United States Patent Application Publication US 2019/0348154 A1 - sequence listing, part 20

SEQ ID NO: 75444 - DNA, 2076 bp, Citrobacter koseri
atgctaccaaaagccacccgtattccgcacaccatgacgctgcatggcgacacccgtgtcgataactattattggctgcgagacgactcccgctcgcagcctgatgtccttgactatctgcatcaggaaaacgcctatggacatcaggtcatggcgtcacagcaggcgttacaggatcgcgtgctgaaagagattatcgatcgcattccgcccagagatgtttccgcaccttacgttaaaaatggttatcgctaccggcagatttatgagccagggtgtgaatatgctatttaccaacgccagttggcgcgaagtgaagagtcggatgcgtgggatttattgctggatgcgaatcagcgagcggcccacagcgagttttataccctcggtggaatggccattacgccggacaacaccatcatggcgctggcggaagattatctttcccgtcgtcagtatgggctgcgttttcgtaatcttgaaagcggtaactggtacccggaactgctggataacgtggcgccagagtttgtctgggcgaatgattcgctgacgctttactacgtgcgtaaacacggcaccacgttgctgccttaccaggtatggcgtcataccgtgggcacgccggccacgcgggatcaactggtctatgaagaaaaggacgacgctttttacgtcagtttgcacaaaaccacctctcagcattatgtggtgatccatcttgccagtgcgaccaccactgaagtgctgttgctggatgctgaactggccgatgcggaacccttctcgtttttaccgcggcgtaaagatcatgaatacagtctcgatcattaccagcataagttttatctgcgttccaatcgccacggaaaaaactttggtctgtatcgcagccgggtacgtgatgaaaacgcctgggaagagctgattgcgccgcgcgagagcatcatgctggaagggtttaccctttttaccgactggctggtggtggaagaacgccagcgtggtttgaccagcctacggcagattaaccgtaaaacgcgtgaagtaacggggattgcgttcgacgatccggcctacgtcacctggcttgcctataaccctgaaccggaaacgtcccgcttgcgttatggttattcatcgatgacgacgccggacaccttgtttgagctggacatggataccggcgagcggcgcgtactcaaacaaacggatgtgccgggatttgacgctgcgaattatcagagcgagcacctgtggattgtcgcccgggatggcgtagaggttccggtttcgctggtttaccatcgaaaacacttccgtaaggggcaaaatccactgcttgtctacggctacggttcctatggcgccagcatggatgccgatttcagcagcagtcggttaagtttgctggatcgcggatttgtttacgctatcgtgcatgttcgcggcggcggtgagttaggtcatcagtggtatgaagacggtaagtttctgaaaaagaaaaatacgtttaatgactatcttgatgcctgcgacgcgttgctgaaactgggctacggctcgccttcattttgctatggcatgggcggcagcgcgggcggcatgttgatgagcgtcgcgattaacgaacgtcctgaactttttcatggcgtcatcgcgcaggtgccgtttgttgacgtcctgacgacaatgcttgatgaatctatccctttaaccacgggagagttcgaagagtggggaaatccgcaggatgcggaatactacgcgtatatgaaaagctacagtccgtacgacaacgtcaccgcgcaggactatccgcatcttctggttaccaccgggttacatgattcgcaggtgcaatactgggaacccgccaaatgggtcgctaaactgcgcgaactgaaaacggatgaccacctgctgttgctgtgtacggatatggattccgggcatggcgggaagtccgggcgttttaaagcgtatgagggagtggcgctggaattcgcttttctgattggcctcgctcagggcacgttgccagggcaggcaggcgctcaggcgtcgctcagatag

SEQ ID NO: 75445 - DNA, 663 bp, Citrobacter koseri
atgttgcgagttatagatacggaaacctgcggactacagggcgggattgttgagattgcctctgtcgatgtggtggcggggagaattgtcaatccaatgagccatctggttcgtcctgaccgccccatcagcccgcaggcgatggcgattcaccgtatcagtgaatcgatggttgccgataaaccctggatcgaagatatcattccgctctatcacggaagcgaatggtatgtcgcgcataacgccagtttcgaccggcgtgtgctgccagagatgccgggagagtggatttgtaccatgaagctgtcccgccggttatggccggggatcaaatacagcaacatggcgctctacaaatcccgtaagctaagtgtgcaaacaccgcccggccttcatcatcaccgcgcattgtatgactgctatatcacggcggcattgctgatcgatattatgaacacgtcaggctggacggcggaacaaatggtcgacattaccggacgcccggccctgttaacgacatttacgtttggcaaatatcgcggcaaagccgtttctgaagtcgccgagcgcgatccgggctatctacgctggttatttaataaccttgacaacatgagcccggagctgcgtttaacgcttaaacactatctgagcgacgcctga

SEQ ID NO: 75446 - DNA, 657 bp, Citrobacter koseri
atgtcacactggaaaatcgcggcggcgcagtatgaaccacctcgcgccacgctggcagaacatgtcgcgcaccatctgcaatttgttgagattgctgccagccagcaatgcgaactcctggtattcccttccctgtcgttaaccggatgcaacgatacggcgcaggcgctccctgtcccgcccgatgagtccttattacagccgcttgcttatgcggcatccgcgtaccgcatgacaattattgccgggctgccggttgagcataacggccagttagtcagaggcattgccattttcgccccctgggtgacatcgccgctgatctttcatcaaagccacggcgcctgcgtggcccgccaccggaaaacgataagcgtgatggatgagcagccggaaggcattgatatcgatcccgccttttcgttattcaccaccagccagtgcgtcagcgaacatgatttatttacctccacctcccggctgcaacgtttttcgcatcgcttcgccattgccgtgttgatggcaaacgccggaggcagcagcgcgctatgggatgaaagcggccagctcattgtccgcgcggacagcggttctctgttgttaacaggtcagcatacgacacggggttggcaaggcgatatcattccattacgctag

SEQ ID NO: 75447 - DNA, 231 bp, Citrobacter koseri
atgcaaacgaacctggctcaacttgaacaagctgacatggataagatcaacgttgacctggccgcagccggtgtggcgtttaaagagcgttacaatatgcccgtcgtggcagaagtcgttgagcgtgaacagccagaacacctgcgcgaatggtttcgtgaacgtctgattgcccaccgtctggcgtcggtttccctgtcacgcttaccttacgaaccgaaagttaaataa

SEQ ID NO: 75448 - DNA, 375 bp, Citrobacter koseri
atggcttctactgcaccttctttgcgctatgctctccttttcctcgcctcaacgctggcggcgcctgcggcctgggcacatgcgcatctgacgcatcaatacccggcggctgacgctgaggtgaccgccgcgccgcaggcattgacgctgaatttctccgaaggcatcgagcctggcttcagcggggcgacgctgaccgggccaaagcaggaaagcatcaaaacgcggcctgcgaagcgcaatgagcaggatgcgaaacagctcattattcctctggatcagacgcttaatcccggaacctatacggttaactggcatgtggtgtcggttgacggtcataagacaaaagggcaatacacctttagcgtgaagtaa

SEQ ID NO: 75449 - DNA, 873 bp, Citrobacter koseri
atgctgacgtttacctgggtagcgcttcgctttatccattttagcgccatgatgctggtgtttggctgcgcgttatatggcgcgtggctggcgccggtttctgttcgtcgcctgatgacgcgccgctttctgcgcctgcaacagcacgctgccgtatggagctttgtcagcgcgacgctgatgctggcgatccagggtggactaatgggggcgggctggcaggacgtaatctcggtttcgatatggggcgcggttttacagactcaatttggcggcgtatggctgtggcagattattctcgcgcttgtcacgttggtcatgacgctggttataccgagaaatttaccgcgtctgctgctcatcctgatgattgcccagtttatgttgctggcaggcgttggccacgccacgctgaatgatggcgtggtgggcgcggtacagcagattaaccatgcgactcatctggtgtgcgctgcggcctggtttggcggcctgctgccggttatctactgtatgtgcatggcgcaaggtcgctggcgacaacaggccatcgaaacaatgatgcgtttctcccgctatggtcatctgtttgtcgcgggcgtattgtgcaccggcatcgcaaatgtgctttttattacggggttttccgccccctggcataccgcgtacgggcagtttcttttgttaaaatgtgtccttgtcctgctaatggtggcaattgcgctaacgaaccggtatgttctcgtaccacgtatgcggcaggaaaatcgccgcgcgaatctctggtttatctggatgactcagattgaatggggaattggagccgttgtgctggcgattgtcagcctgttcgcaaccctggaacccttctga

SEQ ID NO: 75450 - DNA, 339 bp, Citrobacter koseri
atgaaaaaaatgattctctctctgctattgttggcaagttcaggcgctgcgctggcggcgcctcaggttatcaccgtgagccgctttgaagtgggcaaagacaagtgggcgtttaaccgcgaagaggtgatgctgacctgccgaccgggccatgccctgtatgtcatcaacccgagcacgctggtgcaatacccgctgaacgatgtcgcagagcagcaagttgcaagcggcaaaaccaacgcgcaggatatcaccgtcattcagattgacgatccggcaaaaccgggtgaaaaaatgagccttgcaccgtttattgaacgcgcggaaaagctctgctaa

SEQ ID NO: 75451 - DNA, 1080 bp, Citrobacter koseri
atgagtcaaaaaagatacgacgctaatctacccaagaacctcacataccgtaaaaatgacagagcgttttactggcgtaatccgctgactaaaaaagaaattgcgttggggcaaatttcccgcagggatgcggtcgcacaggcgatcgaagccaataacttcatcgcgcagaattacacccctgtcgcgctgattgaaaaacttaaaggtctggactcgcttactgtcacaaagtggatcgagcgctacgaggtactgttacagcgtcgtaatctgtctgcgaacacatacaagatccgtggcaaccagttagcgactatacgggacaaaatgggcggaatgctcctggcggaagtgaccacaaagcatattgctacgtttctggaaacgtggattgaaggagggaaaaatactatggcgggagcaatgcgatctgtcttatcagatatgttcagggaggcggttgttgaggggcatataacacagaatccggttgagccaacccgcgcgcccaaaatcgaggttgcgcgtgatcgtctgagactggacgtgtatagaaaaattcgtgaagcagcagagaaactgccgacatggtttcctttggctatggatctcgcgttgatcactggtcagcgtcgcgaagatgtttcctgcatgcgattcagtaatattattgatgaccgtctatatgtaaaacagatcaaaacagggatgaaaatagcgttaccgttgtcgctcagcctcccatccatcggcctgcgcctcggaacggtggtcgatcgctgccggcttgtgagcagaactgactatctgatcagcgccggggtcaggaagaacagcccggacgggagtattcaccctgacagcctgacgaaaaagtttgtcgctgcgagaaaattaactgacattgcgttcagcgaaaacccgccgccgtttcatgaaatccgcagcttgtccgggcgactgtacaaagatgcctatggcgaagatttcgcccagaagctgctggggcatacatcagagaacacaacaaaaatgtatctcgatgagcgtgatgaaaaggcgtatatgatgctctga

SEQ ID NO: 75452 - DNA, 273 bp, Citrobacter koseri
atgtcatacgtaactctgaccacctgggcagcgaagatttatcccgacaatcccccggcgcgagtgaccctcagacgctgggcgaggaacggaaacatctacccgccccccgagcttcatgggcgtgaataccgcgttaacccggaagcgttttatatcaagcccaacaaagcgggaaaagtgctgcaacagcaccatcccaacgggcgaactggtaaaaaaagtgcgttgctggagcagttaataaatgagtcaaaaaagatacgacgctaa

SEQ ID NO: 75453 - DNA, 504 bp, Citrobacter koseri
atgaacaagaatactaccgctatttctatcgctgcgaacatgacaaagcttctcgctttagttgagaacggtgaatttacctccgaagatatcgccgacactcttgaagatgtggaaatgcaactcggtgacaagttcgacggaattatgtctctggtgcggaatattgaaggacaggcaaacactttagcggaagaagttaaacgcctcagtgaccgtaaaaaatcatttgaaaatcaggctaaaaacctcaaggcgtatattctccagtgtctgcaagcggcgcaacttaagaacttcaagaccgagcgcaacaccctgacagtgcgaaaaggctcagtatcagtagtgatcgataacgttgaccaattgccggatgagttagtggatattgctactgttgttgcccctgataagaaaaaaatcaaagaggctattgaatccggcaaagaaattaaaggcgcacatttagaaattggtgcggagtcattacaggttcggtaa

SEQ ID NO: 75454 - DNA, 219 bp, Citrobacter koseri
atgagacaattaatggctgattacctgaaatacgtgcgaagggttgaacagaatggaggaaagctaatcaccttcaaatgccctgattgcagacgtgtcataaaaaccccgcccgcctctgctggcgaggtctgggacacaatttcaacctgtccgcattgtgagcggtcatttgtaaagataacgaatggaaacaatgtagaggcaacaattatatga

SEQ ID NO: 75455 - DNA, 2364 bp, Citrobacter koseri
atgtctgaacagaaaattttcattgctggttatattcctgatgataaatcagttgaagagtttggcgcacgccgtgttgcaacttcattcaatgcaaaagatatgaaacacgcgagggcaaaagcttcattcctgtttatggaagaatatccaggatcacaggatgcagcatataaaatcctcatttgcgaagatactcccggtgttccatgccgccctgttcgtggcgtgtgggatgaagaatttctttataaaaacgactggccggaagatatcggccatcccgtattacgcaagaatgaatctgaaccagttgatttcgattcgttatctaaagtaatgcaaaacgcggtgctcgtaaaattcgacacaaccgaagtcacgaaagatatgctccttgccgcactgaaattaacgcaggaggaagaaggcacattcgaaggtcatattgttgaagcaatcaacaaaacacctgagattaacgctatgtatcctgagcgtaagctgttcgctatcggatgggttaagcacaaatgctcacaaaataaaaaatggcctgaaattaaagccgaactgttcgcatggaaaaagcgccaggattccgagaggaaggaaaccggcccgtcaaaatccattgttgaaattgcaagagaaaaggcagcaaaccagaccattcagcagatagaagaaaaagcgaaagttggtagcggtgatcctgaccgtttcgacactgttgttgcgctgctcgttatggggcttgatcccgaaaccgccaatgcgacacaggtaaaacacgcaaaacacataaaagaatcgcgtgatcctgcgtggcgcgcatggcgtacaacgcttatcggtattccggggatttacctgtttcctgaaagcgagctatatgccctcaccctggacggaatgaaagatctgtccctgatcaaagatgatgatgcccgccgtgcgtatgtacgggaacattttgcgggtcacgaactgttacctgattacctgccggacggtgaagaaaatgaaagcgaagcacaggaaccacagaatgcggatgaattggctgatgatccgtctgaatcagatccagtggagcaggaacaatctactgagcagcctcaggaaggcaaggaagtagtaaccgaacgtcaggggccgttttatttcctgttcccggacggtgaaaaggttggtcgtgcaaacaaactgcccggcctgaacaaagcgctttccgatggctgcaccgaaatcagccaggaagagtatcaggcacgtaagaacggcacgtacaaagcacctcaggagaacgtagagccgcgtcacgaacaacctgaggttaaaagccacggcaatgggatctactccgttgattccctgatggctgagcagccgaaaaatgaagatcatcaggatacatccccctcaaatgagggggaaaaaacggaaaatgacaccgaagaaactctaccgcgtcaaccttctgctgatttccagagtgttggtgacagcctggagaaagagctgtcggagaaaccggctacagcgcaggacaacctcaatatctggcgcaacgttatgcgtacagatccgcgcttcacgaaggaactgagcggcacagggtttgaaggaaccagtattaacgctgaatacatggttatgcgcgcaacagagttatttggcccgatcggaagccgctggggttttgaaattctggaagatcgcatgctccccggcgccccactcagtgaagcgatctacgaagataagaaatttatttgcaaccgcatgctgcgcgatgccgacggaaccctgctgtttgagcaaaatcacagcattaaaatccgtctctggtatcagaccgaaaccgatgagggaagtgtttattcctatggtgccacgccgtacctgtacagaaccaaacacggactcaagtgcgacggcgaagcgcagaaaaaatcactgaccgatgcgatcaaaaaaggtctttcattgctcggcttcagcgccgacgtgtggctcggtctctatgaccagccagaataccaggaagagaaccgcacagagttcgcaattaaaaacgcgtcggataaagccggtgacaccattcgtttacgtaaagagcttgatgaacgaatcgagagaaacctcgaaatcattcgctcagcagttacaacgaatgaagcaaaaggcgtttacagcacaatcactcgtgaagtggatgtgtaccgcaaagacgcccaggcaaaagcagataacgaatttgatgaatatctgaaaaaacgtctgctggttctgcaccgtgccgtagagcagaaagtcagcgagctggagaacgttaccaagcaggagcaatcggcatga

SEQ ID NO: 75456 - DNA, 300 bp, Citrobacter koseri
atgttaaaagttaaagtggtatctgtaaaaattaatctggaactactcactaatgagtttgcatcatttgattgcggtgaaaacttatcaggggtaattcactcctcttctgagaacggcccatacaccgtttttcttgatggcggatatctgctgggtaagtttcataatgaaaatgaagcggtgaaaaatatttcgtttcttcgtatgcaaatcgaagatgcccgcgaggtttctggcatggattaccccgcttataaacgtactttctcagaaggtgctaactcacgcgtgcattga

SEQ ID NO: 75457 - DNA, 207 bp, Citrobacter koseri
atgaaacatcaacactacggcacagaggaagtaattcgcggatgtgttcgtgctgggatgatggttttatataaaaaccaaatatggaaagcatcagcgaatcacggcggaaagctttatttaaataacatgagggaaagcaccctaactaaagatatctggataaccattcttctggatggtcgcggagacgcattaattaactaa

SEQ ID NO: 75458 - DNA, 267 bp, Citrobacter koseri
atgagtaattcaattgagttaacgcgcatctctgaactgttaaaagaacatgaagagcgattaactgcgcaccaatatgttattcaaagtctgcttgccatgttgccgcaaagtaaattagatgaagcaaaaaagcttttgcgcaactctctggaaataaacaaatatgatcgccagaaaataaatgatgaagcatggcttgagcgtcataaaggcgttctccgagaattgcctcacctcatccctaaattgtttgaagatgaataa

SEQ ID NO: 75459 - DNA, 213 bp, Citrobacter koseri
atgatcgaagaactgaagcacacaattgcacttctgttggaagatgcgaaacgcctacaggaaatcgaaccgaatgcaggcactgaggcccgcattgaagcagcgcggcaagcgctgaaatcaggagaatcatttcaaattggagactcccgcccgataagtgaaccgtttaaaaagctttattcatcttcaaacaatttagggatgaggtga

SEQ ID NO: 75460 - DNA, 408 bp, Citrobacter koseri
atgacaatgacaccgcaaaccatcggagagcgcataagagcgcgccggaaagagctaaagctcacacaaaaatctttagcaaaagcccttaaactttctgacgtttcgatctcccagtgggagcgggatgacagcgaacctacgggcaagaacctattcgccttaacaaaagtgctaaagtgctcgccaacctggattctcttcggcgatgaggatcaaactccagaggaaccgactgaattacccattgttctggatgaaagaaaacaagagctgatcgatttgttcgatgccctacctgagtcagaacaagaagcgcagttagagcaactgagagctagggtagaaaacttcaataatttgtttaacgaactactcgaagcccgcaaacgaaccaaaaaaaaataa

SEQ ID NO: 75461 - DNA, 489 bp, Citrobacter koseri
atgaaaatcagtcctccgattgatgctgttgccgcagaactggaagcatgggcgcttgaggctggctggaaggccgttggcctggccgttgctgagcaatatcacttgacgggtggcggcgacattctgccagtaaccagcaccgcgaagggactgaataacgcaacgcagcgcgttaaacggatcttccgtggattcgatggcccgagatatgcgccgcaggccgaaggtctgaaagccgcagctctggcagcactaccgacagagcgccgtgcgcgactggaatatccgggcgatcccgtctttctggcggcggtggccgctaaagaggggatagaagcgattaacgctgtaaacctcggcgcggcgccagcattagtaattcaggcaattaacgaagcgatcgccgcgttcctggctattaaagctgctgttgagctgctgctgtgcggcgaaactcacgaagcttatagggggcgatttgcgtaa

SEQ ID NO: 75462 - DNA, 186 bp, Citrobacter koseri
atgggaacatttgcattcaccgtgcctcaacgtaatgaaatcagcatcgaagttaacgatgagggattcgtcgaaatttcccaaagcgacggctcaatggacgatgacaacctcaataccattcgcgtacacaaaaccgacttggaggccttgataactggtctgcaagaagcagcaaagtcgtga

SEQ ID NO: 75463 - DNA, 981 bp, Citrobacter koseri
atggcaaacgctatgcctaagacaaaggcaaacaatgagccttatcgcaaggtaaagatcactatgtgggatgaccctaaatttcggtctctatccccgttgccaccgagtgggcagagtttgtttatttatctgctaaccagcccatttaccgggattataccaggcctttttaaagccgggcgtgcggcaatggctgaggagcttgggtgggaagtagaagccttcgacttagccttaggcgaagccttagcgttaggtatcgttaaagccgaccttcaagccagagttttttggcttcctaacgcggcaaaacataatccgccagtctcgataaatgtcatcaaatcatgggcgaaagcattcaattacctccctgaatgtcctcttaaatgggaggcatgggaatcgcttagagccgcatgttacggggtttctaaggctatgggtaaggcattcgatgaggcattacctttgcctaaggataagcctacgcctttgtcatcaggtatccagaaagcagtaaacagtaaacagatcttaaaagatcaaaacatattgtctcatggcgaaaaaaacgtcacgagaccagatgaacaaaataattcgactgcggctggtggtgagaaaaataaacccaagcgtcagtttgagtatcccgatgacttcgaagatgcctggaaagaatatccacgtcggcccggtagcccagataagcgaggggcattcaatgcctggaaagcccgtattcgtgaaggtgccagggccgaggaaattcttgccggagttaaacgttacgcggtgtatatccaggcaactggaaagtctggaacagaatttatcaagcaggccaaaacattttttggtccatcgtgccactacgaggacgaatggaatattccggctgactacaagggcagaagagacgtaaacgcaatttctcaacccgataacacgattcctgatggtttcagggggtaa

SEQ ID NO: 75464 - DNA, 750 bp, Citrobacter koseri
atgaaagacatttcagcagttggcggcgcgctggagcgactgaaacggattattccggcaggcgttcagccaaagtttacgaccgccgaagaatggcggaactggcagcaggaggaagggcgtaaacgctctgctgaggtggacaaactgaaccagaaagcgcgggcagaaaagatcctggggcggtctggcatacagaatctgcaccggaactgcacattcaaaaattacgaagtaactggcgattcgcagcgccgcgcactgagccttgcaaaaagttacgccatgaatttcggttctggatttaccagttttgtattcagtggaaatccgggcaccgggaaaaatcatctggcggcagctatcgggaattacttactccaacaggatcgctccgttctgattgttacggttgccgatctgatgctgcgcgttcgggcgtgttacgacggggggcaatcggaagcagctctgcttgatgagttgggccatgtcgatttgttggttctggatgaagtcgggatccagaaggactcccagcacgaaaaaataatcctgaatcagattatcgatcgccgcctggcatccatgaagccggtcggggtgctgacaaatctgaactatgacgaactagccagaacattaggggagcgtgttgttgaccgcctgaaaatggattctggcatgtgggtaaatttcgactggggcagctatcgcaagaacgttagccacctccggttagttaaataa

SEQ ID NO: 75465 - DNA, 225 bp, Citrobacter koseri
gtgaaaattatcaagttatacgagcgggcaactgttgaacgccaggggaaatatggctgggaaccggaaactatttacgagccgatttatatcatcgctgagcatatagaatccatgaactttgccgggaataccattctgaaaatggtttcaggcaagcagatcattgtcagggaaaccccggaagaaattattttattgcttgagaccggggtagcagcatga

SEQ ID NO: 75466 - DNA, 204 bp, Citrobacter koseri
atgacttatccgaaaattggaggtgttttgaaaaagaaaaaaaataccagcgcaaagtgtaaatgtggtgcggttgcaaaatataaaaccacggtacaagtgaacatatttcgcggtgatgatgaggttttttgggcttgcgatgagcataaaaacgactgtttatttttgcttaccgatatcagcagggagatagcccaatga

SEQ ID NO: 75467 - DNA, 774 bp, Citrobacter koseri
atgagcactggtatccaatcactgattgatgcaggcgcgttgttcgtctctaatcattctggcggaaaagacagccaggcgatgttgatcaagctgcttgatgtcatccctacgcgtcagcttgtcgttgtacatgcatcgctgggtgctattgagtggcctggcgcgctggaacttgctcgcggccaggcaaagtctgccggagtacagttcatcgttgcgcgggccagcaaaaccttgttcgagatggtagagcgtcgcttcgaaaaccgcccagaagttccaagctggccgtctgccagtacccgacaatgcaccagtgacctgaagcgcggccccatccagcgcgaggttcgcaggtatgcaaaggccaatggctttaaaaccatcgtcaactgcctcggcctgcgcgcccaggaatcacccgggcgagctaagcgcaaggcattgagcaagatggggataagcaattcggtgaatacctggtttgaatggttgccgatacatgaactcttaaccggagaggtattcgccacgattcgcaatgcggggcagcagccacactatgcctatgcactggggaatgaacggctgagctgtgttttttgcattatggctagtcgtaacgatctgcggaacggcgcccggaaccatcctaaactgctggagaaatacgcggctctggagaaacggactggctacacaatgcatatgaatcgcatacctattcgcgagttggccgctgatgatgaaaaacaggagagtgcagcatga

SEQ ID NO: 75468 - DNA, 432 bp, Citrobacter koseri
atgagcaacatcgacaaacaggcgctgcgtgatatcgcagagaaaacaaaaatcgctggcgaagctccggttatgccgttcgagcaacgaatcaatgcgctgaatgatttcatgaagcactttaccccggcaaccgtgctggcgctgctggatgagctggaagcagataaagagcaaatcaaaacactcgaaagccgaaaccgtcgtctggagggaatcatcaatgcggctgagaggcgcattgctgagcagtcatctcaaaaacggttaattggatggcgagcatcggattataccgatgagacatcagaccctgagttagctaaaaactgggctgcggctattggtgttctgcctatttttgaaggcgacgtgaataccaaacttagcgccactggcatcggtatcaaaggagaaagcaataatggctaa

SEQ ID NO: 75469 - DNA, 231 bp, Citrobacter koseri
atggctaaaacagaattaaatcgccttaatcgcgcgttccgtaaagaaacacgtcactggatgggacaccctgacggattcactaataaaaaacagtggaaagactggtgccgtgagaatgctgtcattcttcattcggcgcgtaatgttgagcaattgccaaatgatgaagttatcaatgatcagttagatgcagatagcgcggttattgaagaaatgagtaactggtaa

SEQ ID NO: 75470 - DNA, 297 bp, Citrobacter koseri
atggcaaaagtaacttttttagatgaactggcaaaaatctacactgaaaaaaaacgctctcagggtgagcgggcttattcagtgtacaaaaataaatccgattcattacactggtcgcaagttgttgaagcccgaaatcgcaaagtaatgcgtaagatacgccgtagcgcaggtaaatctaatcgtctcggtggtcgtgctacggcttacggtcgcgttgctgcaatgagcgaagtagatatgtgggcgaaaatttgccgtaccaatcgacgtcttgggggattaaatgaccaataa

SEQ ID NO: 75471 - DNA, 261 bp, Citrobacter koseri
atgacggaatactacgaagctggttccgtggagttctgccagtcttttcgcgtcaacgagccaatcatcagctaccggcgctgtctgcgcgtggagatagagcggaatggttccgggtcgttgctctgtagggcttgcaaaataaaatccatcactaccttttcgatagtatccgacaggctccgcattccgcacctcaagcaattcaccaatagcttttacagcatcagcgatgatgtaatccatattcccgccatttga

SEQ ID NO: 75472 - DNA, 153 bp, Citrobacter koseri
atgcgcaggagctatgtgtattgtctggtggtggtttgtatcaccgtcctggtgtttgtctggatggttcgcggttcgctttgcgaactgcacatcaaacaggggaacacagagctttctgcgtatttagcctacgaagttgaacaacgttaa

SEQ ID NO: 75473 - DNA, 1125 bp, Citrobacter koseri
atggccgttgataagaaaaaaactgctctttccgataagtcaaaaccagcatcaaaggaagaaaaagagaaagcgctgacatctgctattgcgcagattgaaaaaacatttggtaaaggggcgattatgcgtctgggcgctgagagcgatctgaacgtagagactatctcctctggttccctgactctggatattgcgctgggcggcggacttccgacggggcgtattgtagaaatttatggcccggagtcgtccggtaaaacaacagtggcattatcagccatcgccagcgcccaaaaacagggttttcagtgtgcttttattgatgctgaacatgcgctggatcctgtatatgccagaaaacttggcgttgatattgatagcctgctggtttcacagcctgatactggtgaacaggcgctggaaattaccgatgcgctggtgcgttccggtgcggtgaatatcattgttgtggactctgttgcggcgctcacgcctaaggctgagattgagggtgaaattggtgactctcatatggggttgcacgctcgtatgatgagccaggcaatgcgcaagctgaaagggaacatcaacagcagtaaagccattgttatttttattaatcagattcgaatgaaaattggtgtgatgttcggcaacccggagacgacaaccggcggtaatgcactgaaattctacgcatctgtgcgaatggatgtgcggagaattggtcaggtaaaaaataaagacacagatgttatcggtagcgaaacccgagtgaaggtggtcaaaaataaggtggcgccgccgttcagacaggctgaattccgcatcatgtatggcgaaggtatttcccggattgatgagatattaaccctggctgagggttgcaaaatcattacgaaggctggcgcatggttcagctacggtggtgaacgtcttggacaagggcgcgacaatacgatcgagtggttgaaacaaaatcctgtgctgttggccgacattgagcagcaggtcagagagaattatctgcgtcctgacgccacacccccccagattacaggcaagcgcgagtcatcagttgatgatgaaccgcagcctgaatacgaagaacacgacaattaa

SEQ ID NO: 75474 - DNA, 234 bp, Citrobacter koseri
atgaaaatcgaagtgacgatcgaccgcactaagcaattgcctgatggcgcagtaccggctctggaacaggagctactccgtcggctggagcggaactttgatgactgcaatctgataatccggcgcgctggttccgatggcctcagtatcatcggtggcgccgacgatgataaaaaacgtattgaagagatcctgcaagagacctgggaaagcgccgacgactggttttattga

SEQ ID NO: 75475 - DNA, 594 bp, Citrobacter koseri
atggcacagattcaactgataaaaacctcatcaacgacactgaccccggctacgcccgaggccagcgaatttttgcaacgtgtgaaaactggcgcgtggcttaactgtgatgttaagcaggccagaaattatcttttccataagcgctttttcgcgctcctcaatcttgggttcgaatactggacgccgacgggcgggacgatcacccctgccgaaaagcagtacctcactggttatgttcgttacctgatctccatcgttgctaacgacgatattctcattgaaaccgaaatggcttatgcagagctcacagcgcagcggcgcgcgaacggtcacgccgtggttaaatcgtttgaggctttcagaaagtgggcgacgatagaagccggtttctatgacgagttcgttttaccggacaatacccgccgccgggaagctcgttctatcagctttgcgaatatgagcgaggccgaattccacgaagtgtacaaagccgttttcaatgtcctctggaacgtaattcttttccgcaaatttgcatctcaaaaagaagccgaaaacgtagctatgcagctactggagtttgctgcatga

SEQ ID NO: 75476 - DNA, 1455 bp, Citrobacter koseri
atgagggctatcacgtatggatctatttgcagcggaattgaggccgcaagtgtggcatgggagccgcttggctggaaacctgtatggtttgctgagatcgagccttttccttgcgctgttcttaattctcgttggcctcaggttcccaacctgggagatatgacagccattgctgaactggtggacattggtgtcattgcgccggaaataattgtgggcggtacgccatgtcaggcgtttagtgtggccggccttcgtaatggcctcgccgacgcgcgcggtcagttaactctttcatatgtggagctggcagatgccattgatgacaaacgccgcgagcgcggtgaagaagaagcaatctttgtctgggaaaatgtaccaggagtccttagtagcaaagacaacgccttcggctgctttattggcgcacttgccggagaagaatgcgaattgcagccatcagggggaaaatggacgaacgctggttgtgtgtatggaccctcgcgcgttgtcgcctggcgaatccttgatgctcaatttttcagagtggcccaacgacgccgccgtgtgtttgttgtcgcaagtgctcgagaaggatttgatcccgcaaaaatactttttgagctcgacagcatgcgccggaattctccgccgagcagaacaccgcaagcgccagcttccgccaatgctggaaaaagtcctgacctcggtagccactgggacaaccctgacaaccctgacaacccacatccaaccctgaaccagtccagcaatatcggtggtattggtcagagtaatcaggaaattttttctcagcgtggttcaggtcttgtaagcgaaactcaatacggtaaagagctggccggaacattaactgcacgacatgattcatcaccgtgcgcagatcgtggaatgaatgttgttggtacgtatcggatgacagcattcggtgaatatgcagatgatgaaacagcatcaactgttaaagctcgtgattacaaagatgcaactgaccttgctgttattgccttcaactcgaaagacagtggtcaggacgccaccagcgatctatcgccaaccctacgcgcctgcaacagcacaaatagcaatcaaaatgcaggaggtccgccagcggtcgcctattgtttcaaaggtggtcagggggctaaagcgggaggtatcggctatgcaaaagagctatcaccaacgctcaccagcgccagcagcggttccaatttatcgcctacagtgatgcagaacacgttagttcgccgcctcacgccagtggaatgtgaacgtctacagggcttccccgacaatcacactctgattggctggcgtggtaagaatgcggctgaatgtcctgatgggcctcgctacaaagctattggaaacagcatggctgttcctgttatgcgctggataggacagagaatagcggaggccttgaagtga

SEQ ID NO: 75477 - DNA, 297 bp, Citrobacter koseri
gtgaagaaagtagatctccgcaaacaggctcgtgggcgtgaatgtactgtgcgtatacctggaatctgcaatttcaacccggaaaccagcgtactggcacattaccggcttgccggaacctgcggcacggcctgtaaacccgacgatatgcagggggcgatcgcctgtagcgcatgtcatgacctgatcgatggtcgaacaaaaacaaaagaatttacccgcgatgaacttcggctgatgcatgccgagggtgtgttgcgtactcaacaaatctggagagaagagggctttatatga

SEQ ID NO: 75478 - DNA, 576 bp, Citrobacter koseri
atgatttacccaacaaatacaggtaaggcaggggaaatgatccgcctgaatactctcgaaagtatgatggtccagggccgcttaaaaatgtgggggcggtggtcatatatcggcggcggacgagccgggaatatgttcaatcaattattggtaaataaaaaaataactaagacagctattaatgaagcactgcgcaggatgaagaaagcaggaataagcaaacctgatctggaaatatttctgcgcgaaatgatgaccgggaataaaaagagtcacctggctcactgtactgatgctgaggctttgattatcgatcgcgtcgtggggacggttttagctgatcacccggccctgattgagttactacacgagcgttatgatggaaaagggaaaagtaaaaagaaactggcgcgggaattgaacgataaacaccctgaatggtgcctgagaacctgtgaaagccgtattgatgtttggctacatacggcagaatatatgctttatgtaccattatgtgatgctttcggtacagatagcagcaaatttcgcttgcgggcttgcgcggaaactgcttaa

SEQ ID NO: 75479 - DNA, 336 bp, Citrobacter koseri
atgaaacgatttattctcggtatttttgctgttgttttaccaacactccaggcaaatgcagtgcaattagcccaggctgactgcaattatgcaattgagaaacttaaatcctttaacgctgatgctaatgccaatcccggaaaaagaatcacctttgaagaaaaagcaacatatgcctatgccgaggcatgcgaaagcgctggattagtaacaatctatgggtatttacgagaagccccggaagcatcgccagaagtcacaaaattttgtcagcaaaatgcgagaaccagcggcgaagccgaacgctgcctggcaaccggaaaactggatgattaa

SEQ ID NO: 75480 - DNA, 834 bp, Citrobacter koseri
gtggatacggaattgttaaaaactttcctggaagttagccggacacgccactttggacgagcggcagaagcgctctacctgacccaatcggcggtcagttttcggataagacaactggaaaatcagcttggtgtgaacctgttcacccggcacagaaacaatatccgcttaaccgcagcaggtgaaaagctactaccctatgcagaaacactgatgaatacgtggcaggcggcacgtaaggaagtggcgcatacgtcgcggcataatgagttttctatcggtgccagcgcttctctgtgggagtgcatgctcaatggctggctggcacgcttatatcagtctctggagccgcaagccagtctgcaatttgaagccaggatcgctcaacgccagtcgttagtaaagcaactccatgaacgtcagcttgatctgctcattaccaccgaagcaccaaaaatggatgagtttagcagccaattgctgggacatttcacactcgcattgtattgcagcagcccatcacagatgaaagatgaattaaattatctgcgtcttgagtgggggcctgattttcaacagcatgaagtgggtttgattgcgagcgatgaggttcccgttcttaccaccagttcagctgaactggcgagacagcaactgtctgctcttaatggatgcagttggcttcctgttggctgggccaaagaaaaaggcgggcttcataccgttgccgacagcgctacgctttcacgcccgttatatgcaatatggctacaaaatagcgataaacatacgttgatccgcgatctgttaaaaacaaacgtcctggaagattaa

SEQ ID NO: 75481 - DNA, 339 bp, Citrobacter koseri
atggcggaaagctttacgacgactaatcgatatttcgacaacaaatattatccacgcggattctctcgtcatggtgatttcaccatcaaagaggcacaactgcttgaacgtcatggttatgccttcaatgagctggatctggggaaacgtgagccagtaaccgaagaagagagactgtttgtcgcggtatgccgtggcgaacgtgagccggtgacagaagcagaacgcgtctggtctaaatatatgacgcgtattaagcgtccaaaacgtttccacactctgtctggcggtaaaccgcagatggaaggtgcggaagactacaccgaatctgacgattaa

SEQ ID NO: 75482 - DNA, 1521 bp, Citrobacter koseri
atgtcactgtcgattgttcacacacgcgccgcacttggcgttaatgcgccgccaataaccatcgaggtgcatatcagtaatggcctgccgggtttaacaatggttgggctacctgaaacgacggtaaaggaggcccgggatcgggttcgcagcgcaatcatcaatagtgggtatgaatttccggcgaagaaaatcaccattaatctggccccggcagatttacccaaagagggcggaagatatgatttacctatcgcaattgcgcttctggcagcgtcagagcaacttacaacaaataagcttaatgaatatgaactggtgggcgaactggcccttacaggtgcgttacgtggcgttccaggcgcgatatccagtgcaaccgaggcaattcgggcaggcagacatatcattgttgcaaaagagaatacggcggaagttgggctaatcagcggggagggatgcctgattgcagatcatctgcaaacggtatgcgcatttctggaagggaaacaggatcttgagaaaccagtctctaccgattctgacgcctgtttactgcatgacgatctcagtgatgttatcggtcaggaacaggggaaacgaggcctcgaaatcacggccgcaggagggcacaacctgttgctgataggcccgccaggtacgggaaaaaccatgctggccagccgcattaatgggctactgccatcattaagcgacaaagaagcgctggaaagtgcggcgattctcagcctggtgaacgccgatacggtacaaaggcagtggaaacggcgtcctttccgctcacctcatcacagcgcatcattaacggcaatggtggggggaggttcaatacccgcgccaggagaaatatcgctggcgcacaacggtattttgtttctggatgaactgcctgagtttgagcgacgcacgctggatgcgctgcgtgaacctattgagtctggtcagatacacctttcgcgcactcgggcaaagatcacctatcctgcgcgcttccaactgattgcagcgatgaatcccagcccgaccggtcactatcaggggaaccataatcgctgtagcccggaacagacgttgcgctacctcagccgtttatccggcccctttctcgatcgattcgatctctcgctcgaaattcccctgccaccgcccggtatactcagtcaggcagcggttaaaggcgaggacagcgctacagtgaaagtacgggtgatatccgcacggaaacgccagtacgaacgacaggggaagctaaacgcccatctggacagccagggtatacgaaagtactgctctctacacagtgatgatgcgcactggctggaggagacgctgatacatctgggattgtctatacgagcctggcagcgcttactgaaggttgcccgtaccattgccgatctggaacaaacggagaatattacgcgcctgcatttgcaggaggctgtgggctatcgggcaatagacagactactgattcatttacaaaaactactgatgtaa

SEQ ID NO: 75483 - DNA, 1647 bp, Citrobacter koseri
atgaatggggcacagtgggtggtacatgctttgcgagcacagggcgttgaaaccgtttttggttatcccggtggcgcaattatgccggtttacgatgcgttgtatgacggcggcgtggaacatctgttgtgtcgtcacgagcagggtgcggcgatggcggcaatcggctatgcgcgttcaacgggcaaaacgggcgtctgtatcgccacgtccggccctggcgctaccaatttgatcaccggtctggctgacgcactgttagattccgtgccggttgtggccatcacgggtcaggtttccgctccgttcatcggaacggacgcttttcaggaggttgatgtgctggggctgtcgttggcatgtacgaaacacagcttcctcgtgcagtcgctggaagagctgccgcgcatcatggctgaggctttccgggttgctaactcggggcgtcctggccctgttctggttgatatccccaaagatatccagttagccaatggttcactggagccgtatttcaccaccgttgaaaacgaaacggctttcccgcacgcggacgttgagcaggcgcgtcggatgatggcgcaggcgcaaaaaccgatgctgtacgtgggcggcggcgtaggcatggcgcaggccgtacccgcgctgcgcgcatttatcgctgcgacgcaaatgccggtgacctgcacgttaaaaggcctgggcgcggtggatgccgactatccgtattatctcggtatgttggggatgcatggcactaaagcggcaaactttgcggtgcaggagtgcgatctgctgattgccgtaggggcacgttttgatgaccgggtgacgggcaagctgaatacctttgcgccgaacgccagcgtgatccacatggatatcgatccggcggaaatgaacaaactgcgtcaggcgcatgtcgcgttgcagggcgatctgaacgcattattgcccgcgttacagcaaccgttaaatattgacgcctggcgtcagcacaatgctgaactgcgtactgagcacgcctggcgttacgatcatcccggtgaagccatctatgcgccgctgctgttaaaacagttgtcggaacgtaaacccgcagacagcgtggtgacaacggatgtgggccagcatcagatgtggtctgcgcagcatatgacgtactcgcgcccggagaatttcatcacctctagcggcttaggtacgatgggttttggcctgcctgcggcggttggcgcgcaggttgcgaggccgaatgataccgttatctgtatctccggtgacggctctttcatgatgaatgtacaagagttgggcaccgtaaaacgcaagcagttgccgttgaagattgtcttactcgataaccagcggttaggcatggttcgacaatggcaacaactgtttttccaggaacgatatagcgaaaccacccttaccgataaccccgatttcctcatgttagccagcgccttcggcattcctggccaacacatcacccgtaaagaccaggttgaagcggcgctcgacaccatgctgaacagtgatgggccatacctgcttcatgtctcaatcgacgaacttgagaatgtctggcccctggtgccgcctggcgccagtaactcagaaatgctggagaaattatcatga

SEQ ID NO: 75484 - DNA, 264 bp, Citrobacter koseri
atgatgcaacatcaggtcaatgtggcggctcgcttcaacccggaaacgttagaacgtgttttacgcgtggttcgccaccgtggttttcaggtgtgctccatgaatatggaagccgccaccgatgcgcaaaatataaatatcgaattgaccgttgccagcccccggtcggtcgacttactgtttagtcagttaagtaaactggtagatgttgcacatgttgctatctgccagagcacaactacatcacaacaaatccgcgcctga

SEQ ID NO: 75485 - DNA, 930 bp, Citrobacter koseri
atgacgacgaaaaaagctgattacatctggttcaatggtgagatgattcgttgggaagatgcgaaggttcatgtgatgtcccacgcattgcactacggtacttctgtgtttgaagggatccgttgctacgactctcacaaaggtccagtggtgttccgccatcgtgaacacatgcagcgtttgcatgattcagccaaaatctatcgttttcccgtctcccagagcgttgatgagctaatggaagcctgccgcgacgttatccgtaaaaacaacctgaccagcgcgtatattcgtccgctggtgtttgtgggcgatgtagggatgggcgttaacccgcctccggggtacagcactgacgtcatcatcgcggcgttcccgtggggcgcatacctgggcgcagaagcgctggatcaggggatcgatgcgatggtttcttcctggaaccgcgcagcgccaaacaccattccgacagcggcaaaagcgggcggtaactacctttcttcactgctggtagggagtgaagcgcgtcgtcatggctaccaggaaggtatcgcgttggatgtgaatggttatatttccgaaggcgcaggcgaaaacctgtttgaagtgaaagatggcgtgttgtttaccccgccgtttacctcctccgcgctgccaggtattacccgtgatgcgatcatcaagctggcgaaagagctggatatcgaagtgcgtgagcaggtgctgtctcgcgaatctctgtatctggcggacgaagtgtttatgtccggtactgcggcagagatcacaccggttcgcagcgtggacggtatccaggtaggcgagggccgctgcggtccggtcactaaacgtattcagcaagcattctttggcctcttcaccggtgaaaccgaagataaatggggctggttggatcaggtaaatccataa

SEQ ID NO: 75486 - DNA, 1851 bp, Citrobacter koseri
atgcctaagtatcgttccgccacaaccacacatggtcgcaatatggcgggtgcccgcgcgctgtggcgcgccaccgggatgaccgatgccgattttggcaaaccgatcatcgccgtcgtgaactcattcacccaatttgtgccgggtcacgttcacctgcgcgatctcggtaagctggtcgccgaacagattgaagccgctggcggcgtcgccaaagagttcaacaccattgccgtggatgatggcatcgctatgggtcacgggggcatgctgtattcactgccgtctcgcgaactaatcgccgactcggtggagtacatggtgaacgcccactgtgcggatgcgatggtctgtatctccaactgcgacaaaatcaccccagggatgctgatggcctcgctgcgcctgaacattccggtaatttttgtctccggcggcccgatggaagccgggaaaaccaaactttccgatcagatcatcaagctcgatctggttgatgcgatgattcagggcgcggacccgaaagtttccgacgatcagagcaatcaggtcgaacgctccgcttgcccgacctgtgggtcgtgttctgggatgttcaccgctaactcaatgaactgcctgacggaagcgctgggtctgtcgcagccgggcaacggctcgttgctggcaacccacgccgatcgcaagcagctgttcctcaatgccggtaagcgcattgttgagctgactaaacgttactacgagcaggacgatgcttccgcactgccgcgtaatatcgccagtaaagcggcgtttgaaaacgccatgacgctggatattgctatgggcggttcgaccaacaccgttttacacctgctggcggcggcgcaggaagcggaaatcgacttcaccatgagtgatatcgacaagctttcccgcaaggttccacagttgtgtaaagtcgcgccaagtacgcagaaataccacatggaagacgtccaccgcgcaggcggcgtgctgggtattctgggcgagctggatcgcgccgggctgatgaatcgcgatgtaaaaaacgtgctgggtctgacgctgccgcaaacgctggagcagtacgacgttatggtcagccagaatgaagcggtaaaacagatgttccgtgcaggcccggcgggtatccgcacgacgcaggcgttctcgcaggattgccgctgggattcgctggataccgaccgcgccgaaggctgcattcgctcgctggagcatgcctacagcaaagatggcggtctggctgtgctctacggtaactttgctgaaaacggctgtatcgtaaaaactgcgggcgtggatgacagcatcctgaaatttaccggcccggcgaaagtctatgaaagccaggacgatgcggttgaggcgatcctcggcggtaaggtggttgccggtgatgtggtggttattcgctacgaagggccgaagggggggcctggtatgcaggaaatgctctacccgactaccttcctgaaatcgatggggctgggtaaagcctgtgcgctgatcaccgatggccgtttctccggcggtacgtctggcctctctatcggtcacgtctcaccggaagcggccagcggcggtaatatcgccatcatcgaagatggcgacatgattgctattgatattccaaaccgtggtattcaactgcaactgagcgatgcggaaatcgccgcgcgccgcgaagcgcaggaagcccgaggtgataaagcctggacgccgaaagatcgtcagcgtccggtctcctttgcgctgcgtgcttatgccagcctggcgaccagcgccgataaaggcgcggtacgcgataaatcgaaactgggaggttga

SEQ ID NO: 75487 - DNA, 1545 bp, Citrobacter koseri
atggccgagtcgcaacccctgtcagccgccccggaaggggcggagtatctgcgtgcggtactccgcgcgccggtatatgaagcagcgcaggtgacgccgctgcaaaaaatggaaaaactctcttcgcgcctcgacaacgttattctcgtgaagcgtgaagacaggcagcctgtacacagcttcaagctgcgcggagcctacgcgatgatggcggggctcaccgaagaacaaaaagcccacggcgttatcaccgcatcggcgggtaaccatgctcagggcgtggcgttctcctccgcgcgtttgggtgtgaaagcattgattgtgatgccgctggcgaccgccgatatcaaagtggacgcggtgcgcgggtttggcggggaagtgctgctgcacggcgcgaactttgatgaagcgaaagcgaaagctatcgagctggcgcaacagcagggctttacctgggttccgccgttcgatcatccgatggtgattgccgggcagggcacgctggcgctggaactgctccagcaggatgcgcatctcgaccgcgtattcgtgccggttggcggcggtggactggcggcaggcgtggcggtgctcatcaaacagctgatgccgcaaatcaaagtgatcgccgttgaagcggaagattcggcctgcctgaaagcggcgctggatgccggtcatccggtggatctcccgcgtgtgggactgtttgccgaaggcgtggcggttaaacgtatcggcgatgaaaccttccgtctgtgccaggaatatctcgacgacattatcaccgtcgacagcgatgcgatttgcgcagcgatgaaagatctgttcgaggatgtgcgtgcggtggcggaaccttccggtgcgctggcgctggcggggatgaaaaaatacatcgcccaacacaatattcgcggcgaacgcctggcgcatgtgctttctggcgcgaatgtgaactttcatggcctgcgctatgtgtctgaacgctgcgagctgggtgaacagcgcgaagcgctgctggcggtgacaatcccggaagagaaaggcagcttcctgaagttttgtcagctgctgggcggccgttccgttaccgaatttaactaccgttttgccgacgctcaagatgcctgcatttttgtcggcgtccgtctgagccgtggactggaagagcgcaaagagattctcgcgctgctgcatgaaggcggctacagcgtggtggatctctccgacgacgaaatggcgaaactgcatgtgcgctatatggttggcggacgcccatcgaaaccgttgcaggaacgtctgtacagtttcgaatttccagagtcgcccggcgcgctgctgaagtttctgcacacgctgggaacgcactggaatatttcgctgttccactatcgcagccacggcaccgactatggtcgtgtgctggcggcgttcgaactgggcgaaaacgagcctgatttcgaaacccggctgaacgagctgggctacgagtgccacaacgaaagcgataacccggcgttccggttcttcctggcgggttag

SEQ ID NO: 75488 - DNA, 891 bp, Citrobacter koseri
gtggatttacgcgatctgaaaaccttcctgcatctggcggaaagtcgccattttggccgcagcgcgcgggcaatgcacgtcagcccttccacgctctcccggcagattcaacgcctcgaagaggatctcggtcagccactgttcattcgcgataaccgtaccgttacgctcaccgaagcgggagaagagctgcgaacgttcgcccagcaaacgctgttgcagtatcagcagttacgtcacaccatcgaccaacaaggcccgtcgctgtcgggcgagctgcatatcttctgctcggtcactgccgcttatagccatctgccgcccattcttgaccgtttccgggcggagcatccctctgtggaaatcaaactcaccaccggcgatgccgccgatgcgatggaaaaagtggtgacgggcgaggcggatctggcgattgccggtaaaccggaaaccctgcccggggcggtcgcgttttcaatgctggagaatctggcggtggtgctgatagctcccgcattgccttgcccggtgcgaaatcaggtctcagtggataaacccgactggtcaacggtgccgtttatcatggccgatcaaggcccggtgcgtcgccgtattgagctgtggttccgccgtcagaaaatcagcaatccgtcgatatacgcgacggtcggtggacatgaagcgatggtgtcgatggtcgcgctcggctgcggcgtggcgctgctgccggaagtggtattggaaaatagccctgaacccgtgcgtaaccgcgtgatgatcctggagcgcagcgacgagaaaacgccgtttgagctgggcgtttgcgcacaaaaaaagcggctgcatgagccgcttattgatgcgttctggaacattctgcccaaccactag

SEQ ID NO: 75489 - DNA, 1476 bp, Citrobacter koseri
atggctaactactttaatacactgaatctgcgccagcagttggcgcaactgggtaaatgtcgctttatgggccgcgatgaatttgccgatggcgcgagctaccttcagggtaaaaaagtggtcatcgtcggctgtggcgcccaggggctgaaccagggcctgaacatgcgtgactccggtctggatatcgcctacgccctgcgtaaagaggcgattgccgagaaacgtgcttcctggcgtaaagcgaccgaaaacggcttcaaagtggggacttacgaagagctgatcccgcaggctgatctggtggttaacctgacgccggacaaacagcactccgacgtggtgcgttccgtacagccgctgatgaaagacggcgcggcgctgggttactcccacggtttcaacatcgtggaagtgggcgagcagatccgcaaagatatcaccgtggtgatggtggcgccgaagtgcccgggtactgaagtccgtgaagagtacaaacgtggtttcggtgtaccgacgctgatcgccgttcacccggaaaacgatccgaaaggcgaagggatggcgattgctaaagcatgggcggcggcaactggcggtcatcgtgcgggcgtgctggagtcctccttcgtggcggaagtgaaatctgacctgatgggcgagcagaccatcctgtgcggtatgctgcaagcgggttctctgctgtgcttcgataagctggtggaagaaggtaccgacccggcatacgcggaaaaactgattcagtacggctgggaaactatcaccgaagcgctgaagcagggcggcattacgctgatgatggatcgtctgtccaatccggcaaaactgcgtgcttatgcgctgtctgaacagctgaaaaccatcatggcgccgctgttccagaaacacatggacgacatcatctccggtgaattctcctccggcatgatggcggactgggcgaacgacgataagaaactgctgacctggcgtgaagagaccggtaagaccgcattcgaaaccgcgccgcagtatgaaggtaaaatcggtgagcaggagtacttcgataaaggcgttctgatgatcgcgatggtgaaagcgggcgttgagctggcattcgaaactatggtggattccggcatcatcgaagagtctgcgtactatgagtcactgcacgaactgccgctgatcgccaacaccatcgcccgtaagcgtctgtatgaaatgaacgtggttatctctgataccgctgagtacggcaactacctgttctcttacgcttgcgtaccgttgctgaaagcgttcatgactgaaattcaaccgggcgatctgggtaaagcaattgctgaaggcgcggttgacaacgcacagctgcgtgatgtgaacgaagcgattcgtggccacgctattgagaaagtgggccagaaactgcgtggctatatgactgatatgaaacgcattgcggtagctggttaa

SEQ ID NO: 75490 - DNA, 282 bp, Citrobacter koseri
atggcgaaaaccgcagcagcactgcatatcctggtaaaagaagagaagctggcgctggatcttctggaacaaatcaagaatggcgccgactttggcaaactggcgaaaaagcactctatctgcccgtcaggcaaaagaggcggtgacttaggtgagtttcgtcaaggccagatggttccggcgttcgacaaagtggtcttctcctgcccggtgctggaaccaaccggcccactgcacacccagttcggataccacatcattaaggtgctgtatcgcaactaa

SEQ ID NO: 75491 - DNA, 702 bp, Citrobacter koseri
atgagctcaatgaaaaacgcagaattttcaggcgactggctgacagggctaacccaaatcgtacgcgatccgcagctgtatgagctgctcaaatattgcccgctggacatcatgcagcgctggcgcgttgaggaaatacctcgcggagcgctgatttgccgtcagggcgacatttgtcggcaattctcgctgattgtttccggtgaggtggatgtcttttacgaagctgaagacgggcgccgttatcggcaggcacattaccgcaaaggcgacatgctgggcgagctggagatttttgagtcgcggcattacatctgttcggtgatggcggttggtagcgttcagttgttaagcctgccgcaggcggattttcatcgctggctggcgctggataaccattttaaccagcggatgctgcgctttttcagccagcaatattatcagttgtcgaaaaaggccagcagcgacaatttgtactcgctgtatcaacgggtttgccaggcattatggcagcgatatcaacatgatgaatcgaccacgattttgctggataaacaaaatctcagtcaggaatttgcggcgacgacgcgcagtatcaaccgtattttgcacgatctgaaatcgctgaaaattattgataccgacggtgagcggatcgtcttattagcccctgaaaaactgaaacaggaggcggagatctga

SEQ ID NO: 75492 - DNA, 744 bp, Citrobacter koseri
atgcaaccccatattcgattaagcaatagcatgaccggtgcgcggtatgcgctattgcccggcgatcctgagcgggtggacaggatcgcccactttcttgataaccctgagatactggggcaaaaccgggaatttcgggcggcgcgcggcacatataaagggattgagattctggtgctgtcgacgggaatcggcgggccatcaacggccattgccattgaagagttacggcagattggcgtggacacgctgattcgcatcggtagctgtggggcattgcaggatacgctggcgctgggcgatctgattatcgccaacggtgcggtcgccgatgacggcaccagcaaaacctacgcgccagcctgctatccggcctgcgcagacccgcagcttatcgccacgttgatccagcaggcgaagcagatgaacattcctgcgatttgcgggctggtgcgcagccacgacagcttttataccgatcgtgaagctgaactggatgcggaatggtcagcgcgcggcattctcggggcggatatggaaacggcggcgctgatggtggtcggcgcactacgtgggctgcgtacggcgtcgttgctgaacgtggttgttgcccacaacggctgtctggacagcagtattaatgattatgttcaacaggaaacgctgtgcctgcggggtgaagaacgtcagatttccctggcgctacaggccatttatttcgatagccagcaaggagagcagtga

SEQ ID NO: 75493 - DNA, 729 bp, Citrobacter koseri
atggactttttcagtattaacaacgtgatggtcaacattcctctcggcgaaggcgggtatgcgctgtcgtggattgaggctatcggcacggtctttggtttattgtgcatctggtgcgccagccgggaaaaaatcatcaattacctgtttggtctgattaacgtcaccctgtttgccgcgatctttttccagattcagctatatgccagcctgctgcttcaggtgttcttctttgccgccaatatctatggctggtatgcgtggagccgtcagaatgaggcgcaagaggcggcgctgaaggtgcgctggctctcccgccagcaaacgctggtgctgagcggtgtgtgtattgtcgccatcctgctgatgacgcggtttatcgacccggtgttcgccatgctgacccatattatgctcgggatgctgcaaacggtaggagttcaggtggcgatgccagagctacagccggacgcgttcccgttctgggattccaccatgctggtgctgtcgatcgcggcgatggtgctgatgactcgcaaatatgtggaaaactggctgctgtgggtgcttattgacgtcattagcgtggtgatttacgcggtacagggcgtctatgcgatgtcgctggagtatgtcctgctaacggcgattgcgattatgggatcgtacagctgggtcctgagcgcaaaacgcaacggctatacgccgcttgccgccagcgcctcctga

SEQ ID NO: 75494 - DNA, 2022 bp, Citrobacter koseri
atgcgtttaaaccccggccaacaacacgctgtcgaattcgtcaccggcccctgcctggtactggcgggcgcgggttctggtaagactcgcgttattaccaataaaatcgcccatcttattcgtggttgcggctatcaggcgcgccatattgcggcagtgacctttaccaataaagcggcgcgtgaaatgaaagagcgtgtcgggcaaacgctggggcgtaaagaggcgcgcgggctgatgatctccactttccatacgctggggctggatatcatcaaacgtgaatatgcggcgttggggatgaaatcgaacttttcgctgtttgacgataccgatcaggtcgcattgctgaaagagctaactgacggtctgattgaggatgacaaagttatcttgcaacagctgatctcgacgatctctaactggaaaaacgatctgatgacgcccactcaggcggcggcaagcgcaaaaggggaacgcgaccgtatcttcgctcactgttatggtctgtacgatgcacatctgaaggcctgcaatgtgctcgattttgatgacctgattctattgccgacgctgctgctacagcgtaatgaagaggtgcgtgagcgctggcagaacaggattcgctatctgctggtggatgaataccaggataccaacaccagtcagtatgaactggtgaagctgctggtaggaagccgcgcgcgctttacggtggtgggtgatgatgaccagtcgatctactcctggcgcggcgcgcgtccgcaaaacctggtgttgttgagtaaggatttcccggcgctacaggtgatcaagctggagcagaactatcgttcctccgggcgcattctgaaagcggcgaatatcctgattgccaataaccctcacgtctttgaaaaacgcctcttttctgaactgggctatggcgcggaactcaaggtgctgagcgcgaacaatgaagagcacgaggccgaacgcgttaccggcgagctgattgcccatcactttgtgaataagactgaatacaaagattacgccattctgtatcgcgggaaccaccagtcgcgggtgtttgaaaaattccttatgcagaaccgtattccctacaaaatttctggcggcacgtcgttcttctcccgcccggagattaaagacctgctggcctatctgcgcgtactgaccaacccggatgatgacagcgctttcctgcggattgtgaatacgccaaaacgagaaatcggcccggctacgctgcaaaagctgggcgaatgggcgatgacgcgcaacaagagtctgtttaccgccagttttgatgtggggctgaaccagacgctgaccgggcgcggctatgattcactgacccgcttcacccattggctgggggaaattcagcgtctggcggagcgtgagccgattgccgccgtgcgcgatctcatccacggtattgattacgaatcctggttgtatgagacctcgccgagcccaaaagcggcggaaatgcgcatgaagaacgtcaaccagttgtttagctggatgaccgaaatgcttgaaggtaacgaacttgacgaacccatgacgctcacccaggtggtgacgcgctttacgctgcgcgacatgatggagcgtggtgaaagtgaagaagagttggatcaggtacagctcatgacgctgcatgcctcgaaagggctggagttcccgtacgtgtttatggtggggatggaagaaggattcctgccgcaccagagcagcattgacgaagacaatatcgatgaggagcgccgtctggcctatgtggggatcacccgcgcgcagaaagagctgatcttcacgctgtgcaaagagcgtcgtcagtacggcgaactggtgcgcccggaaccaagccgctttttgctggaactgccgcaggacgatcttatctgggagcaggagcgtaaagtggtaacggccgaggagcggatgcagaaagggcaggccagcatagccaatatccgcgccatgatggcgaaagcaaaagcgaagtag

SEQ ID NO: 75495 - DNA, 1485 bp, Citrobacter koseri
atgctcacttccacttcgctgtatgccgcaattgatctcggttccaatagttttcatatgctggttgtacgcgaggtggctggaagcatccagacgctcacgcgaattaagcgcaaggtgcgtctggctgcgggcctgaacagtgataattcgctttccgctgaagcgatggagcgcggctggcaatgcctgcgccttttcgctgaacgcctacaggatattcctcaaccgcaaatctgcgtcgtcgccacggcaacgctgcgtctcgccgtcaatgcgggcgagtttatcgccaaagcgcaggagatcctcggttgtcctgtccaggtcattagcggcgaagaagaagcgcggctgatttatcagggtgttgcccataccaccggcggcgccgatcagcgtctggtggtcgatattggcggcgccagcaccgaactggtcaccggaaccggcgcacaaaccacctctttgtttagcctgtcaatgggctgcgtcacctggcttgaacgctactttaccgatcgcaatctggcgcaagaaaacttcgatgaagcggaaaaagccgcgcgtgaagtgctacgtccggtcgccgatgagctacgcaagcatggctggaaagtctgcgtaggcgcgtctggcaccgtccaggcgttgcaggaaatcatgatggcgcagggcatggatgagcgcatcacattggcgaaacttcaacagctgaagcaacgcgcaattcattgcggccgtctggaagagctggaaattgaagggttaacgctggaacgcgcgctggtattccccagcggtctggccattctgatcgcgattttcaccgaactggacatccagtgtatgacgcttgcgggcggagcgctgcgcgaagggttggtgtatggcatgctgcatctggcggtggatcaggatattcgcagccgcacgctgcgtaacattcagcgtcggtttatggtcgataccgaacaggcgcatcgcgtagcggatctggcggtaaactttctcgatcaggtggaagataagtggcatcttgagccgatcagtcgcgaactcctgaccagtgcctgtcagctgcatgaaatcggcctgagcgttgattttaaacaggcgccgcagcacgcggcttatctggtgcgtaatctggatttaccgggattcacccccgcgcaaaagaagctattagccaccctgttgttaaatcagaccaacccgatcgacctctcttccctccaccagcagaatgcggtgccgccgcgcgtcgctgaacatctttgtcgcctgttgcgtctggcgatcatttttgccagccgtcgccgtgacgatctggtgccacagattacgttgcaggcgcaggatgagaatctgacgttaaccttgccgcaagggtggctggagcatcacccgctgggtaaagagttgatcgatcaggaaagccagtggcaaagctatgtccactggcctttggacgttcattag

SEQ ID NO: 75496 - DNA, 1266 bp, Citrobacter koseri
atgagcaaaacacatttaacagaacagaagttttccgacttcgccctgcacccaaaggtgatagaagcccttgaaaataaagggtttcataattgtacgcccattcaggcattggccctcccgctaacgctggcgggtcgtgatgtcgcagggcaggcgcaaaccggaaccggaaaaacgatggcgttcctgacgtcttcgtttcattatcttctctctcatcccgcgattgacgatcgcaaggtgaaccagccacgcgccttaattatggcgccgacgcgtgagttggccgtgcagatccacgccgatgcggaaccgctggcgcagaccaccggcctgaaattaggcctggcctacggcggtgacggctacgacaaacagctgaaagtgctggaaagcggcgtcgatattctgatcggcaccacgggtcgtctgatcgactacgcgaaacaaaaccacattaacctcggcgccattcaggtcgtcgtattggatgaagccgatcgcatgtacgatctgggctttattaaagacatccgctggctgttccgccgcatgccgccggccaatcagcgtctgaacatgctgttctccgcaaccctctcttaccgtgttcgcgaactggcgttcgagcagatgaacaacgccgaatatgttgaagtggaaccggaacaaaagacaggccaccgtattaaagaagagctcttctacccttctaacgaagagaagatgcgtttgctgcaaacgctgatcgaagaagagtggccggatcgcgccattgttttcgccaataccaagcaccgctgcgaagacatctgggggcatctggcagctgacggtcatcgtgtcggcctgttgaccggcgacgttgcgcagaaaaaacgtctgcgtattctcgacgagtttacccgtggcgatctcgatatcctcgtcgcaaccgacgttgccgcgcgcggtctgcacattccggccgtaacgcacgtctttaactatgacctgccggatgactgcgaagactacgttcaccgtatcggacgtacgggtcgcgcaggagcgagcggtcactctatcagcctggcctgtgaagagtacgcgctgaacctgcctgccattgaggcttatattggtcactctatcccggtcagcaaatataacccggaagcgctgatgaccaatttgccgaagccgttgcgcctgacgcgctcgcgcccaggcaatggaccgcgtcgcaccggcgcgccgcgtaatcgtcgtcgttcaggttaa

SEQ ID NO: 75497 - DNA, 330 bp, Citrobacter koseri
atgagcgataaaattattcacctgactgacgacagttttgacacggatgtactcaaagcggacggggctatcctcgttgatttctgggcagagtggtgcggaccgtgcaaaatgatcgccccgattctggatgaaatcgctgacgaatatcagggcaaattgacggttgctaaacttaacatcgaccaaaacccaggcaccgcgccgaagtatggtatccgtggcatcccgaccctgctgttgttcaaaaacggtgaagtcgcagcaaccaaagtgggcgcactgtccaaaggtcagctgaaagagttcctcgacgctaacctggcgtaa

SEQ ID NO: 75498 - DNA, 1260 bp, Citrobacter koseri
atgaatcttaccgaattaaagaatacgccggtttctgagctgatcactctcggcgaaaatatggggctggaaaacctggctcgtatgcgcaagcaggacattatttttgccatcctgaagcagcacgcaaagagtggcgaagatatctttggtgacggtgtgctggagatattgcaggatggatttggtttcctccgctctgcagacagctcctacctcgccggtcctgatgacatctacgtttctcccagccaaatccgccgtttcaacctccgcactggtgacaccatttctggtaagattcgcccgccaaaagaaggcgaacgttactttgcgctgttgaaagttaacgaagttaactacgacaaacctgaaaacgcccgtaataaaatcctctttgagaacttaacgccgctgcacgcgaactcacgtctgcgtatggaacgtggtaacggttctactgaagatttaacggctcgcgtactggatctggcttccccgattggccgtggtcagcgtggtctgatcgtcgcaccgccgaaagcgggtaaaactatgctgttgcagaacatcgcgcagagcattgcttacaaccaccctgactgcgtactgatggtgctgctgatcgacgaacgtccagaagaagtgaccgaaatgcagcgtctggtaaaaggtgaagtggttgcttccaccttcgacgaaccggcatcccgtcacgttcaggttgctgaaatggtgatcgagaaggcgaagcgtctggttgaacacaaaaaagacgtcatcattctgctcgactccatcactcgtctggctcgcgcctacaacaccgtggttccggcttccggtaaagtcctgaccggtggtgtggacgccaacgccctgcaccgtccgaagcgtttcttcggcgcggcgcgtaacgtggaagagggcggcagcctgaccattatcgcaacggcgctgatcgacaccggttctaagatggatgaagtgatctacgaagagtttaaaggcaccggtaacatggagctgcacctctcccgtaagatcgctgaaaaacgcgtcttcccggctatcgactacaaccgttccggtacgcgtaaagaagagctgctcaccactcaggaagagctacagaaaatgtggatcctgcgcaaaatcatccatccgatgggtgaaatcgacgcgatggaattcctcattaacaagctggcaatgaccaagaccaacgacgacttcttcgacatgatgaagcgttcgtaa

SEQ ID NO: 75499 - DNA, 921 bp, Citrobacter koseri
atgtttgctctctcggattactatattccgcacgcatcgttataccttttttctgctggtgtgctggttttggtcggcgcattggatgatcgttttgacattagcgtgaaaattcgcgctgtggtacaggccgctattgctgttgtcatgatggtgatagggaaactccatctcagtagcctggggtatattttcggtccctgggaattggtgctcggcccctttggctatttcctcacgctctttgccgtctgggcggcgatcaatgctttcaatatggttgatggtattgatggcttacttggcgggctgtccagcgtctcatttgccgcaatggggctgattctgtggtttgatgggcagacgagtctggcggtatggtgtttcgccatgatcgccgcgattctgccctatatcatgttaaaccttggtgttctggggcgtcgttataaagtctttatgggcgatgcgggcagtacgctgattggcttcacggttatctggatcctgctggaaaccacgcagggtaaaacgcatcctatcagcccggttactgcgctgtggattattgcgattccattaatggacatggtggcgattatgtatcgtcgcctgcgtaagggcatgagccccttttctcccgatcgccagcatattcatcatttgatcatgcgtgcagggtttacttcccgacaggcatttgttctcattacgctcgccgctgcgattctggcttccattggcgttgccgcagaatattcccattttgttccagaatgggtcatgttggtgctctttttgctagcattcttcctttacggttactgcattaagcgtgcctggaaggtggcgcgatttattaagcgcgtgaagcgcagactacgcagaaaccgtgataacaatccaacgataaccaagtaa

SEQ ID NO: 75500 - DNA, 1047 bp, Citrobacter koseri
atgacacaaccattaccgggggcacacgccgtgagcgctgaaaatgaactggatattcgtgggttgtttcgtaccttgtgggctgggaagctatggattgtgggagcagggctggcttttgcgctgattgcgttagcgtatacgttttttgcccgtcaggagtggagcgcaacggcgatttccgaccgccccaccgtcaatatgctgggcggctattactcccaacagcagtttttgcgcaaccttgatatcaaagccagcctcgcgccggccgatcagccttcggtaatggatgaagcgtataaagagttcgtcatgcaactggcgtcctgggatacgcgtcgcgatttctggctacagaccgattattacaagcagcgcatggtcggcaacagcaaagccgatgccgcgatgctggatgaaatgatcaataacattcagttcacgccaggcgatttcactcgcaacaccaatgatagcgtgaagctgattgcggaaacggcgcccgatgccaacaacctgcttcgccagtatgtggcgtttgccagccagcgtgcggcgagccatctgaatgatgagttaaaaggcgcatgggccgcgcggactatccagatgaaagcgcaggttaaacgccaggaagaggtggcgaaaagcattttctctcgtcgtgttcatagcattgaacaggcgctcaaaattgccgagcagcataatatttctcgtacggcgaccgatgttcctgccgatgaactacctgactctgagctgtttttgcttggccgccctatgctacaggcgcgtcttgaaaaccttcaggctgtcggtccggcattcgatctggactatgatcaaaaccgggccatgctgaacacgctgaacgtggggccgacgctggacccgcgtttccagacctatcgttatttgcgcacgccggaagaaccggtaaaacgcgatagcccgcgccgtgctttcctgatggttatgtggggcattgttggggcgctgatcggggctggcgtcgcattaacccgccgccgcgcgatttag

SEQ ID NO: 75501 - DNA, 1086 bp, Citrobacter koseri
atggcgcctctggttcatgcgctggcaaaggaccctcattttgaggcaaaagtctgcgttactgcgcagcatcgggagatgctcgatcaggttttgaatctcttttctattgtgcctgactacgatctcaatattatgcagccgggtcaggggctgacagagattacctgtcgaatcctggaaggattaaaaccgattcttgccgattttaaacctgatgtcgtattggtgcatggcgatacgacaaccactctcgccaccagtctggcggctttctaccagcgtattcctgtcggtcatgtagaggccgggctgcgaaccggcgatctctactccccctggcctgaagaggcgaaccgcaccctgaccggtcgcctggcgatgtaccattttgcgccgacggagaattcacggcagaatttactgcgggaacagatccctgataaccacatctttgtcaccggcaataccgtgattgatgcgctgatctgggtgcgcgatcgcgtactggccagcgatacgctacgcgccgaactggcaaagcggtatcctttcctgtgtgacgataaaaaaatgatcctggtgaccggacatcgccgtgagagctttggccgggggtttgagcaaatctgccatgcgctggcggagatagcagctaccaatcaggatgtacaaattgtgtatccggttcacctgaatcccaacgtcagcgaaccggttaaccgcatcctggggcatgttgaaaatgtgatactgattgagccgcaggattacctgccgtttgtctggctgatgaaccacgcctggctgatccttaccgattccggtgggattcaggaagaggcgccgtcattaggcaaaccggtgttggttatgcgcgaaatgacggaacggccagaagccgttaccgctggcacggtgcgtctggtgggaaccgattcacaccgtattgtggaagaagtcacacgtttgctgcacgacgaaaatgaatatcaaaccatgagccgcgcccataatccttatggcgacgggcaggcgtgcggccgcattttacacgcgttaaaaaataatcgggtatcgctatga

SEQ ID NO: 75502 - DNA, 1263 bp, Citrobacter koseri
atgagttttacgaccatttctgttattgggctgggatacatcgggttgccgacggctgcggcctttgcttctcgccaaaagcacgttattggcgtggatatcaatcagcaggcggtggacaccatcaaccgtggagccatccatattgttgagccggatctggatagcgtcgtgaaaactgcggttgaaggcggattcctccgggccacgacaacgccggtagcagccgacgcgtacttgatcgccgtgccgacgccgttcaagggcgatcacgaccccgatatggtttatgtcgaagcggccgcgaaatctattgctcccgtactgaaaaaaggcgcgctggtcatcctcgaatccacctcgccggtgggcgcgacagaacaaatggccgcatggctggcggaaatgcgcccggatctgactttcccgcagcaggcgggggaacaggctgatgtgaacattgcctactgcccggagcgcgtattgccaggtcaggtcatggtggagctcatcaaaaatgaccgcgtgattggcggcatgacgccggtatgctccgcgcgtgccagcgagttgtacaagattttccttggaggcgagtgtgtggtgactaattcccgcaccgccgaaatgtgtaagctcacggaaaacagcttccgtgacgtcaatatcgcctttgcgaacgagctgtcgctgatttgcgccgatcaggggattaacgtctgggaactgattcgtctggcgaatcgtcatccacgcgtgaatattctccagcctgggccgggcgtgggaggccactgcatcgccgtcgatccgtggtttattgtggcgcaaaacccgcagcaggcgcggctgatccgtaccgcgcgtgaagtgaacgacggtaaaccacactgggtggtggcgcaggtgaaagccgcagtggcggattgcctgacggcaacgaataagcgcgccagcgacatcaaaatcgcctgctttggtctggcgtttaaaccgaatattgacgatctgcgtgaaagcccggcgatgggcattgcgcaggagattgcgcaatggcatgccggtgaaacgctggtggtagagcctaatattcatcagttgccgaaaaaactggaaggtcgctgcacgttagccacgctggaaaatgcgctggcggaagcggatgtgctggtcatgctggttgaccatcatccgtttaaagcgattaacggcgacgccgtgcggcaacgctacattgtggatacaaaaggagtctggcgctga

SEQ ID NO: 75503 - DNA, 1068 bp, Citrobacter koseri
atgaaacggattctggtcactggcggcgcgggatttatcggctctgccgttgtacgccacatcattgatgaaacccccgacgccgtggtggtggtggataagctcacctacgccggaaacctgatgtcgctggcgccagttgcccagcatgagcgctttgcctttgagagagtggatatctgcgatcgggcatcgctggatcgcgtttttcagcagtaccagccggattacgtgatgcatctggcggcggaaagccacgttgaccggtctatcgacggcccggctgcgtttattgaaaccaatatcgtgggaacctacacgctgctggaagcggcccggacttactgggcgacgctcaatgatgagaaaaaatcggcgtttcgtttccaccatatctccactgacgaggtgtatggcgatctgcattccacggatgatttctttactgagaccacgccgtatgcgccgagcagtccttattccgcctcgaaagccagcagcgatcacctggtgcgcgcgtggttgcgcacctatggtctgccgacgctggtcactaactgttccaataattacggcccttaccacttcccggaaaagctgatcccattgatgatcctgaatgcgctggcgggtaaaccgctgccggtgtatggcaatggacaacagatccgcgactggctgtacgttgaagatcacgccagggcgctgtatcgcgtgctgacggcgggcgaagtgggggagacatataacattggcggccataatgagcgtaagaatctggaggttgtggaaacgatttgcgatctgctggaagaacttgcgccacaaaaaccgcagggcgtggcgcattatcgctccctgatcgcttttgtggatgaccgtccaggccatgatttacgctatgccatcgacgcagcgaaaattgcgcgtgaacttggctggacgccgcaggaaacctttgaaagcggaatgcggaaaaccgtgcagtggtatctggcgaatgaggcctggtggaagcccgtgcaggatggcagctatcagggtgaacgtttaggtctgaagggctaa

SEQ ID NO: 75504 - DNA, 882 bp, Citrobacter koseri
atgaaaggtatcattctggcgggcggctctggcacccgcctgcatccgattacgcgcggcgtgtcaaagcagcttctgccgatttatgacaagccgatgatctactatccgctgtcggtactgatgctggcgggtatccgggaaatcctgattatcaccacaccggaagataagcactattttcagcgtctgctgggcgatggttcggagtttggcattgagttgcaatatgccgaacaacccagcccggatgggctggcgcaggcctttatcattggtgaaacattccttaacggcgagccgtcctgtcttgtactgggcgacaatatcttctttggtcagggtttcagtccgaaattgcgtcatgtggcggcgcgaaccgaaggggcgaccgtttttggttatcaggttatggacccggaacgttttggcgtcgtggagttcgacgacaattttcgcgcggtctcgttggaagagaagccgaaacagccgaaatcaaactgggcggtgaccggtctctatttttacgacagcaaggtagtagagtatgcgaagcgcgtgaagccttccgagcgcggtgagctggagattacgtccattaatcagatgtaccttaatgacggcaagctgacggttgagttgctcggtcgcggctttgcgtggctggataccggcacccatgacagcctgattgaagcgagcacgtttgtgcagacggttgaaaaacgccagggcttcaaaatcgcctgtctggaagagatcgcctggcgcaacggctggctggatgacgagggcgtaaaacgcgccgccagttctttagcgaaaaccggctacggccaatatttactggagctactccgtgcccgtccgcgccagtattga

SEQ ID NO: 75505 - DNA, 678 bp, Citrobacter koseri
gtgcccgtccgcgccagtattgaaccattaacgtgggaaaatacgttctttggcgtcaatagcgctattgttcgcgtgaaccctgccgcgccggtgttaacgccagaggcattgcaaccctggtcgcgcgtgcaggcgaaaatttctgctgcgcgcacggatgaattagatgcgctgcaacagttggggttttcgctggtagaaggcgaagtcgacttcagcctgccggtcgctggcgttgaacgtatttctggcgtggaaattgcacaaattgccgatattcccgcgttacgtcaacaggcgtccgccgcgtttgcgcaaagccgtttccgcgcaccgtggtatgcgccggacgccagcgcccgtttttatgctcagtggattgaaaatgccgtgcgcggcaccttcgatcaccagtgtctggttatccgggcggcgaataacgatattcgcgggtttgtctcgctgcgcgaactgaacgacaccgatgcgcgcatcggcctgctggccgggcgtggcgcaggagcagaattaatgcaggcggcgctcgcgtgggcgcagtctcgcggaaagacaacattgcgggtggcgacccagatgggcaacaccgccgcgcttaaacgttatatacagagcggtggcaacgtagaaagcaccgcgtactggttatacaggtga

SEQ ID NO: 75506 - DNA, 1131 bp, Citrobacter koseri
atgattccatttaacgcgccgccggtggtgggaaccgaactcgattacatgcagtcagcgctgggaagcggcaaactttgcggagatggcggctttacgcgccgttgccagcagtggctggagcaacgttttggcagcgctaaagtgttgctgacgccatcctgtacggcgtcacttgaaatggcggcattgctgctggacatccagccgggcgatgaagtcattatgccaagctacaccttcgtttctaccgccaatgcctttgtgctgcgcggggcgaaaatcattttcgtcgatatccgcccggataccatgaacattgatgaaacgctgattgaagcggcgattaccgacaagacgcgcgtcattgtcccggtgcattacgcgggcgtagcctgcgaaatggacaccattatggcgattgcgaagcgtcataatctgtttgtggtggaagatgccgcgcagggcgtgatgtcgacctggaaaggccgtgcgctggggacgattggtcatatcggttgcttcagttttcacgaaaccaaaaactacacggcaggtggtgaaggcggcgcgacgctgattaacgaccgttccctgattgaacgggcggaaatcatccgtgaaaaaggcaccaatcgcagccagttcttccggggacaggtggataaatacacctggcgggatatcggctccagctatctgatgtccgatctccaggcggcgtatctgtgggcgcagctggaagcggccgatcgcatcaatcaacagcgtctggcgctgtggcagacctactatgacgcactggtgccgctggcgcgcgcgggacgtattgacctgccttctatcccggacgactgtaggcacaacgcgcatatgttttatatcaagttgcgggatattaccgatcgcagcgcgctgatcaacttcctgaaagaagcggaaatcatggcggtgttccattacatcccgctacatgattgtccggcaggcgacaagtttggcgagttccgtggcgaagatcggtacaccaccaaagagagcgagcgcctgctgcgcttgccgctgttttataatctgtctcccgttaatcagcgaacggtgatttcgaccttgctgaactatttctcctga

SEQ ID NO: 75507 - DNA, 1251 bp, Citrobacter koseri
atgtcgcttgcgaaagcgtccctgtggacggccgccagtacgctggtgaaaattggcgcaggcttactggtcgtaaaactgctggcggtgtcgtttggccctgcgggcgtcggccaggcgggtaacttccgccagatggtgaccgtgctcggcgtgctggccggggccgggatatttaacggggtgacgaagtatgttgctcagcatcatgataaccctgcccggttgcgtaacgtggtgggcacttcatccgcaatggtgctggggttctccacgctactggcgctggtcttcgtgctggcggcggcccccattagccaggggctgtttgggcacagccactaccaggggctggtgcgtttagtggcgctggtgcagatggggatcgcctgggcgaacctgctgctggcgctgatgaaagggtttcgtgacgctgccgggaatgcgctgtcgctgattgtggggagcctggtgggggttgtggcctactatggctgctaccgtctgggcggctatgaaggtgcgctgctgggtctggcgctggtgcctgcgctggtggtgatcccggcggcgattatgctgattaaacgcggcgcgatcccgcttagctacctgaaaccgtcgtgggataaagggcttgccggacagctcagcaaatttacgctgatggcgctgattacgtccgtcacgctaccggtggcttatgtgatgatgcgaaacctgctggcggcgcattacagctgggatgatgttggtatctggcagggcgtaagcagtatttccgatgcctatctacaatttattaccgcctcgtttagcgtgtacttattgccaacgctgtcgcgtctgaccgaaaagcaggcgattacgcgcgaagtggtgaaatcgctgaaatttgttctgcctgcggtggcggtggcgagttttacggtctggctgctgcgtgatttcgccatctggctgctcttttccgccaaattcaccgccatgcgcgatctgttcgcctggcaactggtgggcgatgtgctgaaagtgggcgcgtacgtttttggctatctggtgatcgcaaaagcgtcgctgcggttttatattctggctgagattagccagttcattttgttgacggcattcgctcactggctgatccccgcgcatggcgcgctgggggcggcacaggcgtatatggccacctatgtggtctatttctctctctgttgtggcgtgtttttactctggcgtaggcgggcatga

SEQ ID NO: 75508 - DNA, 1080 bp, Citrobacter koseri
atgactgtactgattcacgtactgggatcggatatccctcaccataatcaaaccgtgctgcggtttttcaatgatgcgctggccgcgacaagcgagcatgcgcgcgtgtttatggttgcaggtcaggatgcggggctcagggaaagctgcccggctctgtcgctgagtttctacgccgggaaaaaaacgctggctgaggcggtcatcgccaaagcgaaagccaatcgccagcaacgtttcttcttccacggtcagttcaataccagcctgtggctggcgctgctaagtggcggaatcaaacctgagcagttttactggcacatctggggcgcggatctgtatgaagtttcccgtgggctgaaattccgtctgttttaccccgttcgccgcatggcgcaaaatcgagtgggctgtgtgttcgctactcgtggcgatttgagctatttcgcccgtcagcacccgcgcgcgcgtggtgaactgctctatttcccgacgcgaatggactcttcgcttaataacatggcaaacgatcgtccgcgtgaagggaaaatgacggttctggtgggtaactccggcgatcgcagtaacgaacatattgcggcgttacgcgcggtgtatcagcagttcggcgacacagtaaatgtgatcgtgccgatgggctatccggccaataacgacgcgtacattgatgaagtccgtcaggcggggctggcgctgttcagtgcggaaaatttacacatcctcagcgaaaaactggaattcgatgcttatctgacgctgcttcgccagtgcgacctcgggtatttcatctttgcccgtcagcagggaatcggcacgttgtgcctgcttatccaggcaggtgtcccgtgcgtgcttaaccgtgagaacccgttctggcaggatatggcggagcagcatctgcccgtgttgttcacgacggacgcgcttaatgagggcgtggttcgtgaggcgcagcggcagctggcgtccgtggataaaagcgggatcaccttctttagcccaaattaccttgaagcgtggcataacgcgttacgtattgccgcaggagacgccgcatga

SEQ ID NO: 75509 - DNA, 1353 bp, Citrobacter koseri
atgagcctgatgcaatttagcgggttactggtcgtctggctgctctccacgctgtttatcgccacgttgacctggtttgagtttcgccgcgtgcgctttaacttcaacgtattcttttcattgctgtttttgctgacctttttcttcggcttcccgttgaccagcgtgctggtgttccgctttgacgtcggcgtggcaccgccggaaatcctgttgcaggcgttattgtccgctgcgtgtttttatgccgtttattacgtgacctataaaacccgcttacgtaaacgcgtgacggatgtgccgcgcaagccgctatttaccatgaaccgggtggagactcaccttacctgggtcatgctgatggggattgcactggtgagcgttggcatcttctttatgcacaatgggttcctgctgttccggctgcactcttacagccagatcttctccagcgaagtctccggcgtggcattgaaacgcttcttctacttctttattccggcgatgctggtgatctacttcctgcgccaggacagtaaagcgtggctgtttttcctggtgagtaccgttgcgtttggcctgctgacctacatgattgttggcggcacgcgcgctaacatcatcatcgcgtttgccatcttcctgtttatcggcattattcgtggctggatctcgctgtggatgctggcggcggcgggtgtgatgggaattgtcgggatgttctggctggcgctgaagcgctatgggctgaacgtgagcggcgatgaggcgttttacactttcctgtatctgacccgcgataccttctcgccgtgggagaacctggcgctgctgttgcaaaactacgataacatcgatttccagggactggcgccgatcgtccgtgatttttatgtctttattccttcgtggctgtggcctgggcgtccgggcattgtgctgaattcagccaactactttacctgggaagtgctgaacaaccactctggcctcgccatttcccccacgctgattggttcgctggtggtgatgggcggcgcgctgtttatccctctgggggcggtcgcggttgggctgattattaaatggtttgactggctgtatgagcttggcaaccgtgagacgaatcgctataaggcggcgattttgcacagtttctgctttggcgccatcttcaatatgattgttctggcgcgagaagggctggattcttttgtctcgcgagtggtctttttcctcgtgatttttggtgcctgcctgctggtggcaaaacttttgttctggcttttcgattgtgccgggttggtccatcaacggacgaaaccgcagccgcagactcaggttgaaggataa

SEQ ID NO: 75510 - DNA, 741 bp, Citrobacter koseri
atgacggataacacgacagcgccgctctattcacttcgtggattgcagctgattggctggcgcgatatgcaacatgcgctgaattacctgtttgccgatgggcaaatgaagcagggtacgctggtggcgatcaatgctgagaaaatgctgaccgcagaagatgacccggaagtcagggcgttgattgatgccgccgagtttaaatatgcggatggcattagcgtcgtgcgctcagtgcgtaagaaattcccccaggcgcaggtttcacgggtggccggggccgatctctgggaagaactgatggcgcgcgccggtaaagaagggacgcctgtttttctggtcggcggtaagccggaggtgctggcgcagacggaagcgaaactgcgtgcgcagtggaacgtcaatattgtcggtagccaggacggttattttaaacctgagcagcgccaggcgctgtttgagcgcatccatgccagcggggcgaagattgtgaccgtggcgatgggatcgccgaaacaagaaatcctgatgcgtgactgtcgggtgattcatcctcaggccttatatatgggggtgggcggcacctacgatgtctttaccggtcatgtgaaacgcgcgcccaaaatgtggcagacgctggggctggagtggctgtatcgcctgctgtctcagccgagccgtatcacccgccagctgcgtctgttgcgctatctcagctggcattacaccggcaatctctga

SEQ ID NO: 75511 - DNA, 1386 bp, Citrobacter koseri
atggcagagaaaaaaccggagctacagcgtgggctggaagctcgtcatatcgaattgatcgcccttgggggcacgattggcgttgggctgtttatgggggccgccagtacgctgaaatgggcggggccctccgtgctgctggcgtatatcgttgccgggctgttcgtctttttcatcatgcgctcaatgggcgaaatgctgttcctggagccggttactggctcattcgccgtttatgcgcaccgttacatgagccccttctttggctatctcaccgcgtggtcatactggtttatgtggatggcggtggggatatcggaaataaccgctatcggggtatacgtgcagttctggttcccggacatggcgcaatggatacccgccctgatcgccgttgggctggtggcgctggctaatctggccgccgtccgtctgtacggcgaaatcgagttctggtttgcgatgatcaaagtcaccaccatcattgtgatgattgtggtcggactgggggtgattttctttggctttggtaatggcggccaggcgatcggttttggcaacctgacggaacacggcggcttctttgccggtggctggaaagggttcctgacggcgttgtgtattgtggtcgcctcctatcagggcgtggagctgatcggcattaccgcgggtgaagcgaagaatccgcaggttacgctgcgcagcgcggtaggcaaagttctgtggcgtatcctgattttctatgtaggggcgattttcgttatcgtgacgatcttcccgtggaacgaaatcggcagtaacggcagcccgtttgtactcacttttgccaaaatcgggattacagctgcggcgggcattattaacttcgtggtgctgaccgccgcgctttccggctgtaacagcggcatgtatagctgcggacgtatgctgtatgccctggcgaaaaaccgccagcttccggcggcgatggcgaaagtctcccgtcatggcgtaccggtcgccggggtggcgctgtcgatcgcgattctgctgattggctcatgcctgaactacattattccgaacccgcagcgggtatttgtgtatgtctacagcgccagcgtattgccgggtatggtgccgtggttcgtgatcctgattagccaggtgcgtttccgtcgtgctcataaagacgcgatgatcagccatcctttccgttctattatgttcccgtgggcgaattatttgacgatggcgttcctggtttgcgttttaattggcatgtacttgaatgaagatacccgtatgtcgctgtttgtcggcatcatcttcctgcttgccgtcacgctcgtctacaaggttttcggcctgaatcgcgccggaactgcccataaggtgggggaataa

SEQ ID NO: 75512 - DNA, 1197 bp, Citrobacter koseri
atgctgaaagtattattgctctttgtgttgttgatcgccggtatcgtcataggcccaatgatcgccggtcatcagggctatgttctgatccagaccgataattacaacattgagaccagcgtaacggggctggtgatcatcctgatcgttatgatggtcattctgttcgccattgagtggctgctgcgacgcgttttccgcaccggcgcgcacactcgcggctggtttgtcgggcgtaaacgccgccgcgcacgtaagcagactgaacaggcgctgcttaagctggcggaaggcgattaccagcaggttgagaagctgatggcgaagaatgccgatcacgctgaacagccggtggtgaactatctgctggccgccgaagccgcgcagcagcgtggtgacgaagcgcgcgctaatcagcatctggaacgtgccgctgaactggcgggcaacgacacgattccggtggagatcgcccgcgtacgtctgcaactggcgcgcaacgagaatcatgcggcgcgtcacggcgtggataaactgctggaagttaccccgcgtcatccagaagtgctgcgcctggcggaacaggcttacatccgcaccggagcatggagttcgctgctggacatcatcccatcaatggcgaaggccaacgtcggcgatgaagaacatcgcgccatgctggaacagcaggcctggattgggctgatggatcaggcgcgagccgatcagggcagcgaaggattacgcgaatggtggaagaaccagagccgtaaaactcgccaccaggttccgctgcaagtggcaatggcagagcatctgattgaatgcgacgatcacgatatggcgcagcagatcatcatcgacggcctgaagcgccagtatgacgaccgcctggttctgccgatcccgcgtctgaaaaccaacaacccggagcagctggaaaaagtgctgcgccagcagattaaaaccgttggcgatcgcccgctactgtggagcacgctgggtcagtcgttgatgaagcatggcgaatggcaggaggctacgttcgccttccgcgccgcgctcaagcaacgccctgacgcctacgactacgcctggctcgccgatgcgctggaccggttgcatcagccggaagaagcggccaccatgcgccgcgacggtcttatgctgaccttgcagaacaatcctccgcagtaa

SEQ ID NO: 75513 - DNA, 1182 bp, Citrobacter koseri
atgacggaacaagaaaaatcctccgccgtggttgaagagaccagggaggccgtggaaaccacgccgcagccagtcaatgcagaaaagaagagtaagaacggcgccgcgctggtattgagtgcggtggcaatcgccattgccctggccgcgggcgtcggtctgtatggctggggaaagcagcaggccgttaaacaaacggccaccagcgatgcgctggttaaccaacttacggcgctgcaaaaagcccaggaaagccaaaaagcggagctggaaggcattatcaaacagcaggcgacgcaactggatgatgcaaatcgccaacaggccgcgctggcgaaacagctggatgaagtgcaacagaaagtcgcgacgatctccggcagcgacgccaaaacctggctgctggcgcaatctgattttctggtcaaactcgccggacgtaaattgtggagcgatcaggatgtcaccaccgctgcggctctgctcaaaagcgcggatgccagcctggcggacatgaacgaccccagtctgatcgccgcgcgccgcgccattaccgatgatattgccagcctgtcggcggtggcgcaggtggactacgacggcattatcctcaaagtaaaccagctctctaaccagattgataacctgcgtctggccgataacgacaccgacgattcgccaatggactccgacagcagcgagctgtccagctcgatcagcgaatggcgcgttaatctgcaaaaaagctggcagaactttatggacagctttattactattcgccgtcgtgatgacaccgccgtcccgctgctggcgccgaaccaggacgtttacttacgtgaaaacatccgctcccgcctgttagtggcggcgcaagccgtgccgcgtcatcaggaagagacttaccgtcaggcgctagataatgtctccacctgggtacgcgcgtactacgacaccgacgacgcaacgaccaaagcgttccttgatgacgtggataaactgagtcaacagagcatcacgatggacgtgccggagacgttacagagccagccgattcttgagaaactgatgcagactcgcgtgcgtaacctgctggcgcaaccggcggcggccacgaccgaagcggctcaggcccctgctccgcaggcagaagcaccggcagccgcgccgcaaggagaataa

SEQ ID NO: 75514 - DNA, 741 bp, Citrobacter koseri
atgagtattctggtcacccgcccgtctccctccggggaagagttagtgagccgtctgcgcacactggggcaggtggcctggagttttccgcttattgagtttacgccgggccgggaactggcaacgcttgccgatcgcctggcggcgctcacggacaacgatctggtgttcgccctctcgcaacacgccgtcacctttgcccacgcccaactgcaacagcaggggctgggctggcctgtgcagccatgctacttcgccatcgggcgcacaacggcgctggcgctgcataccgttagcggatgcgatattcgctatcctctggatcgggaaatcagcgaagtcttgctacaattacctgaattacaaaatattgcgggaaaacgagcgcttattttacggggcaacggcgggcgtgaactgttaggcaaaaccctcacagaacgcggcgctgaagtcaccttttgtgaatgttatcaacgcagtgcaaaacattacgatggcgcggaagaggcgatgcgctggcactctcgcggcgtgacgacgattgttgtcaccagcggcgaaatgctgcaacagctctggtcgctgatcccgcagtggtatcgtgagcactggttactacgctgtcggctgctggtcgtcagtgagcgtctggcgcacctcgcccgggaactgggctggcaagatattaaggtcgctgataacgccgacaacgatgcgctactgcgcgcattacaataa

SEQ ID NO: 75515 - DNA, 957 bp, Citrobacter koseri
atgacggtaacaagcatgttagacaatgttttaagaattgccacacgccaaagcccccttgcgctctggcaggcacattatgtcaaagacgcgttgatagcacagcatccgggactggtcgtggaactggtgccgatggtaacgcgcggcgacgtgattctggacacccctctggcaaaagtgggcggtaagggcttgtttgtaaaagagctggaagtcgcgctgctggaaaagcgcgccgatatcgccgtgcattcgatgaaagatgtgccggtagaattcccgcaagggcttggcctggtcacgatttgcgaacgcgaagatccacgcgatgctttcgtctcgaaccaatacaacaatctggatgaactgcccgcaggcagcatcgtcggcacatcaagtttgcgtcgccagtgccagttggccgagcgtcgcccggatctcatcatccgctcgctgcgcggcaacgtcggcacacgcctgagcaagctcgataacggcgattatgacgcaattatcctggcggttgccgggttaaaacggttaggtctgacgtcgcgtattcgcaccgcgctgcctccagaaatctctctccctgccgtagggcaaggcgcagtgggcattgaatgccgactggatgacgcacgtactcaggcgctgttagcgccgctgaatcatgaagaaaccgcgctacgtgtaaaagccgaacgcgccatgaacacccgcctggaagggggctgtcaggtgccgattggcagctatgctgaaatcattgatggtgaagtctggctacgtgcgctggttggcgcgcctgacggttcgcagatgattcgcggagaacgtcgtggattgccgcaggacgccgcgcaaatgggcatttccctggcggaagagctattggaaaacggcgcccgcgcgattctgaccgaggtttataacggagaagcacccgcatga

SEQ ID NO: 75516 - DNA, 2616 bp, Citrobacter koseri
atggtttggttgtccgcactcgcgatggcaatcagacgcatgacgggtagcaacatcaggcgatacgtcttgtacctctatattgagactttgaaacagagactggatgccatcaatcaattgcgtgtggatcgcgcgcttgctgccatgggccctgccttccagcaggtatacagtctgctgccgacattattgcactaccataatccgctgatgccgggttacctcgacggtaacgttcccaagggcatatgcttttacacgcctgatgaaacccaacgccactacctgaatgaacttgaactgtaccggggtatgtccccgcaggacccgccgaaaggcgagctgccgatcaccggcgtgtactcaatgggcagtacatcttcagtagggcaaagctgttcttctgacctggatatctgggtctgccaccagtcctggcttgatagcgaagaacgccagttgctgcaacgtaaatgcagcctgctggaaagctgggccgcttcgctgggcgtggaagtcagcttcttcctgatcgacgaaaaccgtttccgccataatgaaagtggcagtctgggtggtgaagactgcggctcgacgcagcacatcctgctgctcgacgaattttatcgcaccgctgtgcgtctggccggtaagcgtattctgtggaatatggtgccgtgcgacgaagaagagcattacgacgactacgtcatgacgctttacgcgcagggtgtcctcacgccaaacgaatggctggacctgggcggattaagctcgctctccgccgaagagtactttggcgccagcctctggcagttgtacaagagtatcgattccccgtataaagcggtgctgaaaacgctgctgctggaagcctactcctgggaatatcccaatccgcgcctgttggcgaaagacattaaacagcgcctgcatgacggcgagatcgtttcgtttggtctcgacccgtattgcatgatgctggaacgcgtgaccgaatacctcacggctatcgaagatccgacgcgtcttgatttagttcgtcgatgtttctacttaaaagtgtgtgagaaactgagccgcgaacgcgcctgcgttggctggcgtcgtgaagtgttaagtcagttagtgaacgagtggggatgggacgacgcccgtctgacaatgctcgacaaccgggcgaactggaagatcgatcaggtacgcgaagcgcataacgaactgctcgacgccatgatgcagagctatcgtaatctgatccgttttgcccgccgtaacaatctcagcgttagcgccagcccgcaggatattggcgtgctgacgcgtaaactgtatgccgcatttgaagccctgccgggcaaagtgacgctggtgaacccgcagatttcaccggatctctccgaaccgaacctgacctttatccatgtgccgccgggccgggccaaccgttctggctggtatctctacaaccgtgcgccgaacatggattcgatcatcagccatcagccgctggaatataaccgctacctgaacaaactggtagcgtgggcctggtttaacggtttgctgacgtcgcgtacccacctgtttattaagggcaacggcattgtggacctgcctaagttgcaggagatggtggccgatgtgtcgcaccatttcccgctgcgtttgcctgcgccaacgccgaaagcgctctacagtccgtgtgaaattcgccatctggcgatcatcgttaaccttgaatatgacccgacggcggcgttccgcaatcaggtggtgcatttcgatttccgtaagctggatgtcttcagctttggcgaagagcaaaactgcctggtcggcagtgtcgacctgttgtatcgcaactcgtggaacgaagtgcgtaccctgcacttcaacggcgaacaggcgatgattgaagcgctgaaaacgattctcggcaaaatgcaccaggatgccgcgccgccggacagcgtggaagtgttctgctatagccagcatctgcgcggcctgatccgcacccgcgtacagcaactggtctccgagtgcattgaactgcgcctctccagcacccgccaggaaaccggacgttttaaagcgctgcgcgtttcgggccaaacctgggggctgttcttcgagcgcctgaatgtttcggtgcagaaactggaaaacgccattgagttttacggcgcgatttcgcacaacaaacttcacgggctttccgttcaggttgagaccaaccatgtgaaattaccgtcggtggtggatgggttcgccagcgaagggatcatccagttcttctttgaagaaaccggtgatgagaaaggctttaatatttatattctggacgagagtaaccgggcggaagtgtatcaccactgcgaaggcagcaaagaagagctggtacgcgacgtgagccgcttctattcgtcgtcgcacgatcgcttcacctacggctccagcttcatcaacttcaacctgccgcagttctaccagattgtgaataccgacggtcgcgagcaggtcattccgttccgtacccagcccatcagcgccgtgccaccggcaaaccaggacaacgacgcgccgctgttacagcagtatttctcgtga

SEQ ID NO: 75517 - DNA, 321 bp, Citrobacter koseri
atgaacgacagtgaatttcatcgcctcgcagacaccctgtggatgaccattgaagaacgtctggacgactgggacggcgacagcgatatcgactgcgaaatcaacggcggcgtgctaaccattacctttgagaacggcagcaaaatcatcatcaaccgtcaggagccgctgcaccaggtatggctggcgaccaaacagggcggctaccattttgacctgaaaggcgacgaatggatttgcgatcgcagcggcgaaaccttctgggatctgctggagcaggccgcgacacaacaggctggagaagcggtgagcttccgctaa

SEQ ID NO: 75518 - DNA, 204 bp, Citrobacter koseri
atgaaaaatgtgtttcaggcactcgctgtacttctcactctgttcagcctgaccggctgcggtctgaaaggcccgctctattttccacctgctgacaaaaacgcgccgccgccgacgcatgaggttgattcgcaaatccaatcaacgacgcccgatcaaaacgatcgcgctacgggagacggcccttctcaggtgaactattga

SEQ ID NO: 75519 - DNA, 825 bp, Citrobacter koseri
atgcaattctctaaaatgcatggccttggcaacgattttatggtcgtcgacgcggtaacgcagaatgtctttttctcgccagagttgatccgccgcctgtcagacaggcatctgggcgtggggttcgaccagcttctggttgtcgagcctccttacgatcctgaactggattttcattaccgcatcttcaacgccgatggcagcgaagtgtcgcagtgcggtaacggcgcccgctgctttgcgcgatttgtgcgtctgaaagggctgaccaataagcgcgatatccgcgtcagcacggccaatggccggatggtgctgagcgtcacagatgatgagctggtgcgggtgaacatgggtgagccaaactttgaacccgcgcaggttccttttcgcgccaacaaagcggaaaagacctatattatgcgagcggccgagcagacaatattgtgcggcgtggtttcaatggggaacccgcactgcgtgattcaggtcgataatatcgacacggcggcagtcgaaacgctgggaccggttctggaaagccatgagcgttttccagaacgagcgaatattgggtttatgcaggttgtgaagcgcgagcatatccgattacgcgtttatgaacgtggggcaggagaaactcaggcctgcggcagcggcgcatgcgccgccgttgcggtgggcattcagcagggtttgctggcagaagaagtacgcgtggaattacctggcggtcgccttgatatcgcctggaaaggcccgggtcatccgttgtatatgactggcccggcggcacatgtctacgacggatttattcatctatga

SEQ ID NO: 75520 - DNA, 672 bp, Citrobacter koseri
atggaactggacgaccgggcggtcgtcgattatctactgcgtaaccctgagttttttatccgtaatgcgcgcgccgttgaggcgatgcgcgttccgcatcccgtgcggggtacggtgtcgcttgttgagtggcacatggcccgcgcccggaatcatatccatgttcttgaagagaacatgacgctgctaatggaacaggcgaatgccaacgaaagcctgttctaccgtctgctgcatttgcagggacggctggtttccgccagtagcctggatgaaatgctgatgcggtttcatcgctgggcgcgggagctggggctggcgggcgcgaccatccggctgtttcccgatcgctggcgactcggcgcgccgtcgaatcatacccatctggcgttaagccgtcaggcctttgaaccgctgcgtatccagcgtctggggcaggcgcaacactatcttggcccattgaatggcccggaactgctggtggtgctgcctgaagccaaagcgattggctcggtggcgatgtcgatgctggggcgcgatggcgatctgggggtcatactcttcagtagccgcgatgtgcatcattaccagcaggggcaggggacacagttactgcaagaaatcgccttgatgttgccggaactgctggagcgctggattgaacgtgtatga

SEQ ID NO: 75521 - DNA, 903 bp, Citrobacter koseri
atgaccgaattatcgctttctcaggacgttgcgcgcttcttgcgttacctgggcgtagaacggcaacttagccccatcacgctactgaactatcagcgtcagcttgatgccattatcgctttagccggagaaaccggtctgcaaagctggcaacaatgtgacgctgcgatggtgcgcgctttcgcggtacgtagccgccgtaaagggttagggcccgccagcctggcgttgcgcctctctgctttacgcagtttctttgactggctggtgagccagggtgaactcaacgccaacccggcgaaaggcgtttccgcgccgaaagcgcctcgccacctgccgaaaaatatcgacgtggatgatgttaaccgcctgctggatatcgaccttaacgatccgcttgccgtgcgcgatcgggcgatgctggaggtgatgtacggcgcggggttgcgtttgtctgaactggtagggttagacatcaaacacctcgatctcgatacgggcgaagtgtgggtgatggggaagggcagcaaagaacggcgtctgcccattggccgcaatgcggtggcgtggattgagcattggctggatctgcgcggcctgttcggcagcgatgacgatgcgctgtttctctcaaagctcgggaaacggatctccgcgcgcaatgtacaaaaacggtttgcggagtggggcattaagcaagggctgaacagccatgtccatccgcataaactgcgtcactcgttcgcgacccatatgctggagtcgagcggcgacctgcgcggcgtgcaggagctgttaggccatgccaatctgtctaccacgcaaatctatactcatcttgattttcaacacctggcctcggtgtacgatgcggcgcatccacgcgccaaacgggggaaataa

SEQ ID NO: 75522 - DNA, 717 bp, Citrobacter koseri
atgcgtttttaccggcctttgggacacatctcagcactcacgttcgatctggatgacaccctttatgataaccgtccggttatcctgcgcaccgagcaggaagcgctcacctttgtgcaaaactaccatcctgcgctgcgtacattgcagaatgccgacctgtatcgcctgcgtcaggcggtacgcgaagcagagccggaaatttatcatgatgtgacgcgatggcgtcatcgcgccgtggagcgcgccatgctggaagcgggcctgtcagcggaagaggcaatggcgggggcgaacgccgcgatgatcaatttcgcaaagtggcgcagccgtatcgatgttccgcaagtgacgcatgacacgctgaagcggcttgcaaaaaaatggccgctggtggccattactaacggcaatgcgcagccggaactgtttgggctgggcgattacttcgaatttgtgctgcgtgcaggcccggacgggcgctctaaaccgttcagcgacatgtactctctggcggcggagaagctcaacatgccgatcggcgagatcctccacgtcggcgacgatctgacgaccgatgtcgccggggcgatccgctgtggaatgcaggcctgctggatcaaaccagaaaatgccgacctgatgcagaccactgacagccgtttactgccgcatatcgaaatttcacggttggcatctttgacctcgctgatataa

SEQ ID NO: 75523 - DNA, 2163 bp, Citrobacter koseri
atggacgtttcttacctgctcgaaagccttaatgataaacagcgcgaagcggtggctgcgccacgtagcaacatgctggtgctggcgggagcggggagcggcaaaacccgcgtgctggttcaccgtatcgcctggctgctgagcgtagagaataattcgccctattccattatggccgttaccttcaccaataaggcggcggcggaaatgcgccaccgtatcggtcagttaatgggaaccacgcagggcgggatgtgggtcggcaccttccacggtctggcgcaccgtctgctgcgcgcgcaccatatggacgccaacctgccgcaggatttccagatcctcgacagcgaagatcagctgcgcctgctcaagcgccttattaaagcgatgaaccttgacgagaagcagtggccgccgcgtcaggcaatgtggtacatcaacagccagaaagacgaagggctgcgtccgcaccatattcagagctacggcaacccggtagagcagacctggcagaaggtttaccaggcctatcaggaagcgtgcgatcgcgcagggctggtggactttgccgaactgctgctgcgcgcgcatgaactgtggctcaacaagccgcatatccttcagcactaccgcgaacgttttaccaatatcctggtggacgaattccaggataccaacaacatccagtacgcgtgggtccgtctgctggcaggcgataccggcaaagtgatgatcgtcggcgatgatgaccagtctatttacggctggcgcggggcgcaggtggagaacatccagcgtttcctcaaggatttcccgggcgcggaaaccattcgtctggagcagaattaccgctcgaccagcaacatcctcagcgcggcgaacaccctgattgaaaacaacaatggccgtctggggaaaaagctgtggaccgatggcattgatggcgaaccgatttcactgtattgcgcgtttaatgagctggatgaggcgcgttttgtcgttaaccgcatcaaaacctggcaggacaacggcggggcgctggaacagtgcgccattctctatcgcagcaacgcccaatcgcgcgtgctggaagaggcgctgttgcaggccagtatgccgtaccgtatttatggcggtatgcgcttcttcgaacgtcaggaaattaaagatgcgctctcctatctgcgcctgatcgccaatcgtaatgatgatgcggcgtttgagcgcgtggtgaacaccccgacgcgcggtattggcgatcgcacgctggacgttgtgcgccagacctcgcgcgaccgtcagttaaccttgtggcaggcgtgccgcgagctgttgcaggagaaagcgctggctggccgcgccgcaagctccctgcaacgctttatcgagctaattgacgcgctggcgcaggagacggcagatatgccgctgcatgttcagaccgatcgggtgattaaagactcgggtctgcgcatgatgtacgagcaggaaaaaggcgagaaaggccagacgcgtattgagaacttagaagaactggtgacggcgacgcgccagttcagctacaacgaagaagatgaagacctgatgccgttgcaggcgtttctttctcacgccgcgctggaagcgggcgaagggcaggcggatacgtggcaggatgcggttcaactgatgaccttgcactcggcgaaagggctggagtttccgcaggtgttcatcgtcggcatggaagaggggatgttccccagccagatgtcgctggatgaaggcgggcgccttgaagaagagcgtcgcctggcctacgtcggcgtaacccgcgcgatgcagaagctgacgttgacctatgcggaaacccgccgtctgtatggcaaagaggtctaccaccgcccgtcgcgctttatcggcgaattgccggaagactgcgtggaagaagtgcggctgcgtgccacggtcagtcgtccggtgagtcaccagcggatgggaaccccgatggcggaaaacgacaccgggtacaagctgggacagcgcgtgcgtcacccgaaattcggtgaaggcacgatcgttaatctggaaggcagtggcgagcacagccggttacaggtcgcattccaggggcaggggatcaaatggctggtagcggcctacgccagactggaaacggtttaa

SEQ ID NO: 75524 - DNA, 951 bp, Citrobacter koseri
atgctgagcgcatttcaactggaaaataatcgactgacccggctggaagtcgaagagtcacaaaccctgattgatgccgtatgggtcgatttggtcgaaccggacgacgacgagcgactgcgcgtacaatctgaactgggccaaagcctggcgacacgtcctgaactggaagacatcgaagcatccgcgcgtttctttgaagacgaagacgggctgcacatccactcctttttctttttcgaagatgcggaagaccacgccggtaactccacggtagcattcaccattcgcgatggccgcctgtttacgctgcgtgagcgcgaactgcccgctttccgcttgtaccgtatgcgcgcccgtaaccaggcgatggtggacggcaatgcctatgaattactgctcgacctgtttgaaaccaaaatcgaacagctggcggatgaaattgaaaacatctacagcgatctggaagaactaagccgcgtgatcatggaagggcatcagggcgatgaatatgacgaagcgctctctacgctggcagagctggaagatatcggctggaaagttcgcttatgtctgatggatacccagcgcgcgcttaacttcctggtgcgcaaggcgcgtcttccgggggggcaactggagcaggcgcgtgagattctgcgcgatatcgagtccctgctgccgcacaacgaatccctgttccagaaggtgaacttcctgatgcaggcggcgatgggcttcatcaacatcgagcagaaccgcattatcaagatcttctcggtggtatccgtggtattcctgccgccgacgctggtggcgtccagctatgggatgaactttgagtttatgccggagctgaagtggagctttggttaccctggcgcgattatctttatgatccttgcgggtctggcgccgtatttgtacttcaagcgtaagaactggctgtaa

SEQ ID NO: 75525 - DNA, 894 bp, Citrobacter koseri
atggatgctaagcaaacgcggcagggcgtgttactcgctcttgccgcctattttatttggggcatcgcacccgcgtacttcaaactgatttactacgtgcccgcagacgagatcctgacgcaccgcgtgatctggtcatttttctttatgatcgcgctgatgagcatcagccgccagtggtccggcgttaaaacgctgctgcaaacgccgaagaaaattttcatgctggcgctatcagccgtgctgatcggtggaaactggctgctctttatttgggcggtcaataaccaccatatgctggaagccagcctcgggtattttattaacccgctggttaacattctgctgggaatgctgttcctcggcgagcgcttccgtcgtatgcagtggctggcggtgattctggcggcctgcggcgtactggtgcagctctggaccttcggctctctgccgatcatcgcactggggctggcgtttagctttgcgttttacggcctggtacgtaagaagattgcggttgaagcacaaacggggatgctgatcgaaacgctgtggctattgccggtcgccgcgatttatctgtttggcatcgcggatagcccaaccagccatatggggcagaatccgctgtcgctgaatctgttgctgattgcggcaggtatcgtcaccacggtaccgctgctgtgctttaccggggcggcgacgcgcctgcgcctctccacgctgggttttttccagtacattggcccaaccctgatgttcctgctggccgtgacgttctatggagaaataccgggcgccgataagatggtgacgtttgcctttatttgggtggcgctggcgatttttgtgatggatgcgatttatacacaaagacgcaaagttcgaggataa

SEQ ID NO: 75526 - DNA, 468 bp, Citrobacter koseri
atgtcttccgtacttaccgctgagcaggccctgaaactggtgggcgagatgtttgtttaccatatgccttttaaccgggcattaggactggagctggaacgctatgaaaaggagtttgcccaactggcctttaacaatcagccgatgatggtaggcaactgggcgcaaagtattttacacggtggggtgatcgcctccgcgctggacgtcgccgccggactggtgtgcgtgggcagcacgctgacccgccatgagaccatcagcgaagacgagctacgccagcgcatgtcgcgtatgggaactatcgatctgcgcgttgactacctgcgcccgggcagaggcaaccgctttaccgccaccagcagcctgttgcgcgcgggcaataaagttgctgtggcgcgtgtggaactgcacaacgaagaacagctttacattgccagtgcgaccgcaacttatatggtgggataa

SEQ ID NO: 75527 - DNA, 870 bp, Citrobacter koseri
atgcgggcgattttgggttggttattaccagcagcaatgatgccattggctgtatatgcgcaggaagcgacagtgaaagaaattcatgacgcgcctgcggtacagggcagtattatcgcaaacatgttgcaggtgcatgataatcccttcacgctttatccttatgatacgaactacctgatctacaccaataccagcgatctgaacaaagaagcgatcagctcttataattggtctgaaaacgcgcgcaaagacgaagtgaagtttcagctgagcctggccttcccgttctggcgtgggattgttgggccaaactcggtgctgggggcgtcgtatacgcagaaatcctggtggcagttgtccaacagcgaagagtcctcgccgtttcgtgagactaactacgaaccgcagttgttcctcggctttgccacggattaccactttgcaggctggacgctgcgcgatgtggagatggggtataaccataactccaacgggcgttccgatccgacttcgcggagctggaaccgcttgtatacgcgtctgatggcgcaaaacggtaactggctgatggaagtgaaaccgtggtacgtcgttggcggcaccggcgataaccccgatatcactaaatatatgggctactatcagcttaaaatcggctatcacctgggagatgcggtgctgagcgcgaagggtcagtacaactggaataccggttacggcggggcggaagtggggttaagttacccgatgacgaaacatgtgcgtctctatacccaggtatacagcggctatggcgaatcgttaatcgactataactttaatcagacgcgtgtcggcgtgggtgttatgctgaatgacatattctga

SEQ ID NO: 75528 - DNA, 1815 bp, Citrobacter koseri
gtgttgaatctggaattgggggctaaacaggttttacaggaaacctttggctaccaacagtttcgcccaggccaggaagagatcattgagacggtcgtctcgggtcgtgattgcctggtcgtcatgccgaccggcggcggcaaatccctgtgttaccagattccagccttactgcttaacggacttaccgttgtcgtttcgccgcttatctccctgatgaaagatcaggtcgaccagttgctggcaaacggcgtggcggcggcgtgcctgaactcgacgcagagccgtgaacagcagcatgaggtgatggccggttgccgaaccgggcaggttcgcctgctgtatattgcgccggagcgcctgatgctggataacttccttgagcatctggcgcactggaatccggtcttactggccgtcgatgaagcgcactgtatctcgcagtgggggcatgacttccgcccggaatacgccgcgctcggtcagctccgccagcgttttccttccctgccgtttatggcgttgaccgccaccgcagatgacaccacccgactggatattgttcgcctgttggggctgaacgatccgttaatccagatcagcagctttgaccgtccgaacatccgctatatgctgatggagaaatttaagccgctcgatcagctgatgcgctatgtgcaggaacagcgcggcaagtccggtatcatctactgtaacagccgggcgaaggtggaggacaccgccgcacgtctgcaaagtcgcggcatcagcgcggcggcgtatcatgccggtctggaaaataacgtgcgcgccgatgtgcaggagaagttccagcgcgacgatctgcaaatcgtcgtggcgaccgtcgcatttggtatgggcattaacaaacctaacgtgcgctttgtggtgcatttcgatattccccgcaacattgaatcctactatcaggaaaccggccgcgccgggcgtgacggcctgcccgcagaggcgatgctgttctacgatccggctgatatggcgtggctgcgccgctgtctggaggagaaacccgccgggcagctacaggatattgaacggcataagctgaacgcgatgggggcgtttgccgaagcgcagacctgtcgtcgtctggtgctgctgaactactttggcgaagggcggcaggaaccctgcggcaactgcgatatttgcctcgacccgccaaaacagtacgacggcctgatggatgcgcgtaaagccctgtcgacgatttatcgcgttaatcagcgttttggtatgggctatgtggtggaagtattgcgcggcgcgaacaatcagcgtatccgcgatttagcgcatgacaaattgccggtgtacggcattggtcgcgatcagagccatgagcactgggtcagcgtgattcgtcagcttattcatctgggtatggttacgcagaatattgcccaacattcggcgttgcagttaaccgaagcggcgcgtccggtgctgcgtggcgaagtgccgttgcagcttgccgtgccgcgtatcgtcgcgttgaagccgcgagtgatgcagaaatccttcggcggcaattacgatcgcaaactgttcgccaaactgcgcaaattgcgtaaggccattgccgatgaagagaatatcccgccgtatgtcgtctttaacgatgcgacgctgattgaaatggccgaacagatgccggtttcgccgagcgaaatgctgagcgttaacggcgtcggcatgcgcaaactggagcgtttcggtaaagagtttatggcgctgatccgcgcgcatgtcgatggtgacgacgaagagtag

SEQ ID NO: 75529 - DNA, 621 bp, Citrobacter koseri
atgttgatgctatttctcaccgtggcgatggtgcatatcgttgcgttaatgagtcctggaccggactttttctttgtctctcaaaccgccgtgagccgctcgcgcaaggaagcgatgatgggcgtgctgggcattacctgcggcgtcatggtttgggcgggcgttgcgttgctcggcctgcatctgattatcgagaaaatggcctggctgcataccatcattatggtgggtggtggtttgtacctgtgctggatgggctatcagatgttgcgtggcgcgctaaaaaaacaggacgtcgccgcgcctgcgccgcagattgaactggcgcaaagcggtcgtagctttgtgaaaggtttgctgacgaacctggcgaacccgaaagcgatcatctatttcggatcggtcttttcactgttcgttggcgataacgtcggcgtagccgcgcgctggggtattttcgcgttgattatcgtggaaacgctggcctggtttaccgtggtcgccagcctgttcgcgctaccgaaaatgcgtcgcggttatcagcgtctggcgaagtggatcgacggctttgccggtgcgttgtttgccggtttcggcattcacctgattatttcgcgttaa

SEQ ID NO: 75530 - DNA, 621 bp, Citrobacter koseri
atgaccttcgaatggtggttcgcttatctgctgacatccattattttgagcctttctcccggctccggcgccatcaataccatgaccacggcaatcagccacggctatcgcggcgcaacggcgtctattgcgggtttacagaccgggcttggcattcacatcgtactggttggcgtgggcctggggacgctgttttcacgttccgtcgtcgcattcgaagtcctgaaatgggcgggcgccgcttatctgatctggctgggtatccagcaatggcgtgccgcaggcgctatcgatctcaacacgctggcgcacacacagtcccgaagccgtctgttcaggcgcgcggtatttgtaaacctgaccaacccaaagagcattgttttcctcgccgcgctatttccgcagtttatcaagccgcaggagccgcagctgatgcagtacgtcgtgctcggcatcacaaccattgtcgttgatatcattgtgatgatcggttacgcgacgctggcgacacgtatcgcaggctggattaaagggccgaagcaaatgaaggcgttgaataaggtatttggttcgctgtttatgctggtgggtgcgctgctggcgtccgcaaggcatgcctga

SEQ ID NO: 75531 - DNA, 993 bp, Citrobacter koseri
atgtttcagcagcaaaaggactgggaaacgagagaaaacgcgttcgctgctttttctatggggccactgacagatttctggcgtcagcgggaagaagcagaattcacgggcgtggacgacgttcccgtacactttgtccgctttcacgcaaagaaaaatgatcgtgtcatcgtcatctgtccaggtcgcattgaaagctacgtaaagtatgccgaactggcgtatgacctgttccatcttggttttgatgtcctcatcatcgaccaccgcgggcaagggcgctccgggcgtttgctgtcggatacgcaccgtggtcatgtggtcaattttaacgattatgtcgatgacttaaccgcattctggcagcaggaagtgcaatcggggccgtggcggaaacgctatattctggcgcactctatggggggcgctattgccacgctgttcctgcaacgcaacgccgtccagtgtgatgccatcgcgctttgcgcgccgatgtttggtatcgtgatgcgcttaccggagtggatggtgcgccacattcttgactgggccgaggggcatcagcgaatccgtgaagggtatgccattggcaccgggcgctggcgagcgctgccttttagtatgaatgtgctaacgcacagtcggcagcgctatcggcgcaatttacgtttctatgccgatgaaccccggctgcgcgtcggggggccgacttaccactgggtgcgtgaaggtattctggccggtgagcaggctttggcgggggcgggtgatgacgcaacccctgtgctactcgttcaggctgaagaagagcgtgtggtggataatcgcgcgcatgaccgtttttgtgaaatccgcgccgcagcgggccatcccgtagagggagagcgaccgcttgtcataaaaggcgcgtaccatgagatcctttttgaaaaggacgcaatgcgctcagtcgcgcttaacgccattgtcgaatttttcgacaggcataactaa

SEQ ID NO: 75532 - DNA, 801 bp, Citrobacter koseri
atgtatcaggttgttgcgtctgatttagatggtacgctgctctctcccgatcacacgttgtccccttacgcgaaagagacgctgaaattattgaccgcctgtggcgtgaattttgtgttcgcgactggccgccaccacgtcgatgtggggcaaatccgcgataatcttgagattaagtcttacatgattacctccaacggcgcgcgcgtgcatgacaccgacgggaacctggtgttcactcacaaccttgaccgcgacatcgccagcgatctgtttggcgtagtgaatgcaagcccggatatcgtgactaacgtctatcgcgatgacgagtggtttatgaaccgccaccgcccggatgaaatgcgtttcttcaaagaagcagtatttcactattcgctgttcgaaccggcgatgctggagcctgaaggggtcagcaaagtgttcttcaccagcgatgcgcatgaaaaactactgccgctggagcaggcgattaacgcacgctggggcgatcgcgtgaacgtcagtttctctacgctgacctgtctggaagtgatggcgggaggcgtgtcgaaagggcatgcgctggaagccgtctcgaaagcgatgggctacaaattgcaggattgcattgcgtttggcgatggcatgaacgacgcggaaatgctctcgatggcggggaaaggctgcattatgggcaatgcccatcagcgcctgaaagatctgcatccgggtctggaaatcattggcatcaatgccgacgatgccgtaccgcattatctgcgtaagctctttttgcggtaa

SEQ ID NO: 75533 - DNA, 900 bp, Citrobacter koseri
gtggcgctactcatcattaccactatcctgtgggccttctcctttagcctgttcggcgagtatctcgcgggtcatgttgatagctattttgcggtgctggtgcgtgttgggctggcagcgctggtgtttctcccgtttctgcgtacccgtgggcatagcgtaaaaaccattggcctgtatatgctggtgggagcgatgcagcttggcattatgtatatgctgagtttccgcgcctatctctatctgacggtctctgaactgctgctgtttaccgtcctcacgccgctttatatcacgctgatttatgatttgatgagcaagcgtcgcctgcgctggggttatgccttcagcgcgttgctggcggtcatcggcgctgggattattcgttacgaccaggttaccgatcatttctggacggggttactgctggtacagctttccaatatcagttttgccatcgggatggtgggctacaagcgtctgatggaaacccggcctatgccgcagcataacgcgttcgcctggttttacgttggggcgtttctggtggccgttgtcgcctggtctatgctggggaacgcgcagaatatgccggaaacgacgctacagtggagcattctgatcttcctgggcgtggcggcgtcgggcatcggctacttcatgtggaactatggcgcgacccaagtggatgccggtacgttaggcatcatgaacaatatgcatgtgcctgcgggactgttggttaatctggcgatctggcatcaacagccccactggccgagttttattacaggcgcgcttgtgatactggcttccctgtgggtacatcggaagtgggtcgctccgcgctccgtacaaacggcagatggtcgcatgcgtggttccgcgccgagcgaataa

SEQ ID NO: 75534 - DNA, 954 bp, Citrobacter koseri
atgatcgagattaaacacctgaaaacgctccaggcgttgcggaatagcggttcgctggcggctgcggcggctacgctgcaccagacccaatccgccttgtctcaccagttcagcgatctggaacagcgccttggcttccggttatttgtccgtaagagtcagccgctgcgttttacgccacagggggaaattctcctgcaactggcaaaccaggtactgccgcagattagccgcgccctacaggcctgtaacgaaccacagcagacccgattacgcattgcgattgaatgccatagctgtattcagtggctgaccccggcgctggaaaacttccacgccaggtggccgcaggttgagatggatttcaaatccggcgtgacgtttgatccccagcccgcgttgcaacagggggagctggatctggtgatgacatcagacatcctgccgcgcagcgggctgcactattcgccgatgttcgattttgaagtacgactggtgctggcgcccgatcatccgctggccagtaagacgcagattacgccggaagatttagccagtgagacgctgttgatctatccggtacagcgcagccgactggatgtctggcggcatttcctgcaacccgccggcatcagcccgtcactgaaaaacgtggataacaccctgctgctgattcagatggtcgccgccagaatgggtattgccgccctgccgcactgggtagtggagagtttcgaacgccaggggctggtcgtcaccaaaaccctgggcgacggtttatggagccgcctctacgctgcggtacgcgatggcgagcagcgtcaggcggtgactgaagcgtttattcgctcggcgcggaaccacgcatgcgaccatctgccgtttgtacggagcgcggagcgacccacttccgatgtacccacagggaagccagtatcacaagcgcgcctgtaa

SEQ ID NO: 75535 - DNA, 2262 bp, Citrobacter koseri
atgacaatccgcaatcacaccctcggttttcctcgcgttggcctgcgtcgtgagttaaaaaaagcgcaagagagctactgggcgggtaacgccacccgtgaagacctgctggcaaccggacgtgaactgcgtgcgcgccactgggatcaacaaaagcaggcgggcatcgacctgctgccggtgggcgatttcgcctggtacgaccatgttctgaccaccagcctgttgctgggcaatgtaccggctcgtcatcagaacagcgacggctcggtggatatcgacactctgttccgcattggccgcggtcgcgcgccgaccggtgagccggctgcggcggcggaaatgaccaaatggtttaacaccaactatcactatatggtgccggagtttgtgaagggtcagcagtttaaactgacctggactcagcttctggatgaagtggacgaagcgctggcgctgggtcacaaggtgaaaccggtactgctggggccggtaacctacctgtggctgggtaaagtgaaaggtgagtcgttcgaccgtctgagcctgctgaacgacattctgccggtctacaaacaggtactgaccgagctggcgaaacgcggcgttgaatgggtacagattgatgaacctgcgctggtgctggaactgccgcaggaatggctgaatgcttacaagcccgcgtatgatgcgctgcaaggccaggtgaagctgctgctgacgacctattttgaaggcgtcacgccgaatctggataccatcgccgcgctgccggtacagggtctgcacgttgatctggtacacggtaaagatgacgttgccgaactgcacaagcgtctgccgtctgactggctgctgtctgcgggtctggttaacggtcgcaacgtctggcgcgccgatcttacggaaaaatatgcgcaaattaaggacattgtcggcaaacgcgacctgtgggtggcctcgtcctgctctctgctgcacagcccgatcgacctgagcgtcgaaactcgtctggatgcggaagtgaaaagctggtttgctttcgcgctgcaaaaatgcggtgaactggcgctgctgcgcgatgcgctgaacagcggcgacacggcaaaacttgaagcgtggagcgcgccgattcaggctcgtcgccactccacccgcgtgcacaacgcggcggtggagaaacgtctggcggcgattaccgcccaggacagccagcgtgccagcccttatgccgcacgtgcccaggcgcagcgtaaccgttttaacctgccgtcatggccgaccaccacgatcggctcattcccgcagacgacggaaatccgcggcctgcgtctggacttcaaaaagggcaaccttgatgcgaatcactaccgtaccggcatcgctgaacacatcaaacaggcgatcgttgagcaggagcgtttaggtttagacgtactggtacacggtgaagctgagcgtaacgacatggtggagtacttcggtgaacatctggatggttttgtcttcacccagaatggctgggtgcagagctatggctctcgctgcgtgaaaccgccggtcgtcattggcgatgtcagccgcccggaaccgatcaccgtggagtgggcgaaatacgcgcagtccctgactgataaaccggtgaaagggatgctgaccggcccggtgacgatcctctgctggtcattcccgcgtgaagatgtgagccgtgaaaccatcgctaaacagattgcgctggcgctgcgtgatgaggttgccgatctggaagcggcgggaatcggcatcattcagattgatgaaccggcactgcgtgaagggctgccgctgcgtcgcagcgactgggatgcttacctgcaatggggtgtggaagccttccgcatcaacgctgcggtggcgaaggatgatacccagatccatacccacatgtgttactgcgagttcaatgacatcatggattctatcgcggcgctggatgcggacgtgattaccattgaaacgtcgcgttctgatatggagctgctggaatcgttcgaagaatttgaatacccgaacgaaatcgggccgggcgtctacgacattcactcgccgaacgtaccgagcgtcgagtggattgaagccctgctgaataaagccgctcagcgtattccggcggaacgtctgtgggtgaacccggactgtggcctgaaaacccgcggctggccggaaacccgcgccgcgctggcgaacatggtcaaagccgcgcagaatctgcgtcaggcataa

SEQ ID NO: 75536 - DNA, 810 bp, Citrobacter koseri
atgacaacgatacaacaatctggctttgcacctgctgcttccccccttgctaccacaacggttcacacccctgatgacgccattatcgcaggcgtaacatccattcctactcagggtgatgagatgcccgcctggcacgcgcggccaaaagtgaacgatggcgcgttacccgttgtcattgtggtgcaggagatctttggcgttcatgaacatattcgcgacgtttgccgccgcctggcgctggaaggatatctggctatcgcaccagaactctatttccgcgaaggcgatccgaatgattttgccgatatcccaacgctgttaagcggtctggtggccaaagtaccggactctcaggtactggcggatctggaccacgtcgccagttgggcctcccgcaacggcggcgatgtacatcgtctgatgataaccggcttttgctggggcgggcgcattacctggctgtatgcagcacacaatccacagttaaaagccgcggtagcatggtatggaaagctggtcggggacaaaaccctgaactcgcccaaacacccggtggatatcgcgaccgatctgaacgcgccggttctggggctgtatggcgggcaggacactggcattcccgtggataccgtcgaaaccatgcggcaggcgctgcgcgcagcaaacgccaaagcggagatcgtcgtttacccggatgcagggcatgcttttaatgcggattatcgtccaagctatcacgaagaatcggcgaaagatggctggcaaagaatgctggggtggtttgcgcagtacggcgggaagaaataa

SEQ ID NO: 75537 - DNA, 762 bp, Citrobacter koseri
atgtccaagtctgatgtttttcatctcggcctcaccaaaaatgatttacaaggggctacgctggctatcgtccctggcgacccggagcgtgtggaaaagatcgccgcgctgatggaaaagccggttaagctggcatctcatcgcgaattcaccacctggcgtgctgagctggatggtaaagctatcatcgtctgctctaccggtattggcggcccgtccacctctattgcggtagaggaactggcgcaactgggtattcgtactttcctgcgtatcggcaccactggcgctattcagccgcatatcaacgtgggcgatgtgctggtcacaaccgcgtctgtacgtctggacggagcgagcctgcactttgcgccgatggagttcccggccgtcgccgattttgaatgtacgactgcgctggttgaagcggcgaaatccgtgggcgcgaccactcacgttggcgttaccgcctcttctgacaccttctatccgggtcaggaacgttacgacaccttctctggccgcgtcgttcgtcgtttcaaaggttctatggaagagtggcaatcgatgggcgtcatgaactacgaaatggaatccgctacgctgctgaccatgtgcgcgagccagggtctgcgtgccggtatggtggcgggcgttatcgttaaccgcactcagcaagagatcccgaatgcggaaacgatgaaacagaccgaaagccatgcggtgaaaattgttgtggaagcagcgcgtcgtctgctgtaa

SEQ ID NO: 75538 - DNA, 1428 bp, Citrobacter koseri
gtggatatcacaatcattttgtatgccgtgttggcgctggcaggtgtgggggtaggctggctgatcgccagttatcaacaggcgcagcataaggccgaacagctggcggaacgtgaagagattgtggcgtcgctcagcgctgcaagacagcaggttgcgctaagcgaacactggcgcgaggagtgtgaactgctcaataacgaactgcgcaatctgcgggacatcaacacctcgctggaagcggatctgcgtgaagtcaccacgcgactggaggccactcagctgcatgcggaagataaaatccgccagatgatcaacagcgaacagcgcttaagcgagcagtttgagaaccttgccaaccgcatcttcgagcagagcaaccgccgggttgatgagcaaaaccgccagagtctgaatagcctgttaacgccgctgcgcgaacagctggatggcttccgtcgccaggtgcaggacagctttggtcaggaggcgcgtgaacgccacaccctggcgcatgagatccgcaatctacaacagctgaatgcgcaaatgacgcaggaagcggtgaacctgacgcgcgcgttgaaaggcgataataaaacccagggtaactggggagaagtggtgctgacgcgcgtacttgaagcctcgggtctgcgtgaaggttatgagtatgaaacccaggtgagtattgaaaatgacgcccgctcgcgtatgcagccggatgttattgtgcgtctgccgcaagggaaggatgtcgtcatcgacgccaaaatgacgctggttgcctatgagcgctattttaacgctgaagatgagtacacgcgcgaaagcgcgttgcaggagcacatcgcgtcagtacgtaaccatattcgcttgctggggcgcaaggattaccagcagttgccggggttacgcacgctcgactatgtgctgatgttcattcctgtcgagcctgcgtttttactggcgctggacagacagcccgaactgattaccgaagcgcttaaaaataatattatgctggtcagcccgacgacgttgctggtggcgttgcgtacgattgccaacttatggcgctatgagcatcaaagccgtaacgcgcagcacatcgcagacagagccagcaaactctacgacaagatgcgcttatttatcgatgacatgtcgtccatcggccagagtctggacaaagcgcaggacaactaccggcaagccatgaaaaaactctcctcagggcgtggaaatgtgctggcgcaggcggaggcttttcgtgagctgggggtggaaatcaaacgcgagataaatccagatctggttgaacgtgcgacctcgcaggatgaagagtatcgtttacgcgcggttcctgaagatcaacaggatacgccttgtgctgatgatgagcggataaatcagcaatcgcactag

SEQ ID NO: 75539 - DNA, 756 bp, Citrobacter koseri
atggtggaagattcacaagaaacgacgcactttggctttcagaccgtcgctaaagagcagaaagctgacatggtggcccacgtttttcattctgtggcgtcaaagtacgatgtcatgaatgacttgatgtcatttggcattcaccgcttgtggaagcgcttcaccatcgactgtagcggcgtgcgtcgtggtcagactgttcttgacctggcgggcggtacaggcgacctgacagccaaattctcgcgtctggttggcgaaaccggcaacgttatcctggcggatatcaatgactcgatgctcaaaatgggccgcgagaagctgcgtaacattggcgtgattggcaatgttaagtacgtgcaggccaacgccgaagcgctacctttcccggataacacattcgattgcatcaccatttcgtttggtctgcgtaatgtgacggaaaaagagaaagcgctgcgctccatgtaccgtgtactgaaaccgggcgggcgtttgctggtacttgagttttctaaaccaattatcgagccgctgagcaaagcgtatgacgcatattcattccacattttgccgcgtattggctcagtcgtggcgaatgatgcggacagttaccgctatctggcggaatctatccgtatgcatccggatcaggacaccttaaaagcgatgatgcaggacgccgggtttgaaagcgtcgattactacaacctgacggcgggcgttgttgcgctgcatcgtggctataagttctga

SEQ ID NO: 75540 - DNA, 606 bp, Citrobacter koseri
atgccttttacacccttcgtgaccgcaggaatcgaaaatctgctcaatacctttctgtaccgttcaccggcgctgaaatccgccagagcgcgtttgcaggacaaggtgctgcgtgtggagctcaaaggattttcgacgccgctcgtattggtgttcagtgaacgccaggtcgatgtgctgggggcatgggaaggcgaggctgattgcacggtcatcacgcatgccagcgtgttgcctgaattgcgcgatcgccagcggcttaccgcgcttattcgcagcggcgagctggaggttcagggcgatattcaggtggtacagaattttgtggcgctggccgatctggcggaattcgatcccgcagagcttttagcgccttataccggcgatatcgcggcggaagggatcagcaaagtcctgcgtggcggcgctaagtttttacgtcataacattcagcgtcagcagcgttatatcgctgaggcgatgactgaagagtggcgtatggcgcctgggccgctggaagtggcatggtttgcagaagaaacggcagccgttgagcgtgcagtagacgcgctgactaaacggctggaaaaactggaggccaaatga

SEQ ID NO: 75541 - DNA, 1641 bp, Citrobacter koseri
atgacgccaggtgaagtacggcgcctttatttcatcattcgcacctttttaagttacggccttgatgagctcatccccaaaatgcgtatcacgctgccgcttcggttatggcgttactcattattctggatgccgaaccggcataaagacaaaccgctgggtgaacgattaaggctggctttgcaggagctggggccggtgtggatcaaatttggtcaaatgctttccacccgtcgtgaccttttcccgcctcagattgccgatcagcttgcgctattgcaggataaagtcgccccttttgatggcgcgctggcgaaagcacaaattgaagaagcaatgggcggcctgcctgttgaagagtggtttgatgactttgacatccagccattagcctctgcgtcgattgcccaggtacataccgcgcggctgaagtcgaacggtaaagaggtggtgattaaggttatccgcccggatattctgccggttattaaagccgatttaaaactgatctaccgtcttgcccgttgggtgccgcgcctgctgccggatggacgacgccttcgcccgaccgaagtcgttcgcgagtatgaaaaaacgctgatcgatgaactgaatttgctgcgtgaatcggcaaacgccatccagctacggcgtaatttcgaaaacagccccatgctgtatgttcccgaagtctattccgactactgtagtcaggacatgatggtcatggagcggatttacggcattcccgtttcggatgtggcgacgctggaaaagaacggcaccaacatgaagctgctggctgagcgtggcgtacaggtcttctttacccaggtgttccgcgacagttttttccatgcggatatgcaccctggcaatatcttcgtcagctatgagcatcctgaaaatccgaaatacattgggattgattgcggcattgtggggtcgctgaacaaagaggataaacgctatctggcggagaatttcatcgcgttctttaaccgtgactaccgcaaagtagcggaactgcatgtggattcagggtgggtgccaccggataccaatgttgaagagtttgagttcgctatccgcaccgtgtgcgagcctattttcgaaaaaccgctggcggaaatctcgtttggtcacgttttattaaaccttttcaatacggcgcgtcgatttaacatggaagtccagccacagctggtattgttacaaaagacattgctgtatgttgaaggggttggacgccagctctatccacagttggatctgtggaaaacggcgaagccgtttcttgaatcctggattaaagatcaggttggcattcctgcgctcaccagagcacttaaggaaaaagcgccgttctgggtcgaaaaaatgccagaaatacctgaactggtgtatgacagtttgcgccagggcaaatatttacagcacagtgttgataagattgcgcgcgagcttcaggagaatcatgtgcgtcagggacaatcccgctatttactgggcattggcgcgacgttgttgttaagtgggacattcctgcttgtcagccgcccggaatgggggctgatgccttgctggttaatggccggaggcctggtcgcctggctgattggctggcgtaaaactcgctga

SEQ ID NO: 75542 - DNA, 267 bp, Citrobacter koseri
atgggtggtatcagtatttggcagttgttgatcattgccgtcatcgttgtactgctatttggcaccaaaaagctcggctccatcggttccgatcttggcgcgtccattaaaggcttcaaaaaagcgatgagcgatgatgatgcgaagcaggataaaaccagtcaggacgctgattttaccgctaaatctatcgctgataagcaaggtgaagcgcaaggcgaagcgaagaaagaagacgccaaaagtcacgataaagagcaggtataa

SEQ ID NO: 75543 - DNA, 549 bp, Citrobacter koseri
gtgtttgacatcggttttagcgaactgctgttggtattcgtgatcggcctcatcgttctggggcctcaacgattgccggtagcggtaaaaacggtagcgggctgggtacgcgcgttgcgatcccttgcgaccacggttcagaatgaactgacccaggagctgaagctccaggagtttcaggacagtctgaagaaggtcgaaaaagcgagcctccagaatctgactccagaactgaaagcctcgatggatgaacttcgtcaggccgcagagtcgatgaagcgttcctacagcgccaacgatcctgaaaaagcgagcgatgaagcgcataccatccataatccggtggtgaaggataacgaagcgcagcatgaaggggttacacctgccgccgctgaaacccaggccaattctcctgagcaaacaccggaaacggctgatgccgggcagcctgaacagacggaagccgcttccgtaaacgagatggacgcagaaaagaaatccgccgcgactgttgtcgaatcctccccctcgtcgagtgataaatcgtaa

SEQ ID NO: 75544 - DNA, 780 bp, Citrobacter koseri
atggctgtagatgatacccaacctcttattacgcatctgattgaactgcgtaagcgtctgttgaactgcattattgcggttattgtgatttttctggcgttggtctatttcgccaatgacatttatcacatggttgccgcgccgctgatcgaacagatgccgcagggtgcgacgatgatcgccaccgacgtggcctcgccgtttttcacccctatcaaactaactttcatggtgtcgctgatcctgtctgcgcccgtgattttgtaccaggtgtgggcgtttattgcccctgcgctgtataagcatgaacgtcgtcttgtcgtgccgctgctggtgtccagctcgctgttgttctatatcggcatggcgttcgcctactttgtggtcttcccgctcgcgtttggtttccttgctaataccgcgccgcagggcgtacaggtttctaccgatatcgccagttacctcagctttgtgatggcgttatttatggcattcggtgtctctttcgaagtgcccgtcgcgattgtcctgctctgctggatgggggtaactacccctgaggacttgcgtaagaagcgtccttacgtcgtggttggcgcgtttgtcgtggggatgctgctgacgccgccagatgtcttctcacaaacattgctggcgataccaatgtactgcctgtttgaggttggcgtgttcttctctcgcttctatgtcggtaaacgacgtccacgagaagaagatgacgaggccgagactgagcaggccgggaaaactgaagaataa

SEQ ID NO: 75545 - DNA, 783 bp, Citrobacter koseri
atgtttgatatcggcgttaatttaaccagttcgcaatttgcgaaagatcgcgatgacgtggtgacgcgcgcgctggctgccggggtgtcaggtatgcttctgaccggaaccaatctgcacgaaagccagcaggcgcaaaaactggcgcagcgttatgcctgctgctggtcgacggctggcgtacatccgcatgacagcagtcagtggcaatcagaaactgaagacgcgatcgtcgctctggcgagccagccggacgtggtggcgattggcgaatgtggtctggacttcaatcgtaatttttccacgccgcaagaacaggaacgcgcattccaggcgcagctacgcattgccgctgagttgcagatgcccgtttttatgcactgtcgggatgcgcatgcgcgttttctggcgctgcttgagccgtggctggataaactcccgggcgcggtgttgcattgctttaccggtacgcgtaaggaaatgcaggagtgcatagacagagggctttatattggtatcacgggttgggtctgcgatgaacgtcgcggtcttgaattgcgtgagttgctgcccttcatccctgcggaaaaactgttgattgagaccgacgccccctacctgttgccgcgcgatctcacgcctaaaccggcttcgcggcgtaacgaaccggcgcatctggcgcacattcttgcgcgcgttgcccactggcgtggggaagacccgcaatggctggcggccacaacggatgccaatgtcaaaacgctgtttgggattgccttctaa

SEQ ID NO: 75546 - DNA, 489 bp, Citrobacter koseri
atgcaatcctggtatttactgtactgcaagcgcgggcaacttcagcgtgcccaggaacacctcgaaagacaggcggtaaattgcctgacgccgatgatcacgctggaaaaaatggtgcgcggcaaacgtaccgccgttagcgaaccgctctttcctaactatctgtttgttgaattcgacccggaagtgattcataccaccacgatcaacgccacgcgcggcgtcagccacttcgtgcggtttggcgcacaccctgccaccgttccgtccaacgtgattcatcagctttctgtctacaaaccggaaggcgttgttgatcccgaaacgccctacccgggggacagcgtgatcatcactgaaggcgcatttgaaggtctgaaggcgatttttaccgaaccggatggcgaagcgcgctccatgctgctgcttaacctgctgaataaagaggtgaagcagagcgtgaaaaacactgcgtttcgtaaagtttaa

SEQ ID NO: 75547 - DNA, 1485 bp, Citrobacter koseri
atgaaatatcacgacttacgcgacttcctgacgctgctggaacagcagggtgaactcaaacgcattacgcttgcggtagatccccatctggaaatgactgaaattgctgaccgtacgctgcgtgcgggcgggcctgctctgttgtttgaaaatcccaaaggctatgcgatgccggtgctgtgcaacctgtttggcacgcccagacgcgtcgcaatgggcatgggccaggaagatgtcaccgcgttgcgcgaagtcggcaagctgctggcgtttctgaaagagccggagccgccgaaagggttccgcgacctgtttgataagctgccgcagtttaagcaagtgctgaacatgccgaccaaacggctacgcggcgcgccgtgccagcagaaagtgttctctggcgacgacgttgatttacagcgtattcccatcatgacctgctggccggaagatgcagcgccgcttattacctgggggctgaccgtgacgcgcggccctcacaaagagcggcaaaatctggggatctaccgtcagcaactgatcggcaaaaacaagttgatcatgcgttggttgtcgcatcgcggcggcgcgctggatttccaggagtggtgcgcggcgcatcctggcgagcgtttcccgattgcggtggcgctgggcgccgatccggccaccattctcggcgcagtgacccccgtaccggatacgctgtcggaatacgcgtttgcagggctgctgcgtggcacaaagacggaagtggttaaatgtctctccagcgatcttgaagtacctgcaagtgcggaaatcgtcctggaaggttatattgaaccgggcgaaatggcggcggaagggccgtatggcgaccacaccggttattacaatgaagtggataacttcccggttttcaccgttacgcacattacgcagcgtgaagacgccatttatcactcaacttataccggccgaccgcctgatgaacctgctgtgctcggtgtggcgttgaatgaagtcttcgtcccgattttgcaaaagcagttcccggaaattgttgatttctatcttccgccagaagggtgttcttatcgactggccgttgtaacgatgaaaaagcagtacgcgggtcatgcgaaacgcgtcatgatgggtgtttggtcatttttacgccagtttatgtataccaaatttgttatcgtctgcgatgacgacgtcaacgcacgcgactggaatgatgtgatttgggcgatcaccacccgtatggacccggcgcgggatacggtgctggtagagaacacccccattgattatctggattttgcctcgccgatctccgggctaggttcaaaaatgggactggatgccacaaacaaatggccgggcgaaacccaacgtgagtgggggcgccctatcaagaaagatcctgaagtgactgcgcgtattgacgcgatttgggatgagttggccatctttaacgacggtaaaggcgcctga

SEQ ID NO: 75548 - DNA, 702 bp, Citrobacter koseri
atgacaaccttaagctgtaaagtgacctcggtagaagctatcaccgataccgtatatcgcgttcgtttagtgccagacgcggcgttttcctttcgcgctggtcagtatctgatggtcgtaatggatgagcgggataagcgtccgttctctatggcctccacgccggatgagcacggattcattgagctgcacattggcgcttcggagcttaatctgtatgcgatggcggtgatggatcgcattctgaaagacagagaaattgtcgtcgatattccgcatggtgaagcctggctgcgtgatgatgaagagcgcccgctgattctgattgcggggggaacgggtttctcctatgtccgttcaattttgctgacggcgcttgcgcgtaatccgaatcgcgacgtgacgatctactggggcggacgtgaagagaagcatctttacgatctcgctgagctggaggcgctttcggttcagcacccgaatctgcgcgttgagccggtggttgagcaaccggaagaagactggcgtggccgcacgggtacggtattaactgcggtattgcaggatcacggtacgctggcggggcatgatatctacattgccggtcgttttgagatggcgaaaatcgctcgtgacctgttctgcaatgagcgtaacgcgcgggaagatcgcctgtttggcgatgcgtttgcctttatctaa

SEQ ID NO: 75549 - DNA, 1170 bp, Citrobacter koseri
atggaacaggttgtcattgtcgatgcaattcgcaccccgatgggccgttcaaagggcggcgcatttcgtaacgtgcgggcagaagatctctccgcacacttaatgcgcagtctgctggcgcgtaatcccgcgctggaagcagccgctatcggcgacatttactggggctgcgtgcaacaaacgctggagcagggttttaacatcgcccgcaacgccgcgctactggctgaaatcccccactccgttccggctgtcaccgttaaccgtctgtgtggttcctccatgcaggcgctgcacgatgccgcacggatgatcatgaccggcgacgcacaggcgtgcctgattggcggcgtggagcatatgggccatgtaccaatgagtcatggcgtcgatttccatcccggcctgagccgcaacgtagccaaagccgccgggatgatggggctgacggcagaaatgctttcccgtatgtacggcatcagccgtgaaatgcaggatgcgtttgccgcacgttcacacgcccgcgcctgggcagccacgcagtccggcgcgtttaaaaacgagatcatcccgaccggcggtcatgacgccgacggcgtgctgaagcagtttaactacgacgaagtcatccgcccggagaccaccgtcgaagcgctgtcgactctgcgccccgcgtttgatccggtcagcggcaccgtgaccgcaggcacttcttccgccctctccgatggcgcagccgccatgctggtaatgagcgaaagccgtgcgcgtgaactgggcctgcaaccacgcgctcgcattcgttcaatggcggttgtcggttgcgatccctcgattatgggttacggcccggttccggcgtcaaaactggcgctgaaaaaagcagggcttgccgccagcgatatcgatttgtttgaaatgaacgaagcgtttgccgcgcagatcctgccgtgtataaaagatctgggactgatggagcagattgacgagaagatcaacctcaacggcggcgcgatcgcactgggccacccgctgggttgttccggggcgcgcatcagcaccacgctgttgaatctgatggagcgcaaagacgcccagtttggcctggcgacgatgtgtatcggattaggtcagggtatcgcgacagtatttgagcgagttcaatcatag

SEQ ID NO: 75550 - DNA, 2190 bp, Citrobacter koseri
atgctttacaaaggcgacaccctgtacctcgactggctggaagatggcatcgccgaactggtgttcgatgccccaggatcggtcaataaactcgacactgcgaccgtcgccagcctcggccaggcgctggacgtgctggaaaagcaaacagatttaaaagggctgctgctgcgctctaacaaagcagcctttattgtcggtgctgatatcaccgaattcctttcgctgttccttgttcctgaagaacagttaagccagtggctgcactttgccaacagcgtctttaatcgcctcgaagatttaccggtaccaacgctttccgccatcaacggctatgcgctgggcggcggctgcgagtgcgtactggcgaccgattatcgtctggtgacgccggatctgcgcattggcctgccagaaacgaagctgggcatcatgccgggctttggcggttctgtccgtatgccgcgtatgctgggcgctgacagcgcgctggaaattattgctgccgggaaagacatcggcgctgagcaggcgctgaaaatcggcctggtcgacggtgtcgtgaaaccggaaaaactgcttgatggcgcaatagcggtattacgtcaggcgattgacggctcactggactggaaagccaaacgccagccgaagctggaaccgttgaagctcagtaaaattgaagcggcgatgagctttactatcgccaaaggcatggtggcgcagacggccgggaagcattaccccgccccgatgaccgccgtgaaaacgatcgaagccgccgcacgctttggccgtgaagaagccctgaatctggaaaataaaagctttgtcccgctggcgcataccaatgaagcccgcgcgctggtcggcatcttcctcaacgatcagttcgtgaaaggtaaagcgaaaaagctgaccaaagacgttgaaacaccgaagcaggcagccgtactgggcgcaggtattatgggcggcggcatcgcttaccagtcagcctggaaaggcgtgccggtgatcatgaaagatatcaacgacaaatccctgacgctgggcatgaccgaagcggcgaaactgctgaataagcagctggaacgcggcaggatcgacggcctgaaactggcgggcgtgatttcaacgattcacccaacgctgaactacgccggttttgatcgcgttgatgtagtggtcgaagcggtagtggaaaacccgaaagtgaagaaagcggtactggcggagactgaagacaacgtccgtccggataccgtgctggcgtcaaatacgtccaccattccaattagtgaactggcaagcgcgctgaagcgcccggaaaacttctgcggcatgcacttctttaacccggtacaccggatgccgctggttgaaatcatccgcggcgagaaaagctcggatgaaaccatcgctaaagtcgtcgcctgggccagcaaaatgggcaaaacgccgattgtggtcaacgactgccccggcttctttgttaaccgcgtactgttcccgtatttcgccggtttcagccagctactgcgcgacggcgccgatttccgcaaagtcgacaaagtgatggagaaacagtttggctggccgatgggcccggcttatctgctggatgtggtcgggattgataccgcgcatcatgcgcaggcagtcatggcggccggtttcccacagcgtatgcagaaagattatcgtgatgccatcgacgcgctgtttgacgccagccgctatggtcagaaaaacggtctcggcttctggcgctataaagaagacagcaaaggtaagccgaagaaagaagaagatgcggccgtggacagcctgctggcagaggtcagccagccgaagcgcgacttcagcgacgaagagattatcgcccgcatgatgattccgatggtcaacgaagtggtgcgctgtctggaagaaggcatcatcgccagtccggcagaagcggatatggcgctggtttacggtctgggcttccctccgttccacggcggcgcgttccgctggctggatacgctcggcagcgcaaaatatctcgatatggcgcagcagtatcagcacctcggcccactctatgaagtgccggaaggtctgcgtaacaaagcgcgccataacgaaccgtactatcccccggttgagccagcccgcccggttggcgacctgaaaacggcttaa

SEQ ID NO: 75551 - DNA, 1332 bp, Citrobacter koseri
atggaatcactggccgcactctataaaaatcatatcgttaccttacaagaacggacgcgtgacgcactggcgcgttttaagctggatgcgctacttattcactccggcgagcttatcaacgtcttcctcgacgaccatccctatccgtttaaagttaacccgcagtttaaagcctgggtaccggtcacacaggttccaaattgctggttgctggtcgatggcgtgaataaacccaaactgtggttctacctgccggtggattactggcacaacgttgagccgctgcccacgtcattctggaccgaagaggtagaggtgattgccctgccgaaagccgacggtattggcagccagctccctgccgcgcgcggtaatatcggttacatcggtccggtgccggagcgtgcgctgcaactggatatcgccgccagcaacatcaacccgaaaggggtgatcgattacctgcattactaccgtgcgtacaaaacggattacgaactggcctgtatgcgtgaagcgcagaaaacggcggtgaatggacaccgtgccgcagaagaagcgttccgttccggtatgagcgagttcgacattaacctggcttacctgaccgcgaccggccaccgtgacaccgatgtgccttatagcaatatcgtggcgctcaacgagcacgcttcggttcttcattacaccaaactggatcatcgcgcgccgtctgaaatgcgcagcttcctgctggatgccggggcggaatataacggttatgccgcagacctgacgcgtacctgggcggcaaacaatgacaccgattacgctcagttaatcaaagatgtgaatgacgaacagctagcgctgattgcgaccatgaaagcgggcgtcagctacgtggattatcacattcagttccatcaacgcatcgcgaaattgctgcgtaagcatcagatcgtcaccgatatcagcgaagaagcgatggtcgagaacaatctcaccgggccgtttatgccgcacggtattggtcatcaactgggtcttcaggttcatgatgttgcaggctttatgcaggacgataccgggacgcatctggccgcgccgtcgaaatacccttatctgcgctgcacccgcgtgctgcaaccgcgcatggtgttgaccattgagccggggatctactttatcgaatcgctgttggcgccgtggcgcgaggggcaattcagcaagcacttcaactggcagaaaattgaagcgctgaaaccgttcggcggcattcgtattgaagacaacgtggtgattcacgaaaacggtgttgaaaatatgacgcgggatttgaaactggcgtga

SEQ ID NO: 75552 - DNA, 615 bp, Citrobacter koseri
atggacagctggttaatccctgcggcgccggtcactgtcgaggaagagatcaaaaaaagccgcttcattacgctgctcgcccacacggacggtgttgaagcggcgaaagcctttgttgatgctgtcagagcggcgcatccagatgcgcgtcatcattgcgtggcatgggtggcgggcgcgccggatgattcacaacagctgggattttctgatgatggcgaaccggcgggaacggcgggcaaaccgatgcttgcccagctaatgggcagcggcgttggcgagatcaccgctgttgtggtgcgttactatggcggtattctgctcggcaccggtgggctggtaaaagcctacggcggcggcgtgaatcaggcgttgcgtcagttaacgacgcagcgcaagacgccgttaaccgaatatactttgcagtgtgagtacggccaactggccggaatagaagcattattagggcagtttgccggtcaaatcgttaccagcgattatcaggcattcgttcggctcagggtggcgcttccttatgcaaatgtggatgaattttcagcaaggctggcggattttagccgtggttcattgcaattgttagcgattgaagaataa

SEQ ID NO: 75553 - DNA, 1452 bp, Citrobacter koseri
atgcattttcgcgccattacccgaatcgttggactgttggtcattttattttcgggaacaatgatcctccctggactggttgcgttgatctaccgtgatggggcggggcgggcattcacgcagacattctttgtcgcactggtgatcggctctctgctgtggtggcccaaccgccgggagaaaggcgagcttaaatcccgcgaagggtttctcattgtggtgctgttctggaccgtactgggaagcgtgggggcgttgccgtttatcttctctgaaagcccgaacctcaccattaccgatgctttttttgaatcattctccggcttaacgacaacgggcgcgacgacgctggtggggctggactctttaccgcacgcgattctcttttaccgccagatgctgcaatggtttggcgggatggggatcattgtgctggcggtggcgattctccctatcctcggcgtcggggggatgcagctctaccgcgcagaaatgccggggccgctgaaagacaataaaatgcgcccgcgtattgcggaaacggcaaagacgctatggctgatttatgtgttactgacggtggcctgcgcgctggcgctatggttcgccggaatgcccgcgtttgacgccattgggcacagtttttctactatcgcgatcggcggtttctctacgcacgatgccagcgtcggttatttcgatagcccgaccattaacagcatcatggctatcttcttgctgatctctggctgtaactacggtctgcacttctctttattaagcgggcgcagcctgaaagtttactggcgtgaccctgaatttcgcatgttcattggcgttcagttgacgctggtagtgatctgtacgctggtgctgtggttccacgatatctataactcggcgctgaccacgctcaaccaggcgttctttcaggtcgtatcaatggcgacaaccgccgggtttaccaccgacagcatcgcccgctggccgctctttctgccggtgctgctgttatgctctgcgtttatcggcggctgtgcggggtcaacgggcggcgggctgaaggtgatccgcatcctgctgctgttcaaacaggggaaccgtgaactgaagcgtctggtccatccgaatgcggtttacagtataaaactggggcaccgtgcgttgccggaacgtatcctcgaagcggtatggggattcttttctgcttatgccttagtctttattgtcagtatgctggccattatcgcgactggcgtggatgacttttccgcgtttgcctccgttgtggcgacccttaacaacctggggccagggttaggtgtggttgcggacaactttgccagcatgaaccctgttgcgaaatggattctgatcgccaatatgttatttggtcgtcttgaagtctttactttgctggtactttttacccctaccttctggcgtgaataa

SEQ ID NO: 75554 - DNA, 546 bp, Citrobacter koseri
gtgaaaacattgattcttttttctacccgggacggacaaacgcgcgagatagcttcttatctggcctcggaattaaaggagctggggatctgggcggatgtgattaatctccatcgtactgaagagctggactggcaaagttacgatcgcgtggtgattggcgcctctattcgttatgggcattaccatgccgctttccaggagtttgtgaagaagcacgctacgcgcctgaacgcgatgccgagtgcgttttattccgttaaccttgtcgcgcgtaaacctgaaaagcgcacaccgcagaccaacagctacgcgcgcaagtttctgatgagttcgcagtggcgacccgatctttgcgccgttattgctggcgcgcttcgttaccctcgttaccgctggtatgaccgtctgatgattaagctcattatgaagatgtctggcggtgaaacggatacgagtaaagaagtggtctataccgactgggaacaagtggcgaattttgcccgcgacatcgcccaattaaccaacaaatcgttggcaaaataa

SEQ ID NO: 75555 - DNA, 1500 bp, Citrobacter koseri
atggaaattcaagaatttattgcaaagtatcgaaatcatccagtgctcttcatcggaactgggtttagcttgcgatatctctctaattcctatgattggaatggattactctcacatatttgtttcgaactcactggtgataaagaaacatatcttgatattaaatctaaatgtcaaatcaatggtgaatataaatatgataaaattgctagtgatatagaaagaaaattcaatgaaactttgtctaacgatagaaatggaaagtttaaagaaataaatgatattttctataaagagatggataagggaattaatttaagtagatttaaaatatatattactcagctattatcaactgtagaattaaaagatgaaaaaagcgaagagatcgctgaactcattaagatgagaaaaaatatcggatcaatcatcacaacgaactatgatttattgattgagcaactctttgaatttgaaccactaataggcaatagcatacttttaagtaatccttatggttcggtctataagatacatggttgtgtgtcagccccttacgaactaacgattacagaacaagattatgactatttcgataacaaatatgaactaattagagcacaattactctcactatttattcataatcctgttatctttattggatacagcattagtgacagaaacatacagcaaattctaaagactattttttcctatgtacctactaactccgatatagccaacaaaattagaagtaattttttacttgtggaatatgaaaaagattcacgatctactgccatatctgaacacgatatatacatagggaatgctaccactataagaataaataaaatcaagaccgacgattacgcttctatatataaaagcttatcagacttaatattaccagtttcagcaatggatattagaaaagttcaaaaagtctggaatgaaataaaaagcggtggtgaaattgaagtaaaaatcacagaagatttagaccagttaaaaaatggacaaatggtattagccgtaggttctcataaacgagtcaagtatgagtttcaaaccaagcctgaaatgatgcaagattatttcaagattgtagaggaagcaaataagcaattaatcatattgttaaataaacagaagatacagagttcccagttctttccaatctttgcgttcagtgaaatctgtcctgaacttgacaatatagaaatgtataaggaacagcaaataaataaacttgctgatcattttgaaagaacctctaataataactgtaaaaatattcacttatctacagaagaaataattgaagactttacaatccctttatctaaaaaagatgattgcattttccatagttattatgagaatagaattccgtctgaacaaataaaaacttacttattaaactgcaaagataaaaacagcacatcatacagaagacttttatgtttatatgactatatcaactacagcatatga

SEQ ID NO: 75556 - DNA, 297 bp, Citrobacter koseri
atgtcttatttaatcaacaaggaaatctacaaaaagaagtctgatatcataagcagagcccaaaatataatttcggtcacaaataccggtgatgaaattaatggtgaaaattatgatttcatcttaggcctgctaaaaaaccatgacgaatgggaacataaaacttcaaatggttttctaggaattacagttggtaaatcattacacggtacaacgtgtttctatattaaaacaaatgatgggcttaaagatatatcctttcattatgcagttaagtgcttaaaaaaaacacaataa

SEQ ID NO: 75557 - DNA, 801 bp, Citrobacter koseri
atgtttgctcgctctctccgagagaccgagctttttgaccatgcagatacacatgggattaccgttggtgaagccttcaatgaggcatttgccttactcagacaaacgggtttgcggaatgagtatgtttatcgttctgcactcacacacaatcttttacttgggaagcattcattaagaactgcctgtatgcttaatgaattcagaatcggctcttgcaaggctgatctcatcattctgaacggaactggaacggtttacgaaataaaatccgaaagagattccttaagccgtctacaaaaccaaataacaaactaccgtaaagcatttggaaaaatctatgtaatagcaggttcagagcatatagatgatgtgctgaaaacaactgaatctaccattggggtattgagtttaacccgatggaatcgaatctctactataagagaagctgaagaagttttagactttatatgccctgttacaatctttgaatcattaagaattaatgaggcgaaaattattgcttccgagttaggtataaaaattcccaacttgccgaatacccaaatgcatggtttcttaaaagaagagtttagtggcctaccacctgtttctgtatataatttaatgctaaaaactctaaaggaaagcagaagtttactttctttaagagagttgattctcaacttaccaaagtctttacaaccagcagcactttctattcagcttcgctctaaggatcatgagcgattaattaatactatgcagcttcctcttaatgaggcattgttatgggagtaa

SEQ ID NO: 75558 - DNA, 933 bp, Citrobacter koseri
atgtattatccttattttcgtgggaaacaatttgaactgttggctattagagatactgctaatgtaatggctgaggcaggttttactccaattatagagcctgtgagagaggctctcaatggtcttgagcgaacactgaaaacaataaaagaaaatgatggtagggctattgtcatcattaatccggcatgtggtgatcattctaccgatggacaaagtatagctcaattattaaaaaatgaatttagtaagtatgaaaaaatttctgtaggaatacttcttgataagagtatgactattactaaggttgataacctccttcattcagatctcgttcatgaagtcacctttattcatgccgggtttgatgagccaaaagctttacatgaaagatttggggatggatacaaacatgtatttatttctaactattgttctaaagcttatcgaaaacatttttcgggttcagaaagaattttaattaaagatggctttgaaaaaagacgaaatgctgaccatcccgattctgagttcttttcagatcttcatcttaattatgaagaagagggtatgaatggttttggtgatttcttaattgttggtgatgaatttagtgagtccggtggccctgcgtatgcggttgctattcatcttacttacattaatacgaagcatgaagatgaaatgtacatctatcattttgtttcgacaacacgtgacacaccgacagacccagcaggtaagttcgcacagtcccttgataaattaatggctgctttaaattcaggcaaatccatgttgcttgaaacgtcggctatcaaagagtttaggcgattacataatccgagtcacttccctggtttagggacagttaaaaaattgtctatgattcaccatatagaaaccctagccgatttcatggatggtaaataa

SEQ ID NO: 75559 - DNA, 1026 bp, Citrobacter koseri
atgatcaagtactgctgtgcgagctgttttggggataatggtttaaagaaaaatatcataccttcactttccccagattttggcgattgttcgtattgtggtaccaaaggtattgagattattgagcctcatgctttatttgatcattttagttcattgataaacatctacgaaaatcatccggatggtaagagtcttgttgcacatttgaaagaggattggaagctattttcacatcctcttttagatgaggctcatgccaaagagttattaggtgatatacttgatgatgggaatatcgttagaaaaactttcgtactttctgatgcttataagagtgaatctctcgcattatgggatcatctttgtcaggaactcatgtatgaaaatagatattttttgaataaatcacttgatacagatagacttggcgagttattaagtttccttgctttagatgatttttctaaaacttggtatcgagcccgtatttatgcagacgatgctgcttttacgatagacaaaatgggggctcccccaaagagattagttagtcatgggagagcaaatcctacaggtataccgtatttatatcttggatctaaaccagatacagctttgtctgaaattcgacctcatacaggtgacagagcttgtgtcgcagagtttactctaagagataacttgactctaatagacctaagaaaccctcgtgaaaccgtttcaccgtttttattaaccgatccaggtgaaatgggtaaaatgcttgcagatataccttttcttgaacgacttggttatgaactaacaagacctgtattacctaaaagtgcagcccttgattatattccaagtcaatatatatgcgaatttattaagaaaactggctttcatggagtactttatagtagttctgtaagtgaaggaatcaatcttgctctttttgatccgttaaatgcgactggaggcaatgtaagtatttattatatagataaagtcgaagttagtgtaagcaaacaagattaa

SEQ ID NO: 75560 - DNA, 228 bp, Citrobacter koseri
atgacggaaaaccaggtcagttatttcttttccaaactcagcaatgcctgccacagccgtttttcatcgcaccgctaccgccataccgttgccacagaattgatgcagaaaccggagcaaaatctgtatgtcacgcagaaactactcgaccaccgcgatattaaggtgacgctcagctatattgaacacaatgtcgagatgctcagaagttgcgtggagagagattga

SEQ ID NO: 75561 - DNA, 594 bp, Citrobacter koseri
atgacctttgaacagctcctggaagagtatttttttgcccgtctgttgcgccctgaaacccagagctgctattgcacggcggtaaatcagtttacccactggcgcaacgtactgcccgccgaagtcacaccgcatatggtgctggagtggcgtcattacctgttaaatgtgcgatgtatcaagccggtgagctggaaccactatatgcgccatatgcgagccttgtataacttcgcgattgaacagggattactggaacagttcatcaatccattccagaaaacatcactgcgggaatctcgtaagaaaaagaaaaccctgacccacgagcaaatcctcgcatcccgtaaagtgctgaaccaatatatcgaacgggagaaaatgcagcgtggctatcgttcgcctttatatccggcatggtgttggctgaccgtggttgaaaccttcaactacaccgcgatccggctgaatcagcttatccatctgcgcattaaggatgtcgatctggtccatgacacgctgtttattcagagcgaaagcagcaaaagccatgatgaacacattgttcccatcgcctcccggctgcggccctag

SEQ ID NO: 75562 - DNA, 1263 bp, Citrobacter koseri
atgaccttcatatcaacggcggagcatccctgctctgccgtttttctccattccaataaatttgcgcagcccaataaacaatttcgccccaaatctgacggcaccaaaaggcaaaatccaaagggtgaaggggaagagagtgaaggggtaacgggcttacccgaaaaaggggaaagggccattatgcggatatggctgacgcgcaaaaagcaaaacaccacaccatccactggcgaaccagacgtcgcggagggatggctgcatcctgaatccgcgcaaacgctactggctgaaactacccgccaacagttgatccagtttattcggcagagcaccgcccttcccgcctcactgtttgaacgcttctggctgataccaatccaccgcttcgcagaactggcgcagtcgtttccggcctcggaaaaccaccatcacgcccacgcgtgcggtctgctcgatcacagccttgaagccgcctgctatgccgcacggctgcggcagagttatctttttccacctgatgcagcgccggaagatcaggccgcgcagtccgaacgctggacgacggttatcatctgtgccgcgctgctacacgatctgggtaaacttgtcacggatgttgaggtggaggacgccagcgggcaacgctggtttccgtggcatggtccactgacccagccttatcggttccgctatctgccgcaacgtgattacctgcgccatccggctgcggcagcccttctgctcacccaactgctcccaccggaaagtctcgactggctcgccgccgatgctgctgccttgtccaccctgctgcactgcctgaacggacagtatcagtatgccgggctggcgggtgaactggtgcagaaagccgaccgggcgtcggtggcgtttaatctcggcggcgatccggtcaaggccatccatcgtccgcaaacctcgctgccacagcaaattatcactgccttacgcgacctgctggcaaatgagtttcggctcaacaacccaaacggcggttctgatggctggctgaagaagcgctgtggctggtcagtaagaacgctgccgatgctgtccgtggttggttgctgcgccagggtattgacgccgtaccgcagcataacgtgcggctgttcgatgatatgcaagcacaccagttgctcattccctgtgaggataaagccatctggcattgccggattgaggccagcggcggctggagcagtgaactcacgctgttacgcttttcccctttgctaa

SEQ ID NO: 75563 - DNA, 912 bp, Citrobacter koseri
atgaacagaagcaacgatctttaccagaaagtcaccgatgaaattatcgccgcgctggagaaaggcgtgatcccctgggttcgcccgtggcgggaaggggaaccggtggtgccgatgaatgccttatccgggcgtttctatcacggcatcaatattcctctgctctggaacagcgctgagcgacagggatatgaaagcgatcgctggctgaccttcacgcaaattcgcaatgcgggcggtaacatccgcaaaggcgaaaaatctacactggccgtgttctatctgccccagcagcgcgaagtagtggacagcaatgggagcacggttcttgatgctgacggcaatcctaaagtgacgtcttacgctgtagtacgcgagttccggctgttcaacatccagcaatgtgaaggactgccggaggcgttttcacagcctgtcgtgatggtcgatgaccctatcgccgctgccgagcaggttgcccggcaaagttcgatagtgatcactcaccgacgccagaatcgggcgtattactcgccaggacgcgactgcatcatcatgccgcatcctgagcagttcacttcgcgtgaggattattacggcacgctgctgcatgaactgacgcacgctacaggacacgcttcacggctgaaccgggatggcatcaccgccggaaaccatacctttggcaatccgacgtatagttttgaggaactcgtcgccgaaatggggtctgcatttctctgcgcccatgttggcattcaggcgaagctacagcatgacagctacatcgtatcgtggctgaaggtattgcagcaggacaaaaaagcgattttccgcgccagcgggttagcgcgtaatgcctgcgagtatctgcttgaacgggcgcagcagccgttagcgctgagcgcatga

SEQ ID NO: 75564 - DNA, 294 bp, Citrobacter koseri
atgccaacttcatcttgccctgaagcaaaatccttatcgttgtctgtctcatctgaggcatgggaaaaggtagtcagttttccacccgatccctctcaggaagatgaccgtctcgaaaatctgattgtcgccaccatgctgacattcaaaagcgcaggcccggaccgtaagagcattaatttcggtctgtactgtttgcccgctgacggcagcagcaacgtaccgctgatgacgccgctgcgcttaacgcttgaagataaccatctgctggttactgcccttcatacctgctga

SEQ ID NO: 75565 - DNA, 1086 bp, Citrobacter koseri
atgcatgatcgtaaccagacaaattacttttacatgtttcctgcggtacgtggaatgcaggcaggaagagagttttacattgcgacctgcccattgctgacaattccaaagattttcagctttgatgaagaagaggttccacctgaactgcgggcgcagcgctcattaaataaagcacggatacccgacatggtgcgttatctgttggataatccagataactatattttttctgcacttaccgcttctgttgctgttgatgtgcattttgaagcaattaacgatgctgggagtctgggtacgttacaagtgcctatgggagcccaaattttgattaatgacgggcagcatagacgaaaggctatcgaagaagcattaaaagcaaaccctgagctgggatatgacaacattccggttttgttcttcgttgatcgggggttagtgagaagccaacagatgtttgctgatttgaacaaatacgcggttagaccaagcccttcgttggcgaccctctatgatcaccgagatccaagcgctcaacttgcctgccatctggctgaaaatattgagccgtttattggtttcacagaaatggaaaaatcaagcatatcatcgctttccaataagctttttacgttgagcagcatcaagcaggcgacgaaagcattactcggtaaagggctgaaagatttgtactccgatgacgaaaagcataaagcggaacgtttctggcgtgctgtgtttggagttatgcccgaatggcaaatggtacgacgccgtgagatttctccagcgagtatgcgtcaggaatttatccattctcacggtgtaggtttacaggccatcggtttgatgggtaagggattgctacaacattcgccatataactgggagcaaaagttggaaggtttgagagatattgactggcgaaaggcgaatccggaatggctaaaacgcacgatgctgcatggaaaaatcagcaaatcagcgatatcgatacacttaaccagtaatgctctgaaacagaaactcggcattcctttaaattcagaagaacaaaaattagaagagcaactgaagtcatga

SEQ ID NO: 75566 - DNA, 1635 bp, Citrobacter koseri
atgagtcatttattacaagcatatgatcttgatagttacgaagattttattaatcaggaaacctttgctgggcgtccattacatgaatttgtatctgagatccagcggatctatctggctgataaacgtccttgggttattggctacagtggcggtaaggattcgtctgctgtaacaactcttatttatctggcattactgggattgtctcccgagcagcgtaataagcctgtttttgtagtatgttcagatactttggtcgagacaccagtagttgtaaacctgatcagtcgaacattgaagctaatagaaagaggtgctcgccaggatggtttgcccatattggtgcaacaagttgttcctaaaacgcatgaaacattttgggcaaaccttttaggaaagggatatccggcacctactcggcagttccgctggtgtaccgaacgtatgaaaatcaatccggttagtgactttattcgagataaagtaagtcagttcgaagaagttattgtggttttagggtcccgttctgcagaaagtgcatcccgtgctcaggtaattgcaaaacacaagattgatgggactcgattagctcgtcataccaccttagctaatgcgtttatctatacccctattgatacttggggggttgatgatgtctggaaattgttgagaggtgcattccgctattcaagtgatgtaaccgaatgggaaacaccttggggaggtgggaacaaccttcctttatggactttgtatatggactcctctggtcagggggaatgccctatggttattgatgacagcaccccgtcttgtggtaattcgcgatttgggtgctggacttgtactgttgtaaccaaagatcgggctatggaaagtctagttcaaaacggagagcaatggatggctccgttgttggagtttcgcaatatgcttgcgaagactactgaaccagaagagaaagataagtaccgtaactttaagcgccgaactggaaaggttagttatcagtatttaaaagagggggaggatatttcggttgaacgaaaacatgttcctggcccctatttattgaaatatcgacaagaatggctggagaagttgctcaacctggataaggtcttgaaagcacaaggacatgatattcagcttataactgaaggggagttacatgctattcgtcaggagtggcttaatgatcctaatgaacctgattggaatgattctctgccaaaaatctataaacgtgtatatggtcatgatttagcttggcagatagatgaacgagttcgttttgctggtgcagatgcaggactacttcatgaactagccactgaacatggaattgtccctgagatggtcatgaagctgattgatcttgagatctcttttgaaggaatggggcgccgtcaaaatgttcaaaagaaagtagaatcgatattacaacaggattggggaacatttgaagagatcaaggaaaaatactcttcggttcagaaaaagaatcaattcgatatgcttttaaaagaaaaagaagatattgaacttgctttggatgatctatcaaatgattttgataggcttgagaacatattaaatagtgtgaccagtaatgatgaggtggcaaaatga

SEQ ID NO: 75567 - DNA, 1998 bp, Citrobacter koseri
atgattataactaaactggttatgcgtaatttccgcgtgtttcgtggtgaacatgtgctcgatcttgctccaaatgatgaacctggaaagccactaattttgattggtggtcttaatggttctgggaaaacttctattttaactgcaatacgacttgccttgtatggatcacaagcatttgatgatgtttttaccaagaattcctatattgagagattatcgtctttagtccataacggaaaacctgatgattttgaagattttacctctgcttttgtggaacttagtttcacacttcgaattgatggagaagatgtcacgtactgtacaaaacgatcatggtcaaaaggtaggggcgatcaactctctatttctgagaatggggtgcttatggagggaaaaagcccggagcagttacagggtttcctaaatgagctgatccctgttggtgttggtgaattattcttctttgatggggaaaaaattgccacgcttgcagaagatgagactggaagcattttaaggatagctatgcaacgtctactaggacttgacgttgtatctcggttaaaaggagatctaaatacctacatcaaaaatgatcagaaaaacaagcttaatcgtgttgcacaggaacaagttaaagtacttgaaaaaaagaagaatgaccttatttcatatgctaatgaaaaaagaagcgaagcactcgattatttgaaaggtattgaattaaatatcaaagatttacgtaagtatgaagctttattgatggcgcaaggaaaaaattttgcagactcaaaagtgagtgaggaagcgaaattaagaagtttagagactgaaaaactatatacagaaaagcaattgcgtaatacccttgacggatatttccctttttcattagcgccaaatatatttagagatctttttaaccaagtagaactggaaaaagaaataataaaagctaccgcattcaagtcaggtcttgatgattttctgaaaaaactccggaatgaattggcgatccggtcatctacaacgttgaaaattgctacagagacaattgaagatcaattaaaagattttctattgactcaaccgtccggggatatcctgctagatgtctctgaacgtgagtctggtattttacataatgcagtctacacattatcgcctaaattaaaaaaagaaaaaaatagactttgcgaagagataaaaagaattgacttggctattgaacatgcaaaagaaaatatcgaaagatctcctgaggaagaacagttaagtagtactttcaatattattaggacttttgacaagaacatacgtgatgccgtagatgagtttaaaaaactacaccttgatgctaaaacagcactaactgaagcgttagagtgtactcgagaacagcagaagcttcatgacgcaataaagaataaagttgcactggaaaatgctagtgattatgccctatctatattacctcttcttgatgaatacgccaaaaaactgacacagaagcgtatatctgaagtggaacaagagttttctcgagtatataagaagttggcaaggaaggacgagttaaaattacgagctaaaattgatgtaaatacatttaatgtgaatcttcaagatgaagatggattaataattgatcgtagtttattgtctgctggtgaaaaacagatatatgcagtcactatgcttgaagcattagggaatgtttctgggaaattacttcctattataattgatactcctttaggaaggttagactcgcatcatagagataagttagttgaacactatatcccagatgctagtcaccaggtcattatcctatctaccgatacggaaattgatgagagatattacaaaaattatctctgtgattgtatttcaaaatcttatgaaataagatactcaccatttagtcaatcttcaaagattgaagacggctatttttggaaaaatgcaaaatgtgaggtgaatgcctaa

SEQ ID NO: 75568 - DNA, 348 bp, Citrobacter koseri
atgttacctaatcgtttgcaactgaacattcgtgttgaagatcaacttaaaagactaaaagctagcacgggggttaatccaaatatttctgctcggatagcatttttccgttctgtagaaagtggctatcgttttgacggaaatgactataaaactgatggcaatatgagtatggataaagctgtatggttgggagatacaggtgtagctactgaacttatattgaagatgttgtatcccaattttgatggaaaaaaaatgatgcaagcttgggctgcacatgttgacgatgggtctgcatccttgcgaaaccatcgtgaattaattagttttactacatctctttaa

SEQ ID NO: 75569 - DNA, 1629 bp, Citrobacter koseri
atgcgagcagcgagaataaatgacatctggcgttatgtaaacgacgtagaacaatatagaaccagaataaaaaaagtagaaataaaaaaactatctggatttgaagatataacaatagagcctcaaagtgctatcactgcgatttgtggcaagaatggtgtaggaaaaacaactttcttaaaattaatataccaagcaataaaatcacctaaaaaacagctttctcctttgagattcggtgtatatgatttccagattgaaatattagataatcgttcgaatattatatttgatagaaattcagaacatcatttagaaaatgtttactatcttgaaccgagtcaagaatgcgcaagaatattagattatataaaacgaactaaaaatattaatgagctaattgaaggtgaaggagagaatatatcattcaatgatgataaaacaaaacctcaaattgaaagtattattggcaaaaaatataaaagaatagtattcagagagatcactggagcaattgaaaatgattatacatttccatattttgagattgaattagctagtggggcaaaatactcaaatattgacatgggaatgggagagtttgcggtcttttatatcttatggtttataaaaaactgcgaaagaaactcaatcatttttatagaagaaccagagaattttatatcggctaatacccaaatttatctaatggataagattgcagagcaatcaaatagcaataaactttggattatgttatcaacgcattccgaacatatattgtcaaaaattagtgttgagaatacaaaagtattacaaaaacgtttgacagacattactcatctgattgaacctaaacaccgtgaaaagtacttatcggctttagggttagtccctcagttagatggtgtaatttttgttgaagataatttctcagctaactttacgaactatttattatcgaaacttgcacctgcattcctaaaaagctatagaattttaccaatacgttgtgattctaatattgaaaaaatagctctccactatgaacccctcagaaaatccccgataaattacatcggtattttagatgcagatcagaaagaaaaggtagcccaatacattgataaagatatatatatcagttcattgccaggtggtgtaacagctccacctgaaactattgtttgggatgttttaatcgataatagtaaaaatatatctgatgcattagacgtcgatcatgacacgatgcagaatgtaattatggaaaatagcaccgctgattaccatgatagatatacaaacatatcaaaggagctaagtataccactagatgttttgcttcaaaaaatattctcatcatggataaacatccaagaaaatagagaattagcagaagactttatcttcgccattattaattacaataaaagatatacatccttagttgaattgcaacctgacaataaagtaaagctcatcgccgatgataagactattttcttaaaaagagacgatatatacttccctcagaatagaacgaaaccactagtcaacggcatggaattaaaatttaatttattctttaacagttattcattcatagctaaagtaaccgcagaataa

SEQ ID NO: 75570 - DNA, 1185 bp, Citrobacter koseri
atgaaaatagatgatagaaaagataaagtaattaatctattcaatgatataaactcaggagagatcaatacccgccctgatttccaaaggggagaagtatggtcatcttcgaagaaaaaaatgttaattgacactatattaagaaaatggcctataccgccaattcatttagttaaaatagatgataaaacatttgaagttcttgatggacaacaaaggttaactgcaataagagattttataaataataaattctcaattgatggtaatattcagcctttagatgatgaaatacaagcattaaatgggaaaaaatataagcagctcgatgatgatacgaaaagggaatttaacacatacagatttataatttatgaaatgatggaatattctgctggtgaacctggtgaaatatttcacagattaaatcaatcagttaaattaacctcatcggaacaaaggaattcattatttggagaattaagaagccaaacggctgattttgttagattaatgcaagataatggcgtgaataaagatctattaggattcacaaactctagacttgcttataatgaccttatagcaagagttggatatttattagaaaagaactctcttcgcgcaacacttaacgacaaagtgttaaattatcgatttagagatgaaactggatttgactcagatatattagaacagctaagtttctcaatattaaccttagctaatatgcgtaagcatttagatgaatgtaactatagcattaatctaacaaaagcatcatccttaaactggatatattctttagcagaatataaaaatatcctttcgactaattcagacaatcttatggtagcatttttcaaccttgaaagagctaagcactcagtaaaaaacaatgaacaaattcctgaagacataattcatttctttggttccaatgaaacaaacataaaagaattattacttatatatattgagaggtcatcatctagagtaatgacgacagcatctattataattcgcgacattataataaatttatcactgtataaggcaggtattcctctgcctgatagtattgacacattacagcttgatactctagcagatgtaatagcatctcataatttcgatgtcaaagagtgtattgaaaacctctctaacgaatggaaggtttattaa

SEQ ID NO: 75571 - DNA, 1482 bp, Citrobacter koseri
gtgacgaccaacagctatctggaatactttctgacgctgctcggctgggtggtcaataacgggttgtggaatgcgattagcgccaccggattattcgccctgccgctgctgattaagttgctggcactgtggttacaggccagaagtcagggggcggatgagggcaataaagccgcgcttgctctggtatggaccgagcacctgatgtacacctcgctgctggtgattatgttcacctgcgtgccaatgttgaacatcgacctcgataccatcaaatatgacaccacgcgctcaaagcagtgcggcatgtcggtgccacaacccgccgataccggctatcaaccgattataaactcgctcggcggtaaaaccgccgccgtcccggtctggtggtactttattcatgtgatcagcaaaggcatcaccagcgcaacggttgccaccctgccctgccagccggatctgcgtcagatccgttttgaggtgcagcacacccgaatcaaggatccagcgctggctcaggaacttcgggatttcgtcgaggagtgttatgccccttcccgcgcccgtctgaaatttcgtgccggagagctggaggatgacaccagtgatgatactgcctggctgggatcatcgtactttctcaacacgactggttactacgataccgaccatgccctttcaccgcacagtgcgtggccgtacagcacatcacgcgatgccgggctggccgataccggcgcgggcggctatcccacctgtaaacagtggtgggccgacgatactgttgggctgaaagcgcggctactgcaactcccggctccggatatctggacagcgtttaaaaagatcggccagtcgcaggcagtatatgaagaggccgtgttgcgctcgctggtcagtgagcgaaatatgcaggtatcgcagaacgggcgcgtttaccccggctatggtggcaatgtcgatggcaccatagccaatgccgccacccggctggcatccagcgccggaaatatcctcggcagcattgcggcgttcccggcgtttgacagcgtacgtcaggcgctaccgatggtacaggcgctactgcaaatggcgctggtgatctgtattccgctggtaacactctgttcggcatgggatgtgaaagtagtgatgacactgacgtttgtgcagtttgcgctgttcttccttaccttctggtgggaactggcgcggtggctcgatagctggctgctggatgtgctctacaacagtgatacccacagtagctggaatctggccgggatccagaatacgcaggatgacgtgatcattaatttggtgatggggtcgatgtttctggttctgccgactttctggatgggggcgatgacgtgggctggggtgagagttggcatagcggtgaatggggcgctggcgggcggggttaaggtggcacaggatagtgggggtaaggctggggggatgcttgggaggtga

SEQ ID NO: 75572 - DNA, 258 bp, Citrobacter koseri
atgaagcggctgatgctgtccggcaccctgctgctgatctgcatcgcagcgacattttacctggcatcaggtaacacgccgcagattaaccgcagcgatctgctgctctggcgtataacactgtacgctgcaatgtccggtgtgggctggcgtctgtacgatcgcttcccaccttatcgcccgacaattcgtcgcatcaccctgtggtttatcgtgctgattgcgctcaatgagatcgcgccggaggtattccggtga

SEQ ID NO: 75573 - DNA, 1368 bp, Citrobacter koseri
atgcgctcagcttactgtcttctgttcgtcgcctttctcgctccggcagacgacaaatatcaatacaaacaacagggggcgatcagcgactggatgtattaccgcatcggcggcggtgcggccatctctccaccgccaacccggcgtaacaccttcccgctaacggcaggtgtaagctggaacagcgatatgatgtgcggcaatttcgatatcgacaccacagtccgtaatcagctcaacggcgtgacggacggcttccagcaactgatgggagaagtcatcgaaagcgcaaccagcgcggtcgccagcctgcccgcaatggtgatccagcgagccaatccccagctctacgatctgctgaccaacggtgtgcttcagggacgcctcgacttcgataagtcactgttaagctgccagaatatggcaggcaagatgaccgattatgcgctcggtccggcatggacgcagagcgcccaggcggagaactatcagggaattgcggccagcgaaaaagacgccgttcgtgctgaccagagagcagccgaagaagcggcagagaaaggcaaacgctgggttggtggcgaacatcgcggcggtaaaggccagccgcccatcaaactgatacgcgatacgacggttgcaggctacaacatcctcaataatcgtagcgcgaccagcaccggttccgtctctggcagtgactgccagggtgagttatgtcaggtctggagcaagcccgatgacgccgcacaatggctgacgcgggtagttggcgaacagactattaacgtcgccccggataacgatcaatccggcggcactgaccagcaaagcggcgcacaatccggcgtcgggctgacgccgcttattcaggaagaaaaggataagatccagccgctgattatcgatatggtgaaccgcagccagcccgttaatgatgacacactggcgcaggccagcggcggcgaactacatctgacgcgcggcgtgattgaggcgctgcgcgacgatcccgatgcagcggtgcttatccagcggctctccggcgaactggctctctcccgcgtgatggagcaggcgctgatggcccggcgcacactgctggcaggaatgcgcgaacccaatgtctccggagaaaaagaggcacaaaccgcgctgacccagaccaccgcccagctcgaccaggaactgtctcagctcaagctggagctggatatgcgtcaggcgctggcggataacgccgcgctcaccatccttgaacgccagaccatgcgggcgaagaccaaaggccaggcggtcggcgtagaggacgacaccgataaacgggtggacgatctcagcaagcccacaggtggagaggcgcaatga

SEQ ID NO: 75574 - DNA, 933 bp, Citrobacter koseri
atgaatctccaccggacattactttgcttactgataatgatgccgtgcgcaggtaaagccatcactacaccggaaatcgctgcctcagccctgtcgccgacgtgcgtaaaatatcaggtgatcggtgtctgctactggcttttttgttcaccgtttggctgctcggtacgcacgtcggtaaaggtacgccatttccgaccggacctggtggtatcggcctacagcgtgaccgggcaaaacccgtgggctgagatgtcgccgctcagttcgccgctgcccggtatcgccgaagccggtggcgatacaaatccccgcactgtcggccagcacagcaaagtccgctttaaaaatgctgatgcgattggcttccctgccggtgatgcgctggcaaacttctttgcccagtttggctacgtctgcgccccgtcgtcacaaccttttctcccttattttctcagcacgctggatgcgctcgcctggcgcagcggtgtaccggaaatgttctacccagaggcgttaacgccagggctgcgcgaagtcagcaaagacggtgatatgtggggcaatgtctacccacgagccggggcgctcagccagacgcatgactataaggccggggcggtcatcgcccaacgcgttgccgatctggtaacgcgcagtggtcagccgcatgtttatattccgctgactgcctcttcacacgacggatactggccgccagatcctgttatggaaggcgacagcagtaaccatcagtggcagatgctggctcccaaaaagtctgcctcctgcgccattttcccggatgggtctaccaccgactcttacgccgataaactggcagaagacggtgcatatgtctggacgctgtggcgcccctataaatgctgcccgcgtcgtgggcaaacctttcttggcagcagcggaggttaa

SEQ ID NO: 75575 - DNA, 768 bp, Citrobacter koseri
atgtcagatatcaatccacgcaatgcgttaccccaggatcgggaatcactctacaatctcgtctggcgcgaacctgcggagcgcatagccgcgcaatatggcattagtacaacgttactggcaaaacgatgtacagaaatgcggatacccaggccgcttgccggttactggaaagcgctggcgaaaggggctgcacctgcggtgccagcattgcctgatttgaagaagggcaaggtagaaaaagcttcaggcaaagccagtttggccgttcagcccctcacaaaagtaccatctaaagtagccatgccagcaccgcgaaagcgagcaaggacggcgggtagtggctatgcactgattgatgatctcaaaacttaccttcccgtctcttccgtcacaaaagacggctactacaaaccaacgaaaaagaagctactcgatctgaatgtttcagaaacggggttcaacagtgctatcgattttcttagtcggttctttgctgcattgggaaagcaagggtattgggtacgattggctgaaagcgctgagggacttcattgtcagggcatcgatatcaaagaagatctaaaagagggaggtttgcgctacgacagtttatggcgccctttttcagcaagtattatttgcattgaagatatgttgttcggctttagcctagctgaaatgacggaatatgttccagcaaaagagattaatggtcaatacattcgcgatgaaaccaggcatccgctggatgcgaggaaagcatga

SEQ ID NO: 75576 - DNA, 537 bp, Citrobacter koseri
atgcgaggaaagcatgaacagccgtttcgctatgtcattaaacataatttacctacaggacgatttctgctacagctttattcgccatactcatcaacaaaatggcagactgagtttcggcagacaaaacagtgtgggcttgtaagccagatcccgaagatcatttctgcgatgtatgatgttgttccgctgattaagaagcagcaggaagaggccagagttaaggctgaagcacggcggatccagtgggggctggatgagaagagatatctggaaaaggagcggatcagaagggaaaaagaggcatataacgtcagtctggccgaattgaaagctattatggtgcagtgggcggaagataagcgtatagagcagtttttttgtgaggcggagctggatgtggcaatgttggatgggcaaaagaaggcactggtaatggagcgtttgcaactggcccgtcaactcttatcagtagatacggcagttgagcgattactaaagtgggaaacgccgcaggaacagtttaacaagggatag

SEQ ID NO: 75577 - DNA, 801 bp, Citrobacter koseri
atggaaataactatagctgagtttgttcccaccttaaatgaatacgtagatgttcatataaaaaaccccgaccccgaaattaaaataaaagtggatgatttttgtgactttcctggaccagaaaattgtcaaagtaaaatagagaaaataaaaaagaaaaaaagaaactcccttttaaacagctttaataaaagagttgatgatgtaatcatgctcaatagatatgcactgcatcaatacaatataaatgcagagaaaattgccccgttatttaaaaattacgatgaacagcatggtggaatgtttagcattatttatgacgagcatgatgaaactaaagttgattgtgctcgaatgggcttcatcaatttcaactatgtttgcgaactattaacagcaaagaaaattgctgatgaaggtttgataattcatttgtgggcaacaattgaacagtttgttaagcgagccataataatcatgggaggcgaggagaaagaaatgccttttaaatggcatgagctgaaaagattatctaccaaaaatgggattgatttagaatcccttccatcatatgccataattaatgaaattagagttgttaacaataaaataaaacatctttatatagttgatgatgaacttagtaaataccctggctttgaaaaatataaaggtaaaaaaatgagtcttgtcgactacaggacgcatgaatacgctttggcaacatatcattttatgaatagattagttatgtttatgggaccgattataagttatgcgccagatagaatcattgattag

SEQ ID NO: 75578 - DNA, 456 bp, Citrobacter koseri
atgaatcatgatggatataatttaaaattcgaagctgaaaatggaaaatcaaaaaaactaaaggctacatttaatcaagtttcagatattagaaaatttgaggtcgagctttactggaaaagggcaacttacttctgggcattaatagttgttgcctttactggatacttctctattctgtcatcagaacatataccaagtaagttctttttatcatttgtggtctcgtgtattggttttatttttacttttgcatggtttctttcaagcagagggagtaaatattggcaagaaaattgggagaaccacttagacttgttagaggataaagtaactgaccctctatacaaaactttacttgagagaccaggttacgaaaatctcgccgagaaatttataacgggccccatgagtgtatctgtttctaaaattaatcaatgggtcagttttttatag

SEQ ID NO: 75579 - DNA, 696 bp, Citrobacter koseri
atgagcaacgctactgattggatttctgctggagcgaatatagtgatggccgtcactgcatttatggcttatcgtgtcggtcgaaattacttattaaacttaactaataatgacgcatacaaattagcatttgaaataaaggatgaattattacctaacctaaaaaaggctgttagattcatttatagatataactcaatagaacgtttattaaatgaattattgaacgataaaaagatcaacaccagaaaaataaaaaccattttcaatcgttcactggcgattagaggtagttacttaaacataaaaaagcaagagaaaagtgttaaactttctttaaggaagctagatgggtacggatggggttccattgggaaaaaagaagtcttccttgaagaaattacaaatgcctcatcattgttagaagcaacttgcgataaatttgatgatgaaattgattcttttgtttctgctgtatttggggtcgagtccatagaaggagatatcgaatttgatataagcaaagccactttggatgaaaattattcattagatactagacatataaataaattattagacttaataacaaaaataagatcgtcaagagatagccttgatcattcatatgaaaaatacatggctaatgataactatattgggttatttttcaaacgacaaaaaggtcatatttaa

SEQ ID NO: 75580 - DNA, 675 bp, Citrobacter koseri
atgaatatattctgctccgggtttgagggtgaactgtttaaccgtgaaggcgaggcctggccggaagcggatatcactctggtggatctggcgatgtttgcccgcgaaggttacgaagcgcaactggcgattgcctatatctcgctgattaaccatatcaacaacttcggcgaacgtgaccagcatctggctcgtcccatcgttaatattaccgacgaagcgcatatcatcaccgtcaacccgctactggcgcggtttctgacgaagggtttgaagatgtggcgcaagttggggatctggctttggctggcaacgcagaacctgagcgacttcccggatgatgcgaagaaactgctcaatatgatcgagtggtgggagctactggtgatgccacccaaggaggtggagcaggttagccgctttaaattcctgacgccggaacagcgacagctcctgctaagtgcgaccaaagcgccggggaaatataccgaaggcgtggtgctttcgccgcgtgttgaggcactgttccgcgtggtttcccctgccctgtggctggctctggggatgacggagaagcatgagaaggcagagcgcatgcggattatgcgggagtttgggtgtagtgagctggaggcggcggtgagggtggcagaaaggtgctttgtcagtggctga

SEQ ID NO: 75581 - DNA, 924 bp, Citrobacter koseri
atgaccggagagtctgcacgcggcgacggcattaacgcgctgttcgatctgctgccggaaggggtgattatggcgctgaccatcgtcgtctggccgcaggaccggctggaggaacatttaagtcgcctcagcgaccgcgccatcggcgagaacgtcgaatcggagtacaccaaaaaagactgtcaggaggtgcgccactggctgaaggacggccacaaactctaccgcagcgcgctggcgttttatctttccgccccggataacggcgaactgacccgacgcgtgcgcagcctgaacagtctgctgctgaatgcgggtatggtcccggtacaggaaaatgacgaactcgccccgctcagttcgtggctgcgctggctgccgatgtgtttcgacccagcgcgggacaagcgccagctctacacccgcttcagctttgtgcagcacctcgccaacctgctgccgctatttggccgcgagagcggcaccgggcatccgggcgtcagctactttaaccggggaggcgggatgttgtgctgggatccgctcaaccgcgaggaccgcgcccagaacaggcacctgttattgctcggcccaactggcgcaggcaaatccgccaccctgaacgccaaaatcgcgcaactgatggcgctgcatcgcccgcgcctttttatcgtcgaggcgggcaactcgttcgggctgatggccgattacgcccgtgagcatggcctgacggtgaataaaatcagcctgaaacccggctccggcatcacgctgccgctatttgctgatgcctggaagctggcggaaagcgatgtgccttcagcagaaccagatgatgacgatcccgaagatgccgataacgaacaacgcgatctgctgggcgagatggagatcacggcccgcctgatgatcactggcggctaa

SEQ ID NO: 75582 - DNA, 450 bp, Citrobacter koseri
atgtttatcgaacgcgcggaagggatcctgcacctgcgcgatctttaccaggaggcaggcattgaatgctcgacgcagctggcgctggcggagcaactcacccgcgacggctatcccgtcagcccgtcgcaaatcagccggatgctacagaccgtagactggctgctgccctgcatccccaaagcgctatacggcggcctgacccgaaagattatcgatcgcctgctggcgctacgcagcgcagcggaacaggtgtgggcaaagctgataccgctggagcgccaacccgaatttaccgacctgttcagcaccgccctcgccaccttcaacggcgagccggaagccgtggtaccacaactggtgcaggacgaactgctcggcgagatgagctcatggctgtttgaccagcgcccgcatagctgcgcaaaacgcccaccgtcggccatatga

SEQ ID NO: 75583 - DNA, 345 bp, Citrobacter koseri
atgtgcgcttcacacctactcaaccgctggcttcacggtgccagcaatatcggagaacaggagatggtccaggtcagtctggagcaaatccagccgttctccctcaatccccgcgtcacccgcaaccccggctatgacgtactgaaagcgtcaattctcgcccgcgggctggataacccgccagtgttgacacgtcgccccggcgatgaaaaatatatgctcgccagcggcgggaatacgcgcctcgcgatcctcaatgaactgtggcaggagacgcagcatgagcgttaccaccgcgtctgctggccgttcagaccgtggccggaaacgctgtcaccgcagtaa

SEQ ID NO: 75584 - DNA, 195 bp, Citrobacter koseri
atgaatagcgacagatttttacgcttacgccaggtggaagacaaaatcggcttcggtaaatcgtggatttatcggcaaatacagctgcaacagtttccgccatccatccgactcaacagccgccacgtcgcctggctggaaagcgaggtggacgcgtggatccaccaacgcatccggcttacccgcgatgtctga

SEQ ID NO: 75585 - DNA, 891 bp, Citrobacter koseri
atgcccccacataaaatccgccaggagtggctgacgctggacgaggccgcagaagtcatccggcagcacaacatcacgttgctgcccgccgacctaatccgccatgccctgcatggcgatctgtcgctcccggtctacttcccttctcccgtacttctgagaccactcaatcccccttgccgctttgcctgccgattcagcaagcccccctttccaccttcgcagtgcaacaaacccggcaaccgcaaagtgatggcgaactttccgccatgcagacgcgacccgactctgcaactgaccaccagccatctgtggaatttgccgttaatcggccttgagcgcctgctgctccaccagcaactggcgaaaacattgaatcgcccttgccccaaagatacccattgctgcaaccagattggcatcgtggtctgcgatgagaacgacagctactaccagctctgttgccgcaaatcgttgcgggagcttttactggaactgctcgccacgcagaacaacctccaggaagagctacatctgctgattggccagctgtatggcaatggtcgcaatgaccttaaatcccggctcaatctgtccgtctgctacctgcaggacacgctgcctcctgacgctctgttcgtcatccgccgcactcatctcgaggccttcctgacccgtcatcagccagaatcaaaggagcggatcacctccgcgctttcccgtttgctgtggctggcctgcaagcacaacccgcaactggacgatgaaatgctggagcatccctacaaactgctgaacattttcgaatgctgggcgcgtgaggatggtatgcacctgccgctgagccccgagacgttgaaaaccgccctccagcgcggcgcaccgccataa

SEQ ID NO: 75586 - DNA, 780 bp, Citrobacter koseri
ttgaatagttcggaagacgatttgcttgaagtagcgtggtatttgtcgaagtacggtaaatctcaaccacccgtgggactgagtgttcagaaatggaaagaggcttatgacttgttttatccccgtttcggggcgggcaaaaccgccaatgagtttcgcaatagtctgaaaaatagtcgtgaccgttttgattcttggcttagtgatgtgcgtgtcggctggcttgacgagcagggcgctcctgctgtgctttctcattcagcgcagcgtgtgcatcagcgattgagtgtgctttcagacagtgcgattgagcagcgcgttctttcgttgatatcttctgatggagatgaacaggcgcaacgtgactgtcttattattcagcaagataaaagtattgaagataccgtacgcgagcagctgattgcggcacggctggggcagggtacctttcggaaaaattgtctcatgctgtatccggcatgccctgttacgggaacgacttttgcgccgttactgcgtgccagtcatataaagccgtgggctgcctgcgagaatgggaatgagcgccttgatccttttaatggaattatactggccgcacatattgatattttattcgatcagggatggatttcgtttgagaacgatgggcgcttattaattagtaatgagctggatattagcgttaaagagcagtgtttgttgccagagaaaataaaggcgttttctgttgaatcgtattgttatctggagtggcatcgggagaatttattgagatag

SEQ ID NO: 75587 - DNA, 3516 bp, Citrobacter koseri
atggatgaaaatgctttagggtttgcctcatactggcgcaactcgcttgcagatgctgagtcaggaaagggcagttttgaacgcaaagacgccaaaaatttcactcactggcatgagatagcggcgggacgtcttgacgaagcgatcgtcggtaaattttttgagggagaaaaagacgacgtcgaaacagtcgatatcatcttgcggccaaaggtttatttccggttactgcagcatggtaaggaccgttccgctggtgcgcctgatattgttaccccgattgtgacgtcagccctgttgagccgtgaaggttttttatatccgactccagcgacttccattcccagagacctgcttgaacctttgccaaaaggggcattttcgattggtgagattgagcagtatgacaaatacaaaacgacacatacgtcattctctatcaacgttgattacagcgttgataagactgccgaaacagatgaagaacgagaagcacgatatgcagcctggcagcaggattggcgtcaatatctggatgattcagagaggctactgaagaacgttgtcggcgactggattaaaaatcccgagcaatatgaactcgctgagcacggttatattgttaaaacggcgcaatctggcggcgccagtttccatatcctttcgctttatgatcacctgcttatttgcaaaaaggatgtgccgctcttcaatcgcttcgcctcgcgagaggttcatgctgcagagtcattacttcctccggaagcaaaattcagcgacagacttggacactccggggataagtttccgctggcaaaggctcagcgcgatgccttaagccattttcttgatgcaagacatggcgatatccttgccgtcaatggtccaccgggaaccggaaaaaccacgttggtgctttctatcatcgccacgcagtgggcccgagcggctctcgaaaaagcggaacctccggttattatcgcgacttcaacgaataaccaggctgtaacgaacattatcgaggcgttcgggaaagatttttcccagggcactggtgcaatggccggacgatggttgccagagctgaaaagcttcggcgcttattttccctcaagcactcgtaaagccgaggcagccaaaaaatatcaaactgaagatttcttcaaccaggttgagtcaaaagagtatgtagaggatgcactgctgttttatctcgagaaagctaaagcagccttccctgaaaaagattgttcatcccctgaaaaggtaattgaactcctgcatggtcagttggcagcaaaatccgaacaactggtaaggctgaacgcaacatggcaaacgttaagcctggttcgggcggcgcgagagcttattgctaacgacattgagcaatatctcgataatttaaataaattactttccgggcaagaacaaaaagtcactctactgaagagtgctaaagcggaatggaaaaaatatcgggccagtgaatcactgatctattcattattttcatggctaccagcggttcgcagtaagcggcagtaccaaatacaactgtttctcgaagataaattaggtgcgctgattgcgggaaatcagtggtctgatcctgaaaccatcgaacgtaatatagatggactgctcaactccgctgagcgcgagcaaacaacctaccggcagcagattgactccacccatgaaattgttcttaaagaacagcaggtagctcaggaatggcagaggctggcacttgatttagggcatgagggcgacgaggaactgagcttctcacaggtcgatgaactggctgatacgcagattcgcttccctgcattcttactgacgactcactactgggaaggccgttggctgatggatatggccagcattgatgacctgcagaaagaaaagggcaagaaaggtgctaaaggggtagccgcccgatggcaacgccgaatgaaacttaccccatgtgtggtcatgacctgctatatgctgcccggcaatatgcagataagtgaacacaaaggacaacgtaaattcgagaaaagctatttatatgacttcgctgatttactcattgtcgatgaagccgggcaggtgcttcctgaagtggccgctgcctcgtttgccttagccaaaaaggcattagtgattggtgatacggaacagatcccgccaatatggagtattgctcccgctattgatataggtaacatgctggcggaaaaaattctttctgggagtacgcaagaagagattactgagaaatatacggcaatcgcagagcttggcaaaagtgccgcatctggcagcgttatgaaaatagcgcagtgtgcttcgcgctatcaatatgatcccgaactggctcgcgggatgtacttatatgaacaccgccggtgtttcgataatattattggatactgtaatacgctctgctatcacggtaagttgttgcctaaaagagggcttgaagagagcaatttaatgcccgcaatgggttatctccatattgatggtaaaggagagttggcaagtagcggaagtcgatataatttgcctgaggctgaaacgatagctgcctggcttacagagaaccagcaagatattgaaacgcattacggcaaagcgcttcatgaaattgtcggtatcgtgacgccttttagcgcgcaggtatccaccatcaaacaggcgctgggtaaacaaggtatcagtacaggcgcgaatgaaaagtcgctcacagtgggcaccgtgcactctcttcaaggagcggaaagagcgattgtgatattctcgccagtctattcaaagcatgaagacggcgggtttattgatagcgataacagcatgctgaacgttgctgtctcccgtgcgaaggacagtttcctggtcttcggcgatatggacctgtttgagattcagccagcttcatctccgcgggaattactggcaaaatatctctttgagtcagagaagaatgcgctcacttttgattataaagagcgtaaggatttaaaaacttccgagaccaaaatttacacactccatggtgtggagcagcatgataatttcctgaatcagacgtttgaaaataccggtaaacacatcacgatagtttctccatggctgacctggcaaaaactggagcaaaccggttttcttgattctatgattgcggcgtgttcacgtggtattaacgtcacgattgtcactgacagaagctacaacactgaacataatgattttgagaagcgaaaagagaagcagcagaacctcaaagcggcgctggagaaactgaacgcccttggtattgcgacaaaactggtcaatcgtgttcatagtaaaattgttattggtgatgatggtttgctgtgcgtgggatcattcaactggtttagtgcgacacgtgaagcgcgatatgaacgatacgatacatcgatggtttattgcggtgataacctgaagggcgagattgaggcaatttataatagccttgagaggcgtcaggtttag

SEQ ID NO: 75588 - DNA, 1425 bp, Citrobacter koseri
atgtctgaattcgatttatttgcgcaggaactgctcgaaaaagcagaagctgaagaaaaacaacaacaagagcgcgacaggaagctgattgatcgggtacttgaaatttacgaccagaagtatgtcgcagaactgctaagaaaaataggtaaaaatgagtggagccgcgaaacgcttaaccgctgggtaaatggcaagtgtgagccaaaatcgctcaccatggctgaagaagctctgttacggaaaatgctgccggagcaacctgctcatcatcctgactatgacttccgctttattgacctgtttgctggtattggtggtatccgtaaaggattcgaggccatcggcgggcaatgcgtttttaccagcgaatggaataaagaagcggtacgtacctacaaagcaaactggtacaacgatgaagacgcacacacattcaatctggatatccgcgaagtcacgctaagcggagaagaaggcatctcagaagagaaagcctacgcccatatcgatcaacacatcccggatcatgacgtcctgctggccggttttccctgccagccattcagtctggcgggtgtaagtaagaaaaactctctcggacgcgcacatggattcgaatgtgaagcgcagggcactctttttttcgatgttgcccgcataatcaaggctaagcaaccaaccatttttgtgctggaaaacgtgaaaaaccttaagagccatgacaaaggcaaaacgtttaaagtcattatggatacccttgatgaattaggctatgaagtcgctgatgccaatatcacagggaaagatgatcctaaaattattgatggtaaaaatttcctgccacaacatcgtgagcgtattgttctggtcggattccgccgtgaccttaatatccatcagggattcactttaaagaatattcataaattctaccctgagaaaagaccaacatttggtcagcttctggaccctgcggttgacagtaaatatatcctgagccctaagttatgggaatatctctataactatgctaaaaagcatgccgccaaaggtaatgggttcggttttggtctggttgatccgaataatgaaaatagcgtcgcgagaacattatccgctcgttaccataaagatggatctgaaattctcatcgacagaggatgggataaagaactcggcgaaatcgatttctctaatccagagaatcaggaacaaaggccaagaagactgacgccccatgaatgcgcaagattaatgggatttgagcaacccggaggcaagccattccgaatccccgtttccgatactcaggcctatcgacagtttgggaactcagtggtcgttcccgtttttgaagccgtggcaaaactgcttcagccttatattatgaaagccgctgcaagcaaggcgaccaaaaaataa

SEQ ID NO: 75589 - DNA, 1203 bp, Citrobacter koseri
atgatgtcggggctacattcatggctgttagataagtcaaccagtgacacctatatgttcatcaagcgcttgtcagccaacgataccggcgcgacgggcggacatcaggttggcatttacataccttctggcattgttgaacatcttttcccttcaattaatcatacaagggatcttaacccgtccgtgatgctgaatgcgcatacctcctcacacaactgcccggacagcgaggccagggccatttattacaatggtcgtttctttggtaagacccgaaatgaaaagcgtatcacccgatgggggggaggaaagaatcctctgcaagacccggagaatacgggggcgctggcgttattggcgtttgatcaccatcagggatctgatagccaatttgttgatatttgggtgtgtcataacgcagaagaagaagatatcgttgagtcatcgctcggagaaattgttcctggatcgttggtctatggtcccgcaaatgagattctgggtggtctggctttaaaagaaccagtttccagtgggtatcgtcttccggaagagtggagaacaaatttcccttcaggtaaggagattatccagtatgcagcagctcactattccccaaatgtcataggcccggataagcaactgattgaacgtcgtcgtgttgagtacgaaattttcctactggtggaggaaatgcatgtactgggtatagttcagtctgggtttggttccgtaaatgaatttattgcactggcgaattccgtgagcaacagacgaaaatcacgagccggaaaatcacttgagctgcatcttgaacagctttttaatgagcatggactgaaaacttttgagactcaggccgttacagaaggaaataagaagccagattttttattcccctctgcgcaagcttatcacgatgaagcttttccagagcagaagctgcgtatgctagcggtaaaaacgacctgtaaagatcgctggcggcagatattaaatgaggcagacaggattcaggatatttatctctttacccttcaggaaggtgtttctgttgctcaatttcaggagatgcagcaggaaagggtcaggttggttgtacccagtagccttcatgataagtacccgaaagctatccgggaatatcttatttcgttagaaacatttatcgatgaaactaaatcattgtatgtcgattaa

SEQ ID NO: 75590 - DNA, 1101 bp, Citrobacter koseri
atgcaacggatccattatcgcaacgaagcaggcaatcaggctggctttgtccttacacctaacatcatgtcagtctgtgaactggtggacaagcacgccacaaggctggtgctcaaagaacttaccaccagactcagggaggcaggtaaagagttaacagcactaagtatggaagagccaatcacttcatcgcaactggaaggcgctaacacaactacgcttgtcgcgcgggacatgctagaaagtggcagagccccccgtaccgaagatgaacacatgatcgcgggtaatgcgcggttgatggccgaaattccggaacttatccaggagccattaacaccagatttaatccgccgtttccatgccattggcatgggtggaattaatggcgaaaaatacagtcctggagaattccgcgataccgatgatgtagtgattgcagattatgacggtaacattgttcatcaaccgccagcggccaccgacctgcaggcacgtctgcaaatggtgtgtgacttcgtaaacgacacagaatcctacgttcaccccttggcaaaagcctgtgttcttcacttcatgctcgttcacgagcaccctttcagagacggtaacgggcgtacaagccgtgggcttttttactggtacatgctcaaatcagagtacgacgtatttaaatatgtctctatcagccagctactgcatgccgccccggccaaatatgcccacagttaccagtacactgaaaccgatggtatggatctgacgcactatcttgaatatcaggccagtattatccatcgtgctatgacaaggctcttacagcatgtagacgatctggttgcccgcgctgcccgaattgatcattttttgtataaatcagggagcttatcgcggctgagcggacggcaagtcacactacttaatattattctggctgagcctggtaagaaatattccgcagcaggcgtagcggaggcgctgggcgtatcggataacactgcgcgtaattatttgcgtaccctggcacgtgcaagtctcttaacagagatgtcagaaaacgaccagaaaacggtttataaggtatctcgggaactgagctga

SEQ ID NO: 75591 - DNA, 1371 bp, Citrobacter koseri
atgaattatccggcagaacccttccgtattaaaagcgttgaaactgtatctatgatctcgcgtgatgaacgcatccaaaaaatgcaggaagcgggctacaataccttcctgttgaactcgaaagatatctatatcgacctgctgacggacagtggtacgaacgccatgagtgataagcagtgggccgggatgatgattggtgatgaggcctacgcaggcagtgaaaacttttatcatctggaaagaacggttcaggagctgtttggctttaaacatattgttcctacgcaccaggggcgcggggcggaaaacctgctatcgcagctggcgattaaaccggggcaatatgttgcggggaatatgtatttcactaccacgcgttatcatcaggaaaaaaatggcgccacctttgtggatatcgtccgtgatgaggcgcacgatgccggtctgaatatcgcatttaaaggcgatatcgatcttaaaaagctgcaaaaactgattgacgaaaagggcgccgaaaatattgcctatatctgtctggcggtgacggtgaatcttgcgggcggtcagccggtctcgatggcgaatatgcgtgccgtcagggagttgacgcaggcgcatggcattaaagtcttctacgatgcaacccgctgcgtagagaacgcctatttcatcaaagagcaggaaaaaggctttgagaacaagagcatcaaagagatcgtccatgaaatgttcagctacgccgatgggtgtaccatgagcgggaaaaaagactgcctggtgaatatcggtgggttcctgtgcatgaacgatgatgagatgttctcggcggctaaagagctggtggtggtatatgaagggatgccatcctacggcggtctggccgggcgcgacatggaagcaatggccattggtctgcgtgaatccatgcagtttgagtacattgagcaccgtgtgaagcaggttcgttatctgggcgataagctgaaggcggcaggtgtgccgattgttgaaccggtaggcggccatgcggtattcctcgatgctcgtcgcttctgcgaacacctgacccaggaccagttcccggcgcagagtctggcggcaagcatctatatggaaacgggcgtgcgcagcatggagcgtggcattatctccgcagggcgtaataaagagacgggcgatcaccaccggccaaaactggaaacggtacgcctgactattccacgccgcgtttatacttatgcgcatatggatgtggtggccgatggcattattaaactctataagcataaagaggatattcgcgggctgaagtttatttatgagcctaagcagttgcgcttctttactgcacgttttgattatatttaa

SEQ ID NO: 75592 - DNA, 1263 bp, Citrobacter koseri
atggatattaatgccattgaacgacagagttcccccggacttattagcgggacgatgcttgtcatcgcaacagtagtcggcgggggaatgttctccctgcctattgcgatggcgggagtctggtttcccggcgcctctgttattctgatcgttattgccatcatgatgttattaaccggcctgatgctggtggaagtgaaccttcactatggtgccggcgccagttttaacacctttactcaggatctattagggcgaaagtggaatatcgtggttggcatcgcctttggttttgtactctatattttaacctatgcgtatatctccgggtcatcggcggtgatggcgcagacggtgtttaaatatagtggttttcgtttcccggcaaacatctccgttattgtcgtcagtatgctggttggcgtaatcgcctggtacagctcgctgctggtcgggcggatcaccaccattctgatcgtcggtaagtttgtggcgttctttgccacgttctccgggctaatcggccatattgaggtggcgaaactggtcgatagcgtcgccatcgcactgccgaatacgcaatatctgccctacattctgatgacgctgccgttctgcattatctcctttggttttcacggcaatgtgccgagtctggtgaaactgtatggcacccacggcgtatcccatattacgcgttccatcgtgattggcaccctgtttgccgtgctgctctatatcttctggctggcggtgacgatgggcaacatcagccgcgccgagttttcgccgatcattgccaaaggcggcaatattgatgtgtttgtggaagccatcagtgggctgtttaccagtcgctatatggatttaatcctgacctttttcggtaactttgccgttgccagttcgctgctggccgctacgctgggtctgtttgattatattgccgatctgttccacttcccggataacggcatcggcagactgaaaaccgcgctggtgacctatttcccgcccgctgccgtctgtttctttttcccgaatggttttgtccatgcgattggctatgcgggactggcgtttaccatctggagcgtgatcctgccgccatttctggtgaaagcgtcccgtaagcgttttgccacggcgcgttataccgccccctgtaacaatacggtgctgaatctggtgattgtcggcggagggattgtgtatctgacggtggtgatggatgtgtttggtttgctgccgacgttccgttag

SEQ ID NO: 75593 - DNA, 135 bp, Citrobacter koseri
atgtttctgacattactcaggttacagcatccgctggtttatcgttacgcctggctgagggtgtgggtggtggtgttaagaaaatgcggactgcgcaagaataaaactcataaaagcaatcaggcctgtcgctga

SEQ ID NO: 75594 - DNA, 1008 bp, Citrobacter koseri
atgaacacaaaacccaccattctgaccggcgatcgccctacgggcgccctgcacctcgggcactacgttggctcactgcgccagcgcgttgctttgcagcatacccatcaacaatttgtgctgattgccgacctgcaagggctgaccgataacggtacgaacccgcaaaagatccgcgacaacatcccggaagtgctggcggattatctggccgccgggatcgaccctgaactcaccacgctctgcctgcaatccgccttacctgcactggcggaactgaccatgctgtatatgaatgtcgtcactgtcgcccgcgtagagcgtaatccgacggtgaaaaatgaaattgcgcagaaaggctttacccgctcgttaccggtcggatttatggtctaccccatcagccaggcggcggatatcaccgcgtttaaagcggaatatgtgcccgtaggagacgatcagttgccgatgatcgagcagactaacgaaatcgtacacaagatgaacagcctgctgcctgccccgctgctacgccactgtcaggcgattctgagcgacaccggccgcctgcccggcattgatggcggcgctaaaatgtcaaaatctctcggcaataccctgcaactctccgccagtgaagagacgatccacaaagcggttagcgccatgtacaccgatcctcaccaccttaacgtcagcgatccgggtcagatcgaaggaaatgtcgtgttcacctggctggatgcctttcacccggacaaaacgaaagtcgcggcgatgaaagcgcattatcagcagggcgggcttggcgatcgcacctgtaaaaacgaactggaagcctgtttgcaggagttgattgccccaatgcgcgagcggcgggcaacctatattcaggataaaggcatgctgatgcagatactgcaacaaggcagtgaacgggcgcatgaggtcacacagacaacgctacaggaagtgaaacgcgggctgggattgcccgtactattttaa

SEQ ID NO: 75595 - DNA, 1191 bp, Citrobacter koseri
atggttcagggcaatgccgattcaaaccgtcatgccatcagtacggcactcttcggcttaatggtactaacgctgggaatggggatcggacgttttctgtataccccgatgctaccggtcctgctgtctgaaggtcagtttaccttcgcggagctttcctggattgccagcgccaactacgcggggtatctggcgggcagcctgttgttctccttcggcgcctttcacctcccctctcgcttacggccaatgctgttgacatcggcggtagcaaccgggggattaatccttgcgatggcgatatttacgcaacctgccatcgtgatgctgatccgttttctggccggggtcgccagcgccggaatgatgatttttggctcgatgatcgtcctgcaacatacccgtcacccgtttgtgattgcgtcgcttttctccggcgttggcgccggtatcttgctgggcaacgagtatgttatcgccggtttacgctatgcgctttcttcccatgcgctgtggtcaggcgcagccgttatctccaccgtgttactgctgctcctggcgttcctcatccctgcccgcgcccacgcgttgccgcccgctcctccggcgccgacgcatcatccgctgatgcgctggtggcaactggcgctgctgtatggcttcgccggatttggctacatcatcgtcgccacctatctgccgctgatggcgaaaaacgcgggctcgccgctactcaccgcccatctctggtcactggtgggactggcgatcgttcccggttgttttggctggctgtgggcggcaaagcgctggggcgtattacaatgcctgacggcgaatctgctgattcagggggtctgcgtcatactcacgctcgccagcgacgcactgccgcttcttattatcagcagcattggttttggcgcaacgttcatggggacaacctcgctggtgatgccgctggcacggcaactgagcgtgccggggaatatcaatctgttgggtcttgtcacgcttacctacggcatcggtcagatcgtcggcccactgttaaccagcctgctaggcagcggcacggaggcgatcgccagcgcaacgctttgcggcgctgcggccttatttttcggcgccgtcatcagcatgattcaacttgttaagcagcggcagtttacgcaaaaaagagaatgctga

SEQ ID NO: 75596 - DNA, 252 bp, Citrobacter koseri
atgacggaatatctgtttttatttcattcgacggtgggcgtcattcagacccgcaaagcgcttcaggctgcgggaatgacctttcgggtggcggatattccgcgccagctacgcggcggctgcgggttatgtatttacctgcactgcacccccggcgaagaaacgcggtggattatccccggtcataccgaatccatctatcgctgcgtggatgatggctggcactgcgtaaaaacgatcgacgcctgctga

SEQ ID NO: 75597 - DNA, 768 bp, Citrobacter koseri
gtgacgtattcgattggcattgattccggctccacggcgacaaaaggcgttttgctggcggagggcattatcacacgccgtttcctctgccccacgccgtttcgccccgccgatgctatccaccaggcgtgggaagcgctaagcgcagggctggacacgcgcccgtttctgacgctaaccggctacggacgccagctggttgattttgccgataaacaggtgacggaaatctcctgccacgggctgggggcgcgctttctggctcctgaaacccgcacggtcatcgacattggcggccaggacagcaaagttattcaactggataacgacggtaatctcaccgactttctgatgaatgataaatgtgccgccggaaccgggcgttttctggaggtgatttcgcgcaccctcggcgccagcgtggatcaactggatacgatcaccgacggcgttgagcctcatgccatcaccagcatgtgcacggtttttgccgagtctgaagtgatcagcctgcgctctgcgggcgttgcgccagaagctattctttccggcgtgatcaacgcgatggccagacgtagcgccaattttatcgggcgactgtctgccgggggacctttgctgtttaccggcggcgtcagccactgtgcggcattcgcgcgtatgctggaaaaacacgttgcgatgccggtttacacccatcctgacgcgcagtttgccggggccattggtgcggcgctgattggtcaacgccagagaaaacgcggatga

SEQ ID NO: 75598 - DNA, 1152 bp, Citrobacter koseri
atgtcgcttatcaccgatctacccgccatttttaaccagttctccgacgcccgtcagaaaggctttctcaccgtcatggatcttaaagaacagggggttccactggtcggcacctactgcacgtttatgccgcaggagatcccgatggcggcgggcgcggttgtcgtttccctgtgttcaacgtcggacgaaaccatcgaagaagccgaaaaggatctgccgcgcaatctgtgtcctctgatcaaaagcagctacggcttcggcaaaacggacaaatgcccctacttttatttttccgatctggtggtgggcgaaaccacctgcgacggcaaaaagaaaatgtacgaatacatggccgaatttaaggccgtacacgtcatgcaactgcccaacagcgccaatgacgccgcctcccgtgcgttatggaaagcagagatcctgcgtctgcaacaggctgtggaaacacgttttggccaccctatcagcgaagccgccctgcgcgacgcgatcgtattgaaaaaccgcgaacgccgcgcgctggccaatttctaccgcgtcggccagcttaatcctcctgctcttagcggcagcgatattctgaaagtggtgtacggagcgacgtttcgttttgataaagaagcgcttatcgacgagctcaacggcatggctgaccgcgtgcgccaggagtggcaggacggcaagcggctggacgcccgcccgcgtattctgatcaccggctgcccgattggcggcgcggcagaaaaagtggtacgcgccattgaagaaaacggcggttgggtcgtcggatttgaaaactgcacgggggcaaaagccaccgaacagtgcgttgaagagacgggcgatgtctatgacgcgctgaccgacaaatacctcgcaattggctgttcctgcatttcgcccaacgaccagcggctgacgttgctcagccagatggtagaggagtatcaggcggacggcgtcgtggatgtgattttgcaggcctgtcatacctatgccgttgagtctatggcgattaagcgccacgtacgccaacagcacaacatcccttatatcgccatcgaaacggactactccacttcggatatcgggcaactcagcacccgcgtcgcggcctttatcgaaatgctgtaa

SEQ ID NO: 75599 - DNA, 1326 bp, Citrobacter koseri
atgaacttttgcacgatccccccgtctggctctatccttaacgctatgaataaaattgctgaactcaaacgcgccaaacgactggcgctctcgctgctgctgattgccgccgccacgttcatcacgacgcttttcctgccgccaaatttttgggtactcggcattaaagccattgcggaagcggcaatggtgggcgcactggcagactggttcgccgtcgtggcgctgtttcgtagggtgccgatcccgtttatcgcgcagcataccgccattatcccgcgtaataaggatcgaatcggcgaaaatcttggccagtttgtgcaggagaaatttcttgatacccagtcgctggtcgcgctcattcgccgtcatgaaccggccttgctgatcggcaactggttcagtcagccggataacgcccggcgggttgggatgcatttgctgcaaatcatgagcggttttctcgaactgacggacgacgcccgtattcagcgcctgctcaagcgggcggtacacaaagcgatcgataaagtggacttctctggcaccagcgcgttaatgctggagagcatgaccaaaaacgatcgtcatcaggtactgctggacaccctgatcgcgcagttgatcgccctgcttcagcgcgacagctcacgcgcgtttatcgcacagcaaatcgtgcgctggctggagacggaacatccgctaaaagcgaaaattttaccgaccgaatggctgggggaacacagcgcagaactggtttccgatgcggtgaattcgttgctggatgatatcagccacgaccaggcgcaccagatccgccatgccttcgatcgcgccacttttaagctgatcgacaaactcaaaaacgatccagagatggcctcccgggcggaaagcatcaaagcgtacctgaaagaagatgaggcgtttaaccattatcttggtgaactctgggctgatttacgccagtggctgaaggcagatattaacgctgagggttcccgcgtgaagcagcggatcgcccatgccgggcaatggttcggcgaaacgctggtggcggatgatgcccttcgcgcttcgctcaacggccatctggaacaggctgcgcaccgggtcgcaccggaattcgccgcgtttctgacgcgccacatcagcgacacggtaaaaagctgggatccccgcgatatgtcacgccagatagagctgaacatcggcaaagatttgcagtttatccgcgtcaacggcacgctggtcggcggctccatcgggctggtgttgtatctgctgtcacaaataccgtccctgctgacgttacccaacttttaa

SEQ ID NO: 75600 - DNA, 1242 bp, Citrobacter koseri
atgcaacggatacgtcaatttttctcccggcgcgcgacaacgctatttttcccgatggcgctgattctgtacgactttgccgcctacctgtcgacggatttgattcagccgggcatcatccatgtcgtgcatgatttcaatgccgatgtcagcctggctccggcatccgtcagtctctatctggccggagggatggcattgcagtggttgctcggcccgctttccgaccggattggccgccgaccggtgctgattacgggcgcgcttattttcaccgttgcctgcgccgccacgctccttacaacgtcgatgacgcagtttctggtcgcgcgtttcattcagggcaccagcatctgttttatcgccacggtcggttacgttaccgtgcaggaagccttcggccagaccaaagccataaaactgatggcgatcatcacctcaatagttctggttgcgccggttatcggcccgctctcaggcgctgcgctaatgcactttgttcactggaaagccctgttcggcattattgcactgatggggctgatcgccctgtgcggcctggcgctggcgatgccagagacggtacaacgcggcgcggcgccgtttagcattcccgccgtcctccgcgattttcgccatgtctttcacaaccggattttcctcttcggcgccgcaacgctttcgctgagctacatcccgctaatgagttgggtggcggtctcgccagtaatcttaatcgacgcgggcggcatgactaccgcgcagttcgcctgggcgcaggtgccggtgtttggcgcggtaatcatcgccaatatgatggtcgctcgggttgtgaaagatcctggcgatccgcgttttatctggcgcgcaccgccgatacagcttgtcggtctggccatcctgatcgcaggaaatctgttgtggcctcatgtctggctgtggtcagtgctgggcaccagtctgtacgcttttggcatcgggatgattttctcgacgttgttccgctttacgctgttttccaacactctgcctaaaggcaccgtctcagcgtcgctgaatatcgtcatcctgacagtcatggccgtcgctatcgaagtcggacgcgggctgtggtttaacggcggcaagattccgtttcatctgttggcggtggtggcaggaattgcggcggtgttcacattgaaagggctattacagcgcgtgcgtcagtatgaggtaacagaactggcaactgagaaataa

SEQ ID NO: 75601 - DNA, 1413 bp, Citrobacter koseri
atgacgcgttaccaacatctggctaatctgctggccgagcgtattgagcaagggctgtatcgccacggggaaaaattgccctcggtgcgtagcctgagtcaggagcatggggtgagcatcagtaccgtacagcaggcatatcagacgctggagacgttgcagctcatcactccacagccgcgctccggctactttgtcgccccgcgcaaggcgcaaccgccggtgccgctgatgtcacgcccggtacagcgaccggtagagatcacccagtgggatcaggtgctggacatgctggaagggcacaacgacaaatcaattattcctttcagcagcggcgtccccgatatccaccaacccagcctgaaaccgctctggcgcgagctaagccgcgtggcgcaacataacctgggggcggtgctgggctacgatgaactggccggataccgcgaactgcgggaacagatcgcccgcctgatgcttgacagcggttcggtcgtcagcgctgatgatatcgttatcaccaacggtagccagagcggtttgtcgctggcgctgctgaccgtctgccaggcgggtgatattgtcgccgtcgaatcccccgcctattacggcaccatgcagctcctgcgcggcttaggaataaaagtcattgaaatcccgaccgacccggataccggtatcagtattgaagcactggaactggcgctggatcagtggccgattaaaggggttatcctcgtaccaaactgcaataatcccctcgggtttattatgccggacgcacgcaaacgggcagtgctcagcctcgcgcagcgccacgatattgtgatttttgaagatgacgtgtatggcgagctggcgacggattacccgcgcccccgcaccatccactcctgggatatcgatggtcgggtgctattgtgcagttcgtttaccaaatccgtcgcgccgggcctgcgcgtgggctgggtcgctccgggtcgttaccacgatcgtctgctgcatatgaaatacgccgtcatcggcaccaacgttcccgccacgcagctggcggcggccaccttcgtccgcgagggccactatcaccgtcatgtccggcgaatgcgccaaatctaccagcgcaacatggagatctatacctgctgggtacgcgaatattttccctgcgggatctgcgtcacccgaccaaaaggcggctttatgctatgggtcgagctgccggagcatatcgatatggtctgcgtcgccagacagctatgccgcctgaaaatccaggtcgcgccggggtcactgttttccgcctccgggaagtatcgcaactgcgtgcgcatcaactgtgcgttaccgccgaacgagaaacatcgtgaagtgatgcaaaaacttggagaggcggtgaaagtggcgatggaataa

SEQ ID NO: 75602 - DNA, 165 bp, Citrobacter koseri
atggaatttcacgagaatcgcgcaaaacagccgtttattggttttgttcagatctggcgggcaataaaaaggtggcgactgcgggcgcagacgcagcgcgtattgcaacgcatgaacgatgaacagttaaaggatgtggggctgcgacgggatcagattgagtga

SEQ ID NO: 75603 - DNA, 459 bp, Citrobacter koseri
atgactgaagatgagctgtttgcccgtcgtccgatggggatgcgcatggcaatggtggtacgccagtggcgtgcaattattgatgctgccatcaccgataccggcctgacgcagtcaagctggacggtactgatgcaactgcatcagttgggcgataacgtctcggtcagcgaactggcggaggtgcagggcattgagctgccaccgctgatgcgtaccctcacgcaactggaaaaacagggctatctggtgcgttcaacatcgccatatgacaaacgcatccgcctgctgacgctgacagcgcaaggccgttcaaggctggaagaactgaaccgggtgattgagacctatcagcaacgcgtcacccgtactatcccggaagcggaacttgctgccttcagcgccacattaaatcaaatcgcctgcaatctgcggttaatccgcgaagaagataattaa

SEQ ID NO: 75604 - DNA, 1068 bp, Citrobacter koseri
atgatgaccccagaacaaaaatttgcccgttgggtaagggtgagtattgccgctttccttgcaatattcgcctggtttattgttgccgatatctggatcccgctgacgccggattccaccgtgatgcgtgtggtgacgccggtctcctcgcgcgtctccggctatgtctctcacgtctacgtacgcaacaatagccaggtgaaaaagggcgacctgttgtatgaactggacccaacgccgtttatcaataaagttgaggccgcacagattgcctttgagcaggcgaagctgagcaaccaacagctggatgcgcagatcgcctctgcgcgcgccaacctgcgcaccgcgcaatacactgcccgcaacgataagctcacgtttgaccgctatcagcggctgagcgcgatgcagaatgtttcgcagtcggatctggataaagtgcgcaccacctggcagaccagcgagcagtcggtggctgcgctgaatgccagtatccagaacctgctgatccagcgcggtgaacgcgacgacagtcgcaatgtgacgctgcaaaaataccgcaatgcgctggaagaggcacagctgaacctgggctggacgaaggtgcgggcggaaaccgacgggacggtgagcaatctccagctcaaccctgggctttacgccaccgccgctacgcctttgatggcgctggtcagtaaccagaccgatattgtggccgattttcgtgagaaaagcctgcgtcacacccgcgtaaataccgatgccgcagtggtgtttgacgccatgccgggcaaagtgtttcctgcgcatgtgaccagcagcgacgccgggattctggccgggcaggaagcggttaacggacagctgtcgcagccggaacagtcgacgcgctgggtgcgcgatgcccagcgtatgcgcattcacgttgcgttggataccccgctggagaaccccctgccgaccggcgctcgcgctacggtgcagttgtataacagcgaggggatgtttgcccgcacctttgcaggggcgcagatccacctggtaagctggcttcactatgtctattaa

SEQ ID NO: 75605 - DNA, 1065 bp, Citrobacter koseri
atgtctattaacaccctggcccacgtctttacgccgcacgggaatattgtctacaccgccaatgattttcgccagaccgtgcgtatttccgttgccgggacgatagcgctgagtatctcgaccttctacaacgtgcagtacggcgtcttttttgtggtttatccgctgatgctgctatcgctggtgccggtgtttaaccgccatgtggctcgtcagtttgtattcagcgcggcggtgaactgcgttgaaatggtgttgattgtcggctatctctcgcagtggccggtaattatgacgctggtggtgtttggcctgtacgtgatgcgctttcgttttatgagcaaggggccgctgtttttgctcggttcgatgggcgtggtgtgccagagcacgatgctcaactttatgagttaccctggcaccaactggcacacgctgatgttctccaatatggaggcctgcgtgatggcggtagccctgagcgcgctgctgcactatctgatcccggatgtcgaaccgcgtcagctgccgccgcgtattgagaaggatgatgcccgtattcgccatgagtcgctgctttccggcaccgtggcgacgatgatctttgtgattttccagatctgcgatttgagcgattcgttgtcggcgctgatggcgggaattttgattttgtttccgatgcactatcgtggcgcggtgatcagctctatctggcgcgtcgtcggcgtggtgctggcctgtctctatattctgctggtgcaactgcttatttatgacttcagcaaccatatgctgctgatgatgccgctgattggcctcgggctaggcttcagcgctcgtctgcatgtgatggaaaaggttggcgcgggcgtcggttttgccagtatcaccaccatcggcattatgttcggccagaacctgcacccggacagcgatctggtgttcagcgatctgtaccgcatcacctcagtcaccgtcgcgctggtggcgacgctgacgatggtgtttctggtgcaccgcatcctcaactgctttgcagcgacgcggtttgtgattactgagtga

SEQ ID NO: 75606 - DNA, 957 bp, Citrobacter koseri
atgaccccgattgcagttaccctactcaccggttttctcggcgcaggtaaaaccaccctgctgcgccacattcttaacgaaaagcacggctacaagattgccgttatcgaaaacgaattcggcgaagtttccgttgacgatcagttgattggcgaccgcgccacccagatcaaaaccctgaccaacggctgcatttgctgcacccgctccagtgaactggaagacgcgctgttagacctgctcgacaacctcgaccagggcaacatccatttcgaccgtctggtgattgagtgtaccggcatggccgaccccggcccgattattcagacctttttctcccatgacgtgatttgccagcgctacctgctggacggcgtgatttcgctggtcgatgcggtacacgccgacgagcagatgaaccagttcaccatcgcccagtcgcaggtcggttatgccgaccgcatcctgctgaccaaaaccgacgtggcgggagttagcgaaaaactgcgtgaacgcttagcgcgcatcaacgcccgcgccccggtttacaccgtcacgcacggcgatatcgacctctccttgttgttcgacaccaacggctttatgctggaggagaacgtggtcagcgccacaccgcgcttccactttatcgccgacaaacaaaacgatatctcatcaattgtggtggagctggattatccggtagacatcagcgacgtttcccgcgtcatggaaaacctgctgctggagtccgccgagaaactattgcgctacaaaggaatgctatggattgaaggcgaaccgaaccgcctgctgttccagggcgtccagcgcctgtacagcgccgactgggaccgcccgtggggcgacgaacagccgcacagcacgctggtgtttatcggcattcaactgccggaagatgagatcagagccgcgtttgcggggttgaagaagtaa

SEQ ID NO: 75607 - DNA, 204 bp, Citrobacter koseri
atgtttggtaacttaggtcaggcaaaaaaatatctcggccaggcggcgaagatgttgattggcattccagactacgacaactatgtcgagcatatgcaaaccaaccatccagacaagccgtacatgagctatgaagaattcttccgcgagcgccagcaggcacgttacggcggcgacggaaaaggcggcatgcgctgctgttaa

SEQ ID NO: 75608 - DNA, 2151 bp, Citrobacter koseri
atggatacgaaaaagatattcaagcacataccctgggtgattcttggaatcatcggtgcattctgcctctcggtcgtcgccttacgcagaggtgagcacgtcagcgccctgtggatcgtggtcgcttccgtctctgtttatctggtagcttatcgctactacagcctgtacatcgcccagaaggtgatgaaactcgacccaacgcgtgctacgcctgcggtcattaataacgacggcctgaactacgtcccgacaaaccgttacgtactgtttggtcaccactttgccgctatcgctggcgccggcccgctggtcggcccggttctggccgcgcaaatgggctacctgccgggtacgctgtggctgctggcgggcgtagtgctggccggtgcggtacaggacttcatggtgctgtttatctcttcccgccgtaacggcgcgtctctcggtgagatgatcaaagaagagatgggcccggtgccgggcaccatcgccctgtttggctgcttcttaatcatgatcatcatcctcgcggtactggcgctgatcgtggtaaaagcgctggccgaaagcccgtggggcgtcttcaccgtttgctcaaccgtacctatcgcgctgtttatggggatctacatgcgcttcctgcgtccgggacgtgtgggtgaagtctccgttattggcatcgtgctgctggttgcctctatttacttcggcggcgtgattgcgcacgacccgtattggggcccggcgctgacctttaaagacaccaccattaccttcgcgctgatcggttacgcgtttatttccgcactgctgccggtatggctgatcctcgccccgcgcgactatctggcaaccttcctgaaaatcggcgttatcgtcggtctggcgctgggaattctgatcctcaacccagagctgaaaatgccggcgatgacccagtacatcgacggtaccggcccgctgtggaaaggcgcgctattcccgttcctgttcatcaccatcgcctgtggcgcggtatctggcttccacgcgctgatctcttccggtacgacgccgaaactgctggcttgtgaaaccgacgcgcgtttcatcggctatggcgcaatgctgatggagtctttcgtggcgatcatggcgctggttgcggcgtctatcatcgaaccgggtctctacttcgcgatgaacaccccgccagcgggcctcggtatcaccatgccgaacctgcacgaaatgggtggcgagaacgcgccgctgattatggcgcagctgaaagacgtcaccgcacacgcggcggcaaccgtcagttcctggggctttgtgatttcgcctgagcagatcctgcaaaccgcgaaagacatcggcgaaccatcggtactgaaccgcgcaggtggcgcaccgacgctggctgtcggtatcgctcacgtattccacaaagtgttgccgatggctgatatgggcttctggtatcacttcggtattctgttcgaagcgctgttcatcctgaccgcgctggatgcaggcacccgctccggccgctttatgttgcaggatctgctgggtaacttcgtcccgttcctgaagaaaaccgactctctggttgctggcgtcatcggtactgcgggttgcgtcggtctgtggggctacctgctgtatcagggcgtggttgatccgctgggcggcgttaagagcctgtggccgctgttcggtatctccaaccagatgctggccgctgtggcgctggttctgggcaccgtggtactggttaaaatgcagcgcaccaaatacatctgggttaccgttatcccggcagtatggctgctgatctgcaccacctgggcgctgggtctgaaactgttcagcaccaacccgcagatggaaggcttcttctacatggctaaccagtacaaagagaagattgccaacggcagcgaactgaccgcgcagcaaattgccaatatgaaccacatcgtcgtgaacaactacaccaacgcaggcctgagtattctgttcctggtagtggtgtacagcatcatcttctatgggttccgtacctggcagaaagcccgcaccatcaacggtcgtaccgataaagagacgccgtatgtaccggtgccggaaggcggcgtgaagacctcttcacaccattaa

SEQ ID NO: 75609 - DNA, 1665 bp, Citrobacter koseri
atgttaaaacgaatcaagattgtgaccagcttgctgctggtcctggcaatatttggccttttacaactcacctcaggcggtttgttctttaactcattgaagaatgacaaagagaacttcaccgttctgcaaaccattcgtcagcaacagtccacgctgaacgccagctgggttgcgctgctgcaaacgcgaaacaccctgaaccgggcaggtatccgttacatgatggatcagaacaatattggcagcggcgcgaccgttaccgatctgatgcaaattgcgacgacctctctgaaactggcggaaaaacactgggctgagtacgaggcgttgcctcgcgatccgcgccagagtgaaacggcggcagtggagatcaagcgtaactacgatatctaccacaatgcgctggcggagctgatccagctgttgggcgcaggtaagatcaacgacttcttcgatcagcccactcagggttatcaggacggttttgagaagcagtatgttaactacatgcagcagaacgatcgtctgtatgacattgcggtagaagataataaccgttcatacagccaggcgatgtgggtactggcgagcgtgttaatcgttgtgctgctggtgatcgtcgccgtctggttcggcattaagctctctctgatcgcgccgatgaaccgtctgatcgaaagtattcgtcatattgcgaacggcgatctggtgaaacgcattgatgtggaaggctctaacgaaatgggacaactggcgcagagcctgcgtcatatgcagggcgagctggttcgtaccgtcggtgatgtgcgtaacggcgcgaatgcgatttacagcggtgccagcgaaatcgcgatgggcaacaacgatctctcttcccgtactgaacagcaggccgcctctctggaagagaccgccgccagcatggaagagctgaccgccacggtgaaacagaacgccgagaacgcgcgccaggccagccatctggcattgagcgcgtctgaaaccgcgcagaaaggcggtaaagtggtggataacgtcgtgcaaacgatgcgtgatattgcttccagttcgcagaaaattgccgacatcatcagtgtgatcgacggtattgctttccagaccaacatcctggcactgaacgcggcggtagaagcggcgcgtgcgggtgaacagggtcgtggttttgccgtggtagcgggtgaagttcgtaacctggcgcaacgcagtgcgcaggcggcgcgtgagatcaagagcctgattgaagactccgtcagccgtgtggatgtgggctcaacgctggtcgaaagcgccggtgaaacgatggatgaaatcgtgaacgcggtgacgcgtgtgaccgatatcatgggggagatcgcctcggcatctgatgagcaaagccgtggtatcgaccaggttggcctggcggtagcggagatggatcgcgttacccagcagaacgcctcgctggtggaagagtctgccgccgccgctgccgcgctggaagagcaggccagccgcttgacgcaggccgttgccgtattccgcattcagcaggaacagcagcgtgcgcgtgatgccgcagcggtgaaaccggcttctgcgtctgtactgccgcgtaaagcagccgtcgcggatagcggtgataactgggaaaccttctaa

SEQ ID NO: 75610 - DNA, 516 bp, Citrobacter koseri
atgaagatgacttttcgccctaccacgctggctgatatcaccgccatgcccgccattgaacgctctgcgggtcaacgctttcgggacgtgcctgcgctggcatggatagccgatggccctgttatttcagttgaacaacaccgggaacacgccgcaaaaggattgagctggctggcgctggccgatgagcgtcctgtcggttttttactggccgaagcgctggattcatcgctgtttatcgccgaggtgtctctgctgcgtgaatggcagggaaaaggcattggccgtcaactgattgcgtacgtcgcggagcaggcgcgcagcagcggttttgatgcgctgacgcttaccacctttcgggacgtgatgtggaatgcgccgctctatgcacgaatgggatttgtggtgctggatgatgagcgcctgtcgccagggttacgtcaaaagcgagaggaagaagcggcgcacggtctggcgtatgaatcacgctgcgccatgcgcctgaggctggtctga

SEQ ID NO: 75611 - DNA, 2292 bp, Citrobacter koseri
ttgtctgagttactttccatcgccctgtttctcgcgtccgtgctgatttatgcgtggaaagcgggtcgcaacacctggtggtttgccgccattttagcggtacttgggctttttgttgtcttaaatattacgctctatgccagtgattactttaccggtgacggcattaacgatgcggttctctacacgctgaccaacagcctgacgggtgccggcgtcagcaaatatattctgcccggcgccggcatcgtacttgcgctggccgccgtatttggcgcgttaggctgggttctgcgcaggcgtcgccaccatcctcaccattttggctacagcctgttggcgctcttactggcgctgggatcggtggatgccagcccggcatttcgccagatctccgaactggtcaaatcccagtcgcgcgatggcgacccggacttcccggcttattacaaagaaccgtcgaaaacgatcccgaatccgcagctcaacctggtctatatctacggtgaaagcctggagcgcacctattttgataacgatgccttcccggatctcacgccggaactcggagcgctgaaaaacgaagggctggatttcagccacaccatgcaattgccgggcacagattacaccatcgccggaatggtcgcctcgcagtgcggcatcccgctgtttgcgccgtttgaaggcaacgcgtcggcttccgtatccagcttcttcccgcagaatatctgtctgggcgatatcctgaaaaactccggctatcagaactattttgtgcagggcgcaaatctgcgtttcgccggaaaagacgtgttcctcaaatcccacggtttcgaccacctgtatggtgcggaagagttaaaaaccgtggtggcagacccgagctatcgtaacgactggggtttttacgacgatacggtgctcgacgaggcatggaaaaagtttgaagaactctctcgctccggccagcgtttctcgctgtttacgctgacggtggatactcaccacccggacgggtttatctcacgcacctgtaaccgcaagcgttacgacttcgacggtaagccgaaccagtcctttagcgccgtcagttgcagccaggagaacattgccgaatttatcaacaaaatcaaagcatcgccgtggtttaaaaataccgtcatcgtggtttcctccgaccatctggcgatgaacaacaccgcgtggaagtacctgaacaaacaggatcgcaacaacctgttcttcgtgctgcgcggcgaccagcctcagcaggatacgctggcggtgaaacgcaacacgatggataacggcgcgaccgtgctggatattctgggcggggataactttatcggcctggggcgcagcagcctctccggtcagtcgctgtcggaagtcttcctgaacagcaaagagaagatcctggcgatgaagccggacattattcgcctgtggaacttcccgaaagagatgaaggattttaccgtcgatcgggataaagacatgatcgctttctcagggagccacttccgcctgccgctgctgttgcgagtgtcggataagcgcgtcgaaccgctgccggaaagtgaatactccgccccgctgcgtttccagctggctaattttgccccgcgcgataacttcgtctgggtcgatcgctgctacaaaatggcgcagctgtgggcgccggagctggcgctctccaccgactggtgcgtttcacaagggcaactgggcgggcaacaaagcatccagcacgtcgataaagcacagtggaaaggcaaaacggcgtttaaagatacggttatcgatatggaacgttacaaaggcaacgttgatacgttgaagatcgtcgataacgatattcgttacaaagccgacagttttatctttaacgtggctggcgcgccggaagaggtgaagcagttcagcgggatttcacgaccggaatcgtgggggcgctggtctaatgcgcaactgggtgatgaagtgaagattgaatacaacacgccgttaccgaagaaattcgatctggtgatcaccgccaaagcctttggcgcgaatgctaatcgccctattcctgttcgcgtaggcaaggaagaacagacgctggtgttagagaacgaagtcaccacaacaacgctgcattttgataacccgtcaaatgccagtacgctggtgattgtgccgcccgacccggtatcgaccaatgaaggcaatattctcggccactccccgcgtaagctgggtattgggatggttgagattaaagtggtgaatgccgaaggctaa

SEQ ID NO: 75612 - DNA, 492 bp, Citrobacter koseri
atgaaaaccacaaaacgtcttctgtgctgcgcggttgccgccagcgcgtttatcgccaccagcgccttcgccgcgtcctggcaggattctctctccagcgccgccagcgaactgagcaaacaaagcagctcttcacagcagggcggcatgtcgctgtcttccctgaccagcctgctgaatggcggcaatcaggcattaagcgctgataacatgaacaacgcggcaggtattttgcagtattgcgcgaaacagaaactgacttccgttaccgatgcggaaaacgttaaaaaccaggtgctggataaactgggtctcggcgccaccgaacagaagcaggacaccaattatctggatggcattcagggtctgctgaatacccaaaacggcgaacagcttagcttggataacattggcaacacgccgctggcggaaaaagtgaaaaccaaagcctgcgacctggtgttaaaacaggggatgaacttcatttcctga

SEQ ID NO: 75613 - DNA, 738 bp, Citrobacter koseri
atgaaaaacgttggcgacctgatgaaacgtctgcaaaaaatgatgccagcaaatgttgagcctgcattcaaaacgggcgaagaactgctggcatggcagaaagagcaaggcgaaatgcgtgcggcagcgctggcgcgtgaaaaccgggcgatgaaaatgcagcgcacgttcaaccgttccggcatccgtccgctgcatcaaaactgctcgtttgataactatcgtgttgagaacgacgggcagatgaacgcgctgagcaaagcgcggcagtacgtcgaagagttcgacggcaacatcgccagctttatcttttcgggcaaacccggcaccgggaaaaaccatctcgcggcggcaatctgcaatgaactgctgctgcgcggaaaatcggttttgatcattaccgtcgccgatattatgtccgcgatgaaaggcacctttagcaatcgcgaaaccagcgaagagcagttgctcaacgatctcagcaatgtggatctgctggtgatcgacgagatcggcatgcagaccgaatcccgctatgaaaaagtgatcatcaaccagatcgtcgatcgccgctcatcatccaaacgccctaccggaatgttaaccaacagcaatatggatgagatgaccaaactccttggcgagcgcgtaatggatcgtatgcgtctgggaaacagtctgtgggtgatcttcaactgggaaagctaccgtagccgcgtcaccggcaaagagtattaa

SEQ ID NO: 75614 - DNA, 540 bp, Citrobacter koseri
atgtcttccagaattttgaccccggacgtcatcggtattgacgccttattacacgatcacaacgcggtgctggcaaaatcggcaagcggcgcggtggcggtcttcgccaataacgcgcccgcgttttatgccgtgacgccggcacgtctggcggaactgctggcactggaggaaaagttatcgcgcccgggaagcgatgtcacactggatgctcaactctacgaagactcccaggccgcgcctgtggccgttccgctggggaaattcgccatgtacgcagactggcagccggatgctgacttccagcggcaggctgcgctgtggggcgtcgcgctaagggaacccgtcaccgccgaagagctggcctcgtttgtggcttactggcaagcggaaggtaagatttttcaccacatccagtggcagcaaaagctggcgcgcagcgtgcaaatcagccgggccagtaacggcggtatgccgaaacgtgatgtgaacaacgtcagcgaacctgacgaccatattccacctggttttcgagggtaa

SEQ ID NO: 75615 - DNA, 474 bp, Citrobacter koseri
atgggtgtaatcgattttcttctggcgctgatgcaggacatgattctctccgcaatcccggcagtgggctttgcgatggtgttcaacgtgccgcaccgggcgctcccctggtgtgcgttgctcggcgcgctgggccacggctcacgcatggtgatgatgaccgccgggtttaatatcgaatggtcgacctttatggcctcgctgctggtagggagcatcggcattcagtggtcacgctggtatctggcgcaccccaaagtctttaccgtcgcggcagtcatcccgatgtttccggggatatccgcctatacggcaatgatatccgccgtcaaaatcagccactttggctacagcgaaccgttgatgatcacattgctgaccaatttcctgaaagcctcctctattgtcggcgcactttccattgggctttccgttcccggtctgtggctgtatcgcaaacgcccacgggtgtga

SEQ ID NO: 75616 - DNA, 777 bp, Citrobacter koseri
atgcaaacagagcagtcgttacagcgaacggttacacggttatgtattcaatgcgggctttttttactgcaacacggcgcggagagcgcgctggttgatgaactctccacccgcctggggctggcgttagggatggacagcgtggaaagcgccatctcctccaacgctatcgttctcaccaccattaaagatgggcagtgtctgacatcgacacgtaagaaccaggatcgcggcattaatatgcacgttgtcacggaggtgcagcatattgtcatcctggccgaacataatttgctggatataaaaggcgtagagaagcgctttagccagctcagaccgttgcgctacccgcgatggctggtgtcgctgatggtcgggctttcctgcgcctgtttctgcaaactgaataacggcggatgggatggcgcggtgatcacctttttcgccagcatggtggcgatgtatattcgccagatgctggcgcaccggcatttacacccacaaatcaacttttgcgtcaccgcttttgtcgccaccaccatttccggccttttgcttcgcttgcccactttcagccataccccgaccatcgccatggccgccagcgtcttactgctggtgccggggtttccgctgattaattccgtcgcggatatgtttaagggccacattaataccggtctggcgcgctgggcgattgccagtctgttaacgctggcgacgtgtgtcggcgtggtgatgtcgatgacgctgtgggggctacgcggatgggtgtaa

SEQ ID NO: 75617 - DNA, 723 bp, Citrobacter koseri
atgttgccaggatgccgcaaaaacataattattatcagtaaaatacctgttatacagacggggttaaaagaggtggtgctgggccatttccctgcttatgaactgatgtactgccgttccgtagaagaactgacattaatgcagttgcgccgctccgatgtagtgattacggatttaacgggagaatgtaaacatccccgcgctgtctgcgagcaattttacgctttattatctcaataccatgatattcactggatatttcttgtttcccgtgcgttttactcacaggcgattgagcttctgatgagccccttcagtacgttgctgtctgacgttgaaccggttgagaatctggtaaacgtgattgaagcaggcaatgcccatacggacaggatcagtaagacgctgctatctcccgctctgccagacgtctcgagttttggccatcgtccggttgttcttacgctgtcggaacggaaagtgttacggcttctgggtaagggttgggggattaatcagatagcgatgttgcttaagaagagtaataaaacgattagcgcgcagaaaaacagtgcgatgcggcgtctgtcaatacacagcaatgctgagatgtatgcctggataaacagttctcagggagcaagagaattgaatttaccttcagtttatggagatgctactgaatggaaaacagaattgccaagggaaatgtcgcactcatag

SEQ ID NO: 75618 - DNA, 669 bp, Citrobacter koseri
atggaaaacagaattgccaagggaaatgtcgcactcatagagaagtgcgtaatgagcagtattggaatgaaaagtttatttgacgcgtttcctgattgccaatataaacttcatatttttccaactcaatctgctttccagaaagcgatgttaagtactcccttttccgtcgttattttttcactttctgcgatgcgggaagatcgccggatggggctggcttatctggcggaactggctgtgaattttcctcgtgtgcgccgactggtcatcgcggatgatgatgcggaagcccggttaattgattcgctgtcgccttcgccgttagatggggtattaagtaaagcgtcgtcactggccagtttgcaggaaaagctctttttattattgaacagtaagcgagaggtgacggaacacactctgaacctctggtatctcaatcagagccgaatgatcagccccactgagcgtgaaattctgcgttttatgtcgaatggttattcgatgccacagatagccgtccagctggaacgcaatatcaagacgattcgcgcccataaatttaatgtgatgtctaaactgggcgtcagctcagacgccggattgcttgatgcggcggatatcctgctgtctctgcgcgccgaaaagccaggtcgcttatccgcgtaa

SEQ ID NO: 75619 - DNA, 459 bp, Citrobacter koseri
atgagtctgcaatcggtacggcagtttctggccgaacgtgccccggatattgaaatcatcgaattaaatcagagtacggcgacggtggaactggcagcgaaagcacacaatgtcgcgccaggacagatagcgaaaacgctttcgcttaaggtgaaagacgacattattctggttgtcgccaaaggcgatgcccgcctggacaataagaaactcaagagcacgtttggcgcgaaagcgcgaatgctcagcagcgatgaagtcgtgatcgccacagggcacccggtcggcggtgtctgccctttcgggctggaaacgcctctgcccgtctattgcgacgtctcattaaaacattatgctgaagtcttaccagcagcaggggcaacgcacagtgcagtccgaatttcccccgacagaatggcagaactcacttcagcaacctggattgatgtgtgccagtga

SEQ ID NO: 75620 - DNA, 1344 bp, Citrobacter koseri
atgtctaccaaccatgctgtgtttaatgtgatttttcggtttgtcgaaaactacgtgagtcccgttgccggacgtatttcctcacaacgtcatgttatggctattcgtgatggcttcatttcggcaatgccgtttatgattgtcggctccttcctgctggttttcgcctatcctcctttctcaccggacaccacctggggatttgcccgtggctggctggcgctggcgaaacagtttgaaagccagattttgacgccgtttgatatgacaatggggatcatgtccatctatatctgtgcggccattgcctataacctgggcaaacactatgttaaatcgcatcagttagatccgtttatgtgcgccatgctctcgatcatggccttcttgctggttgccgcgccgaaaacaaacggcactatgccggttgacagcctgggcggaacggggatttttaccgcgattctggtggcgatttactgtgttgaaatgatgcgcttcctgaaagcgcataacattggcattcgcctgcccgaccaggtgccgccgatgatcaagaactcctttgatctgctgatcccggtgctggtggtggttctgaccttgtatccgctgagcctggcgatccagtcgcagttcgatatgctgatcccacaggcgattatggcgatctttaaaccgctggtttccgctgcggattcgttgcccgctattttgctggcggtgctgattgggcatctgctgtggtttgcggggattcacggagcggcgattgtctccgggatgctgcaaatgttctggctgaccaatctcggtatgaaccagaccgcgctggcgcagggggcgccgttgccgcacattttcatggaagccttctggactttcttcatcgtcattggcggttctggcgctacgatggggctggtgatttgttatttacgcagccgttccgtacatttgcgctctattggccgcttaagcgtcgtgccgagtatctttaatatcaacgaaccggttattttcgggacgccgattgtgatgaacccggtgttctttatcccgttcctgctggcgccaatggtgaatgccgtgctggcgtgggcggcgatgaaactggatctgattgggcgggtgatttccgtggtgccgtggactgcgcccgcaccggttggcgctgcgtgggcactgggctgggactaccgtgcggcgatcctggtggtcatactggcgctggtgtccgccatcatatacttcccgttctttaaggtttatgagaagcagcttctggcgcaagaggcagaagaggccgggcgtgcagaagaggagagtcagcagatggcctga

SEQ ID NO: 75621 - DNA, 789 bp, Citrobacter koseri
atgccttaccgttccgcaccgatcattgaagatgtcacctggcgagcccatctccagcctgagatgccctcgctggctgaagccgtgcgtgaaacgataacccggacgcgcgaacatctgcttgattttattcggctggacgaaccgcacccaacgggcgccatgacgctggcgcagtgggctagaccgggtacgatgcgctccctgctggctatctattccgaccatatttatcgtcatcaaccgacgcaaccacgcgaaaataagccgctcatttcgctttgggcgcaatggtatatcggtctgatggtaccgcctctgatgcttgccctgctcacccaggaaagggccattgacgtttcgcccgagcacatgcacgttgagttccacgaaaccggacgcgcagcctgtttttgggttgatgtgcatcaggacgagcgggcaaccgcgcattctcctcaacagagaatggaaacgctgatcgtctctgcgctgatgccggtcgttcaggcactggaatcaaccggcgatattaacggtaagcttatctggagtaacaccgggtatctgatcaactggtatctgaccgaaatgaaaccgctacttggcgaagcattgctggcaacgctgcgccagagctgcttcttcgaaaagcaactttccagcggtcaggataacccgctgtggcgtaccgtcgtccctcgcgaaggtctgctggtgcgccgaacctgctgtcaacgctaccggttgccagacgttcagcaatgcggtgactgtacgctgaaataa

SEQ ID NO: 75622 - DNA, 1068 bp, Citrobacter koseri
atgacagctcaatcctggcgcgcgctacgcaccaaaaaatatcaattctctttacgcctttttctgtttctcaatgcggtgtccgggctgtttacgcttgtctttcctctttatgaggtcagggctgtctcagtcccggcaatactactctttgttgcaagtacgttacttctgatatggcacggaaaatatacgcataaaaagattaatatcccctttatttctgttatatcaggcatattgtgggcctggcatatcacactgaaatataatgctatgaaccatagcgattatacttttctactcatcgcccttctctgcgtgttatttattggctccatcgcctttgctaataatatcattgcgtttacgttccattcattgccttccgttctggcctgcctgtggcttaatggcagcgaacacggcatacggattatttatctcatggcgctcccgatggcgggcattgccatccagcatgttattcaaaaacgctatgacgatttcgctcaacagctgatgtacaaactgctggaagagagagaaacgctgaacgggctgagtatgctcgatcctttgactggcctgtataatcgtcgcggcctgcaaaataagctgaatacgctccttgctctggaaacgcacgaagaacactacgtattgctgctggatatcgatcacttcaaagcttataacgatcactatgggcacatgatgggcgaccaggctctcattcgcgtttcagccgcgattcgtgacgctgtccgttcccgggatattgtcacccgttttggcggcgaagagtttatggtcctgctgaccgcgaccgatccacaggaggcgcgcacgaccgccgaacgtattcgccagaaggtctacgatctcaaaatcccacatatgtttaatgtcagcgtggcgaccaatgtcaccatcagcgttggcatcgcgccgctactgggtcaggacatggaggctgcaatcgtcaaggcggataaagcgctgtatgaagccaaaaacctggggcgcaacaacattcttgcgagtgacgaactgcgtacggtctga

SEQ ID NO: 75623 - DNA, 237 bp, Citrobacter koseri
atgttgcagcgtacactgggcagtggatgggggatattgttgccgggtatttttattaccggactggcgtttgccggcctctccattgacgcatggaaggtactgattgtattagggttactgctgacttcgttgatgctgtatcacaaacgcttacggcatttcgtcctgctgccgtcatgtgtcgcgctgatcagcggcatggtgctggttatgatgaatttgaatcagggatga

SEQ ID NO: 75624 - DNA, 609 bp, Citrobacter koseri
ttgtggctgttgtggctgttgtggctgttgtggctgttgtggctgttcagcctgagtcacgccttctccggaggcaacctccggttcgaagaggctggccatctggcgaccttctgcttcccttgcagcaagtacggcactcagacggttctccatttccgggttgatgtcacgcggaataaactccggagcgaccttcggtcgtgcctgatatttcagagagagtttgactgccggatacggtccgggcagagtgacatagcaggtcagatccggcagagactgaatgtcggaataactgaccagcgtctgacgctccatatccttaccggtcgataccccgtcacgtaccgggtcagcaccgtaggaatactgctcgctggctttcaggtgctctttctcaccaatttcaccggcagcgaactctgcaatcttatggctgggagaacggaaaaaggcacgggtgttcatgacgtcaaacagcgtggccgccgctttctcaccgtagatatcttccagctgggcataggactggataccaaacacataacagccaccgaacttacgggcttccggcaggatctccaccaggtccggcagtttgtgtaa

SEQ ID NO: 75625 - DNA, 207 bp, Citrobacter koseri
atgggtgtcggcgttcgacgaaataaacagccagccgtttttctgatcttcccggacaccacgcatccagtcacggatggtaaaagactcaccgttatgctcaatcccctgcaggtaacggatggctttcacgtagttggtcagcacagcacggatggaaatcgccgttttctcaattttctcttccaccaggttggctgccggtga

SEQ ID NO: 75626 - DNA, 738 bp, Citrobacter koseri
atgacatcagacaatatcgctgaatatgttggtgagaataatcaatttactgagaagcctgtaactgaataccccccggtgatacaggataatacagtgaccactaaagactatctgtacagcaataatattgatactgaccttttagtggttatcggagggcttattgttatattgtttctcatgatgcttatcatgtactttattaattctctcaggcataaggaattaactgaaatactgacaaaaatatcttttcctgaaaaatccgggagcaatttgcttaaaccggaggcggtcagctgtaatttgttgtccctgtgtgtgctggcaccggtattctgtacacccagaaagctggctgaagtttccagggagatcatcgtggcgagtgcgcaggaaattgcatggacgccggggagcagtcgtattgatggccaccaggcggagaatatcacctgggcgatttcatcgcagtctcctgccgataagtatgatctcatcaataaaacgtcctgtgtttctcctgacagtggccgtttttatgaaccggacacagttctggatcaccgtgaacgggtacgcctttttattcagatccagtttccgcacgggagtgactggtctgaagtattgcgcctgactgacattgttacagagaaggtctcttccggcaggactgcaggcgggcatcaccaccggcatacagggtacacctggtctgtttctgtgaattaa

SEQ ID NO: 75627 - DNA, 732 bp, Citrobacter koseri
atgaaaacaaaaaaattgatgatggttgcactggtcagttccactctggccctttcagggtgtggtgcgatgagcacagcaatcaagaagcgtaaccttgaggtgaagactcagatgagtgagaccatctggcttgaacccgccagcgaacgcacggtatttctgcagatcaaaaacacgtctgataaagacatgagtgggctgcagggcaaaattgctgatgctgtgaaagcaaaaggatatcaggtggtgacttctccggataaagcctactactggattcaggcgaatgtgctgaaggccgataagatggatctgcgggagtctcagggatggctgaaccgtggttatgaaggcgcagcagttggtgcagcgttaggtgccggtattaccggctataactcaaattctgccggtgccacactcggtgtaggccttgctgctggtctggtgggtatggctgcagatgtgatggtggaagatgtgaactataccatgatcacggatgtacagattgcagagcgtactaaggcaacggtgacaacggataatgttgccgccctgcgtcagggcacatcaggtgcgaaaattcagaccagtactgaaacaggtaaccagcataaataccagacccgtgtggtttcaaatgcgaacaaggttaacctgaaatttgaagaggcgaagcctgttctcgaagaccaactggccaaatcaatcgcaaatattctctga

SEQ ID NO: 75628 - DNA, 510 bp, Citrobacter koseri
atgatcactcactatgatataaaaatggagatgcagaaactaaaggaggtactctctgtagagggtgttaatatcccatcattattacaagtcataaagccgggaacttatgtgtttttatgggttttattatggccaacttttctgcgtttagtatcggttaaaagtgatgtcagggatgttggctttgatatatgtgctagtggaatgatggggttcctgctttttgtggctattacaaatggaatgatgttataccttgcgattcctgatagtttcagaaaggattcaaaaataataaattttatgtattctaagagtaagacatatattttgttgtttttgattgttttttctatggtttcgtttatgcattctatcttatatgtttttgcactaatgattacattcatattatttttcttggtgtataccatagatataaatcgttataatctctcagctatagcctcagtaataggactattcaaaaaagagtctgttagttaa

SEQ ID NO: 75629 - DNA, 2847 bp, Citrobacter koseri
gtgaatgaagtctatgtgattgccggtggtgagtggttaagcaataacctgaacgccattgccgcctttatggggacccggacgtgggattccatcgaaaaaattgcgctcacattgtctgttctcgcggtggccgtgatgtgggtacagcggcacaacgtgatggatttgctgggctgggtggccgtgtttgtgcttatcagcctgctggttaatgtccgtacatcggtgcagattattgataacagtgacctggtcaaagttcaccgggtggataatgtgccggtcggactggcgatgccactttcactgacgacccgtatcgggcatgcaatggtggccagttacgagatgatattcacccagccggacagtgtcacctacagcaaaacggggatgctgttcggcgcagaactggtatcaaaaagcaccgactttttgtcccgcaatccggaaatcgccaatctttttcaggattatgtgcagaactgcgtgatgggggatatttacctgaaccacaaatacacgctggaggagctgatggcctcctctgacccgtacaccataatcttttctcagcccagccctttacgtcaggtgccgaataataattacagttttctgaaaagctcagagccgtttgtgtcctgtaaggacgcatccgtcggactgaaggataagctgaatctggacacacagagtggcggaaaaacctggcattattatgcccagcagctatttggtggtcgccctgatccgaacctgttgttcagtacgctgattggcgacagttacagttacttctatggctcaagtaaatcagccagccagatcatccgccagaatgtcaccatcaatgcgctgaaggaggggatcaccagttatgccgcacgtaatggtgattcggccagcctggtgaatctggccaccacatcatcgatggagaagcaacgtctggcacatgtctccatcggtcatgtggcgatgcggacactgcccatgacgcagaccatcctgacggggatcgccatcggtattttcccgctcctggtactggcggctgtcttcaacaaactgacgctgtccgtcctgaaaggctatgtgtttgccctgatgtggttgcagtcatggccaatgttgtacgccattctgaacagtgccatgacattttatgcgaagcagaacggtgcaccggtggtgctctcagaaatttcacagatacagctgaaatactccgatctggcttccactgccgggtatctttccatgatgatcccaccattatcctggatgatggtcaggggactcggggccggattttccagtgtgtacagccatttcgcttcctctgctatcagcccgaccgccagtgcggcaggcagtgtggttgacggtaattactcctacggcaacatgcagacggaaaacgtgaacggcttcagctggagcaccaacagcaccacgtcgtttggtcagatgatgtaccagaccggcagtggcgcaactgccacacagacccgtgacggtaatatggtgatggatgcgagcggggcgatgtcccggttaccggttggtatcaatgcaacgcgtcagattgcagcggcacaacaggaaatggcccgggaggcgtcgaacagagcagaaagcgccctgcatgggttcagcagcagtattgccagtgcctggaactcgctcagccagtttggttctaaccgggggagcagtgattctgtcacaggtggtgctgacagcacgatgagcgcacaggactccatgatggccagccgtatgcgcagtgcagtggaaagctatgcgaaggcgcataatatcagtaatgagcaggcgactcaggaactggcatcaacaagtaccaggctatctggtggaatgtatgctgatgctcatgctgaatggggggttaaacctaaaattcttggtgttggtggtggggtaggcatcagaggtggatttaaggggagcctggatgcaacggatgatgactcacattcagcaagtagtggcagcagggctacccatgatgctcgccatgatatcgatgctaaagccagtaaggactttaaagaggccagcgattactttaccagtcgcaaagtcagtgaatccggcagccatactgacaataatgccgattcccgcgtggaccagttgtctgcagccctgaactcagcaaaacagagttacgaccagtacacgacgaatatgacccgcagccatgaatatgcggaaatggcctcccgtactgaaagcatgagcgggcagatgagtgaagacttgtcgcaacagtttgcacagtatgtgatgaaacgcgcaccgcaggatgcagaagctattctgacaaataccagttcgccggagattgcagaacgccgtcgggctatggcgtggtcttttgtgcaggaacaggtacagcctggtgttgataatgcctggcgtgaatcccgtggggatattggtaaaggaatggagagcgtaccttcgggtggtggcagccaggatattattgctgaccatcaggggcatcaggccattattgatcaaagaacgcaggacagtaatatccgtaatgatgtaaaacatcaggttgataatatggtcacagaatataaagggaatatcggagatactcagaatagtattcatggcgaagaaaatattgtagacagacaatattcagagttaaaaaataatcacaaacaggaagaaattcagcaaaacaacagatataatgaagaaaataaacgacagaaattaatgccaacaccgtctgaagatgcgttaaaacagatggtggatgataagaaagaacgattgaaggggccattatga

SEQ ID NO: 75630 - DNA, 1374 bp, Citrobacter koseri
atgcttcgcattaaacctctttttattctttgcgccgccttactgacggccatacccacagcgtcagcggatgtgaacagcgacatgaatcagttctttaataagctgggcttcgcctccaataccacacagccgggcgtctggcaggggcaggccgccgggtatgcctatggtggctccctgtatgcccgcacccaggtcaaaaatatccagctgatttccatgacgctgccggatatcaatgccggatgtggcggcatcgacgcctatctcggctcgttcagttttattaatggcgatcagttgcagcgttttgttaagcagattatgagcaacgctgccggttacttttttgaccttgccctgcaggcaacggtgccggaaatcaaaaccgcaaaagacttcctgcagaaaatggcaagcgacattaacagtatgaacctcagctcctgtcaggtggcgcaggggattgtcggaggattatttcctcagactcaggtgtcacagcagaaggtctgtcaggacattgccggtgagagcaatatttttgctgactgggccgcgtcccgtcagggctgcacggtcggaggacagtcatcgtctgttcgtgacaaggccagtgacaaagataaggaacgggtgctgaagaacatcaatatcatctgggactcgctgtccaaaaacaggatgcttgatggtaacaaagaactgaaagaatttattatgacgctcaccggtacgctgatttttggggaagacagcgagattacccccctgccggcgcgtaccactgaccgcgatatcctccgggcgattatggaggggggaacggcaaaagtttatcactgcaacgattcggacaagtgtctgaaggtggtggcggatgcaaatgtgaccatcgcccgggataaagccctgaaatcacagattacaaaactgctcaccagtattcagaataaagcggtgagtgatactccactggatgacagggaaaaaggcttcatttccagcaccaccgtccccgtctttaaatatcttattgacccgcagatgctcggtgtgtccagcagcgtggtttaccagctgacggactatatcggctacgacatcatgctccagtacattcaggaactgcttcagcaggcccgggccatgattgccaccgggaactatccacagaccgtgctggacagtgtgctggagaatctgaatcaggcacagcaacagattgcggttttccaggggcaggtaaaggtccagcaggatgcattgctggttgttgaccgtcagatgagctacatgcgccagcagctttccgcccgcatgctcagccgttaccagaacaactatcacttcggagggagcacgctgtga

SEQ ID NO: 75631 - DNA, 396 bp, Citrobacter koseri; identical to SEQ ID NO: 29559

SEQ ID NO: 75632 - DNA, 315 bp, Citrobacter koseri
gtgcgaaataagcaggtggtgttactcattgccggaatatccggcgtcgcgacgggaataatcgtcagcctgaatatcccctttatccgtcaggggcttttttatcccgccagccctgtggaaattgtcgtttcgctgtgtcttaccttttctgtttctgttgtgttttttgtaggggcaattgtgggatggattttggtgtctgaaatatattacagccgcatgacctgtctgcatgaatcatcagaaatatcagaggaaacttatgatgacagaaaacaaaaagaatcaggaattcaaaatcagaaaaattaa

SEQ ID NO: 75633 - DNA, 546 bp, Citrobacter koseri
atgtctctcactaaattactgccggtcattttgttgatgatggccacaggtgtgcaggcctccacccgggatgaaattgaacgactctggaatccgcagggtatggccgtgcagcctgcacaaccggcagcagacacatcagccagaacagaaaagccggctccccgctggttccgcctcagcaacggcaggcaggttaacctggccgactggaaggtggtgctgtttatgcaggggcattgcccttactgtcaccagtttgacccggtactgaagcagctggcacagcagtacggcttttccgtttttccctacaccctggatggtcagggggatactgcctttccggaagcattaccggtgccaccggacgtgatgcagaccttcttcccgaatatcccggtggccacaccgaccaccttcctggtcaacgtcaacacacttgaggcattaccgcttttgcagggggcaacggatgccgccagttttatggcgcggatggataccgttctgcagatgtacggagaggaaaaaggtgcgaaataa

SEQ ID NO: 75634 - DNA, 285 bp, Citrobacter koseri
atgataagtaaacgcagattctctttaccccggcttgatattacgggaatgtgggtattttccctgggtgtctggtttcatatcgtcgcccgtcttgtttacagcaaaccctggatggctttttttctggcggagttgattgcggtcatccttgtgctgttcggcgcataccaggtgctggatgcatggattgcacgtgtcagcctggaagagcgtgaggcactggaagccaggcaacaggccatgatggaagggcagcaggagggcggacatgtctctcactaa

SEQ ID NO: 75635 - DNA, 336 bp, Citrobacter koseri
atgaaaaagttatcttttaaagaaaaactggaaatagtgagaaacatcataagagagtcattatcaggtaatgcggcttttgctttactggtgtattcattattgcactccctccccattaaaacctttgctgatttatttgtgacgatactgttatttatagcgattatcgctgttgtgatatggctatttctaatcatctatatttatttttgtgagttattcagaagtcactggatagcagtctggtttatcctctggtctgtggtaatcaacctcactattggatttggcatttatgacaaattagcaccagtcatttcactaatgaaataa

SEQ ID NO: 75636 - DNA, 342 bp, Citrobacter koseri
atgcatacaggggatttgtgtttttttacaggtgccagcctgtttatcgtgggggttgttggttatttctttacaggaccaaataataaaggagtttatctgctgagctcgtttgtcttctttgtagtaaatgtcataagtgtatgtatgctgccagataatttcttgtttctttgtggtgcggttatgaatcagtgtgccgtaccggttgtttcaatggcagtcagtaccataccggttatcacgaagtttgacagtttcagaaggatgtttgtttgtattatgttgtcagccatatggtctggagtgatgtggttttttattatttcattagtgaaatga

SEQ ID NO: 75637 - DNA, 744 bp, Citrobacter koseri
atgaataaagcattactgccactgttactctgctgctttatttttccggcgtcagggaaagatgcaggctggcagtggtataacgagaaaataaatccgaaggaaaaagaaaataaacctgtacctgcagccccccgtcaggagccggatattatgcagaaactggccgcgctgcagacggcaacaaagcgggcgctgtacgaagccattctgtatcccggcgtggataattttgtgaaatatttccggctgcagaattactggactcagcaggccgggcttttcaccatgagtgctaaaaaggccatgctggcacatcccgaactggactataacctgcagtacagccattacaacggcacggtacggaaccagctggcggcagaccaggcgcagcagcgacaggccattgcgaaactggctgaacactacggcatcatgtttttttaccgggggcaggaccccatcgacgggcaactggcgcaggtcattaatggcttccgggatacgtatggtctgagtgttattcccgtttccgtggatggcgtgattaatccgctgttgccggattcccggactgaccaggggcaggcgcagcgcctcggtgtgaaatatttcccggccatgatgctggttgacccgaaacagggcagtgttcgcccgttatcatacggctttatttcacaggacgacctggcaaaacagttcctgaacgtttctgaagattttaaaccgaatttttaa

SEQ ID NO: 75638 - DNA, 258 bp, Citrobacter koseri; identical to SEQ ID NO: 5104

SEQ ID NO: 75639 - DNA, 1851 bp, Citrobacter koseri
atgaaacgtattttacctctgatactggctctggttgccggcatggcacaggctgacagcaacagtgattaccgggctggttctgattttgcccgtcagattcaggggcagggtacaggcagtattcagggctttaagccacaggagagtatccccggctataacgcgaatccggacgagacaaaatattacggtggcgtgactgccggcggggatggcggcctgaaaaatgacggcaccacggaatgggcgaccggtgaaaccggaaaaaccatcacagagtccttcatgaacaagccgaaagacattctgtcaccggatgcaccgttcattcagaccggcagggatgtggtgaaccgggctgacagcattgtgggaaacaccgggcagcagtgcagtgcgcagcagataaaccgcagtgagttcacaaactatacctgtgagcgggacacgatggtggaggagtactgcacacggactgccagtatcaccggggactggaaatacacggatgaatatcgtgaggtgacgataccgcactcacagttccggttcagtatgaacggtctgaaactggtgttcagtgtcacggctccggtaaccggtacagtggaaagtgcatcattgtctgtatacgccgcttttttcttcctgaactcccgttataccttcatgaatacaacctttaatgtcggcctggcaaacgggcagtcggatacttaccccctgtccggggcgacaggtttgcaggtgacacaggggcaggttctgaccggtagtggctgtactgctaacggtaattgcctcccgcacgggaatggtgacaggaaagtctatgaatcgcttgtcagtggtgcttccacctttacgctgaaactcaggatgaaggtccgtgataaagaatgggttccccgggtggagtgggtggagagttgtccgtttaataaagcggatggcgtgctgacaggcactgagtgttcagagccgggtggtacgaaaaccggagtgatggaaggtaaaccctggaacatcacacaggcatgctgggcataccgggataaatatgtcactcagtccgcagataacggcacctgtcagaaatatgtcgataatccggcctgtacgctggcctcacgtcagtgcgcgttttattccgatgagggaacctgtctgcatgagtacgccacgtactcctgcgagtccagaacatcaggaaaagtgatggtctgtggtggtgatgtcttctgccttgacggtgaatgcgataaggcacagagcggaaaaaacagtgattttggtgaagcagtatcacagctggctgcgcttgccgccgcaggtaaggatgttgccgccctgaatggtgtggatgtcagggctttcacgggtgaggcgaaattctgccgtaaggccgcagccggcttcagtaactgctgtaaggatggcggctggggtcaggatgtggggctggcgaagtgcaacagtgaagaaaaggcgctgggaaaggcaaaggacaacaaactgacggtgagtgtgggcgagttctgctcccggaaagtgctgggtgtctgtctgcagaaaaagcgcagctactgccagtttgattcgaagctggcgcagatagtccagcagcaggggcgtaacgggcagttgcgtatcagttttggcagtgcgaagcatcctgactgtcgggggattacggttgatgagctgcagaaaattcagttcgacagactggatttcactaacttctacgaagacctgatgaataaccagaaaatcccggacagtggcgttctgacgcagaaagtgaaagagcagattgctgaccagctgaaacaggcaggacagtaa

SEQ ID NO: 75640 - DNA, 639 bp, Citrobacter koseri
atgaaccggaaaatatttgcactttttgctctgacagcagggatgcatcttgctgttcatgcttcagaaaatgtgaacacacctgaaaaccgccagttcctgaagcagcaggaaaatttaagcagacaactgcgagagaaacctgaccatcagctgaaagcctgggcggagaaacaggtgctggaaaacccccttcagcgttcagataaccattttctggatgagctggttcgtaaacagcaggcttcgcaggacgggaaaccccggcagggtgccctgtattttgtgtcgttttccattcccgaagaggggctgaaacggatgctgggcgaaacccggcactacggtattccggccacactgcggggcatggtgaataatgacctgaagaccaccgctgaagccgtgttgtccctggtgaaagacggcgcaactgatggtgttcagatcgacccgacgctgttttcacagtacggcattcgcagtgtaccggcactggtggtgttctgcagtcagggatacgacatcatccggggaaacctgcgggtcggccaggcgctggagaaagtggccgccacgggtgactgccggcaggtggctcatgatttactggcagggaaaggagattccgggaaatga

SEQ ID NO: 75641 - DNA, 306 bp, Citrobacter koseri; identical to SEQ ID NO: 5779

SEQ ID NO: 75642 - DNA, 993 bp, Citrobacter koseri
atgaagcgaagcctgtggctgctgatgttattccttctcgccggtcatgtccctgcggcatctgcggattctgcctgtgaggggcgttttgtaaacccgatcacggatatctgctggagctgtattttcccgctctcgctgggcagtatcaaagtcagtcagggtaaggtccccgacacggcgaacccgtcgatgcccattcagatttgtccggcaccgccgccgctgttcaggcgtatcgggctggccattggttactgggagccgatggcgctgacggacgtcacccggtcaccgggatgcatggttaacctgggcttcagcctgccggcttttggtaaaacggcacagggaacggcgaaaaaggatgagaagcaggtgaacggggcgttctatcacgttcactggtacaaatacccgctgacgtactggctgaacatcatcacatcgctgggctgtctggaaggtggtgacctggatatcgcttatctttctgaaattgaccccacctggacggacagcagcctgaccaccattctcaatccggaagctgtcatctttgccaatccgatagcacagggggcctgtgcagcagatgccattgccagcgcctttaatatgcctctcgatgttctgttctggtgtgccggttcgcagggaagtatgtacccgttcaatggctgggtgagtaatgagtccagtccgttgcagtcctccctgctggtcagtgaacgcatggcgttcaaactacaccgtcagggcatgattatggaaaccatcgggaaaaataacgccgtctgtaatgaatatccgtccccaatcctgcccaaagaacgctggcgttatcagatggtgaatatgtatccggacagcgggcagtgccatccgttcgggcgcagtgtgatgcgctgggagacgggaaaaaatccgcccaacacaaagaaaaacttcggctacctgatgtggcgtaaacgtaactgtgtattcctgtaa

SEQ ID NO: 75643 - DNA, 633 bp, Citrobacter koseri
atgagatgccgggggctgattgccctgctgatatgggggcagagtgtggtcgccgccgatcttggcacctggggcgatctgtggccggtaaaggagccggacatgctgacggtgatcatgcagcgcctgacggcgctggagcagtccggtgagatgggccggaaaatggatgcctttaaggagcgggtgatccgtaacagtctgcggccccctgccgtgcccggtatcggacgcacggagaaatacagcagccggttgtttgacccgtccgtcagactggctgcggatatccgggataacgaagggcgggtgtttgcccgtcagggtgaagtgatgaatccgctgcagtatgtgccttttaaccagacgctgtatttcatcaatggcgatgatccggcgcaggtggcctggatgaaacgccagacgccgcccacactggagagcaaaattatcctcgtgcagggcagtatcccggagatgcagaagtctctggacagccgtgtttactttgaccagaacggtgtgctctgccagcgcctcggcattgatcaggtcccggcacgggtgagcgccgttcccggcgatcgcttcctgaaggtggaatttattccggcagaggagggcagaaaatga

SEQ ID NO: 75644 - DNA, 387 bp, Citrobacter koseri
atgaccacaacgcaaaaaacgactgatgttacagccccccgacgcagccactggtggtggacggtgccgggatgcctggcaatggtgttactgaacgcagccgtcagttacggcattgtcagactgaacgcaccggtgactgccgccttcaacatgaaacagaccgtggatgcgttttttgacagcgccagtcagaaacaactgtcagaagcacagtcaaaagccctttcagcgcgttttaacacggcactggaagccagcctgcaggcgtggcagcagaaacaccacgcggtcattctggtgtcgcctgccgtggtacagggggctccggatatcacccgggaaatccagcaggatattgcccggcgaatgagagcggaaccatga

SEQ ID NO: 75645 - DNA, 2631 bp, Citrobacter koseri
atgagtaataacccacttgaggccgtcactcaggcggttaactccctcgtcacagcactgaaactgcctgacgaatccgcaaaggccaatgaagttctgggcgaaatgagcttcccgcagttcagccgtctgctgccgtaccgtgattacaaccaggaatccggtctgttcatgaatgacaccacgatgggctttatgctggaagccattcccatcaatggggcgaataagtccattgtggaggctctcgatcatatgctgcgcaccaaactgccgcgcggtattccgttgtgtatccatctgatgtccagtcagctggttggtgacaggattgaatacgggctgcgtgagttctcctggtcaggtgaacaggctgaacggtttaacgccattacccgtgcctattatatgaaagcggcagcgacacagttcccgctgccggaggggatgaatctgcccctgaccctgcgccattaccgggtgtttatctcgtactgttctccctcgaagaaaaaaagccgggctgacattctggaaatggaaaatctggtgaaaatcatccgtgcctcttttcacggcgcaaaaatcaccacacagacagtggatgcacaggctttcatcgagattgtcggggagatgattaaccataatccggactctctgtacccgaaaagacgtcagctggacccgtattctgatctgaattatcagtgtgtggaggacagttttgacctgaatgtccgggctgattacctgacgctgggcctgcgtgagaacggcaggaacagcacggcccgcatcctgaatttccatctggcccgtaacccggaaatcgccttcctgtggaacatggccgacaactacagcaatctgctgaacccggaaatgtccatttcctgcccgttcatcctgacgctgactctggtggtggaagaccaggtgaaaacccacagcgaagccaacctgaagtacatggacctggagaagaagtcgaagacctcctatgccaaatggtttccgtcagttgaaaaggaggcgaaggagtggggggaactgcgccagcggctgggctccggccagtcttctgtcgtgtcctacttcctcaacatcacagccttctgcaaggacaataatgaaacggcactggaagtggagcaggacatcctgaacagcttccgtaaaaacggttttgagctgatttcaccgcgctttaaccacatgcgcaatttcctgacctgcctgccctttatggccgggaaagggctgtttaaacagctgaaagaggccggtgtggttcagcgcgcagagagctttaatgtggccaacctgatgccgttagtggcggataatcccctgacaccggcaggtctgctggcgcccacctaccgtaaccagctggcgtttatcgatatcttctttaaggggatgaataacaccaactacaacatggcggtctgtggcacctccggggccggtaaaaccggactgatacagccacttatccgcagcgtgctggactccgggggctttgccgtggtgttcgacatgggggatggctacaagtccctgtgtgagaacatggggggcgtatatctggacggtgaaaccctgcgttttaacccgtttgcgaacatcaccgatatcgaccagtcagcggagcgtgtccgcgaccagttgtcggtgatggccagccccaacggtaacctggatgaagtgcatgaaggtctgctgctgcaggcggtcaaagcctcctggctggccaaaaagaatcaggcgcgcattgatgatgtggtgaatttcctgaaaaacgccagtgacagcgagcagtatgccgggtcaccgaccatccgcagccgtctggatgaaatgattgtgctgcttgaccagtacactgccaacggcacttatggccggtattttaactctgatgagccgtccctgcgggatgatgccagaatggtggtgctggagctgggtgggctggaagaccgtccgtcactgctggttgcggtgatgttcagccttatcatttacatcgagaaccggatgtaccgcacgccgcgtaccctcaagaaactgaacgtcattgatgaaggctggcgtctgctggacttcaaaaatcgtaaagttggtgagtttattcaaaaaggttaccgcacctgtcgccgtcataccggtgcctatatcaccatcacacagaacatcgtcgactttgactctgacaaggcatccagcgcagcccgtgcggcatggggtaactcctcctacaaaattatcctcaaacagagtgcgaaggagttcgcgaaatataaccagttattcccggatcagttccagccactgcagcgcgacatgattggtaagtttggtgcggccaaagaccagtggttcagttccttcctgctgcaggtggaaaaccattcctcctggcaccgtctgtttgtggacccgttaagccgtgccatgtacagctctgacggcccggattttgagtttgtgcagcagaaacgtaaagaggggctgagtattcatgaggcggtgtggcagctggcgtggaagaagtcagggccggagatggcttcgctggaagcctggctggaagaacatgagaaatacaggagtgttgcatga

SEQ ID NO: 75646 - DNA, 348 bp, Citrobacter koseri
atgaagtcgatatatttaaaatctgttctggcttttatatttgttggcgttatggctatgattgtatgtattcctttttacatcgtttaccttgcgcaacaacctgcaacaccagaacaactgacagagattttacaggaaactccctgtgcagcagaagcatttcaggagacacttaattatcagtctgaacctttaacacttggtaaggcaaataaaatcgcatcagaatgcagaaaaagaaacgaaatggcagaggtgaaacgggtaagagaaaatgagcgcaataagattcgcgaaaaacaaattcaggcattaaatgatgctcattcagtaaaggaacgttaa

SEQ ID NO: 75647 - DNA, 219 bp, Citrobacter koseri
atgcatacctttatttttcttgtgctgataaaaaatattaacggtggcggaagctggaatgttacccccatgccaaatacggacgtatgcgtgcaggttcttcggacaatcgaagcacatggcggcaggggctttggaaatacaggggagtgtattgaagttaaaacaaatgaacctttgaacagcgtgatggaaacactaaatggtggtgggcaatga

SEQ ID NO: 75648 - DNA, 474 bp, Citrobacter koseri; identical to SEQ ID NO: 15223

SEQ ID NO: 75649 - DNA, 414 bp, Citrobacter koseri
atgcataaatcagaaaatgaaaaaatagattttattctggatgagcatgagcggatattcagaaaacaggggtctttgtgtatggcactgggtaagggctttttagttatagctattctttgtggtgttgccacattctgtgtttctggcctgtatctgaaatccctgtgcctgtccgttgcctgctgttgtggggtattcagtcgtatttttaattattacagcgtaccggaggaatcacgcatggtactcagtcgtcaggaattactccggcttatgcgtctgactgaagacgtaccagatgtgagacaggaactgcttaaccgtttgttgtccggtaaaaaactgactggtcgggatgaacaggatatccggcgtctctggcaggaaacgcagaggaaacactatgcataa

SEQ ID NO: 75650 - DNA, 516 bp, Citrobacter koseri; identical to SEQ ID NO: 11033

SEQ ID NO: 75651 - DNA, 318 bp, Citrobacter koseri; identical to SEQ ID NO: 7542

SEQ ID NO: 75652 - DNA, 567 bp, Citrobacter koseri
atggcgggtgatgcactgacattccgtgtggcgtttgtcgttcgctggctgctgtgggtcgtcaggtttgtggttatctggccgctggccacaatggccctgatggctctgtttgttttatggaaggacaacaccacgccggggaaattactggttaaggagattaacttcgtaagacaaacagcacctgccggacagttcccggtcagtgaatgctggttttcttcctctgattcttcaggcagatcagaaatacaggatatctgccattaccgcgcggctgatgctgcagattatgtcagggagactgaccggtcactgatgcaactggtcaccgcattctgggcaacgctggcactgatgtatatgtcgtttgcggcaggcaccgggaaatatccgatgtggcccggaaaaatgaaatgtgtccgggtgggaaccgcagatgaacatctgaaggaagtttatacggaagacgcttccctgccggaaaaaatcaggaaatgccctgtttatttccatgatgacagaacaaacagaagcaacggagataaaaatgaacatgcgtaa

SEQ ID NO: 75653 - DNA, 1452 bp, Citrobacter koseri
atggccagtatcaataccattgtgaaacgcaagcagtacctgtggctggggattgtggttgtcggtgcagcctccgcgattggtggggtactgtatctgtctgatgtggacatgtccggtaacggtgaggtggtggctgaacaggagcctgtgccggatatgacaggtgtggtggatacgacctttgatgacaaggtgcgtcagcatgccaccacagagatgcaggtgacggcagcgcagatgcagaagcagtatgaggaaatccgtcgtgaactggatgtcctgaacaaacagcgcggtgatgaccagcgtcgtattgaaaagctgggacaggacaatgccgccctggcagagcaggtaaaagccctgggtgctaatcccgtcacggcgaccggtgagcctgtacctcagatgcctgcctcaccgcccgggccggaaggcgaaccacagccaggaaacacccccgtatccttcccgccgcagggcagcgttgctgttccaccgccgacggcgttttatcccgggaatggtgtcacgccaccaccacaggtgacgtaccagtctgtgccggtgcctaaccggatacagcgtaaggtgtttacccgtaatgagggaaaacagggaacatcgctgccgtacattccgtcaggaagttttgcgaaagccatgctgattgaaggggcggatgccaatgcctcagtcaccggtaatgaatccacggtgccgatgcagttgcgtatcaccggcctggtggaaatgccgaacagcaagacgtatgacgcaacgggatgttttgtggggctggaagcctggggggatgtgtccagtgagcgtgccattgtacgcacccgcaatatcagttgcctgaaggacggcaaaactattgatatgccgattaaggggcatgtcagcttccggggtaaaaacggtatcaagggcgaagtggtgatgcgtaacggcaaaatcctcggctgggcatggggcgcgggatttgttgacggtatcggtcagggaatggagcgcgcctcccaaccggctgtcgggctgggtgccacagccgcttacggggctggtgatgtcctgaaaatgggtatcggtggcggcgcatcgaaagccgcacagacgctcagtgactactacatcaaacgtgccgaacagtatcacccggtgataccgattggtgcgggcaacgaagtgaccgtggtgttccaggacggcttccagctgaaaaccgtggaggaaatggcgctggagcagtcacagagtacagcggaagagggtaacccggaaagcccggtgccgaatcctccctcggcagaaagccacctgaacggttttaacaccgaccagatgctgaaacagctgggcaatctgaatccgcagcagtttatgtccggagacaagaacccgctgggcggggatgccggcaaggagggcggaaatggcgggtga

SEQ ID NO: 75654 - DNA, 729 bp, Citrobacter koseri
atgagaaaaaataatacggcaataatattcggcggcctgtttttttcctgcagcgtgatggccgcaaacggtacgctggcccccactgtggtgccaatggtgaacggtggtcaggccagtattgccatcagcaataccagcccgaatctgtttaccgttcccggtgaccggattatcgccgtgaacagtctggatggtgccctgaccaataatgagcagaccgcctccggcggtgtggtggtggccaccgtcaacaaaaagccctttacgttcattctggaaacagagcgtggtctgaacctttccattcaggctgttccccgtgaaggcgcggggcgtaccattcagctggtcagtgacctgcgcggaaccggagaagaagccggagcgtgggaaacgtccacgccttacgaatccctgcttgtgaccatcagccaggctgtccgtggcggaaaattacctgcaggctggtatcaggttcctgtgacaaaggaaaccctgcaggccccggcggggctgtcttcagtggcagattccgtatggacggggaatcacctgaagatggtccgctttgccgtggaaaataaaacgctgtctgccctgaatatccgggaaagtgatttctggcagccgggaacccgtgccgtgatgttcagccagcctgccagccagttactggcaggtgcgcgcatggatgtgtatgtcatccgtgacggggagggcaactga

SEQ ID NO: 75655 - DNA, 567 bp, Citrobacter koseri; identical to SEQ ID NO: 24478

SEQ ID NO: 75656 - DNA, 312 bp, Citrobacter koseri; identical to SEQ ID NO: 18468

SEQ ID NO: 75657 - DNA, 363 bp, Citrobacter koseri
atgaatactgttttaagtgttcagggtgcttctgcgcccgttgaaaagaaatcgtttttttctaaattcactcgtctgaatatgcttcgcctggttcgtgcagtgatcccggttgctgttctgatgatgttgttccctgagttagctatggctgctggtaaaggcacggacctgatggctaaaggtcaggaaacggttaaggcgaccttcggtaaggactccagtatcgttaaatgggttgttctggctgaagttctggtcggtgcagtcatgtacatgatgaccaaaaacgtcaagttcctggtcggctttgccatactctctgtatttattgcagtaggtatgtctgttgccggattctga

SEQ ID NO: 75658 - DNA, 228 bp, Citrobacter koseri; identical to SEQ ID NO: 7544

SEQ ID NO: 75659 - DNA, 648 bp, Citrobacter koseri; identical to SEQ ID NO: 7545

SEQ ID NO: 75660 - DNA, 384 bp, Citrobacter koseri; identical to SEQ ID NO: 7546

SEQ ID NO: 75661 - DNA, 648 bp, Citrobacter koseri
atgatattaaagataaatcagcaaaaacttgtttttgcgtggggtgtggtgcttttggtggtgagaaccaccaacctgttgagcctttttgtggagtgggttaaattatttacggataaagtcaccagaggtggaaaaatgaaaaaatggatgttagcaatctgcctgatgtttattaatgggatctgcgaagccgccgattgctttgatcttgcaggtcgggattacaaaatagacccggatttactgagagcgatatcatggaaagaatcccgttaccgggttaatgccatcggtattaatccggtaacgggatatggcagcggacttatgcaggtagattcccagcattttaacgaactggcccgctatggaattaagccggaacatctgacaacagatccctgcatgaacatttataccggtgcttattatctggcaatagcctttaaaaaatggggcgtctcctgggaggccgttggtgcatacaatgccggattcaggaagaccgaacgccagaaccagagacgtcttgcctacgcatcagaggtttaccggatttatacctggataaagagcagtaaaggcatccgggttccgaccacgaagaaatcactttcccaaattaacagtgtgcagaacaattaa

SEQ ID NO: 75662 - DNA, 822 bp, Citrobacter koseri; identical to SEQ ID NO: 13217

SEQ ID NO: 75663 - DNA, 297 bp, Citrobacter koseri; identical to SEQ ID NO: 5319

SEQ ID NO: 75664 - DNA, 597 bp, Citrobacter koseri
ttgacgttttgcggggacctgctctttgttccctccggtattcaccatcacctgtttgagaaccttcgccgcaaggggcatcactgccacggcctgacgcacctgtcctgggcagaacgcaaaattttttaccggtttttgggtaaaaaattttgtgggctgttcatttaccctggacagtcagtgcggcaggttgtggctgtatcagcccccggcgacaggggcttaaacaggtgtatgacaccggacacaacaacgggcagggacccgccgcaacgacgtgaagcgcggtttgcgaaacggcgttgccccttacatcccggcgtctttttgccgggatgccgggagcgcaggccacggcgcgacaagggtggcgcgaccgttccggtcgctgcaaacccgggttttgcgtcagggatggaagcccgccagggcggagacagcttcgctggctccgttcacgacagcccgccccgacagggggacgcccgggaaaggcacaggcaggagaacaacaaaacagacaataatcagggcagcagtaatcagagtcagaacaggaggaaaaagagaataatcaaagggaaggtgatgtga

SEQ ID NO: 75665 - DNA, 216 bp, Citrobacter koseri; identical to SEQ ID NO: 7699

SEQ ID NO: 75666 - DNA, 315 bp, Citrobacter koseri
gtgaagtggcgttactcattgcgctggaaattgccttctccctgtcctggcgagcatgaactggtttcagaagtggtggaggcggggcagcctgcaccggcatccgttatgtcacgctgggttgccggagcagggtatgcggtctgtctggattttatttctgaccgcccggtgcgccgctggagcgaagaacgtaaggctgcggtacggcggcggaatctggagaaacgtatcaacaggcatgcaccactgtttgcggatgaactgatagcccgtgaactggctgaacgaccggattattttcagggaaagtga

SEQ ID NO: 75667 - DNA, 720 bp, Citrobacter koseri
atgagcgcacgttcacaggcactggttcctctcagcacagagcaacaggccgcatggcgggcggtggcggagaccgaaaaacgccgccatcagggtaacacgctggctgaatatccgtatgcgggggcgtttttccgctgtctgaacggaagccgcaggatatcgctgtctgacctgcgatttttcatgccgtccctgaccgcagaagaactgcacggcaaccgtcttcagtggctgtatgccatcgatgtgctgattgaaacacagggcgaggtctgcctccttccccttcccggtgatgcagcagagcggttgtttccgtcggtgcggtttcgtgtcagggagcgcagtcgccataaatccgcgctggtcatgcagaagtacagccgccagcaggcgagggaggcagagcagaaagcccgtgcgtaccaggcgctggtcgctcaggctgaaatcgaactggcattccattcgccggaaacagtcggaagctggtatgcacgctggagtgaccgggtggcagagcatgacctggaaaccctgttctggcagtggggtgagcgttttccgtcactggccggaatggaacgctggcagtggcaggatatgccgttctggcaggtcatcgcagaggcaggtatggcggcaagggaggccggtcatgccgtccgtgagatggagcggtggatggtgccgaacaaactccgggaggcggcgtga

SEQ ID NO: 75668 - DNA, 435 bp, Citrobacter koseri
atgaaaactgaactgaccctgaatgtattacagaccatgagcgcacaggaatatgaagatatccgggctgccggaagtgatgaacgtcgtgaactcacacatgccgtgatgcgggagctggatgcgccggataactggacgatgaacggcgagtatggcagcgagttcggcggctttttccccgtccaggtccgcttcacgcctgcccatgaacgttttcacctggcgttatgttcaccgggcgatgtctctcaggtctgggtgctggttctggtgaatgccggtggtgagccgtttgcggtggttcaggtacagcggcggtttgcaccggaggccgtcagccattcactggcactggcggcgtcactggacgcgcaggggtacagcgtcagtgacatcatccatatcctgatggcggaaggaggtcaggcatga

SEQ ID NO: 75669 - DNA, 1965 bp, Citrobacter koseri
atgtcagtaacaaagtctgaaccaaaatctacccgtaaagcaagccgtaaacctgcaaaaacgcaggaaactgtcctgtctgccctgctggcgcagacggaggaagtgagcgtgccgctggcctcgctgattaagtcaccactgaatgtgcgcacggtgccgtattctgcggagtccgtcagcgaactggctgattccattaagggggtcggcctgctgcagaatctggttgttcatgccctgccaggtgaccgccacggtgtcgccgcaggtggtcgccgactggcagcactcaacatgctggcagagcgtggcatcattccggctgactggcctgtccgcgtgaaaattatttcgcaggaactggcgacggccgcatcgatgaccgagaacggtcatcgtcgggatatgcacccagccgaacagattgccggattctgtgcaatggcgcaggaaggcaaaacacctgcacaaatcggtgatttgctgggctattcaccccgccacgttcagcgaatgctgaaactggctgaccttgcgcctgtcatcctcgatgcgctggcagaagacctcatcaccaccgagcactgtcaggcgctggcgctggagaacgacaccgcgcgtcaggtgcaggtgtttgaagccgcctgtcagtcgggatggggcggtaaaccggaagtacagaccattcgtcgtctggtgaccgaaagtgaagtggcggtggcagggaacagtaaattccgcttcgtgggggctgatgccttctcgccagatgaactgcgcactgacctgttcagcgacgacgagggtggctatgtggactgcgtggcgctcgatgccgccctgctggaaaaactccaggctgttgctgaacaccttcgggaagccgaaggctggggatggtgcgccggacgcatggagcctgtcggtgagtgccgtgaggatgccggaacataccgctgtctgccggagccggaagcggtgctgacggaggcggaagaagaacgtctgaacgaactgatgacgcgttacgacgcgctggaaaaccagtgtgaggaatctgacctgctggaagcagaaatgaagctgatgcgctgcatggcgaaggtcagggcgtggacgccggagatgcgtgccggaagcggtgtggtggtgtcctggcgttatggcaacgtgtgtgtccagcgtggtgtgcagttgcgcagcgaggatgatgcggctgacgacgctgaccgcacggaacaggtgcaggagaaagcgcccgtggaggaaatcagtctgccactgctgacgaaaatgtcttccgaacgcacgctggcagtccaggcagcactgatgcagcaaccggacaaatctctggcactgctggcatggacgctctgcctgaatgtgtttggcagcggagcgtacagtaaaccagcacaaatcagcctggaatgtaaacattattcgctgaccagcgatgcgccatcggggaaggacggtgccgcattcctggcgctgatggcagaaaaagcccgtcttgcagccctgttaccggagggatggtcacgggatatgacgacattcctgtcactcagccaggaggtactgttatccctgctcagtttctgcaccgcgtgcagcatccacggcgttcagacccgcgagcatggtcacacgtcacgcagtccgctggactcgctggagagcgctatcggattccacatgcgcgactggtggcagccgacgaaagcaaacttcttcggacacctgcaaaagccgcagattatcgatgccctgaatgatgccggactgtccggtgctgcgcgggacgcggagaaaatgaagaaaggcgatgccgctgaacatgcagagttccacatgaaagacaaccgctgggtgcctggctggatgtgtacaccacgtccacaggcagagacggaaaccacggagtaccgtgacgaccaggcagaagccgcctga

SEQ ID NO: 75670 - DNA, 234 bp, Citrobacter koseri; identical to SEQ ID NO: 11469

SEQ ID NO: 75671 - DNA, 528 bp, Citrobacter koseri
atggcagttcgtggaattaacaaggtcattcttgtcggtcgtctgggaaaagatccggaagtccgttacatccccaacgggggcgcagtggcaaacctgcaggtcgccacgtcagaaacctggcgcgacaaacagacgggggaaatgaaggaacagacggaatggcaccgcgtggtgctgttcggcaagctcgcggaagtggcaggtgaatatctgcgtaagggggcgcaggtctacattgaaggccagcttcgcacccgtagctgggaagataacggtattacccgttacgtcaccgaaatccttgttaaaaccacgggcaccatgcagatgctggggagtgcaccacagcagaacgctcaggtgcaaccgcagcctcagcagaatggtcagtcacagagtgctgacgcgacgaaaaaagggagcgcgaaaacgaaaggccgtggacgtaaggctgcgcagccggagcctcagccgcaaccaccggagggggaggattacgggttttcagacgatatcccgttctga

SEQ ID NO: 75672 - DNA, 237 bp, Citrobacter koseri
atgacacagggctggcgggaggataaatgcccgtctgtccgcgccgggaaaaaaccgcgcgccggtggcgctgaaaggggccgcgctcacgcgccgcccctttcattacgcggacgttctgatgggggcttctgtcttttcagacctgtcatttgtctgttactgatgatgttgttgttcctgctactgctactgctactgctactgctactgttcttcttttttctactgccctga

SEQ ID NO: 75673 - DNA, 564 bp, Citrobacter koseri; identical to SEQ ID NO: 5765

SEQ ID NO: 75674 - DNA, 1362 bp, Citrobacter koseri
atgacattagctgcaatcaccatgaccgccccggaagccgccagccctgtgcagatgtaccgcgcgacctactcaccggatgacaacaaactgcgcctgtatgccgcgtcacgtcttgacccggagacgtataaaaaagtgcatgatgccggtttccgctgggcacccagacaggcgctgtttgtcgcgccagcctggacaccgggccgggaagacgtgctcctctcacttgccggagagattgaggatgaagacagcacgctcgctgaacgtcaggaagcacgggcggagcggtttaccggatacagcggaaagcgggccagtgaatccgcacaggcacttgatgaagtggaaagactggccgcgatgatcccgcccggtcagcccattcttgtggggcatcacagcgaacgccgcgcccgtcgtgatgcgcagcgtattgaaaacggcatgaaacgtgccgtgatgctctttgaacgtgcggaatactgggaagaacgggcgcggtcggcactgcttcacgcgaagtataaagaacgcccggacgttcgctggcgtcgtatcaaaaaaatcgaagctgatttgcgcaaggctgaaaagaccatcgcacagtcgcagaaatatctgacgatgtggcgggctgaatcgctggatctgaatatggcaaaactcatcagcagtcatgaccatatcagcgcctgtttcccgctggatacgtatccgcgcccggcagaaaaaagccagtatgaagggagccggtcgttatggtcggccctggatgatgacatcatcaccacggagcaggcccgcgaaattgcgatccgctgtcatgaacggcagattcagcatcagcaacgctgggttaaccactatcagaaccgcctgatctatgagcgtgccatgctggacgaaagcggcggcgtggttacccggacacaggattttgagccgggcggacaggttttcagccggggcgagtggctgactatcatccgcgtgaacaaaagcaacggggcggtgagttcagtcacaacgccaaattacagttttctcgggtacagcggcacgatgaaagtgacgcccgatcgcatcacggactacaaagcaccatcggcagaagaggctgccgtcgccagtcaggccgcgaagcgtccgccggtagtcaactatccgggggaaggtttccgggaaatgacaaaggcgcagtgggccgccctgccccgggactgtaaggccgtgcgcagtgtggaagaagcagaagaccacggggcataccgctaccgccgcacaatggacaataatttccgtctggtgaatgtgtatatcaccgacatgaaaatcacggaaatcccacagaaataa

SEQ ID NO: 75675 - DNA, 231 bp, Citrobacter koseri
atgactgtaagcattgtttcaccttccgcagcggctgtaaagccccgccgtcatccccgtttcagacgcgaagacatccccgcgccggaacttgaccccgtgctgaaagccttcgggcgacacattgcccggagttttcgccgggggcgtggtgtacacatccccgccatgaaaaacacggctttcgggcaggtgctccgcacactcgaactgaaacgcgcttttaactga

SEQ ID NO: 75676 - DNA, 504 bp, Citrobacter koseri
ttgacgtttcgcgggaacctgctgctgtattccctgtggtatgaacttcacccgtttgagaaccttcgccgcaaggggcatcactgccacggcctgacgcacctgtcctgggcagaacgcaaaattttttaccgggttttaggtaaaaaattttgtgggctgttcatttaccctggacagtcagtgcggcaggttgtggctgtctatgcccccggcgacaggggcttaaacaggtgtatgacaccggacacaacaacgagcagggacccgctgcaacgacgtgaagcgcggtttgcgaaacggcgttgctccttacatcccggcgtctttttgccgggatgccgggagcgcaggccacggcgcgacaggggtggcgcgaccgttccggtcgctgcaaacccggggttttgcgtcagggatggaagcccgccagggcggagacagctccgctggctccgttcacgacagcccgccccgccagggggacgcccggaaaaggcataa

SEQ ID NO: 75677 - DNA, 192 bp, Citrobacter koseri; identical to SEQ ID NO: 13008

SEQ ID NO: 75678 - DNA, 420 bp, Citrobacter koseri
atgtactgtactgttaaagaaattatccgcgaagtgctggatacagacgtgccggacagtgaatgcgtttttgccgtggtgctgacccgtggggatgtgcgtcacatagcccaggactggagtctgacagacgatgagctggaaaccgtcatgcagcggctggacgatgcctttgagcatggtgctgatgtcagcattgttcacgacgttgttcgtgaactgatggaggaaaagcgcgtaaaccgtcttgtaacagtccctgcggtgctgctggaaaaagtgatggtgatggctggtagtgaaatttatcgcctccatgctgtagggagcgagaacgggggcgacggtgacgcatttgtcagggaagaacgtgagattatgcgggtaatgcgtcaggcgctggacggggagaatgggtaa

SEQ ID NO: 75679 - DNA, 426 bp, Citrobacter koseri
atgcaatatgcgaaacctgtcactctgaacgttgaagagtgcgaccgtctctcctttctgccttacctgtttggcctggattttctgtatgccgaggcatctgtgtacgcgctggcgaaaaaaatgatgccggaatatgaaggcggattctggcacttcatccgcctgccggacggtggcggttacatgatgccggatggcgaccgttttcatctggttaacggtgaaaactggtttgaccgcacggtcagtgctgatgccgcaggcatcattttgacttcccttgtgattaaccgccagttgtggctgtaccacgacagcggtagcgcagggctgactcacctgtacaggatgcgcgatgcgcagttgtggagccacatcgaatttcaccccgaatgcaatgcgatttacgcggcactggactga

SEQ ID NO: 75680 - DNA, 771 bp, Citrobacter koseri
atgaacaaaacgctgaatgcactggtttatcgccacgcccgtaacctgctgctggcgcagggctggccggaagagacggatattgaacaactgaatccgcactatccgggctggatcagcatttacgtgcggctggatgcgccccggctggcgacgttacttatcaaccgtcacggcggcgtactgccgccgctcctggcctctgccattcagaaactgaccggaaccggggcggaacttgttctgtccggcagtcagtggcagtcgctgccggtacttccggcagacggaacgcaggtgtctttcccgtatgccggagaatggctgaccgaagacgaaatcagggcagttcttgatgcggtgcacgatgcggtacgcagtgtcagttgccgggtggcagaagatgcgcggcgtatccgggcggcgctgaccacaaccggtcagacgttgctgacccgccagacgcgccgctttcgtctggttgtgaaggaaagcgattacccctgctggcttgatgaagatgacgaaaatctgcccgtggtgctcgatgccatcgtgaaccggggagcacgtttttcgtcggtggaaatgtacctggtcagcgattgtattgagcatatcctgtccagtgggctggcctgcgatgtgctgcgtataccggatgaaccgccccgccgctggtttgaccgtggtgttctgcgggaggtggtccgggaagcccgggccgaaatccgcagcatggcggatgccctggcaaaaatccggaaatga

SEQ ID NO: 75681 - DNA, 1500 bp, Citrobacter koseri
gtgacgctcaatacttctcaggtcagttactatatgactcagcgtaagaaaggtataactcagcatatctcggccatgaaggctggtatctcagtccgttctggtcgtcggatcgaaaaaggagagtgggcaaaaaacagtgttcggcactggcgcacacgcaaagatcctctggaagctgtgtgggacagcatgcttgttcctctgttgaaagagaggccggctctgacaccaacaactctgctggagatgctacaggataaatatcccggccagtaccccaacagccttcgaagaacaatgcaacggcgggtccgcgaatggaagctacagtatggtgcagagcaggaggtcatgttccgccagcgacatcagcccggtctgcgaggtctgtcggactttactgaactgaaaggtgtagttgtcaccatcgccggtaagttgttggcgcataagttgtatcacttccgtctggaatggagccactggagctggatgcgggttgtgctgggtggtgagagcttctctgctctggctgaaggtctgcaggaagccctcggacaactgggcggagtgccggtagaacataaaacggacagcctgagggcagcatggaaacaacagggcgaagatggacgccgcgagctgactgagcgttatgctgctctctgtcagcactacggaatgcagggcgtacacaataatgccggtcggggccacgaaaatggctcggttgaaagtgcccacggacatctgaaaaggcgtatctgtcaggcgctgatactgcggggcagtaacgacttcagcaccatagaagaatatcaggccttcatcactcagcaggttatgcggcacaaccgtaacaatcaggatctggtcaaggaagaacgtcttcatctgaaaccgctgccgcttcgtcgcagtgctgactatgatgagctgactgtgagggttagccgcagcagtaccatcaatgtgaagcacgtcgtctacagcgtaccttcccggcttgtaggtcaactgttacgggtccggttatgggacgatcgtctgagctgttacgttggcagcagcgaggtcatgagctgcccacgtgtcagaccagaaaaagggaagacgcgggcccgtcgtatcgacttccgacatgtgatcgacagtctggcaaaaaagcccggtgcgttctgccatgcaacgctgagaaatgacatcctgccagacgatgaatggcggaggctgtggcgtcgcttatgtaatcatctggaacccgacatggcaggcaggctgatggtacatgctctgaaactggctgcaggatacgacgatatctcagtcgtggcaaaaggtatggagcagatgctgaataccccgggaaacgtggatctgcaccggctgatgcgcttcctgggtataaaggaaaaggcgttgccggtagtcaatgtgatacagcataacctgagcagttatgagcaactactgcgtggcaagggaggttcgcagtga

SEQ ID NO: 75682 - DNA, 756 bp, Citrobacter koseri; identical to SEQ ID NO: 13499

SEQ ID NO: 75683 - DNA, 435 bp, Citrobacter koseri; identical to SEQ ID NO: 23108

SEQ ID NO: 75684 - DNA, 222 bp, Citrobacter koseri
atgaactatgccggacacgaaaaacttcgcgccgacgtggcggaggtggccaacaccatgtgtgaccttcgggccagactgaacgatatggagcatcgctgtcgctttgattccgatgtgcttgttgaacgcctgacacgccagacgctgtatcgcgccaatcgcctgttcatggaggcgtataccgaaattctggaactggattcctgcttcaaagattga

SEQ ID NO: 75685 - DNA, 684 bp, Citrobacter koseri; identical to SEQ ID NO: 36490

SEQ ID NO: 75686 - DNA, 927 bp, Citrobacter koseri; identical to SEQ ID NO: 36491

SEQ ID NO: 75687 - DNA, 423 bp, Citrobacter koseri; identical to SEQ ID NO: 18913

SEQ ID NO: 75688 - DNA, 981 bp, Citrobacter koseri; identical to SEQ ID NO: 18914

SEQ ID NO: 75689 - DNA, 567 bp, Citrobacter koseri
atgattatttactctttcccatttcaaatggaagaaaatgacgcttttcttgatgccgaagttaagtatcagaaaatgaagaataaagaatgttatggtgtgaaagcttcacacaaaacacctttatcctttcttaaaccgagcgatacgttatacatcgttgctcatggcaacacatcagttattggatctggttcagctactgggccaacgttgaatcccgtagcattagcctctctattaatacacaaacgtttaccaaagaacttcatagatatcagagtgttgtcctgcgcctcggggatacattcgagaaccccagccttcgcacaacggctgaaagaaattatgaaagtacatgggtatcatagtctggtcgttaccggataccttggtgaggttgatgtatcgagagactggagattaaaaaatgatgatggtatggagttttataccttaagaaaaaaagggattattcctgttaaggatgtattaagtgaatcccagagagcgctttgtggttctgatctgaaatacgccctttctgatttcaagaaacgattttga

SEQ ID NO: 75690 - DNA, 207 bp, Citrobacter koseri
atgtccacccatgacagtctgattgaactgactgacacacttatccagcagaacggttaccaggggttcagctatgctgacctggcgaagacgctgggtatccgtaaagccagcattcactaccatttccagacaaaaacagacctgggaatagcctactgtgaatataaaaaagccggttttctggcgctggaagccaccctgtag

SEQ ID NO: 75691 - DNA, 315 bp, Citrobacter koseri
atggaggcctttctggcctgcgcggacaccggccagatgtgcggggtgtacgcaatgatgtcggactgtaacctgtttgagcctcccctgcaggaggccgttaaccggttggcacagacggacctgcgcattctgacggcggtcctgctgtccggaaaggaaagcggagaactgtttttttctgccccggcagaagatgttgctatgattgtggccagttcgataaaaggcgccctgatgctgaaccgcataccgcctcacgacgcctgcatccgcacgatgaaagcgctggagcagttgctctgccgggtctga

SEQ ID NO: 75692 - DNA, 291 bp, Citrobacter koseri
atgaaaaaaacaacctccaccgcattactggcactgaccctgggcagcgtactggcagcggccagtgccccggcaatggccactggcgataatatggaaaaatgttacggcgtttcgctgaaaggcaaaaacgactgtaaagccggcgccggcacaacctgtgcaggcaccgcgaaaatggattatcagggaaatgcctggaaactggtaccggcgggcacctgcgtgaagatgaaatccccgggttcccctaccggctatggccagcttgaggcctttaaaaacgcataa

SEQ ID NO: 75693 - DNA, 927 bp, Citrobacter koseri; identical to SEQ ID NO: 18852

SEQ ID NO: 75694 - DNA, 759 bp, Citrobacter koseri
atgcaaaacagtctgtaccaggcactgcttgagccacactcaccccccccggtggggcttaccgtctggaatggcagcgatccggccgtccggtttgcggtctaccgtaataatatcatggcctccttaacggaagcgctggcagaaaactgcccggtcctgcaacgacaggttggtgacgaattttttcgggccatggttgctgaatttatccgtcagcatccaccctcgtcgccggtattggcggggtatggacatgctctgcctgcctggatagcgtccttttccccactggctgaatggccgtggctggccgatctgacccgactggaactattgtttatcgatgcgttgcatgcggcggagacgaccagcctcgtatccgaagaacagctggtgcgactggcgcagaccggactggtcagtctgactgcgggcctggttccttctgtccgacttttcagctcgccttatgcgatatacagcctgtgggcagctcatcaggaggaggagccattgtttgttgaccctctgcagccagagcaggtgctgttgttccgtttgggggatgacgtgcggattacgcttctcagccctgccgacttttcgtttatggtggcggtacatgccggcaataacctggcgcaggcaacgttgcaggccagagagcatgactgctgttttgaacctggctctctgttgctgcgcctgcaccagaacaggctactcgggtggctggcctgcacagaggagaaatga

SEQ ID NO: 75695 - DNA, 528 bp, Citrobacter koseri
atggcattgatgagaagttttctgcagcggggccaggcattactgcaggacagtctgatcccccttctggctcgtacaggcctggccgccacattctggctgtcagggcaaagtaaggtagaggggttggttctggatatactgggagggatgccaccggaactggatgttccgcatattacccgttcggcggttgcgctgtttgccacagagtaccgactgccgtttctggcaccggagactgctgcactgcttgcagcaggagccgaacatatttttccggttctgcttgtcctgggactggcaacgcgtttttccgcactagtgctggcaggaatgacgatagtgatccaggtgtttgtctatcccgatgcctggccggttcatgccacctggcttaccgcccagatgtatttactggcgtatggcggcggaaaatattccctggataacctgctgaaacgtacgtaccggcgtaggcaccagaatgtgatgcagaaaaggaataaccctatgatgacgctataa

SEQ ID NO: 75696 - DNA, 288 bp, Citrobacter koseri
atgctagattacttggaagctgattggtttatttcaacaaatggtcaaaaagttatctataaaaaacatcagttacgaaagattgatatgcgtccagcgaggattttacctggcatagaaagatatgaatatgatgtcgtaatgcgtgagtttaaaggaattgcttgtgtttcagggaaagctgaaataaagcaaaatgatggaaatatattaatggcatttattgaaaattggataaaggttaatggtggatggaaaatgcagtttatatcgtatgaaaaaatctaa

SEQ ID NO: 75697 - DNA, 510 bp, Citrobacter koseri
atgtcagttttgcaagtgttacatattccggacgagcggcttcgcaaagttgctaaaccggtagaagaagtgaatgcagaaattcggcgtatcgtcgatgatatgttcgagacgatgtacgcagaaaaaggtattggcctggcggcaacccaggttgatatccatcaacgtatcattgttattgatgtttcggaaaaccgtgacgaacggctggtgttaatcaatccggagcttttagaaaaaagcggcgaaacaggcattgaagaaggttgcctgtcgatccctgaacaacgtgctttagtgccacgcgcagagaaagttaaaattcgcgccctggaccgcgacggtaaaccatttgaactggaagcagacggtctgttagccatctgtattcagcatgagatggatcacctggtcggcaaactgtttatggattatctgtcaccgttgaaacaacaacgtattcgtcagaaagttgaaaaactggatcgtctgaaagcccgggcttaa

SEQ ID NO: 75698 - DNA, 366 bp, Citrobacter koseri
atggcccgttcagctaaaccccgtaaacgcaaacccgcacaacaaagaagcaaacttccccgctatgttgtgaaacttcatccggatgatttttttgacgaagaagacgctgaagttctgcgctttgataattttgacgatgccgttgagtgctgcgctgacctgggtattccgttctttctggatgcaggaaacaaaaagctggtcttctggtttgttcgtgtcgatgacgaagggtatccggaaatcgcccgctgcacggaacgggaatttgcgaccattcttgccggtatcagcgccggcggtatgtactgcccggagtgtggcacggttcactggccggacggagtcgccccgcccttctga

SEQ ID NO: 75699 - DNA, 153 bp, Citrobacter koseri; identical to SEQ ID NO: 36492

SEQ ID NO: 75700 - DNA, 627 bp, Citrobacter koseri
atgtggcgttaccggataacgcggctactgtcccggaaatacccggagctggtaataccggatgaactggcagtggaaggaaacagcaaacgggactggaatcgcttcccggacacgcattaccgccgcggctggaatgtcaacatatccagggtgatggataacgccacacatgtggcggtgtacttcggctcttacctgaaaaagccaccggtgccgatgagtcggctggagcattatgccggtcaggatgaaatcggtctgcgttacaacagtcaccgtacaaaacgggaagaatacctgttgatgagtggagatgagttcatggaaaggttctcctggcatgtagcagataaggggttccgtatggtgaggtactacggtttcctgagtccggtgaagcgccgcttactggaagaagttgtgtacgtcataacggagacggtgagaaaaacggcgatgcaaatcacccggagagggatgtatcagaggttactgaaggttgacccgctgaagtgcattctgtgcggaagtcagatgcgttttacggggctgaagcggggttaccgactggcagagcaggccctgatgcatgagcgactggcacgacagcaggtgtgcggctga

SEQ ID NO: 75701 - DNA, 459 bp, Citrobacter koseri; identical to SEQ ID NO: 17231

SEQ ID NO: 75702 - DNA, 849 bp, Citrobacter koseri
atgaataatgatgagctggtcaccagacgtgcgcaggcgattgccgaagacaggtgtttctcgaaaggacgtctgcgcgatgaattcagaatgaagccagcccccggtgctgagccggttaagtggtataaaaatacttatggtggcaggttcgctgtataccgaattgcagactgtgttccgatgcgtgagaaacgccctctgacgagtaaacaacagctggctggccagcggctttccgttttatcccgactaaacagcaccagtggccggatggcacggcaggcatatgactggctgagtctggcaccactctttctggatactgaaacgacaggactggataataccgcggaagccctggaaatcggcctgaccgatgcggccggtcaggtggtatttgaaaccaggctgaagcccacggtcgccatcggggcgcaggctgccgccgtgcatggtatcagtgagcaggctctctgcggcgcaccatcatggacagatgtggcgcgtcaactgcggcatgcaatcggggaccgaccagtaattatctttaatgcccggttcgacatccgcattctgaaacagactgcggccgcacatagcgatccggctgactggctggaagaactgacggtatattgtgcgatggagctggctgcaggatattatggggccaccaaccgctatggcacgatttcactggcctgtgctgccagccaggccggactgacctgggaagggcaggcacactcagcgatcgccgacgcacggatggcggcaggggtggtaaacgctattgctgcatatcatctggaactgctgcaggaacaggcccggctgaaaatctga

SEQ ID NO: 75703 - DNA, 282 bp, Citrobacter koseri
atgatggagatattctggaccatgctggccagccaggacaggaagcgcattcgtgagtacattgcggagcagaacctgatggctgccattgaactggacgaacggattggttattcagccagcagcctggccgggcagccgtataaaggccgcaacggtcgtgtggaaggtacccgggaactggttattcacccgcattttgttctggtttatgaggtcgacagccagtggggaaaagtgtatatcctgcgagtattgcatactgcacagaagtggccatag

SEQ ID NO: 75704 - DNA, 270 bp, Citrobacter koseri; identical to SEQ ID NO: 39193

SEQ ID NO: 75705 - DNA, 858 bp, Citrobacter koseri
gtgactgatcttcaccaaacgtattaccgccaggtaaagaacccgaatccggtgtttacaccccgtaaaggtgccgaaacgctgaagttctgcgaaaaactgatggaaaaggcggtgggcttcacctcccgttttgacttcgccattcatgtggcgcatgcccgttcgcgtggtctgcgtcgacgcatgccaccggtgctgcgtcgacgggcaattgatgcgctgctgcaggggctgtgtttccactatgacccgctggccaaccgcgtccagtgctccatcaccacactggccattgagtgcggactggcgacagagtccggtgcaggaaaactctccatcacccgtgccacccgggccctgacgttcctgtcagagctgggactgattacctaccagacggaatatgacccgcttatcgggtgctacattccgaccgacatcacgttcacaccggcactgtttgccgctctcgatgtgtctgaggtggcggtggcttccgcacgccgcagtcgtgtggaatgggaaaacagacagcgcaagaagcagggactggatgcactgagtatggatgaactgatagcgaaagcctggcgttttgtgcgtgagcgtttccgcagttaccagacagagcttaagtcccggggaataaagcgtgcccgtgcgcgtcgtgatgcgggcagggaacgtcaggatatcgtcaccctggtgaaacgacagctgacgcgtgaaatctcggaagggcgctttactgccagtcgtgaggcggtaaaacgcgaagtggagcgtcgtgtgaaggagcgcatgattctgtcacgtaaccgcaattacagccggctggccacagcttctccctga

SEQ ID NO: 75706 - DNA, 261 bp, Citrobacter koseri
atgtcgcagacagaaaatgcagtgacttcctcattgagtcaaaagcggtttgtgcgcagaggtaagcctatgactgactctgagaaacaaatggctgctgttgcaagaaaacgtcttacacacaaagagataaaagtttttgtcaaaaatcctctgaaagatctcatggttgagtactgcgagagagaggggataacgcaggctcagttcgttgagaaaatcatcaaagatgaactgcagagactggatatactaaagtaa

SEQ ID NO: 75707 - DNA, 591 bp, Citrobacter koseri
atgaagctgattatttttattttcattgttctgattattgcagcgttacttatccggattatcctcagaagtgtaaatcagcattctcctttgctgatgcagttgcatgcggcaggtatacggaccggtgatgcagagcgaatactgtccggcggtgaatactggcaacatcagaagacgctgctgacagaaagggaagtcagttttatgaaaggactgttcagaattgtggatatgaagcggtggtatctgtgtccgcaggtacgggtcgcggatatcgtccagctgaacgggaatatccggccacgatcacgccagtggtggcagttattcaggatggtgtctcagtggcatgttgatgtggttatcgttgagcagtgttcgttcagtattgttgcagcagtagagctggatgatgccagccatttacgaccggaacgcagacgccgggatattcttctggaagaggttctgaggcaggctggtattccgttgctcagaagccacgatgccagaaaactgctgcagatgaccggagaatggctgaatacaacaggggctgatcagcagtccccggaacatcgtagctga

SEQ ID NO: 75708 - DNA, 462 bp, Citrobacter koseri
atgaggaaatatattccactggtattatttatcttttcatggccggtattgtgtgcagatattcatggacgggttgttcgtgtactggacggtgataccatcgaggtcatggactcacggaaggcagtgcggatcaggctgataaatattgatgcaccggaaaagaaacaggattatggccggtggtcaacggacatgatgaaatcactggttgcaggaaaaacggttaccgtcacatattttcagcgagatcgttatggtcgtattctcgggcaggtttatgcaccagacggaatgaatgttaatcagtttatggtccgggtcggggctgcctgggtatatgagcagtacaacacagatcccgtgctgcctgtccttcagaatgaagccagacaacaaaaacgtgggctctggtcagatgctgatccggttcccccctggatatggagacaccgtaaataa

SEQ ID NO: 75709 - DNA, 561 bp, Citrobacter koseri; identical to SEQ ID NO: 5114

SEQ ID NO: 75710 - DNA, 861 bp, Citrobacter koseri
atgaaaattacggatcacaaactctctgaaggtattgccctgacatttcgtgttcctgaaggaaatataaaacatcctttgattatcttatgccatgggttttgcggtatcaggaatgttctgctcccttgctttgcgaatgccttcacagaagcaggattcgcaacgattacttttgattatcgaggattcggtgagagtgatggagaacgagggcgtctggttcctgcaatgcagaccgaagatattatttcagttatcaattgggcagaaaagcaggaatgtattgataatcagcgtattgggttatggggaacatcgctgggaggggggcatgtcttcagtgcagctgcgcaggaccaacgcgtaaaatgtattgtcagccagctggcttttgctgatggtgatgttctggttaccggagagatgaatgaatcggagagagcgtcttttctgtccacgctgaataaaatggcagagaagaagaaaaacaccgggaaagagatgtttgtgggggttacccgggtactgagtgataatgaatcaaaggtattcttcgagaaggtaaaaggtcagtatcctgaaatggatataaaaatacctttccttacggttatggagacgttgcaatataaaccggcagagagcgcagccaaagtacagtgcccagttttgattgttattgccggccaggatagtgttaatccaccagaacagggaaaagccttatatgatgctgttgcttctggtactaaggaattatacgaggaagctgacgcatgccattatgatatttatgaaggcgcgttttttgaacgtgtggcggcagtacagacgcaatggtttaaaaaacatctttaa

SEQ ID NO: 75711 - DNA, 747 bp, Citrobacter koseri; identical to SEQ ID NO: 5112

SEQ ID NO: 75712 - DNA, 5271 bp, Citrobacter koseri
atgatgagtatcgcgcaggtcagatcggccggaagtgccggtaactattataccgacaaggataattactatgtactgggcagcatgggagaacgctgggccggcaggggggctgaacagctgggactgcagggcagtgtcgataaggatgtttttacccgtcttctggagggaaggctgccggacggagcggatctaagccgcatgcaggatggcagtaataagcatcgtcccggctacgacctgaccttctccgcccccaaaagtgtctccatgatggccatgttaggtggcgataagcgcctgattgatgcacataaccaggccgtggactttgctgttcgtcaggtggaggcgctggcctccacacgggtgatgacggacggacagtcagaaacggtgctgaccggtaatctggtgatggcactgtttaaccacgacaccagtcgcgatcaggaaccacagttacacacgcatgcggtggtggctaatgtcacgcagcataacggtgagtggaagacactgagcagtgacaaagtggggaaaacggggttcattgagaatgtgtacgctaatcagattgcctttggcaggctctaccgggaaaaactgaaagagcaggttgaggcgctgggctatgaaaccgaagtggtgggtaagcacggtatgtgggagatgccgggcgtaccggtggaggccttttccggacgctcacaggctatccgggaggccgtcggggaagacgcctcgctgaaatcccgggatgtggcggcactggatacgcgtaaatccaaacagcacgtcgatccggaaatcagaatggctgaatggatgcagacgctgaaggaaaccgggttcgacatccgggcatatcgtgacgcggcggatcagcgtgcggagacccgcacgcaggcgcccggggctgtttcacaggaggggccggatgtgcagcaggcggtgacacaggccattgccggattaagtgaacgaaaagtgcagtttacgtacacggacgtgctggccagaacggtcggtatactgccgccggaaaatggtgtgattgaacgggcacgcgccggtatcgatgaggccatcagtcgtgagcagcttatccccctcgaccgtgagaaggggctgttcacatcaggaattcatgtgctcgatgagctgtccgtccgggcactcagtcgtgacatcatgaaacagaaccgggtgaccgtacatccggagaaaagtgtcccccggacggccggttacagcgatgccgtcagtgttctggcacaggatcgcccgtcgctggccattgtgtccgggcagggcggtgcagccgggcagcgtgagcgggtggctgaactggtcatgatggcccgggagcaggggcgggaggtgcagattatcgctgctgaccgtcgctcgcagatgaacctgaagcaggatgaacggctgtccggtgaactgataaccggacgtcgtcagctgcaggagggcatgaccttcactccgggcagtaccgttatcgttgaccagggcgaaaaactctccctgaaagagacgttaaccctgctggacggtgccgcacgtcataacgtacagatcctgataaccgacagcgggcagcgaaccggtacaggcagtgcgctgatgtccatgaaggatgccggggtgaacacatatcgctggcagggcggagaacagcgaccggccaccatcatcagtgaaccggaccgtaatgtccgctatgcccggctggcaggagattttgcggccagcgtgaaagccggagaagagagcgtggcacaggtcagcggggtacgggaacaggccatactgacacaggccattcgcagtgagctgaaaacacagggcgtgctcggacacccggaggtgaccatgaccgccctgtcaccggtctggctggacagccggagccgttatctgcgggatatgtaccgaccggggatggtgatggagcagtggaacccggagacacgcagtcatgaccgctatgttatcgaccgggtgacggcgcagagtcacagcctgaccctgcgggatgcgcagggcgaaacgcaggtggtgcgtatttcctccctggacagcagctggtcgctgttccggccggaaaaaatgccggtggcagacggcgagcgactgagggtgacagggaaaattcccgggctccgcgtctccggcggtgaccgcctgcaggtggcatccgtcagtgaagatgtgatgacggttgttgtgccggggcgggctgaaccggccaccctgcctgtggctgattcaccgttcacggcactgaagctggagaacggctgggtggaaacgcccgggcattccgtcagtgacagtgcgacggtgtttgcctccgtcacacagatggcaatggacaacgccaccctgaacggtctggcccgcagcggtcgtgatgtccggctgtattcctcactggatgaaacccgtactgcggaaaaacttgcccgccatccctcctttacggtggtttctgagcagataaaggcgcgggccggtgagacattgctggaaaccgctatcagtctgcagaaagccgggcttcacacgccggcacagcaggccattcatctggcccttcctgtgctggaaagtaaaaacctggccttcagcatggtggacctgctgacagaggcgaagtcgtttgctgcagaaggaaccggttttactgaactgggaggggaaatcaatgcgcagataaaacgcggtgacttactgtatgtggatgtggcaaaaggctatggcaccggcctgctggtttcccgtgcgtcgtatgaggcagaaaaaagtattcttcgccatattctcgaaggtaaggaggcggtcacgccgctgatggagagagtacccggcgaactcatggagacactgacgtcgggacagcgtgccgccacccgtatgatactggaaacgtccgaccgtttcacggtggtacaggggtatgccggtgtgggtaagaccacacagttccgggcggtgatgtcagccgtgaacatgctgccggcgagtgagcgtccccgtgttgtggggctggggcccacgcaccgtgcggtcggggagatgcgcagcgccggcgtggatgcgcagacactggcgtcctttctgcatgacacgcagctgcagcagcgcagcggagaaacgccggatttcagcaacacgctgttcctgctcgatgagagctcaatggtgggcaataccgagatggcacgggcatacgccctgattgcggccggtggcggtcgtgccgtggccagtggtgacacggaccagctgcaggccatcgcgcccggtcagcctttccgtctccagcagacgcgcagtgctgccgatgtggtcatcatgaaggagattgtgcgtcagacgccggaactgcgggaggcggtatacagcctgattaaccgggatgtggaaagggcactgtccgggcttgagagtgtgaaaccgtctcaggttccccgtcaggagggcgcatgggcaccggagcactccgtgacggagttcagtcacagccaggaagcgaaactggcagaagcgcagcagaaggcgatgctgaaaggtgagacttttccggatgtccccatgacactgtatgaagccattgtccgcgactataccggcaggacaccggaagcacgggagcagacgctgattgtcacgcacctgaatgaggaccggcgcgtactgaacagcatgattcatgatgcacgggaaaaggccggtgagctggggaaagagcaggtcatggtgcctgtcctgaacacagcgaatatacgtgacggggagctgcgtcgtctctccacctgggagaaaaaaccggatgcccttgccctggtggataatgtgtatcaccggattgccggtatcagcaaggatgacgggctgataaccctggaggatgcggaaggtaacacgcggctgatttcgccccgggaggcggtggctgaaggtgtcacactgtacacaccagacaaaatccgggtggggaccggcgaccggatgcgcttcacgaagagtgaccgggagcgcggttatgtggccaacagcgtctggacggtgacagcggtttccggtgacagtgtcacgctgtcagacggacagcagacccgggtgattcgccccggccaggagcgggcagagcaacatattgacctggcttatgccatcaccgcccacggtgcgcagggggcgagtgaaacctttgccatcgcgcttgaaggcacggaaggtaaccggaaactgatggccggctttgagtcagcctacgtggccctgtcgcgtatgaagcagcatgtgcaggtgtacaccgataaccgtcagggctggacggatgccattaacaatgccgtacagaaaggaactgcccacgatgtgctggagccgaaaccggaccgggaggtcatgaatgcgcagcggctgttcagtacggcacgggaactgcgggacgtggcggcaggccgtgccgttctccgtcaggcagggctggccgggggagacagccctgcacggtttattgcaccgggacgtaaatatccgcagccgtatgtggcactgccggcttttgaccgtaacggcaagtcagctggtatctggctgaacccgctgaccacggatgacggaaacgggctgcggggcttcagtggtgaaggccgggtgaaaggcagcggggatgcgcagttcgtggccctgcagggcagccgtaacggagagagcctgctggctgataatatgcaggatggcgtccggattgcccgtgataatcctgacagcggtgtggtggtgagaattgccggtgaaggtcgtccgtggaatcccggtgccatcaccggtggccgcgtgtggggggatatcccggataacagcgtccagccgggggccggaaatggcgaaccggtcacggcagaggtactggcacagcggcaggctgaagaggccatccgccgtgaaacggaacgccgcgcagatgaaattgtcaggaaaatggcagagaacaaacctgacctgccggacggcaaaacagagctggctgtcagggatattgccggacaggagcgtgaccggtctgccatatctgaacgggaaaccgcactgccggagagtgtgctgcgtgaatcacaacgggagcgggaagcggtccgggaggttgcccgggaaaatctgctgcaggagcgtctgcagcagatggagcgggatatggttcgtgacctgcagaaagagaaaaccctgggcggagactga

SEQ ID NO: 75713 - DNA, 201 bp, Citrobacter koseri; identical to SEQ ID NO: 20869

SEQ ID NO: 75714 - DNA, 438 bp, Citrobacter koseri
atggttattagcattcgccgatcgcggcaggatgaaggggaaaaactgattgctatctggtgtcgttctgttgatgctacgcaccattttttgtctgcatcctatcggagcgagctggaagagctggtgcgttcttttttaccagaagcgccgttatgggtggcagtgacagagcaggatgagcccatcgcgtttatgctgctgaccgggcagcacatggatgccctgtttgtcgatcccgacgttcgtggctgcggcgtagggaaattgctggttgagcatgcgtttacgctggcccccgagttaacaaccaacgttaacgaacagaatgaacaagcggttgggttctacaaaaagatgggatttaaagtgacaggacgttcagaggtagacgatcttggcaggccgtatccgttattgaatctggttcatacgtag

SEQ ID NO: 75715 - DNA, 930 bp, Citrobacter koseri
atgccaattcgcgtgctggacgagctacccgccgtcaatttcttacgtgaggaaaacgtctttgttatgacgacatcccgcgcttctggccaggaaattcgtccgctgaaggtgcttatcctcaacctgatgccgaagaagatcgaaacggaaaaccagttcctgcgcctgctgtcaaactcaccgcttcaggtcgatgttcagctcttgcggattgatgcccgtgaatcgcgtaatacaccggcagagcatctgaacaacttctactgtaacttcgaggatatctgcgatcagaacttcgatgggctgattgtcaccggcgcacctctgggcctggtggagtttaatgatgttgcgtattggccgcagattaagcaggtgctggagtgggcgaaagatcacgtcacctcaacgctgtttgtctgttgggcggtacaggccgcgcttaatattctctatggcattccgaagcaaacccgcacagataaactttccggcgtctacgaacatcacatccttcatcctcatgctttactgactcgtggttttgatgattcattccttgctccgcactcacgctatgccgacttcccggcggcgctgattcgggactataccgaccttgagatcctcgcggaaaccgaagatggagatgcctacctgttcgccagcaaagataaacgaatcgcgtttgtaaccggtcacccggagtacgatgcccatacgctggccagtgaatatttccgggatgttgaagcaggtttaagtccgaatgtaccgtacaactatttcccgaaaaacgatccgcaaaacaaacctcgcgcgacctggcgcagccacggtaatttgctgtttaccaactggctcaactattacgtctaccagatcacgccatatgatctgcgtcacatgaatccaacgctggattaa

SEQ ID NO: 75716 - DNA, 1602 bp, Citrobacter koseri
atgaatcaacaggcaacgacaaccgatgaactgacctttaccaggccgtatggtgagcaggagaagcaaattctgaccgcagaagcggtagagtttctgaccgaactggtgacgcgttttacgccgaagcgtaacaaactcctcgctgctcgtattcagcaacagcaggatattgatgacggtaagttgcctgattttatttcggaaacagcttccattcgtgaaggtgactggaaaattcgcggtattcctgacgatttacaggatcgtcgcgtggaaatcaccggcccggtagaacgtaaaatggtgattaacgcgctgaatgctaacgtgaaagtattcatggccgactttgaggattcactggcgccggagtggagcaaagtgattgatggtcagatcaacctgcgtgatgcggtgaacggcaccatcagctacaccaacgaagccgggaaaatctatcaactcaagccagacccggcgttactgatttgtcgcgtacgcggtttacacctgccggaaaaacatgtgacctggcgtggtgaagccattcctggcagcctgtttgatttcgctctctactttttccacaactataaagcgttgctggcaaaaggcagcggcccgtatttctacctgccgaaaactcaggcctggcaggaagccgcctggtggagcgaagtcttcagctatgccgaagaccgttttaatctgccgcgcggcaccatcaaagccaccttgctgattgaaacgctgcctgccgtcttccagatggatgagatcctgcatgcgctgcgtgaccatattgttggtcttaactgcggccgctgggattacattttcagctatatcaaaacactgaaaaatcacccggatcgcgtcctgccggaccgtcaggtggtgacgatggataaaccgttcctcagcgcctattcacggctgttgatcaaaacctgccacaagcgcggtgcatttgcgatgggcggcatggcggcgtttatcccgagcaaagacgccgagcgcaacaatcaagtgctcaacaaagtgaaagcggacaaagcgctggaagccaataacggtcatgacggcacctggatcgcgcacccggggctggcggacaccgcgatgacggtctttaacgaggcgctgggcgaaaaccagaaccagctgtttgttacccgtgatgaagatgcgcccattactgccgaacagctgctggcgccctgcgagggcgatcgtaccgaagagggaatgcgcgccaatattcgcgtggcggtgcagtacatcgaagcatggatctccggcaatggctgcgtaccgatttatggcctgatggaagatgcggcaacggctgaaatctcccgtacctctatctggcaatggattcatcacgagaaaaccctgagcaacggcaaacccgtcacgaaagcgctattccgccagatgctggccgaagagatgctggtgatccaggacgagctgggagagcaccgcttcagcagcgggcgctttgatgaagccgcgcgcctgatggagcagatcactacctctgatgaactgatcgatttcttgaccctgccaggctaccgcctgctggcttaa

SEQ ID NO: 75717 - DNA, 1287 bp, Citrobacter koseri
atgaaaacccgtacccaacaaatcgaagagttacagaaagaatggacgcaaccgcgctgggaaggcatccgtcgcccgtatagcgcggaggaagtggtgaaattacgcggctcggtcaacccggaatgtacgctggcgcagcttggcgcggccaaaatgtggcgtctgctgcatggcgacgcgaaaaaaggctacatcaacagcctcggcgcactgaccggcggccaggcgctgcaacaggcgaaagcgggcattgaggcggtctatctgtccggctggcaggtggcggcggacgctaacctggcctccagcatgtacccggcaaactctgttccggcggtcgtggatcggatcaacaacactttccgtcgtgcggatcagatccagtgggcatccggcattgagcctggcgatccgcgctttgtcgattatttcctgccgatcgttgccgatgcggaggccggttttggcggcgtactgaacgcgtttgaactgatgaaatcgatgatcgaagccggtgcagcggctgttcacttcgaagatcagcttgcgtcggtgaagaagtgcggccatatgggcggcaaagttctggtgccgacgcaggaagccattcagaaactggtggctgcgcgtctggcggctgacgtgatgggcgtaccgacgttgctgattgcccgtaccgacgcggatgcggcagatctgataacctccgactgtgacgcgtacgacagtgaatttattaccggcgaacgcaccagcgaaggcttcttccgcacgcgtgccggtattgagcaggcgatcagccgtgggctggcgtatgcgccttacgcagacctggtgtggtgcgaaacctccacgccggaccttgaactggcgaagcgctttgccgatgccatccatgcgaaatacccgggtaaactgctggcctacaactgctcgccgtcgttcaactggcagaagaacctggacgataaaaccatcgccagcttccagcagcagctgtcggacatgggctacaagtaccagttcatcaccctggcgggcatccacagcatgtggttcaacatgttcgacctggcacattcctatgcgcagggtgaaggcatgcgccactacgttgagaaggttcagcagccagaatttgcggcggccaaagacggttacaccttcgtctcccatcagcaggaagtggggacaggctacttcgacaaagtgaccaccattattcagggcggcacctcctcagtgacggcattaacgggttccactgaagaatcgcagttctga

SEQ ID NO: 75718 - DNA, 390 bp, Citrobacter koseri
atgagcgacctgaatcagtttcgtagtaaagggccggaactgttggtggaactggcacagcacacctctgagatcgtccgtgagattatcgctcttgaacctgcgcttgccgatcagattggtcaggctgtcgcaaaccgtatgatgcaggtctggggcgggcagaacgtctattttcctatggggatggtctggaaagtcagccagcgagatcgggatatcttcctggagtttgacgggcgcaaccatcacgaactggcccgcaagtttggcgtttcgcttcagtgggtctacagcgtggttaagagggttagaaaagaagaactggatcggatgcagggaaaactgtttgatgctgaccccgatgccgatacgggtaaaaaggagtaa

SEQ ID NO: 75719 - DNA, 426 bp, Citrobacter koseri
atgaccagacaacggttaattcagcttatccacattgcccgtaatgacctccagatggacgaggacacctatcgccagatgcttcaggggctgactggcaaagcctcaacgaaggggatggatgtaactcagcttaaccgtgttgtggaatccatgaaaaagaaaggctttcgtattaagcctgccgggaaagccaggtctggctttccactggataaccatccacagtcaaagaaaatccgtgcgctatggcttgaaatggctgcggctggcatcgttcgagacagttcagaactggcgctgtcgcaatgggttaaacgagaaacgggtatcagtgcgttacgctggctcagcaatgagcaggcaagtagcgttattgagaaactgaagaagtggcagcgcagagctgcaggggggaagcaatga

SEQ ID NO: 75720 - DNA, 207 bp, Citrobacter koseri
atggcagttgaattctgtatcgctgtgctggttatgtactgcatggccggttggtgcaccatccggttgtactctcatatgggatattttatccgtttcagcggacgctggcgctgggttgtatggacactggttttttccttgtggcctgtatcattaccgctttttgttgaagcgtttggtcagatggtcagggaggggaactga

SEQ ID NO: 75721 - DNA, 693 bp, Citrobacter koseri
atgactgataaagaaaagattctggagaaattaaagaaactcctggcactgtcaaaatctgataatccacatgaagcagctctggctctgcagcgcgcccagaagctgatgctggcgtataacatcacccaggctgacctggcgctaagtgatattgatgaaagcatcagtaactactgggctgcaggtagcgttaatccgccgcgttatatgctgggcctgctggatattatccaggtggcatttggcgttaagtctataattcattccggctttaaacccagcgttggtttttacggtaataaagaccgggtcgagctggcctcatatacatgggaagtactggccagacaattaatcgtggcccgtaaaaactatatccgtcagcagaataagcgaatcaagaacacgaccaaaaccagccgtggtgacaaatttgctgaaggctgggtactggctgtgcgcagcgagattcagttgttcgcgatgtcccgtgaagaacgggagctggccagcctctggcttgaacagaaataccctgactcagaaacaaccacaggccgaaaagccgggaaatcccgcgacgcagacatgtcccgccacatcggttacagagagggagaaaacgtccggttgcatcagccagttagcgggcaggaacagcagaaactgggaggtgactatggcagttga

SEQ ID NO: 75722 - DNA, 492 bp, Citrobacter koseri
atgcaacagaatagccaattaactaatgagcgcctggcccaggtctatcgaaacctgaaacgctgggctgaccacgataacgctttaaatagctgtatcagcggtcaaaagatagaccccatatttcatgattgtgtgctggcactggctgaactacaggagcttcgcaagcctaatcaacgtgaacaagttcgtcgtgaacatgccgagtggtcaaatgcgacattcggcgatgttggccctattggccctttgaaacacctgtcgaaagaggctctggaggcatcagccgacccatccgatctgcttgagtgggccgatatgcagtttctgttgtgggatgctcagcgccgtatgggtatttctgatgaatcaatcaccagggcaatggttgaaaaactggcgataaataaggctcgccagtggccagagccgaaagatggagagccgcggctgcacataatagaaccaggtgcaggtaaggaggattaa

SEQ ID NO: 75723 - DNA, 228 bp, Citrobacter koseri
atgaaaggcaagatattaaatcccccctcaacaactgattatttggcccgctgtgtagaacgcctgaaatctttaaacgcagacaatcagcgagacgtccgggttaatctcggcgtacttaaagcggcccgcagtgaaatcctggcccatgtcaagctaaacgggaaaggcgtaatgactgatatggttctcaatgcgctgaatagcgccattaatgatggcaggtaa

SEQ ID NO: 75724 - DNA, 168 bp, Citrobacter koseri
atgaaagtctgggtaataaaattattgaatctggcgatgcttgcagttacgggcgctatggatttagtcggaaaattactttactggtctctttttgctacagctgtcggtgccggactgactttcggttctctgttagcgttctgttatgtcatttacgggagttaa

SEQ ID NO: 75725 - DNA, 189 bp, Citrobacter koseri
atgtccatcaaatgtaccaactgccagaaaggtatcaccaccctgaagttcagcgacgccagcgtcattatctccggtaagtaccgtgtgccagccgtcctcatcacgctggtatgcccccactgcagccagcattactacactgaagtcccggccatggagttcatcccctgcgaggcaaaacaatga

SEQ ID NO: 75726 - DNA, 612 bp, Citrobacter koseri
atgagcgaagtaaataaagaagactacatgaaagaccgcaagggccgtctggtgccaataagccagatttccgattacgacctcgcaatggatgctttcgtccgggaacaggttgctgctgctaaggttaaaaacgctgacctcagtgacttcaagcgccgcgcctttgatgattgctatgcctggctcgaccttgtggccgagaagtacggcagaacgcgtggcggagctaaaggcaatgtaacgtttcctacgtttgacggtagccagcagatcaccatccgcgtgcaggaaaccctgactttcgggccggagctgcagattgccaaagacctgattgacgagtgcgtcaccgaatggtcggaaggcgcgaacgccaacctgcgggccatcatcagcgatgctttccaggtggacaaagagggccagcttaataccggacgtattctttccctgcgccgcgtcaagattcaggacgagcgctggaaccgggcaatggaggccatatcggaatcactgcaggtggcaatgtccaaaacctatattaatttccgggagaaagataaacacgggaagctaattaatattccgttagatatcgctgccatttaa

SEQ ID NO: 75727 - DNA, 270 bp, Citrobacter koseri
atgaaatccatcaccgatatcaaccagcagatgagcaaggtacagtccgccattatggcgctcaacgccatgaatctcaccgtacagagcgtcatgattgctggcagtaaaccggttatccgtattgccagaaacggacattgctactgtctgctggaacaggggaaagcgagttatacccatgttggccatgacgcatcagggcgctttcgccagggcgtatttgagttgcatggctgccgtattacctggtcagagtcattacattaa

SEQ ID NO: 75728 - DNA, 1167 bp, Citrobacter koseri
atgctggtactgaagcaacaactgaaagaggcccgtatcccgcaggcggtggtggcaagagcagtcgccgtttccgaggccacgctggcccagattgtgaaccataacgagtggccccgtaccagccccgaagaggtgcgccagcggctggcgtcctggctggaaagtcagggaattgatacagcaaagagttttgatgctgcacagggcgctgtcacgccccgtacagcgggtactaccgataaaaccaacctcagtgaggaagagaacatgttactcaaaaagcaggtgttatttccagcaaccaaaaaagcgtttggccttttccgtgacccgttcgccgatgaagccatgcagggcgcggacgatgtgttcaccacgcctgatatccgctacgtgcgtgaggcgctgttccagaccgcccgccacggtggctttctggcggttatcggcgagtccggcgcggggaaatccacgctgcgccgcgacctgattgaacgcgtcaaccgcgagaatgcgccggtgattgttatcgagccatacatcatcgccatggaagacaacgacgtgaaaggcaaaaccctgaaggcggcagctatcgccgaggccatcatcagcaccatcgcgccactggaaagcatcaaacgcagccaggacgcccgcttccgccagttgcaccgcgtcctgaaggacagcagtcaggcgggtttcagccacgttctggtgattgaggaggcccacagcctgcccattccgacgctgaagcacctgaaacgcttcttcgaactggagtccggcttcaaaaaactgctgtccatcgtgctgattggtcagcctgaactggcggacaagctgtccgagcgcaacatggaagtgcgtgaagtcgtgcagcgctgcgaggtggttgaactgctgccgctggacaacagccttgaagagtttctggcgttcaaactgcaacgcaccggtaagcagctggccgacatcatggacgccagcgcagtggaagccatccgcgcccgcctgagcaatctgggcagcaaccgtaaaagcatggtcagcctgctgtatccgctggccgtcagtaacctggtgatagcggccatgaatctggccgctgaaatcggggtaccgcaggtcaacgccgacgtcgtcaaaggggtttaa

SEQ ID NO: 75729 - DNA, 1770 bp, Citrobacter koseri
atgagtgccgccctgactgaacgactggtttatgttgcccgcgcggcacgtgacgcggggcatggtaagcgcggtgcgatatacgacgcagcctgcgctgaactgggtatgtcccgcgccaccctgctgcgcaagctgaaggaggtatcagtgactgacaaacgcaaaaaacgcgccgatgccgggcgcagcgccctgagccgcgacgaagctgcgctgatatccgccacgctgcgcgaggccacccgtaagaacggtaagcgcctgtattccatcgcggatgcggtggagaccctgcggtcaaacggctttatcaccgcaggcagaacggacgagaccacaggcgagtttttcccgctgtccgaggacaccatcagccgcgccctgcggaactatggtctgcacccggaacagcttgacgcaccggctccgtcatccgagatggccagcctgcatcccaatcacgtctgggagattgatgcttctctttgcacgctttactacctgagcaacggccataaagggctgcaggtgatggacagcgcgaagttctacaagaacaagcctgccaacatcgcccgcatcgccagtgaccgcgtgtggagttacgagattaccgaccataccagcggctggatttacgttgagtatgtgatgggcgcggagtccggtgagaacctctgttctgttcttatcaacgccatgcaggaacgcggcggcgctgatgtgctgcacggcgtgccgaaaatactctacctcgaccccggctcggcgaacactgcgggtatgacgaaaaatatgtgcaggtcactgggcatcgacctgattgcgcacaaaccgcataacgcccgcgctaccgggcaggtggagaaggcccgcgacattatagaacgcaagctggagccgggcctgaagttccagccggttcacagcctggaagaactgaacgcgctggcggtgaaatggcgcagccactttaacgccacagcagtccacagccgccacggtaaaacccgcacggatatctggctgaaaatcaccgcagagcagctgaagaaagcaccttccgtcgaggtatgccgcgaactggctgtggctgcgccggaaagccgcaaggtcacatcaaaactgcgtgtgccgttccggggcactgagtttgacgtatcaacggtaccgggcgtactggtcggcgaaaaactgatgattacccgtaacccgtggcgcagcgatgtggcgcaggtggtactgaccggcgaggacggtcacgagacgttcttcctggttgaggaggtcagaaaaaacgagttcggctttgccgagagcgcggcggtatttggcgaaaactacaaagccctgccggagaccccggcgcagacagcagcaaaagaaatcgaagagctggtcaccggcacggataacgccgccgatgcagctgctgcacgcaaggcgaaggcgctgccgttcggcgggcgacttgacccgtacaaacatatcgacgacaccacgcttccggcctatatgccgaagcgcggtcaggcttcagacgtgcgcgggccgcgtattgagcagcgtccgctgacccatgtggaggccgcgaaagccctgcgcgagaagttcagcgctaacggccacacctggacgccggaacattaccgccagttaacggcgcagtacccggatggcgtaccggaagccacgctggatgaggtcatggtcaccctgaccactccggcccgcaacagcgttatcagcatcgttaacggtaactga

SEQ ID NO: 75730 - DNA, 909 bp, Citrobacter koseri
atgggacgcacaaaattacaaccagttgaattagtggaagatgcaccgctgaccgatggtctcagcgtcaatcttaatgccatgaccgaacaccgcctcgaaataatgcaacagtttggggaaggtttgccttacgaacgtgatcgcatcgtccatgaaacaaagttctatatggcccaatcagccgaagctatgttagaggctggtaagaggctgattattcttaaggaatgtgaaccccatggcgatttcactcacattatcactgaacaactgggtcttgcagaaagaactgcccgattggtcatgcaagctgcagttaaatattgctcaccagaattagccccaaaacggcaagcgcttgccgttttggggaaaacaaagctgtttgagttgatgaccgaagatgatggggaccttgccgaattagccgatggcggcacgattgccggtatgagcctcgatgatattgatcgcatgaccagccgcgaactgaaggctgctctgcgcgaagcccgcgaaaccaacgcagcacaacagcgtgtactcgctgataaaaacgaaaaaattgatgcgctctctacgaagctggagaagaaatcccgtattcagccacccaagcctgacgaagaggtgaagaagctgcgcgcggaagtgacggcgttagcggttgaggcggaatctgccatcgccgttcgactgtccagcgcctttgaaaccctgtgcgcatactgcgctgaaaacatgattgatacacccagagacttcatggcgggtctggtctgccagctggagagcaccgcgcgtagcctgcgctccacatttgacctgccggacgagccgacaggcaacgccgtcccttcatggctgactgacccgaccccacagattaacgggcaggaggcataa

SEQ ID NO: 75731 - DNA, 306 bp, Citrobacter koseri
atgagtaaaccaaatacatcaagctcaggtacccgtattttgcgtgtccttaaggctttacgcggtcacgctctgaatggtgtttctaacggtgaactggcatcggctttaggcgagtccccggcgaatatcaatcgggcgctcaacacccttattgaagaaggactggccctgaaactggacaacgggcgctttgccccaggagtccaactattacaaatcgccatggcgcacagtaccgaaatggcacgggcgcaggatcggatcaatgaaattaaccagcgtgttatggctggcagtcgctaa

SEQ ID NO: 75732 - DNA, 225 bp, Citrobacter koseri
atgaacaaacaacaggttcgggcacggctggttgaacgaggcagtagcttgcgccagttcgcgcttaacgcgggctatgagccacgaacagtcacccaggctgtcagccgctgggcaggcaaaagtgaacttccacgcggtcgtttgacttatcggattttgcgagacctttcggtcgcaataggcaaagaagttacccccggcatcctcaaggaggcgtcatga

SEQ ID NO: 75733 - DNA, 411 bp, Citrobacter koseri
atgagtataaaaaagagattgcgcgaagcgatggatgctaagggtttgacaatcaaggcattgtctggcttgtcgaaaattccatatcgctcacttcaaaactatctgcgtggagagagagaacctaatgcagaggctcttgttgcgttaagcacccatttgaacatatcaatagattggctacttactggcaaaggggaagctgtgggggtagagaaagcacagccagctaatcaggagcagcatttcaaccagtctgatctgaagttattggagctgctcaaccaattggagccagaggtgcgaaaagagttgctgcgaggcgctgaggaaaaacagcgaatgattgatatggaaaaacagcttaaggagctgtccgcagcattcgagagattaaaaaatacgggttaa

SEQ ID NO: 75734 - DNA, 534 bp, Citrobacter koseri
atgactatgcgcaagttatttttatcgttgatatttgttttagctgggtgtggagataataccgagcctgctgatacatccaccacagctaaggagcacgcggtttttagcgttgaaactgataatccggttgtgaatcgcgaattaccgttcattcgccaacaactgcccggtttggacaagtacgcgggtagttttgaaaaaatcgaagtatccgaggatagcgaacgcccggtgacaacggtgcaatttcacattaaagacgaaaatactattccaagtgactacatagcttctggtcataattgttttttgttcatatcaaataacgcccatgaagtgaaaatatctaaatcagtatgccaggctgttttttttgataaaacggatgttcccggtggagacctgaccgtgaaacttgataaggaaaatgttcctgtgacagatgatggcaaggcaccacgagagggatgcttgaaggttttttcaccaaagcctaatagtgattcctggacgtgcccaaggcttaattaa

SEQ ID NO: 75735 - DNA, 771 bp, Citrobacter koseri
atgaaagaacaatctttacccatcgtcccatggattggcggcaaacgtcgtctggctaagcatattcttcctctgttcccggcccatacctgctatgtggaaccattctgcggggccgcagcgctttattttctcaagactcccagcaagaccgaagtcattaacgatatcaacggggaactggtaaacctctatcgggtggtcaagcatcatctggaagaatttgtccgccagttcaaatgggcgctggtcagccgtcagatttacaaatggttgcaggatacgccggaagaaacgctcaccgacattcagcgggcggcccggttctactatctgcaaaaacaggcgtttggcggtaaggtcgcggatcacactttcggaacctccaccaccagtgcaccgcgtttcaacctgctacgtatcgaagaagaactgtcgatggcacacctgcggctgtcgagaacgctgatagagcatctggactggtgccagtgcatagagcgatatgatcgcccgcacacactgttctactgtgatccaccgtactggggaacggaaggctatggcgtagattttccgatgggtaactatatccacatggcagagctggcgcggagcatcaaagggaaaatgattatatcggtcaacgatatcccggaaatgcggcaggtgttcaacggcctgaatattcaggctgtcgatatcagctacaacctgaaggtcacaggtaaagctacaccacggaaagaattggtgatttgtaatttttaa

SEQ ID NO: 75736 - DNA, 351 bp, Citrobacter koseri
atgaaaaccattaaaaaattcattccccctgttaaaaagccccgtctcagcggctggctgctgacctctgtgctgctgcttgggaccatcggtctggtctcgccccagcagctgccggtggtcgtctacaagctgtcgctcatcacgctggcggctgtgctgggctactggcttgatcgttcgctgttccccaaagcccgccccggccagtacctgaagcatgatgaaaagttgatggctgatggtcgcttccccgtccagaccggcctccacctggtgttttctgccgcattgatccgccgtgcgctgattgttgctgcggtctgtatggccgtggcgacgggactgtga

SEQ ID NO: 75737 - DNA, 723 bp, Citrobacter koseri
atgagctggcctcaaatcactctcatcatcctgttcgcctttggtctgggcgtaacagcgattaagcacggcgaaccacgtaacgataaatacagcttctggtggcagctcgcaggcaacctggtgattgcctggctgctctggtgtggcggcttcttcagtcaggccagcgcagcgcaacctccgcaggccgcgctgcagtatcgcggtgatgtgatccgcaatgcccggcttgaatgggggctgtctgcgccggtggctgacttcgccgcgcagctgcatcaggaaagcggctggcgacctgatgctgtctcgccggttggtgctcaggggctggcgcagtttatgcccgccactgctgactggataagccagctgatgccggggcttaacagtcgcgagccgtttaatcctgcatgggccatccgtgcgctggtcagctatgaccactggctgtggcagcgcgtcagcgccgccaacagctgcgagcgtatggccatgacgctgtcaggctataacggcggtctgggctgggtacagcgggacaagcggctggcctcacagcaggggctggacagttctcgctggtttggacatgtcgccacggtgaatgccgggcgcagcgctgccaactggcgggagaaccgtcattatccgcagcgtatcctgcacgaactggccccgcgctatctcacctggggaggcggcagctgtgtggactag

SEQ ID NO: 75738 - DNA, 654 bp, Citrobacter koseri
gtgtggactagcctgataaaaaaactgccgtggcgcggcatgctattcgcgcttgccttagtgggggtgctgtatggcctgtaccactggggatatcgcggtggatacagtgacgcaaaacgcgacggagatgtggcactcatcacgctgcagtcagcattcgacacgtacaaaacggagcaggcaacgcgtgagaacgttgcgctgcgggcctgggcaaaacggtatcaggaacaggttgccgtcgggcagcaggctgaagccagttaccttgagcaaattgctcaactggagagccagaacaaacaactacaggggcaaattaacgatgtcacacagcgctggattgatgaaaaaggtaagagccatcccattgagtgcgtgtttactcgcggtttcgtgcgccagtacaacgcagccctcggatatgacaacgcatccgtcgacaccggtcattcagatgcaactgccgccgctggcaccggcactggcgcagcgtccggtcaacctgaaaccgctgacgcctggctacgcgactcaggcgtctcccagcgtgacgtcctcgccaacatcatcgacaacgcgaagcagtgccgcagctggcgcagccagataaacagtctgctggacgaacgggaaggattacagaaatga

SEQ ID NO: 75739 - DNA, 333 bp, Citrobacter koseri
atgacgttgcaggttgaattctggacggtggtgggcttcctcatcagctttatgggctttgtcggcgggatagcaaagtggctattcagtaaggcggaagagcgtcaggcggcgcgattcgcctcccttgagcagtcgctgcaacagtccgcctccaactggggcgagctggaaaaagaatttatgcggtttaaggcggatttaccgctgaactacgtccgccgcgaggattatatccggggccagacggtcatcgaggcaaagctggacgcgctctacaacaaactggaactggtacagcagtaccgccatacaggaggtcgtaatggttga

SEQ ID NO: 75740 - DNA, 312 bp, Citrobacter koseri
atggttgatatcgcccgcgtgcgccgggagtccctgcgctggagtctgctggttgctctgaacaaaacccgcccgtacaccgccagcgagacgctgttgctggacgtgtcccgcgccatctacccggacaccacaccgctggagctgcgccgtgagctggattatctggctgaccgcaagatggttgatctggagaaaaaaccctccggcgactggtttgccgacctgacccgcctcggcgttgacctggtggaatataccgtggaatgcggccccggtatcgcccgcccggaaaagtactggagtgaatga

SEQ ID NO: 75741 - DNA, 546 bp, Citrobacter koseri
atggccagacgcagcacgatagaaaagctgccggaagacgtgcgtcgctggcttgagcgggcgctgactgaatccggcttcagcgggtataacgagctggagtccctgctgcgtgagcagggttacgtcatcagcaaatcggctatccatcgttatggccagaagattgagcgccgttatggcgctatccgtgcggccaccgaagcggctcgtatgctgaccgaaggtgcggctgacgatcaggatgcacgttcggaggcggtgatcgccctgattcagaccgagctgttcgagagcatcgtccagttgcaggaagcggaagaaggcgaagtcgaccctaaagagcgcgtggcgctgctgtcgaaggtggcgaagaacgtggccacgctgtcccgcgcgtccgtcaacctcaagaagttccagtctgaagtccgggccagagcgcagcaggcggccagcaacgccgagaaaattgcccgtaagggtggactgtcaaccgatgcggtacaggcgctgcgccgtgaaattctggggattgccacatga

SEQ ID NO: 75742 - DNA, 1524 bp, Citrobacter koseri
atgagccagcttgctcccgttttgcctgatacctcggcgctggatatccccgccgttctgatgccctaccagcaacgctgggtggctgacacttctccgctgaaggtgattgagaagagccgccgtaccggtatcacctgggctgaggcatccgatgacgtgctgaccgctgcctcttcagcgcctgcgggcgggatgaacgtgtattacatcgcctataaccaggacatgaccgtcgaatatatccaggcgtgtgcgatgtgggcgcgggcattcaactatgccgccagcgaaatcgaagagggtttctgggaggaggacgaagacgacaagcacatcaagacctacaccatcaaattccctgattccggcttccgcgttgtcgcgctctccagtcgcccgtctaacctgcgtggccgtcagggcatcatcgttatcgacgaagcggcgttccatgagcaactggacgaactgctgaaggcggcgctggcgatgcttatctggggcggtaaagtgcgcgttatctccacccatgacggtgacgataacccgttcaatacgcttatcggtgatatccgggccgggcgtcaggggggcagcgtacatcgcattactttccaggaggccgtgtcggagggattgttccaccgcgtctgcctgcgtaccgggaaagaatggtcggaagcgtccgagcaggcgtggatggcatcggtgtacaaattctacggtgccggtgcatcggaggagcttgactgtgttccggctaacggtggcggtgcctggctttcccgcgccctgattgagtcccgtatgtcggctggcacgccggtgttgcgcctgacctgcccggagggctacgagctgaagcccgacgacgtccgctggagcgagacgcaggactggcttgatacacatctgaaaccgttgctggaagcgctgcctgctgacgcacgttctttcctggggcgtgactttggccgcagcggtgacctgtcggtggactatcccctgctgcaggagaagaacctggttcgccgcgtgccgttcgtgctggaactgcgcaacgtgccgttcaaacagcaggagcaaatcgcctggtacctgatggacggtctgccaaacctgatgggcgcggcgcttgatgcccgtggtaacggctcttacctcgccgaatacgccatgcagcgctatggctcaagccgggttaagcaggtgatgcctactgaaaactggtatcgcgagcatatgccaccggtcaaggctgcgctggaagatggcaacctggtggatttaccgaaggatgaagacacgctggacgacctgcgggccgttcaggtggtcaacggcgttccccgtgtgccggaacagcgctcaaaagcaaagtctgacagtggcaaacgtcacggggattcagccatcgcgctggtgctggcgtacttcgccagccgtgaaattaacaaagggccggtgaaggcaagctcacgccgtcgtcgtcaggcggcccgtatgctggaggattactga

SEQ ID NO: 75743 - DNA, 1497 bp, Citrobacter koseri
atggcccgtggactctgggtttcacccaatgagtttgtctctttttccgaaccgaataaaacgctgacggagcagatcgcctcgcgcagccgctccatcgacttcttcgggctggggatgtacctgcctaaccctgaccctattcttaaatctcagggccgggatatccgcatctatcgcgagctgcgtaccgacccgctggtcggcggctgcatccgcaggcgtaaggcggcggtcaaatcactggagcgcggccttgaacgcggtcatgccccggcgagggtattcagcttcatccgggatatgctcgacgatctggatttatcccgcatcatcggcgagatgaccgacgccgttctctacgggtatcagccctgtgagatcatgtggggacgctctgttaaatcctgggccattgccgatatcgtgggtaaaccaccggagtggttccagttcgataacgacaacctgctgcgctttcgcgctaaagacgccgggctggaaggcgagccggtacccctgaacaagttcgtggtgccgcgtcaggacgcgacctacgacaacccgtatggcttccctgacctgtcgatgtgcttctggcccgtgacattcaaaaaaggtggcatgaagttctgggtacgctttgccgagaaatacggctcaccgtgggtgattggcaagcatccgcgcggcacggctcagggcgagattgacctgctgctggactccatggaggcaatggtagaagacgctgtggccgctatccctgacgattcctccattgaaattaaggaggccgcaggcaaggccgacagcagcgatatttatcagaacctgataacgcttgcacgcagtgaaatctccatcgccctgctggggcagaaccagaccaccgaggctaacagtaaccgcgcctccgcgcaggccggactggaagtcaccgatgatatccgtgacgctgacgctgatatcgtggaaagcgcggtgaatcaggttctcaggatggcggtatcaatgaactttggcgatgtggccagccccgtctggaagatgtgggaacagggaacggtcgacgatacccaggcgacccgcgacgagaaactcagccgcgccggtgtggtcttcaccccgaaatacttcaagcgtgagtaccagctgcaggacggcgatattgacgagacaccaccttcagaacgccagaagaacatgctgccgctgtcatttgccgaggccattgatgccgatattcaggcacagcaggccctggacgacgcgctggatattctgatgaacggaggtgcgttaaatggcacgctggaacccgtactggctcctctgtttaagcgggtagaggatggtgttaacccgtctgagctgctgggcgaactggccgagctgtacccgcagatgaacgcggatgatctgcaggagcggctggcacggattatgtttgttgcaactgtctgggggcgtctgcatgagcgtgacaacggctga

SEQ ID NO: 75744 - DNA, 822 bp, Citrobacter koseri
atgagcgtgacaacggctgaactggcgtactgcatgacgcttcccccgaagcgggctatcagttacctcaagtccaaagggtatagcttcacgtgggactgggaagagatgtggcaggatgcccatgcccgcgcctttaccgtcgccaaagtgacccgccttgatatcctggaagatatccgcagccgcctgcagcaggcactggatgaggggaagacagaccgctggttccgtaaggagctggagccggagctgcagcgcaagggatggtgggggccacgtgacaccaccgacccggtaacgggcgagccggtcaccatccagcagggcagcccgtggcggctcgacaccatctttcgcaccaatatgtccgtactctacagcgccggtcgctgggccgagcaaatggagaacgtcgacgacaggccgtactggatgtataccggcatcaacgacagccatacccgcaagagccatctggctctgcatggtctggtgctgcgctatgatgacccgttctggcaggcgttctacccgccgaacggctggcgctgccgctgtggcgtgattgccctgagcgcggcggatgtgcgtgcccgtggcctgaaggtgtcaggttctggctcagccatgggatgggagctgaagctggtctcagagaaaacaggcgagatgcagaacgtcgccaccttcaataccggcaccacgaaagtgtccaccgacgtcggctggtcttatgcgcctggggcagcataccgtcccgaccttgcccgctatcagggtacacttcaaccgctggcacagcaggaactgagaggataa

SEQ ID NO: 75745 - DNA, 459 bp, Citrobacter koseri
atggcttccgataacctggtcaatgtcaccattaacgatgaatccctgcgccggagcctccgtgcgctggatctggctgccacagacctggaacccgcgatgcgcaaaatcgcgggcaccctgctggcggaaacgcagtttaactttctcgatgaggggcgtccggggtggattccctcgctggcagcgcaggagcgcgacgggcaaacgctgcaggataccgggcgtctgatggggtcagtatcaaccgaccatgacgaccagcaggctgcggttggcactaatgtcgtttatgggccgattcaccagttcggtggtaaaacggggcgtaatgagtccgtcgaacttccggcccgtccgttcctgccgctgacgggggacggtgagctgcagcctgaagtggttgtccccatactcgatacgattgtccgccatcttgaagcagcggcccgtcgctga

SEQ ID NO: 75746 - DNA, 1098 bp, Citrobacter koseri
atgccagccattcacatttttaaagccggtactcataccgatatgcacggcacgaaattgccgttcacgcaaagcgatcttgccgcctgcgtgaaagcctatgacccgtccgtccatgaggcaccactcgttattggccaccccaaaacggaagacccggcgtggggctgggtgaaatccctgtcgctcgatggtgcggatctgaatgccgagccaggtcagatcgacccggagtttgccgaaatggttgccgccgggcgctggaagaaagtctcagcttcgttttacctccctgattcaccgaacaacccgaagcccggcacgctatacctccgtcatgtcggctttctgggggcgcagccgccttccattaaggggctgaagcaggtttcgtttggtgagaaagaagaaggcgtcgtggagtttgccgactggagtgatatcaccaacgcctctttatggggccgtctgcgcgatttcctgattgcccagttcgggctggatgagaccgacaaggtacttccttcatggcaggttgactccctgcgcgaagaggcttaccgcgacaccgggaagtctgaaccggacttcagtgaacacaatcccaaccctcaacaagagaacagcaccatgactgaagaagaaatcaaagcgcttcaggcggaaaacacacgtctgaaagcggaagccacccagcgggcggaacaggaagcgaaggataagcaggacaaactgcacgcggaaaacgtctcctttgccgagaagctggttggtgatggccgactggcccctaatgcgaagtcagttgttgtggccatcctggacgcggtctctgcaggtgacaagccggttgagtttgccgaaggcgatacccgcaccccgctggctacggcgtttaagacgctgctggacagcactgatccggtactgaatttcagtgagcacgcgaccaaagaccgtgtgaacacggatatcaaaacgacgtcagcagagttcgctgaagccgacccggaacgtctggcgctgcatcagaaagcgctggaactgtcgaaaaaagaaggcatcagctacgacgctgctgtctcccgctgcctgtaa

SEQ ID NO: 75747 - DNA, 954 bp, Citrobacter koseri
atgtctgactatttaaagggtaagcgcgtcgttgacccggtgctgaccagcatcgctcgcggttataaaaatgccgcatttatcggcgaacgcatcttccccattgtccataccgataaggaaggtgtgaccgttccgaccttcggtaaatccgcctttgtggagtacgacactgagcgtgccgtgggggctgacagtaacgtcctggtacgtgagaagaccggcaaactggatctggttcttaacgagcacgatctggccgcgccggtggactaccgcgagcaggccgagtcgatgtttaacgaagagtctaaagccattcgccgtgtgaccaacggcgtcaatctgcgacgtgaactgtatgcagcccgtctggcgcaggacaaaaacgtttatcgcgcggctaacgtcaaggcgctggccgctgccgaccgctggggtggtggcaagggtgacccgattggcatcattgaaggcgggatcgaagcggtgcgtaatgccaccggcctgcgtccgaacctgatgaccatgggggccagcgtcatgtcgctgctgaagttccacccggcgattcaggcagcgattggtgccaacgagcgcaagcgtatcaccatcgaaattctgaaagaccttttccaactggacgatgtggtgatcggcgaaccagtgtccatggcctccatgaaagacgcgcagaacaaagacaaagtcccgaccgatatctgggccgacaacctgatgctgcattacgtcgctaaaccccagcagggttccgacagcgccgacgaaaacgagccgtccttcggttacaccctgcgccgtaaagggatgccggtggcggataaatacgacggcgtcggcggcaaggtgaagtactgccgttacaccgatatctacaaagtcgccgtggtcggtggcgatgccgggtatctcgtcaccaacatcgtgaaataa

SEQ ID NO: 75748 - DNA, 357 bp, Citrobacter koseri
atgggtacaactcaacaggtcattctgaccaccaccgtgacagccagtgcagcgctgacgcaacagcgctttgtcggggccgacaatggcccctgtcaggccggagccgtcgcgctcggcgtggcagaggtggatgccgcagccggtgatgtaaccccggtcaacgtactgggcattgttgccgtcgaggtcggggctgccattgcgaaagggcaaagcgtccagtcggatgcaaacgcctgcgccgttccctggacagccgccacggaagatacccctgcgggtatctcagccgggattgccctggatgacgcactggccgaaggcgacgttatccgcatcctgcgcggggtgtga

SEQ ID NO: 75749 - DNA, 498 bp, Citrobacter koseri
atgacgcactggccgaaggcgacgttatccgcatcctgcgcggggtgtgacatgtactgcaccctggcagatttgctggagcaggtgccggaacggacgctcgtcgaactgaccaatgagtcggttggctttgatgagcatcctccggtcaatgaagcggtgattgatagctgtattcgttacgccggtgagctgattgatgcacacctgcgtgggcggtataccctgccgctggcggaagtaccgaccgttctgcgggacattgccatcacgctgacccgttaccgtctgtatgcccgccgcccggaaggaggaatcccggaggctgttaaggacgataacaaaggagcctgtcgtcagttggaggccatccgcgatcagaagctcacgctggggctgctgtccactcagaaagatgtacctgagtccggtgaaattcgggcgcgggcacgccgccccacctttggcgggcgcgacggcttactggagaagtactga

SEQ ID NO: 75750 - DNA, 465 bp, Citrobacter koseri
atgaacgttctgcccgttattgatgcagtggtggcccgccttaaagagaagctcccgacgcttgcagtggagtatttccctgagaaaccagcggaataccgcctgaaccatccgaagggagcgctgctggtgagctacgccggttcgcgtttcgacaaacccggtgatatcggtgcggtgatacagccccagactatccagctctgcgtcacggtggtctttcgccagctcaacggtaaacagggcgctgtggatgtgctggatgtggtgcgtcgtatcctcggcggctacaccccgccgaactgccgccgtcgtatctggctgacccgtgaggtgtttatcggtgagatcaagggactgtggcagtacgccctcgactttgccactgaaagtgtctttatcgaagacagcgatttaccgtccggcccgctgttaaccgaagtgaactatgaggaaagcgagtga

SEQ ID NO: 75751 - DNA, 252 bp, Citrobacter koseri
atgaaagaataccgctattccggcccggccagcggcgtcacgctgtcggacggaaccgaaatcctgctctggccggggaagcatgtttccctgcccgaggagcatgactatgtgaaggtactggtggcgctgaagcatctgacgccggtatctgaagagactaaacccgccagcataccggctgtgcagtcatcaaagcgcaggaacggcggcgacagcgatgtgaaaacggaggactcccatggcagctaa

SEQ ID NO: 75752 - DNA, 1428 bp, Citrobacter koseri
atggcagctaactatctgcatggcgtcgaaaccattgaggtggaaaacggtgcccgcccggttaaaacggtgaagtctgccgtcattggcctgattggtaccgccccgatgggggacgtcaatacgctggtgcagtgcctgtctgagaaagatgcagcggcgtttggcagccagctcaccggctttaccattcctcaggcactggatgcgatctacgaccatggggcaggcaccgttctggtcattaacgtgcttgatccgattgtgcataaaaccgcagtggccgatgaggatgtgacgttcgacaaggcgacgggcaaagcacagctggctaatccggtggtcgcgcagctggtactgaaaccggacagcgacggccagccttatgtggaaggtcaggactactcccttgatgcacagacaggggtgattaccaacctcggtaagagcattgctgcggatgcaacggtgaaggccagctataactatgccgatccgaccaaagtcaccccggctgatatcatcggtgccgttaacgcggcgggcaaccgtaccggcatgaagctgttaaccgacagcttcaacctgtttggctatttcgcaaaaatcctgatcgcgccggttttctgtacccagaacagcgtctcggttgagcttattgccatggctgaaaaactgggggcggtggcctacatcgatgcgccgattggaaccacctttgcgcaggcgctggcgggacgtgggccggaaggtaccattaacttcaataccagctccgatcgtgttcgcctgtgctatccgcacgtcaaggtgtatgacgcggccaccaacagcgagcgactggagccgctgagtcagcgtgctgcggggctacgtgccaaagtcgacctggataaagggtactggtggtcgtcatccaaccaggagattctgggtatcaccggcgtggagcgccagctgtcggcaatgattgatgatccgaagagcgaggtgaacctgctcaatgaacagggcatcaccacggtcttcagcagctacggcagcggcctgcgtctgtggggcaaccggacggcagcatggccaacggtcacccacatgcgcaactttgagaacgttcgccgcaccggtgatgtgatcaacgagtccctgcgttatttcagccagcagtacatcgacatgccgattacccaggcgctgattgatgcgctgacggagtcggtcaacgcctacggtcgcaagctgattggcgacggtgcgctgctgggcttcagttgctggtttgatccggcccgtaatgaagagacggaactggccgccggtcacctgttgctgagctacaaatacacgccaccgccaccgatggagcgactgacgtttgagaccgagatcacctcggaatacctgttaaccctgaaggggaatagctga

SEQ ID NO: 75753 - DNA, 522 bp, Citrobacter koseri
atggcaaagattgagatcaaccgcatcacgaatgccaacatctacctggatggcgctaacctgctgggccgggccgaggaggttaaactccccgacgtgtcgatgaccatgcaggagcataaagcgctggggatggtcggcaaggtggaactcccggcaggtttcgacaagctggagggtgagatcaagtggaacagtttttaccgcgacgcgatgctgtcagccgcgaacccgtataagtcgctggcgctgcagtgccgttccagcgtccagcgctacagttcgcaggggctgattgatgaaatcccgcttgtcaccttcctgacgatcatgttcaagaagaacccgctggggacgttcaaacagcatgagaacgccgagttctccagtagcttcacctgcacgtacatcaagcaggtactggatggtgaagagttgctggaactggactatctggccaacatcttccgagtcggcggcgttgaccagttgaccgactaccgtatcaatatcggggggtaa

SEQ ID NO: 75754 - DNA, 294 bp, Citrobacter koseri
atggtggtacccaaagttgagcgcaaaacgatagacgacctggtggcgtcgctgaattatcagacccaccactttccgggcaccaccctgaccattgctgttgcgctgatgcccgatggctttatggtcagcagtggattcagcgctacggcgcatccggggttgttcgatgaagagaccggcaggaaggtggccatcgctaaagcgcagcgcaatgcgaccgaagcactgtggcagtttgaggggtacaggctgaagtcgcagctggcatcggggagtcaggatgaccgttga

SEQ ID NO: 75755 - DNA, 282 bp, Citrobacter koseri
atgaccgttgagattgaagataaaggcggtaactgtggctcgattggtatggggaacggcacctggtttaccatcctcgatattccgggagtggaaaacctttttgctacctggcacaccaatgacccgattgactgcacccgctccaaagcacggaagctggctgacctgattgaggcatgggagccacccgaccactggtttaccggcatcggtaaaaccgaagggaaagcgatgctcattacctttctgcgcaactgtaaaggctttcgcactcactga

SEQ ID NO: 75756 - DNA, 315 bp, Citrobacter koseri
atgtcacaaacccaatccgatacttttaagctgtcttaccccttcaccacagctgcaggcaccagagttgagcaggttgaactgaaacgcctgacggtcaaagacctgaaacaggtgcgcaaagtcagtaaagacccggctgactgggacgaaccgctgattgcccgtagcaccggtattctcccggaagacctcgataacatggatcttgccgactacatggagctgcagaaacgatttcagaaagtcactgggctgggcaagagcgacgaaaatgctgatgcaggcgcaggggctactggcgaggtggtttag

SEQ ID NO: 75757 - DNA, 144 bp, Citrobacter koseri
atgctgatgcaggcgcaggggctactggcgaggtggtttagatttcagccgggggagattgatgccctcgatactgacgatctggacatgtggctggagcaggctgaagagcaaatcaaaagtgagttcggcgacaatcagtaa

SEQ ID NO: 75758 - DNA, 2466 bp, Citrobacter koseri
gtggccagtgaattttcagtcggcgtcattattggcggcattgtcggaagtagtttccgctcagccgtcagtggcacccgacgcgccctcgattcccttggcgatacatcacgccgcctgcaggaacgtcagaacgctttaacccgtgctactgaacgttatggtcagttaggttcttcccggatgcagcgcctcaatagtgagctgctgcgggtaagccgcacaatggagcaaattgagcgccagcagcgccgtctgtcagcagtatcggccaccagtgatgcgctgaaagctaaccgcatggcgctctatggccagggcgcagaaacctatgccatcggcagaacgctgggcgcaccggtcatggcctcggtcaaacaatatgcctcgtttgaatcgcagttgcgggatatcagtgtcaccggcgatctggatgcccgccaggaacaggctattggtactgccattcgtcgggcatccctgcaggtcaatcagctccaggaatccctgttagggggcgtgggtcaactggttgccgatggcatgaatccgcagcaggcagcgacctttgccgggatgctcggtaaagcggccacggccaccaaagcggatatgactgaccttgcaaaaatgacctatgcctttagcgatgcgctgaaaattaccgatgccaaagagctggagcaggcgtttgggattgcggcaaccggggccaagctaggctcgtttgagctgaaggatatggcgaaagcgttacccggtatggccaaagccttcgctgcacgtggtatttacggcaaagacgccataacccagatcgtcgccagtctggaagtgggtaaaggcagcggctcagcggaggaggccgtcaccaatatgtcaaactggcttgcggcaatgggacgcggagataccacgcagaaatacgctaaggctggcgtggattaccagggatcaatgcaaaattatgtagcccaggggttctctcaatatgaagcctccctgatgattgccaaccgatttatcgacggtaaaggcaaggcatttgtgcagcaatggaaagctgcaggctcaagaggcgatcaggaaggccagcagaaactgatggagtctttcggactggcggaagtctttaccgatatccagaccgtgaaccatctgctatcgatgcgtcagggctgggataagtaccaatctaacaagcaggaaatgaacactccctctgcaatgtctacgctggacaaggatgcagcgaaacaaaatgatacgctcgaaggacgttggcgcagaacgcagattggttttaacgactcggccattagcatcggagaatcattacgcccggctttgatccagttgggggaaacgttcatccccttaatgaacagcgttggcaaatggatagccgcaaatccgcaacttgtcagcagcaccataaaggtggtgggatcgctgcttgctttcaagatggccactatcggtctcaagctggggctgaatctccttatttccccctttgttaacgtctggaaaaatgccgttttactgcgggccaactggcttcgactgacgcttgcactcggtgaaggcggtaagctccgctggctggtgaccggcttcagtgccgtcgccagaggagccagaacactgggtggtgtgctgtctggtgggctggttcgcggcattatgatcgccgggcgggccgttctctggattggccgggcgctgctgctgaatcccattggtctcgctatcaccgccgtcgcggcagcagcttaccttatttatcgcaactggggcgcagtcagcagctggtttaaacagcgctgggctgacattaaagaggcttttaacggcggtatcgtggggattggcaagctgctgattaactggtcgccggtgggtcttctctataaagcctttgcagctgcgctgaagtatctcggcgttgacctgccagcgaagttcacggactttggtgggcatcttatcgacgggctaataaacggcatcaaaaacaaatgggagtcgctcaaaaccaccgtgacagatatgggtgacagcgtcggcggctggttcaaggaaaagctgggcattcattcgccgagccgcgtgtttataggctttggtgacaacatcgcgcagggagcagctatcggcctgcagcgcaccaccccactggcagcactggctggccaacgactggccgcagagatgacgccagacgttccccgtatcccgtcgccggaaatcatggctgcgggatattcaggccgtggagcagctgcatccggtggcggaatgtctggtggtattcaggtcagctttaatcctcagtttttcctcaatggcaaagagaccgcagcgcctgccggattgaccggcgcactgaatatgagtctgcatgagctggagaaaatgctggagcgcctgctggcgcagaaacaacgtaaggagtacagctga

SEQ ID NO: 75759 - DNA, 885 bp, Citrobacter koseri
atgtttgcggtactgggtgatattgagtttgagctgattacatactgggacggcttcgaagccacgttcggcgttgattatgcggaacatgcccgcatcgagggtaagcccggcctgcagttcgtcggggacaagctggacgaaatccagataagcctggtctttcaccagcattattgtgtgcccgatgtggaactggcgcgtctgcgaacggccatgaaagcccatcaggcactggcactggtcttcggcaacggtgactatcgcggctggtttgtgattaccgacgtagtcgcgaccagcgaacagaccgacagcaccggcaacgtgctggctgtcaatgccaccgcgtctctccgggagtacatcggcgacccgaaaaacccgctacagcctccggcaatacgcacaacggttcccggcgtcggggcggtctccggtgccgttccttcgccttccggggtggcgcagtacgtccgcgacggcgtcaactatgccaaacaggcgcagtctgttctccagaccaccatcagtgccgttcgggtggcgcagaaaatgaaggataaccccgccgttgcactgacccgcgtaccggggctgatgagcgggttgggcaatgtatccggggcgttaggccagagcgttccggcgtttaatgcactctctgaatccatgcctgatgccatcagtctggccagagccaccagtgatgcggccacgtatgtacaacaggcacagtcttcgctgagcggcgtggacggcagcaatatcgcagcggcacttgatgccgtttccgggcagcttaactccgccagcaccaccttcacccgtatgtcgccggggttaagcaccatggcagccaaaattctggcgaggagtgtgtga

SEQ ID NO: 75760 - DNA, 213 bp, Citrobacter koseri
atgtttcttgagcatgtcacccgtgacggagagcgctgggactctctctcatggcagtactatggcgacccgctgggctatccccggataattgccgccaatccgcacgtggccatcacgccggtgctgccctccgggctgttgttactgattccggttatcgaggctgaagaagccaccacagaagaggatattgccccatggctgagataa

SEQ ID NO: 75761 - DNA, 1170 bp, Citrobacter koseri
atggctgagataaacagcactgcacaggccgcatcagcgttaaccggcgtcagcgatgttctgagtccggtgttcactctgtggtatctgcagaagaacatcaccaccgatatcgccccctatgtcacccgcgtcacctacagcgataacatcaaaagcgagtccgataccattgaggtggagctggacgacaccgatggccgctggctggataagtggtatccgggcaagggtgacacgctgacgctgaaaatgggttatcagggcgagaagctgctgtcctgcggtacgttctctatagacgagatcgaggtaagttcgcccgcgtccgttgtcgctatccggggcgtggccacgtcggtcaacaacgccctgcggacaaaatccagtcgtggtttcgagagcaccacgctggcggccatcgccggacggattgccaaaaagcatcagctgaagctggttggcagtattgagtccatcaaaattgaccgggtgacccagtatgcagaaacagacgtgggcttcctgcgccgactggccagcgagtatggttatgccgtaaaagttgtcagcgaccagctgattttctctcatttggccacgctgcgtggtcaggagccggtaaaacagttgaagccgcaggatgtggcccgcttttccctgcgtgacaccatcaaccgcgtctacaaatcagcaaaggtaaaacaccagaagagcagcgataaaaagctgatcgcctacgaggttgccggtggcaccagtgaaagcgacaaacaaaccaaaggcggtaaggtcaccagtgccgactcactgaaggtcaacagccgcgtcagtgacccggacagcgcccggattaaagcagattcggcgctggccagacataacgaataccagcagaacggctccctgacgctgatggggacgccccagttgactgcaggcaacaaaattgaactggtgggctttggtcagttatccgggccatggctgataaccactgcccgccatgcgtttgaccgtaacagcggctacatcaccgaactggaagtggcacgagggccggtcacgcaaggcaaggcgaagaaaggtaaaaagaccggcaaaacccagacgctgaccgtttataaaccggacggcagtacatccacggtaataaaggagaagaaataa

SEQ ID NO: 75762 - DNA, 513 bp, Citrobacter koseri
atggcaggtgtcacccgtcaggtcggtacggtcagcgccgtcgatgccgacaaggttcaggcccgcgttcgtctgcctgagtgcgataacctgcgcactaactggcttaacgtgctgcagcgcaatacccaggataacaaggattactggctccctgacgtgggggagcaagttgaggtgctgctcgatgccaacggcgaggatggtgtcattctgggcgcggtgtactcagaagttgataaaccgccgttcagcgacaaaaacgtccggggcacgaaatacgcggatggcgcagaattcagctataaccgtgcgacccatacgctgacggtcaaaggcggtatcgagcatgtggtgatcgaggttgcggtgggtatcagcctgaaggggaaaaccattgatttgaccgctgataccaccacggtgaacggtaaccttgaaatcaacggcaatgcccactccacaggcagtatgctgtctgacggccagaactccaatcaccattcccactga

SEQ ID NO: 75763 - DNA, 348 bp, Citrobacter koseri
atgaaaacaacctcagtattctggcaaccggccctgcaggcccccggcgaaatcgtccgggggctggatgatatctggcaggccattcaaatcatcctgcgaactcctcgcggcagcgacccacatcgcccggagttcggcagcaacctgcatctttatatcgactggcctatcgaccgggccattccgcatgtggtgcgcgaatccgtcgatgccattcggcgctgggagcctcgctgccagcttatgtcggttaaacccgccgtcgacggtgaacatcttacgctccgggtgagctggaaaggctctgacggacagacccggactcaggagctgctatggcgctga

SEQ ID NO: 75764 - DNA, 1104 bp, Citrobacter koseri
atggcgctgacagaacccgattttattgaacgcgatgccgacaaaatcacggcagaaatgattgcgcagtacgaagctgcaaccaaaaaaacgctgtaccccgctcaggctgagcgcctgctgattgacctgtgggcataccgcgaaatgctggtcagggtggcagcgcaggaagcggccaaacagaatctggtcgcctttgcccgtgagccgatgattgattacctcggtgaactggttggtgtgtaccgccttgccgcgcagcctgccaccaccacgctccagttctccgtggatgaggaactggccattgatgtgctgatcccggcaggtacccgcgtcagcgcttccgacagcattatttttgccaccgatacggacgtggtgctgaaagccggattgctgctggtcaataccaccgccacctgtaccgagccaggagccgctggcaacggatggcaacctgcacaggtcagccagttgctcgatgagattgataacgtcgacctgcaggtgaccaatctggcggccagttctggtggttcagagcaggaagacaatgacaggctccgggaacgtatcaaactggccccggagtctttcacaaatgccggaagccgtatggcataccgcttccatgccatgcaggcccatcccaacatcgttgacgtcgccgtgctctccccggttccgggcaccgtagagctgtatccactgctcagtaccggcctgccggacgacagcatcctcacgctggtagagagcttctgctcagacgaaaaagtcaggccgctcactgataccgtgcgggctaaaacgcccgtgcaggtggattacaccatagatgcccagatcaccatctaccgcaatcaggatgcaaactcggtaaaagacgaggcaaacaacgccatccagaactgggtcgcagcccgaagaactaagctgggcgtggatatcgtccccggacaaattaacgcggtgttgactgtcagcggcgtttaccaggttgaactacccggccttgaacttgttgttcttgcagagaatgagtgggctaactgtaccgccatcaacgtaactatcacgggagttgtcgatggctga

SEQ ID NO: 75765 - DNA, 579 bp, Citrobacter koseri
atggctgagacgctaaaactcccgccagcacttgagggtgatatcagcttcagggcactgggcaatttggccggaagactggacagcatcgacctgagcgtgttgatggtctacctcgtcgatattgtcgacagctctgcgctgccatggctgggcgagcagttctcgctgttcggtgacggctgggaactggcggagtcagacgatgtacgtcgcacgctcatcaaatccgccatcgagttgcaccgctacaaagggacgccgtggtcaatccgggaaattatccgccgttttggcttcggtgaggtggatctgattgaaggcactggccagatcggatacgacggcaaacacagttataacgggctttttgtccacggcgatgcggaagcctgggcggtctatcgcgtcatccttaaacagcccatcactaacgatcaggcagcactgttacgtcagacgctcgctgcctttgctccggcccgctgccatctggcgagtctggagtatcagtctgtcgccattcgctacaacaacaccgtcaactatgacggcagctataaccacgggagcagttaa

SEQ ID NO: 75766 - DNA, 1590 bp, Citrobacter koseri
atgcaacaacgtcgtccagtccgccgcgctctgctcagtgtttctgacaaggccggtatcgtcgaattcgcccaggcactttccgcacgcggtgtggagctgctgtctacagggggcactgcccgtctgttagcagataaaggtctgccggtgaccgaagtttccgattacaccggtttcccggaaatgatggatggacgcgtgaagaccctgcatccgaaagtacacggcggtattctcggtcgccgtggtcaggatgacggaattatggaacaacacggtatcgcgccaatcgatatggttgttgttaacctgtacccgttcgcccagaccgtcgctcgtgaaggttgctcgctggaagatgccgtagagaacattgatatcggcggcccgaccatggtgcgctccgctgccaagaaccataaagatgtcgctatcgttgtaaagagcagcgactacgacgccattattaaagagatggatagcaacgacggttcactgacccttgatacccgcttcgatctcgccattaaagccttcgaacacaccgccgcctacgacagcatgattgccaactacttcggcagcatggttccggcatatcacggtgaaagcaaagaggccgctggccgcttcccgcgtaccctgaatctgaacttcattaagaagcaggatatgcgctacggcgaaaacagccaccagcaggcagccttctatatagaagagaatgtgcaagaagcatctgttgcgaccgcgcagcaggtacagggcaaagcgctctcctacaacaatatcgccgataccgatgcggcgctggagtgtgtgaaagagttcagcgagcccgcctgcgtcatcgtgaagcacgctaacccgtgcggcgtggcggtaagcacttctattctcgacgcttacgatcgcgcatacaagactgacccgacctccgcattcggcggcatcatcgcgtttaaccgcgaactggatgccgaaacggcacaggccatcatctcccgtcagtttgtcgaagtgatcattgcgccttccgcaaccgaagacgcactgaaaatcaccgccgccaaacagaacgtgcgcgtcctgacctgcggccagtgggccgagcgcgtcccgggcctggacttcaaacgtgtcaacggcggtctgctggttcaggatcgtgacctgggtatggtaacggcaggcgaactgcgcgtagtgtccaaacgtcagccgagcgagcaggaactgcgtgacgcgctgttctgctggaaagtagcaaaatttgtgaaatccaacgcgattgtgtacgcgaaagagaatatgactatcggtattggcgcgggccagatgagccgcgtttattccgcgaagatcgccggtattaaagcgggcgatgaaggcctggaagtaaaaggttccgcaatggcctctgacgcgttcttcccgttccgcgacggtattgatgctgcggccgccgttggcgtgagctgcgtgatccagcccggtggctccatccgtgatgatgaagtcattgccgccgctgacgaacacggcatcgcgatgatcttcaccgacatgcgtcacttccgccattaa

SEQ ID NO: 75767 - DNA, 1290 bp, Citrobacter koseri
atgaaagtattagtaatcggcaacggcgggcgcgaacacgccctggcgtggaaagcggcgcaatcaccgcaggttgaaaccgtgtatgtcgcgccaggtaacgccggaacagcgctggaaccggcgctgcaaaacgtcgctattggcgtcacggatattccggcactactgagctttgcccagaacgagaagatcgatctgaccatcgtcggcccggaagcgccgctggtgaaaggcgtggtggatactttccgcgccgcaggcctgaaaatctttggcccaaccgaaggcgccgcacagctggaaggctccaaagccttcaccaaggatttcctcgcccgtcaccagattccgacggcggagtaccagaacttcacggagatcgaacccgcgctggcttacctgcgtgagaaaggcgcgccgatcgttattaaagccgacggactggctgccgggaaaggcgtgattgtggcgatgacgctgagcgaggccgaagccgccgttcatgacatgctggcgggtaacgcgtttggcgacgcgggacaccgtatcgtgatcgaagagttcctcgacggtgaagaagcgagcttcatcgtgatggtcgatggcgagcatgtgttgccaatggccaccagccaggatcacaaacgcgtcggcgatggcgataccgggctgaataccggcggtatgggcgcttactccccggcgccggtggtgaccgacgaggttcatcagcgcacgatggagcgcatcatttggccaaccgtaaaaggcatggcggcggaaggcaatacttataccggcttcctgtacgctgggctgatgatcgataaacagggcaacccgaaagttatcgaattcaactgccgctttggcgacccggaaacccagccaatcatgctgcgtatgaaatccgatctggttgaactttgtctggctgcctgcgacggtaagctggacgagaaaacgtctgagtgggatgagcgcgcatcgctcggcgtggtgatggcggctggcggttatccgggtgactaccgcacaggcgatgtgatccacggtctgccgctggaagaggtggcagacggtaaggtattccacgccggcaccaaactggcggaagatgaccgggtcgttacaagcggcggtcgcgtactgtgcgccactgcgctaggccataccgttgccgaagcacagcagcgtgcctacgcgctgatggcagatatccactgggataactgctttagccgcaaagatatcggctggcgcgcgatcgaacgcgagcaaaactaa

SEQ ID NO: 75768 - DNA, 693 bp, Citrobacter koseri
gtgaacagttttaatgaaggggcgctctcgccccttttgtctgtctggcgtcgtatgctgacgttggcaggcgcgctgttgctgtccgcttgtagccataacacgacgcttccaccgtttacggccagcggttatgttgacgaccagggtgcggtacgcatctggcgtaaagattccagcgatggcgtccatctgctctcggtctttagcccgtggcgtaacggcagcaccacaaccagcgaataccgctggcagggcgacatgctctccctgattgaactcaatatttacagcaaaccttctgaacatattcgcgcacgcttcgacgatcatggcgagctcagttttatgcagcatgaagtcgacgggcagaagcagcagctttccagcgaccagatcgccttataccgctatcgcgccaatcagatccgccagaccagtgacgcattgcgtcagggacgcgtcgtgctgcgtcagggacgctggcatgcagaccgtacggtaactacctgcgaaggcgaaacgttgaaaccagacctggatgcgtgggctatcagccacatagagcgacgtcagcagcgttcatcgatagaggtgagtgtggcatggctggaggcgcctgatggctctcagctgctgctggtggccaatgaagacttctgccactggcaacctatagagaagacgttctga

SEQ ID NO: 75769 - DNA, 273 bp, Citrobacter koseri
atgaacaagactcaactgattgatgtaattgcagacaaagcagaactgtccaaaacccaggctaaagctgctctggaatccactctggctgctattactgagtctctgaaagaaggcgatgctgtacaactggttggtttcggtaccttcaaagtgaaccaccgcgctgagcgtactggccgcaacccgcagaccggtaaagaaatcaaaatcgctgcagcgaatgtaccggcgtttgtttctggtaaagcactgaaagacgcagttaagtaa

SEQ ID NO: 75770 - DNA, 591 bp, Citrobacter koseri
atgttacaaaacccgattcatctgcgtctggaacgcctggaaagctggcagcacgtcacctttatggcttgtttgtgcgagcgtatgtatccgaactatgccatgttctgtcagcagacgggttttggcgatgggcaggtgtaccgccgaatcctggatctcatctgggaaacgctgacggtgaaagatgcgaaggtcaattttgacagccagctggaaaagtttgaggaagcgattccggctgctgacgattttgatctgtacggcgtttacccggcgattgatgcctgcgttgcattaagcgagttaatgcattctcgtctcagtggcgaaacgctggaacatgccattgaggtcagtaagacatccattaccacggttgcgatgctggaaatgactcaggctggtcgagaaatgaccgatgaagagctcaaagaaaacccggctgttgaacaggaatgggacattcagtgggaaatattccgacttttggccgactgcgaagaacgcgatattgagctgataaaagggcttcgggcagacctgcgcgaggccggtgagagcaatatcggtataaattttgagcaatga

SEQ ID NO: 75771 - DNA, 672 bp, Citrobacter koseri
atggatctcgcgtcgctacgcgctcaacaaattgaactcgcctcgtcggtgatccgcgaggatcgccttgataacgatccgccggatctgatcgccggggcggatgttgggttcgagcagggcggggaagtgacgcgagcggcgatggtgctgttgacgtatccagcgcttgagctggtggaatacaaagtggcgcgtatcgccactaccatgccgtatatccccggcttcctctcctttcgcgagtatcctgcgctgttggcggcgtgggaacagctgtcgcaaaaaccggatttagtctttgtcgatgggcacggtatctcccacccgcgtcgtctgggggtggcaagccactttggattgatgatggatgtacccaccatcggcgtagcaaaaaaacggctgtgcggcaagtttgagccgctttccgccgaacctggcgcgctggccccgctgatggacaaaggcgagcagttagcctgggtctggcgcagcaaagcgcgctgtaacccgctgtttatcgcgaccggacatcgcgtgagtaccgacagcgcgttggcgtgggtgcagcgctgtatgcaaggctaccgtctgccggaaccgacgcgctgggcggatgcggtggcatcagagcgtccggcgtttgtgcgctggcaagcaaatcaccgctga

SEQ ID NO: 75772 - DNA, 1065 bp, Citrobacter koseri
atgaccgaactgaagaacgatcgttatctgcgtgcgctgctgcgccagcccgttgatgttaccccggtatggatgatgcgccaggcaggccgctatctgccggagtacaaagccacccgcgcacaagcaggcgattttatgtcgctgtgcaaaaatgctgagctggcgtgcgaagtcacgctacaaccgctgcggcgctacccgcttgatgcggcgatcctcttctcggacattctgaccatcccggatgcgatggggctgggactctattttgaggccggggaaggcccgcgctttacttcgccagtcgcctgtaaagcggatgtcgataagctaccgattcctgacccggaagacgaactgggctacgtgatgaacgcggtgcgtacgattcgccgcgagttgaaaggtgacgttccgctgatcggtttttccggcagtccgtggacgctggcgacttacatggtggaaggcggcagcagcaaagcctttaccgtcatcaaaaaaatgatgtatgccgatccgcaggcgctgcatgcgctgctcgataagctggcgaaaagcgtcactctgtacctcaacgcgcagattaaagcgggcgcgcagtcggtcatgattttcgacacctggggcggcgtgctgacggggcgcgattaccagcagttctcgctgtattacatgcataaaatcgttgatggtctgctgcgggaaaatgacggtcgccgtgtaccggtcacgttattcaccaaaggtggcggccagtggctggaggcgatggcagaaaccgggtgtgatgcgttaggtctcgactggacaaccgatattgccgacgcgcgccgtcgcgtgggccataaagtggcgctacagggcaatatggacccgtccatgctctatgcgccaccggcgcgcattgaagaggaagtggcgacgattctcgccggattcggccagggtgaaggccacgtctttaatcttggacacggtatccaccaggatgtaccaccggagcacgcgggcgcatttgttgatgcggtacaccgcttgtccgaacagtaccaccgctaa

SEQ ID NO: 75773 - DNA, 774 bp, Citrobacter koseri
atggatcgtattattgaaaaattagatcacggttggtggatcgtcagtcacgagcaaaaattatggttgcctcgtggagaattgccatatggcgaagcgacaaatttcgatcttgtggggcagcgcgcactcttgattggcgagtgggaaggggagcctgtctggctggtgttacagcatcgtcggcatgatatggggtcggtacggcagatcattgatcgggacgttggcctgtttcaactggcggggcggggcgtgcagctggcggaattttaccgttcgcacaaattctgcggttactgcggccaccccatgtacccaagcaagaccgaatgggcgatgctgtgcagccactgccgcgagcgttactatccgcagattgctccctgcattattgtcgccatccggcgtgccgattccattttactggcccagcatacgcgccatcgtaacggtgttcatacggtgctggccgggtttgtggaagtgggggagaccttagagcaggcggtcgcgcgcgaagtgatggaagagagcggcatcaaagtgaaaaatctgcgttacgtgacctcacagccctggccgttcccgcaatcgctgatgacggcgtttatggcggagtatgacagcggcgagattgtcatcgacccgaaagagctgctggaggcgggctggtatcgctatgacgatcttccgttattgccgccgccgggcacggtggcgcgtcgtttgatcgaagatactgtggcaatgtgtcgggctgagtatgagtga

SEQ ID NO: 75774 - DNA, 504 bp, Citrobacter koseri
atgctaaaccagctggaaagcctgacggaacacgtcgaaggaagtaataaactggttgatcgctggctacatgtacgtaagcacctgctcgtggcttactacaatctggttggcattaagcctggcaaagaatcgtacatgcggctgaatgaaaaagcgctggatgatttttgtcagggcctggtcgactacctttccgccggacacttcagtatttatgaacacattatccgtgaaatggaagagggaaacccgcgttcaaccgcaacgcgcctccattcattgctggaagccaatactcaacagatcatggaatattacgactccagcctggagaacgcgatcgatcacgataattatgcggaatttcagcaagtgctctccgacatcggcgaagcgctggaagcgcggtttacgctggaagataaactcatcctgctggccttcgacaataatctaacgcttaatgcccaggatgaaagcggaattgcacggcctgcttga

SEQ ID NO: 75775 - DNA, 1896 bp, Citrobacter koseri
atgtctgcaacaaaattgactcgccgcgaacaacgcgcccaggcccaacactttatcgacaccctggaaggcaccgcctttccgaactcaaaacgtatttatattaccggctcacaaccggacatccgcattccgatgcgtgaaatccagctaagccccacgctcatcggcggcggcaaagataatccgcaatacgaagagaacgaagccatcccggtctatgacacctctggcccctatggcgatcctgatgtcgccattaacgttcagcaggggctggcaaaactgcgtcagccctggattgaggctcgtgcagacagcgaagaattgaccgaccgtagctcggcgtacaccaaagaacgtctggccgatgatggactggacgagctgcgttttacggggctgctcacgccgaagcgcgccaaagcgggcaagtgcgtaacgcaactgcattatgcgcgtcaggggattgtaaccccggaaatggagttcatcgctattcgtgaaaacatgggtcgtgagcgcattcgcggcgatgtgttacgccagcagcatccgggcgttgggtttggcgcgcgcctgccggaaaacatcacgccggaatttgttcgtgacgaagtggccgccggtcgcgcgattatcccggccaacatcaaccacccggaatccgaaccgatgatcatcggacgcaacttcctggtgaaggtcaacgccaatatcggcaactcagcggtcacttcctccattgaagaagaggtggaaaaactggtgtggtcgacgcgctggggcgcagatacggtgatggacctctcaaccggtcgctatattcacgaaactcgcgagtggatcctgcgtaacagcccggtaccgatcggcaccgtgccgatctatcaggcgctggagaaagtgaacgggatcgccgaagatctcacctgggaagccttccgcgacacgctgctggagcaggcggaacagggcgtcgattacttcaccatccacgcgggcgtgctactgcgctatgtgccaatgaccgcaaaacgtctgaccggtatcgtctcgcgcggcggttcgatcatggcgaaatggtgcctctctcaccatcaagaaaacttcctctacgagcacttccgcgaaatctgcgagatctgcgccgcttacgatgtctcgctgtcgctgggcgacggcctgcgtccgggatcaattcaggatgcgaacgacgaagcgcagtttgccgagctgcacacgctgggcgagctgaccaaaattgcctgggagtacgacgtgcaggtgatgattgaaggccctggccacgtaccgatgcagatgatccgccgtaacatgaccgaagagctggaacactgccacgaagcgccgttctacaccttagggccactgaccaccgatattgcgccgggctacgaccacttcacctccggcattggcgcggcaatgattggctggtttggctgcgccatgctctgctacgtaacgccaaaagagcacctcggcctgccgaacaaagaggatgtgaaacaggggctgatcacctacaaaatcgcggcgcatgccgccgacctggcaaaaggccatcctggcgcgcagatccgcgataacgccatgtcgaaagcccgctttgagttccgctgggaagaccagtttaacctggcgcttgacccattcaccgcccgcgcctaccacgacgaaaccctgccgcaggagtccggtaaagtggcgcacttctgctccatgtgcggccccaaattctgttcaatgaagatcagccaggaagtccgcgactacgcggcggcgcagaccatcgaggtaggaatggcggatatgtcagaaaacttccgcgccaaaggcggtgaaatctatctcaggaaggaggaagcataa

SEQ ID NO: 75776 - DNA, 636 bp, Citrobacter koseri
atgtatcagcccgatttcccggcggtgcctttccgcctggggctttatccggtcgttgatagcgtgcaatggatcgaacgcttgctggaagcgggtgtccgcaccctccagctacgtatcaaagacaagcgcgacgaagaggtggaggacgacgtatcagccgctatctcgctgggccgccgctacaatgcccgcctgttcatcaatgactactggcgactggcgatcaagcacaacgcttacggggtgcacctcggtcaggaagatctggaaaccaccgacctgaaggcgattcaggctgccgggctgcgcttaggcgtttccacccacgatgacatggaaatcgacatagcgctggcggccagaccgtcttatatcgcactcggccacgtattcccgacgcaaaccaaacagatgccgtccgcgccgcaaggactggagcagctggcgcgccatattgaacgtcttggcgattaccccaccgttgccatcggcgggatcagcctcgaacgcgcctcgccggtgctgaaaaccggcgtgggcagtattgccgtcgtcagcgccattacccgggcggaagactggcgcgaagcaacggcgcagttactggcaatcgcgggggctggcgatgaatga

SEQ ID NO: 75777 - DNA, 759 bp, Citrobacter koseri
atgaatgatcgcgactttatgcgctacagccgacaaattttgctcggcgatatcgccattgaaggacagcaaaaattgcttgccagccgggttctgattgtcgggctgggcggtttgggttcccctgcggcgctctatctggcgggcgctggcatcggtacgctggttttagccgacgatgacgaagtgcatctgagcaatctgcaacggcaaatcctgttcaccacagatgatattgcccgccctaaatccctggtgacaaagcagcggctggcgcggctgaacccggatattgaactgctggcgttacagcagcgcctcactggcgatgcgctccgccatgcggttgagcgcgccgatgtggtgctcgactgtaccgacaacatggcgacccgtcaggagatcaacgccgcctgcgtcgcgctggatactccactcattaccgccagcgccgtcggctttggcggccagttgatggtgctgacgccgccctgggaacagggctgctaccgctgcctgtggccggatgatgaagaaccggaacgcaactgccgcacggcagggatcgtcggccccgttgtcggcgtgatgggaacattgcaggcgctggaagccatcaagttactgagcgggatggacatccccggcggcgagttgcggttattcgatgccaaaaccagccagtggcgcagtctggcattgcatcgcgccagcgattgtccggtatgcggagggcgtcatgcagattcagttcaatga

SEQ ID NO: 75778 - DNA, 201 bp, Citrobacter koseri
atgcagattcagttcaatgatgaacctatgcagtgcgctgacggcctgtccgttatcgatctgctcactcagcttaaccaactgaaaccaggggcggcgctggcgctgaatcaacagatcctgccgcgtgaacagtgggaacagcaaatcgtgcaggaaggcgaccagatcctgctttttcaggttattgcagggggttga

SEQ ID NO: 75779 - DNA, 771 bp, Citrobacter koseri
atgttacgtattgcagataaaacatttgattcacatctgttcaccggcacggggaaatttgcctcttcacaactgatggtcgaggcgattcgcgcttccggcagccagttggtcacgctggcgatgaaacgcgtggatttacgccagcacaatgacgcgattctggcgccgcttattgatgccggggtaacgctgcttcccaatacctccggtgcgaaaacagcggaagaagccatcttcgccgcgcaactggcgcgggaagccctgggcacacactggctgaaactggagattcaccccgacgcgcgctggctgctaccggaccctgtcgaaacgctgaaagccgcagaagcgctggtaaaacagggattcgtcgtgctgccctactgcggcgccgacccggtgttgtgcaaacgtcttgaggaggttggctgcgccgccgtcatgccgctcggtgcgcccattggttcaaatcaggggctggagacgcgcgcgatgctggagatcatcatccaacaggccaccgttccggtggtggtcgatgccggtatcggcgttcccagccacgccacacaggcgctggaaatgggcgctgacgcggtactggtgaatacggcgattgcggtagcagatgatccggtgatgatggcgcaggcctttcgcctggcggttgcagccggagttatggcgcgtcgggccgtacccggaacgcgcagcagctacgctcaggccaccagcccgctcaccggatttctggaggcttcggcatga

SEQ ID NO: 75780 - DNA, 1131 bp, Citrobacter koseri
atgaaaacgttcaccgaccgctggcaacagctggactgggacgatattcgcctgcgcatcaacagcaaaaccgccgccgatgtggaacgggcgcttaacgccacgcaacttagccgcgacgacatgatggcgctgctttcacccgccgccagcgactatctggagccgttggcccaacgtgcgcagcgccttacccgtcagcgctttggcaataccgtcagcttttacgtgccgctgtatctctccaatctgtgcgccaacgactgcacttactgcggcttttccatgagtaaccgcattaagcgcaagacgctggatgaaacagaaataggccgtgaatgcgaggcgattcgcgagctgggttttgagcatctcctgctggtcactggcgagcaccaggccaaagtcggcatggactattttcgtcgtcatttgcccgctatccgtcgccagttttcttcactccagatggaagtgcagccgctggcggaagaagagtatagcgagttaaaaacgctggggcttgacggcgtgatggtctaccaggagacctaccatgaggcgatttacgcacaacaccatctgaaagggaaaaagcaggatttcttctggcggctggaaaccccggacaggctgggtcgggcaggtatcgacaaaattggtctcggcgcgttgattgggctgtctgatagctggcgtgtggactgctacatggtagccgagcatctgctctggatgcagaagcattactggcagagccgctactctatctccttccctcgcctgcgcccgtgtactggcggcgtcgaacccgcctccatcatggatgagcgccagttggtgcaaaccatttgcgcatttcgtctgctggcgccagagattgagctgtcgctctcaacgcgcgaatcgccgtggtttcgcgatcacgttattcctttggcgattaataacgtcagcgcattttcaaaaacgcagccaggcggctatgccgataatcatcccgagctggagcagttttctcctcatgacgatcgccgaccggaagccgttgctaatgcactgaccgcacaggggttacagcccgtctggaaagactgggatagttatctggggcgagcttcgcaaacataa

SEQ ID NO: 75781 - DNA, 306 bp, Citrobacter koseri
atgaagaatatcgttttatgctgtgccgccgggatgtccaccagcatgctggtgcaacggatgaaagacgccgctcagaagaaaggggttgaagtcagtatcaaagctgttccggtggctgaatttaaagaaaacatcgccactgcggatattgttttgcttggcccgcaggtcaagtatgaacaggcgaaattgcaggcgcttgccgaccccttaggtaaaaaggtcgcggttatcgacatgatggattacggcatgatgaaaggcgatgccgtgctggaaaaagccctcaagctcatggagtaa

SEQ ID NO: 75782 - DNA, 318 bp, Citrobacter koseri
atggaagagttagagacgatcatcatggagctgctggtcaacgcaggcgcagcccgtagttcggcactgaccgcactgcaactggcgcgaaaaggcgattttgctggcgccgagaaagcgatggaagagtcgcgcgagtttgtcaaactggcacacggcatccagacaaagctgattgggattgatgaaggaaccggaaaactgcctgttaatctgatcaccgttcattcccaggatcatctgatgaacgcaatggttattcaggatttggcgggggatatgattgagctttatcgtcggttgccgctggtgaattaa

SEQ ID NO: 75783 - DNA, 4224 bp, Citrobacter koseri
gtgaaagacttattaaagtttctgaaagcgcaaactaaaaccgaagagtttgatgcgatcaaaattgctctggcttcgccagacatgatccgttcatggtctttcggtgaagttaaaaagccggaaaccatcaactaccgtacgttcaagcctgagcgtgacggccttttctgcgcccgtatcttcgggccggtaaaagattacgagtgcctgtgcggtaagtacaagcgcctgaaacaccgtggtgtgatctgtgagaagtgcggcgttgaagtgacccagactaaagtacgccgtgagcgtatgggtcacatcgagctggcgtccccgactgctcacatttggttcctgaaatctctgccgtctcgtatcggcctgctgctcgatatgccgctgcgcgatatcgaacgcgtgctgtacttcgaatcctatgtggttatcgaaggcggtatgactaacctggaacgccagcagatcctgactgaagaacagtatctggacgcgctggaagagttcggtgacgaattcgacgcgaagatgggtgcggaagctattcaggccctgctgaagagcatggatctggagcaagagtgtgaaactctgcgcgaagagctgaacgaaaccaactccgaaaccaagcgtaaaaagctgaccaagcgtatcaaactgctggaagcgttcgttcagtctggcaacaagccggagtggatgatcctgaccgttctgccggttctgccgccagatctgcgtccgctggttccgctggatggtggtcgtttcgcaacgtcggatctgaacgatctgtatcgtcgcgtgatcaaccgtaacaaccgtctgaaacgtctgctggatctggctgcgccagacatcatcgtacgtaacgaaaaacgtatgttgcaggaagcggttgacgccctgctggataacggtcgtcgcggtcgtgcgatcaccggttctaacaaacgtcctctgaaatctttggccgacatgatcaaaggtaaacagggtcgtttccgtcagaacctgctcggtaagcgtgttgactactccggtcgttctgttattaccgtaggtccatacctgcgtctgcatcagtgcggtctgccgaagaaaatggcgctggagctgttcaaaccgttcatctacggcaagctggaactgcgtggcctcgccaccaccatcaaagccgcgaagaaaatggttgagcgtgaagaagctgtcgtttgggatatcctggacgaagttatccgtgaacacccggtactgctgaaccgtgcgccaacactgcaccgtttgggtatccaggcatttgaaccggtactgatcgaaggtaaagctatccagctgcacccgctggtttgtgcggcatataacgccgacttcgatggtgaccagatggctgttcacgtaccgctgacgctggaagcccagttggaagcgcgtgcgctgatgatgtctaccaacaacatcctgtccccggcgaacggcgaacctatcatcgttccgtctcaggacgttgtattgggtctgtactacatgacccgtgactgtgttaacgccaaaggcgaaggcatggtgctgactggcccgaaagaagctgagcgtatttatcgcgctggcctggcctctctgcatgcgcgcgttaaagtgcgtatcaccgaatacgaaaaagatgctaacggcgaattcgtggcgaaaaccagcctgaaagacacgaccatcggccgtgccattctgtggatgatcgtaccgaaaggtctgcctttctccatcgtcaaccaggcgctgggtaagaaagccatctctaaaatgctgaacacctgctaccgtattctgggcctgaaaccgaccgttatttttgcggaccagacgatgtacaccggctttgcttatgcagcgcgttcaggtgcatccgttggtatcgacgatatggttatcccggagaagaaacacgagatcatctccgaagcggaagccgaagttgctgagatccaggaacagttccagtctggtctggtaacagcgggcgaacgctataacaaagttatcgatatctgggctgcggcgaacgatcgtgtatccaaggcgatgatggacaacctacagaccgaaaccgtgattaaccgtgacggtcaggaagagcagcaggtttccttcaacagcatctacatgatggccgactccggtgcgcgtggttctgcggcacagattcgtcagcttgctggtatgcgtggtctgatggcgaagccagatggctccatcatcgaaacgccaatcaccgcgaacttccgtgaaggtctgaacgtactccagtacttcatctccactcacggtgcgcgtaaaggtctggcggataccgcactgaaaacagcgaactccggttacctgactcgtcgtctggttgacgttgcgcaggatctggtggtgactgaagacgactgcggcactcacgaaggtatcctgatgactccggttatcgagggtggcgacgttaaagagccgctgcgcgatcgcgtactgggtcgcgtgactgctgaagacgtactgaagccgggcaccgcagatattctggttccgcgcaacacgctgctgcacgaacagtggtgtgacctgctggaagagaactctgttgacgccgttaaagtgcgttccgttgtatcctgtgacaccgactttggtgtatgtgcgcactgctacggtcgtgacctggcgcgtggccacatcatcaacaaaggtgaagctatcggcgttatcgcggcacagtccatcggtgagccgggtacacagctgacgatgcgtacgttccacatcggtggtgcggcatctcgtgcggctgctgaatccagcatccaggtgaaaaacaaaggtagcatccgtctgagcaatgcgaagtcggttgtgaactccagcggtaaactggttatcacctctcgtaacaccgagctgaaactgatcgacgaattcggtcgtaccaaagagagctataaagtgccttacggctctgttatggcgaaaggtgatggtgagcaggttgccggcggcgaaaccgttgcaaactgggacccgcacaccatgccggttatcaccgaagtaagtggtttcgtccgcttcactgacatgatcgacggccagaccattactcgtcagactgacgagctgaccggtctgtcttctctggtggttctggattccgctgagcgtactacgggtggtaaagatctgcgtccggcgctgaaaatcgttgatgctcagggtaacgacgttctgatccctggcaccgatatgcctgcgcagtacttcctgccgggtaaagcgattgttcaactggaagatggcgtacagatcagctctggtgacactctggcgcgtgttccgcaggaatccggcggtaccaaggatattaccggtggtctgccgcgcgttgctgacctgttcgaagcgcgtcgtccgaaagagccggcaatcctggctgaaatcagcggcatcatttccttcggtaaagaaaccaaaggtaaacgtcgtctggttatcaccccggtagacggtagcgagccgtacgaagagatgattccgaaatggcgtcagctcaacgtgttcgaaggtgaacgtgtagaacgtggtgacgtggtttccgacggcccggaagcgccgcacgacattctgcgtctgcgtggtgttcatgctgttactcgttacatcgttaacgaagtacaggacgtataccgtttgcagggcgttaagattaacgataaacacatcgaagttatcgttcgtcagatgctgcgtaaagccaccatcgaaaacgcaggtagctccgacttcctggaaggcgagcaggttgaatactcccgcgtcaagatcgctaaccgcgacctggaagcgaacggcaaagtgggtgcaacgttctcccgcgatctgctgggtatcaccaaagcgtctctggcaaccgagtccttcatctctgcggcatcgttccaggagaccacgcgtgtcctgaccgaagcagccgttgcgggtaaacgcgacgaactgcgtggcctgaaagagaacgttatcgtgggtcgtctgatcccggcaggtaccggttatgcgtaccaccaggatcgtatgcgccgccgtgctgcgggtgaactcccggctgcaccgcaggtgactgctgaagatgcgtctgccagcctggcagaactgctgaacgcaggcctgggcggttctgataacgattaa

SEQ ID NO: 75784 - DNA, 4029 bp, Citrobacter koseri
atggtttactcctataccgagaaaaaacgtattcgtaaggattttggtaaacgtccacaagttctggatgtaccttatctcctttctatccagcttgactcgtttcagaagtttatcgagcaagatcctgaagggcagtacggtctggaagctgcattccgttccgtgttcccgattcagagctacagcggtaattccgagctgcaatacgtcagctaccgccttggcgaaccggtgtttgacgttcaggaatgtcagatccgtggcgtgacctattccgcaccgctgcgcgtaaaactgcgtctggtgatctacgagcgcgaagcgccggaaggcaccgtaaaagacattaaagaacaagaagtctacatgggcgaaattccgctcatgaccgacaacggtactttcgttatcaacggtactgagcgtgttatcgtttcccagctgcatcgtagcccgggtgtcttcttcgacagcgataaaggtaaaactcactcttccggtaaagtactgtataacgcgcgtatcattccttaccgtggttcatggctggacttcgagttcgatccgaaagacaacctgtttgtccgtatcgaccgtcgtcgtaaactgcctgcgaccatcattctgcgtgcactgcaatacaccactgaacagatcctggacctgttctttgagaaagtgatcttcgagatccgcgacaacaagttgcagatggaactggtgccggaacgcctgcgtggtgaaaccgcctcctttgacatcgaagccaacggcaaagtgtacgtcgaaaaaggtcgtcgcattactgcgcgccacattcgccagctggaaaaagacgatatcaaacatatcgaagttccggttgagtacatcgcgggtaaagtggcgtctaaagactacgttgacgaatcaactggcgagctgatctgcgcagcgaacatggagctgagcctggatctgctggcgaagctgagccagtctggccacaagcgtatcgaaacgctgttcaccaacgatctggatcacggcccgtacatttctgaaacggtacgcatcgacccgaccaacgatcgtctgagcgcgctggtagaaatctaccgcatgatgcgcccgggtgagccgccgactcgtgaagcggctgaaagcctgtttgagaacctgttcttctccgaagaccgctatgacctgtctgcggttggtcgtatgaagttcaaccgttctctgctgcgcgacgaaattgaaggttccggtatcctgagcaaagacgacatcattgacgtgatgaagaagctcattgatatccgtaacggtaaaggcgaagtcgatgatatcgaccacctcggcaaccgtcgtatccgttccgtaggcgaaatggcggaaaaccaattccgcgttggcctggtgcgtgttgagcgtgcggtgaaagagcgtctgtctctgggcgatctggataccctgatgcctcaggacatgatcaacgccaaaccgatttctgcggcagtgaaagagttcttcggttccagccagctgtctcagtttatggaccagaacaacccgctgtctgagattacgcacaaacgtcgtatctccgcactcggcccaggcggtctgacccgtgaacgcgcaggcttcgaagttcgagacgtacacccgacccactacggtcgcgtatgtcctatcgaaacgcctgaaggtccgaacatcggtctgatcaactccctgtccgtgtacgcacagactaacgaatacggtttcctcgagactccgtatcgtaaagtcaccgacggcgtggtgactgatgaaattcattacctgtctgctatcgaagaaggtaactacgttatcgctcaggcgaactccaacctggatgacgaaggccactttgtagaagatctggttacttgccgtagcaaaggcgaatccagcttgttcagccgcgaccaggttgactacatggacgtttccacccagcaggtggtttccgtcggtgcgtccctgatcccgttcctggaacacgatgacgccaaccgtgcattgatgggtgcgaacatgcaacgtcaggcggttccgactctgcgcgctgataagccgctggttggtaccggtatggaacgtgctgttgccgttgactccggtgtaactgcggttgctaaacgtggcggtactgttcagtacgtggatgcgtcccgtatcgttatcaaagttaacgaagacgagatgtacccgggcgaagcaggcatcgacatctacaacctgaccaaatacacccgctctaaccagaacacctgtatcaaccagatgccgtgtgtttctctgggtgagccggttgagcgcggcgacgtgctggctgacggtccgtccaccgacctcggtgaactggcgctgggtcagaacatgcgcgtagcgttcatgccgtggaacggctacaacttcgaagactccatcctcgtttccgagcgtgttgtccaggaagaccgtttcaccaccatccacattcaggaactggcctgtgtgtcccgtgacaccaagctggggccggaagagatcaccgctgatatcccgaacgtgggtgaagctgcgctctctaaactggatgaatccggtatcgtttacatcggtgcggaagtgaccggcggcgacattctggttggtaaggtaacgccgaaaggtgaaacccagctgacgccagaagagaaactgctgcgtgcgatcttcggtgagaaagcgtctgacgttaaagactcttctctgcgcgtaccaaacggtgtttccggtacggttatcgacgttcaggtctttactcgcgatggcgtagaaaaagacaaacgtgcgctggaaattgaagagatgcagctgaagcaggcgaagaaagacctgtctgaagaattgcagatcctcgaagctggcctgtttagccgtatccacgctgtgctggtttccggtggcgttgaagctgagaagctcgacaagctgccgcgcgatcgctggctggaactgggcctgaccgacgaagagaaacaaaatcagctggagcaactggctgagcagtacgatgaactgaaacacgagttcgagaaaaaactcgaagcgaaacgccgcaaaatcactcagggcgacgatctggcaccgggcgtgctgaagattgttaaggtatatctggcggttaaacgccgtatccagcctggtgacaagatggcaggtcgtcacggtaacaagggtgtaatttctaagatcaacccgatcgaagatatgccttacgatgaaaacggcacgccggtagacatcgtactgaacccgctgggcgtaccgtctcgtatgaacatcggtcagattctggaaacccacctgggtatggctgcgaaaggtatcggcgataagatcaacgccatgctgaaacagcagcaggaagtcgcgaaactgcgcgaattcatccagcgtgcgtacgatctgggcgctgacgttcgtcagaaagttgacctgaataccttcagcgatgaagaagttctgcgtctggctgaaaacctgcgcaaaggtatgccgatcgcaacgccggtgttcgacggtgcgaaagaagcggaaattaaagagctgctgaaactgggtgacctgccgacttccggccagatcacgctgtttgacggccgtaccggtgaacagttcgagcgttcagtaaccgtaggttacatgtacatgctgaaactgaaccacctggtcgacgacaaaatgcacgctcgttccaccggttcctacagcctggttactcagcagccgctgggtggtaaggcgcagttcggtggtcagcgcttcggggagatggaagtgtgggcgctggaagcatacggcgcagcatacaccttgcaggaaatgctcaccgttaagtctgatgacgtgaatggccgtactaagatgtataagaacatcgtggacggcaaccatcagatggaaccgggcatgccggaatctttcaacgtattgttgaaagagattcgttcgctgggtatcaacatcgaactggaagacgagtaa

SEQ ID NO: 75785 - DNA, 366 bp, Citrobacter koseri
atgtctatcactaaagatcaaatcattgaagcagtatccgctatgtccgtaatggacgttgtagaactgatctctgcaatggaagaaaaattcggtgtttccgctgctgctgctgtagctgtagctgctggcccggttgaagctgctgaagaaaaaactgaattcgacgtaattctgaaagctgctggcgctaacaaagttgctgttatcaaagcagtacgtggcgcgactggcctgggtctgaaagaagctaaagacctggtagaatctgctccggccgctctgaaagaaggcgtgagcaaagatgacgctgaagctctgaaaaaatctctggaagaagctggcgctgaagttgaagttaaataa

SEQ ID NO: 75786 - DNA, 498 bp, Citrobacter koseri
atggctttaaatcttcaagacaaacaagcgattgttgctgaagtcagcgaagtagccaaaggcgcgctgtctgcagtagttgcggattcccgtggcgtaactgtagataaaatgactgaactgcgtaaagcaggtcgtgaagctggcgtttacatgcgtgttgttcgtaacaccctgctgcgccgcgtcgttgaaggtactccgttcgagtgcctgaaagacacgtttgttggtccgaccctgattgcatactctatggaacacccgggcgctgctgctcgtctgttcaaagagttcgcgaaagcgaatgcaaaatttgaggtcaaagccgctgcctttgaaggtgagctgatcccggcgtctcagatcgaccgcctggcaactctgccgacctacgaagaagcaattgcacgcctgatggcaaccatgaaagaagcttcggctggcaaactggttcgtactctggctgctgtacgcgatgcgaaagaagctgcttaa

SEQ ID NO: 75787 - DNA, 708 bp, Citrobacter koseri
atggctaaactgaccaagcgcatgcgtgtgatccgtgagaaagttgatgcgaccaaacagtacgacatcaacgaagctatctctctgctgaaagaactggccactgctaagttcgtagaaagcgtagacgttgccgttaacctcggcatcgacgcgcgtaaatctgaccagaacgtacgtggtgcaactgtactgccgcacggtactggccgttctgttcgcgtagccgtatttacccagggtgcaaacgctgaagctgctaaagctgctggcgctgaactggtaggtatggaagatctggctgaacagatcaagaaaggcgaaatgaactttgacgttgttattgcttccccggatgcaatgcgcgttgttggccagctgggccaggttctgggtccgcgtggcctgatgccgaacccgaaagtgggtactgtaacgcctaacgttgctgaagcggttaagaacgctaaagctggtcaggttcgttaccgtaacgacaaaaacggcatcatccacaccaccatcggtaaagtggattttgacgctgacaaactgaaagaaaacctggaagctctgctggttgcgctgaaaaaagcaaaaccgactcaggcaaaaggcgtgtacatcaagaaagttagcatctccaccaccatgggtgctggcgttgccgttgatcagtccggtctgactgcgactgtggcgaactaa

SEQ ID NO: 75788 - DNA, 429 bp, Citrobacter koseri
atggctaagaaagtacaagcctacgtcaagctgcaagttgcagctggtatggctaacccgagtccgccagtaggtccggctctgggtcagcagggtgtaaacatcatggaattctgcaaagcgttcaacgcaaaaactgattccatcgaaaaaggtctgccgattccggttgttatcaccgtttacgctgaccgttctttcaccttcattaccaaaacgcctccggcagcagttctgctgaagaaagcggctggtattaagtctggttccggcaagccgaacaaagacaaagtaggtaaaatttcccgcgctcagctgcaggaaatcgcgcagaccaaagctgccgacatgactggtgccgacattgaagcgatgactcgctccatcgaaggtactgcacgttccatgggcctggtagtggaggactaa

SEQ ID NO: 75789 - DNA, 546 bp, Citrobacter koseri
atgtctgaagctcctaaaaagcgctggtacgtcgttcaggcgttttccggttttgaaggccgcgtagcaacatcgctacgtgagcatatcaaattacacaatatggaagagttgtttggtgaagtcatggtgccgaccgaagaagtggtcgaaatccgtggtggccagcgtcgcaaaagcgagcgcaaattcttcccgggctacgtcctggttcagatggtgatgaacgacgcaagctggcacctggtgcgcagtgttccgcgtgtgatgggcttcatcggcggtacgtctgaccgtccggcgccaatcagcgacaaagaagttgatgcgatcatgaaccgtctgcaacaggtcggtgataaaccgcgtccgaaaacgctgtttgaaccgggtgaaatggttcgtgttaacgacggtccgtttgctgactttaacggcgttgttgaagaagtggactacgagaagtcccgcctgaaggtgtctgtttctatctttggtcgtgcgaccccggtagaactggactttgcccaggttgagaaagcctaa

SEQ ID NO: 75790 - DNA, 384 bp, Citrobacter koseri
atgagtgcgaataccgaagctcaaggaagcgggcgcggcctggaagcgatgaagtgggtcgttgttgtcgcattgctgcttgtggctattgtgggcaactacctctatcgcgacatgatgctgccgctgcgtgcgctggccgtagtaattctgattgctgcagcgggtggtgtcgcgctgttgacgacaaaaggtaaagcaaccgttgcttttgcccgtgaagcgcgtaccgaagtccgtaaggtcatttggccgactcgccaggaaacattgcacaccacgctgattgtggctgcggttaccgcagtaatgtcactgatcctgtggggactggatggtattctggttcgcctggtatcctttatcactggcctgaggttctga

SEQ ID NO: 75791 - DNA, 555 bp, Citrobacter koseri
atgtctgacgtattacgtccttataaggatcttttcccacagatcgagcaacgcgtgatgatcgattccagtagcgtcgtcattggcgatgttcgtctggctgatgacgtcgggatctggccgctggtcgtcattcgtggcgatgtgaactatgtagagattggcgcccgctcaaatatccaggacggcagcgtgctgcatgtgacgcacaaatccaccactaacccgcaaggtaatccgcttattgtgggtgaagatgtcactgtcggtcataaagtcatgctccacggctgcactatcggcaaccgggttctggttggcatggggtccattctgctggatggcgcggtaatagaagatgacgtcatgatcggcgctggcagcctggtgccgcaaaacaagcgcctggaaagcggctatctgtatctggggagtccggtgaagcagatccgtccgctaagtgatgaagagaaagccgggctacagtactccgcaaataactatgtgaaatggaaagatgaatacctgagtcagggcagccagacccaaccctga

SEQ ID NO: 75792 - DNA, 258 bp, Citrobacter koseri
atgaaccaggctattcagtttcctgacagagaagagtgggactcggaccttgaggccgttagctttcccgcactggtgaatgggatacagttaatgtgtgctatcaagggaaccacgctggcgcatcgctttggcggcgatacgccagaacggtggctggcagacttttgtgaacatcgctgggatctggaagaagaagcggaagcgttgatccagtcccagcaagaagacgatcagggttgggtctggctgccctga

SEQ ID NO: 75793 - DNA, 819 bp, Citrobacter koseri
atggaaacctatgccgtttttggtaacccgattgcgcacagcaagtcgccatttattcatcagcagtttgcgcagcaactgaagatagatcatccctatgggcgtgttctggcgccggttgatgatttcgtgaatacccttaatgccttttttgcgcaaggagggaaaggggcgaacgttaccgttccttttaaagaggaagcgtttgcacgcgcagatgaactgacggagcgtgcggcgcttgccggggcggtgaataccctgaaacgccttgatgatggtcgcttgctgggggataacaccgacggcatcggcctgttgagcgatcttgaacgtttgtctttcattcgtccggggctacgcatcctgctgattggggcagggggggcttccaggggcgtactgttaccgctgctatcaatggattgtgcggttactattgcgaaccgaaccgcttcccgtgctgaagaactggcgcaaatattcgctcataccggcagtgttcaggcccttcgtcttgatgcgctggaaggccatgaattcgatctgatcatcaatgcgacatccagtggaattagcggtgatattcccgcgatcccgtcatcgctcattcatcctgctgtctgttgctacgatatgttttatcaaaagggaaatacgccgttccttgcctggtgtgcggagcaaggggcaaaacggtatgccgatggtttggggatgctggtggggcaagccgcgcatgctgtttttctctggcatggcgtgttgcctgacgtggaacctgttattgcaacgctgaagcaggaactgtcggcatga

SEQ ID NO: 75794 - DNA, 573 bp, Citrobacter koseri
gtgaataataacctgcctacagacgctatcgcggcagcggtagcggtactgcataaagaatgtgtcatcgcgtatcccacagaagctgttttcggtgtcgggtgcgatcctgatagtgaaacggcggtcaaccgcttacttgaattgaaacagcgtccggttgaaaaaggcctcattttaattgcggcaaattttgagcagcttaagccatatattgatgacagcatgctgacagatacgcaacgagaagcgatctttgcgtgctggcctggcccggtgacgtttgtttttcctgcaccggcgacaacgccgcgctggttgacgggacgttttgattcgctggcggttcgcgttacggatcacccgctggtggtctcattgtgccaggcttatggcaaaccgttagtttccaccagtgcgaatttgacagggttgcctccctgccgcacggtcgaagaagtacgggcgcagtttggcgcggatttccccgttgttgagggggaaacgggaggacgtctgaatccttctgaaattcgtgatgccctgacgggcgagctgtttcgacaggggtaa

SEQ ID NO: 75795 - DNA, 555 bp, Citrobacter koseri
atggctaaatcagcactgtttacggtgcataaaaatgagccctgcccacagtgcggggctgaacttgttattcgctccgggaaacacggtccttttctcggctgctcacactatccagaatgtgattatgtccgtccgctgaaatcgtcagcagacggacatatcgtcaaagttctggaggggaagttttgcccggcatgtggcgcggagctggtattgcggcaggggcggttcggcatgtttatcggttgcagtgactaccccgcgtgtggccataccgaactgatcgacaaaccagacgaaactgccattacctgccctcagtgccaaaaaggtcatctggttcaacggtgttcccgttatggtaaaacctttcattcctgcgatcgctatcctgaatgtcagtttgtcattaacttcaaaccgatagccggagagtgtcctgaatgtcactatccgctactcatcgaaaagaaaaccgcgcagggtgtgaagcacttttgcgccagtaaacaatgtggaaagccggttccggcggaacaacaaagtgaataa

SEQ ID NO: 75796 - DNA, 474 bp, Citrobacter koseri
atgttcgacgtactaatgtatttgtttgagacttacatccataacgaagctgaattgcgtgtggatcaggacaaactggaacgggatcttaccgacgctggctttgaccgtgaagacatctacaacgcgctactgtggctggaaaagcttgctgattatcaggaaggcctcgccgaacctatgcaactggcttccgatccgctctccgtacgtatttacacggcagaggagtgcaatcgactggatgccagctgtcgggggtttctgttattcctcgagcagattcaggtgctaaacctcgaaacgcgagaaatggtgattgaacgcgtgctcgcgctggataccgcagaattcgatctggaagacctgaagtgggtgatcctgatggttttatttaacattccgggttgtgaaaatgcgtatcagcaaatggaagaattactctttgaagtgaatgaaggtatgctgcattaa

SEQ ID NO: 75797 - DNA, 1125 bp, Citrobacter koseri
atgacccgtaccgaaatttggttacgtttgatgcatgtgagtgaattgtatggcgatgcaatgttgagcattgcgaatttgctcatacaacagcgtcagattgataagactttacttcagaacgcagggttaacgtcccgacaagcggaacgttttttaaccgtcccgcaaaaagcgctggatgacgcgcagcactggcttgagcaacctcatcaccatttgattctggccggcagcgcgcgttatccggcacagttgaatgcgattgcagattatcccggcgctttttttgttgcgggtgatccagaatgtctccagaacttccagcttggcgtcgtaggaagccggacaccttcctggtatggcgagcgatgggggcgcttgttctgtgaaagtcttgccgtaaaaggggtgacgattaccagcgggctggcgagaggagttgatggcgttgcgcataaagccgccttaaacgcgaacgggaaaagcgtggctgtgctgggcaacggtctgggaagtatccatccccgacgacatacccggctggctgaggggctgatagacgccggtggcgcgctggtgtcggagtttccattagcgacgttccctttaccgcaccattttccccgacgaaaccgcatcattagcggcctgagcaaaggcgtgctggttgttgaagcggcactacgaagcggctctttggttaccgcgcgctgtgcgctggagcaagggagggatgtctttgccttgccagggccgataggcagccctggcagtgaagggccgcattggttgatcaaacagggcgccactcttgtgacggcgccagaggatattctggaaaatttgcaatacggcttacattggctgccagatgaggccgaaaattcactttattcaccagatcaggaagtcgcagcattgccatttcctatgctcctggctaacgtaggagatgaggtaacacctgttgacgtcgtcgctgaacgtgccggccaacctgtgccagaggtagtggctcagctactcgaactggagttagcaggatggatcgcagctgtacccggcggctatgtccgattaaggagggcaagccatgttcgacgtactaatgtatttgtttga

SEQ ID NO: 75798 - DNA, 510 bp, Citrobacter koseri
atggcagttttgcaagtgttacatattccggacgagcgtcttcgcaaagtcgcaaaaccggtagaagaagtgaatgcagaaattcagcgtatcgtcgatgatatgttcgaaacgatgtatgcagaagaaggtattggcctggcggcaacgcaggtcgatattcatcaacgtatcatcgtgattgatgtttcggaaaaccgcgacgagcgtctggtgttaatcaacccggaactgctggaaaaaagcggtgagacggggattgaagaaggctgtctgtctattccagaacagcgtgctttagtgccgcgtgcggagaaagtgaaaattcgcgcactcgaccgcgacggtcaatcttttgagctggaagcagacggtctgttggctatctgtattcagcacgagatggatcacctggtcggtaaactgtttatcgattatctgtcgccgctgaagcaacaacgtattcgtcagaaagttgagaaactcgaccgcctgaacgcccgagcttaa

SEQ ID NO: 75799 - DNA, 948 bp, Citrobacter koseri
gtgtcagactcactacgtattatttttgcgggtacacctgactttgcagcgcgtcatcttgacgcgctgttgtcttctggacacaacgtcgttggcgtgtttacccaacccgaccgcccggcaggacgcggtaaaaagctgatgcccagcccggtgaaagtgctggcggaagagaaaggaatagcggtttttcagcccgcctccttgcgcccacaagaaaaccagcatttagtcgcagacttacacgctgacgtaatggtcgtggtggcgtatggcctgattctgccaaaagcggtgcttgatatgccgcgactcggctgcatcaacgttcacggttccctgctcccgcgctggcgtggcgcagcgccgatccaacgttcactttgggctggtgatgccgaaacgggcgtcaccatcatgcaaatggatgtgggtctggatactggcgatatgctctataaacttgcctgtccaatcaccgagaaagacaccagcggtacgctgtatgacaagctggcggatcttggcccacaggggctgattgaaacgctgaaacagttagaaaacggtaccgcgaagccagaagtacaggacaacgccctggccactcacgctgagaaacttagcaaagaagaggcgcgtatggactggtctctctctgctgcacagcttgaacgctgcatccgtgcctttaatccctggccaatgagctggatggaaattgacggtcagccggtaaaagtgtggcaggcgtcagtgatagagcgcgtaacgcaagcggaaccgggcaccattcttgacgcgactaaacaaggtattcaggttgcaaccggcaacggcatcctgaacctgctctcccttcaacccgcaggtaagaaggcaatgagcgcgcaggatcttttaaattcacgtcgggaatggtttattcctggcaaccgtctggcctga

SEQ ID NO: 75800 - DNA, 1287 bp, Citrobacter koseri
atgaaaaaacaaaatttacgcagtctggcggcacaggccgttgagcaggtcgttgagcaagggcaatccttaagtaatgtcctgccaccactacagcaaaaagtctccgataaagacaaagcgctgcttcaggagctgtgctttggcgtgttgcgcaccctttcgcagctggagtggctgattaataaattaatgtctcgcccgatgaccggtaagcaacgcaccgtgcattacctgatcatggtagggttttaccagctattgcacacacgaattccaccacatgcggccctcgcggaaacggttgaaggtgctgttgctattaagcgcccacagcttaaggggctgatcaatggcgttttgcgtcagtttcagcgtcagcaggaggcgttgctggctgagtttgcgaccagcgaggcgcgttttctgcatccgtcctggctgctaaagcgcctgcaaaaatcctatcccacccaatgggaagcgattgtcgaagccaacaaccaacgtcctccaatgtggttacgcgtgaaccgtacacatcattcacgcgacagctggctcgcgttattgcaggacgcaggaatgaacggttttccccactcggcctatcctgacgccctacgtcttgagtctccggcgccggttcatgccttacccggctttgaagagggttgggtaacggttcaggatgcttccgcgcaaggctgtgttagcttcctcgccccacaaaacggcgagcaaatcctggatttgtgcgccgcaccggggggtaaaacaacgcatatactcgaagccgcgcctgaagcgcaggtgttggctgtcgatgtcgacgaacagcgtctttcacgcgtttacgataaccttaaacgtctggggatgaaggcaactgtcaaacagggtgatggtcgatatcccgcgcaatggtgtggcgagcagaaatttgaccgtattctgctggatgcgccttgttcagccaccggcgtcattcgtcgtcacccggatatcaaatggctacgccgcgatcgtgatattgctgaactggcaaaattacagtcggaaattctggatgccatatggccacatttaaagtcaggcggaacactggtctacgcgacctgttctgtcctgccggaagagaatagccaacagattcaggcttttttacagcgcaccccggacgccaccctgaccggcaccggaacccccgctcaaccgggcgtgcaaaatctgccaggtgcggaagaaggtgacggcttcttttacgctaagctaatcaaaaagtga

SEQ ID NO: 75801 - DNA, 1377 bp, Citrobacter koseri
atgaaaattatcattctgggcgcagggcaggtcggcggcacgctggctgaaaacctggtcggagagaacaacgacatcacggtggtcgatatcaatggcgaacgcctgcgtagtttacaggacaagttcgatctccgcgtcgtgcaagggcatggctctcacccccgcgtgctgcgtgaagcgggtgcagacgatgcggatatgctggtcgccgtgaccagttccgatgaaacgaatatggtcgcctgccaggtggcctattcactcttcaatacgccaaatcgtatcgcccgtatccgctcgccagattatgtccgcgatgcggataaactcttccactctgaagccgtccccatcgaccatcttattgcgccagagcaactggtcatcgataacatttatcgcctgatcgaatatcctggcgcattgcaggtcgttaatttcgccgaaggtaaagtcagtcttgcggtagtgaaagcctattatggcgggccgctgatcgggaacgcgttatccacgatgcgtgagcatatgccgcatattgatacccgcgtcgccgcgatattccgtcatgaccgccccattcgcccccagggttcgactattgtagaagcaggcgatgaagtctttttcattgccgcatcgcagcatatccgtgcggtaatgagcgaactgcaacgtctggagaaaccctataagcgtattatgttagtcggcgggggaaatatcggtgccggtctcgcgcgtcgtctggaaaaagattacagcgtcaaactgatcgagcgcgatcaacagcgggcctccgaacttgccgaaaaactgcaaaatacgatcgtcttttttggcgatgcgtcggatcaggaactgctggctgaagagcatattgatcaggttgatctgtttattgcagtcaccaacgatgatgaagccaacattatgtcggcaatgctggccaaacggatgggtgcgaagaaagtaatggtgctcattcaacgtcgcgcctatgtggatctcgtccaggggagcgtcattgatattgccatttcaccacagcaggccacgatttccgcgttactcagccatgtgcgtaaagccgatattgtgggagtgtcatcgctacgtcgtggtgtagcagaagcaattgaagccgttgcccacggtgatgaaagtacatctcgcgtcgtaggccgtgccattgatgaaattaaacttccaccgggaacaataattggcgcagtggttcgcggtaacgatgtaatgattgccaatgacaatttgcgcattgaacaaggcgatcatgtgattatgttcctgacggataaaaagtttattaccgacgtcgaacgcttattccagccaagtcctttcttcctgtaa

SEQ ID NO: 75802 - DNA, 411 bp, Citrobacter koseri
atgagctttattaaagagtttcgcgaattcgcgatgcgcgggaatgttgttgatttggcagtgggtgtgattattggtgcggcattcgggaagatcgtttcttctctggttgctgatatcattatgccgccgctgggattgttaattggcgggatcgattttaaacagtttgcctttacgctacgcgaagcgcagggagatatcccggcagtcgtgatgcattacggtgtgtttattcagaacgtctttgattttgttattgtggcgtttgctatcttcatggctatcaaactgatcaacaaactgaatcgtaagaaagaagaaccgacggaagcgccagcgccgacaacggaagaagtattgctttctgagatccgcgatcttctgaaagaacaaaacaaccgttcttaa

SEQ ID NO: 75803 - DNA, 219 bp, Citrobacter koseri
atgagtcgttatcagcatacgaaagggcagataaaagacaacgccattgaggcattactgcacgatccgcttttcagacaacgtgttgaaaaaaataagaaagggaaaggaagttatctgcgtaaaggcaaacatggcaatcggggtaactgggaggccagtggcaagaaagtgaatcacttttttaccactggctttctgcttattaaggcttgttaa

SEQ ID NO: 75804 - DNA, 426 bp, Citrobacter koseri
atgtatcgtattggtgaactggcaaagctggcagaagtgacgcccgataccatccgctactatgaaaagcagcagatgatggagcatgaagtgcgtacggagggtggtttccgactctacacggaaaacgatcttcagcgcctaaagtttatccgctatgcccggcagttgggctttacgcttgagtcgatccgggaactgttgtcgatccgtgtcgatcctgaacaccatacctgccaggagtcgaaaggaatcgtgcaggaaaggctgaaagaggtcgaatcacgaattgcggaattacagagtatgcagcgttcattgcagaggctgaacgatgcctgctgtggaacggcacacagcagcgtctattgttcaattctggaagcactggaacaaggcgccagcggagtcaagcaggagtgttga

SEQ ID NO: 75805 - DNA, 369 bp, Citrobacter koseri
atgtggttactggaccagtgggcagagcgccatattaccgatgcacagactaaaggtgagtttgataatctgcccggcagcggtgagccgctggccctggatgatgactcacatgtgccgcttgaactacggactggctaccgtttactcaaaaatgccggttgccttcccccggagcttgaacagcgtaaagaagccattcagctattggatctacttaaaggtattcgtcaggacgatccacggtatcaggaagtgagccgccgtttatcgctccttgaactaaaactacgacaggcggggctgagtaccgggtttttacgcggtgaatatgcagataaattgctgcataagattaatgatgactaa

SEQ ID NO: 75806 - DNA, 387 bp, Citrobacter koseri
atgcgccatcgtaagagtggtcgtcaactgaaccgcaacagcagccatcgccaggctatgttccgcaacatggcaggttcactggttcgtcatgagatcatcaagacgaccctgcctaaagcgaaagagctgcgtcgcgtagttgagccgctgattactcttgccaagactgatagcgtagctaatcgtcgtctggcattcgcccgtactcgtgataacgagatcgtggcaaaactgtttaacgaactgggcccgcgtttcgcgagccgcgccggtggttacactcgcattctgaagtgtggcttccgtgcaggcgacaacgcgccgatggcatacatcgagctggttgatcgttctgagtcgaaagcagaagctgctgcagagtaa

SEQ ID NO: 75807 - DNA, 990 bp, Citrobacter koseri
atgcagggttctgtgacagagtttctaaaaccgcgcctggtagatatcgagcaagtgagttcgacgcacgccaaggtgacccttgagcctttagagcgtggctttggccatactctgggtaacgcactgcgccgtattctgctctcatcgatgccgggttgcgcggtgaccgaggttgagattgatggtgtactacatgagtacagcaccaaagaaggcgttcaggaagacatcctggaaatcctgctcaacctgaaagggctggcggtgagagttcagggtaaagatgaagttattcttaccttgaataaatctggcattggccctgtgactgcagccgacattacccatgacggggatgtcgaaatcgtcaagccgcagcacgtgatctgccacctgaccgatgagaacgcgtctattagcatgcgtatcaaagttcagcgcggtcgtggttatgtgccggcttctacccgaattcattcggaagaagatgagcgcccaatcggccgtctgctggtcgacgcatgctacagccctgtagagcgtattgcctacaatgttgaagcagcgcgtgtagaacagcgtaccgacctggacaagctggtcatcgaaatggaaaccaacggcacaatcgatcctgaagaggcgattcgtcgtgcggcaaccattctggctgaacaactggaagctttcgttgacttacgtgatgtacgtcagccggaagtgaaagaagagaaaccagaattcgatccgatcctgctgcgccctgttgacgatctggaattgactgtccgctctgctaactgccttaaagcagaagctatccactatatcggtgatctggtacagcgtaccgaggttgagctccttaaaacgcctaacctgggtaaaaaatctcttactgagattaaagacgtgctggcttcccgtggactgtctctgggcatgcgcctggaaaactggccaccggcaagcatcgctgacgagtaa

SEQ ID NO: 75808 - DNA, 621 bp, Citrobacter koseri
atggcaagatatttgggtcctaagctcaagctgagccgtcgtgagggcaccgacttattccttaagtctggcgttcgcgcgatcgataccaagtgtaaaattgaacaagctcctggccagcacggtgcgcgtaaaccgcgtctgtctgactatggtgtgcagttgcgtgaaaagcaaaaagttcgccgtatctatggtgtgctggagcgtcagttccgtaactactacaaagaagcagcgcgtctgaaaggcaacaccggtgaaaacctgttggctctgctggaaggtcgtctggacaacgttgtataccgtatgggcttcggcgccactcgtgcagaagcacgccagctggttagccataaagcaattatggtaaacggtcgtgttgttaacatcgcttcttatcaggttagtccgaatgacgttgttagcattcgtgagaaagcgaagaagcagtctcgcgtgaaagccgctctggagctggctgagcagcgtgaaaagccaacctggctggaagttgatgctggcaagatggaaggtacgtttaagcgtaagcctgagcgttctgatctgtctgcggacattaacgaacacctgatcgtcgagctttactccaagtaa

SEQ ID NO: 75809 - DNA, 381 bp, Citrobacter koseri
atgagggatcggagtcacatcagtaatattagtgatgcggaaaccagcggcgttcagtgcacgaatggtagattcgcgacctggacccggacctttaaccataacttccagattcttgataccgtattcttttacggcgtcagcgcaacgctctgctgcaacctgagctgcaaacggagtggatttgcgagaaccacggaaaccggaaccaccggctgttgcccaacccagcgcgttaccctgacgatcagtgatagtcacgatggtgttgttgaaagaagcatggatatgagccacgccgtcagagacttgttttcttacacgtttacgtgcacgaattggtgcctttgccattattcaatcaccccgattatttcttga

SEQ ID NO: 75810 - DNA, 357 bp, Citrobacter koseri
gtggcccgtatagcaggcattaacattcctgatcagaaacatgctgtgatcgcgttaacttcgatctacggcgtcggtaagacccgttctaaagccattctggctgcagcgggtatcgctgaaaatgttaagatcagtgagctgtctgaagaacaaatcgacacgctgcgtgacgaagttgccaaatttgtcgttgaaggtgatctgcgccgtgaaatcagcatgagcatcaagcgcctgatggatcttggttgctatcgcggtttgcgtcatcgtcgtggtctcccggttcgcggtcagcgtaccaagaccaacgcacgtacccgtaagggtccgcgcaaaccgatcaagaaataa

SEQ ID NO: 75811 - DNA, 1332 bp, Citrobacter koseri
atggctaaacaaccgggattagattttcaaagcgccaaaggtggcttaggcgagctgaaacgcagactgctgtttgttatcggcgcgctgattgtgttccgtattggctcttttattccgatccctggtattgatgccgctgtacttgccaaactgcttgaacaacagcgaggcaccatcattgaaatgtttaacatgttctctggtggtgcactcagccgtgcttctatctttgctctgggtatcatgccgtatatttcggcgtcgattattatccagctgctgacggtggttcacccaacgctggcagaaattaagaaagaaggggagtctggtcgtcgtaagatcagccagtacacccgctacggtactctggtgctggcgatattccagtcgatcggtattgctaccggtctgccgaatatgcctggtatgcaaggcctggtaatgaatccgggctttgcattctatttcaccgctgttgtaagtctggttacaggaaccatgttcctgatgtggttgggcgaacagattactgaacgtggtatcggcaacggtatctcaatcattatcttcgccggtattgtcgcgggactcccgccagccattgcccatactatcgagcaagcgcgtcaaggcgacctgcacttcctcgtgttgctgttggttgcagtattagtatttgcagtgacgttctttgttgtatttgttgagcgtggtcaacgccgcattgtggtaaactacgcaaaacgtcagcagggtcgtcgtgtctatgctgcacagagcacacatttaccgctgaaagtgaatatggcgggggtaatcccggcaattttcgcttccagtattattctgttcccggcaaccatcgcgtcatggttcgggggcggtactggttggaactggctgacaacaatttcgctgtatttgcagcctgggcaaccgctttatgtgttactctatgcgtctgcaatcatcttcttctgtttcttctacacggcgttggttttcaacccgcgtgaaacagcagataacctgaagaagtccggtgcatttgtaccaggaattcgtccgggagagcaaacggcgaagtatatcgataaagtaatgacccgcctgactttggttggtgcgctttacattacctttatctgcctgatcccggagttcatgcgtgatgcaatgaaagtaccgttctactttggtgggacctcactgcttatcgttgtcgtcgtgattatggactttatggctcaagtgcaaactctgatgatgtccagtcagtatgagtctgcattgaagaaggcgaacctgaaaggctacggccgttaa

SEQ ID NO: 75812 - DNA, 435 bp, Citrobacter koseri
atgcgtttaaatactctgtctccggccgaaggctccaaaaaggcgggtaaacgcctgggtcgtggtatcggttctggcctcggtaaaaccggtggtcgtggtcacaaaggtcagaagtctcgttctggcggtggcgtacgtcgcggtttcgagggtggtcagatgcctctgtaccgtcgtctgccgaaattcggcttcacttctcgcaaagcagcgattacagccgaagttcgtctgtctgacctggctaaagtagaaggcggcgtagtagacctgaacacgctgaaagcggctaacattatcggtatccagatcgagttcgcgaaagtgatcctggctggtgaagtcactactccggtaactgttcgtggcctgcgtgttactaaaggcgctcgtgctgctatcgaagctgctggcggtaaaatcgaggaataa

SEQ ID NO: 75813 - DNA, 180 bp, Citrobacter koseri
atggcaaagactattaaaattactcaaacccgcagtgcaatcggtcgtctgccgaaacacaaggcaacgctgcttggcctgggtctgcgtcgtattggtcacaccgtagagcgcgaggatactcctgctgttcgtggtatggtcaacgcggtttccttcatggttaaagttgaggagtaa

SEQ ID NO: 75814 - DNA, 504 bp, Citrobacter koseri
atggctcacatcgaaaaacaagctggcgaactgcaggaaaagctgatcgcggtaaaccgcgtatctaaaaccgttaaaggtggtcgtattttctccttcacagctctgactgtagttggcgatggtaacggtcgcgttggttttggttacggtaaagcgcgtgaagttccagcagcgatccagaaagcgatggaaaaagcccgtcgcaatatgattaacgtcgcgctgaacaacggcaccctgcaacacccggttaaaggtgttcacacggggtctcgtgtattcatgcagccagcttccgaaggtaccggtatcatcgccggtggtgcaatgcgcgccgttctggaagttgctggggttcataacgttctggctaaagcatatggttccaccaacccgatcaacgtggttcgtgcaactattgatggcctggaaaatatgaattctccagaaatggtcgctgccaagcgtggtaaatccgttgaagaaattctggggaaataa

SEQ ID NO: 75815 - DNA, 354 bp, Citrobacter koseri
atggataagaaatctgctcgtatccgtcgtgcgacccgcgcacgccgcaagctccaggagctgggcgcaactcgcctggtggtacatcgtaccccgcgtcacatttacgcacaggtaattgcaccgaacggttctgaagttctggtagctgcttctactgtagaaaaagctatcgctgaacaactgaagtacaccggtaacaaagacgcggctgcagctgtgggtaaagctgtcgctgaacgcgctctggaaaaaggcatcaaagatgtgtcctttgaccgttccgggttccaatatcatggtcgtgtccaggcactggcagatgctgcccgtgaagctggccttcagttctaa

SEQ ID NO: 75816 - DNA, 534 bp, Citrobacter koseri
atgtctcgtgttgctaaagcaccggtcgttgttcctgccggcgttgatgtaaaaatcaacggtcaggttattacgatcaaaggtaaaaacggcgagctgactcgtactctcaacgatgctgttgaagttaaacatgcagataatgcactgaccttcggtccgcgtgatggttacgtagacggttgggctcaggctggtaccgcgcgtgccctgctgaactcaatggttatcggtgttaccgaaggcttcactaagaagctgcagctggttggtgtaggttatcgtgcagcggttaaagggaatgtagtaaacctgtccttaggtttctctcacccggttgaccaccagctgccagcaggtattactgcagaatgtccgactcagactgaaatcgtgctgaaaggcgctgataagcaggtgattggtcaggttgcagcagatctgcgcgcctaccgtcgtcctgagccttacaaaggcaagggtgttcgttacgccgacgaagtcgtgcgtaccaaagaggctaagaagaagtaa

SEQ ID NO: 75817 - DNA, 393 bp, Citrobacter koseri
atgagcatgcaagatccgatcgcggatatgctgacccgtatccgtaacggtcaggccgcgaacaaagctgcggtcaccatgccttcctccaagctgaaagtggcaattgccaacgtgctgaaggaagaaggttttatcgaagattttaaagttgaaggcgacaccaagccggaactggaactgactcttaagtatttccagggtaaagctgttgtagaaagcattcagcgtgtcagccgcccaggtctgcgcatctacaaacgtaaagatgagctgccgaaagttatggcgggtctgggtatcgcagttgtttctacctctaaaggtgttatgactgatcgtgcagcgcgccaggctggtcttggtggcgaaattatctgctacgtagcctaa

SEQ ID NO: 75818 - DNA, 306 bp, Citrobacter koseri
atggctaagcaatcaatgaaagcacgcgaagtaaaacgcgtagctttagctgataaatacttcgcgaaacgcgctgaactgaaagcgatcatctctgatgtgaacgcttccgacgaagatcgttggaacgctgttcttaagctgcagactctgccgcgtgattccagcccgtctcgtcagcgtaaccgctgccgtcaaacaggtcgtccacatggttatgtgggcaagttcgggttgagccgtatcaagttacgtgaagccgctatgcgcggtgaagtaccaggcttgaaaaaggctagctggtaa

SEQ ID NO: 75819 - DNA, 540 bp, Citrobacter koseri
atggcgaaactgcatgattactacaaagacgaagtagttaataaactcatgactgagtttaactacaattctgtcatgcaagtccctcgggtcgagaagatcaccctgaacatgggtgttggtgaagcgatcgctgacaagaaactgctggataacgcagcagctgacctggcagcaatctccggtcaaaaaccgttgatcaccaaagcacgcaaatctgttgcaggcttcaaaatccgtcagggctatccgatcggctgtaaagtaactctgcgtggcgaacgcatgtgggagttctttgagcgcctgatcactattgctgtaccgcgtatccgtgacttccgtggcctgtccgctaagtctttcgacggtcgtggtaactacagcatgggtgtccgtgagcagatcatcttcccagaaatcgactacgataaagtcgaccgcgttcgtggtttggatattaccattaccactactgcgaaatctgacgaagaaggccgtgctctgctggctgcctttgacttcccgttccgcaagtaa

SEQ ID NO: 75820 - DNA, 315 bp, Citrobacter koseri
atggcagcgaaaatccgtcgtgatgacgaagttatcgtgttaaccggtaaagataaaggtaaacgcggtaaagttaagaatgtcctgtcttccggcaaggtcattgttgaaggtatcaacctggttaagaaacaccagaagccggttccggctctgaaccaaccgggtggcatcgttgaaaaagaagccgctattcaggtttccaacattgcaatcttcaatgcggcaaccggtaaggctgaccgtgtaggctttagattcgaagacggtaaaaaagtccgtttcttcaaatctaacagcgaaactatcaagtaa

SEQ ID NO: 75821 - DNA, 372 bp, Citrobacter koseri
atgatccaagaacagactatgctgaacgtcgccgacaactccggtgcacgtcgcgtaatgtgtatcaaggttctgggtggctcgcaccgtcgctacgcaggcgtaggcgacatcatcaagatcaccatcaaagaagcaattccgcgtggtaaggtcaaaaaaggtgatgtgctgaaggcggtagtggtgcgcaccaagaagggtgttcgtcgcccggacggttctgtcattcgcttcgatggtaatgcatgcgttattctgaacaataacagcgagcagcctatcggtacgcgtatttttgggccggtaactcgtgagcttcgtaccgagaagttcatgaaaattatctctctggcaccagaagtactctaa

SEQ ID NO: 75822 - DNA, 255 bp, Citrobacter koseri
atgaccgataaaatccgtactctgcaaggtcgcgttgttagcgacaaaatggagaaatccattgttgttgctatcgaacgttttgtgaaacacccgatctacggtaaattcatcaagcgtacgaccaaactgcacgtacatgacgagaacaacgaatgtggtaccggtgacgtggttgaaatccgcgaatgccgcccactgtccaagactaagtcctggacgctggttcgcgttgtagagaaagcggttctgtaa

SEQ ID NO: 75823 - DNA, 192 bp, Citrobacter koseri
atgaaagcaaaagagctgcgtgagaagagtgttgaagagctgaacaccgagctgctgaacctgctgcgtgagcagttcaacctgcgtatgcaggctgcaagtggccagctgcaacagtctcacctgttgaagcaagtgcgtcgtgatgtcgcacgcgttaagactttactgactgagaaggcgggtgcgtaa

SEQ ID NO: 75824 - DNA, 411 bp, Citrobacter koseri
atgttacaaccaaagcgtacaaaattccgtaaaatgcacaaaggccgtaaccgcggtctggcgcagggtacggatgttagcttcggcagcttcggtctgaaagctgttggccgtggtcgtctgactgcccgtcagatcgaagcagcacgtcgtgctatgacccgtgcagttaagcgtcaaggtaagatctggatccgtgtattcccggacaaaccgatcactgaaaagccgctggcagtgcgtatgggtaaaggtaaaggtaacgtggagtattgggttgccttgattcagccgggtaaagtcctgtatgaaatggacggcgtaccggaagagctggcccgtgaagcattcaagctggcagcagcgaaactgccgattaaaaccacctttgtaactaagacggtgatgtaa

SEQ ID NO: 75825 - DNA, 702 bp, Citrobacter koseri
atgggtcagaaagtacatcctaatggtattcgcctgggtattgtaaaaccatggaactctacctggtttgcgaacaccaaagaattcgctgacaacctggacagcgattttaaagtacgtcagtacctgacgaaggaactggctaaagcgtctgtatctcgtatcgttatcgagcgtccggctaagagcatccgtgtgactattcacactgctcgtccgggtatcgttatcggtaagaaaggcgaagacgtagaaaaactgcgtaaggtcgtagcggatatcgctggcgttcctgcacagatcaatatcgccgaagttcgtaagcctgaactggacgcaaaattggttgctgacagcatcacttctcagctggaacgtcgcgttatgttccgtcgtgctatgaagcgtgctgtacagaacgcaatgcgtctgggcgctaaaggtattaaagttgaagttagcggccgtctgggcggcgcggaaatcgctcgtaccgaatggtaccgtgaaggtcgcgtaccgctgcacactctgcgtgctgacatcgactacaacacctctgaagcgcacaccacttacggtgtaatcggcgttaaagtgtggatcttcaaaggcgagatcctgggtggtatggctgctgttgaacaaccggaaaaaccggctgctcaaccgaaaaagcagcagcgtaaaggccgtaaataa

SEQ ID NO: 75826 - DNA, 333 bp, Citrobacter koseri
atggaaactatcgctaaacatcgccatgctcgttcttctgctcagaaggttcgccttgttgctgacctgattcgcggtaagaaagtgtcgcaggctctggatattttgacctacaccaacaagaaagcggctgtactggtcaagaaagtcctggaatctgccattgctaacgctgaacacaacgatggcgctgacattgacgatctgaaagttacgaaaattttcgtagacgaaggcccgagcatgaagcgcattatgccgcgtgcaaaaggtcgtgcagatcgcatcctgaagcgcaccagccacattactgtggttgtgtccgatcgctga

SEQ ID NO: 75827 - DNA, 279 bp, Citrobacter koseri
atgccacgttctctcaagaaaggtccttttattgacctgcacttgctgaagaaggtagagaaagcggtggaaagcggagacaagaagcccctgcgcacttggtcccgtcgttcaacgatctttcctaacatgatcggtttgaccatcgctgtccataatggtcgtcagcacgttccggtatttgtaaccgatgaaatggtcggtcacaaactgggtgaattcgcaccgactcgtacttatcgcggccacgctgctgataaaaaagcgaagaagaaataa

SEQ ID NO: 75828 - DNA, 822 bp, Citrobacter koseri
atggcagttgttaaatgtaaaccgacatctccgggtcgtcgccacgtagttaaagtggttaaccctgagctgcacaagggcaaaccttttgctccgttgctggaaaaaaacagcaaatccggtggtcgtaacaacaatggccgtatcaccactcgtcatatcggtggtggccacaagcaggcataccgtattgttgacttcaaacgcaacaaagatggtatcccggcagttgttgaacgtcttgagtacgatccgaaccgttccgcgaacatcgcgctggttctgtacaaagacggtgagcgccgttacatcctggcccctaaaggcctgaaagctggcgaccagattcaatctggcgttgatgctgcaatcaaaccaggcaacaccctgccgatgcgcaacatcccggttggttctaccgttcataacgtagaaatgaaaccaggtaaaggcggtcagctggcacgttccgctggtacttacgttcagatcgttgcgcgcgatggtgcttatgtcactctgcgtctgcgttctggtgaaatgcgtaaagtcgaagcagactgccgtgcaactctgggcgaagttggcaatgctgagcatatgctgcgcgttctgggtaaagcaggtgctgcacgctggcgtggtgttcgtccgaccgttcgcggtaccgcgatgaacccagtagaccacccacatggtggtggtgaaggtcgtaactttggtaagcacccggtaactccgtggggcgttcagaccaaaggtaagaagacccgcagcaacaagcgtactgataaattcatcgtacgtcgccgtagcaaataa

SEQ ID NO: 75829 - DNA, 303 bp, Citrobacter koseri
atgattcgtgaagaacgtctgctgaaggtgctgcgcgcaccgcacgtttctgaaaaagcgtctactgcgatggaaaaaaccaacaccatcgttctcaaagttgctaaagacgcgaccaaagcagaaatcaaagctgctgtgcagaaactgtttgaagtcgaagtcgaagtcgttaacaccctggttgttaaagggaaagttaaacgtcacggacagcgtatcggtcgtcgtagcgactggaaaaaagcttacgtcaccctgaaagaaggccagaatctggacttcgttggcggcgctgagtaa

SEQ ID NO: 75830 - DNA, 606 bp, Citrobacter koseri
atggaattagtattgaaagacgcgcagagcgcgctgactgtttccgaaactaccttcggtcgtgatttcaacgaagcgctggttcaccaggttgttgttgcttatgcagctggtgctcgtcagggcactcgtgctcagaagactcgtgctgaagtaactggttccggtaaaaaaccgtggcgccagaaaggtaccggccgtgcgcgttctggttctatcaagagcccgatctggcgttctggtggcgtgaccttcgctgcacgtccgcaggaccacagtcaaaaagttaacaagaagatgtaccgcggcgcgctgaaaagcattctgtccgaactggtacgtcaggatcgtctgatcgttgtcgagaagttctctgtagaagcgcctaaaactaagctgctggctcagaaactgaaagacatggctctggaagatgtgctgatcatcaccggtgagctggacgagaacctgttcctggctgcgcgcaacctgcacaaggttgacgtacgcgatgcaactggtatcgacccggttagcctgatcgccttcgacaaagtcgtaatgactgctgatgctgttaagcaagttgaggagatgctggcatga

SEQ ID NO: 75831 - DNA, 630 bp, Citrobacter koseri
atgattggtttagtcggtaaaaaagtgggtatgacccgcatcttcactgaagatggcgtctctatcccagtaaccgtaatcgaagttgaagcaaaccgcgttactcaggttaaagatctggctaacgatggctaccgcgctgttcaggttaccactggtgctaaaaaagctaaccgtgtaaccaagccggaagctggccactttgctaaagctggcgtagaagctggccgcggcctgtgggagttccgtctggcagagggtgaagaatacaccgttggtcagagcatcagcgttgaactgtttgctgacgttaaaaaagttgacgtaactggcacctctaaaggtaaaggtttcgcaggtaccgttaagcgctggaacttccgtacccaggacgctactcacggtaactccttgtctcaccgcgttccgggttctatcggtcagaaccagactccgggcaaagtgttcaaaggcaagaaaatggcaggtcagctgggtaacgaacgtgtaaccgttcagagcctggacgtagtacgtgttgacgctgagcgcaacctgctgctggttaaaggtggtgttccgggtgcaaccggttgcgacctgatcgttaaaccagctgtgaaggcgtaa

SEQ ID NO: 75832 - DNA, 312 bp, Citrobacter koseri
atgcagaaccaaagaatccgtatccgcctgaaagcgtttgatcatcgtctgatcgatcaatcaaccgcggaaatcgtcgagactgctaagcgcactggtgcgcaagtccgtggtccgatcccgctgccgacccgcaaagagcgctttaccgttctgatctccccgcacgttaacaaagacgcgcgcgatcagtacgaaattcgcactcacaagcgtctggttgacatcgttgagccaaccgagaaaaccgttgatgctctgatgcgtctggacctggctgccggtgtagacgtgcagatcagcctgggttaa

SEQ ID NO: 75833 - DNA, 501 bp, Citrobacter koseri
atggtgagcgcaacgtttaatgaggatgacatgatgcaacccgacctccccttcctgattatctacctcttattatctgcgctatccgggatatatgacgcgcgaacaggactcttgcccgatcggtttacctgtcccctgctctggagcggcctgctttattacctgtgctgtttacctgaccatttgccagatgcgctttggggcgccattgcgggttacggcgggttcgcctttctctattggggatatcgactgctgtatcgcaaagaagggctcggatacggcgatatcaaatttcttgccgcgcttggcgcctggcatcgttgggagtcattacccctgctggtctttctggccgcgcttattgccagcattaacgtgatggcgatgtacgtaataaacgggaaaggggcattaaaaaacccgctgccgttcgggccatttctggcggctgcgggttttatcattggctggaaaacactgctgtcggggagttaa

SEQ ID NO: 75834 - DNA, 477 bp, Citrobacter koseri
atgaaaggtgatgttaaaatcataaattatctcaataaactattgggaaatgagcttgtcgcaatcaatcagtactttctccatgcccgtatgtttaaaaactgggggctcactcgtctgaatgacgtcgaataccatgaatccatcgatgaaatgaaacacgctgataaatatatcgagcgtattttatttcttgagggtatcccaaacttgcaggatcttggcaagctgggcattggtgaagatgtcgaagagatgttgcagtcagatctccgtctggaactggaaggagcgaaggatctacgtgaagccatagcctacgccgacagcgttcatgattacgttagccgggacatgatgattgagatcctgacagatgaagaagggcatatcgactggcttgagacggagctggatctgattgcaaaaattggtctacagaattacctgcaatcgcaaattaaagtggacgattaa

SEQ ID NO: 75835 - DNA, 195 bp, Citrobacter koseri
atgtacgtttgtttgtgtaatggtgtaagtgataaaaaaattcgtcaggctgttcgtcagtttcaccctcaatctttccaacaattacgtaagtttattcctgttggaaatcaatgcggtaagtgcgtccgtgcggcgcgtgaagtgatgcaggatgagttaatgcaaatgccggagtttaaagaaatcgcctga

SEQ ID NO: 75836 - DNA, 1728 bp, Citrobacter koseri
atgaatccacatctaatgcaaaagctaaatggtattgctgatgctttttcaatatttctgttatggctacagaacagccctgtcatattgtcattactggcaggactaacacttccatttatattcaacctaccacgagaggaaagaaaaaacgctcccttctggttaaaatctgttgcgtgcgtatccattttctttttcatatttggaacaatgtcaccacttagtattcatggactgagttatctctttgacgttctcgatccaaatacactacttagaataccattatggataatcactattctctttacactagccggattagcttttcatttgacagcgagacgattattagcaggtgaaatagacagtctgaaacacagaatgataaagaaaagcaaacttgagagaaatacaagaacagatgttcgcaaagtaaaagaattgttgccagacagcatagaatacaatcccctagattacattgatttgaaaaaaggggttttcattggcttagacaaagacgaccaaccgcaatatataacaataaaagaatttcagaaacaacatgcagcaatcataggtacaacaggttcaggtaagggtattaccgcatcggttttgctttatcaggcaattctgttaggcgaggctgtttttgttgaagatccaaaagatgatgaatgggctgtgcatgttcttagagaagcatgtaaaaaagcaggaaagaaatttgttgtaattaatttaaacagaaccaaccatcaacttgacttactggctgacatatcacatgaacaattagaagaattatttaacgcaggatttagtctatcaaaaaaaggagaggccgcagatttttatcgtatagctgatcgccgcgcagccagaaatgtagccgcaattcataaaacaggaatgacactgtatgatttattcaacgatgacaacgtaaaatcaataggagaagatgccccagcatttttaggtgaattagaagaaatcgctcttgtaaattccgtcaatgcaaaaaatggtttttctcttaaagagatttttgataatggaggatgctgctatatcattggatcaacccgaaatcaaaaaattatttctgcacaacgcatgatacttacgcgtttgattcagatagctgaaaccagagacagaataaacacaacaccacgtgttgttgcaattttccttgatgagttgaaatatcatatttcacgcccaacaatggaaggattaggtacagcacgagataaaagcgtgcatatatttatggccttccaagcaatagatgatttaagagattgtccttctgatcttaatggcgattctgtaattggtgctgttattgaaaacgcaaaattcaagttaatctataaaatccagaatccagaaacagcagagtgggcagctaaaatgactggttccatattagttgacgatgaaatgaggaaggtgagaaccgacttatcattaacagaaaaagttgatactgaccgcatgataagacaggcagaaagttattatgtagacagtaatatgtttttaaatctacctgaaagagtaggatttgtgttcacatcaaaagatttaccaaaagcaactaaaatgtctcatataccagcaaacaaagaaaccattgaattgctatcttttgagacagaacaaatagaacaacacaataacaacgatatgccttccagtggtttatga

SEQ ID NO: 75837 - DNA, 735 bp, Citrobacter koseri
atgttaattcatgattttcacgaaagaaaaagaatatcagctaacaacatgctttgtcttttaaatttccttaaggatgaaacctattcagactttcacattatcaaaagaaaattaggattcacaaaaaaaagcagaaacccagtatataaattattaaacaaggctcttaaagaaggttttattatcaaacatgaaataccatcatcaaaaagaaaattaactatttggggtattactatgcaaggattagcaatggttgtaaaagccgatgacattacgttccctagttattttgaacccagcaaactaaaatactggactcttgaacatcgtcttttaaatcagcgagtgagaatatctctggaaagtaaaggagctactgaatggattaacggtgatagtgcagccttcatcgcacgttattccggctgctcccatcgcccggatggaataataaaacaaccaactggcgcaatcatggctattgaaacagaacgaacaatgaaaactcgtgctcgctatataagcattataaacagtcatcttacggcaagagataaaggaaactggcattatgctttgtacgtcatgcctgacaccaaaagtaaagaatcattaatcagactattcgactcaatcaaaactgtaatgaggaataatacacctgtgccttttgatgaaaaaaacagagaaatgtttatttttagaacaattgatgaactggaacaatag

SEQ ID NO: 75838 - DNA, 465 bp, Citrobacter koseri
atgaaaatattaatcatattcgcactatatatcttatcgtcttcactatatgccaatactgcggatatacagggaaaagttactcgtgtacttgacggcgatactatcgagattttacagaataaaacgccagtaaggattcgtctggccaatattgatgcaccggaaaaaaaacaggcttacggacgctggtcaactgaccaacttaaaagcctgattgccgaacaatccgtcagagtgacatattcacacaacgaccgttacggccgcattatcggacgtgtattcacaacaggcggtagtgaggctaaccgctttatggtgcaatcgggtgctgcatgggtgtatgagcattacaacacagataacgatctagcaactctacaacaggaagctcgctcacaaaaacgaggtttatgggctgaccccaatcccgttccaccgtgggaatggcgacataaatag

SEQ ID NO: 75839 - DNA, 516 bp, Citrobacter koseri; identical to SEQ ID NO: 19487

SEQ ID NO: 75840 - DNA, 264 bp, Citrobacter koseri; identical to SEQ ID NO: 19486

SEQ ID NO: 75841 - DNA, 234 bp, Citrobacter koseri; identical to SEQ ID NO: 19485

SEQ ID NO: 75842 - DNA, 648 bp, Citrobacter koseri
atgacggtagctattgcgctggttaacggtaaaggcggggtgaaaaagtcctcaatgagcagggctattgccacagagtacacgaaggcagactggaaggtattagggcttgatatggatgttgatcaggggtcattcctggattggggacagcggcgattgagatataaagttgaaccacctgtcactattcagggatgcggaacggtatcacaggctaaaaaacatattgaatcagggatatgggatttagtcgttatcgatagtgctgcttatgcaactaaatcgctgttgagcctggcagaaattgttgatttgctcgtgttaccgtctggttttagtgtggacgatttgagaacgacggttacaaccgtgaatgcattgcgtaacaagggacactcaacaaataagatggctgtagtttttgtcggagtcagtgaaagcgaaagtgagtatcgtaccgcgcttgaatatcttaaaccgtgtggtgttcaagttatcaatggcgcaataccttttatgacctcgttcagccaggcacaggataaaggactggcattgacggaatccccttttccaggtccacggcagaaagctgacgaagttgtccagggagttattgacttgctgactaaactctcacagtga

SEQ ID NO: 75843 - DNA, 351 bp, Citrobacter koseri; identical to SEQ ID NO: 19483

SEQ ID NO: 75844 - DNA, 300 bp, Citrobacter koseri; identical to SEQ ID NO: 19482

SEQ ID NO: 75845 - DNA, 246 bp, Citrobacter koseri; identical to SEQ ID NO: 19481

SEQ ID NO: 75846 - DNA, 270 bp, Citrobacter koseri; identical to SEQ ID NO: 19480

SEQ ID NO: 75847 - DNA, 543 bp, Citrobacter koseri
atgacaacattttcagaaaaatatcagcctgtctttgaagttgtatgccgtattcttgggaacggctggcgtgttaacaaactggataattatcagcatcgtattaaactgacttctacagaaattcgtaaatactccatcattattcgtctggagcgtgaaagattttttatagttggtagcgttgatagtcttgtatggcacggtaatccttccgtctgtactgtatctcttacgcgcaatcctgttggtattgctaatgatatatctcggaaaatccttgctaatgcactggatgaaattgaattgctcaggaagcatgagaacgcattacagaaaaaacaagataaagtacaaataatcaaagggatgttatcacagttgatttctatatccccttggtatggggcattaacgggatttaatgtggataatgggcttacaggaaaaatactacaaaatggtgatgattatgaaatggttatcagagggcttaatgttgatcaacttatcaaagtggctggttttataaaaaaactataa

SEQ ID NO: 75848 - DNA, 534 bp, Citrobacter koseri
gtgaatatccaagaagcattaaatatttttggcttgtctggccagttgactgaaaaagacatcaaaaacgcctttaagaaagctgcattaaaatatcacccagaccgtaatccggtaggtgctgaaatgatgaaggcggttaattcagcattcgattttttaatggcgaatcttgataagattaatcagtaccaaagtcctgaacaaagtgcaatatataactatggtgatgaactagaaaatgttttaaaggctctttacggtttgtctggtttagtttatgaggttattggtaactggatctggattagtggaaatactatcgagcataaagaagcattaaaagaaatagggtgtaaatgggcggcaaagaaaaaacaatggttttatcgtccagaagaacataaaagttactggaaccgtgaagagcacacgatagaggaaatccgcgcaaaatatggcacaagcggaaaattccaggccggaggatggcaacaagttgaaggcagggcaagagttgaagccagagcataa

SEQ ID NO: 75849 - DNA, 138 bp, Citrobacter koseri
atgtcaacaggtcagatcgtacaacttgcggattcacttgtcaaaggatgggaaacgagaatcccagcaatgaaatttacggattgggatcaattcaggtggtggttaaattatttacagggatatgaaatgttttaa

SEQ ID NO: 75850 - DNA, 300 bp, Citrobacter koseri
atggctcgcttaccttatattgaatcaaccacgcaacagatttttatttttaatactttgacactttgtactattggattaattcatatagagactggtaaaaaatatattgtagtatttacagataacaataagattagagattataaaaatggtgtaatagaagaattaggggaaattacgcaagaagatattgaactgattgagtattatgctaaaaaatatgaaaagtattttgatgatttaaaaataggtgaggagcctttgaatcttaaagaatatatagaatgtatgcaatag

SEQ ID NO: 75851 - DNA, 273 bp, Citrobacter koseri
atgagtgcatttatttttagaaccacatttaaagcaactggcgatcagcaaaaagacgctattacccaaattgaagttatgctggaacaagcagtaaaagcctttgtttcctggatgaccaaccaggagggtacagaatttttaagcactttgcaggaaatcacaacagaacttgacgcactgattgatgcggtagagtcccattcccctgttttcagaaagaaagcgactgaactggaagcgcttttagcccattacaaaacgttgctgtaa

SEQ ID NO: 75852 - DNA, 726 bp, Citrobacter koseri
gtgcgggcggtggtggctgaaaagaacaactccttaatcccccgcatatcgccgtcaggggtggcaaaacaaagtccatgctataacgttgtgtcgcgtaagcgacgccgtttcctccatcgctggattaaatcgctgacgacggtcgcagggcgtatcaaaatcaaaaacgaactccgccgccgcatccggtataaccgctattgggttaatgaggctaacaagtttggcatagaggctctttgcgaattgatgttagctatcttggacgatctcgatttacgctcgtgggaaaccaggcataaccttgaaacgcttgccgaacgtgccggactggttacacgcagcgatgcggggcataaatccatttctcgcgccagtcgcggttgtgatcgcctggtttggttgaatgccatcattacagagaaagcgccgtttaacccgtatgatgcacggtgtgcctgtaaacacattgaagtaaccgaggatttctttgccatccttggcattccgttaaaactggtttatcgggaacgagccaggctgttaaaggcagatcctgatgaggtgatttactccggtgatgccagacttatagctatcagagtccagaactggacgcggaaagcggcagccggattagccaggatgaaagcaaaacgcgacgcagctcgacaacgcaaaaaagaatattacgcacattcacctacccccattccggcatga

SEQ ID NO: 75853 - DNA, 366 bp, Citrobacter koseri; identical to SEQ ID NO: 19507

SEQ ID NO: 75854 - DNA, 480 bp, Citrobacter koseri
atgggggcttgtgtccgtaaggtgacgcttatgaatgcatggtatcttttatattgtaataacaacgatttagaccgcattgcatatcgttgtaaaactatgaacgttgtggctttctgtccgagatacataaagatcacacctcggaaagattgcaacgcagtacgcaaggaagaaaaagttttatttcctaactacctcttcctccattttgatgtgaatgtcacgcacacatcagcaataacctctattccaggtgcaattggcttcgtaagtttcggttccacaatatgtactgtaccggaaaaagtcgttatcgctattaaatgcgccaagatactggcgctaaatcctgatgatgattccatagagtgccgtaacatcggtagtgacctactggcagaaattcaacgcatatcttcaatcatctcaccgttagaacgtcaaacggccttctccaggcttttacaaaatcagtaa

SEQ ID NO: 75855 - DNA, 213 bp, Citrobacter koseri; identical to SEQ ID NO: 19505

SEQ ID NO: 75856 - DNA, 207 bp, Citrobacter koseri
atgcccaaacccacctataacgtatacgtcacacaggaagttccaactgacgaaaacggcggtaaaaatacctactggaccaaggttggcgcggcattcgcgcataacggaaaaccaggactgaatattatgctcgtccctggtattgctgtttccggcaagctggtactactcgaacctaaagaagacgccccacaaggaaactaa

SEQ ID NO: 75857 - DNA, 705 bp, Citrobacter koseri
atgctttccaccgtttcatttatggcggtggctatgcagtgtgccgccacagttcacccctccacatcactggatattgcgcgggtcgagtctggttttaatccctacgctattgctgagatcatccccaaacgtgaacgccagccaggcgacaagggctttatctcacatatgccaaaaactaaggaggatgcattaagcatcgtcaaacagatagaggcaaaaggccgtcgctattctgttggtctgatgcaaatcacaagtacaaattttaatagttacgccgtaacggctgctgacctgttcaacccgtgcacaaatctttctgtttttgaaaagatcatcactgattgctaccagcgaggcggcacactgaaacgggcgctgagttgttattactctggaaattttactacaggacaacaaccagaagctgcgttatccagaaccagttacatacagcgaattggttactcacctgaaaagccccgctatgtcgttcctggaaccagggatgatatcgcaactcaatcggccattctgaatgcaacacccgttgaagctccggcacgccctcgcgttgtctggcctggcgcaatcgtgcgcggggttcctgctcaactgcgccagaaaaaggcagataccgtttattaccccgcacaagttatacgcggaaacagattttcaactgaaaaagaggattaa

SEQ ID NO: 75858 - DNA, 297 bp, Citrobacter koseri
atgtttaacaaattaaaggccatttgcagccgcgcatctgcttatattctggctccgttagtaagtgttgtcagtccagttttcgcggctgacggtttcagacgagcaaataccatcatggaaaaggtttcgaatggtctgcatggtctggcagccgtcaccatcaccgtcgctgtgatctggattggctataagactctgtggaaaggcgaaagcctgtcgcagtgcggttacatcatcattggcggcattttaattggcggaggcagtgaaattggcgctctgctaatgaactaa

SEQ ID NO: 75859 - DNA, 2745 bp, Citrobacter koseri
atggcaaagctgcttaaggcgatgaaacgtccggcggcgctgtggggggtgccaatggtgcccctgctgactgtcgtgggcgtgacaattattgttgctatctggacttccatagccctacttctcttcctccctattgagtttctggttatgaaatcactaaccagaaatgaacctctgagatttaacctgatagctgtctggctaagggtaaggggtaatccggtagcaaaccgtttatttggcgcaaccgcatttatgcctgttgaacataatgctgttgatatccaggagtttatcgatgcgatgaagctaaaccaatgtgccaccataaaaaaatacattccttactcgtcacatattcaccctaatgttgtccgttcactgaatagcgattttttctgtacctgggaactgacaggaacgccgtttgattgtgaatctgacgagacactacagttcggtacaaaccagttgcacgggttaatacgctcatttgaaggctttccgattacattttatgtacataacagtcgtgaacagtttacggactcactgcataaggtttcaggaaacccttacgcggataccgtgagcgaacgctattacgcatcactgaataaaaggccattccgacgtaaccgcctgtttgtgaccatctgctatcgtccgtttgccagtctggataaggcaaaccgtaaacgtatgaaagacggtcagaagctaaaagagatagacagcgcattacttgaagtgctggaaatcaaaagtacgctggatacagccttatcccgttatggtgctcacgcgctcggtactttcaccgaaaacgaggctgtattctcgtcccaactggcattttatgaataccttctcacgcatcaatggcgaaaagtcagagttacacgtacccccgcttacaacgtaatgggaaatgttgcgctgtacttctccgccgaatcagggcaaataaatcatgttaatggcactcaatatttccgtggtctggaggttaaagagttttcggaagaaaccgcaacgggcatgacagactccttactgtacgcgccgtgcgattatgtgattacacaatcctatacctgcatgtcccgtgaggaagcgaaaaaggcgattaagcgcacccgacggctgatgatgagtgctgatgatgatgctgtatctcaacgtctggatctcgatgtggcacttgacctgctcacctccggtaaaatcgcctacggtaaacatcatttatcaattatggtgttttcgccgtcactggaaagcctgattgcagacacaaacgagatcagcaatgcacttaacaatatcgggataacccctgttcctgctgaaatctcattgtctgcggcctatatggctcaattaccaggcaattacaatctgcggccacgagccggagagctgagtagcctgaactttgttgaactggcatcacttcataatttctatccaggaaaacgcgacaaagccccgtggggtgacgcgatggcactggtgcgaaccccgtcaggtgatggctactatctgaatctgcataacactctggcagataaagacgagttcaacgaaaaaaaccctgcaagtacctgcattctgggtacaaacggttcaggtaaaacaatgctgatgacgtttttacaaatcaatcagcaaaaatataaccgtgatgacagcttttcaccggatgccaggactaaacgactaaccacagtttacctcgataaagaccgtggtgctgaaatcaatattcgcgcacttggaggaaagtactacagggtattcagcggtgagccaacaggctggaacccgtttgctctgccagccactaagcgaaacatcaatttcattaagcaactgatgaaaatcctttgtacccgcaacggtgcaaccataacgccacgtgatgaacgtcgcctcaatgatgctgtaaatgccgtcatgagtgatgaacctcaatatcgcgtctacggcataacccgaatgctggagaacctaccggaaccggcaacgcgtgaagcgcaagaaaacggcctgagtatccgtctttcacagtgggcgcgcggtggtgaatttggttgggtgtttgataacgaacacgacactttcgatatcagcaactgcgataatttcggaattgacggaactgaatttctggatgacccgaatgtctgcgctcctatctcgttttatctgctgtaccggataaccagcctgctggatggcagacgacttgttattttcatggatgaattctggaagtggttacgcgaccctgtatttaaagattttgcgtataacaagctgaaaactatccgaaaactgaacggtatgctggttgttggcacgcaatcgccagcggaaataatcaaggatgagatagctccggcagttattgagcaatgtggtactcaaatactggccgccaacccaagcgcagatcgctctcattacgtggatggaatgaaatttgaaccagaagtgtttgatgtcattaaaggacttgatccacaagcgcgacagtatgtcgttgtcaaaaatcagttccgccgtggagatacaaaacgctttgcagcccgtatcacgctggatctgtctggtatcggcagatacacaaaagtaatgagcggcgacgcacctaacctggaaatattcgaatcactctatcaggagggaatgaagcccagcgactggctggattcctacctggctaaagcactataa

SEQ ID NO: 75860 - DNA, 705 bp, Citrobacter koseri
atgaaaagatttcgcccccttattctggcggttcttattgccagtccgatagtaaacgctgcgggtatacccgtatttgatgcaacagccagactggagaatattcgccagtggacaaaagaagccaatcaatggctacaaacggtacaacactataaagaccagctacaggcgtatcaaaaacaactggaaacagttacaggcatccgtgacattcaggcgttcgttaatcaggccaaaagccttaaagcggacctggataaactacgtaagccagggcaagccctgaacgatttgctcttatccggcggttcttctggccaatttgatgaactgtacaacaaatacaagattttcgataactgcaatgctgaacaatcaaaaagttatgccaatacatgcagacaagaggtcatcaacaaagcaatacaaatcgaacaaaccaatgaagtacaaacccagattggtgagatgcttggtgagatcaacgaattatcagaccgtgtagcaaatgccaaagatatgaaagaggcccaagacttagcaaacagtattcagttaaaatctgtgatgctaaatacgctcacgacccaatgggaaatgaacgtaaaagcagcggagaagcgcgaaaagatgcttgctgaggaacgccgtaagaaatggaatcagcagcaattaaacgcaccagaaataatgtttaattag

SEQ ID NO: 75861 - DNA, 228 bp, Citrobacter koseri
atgaagaaaattattttatttacaattatttcaggcctgatggcgttaacttcaggatgtaaggaagaagctaaaacaacaaaatggtatcgtgaacatcctgatgaactcaaagttgtttatgctgaatgccagaaaacaggtagcgcatctgaaaactgcaaacatgcaaatgaagctcattggcaaattcaacaattaaatgcacctgaaataagttttaactaa

SEQ ID NO: 75862 - DNA, 1068 bp, Citrobacter koseri
atggccggtatattttcttctgtcgaaaaaaatatcatcggtgggataactgacgcgactaatggtttgatgatgtcttattcgtcaatgatgatggggctggcggctacgtcagccactatctacattatgtggcgaggatatcaaaccttagcgggaaagctgtctacaccaatggaagatgttatgtgggatataatgaggatggctatcattttatcctttgtagcaaacattaacggatatcttgatggtgtcattgatgctgtaaatggaataaaagaaggtttttccagtagcacaagcatctggcaattacttgatactctatggaacagcgcaagagttttaggtaaaacgttacatgatctagataactccgaatttatcaaagaggaaggcacaattgctgaattatttgtatggggtggtgtctttgtcttaatgattatcacagcattcgtatctatgattgcggagatcatgatcttattgttaggtattaccgcaccaatatttatattttgcctgatgtatggctttttacggccaatgtttaataactggcttcaaaatatatttgctgcaatactaacaattatgttttcagccttagctctgcgaattgtaattggttttcttacatccagaatgtcagaagcagtgacccaggccagcaaagctaacattgtagaacttggcgctcaagtttgtcttgccggagtatgcgctgcaatactggtatacatgtccgcaaaactagctggggcacttgcaggagcaagtgctacagccactatgcaaggtgcggcggctctcggcattggcgctgctgcatacggcgctggaaagatgttaaaggaggcaggaaaagtattacctaaagaagtagcaagcccaagtaataaagggttaggagatccacaatcgcgcatagtatttaacgctgctgatgcacgtaaacacgctatagaacaaatgatagcgcgtaatgaagcgcggatgctgacagatcaatcagcaccaaaactaccgccatcaattaaacgtttacctcctccaagataa

SEQ ID NO: 75863 - DNA, 144 bp, Citrobacter koseri
atgaaacgcttaatcgcgctggctttgctgtgcgtgctttctggctgcgcacaaaaatctaaatctctgccgcacgcattcagcggtcagggtagccctgtaaacaccccccaaattatcgcggagctaaccacacatgactga

SEQ ID NO: 75864 - DNA, 684 bp, Citrobacter koseri
atgactgaacagaaattaattgctgattcccgctcgtttgagcagcaaatgattgacagggataaacgcgccacaaaagcaggctttctggtcggtggagcagggttattaatcactatcctgtcactgatcgcgatagtgattatgttgccacttaaacaaacaacagttgaactctataccgtagataatcataccggacgagtggaacacgttacccgtgcatcaaaaacagccctgacagcggaagaagcctaccaaaaagctatggccgccaattacgttaaattacgtgaacggtacgtttatcctgcattacaggacgattacgagaccgtacagatctacaactcaccacaggtaaacgacgactacctggcactgtacgccggaaaaaacgcaccagacaaagtttataataacgcggctcacaccgtgaaaattgaaattatttctgagcagataacgaatgcaacagcaccagacaaagtagccaccgttcgttataaaaaaataattcgtcgcatggctgataacagtattcgcaatgaatactgggatgcacgtttcaccttccattcagaccctgaaaaagaaatgtcagatgttgagcgggaaataaacccgttcggattcaccgtaacaaactggcagactgaccgcgaaatcaggggaggcgagtaa

SEQ ID NO: 75865 - DNA, 906 bp, Citrobacter koseri
atgagaaaactgacgttaattaccctgataataatgctgaacagccaggcatgggccgcagctacaccacaggcgagccgttatgatgcacgtatccagcaggtcatttataacccgcagaatgttaccgttgtaaacacaaaaccaggatttatgacgactctggtttttgataacgatgaagctgttatcagtgccagtcctggctttgatgaagcatgggaagccagagcagatgcaaacagggttaacattcgtcctgttgcgctcacacagggtgcacctggtgaagacggtaatacaacacaggttgttatcccgccgaacagccgtgactggcataccaatatgctgattgtgacaaataagcgcctgtataacgttgagctgaatgtcattgatgaaaaatcgccacaacagcccgcatacctagtgagttaccgctatccaggagacgaacgtaacagagctaataaggaagcagcagcgcgacagaaagaatgggaacaaaagcaggaacaaacccagattcagaaagcactgagaaccgcacaaaccccgcgtaattggaactacacgaaatatccaggaaaagacagttatagcattgaacctgactttgcctacgacgacggtcgctttacgtttatcggattctcacccaacaaatcagttccatcagttaccaaagaacaaaacggccaggaatacgtggttaacagcagtatacagcgtaagggcaattttaccgttctcgttatccaggaaatcgcaccacggcttgtactacgttccggtgatgccgtagtagggctgaaaaataacggctttggaaaagtacacgcggctgataattcaaccgtatctgacaaggtggagcgcgttgaaaaaacagataacacctaa

SEQ ID NO: 75866 - DNA, 1251 bp, Citrobacter koseri
atgactgacgaaaataaattcccctctacggaagaagaaaagccagtgacgacacctgatcaggatgatatcgccacgctggaacgagaagccagagcaaaacgtgaggctgaattacaagcattacaggacgatgaaaaggagaactcattacaaccagcagtaaacaaactgaaaaaacgtccgaaggggaaagcaacggcctttctggcaatttgtgcagtagccctgattggcctgacatggggcggtaactgggtatatcaaaacttcctgacgcaagaagatggagagaaaacaaaggaggttacgccacctaaaaaaacgaatgactaccggaaacgaaccgatttaggcatggccaccaatgagccggaaaattcgactgagggagagcaaactgttaaccaagataacatgggcaatgtatccggtactgccggacagatgaaaacatttgagccaccacaactgaataaggccagtttccttgttcgtcgtaataatacgaccagcccccaaaatcaggtcaaaacaagacaacaggaaatgatactggctgcggaaaacaacgccacacagcctacagacagtacagcaaccacaacacaacatggcactgcatcacaggcaatttcccccgcgacagtgcgaagaatcccctacaaccctgatttgtatataccggaaaacacagtcattccatgctctatggattaccgctttgtttccgatcgcgctggaagaatacgatgtacggtagctaaagatatctggagtgccagcaacaatacaaaacttatcgagaagggaaccacggcaacaggaatataccagacgggaattacacaagggcaagggcgcgcttttatcatgatgacaaaattacgtacccgacagcgaccatatctggatattccgctgattgataccaacgccgctggcgagcttggagaatcaggtgttgatggatggattgatacccacttctgggagaggtttggcggcgcattaatggtcggcatgatcccagatattggcgcatgggcatcaaacaatgcgggtaaaaaagaccgcaatacagactatacagagaacagccgccaggctatggcggatatggctcgaaccacgctggaaaacagcattaatattccaccaacgctttacaagaatcagggagaaataatcaacctaattacagggcaggatattgacttctcaaatatctacacgctgaggatgaaatag

SEQ ID NO: 75867 - DNA, 1026 bp, Citrobacter koseri
atgacggttaaaaacatatctcttgatcgctataaacaacgtttttttagtgaatacctggaattaccaggactgacagaaatagctgttaatcgtccaggtgaactctggacaaagatagatggtgtctgggggcaacataccgttgatctgaaatttgacgattgctataactttgcacggtgtcttgcaagacaccataacgataatatcgaggatatcaaaccaggactttctgcaacccttgaatcaggagaacgatgtcaggttgtcgttcctccggcgtgcgaacgtgacacgatctcaatcacgatccgtaaaccgtcaaaaattcaaattccgcatcaggcatatattgatagcggtttttataaccgcgtcacgggcattgaaaaagcatccacacataacgaagaactgattgaattatacaaatcaaaaaacattcctttgtttatggaaaaatgcgtggagtatggaaaaacattagccgtcgcaggtgaaaccagtacgggtaaaacaacatacatgaaaatgttgatacaatatatacccgtccatttacgcataacgacgatagaagacaacccagagataatattctacaaacataagaactatgttcatctgttttatccttctgagtcatccgatgaaaaaggttctgttgtaacaccagcggcgcttatacgctggaattaccggatgaatccagacagaattttattaacagaagtgaggggtggagaggcatgggattttctgaaaataacggggtcaggccatgaaggaagtatgacctccattcatgctggttcagcccatgaagcaatcgacggttttattacccgctgtactgaaaacccacagtgtgcgcaattaccatattcattcttgctacgtaaagttctcgactctctggatgttgttgtgagcattgatttagatggaaacgtacgccgtatgaatgatatttatttccgaccgttacaccgcaatcaatattacgaggaaatgaaagtatga

SEQ ID NO: 75868 - DNA, 549 bp, Citrobacter koseri
atgaatacagatgaaaacatggtattttatctgacaaactccgatcttgtttatagctatgcacacaaaatagtacactccattccatcaggaatgaaaggaaaattcattacttctattggtgaaacaattgaagatttaaagaaacgacaccctgatattattctcattacagaatctgaagcattagcattgctatcggagagaaaaaaccaacatattctttcagatttggagagtcctatgttaaaagaagatatgttcattaataatattcattcaaggaatcaggacagaatccatgtaaaaagagtctttgatgatattagtaataaagcaaacaggggatgcggactatattatgaaatatatcaagctagattaatgcgagggataattgaacacacagcaaaactgaaaaattctgatgccaataagctgattagttacgctgcttcacaaggttatgaaataacagaagacagatataatgctgcaataaaagccgaggatgaatgtctggctgaaataacacgggcacaagtctga

SEQ ID NO: 75869 - DNA, 129 bp, Citrobacter koseri; identical to SEQ ID NO: 14369

SEQ ID NO: 75870 - DNA, 258 bp, Citrobacter koseri; identical to SEQ ID NO: 14370

SEQ ID NO: 75871 - DNA, 1686 bp, Citrobacter koseri
atgagtggcggagacggacgaggtccgggtaattcaggtctgggacacaatggtggtcaggccagtgggaatgtgaacggtacatcaggtaaaggtggcccttcatcaggtggtggtacggatccaaacagcgggccgggctggggtacgacgcatacacctaacggggatattcataactataacccgggggagtttggtaacggcgggagtaaacccggtggtaatggcggtaacagcggcaatcatagcgggagctctggtggcggacagtcttcggccaccgcgatggccttcggtctgcctgccctggccactccgggggctgaaggactggctttatccgtttccggcgatgcgttgtcggccgctgttgctgatgtgctggctgccctgaaaggtccgtttaagtttggtctgtgggggattgcgatttacggagtgctgccttctgagatagcaaaagatgatccgaaaatgatgtcaaaaatcgtgacgtcattgccggcagacacggtaacggagacgccggtcagctccctgccgctggaccaggcgacggtcagcgtcactaaacgtgtggcggatattgtgaaggacgagcggcagcatattgcggttgtcaccggccggccaatgagtgttcctgtggtggatgcgaaaccgacaaaacgtccgggggtattcagtgtgtcgattccgggtctcccgtctctgcaggtgagcgtacctaaaggtgttccggccgcgaaagccccgccaaaaggcattattgctgaaaaaggtgattcacgtccggctggttttacggccggtggtaactcccgtgaggccgttattcgtttcccgaaagagagcggacagaaaccggtctatgtgtcggtgacggatgttcttactccggcacaggtaaaacagcgtctggaggaagaaaagcgtcgccagcaggcatgggacgctgctcacccggaagaggggctgaaaagagagtatgataaagcgaaagctgagctggatgctgaagataaaaatattgcgaccttaaacagtcgcattgcatcgacagagaaggcgatccccggtgcaagggctgctgttcaggaagccgataaaaaggtaaaagaggcagaggcaaataaagatgattttgtgacttataacccgcctcatgaatatggctccgggtggcaggatcaggttcgctatcttgataaggatattcagaatcagaatgagaaattaaaagctgcccagacatctttaaacgaaatgaatgaatccttatccagggataaggctgcgctttccggggcgatggagagccggaaacaaaaggagaaaaaagcgaaggatgcagaaaataaattaaatgaggaaaagaaaaaacctcgtaagggaactaaagattacggccatgattattttcctgatcccaagactgaagatattaaggggttgggagagttgaaagagggtaaacctaaaacccctaaacaaggtggtggtggtaagcgggcccgatggtatggtgataaaaagcgtaaaatttatgaatgggattcccagcacggtgagcttgaagggtaccgcgccagtgatggcgaacacctcggggcattcgatccaaaaacgggtaagcaggttaaagggccggatccaaaacgaaacattaaaaaatatctttaa

SEQ ID NO: 75872 - DNA, 420 bp, Citrobacter koseri; identical to SEQ ID NO: 14372

SEQ ID NO: 75873 - DNA, 264 bp, Citrobacter koseri; identical to SEQ ID NO: 14373

SEQ ID NO: 75874 - DNA, 300 bp, Citrobacter koseri; identical to SEQ ID NO: 14374

SEQ ID NO: 75875 - DNA, 378 bp, Citrobacter koseri; identical to SEQ ID NO: 14375

SEQ ID NO: 75876 - DNA, 180 bp, Citrobacter koseri; identical to SEQ ID NO: 14376

SEQ ID NO: 75877 - DNA, 531 bp, Citrobacter koseri; identical to SEQ ID NO: 14377

SEQ ID NO: 75878 - DNA, 732 bp, Citrobacter koseri
atggcgctggagctgtacaacgtcagccacgcgaaacgacaggcgcggaacgcggagaaaacccggctgaccctgcgctggttgcgggaagagctgtgttccacggcggagctggttgcgcggcggctggggattgcggcggtgcagccggtctaccgcttcctcgacagcctggtggcgaaagggctgctggtccggaccaaatatccggtggacggccgtcaggtcagcgtgtgggggctgacgccgcatggcgtggcgttctcgttcgacgaggacgaaccgctggcggatgttattccgtttcagccgtcaagggtgtcggcagcacatctgccgcaccggctggccgtgcaatccctgcgccttgatatggaagccagaggggccaccggctggcgcattctgcaccgtctgagtcttaaaggcatgaaagtgccggacgccctggcggagctggacggtaaaacggtggcgtttgaggtggagcgcaccgtcaagagccgtcgccggtatcaggaagtggtgtccgggtatctgttcaaccgcaaagctaacggcatcgatgaaatctggtacatctgcccggaccgggcgacgcaggtcagggtgcagcgggcaatcctgtcggtggatgaaatcgtgaacccacagaccggcgaggcccgcaaaacggcagagctggatcgtgaacggttgtttgcgtgctttaaatttatgacaacggagtga

SEQ ID NO: 75879 - DNA, 1965 bp, Citrobacter koseri
atgtttaatacggattcgcttgcctggaagtggcacattccggagctggcccggcagatttatccgtgggtcagctggctgtaccaggagtattacggtctggccggggctttcctagttatcggcctgtttttcggtctggctgaactttgggccggacggatgcgttttgtggggctgagtcataaggagcgacgggagtatgccgatcgctataagcgcgataataaacggccagcgccattttcggtgctggcctcgctggattcgcccgggcggatggtcagggcacgtcgacatgtctggaactacgcgtactggctgaccggcgcggccggtctggcccttctgggggggctggttgtcgccgtgtttatcgagagctggggagaaaccgtcctgcgtccggacctctacgcaaacgcagattattacctgctgcagccggctaacctgttcgggattgcctggtgcgcgggcgggctggctgtcgggattgtgttggcgcggctgctggcgttcctgctgcttgacggtcattttgcggctgctgacgaggcggtgaacgcgaaactgaatcaggagagccggcgcagcagccagcggacaggagagatgaccgacgtgcgccacctgcatttcggggagccggtaccggttaatgcgctggccgatttttcctcggagcaggcccggcaggagcaggcggtgtttctgggtaaggatgagcagggcaagccggtgctggttccgcgtgatacctggcgcaagaccaacattcagatcctcggcctgcccgggagcggcaagagcgtgatggccaccaacgcgctcattcgctgcgtacgcgatttcggggacgcggtggtgtacttcgaccccaaaggggacgcatgggcgccgcacgtcttccgggcgcactgtccggacttcaccctgctggatctgcggccggggaaaccggcgcagctgaatctgttccgcgatctcgaccagtacgcgctgaaaaacctgctgattgccgggcttaacctgggcgagaccggcgacgtggcggaccactaccgcatcagcgagcagaaagcggcgaagctgattgcggagcagtttccgcagggggcaaacattcagcaggtgctggcggcggcgtacgcgctgccggaggccctgaaaaaggacgtgaaggggttgatcactaggctggaaaacgtcgctgacctgagcgtcctgcagacggacagtggcatcgatgtggcggggattatcaacggcggcggctgcctgtacgttatcggctcgatggacgacgaggcggtgatccgtgtgcaaaaaatgctgtttgcccgctgcgcgcaaatcatcattgcgcgggacgagttccgggagtggccacacgtcagcgtgatgctcgatgaaattaaatatctgctgtcgaagtatgtactgaacgcactggggacgctgcgcagccgggactgcaatctgttgctcgcgcaccagtcgctgggcgatttcgggcagtgcgggcaggatctgcccgctgaatttgtgaaaaccacggtactggataacacgccgatccgctggttttaccgggcggcctgcctggagtccgcgcagtgggcggcggggcagaccggggaaatcagggtggacgtggagcgccgccgtgccagccgggaggcggggaacgtggagcatatcagcggggacagcttcatccagaaggaggcgcggccgctgtttgacgtgaacaccctgcaacacctgccggacgggttcgcggtcatgaccgggctgggtgtggcccggatggcgttcagcagtccgctgcgggttgagcgccgggaaatcccgttgcagcgtttcccggtgctggcgaaaaccgatcccctggcggagttccggcccccggccgacggcggcgggccgaaagcggatgatgattttgcggggatttactga

SEQ ID NO: 75880 - DNA, 1029 bp, Citrobacter koseri
atgaatcactccctcaaaccctggaataccttcggtatcgatcaacgcgctaacgagattgtctgtgccgaaaatgaacaacaactattggatgcctggcaatcggctaaagcatcaaattatccggtactgatactgggcgaagggagtaacgttctgtttcttgatacctttcatggaacggtgattatcaaccgtatcaaaggtattgaggtgacagagcaacccgaagcatggcacttgcacgtaggggcgggggaaaactggcataacctggtacgatacacactccagcaaggtatgccggggctggaaaatctggcgcttattccggggtgcgtcggttcttctcctatccagaacattggcgcctatggtgtagaactacagcgggtctgtgactatgtggattgtgtcgagctggcaaccggaaagtctctacgggtgagtgccacagagtgccgctttggttatcgtgatagtatcttcaagcatgaatatcaggatcgttacgccattgtggctgtcggcctgcgtttaccaaaacagtggcagcccgtactcacttatggcgacttggttcgccttgaacctgaaacggtcacgccgcagcaggtgtttgatgccgtatgccatatgcgcaccacgaaactgcccgatccaaaagtaaatggtaatgcaggtagcttctttaaaaatcctgttgttacagcagagattgcgcacacattactggcgcaatttcccggtgcgccgcattacccgcaggccgatggttcagtgaagctggctgccggttggttgatcgatcagtgccagctaaaaggcgtcagtattgggggcgctgcggtacatcgtcagcaggccctggtgctgattaacgcacataatgcgacaagcgaggatgtggtgaaactcgcgcatcatgtgcgtcagaacgtgggtgagaaatttaatgtctggctggaaccggaggttcggtttatcgggcagactggtgaagtgaatgctgtggagatcattgcatga

SEQ ID NO: 75881 - DNA, 963 bp, Citrobacter koseri
atgaaggataataccgttcccctgacgctgatctctttgctggccgatggtgagtttcattcgggtgaacagctgggtgaaacgctgggaatgagccgcgcagccatcaacaagcatgtccagacgctgcgtgactggggagttgatgtgtttaccgtacctggcaaaggatatagcctgccagaacctatccaattattagatgcttctgtcatccatgcacaactggacagcgggaatgtcacggtacttccggttatcgattcgacgaaccagtatctgctggaccgtattggccagttgacgtcgggtgatgcctgtgtagcggaataccagcaggctgggcgtggtcgtcgtgggcggaaatggttctccccatttggtgcgaacctgtatctttctatgtactggcgtctggagcaggggccggcagccgcgatcgggctgagtctggtgatcggcattgtgatggctgaggttctgcgcgatctgggggcagagaaggttcgggttaagtggcctaatgatctctatttactcgatcgcaagctggcaggcattctggttgagcttacgggtaaaacgggcgatgctgcacaaatcgttatcggcgcaggtatcaatatggccatgcgccgtgtggaagaaggtgttgtgaatcagggatggatcaatctccaggaagcgggcattacgcttgatcgcaacatgctggcggcgacgttaatcaaagagttgcgtgcggcgctggaactctttgagcaggaaggtctggcaccttacctgtctcgctgggaaaaactggataattttattaaccgaccggttaaactgattattggtgataaagaaatatttggtatttcccgtgggatagatgcgcaaggtgcgttgttgcttgaacaggatggcgtaattaagccgtggatgggcggagaaatatctttacgcagcgcagaataa

SEQ ID NO: 75882 - DNA, 927 bp, Citrobacter koseri
atgacgccttatctacaatttgatcgcaaccagtgggctgcgcttcgtgattccgtgccgatgaccctgaccgagggcgaaatcgcacgactcaaaggtattaatgaagatttatcactggaagaagttgccgagatttatttgcccctgtcgcgtttgctaaatttctatatcagttcaaacctgcgccgtcaggctgttctggagcaatttttaggcactaacggccagcgtattccttatatcatcagcattgccggtagcgtcgccgtgggcaaaagcaccaccgcgcgcgtactgcaagcgctgctgagccgctggccggaacatcgtcgcgtcgaattgatcaccactgacggttttctacaccctaaccaggtgctgaaagatcgcgggctgatgaagaagaaaggctttcctgagtcttacgatatgcaccgtctggtgaagttcgtttccgatctcaaatcaggggtgccaaatgttaccgcgccagtctattcacacctgatttatgatgtgattccagacggagataaaaccgtcgcgcagcccgatatattaattcttgaaggcttaaatgtactacagagtggaatggattatcctcacgatccacatcatgtatttgtttctgacttcgttgatttttctatttatgttgatgcgcctgaagatttactccagacgtggtacatcaaccgcttcctgaaattccgtgagggggcgttcaccgacccagattcttatttccataattacgcaaaattatcgaaagatgaagcgatcaataccgccgcatcattatggaaagaaatcaactggttgaacttaaagcaaaatattttacccactcgtgaacgggccagtctgattatgaccaaaagcgccaatcatgcggtcgaacaagtcaggttgagaaaataa

SEQ ID NO: 75883 - DNA, 207 bp, Citrobacter koseri
atgcaactaaaaaattgcataaaatgttctatcgctcacattttgcacgacaagactgctaaatggcctatttttagtcaggtcagtgcgatttttcgacaccaggatgctaacggcttaacggagagcatcatcatatctgtgtttgaaagagaaaaattcttcttttacatatggtatatccgtcacattgcgtttcagggataa

SEQ ID NO: 75884 - DNA, 1281 bp, Citrobacter koseri
atgagtgatgttcagtcgaatgtgaaaccgctgacgttgacgaccgggcgggtgatttttgctattgccggcgtctatgtgacgcagagtctggtatcggcgctgtctatgcagtccttacccgcgctggtgcgcgctgctggcggttcgctggcgcttgccggtgcgacaaccctgttcatgctgccctgggcgctgaagtttatttgggcgccgtggatcgagcgctggcggcttccgcccggtagccaggaacgccgttcgcggatgttaatcctgcgtggtcaggtcgcgctagcggcgatcctgatgattgccgcagcgattggctggtttgggcgagaagggggatttcctgatacgcaaatcgtcgcgttatttgttctgtttatggtggcaggcacggtcgcctccaccattgatatcgccagcgacggcttttgcgtcgatcaactgactcgcgcgggttacggctggggaaacagcgtgcaggtcggcggcagctatctgggaatgatgtgcggcggcggggtgtttctgatgctgtcggcggcatccggctggcctgtcgccatgctgatgatggcggtgctgattatggcgctgtcattcccgctgtggcgcattacggagccgacgcgaacagcgcctatcccgcatgttccggcgttaggttatgcgctaaggaggaagcaggcgcgcctgggcttactgctggtattgatgctgaattcaggcatgcggtttgtgctgcctcttctggcgccgctgttattggatcatgggttaagcatgtccgcgttgggcgcgctgttcagcggcggcaatattgcagcgggcatagcaggaacgctggccggcggattactgatgaaatacacctcacccggcagagcgctgttgacggcttatggcgtccaggggatcgcgctgctggcggtggtgatgacgttcatgatggcgccgggtcatctgttgctgccgattctccagtgtctggtcattgtccagtccatttcgctggcctgcgcgctggtctgtctttacgccacgctgatgtcgctttcatcgcctttgcaggccggtgtcgacttcaccctctttcaatgtactgacgcggcaatcgccattctggcaggcgttatcggcggcgttgttgctcaacattttggctatgcggcctgcttcctgtttgccggggcattcacgttgctggcggcgtgggttgcttatatccggctgcattcggcaagaaaactgatgaccagcgcaattgattga

SEQ ID NO: 75885 - DNA, 435 bp, Citrobacter koseri
atgagcaaatatatttacagcccttcccataacgcgttctatctggccgtattaaaagcagagtatgaattgtctggtaactggcccgaagatggtgtggaaattagtgatgatttattcatccagtacacagcaacaccacctgacgggaaagaacgcggagccggtgaaaatggcatgccgtgctgggtagatttaccagaaccaacaaccgaggagttaattgctgccgcagaaagcaaacgacagcaattaatcaatgaggctaatacctgcatcaataacaaacaattgcccggtaaagctgcaattggccgcctgaaaggcgaagaactgtcgcaatacaatctgtggctggattaccttgatgcgctggaagccgttgatacatccagcgcaccggatattaactggcctgttcccccggaactgtag

SEQ ID NO: 75886 - DNA, 396 bp, Citrobacter koseri
atgtggtactggaatccggttgactgtaatgaggctttgccgggcatacatgacttatctggttgtattgagattgatgatgagcacccgtttaaaacgggggatttacctgctggtaaagtgtggtcgaacgatgccagcaatcatccggtattaacagacattccccctccatcaccagaagaagaaatagcggaggccgaagcaataagaagccagttacgcgcaaccgcagatgccgaaataatctggaggcaggacgctgttgacgccggaatcgcgacagaacgggaaaccacagaactggctgaatggataaaataccgggttttgctgatgcgcgttgatacaacaaaacccggatggcctacagttccgggggaacaggccagttaa

SEQ ID NO: 75887 - DNA, 264 bp, Citrobacter koseri
atgtgggatagctcaaacccgcttttaatcagcactcctgcaacgggagcaagagttaactatcccatcagttttacgacgcaatttaacgggatctatgtcactgaaaatgggaatacgaataacaattttgagtttgctaaccccgcccaaatcggcatgacgggcttttctatggcaactatggacataacgcttggctcatcaccatcaacggcctacggaacgtcatttacagggtattacactgcggagggatattaa

SEQ ID NO: 75888 - DNA, 417 bp, Citrobacter koseri
atgacaactcagacttcgcgcgggatccgcaacaacaaccccggaaatattcgctggggtgatgactggaaaggactggtcccgaaagatcaacgaactgacaaagcattttgccagttctcaaccccggaatatggcatccgggcaatgatcatcattctgcgtaattatcagcgtaaatatgggctgaacacagtagccggtattatcaaacgctgggcgccaccgaacgagaatgatacgcaggcatatataaacagcgtggcgcaggcaaccggcgtttctcctgatcagaaaattgataccagcgacagccgctttatgatgaaactgttgcaggccatcattaagcacgagaacggtagccagccttatagctttgatacatttgtacgagctgtcgaactggcgggttaa

SEQ ID NO: 75889 - DNA, 348 bp, Citrobacter koseri
atgaaaatgcctcataaccctaatacctggccggactggctggaattattccagagctggtggcgtggagatacgccgctgggcgctgtcctgatgtcacttatcgttgctggtctacgaattgcgtattttggtggcaatggaggcaaaaagaaaaaagcgctcgaaatccttctctgtggcgcccttacgttgacgattttctctgctcttgagttcctgggattacctaaatctctgtctgtcagcatcggcggtagcgttggtctgattggtgtggatgcaatccgcagtttcgcaatgagatttattggtgggcgtgttggtggcgacaataacaaggtgtga

SEQ ID NO: 75890 - DNA, 285 bp, Citrobacter koseri
  misc_feature (112)..(121): n is a, c, g, or t
atgttccacatcctgtgtataaccttagttataacagggattctctcagagctggcggcggttgtatgggtgatggcgcacaaaaaagccctgccggggcagggccttgtgnnnnnnnnnnatagcttccggcacgttacgggtgaggtcaatattcagcagcccgttagtgaacgtcgcgccagaaacttccatatggtctgccagggtaaagctcaggctaaacggctgagtgacaagcccctgatgcaaccatttggtctcggtgtctggtttttccggtga

SEQ ID NO: 75891 - DNA, 246 bp, Citrobacter koseri
gtgcaaaaagcgatcgataacctggttcacaaccggacggtgattatcatcgctcaccgtttatccaccatcgccggggccggaaacattctggtgatagaagagggacaggtggttgagcagggtactcatgcgcaattgctctcacatcatggacgttatcaggcgctgtggcaggcgcaaatggccgcgcgcgtgtggcgcgacgagggggtttccgcgtctggagagtgggtgcatgagtga

SEQ ID NO: 75892 - DNA, 162 bp, Citrobacter koseri
atgaatttacttaaatttggtaaaacttacacagagattgcactgattcttggtgtaagtgaaagaactgtcagatttcacattaataatgtcctcaggaaactggatgtgacatctgtccgctatgcgatttttaaagctacatccgaaggtttgatctga

SEQ ID NO: 75893 - DNA, 930 bp, Citrobacter koseri; identical to SEQ ID NO: 13755

SEQ ID NO: 75894 - DNA, 720 bp, Citrobacter koseri
atgaacctaactagtacacctcaaagtaaaagagagcttctgaatcgttacttgtccttaatgacaggagatgaaaaacatgcgccttcatcaatctccactcttgatgtgatccaagtgttgtatgaaaaagtgctgaattattcaccgggacaaattcaggatgaatatcgggatcgtttcttcctttcaaaggggcatggtcctatggcattttatgccgtattggcattaaaagggtatatttccccggaacaactggaaacatacggtgaatatgatagcaaactgggttaccatccggaccgtaccaaactggattgtgttgaaatatcaagcggatcactaggacacggtttacctttagctattggctcgattatggccctgagagccagaggaattacaggccccagacactgggtacttatgggagacgcagaacttgatgaaggctcgaatttcgaggcaattccctttgctggcaggcgtgggatatcagaactaaatgtcgtggtcatagataatgactcgtctactctcggctggcctggtggtatatcacaccggttttccatagagggttgggaagtcagcagcgttaatggcagggatcatgacgaactttaccgggcgtttaccaaagagcatccacataaaccccacgccattattgcaactgtagaatccaaatcaggtaaacctcgcaggcttttatag

SEQ ID NO: 75895 - DNA, 1167 bp, Citrobacter koseri
atggaaaagttcaacaataaccatctgatttatcttataccgataatatgtggttttacagcagcaaatatgtattatgttcaacctttggctcctgtgatcagtagtgagttgatggtttcttatgagagagcctccatgctgtattcattcgctcttactggtaatgcgttatcattattttttatcatacctttaggtgatttttatagtaagagaaagttgatttcgcttctctattttctttctacaatgtcattactgatttttttcataacgaagagttattacttattgtctgcgtctgcagttcttatcggaacaggaacatccgctatacctctgattacagctggcttgagcaagctgcagggaggaacccggtatataggcagaattatggctggagttttgaccggaatacttttttctcgttttctgtcgagtatgttaagtgaaatctggggctggaagtcagtatacgctctgtctgctctcgtgatgttcatgtccggcatcatacttttcaaagattatcccgcccccgacaataaggaagtgaaaacacatgcatcttatttccatattctatttctgaatatcaggggactcacacaggactctgttataaggcattactgttttaacgcatttgccattatgtttctgttctcagctttctggagtaatgtttcaatgtatctgacaacggctttccatttcagtcagacgcaagtaggattattctccctgaccggtgttgccggcgcctcatctgctcttttttcatcacggatactggaaataataaattatagaaataatattcttttctttttagttgtggcaagtctgctggcaatgggattttcaggcaaccatttatctattaccgtcgcgggtgcacttctgattgatgcatttattcagttaatacatgttaataatcagcgtggactgtttctttcctgtcagggtaacgaagcacgagcggcgagttgctatatgatgagttttgttacaggaggtgcgattggtggatttatctcatcctatctctatgcaatatttggatggaatgtagtgctgattagctgtgcaatcatcaccatgattccgttatttatcaaaacaaaaacacgagaaaactttaatgaacctaactag

SEQ ID NO: 75896 - DNA, 699 bp, Citrobacter koseri
atgatgaatctgaaaaaaattaaattatttgccattgacagtgatggcgttattctgaatgacacgtacagcccggcgatcaaaattttcgtggaatcttttggcgttagctattcaccattaattgagcgcagtgtttggggatcaccacaagtgacagcagggcataacctcgctcttgcctgtaaattaccttattcgggtgaaaaagtcattaaagacttttttaaaaccagagaggaatacctgaaaaaacatcctgttgaagttcttcctgacattgaatcaacgctggctttgctaagtagtactggagcacgtattacctgctacggcggaagaaataaagagtacagcttcgataggtttttaaaaccttttgaaaaatattttgataaggaaatgccctatattgatattaactctttccgcccgggtgtatatgaaatagtcaaagaaaaattcaaccttaattttgatgaggttgtttttattgatgacatcaatcgagttgctgaagtttgcaaagcgttaggtactgggtttatcggggttcctgcatccatggctcataactatcagcgagaagaaatggtcagaacaggtgcaaagtatatggtaaatcgttttactgatattacagataaactcattcatgaagttgacgaacatctggcttcgtcagacctctggaaataa

SEQ ID NO: 75897 - DNA, 1227 bp, Citrobacter koseri
atgagaaataaggttgtggttacaggcatggggattatctcctctgtagggcacacaccggaagagtgccatttgactctattgaagggaaaaggaatgactagacttgactcgcgtctgcaaggtctgaaagtctcatggtcttgtcctgttcagaatttcgcccctgcacagcatatgagtaaatctttgatctggcgaacagacccttttattcaatatgccctgtatgcagcctgtaacgctgttgaagatgcaggattaaaaaaggggtatggagggctgaagacaggcatcgtactgggcaattctcttgcaggcataagctctttggaaaccctgaataaaagagccttccaagaaggaacagcaacaattgggtcactgtatctcttgtccacaatgggcagcatggcaacaggaaatatagccattgaacttggtatacatggaccaacttatcttacgggtacagcatgctcttccggagcagatgcaattggaacagcaagtcgtcttatcgagagcggagaatgcgatattgttattgccggtggcagtgaagcgccgattacaccactggttgtttcgtctttcacgaaactcggtgctctttcaaaaaatactgatctgccgcatgcgtcacgtccgtttgacaaagaaagggatggttttgtcatctccgaaggtgcggcgatgatggtattagaaaacgaaaaaacagcgatggagcgcggtgccagaatttatgcaacgttatccggatacggatcagccaacgacgcgcatcatattacttcgccagcaccagatggttctgggctatctaaggcaatttatagagcactggaagatgcttcgttatcatcgtgtgatattcagtgtattaatgctcacggcacatcaacaccactgaatgattaccttgagggaaatactttatctgcaatattccctgatcatccttgggtgacatcaacaaaaggtgttaccggacatagtcttgctgcaacaggtgcaatggaagctattttttcagtcttgaatattatacatgatgaaatcactcctgttgctggcttgaaaaatattgatgaagcaataaaaataaatattgtaacggaagttattaaaggtgcaggcattaaaaatgtactcagcacatccctgggatttggtaggcaaaactctgctcttatcttttctaaatacaacaaaaggttataa

SEQ ID NO: 75898 - DNA, 225 bp, Citrobacter koseri; identical to SEQ ID NO: 13750

SEQ ID NO: 75899 - DNA, 903 bp, Citrobacter koseri
gtgaaaagaataaaagatgctaaattatatacacacaaatttcatgaaagtgagatattcataaaaaatacctcacggatttctgacaatcattttcaagctaacttcaggctaattaaaaatcatgggttttattctgattttctcgcctgtcagtccaagattaatccattttttttactggaatgcgcgaggcaggctgaaacagtattatcgcatacggagtttgctatagcggtagacagtaagtttttgcttgacaggtggtccataacatattacccaacagggtttgatgatacgggaacattaaaagctgatgtctacacaaaagaaccaacaacaaagaaaacaaacaaaaatacgtttaacattgtttttaaactaaaagaaacagttatcggcgtggttaaaattgaggtaaggtacataacaaattcttgctataaacgtattcgaagaatcgctaatgggaacaccttccctaaaatttcaacaccactattacctgctacggtctgtttcacatcgcaggaaaatgtggtgctggcagatctaagtgatgaaggtccatatgttaaagcaactatttatattagtaacgataataaatcacttaatgaccatgagcaagatcatataactggaatgaatctaactgaagctgttaaacaaatatgctatagctacatctccttatacatgaaagaaaaaaacaactgctatattccaataaagctggaagcaaacttttacagttatgtagaaaagcatatacctgcagttttagttataaaaaaggtaacgttacaggacaacctttacttatttgatgttgatataatccagaatgagaaaacactggcaaccgttaatttaaaactaggaggagaatatggataa

SEQ ID NO: 75900 - DNA, 204 bp, Citrobacter koseri
atgcctgaagggatgaccctgtttgctatttctggtagcacaagggacgtgcgtatccaaagtcggttacagggtgaagtcatcgagagtttgtcgaagaaacatgatgtcctggacgacttagaagatgaaaaacggcctgtggatgaaaagccgtatcagcgtttgctgatacggcctggttctttacaagattattcataa

SEQ ID NO: 75901 - DNA, 1272 bp, Citrobacter koseri; identical to SEQ ID NO: 4887

SEQ ID NO: 75902 - DNA, 876 bp, Citrobacter koseri
atgcggttatcaagatccttatgcaaagtagttggcgatgttattgctaactcaggctctcatgcagctttagacatgttatttctatcgtcaggtgcgccgggagacccccctgctggatctcatagtacaaaatggaaagattggctattccttgcgggacaagatccagctactgatagtttgtctgtactcggtggagtcattgaggagtttatggatcttcctccgaaagaagaaactccagaatatatagagtggaaggaaaaacgagaaaaaatagaagccgtattacaagataatgggcttaggtattatcgctttggtcgtgtattgccccaagaccaaatcccgccaaaccaaatggattatcctgatagtgtaatcacctatcaacaacctgttatgccagataaggttgagatcttgctagaaagactggttaaaggcttacatcgtgcaatgcatcctcttattcacaggagaaaggggagtcagacattatctttcaataatgaatacgatgtgcaagatcttctccatgccttgcttaggccatgggttcaggacatccgtcctgaagagtttaccccaagctatgccggttcaagcacgcgaatggattttttgttacctgcacacaaattagttctggaaacaaaaattgttcgagatcgtaatcatgcaaaaaaaataggcgacgaactcattattgatactgagcattaccgtcgtcatatggactgtaaaaatctctggtgtgtgatctacgatccgaacaagttcattacaaattctgaaggtcttaaatcagacctggaagggaaaagaatctctaaagatggtgaactgatcgttaaagtctttgtactttag

SEQ ID NO: 75903 - DNA, 882 bp, Citrobacter koseri
atgatgcaaaaacattttgacattgttcaagccattatcggtaactgctttatgaacaatatgccaaacaatagacttttatacagcacgaaaaatggcacatctacaacacactatccattaaattgcataggctttttctcatggaatagtagtttgcagaatgattatacaaaattcgtattattccctattttctttgattatctagatagctatgttgatcttcgttttaactgtgtaaacgaaaacttcaacaaaaaaagcgccattattgaatcccaaatggataatggttccattgatgatctgttccttcatactctgtataaaatgtgttcaaaaatcagaaataagatgcttcatcaccggctcagctatgaaggtaccgaagtgacagccagcaacaccactgtcacaattcctcatttcagagttattaatgagttgatttatcaatatgtgaaattttcggtgacgggcaaatcactctttgaaaaaaacgcactctattccgggttaatcgatatacttaaaaacaataacaatagcgaccatgaatttgttcaacgggtagagataatgtcgaactatgtgtttatcaccccctataaagaacgacagttgtatgacatcaatgctccaattgtacccgccgaactcatcatcaatcgggtttctcggcctgctggaagctttcaccatgaaaatgatgaatttaagttaaagcaccccgatcctgaagaaaaaattgtattcggtaattcttactactttttcaggatggcggacaaatactatttgttaccttcggaagtggtaaacaatagcaaaaatatcactttcggtgagatcgatgtctgggagtttcaaacgcagtaa

SEQ ID NO: 75904 - DNA, 960 bp, Citrobacter koseri
atgaaggatgaggaagataatttatctgtgtttatatcctatgcttggggcggggcattggaaaaaaaagaatggattaggcaacacattgtagaaagtctgaaatggaaatactcagtattttgggatcgtgacagcatcggttttggcgagtcaattgacgcttgtatatcaaaggcacttaaccagagacctattacagttttttgtatctgcgatgctgattatctggtttccgctcaaaaagttggatcaggactataccgggaattgcagttactgacaaaaattgccacatcggaagatgtgaaaataatcccgctaatttttgatactgaatgtgttcagaatcttcctgagcctcttgatggtaggacttacctcaatttggaagagatacatcgtcgcggtttataccttggagatgctatgctagctttagccgatggtagaactcagtcatggatgactatgtggttaaaaaaaaggattgcttgggatgatctccatagatatgcaagtagctattttcagatgcagcaattaagcatttgggggaatgcgagttctcatgaggtaacgattagaccgggagaattgttgctagccccgcaatggatgtgggatagtaatgagtggaactatatgctatcggacgaaaatgctactttttgtccccttaaagggcgttggcattgggattattttacgccgtctcgtggtatgagagctcttggtaccgctgtcatgtcagcgttttttccacaatgtactactcaagttgagcgagccgcattgcaaaatgcaggagtggtcttagctcagaaagtttttgctatgacgtacatgacggagtcgtttattcttgaatataaggaaattattagtattttacttaacgatagcaacggctataaagcaatagagttattattagaatcaacaagacgattgaaataa

SEQ ID NO: 75905 - DNA, 2034 bp, Citrobacter koseri
atgggaatacttcctcaagtctattcaacacatcaacaagaaaccaatagctttagaaaaatagaatcaataatcccatctgaaaaatttattcttcgtaaagaaagcggtggggattatggtgttgattgtatccttgaaattatcgaggatggttttgcaacgaatatcagaagccatattcagctaaagagtaaacaaaatcaatttctcgattctgatggatactttaaatattctgtaccaatcaaaacaataaattatctatcaaatacactgagttctatatttcttatttattccgaatctgaggacgttgtctattgggagtggaattccgtaattttagaaaaaataaatcaaagtacaaaaacagggacaaaaagcttcaaataccctttctataaaactcttgatgataaaagcattgatgggatatatctcaccataaaaaataaaaatgagataataattaatttagggttaaacgctttagagaaaggtgtgttagagaatctgattactgaagatattagttatgatttattactgaatttcttcaagaagaatgactacgattctatagtgggtaaattaaagaatataaaagatcctacattaggtgaaataagtttattatcactaagttattataatatgtgccagtatgataaggctttgatggttattctaagatttgagaataaaggatttaaaaacaatcatttattgaaaattaaagcgtgtattttttgtgagaaaggaataaaagaaaaaaatcttaatcttgttaaagatgcaaaaaacatacacgaggaagctttaaagggcgaatgctgggattggttagaccactataattatgcaaatatggatttagcactcggtaattttaaagatgcaattaataaatacaataaggcattaaaaataaatccaaaagatgcaaagacatggaaaaatttggcacaatgttactatgaaataggtaaaaataaaaaagccttttcttgccttgatcaggcgcttaatattaatccagaactaattgaagctattctcactaaagcaggaatgctccgagatgttaaaaaagcccctcttaatgcggtagaactttatgatcaggcaatgaatatcgctactcaaactggtttcgatatgagctctattttttatcaaaaatcgctgtcttttttccaagcagataaaactttagacgctatatctacaatacaggatggactcatatattttcctggcgacttttatcttactaatctcaagctatcagttttagcccagagatggtcaactgacactatattagctgaaatggcaattcaagatttctcacaacagcttgaagaatatccggatgatattgaagctaaaaaaatattagcagaaatttttctaaaaaataacgatactaaaaattttgaagacactattaaatcatgcctcgaacaatatgagttgccatattgcttagatgattttattgatcacaatatcgaatcaatatttatttttattaagaacattgataaaattcataaatataggaaaaacagtaatttatgcggggaattattttccatctatgaactgaatatagctcacgctaatgaaattcaatttcatttcgatatactttatgctgatttgtatacaaaaatagcaacaaaattaaataaaaagaattttttgaatattcttgataagcatctctcgtccgggattgaggtgtcagaaccagtatctcgcatactttctaaacatcaatctagcaaaataaaaagtaaagaggaaattgcagataacattgcttacttaattgcatccatacctgaaattacaatcggagaaatatcaagacagataggacatgcagcgggtatccttggatatgactcttcccttttggatacaaatattgatacatcaaagaaaatcagtgattggtttgccctttctgttgaaccaataataattggagcaaatgaaacatataaggtatttaaggaataa

SEQ ID NO: 75906 - DNA, 873 bp, Citrobacter koseri
atgggtaagttaggcggtgaaatgaaggcacaggcgaaacactgcggcggcagccataaaacggtgaatgatcgtattcatatcgtgcagcgtttcgatcaccatttacgggcactgaacatccagatccagcgaatggcgcagattaaggttcgccacattgaaagctacattcataaaaggctggcgcaggggatcggcaagcgaacgctacaaaatgaaatggcctcgctacgtgccgtactgcaacaggccgggcgtaagcaggtggcaaagcatgagcggctaaccaataaatcacttggactggcgggcgcatcacgcagcggtacgcggcaggcaattacgccggagcattaccaacatgtgcatgagaacgctcaaatgaaagatccggggctggctgcggcgctggaactggcgcgactgatgggcttacgttcacaggaagcagtacaaagcgcgcaatcactgaaaacgtggaaacaggccgttgaacggggcgatacacgtttaactgtggttttcggtaccaaaggaggacggccccgcgaaacggtgattctggatactggtgcagtccgaaaagcgctggataatgcgttagaggttgcaggaagccgtaatgaccgactgatcgacaaaccggatctgaaaagcgcgatggactactggcacaatcaggcggcacgcattggtctggctggtgcatactcccctcattcgctgcgttatgcgtgggcgcaggatgcccttcatcactatctggctcaggggtttagtaggaaagaagcgctggcaatggtggcgatggatctggggcatggagatgggcgtgggcggtatgtggcgcaggtttatggacaaaggtga

SEQ ID NO: 75907 - DNA, 228 bp, Citrobacter koseri
atggataaagacgactggcacccggcagacatcatcgccgggttacggaagaaaggaacgtctctggctgcggtatcgcgtagggccgggttggcctcttccacgctgaccaatgcccttaaccgccactggcctaaaggtgaaaggctgatcgccgaagcgttaggcgttgcgcctgaacagatctggccgtcccgctatcgtaagccggaataccgccagaactaa

SEQ ID NO: 75908 - DNA, 285 bp, Citrobacter koseri
atgatccctgaacgactgaaagccgcaaggctacgggccaaccttacccaagagcaactgggtgtccgcgcaggcatagccgaagacactgcttattcacgactctcccagtatgaaagtggaacgcacaaacccacgtttaaaatggtgtgcgcttttgcccatgtgctaaacattcctgaatgctatttctacacggtggatgatagtttcgcagaagcgctattaagactgtatgacggtgaagttgttcagtggaatatgaaagcgggggattactcttaa

SEQ ID NO: 75909 - DNA, 261 bp, Citrobacter koseri
atgatccccaaacgcttaaaagaagcccggcagcgggcgaaactcacacaggaaaagctgggggtactggccggaatagaagaggcaacagcatactcccgcctctcacattatgagaacggcacccataagccgacttttgatcttgtttgcgaatttgccagagtgctcaacgtaccggagtgctatttctatacggtcgatgatgattttgccgaagcggtactggatctttattcccggagggaaagtaaatcctga

SEQ ID NO: 75910 - DNA, 1263 bp, Citrobacter koseri
atggcattaaccgataccgctatccgcaagatcaaacccaccgataaatccttcaagattaccgacagttcaggactctacctgctgatcaaacccaacggctcaaagctctggtatatgaagtaccgcattgacgggaaagaaaagaagttggcttttggcccctacccggatgtttctctgtttaaggcgcgtcagctacgcgatgccgcccgctccagagtgcgcgaaggggccgatcctgctgctgataagaaaatcgcccagcagaaaaagaaaaacggacatacctttcgccagatcgctatgaactggcacgccgatcaccggcgttggtctgcgcattatgcaaccaccatccagcgcaggctggaaatgtacgttttcccggatattggtgacagccttatcgatcagatcaccacggaaacgcttttattcacattgcgcaaagtggagagtaaaggctttctggaaatcaccgcgcggctaaaaaactacgtcactgagatcatgcgctatgcggtgaaaaagcagttactcaaatcaaaccctgctctggatctggacggtgaatttacgccgccggaaacgcaacattacccggcccagccccttgagaaactgcctgaactgttatcccgcacggacagctactccggcaggctgctgacccggtatgcgcttaagctgtcgctgctgttttttgtgcgctccagcgaactgcgctttgcccgctggaatgaaatcgactggcagcagaagctatggataatcccggaagaacgggaacaaatcgaaaacgtgcgcttctctcatcgcggcacgaaaatgaaaacgcagcacatcgttccgctgtccgatcaggctattgctgtcttaaagcaaattgaagcgctctccggtcatctggcatttattttccccggcgaatacgatcaggataaatgcatgagcgacaacaccattaacaaggcactgcgcgtgatgggctacgacactaaaaaagaaatctgcggccatggcttccgggcgatggcgtgtagcgctctgagcgagtcggggttatggagcaaagacgccattgaaaaacaaatgagccatcaggaaagaaacagcgtgcgtgcggcctatattcataaggctgaatatctggaggagcggatcgcgatgatgcagtggtgggcagattatcttgatgcaaatctcaatgggtatatttcaccttatcaatacgccgcgccgctgaaaaacgtgtcgtaa

SEQ ID NO: 75911 - DNA, 240 bp, Citrobacter koseri
atgcgattgataaaccgcagcacgcaatctccgctggcgcgccgggcgtgcgatgcagcactggcaaagcatgttgagctttacggggagtttggccgacagaaaacaaagaccacttataccgtggcggtcgacggcgtgaaggtgacggtagaagttgttaaccgacacaagagctacgtggccacggcgatgacaggtatgcgccgactgcgcgcactgccagggcagattgcctga

SEQ ID NO: 75912 - DNA, 273 bp, Citrobacter koseri
atgcgtattgaagaactgaaaaagcttccgaaattataccgggttatcactgttgaacttgacgtattgcgtaacgggttcggggctaattacggtgtaatttacgatgttgataccgttgttaaacgcaaggttcgccgtgtgttagatgccgatggctggcgctgggcaatggtccgtgagcaccgcaatcaagagcaatgggactacttctttgagtacgacaaagaatgccttcatgaacttaattacacacttggcctaattaagtga

SEQ ID NO: 75913 - DNA, 609 bp, Citrobacter koseri
atgactaagcgcggaatgatttttaacggcgagatggtgcgcgccattcttgaaggtcggaaaacgcagacgcggcgcccagttaattcgtcaactgctgacctgcttgatttgcaaaaacaatatccgcataagaaatacaacattgtttgcccgttcggtcagccaggtgattgcctgtgggtgcgagagacgttccaggggccgcttgtttctgaggagttattcgaagaataccgagcctatcctgaaaagttcgagacgccgcaatactgcgaatatgccgccgatggtggtgccaagcctgaatactgtgatcttgacgataacctccgtcatggctggcgcccatccatacacatgccgcgctgggcatcccgtattctgctggaaatcaccgacgtgcgggttgagcggctgaagagtatcagcgacggcgatgcgatacgcgaagggtgcagtgccaccgacatgaaaagtggcgactgtgttgctgatgtgttcgcgcgcctgtggaaatccatctacggcaaggaaagctggcaggccaatccctatgtctgggtaatcgaattcagacggatcgacgggggtgaccatgcgtattga

SEQ ID NO: 75914 - DNA, 345 bp, Citrobacter koseri
atgagcaaatcattaaatgcacgctgtattcgccgctgggaagtcgaatttaaaccgctctgcgattcgaaagtaaatccgtactggcgcaagcgcgacctgcgcgggtatatccgcgaagcggcgctcaccactgcttacaacatggttgagagcatggctgagaacaacgccaaatttgactatgaaggcacgactattggctggtcgcctgagttctcggcctggtataacgaacgccgggaacactacctcaaggaggctcgggaatacctgaacgaagacgccaccaacgaagagatagacgaagagatcgagaacgagctggaggcctggaatgactaa

SEQ ID NO: 75915 - DNA, 1110 bp, Citrobacter koseri
atggaaaataccaacattgttacagccgaacagcaggcaccaaacacaatctctgcaagtaactcaattttcaacgtacaggccctgggacagttgcagtctttcgccgggctgatggctcaatccgtcgttaccgtgcccgcgcacttggcaggaaagccagcagattgcatggctatcgtcatgcaagccatgcaatggggcatgaatccatatgcagttgcgcaaaagacgcacctggtcaatgggcaactgggttacgaagcacagcttgttaatgccgttatcaccagttccagcgccatccatggccgcttccattatcgctacggtggtgactgggaacgttgcaccagaaccaaagaagtgacccgcgagaaaacagggaaaaatggcaaatacactgtaacggaacgcgttcgcgactggactgatgaagatgaagcaggcctctacatcgaggtcggggcaattcttcgtggtgaaagtgaaatcacttgggacaaaccactctacctgtctcaggtagttactcgaaattcgccgctgtgggtttcaaagcctgaccagcaaatagcctatcttggggtgaaatattgggcgcggttgtactgcccgcatgtgattctcggtgtttacacaccagatgagcttgagcaacgtaccgagcgagaaatcaatccggcgccagtccagcgcatgagcgtacaggaaatcactggcgaggttagtaccacgaccagcgcgcaggaatcggcaactaacattgacgccgttgccgacgacctacgcgaccgcattgacacagcaagctccgttgaccaggccaaagccatccgcgtggatatcgaatcgcagaaagcattgctgggaaccgctctgtataccgaactgaagaataaggctgtgaagcgctactaccaggtcgatgcgcagaacaaggtcgaggctgtgatcaactcacttccaaatcctggcgaaccggaatccgcagcgatgttcgctaaagctgaaagtgctctcagcactgccaaacgtcatttgggcgacgaactgtatgaccagttccgcatcaccctggacgacatgaaaccggaatacgtgggctaa

SEQ ID NO: 75916 - DNA, 159 bp, Citrobacter koseri
atgcagaaagaatgcggttactgccgcaaacccgttgaagaaggcaaggaagtaaaaaacgtattgctctatctcaacggtccgcaactggcacagaaagaaaaagaatattgctctaaacaatgcgctgaatacgaccagatggcgcacgagagttaa

SEQ ID NO: 75917 - DNA, 312 bp, Citrobacter koseri
atggcatcacgtccaatctgtgttttttggttcaagaaccaggaacagtatgattcctataaaaaagtactaactgatgcatgggtattacctgaatactatcgggattggcttatccgctttaatcaaatggttgagcgttacgaaaacagcggtatccaagtgattaaagtagaggccgaggctgacgagttcgcttcctggtgtcttagtaatgttcgtgacactagtaccaaaagctgcaatgacttcgcggctttcataggcggcagcaaggcgatccgcgatagtgagcgtgattggggatattag

SEQ ID NO: 75918 - DNA, 651 bp, Citrobacter koseri
atggaaagactgaagccagtttcttcagttcaacctacctcaggaacaacatcatcagttcttccaagtattatagttagtgcaaccctagcagcgacaaccgtttctccttatggggatccatctcagtaccaaagtattggtattgatgctaaggtatcaaatagagtttcatacgccatggacgaaacgggtttgcgcccaagtaaggaagatgtagcgatgaagagtgataccctggaggtaagcgtgagcggaatgtccagagaagaacttgacgcaaagctttcacaaaacaaatcagaggtagagtctattgctgcggaaatgcgtcgcgaatcagctgactttaaaacctattatactcagcaattttcttctattgagagaggtattgctgaaattaaaggtgaaatcggcggtttgaaaacgggacttacaacgactcagtgggcgatggccgttggcttgactttagttactgtgattctgtctggcgtgatgttagcctcaagttggattatctccggcaatgacaagtcaccatcagtaaccagcccggctccaattataatacaggtaccgacacagcaaccattaacgagcgctccaactaaccaatcgtcatcacaacaagctcctaagcaataa

SEQ ID NO: 75919 - DNA, 267 bp, Citrobacter koseri; identical to SEQ ID NO: 17642

SEQ ID NO: 75920 - DNA, 156 bp, Citrobacter koseri
atgaacacattcagcatactcgcgatacctttctttgccctttcagtggttctgttgactcttagggctaccaggaagaaccaagccagcttcatcgttggcggcgtgtttatggcgtcaagtgtggttaatgccgttatcggcatgtctctttga

SEQ ID NO: 75921 - DNA, 312 bp, Citrobacter koseri
atggcaagcaaatcactgtgggcaattgttgatttccttcgggaaaaccagaccatcacgccgagacaggttcagaagttgctgggatgtgactgcaagaaatctcacaacctgttgcttcacctgacgcgcaaagcggtagtgatccgtacaggcgagccgcatcacccggtctattcgctgttgcccggcggagaactgaatatcaagcgcttcaaatcgaccgtgcgaaaaaacatggttacttcagtgtgccgcacaagcccggcgatgaagcgagttctggcattttacgggagggcatcagcatga

SEQ ID NO: 75922 - DNA, 612 bp, Citrobacter koseri
atgaaatcaacggtagaaacaaaaatcagtgagttaatgaagttagggcatgagctggcgaaagaactgcattgtgctgagtctgccgcgctggtgagcgatctggcatctcaactggaagtgcaactggtgcgtagcaatgcgctggctgcggagaatgcggggctgaagcaaatcgttgattccgtcactgacttcagcaacgagcctcagtaccacgctgagggcatgggttgcggactggaagaccgtggcattactggccgatacgatgcttgccgttacggatgggatgaagcaatggagcgaatttacggagaggtaattccatgcgcagaggaaattgcattccctgaaacctccgctttcttggctgaagtgcggtcaaaatctcgcgaagaaggtgcttactttgttgctaatagaatgcttgctgcatgggatgccggatttatcgacgacaccgcaaagaacgctgcggacatcgcacgaatgatactgacctccacagggtttatggctgatgcgccggaaggcgatttcgatcgctcgttcgctgatggtgtactcgaagacatcgcagcccagcttcgcaaaggagcagcccaatga

SEQ ID NO: 75923 - DNA, 597 bp, Citrobacter koseri
atgagcaacatcgacaaaaaggcgctacgccaattagcagagaaagctatctcggcagagggggtgacttggtggagtgagcaccagctatcacacgaggatggtctcgctctgcatgatgcagacgctaaattcatcgccgccgctagccccgccaccattctggcgctgctggatgagatggaagtgctccagtctttccgcactgcatacatggagtggagcgataaaaccgattgggtgcagacggataagcggcttgacgtcattaagccgtggggtaagcatcgcgccgacgttctgaagctctatatcgatcatctggaatcaaatctggaagccgcagaacacacagcagcagtagaccacgaagcggcatgttctctggtcgaagaaaacgaagagctgaagcgaaaacttgaagccgcagagcagtgcatagcagaactggaggcgcggacggtgactataaagcagttcgatgaattccagatttgccactacggcgcaactgaggactatgcgaaaggctatatcgactgccagaacaattacaacaaagcgcttaacgccgctggcatcggtaagggggagtga

SEQ ID NO: 75924 - DNA, 222 bp, Citrobacter koseri
atgagtgaggtcaatatgcaaatttacatttcgaatctcgaaagcgagtcaagagagtgtgctcactttcaaaatatcatgatgtacaaggtgaggaagctgataaaggctgtaaggggtgctggcgctagcgctgagattattgagctaatttctgatattgaagaatttgccatttcaccaccggaagttatcgcaaaacatcctgctcaggaggcttag

SEQ ID NO: 75925 - DNA, 513 bp, Citrobacter koseri
atggcactaacacacgatgagctttgccagatcgcttgccgctttcttcaaaacaatggtttcaaggttgctttccatgaccggttccgcgcatggacaccttacggcgagcaggctgacgcaatcggatttcgcaatggcgccagctgcctgattgaggctaagtgttcccgttctgacctgttggcagaccgcaagaaaccttttcggattgaaccagagaagggtatgggcgattggcgctttatgattagcgagccgggaatagtgaatgttgaagacttgcctactggatgggggttactccacgttgtcaaagaccgggtaaaaaaggttcacggctggccgggcaatggcctctgggtaaacaaagatagcaagccattccaggctaataaacaggctgagtgcgactatatgtttagcgctctgcgtcgaatggatttacgtggtcacctcaaagaggtttatgacggcgtaatcgtaaacaagacagaaggaagcgcggcatga

SEQ ID NO: 75926 - DNA, 867 bp, Citrobacter koseri
atgaccactattaccagggaacgcctacttaaaatccagcagtggcgcgaaacatacggaccaggtagcaacgttgtgctgccagcagaagaagcggaggagctggcgcgtatcgcactggcatcgcttgacgctggcagcaacagccacccggctcacggcccgctctcaaatgaccgcctgcaccgcattcgtgaaatcttgggcaaagcagcagcacaaagcgacggcggtaacatcggttacgcaatgtctgatgctgtgaaagcgattgatgaattgcttgatgtgcggaaggcggagcctgttggctactatcgaaaaggcagtgatggattttattttgctagtcctacagagcaacgaccgggaaccattccactctacaccgccccgccagagccggtagtgccagaggcaaagtgtgacgatgacgggaataccacgtccgagtttgaccacggctggaactcctgccgagccgcgatgctcaaccattccggtgatgtcaccgaaatgggggaagccatcaagcaacagtcaagcattcataccagcaatggcgctatgtcaggtgatgcagtcaagcaaccgtcaaacaatgccagctctctggtattcgttgacgaaattgcagaacagaacggtgtagaccctgccatcactgacgcatacatgcagggatatcacgacagcgagggttggaagccagcaccggtagataatgatgatttgcacgaagcggtaagtgatttacttgcggctctggacgaataccctgaacagctcgtaccgattaacagaaagtcattcctggttcgaatcatccgcgccgccatgctcaacaaggataaaaacaatgggtaa

SEQ ID NO: 75927 - DNA, 603 bp, Citrobacter koseri
atgggtaatcgttatgaaattgccgaaaaaaacggcatgtctcgcgaatttgtcgactggttctttgataacaaaaaaaatggatgtggcaacgtatggttcatgatgatggcggctatgtgggaagggtggaaaggtaatgccgatatgcagtcgctgcccggcatccagagcgctccagaactgaattctttgcaaaataatgccgggtcggtgcccgccaccctgacagcgaatgaactgtctgcaattcttagctggatgacgccaccctacatcaccagtggaacgcacacagacgagttcaacgaattgcgtaataaagtcttttacgctctgcgtgatgctcagaacgatgaacctgtaagtgacgcttacaagttgccaggcagatggattccggtaagcgagcggatgccggagcgcgatgctgaaattcaggtttactgcgctgatacgaaagagcagatggttggctacatggagcgcaatgaaacagagggatggtttaggtttgcatcgcttccgaatggtggtggcgtttattgcaagccaacccactggatgccactgccagcagcgccgcagcaggaggtgaagtga

SEQ ID NO: 75928 - DNA, 228 bp, Citrobacter koseri
atggggcgctcacgatttgatgcacggcttgataaacgagttaacatcgagagactagaagaacaaggtataatcgctgatagcatggaagttagaaagagcttggttgagcgcgttatgagaggtgaaatcactccagagcagtccagggaagaactgaaacgcattcagcgcaacgccaagcgcaatggacttaaaaccagaaatcaggcatggagagaaggttga

SEQ ID NO: 75929 - DNA, 186 bp, Citrobacter koseri
atgcagcttaaacagtacattgatgatcactttggggggaataaatcggagtttgcccgggtgatgggggtcagacgagacaagccgaatcgctggatctctgaaggctggatagtcgttgacggaaggctctacagtccacagcgagagataccggagaaaaatgaatccccctcgatgctttga

SEQ ID NO: 75930 - DNA, 339 bp, Citrobacter koseri
atgactgaactcgacctgagaaaactcagcaaaaaggctttgcttcagttaatttctgaagccgcaaacgagctgcaccgccgtgaatcctcatcttcttttgtcgaaccggccgcagcagaagagactgccctgtcacccggacaggccgatctggtttttattaataactgcctgaacgcaagtgattatgtgcatgctgatgcaaaagaccgatacaaacagttagcatctaaatactcagcgtggttcgcgtacaagggatatccgcgagatttgcgtggttcagacctcaaaaaatggaaacagtatttcaggcccaacacgagagaacagtaa

SEQ ID NO: 75931 - DNA, 549 bp, Citrobacter koseri
atgacgatttacgcagtgaccaggcaaaaaaatgccgaaatgacaatgttcaacatgggcgatcgcgtggtggacctgaacgggtttgtcgagcttgcagggctcggagagtcagcagaggccgcaaaaatcagcgccgtgcagttctatgaagatcaatcatggaatggcgaggattacgttgatgtatcagtccattccccacttgttaataacgtcaggaaactctctgattctctcgaaagtcactacagaaacggtgaggaagccagagctattgttaacgcatacatcaccgaaactgagcacgagtggcggccagcaactgaatctgaaattcaggcagacatgaaaatcagcctgtttcagtacctgataccgttctttttcattaacggcgacggcgatgttgattatcttccgatagtcggtgacaacttcccctatggcgcgcgcgtcggaacggatgaagatgtgatggcatttatccgcgaaaaccatcgttctaatcgtgcgttcatgtacgacgaagttaacgatctggattaa

SEQ ID NO: 75932 - DNA, 234 bp, Citrobacter koseri
atgaaagttgagttaactattgatcgaacaaagaaacttcctgatggtgcagtgccagcactggaaaaagaattacttaaacgactaaatgatcagtatgagaattgccgcctgacaatccgtcgcgcaggatcagatgggctgagcgttttcggtggcgataaggacgataaaaagaaaattgaaaagatcctccaggatacctgggaaagcgctgacgactggttttactaa

SEQ ID NO: 75933 - DNA, 291 bp, Citrobacter koseri
atggctaatcttcgaaaagctgcgcgtggccgggaatgccaggtgcgtattccgggggtatgcaacggcaaccctgagacatctgttctggcccatatccgtatcgccgggttatgtggcaccggcatcaaaccgccagaccttatcgcgactatcgcatgctcatcatgccatgacgagatcgaccgccgtactcaccaggttgatgctgaatatgcaaaggagtgtgcgctggaaggtatggcccgaacgcaggttatctggctgaaagaggggctcattaaatcatga

SEQ ID NO: 75934 - DNA, 357 bp, Citrobacter koseri
atgacagtctacgacatcacgccgatcggcaagcccagaatgactcagcgcgacagatggcacaaacggccagcgacagcggcgtactggtcatacaaagcgcaggttcgtctgctgggcatcgagttaccggaatccggttatcacatcacattcgttatccccatgccccaaagctggagcaagaagaagcgagcccaacacgccgggcagccacatcagcagaagccagacaaagacaacctggaaaaggcgctgctggatgcagtgtttgacgaggatagccatgtctgggatggccgggtaacaaaaatctggggcgagagagggcggatcattatcgaggatgccacatga

SEQ ID NO: 75935 - DNA, 147 bp, Citrobacter koseri
atgaaacccgaggttattgagtctcttcgccagcgctggcagcgccttaaccttttccggtatcggggatcggtgctggtggcataccgcatccttcgcaattacatccgcattgaagcaaaacgggagcatcaaaatgaagcttga

SEQ ID NO: 75936 - DNA, 798 bp, Citrobacter koseri
atgaagcttgagtccttaccaaaatatttttcgcctaaatccatgatgcccggcgctgttccatgcggtatttcagcagatacgttgactattactgacgtaatggcatccctcgggctactttccgcaaaagcagcggtgggtattgaattgtatctggcaaaagccggggttttatcttcagacaatattattgcctacatcaagaaactggcagaacagcgcgcagaacggcacggatcgctgcggaaaatggaagaaagtgaacgctcaaaatttctcggtattctggctcggtatgttttccgcgattattccctcagtgctgcaagcctggtggcgtgcggtagctgtcatggcgcaaaatttattgatgctgaggttttcacgaacaaggttacttacccggatggtaagccaccaaaatgggtaaaagatacgaaaggcatttctccttctgactgggaggtgtggaaatcagtacgtgagcaagtgcgcgtcgtgtgtaaaacatgtgatggtaaaggccatgtgaaaaacgaatgccgttgccgggggcgcggagaaattctcgataagaaaaaatcagagttgcagggcgtgccggtttataaaaaatgcccgagatgcaagggaagaggttacccacgcctgaaagataccgagatttttaaagcgctggggataacggaaatggtatggcggtacaactataaacagtttttcgatcggctggtggagcattgccatattgaggaatcatatgcagaaaaggttctgggaaacgtgacccgatga

SEQ ID NO: 75937 - DNA, 564 bp, Citrobacter koseri
atgctgggggatagaccagtgaacccggtgccgttaattgctggcataaaagcctggtggaaacccgttgtcgttttacttctggtggctggcgcgtttatcaccggaaatgtctggagcaatcggggctgggaaaagaagtgggcagagcgcgacagcgcggagtcgtcacagaccgcgaacgcgcagaccgccgcccgcatgattgagcaagggcgagccgttgcccgtgaagaggctgtgaaagatgcacaacaacaagcggcaaaagctgctgccactgctgctggcttgtctgccactgttaaccagttgcgcaccgaagcaacaaagcttgccgcccgcctggacgccgcaaagcacaccgcagatcttgccgctgccgtcagaagcaaaacagccggagccgatgccggaatgctcgccgacatgctcggagatattgcagcagaagctaaacgttatgctggaatcgctgacgaacgctacacagcaggaatgacgtgtgagcgtatttacgactcggtgagagagtcgaataacaatctggtgaccacgcattaa

SEQ ID NO: 75938 - DNA, 996 bp, Citrobacter koseri
atggcaaaaccggactggggcgagcttcagcaacggttcctgtccgatcatgccgcaaccggcgtatcaccgaaggattggtgtgaagcgcagggactgaactacgctaccgcccgtcgatatatcaaaaaggcacctgcgcaaaatgcgcaaaaacctgcgcagaagaaattgcgcactgcgcaaaaggaaaagtgcgcaaaagagctggtggatgatgacggccttactgctcagcagcgtttatttgtcgcagagtacctgaaggacaacaatgccacgcagtccgccattcgcgccgggtacagcaagaagaccgctgaacaaattggttatcaactgcttcagaaaacttcaattgcccaggcgattgcgcagcagcagaaagaatcgttaatgcgcacactcggcagtgcagacgaggtgcttgcgcagatgtggcaactcgccactttcgacgcaaaccagctttcgcaatatcgtcgtggatgctgtcgttattgctggggcttcggtcatcagtaccagtggcgggatgctgttgagtatgaagaaaagcgaatcgaagcggttgaacgcaaacgtcgcgagcctgaggacgtgggcggatatggatatgaccatacgcaggaaccaaacccggaatgtccacgctgcaatggcgatggaataggccagccattttttgctgatacccgcaagttgcccactacggcagcgctggcatattccggcgttaagctcggcaagcacggcgttgaaattaccgcgataagccgcgaacggatgtttgaagccgtaatgaagcgcctcggcctggcggacagtgaatttgcgcagcgacttcaacaattggaaattgaacgacgacaattggaggttgaccaacttcgaagggagatagctttgggtaaaaacccgacgggatttgaagaggattatcaacttcagccaataactcccgatgaggaatctccagatgatccaatcctctaa

SEQ ID NO: 75939 - DNA, 1314 bp, Citrobacter koseri
atgatccaatcctctaatagcgatgccgtcagcctgacaccgaaacaggcaaatatttacgtctggggctggcagcgttcagcgcgtttcagggatgctgtatgtggtcgccgatttggtaaaacattcctgggcaaagcggagatgcgcagagccgccagactggcgcagaaatggaaagtcagtgtagaggatgaaatctggtactgcgcgccaacccaaaaacaggcaaagcgtgttttttggcggaggctgaaacaatcaatacctccacactggcgggcatcgaagccgaacgagaccgaattatcgatcacactcaaaagcggccacataatgcgatgcgtcgggttgaataactacgatgatttgcgtggttccggcttgtttttcgtgttggtggatgaatgggcggattgcccctatgcagcgtgggaggaagtattgcgcccgatgctgtcgacatgtcggtatatcgtaaacggtgtgcagtatataggcgggcatgctcttcgaattggcacacccaagggattcaaccattgttatgactcatggcttgccgggcaggacaaccgagaacctgatcataaaagctggctttatacttctgtggacggcggaaatgtcccgcctgaagagctggcagcagctcgccggcgaatggatcccagaacgttcaggcaggaatatgaagcctcgttcgaaaactatcagggcgttgtctattactgctttgatcgccgtaaaaatcatactgatgagatcgttaaacctggtgaagcgcttcatattggcatggactttaacgtggggaaaatggcggcagtggtatacgtgctgcgtgatggccttccccgcgctgtagatgagtttatggatattttcgatactccagcaatgattgaagcgattaagacgcgatatgcagaagggaaacacacaatcagtatttaccctgatgcttcggggaaaaaccggaagtccagcaacgccagtgagtccgatatttcacttctctatgatgccggattctctgtgctggttaacgacagcaacccggcagtaagggacaggataaatgcggttaactctatgttgtgcaatacctacggtgagcgcaggatgatggttaacacggtaacctgcccgaaattcactcaatgccttgagcgacaggtttataacgataaaggcgagcctgataagaaaggcggctttgaccacggcaatgatggcggtggttatccaatcgtgttcctgttccctgttaacgctacagcgttcgacatcaccctcgatacgacattctga

SEQ ID NO: 75940 - DNA, 1404 bp, Citrobacter koseri
atggctaataacgacattacatttgttcgccctgaggtcagggcggcgttgcccgtgtggaaaaaaattcgcgatgtttgtaagggggcggacgccgttaaggctgacgggaacgcgtatctcccgtatctcgatccctccgataaatcatcacggaacaaaaaacgcaacgaggcgtacattgaaagagcagtgttctatgcggtaacgggaaatacgaaaatcggcctgatgggccttgcctttcgcaaagacccgactctgaccgcaccggaaaagctcacctacgttcagaacaatgctgatggtgccgggacaagtatctaccagcaggcgcagcaggtgcttgaaaatgtccttgaggcggcccgtgacgggctttacgttgattacgccagcgccagtgatgaagccattattctccgctatctggcagagaacatcatcaactggcgcacggaaaggattaacggacgcgatcagctagtgctggtggtgctgcgcgaatgcattgaagagcctgacggttacggatttcaggaacgcatccagtatcgtgaactggcgctgaaggagggaaaattcgtttgccgggtctggcgtaggtcgggtgatacgcaatctggggcatatgaagtcagcaccgagtactggcctaagcccaaaggagaaaactactgggatgaaatcccgttcacctttgttggtgcgcaaaataacgatccgacaattgatgaatccccacttgcagcgctgacagaaatcaatctgggtcattaccggaattccgctgactatgaggacagtgtgtttttctgcggtcaggtgcagccagttattactggtcttgatacaaactggcgagactggttgcaaaaggctggcattaaagttggttccagaacgccattcttacttccgaaagacggaagtttcacctacgcacaggcgcaacctaataccctcgctaaagaggcaatggacagcaagcgtgattatatggtgcagctcggagcccggttaattgagcagaattctgctgtcaaaacagccacgcaggctaccggagaacagacgtcatcgacttctgttctgggtatctgcgcagcgaacgtcaccgaagcctatggtcgcgttctcgcgtggtgcgcgcgctatcttggtgtgaaaaatgaaacaccgacattcgttatcagtcaggaatttatcgccagagtggctgagtcagggatcgtaacggctattgttgcggcatggcagtacggcgcgattcgtgattccgatatggtacgtgcgttgcagaaactggacatcattgaccccgcagacagtgttgaagatgtgatcgacacaatccgcaatcaggagccaacgttgatcggaggcggtaatggcgacggttaa

SEQ ID NO: 75941 - DNA, 144 bp, Citrobacter koseri
atgaaactaacattaattaaccggctgaaattgtgctgggaaatactaacggtaaaaagcgggcatgcacacaccgcgcaagagaagcaactctctacatttcagcgcggataccgtgctggcttaaaagacgcaggtatttaa

SEQ ID NO: 75942 - DNA, 252 bp, Citrobacter koseri
atgaaattccgcaaaaagccggttgttattgatgctgttcagtggaccggaacaaacacgcaggagatttacgatttctgtaactcaggcagtcgggactgccatgttatgggggatgatctgctaattaagacactggaaggcaccatgacagcaagcgctggcgattacattattcgcggcgtgaatggtgaacattacccctgcaagccggacattttcgataaaacctacgagccagtcgggttgtga

SEQ ID NO: 75943 - DNA, 477 bp, Citrobacter koseri
atggctgctccagaaaacaatttacattacgccggtaatgaattgattattcatgattcaggtgacggacccgatcagttttatcgctatgttagtccgaacgacctaacaaatgctgaattattgaacgcgctgcgcgatgttgttgagcgcaatggcattggatacatagaaccatccgatacggtagtacgcgtcggtgctcatgttggtccatgcaaagatctatttaaaaaattcagtcagcatgaaacgatgactgttatcgttgatggcggatacactaaagtcggccaggttgatatggattcacaaaaacaaagagaccttattgcaagcctgcatgaagagttagtaatcgcaaggggactcattaaagagatttgcacagtgcgaagcattgcggagccaaaggcttctttgcagagaatggataaagccattaaagatgcaaaagatatgcttgaaaatatctaa

SEQ ID NO: 75944 - DNA, 789 bp, Citrobacter koseri
atgcttattcgtaacatgctcatcaaatattattcggcggctggtggtgaaggtggtgaaggtggcggtggcggcggtgaaggtggcgcaccagaaattacgccggaaattcagaagctgattgatgagcaggtatcggctcaggtgtcagggctgaaaaacaaaaatacagagctgctcggaaagctcagggagtcaaccgagtccctcaaacgttttgacggtatcgaccctgacgctgttcgcagcattctgcaacgtttttccgacgacgaagaagcaaagctgatcgccgatggaaaaattgatgaggtgctgaacaaacgtactgaacgtttacgcgctgacgttgataagcaaatcaaggccgctaacgagcgtgcggataaagctgaagcgttctcgaataaattccgggatcgggtgctggctgatgcaattcgcgcggcggctgcaaccgtcggcgcgctgcctgaagcgtccgacgacctgatcctccgtgccaaaggcacattccagctcaacgacgaaggcgaggccgtagctgttgatgcaaacggtgatgttctgttcggcaaagacggcaagaccccgttaagccctgctgagtgggcggaatccctgaaagaatccgcgccgcacctgttcccccgcgctgaaggcacggatgcaggtggtcataagcagcagggaagcggcgctcttaaacgctctgaaatgacatcggccgataaaacagcctacatccgtaaacacggacaacaggccttcctcaggttaccaaagtaa

SEQ ID NO: 75945 - DNA, 948 bp, Citrobacter koseri
atggctacgaccgttaatactgatctgattatttatgacgatctcgcgcaaactgcgtttctggagcgccgtcaggataatctggatgtttttaaccaggcgtctaatggtgcaatcattctcgataacgaactgatcgaaggtgatttccgtaagcgcgctttctataaagtcggcggttctatcgaagcgcgtgacgttaactctactgacccggtaacgggtaaaaaaatcggcgctggcgagtccgtcagcgtaaaagcaccatggaaatatggcccgtacgaaactacggaggaagcgttcaaacgtcgcgggcgtgatgtgagcgagttttctgaggtgattggtgtcgatgtggctgacgcgacactggagggctacatcaagtacgcgcttcaggggctgattgccgctatcggtgccaacgctgatatggtcgtgactgcggatattgccactgatggcaagaaaacgctgactcgcggtctgcgcacctacggcgataaattcaaccgcgtttccctgttcgttatgcactccactacctacttcgatattgttgatcaggctatcgacaacaaaatctacgaagaagcgggcgtggtcgtgtacggcggccagccaggtacgctgggtaaaccggttctggtgaccgatacgatgcctgttgatgcaattctggggctggtggccggtgctgtatcagtaactgagtctcaggcgccggggttccgctcctatgacatcaacgaccaggaaaacctcgcgatcggctatcgcgctgaaggtacggtgaacgtcgaactgctggggtacagctgggataccaccaaaggcgaaaacccggaccttaccgccattggcacgcaggggaactggaagaaacacttcaccagcaacaaatccactgctggggttttgattcagctcggcggcggcagctaa

SEQ ID NO: 75946 - DNA, 204 bp, Citrobacter koseri
atgaaataccagatagcgaagttataccgtggagaccatttccttggttacggtattgccgtggatggtcaactactggatggacaggcctcgaccagcattaacaccgaaataacttccttgccaacggtcacagtggtttttaacctcaataaagaccacgccgaaaatcaaatcaccattgaccttgacgagaaggtataa

SEQ ID NO: 75947 - DNA, 1461 bp, Citrobacter koseri
atggatgtcattgttggtggggttccttatgtccgcgccgatagcgtttcccataataaaatcggaatcgcgataaccactcataacaggccggatgtcctcgcaagatcacttgagcaacatcgaaaatatttacctcccggtgcggtcgtgttcgtcattgatgatggttcaaatccgccagcaacagctccgggttggtgtaatttaatccggcacgataattcaaaaggcattgttgcttcgaagaacgccagtcttacagcgctgatggataccgggtgcgaacaccttttcctgtgggacgacgacgcatggccgattgccgatggctggcatcttccgtatatcgaatcacccgaggcgcacctggcttaccagttcctcgaccttgccggaccgcgaaaacttaacgatctcgctgtgctttatagcgacgataagcatgtggcgtataccggacagcgcggcgtgatgctttattaccatcgcagtgcgatcgagaaggtaggcggatttgatccggtatacgggcgcggcatgtacgaacacagtgaccttgccctgcgcatccataacgctggcctgactacttgggcttatgccgatgtaactggttccgaaaagttgattcattcgctcgatgagcatgaagccgtagaccgttcagtaccaacggcagaccggaaagcgctggtggaacgtaatgtaaaaatccacaacgagcgtcgcgataaggggtataccggctatgtcgaataccggcgccagcgcgacgttgtgatcacaacattactgacgagccaaccggacccgcagcgcggtagcagaatgcagcctgacccggccgcgctgaccacctgggctaaatcaatccggggtgccgatgccgtagtgctggcagaccagctaacctccgctcccgatggtgctcaactggtgacagttccagatgtcgcaatgaacgtctacttccggcgctggctgcatatctggcagcacctgcgcgatcatcctgaataccggttcgcctggtgtaccgatggtactgatgtcgaaatgctttgcgcgccgtgggaagagatggaggccggaaaactctacgttggttcggagccgaaaacctacgctgacgcatgggcgaaacagaatcacccggaacgcatctatcaggagtttatcgaacagcaccgcaacgatgtgatgcttaacgccgggctgctgggcggtacgcgcgcagatgtaatggcgttcgctcacggcatcatccgcctttactaccggattgagagctaccgattctggaagaaagagcaggctggcgccgcagtgggtgacatgctggcattcggcatcgtggcgaagtctttgggggatcggatagtaaccggcccgcgcatccacacagtgttcaagtctgaaggtaccggtaaggagtacgcctggtggcgccataaatag

SEQ ID NO: 75948 - DNA, 582 bp, Citrobacter koseri
atgactaaaaaatgttgcgtgaatgactgcgataatcgttctgaaaaaagaaggatgtgtggaaagcactatttcagatggcggaaatacggtgacccattggttgtgcggaacacagtttatagctctccacaggaagcaattaaggccaggacaaagattgaaggcgaatgccaggtatggactggagcaaggttaaaaacaggttacggcagcatacgaactggcggtaaggcattacgtgtgcatcgctttgtttgggaatccgtgaatggtcctgttcctgatggaatggatgtcgaccatatttgtcgcaacaggctctgctgcaatatcaatcacctcaggttggccagcagaagtgagaacaatcagaacctcggcggcgctaagaaaaatagtaaaactggagtactcggggttacttatctaaatcgcggcaacaggcgctggcttgcgcaagttaagctcaatggcaagtttgttctaaggaaaacattcatgtcacttgaagaagccagggacgcagctgtagccgccaggcttgaacacttctcacacaatgaggctgacagatgttga

SEQ ID NO: 75949 - DNA, 582 bp, Citrobacter koseri
atgttgatcgccatcgtggctcaccactctcgccgcatcatagctgatgagttagcgagtcagcttgatgctgacattgtcttcatggatgagcatagcgctggtgcaaatgcaaatcatcttcgcgctcttcgttgggcagttgagcagtcagacagagtgattatcatcgaagaggatgcattacccgttgatgggtttcgtgaaaaggtattcgactggcttaaccgcttccctgattccctggtgagtttttacctgggaaccgggcggccacctcagtaccagatgcagatagccgaacggctgatagttgctgataagactcgggcagacttcatcacgttgccgcgattgatacatggcgtttgctacagcgtcccgccccagcatattgagcgcgtgttatctcgatgggacagcagtaagccagccgattatgccgtgggtgatgcctggggtggttcagtagtctatccgtgttactcactggtggatcatgccgacggtgaaccggtagagcgccatccagacagaacaccgcgcacagagcgccgccgggcgtggagattatctcaatga

SEQ ID NO: 75950 - DNA, 396 bp, Citrobacter koseri
atgacaacctatataaccgtcgctgatgttgaccagttgcttggtgaaaactggactgagccagataaaaaagcaaaagcggttctgatggctaatgcctggatgacaagcctcaatcttcaggatatcgacctcaataatattcctgatgatgtaaaacaggctggcgcatacgcagcttccgtcgcggctgttggaaacctttaccaacagaaaaccagttctggcgtcgttacgagtgagtcagttacagcggatggagtgagtgtatctgaatcgtatgctgaattatcggtagacagttcatcacttcttgaccctgatcttcaactggcgctggcattgctgggcccgtggcggctgagtccttttcaaacgtactttgtgagggcttga

SEQ ID NO: 75951 - DNA, 201 bp, Citrobacter koseri
atgggcgaagtagtcaacattgaaccgcgcaagccgcatgtttgcctacagacttctgacggcaatgtgcatgtcattccggtatcccttatgcgagcgatcgctgatgggaaaatgtcgccagatgacattgctgacagggaccaggtggtcagggcgattatcgctgagtggttgaggctgattcatgggaattcgtga

SEQ ID NO: 75952 - DNA, 381 bp, Citrobacter koseri
atggcgaacgggtggagtatcgacccttctgtttttatgaatcaggttgaggaagacgttggtaaaaaattgcgttttatctcgcttcagttgctgaatgaaattgtctctcgctctccggtcgataccgggcgtttccgtgcgaataatcaggtgagtattggctctcctgaatacggcaccaccgatacaacagataaaaatggatcggcgactttgcagcaaggcagcgctgttatagcgcagggaaaaccttattcagtgatctacattcagaataacctcccatacgcggaacctctggagaatggtcactcgcagcaggctccggcgggtatctacgctgtctcattccacggtgtaacacaggcctacaaatga

SEQ ID NO: 75953 - DNA, 393 bp, Citrobacter koseri
atgaccctcacagaaattcgtaacgctgtcattgctcgtatgacggcgcagacggctattgctgaaagtgacgtgacataccctaacgacccgacattcgacccgaaaggaaaggatatatgggcgcgtgtgacaaacatagccggtcaggcaggcgcgacggaaatcggcgcgggccccgttgtacacagaacggggattgtcattatccaactttttgttcccaccggctctcactcattaccaataactcaggccgccgacaaaattgtttctttgttcgagttccaggatgacggcgcgctgagctatttcgctgcatcagcatacgaagtcggtgatgccaatggttggtatcaatggaacatcaacatcccttaccgcgcgacttag

SEQ ID NO: 75954 - DNA, 555 bp, Citrobacter koseri
atgattatcctaacaccacgaattgatgttggcggcgagcgctggttttttccgtataagcgagacgaaaaacgtacgaaaccgtacacagaggaagaggaggcgaaattcagactacgcctgcttgtcgtcagcagtgaaaaccctcaatttcgctcaatgaacgctctggtgcgccgtcacatcgacaaactggatgccagttatcatgtcggcactaggcagttcgacatttccagcgtcggtgatatcgactccattgacgatttgctgattaataactgcgcacgccacctactcaaagattgggagggcgtaggagagttgatcgacggtaaggaagtcccgatcgagtactcgccagaaaacggtatcgcattactcaagcagaatcctgagttgtactggatggtactggctgaagccgccagcatcgcccagggcaaagagcggcaaaagcaggaaaccgtaaaaaagccatcgaagcgcaacaatggttcagcgaattcggcggggagaagggcgaaaaggcaaagtggcgaagggagaaattaa

SEQ ID NO: 75955 - DNA, 3159 bp, Citrobacter koseri
atgtcagaacagacatcccgcctcgcaataattcttgacagtacgggcgcgcagcgcaacgcagataaccttgctactgcattagttaaaattacccaggctggtgaacaggcagaaaaagccactgacgatctgagtagcgccaccaaagacctgaacgcatggctaaaagtcggaccgaaacacgcaagcgaaaatgctaaggctacggatgaacagcgcgaggcattaaaaaagctacgcgaccagatagaccctgtgggggccgcccttaacaagcttgatgaccaactacagcagcttcagagtcattataaggctggtattctccctgatgctgatttcgaagatttatcaggaaaaatacgtgagacagaaaaagcgttaaatggcgaggctcgggctgaaagagaagcggcaatagcgcgtgagcagcaaagtgcttcactaaaaagactggtcgctcagcttgatccagttggcgagggattccgccgactagcggagcagcaaaagcagctcgactctgcgaaatcgtcagggctgctttcccctgagtcatacgcaaaactttccggcacgctcggtgaaatgcgtaccgagttagaaaaaacacaggcgcagttaggcaaaactggcatgtcagcaaaacaaaccgcttttgcgatgcgacttgttccgatgcaaatgaccgatatcgtcacaagcttagccgcagggcaaccaccattgatggttctgttacagcagggcggccagcttaaggatatgtttggcggtattggtccagcagccaaggctatggggggatatattcttggactggttaaccctttcacgctggcggctgctgcggtcggcgtgctgggtgtggcgtactacaaaggcacgcaggaacaggacgctttcaataaatcactcatcctgacgggtaaccaggtagggaaaacatcgggtcaactggcggacattgccgcgcgcgctggcgtggcggcgaactctaccactggcaaagcagcatcagcgctaaatctactggtggaatctggaaaggttgccggtgattcgcttgagcgcgtgaccactgccgttgttaaaacgagtgaagccactggtattgcgaccgataaactggtggacgatttcaacaaaattgccgcagatccggttgaggcaatcactaaactgaacgatcagtatcacttccttacgctggcaacttacaaccagattaaggccctccaggatgaagggaatcagcaggaagcggcgcgcgttgctactgatgcttacgccaccaccatgcagcagcgtgccgcagatattcaggataacctcggttatctcgaaaaggcatggaacggactcaccggcgcagcaaaaggcgcatgggatgcaatgctgggcgttgggcgagagcagtctcttgaacaacgcttggctgatgcaactaaaaaggcaaatgatgcgcgcggcaaagccgtgggtaatattttcggtgtgccagggtggcaaactgaagcagcagcagcggctaattttctgcaaagtgctatcgacctgcaaggcgaccttacaaaagctgtcgcggctggcagagaagagcaggataaggcaattaaaatacagcaggaagctgatcgcgttaaccagcagttcctgtcgaatgctgataagcgaaacaaggcgattcagcagcagaagaaattccttgatgccggggccatcagtgaagatcagtacgcgaaaaatatcgcgcgcatcaatgaaatgtacaaagaccctaaatcgccaacagcaccgaagggaaaagcatatagcgaagatgccgcgacacgactactggatcagattaaccagcagaccgccgcaatgcagtcccagcttgacgccagcgataagctcaccagcgccactcaggcgcgagtgaagtttgaacagcagatagctgacctcaaatcgaaaacgcagctcaccgccgatcaaaaatcgcttttgtcccgctctgaagaaattgttcaggcctacaagcgacaggagacgttgcaaaactccgttaaaacgctcgacgattaccggaaaatgcaggaacaggttaaagcgaaggatgagcagcagaatgatttgcttcgcgaacggcttgcgctgctggaaaaagcaaaagccacagggaagctggctccgggggaatacgagcaaacccgatctgatatttacaaaaacaccccagcggagttgccttcttcagtgaagagtgtggttggcaacctgtcaccgactggcggccagttatccggcacgttcggcggtatgcaacagcagtacatgcagatcgatcaggcgcaacagcagttacagacgtggttgcaggctcaggaagcggcatatgcccaggctgcgcaaatcaccacggaaggcgaagcgcgaatgacggcaatccgccagcaggcggcgcaagccaaccaggtaatcgaatcccagaaaaacgaaatcatcaccagtgcgacgcaaaccatgatcgacagtggtttgcagattctggcaactggtttcggggagcagtccgggatttataaagcggcgttcgctgccagcaaggcattcgctattgcacagtctctggtttcgatccagcaggggattgcaatggcggcggctaacccgttcccgtacaacatcgctgcgatggcatccgttgcagcggcgacggcgagcatcgtttctaatatcgcagccgtagctgatgttggattcaaaggtggtggttacacaggcggttcaagcattaatgatgtgcgtggtctggtgcatggtaaagagtttgtttttgatgctgcgtcaacgaaaaacatcggcgtctcgaatctggaatcgatacgcaagaatggtctcgacgccacgttatcaaagcccggtttcggtacgggggcgcagaacgtcaataacaacagtaattcaactgtattcagcccccagattcagcaggacttctatattcagcagggtgtaacgcctgagcagatggatatgtctctcgccaacaccgccaaaaaggcgacgacggacgcagttgatcaggtggcgaaccagattgtccggggtaacgggaaagtgggtaacgcaatgcgaggaacgtacaccggaaggagaacgacctga

SEQ ID NO: 75956 - DNA, 2562 bp, Citrobacter koseri
atgacgacttataacaccaacgaacctctcggttctgcatccgccaaggttctttatgataacgcccagaattttgatcacttctcaaatgaccgggtcaatgagacgtgggatgaccgttttggcgtgccgcgccttacctggcatggaatggaagttaaacattcagaacaaatggattcattcgaaaatgagtttaataattttcttgtaaactctggatatcagttccttggtgactacgaagatgggccattaacattctcggcgagaaaccagtacacgcgttacgaaggacaatactggaggctcaacacggaaacagatgttccatttacaactactggtacggatgctaccagctgggaattggacgtaacgcatttttctcttattgatggggatacactcagacaggaaattactaacggcacgttgccgtatggtgaagacactataggtaacatttttggccgtacactgaagtattttggcgccgttggtgatggggaaacagatgatacagccgcgctattacttgctgacgaatggagcatcagcaccggtcgtccggtttatgttcgggctggggagtataaaattttaaacgccgaaattggtggccattatattttcgattctggcgcatggattgttaacgaaacattaggcgcaactgacaacatattaatttcgaggaattctttgaaactgcatggattgaatgctcgtgttggatgtatcgcgtggcctaccagtggtaactacggtaatgcactgctcattggcggttattatcagccggcagatgattccggtcttgtgagtgatgttgaggtatatgattttaccataatcggaacgacgactgcctttagtgggcaggcgatggagggattagggaacatagaaaacgtaaaagttaagcgtgggaagtgcataggacaaggtaccggtatgcttttccattggggaggtgatgtagatctatcaaacccacatactggcaccgttacgtatagccatcacccgagaaatattgaggttgaagatgttcaatttctaagtgcggatggtgtaactccccgtgcaattggtctttatttcagcgcttgctacaacgtaaaggccaataatatttatggggaaagatgcccagcactgattagcgcaaagccgggtgatgtttatgagcaggttgctgtggcgcgagataaagggaaagtccatacaggtattgatattcgcaattgccactcacgattgccaccagataccaatagcgcaatgatagcgattactggagttccagatacatatcgtacaacagagacaagactttctgctcttgacccttcatcgccatcggacataaatgcagaaaatattacagtagatctcggaacagcagcatatacgaacccaatgattcttgtccggggtgccaaaaatgtaaaaggttcatttaatgttgttggcggaaaaaacacggtgaatccatgggctttaattgactacacggtaaaatctaaaataagggtttctggttcgtgtcctggtggggttagtggaagggggtatagctcttcagtttcagatcatgcacaacattgtgatgaatcagtcacgtactcatcatctatggttggttttaaactgcaaacatttacccaaaccggtattacgctacagtctgctgtatcggtaggcaacacatccgtcagcgttcagtcaacagcagacgctataattttctatggtgccatgctttacagtggagccgcctacataggtaaagtgacgagaacaacctggcttaccgccggagtgacaaataccattccagttaccaagtcatccaatgccgtatcctctgggtcagcaattacatcatatctgacatctgaaggcctcaaggtaaccggcacaatttcagggtttatgtataacatacaatctactaacacatggggaattgatttcgcagtaaacattgaaagaggttatcgcggaggcattctttgtgatggtacatattgtcgctctgctaaattctcaggttcttacgacggcgttggctgggaagatggtgccgcagtaaatgttaatatccatgtgacagcaacaactgtaagaaacgttaccattaatgggtgccggtttgatgctgacgaaacaaatccgaccatcgataaccatgttttattctcaacgacaggtcacgccggagttattatttcagagaacaccgggacaaatccaagcgccgttgcgttcagtatcggaaactcgacagttgcagaagcgtattcgatgcagcagatcttcggcaaccatattaatgggattcaggcaccagtagcaacagcaacaggtctctatgtcggtggctattacagaggtgctgtacgtaacaatgctgtgccaacagctgggtactggaacgttggcgataaacttgacagggtaactatagtggctggaggtcaggaggggtgggtttgttccgctgctggctcaccagggacatgggtaggttatggggtagtcgcatcctcatga

SEQ ID NO: 75957 - DNA, 1773 bp, Citrobacter koseri
atgagattaaaaaacttgcaatgcagccttccttttgatcttgtgtatttcgcaccaattttttgcgggatatttgtagtcatatcttctaataaaatattcaatttatcactaactgacattatattatatgtatcttcgtttgtaatagcgattagcctctacgtcaggatcgcaatcggtgcgagcactaaatgcaaattaggatataactcattgttcgtatttgccataagcatattgatcataacttacgcattgagtttctatgactcaaatatgaataagtattttagcttcaatccaatttttgatgttgataattataatatttggcacaaagatagcgcttacaacctagcaataattcaaagcattattaactttggatatccaagcataggattagacgggcatgcattgaccacataccacgtattaagtcattatgtagatgcattacttttaaaaatatcagggttgccaatatacgaatcctatgggttctcatcatatgtcaaagccgttttccttatttgttcgatatatgtattttgctaccaatattctaagaatataatatcctcatcggtcgcattcctttttattagcccttttattgtcgcatcatggcatgcaattaactctcatgctctatggctaccaagcttcattcttgttttttctgcgagatttacatttaacttcctataccagtccgaggttccaacctttaaaaaatataacattattgcaataatttctgcgctgctatgtctgggtaaaatatcaactgggctggcgtatatcaccattgtattttcagtagcctttataagagacttaaaaagcctgaagttctatttttatgccgtcactctattattatttattgttttttatcaaaaagtaataaactattcgtatggcatcccagcggttttggaactacaagcactatcaccaacagtaatttaccatcatttattaaataccgatatccgctacgagaaattctttattccttttatcgccgcaattatatcactgagaatttgcatcaaatcagaatttcttacaaggttgatctttggagttatttgttctttttcctcaatctttgtcataacccaaacattcacctcatttaactggagcgataaatattatttcttccaggggctttattcagttacagttttgcttttttgctcttatattctaacatgggccaatgcatcgaaagaagaaaaaaaaataaaacatctcacgtcttttgctcttatttcacttctttcattctttgtatatcaacctgtatattcaatagcaagcattaatgcaaaaagcattgtgagtaaatttgaatacgttaaaataaaattattcaaaccacataaaacagacgttaacgggagtatgtattctttaaagcaatacgtatatcaaataaaagaagggagtcacctgaacaatagagatatagcgttattcatcccaaaatccgttattctaaaccaggtaattaaaataaacgatgggaataaaaacttccataccatgaatatctatgctgcaactggcattcaaataataaatggtttaataggaaatgagagggcctatggattgattaattatggaaaacaatcagcccttaaggaaagcattgattatagttatgaatgttcaaggttaggggttaaggcgataatcacagtggaaaattacacagaaaaaaaatatctatatcacctgtgtgacggccaataa

SEQ ID NO: 75958 - DNA, 951 bp, Citrobacter koseri
atgaaagcgcctgttctttccattgttgtgccttgctataacgagcaagatgtttttagcctttgtcttaatgagttatcatctcgtatgagtgaaatgaaagacaaagggaaaatagacagagaaagtcatatagtctttgttgatgatggaagcaaagataatacctggcgattaatagaagaagcatcaagtgacagttgtctggtgaaaggggtaaaactttcacgaaataaaggccatcagactgcattgatggcagggttatcatcatgcactgcatctgacattactgtaagtattgatgctgacttgcaagatgacaccgctgtgattgaaaaaatggttgactcctatctctctggtcacgacatagtatacggagtaaggaacgacagaacctcagatagtttttttaagaagtttacagcagaagcattctataaggtaatgaccaggctcggtgtaagtcaggttgaaaatcatgctgattttaggctgttaagtcgaagagcgctcaactcccttttacagtataaagaacaaaacctatatattcggggtcttatccccctgatcggatatccgagcgataaagtgtactattctcgtcatgagcgagcagccggagaatcaaagtacccgctcagaaaaatgctggctcttgcacttgaaggaatcacatcgttttcggtaacgccattaaggatcgtaaccgctttaggtttcattatttctatactttcatcaattggagttatatatacccttgctcagtattttcttggacataccgttagtggatgggcgtcgatgattttggctgtcctgtttatagggggggttcaaatgctttgccttggtgtaatcggtgaatatatcggtaaaatttatatggaatctaagaaaagaccaaaatttttcattgaacagaagaaaggatttaagtaa

SEQ ID NO: 75959 - DNA, 1578 bp, Citrobacter koseri
atgaattcttcctttgaatctctgattgaacagtatcccttacccattgccgaacagttgcgccactgggcggcccgttatgcctcgcgaattgccgtcgttgatgcaaagggatcgttaacctacagcgcgcttgatgcacgggtcgacgaacttgccgcaggtctgtcatcactgggtttgcgttcgggggagcatgtaattgtgcagcttcccaacgacaacgcgtttgttaccctgctgttcgccttgttaagactgggcgttatccccgtgctggcgatgccctcccaacgggcgctggatatcgacgcgctgattgagctggcgcaacccgtcgcttacgttattcacggggaaaaccacgcagagctggcccgacagatggcgcacaaacacgcctgcttgcgtcatgttctggtcgctggagagaccgtgagcgacgattttacgccgctcttctcccttcacggtgagcgacaggcatggccgcagcctgatgtttccgccaccgcgttgttgttgctctcaggcggcacaaccggcacgcccaaactcatcccgcgccgacatgccgactatagctataacttcagcgcttctgctgaactgtgcggcatcagccaacagagcgtatatctcgccgtcctcccggtggcgcataactttccgctggcctgccccggcattctgggaacgcttgcctgcggcggaaaagtggtgctgaccgacagcgccagctgtgatgaggtgatgcctttaatcgcgcaggaaggagtgactcacgtcgccctggttccggcgctggcgcaattatgggtgcaggccagggagtgggaagacagcgacctttcgtcgctgcgcgtcattcaggcaggcggcgcccggctcgacccgacgcttgctgagcaggttatcgccacctttgactgtaccctgcaacaggtcttcggtatggcggaaggtctgctctgttttacccggctggacgatccgcataccaccattctccacagccaggggcgcccgttgtcccctctggatgaaatccgcatcgttgatcaagacgagaacgacgtcgcgccgggcgaaaccgggcaattgttaacgcgcggcccttataccatttcgggctattaccgcgcccctgcccacaacgcgcaggcctttaccgcgcaagggttttaccgcacaggcgacaatgtcaggctggatgaggcggggaacctgcacgttgaggggcgcataaaagagcagatcaaccgcgccggagaaaaaatagccgcggctgaagtggaatcggcactgctgcgtttagcggaagtgcaagattgcgcggtggtcgccgcgccggacacgctgcttggcgagcggatctgcgcgtttatcatcgcgcagcaggtgccaactgactatcagcagttgcgtcaacaactgacccgtatggggctcagcgcgtggaaaattcctgaccaaatcgagtttctggaccactggccactcaccgccgtcggcaagatagacaaaaaacgcctgacggctctcgccgtcgaccgttatcgccattctgcccaataa

SEQ ID NO: 75960 - DNA, 1317 bp, Citrobacter koseri
atgaaaatcagtgaatttctacacctggcgttaccagaggaacaatggctgccgacgatttctggcgttttacgccagttcgcagaagaagaatgttatgtctatgagcgtcaaccctgttggtatttaggcaaagggtgccaggcacggttgcacattaatgccgatggaacgcaggcgacatttattgatgatgccggggagcaaaaatgggcggtggattccattgccgactgcgcgcgtcgttttatggcacatcctcaggtgaaaggacgtcgggtttatggacaggttgggttcaactttgcggcgcatgcgcgggggattgcctttaacgccggggagtggccgttgctgacgttaaccgttccccgtgaagaacttatttttgaaaagggaaatgtcaccgtttatgcggactccgccgacgggtgccgacgtttgtgcgagtgggtaaaagaggccagtacaacgacgcagaacgcaccactggcggtggataccgccctcaatggcgaggcgtataaacaacaggttgcgcgcgccgttgcggagatccgctgtggcgagtatgtcaaagtgattgtctcgcgcgccattcccctgccatcgcggattgatatgcccgccacgctgttatacgggcggcaggcaaacacgcctgtgcgctcgtttatgttccgtcaggaaggacgcgaagcgctgggctttagcccggaactggtgatgtcagtgacgggcaataaagtggtcactgaaccgcttgcgggcacccgcgatcgcatgggaaacctggagcataataaggcgaaagaggcagaactgctgcacgacagtaaagaggtgctcgaacatatcctttctgtcaaagaagctattgctgaactggaggccgtttgccagccgggcagcgtggtggttgaagatttaatgtcggttcgccagcgcggtagcgttcagcatctggggtccggcgtgagcggtcagcttgcggaaaacaaggatgcctgggatgcgtttaccgtgctgtttccatcgattaccgcctcaggtatccctaaaaacgctgccctgaacgcgattatgcaaattgagaagacgccgcgagagctttattccggcgcaatcctgctgctggacgatacgcgctttgatgcggcgctggtcctgcgttccgtatttcaggacagccagcgcagctggatacaggcgggggcgggaatcatcgcgcaatctacgccggaacgagaactgacagaaacccgggagaaattagcgagcattgcgccttatttaatagcgacagagcaggggtag

SEQ ID NO: 75961 - DNA, 4068 bp, Citrobacter koseri
atgacgcagcgactggtcattatcggcaacgggatggccgccacccgtctggtggaggcgctgctggcgcgggcgccgcaggccttcacgataaccgtggtgggggaagaaccgcagcatgcgtataaccgcattcagctttcgcccgtactgggcggcgaaaagcgctttgcgcagacgctgctgcatccgcctgagtggtatcagcgccacggcgtcacggtgctgacgggggaagccgtcatcgccgttgacgcgatagcgcgtaccgccactaccaccggtcgaacgctggcgtgggatgcgctggtgtttgccaccggctcggttccgtttattccgccgatccccggcgctgatttaccccatgtgcatgcttttcgcacgattaacgatgtggacagcatcctgcatggctgcgggccggttgccgtgctgggcggcggtgtgcttggcgtcgaagcggccgccgcgctgcgactaaaaggtgacaatgtcacgttaattcatcgcggcaatcggttcatggagcaacagcttgatgagcaggccggggaactgctggcggaacaccttgccgcacgcgggattgactgcgtgctgtcgtccggtatcgacaggattacgcctgatgacgtcacgttgacgaacggttgcgtgctgtctgcaacgcgcgtggtgattgccactggcgtaaaacccaatacggcgctggcgctggcaagcggggtgtcctgtcagcgtggaattgtggtggacgggcaactgcgcacggcggtggcggggatcagcgcgataggcgagtgctgtgaaatcgacggccagacctgggggctggtcgcgccctgtctggcgcacgcggaggtgctggcggctcgcctggcgggaacccccggcgctgattttcactggcaggacagcggtacgcgtctgaaggtgacgggcatcgatctgttcagcgccggggaggtaaacgccacggcaggtgatgacctgctgcgcacatttgacccgctgagcggtcattaccgtcgtctgctgatccgcaatggacggttacagggggtgctgctgatgggcgattgccgcagcgccgcgccgttgactgatttgctggcgcaggctgcgtcggcgaatcctgactggttattcgacagattcgatacgcagcctgcggctgcaggacaggtgactatgacaaaacccacgttggctgttgttggacacggtatggttggccaccattttcttgagcaatgcgttagccgcaatctgcatcttgactatcagattgtggtctttggcgaagagcgttatgccgcctatgaccgtgttcatctgtcggagtatttcgccgggcgcagcgcagaatcgctctcgctggtggaaggcgatttttttgcccgctacggtattgaactgcggttgtcgcaatgcgttacggcgatcgatcgggatgcccgcgttattcgcaccgccagcggacatgaaacgcactgggataaactggtgctggcaaccggatcatatccctttgttccgccggtgaaaggcggtgattcggcggcgtgtttcgtctatcgcacgttggacgatctggatgcgattgccgcgaaggcaaaacactctcgccgtggggtggtgattggcggcgggctgttggggctggaggcggcgaacgccttgcggcaattagggctggagacgcatgttgtcgagttcgcgccatctttaatggcggttcagcttgataacgctggcgcggcgatgctgcgtgaaaaaatcgaggcgctgggcgtgagcgtgcatacctcgaaatccactgcggaaattgactccaccccgcaagggttacagttggtgtttacggatggtgagcgtctggagacggatatggtggtgttttctgccggtattcgcccgcaggatgcgctggcgcgcggcgccggacttcgtatcggagaacgcggcggggtgtgtattgataaccactgtctgacctctgacgcggatgtttttgccatcggtgaatgtgcgctctgggacggcagggtgtttgggctggttgcgccgggctaccagatggcgcgcgtggcggcagcgcagttggccggtgaagatgcggcgttcagcggggcggatatgagcaccaaactcaaattgctgggggtggatgtggcctcgttcggcgatgcgcaggggcgcacgccaggcgcgcaaagctatcagtggacgcatggcccggagcaaatctacaaaaaaattgtggtcagcgcggacggcaagacgctgctgggcggcgtgctggtgggggatgcggcggattacgccacgttattgcaaatgatgcttaacggtatggcgctgcccggacagccggaatcgctgattttacctgctttggcgggcagcgcgccgaaagcgttgggcgttgcggcattaccggacagcgcgcaaatatgctcttgtcataacgtcagcaaggcggacatttgccaggcggtcagcgcgggcgcaacggagatgggcgcaatcaagcagtgcaccaaagcggcaaccggctgcggtgggtgcagcgcgctggtgaaacaggtgatggagttccagctggcggcacagggcgtggaggttaaaaaggatatctgcgaacactttgcgtactcgcgacaggagatttaccacctggtgcgggtgaaccgcatccacacctttgagcagttgattagccgctatggtcgcgggcatggttgtgagatttgcaaaccgctggtgggctcggtgctggcctcctgctggaatgagtatctgctaaaacctgcgcatctgccgttgcaggacaccaacgatcgttattttgccaatatccagaaagacggttcgtattccgtcgtaccgcgcatggcggcaggcgaggtgacgccggatgggctgatcgccattggcgaaatcgccaaacgttatcagctctacagcaaaattaccggcgggcagcgtatcgacttgtttggcgcgcgcctcgaacagctgccggatatctggcgcgatctggttgccgccggttttgaaaccgggcacgcctacgggaagtcgttgcgcacggtgaaatcctgcgtcggatcaacctggtgtcgctatggcgttcaggattcaaccggtctggccgttacgctggagaaccgctacaagggactgcgcgccccgcacaaaatcaaaatggcggtctccggctgtacccgcgagtgtgccgaagcgcaggggaaagacgttggcgtgatcgccaccgataagggctggaacctgtatgtctgcggaaacggcggtatgaagccgcgtcatgcggatctgttcgccagcgatctggatgacgccacgctgattaaattcgtggatcgcttcctgatgttctatatccgtaccgccgatcgcctgcaacgcaccagcacctggatggataatcttgaagggggcatcgactatctgcgcgaggtggttatacacgacagcctgggtatcggcgacgagcttgaacaagagatggcgcggattgtggaaacataccagtgtgaatggcaaaccacgctgaacgatccgcagcgtctggcgctgttccgctccagcgtgaacggtgacgaaccggatgaagccgtagcgcgccagatgctacgtgggcaaccgcagctggcgaaaccggcagcgccagcgagaaccatcctaccgacaaaaccctggcaggaggtttgtcaactggaggagatccccgaacaggcgggcattggcgcccgtctaggcaacctgcaaattgcgctgtttcgctttggtcagacgatttacgcccttgataaccatgaacccggcagcgacgcaaacgtgctttcccggggaattctgggggatgcaggcggtgagcccgttgtcatttcgccgctctacaaacagcgtattcgcctgcgcgatggtcggcagtatgacagcggtgagcccgttgtgcgcgcctggccagtgaaagtcgaagcgggcaaggtatgggtcgggaatcaggcgctactgctgcgcgcggaggcgtcatga

SEQ ID NO: 75962 - DNA, 906 bp, Citrobacter koseri
atgagaaaaattaaaatagggctggcgctaggttccggcgccgcaagaggatggtcgcatattggtgtcatcaaagccctgaaacacatgggcattgatatcgatatcgtggcgggatgttcaattggttcgctggttggcgccgcatacgcctgcaataaactgcccgcgcttgaacagtgggtgtgttcgttcagttactgggatgttctgcgcctgatggatctctcctggcgcagaggagggttactgcgcggcgagcgcgttttcaatcagtaccggaatgttatgccggtactggattttgaacaatgcacccgacgttttggtacggtggcgaccaacctgagtacggggcgagaattgtggtttaccgaaggcgacctgcaccttgcggttcgcgcgtcttgcagtatgcctggcctgatgtctccggtggcgcataacggctactggctggtggatggcgccgtcgttaaccctgttcccgtttctctgacgcgtgcgatgggcgccgatattgttattgcggtcgatcttcagcacgatgcgcacctcatgcagcaagatcttctgtctttgaatgtcagcaatgataacgacgagagtgatgattcgctctcctggcatgcgcgtttgaaagagcgcctcagcagcatgacttcacgccgtgcggtcaccgcgccaacggcgatggagattatgacaacgtccattcaggtgctggaaaaccgccttaaacgcaaccgaatggcaggcgacccgccggatattctgattcaaccgttctgtccgcaaatatccacgttggacttccaccgtgccagtgccgctattgctgcgggacaactggcggtagagaaaaagatggacgaacttttgcctttggtgcgtaccgacgtttaa

SEQ ID NO: 75963 - DNA, 1158 bp, Citrobacter koseri
atgaaaagaaaagtactggctctcgtaatccctgccctgttagccgcaggcgcggcccacgccgctgaagtttataataaagacggcaataaattagatctctatggcaaagtagacggtctgcattatttctctgatgacgcaaattctgacggcgatcaaacatacatgcgtatgggtttcaaaggtgaaactcaggttaacgatatgatcacgggttacggccagtgggaatatcaggttaatgcgaataccactgaaggcgatcatggaaacagcttcacccgtctggcttttgctggcctgaagtttggtgactatggttcattcgattacggccgtaactacggcgtactgtacgacgtggaaggctggaccgatatgctgccagaattcggcggcgactcttatactaaagcagacaacttcatgaccggccgtgcaaacggcgtggcaacctaccgcaataccgacttcttcggtctggtgaatggtttgagctttgcgctacagtatcagggggcgaatgaaaaccaggttactgatgaagacgctgactacatcagcggcactgctcaggaaggtacaggcaacggcggtgaccgttctgtacagaattccaacggtgacggtttcggtatttctaccacttacgacttaggtatgggtgcaagcgttggcgcggcatacaccacttctgaccgtactaatcaacaggtaaattacggtggcaatgtcgccggtggcgataaagccgatgcgtggactgctggcctgaaatatgacgctaacaatatctatctggcgaccatgtattctgaaacacgtaatatgaccccgtatggttcaatggacaaagaggggggcgtggctaacaagacgcaaaactttgaagttacagcccagtaccagttcgactttggtctacgcccggcagtatccttcctgatgtctaaaggtaaggatctgaacaacaccgatggtgacaaagatctggttaaatatgccgatgtaggcgcgacctactacttcaacaaaaatatgtctacctacgttgattacaaaatcaacctgctggacgaagacgatcagttctataaaaacgcgggtatctctaccgacgacgtcgttgctctgggtatggtttaccagttctaa

SEQ ID NO: 75964 - DNA, 609 bp, Citrobacter koseri
atgatgacgctttatcagataaagcccgcttttcaggcgcttctgcgcccattgatgttctggttgtacaaacaccatgccaccgctaatcacgtcacccttgcagcgatggcgctttccctgatcaccggtgcggtgttagttttctttcctcatcctgatttattttttctgcttcctgtcgtgctgtttgtgcgtatggcgcttaatgcgttggacggcatgctggcgcgagagtgcaatcaaaaatcacgtcctggcgccattctcaatgagactggggatgttctctctgatgtcgctctctacctgccttttatgctgctgccatacagtaatacgttgctggtgctgctcatgttgttctgtgcggcaatgaccgagttttgtggtgtgctggcacaaaccatcaatggcgtgcgcagctatgccgggccgttggggaaaagcgacagggcgctggtgtttggtgcctggggactggggttggcgatctggccagagcttttgcattggaataacgccgtgtggggcgttgcaatcgtgttgctgctgtggacggtcatcaaccgctgccgtagtgcattacatgacgaggaggcgaaatga

SEQ ID NO: 75965 - DNA, 918 bp, Citrobacter koseri
atgatgttgctggagaaatcgctcgcggtcatttttgcgcttttgctggtggcaacggtagtcaatggattactggtgctgctgcgtccagggaaagactggcaggaactgacgctgcgcattcgcacatggtgggtgattatcgtgctgttttcgctggcgatgctcagtccgcaatggctggcgctgacatttttcgcactggtgagctttatagcgctaaaagagtttctgacgctggcaccgtcgcgacaatcagaccgtatgccactgctgtggatgtttattgccatccccatcaattactggctgattggcattggctggtacggcatgtttgtggtgtttattcccgtttatgtttttctgttcttacctgcgcggatggtccttacaggcgatacgcagggctttttacgtaccgcgtctcaactgcactggagtttgatgacgacagtatttgccttcagccatgtcgcctttttactggtactgcctgcggatggtctacagaccggcgcactgttggtgctgtttctggtggggctgaccgaattcaacgacattgctcaatacctgtgggggaaatcgctcggccgtatcagagtcattccgaaggtcagtccgaataagaccctggcaggattgctggggggcgtggtaacgacggcggtggcggcaatgattctggggccgctgcttacgccgttaaactggccgatggcgctgttggcaggtgtgattattggcataactggattttgcggtgatgtggtgatgtccgcgatcaaacgcgatatcggtgttaaagacagcggcacgctgttacccggacatggaggcatccttgatcggctcgattcgctgatctttaccgcgcccgtcttctttcatttcattcgttacttctgctactaa

SEQ ID NO: 75966 - DNA, 642 bp, Citrobacter koseri
atgatgacgcgtatccttcgtccgttgtttgcgctgtgcatcgtctggccgatcatgtggttgtggcttggtctgcgtgttaaatatcaagaaagattgccgaaaagcggcccggcgattgtggtggccaatcacaacagtcacatggatgtcttcgcgctactttctctttttccactctgccgtcaggctgaagtgcatcccgtcgcggcggctgattatttcttgcgtaataaaatcatggcgtggtttgcgctcaatattctcaacattatccccatttcacgtaaaggcggagaggctaaccctctggcactgtgcgagcaggcattgcgtgagggaaaaacattaatcctttttccagaaggcacgcgcggcgaggcaggtaagctgtcgccgctgaaatcagggttatggcatttgagccaaagcatgccggaagtcccgattattcctgtctggctgcggggaacagagcgagtgatggccaagggaaaccgtattccgcttccgctgtttatcggcgtcacggtaggtaacgcactgagttttaattccgataaaaacacgtttatggacgatctgaagtgccagttggtagcgctttcgcaacaaacaacaggaagtcattcccatgattaa

SEQ ID NO: 75967 - DNA, 1761 bp, Citrobacter koseri
atgattaatacacgggcgcctgaagaacggcaatttttaaccagtgacaacgttgagctgttttatcgctactggcccgcaacgtcggcaggggcaacgccgaaagtgattgtcctgttccatcgcggacatgagcattctggtcgtctgcaacatattatcgatgaactggcgatgccggatacggcgttctacgcctgggatgcccgtgggcacgggcgctcgccgggcccgcgcgggtacagtccatcgctggctcgttcggttctggatgtggatgagtttgttcgttttgttgcaactgacagtcaggcctcaatagaggatgtggtggttgtggcacaaagcgttggtgcggtgttggcggcaacctgggtacatgactacgccccgaccatccgcggtctggtgctggcatcaccggcgtttaaggtcaaactgtatgtgccgtttgcccgctcagggctggcgttgatgcaccgactgcgcgggctcttttttgttaactcctacgtgaagggcaagtatctgacccacgacccggcgagggtggcaagtttcaatcaggatccgctggtcacccgtcctatcgcggttaatatcctgctcgatctctacaaaacggcagagagaattgtcagcgatgccagcgcgatcaccttgccagtgcagatgttggtctccggggaggattacgttgttcaccgccagccgcagatcgatttctaccagagactgcgcaacccgctaaaagaaattcatattctgccggggttttatcacgatactctgggtgaaaaagagaggcatctggcgtttgataaaatgcgcgtgtttattgatacgctctatgctctgcctcctcaacgttttgactatagcgacgaagaccgctggagtccgggggcggatacctggcgaatgttaagcggtgggccggaaccttattcgctaaatgacatcgcttatcgtaccttgcgctatggcatgaagatgctggggacgcaatccactggagtccgtctgggatttgaaacggggtttgattctggcagtacgctcgattatgtctatcgcaatcaaccgcagggtagcagcgcactggggcgtctgattgacaaaaactacctcaatagcgtgggctggaaagggatccgtcagcgtaaaatccatatgcagatgttgattcagcatgcggttgccaaacttgctgagcagggaacgacggtgcgggtggttgatgttgctgctggtcacgggcgttatgtacttgatgcgctggaaagtgaaacggcagtggatgaaattttgctacgagactacagcgaattaaatgtggcgagaggccaggaaatgatagcgtctcgcgcaatggcggcacgtgcgcgttttgaaaggggggatgcttttaaccgtgaagaactggctgcgctgctacctcgaccgacgctgggaattgtctcaggactgtatgaattgttcccggaaaatacgctggtacgtaattctcttgccgggctggcagatgccattgagccgggaggtattctgatctacaccggtcagccctggcatccacagttaaaaaccatcgcctggtcgttgaccagtcataaggatggaaaagcatgggtgatgcgtgtgcgtacgcaaggcgaaatggatgcgctggtgtgggaggccgggttcgataaatgcgctcaactgatagatgggtggggaattttcaccgtttctatggcggtgcgtcgcgcatcatga

SEQ ID NO: 75968 - DNA, 1287 bp, Citrobacter koseri
atgacaacccgacgttctgtttaccggcaaggtataggctggttactgctgcttgctccgtttttctttttaacctacgggcaggttaaccagtttaccgccgggcgagataacattagtagtctggtttttgagtgggagcggcatattccttttgtgcccctgactattattccttactggagtctggatctgctgtacggcctgtcgctattcgtctgtacaacgctgaatgaacagcggcgactggtctgcaaattagtgttggcttcactgattgcctgcattggcttcttgttatttccgctgcaatttaccttcaccagaccggagataaccggtccggccggttggctctttggtcagcttgaacggtttgatttaccgtacaatcagtcgccgtcgttgcatattattttgtgctggttgctgtggcggcacttccatcgtcatctgaagggcaaatggcaagcattgaacggtggttggtttttgctgattgccgtatcggttctgactacctggcagcaccattttattgatgttatcaccgggctggcagtgggtatggttatcgactggttgattccgggacaggggcaatggcgttggcgcatcgcctctggtaagcgtaaggttctggctactcgctatctgtttggtgtactggcgtgtctggctggcacgtttgtgacgccctggttgtggtggccgacattggcgttgctgattgtggcgctggcttatggtgcgctcggcgtcgaggcattacaaaaagacaggacggggcggttaacgcccgccgcctggtggctgctgtttccctggcgactggggatgatgctctctatgcactgctatacccgccgcttaccggcggtcagccctctggtcgatgggctgtttttaggtgcgtatccgtgcagacctgtggagcaacaggcggtactggatctgaccggtgagtttccccgctcccacgcttcgcaagacgttgtctattgttgcgtaccgatgctggatctggttaaaccggactacgacacgctttatcaggcagtgggttcgctggagcaattgcgcatcactcatggcagcgtccttattcactgcgcgctgggactgtcacgcagtgcattggtgggggcggcatggttattgtatcgctatccggggttaggtgttgatgacgcagttgatcgactacgaaagacgcgaccgcaggttgtttttacatctgaacatctggagctgttaaaacaatggaaaacagaagtgacaacataa

SEQ ID NO: 75969 - DNA, 408 bp, Citrobacter koseri
atggaaaacagaagtgacaacataactaataagcatcttctacaggctcgcttgttgatgcaaacgcttaatagctggcgtttctttttgctcttcactttcccaccgctggcctgggctctcctgctctcaccaccgggaatactccgcacaatgatcgctatgatgagcggcattgtctggtttggttgctggcgactgtggcttgatgctcagtatttttctcttatcaacgaagaaaataacgagcaagctggtgaagtgctttgctttatctggcagcgagaaaagctactgacgttgacgcttgccgggcggcggcagggggcgttaaagcagtgtcagcgtacgttgtactgggttgccattctgtggctgggatggttgatgctgttgttgttctattga

SEQ ID NO: 75970 - DNA, 357 bp, Citrobacter koseri
atgagcaaaaccgttgataaacgaacagctaccgccggtatgattgcgtccagtgatgatgcatgggattcccgcgagcttggttccagcgaagctcacgtcaaagtgtcagacgacctgtctgaaatggacatcaatgacgcactggagttacaccctatctctatcagactaaataagtctctgatagaagatctcaaaatgattgccgacttgcatgggttaggttatcagccattaatccgtcaggttctgacacggttcgctgattgtgagaaaaaacgcattttacaagaagtacattcccgggagctaaagaagcagaacagggaaccaaagtctaaaaaagtagcatga

SEQ ID NO: 75971 - DNA, 291 bp, Citrobacter koseri
atgaggctgaatatttcaccagccatcaggcagaagctggcaaacaaacaaccccccgttaacgaagacgacatccttcaatgtttttctaaccgaacgggagggtttcttgaagatactcgcgaggaccaccaaagcgatcctcctacaaaatggttcatcgccgaaaccgactacggcgtaaagctgaaaattgtattcatccatcgtaagggaaaaggcatatacatccgtacagcctacgctcctaacgctgaagaaattcgtatttatgataaacatgggaaataa

SEQ ID NO: 75972 - DNA, 903 bp, Citrobacter koseri
atgatatatgtaattggtcacctcaatcctgatagcgatgctatctgtacggccatgatgacggcgcgctggctgacgttgcgcgggcaggaggcaatggcgttccgcacgggggaagccaaccgtgagacgcagtttatttttgcgcaggcggggttgcccattcctgaacgattaatcgttccgctcaccgatcgggacgtctggctggttgattttaccgaaccagcccaggggccggattctttagcgcagagtaacgttgttggcattattgaccatcaccgcttaggcgggttgatcacccgactgccgccggaagtgtgggtaaaacctgttggcagtagtgcgacattactgtggcaactgatgacggatgccattcgaaaacagctttcccccgcagaagcgacgttattactgggcgccgttctgagtgacactgtcacgcttcgttcgccgacaacgaccccggatgaccgccttgcggtggaatcgctcagccagctcgccggtttgtctcttgaacgctttagccgcgatcttctgtacgcgaaaaccagcgtggaagggatgagcgccagccagcttcttcagaaggacatgaaaacctttactgtccacgggcagcgggtttgcgtggcgcagcttgagctgtatgcgctggaacaggttgatgcgatgatggacgacctgcgtgaggaaatggcgcgctatgccgccggggcagatgcggcgctggttgttctgatgctcacggatatcaatctcggttattcccgcctctggtttgccggagatacccagccggacgtcccgcacccctgcgaggtggaagggatgctgagccgtaagaaacagatgctcccctggctggaacatcacctgaatccgcacaggtga

SEQ ID NO: 75973 - DNA, 228 bp, Citrobacter koseri
atgccgcacattgatattaagtgttttcctcgcgaactgaatgacgaagagaaggccgccctggctgcggagattaccgacgtcattatccgccatctgcaaagtaaagacagctcggtaagcattgcgctcagtcaggttcagccggatgcctggaaaaccgtctgggacgcggaaatcgccccgcagatggactcgctgattaaaaaacctggctacagcatgtaa

SEQ ID NO: 75974 - DNA, 1560 bp, Citrobacter koseri
atgcgccgtacctcaacaacatcgctgcaatttattaccgttttgtatgcctctggtcgtcgtcatacccccccttcgggcgatcgtgctcctgcatattttgtcgatctgaatcttgataaaatcgtcgatcgcattgttcaggggcgggaagagtacggcatcagcgctttcttttattcaccgctcgaatgtctggaggatatcctctatcgacaggaaattattcaggatgtgacaatacacgcgctctataaggcgctaatggcatattccgcagagatgaagaatatcagggagatttcagaagaaaaaacaaaccggttttacttctatcaacagcggcgctgggagcttgagtgcattttgttgtattgccaggccgttacggcgctgtatgagcgtatagcgccgctgtctttgtcttccgacggtatgattaatttcaggcattatcttcgtcagtatatcgagagtgaaaattttaccgggttatattcaaccgccactatgataagaaaaagtctggaggcggttcagtacggtctgaaaattaaaggcgacaccattattgttgaactgtatcaccaggagaaaaactatagcgatgagatcctcgatgtgttctcaaagtttaagcagcatgatgtgaatgtcgaggtggagagtagacatcacagcttcgggatgaaccatattgaagcacaagttctggattgtgttgccagactatttcccgccgagtttcatcaacttgatgtgtttatagatgccaacaggcgctacagagataacacgctggatctttttgaacgtgaagtgcagttttatctggctgttgtggaatacattgaaaaatttcggcagaaagggctgccgttttgtatcccggagatacaacgagataaaaaagctatttcggttgttgcggctttcgatctcgcgctttcagaggtcatccttgagaaaaaggagaaggttgtctgcaatgatttcagcttccagaagcatgaacgtattttcgtcatatcgggccccaaccagggcgggaaaaccacctttgcccgcatgatagggcaactgcattttcttgccttgctgggcatttatgtccctgccaggcaggcaaagctctttctgacagacactatttttacgcattttgagaaaagcgaaaatatttataaccttcggggaaaactgtatgacgacctggtgagaataaaagcgatccttgatgctgccacatcacacagtttgattatcatgaatgagatttttacgtcaaccacatcgcgggacgctatttatctgggaacacgggtaatcaagaaaatagtcatgctcgatgcgctttgtgtctgcgtaacgtttatcgacgagcttacggcattagatccgtccatcgtcagcttaatgagtacggttgagcataataatgcggcattaagaacctataaaatcaccaggaaaccggccgatggtatcgcatggtcaacgacgctggtgataaagcatgggctgacatatgagcagataaaaacgaggttaaacggatga

SEQ ID NO: 75975 - DNA, 1287 bp, Citrobacter koseri
atgagctatgaaattgaacgtgtgatcgcaagagaaattctggactcccgaggtaatccgaccgttgaggtcgaagtctccgccatcggcggcggtgttgcgcgcgcgtcagtcccttcaggtgccagtaccggttcgcgcgaagccattgagcgccgtgatggagataaatcgcgttttggcggcaaaggtgtattgggcgcggttcagagtatcaatactgaaatcgataatgcgctgcggggatatgatgtccgccgccagaaagatatcgataaccgcctgataactcttgatggtacggaaaataaaagtcgtctcggggctaatgctattctcggggtatcgcttgccgtggcgcgtctggccgcgcagctatcaaacattccgctgtatcgttacctcggcggcgttggcgctaacctcctcccggttccttgtatgaatatcatcaatggcggcgttcacgctcgctggcaaggcgccgattttcaggagttcatgattgctccctggggcgcaagctctgttcgggaagccattcgctggggtagcgaggtgtatcagaatttacgtcaggtcttactggagaaaggtttgtctactggtgtgggcgatgaaggtggattcgcgccagccgtctcgtcaaaccggcaaccgctggaattgattgtcgaagcgatcgaaaaagccggttataaacccggcgaggatattgttatttgcatggaccctgcatccagcgaattttattcagatggaaaatacaccctgcgcagcgaaaatgcgcaattcagtgcggaagagatgacgcgctattatgagcggctggtcaacgaattccccattgttctgattgaagatggcctggccgaagatgactgggctggctggagaattctgagtgatacgcttggcaataagattgaactggtgggtgacgatctttttgtgactaacgtgaaatatatccagcgaggaattgatgaaaatctggcgaatgccgcgctgatcaaattgaaccagattggtacgttaagcgagacaatcgaagcggttcaattgtgtcatgatcatcactggggcagctttatctcacaccgtagcggagaaacaatagacagtttcattgctgatatgacggtaggcttacgcgccggacacctcaaaacgggagcgccaagccgtggagaacgcatcgagaaatacaatcagctaatgcgtattgaagatgaacttggcgatgccgccgtttttgccggtaaatctgctttcagaaaaggttaa

SEQ ID NO: 75976 - DNA, 234 bp, Citrobacter koseri; identical to SEQ ID NO: 11589

SEQ ID NO: 75977 - DNA, 1266 bp, Citrobacter koseri; identical to SEQ ID NO: 11591

SEQ ID NO: 75978 - DNA, 1095 bp, Citrobacter koseri; identical to SEQ ID NO: 11592

SEQ ID NO: 75979 - DNA, 342 bp, Citrobacter koseri; identical to SEQ ID NO: 11593

SEQ ID NO: 75980 - DNA, 273 bp, Citrobacter koseri
atggtggtggtgagtctggcggtggtgagtccggtggcggtagttctggcggtggtgagtccggtggcggtagttctggcggtggtgagtccggtggcggtagttctggcggtggtgagtccggtggcggtagttctggcggtggtgagtccggtggcggtagttctggcggtggtgagtccggtggcggtagttctggcggtggctttagtggttccagtctttctaaaggtgatattcagtctgctatcgaaggtgcttcacccaaaatag

SEQ ID NO: 75981 - DNA, 243 bp, Citrobacter koseri; identical to SEQ ID NO: 11595

SEQ ID NO: 75982 - DNA, 318 bp, Citrobacter koseri; identical to SEQ ID NO: 11596

SEQ ID NO: 75983 - DNA, 1053 bp, Citrobacter koseri; identical to SEQ ID NO: 11597

SEQ ID NO: 75984 - DNA, 183 bp, Citrobacter koseri; identical to SEQ ID NO: 11598

SEQ ID NO: 75985 - DNA, 423 bp, Citrobacter koseri
atgagtagaaataacgatacaaacggcgttgaactggttgtcgtgggcgtatttgctttctgtctggcagttgttgcctggctaatgaaaactttcgatgttgaatggcaaacagcactggaaactgcgcctggcctgatagtctggctgcttgttgtcggcgcggggatctttttcgggatcaaaatggaaacaggtcttgttcgctggggtgctcctctggcgatcgcccttctgattccagtgttcaaaccaattcttaaggaagctgccggagttcgtgaaacgggtgggctagttttcgatgatatggtttcgtggtatggaactggctggggaatgtctctgatgttcttcgggattcttattgtcggatatggcctgctttattggtggcacagaagaaattcatattactggtaa

SEQ ID NO: 75986 - DNA, 276 bp, Citrobacter koseri
atgaaactgaatcctgagaaatacaatagaaacatcaccctgctatgtcctgtatgcggaaatacagagatggaacacaaggaagagtctgaagtcgtcagatgtgtaggctgcgggaaagaatttactaatgatgagttaatccaagaaaacggggtgagtattgacgcccatgtagatgaaataaaagaagagttaacaaaagacattcaaaaaaagtttaacgacatgctcaaaaaggcatttaagggaagtaagaatataaggatcaaataa

SEQ ID NO: 75987 - DNA, 480 bp, Citrobacter koseri
atgacaacaagtgatgccatcgctttagctgcgcttgtagtatcgatttacactatcatatcgtcagaaatgaaatcgagaaaaagcgataaagaacaaaaggttataaaggatgagcaagacaggttacgtaagttgcttctggaaaaggaaacaaagtcagcaattaatgagatgaaagctgagcttggtgctcgcctcgtaaaaatagccaaaaacaactataggctcaagatatttaatagagggaaggttgaggctaaaaatatagagattcatttccctgataacgatggaaatgaatatctttcaatgcatgatgtagaagataaatttccatatgaggtattacacccgcaacatgggattgaaattttagcgggaataagctttggaagtaaaactaaataccgaataaaactcatatgggatgacaattataaaagaagaaatgaagaggagtttttcatttctatataa

SEQ ID NO: 75988 - DNA, 312 bp, Citrobacter koseri
atgattcattttaaacaaaaactcgaagactacactgaatccgaattcttagacttcctaaatgaattctccgcaaacccgcgctaccaggaagaaatggaccgtgaatcttacatcgactcattagtcgatcatttcgataaaatcgtggatcatcctgaaggcaatggtttgattttttatcccccggatgacagggaggacagtccacaaggcatcattggagaaattaaaagatggcgtaaatcccagggacttcccccgttcaatcacagaaaaaactcagatacaaacctaaggaaattcaaatga

SEQ ID NO: 75989 - DNA, 405 bp, Citrobacter koseri
atgacaatactggttacggttcaggctcagctcattgtgggtgaagcgcaggtgatagagagtctggcccccgaaggttcatttgcagcagtgtttgaagacgatggaaaaacgggatatttctatgcccttgatgagtctgttgatggtaatcctatcagagatgctctacatatctacaatacagaagacgtttcagacgggcatatcccgtctgatgtgaagatcggttggtcagaagacagcaggaaatgcgtgcttttaattaataattatccgcatggtgtatttgattttgaatctaaaaatggatactgccgaagtggcttcccacccccaatcaatcaggaatggtctgtttcaggtcacaactggaatgataccgttgatgattttttcagatga

SEQ ID NO: 75990 - DNA, 1428 bp, Citrobacter koseri
atgtcatcacgccgctatggaagccagtctcttcagcgcctgcttgggcactggcaggagaccccctcacgtactcctgtctggcgtcagctggcggaggccctgcgtctgctgattcttgatggccgactggcgctcgatagccgactgcccggcgaacgcgaactggccgccgtattgaagatcagccgaaccaccgtcgccagcgcaatggcgcaacttcgggaagaaggttatctggaaagccgtcagggtagcggctcgcgggtgatcttaccggatgccattcaccctgtgcccacgcgcggtggagccaatatggcattggatctctctaccgccgcgctcagcgcaggccctgaaattcaccaggcttaccagcaggcgctttgcgcaatgccgcagcatctgctgagttccgggtatctgccgcaaggcttgctctctttacgtgaatctatcgcccggcactattgcgagcgcggcttgccaacccgccctgatgaaatcatggtggtcaatggcgccgtgagcgggctggcgctgctcctgcgactcctgacgggcccgggcgatcgcgtggtggtggatcacccgacctacccgctcgcaatcgccgcgattcagggagcctcctgtcgccccgttggcgtctcattgcccgaacagggttgggacaccgccggtctgatggcgaccattgcgcagaccgcgccgagaatggcttatctgatgccggatttccataatcccaccgggcgctgtatggatgccgtcacgcggcaagcagtcgcggatattgccgccagaacgcataccacgctggttgtggacgagacgatggttaatttgtggtacaacgccccgccgccgcccccactcgcgcattacaatgccgacgcgccgattattatgctgggatcggcaggaaaaagtttctggggcgggttgcgtctggggtgggttcgcgcctcatcacggacaatcgccgcgctggtacaaacccgggatacgtttgatttaggatcgccggtactggagcagttagcgaccggctggctgcttgataatgccgccagctttcttcctgacagacggcagttgctgtcccaacgacgcgacctgtgttgtgaactgatgcacgcgcattttcctgaatggcgcttcaggcagccgcagggcgggctctctttttgggtggagttacccgacacgctggccacgctctttgcaacgcgcgccgaaagcgaagggattcaactgggcaccggtacgcgttttggcctcgcgggtgcgtttgatcgtttcttacgtatgccgttcaccctgccggatgaaacactgcgatcggcttttcagacattacagccgatatgggacaacctgcgctcacaaaacagcgcagggaaaatacgcaaaattatctaa

SEQ ID NO: 75991 - DNA, 1434 bp, Citrobacter koseri
atgcctgaagcggcaaggaaaggagacatagcaaagggccacgggtgttttcctgataccccgattatcgaaggcagtccgaatgtttttatcaacggtcagcctgccgcccgagttggcgatgcggctgcaccacatacttgcacctgcggaaatggttgtggaacccactcccgctccatagccgaaggatctgccactgtattcatcaatggcaagccagcggtcagtgtgggggacggcattatctgtggcggggtggttatctccggcagcggtaatgtcaccatcgggaatgcgacatttaagtccccggtacatgagtgcggcaagcgagcggcactgcaacgttcaccgttactgggcctatccccgatgctcagtggtgatatacctgagccagaacaacacgcacgggcagctaaaaagaaacgtactggcgttgatgctggtttctgcgtagttcctgaacaatcgacaaccgaatctttcggaagcatcctgtttgctggcggtcagccggaaggaacacgcgaactttaccgctcattgaatggtgcaggtaaggaatgcaaggcaggttctattctgctgctggttgatcctgataagcaggacgacgaacagatcgcccacatgaaagccgcgaaagcgcgagtcgatgcggcgttagaaccgctgacaatccaggaagctaacttcctgcataaacattacgctaccatagccaacttctctaatattgccgataaaggtattggccttgcagccgatccggttgggaagtattttgagaatattgaaaagattctcaaagagatccaagaaacttacaaaaatacgtacatgacacgaggtgcattaattggtgaacagttttatgtgaggcgtactcagttattcaaagagcttgaacgtgtgctaaaagttggcttcctaaataagttcatgaattttggtgagtatacgaaaataaaaaatgcgcttggtttatctaccagttcaatcactcataaatggaatgagacagggatcagtgatattgaaggttacgcaacgcatatcgagcgagcagctaaatataccaaggcgatgcgttatactggttacgttggaatagcgtttagtgcggttcactcaatcaatgagataaatgaggcttgctcaactggtcgtgaagctgaatgtactaagaaaaaatatactgagatcggtagtttcactggaggtcttgctggcggatatgcaggaggcgcaataggtatggggttatgtactctcatcttaggtggcgcaacagtagaagttggtggggctggtgcattagcttgtggcgtaatactgggtacaggtggaggctattggttaggtcaagaaggagctgatttaggccaaagtttcggcgattctatatatgaatccgtaggtaaataa

SEQ ID NO: 75992 - DNA, 393 bp, Citrobacter koseri
atgcatactctttttatgttattaacgccagtaggaatactggttatttttatgtcattcatatattcgacattgaaaaataatcagcataaaatattatgcgcagatttctataaagaatacggatattatcctgatgacatttctgcatatgaaagaggtggtttattattaacatttcagaaagatattcattttttattagctttgttattcaaagagaatagtttttttgttcgaaacataaacaaagatttgtataagttcattcgtgaacagccaaaacaaaaaacatcctggataaaaatcaagttttttctcctgatctctggtgctcttattttaatagcagactatgccattttttccctgtttataaaaaacgcacattga

SEQ ID NO: 75993 - DNA, 1089 bp, Citrobacter koseri
atgtcgcatcttatgctttcccgtcacgggatctggtactaccgcagggtctacctgacacctcggaaacgccgtgcaattcgcatttctcttcgtacacgttccaggcgtgaagccttgctccgtgtggagaaatatttcacctcgcagcctttccactgtgttccgcagtccatcccggcacacactgcaaccccgtctgcttccttccaacaaccacaacagaaaaagcctttcaagagcttgaagagtgaacttgataagtatacgaaaagcaaagcgggatctgttggtgtgcgtgaaatactgacgatcaacaggtgcgtgagtgcatatttgaattccacaacggagcctttcagcaagagaagcgcggcggcgtttgttgatggtcttgaaggatctgcatctaccaggaatcgttacatcaagaagaactcagcatttttcaaatggcttgctactcgtactgatgaagatattcgaaacccatttgaaggaatgggagtgaaggaaaccacatcaccaatggatcgccttcttgcgtatacactcgacgatctgaaacgattgcacattgctttacatagtgtgagagactggaaacgctggatcattttaatcggtcgctattctggcatgaggcagaatgaaatctgccagctttaccacaatgacgtgatgaaggtagacggaatctggtgctttcgtgttgataacttgaaccctaatcagacgcttaaaacggacagttcgcggcggttcgttccgatccattcgaaactgctgacgcttggtctgcttgatttcatcgaagacagaaaagggcatttattccctgagctaaccttgcaccttggcagttatggtcactacttcagccgctggttcacacggttccggggcaggcatggtttacctgaataccattcgttgcgacactatgcagccaccacatttaaaccgccgggattctcagagcagtttgcgtcccaggtgctcggatactcgaatgccacgatcacgtacaaccgatacgggaagggcgttgatgcctcgcggttggttgaagtgatagaaactctttga

SEQ ID NO: 75994 - DNA, 438 bp, Citrobacter koseri
atgctggtgaatatgtgggagagcatattatatatgaaaacatttttaattcaaaatgatggattaataaagaatatgttttgtattgcatttgtggtggatgttttaatattcctgatttgctatttttacaataaaaatgcatataaaaaaatagttaaaatctatgaggaaaaaatagggggtgtgcctcttgatactattttatgtaaaaatgccagtgttttttctacaccatatttatatggttcgaaagttcgatttataacaaggagtctgaattttaagtataataatcatttacatcatgatgtgagcattgaaggttataatttgataaggaacctacctaaaaaattaacgctaggcttcagaattgaaacattgtcattattaatctttatcccaataatgattggcatttgcattctattctaa

SEQ ID NO: 75995 - DNA, 1797 bp, Citrobacter koseri
atgagtttttgggatggagaattgaagggctttctattgtctcagggcgatagaacaagttgcggtggctatattttaggaaataaagattccccttttattctagggatggaaatagcatgtgagggagacgaatatatatgtggtttagatggtcaacgataccaaattgttgggggagtaccaaatggatcacatatagaagcaggccgtatattatttagagatatcttcaaaagtccatttgatgatgatatcgatcatgaaggtcgaaaaataacacccgtctcagaaagacagaggaaaatgcaagaggaaatgggtttacaaagacgttcacataattcactaagggatcttgatgaacgatttgaacacgatgactttatcggcatggctggagggagaatacaaggacgaaaaataatcgttactggagaaaaaaaagataggttctcaactccaaatcttaatacaatgttccgaacaagaatctctaagagccaatttgatctctatttaagaacggggcaagatttatcaaactatgaaactgaaattatatgccttttggctggttccgcacatagcagaggttcatgcaactgtcattgtagatttacgccacgcttaaatataatatacaaatatgatgaatatcttttatccatttttcagtcagtaaataaaaccagtaatttaaaatctgagacactccctgttcggcagcaccgggttcagaaaacaagacaatcagttgaacctggtttttgtatagtgccagatcaaacatcacctaagaagtatgaatgtgagttaatagtcaatccaccatcaggggtaaaggagttataccgcaagctaaatccagaaatggaaaaaaaaccaggctctatattgattgttgttgatcctgaaaagcaagatcagaagcaaattcaaactctgcaaaacgcacgagataaaattgataaagcccttgaacctcttactttacaggaagcaaaattattgcatgacaacagaggggcagtagatgcattttcatatcaactttttggggaatacttaggaaatgctggtgatggttttggatatatcagtgaagcaggtaaaagttattatgaagaaatcaataagacgttaattgaaattcaagaattatataaaaagacatatgtgcataataatggaattatatctggggaagaattttttggtcaacgggcgagattatttaaaaagttagatgctatcttaaataaattttctaaaacccaacttaatctggaagaatataatagcattaaaaaaactttaggtttatcaataagctcaattatgcataaatgggataaaactggaataaataatattgaagggtatgctacgtatattgaaaactcagctaaattaatgaagctaatgaaaaccgttggttttgtgggaataggtttagattttgctgggtacacatcaaatgtttatgatgcttgtgcaaaaggtcgtgaaagtgcttgcaaaaaagccgccattactgaatacagtaagtttggtttcaaacaggctagtagtatgctgactggtttagccgctggaagtgccgcaaatgcggtttgtacatgggtattagggctatctacagtagaagcaggaggcgtaggtgccgctttatgttttgttactggagttggtgtgactattgcatcaagcaagttcgtagaaaaatacggcgaaaatgctggtgaatatgtgggagagcatattatatatgaaaacatttttaattcaaaatga

SEQ ID NO: 75996 - DNA, 1134 bp, Citrobacter koseri
atgtcctccagcggcgacaaaagcgaaaaacccacccccggaaaactgcgcaaagcgcgtgaaaaaggcgacctcccgcgctcaaaagatctgacgatggcggcgggactgctggcgtcgtttttcacccttgccgcatttctgccctattaccagcagttaatccgtgaatcgtttgccgctgtcggtgaaatggcgggcaggctcgacgatcccacggcgctgaatcagtttatgctgctgaacgtctgggttgtactgcgctttatcgcaacgctgattccgattccgctgtgctgcatagtggcaagcctggtgcctggcggctggatttttacccccacaaaactgaagccggattttaaaaagctcagccccatcagcggcatcaagcggatgttttccgccagccactacacggaagtcggcaagatgctgctcaagtgcggcattattcttaccgtgttgtacatgatggtgcatgactccatgcacgctctgctgcacctgcaacagctttatcttcgtcaggcgatcggacaagggtttgccatttttcgtcacgtcttcagctacttcatcgccgttatcgtcattttcgccctgctggatgtaccgctcagtaagttcatgttcaccaaaaaaatgcgcatgaccaaacaggaagtgaaagaagagtataaaaacaacgacggtaatccacagattaaaggacgcatccgccagcttcagcgtcagatggcgatggggcaaatcgcgcgaaccgtaccaacggcagacgttatcatcaccaacccgacgcattacgccgttgcgctgaaatatgatccacagcgtgccgaagccccttacatcgttgctaaaggaatcgacgatgttgcgctctggatccgtgaagtgggcgctaatcacaatatcgaggtggtggaatttccgccgctggcgcgggcagtttattacaccacccgcgttaaccaacagattcccacgcagcttttccgcgctattgcccacgtactgacctacgtcatgcaattaaaatcctggcgcgaaggcaacgtggaacaaaagccccgcctgaacaggcaaatcaacattcctcaagaggtactgaaagccaatggcgaacagtaa

SEQ ID NO: 75997 - DNA, 2439 bp, Citrobacter koseri
atggctggtaaaaagagtcaatacgcatgtttattgccaatactggcgatgatgtctatttatagtcgggcgtatgccgtggctttcaatactgactttttagccggtgactctaaaaatgccgatatgtcgcgtttttatcgtgcctctgcgcttcctcctggtgaatacccgtttgatgtttttattaacgaggaatggaaaggccgccttcccgtttatatcacggatgaaggaacgtttttccagcatgagaatattgcccagcttgggcttcttccctcaatagtccctgccgcaaatagcgccagcgagcgagtggatgtgaatacgttactgcacggaggcagtatgaaagtcaatgcggccgatatgtcgctacgtctgaccattccccaggcgtatattcgccagacgctgcgcggttatgtcgatcccgtcttttgggatgaaggcattccggcgctgatgctgggatacaatgccaactataactacaacgaagccaaaggcggaggacgcaatcaggaaaacgcctatttccagttaaacagcgggctgaatgcgtttggctggcaatttcgcgatagctccagctataacaaaagcaagggcgtggaaggatcatggacaaacaatacacgctacgttgagcgcgggatcgctgcgcttaaatcgatcatccgcatgggtgacggctattccagcaacgatctttttgactctttgcgttttcgcggcgtcagcatgggcacggatatgcgcatgttacccgattctcagcagggcttttccccgattgtacgcggcgtcgcacagtctaacgcgctggttaaaattagtcagaacgggcaggttatttatcagaaaaacgtgtcgcctggcccatttgaaattgcggatatccttcctaccggctcaggcggcgatctgaatgtcgaagtcattgaagcagacgggcgcaccagcagtttcatcgtccccttttcttctgtgccaaacatgctgcaagaagggattgggaaatatggtctgttgctgggggaagcgcgcacggaagaaagccgctatcgcccccagtttgcccagggcagctatcaatacgggatcaataacctgatcaccggttataccggggtaatttacagcgaagactataacgcgtttcttctcgggagcggccttaatctcccgtttggcgcgctgtcttttgacgtcacacagtcacaaacgcaaattccggcagataaaaaagtccgtgggcaaagttacaaagtcgcctttagccgtttctttaatgtcaccgggacgaactttgcgctggtggcgtatcgctattccacgaaaaactattacagcttcaatgatgcaatcgctttgcataactggcaaaaagagaacgctgacagccctaatgccagatatatgcgccagaaaaacacctttaatatcaacctgagccagtctctgggtgaggaactgggttccctttacttatcaggaacctggcgggactactggaatggtcatggcacaacaaaagagtatcaactggggtattccaaccacgttggcgccgtaagttataccctctcagccagcagcatgcgtaacgataatcagcgcgaagagcgacgttattacctcacattctcggtgcccctgagtctctttgaacggcccgttttcctcaacagcagcgtgacatttaatcgtgacggctattccgacacgaacgtggggatcagcggaaccgcaggcgaatttaatcaggcgacctatagcgtcagcggcagcaaccgtcgcggtggaaataactcggccagcagcagcctgagctatcgcactgcgtttaccaccttaaacggcagctatagcgagtcaggagactatcgtcagatcggcgcgggagccagcggtagcctggtggcttatcggggcggcctgctgacgtccagccagttgggcgataccttcgcaattatcgacgcgccaggcgctcaaggggccacgctgggcggcgacggcacacgcaccacgaatacctccgggaaagcgttggttccttacctgtccccgtaccgtaaaaaccgaatccagttagataccacccatatgaaggaaggcgttgagctgaaaggcaatatccaggaagtggtgccttatgcgggttccgtcacctatgtgcgcttcgataccgaccaacggcggcagttcatgttgccagcacgggccgttaacgggcgccctctccccttcggcaccgaaatttttgacgatgctggcaccagcgtcggatatgtcgcccagggaggaatgttgtacctgaaaacggaacagctcccgtcacgtttacatatcaaaaccagcagtgacggccgccaaagctgtgttattagccagccgacccacgatggtcagataaatatttgccgctaa

SEQ ID NO: 75998 - DNA, 504 bp, Citrobacter koseri
atgaacctgtatatgttttatatcggtggaaatgccggtaaatccaatatcgaagtacacgatattcagtttgtcgcagccaacgagccacaagacgcctggcctgcgctaagagaagcatggtttggtgacaaggataagattcacattgatggttacagccgtattacgtgggtgaatggctattctgtcacactctctcctgaaccctccccaacggcgaacaggttattttttgttaacgttggtggataccggcctgatacgttagctgaattacatgaatttgatctttttgtcgcgcaagacgcacaacaggccaggaagaatgcactacaaacgttgctctgcggcgttgaacagcaacataaagacaatctgaaggatgtcgatgattgcctgttacttgaaaaggtaggcgggctatttattcatctgacaccctgcccgacaggacgtcgtgaccaaccagaatggcagggttatcaaccgataggtgaataa

SEQ ID NO: 75999 - DNA, 297 bp, Citrobacter koseri
atgaaaggcatgaaattatataaccgttcgacgatctaccatctggccctcaaaacctttggcccggaatctcagtctctgaagctgatggaagaggccgccgaactggccgctgccgctgcccgtaatatgaacgggctgggcaatgaaatagatctcgcagcagaaatggcagacgttgaaatcatgattgaacagtttcggctcaacgggatgggcttgctgattgactttcataagcagcaaaagctggaacacctcgccgaacgtctgggggtgacttatgcagcagaataa

SEQ ID NO: 76000 - DNA, 168 bp, Citrobacter koseri
atgaaagtctgggcgataaagtttttgtatctggcgatacagacagttacgggggctatggatttagtcggcaaattactttactggtctctttttgctacagctgtcggtgccggactgactttcggttctctgttagcgttctgttatgttatttacgggagttaa

SEQ ID NO: 76001 - DNA, 189 bp, Citrobacter koseri
atgtccaccaaatgttccaactgtaagaaagttatcaccaccctgaagttcagcgacgccagcgtcattacctccggtaagtaccgtgtgccagccgtcctcatcacgctggtatgcccgcactgcagccagcactactacacggaagtcacggccatggagttcatcccctgcgaggcaagacaatga

SEQ ID NO: 76002 - DNA, 264 bp, Citrobacter koseri
atgagtgattttattcttgttgatataagtgcagaagttaaagtccgctacaaaaaacgggtcaatatgaaacgagaggattacgaaaggtatctttccatatgcgaagaatggtctgatgataccgaaaataaaattgctgagatagctgtgaaatatggcttctttgctgatggtgaggatattgaggacacagatgacccggaaaatgtcgaattcgaaccggttctttccacaaaagataccaccaccgaggataaataa

SEQ ID NO: 76003 - DNA, 189 bp, Citrobacter koseri
atgactgcagaacaagtcaaatcactcttccgccagcgcggggtcactttcacccgctgggctgaagaaaacggctacagccgcaatgaggtctaccgtgttcttaacggattcaccaaagctcgttacggcaaatcacacgaaattgcagtgaagctgggtctgaaaccagattcgaatgcggcgtaa

SEQ ID NO: 76004 - DNA, 366 bp, Citrobacter koseri
atgtgtatagctgagcgattaaaagaagtactaaaagaaaagaaaatcagctcaatcaaagagttcgctgagatttgcgagctaccttaccgtaccgctcaaagctatttgaatggcgacagggaacctaatattgcaggcttaacaaagttatgcacacagttgggtataaatctcaattggcttctcacaggtgttggtgaacaatttatcttgggagatgggacttcatcagtgcagggtatatcaacggagaaacaggctctgatggatgcgtttgatgatatgagtcctgagcagcggagggccattcttgaggtcggcaaagtcctcactcaaccaaaaccaagcaagtttgctgggtag

SEQ ID NO: 76005 - DNA, 267 bp, Citrobacter koseri
atgaaatttaagaccgctgttctgatttctacctttttagtcgctggaaataccatggctgatagcgtcatgaaagctgaatttcattcattacaagaatgtctgtcagccataaaggcaaatggaggcgaaccactcaaaatcattcaggataagccagacatggtgaccggacgattgccaaacgagaaaatgttcgcctgcgaaaagaaagagacagggtctaaaggcacttactttgaaggttggtttatggtcaaagattaa

SEQ ID NO: 76006 - DNA, 255 bp, Citrobacter koseri
atgcaaaaaaaatcccctgaagaattcattgaagaatggcgtcaacgggatcgtaaaaatattgaacgctccgctgtatcaatgatacctcacgttattgggaaggctgctgttgctcttgtcagtcaggataaaccgattacaacaaagaatctcattcagcatcttgagggtgagattcagaattcgggtgcagctgaaagctggtaccgaacggctttgaagttcctggaggattcagcctcccggcaataa

SEQ ID NO: 76007 - DNA, 252 bp, Citrobacter koseri
atgagctgggtaaaacaagagaatggcacctggtatttcatccgtaagccaggggagtcttaccaggaatcgctgaagcggtgtatgtctgactctgtacacaccgcctgtgaagaggactggctggcactactggttattgcaactgatattattgccgggaggctgaatcctccaggaacttcaaagccgttcggtaccagctttcagctgcacccgaattctgaatctcaccctcaagatgctgaatga

SEQ ID NO: 76008 - DNA, 654 bp, Citrobacter koseri
gtgtggactagcctgctaaaaaatctgccgtggcgcagtctgctgctggcagtagtcataaatgcttttctgattggactttattacctgggctacaaaagcggtcatgaaaacgctacgcgcgacggcgataaggcggtcagtgagttgcagtcagcattcgacacatacaaaacggagcaggcaacgcttgagaacgctgcgctgcgggcctgggcaaaacggtatcaggagcaggttgccgccgggcatcaggccgaagccagttaccttgagcagattgcccagcttgagggccagaacaaacaattacaggggcaaattaacgatgtcacacagcgctggattgatgaaaaaggtaagagtcatcccattgagtgcgtgtttactcgcggcttcgtgcgccagtacaacgccgcgctcggatatgacaacgcatccgtcggcaccggtcattcagacacaactgccgccgctggcaccggcactcgcgcagcgtccgggcaacctgaagccgctgacgcctggctacgcgactcaggcgtctcccagcgtgacgtcctcgccaacatcatcgacaacgcgaagcagtgccgcatctggcgcagccagataaaccagctgctggacgaacgggaaggattacagaaatga

SEQ ID NO: 76009 - DNA, 468 bp, Citrobacter koseri
atggcttccgataacctggtcaatatcaccattaacgacaagtcgctgcgccagagcctccaggcgcttgagctggcggcgacagacctcacgcccgcgatgcgcaaaatcgccgggactctgctgacggagacgctgctgaacttcgaggatgaaggccgtccggcctggacgccttcgctggcagcacaggagcgggatggcatgaccctgcaggacaaagggaacgccggtggcctgaaaggaagtatttccaccgattatgatgccaggcaggcgatggctggcaccaataaagtctatggcccgatccaccagttcggtggcgaggccggacgtaatcagtccgtagagctggaagcccgtccttatttgcccatgaacgccgatggtgagctgcagccggaggccgaagcatcggttctggatacggttgtccggcatcttgaatcagcggcccaccgttga

SEQ ID NO: 76010 - DNA, 498 bp, Citrobacter koseri
atgaggctctggccgaaggcgacgttatccgcatcctgcgcggggtgtgatatgtactgcaccctcgcggatttgcttgaacaggttcctgagcggacgttaatccagctcaccaatgaggagctggacttcgactcgcccgcgacggtgaaaactgaggtggtggacagctgtattcgctatgccgatgagctgattgatgcccatctgcgcggacgctataccctgccgctggcggagataccgaccgttctgcgggacattgccatcacgctggtgcgttaccggctctacacccgccgcccggaaggggctgtcccggataccgtgaaggatgaccacaaagaggcccggcgacagctggaggggttgcgtgacaacaagctgacgctggggctgcagtccactcaaaaagacgtgcctgagtccggtgaaatccgggcgcgggcacgtcgccccacctttggcgggcgcgatggcttactggagaaatactga

SEQ ID NO: 76011 - DNA, 336 bp, Citrobacter koseri
atgtcacaggtacaacccgaagtattcattccggcccatcccttcacgactgctgccgggacgcgcattgagcgcgttgaactcaaacgccttaccgttaaggacctgaagatggtccgaaaaacatcaaaagacccggatgactgggatgaatcactgattgcccgcagcaccggttttctgccggaagacctggataatatggaccttgctgattatctggagctgcagaagcgatttcagaaaatcacagggctgggcaagaaacccgaagacgatgacaaaggcacaggggctactggcgaggtggttccggttccagccgggggaaattga

SEQ ID NO: 76012 - DNA, 2466 bp, Citrobacter koseri
gtggccagtaacttttccgtcggcgttgttattggtggcatgattggcagcaccttccgttctgcgatgagcggtacccgacgcgcccttgattccctcaatgacacttcccgccgtctgcaggaacgccaggacaatctgacccagaaaattgcccgctatggccaccttggcacctcctccatgcagaatctgaacaatgctctgctgagggtgggccggactatggagcaggttgagcggcagcaacgccgtttgtcggcagcctctgccaccagtgatgcgctgaaagccaaccgcagggacctgtattctcagggggctgaaaccgccggtattgcgatgatgctaggtgccccggttctaaaatccgtcaagcaatatgcttcttttgaatctcagctccgagatatcggtgttactggtgatttgaataaatcacaagagctacagattggtaatattattcggcaaaaggctctggaaactaaccagtatcaggaaacattaatggaggggattggtaccctcgttgctgcagggcaggaaccattaaaagctgccgggaaaagcggtctgctaggaaaaacagcgacagcgtctggagcagacattaacgatttagccaaaatgagccttgcttttgagtcgcttcgtattacggataatcaagagttagaaaaagcatttaaccgcgcggtatttggcgggaaagccggtcgatttgaattaaaagatatggcgcaatatttacctgaaatggcccagcaattcgccggaaaaggtatttttggacaagaagccttatctcaaattatcgcaagtcttgaggttggtcgcgagggggccggttctgaaggggaagctgcgaccaacatgcggaactggttagcatctatgggacgaggcgatattgccaggcgctatgcaaatgcgggccttgattaccaggattcaatgagccactacgtctctgctggcaagtcgcaatatgaagcatccattcttatcgcagatcgttttattaaaagtaaagggaaagagttcttatctcagtgggagaaagctggagcaagaggagaccgggaagcgcagcaaacattaatggaatcctttggactttcttcaatatttacagatgtccaaacagtgaaccatcttttagccatgagacaacgctggggggattaccagaaaataaaagaggatatgaatggtccaacagcgcagaactctataaatactgatttcgagaaaaaaaatgacacactagaggctcgatggcgtagaacgcagatcggttttaacgagtcggctatcagtattggcgagtctctgcgtcctgcgttgatccagttaggagaaacgttcatacccctgataaacagcgttggtaaatggattgcggcgcatccacaactggtcagcggcactatcaaagtcgtcggcgcattgctcgcatttaagatggccaccatcggtctcaagctggggctgaacctgctgatttccccctttgtgaacgtctggaaaaatgccattttgctgcgtgccaactggctacgcctgacgctggcgctgggggaaggcggtaagctccgctggctggtgaccggcttcagtacggtcgctaaaggagccggaacgctggggcgtgtactggctggcagccttgttcgcggcatcatgctcgtcggacgggccgttctctgggttggtcgggcgctgatgatgaaccctatcggtctggccatcaccgctgttgccgtggcggcttacctcatttaccgcaactggggagcggtcagcggctggtttaaacagcgctgggcagacattaaaacggcgtttaacggcggtatcgtggggattggcaagctgctgattaactggtcgccggtggggcttctctataaagcctttgcggcagcgctgaaatatctcggcgttgatctgcccgcaaagttcaccgacttcggtggtcatcttatcgacgggctgattaacggcatcaaaaacaaatgggagtccctcaaaaccaccgtcaccgacatgggcgacagcgtcggcggctggtttaaagaaaagctgggcatccattcgcctagtcgcgtgtttatgggctttggtgacaatatcgcgcagggggccgccattggcctgcagcgcaccaccccgctggcagcactggctggccaacgactggctgctgaaatgacaccggatgttccccgtatcccgtcgcccgaaatcatggctgcgggatattcaggccgtggtgcagctgcaaccggaggtggaacatctggcggtattcaggtcagctttaatcctcagtttttcctcaatggcaaagaaaccgcagcgcctgccgggctgactggcgcactgaatatgagcctgcatgaactggagaaaatgctggagcgtctgctggctcagaaacaacgtcgggggtacgaataa

SEQ ID NO: 76013 - DNA, 375 bp, Citrobacter koseri
atgaacggcctggaagttaccgacggcaccgggcaactgtttctgaccggcgttctctctcccaatctggccgcccgcgcctggcaccacactggtcgcgccgacggtctggacgtgccgggcagcgaaaccggctttatggtcagcgccatgtacgaagcgctaaaaggcgtttatctctctaccgcctacagctatgccaggcaccggccagaccatgccgcagacgaaaccacctcttttatgcagtttggtgtctggtacgaatacggcggcggacgtttcgccaccgccttcgacagccggttctatatgcaaaacgcatctggcgatcccagcgaccagattttcctgatgcaatatttctactggtaa

SEQ ID NO: 76014 - DNA, 1926 bp, Citrobacter koseri
atgacggctcagacgcaggacatcgggaaggaagtatcttccgtcatcgctcagtcatggcatcgttgcagcaagtttatgcagcgagaaacctggcagacgccgcaccaggcgcaagggctgacctttgaatcgatttgccgacgcaaaacggcgttgctgacgataggccaggctgcgctggaagatgcctgggagttcatggatggacgaccttgcgcgctgtttatcctggatgaatccgcctgtatcttaaaccgctgcggcgaccccgggacgctggagaaactggcggaactgggctttctcgacggcagctactgtgcggaaagcatcatcggcagctgtgcgctgtcgctggcaaccatgccggggcagccaaccaaaacggccggagagcagcattttaaacaggcgctgcacccgtggtcattctgctcaaccccggtatttgataatcacggccgcctgtttggctctatttcgctctgctgtctggtggagcaccagtcagtttctgatttatcgctgacgctggcgatcgcccgtgaagtgggaaattcactgttaaccgatagcctgttggccgagtctaatcgtcatctgaatcagatgtacgggctgctggaaagcatggacgatggcgttatggcgtggaacgagcagggcgtgttgcagtttctcaacgcgcgggcggccacgatgctgcatctggatacgcaggccagccaggggaaaaacatccatgatctggtcaatttgcctgccttgctgcgtcgcgccattaaacacgcccgcgggttgagccatgtcgaagtgacttttgaaagtcagcatcagtttgttgatgccgtcattaccctgaaaccgattgttgaggagcagggcaacagctttattctgctgctgcacccggtggagcaaatgcgccagttgatgaccagtcaactggggaaagtgagccatacctttgaacagatgtcgacggacgatccagaaacgcgtcggttgatccactttggccgccaggcggcgagggggaacttcccggttctgctgtgtggtgaagaaggagtgggtaaagagcttctcagccaggctatccacaacgaaagcgagcgcgcgagcgggccttatatcgccgtaaactgccagctctatgccaatagcgtactggggcaggattttatgggcagtgcgccgaccgatgatgaaaatggtcgtctgagccgccttgaactggcgagcggtggcacgctgtttctggaaaaaattgaatatctggcgccggagttgcagtccgcgctgctgcaagtgatcaagcagggcgtgttaacccgccttgacgcgcgacgtctgatcccggtggatgtgaaagtgatcgcgacgaccacggttgatctggcgaatctggtcgagcagaaccgctttagccgtcagctttactatgccctgcattcgtttgaaattattattcctccgctgcgcgcgcggcgtaacagcatcccttcgctggtctataaccggctgaacggcctgaaaaaacgcttttcaaccagcctgaaggtggatgatgatgcgctggcgcaactggtggcctattcctggccgggcaatgacttcgagctgaacagcgtcatcgaaaacatcgctatcagcagcgataacggccacatccgcctgagtaatctgccggaatatctgttttctgaacgccccggcgtggatacgacatcatcgctgttacccgccagcctgacgtttacggctatcgagaaagaggcgattatccatgccgcccgcgtcaccagcggacgggtgcaggaaatgtctcatttgctgaacattggccgcactacgctgtggcgtaagatgaagcagtacgacatcgacgccagccagttcaagcgcaagcatcacgactag

SEQ ID NO: 76015 - DNA, 909 bp, Citrobacter koseri
atggcctttgagcgccacattaaggatcaagcgcaggacaagccctggctaggagaaaaagcagataagcggcgagttactgaccttgttgaaacctggttcaacgctcatggcgttacactctctgatggcctcaagcgtaagggcgcaatggaatttgcctgctttgctatgggaaaccctctcgccactgaatttaacgccaaactttttgcaacctaccgtgaacaacgtttaagcgggaaaattacacgttctgatcgggtaaaagcagtgactccccgtaccgttaatcttgagctggcgtatttccgcgccatgttcaacgaactaaaaagactggatgactggagtgcgcccaatccgctcgaaaacgtccgggaatttaaaatcgatgaggcagagctagcctggctgacagttgaagaagttaagcagcttctggctgagtgcgagaaaagcaaggcggaagatttagtaactatagtaaagatatgccttgcaaccggcgcacgatggggcgaggcggagtcactaacaggcaagcaaataagccccggcaaaatcacttatatcaaaaccaagggcaagaaaaaccgcgccgttccaataagtgatgagctttacgaaatactcccaaaagtaagaacatcaaaaccagtctttacggggtgctattctgcgtttcgtggggcaattaagcgagcgggaattgagctacctgacgggcagctgtcacacgttctacggcacacatttgcaagccactttatgatgcgcgggggtaacattcttgtactgcagcgtatccttggacacactgatattaaggtgacgatgcgctatgctcatttcgccccagaccatctgacagaagcagtggagtacaaccccttaaatctgatttga

SEQ ID NO: 76016 - DNA, 546 bp, Citrobacter koseri
atgaaaaaaacgctcatatcttttttaatcatgacttcttttgctgtcagtgcagcacctgaacagtacaaaagcatcagcaagttaatggatcattataacgattactcatcatacagcgtaaagggagttgagtacccggcatttaaagttttagcgcaaaatcctttgcatattcaaatatcaccaagcatctactctaaagattcaaaagaaataaaatatgagtcagataaagcgtccgtttacgctgtataccgtactctttttcagactccagctaaaagcgtgaaagttacagtcctacctttatccattgacctccaaaccaaaaaatttgaatacctaactgcggaaaaattcgatttttccataaccagaaagcaagcggaaaatctgttgcgtaagtacggcaacatccgtaaccctgaccaattaatgaccgcaagcggaagctggagcgataacttcaaaaattgctgctatctggaagagggtaagccaggcttgactaaatttgctcaagacctcatttctcaaaggtaa

SEQ ID NO: 76017 - DNA, 651 bp, Citrobacter koseri
atgatccaaaattggaaaggtcaacaacaagatttcactaatcgtaagtcaattcagctaccccatggcggcaaagaccctatcgaacgtatttgcgcagcttatggctttacctcacgacaggcgttatgcagacatcttgatgtgtcacaaagcaccatggctaatagggttacgcgtggtaactttcctgcggattgggttttgatatgtgccatggaaactggtgcgtctttagattggttagtttttggacgcggcgaagcccccaaaatggaaacacatattgaaaacacaaatgagataccccaagcgcaaaaaacactccaattgagttatctaaccatccaaaatggggtggtaaaaaaccaaaagcagattgatgttgcaccggaacttatcccaacaggcacaacttcgccccgccttgttggactagatagtgcgatatggatagtcgatgatttcgcaggtgagcttgtagatgggttttggttgactgaaatggatggtgttatcagtatccgcgaaatgtacagattgcctggtggtcgcgtaagagttgaaaacggaaaggcatcttttgaatgtaatgccgccgatgtgaaaattttgggtaaagccattggcaaaacagaatttatggaatga

SEQ ID NO: 76018 - DNA, 237 bp, Citrobacter koseri
atgaatcgtaatttttcaatgcgccccagcatcaaccttgtggtatctgagccattcatcacactggatgagttctgtcgccgtactggctataagccaagctatgcccgtcaaatgatccgggaaaaccgcctgcctatcaggaagaaagctggagttaacagccttatcgaaatcaacatgttcgcgttaacgatggaagcggcccaaggctgcgaagtcgcaatgcaagcctga

SEQ ID NO: 76019 - DNA, 510 bp, Citrobacter koseri
atgtttgattatcgtgtttccaaacatccgcattttgacgaagcctgccgggcttttgcgctgcgtcacaacatggcgaagctggcagaacgtgcgggaatgaacgtccagacgctgcgtaacaaactgaacccggagcaaccgcatcagctcaccccttcggaaatctggatgcttaccgatcttactgaggactccacgctggttgacggttttctggctcagattcactgcctgccatgcgtaccgatgaacgaagtggcaaaagagaagctgccgcattacgtcatgagcgctactgctgaaatcggacgtgttgctgccggtgccgtatcgggcgatgtgaaaaccaccgcaggccgccgcgatgttatcagcagcataaactctgttactcgtctgatggcactggctgccgtttcgatgcaggcgcgtttgcaggctaacccggcgatggcaagcgcggtggataccgtgacgggcctcggcgcttcgttcggtctgatctga

SEQ ID NO: 76020 - DNA, 201 bp, Citrobacter koseri
atgctgactaaagaaccatctttcgcgtcacttctcataaagcaaagcccggcaatgcactacggtcatggctggatcatggggaaggatggcaaacgctggcacccgtgccgctctcaggatgaactgctggctgacctgtccacaaccaaacaggggaaatcatggctattgaaggcgctacggcgactgttccattaa

SEQ ID NO: 76021 - DNA, 342 bp, Citrobacter koseri
atggctattgaaggcgctacggcgactgttccattaagccccggtaaacgcctggacggactgaaccatattgcggaattgagggctaaagtgtttggtctgaatattgagccggagcttgaaaggtttattaaagatatgcgcgatccacgcgacgtaaataataaacagaatgagcgggcactggcagccattttttatatggcaaaaattccggcagaacgtcacggcgtcaatattagtgatctgactactgacgaaaagcgggaactggttaaagcaatgaatcattttcgtgcagtggtgagcttatttccaaagcggctaaccatgccgaattaa

SEQ ID NO: 76022 - DNA, 234 bp, Citrobacter koseri
atgcgaaatattgaaacccgtaccattaaaacaggaccagatgatgctggaatcaacctgctgctgactgaggcacgcaaagaagaacgccggggacgcgcagatgtgatggctgcgcgtctggattctttagctgcccgtatcgtgtcacgtcagcttaaccacacggaagcggctgagctgctgcgtcaggaagctgtgaagattcagaacgaagcgcaggagatccactga

SEQ ID NO: 76023 - DNA, 228 bp, Citrobacter koseri
atggctgattcaatggaccttgtacagcagcgcgttgaagaagaacgccagcgccatatccacaccgcccgcaataaaacgccgggcgtttcccgtgttctctgcattgattgcgatgcaccgatcccgccagctcgccgccgcgccattccgggcgtgcagtgctgcgtcacttgtcaggaaatcgcagagctgaaaggcaaacactacaacgggggtgctgtatga

SEQ ID NO: 76024 - DNA, 855 bp, Citrobacter koseri
atgagcactattctgaaatgggcgggaaataaaaccgccatcatgccggaactgattaagcaccttcctgctggcccgcgactggttgaacctttcgcgggttcatgcgctgtaatgatggcgacagactatcctcattatcttgtcgccgatattaatcctgacctgatcagcctttacagcgtcattaaaaacgggtctgaatcactaattactattgcgaaagggttctttgataagaataacaccgcagaagattattacggtatacgtaaggaatttaactgtgatcgccactggcccgcagaatggcgcgcagctatgtttctttatcttaatcgccatggttatcgtgggctgtgtcgctacaacttgagcggacattttaatgtcccttacggtaattataaaaatccgtattttcctgaaagtgaaatacgcgcttttgcagaaaaggctcaacgcgcaacgtttatttgtgccagctatgacgaaacactggcgctgctgcagactggtgatgttgtttattgtgatccgccatacgatggcacatttagcggttatcactctgccggttttacagaggacgatcagtgtcatctggcgtctattcttgagcgccgatcatcagaaggtcatccggttatcgtgtccaacagcgacacatcgctgacccgttctctttatcgcaatttcacccgtcaccgtatcaccgcaaagcgcagcatgggtgtggctgccggtgatggtaagtccgcagcagaaatcatcgctacaaaatcagcaggctggtttggggttgatatggcccaccgcgctgatcgcactgtttttgctgaggttcagttatga

SEQ ID NO: 76025 - DNA, 1185 bp, Citrobacter koseri
atgagcaccttggcctactacaacgagtttgatccgtttgcggctcaatggctgcgaaatctgattgatgcagggctaattgcacctggaattgttgacgacaggagtatttcggatgttacagcagcagacctcaaagggttcacgcaatgccatttcttcgccggaattggcggatggtcactcgcattacgcctcgcaggcgtcccagacaactttgcttgctggacaggaagcccgccatgccagccatttagttcagcaggaaaacaactcggtcaactcgatgagcgacatctcgcaccaactttcatgcggcttgtcactcagtgccaccctccaatcctctttggcgaacaagttgcggcagcgattggaaagcactggctcgatgatctattcgatgagctggaaagagaaaattacgcctgcggggcggctgtattgccagcggcaagcgtcggtgccccgcacaagcgtgacagggtttattttggtgcggtcagcatggcccagcccttgcgcccagaatggaatggtgaacggctacacggactggctgaaagttatcagaagaaaagaggcggggaggcaacagaacctacaggatgtagtaattctggctgcatggcccactcctactgcgaacgatttcaaggggagtggaaaaaccgtcattcggaaagacgggaaggatcggacgttcgaccggctggattatgcgacggagcagggtttggctccgtggcctacagtcacgaccatagacaacaatcaggttgccgggatgggggctgcagcaatgcatcccgcgagagggacaacattgggcggagcggcacgattggcgacatgggcgacacctcgcgcagtggatggcagcaaggggagtcgcagctttcagggatgccagaaagaaatggagagaaagggaaaactggacgacctgccaagccaggcaacctatctcacttgtgcaatcagaataactgcttctggaaagatgctgactggattggatgcagggatgggagattccggccggttgaatccggcacattcccgctggctgatgggattcccgccagagtgggacgtttgcgcggctacggtaacgcgatagttccacaagttgcagcagagtttataggcgcttttcttgatggctacggggaaatgttgtga

SEQ ID NO: 76026 - DNA, 2352 bp, Citrobacter koseri
gtgaaagccgcatttccatggaacacacctaaaaaagcggtaaacccgtatgtagacccggcggaagttgcgccggagtctgcgctttcaaacctgatcgctctttacgctgcggataacgagcaggagcagctgcgctgtgaggcgctgagcgatgaggtctgggaacgctatttcttcaatgaatcccgtgatcctgtccagtgcgaaatggagcaggaccggctgattagtcgtgccaaaatggcgcgcgagcagcagcgttataatcccgatctggtcattctggctgacgttaacgccatgccgccccatatcagcaagcctctgctggagcggattaaatatttccatagtctgggcagagcaaaagcctattcccgctacctgcgcgaaacaatcaggccgtgtcttgagcggctggagcgcgtgcgtgacagtcaggcgtctgcctctttccggttcatggcgagtcatgacgggctggaggggctgctggtactgcctgaaatgaatcaggatcaggtcaagcgcctttccacgctggttgcggcacatatgagcatgtgtctcgatgcggcctgtggtgatctgtttgtcagcgatgatgttaaaccagaagaaatccgccaggcatgggaaagggttgccgcagaggcgatgcgtcttgaggtcatcccgcctgcctttgagcagttacgccgcaaaaagcgccgccgcaagcccgtgccctatgaactgatcccaccgtcgctggcgcgtatgttgtgcgcggactggtggtatcgcaaattgtggcagatgcgctgcgagtggcgggaggaacaactacgcgccgtctgcctggtcaacaaaaaagcatccccgtatgtcagctacgaagccgtgatccacaaacgcgagcagcgccgcaaatcgctggagttcttccgctcgcatgagctggtcaacgaagacggcgacacgctggacatggaagacgtggtgaacgccagcaacagcaatccggcacaccgccgtaatgaaatgatggcctgtgttaaagggctggagctgatcgcggaaatgcgcggagactgcgcggtgttttataccatcacctgcccgtcacgcttccacgcaaccctcaacaacggcagacctaatcctaagtggaccagcgccaccgtccgtcagagcagtgactatctggttgatacgttcgccgctttccgcaaggccatgcacaaggccgggctgcgctggtacggcgtccgcgttgcagagccgcaccatgacggcaccgtgcactggcatcttctgtgcttcatgcgtaaaaaagaccgccgttccatcaccgcgctgctgcgtaagtttgccatccgtgaagaccgcgaggagctgggcaccaatacagggccgcgctttaagtccgagcttatcaatccgcgtaagggcacgccgaccagctatatcgctaaatacatcagcaaaaacatcgacgggcgcgggctggctaaagaaatcagcaaagaaaccggcagatcgctgcgtgacagcgccgagcatgtcagcgcatgggcgtcactgcaccgtgtccagcaatttcgtttctttggtattccggggcgtcaggcataccgcgagctgcgcttgctggctggtcaggcggcgagagtgcagggcgaacgcaaagcaggtgcgccggtactggataatccgcgtctggatgcggtactggcggcggcagacgcgggctgctttgccacctacatcatgaaacagggcggtgtactggttccccgcaaacatcaccttgtccgcacggcttatgagcttaacgacgagccgagcacctacggcgatcacggtatccgtatctatggcatctggtccccgattgtagagggcaagatttgcacgcacgcggtgaagtggaaaaaggtacgcaaggccgttgacgttcaggaggcggcagccgaccagggcgcttgcgccccttggactcgtggcaataactgtccccctgttgaaaatctgaacaaatcagggggtgatttacccgatattaaaaccatgaatgagaaggagctgcaggaatatctccacaacatgggccagaaggaacggcgggagctgacagccaggctaaggctggtaaaaccgaagcggaaaaaagcatataaacagactatttcggatcagcagcgcctgcagcttgaggcagaactgagttccagagggttcggtggtagcgagtcagagattgacctgcttctgcgcggcggcagtattccgtcaggtgccgggctgcgtattttttaccgcaaccaccgcctgcaggaagatgacaaatggcgtcagtggtactga

SEQ ID NO: 76027 - DNA, 189 bp, Citrobacter koseri
atgcaggattatcttttggagtcattgaagctccagcgcattgatttttttatcaagcttgtagcggctagtgagtgcagcgacgaagaaaagcggctggctatccagtgggtgtccgaactgaccgacgagctgatggcgaaaatccgcagccatgaatactgccggtcgatggacgtaaccagttaa

SEQ ID NO: 76028 - DNA, 234 bp, Citrobacter koseri
atgcgcattgaaataatgatcgataaagagcagaagattagccaggctacactggacgcccttgaatccgagctttaccgtaatttgcgccctctgtatcccaaaacagcaattcgtatccgtaagggcagtgccaacggcgttgagctgagcgggttaaaactggatgaagataaaaagcgagtgatggaaataatgcagcaggtctgggaggacgacagctggttacattag

SEQ ID NO: 76029 - DNA, 1056 bp, Citrobacter koseri
atgagcaaacgtaaaaacaagaacaaccgcgcagcggtggatcacaacgcaaaatctggcggcgctgcggcagaggcgttcagctttggcgacccggtgccggtgttagaccgacgcgaattgctggactacgtggaatgcgtgcagatggaccgctggtatgagccgccggtgagctttgacggactggcgcggacctatcgcgccgccgtgcatcacagctcaccgattgccgttaagcgtgacattctcagcagtacctacatcccgcaccgcctgctcagccagcaggcttttgcccgtttcgttcaggactatctggtgttcggtaacgcctatctggaaaagcgcaccaaccggctcggcggcgttctctcactggagccagcactggcgaagtacacacggcgaggcgtggacctcgacacctactggtttgtgcagtatggcctgaccacgcagccctatgaatttacgcagggcaacatctttcatctgctggagccggatattaaccaggagatttacgggctgcccggctatctctccgccatcccgtcaaccctgctcaacgagtccgcaacgctgttccgccggaagtattatatcaacggcagccatgcaggcttcatcatgtacatgaccgacgcagcacagaaccaggaggacgtgaacaatatccgccaggcaatgaaaagcgccaaagggccgggcaacttccgcaacctgtttatgtattcgcccaacggcaaaaaggacggcatccagatcatcccgttatcagaggttgcggcgaaagatgagtttctgaacatcaagaacgtgagccgcgatgacatgatggcagcgcaccgcgtaccgccgcagatgatgggcattattcccaacaataccggcggctttggtgatgtggaaaaggccagccgcgtctttgtccgcaacgagctgatgccgctgcagaagcgactgcaggagcttaacgactggctgggcgaagaagtgatccgctttgagccgtacacgctgggactgacagaagacaagcgcaacgactga

SEQ ID NO: 76030 - DNA, 726 bp, Citrobacter koseri
atgcactcaaccccaacgaacctcatgaccaccgccagcctgcctgtagatcgccctttctttgcttaccagcatgaatggaacagtggcgcacgcagcagaaaccgcgtgcttacaaaaatgcgtcaggctggcgcggatttctttttcgcctacgaagccctgaacgatgcactgcataccggacgcaaccagatttttctgggctgcaccccggcatctgcccttaccgtcaaaacttatatgtcagcttttttaagtgaggccgcagcctggacacaccttggaaaaataaaatcaggtaaagcgcatctggaactaccaaacggtgcggtcatttattttatcgggccggaaagcctcgccgccgcgctccatggaaacgtctacgtgtcagagtatgcctgggctgaatcccccaaaaatatgattgcgctcgccaaaagcctgtccatgcacgcgcgctatcacgctacctactacaccaccccaagccccagcccggaagcatggcaggaatacaagaagctgattgcacgcaccagcacaaccagcatgacctttaccgctgatgacgcagcagcatccggggcaacgctcgcaaccggagccgcgctctttgatgatgaatggctgaatgacatgaaaaaagaattatcagcagagggctggaaaatgctgtttatgtgcgaatggccccaggctgacaaggagcaggcggcatga

SEQ ID NO: 76031 - DNA, 1767 bp, Citrobacter koseri
atgaacacgacactgacccccgcagacctcgatccccgtcggcaggccatgctgctgtactttcagggataccgcgtagcccgcattgctgaaatgctgggcgagaaagttgcaaccgttcacagctggaagaagcgcgacaaatggggtgactatgggccgctggatcagatgcagctcaccaccgccgcacgttactgccagctcattatgaaggagcagaaagaaggaaaagacttcaaggaaattgacctgctggcgcgtcagtcagagcgccacgcccgaatcggtaaatttaacgatggcgggaacgaagcagacttaaacccgaaagttgccaaccgtaacaaagggccacgccgccagcccgaaaagaatgttttcaccgatgaacagaccgaaaagctggaagaaatcttccgcaacggcatgtttgaatatcagcgccactggtggcaggcgggcgtaaaacaccgcattcgcaacctgcttaaatcacgccagatcggggcaacatacttttttgcccgtgaggcgctgattgacgccatcaccacggggcgcaaccagatttttctctcagccagtaaggcgcaggcacacgtttttaagcagtacatcatcgactttgcaaaagaggtggatgttgagctgaaaggcgacccgatgacgctcagcaacggcgcgtgcctgtacttcctcggcaccaacgcccgcacggcgcagagctaccacggcaacctgtaccttgatgaatatttctggataccgaaattccaggagctgcgcaaggttgcctccggcatggccattcacaagaaatggcgacaaacctacttctccacgccgtccagcctgacccacagcgcctatccgttctggtccggcgcgctgttcaacaggggccgtgccaaagcggacaaggtggatattgacctgacccacggcaaccttgcgcgcggcgtgctctgcccggacggacagtatcgccagatcgtcaccgtggaggatgcggtgcgcggcggctgtaatctgttcgacctggaccagctgcgcatggagtacagcccggacgaataccagaacctgctgatgtgcgaatttattgacgatctggcgtcagtgttcccgctcagcgagctgcaggcgtgcatggtggacagttgggaagtgtgggcagattttcaggcgctggcgctccgcccgtttggctggcgcgaagtctggatcggatacgacccggcgaaaggcacgcagaacggtgacagtgccgggtgcgtggtggtggcaccgccagccgtaccgggcggcaagttccgcattcttgagcggcaccagtggcgcgggatggacttccgcgcccaggctgacgccatcaaaaagctgacgcagcagtacaacgtgacctatatcggcatcgattcgaccggtgtcggtcacggtgtctacgagaacgtgaaagcgttctttcctgcggtgcgggagtttgtctacaaccccaacgtcaaaaacgccctggtgctcaaggcatacgacattatcagccaccgccgtctggagtttgacgcgggacacaccgacattgcgcagtcctttatggctatccgccgggccaccaccgccagcggcaaccgcccaacctatgaagccagccgcagcgaagaagccagccacgcagatttggcctgggcaacgatgcacgcactgtttaacgaaccgctgcagggcgaagccgccaataccagcaacattgtggagattttctga

SEQ ID NO: 76032 - DNA, 834 bp, Citrobacter koseri
atgacagtgaaagcaaagcgtttccgtatcggggtggaaggtgccaccactgacgggcgcgaaatccagcgtgaatggctggtacagatggctgccagctacaacccgacggtctataccgcgctgattaaccttgagcacatcaagtcttatctgccggacagcacctttaaccgctacggcagggtgacggggctggttgcagaagaaatcaaggacgggccgctggcgggcaagatggcgctttatgccgatatcgaacccacggacgccctggtggaactggtgaagaaaggccagaagcttttcacctccatggaggtcagcacgaagtttgccgacaccggcaaagcctaccttgtggggctgggtgcgacggacgatccggcgagccttggcaccgaaatgctggcattcagcgccagcgccacgcataacccactggcgaaccgtaagcagaaccctgaaaacctgttttcggaagcggttgaaacgctgatcgaactggaagaagcccaggacgaaaagccgtccctctttgcccgcgtcaccgcgctgttcaccaaaaaagagcagaccgatgaggcgcgtttctccgacgtgcataaagccgtggaactggtcgccaccgagcagcagaacctgagcgagcgcactgataaatccctgtccgaacaggacaagcgcctttctgagctggagtcctcactgcaggagcagcaggccgcctttgccgagcttgagcagaagctgagcagcgaagacagccgtaaagactaccgccagcgcgcgccgggcggtgacgcaccggcaggcaccctgaccaattgctga

SEQ ID NO: 76033 - DNA, 1062 bp, Citrobacter koseri
atgaaaaagaaaacccgctttgcctttaacgcttacctgcagcagctggcgcgcctgaacggtgtagagattgaagaactctccagtaagttcaccgtagagccatccgtgcagcagacgctggaagaccagatccagcagtccgccgctttcctgacgctgattaacatcacgccggtcactgagcagtccgggcagctgctggggctgggcgttggcagcaccattgccggaaccaccgataccaccaccaaagagcgcgagcctaccgatccgacgctgatggaagatgtggaatacaaatgcgagcagaccaactttgatacggtgctgacctacgcaaaactggacctgtgggcgaaattccaggacttccaggtgcgtattcgcaatgccatcgtcaagcgtcaggcgcttgaccgcatcatgatcggctttaacggcgtgaagcgtgccaaaacctccaaccgtgctgaaaacccgctgctgcaggacgtcaataaaggctggctgcagaaaatccgcgaagacgcgccggatcacgtcatgggcagcaccacgaaagacggtgcaacgactgcaggcgcggtcaaggtgggcaagggcggcgactatgccaacctggacgccgtggtgatggatgccgtcaacgagctgatcgacgcggtttatcaggatgatgacgatctggttgtcgtctgcggacgtgaactgctgtctgacaagtatttcccgctggtcaacaaagagcaggacaacagcgagaaaatcgccgccgatctgatcatcagccagaaacgtatgggcggcctgcaggctgtgcgcgcgccttatttcccggcaaatgccctgctgatcacccgtctggataacctgtccatctactggcaggaagatacccgccgccgttctgttatcgacaacccgaaacgtgaccggattgaaaactttgaatccgtcaacgaggcgtatgtggtcgaggactaccgctgtgcggcgctggttgaaaacattgaaatcggtgatttcagcgcgcctgccgcaccggaaggtggggaataa

SEQ ID NO: 76034 - DNA, 651 bp, Citrobacter koseri
atgagcctgagtcccgcacggcagcaccgcctgcgcattcaggccgaacaggccgcccgtgagggcggcagtgttcgccatgcgtcgggctatgacctgatgctgctgcagctggcagaagaccgccgccgcctcaagggcgtccagtccacggtgaaaaaggcggaaatcaaggtggagctgctgccgaaatattccgcctgggcggagggcgtgctggctgccggaggtgcgcagcaggatgacgtgctgatgtacgtgatgctgtggcgtatcgacgccggtgattatgccggtgcgctggaaatcgggcgtcatgcgctgcgccatggctgggtgatgccgctgggcaaccgtaacgtgcagaccgtgctggcagaagaaatggcagacgcggcgcaaagcgccctgcttgccgctgctggttttgatgccgctctgctcctgcagacgctggacctgacaaccgatctggatatgccggaccagtcgcgggcgcgcctgcataaagccatcggcgctgtactgagtgaaagcaacccggcatctgcccttaatcaccttacccatgcgctgcagctcgatccccgctgtggcgtgaaaaaagaaaagcagcagctggagcgcagactgcgcaatgacagccgctaa

SEQ ID NO: 76035 - DNA, 465 bp, Citrobacter koseri
atgaagtttgttgcgcccgaacaggcaccggaacaggcggaggtcattaaaaatacgccgttctggcctgatgtggacctgtcggaatttcgcagtgtgatgcgcactgacggcacggtgacgcagccgcgtttaaagcaggtcgtgctgacggcaatttctgaggttaacgctgagttgttcgacttccgcaaccgtcagcagatgctgggctggcggacacttgctgaggttcccgcagaaatgctggacggcaaaagcgagcgtatccggcactaccacaacgccgttttttgctgggcgcgcgccgtgctcaatgagcgttatcaggactatgacgccacggcgtcaggcgtgaagcgaggggaggagctggcggaggccagcggcgatctgtggcgtgatgcccgatgggctatcagccgggtgcaggatgcaccgcactgtacggtggagcttatctga

SEQ ID NO: 76036 - DNA, 204 bp, Citrobacter koseri
atgaaagtgcgtgcgcatcagtatgacacggtggacgcgctttgctggcgtcattacgggcgcacgcagggtgtcactgagcaggttctgcaggcaaatccggggctggctgagtacggcccatttttaccgcacgggctgcaggtggagctgccggacattacggcgtcaaccacggcgcagaccgtccagctatgggactga

SEQ ID NO: 76037 - DNA, 216 bp, Citrobacter koseri
atgacgcttgaacgaatcagcgcctttatcacttactgcatcgccgtgctgctggcatggctgggcgatctgtcgctcaaggatgcgtcaacggttggcggcgtactgattggtgtgctgatgctggctatcaactggtactacaaacaccagtctttcaaattgttacgtggcggcaaaatttcgcggggggaatatgaatccttcaatcgttaa

SEQ ID NO: 76038 - DNA, 510 bp, Citrobacter koseri
atgaatccttcaatcgttaagcgctgccttgtcggggcggtgctggctatcgccgccacgctgcccggtttccagtcgcttcatacctccgttgaggggctgaaactgatcgccgattacgagggatgccggctgcagccttatcagtgcagcgcgggcgtgtggaccgacgggatcggcaatacgtccggtgtggtgccggggaaaactatcacggagcggcaggcggcgcagggacttatcaccaacgtgctgcgcgtggagcgggcactggataaatgtgtggtgcagccgatgccgcaaaaggtctatgacgcggtggtgtcgtttgctttcaacgtgggcaccggcaacgcctgcagctccacgctggttaagttgctgaaccagcggcgctgggcggatgcctgccatcaactgccgcgctgggtatatgtcaaaggtgtgtttaatcaggggctggataaccgccgcgcgcgggaaatggcctggtgcttaaaaggagcataa

SEQ ID NO: 76039 - DNA, 378 bp, Citrobacter koseri
atgaaaaagaaagtcatgagcgtttttttccagctggcatgggctgcgctgttggttatcagtctgctgtatccgcgcagcggtgcgccggttctggttggtgcgtctgtctgggtgtcatgcttcctcgcctggctgcttgctgcgctgtgcgctgtcgggtggttcgccggagatcgggcgcgcgatgaggtcagggcggcattgctgaaattcagggcgcaccccgtaaaacccgtgcgcacatgggtaatcaggctgcttattgttctgtgcctggcgttttcgggatgggtgatcaccctggtgttttacctgctgacgctggttttgtatcagattgcccgcgcgcagcttcatgagccgatggcagcctga

SEQ ID NO: 76040 - DNA, 426 bp, Citrobacter koseri
atgcgtgcgctggcggtagtgctggcgctggcgcttgcggcgctgggctggcagtcatggcggcttaacaatgccagccacaccatcgagacgcagggtgcggcgctgaaaagcaaaacgcaggagctgacgaagaaaaacagccagctgatcggcctgtccattctgaccgaaaccaacagccgggagcagacgcggctttatgcggcagcggaacagaccaccgcactgctgcgcagccgccagcaccggatcgaggaactgaaacgtgaaaacgaggatttgcgccgctgggctggcactcctttgcctgctgacattatccggttgcgggagcgtccggccctcgccggaggtgcagcttaccgtgagtggctgtcccagagtgacgcagtgccgcctggaaaggtcagcgccgcgcagtaa

SEQ ID NO: 76041 - DNA, 432 bp, Citrobacter koseri
gtgaacaaaccgcagtccttacgcagcgccctgaataaagcggttgcctatgtccgcgataacccggacaagctgcaccttttcgttgataacggatcactggtggcaaccggtgccagctccatgtcatgggagtaccgctacaccctgaacgtggtgatcgaggatttcagcggcgaccagaatctgctgatggctcctgtgctgctgtggctaagtgacaaccagccggatgccatcaataacccggatctgcgtgaaaaactgttcacctttgaagtggatattctgcgcaacgatgtgtgcgatatcagcctgaacctgcaactgacggagcgcgtgctggtcagcactgacggcagcgtgtcgagcgttgaagcggtgccagagcctgacgaacccgaagaaatgtggacggtgaaacgtggatga

SEQ ID NO: 76042 - DNA, 447 bp, Citrobacter koseri
gtggatgagctgcagagggtggatgactggctggcggcgctgctggcaaatctggagcctgccgcacgcaaccgtatgatgcggcaactggcgcaacagctgcgccggacgcagcagcagaacatcaggatgcagcgtaatcctgacggcagcggttatgagccgcgccgggtgacagcccgcagcaagaaggggcgcatcaaacgccagatgtttgcaaagcttcgcaccacaaaatacctgaaaaccaccgccagtgcggactccgccagcgtgcagtttgatggcaaggtgcagcgcattgcccgtgttcaccattacggcctgcgggatcgcgtcagccgaaaaggcccggaggtccgctacgcagagcgccgcctgctgggtgtgaatgatgaagtggaaaccatcacccgtgacactctgctgcgttggctggcggggtga

SEQ ID NO: 76043 - DNA, 579 bp, Citrobacter koseri
atgaatgcacaactgaccgaaatcatgcgccttatcaccaacctgatccgcaccggcactgtgaccgaagtggaccgggaaaactggctgtgccgggtgagagtgggcgagcttgaaaccaactggattaactggctgacgctgcgtgccggtggtgcccgtacatggtggtgcccgtcgccggatgagcaggtggtggtgctgagcatgggcggcaatctggaaaccgcttttgcgttgcctgccatctattccaatcagtttgcaccgccgtcggactccgtggacggttgcgtgacggagtacccggacgggggctggtttgagtatgaacccgccaccgggcggtggcatgtccggggtatcaaatccatggtgatcgaggcggcggacaatatcaccctcaaaaccggtgagtttgtggtggaggctgataccacgcgcattaacagcgaggtggtgatcaatggcggcgtcacccagggcggcggcgcgatgagttccaacgggatcgtggtggataaacacggtcacaccggcgttaagtccggcggcgatacgtcaggaggcccggtatga

SEQ ID NO: 76044 - DNA, 360 bp, Citrobacter koseri
atgacgctgtatatcggcatgagccagggaaacggtaaggccattactgatacggaccatctgcgccagtcagtgcgggatattctgctgacgccgcagggcagccggattgcccgccgggagtacggctccctgctttcagctctgattgaccagccgcagaacccggcgctacgcctgcaggtcatgtctgcagtctatgtggcgctgagccgctgggagccacggcttacgctggattccatcaccatcagcagcaattttgacggctctatggtggtggagcttaccgggcagcgcaataacggcgcgccggtttccctttcggtatcaacaggagcagacaatggcagtgattga

SEQ ID NO: 76045 - DNA, 909 bp, Citrobacter koseri
atggcagtgattgacctttcccaactgcccgcgccgcagatagtggacgtgccggattttgagacgctgctggctgaacgcaaggccgcttttgtggccctttatccggtggatgagcaggacgcggtacggcgcacactggcgctggaatctgaacccgtcaccaagctgctgcaggaaagcacataccgcgaaatcctgctgcgccagcgtattaacgaggctgcgcaggcggtgatggtggcctattcgatgggaaatgatcttgagcagctggcagccaactacaacgtgaaacgccttacggtaacgcctgccgacaacgacgcggtgccgccggtcgcggcagtaatggaaagcgatgaggcactgcgcctgcgtgttccggctgcgtttgagggattgtccgttgcagggccgacggcggcctatgagtttcacgccaaaagcgcggacgggcgcgtggcggatgccagcgcaaccagcccggcaccggcggaggtggtgcttaccgtactgagccgtgagggtgacggtacggcagaggctgatctgctggcggtggtggagcaggcgcttaacagcgagaacgtgcgcccggtggcagaccgcctgacggtgcgcagcgccgaaataatcccgtacagcgtggatgcgacgatctttctttatccggggccggaagctgagccggtgatggcggcggcaaaagccagcctgcagaagtacatcgccagccagacgcggctgggccgtgatatccgtcgcagcgccatttatgccgcgctgcacgttgagggcgtccagcgtgtggagctggcctccccgctggatgatgtggtgctggataagacgcaggcggcatcctgtacggaatggagcgtaaccaacgggggcacggatgaatag

SEQ ID NO: 76046 - DNA, 606 bp, Citrobacter koseri
atgaatagcctgctgccgcccggttcatcgccgcttgagcgccgactggcgcaggcctgcagcgggatttccgatctgcaggtgccgctacgtgacttgtggaacccggcaacgtgtccggtcagctttctgccgtatctggcgtgggctttttccgttgatcgctgggacgaaagctgggcggaaaacgtcaagcgccgcgtggtgcaggatgctttctacatccatcagcacaagggaacaaccagcgccgtgcggcgcgtggtggagccgttcggcttcctgatccgcatcatagagtggtggcagaccggcgagaaaccgggcacgtttcgcctggatattggcgtgcaggaccagggcattacggaagaaacctatctggaactggagcgcctgattggtgacgccaagccgtgcagccgccatctgattggcatgtccatcaacctgcagaccagcggcccatattttgtgggcgcagccacctacaccggtgaagaaatcacgatctacccgtatatcaacgaaaccattatttccggcggcaccgcttatgagggcggagcggtccatgttattgacacaatgagagtgaatccatga

SEQ ID NO: 76047 - DNA, 1317 bp, Citrobacter koseri
atgagcgcaaaattttataccctgctgacggatatcggcgcggcgaaactggcaagcgccgccgcgctcggtgtcccgctgaaaattacccagatggcggtgggcgacggcggtggcgtactgccaaccccaagcgcacagcagacagcactggttgctgaaaagcgccgtgcggcattgaatatgctgtatatcgatccgcagaacagcagccagattattgctgaacaggtgatccccgaaaccgagggcggttggtggattcgtgaggttggtttgttcgacgaaaccggcgcactgattgccgtgggtaactgcccggagagctacaagccgcagctggctgaggggagcggacgcacgcagaccgtgcgcatggtgatgattaccagcagtactgacaatatcaccctgaaaattgacccggcagtagtgctggcaacccgcaaatatgtggatgacaaagtgctggagctaaaggtgtatgtggatgacctgatggctaaacaccttgctgcagcagacccacaccctcagtatgcaccaaaagaaagtccagtgctgacgggcacgccgaaaacgccaaccgcaccggcaggaactaataccacgcagattgccagcaccgcgtttgtgcaggctgtggtcactgcgctaaataacgcgctggcgcttaaggccccactggcaagcccggccctgaccggaacgccaacggcacccactgctgcgcagacagtcaacaatacgcagattgccaccacggcatttgtgaaatcggctattgctgcactggtggcatcatccccggcggcgctggacacgctcaatgaactggcggcagcgttgggtaacgatcctaacttcgccacaaccatgacgaatgcactggcaggtaaacaaccgctggatagtacgttgactgcacttgccgggaaatcagttgctgatctgattcagtatttagggatggggactgcagctgctcgtgatattggcactggtgttggtcaggtgcctgatatgaacagctttggaagtagtcttaacactgcgggctatcaaaaattacctggtgggctgattattcaatggggctttacctccacggggtcagcaggcaatacggtgactttacctgttgcatttaatagctggatcgctggttgcgtgggctgtgaatcaggggacgatacttcaattaaagttgtgtcagttatccctaagtcactttcgaccattaaagtttccgggcgtgtagtgggtgccagcacactggctaatacatctgtacgttggattgcgattgggtattaa

SEQ ID NO: 76048 - DNA, 399 bp, Citrobacter koseri
atgaaaatttattcctccagagtgtcccccggcttttatgtcgatggaatttcgaatatccctgacgatgcacaggaaataagcgttgaattatggcgcgaattacttgaaggtcaggcggaagggaagattattgatttcactaatgtgccgccagcattggttgaatacgtgaagacgccagaagatgaagcagctgaggcggagtcaaaaaaagcggagttacgacttatagctgacactgctattgcgcctttggaagatgcggtcgagttgggtattgcgactgacggagagcagaccaggctgagtgaatggcgaaaattcagagttatgctaaatcgcgtaaatacatcacaggcccccgatattagctggcctgtacttccagacaattaa

SEQ ID NO: 76049 - DNA, 1173 bp, Citrobacter koseri
atggctcaggattaccaccacggggtgcgcgttgttgaagtcaacgagggcacccgatccattaccacggtgagcaccgccatcgtgggcatggtctgcaccggcgatgatgctgatgcgtccatgtttcccctcaacaagccggttctgctgaccgatgtgctgaccgccagcggcaaagcgggcgagtccggcacgctggcccgttcgctggatgcgattgcagatcaggcaaaacccgtgaccgtcgttgtgcgcgtggcgcagggcgaaaccgaagcggaaaccacctccaacattatcggcggagtgaccgctgacggtaaaaaaacgggcatgaaagcgctgctttcggcgcagtcgcagctgggcgtcaagccgcgcatcctcggcgtgccgggacacgacacgcaggcggttgctactgagctgttgagcgtggcgcagagtctgcgcgggtttgcctacctgtccgcctatggctgcaaaacggtagaagaagcgattgcctaccgtgacaatttcagccagcgcgaggggatgctgatctggcctgacttcatcaactttgacaccgtgctgaatgcagatgcgacggcttacgcctccgcccgtgcgctcggcctgcgcgccaaaattgacgagcagaccggctggcacaaaaccctgtccaacgtgggcgtgaacggcgtcaccggcatttccgccgatgtgttctgggatctgcaggacccggcaaccgatgcgggactgctcaaccagaatgacgtcactacgcttatccgcaaagacggcttccgcttctggggttcccgctgcctcagtgacgatccactgtttgcttttgagaactacacccgcacggcgcaggtgctggctgacaccatcgcagaagcgcacatgtgggcggtagatggcgtgctcaacccgtcgctggctcgtgacattatcgaaggtatccgcgccaagctgcgcagcctgaaaacgcagggctacatcatcggcgctgactgctggctggatgagtcggttaacgacaaagactccctgaaagccgggaagctcaccatcgactacgactacacgccggtgccgccgcttgaaaacctgatgctgcgccagcgcatcaccgatcagtacctgctggatttctccagccaggtcagcgcgtaa

SEQ ID NO: 76050 - DNA, 516 bp, Citrobacter koseri
atggctttaccacgcaagttaaaacacctgaacctgttcaacgacgggaacaactggcaggggatcgttgagtctctgaccctgccgaaattcacccgcaagtttgagaagtatcgcggcggcggtatgccgggcgcggtggacgtggacatggggctggatgacggcgcactggacacggaattttcaatcggcggcaccgaactgctgttattcaagcagatgggcaaggcaaccgttgacggcatccagctgcgtttcaccggttccattcagcgtgacgataccggcgaagtgcaggccgttgagctggttgtgcgcgggcgtcataaagaagtggattccggcgagtggaagaccggcgagagcagcagcaccaaggtcagtagcaccaacagctacgcgaagttgaccattaacggcgaagtgctctatgaggtcgatctggtcaacatggttgaaatcgttgacggcgtggacctgatggaagaacaccgtaacgccctcggcctctga

SEQ ID NO: 76051 - DNA, 303 bp, Citrobacter koseri
atgagcgacaaactgactgaaaagactgtgcaactggataccccgatcaagcgcggtaaaactgaaattactgaaattgtgctgcgcaaaccgcagtccggggcactgcgaggcacccgcctgcaggccattatggatatggacgtgggcgcgatgatgactgtgatcccgcgaatctcctccccgacgctgaccgcgcaggaaatggcagagctggaccccgccgatctcaccgcgttgtcggttgaggtggtgacttttttgttgaagaagtcggtgcttgccggtttaccgacagcctga

SEQ ID NO: 76052 - DNA, 3075 bp, Citrobacter koseri
atgagtgacaacaacctgcgcctgcaggtgattcttaatgcggttgacaagctcacccgcccattccgatccgcgcaggccagctcgaaggagctggctactgtgcttcaaaccacccggaacagtttaaaagaactgaataaacaggccgggcgtattgatgaattccgtaaaacccggtcacagcttgcaatcactgcaacaaatctcagtgctgcgcgcgaagaagccgcaaaacttgccacgcagtttgctgcaacaaatcgcccaactgctgctcaggctaaattattaagccaggcaaaaaaccgtgtgcaggaactgcagcagacctacaacggcctgctgggttcggtacaacggcagcggcaagcactgaaagaatccggcattgatactaaacagctgagtagcgcccagcgggaactgcgtaaaaatgccgacgaaacccggcaggcgctggaacgtcagcagaaatccctgaaacgcctgggcgaacagcaagcgaaaatgaatgccgcacgtgagcaatattcacgccgtcttgaggtgagggatcgcattgccggggcaggggcaaccaccacggcagcggggctggcaatgggtgcgccggtcatggcagcggtgaaaagctactccagcatggaagatgccatgaaaggcgtggcaaagcaggtaaacgggctgcgggacgataacggcaaccgcacgaaacaattttatgacatgcaggatgccatcaaggccgccagcgaacagctgccgatggagaacggcgctatagactatgccgcactggttgaaggtggtgcgcgcatgggcgtgactaaacaggacgatccttacgaagaccagaagcgtgacctgctggcctttgcatccacggcggcaaaagcggcaacggcgtttgagctacccgccgatgaattagctgaaagtttgggaaaggtggcgcaactttataaggtgcctacccgtaatatcgagcaattgggcgatgcactgaactatttagatgataacgctatgtcaaaaggcgcggatattatcgacgtgctgcagcgcatggggggggtggctgatcgattggactatcgtaaagcggctgcgcttggctctacgctgcttactctgggggctgccccagaagtagccgcaaccgcagctaatgcgatggtgcgtaaattgtctgccgcaacagttcagggaaaaagttttcaagaaggggtgagcatattaaagctcgatcctgaaaagcttgaaaaacaaatgaccaaggacgcgatggggactattcagagtgtacttgagaaggtcaatagtctacccaaagataaacgattaggcgtgatgtctttagtctttggaaatgaatttggtgatgatgcggcaaaacttgcaaacaatcttacagagctgaaacgccagcttagccttactgcaggcaatgaagcgaacggctccatgcagaaagaatctgatatcaacaaagactctttatctgcgcagtggttgttggtcaaaacaggggcgcagaacgctttcagtagtctgggcgaaacgctgcgccagccactgatggatattatggattccgtaaaaagagtcactggggcattacgtggctggatagaggccaacccgcaactggcaggtacgttgatgaaagttgctgcagcgactgccgcgatcaccgttgcgctcggtacgcttgcggtggcggtggctgcagtgctggggccgatagcggtgatccggtttggcctgtctgtcttgggtataaaaactttgccttctgttactgccgcagctacccgaactggcagtgcgttgtcatggctggcaggcgctccactttccctgttgcgtcgtggtatggcctcatccggtggcagtgccgggctgctgaacgctccccttaattccctgcgccgttctgctgggctggctggcaatgcactgaaagcagtagcaggtgcgccgcttgccatgctacgcgccggaatgtccggtattcgtaatgtaattggtatggttatgaatccgctggcaacgctgcggggcgggttgtctgctgccggtggcgtgctgcgttttctggtatccggtccactggcattacttcgtgtcgcgctatatggaatttccggcctgctgggtgcgttacttagtccgatagggctggttgtgactgcgctggctggcgtggcgctggttgtctggaaatactggcagccgatcagcgcatttttgggtggtgtggttgagggattcaaagccgctgctgcaccgatcagtgctgcctttgagctattgcggcctgtttttcagtggattggcgacaaggtgcaggctttgtgggggtggttcactgatttgcttacgccggttaaatccacttccgaagaactgaacagcgcagctgcaatgggccgcaggtttggtgaggcactggcggaaggtctgaatatggtgatgcacccgcttgagtctctcaagtcaggcgtgtcgtggttgctggaaaaactcggcatcgtcagtaaggaagcggcaaaagcaaaactacctgaacaggttacacgacagcagcctgctacggtgaacagtgacggtaaggtggtgttgccgcctggcggatttccgtcgatggggtttgcaggcatgtatgacagcggtggcacgatcccgcatggtcagtttggcatcgttggggagaacggccccgaaatagtgaacggtcccgcaaatgtgaccagcagacggcgcactgctgcgctggcttccgtcgttgcaggcgtcatgggcgtagcggcagcgcctgcagaggctgctccactacatccttacagtctgcctactgaggcatataaacaaagccagccagcgaaatctgccagcgcgccgccagtgatgcactttgaaactcacgcgccgatcactatctatgctcagccagggcaaagtgcgcaggatattgcccgtgaagttgcgcgacagcttgacgaacgcgagcgcaagaccagggctaaagcacgcagcaatttcagtgaccaagggggatatgaatcatga

SEQ ID NO: 76053 - DNA, 486 bp, Citrobacter koseri
atgatgatggtactggggttatatgtcttcatgctgcgtacagtgccatatcaggagctgcagtatcagcgaagctggcgacacgccgccaacagtcgggtgaaccggcgaccatcaacgcagtttcttggcccggataatgactcgctgacgttatctggcgtactgctgccggaagtcaccgggggcaggctgtcattgctcgcgctggagcaaatggcagagctgggcaaagcatggcctctgattgagggaagcgggaccatttacggtatgtttgtgatcgagagcctgagtcagacaaaaacagagttttttgaaagcggaatgcctcgccgtattgagtttacgctgaccctgaaaagggttgatgagtcgctgtctgatatgttcggcagtctcagcgatcagctcagtaacctgcaggactctgcaacgtctgcgataggtaatattaaaaatacggttggagggttgctgcagtga

SEQ ID NO: 76054 - DNA, 1101 bp, Citrobacter koseri
gtgaattttagctctgatctttttgacctgaacagcagaagtccggctttcagtatcactattgaagggaaggacgtgaccaccgcgctggatgcgcgcctgatgagtctgacgctgaccgataaccggggttttgaggctgaccagcttgatctggagctggacgacgccgacgggcagatcgttctgccgcgacgtggtgccgttattcagctggcgctggggtggaagggccagccgcttttcccaaaaggggcatttacggtggatgagattgagcacagcggtgctcctgatcgtctgactatccgtgcccgtagcgctgatttccgtgaaaccctcaatacccggcgcgaaaagtcatggcaccagacaaccgttggcgatgtgataaaggaaattgcagcacggcataacctcaaaatggcgctgggtaaagacctgacggacaaggcgctggatcacatggaccagaccaatgaaagcgatgccagtttcctgatgaagctggcgcgccagtatggggcgattgcttccgttaaggatggaaacctgttgtttatccggcaggggcagggaagaacggcgagcggcaagccgttgccggttatcaccattgagcgtaaagccggtgacggtcatcgttttaccctggctgatcgtggtgcttataccggcgtaattgccagttggctgcatacccgcgaacccaagaaaaaagaaacaaccaaggttaagcgccgtcggaagaaaacctccgcgccaaaagagccggaagcaaaacagggtgattatctggtgggaacggatgaaaacgtgctggttcttaatcgtacttacgcaaaccgcagcaatgctgagcgtgcggcaaaaatgcaatgggagcgcctgcagcgtggtgttgcgtcattctccctgcagctcgctgagggccgggcagacctctacaccgaaatgccggtaaaggtgagcggctttaagcagcctatcgacgatgccgaatggaccattacaactttgacgcatacggtcagtccggataatggttttactaccagtctggagcttgaagtaaaaattgatgatttagaaatggaatga

SEQ ID NO: 76055 - DNA, 219 bp, Citrobacter koseri
atgatgaattgtccgaaatgcggacatgctgcacatactcgcagtagctttcgggtgtctgataacactaaagaacgctactgccagtgccaaaatattaattgtggcaccacttttgtcacccatgaaaccgtcgtgcgctacattgttacccctggacttgtcgatcatgctccgccacacccattaaatagtggtcagggacacatgaatttctaa

SEQ ID NO: 76056 - DNA, 285 bp, Citrobacter koseri
atgccgcgtctgactgccaaagactttccgcaggagttgctcgattactatgactactatgcacatggaaaaatctctaaacgcgagtttcttaacctcgcggcaaagtatgccgtcggcggcgtgaccgcgcttgcgctgtttaatctcatgaagccgaattacgcgctggcggtgcaggtggaatttaccgacccggacattttgccggaatacattacgtatccgtcaccgaacgggcatggcgaggtgcgcggctatctggttaaaccggccgacgggtaa

SEQ ID NO: 76057 - DNA, 153 bp, Citrobacter koseri
atgaattcattttctccccgttttgtaaacgggctgatgatgtacgtaagcattatgctggatgtgttaattacccgcatcaaaggactggaggcacagtcttattttcaccggaataaaaaacaaacaacaattctgttacaccgtaaataa

SEQ ID NO: 76058 - DNA, 609 bp, Citrobacter koseri
atgggtaaatcgcttggaactctttttggctctcttgttatcgctccggccatattttttatcattaattcactgtgctttcgtggtaatcaggtcacgcaggagcaggtaacccaatatatcaatgacagtaagaccattgaattcttaattccttatgcatacgatgaaagtgatgaaaaaaaggtaagtttcgaagtgtatcgcagaggcttacgtgatcttaaaacaattcatcggtttgcattcttctccaaagaatacaacagatattttgtggtaatgaactttgatggttttgattatagtggcgcatttaactctgatcgtaacggacttgagagaaatcccgtactccatagaggtgggtactttatggtacatgcaaacaatacacaatggcatgatataaactatggagctaaagaaaatccagtaccgattttcgcttttgaagtaagtccccgcagttataaaaccagttgggtcctggaagataaaaagaaagaatttgatgtttccgatgatattaaccgtatatttgtagagcaataccttaattattttatatcagatgaaaatttcaagaaattatttcaaaaacaataa

SEQ ID NO: 76059 - DNA, 1140 bp, Citrobacter koseri
atggcgcgttcatttgtcagacaaggtgtaaatattatttgcagtaatatgaccatatcgacccccagaaagctggggctgaatccggctaaagaaccagttgagacagcgggaattacaatatattcaaaaattcctgtaccattgctcaatatatcagataaaaagctggatgcttgttttgaatgtaaaatgccgctgaaagtatggggtgggcttgccatgttttttgcaggcatagccgctgtggcggtggttgttcttgtagttgccactctgccaatatccggccctattgctgccgcaataactgctgcatccgcgaccgctttaacaattggaacaatagcaacagtgggtgaagtggctgcggcaagttatggcatttataaaacactgcatgagtgtgacagggttgctgattctcagtggcaggaatatcataaaaccgtttttattgaaagagaaaatgcgcttctggattcatcgtatataaagtgcccggttggtggtaagcttaacattattatagatgatgctattgcacaaaaagcagcaagaatgatatccgacgctaacagtagtgagatttatgctcattggaccagtaaatttgttaatggcataattacttatatcgccacgatggggttaccatttggggtatccgttctctcagggttagagatttacggtacagcaactgatagcggtaagtcaaaccaaggtcgtgatattcctggtgacattaagacagcggcaaaaaatcaaggaattggtaccgcaggtgatgtgggaaacgcggcgcttaagcatggaaccacaaatgtggtaggttcctggattctggacggggttatcatagcacagagtaaaggtatgctaacggcggctcatggagacgcagtcctgaactggctggttaaatacgggagtcgtttttcctttaaagagtttgctacaggcagcctggtaggactcggtggcactgtgctgggttttgctgtggatgaatattctaatgaaaaagaaaggaagtatgagcaagaggcaaatactgaactcgacttattcaatacaaaagatgaatctgagacatcaaaaaattccatcggtataatttccgtaagaaacgattaa

SEQ ID NO: 76060 - DNA, 879 bp, Citrobacter koseri
atggatttaagtggaagtaattttgtttatcagcctgataatttacaggatgttgtcagatacagagttgaacaagaagtatcaatcaaacttaacaaaatcctggtgaacaatacaatagtcaaaactgactatacagtaaagcataatcataatgagcctttattctattcagtgtatgtcgatgaccatatatcaaaaacatcaccagatgcacatcagactctgttggatatcgtgaaggaaattgacataataaaaagtaatgtggatttattaattaatgctgacacaggcaggcctgaagtactaaaaaatcatcatgttattattgatgaatggaatatcttcaaagaaaacttttttaaaaaaaatgaattcattcgtgcaaaagagacccaacagggtattcaggatttcatgtcagtatttgacgaacaaatccattcccatgagcagttgattgctggcctaggtagtcaaattttctttgatacattttttaattattatcttgtccatacgcagggttttgaatctgattctggtatgaattaccattctcagttatttaaagatatcataacgcctctggttgttagtcagaaaatcattcaggaaaatccgaaaactgtaaccattcgcaaaacgggtgtgccgaaaggtaatataaatgtggcaaaaataaaagaacaatatgatgagagatataaaccagtcattgactatcaattttctgagtatcaggttaagtatgatgctcagattgaatttaatacagcgagaaatcatatagagtatgctgatatccgaatgaatgagtgtatcagaaacaacgtggaaatggatattcactgtcgcatctggagaatacagtaa

SEQ ID NO: 76061 - DNA, 1941 bp, Citrobacter koseri
atgtcgttaaaagggctgcgtttcacactggcagtgggcggactgccggaaatgaccactgcggtggtcagttttcgacttactcagcattactcaaaacctttccagctaaaggtggatattgctagtggtctttctgacctgacagcaaccgattttcttgaaaaaaacgccgtactgaccatctggcaaggaatggagccacaacgctatatcagtggtattgtctctgccgtaaccctcagtgaaaacaaccactggcagatggggtaccatataattatctcaccaccactctggagaagcggtttacgccagaatttccgcattttccagcagcaggatatcaaggcaatctcctccaccctgctcaatgaaaatggcatcaccgagtggaccccggtattttatgagccgcatccggcacgcgagttctgcgtgcagtacggtgagacagaccttgccttcctgacccgcctgtggtcagaagaaggtatcttttattttgactggtgcactccggaagggacggagcaaaagctggtactgtgcgatgatgtggcgggagtatcgtcactgggagccatgccatttaatccgaatacgacggcagaggcatctaccgagcatatcagccagttcaggtatcatgcgcagatacggccttcatccgtcgaaactcaggactacaccttcaaaacgcccggctggccgggttattacagccgtgccggagagaatctgaacggccagctcacacagtatgaaatctttgattatcccggacgtttcaaggacgaatcccacggacaggcgtttgcccgctaccagattgagggccggagacatgatgcagagatagcaacaggttacagtaactcaccaaaaatgtggccagggaagcgctttaccctgacaggacatccatcagtatcgctgaacagggagtggcagattgtgggtagcgtactggcaggagaccagccgcaggcactgcatggcagtcagggaacgggaaccactctcagcaatcgtttcgaggttatcccggcagacaggacatggcgcgttccgccccaaaagaaaccttccgtggacggcccccagagcgccatcgtcaccggcccggcgggggaagaaatcttctgcgatgagcatggccgggtgcgggtgcgctttcactgggaccgctactgtccggggaatgaggacagctcctgctgggtacgggtatcgcaggcatgggcgggcaccgggttcggtaacctcgccataccgcgcgtgggccaggaggttatcgtggacttcctcaacggcgacccggaccagccgataatcatgggccgcacctaccaccaggataaccgctcaccgggcagtctgccgggcacgaagacgcagatgactatccgctcaaaaacctataaaggcggcgggtttaacgagctgacgttcgatgacgccaccgggaaggagcgggtgtatatccatgcgcagaagaacatggatacggaggtactgaataaccggacaacggacgtgaaggttgaccacacagaaactatcggcaacaaccagaaaatcacggtgggcgtggggcagaccgtcaatgtgggcagtaaaaaggcagagggtcatgaccagacggtcacggtggcgaatgatcagaaaattaccgttcagaataaccagacactggatgtgacggaaaaacggacaaaaacggtaggtggcgatcagatatcaactattacaggagacgatattgaaaaagtactaaaaacacaaattattgacattggcaaactgttttccctaaccgcaaaaaatatgatagtgctgaaatgtggtgaaagtctgttcagtatggacgagggcggaactattaccatcacaggtaatctgattaaaatcaaaggcaaagaagttgacattaactga

SEQ ID NO: 76062 - DNA, 729 bp, Citrobacter koseri
atggaaaacgattattataaagtaactaaagatttgattcatacagggcttgatgcaatatcaaagtccataaaagaatgtgaaaaaaaagccagagtaagggagtccatattttctgacttgcaagaagctggaatagctgtcagaaaacgaagcgactggaaagcaaaaaaggccccaggaactgatggcgaagactggaactacctcgcaatcgtgatacatcatgctggaaatagttactcctgtgataacgatggggaagttaaaatgcgtcaggctgaagaaaccgacattaaaagttttaatcatttaagttatcattatgctatagattgcacaggtataatttatgaagctctggatataagagaaaagggtgctcatctaaaaggtgcaaatacaggaaaaattggcatagtttttttatcagactttagtttaccaggtgaagcatcacaatatggcccctcccgatggggatcattaagtgagtttgccgggcaagtgaaggataactgggattcatccgttgatataccaaccactaatcagaaaaaatctatcgatgttttagttaagactcttataaaatttttcccgatcacacaattaggaggacatagagagtttgcctctttaaatgatttaggccgagcttgtccaggaacttatggacttcagattgcagctgacctcagaacaaagttcaagttaatggccccttaa

SEQ ID NO: 76063 - DNA, 519 bp, Citrobacter koseri
atgccaactccatgttacatctcaataacaggccagacccagggcaatatcaccgcaggcgcattcaccgcagattctgtcggcaacatctatgtgcagggccacgaagatgaaatgctggtgcaggaatttctgcataacgtgacggtgccaaccgatccgcagtctggtcagccagccggtcagcgtgcccacaagccgttcatttttaccgtggcgctgaataaagcggttccactgctgtacaacgcactggcgtccggtgaaatgctgccaaaagttgaactgcactggtggcgtacttctgttgaaggtaagcaggagcactacttcaccacccgcctgacagacgcgactattgtggatatggacctgcatatgccgcactgccaggacccggcacagcgtgagttcactcagttgctagccgtttcactggcgtaccgtaaggttgagtgggaacacatcaagtctggcacttccggtgccgacgactggcgtgcgccgctggaagcataa

SEQ ID NO: 76064 - DNA, 507 bp, Citrobacter koseri
atgagcagcagaaaaaatgacagcagtggcagtattgcccctaaagaacgtgtaaatataaaatttcaaccgaaaacgggaaatcagacagcagaagtggaactcccgcttaacctgctggtgactggcaatctgaccggtggcgcggatgatattccgctggacgaacgccagccggttgctattaatcgtaacaattttaacgccgtactggaccaggcgggtattgggcgtgattttacggtgccctctgcgctcagtgaaacccctgatgcacgtatgtgcgtcaatctgaaagtgaaagcgctggccgatctgtcaccggacaacattgccgcccaggtgccggagatgcgcaaaatgctagaactgcgcgaagcgctggtagcgctccgggggccaatgggcaatatgcctgccttccgtgcgcagcttcaggcactgcttgctgacgaaaagagccgcgaacagctgattgcggagctgggcctcgcgggtcggaaataa

SEQ ID NO: 76065 - DNA, 1485 bp, Citrobacter koseri
atgtcagagaccaccttaccggaagcgctcgcttctacatcacctgtcgccacaccctgcctgttggatgagatcatggcgcagacccgttttaaaccggcgtcagaaagctacgatatcgcccgtcagggtgtgaccgcctttatcaccgcactgttgcagaatgatgatgaggcagagtctgtcgatattctggccgtcaacggcatgatcgccgatattgatacgcgtatgggacgccagatggatctgatcctccatgccccggaatttcaggaactggagtcattcctgcgttcgctgaaactgctggttgatcatgccgatccgcgtgaaaacattaaaattcacatcatgcacgctactaaggacgaattgctggatgactttgaatttgcggcagaaattacccagtcagggttctaccggcacgtctattccagcggttttggtcagtttggcggtgagccatttgccgcagtgattggcaactacgcgtttgagaacaccgccgcggatatgaagctgctgaaatatatcagcgccgtcagcgcgatgagccactgcccgtttttgtcttctgtatcgccggagttctttggtctggattcgtttaccgaacttcctggcattaaagacgttgccgccatttttgaaggcccggcctacaccaaatggcgttcgttgcgcgagtccgaagattcccgcaatctcggcctgacggcgccgcgtttcctgctgcgccatccttatgcaccggaggagaatccggttaagagctttaactaccatgaggatgtcagcaaaaatcacgagcattatctgtgggggaatactgcgtttcttctggcggcgaacatggccgaaagtttcatgtccaccaggtggtgtccaaatatcgtcggtccacaaagcggtggtgcggtaaaagatttgccggtgcatttatatgaggcaatgggccagcttcaggccaaagttcccactgaaattctcattaccgaccggcgggagtatgagctggcagagcagggctttattactcttacaatgcgtaaaggctctgataatgcagcatttttctccgcaaactcggttcagaaaccgaaagttttccccaacactgtggagggtaaagaggccgaaaccaactacaaactcggtacgcagcttccttatcttttcattatcaacagactggcccattacatcaaagtgctgcaacgcgaacagcttggctcatggaaagaaaggggcgatctggagcgtgagctgaacggctggatacgccagtacgtggctgaccaggagaacccgccttctgacgtgcgcagccgtaaaccgctgcgtcaggcgaagattgaagtctctgatgtggaaggtgagccaggctggtaccaggtagccctgagcgtcagaccccactttaagtatatgggggcatcatttgagctgtccctggtcggtcgtctggacaaggagtaa

SEQ ID NO: 76066 - DNA, 429 bp, Citrobacter koseri
gtgatcacggaacgggagttcgggggcagtctgtttgaacgtatcgggggggcggaaaaactgccttcacgccagcacctaaaaacggagttgttgtattctgtacgcgataacctgcgcaatatcctcaacacccgttccggtagctgtcatggttcgccggagctggggatcgctgattttaacgatgagtcacctgaacgccagaacatccgggaatggatggttcaggcgattcagaactgtattctgcgttacgaaccccggatatcggatgtggtggtgacagctgccacagaggatcaccatgcgccactggaactgcgttttcatattgtggcgtatctggatttcagcgacagacaggatgttctggagtttgacattctgctggataatcaccagcactggtgcgtggagtcagactga

SEQ ID NO: 76067 - DNA, 1833 bp, Citrobacter koseri
atggccttcgaagagcgttattaccgcgaggaactggattatctgcgtcaactgggcaaacttcttggtcgtgaaaaacctcatcttgcccgttttctggctgagaaagagggcgaccccgatgtggaacgcctgatggaggcatttgctttcctttccggtggcctgcggcagaagctggaggatgagtttccagagtttacgaacgggctaatcaacatgctgtggcccaattatctgcgtccggtgccttcaatggccgtggttgaatacaaccccgttgcgacacagttttctgcgcctgttcaggtttgtcgtgatgaactgatttgctcaggcccgattcgcgtgacgtcatcgggacgtaagatcctggccggggatgatgttaccccgtctcctgtctgccattttaccctggcacgtgatacttggctgcaaccgttacatattcgcgatgtgcgtaacaccagcacgctgaaaaaaggatacattgacattgattttttcaccgaaggtagcgtctctcccggcacactggatctgaataagctcactttctggctgggaaacggagatgactatacccgccagcaactctatttatggttcagtgagcggttaatggatgcggaactggtggctggagagcggcgtattccactaccggatttgtggctgaatgccgccgggtttgaacgggaagatgcgttgttgccgtggccgaaaaacgtccatagcggttaccgcgtgcttcaggagtatttttgctacccggagagctttttcttctttcatttgcaggggggcacgtcgctaccggcagatttcccggtcggcgcgtttacactgcgtttgcattttaatttgccattgcctgtggatatcaagcttcgcaaagattcattgcgcctgtactgtacgccggtggtgaatttgttcgcccaccattctgagcctgtcaggccggacgacagttcaccgcaatatgcattacgggccagtcaacagaacccggagcactatgatgttttccaggtgaagacggtttccagtaaggttgcagcgtcggatgatactcctgagcctggtgaaataatacatatctggcccgaatttgaagggtttcagcatcagattgaatacagtcggcagcgtgaagtcgtctactggcaccaccgcaccagaagctccctgtttcatcgtggtctggagcacgccattgcctttgtccacgcggatggcagccagcctgactcttcccggcttagcggtgaagtgttcactgcctcgctggtctgcactaaccggatgttgcctgcatcactgcataccggtgatatctgcgttcctgttaacaaaaatccggcggtggcgtcgttcagcaacgtgacgcgcccgacccgtccgctgtatccggtgacggatggcgatatgcactggtcgctgatttcctgcatgaatctgaactacctctcgctgctggaccgggaggcgctgatccaggtgttgcgtaccttcgatatgccgggtatccaccatccacagcaggcgcggctttcctcacagaagctcgatgccatcgaaaaaatggaatcccgcccggttgaccgtctgtttaagggggtgccggttcgcggtctgtccaccacgctgtggattaatcccgccccctttgtctgtgaaggcgagatctacctgctgggtaccgtgctgtcatacttttttgcgctgtacgccagcatcaactcatttcactgcctcaaaattattaacacggaaagtcaggagtcctgggaatggcaacatacaggtcagcacgccctgatgtag

SEQ ID NO: 76068 - DNA, 1044 bp, Citrobacter koseri
atggcaacatacaggtcagcacgccctgatgtaggggaaacgacaccgctcccggatgtgcgcgggatgaatttttatgtgctgatggagtcactgtaccgccggtatggtgagcctgatcgcgagccatccctgcgtaccgaaccggagcaggaagtggcgctgttcaaatccgatgccagtattgcctttccgggtagcgacctgagcacgcttgaacgcagtgaaagcgggcagtttatcctgacgacaagattcctgggtttttccggcagccagtcaccgctgcccggctactacctggatcgaatggcgcgggaatccgcgcagaatgaggaggggctgaaagggttcctcgatctgttcagccaccgctggacgcagtttgcctatcacgcctggcgcaagtaccgctattacatctgttttcgcaacggcggaaccgacactttttcacagcggatgtatgctctggtgggcttaggtaacccgagcgtgcgcgacagactcgctatcaaccacagcaagatgctggcctacgccgggatactggcaacacccgggcgctcgccggatgtggtatgcaacctgatcagtcactgcttcgatttgccggatgtcagcatcgaaaactggcagttgcgtaaagtgccctttgatcctgcacagcagaaccggctgggcgtgcgtaacccgaaacggaaaacagccgggtatgtgccaggccgctcggtgattggcgttaattttaccctcggtgccagagtgccggatcgcagtggcaaatttctgctacggctcggcaacctctcaatggcccgctacctctcttttttaccggatggggaaaaccaccaggcgctgacgatgtttatctccttcctgttacgcgatcagttcgcctgggatttgcagcttgatcttgcgccggatcaggcgaagggaatgcggctgggcgatcgtttccgatcctgcatcggacgcacggcgtttatcggccagccgaaaatgccgccatccgtcaccctccacatcagggattaa

SEQ ID NO: 76069 - DNA, 1299 bp, Citrobacter koseri
atggaaccgcaaatggctgaggaaaaaacgcacactcccgtactctcactgacgctacaggtgatgaacggcaatgagctggagagcggacgcgccgcaaaatgtctgtttaccgccgatggcggggatatcggccacgcgcccgcctgccactggccggtacaggacagggccggctccgtcgccgatcgtgcctgccaggtggtgatgcatgatggcacattttgtctgaaaagcctggtgccggggctgatgattaatctggcaccggtgtccacggataccgggctggtacgcctgcgtcagggcgatgaagtcgttctggggtcgctggcgctgaaggtatttatccacaatggaaagctggtcagctacggcgagcagatggcggcaccggaaaccatcgtcaccaaccgtgaccgtctggcagacgcgctactgacgacggacggccagccagcgtatccgggaatgcccaggatgcaccagcttgcagataccgtggtcaacagtttttcagccgatccgctccaggcgctgcggacagaaagcctgaccgtggcgggtgatccgctttcagggatcgtacctgcgcgatcttctgttcctgacagggatggtgtgatcgacactccgtttatggatctgccgccactgtatcccgatcccctggtcggacaggatgcggcggcgtccctggcagacaccgcacagcttcatcttgcggtgaccccgctgttgcgcgggctgggcggctcgcttgccgtacgtaactcacaggatgccgacgattttctggaggaagcggggcggacgttgcaggcggcgataaaagggctgcttgaactacagctgcgtcgtaacagcctgtcggacaagcatttacgtccgctggaagataatccgctgcgcttgaatatggactacaccaccgcgctggacgtgatgtttgccgaaggtaaaagtccggtacacctggcggcacccgctgccgttggcgagagtttgcgtaacgtccggcatcacgaggaagcgaaccgggccgcgattgtcgaatcgctgcgcgtgttgctggatgcgttctccccgcagagcctgatgcgccgctttgtacagtaccggcgcagccatgaactgcgaaagccgctggatgatgccggtgcctggcagatgtactgcgattactacgacgaactggcctccagccgccagcagggatttgaaatgctgtttaacgaagtttatgcccaggtgtatgaccgggtactgcgcgagaaacagcgggagccggaagcatga

SEQ ID NO: 76070 - DNA, 534 bp, Citrobacter koseri
atgacaggacgtttttttcgttcctgcatggtggttgtgcttttcagtctcaccctgacaggctgcgaaacggtgaaaaagctcggccaggtgattaagaacccggatgttcaggtcgggaaactggcagatcagtcatcggaggtgacggtcacgttgctgaccgagcctgacacgaatatcaatgcgaacggtgaggcggcagcggtcgatgtgcagcttatttatatgagcgatgactcgaagttgcaggcggctgactacgacacggttgccagcacgccgctgccggaagtgctggggaaaaattatatcgaccaccaggactttaacctgctaccggacaccataaaaacgttgccgccagtgaggctgaacgaaaaaacacagtttattggagtcgtggcgtacttctctgacgaccaggctactgagtggaagcaaatcgaaccggtagaagggacgggtcatcactaccgtctgctggtacatgtacgacagggcagtatcgaaatgaagaaagaggacaactga

SEQ ID NO: 76071 - DNA, 1341 bp, Citrobacter koseri
atggcgaccatgaaaaacagggtgatctggcaggaaggtctgtttgccctgccacagcacttccagcagcagcgtaatcaggaatatttgctgaaccagcgtatgagtgcgcaggatgattttgcttgggggttcacctcgctgtcgatcaataccgagctgcttgcccaggggaaactgatgctggactacgcgacgggctgtatgccggatggcacggtgttcagcatcccggagcaggatcaactccctctgccgtatcagccgttcgatctctcccggtccggcagtaacgatatttacctggcgctgcctgttatcagcgatatcacctgtgaaatcgaaggacgccggagcgcgggacagggaacggagcgttaccgcctgacgcaggccgatattcgcgatttgcactccgatgacggtgacgtgcagcccatcgcgctgggacaactggcaccgaaaatcgtcagcggcgcggacgatctcagcgcgatggtcacactgccgttgtgccgtattctcagccagcagtctggtggcgcgctggtgatggatgacagctttatcccgacctgtcaggccatccgcgtcagcccggtgctgaacgggtttgccggtgatgtacaggggcttctcagcaaccgcgccagcgatctggcaaagcgtatcggttcgccggaacagagcggtattgcggatgtggctgagtttatgatgttacagctgcttaaccgcagccagatgcacttcactcatcgtactcacctgcgcactctgcacccggaaacgttttatctggatctggtccggttgctgggtgagctgatgacctttacggaagacagtcgtctgccctgtccggtggaatcttacgaccaccgcaatcttacgcagtcgtttgataccgtgatcccggaactgcgccgggcgctcaataccgtactgatgccgcgtgcgcaaaatctgccgcttctcttctctgacgggttttatgtcgccacggttaacgatccgaccctgttgcgttccggcaccttcattctggcggtacgcgcgcggatgccgcacagtcagcttatccaccagtttacccagcagtcaaaaatcgcggccaccaacaaaatccgcgatatggttagcgtgcaggtgccgggcgtaccgctgacgccgcgaaccgccgctccgcgccagctaccgtaccatgatggctttgtttacttcgagctggataaaggcgcggcggcctggcaggacgtgataaaagccggggcgctggcgctgcatatctccggcaccttcccggatctggggatacagttgtgggcgataaggggttaa

SEQ ID NO: 76072 - DNA, 810 bp, Citrobacter koseri
atgagcgagccgttcgtttcgcccattgactgtctgaccacagggaacccgccgggacaggtcaatactgcgcctcaggtcgcgaacgaaaacctttccggtcgccagtaccggctggccctgcgtggtaacagcataaacccgatgattgacgctgccacgccactgttggggatggtgatgcgcgtggacgggatgaacagtcagagtatgccggaacacctttttgcgcaggtggtgacggacgttcaggccgtggagcaactattgcaggagcagggctacgagccgggcgtgattgtttcgttccgctatgttctctgcacctttattgatgaggccgcgctgggtaacggttggtcgaacaaaaatgaatggatcaaacagtcgttactggtgcatttccataacgaagcttggggtggcgaaaaggtattcatactgctggagcgcctgatccgcgagccaaagcgctatcaggatctgcttgagtttttatttctgtgcttttcgctgggatttcgcggacgctacagggttgctgcgcaggatcagggtgaatttgaacagatataccgccgtctgcaccatgttctgcataccctgcgtggcgatgcgccttttccactgctgcatcaggataaaaaaacacagggtggacgctatcagcttatcaaacgactgaccatccggcatgttctggctggcggtatcgtcgtgctggcgctgttttatttcttttatctactgcggttggacagccagacgcaggatattctgcatcaactgaaccggctgcttgccaggtaa

SEQ ID NO: 76073 - DNA, 2751 bp, Citrobacter koseri
atgatccagattaatctgacctctctggttaagcatcttaacccgttttcccggcaggcgctggaggcggcggcggcagagtgtatgagccagcaggcaacggaaatcaccgtggcgcatgtgctgttgcagatgctggcagcggtgcgcagtgacgtgagggtgattgctgagcgggcagaaatcgacacaaatgcgcttcgccgggcgctgacggtagaaaattacgtgacggcgcgagcgacagacagttatccggcattttcgccgatgctggtcgagtggctgaaagagggctggctgctggcctctgccgagatgcagcatagcgagctgcgcggtggaacactgctgctggctctgctgcattcgccgctgcgctatgtcccgtctgccgccgccaggttgctcaccggtatcaaccgcgatcgcctgcaacaggacttcggcgagtggacgcgcgagtcggcggagtcagtcgtaccggacgctggcgggcagaccgtcggcaccacagccgataccggcgacagtctgcttggtcgttatgccaaaaacatgactgcagacgcctgcaacggcaaacttgatccggtgctgtgccgcgaccatgaaattgatctgatgatcgacattctctgtcgccgccgcaaaaacaacccggtcgtggtcggcgaagcgggtgtcggtaagagtgcgctaattgaaggactggcgttgcgcattgtcgcaggccaggtgccggacaaactgcgcgacaccgacattatgacgctcgatctcggcgcattgcaggcaggggcatcggtgaagggcgagtttgaaaaacgctttaaggggctgatggcagaagtgagtcagtcaccgaaaccgatcattctgtttatcgatgaggcgcacaccctgattggcgcgggtaaccagcagggcggactggatatctccggcctgctgaaaccggcacttgcgcgcggcgagctgaaaactatcgccgccaccacctggcgcgagtacaaaaaatacttcgagaaagacgccgcactgtcacgccgtttccagcttgtgaaggtgagtgagccgactgcggcggaggcgaccattatcctgcgcggcctgtcggcggtatatgagcagtcccacggcgtgctgattgacgatgacgcgttacaggccgcggcgacgttgagcgaacgttacctctctggtcgtcagttgccggataaagccatcgatgtgctggataccgcctgcgcgcgggtggcgattaacctttcctctccgccgaaacagatttccgcgctgactaccctgtgccagcagtgcgaagcggagatgcgccagcttgagcgcgagattcgcatcggcctgcggtcagacgcctcacggctgactgaggtgactgcacagtacgactacacgctgagcgaactggatgaactggacactgcctggcatcagcagcaggcgctggttcaggaaattattgcgctgcgtaaggagctactggacgaaacggaagccagcagtagtgaagatatcacgctaccgaactctgacgataacgccgcatcaacggatgaacccgtcgcagaaccgacggatgcgacacctggcattcctcctgccatccgtctcgcacagctaactgctgaactggagattctgcaccatacgcaactgctggtttctccgcacgttgataaaaagcaaatcgccgccgtcattgccgaatggacaggtgtgccgcttaatcgcctgtcgcagaacgaaatgtcagtgattactgacttacctcagtggctgggcgataccatcaagggccaggatctggcgatcgggcacctgcacaaacacctgcttaccgcccgcgccgatctgcgccgtccggggcggccgctcggcgcgttcctgctggccggtcccagcggtgtgggcaaaaccgaaaccgtgctgcaattggctgagctgctctacggtggtcgtcagtacctcaccaccatcaatatgtcggagttccaggagaaacacaccgtttcgcgactgattggttcgccgccgggctatgttggctacggggaggggggcgtgctgaccgaagcgattcgtcagaaaccgtattccgtggtgctgctcgacgaagtggaaaaagcccacccggacgtactcaacctgttctaccaggcgtttgacaagggcgagatggccgatggcgaaggccgtctaattgactgtaaaaacatcgtctttttcctcacctccaaccttggttatcaggtgattgtcgaacatgcggataacccggaaaccatgcatgacgcgctgtacccggtgctggcggatttcttcaaacctgcgctgctggctcgcatggaagtggtgccgtatctaccgctgtcgcgtgaaacgctctccgtcattattgccgggaagctggcgcggctggacaacgtactacgcgcccgcttcagtgcggaggtggtgattgaaccggaagtgaccgacgaaatcatgcagcgtgtcacccgcgccgaaaacggcgcgcggatgctggaatcggttatcgatggcgagatgctcccgccactgtccctgctgctgttgcagaaaatggcggcgaacgtcgccattgtccgtatcgtgctgggcgtgacgaacggcgcgtttaccgctgacgttgaagatgcgccggatgacagccttgtagaaaacatgcagtcagaaccggaaacagaggacgaaaccgttctatga

SEQ ID NO: 76074 - DNA, 732 bp, Citrobacter koseri
atgagcagaatgcagatgctcttgatcatgctgctgctgccgggattattccccggcgcagtacaggcggaaacacctgcgaaacaggcggttgccgtactgccggggattgtggtgccggaaacctacgcacagacaacgctcagggccatgatggcctgtcgccgggagcctgctgcgctggagcgtctcgactgctatgaccatatcttggcaccggagcaacccggttttgatggcgcgctggtaaaggcccgttatgaaggtgaagcctggaagcgggccttcactcaggaaaagcagcgtccggacaattccaccacactgatgatgacgcagagcagcggtggagagcggccaacggtaattatcaccacgcccgccatcggcaacgtgccgccgcgtccggtgctgatgttcagttgcgtggacaacatcacccggatgcaggtggcgctgacgcataccatgacgcctgacgacatcgccgtcacgctgagcaccgacgccggacgttttcagtcgcgctggtttatccgcgagaacggcacgctgctggagtccagccggggcttatccggcattgacgaaatcaaacagcttttcggcgcaaagaccctgactatcgacaccggtacggaaagcgccgccgggaaactgacctttaacattgacgggctggcgaaaaccatcgcgccgctgcgcgacgcctgccactgggcaggagagtaa

SEQ ID NO: 76075 - DNA, 1416 bp, Citrobacter koseri
atgaacttacgtgatccggatatctggatttcgcacctgctggaaaatctgccggaagacaaactggcctgcgcgctgaaagacgataatcctgactgggaatatatcgacggcgaaatgctcaaactcggctcgctggctcacagccagcttgatatcccggaaattcagcgccgggggctggtgcttctggcctcggaaagcaaggattttcgcctgctggcccatctgctgcgtacgctacaacatgccggtgatccgttgctggcgctgcatttactggcgctgtacgtggagcattactggacggtggcggcaccgggtatgacgcacaaaaaacgttttgccgcccaggtcataaagcgttttgaagcaggcgctggcgagttttcccgtcagacgaataccactcaacgcgatctgctcctgggcgagttggcaaaactggcgctgctctggcagagcaataacgccgtcgaactggcgcaggcaacggacaatattgccgcgctgtaccagcgggcgtttcgcgacagcgaacctgccgcgacgcccgtttctgcacaatctgccgtcacgtctgtgcagccttctgccgcgcctgtagcgtctgcctctacgccgtcaccggtagcttccgcgccggtggtgaatatcgacagccatgacgacaaaacctggcgcgatacgttgctgaaagtcgccgccattttatgtgaacgccagccggatgccccattgggctaccgtctgcgccgccatgcgctgtggctggcaattacctccgagccgcaggctgaaagtaacggacgcacgtcgctggccgcattccctgtcgatatgatggatgattatcaggcgcgcctgaataatgccgatatggtgttgtggcaacaggtagagaaaagcgtacttctggcgccctactggtttgacggtcattacctttcagcacaggctgcgcagcggctgggctacatcgccgtggcagaggctatccgtgaggaagctggtggctttcttacccgtctgccccagctttccaccctactgtttaacgaccatacgccctttatcagcagccagacaaaacagtggattaccgccaccgcttcctccggccagcccgcatcagcacagcaatccggtgaggaatggcagaccgccagagcctgttttactgaacaggggctggaagcagcattacggtatctggatacgctgcccgaaggctccccccgcgatcagttttatcggcagtattccggcgcacagcttatggaagaggccggactgatcacactggcacagcagcagtaccggatattgttcacgacgggcttacggatggcgctggcagactgggagccatcgttgcttgagcagcttgaacagaagttcacggcagaacagtaa

SEQ ID NO: 76076 - DNA, 3522 bp, Citrobacter koseri
gtgagattaccgaccccccgaatattcagtggcatgagatctgtcctgcgacccgcgatgccaaggtttaaggtctctgcgttttggttgctggtgttggcatggattgtgctgctggtatggatctggtggaaaggcccgacatggtcactgtacgacgaacagtggcttaaaccgctggcgaaccgctggctggcgacggcggcatggggaattatcgccctggggtggcttaccgtccgggtgatgaaacgcctgcaacagtttgagaatcaacaaaaacagcaacgtgaggaagcgcaggacccgctaagtgttgagctgaatgcgcaacagcgttacctcgacaggtggctgctgcgcctgcaacgccatctcgataaccgtcgttacctgtggcaactgccgtggtatatggtcatcggtcctgccggaagcggtaaaaccgcactgttacgggaaggttttccgtccgatgttatttatacgctggaaactgtgcgcggcgcagaacaacgtgtgtacctgacgccgcatgttggcaaacaggcggtgatttttgatgttgacggcgtactctgcgaacagccggatgctgatgtcctgcaccgtcggttatgggagcacgttctggactggttggtggaaaaacgcgcccgccagccgctgaacgggatcattatcactcttgacttacccgacctgttgacggctgacaaacgccgccgcgaacatctgttacagacgctgcgcagccggttgcaggatgtgcgccagcaccttcactgccagctaccggtttacctggtgctgacgcggctggatttattacacggctttgccgccctgtttcagtcactggataaaaaagatcgcgatacgattctgggcgtgaccttcacccgccgcgcccatgaaaacgaggactggcgcgcagagctggatgctttctggcagacatggtgtgagcgaatgaaccacgccatgccggatctgatgctcacgcagacgcatatgcgcagttccctgttcagtttttcccgccagatacagggaagccgggactacctggtcgccctgcttgacagcctgctggacggtgaaaatatggatgtgatgctgcgcggcgtatacctcacctcgtcactgcaacggggccagatggatgacatctttacgcagtctgccgcccggcagtaccggctggacggcagtccgctgaacgcctggccgctggtggataccacctcttactttacccgcaacctgtttccacaggcgctgctggccgagccaaatctggccggagaaagccgcacctggctgataaacagccgtcgccgtctgacggttttttccgtagtgggtggggtggcggcattactgctcatcaccggctggcaccattattacaatgataactacgcctccggcgtacaggtgctgaaacaggcagaagcctttatggcgatcacgcctccgcaggggatggatgactacggcaatatgcaactgccgctgcttaacccggtgcgcgacgcgacgctggcctatggtaactgggatgaccgcagccgcctggcggatatgggactgtatcagggacggcgcatcgggccgtatgtcgaacaaacctatctgcaactgctggatcagcgctatttgcccgcgctgtttaacggtctggtgaaagaaatgaatgctgcaccgccagagagcgaagaaaaactcgctgtgttgcgtgtcatgagaatgctggaagacaaaagcgggcgtaatgatgaggtggtgaagcagtatatggcaaaacgctggagtaatgagttccacggtaagcaggacatccaggcgcaactgatgtcgcaccttgactatgcactgaagcataccgactggcacgcagagcgtacagcgggcgacggggatgccatcagccgctggacgccgtatgataaaccggtcgtcgatgcacagcatgaactgagtaaactgccggtttaccagcgcgtataccagagcctgaaaacacgggcgctgggcgtgctgcccgctgatctgaatctgcgcgatcaggttggaccgacattcgaacaggtgttcgtttcctcagatgataacaaactggtggttccacagttcctcacccgttacggtctgcaaagttattttgtcaaacagcgcgatgcgctgattgagctgacggcgatggattcctgggtgctgaacctgacccacagtgtgaaatacagcgaagccgaccgggcagaaatccagcgtcagctgaccgaacagtatctcagcgactacaccgccacctggcgggcgggaatggacaaccttaacgtgcgtgactatgagtccattgcgcaactgaccggcgcactggagcagattatcagcggcgatcagccgttacagcgggcgctgacggcgctgcgggataacacgcagcctgcggttctctctgaaaaactttctgataaagagcgtgaagacgcacaggcagagccggattaccgcttgctgacgcgtctcggccatgagtttgcgccggaaaacagcacgctggcggtacagaataacagggaaaatacctttcaggcggtatatcagcagttaacggaactgcaccgctacctgctggctatccagaatgcgccggtgccggggaaatcagcgctgaaagccgtccagctccgtcttgaccagaacagcagtgaccctatatttgccacgcgacaaatggcgaaaaccctgcccgcgccgcttaaccgctgggtaggcaagctggcggatcaggcctggcatgtggtgatggtggaagcggtgcactatatggaaattgattggcgcgacagtgtggtgaaaccgtttaatgaacagctggctggcaactatccatttaatctgcgttcatcacaggatgcgtcgctggacgcttttgaaagattctttaaaccggatggcgtgctggataccttttatcagcagaacctgaaactgtttatggaaaacgacctgagtctggaagacggctataacgccgtgattattcgtgaggatatccgtaaccagcttgagacggcgcaaaaaatccgcgacatcttcttcagcaaacagaacgggctgggtacctcatttgcggtggagaccgtttcgctttccgggaacaaacgccgcagcgtactgaacctcgacggtcagttagtcgattacagccaggggcgtaactacactgcgcacctggtctggccgaacaacatgcgggaaggcaatgaaagcaaactgacgctgattagcaccaatggtggggcaccgcgcagtatcagtttcagtgggccgtgggcgcagttccggctatttggcgcaggtcagttaaccagcgtggaagaggggacattcagcgtgcgctttaatgtggacggtggcgcgatggtctaccgaatccacgctgataccgaagacaacccattcagcggcgggctgttcagccagttccggctgtcagatacgctgtactga

SEQ ID NO: 76077 - DNA, 1341 bp, Citrobacter koseri
atgagcaacgatgtactgacacaaactatcgtgaccggcagtgatccgcgcaatctgccggaatttattgccatccgcgaggaaatcaataaagccagccatccgtcgcagccggaaatgaactggaggctggtggaatcgctggcgctgacgatttttaaagccaatggtgtggacctgcatacagccacctactacaccctggcgcgtactcgcacgcaggggctggccggtttttgtgaaggagccgagctgctggcggcaatgatcacacgtgaatgggacaaattctggccgcaggggggagctgcccgtactgagatgctggactggctcaacacccgtaccggaaatatcctgcgccagcagacctcctttgctgagaatgacctgccactgctgtaccgcaccgagcgggccttacagcttatctgtgacaaactccagcaggtggaactgaagcgtcagccgcgcgttgagaacctgctgtattttgtgcagaacacgcgcaaacggctggagccgcaacccaagagtaatgccgatgctgccacacagaccaccgtcagaacgctggtctatgccccggaaagtaatgcgcccatggctactgagaccgcctctccattccccgatctgccggagatgcgggtggaggtccgtggtctggcggataatggcggtatcgccggtcagggcagcctggtaaaaggttttatggcgggattcatcgtgaccgcggttatcgccgtcgcgctctggtggtggcaggtgtacccgatgcagcggcaactggcacaggtcagggatacggcacagggcgcggcaacggtctggctgacatcacctgacctggacagttacgggcaacggctgcaacagcttcctgataccccgccattgcagttgctggagacgggtatgcagatggcccgtaccgccgacagccgctggccggagagcctgcaacaacagcaggcgagtgcgaaatggaatgaaacgctgagaacccgcgcacagggcagtccacaactgcgcggctggctccagacccgccagaatttacatgcctttgcagacctggtgatgcagcgcgagaaagaggggctgaccctttcctatataaagaatgttatctggcaggcagagcgggggctggggcaagaaacaccgctggaatccctgctgacgcagtaccaggacgcccgcgcacagggacagaatactgaggcgttggaaaaacagattaatgaacggctggatggcgtgttaagccgttggctgctgttgaaaaacggcggaatgccggaaacgacaactgaaaccaaatccgaaaaataa

SEQ ID NO: 76078 - DNA, 480 bp, Citrobacter koseri
atggcaaatccggtttatctgacgctgaacggagatcttcagggactgatctccgctggctgctcttctatggcctctattggcaacaaagcgcagattacgcatatggatcagattatggtgctgggtttgtcccacggactgactcgtgcacagaacgtcaatcatcagacgctggtgatccagaagccggtggacaagtcctccccattactgactaaagccatcagcgaaaatgagtgtctgacctgtgactttgagtattaccgtaccaaccgctttggcattaatgaactgtattacaaagtgaagctgattaacgcccacatcgccagtattgcacataatgtgccacacacaatcaccaacagcgaggggcaaccggaagagtcagtatcactgacctatgaaagtattacccaggaacactgtattgccggaaccagtgcgtacagtctgtgggaggcgcgacttttttag

SEQ ID NO: 76079 - DNA, 471 bp, Citrobacter koseri
atggaatcgctgaaagaagacgggttatgggggcctaagacattttccaggttagtttactttcagacaaacttcgttcatttgcctcacgctgatgccatcgttaacctgcatggtccaaccttcagaaggttaaatcaggcgaatgctgtggcttatcatagtgcttcaactcatcagaagcaggccgtggtagtaccggatagcaatcagcttcaacaattagcacagcgagtgtcattgcccttaccggcaattaaatctgaatggataaacagggcattacctgcggccattaatgttaaacgtaactggggagttccgatagaggtgactattgctcaaggcgcatttgaatcaggctggggacgtaaggcgaaaggcggagcatattttggtgtgaaaggaaaatctccggaaggtaagtcaataacatttacaacacatgaaaattatgatgacaatcagtaa

SEQ ID NO: 76080 - DNA, 708 bp, Citrobacter koseri
atgctgacgctagaacaggtgacttttcgctggccgggcgccgctactccctgccttcacgatatctcactgacgctgaacgcaggggaatggctggcgctgaccggtgataacggcgcggggaaatcgacgcttctgcgcatcatggctggcttactcactccgtcatccggcgacgtgctgcttcagggaacgccgattgcgcaacgcaaaaaccgcgaacgcgcgcaggttctcggcgtgctgtttcaggaagcggaaaaccagctttttcacagtaatgtcgccgaagaggtcgcttttggcttgcggctacaaaagttgccgccgaccgaaattgcgcaacgcaccgctacggcgctgaaattatgcgctctggaagaggtcgcggatatgcatccgttagatcttcatacggcgcaacgccgtatggtcgccgttgccagtcttgacgtcatgagaccagcaattctgatgcttgatgaacccagccgggattttgacgcccactggctggcaatctttgaaaactggctcgcggtttgccgacaacggggaaccagcgtggtggcgatcagtcatgacaccgcctttacgcagcgccatttttccagggtggttcgtctgcataacggggccattactgaggctcgtcaggcaacgcctgcgcaagacgatactcgccctttgccgtcatctctaacgtaa

SEQ ID NO: 76081 - DNA, 678 bp, Citrobacter koseri
atggttacgctagagcagttccgttatcacccgacacatgcgacgcgcgccccgctgtgcttcgattttcattacgacacgcccggtatcgtggcgatttttggcaataacggcagcggaaaaagtacgctggcgcagttaatggcgggctggtttcccgattttcttcccggcacgatcgacggcaaaggcgaactgttatgcacgcccatagggcagcgctccctggcggaacacgcgcaaaccatccagcttgtccagcagtcgccctggctgcaactttccggctgtaccttcagcgtggaggaagagatcgcgttcggcccggaaaaccttgcgctcagcgaggcggagatcctgcgtcgcgttgatgccgcgctctcgctgacggaatgccagccattgcgccatcgccacccgggtacgctttccggcggggaaacccagcgcgtggtgattgccagcgcactcgctatgcagccgaaactgttgattcttgatgaagcgttcagccgtttaacggctcaggccacggcgctgctgctgacgcgtttacaggactgggcgcatacgcaacaggcgttaatcattctttttgagcgtgaccccgccccctttctcgcctattgcgatcgcacatggcagttgcacaacgaaggattatctttacgatgctga

SEQ ID NO: 76082 - DNA, 708 bp, Citrobacter koseri
atgcacccttttacctcgttaacgctctgggcgctggccgcctgcaccacgctgctgcttcctgccggcatggcgctcacgctgtacagcgcggcgacatttctctgtttactggggataagcgccacgcgcccgcgggcgaaatatgtcgcgtggctgatgttttctctggggttcggcctatggctggtacacggaggctggctgaccgagtggatcagcggccagccgcgcgatccgcaacgctggcaacacgccgtcacgctctggctacggattctggcgatagtctccacctcacagttgtggatgcagtacgtgccggttcgccagtttattcgcgccctgttcgcctcacgcctgccgccgggtatcgcctacctgtttgccggcccgctgctggttgtcgaacagctaaaacgccagctgtcgatcattcatgaagcccagcgcgcccgcggcgtgccgctggacgaacgttggtatcagcgacttcgcgccatgcctgcgcttatcgttccgttaacgcacaatgcgctcaacgatctggcggttcgcggcgcggcattggatatgcgggcgtttcgtttacatcgccgtcgcaccacattgtgggcgccggaggacagcgcccggcaacgggtcgcacgctacagcatgttactggcgatgctggtcgaaaccggagtgtggatatggttacgctag

SEQ ID NO: 76083 - DNA, 579 bp, Citrobacter koseri
atggcgcgtcgccagttttccagccagtccctggctttgatcgtgattgctatcgccatcaatatgatcggcggacagctcatcagcatgttgaagttaccggttttcctcgactccatcgggacgttgatcagcgccgtcctgctcggcccgatagtcggcatgttaaccgggttgctcaccaatgtactctggggattattaaccgatcccatcgccgccgcctttgcgccggtcgcgatggtgattggcctggtcgccggttggctggcgcgtgccggatggtttcgcaccctgccaaaagtggtggccagcggcgtggtgattacgctggcggtcacagttgtcgccgtgccgctgcgaaccacgctgtttggcggtgtgaccggaagcggcgccgacctgtttgtcgcctggatgcactctgtcggtcagaacctggtggagtccgttgcgattaccgtcctgggggcgaatctggtcgataaaatcctgaccgcgattatcgtctgggtgctgttgcgccagttgccattacgcaccacgcgccatttcccaacgatgtcgcccgtgcgctaa

SEQ ID NO: 76084 - DNA, 426 bp, Citrobacter koseri
atgacaatgccgccagttccctcatctgccgcacgcttttatgcgctgcgcctgcttcccggccaggaagttttttcacaactacacgcgttcgtccaacagcaccaactgcgcgccgcgtggatagccgggtgtaccggcagcctgactgacgtcgcgctgcgattcgccgggcaagaggaaaccaccctgctcaccggaacgtatgaggtcatctccctgaacggcacgctggaactcactggcgaacaccttcatctctctgtttccgacccaaaaggcgcaatgctgggcggccatatgatggcaggctgtaccgttcgcaccacgcttgagctggtcatcggagagcttaacgcgctggcgtttagccgccagccctgcgctgtttccggttatgaagaactggttatctcaccccgttaa

SEQ ID NO: 76085 - DNA, 1911 bp, Citrobacter koseri
gtgccgattatccagcgccgccagctactgggtgtgctggtggtacagcagcgtgaactgcgccagtacgatgaaagcgaagagtctttcctcgttacgctggcgacccagatggcggctatcctttcgcagacgcagctaaccgcgttatttggtcaataccgccatacgcgcatccgtgcgctgcccgccgcgcccggcgtggcgatagcggaaggctggcaggatgcaacgttgccgctgatggagcaggtctacgaagcctccacccttgacccggcgcttgagcgcgagcggctgaccggcgcgctggaagaggccgctaacgaatttcgtcgttacagtaagcgctttgccgctggcgcgcagaaagagacggcggcgatcttcgatctgtattcacacctgctttctgatgcccgactgcgtcgtgaactgtttgccgaagtcgataagggcgcggtggcggagtgggccgtcaaaaaagtcatcgaaaagtttgccgagcagtttgccgccctgacggatggctacctcaaagagcgtgccggagatttacgcgcgctgggccagcgtctgttattccacctggatgacaccattcaggggccgaacacatggcccgagcgttttgtgctggtggcggacgaactctcagccaccacgctggcggaactgccgcaggacagactggccggcgtcgtggttcgcgacggcgcggctaactcgcatgcggcgattatggtgcgcgcgctcggtattccgaccgtgatgggcgcggatattcagccttcggttcttcatcaccgcacgctggtggtggacggctatcgcggggaactgctggtcgatcctgaaccggtattgttgcaggaatatcagcggcttatcagcgaagagaatgaactaagccggctggcggaagatgatgtcaatctgcccgcgcatctgaaaagcggcgaacgcgttaaggtgatgcttaacgcagggttaagcccggaacatgaagagaagctgggcagccgtatcgacggtatcgggctttatcgcaccgaaattccgttcatgttgcaaagcggtttcccctcggaagaagagcaggtggcgcagtatcaggggatgctgcaaatgtttaacgacaaaccggtgactctgcgtacgctggatgtcggcgcggacaagcaactgccctatatgccgatcagcgaagaaaacccgtgcctgggctggcgcggcattcgtattacgctcgatcagccggagatcttcctgatccaggtgcgcgcgatgctgcgcgccaacgccgcgaccggcaacctgagtattttactgccgatggtcaccagcattgatgaagtggatgaagcgcgacgcctgattgagcgtgccggacgtgaagtcgaagagatgatcggttacgcgatccccagaccgcgcattgggatcatgctggaagtgccgtcgatggtatttatgctgccgcaactggcgaaccgggtcgattttatctccgttggcaccaacgatctgacgcagtatatcctggcggttgatcgcaacaatacgcgtgtggccagtatttacgacagcctgcacccggggatgttacgtgcgctggcgatgatcgctcaggaagccgaaaaacaggggcttgatttgcggctatgcggtgaaatggcgggcgatccgatgtgtgtggcgatcctgataggcctgggattccgccatctgtcgatgaacggtcgctccgtcgcgcgcgtgaaatacctgctgcggcacattgattatgaagacgcgcaaacgctggcgcagcgcagtctggaagcgcaaatggcgacggaagtgcgtcatcaggtggcggcgtttatggagcgccgtggcatgggaggcctgatacgcggggggttgtga

SEQ ID NO: 76086 - DNA, 480 bp, Citrobacter koseri
atgtcaaatttatcgtggattatacttaaaggcgaactgcaaggggacatatctacaagttgcagctccagaaactctataggaaataaatatcagacgaatcatatcaatcaaattatgatttatggtctggagcatgaaacaacgcgtcagcagaacgttaatcatcacgaacttcagatcatcaaacccgttgatcgttcgtcccctttgctgaacaaagcgatcaacgataacgaaacgctggagtgcgaaatattcctctatcgcaccacccctacaggaatgcaagaggtctattataaaataaaattattcaaagcacatatatcaaacattaaattaatagttcctcacaatattattgaaaacggaaacgaagcacaagaacgcgtttcctttatttatgaatcgattagttgggaacactgcatggcaagtaccagcgcttatagtttatggagtgaacgtactttctga

SEQ ID NO: 76087 - DNA, 867 bp, Citrobacter koseri
atgcataaacgtaactccatgttaaatggcaactcactcaggtttcgggacgaacgaccgcaggcaagtgattttagtagctggcataccatgaaccctgtacagcgcgatatggcctttatggacggctcatttatcacacaaagccatcacatcttgctgctcacgcccgaagaagcacagcaggtgatggacgatttaatgggcggagtggataaatttttttcctaccgtgcagcaccaggtaatatcaaagatggcctggatggcttccgcagtctctctaagctcaccacctattacaattccgcacaagagctggtctttaatttcagggcaatccgcattcaagccattgaatacaaagtcggcggtaaaacctatatcaaaattactggatatcctgccctgcgccggattcttaacggaacccgctacggggcaagccatccacagatgctggaaatggcattgggtaaacgtgggctttataacaatatccgaaatggtgttaaatattgcatctacttctcacttgcctggcgggcaattgaactgatttttaagtccgattatgatctggtggattttttggtagatatctcaatggatgccgcaaaggcggtggtgtcgggggtagtgattggggtaattggcgggatagcgatattatttagtgcaccaatactctttactactgtctgcatcgttatatcaggattcgttcttaatgcaaaattaaactctcttgatgaaaacgcaggattgtcagattcattaaaagaaaaattgcgagattatatttttcatcacaaacatacaattgaatattatgatttcaattcaccatacctttactctttttaa

SEQ ID NO: 76088 - DNA, 411 bp, Citrobacter koseri
atgaataatatctatatgcgcttgatagctattcttgtcattgcttttttcctttggattcttgacacacaattctttggatacgtaatgactgattttttatctatcataaaaatgggtgatattgtttcctataatcatacatttgtactgataggcggaatacctacgatgattttgatgactatcagtttcgtcagaatactgttcagcaaaagcttaaaatataaaaactttcccaaatcgattgagacttgggttacatgtgccgtcattataccttttgcaataggtttgattgctgactgtattgtacctttttttttctggcatcgtcatacacccgttgcccccaggaacatttggatgattatcatgtcgttgacatttcactctgcgaaaccatcatag

SEQ ID NO: 76089 - DNA, 435 bp, Citrobacter koseri
atgactaagctccatctgcgcctgatatctttttctcttactatttttttctgtagtctcctttatatgatattcactgggagcataatggaaaattttctttcactaattagaatgggtgatgtaatctcctataacaaaaatacatgcgcaatagtaggaggaataccaacaatacttatattttcaatgttttctgttttcgccttatttagtaaggaaggccgtttgaaaaaactgcccactacaatagagttatggatgacaatgattgtagtaatttcctttctcattggcattattgctaactgtcttattccctttttatttcttggattatcatacacatcctgcccccagaagaagcttcatgatttctacgttacagatatcgaactatgcaaaactatcgtagataaacgcggcttgtggtaa

SEQ ID NO: 76090 - DNA, 1953 bp, Citrobacter koseri
atgtcacagcagggactgcgctttacgctggatgtggacggattaacgcagacggcaaccgctgtcgtcagcttcaccctccaccagagtctctccacgccctttttactcagtgtcgatattgccagcagtctgcctgacctcaccgccgtcagtttcctcgaaaaaaacgccaccctgaccatctggctgggtgatatcccgcagcgctaccttcacggcatcattacgggcatggaaaccggggaaaacaacaactggcagatgaattacaccctgaccctttctcccccgctctggcgctgtggcctgcgccagaacttccgtatctttcagcagcaggatattcaggccatttccgccaccctgctcactgaaaacggcgtcaccggatgggtgccttccttttatgaacctcacccggcgcgggagttctgcgtacagtatggggaaaccgacctcggctttctcacccggctgtgggctgaagaaggcattttcttctttgactggttccacccgaccggtccagaccagaagctggtgctctgcgatgacgtcgccggtgtttccaccctcggctccctgccctttaacccgaatacccgcgaaatctccactgaatgcatcagcgagttccactaccgggcgcaggtgcgtccttcatcggtggaaaaccaggattacacctttaaaacacccggatggcccggctggttcagccaccaggccacgaacctgaacggccagcgcacgcagtatgaaatcttcgactggccgggacgcttcaaggacgagcagcacggtcaggctttcgcccgctaccaggctgaaggccaccggcatgatgctgaaaccgcagcctgtgtgagcaactccccgaaactgtggcccggaaaacgtttcaccctcaccggccacccttcattaacgctgaaccgggagtggcaggtgacaggcagtgtgctgaaagggaaacagccacaggcacagcatggccaccagggtgaaggcaccacgctcagtaacagcctggacgtcatcccggcagaccggacatggcgctcctccccgttgcccaaaccctccgttgacggcccgcagagcgccattgttaccggcccggctggcgaggaaatcttctgcgatgagcatggtcgtgtccgggtacgttttcactgggaccgctattgtccgggaaacgaagacagctcctgctggatacgggtgtcacaggcgtgggccggggccggatttggtaacctcgccattccgcgcgtgggccaggaagtgatagtggacttcctcaacggcgacccggaccagcccatcatcatgggacgcacctaccaccaggacaaccgctcgccgggcagtctgccgggcacgaaaacgcagatgaccatccgctcaaaaacctacaaaggcggtggatttaatgagctgcggtttgaggatgcgactgataatgaagaaattttcctgcatgcgcagaaaaacatgcaggtgaaggtactcaatagtaaggacgtgcgggttaattatgaccgtactgtcagcattggtcatgacgaatcgctggtggtggccaatgaccggaaagtgaccgttgacgggaagcaggatcacaaaacaacaaaagaccatgtcagtttagtggaaggtagccacggtctggaagtaaaaggtgatctggcgcagaagattgctggtgctctcggtatcaaagttcagggcgatattgttttgcaaagcgacagcaaaatcagtctgcgggtaggtggttcgtttgtggtgatacatgcgggcggcgtggatgtcatgggaccgaaaattaatcttaacagccgcggcagtcccggcgaagttatcctgccaatgcgcccgatgatcctgaaggccgctgcgggaagtggaaccgtatttgtatcgcattgtccgaaggagaattaa

SEQ ID NO: 76091 - DNA, 840 bp, Citrobacter koseri
atggaaatcactcctgtacaatatgccattgtggatggtgccgtggaagaagatttgctggattttctgcaccaaaataatcctccacactgttgcctgtttcctccgccagtccagtcagacctagtcgagatatctccttacctgctggaggtcacacaggaagtagccaggtggctgactacaaaggaaacgccctggggaatatatttttattcatataataagattcatttgctagtacaacatttccgccattatctgtgggctaacataccagaacagagcaagccagtattatttagattttatgatccgcgtaatatctgggcactggttaatgtattgactcctttcgaactctacaaatttattgagccagtcaataaaattattactcaatattcagaagaaagacgggaggatgatttttcctcattccgtcagtcaggaaaaagaaacattactggaaaaagtgatgctgtactgactttctcccaacgacaatatgatctgctgaacagacaggcacaaaaaaactatatcaaaacactggagctatatatacgcaattattacacagaaaaaggttctcctgttccgaagaagcaggaacacaatggccattgtgctgaggattattttgatttttgtcactcattgaatataaatgatgacagatctatcagaggcataatctatttactgctggaaaataaaatttataataacacagatattccacatgaatggattgatatgttaaataataatgaagcggcagtacaccgacaggttgaaatgttgcttctacagaaactgggttttttccctcagtaa

SEQ ID NO: 76092 - DNA, 1623 bp, Citrobacter koseri
atgtcaaaaccgtcatcgactgccggaaaagcctgtgtggaatgtggtatccctgatccatgcctgatggatgtgattactgattttcctgaaaatgaagaacatcatgtctggtcgaaagagggaatagttcattttgaactgctggatgaaggggaaggatgtgatggaaccatcactattgagagtaaatgcgacaaaagcgggtgcccggaagcatggctggaagagcataaagaggggacttatgaatcgttaagctctgatggaaagccaaataaagtaacactttattacggtggagaaaaaaaagggttaagtgtagtagattcattcaggagtccatgggaatatctcagttcaattactcaccccggagatatgtttgacgaaccggctcattatgcggttgtggtaaatggctgttacgagtgcggcagatatgtcgaaattgatgtctatccgacgatagaaatacgttttactgtcgggttaagttacgatcttctttcgtcacaaagagagcgaactataaaagaacgccgtgatgagcaaataaaatctcggcaagctatggataatactcagcccaaaaataaaaataaattacgcgacggctggaaatataaaacggctcagtttgagttgatgaataaaactgcactgaacgtggatttcggattaaaaatttgcaatgtagaatttacacatgaatatgaagaagaaatcaaaaaactgcgtagaactaaagcacttgagcagttaaatcgggcagaccagttagttgataaccttaatgcctattttgctcctgatccggaaagtggaaacaagacgcgggaatactctgtattttcatttaatgcagaaccgctaaaaattggagtttcttacgcttatcagtatactgatataaaagaaggtccatgtcattatttcgggttgtatggaaagccctttctggaggcaaagttaagatttgatattattcagtttatctgtgcctattgtaaaattgatactttagttggcaaatgccgagactatctcaaaagacacggtaccagtgtagaatgctatatagaagtagctcctggtgttaatttgaatatcggggcagcatacagcaaaaaagatgataaatgggcattcaaaatcctcacagaaaatcagttatatctgggtataaaaggtgttgtaagtgccacctttgaagccgaagtttttgtggtagaacttagatctgaggcaaaagcgactatcgatgcagcagcaggttttgctctggatgagcatgataatggtctggatctggttttataccatgacggaattaagggaacgtttaagttttctgctgatatcggaactggagataaagatagtaaaaatacaagtcaacctgagactaaaaataacatagaagacgaatggcaattatcttctcctttaaaaacagaagattcgcctttacgtgttaatttatatggtaaagaacgtgttatccctcgtcctgcgattactcctcctgctcattttgaaccgtgggcaatgggttccaatccaaactggaataaaaatgatgaggataaaacaggatataacggaatcccacaaatttga

SEQ ID NO: 76093 - DNA, 954 bp, Citrobacter koseri
atgtcgttagcagcattttcaagtaatgaaccacaaaaaatacgaagcctttttaatatccagcaagcctactgtgcaatcaaaactaatgatgtcaccgggtttgataatcgcaaatctgcatggaagggacgaggaggtggaatttccagtaccaacactttaatgttggtggaaaacggtgagaacgaaatcagcctggagattggtgcactgggctggttttctgataagtcactatccccggaagagagaggtcatttcgatccacagtcagcctgtagtctggaacttgtacgttttaacggacaggaaaagcaaatgctttcatcaataaaagtgaccatcagtccgcagggattacctgaggcattacctgacaacacgcgttccattacccgaaccaaagttctggcagagcaggccacacccggacatatcgatcccgattattttgataagacctattttccacaaggaatggaactctaccggtttacgcagaaagtgacggtaagtggtattccggaatgggcatgggttaaagccgaacctttcacaggcagcagtgaacaacttcaaaagttacggactgcttacagtgagatggcgagaattatcaacagccgggatcggaaccgcctgaaggcgtatgacaagactgcactggaagcgtggtctgcaactaccggtgacagcgaagatgagatactgttatcgcagtttacaaaagatgacctagaaggtggaaaagcaatactgcttcccattaagtgggaggattacgatattcgagtcatgaataaggggcgcatggtccgaatgtataataaatcaaaaccaacttattccccattgacatataaatatactgacaaaaatggtgaggagtttatgggttattatgctcccgtattctcactaattgatggtaagttcattcctgttatttaa

SEQ ID NO: 76094 - DNA, 285 bp, Citrobacter koseri
atgccattagccgctaaactttcagacaaaggtacccagcatgacggttatcatgaaaccgttattatcgcgggttcaccaacagttttaattgacggactacccgctgcccgtatgggtgacccgctgaccccccacgacaaacccaaacatcctcctcacccacgaaaaatagccagtggttcaggcaccgtatttattgatggcctgccagctgccagaaccggtgatgccattgactgcggtggcgtggttatcggtagcggcacagtcaatatcgggtga

SEQ ID NO: 76095 - DNA, 2034 bp, Citrobacter koseri
gtgacagtcagtgttctgaaagggaaacagccacaggcgcagcacggcaaccagggtgaaggcaccacgctgagcaacaacgttgacgtcatcccggctgaccggacatggcgcgcctcccccctgtcaaaaccctccgttgacggcccccagagcgccattgtcaccggcccggaaggtgaagaaattttctgcgatgagcatgggcgggtccgggtgcgttttcactgggaccgctattgtccgggaaacgaagactgttcctgctggatacgggtgtcacaggcgtgggccggagccgggtttggcaaccttgccattccgcgcgtgggccaggaagtgatagtcgacttccttaacggtgacccggaccagcccattattatgggccgcacctaccatcaggacaaccgttcacccggcagcctgccgggaacaaaaacgcagatgaccatccgctcgaaaacctacaaaggcggtggatttaatgagctgcggtttgaggatgcgacggaccaggagcaggtttatatccatgcgcagaagaacatggatacggaggtgctgaacaaccgtaccaccgacgtggaggtggaccacaccgaaaccatcggtaacaaccagaaaatcaccgtgggtctgggacaaacagtcactgtgggtaaggagaatgccggagggcatgaccagaccatcatggtggcacatgaccggagcatcacggtacgcaatgaccagacgctgaaggtgaagaacgaccggatggtgagcatcagccatgacgacgggctgtacgtggcgaatgaccgcagggtgacggtggacggaaaacaggagcacaccacccgcggagaccatatcagtctggtgaaaggcagccacagtctggaggtgaaaggtgacctcgcgcaaaaggtggcgggtgcgctgggcgtcagcgtggagggagatattgtcctggagagcagcagccagataagcctgaaggcaggcggttcgttcattgttatccatccggggggcgtggacattatggggccgaaaatcaacctcaacagtggaggcagtccggggacaccagtagggacactgcaatcgacagtgctggcggatgaaggggacgatatggtatccggacagattagtggaaactccggcagtgatagtggagccggaagcggaggaaactcggggggagatagtgaaacgggtaactccaacaatccagaaaatccaaaagaggttaatccagatgtaattacaacagaaacaatggttgctatgcctgctgatcgtgccaggagaaagattggtgtaggcgagcaagttaacttgacatgtaataacgaagtttctaattggtctatgtcaccaaatgagagcggagagttgacaaaaacaggtagcaatactgctagttttactgcctctgataaagcagttgtggttacagtgaccgcgactacagccactgggacgattgatattcaattcactgttgtagaaccatctgcctttgtgatgaatcgaaaatcaggatcgccattacttcatcactatggataccctgattgtggatggttaggcaggccatatgttgaacctgtagatgttaacttttatgctatttttataagggaaagagattctcaggctacagggactgggccttatagtagtttgacgggacggtggcatgggaattatgctacaggtacttctgattggttcctaattgatgctcaagagtactctccttacttcggaagcaccttggatccaagtgtttttgataagatttttgctactataggctctaatgcaggaaccaaaccgccatttaccccttgtgttctttctatgcccatacaatgggagtggactattgataaaacgaagatttatagttttcctcaaacagagcaaagacatgaaatttccacagatggccgttgtacaacgactaaaacagtacatcatgaaactacaatatatactgatccagatagtggtcttcagtttatgcatcgttag

SEQ ID NO: 76096 - DNA, 621 bp, Citrobacter koseri
atggtggataatatcgattcaaatctaaataacgtcaaaaacaaaatatcaacattcaaagaaaatcctgcacttgaagctaataatgccaacttgcgaggtgcgctttctatactgaacaatacaaatgttttgaaatttgatttaacaccatctgaatttaaaaaatatagattagatgagttaaaatatcatattgaaattattgagttatttgaaaaacaccacattaaaaactatagatcaagtaaaccttatcacatgaatgtcatgcctcctcaaggcgcagtagatggacctatatttggcactgtagatccagctataattaaaaataaaaaaaccagggaacagtataaatcagatctcgaagaaaataataaaattggaaaagaaattgcattccagggagaactaaccaagctaaaatatgttcttgaagctccaaacatcaaaattggtagtattgccacaattgaacttttcatcaaaaatcattatacaaacgactcatttgatataattgaaataaaaaaatccattaatgaatcaaaactagagccttatattaagaataaaattcttgacgacacaattggacataaaaattccaaacaatag

SEQ ID NO: 76097 - DNA, 285 bp, Citrobacter koseri
atgtcattagctgctaaactttcagacaaaggtacccagcatgacggttatcatgaaaccgttattatcgcgggttcaccaacagtttctatcgacgggctacccgctgcccgtatgggtgacccgctgacgccccacgacaaacccaaacatcctcctcacccacgaaaaatagccagtggttcaggtaccgtatttattgacggcctgcctgccgccagaaccggtgatgccattgactgcggtggcgtggttatcggcaacggtacagtcaatattggctga

SEQ ID NO: 76098 - DNA, 594 bp, Citrobacter koseri
atgaatgaaatcatttcagcggcagttttattgatcctgattatggatccactcggaaacctgcccattttcatgtccgtactgaaacataccgaaccaaagcgccgccgggcgattatggttcgcgagctgtttattgcgcttttactgatgctcattttcctgtttgcgggcgagaaaattttggcctttctcaacctgcgggcggaaaccgtgtcgatctccggggggattattctgttcctgatcgccattaagatgattttccccagcgcatcaggcaacagcgccggactcccggcgggcgaagaaccgtttatcgtaccgctggctatccctctggtggcgggcccgaccatcctggcgacgctgatgctgttatcgcatcagtatccgaaccagatggggcatctggtcatcgctctgctgatcgcctggggcggcacgtttgtgattctgctgcaatcgtcgctgttcctgcgtctgctgggcgagaaaggggttaacgcgctggaacgtctgatggggttgattctggtgatgatggcgacccaaatgttcctggacggcattcggatgtggatgaaaggctag

SEQ ID NO: 76099 - DNA, 1101 bp, Citrobacter koseri
atggagaatattgtctacctgacaattgcaggggagttgcaaggtgctatttccgatggatgtggaacgatagcctcagtgggcaaccgctggcaaaccggacacgaggatgaaattttcgtattttcactctcgaatagcataaccagtactggtaaaggttctcatttgcacggactgcgattttgtaaactgatcgataaaagcacgccgttgtttgttaatgctattaacaacaacgagcagttgtatatggagttttatttctaccgcatcaatagattcggtagatgggagaagtattattatattcaactgcggggagcatttctatcaggtattcaacaccaattcagcgaaaataatttagatacagaaacaataaccatcagctatgaatatatcctctgcaaacaccttattgccgacactgagtttagctacctggcgttgcccgagaactacaaccgtctgtttatccccccgctcaatccgggattgaaaaccctcaacagtaaagctgtcggccgactgcttgccgcaggcggcgtttacaacgggaatatagaggcgttcagggccactgcggataaattaggtggcgatgcatctgctggttacgagcaggtgcttaatgaaaaaacaattggactgggtattgctgctgcatctatactctttgcaagaaaacaacccaacctcaggcagttagaggaattaaaaaaggttaaatgggttgatgaaaatgcaggaatgagtcaaagagcaagaaattataacgattcagctactggtgctcgttcaaacattaatactcaaaaaggtcaagcaccaaccatagatagaaccgatacaaaaaataatagcaggccggttcgctttgatggagttgatggaaatgtaatgatagacaggaagatatctgtagttacgactcaaaaagctaaagatcaagcaataagacagtccgaggcattgaacaataacaaaatgacaggacgttgggaagtaccaaatcaaactcaagcaagtcgcgcacaaaagatgtttgatgaattgggaatcaaaaatatagaggtgaaaattgttaaagaacagtga

SEQ ID NO: 76100 - DNA, 255 bp, Citrobacter koseri
ttgttaaagaacagtgaagtgaaacttgcaaaaatcattgtcgatctggctatatttttggagtttaccagccctgatttgcttgatcctgactgcgctgtagaagcaatggaaggtatttcagctgaactgcaatccttaaaccatgaagatagagacaacatggctaatatatttaaaaatttatcaaaaaaatatacaagtgataaagcagaatatgttagaaaccttccagaatcattaggaattatctaa

SEQ ID NO: 76101 - DNA, 255 bp, Citrobacter koseri
atgacaataactataattgagtttaacgtattgaaagttatggcagaaaaagacattaactggaactggatggttctggatcgtacccttactaccagaaacattcctggatttagtaacgttgctaatatcgtaactattctggttaatcacggattagttgatgtcgtatacggtaaggacaaatcaagaccacgctacagagtttcccaaaatggttttgacttccttaaaaatcaacaacaacttctttag

SEQ ID NO: 76102 - DNA, 528 bp, Citrobacter koseri
atggcggaatttattgatatgaatgttaatattaatctggagaatcttaagaaaaggtgcagcctgtttctttgtatgttcttttttgggggaatgacctggggtttttatattgccagcgtaccggatctcaccgatctggttgaatcaagaagcatcgtctattttttctggggttcattttgcatgttattcatggttccggtgatgggttgccttgctttaggtattgcttacctggcctttgcaaaaagcatgcagccgcccaaattcttcgacaggacatttaccattgttttcctcgtcgcggggggagggtttgttgttggtaatatcctctcttttattgttattttttatcccctcggcactaattatgtcttatgtgagcgctcaggcccgacgtctggcacctattacacccggaccgaagagatttgcgagcaggtgaaatatctgctcaaaacaaaatacagcgatattgaaaaactgaacgacacactggacggcaaaccaaagcagcaatag

SEQ ID NO: 76103 - DNA, 879 bp, Citrobacter koseri
atggaaaggtattatgactggatagggaatcaccgtgaagatattcttagaggaaataactggcaacgtaatcagcgtgtcgagaatgaaatcagaacgctaaaaaataacctgaacaacaatcctcaacacatcatgctgctgacgcctgaggaggctcagggcgtaattgacgatttgctgggcagtaaacccgtcagtttttcgacgaattatgccggtaacattaaagatacggtttctgctactaaaaacctgtcaaagcttttttcttatcagcaggccgggaagattgtcttcaccttaaaaggccttgggattaaagcaacgcagtatgcttatcagggaaagctgtatgtgaagattacaggttacccttctttgcgacgcatccttaatggaacccgttaccggattaatcatcctaaggtacttgaagtgggcattggccgcgctggatttcgaaatggcataatgtcaggggccagattctgcatctggttttccgcatgctggcggttgattgagttgatctttaaatccgaccatgacgtcgccgcactgctggggaacgtgacgatggatgtggcgaaggtgattgtgggtctttttgtctcgcaatcagcgggtaatgctcttaggttagccgtaccgctcttgttctctagcggggccgttccggtttggggagaaatcgtcgttgtcgttgcattaggttttttcattgcctggactttgaatgaggtggacacaaaatataagttatcagacaaacttatagcgtgtattcgtcagggatttaaagaacggcaaagaattgaagagtggaacgcccaacgcctggggtacagaagctccctttatggcggaatttattga

SEQ ID NO: 76104 - DNA, 480 bp, Citrobacter koseri
atggcgaatacaatgtggttggccttgaatgggcaggcgcaggggttgatttctgctggatgtgcctcggtaaattcgataggaaataaatcacaacccgcccatcgtgatcagataatggtaatgacagttaatcatggcatgagccgggtacaaaatgtgaaccatcaatgtttgacatttattaagccggtagataaatcctcgccgttattagggaaagccataactgacaatgaaacattgaactgtgaatttagcttctaccgaactaatagggcgggtttaaacgagtgttattacacgctaaaacttatcaatgccagaatatccagcatccatctgcaagtacctcataccattgatgactgcgcgggtcagccagaagaagtcattgagctgtcgtatgagtctattgcctgggaacaccttattgctgggaccagcgcatacagtatctgggatgaacgaatttattaa

SEQ ID NO: 76105 - DNA, 1146 bp, Citrobacter koseri
atgatcaacgcgctgggcaacgatacggatgagatcgccacgaacctgacgcgcggcgtggcgcctggcatgcgccctcgccccggctggctacaggggcatccacaggcggtgctcgccggtgttgacggcgaactgcccgccatccccgatgactttgccgctcaccgttcgcgcaacaatcagctgctgctggccgcgctcgcgcagatccagccccgggtggatgaagccatcgcgcagtatggccgcgatcgcgtcgccgtggtgctcggcaccagcacctccggcctcgacgagggtgatgcccatgtcaacctgacgctaaacggccaagaaagcctctcctggcagtacccgcagcaggagctgggcgatccgtcgcgctttctcagccactggctggcgcttgatggcccggcgttcaccctttccaccgcctgttcctccagcgccagagcgatcatcagcggacgccgactgatcgaagccggtctggcagacgtggcgattgtcggcggcgcggacaccttaagccggatgccgattaacggcttccacagcctggagtcgctctctccaacgcgatgcctgccgttcggccgggatcgcagcggcattaccatcggtgaaggggccgcgctgatgctgctgacccgcgaaccgcagcctgtcgcgctgctgggcgtcggcgagtccagcgacgcgtaccatatttccgcgccgcatccgcaaggtgaaggcgcgattcgcgcgattacccaggcgctcaatgacgcaggcctcacgccgacgcaggtgggttatatcaacctgcacggcaccgccacgccgctcaacgaccagatcgaatcgaaagtcgtgagtgaactgtttggcgagaatgtgccctgtagctccaccaaacatctgaccgggcacacactgggcgcagcaggaatcaccgaagccgccctcagcatgttgattctgcaacgcgacttgccgctgccgccgcaggatttcagcgattcgccgcgtgacccggcgttgccgcgctgcggcatcatcgaacaaccgcgcgcgcttgaacgcccggtgatcttatctaactcgttcgcctttggcggcaacaacgccagcattctgctcgggagggtttcatga

SEQ ID NO: 76106 - DNA, 1038 bp, Citrobacter koseri
atgacggataaacacttgacccaatccccggcaggcgaatttattatgtttgccagtgatgacggtgaagtgcgtgttgaatgccgctttgagcaagagacactgtggctacctcaggcaaccattgcaaacctttatcaaatcactccccaggctataacgcagcacatcaaagcaatctacgaagaaggcgaacttgaacaaaacgcaacctgtaagtcttacttacaagttaaacaggaagggaatcgtcaggtaagccgcaatatgcttcattacagcctacccgtcattcttgccatcggctttcgtgtccgctccccccgaggtacgcaatttcgccagtgggcaacccagacgcttcaggaatacctgatcaaaggttttgtgatggacgatgagcggctgaaaaacccgcccgtaggaacatcggccgttcctgattatttcgatgagatgctcgaacgcatccgcgatattcgcgccagcgaacgtcgggtttatttgcgagttagagagatctttgcgttggccgccgactatcagccctcgcttaaagagacaacgcagtttttccaaaccatccagaacaaattgcatttcgcctgtaccggccatacggcagctgaacttatttgtgaacgtgctgacgccaggaaaccccatatggggctaaccagctataaaggcgaagaggtgcgtaaatgcgatgtaacagtggcaaaaaattacctcaaccaggatgaagttagcgaactcaaccgtgtggtcaacatgtggctggattttgccgaagatcaggcccggcgccgtcaacaggtgtttctgcgtgactggcaggataagctggatcagttcctgcaatttaatgaccgggaggttctgcaaggcgcaggaaagatcagtaagaaaacggcagaggaaaaagcacaggcggaatatatccagtttgcagaacagcgacggcgcttaaaagaaactgaaggagaaagggacattgccagtttgctacagtggaaaaaagagaccaaaaagtaa

SEQ ID NO: 76107 - DNA, 360 bp, Citrobacter koseri
atgcgtgtatttaaaaccaaatggtttgtcagggaagcaaagtcccatgcaatcaaagacgaagagttatgtaaggttattgcagcagcaatgcagggaaaagtggaggatctcggtggtggggtttacaaaaaacgcctcaatcagaatcgcgatcgcgcgatcatcctcgcaaaaggcggtatacattggttttatacatttttatatgccaaacaggatatggcaaacatcgacaacggtgaattagccgggttccgcgagttagcaaagcattatgctggtctcgctgaagataaaatgacggcattgattaaaagtaaagaattggtggagatttgccatgactgcaaaaaataa

SEQ ID NO: 76108 - DNA, 324 bp, Citrobacter koseri
atgactgcaaaaaataaattcaaaagccctgcttttgaagctattcacagcgcagcttctggattattcagcgttgatgccattccccaggaaacgatgcgcaactttgacaaagcatgcctcagtagcgtggaggatcttcagccgcttgaaatcaaagcactacgcgagaagctgaacgtcagccagcccgttttcgcgcgctatctgaataccagcgtttctacagtgcaaaaatgggagagcggcgcaaagcgccccggcggtatagcattgaagcttcttaccattgtgcaaaagcacggactaaaagtgctggcctga

SEQ ID NO: 76109 - DNA, 159 bp, Citrobacter koseri
atggacaggtcaggtagccagaacacccatcaggcgtgctctttatttgcctacaccctaaaaatgggtctggaaatgaacttttcaagcgcttgcaggggactttttttgcagtttgttgtctatcgcatagactgggtgaacagcacacattgttaa

SEQ ID NO: 76110 - DNA, 123 bp, Citrobacter koseri
atggtagtgcgccatcaggcaaaaaaaaagccgctaacgcacgttagcggcctgaatatcagtttccctgaaaattacgcggtagcggttttggcggccttcgcgttttcttcatcatcctga

SEQ ID NO: 76111 - DNA, 675 bp, Citrobacter koseri
gtgaacgcgaaaaaacgactgctctcaggttttttaatcatctgtatcgccggggtggtgtgggctttgccccccggttttctctcccttgataccctgaaacgctatcacacgatgctggcggcctggcagcaacagtcgccattcctgagcgccggtctctattttctggtctatacgctggtggcggccttatcgattcccggcgctgcgctgctgacgctgctcggcggcgcgctattcggactctggcaaggaacgctgctggtctccttcgcgtcaaccctcggcgctacgctcgccatgctggccagccgctacctgttgcgggagtggatctcccgccggttcgcacgccagatgcaaaccgtaaatcatggtatggcgcgcgacggcgccttttatctgtttgcgctgcgcgtaatgccgctgttccccttcgttctcgttaatttactcgccgggttgacgtcaatccgcgtacgtcaatactggtggatcagtcaggcgggcatgtttccggcaacggtgatttatctcaacgccggacgccagctcagccagttgacatcaatacgcgacatcatttcccccggtatgctggcggcctttgccctgctggggctgttaccgctggcctcccgttggctggttaagcgttttttacgatcctaa

SEQ ID NO: 76112 - DNA, 1023 bp, Citrobacter koseri
gtggcgctgccgcttaccgggcctacaaggttgttctgtgattgtgtcggccggattacggtcaatcgcccggtggcgctgtcgcttaccgggcctacagggttgttctgtgattgtgtcggcctgattacggccaattgcccggtggcgctgccgcttaccgggcctacagggttgttctgtgattgtgtcggccggattacggccaatcgcccggtggcgctatcgcttaccgggcctacagagttgttctgtgattgtgtcggccggattacggtcaatcgcccggtggcgctgtcgcttaccgggcctacagagttgttctgtgattgtgtcggcctgattacggccaattgcccggtggcgctgccgcttaccgggcctacagggttgttctgtgattgtgtcggccggattacggccaatcgcccggtggcgctatcgcttaccgggcctacagagttgttctgtgattgtgtcggccggattacggtcaatcgcccggtggcgctgtcgcttaccgggcctacagggttgttctgtgattgtgtcggcctgattacggccaattgcccggtggcgctgccgcttaccgggcctacagggttgttctgtgattgtgtcggccggattacggccaattgcccggtggcgctgccgcttaccgggcctacagggttgttctgtgattgtgtcggccggattacggccaattgcccggtggcgctgccgcttaccgggcctacagggttgttctgtgattgtgtcggccggattacggccaattgcccggtggcgctgccgcttaccgggcctacagggttgttctgtgattgtgtcggccggattacggccaatcgcccggtggcgctatcgcttaccgggcctacagagttgttctgtgattgtgtcggccggattacggtcaatcgcccggtggcgctgtcgcttaccgggcctacagagttgttctgtagtcgtgtaggccggataaggcgtagccgccatccggcaatcagatag

SEQ ID NO: 76113 - DNA, 1089 bp, Citrobacter koseri
atgatgaagcgtaatatcctggcagtggtaatccctgccctgctggcagctggcgccgcaaacgcagccgaagtgtacaacaaagacagcaacaagctggacatctacggtaaagcggtagggctgcactacttctctaaagacaacggcaaaaacagctacgaaggtgatggcgacaagacctatgcgcgtctgggctttaaaggtgaaacccagatcaacgatcaactgaccggttatggccagtgggaataccagttccagggtaacaactctgaaggctctgacgctcagtctggcaacaaaacccgtctggcatttgctggtctgaaattcggcgatgcgggttctctggactacggtcgtaactacggtatcgtttacgatgcactgggctacaccgatatgctgccagagtttggtggtgacaccgcatacagcgacaacttcttcgttggccgtgttggcggtgtggcaacctaccgtaactccaacttcttcggtctggttgacggcctgaacttcggcgttcagtacctgggcaaaaacgagcgtgacagcgccaaccgctccaacggcgacggctggggtgcatctctgagctatgaattcgaaggctttggtatcgttggtgcttacggtgccgctgaccgtactaacgctcaggaagctgcattctatggcaacggtgaaaaagctgagcagtgggctactggcctgaaatatgacgccaacaatatctatctggcagcaaactatggcgaaacccgtaacgctacccgtttcaccaacggccttactaacaatagcggcttcgccaacaaaactcaggacatcctgttagttgctcagtatcagttcgacttcggtctgcgtccgtccatcgcttacaccaagtccaaagccaaaaacgttgaaggcgtgggtagcgaagatctggtcaactacgtagaagttggcgcgacttactacttcaacaaaaacatgtccacctatgttgactacatcatcaaccagattgattctgacaacaaactgggcgtaggctctgacgacacggttgctgtaggtatcgtttaccagttctaa

SEQ ID NO: 76114 - DNA, 2265 bp, Citrobacter koseri
atgaaaataacaacggtcagcgtgtgtgtattatgcggaattcttccgctaatattcttacctgtacttcccggttcgttgtgtctcattggcatattttgttttgcctgtgcgctgtcctttgttccatataaatatacgcagtacgccagcttgaccctgctgttttttctctggggaatacttgctgcaaagcaagccgtctggccgggtaatatcttgcctggcgcaacacaagaaaccgtggtgcaaattacggcgaccgatcatgccaccacacattacgggcaaattacccatgtacaggggaaacgcctgtttccctcggtgggcgttgttctttatgggcagtatttgcccggcgaggtgtgtgcaggtcaacgttgggcgatgaaactaaaagtccgtgccgtgcatggtcagcttaatgaggggggatttgatagccagcgttatgcgcttgcgcaacatcagcctctgagcggccggtttctgcatgcgacggtcatcgaatcgtcatgtagtttacgcgcgcgttatcttgcttccctcaataccacgctggcgcactacccctggcagcaggttatcctggcattaggcatgggcgagcgtttatcagtatcgcaagaagtcaaaaatattatgcgtgatactggtacggcgcacctgatggccatttcagggttgcatatcgcctttgccgcactgctggcgggaggattgattcgtggcgcgcaatttttacttcccacccggtggattcactggcaaacgccgttagtgggagggattgtgtgcgcgacgttttatgcctggctcacggggttacaaccccccgcgttgcgtacggttgtggcgctggcagcgtggggattactgaagctgagcggtcgacaatggagcggttgggaggtctggttctgctgtctggcggcaatagtgattaccgatccgattgctgttctgtcgcaaagtctgtggctttcggcctttgccgtcgcagcgcttattttctggtatcagtggtttcctgtaccggcctgggcgttgcctcgggcagggaaggttgtgttggatctcgttcacttacagttgggcattacacttctgctcttacctgtgcaaatagcgctttttcatggtgtaagtgtgacctcttttccggcgaatctgtttgctgttcctttggttacatttatctctgtaccactgatactggcgggaatgatcggccatttgaccgggccgctgatggctgaagaaggcctctgggcgctggctgacgcctctctggacgtgttgttccgggcgctgaaaagtctgccggaagggtggattaatattgattatcgctggcaatacctgtctttggctccctggttaacgcttatggcgtggcgattgaatgcctggcgaacttacccggtgatctgtttgtctggcgtgttgctgttgagctggccgttctggcgtacgccgcgcacggaggcgtggcaggttcatatgctggatgtcggacaggggctggcgatggttatcgcgcataacgggaaagcgatactttatgatacgggacgcgcctggccggatggcgatagcgcacagcagctcatcattccctggctacgctggcacaatctggaacctgaggggattatcctgagtcatgaacatctggatcatcggggtggcctgtcatcattacagaagacgtggccttcgctctggatacgaagcccattaggctggaagggccatctgccgtgctttcgtgcggagcagtggacgtggcaggggctatccttcatcgcacactggccgattaagggaaacagggaaaagggcaacaaccattcctgcgtggttaaagtggatgacggaaagcagagtattttgctgacgggcgatattgaatctccggctgaacaaaaaatgctaagtcgttattggcgtcatttgcaggcgacaatcattcaggttccgcatcatggcagtaatacatcgtcgtcattagcgttaattcaacgggttgagggccttgccgcgctggcgtcggcatcgcgctacaacgcctggcgtctgccttcctggaaggtaaaacagcgttatcaacaacaaggttatcagtggctggataccccgcatcaggggcaaatttcggtggatttttccccgcaaggctggcgcatacgaggtttacgggagcaaattttacctcgttggtatcatcagtggtttggcgtgtcagaggataacgggtag

SEQ ID NO: 76115 - DNA, 147 bp, Citrobacter koseri
atgccggatggcgacgcgaagcgtcttatccggcctacggagtcacgggagcatatctgtgggcctgataagcgtagcgccatcaggcgctgctttgtgccggatgatggcgttgaagtctcttttccggtcggaatgcagaaatga

SEQ ID NO: 76116 - DNA, 849 bp, Citrobacter koseri
atgagccaaattaatactaacttactgataaatattagaaatgaagctgccgggctcagtccgatcctggagaaagtgggccgttttgtgacggaaaatcctgactttgtgatgcggcacactattactgagttggccgattctattgaaaccagtgaaggaagtattacgcgcttttgtcgcgcgtttggctttaaaggcttttctgatttcagaactgcactggcgctggagcagggggccgcgcgccctgaagaacaaggtaatgaggagatatcctctgtgatggcgagtatccgcgacagtcatgccattattaatactcaggagctacaggctgcggctgcgtggcttaaccaggtcaataatgtggcgatttacgctgtcggtacggcggtacctgtcgcgctgtttttgcagatgaacctgatcaaaatgggcaaagctgcgagttttgtcgatcgtttttatctcacaacctcatccatgatggttgaaccgcagagccagggaattattgtggtgcacaccgagcagacgtcggcagatatgatgcaggctctggcattggcaaaacaacatagcgcgcggattctttcgctgacgcggggcacttttgcgccgcttagccgtctttctgactggaacttacaagccgccgtggcgctgaaaggggaaggtgagtatggttttgccgagattgccggtgcgatgatggtcgcagataaattgcttaatgcgctggaagaacaggatgaacgctatgcggaatgtcgcaaagcgcatcagaagagtattttctcgattgagagcgtagcgaacaagctatcggaatattttatgtcgtag

SEQ ID NO: 76117 - DNA, 276 bp, Citrobacter koseri
atgaaaggtcttattgtctgtcgtaccggcatgggcagttccttgatgctcaaaatcaaagcgcaaaaaatcatcgataagcatggctgggatattgagctcgaacacgacgtcttgtccgggcttgccacctggcaaggaattgactttgttatcaccatgcgcgacctcaccgatgaaattgaagctgccggattcagagctatcggtataaccgacttgatgaatagcgaagaaatggaaaccgcgctcaccagcgtaattcaggacaactaa

SEQ ID NO: 76118 - DNA, 1266 bp, Citrobacter koseri
atggatctcctcaggtttattgtattcgacattctgggtgtaaccccacttttagttggatttattgcattaatcggcctgttaattcaacgtaagccgattgagaaagtattatccggcacgttcaaaaccattgtcggctttctggtctttgccggtggtgccggactggccgtcacctctctgggaaatttccagacgctgttcagcgacggatttgggcttaagggtgtgatgccgctggctgaagcactaaccggattagcacaaacaaaattcgccatgtgtgtttcactgattatggttatcggttttggctggaatctgttttttgcccgttttacaccatttaaatatatctttttaaccggtcagcataatctgtacctctccgctctgcttactgtaacgctaaaagctctgggttacagtgatggtacgacgattattgtgggttctgtactgttagggctggctgcctgcatctatccggccatcgcccaaccgtggatgcgcaagatcaccggcaatgatgaaatcgctatgggccactacgtcacgctggcctacgccgcttcgggatggattggctcgaaagtcggcgaccctaaagagtcaacggaaaagttgaatctgcccggatggctggggatctttaaagactacattgtctccgtatccatttcggtcagcattttctactacatcgccgcgctggctgccgggaaaaccgccgtgacggccgtagcaggcggaatgcattggctggtctatccgttatttcaatccctgacttttaccgcttcactctacatcatcattaccggggtgcgactgttactgtctgagatcgtcccggcgtttctggggatctcagagaagttcattccaaacgccaaaccagcactcgactgtccggtggtattcccctatgcaccaaccgctaccgtcctcggctttatctcctcatttgttggtgggttggtggtaatgggcatactcgcgttgattggtcagacggtcatcatccccgtcgccattccttatttctttattggggcaacggcagccgtttttggtaacgcctccgggggatggaaaggtgccgtggcgggcagctttattaccggcattctcatcggcatcggccccgcgctgatctaccccattatggaatccgtaggcctttctggcaccagcttcccggaaaccgatttcgttgctcttgggctggtggtgtattacatcggcaaaatgctgccctga

SEQ ID NO: 76119 - DNA, 798 bp, Citrobacter koseri
atgaacattgataaactgaagtctcacgcgctggcagctcgccgcgatattgtgaccatgatttatgaatccggcattgggcacccgggtggagcgctctcgattattgatatcctgacctggatttatcatcaggaaattgatcttgatgagtctcctcgcgctcgggtggtaatgagcaaaggccatgccgtcgccgcacagtacgctctgttgttccagaaaggaaaaattgaccgcagcgaattcaactcgttccgtcagatcaactcacgtctgcagggtcatcccagtgtgaaatcactacctgaagttgacgcaaccaccgggctgttaggccaggggctctcggtcgcattaggtatggccgccgcgaaaaagcacgctcaggatccccaccgcgtcttcgccatcattggcgacggagaaatgcacgaaggtcagatttgggagtcattgcagcaagcgggacacatgcgaatggataacctggtcgcgatcgtcgactacaacggtttctcctcgcacgatcctgttaacgaggtaatcaaccttgaaccgctggccgataaaatccgcaattttggctggcatgtccttgagttgcaaaatggcaacgatatgcatcaggttgccgacacgctgatgctatcacgccatctgaaaggcaagccggtggcgattattgcccacacaaccaaaggcagtggcgtcagctatatggaaaataacggagactggcattcaaaaaccccagatacagagcaataccagcaggcaatggaggaattacagtaa

SEQ ID NO: 76120 - DNA, 912 bp, Citrobacter koseri
atgaaagcaccacgcgatgaaattggtaatgcgctgcttaccctaaaagcgaaaggttatccgattgtcgtgatcgacagcgatctggccagttccacccgcacggatcaatttcagaaggtctggcctgatgcattctttgaaatgggcattgccgaaggttccgccatgagttttgccacaggccaagcactggagggcaatattccgttctatgttaacttcgcgatgttcgttaccggcaccgcatggacacagcttcgccaggcatgctatgcaaaagcgaatattaaattagtaggcagtcatcctggcatggatgacggtccggacggcgcatcacaccatgcgctggaagatctggccttaacgcgcgtgctaccggggatcacgattctgacgcctgccgatgcagaagaagttgaagccgcatttgaacaggcagtaaacattcatggccccgtctatatccgcgttgcacgggaaccaatgcccgttcgcgataaatcggtcgttccgcgagtaacagacatcgcagccgttgccgattccggtaatgatttcgctattctctacgaaggcaccgtactggaacaggcgagcgcgggttatgagcagttatgttccgagggtaagcggggaaaactgattcatgtcgccacgctgaagccatttaaccgccagcgattcctggcgttaatcgcggattgtccccatatcgcaacaattgaaaatcatacgataaacggcgggctgggcgggcaagttgcggaagtgctggcagaggaagcgtcaggtatacgcctgactcgtctcgggacgcatgacacatttacagaatcgggtaacagccgccagctaaaagagaaatatggaatttcagcgtcggcactctgcgacgcactcagatag

SEQ ID NO: 76121 - DNA, 435 bp, Citrobacter koseri
atggtacatgcactattttctgccagccagtttcatgaacgatgcgacacatggcaagaggccgtaaaactggcctgcttaccactggaagaacaaggggtgataacaactgaatatgcgcaggcgataatccgcgaaacagaacaacatggcccatggtatatattaagccctgagtttgcattaccgcatgcccgcccggaagaaggcgttgccagtaccagaacacatctgtcgcttttgtctctgaaagacgcggtacacttccaggatcacccgaatgtacggctggtgatcgtccttgccgccgccgacagcacgcaacatatagaaaggattcaacaactgatgtgctggctggatgaagcggagcgtttacaacggttgaccagtattacccgtctggcgcagcttcattccgctcttcatacctga

SEQ ID NO: 76122 - DNA, 1050 bp, Citrobacter koseri
atgaataaatttataacaattgatggccgcaatattggtaaagaccatcctccctatattattgctgaactttcggctaaccataatggtgatcttaatcgcgcattcaaaattatggaagaagctaaagcagcaggagcagatgcaatcaagttgcaaacttatcgtgcagataccatcactattgactgtgacactgaagattttcagattcatggcggattatgggatggacaaactctgttcaatttgtacaaaggtgcccagatgccatgggaatggcacaaacctttattcgaaaaagcaaaagaactgggaatcactatttttagtagtccgtttgatcatacggctgttgacttactggaggagttgggcgctcctgcatataagatagcttcatttgaagcaatcgacctgccattgattaaatatgtagccaaaacaggtaagccgatgattatctcaaccggcatggctgacgaaaaagaaattcaggaagccattaatgctgccagagaaggcggctgtaaagaactcgtcgtattacattgcgtaagtggctacccggcacctgctgaagactataatctggcaactattccagatatggcagagcgatttggtgttattacaggattgtctgatcatactattgataataccacggctattgcttctgttgtccttggtgcaaatgttattgaaaaacatgttacgttagatcgtaacggtggtgggccggatgacagtttctcgcttgaacctgatgagctgggggctctttgccgcgatgctaagacagcatggcaagcgttgggccatatcaactacgagcgtaaagagagtgaaaaaggtaatgtgaaatttcgccgttctctctatatagtgaaggatattaaaaaaggtgaaaaactaaccagtgagaatgtaaagagcatcagaccgggttacgggttggctccaaaatattatgatgaggttatggggaaaactgcaacgcaaaatcttattaaaggtactccactcttggaggatcattttaactaa

SEQ ID NO: 76123 - DNA, 1533 bp, Citrobacter koseri
atgaaagtgttcctgcgagctgattcatctctttcaattggttctggccatattatcagatgcctcaacttggcgaaaaccttaagacattcaggtgtacagtgttttttcatatccaaaaatcaccgaggtaatatcctcgataaaattggactggagggttttccagtaaaagtcatctctgtttctgatgaaccagatgtttatattcgcgatgaaaaatcctggctaaatggtagtcaaagagatgatgcagaacaatttatttcattggtgaaacagcaatgcaataacccagatattattattgttgatcattattcactcgacagtgaatgggaaattctggttaaaacatgctttccagatacaaacttagtggttattgatgatctgtgtaaccgaccacaccactgtgatttattgattgaccagacatatcagcgcagtgcggaagaatattcttctttaaatgagaataatgccagaatattagctggtgcgaagtatgctttattgagtccggtattttcacaattaagacatcaatcaatagaacgcaaagccagattagctataccaaagacattgatactaacgatgggcggtgttgatgcgcataatgttacaggaaaagttcttaaatatcttgaacaagccgtttttgagaatattgaaaaaataactgttattttaggtagtgcttgcccatatagcgttgagatacatgctcttgctgaaagatcaaaatataaaatcgatgttctgaccaatgttacaaatatggcggaactcatgcttgagcatgattttgcgattggtgctatggggggaacaacctgggaacgctgtgcaatggggctacctgctgtaaatgtcgcgattgcagataaccagataactattgcgcgtaatctttccagagttggagcaattgttttatacgcagatcacttcagtaaagatgaactttgtaatgcgctacataatttagttactcattatcataagcagcatgcccttgcgatggaaatttgtgatgggctgggactcttcagagatatacaggaaatggtactcatatctgcaaaagatggtgtaaatgttacacttcgccatgctactacagaagatattgattttgtttatcagcttcaatgtgagccgcagactcgtcagtatgcgcgcaatcctgaaattccttcctatcaaaaccacgttgactggatgcagcgtaaattaaatgataatggaacgtcattctatataattgaacatgatggtccgtgtggtgttttgcgacttgatccgcttaagcatgtttgcgcggaatgtgaaatttcaatttttctgactgcaagttgtcatggcaagggggttgctagtgctgctatcagacgcgctttaatgttgcataatgatatcactatgttagcgacagtactgccagaaaatcaggcatcacatcagttatttgaacgccttgggtttattaaaatctctcccagcgaatatattagcgagacgaagtaa

SEQ ID NO: 76124 - DNA, 711 bp, Citrobacter koseri
atgaatgtggcaatcattcctgcacgtggcggtagcaagcgtataccacgtaaaaatattaaagaattttgtgggaaaccaatgattgcctggtccattgaagccgctcagcagagcggcgtctttgaccgaatcattgtttcaacagatgatgaagaaattgctgaggtcgcgcgtaaatatggtgcggaagtgccgtttatgcggcctgaagagctttcgaatgattttgctggaacgatccctgtaattcgccatgctatcgattggctgattaatgatggttacatagcagactttgtttgttgtatctatgcaacagcgcctttcatccgttctgaagatattattcgcggtttgggaacgcttcgtgaacaaaaaggcgattacgctttcacagtgacaagatttccttacccgattcagcgtgcactcaaagtaagtccagaacagcgtataagtatgttctcaccagatatgttccatgcacgttctcaggatctcgaggagtcatggcacgatgcgggacaattttattggggaacatcttttgcatggttgaatgaaaagccgatatttagtgcagattcctattcgattgaacttccgcgtgaacgtgttcaggatattgatactccagaagactggcgagtagctgagtggttgtttaaaaccatggagtttaaaaatgaaagtgttcctgcgagctga

SEQ ID NO: 76125 - DNA, 1152 bp, Citrobacter koseri
atgaaatttatcccttatggacgacaggatatctctgatgaagatatcaatgcagttgtggacgtattgaagtcagattttttgacccaaggaccatgtgtaccacagtttgagcaagcaattgcagattatgtcggtgttaaacatgccgttgctgtgaacagtgcgacctctgcgttacatgttgcttgcctggcgttgggcctgaagaaaggtgactggttatggacgtctccgaatacgtttgtcgcttcggctaattgtgctttgtattgtggggccaatgttagttttgtcgatatcgatccgcaaacctacaatatgagtgtgagcgcgctaaaagctaaattggctactgctaaggctaacggcgtattaccaaaagttgttgttcctgttgctttcgcgggtcaatcatgtgagatggaagaaattcatcaactgtctaaagagtatggttttgccattattgaagatgcatcacatgcaattggcggtagttatcagggtgttaaaattggtaattctcgttttgccgatattacgatactgagctttcatccggtaaaaattataacgacagcagaaggtggcatggcgctcaccaactgtgattccctggctgaaaaattacagctttttcgtagtcatggcattacccgcgatggtgataaaatgacgaaagccacggaaggaggttggtactatcagcaggttgatctcggtttgaattatcgtatgaccgaattgcaggcggctttgggtgtgagccagttaaaacgtattgaggattttgttgcccgtcggcatgaattggcaagacgttatgacgcggcgtttgagggagtacctgtttccactcctcttcaatcaccaagtggctacagtgctctacatctttatcctctgacggttaacgatccagcacagcgtaaaccgctttttgactacctgcgtgataaaggaattggcgttaacgtccattatatccctgttcatactcagccatattatgaacaactcggacataaagcaggcgattacccgattgctgagaactattactcgcgcgcaatcagcattccgatgtactcgacactttctgatgaagagcagaattacgttatcaaatgtattcgggagttcttttaa

SEQ ID NO: 76126 - DNA, 999 bp, Citrobacter koseri
atgtttgataataaaactattctggtaactggtggtacggggtcttttggtaataaatttgttcgaatgacattggaaaaatataatccgaaaaagattatcatttattctcgtgacgaaatgaaacagtgggaaatggcgaagcattttaaagatgaaagccgtattcgtttcttcattggcgatgttcgcgataaagatcgtttataccgtgcattagatggtgttgatttcgtcgtccatgcagcagcaactaagattgtaccgacagcagaatacaacccattcgagtgtgtaaaaacaaatattaacggtgcgatgaacgttattgatgcatgtattgataaaggcattgaacgtgttgttgcactctcaacagataaagcgagtagcccggctaatctttacggtgcaaccaaactggcctctgacaaactgtttgttgcgggtaattcctactctggtgcaaccaaaacgcgttttgccgttgtccgttacggtaatgtaatgggttctcgtggttcagtcatccctttcttcctttccattaaagataaaggtgaactgcctattactgatgatcgtatgacccgctttatgattaccctggaacagggcgttgaactggtatggcatgctttcaacgatatggtgggcggtgagatttacgtgaaaaaaatcccatcaatgaaagttaccgatgttgctaccgctgttgccccggatgcaactcagaaagtcattggtattcgccctggtgaaaaactgcatgagcagatgatcagtgcggaagatgcacattatacctatgaatacccagaacatttcaaaatcctgcctgctattcacaactggtgtgactctcctgaacgtatcaaagacggtaagagagtgccggaagggttcgtgtacgagagcgacagcaatacggaatggatgagtattgaggagcttcgtcagtggattgatgaaaaccgcgaaaaagtaggcaatatctga

SEQ ID NO: 76127 - DNA, 351 bp, Citrobacter koseri
atgccgtatttggagcccgatgcgtacagccttaaagataatgatttgcaggtctacggtatgcgcgttgtggagccgcatcatgacggaacgccgaattggcacatgttgcttttttgcaaaccagagcaacgcaaacacattacggaaatcatgcgacgctatgccttaaaggaagatggcgacgaaaaggtgcagcagcacagagatttgaagcgaagcacctcaatcaaggtggtgcagccggttacatcgcaaaatacattgcgaagaatatcgacgggtacgcactcgatgggcaggtcgatcacgataccggtagacctctcactgatgctacagcagttgtaa

SEQ ID NO: 76128 - DNA, 183 bp, Citrobacter koseri
atgccaagaactgttgacctcgtcagtcacgttacgagccacacggacggtctgactatcacggggaacgttcgccccaccctgcgctgcgatataaaggtcaaacttaccttcgtcagctgctgcccttgcttcctcgacacgctcatcaaattcatcagcaatgcttacaccacgtggtag

SEQ ID NO: 76129 - DNA, 2595 bp, Citrobacter koseri
atgatcgagagcaatgttatagataaaaaattattgacaaaaaaaagaagcgttaaagatttagcggattatatcaaaattagatctggagcatcccccaattactctctttttcttggtgctggtgcatctgttacatcgggaattcgaacaggttatgaattagtccaagagtggagagaggagatttatactagattttcgcaacaaccttattcaaaccacagtaaagctaaagaatggttagcagaacagcatcctgactggtacgatcaaaataacgagtactcatctctttttgagaaaaaatttgacttaccatctcaacgcagacgatttgttgaactccaggttgacaaaaaactaccttcaattggttatgcctatctcgttgaattatttgaatcaaaattctttgatactgtattcactacgaattttgatgatttgattaatgaggccttttatcaattctcatcagatagaccacttttatgtgctcatgattcatccataaaaggtgtatccgttacatcatcccgccccaaaataataaaacttcatggtgattatttattcgatagcattaaaagttctctgaaagaaactgagtcactggaaaacaacacaagagaaaaattaatagaattcactaaagaatatggattgatatttgtagggtatgcgggtaatgataattctataatggatacattaaaatatttactaaagcaggaggattacttaagaaacggaatatactggtgcagaagaccgggagatcaaataactccagagttattcaaactactcaatcatgacaaagtttactgggtagaaatagatggttttgatgagttcatggcagaactagtccacgaacttggtggagagctttctcttggtggaaatcaaaaatccacaaaaagagagagaatgataaataatttcataaaagacgaatatagccttgaaaaaaacacttttattaaaaatgatttaaccaaattaaaaaaacacacactcacacgtgacatttcatcattaataaatgaactttcacaaagcgattccgacgaacaaaaaatacctgaggaagacttcaaaaatctcctatttattgataatttaattagagcaaaaaattacagcatagctgaagataaattaaacaaactagttgaagaagccaacaacgacaatattaaatcaaaatacctccggcgtctcatagagattaaagaagatcaaaaagacaccaagtcagctctggaatatagtgacaaactaatcgaacttgacgaattcaacattagttatgttttatccagaactaatatattcatagacatcaaagacaaattaattcatttaaaaggattgcttgaaaaattcagatatagcataagccttagaaatcatctctgccggattgctctaacatatttggaaaataatgatgagaaattaataacattcaaagaaatacacaaattaatagaggaaagtctcttccaaaataatagccttgacaataacgcctggaagctaaaatacgatacaatcgtatccgaacatcagtccaatcatgataaaaaggaatgtaatgaaaatattatagagttacttgacaggatcaaatcaattaaccaaagtcatgacacatacttaaatatatattctgatttctcttgttcctcacacactaaaaaagatattgtagcatgcatagatacattgtccaatgtatataaaacatcttccaaaaataagaaaaggaatatattaaaatacttaacaaagctatatctatccttattcgaaactgaatatgataatgatacgccagaagcaatgagacaatttatagaggaatatcaagaggatgatgatatttccaaaatagctccattcattatattcaaagcaagatatgaaattggttgcaacaaggacagtaatgctgctatagcacttgcgaaagaggcaatggatagcccttggaaaaacaatcatattgaaagcatcactaacattttattaatcgatagtgacaacatcccattggtagaggagtttattgaaaatttaccaagggatacttccgatgttcttatattaaaaataaaatctgatatatcgatactaaaaggcgattataaaacatcgattcaattacttgaagaagcctataaagaaggctgggattttagcgattatacattaggaagggcctatactaatctattagcgaaaaattatcacgacacaattagaattgttgatgaaagcctcaccaaaattaaaaattttagagagaaagatgtattaatagttaatagagaaatcgccaagaaaaaaatagggcaagaagtaattaaacatgaggttcgttcaataatagctcatcacaaatctaaaggagatgttgctatgtgtgcatttttccttttagatgatcttaaaaatgcaaacaaactattgcaaaatttaatagaacaagacttcatgaattattacagattttcggcatggccagctttgcctgaaaatatactttcaccttatagcttaaaaataaataacgctgcttaa

SEQ ID NO: 76130 - DNA, 273 bp, Citrobacter koseri
atgccggaatgtctgagcgcactcaattcggcctggctgaatgaatctgccaccctgtttcgtcgcaagtattaccagaatggtgcacacgcgggttacatcatgtacgtcaccgacgcggcacagagcagcacagatgtcgagtcgctgcgttctgccatgcgcgattcaaaggggctagggaattttaaaaacctgtttttctatgccccccaacgggaaaccagatggcatcaagatagagccactcagcgaggccgccacgaaagatga

SEQ ID NO: 76131 - DNA, 342 bp, Citrobacter koseri
atgattaatgtacttaaaatcgacggccatcaggccgtcatcacctttgacccagaaatcgaaatgtttcgcggtgaatttattgggcttaacggtggtgccgacttctacgcttacagcgtggaagaattgaaaaaagaaggcgctgagtcgcttcgtatcttcctggatgaatgcagaaaggacggtattgagccttataaatcctatagcggaaaagttacaacccgtctgacgcctgagcggcatgaagcgttgactattgcagcgcaggctacaggtatgtctattaatgaaatgctgaatgaaggtgttgacctcgttatcgcgcgtcattcataa

SEQ ID NO: 76132 - DNA, 981 bp, Citrobacter koseri
atgaataagtattggttaatattattactgttattccctgtcttatcacaggctaaatgttcactagggaataacacaaccgcacaacaatctattgaaatagatatgacatcaggtgctgcggtgattcctgtcaaaactaatttacatgatacgtttacctgtaatgcgtcaagcgacaagatgtactatgcgacgcctttacaaaattatatcgttgagtttaaagggacagggtcgcagaaatccatttttatgcaattaaagctgactggaaatgggtttcccgttacgattggtaaccaggagactacaacagataatgtgatcaatacgaagtcgtttacgcttgaagcgaactatataaagtctggaactgcggatttaaccgtttcaggtaatagcattaacttaaaccgtcctgctatcagcattcttactgataatacctgtaataataatcttttctcatggattctttgttggataacgggaaagctaaacagtaatgtttcttattcacaaaacattgtttttacagtaaaacataaacctacgacctgccatttttcacagaatcaatatgttattgcgatgccagaaacaacattaaatgagataatagccggaaataatacgaaaacaggaaccacgaatctgattttaaactgtgatagcgtatataatgttacgactaatccagtgagtttcaacgtttctcatggtgactggaatgaaaacggcacgatacttaaaaatatgctgacggagggtgcaaaaggtgtggggtttcagatatacagtggctcaggtactacgcctttaatgcagggtgatatactaagaacaatggtaaaaatgaccagtattgaggataagtatactatcccgatcaccgcaaaatatgtcagagtcagcaacgaaccattacgacctggaaatttgcaaagcaaagtaatatttgctgtttcatatgattaa

SEQ ID NO: 76133 - DNA, 2487 bp, Citrobacter koseri
atgttaaagataaactccattacgttagcgatcctttctgtgctggtgatatccccggtatggggagaaaccgaaacatttgacacacactttatgtttggcggattaaaaggtgaaaaggtttcccgttatcagatcgacggagataaaccgatgccgggtctttatgatatggatgtttatcttaacaatcagtggcgtggccgttacgaattaaatatccaggatgatcctgatgatacttgcttgtctatagctcagttgcatcagattggtattaagtccgatggtcttcaagtggataagaaagttgattgtgtatcgctacgagccgcagttcaggggggggatattagctatgatatcagtcagtttgctctaaatttgacggtgcctcatgcctacgtgaatgaatacgagccgggttatatgttacctgaaacctgggatcggggcattaatgctctatacatgtcttattatgccagtcagtattacagtaattataaaagtggtggtaatgatgaaagcagctacgtaagtctgaacagtgggctaaacctgtttggctggcagttacattcgaatgcaaacttcacgaaaagtaatgatgacagcggagaatggaaaaataatacattgtatatggaacgtggcatccctgaaatattaggaacgctacgtgccggggatatgtataccggaaccgatctgtttgactctgtacgtttcaccgggatacgtatctggcgcgatatgcaaatgctgcccaattcgaaacaaaactttacacccattgttcgtggtattgcacaaagtcatgctttagtaaccattgaacagaatggctttattgtctatcaaaaagaggttccgcctggcccatttgcgattgccgatctacagcttgctggaggtggtgctgatttggatgtcagtgtaaaagaagctgatggttctgtttcccattatcttgtgccttattcatctgtacctaatatgctacagtctggtgtatcaaaatacgatattgcggcagggcgtagccatatagaaggcgcgacaaagcagacggattttttgcaagccaattatcagtatggattaaataatctactgacattatatggtggcactatgctgtctgaccattaccaggcttttacattaggcacagggtggaatacacacattggtgctgtttctgtggatgccactcagtctcatagtaaacaggataatggtgatgtttttaatggtcaaagttatcagatagcgtggaataaatatgtttcacaaacaggtacgcagtttgcgttagcagcctatcgttattcttcacgtgattaccgttcatttaatgatcatgtctgggcgaataataaaaacagctatcatcgggataacaatgatgtgtatgacatcactgattattaccaaaatgattttggtcgtaagaatagtttttctgtcaatataaaccaggggttaccagagggatgggggaacctggcactgagcggattatggcgtgattattggggacgcaatggcagcggaaaggattatcagttgagttattctaatgactggcggcgtattagttataccttgtctgcgagtcagagttatgatgaggataatcgggaggataagcgtcttaatatttatatttccatcccattctcctggggcgatggcgtcacggcaacgaaacgcgagctctttgtttcaaactcaacgacgtttgataacgaaggctatcagtcgaataataccagcctaagcggcattgcgggtggtcgagatcaatttagctatggcgcgaatcttgcgcatcagcggcaaaataatgaaacaagcgcaggtggaaacctgacgtggcgagcgccggttgcgacggtaggcgccagctatagccagtctaataaataccggcaggctggtgggaatatccaggggggaattgtcgcctggtctgatggcatacatttaaccaaccgcctctcagatacacttgccattattaaagcgcctgggttagaaggggcagctgtgcaaggtcaccgttatctgaccacggacaagaatgggtatgccatatatgacagtctgacgccatatcgtgaaaactttttaacgttggatctttcccatacctacagtgatgtcgaactacgcggtaatcgtaaggggattgtgccttatcgtggtgcggttgtgttagctgagtttgaaaccgacaggcgcaagctctggtattttctggcgcgacgtccagatggttctccattaaccttcggttatgaagtagaagatcattccgggaaaaatgttggcttagttgggcaaggaagccgcctttttatccgtacagataatgttcctgcctctttgaaagtcgcgacaaacaaacagcaaggattgttttgcattattacttttgatggcgtaattgatgagaacaagacctatatttgccgatga

SEQ ID NO: 76134 - DNA, 669 bp, Citrobacter koseri
atggcattattgttggctggtgctgtaatgcctgcgtgggcaggtatttatatttacggcacacggattatttatccagcccagaaaaaagaaattactgtacagttaatgaatgaaggtacgcgcagcgcgttggtgcagtcatggattgatgacggcgataccagtttgccgcctgaaaaaattcaggtgccatttgttctgtcaccgccagtcgtccgagtgattgcgggttctggccaacaactgaagattaaattacttgaaaatagattgccgggtgatcgtgaaagtctgttctttctcaatgtgttggatatcccgccaaattcagcagaaacggaagggaaaaatgtaatcaaatttgcgatgcaaaaccgtgtgaagtttatctaccgtccacaaggaatttcttctgtagataaaaatagcttttctcgtctgcggattagtaaatcatacaacggcataaacatcaaaaataattcagcaaactggattaccatccctgaaattgttggaaaaactaaaattaataaagaaacttatgtgcttgcaccctggtcagataaattaataagcacttctgttggcgttaatcattatactgtcacacttattgatgatcatggtaattatttgagtgagaaagtaaaaacggatagatag

SEQ ID NO: 76135 - DNA, 534 bp, Citrobacter koseri
atgaaacgttcaattattgctgcctccgtattgtctgctatttttatgagtgccggggtttttgcggcggatgcagattatggtgaactgattattacgggtaaagttgttggcacaacatgtaaatttgttggtgatgcaactgcaaagattgatatgaaccaggtgggggcggaccgtttaaatatactggatgctggtggcgtttatgatggttattctaactccactatcacgccgttgaaagttgagtgtacgggtgataatgcacctcgtattaccttctcccgttcacagtttgatagttcacatccctctgttacacggaatactgcatcagacaatggcgctggtttctctgtctattatgacgggactaaggttaatgcagataatggtatttctctggaaaaaagtgatgatgggaaatatgagcttagcttctcagcgcgttatgctaatctggctggacaaaataatgtaacagcgggtgaggtgagctcctctttgacgctgacggtagtaactgattaa

SEQ ID NO: 76136 - DNA, 240 bp, Citrobacter koseri
atgtttgtagaactcgtttacgacaaacgcaatgtagatggtctaccgggtgcaagaaacatcattcttaacgagctgacaaagcgcgtacaccggatctttccagatgccgaagtgagggttaagccgatgcaggcgaacgcattaaacagcgattgcacgaaaacagagaaagaacgacttaaccgtatgctggaagagatgtttgaagaagccgatatgtggctggtgaatgaatga

SEQ ID NO: 76137 - DNA, 240 bp, Citrobacter koseri
atgatgagcatggacaacatgattattgccggggtaagaatatatttcccgcctggcaccgatctccctgttccaacacctgaactcaggacatttgccatcgtcagcaaagacctgcctggacatctggtgcttgagtacaaaaacaggcagtgggttcctgtactgacccggctttttgatgattcagcacatgctatttcagcgatcaccagcctgagtaaaaagacatggcattaa

SEQ ID NO: 76138 - DNA, 2310 bp, Citrobacter koseri
atgtctgataatgaaaagacggttcccactgaaggggtggattacggggactcgatggtggtgtggccatcaaaaggaaaactgcccggaggcaatccggctgacggatcaccgtttcctccttcatctcttggccccgggtggtctgactacggcatgggaggtgtcgcctctgtacagggacagaccgtgtggatgatcccacagaggctgacaattgatcagactgttgaggacggggactggcccggatggagcatgatgatttatcaggggacgtgggaacagcatcctgtttcagccgccctcaatgctctggacaaagggcttaaatctggactccccgacccgtccagacctgccgtgatcccgttcgcccgtcttgaccccggttcagtgaaagagaaaggtatatcccgggcggtgactttccttccactgaatgccgtgaccgacgttccggcaggtaagctgcctgcaaaaggagggaaagtgaacgtcagacgccgagtgacggatatggtgaaaggggggaaacagtatctggttctcatggggggaaagatcatgacggttccggtggtggatgctaaaccagtaaaggacagggcacctggcactaaccgtttcctgaaaggggtctatcaggcttctgttgcccccggtctgcctgatatgtcttttgtcaaaaaccgtcataaagataaaaaactccagggtctcccgtataactataagccaaatacggatggagtgttcctggagcagggagcctatggtgcatccggttttaccgccgccagccataaccgggatgtgatagtccgttttccggcagaaagtggtgtgagtccactgtatgtttcgacggtggagttcatgggcagtgatgaactgaaacagcgccagaatgcagaaaacaaagcgaaggctgatattgctgcaaaggccaaggctgccgcagatgccaaggcaaaagctgatgctgccgcaaaagccaaagcagccgcagaagccaaagcaaaagctgatgccgcagcaaaggccaaggcagccgcagaagccaaagcgaaagctgatgccgcagcaaaggccagggcagaactgtttgcaaaagccggagtgaaaccggcaccgacatacacagcgcaaatggtgacaggtgcgaataatgccatgaaagcacccggtgcaatggtgctgaaccagagtccgggtactgtgcagatggcgctggcaggcgcagggagcctgacgctttccggtgcagcagaaaaaagcattctgaacaccatactgaacagcgtgaagaccctggggaaagctgtccccggcgggtatgtgatttcagccatctttcacagcccgaaagcaggtgaaggcagtgataaagtaccgggacgtgacctggaagccatgtttgcgcttaacgcgcagcacatcgcgggtcagggtgtgaaaattgagcctggtgcgaaaagcgtaaacctgccggtgcgcggacaactggtaatcaataacggccaactggcgatgcggttgctgaaaacagggaacagcagcatcccggcagcagtacctgtgctgaatgcagtgcgtgatgcagccaccgggctggataaaatcacggtaccggcagtagcaggtgcgccagcacgaaccattctggtgaatccggcatcggctccgtctaaaccatcaaatactggtaatcagaaacctgtaccagtgacgccagttcataccggaacagagataaaaccagtggaaacgctggtgacgacgaccactccggctgtggatgctggcggactgcgggactttatctactggcgaccggatgcagcaggtactggcgtggaaccggtgtacgtaatgttgagtggcccttatggtgaaacaaacgctaagggcaaatacagcggacgtgagtataataaggacaaagctggtggtcctattcagaaccttgactggaaaacagcaaccattgaccgtgcaggcgtggacaaagtgaaactgcacactggtcggtttggtgaatctcctgacaataaggtgatgattgatcgcctggaaaaaatcctgaagggagaactacagcccaccgataccgacaaacgcttttatactcatgaaatcagagagctggagcgttacaggtctgtgggcgttccagatggagtatcacctgatgatgatggtgcaacatggaataacactcatacagcaacgctggaagattacaaattaagtagcgatcgctctctgctatacacaccagaagcattaaaagctggcgatgaataa

SEQ ID NO: 76139 - DNA, 276 bp, Citrobacter koseri
atgattgattttaaacctatgtttgagaatgaacaaatccgggacatagttttattcttgtcgggacgaaaagaaagcgggatatctcaccctcaattagatgggtattgcactatgtatggtaataaacgtatatcaaatattgaactgatttcattagtgaaaaatatgcgagaaaaaggggatatatcatctaatgggaaaggcggctataaaaaaggtccaaactggaaagagcctaaatttgtgaccgaaaaaaaatacggtattaaatag

SEQ ID NO: 76140 - DNA, 258 bp, Citrobacter koseri
atggcgataattgaactagccagaaattttttggcctcaaaagttaaagcgcttcaattttctgaagatatatgcgtcgaaagacggaaactatacgatgttacagagcaagataaaaaagttctgaattgtggtgaagaacttttcatggtagctgagctttataatccagacactgacagggaagattatgaacttgacgaaacaggcttacgcaaagaagtaaaagccactctcgaaaaatttaaccttctctga

SEQ ID NO: 76141 - DNA, 1326 bp, Citrobacter koseri
atgctatacaatactggaaccatttctgttagcggtaataacgccaccggcacaggcacgaactggaccgcgccagccagccagattcgcgtgggtcagactatcattgtgctgtctaaccctgtccaaatgttccagattacgacaatcaatagcgccacttccctgacagttacgccagctgcgtcaccggcactcagtgggcagaaatacggtattctggtatcagacaatctgtctgttgacgggctggcgcagagtatttcccagttgattaacgaatatgatgagaatatcagcgcatgggaggcttttgctttaacgagcgctaaccaggcgatcaatgtcaccataaacggcacacctgtttctattcctgccctgggtaaacttgtacagaaaggggtaaacggtgcagttcctgttaaccaggggggcaccggcgcaaccactgctgaagacgctcgcacaaacctcggtttgggaacagcatcagtcaggaatgaacaagtatcaataacagatgccgttactgacagagtaatgatgacgggaaaagcatttggacttggctcattgacaggtataggttctgcaataggaagtgcaggccctgttggtttttatggttcaacaggtgataactggggaagccccggaggattatctgtagggtttggcgtgatacaaatgccgggaagtaattcagcttaccggactcaactggccacaaccaactcaggcaagcgtatgtttatgagagccacgcaaaataacgtctttgatgcctgggttgagttctattcaacaggtaatacgacaaaggcgagtgacggcacactcaaagcagcttcgccggttgcccgcattgtcaaatctcaggaagaaaaccagcgtaaggatgtggatgaggacggatttacctggtgtggctgtggtacagcaaacgaagaggccgaaggcatcagtatttcacgtctcgataccggagtttatgtgctcaccggttcggtcggcctggcttcagaaggctggcagttgcttccgccaatggaccccggaggcatgggggaactgggcattgtcgaagcagaagagacagaaagcggtggtatcacgatccgcctgttcaggcgtaaatacatgatgactgatgacggcgagattataaaagccaaaggcgagccgatcgacgtcccggccagcagctggatagacattcgtcttgatatgcctgaaaccagtatctggaaccagaaaaatgcggcgccacagaatctttcagaagcgccttatcaggagaatcagccagacgcacaggattaa

SEQ ID NO: 76142 - DNA, 960 bp, Citrobacter koseri
atgcaaatgtttattgaaggtacgtcctttgatgccgccaatgcgatgagcttcacatatgtcatagactttctgacagtttctggcacaggaagtaaaacctataacacctctggcttcgatctttctgttgttggaatgaatagcaccttagccccaacaaatacgcagagcactatagacgcttcaatatctgggacaaccttaacatggaacacggacgttcctttaaggctggttgtgactgctacagccaggcagggagcaaatagtggttattcaggatttgctttatatacttacccaaataaccagaggacgattaagttagcaccagactttacgccatttgtgttgagcgcggtaataaatattgaacctggagccagaaccgtagataccggagtggcggtaggtgatggggtgattatttttatgcgcaataggaataatcagggtggagcttgcagtagatcgcattttactctgcttgagaccggaacttacaagatgcagtttacggcagcggcaaacaatcaatttcctaccagggcttacgtattttcaagaaagcttccgccaacaccaaagaatggattctatctttacaaagacggagtaatggtatggcatagtaattgtcttccgctggatgccaaattcattaaccagagctatgtagaatcagattatccattagcagtaacgacaggaataacaaattttatatacattccacaagacccaacagttcctgaatatggtttccagaactatggatgctctggtgcaggaataggcaccaatggcaagtggaggacgaataacacggaggtttatcaatcattcctgggtaacgtaggaataccattacccaaagggtgggttgtgggaacaagggttatgtatatagagtgcagtaattacgataattactacacttattcgctcggaagctaa

SEQ ID NO: 76143 - DNA, 3468 bp, Citrobacter koseri
atgcgactccttgaaggtgaaaccattatccacggcgctaaaggcggcggcggtaaagcgcatacgccagtagagcaacctgacgatctgctgtcggtggcaaaactgaaaatgctggtggcactgtcagaaggtgaaattcagggtgacctgactgcccagcagattttcctcaatgacacaccgctggcaaatgacagcggtgaatacaatttcaaaggcgtaaaatgggagtaccgtaaaggcactcaggatcagacctacatccccggcatgccggaagtggataacgagcttgccgtgggcgtaacggtcaccaccactgcaccctggacgaggcaatttactaatctgtcccttgatgcgatccgcataaagctgagtctccccgttcagtatctgtataaagataatggcgatatggtaggaacagtcacggaatacgctatcgacttatcaacggatggcgcggcctggcagacggtcgtgaacggcaaattcgatggtaaaaccacaacagaataccagcgtgatcaccgcatagacttaccaggcgctgtaactggctggtctgttcgggtaagacgtatcacggcagatgccagcggctctaactcaaaactggttaatgcctttaaagtcttttcttttgcagaggtgatagacagtaaacttcgctatcccaatacagcgctgttatatgttgaagtagacagcagccagtttaacggcagcgcgccgaaagtcacctgcaggccaaagggtaatctgattaaggtgccggataattatgatcctgcaacgcgtacctactccgggtcgtggtccggcggtttcaaaatggcttattcaaataaccctgcatggattttctatgatctggtgctggatgaaatctatggtatgggtacgcgcgttgacgcatccatggttgataagtgggaactgtattccatcgcccagtattgtgatgaaaaagtttcagacggagcagggggaaccgagccccgttttacctgcaacgtattcatccagaaccagcaggatgcttatcaggttctgcgcgatctggctgctgtgtttcgcgggatcaccttctggggtaatgaaaaagtttacgttcaggctgatgtcccgcaaactgatgttgactgggtttataacgcctccaatgtcattgatggcctgttcacttatgctggcgggtcttataagaaccgctacagctcctgtcttgtttcctggtccgatccgcagaatcactacagcgatacagtcgaaggcgtctacgattcagagcttgttgagcggtatgatgtgcggcagacaacgctgaccgcaattggctgcacttcacagagcgaagcacaccggcgcgggcgctgggttctgctttcaaacgcgaaggatggcacggtgtcgtttggcgtaggactcgacgggtacattccgttgcctgcggaaatcattggtgtggctgacccgttccgcgccggtaagcaaaatggtggtcgcatcagtgcggtgaatgatcgccaggtaacacttgatcgcgcaattgactatgcagtaaacgatcggctggttgttaacctgccagacggtaaagcacagacccggacaatcagtgccgtgagcgcggataaaaagacagtaacagttgccactgcattcagccagccgcctgctgctggtgctgtctgggcaattgacagcgataacctggctatccagtatttccgggtcacatcgatcgcagcaaatgacgacagcaacggtggtttcaccatcactgccgtacagcacgaccccaataaataccgttacattgacgatggtgtgcgcattgaatcgccgccggttacggtcactccgattaatgtactggaagccccgaaaaatatcgtgattaccgagagtgatcatgtgtctcaggggctgtctgttgcaagcttggatgtctcatggggcaaagtggatggcgccattcgatacatggcgcagtggcgtaaggataatggtgactggattaatgttccggtcaccagcgcacagggattctccgttcagggcatttatacaggcagttatgatgtgcgtgtgcgggcgctgaacgcgcaggaaacgtcctctccatggggttatgctgatacaacatacctttccggtaaagccggtaagccaggaacaccgactaacctgattgcatccgatgatgttgtctggaatatcgatctgacctgggccttcccggacggggccggggatacggcgtacactgagttgcagcgttcgacgaccgacgatctcgcaaatccagagttgctcacgctggttccttatcccgctgcgcgctatcagcatgggccaatgcctgccggtgtgcaccagtggtatcgtgcgcgtcttgtcgaccgaatcggtaacactggtgactggacggaatgggtcatggggacatcctccattgatgtcagcgacatagccaatgacattcttgaggacatgaaggaatcagacacgttcaaagacctgatcgagagtgccgtggacagcaatgaaaaaattgctggcatggctgatgacattcaacagcaggccgatgaactggagcggcaggcgacggagattcaggagaatgccgacgggctggcgcaggctgcggtgaaaatcgatgagatgtcggtatctatggacggtattaccggcggcgtcaaaaactcatccatcgccgttatacagaacagcattgcgcaggtaacaagcagacgttcacagacagtgacgaatgccggtaacagcgccagcattgatcgtgttgacacgacaattgccgatgccagccaggccgttgcccgcgctttgacgacactggattcatctgccgggggtaatgtatccaatgtgacagatctggccgaaacgctggcggatttttcgcaggcgtcagcaacgaagatcaactccctgactgtgacagttaacgggcagactgcggcaattaaccagactgctcaggcggtagctgatgtaaatggcaatcttagtgcgatgtataacattaaagttgctgttgattccaatggtcgccagtacgcagcgggaatggggatcggggttgaaaacacgccttccggcatgcagtcacaggtactgttccttgcagatcggtttgccgtaatgactcaggcaggcggaaatgtgacattgccttttgttattcagaatggtcaggtatttgtcaacgacgcctttattaaccatgcgttaatcaccctggcaaaaattggtgaactcagatcaattaattatgttgcaggtcagacgggaacgattatgaaatcagacggcactctggaggtgaatggtgcagtatctggacaagggaggttaagcattacgaatatcagaattgttcaatatgactctcaggggaggccattggcagttatgggggcacctttataa

SEQ ID NO: 76144 - DNA, 618 bp, Citrobacter koseri
atgctgaaaacactgattcttgacggcaggatggcgaagaaatttggcaaacggcatcagtatcacgtcgctgatcttcgcgaaatgctgagggcgatgtgttcacaggtgccgggatttaaaaagtacatgtcagaagcgcatatgaaggggattcgtttcgcctttttcaacgggaaaagcaatattgggctggaagagttcgatatgacgcggggcggcgatacctaccgcatcatgcccatcattgagggggcaaaaaatgccggggtgcttcagatagtcatcggtgccgtagcgctggttgctgctttttttaccgccggtgccagtcttgctgcgtggggggcggcaatgagtgcgggtgcaataaccgccacaacggtactgaccggcattggcgtttcaatgatgctgggtggcgtggttcagttactcaccccgcagccatcgtttaatactggtgcttcttccagtacggataataaacccaactatgcgtttggcgcgccggtcaatacggtggctatgggttatcccgttcctgttctctacggggagcgcgaaattggcggggccattatcagcgccggtatgtattcaggcgatcaacaataa

SEQ ID NO: 76145 - DNA, 738 bp, Citrobacter koseri
atgatgcgtgaaaaactgatggatgccatccggcagcatgtcgctgcggaatatccgaaagaagcctgcggggtgattattcagtctggtcgtacgcagacgtttattccctgtcgcaatatcgccgacaacccggaagaaatgtttacgctttctcctgaagacagaatggctgccggggagctgggcgacatcattatgattgttcactcacatcctgacgtggtgcaactggtgccgtcagaaatggaccgcattcagtgtgactggtccggtattgaatgggggatcatgtcgtggccggacggtgatttttgcacaatctctccgcgggaagagcgggattacgtcggacgtcagtgggtgctcggctatgcggactgctggtcgctgatccgggagtattatcagcgtgagtttactctctcgctgggggactactctgtgccgtacgcgtggtgggaaggtggaaaagaacacctgtacgacgataactggcagcaggagggttttgtcgaggttgagccccgtgatatgcgacccggcgatattatcatgatgcgcgttcaggcgccggtcactaaccacgctgcggtatatcttggcgacaacatcattctccatcatatgttcgggcatctgtcatcgcgtacgccatatggcaaatattaccgtgacagaacggtgcgggtggtaaggcataaggagcttgtgaatgctgaaaacactgattcttga

SEQ ID NO: 76146 - DNA, 738 bp, Citrobacter koseri
atgagctttaccagtgacatacaacagcttgagcccggcagtctcattcagcttattgagattgacgggactgattttggtatggacgaaatccttcgttttcatgctcacaatatccaggaagagggctgggcgtcgttcgctgctgataatctccctgtcatcatctggcagggtaagcaatatgacccgtatccgtatgagcttaaaggaatggagctttcgagtacgggatcgcagccgacacccacgctttcagtcggaaacgtcggaaactatgtgacagcactgtgccttgagtatgacgacatggttaaggcgaaagtgaagatccacaccacgctggcaaaataccttgatgcggctaactgggttaacggcaaccagaatgcgagcccggctgacgagcgggtacagcttttctatgtgaatgcgaaaacggcagaaacacgcgttcaggttgattttgaattgtgttcacctttcgacattcagagccttcagctacccaccaggcagatcactccggtctgcacctggtgtcttcgtggctggtatcgcagcgggactggttgtgactacaacgggacgaagtattttaccaaagatggtacaccaaccgacgacccgtcgaaagatgtctgcggcgggcggctgcgggattgtcaggatcggcatggtcatgatgcccctttgccgttcggcggctttccggcggctaacctgcaggggaaataa

SEQ ID NO: 76147 - DNA, 339 bp, Citrobacter koseri
gtgacagatacgtttaactggcgtacgcgcaaaacggctcaggggactgaaaatgtccgtacgcttcaggctcagttcggcgacggatataaacagatcgccgggatggggatcaatgataagtccgaaacatgggctcttgactggacgggtacgcgaagtgatgccgcggtgctgcgtgcgtttcttatgtcccacgtcacaacatctttctggtggacaaatccctggggagagaaaaagctctaccgggtgaaagctgattcattcagtgtttcgttcccttccgggaaaaaggcgacagtggcattcactttcgagcaggcgtttgcgccttaa

SEQ ID NO: 76148 - DNA, 2559 bp, Citrobacter koseri
atggcccagacggcagtgggggatctggttgttaatcttgacgttaactcgtcaagatttaacgagcagatcactcatattaaccggcagtttaaacgaacaggtgatgcggctaacgatacggagttacgtatccggcaggcgttctcacgtcaggaaattgcggcaaaaaaagctggtctttctgtggggcagtactcgaatgcgatgcgtatgctgcctgcacagtttacggatgtcgcgacgcagctggcgggcgggcagagtccgtggcttatccttctgcaacagggcgggcaggttaaggactcatttggcgggattattcctacgttccgtgcgttgctggggtccgtatcgcctttgatggttggtgtcggcgcgctgtccgctgctactggcgcacttttttacgcgtggtatcagggagcatccacactttcagatttcaataaaacacttgctctttccggtaattcggcagggcttaccgctgaccggatgctggtgctggcaaggaacggacagagcgccgggctgacgtttaaccagacgagcgaggcgctgacggaactgatcaacgcaggagtgcgcgccggggcgaatttcgatgatatgagtcagtccgttgcccggttcacccaggcatctggcgttcctgttgataaagtggcggcggcattcggcaaactgacaagtgacccgacgtccggcctcatcacgatggcgcagcagttccacaacgttacagcagagcagatcgcgtatgtcgcgcagttgcagcgtgccggggatgaagccgctgcgttgcaggcggcaaacgatgcggcaaccaacggtttcaatgagcagacaaaatccctgcgcgacaatatggggacaattgagtcggctgccgattcacttaagcgtgcttttaaatcgatgtgggacgcggcactggatatcgggcgcccggataccgcacaggagatggtccgtaaggcagaggctgcgtttaaacgcgcggatgagatctggaatctgcgaaaaaatgacggctacgttaatgatgaggcgcgcgcccggtactggactgacagggagacagcccggctggcgctggacatggcgcaacagcaggcgggcattgcaaaagcgaatgaggaaaatgcttcccgtgaagctgctgcggaatctgatcggcagaaatacgccgcgcaggcgcagtcaaattacgccagaacgcagtccgcgcttgagaagtacactgccaggcaaaacgagcttaataaggcgctgaaagaagggcgtatcctccaggctgactacaacatcaatatgtcagcagcgaaaaaggagtacgaagattccctgaaaaaaccgccaaaaacaccggcggtcagaacacagtccggagtgagggcaactgatacaggcaatgccctgacgcttgagttgcagtcgcaactgaagacccttcaggatcacaaaggcataaatgacacaatcagccagcagcggcaggatctctggaagcaacagtcacgtttttcagtgcttgaggaagcatcccgtcaacgcgccctcactgctgaggaaaaatccttgcttgcaagcaaagatgaagtactggcccgtgcagaaattaacgcacggcttggcgatcagattgttgcacagcagcgccttaatactcttgcagatcaggctgaaaaattttctcagcaacaggcggcacggcaggcagggatcgccgctcagtctcaggggctctctgcacgtcaggctgaacgtgaggtggcgttacaaaaactgcgggaggcatatggtacaaatccgcaggctctgcagcaggtgcttacagcgcaacaggctacttatgatgctgaagatgccctgcgttcagactggcttgccggggccaggcaaggctgggcagagtatcaggatgcggccacgaacgtcttttcctcagtgcagcagatatctcagtccacctttggcgggcttgcgaatcagctgacacaatggcagacctccgggaaagcaagtatgaaagaattcacgtcatcgacgctgaaaatgattgcatcagtcattaatcaactgatggtggcttatgtcattcagagtgctatgggctgggttggtggtggaacaaaagcccccgcgtcagggcagtcgttcgccgtaccttcctatcgtcccgcgacttttgatggcggcggctttaccgggcatggcggtaaatatgatcccgccggcattgtgcatcgtggtgaattcgtcttcaccaaggagtctaccagtcgtattggtgtcgccaacctttatcgtcttatgcgtgggtatgccacaggcgggctcgttggttccggtaatgtgccggttcctgcaccgggtggtatcagcgtttacgccccggtcagtatcagccagcagaacgctggtggagaggtcagtcaggccagtacggccggaacggcacgccagcttcagggaattatccagcaggccatcactgatcgcctgaaaaaggaggtgagtccgggtggattactttactccagggggtaa

SEQ ID NO: 76149 - DNA, 333 bp, Citrobacter koseri
atgaagctggcgcgtgagttcggtcgccccgactggcgctccatgctcgctggcatgtcctcaacggaatatggcgactggcatattttctaccgggacaatttttttcatgacgtacagcttgacgcccatttctcggggttgctctacaccatttcatcattattttcccttaatccggatttgactcctgacagcttcagcatactgacaccggctcccggcgatttgccggaggaagagccggatgatgacatgctgatggcaaaggcgtcaggaatgtcaggaggcgttcgctatggcccagacggcagtgggggatctggttgttaa

SEQ ID NO: 76150 - DNA, 414 bp, Citrobacter koseri
atgtttttaaaatccgacctgtacgagcgtaacggtaaaagcgtcacgctcttcgaattgtccgcactacagcgtattgaacacctcgaacacctgaaaaaaatcgaagcaattgaagaaggagatattcaggccgcgatgaccaccactgttcgtgagggggcgttcattgtggccatgtcgctgtggcatggccacggcctgaaagggacgctgccggagggggccgtgcgggaagtcgaacagattcaggaggaggtgcttgccacatggccgcttgaagccgttgcagaagcggaattccgtatcaggctcctgtccggcatgctgccacctcctgatgaaaccagcgatcctgatgcaggcgaagaacccggcccggtcacggcggaaaagccctcgccagcgagctga

SEQ ID NO: 76151 - DNA, 738 bp, Citrobacter koseri
atgccaacaccaaaccctctggaacctgtaaaaggtgccggaaccacgctctggatttataccggaacaggcgatccgttcgggagtccggcgtcagatgtggactggacgcgcctggcgaaaatcaaggatttgacgccaggcgaaatgacggctgagtcgtacgatgatacctatctcgacgatgaagacgccgactggagcgcgacggcgcagggcgaaaagactgcgggtgatacctctttcacactggcgtggaaaccgggtgaagaagggcagaaagacctggtctcctggttcaataatggcgctgttcgtgcctacaagatcaagtttccgaatggcacagtggatgtgtttaaaggctggtgcagtagcctcggcaaggccattccggcgaaagaagtgatcaccagaacggcgaagatcacgaataccgggaaaccgaatctggcggaagaggacaatacgccgccgattgcggttacgggtgtcaccctggataaaacaacggataccgttgcggtcagcgataccacagtactgactgtcgccgtggtgcctgccagcgcctcggacaaatccttccgcgtttccacgtccgatcctgctgtcgcaacggtcaccgtcagcggcaacacgattaccgtaactggtgtggccgcaggtagctgccagattatcgtcatgaccaatgatggtctttttgtcgctgtctgcgaaatcactgtttcgtga

SEQ ID NO: 76152 - DNA, 399 bp, Citrobacter koseri
atgaaacacacggatatacgcctggcgattattgaagctcttgaaaacaacttcggtgaggatgcgaccttttttgatggtcggccggtggtgtttgaagaagaggatttcccttctgttgcagtttatctcacggatgccgtatgcaccggggaagagctggataccgatacctggcaggccacgctccatatcgaagtctttcttccggctcaggttcctgactcagaacttgatgaatggatggagtcccggatctatccggttatggcggacatacctgcactcggtgatttgattaccgtcatggcaacggaagggtatgactaccagcgggacgacgatctggggctgtggagttccgccgacctgaaatattccattacttacgaaatgtga

SEQ ID NO: 76153 - DNA, 555 bp, Citrobacter koseri
atgtccataaaaggtcttgagcaggctattgccaacctgaacagcatcagtaagaccgctgttccgcgcgcatcgtcacaggcggtaaacagagtggcaaatcgggcaatcagccgtagtgtctcggtcgtgtcgaaagaaacgcgggttccccgcaagctggttaaagggcgcgcccgactgcgcagggcaacggtgaaaaagccacgagcccttattcgcgttaaccggggtaatcttccagccatcaaacttggcgttgccagcgttcgtttatcacggcgtaaacgggacaaaaaaggggcaaacagcgtgctccgggtcggccctttccgttttcccggagcattcattcagcaacttaaaaacgggcgctggcatgttatgcgcaggactgcgaaaccgcgctatccgattgaggttgtcagtatcccgctggcggcccccctgacaaccgcgtttaaaaatgagcttccgaagcttatggaatccgatatgcccaacgagttacgggcatcacttaaaaaccaactcaggttgatactgacacgatga

SEQ ID NO: 76154 - DNA, 354 bp, Citrobacter koseri
atgtctgatttcgacaatatctttgatgctgcgatctccggcgtcgataacaccatcctcgatgtgatgggaacggaagccagtatcacttccggcatcatggcggggagcaaaatgacaggcgttttcgacgatcctgaaaatattggttacgccggggcgggagtgcgcgtggaagggacttcaccgtcgctctttgtcaaatcagcgtccgtccgtcagttgcgtcgtatggacacgctgaccatcaacagcgaagcgttctgggttgatcgcatcagcccggatgactgcggaagttgttatgtctggctggggcggggttcacctccggcagctaaccggcggcgttaa

SEQ ID NO: 76155 - DNA, 393 bp, Citrobacter koseri
atgacgaaagacgaactgattgcgcgcctgaaaatgctgggcgctcagcttaatcgtgaggtcagcctggcagggtcgaaagaagatctggcattacgggttgcggaactggaagaagagctggatgacgacgacatcaccgtggacgaagacggcggttctgatattgctgaggctccgttggctgaaacggaacaggccagcggcagccagggattcgaaacgggcgggctggtggcggtaaaaacgctggcgaccttgcacattgaagcgctggacgcggtgaaagatgtgccggtgggaattgttaaacccggcgttgttattcgagtgacagcagaagaagcccgggagctgagtgcatcgaagctggttgctctgaccttctcttag

SEQ ID NO: 76156 - DNA, 1026 bp, Citrobacter koseri
atgtcaatgtataccactgcccagttgctggcggtcaacgagaagaaattcaaattcgacccgctgttcctgcgtctctttttccgcgaaagttacccgttcacgactgaaaaggtgtatctctcgcagatccccggtctggtgaatatggcgctgtatgtctcccccgtcgtggccggacaggtcatccgtacccgcggcggttcaacctctgaatttacgccgggctacgtgaagccgaagcatgaagttaacccgcagatgaccctgcgccgcctgcctgatgaagatccgcagaatcttgcagatcctgactaccgtcgccgccgtatcattctgcagaacatgaaggatgaagagctggcaatcgcgcaggtcgaagaaaagcaggccgttgcggcggtgcttggcgggaagtacaccatgaccggcgaggcgtttgagcctgtcgaggtggacatgggacgcagtgccggaaacaacatcattcaggcgggggccgcagcatggtcttcccgcgacaaggagacgtatgacccgactgacgatattgagtcgtacgcacttaatgccagcggtgcggtaaatatcatcgtgttcgatccaaaagggtgggctcttttccgctcctttaaggcggtaaaagagaaactggatacccgccgcggttctaactctgaactggaaaccgctctgaaagatctgggtaaagccgtttcgtataaagggatgtatggcgatgtggcgatcgttgtttactccggccagttcgttgaagacgacgccaaaaagaactacctgccggatctgacgatggtgctgggcaatacacaggcccgcggtctgcgtacttacggctgcattcaggatgtcgatgcccagcgagaggggattaacgcatctgcccgttatccaaaaaactgggtacagacgggcgacccggcgcgtgagttcaccatgatccagtccgccccgctgatgctgctggcggacccggatgaattcgtgtcggtacagctggcgtaa

SEQ ID NO: 76157 - DNA, 333 bp, Citrobacter koseri
atggctaataccgaagaattcaaacactaccagccactcggaaacagcgacccggcacatacggccagcgggcctggtgaactgaccgaagcgactccggcaatgacaccgctgatgctcgatgccacttccggcaaactgaccgtctggaacggaacgaacgccggagaggcaacgggcattctggcaatttctgccgatcagagcagtgaagaattgactttctataaaaccggcaccttccgttatgaagatgtgctctggccagaagatgtcactgatgaaagcaaaaaacgtaatgctttcgcaggcacggcgatcagtattgtttaa

SEQ ID NO: 76158 - DNA, 1329 bp, Citrobacter koseri
atgacgcccgagctgcgtaatctcccgcatattgccagcatggcttttaatgaaccgctgatgcttgagcccgcctatgcgcgggttttcttttgtgcgctggcgggccagctgggcatcacccggctgacagacaccatttccggcgtcagcctgggggctgcacagatggccgaaccactggccctgtttggtgatgaagaacaggagccgcgtcaggcacgaagttaccaggtaaccaacggtatcgctgttcttccggtatccggcacgctggtcggcaaaacccgttccctgcagccgtattctggcatgaccgggtataacggtattgtggcccgcctgcagcaggccatcagcgatccgggtgtggacggtattctgctggatatggatacgccgggcggcatggtggcaggggcatttgactgtgcagacattattgcccgcgcccgcgaaatcaagcctgtctgggcgctggcgaacgacatgaactgtagcgccggtcagctgattgcgagcgcagcaacacgcaggctggttacgcagaccgcccgcaccggctccattggtgtgatgatggcgcacagcaactacgggacggcgctcaagacacagggcgtcgaagtcacgcttatttacagtggcgatcacaaggttgatggcaacccttacgggaaacttccgcccggtgtccgcgctgattttcaggcccgaattgatgcgacccggcagatgtttgccgacaaggttgccctgtatacgggcatgtctgtccaggcggtgctggataccgaagctgccgtattctcgggccaggagtccattgaacacgggctggccgatgaacttgtcaataataccgacgcgctcagtgtgatgcgcgatgcacttgataaacgcaaaaaaattaccctcggaggaaatatggaaggtactactgcatccgcagcaaccactcaacccgcggaaggcgcatctgctgaagccatcaaggcagataaggctccggtgactgttgcagccgccgcaccggcatctgatgtgagcgaacagatttctgccgcaattgccgcagaaaacgggcgcatcatgggcattctcaactgcgaagaggcaaccgggcgcgaagcgcaggcacgcgcactggccgaaacgccggggatgaccgttgacagcgcccgccgcattctcgccgcggcgccgcagaacgcacaggttcgcacggaaaccgaacttgatcgcctgatggagacttccccgggcgcactggcagcaggcactccggcatctgatgccgtcaatgacttgatgaacacacctgtataa

SEQ ID NO: 76159 - DNA, 1593 bp, Citrobacter koseri
atgaaaacaccagctttattagggccggatggcaaaaccgcgctgcgggaatatgccggatatcacggcggtgctggtggctttggcggccagttgcgcgcctggaatccccccagcgaaagtgcagatgctgctctgctgcctaacttttcccgcggaaatgcgcgcgctgatgatctggtgagaaacaatggctatgcggcaaacgccatccagcttcaccaggatcatattgtcggctcgtttttccgtctgagtcaccgaccgagctggcgtttcctggggattggtgaagcggaggcccgcgcgttctcccgtgaggtggaagccgcatggaaagagttcgcggaagacgactgctgttgtattgatgtggagcgtaagcgcacgtttaccatgatgatcagggaaggcgtggcgatgcatgcgtttaacggagagttgtgcgcgcaggcaacatgggacagcagcgcatcgcggcttttccgcacccagttcaagatggtcagcccgaagcgcatcagcaacccgaataatgctggcgattcccgtaactgccgcgctggcgtgaagacagataacggtggtgcggcactgggatactacgtcagtgaggacggttatcctggctggatgccgcaaaagtggacctatataccgcgtgaactgcccggcggtcgcccctcgtttattcacgtttttgaaccgatggaggacggacagacccgcggcgccaatgtgttttacagcgtaatggagcagatgaaaatgctcgatacgctacagaacacacaattgcagagtgcgatcgtcaaagccatgtatgcggctaccattgagagcgagctggatacgcagactgcgatggactttattctcggttcggacaaccaggatcagcagaacaagctgaccggctggattggggaaatagcctcgtattattctgcggcgccggtgcgtctcggcggctcaagggttccgcatctgatgcccggtgattcgctgaacctccagtcagcgcaggacacagataacggttactcgacgtttgaacagtcgttgttgcgctatatagcagcagggcttggtgtgtcgtatgagcagctttcgcgcaactattcccagatgagttactccactgcgcgggccagcgccaacgaatcgtgggcctttttcatgggacgccgcaaattcgtggcttcccgccaggcctgccagatgtttatttgctggctggaagaggcgattgtccggcgggttgtgacgctcccgtcccgggcgcggttcagtttccaggaagccagaagcgcatgggggaactgtgactggatcggctctggccggatggcgattgacgggctgaaggaagtgcaggaagcggtcatgctgattgaggctggcctgagcacatacgaaaaagagtgtgcgaaacgtggtgaggattaccaggaaatctttgcgcagcaggtacgtgaaacaatggagcgccgcgccgccggacttaaaccgcctgcatgggctgccgcagcgtttgaatcagggctgaggaaatcaacagaggaggagaaagatgacgcccgagctgcgtaa

SEQ ID NO: 76160 - DNA, 207 bp, Citrobacter koseri
atggcgacacaggccgaactggatgccgcccgcgctgcgttgcatgaccttatgacaggtaagcgggtggcgacggtgcaaaaagacggtcgcagggtggagtttacggccacctctgtcagcgacctgaaaaaatatattgccgagcttgaatcacaggtcggcaccattcaacggcgccggggaccggcagggttttacgtatga

SEQ ID NO: 76161 - DNA, 1923 bp, Citrobacter koseri
gtgaatatatcgaacagtcaggttaaggggctgcagcactctgcgcgcgcggggcttcgctcgctgtaccggccggcgccgcagacagcggttgagtgggcagataatcattattatcttcctaaagagtctgcctaccaggaaggccgctggcaaaccttgcccttccagcgcgcgataatgaatgcgatgggaaacgactatatccgcgaggtgaatgtcgttaaatccgcccgtgtcggctattcgaaaatgttgctcggtgtctatgcatacttcattgagcataagcagcgaaactcccttatctggctgccaactgacggcgatgctgagaacttcatgaagtctcacgtcgagccaacgattcgcgatattccttcattactggcgctggcgccgtggtatggcaagaagcatcgggataacaccctcagcatgaagcgcttttctaacgggcgcgggttctggtgcctgggggggaaagcggctaaaaactaccgtgaaaaatcggtggatattgccggttatgacgagctggcggcgtttgatgaggatattgagaaagaggggtcaccaacattcctcggtgataaacgtatcgaaggttccgtctggcccaaatcaatacgtggctccacgccaaaagtaaaagggacctgccagatcgagcgcgcggccaaagagtccgagcatttcatgcgttttcatgttgcctgtccgcattgcggtgaggagcaatatcttaaatttggcgataaggaaacgcctttcgggttcaagtggacgccgggtgaaccttccagcgtgttttatctttgcgagcataacggctgcgttatcagacaacaggaactggatttcaccgatgcccggtacatctgcgacacgacggggatctggacgcgtgatggtttgtcctggttttcatcaagcggcaccgaaatcgacccgccggacagcgtgacgtttcatatctggaccgcctacagcccgttcaccacatgggtgcagatcgtcaaggactggatcaaaacgaaaggggataccggaaagcgtaaaaccttcgtgaacactacgctgggcgaaacatgggagccgaaaatcggtgaacggcctgatgccgatgtgatggctgagcgcaaggaacactttgatgcttcagtgccggagcgggttgcttatctgaccgccgggattgactcccagcttgaccgctatgaaatgcgcgtctggggatggggaccgggtgaagagagctggcttatcgacagacaaatcatcatgggccgccatgatgatgaggcgacgcttctcagggtggatgaggcaatcaacaagacctataaccggcggaacggcgttgaaatgtcgatttcccgtatctgctgggacatcggtggcattgatcccacgattgtctataaacgctcgaaaaagcatggtctgttccgtgtgatcccgattaaaggtgcttcggtttacggcaagccggtggcgaatatgccgcgcaagcgcaacaagaacggtgtgtatctgacggaagtgggtactgataccgcgaaagagcagatttacaaccgtttcacactggttgcagaaggcgatgacccgttacctggtgcagtccactttcccaataacccggagatttacgatctgagtgaggcgcagcagctgaccgccgaagaacaggtcgaaaaatgggtggatggccgcaggaaaattgtctgggacagcaaaaaacgccgtaatgaggcgctggattgctttgtttatgcacttgcggcactgcggataagtatctcgcgctggcagctcaatcttgattctcttcttgccagcctgctggaggaagaggactcccgtaaaaataacaaaaccctggcggattacgcccgggcactagccggagaagaataa

SEQ ID NO: 76162 - DNA, 546 bp, Citrobacter koseri
atggaggtcagcaaaaagcagctttctgagatttttggtgtcagcgtgcgcaccatccagaactggcaggatcagggaatgccggttgcgcgtggcggcggaaaggggaatgaagttttgtacgattctgccgctgctatcgagtggtattccgagcgcgacgcggccattgagaatgaaaaattacggaaggaggtggaggagctacgcattgcatcagaatccgatctccagcctggtacgattgaatacgagcgtcaccggcttacccgggcacaggctgacgcccaggaactgaaaaatgctaaagagtccgctgaagtggtggagaccgcattctgcacgttcgtgctgtcgcggatagccggggaaatagccagtattctcgatgggattcctctgtcggttcagcggcgtttcccggagctggaaaaccgacacattgatttcctgaagaaggatgtcatcaaagccatgaacaaagcagctgcgctggatgaaataataccggggttgctgagtgaatatatcgaacagtcaggttaa

SEQ ID NO: 76163 - DNA, 510 bp, Citrobacter koseri
atgaaaagaaaatttaatcttgatgttgagattgatgcagaccatccacatgcggcaatcgctgaattgcagtctgtggtagctcagttgctaagaataaactttcccgtttctgcgtcagttagcctcgaacattgcgttggtagcgcatccattgagctggttgctgaacataaagcaaagccccctcaatgtggcgatcacgtaccgtttagcgttaatgggggctctgtgtttatcaaggacgcttttgttaagccagcaagcttcagtgcatcaatgtctcttggagtggagcggggcgagaagacaatccgcgataaagtgcgcgatatcgttgccccctacatgactggcgaagcaactgaatttaccgatgagctggtggatgaagtgatgaacctctttgataagccagagaccagacggttgattgatagttgtatcacggagtcaatcaggctgcactgccgtccgggtgggctcatctggcagacgttacgcagatag

SEQ ID NO: 76164 - DNA, 210 bp, Citrobacter koseri
atgtttgttgcagaaggcttaaagcctgaccttgataatgagggatgggttaaggggtggggagttgttcgtaattctccctggcatttagttggtgtttatgccaccaaagacgttgctgaaactaaagcagtttcactcggtgcggattatgaagctcactacggatcacaccgacttgatagtgatgatttcgtctacggcatgtaa

SEQ ID NO: 76165 - DNA, 246 bp, Citrobacter koseri
atgaaaaagctaaaagttacaattgctcatcttgaagagcattgcgatggcattgttcgcggcacacaagttacctatcaaatcatccaggatgggcgtgtattagtcgaggacacattatccggtaaagcgagccacccattttctaaaacgtatgatgttaatgccagtgatgcagttatctctgtaacgcatgatcgccacgacttgagctggttaacgattgcagcagagtttgttgaataa

SEQ ID NO: 76166 - DNA, 231 bp, Citrobacter koseri
gtgaacgcagagaacctaagtgaagcgtattacatcaataacgagataaaagagctacagcggcagaaaagcattctggagagaggtgcagggcttggggtaacaatccaatctacctatcaggataatgcctttttggatgctatacgcccgcatgctgtggctgagcttgaccgtcgtattgaggaaaagagagtcgtactggttaatttaggtgtctccttctcttaa

SEQ ID NO: 76167 - DNA, 243 bp, Citrobacter koseri
atgtacagcagactgttaatcatcttcctgatgacgatgttgaccgcgagttgcgtgagaactttacccgcaaaacatgaagtaacggacacggcctgtgactgggtgaatatcatctatctcaccgatcacgacatcgatgtgctggataagcagaccaagaaagacatcctgacgcataacaaatcagtgcaggctaactgcaagaaggagtctgctcgtgaacgcagagaacctaagtga

SEQ ID NO: 76168 - DNA, 630 bp, Citrobacter koseri
atgaatcaacaacaatttcagcaggcggctggtataagcgccgaattagctgcgcgctggtttccgcacatcgatgcggcaatgaaagaattcggcatcactgcgccgctcgatcaggcgatgttcatcgcgcagatggggcatgagtccggcgggtatgaaaaactggtggaaagcctgaactatgcagccgatcgtcttgttcccgtattcggcaaacgtcgtattactgagcagcaggccgccgcgctcggcagaacggcaacgcaaccggctaatcagaaagcgattgctaacctggtttacggcggcgagtggggcaaaaagaacctgggcaatcaggttgccggtgacgggtggaaatatcgcgggcgcgggctgaagcaaatcacagggttaagcaactatcgcaaatgcggcatggcgctaaaactggatctggtcacacagccggaattgctggaacaggacgaaaatgcagcgcgttccgcagcgtggttctttgccaccagcggatgccttgtgtattccggcgatgtggaacgtatcacgatcatcatcaacggtgggcagaacggcattaaagaccgccgtgaacgttacgccaaagcaaaatccgcactggtgtga

SEQ ID NO: 76169 - DNA, 279 bp, Citrobacter koseri
atgttaaatgatccatcagcattcattaatgcaattatctgtgcggtgattgtcattgtactgatgttctaccagcgccggggagcacgtcaccggccattcatttcgtttctggcgtatctgaccgtactagtttacgccgccattcctttgaagttcattttcggcctgtataacgattcaaactggctggttgtgctggtgaatgttctcatctgtgccgctgtgctatgggcgcggggaaacgtggcacgtttaatcaacattcttcagaaataa

SEQ ID NO: 76170 - DNA, 393 bp, Citrobacter koseri
atgtccgatcctgtaactggttccggcgcgatgctcggaggtgggctggtgggttcagtaatttacggaatcttcactcataccgattttggcgttgtgtttggtgcgtttggtggcgcggttttctacgtcgcaacggctgcaaatcttacccgtggtcgtctggctgcatactttatgacatcgttcattgttggtgtgcttggggccggattattaggctcaaaactctcagcatggacaggctacagtgatcgcccgcttgatgcgctcggcgccgtgattgtatctgccatcactattaaggtgctgacattcatcaacagtcaggatttgaacagtctgttcggtatgctttcgcggcttcgcggaggagggggaaatgttaaatga

SEQ ID NO: 76171 - DNA, 597 bp, Citrobacter koseri
atgacaggtaaagagacagtcgaaacaatcataaccgacatcaaaaatgccaagggtgatggcatcaatcagatagatgtaaataatcttttaaaatatctcgaaggctttataaccaatgaaggttatagccatgactttcaattagaaacacttaaggcaagccatcagataaacgttgaggcatttaaagcaaatactattgttcagatagaatcattcaaatctgtaataacagtaggagcgaatgcagctagggcgatcctcattatcaacggtggtgctgccattgctttacttgcctttctggggaacatttgggagaaaacatcagagccaaatgcagttgccagtattgcaatcgctttactcatcttctgtggaggggtgcttgcatcaggtttttgctctggatttacatatgtcgcgcagttctgctacgggaaaactcctttagagcatgatacatcatgggaaaagtggggaaatataacaaacttagccgcagtattttgcggtatcgcgtctctatcctgctttgcctgtggaacatacatagcattcatctcaatgggagagcaatttttcccaagttga

SEQ ID NO: 76172 - DNA, 810 bp, Citrobacter koseri
atgaatcttgaatcattgccgaagttttattcccctaagtcacctaagctgaatgaccagactccgtccaccagcagcgagacgttgaccattactgatgtaatggcggcgcagggtatggtgcagtcaatggccccgctgggctttaatctgtttcttgcaaagatgggcatacaggctccggcaccggcgctggacggtctcctgaattacgcactggctttaaataatccggtgctgaaaaaactcagtgaaaaggcgcggaacgaaatactgcctgtgcttgtgcagtttgcatatgctgattattcccgttcggcggccagtaaatcgatatgtccgcactgcaaaggatctggtttcatagaaacagaggtatcaaccaaaaaggtgcaataccctgatggtaagccaccaaaatgggctgcatcgactaaaggtctttgcccgtcatactgggaagagtggaaggatgttgccggggtggaaaaagtaaaatgcctccattgcgatggtaaaggcctggtgagtacagcctgcagggggtgcaagggtaaggggactgtactcgatgagaagcgcaccagacttcatggtgtgccagtgatgaaagtatgcggtcgttgcaatggcaatcgttacagcagactgccgacaacacttgctcgtgcgcagatacagcggattgttcctgatattactgattatcagtggtacagcggctacgctgacgtgatcaacatgctggttacgaagtgctggcaggaggaagcctatgcagaggttcagttacagaaagtgacacgttag

SEQ ID NO: 76173 - DNA, 996 bp, Citrobacter koseri
gtgagggctttgttaactcctgaaatcgctcatcgtatgggggttgtgttgttccgtcccggtgcggaactgatgcatctcttcatgcgtggtcgcgtactgcttgagcctgaaccagaagaaatggcgtcattgagtaccggggctgttcccgcagccattcagccgctggctgatgatccggtaatgcggcaggtgttcgagaatgaacgggttattcagcgtgccggtgggcttccttcccttgagcaatggttgagtactcggtttgaatgccagtggccacattcatcgtggcacgacaagaacttcacaacaatgcggcacccaccagggtgcattcgcctgtgctggcattgtgatcacactttgtccgggcagcataccgaacagcttgcaggtatagcgtcaggaaacctggtatcctggattctggaagtcattcgccgtgattctggttttcccgagtcgcatatcctgacgctaccggaactgtgctggtggatggtcaggaatgatctggctgatgttataccggaaagcgtcgcgcacaaggggttacggcttccagatgagaagatccgctcagtcatgagggaaagcgacattgtgccttccgcttcagcagccagcctcgtgcaggagaaggcgaagaagattctcacgctctctgttgatccagagtcgccagaatctttcatgctcaggccaaaacgtcgccgctgggtaaatgagacgtacacccgctgggttaaaacacaaccctgtgagtgttgccgacggccagcagatgatccgcaccatatcgtagggcacggtatgggggggacagcaacaaaagcccatgacctcttcgtgatccctctgtgcagagagtgccacgacgagttacacgccgatgtaccggcattcgagcagaagcatggtacgcagcttgagctgctactgcgttttatggatcgggcgctggcgatcggcgtaattgttaaagcataa

SEQ ID NO: 76174 - DNA, 687 bp, Citrobacter koseri
atgagccagttaatcgtgaatggtgttgtaacaatgtccagccgtgatattgcggatctggttcagagtaaacacagtgacgtgaaacgttcggctgagcgtcttgttgctgcgggaattttaaccgcgccgttggcgcagttcgattttgagcataacggtaatgtgtaccaggagtatcgttttaacaaacgcgaatctctggtgattgttgccagactttcacctgaatttaccgccgcggttgtcgatcgctggcaggaactggaagaagggcagagtgtcagtgttccccgctcattgccggaagcgcttcgcctggctgctgatttagccgagcagaaagagcaactgacaatccagctggcagccgcagcgccaaaagtggaatttgttgatcgttattgctctgcaaaaggttccatgtcattccggcaggtagccaaattgctcaacgcaaaagaaactgagttccgcctgttccttattgaacgcaatatcctgtatcgcctcggcggcacacttacccctatggcgcagcacatttccgcgggaagatttgaagttaagacgggaacatcgagtgcatctaatcacgcattcagccagacgcgtttcactgccaagggggtacgctggattggtggtttgtgggctgaacatattgcaggggggcaggcggcgtga

SEQ ID NO: 76175 - DNA, 336 bp, Citrobacter koseri
atgacgacaaataaatattgccaggtgctggcagaactgcgcaaccgcagagcgcattatctgaaagatgttggcgatcaatggcgatctccagatttacttgtctggggtatcaatgccatgttcggtccgctggtgctggatctgtttgcagacgatgacaataccaagtgcccggcatggtacacagccgaagataacgcgctgacgcatgcgggggtctgggaagacgacagccaggttaaacgcatgctggtggaatgggggcccgttgtgccgaaaggtcgggtagagataacaatcagcagatatgaaccggcgggtgcagccgcctga

SEQ ID NO: 76176 - DNA, 993 bp, Citrobacter koseri
gtgagcacattgattcagcttcttgaccgtccgatcgcatataacccggcatttgcaaagttaaaagcagggaaagtaaaggctggcccggttgcggcagtattcctttcccagcttgtttactggcataaccgaatggatggcggatggatgtataaaacccaggccgatatctcatcagagacggcgctgacgcgtgacgagcaggaaacagcgcgtaaacgcctggtggcacttggcgtgctggaagaagaccgccggggcgtacctgcaacaatgcactaccgcatcaataccgaacggcttgaagcgcttcttctggagacggcgaagccagtgaagaaggccagccaggataaaaccagattgcggaacctccagaatgtggaaaccccgcaatctggattggtgcagtcccgcaaactggattgcggtgatgccgcaaacaagaatgcggaagttctacaaacaagttcggggcaacccaccgaacaagcctgcggtgatcccacaaactttcatacaggagattacacagagaatactcaggagactacacaggagaataacccctcttgtccggttcctgtggaacccgaccctgaagtgacgattaccgatcaggccatcgaggttttaacccacctgaaccgggtaagcggctcccgtttccagaaatcaaaaacctctctcgaaaatattcgtgggcggctgcgcgacgggtacagcgtcagtgatttgaagctggtcatcgatctgaaacatgagcactggcatgacaacgacgagcaataccagtacatgcgccccgaaaccctgtttgggccgaagaagttcgagggttatctgcaaagcgccacacgctgggaaagccggggcaggccaccacgcgatgaatgggggaaaaagcagccagtaactacggcgcttgcccgttcaagtttccagggggttgattattcattgccagaaaattcggggtttcgccaatga

SEQ ID NO: 76177 - DNA, 180 bp, Citrobacter koseri
atggaagagaatattcagccacttaaccagtattaccaggatcaccacggaatcattgtccatgttaccgggtacgatcacgatcgccagcgcgttatttaccgtcgcgccggttatgagtgggagtgcgccgcgccaaaaattatttttcgtgccagattcaagaggatagacaagtga

SEQ ID NO: 76178 - DNA, 714 bp, Citrobacter koseri
atggttcagcaaataaacggggttaatgttccggcaccagcacctttgctggttaacggtcgcgtaacgatgagcagtcgagaaatttctacgctgactggcaagcaacacggtcatgtttgccgggacatcgaaacaatgctggagcagcttggggaacgctctgaagggtatatccatatttggacacacccacagaatggtcagcaatacagagagtttcgccttgatcgtgagcataccgaatgcttaatcaccggatacagtgcagtgctgcggatgaaaattatccgtcgtctgagagagttagaagaggggcatacgccgctgccgcagaccctaccggaagcacttcgcctggctgctgatatggcagagcagaatgcggcgctggtaagcaaggtgcaacaggacgcgccaaaagtggcattcgtagaacagtatgtagaggccagtggtgcgaaaagcctgcgggagaccgcgaagatcctcaatatgcctgaaaaggcgatgattgatgctctggtgcgcgacaaagtccttttccgacagtccggcaatctgcttccacacgcactgcgccagcgtgatggcctgttcactgtaaaaaccggttcatctgagtttggtcatgcctatacgcagacccgagtaacgccccgcggcgtccagtggatagctgatcgctacgcttcagaactgatgagaggctga

SEQ ID NO: 76179 - DNA, 615 bp, Citrobacter koseri
atgttttccaaaagtctacagatccagcagcttaatcataaccacagaatcaaggggttaaccgtgggtaacgaacctatttggaaagttgaacgtcagccaggctggctggtggtagcgattaaaaaaacgattaccgatctgcctggtggatatgctgaggcggcggaatggttgggggtaacagagaatgcgctgtttaaccgccttcgtgtggatggggatcagatcttccctatgggatgggcaatggtactacagaaagcagccggtgttagctacatagctgatgcgttttctcgccaaacagataacgggatccatatcccgggtgcggcaccagaaacagagaacgaagagattggcttaaagctggctgagctggtgggcaggcttggtgacctggttaacgcatatcgtcgatacatcgatgatggtgtggttgataaaggggagtgggacagtctgaacgaaatcgcctaccagttccgggtaacgcttatgacgtttctgaacctgatttcacgagtttattgccttccagaaaagagtgacgcccgcgagtgtgcagctccgggcgccttggcgaacaactcttcgagtatggagaaataa

SEQ ID NO: 76180 - DNA, 243 bp, Citrobacter koseri
atgacacctgagcagttagccctttcagaggcaattgaaactgctggtggccagtctgagttggcccggaaacttactgcaagttccgggaaggaagttaaacaacaacaggtatggaactggctcaacagagaaaaaaggccgccaataaagcaatctcagcacattgagagcgttactggcatcccaaaagaaagactgcgtcctgatgttttccaaaagtctacagatccagcagcttaa

SEQ ID NO: 76181 - DNA, 687 bp, Citrobacter koseri
gtgaatacacttgcggaacgactaaaaatagccagagaaaagaaaggcatgagccaggctcagttagctgagctaataggcctgtctcaacaatctgtggcgaaaattgaaaatggagatacgcttcaacctagaaagatcaaagatatagcgaaggctttagacgtctcccaaaaatggctacagctcggaattgaggagaatggctctatttctgattttgtagttgaggaacttgaagaagccaaacttgatcctgaagtatttgccaacatccccgttctcgacgttgagctttctgctggcaatggatgcgaagccgaaattgtggaatcagttgttgattcgttccctcttcgtcgtttcgatcttagaaaagctggggtcagtcctgctaacgcaagaatcgtaaagatttggggcaacagccttttgccagtattgaataatggggatcatgtcgcgattgacatgtcacagtcgaaacctatcagagatggtgatttatacgctgttagagatggggtcttacttcgagttaaagtgcttatcaatcaatcagatggtggtttgatactacggagtttcaacaaagaagagtacccggatgaagtgctcaactttgatgaaagaagagccagaatacacgttattggtcgcgtattctggtcttcacgttcatggtag

SEQ ID NO: 76182 - DNA, 882 bp, Citrobacter koseri
atggaagacaagctctacgtttttaactacacacaaaatagaaataagctttttgccaatttaatcagcatcatcgatgggattcttgccgatggacatgtacgggacgaagaggtgctatatcttgatacttggctacttgaagccaaccaaaccattagaaatggtgttatcaagagtctaagcactagggtctctaaaatactggccgatggtgttgtttctgatgatgaacgtagtgagttaaaacgacatcttaatgatatacaaagaaaaatacttgatatacccgatgtggatttattctccagtgagtcagatctgcatctgttgaatggtctttgcaagggtttaatatcagatcgaaccttaagtgaagaagaagtgagataccttgactggtggttaacgcagaacggggcgctaaaaagtaattacccaggaaaggagctatacgctttagtaaaagagattctgagcgatgggatcatcaccactgaagaaagtgaaaatctacacaaggcgctggtggattttactggttgtgaccttgcaagcggcgtcgtagatgggctttctactaaattaccattagacaatactgctgaagtttctgttgaaaataaaacattttgcttaacgggcgtttttttggcaggaaagagagcccatgtggaagacctaattaaaaggaataatggactgatttccagcggaatcacaaagaaaatcgattttctcgtaattggtacactttcctcgcgtgactggaagttctccagtcacggaaggaaaatagaaaaagcagtctcatatagagatgatgaaggggctaagttaaaaatcatttcagaagaaatgctttttgacgctctaccatga

SEQ ID NO: 76183 - DNA, 372 bp, Citrobacter koseri
atgagtaatgaccgcatgaccgtagtgcccgactttttgggcgagctggatgccggcgtgttcatgaacaaaatcgcggcagcacttaacaccaccgcgcttggcgttctgaacaacggcaacaaaggcaaagtagtcctcacctttgattttgagcgcatggggaattccgttgaagagaagctcgtcaagatcaagcacaagctgaactacagcaccccgacaccgcgcggtaaagcctcagaagaggacacaaccgaaacacctatgtgggttaacaaaggcgggaagctaaccatcctccaggaagatcaggggcaactgttcgggatcaccggcgcggtggacggaaagcttaaagcggctcagtga

SEQ ID NO: 76184 - DNA, 828 bp, Citrobacter koseri
atgtctcaattagacggcaacgctattcaggaagttcaaaagctggcaatcgctggcctgtcaatcggcaacattgatgccactgaatgcccgacagctttggttcctgaaaacgcacagattgaaagcctggaacgctttaattcccaacgtttccgttttcgtggcgccatgactacaaccagcattgatgactttgtccgttactctatgggttacgcttccgccgacgcaccagcacgttgtttcattgacgccgacaacatgtcagcgcgctccgtattcaatatcggcacgctggataaaccgggacatgctgacaatgttgcagggatcagcctgaaaaaaactgcgccattccgtgcgctgctgcaaatcaatggtgaacgactgagccagaagcaaatcgccgagtggctggaagactggagcgatacccttactgcctttgatgctgacggtaacgtgttgtccatttcccatgccgctggcgccgttcgccgcgtcaatatcaagcatgtgcaggaatctgaccacgaagatgaagatttcagcggtaaaaaatcgctcatgcagagcgtggaagccagcagcaaagacgttatgcctgtcgctttcgagtttaaatgcgtcccgtatgaaggactgggtgagcgccgattcagcctgcgtaacagcctactgaaaagcggtgaaccttgcttcgtcctccgtatcgtacaactggaagcccaggaagaagcgatcgcaaacgaattccgcgatctgctgattggcaagtttgacggtaagccggtcgaaacctttatcggtaaattcagcgcgtaa

SEQ ID NO: 76185 - DNA, 540 bp, Citrobacter koseri
atgagctacattcagacattatccggcaaacactttaattacctcgatatccaacaggacgatatcgtcatcgaggatattgctaccgcgctgtctcatatctgccgttttgctgggcatcttcctgagttttacagcgtcggccagcatagcgttttaaccagccacctcgttccgcaggagtttgccttagaagcactgcttcatgatgccgccgaagcctacctgcaggatattccctcaccgcttaagcgcctgttaccggattaccaggtgatcgaagctcgcgtagacgctgctattcgccagaaatttggcctaccaacggagcaacacccaacagtgaaatatgccgatctggtgatgctcgccagcgaacgccgcgattttgagattaacgaaggttccgtgtggccatgcctcgatggcgttgtcccgacggacctattcatcatcaatccagttcgtccaggccagtcatacggcatgttcatcaatcgctttaacgagttgatggagcagcgtcaatgcgccgcatga

SEQ ID NO: 76186 - DNA, 177 bp, Citrobacter koseri
atgcgccgcatgagggtaaaagaactcgtagcggaggcttttgcctccgttgctgaattgccaccaaagcacgcagcgctaatgcgcgaagtcgccaccagactggaagctacgttcgcagcattaacagaatcattagcgaaactggaacaggaacgtaaaggtaaaacgcaatga

SEQ ID NO: 76187 - DNA, 255 bp, Citrobacter koseri
atgaccgtatttgaatatctccaggcccacccgaacgccaccagcggtgaaatcgcaagatcgatgggtaaaaagacgccagccgtagccagcgcgctatctcagctttatgcaacagggagaattgttaagtctggcgcacgcggtgggataccgacataccgcgtcaatgatctgccgtttggatgcagcaataacttaacgctgatatttaaccagcttctgcgaaacgtccgcaaaggagcagcccaatga

SEQ ID NO: 76188 - DNA, 492 bp, Citrobacter koseri
atgagcactggtattgaactcatgcagcacgcgctgggtatcaacgagcgcaacaggacgccgtaccgcaactatttccttgctggcgatggtcatacggacaactcgaagtggcaagcacttgttgctgatggctgtgccacttctcgtcctgcgccggatttcgttggcggtggtgttctctatcacgtcacagataaaggcgaagagttggcgattgctgcgttgcctgagccaaagaaaaagacacgatacgaagattacctggatgcagatagctgcctgtcattcagtgaatggttgttgggctaccagcttccagaagtcgaatataaccatcatgggaaatgccggatgtaccgctgctcatacgatgcggcatatggatatccacgtcgtgatgttgaaggcgaatggtgcgacaccaaaaaatcggcaaaggccagttacaaagaggcgctgcggaaatcaaaacaggaagccgcccaatga

SEQ ID NO: 76189 - DNA, 153 bp, Citrobacter koseri
atgacagtgcaagaggcaatgaaacttagcgataaagaattaatggctcaaggaaaagaatctcttaagcgctggcatcaagcataccagcactttagttcaaccaaagaatttgcagagcgctgcgctagtttactggagcgtgcagcatga

SEQ ID NO: 76190 - DNA, 477 bp, Citrobacter koseri
atgaaaatcgacaaacaggcgctgcgtaaagcggcagaaggcaatgttaaatatgcccagatgtttattaatcctcgcgatgtgctggcgctgctggatgagctggaagcgctccagtctttccgcactgcatacatggagtggagcgataaaaccgattgggtgcagacggataagcggcttgacgtcattaagccgtggggtaagcaccgcgccgacgttctgaagctctatatcgatcatctggagtcaaagctggaagccaaagaagaacagcgagctaactggtttcagatggcgcagaagttaggcgaggatttggatgccgcagagaagcgcatagcagactatcacagggtgctaaacaatctcgccgctgtcgcccgtcgctatctgccagattatgacgagcatcctgatattcaggccgcagacgacttgttagaaagcgccgctggcatcggtgagggggaataa

SEQ ID NO: 76191 - DNA, 210 bp, Citrobacter koseri
atgggagtcattgagggctatagcgctgacctttactgtgattgtgatagctgtcaaagcggtgaggaatgcaggccgaaatatgccgatttcgctggcgatgataaagcagcagtaaatcgccaaataaagctggctggttggaaagtttcgaaagaccgcatgaattgctacgcaccggggcatgcgccgaaagggggtaaaaaatga

SEQ ID NO: 76192 - DNA, 1452 bp, Citrobacter koseri
atgcaattcaccaaagagcagttaatagcaaaacttcagcaccggcttacagtagctgcaaaatacccagaagttgaagaggctgaacttgatgcggctatcttcaaaatcgctctggcatcgcttgaggctggcagtgacagcaacagccacccggcgcacggcccgcttacgaccgagcgactgcaccaactgcgcgacgcgttcctgcgtactcttcaatactcgaacggcggaaatatgaattacatcatcgctgatgctgtgaaagcgattgctgagttgattgcagcgaggaaggcggagccagtagcagatgtcgtttcctgggcatcgccgaatgaggaaagaacctgtgatatacgctggcgtcgccatgatgtcgcggcgggcccgctctacaccaccccgccatcaccggtgacgatagacgagcgcgcggcattcaacgcatggaataacgaagacaatctccccatcgctggggttggtgcgaaaaacgctgcatggttagcatggcaggcccgggccaagttgggtagcccgccagcgccggtagagcctgcaactcttccgtgcgccgttgagttaaagccaggtcttatcattggcaaaggctgcaaaacagaaactttgctgactgctctgcaacgtcgcgccgactattacgctgaaattgtcgctatgacgccagaagaacgcgcagaacatgacgccaatatcgaagcattcaaagccatgttgccgcagccagcgccgctaacagttcagtgctggtcttgcagagatgagattgaagtttccgcgattggggattgtgatggttactgcccgaaatgtaactcgccgatcgatctcgatgaagagccatacaccgccccgccagcgcctgtagtgccggagaattgcgtaacagcagaacaccgtcgcgttattgaaatgctgctcaatgtttgcggggccgcattcgaactcgcagatgatagctgtcagcaagatgttgatggcgaagagtgccacgttgttccagacgacgcatttcagaagctaagtgatgcgctggacgaaatcgaaaacactctcccgacagaagatgtcgacaggccagacgtatttcttgcctggtcggcaatgccaagggcagcgctgaaatctattctccaggctggcaactctccggtaactccggatggttacgtgctggtcccgaagaaactaaccgctgagaacggcgcaaagagtgtgctgtccggtgagttttcagaaacgaaattcataaactgccctgagtgttttggtgatgatgagtgcgaaacctgcgacggcagcgggagaattgaaatcacagtacctgtcacctggacaactatcaaagaaatctgggctaaaggcgctgagcatttcgcagccgcccagcagaagctgatccctaccaccagcaacgatatttaa

SEQ ID NO: 76193 - DNA, 210 bp, Citrobacter koseri
atggcaaagctgatgaaagcaagtcaatggggcaatcgtgaatttaccaaagactctgttcctgacaaccgaactattaagcgttgggtcgaaaatggtttgctcatgggaaggatcgtggatggatctgtgtttgtctgcgagacagaaaaatggggcgtcgactcaatggttagtcacacggttcgccagttaattaatgagggctaa

SEQ ID NO: 76194 - DNA, 1179 bp, Citrobacter koseri
atggcggcaaggccaagaaaaatagaataccgtcatctgccagactatctggtttttgataaagatcgcggtgtttataaatttacgctgattacgggaaagaaaaagaatataggtaaagacagggctattgcgattgctatagcccgagaatataacctgagaatgcgtccagcaacctcaccttccattgaaaatttaattagagagtctggtggaattgcaggtgaagcaaaaccatttgccgaacatgtagatcatataatggcgcgggctattgaagatgaacgtccatcacagagcactcttgatgactggaataatgatgtcctgcgtgtgaaagaattttttattaatatccctgcttgtgatatcgaactggagcacgtaaacgcatacatcaatcaatatcatgctgatgcgtcggcaaacgtacaaaacagaaaagttagctttctgaaaaagttattttcttatgctgtcgatgaatcactaatgtttgaaaacccggcgacacgcaaaaaaatgcgcaggatagaagagaaaaaaagacagcgtttatctctggatcagtttacggcaatcaggcgagcagctgaaccgtggctcagaactgcaatggatctggcattacagacgacgcacgcaaggctggaagtttccagaatacgctactctatctcgaaaccaaaaaacggtgtttgcggctgcgtctggctgcctcagccagaaaatggcatttatggaacgctatacattcacaggcagaaggtgcagaaaaaagaagcgtcacacgttgcgatcccaattggtgaagagctaaagcggataatagacgacagcagggatagtgtagccagcccttacgttgtccacagaataccagaccgccaggttaaacggagcaaagaggtatctcatccaacgcaagtggccccggactatttaagccggtcgttttcatctttgcgtgacagtctcgggctatgtgatcacctcaagatggatgaaaggccaacatttcacgaaatcagagcactggccgctcacctttttgataaacagggaatcgatccgcaaggccgaatggcccacagcgatgcgaagtcgacgaagatttacacccagaaccatatcgactgggttgtggttccacacggagaaattaaggcggggtag

SEQ ID NO: 76195 - DNA, 1050 bp, Citrobacter koseri
atgagattcttactgggcgtgctgatgctggtgatctccggctcgtcgctggctgccattgatgttatgcagttcaaagatgaagcgcaggagcagcagttccgccagctcaccgagcagctgcgctgcccgaaatgccagaacaacagcatcgcggactctaactcgatgattgccaccgacctgcgtcagaaggtttatgaactgatgcaggaaggtaaaagcaagcaggagatcgttgattacatggtggcgcgctacggtaacttcgtcacctacgatccgccgctgacgccgcttaccgtgctgttgtggatcttgccgatcgccgctattggcgctggcggctggattatcttcgcccgttcgcggcggcgcgtacgtgttaaacaggaaaccttttctgatgaggtgacgccgaagggacgccaggccggattatggctgtttgctcccggggttgtgatcgcgctgattgtcggggcggtaagttactaccagaccggtaactatccgcaggtaaaaatctggcaacaggcgacggcgcagacgccagcgctgctggagcgcgcgctggaccctgacgcgcagccgctgaatgaagaagagatgacacgcctggcgcttggtttacgtacccgactgcaaagcgatgctggcaatgtggaaggctggattatgcttgggcgtatcggcatggtgctggggaacgccagcacggcgacggaagcgtatgccaatgcgtacagactggaccccaaaaatagcgatgccgcattagggtatgcggaagcgctgacccgttcttccgatcctgatgataatcgtcggggaggggagctgttgcgccagctggtgagaagcgatcatgccaacattcggacgttgagtatgtatgcgtttaatgccttcgagcagcagcgtttcggcgaggcggtcgcagcctgggagatgatgctgaaattgctgcctgccaatgattcccgccgggcagtgattgaacgcagtattaagcaggcattagcgcagctttcgccgcaggcggaataa

SEQ ID NO: 76196 - DNA, 375 bp, Citrobacter koseri
atggcaaaagagtggttcacggttaaggagtgtcttgcattaccggggtttccaggaagtgtgcctgcggttcgtgaacgtttgaataagtacagtgaggggaaagagagtgtcaaacgtaagcgtgctaaatcgaaagctgaggagtaccatatttctgtttttcctctctacctccgtccttatttgaacgaaaatgaggcagtgctaacgctggagaataccttcgaccaggaagtggaacccaaagagatctgggatatgatattcaggctactgacgccggggcaacgtgtacaggtgaccgggctgttcaggacaaagggaatcgatgccgtctttccctttctgttcgatgacaagtcttcgttttga

SEQ ID NO: 76197 - DNA, 249 bp, Citrobacter koseri
atggaacacaaaagccaagactggcatcgtgcagatattaaaagtgcactggaaaaaagaggaattacgctcagagatctttcacgagcagctggattatctcccgactcgttacgcaatgtatttacccgccattggcccagagcagagctgatcattgcggtggcgctggagaccacaccagatgtgatttggccttcgcgctacatttctggtcatgaggaaccacatcagcgttcagaagaataa

SEQ ID NO: 76198 - DNA, 531 bp, Citrobacter koseri
atgcggtttattctcccattaatccttttactgttatccgcatgtaatgttcacaatgatacaagtagtcgtaacatggtgagtcaattctacccccagtacatggcaatatacgccagcgataacgataagagccttatcaattacaccaatcctatttatgaaaaatatgtttcaactgaaattattcgcagattaaagaaaattgacgattattatgagcaggaaatcgtggcgtcagactactttatgtacgtgcaggactacgcgccggaatggatcgctaaattccacgcaggaacagccagtgcttttttgggaggtgaaaaagtggatgtgtggcttggcgattccgatacccgccttatccatttaatggtgtacactcgccgggaaaatggtcaatggaaaatttatcgggtacgcgatcttacccaccagtttgaacacccgatctacgatgcaggcgctattgcccgcgccagggcgtggtcggcaaaagtcgcgcaggaatacgaaaacaagcaataa

SEQ ID NO: 76199 - DNA, 279 bp, Citrobacter koseri
atggtggttgatgcttccggcggcacctccgttgatgcgcacaaatacgctatcgatcgtatggttcaggcaggcatcgtaccggtaacctggcagcaggtcattcttgagtggcagcgcgactgggcccgtaaagagacctacaacggcattatggatatcgtgcgtgaacactccggcgcctacggcatgggcgtcgattatgcctatactatggttcataaagcgcctgagcgcgtacaacacggcgaacgtatcggcccaaacccggctaaataa

SEQ ID NO: 76200 - DNA, 3060 bp, Citrobacter koseri
gtgaataccggggggaatatttttgattttaactcctcttcattgaccgataatttcagcggcattctggcgcttaaagagaccttatttcaccttgcagatacgaatacagctgcgctgaaaactatgtggctaaaggtgggccagggagcgacagttaaagtggggccaggacagcaggttattgatggacttgcctttgacggcggtacgctggtttttggcgatattattccgggccagacgacgacagaaaataccgtacataccacaggaatactggatatttcaggtcagggaaccgtacaggttacaacgggagcgaccttcagtaacgacagaccaacgccggatactcatatccctcttctggaacaggataacagcaatattcttgttcaacttgtgtccagtgacggaggcgttatcggtaacggtggtaatttaacgctaactgaccagagcagtaatgctatcagtgatgctgttgaagccgatatcgcccagaatggcgcggtggtggcgaaaggaacgtatgactatcgtctgaccggcggtgacagtgatgacggactttatgtcagctatggcctgacccaggtcgatttgctgggtaaagacgtcgatgcgcttatccttgatgcgaacgggaaaagtggcaacgcggctgacctgagcgccagagtgaccggcagcggcgatctggcgtttgacagccagaaaggccagacggtgacgctgtcgaatatggacaatgattacagcggcgtcaccgatgtgcgcagcggtaatctggcgatgctgaacgataacgtgctgggaaatacccgcgagctgaaactggctggcgataccgggtttgatatgcgcggtcattcacaaaccatcggcaagctcacggctgaaagtggctctctgaccgatttgaacggcggtcatctgacgctgacaaacggcggtgaagcgtctggcgtactgacgggcgacggggagctcaccgttgcaggcggaaccctgaatgtctccggggcgaatacggggctgaaggcgacgaccacgattgctcagggcgcgacggcggtgctggataatacgctggggctgggaaccggagatattgttgccgccgggctgcttaatctgagcaacgccacgggcgtgctgtacaacagcatcagcgatgccgggaaagtcgtgctggatgccagtgatgtggtgcttgctggcaacaatagccattttgccgggaccttcgacatcgacaacgactccacgctgacggcctcttccgcgcagcagttaggcacttccgcgattcagaatgccggtaagtttgtgctgaacactcacgaaaactggtcgctggagaacggtgttacaggcagcgggagcgtggtgaagaatggcagcggtaacgtcacgcttagcgacagcgcccagtggaccggcgcgacggatatcaacgccggtggtctgactctgggcagcgcggataacgcgttcacgctggccagtcatcaggtcaatatcgggaaagacgggcgcttatccgggtttggcggcgtagccggaaatatggctaaccagggcattttattgattggcgatgacctcagcgcggctcgcagatcggcttcttcacctgtcagctttaccgtaggcggtaatctgacgaacagcggcgatatctggaccggaagcaaaggtaaagatgccggtaatcagcttgtggtaaacgggaactatcagggagatggtggtcatcttcatctgaataccgcgttgaatgatgataattccgtcacggataaactgattgttaaaggaaacacctctggcacaaccggcgtcagcgtgacgaatgctggcggttctggcgcgcagacgatcaatggcattgaagtgattcatgttgatggtcagtccgacggtgagtttacgcaggacggcaggattgtggccggggcgtatgattattcactggcccgtggtcagggcgacaacaacggtaactggtatttaaccagccataagacagatccaaatccggggccgggcccgaaacctgaacccgatatccgtcctgaaccgggctcctggacagctaacctggcggcagccaatacgctgtttgtcacgcggcttcacgatcgtcttggcgaaacgcagtacattgacgcgctgacgggcgagaagaaagtcaccagcatgtggatgcgtcaggcgggcgggcataatgtctggcgggacagctccggtcagcttaaaacccagagtaaccgctatgtgatgcaggtagggggcgatattgcccgctggagcggcgacggactggatcgctggcaccttggcgtcatggctggatatggacacaacagcagcaacacgcgctcctcatcgacagggtatcgctctgacggttccgtgaacggctacagcgccggggtgtatgcaacgtggtatgccaatgatgaaacgcatcagggcgcttatctggattcatgggcacagtacagctggtttaataacagcgtcaaaggccaggatattcagagcgaatcgtacaaatccaaagggatcaccgggtcgctggagctggggtacacccgcaagctgggtgaatttgcaggaagtaagggctctaaaaatgaatggtttatccagccgcaggcgcaggccatttggatgggcgtcgaagctgacgatcatcgtgaatcgaatggcacacgtatcagcggtgaaggggacggcaacgttcagacccgactgggcgtccgtactttcctgaaaggccacagcgcgattgatgaaggcaaagcgcgcgagttccaaccgtttgtggaagtgaactggctccacaatacgcgcgatttcggcacaaaaatggatggtgtcagcatccggcaggaaggcgcacgtaatctgggtgaaataaaaacgggcgttgagggacaaattaatccacaactcaatgtctgggggaatgtcggcgtccagctgggcgataaaggatacaatgacacctcagcaatgatagggattaaatataactttaaatag

SEQ ID NO: 76201 - DNA, 219 bp, Citrobacter koseri
atgcttggacaactaatgtaccaccgggggattaatatcagccagaaattattaattaagatgcgtaaatattttttgatgggggtgaaggatgacgcgaatgtgctgcttgccatggcattacccacatcacacagtctgaaatatcaggtactgacactgcatttccactcttcctcttattttattcatttttctgtttttcatactgaaatataa

SEQ ID NO: 76202 - DNA, 1560 bp, Citrobacter koseri
atgaatgctaattttaagaatgaaattcagacattcggccgatcgttattattgccgattgccgtgctggcgcctgttgggatggtcatgggaattagctctgcgttaggccagagctatatgattgataaacttccctttctgggtaatgaaatttttaaagctgtattatcttctctcggattaatcagtagcgtcgtatttaataatattcctctgttgtttgcgatgggcgtggcttacggcatgtccaaaaaagaaaaaggaattgcggtatttgcttccgtcgtcgcctatttaacgctgcttatcgctatgcatgtgcatctacaattagccgggacgctagccaaagaaaacctggcgcttgtgggacagggaatggtattaggcattcagaccctgaaaatcgaagcgcttggcggtattatcgccgggttgttggcagctaaaaccaccgaccggttctaccggttacaactaccgttagccttcgccttttttagcggtaaaaaatccgtcgcgattttagctatcgcattttctattcccgttgggctgatcattccttttatctgggatctttttaccgcaggcatgcgcgccatctcaacaattatgatggcccccaacattggcgccgggatttatatgacgctcaaccgcctgctcatcccattcggtctgcaccatgtgctcagttccaccgtgcgattcaccgcagcgggcggcacgtacctcattgacggtcaaacctacgtcggtattttaccggccatcaataaaatcctttttgagcttggcccgtcccacccggcatggaaagagtatatgccgactctcaccagctatcttgcctcatcccaaatgctgacgacgctgttccgcgtcccggcaattggcctggcgatgtatcacatggcttatttcaagaacaagaaattcgctaaagggatgattctgactgtcgtattaaccgccatgctgggaaatattaccgagccgctggagttttcattcctgtttatcgcaccgaagctatttattatctatgcggtactttgcggattgctgactattccgctgcaaatactggaagtatccatcggctacattcgcggcacgatcttcgatttcggtatttttggcctgatgtatgaacatacccactgggtcaatctgattcttcttggggccattaactttgtcgtcttctattttgtcttccgcttcgctataggaaaatttgatattaaaacgccaggacgcgagagcgaaattgcagacagcaccttattaaacaataaagagtacgacaaagtcgccgaactggttatccagggactgggcgggacagagaatattaagcgcgtcgagaactgcgtgtcgcgtctgcgcatcgatttaaaagatcagaaaaaggtggatatggccgtactgaaagaatccggctcgctgggaacgtttattccctccagcaatcatgtccatgtcgtgtttggcccgcatgtagaatttgtccgcaacgcggtagacgaccgccttgtcggtgcgaaataa

SEQ ID NO: 76203 - DNA, 1353 bp, Citrobacter koseri
atgcgcgcactgtatgattcaaaaagcaaaacgatcgacgatcgtggtatgaaagccctgcttagccagcaggcgcgagtccagtcatggctggatgtggaagctgctctggcgcaggcgcaagccgagcacgggataatccccgccagcgccgcgaccaatatcgccgccagttgccatatcgacaaaatcgatctggcggaaatggagcgtctgctgcgcgaaatcggccacggttttgtcccggtgatcaaagtgctggtcaaagcctgcgacagcgaaagcgggaaatatgttcactacggcgtaaccacccaaaatatccaacaaaccgcccagctatatctggcaaagcaatttgacgctctgatgcaaggattcgtaagcgatattttacgcaatctggcgaggatggcgtctgaccaccagtccacgattatggccggacgtacccacgggaaacatgcgttgccgatcacctggggctacaaagccgccgtgtggattgatgagttattaagcgctcagcagcgaatgcaggaagcagaaaagcgtgtctttaccgtgatgatgggcggcgcggtgggcgcatttcacgccaccggcgaaacggggcgactggtgcaggcaagcgtagcgcaaaaactggggatgcactcaatgcccattccctcccgccactcccgcgtctatcgtacggaatacatcagcaacctgtgcctgcttgccacaacgctgcataaaattgcagaagaggtgtatcagacttcaggcgaggagtttgccgaggtttccgaagcgttcacgaaaggaaccgttggtagcagtacgatgccgcaaaaggtcaatcctaaactggcgaaggggattatcgccaacgcgcagaaattatattccgttatgacgtcctgcctgtacgtcagccctcgtcctttcgaggctgacagttcggcctattttatcttcgatgccaacattcaggagagcatggagttaatggcggaaattgtgatgcgcgcggaagagttgacccgcacgctggttatcaacactgaccgtatgcgacagaacgtccagttaactcatggcctcatcaacagtgaaaaaatcatgatgcaactggtggaaaggctgggcaaagatgccgctcatgagcgtgtgtaccatcttgcaatgcgcagcacccacgaggggattccttatgccaatgttctgcgtgaagatccgctcattcgccagcattttagcgatgcggaaattgattcgctacttgaccctgctcactatatcggcctgtgtgcggaaatcgcccaggaaacggctgtacgagtatgggagaaaaataaccgctga

SEQ ID NO: 76204 - DNA, 1548 bp, Citrobacter koseri
atgaactattttgatctctctttcttaaaatatttgcaggataacaattcgctccctgtcgaggaggcggttcgtcgttttggcaaaacgctctcaacgctaaaacgaacaatgaaagagttgaatgaactcttgccggaaaacgtgcatcttcaccaggacaatcaatttattaccacccgaattggctacagcgaataccggcaatttttgcagcgcgtgcagtttaaccgctatatcactacggcggaggagcgagtgaaagatctcttcgtggcgctctgtctgcatgatgtcgtgaataaaaatgaatactacaaaaaattctatgtcagcgcgggcacggtaaaaaatgataaccctgtgatgatgcagttgatacagggccacgatctggtattacagagtattccacgtaaaggctcccggcttacaggtgatgaatttcaactgcgggtcgcggtgtgtatgtccattctgaaaaccgttgagatcggggcagatcacctgttgattgctcatcaggctaatgaaccgatcaaccgctccatcgctgaacaatttctccgcgagtgttccccggagattaaacaggcggcagcatattatgagaacgtcatcagccccgtgattaccctgggatataacggcagaaaatacttattagtgtatctgagcctcgcattacaccgtatcaggcgagggcattggatcaaagagagtaccgcagctcaatttttgacgacgttttcgtatgatgtgttacccgatgcgcatgaaaatgcatgcctgaatctgttgattgcctcgctgacgtttacccatcgtcctttcacgttatacgacgcccggcttgtcttatacgtcaaacgtacctgctgcgatttagaagggtatcctggcatcactatccacaataaagacgcctggttcacggagatttataacttcatttacgcggctatcatccagaataaattccatctctggtttgatgataaaaaactgcatgatgtccggcggcgttacccggaatggtgggcgtatgttcagcacgcagtgaaagagatcgaagataactggcaaacgtctttttcagccattcacctggcgacgctggtgctgatcatcaaaaaatacgaactcaaaaaccgggtggtgagcgatccgaaaaagcgggtcatcattgtgactaactcatcggaaagtaaggtagggtattttaaagaggtgcttttctcccgctttcatattgatattccggcatgcatcaatatcaatgagatcgctcagctacagcatctggatttcgatttgctgatcacctttaccaataaaatatcaagtcacctcaggtatgccgggctgaactatgtcaaagtgaatttctggctgacgcaagaggacttccgactgttacgcgaacacggactggcctccacgcgcaaaaaaatacctgctgatacttttgttcagcaggtacaggggttgagcccggaggcattaaaagcgttcctcaacgcgcattatggcgatgtttttatctag

SEQ ID NO: 76205 - DNA, 1239 bp, Citrobacter koseri
atgacaaacgatcgcgttgaaagcagtagtggacgagcggcgcgcaagttaaggctcgcattgatgggcccggcgttcatcgccgcgatcggatacatcgatcctggtaactttgcgactaatatccaggccggggccagctttggctataaattgctgtgggtggttgtctgggcgaacctgatggcgatgctcatccaggttctgtcggccaaactggggattgcgacaagcaaaaacctggcggagcaaattcgcgatcattacccgcgccctgtcgtctggttctattgggttcaggcggaaatcatcgcgatggccaccgacttagcggaatttatcggggcggcgatcggctttaaactcattctcggcatctccttgttgcagggggcggtgctgacgggtatcgccacattcctgattctgatgttgcagcgtcgtgggcaaaaaccgctggaaaaagtgattggcggattactgctgtttgtggccgcagcctatattgtggaactgattttttcgcagccaagcctggcgcagctgagcaaagggatgatcatccccagcctgccgaactctgaggcggtatttctggccgccggggtgctgggcgcgaccatcatgccccacgttatctatctgcactcttctttaacgcagcatctgcacgacggctcccggcagcagcgctatgccgccaccaaatgggatgtggcgatagcgatgacgattgcagggttcgtgaacctggcgatgatggcgaccgctgccgccgcgttccattttagcgggcataccggtattgccgatcttgatcaggcgtatctgacgctggaaccgctgcttagccacgctgcggcgacggtgttcggcctgagcctggttgcggcggggctctcttccaccgtggtcggtacgctggcggggcaggttgtgatgcagggatttgttcgctttcatattccgctgtgggtacgccgcaccatcacgatgatgccgtcgtttatcgttattcttatggggctcgatccaacccgaattctggtgatgagccaggtcctgctgagtttcggcattgcgctggcgctggtgccgttattgatttttaccagcgatcgcacattgatgggcgatctggtgaatacccaatgggttaagtacatcggctggatgattgtggtgctggtggtggcgctgaatatctggttgctggtaggaacagcgctggggttgtga

SEQ ID NO: 76206 - DNA, 900 bp, Citrobacter koseri
atgaatttgacactccttcccgatctggccacttttgtgttgattgttgatcacggtagcttttctgccgcagcgcgcgcagcaggtgtgaccccatcagccatgagccgcagcgtttcacgccttgaacgcgaaacgggcagccagttgttgcatcgttcaacacgtaagctggcattaagtgaaacaggaaagatggtgtatgaacatgcaaaaatgatgctggaagcagcgcgacaggccattgattccgggggaagcgtacaacacgttcctcagggaaagattacgctcagcgtacccaaagccgtcggacgcttcgttattcatccactgatcccgcaatttcttgaacgttttcccctggttgatgtttgcctgagactcgaagaccgctatatggatctcattgatgatggcgtcgatctggcgctgcaaatcaccaataccccctcgcccgggttgcatggcaagccgttaatgccaatcacccacatcctctgcgccacgccagagtatctgcaaaaacaggggacaccgacgcacccggaagatttacgtcagcacagttgcattagcctcggagagacgccaacggactcacgctggaaatttcgtaaacaaggtaagacagaagtcgttcaaacaacgggacgctatgcggctaatcatacgggtgtaagactggacgcagtaaagcgccatctgggaattggcagtctccccgcattcacggccagagaagcgttacaagacggcgaaatcatgcaggtgttgccggagtggacgttcatcagcaactactccggcgagctatggcttttgtgggctggaaacaagcatatgccgctcaaaatacgggccatgattgattaccttagccaacaactaaaatcctag

SEQ ID NO: 76207 - DNA, 630 bp, Citrobacter koseri
atgacagaacgtctttattacaacaccgatgatacagaaggcatggtatgtgtgacggggtgctctccacaaatggatggcctgtatgccgttacgctcgataaaacattattccaccctcagggaggtggacaacccgcagacaaaggctggattgcggatattccagtttgcggaatcatgttacgtgataatcaaattatacatattctgccgcaacccgttgcagcgggagtggtgcagctaaaagtcgatgcacagacacgtttgctcaactctcgtctgcattcagcaggccatcttatcgggtgtgcgggagaaacatggggttggtcgccagtgaaagcgcaccactggccgggtgaggggcgcattaccttttcagcaggtgaacatgctcgtcttcctgatgctgaaaatctgctggcgtgtattgagcagtggcaggcgaaggattatgcccgtcgaattgagtttgacggtgagcgacgtaaagtggggtttggcgaacttccgatgtacttctgtggaggaacacatgtcacttcgctcggccaacttggtcgtataatgatcggtgggatcaaaatgaagaaagggcagctcatcattaactattccattgaatag

SEQ ID NO: 76208 - DNA, 276 bp, Citrobacter koseri
atgctgtatatgcaaacagtgataatggggctggatatgttcgttgaactggtttatgacaagcgaaatgttgagggacttgaaggggccagagagatcatcctggcagaactgacgaaacgagtgcaccagattttccctgatgccgaagtgagggttaagccgatgcaggcgaacggcttgaatagcgatgccagcaaaagcgatcgggaaaagctgaaccgcatgctggaggatatgtttgaagagtccgatatgtggcttgtacaggattaa

SEQ ID NO: 76209 - DNA, 924 bp, Citrobacter koseri
atgaaaatttctttggtcgtacctgtgtttaatgaagaggaagccattccaatcttctataaaactgtacgggagtttgaagaccttcagcggtatgaagtcgaaattgtcttcataaatgacggaagcaaagatgcgacagaatcaatcataaacgcgcttgctatagcagattcgcttgtcgttccgctgtcattcacaagaaactttgggaaagagcctgccctgttcgccgggctggaccatgcgaccggtgaagcgataatcccgattgacgtagacttgcaggacccgattgaggttataccgcacctgatagagaagtggcagtctggggctgatatggtgttggccaagcgcactgacagatcaacggatagtcgactaaaacgcaaatctgcagagtggttctataagctgcacaacaaaatcagttacccgaaaatcgaggaaaacgtcggtgatttccgcctgatgtctcgcgaggtagtggaaaacattaagctcatgccagaacgaaatcttttcatgaagggcgtcctgagttgggttggtggccgcactgatgtcgttgaatatgcacgtgctgaacgtgttgctggagactccaaatttaatggctggaaactgtggaatttggcacttgaagggataacaagtttttcaactttcccactcagaatgtggacctacataggtttgtttgttgcaaccatagccattttgtatggtatgtggatgattttagataaagtttggtttggaaatagcgttcctggctatccttcattgctcgtatcaattctatttttaggtggagttcagttaatcggcataggagttttaggagaatatattggccggatatatatggaagtcaaaagacgaccaaaatatattttaaagaaaggtgataacaaatga

SEQ ID NO: 76210 - DNA, 1425 bp, Citrobacter koseri
atgaatgctcagcacagtaacttcaaaattctctcattaataataacgtctggcgtttttataccatttttctttatgcctccttactgggatgatatttacaggcatgcatttaaatatatggggctatttgatcaaggccgttacttgctcgaggcatattattgggtattgattggggggatcgctaccttcccggcagcgatcggaatatttaacgtactcgcctgctttacaatgatttatttcgcgtgcattaaattctcagcatctttagataaaaacactaaccatgcatccattataggcgcaacacttttattaggctcaccttttatactagagaacctctcatatcaggttgataatattgggatgtttgctgcactttccttaagcctgtattcttcatcaacattaaatgataggctagaccgatttttctttataagaacggcaattttaatattggcttcttttttctatcaagcatcattcaatattttcttagtgtcatccctgatatttatagcgctaaatgcaaaatgctcgactgctttagtaaaaatgcttataagcattgtggctacgctattggtaactattacagtggttatgattttggcaagtaatttcgctatcgacccatatgtaaaaatacacaccaccccagtaccattaagcattgatggagttaaaatagtttcgtcaaacataaatgctgcatatcacttatttagtgattccttgtcttttccccaaaagataattgttattatctttactgctgtaacgattattttctctactgcccatgcgtttagacttttccgtaaaaaagaatgtttgctatctattttcatatttttgatgccattcttacttattacacttcagttttttccatacgttttatttacctcaccaataatacagcctagagtatttttaacgtttggcttgtttatgacatactgtttttactctctgccaagcgtaaatgcgtggagaaggttcgctgaaattattggtgctctctttttgatcgtcaattctatgacggctagcggttacgttgcagcaataaacagcaattattctgctgtatcgagttattacaatagcttccaaaatgacatccgttattcattgaatgacaactcacgagcgatgatttatgttaatggcagcatgcctacaccgtctatccaatcaagcaatgaaaattacttcccgataattaaaaaattaattagaaatacactctcagggtgggctgcccctggcttcatgaagttaaacaacattgatttacagtttaaatacatggaaattacatctgacttcaagccggtattagacaggggtgattataaaatactcaaaaaagatggcgagagtaaatacatagtgaaattcaagtaa

SEQ ID NO: 76211 - DNA, 453 bp, Citrobacter koseri
atgagcaaaattattaattctgaatcagcaagttatttttacagcgcatccaccggtggtttttatcctgttagcctgaaagtcgattatgaaacagcaggctcttggccggttgatgctgtttctgttgcggacgaagatatggtggctttgcaggcaggacaatccgcaggtaagcagattacggctaatgctgaagggtatccagttctaaccgatcctaagcctcttacacctgaacaacttcaacaacaggcgaaagtgcaacaaagcacactgatgaatgctgcaacagatgcaatagcaccattgcaggatgcagtagatcttgatgaggcaaccgaagaagaattgttacttctcaaagagtggaagaaatatcgagtaatgctgaataggctggatttatcctctgcgccggaaatcaactggcctgatatgccgcttgtttag

SEQ ID NO: 76212 - DNA, 1110 bp, Citrobacter koseri
atggctaagaacgattttaaaccttttgcaaccggcaacggtgcgaatgtattgactcaggcagaatatgaggcgctcgccgcattagcatctggcttcacctctggtaaggcatcctctgctcaaattaacaaagcgattcggcaggcaacagttattgccagtgtaatcgctcaatttacagcagacaacggcggaagcgatgttttagataatggaaacacggcagctattcttgcaagttttatcacagctcttaatacttccgtaggaaactcactgggttcgaacttcctgcgtaagactaataacctgtctgatatttccaatgctacaacatcacgacaaaacttatccgctgctaagtctggggtgaatagtgatattactgcactaaacggacttacaactccactcaccgtgccgcaaggtggaaccggagcaaccagcgcggtaaatgcaagagctaacctttttgctgcgcagttaggagcgaactccgatattacctctctaaatgggcttactactgctttgtcggttgaccagggaggaacaggagccaaaacagcagcgaacgcacgcagtaatattggtgctgctgcttccggttcaaactcagacatcacagccattaatggcttaacgacggcactatccgttccgcaaggtggaacaggatcttcaagtgctgcaggtgccagagcaaatttgtttgcagcacagctcggtgctaactcagatatcacgtcactgtctggattgacaactgccctttcagttacacagggcgggactggggcaaaaacagctaccgctgcacgcgcaaacctgtatgctggtggtattcccaccgcgctgaactcagctcaaggctggtggaagtgcgctgacactggacgtattttccagcatgggaaagttgcaattacctccggctcacggcttaccttcccgatagcattccccaatgcctgctttgcggtgatcctgactgataatgatggctataagggtgtaggcctgctgggtgcgacaactacttacgcagcattcaccagtggttcaggcggcactgtcactgttggttatctggcaataggatattaa

SEQ ID NO: 76213 - DNA, 681 bp, Citrobacter koseri
atgagtaagtacacagacttaatcaccaactaccacgccaccaggccgaaatactttgatcacatcgacctgagcacccggccgctgattgacatcacatcatccacccgggggtttgttagcgcgtttgacattgatacggcggtaggcgtccagcttgataccctcgggctctggatcggacgtagccgtatagtcagtcagccgattacgggtgtttatttcagctgggacaccgacgggctcggatatgaccagggcgtctggcaagggccgtatgatcccgattctggttatacatcattaagcgacgaaacctacagaataattctcaaagcaaaaatagcgataaacaactgggatgggagaaacgattcgttaccacccattcttgacgctgcgacagagggctccggaattaggatgcaaattgtcgacaatcaggatatgacgatatctgtatgggtatttcctgaaacggatattaatgatgtttcactggaacttattgcagcaattagacaggggtacttgacgattaaggctgccggtgtgtgggcaggaagtatagaaacaccagcagttgaaacaccttctgaaggaaataaattctttggattcgacatggaaaacgactatttcgccgggtttgattccggggcgtggggagaaatactgtaa

SEQ ID NO: 76214 - DNA, 1200 bp, Citrobacter koseri
atggccctcaatttggacacactcggcttatcggcaacggtaaccgctgaggggatcagcgcgcctgattaccagacgatactcgataccctgacaagctatttccagcagatttacggcagtgacgcttatctggagccggacagcaaagacggccagatggtggcgctggtggcgctggctattcacgatgccaataacacggccataactgtttacaactgcttctcacctgccacggggtacggcgcagcgctgaccagtaacgtgaaaattaacggtatcgcgcgcaaaggggcgacgaactccaccgtggatctactgctcaccggcaccgcagggacaactatcacgaacggtaccgtgaaagacactaataacgtgatctggcgtcttcctgcctcggtagtgattggcgttgacggtacggtgacggccactgctacctgctcaaacagcggcgctgtcgcagcgctgggggggacaattactaccatcaacacgccgacccgaggctggacatcggtaaccaacccggcggcggccaccgtaggcgcgccggcagaaaccgacgcagagctgcgcatcaggcaggggcagagcgtcgcgctaccctctatcacgccgtttgagggcgttgacggtgcgattgctaacgttgctggcgtgacacgtcacaagctctacgagaatgatactggcgctaccgatagtaacgggctgccgccacattctatctcggccatcgtggacggcggggacgtgaccgatattgcccagactatccggggtaataaagggcagggaacggcgacttacgggactacttctgtcacggtaccggacacctacggcaatccacacgtgatcagtttttcgcgttcgactgatgttccgatttacgggcatatcacactgaaagcctttacgggctacacgtcgcaaattggcgtgcagattcagcaggccgtcgcggattacatcaacgggctgacgatcggtgattctgttctgctgagccgcatttactccccggcgaacctcggcgtggtgagtggtggcagtgcacgctattacgacattcaggaactgctgattggcaaatctgccggaacggtagcggcggcgaatatcaatattgcctacaacgaatcagcgtcctgtaagcctgaaaatattgtcttaacggtgacgtcatga

SEQ ID NO: 76215 - DNA, 654 bp, Citrobacter koseri
atggcagtatctgaccagacccgcagcggcgatcttgccgaaacatttaaatctgagcgggagaaaacaaagaaccaaatccgtgtcgctttgcctggcatcgttcagtcattcgatcccggcgcggtgacggcggttgtgcagcctgcgatccgttcggttgaaattgataacgacggcaaccgcgttaccaaaaattacccgctgctggtggatgtgccggtgatatttcctcgcggcggcggttgcacgctaacgttcccggtgaaagccggcgatgaatgcctggtaattttcgctgaccgctgtatcgatttctggtggcagaacggcggggtacaggagcctgtcgacgaccgggtgcatgatttatcggatgcgttctgtatcgtcgggccgcagtcgcaggcgcagaaaatcagcggtatcagtaccagcgcggttgagttgcgtagcgacgatggcggaaccaaactgagccttaatccttcaagtggggcgatagccggtaccgcgccaggaggtttcaacctcaacggcctgaaaattctgcctgacggccgcctgcaactggtggatggttcaatcgttgataagcatacgcatggcggcgttgaaagcggcggcagcaatacaaaacctctgggagggtaa

SEQ ID NO: 76216 - DNA, 429 bp, Citrobacter koseri
atggcggttgaacatacctgcttccttgagcttgcaaaacattcccttactttaaacggtgaaatgtggacaagaaacgcaattagccgagcatattacggcatgtatcattcggcgttacgaatcaccaataatttggtcccgagttttactgaagacggtgaaaaattaaaaggtggtgttcacatgcgagtctataccgtgttttgtagcggtgaagcagctgcagtgaacaatgtcgatgttaacgcagtaaaaaaaatcggcgtaaaactgaaaatgacgcatgcacaacgaattaactcagattacaaacttgagcgaaaggttaatcgaattacagcgataagcgcgattcaggatgcagaagaagtcgatacaatcgttaatcaacttttgaaggttggcgacgattcgttaaccgcataa

SEQ ID NO: 76217 - DNA, 732 bp, Citrobacter koseri
atgagcttagcgcagccaaaatcaggagaactgttagatcttctgaccccttcattaactaagggtgaaaatcttctgagtgaatttgaagtacataaaatcattcgtgaagctaagaaaatcccggaacgttatcaggggttatcgattgaaggcttagctaagcttgttcttggtgaaatcgaagaggggtgctctctctgtgaacaagggttgagactagctcctaacgattcagtttctttctgtaactatacgatagcgctgcgtaacttaggtttgcacgctcgccagtacgcaatgattcagaatgcggccaactcacttaacccaacaatactggctgaagttgctacaatttctgcatactgggctgatatcgatttgcttgaaaaggtgatgccgatgctgacagctatggaagtgccgcgtcctgaagaaatggcaaagtggtgtcacacacttgattatctgcatacccatcaagagcatgctcaggatctcaaaaccattgggcagctaatgatgaatgtcgcagacaagtatcgtgtgcgtctcgcgggtgctcatgctttttacgttttgtcagaacttgatacgctatttgtggaagtcaaaacagacgatccagcgctcctctcgcagatgaataacgacctagctgacgagattatcaatgctggtcttgccgattctgaatgcgtcggatgctttgaagcgggggatttttaa

SEQ ID NO: 76218 - DNA, 234 bp, Citrobacter koseri
atggacatgattaacggtgaacgcgtcacatctcagaaaattacaaatcttggcgctgatggcattaagattgatatggggctaatgcctgccaaagacggcaacaactacggctttgaatacattcgccgtccgggtacagaaacgcgtttcctgaacgtccagctgctgcagaacagtatggacgcgccgagaattatcggatctttcccgtgtaagaaagtcgctgggtga

SEQ ID NO: 76219 - DNA, 1062 bp, Citrobacter koseri
atgtcacagaactggatgagacatttcgagctgcagctcgtggacgagaacgggcagggtatcgagctcagcgattttaaagtgaactttacgatcgactggttcaacatcagcagcgcgtcacgggtgggaacattcaaaatctacaacctctcggcagatacggtgaaccgcatcaccgggcaggagttttcgaaagtgaggctgattgccggttacgacggtatcgcaccggaggtatcggccagcgacgtcgggactgtgcgggaagttgacgcggcggacgtgggccagagtgacggccgcaactacgggcttattttcagcggcgaaattcgctactcggtcacaggaaaagacagccccattgattcctacgtcctgattcaggcagccgatacggatctggcttttgccaccagcataacctcgcagaccctcgcagccggttatacggtcgcagacgtgaaccgcgcgctgatgaaagacttcgaggcaaaaggcgcgaccgaaggtctgacgcctgaaatgcctgctaccgttttcccccggggccgggtgctgttcggcatgacacggcatcttatggataacgtggccggacaatgtggcgcaacatggcagtttgtggatggtcagcgccagatggtagcgaataacgaatatgttcacgacgcgattgtgctcaacagcgccaccgggcttatcggtatgcctcagcagactatcggcaacggcgtaaacgtccgcgcgctgattaacccgaacatccgggttaacgggctcattcagctggatcaggcttcggtattccgcaccgcgctgtcgaacaacgatatcgcgatggccggcgggcagatcaccgaccagaacacggacggaaatatcacgctcagcggtaccaccgcgcagcctgccagcatcgcaacggatggcgtttatattgtgcgtgggattatgtacactggcgacacaaggggccaggcgtggtacatggatatgatgtgcgaagcgcgtggcgcggcggatctccgcactcaggactcgcttaaccgggggtaa

SEQ ID NO: 76220 - DNA, 303 bp, Citrobacter koseri
atggcaattcaggaaatcccgctgacagcggataaccagcaattcagcatcatcctggcaggtaccacctggcggattagcatcacctggcgcgatctgtactggattttggacctgcagaacgacagaggggagccggtaatctccggtattcctctcgtaacgggggctgacctgctggcgcagtacggctatatggggctcggctttaagctggtggtggtctgtgacgacagcacacaggattatccgacgaaaaccgacctgggcggccgcagtcatttactggtatcaacggagtaa

SEQ ID NO: 76221 - DNA, 564 bp, Citrobacter koseri
atgggggtactcccgttgagcaataacaccagcacacagcgcggctggctgacacccaccagcggcgatccggattatgacgaagcgctagacaggctgttaagccagtggatgcgcaacgtttccggcttgcctgctgggatggttcgcccgcgctggcagaaagatcagccgccactgctgccagttgaaacgaactggtgcgcgtttggcatcatcgaatggcccattgataacagccccgcattcactcaacagaccgataccggaacacagctctggcggcatgaggattttgtcgctatggcgtcgttctacggcccgggggggatgcaaattgcttcgcgattccgtgacggaatatcggttgagcaaaacaacgccgagctgaaccagtcggatctctcgctcgttgactatggcgatattgtccctttccccgagcttattaaccaacagtgggtgcgccgttacgacatgaaagtgcggctgcgccggaaagtggttcgagagtacaacatcctggcgctgcaagatgcgcccgtttcattcttcggagagtaa

SEQ ID NO: 76222 - DNA, 390 bp, Citrobacter koseri
atgccgactcttgatgtaacagatgtgctttttgaccccgatttttgcgacttcaacctgtgggtaacgcgtcgcgcacaaacggtggacgaggacgggatcggcagcgacagcgaagttaaaacgcagtttggaggggttgttaccgttgaccgctctcttgaaaaccgccgcatgcaggccgggcaggttatcagcggggcgattttaatcgtgacgactgagcgactcacgcaggggcagactggccgtgatgccgatatcgtgacgtatcagaaccgggattatcgtgtgacgttcgtcgacccgtataccgcttacggtgctggcttcgtccaggcacattgcgaactgttgccgtttgatgggggtactcccgttgagcaataa

SEQ ID NO: 76223 - DNA, 549 bp, Citrobacter koseri
atgaaaagcggcgtaacgattcgtgccgataatgctcaggctattcttgatgcgctcaagtcgctaaccaaaaaggatgtgctggtcggtatcccttcggaagacagtgagcgtgatgatgttccgtttggcaatgccgggatcggttacgtcaacgaatacggctcaccggcgcaaaacatccccccacgaccgcacctggtccccggtgttaaatcggtagaagaacagacggtgccgcagctcaaagcagcggcgcaggctgcgcttgatggtaatgcggatggcgctgaaagagctctcaaccaggcgggtacgctggctgctaacggtgtcaggcgttacatgaccattaccggttttacgccgcttgctgatagcaccgttgaagcacgcgcgcgtcgcgggcgtaaaggggcgaaagcggagcttgcccgccgcgctgctggcgagccccccggaaccgatctggtgaaaccgctaatcgacaccgggcagtaccgcagagccattacccacgttgtgagggataaagatgccgactcttga

SEQ ID NO: 76224 - DNA, 411 bp, Citrobacter koseri
atgccgaaaaaccaatctctgccaaccgtaagtgattttcggcgtgactttccccagtttgctgaccccgttaaataccctgaaccacaaatccagttccgtctgaacctagctgatatacagctgattggtgaaggtacgactggaaagcagctctttccgtattttgctgagctgtatgtcgcgcattacatggtgctctgggctgctgatagtcgggcgatgctcgctggcggtccgggaggttcaactaatggggtccagtcctctaagtcagtggataaggttagtgttagttatgacactggcgcgacgcttaaccctgatgctgggttctggaataacagccgttatggtgcagaactgtatcagctaatcaccatgtttggcgcaggcggtcgccagctatga

SEQ ID NO: 76225 - DNA, 360 bp, Citrobacter koseri
atggcaaaagaaaaactggtttcgatccttgtccatacccctttcaagttgacgctggcggatggcacggcgaccgaatacaccaaaggtctccactacgtaccggaagagcatgccggacactggtttacccaggctcatgcggaattgacggaccaagttaacgctgacgatggcgaagatctgcagaagcttaaggatgcacttgcccaacgtgatgagcaacttaaggcgaaccaggacacaatcgatgccctgaatttgcagattgaagaccttaacgcgcaactggcggcatcgctgatcggcggtgaagggggcaaaaatgccgaaaaaccaatctctgccaaccgtaagtga

SEQ ID NO: 76226 - DNA, 948 bp, Citrobacter koseri
atgccaatgattacttttgaccaggcgacggtagacggctctggtgcctttcttgtcggcgaactggagcgtcttgaccagggattaaacctcccgctggtgggatacacctggacccgcgatatccagctgcgtgaagacgtctctatcgcagatgacatttccagctggactaacaccagctttggcgctgccggtactggtgcgaatccgaacggtaaaaactgggttggtaaagactccaccgccattgctggggtgaacgtcgatatcggcaaagacggcaatccgctgaacctgtggggtatggagctgggctggaccattatcgaactgaaagccgctgaacaggttggtcgcccaatcgatacccagaaatacgaaggtatgcagctcaagtggcagatggacaacgacgagcaagtttatgtcggtgattcctcgctgaacttgaaagggctggcaacgttaaacggcatcccagtaaataacgcggccaaaacgtgggcgctgtctactccggatgaaatccgtgccagcattaaccaggtgctgtcggatgcctgggctgcctcaggctattcaatggtaccccgcgatctgctaatcccgccggagcagtttgctctgctgtccagcatcatcgtgtcttcagcgggtaaccagtccctgcttacttacctccagaccaacaccattagctatcaccagaatggcgttccgctgaacatccgcgcggttaagtggctgaaaggtcgtggtgttggcggcaaggatcgcatggttgcctacaccaacgataagaaatacgtccgctatccgctggtaccgctgcagagcgtgcctgtgcagtaccgcggtctgtatcagattgtcacctactacggcaagctgggtgctatcgaacctgtgtataaagaaacgctgtcctacgtggacggtatctga

SEQ ID NO: 76227 - DNA, 498 bp, Citrobacter koseri
atgactgcatatctgtaccggatgcccgtaggcatcgccggggcgatttcacgccctcaggatctgaccaccgagccggtcatcctaaaatccgctgacgccttcccagcctatggtctggcaggcaaatacgatgcggatggttattttgtcccgcttgatgacggcgatactgctgacaaagtgaagggcatttatgtgcgtccgtatccaacgacctctacaccggatatggtccgtcaggttggcaccgacaaaaacttcccgggtgatgcgctgaagcgcggctatatgaccatcaacctgggtaatgatgcgaccaccattaaaaaaggcgctccggtgtacgtcgtgatttctctcgactccaccattgatgtgccgcttggcggtttctcagcagcgaacatcgccggaaagacagtagctcttccgaatgctgagttcaccggtgctggcgatgccgacggcaacgctgaaatctcctggaagatttaa

SEQ ID NO: 76228 - DNA, 1221 bp, Citrobacter koseri
atgaaatacttttttgagaccaggctcggggaaacccgataccgcctggcggatggctcattgctttgcaaagacgtgcccgtagcgcgaaccggaaagcaactctacggcgcagccgacctacccaaccttattcctgatgcctttggcgagattgttgtcagtcgctcgccagagcatgtcttcgacccggcgaccctggcgtctttcgagggcatgagtatcaccgttctccacccggaggacgaaaacggcaatgtgcagttggtcaaccctgcgaactggaaagagctcgcggtgggccacctgcagaatgttcgtcgtgggacaggtgaacagtccgatctgatgattgccgacatcattatcaaagacgaatacgccattcagatggtcgaagacggcctccgacaggtgtcgtgtggttacgacgcggagtacgaacagaccgagccaggtaaagccgagcaggtagaaattacaggtaaccatgtggctcttgtccccaagggcagagccggaaatcgttgtgcaattggagacagagacacaatggcaaatcaaaagaaaaactggtggacacgcatgcgcgctgccatcaaaaccggggatgccgacaccatgaacgaattggtggagtcggctccagcatcggttacaggtgatgaaggggatttgccgcagggcgtaaatctcaatatcaacctgtcgccacaacaccctctaccggataaagatcctgaaatggggggcacgaaaacaggagatggcgacgatgatgtcgttacgctgctgaaagcgctgctggctaaactgagcgcaggccctacgggcgacaatgataatccggatgataaaaaaggtcctaccgccgacggtgaagacgacgaagaggaagccgtgattactggcgactcagcgtatcgcgccgaagttattctgccaggcgtcgatctgagtcgtaagatgaagcctacagcgttcaaacgcgaagttttgtccaccgccgacaagaagttggttcgtcaggttgtcggcgatgccgatattcgcaagctgccgaaacagtcggtagaaatggctttcaatgcggtttccgagctggcaaaaggccgcaatacgcgcaccgcaacgggcgatgcctcccgcgctacgatcaccactcctaacatttccgacctgaataaagctaacgctgatttctgggctaaaaaaggataa

SEQ ID NO: 76229 - DNA, 618 bp, Citrobacter koseri
atggaagccctcgagcgttatagcgaaatcataacgccctgggcgactaaagtggcggagtcattcaccgcagacctcacccggcagaacgacaaagtgtggcggcagcatagcaagaacatcagtcgcgagctccgcaatctggtggaaagcgccccggttggccaggtgatgcagtccatcatcgcggagcaggtgaaatacatcaaatctctgcctctcgaggccgcagacagagtgtacgacatccagaacaaagcgatagaggccgtggtcactggcggccgggcggagcagttcgctaaagaaattgcatccactggcgacgttgcaaagtccagggccgatctgattgcccgaacggaactgggaagagcaacgggcgcgctggatatgacccgagcgatggctattggttctatcgggtatatctggcgaacggcagatgatggcgatgtcagacattcgcatgcggagatggaaggcaaatttgttgagtggggcaagcctccaacgctggacggcatgaccggccatgcgggcgagctgccaaactgccgctgctataaagagatcgtgtttgctcgcgttccattcgcaatgaaaagggcagcataa

SEQ ID NO: 76230 - DNA, 1467 bp, Citrobacter koseri
atggcgaaacaaaagcaaggcggccagcggaaagcagtagctaccgctgacagcattgagaactttgtcgcccgggtggggatgcaagcacctaaccagcacgcagcgtcaacgtatcgaccgaattttaccagccgcaaccgactgctggtggagtgggcgtatcgttcttcgtggattgttggcgaggcggttgatgccataccggacgacatgacccgtaaggggattcgcatcacctctgaaattgatgcaaaagaccgcggcattatcgagtcacagttcgatgatttgcagctgtgggacgcgctcaacgatgtgctgaagtggtcgcgtctatatggcggtgccgtgggcttcatcatgattgaaggtcaggcgccaatgacgccgctcaggctcgagaccatcggcaaaggcaagttcaaaggcattctgccgctcgaccgctggatgattaacccggtgctgacccgtcgcattaaagagatggggccggacttgggcaaacctgaattttacgatgtggtgaccaccgcgacaggtatcccttcctggcgtatccatcacagtcgcctgattcgatttgacggcgtcacgctacctttccagcagaaaatgaccgagaacgaatggggcatgtccgttgtggagcgtatctgggaccggctcactatttttgatagcgcgactatgggcgccgggcagctcgtctacaaagcacacctgcgtacctatggcgtggagaaactccgtgagttgatcgcctttggcggcccggcctacgatgcgctgctgaagcaaatcgacctgatccggcagttccagagtaacgaggggatgactctcaaagataacagcgacaccttcgaaacccatcagtacagcttcgcaggcctggacgacattcttgctcagttcgccgagcagatcagcggagcggtaggtattccgctggtacgcctgcttggtcagtctccgaagggcttttccactggcgatgcagacctggcgaactattacgaccgggtgagctcgttgcaggagcgccggttgcggcagccgttacgacggattatcgacatcatctaccgttcagagcttgagcaagccctaccggatgatttcacgttcgagtttaaccctctctggcagatgtctgatgtggaccgttcaactgtggccgtcaataccaccgcggcaatagtcaacgcgctggatgccgggctgctgacgccaaaagccgcgatgactgacctgcgcgaaacttccgatgttactggcatcggcgcatctatcaccgacgaggatatcgagaatgccgaagacgaagcgcctccaggcctcggcgaacttgaaaacccgaagccagagtcgacaagcggagatccgatatcgaaccaacctacgcaggatagcgcggacggtcggcgacatcgtaaatggccgctacgatggttcaaatga

SEQ ID NO: 76231 - DNA, 1623 bp, Citrobacter koseri
atgcctttaccgtttccttttgatttcaaaaaacctgactacgtgcaggttttcgaatggcgaatggagcgactggagaggatccgcaaagaccccgccatgctggcaaccctgaagcagttttatcgtaccaatccagcccagttcatcattgactgggggatgacgaccgacccgcgtaacctcgactacggcctgccggtgaccattccgtttttgctcttcccaaaacaggaagagtggatccactggattatggaacgctggggcaatcgggagaacgggataacggaaaaatcccgtgaaatggggctcagctggacggcgatagggatggcctgctcactctgtctcttcaacaaagagatggtgatcggtttcggctcccgtaaagaggaatatgtcgacagtactggcgatcctaaagcgttgctctggaaagcgagaaagtttatcgaaacgctgcccgttgagtttcgtggtggctggaatgagaagaaaaactcgcggtttatgcaggtagagttccccgaaaccggggccattatcaaaggtgaggctggcgataacattggccgtggtgaccgtaccacactttatctggtggatgagtctgctttccttttgcgcccgcaactgattgacgcagcgctgtcgcaaacgacccgctgccgtattgacctctcctccgttaacgggatgggtaaccctttcgctcagaagcgccacggcggcaaaatccccgtgtttacattccactggcgtagcgatccgcgcaaggatgacgagtggtaccgcaacgaatgcgacaaaatcgacaatccggttgttgtcgctcaagagctggatctgaactactccgcatctgctgaaggtgttctcatccccgccgagtgggtgcaggcggctattgatgcccatatcaaactgggtatcaaaccgacaggcagacgccagggggctctggatattgctgatgaggggcgggataaaaactcttattcagcccggtatggtttcctcctggaggatgtccaggaatggtctggtaagggtagcgatatcttctcaactgttgagcgtgcgttcggactttgcgacatggcagccgtggaagagctgcgcttcgatgaagatgggctgggggctggtgctcgcggcgatgcaagggttatcaacgaacagcgcagagcgaatcgccgtgcggcaattctcgccacaccgtttcgcggcagtggttcggtatttgaccctgagggggaagcagtgccgggggacaacgcccggactgctcgcctgaacaaggatttctttgcaaacgccaaggcacaaagctggtggcatttacgcaagctgttccgcaacgtttatcgcgcggtggtagagggcaaaccctacaaccccgacgaaataatctctctttccagcagcatttcctgcctggacaaactggtcactgagctgtcccagccgacgttctccatcaatggcgtcggcaagatggttattgataaacagcctgacggcacgaagtcgccgaacaatgctgactcagtgatgatcaactatgcgccgatgaatgcggcactgaatatctgggaaagactcgggagacaggcttaa

SEQ ID NO: 76232 - DNA, 573 bp, Citrobacter koseri
atgactaagaagctgaaagcgaagcacgaggtgttttgccgcgagtttcttgtcgatctgaatgccacccaagccgtcattcgtgcggggtactccgctaagcgagcgcatgttacaggtgctgagctttacggtagaccagaaatacgcgcccgcatcaacgagctaaagcaggaacgtatcgaccagttgggcatcgacgcgaattatgtgctgatgcggctagtggagatcgacaagctcgatgtggccgacatcctcgaagacgatttaagcgttaagccgctctctgagtggccggagtcctggcgtcggtacctcagcgggttcaatctcgcggaaatgtttgagggccgtggggatgatcgagagatggttggcattctcaaaaagattaagtggcccgacaaggtcaaaaaccttgagctgcttggtcgccacgtctctattcaggcgtttaaagacaatgttaagagcgagataaccggcgctgatggtggtccagtcagaactgaaacaaccaacttaacgccagagcaagccgcagaggcgtataaaaaaatgatgggttag

SEQ ID NO: 76233 - DNA, 546 bp, Citrobacter koseri
atgatcaccatagccgatatcaaagcctcatggcgtctgatactgctggtggccgttattgcgatagtcgccgtgctgtgtgtcctgctggcaaacagccgctctgacgttgctacgctgaagagtgataatgacgttctgcgcagtgataacaccttacaggggacggttatcgctgcacaggctttcaacttcaaccggtttaaccaggttgccgaaaacgccagccgattaaactcactgattgatgccagctccgataaaaccgttatcgagtatcgggagatcctccgccgtgaaaaaacctgtgatctgcctgttcctgctgatgtcgctggtgggctgctcagctacgcgaacagtttacgtgccagcgcaatgcacgccgatcccggggacgctgacgcagccagtgatagcgccactaccaccagcgcgctgacgtattgccaggctgttctctggatcaagccgctgctggccgccatcgaaaaagcgaataaccagctggcgggcatccgtcaaatcgagcaggacaggcaatag

SEQ ID NO: 76234 - DNA, 531 bp, Citrobacter koseri
gtggcacaattgaaactgagtaagaaaagcggagcgaccgggattgtttgctcggtcgctacgattatcgcaatagtggtcaatgcggggcacgttcgaaccaatgaacgtggtctggagctaatcgggaatgcagaatcttgtcgacgtgacccttatgtttgccccgctggtgtgctcaccgatggcatgggcaacacccatggcgttaaacccggcacagttaaaaacgaccagcagatcgcggcggaatgggaaaaaaatatcctcgatgctgagtcctgtgtgaaccgctacgggaatggacgcaagctgtctgacaatactttttcagcagttgtatcggtaacttttcgtgctggctgcgggaatatgcgcacctccacgatgttctctcttctaagaagtggggacatcacggcggcatgcaaccagttccctcgctgggtatggggtggcggcaaggttcttcctggtctggtcactcgtgccgggaaagaagaagcgctctgtctggatgggctgaaatga

SEQ ID NO: 76235 - DNA, 321 bp, Citrobacter koseri
atgcaacgtatgaacccaacaaatggacatgacctgccgtactggtggtcagctgctttagggttgttctctttgcttagcctgcaggattacgtatttattatcggtgccctcgtatcggcgtttttcacgataaaaacttattacgcaaaacgcaaagaagagcgtgagcgtatggcagaggaaagaaaaagaacccagctgctggcgaactatctatctgatgtaggtaaaaaaccccactccgatcgtccggctgcagccgaggttgtaacggaggctatgcggagaatttccagtggcacaattgaaactgagtaa

SEQ ID NO: 76236 - DNA, 615 bp, Citrobacter koseri
atgaagtcgttttatcaggaactggaacgcgggctggtgtttctgcctgagctggggatcggtcgatttccggtaccgccagcaaggccgtataactcgcaatattttgcaaagtatcaggcttatgccgatacggagaccgggcatgcgctgacgcaggcgcgtatcgatcttgtagctcgccattaccgcggtctggtactcgatgtgggaatcggggccggacagttcgtgtccacgcgagcggaaacggtgggctacgacgtcaaccctgctggggtttcctggctgaaggataacggatgtttcgttgatctctacgctgaaggcgctccagcgctgacgttctgggatagcctggagcacatcgacgacccggtttgcgcagttcagcaggccggacagttcgtgtttgtctctatcccgattttcaaggatgccgaagacattctggcatcacaccactacaagaaagatgagcatatctggtacttcaccgatgagggcttgcggcgctggtttgcggagcagggcttcgaatgtgtggagcacaatgagatcgagtgcgagctcgggcgcaaaggggttggtacttacgctttcaggcgtttctga

SEQ ID NO: 76237 - DNA, 897 bp, Citrobacter koseri
atgctgaatgtaccccttttcattgagggcatgctggggatgggtgacaacatctaccagcgtgctttcgtccgccagctgccagctggctcgtttatcaaaacgccctggccggagctgtacgaggatttacccgtccgcccggtgcgcagcaacacgacgctgagaactcagcggaagaacgagcaccgcacgcaatcggtattccacccgctgccagatatgcgccagacaaagcgcattttctacgggccagaccatctgcggtgcgggtcgatattcgacgcaatgcgccagcagttcggcacggagccagcagagctggatctcccttccttcggccctgcggagtttacgcacgaaaagccgattgcggtcatccgcccggctaccgtccgatcagaatggcgcagcgattcgcgcaatccggaccctgattacctgctgaaggcttcccgcatcctgcgtaagcatttctgcgtgatcagcgtggccgatttgcaggacggcgaggaatgggccgtcggcgagctgccagaagctgatctgcggcttcatggtggtgagcttggtttcaaatcgctgatgcgccttgttgagcatgctgctgtggtggtaacgcctgttggctgggctctgcccgcagcgattgcctacaaaacacctgtctacgttgtagcgggcgggcgtggcggccacaacgccccggaaatcgttaccgatccggcgatggacctgtcgcgggttggctgggccatccctgacaactactgccgctgtgaagagtgggaccaccactgcgacaagcggatctcccatttcactaacaaattagaggcctggctccatgaagtcgttttatcaggaactggaacgcgggctggtgtttctgcctga

SEQ ID NO: 76238 - DNA, 552 bp, Citrobacter koseri
atggatgcggcaatcatctgcgcttcaggcccctccctcactatcgctgactgcgctgcggcatgcggttctggcctcccggtcatcgcggttaactcatcatggcgtgcggcaccgggttgcactcacatctacgcgggcgaccttcgctggtgggatatgaacatccccgcgctacctgatgggcctgagcgctggacatgcaaccgcagggcgcacaccaggcatggtctgaacctcttcccgactgataccagtggcacgtttaattccgggcagagggcgattctgtttgcccactggctgggcgcaaagcgcatcatcctgctgggcttcgactgctccatcacaaatggcagccactggcatggcgaccacacctgcctggacaacccgacagcggcgaatgtgaagcgctggcacggagagtttgctcgcgtcgcgcagctgcttcgcgggaaggtcaatatcaccaacagcagccgccagacggcgcttaactgctttcggcgtcagtcactcgatgaggcgctacgcgaggccacatgctga

SEQ ID NO: 76239 - DNA, 435 bp, Citrobacter koseri
atgcgtaatattcaacaggttttagagcgctggggcggctgggctgccgatagcaacaccgcagtgagctgggctccaatcgccgccgggtttaaagggctggttgtcagcagttcgtccagtaggctgagttgctgcgatgacgacgggctggttatcgatgcctgcgtctgtcgcctgcagcagatccgcaagcccgaggagctggacgtcatcatgctgtactacgtctacgggttgaccaagcgcgagatagggcgcagggctaaggtttccgaacgcgaggtcagacgcctgatggcaatggctgaaggctttattgagggttgtctgtgcatgctgggggtgcgtctgcagatggatcctgaggtggaaaaacaacgaattgaaaaaagtgttagtgcgggccgcaaaaagtgcgctacgctggtatga

SEQ ID NO: 76240 - DNA, 2169 bp, Citrobacter koseri
atgccagagaaaaagatctggggggcgacgcctgacgaatggttccacttcgatctggtgctgggccgtactgaccagctgctgccggtcgtgtgcaacccaggcgcgaccatatccccgaatagcaaactcaaaatgcttggcaagacgccaagcctgtataaccgcgaccgcatggctaccgggatcaaggactggacagagcacgtcgtaaccgagcatgactttgcccgctggtcgaacgaaccggattacggcatctgcgtgcgcacgggccacggctggctggcgctggactgtgacagcgaagacgaagacatccaggctgatattcgcaaaacgctggtgcagctgtttggcgagctgccgccgcgtcgctggcgcgccaacagcaacaaatgtctgtacctgctggccgtagagggggatttccgtaagcgcatccaccgtctggcgggtgatatggggattatcgagctgctggcaaacgggcagcagttcgttgcctgcggtacgcacagcagcggcgcgcgtatcgaatgggacggcggtctgccggacgagcccccagccattactgcagaccagctcgaaacgctgtggcagcgcctggcggatcagctgcctgtatcggttaccaccgaagcgggcagcacgaagatgcgcgaccgttcaaccttcacgcccggcgccacggatgatacggcggaatatctcgatgccaatggctggacgctgctggacggcgcgaacggcgagcgctatatccgctgcccgttcgaagacggccacagcaccggcggcgacccgacgagcacggtttacttcccgggcggtaccgcgggctttgagcagggccattttaaatgcctgcacgccagctgcgcacaccgcgacgacggcgatttccttaatgccatcgggatccgcaacgacgatttcgaagaccttaccagcaccgaagtggccgagccgttaccgctgccggcgttcgagcgtgacaaatggggacgcatcgaggccaccatcagcaacgcggccaaagccgttgtgcgtcctgatttcgtggacattgatattcgctttgaccagttccgtgacgaaatcatgttcgcccaggctggttccggccagtggcaggcgtttactgatgcggactatgcgcgcctgcgcatcacgatggaaaagcgcggctttaaacccgtggggcgcgagctcatccgcgacgtggtgctgctggccgctgacgaacagcctttcgactcggcgaccacctggctgaacgggctggagtgggacggcgtgccacgtatcgaaactttctaccatacgcacttcggtaccgccgacacgccatatacccgcgcggtgtccatgtacatgtggacggcgctggcgggcagggtgctggagcccggcgttaaagccgatatggtgccgatcctcgtcggtcctcagggctgcggtaagtcctccggcgtggaagcgctgagccccgacccggcgttcttcaccgagatctctttcgctgagaaagacgatgacctcgcacgcaagatgcgcgggcgtctggtggcggaaattggcgagctgcgcggactcaacaccaaagagctggaaagcatcaaggcattcgtgacgcgcacgcatgaaaactggatccctaaataccgggagttcgccacacagttcccgcgtcgcctggtgttcgtcggtaccaccaacgaggacgagttcctcgccgacaagaccggtaaccgccggtggttgcctgtcgaagtctccagcgtcgatgtgcaggctattaagcgcgatttgctgctgctatgggctgaggcccgcgagacgtttaagcgccttggcggcatccagttccgcgatgctgagcggctcggtgcgagtgtccacgagcagtacaccattaaggacgcgtggctcgaaacggtcgagaaatggctcgacacgcctgacctgatgactaacgacattccgcgaaattgcgaatttttacgcgctagcgacgttttgcgtgatgcgattggcttaaaccccagccacatcggaaaacgtgaagaaatgcgaattagcaatgttttgcaaaattgcggttataagcgcgttcagcgtcgtgttgacgggaaagtcttaaaggtttgggtagcggcgtaa

SEQ ID NO: 76241 - DNA, 219 bp, Citrobacter koseri
atgaacaatctaaaaaaattgagaaaagaagctggcatatcgcaagcagcattggcttctgttctcaaggtatcgcagggtgcggtagcccactatgagaagggtatacgcaagctgaatgttgatagcgctaaaaagatcatcgaagcgttaaacgcgaatggggtgagatgcacatttgaagatgtgttcccttccaaaacatccaaaaaggcgtaa

SEQ ID NO: 76242 - DNA, 639 bp, Citrobacter koseri
atgaaagagcttggcatctctcaggagcagctgggcgaaatgctgggtaaaacccagggagcgatcgcacattggttaaatgggcgacgcgacccgggtatcgacaacatagccagtatcatgcgagcgttaaaaatagacactattaacctcatgccggatggaagcgttacaacgccagtcgccacaccggatgaagtagaacttgttggaatattaaaatccggcttaatccctgtagtcggtgaagccgtgatgggaactgatggagagtttgaaatgcaggaagtgtcacaagggtggctccgcatttacagttctgacccagatgctttctctgtaaaagtaaaaggcgatagcatgttcccgcgcatcaattctggagagttcgtagttgtcgaacccagaacacaaatctgcgcaggtgatgaagtgtttgtaagaaccaccagcggaaagaatatgattaaaaagctggggtaccatcgagataacacctatcagttcattagcgttaaccaacaacacccgccactcacaattgaagactacgaagttgaaagcatttacttcgtagccgctatcgtaaaatctaccagattcatggataacatcgctgatcttaacgcatcggcataa

SEQ ID NO: 76243 - DNA, 150 bp, Citrobacter koseri
atgaaacctgaacacctccaccggctgacggggcgcgacgtgctccgctggcgccgcaaacatttcgacatcttcaccggtctggccctcgctactgcgttcggcctggctattaccttcattctccttgtagcgaggaccacagtatga

SEQ ID NO: 76244 - DNA, 879 bp, Citrobacter koseri
atgagcttagaaacaaatctggaacttaataaccagctggtaacccgtaacaacgaattgctggaacgccttatcaccgcgctggcctctggcgtacctctccgcgcggacaccgtggcgcaggtgcaggaataccgcgaaacggtgccggagacaggaggcggttctcctactctggatgatctgacattcagcgacgtaattgcgttggccggattctatcccgaaccacaggccatcagtctgaccatgttgcagcgcgcgatcgattaccgcgacgccgaaggcgataagtgcgttgtgcagatcgacgcactggacagcgctctgcagggtgttaaacgcgcaaaagaagttcataacgaggtgctgctccagctgtcgcgcgacatcatttcgtactgggatgaccttacaactatcgccgagcgacgcgcatacgctgaaacatggctagatgcgaagccgggcgagcgtgacacagtgaagccgaaaaagaccggcaacaagggtaaacaggagcgtaaaggcccgttctactggaaacatccagaaagtgattcttttggcagcgttgaagacctcggcgcattgcatgaaatccttgaggatgggttgactgttgagatcaacaaagtggagttcctccagctgcaggaagctgccagcaaagataagacagaaacggataccgaccagcctgattttgcggcgctgcgtaaaaaggccgaagggttgatcctccagctggcgaaaggtggttaccgtgctgaagctgtcgccattctggaaaaacagggtgccaaaaaactcggcgaagttgctgacgagaacctctcagacgtgatcgctcaggctgaaaaagcgctggagggttaa

SEQ ID NO: 76245 - DNA, 1302 bp, Citrobacter koseri
atgccagacgttcacgcacgactttccccgtcctcagcgcatcggtggatgcgctgccccggcagcctggcactagaggccactcagccagacaaagaaacgtcttttgcgcttgagggtaccgcagcccacgcgctgggcgaaattgtcctccgcaaccggcttgaacgcccggtggattaccctggctgcaatgtcggaacttacctcggcacctacccgctggcgcatccgtcaaaaacggatcccggcccgcaggtggatgaagaaatggtcgaagccgttggccgttacgtcgacaccgtctgggcgctgtcgcagggcaatgaactgcttgtcgagcagcgtgtcgacttctcccatattgtgggggtcgaagaatcattcggcaccgccgacggcgtaatcatcgcgggcaacgagctgcagatccacgacctgaaatacggtaaaggtgtacgcgtcgatgccgagcagaacgagcagctgcagctgtatgccctgggcgcgctcgaacagttcagcatgctgtacgacttcgaaacggtgcgcctgttcatccaccagccgcggcttaaccacgtttcagagtgggccctgacggtggaagagctccaggcgttcggcgaacgggcgcaggaagcagctgccagcgtgatcgtgatgtttaacattgccgattgcgaaggcgtcgaaaccctgccgctggaaaactttactccgggtgaaaaacaatgccggttctgcaaggccagcgccatctgtaccgcgcggcagcagttgcacttcgacactatcgctggcgatttcgtcgacctgacgcaacctactggcgagcagctggcggaagcagttaaacgtgtgccattgctgaccgccgaacagctggcagaggtatacagccaggtcgattttatcgaatcgtggctaaaggctgtgcgcgaccgggtgaacagtgagctgaacgccgggcatccagtaccgggctttaagctggttactggcaaacagggtaaccgagcctggagtgatgaagaagccgcccgcgcgctgctgaaagaccagttccgctataaaactgaggaggttttcgaccttaagctgattagcccaaccaaagccgagaagctcatcaaaaaggccagccctcgccgctggacgaaagtcgaagcgctgatcacccgcgctgacggtaagcccaccgtcgcccccgaatccgacccgcgccctgcgctcaatatcaaccctgttaacgatttcgacgacgtatccgacgacgcgctcgtcgcagacctcatctga

SEQ ID NO: 76246 - DNA, 549 bp, Citrobacter koseri
atgaaaattaaactgaacaacgtccgcctggccttccctgctctgttcgaagcaaaaaccgtgaacggtgaaggtgacccgcgcttttctgctgttttcctgatggacccgaaacaccctcaactggaagaggtccgcaaagcgcttaagcaggtagcgaaggaaaaatggggggagaagtgggaaaccatttacggccagctggagaaaaaactcaacctctgcctgcacgacggtgacgaaaaagccgaatacgaaggcttcccgggtaacttcttcctgaacgctgccaacaaagcacgcccggcagttatcgatcgcgaccgttctccactcatccaggctgatggccgtccttacgccggttgctacgtcaacgcggtaatcgacatctgggcgcaggacaacaacttcggcaaacgcgttaacgcatcgctgggcggcgtccagttcctgcgcgacggtgacgccttcgctggcggcggtgtggcaagcactgacgatttcgacgatatcagcgaaggcgcagacgcgggcgagctgatttaa

SEQ ID NO: 76247 - DNA, 426 bp, Citrobacter koseri
atgtttggtatcttcaaaaagaaagcacgtaaagccgttgttgaagttaagaaaatggaaaaccgcgatgcggttgaggcgactgtatggggcgcttactccattgcgtacgccgatggtacctgcgacgcgaaagaaatcgccacgctggaaaaaaccatttcggcgttgcctgccttcgcgccgttcgccggtgagatcgcacagatgagcagtaatattcgtgctcgttacgaagcttcaccccgctctgctaacgctcaggcgctgcgtgaactggctgatgttgcgggtacaaatgacgctgttgatgttctttgcctgtgcctcgatgttgctgacaacgacggtatcggtgaagaagaagagaaacagctgaagaaaatcgcccaggcgctgcaacttccattggaccagtacctgtga

SEQ ID NO: 76248 - DNA, 2067 bp, Citrobacter koseri
atgtctgaaaccattctctggggcgacctggaaacctactgcgaaatacccatcacgaacggcacgcacgcttatgcggaaggtgtcgaggtgatgctgttcgcctgggccatcggcgacgagccggttagcgtctgggatctgactgctggcgaacctatccctggcaggcttcagaaggctatcgccgaccccgataccctgctttatttccacaattcgcacttcgaccgcacggtactgcgccatgcaataccgcggctggcccctgatgtaacacgctggcgcgacacaatggtgcaggcgctggcgcacggcctccccggcgcgctgggcgcactctgcgaggtgctcggcgtcccgcaggacaaggcgaaggacaaagaaggtaaagcgctgatccagctgttctgtaagccacgtccgaaaaacagcaaactgcgccgggcaaccagcaaaacccacccggaagagtggcggcgctttgtcgcatacgccgggctggatatcgaggctatgcgcgaagtgcataagcgcctgccaaagtggaattataagggtgcagagctggcgctatggcatcgtgaccagcagatcaatgaccgcggcgtctgcatggatgtggagctcgcgcaggcggcgatcgaggcggtagacctcgaacaaaaacgcctggcgaaacgcacgcaggtgatgaccgacggcgaagtgcaggcggccacgcagcgcgatgcgctgattaagcatattgttgaatcgtacggcgtggagctgccggacatgcagcgcagcacgctggagcgccgtatggcggatcctgatttgccgtctgcggtgaaagagctgctggctattcgcctgcaggccagcaccaccagcaccagcaagtacaaatcgctgatgaagggcgtgagcagcgacgggcgtctgcgcggcacgctgcaattctgcggcgcatcgcgaacaggacgctgggccgggcgattgttccagccccagaacctgccccgcccttctcttgagcaggaccagatagacgagggcatcgaggcgctgaaagccggatgcgccgatctgctgttcgacaacatcatggagctaaccagctcggcgctgcgcggctgcatcatggcccccgcaggcaaaaagctggtggttagcgacctgtcgaatatcgagggacgaaaactggcctggcttgccggcgagcagtggaagctggacgcgttccgggagtacgacgagggaaccgggccggacctctacaaactggcctacgcccgcgccttcaatatctcgccggatgatgttgataaataccagcgtcagatcggcaaggtgatggagctgggcctcggcttcggcgggggtgttgcggcatttcttaccttcgccctggtctacggtctcgacctcgacgagctggcgaacgccgcgctgccgaatatcccccgtgatgtcatccgcgaggcgaaaagctggtacgaagaatcgtttaaacgtaaggcgacctacggcctgtcagagcgagtattcatcgcctgtgactcgcttaagcggctgtggcgcagagcgcacccggcaacctgcgatttctggtacgagctcgagcgcaccgtccgcaccgccatcgctacacccaaaaagacgctgtactgcggctatcttaaagtccgccgcgatggcgcatggctgcgcatccagctgccatccgggcgcgcactctgttacccgtctccgtccatcgagaagggaaacatcacctatcagggcgttaactcctactcgcgcaaatggcagcggctcaaaacctacggcggaaagctggtggaaaacgtcactcaggcggccgcccgcgacgttctggccggaaacatgccgctgatcgaggacgccggttacagcattgtgctgacggtacacgatgaggtaatcaccgaagcgccggacaccgacgattttaacgataaggcgctttccgcgctgctctccactaaccccgaatgggcgcccgatattccgctgaacgctggcggcttcgaggcgtaccactaccgtaaggattaa

SEQ ID NO: 76249 - DNA, 216 bp, Citrobacter koseri
atgtcatttaaatatcgggacagtccgctttattaccggactgcgcgggaggctttgcgccttgagcagtccggcgagtatgaccgggcggcgaaggtctgggccaaagcaaaccgcgaatcacgtaacgaactgaatcaggactggagcgaacgccggtctgatttttgcctgatgcagaacatgcgcgaaaagcgtaaggcggtgaacgagtga

SEQ ID NO: 76250 - DNA, 189 bp, Citrobacter koseri
gtgaaaacattaatccgcgttcttctctggattggcggaatttcgctgtttgctctgctggtttgtttcgctggtgagcacgaccgcgaagattgtgaggttcggattgccaaagagctgaacaccaccgccgtatacattaacggtcattgcatggtcaaaggctacggccgcttcgacgggagatag

SEQ ID NO: 76251 - DNA, 294 bp, Citrobacter koseri
atggcctacgaacgtgaaagccttatcgaaaagcacctcgtcaccgaagtgaaaaaggctggcggggtcgcctttaagttcgtgtcacccggtcgccgctcggtaccggatcgcattgtcttactacccggcggccgtctcgtctttgtggaatgtaaagcccccggcaaatcaccacgcgccgaccagctgcgcgagcacgaacggctccgcgcgctgggctttaccgtggtggtgctggatagcaaaaatctggaggggatattgtgcggggagcctattacaacgaaatag

SEQ ID NO: 76252 - DNA, 969 bp, Citrobacter koseri
atgtcgcaccagacgacttgcgcggcttcacacagtgccatttcttcgccgggatcggcgtctggtcttatgctctgcgtctggccggatggccggataacaaaccggtctggacaggaagttgcccgtgccagcctttcagctcggctggtaaaggcgctggatttgatgacgagcggcacctatggccagcactattccacctcatcagcgagcgacgccctgagctggtatttggcgaacaggttgcgggagtcaatgcctggttcgatcttgtacaaactgacgtggaagcagtggactacgcctttgggcttgtcccgtttccggctgcgggcgtcggtgccccgcatatccgagacagagcatattgggtggccgacgccagcggcgagcgatcacagcggtggcggaagcgcctcgatagcactgaggaagatgtccggagatcgtcgaccatccggcaaccccttacacagttccctaagggattttgcccacctggcgggatggtacacgccaacctgcaacaccaatccacagccggagacaaaacgcggtctggaaaccttagcgggtctatccagacttgcgggctggccgagtcctctggcgagcaataccaaaacggcctatcaggatgcagagaaagtaatagcgcgtcagcaggcaggacggcagccgaacctgcaggattatgcctgcctgagcggatggccgacagtgacgacgatcgacaacaaccaggttcggggcgagggcgcagcggccaatcataccgaacggggaacgaccctcggcggcgcagcgagaatctgcggcccaatacgattaacggctgctgggatgatgctgactggctcctctgccgggatggtcgctggcggccagttgaacccggcacattcccgctggctcatgggattaccagcagagtgggacgactgcgcgcctacggcaacgcgatag

SEQ ID NO: 76253 - DNA, 1401 bp, Citrobacter koseri
atgacctcatctaaaatatttactccccgcccttatcaagacctgatcatcaaccacgaaatcgacattcaccgctgcaacatatgggcgggcatgggtatgggtaaaaccgtggcaacgctcactacgctggaagatctcttcatggcgggcgcagagacacagcccgcgctggtcctcgcaccgctgcgcgtagccgccagcacatggccggatgaagcggttaaatgggggcatctgcgcaatatcgaggtgcagccgattgttggtaatgccaaagcgcgcgctgcggcgctggcgaacagcaacgccagcgtgtttaccatcaactacgacaatctggtctggctggtggaggagctgggcggccgctggccgttcggtaccgtcattcccgacgagagcacccggctaaaatccttccggctgcgcgggggcggtaagcgcgcggcggcgctgggcaaagtggcgcataagcacatccggcgctggatgaatctcaccggtacgccagcgccgaatggcctggtggatttgtgggggcaagcgtggtttgtcgaccaggggcagcgcctcgggcgcacctacggtgcgtttacctcccgctggtttaactcaatacagtttccggggcagagctggacgaagctggagccgttcgcacactcgcaggacgagatacagcgggcgctggccgacgtcactatctcactggacgccgccgactggttcgacatcaaagagcccatccataacgtgatccgcgtggatatgccgccaaaggcccgccagcagtatcgcgaaatggaaaaagaaatgttcctcgaactgaacggcgaaggcatcgaagcgccgaacgccgcggcaaagacggtgaagtgtctgcaaatcgccagcggcgcggtatacaccgacgacgccgggagctggtcagaactgcacgacgcgaagctgcaggcgctggacagtatactcaccgaagcagctggcgcaccggtgctggtggcctaccactggaagcacgaccttgagcgcctgcttaaagcgttccctaaaggtcgccatctcgatcaggatccgcagacgctacgcgactggaacgccggaaaagtcccagtactgttcgcgcatccggccagcgcaggccacggtctgaacatgcaggacggcggcaacatactggtgtttttctcgcactggtgggacctggagcagtaccagcaaatcatcgaacgcattggacctacccgacagattcaggccggacacaaccgcccggtgtttattcatcatattatcgctgccgacactatggacgaaatggtgatggagcggcgcaactcaaaacgaacagtgcaggacatcctgctcgatgccatgaaaaagagaggtatagcatga

SEQ ID NO: 76254 - DNA, 201 bp, Citrobacter koseri
atgagcgagcaacccgacgatctgctcaccccggacgaggtatgccagaagctgggcataacccagaagacgttatgcgactggaatataaagcaccggcatcgcgccgtactggcccccatccgtttcagcgcaaaagtggttcgctatgagcgccgtaacgtcgacgccttcatccagaaatgccgtagccagtattaa

SEQ ID NO: 76255 - DNA, 1398 bp, Citrobacter koseri
atgccgcgcactgtaacacataaaccggatagccccaataatgacgatgttttagccgcatctgaaaaatgggatgcctgtaaacctccctataccagcgcacacatgaaaatctgtgttgctgccgccaaaatcatccttgccgcttccggtgtggctcgccgttccaaatacgaaaaggagaactatctccgtatcgatttcagcaaagccggtaaggttacattttacgccgagtttccaaaaaagatggggctcaaaggcaaaaagctcggcgagtggccggagcttgccatccagctggcgcgcgaaaaagcgttaggtatggctgaaagcggcttgcgagctgagtccgtacatgcagcgctggaaatgtaccgggatgacctcaaagccaaagtcgcccggcagaagttaagcccggatagtttcaccacctacggggtgcgtattgaccggattaaagcaacgttcggcccgcgggaagtattcagcgatgtgacgtacactcggctggtagaagtactggacgagtggatcgccacccgttcgaataataacgccctggagttgtttgccgagctccgtcggttctggaagttctgcgcacctacgctttgcaatggccgcaacattgccgccagcctgcccgacgattatgtatcttctcgcgtgcagaaacctaccccaacccggctttttaccgatattgaatcgatcgcccggctctggctcaatgtggccgcctgtacttctgtacaccagaagaatgctgttcgcttcatgatcatcaccggcgttcgtccgattaatgtccataacctgcgctgggactacgttcacgaggatgctggcgaaattgtttatccggaaggggttatcggtatgcgcggggcaatgaaaacacaaaaggctttccgcctgccgataacgccagagatccggcggattatcgacgagcagaaagcctggcgtgattcagttcctgagtgcaataacgattttgtattcctgcagccgcgcgacccaatgcagccattttcaaaacgatcgcttgataagctggtgaaaacgtacagcccagaaggtgcggttaaaggtatgaagcatgacgggactattaaagggagagagggggcatttaatacgatgtgccgcaaattccttaagagcaatgttattgccctgatgaaggaaagaggctattcccgatcagaccgaagggaaatcagcctcttgtgccttcaccattccagcaagtcagatgacccgatggcagaacattacgacttttcagatgagattttgcaggaagagattgcgttgaagcgcgaagccttcgaggctcacgaacggagtatacttgcgcaggctgcgctgttgcggcgacggggttaa

SEQ ID NO: 76256 - DNA, 132 bp, Citrobacter koseri
atgctgagtgtccgctgtgagcgatatgcggacattactaacagcatcctgtgtgaaaccacggggagcaggtcaccgctttccaacccgttatttcagcgtgccaaactgtttgttcttcagtgcatatag

SEQ ID NO: 76257 - DNA, 879 bp, Citrobacter koseri
gtgaaactgaaaatgcaggatttgaggctgtttaatctcgtgtttgagagcgatcctggctggatactggatttctctaaccgcaccttgtctgctttttttgatgaagaactaaacattgatattgatgatgaacgttatcaggaagaggggacgtcaaaagccaaacgagttagatgcttgctgaaacagactgatcgtgagactgctctgcgggttcttggcgctctctggcagtataaaacggaatccatgcctggacaggctgaacaaagccgtaatgactatcttgcactgatttctcgcttagaaaacgctgaaaccgatgaagccaaaggcgtaaagcctgtccaggcatggcatggtgttgactggccttcacttatcgctgaaatgaacgagatgaaatctatgccgccacatccccgtggttttcggtttgaagcctggcttgctgaactgttcagtatctttaagcttgctccccgttcgtctttccgaaatacaggcgaacagattgacggaagtttcagactgaatgatgaattttacctgatggaggcaaagtggcatcagaaacgaacgtcggctgccgatctccatgtatttgaaggaaagctcagtaccaaggcaacctggacacgcggcgtttttataagctggatggggtttacgtctgaaggtctgacggcttttggtaaagggaagcgtgttatctgtgtcagtggttatgatctttaccactcactgagtcatgggatccctttgcccgaccttctggacgctaaaacccgacacgcagctgaaacgggagagccctatgctgagttcgaccgactatatgcactgaagaacaaacagtttggcacgctgaaataa

SEQ ID NO: 76258 - DNA, 1392 bp, Citrobacter koseri
atgactgatcacgtttctgaaagtgttttatatgaccacctggcccttttcgggcaggagcctgagcttgccacagaagatgctcttcgtgatgagataaatcgtgctatggcaatcctggctccacattttaaaaccggacaatcttataaggatgtggatgaccttaaaaatcaccgcaactctgtacgttctctgctcggcccagaaatcgcaagggtacaatattcaaaccataaaaatacgcagagcgacaggcgtcttgttctcctgatggcacctctcaacgtgttggccaaaaaatggcgtaagtcatacgtgttgaaagatgatcctgcttactactcattgggctattacgatttccatgacgacaggcagcattacagcgcgatcgcttctgagatgtttgaaacctatattgcgaatcacggcaattttatgcgtcttgcacaagaaacggcgggtgctatggaaagcatggtcgtcgaaatactgcgtatgaagcctcgtgttgataatgattatgatgctccggatgcaacttatctgaccggtctgtcggacaccttacagtttcttgataggatgattgatgcagtgctggaaaaatacacggtgaatactcactccgctgcggatgaagaaaacacgctggctttctttaagcacgtgtgcaagaacgcagggctacacgtcctcatcaatgaaggcatgtatttcatcaaagagagtgaagagttcgaaggtagcgtctcagcatatttgcattggcgtaaagaccaggaatctttctcatcgccaaaagcaggtagtgaagaaatgatgatcgcaacatgtattgctgtcattcatgcgcttgaaagaagcgcggggggcaactggtgtgctcaattagaaaagaacatgaatcccaaataccttgggcgtgtcgccgattttgtacgttatttacgttatgcgaaaaatgaagataactcacctctgagccttcagctacttcgccgtggagggacgtctaaggggctggccatttacagcgcgttgatggatatgggcaaccttatctatcggaaggattttgatgaactggcttcaagagcgattgctgtgcttaatgagagaaaactgcatggggagttgcgtaaatacgtcggcaatatttttagcgtgatgagttgctgggaaggatttgagtccgacattagtgctcaaatgtcggactattgtgtcagcagaaagctctcatggacttatcgtaccggctttattcggaagctgttgagacttgattacgtccagctgcagcaatttcatcaagacattgctcctgtgatgtatgacgaatgtgcccgcctggagtccgcgctagaccttaaattgatgcattga

SEQ ID NO: 76259 - DNA, 333 bp, Citrobacter koseri
atgaaattaactggtagcatgacagtccatgtcagtcactccagcactgatgaactgattgaatcgttcaatgttgaggctcgtgagtttgggcttgaagaaaccggcgtgagaaattacgacggagaaaaggggtatcgtgggttatacatctactttaaccaggagtacggcttcgatgtgctggttgaactcgaggagatgaatcatcggatcacagagtttgatctcagtatccgcaatgataatggtgtatgccgcatcgcggtcgatactgattaccttactgctcatccttcttcatccgactatgaagacgatgaatggttttaa

SEQ ID NO: 76260 - DNA, 165 bp, Citrobacter koseri
atgggcacaccacgatttacacctgaatttaaggaagaagccgtccgtcagataactgaacgcgattatccggccttcaatacatgtagtgaaggccggaagggattaacacagattaaaaccattcatcgtcttcatagtcggatgaagaaggatgagcagtaa

SEQ ID NO: 76261 - DNA, 1530 bp, Citrobacter koseri
atggctgataacgagaaaattgttagggcgttgtacacgattcttgaagattcattgtttttaggtgatcggcttacgaagagcgagtttggacttttgatgcagccaggccaatttgttagtactcaattaagagaaactgacagttctgaggacatggctattcaggccgagttgatagatgatattatggacacgtctttcttatttcgtccacaaattggtactgtaagtcaaaaatactttgaagtccttgaatatgcagcattgcctaaacggaatttgtctaaagctgagctaaaggaagttcaagatattagggattggtctcagcaatatttgccgctttatgagacatatcgtgatcgatattttgacgctcttgatgcttacgaggctgaagctagtgcacaaacgcctaatgggtcaaggctacggcgccttgcaagaaaacgcgatgatgcgcttcaggcatgggaaacatttgggaaaaggcaagactgggatataaagcaaggtcggttaaattatttgctttctggtaatcctgaagtaatgtggaatgaattcaaaaaaagaatgaatgcacattttaaaacagctccacgccgaggagattattaccagacttttctagttccttccattgctcaatgggattccgcgaatacgtcatgggcaaaatttgaaaaacaaatagacgcatcgtctacctataattactcgaaatctacctcttggagtggtggtgtaagcggaggctgggggctgtggagtgcaagggccggaggcggtggttcgacaacttacacgagagaagtttcagatgtaacactgattgttgtaaaatttgaatatataagggttcgtatagttcgtccttggatggtggaggatgtatttgcatcccgattttggacgtggaaaaaaggttctgggatggggccatacttaagtaatggtgggaatttagcaatcacaccacctgttcgtccgattgggacaatgccttttttgccaaaatatatgattgttgttaaaaatgtcgagttaacaggcaatttttctcaccgtgatgcaacgttcattcaaagccaaataaatgcatcggcatctgctggctgggcttgttttagtatttcaggcagttattccgaagcgactacagagcaaactgtaaatacttcgttcaatggaacaactatttctattcagcaacctcaaatcattggatttactgggaaactgttaaatagatcccctgatccactgaggtctttaccatggcaaggagatcaagagttccccgaggaaatgatgtttgaaaaaagtcttgaggatatcctatttactgaatatgaagactatttaacactaactcgacgagacaaaatcatcacatggagtgaggaacaggaaaaatatcgagaggctgaagaacagcaacaggtatcggagattgagaaagatcttgatgaaatgaggaaaatttttttgaaggtgcataagcatgtcaagcctaaaccttag

SEQ ID NO: 76262 - DNA, 1047 bp, Citrobacter koseri
atggtcttgcaaaacttaagaaatgccttcggcagttcgattaaggcgatttgcatccgttgccacgtaaaatactgctactttattgtcgctattctactattcggattgtcattcgcagctaaagcagatgaggaggtggatcgatatccggtatggctaccgcaatggctttgggatgttcccgaatatgcttatttgctaactccagaaaacaccatactgttgcgccaaaaaatttatacagcgtcgacacttgccgaaaaggttcctgactcaaaagccttagatgcagcggaacaagatgctacaagttcgattgcaagaatgtttagcacacgagactttaccgctgactcgtttatttccagaaatcaactttctggaatatcactagcagtccggattgatccgatgttttcagatgaggcaaaagagactatcaagaagggaatcgaccgctacctagaggttgctcttgaccccaaggttatagaaatcgcattcaatcgttcaacaaacatgcctactcctgcgcccattaagtatgaaatggagaaaaacgctccaaaacttgacgaacttgggcgccaaatttttacagaaaactatgcatttatggcgagacagcgcgtgcaaccccttgacactaaacagttcactgagcacctacgaggagcgcttcatgtttcaaatggagatccaagactccttgttatttctcaatacacaactcagatctggtggggttcatcttactacaactatttcgacaatccgataaaaaatcttgggcgagacacaactgcccagggctttctatatattagattgaactctgataagctcaaagaacctacggagggatggaacgatccagacttctgggcttcgaaaattggccatgaaatacttcacaaccttggttattggcacccggcatatacttcgattgaggagcgagaccaaaataacaaaggaaatagctgggctttcatctactcatatgagaaagccgtatacgataaactcaagggaaaaatttaa

SEQ ID NO: 76263 - DNA, 132 bp, Citrobacter koseri
atgtcgcgtggcctggaattactgattgctcaaaccatcctgcaaggctttgacgcgcagtatggtcgatttctggaagtgacttccggcgcgcagcagcgctttgaacaggccgactggcatgccgtgtag

SEQ ID NO: 76264 - DNA, 915 bp, Citrobacter koseri
atgaaaaaaggaacgacatccactccgcatgatgcggttttcaaaacgtttttatgtcaccccaacaccgcacgtgattttcttgaaatccatcttcctcttgcgctgcttgagctttgtgacttgagcacgctgaagctggagtccgggagctttatcgaggaggatttgcgcgcttattattctgatgtgctctggtcgctgaaaacgacagggggagatggctatatttatgttgtgattgagcatcagagttcaccggatgcgcatatggcgtttcgtctgatgcgttatgcgattgccgcgatgcaacatcacctggatgccgggcataaacgactccctctggtggtgccgatgttgttttatcacggtatcgacagcccctatccctattccttatgctggttggatgagtttgccgacccggaactggcgaggcagctttatgctgcggcctttccgctggtggatatcaccgtgacgccggatagtgagatcatgcaacatcggcgtattgccttgctggagttgatacaaaaacatatccgccagcgtgacctgatggggctggtggagcaactggcctcacttttggtgatgggatacactaccgacagccagcttaaagtgctgtttaattatatgatgcagtgcggcgatgcatctcgttttagccagtttattcacgaggtggccgaacgttccccccaacacaaggagagtctgatgacgatagctgaacgattacatgaagcgggtcgccaggagggtatgcagcaaggcttacagcaaggccaacgggctgaggcgcagcgtatcgcgcgtacaatgctggaagacggcatcgatcgcgatacggttttacgtatcaccggacttgctgttgaagaggttatcgcgctgaaccactaa

SEQ ID NO: 76265 - DNA, 1191 bp, Citrobacter koseri
atgaaagattcagttaagctcgacacgcagttaattatcgccggacgcgacaaacgttatacccagggagcggtgaacccggtgatccagcgcgcttcttcactggtgtttgataccgtgaaggacaaaaaatttgcgacggccaatcgtgcgaacggcgaactgttctatggtcgccgtggtacttatacccacttcgcgtttcagaaggcgatgagtgagctggaaggcggcgttggctgtgcgctctatccttgcggcgcagcggcggtgacgaatgcgattctcgcctttgtgcagggcggcgatcatctcctgatgaccggtgcggcctatgaacccacgcaggacttttgcaataagatcctgagcaagtttgatgtatcaacgacgtattacgatccgctgattggcgcgggcattgtcgatttgatccgcccggagaccaaagtggtgttcctcgaatcacccagttccatcactatggaagttcaggatgtaccgggcatggtgaaggcgatccgtgcggtgaacccggagattgtcattatgatcgacaatacctgggcggccggcgtgctgtttaaggcgctcgactacggcgtggacatttcaattcaggcgggtactaaatacaccatcggccattccgacggtatgctgggaacagcagtgtctaacgcccgctgctgggatcgtctgcgggagaactcttatctgatggggcagacgctggatgctgatactgcttataacggcagccgcggtttacgcacgctgtcagttcgcctgaagcagcaccaggagagcagtattcagattgcccgctggctgtcggctcgcccggaagtggcgcgagtgaaccacccggcgctgccggagtgccctggacatgagtacttccggcgtgacttttccggtagctctggcctgttctcatttgtgctgaaaaagcggctgaccgatgagcagatggcaaatttcctcgataacttctcgctgttccatatggcctactcgtggggcggatttgagtcgttgattctggcgaaccaaccggaagagctgaacagtatccgtcctgctggcgatgttgatttcagcggcacgctggtcagggtgcatatcgggctggaagatgtgggcgaccttatcgcagacctggacgccgggtttgcgcgtatcgcttaa

SEQ ID NO: 76266 - DNA, 1251 bp, Citrobacter koseri
atgtggtcacgactcgaaccctacagatcttcacttattttattactcgctctggttgtcggcggcttactaggtatttatgctccgacgtttgcaagtcaactccagccgataggtcagattttcctgaacctgttatttatgattaccgttccgctggtggggatcagcgtaatgtcttctatcgccagcatgaccgatctgaaacgtctgggacgcattatggcgattatctttatcgtctctatcgcgatggcttttattccggccgccggaattgtggcgctcgcgctctggtataacccggcgcagggggtgactatcgatctttcgcaatccgtgcaggcgggcagcggcaagatggattttgtcagtatgatcaccaccagcgactttatcggactgttttctaaatcgaatattctggcgctgatcgtgatggcgattatcgccgggatcgccattgggcaatcagaacaggcgggcaaacgtatcgcctcactgctggaagacgccaacacggtgatcatgaagattgtggcgatcatcatgaaggtggctcccatcggcctcggctgttacttcgctgcgacgatggccagtcaggactccggcctgttgctgacctttgcccgggctatcggcctgttcatggttgccacgctggtttactacatcttcggttctgttctttactcttacattggcggcgggctacctgcggtgaaggccttctggcgtaacgccattgaaccttcggtgaccgcgctggggacgtgttcctcgctcggcacgctgccggtgactctgcgtgcgggtaaggcgatgggcattaacccggaaatcgttgatgtctccatcccgctgctggttaacctcaataagggcggcgtggcgatgattgccgcattgaagattgtttttatctattccgttttaggcatggagttcaccaccgaaacgttcttcctgacgatgctgattgctgtactttcggcgattatcgtcggcggcgtccctggcggcgcattcctcggtgagatctttattgtcaccacgctggggttgccgatggaggccattccaatgctggtggtgctgggcacgattacggatgcgccagcaacgcttatcaacgtaattcatgatttgaacgcggcgcagattgtggagcgcttcgccggaaagaaaccggtgaacgctgatatcaacaccacggacgcagtagtcccggctttccgcatggattaa

SEQ ID NO: 76267 - DNA, 927 bp, Citrobacter koseri
atgaacacatccatttccctgaagcatttagagttttttatcaagattgtggattgcggtggattatctgaagccgctgcccagcttaacgtgtcaccttcagcggtaagtaaaagtctggcagcaatggaagatacgctgggtacaacgttaattaaacgtaccacccgcagtattaccctgaccgatgccgggcaatatttatttaaccgtgcgactaaattactcaacgagtttgatgaaaccttaaataccacttccggttattatcacagcccgcaaggtgaattacgcataacctgttcaattgcctttggatattcccgattagttaatctggtggataaataccgtactcaatatccagacgtgaatctctacatcgacctcaacgataattttgtgaatctgaacgaaacggatttcgatatcgctctgcgcatctccaccgcgccgccgcaaaactatgccatgcgcaagctggtgccgatccgctgggcgtggtgcgcctcccccggctatctggcgaaaaaagggatgccgcagcgtcgcgtcgagctggtgaatcatgattgcctggtctatcccggactcaccccggtgcttaaagtggcggacgagcaggagcgcctgcaccagttaaagctgcatatgccgatccaggccaacagcagtctggtattgctaaaatcggtgctggaagaccagggcgtggcttatctgccgacctacctgattggcgatcacatccagaaagaggagatcacgcctctgatgctcgacggcaccatcacctgcgaaacgcacgccctttatgcgctctatttcccgagtaaatacagcaacccgaaggtgcgttcgtttatcgattttctggtggcggaactgggaaccttgcctgcatgggataactggatcccgggatga

SEQ ID NO: 76268 - DNA, 423 bp, Citrobacter koseri
atgcttcaatctctgaaccacttaacgcttgctgtcagtaatttgcaaactagcctgacattctggcgcgatttgctggggttgcagcttcatgctgagtgggatactggtgcttatcttacctgtggcgacctttggatctgtctttcttacgacgtatcccgaaactacgtagccccgcaggaaagcgactacacccactacgcattcagtatcgcgccagaagattttgagccgttctcatataagctgaaacagtcgggaatgacggtctggaaagacaataaaagcgaagggcaatctttctattttcttgacccggatggccacaagctggagctgcatgtgggagatttagcatcccgactgacgcagtgccgggagaggccttaccctggaatgcgtttcggacctggaaaataa

SEQ ID NO: 76269 - DNA, 456 bp, Citrobacter koseri
atgcctgatatgaggttatttaaatcaaaaaataccaagcttgagttaagaatcaggaggccgttgtttgcaagagggtttcgttatcgattgcataatggtggtttgcctggaagaccagatatgtatttcccaaaatacaatgctgtcatttttatccacggctgtttttggcatgggcatgataacagctgccctatttctcacattcctaaaaataacgaatcctactggcaaaataaaatcaataaaaatcatgagagagatgttaaaaatcaagatattcttgcatctaaaaacatccgcgttctgattatatgggagtgtgcaataaaacttaaaactattgattttgtcgattttattgattacatcgatgaatggcttagaggtggggcgaattcaacacagatgagcgcaaaggaaccaatgccgacttttgagtttccgaagtga

SEQ ID NO: 76270 - DNA, 138 bp, Citrobacter koseri
atggatgaagatgaacttcattattaccatatgctgctgtcggagagtatctccagcgatgaagccttttatatgattttttactatcatcgccttcttctactgactggaatcttgctaaaccggctcgggccgtaa

SEQ ID NO: 76271 - DNA, 1074 bp, Citrobacter koseri
atgaggataacggcatcgaatctggttcaggcgatttcgagcttacccaaaaatacgctgtttaactatataaacgataggaatagcgggaagattgagattgtacgtatccaacatcccgaaggtcctatcgaaataaagagatttgatcccaagaagggtcaaactcaagcaacagccaaaacagagagtatttcgactcaaatgctttggcgacttgcaaatgcactagaagaaaacagacctgtcaacgttgaaagggttttcggtgccagttacaacacccgctcggtattggagagcttgctcgcgcatactccagagttctattggtgtaggccagccagactggaaatcatgaatgcacaaaagtctataaagccaggacataagcatctgatttttctgcccgatatgccacatgctaatggtttgttagttgagcaccagactaatattgtcgtctctgaaatgagcttcgatgttgttcaccaaagcgtcgatattgagacaataaagccgactaaaggcatgactattgaagaaaaaagacgtcatgctcagatacaaattgctttagtaaaaataggttattgtttaggtttagatacttgggtagcagccaatgatcgtagcttgcaatataatggtaaagctatagcccaaatggacggtgtaataaattcattatcagatgaacaagtactgcaatcatataatgatgcaattaaagatgcccgtctaatagactgcatttggtttagggaaggtcgcatgatgccagctgtaatggagattgaacacagtactggtataaaaagtggacttactcgcatgaaacaattttatgatcatgctccgaggttacaagatatccgttggactatcgttgctcctgatgaatatagggcaaaagtaatcgagtttgctaacatgccacaattccgtgacttagatgcccgatttttcccatactcaagtgtagaagaactttattctttatgcgagcgaaggaaactaaagggggttttagatagtttcttagattcttttatggaaaaatgtctagtataa

SEQ ID NO: 76272 - DNA, 897 bp, Citrobacter koseri
atgaaagtaaatattttcctaataccggatagttttaactttgggaaagatatcgaagagattttatctgatgtaaatatttttaatatattaaaagataagatggcatctgattttgtaacattctcactgtgttctgatttttataataaaatagctcccgaactatataccgcttctatggatagtgggtgggctatgagtaaattttatgatggtattaacaatgtgaatacggaagaaattgattccgtggacacacttgttttagcgaataacgataatccagaatatttcgagcgttggattgggatatatacacctatagatattaatttatcacagctaaaagaagaagcgaaagttaaatgtgagaattccttggtgaaattctgtacaaatactttggcaaaaaacaaaagagaacattcagaatattcttttgatatacagcagatatataaaaatctaatatttctagaaaatcctcaacatgataaatataagacctttgatagtataaggaagatggatggtgggtataggaattttcaaggagcaatatcaaaatttttatgttttgctaatagctataatataatcccacataattctcaaactaatatagataatatgtgcgcttttttagattttcctgtaaccccagaggggaagggaaagaataaaagaaaaataaaagcattgaaaagagatttcttgattgatggggtggtctatgaaaatgtgaattgtgagtaccactataaattagaaaggtatgatgactcaaatggaaaaggaacttattattttaataggatttattttggtttttttaatagaattgatcctgaaaatccgaagatttcaattgcacatataggagaacacctttga

SEQ ID NO: 76273 - DNA, 1155 bp, Citrobacter koseri
atgttaatgattgaaacgctaaaacttaaaaattttaaggcctataaagaccaaacctttaacttcacgaatcttaccgtattttgtggtaacaactctgttggaaaaagtacagctgtacaagctatagggatgtttttacaaactaattttctttcaggtagttcattaaaaatcaatggagacctagtacatataggttctgtcgatgacattcataattatgacagaagaaaagatgatgagttgttgattaatatttcttcatctgaatttgatgcctgttgggggtatggaaaagatggagtaatctatagagacaatttacctaacaagaatgaactgccgtttattgctaatgagaaaactttacataagttaaaatttttctcagagaaaaattttaactttcaatatctagatgcagaacgctatggaccgagagacaacatgcctttgtctaatcataactatcatcaaaattggttagggaagcaaggtgaatatactattgaagtattagaggggctttttaataagcggcttaagttattgaatgaaaatagcaaaaatcaagaagatcctcgaaggcatgttaattcgtctagcgctaatgttttccaaaatattgagttatggatgcaggaaatttctccggggcataaaatactgcccagagtagaaaattctgccaacgttgctttcaattctataattaccgaagatggtcagcatacgaaacctataaatataggttttggttacacatattctttaagtatcgtgtctgcgttgcttttggctgagccaaatgatttagttgtaatagaaaatcctgaggctcatcttcacccaagaggccaaagttatttggggcgattaatcgctttggccgcacaggctggaatacaagttataattgagactcatagcgaccatcttctgaatggcattaggattatttcaaagatcagggaaggatttagtccagagcttttcacgctttattatatctctaaagatcgagatgatacaaaagttgtaaaaattgacataaataatgaaggtaagttatcagaatggcctgaaggattttttgatcagcagtctttagatatgtataccctgatgactggaatgtctcctaaaaattaa

SEQ ID NO: 76274 - DNA, 1950 bp, Citrobacter koseri
atgaacttagaaaatgtgcttattgatattgaaactatgttgattggcaaagagttacagccaattcatcagagcacaggtgtgctctatgtcacaaaaattgatagagtggcaggtaagtattttgtatatagcccaaaggataaaaagactattgggagaactatttctacagagctaggtgcaatagttaacgatttaaatcgtagaggtttttgtaatgtggatcaatctctatatggtagtggttctagccgtaaccatccggagactatttttgccaacttgccttatatacaacactttaaatataaaaacaaaaaacacattttactcagagaagagatggttcatgagccaggaactctttcggaagttcaaggtgctagtttcagaactctgagaaaacaaattgataattacttagatttggatctcgaactattaaataacaaacaagaaaaaatcatccaagatctttatgatgcttacgatattgtattgaaaaaatattctgcagaactttctgttcttaaaatagaacaatctctgaaaaacctaaaacttataaataaagagttatcagattcagttgtctgtctggaccgaaggccttctgataacatcctgactaaggataaagaaagcttaggttatgtttctatcgaggactcattagatactcctgaaaatacaggcgtagatattggtgaggataatataattgatggagacgatcttaagaaacaattattcgcagccgaaacaaaattaggtgttgcaaagattaggatgatgactccaacgttatcgttaatttttgacagggttgagttcaaagatattgagttacaaccagatttccaaaggaaggaccgtatatggaaggctgataagaagtcaaagcttgtcgaatccatattaatgcgcttgccattgcctgttttttattttggcgaaaaatcagatggttcatggattgttgttgatggtttgcaaagaactacctctatctatgatttcatgagtaataagttcccattggctaatctggaaattttatctaatctaaacggaaaatattttaaggatttatcgaggacagaacaacgggacataagagaatatgcaataactgcatatcttattgatgttgatgagcgaaattcaaatttggttgttgagcttttccatagaattaatacctatggagttaaattgagtgaccaagaaattcgttcagctttaaatcaaggttccagcgttaagttccttcgtttccttgcttcattgaattcctttaaagaagcaacaagatataaggttaaacctgacaggcaaaaagatatggagctttgcctctcagctctttcgtttatggttcgtggatataaagattatgggcagggttcgtatgatagtttcttatccggaacgatgtcatacttaaatgcctttgaattgcatttagaaaatgaggatgatattgataacggtaattcaataattcgtacagactgtaaggaatatatagaaatatatgaaaaatatgactctgcattaaaattagcgaaagagatatttggggattttgcatttgtaaaagagcctattagcaacagttctccaattagtaagcagttatttgagttggtgatttattatttctcaaaaatgtctcctgctcaaagagaaatattgcgtaaaaatgcatctgaatttatcgatcatttgtatacagcaatagaagaaaattccaaggagtatgccgactggtattcaaaaacatacaatgagacagatagagggtttaaggatgctttatcaacatctacaggtaaaagaataactgtgttgtatcgctttgaagcgtttgcagaaatccttaaaaccactactggtattgtttttgactattatgatggagagaatactcatgttaatgattga

SEQ ID NO: 76275 - DNA, 558 bp, Citrobacter koseri
atgacgccctcagttaaccaggcggtgctcacccacatcgtccaggcgctgaaggaagggcagatccgctactgcgaatcgctcggcttcagcccgcaggagctgtgcgaactgacgcgccttaccgccgatgacatcctgtttctcagcaacagcgcggtgcagttcatcaccacccacattgaccacgagatgctgggccggatgctcgcgaggatggagcaggagcggctgttccagcagcgtctggaggaagcgctgtcgctcggcgcgtccatcgagttcattaaccactattttggcctttccacgccggaggtctgtgcccggcgacggctgattggcctgtttgtccgccaggggcgcaacaatgccccggatgagcagatggagacgctggtgtggaacgagtggcagaaaacgggcgtgaacaagctcgactcacccgaagcgctgaccgctatgatcgcgatggcccgcgaacacgatctgtcgctgacagttatctggaaccttctgcgccagtggactcaggagaaactgctgcatgaagagtga

SEQ ID NO: 76276 - DNA, 873 bp, Citrobacter koseri
atgaagagtgacgatcggctgctgtttctcggcaacccgcagcagagcgtgccgaagtgcctgctgctggcgcgcaacctctccccgcgcgacaagttcacgtggcaactgctgcgcctgcacgcccgcgacgacggcagcggcatctttccctcctacaacgaactgcaggactggctctccgaccagcctgaggacgaaaaggcctcgcgcagtaccgtcagcaacgcgctgatgatgctgcggatcacccgctggctgagcctgtgcaagcggctacgggacgaacaaagcggcaggatcaccggtaacctctacgccctgcatgatgcgccactgactcatgccgatgcctgtcggatggacagcgaatatctggcgctgctcaccgcctgctcccgccaccacaaccggcgtatccgcaacatcgccatcgggctgctgctcaccctgcaacaacctgtggatagtggacgaacctgcactgtgtctccattgaagaccgccccaggtcttaatcgaggactcagtaaaaaatgcccgggtcttcaattaagactcagtgatgtggcgggggctggcgggcagccggagccgcattgcgtacatactggtacagatttaaacaataaacatcaaaagcgtacgcaactgctgcactggcctgtggataatctcttcagcgccagcgagcgccgcgccgccgaacgcgcgatgcgcaatctggatccctccctctgccagcaggtgctggacgactgcctgtggcggatcgccgcccacgatatccaccgccccctcgcctatctgctggcaacgctggagaaggccaggcggggcgagttcaatcagcttcggcgcaggcgcagatag

SEQ ID NO: 76277 - DNA, 612 bp, Citrobacter koseri
atgcctggcacaaccctgttcagcgatatccgcatcaccctgcacacccgcgtcgccgcccggctgtggcaggcgcatcccactggcatgctgctctgtctggcgttactcaggcgtctgctgcgcgccgaagaggccgacgatccgtgggccgcccactggctgaagcaactgcgcatccgcctgaacctgatcgcccacctgctgaagcaaaaaaatatccggctggaccatgccttcgccagcctgccgggcgctatccacaccacgcaggtcagtaacccgtccccgaccgaattcatcctgccgctggcgctgttctcaccgcccggttcgcgcctgctgcaacagttgattgattacgatctgctggtccgccgcaccctgcttgcctggcacctcggccttatcacccaggcggagaagcgcgatttcattgccaccatcccacggctgatgctccaggtgttcagcttcgtgaaccgctttcgcaccaccggcgtgacccgcgccgatgtgcgggcgaacagtccgctggcgcagacaatggcgcataagctcgggaatttgcccaaaaagatgcttgcggagatacagcgcgatgttcaatga

SEQ ID NO: 76278 - DNA, 132 bp, Citrobacter koseri
atgttcaatgacgatgatgatgaacgctccgcccgcaaaagctcgctaaagggccttttaaaggcctttaagggtaagggagagctgcgagcgctggtgcaggaattacaggcgctgcgcgtgcagctgtaa

SEQ ID NO: 76279 - DNA, 282 bp, Citrobacter koseri
atgctaaaacaggcggtgtatgaattgccggggcgtaacgtaccgctgatcctgtgcagcaacccggcgcgctccggcatcagctatctgcgctggcgaaatctggacaacaaccgttcggggagcgtggcgttgcaggaagccattcaacagccggacgcgagtgatgaactgcgcgacgcgctgatggccctcgaatggcggcggcaggtgctgaatacgcagctttcggtggtgatgtttatgctgcggcggatacagccgttaaccacgcaggtttaa

SEQ ID NO: 76280 - DNA, 1809 bp, Citrobacter koseri
atgcaactttacctgtgcgaaaaaccctctcaggcgcgcgatatcgcccgcgtacttgacgcccgtaaccgcagcgacggctacctgcataacgccaccgtgaccatcacctggtgcttcggccatctgctgagcatggccgcgccggagaattacgatcccacactgaaacactggcggacggaacagctgccgtttatccccccggcatggcggctggtgatccgcccggaggtgcgcaagcagttccgtatcatcgaaaagctgctgaaacaggcggatgcagtggtgattgccaccgacgccgaccgcgaaggcgaaaccatcgcccgtgaaattctggagcaatgtcgctggcgcggtccggtccagcggctgtggctgtcggcactggatgacgccagtatccacaaggcgcttgctgcgatgcgatccggtgacagtacgtatccgctgtatcaggctggactggcgcgcgcccgcgccgactggctggtcggcatcaacatgacccgtgcctgcacgctgatgaaccggcggcacaagggcgtgctctccgtgggccgggtgcagacgccgaccctccgtctggtggtggagcgcgaccgggagatcgcccgcttcacgccccgcccctggtggcgggtggacgcccggctgcatgctgagggcactacctttctggcgcagtggcaacccgatggggcgtacagtgacgacgaaggccgctgtatccgcgaatccgccgcccgcgaggccaccgcgcacctgcagcaggccggaaccgcgctggtaatggacgtgacaacccgacgggagaaaacgccaccaccgctggccttcaccctcagcgccctgcagcaggtctgctcaaaacaatggggcatgggcgcgcaggaggtactggatatcgcccagcgcctgtatgagacccataaggccaccacctacccgcgcaccgactgcggttatctgccgctttccatgcacgatgaagcaccacaggttctggccgcgctggtctccagcgacgcatcactccagcccctcgccacgcaactgaatctgcagcaacgctcccggttgtgggacaacagtaaaatcaccgcccaccacggcatcatcccgacccgtaaaacggtagatctgacacagatgaatgactgcgagcgcaaggtctacggcctggtacgcagccattttctggcgcagtttctgccggaccatgaggtggataaaacggagctgcgtctgaactgcgccggggaaacgctgactgcccgtggctcagtagtgattgtcagcggctggcgacaactgtttttacgcgagatggcaacacattcaccggaagaaacgcaggcacttcccgccctgcaacaggggcaaacctgcgaggtggaacaggtggacgttcgcgcccgccagactcaaccaccagagcactacacggaagggacgctggttgccgcgatgaaaaatgccgcacgctttgtcagcgatgaacgcctgaagcagcggctgaaagagaacgccggtattggcactgaagccacccgcgccgggattatccagactctccttaagcgcggttatctgattaagcaacgccgctttctgctggccacggataccgccagcacactgattgacgccctgccggaagcgctgaaagatccgggcaccactgcgctgtgggagcaaatgctggatgacatcgcgacggggaaaatggggctggaggcgttcctggtgcagcagcagcaaaacatcagttctcttatcgggcagctcctgcaccaaaagtaa

SEQ ID NO: 76281 - DNA, 444 bp, Citrobacter koseri
atgaacgatacccactacttcaacctgtacaccagcggtctgggctacctcaaccggatccgggaagtgaccccgaaaaaaggcgaaccgttcctgtgctgcgacattgccgcactacggggcgaagccagcaacgcggagcacacctggttcgactgccgcgtcagcggtaaggaagcgcagaaactggtgcaccgctgtatcgacgcctgcgagcagagacgcaaggtgctgatccagttccgcctcggcgatctatatgccgacacctttgtctacagcaaaggcgaacgtaaaggcgaaaccggcgtcagtctgaaagcccatctgctgcacatcgggcttatcaaaattgacggtgaagaggtttaccgggcagagcgcgaagcggaatcccagccagcgccagccgcaccgccagcagagcctgtaccgcagttctga

SEQ ID NO: 76282 - DNA, 384 bp, Citrobacter koseri
atgatgaataccgcattgaattcacgtgaagaagcccttaaccggggcaaactgattaaccttgatgacgaagcgctggacgccggcttgccgatggatctggccattacccttccggcccacaagcactgtctcgaaggccgggatgaaaacgccagaaaggagttactgaaaggcgttgaaatggcggtaatagtggcgtttatcgcccgaatgccgccacaacgcacgatccgtatcgattaccgctcggtgttggcgctgaaaaccaacggcagcacgcagcagcagaccgtcaggctgacgttacgcgttcatttttctgagcaaggcatccccatcgccgccacgctggggttgatgggtgaaagattcccttactga

SEQ ID NO: 76283 - DNA, 660 bp, Citrobacter koseri
atgaaacgactgctgatagccctgctcctgtttattttcaacggcgtggccaccgcctccccagtcacgccagaagtcgtccgctacgaccgctacctgctggtcagcacgtcaccgcaacagccgccactcgaacaacttaccgccctggccgttccgcccggttttcacccgacggttggggaagcgctgcagtacctgctgcgcgacagcggctggtctttgtgtctcgccgatgcgcgccgggcgcagctttatgggctcccgttaccacttagccaataccgtaccggcccgcagcgcctgaagagcgccctgcaactgctggcgggcccggcatggcgggtgatcaccgacgaaaaccgccgcgaagtctgtttcgccagcgaccactccctccccccgacggtggtttaccgtcatcccgtatctctccgccctttggggccgttaacggccccattttttctcgccgggaccctacagcgcggtgatatccgcctggcggtaatcgtgccgccggaggctgtttacctccatcaggtggtatggctgcgcaggggggaacagtggcaaggctggcggctggagcgatttgatgagcgccgggccatattccgccacggcaaacgccagctaacgctgaaagtaccggagtaa

SEQ ID NO: 76284 - DNA, 675 bp, Citrobacter koseri
atgaaacgcctgattatcctgttactgttcaccgccagcgtgggggcgcaaccgctccagatgcagaccagccggaacgcggactcagctctcagaccgctgaccacgcaacagcaggccaccgtctggggtatcacaccagaggagtggcagcgctatctcacgctgaagcagcaggcgcgcggcgtctggtcaccggggctcgatccactgaccaccctgggcgtcgaagccaacgcagaccacgaacgtcagcgctttgccgaactgctggtcaggcaggagtaccagcggctggagaaagaactcgccttccagcgcgcctatgatgccgcctggcagcgtctttatccgggcctgacgccgctgaaaaccacctctgccagcacttcccgcgtttcgctatttgttaaagatgactgcccgccctgcgacagcctgctgcgtaccctgctggcgcaacagcgcccgctggatatctggctggtcaacagcgaaggtgatgataaccgggtgcgccgctgggcgatggcgcatggcatcgacgcaaagctggtgagtgaacacagcatcacgcttaaccacgacgcaggccgctggctcctgttgggacagagcaaaatcccggtggcgctggaacataagggggagcaatggcgcgaggtcctgccctga

SEQ ID NO: 76285 - DNA, 519 bp, Citrobacter koseri
atggcgcgaggtcctgccctgatcctgctgctgccctgcctggcgctggcgcagccgctgccggaagcgtacctgcgcgccgcggagcatttccgcgtgccgcctgaactgctgtgggccgtcacacagaccgaaagcggggcgaatctgaacggcaggcatcttccgtggccgtggacactgaatatcagcggaaccggctaccgctacgccagccgggagcaggcctgccaggcgctgctggccgccatccgccgcaccagcccgaagcgtattgacgtggggctcgggcaaatcaatatcggctggcaccgggcgtattttgcttctccctgcgacgccctgcatcccctgcagaacctgtcgctcaccgcgcaactgctgcgtcagcgctacgatgaacgccccggaagctggctcaatgccgccgcccgatatcaccgtcccgctggcggcgcgcccgctgcacgctaccgaaaacaggtcagccaccacctgcaacaggccgcatcgccatga

SEQ ID NO: 76286 - DNA, 2019 bp, Citrobacter koseri
atgagccgctacgcgctggaggcactgctgcgcccacccgtggagttttacagcaccgtcagcgctggctgtggtgcattaatctgcctgacgcaggcaccactgctgatgctgacgccgtggcaagcccaactgatggcctgtgctctgatgctgctggccctgcgacgcggctggcagggatggcacatcgtgcgctatcaccgtaacctcctgcgcctgccgcgctacgcgctcaccagccggaaaatcccggtcagccgccagcggctgtttctcggtaaaggctttcgctggctacccattcatacccagcgtctgtacgactgcctgcaaccggaagccgcacgctggctgcgccccggatggtgttaccgcctggcaagacacatcgaaaaacgcagcgagcatactatgcccggccttgcccgtctgctcagcgacgaacactggctgaacccggtacgcccgctgccacccgtcggcggtaatccgtggctgcacggggtggaactgaaagagagcgacgtcaccctgccgctcagcgaacgtccaggccacacgctggtgctcggcaccacccgcgtcggcaaaacccggctggcggaactgcttgccactcaggacatccgccgtggcgaggtggtgatcgtatttgatccgaaaggcgatgcggatctgttgaaacgtctgtggacagaagcgcagcgtgccgggcgcggcgaccgctttatcctgttccatctggcatacccggaaatctccgcccgctacaacgccatcgggcgctttggtcgcatctcggaggtggcgtcgcgcctcaccggacagctttccggcgaaggtaactcagcggcctttcgcgagttcgcctggcgctttgtcaacattatcgcccgcgctctggtggcgctcggccagcgtcccgactatcagttaatttcccgccacgtcgtcaatatcgacgccctgtttattgactatgcccgcatcgtgctgccgcgccacaacgcgcgggcgtgggaagtggtggcacaactggcggagcgcgttaacgacaaaaacacgccgcgccatatgctgggacgcgatcctcacgtagtggcgctggagcagtacctcaacgcggagaaattttacgatccgatcctcgacggcctgctctcggcggtgcgctatgacaaaacctacttcgacaagattgtcgcctcgctgctgccgctgctggaaaagctgaccaccggcacgctcgccgccctgctcgctcccgactatcacaatctggatgatgcgcgcccgatcctcgactggcagcaggcgatccgccagaaggcggtggtgtatgtcgggttggacgcgctctccgatgctgtggtcgctgccgccgtcggcaactcgatgtttgccgatctggtgagcgtcgccggacatctctacaaattcggtctcaatgaaggacttcctggcaacggtgaaaagctgtcaccgataaatctgcactgcgatgagtttaacgaactgatgggcgaagagtttatcccgctggtcaacaagggcggcggcgcaggtattcaggttaccgcctacacccagacgctgagcgatattcaggcccgcattgggagtgcgcccaaggcaggccaggtgatcggtaacttcaacaatctgattatgctgcgggtgcgcgaaaccgccaccgccgagctgctgacaaaacaactgccacaggttgaagtgcgcagccgccaggtcagctccggcgtcaccgacacgccgggcggcatcaacagctttaccagcaacacccgcgaacaggtaaccaccagtaatgtgccgctgctcaataccgccgcgctgattcagcttcccaaaggccaggcctttgccctgcttgaagggggtcagttgtggaaaattcgtctgccgctgcccgtggcggataaacactgcccgctaccggagtccgtcgcgcaactggcggcctggatgcaggcgcgccagcaggggctgccggaatga

SEQ ID NO: 76287 - DNA, 633 bp, Citrobacter koseri
atgagtgaacagcggccgcctccttcacgcccggcgcagggaccggttggctggccgctgtcgctggccggacggattgttgggctggttattggcgcgctggtgttgcgggtggtgctggagctggcgggactctatttctggtggccacaggagggaagcagacatgtttttcaggtgatgaggagggagcaggcggaactggtcatcgcactacaaccgcatccgcaggggaatgacattgttatgctgctggagaacgggactacgcacgtgcttaaggccaacatactccttcagaaaccgttcaccgtactgtcttatatgctggtgagttttatgctgcgtctgatatggctggccgccatgacccccctgctctgcctgagcgctttaaccgggctgacagaaggtctggtacaacgggatttgaggcggtttggctccgggctggaatcggtttttcttcaccgctatgtcatcaggtccggcagttcggtcgccacaacactctggacgttttatctggcgcagccactgtttctgcctccgatgctggttttactgccaaccgctttatggttcgggataacggtatggatggtggcagggagttttaaacggtggttgtaa

SEQ ID NO: 76288 - DNA, 147 bp, Citrobacter koseri
atgggcattgagttttacataacgagagctgagctttgggctgataatgatgatgcacagataacttctgatgaatggcttagctatattaatagcgataatgaattaagtaggtatattaaaaacggcgattatcatgcattgtga

SEQ ID NO: 76289 - DNA, 693 bp, Citrobacter koseri
atgatagaaaagagtcggattgtcattgatctttcgatgtcagtgcttgagcgtaccgaagcaggtaaactaatcaagacatacgagaaagaatatattaagccctacagatatattgacacgatcaagaagattgcaggctatattttcttttttgcggctacttttacgttaattatgatggttatacagataattggcacccaaaatgataatggtttgacggatcaaattcgagtgcttaatattattttactggctatgttcggtttatcactactgttgtttaatattcaagatatactcctgaaaaaaggttatgaaaaaaatgaaacaatagaaaaaactgataatgaacttactcaaagagtgaagcttaatctgtattttattgaaaacataacgaattcagtaactggccgggtgtaccgggaacatatcaaaacaagttaccggaaaggtgggtttatctttattcatatgcgaaatgacaattgcattgtcattcctgatagagtttttacctctaagcgcgttgttattgaggttgctgacttcatacatgcacagattgtacaaataaaaaaaaggttgggtaatttagcggccacaacatctgtagttatctttgaaattaataaaaaagtgataacttccgcccccctgatcttagcaggtgttaatttttcttag

SEQ ID NO: 76290 - DNA, 1212 bp, Citrobacter koseri
atgtatataccatcaagttttttgtacaaagtgatttgttctgagcaaattggcgtgttttgcgaatcgaatagtgacggacacaaggcgatcattgcaaaaattcccacatcgacaattaaatcccttgctttaggtgctaaggttgaattctatctttatacaatgctgaagttcccacattatttagcgttgggcatgaaaatcattgataacattagctcccctctatatgtaatgattccacagcggtggcagaactcaaataatatctttgactcttcctttcttaatcgcgaattagattttgttgtttatgatgaaactgatgcaccgatacaacaaaataaaatgattatcaaaacaaatttcaagaatgaacgcgtacattacgttctaaaaaacacagactttaattttcctaatgacagtgaatcatctgagtattttatagatactatctatgctgacttaggttttaacttcaaaccacaccctgactttccaattgttggatttaagttccctgtaacaattactcaggtaaacactatttttaccatacatgctaatgaacaaggtgcaacacagtatgatgtggttaaagacattgatggcactcgacaagaacggcagatttatcaggcattttgcttaatggataactctgaaacaacaatgtcacctcttgtcacaattggtttgaaagaacgcgaactcacagatatcctgacagtcacgcaaaacaaaaaattgattgctgttgaatctaaatgtctccaatatgatactagtgcttttgacaaaacttccacccgaactgcatcaaatataattggtcattgtaaaaaagccattggtcaattagaaggcgttcataagacaatcaaacgaggtgaacgggtttacaattctgacggaacaactcttttagccggtgggaactactcattttatgggattatcattattgatgagtatagaccatcgaaagattgggatgcgataataaacttaatgaaaatatgcagtgataagcacgatatttgcattaacataattagcatttcggaagtgatgtatactatgaaattatgtatgtccagcactgatttatttattcagtcactcgaagatcgatataaggcttgtatcagtagtaataacattaatgtccggttcagaaattcatctcttccaacgatgatttga

SEQ ID NO: 76291 - DNA, 309 bp, Citrobacter koseri
atgcgatatcgctctttatttctgttactaactttgctcatagagccgcaggcatacgcctccccagaatccgcccagctcgccctcgccatgaaacaactcgacggcgtgaaaacctcgctggaacgcgcccaaaccagcgccagcacagacccgctgtcgcgctacttcttcgactacttacaggcgcagcaggacatctctgccgttgaacagggcatccgccgctaccttagcccgacgagagcgcagccacgcgccgtccagcccctgagcgccagctaccagcgggagcatcccgatgactga

SEQ ID NO: 76292 - DNA, 234 bp, Citrobacter koseri
atgactgactcgcaactcgccgcctttcaggccgcaagcctgagcaaaccggagactgtcagcctgctggtgctcggcctgtttaccagcgtcatgctgctgtggtgcgcctggacgctgctggtcgcctggcaaggcgtctgccgccagcgcctgagctggcagagctttggcgcggtggcggcccgttcactgttactggtgctggtcagcttctggctggtactgagctga

SEQ ID NO: 76293 - DNA, 222 bp, Citrobacter koseri
atggagacgctgcaaaactacggttttgacatcgtggtgttgttggcactggccatctgcgccgtcggttttctggtggtggcgaacaactgcattgccacctactcggagatccagagcgggcgcaagcagtggaaagatctgggctctatggcgggcgtcggcagcattcttctggtggtcatcatctggctgctcaatcaggcctcggacgtcctgtga

SEQ ID NO: 76294 - DNA, 354 bp, Citrobacter koseri
atggcgaccattccctttctccccgaccgcctcaaccgtgagcccgtggtctggcgcggcctgaccaccagtgagctgtttctggcgctggctctcggtcttggcggcggctgtgcgttcggtattgtgctagccctgataacccattactggccgttgatccccggttccgcgctggcaggcgcagcattactgattcagggcggcggacgcgtcctggcccgcgccaagcgtggcaagcccgatagctggctaccgcaggcgatcctctcctggctggagcgccatcatcttcggggttcacaactcgttcagcacagtaccgtatgggtagtgcgcaggagtccgcgatga

SEQ ID NO: 76295 - DNA, 660 bp, Citrobacter koseri
atgagccgctttcgccatgcgctggccgagcgcgataaccatattctgacgctgcggacggtgattgttctgctgtgcctgtgtctggcaggtgtcggttacggctggtacagcgcgccgcaaaagctcaccctctggttcccgccggacctgcgcagcggcagcactcgtccgtggtgggaggtgccgcccgccagcgtctacgccttcaccttttatatcttccagcagcttaaccgctggccggataacggcgaggaggactattcccgcaatcttcgttctctgcgcgcctacctgacgcccgcctgttacacccggctggagcacgatttccaggtacggcgcaataacggtgaactgcgcgaacgcacacgcggcgtgtatgagcttcccggccacggctacagcagcctggtgcatgacggcgataaacgccccttcacccgcgtcgagaccttaagccgggatgcctggcgggtgacacttgatgtagcggttgaggagtattaccagaacgagccggtgaaaaaagcgctggtgcgctacccgttgcaggtggtgcgctacgccattgatgcggagaaaaacccgtggggactggcgatcgactgtaccgatgccgctccgcagcgtctggtagcggaggagaaacaatga

SEQ ID NO: 76296 - DNA, 768 bp, Citrobacter koseri
atgaaatacctcttctttgctttgttattcagtctcccggccttcgccacggaagtggtacagtgggaaaacatcccgctacccatcgcgctgcatgtcgggcaggagcgtattgtcgacgtgggtaaagcagtgcgcatcggttatcccgccacgctggaaggcaaagtgcgtctgcaaagcgcgggcggcaaggtcttcctgctggcgaatacggcgttcccgtccacccgaatccagctacgtgataccggcagcggcgagctgatcctgctggatattcaggccacccagggcacttcgccacttgaacccgtgaaaattagctatgcgccgcagacgcctgccacagcaaaaacgtccgtcccggtgacagcatcaaccgagcccctgcccattctgctggtacgctatgccgcgcagaacctgtatgccccgctgcgcaccgttgaagctctgcccggcgtcacgcccgcgcccgtccggctggcaaaactcatcaccaccttgctgcctcagcagcctgttacggcgactccactggcagcatggcaggtcaacgccaccaccgtcaccgccatccgcctgcaaaaccagagcggacagcgcatcacgctcgatccgcgcgagcttcaggggcagttcaccgccgccgcgttccagcatgactggctcggcccgcgtggtctggcagaagataccaccgtggtgtacctggtgacggaaggcccggtttcccgcgccctgctgccggagccgaaaccatga

SEQ ID NO: 76297 - DNA, 1296 bp, Citrobacter koseri
atgatgccgcgccagagtctcctgctgaaaatcctgctgcccgtgattgtgctggtaacggtatggctgctgctgcgtcccgccagcaaaaacgccactgagaaatccccgtcccgcagcgtggcagcattaacgccgcaggaactgcgcgatctgggcatcgatggcgacacgcctgccgataccgtcgccacgctggtcggccagatgaagcagtaccgccgcgagcttcaggctatccagagcgataatgaaagccagcaggcgcgcgaaaagcgactgaaagcacagcaggcgacgctggtatcagagttacgcggggatatgcgcaggcagcaggaccagatgcgcgatgaactactaaaaagccagcggggattgctggataagctcgaccatctgatggccaagcgcccggacgatatcccgcccggtctggggctgacgcccggcgaactacctgccgacgtacagccagatatccgctggctggagccgctggatgcccccccgcctgtggatgaaaagctgctgcacgtccctctgaaagcggcggacaaaccactgccaaaacctgacgtgaaggtttacaccctgccgcagaacaccacgctgaccggctcggtcgccatgacggcgctgattggccgcgtgccgcttaacggcaccgtcagcgatccctatccgttcaaattgctgattggcgaggacaacctcaccgccaacggcatcgaactgccggacgtggcgggcgcggtggtctccggcatcgcttccggcgactggacactctcctgcgtgcgcgggcaaattacctccatgacctttgtgttccacgacggcaccatccgcaccgtcccgcatggcggcaaatccggcaacaaacagcaggagatcggctggctttcggataaccagggactgccgtgtattcccggcgagcgcaaaagcaacgcgaaggagtacctgacctcgcagttcctgctggcgggttccggcgcggcggcgcaggccttcgccaatggtgaaagcaccaccgtggtggaggacggcagcatcaccagcgcagtgacgggcaacaacggtcagtacgtgctcggccaggccatcggcggcggattaaaagataccgccgactggatgaaacagcactacggccagatgtttgatgcggtatatgtgccaccgggccacaaggtagcggtgcatctcaccgaaccgctggccatcgactacgagctggagggtcgcaaagtgaaataccagcaggcgagcacgccgggaggtctggagtga

SEQ ID NO: 76298 - DNA, 360 bp, Citrobacter koseri
gtgatacgcaccctgttcatacttctgtttttactggccggatgcagcacctcgcaggaggaactgatgccggtcgatcctgatgccagcatgctctcactgtggcagcagcaaagcggtggcagcgcggccctgctggatgcccgcgcccagttgcgccgcccgccagatggtccggtgacacaacccgaagcggacaccatccgcagccagttcccgcgcctacccaatccggatcttgtgttgtacgttttcccgcaccttaacggcaatacaccggtacccggctacagcaccgtcttccccttctacacccgcccgcagtatgcgctgccgggcgagcgcctgacgccgccatga

SEQ ID NO: 76299 - DNA, 2661 bp, Citrobacter koseri
atgagtgaacggcgcggcctgaccgaacaggcactggacgccagctattgtaaaggcccgtcatttgtcgactggctgccgtgggtggagtttttgccggattcacagacgctactgctggaggatggccgttcggtgggtgcagtgttcgaactgacgcctgttggcaccgaaggccgctcgatggcgtttctggagcaggtccgcgataccgtcactgacgcattgcaggatgcctttgatgagcacgaacgtgcgccatgggtagtacagtttttctgtcaggacgaggacgacagtgaagcgtggctggcatcacttgcctcttacgccgcaccggaaatccgcgactccgcctttacccgagaatggcttgcgcagatgataaaccatatgaccgccctcacccgcgatgaagggctgtttctcgataacaccgtcacccgtacccgctggcgggcgacgtggcggcgcacgcggatggtgatctaccgcttgctgcccggcctctcgccggatgaaccgtcaccggaagagacgctgaataatatctgcgaacggctcaccgccgggctgaaggcggcaggcatcagcgcagtccgtcagaatgagcaggccattcaccgctggctggtgcgctggtttaaccctgcgcctccagtggaagataaaaaagccttctggcggcaactggatttaccggaagcagaatcccagcccgtcatcaccgatttcgccgaacgactgctgacaagcgagccgcgctcagatgcggggaacggtgtctggtggctggataaccgcccacataaagtggtggtggtcgaccgcctgcgcaaagcgccgccacccggcctgctgaccggagaaaccacgcgtggcgacggtatcaacgccctgttcgacctgttaccagcaggcactatcatgaacctgacggtggtggtgtatccgcaggacaaactggagcagcacatcagccacctttccgaccgggcgattggcgacaataccgattcggaatacacccgccgcgactgccgcgatgtgcgcagctacctgaaggacgggcataagctttaccgcagtacgctggcgttttacctgcatgcgcccgacaccgataccctgtttcgccagcagcgccagttgcacagcctgttgctgaatgccggactggtgccggtgcaggaacagcatgaagtcgccccgctcagtcactggttacgctggctgccaatgtgtttcgatcccctgcgcgatccgcgcgggatgtatacccggctcaactttgtgcagcatatcgccgggcagctgccggtgtacggacgggaaaccggcaccgggcatccggggatttgctacttcaaccgtggcggcgcgccgctatgcttcgatccgctgaataagctggatcgtgcccagaacggccaccttttacttcttgggccaaccggagcgggcaaatccgccaccctcaacgccaaaatcgcgcaactgatggcactccatcgcccgcgcctgtttatcattgaggccggaaactcatttggtctgatggccgactacgccgccgcccacggcctgacggtgaacaaaatcagcctgcgtcccggctccggcgttaccctgcccctgttcgccgatgcctggcgactggtggaacaggcggttaccgacgccgaaccgccggaggacgaagagagcgagggcgacgaccagcgagacgtactcggcgaaatggagatcaccgcccggctgatgatcaccggcggcgaagcaaaggaggatgcgcgactcacccggccggatcgggcgatgatccgccaggcgattatcgctgccgcgcatacctgctacgaggaaaaacgccagacgctgacgcaagatatccgcgatgcactattcaccctttcccgcgacagcagcctgccggaatcccgccgccaacgggcatatgaaatggcggaatccatcaacctgttctgcgcggggtttgaaggtgagttgtttaaccgcgagggccagatttggccggaggcggatatcactctggtggatctcgccacctttgcccgcgaaggctacgaagcacagcttgccatcagctatatctcgctgataaaccacatcaacaacctcggcgagcgcgaccagcatctggcccgccctatcgtcaacatcaccgatgaggcgcatatcattactgttaatcccttattggcgcgctttctcaccaaaggctcgaagatgtggcgcaagctcggtatctggctgtggctcgccacccagaacctggcagattttcccgatgaggcgaagaaactgttaaatatgattgagtggtgggaactgctggtgatgccgccggaagagatcgatcaggtgtgccggtttaaggcgctgaccgaggaacagcggcaactgttgcgttcggcggtaaaatctccgggacaatataccgagggcgtggtgttgtcccctcgggttgaggcgctgtttcgggtggtgccgccagcgctgtatctggcgctggcgatgaccgagaagcacgagaaggcggagaggatgcggattatgaaggagatggggtgtagtgaggtggaggcggcaatcaagttagcaaaggatatattaccaagcaataaatatcaccattaa

SEQ ID NO: 76300 - DNA, 777 bp, Citrobacter koseri
atgataaaaatatcaaacttatcaataagatgtatttcgcaccctagttttgatcagggagtttttttggattttctcaatgaaaacggtcttacttggatccagaaaggcaatgccacggaagcagaacatcttgttgaggcatcgggacggttgtgttacatgtcttttggtgagcaaaatcaatccccgcgaaacactaacgaatatataatgaatttaattgttcaaggccatgaaagtgttcttgaacatttaaattggacatttttaattactggtgtttccagagctttcactcaccagttagtacgacatcgcgcaggtttctcttatagtcaattatctcaacagtatcatgatgaatcagaagctgaatttgttgttcctatagaagtaagaaataatcctgtactctttgatgcatggaaaaaacagattgaaagcagccttgaattttataaagcctctctcacaaacatcggtgcttatcaacaacaggataattattcaaaaaaagagaatatgagagctttaagaagtgcatcaagatcgatactgccaaatgccacggaaacaaaaatcattgttacagctaatgcacgtgctattcgtcactttttcgatatgagaggttctattgaaggtgactacgagatgagaatggtttcagaaaagatataccaaatagttaataaagatgcacctgcaatatttcaagattttaaaatagaaaatgaaaacacatatgatgcaaaaataataaaaacatcatga

SEQ ID NO: 76301 - DNA, 225 bp, Citrobacter koseri
atgacttctatctactcaaatgactaccagatggtgattaaggccctccgggatgcgcggatcgcctgtggcatcactcagcaagaggttgcaagtgctttcggaaggccgcagtcatttatcgcaaaagttgagaatggtgagagacgactggatgttgttgaatttgttcgtttctgtcgcgttgtgaatgttgatcctgtcagcattttggataaattatga

SEQ ID NO: 76302 - DNA, 276 bp, Citrobacter koseri
atgactaaaaaagactggcaccccgccgacatcgttgccgccttacacaagcgcggtaccagtctggcgaaactgtcgcgggaagcgggactggcctcgtcaacgctgtcgaataccctgacgcgcccgtggccgaaaggcgagtggctgattgccatcgcgctcgacgctcatccgtcagcgatctggccggagcgttacctcgacacgggaaataaacgtgaaccccgaaaaccgcttcaccccatgacaacaaccgacaactccgggacataa

SEQ ID NO: 76303 - DNA, 522 bp, Citrobacter koseri
atgtttctggtctccctggctgaaggctttatccacctgttccaggccgcaggcaaaatcttcctcgacatgatgacggggcttatcccgatgctcatctgcctgctgctggccatcaacttcctgatgaagctggtcggcaccatcagaatggagaaagtcgccgccctgctcggccgctcgcgcatcctcacctacggcgtgctgccggtgctcggctggttctttatgagcagccccggcgcgctcactttaggcaaactcctgcccgaaaagagcaagcctggttatgaagatgcactcggcaccactgcccaccccctcaccagcctgtttccccacgtggtgccgtcggagctgtttgtctggctcggcgtggctgccggggttaaggcgctcggcctgcccgtcacctcgctggcgctgcgctatatcgctgccgccatgctgattggtttaatccgcgggattatcaccgagtacctgttcctgcggctcagcaaacgggggaatgcgccatga

SEQ ID NO: 76304 - DNA, 375 bp, Citrobacter koseri
atgatgatttactgcgcacgcattactgctatcgggctgtttgtcgccgacggcctcaccgacaagatgctcatcaccttcgacagcaacgggccgaaggactgcctcgattactcgctgtcgctggagccgtcgttccgggaagagagcctgatgatactgcctggcgaccgcctgctgctggcgggccatgattatctggtgaccagtgttggcaaaggtgcacagcaggcgctgtttgaactcggccacctgacgctggtgttcaacggcgacctgaatccctgccacgtcggtgcggttcatctctccggcccggtgccgaaactccatgacctgcacggcaatctggtgattgaggagggacggccatga

SEQ ID NO: 76305 - DNA, 981 bp, Citrobacter koseri
atgaacacggtactgattcctcccggccccggcggctacggtaaagggctgtggctgcccgtgggcagtggcaaaaaggtgctgtcgctgaccgggcgcgaaatccatccggttgcgatagaaattggcgcgctcaccgaatcggaaatcgtcaacggcttctctgacattccgccggataacgacatcctgtgcgtggtgattaactgcgccgggtccctgcgctgcggcctgtatccgcagaagggcatcccgaccatcaacgtgctccccacctggcgcgccgggccgctggcgcagtttattagcgaggataactacgtttccggcgtgacgatggagcagctggttctggtggataccgccgaagcgccggacagcgggcctgagccagttccagctccgaagccagtcattaccaccgctccgccacctccccatggcgcggagaaactggtgcgcatggtcgagcagaccggcaccgccgtcggccacgttatcgccctgctgttcgccgccagccgtgaggcggtggatgtctccctgcgtaacgttatcccgtttatggcctttgtctcgctgctgatagccctggtgcaggagaccgcactcggcagcctgattgcccacgccctgacgccgctggcgaactcgctgtgggggctggtgctgctgtcgctcatctgtggcattccgttcctctccccggtgctcgggccgggcgcggccatctcgcaggtgattggcgtgatgataggcacacagattggcgcaggggcgatatctccagctttcgccctgcccgcgctgtttgccatcaacgtgcaggtcggctgtgactttgttccggttggcctttccatgcaggaggcaaagccggagaccatcgcgaagggcgtgcctgcctttctgctctcacgccagttaaccgggccgcttgcggtaatagtcggctggctgttttccctgggcttattctga

SEQ ID NO: 76306 - DNA, 1017 bp, Citrobacter koseri
atgaacaaaatcagagccgccgtggtgggtgcaggtatctacggcaagcaccatatgaacgcgtaccgccataacccggacacggtactggtcgccatctgcgacaccgatgcagagcgctgtgatgacctcgccatggcgtacggcgtaatcggctatacccgactggacgttctgctgcaggaggaagccatcgatgtggtttcggtggcgacaccggacccgtaccacaccgaatccatcctcaccgccctgcgccacggcaagcatgtgctggcggagaaaccgctcgccacctcagtacgcgagtgcgagcttatcgtggagatggcgcagcagcgggacctgctggtcggcgtcgatttccacaagcgctgggacccggcggtaatgcgcattaaggccgaactggcgaagccggaagccgggcgtatcctgcgcggccatatcagcatggatgatgtcatcagcgtgccgacagagtggctgaactgggcgggcgcaagctccccggtatggtttctgggttcccactgctttgacctggtacgccacctttccggtcaggaagtggtgtcggtgtatgccgccgggcagaagcggctgatggccgaatgcggcctcgacaccttcgacagcgtgcagagcctgctgacgatggccaacggcagttcgtgggtggtcgagaactcgtgggtgctgccggaaggctttccgaaggacaacgacgggcgtatcgatattctctgcgaagcaacgtatatccgcagtacttcacagcatcgcgggctggaaatcaccacgccggacatgacgctcacgcccaacagctatttcatcaactaccgcaacggtgttgccagcggttttggtatcgacccgatcaatgactttgtgcgggcagtcagacataaagccccctacccggtcaccgccgaagacgggctggcggtaagccggatttgtgaggcggtacaccagagtctcgagagtcaaaaaccagtgtcattaaaatag

SEQ ID NO: 76307 - DNA, 546 bp, Citrobacter koseri
atggcggcattctttagggaatacagagatacccttctcgcctttactggaattattatcgcgctgctttccctgtggtttacctggtcgcaaagccaggagcaaataaagcataaccatatttctgttgagccgcggatgaacgcttatttttcaaatgacgggcgggcgaacaaatcgggtatttacatcatcaataatggaatgggaacggcatttgtctctgctatatctgcaacggtcaatggcaaaaaagttgaacctgttgccgggaatatttttgtcggagcagtgcaggcgttaggcctggatatccagtgctttgtgattggcggacccagaccaaatgattcatttaaagttggcgaggagattttcttaattgaagcaaggggaactgacgatcgctgctctggcgattcacttatccttcgctctgcggctttagactctgcccgcctggattttgtcttggatattgaatcaatatacggagacagattccggtatgtttattctcagaataaacaaattaagcgtgattaa

SEQ ID NO: 76308 - DNA, 1041 bp, Citrobacter koseri
atgacccaatattggtggaaagatctttttgatcgcaataataactggcagggtctggagctgatactcaagagcagccagaggaccgacgtggcaatggaaatgctaagtggtcggtatgggcgaatggcgctacaggtctccgggaagacattattctgggcatcaatgttgaaagatcattccggcgtctggttggtgtttaatgccgatcattctgcttgccagacattattatcggctgtcacatctgaagatattgagggtattaaaagcaaaggcgaatgggcctggacaggtgaatggtgtcgctatttttcccggcaattaatgaatgcgccagtgcctcttctgtctcctcgccgatggctgataaggccgatggaggccaaatattcattaccaaaattatccggacagcgtgttcctgtaaatagctggcgttttgatgccccagaaagcagcgggaatatcggctgtagctggacgctctacggcgaagattttcctgatttggtcaatcctgacaaagtcagattagtggattggtggtggggaggtagcctgctacttgggcgttacccgatacaacctgatgccggaaggttgaaatggtggcgtaaaaaatgccgtgagggtgcgctgcctccagtacttgtctggtatatagcagggctgggatcatttgttattcttgatggtcattatcgtttacaggcagcgattgcagaagagatccctccttcatttctggtactcagcgaattgcaggaacgggattttgctaccgatcaagaccatcgggcccgtattgtccgggctttagaacagcagctcaaaaatcctaagtgcaaaatcgacggtgtaaatcagacgctgattaatctttatgatacacgctatctttatgcctcaacccatagccgcgcgacgctcggtgaaggaacgcgctgggtacaggagttagaaagctatctgcaacggcatcagttggaagactatcgggacaggatacttaatggtgttaacgatgaatgttga

SEQ ID NO: 76309 - DNA, 558 bp, Citrobacter koseri
atgggatcaaggggggaactgataaaaaccggggatattaccagtggcaccttaactaacggggtactggcgcgcgcttcggtcgtcaaccagttttactttgctaacatcacgctaaacggaaccaacaccgtcacctctgccgcctgctcggtaacatcggtggatgagccggtccagcttggcgagcacaacaagcgggagttcagcggcgtcggctacaccacggactggaagggatttaatatcgtgctggactgcaataaaagcgcgcatatttatgtgcagattgatgccacccgggatgcgtcgaatgcgccaggcgtgatggccatcgattccgaaagcggcagtaccgcggcgacgggcgttggggttcagctttacttcgcgccggacaacagcgcggcgcagttcgggcaggtaaaggattattatacttcgccaaatggcgggatggagactgtgcagctcaaggcgcgttattaccagacggcttcagcggtgacggcggggcccgccaatgcgacggcgacgtttacgctgacgtataaatag

SEQ ID NO: 76310 - DNA, 462 bp, Citrobacter koseri
atgagaaaatttatatgtttcttgctgttgatgctggtggtttcaccgatcgcccgagccagttgttcattttacagcggcgtgtccggagaagtgccaggttatctgaacttcggcaatgtggttgtccagcgcgatacaccggtcgggagcgtgctggcaacaaccgtaaccggggcttataacaatggcaatgccatcgccggatgtacccgtgaagcctggaccgctcgctgggagctgacgcaatgggggacgctgagtggctatggcaacggcgtctacaataccaatctttcgggcgtcggtttacggctgagcactgctcaatcgggcaaagtattgccgtatgaagccagctatccctacaatgccgggggctcatgggcctccattccaggagatgggatcaaggggggaactgataaaaaccggggatattaccagtggcaccttaactaa

SEQ ID NO: 76311 - DNA, 954 bp, Citrobacter koseri
atgaaacttattcgctacattgtggcctttacgagtgtcatcatgttttctctgccagtgatggtctgggcgtcatgcgcctttacgggcggtgcaacctcagaaattagcggctatgtcacatttggcaatgtgtctgttcaacgcgatgcgccgataggcagcgtgcttgctacggcgacaaccgggacttataacggtgggcaggcgattgccggatgttctgaaccctggacttatcgctgggaactgagcaaatggagctcgttgagttctcagggcaacaaagtctataacaccaatattgcaggagtggggctccggctaacaaacacggcatccggaaagttgcttccttatgaccagagtatgggaacgggcagcgtcattattaatgctgatggtattaaagctgaattaatcaaaacgggcgatattacgggcggaaccctggataccggtatgctggcgcgggcctcggtggcaaaccaattttattttgccaatgtcacgttgaatggcacaaataccattacctctgaatcctgctccgttaccactaacccggttaatgtcacgctgggcgaccatgacaaaagtgagttcagcggtccgggtaccggaacggcctggcagacattcaatatcaatctgagttgtgttcagggcgcgcggattaatgtgcgtattgacgccacggcagatagcgacgcgggcgtacccggcgtcattaaactcgacagcgatcccgttaatgccagcggtgttggtgttcagctctggtatcgctatgaagacagcccggtacagttcggtcaggagcggtattactacacctcgccttcaggtggtaacgaatatgttcagcttcaggcgcgctattaccagacaacgcagagcatcacggccgggaaagcgaacgccacagcgacattcacgctgagctacaagtaa

SEQ ID NO: 76312 - DNA, 2508 bp, Citrobacter koseri
atgaataacccgaattcccgactgatgatcttcctgctggcgctgttgctgattatggtgctcctgttgggttatctgcgtcatgcggaagcccgcgagaccttcaatacccacgcgctggagctggacagcccgggccaggcggtcgttgacttatccgctttttccgaagccgatggccagctaccgggcacttaccgggtgacggtgtatgtgaacggcgagcagcagggcgaggctcaggatattgcctttgttgccgggccagataaaaaactcaccgcgcagttaactcccgcaatgctgaaagcctggggcgtgaacaccgccgcgtttcctgcgcttgccacactgccagcagacaaaccgctggaggatattggccgctatatcccgatggcttccagcgaactgcgtttcagtaaactgcaactgaatctcagtatcccgcaggcggcgatgagcgccactgcgcgaggctgggtggatccgtccgaatgggacgagggcgtacctgccgcgctgctgaactataacctcagcggcagcaatacctggcgcgacggggaaaatggctccgatgataactactacgctaacctgcagagcgggctgaacctcggcgcgtggcggctgcgcaactattccacctggaattacgatgaggataacggcagccactgggattcagtgaacacgtatcttcagcgggatatccagcgcctgcaggggcaacttacgctcggcgacagctacaccccgtcggacatcttcgacagcgtgcagtttcgcggcgcgcaactggcgtcggatgacaatatgctgccggacagcctgcgcgggtttgccccgatcatccgcggtattgcccagtcgaacgcccaggtcaccattaagcagaacggctacaccatctatcagagctacgtcgcaccgggggccttcgccatcagcgatctctacccgacatcgggcagcggcgatctggaggtaacgattaaagaagccgacggcagcgagcgaacctttattcagccattctctgcggtaccgattatgcagcgtgaaggccgcctgaagtatgccctcactgccgggaaataccgcagcggcaacagcgacagcgatgagcctgagtttggccagataacggcaatttacggcctgccgcacgccatcacgatttatggcggcacgctgtactcggaggactatcagtccggggcggcgggtctggggtttggtctcggcgagctgggttcggtttccgctgacatcaccgccgcacacaccacgctgaataacgatgaaactcacgacggtcagtcgtaccgggtgcagtactcaaaagattttcaggccaccgataccagcttcaccctggcggcgtaccgctattccacggaagggttctataccttccaggaagcgaacgacttacgcccggacagcgatgatggctggcggctgacgtacaacaagcggcagaaactccagctcgatctcacccagagtatcggcagctacggttcgttctttgtttccggctaccagcaggattactggcatgaggacggttacgagcgcaccctgagtaccggctggaacggcaatatcaacggtatcagctacagcgtttcctacagctacagtgattatccggacagcactaagcctgccgaccagcagctggcgttcagcatccaggttcctctcagccgctttatgccgaacgcgtgggccagctacagcgtcaacaccgcgaagcatggcgacacccgccagcaggtgggcctcaatggaacggcgcttgccgataacaacctcagctacagcctccagcagagctacaccaaccacggtacgggcggctccggcaatatcaacgccgactataaaggcgggcagggcgaaatcacgggcggctacaactatgacgacgacacgcagcaggtgaactatggcctgaaaggggggattgtcgtccatccgcatggcatcacgctttcccagccgctcggtgattcgcttgccatcgtgaaagcgcccggcgcggatgacgcgaaggtgcagaacaataccggggtctataccgactggcgcggctatgcggtcgtgccgtacgtcaacgcttaccggaaaaaccgcatcgcactggacaccagcacactcggcgatggagtcgatatcgacaccgccgtgcagacggtgacgccaacgcagggcgcagtggtaatggcggacttcaacacccgcgtcggacggcgcgtactgatgacgctgctttaccgtgggctgccggtgccgttcggcgctcaggcgaaaatgaaggaaggcggcagcggtatcgttggcgatgacggccaggtgtatctgacgggcgtcccggatgaaggtgatatcacggtgaactggaacggaaagcagcagtgcgtggtgcattaccggttgccggagaatgccgcaaacgcgccggtaacggaaactgagcaggagtgtcgggaatga

SEQ ID NO: 76313 - DNA, 681 bp, Citrobacter koseri
atgaacaggtatgcagacattttgctggcgctattgctggccgtatttaccgtgcaggcacaggccgggattgtcattggcgggacacggatcatttataacggcgacaaaaaagagtcctccgcttctatacgtaaccccgacagatccggtgtctggctggtgcagagctgggtggacagtggcgtgaaaggcagcaaaacaccgtttatcgtcacgccgccgttgtttcgcattaatccaggcgaagagaacatcctgcgcattgtgcgcaccggagggaacctgcctgaagaccgggaatcggtgttctggctgaacgtgaagtccattcccgccaccgacgacagcgtgccgcataacaacgttctgcaggtggtggtgaaatcccgcctgaaactcttttaccgcccggcggggctggaaggacagccggagacggcttaccaccatctttcggtctcccgtagcggcaatcgtcttacggtcagcaatcccacgtcttactacgtcactttgttcaccttaaaggtggacgggcaggagatcaaagaggtcgatatggtgccgccgaaaggcagcgtcagcttcacgctgccatcggccacggcgtccatggtgagctggcagtcgatcagtgattacggcggcgtcagtcagaccgaaagccgtaagctctga

SEQ ID NO: 76314 - DNA, 513 bp, Citrobacter koseri
atgaaaaaaacgatgttaagcgcgtgttttatgctggcggcggctaatgccatggctgccgacggtaccatccatttcaccggtagcattactgaccagacctgcaagatcgacactggctcccagaatctaccggtgaacctcggcaatgttgcccagaccgcccttaacggggcgaaggggatgagagcggcgccaacgcaatttaccatcaacgtgagcgagtgcccggaaacggtcactggtgcaaatgtgaaatttgacgggacatccgataacaacgaccagagcctgctggcgctggacagtggcacgggcatcgccaccggggtcgggatccagatcgctgataaaaacggcacggctatcccgctgcactccgcttcatccgactacaccctcgcagaaggcgcaaacgcgctcgactttgtcgcccgctatgtctccacaggcccggcggtcaccaccggtacagcaaacggtacctctgagttcaccatcatttacaaataa

SEQ ID NO: 76315 - DNA, 447 bp, Citrobacter koseri
atgccagtaaaacgaaaacatctgacccgccatgaagtggggcagatactgcttgcagcggacagagggatccattttgagcgtgattactgcctgattcagatgtgttttatacacggtctgcgggtcagtgaactgtgcggaatgcgcctgtcggatatcgatttggtcggtggttcggtgtatgtcaggcggctcaaaaatagcctgtcaacacagcatccgctgttcgatgccgaattgcccgcattgatgcgttggttaacggtgcgccgtcgctggcgggatgctgactctgactggcttttcctgtcacagaagggggggccgctgtcgcgccatcaggtccggttattgctcagacgttacggcgaactgggcggtgtcagtatttcagcgcatccccatatgctgagacatggatgcggttacgcgctggcgatttag

SEQ ID NO: 76316 - DNA, 933 bp, Citrobacter koseri
atgccagaccgctttcctcttctgttgcccctggtgctgtgcgccgctttcccgctcagagccattaccacgccggaaattgcagcctccgccctgtcgccggactgcgtgaactaccgggttgtcggcctgtgctactggttgtactgcacgccgttcggctgtacggtgcgtacgtcggtgaaggtcagtcatttccgtccggatctggtggtgtcggcttacagcaacaccgggcaaagtccgtggacggagatgtcgttactcagcccaccgttgcccggtgttgccgaaggcggcggcgatacgaatcctcgttctgccagccagcacagcaagatccgctttaagaatgccgatgctatcggcttcccggcaggcgatgaactggcaaaatttttcacccagtttggctatatctgctcaccttcatcgcagccttttcaaccgtactttctgagtcaactcgatacgctggcatggcgcagcggtgtgccggaaatgacctggccggaggcgctgacgccgggcatgcgggaagtcggtcagaacggcgatatgtggggcaatatctacccgcgcgccggagccatcagccagccccacgcctataaagccgccgccgttatcgcccagcgcgtggccgatctggtgacgcgtaccgggcaactgcatatctacactccgctgaccgcctcatcccgcgccggatactggccgccctccccggttatcgaaggcgacagcgataaccatcgctggcaaatgctcacgccgaaaaaatccgccgcctgttcggtgttcccggatggcagcaccaccgacacttacgccgacaaggtggcggagaacggcgcgtacgcctggacgctgtggcggccctataaatgctgtccgcgccgggggcaaaccttcctcggcagtacgggttaa

SEQ ID NO: 76317 - DNA, 1362 bp, Citrobacter koseri
atgagagtcctttgcctggtcttactgtttttcgcctgggtttgcgtggcggcagacgactacagcttccgcacacgaggcgcggttgacgacctgctttactatcagattggcggcggtgaagcagtcatgccgccccccgtgcgtcgcagtccttcaccactcagcgtaggcattggctggaacgccgatatgatgtgcggcaattttgacatcgacaccacggtgcgcaaccagctaaacggcatcaccgatggcttccagcaactgatgggcaacgttatccagagcgccaccggcgcagttgccagcctgcccgcgatgattatccagcgcgccaatccgcagctttatgatctgctgaccaacggcgtgctgcaggggcgtctggattttgataaatcgctgctgaactgccagaaaatggcggaaaagatgaccgatttggcggcagattccgcctggttttccggagccaaagcggagaattaccagtccctcgccgccagcgacaatgacgccatccgcaccgaccagaaagcggcaaaagaggccgccgaaaagggaaaacgctgggtaggtggcgaaaagcgcggcggcaaaggccagccgccaatcaaggtagtccatgacgccaccgccgcaggctggaatattctcaaccagcaacccgccaccagtacagcttctcttaccacctctgaatgcgacggggaactttgtagcgcctggacatcccctgaagaggccgccggatggatgacccgcgttgtcggcgagcagaccatcagcgtggcgcaggccaccgacgatccggatgcgcgttccggcgcgcaggcggggatcggcctgcatccgctgatcgacgaagaaaaggcgaagatcctgccccttctgacggatctggttaatggcagccagaaacctggcttcgacaacctagcgaaagcctccggcggatccatgcagctaacccgcggcgtggtcgaggcactacgcgacgatccggatgttgccgtcctcaccgaacggctggcgggagaactggcgctggcccgcgtcaccgagcaggcgctgctagctcggcgcacgctgctcgcgggcatgcgcgagcccaatgtcgccaacgtcaaagaggcgcaggagagcttgggcaaaaccaccgcccaactggatgaagagctgagccagcttaagctggaactcgatttccgccaggcgctgacgcgcaataccgccagccagatcctgcaacgcaaacagcagcgcgaccagcttcaaggccaggcggtggaggtgtcggacgacagcgaccgccgcctgcatcagttgaataacccacagccggacagcccgcaatga

SEQ ID NO: 76318 - DNA, 1503 bp, Citrobacter koseri
atgacagccaacagctatttcgagtacgtgctcaccctgctcggctggctggtgaacaacggcgtttggcagacgctgaccgccaccgggctgttcgccctgcccctgctggcaaaactagttgccctgtggcttaaagcgcgcggccagggggccgatgaaggcaacgtcgcccgcctgctggtcgtctgggtggaacactcgctctacagcgccctgctggtgatcctcttcgcgggcgtgccgttcctcaatgtcgatatcaataccctcgcctacgacagccagcgtacgaagcaatgcggctggtcggtggtgcaacccggcgattccggctatgcgccactgatcaacgaacttagcggccagagcgcgtccgttccggtgtggtggtacttcactcatgcgttgggcaaaggtatcaccagcgccgccgtcgcggtattgccctgcaagccggacctgcgccagttgcgctttgaagtgcagcacacccggattgccgatccggcgatggcgcaggagttacaggatttcgttaacgactgttatggcccgtcgcgcgcacgcctcaagcggttgggcagtgatatcagtgaggagcaaagccgggaggtggactgggtgggatcgtctttttacctctccacgccgggctattacgaccacgatcattcccgctcaccccgtgtcgcctggccttatgacgccagccgcgatgatggcctgagtgatacaggtggcggaggctatccagcgtgtaaggagtggtggtccgatggcgatgcggggctgaaaaaccgcctactgaagcaggtcgataccacgctctggcagcaactgcaaaaactggggcagtcgaaagaggagtatgaagaagcggtactgcgctcgctggtgagcccgcgcaatatgcaggtatcgcagggcgggctggtgtacaacgggtttggtgggagtgcggggaataatctcagccagacgcagttgctgagtcgtgtgggcgggatcattggcgcggggctttcgagctacgccctgtttccggcttttgataacgtccgacaggcactgccgatggtgcaggctttcctcgaaatggcgctggtgatttgtattccggtgatcctgctgttctcggcatgggatcttaaaacggtcatcacgctaagctttgtgcagttcgccctgttcttcctcaccttctggtgggaactggcacgctggctggataactggctgatgcagatgatgtacgacagcgacacccactcgtacttcaacctctggggcctgcaaaacacctccgacgatctgattgtgaatattattatgggcgtgatgttcctagtgttacccgcattctggctgggcgcgctgacgtgggcaggcgtcaggatcggcacagcagtcgctggggtgatgggcagcgctgtcggtgatatccgcagcgctggcgaacaggtcgggaaaatgatcgtcagtaaaacgcgtttaccgtag

SEQ ID NO: 76319 - DNA, 663 bp, Citrobacter koseri
atgagtgaaagtgtaagttactttgacaaagtcatatctttaataaatgcagtggtaccagtcctagctatttattttgctcagaggctttggcatgccaaaaatattgagcgagcgcatcaggcggcaaatgattttcttgacgaaatgacatcattaccaatgagagtaatgttactagaaacagagatggtcagagggttagttagagctgaatcagttattagttataaaaataaaaatgaatttgtgtgtgagttgctgcgtcttatggataattcgaataagatcaaactttcgttttttaattcctatgaaagagttgttcgaagggggattaacatcaaaccttcccaaaaacatatgaaactcgaaaaatctgttattgagtttactgaacatgtttcaaaaattctccagaatgcagcagaggctattagtagatcgacaacaacagaagaatatagagagccattcagaacgttagctggtgctagaattgttataaccaaaaataaaaatacactcaatgaagcctgtgctgctacaaaggatatttcgtttgatgactatttttcctttccttcagcatatggttggttcaggcataaatgggatagtttgattcgaccttttttatttaaaccgtttaaaaatatgtaa

SEQ ID NO: 76320 - DNA, 291 bp, Citrobacter koseri
atgtcgcttttcgataaaaaaccatcgttaatgccggtggttatcgcccctgatgtctggcaatccgctgtggaatttcccgccgacccgcagcaggtggaagaacggctgggcaatctgttgctcgccgtactgctgaccctgcgcaccgccgggacgtcccgcaagaaagtcacctttacgatctactgccagccgccgcagggcgatatgaaagtccctgtcgcattaccgctgtcgctcaactatcacggccactatgtgcaggtctcgatggctgaacaggcataa

SEQ ID NO: 76321 - DNA, 906 bp, Citrobacter koseri
atggacagaagcaacgatatctaccagaaagtcaccgaccagattattgctgagctggaaaacggcaatgtgccgtggatccgcccgtggcgtgatggcgagccgccgttcccgatcaatgcgttatccggtcgtccgtatcacggcatcaatataccgctgctgtggaacagcgccgacaagcagagtttcgccagcgaccgctggctgacgttccatcaggtcagcgcgctcggcgggcaggtgcgccggggggagaaatcctctctggcggtgttgtatctgccgcgcacacaggaagagaccgatgcactcggccagccgttgctggataaagacggtgagccaaaggtgcggcatttcgggattattcgtgaatttcggctgtttaacctgtcgcagtgtgacggcctgccgcagtcgctgtccgagccgtttacccgacccgcagagcctgtggagatggccgaaaccattgcgaagaatagcggcgtgacgctgcgccatcgccgccagtcgaaagcgtattacaaacccgcgaccgacctggtgatgatgccgcacccgcagcagtttgaaagcagcgaggcgtactacgccacgctactgcatgaactgacgcacgccaccggtcacgcttcacgcctcaaccgccccggtattgccggagcagaacgcaccgaagcactctacgccgctgaagagttagtggcggagatgggtagcgccttcctttgcgcccattgcggcatgcagggcaggctccagcacgccagctatatcggctactggctggatatcctgcgccaggacaagcgggcagtgatccgcgccagcggtatggcgcgccacgccagtgaatggctgctcaacgctgtaccacaaccctgtcagcttagcgcctga

SEQ ID NO: 76322 - DNA, 171 bp, Citrobacter koseri
atgggactcgatctcttctttttcgaacgggcaaaaaacgcgcccgatgaaagccagtacgccagagtgggttatttccgcaaggtgaacccgctacttaaatgggtggataaacacgttgggctggtgcgcaaccaggtactgttagaagtcacaaaagcacatttgtag

SEQ ID NO: 76323 - DNA, 741 bp, Citrobacter koseri
atgaagctagatacttatgaaagaggcttttatatgtctctatgttctaaagatgaaattgaacgtatatttgatgtcaaaaatgaaaacgattaccttttaaaattacgagctaatgcaacaattgaacacatacggattcatagggtttttcttgcaaggatgagagcaggtaaagatgattggtctttcgaaagcagttttaagtatgatgttttcgaaaaatatctgaataatctttctgataaagataaagagtatgttgatagtatagcttcaggtttggttttctgtaacgatcccaatgggagaataataaatacgccatacggtaatattatcactttatcggaatctttaaaatattttttgtattttatgaatttggcctttgttaattttaatgctgatgttgaaattccagacaacgtaaggttctgcgcacttaaaattgcgttaagaataatgctcaaatcagagtctctagattttgacatagaccccagaggtgaagttccagaagaaattgaacaggaattatctcgttacattgatgatcaaatgttatttcttatagctcatgagtattcacattattttttagggcatatggataatgctaatttaattgatgatgtgatgcatcatgcaattgaagatattgatgggaaaactcctaagtattttacacatggacagcaacaagaattggatgcagatgttgatgcgataaatcgttag

SEQ ID NO: 76324 - DNA, 1590 bp, Citrobacter koseri
atgctgaagtggttacgaagatcaccccagaaccagctacctgcgccagatgctacgctgccggagggctggtttgcgccactatccgcagagcgattgttggcgacaccgttacgccagtcctgtttgcagcagttatggcaactgaccccgctgccggataccctgtttgatagctggatcctcacggcgattcatcgcttcgccacgttggtacaactgctgcccgcctcacaaagtcatcaccattccactcccggtgggctactggatcattcgctggaggttgcctgcaacgccatccgactgcgccagggttacctgttgccaccagaagcgggtgcggaagaacaggcccgacaggccagcgcatggacagtcgcagtggtctgcgcggcattgctgcacgatacgggaaaaatcgccgtggatatggagattcatcaacgtgatggcacccgctggcatccgtggcagggtaaactgacacagccttatcgctggcagtacgagagccacggtcgcgactatcatctgcatccggcagctggcgcaatgctgattaatcagttgataccctcgccattactggactggctggccggatacccggcggcttttgcgtccctgatttatcagctcaccggacactacgaaagggctggctcgatggtggaactggtacagcaggccgataaagcctctgtcgcccgatacctcggcggcgatatcaaaaccgcgctggcgcaaaagccctcttccttcccccagcaacttcttaccgccttacgctcactggtacagaacgagtaccggctcaataatcccgaatgcggatcagatggctggttgacggaggatgcgctgtggcttatcagcaaaaccaccgccgaccgggttcgcgcctggctgctccagcatggcgtagccagcgtaccggaaaataataaccgcctgtttgacgaactgctggcacatcagcttatcgttgccaatgaggataaagcgatctggcgctgcattatccgatcggataagggctggtcgcccgttgaaccgctgacgctgctgcgcctgacgccgtctgcaatatgggaaccaggcgaacaacgtcccgcctgttttgccggtgatgtgacgccggtaagcgaagctgaacccgttcctgaacttagcgctcccactcaaccgctgccggagatagcagacgacccgaggcttggtgacaataacaatttcctgccgtggctgaagaaccacaccaacccttcaggcacggtgaatacccggaacggcaaggtacatgtggtggaaaaccatcttttcttgatttcgccggggatctttaagacatacgcagcagaaactacaggcgatagcggcgacggctggaaactggcacagcgaatgtttcaggagtcagggcttgccctgcgctgtaatgatgacagttttatctggacctgcgaggttcgggttccacaaaagaaaagtagtcagttgaaaggttttctgatggaagatccgaagcaggtgttgggggagaaagtgccggtgaataatccgtggctgaagttgctgcgcgaatag

SEQ ID NO: 76325 - DNA, 654 bp, Citrobacter koseri
atgaagaagaaactgccagaccagctttccagagaatgcattattgcggctatgcgcgcctatgatgaaggtgtacaccaccagttcagcgagtcccggctgtatgatgtggtctttgaagggcgcagttatccaccgaaagctatagtcggtattgctgcttcaaatatgacaggcgttgagttttcccctgaagattttagtggtggtatcaagtcgaaatgcgtcaagttgcttaccgatcaagggtttcagatcgttgagaaaaatttgggtaacgagcagcctgccatcagtatttttcctgatgaactgccgccgcagagcgtatttaatgaaggtgcagctacgcaggtaacggttaaccgctatgaacgcgaccgtaaggcccgccaggccgcattagcctggcatggttgtctgtgcagagtatgtggtattgatatgatgaaggtgtatggtgagatagcaaaaggttttatccatatacatcacctgattccgctatcagacatcaaagagaattactctctggatcccaaaaaagatcttattcccgtctgccctaattgccacgccatgttgcatcggcgtaatccgcctttttcgcctgaagaattgaaatcaattattgaatatcatgcggctctttag

SEQ ID NO: 76326 - DNA, 267 bp, Citrobacter koseri
atgttaccccggacacaccgccagctcgtgagcgttgaagtgatgtggcctgctcagacgctaccgcttcctctgcaacaggtagtcgaagcattgaatcagggcgaaacgcccgatcagattattatccgcatgaaccaacggggtctgctggcgtggcgtgaggatgcatccgcgcaggatacacacgatatctttcaggtacggctggacaatcagcatgaggcgcgatttctctgccgctacgttacgttgccgctgcactaa

SEQ ID NO: 76327 - DNA, 1077 bp, Citrobacter koseri
atgaactggaatcccgaagccccttacaacgatctgccaaaactgccgcctgatctgcagcagatagaaacacgtaatgtactaaaagcgtgtataaatgcgcgcgcggcaattgcagagctgaaaacggcgggtgagttgatccccgatcagggattgttgattaacattctcccgatgctggaagcgaaagattcctcacgcattgagaacatcgtaacgaccagcgatcagctctttcagtatgctgatcgtgcagacggagcagatccagcaaccaaagaagcattgcgttatcgtacggcgctttatgatggttatacccatcttgagacctatccactttgcacaaacaccgcaatcgctatctgcaccaaattacgcgcagttcagaccgatataaggaaaacaccgggcacggtactgcgcgatcagaataacagcgtggtgtatacgcccccggtgggtgaagataccatccgtaacttattggcgaactgggagcagttcatacatggcgatgatgatttagacccattggtgaaaatggctattgcgcactatcagtttgagtgcatccacccttttccggatgggaatgggcgaacaggccgtatcctgaatattctttacctgattcaaaatgaattgctttcactgcctatcctgtacctgtcacgctttatcctggagagacgtagtgattactacacgctcttgcgtagggtaacagaggaaggagactgggaatcgtggatattatttatgctggaggccgtagaaaacacatctcgatggacgactgataagattgcggtcgttcgggcattgatggcagaaacgaccgagtatgtacgtgagaagctgccaaaaatttatacctatgaactcatccaggtgctctatgcacaaccgtattgccggatcgataaccttgttgaacgaggtatcgctaaacgccagacggcatcagcgtatctcaaacagttagtcgagataggcgtgctggaagaaatgagcgttggtcgcgaaaagctgtatatcaacaccaggttggtacaggaattgaatcagtaa

SEQ ID NO: 76328 - DNA, 129 bp, Citrobacter koseri
atggatacgattggtttatttgaggggaagctctttactgacggtttctacagctttgttattggaggacgctacgacgatttagccttcaaccataaagatgttagatcgcatcggtacgaagactag

SEQ ID NO: 76329 - DNA, 1131 bp, Citrobacter koseri
atggcatacaccaaaaaccagcatgttctttcgcagtgggttctgcgaaactttcgtagtgatgacactgcgctgagtccgaaggataagcaacgtgtctggtgtcacgtagtggtgcccagtgctgacggtgaaaatgatatcaaggatatcccgctacccatatccagcgtagccatctgtaaggactgttttcgtctgaaggatggtgatacaggtgactttttcgatattgagcatgaactcagtgagtatgaacaggatatgtccgttcttgttcgtgagcttgttcagcatcatcaattttctcgtttggcaaattgcaatatacatgactttccagtggaaaaactgtctagctttgctattttacagatgatacttaaccttaataatccgcaaagtcgatttcctgacaaggatgagttaaaagcaaccttaataaatcctttgattaataatattgatgagcatatatcagcagtgctttcacttccgaatactcaaccagcttttgcctctgagcctatttaccaaaaactgatgcgcatcgctgggtcttcatccgaggtggaggaaaaagcacatgcaatgtttgttctttattcattgcttgctctgcaaaaaaaaccgacgcctgtggcaacagctgcttatctaagggacgagatattttccggtatttacagtattgatgtttttcataccggccatgaattaaatagtaccaaaccaagaccggtttttactgtttcccccaatgtgttttgccctttagttgatgaagctgtcatttacttacccctttctcataactttgctctgcgatttaatcagcggccggggaaaggtttctattcggatccaataatcagaattttcagtccagcccctcagaacctgtgtgatgaaaaatattctcgcgtaaaaatatataagtgctcctatgattatattgaccaagttatgtcaaccatagatatgtacaatgtgggattttcaaatattatatattcaagctggcagctcagtgatgttgaaaactatctgaggctacaggatgaagatcctgatacctattatcttcccgaacagccgattcgctggacatcggttgcagataaaagctaa

SEQ ID NO: 76330 - DNA, 1101 bp, Citrobacter koseri
atggccttagcacatttcatgcgtgatactttatcccttgtcaagcgggatggaagcagaactgatgggctcaaagggaacgttcaaaaggataagattttcattcatcgaaacgatattgttattggagaaggtgatgttcttattcgtagcatgccacatggtggagttgaagagtatatcgttgtcgagcctaatttcaggcagggattagggagtattcccgcaggttatcaggctgaggttagacgaaagacagaagcaactccagagcatgttatgtcgtctacgtcagcagcgattccggagtcggttatttcactaatccagtcgttcatttcattatgtattaccgttgtaaatgaagatgcttcgcaccctgagaagcatgttactgtctatcatacattgcgccagaaaatccttgaactggacaatgtcatgactatcccctcctggatacgcttctcccaaaccccagcggctgtgaagaatagcgtgggtttatacgttcaggggggcagcggtggatgggatagaaggcgtcaatatttacagagtgaaatgataaacatgctttcgagctataataatttatcgttctccggacattctgttagtcaaaatacaatcaaaactactgagcagattagcgggctaactacaatgggaagtgattcagtacttaatatgaaaaagaaagttttcattgttcatgggcatgatgagcacttaaaaaatgaagtttttatcttcctcagtaaagaaggattcgaacctgtcattcttcatcatgagataaatgaaggattgactattatagaaaaactggaaaagcatatcgataaggtttcatatgccgttgtgctttatactgcctgtgataagggcaaagcaaaaaatgatgtggaattgagtgaccgtgcacgacaaaatgttgttttcgaacacgggtggcttatttccaaactctcacgtaaaaatgtcgcggcgatcgtcgaggaaggtgttgaatttcccggcgacctgtcaggtcttgtcagaataccgaagtctgaatggaagtatcagctctcaaaggagttaagcgttatcaaataa

SEQ ID NO: 76331 - DNA, 1686 bp, Citrobacter koseri
atggcactaacagatcgcgctatagtccacgccaagccttgtggcaagccgtataagctcagtgactcgcatggactttacctgctggttaaccctaacggttcaaaacgctggtacatcaagtaccgctttgtaaataaagagaaaaagctcgctttaggaccttatccgcttttgacgcttgcacaggcaagacgcatgcgtgaagaggcccaattactgctgatttccggcatcgatccgagcgcacaccgaaaggctgaacgccttgctataacgccggaacatacgtttgagtctgtggcacgcgaatgggtcaccagtaacgtgaactggtcggcggaacataagaagcgggtgctgcgttacttcgagctttatgtgttccccacgaacggcagctgtgacatcaccaaaatgaaggttaaagacctgctggtacccatcaaagaggtggagaaagcgggcaagctggatgttgcttcccggcttcagcagcgcaccgcctgcgtgatgcgctacgctgtccagaacggcattatcgatcataaccctgcatcagatttaaccggcgcagtctccacgcccaaagtgcgtcaccaccctgcactggatcttaatcttatccctgatttcctggaaagaatcgacgattacaaaggccgtcaactgactcaactggcggtaaagctggcgctgctgctgtttatccgctccagcgagctgcgctttgcccgctgggatgaaattgacctgcgtaacgccatgtggacaatccctgccgagcgtgagccgatccccggcgttaaatattcagcgcgtggggcgaagatgcactccccacatctggtcccattgtcaagtcaggccatcgaactgctgcacgaggtgcggcagcattgccgaccgggaactgaactggtgttccccggtgatcacaattaccgcaaaccgatgagcgaaaacaccatcaacaaagcgctgcgggtgatgggctatgacacccagaaagatgtttgcggccacggttttcgcactatggcctgtagcgcgctggtggagtcgggcctgtggtcaagcgatgcggtagagcgccagatgagccatcaggagcgcaagcgcgtgcgggcggcgtatatccataaggcgcagcatctcgaagaacgtcgggagatgatgcagtggtgggcggattatctggatgcaaaccggttcaggcatgttgtgccgtatggcttcaaaaagtcgccgggaggcgcactcgaccatatgagtttccaggagcgcaatgaccggcagctagaggagctgaaagccagaatactggctgactcggaatggctgacggcgtctgaattatccgcaaaagcgggttttcgttccgccgatcctgatgctggcccgaaaggctggaaagccgccgggaagatattctcgctgaaggtcgatggtgaggatttgtacccggattatgttctggatgagaaaatgaggcccctcaaggttgtcaggctgattctctcgctgttcaaagaacgtaagaccccgtgggggctagcaatctggttcggcttggcaaatcgcagattgagaggagggaagccgaaagatttgttggtgtcaaagtcagagttagttttgatggcggcgcaggatgaggtggagtcggaggatgctgatatttag

SEQ ID NO: 76332 - DNA, 852 bp, Citrobacter koseri
atgagtaatgatatgtatttattaatgtctctgccccgtgagatatttgctacatcccatcgctttgaagattatcatattgatgatatgcagtatggtgatttggacgactgggatttttacactctggggttgaaggatatctctgctcgggttgacccgttcaggtgtttgcaatttgatatgatgactacttttaattcgcaggctttggatttcgtccatcaacaaccacaaggcaggccgattagtcgccagcattgtgcagatattctgtttgatgagatgaaagaactgtcagcacaattcgctaaagggttatattctcctattattggggaactgattgatcatttccattacggtaacgggcagccatggtttggagaacttctaaatcgcgcgtatgaggaggtcataaggggcgttggaacgaatgatatgttgatgaaaattcgggatgagatcaataaacaattgcatagtaaacgggacgcacgcctggatgatttcttctttgtaagacttaaatcagaaatgcaagattctaaactgccaaaattcaaccgttatatcgacagggtaaatggtttgggggtaagcgtacatgatatttatacacaacaaatcaaactggtgcgttttcagcgctatgccatgtcatgggagggattactttcttttaaagggcaggatcattttggtctgggcaaagaggatattaccaatacgttatataaaaactttcgcttcttccgcatctggttttttctacagcgtcatcgtgactatgcgtacaggccgtttctgacaaatttaaatgctcatgcgcatattaagggaagcgtatga

SEQ ID NO: 76333 - DNA, 201 bp, Citrobacter koseri
atgaaactatcacttctggatgttgtgttcctgaatgttgatttacctgccgttggtttaacgaaaggtcagatcggtgcggttattgatgtgtatcactcaccatcgttagcttatgaggttgagttttgtgatgaagaaggaaagactatcgtatctctggctttatcatcggagcaactgaccaaagatttatcatag

SEQ ID NO: 76334 - DNA, 1128 bp, Citrobacter koseri
atgagtgatattgtttatcttaaactcattggtgagcaacagggtgatatttctgatggatgtggcacgactgattcggtcggtaatcgttggcaacgaaaccatgtgaatgaaatatttgtattttctttgagttcgggggtaacgaatacaggtaaaggtgcgaatctacagagcttaacattcagcaagcaaatagacaaaagttcaccgctgttagctaatgcgattaataacaatgaaaacctgtttctggcattttggttttaccgcataaatagatatggtcaatgggagaagtattattatattcagctcagaggtgcttcaatatcaaggattcagcttcgcattataaaagacgagatagatacagaaacaatatctgttgattatgattatattctcagtaaacatctgataagcaataccgagtgtagttatcttgccctacctgcggaatacaataagctgtttgttccaacgccgaaagcccagactcatacccttaacagcgctggcgtagggcgactgctggcggccggggggatttataatggtaatgtcgatgggtttcatcagacagctgaattgctcggtggtgatgctcctgttggttataaccaggtaatgaacgatcagaccaggggattgctgattgctggcgcttcaatcgccgccgggttaggggttggtaggctgagcactgtaaatgggccaggcgaaatatcgaattatagtatggtcccgtcccttgaatccccctatttaaaaggattcacatctgaggctggaacattactcaatgccaaacatgcagttatcgatcctaaaaaaatagcttcttatgctctaaattctgatcatccggttgggggaaataaagcgcgagttttcgaatcagctttgggttataacccatctaatgcaggggtcttagtttccagagttcagcagggagtcctgtctaaccctgctgaattagggctatatgacagtttcggtcaaagactgtccgttgatgtaccgattatcggtgtgaacggagaaactgcgatagtacgtactggttggatatatgagactgattcgttagtacctcgcatgacaaccctctatgtaaaatag

SEQ ID NO: 76335 - DNA, 135 bp, Citrobacter koseri
atgccggatggcgacgctagcgcgtcttatccggcctacaggtgcgtgaccgtaggcgataagcgcaacgtgaccggcctacaggtgcgtgaccgtaggcctgataagcgcagcgccatcaggcagttaacgtaa

SEQ ID NO: 76336 - DNA, 1479 bp, Citrobacter koseri
atgtcgaagaaatacatcattggaattgatggcggaagtcagagtacgaaggtcgtgatgtacgatctcgaagggaatgtagtgtgcgaagggaaaggattattacagcccatgtatacacccgatgccaatacggcagaacatcctgatgatgatttatggacgtctttatgctccgcagggcaagacctgatgagtcagttttcgggtgacagaaaagacattgctggaatcggtctgggttctatccgttgctgtcgcgcattattaaaagccgacggcacgcccgcagctccgctgattagctggcaggacgcgcgcgtaacccgtccctacgaacataccaaccccgatgtggcttatgtcacctcattttcaggttatctgtcgcatcgcttaaccggtgagtttagagacaatatcgccaactactttgggcagtggccagtggattacaaaacctgggcgtggagcgataacgatgaggtgatgaagaagttcaacattccgcgcaggatgctgtttgacgtccagatgccgggaaccgtgctcggtcatctgactgaagccgccgccctggcaacgggtttccctgtcggcttgcccgtggtctgcaccaccagcgacaaaccagtggaagcactgggcgcaggattgctggacgatgaaaccgcagttatctcattaggcacctatatcgccctgatgatgaacggcaaagcgctccccaaagatccggtcgcttactggccgattatgtcttctattcccgaaaccctgctctatgaaggctacggtattcgtaaaggcatgtggacggtcagctggctgcgggatatgttgggcgaatcactgattcaggacgccaaagcacaggggctgtcgccggaagatttactcaataagaaagcggccggcgtaccgcctggctgtaacggtttaatgacggttctcgactggctgaccaatccctgggaaccgttcaagcgaggaatcatgatcggctttgattccagcatggattacgcatggatttaccgttctattctggagagcgttgcgctgacgctgaaaaacaactacgacaatatgtgcaatgaaatgaaccactttgctaaacatgtgatcatcaccgggggtggttcgaatagcgacctgtttatgcaaatctttgccgatgtgttcaatctccctgccagacgcaatgtgataaatggctgcgcgagtctgggagcggcaattaacacggccatagggcttggtctgtacccgaactatgagaccgcggttgaaaaaatggtgcgggtaaaagatgtgtttatgccgatagagagcaatgccagacgctatgacgcgctgaataaagggattttccgcgatttaacgcaatacaccgatgtgattttgaaaaagtcgtatgaagtgctgcatggcaatctggataacgtcgattcgattcaaagctggtcgaacgcgtag

SEQ ID NO: 76337 - DNA, 1299 bp, Citrobacter koseri
atgcaacacaactcatatcgccgctggataaccctcgccattattagttttagcggtggcgtcagttttgatctggcttatttacgctatatatatcaaattcccatggcaaaatttatgggatttagcaataccgaaatagggctaataatgagtacctttggtgttgctgctattattctttatgcgcccagcggaatcatcgccgataaattttcccatcgcaaaatgattacctccgcaatgattattaccggactactcggtctggtcatggcgacatatccaccgctatgggtcatgctgtgcattcaggtcgcgttcgcgattacgacaatcctgatgctgtggtccgtatccattaaagccgcgtcgctgcttggcgatcacagtgaacaaggcaaaattatgggctggatggaagggctgcgcggcgtcggcgtgatgtcgctggcagtgtttaccatgtgggtcttttctcgcttcgcaccggatgacagcaacagcctgaaaacggtgattctgatttacagcgtggtctatatcctgctgggcatcctgtgctggttcttcgtcagcgatggtcatcatcacagcagcgcggcgaaagaagagaaaaaatcattccagctcagcgatattctggccgtgttacgcatcagcaccacctggtattgcagcatggtcatcttcggcgtctttacgatctatgccatcctcagctactccaccaactacctgaccgaaatgtatggcatgtcgctggtcgccgcgagttacatgggcattgtgatcaacaaaattttccgcgctatctgcggcccgctgggcggcatcattaccacttacagcaaaattaaatcgccgacgcgcgtcattcagcttctctccattgtcggagccgtcgcgcttattgcgctgctggtcaccaactcaaatccgcagtctgtcgtgatggggatcggcctgattctgctgttgggcttcacctgctacgcctcacgcgggctttactgggcctgccctggtgaagccagaacgccgtcttacatcatgggaacgacggtaggtatctgctcggttatcggttttctgcccgacgtttttgtttatccgatcgtaggccactggcaggacacgctcccggcagcggaagcctatcgcaacatgtggctgatgggactggcggcgctgtgtatggtgattctgtttacctttttgctctttcgcaaaattcgtaccgctaacgccacaccggaaaagatgacatcgctggccgcagaagcctccggcgagtga

SEQ ID NO: 76338 - DNA, 786 bp, Citrobacter koseri
atgtcgatcgaatctctcaatgcattctcaatggattttttctccctgaaagggaaaacggcaattgtaacgggcgggaacagtggtctgggtcaggctttcgcgatggcgctggcgaaagccggagccaacctttttattcccagcttcgtaaaggataacggtgaaacgaaagaactcattgaagcccagggtgttgaagtggcgttcatgcaagtggacatcactgagaaaggcgcgccgcagaagattattgccgcctgctgcgagcgttttggcacggtagatattctggtgaacaacgccgggatctgtaagctgaataaggttctggactttggccgcgcggactgggacccgatgattgatgtcaacctgaccgcggcgtttgagctgagctatgaagcggcaaaaattatgatcccacaaaatagcgggaaaattattaatatctgctctttgttctcttatcttggcgggcagtggtctccggcttattcagcaaccaagcatgcgcttgctggttttaccaaagcatattgcgatgaacttgggcaatataatattcaggttaacggtattgcgccgggttattatgccactgatattacgctggcaacccgcagtaacccggaaactaatcagcgtgtactggatcatattccggccaatcgttggggtgatactcaggatcttatgggggcggcgatattcctcgccagtcaggcatcaaattatgttaatggtcatcttttggttgtcgatggcggttatctggtgcgttaa

SEQ ID NO: 76339 - DNA, 1455 bp, Citrobacter koseri
atgtcattatcccgtgaagcgattgttgaccagttaaaagaaattgtgggttccgggcgtgttattacggatgaaaccgtattaaagaaaaacagtattgaccgttttcgcaaatatgcggatattcacggcgtttacacgctgcccattccggcggccgtggttaagctcggttcgacggagcaggtctctcgtgttctggcattcatgaatcagcataaaatcaatggcgtgccgcgtaccggcgcatctgcgacggaaggcggtctggaaaccgtcgtcaaagattctgtggtgctggacggcgcagggatgaatcaaatcctgagtattgatatcgaaaacatgcaggcaaccgcgcaatgtggcgtaccgcttgagattctggaaaacacgctgcgtgaaaaaggctataccaccgggcactcgccgcagtctaagccgctggcgcagatgggcggtctggtcgccactcgcagtatcggccagttctccacgctgtacggcgcgattgaagatatggtggtggggctggaagccgtactggcggacggaaccattacccgcatcaaaaacgtgcctcgccgggcggccgggccggatatccgccatatcatcattgggaacgaaggcgcgctgtgctacatcactgaagtcacagtgaaaatctttaagttcacgcccgaaaacaacctctactacggctatgtgctggacgacatgaaaaccggtttcgacatcctgcgtgaagtcatggtggaaggctatcgcccctccattgcgcgcctgtacgacgccgaagatggaacccagcacttcacgcattttgccgacggcaaatgtgtgctgatttttatggctgaaggcaatccgcgactggcgcaagccaccggcgaagggattgcggagatcgtggcgcgctacccgcagtgccagcgggtggacagcaaacttatcgaaaactggttcaaccatctgaactgggggccggaaaaagtggctgccgaacgcgtacagatcctgaaaaccggcaatatgggctttacgacggaagtatctggttgctggagctgcatccatcaaatctacgaaagcgtgatcaaccgtatccgtaccgagttcccgcatgcggacgatatcaccatgctgggcggccactcttctcacagctatatcaacggcaccaacatgtattttgtgtacgactacaacgtggtggactgcaagccggaagaggagattgataagtaccataacccgctcaacaagatcatctgcgaagagacgatccgtcttggcggctcaatggtgcatcaccacggcattggtaagcaccgcgttcactggagcaagctggaacacggtagcgcctggccgctgctggaaggtctcaagcgccagtttgatccaaacggtattatgaatacaggcacgatctacccgattgaaaaatag

SEQ ID NO: 76340 - DNA, 1350 bp, Citrobacter koseri
atgaacacttcaccggtgcgaatggatgatttaccgctgaatggttttcattgccgcattgctgcgctgacattcggcgcgcatttgaccgatggctatgtattaggcgtcgtcggctatgccatgatccaactgacccccgccatgcaactgacgccttttatggaagggatgattggcggctcggcgctggttggactttttctcggtagtctgatcctgggatgggtatctgattatatcgggcgtcagaaaatttttaccttcagctttatgctgataaccatcgcctctttcctacagttttttgccacaacgccggaacagcttattggcttgcgcattctgattggtatcggccttggcggtgactactcggttggtcatacattgctggctgaatttgcgccgcgtcgccatcggggaatattactgggcgcattcagtgtggtgtggactatcggctatgttctggcgagcctggtggggcatcattttattcaggaaacgctggatgcctggcgctggctgctggcatcggcatcattacccgcattgtgcattacgttcttacgctggggaacgccggagtcgcctcgctggctgatgcgtcaggggcggataacagaagcgtatgcgattgtgcaccgctattttggcacgcatgtgctgctcggcgatgaggtggcggcgccgacgagcagacatatcaaaacgctattttcaacgcattactggcgaagaaccgcgtttaacagcgtgttctttgtctgcctggtgatcccgtggtttgtgatttacacctggcttcccaccattgcacaaacgatcggtcttgaaaatgcgctaaccgccagcctgatgcttaacgcgctgctgattgttggtgcgctgctggggctgctgttaacacacctgttggcgcaccgccaatttctgctcggcagttttatgctgctcgccgcgacgcttgtcgtcatggcttgtttaccggcgggaagcagcctgacgctgttgctgtttgtgttgttcagtaccaccatttctgccgtcagcaatctggtgggggttctgcctgcggaaagcttcccgacggatattcgttccctgggcgtcgggtttgccacggcaatgagccgattaggggcggcgatcagcaccagtttgttgccctggacgctggcgcagtggggaatgcaggttacgctattactgctggctggggtattaatcatcggatttgtggtgacctggctgtgggcgccggaaaccaaggcgctgccgctggtggctgccgggagtgtggacaaaagacagggaggtgtgaatgaacattctgttagcgtttaa

SEQ ID NO: 76341 - DNA, 783 bp, Citrobacter koseri
atgaacattctgttagcgtttaaggcagagcccgatcccggcatgctggcggagaaagactggcaggcggcgacggcggatacccgcggcccggatgtctccttgctgcgttgctccccaggtgcggatgaacaggcggcggcagcgttgctgctggcccagcgtaatgggggctgcaagatgacgttgactgcgttaagcatcggcgatgagcgggcgctccactggttacgctattttgtcgcgctgggttttgagacgccggtgttgctggagacgacggcagacctgcggtttgctcccgaatttgtcgccaggaacattgccgactggcagcgtaatcatggtgcggatctggttataacgggctgtcagagtagcgagggtcagaacagtcagacgccatttctggttgctgaaatgctggcgtggccctgttttacccaggtggagcgttttacgcttgagcctccttttattgtggttgagcagcgaacgatgaccgggcttcggcgttgtcgggtacggttcccggccgtcatcgccgtcaggcagtgtggtgaagtggcgcttcccgtaccggggatgcgccagcgtctggcggcggcgaaagcagacgtcgagcgtcggaacgttgtggttgagacaacaccagcggttcagtgcctgcgtctggagaggccggagcagcggcggcatgcaacgattatcagcggcgcgacggcgcaggaaaaagcccggaggctatgggcggattatttgcgccagaggatgccgtcatga

SEQ ID NO: 76342 - DNA, 855 bp, Citrobacter koseri
atgaaaattgccatcattactgactcgcatgagtgtgcggcgatggcgagctggatcgcagagaatgcgctttgcaccgcagaactggagcgctggattatcgatcccgtgccggatgttgcagagcaggtgctggatgcgctggcggcgcaatggctgcggacacctgttgatatgctgatctttccggcaggtagtccgggcgatgaactggcaacgcgactcgcctggcgtctgcatggcggtagcctctgtcaggttcaggctgtggatgtgcgacaaggcctggtgaaaaaatcccactgggggaatgcgctgacggcaacgttgcaaattaccgcacgccctttgtgcctgtcgctggcgcgacagccggaggtgagcgcttctggtcattccttacctgtgatgacggaatatctgattacccccacggcgccccccgactggctggataaggtggaaagcgtaaatagcgtcgctacccatcctttgttacgcgccgggcgcgtactggtggttgggcaagggggaagtgaagcggatgcagataagattaccgcgcttggtcaggcacttgatgctgaggtagggtacagccgtgcgcgggtgatgaacggcggttttgatgccgatcgcgtgactggaatatcggggcatctgctgtcgccggatgtctgtatcgtggctggcgcgtcaggggcggcggcgttgatggccggagtacgccagagccgttttgttgtggcgataaaccacgatgccagcgcgccggtttttgcgcaggcggatgtcgggattgtcgatgactggctaccggtgctggaagagttggtccgctgcaaaaatgcctga

SEQ ID NO: 76343 - DNA, 576 bp, Citrobacter koseri
atgcccctgttacacctgctccgccagaatccggtgattgccgccgttaaagataacgccagcctacagttagccattgattccgaatgtcagttcatctccgtgctgtacgggaacatttgcaccatcagcgcgattgtgaagaaaataaaaaatgcgggtaaatatgcgtttattcacgttgatctgctggagggggcgtcaaataaagaggtcgtgatccagtttttaaaattggtcaccgaagcagatggcatcatcagcacgaaagcggcaatgctgaaagccgccagagcggaaggttttttctgtattcaccgtctgtttatcgttgattccatttcatttcacaatattgataagcaggtcgcgcagtcaaacccggactgtattgagatcctgccgggctgtatgccgaaagtgttgggctgggtgacagagaagatacgccagccgctgattgccggggggctggtatgcgatgaagaagacgcccgcaatgcgatgaaagccggtgtggcggcgctttccaccaccaataccgacgtctggacgttagcgaaacaccttaattaa

SEQ ID NO: 76344 - DNA, 261 bp, Citrobacter koseri
atgtctgtagcccgcaacatctggcgccccgccgatatttcccatatcgttacggctgccgctgtcgacagcaaaacggcagaacggctgatcacgtcctgccccgccggactcttttcccgcacgccggaagggggcctgcaagtcgactttcgcggctgcctggagtgcggcgcctgtcgactactgtgtgatgaaaaaacgctgcaacagtggcgctacccggcatctgggtttggcatcacttaccgatttggctaa

SEQ ID NO: 76345 - DNA, 1272 bp, Citrobacter koseri
atggctgacgatttcgatatcatcatcatcggtgcagggatagcgggcactgcttgtgctttacgctgtgcgcgggctggactctcagtcctgctgattgaacgcggtgagtttcccggcagcaaaaatctttccggcggtcgtttatattgtcatgcgctcgccgaacttcttcccgacgttcaccagtccgccccccttgaacgccgtatcactcaggaaaacctcacgctattaactcgtgatggcgcgacaacctggtccagcctgcaaccagacggtgactcatggagtctgctgcgcgctcgcttcgatccttggtttgtcgctcaggccgaggccgcaggggtacagtgcgttaacggcattacggttgaagcgctccatattgaagatggccgagtctgcggcgtcatgtgcgaagatgaaacgctgcgcgcccgttatgtcgtactggcagaaggagcaaacagcgtgctggcggaacggtatggattcctgcctcgccccgccgcgacatcaatggcgctggggatcaaggaggtgctggcgctggataaacagacgcttgaagagcgcttccgattgtccggggaggaaggtgccgccatgttgtttagcggagaaatttgcggcgatctccccggcggcgcgtttctttataccaaccaggagacgctctctttaggcgtagtgtgtccactctcttctgttgcgcagagcgacattccgacagtcgaaatgctggaacggctcaaagcacatccagcgctgcgtcctttgctcagaggcagcgaaacgctggagtacggcgcacatctggtgccggaaggcggcttacacagcatgcccgtccagtacgcaggcgaaggctggctgctgacaggcgatgcgttgcgcagctgcgtcaataccggcttctccgtacgcggtatggatatggcgctcatcggcgctcaggcggccgcgcaaaccctgattaacgcctgccagaaacatgcgccgcaaaatctgtttccggcctatcatcaggacatccggcacagtctgctgtgggaggttttgcaacgctatcgggatgttcccgcgctgttgcagcgcccgggatggtatcgtcaatggcctgcattaatgcaggatatttctcacgaactctggcatcaggggcatcatcctgtgccgccactgcgccagatcgtctggcgtcattttcgccgtcacggcctgcgccatctggcaggcgatattatcaggagcttacgatgtctgtag

SEQ ID NO: 76346 - DNA, 339 bp, Citrobacter koseri
atgcttaccgggcctacaatgtgcgcgttctgtaggccggataaggcgcagccgccatccggcattatgcccggtggcgcgatgcttaccgggcatacaacgtgtatgttctgtaggccggataaggcgaagccgccatccggcaaaaaaaagccagttcatcatgaactggcttttttattaatgcgcgcctccaccgccgccgcccgcgccgaaaggtggtttggcgaaccagaccagcccaagcagcacgaggaagatcccggccgacatccagaagatctcattggcggaaataatcagcccctgattggtaatctgctgggcgatccagcctga

SEQ ID NO: 76347 - DNA, 1449 bp, Citrobacter koseri
atgcaacttaacgatcccaccttgttccgccagcaggcgtttattgaggggcaatggcgcgacgccagaagcggcgacacgatcgccgtaaccaacccagcgaacggtcagccgttaggcagcgtaccgaaaatgggggcagaagagacccgcgaagccattgacgccgctaaccgcgcgctgcccgcctggcgcgcgctcaccgccaaagcgcgggcgaatattctgcgtcgctggttcaatttgatgatggagcaccaggacgatctcgcccgcctgatgacgctggaacaggggaagccgctggcggaagcaaaaggagaaatcagctatgccgcctcttttattgaatggtttgccgaagaaggtaagcgcatctatggcgacacgattccaggccaccaggccgataagcgcctgatcgttatcaagcagccgattggcgttaccgccgccatcacgccgtggaatttcccctcggcgatgattacccgcaaagccggcccggcgctggcggccggttgtacgatggttctgaaacccgccagccagacgccgttttccgccctggcgctggctgaactggcgaaccgcgccggggttcccgcaggcgtctttaacgtcatcaccggttctgcgggagcggtcggcaatgaactgaccagcaacccgctggtgcgcaaactgtcgtttaccggctcaaccgaaattggccgtcaactgatggaacagtgtgcgaaagacatcaaaaaggtgtcgctggagctgggcggcaacgcgccgttcatcgtctttgatgacgccgatctggataacgccgtggaaggcgcgctggcctctaagtttcgcaatgccgggcagacctgcgtctgcgctaaccgtctgtatgtacaggacggcgtgtatgaccgctttgcggaaaaactccagcaggcggtgagcaagctgcatctcggcgacggcctgcaagcagacgtcaccaccgggccgctgattgacgaaaaagcggtagccaaagtgcaggagcacatcgccgacgcgctggagaaaggcgcaaaagtgctctgcggcggtaaggcgcatgcgctcggcggcaacttcttccagcccaccatcctggtggacgtccccaataacgcgaaagtggctaaagaagagacgttcggccccctcgccccgctattccgctttaaagatgaagcggacgcgatcgcgcaggcgaacgataccgagttcggtctggcagcctatttctacgcccgcgatttaagccgcgtgtttcgcgtcggtgaagcgctggagtacggcattgtcggcatcaacaccggcattatctccaacgaagtcgcgccattcggcgggattaaagcctccggtcttggccgcgaaggttctaagtacggcatcgaagattatttagaaatcaaatacatgtgtatcggtctttaa

SEQ ID NO: 76348 - DNA, 1029 bp, Citrobacter koseri
atgcagacattacagacgaccagcctgcgagtggcggataatcaattatttattctcgatcagcaggcgcttccgcaggagaaacgctggctggatgcctcaacggtagaagcgctggtagggcatattcacgcgctgcgcgtgcgcggtgcgccgctgattggtctttccgccagtctgctactggcgctgctggcggagtcaggctatcgccgggatgaactggcgatagcgctggaaacgctgcgcgctgcgcgcccgacggcggtcaatctgatgaacaatctcgatcgcatgaagcaggcgctggggcaagaagactttgttccggcgctggcggcggaagcgctgcgtctgatcgatgaagacaaacaactctgtgacgatatcgcgcgtgcgggaagtgcgctggtgaagccgggcagccgtctgctgacccactgcaacaccggcgggctggcgacagcgggcacggggacggcgctgggggtgattgcccgcgcgtatgcacagggcaacgtgcaaaatgtctgggtggatgaaacgcgcccgttattgcagggcggcagactcaccgcctgggagctgggcgaactgggggttccctatcaactgattaccgactcaatggctgccagcctgatggcgaaagggctggtggacgcggtgtgggtaggggccgaccgtattgccgcaaatggcgatgtggcgaataaaatcggcacctattcgctggcggtgctggcgaaattccacggtattccgttttacgttgccgcgccgcaaaccacgctggacccccactgcccgaatggcgacgcaatcccgattgagcagcgcgcggcaggagaagtcaccggcgtggcgggcagttttggtgcggtacagtgggcgccggaaaatgcgcaggtctataacccggcgtttgacgtgacgccagcagcgctgattagcggctgggtgctggatagcggtgtggtgacgccagaagacgtggcgaagggggttttcaggacggaggcggcctga

SEQ ID NO: 76349 - DNA, 240 bp, Citrobacter koseri
atgatgagcatggacaacatgattattgccggggtaagaatatatttcccgcctggcaccgctctccctgttccaacgcctgaactcaggacatttgccatcgtcagcaaagaccagactggacatctggtgcttgagtacaaaaacaggcagtgggttcctgtactgacccggctttttgatgattcagcacatgctatttcagctataacaagcctgagcaaaaagacgtggcattaa

SEQ ID NO: 76350 - DNA, 240 bp, Citrobacter koseri
atgttcgttgaactggtttatgacaagcgtaatgtcgaggggctaccgggcgcaagaaacatcattcttaacgagctgacaaagcgcgtacaccggatcttccccgacgccgacgtgagagttaagccaatgcaggctaacgcattaaacagcgacagcacaaagaccgaaaaagaacgacttaaccgtatgctggaagagatgtttgaagaagccgatatgtggctggtgaacgaatga

SEQ ID NO: 76351 - DNA, 2364 bp, Citrobacter koseri
atgaaaaccctgaaaaactggattgtagagaaacagtcggcccatcatctggaactgctggtcgatggtcaacaccatctgtgcctgtacgtactggaagaaaatctgtttcgcgtgctgatcaaacgtaaaggcgaactggcattagacagaacctggagtatcgccccggcgcaggatgtgccgtgggaaggccgcagccgtgaggatgtcagcggctttagctgcccggcctggcaactgacgcagcaggatggcgcgctgattgtcgctactgagcaactgcgcgtgaccgtccaccagccgctgtggctggagtggcactaccgtgacgaggcgggcgactggcagccgctggtcaacgaccgccccaccagcgcctatctgctgaacgctcacggcgacggcgtggcgcactatttaagccgccgtaaagatgaacgtttttacggtctgggcgagaaagcgggcgacctgcaacgcaacggccaacgctatgagatgcgcaaccttgacgcgatgggctataacgcggtcagcaccgatccgctgtacaaacatattccattcaccatcgcccgccgcgatgacgtcagctacggtctgttttacgacaacctgagcagttgctggctggatctgggcaatgaaatcgacaactatcacaccgcctatcgccgctggcaggcggaagcgggcgatatcgattactacatctttaccggcaagcgtgtgctggatgtcaccaaagcctttgtgcgcctgacggggaaaaccctgttcgggccgaagtggagcctgggttacagcggctcaaccatgcattacaccgatgcgccggacgcgcaaaaccagctgatgaactttatccgtctgtgcaatgaacacgcgattccgtgcgattcgttccagctttcatctggctacacctccattaacggcaaacgctacgtctttaactggaactacgacaaggtgccgcagccgaaagtgatgacccaggcattccacgatgcggggttgaagctggcggccaacattaaaccgtgtctgttgcaggatcacccgcgctacaacgaagtcgcggaaagagggttatttatccgtgattcggaaaccgacgcgccggaacgttcaagtttctgggatgacgaaggttctaacctcgacttcaccaatccgcaaaccgtcgcctggtggcaggaaggcgtcaccacgcagttgctggagatggggatcgactccacctggaacgacaacaacgagttcgaagtgtgggatggcgaagcccgctgccacggctttggccgcgaaatcgccatcaaacatattcgcccggtcatgccgctgttgatgatgcgcgcctcgctggaagcgcagcagcgctttgcgccggaaaaacgcccgtacctgatctcccgttccggctgcgccgggatgcagcgttacgtgcaaacctggagcggcgataaccgcaccagctgggataccctgcgctacaacacccgtatggggctggggatgagtctgtccgggctgtataacgtgggtcacgacgtcggcggtttctctggcgataaaccggatgcggagctgttcgtgcgctgggtacagaacggcgtgatgcaccctcgctttaccatccactcatggaatgacgatcatacggtgaatgagccgtggatgtacccgggcgtgacgccggcgattcgtagcgcgattgagctacgttaccgtctgctgccctacttctacacgctgctgtggcaggcgcacgccgacgacgagccgatgttgcgccccactttcctcgaccacgagcacgacgcgcaaaccttcgcagagtgcgacgacttcctgcttggccgcgatattctggtggcaagcgtggtggaacccggtcaacgtgaacgccgcgtctggctgccggataacgaaaccggttggtacgatttcgatagccacgaatggttctctggcggccagtggatcacgctgaacgcgccgctggaaaaactgccgctactggtacgcgccggtgcaggcctgccgctgagcgaacggatcacccatgtcagcgctgaacacgacgatacccgcgaactgaaactgttcccggtcaaaggcgtggggacaacgtccggtctactgtttgaagacgatggcgaaagctggggttatcagacgggcaatgccctgtgggtggaatgggagatggcgtgtgacggttccaccatcaacctgaagatcaacacgcgtggcgactatcgtccggcgtggaacgcgttgcaggtatcgttaccggtaggggaaaaacgtacgctgcgggtgaatggcgttgaagggagtgagtgggtgctctga

SEQ ID NO: 76352 - DNA, 1263 bp, Citrobacter koseri
atggctttaaccttcacaagcgatacattaccggccgatcataaagcggcgatccggcagatgaagcaggcgttgcgggcgcagctcggtgatgtgcagggcgtttttgacaggctcagcgaggtgattgccacacgcgtggcggaaatcaatacgctcaaagcgcagggcgatgccgtctggcctgcgctgtcttacgcggatatccagtccggcgccatcacggcagcgcagcgtgaacagatcaagcggcgtggatgcgcggtcattaagggccatttcccacgggaacaggcgctggcatgggatcaatccatgctggattatctggatcgcaaccattttgatgaggtgtacaaaggtcccggcgataacttcttcggcacgttaaccgcctcccgccctgaaatttatccgatttactggtcgcaggcgcagatgcaggctcgtcagagcgaagagatggcgaacgttcagtctttccttaatcggctgtggacatttgaaagcgacggcagacagtggttcaacccggatatcagcgtgatctacccggatcgcatccgccgccgcccacccggcaccacctcaaaaggtctgggggcgcataccgattccggcgcgctggaacgctggctgctgcccgcctatcaacgggttttcgccagtatctttaacggcgaactggagaagtacgatccctggcatgccgcctaccgtaccgaagtcgaagagtatacggtcgataacaccaccaaatgctcggttttccgcaccttccaggggtggacggcgctgtcagatatgctgccgggccagggcttgctgcatgtggtgccgattccagaagcgatggcgtatatcctgttacgccccctgctggatgacgttcctgaagatgaactgtgcggcgttgcgccaggccgggtgctgccggtttcgcaacaatggcatccgctgctgattgaggcattgaccagtattccgcaactggaggccggggactccgtctggtggcattgcgatgtgatccactccgtcgcgccggtggaaaatcagcaaggctgggggaacgtgatgtacatccccgccgcgccgatgtgtgagaaaaacctggcttacgcgcacaaggtcaaagccgcgctggaaacgggcgcatcgccaggcgatttcccgcgtgaagattacgaaacaaactgggaaggccgttttacgctgagcgatctgaacgttcacggaaaacgcgcgctgggcatgagttaa

SEQ ID NO: 76353 - DNA, 1947 bp, Citrobacter koseri
atgacggcattgcttgagctgagcaatattcgccgtagttatccgtcaggtgaagaacaggtcgaggtgctgaagggcatctccctgcaaattcatgccggagagatggtagcgattgtcggcgcgtccggttccggtaaatcgaccctgatgaatatcctcggctgtctggataaacccaccagcggcacctatcggattgcggggcgggatgtctccacgctcgacagcgacgcgctggcgcaacttcgccgcgaacattttggttttatcttccagcgttatcatttgctctcacatctgacggcggcgcaaaacgttgaggtgcccgccgtttatgccggtacggagcgcaaacgacggctggagcgggctgaagagttgctgcaacggctggggctgggcgatcgggtggattatcagccttcgcagctctccggcgggcaacagcagcgggtgagtatcgcgcgcgcgctgatgaacggcgggcaggtgatcctcgccgatgaaccgaccggggcgctcgacagccattccggcgatgaagtgatggcgattctgcatcaactgcgcgatcgggggcatacggtcattatcgtgacccacgacccgcaggttgccgctcaggccgaacgggtgattgaaatccacgatggcgagatcgtgcgtaatccgccgtcgcagaaaacgcaagcggggcaaggcatcgcggagcccgtcgtcaaaacggcctccggctggagccagtttgtcagcggatttcgtgaggcgctcacgatggcgtggctggcgatggccgccaataaaatgcgcaccttgctcaccatgctggggattattatcgggattgcgtcggtggtgtcgatcgtggtggtcggcgatgcggcaaaacagatggtactggcggatattcgcgctattggcaccaatactatcgatatttaccccggtaaagacttcggcgacgacgatccgcaatatcagcaggcgctgaaatatgacgatctgaacgcgattcagaagcagccgtgggtaacgtccgcgacgcctgccgtatcgcaaaatctgcggcttcgctacggcaacatcgacgtggccgccagcgccaatggcgtcagcggcgactattttaacgtctacggcatgacctttagcgaggggaacacgttcaacagagagcagttgaatggccgggcacaggtagtggtgctcgacagcaacacgcggcgtcaacttttccccaataaagcgaaagtggtgggcgaagtgatcctggtcggtaatatgcctgcaacggtgatcggcgtggccgaagagaaacagtctatgttcggcagcagtaagatcctccgcgtctggctgccgtacagcacgatgtccgggcgggtgatggggcagtcatggctgaactccatcaccgttcgggtgaaagagggatttgacagcgcgcaggctgagcagcagcttacccgcctgctgacgctgcgccacgggaagaaggatttctttacctggaatatggacggcgtcttgaaaaccgccgaaaagaccacacgtactcttcaactgttcctgacgctggttgcggttatctcactggtggtaggggggattggcgtaatgaacattatgctggtttccgtcactgaacgaacccgggagattggcatccgtatggcggtaggcgcgcgcgccagcgatgtgctgcaacagttcttaattgaagcggtgctggtgtgtctggtcggcggcgcgttggggatcgggctgtcgatgctgatcgcctttacgctacagatgtttttacccggctgggaaattggcttctcgcccgtcgcgctcctgacggcgttcttgtgctcgacgtttaccgggatactgtttggctggttgcccgcacgtaatgcggcacgactcgatccggtagatgcgctggcgcgggagtga

SEQ ID NO: 76354 - DNA, 960 bp, Citrobacter koseri
atgccttcggatttaaaaaccattctgcactctaaacgcgccaatatatattatcttgaaaagtgccgtgtgcaggtaaatggtgggcgagttgaatacattacgagtgcaggtaatgaatcatattactggaatattcctgtcgcgaatactacggcggtgatgctgggtatgggcacgtcagtgtcacaggcggcgatgcgggagttcgcaagggctggcgtgatggttggcttctgtggcactgatggtacgccgctttattccgcaaatgaagttgatattgatgtgtcatggctgtcaccgcaaagtgaatatcggccgactgaatatttacagcattgggtctctttctggtttaaagaagaaaaaagactgatcgcggcaaagatgtttcagaaaataagattgcagcaaatagaaaaatattggttagctccatcatcacagaaaatatttcagccagaccgggaacgattaaatgatattatcacgcgcgcggatgcgtctatggcgcaagcagaggatcatactcatttaatgctcaaagaggcgcaattaacaaaagcgctgtataaactggtgagccagaccgttggatatggcgattttacccgagcaaaacggggcggtggtctggatatggcgaatcggtttctggatcagggtaattatctggcatacggattagcggctgttgcggcatgggttacagggctcccacacggcctggcggttatgcacggtaaaacgcgtcgcggcggcctggtctttgatttggccgatcttatcaaagacgcgcttgtcatgccgcaagcgtttatcgcggcaatggagggggaggatgcacaggcgttccgccagcgctgtattaatagatttcagcagtctgatgctttagatttaatgatcaccacgcttcaggacacggcgcgacagttggctgaggatagcgaatga

SEQ ID NO: 76355 - DNA, 3231 bp, Citrobacter koseri
atgaatgtgctgattatctctcgctgcaccaaacgcgctcgcgaggagagttgccgtatactcgatcagtttgctgagcgaacgggagacgcggcctggcaaaccatcatcaccttagaaggcgttaatacgctgcgccgtttattacggaaaaccgcaaggcgtaatactgcggttgcctgccactggttgaagaaaaacgggcaaatggaattgctatggattgtcggcaatatacgtcgttttaatgcgcaagggcgtgttcctaccaaccgaaccacacaaacgcttatcacgaacaccgatgaacatcggtggcgatgtgcggaaagcattgcgctgttagcagcgattgcgggcttgtttcatgattttggtaaggcagggttctgttttcaggaaagcctgacgaaaaaaacagctaaaagttatcaaccttatcgccatgaatgggtttcggtacgcctgtttcaggcgtttatcggtgagcaacatgatgaacagtggctggcaaaactcggtgagttgtctgcggatgacgacgctgaacttctggctcgattgcacaaggataacccctgctattctgacagcccttttcgtacgcttccaccgctcgccagcgtcgtcgcctggctgattttgtctcatcaccgtcttcctgaaaacctgcgtggcgacaacgtgctggagggatgtcagagctggcttgaaaatcagcttaatgcagactggaacgccgtgaatcatataaaagaagggtggcgagacgtcgattttcgtaatgtctgggtttttccatcaggtacgcctgtacaaagtcgcgtctggcgggagaaagcacgtcagatctcccggcgcgctaagaatgccgcggcattaaaacagtggggacagatggatcaactgttcacgctgcatatggcgcgtttttgtctgatgctggccgatcacttctactcttccagccatcctcacccaacgtggcaagatcctgattattgtgtatgggcaaacagcgatcggaaaaatggcacgctaaaacaacgggttgatgagcatctgaccggtgtcgcgcatcacgcattgcttctggggagacaactggcgcgtgtgcgttcgtcgcttccggcgattgcaaggcataaaggttttcgtgagcgttcaggtaatccgctttatcactggcaaaataaagcctgggatgtagctgccgcgctgcgtgagcggagtcgggaagagggttttttcggcgtcaatatggcttcgacgggctgcgggaagacgtttgccaatgcacgaataatgtatgcgctggctgatgagcaggaaggctgtcgcttcaccgtggcaatggggttacgcacgctgacgctgcaaaccggcgatgcgttgcgtaatcgactgaagctggacgacgacgatctggcggtactgattggctcgggtgcggtgaaacagttgtggcagaaggaaaaagaaccggaaccagacagggatagcgcctcggcaaaggccttgtctgaagaacagcaatatgttcattatgaaggcagtgtgcaaacgggggcgctggaaaaatggttgagtggcgacaggaaattgtcggcgttagtcagtgcgcctgttttagtgacaaccctcgatcatttgatttcggcgacggaaggcgtgcgtggcgggaagcagctaccggcgatgttgcgcttgctgaccagcgatctggtgctggatgaacctgatgattttgatattgccgatctgcatgccgtttgccgtctgatgaactgggccgggatgctgggaacccgcgtgctgctctcgtcggcaacgctgccgccggatcttatccaggcaatgtttgccgcctggcttgccgggcgcaaagtatggcaggcgtcctgcggcgcgtcagagaaaccgatgaatatttgctgcgtatggttcgatgaaaaaggcgcgaaggtggagcacatcgcggatggacgcagctttagcattgcgcataaaacatttgttgagcagcgggcggcaatgctggcggcaaaacctcgtctgcactttgggcgtatttcgcccgtatctccggcgtcgccagaggtgagcgatgtcattacctgcgtggcccgcgccgtgcatacggaaatgcaggttttacatcacgcacataaagagacgcatcccggtggtaagaccgtgtcattgggtttagtccggttcgcgaatatcgatccgctggtcgctgtcgcaaaagcgttaatggcgatcccttcgccgcaggatgtctgtatccattattgtgtctaccatgcccgacacccgctggcggtgcgttcagccatcgaaaaatgtctggatagcgcatttactcgccatcagcccgatacgctctggcaacatccagatattgcaaaagctctcaatctccgcccggagaagcatcacctttttgtcgtgttagggacttccgtcatggaggttggcagggactgggacagcagttggggcatcatcgaacccagctctatgcgatccattattcagttcgccggacgtatacagcgccatcgacgcgtcgttccagagaacgaaaacctggtgattctcagcagtaatattaaagcgctgagaaagcgctctcccgcgttttgtaagccgggatttgaaaataaggatcatccattagccagtcacgatctgcgtgaactattaccaccgcaggattatcagacgatcactgcattgccacgtattttgcctgcaaatggtgaaaataaactggcggaactggagcacatgcggctcagggaagaattactcagcagtaagagccggcaggttattgccgcaaactggtggcgtaaaccgctcacctggaatgcctggctacagcgtaagacaccgtttcgtcagtcgcagccggaagccagattttttctgcatatggaagaggaagagagtgagccttatttcgcatttcatactgaaaacggcaacatcaaggcttccgataaatttgttcttcaggacgttgagtatgcagagggaacagaccattggggatgtacggactaccgccaggtgttgctggcgttggccgatgcccaacagactgagattaaccgcgtaggtgaaattttcggtgagatcagcgtacctgtaaatgaagaggatgtgacgagcgactggcgttaccacccgtggttgggtgtttacagggatattaattaa

SEQ ID NO: 76356 - DNA, 1323 bp, Citrobacter koseri
atgacaaccgaagcactgacccattttattaccgattacattgcctcgcgaaggcagccaaagctggaagcctttgaaaaagaggctgcaaagcgactggcgcagggagaagatgccagtaccatcgccctggaacgtcaggcgcttgaggcacgctatcaaccgcaaaattggttgacggatgcggcaaggcgagcagagcaaattagcctggtgacgcatgcggctaaatttacccacggggattcaaaaagcagcagcatatatcgcgataccgtgggtgaagaggggtatttaagcactgcgtcgcttaagaacctcccgacggatgccgttggaaacgccgccgcgcttgacgtcgcgaaattgttacaaaccgacgtcgagggtgactcgctgctggcctgcctgaaacggggtgaacatcaaccgcttcacgcttttgctgagaatgacgctcaactgacgcagtgggtggaagggtttaatcgtgcgttaacgcccactcagccggcatcgcataaactcgctaaacaggtctatttccccgtagacaatgattaccatctgttgtgtccgttgtttgctacctcgctggcgcaggtgttgcatgaaaaactcgtcgcatctcgctttggagaagaggcgaaagcggtacgcgatgcgcgcaaagcgggtaaatggcatccgcagcccgatgttcgttatccagacatggctgaaatgcattttggcggtaccaagccacagaatatttctgcgttgaacagcgcgcgcggtgggcgtatctggctgctgtcgtcgcagccgcctcaatggctgaatctggataaagcgccgcaaaatatgcgcaatctctttgcgttgcgcggcgcgtttaatcgggccgcgtcaggtattgtttcccgtatggtgtttctgctgaaagaaaatactgagaagaataatcacgctattcgcaatgcgcgggcagcgtatgttgatgagcttatcgaccttcttttcatgcatgccgccactttccagcaggcgtcctggcaaggctggacgcgaaataataccgatctccccctccatcagcagctttggctcgatccctggcgcggccagacggatgaaactttccgtcttgaacgtgacaaagacgactggcaaataagcgttgcggatgatttcgcacgctggctgaactatcggctgaataaggcgcgtctggatgtggggcttgttgagcgccgggaatggcggacgcaatcgctgtttcgccagcggatgcgggaaatggaagcgattttgcgggaggcgctgaaatgcgttatctga

SEQ ID NO: 76357 - DNA, 936 bp, Citrobacter koseri
atgcgttatctgattttattgccccatatccgtattgaaaatgtgaatgccgttgccgggttaacctggggttttccggcgataagccatttcctggggtacgtgcatgcgctttcccgtaaagtgcgcgccacgcatggcgtgcattttgatggctgcgcggtgatcagccatcattctcatgttcaggcatattcctcggggcgtgactatcagtttgcgcttacgcgtaaccctttgactaaagaagagaaaacggcctcgttcaatgaagaaggaagaatgcaccttaccgtctccctggtgattgagtgccagggtgaaatcgtgaatggcgaatacggcaaagaggcgttttgttcgcggttgaaaatgctgtgtcagagtcaaaagctggcgggcggaagtattgtcagtctgcgcgatccgcaggtatttcctgcgccggatgatgaaaaacagctccgtcagatcctctggcggctgatgccgggttttgctctttgcgaccgcagcgaatggctgacaacgcattatcaccagcgtcgacaacaacagccggaaagcacattactggatgcctggttagattttgccgcaatccagtaccgcgctataccaccgggagagggggacaacgctcaatgggaatatcagcctaagccgatgcctggttatctggtgccgctgatgtgcggctatcagcgtatttctccgctttatccccccggagaggttgccagtgcgcgcgataattcgacgccgtttgcgtttaccgaggcggtgtatggcgtaggagaatggcgtgggttgcatcgtgttacggatattcagccgcttctctggcgctaccgcacaaccgacactggctactattgctctgcaatgcctgtcgcagacgactttacgtttaacgaagacgacgatttagaataa

SEQ ID NO: 76358 - DNA, 1002 bp, Citrobacter koseri
atggcaaaggctcctgtatctgtaaaaaccgcttctgtactggcatttgagcgcaaactcgctacgtccgatgcgatgatgtatgcgggtaactggcaaagcgatcattggcaaccgattgaaattcaggaaaaggcggttcgaggaacgatttccaatcggctgaaaaatgcgatttccagcgatccggcgaagctggatgcggaaattcaaaaagcaaacctgcaacgtgtggatattgcggccttaccggcagatgccgacaccttgaaagtggtgtttacgctgcgcgtgttgggtaatttatctacgccatcggtatgtaatgatatggcataccaggatgcgcttcagcaggttattgatggctatatcaatgagtatggatttggtgaactggcgcgcaggtacgccacgaatctggcaaacggacgtttcctgtggcgcaaccgcattggcgctgagcagatccaggtgaatgtcgcggccagtgggcaggaatggatttttaacagtcacaactattccctgcgtgagtttgagcaggaagatgcttcgctgagccaactggcggcgataatcgaaaaaggattaagcggtcaggaatgggtcatgctgactgtcgaagcgcaggtgcgtctgggcgccgggcaggaggtttttccttcgcaggaactggtgctggacagtaacagcagtaaaagcagggtgttataccaggtcagtggtgttgcgggcattcactcgcagaaaatcggcaacgctttgcgtaccgtcgatacgtggcacccaaaagtagaagaattgggcgcgattgcggtagaaccctatggctcagtaaccagtcgtggcgtagcgtgtcgccagccgaaggataaaatggatttttataccttactggataactgggtcactaagggtatgaaaccggatgccgctcagcagcattatgtgatggcggtactggttcgcggcggcgtatttggtgagaaaagcgaataa

SEQ ID NO: 76359 - DNA, 555 bp, Citrobacter koseri
atggatcactatcttgatctccgtgtcctgccagaccccgaatttaatactgaaatgctgatggcggcgttatttgccaaactgcatcgtgcgttaggcgcaaggggaaagggggatattggcgttagcttcccccagtttggcgtgacgccaggatcgtgcttgcgtcttcatggttcgttatcggcgttacaggaacttgaggccggttcatggcgtaaggggctgaatgattattgccagtgtatggcgataacgcctgttccggctgtaaaaggctggcgcacggtgagtcgggtgcaggtgaaaagcagtccgcaacggttattgcggcgttccgtcaggaagggatggttgacggaagagcaggcgcagcagcgcctggtggagtcaaccgaacagcatagcgatttgccttacctgaacgttaaaagcttgtcgaatcagcaacaatttcgggtgtttattcgtcacggcgaactgcgttctgaacctgttagcgggacattcacaagctatggattaagttctacggcgaccattccctggttctga

SEQ ID NO: 76360 - DNA, 126 bp, Citrobacter koseri
atggttaatcgtagcgtccgttttgacgcaaaacagtctgacgtaagtgaacagtctgctatgagcgatgagcggacgttgaggcacctaaaaatcgtctcaactttcaacttttctgacccgtaa

SEQ ID NO: 76361 - DNA, 873 bp, Citrobacter koseri
gtgcattatcaagacctccagatggactggcttaaatgttttgtcgcggtagtggatgcgggatcgctttcggctgcggcacctgaagtccatcgctcacaatctgcggtcagcatgcaacttaaaaagctggaatctgcattagggtgtcagctattacttcgcggtcctcgtcaacatcaactcacgtctgaaggtcaaaaactgctgggatatgcccgaaggatactcgaccttcatgctgaaacgcaggccgcatttcacggtaaggagttaacagggcgtattcgtctgggggtccctgatgactatgcagcaaaataccttacccctgcgctgaagagatttgcccctaactttgggtcagtcgagatcgaactgagctgtgagcaatcaacgtctttaattccccgcgttgaggtcggcgatctcgatttggcactggtttcccgggaacatcccaaccagggcgcgttactgttttatgaaccgatggtgtgggtgggttctccacagtttgaggtctggcggcgcgatccattacccattgcggtttatgaaagtacaagccttgctaaacgtagtgctatcaacgcattagcactgcaggggcggagatataaggtggtgtataacagctccagcctgtcagggcagattaccgcagtggaaagtggactggctgttgcggtgctgacccagtgcagcgtgccgcctcatctgcaaattcttggcagtgaacatcttttggggcctcttgaacccatggaagtctcattgttcagaagccgtacttcccagggttctcctgcagtggatagtttgtacgatttgctcctcaggacattacgggtcagaaaagttgaaagttga

SEQ ID NO: 76362 - DNA, 708 bp, Citrobacter koseri
atgacgcatcaccagcccgatttgtctcaacttaatcattcgctgatatgggatggttttcggcagcttatcccggtttcactgtttgtcgctatttttggtgcagcctttggcctggccgcatcgcagaaaggagtggacccgacgtcggcgacaatgatgagtttgctggtttttgccggttatgctcaattcgccaccttagagctttggaccgatcaggttcctgtattaacccttatcgccaccgtttttgccattaatgccaggcatctgttaatgggggccactttatacccgtggttgcgcgcgttaacacccgctaaacgctacgggatcatgatggtcgtttccgatgctaactgggccatgtccatacaggcattcagcaggggaagcgcggggctgggattactctttggtggcggtcttgcgttatggcttttttggggagcaggaaccctggcaggactgtatttcgggagcgttatccaggatcccaaaagcgctggtcttgatatggtcatggggtgttttctcctttctatggtgttcgaaggggaaagaaacctgaggatgtggattatctgggccgcagcggccagtgcctcgctgatagcgtataaatggttaccagaaaatagtcatgtgatcgctggagccctcgccggaggtattactggaattatcatgagagagaaaaaatga

SEQ ID NO: 76363 - DNA, 309 bp, Citrobacter koseri
atgagtattgagacggtaggcacaggacctcttattattatttttgttatggcgttggtcaccctcgttacccgatggggtggtgtctggattatgtcttttgtgccttttaataaccgaataaaagcctttattcaggggatgtcaggctccgttctcgtggcgattttagcccccgttgccctcacaggcgacaaaggcgctcagatggcattattgaccacggccgtcgtgatgctggtttttaaaagacctttaattgctatcacccttgggattgtcgtttcagccctggtcagatatttttaa

SEQ ID NO: 76364 - DNA, 696 bp, Citrobacter koseri
atgagtctaacgccacgaacgatcgttttaattcccgggtatatgctgaatgaaatgctctggcgtgaatttgaaacatacctgccagcaaactgtattgttcatcatgcttccgtaaccggaggactaaccctccatgatatcgcgcagcatatgagtacctgtctgccagacaaatttacgttgataggtttttcactgggagggtacattgcccggcagtttgctgcagatttttcggatcgtgtggagtccctggtactgattgccagttcgttacgggaagatacgccattagaggcggaatcaaagtggcaaagcgtgcagtcattgtcacccgcaacgtttaaggggctgagcagccatgctattgcccggtcactgccccccctaaacgcatcagatcgggatatgatttcaactatccagcaaatgggacgttatctcggatttgaagccttcattacgcaatcgaccttaacccgacaaggtattccttcagcaacgataggttgtcccacactggttattgccagtgaagatgacgccatccgttccatgcaggaagcagaggagctggtcgatgccatacctgatgcatcgttgagaaccatcaaggattgcggtcatatgattccgttcgaacagcctgaggcgttggcgttaaccattactgaatggatctcagtcaggtaa

SEQ ID NO: 76365 - DNA, 3051 bp, Citrobacter koseri
atggagctcagccggaggcagttctttcgaatctgcgcgggtggtatggcaggaacaactgttgcatctctcggattcttatcatctttttccgttcatgcggaaacacgtcagtacaaactcttaaaagcaaaagagactcgtaataactgtacttattgctcagtaggttgcggcatgctgatgtacagtcttggcgatacagctaaaaacgtcaaagaaagcatctaccacattgaaggtgatcctgatcatccggtcagccgcggttctttgtgtccgaaaggtgctggcgtgttggattatattcacagtgaaacacgcctgcagtatcccgaatatcgcgcccctggttctgataaatgggaacgtatcagttgggatgatgccatcaaccgtatcgcgcggttaatgaaggatgatcgcgatgctaatttcatcgagaaaaacgcgcagggtgtgaccgtcaatcgctggacgaccacaggcatgctgtgttcttcggcagccagcaatgaaaccggtatcctcgacgacaaatttacccgtagcctggggatggtcgccatcgactgccaggctcgtctgtgccatggtccaaccgtttctgcgctggcaccaacgtttggtcgtggcgcaatgaccaacaactgggtggatattaaaaacgccaacgtggtgctgattatgggcggcaacgcggctgaagctcacccggttggttttaaatgggtggttgaagcacagaccaaaaatgacgccaccgttgtggtggtcgacccacgttttaaccgtagcgccgctgttgccgatctctatgcaccgatccgtgcgggttcggataccgcgttcctgctgggtgtcattcggtatctgctgaaacacaagcgcgtacagtacgaatacgtactccattacaccaatgctgctctactgatccgcgaagactatcagttcaatgacggattattcagcggctatgaccctaaaaaacggcaatatgataaatcgagttggttctatcagcttgatgagcaggaaaatgccctgcgtgatgaaacgctgagtcatccccgctgtgtctggaatttactcaaaactcatgtcgatcgttacaccccggaaatggtgagtcgcctgtgcggaacatcggtggaggacttcaatcgtatttgcgacattctcgccagcaccagcgtacctgaccgcaccgcgactattctgtacgcgttgggctggacacaccattctgccggggcgcagatcattcgtgcggccggaatgctgcaactgctgttgggcaatattggtatggctggcggtggcgtaaacgccctgcgtggccactcaaacattcagggctatactgaccttggcctgctgtcgaccaacctccccgggtatatgccgctgccttccgaaaaacagccggactatcagacctatatctcgcaaattaccccacctgcgttgggcgtaaatgaagtgaactactggcagaatacgccgaagttctttgtcagcatgatgaaaagcttctggggtgatcatgcaactgcggaaaatagctggggttatgactggctgcctaaatgggatcgtctttatgacgtgatgactcaggccgagctgatgctggaaggtaaaataaacggctacatcgttcagggtttcaatccactggctgcatttcccgataaaaacaaatcgtcccgcgcactttcgaagctgaagtatatggtggttatcgatccactggttaccgaatcatctaacttctggcagcaccacggcgaaatgaacgaggttaaaccggaagatatccagacagaagtgttccgcctgccgtcatcctgttttgcagaagagaacggttcaattgctaactctggacgatggttacagtggcattgggcagcggccgaaccgccgggtgaggcgttgcatgatggcaaaattctcggccgtctgtttatgcgtctgcgtgagctataccaacaggaaggcggtgcgaatccagaacctcttatgagcatcaactggaactataaagacccgtatgacccacatccggaagaaattgcccgcgaagccaacggaatagcgctggcagacctctacgatgataaagggcaattgatcgcgaagaaaggtcaacaattgagcagctttgctcagcttcgtgatgatggctcgaccagcagcttctgttgggtctactgtggaagctggaccgagcaaggtaaccaaatggccaatcgcgataacagcgatccgtatggtctgggctgtacgccaggttgggcatggtcctggccggcaaatcgccgaattctctacaaccgcgcctcagctgaccctgccggcaagccatgggatgtcaaacgggcccttctacactgggacggtaataaatggaccggaatggatgtggcggactacagtcaggccgctccgggcagtaacgttgggccctttatcatgaatccggaaggtgtcgcacgtctgttttctctcgacaaaatgaacgacgggccattcccggaacattacgaacccattgaatcacctattggtaccaacccgcttcatccggatgttgtttccagtccggttgcgcgcatctaccctggagatatcgctaatatgggcaaatctgacattttcccatacgtcgcgaccacttactcgattaccgagctattccgtcactggactaaacatgctcttctgaacgccatcgcccaacctgatcagttcgtcgaaattggcgaagcgctggcgagcaagaaggggattacggcaggcgacacagtgaaggtcatgtccaaacgtggttttatcaaagcgaaagccgttgtaaccaaacgcctgcaaacgctgacaattgacggcaggcaggtggatacaattgggatcccatgccactggggatttgaaggggctacacgcaaagggttcctcgctaacacgctgacgccatccgtcggcgacgccaactcacaaacaccagaatacaaagcattcctggttaacattgagcgagcgtaa

SEQ ID NO: 76366 - DNA, 882 bp, Citrobacter koseri
atggctatgcaatcacaagatattattaaacgctctgcaaccaacaatattactccaccgccgcatgcacgggattttcgtgccgaagtggcaaaactcattgatgtcacgacctgtattggctgcaaaggctgtcaggtagcctgctccgaatggaacgacatccgcgatgacgtcggatattgcaacggtgtatatgacaaccctacagatctcagtgccaaatcctggactgtgatgcgttttagcgaaaccacccagaatgagaagctggaatggttgatccgcaaagatggctgcatgcactgcgcggatcctggctgtcttaaagcatgtccgtctgcaggagcaatcatccagtacgccaacggtatcgtcgatttccagtctgagcactgtatcggttgtggttactgtattgccggttgcccgtttaatgtcccacggctgaaccctgaagataatcgtgtctataaatgcacgctctgtgtggacaggatcagcgtcggccaggaaccagcctgtgtgaaaacctgcccgacaggtgccatccagtttggcaccaagaaagagatgctgaacgtagcggaaacccgtgcaacacaactaaaaaaacgcggatacaccaacgcgggtgtgtacaacccgcaaggtgtgggcggtactcatgtgatgtatgtcttgcaccatgccgatcagccggaactttaccataacttaccgaacgatccgcatattgctaccccggtgaatctatggaaagggatcctcaaaccgctttccgctgctggatttatcgctacctttgctgggctgatttaccactatgtagggattgggcccaacaaagagacagatgatgaggaaaacgctcatgagtaa

SEQ ID NO: 76367 - DNA, 651 bp, Citrobacter koseri
atgagtaaaagcaaaatgatcctgagaacgaagttcattgatcgtgcctgtcactggacagtagtaatcagtttctttctggtagcgctttctggtatcgctctgttcttccctactctgcaatggttgaccgaaacctttggtacaccgcagatgggaaggatattgcatcccttctttggcgtgctgatcttcgtcgtactgatgtttatgttcgtccgttttgtccatcacaatatccctgataaacaagatattccatggattaaaggtattgtcgaggtactgaaaggaaatgaacataaagtcgcggatgtcgggaaatataatgccggacagaaaatgatgttctggagcatcatgagcctgatctttgtactactggtgacgggtgtcattatctggcgaccttactttacccattattttccaatcgtcgtcgttcgctggagtttattgattcacgcaactgcggctatcgtgctgatccacgctattttgattcatatgtatatggcgttctgggtgaaaggctccatcaccggcatgatcgaaggaaaagtcagtcgacggtgggctaagaaacatcatcctcgctggtatcgtgatgttgaagctgctgaaaaagaagtacaagaaaagaccaaataa

SEQ ID NO: 76368 - DNA, 399 bp, Citrobacter koseri
atgctaatcatcttcagtggcttgcctggcagcgggaagagcacgatcgctcaggctttggcaaagcagttaagcgcattttacttgcgaattgacacgattgagcaagccatactcaaagccgaagaaggtgaccgtgaaatgggccctgccggttattttgttgcttactcactcgccagggagaatctgctattaggagcaacagtaatcactgactcagtcaacctactggcgttaatccgtgatgcctatcgagaaatcgctttatctgcaagaaccggctttttagaaattgagattatatgctccgataagatagaacatcgtaaacgagtagaaaccagagtgtctgaagtagaggggttaaccctgcctggaaagatgtcaccgatttga

SEQ ID NO: 76369 - DNA, 1779 bp, Citrobacter koseri
atgagcaacccaactcccctttccgccctgcgtaatctcctgattgcgcaggggctggatggcatgatcgttcctcgcgccgatgctcatcaaagcgaggactgtacgccacacgataataaactggcctggttaacgggctttagcggttctgccggactggcgttagtgcttcgcgaccgcgcattgctgtttgtggatggccgctaccaggttcaggcccgcgccgaagtcgatcgcaatgattttgaaattcatcacctgcataacgagccgcttgccgagtatttgcaggaacaggttgcctccggcgcacgtattgccttcgaacctctgctgatggtcaacagccagtttgagacactctcagccacccactgcgaactggtggcgttagacagcgatccgttcgacgttgtatggcaaaaccgccccgccgccccctgcggcatcatccgggaaatgcccgttgaaatcagcggtgaaagcagcgcgcagaaacgcgcgcgcattcttgacgaactggcaaaacagcaggcggattacctgccgatcaccctgccggataatatcgcctggatgctgaacgtgcgcggcaacgacctcaacatggtgcctgttcctttctcgtttgcgttattgcactgcacgggcgaactggaatggttcgttgatgaaaagaaaactcagccgttacctgaaagtttgctcagcacgctgaccatttccccgccgggtgagttccttgcacgctgtcagcaacgcgcggccgggaagcgtttcctggttgataaagatttcgccccggtcgccctgcgcttcgctattgagcagcatggcggtgacgtcatctggtcagcagatccgattacgctaatgaaagcacacaagaacgaaaccgagctggcaggataccgcgaatgccatgagcaggacggcgccgcctgggttaatttcctcgcctggctggcgcacgaagtgccgctgcgtgaagccgcaggcaatccgataacggagctggaagcccaggaaaaacagctggcttatcgccagcaacaaccgggatttcttgagcagagctttaacaccatttctgcatcggcaggcaatgctgccatgtgccactatcattcaagcgagaaaacaaacgcgccagtcacagcccaggagatgtacctgaacgattcgggcggtcaatatcagaacggtacgacagacacgacccgtaccctcgcatttgggccacaggagccgcagcgtcggttacactacaccgctgtgttgaagggctttttgtcgctgattaccctgcaattccccagcggaactcagggacaccagcttgacgcctttacccgccgggcgctttgggatcttggtctggattacgatcacggtgcgggacacggcgtaggccatcagctattgattcatgagcagccacaccgtatcgccaaaaaagtgaacccctggccgctggtggcgggcaacatcattacgatagagccgggctattacctcgccggacaatacggtatccgcattgaaaatcaggtcgaaattgtcgaaagccgccctggtttctgcaaattctccacactgacgctggtgccgatcgacttaagtctcgtggaattacatctgcttagcgaggcagaaaaactgtggattgatgagtaccatcagcagataagagaaacattatcccctcgcgtagaaagcaacgcccgcccgtggctgttcgccgccaccgctcccatacgggtgcgcgcaaattaa

SEQ ID NO: 76370 - DNA, 9621 bp, Citrobacter koseri
atggataatacctctggagattttccatgtaataagatggacacgcgtaagcagttaccgctaacaccaagtcaacaggggtttttattccattccttaaaggataagaaaaggagtaactaccatgagcattttacatgcattttttctcagcatgtagatagcgcccacttcaagtgggcgctggaaacgttatttcgaaagcatgagtgttttcgcactgattataactgggagattgatgagcgcccttgtcaggtggtgaagaccgatgtgttgccggatatatatgtgttagactgtgagcaagaggaaatacgttttctactagctaatgatgacattatcattcctgtcccgcaggatgacggtattgatgctataattcctcaactgctacaggctgatttaaaatacccattttccttgaaaacgatcccagtccgggcctaccttattcagtcaacgaaagaaagtgcttttatactatcataccatcatattgtgatggatggctggagcttatcccttttcattaaacagttgctccaactctatggagcggctgtggtcagtggtgtgagggatgatagcgccattatcccctcatctctgaaaccccttgtagacacactgtcggcccgacgtcacacctttcagcacgactattgggctgcatatcttcgggagggaacaccaacttgtatcgtgccgctgtcacaatatcacacagatactgaagccgagaacaattcttacgttaatcaaacaaatcatgtggagatcaatttgtctccggatgtgtgtcagaaaatacagacgctatgcagcgattatcgtatcacccccgcagtaatcttctatgtggcctggggcatcctgctacaacgttggtgctatgctgacgatgtgttattcggcgcgacaatatcagggcgaaatataccaattgatggtatagaagaaacactagggctatttattaacacgttgccgctgcgtctgcgtgatgatggggcgacactgttgcaacacttacaacgtatgcaccaaacactaatagctcactacagcaatgaacatgatgccttagccagcatacaacggttggtacataaagaaggtcatgctggggatctttttaataccttagtggtgttggagaattatcccgttgatatgacattattgtcatgcgcgtcgcccgtggcaattcgccatctcagtgtacatgaacaaacgcactatccgctgaccttgaccatcactcaacagaagggattccgtttcagtattgcatatgcccttaactacctgaccaacaacatggcgcaagcgttgctgatgcacctgagttatctgcttgaacaactggtggacaatccgcagcgccccattgctgcgttggtaaacttgtccccatgccagcaggcgcaggtacttcaaccctatctggaacgcatggcatgccgggattgggatagtcaatccaacgtcatcgaacaatttcatcaagttgctgcgacttcgccagcacaggtcgcagtggttgatgaattgtgcgcgttgacctattcggagttggcagcacaagctgagcagctcgcggcttatttggtacagcagggtgttatggttggcgatactgtaggcataattagcgaacgccgggtaaacaccgtggttgccatcatcgccatcatgttgatcggggctgcttatgtgcccatcagccccgactacccagtgggtaggatgcaggaaattattgatgacagcggcttggcgctgttgctggtacatggcaaaccgctagatgcattaaacgttgcgcagagtgacctctgtgcatttcccgtcgcgccctcggtggtatttccggttatcacaccagattctcgcgcttatgtgatttattcatcggggtcgacgggtaagccaaaaggtatcgcggtggcgcaccgcggtttattgcgcctgatacaaggcgacagcccgttgaaggtggagagcggtgagacaacgctgctgacctgcccatttgagtttgatgtttcggtgtttgagatgtggtctaccttgctcaaccacggcaaactagtattactcagcaaacaggcattacttgatatcaatcacattcgccgcacgatcgctgatgaacaggtggcgcgcgcctggtttacctcatccttgtttaactcctatgtggcagaaggtgccgatttcttcggtatgttacaacacattacggtgggcggcgaagcagtatctgcgtggcatgtcaacgacgtgatgcaaaaatacccgcatctggtggtgacaaacggttatgggccgacggaaaacactatttttaccaccgcatatcgtttcaacgggttgcaacccgcccgagtcccgataggatacgcggtaccgggcacctcgctctacattaccgatctccatgggcatttgttgcctatcggtgccaccggtgaactagtggcgggtggagtgggggtcgccatcggctatcagaacaacccggcgctaagtgcgacggtttttgtccctgatccttttattcccggcggtatgatgtacaaaactggcgattatgcccggttgctggatgatggctgtgttgactgttttgggcgtaaagacggtcaaattaagatcaatggacaacgaattgaaaccggagagatcgagcagcgcctgctggagtgctccggcattatcgaggcggtagtggttccttaccgcgtacgtgaaacgctgcatattgcggcagtggtctgcgtcaatgatagctatgatgaggtggaagttcgagggcaattggctgacagattgccgccattcgctattccggaatccttggtggtggtgacggagattgcaaaaagccatagtggcaaggccgacttggcgcagttgcggtatctcctgcccgcaactcagtgcaacgccgtgtccaccacgatatcagaggtgcatagtgacatggaacatgcgctgcatgctatctggcaacgcgtacttgatagacaagacattgatagcaatgcctcctttttcgccctcggtggcacctcattggataccatcagggttaaaggggatattaagcggcaacttggcttggagattgatattaccgatctctttaagtacccaacgctcacggcgttagcacattttctcgatactgccgtatcgccggaggatgcaattccaacgcgtgctgttgtctacagcgacatgccggtggcgattgtcggtatggcgggacgtttccccggtgcggcgaatattgcagcgttgtggacgctggttgtaggaggggaatcgggattaacactgttcagtgatgaagagttgcgcgcgcatggtgtgacacctgacacgcttaaacaagcgaattatataaaaaccaaagggattgttgatgatcacgaatggtttgatgcggatttctttggttatactcccaacgaggcggaatgtatggatccgcaaattcgcttattgcatcagtgctgctggcaaactctggaacacgctgggtgcgatcctgccacctttactggtgcgattggcatttatgccggactgctgacatccccccactggcttaatgcggtaatgcaagacactaccgactctaccgccctgtacaaggccagtatcctgaatatccattccgtcacagcattgattgcccatgcgcttaacctcaccggccctgccgtgacgcttgacaccgcctgctccacttcggcagtggctatccaccaggcctgcatcgcactacgtaaccgggattgcgatgcggcattggcgggcggcgtttctatcgagatgcctgcgtaccggggctatgaatatcatgaaggcatgatcaatgcgcgagatggtgtctgtcgtcctttcgatagccaagcctctggcacagtcaccggtgatggcttaggaatgctgctgctaaaacgtctggacgacgcgctggcggatcgggactgcatctatggtgtgatcaaaggttcggcggtcaataatgatggcaataacaaaatcggctataccgcgccgagtgtgatcgggcaatcaacggtaatccgcaccagtttgcgccgtgccggttttgatagcgacagtatcggattggtggaagcgcacggcaccggtacggtgctgggtgatcctattgagttacgtgcgcttaatgaggtgtttggcccaacacctgttccgttttgtgtggtttcagcgctgaaaagtaatattggccacctcaactccgctgcgggagtggcgggcgtcatcaaaacaacgctcgccctgcatcatcaagtgttgccaccaacagcgcactttcgccaactcaatcctgctatagatctatcgcgttctgcattgtacgttaaccagcaagtccaaccgtggccgtcgacgcgtcctcgtcgtgcactggtgagctccttcggcatcggcggcaccaatgccagcatcgcactagaagcacatcaacatgaggacgacccttcagcgacgggggtacgcgacagctatctgttgttgttctccgctaaaacacccgctgcgttagagttgcgcgtggcctccacactggaatatgtcaagcatggagtaggggtgcgcctgccggatgtggcttatacattgcaaactggacgcacagcctttgaccatcggcgggcttatttggtgagtcgtgggtcgaaaatcgatctctcctgtgccacgatattgcaagcggaaatcttcaatggtcagcgcacgacagcggagatctgcttcatgtttcctggtcaaggtagccaatatcacggcatggccagcgcgctctatgctcatcaacccatgtttcgccagcacatggatcgctgctttgctgcattccaacgctattcgacggtcgatctcaaggcgttgttgtttgacgatgaggatacgcgggatattgatcaaacgcagttcacacaaccggcgttgttctgtgtcgaatacagcctagcgcgcaccttgattgatctggggattacgccggacagtatgatcgggcacagtctgggcgagtatgttgcggcctgtattgctggcgtatttactcttgaggatgcgctgcacgtcattgaggcgcgcggacgtttgatgcagtccatgcgtcccggtagcatgatggcggtctaccttagtcgcgaacagttgaccccatggctagctgcagaacggggtattgaactggcagctaataatagcgcgcatttttgcgtagtcgcgggcgagcaggcggccatttcccgtttgagcacacgcttagtcgagggcgggatacagcacaggcgcctgaaaacctctcacgcattccactcggccatgatgacgccgatgctgcacgattttgcacagttgctggggcaaatcccgatgcacgcgccgcacaagcgctttatatctaatgtaagcggtacatggattactgaggagcaagctacctcgccggattactgggtgcagcaagtgcgcaacgcggtgctgtttagcgaaggtgcggcgcaactgttggtacaacccacgctgtttatcgaatgtgggccgggtaatacgctctctacctttattcaaggacataaccaatacagcgatcagccgaccctgttgacgctacgcaaagccaacgcggcgatcgatgatgagcacatgttgcatcgtacgctggcggcgctgtgggtcaggggggagaatattgattggagacgctttaaccagacggcactcggcaagcacattccattgccggattaccccttcgaacagacttattactatcgctatggtgctgcactttccggttatcgccagtatccaaatcctctgcgccgtccgcaagatgagtggctccagcgtgtgctgtggcggatgcacgacacatccttgcgggaggcgttctatgcgccgggcgaattgatcatcattattagtgctgacggcgacaagttacagcagacgctgatgagtagtggtgtcgacagcatcacaatgccgctgccgatatcgtcagaggacgacgtgtgggataatgaccgtattctgacgcatttccacgacatctgcgcacttttagcacacaaaacctaccgacagttacattgcttgtatgctcccggtgcggaggcaggatcatcgttgacacagtcgctctcgggactttatcgtgttgctcgctggtgtatgcacagcaccacgccgctggcgtccttaacagtattgacccatggtgcgtttcgcgtacaggaagaggataatcccgaaccgacgctggcagcgttgtcgggcgcagtaaacgtgtttgcccaagagctgcacccgaccgaagtacgattgatcgatatcgatgcgcagagcagtgatgagaatctgaacttgctaacccagcgtctggccccgaaacaagaaacggtaatggcgctcaggcaggggatgctttacctgcgacgctttatcccgacacggctgttggcgcacttaccccctcaaacagggtgtataccgggcaacgtactgtggattatcggcggtgaaaaggggattggccgcatgatcggcgaagcgcttgctcagcgtgagggagtccgtgtggtactgagcagccgcacaggttatcaccatgaagcggtgcagcaggacgcattagacgttatccactgcgacgtgacgcaggcggaggcggttagagcttgtctggcaactctgctcgaacgctatggacggttggatggcgtgatttttgctgccgacgctaccaccacattgacactgcatcaattgagcgaatctgcgctacgcgacacgctaacggtgaaagaacggggtactgctaatgtgctgcatgcgttagcgcaacggaatctgctggatgagcgtctgctactgctgttctgtaactcgttggctgccgtgaatgcggagattggccagacaggctatgctaccgccagcgcctatttggatgcactggcacagcaactgcgtacccgctacaaggtgaatgcgctcagtatcgggttggatgcattgcgtgagcagggcatgttgttggatgctataaacggcagtgaatacgatgtcttgcgtggactgcgcccattgatgacgggaacgttgctacaggcttataaacaacaaggggctgacaccagctactacgcgcgattatcccccgagtccgattggctgctggatgagcaccggatatccggtatcgccacgctgccgggaaccggctatctggcgctggcgtatgaagctctgcgccattactttgtgcaagaccaaatctgcattgatgaattggtctttttggcaccgttgactgtgatggacaactgcagtgttgacgtttttgttgacatttcacctaacgggcaaggagttagtgtcgaggtgaaatcaatgacggagcgctttagtggcacgttaacaacccatgccagaggcagggcgacgcgtctgatggtagacgataatgttgtgtgcgatctcacggggctgatgcgcgagatgcacactatcactcctccaacaaaggaattatcgagcacgcacttccactatgggccgcgctggcacagcgtacaacaactgtatggcaataccgcccagactcaggttttcgcaacgctggccctgcccaccgttgccgctaatgatacgatcgcactgcaccctgcgctgttggacatcgccagcagtgttgtcgaacaactgcctggttttcatactgattcggtacctttcctttatcaggatttacgcctgtaccgcccgttgccgaacaccttacatgtggcgctgactgtcaatcggcacgatgaggagggtgacagctacgctttcacgctctacgacatggcaggcgagatggttgcccgctgtgcggcaatggtgaagcgcaaggtacagctccacatacaagatgtcgatgacgacacgcgactgcgcgtgcccagtgccgataactaccaactgcggctggccgctgagggggagggggcaggaaagctagcgttgtgccctacgccgcgcttagcgctgggggattcacaagtagagattgaggtactggccaccggactgaactttaaggatgtgctgttcaccacgggattgctccggcagcagccgggtgaggctccgctgcaattgggactggagtgcgccggacgcattactcgcgtgggtaaaaatgtcactgaatttgccccgggagaggatgttatggcggtgctaaacggtggttttgtccagtacgcacgggtagaaagcgattgcgtagtgagaaaaccagcccattgtcgcatcgaacaggcggctgcgctgcctatcgcatacctcaccgcctattacgcactggtggtgcgcgctaatttgcaacccggagaacgagtattgatccacagtgcggcggggggcgttggcttggctgcgctacatattgccaaacgctgcggagcacagattttcgccacagcaggtagcgagcagaaacgcgattacttgctttcgctaggcgtacatgccgtagctgattcacacgacgaacagttcgctgccactctgctgaccgcatcggacggacaggggatggatgtgatccttaactccctcacaggccgtctgcttgacgctagcctcgcgctgctggcaccgctgggccgttttcttgagctgggcagcaaggacattgtggaagacaaagcgctaccgatgcgtttcttcgcccaaggcggcacctttattccgattaattttcacgcggcgcatggtgcgtttagtcgctacctgcaacagattgtcgcttggatagatgataacacgctaccgctccttccatgcaaatccgtaccattgcccgaggttgcacgcgccttcgccaccctgaccacgccgcagcatattggcaaggtggtggtaacgcatcgcactgcggcaggcatggaccggctgaacgccatgatagcagaaaggcgcctcggcggctatgcgctcagcatgagcaatgccgaggtgatgcgccaattgtggccgatactgaacactcgcagtccgtgggcgcaactgctgctctcacctcgggcgatcgatagattagcgcggggcaaccgggtggatcgcggtgtaccgtctgccgctaacgatacgattactcagcagacagtgaaaaagcggccccgtccggaaattggcgtgccttacagccccgcgacacgtgaagtggaacgcgtgctctgccaaatcctggaagagtatctgggtctggatagagtaggcattgacgacaactatgccgaattaggggcaacctcactcgatatggtgcaactgagtgggcaaatggcgcgtcactatccgcaagtgagcgtggtgtcgctgtacaaccacgccaccgtgcgccagctggcgacgttttgccagcccccggagggcgagtcaaatgcgccatcaccacagcctgcagtacagacgaatacgcgcgcgaatcagatagcaaaacgtgctttgcaaattgcgaaaaatactgcgcgcagtcacacgtctttgcattaa

SEQ ID NO: 76371 - DNA, 1062 bp, Citrobacter koseri
atggctggtattttttcttcagtggagaaaaatttaattggtgggataaccaatgctaccagcggtctaatgatgtcttattcttctatgatgatgggactggcagcaacgtcagtcaccatctacatcatgtggagaggctatcagacactggctggtaagctctccacgccgatggaagacacgatgtgggacatcatgcggatggcgatcatcctgtcgtttgtggcaaacgtcagtggttatctcgatggtgttatagacgcaataaacggattaaaggaggggttttctggcggagaaagcatctggaaaatgctggataatttatggaaaagtgcaagagtattagggaaaaaactacatgacatggataattccacttatgttaaggatgaaggctggacagctcagttttatgtctggcttggcatatttgttttaatgaccattacagcctttgtttcgatgatcgctgaagtaatgattctattactgagcattacggcccccatcttcatattttgccttatgtatggtttcctgcgtccgatgttcaataactggctgcaaaacatatttgcagccatattaacaatactattttcagctttatctctacgtattgttataaattttttaacatcgagaatggcagaggccaccgcacaagcggataaagtaaatatcgtagaattaggagcacaagtctgtcttgcgggtatctgcgcggcaatactggtttatctctccgcaaaactggccgcatccctggccggggcaagtgctaccgtatccatgcaggggctggctgccatgggcatcggtgctgccgcctatggttccgggaaactggccgggggagcagtaaaagaaaccggacgttccgcccgggacaacatccagggctggaaggatgcgaatgcaggtaagcccggaggtgagttaggctataacgctgctaaagcgcgtaaatacgccatcgagcagatgatagcccggaacgaagcgcggaggctggcacagtcgagagattccgcggttaagaagttcaacagctaa

SEQ ID NO: 76372 - DNA, 225 bp, Citrobacter koseri
atgaaaaagattatattacttacaattatatcaagtatcctttctctggctggatgcaaggaggaagctaaaacaacaaagtggtatcgtgaccacccagatgaattaaaagttgtttatgataaatgtcagaaaacaggggatgcatcagagaattgtaaaaacgccaatgaagctcactggcaaatacagcagctaaacgccccagaggtagattttaattag

SEQ ID NO: 76373 - DNA, 708 bp, Citrobacter koseri
atgaaaactcacttttacacgctgattttcgtatgttcgcttgcaagcccgctggcacaggcgggaggtatattagtatttgatgccacggccagactggaaaatgtccgccagtggcagaaagaagcgaagcaatggatggagaccgtgcaacactacaaagaccagatgcaagcttataaggatcaactggcaacggccacgggcgttcgggatatcgccggctttgttgaccaggccaggagcctgaaagccgaccttgaaaagttacgcaagcccggacaggcattgaatgatttgcttctctccggcggttcctccgggcagttcgacgcgctgtacgagaagtataaaatcttcgatacctgcaatgccgaacggtcggagacctatgccagcgtatgcaggcagcaggtcatcaataaagccatccagcttgaacagaccgacgaaatccagaaacaggtaagccagaccctcggggaaatcaacagcctctccagcagggtagcgttatccagagatacgaaagaatctcaggaccttgcaaacagtattcagctaaaatccgtcatgctgaacacgcttaccagccagtgggaaatgagtgtgaaagcagcagaaaagcgcgagaaaatgcttgaggcagagcgcgttaaacagtggagccaacaacaattaaatgcccccgatataaattttaactaa

SEQ ID NO: 76374 - DNA, 2745 bp, Citrobacter koseri
atggcaaagctgctcaaggccatgaaacgcccggcagcgctgtggggggtaccaatggtgccactgctggctgtcacgggtgtaaccatcatcattgctgtctggacttccgtcgctctcctgttcttgcttcctgtgcaatttctggtgatgaagtccctcaccagaaatgaaccaatgcggttcagtctgattgccgtatggctgagagcgaagggaaatccggtagcaaaccgtttatttggcgcaacaacatttatgcctgttgagcatgatgctgttgatatcagggagtttctcgacaccatgaaactgaatcagtgtgccaccatcaggaaatacatcccgtactcatcgcacattcatcagcatgtggttcgttccccgaagagcgatctgtactgcacctgggaattgatgggaacgccgttcgactgtgagtcagacgaaacactccggttcggggcgaaccagttaaacgggctaatccgctcattcgaaggtatgcccgttactttttatgtgcataacagccgggaacagttcacggattcactccatcgaatttccggtaacgcatacgctgacaccatcagcgaactctattacacctctctggggaaacgaccgttccggcgcaaccgtctgttcctgacggtctgctataccccgtttgtcagccttgaaaaagcagaacgcaaacggatgaaagacggccagaaattaaaggagctggacggtgctttgctggagatgctggaaatcaaaagctcgcttgatactgcgctggcgcgctatggagcctgccctctcggtacgtttagcgaaggggaaatggtgttttcgtcacagctggcattctatgaatacctgctgacgcaccagtggcgaaaggtgcgcatcacccgcaccccggcctgtgacgtcatgggcgccgcagcgttgttcttttcggcagaatccggacagattaaccacgccagcggtacgcagtatttccgggggctggagatcaaggagttctccgaagaaaccgccaccggaatgatggactcccttctttatgccccctgcgattatgtgattacgcagtcttatacctgcatgtcacgcgaggaagcgaagaaggccatcaaacgcacccgccgtttgttactgagttcggatgatgacgcggtatcccagcgactggatctggatgtggcgcttgacctgctgacatcaggaaaaatcgcttacgggaagcaccatttttccatcatggtgtattccccgtcgctggaaaatctggttgcggatacgaacgaaatcagtaacgcgctgaacaacatcgggataacgcctgttccggctgagatatcgctttcagcggcgtatatggcacaactgccaggcaactttactctgcggcctcgcaaaggggcgctgagcagccagaactttgtggagctggccgcgctgcataatttctaccccggcaaacgtaataacgcgccgtggggggatgcgatggcgttaatgcgcaccccgtcaggcgacggatattacctcaatctccacaacacactggcagataaggacgaattcaacgagaagaacccggccagtacctgcatcctcggtacgaacggttcgggtaaaaccatgttgatgacgtttctggaaatcatgcagcagaaatacgggcgcgaagacagcttctccccggatgccagaaccaaacggctgacgaccgtttacctcgataaagaccggggcgcggagatgaatatccgggcgctgggtggccgttactggcgggttatcagtggtgagcctacagggtggaacccgttctcgctgccggcaaccaaacgcaatatcaatttcatcaagcaactgatgaaaatcctttgtacccgtaacggtgccaccatcactccccgcgatgaacgccgtctgaacgacgcggttaatgccgtcatgagcgatgagccggagtatcgtcgttttggtattacccggctcagggaacagttaccggaaccggccacaaaggaagcccaggaaaatggtctggatatccggttgtcgcagtgggcgcagggcggtgagttcggctgggtgtttgataacgaatctgacacgttcgatatcagccactgcgataacttcggcatcgacggaacggagttcctggacgatgcaagcgtatgtgcgccgatctcgttttacctgctgtaccgcattaccagcctgcttgacgggcgacgtctggtcattttcatggatgaattctggaaatggttacgcgacccggtgtttaaggactttgcttataacaagctgaaaaccatccgtaagctgaacgggatgctggttgtcggcacgcagtccccggcggagatcatcaaagatgatatcgccccggcagtgattgagcagtgcgggacacagattctggcggcgaaccccagcgccgaccgcgcacactatgttgacggtatgaagtttgagccggaagtgttcgacgtggtgaaagggcttgatccgcaagcccgtcagtatgttgtggtgaaaaatcagttcaggcgcggcgataccaaacgttttgccgcccgtgtcacgctcgatctgtcgggtgtcggcagatacaccaaagtcatgagcggcgatgcccccaacctcgaaatattcgaatcgatttaccgggaaggaatgcggcctcatgaatggctcgatacctacctggctaaagcgctctga

SEQ ID NO: 76375 - DNA, 306 bp, Citrobacter koseri
atgaaacttttcagaaaggtaaacgaattaatcagccgtgcatctgcttatgttctggctccggctatgagcgtttttgcggccagtccggccttcgctgaaggcttcaagccagcgaataccgtgatgcaaaaagtggcgctcgggcttcatggttgtgcggccatcaccattaccgtagctgtagtctgggtcggttacaaaacactcctgaacgggcaaagcctgcgtgactgcgtttatatcatcattggcagcattcttatcggcggtggctcggagttcgcagcactgcttatcagctaa

SEQ ID NO: 76376 - DNA, 711 bp, Citrobacter koseri
atgctttccaccactgctttcctggcggtggctatgcaatgcgccgccaccgttcacccttcgacatccctcgatgtggcaagggtggagtccggttataacccctatgccatcgctgaaatcgtgcccaggcccgaacgaaaacccggcgataaaggctttattactcacatgccaaaaagtaaggaggatgcagtcagcatcgtcacgcagatagaggcgaaaggtcgccgctactctgttggcctgatgcagataaccagcaccaattttaagcgttacggcgtcaccgctactgaccttttcagtccctgcatcaatctttccgtctacgaaaaaatcatcactgactgctaccgacggggcggcaccctggaaagggcgttgagctgttactactccggcaatttcagtaccgggcaacagcaggaacccgctttttcaaagacgagttatgtacagcggattggttactccccggcggatacccgctatgccgttcccggcacccgcgatgatatcgccaccccggtggccaccctgaaagctacgccagtggatgcgccgacgcgcccgcgcgtggtgtggccgggggcgatcgttcgcggcgttccggcgcaactccgccagaaaaaggcggccaccgtctattaccccgcgcaggttgtgcgcggaaatcgcgatgtaacaatgaaagaggaagaaaaatga

SEQ ID NO: 76377 - DNA, 585 bp, Citrobacter koseri
atgtacccgttcctgaattatattatgctaactgtagttctcagggcactacgcgaagggaacataaactactgtgaagcaatgggattcactcacgacgaaatgaatttgattggaaaattatcagtacccgaacttattagtatcggccttttatccacaccatttgtcgatattagtgttcgacatgatattctacgacaatttctcatattatcccgcaatgaaagcagacgtcatgaacagctaaatagagccgtcagactcggtggctcaattgcactcatgaaccgttattttggtattagctctaaagaagtctgcgcacgtcgacggttacttggtatcgccgtaccaaacgggagaacgcccactcctgatgaagaaacagatgctgaaatctggaatcagtggaaaaaatatcaagtcgaaaatattgattcgcctgaagctctggacgcaatgatgcaggttacagaaaacctttcatcatgtactgacagtccttctctgaccgttgtctggaactgcatcatgcattacgaaagggaagcagcagtaaggagaatacggcgtgccagatga

SEQ ID NO: 76378 - DNA, 150 bp, Citrobacter koseri
atgagaaaaaatatgctttcaattatgaatcctacttttcagtccaaaaaagaaatctcacaccagtataacaaggacagacatgtatccaggctatatcacagcataacccacactgaaaatcagattgactttcttaatgacatttaa

SEQ ID NO: 76379 - DNA, 927 bp, Citrobacter koseri
atgtcagagtcatctcaatcattatttatgattcataatatgccttcctgggtcactatacctgaagccgccgaaataacaatgaaaactttaaagagaaaaatcattcctggtgacatttatcgccacgcattgagcggagacattcttctttcaatttattttcagtccccagttatcattaagaagatacagacatttaatggaaaagttaaattcagacagtttgacggtggattgattgataaactgtgccagcttgacaagaatgggtttatttatgagcataacttaactctttgcaccgaaggtaaatatatccacccaaccccgcgaattatagatacaacccttatgggttacgaatatgttctcatccagagaattcttgctcatgagtttaaatttcctttgcctgttacaggtgcaaaagaactcaactatggaattacagttaaactatctggaaatatatttcagacttttgaaaaaatgacatgggagaaaagagttgaaaatcaattaggccaacttcctaaaaaagccgcaatgaacgttatggctcaactcgctgcggagaaaattatgaaatacagacaaattgattatttccctctttataacttaccctctgatgcctgctttgtaattcgctatgccgaagttgaaaaactaattaatctgtataaaaaggatataaaaagcaccaaatcatccccgagaataaccacgcctttatctcgcctattctggttggcctgcaagcacaatgacactatcagcccgttacttaaacacccttataaactcctctcaatttttgagcagtgggcatcagatgatggcatcaaagaagaattgaatgcagaaactctaaaaagagctctggaacgtgggtcaccatcctctacatccttattcagttaa

SEQ ID NO: 76380 - DNA, 1395 bp, Citrobacter koseri
atgctttccatcttaattgctattttttctcccgtgtttaaaagattggcaatcgaattaaaaaataaaggcgttgatataaccattgtgactgatagtgagttttctattcgtaaatataaattacatgagactaagtgtaatattatttcgtttgaagagttctcaaatataaagaatactgatgttgaatcacaagcgcagcgtcagtatgacaaatggaatgttcatgctgattatgatcgtgataattactaccattctgttaactcaaaggatgataacttctgggggactgtttcaagcgacttatatcgtttttttgaacatgtattccgaaatgatatgttcaattttgttttctacgaaaatgtatcgaatggattagcatatacagcaaatagagttgccgaaaaatacggcgtcagatatttaggactaactgcaagccgacttcctgggaaatctttattttctaccttagatgaccaattatctagagagattagttctttaattgacaatcttcctgaattgagtgttgataaatattctgaaattaagaactatattgataacattcagaatattcaacctgattatatgaagaacaatggtctctcctcagtaaactttataagtaaaatatttaagaaacgtgattttacatttattactgagacgatcaggcagacattagtaggaaaaaatgacttattccaagtaggtaatccattactaaaaagtttttatatgaactttagagaagtcaaacgctggttctgtgtaaaaaggattaagaaattatttagtgaagatcttacatctcaaccattttatttgtatccgttacattatcatcctgaatcctcgacgtcgattcttgcaaaattttatgatgaatataaccttattcgtaatttatcttttagcttgcctcatgggaaatttttagttgtaaaagatcatatctctgcaactggttatgaaggctatgagttttacaaaaaaatattaaaattaccaaatgtaaagcttgctaacccaaatttaaactcaaaagaacttattaaaaaatccttaggtgtatttacgctaaccagtactgtgggttatgaggctgtattaatgaataagccagttgctgttttcggagatgtattctatatggggcacccgcttgtatatcaatgcagaggatacaaggatattcataatgcgttgagtcatatgcaagagaatcagactgctaattattatgattataatattaaatttgttggtgcatatgattatctttgcttcccgctgacgattagttatggttcttcatctggggctgagtttattgaggctatctctacgcaaatattacgaaatttaaaggatcgctaa

SEQ ID NO: 76381 - DNA, 1326 bp, Citrobacter koseri
atgctaatactgtggttctggatatgcctttttttgattagcgttattgttcatggttctgaaattttaaactttgctattgtttttggttatatatcattattgttttactttttggcaaaaaaagagtctttttttataatcagtagtttctttctatggtcaatccttacaacagctataagtggtttgatccttgagtctggtgtttttctgcctgaacttggtatgatgtcaacgctaaatggtgcgacggctattaatgttagtctcgccgttattacattactagctacgtgtaatattttcaattttctgaatgaacgtattagggtaaatttaaattcttcatttttggtaaactcagctattgagaaaatatatccaatcattgttttagtcgctactcttatagttatctttatttcaattaaatatggtcgtccaagtaattatgggcaggatcgattttattattggaataatattgcaccgtcttggggaaatcttgttcggctttttgtagaacagtctgtatttattcttggatgtatttatgctaaaacgaaaaataagatgatcttggttatatttttcttgggcataacttcacaggttctggtcggcgaaaaatttactggcattttccaaatgcttcttttctttagcgtatgtctccttatcgcttcaaatagtagtattaataaaaagttattgtcatttaagagtattcttctatgctcattcttgggctttatctttgtaattctggtttggacgagttatttttctctatctggcgatagcacacttgcctttgaatctctaaagattaggattgcagcgcagagccaattatggtgggggcttatagagagtgcggccttgcaagattttggtgcttccgatattatctataatttctttgggataggggcatttccagaagatacaggtatgtcatatcttatgggattggtcatgccgcagcatttattttcggtatatcaggatgcagggattgctttaacaatggcatttcctgctaacatacttttattcttcggaccgttcttatctcttttggtttgtactgttctcgctatttttcttgcgttggcgctatggtttaccgtatttactttaagaaataaggattatgtattattatttatcgcgatgaaggtttttaacattgctatccaatttatattgatgggaagagtgtatctgttatttgaatggaagattattttactcttatttccaatgatatttgctttcatcgcacattctaaaaataggatttcggggactaatgcctga

SEQ ID NO: 76382 - DNA, 969 bp, Citrobacter koseri
atgcctgatatttctttcatcatacctgtctataatgtttcagcttatctcatgcggtttttcgagccattcaaggcatgtgacttatcctgtgagatcatattcattaatgatggttcgacggactcatcagccgaaatcctctctcagttgtcaagagaggatagtagggtcgttatttttaataaacaaaatggtggagtttcctctgcacgaaactatggtattactcatgcttcaggagagtttatatcctgcctggatcctgacgatataatatcacctacttttttccattatattgctttggctcgtagaaaatatcctgaagctgatacttttgtctactcctatcataagttttatgatggaacaattccggagatacaagagatggatgtttctggagttgttttcgaattagtcccgaaaagtgttctttcatcacttcataattatccatggctaagggtgactcggcgcgaattttatatagataatctttttcctgaaggtattatttacgaagattcggtcacagtccctttactcaatgcccaggctaataaggttgtcaggacgaatgcttcactttattattatagagtgcgaaaagattcattaactaactttgatataaaaagaaacatggatctaatcagggctcttgatatccttgaatcaaaggttgtaaaacacccagagtataaattaaatttttacacttgtgttgcccatttatcacgcagtgctttaattgttttatttaagctgtcaggacaagaacatttttccattctttttaaagaaagctatagtagcattattactaaatttaaccaatatcctcttttgggtgtcttgaaaacagatgctaaaacttcagataaaatctgtttcgctttattaaaatcaaaaagagtgggttttttcttttttaaattgttatataggttgattaataggtaa

SEQ ID NO: 76383 - DNA, 765 bp, Citrobacter koseri
atgaaagtatttgtggtgtctcataaaccctttgaattcccaacagatctggaatatgtgcctttgaaagtcggggcgttaactgacggaattgcaaaaaattatatgcaggattgcgatggtgataacatcgctcacttgaatccctcattttgtgaactgacagcagcctactggatctggaagaattctcaggaagacgttgtgggcttggcgcactaccgccgctatttcgcatcttctaaaagtgatttgaaggttaagggaaagcgcatcgcatcaccagaagagatgatggcgttgctgaaagaagctgatatcctgattgccagaccgagaaattattacatcacatcgattaaaaaccattacattcatgcccaccatgagtctgactacactcagcttcgtgatgagattgcgttacagcacccggaatatttgtctgattttgactctattatgggtgggacaaaaattagtttgtacaatatgtttgtttgtaaaaagtcattgatcgatgaatactttgaatggcttttcccggtactttttgcgcttgagcaaaaaattgattaccaaaattacgatgcttaccaaaagcgtgtttttggttttatggcagaacgtcttttcaatgtctggcttcatcatcaccgcgagagcttgcgcattaaatatatgccagtagtaaatattgatggcgaaaatcttttactgaaaggcattggattattaaaacgacatttctggggtaaaaaatga

SEQ ID NO: 76384 - DNA, 1794 bp, Citrobacter koseri
atggcaacattacagcaagaactaatagtccgtggcgaacaagttgagagagtttttatcaactatcaggataaaaaatacgttgtgaatcgaaagtatcaacgtaagttgatttggactattgaggaaaaacaaaattttattgactcaataattaaggggttcccaatacctataattttattagcagaacctcttgggaagaaagacggcactctcgagattattgatgggatgcagcgtatgaatgccatcatgtcttttatcacaaacgatttttcgtttaatggtttctactttgatttaaatacatttgctacgacgaaagatctattagatcgaggagtgattttgcagaagatgccgatccttgatcgaagccagtgtctagcaattgcatcttaccctgttccgctttcaatttatgaagcagctgagagagagtctgtcgaagaggtatttcggcgaattaactcaggtggccgtcagctatcacggcaggagttacgcgcagcaggtgctacgaatgtgttcgcagagtgtgttcggaaaatctccgcaagagttcgcggtgacacatctaatactgatctcttgcttttaagcgagatgcaaaaaattagcatcacgaacaaggagctagactatggcatcagtgctgacaacgtcttctggattattaatggaattctgacaaaggagcagcttcgccagagccgggatgaagagatggtggcggacatcgttgcttatatggtctctgacaaacctgttgcctcgcgcacagagcttcttgatgactattatggcgcgatatccccggaagcgttaactagtaaggcaagatttgaggcaattgatcaggctattaaaaagcgaagtggggaactagtcgatcttgattatcaaagagtacacgacgcgataattctactgctcgctcaggcccaaactacattttctggattgatttttcctaacggaaatggcggaaatccggtcccccgttacttccaggtggtctttctcgccctgtatgacttgataatcaaaaaaggcatggtggtttcggatagcgcgggcctgattgctcggctgaaagattgcggtaaaaatattcaggttcaagatggagggagatggggcgctgataaccgaagtagaatggtcgattcaatcatcggttggattcagggctttttcgaaaatgacaaaaatccagatccggcaaaagtccattggatcacgaaactccaaaatttactcactaactcaatcactgagcaagcagcctacgattttaaacaaggtttctatactttggatccatcgccctcctttgatgagcactccttcgaaaaaatcatggagacctgtgcggctatagctaatattggcagaggatataagggttatgtgctggtcggtgttgcagaaaacatcaagactgcaacaagagtacaggaggtttttggaagcgaagctctgtcttataacggcttctatataactggtgttgatcacgaagcaaactatgctggaaagaaccttgatcaaatgttccaagacatatctgatcgaattggacgttctgcactttcagaaccgcttaagtcctacataaacacccaccttaaatgcgttcgatattacgataagacggtcttcgtcttcgaaattgtaggtcaggatgccccttcgcatttagctggtaagtgggtagagcggcaaggagcacaagtcaaagatatttcccctgatcgaatgggggcactgtttgagcgtttcagataa

SEQ ID NO: 76385 - DNA, 570 bp, Citrobacter koseri
atggcactcattgataccgctatccgcaagctcagacccactgacaaactcttcaaactcggcgacagtgctggactgtacctgctgatcaaacccaacggctcaaaactctggtatatgaagtaccgtattgacgggaaagaaaagaagctggcctttggcccttccccggatgtatccctgcttaaggcacgccaactccgtgatgtggcacacgctaaagtacgtgaaggtgccgatccctccattgacaagaaaatcgcgcagcagaaaaagaaaaatggacagacattccgccagatagccatgaactggcacggtgagcaggtcacgcaacctttcataaaaaaacgcccgcgtttcgcgggctctgttttgttcaatcgcaataaacgaattagacttaactataaaagtctagagttgtttgatttgcttaggttgaccaaatccataccttcttatctgaaacgctcaaacagtgcccccattcgatcaggggaaatatctttgacttgtgctccttgccgctctacccacttaccagctaaatgcgaaggggcatcctga

SEQ ID NO: 76386 - DNA, 399 bp, Citrobacter koseri
atgacgttaccgagtggacacccgaaaagtagattgatcaagaaattcactgcgcttggcccgtatatacgcgaagggcagtgcgaagataatcgtttttttttcgattgcctggctgtttgcgtcaacgtgaagccagcgcctgagaaacgtgaattctggggctggtggatggaactggaagcgcaggaaaaacgctttacctacagctaccagtttggcctgtttgacaaagaaggtaactggaccgccgtgccgattaaagaggccgaagtggttgaacgcctggagtacaccctgcgcgagtttcatgaaaaattgcgtgcactgctgacttcgctgaatctggcgctggaacccgccgataacttcaaagaaccggtgaagttaacggcgtaa

SEQ ID NO: 76387 - DNA, 1221 bp, Citrobacter koseri
atgaagctaaatgcgcgacaggtagatgcagctaaacccagagagaaagcctataagctggcagatggtgctggtttgtatcttgaagtcgttccctctggttctcgatactggcggatgaaatatcgcttcaatggaaaagagaagcgtatggcttttggtgtttatccagcagtgtctctcgcacaagcgagggcactacgtgatgaagccaagaaaaagctggccgagggtatcgatccatcgtttgccaagaaagaagaaaagctggttcgcgatgtgcagctcaataatactttccagtctgtggcgcttgagtggcacggtacgaaggtgtgcagatggtcagaagggtatgcttctgacattctggaggcctttaataaagatattttcccatatatcggtcagcagccagtcaacgaaattaagcctcttgttctgctgaatgtactgcgtcgaatggaaagccgtggtgcgacagagaaggccaggaaggttcgccagcgctgcagcgaagtctttcgttatgccatcgttactggccgtgcggaatataaccctgcagcggatctaaccagtgcgatgtcagggcatgaatcgaagcattatcccttccttaccgttgaggagttaccagacttctttaaagctctttctggctatacaggcagcccgctggttgttcttgccgcacgtttgctgatccttacgggagttcgcaccggtgagcttcgaggtgctttctggagtgagtttgatcttgaaaaagcggtgtgggaaatacctgcagagcgtatgaagatgaaacggcctcatctggtgcccctctctacccaagcgctggaaatcgtacagcaacttaaagtgatgtctgggcaatatcctcttgtgtttccaggaaggaatgacccccgtaaaacgatgagcgaagcgagtataaatcaggtgttcaagcggattggatacacggggaaggtaacggggcatggtttccgtcacacgatgagtacgattttgcatgaggaagggttcaatacggcgtggattgaaacccagcttgcgcatgtcgataagaacgcgattcgtgggacgtacaaccatgcgttgtatctggaaggaaggaggaagatgatgcagtggtacggggaatgtattgaaagtatgtttgaaagaaaagtagccgttaaattgcaggctaatacaaaggagcggtattga

SEQ ID NO: 76388 - DNA, 1173 bp, Citrobacter koseri
atgagtataggaaaatcctcccaaccaaagtccagcgcgcctggccaatatttgggatttgcgcttcaacctgttcgcctctgctaccatcttctcaactgttctgatgatgcatgtgtatcgctcgagtatcttgacgacgtagccgtacattatcctgatggccggattatattggagcagactaaaagtgctttaacacataaccctttatcagactggtcggaggatttctggaagacaatttctaactggatcgacatagtgacagtaaatgatatatgtcttagcaaagtaagttttcgctactatgttacacctgcaaaaaatataggtacaatttgttcgctatttcataactccaaaaatgatgacgatattaaaaaactaatgttttttttgcagagtgaactgaaaaaattaaaatcagaacctgcatgtatgaaatatatttctcggtttcttaatgctacacaagaagaacaaaaagcaataattacaaatttagttatagagaatgacagaatagatccgcttgattcaattcgtaagtgtttaaaacctacaattgcagaagaacttattgaactaacttgccggtatgcgataggaatggcaaaagaaaaagcggatgggcttatccgtaataaacaaaatgcagttatatctgtgcaggaatttagaagggtgtttataaattttgtacagaaaaataatattcctggataccttcagccactcagtacagaaattaataattctgatgctgaagcattgctcaaacgggcccccacgtttataaaacagctaaaactgatagaacttcgtcaagatcgtcagcttagggctgtcagtgacctattaaagacggacgctaacataaccatgtgggccgaaaatggactaatttttgagcaaaatatttctgaatggcataattcattattaagacagtacgatgcaatatgcgatgatattgaggtttgccactccgacaagtctgaaataagcagaggtaaagttatttatagccgttgttctgctacaaaagtatccttcgataataagatagtccctgaatattttactaatggaggtttcaatcttctggctgacgatctccgtttaggatggcatccgaattatatagagcttctcgataaggatgaatag

SEQ ID NO: 76389 - DNA, 510 bp, Citrobacter koseri
gtgagaatcgaactgagaacgcccgagctgaatgatgcagctttagtacaaaatagtgctttgggagccttttttttatgggtattttgtcggtattatcaacaatacaagaaggagtctccaactattactatcagttttcttgttttaccgcttattttacataaagctactgttacactaatttgtagcacccaaaaggcctcaggtatacatctctttgcagggaaaatacagaaaaaaaaggaagcaatatttactattcatgaaagaacgcttcagttgcgatcacttacatttgaatctttaagtgttgctgaagacgctggattaatagaaattgacgttaaaacagccacattaagagttagatgtgatggttcagaggttgatttaccattgctctctgacgagttgaaaaaaattcatgcttgctgtgataaattagccttttggttctctgaagtttcggatcaacaaattgcgaaaacattgatggtggatttctga

SEQ ID NO: 76390 - DNA, 1965 bp, Citrobacter koseri
atgtatttccaaataagaaaattgatactttggcctaaaacaaatcaacaaccacgggttgtaaaatttgaacccggaaaagttaatattatcagcggtgcatcaaaaacaggtaagtcggctgttatccctattattgattattgtctatgttctgataagtgtgccattccagttggtgtcattcgagaatcatgttcatggtttggtatactgattgatacggctgaaggtcccaaattgctggcacgtaaagaacctggtaatcagcaagggactagtgaaatgtatatagaagaaggtgatggaataattataccttcattagctcctcagaaaaatagtacaatgactcatgtgaaaggaatcttggatcgtttggcaggtttatcagatttagcatttgaaccaactggacatgataattttcgcagtcgtccaagtttccgtgacttaatggcatttatttttcagccacaaaatataatagcaaatccagatgttttattctttaaagcagacactacagagcatagagaaaagcttaagactatatttccgtatgtattgggggctattagccccttggttcttcaggcaagacatgaattagatagagttactcggcaattacgtcgtaaagaaacagaacttaaaacacgtaaagcctcaggagatgcctggcaacgagaaagtcggatttggttgtcacttgctattgaatacgggcttttacccgtagaacagtctattcctgacgagtggcctgcaactttaaaacttttgaagtcaatccttaaaaaggatattcaaatttctcaaccttctttaagctcaacacaatacgttatcactgaattaaagaaattgagagaaagagaaacaaataatattacacaaattaataagattagaagccagcttatagaaattgagagacttaacgatagtagtgatttgtataaaaaagctcttgaagtaaaaagagaacgtcttagtttatccacatggattcgtgaacaatatgctaaagctaaaataattgagccgttaagtgaggtacgaagttcagaaaaaattaggcagctttgtctcgcacttgaaggtattgaattgcagttacgttcctatccacaggttaaccattctttggataaagaaactttacatcttcgctcacaattaaatgagtttacgaaagaattaacgtctatcaggcaagaaatacgagcgctagagaaacagtcagaagaagtaaaaaaatataatactcaaggagaattgatctcccgttttattggtagattggaagaagctttacgcttgtatcaaagtacagatgtgttaactaaattgataagcgaaattaaagaattacaatcagagcagaataagttattaaaaatagtatcggagaaagaaatttcacgtaagcttgatatagtgcttgataaaattcaacgagcaactgggaaattgttaccccatctagatggggagtggccagactcacctgtcaggttaattattaatgatttaactgtaaaagttagtagagggcagcgagatgattatctttgggaaactggtagtggggcaaactggttggcttaccatattgctacaacattagctttgcaatgggtgtttacgagaaatcctcagcatcctgtaccaagtttgctcatttatgatcagccaagtcaagtatatttccctgtaaggcaagcaggaattatagacaatgaaaataatgagccagaatggcaaaacgaggatattgttgctgttcgtaaagtatttaaagttttaaataaatttatatcttcaactgaaggtatattccagtttattgtactggaccatgctaatgaagaagtttggaatagtctggagaacatccatttagttgaggaatggcgtggtgcagcgttgattccatatgattggattgctcgtgattaa

SEQ ID NO: 76391 - DNA, 162 bp, Citrobacter koseri
atgttcagaacagaagacatcatcgatgagataactcaatggattgattcaaacttgcataaaccgctgaagatagaggatgttgttgcgcagcaggatattccaggtggcattttcatgcggattaataatttggtaaaatcaataccacattctgaataa

SEQ ID NO: 76392 - DNA, 252 bp, Citrobacter koseri
atgaaatcactacttattacttcatttgtcatgggatttattgcagtaaatgccgcatctgccgctcaggaaattaaccatgcagatgggaaagaaaagattggtgtagtctcagccagcaatgcctatacgcttgatgatttatcgaatgcgctctctcgtaaggctgatgagcaaggagcaacatcattcaaaattctgtcaaccacggggaataatcgactgcacggggttgctgaaatctataagtaa

SEQ ID NO: 76393 - DNA, 774 bp, Citrobacter koseri
atgaaaatactcattgcaggcgcgacaggaagtattggccttcatgtcgtcaataccgctattaaaatgggccatcagcccgtggcgctggtcagaaataaacgcaaagtaaaattgcttcctcgtggaacagatgttttttacggcgatgtttcaatgcctgaaacactcaccgaattgccgaaagatattgatgccatcatttttacgctcggttccgatggtcagggtcgtattggtgccagagcaatcgattacggcggagtacgtaatattttacgaattttcaaggatacgcctgttcgcatcagcctgatgaccacgattggcgtgactgaacggctcagcacctggaatcaacgcactgaggttcatgactggaaaagacgcgccgagcgtctggtcagggccagtggtcacccctataccatcatcaggcccggctggtttgattacaacaatgatgatgaacacagaattgttatgcttcagggggatcgtcgccacacagggacaccggaagatggtgtgatatcccgtgagcaaatcgcagaggttctggtcagtgccctgaccaacgacgaggcaaaaaataaaacgttcgagctggtggctgaacgaggtgaagcaccacaggatcttaccccactgtttgcagacctgcagactgatgatccacaaaaaaatgatggggttttagacatagacaatatgcctctcagggaagaaccggggtgcattgttaacgagctgaatttgtattcaaaaaattaa

SEQ ID NO: 76394 - DNA, 894 bp, Citrobacter koseri
atgctcaaagaaaacttcaacgaactgcaaatctttcttgtggtggcaagggagcgaagttttaccaaagcagcgggtaaactgggcgtttctcagtctgcactcagccacgcgatgaaggccctggaggaaaggttgaatatccgccttctgacccgcacgacccgaagcgttgcccctacagaggccggtgagagaattattgcctgccttgaacctcgcattgccgatcttgaacaggaactggaatcgcttgttcaactgaacggcaccgcctccggcaatattcgtttatcagccggggagcatgccgcgcgaagtctggtatggccgaagctaaaacccttcctcagggaatatccggaaatcactgttgaactggtggtggataacggctttgtcgatattgttgaggggcgttttgacgccgggatccgcctgggcgaaagcgtggataaggacatgattgcggtaagaattgggccggacatgagaatggccgtggtaggagcgccgtcttattttgctgcaaatcctgcacctgaaacgccgcacgagctacaacatcaccggtgtatcaatatgcgcctgccgacagccggtgggctttaccactgggagtttgagaaggatggaaaaccgttacgggtcagagtagaagggcaggtcacgtttaatctgcaagcggaaaggattgatgcggcgttatccggttttggcatcgcctgtataccggaagacagggtgcaggatgatataaagtcaggagagcttattcagattctgcaggattggtgtccgtctttccccggatattacctctactacccgagccgtaagcagcatccgcccgcttttgcgctgatgatcgatgcgcttcgctaccaggaataa

SEQ ID NO: 76395 - DNA, 990 bp, Citrobacter koseri
atgcaaaaacgttatctgggtaaatcccgactcgaagtctccgcgcttgggctcggttgcatgggcttaagccacggctatggtccggcgaccgatactcgtcaggctatcgagctcattcgcgcagcggttgaacgtggcgtcaccttcttcgataccgccgaagtgtatggaccctttcttaatgaagaggttgtcggcgaagccttaaaaccatttcgtgaccgcgtggtcatggccactaagtttggttttacttttggcgacgacaacaagcagcagattttaaacagccgtccggagcatatccgtgaagcggtggaaggatcactgcgtcgtcttaagactgatgttattgatctgctgtatcaacaccgtgtcgatccgaatgtgccgattgaagacgttgcgggtactgtgaaagacctgattgctgaaggcaaagtcaaacattttggtctgtccgaagcgggtgcacaaactattcgccgcgcgcatgccgtacaaccggtcacggcgctgcaaagtgaatactccatgtggtggcgcgagcctgagcaggagatcctgccgttactggaggaactgggtattggttttgtgcccttcagcccattaggcaaaggcttcctgacgggatcgattaagccaggaaccacttttggcaaggatgattaccgcagcacagtgccgcgtttcgccgagcaggcgattgaagccaatgaaaagctggtctcattgctgggtgaactggcggcagagaaaggtgtgacgtctgcgcaagtcgcgctggcatggctgctggcacaaaagccgtggattgttcctatccctggtaccacgaagctgcaccggctggaggaaaacatgggggccgccgacatcatcctttctcaggatgactcgcgacagataacccaggcgcttgaaacgattaaaatcgtcggcgaacgttactctcctgagcatcaggcccgcgtaggccgttaa

SEQ ID NO: 76396 - DNA, 852 bp, Citrobacter koseri
atgcaaactgtaaaactgaacaacgggattgaaatgcccctgctgggctttggtgtgtttcaaatgtctgatgccgctgaatgcgaaagagccgttattgatgccatcgatacgggataccgcctgatcgataccgccgcgtcttaccagaatgaaacacaggtcgggaacgcacttaaacagaccggtatcgcacgtaacgaactttttgtaacgaccaaactttggctacaggataccaattacgaaggcgctaaagcacagttcgaacgctccctgaaccggctgcaacttgattacgtcgacctctatctgattcaccagccttacggtgatgtccatggggcatggcgtgctatggaagaactgcagcaggcaggcaaaattcgcgccattggcgtaagcaatttccatcctgaccgattggccgaccttatcgccttcaacaaagtggcccctgcggtaaaccagattgaagtaaaccccttcaaccagcagctgcatgctgttccgtggaatcaaagccatggcattcagccggaagcctgggcaccgtttgctgagggtaaaaatggcctgttccagcatcccgtgttaacggcgattggccagaagtacggcaaaagcgtgggtcaggttgtgctgcgttggatcttccagcgaggcatcgtttcactggcgaaatcggtgcgcaaagaacgcatggctgagaacatcaatattctcgattttgaactcagcgctgaagatatgctgcagattgccgccctcgataccgctaccagcgccttcttttcccaccgtgacccggcgatggtggaatggctgactggccgcaaacttgatgtttaa

SEQ ID NO: 76397 - DNA, 1026 bp, Citrobacter koseri
atgtcagacacacagaaaaacattgatttaataaaagatattaatgaaatagccgagaaaggcatacaggcttttgaattgtcatatagtgaatctgggcactcaaatcttcacgagccacttttgagatggtgcgattttattttacgatatatacccccaatgaaacgtgatgtttttaaatcggatcgattcactaaaaatattccagatgatgcaaaagcgggattgcagagaatagaggggttatttacttcaggtggcgatgtcaatccttaccagagtaaaacattgacattatttaatgacacaagcggtaaaaaagccgcgcaaagaacggataacctttgggctgattggggtattcaccatcttcacctgtcattaaacccagtgagttctggtgaaaaatactcagaccgctcagaatgggtgttattcctgaaggtgtatgctaatgctgttttatttattgatataaaaagccatgataaagacattgagcccgaacttttttctcaaaaagacttgattgaaacatttatacgcaactggccagatgaggcagggatgtatgagatgaaaggtgtttcaaagctggcaattaaccaaccaattaccgatgcagacatcgcaaaattgagaaaaaatggaataaatctcccctttgaggtaaacggaaaggtttatgcaccattaggaatgggaatgacgaccgctataacctctacgagagtttcaatttatagaaataaaatatgtaattgggctaaacaaatagaaggaatattcatggatgaagatggcccattcctgaaggaagtgaaatctcagaatgtacaaaaccctaaattcgaattgtatatgtatgatggtgatgtgttcggcattactgagaaaaatattgataaaggatggatattcactagaggaaaatccgacaacgtttttagctgtttatttgactcatttatgcctgtgtgggccagtcctgttgtattgcagtactggaaacagaacccataa

SEQ ID NO: 76398 - DNA, 2034 bp, Citrobacter koseri
atgagttacttaccactagaaagattagaacaattaagaattggaattgttggatttgtatcacctaatgaaattagagtttctttagagattgactcccctgattcggtatcacttcaaggcggttcccctcgcaattttccccgaataaatagttatgtactgatcagtagcgatgatggatttctcgtcggacaggttgagtggattgccgtagaacactctccatatccaaaaagaagaggcctacaagattttggcttgatagaccttccttttccaattaaaaagctcagcatcaatcccgttggtacattgagagtcgatagaaaaaatgaaggtttcaagtttacaagaggtacagatgcttttccttctgttggtgactccgtgctcctgcctactgacaggcaattaaaatcaataattgaatcaggtgacaataggagagtaaaaataggggatagtcccttagctaacaatgcggaaataaaagtggatcctgataggctttttgggcgacatatagctattttgggtaatactggtagtggtaaatcatgctcggtggcggggttaattcaatggtctttagatgctgttttgcaacaaggacaaactccaaatgctcgattcataatacttgatccaaatggagaatatagtcgagcattcgggccagaatcaaaatacaagggcaagttattacgtgtagaagctaacactggtgctggtgaaatagatcttaaagtaccgtcatggttatggaatagctctgagtgggctgctttcactcaagctagttcaaaagttcaacttcctttactacgccgagctttgagagcgatgaggaatgatattttgtcagaagatgatgttacaattcaagcgaagcacttttgcggcatccttctcatatccataagacaatttgcaagccaaggtcagatatatgtaaatggtggacatgccaaaggttttgttgatagcttaacgtcttggaataatagcctttcctcattaaacgacaaaattgataaaaaacctttcgataacctaataaacacgataaacgtgtatctttccactcgggcaggaatccagtggcctgcaaagcctgatgtttccgacactgatcagttgattaatgaattaaaaaatgcacatgcagcgcttggaggcgatgaactagaacttcttccaaaaagtgaagatgcacctattcgttttaaaggtgacgattttgtcgcataccttgagattctagctcaagaaacaggcactgagcaatttgtggaattccttttgactcgtattcggacaatgctaggtgatacccgtataagtacagtaacaaatgattcggaacagcctattagtttaactaattggttagatacttttctcggtaaagatggacaaggttctgtaactgttatcgatttatctctagtcccaaatgaaataatacatttggtaactgctgtaatttccagagtaacttttgaagcattacaacgttatcgaagattaaatggaaaaccactaccaacagttatggttgcagaggaagctcatacatttattaaacgctacaaagaagatagtgagggtcagtcagtctctgacgtatgctgcaaagtgtttgaaaagatcgcacgtgaaggaagaaaatttgggttagggcttgtggtttcttcccaacgaccctcagagctatctccgactgtgttatctcaatgtaatacttttttgttgcacaggataagcaatgataaagatcaagagcaagtccaaagacttgttcccgataatatgcgagggttgttgagagagttgccatcgctaccatctcgacatgctattttactaggatgggcgtctgaacttccagttttagttagaatgaaagagcttactgaaatacaaagaccacaatctgacgatcctgatttttgggacgtgtggtctaacacgacagaagagcctcgcgaagttaattggcaaccgatagctgatgattggcaaagttga

SEQ ID NO: 76399 - DNA, 1419 bp, Citrobacter koseri
atgaatactcagcaaattaaggttggcagtgtacccgaaattattgagctattaccaaactctagcgagcaggctgattctcatccttttatcctatcgacgaacagtgcatggggagaacagggagcagaaatatcaatagagaaattgcgccaaaatatcgagccttggctaacagctctcttccaatccgaacatttaaatttattgataggtgcgggtttaagcacgtctattcaaatatcggctacagattcacctccagctggaatgggttggatcagcgatctagcagtatgcaaaagtgaaatagatgcatttgctactcaggctgccaaagctgcaggtcgcgataacggaaatatagaagatcaaattagagctattaatgaacttattaaagggcttgaaattctgactgtgttgaacccccctcaacctgaaaatcctccagcccctcatgtagcttatagaaatctaaaagcggatttagagatacttaaaggagagctttctcgctgcctaggtgagttttcaagatctgtgagtgccggagaatacttgattaaaactgctgaaccaaagcgtaaagaggaaactttcaactatctagttagcttcttgatgagctttgcaagtaggaccgctactcgggataggctgcatatttttacaacaaactatgaccgcattatcgaagtaggtgctgagcttgctggtttgagacttatagatcgctttgtaggaagcatcgctccagtgtttcgatcttcaagattggaggttgattatcactataatcctccaggaattcgtggcgaaccaagatatttagaaggagtagcgcgttttactaagcttcatggctcccttgattggcatgaacaaaatagcgcgattaggcgctttggtttaccttttggagcacgttctgttgaaccttttttagaagctgaaggccatcaaagcaacagctttgaacaactgatgatttaccctaactcagtaaaagacagagaaactgccgagtacccttatgttgagctatttcgagatctagccgcagcaactagccgtccaaatagcacattagtcacctatggctatagctttggtgatgagcatatcaacagggtaattgaagacatgcttacagtgccttcgactcatatagtcataatggccttcggagatccgcttggaagaatcataaatttcattagtaagagtggaagaaaagcacagatcaccctgttaatgggagaccatttaggagacctcaagactttagttgataactatttacctaaaccagctattgataaagcatcaataaaaatgactgaattgcttaagcaaagaggatttatccagtccaaagaattaggtaattcaactggctccgaggtatcacaatga

SEQ ID NO: 76400 - DNA, 885 bp, Citrobacter koseri
atggcgaaaagggagaactacaacgagctgtacctgtttatgcaggtggtgcgggaaggcagctttaccgcagcggctcagcggctgggtcttgctcagtcaggggtcagccgttccgttcgtgagcttgaagaaaggctgggcgtccagctgctggtgcgcaccacgcgtaaactgtcgctgacgcaggctggcgagcagctctaccagaagacggcatcgggatttgatacgttagatcgtgggcttgccacgctggcgcattatcgggagacgccctccggcacggtgcgtatcaatgccagccagcacgcgattgataaatgcctgctgccgaagctggcggtatttaaacagcgttatcctgatatccggcttgaactgatgaatgagagccggttcgtcgatatcatcgaggaaagattcgatgccggcgtccgcctggggcctgaagtcggccagggtatggtcgcggtacgcatcacgcccgatatggagatggcaattgtgggtactcccgaacattttcgtcgctatggttttccgcaaaccccagcagatttaaaggcgcatccctgtatcgcttatcagtttgccgacggcagcgtataccagtgggaactcaatcaggatgataaaaaaattacccatcggcctgaaggacaatgggccttatctgacagctacatggaagcagaagccgcccggctgggcctcggattggcttatgttcctgttgaactggtcgcggatgatttagaacacggtaagcttatcagggtgttgcagcgtaacagcctgcgaatggacgggctgtttctctattatcctcatcgcaacgtctcccccgccctgcggatggtcattgatacattgaaaatctga

SEQ ID NO: 76401 - DNA, 1059 bp, Citrobacter koseri
atgagttatgctgattcaaccaatccgaatgcccctgtgtccatgacagataaatgggataaaacgttcgctgaaagtcagaaagtcgaacatcgtaaagtctcgttcccgaaccgctatggcatcaccttagtgggcgatctttacctgcctaaagaccgtggcgatcgcaagctggcggcgattgcggtcagtgggccatttggcgcggtgaaagagcaatccagcggcctgtatgcgcagacgctggcggaacaagggtttgttaccctggcgttcgatccctcttacacgggggaaagcggcggctatccgcgaaacgtcgcctcaccggatatcaacactgaagatttcagcgcggcggtggatttcttagggctgcaaaaagaggtggatcgcaaccgtatcgggctgctcggtatttgtggctggggcggcatggcgctgaacgatgccgcgatggatacccgcgttaaagcggtggctaccagcgtgatgtacgacatgagccgggcgatgggccatggtgtgggggatggcaaagaccgttattccaccgccgaccgtcgtgctgttctgcaatatctgaatgaacagcgctggaaggatgcgcagagcggcacgttcgcacacggtgctcatgatattagtgtcgacagcaacggcaaggtcagcgcgggcgagcgcattctgccagaaacgctgccggcaaatccacatccggtactgaaagagttcttcgattactatcgcatgccgcgcggcttccacgaacgttccgttaactctaccggggcgtggacggcaacgatgccgctgtcatttatgaatatgccgctgctgagctacgccagtgaaatcactatcccgacgctgattgtgaccggtgagaaagcgcattcacgctattttgctgaagatgcttacaaggcagtcggcagtaaagacaaagagctggtggtggtaccaggggcaaatcacgtggacctgtacgataacgtggccggaaaaatacctttcgcgaaattcgaacaatttttccagaccaaactgaaataa

SEQ ID NO: 76402 - DNA, 1128 bp, Citrobacter koseri
atgaccctgtgcgtgtttgtgctgattgcttctgaatttatgcccgtcagcctgctcacgccgattgcccgcgatttaggcgtgacggaggggctggcagggcaggggattgctatatccggcgcgctggcggtcctgaccagcctgacgctttcaacgctagctggaaagatgaatcgtaagttcctgctgctggggatgacggttctgatggccgtgtcggggcttattattgcgctggcttccagttatctggtgtatatggtcggtcgtgcgatgattggtgtggccattggaggattctggtcgatgtctgcggcaacggcgattcgtctggtgccgcagcatcaggtcacacgtgcgctggcgattttcaacggcggtaatgcgctggcgacggtagtggccgcaccgctgggaagctatctgggtgccacggtcggatggcgaggcgctttcttgtgcctggtgcccatcgcggtggtcgcctttatctggcagtgcatcagcctgcccagtatggatgcgaataaaagccgcacgtcacctggcgatgtattccgcatacttagccgccgcgtggttgcggttggcatgctggcctgcggcctgtttttcatgggccagtttacgctatttacctatgtgcgcccgttcctggagaccgtgacgcgggttgattcctcaggcttgtcgttgattttgctgattatcggcgtagccggttttatcggcacgctggttgtttcgacattcctcaacagaaaattctaccctacgctgatggccatacctgggttgatggccgtcattgccatcggcctgatgctgaccgggcatcatgtctggacggtttcgctgctgttaggcctctggggcatgctggccaccgccgcgccaaccggatggtggacatggattgcacgtacgttgcctgacaacgctgaagccggaggcgggctcatggttgcggtgattcagctctccatcgcccttggatcaacggcaggaggcatcgtgtttgaccacctcggttggcagagcacgtttgctatgagtagcatgctgctcctttgctcgggcgtactgacctttttcaccgcccgccagaaggccggtgcgcgttaa

SEQ ID NO: 76403 - DNA, 501 bp, Citrobacter koseri
atgagcgcatttgataaagaaaaagatggtattcggcagacaagacataaaccggcggaattggatgccattgaccgaaaaatattaagtgccctcgcagaggacgcaggacgcagctacacggaattgagtgagattgtgaatttatcagccccggcggttcacgatcgcgtaaaacgactgaagcgtgacggggtgattaagggtaccgtggcggtcctggatggctgcaaactgggacggacgctgttaacgtttctggttatcgacaccagtagctatcaggcaacgcgcgcccttttgcagttcaccagccgcaaggaagtggaagagttacacaccgttgccggcgacggctgcgtctttatcaaagtacgcgccgccgataccgaatcgctggaaaatttcctgatggaaattcaaagtcttgaaggcgtacgctccgtccgcagctatattgcgctgtccacgtttctggagcgcggaccttcgccggattaa

SEQ ID NO: 76404 - DNA, 1173 bp, Citrobacter koseri
atgcctatcgcacttttcgccctcgccgtgggcgcatttggtatcggcctgactgaatttgtcatcgccgggatcctcccacaaatcgccgcagaatttagcgtcagtatcccgaaagcgggaatgatggcgacgtcatacgcgctgggcgtatttattggtgcaccgctgttaacgattattggcgcgaagatcccccgcaaggccatgctgatcgcgctggcgggtatttttacggtcggtaatatcattacggccgtcgcgccgacgatggcgatagcgattgtcggccgtattatcacctcatttaatcacggggccttttttggtatcggctcgattattgcggcatcgctggtggcgcccggacgtcaggcaagtgccattgcctttatgttttcggggctgacattagccaatctgcttggcgttccggcgggtacctggcttgcgcaaacctttagctggcggctggtattctggatcattgctggtatcggggtgctgacgatggcaagcatagccgtgctggttccgcatattgcgaaaggcaaagcgattgctttacgcaacgaactgagagcctttgttgacccgcaggtgctgctggtcatggggatcacgattttcggcccggccgcctttttcacctcgattacctacattgcgccaatgatggtgcaggaggccggtttctccgcaggcggcgtggcagggttaatggtgctgtttggtctgggacttgccgtcggtaactggattggtgggcgcttcgctgaccgctctctgtttggcacgctgttcgtcaccctcgcggctcaggggctggtgctgctggtcttctgggcgggtgttgaaagccagtgggttgccagcatctcagtcttcctgatggcggccttcggcttcgcgacggtctcaccgattcagaaactggtgatggagcgtgccagccatgcgggagccccgacaatggcggcctcggtcaatatcggcatgtttaatctgggaaatgctctgggggcatgggctggcggggtaaccattgctgcgggttttggactggcttctccgaactgggcgggcgcgattctgtccttcattgcgttgggcctggctgttcttgcgtggcaaagtgcgcgtaaagattatattttgccggtacttgaataa

SEQ ID NO: 76405 - DNA, 1065 bp, Citrobacter koseri
ttgaagacaatcttaaaaacgctggccatctgcgtgatggcgggtggcctgatggctcagtcggtatacgccgagccgctggtcattcaggaacagggaagcttttctgctggtggcactatcatcaccgcaccaggaacatttgatgcaaaaaagccgctggattcagctggccaaacctatcatggcgatcatgcctcagtgttctaccaaatcccggagaatccgcataaataccctatcgtcatgctgcacggcgcaggtcagttctcccgtacctgggaaagtaccccggatggtcgcgaagggttccagaacatcttcctgcgtcgcgggttctcaacttatcttgtcgatcagccgcgtcggggcagcgccggacgcacgactgtagaaggtacggttacgccaaaaccggatgagcagctgtggttcaaccagttccgcgttggcgtgtggcctgagtattttaaaggtgtccagttctctcacgacaaagaagccctgaaccagtatttccgtcagatgaccccgaacaccgggccgtttgatatcaatgtcatctccgatgcgatgtccgccgtcgtggataaatccggccccgctatcctcttcacccactctcagggcggtggaccaggctggtacacggcgatgaaaaacaacaaggtcaaagccattgtcgcctttgagcccggcagcagctttgtcttcccggaaaaagaactcccagcctctatgccaagcgcgttcgacacactgaagggtgagccagtgccgatagagcagtttatggctctgaccaaaatcccgattctgattatttacggcgataacataccggataaacctgtcgctatgcccgcgcaggacagctggcgcgtacgtctggcgatggctcgcgaatggcgtgatgtggtgaacaagcatggcggggatgtcactgtgacgcatctgccagaagtgggaatcaaagggaatacccacttcccgttctccgatctcaataatgtgcagattgctgacctggtgagtcagtttttgaaagagaaaaatctgcagtag

SEQ ID NO: 76406 - DNA, 585 bp, Citrobacter koseri
atggagcatgatcccaaccgcagaatgttaatcaccgcacttgccgggctgacgctggcgaacgtttcttttgcctcagctgcgaccggaaccgcaaacgtgcagggtaaaagccgtgttctggtggcgtacttttcccgcagcggaaatacacgggtgattgcgggcgtcattcaccgcagcctgaataccgatctgtttgaaatcgaaccggctacgccttatccggaagactattttcagaccgttgaacaggcgaaaaaagagcgtgagcgaggcgtaaaaccggcattaaaaaatagcgttgcagatatctcacgctacgagaccgtgtatttaggctttccgatctgggggaccagcgtgccgcctgtagtgcaagcatttctcagcagccacaaccttgcgggcaaattactcatcacctttattactcacggtggctacggtaaaggagacagcgacgacatccttgccagtctcgccccaactgcgcgtcgggaaaaaccgctggtcattgaatgcgaccaggagcgaagaaccactgaaacggtaacaagttggttagagacaatacgcagttaa

SEQ ID NO: 76407 - DNA, 762 bp, Citrobacter koseri
atgaacaataccacgcccattaaagcattagcggcagcggtactgctgacctttggttttggtctcgcggcacatgctgcgcccgtcaataaaggagcctcagaaatgaaccacgaacaaacggtttcagatacgctgtcagcccgccaacaggccatcccgttaattgcggcatcgatggccagtagtcagatgtataagctgaatgcagccctgaatcagggactggatgccggactcacgataaacgaaaccaaagagattctcgtccagctttatgcctatacgggcttcccccgtagcctgaatgcacttagtgaactaatgaaggtcgtcgaagcacgtaaacaacgtggtatcaaagatgttgagggtaaagaacccgctgccccaatccctgtcggggatgagcttcgccgtgtcggtaccgcaaaccagacaaaaatctcaggcgctcccgtgcagggcccgctatttgattttgccccggtcattaaccagttcctgcaaacgcaccttttcggcgacattttcgcccgtgataacctcgactggcaaagccgcgagctggcaacggttggcgcattagcggccacgccgggcgtcgaatcacaactgctgtcgcatacgcgagcaagcatgcgggtcggcctgacggcgtcgcagctgcgccagctggcacaggttctgcgtgaacatggcgaaagtgatgcagcaacgcgagctgaaaaggcgctacagcaggcgctcgcaaacaattag

SEQ ID NO: 76408 - DNA, 480 bp, Citrobacter koseri
atgatcggacatttacgttacctcgggctgttactgcccctcttcacattttcatcctgggcagcggaacaaaatcccgctgtccatatcgctccagcaggaagtcagaacgcggtgttcgggccagccgagaactttaccggtcgtgtcagggttgatcctctcttcaaaccggataacgacatcagtgtttccggggcttatgtcacgtttgaaccgggtgctcgttccgcctggcatacgcatccggcaggtcagcggctgattgtgacctcgggtgttgggctcacccaacaagaagggcagccggtgcaggtcatccgcgccggtgacgttgtctcttgcccggcgggcgtcaaacactggcacggggcggcccctggcagcgcgatgacgcatctggcgataaccggaattgtggatggcaaaagcgttaactggatggagaaagtgacagatgaacaataccacgcccattaa

SEQ ID NO: 76409 - DNA, 1458 bp, Citrobacter koseri
atgcttaagcgttccatctccgttcacctggcgctgatgtttgccttatccgcgctactgattgtttccgttatcggcatcctgctcagaagctccttgcatgactctttgcaaaagcagatgcacaacgagctgctgttccgcgaatcattaatgagtccgtggatcaccgcacgaacctctgctgacggctggtcactgcttgccaataaatttaccgtattaactaattctgaaggtgaacgcgttcgctactggatagtgagcgataacccacgctttagcatggggggaataccaccggtaggtgttcagtggtcttctttgcgggaaggctttaataaagtgcccggcgcatcagaaggtgcatgctcgctgtttttgttagtgaaaacgatccccgccaacggtgagcggcctgagctgcgctatgtggttgccatcgactccacgccgtatatgggcacactcgatgcgttcacgcggacattgctgatcattaccgcactgggcgtcgtgattgtcgccttactgggatacgtcgtgtcaaggatcggtcttcgtcccgttggggcgctcagtaaacaggctcggcaactcgctcccggggaccatggtcagcgcctgaataccgaagcattacctgacgaattacagcagttagcatcatcttttaatggcgtgctggaacggcaggaggtcgcctggcggcagctcgaaagctttaatgccgatgttgcgcatgaactccggactccgctgactaacctgatcggccagactcagctggggctttcgcgccgacgttcacatgatgaactggaagagttattgggttccaacctggaagaacttgagcgcatgacatcgatagttaacgatatgctgttcctgtcccatgcccatgcgggtgaacatgcgtcccagcttacccaggtgtccctgcgggaagaaaccctgaaaacagcggagtatgtggaaccctcttttgctgaaaaacagctctctctggatgttcagggcgacgtcaccgcggacatcgaccggcgattgttccaccgctcactggccaatttactggaaaatagcgcaagacattccccctccaacagcacggttacggtgcgcttaagcgaaaaaggccatcaggcctgggtagaagtttcaaaccctggagagccgatagcgccagagcacttacatcggcttttcgagcggttctatcgcgtcgacacctcccgagccagaagtgatacccatcatggactgggcctgtcgatcgtacgtgccgttgccattatgcaccggggagatgtctttgcgcgtagtgaaggtggcatcaatacatttggcctcacctttgcgatacaagcggataaagcggcgggcaatgctcaatccggcactgagccgggaccagggttaactgacagaattgtcaggggggcgtcagcctga

SEQ ID NO: 76410 - DNA, 681 bp, Citrobacter koseri
atgcgcctgttgttagtcgaagatgaagaaaaaacgtcaacctatctctcccgtgcgctgggtgagtccgggtttacggtagatgtctctgcagatggcgctgaaggtcttcattacgcgctggagttcgactacgacgcgctaatactggatgtgatgctgccggggatggatggctaccgggtactcgagggtgtgcgggcagtcaaacagaccccggtgctgatgctttctgcacggggatcggtcgacgagcgcgttaaaggactacgtcttggcgcggatgattatctgcccaagcccttttcgcttattgagctggtggcgcgtattcaggcactggtgcgtcgtcgctctacggatggcacagatatcacccagctgcaaattcacgatctgcatcttgacctgctggctcgccgggtatttcgcgccggaacgcgactagagctaaccgcgaaagagttttccctgctaagccttctggcccggcatcagggggagatcctgtcaaagatgatgattgcggaacagatatgggacatgaatttcgacagcgatgccaacgtggttgaagtggccattaaacgacttcgggccaaagtggatgcgccgttcgatatcaagctgttacataccgttcgtggcatggggtatgtcctcgaagtccggtccgaataa

SEQ ID NO: 76411 - DNA, 1167 bp, Citrobacter koseri
atgaaaagccagaatgccccaacaatgccagagcggcgcaagctattagtcgccggggccggtattgccgccgcctcgctgattccgcacgtatcagcggcgagccaatcctctcaggtcgattcatccagacaacccagccaacgcaatgctgctccgggcaagcgtaaactcgggaagctggaagtttctgccgtcggtctgggcgtgcagaacatgagtcgtaaatacgacacctccgttccctggcgtcccgagatgatcaatgttatccaccgggcatttgatgaaggggtaacgttctttgacgctgctgaagcctacggcccgtttgaagtcgaaaaaattctcggggaaggcgtcgccccgttcagggacaaaatcgttatcgccaccaagtttggctggaacattgaccaacagactggtaagcgtctgccgggccttaacagcaggccggagcatatccgacaggtcgtcgacaatatgctcaaacgcctgcgtaccgatcgtatcgatttactgtatcaacaccgggttgatccgcagatccctatcgaagatgtcgccggtgtggtgaaagatttaatggatcaaggaaaagtcctgcactgggggctgtctgaaatgggcatcaacacgttgagacgcgcccatgccgcattacccgttaccgccgtgcaaagtgagtactccatgctctggcgcggccctgaaaaacaggtacttccggtatgtgaagagctgggcattgggttcgtgccatggagtccactcggcgtgcagtttttaacgggctggattgatgagaacacccggttcgctgccggtgatatccgcgcgacagaaacgcgcttctcgcctgacaacctgccacataacttacagctggtggggctactgaaatcctgggcaataagaaaaaatgccgcgccagggcagattgcactggcatggctcctggcacttaaaccctggattgtccccatccctggcaccaccaataaagaccatatgctgcaaaacacggcggctaccggcgtgtcgctgacttccgctgagatgaccgagctcacccgctcactggatgccattcctatccagggtcaacgtctgccggatgctgtgcaggtttattccgatgttgaagcacccatgaaaagttaa

SEQ ID NO: 76412 - DNA, 1050 bp, Citrobacter koseri
atgaaattcacgcttatcagtgcaatgctactcacggcaatggctggagtgacctcagtcaatgcggctgattacaaaaaaaatccattcactctcgtctatgacggagccatcaccgagaacgtcaaaggtaaggtcaatattcacccagtgaaatacgatctgcatggcatccagattgctgcgaatgtctatacccctgctaactataatcccgccaaaaaataccctgcggtggtggttgcacatcctaatggtggcgtaaaagagcaggtcgccgggttgtatgcccagcgtctcgccgagcagggctacatcaccattaccgccgacgcggcttatcagggtgccagcggtgggatgcctcgcagcgtggataaacccgctaatcgcattgaggatatccacggcatggctgactacatcagccagtatcctggtgtagataccgcccgccttggtctgctgggtatttgcggaggcggcgggtattcacttgttgcggctgaaactgacaagcggttcaaatcgatagcaaccatcagcatgtttaattcaggccttgtgcgccgcaacggtatgcaggattcacagctggatactatccagcagcgtcttgagcaggcttctgacgctcgtgctcaggaagcagccggaggagaagtgctttactccggcgatgccaacctgactgatgaacagattgctaaattaccttttgccttgtatcgccagggctacgagtactactggaaaacccacgcgcacccgaactccacgtttaaatacaccaccagcagtcttctggatttgatgagctttgacgtaacggaccatatcaatctcatcaataaaccgctgctgatgattgccggtacaaaagcggatacgctctatatgactgaagacgcggtcgcgaaagccactggtacgaaggacaaagaacttttcctgatcgagggcgctacccatatcgagacgtactgggtgccaaaatacgttgaccaggcaatgcaaaagttagacgtcttcttcgataagaatatttag

SEQ ID NO: 76413 - DNA, 681 bp, Citrobacter koseri
atgagttcgcaagagccaacatttagtgaggtagtaaaaaacagatactcggcaagagcctatcttccatctcctatccccagagagatcctcaaagacattttgcttgaagcgcaatgcgcaccatccaactgcaatactcaaccctggtccctgcatattgttgcaggagataaacttcgtgaattaagccacgcactgacggaagatctgagggcggggaactacagtcttgattttacctttgataaagaagcttatcccgagccattcaggcaacgggcttcggagcaggggcgctcgtactatcaggcactgggcgttgcgcggggggataacttaagtcgctcagaagtggtcgagcgtaatgtgagatttttcggcgcgcctcatgttgctctgctgttcattcctgctgttggggacaacgttcgcgtagcctctgacgccagtatgtatgcgcagacattcctgctttccctggcagctcgcggttacgcaggcgttccacaggcagtgctgagttattttgcccaaacggtgcgtcgaatattaaatgttcctgagggtttcaggctgctttacggtatttcttttgggatcccagataaaacgcatccctccctgagttacagggaagggcgggtatctctggacgaaagtgtcgtctggcatcaataa

SEQ ID NO: 76414 - DNA, 1203 bp, Citrobacter koseri
atgcttaatcaacagtcacaaacacagtcggctacagctaaaaaaaccggtctctcgtttctactcattctcagcgccctgatggctgtaacctctttatcaaccgacatctatcttccggctatgccggtcatggcaaaagacttacagggtgatgctgagctgacaatcacagggtttcttatcggcttttgcatcgcacaactgatatggggaccgattagcgatcgttatgggcgtcgactgccgctgtttatcggtttaggtctattcatcgtcggctcggtggggtgcgcgttatcaacggatatcgtgcaagttgtcttctggcgtgtttttcaggcgttaggcgcctgtaccgggccgatgctggctcgagcgatgatccgtgacctgtttagccgtactcgtgctgcacaaatgctttcgacactgatgataatcatggccatcgcgccgattgccgggcccctgatcggcgggcagatgattaaagtcacctcgtggcatgccatcttctggctgctggcgattatcggagcgttaatgctgatgtctttattctggttacccgaaacattacctgctgaaaaacgctcacaagcctccgtaaccagagcttttcacaactactatgccttgctaaccaacgctaaatacatgcggtttacgctatgcctgacgttctactacgttgcagcctacgcctttatcaccggttccccgtttgtgtacatcacttacttcggtgttgacccgcagcattacggttggctgtttgcagtaaacattgttggtctgatggcggtgagcatggtcaacagacgtctggttcaccgctatccactggaagcgctgctcaggaatgccgtattcatcgccgctattgcggcaatagtgctggcggtcatgaccggcctgggcgtaggtggaattaccgtgattgtcggcgctgtgttcgtattcttctctatgaatggcatcatcgcggcgacatccacggcttgcgctctggacgcagtgcctaatgtggctggctccgcgtcggcgctaatgggcgcgttacaatacggcagcggcatcatctcttcactgcttcttgccttgttcagtgatggcacaccctggacgatgggctggataattgcgttgtttacagcagccagcgccctgatggcactgaccgttcagataaaaaaataa

SEQ ID NO: 76415 - DNA, 207 bp, Citrobacter koseri
atgtatgcaaagcccacattgcttgaagatcaatttattgatatgaaattcattacccaacttactggcctgagcgacaaatggttttacaagctgatacaggatggcttattcccgaagccaattaagctaggcagagcttcccgttggttaaaaagcgatcttgaggagtggttgtattatcgcatttgcgaatccagaacataa

SEQ ID NO: 76416 - DNA, 579 bp, Citrobacter koseri
atgaaagaaccctacaatgccaaccctaattaccctatgcatcgtattcttctcgaagatataaaccaccatctggatgaaatgtttgagcgttattcccgcttactggcttttcgtatggattttggctggaaacaaggaagtgaacgctcgcagcgtaatctcatggatgagatggagggcgagatacagcatctgatggatgtggtatttggtcgaaaaatggttattgggtactgctgggtaattgaatacaggcgacgtaaggggctgcatgtgcatgccatgatttatcttgatgggcaaaagcatcggaaatgttatccgacctcgcgtgcgataggggaagaatggcgcagcttaacagacgatgaaggactctttcatctgtgttccaggaaaaagcatttcgttgcaagctccggaacaatagtggatcaccgcaatcggcaagcagttgatgaactacgttacgtcatcagttacttagccaaatctgagcagaagtcaaaaggggttgttgcaggtatgaacgttatacctccccgcagccgtagaggcaggcccaggaaggaatag

SEQ ID NO: 76417 - DNA, 753 bp, Citrobacter koseri
atgataaagagaataacatttaacaccgatgataatttaacgattgattcaatcgacaggtatgccgaagtgaatggtacgtcacgttctaaagtgatatgtgagttattacggtccactgcgcctattcttgattttgtgacatatcaaaatagaattacgcaggaagttgaaagtaggctttttagcatgttttatcatgaggttcgtcacttcgaaactcaaagtgcaaaggacgacattacattgaagcacttgcatttactttcaaagaaactcgtttttagtgtttctccaaaacctgtcatggagttttcactgcctcctcgtcaagagtgggaagggtatcgaaaggagttttgtcaaaaagtaaacggccatattgaattgtttgagccagaatcaaaaggagatgttcgatatgtgtatttatgcgtcgaaaatgatcttggaagggtgtttaaaaatgaattaatacagattgaaattcccaaatttatagttgatggttacttatttgatctgcactccttgtgctatgtgaggcttgttgatttctgcaatgacgggatttcggaatatatgaagaaaaagaagaaacacttaagtgcagcatatctttcttgggttcctgctgtgaagtttagagatggttatatatttattgctgctctacaaataaataaagcttcgacagagcagttatatccatctgagtcaatagttaactatccttacgattattggaagtga

SEQ ID NO: 76418 - DNA, 864 bp, Citrobacter koseri
atgaataatgctcagggcttacagccattaaaccattcgctttccggcctgccgcagtgggtgtctgaacgtatattgcagcagataaatcagttaacccactacgagccagtgatcggcattatgggtaaaaccggggtgggaaagagcagtctttgcaatgttctgtttgtcggcgaagtatcgccggtcagcgatgtggcagcctgtacccgtgaacctttgcgatttcgcctgcaggtcggagagcgctatatgacgttggtggatctgcccggcgtgggggagagtggtgtacgtgataacgaatatactgtgctctatcgagatcagcttccccggctcgacctggtgctgtggctgattaaagctgatgaccgtgcgctggcggtggatgagtatttttaccgacaggtgattggtgaggcataccgacataaggtgctgtttgttatcagccagtcggacaaggccgagcccacaagcggtggagaaagattgtctacagagcaaaaacaaaacatcagccgtaaaatttgcctactgcatgagatttttcagcctgtgcatccggtgtgtgccgtgtcggtccgtcttcaatggggattgcggatgatggctgagaggatgattaagtgtttgccacgtgaggtcagtagcccggtggtagcgcaactgcagcatccctttcgcacaacggtagtccgggaacaggcccgtgatgatttcggtgaaaccgtaggtgccatactcgatacggtaagcacctttccccttattcccgccccggtgcggaccattattcaggccgtgcgttcctcggtggtgtcagtggcccgcgctgtctgggatttcttcttctaa

SEQ ID NO: 76419 - DNA, 822 bp, Citrobacter koseri
atgacccgtctggcttcgcgctttggcgcatcaaacctaattcgtcgtgaccgtccattaacccgagaggaattgtttcgtgtggtgcccagcgtattcagcgaggacaaacacgaatcccgcagtgaacgttatacctatattccgactatatctctgttggacagtctacagcgggaaggcttccagccattctttgcctgtcagacccgggtacgtgatcctggccgtcgtgaacatacgaagcatatgctgcgtctgcgtagggaggggcagattaccggtaagcaggcgccggaaattatcctgctcaactcccatgatggtaccagctcgtaccagatgttgccgggcttgttcagggctgtgtgtcagaacggcctcgtctgtggtgagtcgtttggcgaggtacgggtgccacacaagggggacgtggtgagtcaggttattgagggggcgtatgaagtgctggggatttttgaccgtgtggaagaaaagcgggatgccatgcagtcattgctgttgcctcaacctgcgcagcaggcactggcaaaagccgcgctaacgtatcgctttggtgaggatcaccagccggttactgaatcgcagatactctccccgcgccgctggcaggatgagagcaatgacctttggaccacctatcagcggattcaggaaaacctgattaagggcggactcagcgggcgtaatgctaaaggcggacggacgcatacccgtgccgtgcgtggcattgacggggacgtgaagcttaaccgtgcgctgtgggtgatggcagaaacactgctcacgcaactgcagtag

SEQ ID NO: 76420 - DNA, 702 bp, Citrobacter koseri
atgacacaggcagaacgccgccatgaccggctggctgtcaggctgtcactgataatcagccgtctggtggcgggtgaaacgttgagcgtgcgcaaactggccgctgagtttggcgtgtcagtgcgcacgctgcggcgtgattttcgtgagcgactgatgtatctggatctggagtatcagtccggatactgccgcttacgcactgctggcagtgaaatgcagatggtgcccgacgtgcttatctttgcccaccgcagcgggctggccggactttttcccggccttgaccgccgtctggtgaacgctctgctgatgtgcgatgagtctccctgcgtgatagcaccagccaatccggttccttcgccttcaggagcattgtctttctggagactgattcaggccattaccgggcgcaggcgggtgacgctgattgcggaggggcgacgctgtgagcgcctggctccctgccggttactcatccaccagcagacctggtatctggtggctgaacacgaagggcatatcgccgtattcacacttgatgaaatccatctgattcagcctttgcaggagacttttcgccgcaatgacagtctgtgtcgcctggttgaagacccggtcttcattcaggccttaccccattttcgctttatccagcagtcactgcttacgtttgttccggctgacagcccaccggaatag

SEQ ID NO: 76421 - DNA, 237 bp, Citrobacter koseri
gtgcccgttattgccattatcgccattgttatcatcgtcatcattctgaacaaaaccggagtgtccgacagcctcacggccctgacacttgcaaccgttgccgcactactgacgggaggtggcgcagccggtgctgccagtgtcgcgctgacgccgttcgtcggcgtgccggtgggtatttttgtggggatttatgtctttgccaaagtggttcgtctgatttcagggaaaaaataa

SEQ ID NO: 76422 - DNA, 441 bp, Citrobacter koseri
atgaaacgtaaaacactacttctgctggcgctggttgccacctctctgtttctgagcgcctgcgatgacaggagtgatgacctcaaagctatcagtaaatttaaggacctcacgcctccgcgcttcagcgatgtggtcagccgtcaggatgatgtcagggaagaatggtcgcagattgctctttctggccccactctgcaggtcttacgtacccgccagtcgcccgatggttgtgagggtggcagttattactatctggtggatatggaggaaaaaaccgtccagccgctgatgaatgcgctatgtattgccgacaacatcagcctggaatactacgagaaaactgacccgcgcacccgggagcgtttccttgaatattcccatgacggcaaactgatgggacggctgctgataccctcaaatcctgataaccgggaataa

SEQ ID NO: 76423 - DNA, 465 bp, Citrobacter koseri
atgaaagtacattcactaagccggtatgtgctctcaggcgtgctgcttaccagctttaatgcctcagcggttcccggactatggcagcagggttatggccagggcaatgcggaatacagcgtgacggatgcaagtgggaaaatgtttaccatcaactgtacggaaaatccggaccagaacggtatttaccagcactcggtttttctgaccctcgcaggggataaaacgatcagctcgcatgatgacaggaccgacatcacagtggtgatggaccataagcaatatgccattccttcaacccttggctggcgtaacggggataatgcctggtttagtttcattatggatatccgtaaggccaggcagttcgacgtctacgtcagtgaccgcaaagcggggaccttcagcgttgacctgacgaacgctacgaaggctctgccaacattagtagactgcactaactag

SEQ ID NO: 76424 - DNA, 189 bp, Citrobacter koseri
atggataaaatttgtgataactgtgcacacatgatgagtgcatgcacctgtggaacttgtgagaactgtgacgagaaagagtcggattgtacctgcaaaaaatgtagccagtgtaataatcttgaggacttctgctcttgcagagtttgtgaagaatgtagtgaaaaagaagcagagtgctgctgttaa

SEQ ID NO: 76425 - DNA, 798 bp, Citrobacter koseri
gtgtctaactggagagattcaaatttttttatagtaacgtcgtcttgtgtggctggttttttggctgccgcaactattacttttacatatgttatccctctgtatcagaaacaagatgagaatacaattagtgaattaaacgcaaaaataaatgagcaaaataaatttcacaagaaggagattgattcactaaaaaatacaattgataagcaacaaaagaaatttagtgccttacaattaaacaatgagagtcttgctgctgaaaataatgattataaaaatcggttattaacactttcaaccttatccacttttcaatatgggcagccactacctatgggcttctcaagtattttgccagggatgagacttagtgatgtcgcaaagaaatataataaggacatgctagatattgaccctcaaggtaatgttattacagttaaagttaaagctggtggcattgaagatattatatactctacaggattagatgacttccctgatattataacatctatactggtaagcaaatatagcatagaaaattcatataatggtgagcgtgtagatggggatgaaaataaacagtcattattgattttattacaggaggttttagggcaaacagaagaatgtagtgctggagagtatttttggcaaattggtgattatcgatatgtatattacaatgctaaaataccatatttttatcatatattctttggcggtgtatatgcaccgggtacgtcatcaaaatgtttgaaattgattaattcattatttatcaaagataaataa

SEQ ID NO: 76426 - DNA, 243 bp, Citrobacter koseri
atgaacaattctgaaggtttgaagtcgtttcaccaatcgctttatgacctatttcagtgggtatcggctgattgcgcagcaggggcactggtacctgcaggtatcaccggcattaacattgaagacgaccagggcagccacgtccgcctgatagtttgcgatggcgaaggtcggatggttggcgggcatggaactttgaaccggatgccagtgatgatcttaaccgctatatccgcaaactag

SEQ ID NO: 76427 - DNA, 459 bp, Citrobacter koseri
atgacaacagcggcacaaaataatcttgcatctgctaacgagtccgaatttgaactgaccgtaacgaaggtacctaacgaacagcgtctcgatttctggccacaacactttggcactatcccgcagtggatcacgctggaactccgtattttcacctggatggaccgcttctgtgatgagtacaacggtggtatctggtccttttacacgctcagcaatggcggcgcgtttatggctcccgatgctgacagttacgataaatggcatctgctcaacagcatgaacggcaacgatgcagatatgagcgcggaagccgcaggtatcgctgtctgcctgattgaatacagccatcacgcctgtcgcaccgaatgcgatgccatgactgagcactattactgtctgcgggattacgccctgcagcaccctgaatccagcgccattctgagcattattgattga

SEQ ID NO: 76428 - DNA, 483 bp, Citrobacter koseri
atgatggaacagtcacttaccccactggcttcggtactcccactagccgcgcaacgcacggtaaaacgcgccttaacgctgcttgaccgccacctgcgtgaaacaggcgtggcattcacctccactcaggctgcccgtgactggctgaaactgaaaatggcgggactggagcgtgaagagtttatggtgttgtatctgaaccagcagaaccagttgattgcccacgaaaccctgtttgccggttctattagtagcaccgaggtacatccccgtgaggtggtcaaacgcgccctgtacttcaatgcagcagcagtgatactggcgcataaccatccctccggtgacatcacacccagccaagctgataagaccatcacacagcgtctggtgcaggcgcttcagctcgttgatatccgtgtgcctgatcatctcatcgtcggtggcacgcagatattgtctttcgccgaacacggtctgctttga

SEQ ID NO: 76429 - DNA, 222 bp, Citrobacter koseri
atgaaaattatcagtaaacgccgggcgatgacgatttaccgtcagcatccggcttcccgcatttttcgctactgcaccggcagataccagtggcacggcagtgtctgtcattacaccggtcttgtagttcctgacattcccggtgtgctggcgatatacgccgaacgccgccaggaccgcaacgggccttatgcctgtctgatgactatcaccctgaactga

SEQ ID NO: 76430 - DNA, 318 bp, Citrobacter koseri
atgaaaaacaccacatggggcctacagcgggatatcacgccgcgcctgggagcacgtctgatgcaggagggcaaccggctgcactatctggctgaccgggcaagtatcaccggtaagtttagtgataccgaatgcctgaagttggatttcgcattcccgcattttatcagtcagatggaatcaatgctgactactggtgaaatgaaccctcgccatgcccactgtgtcaccctgtaccacaacggttttacctgcgaagccgatactcttggtagttgcggctacgtatatatcgctgtttatcccactcaacgctaa

SEQ ID NO: 76431 - DNA, 366 bp, Citrobacter koseri
atgaaaactctacctgctacaatttcgcgggcggcgaagccctgtctgtctccagtggctgtctggcaaatgttactggcacgcctgctggaaaaacactatggtctgaccctgaacgatacgccgttctttgatgaatccgttatacaggaacatatcgatgccggtatcactctggctaatgccgttaactttctggtagaaaagtatgagttagtacgtatcaatcgcacaggatttacctcacaggaacaagcgccatatttgaccgtgacagatatccttcatgccaggagagcatgcggattaatgaacagttgttcgtatcgtgaagtaagtaatattgttcttagccgatcgcggtag

SEQ ID NO: 76432 - DNA, 1590 bp, Citrobacter koseri
atgaacttaacgcaaatttttcgaggcttaattcgtcgtttcactccccgccagtttggtctgttaacgggaatattttgcattatcgcgctgttttctattttgcaggttgcgtcatccctgatgctgtcgttttccgtgcgagacgctcagcgcaacgaacaacgtaaccagcaggcactgctgcaacaaacgaaggtggatgaggcgagggtagcgctgttgtccgcaagcgatctgctgaaccgggcgggcgtttactttatgcaggatgccgcaacgggatcagaaggcagctggcgcccgttgatggatgaagctcagcaggcgctggtacagtcaaaaacggcctgggatgcctggcttgcaatggcccctcataaagacgacggcctgattgagagttatcagcgtttttatagcggtattcaggaacaggcggatggtctgagccagactaacgccatcgacgcgttctttgctgttcctgttcaggcgtttcagacagatttcaatgaaaattatgctcgctttcagcaagagagcgggcgtcagacagagggtggcaggcagcagctgattgccagcctggaagggttgcagcacctctttttgttcatcccgtttgtgctggtggtgattgccctgctggtctggagcggcatgtctcgctgggttatttctccgctgcgccgcctgatcgcccatattaatattctggccgcaggcgatctgtccgaaccgatgccgaaggtgagcgggtttaaccgcgaggtcgcgcaactcagttcacgcattgatgcgatgcaacaggggctgaggcaactggtgcagcaggtgagcgatgccaccaccgcaatggtcggcaacatcgatcagcttgcgcagagcaacaaacagctttatcagcaatcggcgaaacagagcgaagagttaagtagtgtcacctcgcatatctcgtttctggaaacgcatgttgaggacaatagcggctttgccagactggctaatcaacgtgcagccgaggcgcgtcaggtagcggctggcggcgatcgtatgatggaaactgttaaccgttcgatgcaggcgattgttgagcgatcgtcagaaatgcgcggaatcatctctctgattgacagcgtcgcgttccagaccaatatcctggcgctgaacgcggctatcgaagcggcccatgccggagaacaaggtcgcggatttgccgtggtggcaaaagaagtggggctgctggcccgtaaaagcagtcagtccacgcagaacatacaggaacttatccaccactccttgcagggaatcgaggagggttcacatgcggttaaccgactggaagaaaatttacagcaggtgatttcgttagtagacaatctgggcatactgttgaatgacatctctggcgccacgttaagccagggagacagcatccaccagatgacgggacagctacaggcgcttaaccgtgcggcgcaagagaccagcagcctggtgaatactgcatcggcgtcatcgctgcaactgcatcatgaatctcatcagcttctgaacgcggtggcgcgatttcgtctttctgcctga

SEQ ID NO: 76433 - DNA, 153 bp, Citrobacter koseri
atgtttaacggaaatgacgatgagcaaagtctatactggcggctgtctgtgcggttttatccgtttttcggcggtagcgccgaaaaatccacatacctgttcctgctcgatttgccaaaaacatacaggtgcatattcggtcagttgggttga

SEQ ID NO: 76434 - DNA, 723 bp, Citrobacter koseri
gtgtctattacaatacgtaagccgtccagtgtgtttatcgaccatgatacctttgttaaacaaggtttttactcaaggctgaataaaagtgttgaattcagggataaagaagatgaattatctttaatgtttaaagataattgttttgaacgatttgtccctgaatgtctggttaagggtaaaacgatggtattttgtgccggaacgggggcgggtaaaaccacctttgcaaatgcctgtcttcagtacataccccatcatttacgatgtatttcaattgaagatacagatgaagcaaaattcaggtttcacaaaaatcatgtgaaactgtattacccgtcagaaggggaaagtagcactgtcagctccgcttctcttttacgttctggttttcgtatgaacccggacagaatcctcatgactgaggttcgcggcgcggaagcctgggattttctcaaaggctcaagttccggccatgcagggaaccttacaaccgttcatgagagcacccctgaagatgctgtgcttggactggttcaacggtgttatatgaaccctgaatgtcagaatttgccctacaacattatattgcggagggtgttaagcaacgttgatgtgattatgagtattaagtacatcgatgaggaagataaccgatttgcatcgggcatttattatcgtgatattcattttcaggaatactttgaaaaactgaaggagtga

SEQ ID NO: 76435 - DNA, 1836 bp, Citrobacter koseri
atgtctctaaaactacccgataaaggccagtgggcttttatcggtctggttatgtgtcttgtgacgtattatactggctcagttgctgtttacttcctgaacggaaaaacgccgctttatatatggaagaattttgattccatgctcctgtggcgaataataactgagagcaatatacggacggatatcaggttaaccgcaatcccctctcttttatcaggtatggtttcatctctcattgtgcctgcttttattatctggcaactgaataaaacggatgtcgctctttatggtgacgcgaagtttgccagtgataatgatttaagaaaatcgaaacttctgaaatgggagaaagaaaacgatacagatattcttgtcggggcgtataaaggtaagtacctgtggtataccgcaccagattttgtatcacttggtgcaggaacccgagcaggtaaaggggctgcaatcggtattccaaacctgctggtcaggaaacattccctgattgcattagatccaaaacaggaactgtggaaaatcaccagtaaggtacgtgaaaaactgctgggtaataaagtctttcttcttgaccctttcaacagtaaaacgcatcagtttaacccgcttttctatattgatttaaaagcagagagcggggctaaagacctgctgaagctgattgagatcctgttcccgtcttacggtctgaccggagcggaagcacactttaataacctcgcggggcagtactggacggggctggcaaaactgcttcatttctttattaactacgacccatcctggcttagtgaattcgggcttaaacctgttttctcaattggttctgtagtcgatttgtacagcaacattgaccgggaactgatactcagtaagcgagaagacctggagggaacgaaaggacttgatgaaaacgcactgtatcatctgcgcgatgcactgaccaaaatcagggagtatcacgaaaccgaggacgaacagcgttcgagtattgatggttcgtttcgtaagaaaatgagtctgttttatcttccgactgtccgtaaatgcacagacggaaatgattttgaccttcgccagttgcgccgggaagatatcactgtttatgttggcgttaatgctgaagatatgtccctggcctatgacttcctcaatctgttctttaacttcgttgtggaagtcacgttacgtgaaaaccctgactttgacccgaccctgaaacatgactgtctgatgttcctggatgagtttccgtctattggttacatgccaatcattaaaaaaggttcgggttatattgccgggtttaaactcaaacttctgacgatttaccagaatatcagtcagcttaatgaaatctatggtgttgaaggtgccaaaacgctgatgagtgcgcatccctgccggattatatacgctgtcagtgaagaagatgacgctaaaaagatttcggaaaagctgggctatatcaccaccaaatcgacaggatcaagtaagacaagcggacgctcgacgtcgaaaagcagttcagaaagtgaggcgcagcgcgcccttgtgctcccgcaggagctgggaacgctggattttaaagaagaatttatcattcttaaaggtgaaaacccggttaaagctgagaaagccctctacttcctcgacccgtattttatggacaggctgatgatggtaagccctaaacttaccgagttaaccgcctctctgaataagactaaaaaagtattgggtgttaaagggcttaaatatccttctaaagaaaaaatgctctccgtcggtgagctggagtcagaggttttactatga

SEQ ID NO: 76436 - DNA, 393 bp, Citrobacter koseri
atgaaaaaaatgttaatggtcagtgtcctttttctctctgcctgttcctctccgccagaaccgccacaggttgactggaaacagaatcccgaaacggtaaatacacaactaatggactggcaaccgacatattcagtcattaaatcagacaaggttaaatcatcatgggttaaagttatccatgatttcagacctgaaaaccgtctttacgatgatgctgttttttattccgttgctcattctgattcagtgattgttgaaaccagtaacggaacagactttttcacagctaaaaactggttgagggcgaacggtgcaaacggtgtcatacagtatcgttataaaacgaactgtctttcttgccggactaccagtgtttacttatcccgataa

SEQ ID NO: 76437 - DNA, 315 bp, Citrobacter koseri
atgaagaagaccgtaatcacggcagtgctgctttgtgcgttcgctgccggaactgctcatgctgaagaaaaagccgacccgaacgatccatgtgccatggtgttatgccttgccggaaaacttgacggcagcagtccggcggagtgtgacccgatgtataaaagttttatgtcaatcaggaaaaagaataaacatggttttttacccaatcacacggctgatgccagaaagaaaaaactaaatgaatgtcctgcggctgatgcaggtacagtaaataaaattatttcaagctttggtcggctgaaaagcttttaa

SEQ ID NO: 76438 - DNA, 324 bp, Citrobacter koseri
atgaaaggaattaatgaacctgatacaagcattgtaagaatcgccgggattgaaattattaatagtgtcaaggcggtcgcttcagtttttactgaaatcctgatgtttatggtctggtttccgactgttgtgtatggggggtatcgtgttgtcatcgttttatgggatgattcattaaaaccgcagtcactcatgggatttattgatttcataatggagttatacagttttgtaattccttcgctggcgattatagcagtggctttgatcgttgttttgttttcgtttaaagcgttttctaaggtctggagaaaatcatgttaa

SEQ ID NO: 76439 - DNA, 417 bp, Citrobacter koseri
atgttaaaagaattaagtggtgtaggttataccttctggagagcagctttttttagtctggtcaaagcacccgcaatagcattgtttattggttttgtctttctgtctttcaataactccattgcggatacgttcctgacttctgccagagaacttaccgggaatgttccatcggataaggttcagatctgcgtatttaaaagaaataaacaggaacagtcaccttatgtacagaaagaaccatgtgtgaatacgctggctgatgcgaaggactggactcagtcgtttgaccgaaccattcgtagaatttactggactattgccctgctgggtttttttacctggtttttctttgatggtatggctgctcagttgatgctgaaaattggtgatatgtgggagagaaggaaaaaatga

SEQ ID NO: 76440 - DNA, 474 bp, Citrobacter koseri
atgaagcatttccttcatattatttatctttttgctgtgattcttccagctacattgtgtgctgctcagcttcagggcatggttattcgtgtacttgatggtgacaccattgaagtattgcaggagcgacaacctgtcagggttcgtctcctgaatatcgatgccccggaaaagaaacaaccctttggacgctggtcaacaaatcaacttaaatccctgctcgcaggacaatccgttaccgtctcttatacgcaaacagatcgctacgggcgagtcctgggacgagtggtgacagcgaacggtactgaggctaaccgccagcaagtgctaaaaggggctgcatgggtatatgacaggtacaacacggataactcattaccggctctgcaacaggaagcacagacacagaagcgcggcctgtgggctgatcctaatcctgttcccccgtgggagtggcggcataaacagaactga

SEQ ID NO: 76441 - DNA, 1263 bp, Citrobacter koseri
atgggaaaattaaccctggtagagcaggctttacggctccataaagaatattatggtgaagataatttcggcactgtcgtaaaagattgtgattattatcctaaagtagctgagatttttataaacaggaaaaatcgtaagatttattcaaacctggatattgaacctgttgcctcaactgttgttcatacgggaagtaatcctgttatggctaaagccgggagaattaaaaagcttatgtttaaagatggttcgggagcataccggattcatcttggtcaaaatgaagtggttcatattattcgcttcatccttaactctaaagtcagaatggagtacgcagttggcacaaccaaaagtatgtcgatgctccataatctttgcgaagccggacgcgctaaattaaaccgctctttaccccgtaaaggaatctggaaaatcgggtgctacgacggtgtttattatcatggtaaggcaaggaaggaagaaatagaaaacgctttacgtttttctgttcatccaaagtttaatgagctggagaatgattttaatcagttcttttcggatattgatttctacacccggtatggtcagtcaggaatgcgaaaagtgctttttactggtcctccgggtacagggaaaacgactattgcaaaagctttgggggcaaagtatcaggataaatatgtatttgtttatgctgatgattactttaaagatgtttgctatgccgcagctcaaaagaaaatacccgttatcataatagctgaagaggttgatgaactttatcgggctgatgccgggacgttaagttttcttgatggagctgatacaccgcgaaatcttgccggaacatatgttattttttcaacgaactatcctaacaggattgatccgcgcatcagaaaacgccctggcagaattgacagaatcatatctgtaggcgcttttcggactaaagccgctgccgcttgtgccaaaatgtacttaccagacgatataaatattgaccttaaagaacttggcgcggtgttggacagaacgactcctgctgaaataaaggagataataaatattgctattggcatgattcgcggaacaaaaaacgaattaacagtcgatgtaatcaagaatgctcgtgcctttttgaaaggcacccttgaccttagtgtgcaggaggcagaggaagacatcgaggaaagggaagaaatatttaaaaagaatggtgcgcagcctgactattcaagttaccttgaggattga

SEQ ID NO: 76442 - DNA, 2328 bp, Citrobacter koseri
atgagactttttattgcagaaaaaccctctctggcgaaagcgatttttgaagggctgggtggtaacccaaataccgaaaagaaaaacggctattttgaacatggctctgatgtcgttacctggtgttatggtcatatgctggagctttacgacccggaggattatgacgaaaaatattccaggtggagctttggtgatttaccgattaaatcggtttacccgcctcagtataaaatcaagccagaatccgaagcacagacccgcatcattttgtctcttatcgataaagccgacagtatcgttcattctggcgaccccgatgatgaaggatgtttgctggtcgatgagattttaggttatgccggaaacaagaaacccgtccagcggctgcttgttgccgacctcaaccttgcgccagtgcaaaaatcgctggcgaatttacagcctaacgataaatttcgcggtatgacgttaagcgccctggcgcgttccctgtgcgatcagggttttgggtataacatgacgcggggatgtacattaaaaggccgtgagcagggctatgacggcgttctgaacgttggccgggtacaaagtgccgttcttggcctggtgaacatgcgcacgctggcgaaccagaaccacacagaaagtttttattacgatgtattcgccagtctgtcgatgaacgggcatcagattaaggcgaaatatcagacaacagacgacgatcagacagacgagaaaaaacgtctgatctccgaagctcaggccgcgcatattgccgggcgggtcacgggtaaggatgctattgttactatcgcgacgacaaagccggaaaacacgaaaccaccgctgccgcttaacctttccacgctacagcagctatgcgcaaagcgatttggttattctgcaaaagatacgctcgatgtgatgcaggggttgtatgaaactcacaagcttctgacctatccacgttctgacaatcgctatctttcagatgagcattattaccaggccggagagattgctgccgcgatagcggccaccgtacccgaactggcgtctgcgatcgcagatatggataaaggccagaagcacaaagcctttaatgccagtaagattgaggcgcaccacgccatcataccgactacaaaaagcggagccggtattcagcttaatgaaaaagagcggaacgtttataacctggtgtccgtctactttatcgggctgttctacccggatgcgatccgcaacaagacgaaaatccactttgatattaagggggatacctttacggccacacagagcgttctggtacaaaagggctgggaagcgctgggtaaggataatgatgatgaggaagaaactgaagatgccggaacggacggttttgacctttcatcgctgaaatttaatgacagcggcctgtgtgaatcggcagacgtggacaagaaaaagactacaccacctcgctatttcacagagtcaacgttactggccgccatgacgagtgcggcaaaattcattgatgatccggctctcagaaaggcgctggaagcgaaagacgagggcagcagtgatcgtggcagtatcggaacggaagccacccgtgcgggcattcttgagaaactggcggcaaataccgggcttatctccatcgaaaaagaaaaggggtattcggagctggtatggaaaaccacaaaacaaggccaggagttttgcgctgcactgcctcctgaaatcactaaaccggatatctccgctctgtgggctgaaaagcagtctcagatcaaagccggagagctgacggttgaggagtttattaaggaaaatgatgaatatgtccaggggttaatcgacgagctggacaggaacggaatttcgatttcttcaaatgccacgccctgcccgatctgtaacaacggtttcctgcgtaaacgtaaggggcaaaatggctttttctggggatgctcctgctatcctgaatgcaagacaacattcccggacaaagacggcaagccggatatggaagcaaaatccagatcagaaggttccatgtcccggctcgaagccccctgcccttcatgcagtaaagaaattattatccggcctaaaggctttttctgttccgggtgcgagtttaaaatctggtctgaagtgtcaggaaaaaaactgacacaaaatcaggttgaaacattaatcaaaaaaggtaaaaccggagagattaaaggctttaccagtaataaaaccgggaaaaagtttgacgctgcaattgttttgcaggataaagctacgggtaaacttgggtttcagttcagtaaaaaataa

SEQ ID NO: 76443 - DNA, 456 bp, Citrobacter koseri
atgagtgaaaatgaaacgtttgacgcaacaaaaaagctactcctgaatattcgctctgttcgtgtttttgcgcgagaaaccagctttgatcaactgctggaaatgcaggaaaagcttaatgccgtgatcgaagaacgccgtgaagaagcagagcgtgaggcagcagaacgcgcagaacgcgaaagaaagcgtcaggaactgctccagctgatcgccggagaaggtttttcaccggaagaactgcttggcctgtccgaagatacgccaaaaacacggaaaaagacgttgccaaaagcgccgcctaaatatcagtttgatgaaaacggcgaaacgaaatactggtctggccgtggccggacaccaaaaccaatcgacgaagcattaaaagctggccgttctcttgatgagtttctcatcaaaaaagacgcttccagctctgttggtgacgaacagtaa

SEQ ID NO: 76444 - DNA, 651 bp, Citrobacter koseri
atggatatcaaacctaactcagtgatccacctggagccgggcgatacattacccggccataccaatctgaaacccgtacctgataagtatctcgatgagttaaaggcactcataaataaactcaatactcaatcaggtaatatttacctcaagttaaaacagatgtacgcctttttggatcgttttaacaaagaatttgtgagcacgtttacctcctgtcaaaaggggtgctcttcgtgctgtaaaatcgatgttcatttaaccgcgcttgaggcaacacatattgcacaagcaagtaaactcactgccagagacaacccgcttacgaccgggcatgagtcaaaatgtccgtttttgtctgagaagggaacatgctcaatctacaattaccgcccgctgttatgcaggacatatcatgtactcactccgccggaaatgtgtaacgacccggatgcacaagtcatgcagtatggttctcaaagtgcgaacatgggaaatcacatctacaaaacaatagctgagtggatctattttcagacgtatcactgcactggtaagttagaaaccaaagatatcagagactacttcccttatccccgcgaagatatccaaagatttcttcaccataaccccccgcgccctttttgctaa

SEQ ID NO: 76445 - DNA, 234 bp, Citrobacter koseri
atgaattatattgatattgccagggtatggcgtcagcacaaccaggagcacgctgattcgggcgtggttctgatttgggacgggaaggtgtattgctggaaaaatattctccgcgaccctcagcatgagcgccccggagtgatagcggtagatactgaagagaatgtgtttattgctgaaggtggcaatgaatatgacggcgcgaaatgctgggttgtctttcaggagtcctga

SEQ ID NO: 76446 - DNA, 828 bp, Citrobacter koseri
atgatgacgagagccacagaacgcgcttacagcgagctacaacaggcgtttgatttctataaccagcgcctttttgacggcgaactccccgactgtctgattacgttccagcgcggcaagaacacaatgggctatttcagttacaggcgctttgtcgctgctgacggcagcggcaggatgattgatgaaatcgccctcaatcctgaatacttcccggtatacccgcttattgaagtcatgcaaacgctggttcatgagcagtgccacatgtggcagtaccactacggcaacccgtcgcgtaagacgtaccacaatgcgcagtgggcggccaaaatggaaagcatcggacttatgccctcctccaccgggagacctggtggcgcgaaagtcggccagaagattaatgactatccgatccctggtggccgcttccagcgtgtcacactggaactgttccaggggcaatttgctttgagctggtttgatcgcttccctgtccaggttgaacaacaaaaagacatgaccgccgtcatcgagcagtggcgagaaacgctggctcaggcgcatcaaaatgctgaatccgggattgatattgaagcggtgctgtcaatggcgctgctgccgtcagtgtcaccgcagaacgggaacggcgattcaggtgatatggccgggagcaatgataacgatctgcctgttgctgcttttgaggacaagccaaaacggaataaagctaaatatcagtgtcgggggtgcggtgctgccgtgtggggcaaagccggactgaatattgaatgcggcgattgcgagctggctttcatcgaaaattaa

SEQ ID NO: 76447 - DNA, 255 bp, Citrobacter koseri; identical to SEQ ID NO: 19090

SEQ ID NO: 76448 - DNA, 276 bp, Citrobacter koseri
gtgcttaccacaaatgcgattatcctgtgcctggtgtcatatccctgcatcgttgcatgggttatctataaaaacagatttgtcgattacttgtttttagctctgcttgcttgtttggggagcattttttcagtcgtattgtataaacagcccgactactcattgaccatatatcaggccgttgctgtcggctatgctgccgtgatcatgccaacggtgttagttttgagtgtcgttaatatcctcatgggaaaagcagggagaacgtgcaaatga

SEQ ID NO: 76449 - DNA, 279 bp, Citrobacter koseri
atgaatacactggctgcactggaaaatacgtttcgtgatatgagaaagcatggctgccaaacagtcatggtcacgcagtctttagctgattttggccgctacagctataaaccgcgccctgcgtttcaggactggatcgaacggctgaagactggcgaacgtctgccgcgaggccgttactttgttggcaagaaacctggtggccgcctggtgctcattgatgaattggggggaacatggacagaaaaagtaacagtgattcataccaacgctggatga

SEQ ID NO: 76450 - DNA, 663 bp, Citrobacter koseri
atgactcaaacagtaccgaaaggctttgtcagagcttacttacgcgcatccacgactgaacaggatgcaacacgcgccctggacacgataaataccttcgccatcgagcgtggcctgagtatctgtaactactacattgaaaatgagtcaggttctaagcttgaacgccctgagttgttccggctcctgaaagactgtcagcaaaacgatatcttgctggtagaggatgtggacaggctttcacgcctggtaggggaggactggaacacactcaagaaaatgatccggcagaaagatatccgggttgtggccgtcaacgttccgacaacctggctcgcatcgggtcacaatgattttgacagccgaatgttttcggccataaacgatatgttgctggatatgctggccgccgtcgccaggcgagactatgaacagcgccgggaacggcagcagcagggaatcgccagggcgaaaagggaagggaagtataaaggccgccaggttaatcagtctcgctatgacgccataaacaggctgattgcgagcggcagctcctggagccagattcaaaaagtgctgggttgcagccgggcgacaatcagcaaagctgttaagcaaagagctaccgggaaggtatcaactgagcaagaagaatatgagtag

SEQ ID NO: 76451 - DNA, 663 bp, Citrobacter koseri
atgggtaaaatcttgcttgtcgtctcagataagggtggggtaggcaaaagcacctacgtggctaacacaggctcaatgctggtcaacaaaggtaagtcggtaattatcctgaagacagataaaaatcacgatctgttgagctggaacgaaaagcggacagataacggcttactcactatcccggttcacgcagcttacggaaacgtcagcaacgaaattaagcgccttagtaagctgtgtgaagtcctcattgtcgattgccccggccatgacagccaggagttccgtagcgccctgacagtatcagatatcgtggtaacactggttaagccgtcctctgatttcgaaagtgaaacactgaccagtgttacagagaaaatccgcaccgctcagaaagctaacgcagctctggaaccgtgggtgctgttcaccagaatcaactcagcgaaaccccgccacagaaaagcggccattgatctggataaattactgcgttcggacaacatctggattcaacctctgaaaacccggatatccgagctggatgtgtatgaaagcgcctgtaatgaaggggcaggggtacatgacgtcagccgggcatcgagtctttcaacagcgaaagcacagattgaacttgtggcacaggaaattggcattttatag

SEQ ID NO: 76452 - DNA, 285 bp, Citrobacter koseri
atggctttaaaactaaaccgtccgaacatcgatgaatctcagcaaccagcaacaaacgcagaaaccgcgcgttttatctccggcgctaccagagcgcctgtagtgggtaaaccaaagttgatgaacttcagactgccagcgtactttgaggacatcctggaagcggaggcgcagagaacaggccagagcaagacaaccgttctaaaggcagcactggccgcattcgataacctggacgagaaccagaaaaaccactggctgcttgaatctgcaaaattaggttaa

SEQ ID NO: 76453 - DNA, 483 bp, Citrobacter koseri
atgaataaattaagtgataaatcctcaaatcctgtgtttacagtaattgctatcgtgatttttttcttcttccttcctgcaatcggcgcggtactgggaactacgggagaaatttacattgatggtctgcgtgaattaccgtcttttggtatgaaagcgataattgtttcaatctggatgcttgtagttgcatatcttatgtgccgcttaatgaaagctgagaaagatttcattcgcatacctgcaattcttacgcttattggcgcagttctcctgcctctgacaagcagttttcagaatgtgatgactatatcagatccagacgtttccaccagaacagacttttatgcaaaggctatagaagggctggaaacaattaaaaatggaattatgtttatagcacctgctttattatgtgcaatatcttcaatcattctggcagttggaatgataagtattttacgtaaacgttattatcggtga

SEQ ID NO: 76454 - DNA, 312 bp, Citrobacter koseri
atgttcataatcagatatataaaagctcttataaatttctacttgttatacatccaacctatattgggggtgttccttataagtacaggcttatgggggttctatgcacctgatgagggaacttgtactaatctcaacattgagttatgcgctgtatcagctattgatgttctgaaacctgccatttttgtatttttaggcattatcaccgttgccggatggtactttaccgaacttcagccgaagctaaggggggagggcaagtatatgaaggtaaaaacgggtgtaaaaccggaagatttcgttaagtaa

SEQ ID NO: 76455 - DNA, 264 bp, Citrobacter koseri
atgataacaattccatttcctatatttaccgcaataataattgtgctgtgcctcggatatacaatcaacttcaacaaatatattcggttaacttcccttgttctgtatttagggttttggttttcattcaatgcgagcgacgttccatcatttgatattaccgctattgacaatactagctggtatgttattgggaaagccactatcgctattattgtagtagttttaggaatgttttacctgaaaaaatttatgtcaaaatag

SEQ ID NO: 76456 - DNA, 255 bp, Citrobacter koseri
atggcaaacgggattaatacagtaaacttaaacggcgaagttaaacacataactgaactggacgatctgtcactgtgcaatgaatggacaaagattaaagaagaaaacaatcatctatatgaaattaacagagaagcaaacagaggatggcgcggtttcatcctgaagttaattggtgttaacctgccagataaaagaaccgtgtttataaaaggaataaattcaaaaggagagagtgtatatccagagatttaa

SEQ ID NO: 76457 - DNA, 354 bp, Citrobacter koseri
atgaaatatcaggtcaaagagtttattaacgaaaaatatgctaaggctgttaacattttaaaggataacctcaaagaacactaccatattttttatggtttgagattaagtgagattctttttcctgccagtgaatacggctctgatatgttttttcaggagttcgaggcgattaacagtgtaatattgcctttggtaatttttgatttaatagaccgaaagccgattatggttatcggcttcggtgaagtacctggagttgattcacttgtcgattctggtatagaagttgtttctttagatggtctaagcgacctgctactggttgaaaaactgacaccattatttgattaa

SEQ ID NO: 76458 - DNA, 444 bp, Citrobacter koseri
atggctaaaatctatgagttcccgcagggagctgaacgaagtaagctgaaaaaagaaatcatcctggaacgtaaaaaacgattgcgagaaaagaacggtaacccggttatccggcacgctaaatggttctggttttatctacgtcttgcaacggctggcgcactgcatttagtctctgttattactctggcagtcctgggggctttcagtaaagctattttctggattggtggcctgctctgtgttgttacatggttccatcttgagcgccagttctggacgccgcaaaatttcacgattccagtaatcgtaacgctgtggggattgagtttgtttgccactcccctgatggagctgctcaacaaaaaaatgccgtggtatcgtcttctggttcctgatgcaaagcacaccaacactgaggcaaccaatgatgatcagctgtga

SEQ ID NO: 76459 - DNA, 897 bp, Citrobacter koseri
atgccgataagaaagatttccgagaagacaaaaattagacatcgaaatgagatcaataaaactcttgctcagttacctctttcagcaaaaagggttttgtgtctggcattggtgtctgtagatacaaaaaaaccgcttgaacctggtatgatttttaaaattaccgctgatacctatgcatctattacgaaagtaaaaccttcagttgcatatcgtcaactaaaggaaggttctgaattacttaatactagtaagctttccctttcaagtgatgatatattggcattatctaatgaactaggtctacctgatgcaatgcgcaagagtttagaacgtctggatatggggattactgattattgcgcatatagcccgaatgaggggtatgttgttcttaagtttacacatacaattcacccttacatttcaaatttaattggcggtgaaaataagtttactactcaattgcttacttcagcaatgagattaagtggtcaatactcatgggctttatatcagttgataaggaaaaactattccaaattcaaatcaaagaattatttcacaataccgctgaacgaattaaaagatgagttgatcgcatatactatagaagatgatgaactggtttataaatatcctgagtttcctatcttcaaaagagaagtgatcaacaaagcaataaaagagatcaaagaaaaaacagagatagaatttctttcctgtttaatagaaagtaaagaagggcgtaaagttagtgtattacgctttgagtttcttatctctgaagataaattcactggtattgatagtgaaactgatgaatttatgaatggtgatgatgccgctttcttagcagagtttgacaaagtcgttccaccaaaaaagaataagtga

SEQ ID NO: 76460 - DNA, 261 bp, Citrobacter koseri
atgcgctgtcgtaacctcgcgccggagacgttcgccagtcctggcgaaccaataaacccgaatgagagcgataaccccctcacccctgccaggccaatctctgactatcagacgatgtttagcctgtcgcagttagcgcgtgagcttgcgaacggtacgccgggtcagtgtgaacactggctcggggcgctgtatctgcgcgttatgagatgcgttagcagcgaattacggggcgggttgctgaaaccgattgatgtctga

SEQ ID NO: 76461 - DNA, 516 bp, Citrobacter koseri
atgaatattcaggaagcattaaacgtttttggtttatccggtgatctgactgaaaaggatatcaagtcggcatacaaaaaagcggctttaaaatatcatccagaccgcaatccattgggtgccgagctgatgaaagcagtaaatgctgcgtttgattttctcatggctaacattgataaaatcaatcagtttcaaagcactgatgaaaacgcacgttacaattacggtgaagatctggaaaaagttttgaatacgctttccggccttacagggattgtctatgaagtcattggtaattgggtctggattagcggtgaaactaaagaacacaaagatattttaaaggaaatgggctgtaaatgggcatcgaagaaaaaacaatggttttaccgtcctgaagaacacaaaagccgctggaatcgtaaagaacacagcattgaagaaatccgtgaaatgtatggtacagcgggtaaacgtaaggcgtcaggctggagacgtgtagaagctaacgcataa

SEQ ID NO: 76462 - DNA, 237 bp, Citrobacter koseri
atgaaaaacaagaccataacggaagcggagctgataaacatttttgaaagttacggagcctacatttgcccggatgagatcgaaattacagccaaagaatgcaatgaaaatggttcagtcttacaccgtggcctaaacgcagaaggatgggcgcatctttttgcaaaggaagaagcctatcagcaggaatgcgaagcccaggaagctgcaagtgatgatggacactttgacgaatag

SEQ ID NO: 76463 - DNA, 552 bp, Citrobacter koseri
atgaaagaacagaaaaatttctttgaacggtatcaacctgtgtttgaaatcgtttgtcgaattctggggaacggctggcgtgtaaacctgctcgatgattgccagtacaggataaagctaacatcacctcagtttaaaaattactctatacatattcgaatggagaagggaaggttagtcattattggaagcgtagatagtcgaagctggagaagtccttaccatacttgcacagtatcgccagaacgtaaccctgtagaaatcgccgccgatattgaaaagaaaatcctgacggatgctttagataatgtagatatggcgcgagaatatgaacaacagttacagcgaaaacgcgagcaaaaacagatcctgaaaggaatgctatctcgtttagtgcgtcttgaaagctggcatgggacattaaccgggtttaaagttgagaatgggttagatggtaacgtatcagaacggggcgacggatatgaaatggtaattcgtggcctgagtgtggaccagctcataaaggtagcggggtttattaaacagctatga

SEQ ID NO: 76464 - DNA, 270 bp, Citrobacter koseri
atgaatgaagtcctgagcgacaggaaaaacaaaggtaatgtaacttacaggattgttgtgtctgaagatgcaacacgtttgtttattgaacttgaaaaactgatgaaggtacgctctaaagaagcggataaaaaaacaactaaaaaggttgttttccaaaaatcattttataatgaagaattctgtaacgttaaagatgaaattgatgatccaattttattgaaattctattcagatactatcttgaaggtacaaaatcatgagttttaa

SEQ ID NO: 76465 - DNA, 243 bp, Citrobacter koseri
atgagttttaaaccaacacctgaagaggtgaaacaagcacgtatcaaagctggctttacgcagcaggaagccgctgaacggtttggttttacgttatcagcctggcaagccaaagaaacatccggtaaaacgtctcgcggtttagccgctggtacgtatgaattacttttgctcctggccgatgaacatccagattaccagctcgttaagcgagaaaaaaatcaggataaagtgactaaatga

SEQ ID NO: 76466 - DNA, 339 bp, Citrobacter koseri
atgaacacttatgttatcactttccaggctttaaacactaagaaagaaaaaatcacctgctccgcttttgtccattcagaaactctcttccttgccgttcattctttcgaagataaaaatcgcggtcgtggttatgccatcacgtctgttagtgaattgtttgatgatgaattgacggctaaaaattccctcaagaaaaatattaacttttggtttaatgaatgtggtttaagtaaatctgaggttataaacgaagtaattaactggaagaatttcgcatatacccttaaagaactggaggaagccaaaaatgaagcgataaaagaactgcggagttaa

SEQ ID NO: 76467 - DNA, 165 bp, Citrobacter koseri
atgtcggaacgcatgttatcagcaatacagactattgaaaagggtgggcgtccagtttttcccttgatgccattctctgcttttcctgagtacatggcattactcagaaaagccctggaaaagaaagaaacaaaagcactgataaaaaaacaggaggtgttatga

SEQ ID NO: 76468 - DNA, 258 bp, Citrobacter koseri
atgaaaaaacaggagtttttagattttatcagtgcagaacagcggcggggagctgtccggttttcgctgggatttaacagcaaaggggaaattgtattgcactggactaacgaggccgggttaagagtctggagtatactaagcggtaacagaggtaaaagtcccagccgggcaaaccgggaaagaatgagtaacctccgtcgctggctccatgatgcccgtcagggcatggaaggcgacacaccagaggcagaataa

SEQ ID NO: 76469 - DNA, 546 bp, Citrobacter koseri
atgaaaaaagtacaattcaggattgaagaaagtcaatatgatgatctactagattgtcttaaaacactttatccagatgaaccgggtttaacagtagcaaaaggaatgaagctgcttgccagtgctttactgaaaagcaaggttaaaaatgaagatgttaatgtgtcaaaagacaatgatgattttatcaaaaccacaatgtatttgacaggtaaacagcgatcattaattgaaaaagcggctcatcgtcatggctggaatttatcaagagaatgtcgctaccgaatccagacgacacttgaaaatgaactcgatttcttcgatcaggaactgcttgtgatgaatcgttgccgtaatgcaatagataaaatagggcgcaactttcattatattatcgttaacgataacgcgagggtacttgataaagatgggttctatcaggacgctgaacggctaggtacagagataatgagtctcaaaaaagagtttgaaaactatatcatgttatgcaaagggcgaactgtttctaataaggttgaggtgtaa

SEQ ID NO: 76470 - DNA, 1161 bp, Citrobacter koseri
atgggcgtttatgttgacaaggaattcagggttaagcgtaaatcgtctgaagctggccgcaagtctgctttcgcccataaagttaaaaatggtggtaagaactatcaacgcaacgttcaggaacgcatcaaccgcaaaggtgccagtaaggaggttgtagtaaaaatatcaggaggtgcgattacccggcagggggttcgaaacagtattgactatatgagccgtgagtcagagctgccagtgatgagtgaaagcggtcaggtatggaaaggtgacgagattcaggaggctaaagagcacatgatagatcgtgctaatgaccctcaaaatgtttttgatgataagggtaaggaaaataaaaaagttacccaaaatatagttttttcaccgcctgtatcagcaaaggtaaaacctgaagatctgcttgagtcggtcagaaaaacgatgcacaagaagtacccaaaccatcgctttgtgctgggctatcataacgacaaaaaagagcatcctcacgttcatgtcgtttttcgtattcgcgataatgacggtaaacgagctgatatcaggaaaaaagatttacgggaaattcgtacaggtttttgtgaagagttgaagctaaagggctatgacgtaaaagccactcataagcagcaacatggacttaatcagtctattaaagatgcgcacaaaacagccccaaaacgacagaagggcgtttatgaggttgttgatgttggctacgaccattatcagaacgataaaaccaaaccaaagcaacatttcataaagcttaagacccttaacaagggcgttgagaaaacatattggggggctgattttggtgagttaaccactcgcgagaacgttaagaaaggtgatctcgttaagctgaaaaagttaggacaaaaggaggtgaaaatccctgcacttgataagaacggggtacagcatggctggaagactgcacacaggaatgagtggcagttagagaacctgggggttaaaggcatagacagaacgtcttcagccagtaaagagctggtactgaacagcgcggagatgattaagaagcagcagctccagatgagaaatttctcccaaataaaacagtcaatgattcaaagcgaacagaaagtgaaaattggtattcgcttaggataa

SEQ ID NO: 76471 - DNA, 510 bp, Citrobacter koseri
atggaatggtatgttttgcaattcaccactacgagatttgcagcagtttttgcgcatctcgaacgcctgaacttttcttacttctgtcctatggagacagaaagatatcgtcgcccggataagataatttcatatcgagaaagacgtttgccgctttttcccggttatctttttatccaggcagattttgaagaagttcattccactacaataactgctatcccttacgtacaacgctttatctcatttggcggtgagcctttacctgtaccagaagatgtgatggcggagcttttgtgcagacaatcgcatacaacagctcaggcaaatattttaaggaaatcaattccacacgaatttgctgaaattctccttatggacaatccgcagcaaagaagtatggctttcatccactacatcacagagagaagcttaacccacaaaatgaaacggaagaaaaatgactgctacccggaaaaaaaccgcaacgagacgcaagccccaacgtaa

SEQ ID NO: 76472 - DNA, 228 bp, Citrobacter koseri
atgactgctacccggaaaaaaaccgcaacgagacgcaagccccaacgtaatacactctacctgccctcagcttctcgtgaggaactggataaaattgctctggagattggctatcgcagggggcggcgtatttcaagctctggtgttgtccagtacctcattaaaaaatattccagccaggcaattgaggagctgataaacgaagacgatgacgacttcgatgactaa

SEQ ID NO: 76473 - DNA, 645 bp, Citrobacter koseri
atgttatctactactgcttttgcggcgcttgccttgcaatgcgcggccagcgttcatcccgatactgcgcacgaagttgcaagggttgaatctggttttaacccatatgctattgccgagataataccgaaggttgaacgtaagcccggtgacaaaggcgtagtgtcctactttcccaaaactaaggaggctgcactccagatcgtaaatcaaattgaatctcgaaatcatcgttactcagtcggtcttatgcaaataacgagtacgaattttgcaaacttcaatacaaccgctgagaaaatgtttgacccctgcgaaaacctcaaggtttcagagaaaattttggtggattgttataaacgtggtggcgacattttacgtggtctgagttgctattattccggcaatccagaaacgggaactaaacctgaatcagattttaataataccagttatatacagcgtatagggtttaatccgcctgataacaaaaaaaactgggtggttccttcagttaaagatgcaatcagaaaggagaatgtaacgcagagtatcaaacctaaagaaattaccgtatatccccaatatgccatgcgtggcactgttttagatgaaaaggaaacaaacgatgttaaaactcaataa

SEQ ID NO: 76474 - DNA, 291 bp, Citrobacter koseri
atgttaaaactcaataaacgttatttaactctttctgtatttatggctgcattgatgctttgtgtagcagaacccgcatttgctgatgatgtatccactaaaacaactggctttttgcagaagattatcgattttctgaccgatattcgtaagccagcaatcaccatcattgcgctggtaattggctatattgctatcttctcacgccagcatgcttcatggatttacccattagctatcgggatcatcatctttatcatcgcgccatatctcccggactggctgtcgtaa

SEQ ID NO: 76475 - DNA, 2754 bp, Citrobacter koseri
atgagtaccgtttttaaagggctgacacgccccgctttgattagggggctgggcgttccgctctacccctttcttggaatgtgcgttatctgcgttctgcttggtgtctggattcatgaggctatgtatgccctcatcctccctggctggtatgccatcaagcgagttacgaagatagatgaacgcttttttgacctgctttatctgcgaatgcaaatcaaaggtaatcctctggcaaacaagcgcttcaatgccgtccattatgcggggagttcgtacgacgcagtcgatatttcgaaagtggacaattttatgaagcttaaagaccagtcttctcttgaagagttaatcccttattcatcacacatcactgacaacctcattgttaccagaaaccatgacctactggcgacctggcagattgacggagcttattttgaatgtgtaaatgaagcggatctagccttgcttactgaccagcttaatacgctgatacgtagttttgatggaaaacccgttaccttttatacgcatcgtattcgggttagaaaagaagtgcgacctgtgtttgacagcaagatcccattcgtcaacagagtgatgaatgattattacgaatctctttcggcggctgagtattttgaaaacaaattatacttaaccgtatgctataagccgttcaacgctgaagataaagtgacgcatttcctttcaaggaaaaatggtaataaaaatatcttcgaagaacccattaatgatatgaatgaaatatgtggaagattgagcacctatctttcccggtttcactcccgtcgtcttgggttatatgaagaaaataacatagtttattcagaacagcttacgctgttccagaaactgctatccgggcgctggcagaaagtcagagtcaccaatagcccgttttatacatacctgggcggtaaagacctgttctttggtaacgatgctggacaaatcactgcctctgaccatgcccggtactttcgttgcatcgagatcaaggactactttcaggaaacggatgccggaatttttgacgcactgatgtatctcccggttgagtatgtccagacttcctctttcacgccgatagacaagcagtctgcaatcaaggcgctggatgatcagatcgacaaactcgaaatgactgatgatgccgctaaatccttgctcgctgatttgaaagttgctctcgatatggtctccagcggctatatttctttcggaaaaagtcaccagaccctgattgtttacgcagattcgccggagcgtctggtgaaggacaccaatattgtgacgacgaccctggaggatttagggctgatcgtaacctattcaaccttgagtcttggtgcagcgtattttgctcagttacctggtaactacacgttacggccacgcctgagttctatcagcagtctgaactttgccgaaatggaaagcttccataatttctttacgggcaaggagaaaggaaatacctggggtaacaaccttatcaccctgggcggctcaggaaatgatatttatcacctgaactatcacatgactaccgagcatcaaaattacttcggtaaaaaccccacgctggggcataccgaaattcttggtacgtcaaacgtgggtaaaacggtagtgatgatgactaaggctttcgccgcccagcagttcggaacgccggagtcttttccacctgagaggagattaaagaagttaactacggtatttttcgacaaagatcgggcagcggaacccggtatacgttcaatgggaggtgcttactatcgggtgaaagaaggagagccgactggctggaaccctgcggctttgccaccaaccaaacgaaatatttcctttatgaaagacctggtgaggctactttgtacgcttaacagtgagccgcttgatgattaccagaaccgcctgatttctgatgccgttgagcgccttatgcaaaggtcaaatcgctcttatccgattagtaagttacaaccactcattctggagcctgatgatactgaaacccggcggcatgggcttaaagcgcgcctgaatgcctgggtgcagggtggggaatttggctgggtgtttgataacccggatgatacgtttgatgtggacaacctggacgttttcggtatcgacggaacggagtttctggataacaaagtgctttccagcgccgcttcattctatctcatctaccgtgtcactatgctggccgatggtcgccgactccttatctacatggatgagttctggcaatggattaacaacgaagcgttcagagattttgtttataacaaactcaaaaccgcgcgtaagctggatatggtacttgtcgtagcgacacaatcgccggatgaactgattaaatcacctatcgcggctgccgttcgtgagcagtgcgcaacacatatttatctggcgaatcccaaagcgaaacgtaatgagtacgtggacgagctgcaagtcagggagctttattttgacaaaattaaagccattgacccgctctctcgtcagttccttgtcgtcaaaaacccacagaggaagggggaaagtgatgattttgcggctttcgcaagactggacttgggaaaggcggcgtattacctaccggttctcagcgcatcgaaaccccagcttgaactgttcgatgaaatctggaaagagggtatgaagccggaagagtggcttgatacctatctggaacgtgcaaacctgatttaa

SEQ ID NO: 76476 - DNA, 771 bp, Citrobacter koseri
atgaaaaagcatatcgttgcggcacttatcgcctctgttacggttatttctggtgctcaggctggtgttcccgttgccattgatgcaaaccctgaatgggctgtcgaagcgcagcgctggacagaacgcctcaaacagtggcaggacaccgtgaaccactaccagaaacagattaatgcctataagcaggagctgctgaccaaaacgggcattcgtgatgttcagggactggtgcagtctgcgcaatctgtcagtaaggagctggagaagatttacgaccaggggaactccttcattgatgattacattaagaacccggaagccaccctgtctgagcaagccagatcactactggcagattataaggtgacaaacacctgtaaggggctgggatatacgggcgacctggtgcggggctgtgaagcctcgttcttgtcccaactggcggggattgagtacggcaataagctggaaagtaaactgcgtgaagataatcaggagatggccgaccttatcgaccaggtgaagaacgcccaggacacgaaagccacgcaggacgcgacaaacgctgtatcgctggcaagcctgaaatttaacaagctcaaatttcagtatgaaatgtatcgcgataagcaacgcgatcttgcagaatacaaggagaaaatgttacaggccgcatatcagcaaaaacaattaggagcggttactaccgaaacacctgttgtagactataaggcggcgtttgatcagcagagctatgaaatgaactga

SEQ ID NO: 76477 - DNA, 258 bp, Citrobacter koseri
ttgaaaaaatatggaatagtggcagcgctggggcttactttctttcttgccgggtgtgaagaagttaaatctgtagattggtggcaggatcaccctgacgaagcaacaaaaaaagtagctgaatgcaaaaagtctggtagtgatagtgataattgcaaaaatgctaaagacggcttatttagatataagcaattacatcctaaacacgttgactataaagatgcattcaaaaatgttttgggtaaagagggcagttaa

SEQ ID NO: 76478 - DNA, 1056 bp, Citrobacter koseri
atggcaacttctaggtttttccaagccgcccatgacgttattgttaaaaacattgaccagtctttgactggtcaattggataatttttcttcaatagcgtatcaattgggtaaatatggtatttctatctatgtgttatggtatgggtacaccactgtagtagggaagcagaaaaccgcggttcaagattttctatggaatttatgtcgattttggctgattctcatttttgtaagaaatatgggggggtggctagatagtgctaatcaggctatagatggattacgggaaacatttgcaggaggcgatccatggaaatgggttgatgaactttgggagaaagttcagcaagtggctgcgtaccttatgtctaaagatacatctacatatgttaaaactgatggttctattgcggctatattgacatatgctggcggtattttagcgctgttattaacgtcaatagtttatcttgctgctgaagttacgcttaaaatgctaactgttactgcgccgcttttcattatttgcctttcttttggttttttacggcaaatgtttaatagctggctacagttaatatttagttcgtgtttgatttttctattttgtggtttggcaatcagagcaggaatgactttcctaaatggcatcctaaccatatctatagcaaatgcagatgagttaaatcttatctctactggtgctcaagccggggttgcaggtgcattcatggcctggattatctggcaagctaaatcctatgcttcgcagctcgcaggggtaggtgttgaaggcgcgatgcagggggcagccgcaatggggattggtgctggcgtgttcggcgcttcccgtatggggcgcaatatgcttggtatgggtaaaaacgcaggtattggcgcatggaaaggcgttcgccgtcaggataatggttttagccagtcgccaggtgttgctggcaagctggggaatctgaccggacagggcgttaatattggcgctaagagacttcgccaggctgcgatagatgcggcgaaaaagaaatatggaggttaa

SEQ ID NO: 76479 - DNA, 729 bp, Citrobacter koseri
atggggtttaaactctcagaattaaaactgcccggttttaacaagaaaaaagaagtaacggactcttcaactgcttttgaagagaaaaatgtattgatgcaggagaaaatgaaccgtatttataaatttggtggtatttcagggatggccgtaggtgtgttatctctgctggcactgaatggggcgctaccgttaaagagtacggttgtcgaagcttatcttattaatggtgtcactggtgttgctgaaagactgacttccgttaaaaaagaaaacctctctgaaaatgaagcgctggcgaaatacttcattactcagtatgtgaagcgacgtgaagggtataattatttcagtctccagcatgattatgattatgttctgttatacagtgctgagaatgtggcgacggattacaacgctttaatcaacagcaaccagtcaccaaaggttatttataataaagcggaaaaaaccgcatctgttcaggataatccgtccgtgattatcagtccgtcatcccggcgcgatgataaggatatgggagcatatatccggtttaaattaaccattcgaaatgtcgcgacaggccaggatgattatgaatactggaacgtccggttgacctaccgtattgaaccacaggtcgaaatggcatcgggtgaccgaaacaataacccgcttaaattcgttgtaacgagctatgtacgcgataaagaagtgaaggggtga

SEQ ID NO: 76480 - DNA, 930 bp, Citrobacter koseri
atgaaaatgaataaaggagcgctaattgtggcgcttctgttggtgtcgcacgtctgccatgcagccgttacgccagcagccagccgtttcgatccccgtaatcagattgtcagttataacccgcaaaacacgactgttataaacagtgcggtcggctatacaaccacactggtatttgacgaggatgaaacggtaatcagtgccagaaccggctttccccagggctgggaagtgaacaaagaagataacctggtgtacctcgaagtgaagcccgtcaaacagaccgtacagaagaacagtaccgatgacagtggcaaccagtcttcagaggtggtcagtgtagcccttgatcctgaaaacgacctggaacgctggcgaacaaacctgtttgttcgcacaaccaaacgtaattacagcatggagctgaacgcccgaacgttccggcagccggataagatcgcgtttgttgttaattaccagtacccgcaggaacgccggaaggaacaggccgaaatcgagaagaaacggattgaggctctcaacaagcggcaggaagaacaggcaatcaaccgttctcttgaaaatgcgaagtccccccggaactgggattactggaagcgggtagctgacggcagccagtcaatcagccctgattatgcgtatgacgatggtcgctatacctggtttggcttcagccccctgaagaaaatccccagcgtctttgttatgagcggcgaacaggaaacgctgactaacccggtagtcaaaaacagcggcagtttcaccgttgttggtgttcctgtagaccagcgctttgttttgcgtatgggaaatcaggtagttggggttgaaaaccggggctttggcaaagtccgtcttccggcaggagataccgtttccccgaacgttgagaaagaggtgatccagtga

SEQ ID NO: 76481 - DNA, 1215 bp, Citrobacter koseri
gtgagcgaacaggaaaataaaatcccgaccgctgtagaaattgaacaggcactacgggaacggcatcagaaagaaattgagcaaagtgacaaaacggataagggagatgaagatgacggtaaatcagtaaaacgcctgggtatcgagaaactcaaaaaatcacgtaagggactggtgattattgtggccgctttccttctgctcgcggctggcgtgtctgtctattatatcccgtcgattatccgcgctatgtccagcggtgacgaaaaacctgccagtaatgcggtttctactggttcagtaaaacgcgcgacaggtctcagtgatgacgttgatccgttcaacaccagggcagaaccggctaagacggaagaacggaaggaaagcagcggcaaagcggaaacgccaccggaaaaagtacagcagaacttcagtcgtgcgctggatgtggcttatggggggagcagctctgcttcctcaaattccggtggtagctcgtcaacggccagcaataccaggagtgaggataacggcagcagcaaagagacagaggttcagcctgttaacgcagggcaacccgcgcagctttctaaaatcacgcgcgttccttatgaccctaaccttttcattcctgaaaataccgcgattaagtgctcgctggacagacgatttatctctgatctggctggcaagctggtctgtacgattaatgaggacgtatacagtgcaaacaggaatgtaaaactaattgaaaagggaactgccgcatatctgatgtataaaacgggaacgttcaatcatggtcagggagccgtgtttatcgctgctacgaagcttagaacacgcaaggaacctttcattgatattccgctgattgatacacaggcggcgggagcgctgggtgaggccggggcttcaggctggattgacacacattttgcagatcgctttatgggcgcgatgatggttggcatgatccccgatgtggcacaggccgcaagcggcgcagccaaaagcaacaaggacaaccagacggactatacggcgaacagtcgccaggcttttgctgatatagcacgcgaagcttttgcaaacagtgtgaatatcccgccaacgctttataaaaaccagggggaaatcattactctgattgttggtcaggatctggatttctccagcatctacaaattaaaaatggtgggttcccggaggtaa

SEQ ID NO: 76482 - DNA, 399 bp, Citrobacter koseri
atgaaaatctacgcctctaaattaacccctggcttttatgttgagggcatttctaacattcctgatgatgcatatgaaattggtgccgaattatggaatgaattattagaaggccagacagaaggaaagaccattgattttaccagcactccgccagtacttattgaatatgtcaaaactgaggaagactacatggctgaagccgaagccataagaagtcagctacgtataaccgcagataccgaaatcgcctggcggcaggacgccgttgacgccggaatagcgacagaacaggaagccgccgaactggctgaatggaaaaaataccgggttttgctgatgcgtgttgatacaacaaaacccgtatggcctactgttccgggggaacaggccagttaa

SEQ ID NO: 76483 - DNA, 1320 bp, Citrobacter koseri
atgagaaggaaaatattaattctttccgctgtcctcatttctcctttttcacatgctgagtcatgggaaagcattactaaatccacttatcaaagttctgcctatgctgaaagtaagcaaataaccaatcaggatggctctaagataacggtttactatattgatgctgctatgcaggcctccgcttgtcagggtgctaaatccagtgctcagagtgtatttactcggattaaaccaacttatgagggtatctggcctgattctgaattccgtcttgtttttactggcgattgtacttacagcgattcaccagggcagaaggataaatattggtctttaacggcttatattgttggtaatattcagcgttctgttcctgatgaaaaacctactgacccgacaccagaagaaatttgtgaagcgaagccgccagaagaaggtgtatttaataatgttgattcatatgatggtggtcgctatatctactataacggctgtgaatatgaggctactggtgtcattgtttgtcagggtgatggtactgtttgcgctgcaacatggaagcctacaggtgctgtagctgacccctctgataaaccctcaaccccccaaaatggtggtggtgagtctggcggtggtgagtccggcggtggtgagtccggcggtggtgagtccggtggtggtgagtccggtggtggtgagtccggtggtggtgagtctggcggtggtgagtccggtggcggtagttctggcggtagttctggcggtagttctggcggtggctctagtggttccagtctttctaaaggtgatattcagtctgcgatcgaaggtgcttcacccaaaatagccagcgatattcatgataaattaacggagaaagacacttcatcagatgataaaaaaaatgccgatgaacaaaccaggaataatataaatcgtcttgacgattccattaacaatcttacgcggggggctggccgttttgctgacccttcaggtggtgattctcgttatggaaagggcgactctgaattagatggcgcttctactttagctgattctgaattgggaattgaaaaggattctcacggtgctttatgggaagcatttttaaataaaggtgctatgctgcctaatttacccaatggtaacggctgctctgattttattatttttcccggagaggtttatcagattgatattggttgcgataaattactgactattaaagatgttctttcatgggttttttattgccttacgttctggtatgtctttacttctttaacttcattgcttcgcaaagggggtgagtga

SEQ ID NO: 76484 - DNA, 318 bp, Citrobacter koseri
atgtctaattatggtcttttcgttaagggtaaaatgttgggagcccgccaacgtaataaagttaatggtcagggctattataatgaaattggtattggccttgaaatacctgatggttttggtggtacaaagcaggatcaaattattattcgagtttctcaggctctcgttaacgcaggtctaatgaaccaggcgaatgctttcattgggaaattagttcaaattcctgtctatgtccgtgcgtggtcaatggagggtagggaaggtgtaacttataatgttgcttccgatggtggcatcgcagagatcaaaggttaa

SEQ ID NO: 76485 - DNA, 1053 bp, Citrobacter koseri
gtgatcgattggcttaccgggattttcccttgcacacacaaaccgcttccggcggggagtgttgtcagcgttgatgctgacggtgcaattgagtgggaaaccgttaagcgactgactgttcgcggttcgcatgaagcaacgatgaaagtacgatcgataggatctaatggcgaaggtaaagcgacacatttgtacattgatggtaatccttccaagtttctgcaggggcattctgttgttgggtcggatgatatacaagggctcatgttgacggtctatgccaggattttatccttattgaatattcctcatgatttagcgtcttataaagccgttatggcaggtcagtataaaatttcacgtattgacattaattacatgtattcattatctacgctggaaaatgtcagatcatggctttatgccgccgaatttaaagctaaaacacgccatggtcgcgcatgtgggaaaggcggtacagtttatttaggtaaaaactcccgtcgatggagtctgaaattttattcaaaatatgatgaacacgtttctggtaaaaaagggcaccagatagccgaagagtttgtacgagccgggttactggactggacgaaagataaattacgtattgaattaacattaagaacaactgagcttattgatttaaatttaacgcttggcgctaactggaatatgaaaacaccacgtcaattattctctgaatatgtagggagaatagaaatgaatcagaatgctattttaagtgatgaaaaaataacgaaactgccaagaaaaatacagtcaacttatttactttggaaacaaggggctaacatgaaagaaatgttacctcataacactttttatcgccatagaagagaattgctttcgttcggtatcgatattaatttctattgtgattcaccagactctaataacgttgttccgctaataagaacgctggaagccaagccagcggaaatccccttatggatttatgagaaaggttttattttcgattacaaccgtatttcgcacgccagtagctggcattaa

SEQ ID NO: 76486 - DNA, 183 bp, Citrobacter koseri; identical to SEQ ID NO: 11598

SEQ ID NO: 76487 - DNA, 576 bp, Citrobacter koseri
atgagtatgcaaccgaatgaagaaatggacctcaggaaattttacgcagagggaacagctgactacttaaaaactaaaatcaaaaaaagcgaacgacttttaaaaataaaccaatatctatcatttgccctccctgtcctagttggaggatacgcatcggttgatcacagctccaaatattttaattttttagtttggggcacagggatattatcagtgatagtcttgctttctaatttatacacactggtcatgaagactgatgaaaatttatctcgatatctggaatcatactctttcaataaactcctaactgatttgtatggcgaactgtcgagcatgtttaaatcaaagacaggcaaccagcaacccgctaaccatttgttttcagtgataaaatcaaaagatgacttcaatgccaaggaagatgaaaaatatgttagcaataatgataagaaacggattatgttcgacattctggtaaagaaaaataaagaatgcgtacgttgcaataaaataccgactaaatttaacaagcggaaaggttgcacaaattgtggcaatctcgtgaaataa

SEQ ID NO: 76488 - DNA, 192 bp, Citrobacter koseri
atgagttataaagtagatcaagtcaaagctctctggcttcaattgactgatgcggagaaaaaagaatttacaacatatctttttaatggtgaaaaaaaatccttacgtgaaggattcgaaagttttagtgtgaataaaagcactacaatgcaatttggtgatgcaaacgtctgccctgcttgcggaaaataa

SEQ ID NO: 76489 - DNA, 162 bp, Citrobacter koseri
atgacccaacgtaaaccaaacgccgtttttctcccgaatttaagctcgaagcgattgaacaggttgttaaatatcaacagtctgctgttgaggtcgctcatactcttgaaccagaccccagccaattacgtaaatggatacgtcagtattaggccgaagtga

SEQ ID NO: 76490 - DNA, 333 bp, Citrobacter koseri
atgcctagcatcgacaaacatactttcgcagatgatgaaagcgggaaaacttattacatacatccggcggcattcggcagcacgaaaaaccctggctacgggcatgtagctgttgtaaaggctgaggacttcgagaagctgcgcgccaagctggaagccgcagaaaaaaggatcgctgagctggaggagcgacaaccgtacgggtatctgagagaaaacgacggacagattcagatatccattggtcatgagcgaccgcatgatcgttccggtggctacgctacgccatggttcgcaatctataccgccgccgcagcccgtaaaggagagtga

SEQ ID NO: 76491 - DNA, 549 bp, Citrobacter koseri
atgaaagttaaactgcaaaatgttcgtctttccttccctgaattgttcgaagcaagccaggttaacggccagggggatttcaaattccgtgcatccttccttttgccacctgaccacccgggcaataaagccattgagcaagctatcaagaaagtcgctacggacaaatggggagccaaagcggataccatcctttcccagattcgcggtaaccctatgcgcttcaactaccgtagcggcgatgagaaagccgattacgaagggtatgcgggcaacatggtaatcagcgccagcaacaaagcgcggccattggttattgatcgcgatctttccccgctcactgctcaggacggtcgcccttattctggctgctacgttaacgccaccattaccattttcgcatatgagaataacggtaaaggtatcagtgcttccctcggtggcgttcagttctacaaagatggcgatgcgttcagcggcggcggtgtggcaagcactgacgacttcgacgatatcagcgaaggtgcagacgcctccgatctggtttaa

SEQ ID NO: 76492 - DNA, 924 bp, Citrobacter koseri
atgagcttagaaaccagtctcgaacttaacaaccaactgctgacgcagcataacgccctgcttgaacgccttatcactgccctggcctctggcgtcgctcttcgcccggacaccgtggcgcaggttcaggaataccgcgaaacggtaccggaaaccaaagaggaaaataccgttatccgcaaggttacgctggacgatctggagttcagtgacattatcgccctggctgcattctacccagacccacaggaactcagcgaaacgatggtccagcgtgttgtcgattaccgggacgccgaaggcgataagcgcgttgtgcagatcgacgcactggacagcgccctgcagggtgttaaacgcgctggccatcttaacaagccagcgttacttgacctgtcgcgtaacatcctgcgcttctgggacgatttacctaccatcgcggcacgccgtgaatttgccgagcgtttactggacgcacccgcagacgggcgccatgaagtgaagccgaagaaggcagacagcaaagacgaagaacgcaccgggccattctactgcaagaacgtcgatggctccgccgccagcgagcttcacaccttacgcaagctgaacgaactgcttaaaaagggccatatcgagatcacccgcgttgagtacctccagctgcaggaagatttcgcgcgtaaaaacgcggcaaaaggcggtaccgaaacggtcgatgacaccggggataatgctggcgcgcagaccgattttgcagccctgcgtaaaaaggccgaagggttgatcctccagctggcgaaaggtggttaccgtgccgaagcggtggcgattctggaaaaacagggtgccaaaaaactcggcgaagttgctgacgagaacctcgcagacgtgatcgctcaggctgaaaaagcgctggagggttaa

SEQ ID NO: 76493 - DNA, 513 bp, Citrobacter koseri
atgatcactgttaaccgagcagaatacttatctgcgctgacatgcgctggcgtaaaagacgtacgttattacctgaacggtattttctttgacccggagggtttcatcgttgccaccgatggacatcgtctgttttgtgggaaagcaacaactgaaggcgaaagcgtcatcatcagtgtgaaagcaaaaccacccacaaaattcgaccacgtagtcattagtaccgaaggtcgcagcgctaagttcattgatgataaagcacaggaagtattgatatccccgattgaaattatcgatggccgcttcccagactggcgtcgggtatcgtatttcaaaccaggtaaagtcgaagcaatcggtattcatatgccctacctcgcagacgcggcaaagtgctcaaagtatttcgataaaaaagcgaatggagttctcgaaatgcaggactcggcaagcgcaacgcgtttcaaattaggccaggacgcttacatgttaattatgcctgtccgaatgtaa

SEQ ID NO: 76494 - DNA, 693 bp, Citrobacter koseri
atgattaacgaacgtattcgcgaagcacgccgcaatgtaaaaatgactcaagacgcgctcgctaaacgaattaaggtcacaaaagctactatttcccagtgggaatcaggctctacagcgcctaatggtaaaaacctggtcaacctggctgatgctttgggtacatctccagagtggctactcactggcaaaccttctgacgataaaaagatcacatcaaacgctagagtagagggtgttttttcaacatgggactcaaccacgccattagaggatgatgaagtggaaatacctttctaccacgagattgaattatccgcaggggatggtacctacgtagaactggatcgctctggatgtaaactgcgatttgcaaaatccactctacgtaaagccggtgtggacgcaggctgcgccgcttgcgtaagcgtccacggtaatagcatggagccggttttacctgacggggcggtagtaggtgttgatacatcaaagaccgggataaaagatggtcagatgtatgcgatagaccaagatggattgttacgtgtaaagctactgtaccgcctaccaaacggtatcagagttcgctcatttaaccgggatgaatacgcagatgaagattatttttaccatgaggcaaataagataaacatcataggccaagtattctggtactccgttctcctgtaa

SEQ ID NO: 76495 - DNA, 177 bp, Citrobacter koseri
atgaaaaagaccagagccattgagctagcgggcagcaaagcgaaactcgcccgattattgaaggtttctaaaggtgcagtatcacagtggggtgacgaaatccccgaactgagagctctgcagcttgaaaagttattgagcgctaataaaaaaactcaagccagacaaaaggcgtag

SEQ ID NO: 76496 - DNA, 429 bp, Citrobacter koseri
atgaagccgcagatcagcttctggcagctcaccgacggcccattcttcgccgtcctgcaaatcggccacgctgatcacgcagaaatgcttacgcaggatgcgggagaccttcagcaggtaatcagggtccggattgcgcgaatcgctgcgccattcagaacgaacggttgccgggcggatgaccgcaatcggcttttcgtgcgtaaactccgcagggccgaaggaagggagatccagcgctgctggctccgtgccgaactgctgacgcattgcgtcgaatatcgaaccgcgccgcagatgatcaggcccgtagaaaatacgctttgtctggcgcatatccggcagtgggtggaataccgactgcgtgcggtgctcgttcttccgctgggttctcagcgtggtattgctgcgcaccgggcggacgggtaa

SEQ ID NO: 76497 - DNA, 615 bp, Citrobacter koseri
atgaagtcgttttatcaggaactggaaaacgggctggtatttttaccggagctggggatcggacgttatcccgttccggcatcacgcccttatgacgagcagtatttcgagaagtatcagcagctggccgacaccgaaacgggcagagctttaacgcaatcccgtattgagctggtggagcgccattttcacggctcagttctcgacgttggtatcggtgccggtcagttcgtctctacccgaccgggaacacttgggtatgacgttaatccggctggtattgcctggctgaacgagcggggcgcattcgcagatctctacgccagcaagtggcgagcactgacgatgtgggatgtactggagcacatcgacgagccagagctggcggtacagcaggccagcgaatacgtgttcgtgtcgatcccgattttcactgatgccggggacattctccgctcccatcacttcagaaagaacgagcacatctggtatttcactgatgaaggtatcaggcgctggtttgcagagcagggcttcgcctgcgcagagcaaaacacaatcgaatgccagttagggcgtaaaggcgtcgcgtcgtacgctttccgcaaaatttaa

SEQ ID NO: 76498 - DNA, 318 bp, Citrobacter koseri
atgcatcgtatgaatgaccagtcaggtaatgtaattacccagtttttcgcgtggctggcagctgtatcagcggctctgggattttcaacccaggacatggttttcatgtttttcggtctgattggcgtacttctttctctggcctcttttatatccggtcggcttgacgccagaaaactccataaagaggaccagcgccgcactcagttgctggaaaaatattttgatgatgcccgaaagttacctcctgcggatcgtccggcaagcgtcaaggttgttacagatgccattaacaggataaacgcaaatgcaaaataa

SEQ ID NO: 76499 - DNA, 525 bp, Citrobacter koseri
atgcaaaataaaaaggcaggtgctgcgggtattgtttgttcagttgctgcgatcatcgcgatagttctcggtaacgggcatgttcgaaccaatgagcgcggccttgagctcatcggtaatgcggaatcatgtcgtcgtgatccttatgtttgccccgccggtgtgctcaccgatggcatgggcaacacccacggggtgaaacccggcacagtgaaaaatgaccaacagattgcggcggaatgggaaaaaaatatcctcgatgctgaatcctgtgttaaccggtacgccaacggcagaaatctgtctgatgatactttcagcgctgtagtatcggtcacgttccgcgccgggtgcgggaatatgcgtaaatccaccatgtttagcttattccgtgaggggccggttgcgtataagtctgcgtgtaatcagttctctcgctgggtttatggcggtggccgagttcttcctgggctggttactcgcgcaggtaaagaagaagctctctgcctggacggtctgaaatga

SEQ ID NO: 76500 - DNA, 171 bp, Citrobacter koseri
atgcgcgacatacagctcagcaaaatacggaaagagctgctttccagtcgtaccttcaccaatcagctgtatatcagccaggttcagacggaactggatttgtggttcagggtatttaacggggtcagcaaactggggaaagtcacgccgaaaatcacttacggttggtag

SEQ ID NO: 76501 - DNA, 354 bp, Citrobacter koseri
atgaaacggttctgtttggcgttagttatgatggttactgctccggcgatggctgcaattcagtgcggcaactacacgatgaccggtgacggaatgactgttattaacggtgaaactgtcacatcacagaagataaaatttctgggaaaagatggtgactactcaaacatgaaaatggacatgggcctgatgccttcccgtgatggtaacaattacggctttgagtttgtgaagcgtaacggaaaagctttcctgaacgtccagctgctgcagaacagtatggacgcgccgaaaatcatcggttctttcccgtgtaaaaaaagtagccggctaaacctaaagccattcatatag

SEQ ID NO: 76502 - DNA, 363 bp, Citrobacter koseri
atgttaaagttatttagtcgctacatttcagtaggcgtgattaacactgctctccactgggtatgcttcggtgcgcttcttcattttctgggtgccactcaggctgtagctaatgtgttcgcattctgtattgcggttacgtttagtttcttcgctaatgcaaaatggacgttcaagtcacaggcaacgtcagggcgttatatcgcatttgtcacattcatgggcatcatggctggaatgacagggtacatcgctgatgcgatgggtgctccgcctgttgttaccctcgtggtgttttcaggggtaagccttgctgccgggttcatatactcaaaattcattgtctttagggatgcgaaatga

SEQ ID NO: 76503 - DNA, 762 bp, Citrobacter koseri
atgcttgctgaaaaacaattgaagcccgaactgcaatcaggaaaaattttcaatttaactgaaactaacataaataatgttaaaatccaaccttcaagtattgatttgacagttaagtttatacacatcccaggcaaaaaaaatacaaagaaatctcatacaattgaacctggagaaactgtaattctagaattaaacgaagtattttcattatcaaatgaaatatcagggattgtattccctaaaaatactctatcaaaaaatggaattataatgacaaaccctgggcatgttgatcctggctacaaaggcatattaacattatatttagtaaatatgtctaaagaaaatttcaatctcagggaaaaagatgctgttgcaagacttttattatttaagacttcgtcgccaacaaatggataccaaggaccatcgccaattcaggtagaccaaagccagttagaaagaatgggtaaagatttcgctggattagacacacgtattccagtcgcaattggtaaggtattatctaaatggtctgtgggactttttgtcttagttgccttaatgctttctatagtaggtttagctgttcctgtggcatttacaattacatcatcatatttagacaatactaaagatttaaaacaaaatatcaaagatcaggaacaaaaaatagaaaaattaaataaagaaattatcattttaaattcccgagaaccaaagccaagtgctacaatctcaaagaaagcggtaaactaa

SEQ ID NO: 76504 - DNA, 1965 bp, Citrobacter koseri
atgtttaatacggattcgcttgcctggaagtggcacattccggagctggcccggcagatttatccgtgggtcagctggctgtaccaggagtattacggtctggccggggctttcctagttatcggcctgtttttcggtctggctgaactttgggccggacggatgcgttttgtggggctgagtcataaggagcgacgggagtatgccgatcgctataagcgcgataataaacggccagcgccattttcggtgctggcctcgctggattcgcccgggcggatggtcagggcacgtcgacatgtctggaactacgcgtactggctgaccggcgcggccggtctggcccttctgggggggctggttgtcgccgtgtttatcgagagctggggagaaaccgtcctgcgtccggacctctacgcaaacgcagattattacctgctgcagccggctaacctgttcgggattgcctggtgcgcgggcgggctggctgtcgggattgtgttggcgcggctgctggcgttcctgctgcttgacggtcattttgcggctgctgacgaggcggtgaacgcgaaactgaatcaggagagccggcgcagcagccagcggacaggagagatgaccgacgtgcgccacctgcatttcggggagccggtaccggttaatgcgctggccgatttttcctcggagcaggcccggcaggagcaggcggtgtttctgggtaaggatgagcagggcaagccggtgctggttccgcgtgatacctggcgcaagaccaacattcagatcctcggcctgcccgggagcggcaagagcgtgatggccaccaacgcgctcattcgctgcgtacgcgatttcggggacgcggtggtgtacttcgaccccaaaggggacgcatgggcgccgcacgtcttccgggcgcactgtccggacttcaccctgctggatctgcggccggggaaaccggcgcagctgaatctgttccgcgatctcgaccagtacgcgctgaaaaacctgctgattgccgggcttaacctgggcgagaccggcgacgtggcggaccactaccgcatcagcgagcagaaagcggcgaagctgattgcggagcagtttccgcagggggcaaacattcagcaggtgctggcggcggcgtacgcgctgccggaggccctgaaaaaggacgtgaaggggttgatcactaggctggaaaacgtcgctgacctgagcgtcctgcagacggacagtggtatcgatgtggcggggattatcaacggcggcggctgcctgtacgttatcggctcgatggacgacgaggcggtgatccgtgtgcaaaaaatgctgtttgcccgctgcgcgcaaatcatcattgcgcgggacgagttccgggagtggccacacgtcagcgtgatgctcgatgaaattaaatatctgctgtcgaagtatgtactgaacgcactggggacgctgcgcagccgggactgcaatctgttgctcgcgcaccagtcgctgggcgatttcgggcagtgcgggcaggatctgcccgctgaatttgtgaaaaccacggtactggataacacgccgatccgctggttttaccgggcggccagcctggagtccgcgcagtgggcggcggggcagaccggggaaatcagggtggacgtggagcgccgccgtgccagccgggaggcggggaacgtggagcatatcagcggggacagcttcatccagaaggaggcgcggccgctgtttgacgtgaacaccctgcaacacctgccggacgggttcgcggtcatgaccgggctgggtgtggcccggatggcgttcagcagtccgctgcgggttgagcgccgggaaatcccgttgcagcgtttcccggtgctggcgaaaaccgatcccctggcggagttccggcccccggccgacggcggcgggccgaaagcggatgatgattttgcggggatttactga

SEQ ID NO: 76505 - DNA, 285 bp, Citrobacter koseri
atgatggtgctgtggacggttctgctaatgctacggctgattggattcaggataagacggggtttgatactcgaagcgttgatcctgcgatcatggattggttgggggttgggggttgggggtaatgcgccagtatacacggtgaatcctacattcaatttgaatcttgaagcatccgtaccattcactattgccagcgattcgagcagacttgcggattatgtcgatttcatggctaaagcaagtcaggcgagctttatgcaatcctcacgttatcagcgttaa

SEQ ID NO: 76506 - DNA, 2415 bp, Citrobacter koseri
atgattgcacgctggttctggcgcgaatggcgctcaccttccttactgattgtctggctggcgctgagtctggcggtggcctgcgtgctggcgctgggcaatatcagcgatcgcatggaaaagggtttaagtcagcaaagccgtgattttatggccggagaccgggcgctgcgcagttcgcgcgaggtgccgctggcgtggatcgatgaggcgcgcaaacgcggtctgaaagtgggcgaacagatgactttcgccaccatgaccttcgcggacgatacgccgcagttggccagcgtcaaagcggtggatgacgtttatccgatgtacggtgagctgcaaacgaatccgccggggttaaaaccgcagccgggttccgtgttgctggcgccaagactgatggcgctcctcaacctgaaaacgggtgacagcatcgacgtcggtgacgccacgctgcgtattgctggcgaggtggtacaggagccggattccgggtttaaccctttccagatggctccacgcctgatgatgcacattgcggatgttgaaaaaacgggcgcagtacagccgggaagtcgcgtgacgtggcgctataagtttggcggtacgccgcagcagctggacggctatgaaaagtggctattgccgcagcttaagcctgaacatcgctggtacggactggaacaagatgaaggcgcgctgggcaaatcgcttgaacgctcgcagcagttcctgctgctgtcggcgctgttaacgttgctgttagcagtcgcggcggtggcggtggcgatgagccactactgccgcagccgctacgatctgattgcgatcctcaaaacgctgggggcgggcagggcgcagctgcgcaaactgatcgtcgggcagtgggggatgctgctggctctttccgccgtgacgggaggcgccattgggttactgttcgagaacgtgctaatggtgctgcttaaaccggtgttacccgccgttctgccgccagccagcctctggccgtggctgtgggcgctgggaacgatgatcatcatttctttgctggttggactacgtccgtatcgtctgctgctggcgacgcagccgttgcgtgtgctgcggcgtgatgtggttgcgcgtgtctggccgctgaaggtgtatcttccggtggtcacggttgtcgtcgtcgcgctgctcgcggggttgatgggcggcagcatgttgctgtgggcggtgctggccggcgcggtggtgctggcgctactttgcggtgtgctgggctggatgctgttgaacgtgctgcgcggtatgacgttgacatcgctgcctctgcgcctggccgtaagccgactgctgcgccagccgtggtccacgttaagccagctctcggctttttcgctctcctttatgctgctggcgcttctgctggtgctgcgcggcgatctgctggatcgctggcaacaacaactgccgccggaaagtccgaactatttcctcatcaatatcgcttctgaacaggtggtgccgttgaaagccttcctgtctgagcatcaggtgatcccggaggcattcttcccgatcgtgcgggcgcgactgacggagattaatggtctgccgaccgaaggaaatcaggacgaagcgcttaaccgtgagctgaacctgacgtggcaggatacgcgcccggatcataacccgattaccgccggaagctggccgccaaaagcgggagaggtctcgatagaggaagggctggcgaagcggctgaatatacaactcggcgatcgcgtgacctttatgggcgatacccaggactttagcgcgacggtcagcagcctgcgcaaagtagactgggaaagtctgcgccctaacttcttctttatcttcccctccggtgcgctggacgggcagccgcagagctggcttaccagcttccgttgggaaaatggcaacggcatgctgacgcagcttaatcgcgagttcccgaccatcagcctgctggatatcggcgcgatcctgaaacaggtcggtcaggtgctggagcaggtcagccgggcgctggaggtgatggtggtgctggtcacggcttgcggcatgctgttgttactggcgcaggttcaggtcggaatgcgtcaacgtcatcaggaactggtggtctggcgcaccttaggtgcgggcaaaaaactgctgcgcaccacgctctggtgtgaatttgccatgctgggtatggtctccgggctggtggcggcgatcggcgcggaaactgcgctggcggtgctgcaaagccaggtgttcgattttccgtgggaaccggactggcgcgtgtggattattttgcccgtctgcggcgcattattactttcattatgtggcggatggctcggcgcgcgtctgttaaaaggcaaagcgttatttcgccaatttaataattaa

SEQ ID NO: 76507 - DNA, 1143 bp, Citrobacter koseri
atgacaataaaaaaaacagcgctggcggcatcgatcggcgcggcagtggcattaacgtctttcgcatctcaggcggaaatcactgttctgaaacaagatccacaggcgggtaatccgctgagccgtcttaacttcaccgttggcggcagtattcgtcctcagttccagaatatggctggcgacgacggtaaaaatggttacaaacgtaatggcttcgatggcggcacccgtttccgtttcgcggctgattactatctgtttgatgacattagctgggtcagctactacgagctgggcgttaacttcccggcgatgttcaactgggataatcactacgcagacggcgcgaacgacaccactcgtcgtatgctgtacaccggtctgaaaagcgatacctggggtacgctgactttcggtcaacagaacagcgtttattatgatgtggttggcgtgaaaaccgatatctgggactatgacatgattggtcaggcgccaggcaacggtatcaacggcgactatgacggttcttaccgtacccgtaaatccctgaagtataagaaaacagtcggcgacgtcgatctctacgcgtcttatctgttcagcgatgattacaacccgaacaacggcctgcgctacaagcgtaaaggcggcggttctctgggtgcggattaccacatcacggacgatctgacctggggtacggcgtggaactatacgcgtgcggaaatgcgcccaggtaacggcggcgacggtaaagactacgatcaaaatatcgttggtactgcgcttagctggacgccggataactggactttcgcgctgggcggcggctggtatcagaacttcatgaccaccaaacgcgtagacgcgcatgactactttgcgggtgacgcatggggtattgaatactttgccggttataaattcccgatcaaccagtatgcggtgaaatctattcagccgtactttatgggtgaccgtattgaatatgtgaacggccgtaactaccagcgtattgataatggcgtcggtattagcttccagctggattatggtttccgcgtggattacgaacacgtattcacctccagcaccgacgatctgggcgatatgaacctggttcgtctgcgttacgacttctaa

SEQ ID NO: 76508 - DNA, 1674 bp, Citrobacter koseri
ttgttcactctatataatatacgagattttagcagaatcgccagattagaagattttgaaaagatactttcacccagagaaggtcttaggttagctaaggtatactatgaacttgactataaaaaatatctgaactcaactttattcgatataccagaaaggaaatggaatgcagaacgatactctgtaaatgcgtatagaacaccatccattggtagatataatcccgtttatgatcagataaagcaaaaattaagaataggttggatagtagcagtagattatcatgaacattggtgctggagcaaaaatcctttctattttgatgaacaaggggaattagtttataaaccatttatgcctgatatattcgatgatagtttcaaagattatgtaatcagtgcgtatcaagaaaaattagatagagaacaaggaagaaaaccaagacccactaaaagggatcaatatggcgcaccaagttatattgagccagcaccaaaacagcttacggtagcaccaaggccatcctgcccggttgaggatcgtacacctgtagatgcagggttctgtgtactgccctatgaggtgaaaccatcaacatatgaaacttatattttcgctaacccaccaaagggaactcgcgaattatatagaaaattaaatccagatatgatgaaaaaaccaggttcgattttgattgttgttgatcctgaaaaacaagatcaggaacagatagaggcattgcaaaaagcacgagacaagattgataaagcacttgcaccattaacactgccagaagcccgattgttacatgaaaacaaaactgctgtggatattttttcctcgcaattatatagcaatgcattaggaacaagtggtgatattttaggatatataaaagattctggaggggaatattacaaggaaattaatgatacattaaaagaaattcaggaactatatcaaagaacatatagcaataattctggtgttatttctggtcaagagtttttcggtcaaagggctagattattcaaaaaactggatggtgttctcaatcgtttttcaaaatcccaacttaatttgaaacaatatgaaaatattaaaaaagctttgggcttatcgactagctctattatgcatcgctgggatcagactggagtaaaagatattgagggatacgcaagttatatagagaaatccgcaaaactaatcaaaataatgaaaacaacaggctatgtaggtataggtcttgattttgctagttatacaactaatgtttacgaagcttgtgcaaaaggacgtgaaagcgaatgcagaaaagcttcgataactgagtatagtaaattcggcagtaaacagacagtgggtattgttgcaggcggtgtcgctggaccagcagcaaggggaatttgtatgtggacattggggcttttcacatcagaagtgggtgcgatcggtgcgggactgtgcctggtaacaggaatcggtacgggaattgtagctggaaaagttgcagagaaaaaaggtgaaagatggggggggcgtttgggagaagctattaatgatacgatagataaaaattcagataaattaacccattcacccgataagtttaatgaagaatcaggtatgttgatatatgaaaaactttttgatggaaaacttcgataa

SEQ ID NO: 76509 - DNA, 417 bp, Citrobacter koseri
atgaaaaactttttgatggaaaacttcgataatatacaattgttatttattgtggctattttatttagttttgttgtactagtatttgtttcatatgtaattaataaagatagctatgaaaaaatcgtgaaattatatgaggaaaaatttgaccatttacctcagacagcgcgtatggcaaagggagcaagtttgattggttccccggctgcatatcatgcaaaaattggttttataatgggtagtctaatatttccatataatcgcgttacaaataatgatatgagcatggaaggatataaatttattcgcagtttacctggtagtctgattacaggctttagagtagaagcgactgtttggtttgtattgattatactaatatctggtttgatttgtattgaaaatatagtgtaa

SEQ ID NO: 76510 - DNA, 1944 bp, Citrobacter koseri
atgaggcagtttacagctttgcagatagcacaggcccgacaacgagttacgccggaaattattcaggcgctcattgccaataataacgacgttatttataaccctgttctggtgcctgaaacaggatgtgccacctggaatcactactttttctgcccgcagcatagtgtgcgtttagtctgggatcgccgttcaccaaaacggcatcattgtcccattgataatatgcccttttctggtgagccttatgatggtgcatggtggcgctggctgaacgggcttaatgcgaaagcctgttatgaagtggcggtactctggttattaacgggcgaggagagctacttgaataaagtacgggatatactgctaggttatgcccgttattaccctgattatcaggaacatggtggtatcccgtacaacggcccaggtaaagctaacgcacagacattatgcgaggccaactgccatatagattttgccagaggttttgacattatacgcacaaagctaaccgcagacgatgaggcgtatatcgctgaacgccttttgcgtgtcggtgctgattttttgatgaaacatcgcagtaatcaaatccataatcatgaagttaaaattaactcagcaattggtattattggcgctgtacttgatgaaaagagctatcttgaatttgctgtcaacagcaaatatgggcttcgctatcagcttgaacatgccttaatgcctggtggtttatggtttgaaggttcgttacattatcatttttatgctttatctggttttatggcatttgaaaaagtagcaagaggttccggttatagtctactggaattgccacactatcaaaaaatgctggatataccctttgaacttcttctgccggatctttcgcttccaaatataaatgactgtgttaaaggacaggaaagattcaatcatacagatatttatgaatttgcatggtggtactatgggaaattaagttatggagaattactttcccgtatttacaggaatgattcaaaaggccatattgatgttttattttatgggagagaactacctgaaacacagcttattccaccattgcaaaactctcattctccagaaaatggcctgacaattatcagaaataagtcagggagagccatttgctttaattatactccctatggtggagagcatgaccattattgttgtttaaacctgatcgtatttgataatggtaaggctattttcccggatttgggtactactggatatggagcgccattgcattatgattattataaaaattcattttcacataatacggtttgtattaacggaaaaaatcaacctccagtaaatccagttatcaaatattataaagatgatagtagctgcgtgcaaattatcgcagaagctgactggaaaaatccccctgtattgccagatagtaagattcgcattgaatgggataatgaagcatataaagatgttttgtttcgtcggaatataatctctaaagaggatattattattgatatcataacaattgaaaacccacataatcaaactgtagagacaacatatctgatagatgcagatttagctgatcctacagaatatgataaatacagtaatgtttcagataatgatattttaatgggtacgggtgttcgtttggttggttcaactaaagtcacctaccagtcacttaataaactgaatgtttattgtatgtcattagggaatagtgttctattccagaaaaaagtaccaaataatccatcaacatcgaatctggaaagcatagttttgagatcaacagactcaaaaatcactcatattgttgttactgatttttcaggtcgtgatgatgtcaaactaaatattcatgatgaatatttaaatattctggtaagtgatgttaacgttatttcggtttctatagtatga

SEQ ID NO: 76511 - DNA, 1224 bp, Citrobacter koseri
atgaaccgtaaaacaacttatctgatgttaacaattttcagcgttatctatgcttcatcatccgtttttgcagaacagcgtgacccttgtctgacctacgactgcgcacaaatgctcaatatcaaaaagagcatcagcgaaaaagatcctcgctatattcctgcatggtcggcattactggagcaggccgatgcagcactgaatcatcctgtttattccgttatggataaaacactgactcccgcatcaggcaataaacatgattactacagcttcggcccatattggtggccgaatcctgatactcaggatggaatgccttacatacgtaaagatgggcaaattaatcccgattcgaaaacaagcgccacagacagtaaacgcatggtgcagttttctgatgatgttcgtgctttggcgctggcctggttttacagtggagaagataaatatgcggagaaagcccagcagatgcttcaggtctggtttctcaataaaaatacgcgtatgaatcccaacctgaattatgcacaggccattcctggttctgttgatggtcgcgggattgggattattgacactcgtgtattgatcgatattgccgacagtattgttttactggagccatccggtcatataacgcctcagacgctggcggggtataaaaagtggtatacagattatactcaatggcttctcaccagtcgcaacggttttgaagaatcaaactggtacaacaatcacggtgcatggtacgacgcacaagttacagctttctctttgttcacaggacaacagcagcaggcacaaaggcaggtggagatattcaaattgcgtcatttggcatctcaggttgatgcaaatggtgaaatcacttcggaaatcgagcgtacccgttcattccattacaccaattttactctggcggcttatgtgcgcatggggcgctatggcgaaacgctgaaagatgatgtgtggggattctccctggataaccgctcgatgaaaaaagcatttgccgtggtgagtgcgcaaactggtaagccgcagacaagctggttacatgaggatatccattacacgccctctgaagcaacagggccagtgctggcggcagccagagcctggcaggatagcgactttattcagaatgcggacgtactgacaaaaacgtataccagggatatcaatatcctcatccccggttcgtcgctggtgaaatag

SEQ ID NO: 76512 - DNA, 699 bp, Citrobacter koseri
atgaaaaaaactatcttattactttctatttgctttttaccgttagccagtcatgcaatgacttttgatatgcgcggaggatataagcaagccagccatacttatgagtcacgatttaaaatgagccagagttttaaatcaggatactggttaagtatggaaacggataataagcaaggaaacgataattttgaccagtcagcaacagactataatgagattgaaggcaattacaaatatgccttgaatgaattattttctgttcaaccgggtatggtttatcactggggcagcgaaggcgctcaaatccgcccttatgttaaatttaattgggccatgaccgaatcgttatattctgcaatacgttttcgttatgactggaaccaatatgattcgacggatctttctggaaataaaaacaaaggtagtgtagaacgcgttgatctgtatttcggatggaagaataaatactgggatattcaggataaccctgttttttaccgctatgttaatgactttcattataacaacggtaagaagaatggttatgaaaatgatttggtaattagatacaaacttaacaaaacatggcagccatatattgaatgggattatctggagcaacagggaaaatataacggagaatccgggctaacagaaaaccgtttccgtgtcggtgtttcgattaactttggttaa

SEQ ID NO: 76513 - DNA, 1257 bp, Citrobacter koseri
atgaaaattaagaatctacgctggtacatcatcatactcgttatgctaggtacgattacaaactatcttgcgagaagtacactaggagttgcggctcccgaaatgatgaaaacgctgggtttatctaatgagcaatattcctggatagtttctgttttcccgttcacatacgctataggcgggattgcttgtgggttcatcattgataaattcgggttgcgtttaagttttgctctgctcgcggcattgtggtctatcttcaatatgcttaccggattatgcagtacatggttgcctatggcctggctgcgtggcggcctgggcttaacggaagctgcgtttaatccggcagggatgaaagtcaccgctgaatggttcccggcgaaagaaagaggacttgcatgtggtatttatagtctgggaacttcggtcggtgcgatgctggcccctccattagtggtatgggcaatagtcaactataattgggaaatgtcgtttgtcgttacaggtgctattggtattgtctgggctgttatctggtacatattttatcggtctccagaaaaacatccggcattaataaaatctgagcatgatgctgttttgaatgatcagattgaagtggtaacggaaaaagccagccttcgatctattatcaaagatcgcaatttatgggccatttcacttccccgatttatggctgatcctgcatggggtacacttcattactggatgcctttatacctggttactgttcggcatatggatatggcacatattgctctttatgcctggcttccattcctgacagcagattttggctgtatatttgccgggtatgtttcccgcattctggtaaaccgtggtttttgtgtactgaatgccaagcgtataacgtttacctttgccgctatattgatgttatcgatggctggcgttgggtatgtcactaacgtttatgttgcacttacattattttgtattgcgggttttgcacaccaatgtttatctatcactgttatcagtatgtcgtcagatttattccctaaaaagcaagttgctacagcaacagggtttgctgcgtttactggaagtatggggaatttcctttttggtcttttcctcggtgcatcagtaactgttattggttacaacgcgttttttgtagggttggggatctttgatcttattggtgctttattcttgtgggtattaataaaatcgcaaaaaaaaattaatcaaccaatagctgtataa

SEQ ID NO: 76514 - DNA, 684 bp, Citrobacter koseri
atgaagattctgatagtcgaagacgagaaaaaaaccggtgaatacctgaccaaaggtctgacggaagcgggcttcgtggtggaccttgcggataacgggcttaacgggtatcacctggcgatgacgggagattacgatctgctgatcctcgacatcatgctgccggatgtgaatggctgggatattgtccgtatgctgcgcaccgccaacaaaggcatgccaatccttcttcttaccgcgctgggcaccattgaacaccgggtaaaaggtctggagctgggggctgacgactatctggttaaaccgttcgctttcgctgaactactggctcgcgtcagaacgctgctgcgtcgcggcgcggcggtgatggtcgaaagtcagtttcaggtcgcggatttgacgctcgatctggtcagcagaaaagtgacccgcaacggcatgcgcatcacgctcaccagtaaagagtttacgctactggagtttttcgtccgccaccagggagaagtcttgccccgctcgctgatcgcttcccaggtctgggatatgaactttgacagcgataccaacgcgattgacgttgccgttaaacggctgcgcgcgaaaatcgataacgagttcgaaccgaaactcatccagaccgtgcgcggcgtgggctatgtgcttgaggtaccggatggtgactaa

SEQ ID NO: 76515 - DNA, 180 bp, Citrobacter koseri
atgggccggatgagatgccatagcgtattgaatggtgaattatgtttatcttttaaaatcaagctattactgttgcgtggcgaatattttgtctttatcgccgcaaagaaagtaagccttaacaggttaatttattttaagtgtttctgctcaggttcattattattttttccctcctga

SEQ ID NO: 76516 - DNA, 966 bp, Citrobacter koseri
atgaagcagcaggctggcattggcatccttttagcactcaccactgcaatgtgttggggcgctttgccaattgcaatgaagcaggtgctggaggtgatggaacctccaaccattgtcttctatcgctttttaatggcgagcatcggcctcggcgcgatcctggcagttaaaagaaagctcccgccattgcgtatttttcgcaaaccgcgctggctggtgttgctggcgattgcaacaggtggacttttcgggaatttcatcctgttcagctcttccctgcaatatttgagtccgacggcatcgcaggttatcggtcagctgtcaccggttggcatgatggtcgccagcgtctttattttgaaagaaaagatgcgcggcacgcaggtgattggcgcgctcatgctgctttgtgggctggtgatgttctttaataccagtctggtcgagatttttaccaaactgaccgattacacctggggtgtgatctttggggtcggtgcggcgacggtctgggtgagttatggcgtcgcgcaaaaggtgttattgcgtcgtctggcctcacagcagatcctgtttttactgtacactttatgtacgattgcgttattgccgctggcgaagccgggggttatctcgcagttaagcgactggcagctcgcgtgtttgattttctgtgggctgaatacgctggtaggatatggcgccctggcggaagcgatggcgcgttggcaggcagcgcaggtgagtgcgttaatcacgctcactccgctgtttacgctgttattttcagatctattatctatggcctggcccgatttcttcgccagaccgatgttaaaccttttaggttatctcggtgcgtttgtcgtggttgcgggcgcgatgtattccgccattggtcatcgtatttggggcggtttacgcaagcatgaaacggtggtttcgcaaccccgctcaggcgaatga

SEQ ID NO: 76517 - DNA, 2340 bp, Citrobacter koseri
atgatttcttatttttatttactctctttttctgttttgagtttggtgctatccgcgctaatctatcgctataaagccagacgtaatacttactgtttatgccttatttttgttacggctgtagctgctgtcatcctggatgcgttctggctcgtatgtcagcgatttacgggagatggcgttaaccagtccgtactgttcacattaacgaatacacttgtaggtgccgatattactgactttatcctgccgatagcattgtcggttgtgggaagcggttttgtttttttcttactctatctggtgtttcattacagactgcctgcacgggagcggcatagcctctactcgttgctggcctgttttcttgctgcaatgtcacttattacttcgccaactatctcacaagttaatggtagtaccttgttggcggagcgtgtagatggctctgatttcgataagtattttgtaaaacaagaatcaataatatctgacccaaaatataatctggtatacatatatggtgagagtctggaacgtacttattttgatgaaagcatttttccaggacttctcccagatttaaatgaaattcggaaggggagtctggatttttcaaatacgttacaaatgcctgcaacggattttacaattgccggaattgttgcttcgcaatgtggtatcccgttatttaaaccgacggcatttagcgataccaatgttgccagtagcttctatccaacaaatatttgtttgggggatattttaaaaaaatcaggttatgagacctggttctatcagggagctaacctgcgttttgccgataaggatgcatttttccatatgcatggaatcagcaatatctggggtctgagtgaatccggcctgcaagatgatttttcagttcaaaataactggggtctttatgacaatatcgtgttggataaagcctgggaaaagtatgaagagctgtcagcctctggtaagcattttgcgctatttacactgactgtggatactcatccgccaaaaggatatatatcgccaggttgtaaacagaatgactatcgtatagaagggcaaaaagttgatgccctgagcgcggtgctctgtagtcaggaggatatcgcacgttttgtacatagaattcaggcatctccatgggcgaaaaatacggttatcgttcttacctccgatcatttagctatgcccagtactgcggtttcagttgactatctgaacaagcataatcgtcgaaatctcttttttgcgttgggtcatgatattaaaccacgtgttgaagagagagctcgaagttcgctggataatggcgcaacagttcttgagctgcttggcggtgggagggaaatcgggttaggtcggagtacattgagtggagactctttggctgaaactatcccggacttcaaaaataaactttatgcctggggtgacaagattcgtgctctttggggcaaccctacgcatatcgaacgttttcttgttgatgttagcggaaaaaaactctcttttgatgattatgtttatgatttgccattaattattaatattaaacctgaccaggttttacctgtcattgatgatgggagtaaagagacctctctgcggaaagcattagcattattgcctgagggggagctatttctctgggtagataaatgttatcgtgccgggaatatctggaaatcgagccttgcgctctcacaggagtggtgtgtggcacaagggagagcgggaggggatattcgtgttgagaaagtgactagcgaaagatacgaagggatagtcatcgatgatgattcacccacaaatactgcacgttatcgtaaagatcaaatgcaactgcaaattgatcctgagaatatccgttactcttccgacacgtttatttttgcactggatgggcaaccctggtttattgaaaatatgatgggagtaggtcgtcaggagccatggggacgttggtcggatggacttattgcaccgtcagtgttgttactttataaggcgcctttcccacaagagtttgatgttgtgattgaagcgaaagcatttggtaaaaatattaatgcgcctgtagcgataaaaattggcaaccaaacgcaatatgctcgctttggtaaagagccaacaaaagtaaaactacgttttaggggagacatgtacatgcgtttgttgagcattacgccacctgaaccgcagctcagtcgtgaaggtagtgtattgggttcgtctactgcttcacccgtgcgtaaacttggcattgggcttgtcgagataaaaattgttccggtggtcaaaggtatgatgccagactaa

SEQ ID NO: 76518 - DNA, 168 bp, Citrobacter koseri
atgagctctttttacgttcacagcagatatgacacgacaatacctgagataattgtgcggttcccttttatagggtatcaattaaaccgcttttacggcgtccgcaatacgatgagcaaactcagtaacctgcgcttcatcctcgccttctaccattacgcgaattaa

SEQ ID NO: 76519 - DNA, 711 bp, Citrobacter koseri
atgaactctttagtttggaaattgaaaggaaacatgaaccgcaaagcggctaaattacaagaaatgagaaagcagcgtggtgtgacgttgctggaaatcattattgtgttgggcattatcggtgttattgcggcgggcgtggttattctggctcaacgtgcctttaccgcacaggatctgtctgatattcagaacaatgctaacagcatccgtacttccatggttgaagcgtttaaagatgaggggagctatcctaagtctgactctatcgttggtctgaccaaatcaactatcgcttcttcaacatccactaccccaatcgttactctggttaaactgggtaaaatctctccagacgaatcctttaacggcctctctaacgatgcgttccagattggtaacgcgaagattgatagctcttcatcaatgaataaaggttttgtgtttgtagttaacggcctggaaacagaagagtgccgtaatctgatttctgaaatgggtaatcagtgggattatgttgaggcattaaatgctaatgccgctgccggtaatgatgtgtcttccattgacggtagagatctgagcgttgcgaaaggcggtgcgatcctgaagaccctggtttccggtgaaattgcagcagcagatatcgtagaagacggtatctgtgatggcgcgggttccgttaacggcgtgatctttggtagcaaataa

SEQ ID NO: 76520 - DNA, 1890 bp, Citrobacter koseri
atgcgtagcagaaaggattcgggcttcagcctactggaaatcattattgtgttagctattacaggcggcattctgatgagctataccctgtatgcgcgcaagaaagcagaaaataccgcacagcagaatgttgccaatgcgttagttgcggaaatgaaaggtgttattaacttcgtcaatgaagatgagattgctatagttggtaaagataaaataactaatcctctttatgacaccaaaagcggtattgatccttattattcatcgcgcattaccaattcgttggatgatattaatactggtgatgccaatgactattttttatggggggatggaaacagcaaacagaagcaacaacgctatctcttcctgagtaaagattgtgaagttacaaataaatctgagtattcttttgaaaaggaatatcttccatgttttatgtctactcgggcaaaaaattcacaggcgacaatcgaacgtattggtatggctggtggaaccgtaaccagtcgtaagcaggatgttaaccgtattgatgctattgtcagatttactaagtatgagaagaatggtgattatcagtttgctgattatgctccacattttatgaacgcattagctgccgcaggcatcagtgcctcacatgcaatggttcttcatcgtaattcttcttccgcgaactggaacgtcgttgtacagaaaaaggataacaaaacgccggttgagtttggaacaatagccagcaatatggatgcgattacacaatataccagtggtgagtttggcattcgttttacctttgatttgaatgataacacaaatggtggcggtggcggcggaggttctgacacatgctggacttcaactgacgataacgtaaagctctgttatgacaaaaatgacggacagggtgagcatggtgaagatgctgttctcgcattaaacatgacggataaaactaacgaaaacggtaatgaaatggcgggaacgttgaaggccaatatcgtaatggagaatacatcacgccgggtctatatgtttaaacgagtatctggcggttctctggatttagatggagaggggaatccgcagcgttacacgtatcgggatagtgaaggtaatagttatgaaggagacctcgtcatgactgatgaggttgcgagggattatgttaatcctgagtatggtagcgaggccaactatgaggtttatgctacaaaaacgtatgatgcatttgagttacttacgccagtcacgagtgaatatcatgcttttaaagaaataggacgagacgtaacggatgaggaagattactatccaaactatgatgatgccagtctgagtgaccaaaagacagactatggcgctatacgcatcccggtgcagatctgcccgcaggttaaacaatccattgcattaagagatgatagcgggaatttaattctggacggggacggggagacaaaaaaagtagatatagttcgtaaattatatccacgcctgagtgcggcgatgtcttcagtaactgcttataatatgaatggcataactacagggctaaaagatccctctcaagcacgtaatcggcttgatagctcaaaaataatcagtcatcttgctggtgtagcgacacaaatagaatttaccttaaacaatgacatttatcgtccgggatcgtcaggcatcaatacagctgagaatgttgtctacgaagatactaaatatctttggataattagcgcatcagtgggtttatatgacggaaattctggtaaaggggcgacgcttgtgaatccaccggatgttgcttataccgtttctcggtggtgtagctctattccgcaaccaggaacgcctgctgatttattagaaacatatcaatataaataa

SEQ ID NO: 76521 - DNA, 441 bp, Citrobacter koseri
atgacaatgggaaaaaactatctatcgtatatatgcctgtttgctattttgggaattacaagtagtggtgtgtctattgccgctcaggcttcattctctacatcgcagaatgttgaacttgagcctgctcagagtattcaaccctcgtctacagtggggaaaaacccattcagcggttcagccacccaggttaccgcagcgatggtattacatgagaaccaattgctcagtcaggaaataacatcctggggtgtcagtagaggttataaactctactggaacagtaagaaagattatcttatttacaatacaattagtcttactgggaaaaatgatgatgagatcctacagtcattgggtgaactgttcttctctgaaaactatggacttgttgtaaaaaaatacgaaaagaatcacgtcatcgtcattgatgaaatgtaa

SEQ ID NO: 76522 - DNA, 1461 bp, Citrobacter koseri
atgaaactaagaacaggtatgttgttactggcattcttatcacaaggatgtgtaagtgatttcaataagaaatatgacattgataaaaaagtaaaagaacaaacatccggtacgacaacaacagactcggcaaagacgaaaccatttattaagtatgactccgctttcctggggaagaaggttcagtacagcgttgaacagcaaaaggtaatgagtaagcatgtgaaaattgcatcttatgagcctgcgccgctgtctaccattatggaggctgtctctgcgcaaactggaatcagctttcggattaacacctctgctattagcagtaaaaagagcggagcgactgatgattcatgggatattccccgttctgttcagtttgatggctcttttgagggcttcatgagttatattgcttcgctctatgatgtgagcactaaacttgatgaaaataatgtactgaaaattaacgtgtttgatacgtacgttatgcgactggatttttatggtgagaacaataagtctgaaacgacactcgatctttctggtaatcaggcaacgtcaagcggtggtttgaaaggtaagtctgaaacaaaatttgaatcatcattttgggatgatgttgaagacatggcgcagaactatgtgacatcaggaaattatagcttgtttaaggattcatcgattctgatggttaactcacgtccttcagaatacgaagcgttgagccgagctcttgataagtataaagcggacaacagtcgtcagtttattttaacttatcgtatatatattctcgataagttaaaagagaaacagctgagtggtggtctggatttgagttttattgatgctcataataccattaatatcaatagcagcttgtttgaaaatctggccggcggactctctgctggatggaaaaatagtcatattgatatcaatgctggccttgatgcactttataaattgacgggaagtgaatcactgcaaagcggatcattcattacccgcaataatatggctgtaccagtaaacatgacgcagtctcagttctatgtttcaagcagaacgcgcacgacggatgataatggtgaagtaaatgtggatgtggaaacatcagaaatcgttacaggtactagctttatcatcacgccgcgcgtactttcagatggacgtatcgaagttgtcagcgggtttacgaaacgttatcttaattctattaatgaatatgacgatgtgcagttgcctaacgtaagtactactgagtcttttaactcatcaattattaaacctggcgatctattggttgttggtaaatatgaagtgaaaaataccaaggatggtttggaatatcaggttttgggggcaagtgacggaacaaatgaaggggttgctactgttttgatggtggttggtgtggattattatcgtcaaccaatcacctcacgcgatgactga

SEQ ID NO: 76523 - DNA, 543 bp, Citrobacter koseri
atgaataacattctgttgaaaaataatatcttaaccgggctttactgggaaccggaaaatctaagttatttacagcctgcagaacaggcctcatttcgcggaatgatgaaagctaatcgtcgtttagtttacagtgacgcctccggttctcctgcgttaggatatagtaccaaaatttcaactttatatgagccgtttgcgctgtatattaaagagctttttggtgatgggatttatttttttcacgaaagtaatcagtctacctattttctgataataaatgaaggtcgaattatcagtggcacagattgttttattagtaagttgctttttgatgaattaatgaaacatcctgcaggatacgaacatctggaggttactcctttggaagaggtgcaaatcaatgcggtggtcgagcgttgcgttgcccggcagctggcgttgaaacgacgacgtcgcgtcattattggttcaatctttctgggcggcgtctcggttctgcttctgttggcgttggtgcttcatttttttgtggctgggtaa

SEQ ID NO: 76524 - DNA, 873 bp, Citrobacter koseri
atgtcaggggtgaaattgctgttgatattggccgtctttttattgctgctatgtgccggtggtgctggagggtggtactactttgtaaaacttcccgcacagaaagcacaagaggaagctctggcaaggcagcgtcaggctgcggaaaaactgcaaaatgatatatctgctgttaatgccttttatgcgaagtcacttgagggggcggctctaaaacaaggcattcggctattggcagagatacgttcgagccgggaaagtttgagtattctcgctattaagcgcgaatcttttaaatgtgatgctaaaaattgtacttttggttatgactatcaaccgggagaactgttgatattaccgcaaaaaacattttggggtaagagctataaagcgtccgtaacggtgagtaaaaagaaggataaaagtaataaaaaaagcgattttgagtataagggaattgagtccaggttaaatggtaatacacttcagttgttatacaaaagtaaaaagaaactggatttgtatccttgtgataaggttatttcatatgttttaacttataattcttttgtaaaaaattcacgtagagatagcaaaggaaaagggacgggagagattgttattaagggaatgcctaaaagctcagttagcgatcttgaatcacagttaacaggtaaagtgaaagcgtatggattaatggctggtacctgggaacttgagctcaacggtaagagtaaacgtgtcgatgatagtactttgaatttacaggtgatgctatatcagcaggcgtacaatgatgcttttctcattaaacggattgagtcgacaaataaaggaattaaagtttcaggaggtctggtatgcaaggtctga

SEQ ID NO: 76525 - DNA, 651 bp, Citrobacter koseri
atgcaaggtctgaaattaactgttatgacaagtgtcttttcgctcgcaataggcacggctgttgctgcaccaacaacagaattgccgaaggtgcctgataatcaggctaaagaaggtgtctctgaatctgtagtaacgctttctactgaggctggcgctaacatacctgcgactaaaggaacaggtgcgatgatacctgacaccagtatggtatcaagtaaaaaagggaattcgtcagaagcggcagaacaggcgaacgaggtggtggatgctgggacgcaaattgttcaggaacgtctggccggcattgttgaagataattacgcttatgagaaggctcgtcgccagttggaaagtgaacttgagcttgaaaaattacgtagccagatcagaaagttacgtggtgaagataagatgcgcccgccctctgttctgacagaacctaaagcgccagttcagcaagctgctgctgttgctataccgcgtgttgtacttgaggctgatattgctggttcgcagcgtgtcgccgttagtgatggcaacgcattacgttatgttcgtgctggagagatcttctcgatgggagggaataatttcaaactcgcgaaggataagaaatcggtaattcttgttggggatgcagtgcagtga

SEQ ID NO: 76526 - DNA, 1539 bp, Citrobacter koseri
gtgagtctggcgtttctgcgtatatcttctgacgagctactggctggcaaatggacatatctggaatttgaggggattggctttacggccatgactgacgatacagagtatttgttgatcactcatctcgaaatcaacgatctctttacttatcagatccagatatcacgcctgatttctcagcataaacgccgggttgttggcctggcgcttgttcatgaggaagattattaccgtgtgattgagttcgtttcgcttaagcaaatcaatgatgcaaataaagatattaacatcactgacacgcaaaagcagttggctgcgatcttacaacgtgcggtaagtatgggggcaagcgacctgcatattacacggaacgatgtattagctcagctcgaagcacgagtgaacggcgtacttatgcctttcgtgcagataaagtctcagctatgtgatgaactggtttttgtattatataacgtagaggcaactacgcgtgatacgacatggaatcgcgcaatacctcaaagtgcgaacatcctttataaccttggtggtaaaccttatcgtttccgttatgcgcattttcctatctttggcgaaacacctgattgctatcacgcagtattgcgtattattccatcaggattacaaaagggaaatattggtacgctggataaaattggcatatcaacagaggaaattgacgatctgaaaaaaatcctcagtaatccttatggtgcttatgttattgctgggactacgggatcgggtaaatccaccacactgaagaatctaatggaatggctgcaaataaaccgttatgaagaccgaggctgttttctgacggttgaggaccctgtggaatatcagatttatggtgctaaacagagttctgtcgttagcgttgaagggggaggatttcatgctgcgattaagtcggcgttgcgccgtgatccagatgtcctcatggtgggggaaattcgcgacaatatctctgctaatgctcttgctggcgcagttgagagtggtcactactgcttcaccaccgttcacgctggtaatatcgtttcgttactacagcgtatgtcagcattaggcattggtagtgacaaactttctacgccagggtttatcgctggattgcagtgtcaaaaactcgtacctcttttgtgcgacaactgcaagacagtattggaaaagcgaaatatcgccgggcgtcagttcactgtctataccacaggagaaggaggatgcccccagtgtaagcatagcggcattaagggtaggcagttagcgatggagtattttctgccgacttatgaggagttggcggctattgcaaaacaggagtggttaaacacattcactctgtggcgcaataaacggcatatcgcgtcaggtctgacggaaggctttgagatccgtgaaaaggtgatggcgcatgttctgaacgggcgcgtcgacgcgagttggtatgccatggagtttggcacaatggcacaagaagaactggagataatcgttgagaaaattcggtaa

SEQ ID NO: 76527 - DNA, 1029 bp, Citrobacter koseri
ttgagaaaattcggtaaaaaacagcgcctgtatatataccaattttgcgctgatatgattaaggcgggtttacctctgtttgactctttgcaaaaattgcagttggagggacgccctcttcttggaaaatctttcagcaataaactggctgatgtgttaacgaacatgaagcaggagacctctatatcgtcggttttttccggtatggttcctaattctgaattaagtgtaataactgcagcggaaaaaagtggtagtctggcagatggttttttaacactggtttctgtcattcactataatgatgagttacgcaaaaaaataatcggtgcacttattttcccgctaattatgatttcactgtcattagtggttattgcaggttactctcaaaaagtattcccggcgtttgcttcagtagttcctgtcgagacctggcctggtgtaacgcagagtttatacaaatttggctctgccttatatcaagggctatggttaaaaatccttattggattcgttgttgtggtgatactggttagaataatgatggcgaatcttagtggagtgatacgaaataaaattattgataaggtacttccattctccacttatcgacagcttacctcttctatatttttgaataacttatcattgatgctgggtaacaatataccgcttactgatgcactatcaattatccgcctcaatgcgaatagatggcttcgctggcaccttgatgtcatgatcgataatatggcaaaaggtattcactatagtaaagcgctatcttcaggattgatgggcgttgaggaattgttaaatattagcctgtatgctgagttaccgtcatttaatgatgtgctgcgttctgtgtcagagcgttcaagggaacgtattcaggaatatattaaaaaactttctggactcttaaagaacctggctacgataattttaggtggttgtgtaatatgggtattcattgctctttttgcactcatggatacattgtcgaaaacagcgggtaaatga

SEQ ID NO: 76528 - DNA, 795 bp, Citrobacter koseri
atggtgaaaaaatacgctctgaaagtttgtacagcatttgtggccgttgtttcgttattagtatcaacgaatgtattggcaaaagctacttatggtttcggctcggcaggtgctggatgtagtctgtggacgatgctatttcccatctcatttcaacagccaaacaatgacatggctgcttatttttataacattatatggattgatgatgattccattaaaggaatggatgaatattatgatttttatcagacaatgtataatcagtctgcatggccgtctgctgtggcaacgggaacggacacgccaaagtgcagtggagcgacggaatgtcctgttcttgattctaagctggcgccgaagggatacgtgacctctgcttatgacgctatcaaacaaaaatacccttctgacacagtaaaaattagtacaggccaacccattggttcggggggattaacctggcgttatctgcctgtccgtaaattaaaattactccgtattgaagtatttatacaccagacgcaatattctccggctgtgaaaactttcgctgagcctatttattttgagtacagagcaacagaaaatggcaccgaactaaagctggcagagcaggtgccaaatacagcagatatcatacttcccgagacgtttagtcctgtattaacttcagatattcaggtttggtttcagcgaacaggattagataactttactgacatcgcgtcgaaagcacatatagatcctctcagtacaacgcaaatcgagcgtgtacctgaaagttgtaaataa

SEQ ID NO: 76529 - DNA, 840 bp, Citrobacter koseri
atgcgcatggaagcgtttttggcaccgtattacccatggttggcactggctttaggattattgatcggtagctttttgaatgtggttatttatcgtttgcctgccatgctgttacgtgagacggcagatgagaacacgttaaagacattaccggatatgaatctttggtggccaccttcacattgtccagcgtgcaagaataatattaagccatgggataatattcccgtattgagctggatttttctgcgcggtaagtgccgatactgccagtgttctatttcatttcagtacccattaagcgaagcgttggttggaatcggttttttcttgctggtgtttttttactatccgcattatggcctggtacagttggtatttctggcactcttttttagtcttctttatacgttggctatgattgatctgaaaacttttctattacctgacggtttagtttatttgttgctgtgggcggggttgatcgcatctgtacgaaacctcattcccgtttctccgcgtgatagtgtggtgggagccgtatttatctggattttcacgtggctgatggcgcagggatatacctggattgtcggtcgcgaaggctttggtcttggcgatgtaaaattattttcggcctgtgccgtttggataggtaacgataatatcgcacatttgatgttgggatcagccgtaatcggtgtgctcttctttattttgcgttggattatgcagaaaaatggcgctcgtcagaaaaatgaagccacagactatctgccttttggcccggcaatcgctattaccgcatttgtcatcatgcacatggaggtgctgcgttaa

SEQ ID NO: 76530 - DNA, 1179 bp, Citrobacter koseri
atgtctttcttgcttttgtcaggggcgttgttgacgcttaaccctgtttatccgattggacctgaatgctattacgctacttatcaggcattaatgcaggtgaaaaaagcggacaattaccgttcaacgatgggaattatgccgccaggcaataccgtgggctgtaatagtgaggctgaggggatcgaactcgcgatgctttccgactatgaggcagcttttgattttgcggggaaacgtcaatttttttttgatgagaatgaacaacataacagtttcaattattcacaactgtttgttgatagacctgttgtaaatcttgcgatggaaagcgtgactaatgtggttacagagtcggtaatagaagacgatcgatcgctaactgaagaagacagtgttatccattctaatgatggtgatggcggagggagtgttttcagtgtaatgaatgcgacaattccaacggcgagtgctcctcctcccgtttggcaaccattattaaaacagacgcggtcggagcactttatattcccacttacgacgcctttgtttgtgacatccccttatgggctacgttatcacccagtgatccattcattcatgcgtcatgaaggtacagatttccgggctgcaagtaatagcgaggtgatgtctattgctgatggcgttgttcttgaaacgggttatgggccggtaacagggttctttatcacagtgcgccatgctgatggatggagtagtcgatacctgcatttgaatcaattgaaagtatctaagaatcaatatgtacaaaaggggaatgtcattggtctgaccggaaataccggacgtacaaacgggccacatttgcatctggaaatgagccataatgatcggttactggatcctatgacgattctatttgagcaactctcgtcggcaacgcctgttgctgaggcagtgtccaaaccagaacctgttgtaccggaatccatagatatgaccccaaaaattgcagtagttgcaggggaaggggagcacctacagataggaattcgtattggtcgcagaatgtcaatgtatcacccaaatgagatgattgagacagatgacggcaactggaggattgttaaaaaatttggtaaatataaactattgaaaattgagacttcatcccctgagaagaagcgctcattttga

SEQ ID NO: 76531 - DNA, 339 bp, Citrobacter koseri
atgaaaaagtctatatttataacattgcttagctatatggctttaactgcaaatgcattttcagccgagttaccaccgattatgcaactggtcaagaagacgcttgaagagaaaaagcttcttgtatctccggaatgtacggattacctttatataccagacaatgaaccgggtgtggatgtagttaatgtcgttgaaaaacacggtggaagttgctcgggcgatccacaaacacaacccagattattcagtgtctccgtgggtaaaaaaacacataagatgaagtcggatattaatgatcctgaagatggtactctttctcctcttccagaaacgtaa

SEQ ID NO: 76532 - DNA, 144 bp, Citrobacter koseri
atgatcctgaagatggtactctttctcctcttccagaaacgtaaacgctctcttctgacaatgttgacgcaagaatcaggtaacaattactggatcgaaggcatttatcatgattactcctgtttatctgaacgggtagcgtaa

SEQ ID NO: 76533 - DNA, 222 bp, Citrobacter koseri; identical to SEQ ID NO: 72367

SEQ ID NO: 76534 - DNA, 1953 bp, Citrobacter koseri
atggcgcagcgtgataatctctatcgacgtccaagcggtatctatgttctgcggatcaccgttccggttcgttatcgcgccctgatagggcagcgtgaaattcatgcatctacccgcataacccaccttgcaaatgccagagctattgccgcgcgtttgctggagaagtggtatgcgtctctggaagagttcaggcaagtggataaagagaagatcaggggcaatgctccattgttgactggcgcaggtaaaatcagcctggcgttgttttgtgattcatttggggttggggctgagactgtcgtccagcatcttctggcagccaatgtgccgctgtatgcccttgtgtctaaccagcgtggctttctgattgatgatttcagcacgcttgagcgtgatcctgatacgcatgggttcgttttgaataacattgcgtatgacggtgctgaggctgcggtaaacggctatatgcagctttaccagccgcagtttgcccttgttgaattgctgaacgggcgagaggttgaggttacggcattcagggctaacaacggcaatcctctttccctctggttgttggatttacccggggtgacgctgaatgcaagttctttgttcatcaacaacgtgcaggctgaaaaactgcgtagcgcttgggataaggcgcttgcgaaatcggagccaatattaagtgctctgccatgcgctccggtaggtgtaacaccagcgattcctgtggccgctaccatcaacccgtattgcaacccgacatatgcgagcatgacggtttcagcattgctgaaagcgtttttggtctataaaaatacgggcgatattaagctagccagcgaggggaaaattcgttccagaattgaacacttcgtggagataatgggcgatttaactctaggcgaactgaatcgtgacgttgtgaaagattacgtcaccaaaatgcagaatatgcccggtaatctgtatttgatgcggcgaaaatacaagatttcagatacgcaaaagctaattgaaatagcgctagctgatggtcagccagttatgagccgagatgctattggcaggcatattgagtcactgggttctatgctcaaatgggctaagagtgaacgttacctttttgataaccctgctgagaatgtgttggctcagcgtcgtgtgatggtgcgtgagcaggatcgccgcgacctcttcaccgacgatgaactagagcaaattttctcggccgactggtttaagaaaggcgcgggaaggcccaatcaatacggacgttatacgagcttccgcccgtttcactactggttgcctctgttggcattatatgtgggcgggcgcatcaatgagctttgccagctttatctgacggatattcgcgaagataaaaacggggttgcctatattgattttaaccttgatgcgccggataaggtgatggatgaagaagcgcaggctggtggcgttaaatcattaaagacggtgaatgcgatccgtcaggttccaattcatccgcgacttatcgaactagggctgctggagtatgtagatgcattgaaagctgccgggtatgatcgtcttttccctgagttgaagcataacaaaatcaaaggatatcgtgccgccgcttcaaaatggtttaacgaaaactactttggcaaagtcctcggttttacccgtgacggtaagaaaacgttccattcgctgcggcatactttcatcaacgtcgttgacaagtatgagaccaacgaacgcacgattgcgcagcttgttggacatgtccggggcagcactactgcgatgacaacctatcgtaaggatgctgatgtgggagagcaattgggcgtgatttcgcagcttcgctacaacttgcctgatattgcgcaattcgactcgcaagcaggtatcaaggcggtcagtgacgcacggcgcagacgtaaatcgtga

SEQ ID NO: 76535 - DNA, 579 bp, Citrobacter koseri
atgtcaacagtccttcagcaacgcttcattctgacgggtggcccaggttcgggtaaaagcaccctaatgggtgcattggctaagcgtggatattggtgttctacagaagcgggtagagcagtgatacaagatcaggtaagaattggtggtaatgctttgccgtggtctgatcaagttgcttttgcagagcttatgctttgctgggaaatgcgttcatggcatgaagttgaagggctaacagaaccctgcttctttgaccgtggggttccagatgttgtgggctacctgcatctctctaagcttccagtgccgaagcatttggaaagtgccattactgagtttcgttatagccagaccgcgtttatcgcaccaccttggcgtgatatctatgtgcaagacgacgaacgaaagcaatctttcgacgtcgctgtctctacatatcatacgatggtagaaacataccgtaagtatgattatcagttgattgagctgccctgtgcgtctgtcgaggaacgagcggattttattctttcggaaattaaacggctacatgccgcgcactgtttgagaatattgtag

SEQ ID NO: 76536 - DNA, 384 bp, Citrobacter koseri
atggaaaaaaccgtcttttttcttaaaatcatggccttttgcgttgtcttaatgtgtgttggcgctgcaacaggcctctttgtgggttttcacttcggttttaagcctgtcatttccgttactgtatctatgtccattttctcaatatatttagcatgttggatatatagtagcgaacgaagatcagatacaaactttgctaagtttagacagatgcaggtcaagcatgagatggtcaccctgctattgaacgaagcgctcaaagacaccaatagagaattatttgccatggttgcacccgatgcacctgacagcactttaaagcagcaataccagagcttgaaaaagatgggacaagtctggggcataaagattgatagctaa

SEQ ID NO: 76537 - DNA, 729 bp, Citrobacter koseri
atgatttcaggtgcagatgttgtaggaaagatagtcgtctttatatgccaaaaagtgggagggaagctcgttggcgttccgtttgacaaaaggaaaaaggcttgtcgttccttaactaaattgtatttttgtttacaagccttggacgatgtgactcaggagatactgactgagattaatgaatatggtgataatgaaagtgccttttctataattaactcatttaacaatcacatgcaggaagtcgaacttgccacgaatatgtttattgaccttagttatgaactatatgaggggctgaaaataatagatccgaatttggcatgctgctgtagttctctgtatatgggaaaaatggattttttacatttcatgacgaattgtattaagtgggggcacgaaggcgggcagcgtaaaattgtagtgaagcttccaaaaggttaccagcagtcggttgacatggataaaatgtataatgatgtcgagagtgctataaaaaaaggtgagaaattttattggcctagctctgaatttgatgatttctctcgtgattacgatgatgtttatattgattggagtgatagagatactgcggaatatgttcttgatgagcttaaaaaacaaaatgaattattgaaaaaagcaaaggagatgctgcgagatattttgaaggttagtttttccatagaggaagtgttattccagaatgatagccatccttatcgttga

SEQ ID NO: 76538 - DNA, 624 bp, Citrobacter koseri
atggcgatttttggctacgggcgtgtttcgacatcgcaacaggatactgagaaccaacggctggaacttggccaggctgggtggcaaattgattactggttcgctgatgttgttagcgggaaggttccggcaatgcaacgtaaagcgttttctgaaatgctcaataaaatccgtgatggtgaaacgttggtggtagcgaaactcgatcgtctgggacgtgatgcgattgacgtcctgcaaacgataaaggcgctggctgagcgtaatatcaaagtcattgtccaccagcttggcacaactgatctcacctctgctgccggtaagcttctgttgtcgatgctggcagcagttgcggagatggagcgtgacttgctaattgaacgcactcaggcggggctgtcacgagcaaaagccgaaggcaagaagctgggaagaccgtcgaaaatagcgcctgaagcccgtgacgcgattgtagagaaaaagtatagcggaaccagtgtcagtgcgttagcacgagaatatggcgtttctagagcgactatagtgtctatcatgtctttaaacgagagcagagtgtcacagaatgagaaggatgagattgatgtcatttataaggtgttgtag

SEQ ID NO: 76539 - DNA, 162 bp, Citrobacter koseri
atggagaatttcttaagctatgtccaaaatgtggtcaggccaagaacttttatcattatggagcttcatatagaacgactaatgagaaaagagaccaaagtgaatgtgaggtttgtagaggtaattattaaaaaattaaatgttgctaggtggtttttatga

SEQ ID NO: 76540 - DNA, 954 bp, Citrobacter koseri
atgacaagagtaacttctgaatcccacattggcgagctaggttcagcttttttacaatatctatgtagcaaacaagaagtaatttaccgtccagttaggatttttgatgttggtatagatgcgtttattgagccccaagtgggcaatattgctacaggagcaatgataggagttcaaataaaaacagggaaaagttttaaaacgagttcaggtcgttattctttcaaaagtgataaagctcattttgaatattggtctagatgcactttacctataataggtgtcgtctatgatcctgaggatgaaaaaggtgtttgggttaatttgagcgatatagctaaggacaggcttaccaataaagggccatgggtaattaatctttcggttcaagaacacttattagattctgacagcttgcaaacccttattgatagcgctgaattaacaagggttaagaaaaattttattaaattttcttacttaaccatgcctcaatcgaatcaaaagaaagagaaagattcatttcaaaatttaagcaccatctcatctcatactgcatgggatgaactattagatacttttctttcccttctttatgatgacagaattgttgctgatgctggttatagattaagtttatatttcccgaaggaaaaaagtgattttcgctaccaatatataataaaaagattgtctttgcttaatgatgtccagttaatcaaaatgatattttcagtgaaggttgcattggatgattgttatgagcatgtggcggagcatatatgtaatataatgagatacattccagatatatgtttaaggttggaaagtattatcttcaacaataatttgagtaatgatgtgaatgctgttgctattcaattgattgaatctttatcagaatatgaacgtcaagatttatgggacatgattagtaataaaaggttgttgtaa

SEQ ID NO: 76541 - DNA, 924 bp, Citrobacter koseri
atgatttctatatttttgggggccggtttttctaaatgggctttcgatttgccactggtaagtcagctttttgattttaatatttcttaccttactgcctcagaagagaaaaagctctatctaattaaggaggattggtctgtctggatacaaaaaaatccggaagtaacatacgaaaattttgtttattggtgtattaataaatcttctcaccgtaggagcagagttgtttggtatgttaatagaaggttaactgaaccattcattactaggattcgtggtgggtattctgctgctatgttcgatgaaaaaattgtgaaacaaaatgaaaggatagtttttttacgtaatttatttaatgagctagagggggctggtttaaaaaatatcattacttgtaattatgataatattgtcgagtatatcctaggttgctctgggtttaattatggtataaaaaatgaaattttagtgggaagaggaagaaatccacaatttccttggcaaaatgcagatgtgagagttactggtgagatcctgctggctaaattacatggctctttatcatgggacaaatataataaatacaccagcggcaaacctggcaggacagggaaagctttaattgttccccctgctcctgaaaaagaacctccgcttgaattactagatgtttggacatttgctaggaatgccttagccaatagcaaagtcttaattgtttttggcttttcttttaatgcgtatgataatgctttgctgaatctattgagggaaagtggctcaaatttgaaaaaggtaattttgatagatccctatccgaaagttgatgaagccaaatgtctttggcctttggcatcaatagagactatcaaccccttaaatgatattgtttttccggaaaagtggttcgaaatattatga

SEQ ID NO: 76542 - DNA, 498 bp, Citrobacter koseri
atgacggaatcaggctttatattaccgatggcagcgggagccgtgcttagctgggccagttacagcatagttgctcacgtttcaataaaacggcagatcagcagcatacgagcaatatcatggggcattttgggaactctcgctttagtgctgggagtatgtgcgttttctgctgtgagtgcagaacacacaacagaaaagcaaggtgctgcttgctcagataatacaccggaatgctatgcaaaagcgcaccacaaccccgtcagacagtgcaagcaggtaatggacaataaagcgacgtttcgccatgtgtggcaggaaagtgaagctcaaccggttttcggaacttacttatggcacgacgagaaaaagaaaacgattcaagcatttggacaacaggctaaggccattaacagtcttgggatgcaaacaccgcttcagtatttttgtgttttcaacgccaataccggggaagtaatcgcagcttcatttgaatga

SEQ ID NO: 76543 - DNA, 549 bp, Citrobacter koseri
ttgtgctcacaaatagagcttttagattcaaaatgtctcatatggagcgtggccttacagtggtcaagactgcacattcagtgcatgaaaaaatccctgagaatacagtttggcgagcgggtaaaagaactgcgcatcgccaccggaatgagccaagaagcgtttgctgatcggtgtgggttcgcacgtagctatatgagccgcattgaacgcggtggttctaatgcgtctctggatgcgattgaggtgctggctaacgctctgagtgttgagccgtggcagttgttagcgcctgaatcatctgaaaataatgacctagatctgttggttccatacgcggccgatggttcctgttttcaccccggtttggcgagcacccgtgatggttcgtttggcgtaggtgataaagcggctcagaagcgttttgcctcattttccgaagcacttgagtatctccgtagcatggagacggcaaaatggcgtagacccaatgccagtggcaattggggcattgtctcggcagtgcggtgggacaaactgagaaagtga

SEQ ID NO: 76544 - DNA, 240 bp, Citrobacter koseri
atgtgcgttaacgtgctcactatgccgagcgtaatctcgtattacttcatgtgggattttgtaggcatcaagaatgttgtaagtttcatcgaaaagaacggctatcaaataatcaaaatcggcagcttcatagttacgcaatgcactgagttgccgggaaggattatccgatgtgactctcctcgctttgatctgcactttcttgccatcagtgtcgatggcatctgcacctgcagatga

SEQ ID NO: 76545 - DNA, 534 bp, Citrobacter koseri
atggttgcagattatacgagatggggaacaggcgcgacaggtaaatggaaggacgaaaaaaaacctgcgcatccgcgcaggttggtgcaagagacaggtacgaagagcgtaccgaataatctcaccaatcaatacctctgggatcttgattgtggtctccggcgacgctgcgcgccaccagcaaaacgcaaaggaatgaacacaaatgcaacgagttgtgtaaattatcggttactgttacagattggtgtaagcgcaaaaaaaaaacctgcacatgatgcgcaggttggtgtaattcttgtgatcaacccgaaagctgatttcacctatcaatacctctgggatctcaactctagcaatccacccgacgccctcaccagcgaacaatcgcaacagcgcttcgcaaagtgtaaccaaaggtttgcattctcccttttctgtcttacttccccggcgtgcgctcacatttgcgcgttcccgtcaggcaatctgcttgaacagatagccattttccgtaacactgacgaaatgtaa

SEQ ID NO: 76546 - DNA, 141 bp, Citrobacter koseri
atgagtcatccggtcaactttttgccctggcgtcagtcccggcggcgcgaatgtctgcgattctggagcgttatgttcagcggttcactgctgctgaccatcgcgctggcgtgcatccatgaggttacgctcacggcgtaa

SEQ ID NO: 76547 - DNA, 2133 bp, Citrobacter koseri
atgagcaccattttgattttcttagctgctttgctggcctgctctctactggcaggatggctactcagagtaagagccaggcggcagaatctgccctggatcagcgccttttcagacgccgcgacgcgcaagctaacgccggaagagcgcagtgcggttgaaaactatctcgacaacctcagtcagattcagcaggtgccggggccgacaggcgccagtaccgctcccgtgtcgttaacgctgaatgcccagagtaataacgtcattattctgacccattccattacgcgttacggcattacgaccgacgatcccaataaatggcgatattaccttgattccgttgaggttcatttgccgccgttctgggaacagtacatcaatgacgaaaataacgttgagctgatccataccgatacgcttcctttggtcatctcgcttaacggccacacgttgcaggagtacatgcaggagacgcgcggctatgcgctacagcatacctcctccacccaggcgtcgattcgtggcgaagagagcgagcaaattgaactgctgaacattcgtcaggaaactcacgaagagtatgcgctcagccgccctgcggggctgcgcgaagcgtcgctgattgtggcctcattcctgctgttcttctgttgcttaattacgccggatgtcttcgtgccgtggattgcgggtggcgcaattctgctgctcgccgcaggtctctgggggctgttcgcaccgccatctaaaacctcgctgcgggagattcactgcctgcggggaaccccgcgtcgctgggggctgtttggcgaaaacgatcaggagcagatcaacaatatttcgctggggattattgacctgatttaccctgcccactggcaaccctatatcgcacaggatctcgggcagcaaacggatattgatatctatctggatcgccacgtcgcgcggcaagggcgttttctctccctgcatgacgaggtgaaaaatttcccgttgcaacactggctgcgtagcgccgttattgcgggcggatcgctgctggtgctgtttatgctgctcttttggatcccgctggatatgccgatcaaattcaccttgtcgtggatgaaaggcgcgcaaaccattgaggccaccagcgttaaacagctccacgacgccggagttcgcgtgggcgatacgctgcatctgagcggcaaaggcatgtgtaatatccatcagcctggcagctggactgcgcagccgaattccccttttatgccgtttgattgctcgcaaatcatctggaatgacgcgcggacgctgccgctgcccgagtccgatctcgtcaacaaagccacggcgctgacccaggccatcaaccgccagctgcacccgaagccggaagatgactcccgcgttagcgcgtcgctacgttcggcgattcaaaagtccgggatggtattgctggatgatttcggcgacatcgtattaaagaccgccgatctgtgcgccgccgaagacgaatgcgtgcgcctgaaaaacgcgctggtgaacctcggcaatagcaaaaactgggccgcgctggtcaaacgcgcgaatgcgggcaaacttgacggcgtgaacgttctgttgcgccctgtcagcgcggagtcgctcgataacctggtgacgacctcaaccgcgccgtttatctcccgtgaaaccgcgcgcgccgcacaggcgcttaacagccccgcgccgggcggcttcctgattatcagcgatgaaggcagcgatctggttgatcagccgtggccgtcgatgtccctgtacgattaccccgcgcaggaacagtggggcgcattccagcgcctggcgcagatgttaatgcaaacgccgtttagcgccgaagggatcgtcacccgtgtctacaccgacgccaacggcacgcagcacatcggtctgcaccgcatcccggatcgttccggtttatggcgctaccttggcacgacgttgctgatgctcaccatgctgggctgcgccgcttacaacggcattcaggcgttcagacgttatcagcgtaaccgcacccgtatggcggaaattcaggaatattatgaaaactgcctgaatccaaagctgatcgcctccccggaaagcctcatctga

SEQ ID NO: 76548 - DNA, 510 bp, Citrobacter koseri
atgaactttaatattaatctggagaatattaaaaaaagatgtggtttgcttctgggtatatttgtttttggaggggttacctgggggttttatcttgccagtgtgccggacatcaccgatctgattgaatccagaagcatcgtttattttttctggggttcattttgcctgttattgatgtttccggtggggtgttgctttgttttagctattgcctacgtgacctttacgaaaagcatgcagccgcccaggttcttcgacagggcttttaccattggtatccatgttgcgggggtagggtttgttgttggtaatatcctctcttttattgtccttttttatccccttggtactaactatgttttatgtgagcgctcaggcccgacgtctggcacctattacacccggaccgaagagatttgcgagcaggtgaaatatctgctcaaaacaaaatacagcgatattgaaaaactgaacgacacactggacggcaaaccaaagcagcaatag

SEQ ID NO: 76549 - DNA, 132 bp, Citrobacter koseri
atgatttacaacaacggtgagaattcacaaacaaagattaaaaaaacttcaaacgactattttcagcagggaaatttgtgctactccgttaacaccagaattaatcgcttcatatttcgcaacatttggtga

SEQ ID NO: 76550 - DNA, 1692 bp, Citrobacter koseri
atgaaatacattaaatcgatgacgcagcagaagctgagcttcttgcttgcgctctatatcggcctgtttatgaattgcgcagtgttttaccgccggttcggtagctatgcgcaggaatttaccgtctggaaaggcctctcggccgtggttgaacttggggccacggttctcgccacgttcttcttactccgtctgctttccctgtttggtcgccgcgtctggcgggttctggctacgctggtggtgctgttctccgcgagcgccagctattacatgaccctcctgaacgtggtgatcggctacggcattattgcctccgtgatgaccacggatatcgatttatcgaaagaggtcgtcggctggcacttcattttgtggctggtggcggtgagcattctgccgctggtctttatctggagtaaccgctgtcgttacaccctgctgcggcagttacgcacgccgggccagcgcgttcgcagcgtggcggcggtggttctggctggggtgatggtgtgggcgccgattcgcctgctcgacgttcagcaaaagaatgttgaacgaacaacgggtatcgatttgccgagctatggcggcgtggtggcgaactcttatttaccgtcgaactggctgtcggctttagggctgtacgcctgggcgcaggtggatgagtcgtcggataataactcgctgatgaacccggcgaagaagtttacctatgttgcgccagaaggcattgatgacacgtatgttgtgtttatcatcggcgaaaccacgcgttgggatcatatgggcatcttcggctacgagcggaacacgacgccgaagctggcgcaggaaaaaaatctcgcggcgttccggggtgagtcgtgtgataccgcgaccaaactttcgctgcgctgtatgtttgtgcgcgagggtggcgcgtcggagaatccgcagcgtacgctgaaagagcaaaacatttttgcggtgctgaagcagctagggtttagcgccgatctgtatgcgatgcagagtgagatgtggttctacagcaatacgatggcggataacattgcctaccgtgagcaaatcggcgcggagccgcgcaaccggggtaagacggttgatgatatgttgctggtggatgaaatgcagcgttcgttagcgcaaacccctgacgggaaacacctgatcgtaatgcataccaaagggtcgcattataactatacgcagcgttatccccgcagctttgcgcagtggacgccggagtgtgtcggcgttgacgatggttgcacaaaagcggagatgatcaactcttacgataactcggtgagctatgttgatcactttattacccgcgtgttcgatcagctgcgcgataagaaagccattgtgttttacgccgccgatcacggcgagtcgatcaatgagcgcgagcatttgcacggcacgccgcgcaagatggcgccgccagaacagttccgggtgccaatgctggtgtggatgtcggataagtatctggagaacccgcagcatgcgcagatgcttgcgcgtctgcaacaggcggcggcgatgaaaacgccgcgccgtcatgtggagctgtatgacacggtgatgggatgtctcggctacacctcgccagatggcggaattaacgaaaacaacgactggtgccatattccggctgaacagaatgcagcggtgcagtaa

SEQ ID NO: 76551 - DNA, 432 bp, Citrobacter koseri
atgattcgcgaatcccggactgacgatatggcgtcaattttgacgctctggatggaaagcacgatctatgcccacccgtttatcgaagcgcgctactggcgcgaaagcgaaccgatagtgcgtgacgtgtacctgcccgccgcgcagacctgggtgtgggaagaagcaggttcactgaagggctttgccagcgtgatggaagcgcgctttttgggcgcgctgtttgtcacgccggacgcgatccgcagcgggattggcaaggcgctggtgcagcatgttcagcagcgctttaccgcgctcagcctggaggtttaccagaaaaatcagtcggcggtgaatttctaccatgcgctgggttttcgtatcgaagacagcgcatggcaggaagatacacagcatccgacatggattatgggctggcaggcggattaa

SEQ ID NO: 76552 - DNA, 522 bp, Citrobacter koseri
atgtctgctatcgtcacggaaagattcattttgcgccctcaagtcatcacagattatgatgtatggtatccgatgtattcagaccctaaaatatttcatctggttaatgccccaggctttacgccggaagaggcgtggaaccgcctgttgagaaacatcgggcattggtctatttttggttacggtatattttctatttttcaaaagtctgacggtacgtttttaggcgaaacagggctggctaattttcatcgtggtattgatgaaaactttgagaactgtgtcgaggcatcatgggttatttcacgttcagctcagggggctggcgtggcaaaggaagccgccgtcgctgcgcatcagtggtttgtccattcgttttcaccttcgaagacaatttgtcttatcgcaaagaataacattccgtccattcgtgttgctgagcatgtgggctaccgtatttatgatgaatgcttatacaaaggcgctgagtgtttaaaacttgaatgcttatgggataaataa

SEQ ID NO: 76553 - DNA, 1074 bp, Citrobacter koseri
atgaaacttaaattagttgcagtggcagtgactaccctgttggcagcaggtgcggtaaacgcagctgaggtatataacaaagacggcaacaaactggacctgtacggtaaagttcacgctcagcattacttctctgatgataccggtagtgatggtgataaaacttatgcgcgtctgggcttcaaaggtgaaactcagattaacgaccaactgaccggtttcggccagtgggaatatgaatttaaaggcaaccgttctgaaaaccagggttctgacaaagacaaaactcgtctggcatttgcaggcctgaaattcgctgaatttggttccttcgattacggtcgtaactacggtgttgcatatgacatcggcgcatggaccgacgttctgcctgagttcggtggcgatacctggacccagactgacgtgttcatgactggccgtactaccggtgttgcaacttaccgtaatactgacttcttcggtctggttgaaggtctgaactttgctgctcagtaccagggcaaaaacgaccgtgacggtgttcaagaagctaatggtgatggtttcggtctgtctgcaacttatgaatacgaaggcttcggtgtaggtgctacctatgcgaaatctgaccgtactgacaaacaagtcaatgcagcaagcaattttaacgctaacggtaaaaatgcagaagtatgggcagcaggtctgaaatatgatgcaaacgacatctatttggctgcaacttactctgaaacgctgaacatgaccactttcggtgacgattatattgctaacaagactcagaacttcgaagctgttgctcagtaccagttcgacttcggtctgcgtccgtccatcgcttacctgaaatccaaaggtaaagacatcggtagctggggcgaccaggatctggttgaatacattgatttaggtgcgacctactacttcaataaaaacatgtctaccttcgttgattacaaaatcaacctgctggacgataccaacttcactaaagatgctcgtgtgagcactgacaacgtggttgctgttggtctgaactaccagttctaa

SEQ ID NO: 76554 - DNA, 1209 bp, Citrobacter koseri
atgcttttagaagaaagacgtgcaaaaatattagcaattcttattaaaaatgaacgcgtgctggttaataatttagccgaattattctctgtatcaaaggaaacaattcgtcgcgacctgtcttatctcgaaaaaaatcaggctattgaacgatgctatggcggcgcaattcttaataaaaagaatgtcatggtctctttcagaaaagagatgctttcaaatattaatgatttgttaaaacatcaggatgcaataaaagttatgactgaagaaaaaaaaggtaaggtatgtgtttttggatctttcaatgtagatattgtttcctatgttgcaagacttccacacccaggagaaactattgtatcacaaagttgctcatttgggcctgggggaaaaggcgctaaccaggccattgcagcaagtaatgcagtgtgcaaagttgattttattacaaaagtgggtaacgatcagctaagttcacatgcttattctcatttagaagcatcaaacatagactcattaacgatatatgtttcagactccgcacctacaggtaatgcattaatatacgtttctgaattagatggcgaaaatatgattgctattaatcaaggagctaatgtaacaattaccgatgaggagattataaattcacataaaaacatattaaattccaacatattgctggtacagcttgagaataatctttccgcaaccatcaacgcaataaagtatgccagagagaacgatgttacggttatcttaaatcccgccccttttacttcagatgcgaaaataatgttaccgttcgtcgatatagtcaccccaaaccaaacagaagctacgcttcttagcggcattaatattactgatattgaaacagcaaaaaaagccgctgaacgaatcgctcaaatgggaccgcaatgcgtaatcgtgacgcttgggaataaaggtgcacttttatatgataaggtgcaattttatatgattcctgcttatccggcaatggtcgttgatactacgggtgctggtgatgctttcaatggggcattagctgcttccttatctaaaggtgaaacaataaaacatgcctgtcattatgctgctgcattttcttctctggccgtagagctaaatggggcatcaaatatgcctgaacataaaaatgttctcattcgattaaacgaatcaagctattcaaaaatgtaa

SEQ ID NO: 76555 - DNA, 927 bp, Citrobacter koseri
atgactaaagtaattattgatactgatattggcgtcgacgatgcttttgcgatcgcctatgccgcaggatatttagatattattggcattactactgtttttggtaatgttccggttgaacaggcggttaaaaacgcaaagcttttctgcgagaagatcaatcttggaacaaaaatatatcggggatgctcaagacctctggctattgaacctgctccgccagggacaaaagtacatggagaagatggtcttggcggcgttttttcaaacccgcatgatagtcatgcagaggatgcaatttcattcatcattgacagtatcaagtctaaccctggagagattacattaatccttattgggccattaacaaacattagcgttgcactgaatcaagcaccagaaatcgcggagttagttaaacaagttgttatcatggggggagcatacggtactcatggtcactccggtaattcgacaccatttgctgagttcaatttctggaaagatcctcatgctgccgatcaggttctttcttcggcgctgccagtaaccatcgtccctttggatgttacgcatcaggtattaattacagggaaagaaattcgtgatactggaaatgaattatttacaagcatagccgatttttatctgcaatatagcctcaaggaagaaggttttgaaggaatggcactacatgattccttagccgtatcttatcttttaaatcctgagtggtttgatacagttgaaagttctctacgcgtcgttaccgaaggtatctgtattgggcagtcgctgctgaagcctaagtatagagcaacacgagttgatccttttgcaaatttgaaatctcaacaaatttgtcttgatgtggacgttaatgaagtgaagaaacacttcctgaacgcacttgctaataatttttag

SEQ ID NO: 76556 - DNA, 1326 bp, Citrobacter koseri
atgaattcaaataacaataccgcagcaaagtttggtttaattggtgcggttatttatggtgttaactcgattattggatctggtatatttcttttgcctggagagttatataaattaacgggacctgcttcaattattatgattctcatcgatgtttttgtggtgctttgttttgcactctgttttgctgagtgctctaagtattttgacaaaaatggtggagcatatcagtacgcaaaattttcgatgggagatctcgctgggtttaatattggtgtacttggttggcttactaatgttattggttggggcgttatggcggttggctttgctaaactatttcttgccttttttcccgaactcccactgacagtttcgcaaacagcactacttatcatctgggtgtttgctatctcaaacttgtttggtatgaggacgtctaaaaatctaacattggttattactgtcataaaactcattccaattatagggttctgctttgtctcgctattttttcttaagtctggaattgaaaatgccaacttcacaccatttgttcaactcccgacagataaaagcctatttgatggtgtaagccagagcacactgctacttttttatgcctttctcggatttgaagccctacccataattgcggctgaaattaaatctccagagaaaaacgtctctcgtgctattcttattactgttttctttgtgtcactaatttattttctcattatcgcaggcgctgttgcaattttaggtaaagacattattcattatgacagccctattcaacaggcagccaaattaacattgggttcggtaggcggaagcataatagctcttggcgcaatcatttcaattgccgggttaaacatgtcatgctcgattatcacacctcgcattgccagtgctattgctgatgatggtatgctgccaggtatttttgcaagaaaaaataatgcaggagcacctgtattttcaaccttaatctcagcgcttatcgcatctgttattgttatgagtggaacatttgcccaactggctgagttggcggttttaatgtttttcttgcaatatattccaacgccgatagcgactatcattatgaagtaccgcaggaagaaaagtaatgaagtagagaaagaaggatttgttctgcctcttggatatatctttccagtattagcgctggcaattagttttatcatcatctgtaactcacgacctgttaatattatttttatgctgtcgtcaattatcttatctagtgtcgtttggtttatttctttcagaagacaaagtgttcgtagtgagtag

SEQ ID NO: 76557 - DNA, 1620 bp, Citrobacter koseri
atgaagcactctgtttcagttacctgttgtgcgctgttgattagcagcgtctccctgacacacgctgcggatgttcccggcggaacggtactggcagagaagcaagaactggtccgccatattaaagatgaaccggcgtcgttagatccggcaaaagcggttgggctgccggagattcaggtcattcgcgatttgtttgaaggtctggtgaatcagaacgagaaaggagaaatcattcctggcgtcgctacgcgctggaagaccaatgataaccggatctggacgtttaccctgcgcaataacgcaaagtggtcggacggcactccggtgaccgcgcaggattttgtctacagctggcaacgtctggttgatccgaaaaccctgtcaccgtttgcctggtttgccgcccttgctggcattaataacgcccaggcgattattgatggtaaagcgtcgccggatacgcttggggttagcgccgtggacgcccgcacgctaaaaatacagctggataaaccgctgccgtggtttgttaacctgactgccaactttgctttttacccggtacagaaagccaatgtagaaagcggtaaagactggacgaagcccggaaacctgatcggcaatggcgcctatgtgttgaatgatcgcgtggtcaacgaaaaactggtggtggtgcccaatacccactactgggacaatgcgaagacggtgctgcaaaaagtgactttcctgccaattaatcaggagtcgtcagcgactaaacgttatctggctggcgatattgatatcaccgaatctttcccgaaaaatctgtatcagaagttgctgaaggatataccggggcaggtttacacaccgccgcagttgggcacctattattatgcgtttaacacccaaaaaggcccgacggcggattcccgcgttcgtctggcgctgagcatgacgattgatcgccgcatcatggcggaaaaagtattaggaaccggggagaaaccggcctggcgcttcaccccggacgtgacggcaggctttactcccgatccctcgccatttgaacaaatgagccaggaagaactcaatgctcaggcgaaaacgttattgcttgcggctggctatggcccgcagaaaccgctcaagttgacgctgttatataacacatctgaaaatcatcagaaaatcgcgattgcggtcgcctcgatgtggaaaaagaatctgggcgtagaggtgaagctgcaaaaccaggaatggaaaacctatatcgacagccgcaacaccggtaattttgatgttatccgcgcctcctgggtgggggactacaatgaaccgtctactttcctgtcattgttaacctcgacccatacgggcaatatctcgcgcttcaataacccggcctacgataaaatcatgacgcaggcgacagtagaaaatacggcgaaggcgcgcaatgcggactataacgcggcagagaaaatcctgatggaacaggcgccgattgcgccgatttaccagtataccaacggacgtttgatcaaaccgtggctgaaaggttatcccattaataacccggaagacgtggcgtatagccggacaatgtatattgtgaagcacgacaaataa

SEQ ID NO: 76558 - DNA, 1542 bp, Citrobacter koseri
atgcgtctggaagtcttttgtgaagaccgtcttggtctgacccgcgagttactcgatttgctggtgcttcgtagcattgatttacgcggtattgagattgaccccatcgggcgaatttaccttaattttgctgaactggagttcaccaacttcagcagcctgatggcggagatccgccgtatttccggcgtgaccgatgtccgtacggtgccgtggatgccgtctgaacgcgagcatctggcgctgagcgcactgctcgaagcgttgccggaacccgtcctctctctggatatgaaaagtaaaatagagatggcgaaccccgcgagctgtcagcttttcgcacaaaatcaggagcgtatgcgcaatcacactgccgcgcagttgatcaacggcttcaacttccagcgttggctggagagcaacccgcaggtctctcacaacgagcatgtggtgatcaatgggcagaacttcctgatggagattaccccggttcatttgcaaggggaaaatgacgagtacatgctcacgggcgctgtcgttatgttacgttccaccatccgaatggggcgtcagttgcagaatttgacgactcaggatttgagcgcgtttagccagattatcgccgtcagcgcgaaaatgaagcatgtcgtagagcaggctcgcaagctggctacgctgagcgcgccactgctgattaccggcgataccggaaccggtaaagatctcttcgcccatgcctgtcacctggcaagcccgcgtgcggcaaaaccgtatctggcattgaactgcgcctccattcctgaagatgcggttgaaagcgaactgtttggtcatgcgccggaaggtaaaaaaggcttctttgaacaggccaacggggggtcggtgctgctggatgagattggtgagatgtcgccacgcatgcagaccaaattgctgcgttttcttaacgacggcactttccgtcgcgttggcgaggatcatgaggttcacgttgatgtccgggtgatctgcgccacgcagaagaatctggtggaactggtgcaaaaagggctgttccgcgaggatctctactaccgtctgaatgtgctgacgctcaatctgccgccgctgcgtgattgcccgcaggatatcatgccgctcactgaacttttcgtggcgcgttttgccgatgagcagggggtgccgcgtccaaaactctctgccgatctcagcaccgtattaacccgttatggctggccgggcaacgtgcgccagcttaaaaacgccatctaccgggcgctgacgcagcttgaagggtacgaattacgtccgcaggatatcttgctgccggattacgacgccacgaccgttgccgttggtgaagatgcgatggaaggctcgctggatgagatcaccagccgttttgaacgctccgtgttgacgcagctttatcgcaattatccgagcacgcgcaaactggcgaaacgcctgggcgtctcacataccgcgattgccaataagttacgtgaatacggtttgaatcagaagaaaagcgaagagtag

SEQ ID NO: 76559 - DNA, 1011 bp, Citrobacter koseri
atgtcccctactatttatgatatcgcgcgcgtcgccggagtatcaaaatccacagtatcgcgcgtgctgaataaacaaaccaatatctccccggaagcacgggagaaagtattacgcgccattgatgaactgcaataccaaccgaataaactggcgcgcgccctgacctcttccgggtttgacgccattatggttatttctactcgttcagcaaaaacaacggccggtaatccttttttctctgaagttctgcatgcgattacggcaaaggccgaagaggaaggttttgatgtcatattacagacctcccgcagtacagaagatgacttgcaaaaatgcgaaagcaaaattaagcagaaaatgatcaaaggcattattatgctgagttccccggcggatgagttcttctttgcgcgtctggataagtatgatgttcctgttgtcgtcattggcaaagtggaaggcgaatacgctcatgtttactctgtcgatacggataatttccaggacagtattcaactcacaaatgcattaattgacagtggtcatcagcatattgcctgtctgcatgcgccacttgatttccatgtttccatcgaccgtgttaatggttataaagccagtctggaagtccataaaatccagtgccgtgatgaatggatcgttgatggtggatacacgcatgaaagcgcgctactggccgccagaaaactgttaagccagaccccattgccaaatgccgttttcgcaacagacagcttaaagttaatgagtttataccgggtggcggcagagaaaaatatcgcgattccacaacaactcgccgttgtcggttacagtaatgaactgctctcgtttatgctgactcccgccccaggcggcattgacgttcccacgcaggaattaggcgagcaaagttgtaatctgttatttaacctgattgccggcaagaaaggcctgcaaaatattatcgtaaaaacgcaaatatcattagccggctccctcgcttaa

SEQ ID NO: 76560 - DNA, 906 bp, Citrobacter koseri
atgaaaaccttactgtactctactgcgctggtcatatgcgcaggaatggcttgcgcgcaggccgctgaaaacaatgactggcattttaatatcggtgctatgtatgaaatagaaaacgtcgaaggctatggtgaagatatggatgggctgggtgaaccgtccatctattttaatgcggcaactggtccgtggaaaatttcactggcgtattatcaggaaggacctttcgattatagtgccggtaaacgcggtacatggtttgatcgcccggaactggaagttcgttatcaattcctcgaaagcgatgatgttaatttcggtttaaccggcggttttcgtaactatggctaccattacgtaaatgaagcgggtaaagacaccgccaatatgcaacgctggaaagtacagccggactgggatgtgaaactgaccgacgatttacgtttcagcggctggctggcgatgtatcaattcgtcaatgacctgagtatcaccggctactcagacagtcgtgtcgaaagtgaaaccggcctgaattacacttttaatgaaacggttggtctgacggtgaattattacctggaacgtggcttcaatcttgccgaaaaccgtgataacggtgaattctccacacaggaaatccgtgcctatttaccgatagcattaggcaataccaccctcacgccttatacccgtatcggtctggatcgctggtccaactgggactggcaggatgatcctgagcgtgaaggtcacgactttaaccgtctcggtttgctttatgcgtatgatttccagaatgggttatcaatgtcgctggaatatgcctttgagtgggaagatcacgacgaaggtgagagtgacaaattccattatgcggggatcggcatcaactacgcgttctaa

SEQ ID NO: 76561 - DNA, 1083 bp, Citrobacter koseri
atggcacagctttcgttgcaacatatccaaaaaatatacgataaccaggtgcatgtggttaaagactttaacctggagattgaggataaagagttcatcgtttttgtcggtccgtcgggctgcggcaaatccaccacgctacgcatgattgcggggctggaagagatcagcgccggtgaattattgatcgacggtaagcggatgaatgatgtaccggcaaaagcgcgcaatattgccatggtctttcagaattacgccttatatccgcacatgaccgtttacgacaacatggcgtttgggctgaaaatgcaaaagatggacccgggcattattgatgaacgcgtgaactgggcggcgcaaattcttggattgcgggattacctgaaacgcaaaccgggcgcgctttccggcggacagcgtcagcgtgttgcgcttgggcgcgccatcgttcgtgaagcgggtgtgttcctgatggatgaaccgctgtctaacctggatgcaaaattacgtgtccagatgcgcgcagagatcagtaagctgcaccagaagctgaataccaccatgatttacgttacgcacgatcagactgaagccatgacgatggcaacgcgaatcgtcattatgaaagatggcattgttcagcaggtcggtgcgcctaagatggtatataaccatccggccaatatgtttgtcgcaggatttattggttctcctgcaatgaactttattcgtggtgcaattgatggcgataaattcgttaccgaaacgctgaaattaacaatcccggatgacaagctgaacgcgttaataaaacaaggccacgagcataaagcggtggtaatggggattcgcccggaggatatccatcctgaaaaacaggatggtaatagcataacggcgcgtattagcgtggctgaattaaccggtgcggaatttatgctttataccaccgttggggggaacgagttggtcgtccgtgccggggcgattaacgattattctgcgggagaaaatatcaccatacattttgatatggcgaaatgccatttctttgatgctgaaaccgaactggctattcaataa

SEQ ID NO: 76562 - DNA, 663 bp, Citrobacter koseri
atgaaacctcaggccatcatttttgatttagacggcgtgattactgataccgcgcacctgcattttctggcgtggaaacagatagccgatgagacggggatcgtgattgatgaggcgttcaatgaacgtttgaaaggcattagccgtaatgaatcgttgtgccgcattttgcagcatggcggtaaagaaggggtgtttaccgatgctgaatgtttgcagctagctgcgcgtaaaaatgccctgtacgttcacgctctgcgccagttaacgaccgactctgtcctgcccggtattcgggcgttattgacctcgctgcatgaattacagattccggtagggctggcatccgtctctctcaatgcccctgcaatcttacaggcgctggagattgctgacttttttgatttttgtgcagacgcagcgcacatatcccgctcgaaaccggatcctgagatttttcttgccgcctgcaacggtcttggggtgaggcctgatgcgtgcatcggtattgaagatgcacaggcgggtattgatgccatcaatgcctgcggtatgcattctgtcggtatcggtccggggttaaccggcgcggagttacatcttccttcaacggaatttctgacgtggccgtgcttatcggctttctggctaaacgcaaagtaa

SEQ ID NO: 76563 - DNA, 2268 bp, Citrobacter koseri
atgaagcctgtaatgttaacagacccgtttttttgcctgcacagcctgaataaatatgcctcacttatggcgtcaggtaatggttatatggggatccgcgcaagccacgaagaagcgtatacagtacagactcgcggcatgtttctggcgggtctctatcatcaggctggcacgggagagattaatgaactggtcaatctccccgatgtggttggcgtagagataacgctgaatggcgatattttctccctgctgagcggcacaattgaaagctggcggcgcgatgtggattttgccaccggagagttgcgccgttcgctgatatggcgctcgcctggcggcatgcgctttgcgatcgaaagccgccgttttgcatccgcagaaaagttaccgctgtttgcgatggaaatgactattacgccgttggacgccgacgccacgctttctctctcgaccggcattgacgcgacgataactaaccatggccgtcagcatctggacgaaacacaggtcagagtgttcggacagcaccttttgcagggggtctatacgactcaggatggccgcaacgatatttccatttccgctttctgccgcgtgaaaggcgatgtgcaacgttgctttacggcaaaagatcgccgcctgatgcagcacaacagtttgtgtgtaaaagcgggccagcgtatcacgctggagaaattggtctggattgaatggacatctgaacggaatacctcgcctgaaatctgggggagtcaggcccttcgtcaactggaagcctgtgctgagcaggggtacgacgcgctaagagcagaaaccgccgctaactggcatcgctggtggcagcgtcgccgtgttcaggtcagcagcgtggcgcctggcgatcagcgcgcgttggatttcgcgctctatcacttacgcatcatgacgccggttcatgatgagcgcagcagcatcgcggcaaaaggattaaccggagaaggttacaagggccacgtattctgggataccgaggtttttctgctgccgtttcatctgtttaccgagccagacactgccagaggcctgttacgttaccgttggcataatctgcccggcgcgcgtgagaaagcgagacgtaacggctggcaaggcgcgttgtttccatgggaaagcgcgcgtagcggtgaggaagagacgccggagtttgcggcgatcaacatccgtactggcctgcggcaaaaagtggcgtcggcattagcggaacaccatcttgtcgccgatattgcctgggctgttattggctactggcaagccacaggcgacatgagttttatggcgcatgaaggcatggcgctgctgctggaaaccgccaaattctggataagtcgtgcggttgacgtgaacggacgtctggagattcatgacgttattggcccggatgagtacaccgagcacgttaataacaatgccttcaccaactacatggcctggtacaacgtggagcaggcgctgcgttttgcgcgtgcgcagggttgtgctgatgacacgtttatttatcgcgcggaatactttttgcagaaactttggcggcctgacattcagcaggatggcattttgccgcaggatgatgcgtttctcagcaaaccggttatcgatttagcgaaatataaagccaatgcgggcaagcagacgatcctgcttgattattcacgcgctgaagttaatgagatgcaaattctcaagcaggcggacgtggtaatgctgatgtatatgctgccggatctgtttacgccgcagacatgcctggcgaacctgcgcttttatgaggcgcgcacgattcatgactcctctctgagtaaagcgatccacggtatcgtggctgcgcgctgtaaagatccagcaatggggtatcagttctggcgcgatggggggcaaatcgatcttggcgacgatccgcacagttgcgatgacggtattcatgccgcagcgacaggggctatctggctgggcgcgatacaaggatttgcagggttaagcgtgcgccatggcgaactgcatctgcatccggcgttcccggcgcagtggaaacgcctcgcttttccgttgcagtggcagggcagagaactgtttatcaccatggatgcagataacatcagcatcaccagcatcggccccgtcgatgtgtggatttgcaaccgcaaggttactgtcgacggtgagcggtcattcaaatgcagtgacgttattttacctgttaatgggaccgctaccagggagaggaaatga

SEQ ID NO: 76564 - DNA, 1056 bp, Citrobacter koseri
gtgaaaagtgcaatgacaagcgcgccgttgcgtgtcgccatcattggcgccgggcaggtggcggataaggttcatgcttcgtactactgcacccgcgaggatctggaactggtggctgtctgtgacagccgcctgtcccaggcgcaagcgttggcagataaatacggtaatgcacaggtctgggatgacccagagaagatgctgcgcgacgctcagccggatatcgtcagcgtctgttcgccaaatcgttttcattacgaacacaccatgctggccctggaagccggttgtcatgtgatgtgcgagaagcctcccgccatgacgccagaacaggcgctggagatgtgcaaaaccgcgcgacgaatgagaaaggtgctggcctacgattttcatcatcgctttgcgctggacacgcaattgttgcgtgaacaggttgtggctggcgtgctgggtgaaatctatgtcaccaatgccagagccttgcgccgctgcggagtgcccggctggggtgtattcaccaacaaagccttgcagggcggggggccgttgatcgatatcggcgtgcatatgctggatgcggcaatgtatgtcttagggttcccggcggttaaacgggtttgcgcgcacagctttcaaaaaatcggcacctgcaaaaacagcgggcagtttggtgaatgggacccggcaacgtacaccgttgaagatgcgctgttcggcacaatcgaatttcacaatggcggcatcttgcggctggaaacctcctttgcgctcaacattccagagcagtcggtcatgaacgtgaatttttgcggtgataaggccggagcaacgcttttcccggcacaggtttacaccgaccgggagggggggctggcggtcctgtttcagcgtgacgttgcggatgatcaccgccattttcggagtatggatgcttttgtcaatcatgtgaaaggggagccagtgacgatcgccgatgcagaacaaggttttgtcattcaacaaattgtggctgcgttgtatcactctgctgaaacaggaacctgcgtggaattatga

SEQ ID NO: 76565 - DNA, 789 bp, Citrobacter koseri
atgaaaattggaactcagaatcaggctttctttccagaaaatattctggataaatttcgctatatcaaagagatggggtttgacggatttgagatcgacggcaaattgctggtcaataaccttgatgacgtcaaagcggcgattaaagaaacgggtctgcctgttaccacagcctgcggtggttatgacggctggattggcgattttattgaagagcgccgtctgaatggcctgaaacaaattgaacgcattcttgaagcgctggcggaagtgggcggcaaaggcattatcgtgccggccgcgtggggaatgtttaccttccgtttgccgccaatggcctcgccgcgcagcctggaaggcgatcgcaaagcggtgagcgactcgctgcgtttccttgacaacgtggctgagcgcactggaacggtggtgtacctggaaccgcttaaccgctaccaggatcacatgatcaatacgcttgccgacgctcgtcgctatatcgtcgaaaacgatctcaaacatgtagagattatcggtgatttttatcacatgaacatcgaagaagacgatatggcgaaggcgctgcatgacaaccgggatctgctcggccatgtgcatattgccgacaaccaccgctatcagccgggaaccggcaccctgaatttcggcgcgctgtttgatcagttgcggcaggacaattatcaggggtatgtggtgtatgaagggcgggtacgcgcagataatctgccggaagcctaccgtcagtcattggcctggttgcgtacctgctaa

SEQ ID NO: 76566 - DNA, 1053 bp, Citrobacter koseri
atgaaaaagttagttgccaccgaaccgcgcgttgcggcgcttgtggagtatgaagatcgcgcgattttagccaacgaagtgaaaatccgcgttctgtttggcgcgccgaagcatggtactgaggtggttgatttccgcgctgccagcccgttcattgatgaagattttgatgcgcaatggcagatgtttatgccgcgcccggaaggcgcgccgcgcggtatcgaattcggtaagttccagctcggtaacatggtggtgggcgacattatcgaatgcggcagtgacgtgacggactatgccgtgggcgatcgcgtatgtggttatggtccgctttctgagacggtcatcatcaacgccgttaataactataagctgcgcaaaatgccggaagggtgttcctggaaaaacgcagtctgctatgacccggcacaattcgcgatgagcggcgtgcgtgacgcgaatgtgcgcgtgggtgactttgtcgtgattgtcgggctgggcgcgattggtcagattgcggtgcaactggcgaaaaaagcgggagcgtcagtggttatcggcgtagacccgatcgctcaccgctgcgatattgcgcgtcgtcatggcgcggattattgcctgaacccggtcggcacggatgtcggtatggaaattaaaaaactgaccgggaaacagggcgctgatgtgatcatcgaaacctgtggttatgctgacgcgttacagtcggcgctgcgcgggctggcctacggcggcactatctcctatgtggctttcgctaaaccgtttgcggcgggattcaatctcgggcgtgaagcgcacttcaataacgccaaaatcgttttcgctcgtgcctgtagtgagccgaaccctgattacccgcgctggaaccgtaagcgtattgaagaaacctgctgggaattgctgatgaatggttatctcgattgcgaagagattatcgaccccatcgtaacgtttgccaacagcccggaaagctatatggagtttgtcgacaagcacccggaaaagagcatcaaaatgggcgtgacgttttaa

SEQ ID NO: 76567 - DNA, 843 bp, Citrobacter koseri
atggcaacaaataaacgcaaacttgagcgtgtcggcttttactgtggcctgatcgtctttcttctcatcacgctgtttcctttctttgtgatgctgatgacctcgtttaaaagcgcgaaagaggcgatttcactgcatccgacccttttcccgcagcactggacgctggaacactatatcgacatttttaatccgctgattttcccgtttgtcgattatttccgcaacagcatggtggtgtcggtagtgtcatccgttgtggccgtatttttgggcacgcttggcgcgtacgcgctgtcacgtctgcgctttaaaggtcgcatgaccattaatgccagcttttacaccgtgtacatgttctccggcattttgctggtggtgccgttgttcaaaatcatcactgcgttaggcatttatgacaccgaaatggcgctcattatcacgatggtcactcagacgctgccgactgcggtgttcatgctgaaaagctacttcgacaccatcccggatgagattgaagaggccgccatgatggatggcttgaaccgtctgcaaattattttccgcattaccgttccgctggcgatgtctggcctggtctcggtgtttgtctactgctttatggtggcctggaatgactatctgtttgcgtcgattttcctctccagcgccagcaatttcacccttccggtagggctgaatacgctgtttagcacgccggattatatctggggacgcatgatggcggcgtcgctggtaacggcattacctgtcgtcattatgtatgcgctttccgaacgttttattaagagtggtttgaccgctggtggcgtgaagggctaa

SEQ ID NO: 76568 - DNA, 882 bp, Citrobacter koseri
atgaccaggcttttttccggtcgttccgatatgccattcgcgatgttgctgctggcgcccagtttattactgctgggcggtctggtggcatggccgatgatatcgaatatcgaaatcagttttttgcgtttgccgcttaatccgcgaattgcctcaacgttcgtggggtttagcaactacgttaacattctctccgatcctgggttctggcacgcgctgtggatgacgatctggtataccgcgctggttgtggccggtagtaccgcactggggctgggcgtcgcgatgttctttaaccgggagtttcgcctgcgtaaaacggcacgttcgctggtgatcctctcttatgtgacgccgtccatctcgctggtgttcgcctggaagtacatgttcaacaacggctacggcattgtgaactacctcggcgtggatctgctgcatctctacgatcatgcgccgctgtggttcgacaatccgggcagtagtttcgcgctggtggtgttgtttgcgatctggcgttacttcccgtatgcgttcatttcattcctggcgatcttacagactatcgataaatcgctgtatgaagcagccgaaatggatggcgcgaatgcctggcagcgatttcgcatcgtaacgctgcccgccatcatgccggtgctggcgacggtcgtaaccttacgcaccatctggatgttctacatgttcgccgatgtttatctgttgacgacgaaggtcgatattctcggggtgtatctctacaaaacagcatttgcatttaatgaattaggtaaagcagccgccatttccgtggtgctcttcatcattatttttgccgtcatcttgctgaccagaaaacgggtgaatctcaatggcaacaaataa

SEQ ID NO: 76569 - DNA, 1293 bp, Citrobacter koseri
atgcttaaatctaacgttgtgctgttatcagcactggtttcctgcgccctgatttcagggtgcaaagatgacaaacaatctcatgtctccattgaatttatgcattcgtcggtggaacaggagcgtcaggccgttattacaaaactgattacgcgttttgagaaagaaaatcctggaatcacagtgaaacaggttcctgttgaggaagatgcctataacaccaaagtgatcacgctggcgcgcagcggctcgctgccggaggttattgagaccagccatgattacgccaaagtgatggataaagagcaactgatcgaccgtgatgctgttgcggatgttattcagaacgtggctgaaagcgcgttttatgacggtgtgctgcgcattgtgcgtactgaagatagcgcggcgtggaccggcgttccggtaagtgcctggattggcggtatctggtatcgcaaagatgttctggcgaaagccgggctggaagagccaaaaaactggcagcaattgctgaccgtcgcgcaaaaactcaacgatcccgccagtaagaaatacggtattgcgctaccgacggcggagagcgtgctgactgaacagtctttctcgcagtttgcgttgtcaaatcaggccaacgtctttgatgcacaaggaaaaataacccttgatacgccagagatggcgcaggcgctggaatattatcgtgcgctggcggcaaatacgatgccgggttctaacgacatcatggaagtgaaagacgctttcatgaacgggactgcaccaatggcgatttattccacctatatcctcccggccgtcattaaagaaggcgaaccgcagaacgtggggtttgtcgttccgacggaaaaaacctctgccgtctatggcatgttgacttcgctgaccatcaccagcggacagaaagcggaagagacggaggcggccgagaaatttgtcacctttatggagcaggcggacaacattgcggactgggtgatgatgtctccgggagcggcactgccggtcaacaaagccgtggtgaacacgcccgtgtggaaggaaaacgatgtgatcaacgcgcttggcgatctgccttatcagttgattgcaaaactgcctaatatccaggtgtttggcgcggtgggcgacaagaactttacccgtatgggcgacgtgacgggctctggcgtggtgagttcgctggtgcataacgtgacggtgggtaacgccagcctgtcttcggccctaaaggaaagccagaaaaagctggatacccttgttgaacagcgctaa

SEQ ID NO: 76570 - DNA, 1710 bp, Citrobacter koseri
atgggaccgctaccacggaaaacaaaagtgagccaaaaaatccagaaatacctgcttgaagtctatggaaaaacattttcgcaacgccactacgacgtactggaaaggcgtattgaaaaatcacgttcattaattaaaaaacagcgtaagttgcattgggatgaaagtgatgttgtgcttattacctatgccgaccaatttcactgtgagacgtcaaaaccgcttcccgcatttaatcagttcttccgtgaacggctaggcgcgagtttttctcatgtccatctgttacctttttatccatggtcatctgatgatggattttcggtcattgattatcaccaggtggcgcaggaaacaggggagtggaaagatatcggtgaactgaatcaaacaagtcaattaatgtttgattttgtctgcaatcatatgtctgccaaaagtgaatggtttaaaaactatttacagcaaaagccgggctatgagcatttctttattgaaatggacccttcgacagacctgagtgcagtgacgcgtccgcgcgcattaccgttactgacgccttttacattgcacgatggcaccgtccgtcatttatggacgacattcagtgatgatcagattgacctgaattatgcttgccctgacgtgctgctggcgatggttgatgttttactgacctacctcgaacaaggggcggactatattcgtctggacgccgtcgggtttatgtggaaagcaccaggtacaacgtgtattcacctggaaaaaacgcaccagttaatcaagctgctccgggctattgctgatgaggtggcaccggggaccatcatcattactgagaccaacgttccgcatcaggataacatttcctatctgggtaatggctatgatgaagcgcacatggtctaccagttttctcttccgccgctggtattgcatgccgtgcaacgccaggatacgcgtgcgttgtgcgactgggcgaaaacgctgtcgctgccatcctcgaaaacgacctggtttaactttctggcttcccatgacggaataggcctgaatccattacgcggtattttgccggaagaggaaatactgcaattagttgaagcgttgcagcaggaaggggcgttagtcaactggaaaaacaacccggacgggagtcgaagcccttacgaaatcaatgttacttatatggatgcgctcagcaagcgcgacagcagtgatgatgagagactcgcccggtttattttagcgcatgccatattattgagtttccctggcgtacctgcggtatatattcaaagtattctgggttctcgtaatgactatgatggtgtggaacaactggggtataaccgcgctattaatcgtaaaaaatatgatctggcaacaattgaatcggctttaaacgatgacgacacgctaagacataacgtctttcagacattatcaaagcttattattatacgtcgtcataataatgcctttcatccgaacagcgcttttgaaatagagagtctcacatcagaagttatgcgagtgacgcgtacaacaaaagatggcgaagccattactgcattgtttaatgtgagcgatcaaattcaaactgtgaatatttgttgctcgggtggttatgacttaattagtgaaagttatatcaccggggaaacattaacgctgcacccatggcaggttatgtggattaaaaaataa

SEQ ID NO: 76571 - DNA, 1266 bp, Citrobacter koseri
atgtttgcgctagtggatgtgaacagcttctatgcgagttgtgaaacggtgttcaggccagatctcaaaggaagggcggtagtcgttctctctaacaacgatggctgtgtcattgcgcgttcggcagcagcgaagccctttgtgaaaatgggggagccctatttcaaacaaaaagagacttttcgccgtcacggcatcgtcgcgttctccagtaactatgagctttacgctgatatgtcgaaccgcgtaatgacaacgctggaagaaatgagtcctcgcgtcgaaatttacagcatagacgaggcattttgcgatcttactggtgtgagaaactgccgtgaccttactgaatttggccgggagatccgtactacagtattacagcgtacacatctcaccgtcggcgtcggtattgcgcagacaaaaaccctcgcgaagctggctaactatgcggcaaagaagtggcaacgacagactggcggcattgttgatttatcaaacgtagaccggcagcgtaaacttttagctgcgctgccagttggagaggtgtggggtatagggcgacgcatctctaaaaagctggaggggatgggaatcaaaactgctcttgacctggctgacaccgatatccggtttatcaggaagcatttcaatgttgtgctcgaaagaacggtacgcgagctgcgtggtgagccgtgtctggaactggaagagtttgcacctgtaaagcaggaaattgtatgcagtcgctctttcggcgaccgcgtcacggaatatagcgcgatgcgccaggcgatatgcagctacgcatcacgcgcagcggaaaagttacggggtgagcatcagtattgccggttcatctctgcattcgtgaagacgtctccatttgctcttaatgagccatattacagcaacaacgcgtccgtaaagctactgaccccgacgcaggacagccgggacattattggtgcggccacaaaatgcctcgatgcaatctggaaagacggacacaggtatcagaaggctggtgtgatgctcagtgacttcttcagccagggtgtggcacaactcaacctgtttgatgataatgcgccgcgtgctggtagcgagagactgatggaagtgttagatcatctcaatgcgaaggatggaaaagggacgctttacttcgccgggcagggcatacaacagcaatggcagatgaaacgtgagatgctctcacctcgatatacaacgagattcactgacttgctgcgagttaaataa

SEQ ID NO: 76572 - DNA, 240 bp, Citrobacter koseri
atgtgtgatgctggaatcggcgagggcgatgtgttggtagtagacagctcacgaaaagcaggacatggagacatcgtcattgcagcggtcgatggtgagttcacagttaagcgactgttgctacatccggttgtcatgctcaggcctgaaaactccgtgtataagccaattatgattggtagtgaagacgatcttgaggttttcggtgtcgtaacttacatcgtgaagtctgctggctga

SEQ ID NO: 76573 - DNA, 1128 bp, Citrobacter koseri
atgtcaatatttaataaccagaatgctgtctattctaatgatacttatgtatttagagataaaacaatttctgataaaatttactcaattcagtatttgagaggatttgcagcgctgtttgttgttctttatcactctaaagaactaatgggaaatgcgtggaataagtttgtggtaaatggatttattggcgttgatatattctttataatgagcgggtttattatatactacataacgcataataaaaaagaactaaacgtaaaaacatttataataaaaagattcctaagaatctaccccgtattcacatttgcgtggattgctgtctttgttttttactataacaaccctagagttattgatatggtaaagtcttattttcttttccatatcgactataatgccaatgcgccaacttacaagtataattttgttgggccagcatggacgctgacatatgaaatatatttttacttaatattctgtgcttgcggctacatatcgcatacattcagagggttgctttccgggatttgtcttattttactccctattataatacagtaccactttaacgggtctttcttaattatttcaaatgcaaaggctgagtttatacttacatcggtgtctgaatcaccttttaaaatactatcaaatactatgttttgggaattcgcattcgggatatttattgcattcttatttatgaagtatagacatgcacttaaaaatacaaacacaaaaattaaagcatgtgtttctttggtgttactgtcgttttttgtttacttaatgttctttcatgggtggataaggcagggtgtaacaggaatgctttggccctcagttatacttgttattgctgcgctaatttcagaggacataataaaaaaagaaatcaaacccttatcatttttaggtgatatatcttattccctttatttggttcactggatcgttattagagtgatacaaaaacattacccagacttatgggataaaatgcatggatttggcggtttgactttgtttgtttttatatgtttgttgatatctttcataacttataaatacatcgagaaacctacaataaaactcgcaaggaaacttacagccaactag

SEQ ID NO: 76574 - DNA, 2259 bp, Citrobacter koseri
atggctaattcatatcagaatatccctgttcctaccccaacacagaactccgtaccgagcgcggatatccgcgaccatgtgtttgccggttcaaagcttgatgagttcgtgacatcaatggggtggacatacacagatcggtttggtggtaaacactacacaattgaagggctgcggtggctggcacagcaagccatctcacagtacggctatataacactggattcgtttgaaactggtaacaccattacgcttcccaatcaagtgcttcgacttgaaacaactggtgaatattaccgttgggacggggctctaccgaaagaagtgcctgctggctcaactccagaatcaacggggggagtagggacaggtgcgtggataggcgttggcgatgcagcacttcgtggccaattagcatcttctgaaggtgcttctattgttagagcttcagatggccgcacggttgagcagtggcttgtcgcgtctgattcagcttcgtatcgtgccaagaatatagccaaattggcgtgggtggattaccaggtccataaccgtggtgatattggggtttgcttcctgggtgactctatcacggctggctatgaccaaacatcgtctgatgtaattccaccgcaggatggtgattgggcaaccagggcaacaatgaactatccatatcggtttgcagattatctaaaagaaaaatcaggatgtaatgtaagtccttttgttatgcgggcaatttccgggtacaccgctaaaaatgcatacgaaaagtcagagtgggaatcaaaccctaactgtgatgttgtgattatcaattacggtattaacgattccggtagcgctggaactggcatagaagattatatgtcatatatggaaaagttaattcgccgatatatcgactttggcgcggcggttattatctgtactccttattgtgggttgaatggagcctggagtccaacgtggttgcagtgggggcgacgtatgcggatgatggctactatctacggttgcccttgctttgattccttcgaaaccaatctgcatcgatacggtggggcagttcaatctgatcagcatcatatgaattctatgggatactccatcatgggggaaaagatcgcttctatgatgatggctggaggtcttctggattcatacaaaccattagtcaatgagtatactgtttggccggggatgttctgtgattcagttgggtggtgtgacgcatttgggaatatatcaactggaatggttgatggcgcttatgtgcgacataaaatttcaggggctatgccagaagggcagaagtcattagtatcctttagtttttacctggatgccgaagcggcacatatatattcaaaattaactggagtcatcgcaacaaactatacaaacggtacggaatggaataataacgcgcagccgtattatagccattcgtcagaccagaccatgtcatacggtatggaaattgaacgttcccctaggtcggcagtagactatagaggagcacccggtacaaacaaatttattggtcgtgtaattggtcgaggatggcatactatctctttctcaaaggggattgatgaccccgttgcatatattcagtccttaacaattcagcctataccggttggattgtctaccgaacagatgtggggacaggcagaagaacgcagatacaaagtcgtgcaatgtaagaaaattccatcgccttccggtcagaatggttccctgccttcagcagttgcattgaacaatttttacatgaaagctccacagtctattctggggactggcagtaacttctataatctgccagtgccgaataactacaactcatcccatgccaaattgataattaccaatgcggctggaatgtatattgaagcgctggttgtaaaaacaacaaacagtgacggtatgcttaacgtacgtatactaaactcaacacttgatagcggcgacattcccagcataacttgccaatttgcaacatcaaaacgcaatattgtctacggcgtgggggctgttgacgataatcaaccgtgggtcgcaattgatgactacaacggcggcatgcagttacaaaacattaactcgtcagatatggcttgggttggtggggtttacctcgcattcaacctaatatggcctggaaccgccccaactggttactggaatattgaactttgtggatcggactggttcggtaattcagagtcggcatttggcgcgtactag

SEQ ID NO: 76575 - DNA, 2508 bp, Citrobacter koseri
atggcaacatttgaaattcagcgtctgcctggtgcacctaagcagcgcggccgccttgagccaggtcaacgcatgatcgactggcttgatagtcagaaattgcacagcaatgtgattgttaagctgaacgggaaagagctgaatgacgaatttgatatcggataccggttaaaagtcgacgatcatctgtctgtgttcgatcagccacaaaacatgggcggactgaaagatatcattaaattgtctgcaccgtgggaggcattgaacccgattcgtcttaccaaaaaagggatggctgcgttgcagaaattcctggtcggtgatgttaaaaaatcaccgtcagttgcaacgggtgagtcaccaaataacgatttaaccgggcagacgaacgtcgctcgcttgtacaaagggcgcccgaatatttacggccaggttcgcgcatatcctgacctgattcaggagtccctgttcgagtacatcgataacaagaaatatgtcaccgagttcatggaaattgggtatgggcgttatgacatctcatccgtccgctactcagaatcgtcgcttattgcaatggccggagccagctaccagatttaccagccaggtgaggtaattggcacgattaacgagggctatgctttcgatgatgttgacggtcaggaacttgacgggccggataaagcgaccggtgaaatagttcagcaggcaactacaaacagcattgttgaaggtatttatgccggcggccagatctctgtcagattggtaaaaaacaacgattttgattattttttcgatgcagttaagccacttgatgtgacgtttattcttaacgtaacgtacaacaccgcatcgggaacagtcacaaaaaacattactgtaaatggcacgctcatcagcgcaacgctcacagacgacggtgcgattatagatccggtgcaatggtacacatttgtctttaatgaccttaccggcgcagacatcaatgaaacgccagccaccgcgacgattaacaccacatactttcagataacgcagtacgaaagccttgccgtaggcccattctttgcggctgtagagtcaacctatctctggatccacatgtccgcaaaccaggcgaacgggaaaaagggacctgtgttgctcacatggtggaaagtcgatgacgataacaacatcatccccggcacgcagcagtcaatgcaggtgaatgttaataacaacaccgggtactacgactatgtgtattacacatacaaaattcagccagcagcaggaaaaggacggtatgcgtttactgcaatgcggctgaacaatgccgccaacgataataccgtttatctgcttgcggcacattcgataaatatcagacagaacgttgtttatccggctgacacgctcgttaagctaaccgtaatggagacggaaaacgcctccggcatcaaagagcgaaaatacaacctgctggcccagcgccgggtcatttcatacaaccgcaccacaggtgaagtggattatacactgcgcgcgtcacggtcgttcgctgatgctgttttgcatgagtgggtgatggttgcgaagcaggacgttaaccgacttgacctgccgacgctatatgcaattgcagacagccttaatgacgagcggttagggtatttcgattacaccttctctgatgcgaaacagtccctcggtgagcgcattcagacaatctgcaacgctgctcgtgttgacatcaactggataggagacatgctgacgttctggcgagacgagagagtggatgtgccggcggcggtattcgggcgcagtaatatgttctgggacgagttcaggatggggtactcgatgagtctcccgaatggatatgatggaataaccctggactacacagacccgcgcacaaacaagaaggcctacatctacctctctgtttcaactgatgggataagtgaagttccggcatcgacagagaacgcgatgacgataagcctggccggatgccgcaatgaattgcaggcgctcaaccgggcgtatctggaagcaaatcgtcttgtacattcacggctgagtatgactgtgaaagtgttcgaaaccacacaggttgtgcgcggcgccgtgatccagtgccctgatatgtacgacaacgagcagcaaaccggttatctgaaagggcgcgctggcgatgtattccagacgtcagaacggctaacgttttccggcgatatgtgggtggttatgacggacagtctggggaattatcagggacgttaccgggcttatcctgtcgacggaaatcctaaagcattctcggcagcggccgaggcgttcgacctgaatatctatgacgggagaaccgtgcagaccccatcgcgctactttctggcaagcagcgaagagcttaattcaacgctctggcgggtggagtcgtcaaaacccaatggcgatgacacccaaactctttctgtcgttgagtatggcgacagtatttacctgaacgactaa

SEQ ID NO: 76576 - DNA, 393 bp, Citrobacter koseri
atgaatgcaaccgattttattcggaaggttaatcacctgccgtggattgaccgcgcctgtagtttcgatgcggtggattgttgggggctggtggttctctactatcgccatgttctcggtgttgagatacatcagacgccggactacgaagccgggaaagacttcattacctgctatgaaggtgatcgtgtgttctggcatccgggattgcgtgcttccgggaatatcgctgttttctaccgtggtgataaccccgatcacattggcatagtcatcgacgggaattgttgcctgcactctcgcggtaagggggaaggggtgcggattgacccgctaccggtactggaaagagcattcactcgcacggagtttcttcagtatggcaacatttga

SEQ ID NO: 76577 - DNA, 471 bp, Citrobacter koseri
atgccaacgttacgtgaatggaaggagaggcgcccggcgtctgaccttaagcagacagtgacgttcagtcattctgctttcggcacagatcggctggtgaataacctctttcagtcagcccagtttggtgggaattcatatcagccaacccgctttgcgtttacagagcccgctcaggatggcacaacgacgcttaacgctacaatcaccttcgctgctttgtctcaggatatcaagtctcgacttaagtcatggcgtggagcggcaagaatggaaccgatactgttccggtatgatatctgggacaatattggcgacatgactcctctaaaaacgtactcaatgtacgttcgtgacgtcgccgctgcggctgaaaacgtctctgttactgtcggcatgacaaacccgttaagtgttgccacgccgattatctacaccgttcaggattaccctggtctgagcaatatctga

SEQ ID NO: 76578 - DNA, 483 bp, Citrobacter koseri
atggctgatgttaaataccctccgtttcttcccattccgcagcgcgcgaacatgaacatgacgcaggataccagtttccggcagagtaatccggctgttggtcctgctgtgtttacgcctgtcactactgacctgaaaacgacatggagtcttaactggattttcactcttgcagaagcagagcgattcaagtcctggcttcgatcgccaaactactgcaatcgtggtcaggaatggtttgatattccggttgatttgggtgatacgcagggcgtgcaggttcaggaagttcacttcataactatgccggtacagaccagtaaaaacggaaataccgttacctggtctgctgacattatctgcaatgaaatgtccgatatcacggaagattacgatgactggatcgtcaatgctcagcctggaatgggctggtggtacgacttacttgtgacggagattctgccagatgccaacgttacgtga

SEQ ID NO: 76579 - DNA, 2340 bp, Citrobacter koseri
atggcaggtgatactcaattaggcaatatcgtctatcaggttcagatggacgtggccaaacttatcgaagcgcaaagaaaagtaaacgagcgcctcgaaaaaatgaatggcggagccgctaaggcatcaaaaacgttcgaccagttgcaaaccagtatcaataaggttgcaagtgcaatcgccgcttcagtggtagcagattgggggaaggctttcctggttgcggcagacaacatgtcgcaattaaacgcccggattgagcgacttactggcagcgcggcggcggcatcgcaaacgatgcagagtctgatgagaataagctcatcaactggtggatctcttcaggatacagcgaaattatgggaatccctgagcacagcattacgtgatacaggagcgactaatggacaagttctccagttaactgagacgttgcagaaaattgggcgcataggtggatcctcatctgaggaaatggctaacgctctccgccagttcggtcagtctatttcatctggtgtagtcagggcggaggaatttaactccatccttgagcaaatgccggaactggcgcgccagattgctgccggaatgggcgttagcattggcgaattacggcagaggatgctggaaggtaagctgactgctgaagatgccttaaatgctatacagaagcaaacatcctctgtaaacgcagaattcgacaaacttccacggacgctttcgcaggccaatactgctttcactaactcagtgctgagtatggttgactcaattaaccaggcgacaggtgcaagtaccgggcttgttgcggttattgattccgtcactgctgcgttggatcgtttgatcggaaagtctgcatccgctgcatcacaaatttcagaccttaccagcacagcagaaatgtttgaacgccgggctcgcacatggggatggcttggtcttgatggatgggaggcacagagtaaggcgctggccggactgagcaacagggcagcaatgctggttggcgatcttgacgctgttacaaaagcatcagagcaggccgctaatactaagcccattgagataaaagcaaccggaactggaaataagccaaaaggtggtaaatctcaggctcaaaaagatgccgaacaatacgccaaatcgcaggaagagataactcagaagctagaggcaatgcgacagaaagctgacttgtcagcaacaagtgttggcgaattgtcccgcgctcagtctgtgcttaatgcccagcaatcgctgggtaaatctgcgactgagcagcaaattgctcttgcaggtgaatacgccgctaaagcctgggataacgcgaatgcacttcgcgaacaggctaaagcggaaaaagaaagagccgaagccagcaacaagttcagcgctattcagggacggaccagcaaaacagccgggctggatagccagtatcagcaggacatggcagaccttaaccaatacgctttgctttaccctcagaaaattgcagaagctgaagcggcacgggcagccatcgaactgcaatatcgacagcaacgttctgctgcgatgtttgaagagtggacacaacttaacctcgctacgcaaatggctggcgctgcttttacgtcgtttggcaataatgccagcaatgcctttaccggcattcttactggcagcatgactgcgcaggaagctattaattcccttgtcagcaatgcgttgaacagtgcgatcaatgcggttgtgcagtggggcatagactgggccaaatctgctcttatgggacagacagctactgttgcagcggtatcagcttcgactgctgcgcagacagcaggtcttgccactacgacatcagccagtactgcgtccgccgcaacgacaacagcggcctggactccggcggctctcgtcgcgtctatcgggtctttcggtggtgcggttgcgattggtctcggtgctctggttgcggcgctggcggttggcaaaggcctggcggggaaacgtaagaacggtgggcctgtatcagcaggaagcatgtatcaggtaggcgagggtggcatgcctgaaatctaccgagccagcaccggcaagcagtacatgatccccggtgataacgggaaagtcatcagtaataaggatatgacgtcgggaggcggttccggcggtgttgtggttaatgtgaataactacacgtcagcagatgtgcagacacaaagcagaaacgaaaacggaacccagtatgttgatgtgttcattcaggatatggaaacgggcgggccgatgtcttctgcaatgcaaagtacatttggcttatcgcgacaggcaaacggagatctgtaa

SEQ ID NO: 76580 - DNA, 744 bp, Citrobacter koseri
atgaccccgttgacagatattggtgagtgcgtgattggaattaatgggcgtgattactttttccgcccatcctttcgcaacatgacacgcatcggtgatcctgagcatatcgtgcgcactttctatgctttatttaatgatgatgttgtcaatatgcttgagtcagcaagagatattcacagcaaacttcctgaacatcaacggcgtttttatgcccgatacttcggtgatatagctttgccttgttgggctattaatgctgcaagatctgctgggtacacgcgagaagcgctgttatcagctatcaatgtggtgagttcatgttgtaatgaagacgtatccgagctggtgggatggcttaatccatcgaagacgggaaggaggacatttgtctggcatcgtggggcaatgcctcctgagaatattatcatcattgcccagtcccttattatgcatggtgttattggtaagacgagagcgagggttttacaaaagcacgaaaggaaagaaaccaccaaagaatttcatgcaacagaatacataatggctgcccgtaaccatttcgggatcggcagggacgaagctgagaaccttaccatgacagagtttgccatgatgctaaatgctaaatatccagaccagaaaggtttcacccgtgaagagtatgacgcagtaatggatgaagatgaacaacgatggcagtccatgatcaatcgtgaaaatgcgacgaaaaagattgcctga

SEQ ID NO: 76581 - DNA, 756 bp, Citrobacter koseri
atgcaaggctgtgctaatgattttggcaagctgatcgggaaagtagctgtgctacgcatggcctttggctgccccgacgcagtgccggcgctttccgagtggaagcgtctcggcgctatgacgaccaagggcatcgactattcgatgaacaccatcaactccgaagcagatgatgctaaagggctggtggagaacctggtcaacaacatggatctgacgatctccggtgaaggtgagtttcgcaagtcggataaagataacgagatcggcgcgtggcgtctgtcgaagtacatctttgatgaagtgcaggcaggtcggcagcctaacctttgggtgcgcttcgacttcgctggtgagaacgctggcacctacattcagggctacatgaacaccacgtcatggtctggtgacttcggtaccaacgatatctccaccttctccggcgagtggaaggtctacgacgccgacaccgttgtgtttgaagtcgctgactccattgcggccactggcgttgaggttacccctgcaactgcttctctggtcgtcggggctacccagcaactcagcggcgcggttcagccaactgacgcgactaataaatcgatcacctggacgacttcggcgccttccatcgccaccgtcagttcaaccggactggtgacagcagttaccgagggtaccgcgactattacggctacaactgctgacggtgatttcaccgacaactgcgctgttaccgtgactgccgcaccgtaa

SEQ ID NO: 76582 - DNA, 384 bp, Citrobacter koseri
atgactcctccaatgtacgaacgagtacgtaatttcttcgtaagagcagggattactgatggttacgtcgttcagttgctggcattcgacgacaccaagaaatcgtcagacgcatttattgtcttccgaccgaacggcggcaccgacatccgcagcgaccttggctcagatcattatgtactggtagacgttatctctgccaaggataagcgtcgcccagcagcagaaaaggcacaggaaatcatcaattatgtcgaacagaacgacattgccgatgagtgccttggcctgattcaaaacctcgggaatattccagcaccactcctgactgaagagggacgattggtcttccgacttcagttcatgtgcgtctacggcgaataa

SEQ ID NO: 76583 - DNA, 369 bp, Citrobacter koseri
atgggcataaaagtgaagggcatcagccaggcgaagaagcacctgaacactattgttggtgatatacaggggagaaaagtcgttcgtgctatgcaatctgctttgattataggcggaacgcaggcggctctgtatacaccaattgatacttcaaccctcataaacagccagttcagagagattacggtgaacggtaatcgtgttactgggcgcgttggatacactgctaactacgccgtttatgtccatgatccgaatgtaccgcagaacttccgccgggcaacggccaagaaagaatttcttactaaaggtttcgaagaaacccggcgacagatagacgctgaaatcgccaaggaaatgtcgttatga

SEQ ID NO: 76584 - DNA, 288 bp, Citrobacter koseri
atggggtttgattactggctggtaatagggtgctcgttactgttcggcccgattgctttagtggaggctatcgcatacgtaaggcgggggatttacactaaaacattcaaagggactaggcggagagaatacattcacaaaaacatgcagccagtggagtactggtttagtgtgatttttcacttcgcaatgagcttcgcgatgattggacttgggttatggtttctggactacattccatttttccatgatttttattctgaaatgcgcgcgatgttgcccttttag

SEQ ID NO: 76585 - DNA, 351 bp, Citrobacter koseri
atgtcatcggtagcaaactggtcttacaccgcaacggcgaccatctggcgcaagctggctggaaatgacgaatatggcgacccgctgggctatgccgaacctgagcaaatcctctgtgattacgagggcgggctcagcaagaagttagccagcctgggcgcagaaatcgtcgtgaagaataccgtctggacggagttcgcgctggcggccgcgggtgattacctgctgattggggtttcgacagaagccgacccgattgtggccggtgccgacgaggtgcggcaggttatccgctacgccgacacgttcgagcgcctggcggatgattacgcgattcttactggggtttga

SEQ ID NO: 76586 - DNA, 174 bp, Citrobacter koseri
atggcgtggatatccgttagcgtccggatgcctcgctcattcacccgcgtctgggtgatgaccgacaccgggcgggagacaactggctacgtgaaatcggacggggagtggttcatcaactgcccgcgcatccgggcgactggcgcgaaggtgctgcgctggaaggaggactga

SEQ ID NO: 76587 - DNA, 381 bp, Citrobacter koseri
atggctgacccaatcacagcggcagacgtgcaggcgttcctcggtgaattgggttactccataccgggtgcgctgcttgagccgatcctctgcgtggtgaataagataatcccgtgcctcgatggcgctgggtatgacgagtgcaccgcgaagctgattttgatgtatgccgccgcgcttatggctacgtcttccggcgcgcgccgcatcaaatcgcagggtgctccgtctggcgcgtcccgctcgtttgaatatggcgacgacagcattacctggctgcgcgactctctggcccggctcgataccagcggctgcaccggtgatctgccgatcagcgccggtaacagcgtgggcctgttcatggtggtcgggggctgctga

SEQ ID NO: 76588 - DNA, 207 bp, Citrobacter koseri
atggcactggtaaaagtggcctcatctaacctcttttccggtgccaatctccagaagctggaggttggcatgacgttagaggttagcgatgatgttgcggaacgctgggaatctgctggtctggttgaggtgatcgatggcggagagcgtcatattgagtccgccgctccagcagagccgaaaaccaaagcgaagaagggtaaataa

SEQ ID NO: 76589 - DNA, 1080 bp, Citrobacter koseri
atgtttgcattttctgtgaaaaaggcgaaggagacccgaaactttgaggccaaccaggctcagtttcaggagttgcaattcgcacgcaatgccagcgctcaggctgtggcagatttcatctcccgcgcgcaatttcgtggtgaggcatccaacgccccggtactggatgttgttaatgcagtagacgatatccgccgactgtataaagcgtatgaccagacagtactggccgagtttgagccgaccacagagtttacgctactgaatgatctgatgccgctgtcccgttccgttcgtctggaagaatcagtgtacgagtatgcccgcaaaggcggacgaggctgggctcacacttctatgtcaggtcagattggtgccgctctggacgcgaaaagctacacctttgacggaacgatggtgccgatccatgacagcggctttaagttcaactggcgcgacccggtattcaacaagggttccgctctggcatcactgtctgacgctcaggctggctctgtcgatgatgttcgccgtcagtatgtggactacatctggaatggttttcgcgacagcgaaggcaatttcatcaaatttgatgactatacctggaaagggctacaggcggacgagcgcgttgctcaggtaacactgacagtcaacttcgcaaccagcaccgatccagacgctatgcgtgctgccgcgattgcgctgcgcgatgtactgaagcttcaaaactatcagtatggccagcagacctggtatgtgtcggcagaaatcatgtccaacctcgagcagtactacgacactcagaataaaacccgcaccgtgctggaagagattctgaagttatctggtatttccgcagtaaaagaagatgctcagttgaccggcaaccagatcctgattgttccgctgggtgctggagttattgcccctattgttggtcaggcgttcggcacagtagccgacccgcgcctcttctataacagcgattatgtctggcgtacctggggtgcagctggcctgatggttaagcaggacatcaacggtcacttctctgtcgttttcgcttcgagctaa

SEQ ID NO: 76590 - DNA, 444 bp, Citrobacter koseri
atggctaaagacggaaaacacgtaattcacgcgggcggcattttcgctaacccgcaacttcatcgcgaaggtgctgctgcggcagccactcagccaggtactgtcggtatttttgttgatggtaagttcactgcttcaaccgatggctcagaagcagcaattcactacgttgccaactatgactacctgcgctgcaaaacagtagacgataccatcgccgctggtgactgggtagttgcatttcaccccactcctggtgtgttcctcaatttgcgagcagcggcgggaacatactcaaaaggcgatccggttgccgtggacaatggtcgaatcaaactggcaacgactacaggcgaaacgcctgacaccgtgttcgcatatgtagaagaagacaaagcgctgaccgctgctgctggcgatctggttcgcgtcgtattcaagtaa

SEQ ID NO: 76591 - DNA, 1389 bp, Citrobacter koseri
atgaaacgcaaccgcgttaacgtgctgaccgtcgtcaactccgcttcaaacatcaccactgaaaccatcgacggcaagccacatatcgtggttcgcggcatcacgcctgtcgtggacgatatcgtgatgaaccggaagttgtacccggcagcagaaatcgaaaaggcctacaacacgcttgagcgtaatccgatgccgctgggccacccgaaagtggacggcaagcatgtttcggcgcgcgatgtcagggcggtaaacgagtaccacgtcggggcatggctgcaaaacgtcagccacaaagacgggaaggtgacgggcgacatgtacgttaaccgccagtacgccgagtcgagcgataagggcaagcgcctgattaaccgcttggatgagatgctggccggtaccaactccgacccgatccacatctccaccggcctgctgtattccggtatcgccgccaacggcgagtcgaagggcaagaagtataacgaaatcgccaccaacatgatgtttgaccatgtggcggtactgcttgatgagcctggcgccggcacgccggaagagggcgtaggtattttcgttaatgccgaaggtgatgagcagcagattgaagttgcccgcctggctgatggaatcgattgcacccgcgacggattgctcaacaaaaccaaatttttcttcaccaacgcatctaacttctctttcgacgacatatcccgcgctatcagcgacaagctgcgcgaggttgacaccgaagacaagtggctttggcctgaaacggtgtggccggacagcttcatttaccgcaatgacaccaaatacctgaagcagaagtacctcatcgatgatgacggcaaggccgtgttcgtcggcgaacctgtagaagtcgtgcgcaaacccactgagtacgagattaaaaccaacggagagaacgatccgatgaaagaactgattatcaatgcgctgcaagccgctggtaagccgactgaaggcaagtccgacgctgagctgatggacgcatacaaccagatgaaggccgaagaagccaccgccaagaaaaaaggtgatgaagaaatcgacccggaaaccggcaagcccaagaaaaaagagcaggccaccaataacgaagagatgccagcgtgggcgaaggtccttactgagcaggtcaccgcacttaacagccagatcaatgccaactctgacaaagagaagggcgaaaagcgcgcagctgtgaaactggcgatgaacatgagcgacgacgaagtcgcagatctggacggcaaggcgctcgacgcgatgtacgccaaatgccagacctccttcggcctgagcggtgcattccgccatcaggcaaccaatacccaatcagtcagcgaaatgccggagtaa

SEQ ID NO: 76592 - DNA, 222 bp, Citrobacter koseri
atggaaaactttgacgcagttttaagggaagtaaaggccgagctgactaaacgtggtatgcagcattcaagccttgtttttaacaagcttgctgagcggtacaaaccatcgttcaaggcggcatcaaaagctgaacaggaagagatccttcagagattgaaggattaccaaaaaacaagcgggttgaatattcgtttcgattgggaagcttctctttcttaa

SEQ ID NO: 76593 - DNA, 987 bp, Citrobacter koseri
atgatgatgacagcgcaaaccagaatcgggacgccaatcgtaccgcgcaataaagctgacccgacgcaatcatcgcggcaggtcagtcggatgttcaacgatatcgaagatcggtatctaaacatcaagcgcaggcttaaggctctgtttgagctgcggctgaccggacagcagcgtgaggcgaacgcacagcagtcctggatgatgtgcaacaacgagggcgcagaaccttcgctgtatcaggtcaatgccggtaagttcgtctatgacatgacagctgctgaattggccgatctgctccaggtggtgcagtcgattctggatgatgagcttcttgaaggcggcagccagaacctatgggtgatggactatgtcattgcggaatatgaccgaggcacgctaaacgcctacaccaacctgtcgatccagtcgcaggtgtacgcaagtcagacaacgctacagcagcttttaagcagtcccggacatctaaaccagatagcggcggccaggctgacaacgttcagtgactggaaggtcatcagcgatacagcccgcggcgacctagccaacatcatcaccgatgcggtagcgcgcggggtgaatcctcgcgagacggccagcgtcatcagcaagcgcctcgatgtgtcgatgtcgaaggcaaagaccatcgctcagaccgaacaggtcggcgcgctgcggcgggctcagtggaatgaaactgactgggctgccgacaggcttgggctgaatactggactgttgtggttgtcagcactcaaaccgacgacgcgtagttggcacgccagccgtcacggcaaggtctacaccaccgagcaggttcgggacttctacgccgagaacggcaaccggtacaactgctattgcagccagattccggtgctgctcaacgacgacggcagcatattcaacaaagggttggctgataagttggcgaaagagcggaagcagtggaaagttgcagcataa

SEQ ID NO: 76594 - DNA, 1461 bp, Citrobacter koseri
gtgagtgaacaacaaggcgaggtttcattcctcgttaatgcccttgctgatgctatcgggcggcagcgcatgctgtacgcaggccagccgggaaacaccaaacgcacgaagttgtgggatgagttcggctatccaaacagtctcgagttcgaccgctactaccgggcatacgagcgcaacgcggtggcgtttgccgcagtccataagcttcttgattcgtgctgggttgataacccgacgatcatcgacggtgacgacggcaaggagtcaaccgagacaacggactgggagaaatcagccactaagctgctgaagaagcactggccgaaaattaaggatgcggatcgccgtaatcttgtcggtcggtactcggcattgctcattcagttccgtgacggcagggaatggcacgagccagtcgaccgcgcgaaggttaaatctctacggaatatcggtaacggacccattgtcaagctgatccccgcgtgggaatctcagatcaagccaggtaatttcgataccgacacgctttcagaaacgtatggccagccagtttcatacaacttcaacgagcagccagttggtgatgatggcacgtatggcccggtgcgcggcgttaccgtacaccccgagcgaatcatcattctctgcgaaggctctgaagacgagaacatgctctctggcgtgcctttcctgcgtgcgggctacaacaaactgctcgacctcgaaaaggtatcgggtggtagtgctgaagggttcctgaagaatgccagtcgccagctagggatagcgttcgacaaagaaaccaacattgcgaacctgtcaaagaaagccacagaatctggctacaaagacctgggcgaggcgcttaacgacaaagtcgccaagatgaaccgtggcacggatgcggccctggtaatgcaggctggcactccgtcggttctctccgtggcagctgccgatccatctccaacatggacagtggccgctaacgagtttgcatcttcgattcagtgcccattcacaatcttgtttggccagcagacggggcgccttgcctccgatgaggacaagacagactgggcgaagcgctgcaacggccgccgctggggattccagtcaacggtgattgagagcgtgcttgagcgtttctggaccgttggtgttattgaaccgccatcatccggagaggtcacgttggcatggtctgatctgctcgcgccgagcgaaaaagagaagatagccaacatgcaggcaatggctgtcgtggcgaaggatacccagcaggcatacggcacaccagcggtggatgaaaacgaaattcgcgcagttggtgaactggagcctcgcaaggtcgttcagccacctaaccctgataaaaagcaaaccgataaggatccgctgacagatgatgatgacagcgcaaaccagaatcgggacgccaatcgtaccgcgcaataa

SEQ ID NO: 76595 - DNA, 1473 bp, Citrobacter koseri
atgaaacctgagcatctgaagctgctggccgataaagactggcggctgaacaatctctactggatcaccgataaagagggaaagccaacgcggttcaggatgacgcctgagcagcgggagtactttgaggggatccacacccgcaacatcatccttaaggctcgtcagctcggatttaccactgaggtgtgcatcatccagctcgacgcggctctgttcgagtcggcgaagtgcgctcttattgcccacacgctgaatgacgcaaagcgcctgttccgcgaaaaggtgaagtacgcatacgacaagcttccagcagagataaaggcggccaacccggcgagcaatgattcgtctggtgagctggtgtttaagaagggcggatcgctatacgtcagcacgtcatttcgtggcggtacgctgcgttacctgcacgtttccgagttcgggaagatatgcgccaagtatcctgacaaagcccgtgagatcgtcactggtgcgtttgaggcggtatcgactggatgcttcgctaccatcgagagcacagccgagggccgggcgggttacttcttcgactactgccagacggcagagaaagcgctgctccaggataagccactttcagcgctggactggaagtttttcttcttctcctggtggaagaatccgcagtacgcaatcgacccggtcgaagcgctgccggtgcgcctgctggaatacttctctgagatggaagcgaagcacggcgtaatcgtcaacgaacgccagaaagcctggtactacgccaaagagaaaacgctcggcgatgacatgaagcgcgaatacccgaccattccggccgaggcgttccagcagtcggtcgagggtgcgtactacgccaagcagttccgctggctctataccaacaagcggatcgggcaaatcccggacaactcacacctgccagttcatacattctgggatatcggtgtgggcgactccacggctatatggttcgttcgtgaggttgggaacgagttccacataatcgactactacgaaaactccggcgaggggctgaggcactacatgaaggtgctgaaagaccgcggctatgaatatggcgaacactggggtccgcacgacatagaaaaccgcgagttcggagctgatgccaaatcgcgtaaagaacttgcgcaggaaggctatgaaatcgacggacaggtttactcgatgacgttcaatgttgttccgaaaacgggtgtcgataccggcattgagtcggtgcgtgaaattctcccatcctgcgtcttcgatgaggagaaatgtgccgagggcatatctcacctcgaaggctaccgcaaggagtgggacgacaagcgcgggtgctggaaagacaaaccgcttcatgactttacatcacacggtgctgacggcttccgttactttgcggtagcgaagaacaaccacaagcaggtcggcgcagtattcttctaa

SEQ ID NO: 76596 - DNA, 603 bp, Citrobacter koseri
atgagcaaaccggactgggaggccatcgagacggcgtaccgggccggagtgatgtctctccgagaaattgcatctcaacacggcattagtgaaggggctatccgtaagcgcgccaagcgtgatgactggtctcgcgacctgaatgcgaaggtgaaagaacgcgccgacgatctggtacgcaaagcagaggtacgcaaacaggtacgcactgaaacgactttgtcagagcgcgtacttatagaggctacagctgaggtcattgctacagtacgcatggagcatcgcggtgacattaaacgcgccaggcagataaccaatgccctgtttgatgagttgggcgccgagtgcgcagatgtagcagcgctggagaaactcggagagttgatgttcgatcccgacgacaaaggccaggacaagctaaatgagatttaccacaaggtcatcagcatgccggagcgtgttaagtcgatgaaggctctcagtgaagcgttgaagaacctcatcggtctcgaacgacaggcctacgacatcgacgggcctgaaggcgacaactctgttaaacaactctctgacctgatggattcactgtctcagggggcgtaa

SEQ ID NO: 76597 - DNA, 219 bp, Citrobacter koseri
atgtcagacatctaccaaatcaccctaaccacccaaacaggcgaaaccttcacgggaaagatgtcacgacgtcagcctgagctggttaacggctttgtgccgctggcgactgagacgggcgagtggttgtatttcgctcctgccgatgtgaagcgcgtgcagttcacgccggtattggaagagcaaaccgagcagtcggaagaacaaacaacggagtaa

SEQ ID NO: 76598 - DNA, 387 bp, Citrobacter koseri
gtgattggcgcgctgctaaggcgttactggttgcagcttctggtggtggcgttaatcggcgtgctggcgttcttcgtaaaccgctaccgcgaaaacgccatcacttataaagaccagcgcgacaaggcgacggtccgggcaaacacatcagaggcgatcaccagcaacgtgatcaccacgatgaaccttatccgtgacatctcacaggctacccagaatgcaaagaacgaactgtctcaaaagggcgagacgcgcattgtctacatcaggcaggcgcttgaaggcgatccgtgctctaaccagcttgttccttctgccgctgctgacagcctgcgggaatacgcagacagtttacgttccggccccagtggtgccgataagcgctga

SEQ ID NO: 76599 - DNA, 450 bp, Citrobacter koseri
atgcaaaccagtcctgacggcattgctctgataaaaaaatttgaaggttgtcggctgactgcctatccagacccagggacaggcggcgcgccgtggacgattggttatggctggactcacccggtagatggcaagccagtaaagcccggaatgactatcgaccaggcaacggctgacaggttgcttaaaacggggctggtgagctatgaaaacgatgtactaaaactggtcagagtgaaactgacacagggacagtttgatgcgctggtatcgttcgcttacaacgtcggctcgcgtgcgctatcaacatccacgttgctgaaaaagcttaatgccggcgatgccaaaggcgctgctgaggagttcctacgctggaataaagcgggcggaaaagtcctgaacgggttgacccgtcggcgtgaggcggagcgcgctctgtttctgtcgtga

SEQ ID NO: 76600 - DNA, 324 bp, Citrobacter koseri
atgaaaatgccatacaaacaagatttcatcgctgcgctacttgccgccaaggagcagggtattggtgcaatgctggcttttatcatggcgtacctgcgtggtcgctataacggcggcgcggtaacaaaaacgctaattgatgctctgatgtgcgcgatgattgcctggttcgttcgtgaccttctggactttatcggactgagcagcaacctcgcctacatagccagcgtctttattgggtacatcggcaccgattcgatcggcaatctgattaagaaattcgcagccaaaaaggcgggagttgacgatgcaaaccagtcctga

SEQ ID NO: 76601 - DNA, 501 bp, Citrobacter koseri
atgaaactggaactcaccaaagatcagcatcagtggattgaccagtggctccagttatggggggcgtggacgcaaacaggaaaaatcgacaaatccatgatcaacatgatagcgaagttcatggctaccgttcagcctcaggagtcatcccggccagtatgcagtgatgacgatggtatgctaattgatggagttattcgtcattacctgaagaacatcgatgaaaatgcgtggcgggtggtttttgcatactacgtctgcaattccagtgagatcagcatcgccacatggcagcacgcagtttgttcaccgcgactgatgagaaccagagcaggcaaccagtataagcgaccgagcatctctaccatccgccgtgaggtgaaagatatccttaatgcctcgctttattgtttatatcaaccactgcaaaatgctttcatctgtcgcgatagtgtgaagaaagtagcaaaaaaagttgataacgtgcttgcttttcaatga

SEQ ID NO: 76602 - DNA, 195 bp, Citrobacter koseri
atgacccgcaccgatatcgacaactatcagcgctcgtcagtagagcgtgctaccaggctgactccttacgcaaggagtgaaatagcccggattgatagtgagatagcagagcttcagaagcgcatcgatcggaacaacgaattacgccgtgaaatcatcaaacgtgcaaacatgaacaaggggccctcacaatga

SEQ ID NO: 76603 - DNA, 228 bp, Citrobacter koseri
atgaataaaatccattacccatgtgaaacagcggcaatcttccaggatgtgctgtttgttatccgggttaaccatgcgtcagagctgctttgcgccgccgacagagcagcagagttctatctcaatcatttcccttacgcgacgttagaaaacatccgtgaaggaatcctgtatagctttggcggcctgtatctgaatgactttgagctcatcagggaggcagcatga

SEQ ID NO: 76604 - DNA, 591 bp, Citrobacter koseri
atgcgtaagccaacccgtcgcacctgtaaaatatgcaaagaaaagtttaccgctaccttcgacaatgtctggtggtgctgccctgagcatggctacgaatatagccagttgcttcttgccaaaaagaaactggatgcggagcgcaagcgtaagcaggaggctcaacaggaacgccgagatctgaagatccgcaagaaggcgctgcaaccactcagtaaattccacgaacgcgcccagaaggcgtttaacgcgtttattcgcctgcgtgatgcagggcagccctgcatcagctgcgagcgaaactctggtgccaagatgaatgccggacacttccgcactgtcggcgcatcaccagaaacccgctacgacgaaaccaactgtcatatccagtgcgaatcctgcaactcatacctttccggcaacatcggtgagtaccgtccgcgcctcatcaaaaagataggacaggaagcattcgatcgcctgatgggcccgcacgaatcgaagaagtggacacgagaagaactcgatgccctggccgcgcattaccgcgcaaagctcaaagaactgaagcaacaggagattgcagcatga

SEQ ID NO: 76605 - DNA, 450 bp, Citrobacter koseri
atgaagcagcactactgcatcgttaacgacaccgttaaacgcaacctaatcgagtttattcgcaccctgccggtaaaccctcgcgcgccgatggtggtcgaggcacgggaagaaacccgcactgataagcagaaccgtttgatgtggccgctgctgaaagacctgtctgaccaggttgtctggcacggcgaaaagctgacccgcgaagagtggaaggatctcatcaccgttctggtaaatcagacacaagaccaggaacagaaatccgcgccgggcatcaacggcggccgcgtttatttcggcgtccgcacatccaaatccagcaagcgctacatggtcgacgtcatcgaggcaatttactggtttggcactgatcgtggcgtaaatttctccgaggcatccagtaaacgcatcgcctgggcgcaagagtggagagcttctcatgcgtaa

SEQ ID NO: 76606 - DNA, 258 bp, Citrobacter koseri
atgtcagactggaacatcgcagcaaaatcgaaagacgagcaggacaaaatcaacgtggatttagcggcaagcggcgtggcgtacaaagagcgtctgaacatgccggttatcgctgagcaggtagcacgagagcagccggaacacctgcgcgagtattttatggagcgagtacgttactaccgtgagcaaagcctgaagctacctaaatcatccgatccgcgctacatcgaaatggcggagcagaacgacaaaaagtag

SEQ ID NO: 76607 - DNA, 471 bp, Citrobacter koseri
atgaaactgtttcacggctcatacagcaacgatgccccagcaattaaaattggtgctttcgcaatgtcaggtgacaatatttttgatggtatctttgcttgctcagattccgatgttgcaggttctcacggtaattttgtttacagctacaacgttgaaagcatagcggataatggagacttaaatgaccgtatcgctgatatcattagcttcctgcgcagtgaagttgaagcagacgaagaatcactggaagcgctggcatacgcactggcagacgatgagtgtgacgccgcttttgctgatattctgtcaccccgcactgattcagcggatgagtttgcagcagcaagctgggaaatgcagcgcctgcgtggtcgcgccgccgcccatcttggtttcgacgctgtagaaatggaagacgagcacggcacaagctacctgatcgtcaaccctgctgtaaaaggtgaatga

SEQ ID NO: 76608 - DNA, 300 bp, Citrobacter koseri
atgaaaggcaaacaggcaattctgcgttatctcgaaacgcaccgtactttcacagcaagggatgtggcaacagagtacggaatatcactgagttgcataaccaaaaacgcccttgagcttgagaagaagagaacaatcatccgtcttggcaaagtatggcgaacggtgacttatcgcctggcgacaccggaagaacaggatggaacagcacgcagctgcacaaacgggatattccaggagcgccgcaacagcgcggcgatgaagcgagtattgatggtttgggggagagcgtcagcatga

SEQ ID NO: 76609 - DNA, 729 bp, Citrobacter koseri
atgaaaagccttgcagagcagatgcataactttgaccgcgagcagatgcgccgcgttgcgaacaacctgccagagcagtacgacgacaagccgcagctagagcaggttgcccaggtcatcaacagcgtgttcagccagttactggcagccttcccggctaccactgcaaaccgtgaccagaccgagatgaacgaaattcgccgtcagtgggttatggcttttgctgagaacgggattaccacaatggcgcaggttgatggtggacttcgcgtagcccgtcgtcaggagcgtccatttctgccgtcgccgggtcagtttgttgcctggtgcaaagcggaacaagcggccgccgctggtctgcctgacgcgaatgaacttgtcgatctggtttatgagtattgccggacgcgcgggctgtacccggatgctgagtcctatccgtggcccgggagaattgacgggcagcatacgcaggaatcatctgccaactactggctggttacatccctgtattcaaacatgcgagccaacgcactcagcgacacagaactgcggcgtaaggcatcagaagaactcgttcacatggcatccagaattaatcgcggagaaaccattcctgaacctgtaaagcagcttcctgttctcggtggcaagcctctgagcaaagcacagggactggcaaagattgctgaaattcgcgcaaaacacggactgagggggaagcactga

SEQ ID NO: 76610 - DNA, 942 bp, Citrobacter koseri
atggaaaaccagaagtctggttacgtcccgttgtaccggagcatcaagaagaagtcatgggctaaagatgtgttcctgcgcacgttgtgggagaacctgatcattgacgcagccagacagccatacacggcattcttcaagggcaaacaatggcctctgcaacccggtcaactggtcgtcactgctgcggatcttgggcttcagttatgtgaccgtcagggcaacccgacaagccgtgacgcagtggagagaatgctgtctgtttttgtccgggaagggatgatcaccatcgaaggagagaagcgaaaaggcagggtgatcaccatcacaaattatgtcgaatatgctcaaaaaatggacgatttgcccgcacataaggccgcacatacaggcgcacatgacgaagccagtaacggcgcgggttcagatgggtatgccacacataaggccgcacaattccccgcacatcatgaacaagaaggtaataacaagaataaaaacattaaaagatcttcgtccgagaattctggcgaatcctctgacgcccggatgaagaaatttttgtctgctcatcctgacgcagtggtttacacacctagcggcagcaagtggggaaccgctgaagaccttcgggttgccgagtggattttctccagggtcaggatgatcaacccaacctgcaaagcccctgacatgactacctgggcaaacacggttcggctgatgcgccagatcgacaaccgcagctaccaggatatctgtgccatgtacgactgggccagcaaagactcgttctggcaccgcaacatcctgagccctgaggcgctgcgcaagcagtgggacaaactgaacatgcagcgaagcgtgcctggaactcaggtttccgggaagccaaaagtcgacctgaccaacactgactggatttacggagtgcagctatga

SEQ ID NO: 76611 - DNA, 222 bp, Citrobacter koseri
atggaaaattcaaccacacgcaacaaagcggaggcgcgccgaatcgagagttggttacacagccagatagccgagatgggcgcaacgacaattgcccaggtagctggcgtcaacaaatcaacagtgagccggtggcgggaaagtctgctgcctaacatgtcacttttgctggcaatcctgatttccaaccgggatgaggtgaagggggatttcgaggcatga

SEQ ID NO: 76612 - DNA, 207 bp, Citrobacter koseri
atggatcagcgcatcaaactaaaagattacgcaaagcgctttggtcagaccaaaactgcgcaagaccttggcgtttatcagagcgctatttttaaagctataacttctcggcgtgatatcactgtaattgtccatgctgatggttctgtgtcagccgaagaactaaagccattcccgagcaatcgacgggaaagcaacgccgcataa

SEQ ID NO: 76613 - DNA, 717 bp, Citrobacter koseri
atgagcataaaaaagaaaccgttaacacaagaacagcttgaagatgctaagcgtctaaaagcaatttacgagagcaaaaaatctgagttaaagctctctcaggaatctgttgccgatgctttaggcgttggtcagtcagctattgcagctttacttaacggcgtgaatgccctgaacgcaagcaatgcagctgcgttagccagggtgttcaaggtaagcgtaggtgaatttagcccatctctgtcaaaagaaattgaggagatgtacaggtcagtatcgtcagaatcagctagtgccgcaggggattacgattaccctgtattttcccatattcaggcaggcatgttttctcctgagtttcggacttttactgagcgcgatgccgagaaatgggtgagcacaacaaaaaaggccagtgatagcgcgttctggcttgaggtcgatggtcactctatgactgcaccagcaggatctcgccccagcttcccggaagggatgctgattctggtagacccggagcaaccagtagaccctggcgatttctgcatagcacgtttgggtggtgatgagttcacattcaagaagctgatacgtgagagcgggacatcatttctgcaaccactcaacccgcaatatcctctgatcacctgtgacaacaactgtcacattgtaggtaaggttgtggcttctcagtggccggaagagacgtttgggtga

SEQ ID NO: 76614 - DNA, 384 bp, Citrobacter koseri
atgaatgatattgacaagaagaagtatgaccaggtcattgaatctgtgaacttagccctcagatcattgtcacaactgtttgaagggcacggcatgcatggtatgtatgaccttaccaacccaagccttgaacagttaaaagaagtattctccaggatgaaagctggtgtagactctatcgctcaaagttttgatcacatggtcgaaactgcgcgtgacatggatgccgcatcggcaagcattaacgtaatgaacattaaacaaggacttgtttacgctgagtctctcttgattgctgttgaaaaactagactatgataagtgtatagaagcaaacaacaacatcaaagatcatgacgtaccaccgactcagtggcacagatag

SEQ ID NO: 76615 - DNA, 225 bp, Citrobacter koseri
atgggtttaggaatggatatggaacgggatgagctattggaagatcgtgcagctttcatcgctggcgagattggcggagcggttgttgagttgattatcggcggggtagtgattaatcgggatgcgattgtggatagcctggaagccaagaggaagtcggttggtaatgtgattcacaagggattgctgagggatgctgcggagttcgtgaggaaagggcagtaa

SEQ ID NO: 76616 - DNA, 363 bp, Citrobacter koseri
atgacgcgcagaacagcattcaatggttcagcttcaggtcgtcgccgtgagcgtcgcgcagcaatgcagaacgaaaccacatccagttcagatagcctgcatcgccccactctcagccgggcgcagattcaggctaaaggttcacaccgcacaccagatcgcattgaagatgcaacgccaatcaagtttgtagctcaggacgccatctggaaccgccgggaatacaaacgccagattgaacgcgcagccatcgtttatgcaaacgagtttggtcacaaaccattagaggtgggcatgtgcctgccggatgtggcgatttacgcagccgggcatcgtaaaagcaagcagataacagcgaggtga

SEQ ID NO: 76617 - DNA, 219 bp, Citrobacter koseri
atgtcttacatcaccgaaaacatccacctactttcaaacttcaacgctgatccggtaactatcgcgaacatgaaatcgctggtattgccatgggcaaagaagcgcttgagagagtatcaagagctatacgcattgtgcccagaagcgatattcagcgacgaaattgaaacgctaaaaactggcatagcagtttgcgaacaaagattacaagccgcctaa

SEQ ID NO: 76618 - DNA, 639 bp, Citrobacter koseri
atgggctcggcagctaccgacatcattcttgagtgcaagagaagccgaaagaaaaataatgggcctgtccacggagttgggattattgatgttccattcagtgtgcgcggaacagtagatgggaaaaagatataccaccgagcctttaaggtttggaacagcattttgcagcgatgctattacccacctattcaagccaagtatccatcatacataggctgctctgtttcccctgaatggctgctcttctctggtttccttaagtggtggaaagcgaattttcatgagggctgggaaatcgataaagacctcctatttcctggcaacaagatctactcaccagataaatgccttttcgttccatgcgatctgaatagttttgtaatcagccgagaagcaaagcgcggaccttctcctatcggaagtacgtttgatgctcgttatggcgtttataggacaactatcagtcttgggaaaggccaaaagcattacttggggtcgttcgcttgtccagacgaggcatacgccgcctggctcagtgcaaagttgaagcttgctgagcgattcaaaccaatctgcgacgagatacaccctcaactttacgacagcctactcacgaaaattcgctcgattaaatga

SEQ ID NO: 76619 - DNA, 669 bp, Citrobacter koseri
atgactaaaaaattcgaactcgtcgcagaattaacgaaagagtttttcggcagaaaattattccgtattcgtgcagttgtctctttcggcgatgtttccgaaggtgatttgggtggttgggtggaaaaagaaaacaacctggatcaatccggcaatgcgtgggtgtccggcaatgcgcaggtgtacggcaatgcgcaggtgtacggcaatgcgcaggtgtacggcaatgcgcaggtgtacggcgatgcgttggtgtccggcaatgcgcaggtgtccggcgatgcgcgggtgtccggcgatgcgtgggtgtccggcaatgcgcaggtgtacggcaatgcgcaggtgtacggcgatgcgttggtgtccggcaatgcgcaggtgtccggcgatgcgcgggtgtccggcgatgcgcgggtgtccggcgatgcgcgggtgtccggcgatgcgcattggatcactatcggcccaatcggttctgagaatggatttctgactgcttttcgacagaaagataactcaattgttgtgagccgaggatgtttctcaggaacgatcgacgagttcgagtcggcagtaaaagagcgacacggagacagtaagcacgctcaaatctatctggcactaatccccgtaatcaagctgcgtctggatgaggtgagtgatgaataa

SEQ ID NO: 76620 - DNA, 168 bp, Citrobacter koseri
atgaataacaaggcagtcacccacaacggcaagcggtacaccgccaaacaactcagcgataacgagtggcaactgacctcagtcgataaaccccgagagaaaatcacgatgaaccgctggcagatggatttatccgggttattgcagcaggtcgaggagaagccatga

SEQ ID NO: 76621 - DNA, 210 bp, Citrobacter koseri
atgatttcacactatggaacgacgcccatcattcgccagtgcgtcacgcccggcatgatggctatgcatgaaggccgaacctatcgcgtctcagcagtcattcaggagcgcaaatgggtgtacctgcacaccgatgcagaaatcatccgcctcagtgactgcgtgattgacgtccttctggacggtcacggcaaccctatccagcactaa

SEQ ID NO: 76622 - DNA, 285 bp, Citrobacter koseri
atgaacgcatacctcacttacgaccgcatcgaagatcgtcgctgggttgagcagcagctcaccgacgagaaagagaagtggatcgacgatcgagcacagcaaatcatcgacatgatgccaaaagaaccgtctggcctcttccacttcacggtcccgattgactccagcccatacgaaggactgcgcagcgataaagctggcgaggcctacaacgatttcatttcggcagttgcttacgcccaagcggaatacgactgggaacaccgtaccggctgcccgttttaa

SEQ ID NO: 76623 - DNA, 504 bp, Citrobacter koseri
atgtctgaatctaaaactcactaccgaaaagctttcgactctccatacctgagcagcgccgacatcgttgagccaacggtgctgacgatcgcacgggcaacgttagaaaacgacaaaacaaaaaaatcaaaagacgtttttaataccgcttatttcgaagagcgcgagctgcgccctggcgaaaagcttaagccgatgattttgaatgcaaccaatagcaagatgctgaaaagcatcaccggatcccctttccttgaggattgggtaggcgtgaaggtcacggtctacgtcgataaaaatgtccggttcggaaaggaatcggttgaaggtctccgcttaagcccggcgcgcgtcacaaagccggtgctttcgccggaaaaaacgcaggcatggaataacgctaaggccgccttcaagcgcgatggcaaccttgatgcagtgctggcgagaatggacatttctccagaacatcgccgccagcttgagcaggagtgttcatcatga

SEQ ID NO: 76624 - DNA, 624 bp, Citrobacter koseri
atgatctggcacgacgtcgagcaaaacggtgaagagtgggacgctcttcgcctgggtaaggccaccgcgtccaacttcggcctgattatggctaacgatggaaaggcttttggcgaaccagccaagcgttacgcactacagttggctctggagcagattaaggggtgcaagtctgagtttggcttctcaaacgaccaaatggagcgcgggcacgaacaggagccaattgcccgcatgctgtacgaagagatgaacttcgtcgacgtggataacggcggtttctttgatcacgacacgtacggcgacagccccgacggcctcgttggccaggacgggctcgttgagattaagtcggtcattgccgccactcactactccaccctcacccgcggctccttcgatccggcatacagatggcaactggtcggtcaccttgattgctccggcagggattgggtggacttcatcagctactgctcagacttcccggacggtaagcagctcatcgtttatcgccttacagctgctgaatgtgaaacagaaatagcccggcttcgcgcacgcagaaatgatttcctcgaacttgttgcggacacgaagcgccgcattctggagctcgaatga

SEQ ID NO: 76625 - DNA, 429 bp, Citrobacter koseri
atgaaacgaacacccttctaccgcaggcccgggcgcaccgggcaattctctggcctccgtgagcgcgttatctggatgattcagacgcgcggccgcccggtaaccggcagcgaaatcgccgagaagtttggcgtaacgctcatcgagtttaaccgggtcgccaacggcattacccgcggctccggacagatagctcagatcgttgagtcggaaaaatggatcaacgaggacggcatctgcgaccgcactttcgacctcgtaacgaagccgaaggtcgtaacgccgcaaggtaaatcgcgcctgttcacccggcgcgctattgagcaatcgcaggaaggtagacggcaggaatgcattgaacgcgccgcccgccgtagccgcctgattgctcagggcctctacatcgacgaaatggagtccatcctatga

SEQ ID NO: 76626 - DNA, 153 bp, Citrobacter koseri
atgactcacgctcacgacgacatcagggttggcacactgtgccttcccttcattggtaacggctggctaatgccatggggtgaagtggtcagcaatccattaaaggcgcagcggctcgctgaggaatatcgggaaaggcaggaggcggcatga

SEQ ID NO: 76627 - DNA, 1125 bp, Citrobacter koseri
atgacctatcaactccacgtcgggcgctgcgaggacgttctgaaagcgctgccagataactctgttgactctatcgtgacggatccgccgtacgggctgagcttcatgaaccacaaatgggattacgacgtcccgactgtagagcagtggcaggaatgcctgcgcgttctcaagcctggcggccatcttctggcgttcggcggctcacgaacctatcaccgccttgtcgttaacgttgaggatgctggtttcgaaattagggaccaaatcctctggatttacggtagcggctttcccaagtcccataacctcgatggtgattttgatggttggggaacggctctgaagcctgcgcacgaaccgatagttatggcgcgcaaacctttcaaaaagacggtgtccgccaacatgaacgagcatggtacaggcgcaatcaatatcgatgcctgcaggataacaactgatgagtcgcttagcggtggcgctggagtcctgctttcacatcagcgtgacggtactgaaccggttagtgattacgaacaggcaccagagggacgctggccagcaaacatcattcatgacggtagcgaagtagtcgtgtcggcatttccggatgcgaaaggacagcaaggggatttaaaggaaaccggacgagcacgaccatcacagggtcgatatggggatatggcagcgccaaaggcacatgctgccagagtggaaagtgaaaaaagcgccgcccgcttcttctactgcgccaaggtcaaaccgaaggagcgagacgaaggcctagagcgattcatagcgacatcagccagcgatatgaccggcgggcgcaaagagggaagcgtcggaattaacgacccgcgcgccggtgccgggcgcaccaatggcgctaagaacaatcaccctaccgttaagccgatcgccctgatgagctatctatgcaggctgattactccgcctggcggtaccgtgcttgatccgtggatggggagtggtagcactggccgggcagctatcgaggaaggtttcaacttcatcggcatcgacctgaacccggattacgtaaccattgcttctgcgcgaattgctcactccttcaaaaagacgacggaggccgcatga

SEQ ID NO: 76628 - DNA, 219 bp, Citrobacter koseri
atgacgccagagcaagacaacgctgtacgcgcacagggacgtaaatgcgtggcagaaattcagcaggcaatgaaatgcaggcctaagccgaaatggaatgcagtagtgccgccaatcatcaaaaagcatcaccagaaaatcgcgccgctgggtatcagcctggtggcattcgttagcagcatcggtcgaatgcaaggccggtacggagtcgaatcatga

SEQ ID NO: 76629 - DNA, 480 bp, Citrobacter koseri
atgagcttcgaatacatcaattcccaatatggcgtgaatgcctgtgtcggccgacgggtggttgcttatggcgaaccaggaactattgtgcgtgatttcgggcactacattggcgttgttctggatgccgcgccctatcattcaccagaacgttatcaccctacggacggcatcgtatacggcgatgttgtggattattcacctccgaaaattacctcccgtaagcacaaggccaaatgcaattaccaggattttctggatgccgacagcggtcatgatttccatgaatggcttggcattaacaggcctgaagttgattacgaccgcaacggaaactgtcgcatgtatcggatcggaaattaccgcgatgtgagcgtttacggagactggaagccaaccaaaaaagaagcgaaagccagttataaagcgaaattgaataatttactgaaggagtcccgaaatgaccgcagagattattga

SEQ ID NO: 76630 - DNA, 222 bp, Citrobacter koseri
atgaccgcagagattattgaccaagcaaacgagctggctcagcaacgtatcgatatggcgatctccgctcaccgcatcgaccgtaacgccgtatcagcagagcattgtgaggaatgcggggaagacatcccggagccgcgacgcgctgccgttcccggctgccagacgtgttccagttgccaggaagagatcgaactgaggaataagcagcgaggtgcgtaa

SEQ ID NO: 76631 - DNA, 273 bp, Citrobacter koseri
atgcgtattgaagatttaccgaagctcccgaagctgttccgggtcattgaggttgatttggatgtgctgagaaatggcattggcggaggtggtggcgtgatttttgacatggacgccaccgtaaagcggaaggttcgccgtgttaagcatgaaggcggatggaagtggcaactggttcgtgaatggcgtgatcaagagttttgggattactgttttgagcaagaccgggaatgccttgagcacctcaactacgacctcggccttgtgcattga

SEQ ID NO: 76632 - DNA, 858 bp, Citrobacter koseri
atgccagggtttaccaagaattttatccctcagaaacaattcaatcaccgtcctgatcgcttcaacgttctttcttcaggggggggcacgcaaagcaatgcaatcatctgtctgattcacgctgaagtactgccaaagccagacatcatcgttatgtctgacacagaacgcgaggccagcaacgtgttcgaatatcaacgccagtacatcgctccgttgtgcgaagaaatgggcgttgagtaccacatcatccccaagagtaagtacgcaacctacgacctcattgggtctgatgaagatgcccctctccctggctacttcacagaatacggaggcagggatagtcgaggtcagtgttcagggaagcagccagccttctgttcaattaaatggaagacggaggttatccacaggttcctgaacgagcgctatggcgagaagtatcttaccgaacgcggcgttgatacctggctcggaatcagcatagaagaagcacaacgccgggctaagttcccgcctggtaaatggcagcgacgatatccgctgatcgaaatgatgatgactaagcagatggctattcagtgcgtcgaggattatgggctacctacacctccagcatcactctgttggatgtgtccgaaccgagatgacgacctatggctattcatgaagaaccacgttcctgaagacttcgcgagagcatgcgctcatgagaaagagattcagaaattgtggccgcatctatggctgacaaagtacggagtacctttggcagaagccccacttaaaccgagtggcgggaagaatacccagatggacctgattcagttctgcgacagcgggcagtgctttgtttga

SEQ ID NO: 76633 - DNA, 249 bp, Citrobacter koseri
atgagcgacattatccaactgacgcccaacaagtgggtatccgaagaagttctgatggctattactggcctgacaaagaacgcgatcaaatctgcgcgtacaaattcatggatggagggccgagagtatcgtcactactctggtgactgtcagccaaaggagaactcacctatcctctataaccgacacgaagtcgataactgggttgagcgtcaacgaccagcgatcccacgccagaaatctgcttaa

SEQ ID NO: 76634 - DNA, 1284 bp, Citrobacter koseri
atgtctggttatccaactggagtggagaaccacggcggcactttgcgcatatggttcatatataacgggaaaagggtaagggaaagccttggggttgttgatactgcaaagaacaggcgcattgctggagagcttcgcgcctctgtttgttttgctataaaaactggtgcattcgattacgccagacagttcccacagtcacccaatctgaagaagttcaatatcgcgccgccggggataactgttgctgaactggcatccaaatggctggaacttaagaggatggatttaacccttaacgcacatcttcgatatgtatcgtatatcacgattggaaccgatattctcggcggaaatagaatggttgattccataactcatgaggatgtgcttaacgtaaggaaagagttgctgaccggctaccagatatgcggagcgcaccagaagaacaggtcggcgaagaaaggaaggactgtcaggacggttaacgtctatgttacctgcatgaaggggatgtttgattttgcggtattgaatgggtacataagcaaatctccatttgctgcaattaccccgctaaagaaatcgaagtcggatccgtcaccacttacccatgatgagtaccatcgctttcttgaaagatgcccatgcgaacagatacgtaacctatggaagcttgcgtttaacacaggcatgcgacatggtgagatatgcgcactagcatgggaggacatcgacactaagaactggacgattcggattagcaggaaccttgccatttccgatcacttcacgcctccaaagacagaaagcgggaaccggacaattaaccttactactcctgctatcgaggctctaaaaagccaactggcatacaccagaatgggtaagcaacatcagatagacgttcacctcagagagtttggcagaactcgccgagatgaatgtacattcgtttttgttcccaggttaacggcaaggaacggtaaaggaggtgaatggtattcaccaggatcattctcagggacgtggaataacatacttaaaaggagcggtataccacatcgcaagtcatatgagtctcggcacacatacgcttgctgggcattaagcgccggagctaaccccaacttcattgcagctcaaatggggcatacgtcagcacagatggtttacagcgtttacgggaaatggatgtccgacaacaatgacaaccaactggcaatattgaacgctaattttggaagtaatgccccactgatgccccatgctcaaaatgagtag

SEQ ID NO: 76635 - DNA, 2088 bp, Citrobacter koseri
atgcgtattaaacctctcgcttcacttgtcttatcttgtctgggcgccacaagttttaatgtttttgcagaagatgtcatggtcgtcaccgcatcgggatacgagaaaaagatcaccaatgcggcagccagtgtttctgttatttcacaacaagaattacagaccaataaatataatgatcttggcgatgctctcagggccgttgagggagtggacgttgaaagcagtaccggaaaaacaggggggcttgaaataagtattcgtgggatgcctgccagttatacccttattcttattgacggtattcgtcagaatggaacatcggatgtaacaccgaatggcttttctgcaatgaataccagttttatgcctccactttcagccattgaacgtatagaggttatacgcgggcccatgtctacactttatgggtcagacgccattggcggcgtggtgaatattattaccaaaaaaagcaccgataagtggagcacggccattaatacgggagtgaacctacaggaaagtaataaatggggaaacagcacaaccgcaaatttctggtcaagcggtcccctggtgcctggctcgctggatatgcaggttcgtggaagcacaacccagcgacaaggctccagcattacatcactgagcgacaccgcagaaacacgcgttccttatcccactgagtcgcaaaactacaacatcggcgcgagatttgactggaaagccagcgcaaacaatacgctatggatggatctcgacacatcccgacagcgttatgataacagcgacggtcagcttggtagcctcacgggcggatatgataaaacgctccgctatgagcgcaataaagtgacgttaggacatgacaccgccttaacgtttggtacatggaaatcgtctcttaactggaatgagacagaaaacaaaggacggcagctggtttcctccgctctgacacccgatcaagcctggagagcgggtgacgatcgtgaactgaaaaataccaatgttattctcaactcggtgcttctcacgccgctgggagaatcacatttactgacggtgggtggcgaatactgggacgcacgaatgaaagatggcgtcgttctggccagttcaggtgaaaagttccatcaaaaaagctgggcgacttaccttgaagatgagtggcatatcctggattctctggcatttaccgtagggagtcgctatgaacataacgacgtattcggcggtcatttcagtcctcgtggctatctggtctgggatatgacagatgaatggacgctcaaagggggaatcacaaccggttataaagcgccttctcttagccagttacataacggcatcagcggtgtttctggtcaaggaacaatcaataccgtcggtaatccagatttaaaacctgaagaaagcaccagttatgaaaccggactttattacgataatagcaatgggttcaatgccaatataaccggattctacactgaatatcgcaataaaattgtttcttattcgattgatgacaataccagtagctataccaatagcggaaaagcgcgtaccgatggtgtcgaatttgcaacatcgttcccgctctggttggataatttgagtctgtcgctcaactatacctatactcagagcaaacagaaagatggagataataaaggcgcaccactcagctatacaccaaaacatatggcaaatgcccgcgttaactggcaggcgacagatgatttaaatgcctggcttagcgcccgctatcgcggtaaagcgccccgctttactcagacctatgacaatctcagtgcggtacagcagaaagtgtatgatgacaaaggcgcaaatctaaaagcatggacagtgctggatatgggattatcttataaactgactaaagatttaaccctgaataccgccgtcaataacgtactggataaagactttagcgacgtcaaattatatcaatctggccgttccagcacctatgccggtgattatttccagacagcgcagtcaacgaccggatacgttattccaggtcgcaactactggatgtctttaaactatcagttctaa

SEQ ID NO: 76636 - DNA, 1509 bp, Citrobacter koseri
atggcacaagtcatcaatacaaacagcctgtcgctgttgacccaaaacaacctgaacaaatctcagggctccctgagctctgctatcgaacgtctgtcatccggtctgcgtatcaacagcgcgaaagatgacgctgctggccaggcgatcgctaaccgcttcacttccaacatcaaaggcctgactcaggcttcccgtaacgccaatgatggtatctccattgcgcagaccaccgaaggcgcgctgaacgaaatcaacaataacctgcagcgtgtacgtgaactgaccgttcaggcaactaacggtactaactccgacagtgacctgacctctatccagaacgaaatcactcagcgtcttaacgaaatcgaccgcgtttccggtcagactcagttcaacggcgtgaaagtactggctcaggataacaccctgaaaatccaggttggcgcaaatgacggtgaaactatttccatcgacctgaaaaaaattgacactcagagcttgggcgtgtctgacttccgcgtgaacggtgcagaaaaagcgactgccagcgacctgatttctaaatttggtgcgaccggtactgataactacaaagccaccgttggcggtgcagcaggtactgatgttaccgtcgatattaaatctcagactgtgaaagcaggtaccgatgcggtttatgtaagcgcagcagatggaagcctggtaaccacagcaacagtacaaaacactatttccgcaagctaccagaataccgctgttacttctgatgccaaatctcagggtcttgctgcgctgggtgctagtaccaacgtgggcgataagttcagctttgatgggatggaattcactaaaacaactgacggtgctaacggtaacggtacatacaccgctgttgttgacggtagcactgtaacattcactgttacggggtctactgctgcagcaggtgatgatgcacaggtttcaaccagtaaagacttgtatacttcccagtctggtactttaacgactaacgctacaactgcgaacaaagctgcaactgttgcagacctgaaccatgcaaatgctgttaaaaatggtagtaccctcaatgtgagcggcgcaacctataacgttgacgttgacggcgttgtgactaacgatgctgacgataaagtcatgtacctgactaccgacaaaaacggtagcgctaaactggttaacgaagacgtggcgaaagccagcaccagcactgaggatccgctggctgtgatcgacgctgcgctggcacaggttgacgccctgcgttctgacctgggtgcggtacagaaccgtttcgattctaccatcaccaacctgggcaacaccgttaacaacctgacttctgcacgtagccgtatcgaagatgctgactacgcgactgaagtgtccaacatgtctcgcgcacagatcctgcaacaggcgggtacctctgtactggcacaggccaaccaggttcctcagaacgtgctgtccctgctgcgttaa

SEQ ID NO: 76637 - DNA, 1407 bp, Citrobacter koseri
atgccttcatttacatcactgggcgttggctcaaacttaccgctggatacattgctgacgaacctgaccactgctgaaaaaaaacgtttaactccgattactcagcagcaaagcgccaataccgcacgactgacagcctatggaacactgaaaagcgcactggaaaaattccagacagccaacactacgctgaacagcgctgatctgtttaaaagcactaccatcaccagcagtaccgaagatttgacggctactaccacagcgggcgcggctgcgggtacctacaccgtaacagtgacgcaactggcacaagcgcaatccttgagtacaacggttgatattagctctaccaaagatgcattaggcgacacaacttcagacagtcgtaccattaaaattgagcaaaaaggtcgtaaagagccactggaaatccaactcactaaagaccagacatctctcgaaggcattcgcgatgcaatcaacgatgccgacagcggtatttccgccagtatcgttaaagtaaaagaaggtgattatcagttggtgctaactgcagacagtggtaccgacaatcagatgaccatctctgttgaaggtgacagcaagctcaatggtttgctggcctacgacagcaccgcaggcagcggcaacatgaagcagttggtaggcgctcagaacgcactgttgaccgttaatggcatcgacattgaacgtccgagcaacacaataaccgacgcgccacagggtgtaacattaacattaacaaaagaagtgactgatgcccgtctgactgtcactaaagataacagcaaagcgactgaagcgatcaaaggctgggttgatgcctataactccctgctggataccttctccaccctgactaaatatactgaagtcgatccgggcgcagaagaacaggatcaaaataacggtgccctccttggcgacagcgtggtacgtaccatacagactggtattcgtgcccagttttccaacgctggaagtacaggagcattcaaaacactcagcgagattggtattacgtcggatggtaccaccggcaaactcaaaattgatgacgataaactggcaaaagcactgaaagaaaatactgcaggtacgcgcgaactactggtaggtgatggtaaagaaacaggtatcactagcaaaattgcagaacaggtaaaaagttatctggctgatgacggcatcatcgatagtgcgcaagacaacatcaacgctacgctgaaaaaactgactaaacagtatctggccgtaagtactagtatcgacgacaccatcgcccgttacaaagcacagtttacccaactggataccatgatgagcaagctcaataacaccagtacttatctgagccagcaatttgatgcaatgagcaattcctga

SEQ ID NO: 76638 - DNA, 408 bp, Citrobacter koseri
atgtacaccgcgagcggtaccaaagcttatgcgcaaatcggggtggaaagcgccgtaatgagcgccagtccgcaccagttgatagagatgttgtttgacggcgcgaatagcgccctggtgcgcgctcgcctgtttttagaacaaggcgacatcgtcgctaaaggcgaagcattaagtaaagccattaacattatcgataatggccttaaagcgggtttagatcaggaaaaaggcggtgaaattgccgcccatctttcagacttatacgactatatgatccgccgtttgctacaggcaaacttgcgtaatgacagtcaggctattgaagaagtggaagggttactcggcaacattgcagaagcctggaagcagatttcaccgaaagtatcttcccaggagtctcgttaa

SEQ ID NO: 76639 - DNA, 372 bp, Citrobacter koseri
atgacctcagccgtggagtttatcaaccgttggcagcgtattgcgctgcttagccaatcgttgctggaacttgcgcagcgaggagaatgggacctgttactggaacaggaagtcacctacctgcaaagtattgaaacggttatggaaacgcaaactccaccgggcattacgcaaagccttcaggatagggttgcggggtatatcaaacagacgctggataacgaacagcttttacgcgagttgctacaaaatcggctgaacgaactcagcaatttgattggtcagtcgacgcggcagaagtcactgaataacgcctatggtcggctatccggtatgttgctggttcctgacgtccctaccgccccgcaataa

SEQ ID NO: 76640 - DNA, 1272 bp, Citrobacter koseri
atgtcccttactgacagcaaaatccgcgcgactaaactccctgcaactccctttaaactgaccgattctcatggtctgtatctgcttatcaacccaagcggttcgcgtctctggtatctcaaataccgttttaacggcaaagaatcccgtattgcattaggcccgtaccctcaggtttctctttccgatgcccgccagcagcgcgaaggtattcgtaaacttctggctcagaaaataaatcccgctcagcaacgaaccgacgaacggattgcctgctctccggataaatgctttaaagccgtggcgctggcctggcataagagcaataaaaaatggtcggcggattatgccgcccgtctgctcgccagcatgaacaaccacatctttccggctatcggtcatctgcccgttccccttctgaaaacgcaacatttcacagcattactgagaaatatcgaagaaaaaggctttctggaagtcgcgtcccgttcccggcagcagctctgcaacatcatgcgttacgccgtgcagcaggggctgatcgagaataacccggcgatgcatctggaaggcgtcaccacgcctccggttaaaaatcactatcccgctctgccgctggagcagttacctgaactgctccggcgtattgatgactatcagcagggccgggaattaacccgcctggcagtgatgctgaccctgcatctgtttatccgctccagcgaactgcgcttcgcccgttggagtgagattgatttcagaaacaggatctggaccatccccgccactcgcgaaaccatagagaaggtccgcttctctggtcgtggcgcaaaaatgcgtaccccgcatattgtgccgctgtcccggcaggcgctcgccattctgaaacagataaaagaaatctccggtcatctggagctggtattccccggcgaccataacccgtataaaccaatgagtgaaaacaccaccaaccgggcattgcgtctgatggggtatgacaccaaaaccgatatttgcggccacggtttccgggctatggcctgtagcgcactggtggaatctgagcgctggtcacgcgatgcggtagagcggcaaatgagtcaccaggagcgtaacagcgtcagggcggcctatattcacaaagcggaacatctcgacgcccgcaaagcgatgatgcagtggtggtcggattacctggacgccaatcgtgaaggctgtgttgcaccctatatctatgcccgacaacaggcaaaagagtataacgagtga

SEQ ID NO: 76641 - DNA, 1164 bp, Citrobacter koseri
atgaaaagtatcagagaactggcatttcctgtcttaattgcaattatctgtggatttacagcagcgaatatgtattatattcaaccattagtcccatttatacagaaaagtttgttagtctcttacgagaaagcatccatgttgtattctttttctctgacaggaaatgctgtctctttgattttcatcattcctgcaggggatttttataacaggaaaaatctgattagcaagttattgataatatcaattatctctctctttgttttttccattccttcaaatttttactcattaagcctgtctgcattctttattggtgtcggtacatcatcaataccattaattattgcaagtttgagttcaggggtaaatggcaagatcaataatgtaggccggattatggctggtgtattatttggtattttattttctcgttttatttcaagtgtttttagtacgctatggggatggaagtcggtttacctattctccgatatcataatgctgctttcctatatctacatccgaattgaatttcctgaaagtgcaacaaaggagagcaaaacaaaatacctgaatattttatcatcaaacctgagaagcttcatcaataacactacaatacgctactatagtgctaatggttttattgttatgtttctttttgcatcatactggaataacatatcttcatatttacaggatagtttttcgttaagccagttcgaagtcggtattttctccttaacgggtgtagccggtgcttcctgtgctttattttcggctccacttttacgtattttaagaaacaatagtgcagttatcatgttattagatcttctgtcatttgcgatcatgctctttttaacacactattttttagcagccatatttggtgcattattcatcgatgcatttatacagctatcacatataaataatcagcgaaaattataccaggcatctaatggtaatgaagcaagggcggcaagctgctatatgacagcatttgtgattggcggcgcatcaggaggcgctatatcctcacatatttataccttgtttggttggtcaggcgtgctgatcctgtgtgcaataatatgcttactgtcattcctgctaaaatcgcccaaggaaaacacgataacactaccaaggtaa

SEQ ID NO: 76642 - DNA, 615 bp, Citrobacter koseri
atgaaaacgatacttgaagattacacaaaaaaaattcatatccgtagattttctgcgttaatttttaatccattgaaaaaaccattaatcatatcgaatatgccgcaggaatgggagacggaatttttatgcgggaagtttcagactgttagtgacatcgtctccagagtaaaatcaaagatcacgcctcttgtgtggcatgctgaagaagtcaaaacatctggcttagcctcattagcgaaaaaatttgatattcagaatggcatgagctttctgataagaatcagcagcgatattattattttcaccctttatttcgatgaagaagataaacgatttatgtccctctatcagaagagtaagtataaaattttgtttgacgtattagaactgtttgaaattttctatcaaaaggatcacggggtgttgctcacggcccgggaatctgagatattagatctcctgaaaatagggaaaacatatgcagagattgcatttattcttgcgattagtaaaagaacggtaaggtttcatattgaaaatattcttaataaattagatgtaacatcagtaagatatgcaatctttaaagccatctcactggatctcatataa

SEQ ID NO: 76643 - DNA, 1149 bp, Citrobacter koseri
atgttcaaaggcttttatactggtaatattaaagaaaatagtgaaatatacaaacttgatgatactattttcgtcttcgacacaaatgttattttagatctctataggaataacccagacacaatatctgcaataaaaaaatcaatagaacaggttaaggataggatttttttaccatacttcactgcattagaatatcagagaaggcgacttggtgttattgacgatcagaagcatctgatatccagcacgacctcaccgattgtagatattataacattttcaaataaaatgattgaaaaatgtaaaggcaccaaagctagacactatgagggtttaaatcgccaagttctagaattaataacaaaatcaaatgaactattaaatactggtcttgaaacaatgtatgaaactctccaagaatcaatagaagaattgaacacaaaagatatacatagggagtggatagactcggttttctctgggaaaataggagcaaaaaaagaccaagaatatatttccaatttagacaatgaatgtaaaaaaaggtatgaagaaaaacttcccccaggtttttgtgatatagataaacagggtaaaaccgacagttctttcgtatatgatggaattaagtaccaaagggcttatggtgatttttatatttggaaagaaattctggaatattcatcagaaaaaaatgccaaaaatgtattcttaataaccaatgatgcaaaggatgattttatctttaaagtgggaagagataaagataacaaagaaaataaaggagttcatgcttttttaagagaggaaatagtaaatttaggtaaagttcaacactttgatgttttaaacaccaaagagctcatactaaatatcaataatgcatttaatttaaaaatagacacagataatctcaacatctctactggcaatagctatagacctagggagaaagtaagtaacagcgaatatcgtatcctattagaaaataaaataaaaagaataaaaatagaacttaatgagttatctcgaaaactagagacagcaaccgattccgaaatgattgcaagaattagacttttgatgaaagggaagttattatctattaagaaagcgagtgctttactttcatctatccaggaataa

SEQ ID NO: 76644 - DNA, 1101 bp, Citrobacter koseri
atgaatgaccgctcttttttggttaaaaaaatatcttcaaaatcattgagataccacgatgatgatttggaacatgttatggaagacccttacttatcattggacgacgaactgcgggccatgcatctcaacatcaaaaatagcttcctcgacgatgacctccagctccgcaagctgagccattctctggatgatgaacttcgagccatgcatctcaacatcaaaaatggcttcctcgacgatgacctccagctcagcaagttgagccattctttggatgatgaacttctagccatgcatctcaacaccaaaaatggcttcctcgacgatgacctccagctcagcaagctgagccattctctggatgatgaacttcgagccatgtatctcaacatcaaaaatggcttcctcgacgatgacctccagcttagcaagctgagccattctctggatgatgaactccaagctgtacatcttgatgtcaaaaacagcttttttgacgatgacctccagctcctcaagctgagccattctctggatgatgaactcagggctgtacatcttgatatcaaaaacagttttcttgacgatgacctccagctctgcaagctgagccattatctggatgatgaactccgggctatacatcttgatatcaaaaacaacttccttgacgatgacatccaactcctcaggctgaaccattctctggacgatgaactccggactgtacatcttgatatcaaaaaaagctttcttgacgatgaaattcagcttttcaggcttagtcattctctggatgatgaactccgggctgtacatcttgatatcaaaaacagctttcttgataatgacatccagctcctcaggctgagtcattctctggataatgagctccgaacaatgcactttattgataacgactcctttaatgatgacatgcaattcgaggaactgaatcgttctttggacgatgaattcctagacgtgcacttaaatttgaataatcacttctttgaggatgatgtacaactgatggagttgacaaattctttagacgctgaattgagagtattcagcaacaacataaaaataaaatga

SEQ ID NO: 76645 - DNA, 1170 bp, Citrobacter koseri
atgactgtatcgttcaaacttcgcatgttgtgcttaaccggtacactggctgtcatcgggctgttcctttcaaaacagagcgtcatacccggcgcgtatgcacttgagacatcaaactttaaaacggtgcgaactacgtccgcagttgttcatacggtaaacgactgggtcgaattctcgggaaaactggaagccaccgatgaggtcactgtacgttcaaaagttacaggctcgattgtggatgttaagttcagggatggtcagttggtcaggaaaggcgatattttatttattatcgatccagccccttataagactgaactggcccgggctcgtgcagcatacgcgcaggcaaaagcgaagcaggacttggcattgctggatctgtcccggggtaaaaaacttatcgggacccatgctatctcacagcgcgattatgacgttctgaacaatgccgcccgggaatcgaaagcagccagggagattgccgaagctgaggtcgagagcgccaggctcagcgaaagctatacccggatcaccgcaccggtaactggccgtatttccagagcagaactgacagtcggtaatctggtcgcagccggtattgacagtccagttcttgcatccattgttgctcttgatcccttgtatgtcgcttttaatgcggatgaacgaacctatcttaattatatcgacaagctttcaaataaagacaaacctgaagtgctggtaggactggccgatgaaaaagattatccacataaagccattcttcattctgtggataatcatctcagtactgaaaccggcactatcaggatgcgcgcacttcttgataatccatcatcaaggttgcttcccggtttacaggcccgggtcagactccaggcaagcaaatcttatacagcagtattgattgaccagacactgatccgcaccgaccaggacagacgctatgttctggtagtcggaaacaatgacaaagttgaatatcgccccctcgaactgggaaacagacagggggaactgattgttgtgaaaaaaggcctcaataagggtgacagagttatttccggtggggcgcagttggtcagtcccggtgaaacagtcgttgtcagcaaagacgaacccccttcttcaaaatcccgggaaggaaataagtcatcatga

SEQ ID NO: 76646 - DNA, 3192 bp, Citrobacter koseri
atgaaagtatcaaaattctttatcgacaggccggtttttgctggagtactgtctgcgttgttcattctggcagggattatcgccatatttcgtctaccggtatcggaatacccaccggttgtccccccatccgttatcgttcatgcccagtatcctggagccaatgccaccacgattgcacagacggttgcagctccaatagaggaaactgtgaacggcgtagagaatatgctgtatatgcagtcactttcaaatgaggatggcaatctctatctgacagtgaccttcaaactgggcacagatcccgatcaggctcagcaatgggtgcagaaccgggtgtcgcaggctctgccccggttacctgaagatgtccagcgactgggtgtcacaacgaataaaagctcgccgaatatcacacttgccgttcatatgatatcgcctgatggcagatataacgataattacatcagtaattacgccatacgtaacatcaaagaccagctctcgcgtattgagggagttggccaggtatcagtatggggccccggtggttacgcgatgcgaatctggcttaatcctgatgctatggctgctcgcggactgacgacatcagatgtcgcctctgctatccgtgaacaaaacgcccagtcaccagtgggaagcgttggcgcagcccctatggcagaagaaacaccgttacagttgtcagttaatgccagcggtcggcttaaaacggctgaagaatttggcaacattgtgctccatgcccgacaggataccagaacgacattattgaaggatgtcgcccgtattgaactggccgctgaaaattatgccatgcgtacttacctggataaaaagcctgcggtagcgctggccatacaggagtctccgggcgcaaatgctctggaaattgcctcacaagtaagtcgcacaatgaaagatctgaaaaaacagttccctgaaggactggattaccagatagtttataatccaaccaaatcagtcagggcgggtatagaagctgtgcttcatactctttttgaggccatactcctcgtggtactggttgtttttcttttcctccagacctggcgagcatcaatcattcctctgctggctgttcccgtttcgataaccggcacaatggcatttctgtacctttttgggttttcaatcaatgccctgagcctttttggcctcgtcctggctattggcattgtcgttgatgatgccattgttgttgttgaaaatgtagaaagaaacatagaaagaggcatgacgccatatcatgccgcctgcaaggctatgcaggaagtcagtagtcccattattgcgatcgcgctgacgctgagtgccgtatttgttccgctggcttttatgagtggcctgaccgggaggttttatcagcagtttgcagtgacaatagcaatttcaacgattatctccgctattaactcccttacgctctcaccggctctctctgccatgctgctgaagtcacgtgattcagacagcgactggcttacgcgcattatgcatcgtagttgtggacggttctttactgttttcaaccgcctgttcaacagtagtgccaggcgatatgaaaaaggtgttggcgcgcttggccagcgcaagattctgattatggtgatttatggcattctgctggcaattacgctgttactgggcaggtctgtacctggggggtttatccctgctcaggataaagaataccttatcagttttgtgcagcttcctgctggcgcatcattgtccagaacagaccgggtactggaaaaaatgaatgaaatagcacgaagtgagccaggagtatcttccacatcttcttatgctggattgtctgtaaacggcaccaccacaagccctggttccggtctgacatttgtcctcctcaagccttttgagcaacggcctggcatcagcgcagatgatgttgccgcctctctgaatgccagatatcagtcacttcctggcgcagattttgcggccgttttcccggcaccacccgttatgggtctgggttccttggggggattcaaattgcagcttgaagacagaggaaatatcggttacgacggaatggccgaagtacttcgacgctttcaggcagaagcagctaaatcacctgtgctgacgccacttttttcaacataccagaataattttccacaaattaatgtcgatattgaccgtaatcgcgccaaacaacttggggtgaacattagtgatatcaccgagacattacaatcctatcttggctcatattatataaatgatttcaatataataggtcgtgtatatcaggtaagaatgcaggccgacgcagagttcagggcgaccccggaggatatactgaaactacagacccgaaatgccgatggcaatatggtaccgctgtctgccatagcccgtattgagccgacacacggtcctgagctggttacccgttataacggttttacagcggtcgatcttagtggcgcgcctgctccaggctattcttcaagtcaggcgatggaagagattgaacgtatagcgatgaaaacacttccacccggcgtagagtatgagtggacagacctgacctaccagcaaatccttgcaggcaacagtgccgtctggatttttccactctgtgtattcctggtattcctggtactggctgcccagtatgaaagccttacgctccctttggctgttattatgattgtcccaatgagtatcctttctgcacttaccggggtgtggctgactcatggggacaataatatctttacgcaaattggatttatcgtcctagtcgggctcgcatctaaaaatgccattcttatcgttgaatttgcccgtgaacttgagctttcaggtaagtctgccgttaacgcggtgaaagaggcatgccgtctcaggctgcgtccaattctgatgacctcactggctttcatcatgggtgtaatccccctgatggtatcgcatggagcaggcgctgagatgcgtcaggcaattgggatatcagtattctttggcatgctcggcgtcaccctttttggcttgtttatgacccccgtgttctacctgttagcccgacaaatatcagggaaaccactgcactcggccactttaccggacgcgcctgaggaacggccgataacagaacaggcttcagactaa

SEQ ID NO: 76647 - DNA, 420 bp, Citrobacter koseri
atgagaaaagaccaccggctgtcccgtgcattacacgtgctgatacatatggataaaatccgcgatcccgttacctccgaagatatagccttgatgatcaatacgaatccggttgtggtcagacgccttttccaggggctcaaacaggcgggtatcattcattctgaaaaagggcatggaggtggctggacactccagaaacctctcggagacatcactctccttcaggttttccacgctattggcagcactgaacttttttcaataggctgggcgactgaacatgacaaatgccagatagaggatgcagttaacaatgaaataagtgatacgcttgaagaggcgagacgtctgattacgaaccgctttgctgaacttacccttgataagcttgtgccggaagtccttaaacataaataa

SEQ ID NO: 76648 - DNA, 375 bp, Citrobacter koseri
atgtcattcgataatgtgttagaacagttatgggtctgcctcgtcattgcactgatgtccagttgcatctcaatcaccatcacgcagcaggaaatgtttcgcccgttgcgtgaatggatggtcaaaaaaaatgccatgataggctacctgttcagttgtttttattgttttagtcactgggtggtttttgccggtgttgcaatttacaggcccgttcttgttcattccggattctggttaattgaccttgcggttacggcattctttaccatcggtttaacggctatgttcagcgggatcattctgaaagtaatgagaaacgctatcgccaaagcaattgaagaaaaagaaatgaaagacaagctgggtttgtaa

SEQ ID NO: 76649 - DNA, 945 bp, Citrobacter koseri
atgccagaaagattgccctccatatctcaacagtccgaaatggcggctatgatttgccagctcgccccacatgaaggtcacacccgtacgttgctggatggcgtgcgtctgatgcgtgctgacggtgcgctggggcgtacccccgtgttgtacgaaccaggcattgttattgtctgtcaggggcacaaaagaggttacctggctgacagggtttaccactacgaccctttgcactacctggtgctgtcagtacctctgccattttcaagcgagacagatgccagcccggcagaaccttttcttgctgtgtccattcggctggatatgacagctgtggcagacctggttatggctgtcgatcaccatgccactgcatcaggttcacccgttggcattgtctccacaccacttgacgacacgctggcagatacgacagttcgtcttctgaaggtattattttcaccacttgaagcccgggttctggggccggggattgtgcgagagctgatttttcgtgttctgctgggtgaacagggcggagccattcgtgctgcgctggcctgtcatggcaactttggacgtatcgcgcgtacgttacagcgtatccacctcgattacgcccggccactagatgtggcttcacttgcgcacgaagctggcctgagcgttccggcttttcatgcgcatttcaaagccgtggcggcgacttctcccattcagtacatcaagtcagtacgtcttcatcaggcgcgactgatgatgatacgggacaacgttactgcagcaggggcagcagctcgggtcggctacgaaagtgcgtcgcagttcaatcgagagttcaaaagactgtttggtcgcagtcccggagaggagacacgtaaaatgcgcacggcattcgcactgatggaacctgcgcaactcgaagcagcgacatcgacacactaa

SEQ ID NO: 76650 - DNA, 744 bp, Citrobacter koseri
atggaagcagttgtatcagaaaaggttatggtggtcattcttaccggtgccagtagtggtataggtgaggccacagcccgtcatctttccagtaaggggcatcatttgtttatcggtgccagacgtatggaaaaactgaccgcactggcgacagaattgcgggcaatggggggtaatgttgatgccatggcaattgacgtcacgcaaccagaagatttgcaacgcatcgcagccagggcgctggagaagcacggacgcattgacgttctcataaataacgctggcgttatgccactctcaccgctggcatcgttgaaggtcgaagagtggaaccgcatgctggatgtcaatgtacggggtgttttacacggaatagccgccgtcctgccgatcatgcaggagcagggttatggtcacatcattaatattgcctccacaggcgcgtatacggtctcgcccacagccgctgtctattgcgccagcaagtttgccgtgcgcgctatttctgacggactgcgacaggagaccaacgcgatccgggtgacgctggtcagcccgggggtggtcgagtcagaacttgccgatcatattacggacgaaacagcccggactgccatgcgcgaattccggcgcatcgccttacctccggagcccgtggcgcaggcaatcgcctatgccatcgaacaacccgctggcgttgatatcagcgaactcatcgtccgccctgtggccagtcctcattaa

SEQ ID NO: 76651 - DNA, 768 bp, Citrobacter koseri
atgtcagagtcaggctctttttccagggctatgccctttgcaggccgtgttgcgattgtcaccggtgccgccagcggtatcggcctggcgaccgtcgaactgttgcaccgccagggcgctcgtatcgtcgcagttggccggggggataatgtcaatgcgctagcacgtgaaggcattgtccccgttgtcgccgacgtgactcaggaagccagtgcggaactggccgtgcggactgcaacagaacagttcggtcgcctcgacgtcttaatcaacaacgctggcatcatcatcaaccagcccgtggcagaaatgacgctcagggaatggaaccaggtcatggctgttaatgccacgggggcattccttttttcaagggaagccatgcgcccaatgatggcggcaaaatcgggtgcaatcgttaatattggttcttacgcctgttatcagtcttttcccggtatcgccgcctatgcagcctccaagggggcgctggcacaattaacccgcacactcgcgctggaggctatcgctcacggtattcgtgttaatgcagtcggttccggagatgcggtgacaaacatcacgaatacaatccagcccgacgggcaggcatatctggcagagcatggtcgtaaagcgcctgttggtcgtgcagcccaccccgatgaaatcgcagaagtagcagcctttctggcgtcagacagggccagttacattgtcggcgcagtggttatggccgacggtggcatgagtgtcgccattcagtga

SEQ ID NO: 76652 - DNA, 858 bp, Citrobacter koseri
atgcaacaacaaacctcccctgcaaaagtctggtttatcaccggagctgctcgtggtattggtctttcgctggcacgccagttactggcgcgaggcgataccgtagccgcaacctcccgcaccctgaccagtctgcgtcaggtattcggcgacgataacgcgcggctgctggcgctggaggtggacctggtgaacgaagtcagcgttcaaaaagccatcaacagcacccttgccgccttcgggcacattgactatgtggtcaacaacgcaggctacggccagcagggtaccattgaagcattaacagacagcgaattacgccgcaatttcgatgttaacgtatttgctcccctgcatgtactgcgccatgccctgccgcatatgcgtacgcggcgcagcggccatatcttcaacgtggcgtcgatcgtgggctttcagggcggttacgcgggctggggaagctatgtcgccagcaaattcgcactggccggtctgaccgaaaccctggcggccgaactggccgaactgaatatcagagccacagtggtctatcctggaccggtgcgcaccgggttcctgtcgaaggagacgctggtcgtggcccagcgcacaatcactgattattccgaagctcaggcctcgctggacctccatctgaacggtctggacggcaaacaggctggcaatcctgataaagtagcttctctgatactgcaggcggccagtggtgacgccccacccgtgcatctttttgcaggtaagattgccaacacacttgctgaacaaaaaatgcatgcagtgagccaggacattgatgtctggcgaagtgcgtcagatgccacggattttgaagagtaa

SEQ ID NO: 76653 - DNA, 558 bp, Citrobacter koseri
atgcatgacagcctgcctgcggagaaagcgtaccgtattcttgaagctggtcccgttattctggtatccacgagggggacagatggccgaacgaatctgatgaccgcaggttttcacatgatgatgcagcatgccccaccgctggtcggtgtgattatcggcccttgggattacagctatcaggcgctgtcagatacaggggaatgtgttctggctgtaccgccagccgggatggcaaagaccgttgtggacatcggtaattgctcgggggaaacagacgacaaatttgcgcgtttcggcctgacgcccgtcgccgcgcaatcgatcagtgcgcctctggtagatgaatgcctggctaacctggagtgcagagtggtggatgaccgccaggtgcggcgctataacctgtgggtgctggaagttcggcggatttggcttgatagcgcatggcaggaactgcgcctgctccaccatcagggcgatggccgtttcagtgtcgacggagagatgcttgaccttagtgacaggatggtaaaatggcgcgacctgatgaactga

SEQ ID NO: 76654 - DNA, 906 bp, Citrobacter koseri
atggataaactggcagcaatgcaggtctatgtcagcgtggtggaaactcatggctttgcaagagcggcagaagtgctgggtctgccacgctctacggtttctagggttatccgggagctggaatcctggcttggtatccagcttttgcagcgtactacccgcaaactcagcatcacggcggagggcctgcgctactacgacgaatgcaaaaggatcctgacggatattgcggccatggagtcgtcttttcccgcccgatctgagcagccaggaggccgtttcaaagtggggatgccccagtccctcgcccgacattgcattatccccggactcccgtcgtttctccgccagtaccccgggctggaagtgatgctgtgctcaagcgataatgttgaggatatcatcagggaaggatatgactgcgtgatccgtactggcaggatcgaagattcaacaaccctggttgcccgcccactgcctggttttacctgggtagttctggccgcgccgtcttatattgatgctttcggcaagccgcaaaaactggatgaactggaaaagcatcacgcggttggctatctgaatcaccgcaccggacgcacaactgaatggttttttacccttgatggtggggatcgggcgatccgtatgagagaggtgctaatcgttgacgataccgatgcctatattcaggccgggatagagggggttgggttaatccgtgtcgccagttatctggctatgccgtacctgcaaagcggggaactggtctcctgtctggagaacagcacctctaaattaccgctatccctagtatacccctatagccgttatataccaccgtcagttcgcgctttttatgactggagcagaacgatgttaagtcacccggataatcgtcagtaa

SEQ ID NO: 76655 - DNA, 930 bp, Citrobacter koseri
atggcagagcataaattacactcaggtgaaaaaatactggtgctgggcgcaggacaactcggggcggctgtactgcagcatctgctccccgcagtctctcagcgagaaggcactgtgtgcgttatcgtttcgcctcgtgccagggatgaacaaggtcaactgcgcgcttccacgcatcaaaaatatgtggatgccgaagcaaaattaatccctctggacatcgccgacagcacgatggacgccctgaaggatcagtttaaagagtttgataccgttatcaattgtatggggtttgttgcaggcgcaggcacccagataaaaatcacccgcgcagtactggaagccggagttaaccgctactttccatggcagtttggtgttaactacgatgtcgtcggcaaaggcagcggccagccggtctgggacgaacagtatgatgtaagaaccttactgcgagaacaacacaacaccgaatggatcattatctccaccggtatgtttaccagctttctcttcgagcctgcattcgatgtggtgaatttatccgcacggactatcaatgcgctggggggatgggacacacaggttacagtaacttctccggaagatatcggccgactcaccaccgacatttatctacatcagccgcgtattgccaacgaagtggtgtttgttgcaggagaaacgacttcctatggtgaactggcagaaacggtcgagcgagtgacacaacaaacctttgtaaaaaaggttctgaccctgccgaccctgctggaggaattgcaggccagcccggatgaccagatgcttcgctatcgtgcggccttcgcccgaggagacggtatgtggtggccgatgaacgacacctggaacgtgcagaataatattcccacgcagaatatcgcagcctggcttaagtcatccatttaa

SEQ ID NO: 76656 - DNA, 351 bp, Citrobacter koseri
atgatggtgggggagttttacctgacacgtacggtaaaactctcagttacccacccgttatactttataaatttattgacgaatcaaaataaaaacctccagtatgtaatacgatataaatatccttggctgcgtcgacagccatacctggtaaattcaaggggctgtttcacccagatctatttattccggcaggactttttctgctgtgatatgtactttatttcccatgcgggctttggtgattttataatccctgtcagcctgctggcgaatttttttcttccgtctgctccgtatcgcctgttgccgtcacggtttgagcacagactgaaaaaggcaggactatag

SEQ ID NO: 76657 - DNA, 330 bp, Citrobacter koseri
atgcacatttatattgtcagaatggaccatccggatggcaccgggtggaatacctttgtgcgcgagcatgtgatttatctgaaagggctgatagaacagggcaaactgttagcgtccggtccgctcaaaaacacgccgctgcgggcgggatttcttattttcagggctgagacgcgcgatgaagtacagtccatgatcagtgcggacccttttgctcgtgaaggtctcatcgctaaacttgaaatccatgaatgggacccgttgtttggtctgcttgacaggtactcaagccacaatacggtcagtgagttgcaggacttaattggctga

SEQ ID NO: 76658 - DNA, 894 bp, Citrobacter koseri
atgctggataaacttaccggaatgcgggccttcgttgttgtggttcagacaggctcttttgttgcggccgcagaccggctcgatatgtcgcctcagatggtggcccgccatatcgccacacttgagaagcagcttgaaacgcgcctgcttaaccgaacgacgcgcaggcaaagcctgacgccggcaggctcgctgtactacaggcgttgtgaaacaattttacaagccatcaacagtgcagaacgggaagcaagcagttcgagtgcgattcttgcaggtacgctacggctgaatgcgccggtaacattcggccgttatgtcttagtggattttttgagcatatttcttgagcgttatccgcaaatgcgtattgaacttattctttctgatgacgttattaatcctgcttcagaagattttgacctggtgatacgcatcggcgagcttgataagaaactcagacttgcggcaaaaccgttgcctgcgtaccgatttattgcatgcgctgctcctcaatacctggcaaagtacggtcatccagaacaaccttctgatctgaaacatcatgagtgtctggtttttgcaccttggtctgcgggattaagccattactggcctttttccagcagtgagggatatgcggaagtgatggtaaactctcgcctggctattaacgactggggagcaatccttgaggcggcattaagaggtactggcttgctatttggttatgaaaagggacttgaacgatttattaaaatgggaaaactcgttcctgttctggaagattttaatattccccctcgggaaatgcatttattgtatgacccttctcgggctaacgaaaaccggtataaagtttttattgacgaattgtatgaacatcttagctaa

SEQ ID NO: 76659 - DNA, 444 bp, Citrobacter koseri
atgtcattcgataacgttttagagcagttctgggtttgcatggtaatagcgctgatgtccagttgtacttcaatcaccgtcacgcaacaggaaatgttccgtctttttcgagaacgaatggtcaagataaatgccatgacaggttgtctcctcagttgcttttattgtttcagtcactgggtggttttagtgggtatggcaatctacaggcctgttctccttaattcaggattttggttagttgacctcgctgttactgctttctttaccatcggtttaacgtccatattcagaggtattattctactgatgatgagaaatgccattgccaaggcgattgaagaaaaggacatgaaagacaactttgtttatagcatgtacaacaccatacgatatatttttcttcgcaaggatcgccacctctgcgccaggtatgttgagtaa

SEQ ID NO: 76660 - DNA, 294 bp, Citrobacter koseri
atgaaaaaagaaaataatcgcactgacattaaatacccgatgactgagtggttaactatacctgaagccatacaactggctcaacacaaattgaagtttagattaacaaaaagtgatatctacaagaatgcgctgagaggaaacatcatcctttccatttattttcagtcacctattacattaagaaaaattcaaaaattaaaaaataaattaaaatttagacctatagaaaactcattaacctcccgcctttgcgccctcgaaaaaaaagctttatcgaagaaaacaatctga

SEQ ID NO: 76661 - DNA, 195 bp, Citrobacter koseri
atgacagcacatcagctattacgcctgaagcaagttgaagaaaaaactggcctgaaacgctctcagatttacctgtatatgaaaaatggaacctttccacgttcaataaaaattggcccggccagtgtggcctggctcgaatcggaaattgatgaatggatcagccttaaattggccggacgttcaatcagttaa

SEQ ID NO: 76662 - DNA, 588 bp, Citrobacter koseri
atgattccattaattaattacaccatcttaactgatgcgttgcacgctctgaaagttggggatattcgtcactgcgagtccctcggattcactttcgacgaaatgaatgctcttaatgagttatcactcgatgaactgtttgctgtcagccgggcggcggctccctttgtttcggtcagtgtccgccatgatgttctgcatcatttactggcgcaggcccgacaggaataccgacaacagcagcagattaaccgggctatccggctgggcggttctatcgcgttgctcaaccactactttggcctgacgtctaatgatgtctgccttcgccgacggttgctgggtgtcagcgtgccatatggacgtacacctgagccggatgaagagacagatgccgagatctggcggcaatggcagaagtgccggatggaaaaccttgaatcccccgacgcgctgatggccattatgcaggttactgaactcttgctaccaaggttcctgggactgtcactcaccatggtatggagacgtatcacgctttgtgaaaaggaagttgccgctaataggagggcaccagatgccggatga

SEQ ID NO: 76663 - DNA, 210 bp, Citrobacter koseri
atgccggatgagatcgatcgcgatcaggaatttaatgagcagcgcctggaggagatgattgaacatagtcgttttaagccggggtcgacaccatcattatttcactgtcgtgtatgtggtaaacccattccagaaaagcgacggcaagcactgccgggtgtaaccacctgtacggaatgtcaggaaaaacttgaacgtagtagccgctga

SEQ ID NO: 76664 - DNA, 219 bp, Citrobacter koseri
atgagaaaacccgcttatcacgtatttgttacccaggaaagccagcccgatgtgcagggcgaaacaaacacgtactggacaaaagttggcgtggccttcgcacataacggcaagcccggtctgaatatcgttttgatacccggtattgccgtctccggcagactggtgctacttgaacccagggaagatagtgacatttcacagaatgcggccgcttaa

SEQ ID NO: 76665 - DNA, 645 bp, Citrobacter koseri
atgctttccaccactgcctttctggcactggcggtgcagtgcgccgccagtattcacccgtccacggcacttgacgtcgcgcgggtcgaatccggtttccacccttacgccattgctgaaatcctgccagacagtcggggcgggatttctcattttcccacgagcctgccggaggcggtccgcctcaccggacagctgactgcacagggccgacgctattcggtcggcctgatgcaaatcaccagcaccaatttccgccattacggcgtcacggccagcgacctgcttaacccttgcatcaatctgtcggtatttgagcgcattctcgccgactgttaccggcgcggcggcaccctgaaacgggcgcttagttgttactactccggcaactttgaaaccggccagcgaccggaatccgcctttaaccagaccagctacgtacagcgcattggctatgtcgtcccgtccacccgggaagaccggcagcgtgcccctgacccgagcacacaaccgtctgtccgttatcccgccgttgtgctgcgcggcgagcctgccggtgccactgcgccggtcctgacttccctgcattatcccggttccgtcattcgcggcgctatccctgttgtccctgatgaggagaaatga

SEQ ID NO: 76666 - DNA, 273 bp, Citrobacter koseri
atgcgtaaacgccgttactctgctgttgcttccatgctgctgtctgccccggcgctggcggcagacagcggatttaacaaggccagtgagacactgagcaatacttcggccggcctgctgggtctggccgccgtcaccatcacgctggcgacaatgtgggtgggctacaaggtgctgttcgatggcaagagcctgcacgacatgcgtaacgtcatcatcggcgcgatcctgattgttggcgcgtccggcttcggtgcctactgggcatcataa

SEQ ID NO: 76667 - DNA, 2748 bp, Citrobacter koseri
atggctacgctgaataaagcgcttacgcggcctgccaccattatgggcattcctctcgtgccgttcgttctcgtcagcggggccatcgtcctgctggcggtctatgtcagctattaccttgcggttctgctcattcctgcctgggcggaaatgaaaaataaagcccgaaaggacattcattatttcagtctgctctggctggcgtttaaaacccgtggacgacttttcaccaatacccattttggcgcgaatgcccttctggcgaatcagtacgataatgttgatgtctcggagtttattctgaaaatgaaattaaacgagcgtattacgctggataaatatattccgtactcctcccatattcacccttacgtcatcagaaaccgtcaccgtgatttggttgccacctgggagctgggcggcacagtctttgaatgtgaagacgaacatcacctgaccctgatggctacgtacctgaataacgttattcgttcgtatgaaggtctgccggtaacattctatattcaccggctccgtgaaaaataccatgatgcttttgaagcctgttcgggtattcccttttccgatgacgtgacccggcggtattaccagccggtaaaagaaaaaccgttctggcggcaccggctgtttttcaccgtctgctacgcgccgttctctcagattgataagaaagccatgaaagcgcagtcgcacggtaaacgccaggcagcactgaatgacgcgctcaaaatcatgctggaatatcgcgaagcactgggatcctcattatcccgctatatggcaacgccgctggggatatatgaagaaaacgggcgggtgtattcctcacaactggcgttcttccaccgtctgctcaccggccagtggcagaaagtggccgtaacacgctcaccattttatgaaacgctcagtacgccagacgtctttttcaccaccgacaccggtgaatgcaagacagtcagcggttcccgcttcttccgcagcctggagattaaggattattccccggaaacccataccggtatgctggatgcgctgctgtacgctgaaagcgaatatgttctgacgcagtcctttacctgcatggcacgggatgaagcgcagaatcatatccggctggcggaaaaacggcttaactccacggacgacgacgcgatttcccagcgcgaagagctgattgtcctgcgcgacctgctccagtccggatatgtgtcgtgcggtaaattccacttttccctgctgatctcctcagacagtgccggacaggtggtgaaggacactaatgttctggcccagcccttcgccgatctgggtattatgacgacgctctccaccctgtcactgcccgctgcgtatctggcgcaactgccgggcgtctatacgctgcgtccccgactggtggccgtcagcagccagaattttgccgatatggcctgcctgcataacttccacccccacaaacgcagcggtaatccgtggggggaagccatcgccattctcgcatctcccggcggtggcgggtattacctgaacctgcacgacagccaggccgggcgggatgacactgatgagaaaacgccggggaatacggcgattatcgggaaaaccggctccggtaaaaccctgctgatgaccatcatgcaacaactgatgcagaagtaccgtaacccggcgtcgtttgcgccttctgccgccatcaaacggctgaccacggtatatttcgataaggatcgggcggcggagatggcgatccgccaggcgggcgggcgttatttccgcatccgtaccggcgagcccaccggcttcaacccgtttgcgctggagccaacccgccggaacatcagttttatcaaacggctggtgcgcatgctgtgccgccgcaacggtaagccgctcgatccgcgcgatgaggagcggatcagtgccgccgtggacaccatcatgctggactatccgccggagtaccgccggttcgggatcacccgactgctggaagtgctgccagagccgccgactacagatgcccgcaccaacgggctgcgtattcgcctgaaacagtgggcgcaggagggcgagttcggctgggtatttgataacgaggccgatactttcatcatcagcgatgtcgataactttggtatcgacggcaccgaatttctggatgatgacgatattcgcggccccgtgaccttttacctgctgtaccgtgtgaccagtcttctggacggtcgccgcctggtgatgtttatggatgagttctggcgctggctggccgatatcgaattttcccgcttctcgctcaatatgctgaaagtcatccgcaagctgaacggtatcttcgtcccggcaacacagtcaccggatgaaatcgtcagacaccccatcgccccggcgattattgagcagtgcggtacacagatttacctcgccaacccgaaagccagccatgcggattacgtggagaaaatgaaagtgccggaaagtgtttatgacacggtcagaaaccttgatccgggcgagcattatatggtcatcctgaaaacaccgttacaggccggagaaacccgcccgtttgtggcaatggcgagaatggatctgtccggactgggtaaactcacccggcttctcagcggcagtgaggacaacctgaaaatattcgatgccatttatcaggacggtatgcgacctgatgaatggaaaaacgctttccttgagcgggccatctga

SEQ ID NO: 76668 - DNA, 729 bp, Citrobacter koseri
atgcgtacccgggatcaccttctggcattatcgttatttttctcaacgcagacattcagcgccggaataccggttttcgacgctgtgcagaataccgaatccattaatcagtggatacaaaaactacaacaatgggaggatacagttacccattataaaagtgaacttgatgcatataagaagcaactggctaccgcaaccggcgtgcgggatattcagggttttctcagcgatgcccggagcctgaaaaccgatattgataatctccgtaagagcggtatttcactggatgacctgctgaccacgcagaacagttcatattcttctgaactgcaaaacctttacaataaatacaaatcgttcagcgtatgcagcgaggaacaggaaggaataaaatctcaggccctggccgacagttgtaaacagatgatcctcaatcaggcaatggcgattgagaataccactggcgttgaaaacaggatcaacagcacactcagcgacatatcagacttatctgatcgtatatcgaatgcgcaggactcgaaagagtctcaggatctggctaacgccatcgcggcgaaaagcgtacagttaaatgcgctgacgaatcagtgggagatgtctgtcagacaggctgaacagcgaacgacattgctggaacagcaaagacagaaagcctttgaacagcagcaactgacggcacctgttgctgaccttaataatttataa

SEQ ID NO: 76669 - DNA, 276 bp, Citrobacter koseri
gtgctcagatctttattcaccttatgcacactctcaggcgtgatattactgtccggctgcaaggaaaccaaatccgaagcctggtataagcagcatcctgacgaaacttatgcggtttatacgcaatgcctgaaggatggcgaggcaagcgataactgcgaatttgcccaccgggcagcacttatgtttgcacaggaaggccagcccggggttaaggagaaattcggggcgatatttcagcaggaagctgaaaaaagaaatgcagtgacacagtaa

SEQ ID NO: 76670 - DNA, 1032 bp, Citrobacter koseri
atgtccggtggtatttttgttggtatggacaaaaacatcatggatggactgaatgccgtactggaaggtcagtcttccacttacggcacgatgatcagcgtcatcatcgtcagctcttttaccctatttatactgtttcgcggttatcagacgctggctggcaaactccggatcccggttgaagatgtcgcctgggatgtggggcgaatgttgctgatcaccacctttgcgttaaaccgggatggctggctggatatggcggtagcggctatccagggactcaaagacggtatcagcggcgatgataacgtctgggcgctgctcgataccgtctgggaaaaggcacaggcgctggggcaaaagttatttaatatggacacctcaacttacgtcaaactgaatggtggccttgccgaagtcctggtatggggcggctctattgtcctgctgatggcagccacctttgtgaacctgctcgccgaaatcaccatcctgttaatgacgaccaccgcgccgctctttattttctgcctgctgtacggttttcttaaaccgatgtttgataactggctgaaaacgattttcgcggcaatattaacgatcatgttttctgccttatccatccgtattgccattaattacctgaataaaatactggatgcagcaacaaaaacatccgctgaaaccaatatggtcacgctggcggcgcagtgcctgctggccgggattgcagcaggtgtggtggtctggttctccgcgaagctcgccagcgcactcagcggggccgccgtacaggcggtgctgcagggggcagccatgaatggtctgagcggactggcgaataaatccgccgacctcaccggtccgggtgtaaaaggtggtgcccacctggctgcgaaagtcggcatggccgtcgccgcgtcaaccggcaggctcaccggcgcaggcgcgggtaaaaccgtgagcgcctggcagaaacgcgccgccgccatcgaaagcatgaaacgcctgaaccggcagcgtcaccgttaa

SEQ ID NO: 76671 - DNA, 141 bp, Citrobacter koseri
atgaaattcagcatcatccttctgatgctgtgcgcgctcacgggctgcgcacggcatcagggcgacctcccgccggtatccggcgaacccgagccggtgaattcccccgccatcattcaggagctgactcaccatgtctga

SEQ ID NO: 76672 - DNA, 684 bp, Citrobacter koseri
atgtctgatattcagaacattgttaatgtttcccgctcttttgaatccattctgctggaaaaggaagagcgttcccgaaaaaacgcctggcgggtggccgctgccggactgattctggctgcaatggcgattgcggccattattattatgctgccgctgaaaaccaccgacactgaattatggtcagtggataaacagaccgggcgctatgaatatatgacccgcgtgaaggagcgggatatttcttctgaaaaggcactggcgcattcactggcagcacactatgtcagactccgcgagggatataattatttctcccttcagcgtgattatgacgacgtgcagttatttaacagcgacagcgtgaaccgggactatctggacgggtttaacggcgaccaggcaccggacgtgatttttaataaggcggaatatgtcgtttatatcgccattatttccaatgtgcatgcgcctgccaccgggacggataatctggcaacactgcgtattaagcgcacaattcgtcgtattgctgataattccgtgaaaacggatgtgtggaatatccgcctcacttaccgctacgttccgcaccggcaactgaccgacagccagcgagaagtgaacccgctgggttttatcgtcaccagctaccagcgcgacaaagagctgaggggggaatga

SEQ ID NO: 76673 - DNA, 891 bp, Citrobacter koseri
atgatgctgaaacataccctgctcctctctggcttaatgatgtcatgcgtggcatggagcgcagcgacaccgcgcggcagcgcgtatgacagccggatgcagaacgtcacatacaacaaccagaacgccacggtcgtcagtacccgccccggctacgtcaccatgctggtgtttgacgatgatgaaaccgttatcgatgcgcaggcgggttttcccagaggctggaccgtgacgaaaagcgataaccgggtgggcgtcagcccgaacccgattacccagccggtcacggatgccagcggcaacaacgtcagccaggtgtttctgccgacggcaaaagactggaaaaccaatctgttcgtggtgacatcgaagcgcgattacagcctggagctgaacgtgctggataaagactcgcccgctcaggcctttgttatccgctaccgctatcccgacgaactgcggaaaaagtctgccgccgccagcgccgcccgtcagcaacatctgcaggaagcactggaccggcagcggattgcggcggcattcgggcaggccaccacgccgcgcaactggcgctatacaaaacgggtggccaccggatcaacgactatcgccccggactttgcctgggatgacggccgttttacgtatatcggtttctcccccacgaaaaccctgccttctgtcttccggctggttaatggtcaggagcaggcggtcacgccccgaaccattaaacagggcaactacaccgtgatggcggttccggcatcgccgcaactggttctgcgttacggcacctcggtggtggggatcgaaaacgacggattcgggcgtatcccgctgaccaacagtgacaccgtttcaccctccgttatgctggaggcaaaatga

SEQ ID NO: 76674 - DNA, 1308 bp, Citrobacter koseri
atgaccgacaaatctttcccggacgaaccggaaaaaaccaccgcagaacgggaagcggaagcccgtgaacgcgcccgcgcggcaatggcatatcaggagccggagcagaaaacgccgcctggccagccggaagtgacccgcttccgtaaagcttctggtcgccgcacgctgatcgtcagcctgctgagtctggtcctggtcatcgcgctggcatccggtggcgatcgtcttctcaacgccctgaaaaagggtgatgagaaagaatccgacaccgcgccgccgccctcctccggtgcgatgcagcatgagcgtaagaatctgggtctggacagtaacccgtttggcctgttcgggcccgggaggaaggaaagtgcagatcctgccagtcagagcgccccgggcactccagctctgccgcccgggccgcccgccctgaacaaggcggcagcgctggcagacgggctgaacagcggcagcacagggtcaggcgacgatacacgcacgtcccgaagcggatcgcgcagcaacgagggaacgtcgggcagcccgtcagcctccacggcttacacaccctgtaagtctgtactggtcagtggcgaagatggacgcctgcgctgcccggatacgacagcaccagcagacagcaataacaacgacaatccgggcgttgcccgcgtcaccggtgtcaggcggctgggccttgatcccgatctctatatcccggtggatcactatattccgtgttcgatgatgcggcgcttcgtatccgatgttggcggtcatatctcctgcctgatcggtgagaatgtctggagcgccagtaaccatgtgaagctgatcccggcaggaacggtcgcccgtggcgtctaccgcaccggcgcactgcaacacgggcgcagccggatgtttgtgctgtggacggagctgcgcacaccggagcccggcagcctgcaaatcccgctcaccgatacgcaggacaccggcccgcttggtgaggcagggatcgcaggctggatcgacagccatttctgggagcgtttcggcaacgccctgatgctcagtaccgtgcaggatgtggcagcagcggcatcagatgccgcgccgggaaaagaccgcaataccgactataccgaaaacacccgcgccgccacggcggaaatggcgaaaacgatgctggaaaacagcatcagtatcccgcccacgatgtacctgaaccagggcgatgtgatcggcatcatgaccggcacggatattgatttttcctctgtttatcaactacggctgaaaaagaaatggtatgagcgctga

SEQ ID NO: 76675 - DNA, 1020 bp, Citrobacter koseri
atgagcgctgaaaacctgtcactggattttatgagaaatcagctgtttggtgattatctgccagtcgaagggctgaccgaaatcgcgattaaccgaccgggggaactgcacaccaaaataaagggggcatggcagcagcgtgaatccccggtcacgctgcgccagtgttacgcctttgccagagcactggcttcccggcaggacgataatattgacgatacgtcaccgatactgtcggccacgctcgaatccggcgaacgtattcagacgattattccccccgcctgtgagcgtaatacagtgtccattacgctgcgcaagccctcttttgaacagaaaacacatcagtcatggattgatgcgggattttatcagcgcgtggccggtcaggtgaaaacggaaagtcaggatgatgcactaattcagttatatcacagcgggaatataccccgctttatggaaaaagcggtggaatatggcaaaacgatttttattgtgggtgaaaccggctccggtaaaacgacctatatgaaaacgctgctgcattatattccgttgcatctccggctaaccaccattgaggataatcctgaaatccggttttatcaccacgataattatgttcatcttttttacccggcggatgccggggacaacgctattgtcacgcctgggaggctgatccgtgctaattatcggatgaaccctgaccggatattgctggcggaaattcgtgggcgggaagcgtgggacgcgatgaaaattgtcggctccgggcatgaggggttaatcacctccatgcatgcgggcagcccggaagaatgtattgaagggatcattgaccgctgctatgaaaaccccgattgccggaatattccttttgatgtgctgttacgcaaagtacttaaaagcattgatatcatcgtcagcattgatatacacggcgatgtgcgccggatgcgtgatatttactttaaaccagttcatttaaatagcatgaaagatgcattcagaaaataa

SEQ ID NO: 76676 - DNA, 1860 bp, Citrobacter koseri
atgattttaaataagcttgccgcttcactgtcaccgatagtgaacgggatgctggcgctgctcgcttttgtgcatcagcagcaactgataatggcgttattagcggggctgacgatgccgttttttgcatcaatgaaaagcgatgaacggcagaaagctccgctctggaaaaagctgattatggctttttccctgctgtgtttcctctccggcacactggccccggtcgttatcggcttttttcagtggctgtataagaccagactcaccagtgataatacagcactggcctggtcagtacgaattgccttcactgtaaccgggattatttttcatattatgcttcgccggatattcacgccggaactggacaaaataaagaaacgccttgtaaaaaaaaccacccttgaacgggaattgcgcaccgatgtccgcaccgtaaagtccctgctgccggaaacactacattatgagccgcttgattatatcgatctgaataaaggcatttttactggcatggacagagagaacgaaccaatgtatctcccgttaaaagactggcagaaacagcacgcggatattatcggcaccaccggagccggtaaaggcattgccgccggcatattgctatatcaaagcattctggccggtgaaggtgtgtttgttatggaccccaaggatgatgaatgggcaccgcatctttaccgcaaagcctgcgaggatgcaggcaaaccctttgccttaattgacctgcgaaaacagcaatatcagttaaacctgattgaagatattacgccagatgaactcgaagaattgttcgttgccggtttcagcctggcggaaaaaggacaggaatcggatttttatcgcattgatgaccgaaaagccgcgcgtatggccgcacaatttgtcagcgaaaatccatcgacaacaatcagggatgtttataacggtgattacgttcagggtattgccgaaaaaatcaaagcattttttggcaagattgaggagctggcattactcaatgccattaattcaccggaaggtttttcgcttaagcacatatttgatgaaggcggctgctgttatgttatcggctccatgcgaaacagcaaaattattaccgcccagcgcatgctgctggttcgcctttaccagttagcagaaacgcgcgatcgagtaacagacgtcccccgccccattgctgtttatctttccgaactgaaataccatttatccaggccagcgctggaaggtttaggcgcggctcgggataaaggcgtgcatattattatggatcaccagtccattgccgatttaaaagactgcccggcagatttgaaaggtgacgccgttgtcggtgcggtcgttgaaaatgccaaattcaaactggtttatcgggttatggatccggatacagcaggctggatagcgagaatgtcaggaacgattctggtggatgacgaactccgtaaggctaagacggataatatgctcactgaaaccatcgacagtgagcgcacaatccgccaggccgaacgtttttttattgacagcaatatgatcctgaacctgcctgattttgtcagttttatctttacgacaacaacgctaccttctgcctccctgatttcaccgataaaggtcagaaagcgccggttaaaaaccttttctgtttcccctgatattgccgcagcggcggcaccggtgaagatcgcactggattttggcgacgatgataaaccagccgcgctggatgtgatgacatcgcacccggctcttttcttcgacgaaagcgaagtaaaaccgacaaagccaaaacctgatgatgaaaaagacctgtccccgctggatttttaa

SEQ ID NO: 76677 - DNA, 747 bp, Citrobacter koseri
atgctgatttcgtcatttcacgagcgccagacgcgtaacaacgaaaaaataaaacaactgctgaacttcctgaaagaagaaacctacagcgattttaaaacgctgatgctgttgtttggtttccgggatcataagtctctttattcgctactggcaaaaacagagcgaatggggttaatacagaagcatgtgcttgaatcacgaacaatgaagatttcattatgggggatcaccagcgacgggctggctgtagtgctaaccccgaatgataaaatctttcccgcgaggtttgaaccgtccagagttaccggctggacgctggagcatcatcttgataatcaggtcgccaggcttattctggagaaaaaaggcgcttcgggatggattaacggcgaccgggccggctttcttagccagtatcaggtaaaacatcgcccggacggattactgacgctgcctgacggtaacgttattgccattgaaaccgagcgccgcctgaaaacccgggcccggtatcagtcgatcatggcaagccacctgctggcccgtacccgcaagcagtggatttacgttttttatgttgtacccgaaccacagaagaagtgtgcacttgaactgctgtttgacagcatcaggcatgtcatcatcaaccatcagcacgtcccgctggaagaacgccaccgccgtgtgtttcgcacttatacgcttgatgaactgaaacgcctgtcattagacagctattcgtaa

SEQ ID NO: 76678 - DNA, 945 bp, Citrobacter koseri
atgacgatttccctgcatacccagactagcgcccctaacatcgcagtggcgaccagcgtatccccgctggagcagtcaggctcctcaaaaacgaaattttctaaaaccagaacggatatttatcagaccgttaccgacaacatcattgcagcatttgaggccggtgttaaaccctggtcctgcccgtggcagcgtgtatccggcatgtctggactgccatctaattacgccactggcacagcttacagcggcatgaatatcatgctgttgtggtgcagcgcatctaaacagggtttcagcgattcacgctggatgacctacaaacaggcacaggcagcaggtggacaggttcgcaagggtgagcatggcacaacagccattttctacactacgctggagaaggaaaacgacgccggagacgttgaacaaatcccgatgctgaaaactttcaccgtgtttaacgttcagcaaatcggcggcttgcctctggcaaaggtaactgtcagcccggaagcgagatttgccccgttgccgcaggctgaaaatctgttcaggaagagcggcgcaaacatcattgagaaaggacaaaacgcctttttcagcccatcaactgatgaagtctggttaccggagcgccatctattcgctgatgcggctaacttctacgctaccggcctgcatgagcttgtccactggagtgggggtaaaaaacgcctgaaccgtgaaatgaaagggaagtttggcagtgcggattatgcagaggaagaactggtggcggagctgggaagtgcttttctgatggcggacctggggattgagggagaggtacaacatgaaagctacattgcttcctggctgaaagcactgaaaaacgacaggcgctatattttcaaagcggccagcgccgcctctaaagcgcatcgttatctgatggataaactctga

SEQ ID NO: 76679 - DNA, 996 bp, Citrobacter koseri
atgaatgatgcaccttcagacatcatatttcactatccaccggagctattcaatctcttggtggatgttgtgccgttgctcaatcgctctaagcaggatgtgctggttttcttccggggcgcaggagtacctgacaacataacttctgacattgcagttcacttgagggctgcaccaaaggatgtcaacaagtaccagatggttcgcacagtacttgaacgcctcaacgcgaagggggaacatgctctccgtgaacggcgcgaagtgctgcggcgcgtggtggactttgcgaactttgattcgtgctggcccgcagaccaacttaaggccaaaggtcttgtcgccagtatccgcgaagtcgtcaaccaaaaagacgctttcacgcgcatgaacaatgcccgcgaagaagaacggcaaacccgcctcgctgagtcacagcggatcgcagcagaaaaacgcgatcgtagttatagaatcgagaatgccaagcagggtttatataaattatttggcactactgcgactgcacaggaacgaggaaaattgctggagacggctctcaacaatctttttcaagcctacagtgttctcattcgtaaatcctttcatttggttggtgaggctggtgaagggatcgtcgagcagattgatgggatcattgaactcagtggtgttctgtatttcgttgaaatgaaatggtatcgcaatccggtgggtaagcctgagatttcagagcatcttgttcgcctcatgtcgcgtgccgaggttcgaggtatcttcatttctgccagtgactatacagaaccagccattcttacggcacgtgaatttctgcaacacaaagttgtagtcctatccacgcttcatgagatcgtccgtctgcttgagcagcaagacgacctttcagagttcttcacaaagaaagtccaggctgcgcagatacacaaaaacccgtatttctgcccacacgatagccaagcacaaggtgcgttatga

SEQ ID NO: 76680 - DNA, 1089 bp, Citrobacter koseri
atgactgcgagttggatggacatcaataagccgccgagcccagcaaccgctgttacggcagctcaggtggcgaacggccccattattccaccgcagcaaaggctactgacctactcaccagacgagtgggagggattcgtcgaggaatgggcttattactgcctcacgacgaagtatgcacacgtcctgcgtttctctggtgctggcgatatgggtattgatgtcgccgggttcgttggcgatgaacgcctgctgggggtttgggacaatttccaatgcaagcactacggcaatgccatcaggcctagtgatgtttgggttgagttcgggaagatcatctggtactcgtacaaaggtgaatatacggtccctcgtcgctactactttgtttcgccacgaggtgctggtacgtcgcttagccgcctattttcgaatgacacgaagttgcgtgaggaattgttagctaactgggataagcatgtgaaagatgcaatcactagcacacaacaagtgttactcgacgcgaagcttcgtgcctatgtagactcattcgattttaccatcttcgacgccaagactgcgcttcagcttgttgacgatcacagagccacaccggttcacacagcgcgctttggtggtggactaccaacgcggcctgcatctgaaaagccgccccaagaagttgccgccaccgagagtcgctatgtgacgcagttgttcggcgcatacagcgaacacacaggaacaatagtgactgacccttcggccttgcccgtgacgaaactcaaggatcatttccgtcgccagcgcgaggcgttctatgaggctgagtcactgcgcgtcttcgcacgtgatagtgtcccgccaggcacgttcgaagctttgctggatgacattcatgatggcgttattgatacgcacgacgggaaccatgctgacggctacgaaaaggtctgcgctgtcaccaaggctgcccgcgacatgcaaattacggcaaacgccctcatcatttgtactaaccccaaggatagagacggaatctgccaccaacttgtgaacgaagagcgccttcggtggacacgatcatga

SEQ ID NO: 76681 - DNA, 495 bp, Citrobacter koseri
atgagccaagaacataagccaattaccttcaatagcccacttgaggcgggtatccgtgcggtctcgattctgggtgctgcctatccgcaaacctacgacctccagcggcttgtggcctttgactaccttcttgttcacacgggcgatattggtggaccagacaatttgcacccaccgacgccaatgcgctctgctgaattgctcgtgcgccgcaagttagttgagcaatcactgcttctgatgatgacccgtgacctagttgagcgcgaagtcacatccgagggaatcaagtacggcgcgggtgaaaatgctgcaacgttcctgtcatcagtatcttccaactatttgctgtccctgaaggatcgcgctgtatggcttgtcgaaaccattggtgatctgacggatgaacagttcaaagccatgatgcgccgtttcttcgataaatgggttgaacagtttcagagcattgagcaaagcttaggaggtgatgcatga

SEQ ID NO: 76682 - DNA, 1881 bp, Citrobacter koseri
atgacggcagtaactcccggcttacgcttgcgctttctcggtttttttgggccacaaaagccacccgctacagtgaccttcggtactggcctcaatgtcatttacggcgcatcaaacactggaaaatctttcattgtcgaagccatcgacttcatgctcggtggaaagccgcctctgcgtgatatccctgagcgcgttggctacgaccttgttctattggggcttgaaacccttgatgggaagtcatttacactctggcgcagcatagatggcggtggttttcggctctacgaagacttgcacctggcgccaccaacaaacgaaattccgtatacgcagcttgacgaaaaacacagcgataagaacaatacgaacctttcatcattcttgctggatctatgtagccttggtggcaagcgtgttcgcaaaaactcccggaacgaaaccctcagtttaagctttcgcaacattgcgcgtttgatgatcgtcgatgagacggagatcacacaacaaagctcaccgcttattgatggcaatcccaccgccaacacgccgaacttggccacattcaagttacttttaaccggagcagacgactccgcattggtctccaccagtaataagagtgagccggaagagttatcgcgcaaggcacaattgcgtcttctcgatcagcttcttgaagactatggtgaccggctcaaggagttgacaaagagtccgaatgaactcaaggagcagctagagaagatcaacacctcacttcgtcaacaggcggcccaggtaaacaccaccgaagatgagtttcagcaggctgccgggaagcgacgagaattacgcaaaaaactggaagaaagccgagagcgacgtgcagaggtaagtgcgatgcttgagcgattcaggctgcttgatagacactacttgtccgatattgaaaggctacgtgccattgaagaaggcgggacgctctttagcgtactgagtgccgggcattgtcctctttgcggagcggcccccgatcatcatccccccgatactgggtgtaatggagatactgatgccgtcgttcaggctgcacgtgtggagattgccaagatcgaagttttgcgcacggaacttgtagctaccgtccaaagccttgagcgcgaaggcgccaactttgatcgcagaatacccactgttgttcgagaattagagtcaatttcggagtcagttgaagaattcctcgctcccaagctctcgacccttcgcaagtcctattcagacattgccgacaagcgggccgaggtacgcgaagcgcttgcactctatgccactgttcaagacatggagcgccgtcgggctgatcttgaaaagggcactgaagacgagaaggctggggtggttgctaacgtagatctctcaagcactgtggcccatagttttgctaagactgttgaaggcatactgactggttggcacttcccagaggttggggatgtgtacttcgattccaagtctcgagatcttgtaattgctggaaagtcgcgtagtgcttttggtaagggccttcgcgccattacgcatgcagctttcaccctcgggctgcttgctttctgccgtgagcgccacacaccacacacgggattcgttgtactcgattctccattgctggcatacagagagccagatggaacagaatatgatttgaccggtactgaccttaaagatcagttttacgcgtaccttgaagcgctgcctgaggacacccaagtcatcgttgttgagaacaccgacccgcctgatgcaatcatgaagcgtgagcagtctcttatgtttggcaagaatccgcatcatggccgttacggtttgttcccttttatagcggaccctgcacaataa

SEQ ID NO: 76683 - DNA, 2247 bp, Citrobacter koseri
atgggaataaaaagtatacgaattaaaaacatactctcctttgatgacgtatatattgatagctttgaagattttaatttgattattggtagaaataactctggaaaatcaaatcttttaaaagtatttaaatacttttatgaaaaattagacgagcaacggagcattcctcttactctaaattcgaattacacgccctctggaataataacaattacatatgatacaacccggataaagaaaatagtaaccagcactaataataactctcgatttcataaacatatatataacactctttttaaagaaccaaataaaaataaattcaccgcacttttcgcacccgaaaggaaaaaacaaaatagcgaatactccttaacacttacaatatcaaatgatgactcaatatcatggtcaacgaaagataaaaaacttttatccctaattaaaattatcttcccttttttttatatagacacacgtagaatggatttatacaactgggaagacatatggagaataataagtagcattaattcattcaactttcagaaaataagcgaagatgaaatcctgaaatttttagatgaaaatatttcatctagagatggcgactacaaaaaatacatcactcgcattactgatgtaattgacacaaaaccatacacctataaagagaaagtaattaattatattaagatagcattgaaaggtcatgttttcacgaactcaggtgaagatatccttcatcagtctgatggaacaaattcacataaatatattgaaacaattattaagttgctcatttcgttatcacgaaccgagttcataacacctaccatatatatagacgaacccgagataggactacatccaaaacttggcgagcaatttattacaacaattcacacaacttataatagatataaaaaaagcgttcccgaaaaggaatcaggaaaatactcaacaccttatccttgtttaattttcagcactcatgcaccaaatattttaaagcaaaccattaaacttttttcaacagatcagcagattttgcatttttctaaaaagaataaatactccacaaagatatctaaattaaattcacaatatagtgatttgcgttttataaatatgtttagcgataatgaagctagactttttttcagtgagtatattcttttcgtagaaggttccactgaaatggaagtcttccaaaatagttctttagctagaatttatcctgatttaggcaggattgacatatacgccagtgatgatgttatgctgagaaatataaacccaacttattctcaagcagcaattccttttttaattgttaaagatatagacaaggtgattaagcttgactataaaaatgaaatattaagtctggatggtgatgtttctctagttaataaattaatacgaaaaggcagtttaagtttttataatccattcttaataaaaaaaattgacagcgcaaaggaaataataagagcggataagtctaagaaggaaatgtcggttgatggcttgtttttcaaaacatttagaattgaaaattttgtgaggaatttcaataagctgttaaaatcatttaaccttaattatatgacaactacaatagagggtgcattaataaatgagcattctttaaaatacttttacagatggatttgtcatatcgtttttaaccagctagacgtcaataatgaaaaccctaaaaaaatgtttgctggcttaatgagaacgtacaatcttaaagatggagctataagtatattaaattcggcttttgttctctcaactcatttaagtatattagatccagaggagcaaaagctggtattcaaggttaaaaaaagggctctttttttaattaaaaaaagcattaaaggagattttaaaaacaataaagaaattacaaccctatttagacttctttttggagggaaaactgccacacttataagtttagaaatgaatctgaaaaaaagttgtcaaagaatagacccatctattacagccacaataaagaaatataaaagcaatgagcttaaattcttactcccctataccacaaaaactagtggctgggttaccagttttttggattttacgatagctaagttagagcaagaaaatgctgataagatagccgagaatttacgcttccttttccctgaaattatatctataatagagcaagcttcttcttcgatagatataggggagtttcactga

SEQ ID NO: 76684 - DNA, 1101 bp, Citrobacter koseri
atgaaagaaaaaataagcaagattgataaaaatttctatactgacatttttattaaaacatcatttcaaaatgaattcgaggcagggggagttataccaccaattgccaagaatcaagtatcaacaatcagtaacaaaaataaaacattctattctctagctcactcatccccacactactctattcaaaccagaattgaaaaattcttacttaaaaatatacctttaagtgcatcgagttttgcatttaggaaagagcgctcatacttgcattatttagagcctcatacccaaaatgtcaaatattgtcatcttgacattgtttcattctttcatagcatagatgtaaatattgtccgtgatactttttcggtatacttttccgatgagtttttggtaaaagagaaacaatccttattagatgcattcatggctagtgtgactctgactgcggaattagacggggtcgaaaaaacattcattccgatgggatttaaatcttccccatcaatatctaatgttatctttagaaaaattgatattttaatacaaaaattttgtgataagaataaaattacttatacacgatatgcagatgatcttttgttctcaacaaaaaaagaaaacaatatattaagcagcactttttttataaatgagattgcatccattctctccattaataaattcaagttaaataagtcgaagtatttatataaagaagggactatttctttaggtggatatgtcattgaaaatattttaaaagataacagccgtggaaatattagattgtcgtcttcaaaattaaaccccttatataaagcactatatgaaatcaagaagggtagctcttcaaagcatatatgcattaaagtatttaacctaaaactcaaaagatttatatataaaaaaaataaagaaaaatttgaagccaagttctactcatcgcaactgaaaaataaactcttgggatatcgttcttatctgctttccttcgtaatattccataaaaaatacaaatgcattaatcctatttttttagagaaatgcgtatttcttataagtgaaattgaagctataatgaacaggaagttttaa

SEQ ID NO: 76685 - DNA, 1059 bp, Citrobacter koseri
atgattaaagatacaatattacaaaaagatttggattttatcgcaaataaaatatttaagggtggcagtttttctaattctactgtgtttattacaggtgctactggtctggtagggtccttgcttgtcaaaagtatactatatgcaaataaaacgttaggaacaaatataaaagttcttgcaagtgtaagaaatcttaataaggcgagagaaacttttttagattttatatctgattcctgcttggagtttattacaatagacttgcttgaaccaattaatatattaaagaagattgattttattgtacatgccgctagtattactgcctctaaagaaatggtagaaaatccaactggggttctactaactgcattcgatagtactaaaaatattttaaattatgtcaaggtaaatcctaattgtaagatggtctacatttcttcgatggaatattatggccaggtgacagaaggttatgaaaatgcgacggaggataagctaggctatattgatttaagcaagccgagaagttgctaccctgaaagtaaacgtgcttgtgaaactttatgtaacgcttatgcaactcagtacaatattaatgtttgcagtgcacgccttgcccaaacatttggtgctggggttcctttctcagataatcgagtatttgcacaatttgccaagagtgcgatgaataactcagatatcattttgcatacaacaggtgagtcagaagggaactattgttatacagccgatgctatatatgcgattttattgcttttgactaacggtaagaaagggcaaagttataatgttgcttgtgaccatagcagcattattaacatggctaaacttgttgccgaaaaaatagcagataatagaattaaagttgatatccagatacctcaagatttgaacaattatggatatgcgccaactgtaaaattgagacttaactcagataaactacgagcattaggctgggaaccttcaacggatcttgaacacatgttcaaaagaatgatcagcagttgggaaatatctatagataagtag

SEQ ID NO: 76686 - DNA, 726 bp, Citrobacter koseri
atgaatcatgtggtgatttttgctggcggaactggatcccgaatgaattccagaaacttgccaaaacagtttttaaagatttatggcaagcctgttataattcatactttagaggtttttgaaaactgtgctgctatagataatataattgttgtaattgttaaaggatgggaggattatttaaataatcttctcgaacaatatcgtattacaaaagtacgcaaagttgtaccgggcggtgagactggtcagcaatcaatatttaatggtttaaaagagttgagtgaaggtattgtattaatccatgatggcgttcgtccattcattacaaataaactcatagaggaaaatatagcagtagctttacaacataaaatagctattacttgcgtaaaagctaaagaaactttggtttccgttgaagatcataaaattaatggagtcttgaagcgcgaagtatcatatatggccagagcgccgcaagcttttgatgttaatttgttgaaatctgcacatcataaagcaatagcggataatgattactcttttgttgattcttgtgccatcgtgaaacactattatcctgagtcagactttcatattgttgaatgtggttcagaaaatattaaaattacaacacaagaagatttttatttggctaaagccatgttctctttagaagaagatgagcagttgtatggttttaaacgaggggatgagaaatga

SEQ ID NO: 76687 - DNA, 1512 bp, Citrobacter koseri
atgaaacaacatgctgggggattggtgggaaacaagctagtttttgtgatcgtattcttaaccatcactataaccggcatggtgactttttggctgggtgcgtccagccgggtagataatgacaaaagagcattaatccagcgcgtagattcgctgctgtttgaagcaaaacagatatcagattcgttgaccgctcatttaacagaacgctgctcagatgaaacggtgcgtatgctgacgaaacagatacaccgttatccgcatattgggggcattttcctgttgcaggattcgcaggtatattgctcatccgggatggcgaaacctgaactcagcaatttaaccgcaggggagaacggtaatcggctatttttagttgatgaaacgccggcatttcgcggggagcctgtattagcctacgttactgtgagaggaaataacgcaatagtggtgacgatcagtacctactggtttaagtcgctgcttgcagacagtcgtttacttgttaacgtgaatggaaatattctctccgatgataagttaatcagtacaaacagtattgattttcaaaactccgcctggcaacaatctaatatgtttgattatcaggtaatggaatacccggaacatacaggcattgcttctgttcttaactttatttttattctctttttatccgcagcgattgccgtccctgccgcttttctgtttaactatacgctacaacgaatcgcgatgtcccggtatatacaacttcgccgggggctgcgcaaacagcagttcgttccttattacgaacccgtcatgaattgtgcttccggggcattatatggcgcagaagtggtcatgcgatggaagaaggggaacgatacatccgttattaatgaagagattatctctctggcaaataaaaccgggatgatatctccattagttaactttattttacgacaggtggaaaaagatatactctctttacgcctcagactgccgagaacattctacattaatttccgacttagtgaatcgatgatcgctatgccagaacttattgattcgtttgttgagtttcaaaaacgcttgcccagcgatgtaaaactgacgctggaatttcctgaggttgtttatcgtgatacaacgcttgagtttgattcagttctcaggaggttacgtgtcgaaggcattaaaattaaaatgagctccttatttttagaacgtttaaatgctgaccgtaatttataccttccggttgatgctgtcagaattgaaaagtcagttaccggattgatttcggactccaaagaacctgtcgcgagtgttgatgatattattcgttcggcggtaaataaaaattatacgattatcgcggatggtattgaaaatgatcagcagtaccactatttatcactgcgcggtgttgttttacaacaggggaattactggtcaatgccattgtccagttttcatttaatgcagtatattattcagagcgacaaagtattactgtgttaa

SEQ ID NO: 76688 - DNA, 375 bp, Citrobacter koseri
atggccgctatccaatttattacagacagtcgaggccgcagagtctctgctgttgtgccaattgacctcttcgaaaagttagttagcgacagagatcttgatgaactgtatgacactgtacaagacgaatcaggcgcatctgataatgttcgttaccccaacgaagtgatcagcatactttctgagcgaaattgcaccatgcaagcggcatggcgcatttacagagggatgacgcaaaaacaggttgcggaagccctgggcatcaaacaggcgactgtctcagagtttgagaagtcagaacgcccacgtaaagataacatcgaaagattagcaaaactgtataactgcgctcccgagcaactcatcctcgaatag

SEQ ID NO: 76689 - DNA, 264 bp, Citrobacter koseri
atgacccagatactctggacgggtagagccgttaaggatctgcgaaagctacctgctgatgatcaaaaagctgtacgtgagaaagtaaacgccatgcagttatacccagacattagctctctggatatcaaaaaactcacggatcaagacgggcagtacagattaagggtgaaaagctatcgagttctcttcgtatttgtaaacggagaaccgctgatcgttgaaattcagcgcatattacgccgtagctcatcaacctactga

SEQ ID NO: 76690 - DNA, 1134 bp, Citrobacter koseri
atgataaaagatataattaaattagttgttacttatatacttaaaatattattgattcctttttatttgtttcccatgaatagcaaaaagataatattcatgagctattctgggttacaatactcatgtaatcccaaatacatatcagattatattaaggataattataaagattatgagctgatatgggtttttcaggaacctgaaaagcatttattagatccgaaatttaaaaaagttaaatatctttcacttcgttatttttatgccgtagtaacaagccagttttgtattagcaatactggctttaatcgttttttcttcattagaaaatcacaacgatttgttcaaacatggcatggtggcggtgcatataaaagaagatcattgaatcaggataaaaactgctttcaaaagttactggatatacaacatgatgatatgataactgattttatttctagttctgaatattttacaaagtatttcattatggactctgtatataagaatagaatattaaaaacaggaatgccaagaaacgagtttttgattagaaataaaaataacggaaattttattaatcttaaaagaaaaaatatagagggggttggagaaggcaattttcttatcctttatgcacctacatggcgtgatgatggtagcatatatgagtttcctgactttaataaaataatgaataccattgagcgagtgtttaataaaaaaacaactttgctattacggagtcatcattatcaagaattaaaaagtagcttggattgcaattatatcgatgtgagaaactatcctgatatgcaagaattacttttaatttcagatatgctgatttctgattatagctcgtccatttgggatttctcgctattggaaaaaccatgctttttatatacaccagacctgaaatactatgaagatatgagaggtttttatactcctattcgaacatggggttttgatgtgtgccaaacatctgaagaattagatgatgctattaaacgttttgttcccatagtttattgtgaaaaaatatataaaatgcataaacagttcaattcttatgaaaatatagattcaacttctcagcttttaagtaaattagggattaattag

SEQ ID NO: 76691 - DNA, 2175 bp, Citrobacter koseri
atggcgcgtcttaaaactgctcagccaaactcttcgctgcgtaaaatcgcagtcgtagtagccacagcggttagcggcatgtctgtctatgcacaggcggcggttgaaccgaaagaagaaactatcaccgtaaccgctgcacctgcccagcaggaaagtgcctggggaccatcaccaacgattgcggccaaacgatccgcaaccaccaccaagactgataccccgattgagaaaacaccacagtctgtttcggtggtgactcgtgaagagatggatattcatcagccaggctcagtaaaagaggctttggcatatactccaggggctgccgcttcaacacgcggcgcttctaccacctatgattttgttattattcgtggtttttacacgccaggcccaaccccgaacaattacctggatggcatcaaattacagggtgactactacagttctgctgttgttgatccctatatgcttgaacgtgtggaattgatgcgtggaccgacgtccgttctttatggaaaaagtaatccgggcggcttgatctctatggtaagcaaaagcccgacgtcagagcctttaaaagaaattcaatttaaaatgggaacagacaatctgttccagactggttttgatttcagcgattctctggatgatgatggcgtctattcttatcgcttaacagggcttgctcgctcaaacgatgagcaacaggattttgcgaagcagaagcgttatgccattgctcccgtgtttagctggaaaccggatgagaaaacaaacctgacactgcgtgcaaatatccagaatgaaccttcaacgggtttttatggctggttgccgaaagaggggacggtagaacccttacctgacggttctcgtattccagtaagttttaccgatgctgctcctaacaatacctattctcgctaccaaagaatggtcgggtatagctttgagcacagtttcgatgacacatttaccgtgcgccaaaatttacgttatagccaaattaagacatctcagcaaacagtgtacggttttggtgctgttggcaaccaactgacccgacagagtattgtcgcgaatgaaaactataatgattttggtgtagatacacagttggaaagcaagtttgctacaggtgatgtggcgcatactctgctgacgggtgttgactattctcgtctgcgtaacgatatcgacaacgcttatggtacagcgcctccgctagatatgaataatcctgtatatgaggatgtcgtgttcccggatgcgaaacctttccagctaaatactcaacatcagactggcctgtatgttcaggatcaactggaatgggataaatgggttgcaactctgggagggcgttatgattggtctgagcaggcaacaacaattcgttccagcaaccagaaagttgaacgtaacgatgagcaatttacctggcgtgccgggataaattatctcttcgataatggcattacgccatatttcagttacagcgagtctttcgaaccgaacccgtctaaagcctgggctgctacacctgcggacaacgttgcttatgctccctctaaaggtaagcaatatgaagctggtgtgaaatatgtgccgaaagatctgcctgttgtagtcactgctgctgtctatgaactgaccaaaacgaacaatctgacttctgatccaagtaatccgtttgctcaggttccggcaggtgaagtgcgttcacgtggcgttgagttagaagcgaaagcggcagttaatgcgaacattaatatgacagcgtcttatacgtatacggatgctgaatatacggaagacacaacgctgaaaggcaaaacccctgttcaggtgccgaaacatatggcttcgctttggggcgactataccttttacgaaggttacctttctggcttaacgctggggactggtggccgtttagttggctccagctatggcgatccggagaactcctttaaggtcggtagttcaactgtgatggatgcagttgtgaaatacgatctggctcgtttggggatggcgggttccagtgttgcagtaaatgtaacaaacttgcttgatcgtgaatatgtctccagctgttttgctacctatggctgcttctggggcgcggagcgtcaggtcgttgcaaccgcaaccttccgtttctaa

SEQ ID NO: 76692 - DNA, 1716 bp, Citrobacter koseri
atgaaacatgtaactcgtcagaatagtaaacttccgtctccacgtcctgctattaatcaggggattgataataataatgcgatggtgctcaatcatactgccatttaccaaaactgccttggtcagattactaccaataacacgccagaaaatgcactgattattccagacccttatggcacagcccctttaagcgcctgggctggtatctggagtacagacgtgcgagacgtgaccttgcagattcaggatgtcgcgaaaagtacaatccttatcgaacagaccgttacgttaagtgttggtgcgaatctggtgccgattctcggtcttgtagcggataccgacaaccaaatcacttttatggatgatggaataacaatcgcggaatatgttattacgacccaacctttgccagcgacggactctgctgatgtgttattgggattcccaattattagcgtgactcaaccagtagcagattatgataaaatggccccaggttgctattttattacccattttgatcgctacaactatgcacttgaccagaatggggttgttcgttggtacgtgacgcaagattttccttcgtttaattttgtgcgtaccgacaacggtcattttctcgcaacatcagaggcaaaaaatacctatctgaatatgtacgagtttgacatgatgggacgactgcatagcttttatgtactggataaccagttccatcattcaatctggcagtgggacacgaatacgattgtcgcaccgtcagaatatacttttggcagaccagactcgcttaaaaccaatgaggatggcgtttcggttgtcgatcttactactggtctggaaattgcctattacgatatggcggtgattctggatccatcccgtacgccccggccaacaggcaccgctcctggcgaagacccgacagttctggactggctgcacatcaatcaaagttatgtcaatgagacgaataatgtgttgattgcatcagggcgtcatcagagtgcggtctttggtgtagatcttgaaaccgaagcgctgcaatttattatgtccacacatgaggactggggagacgaatatcaaccttatcttctgactcctgtcgacggcgacggtaatcctatttatgacttcagcaacccagacgatattgatgcggcaaatcgggatttctggacatggggacaacataacgttgtggagattgcgaatgataatcccggtattgtcgaatttatggtttttgacaacggtaatttccgttcgcgagacgatagcaaaagcctgttgccaccggataactacagtcgaatagtacactttgttattaatctggacacaatgacggtcatgcgtccgtttgagtatggtaaggagttgggcgcgcgtgggtacagtagttgcgtgagcgccaaagagattcagcagaatggcaacattgtggtgcattttggcgattgtacatttgatgaaaatggacgggcgatttcttgtcaaccgggagacagtgacattgttgatccgcaagagggcaatgaagcaatgggcgaattgctgttgcaggagattgacgcctccacaaaatcggtgcttttcgaagcgacaatgacgtcaggtttctataagaatgaggaaaccaatggtgaaggataccgttatgacatcaccagtttccgggtttacaaaatgggactgtatgcctga

SEQ ID NO: 76693 - DNA, 1254 bp, Citrobacter koseri
atgtttactaatgttaatgtggacgtctgtaagacgccggggtgtaaaaacctgggtattttgaacagcccggattatctctatcagggaaaggaagttctttgtcgtgaatgtggctttctgttccccgtgatttcggagaaagcattgaatctttttcgccacacggtgaaccggacatggaagggactggtcaggcagtgcgcagattgcgggagtacatcattaaaaaaatatggcttttcatcgcaaggtgagcgtcggatgtattgttgtcactgccataaaactttcatcctttcagaaaaacctaaaacagatcagcgccaggaaaatcttgccagcctgattcaggagggaacatcgatcactgaaatacgtgagatgcttaaattagacagtaccgggcttaaccgggaattgtttaagctctcccggcaggcgaatctggctgagcgctactgggaattccctgcctttgatattacgcttagtacccgggcttttcgggttaaatttaatggtggtagcagttatttgtatgtgttagttacggcagaagaactgagtgggcgagttgtcgcgatttcttcaaattactctgcgttgccagtagaaaaagagtaccaatacttctcaaattatgaggaacgcttaccaccaggaacactgacgcacatggttcaacgcaaagaagtgataaccatgcgtcgtgaaacgttgtttgatgtggattacggtccagcggttttatataaaaatgatcccggaatgatcgttaaacccgtgttgcctgcctatcggcatttcgaactggttaaaatgttaacggatgaccgttccctgaatgtacagcactaccttgaccatgagtgttttattttggggggctgtatggtggcgaatttgccgcatgttcatcaggggcgttgccatatctcatttgtcagagaaaggggaagtatgccgccacataaggatatccctcctcgtctgtttttgagtgggggcatccgcaataatgtctggcgcaccttctccacgcgcgattatgcaatggcggtttgtaatctcactggaaataaaaaagtaggcgttctgcggcatgctacattaaatagcgcgacaaaatttattcagtacctgcatacacatccatttttaccgcatctgaatcgtctgtctccggcaaacgtaactgcgacgctggattatctgaaatatgaatataataaaaaacataaaaaaatttaa

SEQ ID NO: 76694 - DNA, 1194 bp, Citrobacter koseri
atgcaaaggaaaagctgccaggtaatgattaaaccgacaggatcggtctgtaacctcgactgtaaatattgcttctatctggaaaaagaacaactctatccagagcgcaaaagcaactacaggatgtctgaagaaacccttgagctatttatcaaacagcatattgatgcacaagatgttgatgacgtcatttttgcatggcaaggaggggaaccgacgctaatgggactgcccttttatcgtcgggctgtcgagcttcaacggcgttacgctggggggaaaacgatcgtaaatacctttcaaactaacggaatgttaattgacgatgcgtgggcggattttttcaggcagcataatttcctggttggcatttctgtagatggcgatgcggtgctgcacgatgaatggcgtgtttcccgttcaggtaaaccgacacacgccaaagtggaacaggcaataaactgtctggcgcgccacggggttgagttcaatacgctcactgtcgttaaccagactaatatgcatcatccgcaacgagtttatgcttatctgaaatcagtcggaagtcgttatatgcagtttattccactggttgaaagaaagatggagagtgaaaacgcactcgcgcatccgcatgatcgtcaaaccataatgacgccctggtcagtggatgcgttgcaatttggtcatttcctgaatacgatatttgatatctggattcgtgaagatattggcgatatcggcatccaactgtttgaacaaactctggcagcctggtgcggtcttcccccgcaggtatgcgtgttcgctcctgtctgcggcagtgctttcgcgatggaaatgaatggcgatgtttataactgcgaccactttgtttatccacaatataagctgggaaatattaacgataccactctgcggcagatgaatattggcaggcaaaatcgccagtttggtgatgataaaagccgattaatggcccaggaatgccattcatgccaatggttattcgcctgctatggtggttgccctaaacatcgttttttaccttccgcatccgggcaactgaatgagaactacttgtgcgctggttataagctctttttctcacatactgcacctgtgatgaatgcaatgaaaattctttatgaaaataacctgtcacctgcggagattcggtctgtattttcatga

SEQ ID NO: 76695 - DNA, 1047 bp, Citrobacter koseri
atggggttcgactatagcctggtgaatcctgccgggtttgtaacggattccacgttagataaagcaaaagaacgtcctcgctatggggttgtacacccgacaggctggctacgtaatggacagcatatcgatcgcgcggacaaaatgagcggcgagttcgtcagttctgaagttgttaactggctggataataagaaagacgataaaccgttcttcttatatgtcgcttttactgaggtacacagtccactggcttctccgaaaaaatatctcgatatgtactcgcagtatatgagcgactatcagaaacaacatccagatctgttctacggagattgggcggacaagccgtggcgtggcgcgggtgagtattatgccaacatcagctatatggatgtccaggtgggtaaagtgctggataagatcaaagcgatgggcgaggaagataatactattgtcatctttaccagtgataacggtccggtgacgcgcgaggcgcggaaagtgtatgagctgaatctggcaggtgaaacggatggtttacgcggacgtaaagataacctctgggaaggggggattcgtgttcctgccattatcaaatatgggaagcatcttccacaaggcatagttacggatacgcctgcaacgggtcttgactggatgcctactctggcgaagatgatggatttcaaactcccggccgatcgtgcttatgatggacagtctctggtgcctttgctggaacagaaaacgttaaaacgtgaaaaaccgctgatcttcggtgttgatatgccattccaggacgatccaactgatgaatgggcgattcgcgatggcgactggaaaatgattattgatcgccaaaataaacccaaatacctctataacctgaaagaagatcgtttcgaaacgctgaatcaaatcggaaaacagcctgagattgaaaaacagctgtatggcaagttcctgaaatataagcaggacatcgataatgattcattaatgaaagcacgcggtgacaagccaacggtggtcacttggggctga

SEQ ID NO: 76696 - DNA, 471 bp, Citrobacter koseri
atgaaaaaaacattagtggccagtatggtcggtttagctctgtgtgcgggaggtatatcaactattgcccatgcagcagatacgaaacgtccgaatctcgttatcattatggccgatgacctgggatatggcgacctggcgaattatggtcactctattgtaaaaacccctaatatcgaccgcctggcgcaggagggggtgaaatttaccgattattatgcgccagctccgttgtgttcaccttcgcgagccggattattaacaggtcgtatgcctttccgtacggggattcgttcctggatccctgaaggcaaaaatgtcgcgctaggccgtaatgaactgacgattgccaatctgctcaaacagcagggatatgacacggcaatgatggggaaattacacctgaatgcgggggagatcgaaccgatcagccgcaagcgaaagatatggggttcgactatagcctggtga

SEQ ID NO: 76697 - DNA, 768 bp, Citrobacter koseri
atgcctcggataaaaagtacgctattagcttgtactatatttgtagcatcgtctggcttcagttttcccgctcaagcatctttggaatataaatattcttttggatcgattaacgctggttatgctgactggaacagtggttttgtcaatgtagatcgtggtgaagtctggaaagtaacggcagattttggaatcagttttaaagaagctgaattctattctttctatgaaagtaatgtactaaaccactctgtggcgggacgtaaccataccgcttcggcaatgactcatgtccgcctttttgattctgattatacttttttcggtaagatatatggtcaatgggataactcatggggtgatgacctggatatgttttatggccttggctaccttggttgggaaggtaaatggggcttttttaaaccttatatagggttgcataaccaatccggtgattatatctcaaagaaatacgggcaaacaaatggctggaatggttatgttgttggttggactgctgtatataattttacgttatttggcgaaaaattcgttctgtctgactggaatgaaattgagcttgatagaaatgatgcttatgcagagcaacaattcggacacaacggacttaatggcggcttaactctggcatggaagttttatccgaggtggaaggcaactgtaacctatcgttattttgagaataagcttggttatgatggatatggcgaccaaatgatttatatgttgggttacgagttttaa

SEQ ID NO: 76698 - DNA, 450 bp, Citrobacter koseri
atgaaaaaatataaaatcaataacgaattcatttatgatgagtcattgagagagataaagtcactgcataataaaacaatgatcagagtaacaatcttgcgagctcgttgcctgagttttctcattgataatgcacaacaagaattagtaacaagagaaatggtaatggatgcagtatggggtaaacgagggcaatatattagcgatgcaaatctgacacaattattctacctcctgcgtcgggatttacgaaaaataggcattcaggattttttcacaacgctaccaagagagggagtaaaaattaatgatagcattctgatcgacacgcttcacctccccaccgacactaagcataacgctttaaattactatagaaatctcccctgcatcattatagctattttgctgctcataataacgatcttatatttaccttatcttatttag

SEQ ID NO: 76699 - DNA, 336 bp, Citrobacter koseri
atgtctatacccaatcatttgtctaacaacagggttgtcttactggaattagaaatattactgactattgttactgtcggtggctgggggggaattgttagctatctcttgagaagaggtaaacgaaagcatgctgatttttacacaagtattaagtcttgtttgacccaggtggtcgtatcttgtttcacgagttttttactgagtgccattgcaattgaaaaagagtttagcttcaacatggtgctattagtggcaggattaggcggtgttttttccggtccggtattgaagtttttgagtgggaagataaagaaactcattgaaagtagttga

SEQ ID NO: 76700 - DNA, 186 bp, Citrobacter koseri
atggttgttgcgccggatgacggctgcgccttatccggcctacaaaacacccgtagacccggtaagggcactttgccggatggcggctgcgccttaatccggcctacaaaacagcccgtagacccggtaagcgttagcgccaccgggcgcttcggtaaaactcacagctgcgtcgcgctgaaatag

SEQ ID NO: 76701 - DNA, 153 bp, Citrobacter koseri
atgcagtggttcgaagccgcagatctgatcgtcaaagggatggaaggcgcgattgccgcgaagaccgtcacttacgatttcgaacgcctgatggaaggcgctaaactgctgaaatgttcagaatttggcgacgcgatcatcgcaaacatgtaa

SEQ ID NO: 76702 - DNA, 210 bp, Citrobacter koseri
atgcaggttgggtacccgatgcaccgggagataaaactgcctggggcgtatatagacagggcttgcgtgacattcctgaacaggacggttttcctgaaaatgtgtactggcctgtgctgcctgctgatgaacattcttcagcggtttgaattgccgcagttgcgtcgtatgcaagaacacaactgcggccagctggcgatcgttcgatag

SEQ ID NO: 76703 - DNA, 381 bp, Citrobacter koseri
atgcaactaactctcgatgcacttaaaactgccggcgccttcacaggtcgccctgttgaaaaagaaattaagtggaaagaccagaaaggcaatgagcatattgctactacttacgtgcgcccgatgggttaccacaccgcaacttcggatgtactggcaagtctcggaaaagtagacggcgtggcaggtcgtatcgctgcatcaatctgtgatgaaaacgggcatcaggtatttaccgttgctgacgtaaccggcgaggctgacccggagcgcggcgccttggatggcaatctgacagttgcgctccttatcgccattcaggaagttaacgatctgggaaagacggactcagcacagaagacgaaatctggtgcgaattag

SEQ ID NO: 76704 - DNA, 753 bp, Citrobacter koseri
atgacttcattaaatttagcaccaaaaggtagtgttgtcaccgagaaaaccattgatagccagcacttgctggagatggtaaatgttgctcgtaagcaatgcggggagcccgctgttcgcaataacaaattcattgaaaaggtggtcgatgaattggagggggagttttacactaaaagtgtaaaaccttcaggagtgaacggtggccgccctgttgaggtgattgcgatgtccatcaagcaagctctgcgagtagccgcgcgtgagtctaaagcggtccgccgctcgctggttgataagctggaagacatgcaggtgatccaagtaccagctcaaagcaactctggtctccctgaatatcggcgcgcaaaggctgagcagttgaaagcactagctcttgagaaaaacatagcatcggctcgtgagttgatgtcaatgctcccgcgtctgggcgactcagcaaaccaagtgatcgttgcaactctcgttaatccgctgttggggcatgaagttgtacctctgccggtgattgaagagcattactcgactgctggtgaagtagcggaaaagcttggaagtacggcaaatatgatcggacgcttagctaataagcacaatctgaaaactgagcagtacggcaagttcttcctggacaagtcaaggcattcagataaacaagttgaagccttccgctataactctgagggcgtcaaagcgcttcgtcacctgatctacggtgctgatgtagcttaa

SEQ ID NO: 76705 - DNA, 582 bp, Citrobacter koseri
atgaatagtgtaattaaatctgatcttaatttccacggaatcattcttacgccggtggctgggatgtctgacacttggttaactgcctcacaaataggctatgcacttgaatattctgatgttaaggctgttcaacgcatttattcgcgtcatgctgatgaatttactgagcaaatgacaagggtggtcaaagtgaccacccctagtggaaaacaggaagctagagttttttcattaagaggggcacacttggttgcgatgtttgccagaaccaatgttgctaaagaattccgtcgctgggtggtggacattttggatcgtgaggtatctataaacattccagcatcgaagatgctcagtgatcgagaaatccacgcccacaatgtaagcgcaatgttcggttatttcgagattatgtgcgaagcatggtttaaccagatcgaaccagcattgagggctatagaatcacctttggccggtcgccttcatgatcgttttaatgatggagctgctttcatgttcatgattaaggaatatgctgatcagcaacttcaacagggagagcgaccgaggatttattga

SEQ ID NO: 76706 - DNA, 174 bp, Citrobacter koseri
atgggtgatgttctttatacagggcgtaagaatgatagttttcaactacgcctaccagagcgcatgaaggaggatattcgccgtatggcggaaatggatggtatttcgattaactctgcaattgtgcagcgcttggctaaaagccttcgcgaggatcgagtgaatggtcagtaa

SEQ ID NO: 76707 - DNA, 378 bp, Citrobacter koseri
atgaaaatgactgaaaaagacaaccctaactttgtagagcgattcaccgtcagaatgccggatgggatgcgtgatgccattgctgagagagccaagcgcaatgggcgttccatgaactcagagatcgtggctatcatcgctaatgccatatctcaaccagcgttagcgcaagagggtatagaattcattcttgagttaacggagccgggcgaaattgaaaaactaagcgacaaagaaaagtcgagtattcatggaactcttgttgacgctgcatccatcatggcaaagaatctggagacagaaagctataacttgaggagggttttatatctcctttctaaagacggccctcttcttgatattaaaaagcccacctga

SEQ ID NO: 76708 - DNA, 498 bp, Citrobacter koseri
atgtcagtagtgactcaaggcactcaactttttgtgctcgcgaataatgtcgtgagcgaaatcgaatgtatcacggcattctcacctggaggcagcccggctgatcagattgatgatacctgcctgagcgaacgtaacacccgaaaatataaaaagggattgcgtacaccggggcaggctacggccacgcttaacgctgacccgcagaacgccagtcacctcatgctcagcaatatggctgagtccaacgaccagagtgacgtaacgtttgctatcggctggtctgatggtgagtcagcgccaacggtagctcaggaaagtgacccagatgcagtagacggtctgtcacttccatctgatcgcacctggtatgttttcaagggttacgtttccgatttcccgttcgacttccagggtaataccgtcgtacagacctcggccactatccagcgatccggccagggcgcatggataccgaaagagcagccgggaagctaa

SEQ ID NO: 76709 - DNA, 366 bp, Citrobacter koseri
atgattgctccagtttttgctatctgctcggcagacccgaaagtaaaggagttgcttggcgatgatccggtgaggctttatccgtttggcatgcatgatgatgatctggtgtatccctacgcggtctggcaaaacgttaatggtgagccagaaaattacctgaagcagaatcctgatatcgatcgttattccatccaggttgatgtgtacggggacaccgacgacgacgctattgctgtggcacgagtgttgcgcgatgccattcagagcagggcctatattacacgatggaatgcacagggccgtgattcagtaaccatgaaataccgttattcattcgatgttgactggctggtcaaccgataa

SEQ ID NO: 76710 - DNA, 540 bp, Citrobacter koseri
atggctgacggtgtagaggtaaaccttaccggacttgagtccttgctggggaaaatggatgccgtttctgaggtgacgcgtaataaagcaggtcgctttgccctgcgcaaggcggcgaatgtgattcgtgaccgtgcgcggagcaacgcagcgcgtgttgacgatccactaaccagagaagccatccataaaaatatcgttgccagcttcagcagccgccagttccgcaggacgggtgatctggcgtttcgcgtcggggtaatgggcggcgccagacagtacgcaaatacaaaggccaacgtcaggaaaggcagagcaggtgcgaaatataagaccgcaggtgataaagggaatcccggtggtgatacctggtactggcgttttctggaatttgggactgagcatgccacggctaaacccgtgctcaggccagcaatgaacggtgtcgatacaacggttattactgtttttgcggaagaaatggaaaaggctattgatcgcgcagtccgccaggctaccaaaaaaggaacaacagcatga

SEQ ID NO: 76711 - DNA, 333 bp, Citrobacter koseri
atgcaggcggggaaattacgtcatcaggtgacaatccaggagccggtgaagattcagaaccctgaaacaggtgcagtcaataacacctggagggatgtggcaactgtctgggcggaggtttccccgtcgtcagtgcgtgagtttattgctgcgcaggcgtctcagggggaaataaccactcgcattgtgattaactatcgcgctggtattaccagaaaacaccgtattctttttcgtggtggcatctacaatatcgaaggtgttttgcccgacccgaaaagcgggcgtgaatatcttacgctcccgtgctcagaaggggtaaacgatggctga

SEQ ID NO: 76712 - DNA, 327 bp, Citrobacter koseri
atgattgaactcgtcactcttgatgaggttaaagatcactgccgtattgatggtgactacagcgataacgatttaaaaggaaaaatcagaggtgccagcgttgcgatcatccgtttttgccagggaagcagggacaaaatcgttgatgccaataaccagcctttggacagcgaagaatgcatgctggcaaaggaggcgacgttacgacttgtcactaagctttacaacgatcctgatggcaccacaacgcagaatttaaagcagggcgagttaccttttgatgtgacgatgcttatctgggacctacgcctaccaacgattatttaa

SEQ ID NO: 76713 - DNA, 954 bp, Citrobacter koseri
ttgtggccaggcggcacttcaacggaagagcacctgaccaggctctctctggaggttgcgtccctgaaggataccccggcacctgactttaccacgctgctggctgatgcagtggcatcccttccggttcctgagactcctgaattgccggatatcggcactatggtcagcgaggcggtggccgccatgcccgtgccacaggacggtaaaagcgtgacggtggatgagattctccctgttctggaggaactggtcagtaaggcggttggtgaaatacctgtgccgaaagacggcaaagactacgatccggcggtactcaggcaggccgttgacgatgccgtcagtgaagccgtagcggaaattcccgcaccgcaggacggtaaaagcgtgacggtggaggacgtcagacctgtattgcaggagcttattacggcagcgatgccggaaattcctgatgttaaatctctcattagtgaggcgatcgcagagattcccgcgccggaaccgggcagacccggtgaagatggtcgcgatgcgcttgcgctggaattattgccttttattgacgagtcaaaaagttatccacgtggttcctatgccacccataacggcgggctctggcgggcctatgagaaaactcatggtatgcgtggctgggaatgcgtcgttgatggcgttgctggcgttgatgtcagcatggaggggatgcgtaacttcactgtcaccgttaaccgcgccagtggcgccagcgagaaaaaagctttcgatgtgccggttatggtgtaccggggcgtattcaaatcaggcgatgaatatctgcctggcgatacggttacgtggggcggctctctctggcactgtgacgaacagacacaggataagcctggtgaaacaggttctaaaggctggactctggccgctaaacgcggtcgtgacgggagggataaaacatga

SEQ ID NO: 76714 - DNA, 1227 bp, Citrobacter koseri
atgactgacatagtgcatacaacgataaaacctttagttgatgtatttcttaaagaattagctgttcgctactggactcctttatatcattacgtcaaggaaaacccacaattaattaaaagcatgccaggtttccttcttcttcatcaaaaaataatagtatatattggtcaaactcatatagctattgaatataatgattcagaagttattgatgaattgccagacggttataatatggagattcaatatattgactactcagtcaatgagtgtaacttatttgaaaagattgtaggttttgaatatgattcaacagttgattttgatttcgacctacccactgtaagtgaagatcttctttttccgacaaacagaggttatgataaattaagagagctaggttggaattttagtgctcaaaatagtattatgggatttaacgtcccaaccccaaccgttactaaggggaaatttacccgcatcgtaaatggtatgttttttgatgctgatgaatcaggtctgaaaactaggcggattaagtggattgattttttcccaattttctttgatggttctgatgaacacaaagacaccataggtatttctctggatggtattgaagatttaataaagcatgatgctcactattgttttcctctgcctgatgattataaatataaacaattaccaaaaatcaataaatttattgaaaaatggggtaatgttaaaagttccgaaccagagataacatcttttttatcggaagttgaaaatgaattcatattgaccatgaagttcggtgccacagctatacattctgaagtgacttgtgaatggcaaagtgagcagcggccatctattcgaccagatttttttgtggttcaacctaatggatatgctgatatagttgagtttaaattaccaactattgataagagtttcgtcgtaggttccaaaaatagagaaacatttagtgcgtggttgaattcatatatttcgcaaacacgtgtctatagtacctattttgatgatccaaataacagaagatggtttgaggataaatatggatttaaagtattaaaacctagaagatggttagtgattggaaggcgtcatgactttgattctgatgtttggcgtgagatcatgttagattaccgtgacttggaaatattaacatttgatgatttaattgatggggttgtcactcaattttatagatga

SEQ ID NO: 76715 - DNA, 1251 bp, Citrobacter koseri
atggaaagcaaagtagttgttccggcggaaggtaagaagatcaccctgcaaaacggcaaactcaacgttcctgaaaatccgattatcccgttcattgaaggcgacggtatcggtgttgatgtaaccccagccatgctcaaagtggtcgatgccgctgtcgagaaagcctataaaggcgagcgtaaaatctcctggatggaaatttacaccggtgaaaaatccactcaggtttatggccaggatgtctggctgcctgctgaaaccctggatctgattcgtgattatcgcgtggccatcaaaggccctctgactaccccggtcggcggcggtattcgttccctgaacgtggcgctgcgtcaggaactcgacctgtacgtctgtctgcgtccggttcgttactatcagggcaccccaagcccggttaaacaccctgaactgaccgacatggtcatcttccgcgaaaacgctgaagatatttatgcaggtatcgaatggaaagccgactctgcggatgccgagaaagtgatcaaattcctgcgcgaagagatgggcgtgaagaaaattcgcttccctgaacactgtggtatcggtattaagccgtgttccgaagaaggaaccaaacgtctggtgcgtgcggcgattgaatatgccatcgctaacgaccgtgattctgtgaccctggttcacaaaggcaacatcatgaagttcaccgaaggcgcgtttaaagactggggctaccagttagcgcgtgatgaattcggcggtgagctgatcgacggcggcccgtgggtcaaaatcaagaacccgaacaccggcaaagagatcgtgattaaagacgtgatcgccgatgcgttcctgcaacagatcctgctgcgtccggctgagtacgacgtgattgcctgtatgaacctgaacggcgactacatctctgacgcactggcggcgcaggttggcggtatcggtatcgcgccgggcgcgaacatcggtgacgagtgcgcgctgttcgaagcgactcacggtactgcgccgaagtatgcgggtcaggataaagttaacccgggctccatcattctgtctgctgagatgatgctgcgccacatgggttgggttgaagcggctgacctgattgttaaaggtatggaaggcgcgattaacgccaagaccgtaacttatgacttcgaacgtctgatggatggcgctaagctgctgaaatgttcagagtttggtgacgcgatcatcgaaaacatgtaa

SEQ ID NO: 76716 - DNA, 573 bp, Citrobacter koseri
atgaactacatagccccattgtataaggagacaaagatacagcatttcaatctactatctcagatttttgttggctcgatgttttacattctagggtttgtattcaaaaagcatctattgtcagtaagatcgatatacataccactggttgctgttgccgtgctatttacgttaaaaagccaaaaactgctttttggaatggggatgtcatggagtgattatcatcctgaatttcacttacacatgttaagcacagtattaagcatagtatcaatatttgttataacaaacattctatccgatcttaacataagatataatttcctttctgacgtagggaaatacagtaaagaaataatgagttatcatctactttcattttttaccgttgactggattttctataagttcggtatgtatgacatatctaaagcgcaagcgctaagccattttaacacgccactatattggtattgctatgggatagccggtgttttactaccaataatttctttttcattaatacgacattttaaaatacaatttttaagtaatcgaaaatcaaatgcataa

SEQ ID NO: 76717 - DNA, 1287 bp, Citrobacter koseri
atgtcaaaaactattattgatgcaacctttcttgatctccaaagtgagtcgatggattatgatattattcaggcgaaatctgatatttctaggctgtataataaatcaggtatttctgacataaaagatataacaatattagggcttaactcatcctctgtcactatggctgacattttctctagaatgccaagaaacagtatgttgcagatggctattattcaaaataactatcctaatcttgatattcctatatctccttcaggttcaagaatgagtggtactcttaatgtatacgggaatagtatagcagaagatcgaggtgcggcggaatactacaatgaatttgggaaatggcggcgttattttaataaagcgtattcagaaggccatgctctaagagattcaggatggttatggatatcttgtccaggtgcacagttaacaatagatgctgctgcttccactgcattgaatggattattatctaacctccgtactccttgtgattatttcgttgctggtggtgttttaagtacgtttactgattcgccatattcggttgcaggtgtccctaacgtagcttcacacattaaagtagaaagagccctgcaagacagaggtgttattatctctgttagagcaaataacaataaccaggtagggtggcgtcgtttcattagttctgctggggtggtcggtggctgggtacaagagtttgtttcaggaactccattatcaactactggcactatagattttgcgggtggcacagtgtctgggcacttatccccgaataccgccgcgtcaaaaaacctcggtggagcttcactgccatttaataatatctacgttcagaacgctcctgttgttatatctgaccgtgcagcaaaaattaatatttcttctattcctgatgatgtgcttgatgcctgggctactgttgaatattcacaatggaaattaaagtctgctgtagcagagaaggatgaggaatctgctcgtttccatgttggcatcatagctcaggagatcaaagaaaaatttgagcttgcaggtcttgatgcaactcaatacggtattctaatccatgaaaaatgggatgcacaggatgctgttaattaccagccagctcaattcgatgacgatggttctcttactgcccctgagattctcccccaaccatctaggaatgctggtgagatctggatggtgcgcatggaagaatgtttagcacttgaggctgcgttaatgcgccgggagttagaaaaattaaatcagcattga

SEQ ID NO: 76718 - DNA, 1185 bp, Citrobacter koseri
atgacgacttataacaccggcaatccgctggggtctgctgctgcaaaagatttgtacgataacgcccagaactttgatcacctctcaaatgaccgggtcaatgaagcgtgggatgaccgttttggcgtcccgcgccttacgtggcacggaatggaagttcgttaccaggaaaaactcacttcaatgggctggtcactaattgaatccttccaggatggagcaactttaacgcgtgctgatcaggcattgcgctggactcttcctgatggtgacggggagtattaccgttgggacggggctctaccgaaagaagtgcctgctggctcaactccagaatcaacggggggcgtagggacaggcgcttggataggcgttggtgatgcagcacttcgtagcgggttagtccctgcgagctattctggactaaattttcgagaagaacgagataagaggattgctgcattgtcgactggcacggtgcgcttctgtacttggaacattcaaggatattatgcagtccaggttcctgaatttgattacgatgttgctagtcggcagagcatccgtgagcatactgaatggtatttacgggtaggggcagactttataggcttgcaagaagttatgtacagtgtggattctccagataacgctcttgccatgtacccatatatttcttcttatattggaacgtcttactggacccatgaaaaatatggtgatgttgctatttcaaccaggcaacaacaaaatagttcccacgtcataatgagagaagcaatacccggagttgattctggaaatcaatatttacgtacggaaattgtagttaatggaataactattgctgtttatgtaactcatctcaatactgattcgttgataattagtgaacaaatttcacagattgcaactgctgtttctaacgatacggcaacgcatattgtaatgatgggagactggaactctcatgatgacttagcttatcaaccatttatcaatttagggttctctatggttaatcgatatggagagcttaatacatataacggggatcaggggtgggaatggtacatggatagaatatttcaccgtgggttttctaatcagggggactacggggtgtatacaccaccacgcagactcggtgatcataaaccattgtatgtcgatctgacgatctaa

SEQ ID NO: 76719 - DNA, 513 bp, Citrobacter koseri
gtgaaacgatttttgctggtttctgccgtaattttactggccggatgttcggctaaatacaatacgaacaatattcagagcaacactgagcagttagtcaaagatgctccagttgctatttctatgccatctgatggggtatatgaaacccgcacatatgctggctctggaaattcgacagcgactgcattaaaagctgcttttttgcgacattcagataacgtagcgatttacgctgattgtgaagatgttacttgtctgaaaaataatcatacaatccatcatggatactacgttgttcctcagatattgcattgggaggacagggctactgagtggtcaggaattccagataaaattgaagtgaaaattacaatttataatgcagaatccaacaatcggattgcctcaacgattattagcgggaaaagtaagtgggcaacatttggtggtgatcatccgcaagacttgttgccagagccagtaaactcgtacatctccagcctgtattga

SEQ ID NO: 76720 - DNA, 597 bp, Citrobacter koseri
ttggaaacacaagtgaagtttgtggtggtcgggcatcactcaagagaacctcaggcgcgagcactggcttaccaaataggaccaactgctcacgtcatgatcgacccagataaccacggcgcgaactggaatcatcgccgcgcgcttgagtgggctaccggacaatcctgccgggttgtagtgctggaagacgacgcgatgcctgttgctggatttaccgatctggtattcgactggctcaaccgcttcccggattcactggtgagtttttatctgggtactggccgcccgccgcagtaccagattcagatagccgaacgactgatagtatccgataagacgcaggccgactacatcacactgccacgactgattcacggcgtctgttatagcgtgccgccacatcatattgaacgggttctggcgcgttgggacagccataaggctgctgattatgcagtaggtgacgcatatggttgccctgtggtctatccgtgttactcgctggtggatcatgccgacggtgaatcggtagagcgtcatccagacagaacaccgcgcacagagcgccgccgggcgtggagattatctcaatga

SEQ ID NO: 76721 - DNA, 438 bp, Citrobacter koseri
atgattagatgtgtaactcccgcctataaaaaaatctggaatatttgcgaaaattcagatcaaagcgataaggcagtgattcttatcgttaacagtgcttgggcaaaagaagttgccttggctcaattcaaagaggatgggtacgacccaataagcaccaagctgacttctatcagagaatggatgacgcacggcggagagctaaacccatcgataatgcacatttctcgcgatggcataacaaggtttgacgaaggtagaactcgcgcgatcgtggctgacgaaaaaggctaccatgactatccgatcgcaaccacttaccgccacgctatgaatctcaaggagcactggggctcagtatcgagtgcaaaaaaggtgtttgactttactgagtgctgggatcgtatagataacgcgataatcttaggaaatccataa

SEQ ID NO: 76722 - DNA, 207 bp, Citrobacter koseri
atgagcatgccgcaaccaatagctaacatgcttttgttgcagatgatgacccagccaaaagacatcaaacttgctgcaatctatgcgttaggcgaaggtagatgccaagcggataacattacccaggaactacacaaattaagccaaagtgatgatatagagattagaatcgcagccattaaggcacttggtcggttatatcgataa

SEQ ID NO: 76723 - DNA, 360 bp, Citrobacter koseri
atgaaagtattacaaacattaggcggttaccaaggtggtcaggccggtatttttcagtacaaaaggaatagcgatggggtagttattgatcctaccgtcggtatgaatgctaatgcggaaatcattgagatttctaacgatgattggagtgggatgattaatcggttagaaaacattggcaagaaagtcgttgatttgacggagataaaacaagagatcgcagatgagctcgggatgaataacactgagacggccgccgtggttgctatattggaacacgaaggaacattcgaccattatggcggatttatcggtggcggggagtcagtttcaattcatctacgtagggatgatgactaa

SEQ ID NO: 76724 - DNA, 270 bp, Citrobacter koseri
atgggaattgaaatgattatcgggctggccgcagcggtgattgcagctatcgctggtgcttttggtttcggccatgcgcgcggcaccagcacagcggaagccaaagcagacaagcagcgcaccgaagagaacgccgcagcaacggtagcggtagcagagcgccgggtggaagtaacgaaagaggccagtaatgtacagcagactgttaaccatatgcgtggcgacgatgttgatcgcgagctgcgcgacaactggatccgcaaggattga

SEQ ID NO: 76725 - DNA, 630 bp, Citrobacter koseri
atgaatcaacaacaatttcagctggcggctggtataagcgtcggactggccgcgcgctggtttccgcatatcgacacggcaatgaaagaattcggcatcactgcgccgctcgatcagtccatgttcatagcgcagatggggcatgagtccggcgggtatgaaaagctggtggaaagcctgaactacacagccgatcgtcttgttcccgtattcggcaagcaccgtatcacggcacagcaggccgccgcgctcggcagaacggcaacgcaaccggcaaatcagaaagcgattgctaacctggtttacggcggcgagtggggcaaaaagaacctgggcaatcaggttgccggtgacgggtggaaatatcgcgggcgcgggctgaagcaaatcacagggttaatcaactatcgcaaatgcggcctggcgctaaaactggatctggttactcagccggagttgctggagcaggacgaaaatgcagcgcgttccgcagcgtggttctttgccaccagcggatgccttgtgtattccggcgatgtggaacgtatcacgatcatcatcaacggcggtaaaaacggtcttgatgaccgccgtcgtcggttcaatctggcaaaagccgtgctggtgtga

SEQ ID NO: 76726 - DNA, 282 bp, Citrobacter koseri
atggtaacaagtgatccttcagcgatgatcaatgctggtatttgcgcggtcatcgttctcgctctgatgttttaccagcgtgatggtgccaggcatcgcccaatagtttctctactcgcttatttcactgtactggtttatgccagcatcccattccgctatctgttcggcctctaccaggaatcacactggatggtggtcatcattaatatcctgatttgcgccgccgtgctttgggctcggggaaacgtggcacgtttaatcaacattcttcagaaataa

SEQ ID NO: 76727 - DNA, 396 bp, Citrobacter koseri
atgtccgatcctgtttctggcactacggttgccgctggtgggcttatgggtgccagtgtttttggcatcgcaaccggtattgattatggcgtggtgtttggcgctttcgcaggggccgtgttctacgtagcgacagcagcaaacatcagcaggataaagttggtttgctatttcgtgacgtcgtttattgttggcgttctcggagcagggcttgttggttcgtaccttgccaagtggacaggttacagtgacaggccgcttgatgctctcggcgctgtggcagtggctgcgttggctatcaaacttcttaccttcatcaacagtcaggatttgggaagcttgttcagtatgctttcgagattgcgcggaggaggggccagcaatggtaacaagtga

SEQ ID NO: 76728 - DNA, 468 bp, Citrobacter koseri
atggcactcagaaccttgtcagcactcccggtatttgctgattccattttctcagaccgcttcaacaggattgacagattattcagtcagttaacgggggatacccctgtagcggctgcgccttcatacgatctcaaaaaacaggattcgaatcgttatcaacttacggtaagcgttcctggctggaaggaggatgagcttgaaattgaaaccgtgggtggaaacttgactgtctctggtaagcgggccgaagaatcttcagaagaaaaagaaaactggatatatcgtggtatccgacgcgcggatttccagttaagcttttctttacctgaacacactaaagtgagcggtgcaaaactggagaatggtcttctgcaggtggatatttaccaggaaattcctgaaagtgagaagcctcagaaaatagcgatagagagcaatcagaaagtgatagaacataaatcataa

SEQ ID NO: 76729 - DNA, 147 bp, Citrobacter koseri
atgaagcctgaggttattgagtctcttcgctggcgctggctgcgtctccgtatttatcgctaccggggatcttttccggtggcataccgcatccttcgcaattacatccgcattgaagcaaaacgggagcatcaaaatgaagcttga

SEQ ID NO: 76730 - DNA, 597 bp, Citrobacter koseri
atggcgcaaacactgtattttgaaaagaccttccagaacgccctgatttcggttgatcccggaaccagcgaatttttacaactgttgccaacaggacagttgctcactggtgagttccgcaagccgcgaaactacgcattccacaaaaaattcttcaagctattgtcgcttggctatcactactggacaccaaccggcggacttgttgaggaatcagagcggtcgctaatctccgggtatattgatttcctgtcatcaaacccgacacaacgtaacgcgctccataacgctgctgatatgtatctgaatactgtcggactggtgcgttcccgcgaagtcgtactgctgaagcatttcgaatccttccgcgagtgggcaactattcaggcgggattttacgacgaatatattatgcccgatggcagccgccggcgcacggctaaatccatttccttcgccagcatggatgatgccgaatttaacggcgtctatcagtcggtgctcaacgttctctggaactacatactgcgtcgaaaattccgttcagcgaatgacgtcgagaacgccgccgcccagctcatgagctttgcggggtga

SEQ ID NO: 76731 - DNA, 636 bp, Citrobacter koseri
gtgaaattttctcgaatcgaacaaagcccaataatggacaagggaaactacgttaaaattgatcatgattttggctattttttagatccgaataagatggcttcgatagctaactatgaagatgagtcagcagcactattaaaattaatgctaattcatgaggactttcttcgagttgttattgagaacttaaggcctgagggttcagagaagtacaatgccatcaaaagctataagtattttgcaccgaagttgtcagctgccgttctcttagggcttcctgtatcacttgctgatgctatgtctgaactcaacagcattcgaaacaagtacgctcataaaattgactatgtcattacaaatgaagaagttgacaagcttgcggaaacgattaaaaaaataaaaatcgaagaaattaaccacggtggctacatacatcaagttattgagccaatccttaaggatgggatctacgcagtggctctgatgaacgatctacctcctgatttggaagaaaatcgtcttcgtatatgcaaattagtcactagcgcacactgcatgtgcttactgggggctttttggttaattaatactctccacgttaaggacaaactaaaactttccatgtctgagtag

SEQ ID NO: 76732 - DNA, 249 bp, Citrobacter koseri
atgtcagactggaacatcgcagcaaaaccgaaagacgatcaggacaaaatcaacgtggatttagcggccagcggcgttgcgtacaaagagcgcctgaacatgccggttatcgctgaagtggtgatgcgcgagcagccagagcatctgcgggactatttccttgagcagttacgatattaccgggagcagagtatttctctgccaaaagcatctgaccctcgatatctcaaacaggaggaaggtaagtga

SEQ ID NO: 76733 - DNA, 141 bp, Citrobacter koseri
atggttaatgtcaccacaatcaacattaaaaattttatcatatatgttcccatcatgctgaaattcaatttattgaattgtatagttattttcagagatttaaaatatgatagttacattacttcttcagtaatgaagtga

SEQ ID NO: 76734 - DNA, 162 bp, Citrobacter koseri
atggatcaactttcgcaatacaccactaacaggattattgaactggaaaatctgctgctggtggatgttgaggaaacggtctggccagcggaagtgaaaatggttttttctcaggttgagaacgccggggatctcccggcgcaccatagttttcatggctga

SEQ ID NO: 76735 - DNA, 453 bp, Citrobacter koseri
ttgcgtaataaagtcttttacgctctgcgtgatgctcagaacgatgaacatgtaagccagcgttacaagttgccagttatcggctggttgcgtagtgattacaacagtgacgacaaacgcgacccgaacgcacctctgtttatgctgggtagcaatgatccgacagaaacatggggagtgaaatacattccgctggctggcaactctccggtgactacggatggttggacgggaagcgacgaagcaaacgcagcactgataatgctcgatcgcatagaaacagtggactcggttgatgatgaccgcattgagggtatcaagcgcatcattcgcgggctcgcagcagcaccgcagcaggaagccagaaaaagtaatgtgataggcagttatcagggtgctgacgggcaagagcatccaatcgtcagcctttcatcgccgcaggaggtgaagtga

SEQ ID NO: 76736 - DNA, 414 bp, Citrobacter koseri
ttgctcagcgcgccccggctcggcaaactgggcgatcgcattggccccgaaaagatcctgattaccgccctgattatctctgtcctgctgctgatcccgatgtcattcgttcaaacgccctggcagcttggcgtgctgcgctttttacttggcgcggcggacggcgccctgctccctgccgtacagactctgctggtctataacgccagcaatcagatcgccgggcgcatcttcagttacaaccagtcatttcgcgatattggcaacgtcacaggcccgttaatgggggcggctatttctgccagctacggttttcgcgccgtgttttgcgtcaccgcaggcgtcgtgttgttcaacgcaatttattcgtggaacagcctgcggcggcgcagagagaccctcgcggcaaaatga

SEQ ID NO: 76737 - DNA, 1269 bp, Citrobacter koseri
atggccttttctcaagcggtcagcggtctgaacgcagcagcgaccaacctcgatgttattggtaataacatcgccaactccgccacctacgggtttaaatccggtacggcgtcttttgctgatatgttcgcgggctccaaagtgggcctgggcgttaaagtcgccgggattacccaggactttaccgacggcactaccaccaacaccgggcgtggcctggatgttgcgattagccagaacggtttcttccgtctggttgacagcaacggctccgttttctacagccgtaacggccagttcaaactggatgagaaccgcaatctggttaacatgcaggggctgcaactgactggctatccggcaaccggaacgccgccgacgatccagcagggtgccaacccaggcccgatcaccatcccgaacaccctgatggccgcacaggcgaccaccacggcgtctatgcagatcaaccttaactcaacggatgaactgccgtcgaaaacgccgtttgatccgagcgatgcggattcctacaacaaaaagggcaccataacggtctttgatagccagggtaatgcccatgacatgaacgtttattatgtcaaaactgctgccaataaatgggatgtatacacccaagactccagcgttacaggagcagcggttacgaaagcagcggtaatgaattttagcagcaacggtacgctgacttccgttaatgactatattgatgatccgagtaatccaggcacgttaactgaaggccctgcgaacgcacagccacaaattaacatcactacgggagcgattaacggcgcggtaccggctactttctccctgagcttcctgaattccatgcagcagaacaccggtgcgaacaacatcgtcgcgaccaaccagaacggctataagccgggcgatctggtgagctatcagatcaacgatgacggcaccgtagtgggtaactattccaacgaacaaacgcaggttctggggcagatcgtgctggctaacttcgccaacaatgaaggtctggcttctcagggtgataacgtctgggcggcgacgcaggcttcaggcgttgcgctgcttggtacggcgggtacgggtaacttcggtaagttgaccaacggcgcgctggaatcctcaaacgtggatttgagtaaagagctggtgaatatgatcgtcgcgcagcgtaactatcagtcaaacgcgcagaccatcaaaacccaggatcagatcctcaacaccctggttaacctgcgctaa

SEQ ID NO: 76738 - DNA, 672 bp, Citrobacter koseri
atgactgagcgcggaatgatttttaatggtgagatggtgcgcgccattctcgacggccggaagacgcagacgcggcggattgtgaaatctgactgcatggatatcggtgaaaaggatgatgtcacgctctggccatcgcgagaacacgataacggtggcgactactggtatccgtgcccgttcggtgaagtcggcgatcgcatatgggtgcgggagacatggcaagcaatccatgactctgttgatgagttcggacacgtcgaagaacgaacctattcgccgtcgataccaaaagaaaaggatcgctactggcacaccgtatatgcggagcattttggtgatgaaaaccgtgaagaccgaggctttccgtggcggcctgccatccacatgccgcgctgggcaagccgcatcacgctggaaatcaccagcgtacgcgtggagcggctgaacgatatcagccaggaagatgcacaggctgaagggattattgatggtggctgcctcaattgcggcgagccggagccatgcggctgtgttaatccacaaccagacgcaactgatgccttcgcctacctctggcagtcaatctatgggcaagaaaattgggatgctaacccctgggtgtgggtaatcgaattcagacggatcgacgggggtgaccatgcgtattga

SEQ ID NO: 76739 - DNA, 132 bp, Citrobacter koseri
atgattgatttcgcacgtcagccagcacgaatccaggccgttcgcgggaatgcttttactgctccactgcgtttcctgtggcgggttctgaaaaacggcaacggcaacggcaaaaaggaaaccagcaaatga

SEQ ID NO: 76740 - DNA, 225 bp, Citrobacter koseri
atgagtgaggtaatttttagctttgaaagctccggcgatgcggcacgcgctgggatgttgatgagtaaggcagatccgtcactgcgttatatgcagatgcgagcaacggtctgcgtaacctggcatgcaaacatcattgcggccacgcaggcagtcctggatgcaaacattccgtgcacttttcagtactggaatgacattaaaaacagtcatcgcagaggttga

SEQ ID NO: 76741 - DNA, 837 bp, Citrobacter koseri
atgacggctcaagactcacaaagcatcgattcactatttgattacttttatgtagacaaagaaagggtaagtgccctaaccgcgcagttgtttccctctggcgtcttaaatactgtaaagcaaacttcatccgaatccgaaaaggacttgaaagaactaaaaggggggcttcctctagttggtgtgcgtagcaatgcttcagaaggctggtcgcgtggacaggaaagaactttcgattcatcatggagtatcccattaaatctcttagataaattgtctgaaaccgggagaatgaaaacgagtcttcacgaagctaaactaggtgatctcgttttaatgaaagggatgatgaaaatttttgatgctcagatggttcatctttgcatgcctatattcaagaaaataaaactaaatgaattaaagagcgagaaaaatactcaagctaaaaacgctctaaagcaggaaattgcaggcttcgagaatgctgaagagttggtgaaaatccttccacctactacacatattgatttcgctgattcctgtgggaacttaagctggatgtctgttgaaccatctaatttaacaactactcttagtgacgtatcattaaaatatggacctttcatacctggtgaatggtacatcttaggcattgtggatgcctacgctgatgatgctaaagttgataatcctgatgccccctaccctacgattactaatgatttaaaacttggcatggaaccaatactgctcatgatgcgaagcttaatgggccgaccattgggttcatatggaattacgcctttgattattttccgtggtgttgcgaaccaataa

SEQ ID NO: 76742 - DNA, 180 bp, Citrobacter koseri
atgatttttaaactgctgaaacaattaaaaaatgagtcgccacaagttggtgttgatgagttgcagctagttcatgacgagattgaagcgaaacaaaaaagaatcgctgaggaaaaagcaaaaatccaagaggaacatcatgacggctcaagactcacaaagcatcgattcactatttga

SEQ ID NO: 76743 - DNA, 390 bp, Citrobacter koseri
atggctgagaaaaaaatacttaacccgattctcatcgagcgtttgacagagctgacgcaacgagggatgacaaaatctgatatggcaagggttgcggggattactccgcaatccgtaaacggctggttcaaaaaaggggttattagcaaagaatctgcgttagctgtagctgatgctgctggcgtatcagttccttggctacttggtgaggatgttggagagaaggacggtcttaagcctgacgagcagcgcctgctggaactctatcgccagctgccggaagaagagcagcagaacatgttgcggatcgtatctctgcgcctgaaggaactcgacgagttgtacgccaagtatatggggcggcggattaagggtgacagtgagcaatga

SEQ ID NO: 76744 - DNA, 261 bp, Citrobacter koseri
ttgtttgcgaatctagtggagatactcatgaacggattagaaaaggccattcagaaagctggcactgccagcaacttagccgcaaagctaggcattaaaccgatgtcggttagtcgctggaaaacacgatacaagggcgtcgtgcctgccgatcgtgttttcccaattttcaacgcaactggtgttacccctcacgaattgcgccctgatctgtatccgaacccaacggatggattaccggcgcaggaagcgagggcgtaa

SEQ ID NO: 76745 - DNA, 873 bp, Citrobacter koseri
atgcgtgattacgcaactgttgcgcctcagttctggcttggaaagaccggtcgtgagttgaggaaacaaggcgcggaggcgcaggtggtttcgttttatctgatgacctcgccacacgcaaacatgctcgggttgtattacctgccaattctatacatagcccatgaaacaggtctgggcttggaaggggcttcaaaggggcttaaaagcgccattgaagctggattttgtagctatgacgaggacacagagatggtctgggtgcatgaaatggcggcctatcaggtagggaaggcattaaagcccggtgataaccgctgcgctggcgtcaggaatgaatattcttcgttgcctgaaaatccttttctttcatcattttatgaacgttacaagacggattttcatctgaattttaagcgcgaatcacgccatatttcagaaggggcttcgaaggggctaggaagccaagatcaggaacaggatcaggaacaagatcaggataaagatatttcggggcatggcgacgccacaccccaagggaaaaatacttactcggaagattttgaacaggcttggggtatttacccaaagcgtgacggtggaaatagtaaatctgacgcctacaaggcctggagtgcccgactcaatgacggggtatccgcagaggacatgatcgcgggtactcagaggtatgccgattatgtcaaagcggatggaagcctcaacaccaggtacgtcaaacaggcaaaaacattttttggcccgggcatgcactttagtgaggcgtgggaaatccagcgatcatcaggggcgagagatccgaacaaaatttctaaacctgatgaaaaaatcccatcgggattcagggggtag

SEQ ID NO: 76746 - DNA, 750 bp, Citrobacter koseri
atgaaaaacattgttagcgccggcagtgcgcttgagcgactgaaaagaattattccggccagcgttcagcctaagttctcgaccgttgaagagtggcgtgcctggcaggagtccgaaggcagaaaacgttgtgaggaactggagaagctgaaccagaaggccagaacagaaaaaattttcggtcgttccggtattcaggatctgcatcgcagttgcaccttcgcgaactatgaagtgacaggggataagcagcgcagggcgttcactatggcgaaaagctatgcgcagaacttcggcaatggttttaccagcttcgtgttcagtggcgaaccgggcacggggaaaaaccatctggcggccgcgatcggaaatcatttgctggctgctggacactccgtgctggtggtgactatccccgatctgatgctgcgtgtacgtgagtgttacgacagtggcctgtctgaagcatcactgcttgatgacctgtgcaaagttgacctgctggtgctggacgaagtcggtattcagcgtggcagcagcggcgagaaagtcatcctcaaccaggttatcgatcgtcgcctgtcgtcgatgcggccggttggtgttctgacgaacctgaactatgagggattgcttgaaaccctgggtgcacgggttatcgatcgcctccagatggacggtggaatgtgggtcaattttgactggaaaagctaccggaaaaacgttagccacctacggctcgttaaataa

SEQ ID NO: 76747 - DNA, 747 bp, Citrobacter koseri
atggaaactgtaatcgatgttttaaaagcaatgggcaaagccacatatcgtgaagtcgctgcgcgcctggaaatcgaacctgttgaagcgctgaacatgctccgtgagcaacgcgagcagggattatgtgatttttttgatggtgggtggatggttactgacggtcaatctgtaaaaccagtattgcagaggccatctgcgaagccagttacggcgggcaagcctgagttgcgtggcgaagctccagaacccgttcagcctgaggtagtcacaacattgctgcgtgagaacggcgccatggataccgttacgcttgcggcggcggtaggtcgtaatgctcgtggaatgacttctgcaatgcggtcgctggaacgtggtggcttagtcataaaaatcggacagggaaaaggtgttaagtgggggcttcctgaccggcagcttgtttcgccagagcctggatttgctgagctgccggaaatcgagattacaccaaaagctgctgcacccgcacctgcgccatcggcagaaccggagccggtcaccatcaggacagaagaattcctggaaaccatcccggtaatgagaaaaccctctcagtctttgcaggttccgtctctgcgggaaatcagtaagcaaatcaggaaaaccaaatcaaatctgaacagccttgagcgattacatgctgcggttcgtgaagtcggcaggaatcgtcacgcgctccggttcttcaacggggagggagaatga

SEQ ID NO: 76748 - DNA, 255 bp, Citrobacter koseri
atggttttgagaatcactacacaggaagttgatacttggaagaaacgtattcagcgggatggtttaaaaggttctacctacttttgccaacagggtggggccgtgtgggtttctgcatctgttgatcatcaggctatttgtcagcgagttttaggcagggattcaggaacaagttctttagcgagttatttgcgctgggatgatgtaagcgcaatttctttagttgatctgttgtacgcgattgaaaccgcatag

SEQ ID NO: 76749 - DNA, 366 bp, Citrobacter koseri
atgcatatgtttaaccattaccccgagaaaacctacatcagaacggaagtaatgaggaagccaactccggttccagcagtgaacggagtctatttttggtggtttaaggaaattccaccgaacgtacctacagagggctacattacctatgacggctacacgctgctgtacgtcggtatctcaccagatcagcgtgggaaaccaaacagtcgttcgaatctaagaaaacgtattaaaacacattatagcggcaatgctgctagttcaacgctcaaacgcacgcttggcatgctattgagcggtaagtggttttcccctacgccgggttggttctggttccagaatgacattcactcactcaggtga

SEQ ID NO: 76750 - DNA, 312 bp, Citrobacter koseri
atgcgtcacgaacgcatgtctacacccaatattagtgcgctggttgtatcgttctttggtttcgctggaaatctgaaagctactacggatatgcagccaactaacaataacgccggtatgcacatggtcatcgaccatgatcttgttgaaattcatcacgtcgcccccctagtgaatctactattgatcaccacctcgctgttaatgcgcgtgttgtcggcttccaccacaaactcactggtttccaggatgatattgtctgccgcctcgatcgctatggatttaatacctctgacgtaccagcgccagtga

SEQ ID NO: 76751 - DNA, 204 bp, Citrobacter koseri
atgaacgcactatttacagaaatcatgcgctttatcaccaaccttatccgcatcggtaccgtgactgaagtggatagggaaaactggctgtgccgagtgaaggtgggtgagtttaaaactaactggattaactggctgacgctgcgatcggtagtgcttgtacatggtggtgcccatcgccggatgagtaggtggtggtcctga

SEQ ID NO: 76752 - DNA, 981 bp, Citrobacter koseri
atggaagataaaaatcaatatcaagcactgctaagaggtaaaatcgctgctgctatcgatcaagcaagggctgcggcaaaaatcacgcataaaggcgtaaaaggaacagttcttgaaattttattaagtaaactctttaggccacttttaccggctgatattgggattggcacaggtcagatcattgatgcgtatggtaataccccctcacctcagattgatattgttatttacaacaaagcaattctacctccgatactaatcgatgaaagtgtaggtctattcccaatagaatccgtcttatacactatcgaagttaaaacaaaattaaactctcgagaattaaaaactgcccatgccagcgcaaaactggttaacacaacttttacatatctccatgatcatttagagggtaaaaataccacaatccataatgaaattagcagacctcgttctgttatttttgctcttaacagtgaccttaaagataacggattatccgaagctgcaagatacatgaaaatttacttacccgaccaaccttacttagcagcaatttgtgttgcaggtagagagtatagctttgaagatagagaatgctgggtgacaatgagagacactcaagaatatgatgaaatactcaatttaatcgctggaattactaacacatacagagatgtatccaaaagtaggggttacccatttttaggtcattatattgcaactgaccgttgcggttacacccttattccatataccgatttacctaatctaacagtgacatgtaatcaatgtggtaatacgaaagaagttaccgccttattcgataaaagggacttcactatatttaataaaaccatagcacatgataagccatgtgaatgtggaggaaagttaatttcaaaaagaggaaattacacaatacaaggtggacgactaagaggaataagtgttaacgacccattgaattttaaattttag

SEQ ID NO: 76753 - DNA, 222 bp, Citrobacter koseri
atgacccctaatatttcaatcactctgaacacaccgcacgtcacaattgaacgctatagcgagctaactgggctgcctgttgacaccataaacgacatgcttgcagatggtcggttgcctcgtcatcgtctgcgcaaagataagaagcatgaaaagttaatgattaacatcgttgctttaaccgttggtgcactctcagattgcaatgtgactatcaactag

SEQ ID NO: 76754 - DNA, 534 bp, Citrobacter koseri
atgctaacatcaaagtactcaagtgagatcaaaataaatctcaatcagggtggcaaaactgcgattgagcgattggtagaggcgtatggttttacgacaaggcaggcattagccgatcacttgaatgtctcaaaaagcacgttggcaaatcgatatttgcgagatatctttcctgcagattggagcattcaatgtgcgcttgaaacggggggaactctacgctggctggctacttcagaaggcccgatgcatatagatgcaaaagcagaaatcatcacaattactaaagaaaaaattcatgatgggaatatcttagatagcggttatttacattttgattcatcacagctaccagatatagcaaatagaacatcggtaatagaatcaggcaatattatttatattgcaagtcgaaatatagtcgatattaacgatggtttgtgggtaatttcaatagatggaatttacttaacacaagaattaactcgactacccaatagtcatattatgttggaaactaaaacaaaaaaatag

SEQ ID NO: 76755 - DNA, 1989 bp, Citrobacter koseri
atgattgttggtgtaattttaagaaattttaaaaactttagaaaccagcattacgttccactcacagtgaacaatcggtcatcatggctgatcggggaaaatggcgttggaaaaagctccatattgcaagcggtcgatgttgtacttaacaggactgatattaaccgacttgatataaataacgatgcgcgtagccaaggtttcgagacacgagagccatttatcgttccaattttcctcatacgcaaagaccggttgagaagtaattcttcagtatataaactctttgatataataagtaatgttacatggcagttagaaacagacgacttcaattcaatgcagcgctcattggctgaaaaattcgtatcacacagaaactttttgacattatactattctgactcagattattttcttattccattaggaattataaaggataaagctaatgaaattccacgaccttatatgtcaatttttgaatccatcgaagactatcgttctgagatagaagaattagcacctgaaaacagtacttctaatgttcaaaagaattttttcaggactacattaactaagcttctcgaccatataaaagacacatataactatatatatttacctgccgaaataactatacctgaatactccaaaattgaaagtgttctgttacaatcgctgttaggagaaaacttacaacaaaggataggtaaaataatcaaaaaagaggatataaatgaaattaaccagcatcttaatgattttgttgaccagctttcgcaaaaactcgatggtcgctatcactttaaacggcccactcagcgacaaaattctttcacacaacgtcatatgatttcaaagatcattgaatcttattttagtgataaagttttacattacattgataacgtaaatagagacaccccaatatataaccttagctcaggtgaaaaaaggaaagcattactagatttagcaattggttttttgaaagacaaccctaagaaaacacaacaaaccaccattttagcagtagatgagcctgagctttctttgcatgcaacctcatgctttacgcagtttgagaaaattagaaacattagtgaattaggtatccaaacaatttgcactacacattggtatggttttttacctgcagcaatgactggaagcgcaacatatatttcaccaaatcaaacctttataaaatgtattaaccttgagtactatcgcgatgaaatgtctgcattagttaaagaatcacaaggttcttacttagacacactagaggtaaaaagcaatcacgacttaattcaatccattataacttccatcacttcatcaaatagttacaactggattttatgtgaaggtcgtactgataaaaaatatattgacgcacacttaacacttgaaaatcatgaacgcaaaaacttaatcgtacttagtgtaggcggttccttcgcgctgaaggatatttactcttacttagtactagccttaaaggatcgaagacctgctataaaaggcaaagtcttttgtcttttagataccgatcatgcatatgataaatttgatgctatagacagcatcccacaagtaagaataagaagattattactcagtgatgatttgagtaatattaacttgcttaaaaccactgataatagggtatctcctccaacggagattgaagacgcacttcatggacttaacttctatgaaacaatatatcgtctttattgtaatggagaagagagattctcttttatcgaaaacatggagacgctctcatcggaagtttctgggggaatactagacttaaccacaagccaaaagcaaactataaagcaatattttaatgaagcagggaataaaaatatcttttgtgagacttatatagaagcactttacgatattgaagaagacgaaattcattccttaggatggttaagagaaatcattagttttttcgatagcaagtaa

SEQ ID NO: 76756 - DNA, 795 bp, Citrobacter koseri
atggcagtacgaaaactcgacacaggtaaatggatttgtgaatgctacccggcggggcgtagtgggcgccgtgtgcgtaagcagttcgccaccaaaggcgaagcattggcttttgaacgtcatacgatggaagagatagaggctaagccctggttgggtgaatcggtagaccgtcgaactctgaaagacgtcatcgaactctggttcaaactacacggcaaatccctgacagctggcgagcatgtttacgacaagcagatcctgatagtcgatgcactcggaaaccctttcgctactgatctcagctcgaaattgttcgcacattatcgtgataaacgcctgacgggtgaaatctactttagtgagaagtggaagaaaggtgccagcccggtaactatcaatctagagcaaagctatctgagcagcgtttttagcgagctaacccggccaggagaatgggctgcaccgaatccactggaaaacatgcgcaagttcaccattgccgaaaaggaaatggcctggctgacgcatgaacaaatcacagaacttctgtacgactgccaacgccaaagcgccctactcgctttagtcgtcaaaatctgcttgagtaccggagcacgctggcgcgaaacggtgaacctcacccccaggtcacaaagtaccgaatcacattcgtcaggaccaaaggcaaaaagaaccgtagcattccaattagcaaagagctgtacgaggaaatcattgccctggacggcttcaaattctttactgactgctactttcagtttttatctgtga

SEQ ID NO: 76757 - DNA, 210 bp, Citrobacter koseri
atggataaaacctctatcgtgcttccgcgcggacagcttacccacgtcctgcgccatacgtttgggaacatccttgcgctccagaaaatcctggaccatcacgacataaaaatgacaatgcgctacgatcacctggaaacggccctacgctttaatcccctagcaaccatgaatcaatcatccttagatgctgctcacgtgtgcatctga

SEQ ID NO: 76758 - DNA, 270 bp, Citrobacter koseri
atgaatgagttgcagaaacaggggttagagcttcgtactaaagcaaaagaactggctcttgctgctttggcaaagcacccggatggacgcataaatggtaagggagttaagcaagcagaggtatttcgtctctgcggtctcgactggggagattatcctaaagccccaagtacgcagcagcaatactgggcggtagctcttctccgcgaacttgagtcagaaggaactgtggagcaagtcgaagagaaaggcccctggcgtttaaagtaa

SEQ ID NO: 76759 - DNA, 816 bp, Citrobacter koseri
atgggtatcaagctaattgcggtagacatggatggcacctttttgagcgatcaaaaaacctataatcgcgaccggtttatggcgcagtatcggctaatgaagcagaaaggcatccgttttgtggtcgccagcggtaatcagtattaccagttaatctctttctttccagagatcgcccacgaaatcgcctttgtcgctgaaaacggcggctgggtggtcagcgagggcgaagatgtgttcaacggcgaactggcgaaagaggattttgctgccgttgtcgatcatctgctgacccgcgcggatattgaaatcatcgcctgcggtaaaaacagcgcctataccctgaaacagtacaacgatgaactgaaacaggttgcggcgatgtactaccatcgccttgagttcgtggacagcttcgacaacatcaatgacgtgttctttaaattcggcctcaacattactgatgaccgtattccccaggttcagacggcgctgcatgatgcgattggcgatatcatggtgccggttcataccggttacggcagcatcgatttgatcattcccggcgtacacaaagcgaacggcttgcgtctgctgcaacaacgctgggggattaacaatgatgaggtcgtgacgtttggcgacggcggcaatgatattgagatgctgcgtcaggccggattcagttttgcgatggaaaacgccggagcggcggtggcctctgcggcgaaatatcgggcgggctcgaataacgcggaaggcgtgctggacgttatcgaccgcgtgctgaaaaacgaagccccgttcagtgggtaa

SEQ ID NO: 76760 - DNA, 1191 bp, Citrobacter koseri
atgttgactgacactaggctgcgtcaccttaagccgaaggagaaactctataaagttaatgaccgtgatggtctgtatgttgcggtcactccggctggaacgatctcatttcgttataactattcaataaacggaagacaggagaccgttacttttggccgctatggtgtgggagggatcacgcttgcagaagcgcgtgaacggctcaatgaagccaaaaaaatggttgccggtggaagatcgccagcgagggaaaaagctagagataaagcgcgtatcaaagatgcggagacttttggtgcatgggctgagaaatggttacgcggctatcaaatggctgaatcgacgcgtgatatgcggcgttcagtatatcaaagggagttgaagtcaaaatttgcgcagcagaaattgaccgagattacacatgaagacttacgcgcattaaccgataacattgtcgagagaggggcaccggcgacagctgtgcacgtcagagagattgtattgcaagtctatcgctgggctattgagcgcggtcagaaggttgagaatcccgctgatctggtgcggcctgcaagcatagcgaaatttgagcctcgtgacagggcattgacgccaattgaaattggtctgatgtatcggtacatggaacgggtaggaacgacgccatcaatcagagcagcggttaaacttttgctgttaacgatggtacgtaaaagtgagcttactaacgcaacctggaacgagatcaattttagtgaggcattatggacgataccaaaggaaaggatgaaacgacgtaatccacatttggtttttctttccagacaggcaatggatattatgattgctctcaaaacctttgccggtagctctgattttatccttccttcgcggtacgattccgatgcgccaatgagtagcgctactttaaaccgggttttgacactgacgtatcgcctggctcagaaagaaggggagttgttgcctaagtttggtccccatgacttacggcgtacagccagcaccttgctacatgaggccgggtacaatactgactggattgagaagagccttgcccatgaacaaaaaggggtacgagctgtttataacaaggcagaatatcgtgagcagagggctgagatgctacaagattgggcgaatatgattgatgaatggactagtaagtag

SEQ ID NO: 76761 - DNA, 630 bp, Citrobacter koseri
gtgcctgagttgtctgtaattatacaatggatgaatcaataccctaagaccggctggctattgctgtgtatctatattgcactcggtgtagttcgtcacagagtaattaatgctgaatctggaagtgtatttcgtggactactcaatcttaggaagcgccggctagagcaaatgctgacacagccatatttgaataaaaatgcggtccgtctggcaaagcttgagcttcgtcagcgcagcctttatcggctcacaggcttgtataattatcggctgcaggatttggctgtaataatgtgtgatcgttatgggttgcgggctggttatctcaagccgtggcgtaactggctcgaagaacgggatggacggattgtgttcaacaggaaatggcattgttttcgctggcgtctttttctggtaggtcagattgtaaacacagttctactaatattattcattatgtatatagtttctcattcttcggccgaaatgatcgcaccgcttatgttactcttcatgcttgtatggtggtttccttggctaatgatcacctcggtacctacccccaggtggactcgcgaaatggaagtctatcttgagaaatttaacgctgaacagaccatggtttaa

SEQ ID NO: 76762 - DNA, 972 bp, Citrobacter koseri
atggttgacatgaaaattactatctgggaaggctgtgacctcacagttgcagctgcaattaaattatttgtagagcgtagttctccgtactccatattttcacggaggtatccaatactgcgtctcatacaggaagttattgatccagcagtagctgattatgtaaattccctgccaccaagtcataaagactacatttctggagtaaatctaggatttagtgaagtacttaaaaaattgggtttaaacgtcgtagcacaggcacaaagacttcttttgcgtaatttcgttctgactttagatcaacaaacttctcttgataaatgctttaccgctacgattgagtctcttattgaattagtcagtgaatgcgcatccaagcggccgaagaaatcctctcctgcaaaaggagtaactataaattcacagcgtaagctcggttattgcgagttctgcggtaatctaaccgaattttccaagttgatcagtgagatatcagaatttgttgctaacgatactgagttccccgttcatgaaaaacaggtccttagtcatcgatattgttctgaccataggcccaaactcaccaatggtctatggaatcccaaatacagacaaggaaagcggtctctcgaacagttcaataaagaattaataaggcttagacggcaatgcgctaaacctcataaagctaacgcaaacacagggaatatattgattgatacatattttcatgagtggatgcagggtcaaactttaaccccagcagatctagataaacttaggaatatcgccagacgaatggttgactccaaattcactgatactaagaaaaaaataatcatattaaaacaccaaggttttaaccagtttgaaaccgcacaggttttagaaaaaaatcactacacaactatgacaaagcaggctgtgtccaaggccttagcgtctgtgaggaaagaattttatatttaa

SEQ ID NO: 76763 - DNA, 231 bp, Citrobacter koseri
atgcaaacaaaggcacatagcacgctcattaacagaaaaacacttctggaaatgatcccattgtcagcccgcactatttataaccttgaacagcgaggcgagtttcctcgccgtatagcacttactagccgaaatgttgcatggcagttatccgaagtggaacagtggattgcggatcgtaaatcagcaatgtttaaagcagccagacccggtattgttttaggtaggtaa

SEQ ID NO: 76764 - DNA, 858 bp, Citrobacter koseri
atgtcattgaacataatggaagcatttgaagctaagccgcaaccaattgattacgtcttgcctaatttggctattggtactatcggagcgattgtttctccgggaggcgttggaaagtcaatgctggcattacaactggctgtgcagattacttgtggtgtagatcttttaaactttggtgaatatccaacggggttagtggcatatttacctgtggaggactctgcaaccatcattcaccatcgtctatattttttgggaaaatatctaacagcacgtcagcagcagattgttgctgataagctacttgtcgaacctttggtagggaagtgtccaaatattttctcgccaggttggagcaacttgattaatgagatttcaaaaagtagacggttaataattttggatactcttcgccgtttccaccaggaagatgaaaataatagcggagcaatgtccaaagtcattggaaagctagaaggtattgctgctgatactgggtgttcgattatatttctacaccattcaaacaaaggctctgccacgatgggagttggtgatatacagcaggcaagcaggggtagtagcgtcctggctgataatatacggtggcaatcttatctggcgggcatgaccgccttagaagcgaagacgtatggtatttctgatgatgttcgaggtcaatttgttagatttggaataaataaagcgaattatggagaacgtacgccagatcgttggttacagagacatgaggggggagtgttaaggataacgcaactcaaatcgaagaataaaaaacaaatagcaaaagaatgtatgtcttcattgagtggtgcagaaaatgataactggtaa

SEQ ID NO: 76765 - DNA, 762 bp, Citrobacter koseri
atgataactggtaataaagttacaccgactagcacagctctgcaggctagagtcattctgtaccaaccaagtcaacgtcccttggcgctgaaggggcagtggatggagactagttttggtcgttgtcgagttaccggaagactaggacaacgtcatgcggatattgtggaaacaatgctctatgtggccgagaaacgtcgagaaatttctgatggaggaatcgagttattagtagatccagcgaaagtacgccgaactctatccgatgcacaatacagttatgatcgaattaaaaaactacttgttgatcttcgtgtggcaactgttgaaatagtaacgccagatttagaaaaaaacggttattgcattctaggcggtttaattgaccatgtcgtaccctcaccaatgactaggcgtaatcctctaactggtggtgaacgtaacctatggagagtacgcttgggtgttgcattggtaatgttgttgaagcgagatttgcattttcatcatgatccaggtcctattgctcgtctccagcatggtattagccaagcagttgcacgtcatatattaacacataagcacgatcctaaaggcggctggcatattgatacattaattttagctgtcagtggtgaaggtactaataatatgacattacgtaactatcggcggagattaaaagaagatagcaaacaatttctagcgattggcattgagatacaaaattctaggataaaacgagctacaacggcccggtag

SEQ ID NO: 76766 - DNA, 354 bp, Citrobacter koseri
atgactgacaatcagacgcggaaaaattccacaccgatcaaggtttactgcttaccggaagagaagatgcagattgaagcaaatgccgccgctgccggtctgagtgtcgcggcttatttgcgtaaagtcggtatgggttacgatgtggagtcaatggttgatatagaacaggttaatgaacttagccgagtaaatgctgatcttggaagacttggcggattacttaaattatggctcgcaaatgatcctcgaacagttgatttttcacccacactgataagaaccttgcttgcgaaaatagaatcaactcgccaagaactaaggaacattatggataaaatcttggataaataa

SEQ ID NO: 76767 - DNA, 174 bp, Citrobacter koseri
atgaaagataatcttttgattgtatttattctgatcagtttattggccatatgttcttgcgataaaaatgataaagattgtttatcgacgccagataataaatttgatgaaaataaatacgataaatgtgctctacggagtaataataaaccaagccctaaacgagaatggtaa

SEQ ID NO: 76768 - DNA, 1392 bp, Citrobacter koseri
atgaaaatagtaagtaagctcacctttttaggtatcatacttttcttttctataaatgcctatgctggtcaattagatagtagcgggctacttgattctttattagataagtttcaacaagtagccagtacatggacaacagtaattgctgactatgcaaattggctcttctgggggctggtattaataagtatggtttggacatttggtatgatggcgatgcaaggggaagggttgacaggcgtacttgctgaaatagttcgcttttttgccgtcattggttttttttattatcttttaatcaacggcccatccatatcgcaatccatcattaattcaatgagacaacttgcagcaaacgctttaggaataagtactggtatttcgccctcaagtatagttgatatggcgtttgcaatattaaccaaggtcagttcagccgcatcaatttggtcgccaatgatatccaccattatgataacagtcgcgataatcgttttggtagtgatgtcccttatagcggtaaatatgctaatcatgttggtttctgcatgggtgttatgttatgcaggagttatattgcttggatttggtggttcgaaatggacctctgatatagcaattaattacttacgaactgttttatcgattggccttcaattattcacgatgacattaattattgggattggacaatcatttatagatcaatatttttctcttattagagatgatgttcctgatcttaatagtcttatcgttttgcttctggcgtcaattatcctgttagtattaacgaataagctaccactgttgttatcaggtgttgtaggaggggcttctttacaagggattggtggatttggggcgggtatgattaccggcgctgccgctactgccatcagcggtgcaggagcaatggcaatgggggcatcagctcaagtcagcggcggagcctctgcattaaaggcagcgtttgagtctgcgcaagctgccatggccgaggaatctggctcaggcggtggaagcggttccggtggaggatttggcggcggggaagataccggttctgtagatacttctggaggccaaccctcaggcagttccggtggttcgtcagcagggagcaattcagttagcgccagcggaggaagtcaggggtttgcttcattctcacgagctggtcgcatggcaagccatatgggaagcatcatggccaacggagctgctgagtaccagaaaatgaagcgaagtagcaattcttcccgagctcaacagacttttggaggggagttggcgactcagatacgtaaacaaacagctactcgtcgggataaccgcgaacatgatgattttgccggagatagcttatccggcaataataaatcttga

SEQ ID NO: 76769 - DNA, 435 bp, Citrobacter koseri
atgtccaggactcccgattcacagttacgtattgagggctttcgcaaagcagaggcttccctgagacttgaaggaatggaccccagtggtactgcgctctatgagtccattaaggcacgtattatttcaggtgagctgacgtatgagcaggggcgttctgagatttttgcgcactacacaaaatcagataacgtcgggcctgtgacagtgggagagatgctggtagaggaatttttgaaaccgctgaacatgtctcatgatgaattggcggaagctatgggtatctgcaagcagtatattgacgatattatctgcggtttgcgtcgtcttacggatgatgaggctcgcgttcttgctgtcatatttggtactgacgaggatttttggagcaatctgcagatgttgcaagatcggaaggaacgacggcagaaataa

SEQ ID NO: 76770 - DNA, 1008 bp, Citrobacter koseri
atgcatctaataatgctcgatacatgtgtttggcttgatatttcctctaaaaaagctgaattgccaatgcttactgccatcgaacatctggtagaggatgggagtatcaaaatactactgcccgatctgatacgtgccgagttcgaacgaaataaagatagggtgattgaggctacgtgcaaacgactttccagtgaattccgagtaattaaaggggtagttgagtcttttggcggtgatggtaaagatactgcgctcaggaccttggatgatgttaatcacagattgcctatcctttccgaagttaatcaaaatacagtaaatcgtgttaccaaactttttgacatggcccacgaagttataatctctgataccgcaaaaatcagagcggcagagcgggctatcgctaagaaggcaccgttccataagcagaagaatagtgtggctgatgcaatgttagcagagactttccaggagtttcggctgtcgcacataagtgagtacgaaacctttagatttgtcactcacaatgtgacggatttttccggcaaagaccacaggcagccacacgacgatttcgcagatatttttgacggcaacagctctttattctttaacgccacaagctctgccatcgaggatctgctcgatcttgaagaatttcactatgagaatagctttgcttgggaggacgaaactcgtgggcttcaggaaatcatgtctgcgatggacgagctcttcgataaagtttggtacaaccggcatatgaacatgatgtatcacctagataatggtgatatagaggtagtacctgctggcacaaaacgccacggcaatgatgtgattcacgaagatatcctcgaccaagcaaagattgcagctcaacgggtcagggataaatatgaagatactgggccttggagcgactttgaatgggggatgctcaatgggaagctctctgccttgcggtgggtcttgggggatgagtgggacatgcttgatggttag

SEQ ID NO: 76771 - DNA, 1215 bp, Citrobacter koseri
atgtatattccccgccctgccaaactgctcttcaccgtcgatgacggctggaacaggtatctcggttcgaatggcgacagcataacgccctggacccgactctgcgtagagcgcatgctcgcctgcggcaccgccgccatgggcgttcgccgctactgctgcgcatcggcagactgcacccactcccgctttttctgccagagctgcaagtcaaaggcctgcagctcctgcggcttcaaagccacggagcagtgggtgtcgcagcagagccacatcctccccgactgcgactggcagcacattacctttaccatgccccatctgctatggccgttttttaacaaccactggcccctgctcaaccagctttttcaggccgccacccgggccatgctccgctgggcacgtaagcagggcgtggaagtcggcatcttctgcgccctgcatacctacggccgccagctcaaccagcatccgcacattcatgtctccgtcacacgcggcggacttgatgtaaaacacggcgtctggcgagacctcttctttaaaaagcatgccgtggaggagatctggcgcggtgccgtcatccgcctgctgcgggaaagttatgaccagatcaaccccgccagcctgcccggctatggtcacctccgggatgaaaaacagtggcgccgctatctggatgcgcagtacgggcgctactggaaggtccacttcgcgaaaaagacccggggtgcctggcggagcgtcaaatatctcgggcggtatctgaagcggccaccggtatcggcggcgaagctgagacactacagcggcggcgccgtggtgcaccactattacgatcaccgcacgcagcagcaccggaaacagacgctgacccaggaagagatgctcaggcgctacatcagccacgtgctggcgaagcattttaaaatggtgcgctactacggctttttgtccaaccggaaacggggcgagctgctgccgaaggtgtatgacgccctgcagatggaagcgcgggaaaaaccagagcagccgggcttcgccgcgctgatgaaggaatttctgcgcacagatccctacaaatgcattctgtgcggtaaccggctgcgcttcagcggcgcagaggctggtaggcatgcgaccgaattagtggcagaaaggctgcacggcatcgaccggaaacgatggcttctggcacaggctgcaggataa

SEQ ID NO: 76772 - DNA, 1605 bp, Citrobacter koseri
atgtcagaaagtaacgagtgcaaaaacgacagtgctgatgagtttgcgaataagaatattcttttatcgcataaagaatattacggtaagcccggttctgcagatgaaatactcaagaataaggtcagtaaagaaactctttcacagctttcaatattgtcatttttgagcaatgaggaaaaaaagttcaggcgctttttcttagggaatttatcggggaagagaggtgatttcagcaatggttttatatatggcaggattcaggtgcttgaatgctggaagctgattctctccagtgaaaatcctgacaggtgggctggaaatagcatgagtgccagcgattcattaaatgtcctgcatcagttattaacgcatataaatgattacgacgttcatgaggatactggaacttactttgtaaagaatgccattcaaaccgccagagatgatttcaagtttaaattgtatcgggcgcataagatattttgcagtgggaagaatatcgccagttatgtcagtgcgtatgaaagagacaccggtttttctgtagaagcttacgttaatgtaattttcgctatagttcttcggatccggatgatgcgtaactccgaagacttcagggtactggaattttcagagtgggttatagatctgcaccagttcagtcatgacacgggcgttgagcttagtttactgacatccatcatggagtcggtatccttcgaccttcgggaaggggctgaattttctgtctccactctcaataacctgaatgactatagtcttttcagaaataaaccttttctgaggctttcgccaacagaatatttacccgttgaagggcgccttgttgaagaactggttttcgataatctctttcataaggttcatcttcactcagggaaaaacgaagggttcatgaaggacttcggggctgattttgaacattacgttcagggattatgtagagatgcctgcgctataaaaggggatggtcggtatgaatacattcctgagttttcgtatggtaaatctaaatcaaaatcaccggatgcaatgatcctgtgtcctaagaataaaacgcttcttgcccttgaggtgaaatcggcaagatatttagatgtaatacttactggtgataatcaaactgaagctatagagaaaagtttagataaactattatttacaccgtgggagcaagtttataaatctataggcaagatagtaaagcaaaagcgtcatcctaaaataacacaaggcaatgcctatatgtttgccatcataacaatgaatgaaatcccgctgtcttacataacgcctagaatgatttttaatagtgtagatagtagtagaagcttttattctcttggcattcatacctttgagttgcttttagcaattttgactcagtcgcacgattataatatatatgatcttttactttacgcttacgatcaaaggttcaaagataaagagaaagtatccataaaaacaacgttattgagaatttacagatcttatgacgactcaagcttacttgacgctgctgttgcaaagtttatagtcgaaaaacaagaagaattttttgacagctacaggccataa

SEQ ID NO: 76773 - DNA, 2280 bp, Citrobacter koseri
atgtgctcgacacagaggcgggtccagggagtgacgttgtcgcggaacctgacgaggaacaggttccaggcgtcatcgacggtgaagagcaactttgtgggacgcggaatatacatgccgcagagtataaaacggagctcagggcatgaacaccatcggaacggcagagccgtgacgctcgccctgcaagggcgctacgttcatgcgattgcgcaaatttgtaatcgcgataacgccattcatattaagggaacgctaaagccatctgacatggatcgattgttcagtgatgagcgccttatacggacggagcttacgacgttgcttggtctcgtggtaaaaggaccgttggacctaaccaagcaacctaaagctgtaattgatggctatgtccagcgtactgatgcgcttatgcaggagcttcacaacgcaatgtcctatccaatctttgcttctatgtttgaagcgataacgcagggaggggagcctccaaacccgtggcatgggccagggatgcgagaaccaatcttttacggtacagaatcagcttatgctttccagtatagagacttagtgccagaaaaatttggggcggatgatgaatggctacttaagaacaaaggtttcacttctggtcaggcgcgcaccatagcgaagacaatgtgcactttgatggatgagaagggaacgaaacttctcgcggattttcgagcagatgaaggttctctaccgacttggttgccagcattcgagttctcgctagacgaagtagtattccacagtggtgttgaggcaaatatagttcaagccttctttgctgcatttctcttttcagggcataacgatgggtttaaggaggttggggatttcaatgaggtcgctgcccgaccgctcataccgaccgggcatggaactgtgcttctcttttcacattacgccatttacgaggcattatacgaatctccattcttttggatgtgggacgacaaggcttatcgcccgaaagctgctgagcatcgcggagcttttactgaacaatttgctgcacgccgcctatctagggtcttcggcagtgaacatgttcatgcgaatgtaaacctatatcgtggtaaagatattgttgctgaggttgatgttctggtcatatacggagatcgactcatcgttctgcaggctaaggctaaaaagctaactatcgcagcacgcaagggcaacgataaccagctaaaggccgacttcgctgccgccattcaggattcgtatgatcaggggtgggtgtgtgcgaatgaactgcttgctggaggatgccggttggtggatgacaacaagaaagacatagctcttccgactagcatcaaagatatctttttgttcagccttgtgtcggagcactatcctgcacttgcctttcaggcaagtcagtcattgaaattccagaccaccaatgtcatccgtcctccgttcgtaatggacgttttcctcctagatacgttgacggaaatgctggcaacgccattgcgttttcttagctatgtgaaattaagagtggcagtatcggataagttgatgagtgggcacgagttaaccgtgcttggctatcatcttaagcagaatctctggctagatgaaaaatacgacctagtgatgcttgaagattcagtagcacaagatttagatgcggcgatgttagttcgcagggataatcttcaaggtgattataccccggcaggcatactcacgaaaatgcgacgaacacgttatgaggacttgattaaagaaatagagaatagagcagacccggcaacacttgaactcgggttccacttgctttcaatgaatgaggatgcttgtagaaatgttcaccgcatacttgaaactatcatgcggaaagcgcagttcgatggtaagcggcatgatgttactcttgcctcgagcactccaccttgtggagtcagctttcattgtaatccaaggacatctcatgaagcgattgctgtgttggaagctcactgtgcaaaacgcaagtatcagcaacaggcagctcaatggtttggcgtttctgtaagtccgaatgggcaagtccagttcggcgtgacgttggattatccatgggtggcgtctgacgaaatggaacgacttacagctgacatgaagccggcaactagagtaagtgatgctcttcctcaatttttacgagaaggttggcgaatgaagcttgggcgaaatgaaccgtgtcactgcggaagtggaatcaagtacaaaaaatgctgtttaaaatag

SEQ ID NO: 76774 - DNA, 681 bp, Citrobacter koseri
atggaaaagtgctatatgtgtgactctgaaggaactacaaatgagcatgttcctccaaaatgtatatttcctgaaaaaaaagacattcctgatggagaggattataaaaaaaaccttataactgtaccttcttgtgaacagcataatacgcaaaaatcaaaagatgatatgtatcttttgtttttcttagctgtaaatatcatttcaaatgaacttgctcagaagcaattcggcacgaaaatcatgagagcgataaatcggtccccccatgtatttacagaattcaccaagaaaagtacgcctgttatcttaaaagcaaaagatggtgaaattattcatacaactgctatagaaatagatcgtgagcgatttgactctgcaattaaacatatttcccatgctttgtattaccataaatttagagaaacattcattggtgacattcaagttattactagtggcttggtagatttatcaaatgaagacagtgttgaggttaacgataaaattcaaaaccttggtcaaatggtcgataagtttttaactagcgtgccctctgaaggtgataaccctgaaatatttaattataaattattaaaagaagatgagttccaacaagtgattattcagatgaatttttattgtaacttcaatgtcgtttctataatgagatactcctaa

SEQ ID NO: 76775 - DNA, 849 bp, Citrobacter koseri
atggcatttgaaaatgttaatattgtcggttcgagatggatacatgagaataactttaaaatcttagatgtagaagagtctcacgccttaataatggctgctggctatttaaaacataactcgcttgaaggcatttattttagagggcaaggatttatatatcctagcctacgcccttccttgtatcgaaatattgattctgactctgcgaaatataatcgtgaaaccaggatgaatgccaagataaatgaatatcgcgaagcatgtaatatattttcaagattcggtgattatgcagccgaaccgctgttacaacattatggattgcaaacaacttggcttgatatcgttgataacatttgggttgcattatggtttgcatgctatgaggcaaagtgtactcgagatggtcatttcatacattttcaaaagagaataattaatgataataataaatatgcatatatctatcttataggtgcagatttagattatcgcacgaaggctaaacctggatattggcatggtccaaatactgagttagttgatttaagaatagctgcgccatcgtatttcttaagacctcatgcccagcatggtttattgtttcgttgtaaaggttctgagggtatagggcgtccattagattattctcgacaaataagaggtgttgtaagaatcccgctagagaaggcatttgactggttaggaaatgggcatactgtaggtattcactccctgttccctccagcattttatgacaatggttacaaaattctcctacaatctggggttacatttgaccctcgtgataaagtaattggcgttgttcattcagtgggtgcttaa

SEQ ID NO: 76776 - DNA, 2265 bp, Citrobacter koseri
atgcgtgagttggttgcaaaaatgcctccgcatgatttgctcggatacatctacgctcagcacatgatgaagataatgggcaaccaaattgggggtgaaaagcaagttcaagaggatggtcccgatgacgagtttaatgaaacccagttcttactggagtatgttcacgctgttctggcatctgatgccgcacctgcggatatggaattcgacgaagtacggtgcactgagctgtttgaacttggccgaaaactaagagaacaggccatgttctttgctatgttcacctccgctggtaccaaagatggcatcttcggtcctaacacggccgacattgaattccgtgcgaaatccacctgggtcatgatccgtgggaatcgttatcaagttttggaaggcgagttttatcgatacgttctagcacctcacaatgatgttttggaggaggtgtatggtgttggtgcaaccgatattgcagaaggctttcaggctatggccgacgccactcgtaccgggcacgccaacgcaattatggagatgaagaagcagtttgaggcggcaaaggccttttcgatagagcaaggtaagtctatggaagacgctatggagttatgggttgctgaacatgaggagcagtccaaagcggcacgagaggcgatggaggatatgcttcgcggtggtattgccaatgtaagccgtcacacgaagttgccaccgacattgctagcagacttgtcataccagcgaggagaagatactgagttcttcgccgcgggtgattttaaggggacaccctttcggacactgccagcacgtaagaaacctctaattcagcttgggtcggactactacgcagtagatccctgttttgctcgcgatgcggggtatcgtgcgctcctatttaacctccttcagcgaaagccggattacaataaggcctttaaagatcggcagaaaatgatgagcgaagcagcctttgctgacattctctatgcccagcttccgggagccacagttctccaggaggtttactacaaggatcctgacagcaagcagtggtccgaaaacgatactctaatcctggtcgatgatgtgctgttactagttgaggccaaggctggtgcagctgccaccattgcatcaccggcgcttgattttggccgccatgctcaatcagtgcaggacttagtactcaaggcatataaacaatgtgcgcgcttcttcaattatatgaattcggcggatgaagtgtccctctatcacctcgtgaatggcaaatacgaagagtgttgccgtgtgcgtcgctctgactatcgggtgatggtgccgattgggttgacagtcgagtcgttctcgcctttttccacgtactgtaaagaattaccgcaggttgagcctttacttggaaagcatgctttcatttcgctgtccatcgacgatttgtttgtgctcaagcgactcttgcccacacccggggagttcgcccattacttggaggtgcggcaagccgtggctggaattcgcggggctcatctcttcgacgagttcgatcacttgggttcttacctgcagaagaaccgtttcgatcaggatattatcgagcagttgaaggaagagaaagcgaacatggttatctgggatggcatgagtgacatcgttgacaggaccttcgaaggtgaagagtgggaaagtaaaccgttcccaagtcagaagttcccggaggaggttctgaagcttcttggagcactcgatagcactcgagctagcggctggctttcagcagagagttatatccgtgacctaggagaggaaggccggaataatctggccaagatgctgaccgatcttcgcaaaacactgattcagcatcccgttcgttactttgttctgggcggggacggtgtgccgctcttcgtttggcttcaacggcatggccatctaattgactggactaaggtgaacaataaggccagcgcaggtgcgttgagcgtcaaggctactaacatcattggcgttgtggctgaagttagtgccgatggtacttatgtccaggcgcggtctttcaaagtttacataccgacggagcaaacagcagaaaacgcacacatttatgaagacgcggcgagaatgggcaatcctgtacgtacgttcaatctcgaacgggaaaaacaagtccactttggtcgcaagagcaaaaagattggccgtaatgtcccttgtccatgtggcagtggcatgaaatacaagagatgtcatggacggtag

SEQ ID NO: 76777 - DNA, 3054 bp, Citrobacter koseri
atgtttagcgatattcctcagggcattagcctttgggatcaccaacgcagagcgctttcattcgtcattgagcgtatgcgagccaatagtactgcttgcctagttcggatgcctaccggtacaggaaagactggcgtcatcgcctgtctgtccgtgatcagtgcgccaggtcgtgtcctggtacttactccttggaagaatttacgagaccagatggtcagcgcgctccagcacggattctgggcaaacgttagatacccagcgccaaatgaaaaaactattgtcggttttgtgccctcatccataaaagacgtattaagtaacaccgatgccaaggtgcttgtctgcacgttcaccacactgactgaactccaaagatcctcgcctcaggagtacgccgcgctcgccgcatccgtcgatgccgttgtcgttgatgagtgccactacgaaccggcactacgctgggggaaggcggtgaaatcgcttaacaagcccatgatcctcatgactgcgacaccgtatcgcaatgacctaaagctgttccgcatcgagaacccaaaagaatccgtttttcatttttcacaccacgatgccgaagcggcaaagattattcgtccccttaagacgctatccctgcctgatgcgatggacgttccgaaactggctcaggaattctccgctgcttggaaggccgcggtacagtcgaatagtctgatcagcagcacacctcgggccatcatatgctgcaccagtgctgctgacatcaaggcagcagtggcagtgattcgcgacgcgggtcttgacgccattggcatacatgacacttttacagggaaggctggctcgcatttgttgaaggaagtccctgagaggcacagcgcggtgatctggattcatcagcacaaactaaccgaaggactggacgaccaccgattctgctgtgtcgccttcttcgggcctgttggcaatgaccgcaagctcattcagcaaatcggacgggttctgcgaaggggacgttcggatcgagaggactgtgcggctctactctacgcgccgaactacttaaatctgggtgatcgttggctggcgtaccgagagttcgaaaaaagcgtagaactcctgacagcgcagcactatcgcaatgttgtcgagcgtatgttggagagtcagccttccgtggagtacttcgatggtcgcttccggcgaaggtttcgtcaggatgtgcttgcagacaatcctcaggttgttattgcgccaagcgtgctcgtgcgcaggctaaagagcagcttttctctggaagaatatatcgaagactgcaccgacagtcttaaccttacagacgcaatcattcttggtgagccgaatgcgccgtgccagcgagcgacagacttcgcactatgggtctacgcatcgatagcaaattcccgtcttctggaagagacatcactgtatgaagtcagactcgaagtgcactgcgtagtcgttgctggcgactaccttctggtttcggacaccacaggtacttatcctgaagcgcttatcgatgtgtcgaccacagctcttggggcagccgagctatctcagttacttgatgcgtcgtacagcatcaccaatgtttccacgagcagcgctattccatttgacactgtgatcagggcgtcagttcatcgcggtcacgatctgaagctgatccctgcctcgctgactgaccgggttcagatctgcaaagcggcccgtggagcgtcggcaaaggggcgacgctacgttggtatgcatcgcggtcgggttcgtcaggatattcccgagcagcaaagacgacgccactctgtatctttgtttaaagaatgggcaacgtcaatcgcctcggcgctggcctcgacgcatgttgacaatatcgtcttgcaaagatacatgcagacctgcaagccacctctaaaaccgcttccggtgacaatgtcgatcgatttgtcgcagtcgaagatccgcatctcttccgccgaaggcgaagaacttcgcatcgtagcttcttccgttgaggtcacgtcgccaaagagcgggccatccggcacaagcaccaatatgcacgagtgcacatacatattcgaagatctcgcggacccgccggtaagcgttgagctggaattgctcttggagtaccagcaagataagggtcgcttctggttcaagggaaagggcgttcgaggtgggtttggcgttcaagtcttcgaggacgacactgggagcagcgccaagtcgttcacggactacctgaaccagaatcaggagttggttctgatcggtcttcaggatggggccatggtttaccagggccgcaacttctacaaggttgactatgctcacgccgaggaatcccttttgcagcacttcagtcgcccacgcatcgctgcctgcgctaacgaaaagggctcgaccgatgagttagatgcagccaagaagcaaggtacgaaggccactgcctttatcccaggctctctcttcaaagcaatcgccgatggtgacgtatcgcccggattctcgcctgagttggtcatctgtgacgacttgggttcggagtgcgccgactttgtgctggccaacttcacgaatcgtcaaatcgcactagttcacgcaaaggctggaaagggtacgtcgatctcggcctcggcctttcacgatgtcgtcgcgcaagccatgaagaacttagtttacctagcgcgtggatcggagacgcctgacggggcaaagagttggacgaaatccaccttttggaacaacacgaagattccacggctatataaggcacccgcgaaatctccaacgggcatcgcgctgtggaggaagctacggagcgacatcatcgagcgggctgacgcgcagttgcatgtggttttagtgaccgctggctgctgcgaccttgatgcacttaagaaggtgatcaaggatccctccaagagaaccgcagaaaccgcgcagctatttcacctgtttgatggtctggttggttacgctagacaattgggtgtgcgagtgaccgtgctggacgttcctcactaa

SEQ ID NO: 76778 - DNA, 144 bp, Citrobacter koseri
atgttccctaataaaaataagcataactttaagtttgccttacgggaaaatattatcgtcatccgtcaatatcagacttttaccaggaaaagtctgttgctaatgtcgcttaattcatgcaacgtaatcacctgtttgttatag

SEQ ID NO: 76779 - DNA, 633 bp, Citrobacter koseri
atgattgtgatgccgacaacttacagcccaatgaccgtcgcccgcgcttttaatgtcgtggaagaatttgcgctttcagggcgtgttttgcatgttatttatgatagacagactccgcgagcagcgattattgaagcggatgttgaaatgtttgaaggcgtgcctcgccatcgcgttattgctgcgcttgatttgcagtataaatccgctttaggcagagatatcgttgccgtagaacgatgttgggaagatacacatgttcttcaggcagaaggggtatgtgttgatccggctgagcgtgataagggattagccacgcgtttgtacgaagcgctgatcctgaagtgtggcatcaccttgatcagtgattttgaacagtatgacggtggaaagatgctctggcagaagatcgctcgcgagtccgatcagatcgcggttttcgtattagatacggaactgggcgcattctggccatatgacggtacaaaggtaatttatgatggcggttgtatccctgaggagcgtatctggagcatctcgccggatcaaaaatgtcatggcgttgttttggttgcagaggacaaacagcgcgcaaaccagctaatggaaacgaccgcgccttaccgggtttga

SEQ ID NO: 76780 - DNA, 375 bp, Citrobacter koseri
atgacattgtttgaggaatgtaaggagttgctcaaggcagattttgatgttgtggaaggggatgatttgagtatggtaatggatatttttcatcaatatccatggcatagcggtaatctcatatggtcagaaatggatttcagcgattatgaactcactcatgatatgtttaatgggagcggcttaggcaatgaaactgtatttgtcatagcggatgatgccgatgtgcccgtgttcagaacccatctacaactcattgtcgataatatctacgatgtcatcgccatatcacctaacctatttatttttaacgataagataatgattacgcctttattccctcataattttatacggttgggtctgcgaaagtga

SEQ ID NO: 76781 - DNA, 204 bp, Citrobacter koseri
atgaacgaaagaaaaagacttatccgcttacccgaagtgttaaacaagactggtttttgtaaagcgtggatctatcggctgattagccggggtgatttcccttcaccgatcaagactggtgaaagaactatcgcatttgttgaaagtgaagttgacgaatggattgatgaaaagattttttattcgcgtaatcaagcggcgtaa

SEQ ID NO: 76782 - DNA, 159 bp, Citrobacter koseri
atgaaaatttcgttgtcgcaggttgccggatggcggatggcggcgcgaacgccttatccggcctacgggttagcgccatccggcattactcactcaatactgacgcgcctttttcacctgatcgaacgtctgctcggcggcttttcgcaccgacggtga

SEQ ID NO: 76783 - DNA, 420 bp, Citrobacter koseri
atgaataccgacactgcaaaagccattgaagcaaccaaacaactcgtcgccgctgttcctttcctgggaggcagctcttcagagagcgattaccgtgaagcgctgtctctggtggattatctgatcgagaacgacgatgagaacccgctcattgacttcctggcgagcaaaattgctgactatgaggataacagcgaccgtttcgctgagttcaataaagatatcgctgaaatgccggttggcgtggcgctgctacgtactctgattgaccagtacaagctgtcctactcagacctgaaagaggagatcggttcaaagtcgctggtgagtcagatcttatctggtcagcgctctctgactatcgctcacattaaggcactctctgctcgtttcggtgtgaagccagagtggtttctttaa

SEQ ID NO: 76784 - DNA, 309 bp, Citrobacter koseri
atgcacgtcatttcaaaagaaccttttgaggaagcggcaaagcgatatcccaacgattcgttagccatacgggcgctgtatcgcttaatgcgtgaaactgacttctcttctccgactgagatgagaactctgataccgagcctggacaattttaagtaccggaacaaatggtgggttctggatgtgggaggcaacaacttgagggttatcgcctacatcaattttgtgaataaacgcttctatgtgaagcacatcagcacccacgctgaatatgacaagttgacccgctattacagggagaacaaataa

SEQ ID NO: 76785 - DNA, 2025 bp, Citrobacter koseri
atgcataccctacacaatatcaccctgacaacaaccgatgacggcttcaccctgagctggcaagatcgtctgttgctatcccacagcgcagaaaatccctgcctgtggattggtaccggcgtcgccgatatcgacatgtttcgcggtaatttcagcataaaagataagctgaatgagaaaatcgcgctgactgacgcaacgataaaccagtccccggatggctggttgatccatttcaatcgcggcgatgccatcagcgcggcgttacacatcgccaccgatgaggcgggccgcctgacgctgaaactgcaaaacagcgctcttacccataaccgcatctggttacgcctggccgcccagccagaagatcacatctatggctgcggcgaacaattctcttatttcgatttgcgcggcaagcctttcccgctctggaccagcgaacaaggcgtcgggcgcaacaaaaacagctatgtcacctggcaggcggactgcaaagaaaacgcgggcggggattactactggacctttttcccacagcccacttttgtcagcacgcaaaagtactactgccacgtcgataacagctgctacatgaatttcgactttagcgcgccggaataccatgaactggcactatgggaagacaacgccaccctgcgttttgaatgcgccgacagctacatcgccctgctggaaaaattgacagcgctgttaggccgccagccggtgttgccagactgggtttacgacggcgtgacgctcggcattcagggcggcaccgacgtctgccagcagaagctggacaccatgcgcaacgcaggcgtgaaggtgaatggcatctgggcgcaggactggtccggcatccgcatgacctctttcggcaaacgcgtgatgtggaactggaagtggaacagcgacaactatccgcagctggatacccgtataaaacaatggcaagaagaaggcgtgcagttcctctcctacatcaatccttacgtcgccagcgataaagatctttgcgccgaagcggccagacacggttatctggcaaaagacgctgcgggcgatgactatctggttgagttcggcgagttttatggcggcgtcgtggatttgaccaatcctgaagcctatgactggttcaagaatgtcatcaagaaaaacatgattgagctgggttgcggcggctggatggcagatttcggggaatacctgccaaccgacacttacctgcataacggcgtcagcgcggaaattatgcataacgcctggccggcgctgtgggcgaaatgtaactacgaagcgctacaagagaccggcaagctgggcgagatcctgttctttatgcgtgcgggttataccggcagccaaaaatactccaccatgatgtgggctggcgatcagaacgtcgactggagtctggacgacggtctcgcctccgtggtgcctgccgcattgtcgctggcaatgacgggtcacggtctgcatcacagcgatattggcggttataccaccctgttcgacatgaagcgcagtaaagagctgctgctgcgctggtgtgacttcagcgccttcaccccgatgatgcgtacccacgaagggaaccgccccggcgataactggcagtttgatggcgacgcggaaactatcgcccactttgcccgtatgacaaccgtttttaccaccctgaaaccgtatctcaaacaggcggtggcgcagaacgccagaaccggtctgccggtcatgcgcccgctgttcctgcactacgaggacgatgcgcagacctacaccctgaaataccagtatctgctgggtcgcgacctgctggttgcgccggtccacgaacaaggacgccgcgactggacgctatatctgcctgaggataactggatcaacgcgtggacgggcgaaacgcttcgcggtggcgagattaccgtggacgcgccgctcggcaagcctccggtcttttaccgtgcagagagcgagtgggcatcactgtttgcctctttacgcactatctaa

SEQ ID NO: 76786 - DNA, 363 bp, Citrobacter koseri
atgtcatggaataaacattccgcagtaacctttgcacgccagcatgcacaccaacaaagtactcatttttgtgcccatgccgttgcagccgcgatacgagctggcggtattcagattgagggagccaatgccatgaattttgatcgttcacttgagcgtgccggattcaggcaagtttatggtgaaccgatggaaggagatgtcgcagtgataagcgcattacctggcccgcatcaatatggtcatacctgtatttacgatgggatgggaacatggtattccgatttcattcaacgcagtatgtaccctggcccacattacagggagctacatcctgcttttaaactttacaggcacaattaa

SEQ ID NO: 76787 - DNA, 453 bp, Citrobacter koseri
atgaaagaattattgatattactttccatcagtttcgcaacatttggcgcaattgatgataaaacccccatatctcgggcgcttgaattcaataaatggtatattaatcagataaataaagatatttatcctatcagcgccggtcatgaaattgataactttgttacgtcagacacgatgaaaaagctgcgtcatgcgcaagatcctaaatacgcggacgatgaattttatgacgctgacttctttattaaggcgcaatacatcggcgatgactggccaaccaacgtaaccgtagtttcatccgattatgatccggtttgtgtgaatgtatatgtgtcatttggcaaaaaacgcgatcacattgtcgttgattgtatggtccgggaaggagggaggtggagagttcagtcagtcgtcggacatgagatttaccacaatagcagcttacagtaa

SEQ ID NO: 76788 - DNA, 222 bp, Citrobacter koseri
ttggcatttgagattgaatatatggatgcctggagaagctacagggactccagtgatatcatcaaagttgatgaaaaaacgcaattgtatatcgatcgtgtatttacagctttagatacttattgcgctgatcctgagttaagggatgatggcgatctggatgagaatgaactattgagtgaagtcattcgtttgaacaagcagtggcgagacgtcgattga

SEQ ID NO: 76789 - DNA, 2115 bp, Citrobacter koseri
atgagtgatgcattcgggatttttggccaagaagatatttattcttttaaaaaaacggggtcttttggtcgtttttcaacaattgaaagttttccaatagagttttttctcacttccctcaaggccagcgagcttcataatcttacttttgcaagagatattaaaccgggtaaaaaaatagattttgatcaacttcttcaaagagatctggatattgtaagggttgagacagagattaaaccatatattacaaatgcggattcaaaatcaagaacaatattcttccctccattgcttgttgccgctgttcctgtttctaagaatactatggaagaattttacagcagacaacaaataaataaaacgagtagtggtaatagaaatttctatgttaggatatggaacggtcttttcaaattgacattaatggaggatggtaattattctatattaccatcattggaagatcctgatagttatatttctgtagccagagaaccatctcaaatagaaataaatttgtcaaataatattgagcgaggaattaagttaattgtaattgatggacaacaccgcctaaaagcactgcaagaagtatatgatgaagatagcaaagatgttctaaaagaaatgacggtgccattatgtatattattttcaccaaattcaacaaaagaagttgcagataagttagagaataatggaattacaattcctcgcgttccagaaatcttcagacagttgtttgttgatgtaaataaaaatgcagagcaagttggcggtcattttaatattttactttccgaagggaacatgggaagcttggcatgcaggctgttttgtgcacatatattaaatacgcaaggtattgaggggttagctcagattgaatggaatcagaaaaagaaaaaattatctactgaaattaatagagcctattatataactagtattggggtaatcgaaaaagcattatctgagacatttggtaaattcaaaacaataaacgactattttataaattttgaggatataagagaggctgttcagccacctttagatgatgatcatcttgactatcctaaggtttcttgggataagttttccctatcgcaaaaaaaacatatagtaaaacagattcagcagcatgttgttccttttcttgaacgactttttttcaatagtaaattgtatgcacccgcaacggattgctttcataaagagatcgctaaacttaagaataaatcagatcatgatgtacatggtggcattgcttatcgtccggttctcgaatctcttttagaatatatgcctattcccgaaactgataagtatcgagaggctcggcataatttaagagtgttcgaagaagatattagagattgcaaaagtaaaaattgctttagcatgctaaaccatgccattttccaacgagcattgtttatgacttggtccgagatactgaaaattggcaatcgagtatcagtaaataaagattttgctaatcagtattttttttcattaattgatgagtttgcatcatatccttctgatgtaatagattttaagaaaggatattgccagagttttatattcaatggggctcgagttaacccgacaaatgaagttaaaaatggaatctcttatttaattttatccttgttatcaagtaaaaatacccgtgatcgcctggctaacttaatagacataaaacctgaagacagggcgttgtctgcatttaaagaagaaataagaaatacagcctatgcaagccttaataattatatatcattatataaaaagtacagagtgaaagtttttaagagtaactatccgattgattctacgatagatctagatttacgtcgtgagcttcaagaggaagaaaataagaaaaaaagggagcttaaagaattcaaagacggagtcatttcaaaggataagctgacaagtagatttgatgaaatggtgaatgagtgtataaagattgacatacttaaagctcaagaggaattaaggatatcattaggtctggaattggatgtttttggtgtcaaagatatatcatccgatgcttctgatgatattattgaagacgagtcaattgacgagtaa

SEQ ID NO: 76790 - DNA, 873 bp, Citrobacter koseri
atggcggaagcgacaactccacatgatgcggtttttaaaactttcctctcctgcgtggagaccgcgcgggattttattaaaatccacctgccgccctcattacttgagatttgcaaactggatacgcttcgcctggaacccggtaactttgtagaagatgatcttcgcccttatttcagcgacattctgtattctctggaaaccaccagcggtcgtggctatgtacatgtcctgattgaacatcaaagctcacctgacaaacttatgtcgtttcgcttgatgcgctatgccgtggcggcaatgcaccaacacctgcaagctggctacaaaactctcccgctggttatcccagtgctcttttatcatggacaacaaagtccctataaaggcgccatgaactggctggatcactttgacgatgcggatgctgcccggaagctgtacagcaatgcgtttccactggtagatattacagtcatacctgatgatgagattatgcagcatcgtagtatggccgcgctgacgctggtgcaaaaacacatccgccagcgtgatatggtgttgttgctggataaactgactcatctgtttatgctaaaggagatgagcggacaacaaataaccgtgctggtaaactacatggtgcaggcagggaatacgcaagatgttcgaacattactgtatgagctggcacagcgcgtgccgcagcatggagaaaaactgatgacaatagcggagcaacttcgggaagagggcaaacacattgccctgttagatgtcgcaaaagcaatgctaaagcgaggttttgaaatcgaagcaattatggaaatgaccggtctttcacaggatgaattgcggcaactccagaattaa

SEQ ID NO: 76791 - DNA, 360 bp, Citrobacter koseri
atgactaatacgcattgtattgcagtttcatttgatccaaaagtgcacgccgcagataaccgtcgcctgaagatgggttatgcgagccgttatcctgattacagccgtcttccggtgaagtatgtccagtttccgtccatcgtgatgaagggcccgtggcttaaagccgccggattcgacaccgacaccagcgtcgatgtgctggtgacgcaaggctgcatcgtgttaaccgcctcccctaaacctgaagagtcagaactgatgaaatccctgcgcgccgtggaaaagctgtccgcgcgtaagcaaaagcaggtgctggagtttatcggggtaatcgcggggaaagcgttgaaggggtga

SEQ ID NO: 76792 - DNA, 729 bp, Citrobacter koseri
atgttaaaaggtattgttaccgtaatgcagatactggttggcgtttactttatggggaatatcgcgcggcaaaaccctaaattcaaagcgtttattgttgtgttagaggatgggtatggaaatgttaataataagattaaagatgcacgtctaacggaaggtattgtatttttacaactcatctatggctttgttgctatttcatctgccgtcatattcttcttaacggcttatgccgtaccagaacaagaaaatgtgaagtttatctgttctatgggatttgtctttggatttattggttgggcatcggtttcatggtgtatgcagcaccgaaaggcaatctcagaaaatgcttgggtttttctcttaatgatggtttcaccttttgcgatggcgttacttgagaaacagtctggcatttctctgataaggtatactttggaacctttgtttcatattttcaaggtgatggggtttcatgtcgatcttccgacagacatctggagtcaggccggtatattaagttgcatgttattatttgtagtattaatgcaatatatctttagctggattctgtctattcctgtgttattattaacaatatttattgttatttcaatgatctattttgcaaggttggttaatctgatagcacctgataagtccttttctgggtttatgataatattgtttatattattaacagtagtgcaaaactatctactgtga

SEQ ID NO: 76793 - DNA, 261 bp, Citrobacter koseri
atggataccaactggcacaaagccgacatcatcacggcattgcataaaaaaagaatgtcattggcagagctgtccagagaggctggattgagtttctccacattgggcaatgccctggagagaccatggtctaaaagggaaatcataattgctaaggccattggtatcccacctgaggttatctggcctgaaagatactacaagggtggagagtttataaaccgctatgagctggtacgtaaattcggtacccaggtgtag

SEQ ID NO: 76794 - DNA, 1086 bp, Citrobacter koseri
atggcaaacttcgacgctgattactgctattctttccccgctgtacgcggagtgcaagccggccggccattttacattgcaacctgccctatgcgcatcatacccaaaattttcagctttgatgaaactgacgttccgccagagctgcgtgctcaacgcatcctgaacaaatccagaatacctgagatggtcaggtatctgcttgagaatccgaaagattatgtcttctctgcgttgacagcgtctattgccgttgacgttcagtttgatgagtacgaaaactcaaataatctaggaacgctcagagttccaatggatgcccagattctcattaatgatggtcaacatcgtcgtaaagcgattgaagacgctttagccgagcgtccagagctcggccaggacaatatccctgtgctgtttttcgtcgacgaagggttaagacgtagccagcagatgtttgctgatttaaataaatacgcgattcgccctagcccatcgctttcagctctttacgatcaccgtgatgtaagttcaaatttggcgcgttacttagcaatgacaatagaaccatttatcggccttactgagcttgaaaaatccagcatcagtatgctttccaataagttatttactctgagtagcattaaacaggcaactcgagcgcttttgggtaaagacccgaaagtaggcagtattgaagacaacactgctattgctacacaatattggcaagctatttacaaagttatgcctgattggcagcttgctgcacggaaagaagtttcccccgctcagctacgtcaagactatgtgcatgcacacggtattggcctgcaagcactgggacttttggggcggtcacttatcactgaagagccagaacagtggcaacagaaaatattgaaacttaaatccttcgactggcgtaaaagcaatcccgaaatggttaaacgcgcaatgcagcatggcaagctgagtaagacgggaaccgctattcagctcacctgtaatgcacttaaactcgcgctatctattcccctcactcctgaagaacaggaacttgaagctcaaatggttgtctcatga

SEQ ID NO: 76795 - DNA, 1635 bp, Citrobacter koseri
atgagtaaattaactcaggcctacgatctggccgactatgaagatttcatcaatcaggaacaatttgcgggacatccacttgctgaatatgtcacagaagtgcaaagagtatactgcgcagataaacgtccatgggtcattggctatagcggtggtaaagactcttcagcagttatcactctggtttacctggctctgctgggtcttccgccagaaatgcgtaccaaagatatttttgtggtgtcatcagatacgctggtagaaacccccgttgttgttgatttgatcaaaaagacaatgcagttaattgaggctggtgcaaaacgtgatggactcccaataactcaacacgccgttatgccaaaaactaacgaaactttttgggtgaacttactgggtaaaggctacccagcaccaacacgtagcttccgttggtgtacagaacgcatgaagatcaatccggtcagtgactttatcaaagataaggtcagccagtttgacgaggtcattgttgttctgggttcacgtagcagcgaaagtgcatcacgtgcccaggttatcgcaaagcataaaattgacggttcgcgtcttgcccgacacaccacactgcctaatgcctttatctacacacctatagatacatgggatgtagaagatgtatggaaacttctacgtggcgcattccgttatgctccggaagatatcgatgagtgggaaaatccgtggggtggaaataaccgcccactctggacgctctatatggattcttccgcgcaaggcgagtgcccattggtcatcgatgatagtactccttcctgcggtaactcccgctttggctgctggacttgtactgtcgtgactaaagataaagcgatggagagccttattcagaatggtgaggaatggatgtccccactgctgaaatatcgcgatctgctggctttcacaacagacccggcaaataaagacactttccgtaactacaaacgccgtacaggcaaagtaagttaccaatacgctaaagacggcgaagaaattagtgctgaacgtaagcacgtccctggtccgtattggttaaaatatcgacagaaatggttaaaggaattactggaaattgagcgtgatatgaatgctcaaggccataaaattacgctgatcacacagccagagctacatgctatccgtcaggaatggttgaaagaccccaacgagccggattggtatgactcattgccaggtatttaccgcgaggtgtaccaaaaggatctggattgggtcattgacgatcaatcacgctttgatgcgagtgatgcagatttacttgtgcagattgcccagggatttgatgttgaacctgagatggttatgaagttgatcgaactggaagtctcgatggaaggcttgagcagacgtcagggggtgtttgataaacttggtacaatcctcaaacaagactggggaagtctggaagaaatcaagcaacaacaagaaacattgcagaaacgcaacgagcgagatattcatcaagaggaagtcgcaaagctggaagcggagcttcaggttttacagcgcagaataatagatgcgagtgaatcatacttgctgaccagtaaggaaaacgagcatgctaattaa

SEQ ID NO: 76796 - DNA, 2001 bp, Citrobacter koseri
atgctaattaaacaactggtgctgcgtaattttcgtgttttcaatgaaacacatatcatcgatttagctcccagaaaacgccccaacgatgacaatccacgccctatcgtactattcggtgggttaaatggcgcgggtaaaacatccattctctctgccattcgtttggcactatatggtcggctggcattcggcttatcaacacaaaaccaggactatattaatgagctcagttcattaattcataatggaacaattaccagtgagcaaccaaatgaggctgcaatagagctgacctttacttataacaaaggtggtcaggaagcagagttcacggtagcccgaacctggaaaaaaggaaagaaagaccaactgtcgcttttacaagatggagtgcctttagaagaactggattacgatcaatgccaaggttttctcaatgaactcatccctcatggtattgctgatttattcttctttgatggtgaaaaaattgccgaacttgcagaggacgagtcaggtaatattttaaaaaccgcagttcgccgcctgctagggctagatttgattgccaagttacgcaatgacttaatgatttttattaagcgtcagcaatcgagccaatttgcagctacacagcagcagcagcttgctgcactggaaaaacaaataaaagagtacgcattccagactgaacaattgcttgagaaggcggatttttcaaagatacgaatcgatctgttgtctaaagagattattcgctatgagggccaactcaatgctcagggtggagcgtttgctcaaaccaaagctcaggaaaagcaaaaagtcgaaacgctgttgaaagaaaaggaccgtcttgaaaaagcgttacgtcatgaatgtgatggtttattaccatatgctttagcgccaaaaacgttaacacgtttgcttgagcagatctcaactgaaacacaaatcaagcaagccaggaactttgaaaatgagcttggtcaattcctaacacagcttaaaaacgatatagcattccgttccagtacctccgggaaaatagtggctgaagcaattgaggataatttaaaggattaccttgcaaccaaaccaaagggggaactgctgttcgatatatctgaacgtgaagcaggtatgcttcagcaagctatcgagcaagacagcaaaaagacctggcagcgttttgatctttatcgtaatcaattagttgaaattgaagaacagctggaacaggctgcggccaatattgctcgagcaccagaggatgaccagcttcttgatatatttgataaaatccgtgaacttgataaacaacgtgaactgaaaaagcaagaatatcgcgcattacttgaagacgcgaaacggaccaaacagcaacagttagactgcgtgcgtcaagtgcaaaaagcacatgatactgcccgcaatcagcacagttttaatagtgcatttaataatgctcaagaaacgattaacttgctcgatcgctacagtgaagttttaactcaagcacgcgtaaaaacactatcaacgaatttcgaagtagcttatcgaaaattggctcgtaaagaagatttgcagctcaatgcgcacattaatccagaaacatttgatgtagaactcattgatgaaaaaggtaatgtaataaatcgtaaactgctttcagcgggcgagaagcaaatttatgcgattgcaattcttgaagcattagccaaaacctctggtcgtgatttaccggtaattattgatacaccactgggacgattagattcccagcacagagataagttaattaatcactatttcccatttgccagccaccaggttgtactgctttctacagatacagaagtagacgagcgctactttgttgaccaattgcgcgatgatatctctcatgcttatgagattgtgtttaatgcgcataccaaatcatcagcgttgaagccaggatatttctggcaactaactaaggaggcaatttaa

SEQ ID NO: 76797 - DNA, 354 bp, Citrobacter koseri
atgctcccgaatcgaatgcagcttactcgccagactgaagagcagctcaaaaggctaaaaggatttacaggaataactcccaatgtagccgctcgtattgcatttttccgctctgtagaaagtgagtttcgttttttaccagagaaagataataggaagttagacggccaacttgtgcttgataaaattacctggctgggtgaaacaatgcgtacaacagaacttgtgctgaagattctttatccacagttagatcagaaagaaatagtcagagcctgggccgcacatgttgaagatggaattgctgccttaagaaattaccgtagcttaaaagattttgttaaatttttgtaa

SEQ ID NO: 76798 - DNA, 1221 bp, Citrobacter koseri
atgccgaaggtagcaacaaaactcactgacacagagatcaaaaaggccaagcccacagagaaagagttcacgctatgggatggagatggcttgttcctacgtatcaaaccaagtggcaaaaaaatctggcacctcggctataccgttcctttaaccaagaaacgggccaaaatgagtcttgggttctatccctacctgacacttgctcaagcaagagcgctacgggatgaatacctctctttacttgcacagggtatcgatccccaatcccacaatgagcaaaaagctcaagcgctcaaagatgccactgaacacacattccaaacagtggcgagaaagtggcttgatgaaaaaattaaaacatcaggcatatcgcaagatcatgctaaggatatctggcgtagccttgaacggaacatctttcctactttaggggatgttcccattaaagagatccgccctaagatgttgaaacaacatcttgaccctatcgagcaaagaggtgttcttgaaactctacgccggataatttcccgactgaacgaaattttccgttatgcggccacagaagagcttattgagttcaaccctgctgataacctcacacagcgtttcagcaagccaaagaagcaaaacatgccagccctcccccccagcgagttaccaaggttcatagcagctttagcaaacgcatctatacgcttagaaacacgccagctaattgaatggcaacttcttacatgggttcgccccggggaggctgtccgtgctcgttggactgacatcgacgaagagaaccgattctggaacatccccgctgagttcatgaagatgaaacggccccacaaggttccattgagtaaggaatctatgcgtattcttgaatccatgaaaccaatcagcggtcatcgtgagtgggttttccccagcatcaaagctcctcttagccatatgcacgagcaaacagctaacgcagcgatcatccgcatgggttttggcggtgaactggtggcacatggtatgcgttctattgccagaacagcagccgaagaagcggggaagtttaggattgaagttcttgaagcagccctcgctcactctaaaaaagatgaaatcattgcggcttataaccgtgcagaatatttagccgaacggatagagttaatgcaatggtggggtgattacgttcaaataaaaaaatataagtctattgctgcataa

SEQ ID NO: 76799 - DNA, 1107 bp, Citrobacter koseri
atgaatatacttcagatgactatacataagataaaaggaattcctaatggattgcttgaactacccatcgaaaatggcgtttatgctatagtaggcaataatggcactggcaaaagtactattatgtcatgccttgctcaattggtatcaagacataacttaggattacttaaaaaacaggatttcagcgatgaatcatttgtagagtttacatttaatgggcagactgataggtggtattgcgaagatggcttttggaaatcagatacattccctaattcgataagatttaatggcacatatgaagggagccttttttatggaatgcgttttattgattcaaaaaatgttgatgagcttgtagaagagggtaaaattttagaagatgagattgtagtttcggattcatacgtagtagaacatcttgggcaaatactccattcagataagaagcattattcagaccttaagcgagttaaaaataaaaccatcagagaaaaattagggttaaaaaacacgccatactttatgaatggtggagattctattataagtcaatatagaatgagctcaggagagtgtttaaccatatcattattacattttatttataactcattggttcgaagatctttatcaagaaacaaaccaatattgatgctcattgatgaaattgagttggcattacaccctatagcaattacaaatcttttagatttattgaagaagttggtgtcagaatttgacaatctgacagttattattacttctcactccccagaagtaatacgctcaatatcccctaataatattttcaaacttgaatttgactcaaacgatcaaaactgctttaacatagtcaacccttgttatcccggttatgcaattcgcgatgtatatacgcatgatgggtttgattacttattgctggtagaagataaattagcacaaataattattaaaagatcgattgataaactaaagttgaataacagtagattagtgaatgtaatgcccgtcggcggttggtttaatgatcagtgggttgattgctttttttattacgataaaagaaaagagaggttcaaaaaatggcgtttaatatag

SEQ ID NO: 76800 - DNA, 342 bp, Citrobacter koseri
atggcgtttaatatagaaaaatataataaagtaaaaaaagaaattgagcaaagagcaaacttattgaatagaatggagcaagaaatgaaggcagaagaaaggaaaaaagatgcgacacgtaaaataaaagtcggcgctgaactaataagaatagttagagaaaataacatcgagacattagattttgcgaatgatatttctttgttagtaggagcgttaactaataatctaatactgaaaagaataaacgatcagcgtgagttcttaaaagttgaaggcgataaaagattgaatgaatggaagctaaaaaacaacaagaaaaggagtaaagcagatgaataa

SEQ ID NO: 76801 - DNA, 414 bp, Citrobacter koseri
atgaataacttaagacctaacccgaaccctcgaaaagagggaacggcggatatgatgaaccgcctaaatttctatgatacgtcttttacttgcttacattttttaatgatagattttgataatgacatgcaagaaatgaaaagaaaaaaagattttcatccgctccagcttttgaataagcacgatagagcaagcttggatttagaagtgcgaaatattattagaatatcacttgctagtaaaatgttagatattcaaagcgaagagcttttaagcgctgatttatattttcataaaaaggatgagttagatatatgtgaagacgcgcgaataataggttatgtgtttagagactttgtaaaacaaagaatagaaacagcgattaaaaacattgaagaagagagaaatatatga

SEQ ID NO: 76802 - DNA, 1302 bp, Citrobacter koseri
atggcaatatttcatatgagcgctcaaacaataacacgcagcaaggggcatagtagcgtagctgcggcagcttatcgccacggcgaaaagttaatggacgaacacacaggagagatccacgactacagcaaaaagaaaggtatttcagacagtatgatattaatacctgaaagcgcagaccgtaattttttaaagcctgcgtatttatggaacacgatagaaaaaagcgaaaaaagaaaagatgcgcagttagcacgcgagtttaatattgcgcttcctgtcgaaatgacagacgaacaaaaaaaggtgttagcaatagatttttgccaagagcattttgtaaaaaatggaatgattgctgatatagccttccacaaactcgatagcgacaacccgcattttcacgtaatgctaactactcgccgccttactcctgacggcgcggggttcggtcagaaggaaaggaaatggaacgataaagaactgttagagcaatggcgcaagagttgggcagacacagcaaacgagcacatgcaaaaggctggcatcgatgcgcatatcgatcacagatcactgaaagaacaaaaagcagagtttgacgctatcctgccccctctcagaacggttgagcaagaggcgcaggcaatcagcttagacagaccgccgactatccatagaggccatagccgcaatccagagcgacaagcaagatttgacgtgctccaagaagtgaaagtatcacaagaggcaaaagcacttaaccacattgaacagaaacagcttaagccctcgccgctggctccagcttcctcccctgccgcatctttgcaagatgctacacagggaggcaatgaaaacaacccgcaaaatagactcggcgaagttggcgaatatcttcaatctaaactcaataaagaagataaagcagatcttaatgctgataatgaaatcaaagttcacaccactaaaaataatagtaaaagcagttcagcagcggctataggttcaacatcaaatattaatttaaccgatgagaaagtagataagaatctacacttaacagaagcacaaaaagaagagttagaggatttagaaaataaagaagcagcagcaaagaaaaaagcttatctgatgggcggcgctgccgttcctgaactttctcaagataacaaaacacagtcaaaaagtgagtttaaaaataaacttcatacagctaaacaatcaatatcattaactgaacagagatttaatgaagaacgtgaaacatatgagaacagaagaaaccgaccaataccgcgctag

SEQ ID NO: 76803 - DNA, 495 bp, Citrobacter koseri
atgaaaaccgaaaacattatttttcttttttgggcagtgatttttatcctgattctctgccaactgttttactttggccctaaaaaaagaagatatctcaatacttacacagaggtattagatggtgatgtcctctcatatgaatgtcaaaacaccggtgtagtaattgatactaaaaaacacacagtacgtattttcaatacagataaggacagcactttcaaatacgacaacatcagggaaataaattatacgctatccgaagccggaaaaatttatagcacaggtaataatctaaactctatgataaagtccgctggagctaacagtaatgaacaaatgttagctaatcagcgttccggtatttttatactgacagatgatataaaaaatccttcatggaaaatcaatctaccaatgaaaaacaaaacatcatcgaccaatcaggagatctgcgatcgctggcttctcatttttaataaatatgttttataa

SEQ ID NO: 76804 - DNA, 378 bp, Citrobacter koseri
atgaaaaaatttattacggcagtatttattattcttcctttggcgagttgtactgtttatggaaacaaatccattaaagacgaaacgcagcaaaatatagcctcaaaaattatcaaaggtaaaactactcaacaagatatccttcatctttatggggaacctcagactaaagaaactaacgatggtaaagaaatgtggggatattccgttatgtccggtgaatctcagttttcaaattacataccgggattagcgttattgaagaatagcagcacagcgcacatgaaagaacttgagatctggtttaaaggtgatgtggttgaacgctatacctttagacaaacagcaagcaaagcttctcgcgggttgttagattaa

SEQ ID NO: 76805 - DNA, 327 bp, Citrobacter koseri
atgaaaagctatgcagagataaccgacttaatacggcaacttaatggtcgagcgcaatacctgcgggataaagggcaggtaaaaacacctgaccttcttgagcgtgcagcgggcgtgattaaggatgcaaaatccaatccgaggatgttcattgacggcgatatttcacctgctgacgccgacaagctggcttctgtaattcgggagttcaacgaggaaacagaaaccccagcagcaagaatggcgcggattattcgcgagaacccgcacccgacaaacatgtgtgacatgccatcggatgacatatctcatggaggtaaatcgtga

SEQ ID NO: 76806 - DNA, 822 bp, Citrobacter koseri
atgagcacaattaccaaagagcgaatgaaagaaatacgagacttcgatacctgcgtaacactggaagagtcagcagagctggcgcgtatcgcgctggcatcgcttgaggctggcagtgacagcaacagccacccggcgcacggcccgctctcaaattaccgcctgtaccgcattcgtgaaatcctgagcaaagcagcagcacaacgcgatggcggcaatctcggctacggaatgtctgacgctgtgaaagcgattgatgaattgctggaagggaggaaggtggagccagtggcatggactgacgaagaggagttacgtgacgtgcgcagggtaggttttggtgaaatgttctcagttgaacctatttccccgaatgctgatatgtgtcgtgtgataccgctctacaccgccccgccagcgccggtagtccctgcaactcttccgtgcgccgttgagttaaagcccggtcttatcattggcaagggctgcaaaacagaaactttgctgactgttctgcaacgtcgcgccgactattacgctgaaattgatgctatgacgccggaagagcgtgcagagcatgacgccaatatcgaagcattcaaagccatgttgccgcagccaacaccgaaaaatattgagatgctggcgagcgcccgcgttagaaatgttacttttcaatgggatgaggatgagcgtaatgctgcggctgactcgtggaacgcctgtcgcgccgccgtgcttaaagaggggcaaatattatctgattccgatgttaatcggtttggtaaatttctggcaaagaaggatggcgtaggaatatga

SEQ ID NO: 76807 - DNA, 174 bp, Citrobacter koseri
atgaaacagggtgacattatcgaaagcgtccacaccggaaacaaattcatcatcgaatacatttctaacgatgggaaaagttttgtgcttgtctaccaggctgatgctaatcagccatctcggtgttatgcggattatgacatcagacgcagtttcaggaaggtgaacccatga

SEQ ID NO: 76808 - DNA, 186 bp, Citrobacter koseri
atgagcaacatcgaaaaactggctgatgatgcgatgttctcatcaatcgaaggctttgcgtcccttgtcgttgactccattgaattcgaattgggcagagaactgaccgaagaagagcatcagcgtgtctacctgcacgtcgaggggactattaacaacgcaacaagcaaaggcggttcagcatga

SEQ ID NO: 76809 - DNA, 285 bp, Citrobacter koseri
atgagcattgttgacgattcacacctgaccgatgaagtggtcaatgcggctttcgaaggaacgaacttcgggagaactgattttcgcaccattctcgctgaaacagtgctcaagcgcgcgtctggttatcactccggctacacggcaacgactatctgtattcgtctcggattgcttggcaaacacgatcgcccgacaaaactcggcctgaccttcgcttttcatcactactacaaaccatgcgttcgtgaagcgctgatgccagttaaggaggccgcccaatga

SEQ ID NO: 76810 - DNA, 231 bp, Citrobacter koseri
atgaaacttaaaatgcacacgccagacggatcggtgattgtcgaaagtaacctggtaacgcagttctaccctgacttcgaaagcggcggtgagttgaccaccatcgaaacagtatcagctaccggggaaactttctcagtgaaagttaaacactcgtttacgcaggtgactggcgcactggctacagcatggcgagttgacgagaagaaagcagaaggagcagcccaatga

SEQ ID NO: 76811 - DNA, 552 bp, Citrobacter koseri
gtgaagttagggcatgagctggcttctgaactgaaagcgtcatgcggtgctgtagacgtacgcagcgtagcgcaactgattagcgatctggctacgcagcttgaagtgcagtttgcccgtagcaatgcgctggctgcaaagctgagcatgattaacggcctcatggatgctgctgaacaggccaacaaacttgcgcaggaagcaacggaaaaactggtacaggagcgtgacgcgctggctgcggagaatgcgcatatgcagcaggtaataggagaggtgcaaatactctactacgaatcagatgggatcgttggttatcacctgaatggtgaggtagcgaagtgggatgacgtgatgcctgatttatgggcagaaacaccagcgaccgacgctttcctggctgaagtgcgggccagctgtgttgatgcggtcaagcagaagattagcgatgcaatcagcggttgctatcaggacgaaatggcggggcttgatgcagcagtcaacatcgccagcgagttcgccgcccagcttcgcaaaggagtgcagtcatga

SEQ ID NO: 76812 - DNA, 852 bp, Citrobacter koseri
ttggatccgtttgctatttcattaattgagtatttaaaatcatcggacgtgaataaattaatatttcacacatcaaatattacagatggttttattgagtcgtataattttcttccaaattttaaaaaaacaatacttcccttattcgaatttaatagagtgatttactccttatacacaacatccataggggattgccaatttaaagatatggatgtgaatcttattcagtctctcaataatacttcaatttacaataagttatctggtaacttgtcaacatttagtgaaagaatacctgagtttacttctttaattacttgtatgagtatgtacttgaatttctcccaaaaaaaagaagtgaaagcattactgttttatgttgcattgtttctaaatatctcaacctttaatcgaaatagacaagaatttgctatttcctacttatttttgcaacgagctattgagacagctttaattcatttctatctatcttctggtgttttagaaataaatgaatatgataggctttcttttagaggtgagcgtaattcaatacaaggagttggtatactgataaatgaatattttgccagaaagaatgaacctgatcttgaaaaaaaaatacgtaagcttaatcacattagaaattgtagtgtattagctcatgggctttatctaccttcaagcgctgattatgattcattataccaagcttcaaaagaatttgtagatagactaatcttgcaagaagaatgcgttgcattttataagatttcattatcatcccttaaaccgctctcaaaagagttagttagagaaagagttatcggtttttttactgatatttga

SEQ ID NO: 76813 - DNA, 498 bp, Citrobacter koseri
atgaacgatcagaccaggggattgctgattgctggcgcttcaatcgctgccgggttagggattggtaggctgagcactgtaaatgggccaggcgaaatatcgaattatagtatggtcccgtcccttgaatccccctatttaaaaggattcacatctgaggctggaacattactcaatgccaaacatgcagttatcgatcctaaaaaaatagcttcttatgctctaaattctgatcatccggttgggggaaataaagcgcgagttttcgaatcagctttgggttataacccatctaatgcaggggtcttagtttccagagttcagcagggagtcctgtctaaccctgctgaattagggctatatgacagtttcggtcaaagactgtccgttgatgtaccgattatcggtgtgaacggagaaactgcgatagtacgtactggttggatatatgagactgattcgttagtacctcgcatgacaaccctctatgtaaaatag

SEQ ID NO: 76814 - DNA, 258 bp, Citrobacter koseri
gtgtctggattaactgacgtgcatattcgccgcccctggtgcgcaaggcatcaagttcggccagcgtggcgttatcaatacgatcacatcaatgacgtgaacgacctgccggaactgctgaaagcgcagatcacgcacttcttcgagcactacaaagacctcgaaaaaggcaaatgggtgaaagttgacggctgggacaacgctgaagcggctaaagctgagatcgttgcttccttcgagcgcgcagcgaagaaataa

SEQ ID NO: 76815 - DNA, 498 bp, Citrobacter koseri
atgcccgtcggcggttggtttaatgttttgaaattgcactatgagttgtcggataaaaatgtgttaggggtcggaaaaacaataataagcgtacttgatggcgacgtcgctggatctattccaaagcaatataagagtctaaaaaaatttttcttaccagtaaacagtgttgagaaatatctaagaaacatattaataacaacccccaataaagtgataaaaaaagaaataaatgatagattttttgatgttgatcccatagataaattattaattgcctatcagcgtgaagaaaacgagttcaaaacaaactctccagaattttataaagaagataatgacgggaaaaggctttaccgtaagatacttgctttcatgcaggacagaaagattagtgaagaagagtttgtaatgaaactctatgaaatattagatgagcacgttgatttcactagcttacatgaaaacctgactcgcgggcttaataaatatgattaa

SEQ ID NO: 76816 - DNA, 684 bp, Citrobacter koseri
atgaaaataacacgtaaagaactacaattaatgaaagaaaccacttctgatggttgcatcatttatttgtctggaccatcatcgttagatactccattggagctattgcgcgccaaaagcatcatcagcgtgaacggtagcacaggctacttactggaaaacaatattccagtatttgcatatattgtcagtgatggttcattttatgaaaaaaataaatcactatttttaaaatactcatcttatgccagatatacttttattagtaatgacgttctcaaacgtgcaaacacttcagaaaaagaacaactactcaatacatgttttgtgttaaatgatatctgcaaatcacggggtgggccgggaaggaaaataagatacacaataaaatcggcaattaacagaagtgtttttatcaagtgttctgcatcaaggaaagaaaagacaattgcattttccactgatgtatatcatggacactttggcagtgcaacggttgcatttggtcaaccgcaaccaacaaccttacccacagactttaatttcatattgaaatcttttgattttcttatgaaaaaatatcgcggaaacattttcaacctttccagtagaactgctataccctatgaagtaatcccctttgcgagtgcagcggaaataatgaatcaaactacactggtataa

SEQ ID NO: 76817 - DNA, 1077 bp, Citrobacter koseri
atgaaaacactcaataatacttatctttcaaggttagaccatttaaggttcttcgcagctgcattagtcattatctaccattgtcgtggttttttaaaatataacaatgaattatcagggccagttgattttctgaaactatggattacaggagggaatagtggggtcagcttatttctcgtcttatccggatttcttttctgcgtgatttcgaacgcaggagctaaaaatatctcctacggcagtttcattaaaaatagggttttacgtatagccccaatgactgtgctattatgcttcattgctatcagtgtcaatcgcgtacattccgatcctatggatatacttcgaatacttacgctgcaattaaacaccgggcatcctacaactggatggggtcaacaatactatcctattggacaaatatggaccattgccgtagaatttcaattctaccttttgttccctttccttgcgttattcatgagaaatgacggagtaaaaaccatgtttggtatgattgccgtcatgctgatggttaaatactcgctggtaacatttaaaggagcgccaatatatggaattttttatcacactattattggaagaatggaccaatttttaatagggatgattgcaggatatttatatttaagaaaagaaaaaattagtttcacagtagccgttgtatttttggttgtggcaatttctggactaacaagcgtcctttattttaataaaaagtcgattcctgattttgtaacattcagctttacaattgaggcggcattttgggccttgctaatatatgcttattgctcagcaagattctcaatgaatcagcgcattgatgccacccttgcatatctcgggggattaagtttttccatgtacctgctccatcttcctatttattatattctgcaaagaaaattaatcccgatggaccctaacccaacaatgcatttggttaaggttattttggtagtaatacctgtaacaattcttgcttcggcattaacgtacgcttatgtagaaaaaccttttcttaaattaagagttaagtataccaaataa

SEQ ID NO: 76818 - DNA, 435 bp, Citrobacter koseri
atgagcaattatgtatacagtccgtcgctgaatcttttttatgatgcagagcttgaagaagaatataaagacgctaatgcctggcctgaggatggaattttcgttagtgatgaggttttcttaactttctccggttccgcaccagaaggcaaagaaagggtctgtggggaagacaatcttcctgcatggagagatattccacctccaacctatgaggaacttgtagcggaagcggatgctgataagcaatcacgtattgatcaagccaatgattatatgaatagtaagcaatggcctggtaaagcagcactaggaaggctaaagggagatgatcttgttcagtataatgcgtggcttgattatctcgatgcacttgaggcggttgatacttcaaatgcaccagatattgagtggccgatatcccctgatgtatag

SEQ ID NO: 76819 - DNA, 624 bp, Citrobacter koseri
atggcaacaaataactttaaagcgttcgcgcttgatcctaacgctaacgttacgccacaggctgactgggaggcgctcccggctttgctgtctggctttaccgctgggaaggcggccagcgcccaggtaaacaaagcacttcgtcagtcgacgacgattgccgcgctggtggggcagtttattgcaaactctggagcggatgcgctggacaatgccgacgttaacgggctggtgacgaaattcacgaatgctttaattagcacgctcgggttaggcacagcctctaagcgtaatggtattacaggatcgttgtctggcactggatatcttaagattccttttctcaacgggtcaacagagagaactttcattattcaatgggggtcagtggcaaatggtggttcgggaacttcaggcagcgcgacttttcctattgtttttccttcagccattgtaggcggtgcgtttggtcctctggatacggaaaatggaggattcagtgtttcctttagcacaaggacattatcaggtttcacggcaatttttcgtgatatatcaaacgcgccatatccccatgtacctactcgtcttcagtcctcaacttactttgtgattggatattaa

SEQ ID NO: 76820 - DNA, 681 bp, Citrobacter koseri
atgagcaagtacacagacttaatcaccaactatcacgccaccagaccgaaatactttgatcacatcgacctgagcacccggccgctgattgacatcacatcagccatccgggggctggttagcgcgtttgacatcgatacagctgtaggcgtccagcttgataccctcgggctctggatcggacgcagccgtatagtcagccagccgataacgggtgtttatttcagctgggacaccgacgggctcggatatgaccagggcgtctggcaagggccgtatgatccggattcaggttatacgtcgctgagcgatgacacctaccgcatcattctgaaagcaaaaatcgctatcaacaactgggacggccgcaacgactctctgccgcccatccttgacgctgcgactgcaggctctggcctgaagatgcagatcgtcgacaaccaggacatgacgatttcggtctgggtattcccggagactgatatttctgatgtgtctctcgaactgatcgccgcaatcaaacagggctatctcaccgttaaagcaactggcgtatgggccggtgatgtggaaacgccttcggtagaaacaccgtccgagggctcaaaattctttggttttgatttagataacgaatacatcggcgggttcgatgtaggagcatgggggactttactctaa

SEQ ID NO: 76821 - DNA, 342 bp, Citrobacter koseri
atgaggggtattatttttctgttagctgtcttctctgcatgcagcgcgtgggcgaatggcttcacggttaaatgtggtggctacactatggttgcaaaccagggcgagttatcgacaatcaacggtgaaagagttacctctcaaaaaatcactgaactgggtaccaatggtttgaaagtagacatggggcttatgcctgccaaagacggtaacaactacggctttgaatacattcgtcgcccaggcaccgaaaagcgtttcctgaacgtccaactgctgcagaacagcatggacgcgccgcgaaacatcggatctttcccgtgtaaaaaagtagccggctaa

SEQ ID NO: 76822 - DNA, 171 bp, Citrobacter koseri
atgaaaaagacaaaggccatagagctcgctggcagcaaagctaaattagccagattgctgaaggtttctaagggggctgtgtcccagtggggggatgagatccccgagctgcgagcgcttcagcttgagaaaattttagaaaagaaaactacagccagacaaaaggcgtaa

SEQ ID NO: 76823 - DNA, 693 bp, Citrobacter koseri
atgattaacgaacgtattcgcgaagctcgtcgcaatgtaaatgtgacacaggatgcgcttgccaaacgtataggccttaccaaagcaacaatttcacagtgggaatcaggcacaacaacgcccaacggaaaaaacctgattaatcttgcggaggcgctgaatgtctccccggaatggctgctcacaggcaagccagccgaaccaagagagatttcatcaaacgctcgcgttgaagggagtttttctgtgtgggactcagcaacgccgttagaggatgatgaagtggaaatacctttctatcaggaagtagagctgtctgccgggaatggtacttacgttgatttggaccgttcagggtgcaaactgcggttcgctaaatctacgcttcgtaaagcaggcgtggacactggatgcgctgcttgtgttagcgtacacggcaatagcatggagcccgttctccccgacggggctgttgttggtgtagacacttcgaaaacgagtatcaaggatggccaaatgtacgccatagaccaggacggtctactgcgcgtaaaactactttatcgcttgccaagcggtattcgcattcgctctttcaatcgagatgaatacgctgacgaagaatatttcaaccatgatgctaacaagataaaaattatcggccaggtattctggtactcagttctgctttaa

SEQ ID NO: 76824 - DNA, 213 bp, Citrobacter koseri
atgcttcgtaatcgtccacaggttattcctcattcatttcactttggcggtgcggtggccggtgctgatcttcggcttgtctcggtggactgcaattcaccgcaccccaaagggaacttactgacccgtattgccgacatcctgtcccgccacggtcccgacgcatggtttagagtcgcgccgttcgacttgtggttaagtatcttggtatag

SEQ ID NO: 76825 - DNA, 159 bp, Citrobacter koseri
atggaagaaaaactgtcttttgaagaagctgcaaaaccgttaatcaaatggttatctgaaaatggtaatccacaccattctgtcattgtcactccgattagtgctgaacttgtcgcaacggaacaaacttttcagaccgaagagtttttgaaagattaa

SEQ ID NO: 76826 - DNA, 483 bp, Citrobacter koseri
atgtctgaaatttggaaacctacccccggatttgaagaccgttacgaggtcagtaatcaggggcgtgtacgcagtatctcgtttttgcaacgctacttactgcgaaacggaaaagaggcataccgccagacgccagtaaaaatcatagcccagcaagttacaaatagcggctacgcactggttcacctccaccgtaatggcgagcgcaaagccaaaacggttcattctctggttgcgggtgcgttcctgccgggcgcagaccagaccgttaatcatatcaacgggaacaagctggataaccgcctcattaatctcgaatgggccagttatagcgacaaccatgctcatgcagtggctacaggccttaatcgtcaggccgtacgcgtcaggaaccccgccacaggccagatattcccctcaatttcacaggcggcaaaagcctgccatgttaaccacaggacagcagcgctatggaaaatatag

SEQ ID NO: 76827 - DNA, 2070 bp, Citrobacter koseri
atggaaaatatagaatttctctggtgcgacttagagacattcagcaaaacacccatcacctgcggcacacacaaatatgccgagcaagccgaagtaatgctgtttgcgtgggcggtcggtgatgaacctgttagcgtatgggacctcaccaccggcgcaccaatgcccgcgcgtctccgtgaaaagctggatgacccaaaggttatgaccgtctggcataacggcggaatgttcgacacggttattttgaagcatgcactaaacatcgatttaccgttagagagagtccacgacaccttagtccaggcgctggcgcatagcctaccgggggcactatcagtgctgtgtgaagtgctgggagtagacgctgataaagcgaaagataaagagggtaaaacgctcatacagctgttctgcaaagagaggcccaaaaacagcaaggtccggcgcgcaaccagcaagacacacccggaagagtggcgacggttcgttagctatgctgggtctgatatcagcgcaatgcgtgaaatttatcgcaaaatgccgcgatggaaccttaacgccaaagaaataaagctctggcaactggaccagcgaattaaccgccgcggtatgtgcatggatatcgagctcgcagaaagtgctctggcggcggtggatgcagagcaaaaacgccttgccaaccgtacgcaggtgatgaccgacggcgaagtgcaggcggccacgcagcgcgatgcactgctcaagcatatcgtcgaatcatacggcgtcgaactgcctgacttgcagaaatcaacgctggagcgccgcatcgcggatcctgatttgccttctgcggtgaaagagctgctacatatcaggctccaggccagcactaccagcaccagcaaatacaaaaccctgctcaaatcagtaagtagtgacgggcgtctgcgaggtacaaaacagttttgcggtgccgggcggactgggcgctgggccgggcgtctatttcagcccgataacctgccccgcccttctcttgagcaggagcagatagattttggtattgatgccctgaaagccggatgcgccgatctgctgttcgataacatcatggagctgaccagctcggcgctgcgcggctgcatcatggcccccgcaggcaaaaagctggtggttagcgacctgtcgaatatcgaggggcgaaaactggcctggcttgctggcgagcaatggaagctggacgcgttccgcgagtacgacgaggggacagggccggatctgtataaactggcctacgcccgcgccttcaatatctcaccggacgatgttgataaataccagcgtcagatcggcaaggtgatggagctgggccttggcttcggcgggggtgttgcggcatttcttaccttcgccctggtctacggcctcgacctcgacgagctggcgaacgccgcgctgccgaatatcccccgcgatgttatccgcgaggctaaaagctggtacgacgaatcggttaaacgtaaggcgacctacggcctgtccgagcgtgtattcatcgcatgtgactcgctcaagcgcctgtggcgccgggcgcatcccgcgacctgcgatttctggtacgagctggagcgcaccgtccgcgccgccatcgccaccccgcaaaaaacgctgtactgcggctatctgaaagtccgccgcgatggtgcatggctgcgcatccagctgccatccgggcgcgcactctgctatccgtccccgtccatcgagaaggggaatatcacctatcagggcgttaactcctactcgcgcaaatggcaacggctcaaaacctacggcggaaagctggtggaaaacgtcacccaggcggctgcccgcgacgttctggccgggaatatgccgctgatcgaggatgccgattacagcattgtactgacggtacacgatgaggtgattaccgaagcgccggacactgacgatttcaacgataaagcgctctccgcgctgctctccactaaccccgaatgggcgcccgatattccgctgaacgctggcggttttgaggcgtaccactaccgtaaggactaa

SEQ ID NO: 76828 - DNA, 303 bp, Citrobacter koseri
atggcctgtaactgcttttcagaagtgaaagaacgcatggaagcgcgcgtaaaagaggtgttgggtgactcggttcattcaatggacgagtgtgattttggtagtcgcgtttgggtactcgaaaaaggcgactactgtgcggtaatgcttccgttcaacgtacggtatcgcaagcgcaagaaaaacggcgatccggagcagcgcttaacaaacgctgacacgaaaatcgcaatcaactactgcccgttctgcggcaccaaattcaacggtaaagccacctcaaatgaggaagttaccgcatga

SEQ ID NO: 76829 - DNA, 204 bp, Citrobacter koseri
atgaaattcatttttatggtgatggatagccgtgcgcagttcgatatagacagcgccaccatcctggaatgctgcggcgataaacaaccctcctggcgcaatctgcgcagagactggggtgatcaaggcgcagttctggtccgcttccgtctggttaacagcgatatggctaccgaccctgaggttgtcggcgtcatccactga

SEQ ID NO: 76830 - DNA, 222 bp, Citrobacter koseri
atgtcatttaaatatcgggacagtccgctttattaccggactgcgcgggaggctttgcgccttgagcagtccggcgagtacgaccgggcggcaaaggtctgggccaaagcaaaccgtgaatcacgtaacgaactgaatcaggactggagcgaacgccggtctgatttttgcctgatgcagaacatgcgcgaaaaacgtaaggcggtgagcgatgacttgtga

SEQ ID NO: 76831 - DNA, 483 bp, Citrobacter koseri
atgacttgtgagcagaccattcttgacatgtgctgcggctctcgcatgttctggttcgacaagcaggacaagcgcgcggtattcagtgatatccgtgctgagcagcatgagctttgcgacggccgccagctggttatcaccccggaccttattgctgatttccgcgcccttccctttgccgataaaactttccctgtcgtcgtgttcgatccaccccacctcgagcgtgtcggtgataacgcgtggatgggtaaaaagtacgggcggctcaacaaagagacatggcgcgatgatttacgtaaaggcttcgccgaagcgttcagggtgttgtggccccacggtgtgctcatcttcaaatggaacgaaacgcagatcccggtaagcaatatcctggcgcttaccgacgagaagccggtcatctggcagcgcaccggcaagtcagacaaaacccactgggtgattttcgtcaaaggtggggaatga

SEQ ID NO: 76832 - DNA, 132 bp, Citrobacter koseri; identical to SEQ ID NO: 76263

SEQ ID NO: 76833 - DNA, 180 bp, Citrobacter koseri
atgccggatggcgacgctagcgcgtcttatccggcctacaggtgcgtggccgtaggcgataagcgcaacgtgaccggcctacaggtgcgtgaccgtaggcctgataagcgcaacgtgaccggcctacaggtgcgtgaccgtaggcctgataagcgcagcgccatcaggcagttaacgtaa

SEQ ID NO: 76834 - DNA, 177 bp, Citrobacter koseri
atgtctggacttatcaatcctcaaaatgccccagaagaatcagcttatgcattactgattgaaatgattagagcccaaagagttcctgtttattcaggaggagatatatctaatctcctctcaatgtatgaccaggctgttcagcacttccaaaagagtagcgatgacgataattaa

SEQ ID NO: 76835 - DNA, 249 bp, Citrobacter koseri
atgatgttcaaaaatgctcagtacatcaaacaatatcttatgtttttcactggcgtacactttaataaaatcatcatcatcattaaaataaatagtaaaaataacagaattataatttatttttatgacaaaacttcgttagctgtatttaccgaggaccacttgaaaggtgttattttatttttcgcctttaatacgatatggcttcgtaaatgcaatttcctttttataaaatcctgcgcccagtga

SEQ ID NO: 76836 - DNA, 306 bp, Citrobacter koseri
atgggattttcaggcaaccatttatctattaccgtcgcgggtgcacttctgattgatgcatttattcagttaatacatgttaataatcagcgtggactgtttctttcctgtcagggtaacgaagcacgagcggcgagttgctatatgatgagttttgttacaggaggtgcgattggtggatttatctcatcctatctctatgcaatatttggatggaatgtagtgctgattagctgtgcaatcatcaccatgattccgttatttatcaaaacaaaaacacgagaaaactttaatgaacctaactag

SEQ ID NO: 76837 - DNA, 1140 bp, Citrobacter koseri
atgtccacaatgaaacccgctatattttcattcttttcaggatcaggttttcttgacctaggcttcgaaaatgccgggtatgaggtggttttcgtcaatgaattccatcctcccttcatggacgcgtataaacactcaagaaaaaaacttggcaaacagccgccacgctttgggtatgcccaagaaagcattgaaactattgagcattcagtgattaatcatagcatgaaaacactgaaagatgaaaatcgcctcgtgggcttcattggcggaccaccatgccctgacttttctgttgctggcaaaaacaaaggcaaagatggtgaaaatggcaaattatcacaaagttatattgacctgataattgaaatgatgcctgatttcttcctttttgaaaacgtaaaaggcttataccggactcttaaacatagagaatttttcgaacaaattaagaatgaactagcttcagcaggatatatcctgcatgaaagattgattaattcaattgaatacggtgcgcctcaagatcgagaaagaattattttagtaggttttcttgataagtctttagccaaaaaattcgaatggagtggccaaatataccctaataaggaagctttccagttcccttggccaacaacaaacacatacgaagaagactcaaatatggaatgcccacaaggtattccagaaaaacttactatagaatactggttcgagaaaaacgatgttatcaatcatccaaacgctaaacatgtatttacggcccgagccggtttagcaagattccagtcagtagaagaaggcgatgatagtaaaaaatcatataaaaggcttcatcgctggagatactctccgacagcagcatatggtaataatgaagttcatcttcatccatacaaacctcgtcgtattacggtcgctgaagcattggcaatccagtctttgccaaaagattttgagctaccagcggatatgactttgtcgaatatgtttaaaacagtcggcaacggcgttccctatatcgccgcgctcggtattgcccaatcaattttgcaacatttaggatacagtaatgaggataacggcatcgaatctggttcaggcgatttcgagcttacccaaaaatacgctgtttaa

SEQ ID NO: 76838 - DNA, 288 bp, Citrobacter koseri
atgaatacgactcttgttgttttagtcctcgccataacaggcgcgttatatctcccctggcgtcttgtgcgcgacggttacaaagaactggtgcagatgtgcctgttttgctcctgtatcgtcacgctggccgctgtatatgccgtgttagtcaatctcgatactccacacccgtttatgccaatgtttatcgcggtaacggcgttcggtgcggctttcgtggctgactgcgctttatctctctggctctatcagcgtaaagctaacgctaagacggctaaccactaa

SEQ ID NO: 76839 - DNA, 243 bp, Citrobacter koseri
atgggaaatatcatcctgatggccgagaaagcaaaaggcgcgattgatgaagaggctgaagtgtatgaatttgagggaatggatgatctgatccagtttcgtaagaaattccctgaacagatgaagtatgaatatcattacatcctttccggcggcacgaaaaattttcggcatatcgcgcttgttgaagccaaccattttaagcagttcaaaaagctggttaatctgtaccaggatcgctaa

SEQ ID NO: 76840 - DNA, 156 bp, Citrobacter koseri
atgaaaaaatttatctgcaaccgcaacggcaaggcggtttttcaggaaggtgatcgggagatggtagccgcttaccagatgaaatcctctccggttccggtgacaccccgcaagctgaaagctgaaatggaggctatcgccagaacagcccgataa

SEQ ID NO: 76841 - DNA, 258 bp, Citrobacter koseri
atgtgtattgatcacgtcctcacctttcccgttcccctggaagatgccagcttgctggcagactactgcgggtttgaagtgtatcccacctacagcacgaaccgggccgatgaaacgccccgtttttccgtggtggcacttcatcgccacaaagccaggctggaaacgttagccgtggccgacacggagaaaagcgcccatgctttccgcgatatggccgagattaccgccgcttactacttacattttcggcggtaa

SEQ ID NO: 76842 - DNA, 252 bp, Citrobacter koseri
atgctttccgcgatatggccgagattaccgccgcttactacttacattttcggcggtaatacgatgaacgattatctatctctcatggaacaggcacgacaggcagaggatttgcgcgactggaaaaccgccgcgcagctctacactcaggcaatggccgttagtccaaaagccagaacgatgcgccagcgccgcgaaaggctgaacctacagcagcgtatcgacttttgcgagcgtaacgcgaggacgtaa

SEQ ID NO: 76843 - DNA, 771 bp, Citrobacter koseri
atgatcatccctacccaggaaacttacgacgagcttcaacgcgcctacgaatttttcaatcaacgcctgtttgatagtgcgctgccgccttgccttatcacccttcagcgcgaaaaacgaacgtatggctatttctcgaatggtcgctttgttggtcgctcaaccggacaaatcgttgacgaaatcgccatgaatccggtctatttctcgatccgcacgatacgcgacacgctttcaacgcttgtgcatgaaatggttcaccagttgcagcaacacaccggcaaaccgggccgccgtggataccacaataaagaatgggcggcgatgatggagcgcatcggcctgataccatccgacaccggccagccaggaggtaagcgcgtcggagagtccatgagccattacatcgaggacggcggcgcgtttgataccgcctgcaaggagctgcttaccacggagtttaaactgagttggctggatcggttcccgccacacaaaccaacgccaccaacgccaaccggcgcagacggtaaagggtatgttgatgacgaagattatgaggacgagggatacggcgacgatggcgagctggacgatgagatcacacaagccctttcgctggtaaacccgccgccagatacgccggtgaataaatcaaaccggacaaaatacacctgcccgaaatgccatacgaacgtgtggggaaagccgggcctgatcctgtactgtggtggcgaacactgcggaaaggcagaataccagccaacctaa

SEQ ID NO: 76844 - DNA, 369 bp, Citrobacter koseri; identical to SEQ ID NO: 12613

SEQ ID NO: 76845 - DNA, 711 bp, Citrobacter koseri
atgaaaattgcagtaatgaactacagtggcagtgtcggcaaaactattatttcgtcatacctgctgtatcctcgcatggctggcgcaaaattctttgccatcgagacaatcaatatgtcggcggcggatttgggtgttgataaagtaatgagtttgaccggggataattttggtcaactggttgaagaaatcgtatttgaagataacgccatcgtggatattggcgcgtcgaacgtagagcgctttctttctaccatgacaaaatacgagggtgcaattgatgaatttgataaatatctgattcctgttaccccggatgataaagcatggcaggaaagtattaagaccgctctcgcgttaagcgctgctggcgttccaaaatccaaaattgttcttctgcctaatcgcattaaagcaactccgcaggaagatattgcttctgtgtatgaatgggcgaaggattctaaaaaagcctctattcataaagatgccgccgtttttgaaagtgaaatttatgaatacctcgcgtatcacaaaatttcgtttgaagaactgctggctgaagatccagaaacatttaaagcgaaagctaaatcctgcactgatgccgacgaacgcgcggcggctgcgcgacgttatcgctggatgaaattagcgctgccggttaaacgtaatcttgatcgtacctttgaaatattaacggctgaataa

SEQ ID NO: 76846 - DNA, 435 bp, Citrobacter koseri
atgaaaaaggcaaccgagttagaacctcgtaacctttcggcagcagtacgaactcgtttagatgagatcgagggctggctggataaaggtgtatcgaggcaagagattgctcaactgcttgatgctgaatatagcttttccgtaacaccgaaagcgctggaaatggcattgtaccgggccaggttaaagcgtaaaaaaggtggattgcacaatccagtaagtacggtaaaaaatggattgcacaatccaaaaccgcaggaagaagcaaaaccggaagatactggattgcacaatccagaatcagaaaagttagttgaggatatgggcgggaacaaagaatttctgtccgataccgattttaaaaaaatcggggatgaggcaaaaaaagttgcgtcctcattcaaaggtagcgtaggtaataaaaaaggtttctaa

SEQ ID NO: 76847 - DNA, 348 bp, Citrobacter koseri
atgccatctatcagtttaagagtgaccgaagcgcaaaaaatcgaccttgaataccgttcggagggcaacgtatcggagtacatcaagcaacagctttttggacaaaaagagagtgccagtgaagtgatcgcccggcttgatagattgctggaacgttcatcttcagagcagcaagccgccggacgagatcggtacatcgaggcaatgttgattgaggtgttattgatacttcgccaggtgagtaaagcagatgcgcagaaagttgccggtggtgaaattcgccggttaggactggagccgtggtcagcagagctggcccaggagagagaggaacagagtcatgaatga

SEQ ID NO: 76848 - DNA, 1578 bp, Citrobacter koseri
atgaatgaagcggataagggcaaaatttgcctgggggcattgctttttaccccccttgttatgtggtttatcgcggcgaaagcattgtatgggtttacgccaaaagatgcgcgtgaacgtctggttttacttattcagcagacttttgatttatggcctttatggggcgctttattagtcggtgaaattattgccatcataggcttaatcatatttttcaaatttaatcaccagatttttaaaggtgcaccatttaagaaaatatatcgtggtacgcggcttgtttctcagcgggctttagcatccataactaaagaaagagagcctcaaataacaatagccgatattccaatccctacaaaagcggaaggtacacatatttcaatagccggggcgacaggtgttggtaaatcaacgatttttgctgaaatgatgaaaggctgtttgcttcgcggaaaaatgcagcgcgtagcagaaaaaaaagatcgtatgattattctcgatccagatggtgatttcctttctcgtttctataaaaaaggggataagattttaaacccctatgatgcaagaacagaggggtgggtgttttttaatgagattaagagcgacttcgacttcgagcgatttggtatatctatattaccgccgtctaattcagcagagtcagaagaatggaatggatatgggcgtttgcttttcaccgaagttgctcgtaaggtttttaacactagtaggaatccaacaatggaagaagtattccattggactaatgaagtaccctttgaagaattagaggaatatgtacaaggtactttagcgcaatctctctttgcaggttcagatcgttcgagtcgtagcgcacgatttgtgcttagtaaaatactaccggcacatttgaaaatgcctagaggtgacttttcaataagagagtgggccaataatccaaaggccggtaatctgtatattacgtggaacgatgagatgagtgaggcattaaaaccgcttatttcatgttggacagatagcttattttctattgttttaggtatgtctaaaagtagatcgagaaaaatatggacatttatagatgagcttgaatcacttgattatttaccttcgttacgtgcggctttgacaaaaggacgcaaaaaaggactacgaatagtcaccggctatcagtcgtattcgcagattatcagcatctatggcagtgatgtagctgaaacccttctatctaatcatcgtacatcagttgtcatggctgccggtcgcctgggtgaaagaaccctagagtttgtctctaaatcattgggtgagattgagggggaaagggagaaaacggggattagccgccgctttggtcagttgggaaccaaaaataccaatgatgatcacaagcgcgagcgggctgtaacgccaaccgaaatcgccacgctggatgatctgacgggttacatcgcgtttcccggaaatctgccagtggcgaaatttgagactcattacgttaactatactcgctctaaccctgtaccgggcattgttttgcgagaaagcaccgcatttgcaggaatgtaa

SEQ ID NO: 76849 - DNA, 2910 bp, Citrobacter koseri
atgctgaacattacgacgattacccgccagcgtatcgataaggttgttgattactatgctgatggcgcagacgattactatgcgaaagacggtaacgcgatgcagtggcaaggcgctggcgcggaagaactgggcttaaccggcgaggtagaacaaaaacggtttgcgaaattgcttgatggcaaagtaacggatgacatttccgtgatgcgtaaaacggccaacagcgaaagcaaagaacgattgggatacgatcttacgttttccgcgccgaaaggcgttacgcttcaggcactggtcaacggtgataaacgtatcattgaagcgcacgatcgggcggtcactaaagccatcgaggaagcggaacggctggcactaggccgctttaccgtcaataaaaaaacgcacgttgaaaacacgaataagctgattgtcggcaaatttcgacacgaaacgtcacgcgagctagacccggatttgcacacccatgcctttgtaatgaacctgaccaaaaccagcgatggtaaatggcgttctctcacgaatgacggcattgtgaactcgcttacgttattgggtaacgtttacaaatccgagctggcaagagagctggagctggccggttacaacctgcgttatgatcggaatggtacgtttgatttggcgcatttcagccaggagcagatagcccaattcagccagcgcagccagcagattgaggccgagttagcaaagaatggtttaaaccgtgaaacggccagccatgagcaaaaaaatgcggccgcgctgaaaactcgtaaaagcaaaggcgaagtagatcgcgatgtactctatgagggctggaaaaaccgcgccaaagagcttcagattgattttgatagccgggagtggaaaggtgcggccaacgacgatatagcgcggaatacgcagccagcagcgctggaaaagcctatcgagtaccaggctgacaaggtaatgacctttgccattcgttcacttaccgaacgtcaatcggtgattaccgagcgggagctgatggacgtggcgatgaagcatggctatggccgcttaaccctcgatgatattcgggctgcgagagaacgggccataacctccggcaacctcatcaaagaagaagcaacatacgcagcggccacgaccaataaaaaacagcagaacgtagcaatgacccgcgaacaatgggtaacggaactggtgaaagctggccgcaataaagatgaggcccgtaaactcgtagataagggcatcacaaacgggcggctggtacagcaaaagccgcgttttaccacacagttagctcaacaacgcgaacgcaacatactgaagatggagcgggaagggcgcggaaagatccagaccccatacactcgcgagtttagcgagggctggttagccagcagaacgttaaaacccgaacagttaaaagcggttatgggaattattcatacccccaaccagtttatttctgtacatgggtttgccggtactggcaaaagttatatgaccaaatcggcagcggattttctaaaagagcagggcgtacacgtcaccagtcttgccccctacggtagccaggttaaagcgcttcaggctgaagggctggaatctcgcacactccagtctttcctccgggcctcagataaaaaaattggccccggctcagtagtttttattgacgaagcaggggtaatcccggcccgccagatggaggaaaccatgcgcgtgatccgcgatgcgggcgcacgagcggtattcctgggcgataccaaacagactaaagccgtcgaagcgggtaaacctttcgagcagcttattaaagccggtatggaaacggcctatatgaaagatattcagcgccagaaagacccggaattgctgaaagctgcgctaaatgcagcagaagggaaaataaaggcgtcgttgacccacgtaaccagcatcgtagaagaaaaaaatcatgatcagcgctaccgccgcattgtcggggattacgtggcaatgccgccgacagaccgggctaacgccctgatcatcaccggcacgaacgacagccggaaaaaaattaatgagtacattcaggccgagctggggctaaaaggccagggtatcaattacccgcttctgaaccgtcttgataccactcaggcccagcggcagcacagcaaatattacgaaaaaggagccgtgattatcccggaacgggattacagcaacgggctgaaacgcggggccgtttataccgttctcgataccggccccggcaataaacttacggtaagcgacggcagcggcgacacaatcgcattttcaccggcgagattttccaaattatccgtgtactcagttgaaaaaacggagctggccgtaggcgaccaggtaaggatcacccgtaacgatgcgcatctggatttagcgaacggcgaccgttttaaggtaaaaggcgtccagagtggtgaggtactgctggagaacgagaaagggcgactggtaaaaattgatgccaacaaacctatgtatttagggctggcttacgcttcgaccgtccatagcgctcaggggctaacctgcgacaaggtttttatcaatatggatacccgatcactcacaacggccaaagatgtttattacgtggctgtcacccgcgctaaacacgaagccgtcatttacacagacgatgagaagaagctggataaagcggccagccgtgaagggttcaaaaccgccgcgcttgagctggaacaactcaaacgctatgccaaagagcagcagcatgatgcccgcgaaaaaggccgagacaaaaccgagccgacgcaggaaaaagacaatgccaagcgtaaaggcaaaggtcatgacaaaaataacgacgagagagcatttacctcgctctaa

SEQ ID NO: 76850 - DNA, 195 bp, Citrobacter koseri
atgggtcaaggtatcaacacgttgtctttagatctggatgacaaagaagcgctggcgctggcgcagtttgttaagcggttgacgtggagtgatttacgggggtgtgccgttgatgatgacgaggcgtatgtcatcaaggatgccgtcgataaattacagagggcaatggccgaagaaggtttttccccgcgatag

SEQ ID NO: 76851 - DNA, 483 bp, Citrobacter koseri
atgcttgatatgcgattaggaaacagcggcgatattcctttcatcatgaacctggtgcgcgatggggtaacatctggcgcatttttctatgccgagggcaacggtcttgaaacagtgagatctgagctacaaagtgtcacccaacaatacagagataatatccccgttggggattatctctttgtctttgccgagaagttaacgcggcagccggtgggattttcactgttaaccggccgcaatgattttgcgggccgggcatctcatcttgagatccgtatgttcgctgttgcggctgacgagcagggtaaaggcattggcaagagtatgcttgcctcaatcatcgaagccacgcccggacaccggctggaagcctcctgtctccccccggccacaaaaatgatgagactgctggccggaagcgggtttaagctgattcatgaaacgcagggcggtaagaaaacgtaccgttttacagactaa

SEQ ID NO: 76852 - DNA, 555 bp, Citrobacter koseri
atgatccagcgtttaaaaaagcgcaactttctctttaaagcggcactggttgccgccgtactttacggggcttcggccccgtctctttttgctgcatcggcgcaagtaggtttctcgccggaaggaaccgcgcagcagctcgttatcaacgttatcggctcggcaaaagataacatcagaatgatggcctacagctttactgcccccgatattatgaaagcgctgattgcggccaaacgccgcggtgtagacgtgaaaattgtcgttgatgagaatggcaatacgggtcgcgcaagtcgtgcggcaatgaatcttgttacgaatgcgggtattccgcttcgggttaacagtaactacaaaatccagcatgacaaggtgatcatcgttgatggccgtcatgtggaaactggcagttttaactacacggccagtgccgagaaatataactctgaaaacgcgattgtgatgtgggacgcgcccgaactggccgggcagtacctgaagcactggcaatcacgctggaatcagggccgggattttaccccgtcttattga

SEQ ID NO: 76853 - DNA, 573 bp, Citrobacter koseri
ttgctggagttgctcgataaagacgacctcgtttcgttttttaaaattgcggtacgcaacaagctgaacatcgttgtatcagggtctaccggttcgggtaaatcaacgtttacccgctccctgctccgggaagtgccttataccgagcgcattgtagtttcagaggacgttcacgaaattgggtctgatctgcatcacgaaatggtttatatgctgtacggcgatcaggatggccgtctggccccggcggtcagcctgaaagcgtgtatgcgtctttctcccgaccgtatcatgatgacagagcttagggatgatgcagcatgggattacataaactcgctgaataccgggcatccgggcgggatcacatccacccacgccgacgatgcaaaatccactttcagccgtattgcgctgcttatcaagcaaaccggcgtcggccagacgctggattatgacgtgattatgaaaacgctgtacaccacgatagatgttgtggtgtacatggaacaccgccagattgttgaggttctttatgatccagcgtttaaaaaagcgcaactttctctttaa

SEQ ID NO: 76854 - DNA, 306 bp, Citrobacter koseri
atgactgagttaaccagtaatattcaagatattcgccaacgcccccgccgtgagcagggggtatggctgacgctcgaaccacttcagcgctacctgagtgatcccgatgtgtgggagctgagaattaacaagtatcagcaggttgtctgtgaaacgtcgaaaggccgtattttccacgacgatgagaaaattacggctgaatatatatcacgcttaaccgacacgctttgtggttataacggactaccgaaagagtccgttaataacgtgcttctgccggacggctcaaggggaattatttgctga

SEQ ID NO: 76855 - DNA, 1155 bp, Citrobacter koseri
atgagaaaagacagagaggaaaacttagattatctcgatgaagaagataccggcatcgaggatgagcgtcagggcttcagcggttcccccaaaaaacgtattgccggtgcgcgggcctttgtcgggctgatggtgttgataggttcggcaatggtgggatggttcatctataaccagatgcacgttaagaagctggccgacgatcccaaaaaggataaagagcaggttatgaccagctctttaccgcgccagtcttttgatgatgtgcccccgactatcgacaacacgccaaaaaatagcgtcgttcctccgttgcagacgacgcaggagtcgcagcagcaggttgcgcgtcaaacattgaataaccagaaaaaggaattatcaccggaagaaaaaattatgcgcgcccggttaggggtgtccttcaacggtgtcgatcctgagaaacaggctacgactgcgaaagaacaggagcgccggtcaggtcaggacaatacagaaaccagctcaaacagccaggcactggcgagccgaatgaaaccggcgcgtatggctgtcgcccaggcatctgtaatgccgcatccaaatctgaccattgcgcagggaacaatgattccttgcggtacaaatacggaactggataccaccgttccgggccaggtgaaatgtactgtaagccgtgatgtgtactctgctgacggtactgtaaaactgattgataaaggggcagtggtcactggcgagcagaatagcggtatccagaacggccagaatcgtgtgttcgttctctggtcacgcttgcgtaacccggatcagaccattgttaacctcgacagcagcggcactaacgctttaggtagtgcgggcgtacctggtcaggtcaactctcacttttgggaacgaatgggcgatgccattttcttctctgtgctgactgatggcatgaaagccggtatcgcgtcgattaacaacaacaactccgatgtgacgtttaacacaacggaaaacagtaccgaccagcttgctactgaagcattacgggcgaagattaatatcccgccaacgctctacgctgcgcagggcgatgccgtatccatctacgtagcccgcgatctggatttcagcactgtatatgggttagaaatgaatgactga

SEQ ID NO: 76856 - DNA, 888 bp, Citrobacter koseri
atgaaaaaacaattaatcgccggtttaattctggtcagcctcggcctctctggtcaggcgctggcgctggaagtgggaaaaggtagcccatacgactaccgtattaaatccgtggtgtataacccggttgacgtggtgcgtattgattccgttgccggtgttgccactcatatcgtggttgcgcctgatgaaagctatgtgacacacgcttttggtgacagcaatagttatgcgtttacccatgttgaaaacaacatgtttatcaagccgaaaggggaagttcctagcgatactaaccttgttctggtcacgaacaaacgcacttataacattgtgttgcactatgtaggtgactacaccacgaaagacgcccagggtaacgttaaagccaactttatcaagacgccgtggagtatgaaaaatgccactctccagcttacttacctctatccatttgaggatatgaaaaaggctaataaaacgctggaaagtaaccgcgtgaaaaaggcgttgaaagaccttcagaacgggccttacaacctgctttataaaatgtcagatgaagatgaatatcggacagtggccccggtaaacgtttgggataatttccgcttcacatacttcaaattccctgcaaatgccgatttacccgttgtgttctatatcggtgacgatggtaaagaacacaccgttaaccagcatccagccggggaatataacaacattgttgtggctgaaacggtagcaaaagaatggcgtattcgttacggaaataaagtcgtgggtgttctgaatatgaattacaacccaaatttaggggcgatcagtaccggcactacgtcaccagatgttaagcgcgtgaaaaagggtgagggggataaatcatga

SEQ ID NO: 76857 - DNA, 717 bp, Citrobacter koseri
atgctgaagaaaaacaaacatcaagcgatatcgcgggaagatctgaataagtaccatgaggaaactcaagggcttgagcgcgatatggttaatgagatccttaattcccgctctcgcgcctggaaaattgccacggcctttttcgtctttgccgttgtgagcatgattactgcggtcggcgtcattatccgttttgcgcagccgttaccggcatacctcaccacgattaataaagatacaggcgaagtatcgcaggtgaaaattacccgcgatgaagcgacttatggcgacgtgatagaccagtattggatttcacaatttgttattcaccgtgagtcctacgactacaacagtattcaggttgattatgacgccatgagcctgatggcttccggtgatgtagccgatgaatatctctccatgttcaaaggcccgaaccgcattgataagcggttgggtgactctgaaagaacgaccgttcatatcaactcggtgatcaccgaccgcgaacacggtgttgccaccgttcgctttaccacgcagcagcgcattcgccagcgtccgaaccctgagccgccgcgctactggattgccacgattgcgtatgagtacaaagcgttaccaatgaccgcgcagcagcgctatatcaacccgcttggcttccgtgtaacgagttaccgtaagaacgctgagaacgttggcgcagtgggaggctga

SEQ ID NO: 76858 - DNA, 171 bp, Citrobacter koseri
atggtgcatttcttcaaatacacggcaatggcacttatcgggctgctgttggccgcctgttccagtagcccgacgccgccgccagaacccaacatgaaaaagttggttgatgttaataagacgtatcccgccgagctgtatcgtgcagatgccgctaacaacggagagtaa

SEQ ID NO: 76859 - DNA, 1044 bp, Citrobacter koseri
atggccttttcatttacaacggatattttcaattacatggatacggtcacaaaggaatttgtggcctctaatctcggagttgttatatccaccatttcaccggtaattgggttggcgttgatttgcaaactcaccctggacgggctgtttacattagcccggccacacggtgagccgctctcatcgttgataaaaaaattcattgtgtggtcgatgataatcagctttgccagcgcgggcgggctgtatcaaacccaactggctgatgcggccatgaagatcccggatgagttttcctcggtactggttattaacggttcgtccggtggcactgaagatgcaatgggtaacaacatcgacaaggccatccatgacgggatgcaggttgcgcgtactgcgtttgataacgccgatatttatagcggttccgggttggcgtcattattcctggcttgcgcggtcattatttccacggtgttgatctgtggtatcggggccgggctggtactgatggcgaagttactgctggcaatcactgtgtgctttgggcctatcttcatcttctgcctgttgttcaagccgctgtatggcatgttcaataaatggcttggctcgatggttaactatgggctggtaacaattctgctgtcgatgctgtttggcctgatgattaagttctatcaaaaagcgctcgatgccgtcaccgcttccggggctgacagtagcctgttagggccggtttttgcttgtctgctgataatgattgtttcttacctgatcctgatgcgcattcctgaaatagcctcccgttggggggatggtatctctgcgggtattcaggagctgatacctaacgccggtggcggtggccgtggagctggcggtggtggcaatcagcctggtggtcaaaaaggcgctacaggtgccgggggcggtactggcgctaagactgcggcggctacggctgccggtggccccggcgcgggagcggccaccgctgcgggttcccaaatgcagggtttcgcaaagggttcacggcgctaa

SEQ ID NO: 76860 - DNA, 237 bp, Citrobacter koseri
atgaaaaaactgattttacctttagctcttttcctgctggccggttgtgattctgaacatcctgtttcctggtacaaggaacacgatcaggagcgtaaagcgatggtggaaaaatgtcgtgatgatgcggcgctcaaagtgaagccggattgtcagaacgcgctggaagcagagaaagatttgaaagtgtttggcaaaagtgatgatggcctctcaatgccaaaagtcacgccctga

SEQ ID NO: 76861 - DNA, 708 bp, Citrobacter koseri
atgaaaaagacacttgcaagccttgttttagctctggctatttcgccggttgcagttaatgcgcaactggtagttaacgatcctgcaaatctggcccaggcgcttcagcaggtcacattaatgacgcagcaaattgaacagctcaaatctcaattgctgaagcaggagcaaacgctggcttccttaaccggcagctctggtatcggtaatttgctgaatggcgatattagtacgctgaaaggcaatttaccgtctgactggacgcaggtatacagcgacgccatgaacagcagttcaggtatcacttcatctgctcaatccatgctgaaggaatttcagtcgcagattgacggtatgaaccgttccgaagcgatgagtttcattaagcagaagctggcggagaaaggggcgtatgaccgtgtgatggcgcagaacgcttacaacaatgaaatggcggagctgaataacattcaggagctgaccaatcagattgactcaaccacggacatgaaacaaatcgctgaccttcaggcgcgtatccagaccgcgcaaggtgctattcagggggagcaaacgaagctgcaactgatggcgatgctgcaaacctcgcaagacaagattttgcaggaacaaaaacaatacgcccagaagcgctttgtcctcggcgctgacggtgaagatctttccatgcctaacgtaacggaataa

SEQ ID NO: 76862 - DNA, 2631 bp, Citrobacter koseri
atggccgtagcggaaatgaaaaaaaggggggtgaaagatttcaaaaaagaaccttcctctttgaaatatattccttactcctaccatgtgacgccccatgttatcagtacggtaaatggggagtacctttctatatttaaaatccgtgggcgaacccatgactgtgcctctgatgccgaactgattaagtggcacgctgatttgaatcagcttttaaaagggattggtagtgagcatgtaaagttatggactcacttacatcaccgcgaaattaataattatcctgacacgcattacaatatgacgttcccgcgtatggtgaatgaatattatcgtgatcagtttgatgatacccccatgatggtaaatgacctgtacctgacggttgtttataaccctgtgggggatgccgctcaaaagatgctcgcaaagtttgataagccatcggctagcgagctgcgcgaaatgcaggctgatgctattagtgcgctggaagatatttgtgagcaggtcatgaactccctgcgtccttatggcattgaccgcttaggctactacttccgtgacaaacgggggaacgtcattcctgaacagaaaaaagatgatgcagaagatgatgaggatattatcgatctgcgtgaagatttgctggccgatgtggaatatcaggacgttcaggaagataaagaagtctttagtggcactcaacacacctattctaaagcgctggagtggctctattacctcgtcaatggtgagtgggcgccagtgccggtttgtcgtggccgaatccgtgaatatttggctactacccgcccaacttcttcattttggggggatggtatcgagattcgcggtaccgacgaacgccgctatacgtctgccgttgaaatccgggattacgattccgatactgagccgggtcagatcaatatcctgatggaagcaccgtttgagtttttgttaacgcaaacgtattgctgtatgtcccagcaagcggcaagaacttacctcactaaccagcaaaaagcactactggaaacaggcgatccatcctttacgcagataaaccagatgaatgacgccgttgatggcgttgtttcacgtacctttatcatgggctggcatcacctgacggtacacacctttggcaagacgcttaaagaggcccgttcaaacgccggtgttgccagaaatatgctgaacaactgcgggctgattgccagccaggtagggttagcttcagaagcggcatattatgcaaaacttccggctaatcaacacctgtcgccacgaccttgcccgctgaatagctggaattttctttgcttctcccccttccataattttatgtccgggaaagcaaataataacccgtgggggccagcgctgacgctgttcaaaacggtggcaaatacgccgctgtatatgaacttgcatgtaacgccagaagatgaaatgtctttcggtaagcgaccgctggcgcatacgttaatgcttggacgttcgggggcaggtaaaactacgctgcttaacttcctgctgacgcaagcgatgaagtataacccgcgcatttttgcctttgaccgcgatcagggcatgatgccgatgattaaagcgttacacggtcactacacggttctgaaagagggcgttgcttccgggtgggcacctctacagatgcctggcaccaaagttaacattgcattttgtaagcgcctgatgcgcctgtgcgctgaaattaccaaaggcagcgtactcgatgctgatcaggttaatgaccttaaccgcgccgtcgatgctttgatggatgagaactccctcattccgacagatttacgcaccgtggatatgttaattcagcagatgccgaatccatatcaaacagcgggcagtaaacaaacactggcgtcattgcttgttccgtggactcgcggccatgaaaacggttggttgttcgataacgattcggattcactgaatcttggtgaatacgatatttacggctttgacctgacagatttcattgttgcagataatgagatcccccctgcaacacgtactccgctcctgatgtatctcaatttccgtgtgcgtcagtctattgatggccgtcgccgtgtgattcaggtattcgatgagtttcaccagtaccttgacgatccaattatgagtgtggaagtcaaacgtggccttaaaacagaccgtaagaaagatgcggtttacgtattctccacgcaagagccgaacgatgcgctggatagctccatcggtaaaaccatcatgcagcagtgcgtaacgaaaattcttctggaaaacccggatgcggattatgaggactacgttactcgcctcaaattgacaccggcagagtttgacgcgctgctgtctattcctgagaactcccgccagttcctggtgaaacaaggcagccaaagcgcgatggcgcaattcaacctggccccgcgcgttaagacgccggagaacttcaggaagctggataagatccttagcatcctgtcaggggaaacccaaaacgccgaaacactggcgaaaattattgagcaaattggggatgataaccctgataaatggctcgaaccctactggaaatctgtactcgcagcgtga

SEQ ID NO: 76863 - DNA, 315 bp, Citrobacter koseri
atgaatttatccggtaaatatcctttatttaaaggcgctacgcgactgccgacatttgccggtgttccgcgaacagtaattattgccaccttcatattttgtgcgacgttatttatgacgatccacctttgggccgtagttctttttggcttgctgtggtttattgagttttgtatcagcaaacatgatgaccgtatgtttcgtattatatggctggctatcatgacgaaagggctaaatatgattaactccccgtttactaaactgtggggcggctctagttactcacctactgattatggagataaaaaataa

SEQ ID NO: 76864 - DNA, 291 bp, Citrobacter koseri
atgaatacagcgattaaacgttttttcccggtggcaatgttcatgatggttgctctgtgtgttcctgagctggcgctggccgccggtgcagataccggtgaatcatccctgagttctgttcagtcttggatgatgacgtggattccgattgcggccaccgttcttatcatcgcgagtgctgtcgcatggatcgctcatatgctcccggcgagctgggcggttcgtattgttatcggtctgattattatcggttccgcgtcttaccttgttggccttttcgggttgagttaa

SEQ ID NO: 76865 - DNA, 318 bp, Citrobacter koseri
atgcgcgtttatctcatcttgttgaagcagttagaagaagtattcaatcaaaacaaagttgttcggatcgcaattcaacggatggataaaaagaaatggataccgctttttgatgtgaaaaatagtgaggggggcgtaatcacttgctccctgagagttcagtctggagagggggttagaacgtgggccgatctgcggatactggccgacatgctgagagacgattttaatgcaagagaagtggggcttttcctggatgagcctgattttatttttcctgatgatggagtgttagacaaagatgaatacagcgattaa

SEQ ID NO: 76866 - DNA, 741 bp, Citrobacter koseri
atgaagcaggttgttgcccttttcccactgttgattgctggccttttggatgccacacccgcaaatgcggaactgtctgcgccggttatggctctggcaaaacgttgtgcgccagaagtgcatcctttaactattgggtacctggttagccatgaatcgcgcaacaacccatacgcgataaacgtcaacgttcctaaaggaacaaaatcaccgttagccagacaaccgcgctccctggatgaagctgttaaaacgacaaaatggctaacggctcatggttataactttgacgtaggtttagggcaaatcaactctgcgaatttcccaaaattgaatgtttctgccgcagatttgtttaatggttgtaaaaatctcgaagctgctcaatacgttcttaattactgctaccagctcgcaacaaaagagtatgcgccggggcagtcagctttgagacacgctttatcttgttataatacgggttcactaaccgccggatttacaaacggttatgtatcaaaggtggttgctcaaattgggcaatcaaaacccgtaatccctgctctgaaagccgatgatggctccactgatgtggaaagtgttgatacagctatagatgctgtgccggtagatgctgctgatggtgaagaacaaccaaaagacgccggtatgactgatgcctttagtggctcggataaagacgcttttggtgcatctgatggtgacgctttccggcagaagtag

SEQ ID NO: 76867 - DNA, 237 bp, Citrobacter koseri
atgtcaagacaagatgaaaagaagcacaaaacagagcaggagcgcgaaacatcagtgcctaaaagaaaaatcatattcgtacccttgcagtcagaaaagagtcccaaaggggagcctcgctaccgagatccagccaatccatttaacacatgggttggaaggggaaagcgccctgactggctaaaaaaatatcttgacgaaggccgcgagctttcggagtttgagatcgtagaataa

SEQ ID NO: 76868 - DNA, 438 bp, Citrobacter koseri
atgagtaaaattattgattttcctaccggaaaaaagagggagaaaagggccaaagcaatccgagcgcgtcgtaataaagaagcgcagcagcggagcgaaataaccccctcccaattttggtgggttaagaaaataaagttactcaccgtgattaaacagtcggcatgttttctcttaatatatttagggttattaactgccgacatccttatctatctcctttttattctaggaaaactcctaaaattctttacgatgattggtatcatcgcggtgcttctgtttctggtcgtggaatataggaatgattggcattatacgcaatctgcattccatgccgcagcaatatttgttggcctgatcgccctgcgcatcgggcatgacaaactactgaatggcctaataaggcttaaatcctatctatccagaaaagggtga

SEQ ID NO: 76869 - DNA, 318 bp, Citrobacter koseri; identical to SEQ ID NO: 21468

SEQ ID NO: 76870 - DNA, 315 bp, Citrobacter koseri
atgaaaactaaaagcatcatcttcaccgcagccctcttactgaccggctgcgccagccagtcacaagttgaccagctaaccaagcaggtgaatacgctcagaacagatgtgtataacctacagattcaacagcgcaatgacacacaggcgcttcagcgcgaagtacagaaatcgcgccccatcggagtttgctatcttgacggccaaccctattcacaaggggcggtcattgctggccgcatttgcgccagtaatggtgtgatcgtcaatggcagaccgacagaagtttcatggcaggtttatcaccgccgctaa

SEQ ID NO: 76871 - DNA, 726 bp, Citrobacter koseri
atggcaggtttatcaccgccgctaacaacgcgcgttcggggcttcggccccgttttttatggtacaggtagcatggatatactttcccttttcccctctaacgtaatcgcattgtgggccgtgtcatttgcttttctggccgtcctgtattggtggaagatcaccgccagaaaacgcagacacaaacgcaagcaacaacaagcccggcgtgtactcgcaaaaattcagaccctaccggcgttcggctacaagatcgcttatctcaggaagatagaccctttcacctttgaggaactgttactggaggggtttaagtcgcatggcttcagaactatcagaaacaaacgctataccggtgacggaggcattgacggccaggtaataatcggaaaacatcgctatctcatccaggccaaacgctatcgcggccatattgctttacagcacgttcaggagttcgatacgttgcttaaacgacataactgtcgcggtttgttttgccataccggaaaaaccggcgcagcgtcaaaagctgttagcttcgccagtgagcggatggagattatcagcggccagcgcttgattgatttactcacgcccggcagctccttcaccatcgcaaccgcaccgcagacaatgatgaggcgtaccgcagcaacgcgaggaacgaacatcattgtcgaggaagcggataaaaatacaaccgatagtatgagagtcaattaa

SEQ ID NO: 76872 - DNA, 402 bp, Citrobacter koseri
atgaagtcagtaactatagaagcaaaaacttttgctgaaatgttaggaataacagaaggtgagttaatcttcgccattaagacaactggcacatttaaaaacaaaaccattccacaacctcatgagccacataaatcgaatagcagatttttatattctgacgtaatgaaatttatcgaatcaataaaagacaaagaaaacttacaacgaacatacttgatgcgtttccgtcgatgcagctcgttggacactcttgaaaaagtatttgataacttacgcgataagctatcaggtaaagaactggatgcaatgatgagcgcctcagaccatcggagagccgaaatcactcataatactttatgggataaagttccggcttccgcatggaaaaatgtaaaataa

SEQ ID NO: 76873 - DNA, 438 bp, Citrobacter koseri
atggctattagcgaatcatctctaggcaagcagatacttgaaaagataaatgatcatgatcgtttaaattctaaattgcttttaagaattaaaattttaaacgtgcttgtgttcgttattctttttgcaataggagataagtttaacgaactagttatatgtgcgattgctttcgttgttttctttgtgctaaccggtgtgtatttgaagtgcaagatggttatttcatcgtcgttaatatttgattatttcgaacgtagtgctgttgacgaggagtttagaaacttttttatggggttatttaacagcaaaaggtttcttacgatccgggatgatagaaagaaaatccatgattatatttatgagcaagataagaagtttgaagaattgaagaaaatagaaactattaatcatggtatgaatggacgtagtgagtaa

SEQ ID NO: 76874 - DNA, 327 bp, Citrobacter koseri
atgaagcgtgattatattcctgatgccggtgatattgtatggatggattttaatccgcaagccgggcatgaacaagcgggccatagaccagctttagtgttaagtcctgcggtatataacggcagaatagggctgttattgtgctgccctatgacaacgaaaataaaaggttatccattcgaggtgcggaacggagaggggagtgctgtactcgctgaccaggtgaaaagtcttgattggcgtgaacggggggccgtaaagaaaggtaaagtgtctgcggctgtgttagctgaagtcaggtctaaattaaaagtattgattggatag

SEQ ID NO: 76875 - DNA, 258 bp, Citrobacter koseri
atgctgaattttttgaaaaaaatttatagctacctggagtttttaggtgctcttatttgggttggtgttgggttgtattccatctggttagggtttagtaaattatttaaagacaactcaatctctattggtggtgttgaggctatatctttacttgatacaactccgtttgcaattatgtttattttttgtggggtgctcatcattacatttatatgggttgggtatataagtaagagactaaaaaatgaagcgtga

SEQ ID NO: 76876 - DNA, 246 bp, Citrobacter koseri
atgactcaagtaataattaaaaaatggggtaatagtccgtctgttcgccttccttctgcgattgtgaaagccgcttcgttaaacgttgatgatgtagtggagctgtcagtagaggacggcgcaattaccatcgttcctgttaaaacgaaggagtattcactggatgcgttgatggccggtgttactaacgaaaatattcatgaggaaatctctttcggttctcctgtgggtaaagaacttttataa

SEQ ID NO: 76877 - DNA, 585 bp, Citrobacter koseri
atgaaaataggctacgccagaaagtcaaccaaagagcaagacacatcccttgagtatcagatcgaggctttacaaaaagctggctgcgaaaaatggtatgcagagcaggtatcgaggggcggtaataagcgcctgaaaacaggtacaccagaattggaaaactgtctgaaagcgcttcgcgccggtgacacactggtagtatgggcgctagaccgattaggtggcactctcttgcagctcttgcagctcatgaatgagctacgcagcaaaggtattcactttgagagcctcaaagagcgcatagacacacaaagcccaatgggtgaaatgtactattccctcatcgctattttttccaatttcgaggtagccagaaaccacgaaaggacaatggccgggcttgcggccgcaaagaagaaaggacgcattggaggcagaaaaccaaagctatctccacaggacattaaagaaattaacgcgcttgttaaatcgccagaaattacggtaaaagagatcgcggcacgttttaaggtttcacgtccaacgatttacagacatattacccccgacagcaatactgattaa

SEQ ID NO: 76878 - DNA, 885 bp, Citrobacter koseri
gtgacagacaaaccattaccagcgaagcaaataaaaacggtaaacaccggcatcgcaattaaagagaatcccccaaaaggggatgatatggcgtttactcactcgatattgtgtcaggttggcctacctcgttctaaggtggatggccgcgagtttatgaggaaatcaggcgatgcctggctggtcgtccaagctggctggcttgatgaagggagcgggcctgtagaacaaccgatcccctatggttcgatgcctcgtttagcgctcgcatgggtatcctcttatgctctccgcaaaaagacccgcgaaataccgatcggtaagagtgcaaacgaatttctgcaattaatgggcttatcaggtggcggcagacaatacaaaacgttgcgcgaacaaatgcacgcgctggccgcttgccggttgcagctcggatttaaaggacgttctttcaacggtcagcccgtagaacaattcgatgcctggcagaaagacgaccaaagcggccagctaagtttatggccgggcgtgatgaccctatcagaagggtatttcaatgggctaattgatagcgccgttcctctcgataaccgcgctctgtacgcgctaaaaggctcggcattgtcgttagatgtttatacgtggctggcacatcgtttacaccgcatcgagggccgcccgattaaacttcactggatgaatttacgggaacagttcgcccaagagtacatgggtaaagaccctgacaaggatttcaaaaagaaattccttccagctctgcgcgacgttctgaccgtatacccacaggcgaaggtagaaaaagttaccgggggaatattactttacccttccccgccccctatcccattcaaggaagcaaaaaaatag

SEQ ID NO: 76879 - DNA, 183 bp, Citrobacter koseri; identical to SEQ ID NO: 22499

SEQ ID NO: 76880 - DNA, 429 bp, Citrobacter koseri
atgaaaaaatctctattcagtatcatcctgctggctaccacgtatcaggcaaacgccgaaccttgcatggtgatctttgaacatggtcagttaattacattacctgcggctgtcacacaggctgaccaagtgaaaggtatgtcaggtgaaaatcacagcaccggcttaatcctcgcatggaaaacagcagaaccccgcgctgtctggatgaaagatacgccaaacccacttacagcggcgttcatcggtgctgatggtgttatccagagtattcaggacatgcagcccaacaccgacacagcgcactcatcactacatccgacgatagcaatcatcgagatgagaacagaaaaatttaagcagttcaggttatcaaaaggagacaaaatcatatccagtcaatgtttccccctcaaaaatcgcccgtaa

SEQ ID NO: 76881 - DNA, 552 bp, Citrobacter koseri
atggggttagaggatatggttacatcagtgactggcgcagacacaataataattctgcgtgtcatggtagtgttgtgtggggtaatcctcttttcagcttcagtaccgttttcagaagcaaaacattggaaatttattaaaaagaatcccgatatattagatgataatctaatgaatattcttttttatgaaaaaggctttttagataaaaagataaaaacagaaatattaagagggatagttttagctttttcatcattgattgggattctttttaccatctttgaggtaaatcaaataatggacgccgggagaatgttttatattttatcttcctatttagtcatcgcttataccattcgctgtattgttgactcgctaggttggatttttagcataaaagatataaagcaacgctatgccagtaactcagatggaataaaaaaactacagggattcatgaaacgtaattctgttagtacgttaattcaatcagcttttggcactgctgtatcaatactcctgcttttacaaatttcttctcctgcctaa

SEQ ID NO: 76882 - DNA, 273 bp, Citrobacter koseri
atgaagttaatcactctactgaaaaagcatttcgatattgaggaatgtaccgatgtggatagcaccgtaaaccgtgaggtttatgccatatgggtttatgaaaagggcgaggactgcgagccgcttttaatcctcaaagatgcgcaggatcttatgggggtggatggttggcttgtcgggaatatctattccacgttgcaacatggcttattgctacagcatgaacaattaaaaacaatgatccgaaacggtgagattaaaagtagcttctag

SEQ ID NO: 76883 - DNA, 360 bp, Citrobacter koseri
atgagtcttatagatttaatcaaagataacactcctcaaattgtcgagtttgttgataaggctgaatctttatttctttattttgttttgtttttgttttcccttgctgtatttattgttttcattggatatatatatgacgaaataaaatcaggtgaggctatagataatatttttctttgggttggcgggcctgtagcggtggctattggtttctttcttataactagttttagctacagtgtatatgtcgttatatcaggattgattatctctattgcgggtgcattgttttttattgggatgctcattcttttttttacatacatagtcccaaacttaaagaatctcaatgattaa

SEQ ID NO: 76884 - DNA, 216 bp, Citrobacter koseri
atgtcagtaaaagatttctcccctaccctggaaattaaattccatcgtcgccgctggcgtatcatggtcgggcgttcaagcctggcctctttccgctccgagcaggacgcaattgatgctctcaataaacgccgctcattctatgagtattgggccggttctgccggtgtacaggcagagaacacagagccggtgattgtccacgtaacatattga

SEQ ID NO: 76885 - DNA, 825 bp, Citrobacter koseri
atgttatctagccgttttcgttctgcaaatatcctgcgttctgaccgccctcttaacgatgatcagatcatgcgttatgccccgtctatctttgccactgaagcgcatgaaagccgctccgaccgttacgcctacattgcgaccagcgaagtattaaatggtctgcgtgataacggttttcatccattcatggtttgccagactcgcgttcgtaacctggataaacgcgaacacaccaagcacatgatccgtctgcgtcatgctgggcaaattaacggcactgaagcgaaggaaatcatcctgcttaactctcatgatggcagcagcagctatcaaatgctggccggtgtattccgtttcgtctgccataacggtttagtgtgcggtgataccgttgctgacattcgtatcccacacaaaggcaacgttaccgagcgtgttattgagggcgcttttgaagtgctggatcagttcgataacgttgaaaaccatatggatgctatgaaatctgtcacactgaatgcgctggaaaaacgtattttcgctgacgcggcgttagcactgcgttatgacgagaaagacggccccgcaccaatcgccgcgagccagctccttgaggcgcgtcgtttcgaagatcgcaaagatgatttgtggacaacgtttaaccgcgtacaggaaaacatcatccgtggcggtttgagtgccagaactaagcagggcaaatcaacccgtacccgcgccgttaccggaatggacaaggatacttctttaaaccgcgctttatggattctcagcgagcgcatgaatgaactcaaagccgcttaa

SEQ ID NO: 76886 - DNA, 480 bp, Citrobacter koseri
atggcttcaagaggtgttaacaaagtaattctggtcggcaatttaggccaagatcctgaagtgcgttatatgccgaacggcggcgcggttgccaatattacgttagccacgtctgaaagctggcgtgacaagcaaaccggcgagatgaaagagcagactgaatggcatcgcgtggtattgttcggcaagctggccgaggtcgccggtgaatatctgcgtaaaggttcacaggtgtacatagaaggccagctcagaacacgtaaatggactgatcaagcgggcgtggagaagtacaccacagaggttgtggtcaacgtcggcggtactatgcagatgttaggcgggcgcccacaaaacgcttctcagcctggtaatcagccgcaagccggccagcagttcagcggtcagccacaggccaccggcacagcggcagcgccgggaaacgagccgcctccgtttgatgatgatataccgttttga

SEQ ID NO: 76887 - DNA, 303 bp, Citrobacter koseri
atggcagtagaacgcatttcccctgaagaatggcagcgtatcgcaccggcattacgcacatgcagccaggtaacgatcgatatggcatacgccgtactggttgacggtcgcaaacaagtcgatgtggctaaagagttcgaccggtcaaagcaaacggtcaatgctgcaatcaggcgcgttactgcgatttttaacgaagttatcccggaagatgagcagttagaatttgtgcaagtctggttgccgccagagctggcgaagcaggttaaagaaatggctaaaccatatcagaataaaaattaa

SEQ ID NO: 76888 - DNA, 423 bp, Citrobacter koseri
atgagcgcatacgtagtatctgataaagccatttctactatcgttaaaactctggtactgaccggcacacttcagcctgtcgaggctgtttcatttggtcagatgatgcttaatctgaatacccattctgttaatgttcgctatcaagaaagtagcccggcgcacgcttttgaatacagtgaaccggagctaaatattaacgatccaaaaacacaaattcaggtgattgtctgcattgatgagtatgaatatcagtcctgcgagtttgccgaatactatgaaacgatggtgcatacagtcctcaaagctataaaatcagcgttacatgaggcttatactgaaacattgcctaatcccgcccggtggaaagctaaaaaatcctatgaactgccgggatactcagaagctgaatggagtttatga

SEQ ID NO: 76889 - DNA, 297 bp, Citrobacter koseri
atgccctatattgatattaactctttccgcccgggtgtatatgaaatagtcaaagaaaaattcaaccttaattttgatgaggttgtttttattgatgacatcaatcgagttgctgaagtttgcaaagcgttaggtactgggtttatcggggttcctgcatccatggctcataactatcagcgagaagaaatggtcagaacaggtgcaaagtatatggtaaatcgttttactgatattacagataaactcattcatgaagttgacgaacatctggcttcgtcagacctctggaaataa

SEQ ID NO: 76890 - DNA, 783 bp, Citrobacter koseri
atgccatgggaatggcacaaacctttattcgaaaaagcaaaagaactgggaatcactatttttagtagtccgtttgatcatacggctgttgacttactggaggagttgggcgctcctgcatataagatagcttcatttgaagcaatcgacctgccattgattaaatatgtagccaaaacaggtaagccgatgattatctcaaccggcatggctgacgaaaaagaaattcaggaagccattaatgctgccagagaaggcggctgtaaagaactcgtcgtattacattgcgtaagtggctacccggcacctgctgaagactataatctggcaactattccagatatggcagagcgatttggtgttattacaggattgtctgatcatactattgataataccacggctattgcttctgttgtccttggtgcaaatgttattgaaaaacatgttacgttagatcgtaacggtggtgggccggatgacagtttctcgcttgaacctgatgagctgggggctctttgccgcgatgctaagacagcatggcaagcgttgggccatatcaactacgagcgtaaagagagtgaaaaaggtaatgtgaaatttcgccgttctctctatatagtgaaggatattaaaaaaggtgaaaaactaaccagtgagaatgtaaagagcatcagaccgggttacgggttggctccaaaatattatgatgaggttatggggaaaactgcaacgcaaaatcttattaaaggtactccactcttggaggatcattttaactaa

SEQ ID NO: 76891 - DNA, 423 bp, Citrobacter koseri; identical to SEQ ID NO: 76888

SEQ ID NO: 76892 - DNA, 1395 bp, Citrobacter koseri
atgacggacaatgccggggctgccgtacaggcgctgctgggcaaactgctggaaatctatgatgtgaaaacgctggtggcgcatctgaatggcgttggggagaaccactggagcccggctatttttaaacgcgtcgtggcgaacgcaacggcgtggcatcgtctgagcgagagcgaatatacgcacctcaggacattgttgccaacgcctccggcacaccatccgcattatgcctttcgttttgtcgatctcttcgccgggatcggcggaattcgccgtggctttgaagcgataggcgggcagtgcgtgtttaccagcgaatggaataaacacgcggtacgcacctataaagccaattattactgcgatccgcaacggcatcatttcaatgaagatattcgcgatattacgctgagccaccgcgacggcgtgagcgatagcgaagcggcggagcatattcgccagcacataccggagcacgatgttctactggccggttttccctgccagccattctctctggcaggggtatcaaagaaaaacgcgatgggacgggcgcatggtttcgcctgcgatacgcaggggacgctctttttcgatgtcgtgcgggttattgacgcccgacgcccggcgatttttgtgctcgaaaacgtcaaaaacctgaaaagccacgaccagggaaaaacgtttcgcatcattatgcaaacgcttgacgaactggggtatgacgtcgctgatgctgcggataacgggccggacgacccgaaaattattgatggccgccattttttaccccagcatcgggagaggattgtgctggtggggttccgccgcgatcttaatctgaaaaccgattttacgctgcgggatattgccacccgctatccgcagcagcgcatcacgctggcggagctgcttgaaccggcggttgaagcgaaatatgtgctgacgccggtattgtggaagtatttgtaccgctacgcgaaaaagcatcaggcccggggtaacggttttggctatgggatggtctatcctgcgaatcccggcagcgtaacgcgcacattgtcggcgcgttactataaagatggcgcggagatactgattgaccgtggctgggatatggccgcaggagaggcgaatttcgacgatccggtgaatcagcagcaccgtccacgccggttaacgcccagagagtgcgcgcggttaatgggatttgaatcgccgcagggatatcagttccgcattcccgtttcagacacccaggcctaccgtcagtttggtaactccgtcgtggttccggcatttgccgcagtagcaaaactgctggagtcgagaattaaacaggccgttacattgcgccagaaagagagccagcatggcggacgtacacgataa

SEQ ID NO: 76893 - DNA, 912 bp, Citrobacter koseri
ttggcaggaagtagtttgctgacgttgctcgatgacatcgccacgctgttggatgatatctcgatgatgggaaaactggccgcgaaaaaaacggcaggcgtattgggtgatgacctgtcgctaaacgcgcagcaggtgacgggcgtgcgggcgaaccgcgaactgccggtcgtctggagcgtggcgaaagggtcgttgatcaacaaggtcatcctggtgcctctggcgctgctgatcagcgcttttatcccgtgggcgattaccccgttgttgatgattgggggcgcttttctctgttttgaaggcgtagagaaagttttacacacgcttgaggcccgaaagcacaaagagagcccggaggcgcgtcagcagcgtctggccgcgatcgccgcacaagatcctctcacgtttgagaaggagaaagtgaaaggggctgtacgcaccgactttatcctttctgcggagatcgtcgcgattacgctgggaattgtcgcggacgcgccgttgctcaatcaggttctggtgttgtccggtatcgcgctggtggtgacgattggcgtttatggtctggtgggactcatcgtaaaactggacgatatggggtactggctggcggaaaaacgcagcgtactggctcaggcggtgggcaaagggctactggttacggcgccctggcttatgaaggcgctgtccattgtcggcacactcgcgatgttcctggtggggggcgggatcgtggtgcacggcatcgcgccattacaccacgcgatcgaccattttgctcagcagcagaatggtcttattgcgctcacgcttcccatgttgattaatctggtgctcggtttcatcatcggcagcgtggtggtaggactggtaaaaactgttgccaacgttcgcggtggttcgcactaa

SEQ ID NO: 76894 - DNA, 693 bp, Citrobacter koseri
atgacaaccttctacacagtggtgagttggctggtcattctggggtactggatacttattgccggtgtgacgttacgtattttaatgaaacgacgcgccgttccctccgcgatggcctggctcttaatcatctatattctgccgctggtagggattattgcttatttatcattcggcgagctgcatttagggaaacgccgcgccgaacgcgccagagcgatgtggccgtccaccgctaagtggctgaacgacctcaaagcctgtaaacacattttcgccgaagagaacagcagcgtcgcttcgtcgctgtttaagctgtgcgagcgacgccagggaatcgctggcgtaaaaggcaatcagctgcaactgctgaccgactctgacgatgtgatgcaggcgctcatccgcgacattcaactggcgcgccataacattgagatggtgttctacatctggcagcccggcggcatggcggatcaggttgcagagtcgctgatggcggcggcgcgacgcggcattcattgccgtctgatgctggactccgccgggagcgtggcctttttccgcagcccgtgggcggccatgatgcgtaacgccggaattgaagtggttggaggcgctgaaggtcaatctgatgcgtgtctttctgcgccgtatggatttgcgccagcaccgcaagatggtgatgattga

SEQ ID NO: 76895 - DNA, 657 bp, Citrobacter koseri
atgaatagaaacacagataacggatctaaagtttacacccccctcacactaaaactttatgactggtgggtcttgagggtatcaaatcggcttgcatgggggtgccccactaaggaataccttcttccacacttcctccgacatttagggaaaaaacatctggatattggtgtaggaaccggatattacctcactcacgctcctgaaagccgtttaatatcgctaatggatttgaacgaagcaagcttgagcgcagcatcaacaagggctggagaaacgaaaattcagagcaaaattacccatgatgttttcgagccttacccaaaaaccttgcataatcaatttgactccatctccatgttttaccttcttcactgcctgcctggagatatgtctgcaaaaggatgtgtaatacagaatgccgcgcaggctttaaccgacaatggcactctttacggcgctaccatccttggtgatggcgttaagcacaatactttcggtcaaaaactgatgcgcatttacaaccggaaaggcattttctcaaataccggagattcagaggcgggcttaacgcaaatactgtccgagtacttcgaggatgttaaaactacggttaaaggtactgtagttatgttttcagcttcaggaaaaaaataa

SEQ ID NO: 76896 - DNA, 198 bp, Citrobacter koseri
atgcccggcgacgctgtgcttaccgggcatgcgatgtgcagttcccgtaggccggataaggcgtttacgccgccatccggcatcatgtccggtggcgctgctaccgggcctgcggtgtacggtttcctctcccgcaagggagagggtttgggtgaggggggaagccatgcggtccctcaccccagccctctcgggtaa

SEQ ID NO: 76897 - DNA, 1293 bp, Citrobacter koseri
atggatatttcagttacagctgcaaaacccgggcgtcgtcgttatctgacgctgattatgatctttattaccgtggttatttgttatgttgatcgcgcgaacctcgccgtggcgtcggcgcatattcaggaagaattcggcatcaccaaagcggaaatgggctacgtcttttcggcttttgcgtggctttatacgctatgccagattcctggcggctggttccttgaccgtgtgggatcgcgactgacctactttatcgctattttgggctggtctgttgcaacgctatttcaggggttcgccaccggattaatgtcgctgattggtcttcgcgccatcaccgggatttttgaggcgcccgcatttccgaccaataaccggatggttaccagctggttcccggagcatgagcgcgcctccgccgtcggtttctacacctctgggcagtttgtcggcctggcgtttctgacgccgctgctgatttggattcaggagatgctgagctggcactgggtgttcatcgttaccgggggaatcgggattatctggtcgctaatctggttcaaggtttatcagccgccgcgcctgaccaaaagcatcagccaggctgagctggactatattcgcgatggcggcggtctggtggacggcgatgcgccagtcaaaaaagaggcgcgtcagccactgaccaaagctgactggaaactggtgtttcaccgcaaacttgtcggggtctacctggggcaatttgcggttacttctacgctgtggttcttcctgacctggttcccgaactatttaacccaggagaaagggatcaccgccctgaaggcgggttttatgacgaccgtaccgttccttgccgctttctttggggtgctgctctccggctggctggcggataagctggtgaaaaaagggttctcgttgggtgttgcgcgtaaaacgcctattatctgcgggctgctgatttctacctgcatcatgggggcgaactacactaacgatcccgtatggattatgactctgatggcgctggcgttcttcggcaatggttttgcgtctatcacctggtcactggtctcttcactcgcaccgatgcgtctgattggtctgaccggcggcgtgtttaactttgttggtggactgggtggcatcaccgtgccgctggtgattggctaccttgcgcaggattatggctttggcccggcgctggtctatatctccgctgttgctctgattggcgcgctctcttatatcctgctggtcggcgacgttaaacgggtaggctaa

SEQ ID NO: 76898 - DNA, 1149 bp, Citrobacter koseri
atgaaaataaccaaaatcaccacgtaccgtttacccccgcgctggatgttcctgaaaatcgaaacggatgaaggcgtggttggctggggcgaaccggttatagaagggcgcgcgcgtaccgtcgaagcggcggttcatgagtttggcgactatctgatcggtcaggacccggcgcgtatcaacgatctgtggcaggtgatgtaccgcgccggtttttatcgcggcggcccaataatgatgagcgccatcgccggtatcgaccaggcgctgtgggatatcaaaggcaaagtgctgaacgcgccggtatggcaactgatgggcggtttggttcgcgacaaaattaaagcctacagctgggtgggcggcgaccgtccggcggaagtgatcgacggcattaggaaactgcgcgctattggcttcgacaccttcaaactgaacggttgtgaagagatgggcgtgattgataattcacgcgcggtggatgcggcagtcaataccgtagcgcaaatccgtgaggcttttggtaacgaaattgaatttggtctcgacttccacggtcgtgtcagcgccccgatggcgaaagtattaattaaagagctggaacaatatcgtccgctgtttattgaggagccggtgctggcggagcaggcggaatattatccgaagctggcggcgcagacgcatattccgattgccgcaggcgagcgcatgttctcacgctttgagtttaaacgcgtgctggaagcgggcgggctggcgattctgcaaccggatctgtcgcacgctggcggtatcaccgaatgctacaaaatcgccgggatggcggaagcctacgacgtggcgctggcgccgcactgtccgctggggccgattgcgctggcagcctgtctgcatatcgacttcgtatcgcgcaatgcggtattccaggagcagagcatgggcattcactacaacaaaggcgcggagctgctcgacttcgtgaaaaacaaggacgatttcagtatggaaggcggcttctttaaaccgttaactaaaccgggccttggcgtggacattgacgaagctaaagtcattgaactgagtaaaaacgcgccggactggcgcaacccgttgtggcgtcatgaagatggcagcgtagcggaatggtaa

SEQ ID NO: 76899 - DNA, 618 bp, Citrobacter koseri
atgcagtggcaaactgatcttccgcttattgcgatattacgtggcgtgacgcccgatgaagcgctggcgcatgttggcgcggtcatcgaggctggctttgatgcggtggaaatcccgcttaactccccgcagtgggaaaaaagtatcccggcgatagtggatgcgtatggcgataaggcgttgatcggcgcgggcaccgtacttcagcccgatcaggtagacctgttagcgcaaatgggctgcaagctgatcgtcacgccaaatattcagcccgaggtgattcgtcgcgcggtgagttatggcatgaccgtatgccctggatgcgcgaccgccagcgaggcctttaccgcgctggatgcgggtgcgcaggcgctgaaaatattcccctcatcggcatttggcccggactacatcaaagcgctgaaagcggtgcttccggctgatgtcccggtgtttgccgtggggggcgtgacgccggaaaacctggcgcaatggattaacgcgggttgcgcaggcgccgggctgggcagcgatctctatcgcgccgggcagtccgttgagcgtaccgcgcagcaggcgacggcatttgttaaagcgtatcgagaggcagtgaaatga

SEQ ID NO: 76900 - DNA, 876 bp, Citrobacter koseri
atgacagctcgctacatcgcaattgactggggatcgaccaatttgcgcgcctggctttaccagggcgacaaatgcctggagagcaggcaatcagaagcaggcgtaacgcgtctgaagggtaaatctcctgaagcggtgttagcagaagtgacgcaaaactggcgcgacagcgccactcccgtggttatggcgggaatggtcggcagcaatgtaggctggaaaatcgccccctatctgccggttcctgcccatttctcttccataggcgagcagttaacctccgttggcgacaagatctggattattcccggactctgtgtctcacgcgacgataaccacaatgtgatgcgcggcgaagagacacagttgcttggcgcccgcacgctttctccttcttctgtctatgtgatgcccggtacgcactgtaaatgggtacgggctgataacgcgcaaattcacgattttcgcaccgtgatgacgggtgaattacaccatctgttgctgcgttattcactggttggcgcagggttgcctgaacaggaaacctcgcctgtcgcctttactgccgggctggagcgtggtctcgctacccccgccatcctgccgcaactttttgaggttcgcgcctcgcacgtcctgggaacactcccgcgcgcgcaggtgagcgaatttttatccggtctgttgattggcgctgaagtcgccacccttagcgaaagctttgacgcccggcagatcaccattgttgccggagacgcgctggcggaacgctaccagcaggcgttcagcgccattggccgtcatgcaaccgtcgtttccggtgagaaggcatttcaggcaggaataaggagcatcgctcatgcagtggcaaactga

SEQ ID NO: 76901 - DNA, 690 bp, Citrobacter koseri
atgaccctcaataaaaccgatcgtatcgtcatcacgctgggaaaacagattgtcagcggcaagtacgtaccgggttcggcactgcctgcggaagcggatctgtgtgaggagtttgaaacctcgcgcaacatcattcgcgaagtgttccgttcgctgatggcgaagcggctcattgaaatgaagcgttatcgcggagcgtttgtcgcaccacgaaaccagtggaactacctcgataccgacgtgctgcaatgggtgctggaaaacgattatgacccgcggctgatcagcgcaatgagtgaagtccgtaacctggtggaaccggctattgcgcgctgggcggcggaacgcgcgacgtcgagcgatctggccgaaattgagtcggcgctcaatgacatgatcgccaacaaccagaaccgggatgccttcaacgaagcggatattcgctatcacgaggcggtattgcagtcggtacataacccggttttacaacagcttagtgtggcgatcagttcgctacagcgagcggtgtttgaacgaacctggatgggtgatgaggccaacatgccaaaaacgctccaggaacataaggcgctattcgatgcgatacggcatcaggatggcgatgcggcagagcaggcggccttaacgatgatcgccagctcgacacgaaggctcaaggaaatcacatga

SEQ ID NO: 76902 - DNA, 354 bp, Citrobacter koseri
atgggtaatgttcttgctattatcgatctaattttccttgagtacaaaaaaacacatcctgagttaaaaggatttattaaaaatattatcatcgacgatattaaacgttcgtcagccaaagactctgtttttgatgttctttggcttgtgttttttaccaagtttaggcaatttggaacaggggatgtatctaagtatgttgatagcgtgcttatcaatagtaataagttttatcaatgccttgttaataataaaaccatattcattgatggcaaatatccattgtttaaaaagcctaaagatcttaatgaaatcatgttaattgaatatgtcgatttatttaaaagagattaa

SEQ ID NO: 76903 - DNA, 594 bp, Citrobacter koseri
atgagtgacgatgagaattataaaagatgggcaagaatattagagccaaaagcattaaaggaaatggtcatttcttattctatatttattgcatcttttgagctgctaaaggatgtagtaattggaaaattagaacgtttttacttaagttttggaaacgaagatgaattcgcggagtataagaaaaaagttttagatagaaataaaagtaggctgtatgcatcgataagttggttgacagaaaacaacgctttagaacagagtgatatcgaggcatttgaacgactaaaaaacatcaggaataaactttctcatgaaatgtttaatttgattcctgaggctgatttacttaatgtaaccgatgagattaatacaataatttctctcacacgaaagattgaattatggtggttttataatcttgatatgaccattgacccagatagctatcccgcagatctggatcttaatgaagtgatgcccatgactgtacttctgttacaggtcatgtgcgaagttgccttaggagatgagcaggctgctcacaatatgtttgttgagtttacctgcaactacaagagacaccatacctga

SEQ ID NO: 76904 - DNA, 279 bp, Citrobacter koseri
gtgccactcaccgagctgtggggcggtaacctgagctacatcggtttcactaactttgactggggctccgatctgggcgactctcagtaccgtaccagcaactctatcgcatccagccacatcctggcgctgaactacgatcactggcactactctgtggtggctcgttacttccataacggcggacagtgggaaaacggcgctcagccggtatggcaatccgaaacggttaaagctaccggttggggtggctacctggttgtcggttacaacttctaa

SEQ ID NO: 76905 - DNA, 1422 bp, Citrobacter koseri
atgggagtggcatattttttaatacttggggataaaacaacttgcggcggaagaattatatctggtcgacatgatcatataattgatggacaaccaaccgcatgtgagggtgatcagtatatatgtggtaaagataaacaggtttatcgcatagcgggagggcaaccggattattttatagatggtatacgggcagccgggactgcgcacagcacagggacatgttcctgcaagtgtagatttattaattcaattcaaaatgtgacgtatggatatgaaaatgagagtcggtattcaggactggccagggctggctcacgacaaacagccgtcaacaatgaactatctatagcgccgcagaacacctcaaaaccgcttgtctttcctcgggggccatcttctacgacagaggaagaaaaatcgccccgtgaacctgtagatgcgggcttttgcgtactgtcctatgaagccacaccatcatcatatgaaccttatattttcattaatccaccagaaggaactcgcgaactatataagaatttaaatccagatatgaagaaaaaaccaggttcaattttggttattgctgatccagaaaaaaaagatgcagaacaaattaaacacattgaaaatgccagagataaaattgatagcgcactggaaccattaactttggacgaagcaagattcttatatcaaaatagaaatataatagatatgttcacttcatatggttctgattatggtggtatccttagtgatatgtcagaaaaatattttggagaaattgagcatactttaatgcaaattcaggaagcatataaaaatcaatacctgactcgtgggacgttaatcagtgagcaatttttcgttgaacggagaaatctattcaaaaaactggacgggatatttttaaaaatatttagagaacgtattggccttgctcaatatgatgatataaaaaaagcgttgggattatcttcatcttcaattgtccataaatggaatcaaacaggggttaacgacattgaaggttacgcaacttatatagaaaaatcggcaaaactggcaaagttaatgaaaactttcaataaagttagtattggtctgtcagcattgaatggtgctaattctatttatgatgcctgtacaattggtagagattgtgaaaaaacggcttatactgaaattggtaaattttcaggaggcttaatcgttcctgctgcacttgattttgccgtcaaacctgcggcatctgcaacatgtgcagtgatattgggcatattaagtgccccagagggaggtataggaagcatagcttgtggaattattgtacaagctggtgcggcatttggtctaagtaaagctggagaagaagtaggtgaaacgtccggtgagataatttacaatgcaacaaagtaa

SEQ ID NO: 76906 - DNA, 954 bp, Citrobacter koseri
atgcaggataagcataacttactaaaaaatataagaatatttatcgtttctttgacgctatccattgtcggcatacagttctcccgctctatttctccgctcgccgttgtcgatgacagctctattttcctggcctggctgccgctatgcgtcatgttttccgtgcttttcttatttggccgacgcggtattgtccccatcattttagcgatgatggcgaccaatcactggaaccttcatctcccgttaatgcaggcagcggtgctgttattttgtcagaccttttccgtattgggcatttgcgggatcgtccgctggcaagtggggtcgcgctggcgtcatggattgcctgacaggaatatctggttgcgtatcttctggctcgggtttgtcgcgccggcgggcatcaaagccagcatgtatctcgcggggcattgtctggactaccctgttgcgatatcaacattctttggtacggcaaccattatttataccatcgtggatattctgagcctgatttcagcggtcctgattttcactatgctcttttattatcctctgcggatgataatcaacccgcgctattgccgcattttctggcgcagagacattgcgccatatctggtcaaagagaagcgtctgtttaccctgacctggatctccgtcgtcgtggcgctgatcgttctgatgtgcgcgccttttgatgccgactatattgccggttatctggtgcccgtcttttttattgtttttacgctcggcgtgggcaagctgagttatccgctgctgaacctcagctgggccatctctgcgctgtgcctgctggtgtataaccggatttcttgcagggcgtcggctccgaatattcactggcctttatcctctctgttctcatctcctttagtatttgcttgctgtatatggtgtgtatttatcaacgcagcgaatggttga

SEQ ID NO: 76907 - DNA, 936 bp, Citrobacter koseri
atgtggggggatagcaaatttcgcgctctgtctgcattgccaccttgcgggcagggactctggctgtatttattaacgaatgtaaatactggccctattcctgggttatttcgcgcgggtagggcagcgatatctgaagaattaggatggtctcttgaagacttcgataaagcctttcaggaagtctttaatcaagggatggtgaaagcagattttatatcccgcgttgtgtggattcccaacgcgataaaacacaaccgccctgaatccccaaatgtggttatttcgtggggaaaagagatcgaccttataccagagtgtgccctcaaggatgaggcaattataacgctatataaacatgtgcaacttattgattctgaatctgataagccagaaagacgctcttattcaacagcctttgagaaagcatttagcaaggctttgccaaagcctttcgtgaatacttcagaaaagactatgccgaatcaggaacaggaacaggaacaggaacaggaacaggaacaggataaagatagttcggggcatggctccgccaccccaaccgatgaccaggaacaagacgacggcgataaacctgaatctcaaaaaaaataccctgatgagtttgagcgagtctggacgatttatccaaaacgatcggggggtaacagcaagaccgatgccttcaaagcctggaacgcccgaatcagggatggaactaccgcaagggaaatacacgagggcgtggagcgctacgcggcgttcgtcaaagccgagggaagcctgaatacgcaattcgtgaaacaggcgaaaacgttttttggtccaggtatgcacttcagtgaaccgtggacgatccagcaggcgtcaggcccccgagatcctaatcagatttcggagcctgataaaaaaatcccatcggggttcagggggtag

SEQ ID NO: 76908 - DNA, 756 bp, Citrobacter koseri
atgaaaaacattgttagttctggcggagctctcgaacgcctgaaaagaattataccggccagtgttcagcctaagttttccaccgttgaagagtggcgagcatggcaagaatcagaaggccgaaaacgttgtgaggaactggagaagctgaatcagaaatcaagaaccgagaaaattttggggagatccggaattcaggatctgcatcgcaattgcacgttcgctaactacaaggtcgacgtcaacagcgacagccagcgtaaggccttctcgttggcaaaaagttacgcagagaacttcggtactggattcgccagctttgtgttcagcgggaatcccggcaccggaaaaaaccatctggcagccgccatcggaaaccatctcctgactggtgggcgtagcgtcctggtggtgacgattcccgacctgatgatacaggtgcgcaagtgctatgacagcggccaatcggaagcgtcactgttagatgacctctgcaaagtcgatttgctggtgctggatgaagtcggaattcagcgtggcagcagcggcgagaaagtcattctgaatcaggttatcgatcgtcgtctgtcctccatgcgaccggttggcgtactgacgaacctgaaccatgaaggcctgcttgatgcgttgggcgcacgggttatcgatcgcctccagatggacggcgggatgtgggtgaattttgactggggaagctaccggaaaaacgttagccacctccggatcgttaaataa

SEQ ID NO: 76909 - DNA, 768 bp, Citrobacter koseri
atggaaaccgtaatcgatgttttaaaagcaatgggtaaagcaacataccgtgaagtcgcggcacgcctggaaatcgaacctgttgaagcgctgaatatgctccgcgaacagcgtgaacagggattgtgtgattttttcgatggcggatgggaagtaacaggcaatgctggcggaaaaacaagttttcggtcagcgccagcgaagaccgtactgcgtgcgaaaaatttaaatgacaccccaaaaaaaccgctgcgcggtgaggttactgagcctatcaaacctgaggtaatcgtcgcactactaaccgaaaacgggatcatggataccgtagcgctggcatcggctgtcggacgagatccaagaggcttagcgtcaaatctatgcctgatggcaaagcgcagacacattaaaaaaatcggacaggggaaaggtgttaagtgggggcttcctgacgagcagcttgtttcgccagagcctggatttgctgagctgccggaaatcgagattacaccaaaagctgctgcacccgcacctgcgccatcggcagaaccggagtcggtcaccatcaggacagaagaattcctggaaaccatcccagtaatgagaaaaccctctcagtctttgcaggttccgtccctgcgggaaatcagtaagcaaatcaggaaaaccaaatcaaatctgaacagccttgagcgattacatgctgcggttcgtgaagtcggcaggaatcgtcacgcgctccggttcttcaacggggagggagaatga

SEQ ID NO: 76910 - DNA, 246 bp, Citrobacter koseri
atgggtaaggtaacttttgtcgtcgatttcaaggatggtgaagagccagcggtatcaatggcaaccgaggttctgggtggtcgtctttctgctgttttatgggctgactatcgcgatgattttttcaccgaagaagaggtcgatatggttcgttctgcgttcgatgatgtggcgctgactacttctgaagatgaggaagaatcacaggctgaaatcatcaagaaaatggagctgatgacgctatga

SEQ ID NO: 76911 - DNA, 828 bp, Citrobacter koseri
atgaccactattaccagagagcttatcgccgcatatcttaacggtgaagttaaaacgctcactaacagcgaacagaaagaactggcgcgtatcgcgctggcatcgctgaacgctggcagtgacagccacccggcgcacgcccctctctcaaattaccgcctgcaccgcattcgtgaaatcctgagcaaagcagcagcacaacgcgatggcggcaatctcggctacggaatgtctgatgctgtgaaagcgattgatgaattgctggaagggaggaaggtggagccagtggcgtggcgatatcgcaccactgacattaacggaaaccctaacccgcgctggtcattttccgaagaggcgagcttgatggggttgtatcaaccgctctacaccgccccgccagcgccggtagtccctgcaactcttccgtgcgccgttgagttaaagccaggtcttatcattggcaaaggctgcaaaacagaaactttgctgactgctctgcaacgtcgcgccgactattacgctgaaattgacgctatgacgccggaagagcgtgcagagcatgacgccaatatcgaagcattcaaagccatgttgccgcagccaacaccggtagtgccggaagaagcaacaccgaaaaatattgagatgctggcgagcgcccgcgttagaaatgttacttttcaatgggatgaggatgagcgtaatgctgcggctgactcgtggaacgcctgtcgcgccgccgtgcttaaagaggggcaaatattatctgattccgatgttaatcggtttggtaaatttctggcaaagaaggatggcgtaggaatatga

SEQ ID NO: 76912 - DNA, 555 bp, Citrobacter koseri
gtgaaaactatccagttatctgaacgtgagttgtcgatagtttatagcttaatggcgccgccgtaccgcgctgaagatattcgctccgacgagttcaacgaattgcgtaataaagtcttttacgctctgcgtgatgctcagaacgatgaacatgtaagccagcgttacaagttgccagttatcggctggttgcgtagtgattacaacagtgacgacaaacgcgacccgaacgcacctctgtttatgctgggtagcaatgatccgacagaaacatggggagtgaaatacattccgctggctggcaactctccggtgactacggatggttggacgggaagcgacgaagcaaacgcagcactgataatgctcgatcgcatagaaacagtggactcggttgatgatgaccgcattgagggtatcaagcgcatcattcgcgggctcgcagcagcaccgcagcaggaagccagaaaaagtaatgtgataggcagttatcagggtgctgacgggcaagagcatccaatcgtcagcctttcatcgccgcaggaggtgaagtga

SEQ ID NO: 76913 - DNA, 921 bp, Citrobacter koseri
atgtcatctggagccaaagttcttagtgcattcgtgcgcgaaatcactcccggagtgaccccaacgggtattccgtggaaccttttaaaacgcacaagttggggcgttggcccgtcccagaataccaatgacaacgatgaaatcggcggcacccgaatggcgcagggcgctacgttgggaacggtcgatgttggcggcgatgtcggggcaaaattccgctacggccagcatgatgaattcctggcttcgtgttttggcgcggagtgggcaggcaatgtgttgacgatggggaatgaccgtatctgtttctcacttgcaacgtacgcctccgatgttggtatcgcctctatcgttcgcggcgcgcaggtaagcgtgttccagttggaagttcctaacgacggtgacgttaccgcgacgatcactttcgccgggttgggctgggcgacgaaggccgacgatacgagctatttcggcacgccggttgataactcaggtgaacttcgttattcattcaaggaagtcaccaatatcaaactgaacggcgttgacggcggcacgggattttgtgtcgattcgttcaatatccagttcgacaataacctgcaaacgcagcgctgcatcggtaccgggtcggcgttcgccggggcgaacatcccgacaacctttaccccgtccggcagcgttaccctgtcctggtctaaagcggcgtgggatctgtaccagaagacgttcactggtgagttgtttccgtttgagttcaccgtatcgaatgccgagggctcttaccgattctacctcccgaaagttcaggtagtggctgactggccggacggtggcaataccgacattatccaggttcaactggatatcactgcggccgatgagtcaccaaccattacccgcacacctgcgggcagttaa

SEQ ID NO: 76914 - DNA, 783 bp, Citrobacter koseri
gtgccgccatccggcgtcatgcccggtggcgctttgcttaccgggccgacaaaacctctctcccgtaggccggataaggcgcttgcgccgccatccggcgttatgcccggtggcgcttcgcttaccgggcctacaaaatccctctctcgtaggccgggtaaggcgcttgtgccgccatccgtcgccatgcccggtggcgctttgcttaccgggcctacaaaatccctctctcgtaggccgggtaaggcgcttgcgccgccatccggcgtcatgcccggtggcgcttcgcttaccgggcctacaaaattcactcccgtaggccggataaggcgcttgcgccgccatccggcgtcatgcccggtggcgctttgcttaccgggccgacaaaacctctctcccgtaggtcggataaggtgcttgtgccgccatccggtgccatgcccggtggcgcttcacttaccgggcatacaaaacctctctcccgtaggccggataaggtgcttgtgctgccatccggtgccatacccggtggtgcttcgcttaccgggcctacaaaatccctctcctatcggtaaaaaaaagcctccgctacgggaggctttttgcttcgcggtgaaccgctggctatttccggcggaatttacgggtgagcggtttctctatctccacaatgcagaacagcactgcgccgatagcgaaggttatgccccagtaacgcagcggcagcgcttctgtgccaaacagcatctgcatgaaaggcatatagataatcgccatttgtaa

SEQ ID NO: 76915 - DNA, 942 bp, Citrobacter koseri
atgaatcatagcgcgcaacgaaagttgctgagattccttggaacaatcatggtggtattactccccgtgatgctggcgctatggtttgcccacatgcgggcggtgtctgaaacccgtaatcaactgcactcttttgccgagctggcattagaaaaaacggaactggttgtccagcaggtggagctggcccgcgacgcgatacagcagtatcagggaaaagcctgtactcctgcgcatcaaaaacgaatgcaggatattattcgtggtcgtctgtatatcagcgagttaatttatgcgcaagacgatcattttttatgctctacggtaatggcgcctgccagtccttatattatccctgccgcagattataaacgagaaccagacgtttctatttattactatcgtgatacgccgttctttgctggctacaaaatgacgtatatgcaaagaggacactatgtcgcggtaataaatccgttgtcttacagcgaggtgatgtcagacgatcccactctggcctggggcgtatatgatacggtgacgaactcctttttctccgtgagcgagcaggcaaacgtcgaacaattattaccgttgctgcaccgtgatgaatctacctttcagcaaaataatcgcttctatactattgcccattcagaaaaacgtccgatcgcgataattgtttccactgataacgcgcgtttctatcagaacctgtaccatcaggcgacgttaacgctgccgttaggcattatctgtagcatcattgtgttattgatgtggtcgcgtacgcgcgaggaatatcattcaccgcgccgtttgttgcagcgagcgataaacgtcaactgcgtctttattatcagcccattattgatattcaaaatgaaaaatgcgtgggggcggaggcgctattgcgctggcctggttttgaagggcaggtga

SEQ ID NO: 76916 - DNA, 1659 bp, Citrobacter koseri
ttgagtacgttaataaaagtacctgcgctttccggcagggcggaaaattggcaccagattaactggcgtcaggtacaccgtcaggtcagagggctacagatacgaatcgcaaaggcaacggagcagaagcgctggcgtagggtgaaagccctgcaaaggatgctgacgcgctcgtttgcagctaaagcactggctgtcaggcgagttaccgaaaatcgaggcaaaaagacagccggagtggatcgccagttgtggaacactcccggaagtaagtggcaggcgataggtcagctaaaacggacgggttacaaaccgtctccgttaaggcgtgtttacattcccaagagcaacggcaaacgccgtcctctgggtataccgacgatgaaagacagagcgatgcaggcgttacacctgctggcacttgaccccgtctcggaaacaacggccgaccgcaacagctatggctttcgtccggcacgttcggcggcagatgcgattgagcagtgttttgttaatctcagtcgtaaaagctctgctgaatgggtactggaaggcgatataaaagggtgttttgacaatatcggccatgactggttacttgccaacattccgttggacaaacaggtgctcgggaaatggcttaaagcgggattcatggaatccggacggttatacccgacggaggctggtacaccacaggggggcattatttcccctgtactggcgaatatggcactggatgggctggaagcggtgttagaaacccattttgggaagaaaaacaccaaagctagttacaaaaccaaggtcaattatgtgcgttacgcagatgattttatcattacggggatctctaaagagttgctggaatatgaagtcaaacccctcgttgaagcctttatggcggaacgggggctgcaattatcacccgaaaaaacggtgataacgcatatttccgaagggttcgattttctggggcagaacgtgcgcaagtactgcggcaaaatgctgataaagcccgctgccaagggactgcgtaatcatcttcagaaaatccggcaaatagtgaaacgaaatgcggcgtcaaaacagggtgacctgataaggcaactcaatccgatactgcggggttgggcaaattatcatcgtcatattgtcgccaaagagacgtttagctatatcgactatcgcgtctggaagttgctctggcgctggtcatgccgtcggcacggtaatcgcaacaagtactgggtgaaacggaagtattttcactctgtaagtagcgaaaactgggtattccagagtatcgatgcggataatggccggcaaaggttagtctcctgcaaagatatccctataaaacgtcacattaaaatcaggtctgaggctaatccatatgatccggttgacgagttgtacttcgaacagcggcaggttaagcgctggaaagaaggtaaaatgcagcgaggaaaactgagattaatttgggagcgacaaggccatcggtgtccgatctgccaccagaaattcagagataatgatgattgggatgtccatcacattatcagacgagtagacggtggtggtgatgaaatcgataatttaatgatgctgcatcctaattgccatcggttgatccataaccatgaagtggattag

SEQ ID NO: 76917 - DNA, 273 bp, Citrobacter koseri
atggtgaaaatgggaaaatccgtgagcggaatacttacggtaatgatccttttccaccaaaaggctaacccaacagttaaaatgttgctggcccaaacattagtgcgggcttataaaggcttgagccgtatgcggggaaacttgcatgtacggttcttagggggcggcggcgcagtaatgcgctgctgctacccgacattgcccacaccctgcatccttcaggccgcaggtgcgttggttgcgtttgctaaccccagtcacttacttgagtaa

SEQ ID NO: 76918 - DNA, 378 bp, Citrobacter koseri
atgcaattagttgaaattaaaaaactcgaccttgtaaccagcactgtcgctattgctgatggggttgggcgtgatcatgacaccgtcattaagctggtagaccgtaacaaggctgatcttgaagaattcggaagggtcggatttgaaatccgaaccattcaaactgacggtggtcctcaaaagcgtcgagtggcgctattgaacgaacagcaaaccactctactgatcacctacatgcgtaataacgatgttgtccgcaagttcaaaaagaaactggttgctgagttcttccgcatgcgtggcgctctggcgggcaaaaaaatggatcgcaaccatcgccagccgctgattgaagaacagcacagtttagcagcgtaa

SEQ ID NO: 76919 - DNA, 816 bp, Citrobacter koseri
atgaaactggaagcggcactaaaacatttcagccctcaggggatgcacatcagcgacagcgtgaaaggcacatcaccggatcgtataaccggtactgatgtaatggccgctattggggccaccagcagccgcgcacgattcggcctggctgctttcttcggcaaggcggggatcagcaagacggatgagcaactggcggttcaggcgctggcgcgtcacgcgatggagacggctccgaagaacgtcaggaagggcgccggtagtgagttcggctggtgcatgcaggtgctggcgcagtttgcatttgctgagtattcccgttctgcggccaccagtgcgacatgtcgcagttgcaatggttcggggtgtgtaacggtgacccggataatccgcaaagtatcttacccgtggggtaaagctccatactgggccagcaagtcccgcgctgttcgtccttcagactgggagcaatggaacgaggtcacagagagtgtccccgctgtttgcgaggtatgtgatggtaaaggcattctgagcgctcgctgccgttgtggtggaaaaggggaggtgctcgatcgcaaggctacgaaagagcatggggcgccggtgttcaaaatctgtgagcgttgtggtggtgaagggtattcgagagtgtcttctgcgaccgttcaccgcgctattctcaaacgtctaccggacctccatcagtcgtcgtggtcccgcaactggaagccattctataaaatgctggtggatgtgttgcacaagggggagacacaggctgcgttagagtttgagaaggcaaccagttattga

SEQ ID NO: 76920 - DNA, 183 bp, Citrobacter koseri
atggatgtaacgaaggaagacgagcacaccataagcgaataccttcgcgttgctcacggtggttattccgggccggtattcatcgatatcaacaggctggcggatttgaatatggcttacagccgtctgattgttatgacgtatctcatgaaacagcggtggttctggagggctaaacaatga

SEQ ID NO: 76921 - DNA, 336 bp, Citrobacter koseri
atgatgaaaaacaaacaagtcactatcgcaatggaaaaatatattcgtatccacgaagaaattaaaaagcaggagcgtgagagcattgcagacgatcctgatggaataggttgcggggctgacgcatatctttttgaggaactggctcaggcgcgtgatgaattctgcgaagctataactccatcttattatgctgaattgctgagactggttgccatgcatcgggataacacttgcgaactgatccttgaaaatatggtgctgaaagcagagattcgtcgtcttggcggcaatccagatttgctggggaacgtggattcagagggaaaggactga

SEQ ID NO: 76922 - DNA, 1875 bp, Citrobacter koseri
atgaccgcggctgaactgtcagacaagctatgggataacgccgaaagggtcgctaagttcctgctgccaaaggggcacctggagggcagagagtggtgcgttggtaataccaacggtgacgcagggaagagcctcaaaattaacattggagggaaaaaaacgtgggctgactttgccagcggcgatagcggtgacctgctggatttatgggttttggtacgtaactgccagttgcatgacgctatgcgtgaggcgaaagaatttcttggcttaaaagacaacgatcaccacttcgaggcgaagaaaaaaacgttctccagaccgacgaagaagggggttaaaaaagccagtagctgttatgactacctggcaacacgcggtatcactcgcgagacggcggatcagttccgggtatcagatgcggtggtctggtatcacgatgaaaacagggaagtaccagcggtggcatttccgtacattcgcaatggtgaattactacaggtaaagcgtattggcactgaacgcccgaatggtaaaaaactgatcatggccgaggcagattgtgaaccctgtcttttcggctggcaggccctggacaaatccacgcggctggttgttctgtgtgagggtgagattgactgcatgagctatgcccagatgggattcccgtcgctgtcagtaccgttcgggggtggaaagggggccaaacagcagtggatcgaatacgaatatcacaacctggatcggttcgatgaaatctggctgagtctggacaatgatgacgttggccgtgaagccgcgaaagaaattgcccgccgccttggtgagcaccgttgccgcctggttgaactcccgcataaggacatcaacgaatgcctgatggccgggatggattcagaggccgtgctggagtatgtcgaacgagcaaaatatttcgatcctgatgagttgtgctcggcaggggatttgctccaggaaaccatcgacgcgtttgaacatcgtgatgtcggattgtttatcagtccctgggaatcactgaattacaactttaaattccgtgccggagaactgaccctgattaacggcgtgaatggacacggtaaaaccgagctggttggacatatcgccgtcgacgcgatgagccagggcgttcgcacctgtattgcttcgctggaactcaagcccggaaagatgctggcccgactcacgcgccagactgtctgtatgaaacggccaaagcgcgaagacatcatcacgaccaacgaatggttctccgatcgcctttgggtattcaagttgaccggcacagcgaaagccagccgcctgcttgagatatttacctatgcccgccgccggtatggcattgaattgttcgtaatcgacaatctggcaaagtgcgggctggatgaagaggattacagcgggcagaaggattttattgacgcgctctgcgacttcaaaaatgaaaataactgccatgtcctgctggttacacacagccgcaaaaccaacgaatcagcgccaaccggcaagatggatgtcaagggtacaggcgcgctgaccgacatgccagacaacgtcatgtctatctggcgcaacattccccgcgaactggcaatgcgtaaggcggaaagcaaggggtatgagagcctggataaagacgaacaggctgctgtcagtatgcctgcgtcaatgattcgactgctcaagcagagggagggcgaagggtgggttggtgatataggcacaacttttgatactcgttctcaccagttcctggaggatgaaaagaaaggtccgctcaattacctgaccagggagccacaaaacgatctcgatattgaatgggaagcgagcaacgcaacgaggtactga

SEQ ID NO: 76923 - DNA, 936 bp, Citrobacter koseri
gtgagcagcaaactacagggctatgtctgggatgcctgtgctgtttctggtgtcaaaggaacccggctaatggttatggtccgtctggctgattattccagtgatgatggcaagagctatcccggcatcaaaaccattgcccgtcagattggcgctggtgagagcaccattcgtacagccattgctgagcttgaagcagaaaaatggcttcggcgtgaaaaccgccgaaatggcaaccgcaacacatccaatatgtactttctaaatgtcgagaagctggaggaaatagcgcttcgggaaagatctgcaatccgtaaggaaagatgcaaaaacagtcgttttgacccgtcagattctgacgcatcgaattctgatgcatcagattttgacccgtcagattctgaccagtcagaaatgagcgcctcaagtgcacttgacccgtcagattctggcaaaaacagtcgttttgacccgtcagattctgggggacatgatccacaaggtttaaaatctgatccacaagtaaaagatcatgaaccacaagaagcgcgcgcaaagcgccagaaaaaaacttcgttcgaccctgcaaaagcaaaacctgaaaacgtcagcgctgaaatctggcaggactggattaaatttcgccgggagaagcgccaacccctgaccgaaacaacatgcacctaccaggctaagcagcttgctggtcaccagaacgctgatgaagtgatccgccgttcaatcgccagtgggtggcagggattgtttcccgatcatgtgcccaacaaacctgcaacgatgacagaaacgcccggtgcagcagtttccagcgaatccggctccagctcatggtacacgccatccggaaacggctcggcagaggtgtttatcaaccaggccgctattgagcgcatgaagcgcggtgggtaccgctaa

SEQ ID NO: 76924 - DNA, 366 bp, Citrobacter koseri
atgaagatatcaccacaaaaggcgatagccatctaccagaagactaaaggtcactgtggatactgtggttgctatctggactttgaggagtattcggctgatcacatcaccccaaaaagtaaaggcggctcacatggcgtagataatctactgccttgctgtaagacctgcaaccgtaccaaaggcgctcgttcgcttaacgagttccgccttgttacagctgccagaaacgcaggttgcaatattttcagtgcctctcaacttgtctatctggctgatgcgggagtattgccttcgcttgggattgatgctgaccatcgtttttatttcgagcagcacagtatgcatgagggggccgaaaagtga

SEQ ID NO: 76925 - DNA, 198 bp, Citrobacter koseri
atgtcacacgcgaacacatcaccagatccgattaagtcactcgatatcgattatcgcgatccgcgaggtgttgttgtgcatgtcaccggatggaaccgggaaaagcagcaggtctatttcaccagacagggctatccgcatgagtgcatgcaaccggtctggaagtttcaacagtatttcacgaggtgcgatgaatga

SEQ ID NO: 76926 - DNA, 243 bp, Citrobacter koseri
atgaagcgcgacttgaaaggtaagatctcaaaaatctctagccaggccgctctggctagtcggcttgggtgtaagcagcagacggtcagtctttggatgaaaaatagtgtgcccgcaaacaatgtgctggatttatgcgcggctttagagtggcaaatcactcctcatgaagtaaggcccgatctgtacccaaatccaaatgacggccttcccatagaaccccaagcagctacagaggtgtga

SEQ ID NO: 76927 - DNA, 456 bp, Citrobacter koseri
gtgactatgaaaagctcaaaccaaacagtctttcaaagacgactcaaagaaatacttgacaagctcgaacttagtcagtccgagctagccaggcgtatgaaggtaactccgcaggcagtgcagaggtggtgtaatgggttgggggagcctcgcaagagtgcactggagaaattggcggaggtaaccggcgcacctgctcactggttctatacaccttacgaccatagcgagaagagtgatatttataccagtatatcgtttgggcatgtagatgaattacctgatagcaggaaacaggtacttttatcaccagatgaagagcaactaattaatatatatagagatttgccaggagaagaaaggaaaaatatgttgagagtctttaacattagacttaaagaaatcaatgattttatcggtaggttaagaatttcttttcaagaaccagataaataa

SEQ ID NO: 76928 - DNA, 675 bp, Citrobacter koseri
atgaaaaactataacggcttatcacttaatcaatccgatgtgatagcaaattcattaagcattatttctgtggtgggaactttacgcgccactcgaaattatatagatattgccgatgagttgatcgatatagtccatcagtatctaaaggaagcaactacaactaccaataagcaacccgccccactccatgccaacgagctgggcaccatcgcgttccgcatccaactcgcccgcaagaacattggactcagcgaagccgatctcgctggcgcgctcggcctgattccagaatgcatcgctgactgggaggatggtaattgtccggttgaagcgacatacatcatcccgcttgccgccgccctcaaatgcgatccgctgtggttgctcgatgatcgcagcaaatccaccagtgcaccactggtgcccgtcaatgttatgcagggcgtggatatgtccactatcggtaagcgtattaacgcagctcgcgtgtcgctgggaatgagccctgatgaactggagttcgacctcaatgcgcctgaaggtacggtattccgctgggagacagggaaagccacaccatccagcaggcatatcgacgaactggctaaaacactcaaaaccagcgtgacctggctgctgacggggaaagaagtggaggtgtcccatgaataa

SEQ ID NO: 76929 - DNA, 132 bp, Citrobacter koseri
atgcaacggataacactgccagtcaatgagttcaattgcaaatcctcagccatattagaatcggatcttggcgatactgatgacattatatacaaattatttcgtcgtgaggggggtatttgttcatattga

SEQ ID NO: 76930 - DNA, 228 bp, Citrobacter koseri
atgaatgattgtaattccgcaaccaaaccatacagcaatatggcgctaacggaaataagtgttgtaactgagcgtctgtattacctgctgcaaacagtcacagagaattattacaggcttgaggatgcacagcgctttcacctgctagaaatcgcctgggaaatatcagggcacgtagataactggatgaatgccgaagaggttcgccgtgaaaacaaacctgattga

SEQ ID NO: 76931 - DNA, 348 bp, Citrobacter koseri
gtgaaaacaaacctgattgaaactcgccgtcgtcacctcgtccgggcaaagctggattcaatgatgagaagaaccggaagttatttccagatagtcaaactggatgacggcacgaaattacccgtagaactggacgaagacattttaacgaaggcactgataaagcttttcgaagcgatgatttatgacacccgtaaacgcgagcaagcagagcatttaattgctgagcattattcgaattgcatgggtgttaataagttaacacccgatggtgtggattttatgaatgcacttattgcaacactggcagaccagtcattaaaagcggaggaattaactaatgactaa

SEQ ID NO: 76932 - DNA, 435 bp, Citrobacter koseri
atgattgacaacagaaccgccagcgcaattgacctggcattacagaaacacgacacaccagttggcccgttgttcgtcgcggagcgccacggtcgcattaagaaatgcttcagccgcgacacggcgatccgttacctggcgttcttcatgactaccagagctttcgaaacatcaggttttaagtgccgccatccggacgtgaaggtatgccatccggtacacggcgaagtatgtcagcgtggcgccgttactcgtgaatatttcatagcccaccagcgctgtgagcatcgcctgcgccgtatccttgcccgtaagcgcgaaatgcagaagtggtgcgcaaagtgggacgccatgcatgtccgctttgtgaaagagcgcgaagaacttcagtccagcaaaccagcagaggtacgcaatggatcgcacaacatttaa

SEQ ID NO: 76933 - DNA, 375 bp, Citrobacter koseri
atgcagaaaacatttatcgacacagacaacctgaatagcgtcagcgaatgcctggagcaactggtcaatgcagaggctacgcaaatcagcatagaaagtcagctacagcaatccagatccggtagcgaatggagtgaatggcgcaaaaaggcagaggcagcattgcgcgcagtaaaagctaagcgacgcattatcacagcgcgtctggccgttcttcggcagcaggagaaagagcgcaacatgcggttgcaccagcagcataacgattatctggtagacgagcttcgccggattgtaacgccctcatcctttgcgcgctgcgttatgcgggcaacggaaaaaatggaacgtggtgtaaaagatgagctggcctga

SEQ ID NO: 76934 - DNA, 240 bp, Citrobacter koseri
atgagcgatgtcattcttctgacccctaatgagtgggttacagaaaaggttctgatagcagttaccgggctaaaacccggaacggttctccgggcccgcaaggaatcctggatgctcggacgagaatacaagcacatagcgcccgacggcagcccgaagccaacgagcgagtgcatgtactgcatccctgagataaaccgttggatcaaaagccagccgaatccagcagtcgatctttga

SEQ ID NO: 76935 - DNA, 1299 bp, Citrobacter koseri
atggctaaaccggcctatccaaccggcgttgaaaaccacggaggtaaactccggatctgcttccactataaagggaagcgtgtacgtgaaaatctgggggtgcctgacacccctaaaaatcgcaaaattgcaggtgagttacgggcttctgtctgctttttaattaagactggtagcttcaactatgcggaacggtttcctgattcgccaaatctgaagcagttcggcgtggtgaataaagacatcactatcgctgaactggcggacaaatggctcggccttaaggaaatggaaatatcgagaaacacgatgatccgctatgagtcgatcgtaaaaacgagtgtttctttgcttggagggcgggttcttgcttccgctgtaacacaggaagacttgctcgttttcagacgggaactgatgacaggttatcaggtagcgagaccaaaccgtgaattgacaccgaagggacgtagtgtggcgacagtaaatgcttatatggggattgtctgtggaatgttccagtttgcagcatgcaatggctacatttcacaaaatccgttcagtggaatatcaacactgaagagagcaaaagctgaaccagatccgctttcacaggacgaatttacgcgactcattgacgcctgccaccaccagcagatcaaaaatctctggtccctggctgtttacactggcatgcgacatggagaattgtgcgcgctggcgtgggaagacatcgatatcaaagcgggcactttggttgtcaggagaaactacactcaggctaaagagttcaccctgccgaaaacccaggcaggaaccgacagggtgatacatctgatacagcctgcgattgatgcattaaaaaaccagacatcactcacaaggctgggcaaacagcataaagttgaggtgaagctacgcgaatttggccggacaagcgcacattcatgtaccttcgtattcaaccctcagcttaccacacgttcaggaaagtccggagcgcattatgctgcaacgtcactaaacaggatatgggaatcagcgatgagacgagccggtttacgatacagaaaagcgtatcagtcccggcacacttatgcctgctggtcactcgccgctggagccaatcccaattttattgccgcacagatgggacatgcaaatgctcagatggtctatacagtatatggtgcatggatggccgacaataaccagtcacaggttgatatactgaatcagaggctggcagccactgccccaaaggtgccccaaaaggggttggcagcaaatttagtttag

SEQ ID NO: 76936 - DNA, 267 bp, Citrobacter koseri
atgaaaaagacccgttataccgaagaacagattgcgtttgcgctgaaacaggctgaaaccggcacccgcgtcggggaagtctgcagaaagatgggcatctctgaggccaccttttacaactggaaaaagaaatttgccggcctgggcgtgacggaactgcgacgtctgcggcaactggaggatgaaaatcagcggctgaaaaaactggtagctgatctgagtctggacaaagagatgcttcaggaggtgctgaagcaaaagttctga

SEQ ID NO: 76937 - DNA, 810 bp, Citrobacter koseri
gtgcatttcctgctggaggcttaccgtatcagcgtccggcggggttgcgggctgctgatgcagagcagaacggtttaccactggctgagccggcgtgacgatcgggcaataaccctgcgcatcagggagatagcagaaacccggatacgctacggttgtccgcgcattcatatccagttacgccgggagggctggcctgttaaccacaagaaaacccaccggatttattgtctggaaggactgaacctgcgccggaagcggccccgaaggcatgtcagtgcagcacgtcgtcagcagcgcccgacgctgacgcatgtcgatcagtgctggagtatggattttgtgtcggataatctgtttaacgggcggcgttttcgggcactgactgtagtggataattttagtcgggaatgtctggcgatccatgccggaaaatcgctgaaaggtgacgatgtggtcagcgtaatggaagcactgcgggtgctggataagcgcctgccggtacgtattcagacggataacggcagcgagtttatctcgaaaagtctggataaatgggcgtatgaacacggtgtcacgatggacttctcccgccccggaaaaccgacagataatccgtttattgaatcatttaacggtagcctgcgcgacgaatgcctgaacattcactggtttttatcactggaagatgcgcaggagaaactcgaaaactggcgcagggaatataatcatgagagaacgcattcatcattaaatgacatgactccggctgaatttatccgaagtctccagaaagatgaagatctctga

SEQ ID NO: 76938 - DNA, 150 bp, Citrobacter koseri
atgaaaaaggttcttctctctgctgcaatcgcgactgcattttttggcatggctgcggcaaatgctgctgatactaatgtcggcggcggtcaggttaatttcttcggtaaagttaccgacgtatcttgtactgtttccgtaaacggctag

SEQ ID NO: 76939 - DNA, 555 bp, Citrobacter koseri
atgaaacgttcaattattgctgcctccgtattgtctgctatttttatgagtgccggggtttttgcggcggaattagaaacaggaacgttaacaatagaaggtgaagttataaatagctcctgttatttcaaaaatggtcttgatgatagccgcattgtattacctggtgttgatgcctctcgtttttcagggctaagtgccggagagacggttggtgcagaagaaggaactcagacggctatgaaaatagtatgtcctgtaggttctggtttgaaaacgataagaattacaaatggagtctttaatgcgtctggtgtgcttaaaaagagtagcggaggtgccgaaggggttgggtttaatctaaagctgggaaataaacctatcacgaatgatcaagaaacggatatatcaggtgaactcactccagtttctactggagatggagaggagtataccctggattttaaagcccaatatgcgcgacttgatagttctactgcggttatagcaggggatctgtcatctgtcctgactatttcagtttctgccgattaa

SEQ ID NO: 76940 - DNA, 1356 bp, Citrobacter koseri
atggcacacacaccgatcaatcacaccatcatccgtaacgggatctactacgtcagctttcgcctgtcgggtcataaatatttccgtcggtcgttagagacagatagccacagccacgcgcaactcttgatgtcatttgcatctccagccattccattagtcaaacgtggaaccattcacccggatcagtttggtcaacgtctttctgatttcagcaaccgcttaaagcaacagaatgaacactggctggttcaacaatttctcagtgatgaacggcgcaatcttcagccgatagttgttcaggaataccgggagactgttacaccttcagaagatgaggaagaacaaactgaagcacagtcaaaggatgtgttaacactggctggcgcttggaatatgtacaaaaaggagaaagcccaaaactggacgaaggcaatttcacaggccaatgagcgctttatggaagtcatgttcattgtcctcggtgcatcaacagacgtaacgacgataaccaagcaggacatcaagcaggtgatggaagttgttgaaaacttaccaaagcgtgttgtacagccttatcggtcgatgacggttcagcaactgatcgagtgtgatgatgtgccacctgaagatttggttggcgctgagtctatccacaagcatttgaagatttacaaatcgctgttcaaaactttcctgactgacaataaagatattctggagaaatctccgactgatggagtagtcgccgcaccgtcgaaagcgaggtttggagcatacagtgcagcagaaatgagaaagtttgtggggtgggcgctcaagcagcctgacggttggcagaagtggatcaccttgctgttggcgtacacgggagccagaagaggcgagatcgccaagctggagaaatcacaaatcaagtttgatgaagacagccagcgacactatcttctgatcgcggaaggaggacagggtaaaaccgaaaacgctacaaggcaggtggcgatccatcccaaactgatcgagtggggttttcttgatttcgttaatcggcagtggaaagagaaaatcttctcccctgtgtctggtaagaatatgccgaagatcggcaaagttttagccgatgtccgtgatcagcttggtattccgtatcttgatgattatggacagcggcgattggtgcatagcttccggcatactatgatttcaacctgtttagctggttgggtaggaaacctcgcgcacttgcaacaggtggtcggtcacgagaaaagcggggcagggatcactaaacggtatatgcatactttcacacttacggcagtttgttatgttattgatggcttgaactgggtataa

SEQ ID NO: 76941 - DNA, 666 bp, Citrobacter koseri
atgaaagataaaactttagaagttcctagtactggcttaggagaccacgttcacactactgttaaagcagctttaggttctattcctgttgcaggcaacgccgctgccgaattatttgctactgttattgaaagtccattccaaaagagaaagaaagaatggatgcaccgcgttgctgaagctattgagttattaaagcagaggggattagatgaaaataccttaaaagaaaatgagaagttcatttcagccgttttttatgcctcgcatctagcaatgaaaactcatcagtctgaaaagttgacagctctaaaaaatgccattgaaaatgttgcattgaatattgagcctgatgagattgtacagcaaatgtttctgaatatgattgacaggttcaccccccttcactttgagttgttaagattttttcaagcaccggttgtccgagataatttaagtatgggagggttaagtaccatattatttgatgcttaccctgacttgcatcaacacgaatccttagtaaaacaaatttggaaggagctatacgatcatggcttggtcagcagcgattctctcagtggaacaatgtccagacagggattggctgcacggagaacttctgatttaggtgacatgttcttaaactttatcactcaacattga

SEQ ID NO: 76942 - DNA, 243 bp, Citrobacter koseri
atgacaacctatgcggtaatcagagacggtattgactacggaacaatttttgaaggatttttcctcagccgtcggggaggtgaaaaaatgatcatgaataatgacaggcaatttgtgagcattatccgttccgcacttgatggctcagagaaaaagtatatttttacagtagatgttgaacaaaaaattatgactcgtgatgatggtacagtttttgaattaagagagattgaaacgttataa

SEQ ID NO: 76943 - DNA, 573 bp, Citrobacter koseri
atgggggattttatgaagaaggtcgaaccagtcagagacaaagagaagatcgcagaggttgaaagactgctgcgccagaataacagcagcgctatctacggtgatttgtgggtgttcctgaatcagacagcggcgcggattggtgacgctcttaagttgcggtatgccgactttaaccatatcgaagggaacgtgttgaaactgaaagaacagaagaccgggaagacacgctcaattatgttgacaccaaaagcacttgaactggtagcacaacgtcgtgctgacaatcccggtcatgaatatctatttgaagtggacagcaatcgggccaagggtaagccgatcagccgggtaacggtctcagctaaattcaaagaagccggggatatgctcaatcttcacattgcggcgcacagcccgcgcaagaaccttggctatcacgctataaaacgtggggtaagtctgccgacgctcacgaagctgtacgggcattcatcgcaggcggttactctggcgtattgtgggattatggaaaaggatgttgaagaagtattccagaccatcgactattaa

SEQ ID NO: 76944 - DNA, 372 bp, Citrobacter koseri
atggaactcgtccaaggcaaagacagctttaacgagatggcaactggaatcctggtgaaactgtttgcggactatccggcttactcttctttcgaattttcagacttcggctggaagcccagaggagacagaactcagattgacctgctgtgcaacacactccaggctctcagcgatatgggttatatcaaaataatctcttcaaccgatatggacagcgccgccaagttaacacctcgtggtttgaatttacttcaacagcaggcacctggtgcaggcgatacagttattaacgttctcaaaggagcagcaggtgagacccgctctgcggtaatcggagccatcatcagttggattttcggcgggaaataa

SEQ ID NO: 76945 - DNA, 411 bp, Citrobacter koseri
ttgagaacagctgccatcgactttaaagtcgcaactgccgaagaaatctttaacgccttagtccataacatcaccactacctctgcgctttatagcttccaaaaccgtgttggtacgaataagcgaaacaccacgaaagcccttgaaatgctccgtcagtacaaattggagcagaagcgtaacgctcgttaccgccaggcaattaaaaccattctcaagcctgtaaatccccgtatagccgcaggggaagaggtaactgatatcttctcagatgtcatcaatgggtatatctgtctgtaccgtgatcgtgtgggaattgacctgcatgagaaacaggtattagcgcttatcttctccgaggctcgcgaagacctcaaaaagtacggtgttgaccctgagaagcaccgctaa

SEQ ID NO: 76946 - DNA, 981 bp, Citrobacter koseri
atgagccagaacgagacagaaaaaactgagaaatacacatttctttataagcgcttggtgcattcaacccatatcgtgcgacaggataccggggaagaaattgcaatccctcctgagacagaaacactttacagttacatgcgggaccagtacgagagctataagactcgcagaaagccattttttgaatctcaagagagtatgggccttaaactcaaagggcgtggtcgccgctggatagctgacagaattgatgtgttaaacagattgggcttggttaaatccgaggagcaggagcgcgattcatacggacataaacgctaccaccacactgtaattcccctggaaggtactgatggcgtcgctgccaatctgcttttctacggtcctgcatcaatcagcggtgggccactggctgaaggaatgctcattcgcacattggtgaaaaagaagccgcgcggaacacctaaaaagaaaaaagttgcagcgccattaaacgaggagaacaaaggcgatgacgagcaggcacagcagcaagagcacgaacaacaaccctctggtgtggcttctaaatctgccccgaatgattatgaacaacgatctggcgtttcagagtctgctggtgatagctgcgatgatgtttccgctaatgatgcggtaaacggtgcggagcactctcgccaatgcgagacacctccggtgctggcggtgaacgaacggtactatgccgatcttgataccctcaacaactgggtagaaggttacgacgatgaaggctttatggcctacggtgcgatgtgggggataacaaaacctggtgcaataacggatctgataaagagccatataagaaaaatccagagcgatggatacaaaggatcgcggtctgtcgctaatgatgatcgcagcagtgctgatgccatttacaaacagcagcaggcacagagagcagccgcagcaaaacagggtgctaatgcatag

SEQ ID NO: 76947 - DNA, 471 bp, Citrobacter koseri
ttgtgtgatgttgccaacggcctaagcgccgaaaacccagacctgtcccgcttttacaagtcccgctctcgtgatacctcgttgatcgagactgctaaaaaaatgctcgttcacggttacaccccaggcaaaacggcgctgctcctgcgcttgccgtatgacatggtgaaaaacctttacgataactcgtggaatcctcgctgccgaaaggtaacacataccagtcagtatgccactaagcgaatggcccgaatgtatttcgacagcggcgcaatgctggagaagatttgttctgaccttcaaatgccattattcactgtggtaacgcttctcaagcgtgaaggaataaccgaaaaagaaatggcatcccgaatgccggatcacgatgatccgctatacgtggcctatcgtgaaacagtcgccagaaaacagaagaatccacagcgacgttcaccacgcctgcactactaa

SEQ ID NO: 76948 - DNA, 336 bp, Citrobacter koseri
atgaaaaacgtaaacgaaatccgtgctgatattctcgccgcaatccaagccgctgccgaaccggagagcggagatctgaataaaagcgccgatcagcttctggctgatgctatcgagggatatctgaccgcttcgactgcaacagccagcgagccagccccaaaaagtggcaaaaccatcaaggaaaaagggatcgctctgtgccaccagacccaaggttatagcgctaatctgcgtccggtcagtctcatgatgaaggcaagccttgatgagctaacgcctgaacaacgcgccgcgcttgagcgtctgggttacgttattaatcagggggtatga

SEQ ID NO: 76949 - DNA, 2196 bp, Citrobacter koseri
atgtccggtacaaataagatcgtctccagcctggttaatacagtctcctggcaagtcgattcgaactcattcactcgcgcccgtaacaaaatcaatagcctgaaaaaatatgcggagtcagcgggaaaatctttcgatcaggcgacacgaaagctacaacaagccaacggcaagaaccagctacagcaggcgcgagcagaaacgcagagattgaagctcaatcagcgattaaccgctgaagcccaaaagcaggccgctataaatgcgaggtcacaaactgacgcccagcgtcacgcccaacgtatggcggcgattgcagcacgtaacccagcggcgggtggtctggttcctaaaagtgtccgaggtcttgcagaggcaatcagagcacagcgtgaacaggccgacctagagaaacgcactcagcagatccgagcaaaaggcatccgcttcagcactgccaccaatggttataacctgactccacgccagcgagcgcaagcgattcaggacttcgcacagcttactaaagagtatcatcggggcggccttgccctttccgagtacaacgccagagtaagcaagctacaacagcggttgagacagcagggcggtttaatcaaaaagccggtaactattcccgttaaggcaaaagtgacgggccttgatacatcccttcttgatcatgcaggcacagcgatcaccatcggggcgaccattggtttagggcgtagtgtgatggaaacaggccagaactttgagagtgctctctctggtctaactgcaatcactggttcagctcaagatgcagcgaaagagtttgaatacctgcaacagcagtctaatcgccttggtctggatttaatcagcacagcgaaggattacacacaatttgcggcggctgttggtaacaaactgccacttgaccagattcaccagattttccagtccacgtctgagtatggtctggttgttggtgcaacagcagagcagcaatctctagcgctgaaggctcttaaccaaatgatgagcaagggccaggttatgagtgaagaactcaaaggccagctttctgaaagtctccctggtgctgttggtttgtttgtaaaagcattaaaaaaaatgaaaaatactaccaacctgacagagcaagatttattcaagctcatgcaggacggcaaactgatgtcgaaagatatccttccttttgtcgctaaagagatggcacaaacagcgcgggcaggtggagcgcttgaaaaggccatgaagtcaaatcgtgcagcttttcagcgtctcaaaacctctatgcagaattctatgaacaatgcatttcttgctgggtttggagatgagttaaccgagacattcaatgggttaacctcagcgattaacagcaaccaggacgcatttaagagcctcggcgcggtagcaggaaaggtcacggcgggattcaccgatgcgggttacacggtctataacagcttcattctcattgaagcgctgatcaagaagtatgctcctcaattgtccaagacattcgagggattcggcaacacagcagcatatgcggcaggaattgcgatcttcactggggcaatcttcaagttagctggcgcgttgaggtggcttgtcagcttcgcgaatccattgaaaggtttgcttggtactcttgctggaatcggtgctcttggtgggattgccaccccaggaatcgataacaccagaccagggaaagacggcaaaccagctaaaggcggtaaaggtgggggcttctctatcggtcttcctgcgatcatggctggtgtaagtctcaataatcgtcttagcgagattcaggctgatcctaatgccttcatgaagaaggtgcaggccaacaacgacaggcctaccctttggactgacatcaaaaacttctttgctgaccatgctcaaggtttcaacaatgcgtttgcgggcatgaataccttacccggaattcaaccagctaccgcaggcatggcacaactaccgggcattgataatcttgcttatggtatgaaccttggtaagccattcagtattgaaggtaaggccgatctgactgtgaccaacgaggttaaactcagcattgacgatagcaaattcagcgatgcaattaaggccgaagtacaagaacaggataggaaaaataccaatctcattttgggtatttctggctaa

SEQ ID NO: 76950 - DNA, 345 bp, Citrobacter koseri
atggcattcgaatatgaaagcaaaaccccacaggatgtattggtttataccgatagcccgattttccacaaacgagaagtgatccttgatctggctgctgatgtgacttgtggtgatgtgattaacccgaccactggcgcggcatacgttgcagcagatgctgataactgtgctgtagctctgcaaaatcaagtcgctggtgatgcccgtagccttgttatcagtgatacccaatgcgtgttcaatccatcaggtctggttgtagcggctgctgcagaagatgctgcatacgctgcccttgttaagcaaggcaaccgcattgctgatgcaaacaccgcaatctaa

SEQ ID NO: 76951 - DNA, 1017 bp, Citrobacter koseri
atgaaattaagtgattttactaacctttccggtcagttcctgaagccaagcggcgaggggttccttctgtccagcctggggatttttaccagccgtccaagtgacacacaaatcatcgcgctcgacacactggaagatgtgcagcgtgaagtgactaaatcagttgcccgttatggttctgaaatgtcgggtctaaacttccctaaagcggctaacgtgaccgttcaggctccactgcatgtctacagctcaaccatcaccagccaggattggcaggggaaacgtcagccgggaacaaatcgccagatgaccgctgaagatgtagttgctaatcataccctgaagcactacctgcaaacccgccgtgatgttgaatatgccatggcgcagagtctgtttcacaatactgtagaggcgacacacctacgtgaaggcccaaccatccactgggatcagttctggggtattaaccagccgtctgctgtggtgaaaactggcaccagtgccaacgtcattactgagatgcagaacgctgtcacgctactgaagaaaaatctgggtggctggtcttccagcatcaagcaggtttatctgctagcgagtccgagtcttttcaccgccattcaaggcaacccaaccgcatatcaggcggctctgtttggtgctacgtcccgtgacatcattttccctgacactttgggcgcatacgatcgatacaacatcgggcgcgtaactgtagttcaggttgacgatccgctatacggcattgcagatggtgaaggctacatgctggcgacgttctccaatgttgttgaaggcgacctttcaccttatatgacttaccagactccggcgagccgtcatgctgaagttgctaatggtccggtttatccatcttaccattacgttctgcgtgataagttcatgaactatgaggtggtcagtgagttatcacagattcagatcccaatgcgtccggacttcgttctgaagatcactatggacgacgcagcgtaa

SEQ ID NO: 76952 - DNA, 213 bp, Citrobacter koseri
atgaaattagctttgatcggtactggcaacatgccgttgatgcagtggattctagatggcaagggcgatgatgcgattatcaacatgtcagcgctggcgcgtcggctcggctgtagtcgttccagcctacttgaccgcattcaaaaccacggattcgacagtgcagtaaggtactacctcagcgaacagcggcaacgaaaactgaaaacatga

SEQ ID NO: 76953 - DNA, 633 bp, Citrobacter koseri
atggatttacaagaatgggataatgttatctctatcgcttcgaatgctgtaacaggtttaagcgtgcttggtggcgtcatcttcggcggggttaaacttcaggagatggtgaaaaacaagaaaatggagcaagctttcgcctctgcaatagcgcttaaagatgagattgatgctacgaggggccgttataatcgtatgcgttttgaccttacacgcataatgacttttatcgacacgctcgcaaagactggtcaaaaagtagatcaagaaagctactatcagattcaaggttccttgagagatatggcggaaaacacctttcgtattggtagctgtttcgtcaaagttagccactataacgttgccattaaacaaccagcttgggaaccattcaacgctcttctacactctgctggtgaaacgcaaatagctatatcgaaattagtaaacctcatcacgcaggccttgcttaaagagcagataacagcagaggaattcgcgacaattcgtagtttttatgatgaacatggtgaacggatgaaaggcgttaataacgctatcgccgggatagatattattaaatttgatgatttgtttgacttcagcaaagtacataaaaaaagccgggattaa

SEQ ID NO: 76954 - DNA, 375 bp, Citrobacter koseri
atggacataacgttgagtgaagcacccatttatgttgtcatacagacctgttttgacgcctgctcatttgagcaggcgtttttttatggggaagcggaagagaactgccggatggcggcttcgctttatccggcctacggtgacctggcaggcccggtaagcgtagcgtcaccgggcaatgggaaattactgcggaggattgttctgcaaggtcagcataagaccgtcgcggcgcatggtggccgcttcttccggctgatgcaaccggtccagcgcatcggcgagccaggcgtagtcgtaggcgtcagggcgttgcttgagcgcggcgcggaaggcgaacgtagcttcctgccattcgccatgcttcatcaatga

SEQ ID NO: 76955 - DNA, 1578 bp, Citrobacter koseri
  misc_feature (1072)..(1081): n is a, c, g, or t
atgaaaaaaataaatcagttgataaccccttctgttgatgccacagattatacatcaccagataaaaaaatgttttttaaggactcatatcttgctacaagtttttctgagaaagcttgcgatcctaattgctattattttgtcggggagaaagggactggaaaaacagcattagcatttcatatacaaaatgatgagcctaaaaatattaatgcgaagttattgccaatatctgattctcagtacactagattcattaatttaaaatcagcaggaaagttgtcatatactgattaccccatcatatggcgagcaactattctttatcttatctgtaagttgattattcaaaaaagaaaaagatggtatcataaattaacgtataaatttcacaaactggaagcagcaataacttcttatgataaggatgcacatattcctgagcttgagtatgttattgaatttgctacttccttaagtgaaggaggtaaactatctgcaaacataccggaagcattaaaaatagcatttgagtcaagtgaaactaattcaataaaaacaactcagacatcgataaaagcttcattattggaatgtgaaaaaatattgaaagatagtttatttagtttgaaattaaataagcaaattgtattgtttttagatggcatagatgctaagccaagcggtattgacttttctgaatatcagaaatgtataactgggttggcagatgcggcttggagtctcaacaaggactttttttcaaatatgccaaactcacctcaaaagccaagagtagttctccttttgagaccagatgtttttgattcactaaatttacataattcaaactgtaaactttcagataattcagttgtatttgactggagtacatctaaacaaggctataaaaattcagatctttataaaatgtctgacaaatattttatctcacaaaataatgacaatagtggctgggagagatattttcaagaggaaaggcctggcagtaaaaataggtcgtatagacgacttctccgcatttcatatcaaaggccgcgagatgtatttnnnnnnnnnnttattgatatatataaaaaagatgggagaggttcattaaaccatttttcatggcaagattttatcagccctgaatttactaaagtgtattctcagtatcttttgggagaggtcaaaaattatgctaattactatatatcaaatgcacagtttgatgttttgatttcattttttcaactattagatggcaatagcaattttactgaagaagaatttagagaagctttcaatacatttaaaaataggcacgaaaatgaaatacaagagacatcaagtattacaaatgattatagttcctttttgcagttttggtatgatgtgaatgtaattggctataaggaaagagtggcagatgaaaataataatttctaccattggtcctatcgtgaacgaaatgcactcaatgtcatgccaaaaattaaaaaagggtgcatgtacatgatacatccaggtatagcgaaagctattgatatcggtaagcctactgtccgagaataa

SEQ ID NO: 76956 - DNA, 582 bp, Citrobacter koseri
atgagtgcaatagacactttaagggaatacgccgaagtatggcatttatttggtaatatgccagatgatgcaactctaagtgctgaagtttcggctctttatcttggtgtgagtgtcaaaacccttgctcgctatcgccagaatggtaatggcccagcttatatccaataccaagcagaagacagcaaagcacggaatcaacgagtaaattatctactgggtgatttaagggcttggcgggatagtcataaggtaagcagtacaatggaggctgcacaggtccgaggattggcttttacttgtttgaatgattttactaagccagaaccgttttggtctattgataataaaatttactctcatgccctcactatttctgacgaaatattcaaggaactattaaatacagctcgtgcagaagttatctggatctctgttgaaaaagttttatctgaggactggcatagtgcgagggaacggcagatatggaatgatttttttgttatttttttaaatgagcttgtgttgacatcaaatttgctacaggaaaaacatataattaatgataaactcttagaatag

SEQ ID NO: 76957 - DNA, 1404 bp, Citrobacter koseri
gtgaagcccacccttaaccatgcgggaaaagtcgttttcgaagcaaacccagagcaaaaaccttacatagtttttgatgaccaccgcgactcaccagttggctttggtgtgaaggtcagtttgacgaaaaaaacctatgtgatccagcgaagagtagcctcgtcagatcgtaatgtcagtgagggtaagaagccaagctctgtcttgaaagtcaaggttggaaatgtgtctgattttccaagtatcgatcaagcccgtgaggtagctcggcagttggttcagacaatgatcgcaacaaagagaaatcccaacaaaattaagagggaactcgatcttgccgaattgacggtgagtgaagcttttgcccaatacagaagtcacttacttggcagaaccaggcctgctaaacccaacaccctaaatgtattggacaaagcagaaaatcgattaaaagagtggcaaaaccttcgaatcaaggatctcactggtaatgaaatcctccgtaagtttgacgagattgctgcaaaagctagaacagcagcagagcagactttccggtgggccaatgttgctgtcaaacatgcgattgaaattgaggctgggaatgctcagacacaacagcggcaaccttcgttgtcatacaatccattttctatcctgaaagtgcagaaaaagttcaggactcgttctgaactggaagatagctatcgtgcgaaaggtgttcgaaaccccttatcacctaaggacacattaggacgatttcttaccgcattacacaacaaaagaagcttcaatcgtctggggtgtgattatctgttgttgaccgttctgacgggggccagaaaagaagaaacggcttcactgtgctggcgagagactctgacagaagatgaagctaaaacgaccagctatatcgatctcgaaaaccgggttattcgcttttacgacacaaaaaaccgcaatgaccatgagttgccaatctgcgatgctacgaagcgaattctggaagatcgacgagatatcgtcaacgataccgaaaaacaagcagataaacgcaaatgggtttttccggctcgttcgtcacgaagtaaggtcgggcactattcagacagtaaaagcttacgcgagtatatctgtcaggaagccggaataatgaagttgggaatgcacgatctgcgtaggacctttggccgtgttgcagaagaactgacctcgtatacagtggtgaaaagattgctcaaccatcgcaataccaccgatcccactgaaaggtatgcaatgcctgataatgaacgaatttatggggcacttcaaaggattgagcttcacatgctgatgacggcaccaggattgtataatacacttttggcttcggcgaaatatccaccattaccagtaaattag

SEQ ID NO: 76958 - DNA, 390 bp, Citrobacter koseri
atgtccgatccattaaccggcgctggcgcagttctcggcggtggcctgctgggatccgttgcgtatggagtttttactcacaccgactttggcgtcgtttttggcgcgtttggtggtgcagtattttacgtcgcaacagcaacaaaccttacgcgagtccgcctggcggcatatttcctgacctcgttcatcgtcggggtgcttggagccggatttgttggttcctggctcaatgccgccacgcgttatgaaaaaccgctggatgcgctcggcgcagtagttctttctgcactgtgcataaagattctaactttccttaataatcaggatttgaacagcctgtttggtgtctttacgcggttacgcgggggagggggaaatggtaagtga

SEQ ID NO: 76959 - DNA, 279 bp, Citrobacter koseri
atggtaagtgacccgacagcactgcttaactcgatcacctgcgcggtgatagttcttgttctgatgttctaccagcgtcggggtgcacgtcaccggcctttcatttcgtttctggcatatctgaccgtgctggtttacgccgccattcctttgaagttcatcttcggcctgtatcacgattcaaactggtttgtggtactggtgaatattctgatttgcgttgcagttctctgggttcgtggaaacgtggctcgacttattgacatgctgcataaataa

SEQ ID NO: 76960 - DNA, 630 bp, Citrobacter koseri
atgaatcaacaacaatttcagcaggcggctggtataagcgccggattagctgcgcgctggtttccgcacatcgacgcggcaatgaaagaatttggcatcactgtgccgctcgatcaggcgatgttcatcgcgcagatggggcatgagtccggcgggtatgaaaagctggtggaaagcctgaactacacagccgatcgtcttgttcccgtattcggcaagcaccgtatcacggcacagcaggctgctgcactcggcagaacggcaacgcaaccagctaatcagaaagcgatagccaatctggtttacggtggcgagtggggtaaaaagaatctgggcaatcaggttgccggtgacgggtggaaatatcgcgggcgcgggctgaagcaaatcacagggttaagcaactatcgcaaatgcggcctggcgctaaaactggatctggtcacgcagccggaattactggagcaggacgaaaatgcagcgcgttccgcagcgtggttctttgccaccagcggatgccttgtgtattccggtaatgtggaacgtatcacgatcatcatcaacggcggtaaaaacggtcttgatgaccgccgtcgccgtttcaatctggcaaaagccgtgctggtctga

SEQ ID NO: 76961 - DNA, 270 bp, Citrobacter koseri
atgggaattgaaatgattatcggcctggttgttgctgtgctggccgcaattgcaggcgcatttggtttcggtcacgcgcgcggcaccagcaaagcggaaaccaaagcgggaattcaacgcacagaagaacgcgcggcagctactgaagcagttgcagaacgccgggtagagacaacaaaaggagccagggatgtacagcagactgttaatcatcttcctgatgacgatgttgaccgcgagttgcgtgagaactttacccgcaaaacctga

SEQ ID NO: 76962 - DNA, 213 bp, Citrobacter koseri
atgtacttccatgaggtcatatcatcaaaaataaaatctattggttactacccttcagagaaaatactggagatagcgtttgtagattcaggtacttatcaatacattagagtgtcgaaaaaaacttacaattcctttgtgacggcaaaatccaaaggtcgattctttgatggcgtaattaatagcaaatatctttgccgaaaaacaaggtaa

SEQ ID NO: 76963 - DNA, 174 bp, Citrobacter koseri
atgagtttagaggaacaaaagctaaaagcagaagcagaaatttccgcccttatctctaaaaagattgctgaattgagaaaaaaaacgggcaaagaagtttctgaaattgagtttactcccagagaaaccatgactggtctcgaaggttacgcagttaagatcaaactcatataa

SEQ ID NO: 76964 - DNA, 507 bp, Citrobacter koseri
atggataacgagctgaaaaatctccgccttaatattaaccagctggcggcgcttaccgatctgcatcgtcagacggtcgccagcaggctgaataatgtcgaacctgctcccggcagtaattcccgtctcaaactttattccgttctggatattctccgggaactgctgggccgaacaacgacaccggaactggtggacgtcgataagatgctgccacccgatcgcaaagcgtggtttcagtctgaacgtgaacgccttaagttccagcaggaaacaggtgaacttatttcggcatcggcagttacccgcgaattttcctcgatggcgaaagccgtcgttcaggtactggaaacgctgccggatattctggagcgcgattgcgcgatgacacctgctgctgtggtcagggtgcaaaaagtaattgatgacctgcgggatcagattgccctgaaggttgaacaggcagatacgccggaacaggaggacagttcgtcagaagaggagtaa

SEQ ID NO: 76965 - DNA, 2118 bp, Citrobacter koseri
atgcgacaggccacggcggcggaggtcagaaaaaacactgccgggatcatcagggcgccacgtcgaatgcctgttgccgaggccgtacataaatacatgcatgtcccggttggtgtgggtaactatgttaaatgggacccggaccttgccccctatgttgtggaacccatgaactgcctggcatcgcgtgaatatgatgctgtcatttttgttggcccggcccgaacaggtaagacaatcggtctgattgatggatgggtggtgtacaacattgtctgtgatccgtcggatatgctcatcgttcagatgacggaagagaaagcgcgtgaacactccaaaaaacgtcttgccagaacatttcgtgtcagcccggaagtggcaaagcgtctgagcccgttacgcaacgacaacaacgtgcatgacaggaccttccttgccgggaactacctgaagattggctggccttccatcaacatcatgtcctcgtcagattttaaatgcgtggcgctgacagattacgatcgcttccctgaagatatcgatggcgagggcgatggatttactcttgcctccaaacgtaccaccacctttatgtctgcggggatgacactggtcgaaagctctccgggcagggaaatcaccaataccaagtggcggcgtaaatcgccgcacgaagctccgccaaccaccggaatcctggctttatacaatcgcggcgatcgccgccgctggtactggccatgcccacactgcggggaatactttcaacctgcaatggaggcaatgacaggctaccgggaaacacctgatccggtgaaagccagtgaagccgcgcatattgagtgcccgcattgtaacggcattattaccgccgataaaaagcgggaacttaacggaaagggcgtctggttacgtgagggcctggtgatcgacagggaaggcaatattacgggggaaggtcgccgttcgcgtatcgcgtcgttctggatggaaggaccggcagcggcttatcagacctggtcccaactggtctacaagctgctgacggcggagcaggactatgaagcaaccggcagtgaagagaccctgcgcgcggtgattaacactgactggggacggccgtatctgccccgcgcggccagcgagcagcgccgcgccgatgtgctgatgcagcgggctgaagattacggtaaacggctggtgccgcccaaagtccgtttcctgctggcgtcagttgacgtacagggcgggaagaaacgccgctttgtggtccagatcattggctacggtgaaaacggggaacgctggctggtggatcgctataacatccgtcagtccctgcgctgtgatgaaaatggcgaaactcagccactgcatccgggctcctatcctgaagactggaagttgctgattacggatgtgctggaaaaaacgtatccgctccagtccagtccttcgcggcggatgcccgtactggcaatggcggtcgacagtggcggggaagatggtgtcacggataacgcctataaattctggcgtcagtgtcgccgtgatggtctgggtaaacgggtttacctgattaaaggggacagcacgaaacgtcagaaaatcattaccagaacccatcccgataacactgaccgaagcgatcgccgggcggatgcgcgcggcgaggttccggtttatctgttgcagaccgacctgcttaaagaccagctcagtaataaccttgagcgtgaaacgcccggggcagggtatatccattttcctgactggctcggggaatggttctacgaggaactgacctacgaagaacgtgggacagacggaaaatggcgtaagccgggaaaaggcaataacgaagcctttgaccttttctgttatgcccacgctgtcgcgatcctgcgcggctacgaaaaaatccgtgactgggaacaaccgccagcctgggcggctgctcaggatatcaattcaaacattattgacggggaacgccccagggagattgctgtgaaaaaagcggtgcctgcacgttcgtctccggtttcagaaactgaacaggccagcacgctgtctggcggctggctgggtgtcagcgaaaacggaggctggctgtga

SEQ ID NO: 76966 - DNA, 216 bp, Citrobacter koseri
gtgacgaaaacagaaattcagcagatgctggttacggttcgccaggcttaccgtgactcccttgatggtaaaagcgtgtctttcactggtgtgaacgggcgcgccattactaaccatgatccggtagcgctgcgtaaagagctggaatactgggaaaaacgctgggaaaccgtgagtcgtcgcagcggttctttcaaactcgctaactttctttaa

SEQ ID NO: 76967 - DNA, 1515 bp, Citrobacter koseri
atgggcatttttgacagagcacttggcgccattgcgccagggtgggcggttgcgcgtgcgcgaaacagaatgctgctgcaggcgtatgaagccgcgcagccgtcgcgccttcataaaggaaagcgggaaagccgttctgcggatacggctgtctttgccgctggtgtgtcgctgcgcgagcaggcaagggcgctggatgaagatcacgacatcgtcattggcctgctggacaaactggaagagcgggtaatcggtgctcaggggattcaggtggagccgcagccgctggggctggatggcaagctgcatgaagattttgcggccaggatatccgcgctctggtcagaatggtcggtgcgcccggaggtgacaggcatgttcacgcgaccggaagccgagcggctggccctgcgctctgcgctgcgtgacggtgaaatttttacccagctggtgcgcgggccggtagcggggttgacccattcaaccagcgtgccgttttcgcttgaacttcttgaagccgattttgtgccgatgaatctcaacagcgtcgccgggcagcaggtgcggcagggcattatcgtcaacgcatggggcaggccgacgggataccgcgtctataagtatcacccggcgaacatggcccgtttcagcgccgagcttaaaaccgtttcggcagaaaacatgctgcatcttgcgcagcggcgacgcctgcaccagttgcgcggcgtcagcctgttgcacggcgtgattaaacgtctgagcgatatcaaggactacgaagagagcgaacgtgtggccgcccgcatcgctgccgcgctgggcttttatatcaaacgcggggatgcggccagttttccaggggatgacgactggaaagggccagagaaaaaataccgtcatttcgatatcgcgccgggcatgatttttgacgatctggcgccgggtgaagatctcgggatggttgagtcaaaccgcccgaacgttcatctccatgaattccgcaacggtcagctgcgtgccgtcgccgctggcagccggggcacctattccagcatcgcccgtgactataacggcacttacagtgcccagcggcaggaactggtggaggggcaggaaggctacaacgtcctgcagcagtggtttgtcggtcagcacagtcgcccggtatatcgcgcctggctggcgatggcgctgctcacgatggatatcccgtcagatgtagaccgccagacgctgttcaacgcgacctatctcggtccggtgatgccgtggatcgatccggtgaaagaggccaacgcctggaaggggattgtccgtggcggcgcgggaaccgaagcagagtggatacgcgcccgtggtcagtctccccaggaggtcaaacgccagcgaatgcgcgaaaccgaatttaaccgtaaacacgggctggtgtttgattcagatgccgccaacgacaaaggagctatgcctgatgcaaccgcaaaacaaaccgggcagccgccggaagatgatgattaa

SEQ ID NO: 76968 - DNA, 2109 bp, Citrobacter koseri
atgcaaccgcaaaacaaaccgggcagccgccggaagatgatgattaacccccgcgccagcctggcgggcgttgatgccgcaaatggccagtgctggtatgagatccgcgcgctggccgccgggcgcgtggagattttcctttatgacgtgatcggcggctgggggatcaccgcccagcagtttgtcacggactgtaaggaggccggtgttttcgacgccagcgcagtggatttgcatattcacagtcccggtggcgatgtgatgcaggggtttgcgatctataacaccctggcgcggctgaaagcaaaagtggatatctgggtggacggtgtggcggccagtatggcttcgatgattgtctgtttgcctggcgccacggtgcatatgccggaaaactcctggcttatggtgcataaaccgtgggggggtatcgccggggattctgacgatatgcgggattatgccgactggctggatcgtaatgaagcgctgatgctcagtgcctacatgaacaagaccgggcttggacaggaagagctggaagcaatgctgaaagctgaaacctggctcaacggcgctgaagcggtggaaaaaggcttcgccgacacgcttgaacctgaactgcaggctgcggcctgcgtgaatgaaaataaactgaaggattaccagaatatgcctgaacagattaagaccctttttacgccgcgtgccgaagccccggtaaatcagccgcctgctccggttcagcagcccgcaccagtgcaggcaacccagacccagccggcaccacaacatcccgcgccgcagatgacaaacatcgatatcaccgcgctggctcagcaactacagcagcagatgcagacggcgaacgcggaacgcgtaaatacggtttccgctgtgtttgaggcgttcccgaccttcgcgacgctgaaggctgaatgccttgccgacttttcctgcacggctgaaaaagcccgtgacaaactgctgcaggcgctggccgcagggacaaccccgagtgcgggcccgggcgccattcatctttatgccggtaacggcaatcttgtcggtgattccattcgcgcggccatcatggtccgggcgggctatgcgcaggctgagaaggataacgcctataacggttataccctgcgtgaactggcacgcgcgtcgctggtggatcgcggtatcggtatttccggtcacggtgcgccgctggcgatggtcgggctggcgttcacccacagcagcagcgatttcggcaatatcctgatggatgtggcgcacaaggctgcactgctgggctgggatgaggcaaacgaaaccttcgaccagtggacccgcaagggcacgctgaccgatttcaaaaccgcgcatcgcgcaggtctggactctttcccgaccttgcgcaaggtgcgtgccggggcggaatataagtacgtcaccctgaaggatcgcggagaacccattgcgctggcgacctatggcgagcttttcagcatcgatcgccaggccatcattaacgacgatatggatatgcttactcgtattccgatggctatggggggcgctgcgcgcgcaaccgtcggcgatctggtctgggcagtactgaccagcaacccgaaaatgtcggacggcaagccgttgttccacgccgatcatggcaacctgatagcggctgacctgagcatcgatggactggatgatggacgtaaggcgatgctgttgcagaagtctggcgatcgtcatctcaatatccgtccggcttttgcgttgacgccggttgctattgaatcccgtgctaaccagttgatcaaatccgccagcgtgccgggggcagatgccaacagcggcatcaataacccgatccagaacttcgcaactgtcctttccgaagctcgtctggatgacagcagtccgacagattactacctgtcggcggcgaagggccgcgacactatcgaagttgcttatctggacggtgttgatacgccatatctggagcagcagcagggcttcaccgtggacggtgccgcattcaaggtgcgcatcgatgcgggggtggcgccgcttgactggcgcggcatggttaaagtcaccaaaaaataa

SEQ ID NO: 76969 - DNA, 336 bp, Citrobacter koseri
atggcgaagaactatcagcaggacggcaacactcttgattttcataataccggtgcggcagatattcattcaggtgaagccgtactttcaggggcgctggtgggcgtagctcacgatgatatcccggcaggattgtggggcgtactgcataccacaggcgtattcgtactgccaaaggcggctgaagtggtcactgttggtcagaaactgtatctggcagacggtaaactgactgcggaagcgggtgaggaggctgcgccgaaccctctggcgggtacggcctgggctgaggctgctgctgatgacgagttcgttcctgtacggcttggctactga

SEQ ID NO: 76970 - DNA, 357 bp, Citrobacter koseri
atgaaccgcttccgtgaacgtctggcgagagcggatgcccggatagaccgggcatttgccgaagaggttccggccattatttctgtcggtgatgagcagcggcccgtcgcggtgattttcgaatcgccggacgcgcctgtcagcgtgccggggggcggagaaatccagaaccatgtcccggccttcagcgccatgaccgcagatattgccggactgtcaaagcacgaccgggtcctgattaacaatttaccctggcgtgtcactcatgtcggtgctgatgaagaagggcgaacacgggttaccctggcatacggggagccgggtaagccccagcccgaaataacgaagtggagctga

SEQ ID NO: 76971 - DNA, 657 bp, Citrobacter koseri
atggcgcggggatcacggttgcggcgggatttacctgtcgatattgatgtggatgctatctggggaatagcggaaagcattggggcaacccagaaacaatttcgcgcggcatattccagggcattaaagcggacagcggccacattacggaaaaaggcaatggccgatctgaaagatggcctggcccccagaagcattaatctggtgcgtcgccggttgctttcattccgtctggatcgcggttcccgcctcgataattttcgtctctggtttggtctcaacgccataaaagtgaaggatctcaaagggcgtatttccggcaggatcagacctcatcacacgcgcagggacaaaaataccgggcgattcattaaagccaggcggcaggccgataacgcgggattcacgccgaaaggccgtctgctgtcggcatgcacgtttgagaatggcgaggttgcacgttcccgacgggaaaaccgccggacggtggtgattcgtgacccgcagacccgccgcacccatgaggctgaaattgatatctacgaaccgatgctgaactacatcgaggataacgcctttgcagaagcgatggagatttttatgcatcactttgaaaccgatctgcgcgggcgtgtgaaagcccgtatttctgtctga

SEQ ID NO: 76972 - DNA, 555 bp, Citrobacter koseri
atggcggagccactcctgctggcgcagtatcacgacgccgtgatcggcgcgctgaaaaaaattgaatgggtccgggatgctgatgcctacccggaaaaaaatgtaccgcgcttttccggcctggtcacgcccgctgtctggctcaccattaacggctgggagcagggcgggggaaacgaagggcaactgaacgtggtgctttcctgcgatctctttgtggtggtggaccccgccgcttcaggtgtcagcaagccagaaattttcctgcgcacggcggcggctgatattacccagtggatcgacggacagcagttcggtctgaattatcctgaacccgccgttttcattgatgccgggcgcgatgaatttgatccgcgcatggatgactatcttgtctggcgtatttcttacacgcagtcagcggccttcggtgcagatccgtttgcgcagctgaatgctccgcttaaagctgtctggctcggtaaggcgccggatattgggcgcgcgcatgtggacgattaccggctgatttacgaggcaaaacctgatgagtga

SEQ ID NO: 76973 - DNA, 618 bp, Citrobacter koseri
atgagtgatattgagggtgacttacagcgcaggctggcgaacatcgtgcggcgcggcgtcatccattcagtgaagcatgatggtatcccgaaatgccgggtcgatttgggcgatatcgttaccgcctggctgccactctgtcagggctttgcgggcgctaaccgtgcggactccaatccatatgcggtgggggatgcggtcacggtgctgtctgaggccggtgagctgaacaacgggcgagtgtatccgggctggaataccggcgcgatgccagtaccgggaggcagcgaaagtgagcatatcacccgctacggcgacggtactgagatccggtacgaccgcgcggcgcatgccctgacgatcaccctggcagcgggcggcacatacaccatcgtcgggaaagggacgctggatggcccggttgaaatcactgacaccctcaccgtccagggtaaaacgcagatcaacgccgacacgaatgtgatcggaaatatcggtgccacgaaggagatcactgataaagccggcagtatgagcaaaatccgcgagacctttaacgaccatgatcaccccggcgacagcggcgggaccacgggaaaaactaatcagaaaatgtga

SEQ ID NO: 76974 - DNA, 1470 bp, Citrobacter koseri
atggctcagttacatggtgttgaaacaattgaactgacatcgggaaccgttgctgtcacgacgattcagacggccatcattggccttgtgggaaccgccccggacgcgtctgacggaacagcggcttcggggtcatccggcacgccgattctggataacgttctcgacttcaccgcaaccctgaaggggcggggcgggaatattatcaatgttgaagcggtggccggacagacggatgcagaaaatccggttgccgtcgggacatctgcggtctgggacccggagtcgcttaccctgaagatcacgctgggctgcgatgaaaatggcgtcattaccgccacacccgcagaggtggccggggtcgtcaatgaggctgaagggggaaaggtaaaggcagcaggcgccggaggcgggcttgtttcaccattcatcctccagctatccggcggcgaggatgaaccttttccgctcaacacgcctgtggcggtcgtcgggaccacgctgttatcccgcctcggtgataacgggacgctgaaacaggccctgaccgatatcaacgatcagcgtaatgcgctgacggtggttgtgcgtgttgcgcaggagagtgaggaaactaaacagcgcgcggcagtcctgaaggggatcgggctgctgtcatcagcgaaatctgtcaccacgtatcagccgcgtattgtgattgcgccaggtttcagtgaagacgatgcggcggggaaagcgctggagaccgtcgccggaaaactccgggcgatcgcttatgtggactgtgcttccggcgcaaccctgcaggaagtggtgcagcgccgccagtcctatggcgcacggacagaattgctgcgaccgcgcgtccaggtcagtaacgctgacggccagctggtgtaccgtccttattctgcctttgccgccgggttgcgcgccagaatcgattacgaaaaaggctggtggtggagtaaatccaaccaggaggtctacaacatcctgggcgttgaacaggtggatgaatttattcttggcgaagagaactgtgatgccaacctgctcaatatgcagaacgtttccaccattatccgccgtgccgggtttaaacactgggggaaccggctgtgcgcgaccgatccacaatggcgttttgaatccgtccgacgtacagcggatgtgattgaggacagcatccaggaagccatgctggagtatgtggaccgcccccttgatcgtgagaacgcggacgacattatcggcaccatcaatgcttatatgcgccagcttgtgggactgagggccattttcggcgggcgggcctggctggatgaagagctgaacaccgcagaaagcatggctgcgggtgtcctgtacatcaactacgatttcgggccgaaatcgccgactgaactcatcagcctgcgtgtccgggtgaacaacaactatgcgcttgaggagatgcttgcagcatga

SEQ ID NO: 76975 - DNA, 507 bp, Citrobacter koseri
atgagcgataaaaatacattacgcgtctggaccttcttccggcaggggattcgtatccagggggcgcatgaatttacgccgccgtctctggctgttgttaaaacagatctgcgtaccggcgcccaggacgctcccactccggtggatgacggtatggaggcgctgacctgccaggtcaaattctatggcatcgatactgacatgcttgccagcttcggttttgtcagcggcagccgttcccggtttacggcctatcaggggtatctgggcaatggtacagcgcgggggacggttgaggaaattgaaggttttgtccagaccgtcacaccggatgcccgtggaaaagaaaacctgtctgaaaatgccgttacggtggatattgccgtgaattattaccggcagtcgctggagggccgggagctttttgccattgataccgagcgttttgcgcgccgtgtcaatggtgtggatgtcctgtccggcctggccgcaaaagttcgcctctga

SEQ ID NO: 76976 - DNA, 300 bp, Citrobacter koseri
atgagtattcccggtgaaacccgtgtaatcagactgttctcccccgtcacgcttgaggggggcgcggtacttgatgaagtgacaatgcgtgagccacttgttcgtgaccgtatcgctcatgcaaaggatcgtggcaatgaagaagaaaaagaagcccgcatgatcgctctgctctgcaacctcagcgaacgggatatctggcaactgacagcggcggattatgcacaactgctggacacatttaacgtttttatgctcccgcccgcgaagcgaccgaaagaggacttctccgggcagtaa

SEQ ID NO: 76977 - DNA, 1848 bp, Citrobacter koseri
gtggccggaataagccagaaccttaaggccgttattactttcggcggtaacatcgacagttcctggagccgttcggcaaacggcctgcagaaaagcctgaaggatatcggcaggcagtctgaacggctgacaaaggaccagacaaagctggctgcggagattaaacgcgcaaagctggcgggggaaagcctgggcgatcttaaacggcgttattcggaagtgtccagggagatcaggaaaacagagactgaacagcagaaactgaatgcacagttgcagaaagcgcagcgcatacagtcattcaagagcgctggcaaggggctgttccggcgcgggctggggatcgccgggcaactgggtgggatggtcgggccggggctggcgattggcggcggcggtgtggtggcctccgcgcttggtacgcttatcgccccggcagccaccaacgcagaaaccgcccagcgcgcgaatgtggcaaaaagctacggtgtggatgtcaccacgtttaacgcctgggacacgctggcaaaacagtacgatatgaacggggaaaacattggcgatctgttcgaagagtatctgcataaagccggtgagtataagcagaacggtaagcaggggtcgctgcaggatgcttttgaaacgctgggcttcaaagccggtgattttgccggactcagtgatatggcgcagttcaataaaattgttgagcgcgcgctcagcctggaggatgagtcaaaagcctcctttgcgctggattcccttttcgggggagaagccagcaaactgctgatgctcatcaaacagtccggcagaagttaccgcgaactgatggatgagcagcgccgctataacctcgtcacaaaagaaggggccgagggtgcgattgcagggcatcaggccatcagtaacctgcgtactgtgttctcctccgccgttgctgaaatatccgggcaactgggtaatgaactggccccggatgtacggcgcctgacggatgatcttgccgactggtttaaaggcggcgggataaaacgcattgttacttttctgcgtaatgatctgtatccgggcgtcctgtctttcggtcagggcgtcgtttttgtcggcaaaattatttatgcgctggctaaaaagctttcatggctgctgcccgacagttcttctgaccagaaagaggtgcttaaatctctggcaatgaccggatcggttgatatcgcacgaatgaccgctcagagaaagggacagggagagtggtttgagcagacgctggctgacaacccgaatctgcccgatgaagtgaaaaatgcgtatatcggcaccaggggatttatcaaagacgacgatgaaaccttcaataaatcactgggtaagtaccttactcctgacagcagcgggacgcttctgaactgggataccgccctgcagcagaatcgtgagcgggcatcccaggctggtgatacccgggagaataccagcgcctgggataagtttcagttatccgtggctggtgtgtctgaaccgtcggacaacggagggcatggcagcgccagcgatccgggcaggtactcgctaccatccgcaaggagacctgatgtatccggtgatccggcgcgggcaaccagtgatgccggatactgggacgcgctgctgcagaggatagacagcctggataaacagccatcccggcagatcaccgacaaccggaaatttgagtaccggttcgaaatcaatgcagcgccgggccaggatgagaaagccattgcggatgaggtgtcagccgtaaccaaaaataattctgcatttaacggtgataacagcctgactgatggagggcttatctggtga

SEQ ID NO: 76978 - DNA, 471 bp, Citrobacter koseri
gtgagtgaaatcattccattgattgaagaatccggtcagcggcaggcgggcgcgcagcgcggcgcccggcaggccagtgtcatgatgatgctgggggattttgccttttcgattgataccaccgcatataaccagcttacacgcgaagccagctggcggtggagtgagcaggaacggatagggaaccaggacctgctccagtacaccggcaagcccgggcggactgtaaaacttgaaggacaggcacacgctttttttcgaaaaggcgtggatgcggtaaatgacctttttgatcttgctgacatggccagaccccagcaactggtcagcggtgaaggggatgtgctcgggtggtgggtagtgactgacttttcggatacaacgaaccgctttctgcccggtggaggccatcgtaataaaaactggaccatgacgttaaaacattatgccgacgatatatcaaacccgtga

SEQ ID NO: 76979 - DNA, 216 bp, Citrobacter koseri
atgccgacgatatatcaaacccgtgacggtgatgtcctggatgccatttgcgctttgcattatggcactgaaaacctctcttattcagtaacacaggttctggaagcaaatcaggggctggcggattacggggcggtttactcttccggcctgcttatcaccctgcctgatctggtgctgcccgttgaggattcgccttttagtttgtgggattaa

SEQ ID NO: 76980 - DNA, 1116 bp, Citrobacter koseri
atggctaatcagattacatcgcctgaatatgctccggcattcagtattaaggcagaaggaaaggatattacccgcgcgctgcagcagagcctggcggagctgacgctgacggattatggtggcgccaccgcgaaagcggatgagctgaaaattacattactgtctgaaactctggccctcccgacgaagggggccaggctgcaggcggcgctgggctttaacaatcatctggtggacaagggctggtttgttgtcagcggtgtcgccagcagtgggccgccaagacgaatcgagatttatgcaaccgctgcaccgatgaatgcgcagaagcaaccgggtgatgtgacaggccagaaaacgcggagctgggataatctgcgcctggccgatcttgtcaaaacggttgcgagggataatggccttatcccgaaagttgccgccgggcttgctgatatacatatcgatcatattgatcaggttgctgaatccgacgcgaatctgctgtcccgtctcgcccgtacttacaatgcggtgagtaaaccgtctggcggttactggctttttttacagcagggggcaacagctacggtttccgggaaacaaaccggagggatcactgtcacaccggatgaagtgtcgaactggtcctacagtgaaggacagcgcggcagctccacgggaaaagccaccggcagcgggggaaaggctgaaaagaaaatcggtgttcgttactacgacgaagcggatggaaaaacaaaaacggtctccgttgaacatgacggcccggcaatgactaacccgtatacccaggcagagaagaacaccgccgaacagcaggcaaaagccagaaagacacaggccgggcggaatgaacagaaaatgacggtgacaggtccctgccgaccgaagcatgttccgctaactgccgaagccggagtgacgacatccggctttggttcccgcgaagatcgcagctgggttgttgaatcactcgttttttcactgacgcccgcagggttcagttacacgtataacctggtcgttgatattcgcaggcccgcaaaatctgcgaaaaaatccggcaaagataagaacggcccggattatttcggttaa

SEQ ID NO: 76981 - DNA, 354 bp, Citrobacter koseri
atgaacggtgtaaacaaccggacaggaaaacgcctgtccggcgctgatcatttgcgccagtccgtcagcgacatactgaccactcccgtcggaagccgcgttctggtacgagactacggcagcgatctattttcgctggtggataacccccgggatgacctgacgcgtctgcggataattgctgcatcagcgacagcgctggcccgctgggaaaccagactgaaggtgacgcgcgtacttgtctcttttcctgaaggtgagtccggctttgtgctggatatcgaggggatcaacaaggaaaccaatttaccgatgagcaccggaggcatacccatttatggcaagcagctatga

SEQ ID NO: 76982 - DNA, 918 bp, Citrobacter koseri
atggcaagcagctatgacgtgatcaacctgtccgaactggccgtaccggatgccattgtggtgccggatgcctcggagattttttcccgctggctgtcgcggctgcgggagctggacagtgagtttgatgcgctggtggagtctgatccggcatacaaacagggagaggtgacagcctaccagttaacgctggcttttcagcgtgtcaatgacgcagtccgggcagtattcctggccagcgccagaaatgacgatcttgatcaacttggggcggcattcaatgttaaacggcttgttattgaaccaggcgatccgaatgccgttcctcccgtggacccggttctggaggatgacaatgcctttcgtgagcgtatccagctttcctgggcgcagcttaacaccgccggtgcgcgaaacgcttaccgctttcatgccaaatcagcggacaccgatgtgctggacgcggatgcctgtggcccggagacacacaaccgtcccggtgaagtggatgtgtacgttctgtcgcgaacaggagacggcacggcgggggaaacattgctggatgctgtcaggagcaatctgagcgctgatgaagtccggccgctgactgactttgtgaccgttaaaagtgcggagatcgtcaggtatgcagtgactgccaaacttgaaataccggacggccctgacgcgcagactgttctgaagaatgcgactgatgttttgcgggcctacaccatcctttctcaccgaataaaagccgtcgtcccgctttcagcaatctatgccgcgctgcaacagtccggtgttgtcagggtgaaactgatttccccggtcgcagatctggaggctgaagccggtaaggcaccgtggtgtaccgcgattaacgttacgcgagaagagggaaacggcaatggctga

SEQ ID NO: 76983 - DNA, 564 bp, Citrobacter koseri
atggctgataaatttcgttccctgctgccgcccggcgcttccgggggagaaagagcacaggaacaggccacaacagaacagattactgcgctggataccgacatggtgcgcaaggtgaagaatgcagacgactgtcctgcgcatcttcttccgtggcttgcgtgggaaagtgccgttgatttctgggatgacagctggacggaggcgcagaaacgccaggtgataaaagacgctccctacgttcaccagcacagggggacagcgggagcggttcgccgctcgctgggcgccataaatctcccgaccacggttgtggagtggtgggaggatacaccgcgcgcggcaccgtacacgttcagggttgaagttcacagcaatcagggggtgagcgatgccctttattaccagatccggcaactgacggaccgggcaaaaaacctgcgcagctacctgagccggattgatgtgatcgcaaatataggtatggatggttcgttttatatttcgggtgcgacgacagcacatatcgatgtagatatttttgccgaggaaacacatggctga

SEQ ID NO: 76984 - DNA, 1674 bp, Citrobacter koseri
atggctgattactattctattatcacaaaccgtggtaaagagctggaagcggaagcgctggccagcggcactgttatcgttctgtcctggtttgtggtgggtgacggcaacggcaaactggttaagcccaacccggcgcaaacccggctggtgaatgaaacataccggggcagtattgccgaattggttgtttctcccgaacagtcaaaccagttaatggctaaaattgtgctgccaacggacacaggaggctttactgtccgggaagtgggtctgctgactgatgccggtgagctttatgctgtggcgaactgcccgacgatcgataagccggtaggtggtgtcagtgtgaatatgcagtttcgcctggctgtatccgacacatcaaatatcactttagatgttgcgacgggagacgggctgtttctgcgcattgaccagaacctgaaagaaattaaagcgcggggggcagcagcacagaaggagtcacgggaatcgatcggcgttgttgatgcgacgacaaaacaaaaagggctcgtccagcttaacagcgcgacgaacagcaccagcgagattcaggcagcaactccggccgcagtaaaagcggtgaatgataatgctaatacccgcgtaccttctacgcgcaaagtaaacgggtacgccttatcaagtgatgttgttctgtcggctgatgatgttgatgcaatacctgtcgaaattgtcggggtaattaatgacaacaaaacaattgcttctgcaaataaaacgggatggtggcgtgtagccgtttcaaatacagcaactatttctgacttcccgacttttcctggaggggtaaagctgtatggatatgggtatttatttgtcgatttgtcatccgggtcgtggcttcagcattactacagccatcgcgggcagaacgctaagcgccagggatgggatgggcctttgccgactccaggcacttcatgggttattgaatataacacggctaataaacctacgcccgaagatatcggcgctttacctatttcaggcggtcagcttactggcggtcttgggcttcatcgcggaatactctttttccctgagtcagcttataaaaataaagctgagggattaacggggacgtatgcgactgatgctcttgattatcgctgggaactgtacgcgcgtagcaaggcaaacagcagtattcgctctaatatcttcactgttgatattatcgatatttcgaaaggttctaccgcttccggtggtggttcgaataatacaacaacaattacatttcatggccgtattgtcacgccctttgcgattcaaccgggggactggtcaaactttgatgcgcgttaccaggctaaaggtaattatactcctgctggtcaggcttatacgaaaacagaaagtgacggtcgtttccagccaaaaggaagttatacaccagcaggagaggcttacacgaaggcgcagtctgatgcacgctatttgcaggggattcgtgtaagcgcaactcaggttcgtgaatttcgcgatgggggcggctattcgtcaaatgacgcagcatttgcaacagcaatcgctatggtaggtggaagttcgaacgttggttctctgttagttaggtatctccaacggaatattaacggcacttgggtaaatgtagctacgtaa

SEQ ID NO: 76985 - DNA, 552 bp, Citrobacter koseri
atgcaacatcttaaaaatttaaagaaatatactccagatgatgaagatagcctgtttctcatgaatgagcatggagcagagttttttatttctgaagatgggcgggactggtataaatcacagtctgattttttacctgatacgctgaaagttgcatatgatgaagcgggaattattcgttgtatcagtaatgatgtgtcaactatttatccgcgagattttagcatcgtggaagtcaaaaccacggcaaaaaataaaatggcggatatttcaggggaatgggtatttaaagatggaaaaatccagccgcgccagtattcgcagggagagttaagagaacaggcggaagcgaaaaaatcggaattgctttctatagctgatgcagcaatagctccgctttcccgcgccgtgaaactgaaaatggcgacagatgaggaagctggaaaactcgaagaatgggagcgatacagtgtactgttgaatcgggttgatacatccaccgcgccggatatcgactggccggaaaagccgaccgaacatacggtgcagtga

SEQ ID NO: 76986 - DNA, 240 bp, Citrobacter koseri
atgatgagcatggacaacatgattattgccggggtaagaatatatttcccgcctggcaccgatctccctgttccaacgcctgaactcaggacatttgccatcgtcagcaaagacctgcctgggcatctggtgcttgagtacaaaaacaggcagtgggttcctgtactgacccggctttttgatgattcagcgcatgctatttcagccataacaagcctgagcaaaaagacgtggcattaa

SEQ ID NO: 76987 - DNA, 240 bp, Citrobacter koseri
atgtttgtggaactcgtttacgacaaacgcaatgtagagggtctaccgggtgcaagaaacatcattcttaacgagctgacaaagcgcgtacaccggatctttccagatgccgaagtgagggttaagccgatgcaggctaacgcattaaacagcgattgcacgaaaacagagaaagaacgacttaaccgcatgctggaggatatgtttgaagaagccgatatgtggctggtgaacgaatga

SEQ ID NO: 76988 - DNA, 1344 bp, Citrobacter koseri
atgtctaccaaccatgctgtgtttaatgtgatttttcggtttgtcgaaaactacgtaagtcccgttgccggacgtatttcctcacaacgtcatgttatggctattcgtgatggcttcatttcggcaatgccgtttatgattgtcggctccttcctgctggttttcgcctatcctcctttctcaccggacaccacctggggatttgcccgtggctggctggcgctggcgaaacagtttgaaagccagattttgacgccgtttgatatgacgatggggatcatgtccatctatatctgtgcggccattgcctataacctgggcaaacactatgttaaatcgcatcagttagatccgtttatgtgcgccatgctctcgatcatggccttcttgctggttgccgcgccgaaaacaaacggcactatgccagttgacagcctgggcggaacggggatttttaccgcgattctggtggcgatttactgtgttgaaatgatgcgcttcctgaaggcgcataacattggcattcgcctgcccgaccaggtgccgccgatgatcaagaactccttcgatctgctgattccggtgctggtggtggttctgaccttgtatccgctgagcctggcggtccagtcgcagttcgatatgctgatcccacaggcgatcatggcgatctttaaaccgctggtttccgctgcggattcgttgcccgctattttgctggcggtgctgattgggcatctgctgtggtttgcggggattcacggagcggcgattgtctccgggatgctgcaaatgttctggctgaccaatctcggtatgaaccagaccgcgttggcgcagggggcgccgttgccgcacattttcatggaagccttctggactttcttcatcgtcattggcggttctggcgctacgatggggctggtgatttgttatttacgcagccgttccgtacatttgcgctctattggccgcttaagcgtcgtgccgagtatctttaatatcaacgaaccggttattttcgggacgccgattgtgatgaacccggtgttctttatcccgttcctgctggcgccaatggtgaacgccgtgctggcgtgggcggcgatgaagctggatctgattgggcgggtgatttccgtggtgccgtggactgcgcccgcaccggttggcgctgcgtgggcactgggctgggactaccgtgcggcgatcctggtggtcatactggcgctggtgtccgccatcatatacttcccgttctttaaggtttatgagaagcagcttctggcgcaagaggcagaagaggccgggcgtgcagaagaggagagtcagcagatggcctga

SEQ ID NO: 76989 - DNA, 1197 bp, Citrobacter koseri
atgaaaggtatgcagaaaatcaagagaggtaagcaatttactggagtagttgtctatgcacttgaaccggcttcacaccataaaactgatcccagggttattggcggcaacatggctggtaaccatatcgttgaccttattcgcgagtttggacaaacaaaacttttacgacctgatatcaaaaaaccggtatggcacaactctcttcgcttaccgcatggagaaaaattgtcagaagcacaatgggcaaccgtagccgacgactatatgtcccgtatgggttttaatgatacacatcttcgttgctatgttcttcataatgatgaggctggacaacacattcacattattgccagtcgtatcgatattactgacggaaagttgtatcttggaaaaaatgagaaccttatcagcactcgtattatcagtgagcttgaaagagtatatggtcttacagaaacagcgactacttcaaaccgacgatctcagagcataaagaagctttcgcgcaacgaaaagatgctctctgaacgaacggcaactccctgcccaaaagccgctttgcaaacttgcatcgataatgtgttagtcaatcgcccagatttgttatcgttcattcagcaactggaacaagtgggtgtaacctgccagcccaacattgcttcgacgggcaaaatgaatggtttttcatttgaatttcaggggattgccttcaaggcttcgcagcttgggaaaaggtatgcctggtcaaatattcagacacttattgattactcgcctggacatgtaaaactacttgatacaagatctaaatttgctccagctccttgtaaacagccagaagcacaacatcccagcagagaaactattctcgataaactactacaactcgacgagcaagtcagaaatgaaatggagaatgaacttgcccataccatccagttgaaccaaaaactacgctttacggcccatcagatatccagacaacaccaatcccacttccaggtgtggcttccatttcttagcagattcatacaactgctcagacagttggatagttctctgttgtatgcgaccgctcgtccctttagacaaatctatcatcttcacttacttgcctcctctcctgaacctggcgatgaaatacattcagaacaattggttagcaaaggatccaactacaaaccacatttctaa

SEQ ID NO: 76990 - DNA, 279 bp, Citrobacter koseri
atgagtaagcaaactgttcagtgccccttttgttttaaagaaagtccccacggcgtaaaaatatgctccggatgccatgcaaaagtggcctatggtgaaagtccgctcagtgtggccttcctgtttcaattcgtggccttcggtctcgcatggttagtatattcattgaccgatagcacttctgtttcagtcattacgttttttgccagcatcattattcttatctgtataattaaaaagacatatgcaaacagagttgtttttattcaacgaaattaa

SEQ ID NO: 76991 - DNA, 387 bp, Citrobacter koseri
atgaacagacttattgcttctgtattttttatttccgtttcctttacttctggttgctcaacatcaggcaatcaacatctcaaaaacgaaacatcacaaagtctacagtcgcaaattactaaaaataagacaacgaaatcagaaatcaccgccctcctgggcaagccagatacaagaaccattcttgataacggtaatgaagaatggacttactttatgaataacaatcagtttgacgccaccacattcatcccgatcgttggattactgacgggtggttcacagacacaggcaaaaagactcgaaatcgaatttaaagacgaaacggtcagaaagtggacgttctcagaaaataacagcaagatgaaaaccggtcttattcaataa

SEQ ID NO: 76992 - DNA, 321 bp, Citrobacter koseri
atgaaaacatatgcaattactacactcattgcctcaatttttttactgagtggctgtaataatgagccctccgagcaagaactttataatgcaatgaataaggtcgtggagcagacgaatgccatcgtcacatccatagccggtaaagatgtcccaaaagacgcactgcgggaattaaaatcagtcaaaaagcatgactgtgtgaaagtatcggataaaagctataaatgtaatgtgacggttgttgtcaataacgacaaggccaccgcagctgtcacaatggtcaaaacggatgatggctggcaggtcgtagataagtaa

SEQ ID NO: 76993 - DNA, 426 bp, Citrobacter koseri
atgtgtaataacattactctttcgcaggaagaaaaatttatccagttgatagataaatatatcactcagcatcgtgatgatgctattaatgctgtgttttaccgaaagctgtatgtgcttttcgtcggatatcaccttaaatattattactcacgtaagcaatactgtaactcgtgttttcatgtcgataatattatgcagatgttcacaggtgtagtttcatcacttagggctaatgtgctaataaagctcaacaacagccatacgatgctttattgcttgaatgggcttgtggattatatttctggtaacctcatggaggttgaacaactctatgcagatttgctggcacagtatgaaaggaagagcatttcacattcattgaattacgtaccaccacctataggtggcaggaaaaggctatga

SEQ ID NO: 76994 - DNA, 468 bp, Citrobacter koseri
atggcactcagaaccttgtcagcactcccggtatttgctgattccattttctcagaccgtttcaacaggattgacagattgttcagtcagttaacgggggatacccctgtagcggctgcgccttcatacgatctcaagaaacaggattcgaatcgttatcaacttacggtaagcgttcccggctggaaggaggatgagcttgaaattgaaaccgtgggtggaaacttgactgttgctggtaagcgggccgaagaatcttcagaagaaaaagaaaactggatatatcgtggtatccgacgcgcggatttccagttaagcttttctttacctgaacacactaaagtgagcggtgcaaaactggagaatggtcttctgcaggtggatatttaccaggaaattcctgaaagtgagaaacctcagaaaatagcgatagagagcaatcagaaagtgatagaacataaatcataa

SEQ ID NO: 76995 - DNA, 2544 bp, Citrobacter koseri
atgaaagctgcggctgacaatattctgtttcctgctcttgagcagacgttcatggcggttgtcctcgtcgacgagcgtaaccgggttctgttctttaacgaagccgcagagaaattgtggggctattccagggatgaagtgcttggccgggatatgaatatattaattcccgggcctctgaagcatgttcacggggattatgtccaccatcaccgcgacgggggaaattcccgggttgtcgggatgaatcgtgaacttcaactggaacgaaaagacggcacgcaggtctggaccagcttttcgctctccaaaatagacgtggatggccgcatccactacatggccgccgcccgggacgtcagcaaagaggtggccaggcgcgagcaaaaccgtctgttgttgcttgccgtcaataacacggacagagccgtggttgttctggatgaacaacgtcgtattgtccagaccaaccgtgcgttcaccagcatgtttggatatggcgcagacgaggccatgaaccaggtattccctgatttcctgctgtcttcaggaaacagcgatgacgcgctaaaacgtgtggaagaacatctgcggggaagtcgctggtttcaggaagaactcctcaccgcgaccagaaacggcagggaagtctggagccgggtttcggtaaaccctgtcctcaatgagcgtgaccaccgccagacccgtaaccttgtcgtaaccttcgttgatattacagaagaacgtaatattcgtaatctggagcgggatgtactggccgcgctgaccagccggatgactttccaggaaacgggtgattacatctgccagcgaattagaaatattgcgcccggcgtactggtctcggtatgccggatcgtcgataaccggatgcgcccgtgggcagctcccggttttccaaaagaatatggtgaatactgggatggcgtggccgtcggtgaaggcgtggcaagctgcggtacttgtgctgcgcgtggcgagcccgtcatggtccaggatatcagcaccgatcctctatgggctccctataaacatcagatgttgcctcatggttttcgggcatgctggacataccctgtaaaacgtcgagatggttccgtggcagggacgtttgctttttatttcaggacacagaatgagccggatacatttctggttcgcattgccgatgccagcgttcatctttgcgctctggcgattgagcgggaggaaggtcgccagcaaatcgaccggctggttcggttcgatgcccttacggggctgcccaatcgtcagtatctctatcaccatctggataaactgctgtcgggtaacgaaccggaactcgccgtgtttttcctcgatattaaccgctttcgtaaggtgaatgagtcactggggtattccgctggcgaccaggtgattatcacgctggctaaccgcttgcaggaacggttcgggccgcatcactttatcagccgggtgggtggcgcgcagtttgtcgtggtggcgagcgcctgtcgtgttgatgaggcctcacacctggctgagcttatgcagcatatcgttggcgctgaaatgagcgccgccgggcagaccttcgagcttaaagcctgtattgggatcagccattccattggcggcgacagggaaacgctgctggcccacgccgagagcgcgatggagcgggtacgtgaaagcggtggaagctatcagttttttaacccggaactgaatcaggccgtcatgcaacgtctgaaactgggcatggcgctgcgaaatgcgattacggaggggcatttgcggctggaatatcagcctcagatcagggctgcggacgggcaggtatacggttttgaagcgctgacccgatggcacgatccgcacgccggcgacatctctccagggacgtttattcctctggctgaagagacgggagagatagagcatatcggcctctgggcgctacgtgaagtctgccgacagctttttgaatggcgggaaaagggcacgaatgtgtcggcggtatctgtaaacctgtctgcccataacttccgtaagcctgatttaccccgttatatcgccgacctgctgaatgaatatcagctgcccggcaatatcctgaccattgaaattacggaaagcgccatgatggaactgacggacgagatgcttgcgcgggtcagggagattcgctcgatgggcgcgggggtctcaatggatgattttggcaccggcttttccagtctggccagcctggcgtatctgccggtgactgaggtcaaaattgataaaagcttcattgaccggttcgcccgcgatcgtcgcgtcaatgcgcttgtcgaagcggttgttagtattgggcataacctcgacctgacggttgtggcggaaggtgtggaaaatacccatcagcatcagcaactgagaaaaatgggctgttccgtacttcagggatttcttttttcccgaccattgtcggcgaatacgttaccggtatggctagaggcttaccgttcacccttgcaggatgcacaatcatga

SEQ ID NO: 76996 - DNA, 1563 bp, Citrobacter koseri
atgaagaaaaaactgttacagatgctgaatttgcgtctgcttattattgcttttgcgtttctgatgaccctccttactcttttcaatagtttctattcagcctggcgtgtccagaagcaggtactcattgagaatgaactcagtgaaaaccaggcatatgcggagaggattgcttccactattgatttgtatctggcggttttcatggagcgtctggaatacagtgcgagcgtcatcggtcagcatttcgatgatgagagcattatcgctggtgaaatgatgaggatgcagcggcgagattttggttttgattccgttacgctggtggatgaaaaaggcaaaattattggcgtgctgcctgaatccctgaacctgaaggggaaaatgctgaccacgccaggcggcgtcgaggctctcaaagaaatgcagccgacggtcagcagcgcctacaattctctgtccggtaatctggtggtgtatatttcacatcccgtcaggaatgcgcaggggaaatacctcggttttattggcggcgcgatttatctgcaaagaagcaacgttctttctgcgctcatttctaatcatttccgcaatgatgacagctatatttatgtcgttgataaaaatgaccagctcttatatcaccccgatccggcccgcagaggggaaaaagaggaaggcaatgccgcagtgaaagccgtggagcaagggctgagcggcgcgatggaggtgacaaactcccgtggcgtggaaatgctggcagggtatgccagtataaatacttcgggctggggcgttgtggcgcaaaaaccaaaagataaaacccttactgcgcttgatgggctcatgtggcaaatgatacgcggcgttgtaccgctgggtattgtggggttgttcattctctggtggctggggaatgaaatcgtcagaccattgcgtcaactggcggatcacgccatttcgatggacagcgatgagtccgcagaaaaagtacgaaacgttcgatcgtggtatatcgaagcctcccgactcaggcgcgcgttgcttcagggaatggaattaatccgggagaaaatgaaatggctgaacgatcaggccagcactgacccgcttaccggcctggtcaaccgacgggcggcagagaaactgctggctgaatacgaacatcagcagcgacagtttgcggtgatttctctggatatcgatcgctttaaagccgtcaacgacacgtttggtcatgacattggcgatgttacgttaaaagcgctggcgcagctgctgaagcgaagctgtcgtaaaaacgataccgcctgccgtatgggaggagaggagtttatgatgtttttcccggagacgtcggtagaggctgcggcagatattgcggagcggctgagaaaagaggtcgccgccgcaaagatagagacggtagggcatatcaccatttctcttggcgtgacggtgtggccgtcgggcgttgactctgtctctcaggcgctgaaacgggctgatgaattgatgtaccaggcgaaacaggcgggcagaaaccaggtggtcgcaggataa

SEQ ID NO: 76997 - DNA, 273 bp, Citrobacter koseri
atgcgcattgaagagttaccaaaattaccgaagttgttccgggttatcgaagtggatctggacgttttgcgtaatggtatcggagggggtggcggcgtgatttttgacatggacgccatcgtaaagcggaaggttcgccgtgttaagcatgaaggcggatggaagtggcaactggttcgtgaatggcgtgatcaagaattttgggattactgttttgagcaagaccgggaatgccttgagcacctcaactacgacctcggccttgtgcattga

SEQ ID NO: 76998 - DNA, 240 bp, Citrobacter koseri
atgttccagctaattcaacggggtcagatttacgctgaccattcaggttggcccgtcatcatccacagctgcacatcacagatagtccgctactggcgacagggccggatcaacaccgcttcaatcgaccgattcaacaatgactttgagcacctcgatcaccttgaggcggagcagatacgcgccgagcttgagacgagcgagcacattaaatcgctgcgcgcccagcgtgcggcatga

SEQ ID NO: 76999 - DNA, 216 bp, Citrobacter koseri
atggacatcatcgataccgcagcagagattgaagagcttcagcgtaacgctgccctttccgctcaccgcatcaatcgcaacgccgtatcagctgaacgttgtgaagaatgcggcgaaccaattcccgaaccgcggcgcgctgccgttcccggctgccagacgtgcgccagttgccaggctgatttggaacttatccgtaagcaaaggggctcctga

SEQ ID NO: 77000 - DNA, 273 bp, Citrobacter koseri
atgagcaaggtcattatcgatttattagtaatggatgatttcaccgacccttttatttgcggagtccgcggggcctgcaccattgaagacctgcgagccattgaaaaggaaattattgaaaaccgcgatgatcgccttccaaaagatggaacctacatcatcgaaaccagcttgtttaaaggccagtacggcgaatatggtcgctgcgagcttgcacccggatgggagtgggaaattgttgatttttcacctttagacattcctgaggaatag

SEQ ID NO: 77001 - DNA, 222 bp, Citrobacter koseri
atgacgccagaagaacaagaaaacatcctccgcgcccaggctcgtcgctgcgcagaagagataaccaaagcgatgaacgcaaagcccaaaccgaagtggaacgctgtatgcccacccatccttcgcaagcactacgagaaggtaaaaccgatgggtatcagcctggtgaaatttgtcagtgttattggccggatgcaaggccggtatggagtggaatcatga

SEQ ID NO: 77002 - DNA, 771 bp, Citrobacter koseri
atgagcaaaggtaccattatctgcctgtgcgatatcactggcgtcatgtctgtgccatgggttgaagcaggctaccgtgcggtgttggttgacccgcagcatccagatacttcgattaacggtccgattgaacgcatatcggcaaccataattgaggctatgccgcggctgtcccagatcattcgtaccgagaacgtggtcatggttatcggctttcctccttgcactgacgttgcagtatcaggatcccgttggttcgaatcaaaacgagccaaagaccaacattttcaggctaaagctgcgctcgttgccgagcaatgcaggatgacaggcttggcggccggatgcccgtgggcattcgaaaacccggttagcgtgttcagtagcatcttcggttcggcagattacacgttccatccgtaccagttcactgggctgtgcgaggatgacaactacacgaaacagacctgcctctggacaggtaacggcttcaaggcgccggcagagaatatgcacccgatggtggaagcggctatcgacgccgtcaagctggcctgcggccggatggttccgaagaagaaggcaatcgaggccatctcaggaacatctttcgcaggattggtgactgactggtatccggacaaccgcattcacgaatgccctcccagtgacgagcgtgccaacattcgaagcgcaactcccatgggctttgcgaaagcagtttttctttcgaatgcaccccatctcaacaggaaacgggaggccgcatga

SEQ ID NO: 77003 - DNA, 660 bp, Citrobacter koseri
atggtgggtaaatatgctcttatctacgccgatccaccgtgggaatacggtaaccgtgcgagcaacggcgccgccgccgaccactattccaccatgaagttaatcgacatcaagcgtcttcccgtctgggaacttgctgccaaaaacgcggtgctggcgatgtggtacaccggcacgcataaccaggaggctatcgaactggccgaagcctggggctttaccgttcgcacgatgaagggctttacctgggtgaagctgaaccagaacgccgagctgcgcatcaacaaggtgctggccgagggtgaggtcaccgacttttacgacttcctcgatttgcttaacgccgagacgcgcatgaacggcggcaaccacacccgggccaacaccgaagatctgctgattgccactcgcggtgccgggctggagcgaaagcatgccgggattaagcaagtggtatacagcccgctgggcgcgcacagcgaaaagccatgggaagtgcgccaccggctggagatgctttacggtgatgtgccacgcattgagttattcagccgcagcgcggcgccgggctgggatcactggggaaatcagtgtgccacctccgcggtggaactgctgcccggatgcgccattgatgttgtgaaaacggaggctgcatga

SEQ ID NO: 77004 - DNA, 687 bp, Citrobacter koseri
atggataacaggtggctcattaaatttgagcaaatatttgggccaattgcgcaaattgagcaaggcagcgaggcatgggcaagggcgagactcggagttattactgcctctgacgctcacaacgtcatttccaagcctcgatctggcaccaaatggacagatatgaaaatgtcctacttccacacgctgctcgccgaggtatgcaccggcgtggcgcctgaggttaacgccaaggcgctggcctggggcaagcagtacgaggaagatgcccgcaccctcttcgagttcaccaccgacgtgaaagtcacggagtctccgatcctgttccgtgacgagagcatgcgcaccgcgtgctcccctgatggcctgtgcagtaacgggttcggccttgagctcaaatgccctttcacgtctcgcgacttcatgaaattccgccttggcggtttcgaagcaatcaagtctgcgtacatggcccaagtgcagtacagcatgtgggtgactggcaaagacgcctggttctttgccaactacgacccgcgcatgaaacgtgaaggcattcaccacgtcgtcgttgagcgggatcagcagtacatgtccgatttcaacgaaatggtgccggagttcatcgagaaaatggatgaagcactgggggaaatcggattcactttcggagagcagtggcgatga

SEQ ID NO: 77005 - DNA, 621 bp, Citrobacter koseri
atgaacgccaatccacttatgcccggtgaaaaatacgggcacctaaccgtcaaagaacactcgtacatgcttagaggcagaaggatgtatctatgcctttgtgtgtgcggtaattcctgccatagggcctcaaatcagcttaaaaacaactcaataagcagctgcggatgcatgacaggaaaaaactccactcacggccagcgcaatacccgcgtttacaggatttggagcgggatgaaaaatcgctgcacaaacccaaacaacaaagacttcgaaaaatacagtctgcgcggtatctgcgaaagatggctgacgttcgagctatttcttgaagatatgggtctccctcctacgcctaagcatcagctagatcggaagaacaatgaaggcccgtattcaaaagacaattgcagatgggcaacggttaccaagcaggcggaaaacagaagtacatcgttttactggtttgttgatgggttgcgttttgaaagcgccggagccgcggcgaatcattttggcgtgaaatcagcaaccatccacaaatggtgtcatggctacaacaatagagggattaacatccctccaagagccaactgccgaaaggagaggaaatatggataa

SEQ ID NO: 77006 - DNA, 918 bp, Citrobacter koseri
atgagcttaacccttgttgatttcgtcaaacaacaggagccgcttttcattaaggcggccacagacgagcggatggtgtgggcgaaggaaagtcagttcgccatccagctatttcagaataacgactacctggcaaagattgcattccagaaccagacgagcacgcagaacgcgatcatcaacgttgcggctatcggtgtttcgctcaacccagcgcagaagctggcttacctagttccgcgtaaaggggctatttgcctcgacatcagttacatgggtctgatgcacattgcgcagcagtctggcgccattaagtggtgtcagtcggcaattgttcgcagaaacgaccagttccgccgggaggggctcgataagccgccgatccacatctacaacgactttgataccgaagagcaacgcggggacatcgtaggtgcgtatgtaacggtaaaaactgacgatggtgattacctcacccatacgatgcgcatcgatgccatctactccatccgtgatcggtctgaagcatggaagaagtacaaatctgacaacagtaagaagtgcccatgggtcaccgatgaagagcagatgatcctcaagacggtcgtgaagcaagcggcaaaatactggcctcgccgtgagcgcctggatgccgccatcgaccatgttaacaccgagggcgaagaaggtatcaactttgcagcagagcgtcagccagagcgcgatataacgccgcttagcgaaactacgcagaaagagattaacgacctgctcgtctctttggataagacatgggacgccgatcttcttcctctctgctcacgcattttcaaacgccctatctcgcagccagccgacctgacagaactggaaggtgttaaggctcttgggttcctcaggcaaaaggcggcagcatga

SEQ ID NO: 77007 - DNA, 972 bp, Citrobacter koseri
atgagcgaagtaacggacttggtcgtcattgagaaacagaacgcaatggcggtattcaccaccaaagagcagctcgacccgattattgaggcgattgagaaagaagcccgcagcctggtcccggatgtgtctacccgtaaaggccgcgacgctatcgcatccatggcgcataaggttgcccgctccaagacctacatcgacaacgccggtaaggatctggttgctgagcttaaagccctgccaaagcagatagacgaaagccgccgcattgttcgtgagcgcctcgatgcactgaaagatgaggtgcgccgcccgctcaccgaatgggaatccgagcaagaacgcatcaaggctgaagaagccatgaacgcgatgcacaccgaagcgctggagatgaacgaagagttcgaccgacagcttgccgcgcagatcgaagcagaccacgaaatggctctgctgatgaacaaggatattgaccgcgaccgcgaagaacagcgacgcctggcggaacaggctcaacgtgaacgtgacgagcggctgaagcaggaagcggcagaacaagcacgccgcgatgccgaagcgaagcacaaagcggagattgaagccgcagcgcgccgtgaagctgaagagaaagcacgtgcagagctggctgaacgccagcgcgtcgaagcggaacagcgtgcagctcgcgagaagcaggaagcggaagcccgggcggaacgcgaaaaagccgcggcggttgaagccgagcgcctgaaggcaaaacaggccgaagatgctcgcctggctgagcagaagcgcatcgccgatgagcaggcaaaacgtgaagctgacgtgaagcaccgcaagacggtcggcaccaacatcgttaacgcgcttaccatccacaccagcttaacccgcgaacaggctatcgaagtgcttaccgctctgaaagatgacctggtcccctgcgcgaaaatccattactga

SEQ ID NO: 77008 - DNA, 231 bp, Citrobacter koseri
atgaccgtaatcgtcgaatgtattgagactaatggcgactggactgtcggccatcgctacgccggggaattggtctctggcggatttttggctctgaaagatgatgatgccgaagataatttcgaatggaccgctgattatcggcaggaatatgacagagaaacagatgagttcgagaccatctggtttttaccaggcatagaaggtgtttcgttcagggagattgagtga

SEQ ID NO: 77009 - DNA, 159 bp, Citrobacter koseri
atgacagtcacccacaacggcaagcagtacaccgccaaaaagctcaacgataacgagtggcagctgacgtcggtatcggcaccgcgcgagaagttgacgcttaaccgctggcagatgcatatcgctggcctcctggaacaggttgaggtgaaggtatga

SEQ ID NO: 77010 - DNA, 234 bp, Citrobacter koseri
atgagcaataaaactggtggtcaggcatttccaaaacagcagtgggaatacgatgggcagaataacgtcctgcaatatcaggaagacggcatgacgctgcgtgattatttcgcggctaaggctatgaatggcatgtgctcacatgttgatacgtggggaatgaccgtgccgcagattgccaaaagagcctatgaattagcggatgaaatgctccgcgcccgggaggcatcatga

SEQ ID NO: 77011 - DNA, 669 bp, Citrobacter koseri
atgattcgtcttaataacgaagttaagaaccagctatgtcataaccttcttctcgcatccccattatttgagaaggcaaaggcagcggtaaatgacagggcaaaaattgtcgaggaaattcgccaggcattgctgaagcaggaaaataccagcgatgagcaaattacccaggcgcgtgaaaacttcaaagataactccttcatcagcatgcaagtcggagcgaagacagcaattttaaaggtcattatcaacggtgaatatcacgaactatcaagaaacggtttagataatcgctatcgccaccgtggcaaacacattggtaagcacgatctggaaagtaaccttttcttcggaacttctttagcacctgtagttgactcaggtttcgttcctgcaaattacagcacgctgaagaaggtaggtaagttgcacgacagactcactgaatcaaccgtcactatcaacgttctttacgacgaagttgatgccttccaattgcaggtaaagggtgctctctccaaagtctcaacagttaaaaaactggctgagatgtggcctgaagcagtcccctatttgcctgaggtagagcggcgtgaagcgacaagcaccgcgctttccattccggtggagacgctcaatgccctttgcggcataccaaagaatgaatga

SEQ ID NO: 77012 - DNA, 285 bp, Citrobacter koseri
atgttcttgaaaaagcttacccctttgaaatacgacgaggtaatcagagggcttaagaaaatggggtttgaaatgaaacccaaaacaggaacctctcacgaacaatgggttctcaagaacagcaaagggaaatgggtggttacagttgataagcatcacgccccgttttccagagatttgataaaatccatggctaaacaagccgggctgaaagatcgccactttcacgcattatgcagaggtgacgctacgcttgaagatataggatttcaaatcaccagctaa

SEQ ID NO: 77013 - DNA, 297 bp, Citrobacter koseri
atgaaaaccttacgttgcatggcctaccagcagaacggcgtttacgtagctgcgtgtttagacctgtcattggcagcgcaagcagataccatgcaggacgccgtaaaaaaactggacgaacagattaaagactttttcactgaagcactatcagaaccggaatatgcaaaacaattacttagccgtaaagcaccgctatctatgtggctaaagtattgggtgatcgcctttcaggtctttgtcagaaaacgaggtgaagcaaagctctttgctgaaccttgtgatgctcatgcttag

SEQ ID NO: 77014 - DNA, 522 bp, Citrobacter koseri
atgcgacctgtgcggcatgaatcatccataccgccagagtcagaatggggaactattgaggtatgggacagcaacacgccactaggtgataacgaggttgaagtgccgttcctgaaagatattgagttcgcatgtggggacgggagaattcacagcgaagatcacaacggcttcaaattgcggttctcaaaggccacccttcgacgtattggtgccaacagcgatgggtctggcgttttgtgcttcccggcaacgggagacagcatggaaccggtcattcctgacgggactacagttgcggtagatacgaataacaagcgcgttgttgacggtaagctctatgctattggtcaggctgatggcggaaacagtcagttaaaacgcattaagctgttatatcgcaaacctggtggcaagctgatcatccgcagctacaacagcgcagcataccctgatgaagaggctgacattgatgatgttgagataatcggccgcctcttctggtactcggttttgctgtag

SEQ ID NO: 77015 - DNA, 231 bp, Citrobacter koseri
atgaacccagtaattaaaaccgcgatagatctcgtcggttctcaaaaaaaactgggcgatgcgtgcggtgtctctcagcaggccgtttacaagtggcttcacaacaaagcaaaggtatctcctgagcatgttgacagcatcgttagcgcaactggtgaagctgttaaagctcaccagattcgcccagatctaccaaaactgttcccgaacgtagaacagtcagccgcctaa

SEQ ID NO: 77016 - DNA, 255 bp, Citrobacter koseri
atgaaccacatccagttcattgagaagcacgtccgtgacgcgctcatcaaacagggattcaccgtagcggtggctcaggggggggcatttcaggccgtcgatatgtacaagcgaatgagtcaggcaagcaaaaaggggaggattttcgatgacgtgttacgacacgcaaagctttgggccgagaagcaacaggtcccgtcagacaagttcgaaaaaaagcgcgttaagcgtgtgcagcagccaggtctgctctga

SEQ ID NO: 77017 - DNA, 147 bp, Citrobacter koseri
atggcaaaaaatccacgctattaccataccgctgtacataaaaacataacccgcgaccgcttcatccgctcggttaatccgattgtggcagagaagatgcgcgccatcctggaagaactgaaacgcaaggagagtggccgtgagtaa

SEQ ID NO: 77018 - DNA, 897 bp, Citrobacter koseri
gtgagtaacgtatccaatttagccgaagccagagaggccagaaggctccagaaaccgcgcacgaatgacggtaaggggtttgccttgctgcaccgtaaaattatggatgtgccgttctacaaggacgctgaggcgtcgcatctatgggttcacctgatactcaaagccaaacatgccccggaggtagtcctaactgaccttggcgaaaaggtggtaggtcgtgggcagttgcttagtgggcgaaattcacttgcatttgaaaccggattaaagcccgatcgcgttcagtatctgctcaggaagttccagaaacttggaatggttagctggatttcacacggtaaattctctgtttttaccatcgtgaaatatgacgattatcagtcgaatagtgtaccagcagattaccagcagattaccagcgcaaagccagatgtggcgcagcctgtgtcgaatagtgtaccagcagattaccagcaaattaccacagataaagaagttaataatatctcttctactaacgtagaagagagtgcatcagaaacacaaaaatcagagcagaaaaaaccgtctctcagttgtgagcaggtagtcgaggtttatcatcgcatactgcctgaagctcagggcatacgaatcctgactgacaagcgccgtagcatgatccgcaccttctggaaaaaagctgctgctgccaaccgccaggtcggcggctcaggattcaacctggcggactgggaagcatatctgaactacatcgccaccaattgccgctggatgctggagaaccgtccagaccagcgcagcggtcgcacatggcgccgcaaatctctcgaatatttcctgaacgtggatgtgtacgccaggacacgcgagggggcatgcgatgacctctga

SEQ ID NO: 77019 - DNA, 1404 bp, Citrobacter koseri
atgacctctgaaatcatgaccatacctcataacctcgaagcagagcagagcgtaattggcgggctgctgctggatgacgacagcagtgagcgagtgcaaaaggtgctttccatcctgaagccggaatcgttctacgtgcgagcgcatcaggttctgtttgctgaaatgcgtgaaatgttccgcgacaacaagccggttgatggcctgacgttgttcgacgtgctggaaagcaaaggactgacggtgcaggtaggtgggtttgcataccttgctgaaatcgccaagaacacgccgagcgctgcaaacatcgtggcctatgccatgtcagttcgtgaagctgcaatggaacgctacggtatccagcgtatgaccgaagctacggagttgctctatgcacgcaacggcatgacggccacgcagaagtacgaggccattcagtcgatattcacgcagatgtcagatcatgcgaaaacgggttcccgtcgcggcgccagagcgttatccgatgttctggaggactgggttgaagagctggagatgcgttttgatccgaaacaacgctcccgtggactgtctactggaatagcgtcgcttgacgcactgttgcagccaaaaggccttgtccgcggctctcttctggtcatcggtgctcgcccaaaaatggggaaaaccactctgtacagccagttagctatcaactgcgcgcttaacgaagaactcccggctgttctgtttagtctggaaatgcctgacaagcagatattcgagcgaatgatagggcagctgtcaggtgttaacactgacattttctatcgtggtgctgacagtgacactgaatttgctcacgccaacgcaagagcaatgcagatggtagagagcggtaacttttttatcgacgacacgccgggcgccagtctttcacacatcgtggccgaatctcgccgaattaaacgggaacgcggatctgttggcatggttctggtcgactacctgacgctcatgaccgcagaaaaagccgaccgtaacgacctggcctacgggatgatcactaaagggctgaaaaaccttgccaaagagcttgattgcgtcgtcgttcttctgacccaactgaaccgcgaactggagaagcgagtgaataaacgcccgttaccgagcgattcccgcgacaccggacagattgagcaggactgcgactactgggttggcatccaccgggaaggtgctttcgatgacagcgtgccgcctggcgaaacggagttaatcctgcgactcaaccgccacggcagtaccggcacggtttattgcaatcagattaacggggcaatttacgacacagaccagcaggccgccgccgcagaacgccgtgggcgtgagcagcagccgaaaaagaaaggggggtactga

SEQ ID NO: 77020 - DNA, 342 bp, Citrobacter koseri
atgaccataacaatccgtgagcagattcttgcagccctgcgtaataacccgggcctgaacagtgctcgtattgccagcatgatcggcatgaccaccaaaaagatttccggcccgttaagcacgttgtttgcagacggcctgatcgaattcgaaggtaaacacggccagcgtctgtatcgactgaccagctacggcatgaaatacgcaccagaaaccatcccggctatgccgaagggaaattcgaagttggtgcagcgtacagagacgaacgtgatctgccaggagtgtcgccagagtccggcgatgaaacgaattttaagcgtatacggggtgatggcatga

SEQ ID NO: 77021 - DNA, 546 bp, Citrobacter koseri
atgaaatcaacggtagaaacaaaaatcattgagttagtgaagttagggcatgagctggcgaaagaactgcattgtgctgagtctgcatcgctggtgagagatctggcatcgcagcttgaagtgcaactggtgcgtagcaatgcgctggctgctgagaattttgtgctgaagcagattattgattccgtcactgacctcagcaacgagcctcagtaccacgctgagggtatgggttgcggactggaagaccgtggcatcacagaccgatacgatgcttgccgctacggatgggatgaggcaatggagagaatttacggagaggtaattccatgcacagaggaaattgcatttccggcaaccgatgctttcctggctgaagtgcgggccagtgcccttgatgagtttgcccgagcgcaggatgagcaagccaaaaaatattatgagctttcaccaggatgctcaggccaaaacgaatgccaattcgcagctggtcaggcgcggtatttcgcagaatgcattcgcaaggagtgcagtcatgaaacttaa

SEQ ID NO: 77022 - DNA, 837 bp, Citrobacter koseri
atgagcactggtatcaaacacccagcaattcgctaccacggcggtaaattccgcctggcatcgtggattaccagtcatttccctgagcatcgctgctatgttgaaccgttcggcggcgctgcatccgtcctgctgcgtaaggaacccagcgaggccgaggtatataacgatcttgatggtgatgtagtgaacctgttcagtgtcctgcgcgatcctactgccagtcgtgcgcttatcgaagcatgcgcattaacgccttattcccgaactgagttccagtacgcttacgagccaactaacgatcgtgtagagcaggctcgacgtcttatcgttcgcgccactatgggcttcgggagtgctggcgccacgaaaggttgcactggctttcgtctcgataccaaacgcaacagtagcaccgcacaacgtgtatgggctcgccagccggataatctcgccgcggtcgccagtcggttctctggcgtcctcgttgagaaccgaccggctattcagtgtatgcaggaccatgacacgccgacaacgctccactttgttgatccgccgtatgtccatggcacccggacaggttcaacaaaaacaagcgcataccgcttcgaaatgacgaacgacgagcatgtagaactactcgacgcgctgaagtgtttacaggggatggtcatcgtttgcggctatgacagcaaactttataacgatgcgctggcgggctggttgcgcgtcacccgcaccacggcggcaaatggtcattcaggctcagtacaacgtaccgaatgcctctggattaacccggcagcacagcaaaaacaggagagtgcagcatga

SEQ ID NO: 77023 - DNA, 411 bp, Citrobacter koseri
atgagcaacatcgacaaacaggcgctacgccaattggcaactgacgcacacgagctgggcatcatcaagcgttacacgaaaggcatcgaggccaataagagattcgctgccaccgccactcctttaaccgttctggcgctgctggatgagctggaatccgataaagagcaaatcaaaacactcgaaagccgaaaccgccgcctggaggggatcattgatgccgcagagaaacggatttctgagccttctggtcagaaacggctgattggatggcgagcatcggattataccgatgagacatcagaccctgagttagctaaaaactgggctgctgctattggtgtgctgcctatttttgaaggcgatgtgaataccaaacttagcgtcgctggcatcggtgagggggagtga

SEQ ID NO: 77024 - DNA, 168 bp, Citrobacter koseri
atgtgggtattaattatctggatgcttggcggctacaactggaatagcccctcaatcgccgctcaggaatttaactcagaatcagcgtgtcgcgcagcctttgctgaagttaaaaagataaacgacggtgaaataactcttcgtggcgcatgtacgccaaaggactaa

SEQ ID NO: 77025 - DNA, 840 bp, Citrobacter koseri
atgaccactattaccaataacaaactaacaggcctcggcgagaatcatccggccaacggcccgcttacgaccgagcgccttactcacgttcgcgacgtgttatatcgcaatctcaaatactcaaatggcggaagtatggattacatcatcgctgacgctgtgaaagcgtttgatgaattgcttgaaatgcggaaggcagagcctgttggcgaggttgtcctcggcgaatatgacgattgcggccgtcatcctgatgcgagggtggtgtgcatagccgctgatggtcaggctgactgggaaaacttcagggacggaacccgcttatatgccgtcccgcccgcaccggtatcaatagacgagcgcgcggcattcaacgcgtggaataacgacgaaaatctccccatcgctggggttggtgcgaaaaacgctgcatggttagcatggcaggcccgggccaagctgggtagcccgacagcgccggtagtgccggaaactcttccatgtcctgtgcatctggagccgggtcttaaattcggtaaaggtgtgcgcactcagtgtgtgctggacgcactgcgccgtcgtgctgactactacgctgagctggaagctatgactccggaacagcgagcagagcatgacgccaatatcgaagcattcaaagccatgttgccgcagccaacaccggtagtgccggaagaagcaacaccgaaaaatattgagatgctggcgagcgcccgcgttagaaatgttacttttcaatgggatgaggatgagcgtaatgctgcggctgactcgtggaacgcctgccgcgctaccatgcttaacggaggtaaatcgtga

SEQ ID NO: 77026 - DNA, 1047 bp, Citrobacter koseri
gtgaaaactatccagttatcagagcgtgagttttccatgattctcaacatgctgacgccgccttacatagtcagcgatacacacacggacgagttcaacgaattgcgtaataaagtcttttacgctctgcatgatgctcagaatgatgaacctgtaatagaggcttacaagttgccagaagaaactggatcatcgcttcaactgcgcaatttaatccggcggcgccatgctgaatggtcagataagacgttcggcaatgttggcccgattgggccacttaagcacctcagcaaagaagcgctggaagccgcagccgaacctgacgacctcagcgagtgggctgatatgcagttcctgttatgggacgcccagcgccgcgccggtatcagtgacggtgaaataacagcagcgatggaagaaaagctgaaggtgaatatggcgcgacagtggccggaaccgaaagacggtgagccgcgtcttcacatcaaggaggctggcaattctctggtataccctgattcagaattaagggactcggtagaaagtttcctccagcttcttgatgattacccggagcaactcgtgccgataaacagaaacgcctctctggttcgttttatgcgtgacgcgttagcagcaccgcagccacaaaacgcaccacaaaatattcctgaaaatattccatcgactcagtttaagccagtggcagacctttacggtttaacctcaccaactggcggtgaaacatcattcactttcgacgctgttgaagctcgcgatttcattgatggcgggtggtcatgtcaggagtatgtggagcttgaacgctttcaggatgctgttattggcaactctccggtgattccggatagatggattccggtaagcgagcgggtgccggaaagcaacggtgtgtattttggctgggatggaaagcgagtgttggaggtcaactgtttctttggtggcttctcggcaaatcaattcatccacggagaaataacccactggatgccgctgccagcagcaccgcagcaggaggcgtga

SEQ ID NO: 77027 - DNA, 177 bp, Citrobacter koseri
atgattcttgcattaactgatgtcaacgacactcccgtgtacatcaactcagagcacattattcggttcaatcgcgtagatagccaaacatcaattcgcctgtctgacgggcagtggtttagcgtgaaagaggatccagattacatctgcgctaaggttaacgattggggtaaataa

SEQ ID NO: 77028 - DNA, 450 bp, Citrobacter koseri
atgaagcagcaattccacctcgtcaacgacgctatcaagcaaaacgctatcaacttcatccgggagctaccggtggacgccaagcgcccactggttctcgatatcaaggagatgacgcgcactctggaccaaaaccgcaagatgtggccgctactgaaagacctgtctgaccaggtaacatggttcggcaataagtacgactctgacgactggaaagacctgatcaccgctatggtcgccaaggctaaaaaacaagagcagagaatggctcctggtctggacggcggcgttgtgatgttcggtcagcgtacaagcaagatgaccgttcggcagatggttgaagtcatcgaggctatctactggttcggtacgcagcagggcgtgaagttcagcgagaaatcccgccttgaaatcgaatgggcgaaacagtggggtgaatcccatgcgtaa

SEQ ID NO: 77029 - DNA, 606 bp, Citrobacter koseri
atgcgtaaaccatcccgccgtaagtgcaaagtatgcaatgagtggttcatcccggcatacgacaacattcgctggtgctgtcctgagcatggcgctatctacgcaatggaactccgtacaagagagaaggtgaaagccgctgcgaagcgcatcaaggaaaaacacgaagccgagaaagccgatcgcaagcgtcttgctgaacgccgtaaagaggttaagccgttgcgtcactgggtacagatgactcaacgcgcattcaatgactggcggcgagagatgctgctggctgctgggcatggttgcatttcctgcggaactaaaaccgcctttgcatggcatgccggacattaccgtaccacggccgccgcgccgcaactgagattcaatccagacaatgtttggctccagtgctctgcatgcaacgttcacaaatccgggaacatcgaggcgtaccgtgccgccctggtcgagctgatcggcgtagagcgagtactggcgctggaatccaacaatgaaacccaccgatacacccgtgaagagctggacggcatccgcgctaaggcccgggcagaccttcgcgcactgaaacagcgggaggccgcatga

SEQ ID NO: 77030 - DNA, 198 bp, Citrobacter koseri
atgatttacgacctcaagattccgcattgggcttcacttcttaactgcccattctgtggtggtgaggcagaactggttgccgatggcgatggtgtttatgccggatgcgcgaccaagcagtgcctgattaagccaataaccgacacatatccaacaaaacgcgatgcgattcgtgcgtggaatcggaggtcatcatga

SEQ ID NO: 77031 - DNA, 123 bp, Citrobacter koseri
atgaccagagagcagattgtcagataccaggcagaaagcgtcaagcgcgccatgttgccgccagtagcaaagcacagccagcaacagcaaaaaacaaaacagaccgcaggagaagccgcatga

SEQ ID NO: 77032 - DNA, 645 bp, Citrobacter koseri
atgaaacgcgcagaccaaaatattgcatggtcagaattggctaaggttcctcgccgatcgtaccttgggaaataccgacgtctcactcctgcgcaaagccgctgggttcgctcactgcttggcatgtggggccgagagtttggcggaagcggaacggagcatcttactgacagtgctggaatgtggtcgatgattcttaccggctggactggcgaacagcaggagcggatcactacggtgctggcaggactgcgcaagatggggtattccggcgaccaactcatcactcaggcaaaagctatcatttggcctaagaagtcactttctgacctgatggagaaagccagtgatgaggaagaggctgagttcatggagcaggtaatcctaaaatccttcaccaaaagcagcatcgtctacgagatcgggaaagactattacacctggcgcaagaccattaacgatatggcgcgttggatgcagtaccatcacgctccctttttgactgaaaagcaatgtatagatcgcgttcgttggtgcattgagttgttcaattctgctgtcttcttcacgttaattgcagaacttggcatcgaaaacaaagaaaattgcaaaaaagacttgaaaacaagttttgaagatgcataa

SEQ ID NO: 77033 - DNA, 204 bp, Citrobacter koseri
atgcaacgcatggataaaatcagagaatggctcagttattgggttggaggcttaacaaccatgggtggcgttctttccctgaacgactgggcaatcattatcggtatcgcctgcactatcggaaccttcggcgtgaactggtactacaagcgcaaagagcgcgaggatagattaaatggcaatgtctccggcgctcagaaatag

SEQ ID NO: 77034 - DNA, 495 bp, Citrobacter koseri
atggcaatgtctccggcgctcagaaatagcattatcggtgccctgggtactggtgcgattggcatcgctaccgtcatggtttccgggaagactggccttgaggggcgtgagtacacgccgtaccgggatatcgttggtgttatcactgtatgcgatggtcacactggcccagacataatctggggcaagcgttactccgataaggagtgtgacgccctgaccagaaaagacatgcagcgcattgccggtctaatcgatccgcatatcaaggttcccaccaccgaaacgcagcgagcagcaatttactcatgggcctataacgtcggcgaaaccgccgctataaactccacgcttttgaaaaaactaaacggcctggactatgccggagcatgcgcggagctaaagcgctgggtatacgctggtggacaaaaatggaaaggcctgatgaaccgtcgcgacgttgagtatgaggtttgcacctggagccagaaatga

SEQ ID NO: 77035 - DNA, 465 bp, Citrobacter koseri
atgagcaggttaaccgcaatcatcattgctgttgtcgtctgcatcatcgtgtcgcttggctgggcggtgaaccactaccgcgacaacgccatcacctataaagaccagcgtgataaggccaccaagaatctcagcctggctaacgccaccattaaagacatgcaggtccgccagcgtgatgtcgctgcgctggatgccaaatacacgaaggaattgtccgatgcgaaaaagaccattagcgatttgcgtcgggatgtcgattctggcgctaaacggctgcgcatcgccgcaacctgtccgggagtgccaaaaaccacctccaccaccggcatggatgatgcaggagcccccgaacttactccagacgctagacggaattatttcgatcaccgggacggaatcgcaaccgctgacaagatgattcgcggcatgcaggaatacatcaacacgcagtgcctcaaataa

SEQ ID NO: 77036 - DNA, 525 bp, Citrobacter koseri
atgaataatccgtcagttattccggccttcgacttccgcgaaatggttttgccatctaacggaaaggtcatcacgacgtccatgaagatcgccagctatttcggcaaggcgcataaaaacgttcttcgcactatcaagcggctggagtcagattgttcccctgattttaaccggctcaattttgagcccgttgaatacctcgataaaaaaggcgagatgcgcctgatgtacaacatcacgaaagatggttggatgatgcttgtgatgggtttcaccggaaagactgctaccgcgattaaagagcaatatatcgccgcctttaattggatgtccgagcaactaagccgacgcatggctatgggcgaagaaatgcagcaccgctacgccatcaaagaaacgcgatcaaagttgaaaggcacgatcggcagccggttgatgaacgagcggaagaaagagaagcgcgttctggcggtcgagcatgagcacattatgcaggtgacgcagccagaattgctgattggctga

SEQ ID NO: 77037 - DNA, 435 bp, Citrobacter koseri
atggcgaccaaaaagaaaactggccgcccttctgattatttaccagaggtggctgatgacatttgcgcactcatcgcttctggtgaaagtttgcgctccgtgtgtaagcgtccaggcatgccgaacaccacaaaagtgatgcgttggttgcgtgaacatgaagactttcgtgaacagtacgcgaggtcaatggagtcaagagccgatgctgtattcgaagagttattcgacattgccgacgaagttgatgaagagtcagcggctgttgccaaagctcgcctgcgtatcgacactcgcaaatgggcgctggcccggatgaacccgaagaagtacggcgacaaggttagtcaggaaatcgaccacaaatcatccgacggcagcatgactccgcagccgaccatcatccagttactccccgttgagccgaaagcatga

SEQ ID NO: 77038 - DNA, 1248 bp, Citrobacter koseri
atgagtgaagccgttcaactgccaatccccgctaagcttgcgccactgttcaccgccgtgaataagcgttaccggtgctcgcatggtgggcgtggtagtgccaagacgcgcacattcgcgctgatgactgccgtaaaggcgtatcagtcgatgatgaacggtgagagcggtgtagtgctctgcgcgcgtgaattcatgaactctctggaagagtcgagcatgcaggaggtgaagcaggcgatcctctctgtcccatggctggcctccaactttgatatcggcgagaagtacatccgcaccatcgataagagcgttaactacgtgttctgcggcctgcggcataacctcgacagcatcaagtcgaaagcgcgcattctgctctgctgggttgatgaggctgaatctgtcagtgaaatagcctggcagaagttgagcccgacagttcgtgaagaaggctcagagatttgggtaacgtggaacccggagcgcgacggtagcgccacggacaagcgtttccgcaaagaggctggcgacgactgcatcaccgttgaaatgaactacacggataacccgtggttccctgacgtgctggaaggtgagcgacagaacgatcagcgacgcctcgacccggcgacatacgcatgggtgtgggaaggcgcttacctcgaaaactccgataagcaggtgctggccgggaaataccggattgctgagttctcggatcagctatggaaagaggccgatcgcctgttcttcggtgctgacttcggtttcgccaaagaccctaacaccttggtgcgttcgttcatcctgcacaaccggctgtacatcgagtacgaggcatacggtcagcagactgagctcgaccacatgcctcagctatatgacacgattccgggtgcgcgtgattggcccattaaagctgactcggcacgaccagagacaatcagctatctcaagcggcagggcttcaacatctcggctgccgaaaaatggcagggaagcgttgaggacgggatcgcgcatcttcgcggcttcgacgaaataattatccatcctcgctgcaagaacgtggcgcgagaggcccgcatgtggtcgtacaaaacggatcgcatcactggcgaggtattgccgaaactggctgatggtgacgagcatacctgggatgcagtccgctactcccttgatggacatatcaaacgtaaacagcagggggtcggcatgatgattcctaaacgccttcgctaa

SEQ ID NO: 77039 - DNA, 1353 bp, Citrobacter koseri
atgactgacaaattaactctcgccgtcaaccatgcgttgaacgatgcgcggatggcccgcgcccgtatggggttgcttaacccttcgatggggctggacgccaagcgtaattcagcgtggtgcgaatacggcttcaaagaagaattaaccttcgacgatctgtataaactctaccgtcgtggtggtatcgctcacggcgctgtcgaaaagcttgttggtaaatgctggcagtcaaaccctgaaatcattgagggtgagaagtcagatgaaactcgcaaggagacacagtgggagtccaaagctaaacaggttttcaccaatcgactgtggcgcgcgtttcttgatgccgatcggcggcgtctggttggtcgctatgcagggattctccttcatatccgcgacaataaagcgtggaatctggagccaacaaaagggcgaggtctggagaaagtaagcatttcatgggctggctcgctgaaagtaagcgagtggcatgacggactggtttcaaagaattacggtcaaccgaaaatgtgggagtacaccgagcgtcttccgaatggctcgacccgccgcgtcaatatccatcctgaccgtgtattcatcctgggagattactcagatgatgcgattggcttccttgagccggcttataacgcctttgtcagcctggagaaggtggaaggtggttccggtgagtcattcctgaaaaacgccgcgcgtcagctcaacgttaacttcgaaaaggaaatcgacttcaataatctggcatcgctgtatggcgtgagcatcgatgaattacaggaaaaattcaacgaagtcgccggggaaattaaccgtggtaacgatgtgctaatgaccactcagggggcgacagttacgccgcttgtcacaaccgtggcagacccaacggcaacctacgacgttaacctccagacggctgctgctggcgtggacatcccgacgcgcatccttgttggtaatcagcaggctgagcgctccagcaccgaagaccagaaatacttcaatactcgctgccagtctcgccgtggcgacctctcattcgagattgaggacttctgtgacaagttgattgacctcggaataatcgacccggttgggcagaaaacagtcatatgggacgacctcaacgcgcaaagcgacagtgaaaaactggatgctgcgcagaagatgtcgcaaataaacagcgcatcgctggcaacaggcgagcaggtgtttactggcgaagagattcgcgtggccgccgggtatgagggttcacccgaaccacttccagaggtagatgatggcgaagaagaaagcgaagtcaccgatactacccggaaaccttaa

SEQ ID NO: 77040 - DNA, 930 bp, Citrobacter koseri
atggcgaagaagaaagcgaagtcaccgatactacccggaaaccttaaagacccgacaggcgctgaccgccttgagcgcggagcaatgaacgagttcgccaggcgaatgaagcgcattggcaaagcctacaaggacatcctcgaccgcattcctgcatcaccatcagtaaaccagcgctacaccttcgaactcgactccacccagctatcaatgctcctcagcaatgcctcattgctggtggatgagatattgggggcagataacgagactgggttctggttctggactgattacgtcaacccggcttatcagcgcggcacggcgcaggagttcgctaacttgtcccagcagtctgccgtgtacgcggcaggacaggaaagcgtatcggcaatcctcctgagtgagccgtaccgccgcagactgattctggttcgcgctcgcaccttcgaggaaatgaagaacctcagtgccagtgtgaaagcagacatggcgcggatactgaccgatgggctggggcgcggacagaacccgctggagatagcgaagcgtcttgctgaacagacaggtattgagtctcgccgggctaatcgaatagcccggacggagattaccaccgcgttgcgtcgcgcgcgcctggacgaagacgacgaagccagagagcaatatggcattctcacgaagcagatgcacatatcagcgctcagcccgacgacccgcagcactcatgctgcgcgccacgctcacctgtacaccgcagaagagcagcgggagtggtgggctaaggatgcaaacagcgtgaactgcaaatgctccacgatcgcggtactggtcgatgaaagcggcaagcctttaagcgacgccatcatcgataaagctcagaaaacatttaacgcaatgaaagcccgtggctaccaatgggctaagggttaa

SEQ ID NO: 77041 - DNA, 1266 bp, Citrobacter koseri
atgccaatgcaagttaatgtcacctcgaaggtgaacagtaaggccatccggcgcgaacagtacaacggacgcgagcactgggttgttccttcctacaccctcccggcgaacgtggtcatgaacggcggtctgtatccggccagtgagattgaccagcactacagtggcctggaggggacgctggcaccgcttgggcatccacaggtcaacggtcagtttgtttcggcatttagtcctgaagggctgaatgtgggttacgtcggagcatggaataaaaacgtcaagaagtccggcaaccgcgtctacgtcgagaagtggatcgacacagaagtggcaaagcgtaccgatgacggtaagcgcctccttgagcgtcttgaagcactggagaaaggcgaggatgtaccgccaattcataccagtgttgccgtattcctggaggaactggaagcaaacgaagagcagaaagcaactggcgctgaatgggtcgcaaaaatttacggcatggaccatgacgcgattctgcttcatgaagttggagccgccacccctgagcagggcgtcggcctgatggttaacgccgatctggcgcagcctcttaaggcgaactctggcgcgctggtgggtgaatcctaccgggagcgcgaacaacgcctcgatcgagcagcaaaagcgaagtttgcgccggggcagaatgaatacgcctggattgctgacttcactgactcgcaagcggtaatcatccgtaacggcggcaccgctgaagtgtttggctacaagtctgagggcggcgttatcaccttcgatgataccggcaccgcagtagcacgccaggagtcgtgggtggctgtcgtcgctaacaaattaaaagctctattcacaccgcaggaacagcctgcaccaaaccacaaaacggagggcgacatgcctttaaccaaagaagaactggaacaaatcggcagcatggttagcgaggccgtcgccaccaataccgaaaaggcgatcaagcctctcgcggaaaaggttgatgcgttacaggccaatcaggacaagctgaccgaaaccctgaccgccaactcccgcgccgaagagaaaacgaagcgtgaagcggtggcgaaagttcacggcgagattgtggctaacgccctgtctggcgaagcgctggatgcgatgtttaaaacaatcggtgaatccgcaccgcttgctggtaactctgcgcagcagcagaaagaaaccggtgcgccgaaccctgacgaatacttcaaataa

SEQ ID NO: 77042 - DNA, 459 bp, Citrobacter koseri
atggcacgttatcgtcgcgttaatatcgacggtcagtctctgtacaagaccgaaacccgtaaagtggccgccgcgtcattgccgggaactttcgttaccatcaacggtgacaatgagtttgcagtagccgcaacaacggttggtcgcctgtatgtgctcgaccctgcattcagcgaagggctgggtattactgactctatccctgctggtcactccacatctggtaactacgtggaagaaggccgcgaactggcaattctgtgtcctgcgggcacttacgccaaagacgccccgatcaagttgggcgcaaatggtcagggggcgattgccgactctgacaccgacaccgttcttggctatagccaggacgatgcaactatcgctgccggcgctaccgactttatccgcgtgcgcttccgcgtaggcactgtagccccgtcaactggcggcggcgagtaa

SEQ ID NO: 77043 - DNA, 1104 bp, Citrobacter koseri
atgtacttcactaaagaaacgcttgccacgaatagccgcctgcgccttcactggaactctctgtgggcgcagcgcaacatctgggataccgcgcataacatcatggttaaccagtaccgtggcgcgatggatgcagaaacgctggcggccaatgcgctggccggtgatggccttggtcgtgaattctgggctgaaattgaccgcgaaatcgtccagtctcgcgatcaggtgatcggcatggaaattgtcaacgacctgatggctgtacaaaccgttctgccgatcggcaagactgccaaactttacaacacgattggcgatattgctgatgatgtctctgtgagtcttgacggtcaggcgccgtattcctttgaccacactgattacggtagtgatggtgacccggttccgatttataccgctggcttcggtgttaactggcgtcttgccgcaggactgaataccgtcggcattgatctggtgctggattcgcagacagccaaaacccgtaagttccataaacgccgcgtgactggttatctggatggtaatccgacaattcaggttcagaactacccggcacagggccttcgcaaccaccgcaacaccgccaaaatcaaccttggctctggcgcgggtggcgctaacatcgacctgaccactgcaaccccggcacaggcgctggccttctttggcccgaccggtgcatttggtgtgactgcccgcgccaaccaggttacggcctatgacgttttgtggctgtctcctgaaatcatggcgaacctatccaagccatacactattgaagtgggtgacggtaccaacgcgatcatcagcggttcagttctggatgctattcgtaagttcattcctgtggaagatatccgccagacttatgcgctgagcggtaacgagttcctggcttatgagcgccgcaaagatgtgatctccccgctggttggcatggccgttggtgttgttccgttgccgcgtcctatgcctcagagcaactacaacttccagatcatgtctgctgaaggtttgcagattaaacgtgatgacgaaggtcgctctggcgtgctgtacggtgcgaatctggcataa

SEQ ID NO: 77044 - DNA, 285 bp, Citrobacter koseri
atggctaaataccaggtaaccagagcgtggcatggagtgaacgtcggtgatgtggttgaaattgagaaactgcatcctgcgctgaagcctcatgttatgaaactctctgatgcggcattaacaccggcgacgccagaggctggcacggatgtgaaatcccgaaaagagattatcgcagcgcgcctgacggagctgggtatcgagtttaaaggcaatctcggggctgaaaagctcggtgaattgttgcctgatggtgaactcgaaaagcttttccctgctgaataa

SEQ ID NO: 77045 - DNA, 399 bp, Citrobacter koseri
atggtaactctcgaacaggcgaaggagtatctggagagccagggaattaccattcccgattttgttcttcaggctctcgtagaccaggccaacagcattcaggaatgtctcggtgcgcattatccggcatcaacagcgctgctgattcagctctatctgctggcgcttatggggctagggcagggggataaatacatctccagtcagacggcgccaagcggggcatctcgctcgttccggtatcagtcgttcactgaccgctggaaaggggcgctggcattgttgcgtggcgctgacaaatacggttgcgctaatgacctcatccctccagacccgaccaatacagcgtttgctggtatctggattggccgaggtggctgcatgtgcgggagcaagtaa

SEQ ID NO: 77046 - DNA, 180 bp, Citrobacter koseri
atggcatgggtatcggttaagcagcgattgcctgagccgttcgtcaaagtctgggtgatgaccgacagtggtaagcgcgttaccggctatgtcaaaagcaacggtgactggtatctgttgtgccggaaggttgcagcggagaacccggaggtgatccggtgggaggatggcaatgtctga

SEQ ID NO: 77047 - DNA, 363 bp, Citrobacter koseri
atgtctgaaacagcacgctggagttacaccaacgttgcgaccatctacccgcgcgtctacgacgactggaacagcacctggacaaacggaactccctacctgattgactgcacctggacggcaaacaatgaagttgcggtagatgccagtgggaaagagttcaccacgaatctgattttcttcacggagcttaagcgtaacggcgttgatgccaccatgccgaagcgcgactggtacatcgcaagaggtgacacaacggcgcagaccgatccgctgaaatctggtgcaaacgtcatcaaagcggtgacggaatgggatatgtcattcttcgaagaagaaccagactacaaaattctgacgtga

SEQ ID NO: 77048 - DNA, 396 bp, Citrobacter koseri
atgcccgttaaaggtatcaagcgtgttcagatgaacacccgcaaggtgctgagcgatatcgctggcatccgaacggagaaggttctgtatgaggtcatgaacgccggggccaaccatgcggcgttgattactccggtcaggtcatcaaccttgatcaatagccaatacaaaaaactcgaaccattaccatcaggaatgattgggcgggttgggtatacagcgaactacgccgccgcagttaatgccgcgccggggactctaaagggtaaacccagaccagacggcagcggcaattactgggatccgagtggcgagccggacttccttcgtaaaggctttgagcgtgacggtctcaacgagataaaggccatcatcaagcaagggtacaaagtatga

SEQ ID NO: 77049 - DNA, 387 bp, Citrobacter koseri
atgacacgtaacgaggtgtatgactcactaagggcgtggttgcagtcgcatggctttgatgttggttatcgcgttcagaagcgtttctggaatgagctggagaataccgagggggaaagataccttgtcattcagcagaatggcggcggtaagccagaagaggcgataacccgcgattatttccgaatccttctcctgtcaggccagaacgacagcaatatcaaccaggttgaagaccgcgccgacgccatccgccaggcgatgatcgacgactacaaaactgagtgcatcatctcgatgcagccaatcggcggcatcaccgccatccagaccgaagaaggtcgttacctcttcgatatttcctttcaaaccatcatttccagataa

SEQ ID NO: 77050 - DNA, 738 bp, Citrobacter koseri
atggccggatgcgaatcaggtgcattcaccgggcgtgacgtcgtcgtttattacgctattagctgcccggaagtacaaccagccgccagcgcatacaatcgcttaggtatgatgcgcggcaaaacagtaaatgctgagtgggaaaccgcagatgcaactggcgacatgagcgccgcattcacgcaggaaaacctcgttacttacaagaacatttcgttctctggtgacggcgtgacccgcaaagaggatgtttatgcgcagaacgcgcttaagcgtcacgtctacaacccgccggcagagaccagcaaccagccgtatgtatggttcaaaatcatctctcctaacgatatcaccgaaggtccgttcatggtgacgtcatggggcgatgaagcgccgcacgacgacgttgccacctggtctatcgaagcgtccagcgcaggtcaggttgacgtgcgcgacgttggtgcggtcattactatcacagcccagccgcagaaccgcacgctgaccgttggtgatgcgctgaatctgtcagtatccgcaacggtttctgatggttcaatgctggcttaccagtggaagcatgatggagaagatatcagtggcgccacgtcttccacttacaccaaagcgagtgttacagaagatgatgccggggcttatacctgtcagatcacttcgaccaccgctggcagtctgacatccggcgcggcgacggttatcgtcaacgcagaataa

SEQ ID NO: 77051 - DNA, 654 bp, Citrobacter koseri
atgaaagcaataaccgatatcggccaggctgtcattcgggctggtagcaaagagatatttctcaacccgtcattcctcgccatgtctcgcatcgggtcgccggagcagatcgttgatgctttcgtgaaggttcatgccgggcattatccgaaacaccgcatcgctgatatccagactctgaaggctgtcaacgctcgctgctttgctgaaatggcagcgtcggccgccagcgtagtccggcattgctcggaaggtgatgttgcagaggtgatcggttcgtactcgatgaacgcggcagggcggctgctgttcaagccgggagccattccgattgaggatgttatccaacttgcccgccacctgattctgcatggagtaatgggcgaccagccaccggaagagtttgagggcaagaagggcgaatacagtgacaaattcgatgtccggtcattcgtctacaccgccgttgctcatctcggcatgagcgagtcagacgcctggaacatgacaatgaccagtttccgcgccgccatgaatgccaaattcccgcagaaggaaaaagcaaaagtgccgactcaggagaaatacgacgaggtcatggactgggccgaacaaatgctggcgatcgacgcgcaacggaatggtccgcactga

SEQ ID NO: 77052 - DNA, 225 bp, Citrobacter koseri
atgaagcgagtaaaagttgaattctcatccagtggcattgttctcaataatgctgagtttcaggtgttgcagggtgatcgcgtactggttgaagactctttatcagggaaaatttctgatgtgttcatccgtaattacgatgtaagcgctaatggtggccctgtgtggtgtcggttcactaaaggtgatatcccaggcttaaatgtgactgcaactctgtgctga

SEQ ID NO: 77053 - DNA, 222 bp, Citrobacter koseri
atgtttgtagcagatggactaaaagctgacccggataacaaaggctgggtcttggggtggggcgttgtgcgcggctctccctggcaccttgtcggtgtatacgccacaaaagatgtagctgaaacgaaagctgctgatcttggtgttgggtacgatgccgtttacggcagccaccgagttggtagcgatgattttgtgacaggaactaggtttctggagtaa

SEQ ID NO: 77054 - DNA, 357 bp, Citrobacter koseri
atgaaaggcgcaagtctgattgcaccgttcggtctaagaatgccggagtcgctaaagaataaaattgcagatagagctaaagccaatggacgctcaatgaatgctgagatcgtgcagatactccaagaaacaatagataccgatagagcgattgccgaaagcgatttagtagacttcgactcaactcaagccgcatttaatgccgcagcgacagcagaagataaagagaaattcctcagtgatcttgcgaaaaaagacccgttcacagcagacatactgcgtgagggggaagagcacgccaggaggcttgctgcgatacttggtcgtcgcatggggtatctggacgacgagaaataa

SEQ ID NO: 77055 - DNA, 165 bp, Citrobacter koseri
atggaaaacgctagaaacatcccgccaacagggattagatttcctgaatggttgaaggatgcccttaagtcagcagcaagcaaagagtgccgctcacttaatggtgaggtcatcaagcggcttgaaaaaagcctaagagaggaaggattgttgaatgggcagtaa

SEQ ID NO: 77056 - DNA, 963 bp, Citrobacter koseri
atgggcagtaaaagcgacgaaaccccgaaggcggcaaccaacgaggtttctaatttgtcagtaactaccaaggaactaacaatgaatagtttagcaaaagcaaatgcagatttcactatcttcaaattcggtgaaaacaacattcgtgttatcgaccgcaacggtgatccgtggtttgttgctgttgatgtctgcaaggcgctgcaaatcgggaatcctactaaagcaatcaagaacttagatgaagatgaaaaagccctaacttcaattcagggcttaagccgaggaaatgaagaaggtaatattgtcagtgaatctggcatgtacacattggttcttcgctgccgtgatgctgtcaataaaggttcagtacctcaccagttccgtaaatgggtaactgctgaagttctgccttcgatccgcaaacatggcgaatacactaagggtaaaaaaaccacagtcaacgaacgcacaccgctccgtgacgcagtgaacatgttggtaggaaagaagggactccgctatgacgatgcatacactatggttcatcagcgctttaacattgatagtattgatgagctttcactcgaacaaatcccgatggccgtagagtacattcatcgtgtggtgcttgaaggtgaattccttggcaaacaggaagaactacctgcgccgaaactggatatcagtttcccgatgtcctggttcgcagaaaacgcgccttatgcaattattcgccagcagagcggagacacagtgtctcttgaccggaacgttcttgtcgattgcagcccggcttatcgcttgcttgataccctgacaaaagccggttatgacgttgaggcggcaaggactgagataaaagccctgcgtaccatcatggcggaacaaagctgggcgctgaaagaaatcgccgcctatacaggattgagggacaaggcgtgtcatagcgtcaggctgtaa

SEQ ID NO: 77057 - DNA, 384 bp, Citrobacter koseri
atgaataagtatcttctgtttttggcacttattgctttaactggttgtaagcctggcgccgacaaggccatagagttagcgcaaaaagaagtgtcagccgatatgaaagaccctgagagcgcaaagttcagatatatgcgcttcatcaaggagggcgagaaagatggtcttgttggtggattcgtatgcggtaacgttaatgccaaaaacagttatggagcatatgccggatattcacctttcttcatagcaataagcatgaagtcaaagggtatattctctaaaggcgtaacctatacagtgtatgacaagaaggtattttctgaacccagcgaaatagaaatgaaatcttatctaagcacatgcggacaagacggcgtctag

SEQ ID NO: 77058 - DNA, 3237 bp, Citrobacter koseri
atgacccagaacgtcggcgatattgaatatgtgattaaggccgatacggcacagttgctgcgtgctgataagcaggtggttaatgtcaccaacagcatggagtcaggattcaaaaaggccgataaatctgctgatgcccttaatacgggattaacaaaacttgcatcgacactcaagctggttattgctgctggcactctccgtgaaatggctcggatggtgcagagctatcaggagatgtcagagcgggtgcagatggtcacctccagccaggaagagtttcagagtgtacagaagcgtcttctgaatacggctaacgatacctaccgatcactgtctgaagcgcaggagttgtatatcacaactgctgatagcctccgcagtatggggtattcaacccaggaggcgatagacgttcaggactcgatgtcttttgcatttgttaagaacgcaacaagtgcagatcgggctaataatgcaattagtgcgttttctaaatccatcaacaagggcaaggttgaggctgattcgtgggaaacaataatcgctgccatcccgtccgttatcggtgatattgctaccgccagcggtaaaaccacggcggaaatcagggcgcttggttctgctggcaagctgacggcatcgcagcttacagaagggttgaaggcatcgcttgattccaatgcgtcagcggctaaaggcatgtccaacaacctgacggacgcaggtgtaaggattaagacggccatcactgaactactggtatcgtttgaggggcaaactagtgtcctccagacgttcaccaacggtctgattagtgccgctgatgtcatccttgagtttggtcgcgactcagaaagcatggctggtctaattgacaccaccaccattgctgccaaggcatttgctctggtaatggctggccggtatgcgggagcgttaaacacagctattgcgagcaaagttcaatcggtatccgcaacgcggcagatggttacagcagaaagccaggctgcgcaggcggctttggttgcagcgaatgcaacaagaagaaaggcggttgctgacaaagaggccgctctttctgccgtcgcgctggcgcaggctgaatataatgtggcaaaaggcagtaatgccgaaatgacggctcttactgctttaacggcagaaaaatcaagagcgcgtgcagcctctctggctctggcgcaggctgaatcagcgcaggcagcagctacagcaaaagcagcgactgctgcgagagctgcatctgtgggtatgggtctgcttcgtggggcgatgtctctccttggtgggcctgctggcattataatgattgctgcctcagcgctgatttactggtggcagagcgctaaacaggccaaagaagaggcgatcagttacgcagattctcttgatggcgttatcgccaaaatgaaagagatgaaccagacgcaactcacaggcactcttgctgatatagcgaaatccattgagtcgcaaaaggatcatatcgatgacctgaatgattcagtaagtgatgcccaggctgaatatgacaaatacaatggcctggcaaaacaattcggggtggaacaggataaaaacaacggttatgtaaaaaaggccaacgaatggctgcaaacattaaaccaaagaaaaagggatgtcagtgatgccactgataaactaaaccgcaccaccgaacagcaatcacttattcaggaacagttaaatcaaaaggcgagagaatccgaagaggcattcaacattcttgccaataacctgcgcaacaaaataccaggggcgagtgaagctgccatatctgcgatggcgtccaccattcaggtgctggacacgctcaacaaaaaagctgcgagcgtcgggaaagatcagcccgtagaacctgaagagtcgccggaagcaaaaaaattaatccagaacgcagagcgccgccttgcgctctcaaaactggaaggtgaggccagggcgagattgcaggctcagtatgacgctgacgacgcccatatcaccaatgataagcaaaggaaatcgcttcaggatttgtatgctgcgactgagaaagttaccgccgcaaggaaggaagccaataaggaaacgtcatcatctgatgaagccgcgcaatccctcacccgtcaacaagcagcgctcgaccgcctgagcacaggttacgccgatggctcgctagaattagcgaaatacgatgcagttgtagctcttggcaataaagcatcagcagagcagcttgccaaagctgaacagcaagcggaatccatatggaaaatccagcaggcaacaaaagcagccgcagaagaagaaaggaagcgcacacaggcaggacaaaactttaccgggttacaggggcaggtttctccagtcgctgcagtggataacacctacgcgcagcagatggcccagcttgatgaatatgttgcgctttacccgcaaaaaattgcagaggccgaagctgtccgcgcaggaattgaagaccagtatcaccagaagcgtatggctgccatgtgggaagaatggcagcagcagagcgagatcaacaacatgcttggctctgcaatcgactccttgcaggggggggcaaccagcgcgattacggggctaattaacggcacgcaaagcctgcaagaatccttcgccaacatcggcacgacaatcctcaacagcgttgtcggtagtctggtgcagatgggtatggagtacgttaaaagcgcggtgatggctcagtctgctaatgctaccgccgctacaagcgcagcagtaaccggggcgagtattacggcttcaatggctccagcggcggcggctacaaacatcgccactatggggcaggcgtcaactatcggaatggctgctatggcgtcggcaattcctgcaatggttggtttgtttggtgggcgtcgctacggcggcacggtatccgctggtaatgcctaccgtgtcaatgaagatggtcgttctgaaatcttccagactgctggtggtcagcagatgttcattccgaaccagtcagggaaggtgatatcggctgataaggcgggtgggggctcttttaatccagtaatgaacctgacgataaatactacgggaggaattggtaatgaggatatcgcaaggctgcgtaaagtgtggaataacgacatgctgaagatgatggtagaccagagcactcgtccgaacggcttattgcaaggacggagaaaataa

SEQ ID NO: 77059 - DNA, 240 bp, Citrobacter koseri
atggctgcaccttctcatgaattacttaatggattggctgtaaaaacagtactcagctacgtaatcgcaacactcaacgaagatcaaaaacaagttcttatgagcctagcggggactcgttcaataaatttcgatgaacttgaaagtgaatcaacttcgaaggaagaacttcgagcggcagctgagaccgttaatgacatcattgaagagatagtcaagacgggagttggtcaggattga

SEQ ID NO: 77060 - DNA, 348 bp, Citrobacter koseri
atgccagaaacattcacatggacaccgcagaaagcctactcagtagagcgaaccccgaacgtagctgtcgttacgttcggggacggttacgagcagcgccagacgaagggtatcaatccgctgatggataaatactcgctcacctttcgcggcgtcagcggcgcgtgccgcagcaacccggcaaaggatgctgaggcgtttctgaaagccagaggggcggtagaggcgttctactggacgccatctgatacgggagtacagaagttgtttgtctgccgctcctggaatatgacaaagaccgggccgctgtttgaactgacggccactttcgagcaggtgccgagatga

SEQ ID NO: 77061 - DNA, 258 bp, Citrobacter koseri
atgatgtcactacttaaaggggctattttgtccgagccgccggcacacgcccgcgagcgcaaagatattgagttctgttgtcgctacgatgcttcggactgggcaaagccaaactggaccgaaaaaaatccagtgcataattggcgaaactacgcgacgccacctttacggcgcatctggcatacgttcactgatgagcaaaagcaagtgattgccttcaccctccagacggcagctgatgccgagcaatggggctaa

SEQ ID NO: 77062 - DNA, 705 bp, Citrobacter koseri
gtgcgcgacataccagcaaatttaattatcgacagcgtggacgccggagtaggcgcgtttatcgatttgttcgaagccgacctgctaccctttggcggtgaccttatcaggttccattcaggcacaaacggctattacggcaatgttatctggaaaggtaaccagtaccaggcatatccgatagctgttgaaggattcgagtcaaagaacgaagggacatatgcccgcccgtctatggctttggcgaacgttaccggcctgctgactggcatcaaccacgactttgatgacatgctgggagtcgttatcaccaggcgacaggttcctgttaagtacctggacgctgtgaatttcccgaacggtaaccctgatgccgatccgacacaggaagccgtttcccgctacgtcgttgaagagatgacggaagagacattcgagcaggtaacctacaccctggcgacaccgattgactgcgataatgccattattccggctcgtaccattctcgccgacgtgtgtcagtggcagtatcgcggaatcgggtgtggatatgacgggcctcccgttgcagatgagcgcgacaatccaaccacggacccggcgaaagacaagtgctctcaccgtcgtagcggatgccgcttccgttatccgcgacctgaaccaatgccaatcagcagcttcccaggctctcagaaggtttcctga

SEQ ID NO: 77063 - DNA, 720 bp, Citrobacter koseri
atgcaagaattactcgattatgcggcatcgtcgcaggatgaagtgtgcggcttaatccttgatggcgatcggctgttccgctgtcggaacgtgcatcccgatccgggcaagcatttccgcatcagtgatgatgactggctggcagccgaggaggctggagaggtgacggcggtattccactcgcacccgggaaacgttccattcctgtcaggtgccgaccgcaaagcgcaggttgtcagtggcctttcgtggtggctggcttgcgatggtcggatcctgaaattcaggcccgttccattcctgctgggccgcagattcgtacatggcgtagtggactgctacacccttttcagagacgtgtatcacctgtgcggcattgacctgcctgacttcgaaaggacgaatggctggtggctgagaggtgaaaatctttacctgaagaacatgcctgtcaatggctttcatcaggtatcacctgaccaggcgcaaccaggtgacgccatcatcaggcaaccattccccggcgctgacccttgccacgcaatgatcctcctcgaagaaaacatggtgcttcaccacgaccacgccggacaccttagccggagagagccaatgcgccaggcatacgttaagcagatgcattccatatggagacatgaacagtgctcatctttaaatttgcgggcaatttacgccgattttaccgccaaatctctctga

SEQ ID NO: 77064 - DNA, 348 bp, Citrobacter koseri
atgcaatggcatctcgatcgccacctgaaagacggctcggtggtcctgtttgtgccggtagttgaaggcgctatctccgccgccgctgctgcatggattgcggttgccgtcagcgtggcttcaattgcgtactcggtctacatgtcccgcaacatgaaaactaaaacgtcagcggaagcggctgagacaaacacgctaacgaacaactcatttaccagtgcggaaaaccgtgtcggtcaagggcgcccggtgccgatactcctcggcgagatggaagtcggctcgaacgtcatttctctcggtattgacacaagtaacaaccaggactggacagaatcaattagctaa

SEQ ID NO: 77065 - DNA, 3144 bp, Citrobacter koseri
atgtcttcaggcggcggtaaagcatcaaccccgaaactcctcgacgataacctcaaatcaaaacaattttacagggtactcgatcttatttcggaaggcccaatatacgggccggtagaccaggaacacctttcttcattcaaactgaacaaaacgtctgttaccgatgcaaacggaaatgtcagtgtgaatggcgtcagtgtggcatggcggcccggttcggagactcagcagccaattaacggcttctctgcaatcgaagcgacgaccattgttaacactgaggtcacttacgataccccgctggtacgcaccattacggatcaggatgtaacccgagttcgtttcaacgttggtgtcacaggactggtagagcaggacaccaaggggaaccagaaaaacacctcggttacgatggttcttgagtcacgcaccggttcatctggttggacgattgagaaaacggtaacgatcacagggaagatttccggtgaatatcttgaggcacatgttattgatgccccggacactaaacccttcgatatccgcgttcgtcgtattacgccggacagcagcagtgatttgctgtcaaacggcaccatctggaacagctacagcgagatcaccgacgataacctgaactatccgttctccgctattgctggtgcggttattgaccgtgaccagtacaccgacaccccgagtcgcacatatcatcttcgcggcctgattgtggacgttcctgacaactacgatccgattgccagaacttactcggggttgtggactggcggattcaaaaaagcgtggactaacaacccggcgtggctgttccgtgaactggcgaagaatacccgttttggcctggcgaagcgtgccggttatatcgatgtagatgacggtgcgctgtacgtcctctcacagtattgcgatcagcttgttaacgatggctacggcgggcaggaaccaaggatgacgctgaatgcctatattaccgagcaggcgagtgcgcgtgacattctcgacaagatagcgagtatgttccgtggaattgcattgtgggacggtatgcgcctgtcagtaatgctggatgcgccacaagacccaattgcgacaatcacgaatgctaacgtggttgatggcgagttcaaacgcagctctgtaaagcgttctgagaaatacaatgccgttgttgtgtcctggactgacccggataacggctgggagcaggtaaaagagtatgtttccgacgatgagatgatcgcccgcggaaactacaacgaaaccactctggaggcgttcggctgtacctcacgcggtcaggcatggcgagccgggaaatggctgctggaaacagcaaagcgtgaaagcagcaggctgtctttccagatggcgcgcgatgctatccacttcacgccgggtgacatcgttgaagtcatggacaacaactatgctggtgcgcgtcttggggggcgcatcatgtcgcacgcgggcaataagattaccgttgatgcggttgattcgtctctgatatcagaaggcgacaccatgtcaatcatgggaagtgacgggaagttcgttaagtatgagattggcagtattgccgacaatatagtgacgctgaaaacgacgcctgcatgggttcgtgacggtactgtatttgccatctctaccagcagcgtttctaccagactcttccgcatcctgagcgttgcagagacggataataattctgtttacagcatcaccgcatcgcagcatgatccgaacaaacaggccattgttgatgaaggcgccgtgtttgaagttcccaacgatacactgaacggttaccgcgtaccgaacgtggagaacctgcgtatcatcaacactaactctgagactgtccaggtcactgctacatgggagacggcaactaccaccaaaaagctggtgtttgagttgtacgtgtacagcgctgacggaaaagtagtggcgcagtacgaaaccgaccggttccgctatgaattctttggtctgaacgccggtggatacacgcttggcgttcgcggtcgcaatgaaaacggaatgaaaggcgctgagacgcaaatcagcatggtcatcggtgcaccacctgcgccatccagtgttatctggacgcctggcctgttctctgctgacctggttcctgttatgcgcattacggcaacgacagacacctcgtttgaattctggtactccgggcaaaatcagatcgtcaatccggcagaaattgaagaccaggctcagttcctcgggcgctctaaccagtggacgcttcatggtctacaggcagataaaacgtattacgtttatgtccgtaccaggaacgctttcggggtatctgaattcgttgaggcgtccggtcaggcgtcatctgatatcccggggatgatagaactcattgatgagcagatccgcgaatcagatgcgtttaaaaatgttcaggaaggtatcgacactaaccttgacggaatcatgtcgaacgcgctggcgaaccacggaaccgttgagcaccagtatcagcagtatggggaggttcgcgccgatatcctggtcgtgaaaaccactgttgcgaccgccgagcaggggcttgctgacctgtccacatatgttcaggcgcaaattggaccgaacggagagttaacggcggcggttaatgaaaagcttactgcccaggttgaagataatggtaatgctaaagcgtcatatactcttaaccttggcattaagagaaatgatgtactgtataacgctggtttcggtatatccattgagccttcaggaagcacctataaatcaacggtagttttcgctgctgatcagtttggtatttattccgggagcgatcctggtaattacaaggctgcattcctgacctctaatggtcaggtatttattaacgaagcatttattgactatgcctcattcactttggcgaaagttggctcatggtattcagctaattacgtagcgggacagacagggacgatcatgaaatcagacggcacgtttgaggtgaatggtgctgtatctggacaggggaggttaagcattacaaatatcagaattgttcagtatgactctcagggcaggccattggcagttatgggggcacctttataa

SEQ ID NO: 77066 - DNA, 255 bp, Citrobacter koseri
atgaaaatcatttacctttcggttatttccatattactgaccatctttatttctggatgcgccagcaacacccctccggtatgttacaacgaagcaattatcatgaagaacagggtttctattccggtgtttggaatcagaaaaccgcttaaaacgacagaatatctttctggtgggtattttgcatatcagtggatgccgcaggaatcgttcactgacacatcaacctgtgataagctcgggcttactgagtga

SEQ ID NO: 77067 - DNA, 804 bp, Citrobacter koseri
atgtccgcaggaacattaaccctgaccaataattcagcagtcgtaactggcagcggaactgcctttactaccgaactgtcagcaggtgactttatcgttgttaccgtcggcggggtcccgtacacgctgcctatcaagacagtaaacagcaatacatctctgacgctggtcagcaactacaccgggccgacgcaatccggcgcggcctggtctgccgttccccgcgtagccctgaacatggttaccgcagcactggtggcacagagtgcagaagcccttcgcgggctgaactacgacaagcagaactggcagagtattttcagcggaaccggtaacgtcaccgtaaaattacccgacggttcagaatggacaggcccggcgtggaacagtttcaagagtgcagcgcgtgccgatattctggggacagtatcgcaaagtggcggggttcctacgggggcaattattgagaagggctctaattcaaatggggagtacgtccgctttgcagatgggactcaaatttgcaggatggtattttctgcggcatctgccgcaaataaaaatctgactgcttcaggcggtctgggcggttatcgaacttcacaaaatgttgttccttttcctgcctcttttgcggcttccccctgttgctcaggccacatcaacaacaatggtcagaacgtaagaattgagttagtgagtggccccctggcatcctgccagtttgctttccacgctataaacactggcacctatacaggttcagacactatctacattacagccattggtcgctggttctga

SEQ ID NO: 77068 - DNA, 273 bp, Citrobacter koseri
atgaaactgattatcacgccccagcgcgcggatattgaatgcagctattctgtcacgggtgacgttctgactgtaatgcttgacggcgaatcggatacgttcgatttcagcgaaatgccggatggctgcgctactgaattctgctcatcactggagccatgcccggtcctgatagctgtgaaaaaggatggtgagttgtctgttaccgtaacggggttttacggagaagatgccagcgcactggaaaaaacagaacgtgtcgaggtgtactga

SEQ ID NO: 77069 - DNA, 234 bp, Citrobacter koseri
atggggaagattaactgggttagtgaaaaaagcgttaaggcagaagaggtgatggcaaaaagaaacatccttctggcagactcggactggagaatgctacccgatgcgccgggggataaaaccgcctggagtgcatatcgacagggcttgcgtgaccttcctgagcaggatggtttccctgagaatgtgtactggcctgtgatgcctgctgatgaacattcttcagcagtttaa

SEQ ID NO: 77070 - DNA, 1056 bp, Citrobacter koseri
atgcgttaccggttcgatggtaaggaaaagacgctggtcatcggcccctatcctgaaatttccctcactgaagcgcgggcaaaacagtcagaagcaaaaatgaagttgctggcaggtgtagacccggcagagcagaagcaggccataaagaagaaagagaaggaagcagcggctgattcgttcggaggtatcttccgtgagtggcatacgcacaaatcaaaggtgtggtcaaagggatatgctgacgagatgatgagcatgttcaccgacgacatactgccagtcatcggtcatctgaaaatggaagaagttgagccgatggtgctactgaaggtcatcaggctgttcgaagacaggggcgcaatggagcgcgctgataaggcgaggcgcagatgcggggaagtgttcagttatgcgatcgtaactggcagggctaaatacaatccatccagagacctggcaggggccatgcgaggatacaggaagaaaaactacccattccttcccatgcaccgcatacacgagttccagaaggctcttaacggctatggtgggtgggttatctctaagatagcaacacagattcttcactatacagccatgcgtacagttgagcttcgatcgttggtatggacgggaattgactatgaaaaccggttaatcagcgttgaccctttcgtcatgaaagggagaaagttgcatattgtcccgatgtcagatcaggtcatggagttgttcaggtttctgcagcagataaccggccagtatgaattgtgtttccctggtcgcagcgacaggaagaaaccgatcagcgaaaacgcagtgttaggcgtgatccgcaatattggatatgaaggccaggcaagcgggcatggattccgtcaccagttcagtaccgttctcaacgagaagcactggaacagagatgcgatagaaatgcaactggctcacgttagcggtggtacgcgatcggtgtacaatcacgctgcttatctcgacacgcgccgggagatgatgcaatggtgggctgactggttagatgaaaaggtggaatag

SEQ ID NO: 77071 - DNA, 450 bp, Citrobacter koseri
  misc_feature (428)..(437): n is a, c, g, or t
atgaatgtggcaatcattcctgcgcgtggcggtagcaagcgtataccacgtaaaaatattaaagaattttgtgggaaaccaatgattgcctggtccattgaagccgctcagcagagcggcgtctttgaccgaatcattgtatcaacagatgatgaagaaattgctgaggtcgcgcgtaaatatggtgcggaagtgccgtttatgcggcctgctcatatttctgatgattttgctacaacagttgatgtcattcatcatgccttggatgagttatcccaaagtgtatgtattgattttgtctgctgcatctatgcgaccgccccctttcttcaaggccaggatttggaaaaagcatatgaaaagctgcagcaaagcgattgcgattatgttttctctgcaacatctttcccattcccgatccagcgagnnnnnnnnnntgttccatcctga

SEQ ID NO: 77072 - DNA, 141 bp, Citrobacter koseri
atgaatcgaaaaggtttcttcacgtcaaagagcttgttagaaatcctcccccgtgagcgggtacaggatattgacactcctgaagactgggtgattgctgaaaatcttttccaattacttaaagctaaaattgatggctaa

SEQ ID NO: 77073 - DNA, 1992 bp, Citrobacter koseri
atgttcggaaaattgacactggatgcagtcccgttccatgaacctatcgtcatggttacgatcgctgccattatcgtcgggggtctggcgcttttagccttgatcacttacttcggtaagtggacctacctatggaaagagtggcttacttcggttgaccacaagcgtcttggcatcatgtatgtcatcgtcgcaattgttatgttgatacgcggctttgccgacgccatcatgatgcgtagccagcaggcgctggcttctgcgggtgaagcgggcttcctgccgccgcatcactacgatcagatcttcaccgctcacggcgtgatcatgatcttcttcgtggcaatgccattcgttatcggtctgatgaacctggtggttccgttgcagatcggcgcgcgtgacgttgcgttcccgttcctgaacaacctgagcttctggttcaccgttgtcggcgttatcctggttaacctgtctctgggcgttggtgagttcgcacagaccggctggctggcttatccgccgctctcgggaatagagtacagtccgagtgtcggggtcgattactggatctggagtctccagctatccggtatcggtacgacgctgaccggtatcaacttcttcgtgacgattctgaagatgcgtgcgccgggcatgaccatgttcaagatgccggtatttacctgggcatcgctgtgcgcgaacatcctgattatcgcctccttcccaattctgactgtcaccatcgcgctgctgaccctggatcgctatctgggcacccatttctttaccaacgatatgggcggcaacatgatgatgtacatcaacctgatttgggcctggggccacccggaagtgtacatcctggttctgccggtcttcggggtgttctccgaaatcgctgcaaccttctcgcgtaaacgcctgtttggttacacctcgctggtttgggcgaccgtgtgtatcaccgttctgtcgttcatcgtttggctgcaccacttcttcaccatgggtgcgggcgcgaacgtaaacgccttcttcggtattaccacgatgattatcgcaatcccgaccggggttaagatcttcaactggctgttcaccatgtaccaggggcgtatcgtcttccactcagcgatgctgtggacgatcggctttatcgtgaccttctcggtcggcggtatgactggcgttctgctggcggttccgggcgcggacttcgttctgcacaacagcctgttcctgattgcgcacttccataacgttatcatcggcggtgtggtcttcgggtgcttcgccggtatgacctactggtggccgaaagcgttcggcttcacgctgaacgagacctggggtaaacgcgcattctggttctggatcatcggcttcttcgtggcgtttatgccgctgtacgtgctgggcttcatggggatgacccgtcgcctcagccagcagattgacccgcagttccatccaatgctgctgattgccgcctgtggcgccgcgctgattgcactgggcatcctgtgccagctgattcagatcttcatttctattcgcgaccgcgagcagaaccgcgacctgaccggcgacccgtggggcgcgcgtacgctggagtgggcaacctcttctccgcctccgttctataactttgccgttgtgccgcacgttcacgagcgtgacgccttctgggaaatgaaagaaaaaggcgaagcgtacaaacagcctgcgcattatgaagaaattcatatgccgaaaaacagcggtgcgggcatcgttatcgccgccttctccactatttttggtttcgccatgatctggcatatctggtggctggcgattgcaagcttcgcaggcatgatcatcagctggattgttaagagctttgacgaggacgtggactactacgtaccagtcccggaagtcgaaaaactggaaaaccagcatttcgatgagatttctaaggcagggctgaaaaatggcaactga

SEQ ID NO: 77074 - DNA, 324 bp, Citrobacter koseri
atgagaaattatgaagctgaagtaattgagtacatcatgaagaactacccaatcagggaacgttggtttaggcctggccttaaacaggttactaaagagtggaccctggaagatgattttcagtttgtaccagaagatgccgatgattttttagtcgatttatttgaacattttgatattgagtattcaaactttgatgcgcggaattatattgaatatgaatatccattctggcaaaaaaagctgcctgaaatagagttaaagcctttgacagtagagatgattatagagtcagcaaaggcgggtaaatggctttatgactga

SEQ ID NO: 77075 - DNA, 468 bp, Citrobacter koseri
atggatacgacggaagaagcgaatggaacttattggtatcatgggcacgctaatgtaacgcctggtgaactatttgatttgatatttattgagcagttagctgattcattagggataaccactgaagctgctacgttagtgttgataggtcaaccattgattcccgtaaaaggaaaattatcagcagccacgaacacaccgggtaccagcattgcatctatcttatgcagaaaacttctgaaaggggctcgtttcccatttggattaagaccgtatgcgcctatggggaaattttctaaattgaagatggttcccacaaaccaaattgcaacttatataggtcgatggattccttttatcggtcatgctcagctaatcatgctgctgttcatggttacaaaacatacgcgtgataaatacaaccttatcgcacgacccaaagatcgcatacagtggacatctttctga

SEQ ID NO: 77076 - DNA, 309 bp, Citrobacter koseri
atgatgatcgtcaaagagttcgattactccagcccgtatttatacaaagctgttgcaacaggccaaaatcttaaatcagcagagatacgctggtacaaaattaacgatgcgggtcaggaggtcgagtattttaatatgttgctcgaaggtgtgcggattgtttctgtctctccaacgatggcagggccagaagacaagaacaacaaccatcttgaaaccatagaattacgttacgagaaaatcacctggaagcactgtgatggcaatattatctacagtgatgcatggaatgatcggcagtccgtctga

SEQ ID NO: 77077 - DNA, 315 bp, Citrobacter koseri
atgtctttcttgcttttgtcaggggcgttgttgacgcttaaccctgtttatccgattggacctgaatgctattacgctacttatcaggcattaatgcaggtgaaaaaagcggacaattaccgttcaacgatgggaattatgccgccaggcaataccgtgggctgtaatagtgaggctgaggggatcgaactcgcgatgctttccgactatgaggcagcttttgattttgcggggaaacgtcaattttttttgatgagaatgaacaacataacagtttcaattattcacaactgtttgttgatagacctgttgtaa

SEQ ID NO: 77078 - DNA, 1173 bp, Citrobacter koseri
atgttcgatttcgacagtatcatcgagcgtcaaagtgataaatgccgcaagtgggatcatccgtttgtctgctcgcggtttggcgccgtaccaaaagactttattccgctatggattgcggacatggatttcacctcacctcctgcggtgattgacggcttccagcgtatcgtccagcacggaacatttggctacacctactgtttcgatgcgttttatgacgcggtcattaccttccagtatgaacgccatcaggtaaatgttcagcgtgactggatcacgctaacctacggcaccgtttctacactgcactacacggttcaggcattctgccaaccgggcgatagcgtgatgatgaatacgccggtctatgacccttttgcgatggcggcgcagcggcagaatgtgcatgttctcgccagcccgcttcgcgtggaagagaaccgctatcatcttgatgttgaattgatcgaagaccagcttaaaacgcatcgtccaaagctatggttcttctgttcgccgcataacccttcaggaaggatctggcgtgcggatgagatccgtctggtctctgatttatgcaaacgctatggcgtgatcctggtcgttgacgaagtccatgccgagcacattcttgatggtaagttcgtcagttgcttgtcatcggggtgcgccgcactggataacgttattgtcctgacctcgcccaacaaagctttcaacttaggcgggctgaaaacctcttattccatcatcccgaatgagacgctgaggcagcgttttcgccagcagcttgagaagaactccatcacctcgccgaatatcttcggtgtctggggaatcattcttgcctatcagcaggggcttgcatggctggatgcgctgaatggatatctgcgcggcaacgccgtatatctggctgacgccattaagacccactttcccgactggaaaatgatgacgccggaatcgtcatatctcgcatggattgacgtgagtgcggatgagcgcagcgcaacgcaactgacacagcactttgctcaacaggcaggagtggtgatcgaagatggcagccactacgtgcaaaacggtgaaaactatttacggattaacttcggcacccagcgctattggctggaacacgccatcgacaggatgctgaagcattactaa

SEQ ID NO: 77079 - DNA, 1572 bp, Citrobacter koseri
atgacacaggaaaaatcctttaaatcgaggttatgggaattttttcaaagcctgggtaaaacatttatgttccccgtatcgctgcttgcatttatggggttattattaggtgtaggcagttcaattaccagtccgtcgacaataaaaagctttccattcctgggaggagaacttacccaattaacttttggttttattgcaatggtaggtggatttgcttttacttatttacctgtcatgtttgctattgctattccaatgggaatggctaaacggaataaagccgttggcgctttttcaggttttgtcggctatatgctgatgaatatgagtatcaattattacctgaccgcgacacaccagattgcggatgccgcgacaatgaaacaggtcgggcaatccatcgtattaggcattcagacattagagatgggcgtgctgggcggcatcatcgctggcgttatcacctatttcctgcacgagcgtttccaggataccgtcttgcatgacgctttcgctttctttagcggcattcgtttcgtccctattatcacctcgctgacaatgtctctggtggggttagcgattccattactctggacctacgtcgcgatgggtattgccggtatcgggcatatcattcagagcaccagcgtatttggcccattcttatacggtgtaggcgtgctgctgctcaagcctttcggccttcatcatatcctgttagctatggtgcgctttaccccggctggcggaacggagttcgttaacggccatgaagtcgccggggcgctcaatattttttatgccgagctaaaagctggccttcccttcagcccacatgtaacggccttcttatctcagggctttatgccgacatttatttttggtttgcctgccgtagcatatgctatctacagaacggccaaccccgaaaaccgcccggtgattaaaggactgttactttccggtgttttagtttcggttatcactggtatctccgaacctattgaatttttattcctctttattgccccagcgctgtatgccttccatattgtaatgtctgggttggctttgatggtcatggcaattcttggcgtcaccattggtaatacggacggcggcattctggatttgttaattttcggtgtgatgcaaggaacatcaacgaaatggtatttattattcccggttggtatcgtttggtttgggatctacttctttgttttccgctggtacattcttaagcatgatattaaaacacctggccgtgaggactcttcagatgatgcagcccaagctgttgcagcaaataccaaagcacgcggcaaatcaaaatatgatcacggtgttattttgaatgcgctgggtgggaaagaaaatatcgattctctggataactgtattacccgtttacgcctggtggtgaaagatatgtccaaagtggatcaacaaacattaaaaaacgccggggcgctctccgtcgttgtactggatgcgcatagcgttcaggtcattattgggccacaggtgcaaagcgtgaaaacaggcattgaagccttaatctaa

SEQ ID NO: 77080 - DNA, 873 bp, Citrobacter koseri
atgagcattatttccaccaagtacctcctgcaagatgcccagacgaaaggttacgctgtccctgcattcaacatccataacgccgaaacgatccaggcgattctcgaagtttgcagtgaaatgcaatcccccgtgatcctcgccgggacgcctggcacctttaagcacattgcgctggaagagatctacgcgctatgcagcgcttattccaacagctatgacataccgctggcgctgcatctcgatcaccatgagtcgctggaagatatccgccgcaaggtcaatgccggcgtacgcagcgccatgatcgacggtagccacttcccgtttgaagaaaacgtgaagctggtgaaatcggtggtggatttctgtcacgcgcgcgattgcagcgtagaagctgaactgggacgtctgggcggcgtagaagacgacatgagcgtcgatgcagaaagcgccttcctgaccgatccgcaggaagccaaacgttttgtcgaactcaccggtgtcgacagcctcgccgttgctattggcaccgcacacggcctttacaccaaacgtcctaaaatcgatttccagcgtctggctgagattcgcgaagtggttgatatcccactggtgctgcacggcgcaagcgatgtacctgatgagttggtgagacgggccattgaactcggcatatgcaaagtgaacgttgcaacggagttgaaaatcgctttcgccgcagcggttaaaaaatggttcagtgaaaaccctgatggcaacgatccgcgttattacatgcgcgtaggcatggatgcgatgaaagacgtcgtcagaagtaaaataacggtttgcggatcctacaaaaagttactgcaaccttcgcattgttaa

SEQ ID NO: 77081 - DNA, 1146 bp, Citrobacter koseri
atgccagaaactcgcacctccgttaccggcacctggacggaagaagagatccgtcaacaaccggccagttggatccgctcactcaataacatcagcagtattcgatcggccattgatcgtttcctgacgccattgctgtgcaaaaacgatctgcggatcatactgaccggcgcaggcacttccgcgtttatcggcgatatcatcgccccctggctttcacgccacaccgggaaaaacatcacggccgtacccaccactgacctcgtcacaaatccaatggattacctgacgcccgcacatccgttactgctggtctccttcgcccgctccggcaacagcccggaaagcgttgccgccgttgagctggcaaatcagtttgtgcctgagtgctatcacctttcgatcacctgcaatgaagccggaaatctgtatcaaaatgccgtcgacagcgataacgccttcgcattgttgatgcctgctgaaacgcacgatcgcggctttgcgatgaccagcagcatcaccaccatgatggcaagctgtctggcggtgttcgcacccgatatgatcaacaaccagaccttccgcgatgttgcggatcgctgccagacgatcctcacctcgctcggtgatttcagcaaaggcgtttttggcaatgagccctggaaacggatcgtttacctcggtagcggcgggttacagggcgctgcgcgtgaatctgcgctcaaagttctggagctgacagccggtaagctggctgcattttacgactcgccgacgggtttccgtcacggcccgaaatcgctggttgataacgaaacgctggtcgtggtgtttatctccagccatccctacacccgtcagtacgatctcgatctgttagcggaactgcgtcgcgatcaacaggcactgcgcgtcgtcgcaatcgccgctgaaagcgatcctgtcatcgacgcaggcccacatatcctgctgccgccatcgcgcgcttttattgatacagaactggctttctgcttcctgatctacgcgcaggtgttcgcactcacgcaatccatcagcgtcggaaacaccccggacaccccatccgccagcggcacggttaaccgtgtggtgcaaggtgttgttatccatccctggaatgcctaa

SEQ ID NO: 77082 - DNA, 1134 bp, Citrobacter koseri
atgagccagttgctgcgcgcccgacgcgtgttgaccgagcagggctggcttgatgatcaccaactccgtatcgagaaaggcgttattgcggcaatagagcccgttcccccaggaatcacagcgcgtgatgcagagttactgtgcccggcatatattgatacgcatgttcacggtggcgcaggtctggatgtcatggacgacgcgccggagacgctcgataaactggcgttgcataaagcgcgcgaaggcgtgggcggttggcttcccacgacggtcactgcaccgttggatgctatccgcaatgcgctggaacgtattgcccggcgctgtcagtccggcggccccggcgcgcaggtgctgggtagttatctggaaggtccctggttcacgccgcagaacaaaggggctcatccgcctgaactgtttcgtgaattggatcttgccgagctggacgacctgatagccgtctcacagaacaccttgcgcatcatcgcgctggcgccggaaaaacctggcgcactgcaagcaattcaacatctcaaacaacgcggcgtacgcgtcatgttaggccatagcgcggcaacgtacgaacagacctgcgccgcatttgatgccggtgcagacgggctggtgcattgttttaacggtatgagtggattacaccatcgggaaccaggaatggtgggcgccgggttaaccaatacgcgtgcgtggctggagcttatcgccgacgggcaccatgtccatcctgcggcactgcgtctgtgctgcggctacgcgaaaacgcgggttgtattaatcaccgatgcgatgcgcgcagcaggtatgcctgacgggcaatatgatatttgcggctacgacgtcgaaatgcgtggcggcattgtacgcaccgcgtccggtgggctggcgggcagtacgctctcgattgataccgccgtgcgaaatatggtcaaacacgctggcgcgacgccagaagaggctatccatatggcctcactgcatcctgcacgcctgcttggcatcgatcgccagttgggatcgatcgagccaggcaaatgcgccagcctcatcgcgctggacaatggcctgcatctccagcgtgtctggattcaggggcagcccttcgccttgtag

SEQ ID NO: 77083 - DNA, 435 bp, Citrobacter koseri
atgttaggcattattttgacggggcacggcggatttgccagtgggatggaaaaagcgatgaagcagatccttggcgagcagtcgcaatttatcgccatcgacttcccggaagcatcaacgaccgcgctgctcacctcacagcttgagcaggccgttgatgaactggacgaccgggaggatatcgtgtttctgactgacctgttgggcggtacgccttttcgggtggcatcaacactggcgttacagaaaccgggacgggaagtgatcaccggcacgaatttacagctccttctggagatggtgctggaacgcgaaggattaaccagcgaagcctttcgccagcaggcgctggagtgcgggcatcgcggcctgaccagtctggtggatgagctggggcgctgtcgcgaagaaaacgccatagaggaagggatatga

SEQ ID NO: 77084 - DNA, 879 bp, Citrobacter koseri
atggcatctaatcaaaccacgctaccaaacgtctccgacactgacgagacgctgctgtccggcgtaaacgaaaacgtctatgaagaccaaagtatcggcactgaactgacgaaaaaggatatcaaccgcgtggcctggcgttccatgttattgcaggcttcctttaactacgagcgtatgcaggcgtctggctggctgtacggtttactgcccgccctgaaaaagatccataccaacaaacgcgatctggcgcgcgccatgaaaggccatatgggtttcttcaacacccatccatttctggtgacgtttgtgatcggcattatcctcgcgatggagcgctccaagcaggatgtgaacagcattcagagtaccaaaattgccgttggcgccccgctcggcggaattggcgatgcgatgttctggctgacattgctgcccatctgcggcggtattggagccagtctcgcactgcaaggttctatcctcggcgccgtcgtctttattgttctgttcaacgtggttcacctcggcctgcgttttggcctggcgcactatgcttatcggatgggggtcgcggccattccgcttatcaaagcgaacacccggaaagtgggtcatgcggcgtctatcgttgggatgacggtgattggcgcgctggtggcaacctatgttcgtctgaacaccacgcttgaaatcaaggccggtgatgcggttgttaaattacaggccgatgttatcgataagctcatgcccgcgtttttaccgctggtctataccttgaccatgttctggctggtacgccgcggctggagcccgctacgccttattggcatcaccgtcgttttgggtgtagtcggtaaattctgtcacttcctgtaa

SEQ ID NO: 77085 - DNA, 780 bp, Citrobacter koseri
atggaaatcagtctgttgcaggcttttgcgttgggtattctcgcctttatcgcaggcctggatatgttcaacgggttaacgcatatgcaccgtccggtggtgcttgggccgctggtcggcctgattctgggcgatctgcataccggtattttgacgggtggtacgctggaactggtgtggatgggcctggcacctttagccggcgcacagccgccaaacgtgattatcggcacgatcgtgggaacgacgtttgcgattacgaccggcgtgaaacccgatgtcgccgtgggtgtcgccgtaccgtttgccgtcgccgtacaaatggggattaccttcctgttctcagtgatgtctggcgtaatgtcccgctgcgaccgtatggcggctaacgctgacacccgcggcattgaacgagtcaactatctggcgctgctggcgttaggcatcttctacttcctctgcgccttcctgccgatttactttggggcggaacatgcgaaaaccgccattgatgtgctgccggaacgtctgattgacgggcttggcgtcgcaggcggcattatgcctgctatcggtttcgccgtactgctgaaaatcatgatgaaaaatgtctatatcccctatttcatcatcggtttcgttgccgcggcctggctcaaacttccggtgctggccatcgccgctgcggccctcgcaatggcattgatcgacctgctgcgtaaatctcctgaaccgactcaacctgcggcacagaaagaggaattcgaagatggcatctaa

SEQ ID NO: 77086 - DNA, 474 bp, Citrobacter koseri
atgccaaacattgtattgagtcgaattgacgaacgtttaatccacggccaggtcggcgtgcagtgggttgggtttgcgggggcaaatctggtactggtcgccaatgacgaagtggctgaagacccggtacagcaaaacctgatggagatggtgctggcggaggggatcgccgtacgtttctggccgctgcaaaaagtgatcgacaatatccatcgcgctgccgatcgacagaaaattctgctggtctgcaagtcgccagcggatttcctcaagctggtggagggcggcgttcccgtaacacgtatcaatgtaggcaacatgcactatgccaatggcaaacaacaaattgccaaaacggtttctgtcgatgctaacgatattacggcatttaatggcctgaaaaccgccggtgtcgaatgcttcgtacaaggcgttccgacagaacccgctttggatctctttaaactactctga

SEQ ID NO: 77087 - DNA, 1296 bp, Citrobacter koseri
gtgaaacatctaacagaaatggtggagcagcataaacgagggaacacaaatgggatttatgccgtttgttctgcgcatccactggtgctggaagccgctatacgttatgcccatgcaaaccataccccactgctgattgaagccacctctaaccaggttgaccagttcgggggttataccggcatgacgcccgccgattttcgcggctttgtttaccagctggccgactcacttaattttccacaatcacagttgattctgggcggcgatcacctcggccccaaccgttggcaaaatctgcctgccgcccaggcgatggcaaatgcggatgatttaataaagagctacgtggcggccgggtttaaaaagatccatctcgattgcagcatgtcctgcgccaacgatccgataccgttaaccgatgagatcgttgctgagcgcgccgcgcgactggcgaagatcgcagaagaaacctgccgcgagcattttggcgaatccgatctggtttacgtgatcggcactgaagttccggttcccggcggcgcgcatgagacattgactgaactggaagtaacaacacctgacgcggcacgagccacgctggaagcgcatcgtcatgcatttgagaaacagggactgagcgctatttggcctcgcatcatcgggctggttgtacaaccgggcgttgagttcgaccatacgcatatcattgattaccaaacgcaaaaagccatcgcgttgagtgcaatggtagaagcgtatgacacgctggtgtttgaagcgcactccacggattaccagacgccacagtcgctgcgccagctggtgaaagatcactttgcgattctgaaagtcggcccggccctcacctttgccttgcgcgaagcgttattctcgctggccgcaattgaagaagagctgttacccgccaaaaccagctctggtctgcgccatgtgctggaaagcgtgatgctcgatcgcccggaatactggcagagtcactaccacggcgacggcaacgcacgccgcctggcgcgtggttatagttattccgatcgcgttcgctattactggccggatcagcagattgatgaggcgtttgcacggctggttcgcaacctggcggatgaccccattccactgccgctcatcagccagtatttgccgctacagtacgccagagtgcgcgaaggggatctcaacgcaacgccgcgagagctcattatcagccacattcaggacgtactacagcagtaccacgccgcctgccagggcgttacatcccaaaacgcataa

SEQ ID NO: 77088 - DNA, 810 bp, Citrobacter koseri
atgagcagtactgattcttctgcggataagcgcattaccgctaccagcgaaaggcgggagcaaattatccagcggttgcgacagcagggaagcgtacaggttaacgatctttccgtcttattcggcgtctccaccgtgaccatccgtaacgatctggcttttctcgaaaaacaggggattgccgtgcgtgcgtatggcggcgcgttaatttgcgacagcaatactccgggtattgagccttcggtggaagataaaagttcactcaataccgctgtaaagcgcagtatcgcccaggcagcggtttcgctgattaaacccggacaccgggtgatccttgactcaggcaccacgacatatgaaatcgcgcgcatgatgcgccagcatacggatatcatcgccatgaccaatggcatgaatgtcgccaatgcattgctggaagctgagggagtggaactgctgatgacaggtgggcatctgcgccgccagtcgcagtcattttatggtgaccaggcagagcagtcgctacagaattaccatttcgatatgttgtttctgggggtcgatgccattgatttagagcgtggagtcagcacgcacaatgaagatgaagccagacttaaccgccggatgtgtgaagtggccgagcgcatcattgtcgtcacggattccacgaagtttaaccgttccagtctgcataagatcattgatacgcagcgtattcataccatcattgtggatgaaggtattcctgtcgacagtctggaaggtttacgcaagagcggtattgaagtgattctggtgaacgcgtaa

SEQ ID NO: 77089 - DNA, 654 bp, Citrobacter koseri
atgagtatgaaatatgttgctaccatcatagtggtaacatcattactaactggctgtgcaaatgacagagtaaaaccagaacaatattcagggttcctgaaggattattcatccttgaaaccagccgtttctactaccggtgtgccagttatgcgctggatcgattctaatgctcatctggaaaattattccaaaattatttatgaacctgttgtctattatcctgagcctcgctcatcaactcaggtaggtgaagctgttctacaggggattctggattacactaatcagagtatgaaaacggccgccgcaaagcgctttatgctggttgataaaccaggccctggcaccttgatcttcagaggggcaattactgctgttgataccagtaatatgggattacagttttatgaggtaatcccgatagcgatggtgctggcaggaacacaggtaattagcggatacaggactcaggaaaccaggctctactttgaaggtgaattgattgattcacaaagtggaaatgccgtaactaaagtgctgagaaaggggcaaggtaaagatcttccgaacagtaaccagttacttacagttgatgatttgaaagcggtgattgataaaatggcttccgatgcagctgttttcaacctgtaa

SEQ ID NO: 77090 - DNA, 357 bp, Citrobacter koseri
atgttcctgaactatttctctttaggaatgctgttttttgtattcctgataattttttatggggtcatcatgattcatgatattccttatgttattgcaaaaaaacgtaatcatcctcatgctgacgcgatccatacagctggctgggttagcttgtttacactgcatatcatctggccttttttgtggatctgggccacgctctatcaaccagaacgtgggtggggcatgcaggcgaatgccgctcagtctgaaagaaatcctgatatagacgcattaacaaaacgtattgcagatctggagacattggtaaataaaacacataacaaaatagataaagaatcaccggagatttaa

SEQ ID NO: 77091 - DNA, 1137 bp, Citrobacter koseri
gtggatttgcttattatactgacctatattgcactggcatggacagtttttaaattattcaggataccagtaaatcagtggacactttcgtcagcggctcttggcggtatagggctggttagtgggcttattttattaatgaactataaccatccctatacatttaccgcccaaaaagcagtgatttctgttcctgtgatccctcaggttacgggaagggtaattgaagtcattgacaaaccaaatcaactaattaaaaaaggagaagtactttttaaaattgagcctgataaatatcagtctcgcgtcgagcgttcacaggcagatttagtcacggccatccataatgttgaggtactaaaggcccagttgtctgaagctcaggaaaataccatacgagtctcagttgaacgcgaccgtctttataaagattatcaacgctatgtgaaggggagccaggctaaggtaaatcccttttctgaaagagatatagacaatgcccgacaaagttatctgtctcaggatgcagtagtaaaagcttctgttgccgagcaggctcagattcagagtcaactggacagtaaggtaaatggcgaacagtcccagattgttagtctgagagcgcaacttgctgaagcgaaatataatcttgcacaaacaatcgtccgggcccctggaaatggatacgtcactcagttgttgattcagcccggcacatatgcgtcttcattaccgcttcgtcccgtgatggtcttcatcccggaacagaaacgacaggttgtagcgcagtttcgtcagaactcattgttgcgtctgaaacctggtgacgaagctgaagtcgtgtttaacgccctgccaggaaaagtgtttgaagggaaattaatgagtattcttcctgttgtgccgggaggggcttaccaggccgagggcacactacaggcactaaccgttacaccggcaatggatggggtgatggtaactattgaacttgaacataatgaatatattgatgtgttacccgatggtgtttctgcgcaggtagctgcatattcggaacatttctcgcatgtttccgtattgcgtaaggtgcttttgcgtatgacaagctggatgcattatatttatcttgatcattaa

SEQ ID NO: 77092 - DNA, 855 bp, Citrobacter koseri
atgaatgtaaattatttaatacatgtgcatgcattgttgcagtggatcgaagatcacctttccgaagagttaacgatagaactgcttagtcaaaaatccgggtatagcagtagttacttacaaaaaatatttaaagatactaccggtgattcattatcaaaatatgttcgtggtcgacgaatgtttaaggctggcgtatttctgtgttttaccagagccagtgttggatatatttctgaggttttaaggtttaattcaataagtgccttttcacgttcttttaaaaatacttttggggtttctccccaggatttcaggagaaaaggagttttaaatgtcagcaacacgattgcaaaggccgaagtgtttaagattccatgtgaaattaaaactatcagtatgattgataatgccagtatcagattatacggtcaatattttaactatagtgtagatgctattgattttgataaaccgcacttcaatcagcggaagcgttttaggaaaaaattctttcaacatctgggatatacaccagagcattattatgccacttccaaatattcaccctcatggcgaagcgagagagaaatagatataaaatattttgttggattagcagaacaacctgatggtattgctggactggagaatgctgaattttgcttacactcaaataaaatagcctgtttttatgcagagggaatatttgttaaccctttctatatagcgttgtcagctaacatgcaaagtatgtcggaattattcaccggatggaactgtaattgggatctggaatgttttttaactcataacagatttactgaatatcgctatattattcctgtatcctga

SEQ ID NO: 77093 - DNA, 2697 bp, Citrobacter koseri
gtgaaaaagaagtatctgagttgtgctgtctcttttgtgttgtctgtaggagcagaagctgctcctgtctattggacaggaaataccagtgactggtcagatagccaaaactgggatatcggaatattgcctggcgaaaatgatgaggtatatatagatggtcctaatggacactttccaataattactgatgatatctcagtcagtagtattgataataactatcaccttgccgttaatgacgcgaagctcgtcgtcgccaacacgcttcgcgtaggcattgccgaaccagaccttggaggggagagcttgacaggaagactctcccttttaaatgcaacagtcgatgcctctgaaattacagttggcggcgggagtacggaatatactggatttcttaacgcagtatcttcagaaattaatacaaaaaatctgttaattggttatctgtatggtaacggtcatggcactcttagtgagtccagtctgtcgactgaggcgatccttgtgggtactaatcgggggaccgggaagttggatatccgcaattctgaggtcagtaccacttatttatatattggttacacgatggggcaaggggttgttaatgttgacaactcgagagtcaatatttttgggccggggacaatagcgatagtcggtgagcgggcaggaggtgatggggtacttaatattactaatggtggtattgttacatcttttcgtcttttgtcaggcgtcttaggggggcatggtgaaataaatgtttctggtcaaaactcttccctgagtactaactccctgactcttgctcaatctggatcggcaataatgactgtttcagatggtggtgagataaatactaccagtgagtttttgattgcggatcagcaaggcagtaacggtgtgttgaatataggtaacaacagcgccccaggttacgttaactccagagttattaagtttggcaatggagctggtatgatcaatttctcacataccagcgatgattataaatttctttcccagattacaggtgacgggacggtaaatatctggagtggttcgacgactttacagggtggtaatgactacacaggaaacactaatcttcatggtgggtatttacgcgctggtagcgataacgcatttagtgctggttctgattttaacatcggtaaagatggtgttctcgatctaaatggttatgctcaaacggtgggtactgtctatcacgatggtaccatttacatgaatgaagctgcttcatctgctggcactacgttgactgtcgatggtgattatcatggtcagggaggaactctggtctttaattctcagctggcaggcgatgcttctattacagatagtatgcatatcacaggtgatacagacggtagcagctacgtaacagtaaataatctgggtgggcaaggcgctcaaactgtcgaaggcattgagattattcgcgttgatggtaattcagatggtcaatttatccagcgcggtcgtattgttgccggcgcttatgattataaccttgtgcagggcggcaatggaggtaacagtaataactggtacctgaccagcagcacagaacctgtggacccaacagagccggttgacccgacagaacccgtagacccaacagagccggttgatccgacagaacctgtggacccaatagggccggttgatccgacagaaccaccgtcaccacctgtattcccgaataccagcatctcccgcccggaggccggtagttacatgaccaacctcgcagcggcaaatgagatgttcatgaccaggcttgaggaccgtggcggtgaccgcatgtacaccgatccgttcactggtgaaaagaagctgaccagtatgtggatacgtacggaagggcgacaccttgacagccgggacagcagcggtcaactcaatacggacgagaatcgctatgtcatccagatgggcggtgatattgccagcggcacctacaccggcacggacatctggcgggctggtttgatggccggctacggcagcagccacagtaccacggactcctccctgacgggttatcgctcagaaggaaacgtcagcggctacagcgttgggctatacggaacctggttcaggaatgcggatcagcgtactggcgcgtatatcgacacatggctgcaatatgcgtggtatgacaacgaagtgcagggaaaaggacttgcgaaagagaagtatgactcggatggcctgctggcctcagttgagggcggatatacattccatctgtggggagataaacataatgatgtcttcatccagccacaggcacaggtggtgtggagcggggtgacgatggatgagcaccgtgaaactaacggaactcgagtagctggtaagggtgaaaataatacgcagtcccggttgggcgtgaaggcctttatggaacatcgctccggtaaggagagcgtctggaaaccttacctggcagcgaactggctgcataacagtgagaaaagcggggtcagaatggatgacgtgacgctgtacgacgagggccgtaaggacattggagaagctaagctgggtgttgaagccagcctgatagagaagctgagtgtacaggttggcgtgagttctcgcttcggcagcgataattaccgtgacacggggggcggtattagcgtgcgctatgagttttaa

SEQ ID NO: 77094 - DNA, 516 bp, Citrobacter koseri
gtggctctacatggaaagttcgtaattaatgatgcgtactactcccctttatcgtttcctggtgtaggcacgtttttagctttctctggtaatggtgcttaccgtaaccgtggggcatgtggaatgatccccaaagaggggccagtaccagcgggtaaatactggattgttgaccgccctcaaggtggactcaagtcacagctaaacgcaggggtgagagacatttataatcacttcgccagtggcgcaacattcaaacattccgaatggttcgcattatggcgtgatgattgggggaacgacgattacacatggattgagaacgttaagcgtggcaatttccgtttgcatccaggcgtactatcagaaggttgtatcactctcccacatgattctgattttgccatgttgcgtaatgctctgttgagaacccgaaaaatagatgttccttgcatgaggaagctacaggcatacggcacgattgaggtgatcgccaatggcaaaacatgcccttag

SEQ ID NO: 77095 - DNA, 519 bp, Citrobacter koseri
atggcaaaacatgcccttagtttgttcatcaagatagtgctgttcgctgttgttatgctgatcgttgctaaaatggttccgtatgagggattagttaattctattacggggcttttcgatttccagagtgccgacaagtttacccgcttcattttgggtgaacctgatttagaagtttgggaatcgttaggcgactattttagcatcttaattaacacattaatcagcgtacctgtcatgagtgccattatcacggcgtacagtggcgtgacacacaaagttagtccagcaggtatccccagagagtggggcagttctacgttgcggcggttagctaaaatcttcgggtttaccttcctgttttgggcgttgtttcgcttgctgccttatcagtctttattcccagatcaaacgtattcaaatttcacaatggcggcgattgtgggctttcagttgctcttaacgattgtttgctactggttcatcacgaagaaaatcacaactaaaaggagtttgtaa

SEQ ID NO: 77096 - DNA, 486 bp, Citrobacter koseri
atgcctattccggcttacatgtggcttaaagacgatggcggcgcagacattaaaggatctgtagacgttcaggatcgtgaggggagtatagaaattgttggctttagtcatggtctgaacattccagtagacagtgccaacggtaagatcactggcaagcgttcacattctccgatgatgattgaaaaggagtttgatagctccagcccgtatctatacaaagccgttgccactggtcaaacgttgaaaagtgcggagattcgctggtatcgaattaaccatgcaggacaagaagagtgttacttcgtcatgaccattgagggcgtgaaagtgacgggcattaatccagggatgccaaacgctaaaatggcagggaactcgcagatcaaccacatggaatctgtttccctgatgtatgacaaaatcacctggcgttatgttgatggtaatgtccagtatacggacgattggaacgtaagagcgtaa

SEQ ID NO: 77097 - DNA, 1554 bp, Citrobacter koseri
atgaacgaatattttatgtttgccctggcactctctcctttgctgcttatggtatttttaattctgaaattgaaaatgcccatccattattcagttttgatttcgctggcattcactgccgcgctgtctgcaatattctgggacatgccagtacaaaatcttaaagcctcgatgggttatggcgcactgaaaggattatggccgatcgtgattgtgatcctcggcgctatattcagttataacgtcatgcaggcgaccaaagcgctggatattctccgcgatattctcgccagtattagcgaagataagcgtattcaggtactgctgatttcgtggtgtttcggtggattccttgaagcggctgccgggtacggtacggcggtcgcgatacctatcggtattctcatcgcgctgggattcaacccactgaaggcagcaattgcttcacttgtggccaacaccgtccccacggcgttcggggcggttggtattccggtctctatcctggctgaacaggttaatctgccggtttacaccttaggcggaacgattattctgcaattagccctttttaatatcctgctgccgtttgtcataatttgcattattggcggtggcctgaaagccattcgcggcgtgttccttattacgctgctttgcggtatcacaacgcttgttccgcagtattttgtcgccatacatctcggggcagaattacccgcttttgccggcagcctggtcagtctttttgccgtcgcaattgccagccgcctgcgcaaagggaaaacagatcccgagtggcgcattgaagtcagccacacccgtgaaacgacgccgcgctcggcgaaagtgctgttccgggtcggttctatctatctgtttatttttgtttttattctgctgtgctcgccgttattcccaacgataaaagcggcggcttctcagttggcttcggtgctgcattttacgctggccgatggcaaaacgctggcgctgaaagtcgaatgggtcaccacgcccggaatgttgattatctttgcgaccattattggcggttttattcagggggcatcagcacgcggtatgctggaagtgtttgtcaaaaccgtgttccagcttaaaaattccattgtcgcgattatggcgatcgtcgctctggcaacggtaatggatctcagcggtattatctccacgctggcccagtcgattgtcgatctgaccggaagctcgtacgtttttctcgctccggtgattggcgcgctggggacgtttgttaccggcagcgacaccaactcgaatattctgtttggcaaactacaaaccattgccgccagtaaattaaatattgatccaaactggctggctgcggcaaatacctccggcgcaacaggcgggaaaatgatttcaccgcaaagtatcgccattgcggtttcggcaaccaaaatggaaggacaggcgaatcagataatgtccggcactatgaagtactgctgtgcctatattgtgatccttggattaaaagttggtctcttttattactggtttatgacttaa

SEQ ID NO: 77098 - DNA, 897 bp, Citrobacter koseri
atggagttttatttctaccgcatcaatagattcggtagatgggagaagtatcattatattcaactgcggggagcatttctatcaggtatccaacaccaattcagcgaaaataatttagatacagaaacaataaccatcagctatgaatatatcctctgcaaacaccttattgccaacactgaattcagctacctggcgttgcccgagaactacaaccgcctgtttatcccccgtccaaaaacacccgcagataatagcctcaaaacgttaagcagcaaaggggttggcagattgcttgccgccggaggtatctacaacgggaatatcgaaggtttcagggaaacggcagaaaagttgggaggcgttgctccagcgggttacgagcaggttatggataacaaaggattgctgattcttggagcttcaatagctgccagcttaactatgggaagaatgaaacttcctgaattagaagaactggagcagttcggtgcctggggaactgcatcaggacgaacattcgatcccgagcttgccggaggtccaatagagagcctgacaactgatggtgtcattattaacagtaaaggtatcgctacagttgagaaacatatttccaggttcgttcatgatcctgcaaatgatgtaatgttcggcaggttggaagacattgaaaaagggaaaatacctccagaacaggtcgatctgaattactatactcatgaatgccgagaatatcagcgctactgtaatctgggatgggaatttgggcagcctgagggggatgcaggatataatctatggaatcatgcccatacagccacgctggaagattacagactcaagggaacagttgacgacttataccaccaggatgcacttaactatgataactga

SEQ ID NO: 77099 - DNA, 390 bp, Citrobacter koseri
atggcttccgttccaacccctggccctggttcaattgttatagctaacaacatgcgtgaagcacgccaaaatggaatgtctcgtaatatggccacggcttctacttactactggttctatcaaaaagtcagaaatggcggcccatgggattataaaaaattcgatccgtatttcgcagcatttggcaatttcaacttcggtgccgcagggactgctgcaggcattcctgcaaagatcctccttattggcgggggttgggctcagaaccgcgcaggtacttcaaaacctgaatggggtaaatggtacgataaaccaccttacggtgatgacccaacggatcagcgcaatatcagagaaggaatagactatgccattcagaacggctattag

SEQ ID NO: 77100 - DNA, 408 bp, Citrobacter koseri
atgccattcagaacggctattagatggctccatcggcttgtcacgcttgtacttctcatcgtggttacaggttttgcctggttaaatcatcagcccgcccctctcagtgacgacgagttgcagcgcgtttatcaagtttcagattgcgtctggctgtacatgactgtgaatcatcagggtggcgcaaccgtacctaccatttaccgatattatctgtcgaataagctagagggcaaagacacagacattatccagcaactctctacgaaatctcccgtcattgagggtactggcactattacgaatgccagcccagataaaaacggggcggtgagcatttcttatagcggtaaagttatctcgattcaggacaatatctcagacctccggttcacagttgcgccctga

SEQ ID NO: 77101 - DNA, 171 bp, Citrobacter koseri
atgaaagccatcgcaattacccgcgccgcgccagaaggcagcaatattgagtttttacagaacattgacctccctgttccggtcgccgccggacatgacctgctggttgaggtgaaagccatctccgttaacccggtcgataccaaagtacgcgcgggttttaacgcatag

SEQ ID NO: 77102 - DNA, 1965 bp, Citrobacter koseri
atgagcaaaaattacaaagtagcccataacgttatttcttgtcctctgagattaacccgcattgctcaattcgttgttttatcttttatttctgttcaggttgccttcgctgaaaatgatgaagtgcaatttaatagtgattttttacgctcagcgattgatgttagcaactattctcagggaaacccggttccgcagggacaatataatgtcgatctgtatgtgaacgacaaatggcgagggcgtggtgaagttaagttcgaaaatgataaaagcaatgccgtggtagccaaaccgtgttttacgctgaagctgatatcaacgctgggaatcgatattgataaaattgatccaatgctgcgccagtcgttaaagaataatgaaagttgtgtgcgtattggtgatatatcttctgatttaacagcttattacgatgtgacgacacagcgcatcaatgtgcaggcgcctcagatatggctgcttcgccaggttcgcggctatgttaatcctgaattatgggataacggtattcctgctgcgacgttgcaatatgattacaacgcatggcatgcagagatgtctggaacggactctatgtcatctcagtatctgagcctgatgggagggctcaattgggatgcctggcgcttacgctatcgcggtgttttcaactggaacaacgatcagggttggcattatgactcaaccagcacttatcttgagcgcggcattattccgctgcgcagcaaactggtgatgggtgattccaccacggatggccaggtcttcgacagcgttggttttcggggcgtaatgctgacttctgacgatcgtatgtatgaggattcccagcgaggctatgcgccagtcattactggtgttgcaaacaccaacgcactcgtcagcgtgagtcagcgcggcgcgcgtatctatcaaacgacggttccgcctggcgcgttccgtattgatgacctgtatcccaatggcaccggcggcgatctgctggtaacgattaaagaggcagatgggagtgagcacagttttaccgtgacctatgcttccatcgctgaactgctccgcccgggaaccagtcgctattcgctgatggcggggcgctatcggaatacctccgtgaatgagaaaccacagattgcgatggggacattccgtcatggttttactaacttactgaccacttacaccggtgcgatgggcggggaggattatcaatcggtcgcaggtggcgtcgcgctcaatacgctcattggcgcgctttctgctgacataacgcatgcgcgaacgacgcttgcggataacagcaaacgtgaaggccagagcatccgcttttcatttgccaggattctgcccgtcgttgataccaatatcaccctggcgagctatcgctattccagctccggttattacgatattgacgatgcgatgttgatgcgtgatttagagcggacaaataaaggggcttattccagcagcattaaccgcaagaatcgtctgcaactcagcgcaacgcaaactatttccgagacgcttgggagcattaatctcagtgccagcactcaggattactggaacaaaagcgggcgtgataccgagtatcagttgggttacaccaatgcgttcaagtggttcaattttaacctcaacgccagccgtacccgcgatttagtgaaagacaaatgggataacaaaatcgcgatagggatttccctgccgttagggaacagcgcgcgctcggcttatctcagtaccacctatgttcaggaaagcgggcatcgggggctgcaaaactcaatcgccggcacctccggggagaaccgtcagtataactggggcgcgttcgtcaatcaggatgactacgaccatagcagcaataaaaccacgggcggcgtcagtggtaactggacttcgccgtggaccagcatgggcggcagtttctcagcaggctag

SEQ ID NO: 77103 - DNA, 582 bp, Citrobacter koseri
atgatgttgattggctctggcttgcttatgataacagccttccttagctatttagctattagtggaagtgatgcaagcgaaaggcttcttaatagatttgttttgcaagcccagatgtggtgggcagtagattactactctagtggtgggttttctgggctggataatattttaactcatatgcttggttttggcgcagaagacaattatcaagggataaaataccttatgagtattgtcgcaccagcagatgtctataacatatttatggacagaggaatcacttttactatggctggccctgtaaatcttatctacttctttggatttccattgtgcttacttccggcaatcatcattggatggataacaggtctttcatttcgagtggtaattgagtcaatcaaagttggtgatatgatattatgcctgttatcaatcaagctgtattatgtcatgattagagttctgacaatggctgatgtgcatcagttatttgagatgaaaaccatagcctgtatatttgtttttatatcatattgcatagtatctgcgttgctagtaagaagaaaactagcataa

SEQ ID NO: 77104 - DNA, 315 bp, Citrobacter koseri
atgagttggaagtcttttacgttgaattttatctggggtatagtaagcattatatcgataattatattttcaacgcaggacaaggaatggtttatcgatggcaggggaatcaatgatatctgtgatgtcatgaaatatattgagaatgatgatattcgaactgtgggcataactttaactctacctctgtttattccttttatctatgcaattgtatggcgaaggcaacgtagtatctggcaatattctgttatagtggctctcctgctcttttggttatggcgctttgttattcgataccaattatgttggtaa

SEQ ID NO: 77105 - DNA, 717 bp, Citrobacter koseri
atgatgattagctctccacctttttgtgagatcgacgaatatggttttcctcattggaatgggttagatttttttcgatggtatgccttacctaccaattggcgttttatgactgggaaagcatatctttggtattataaaacagcttggttgattcaccatagggcaatgataaagcaatacgcttatgaagcaagaatccctgaattactccttgcaggtgttgctgttgctgaagttggcggaactccagagagatttaaaggtgttggtgttctgcaattcagacagataattgaagaaatattgggaaagaacagtaatgaatcgtctaatgctacatcggtcggttcaattgctatccagatcggtgttgcagccaaaacaataggtatccaccctgataaattgactcattttcagcaatttcgcctgtcgcagtgtttacttgataacagctttaacattcgggttgtagcattccatttacatgatcttattttatatgataatccagacgctgatactttatacttgactgacgagcagataatattggcgggttccagatataatcgtggaacaatgagaagtaaagatgatattgttcaatcaattagtgagttacccggttctccggggcgtgaatatggtgaatatggtcgtcgaattatagaaaagaaagatataatacttaaaattatgcgaggcggttaa

SEQ ID NO: 77106 - DNA, 177 bp, Citrobacter koseri
gtgctggctgcctggggggagacctgggtggctggcgaaattggttatttatttagtcaggatcagtttcccggattgcgtctggcggagcagataatgttcacccttatgctcaatcagtacccagccttcttcaccgagcaatactttgctgtctatctggcgtttggtgcctga

SEQ ID NO: 77107 - DNA, 1065 bp, Citrobacter koseri
atgaaagataatgaatcattaataatagattatgcgaaatccataggtataattttggtggtaatgtatcacttaaaaactggtttttttaatgtataccatgcgtatatgtatcacatgcctttgtttttctttattggtggaatactgtacaaagacaggcctttcattaccacggttgttaactctacaaaaaaacagtttttttatcttgtatacactttcattattcttgcaataataggaatgcttatagaaagtatttttggtataaaaaacgggaatgtgtacacaggtaatttactggattcaattgctttagcttttaaatcaaacctgtcaaacaataaactttttattgtcgcgtggtttttacttgcatattggctggtatcaatagcattctccgcagcatacaaaattttatcattggtgaaaaacacagcattaaaccgtgctcttatcattttagtgggattggctctagggtacgttgctgttaatgtgttcgctgacagctatcatctggacaaaaaaatagcgaaactgatactttcacaagtatgcttcggtcttatgttttactgtgcaggattctctcttaggaattacatttttgataaccttaatatttattcatttataattataactgcgctattgcttgtgctacgaaactatggtctagcaacaagtaccggaatgtcctgggcagcatacaaagacggcttttacgtttcaacgtttacagcgttcgctggcatatatgccgttatgttcatatcaaaattactcgcattacaaggcgagatgaaactattccgagaaataggaaaatcatcccgtgacatcatgtcttatcatatattaagttttgttattcttgatattattttcagttatacactatcttacaaaattcaaggcactgacgcatatagcaaccatttttatgataagtggacgtggccagtgtattcagcagtcggcgttttattaccaactgctgtcagttacacatacagagccgcaaagagctatgttctaaagtccttgacacggtaa

SEQ ID NO: 77108 - DNA, 132 bp, Citrobacter koseri
atgtttttcctctcctccgccgggggaggggcagactttgacgtttatcacccttactcatttatcacactgataaactacttgcttgctaaggaggtaggctatgttgggttgggtgattacctgtcatga

SEQ ID NO: 77109 - DNA, 1251 bp, Citrobacter koseri
atgaaaaccctgaaaaactggattgtagagaaacagtcggcccatcatctggaactgctggtcgatggtcaacaccatctgtgcctgtacgtactggaagaaaatctgtttcgcgtgctgatcaaacgtaaaggcgaactggcattagacagaacctggagtatcgccccggcgcaggatgtgccgtgggaaggccgcagccgtgaggatgtcagcggctttagctgcccggcctggcaactgacgcagcaggatggcgcgctgattgtcgctactgagcaactgcgcgtgaccgtccaccagccgctgtggctggagtggcactaccgcgacgaggcgggcgactggcagccgctggtcaacgaccgccccaccagcgcctatctgctgaacgctcacggcgacggcgtagcgcactatttaagccgccgtaaagatgaacgtttttacggtctgggcgagaaagcgggcgacctgcaacgcaacggccaacgctatgagatgcgcaaccttgacgcgatgggctataacgcggtcagcaccgatccgctgtacaaacatattccattcaccatcgcccgccgcgatgacgtcagctacggtctgttttacgacaacctgagcagctgctggctggatctgggcaatgaaatcgacaactatcacactgcctatcgccgctggcaggcggaagcgggcgatatcgattactacatctttaccggcaagcgtgtgctggatgtcaccaaagcctttgtgcgcctgacggggaaaaccctgttcgggccgaagtggagcctgggttacagcggctcgaccatgcattacaccgatgcgccggacgcgcaaaaccagctgatgaactttatccgtctgtgcaatgaacacgcgattccgtgcgattcgttccagctttcatctggctacacctccattaacggcaaacgctatgtctttaactggaactacgacaaggtgccgcagccgaaagtgatgacccaggcattccacgatgcggggttgaagctggcagccaacattaaaccgtgtctgttgcaggatcacccgcgctacaacgaagtcgcggaaagagggttatttattcgtgattcggaaaccgacgcgccggaacgttcaagtttctgggatgacgaaggttctaaccttgacttcaccaatccgcaaaccgtcgcctggtggcaggaaggcgtcaccacgcagttgctggagatggggatcgactccacctga

SEQ ID NO: 77110 - DNA, 816 bp, Citrobacter koseri
atgaccgttaaagttatcgtcactgatatggacggaacttttctcgacgacgccaaaaagtacgatcacgcacgatttatggcgcagtatcaggaactaaaaaaacgcggcatcgaatttgtcgtcgccagcggcaatcagtattaccaactcatttcctttttccccgagctgaaagacgaaatttccttcgtcgcggaaaatggcgcgctggtttatgagcatggcaagcagctgtttcatggcgaactgacccggcatgaatcccgtattgtgattggcgagctgttaaaagataagcagcttaattttgtcgcctgcggcctgaaaagcgcttatgtcagcgaacatgcgccggaatcttttgtggcgctgatgtcgaagcactaccaccgtctgcaacccgtgaaggattaccaggacattgacgatgttctgtttaagttttcactgaacctgccagaccagcagatccccttcgtggtcgatgcgctgcatacgtcgctggacggcattatgaaacccgtgaccagcggcttcggcttcatcgacttaatcataccgggattacacaaagcgaacggcatcagccgtctgttgaaacgctgggatctttcgccgcaaaatgtggtggcgattggcgacagcgacaacgatgcggaaatgctgaaaatggcgcggtacgctttcgcgatggcgaacgccgcagacaacatcaaagccctcagccgttatcataccgatgataacaaccatcagggggcgttaaacgtgattcaggccgtactggataacgccccgccttttaacgtctga

SEQ ID NO: 77111 - DNA, 801 bp, Citrobacter koseri
gtgcgttacgatgactatcgttccgccacgaccgactatctgcaaaatggcgataaaacctggatttcacaggatcgcgtcaccaaacgtttcggtgcgttatatgcgtttgaaaatgggatctctccatttatcagttattccgaaggctttaagccgatctcgccgcaagggacactgacctcgaaagaggtgaagccgaccaccagcaagcaggttgagggcggggtgaaatacctgctggcggaatacgcgaccacctttaccgcatcggtgtttaatatccgccagaaaaatgtgctttccgccacgccaacctgggattaccgccagaccggcgagattgagtcaaaaggggccgaactgtcgattgtcagccgtccggcggataacgtcacgctgatcgccaactatgcctatacccatgcgatcaacacggaagatgagacgtatgaaggcaaacgtccgactcaggtgccggaaaacgtgtttaacctgtggggcgattacacctttgataatacgccgctgcgcgggctgaacgttggcgcgggcgtccgttataccgggccgatggagatctcgccagctaacgataaaggcaaactcggcggcacgacgcagtatgatatggccgtctcttaccgtctgggagaggcgatcccatcgttgagcggggtgacgctgaaggccagcgcgcagaatattaccaacaaagagacgtttagctgttacgacgacaacaactgctggattggtcgcgaccgcaccgttcaggttggcgccagctacagcttctga

SEQ ID NO: 77112 - DNA, 126 bp, Citrobacter koseri
atgatctacttctcacacgcacaaacggacgcattgctgctggaggatattcagggaggcgacctgaccacgcgcgctctgggcatcggcaatctgccaggccgcatgaccttccgccatcgctag

SEQ ID NO: 77113 - DNA, 1035 bp, Citrobacter koseri
atgaagcaaaggatcaatatcgtaaaactggcacagcacctcgggttgtccgtctctacggtatccaaggcgctgaatggccgggaggatgtgagtaaagccacgaagcaacgcgtgcttgccgccgcgtctgaactgggcttctcgcccgatccggcggggcggcgtttgcgcagcggaacgtcggaaaccatcgggtttgtgctttcgtatcctcaggcccactttgcacaacctttttttctcgatctaatggccggaatcgaccaggaactggaaaaaacgccttatcagttggttattgtcaccggaagaagcattgaatcggagatagacagcttcagacgcctggttgaacaacagcgtgttgatgcggtgatgtttggcagaacgcgtaaagaggatgccagaatccagtttttgcaggatcgcagcgtgccatttgccactctcggacgaagtgaaacgggcaatcctttcccgttcgttgatattgaccgcactgttgccgggcgaaacggcaccgcgcgctttatcggcctggggcaccgccgcatcgggcttctcaatactccagactacctcatgctcagccaccacttgcgggcaggctacatggcggcgctggatgccgcaaatctgtcttttgatcctgctctgatcgttgacggggatctgtccgaaacaggcggattagcgggtgccagaaagctgctggcgatgaaaaatccgccaacggcgatcatgtgcggccacgatttgattgccagcggcgcgatgcaggccattgtggaaaccggaaagcgccccggtaccgatgtggcaattattggctgcgacaaccacccgctcggaccttacctgaatccgccgttaaccaccttttccgcgccaacccaggaagcgggccagcgaatggtccagttacttctggcgcacatgaacggtaaaccggtcgagacactacaggaggtgtggtcgcccgagctgatcctgcgctcctcacacggtagtgaatttttccagaaagcataa

SEQ ID NO: 77114 - DNA, 411 bp, Citrobacter koseri
atgacgttggtggaaggaggatgcctgtgtggtgccgtccgctacagaatgaaaacaccgccccgctcggtggtggtttgtcattgtacccattgtcagaaagcgagcggaagtgcattctcggttaaccttctggtggaaaaaagtgattatgaacagcagggagtaacggcatgctttaccgatacaggcgacagcggactgccgtcacaccgccacttctgccgggaatgcggctcgccagtggtaaccgaagcgacaaatatgcccggcatgttactggttaaggccggcacgctcgataaccctggagagttttccccgcaggccgaaatttatacccggtatgctgttaaatggtatgcgccgatcgcgggttgtgtacggttcgttcagacccctgttgcctga

SEQ ID NO: 77115 - DNA, 1377 bp, Citrobacter koseri
atgagctttcaaagtattaacccggcaacaggtgaattactcaaaactttcccgttgcagaccgatgctgaggtcttttccgctctggaaaaagccgacatgctttatcgcgacgactggcgtttacggtctgtggctgagcgtgctgcgattgtcggcaaggcggcaaaaatcctgcgtgagaaacgcgatgagtatgtgacctacccgacgcttgaaatggggaaagtgacgcgctttggctatatggaaattgatttagtcgcggatattctcgactactatgccaccaacggtgagcgtctgctcgcggcacaggctattccaggcgagccaggcgcgacgttactctccgaacctatcggggttatcctggcgatcgaaccctggaacttcccttattaccagctggtgcgcgtggcggcgccgcagctcatcgccggtaatgtcgttatgctcaaacacgcggaaaacgtcccgcagtgtgcactggcgttcgcacggttgtttgaggaggcgggcgcgccggaaggggcgtacaccaacctgttttgcagtatcgatcagattgccagcctgattgacgacttccgggtgcgcggggtcgcgctgacgggcagcgagcgggcgggaacgtccgttggcgaacgtgccgggagaaatctgaagaaggtcattcttgagctgggcggtagcgatccggcgattattatgcctggcgcgccgctggatcatgctgtcgagcaggttgtgatggggcgtacctggaactcggggcagggttgcgtcaatattaagcgcgtcattgtgattggccgtgagcgtggcgaacgcatgctggaggcgctcaaagagaagtttgcggcaatcaacgttggcgatcctgaggatgcgtcgacgctgctcggcccgctggtaagcgaacgtgcgttgcaggggctgctgaaacagattgaagaggcgaaagcggcaggggcaaacattgtttttggtggcaacagagtcgaccgtccgggtttctatcttgaaccgaccattattacggatattactgaggctaacccactctatactcaggaagcctttggaccggtactctctttttatgttgtcgacagcgaagaagaggcgattcgtctggcaaacgcgacgccttacggcctgggcggttacgtctttgatgctgatacgaaaaacgcgcagcgcattgcgtcgcatattgactccgggatggtttatatcaactcctgttttgctgactctccgggcctgccgtttggcggtgtgaaaaactccggcttcgggcgcgagttatcggaaatcgggatgggggaattcctgaaccgaaaattaatccgggtaacggaaatcgaataa

SEQ ID NO: 77116 - DNA, 1014 bp, Citrobacter koseri
atgacaaatttagtgaaaattatccggttccacgaaaaaggaagcgcagatgttttacgtatcgatgagctcactctaccggaaccaggtccgggtgaagttcgcctgcgggtaaaagccattgggctgaaccgcgccgaggtgatgttccgcgaagggcaatatttcctggaacctactctaccatcaaacattggttatgaagcctccgggattgtcgaggcggttggctcgggcgtggataccgggcttatcgggaaaatccgctccacagttcccgctttcccacttaatcaatacggcgtgtatggcgaagtcgctatcgtgcccgccgaggcgctcgccgcgtatcctgagcgcttatcattcgaggaaggaacaagtatctggatgcagtacatcacaacctacggtgcgctggtgcataacggccatgtcaccaagggcgattacgtcgtgctgacagcagcaaccagctccattgggatcgcggcaattcagattgttaaagcagagggtgggattgtcatcgcgaccacgcgcggcgccgacaaacgggatgaactgcttgctgccggggcggatcacgttatcgtgactagcgaagaagacgttgcaacccgaattatggaaatcacccaaggcgctggcgcgcggatcatttttgatagcgtagctggttccggtctggccgaactggcgcgcgcgacggccaaagatggcctgatcatgatttacggtaaccttgcgccggaaccgacaccgttcccgatttatgaatcctggggtcagggagcgcagggtaaaccattcaaaatgatgggctataccatgttctcaattaccggcgacccggtcgcgctcaaaaacgcggaacgctacattttcgagaagctggagagcgggcagctgaagccgcgcatcgaccgcaccttcccgctttccgaaatcgccaatgcacaccgctatatggaaaaaggtcagcaaatcgggaaaattgttgtcgtgatttga

SEQ ID NO: 77117 - DNA, 1116 bp, Citrobacter koseri
atgagctggagtggacgtgcaatacgctcgacgattgataaaagcggtgaacttgtgctgtctctggagcaggtcgaactgaccgaaccgggcgacgatgaggtgatcgtcaggatcgaggcgaccccggttaaccccagcgacagcggcatgctgttaggcccggcggatctatctgatattcgggaattcgacagccgtgtcacgatgactgtcccatcagaacgtctggcggctatcgctggccgcctgggacaacccatgcctgttggaaacgaaggcgcgggtaccgtcgtggccgcagggaaaaatgcacaagcctttatcggtaaacgtgtcgggatgtccggtggtggtatgtacgccgattaccgcaggacagatatgcacaatctgattgtgctgcccgagggcgtggaagcagccgatggcgcctctatttttattaatccactcaccgcactcggttttgtggagacggcacttcgggaaggccataaagcgcttgttcataccgcagcggcatcgaatcttggtcagatgctacagcgcatctgtctggccgatggtattccgttaatcaatatcgtgcgcaccactgagcaggaaaaaatcctgcgcgaactgggtgcgacttatgtgctcaacagcaaagagcctgattttgctgcccggttgaccgatgcgattgaagagaccggcgcgaccgttgcttttgatgccatcggcggcggcaaactgggtattgaaattataaatgctatggagcgcgcggcagcccgcaaaaccgcagcctatagccgctacggttccactctctttaagcagctgtatatctatggcgggctggacagtgccccgacagtcctcgatcgtggcgggctcggctatgcctggagcatatcgggatggctgctgtttaactatctcaacacggtttccccggcggttcttcagcgactgcgccagcggatcgtcgatgaactgacgaccaccttcgccagccgctacacgcggaccatcggcctggccgatctgcttgatcctgatgtcttacgcgcgcttgaacgcaaagcgacgggcgaaaaactcctgattgatccgcgagtgggctga

SEQ ID NO: 77118 - DNA, 918 bp, Citrobacter koseri
atggggattccaggaaattattaccttaagggttatatagatgactccaggtcaggctacatcgagacgctctttcaggcaacattctctggcacagaagaagttgttgcatcctgcccccttttacccgaagaagtttttctcttgatcgaacggctttactggacctcgattgatggcgacacgatttataaaaacgatgacagcggtactaaattaattctaaaatatcctttttcacgattttgggatgttattacaaataactttgctatagcacaatattctgagcattacgggctttcttttcagctaaatttgagagagaaactcaatctcgataacctgcgattccctcatttcatccgcatcacactgccgggaaactcgattggtgacgaatttaacaaaataaaaacacgccctcatcatgctggtattgatcatttcgaatgccgctcagatataatttctcatgctacatatgtagaaggaatgttgtacaaaataataattaatagtggactgtcagtaaccgggtccattgatgaaatgacatttaatgagaaaatagtattttgcagaaagaacaagttactcaagatgaaacttattaatatagtctggcttttgaaaaatttaagaaatgaggcagcccatcaattttcctttgaaattgatgattcttcagaaagtcatctggaaataaaacccgtcagcgaaaaactgttagtcgggataaaagagtttgttaaaacctgcgagaagcgatatggtttgacagcagctaagatacatcgctttgataatagctttcgaatgcttgcgggagagctaaatgaagcagctaaccttacccaggtcattactctgggaaagcagttcccggtcgaactatctagttatttttacggataa

SEQ ID NO: 77119 - DNA, 330 bp, Citrobacter koseri
atgcaaaccttatcatcacacccgacgcaggcggctcagccctgcctgtcacccattgaaatctggcagtgcctgctaactcatctgttgtcgcagcactatggcctgacgctgaatgacacaccgttcagtaatgaaaccaccatacgagaacatattgatgctggagtttcgctcagcgatgcggtgaactttctggtagaaagatacgggcttgtccgtatcgaccggaagggattttcgtggcaagaacaaaccccgtatatttccgtagtggatattctgcgagcaaggcgctctaccggcttgctaaaaactaacgtgaaataa

SEQ ID NO: 77120 - DNA, 351 bp, Citrobacter koseri
atgaacaatcactcagaatccggtacaaagccagagaatcccgcctgccagcagtgggggctacagagtacgataaccccctgttttggcgctcgtctggtgcaagaaggcgaccgcctgcattttctcgctgaccgcgccgggtttaacggtgctttcagcgacgagcatgcgttgcgcctcgaccaggcctttccgttgatgctcaaacaactggagttgatgctgattagcagcgagctcaatccccgctatcagcactgcgtcacgctttaccacaacggactcacctgcgaagccgacacactcggctcctgtggctatgtctacattgctatctatcctgagtag

SEQ ID NO: 77121 - DNA, 222 bp, Citrobacter koseri
atgaaaatcatcagtaaacgccaggcaatgaccctataccggcaacatcctggctcccgactgtttcgcttcagtacgagcaaatataaatggtcaggtagtatctgccattatgctggccgcgaggtggaggacatacgcggcgttctggccgtgtttgctgaacgtcgtcaggaccgcaatggtccctatgtcattcttcgaagcgttactctcaattaa

SEQ ID NO: 77122 - DNA, 543 bp, Citrobacter koseri
atgagtaccgcgttatccccattgccatcacagcctgaactctttcagctgtcggttatggctcaacatggttgcctgcttcccgcgacatccggattgacaccctatgcccaacagaccattcgccgggctatcaatctgctggataaatatctgcgtcagcccggtatatcttttacctcaagtgctgctgcccgcgactggcttcggttacagctggcaggacaagaacgggaagtgtttatggtgctctatcttgataatcagcatcgtttactggagagcgaaacgctgtttgccggttcagttaaccatgtccaggtccatccccgcgaagtagtgaagtcagcgcttcgcttaaatgctgcagctgccgtgctggcgcataaccatccatccggtgatccggagcccagtcaatgtgaccgcaacattacgggcaggcttaaagaagcgttagcactggttgatgtgaacacgctcgatcatctggtcatcggctcagagggcattgtgtcgttcgcggagcgaggctggatatga

SEQ ID NO: 77123 - DNA, 444 bp, Citrobacter koseri
atgaatacacaaaatcatcagttcgcggagcttaccgcaattactgcctcagtggtcccggacgagttacgcatcggcttctggccgcagcactttggctccatcccacaatggatcacccttgaacctcgcattttcgcctggatggatcggctgtgtgccgattaccagggtggtatctggcgcttttcgacactcagcaacggcggtgctttcatggctcctgagtcagagcacgataagacgtgggcattgttcaacagcatgaacggcaatggagcagaactcaccagtgaagcagcaggaatagtcacctgtctgatgacatacagtcaccacgcctgtcgcaccgagtgtgatgcgatgactgagcactattatcgcttacgcgacttcgcgctgaaccatccagagtgcaactccattatgcatctcatcgactga

SEQ ID NO: 77124 - DNA, 822 bp, Citrobacter koseri
atgcgattagccagccgctttggccgtataaaccagatacgccgtgaccggcctctgacccacgaagagctgatgagtcatgtacccagcgtgttcgggagtgacaaacatgagtctcgttcagaccgttatacctacatcccaaccatcaccatccttgaaagcctgcagtgcgagggttttgagccgttctttgcctgccagacaaaggttcgcgaccagagcaagcgggagcacaccaaacacatgcttcgcctgcgtcgtgccggtcaactgaccgggcatcaggtaccggaaatcattctgcttaacagccacgacggttcatcaagctaccagatgctgccgggactgtttcgtggcgtctgtaccaacggcctggtctgcggtcagtcattcggagaagtgcgggtgccgcataaaggtaatgtcgttgagagggtgattgaaggggcttacgaagtactcggggtctttgaccgggtggatgagaaacgcgatgcaatgcagtcgctggcgctgccagccccggctcgtcacgcgctggcaaatgccgcactgaagtatcgatttggtgaggaccaccagccggtcacggtatcacagttgctgaccccacgtcgccgggaggactacagcgatgacctgtggaccgtataccagcgcgtgcaggagaacctgatgaaaggaggtctgtcagggcgaaccgctcaggggaaaagcagccgtacccgtgccgttaccggcatcgatggtgatgtgaagctcaatcgcgccctgtgggtgatggcagaaaacatgctcgattttttcgggcgttaa

SEQ ID NO: 77125 - DNA, 231 bp, Citrobacter koseri
atgcctgaactcactgaactacctgagggaccgttttcgcgccagcaggcagaggcggttgcggctcaatattccaacattgctatagaggacgaccagggtacgcatttccgtctggttatccgtcatgagcgttgcatggtctggcgagcctggaactttgagccggatgccggttactggctgaaccggtatatcactcgttatggcatccgcaaatttcctgcataa

SEQ ID NO: 77126 - DNA, 450 bp, Citrobacter koseri
atgaagaagctgaaaggcgttatctcagttttcgttctgagcctttgtctgctttcaccggctcaggccgaagaacagcgttacatcagtatccgcaacacagacatggtctgggtgccgggcaatgtctgcgtgtggcagtttcgtctggataacggaggaagtggtgagggggtcgggcctctgacgctctccctgcgtctgaaagacaaaggcggaaacacgctggttatggggaatatggcggtggctgcatttggtgagagcgatgcgactcgctctcaggaagcctcgctggagaacgaatgcgtggaaaacgtcagctctgtcgaaatcatgaaggcaacggaagagcgtaatggttaccagattgacctgccactgtctgttttcgacccgcagtattaccaaccgctgcaagtcacggttgtcggaggtaaagcgtcttag

SEQ ID NO: 77127 - DNA, 453 bp, Citrobacter koseri
atgaagaaattgtatccacctgtgcttaccgttctgacagttatcggtgcaatgagtgcctctggctgcgacagcaaggaagatgctggcgtgaaagcgatagcccggtttaaggacctgactccaccaccattcagcaaggttgtctcgcataaatccgatattgcccaggaatgggtaaaaaaggatgccttcggtacaccgcaatatacggtgatgaaaacccgccagtcgccggaaggctgtgagtcaggcaattattactacattgcggatatgcagcagaaaacggtgcagcctctgattgctgccctgtgtcttgcggacaatatcaccctgagcttccggattgaaaccgacagctacacgggtgaaaaatcggtggtgtattcgcacgatggcaaggaaatggggaaactctatctgccggagaatcaggagaaaaatccatga

SEQ ID NO: 77128 - DNA, 570 bp, Citrobacter koseri
atgaagaaattactgaccacaacaacactggtcgtcagtctctgcgctggcgctacctttccggcgtctgccgaaactgtcgtgggtaccgtcaaattctggcagtacatgcaggcggatggctggaaatcggccgatggcatggataacgacacgctaaacaatacgctctatcaggccagtgtgattggcaattatccctggaccagacaattcctgctgcgtcagcgtggtggcggtgcttattttctcgccgacaagaaaacacataccgtgcgcaagctgaatctgaaacctgccagcggttattactccgacctgacatcggtctatcagggcgaagaccaggggaaagggtgttacttcactatcatcgacacccagtatcagttggagctggctgacgaacctcacagcaaccaggtacttgctgcattcccggaaaactgtgtcaacaaacagcagcaggctgccctagcggcgaagcgttctgcctcagagcagaaactgcagcagtgggtagcccaacagagtctggctgagttgtgccgacgaactggcaactgctga

SEQ ID NO: 77129 - DNA, 705 bp, Citrobacter koseri
atgtcccagactgagcgtcgccatgagcggctggcggttcggctatccctcattatcagccgccttgttgctggcgaaacactggatatgggccttcttgccgcagagtttggtgtatcgatccgtaccctccgccgggattttcgtgagcgactgatgtacctggacctggaatatcgcgacggcacctgtcgtctgctctcaggtagccatcagcgcgaactggcggtgctgacttttgctcgtcagtcaggtgtggaggccttgtttcctgacatggatagccacatggtcagctcactgctgagtgggcccggtgagtctccgtgcctcatatgggcagaatcggagtcattgtcgccgcccaggccaggcatatttacacgccttgtcagggctatatcagagcatcgtcgcgtgacgctgctggctgaaggttgtcgttgctcagggcttgcaccataccgcctcgtactctgcggcgggcactggtatctgactggagagcatcatcatcgcgtggcagtgtttccgctgaacgatatccatgcggttaccttgcacccggaactgttcgtgcccgaccttcagattcgtaacgttctcgccgaaccggaattactcagagcccttccccattttcacgtttttcactcactgctcgccagaaccggcgacggtcttttacctcataaggaatcatga

SEQ ID NO: 77130 - DNA, 876 bp, Citrobacter koseri
atgaataaatctaaaggccttcaggctattgaggagccgctggcttctctccctcacactatccgcaaccatattcttgaacgtcttcgtagcctgacgcagtacgaacctgtgataggtattatgggcaaaacagggactggtaagtcgtcgctctgtaatgctctcttccagggagaggtaacacctgtcagtaatgttgactcctgcacccgtgatgtgctgcgcttccggcttcgcaatggcaatcacagtctaatgattgttgatttaccgggagtgggtgaaagcgagcaacgcgacgaggaatacaccgccttgtatcgccgcatcctgccagaactggatatggtgctgtgggctatcaaagccgatgatcgcgccatgtcggtggatgagcatttctatcggagggttatgttggcgtaccagcatcgggttttatttgtggtgaatcaggccgacaaaatcgaaccctgccacgagtggaaaactgccgataaccagccctctgcggcgcagctgttgacgattaaggcgaaacagcatgcgatgcagcaattgtttctgccgcagcatccagtctgcatggtgtcggcccgtaccggatggggactgaatacgatggtggaaaccatgatgcgctgcctgcctgaccgcgccaccagcccattgacgacacaactgcatggaaggctctgcaccgagccggtaaaaaagcaggcacgtgagcgctttggtaatgccgtagatgaaatgattggcactgtggggtcatcatcttttctgccagagcctgtaagggctatgattcgaaccgtacgggaagcggtggtgactgttgcccgtgccgtctgggactggattttcttatga

SEQ ID NO: 77131 - DNA, 1404 bp, Citrobacter koseri
atggcttcaatctcatcactgggcgtcggttcaaacttgccgttggatactttgctgacgaatctgaccaccgccgaaaaaggacgtttaacgccaatcaccaagcaacagagcgccaatacagctaagttgacggcctacggcaccctgaaaagcgcgttggaaaaattccagacagcaaataccgcattaaataaagcagacttatttaaaacaacaaccgcttccagtacctccgaagatcttaaagtcagcactacagcaggtgctgcgccaggtacatataaaataaatgtaacccaacttgccgcagcacaatcgctggcaaccgatgcgactttcgccacgacaaaagaacagttaggtgatacctcagtctcttcacgcaccatcaagattgagcaaccaggacgtaaagagccgctggaaattaagctcgacaaaggcgatacctcaatggaggccgttcgagatgcaatcaacgatgcagacagcggtatttctgcaagtatcgtcaaggtatctgaggacaaatatcagttagtcctcaccgcagacagcggtacagacaacacaatgaagatttctgtcgaaggggataccaagctcaacgaactgctagcctacgatagcactaccggcactggaaatatgaaagagctggttaaagcacaaaacgcagaacttaatgttaatggtatcgacattgttcgtcagagcaacaccgtcaccgatgcgccacaaggcctgacattgaacctgacgaaaaccgttaatgacgtgacagtcacagtgacaaaagacgattccaaagcaacagaggcgataaaaacctgggtagatgcttataactcactggtcgacacattcagcactttaacgaaatacacagaagtagaacctggtgaagaagcaagcgacaaaaatggcgcactattgggcgacagcgttttacggacgattcaaacaggtattcgttcgccatttgcaaacagcggtagtgattcgtctttcaaaacgatagcagaaattggtatcacccaagatggtactaccggaaaactcaaaattgatgaagaaaaactcgcaaaagcactaaaagagaatacagcatcaacccgtgaattattggttggcgacggtaaagaaactggaattacgacgaagatcgccaccgaagtaaaaagttacctggctgatgacggcattattgataatgcccaggacaacatcaacgccactcttaagaacctgaccaaacaatatttatcagtcagtaatagtattgatgaaaccgtcgcccgttataaagcccagtttacccaactggataccatgatgagcaagctcaatagcaccagttcttatctgagccagcaatttgctgcaatgagcaattcctga

SEQ ID NO: 77132 - DNA, 1491 bp, Citrobacter koseri
atggcacaagtcatcaatacaaacagcctgtcgctgttgacccagaataacctgaataaatctcagtcctccctgagttccgctattgagcgtctgtcttccggtctgcgtatcaacagcgcgaaagatgatgctgcaggccaggcgattgcaaaccgttttacttctaacattaaaggcctgactcaggcttcccgtaacgctaacgacggtatctctatcgcacagaccaccgaaggtgcgctgaacgaaatcaacaacaacctgcagcgtgttcgtgagctggcagtgcagtccgccaacggcactaactcccagtcagacctggactccatccaggccgaaattacccaacgtctgaatgaaattgaccgtgtatctggtcaaactcagttcaacggcgtgaaagtgctggcaaaagaaggcactctgactattcaggttggtgctgacgatggcgaaaccattgatattaacctgaaagaaattaattccaaaacgctgggccttgatagcctgagcgtacaggatgcctacaagcaagtagatactgcagttaacgcaacgggttatcacgatggtacacaggctattactgcaccgactgctggtgaactagaagctgcagcggggactgctgcgggtgatggtggtgctggaactattcagttcaaagatggcaactattacgtcaatattacaggttctaccggtggtacgaatggtgatggtctgtataaagcaaccgtagatgctggtacgggtgccattactatcggcgctaaagaaactaccgtgactctggccgaaacaactgccgtagctaatgtgcaagaagccaacaccatcgataccactgatgcggcagccgatctggtggctgcgggcgtgactggtgcgactgccgctaacacctccctggtgaaaatgtcctttgaagacaaaaacggcaaatctattgacggcggttatgcgttgaaagtagatggtaagttctatgcggcggattatgacgagaaaacaggcaaaatcaccgctaaaaccgttgattacactgatgatgccggtgcctctgcgaaagcggctgtccagtttggcggagtgaacggtaaaacagaagtggttactgttgacgacaaacagtaccttgcagcgaatgttaaaggtcataacttccagtcaggtactgaactgaacgaagtggctgcaaccaaaactgaaagtccgctggcgaaaattgatgccgccctggcgcaagtcgctgatttacgttccgatctgggtgcggtacaaaaccgtttcaattctgctatcaccaacctgggcaacaccgtaaataacctgtctgaagctcgtagccgtattgaagatgctgactacgcgactgaagtatccaacatgtctcgtgcaaacattttgcaacaggcgggtacctctgttctggcgcaggccaaccaggttcctcagaacgtgctgtccctgctgcgttaa

SEQ ID NO: 77133 - DNA, 1098 bp, Citrobacter koseri
atgcggattcacaccattgactacatgaggggactgatggctctctcaattttattttatcatcttactgcgtggacaataggaacaccgccatctgagactcttctcggcaaattaggtgtttatggtgtgtctgtattttttgtgattagtgggatgtcgatgtatatttcttacaaatcaactaaatggacaacaacatcaatactgtcattctttgtacgtcgttttggtcgattggctccagtgtactggatagccctcgctctgacgttttgttatgctgcatatgaaaaccgacctctcaaatttaccaatactgaaatttggcataacatatttttaacttttggtattgctgatttttctaaatatattgttacaggtggttggtctattggtaatgaggtcgtattttacttgttctttcctgcattaattgttattgcgccatttaaaaagttctttctattagctaatgcagtgataatgtatgtgtatatttattattgcttcgttgtcatctctccatatcatacacttggcgctcagtgggtagcttatattcatccgtttaatcaggcatttctcttttcgtctggcatagttttggcctggcttacgtacacattcggtttcagtaagaatcaaaaactgatgtgggctttactgcttatctcctgcattgccttcattctgtaccctgttcgcggagatcaaataacaattatcagcgaatggaatcgactctgtatcactggactcattcttgctacatgttatgcattgctgaatttgcgggtcaacacacaaaacagcatcacaaaattactcagtttccttggggatgtttcatatcctgtttaccttcttcatgggatattttttatcatagtaaacaaatatatctggactttgttaaatatttcatctaaagaaattgggttcgccttttttgtatttgtctttactcctgttttgcttgcattatcatggctcgtgtttgtgtacattgagaaaccagcaattaacatagtaaaacgcctcacgtttattgaaaggaaacagtcagtaacatttccgtcagacatccagtag

SEQ ID NO: 77134 - DNA, 351 bp, Citrobacter koseri
atgacagggaaggtgacgggaacacgccagcattcacctttccagtttaccaaagagcttgatagcacatcgccgtatctgtttaaggcggcagcgaccggtcagacgctcaaatcagccgaattcaagttttatcacattaaccacgccggacaagaggcggagtattaccggattactctggaaaatgtgaaagttatttcggtcagtccagttatgcatgatacgcgaggctgtccgggaaccggccatatggaagaagtggccctgaactatgaaaaaattacccatctgtataaagatggtaatttactggctcatgatgcctggaatgaacgccctaccgcgtag

SEQ ID NO: 77135 - DNA, 339 bp, Citrobacter koseri
atggtaatcggcgaagacgacattgaacagcgtgtactacacatgttttctgttcgttcaggtgcttacatgttcaggaaaaagaaatacgacacgtacacggcagagtcaaacattcattttgatgtgcagcttgatcaggatgatgttgaagagttagttgaagattttgcaaaagaatttggcgtagacatgtctgatttccatcttgaaacctactaccctgaagttaaattttcatggaacccattcaagaagcctaatcctatagatgttcctgatttcacgatagacatgtttattaaatcggctaaagccgggaaatggttgtacgaataa

SEQ ID NO: 77136 - DNA, 459 bp, Citrobacter koseri
gtggatacggttgaggaattaaacggaacatacttctacgctggaaagtcgaatcttaccgcctctgaactattttttatggtgtttattttcaacactgctgaccagttcggcattaaagacattgccgcaatttatgcactgtacgcaggtatgaatgaccaagatactcggactaagccagaaacggcactgaaaggaacttccagactttcaaaaggcgtgaggaaagtattcggaaatagaatgttcccgttcgggttgaaaatgccgacatggatcggtggttatactccgtggactgtaaaacgcagaatggtgcggaaggttggtacatgggtaggccgtactattccattggttggcgaggttgttcttttggctgatgtttcacagattacctacaattcgatccgcgaatacaacaccatagcgagaggcaatgataagttatggtaa

SEQ ID NO: 77137 - DNA, 252 bp, Citrobacter koseri
gtggctgtcgccgcagctgatgaactgggctatgaggtggcgcttctggaggatgaaggtatttatcttgatacgcaggatgctgaattttattttcagcgttatgacctgaaagagaatgcggcgctgctgctgttgaccctgaggcgcgaactgttttacacctccacggattaccctgatgaaatggcggactggaatccggaggggattaaggctctttcactctggcgcgaaaaggtgcacaggtga

SEQ ID NO: 77138 - DNA, 651 bp, Citrobacter koseri
atgtgtgcattcgtgagcaaaaaaacaggggaaaaaacgaatcatccagttgtcaattacgtaaataatgtgaataaaagaatagctgatgaagccgtgaagttctcccaaagcgcagatttttacataatggaaacagcatcaggttcgcggggatttgttacaacaaatgaaaagagaactgttcttgaagagttaaataaaggctttaggttttatcttcgagatgaaatatcaaaaccagaagtaattgatttgataaatgaattttctggtgttgagcatggatcatttggcgatatttttaaattagaagaaagcaatgatttagttctttcggcttgcattatgcatttcatggggcttgattccgttgctgataatctgttaaaagttgctttctacaatgaaaacatgaaattaggacagttacactttgtttatcattctggcaaggttgttgagcgactgaagcagcgaaaaaattcatcacaaccacggaatcccaattatgcaaaagccatcagaatacttaaagacacttgggagaagtatccggcggcaagtaaaaacgaaatgctctcgaaactacatcaatacttcaacggctcggtgagtaaagactcaatcaaacgttggataaaaaaataa

SEQ ID NO: 77139 - DNA, 1392 bp, Citrobacter koseri
atgctgaacttcttaaaccaggtgcgtaagccgaccctggatctgccgctcgatgtacggcgcaaaatgtggttcaaaccgttcatgcagtcctatctggtggtctttatcggctacctgaccatgtacctgatccgcaaaaacttcaacatcgcccagaacgacatgatctccacctacgggctgagcatgacgcaactggggatgattggtctgggcttctcgatcacctatggcgtaggcaaaacgctggtttcctactatgccgacggcaaaaacaccaagcagttcctgccgtttatgctgattctttccgctatctgtatgctgggcttcagcgccagcatggggagcggttccgttagcctgttcctgatgatcgccttctacgcgctgagcggtttcttccagagtaccggcgggtcgtgcagttactccaccatcaccaaatggacgccccgtcgtaagcgcggcaccttcctcggcttctggaatatctcccacaacctcggcggcgctggcgcggcaggcgtggcgctgttcggcgcgaactacctgttcgacggccatgtgatcggcatgtttatcttcccgtcgatcatcgcgctgattgtgggcttcatcggcctgcgctttggcagtgactccccggaatcttatggtcttggtaaggcggaagagctgttcggcgaagagatcagcgaagaggacaaagagaccgaagaaaatgagatgaccaagtggcagatctttgtggaatacgtcctgaaaaacaaagtgatctggctgctgtgcttctccaacatcttcctgtacgtggtgcgtattggtatcgaccagtggtctaccgtttacgcattccaggaactgaaactctcaaaagaagtggcgattcagggctttaccctgtttgaagtgggcgcgctggtcggaacgctgctgtggggctggctgtcggatctggcgaacggtcgtcgcgcgctggtggcctgcgttgcgctggcgctgattatcgccaccctcggcgtttaccagcatgccagcaaccagtacgtctatctggcgtccctgttcgcgctcggcttcctggtgtttggcccgcagttgctgatcggcgtggcggcagtcggcttcgttccgaaaaaagcgatcggcgcggcggacggcattaaaggcaccttcgcttacctgatcggcgacagcttcgccaagctggggctggggatgattgccgacggtacgccagtctttggtctgaccggctgggcgggcaccttcgccgcgctggatgccgctgccattagctgcatctgcctgatggcgatggtcgcggtgctggaagaacgcaaaattcgccgcgagaaaaaaatacagcaactgaaagtcgcttaa

SEQ ID NO: 77140 - DNA, 966 bp, Citrobacter koseri
atgatttcttatttttatttactctctttttctgttttgagtttggtgctatccgcgctaatctatcgctataaagccagacgtaatacttactgtttatgccttatttttgttacggctgtagctgctgtcatcctggatgcgttctggctcgtatgtcagcgatttacgggagatggcgttaaccagtccgtactgttcacattaacgaatacacttgtaggtgccgatattactgactttatcctgccgatagcattgtcggttgtgggaagcggttttgtttttttcttactctatctggtgtttcattacagactgcctgcacgggagcggcatagcctctactcgttgctggcctgttttcttgctgcaatgtcacttattacttcgccaactatctcacaagttaatggtagtaccttgttggcggagcgtgtagatggctctgatttcgataagtattttgtaaaacaagaatcaataatatctgacccaaaatataatctggtatacatatatggtgagagtctggaacgtacttattttgatgaaagcatttttccaggacttctcccagatttaaatgaaattcggaaggggagtctggatttttcaaatacgttacaaatgcctgcaacggattttacaattgccggaattgttgcttcgcaatgtggtatcccgttatttaaaccgacggcatttagcgataccaatgttgccagtagcttctatccaacaaatatttgtttgggggatattttaaaaaaatcaggttatgagacctggttctatcagggagctaacctgcgttttgccgataaggatgcatttttccatatgcatggaatcagcaatatctggggtctgagtgaatccggcctgcaagatgatttttcagttcaaaataactggggtctttatgacaatatcgtgggtaatggtgccaacttactgatttag

SEQ ID NO: 77141 - DNA, 990 bp, Citrobacter koseri
atgggtcgcaaacgcgcccccggtaacgagtggatgccaaagggcgtattttttcgcccttctggttactactggaagcccggtggaacaacagaaaaactagctcctgctgacgcaactaaagcagaagtctgggtagcatttgaaaaggtgattgaaggaaggaaaaatatcctgacattctcccagttatggaaaaaattcctcaacagcgccgattatgcagatctggcccccagaacgcagaaagattacctggcacacgaaaaatatttactggccgtatttggcgaggcagaagctaaagctattaaaccagagcatgtccggcgttatatggatgccagaggaaaaaagagccgagttcaggccaatcatgagcatagttcaatgtcacgcgtttatcgttggggatatcaacgaggttttgttcccggaaatccatgcgtcggtgtagacaaattccccaaaccacagcgtgatcgttatatcactgatgaagaatatgtggcgatctacgagcacgccagcgagccagttaaggcagcgatggagattgcttatctgtgtgctgccagggtctccgatgttctgaaaatggactggaatcagataatggagaagggaatttttatacaacagggcaaaactggtgttaagcagatcaaagcatggacagatcgtctccgtgctgccgtagatatatgccgcaactggggagaggatggcgccgttattaaaacaatgtacggagagagatattcgtataaaggttttaacgaggcctggaggaaagcaagaacagcggcagcggacaaacttgaaagaccgttagactgcactttccacgatctgaaagcgaaaggaatttctgactatgaaggaacaggacgagacaaacaaaaattcagtgggcataaaactgaatctcaggtacttgtgtatgatcgtaaggtaaaaattagcccaacattaaacagaaaaatgtga

SEQ ID NO: 77142 - DNA, 225 bp, Citrobacter koseri
atgagcgatcgcttcctgactgatgaagaattggcagaagctactggatcaccccagaagtctctgcaaaaagaagtgttaacgctgaatggcatttactttattgagcgccgggacggttcagtaaaaacgacctggtatcacattaatcatcccattcagcgattaactccaccagcaggatcccagcccactccgggtatgaactttaacgcaatagagtga

SEQ ID NO: 77143 - DNA, 312 bp, Citrobacter koseri
gtgaaaactatccagttatcagagcgtgagctttccatgattttcagcatgctgacgccaccatatcccgtccgcgatacacacacagacgagttcaacgaattgcgtaataaagtcttttacgctctgcgtgatgctcagaacgatgaacctgtaagccagccttacaagttgccgcatcacgtttaccgcgaactggtgaaccagttgcatagcacggccatgaagtatagcggttgccagcaattacgcgaacagattagtagaacactggatactgtattagacccggcacatagccacattaagtaa

SEQ ID NO: 77144 - DNA, 462 bp, Citrobacter koseri
atgactaataaccagttaacaggtctcggtgctaaccatccggccaacggcccgcttacaaccgagcggctgagccacgttcgcgacgtgttacagcgcaaatttaaatactcgaacggcggaaatatggattacatcatcgctgatgctgtgaaagcgattgatgaattgctggcgtcgcggggcactgagccggtagtcgatatcgacaggttgcaggagggcgcatataaagctggtctcgcggcggggtggaatttcggtattgagcacaatagcgctggttttgataagtgcatggcagcgcatgagtatagcgtctgccgcgccgccatgctcccccatttatgtgatgtcatcgaaatggaagccatcaagcaacagtcaaccatgaagcccagcaatggtgcgatgtcaggtgatgcagtcaagcaatcgtcaagcaatgctcaacggaggtaa

SEQ ID NO: 77145 - DNA, 186 bp, Citrobacter koseri
atgagcaaacaaccagcaatcgccgttggaatgcgctgcattcacacgagcaaatgggaaaagcgtaagtgtcgcgttgttgcgtacgacggcaccactgtggtcgtaaaaatgtccagaggtggttacgttggcgttcctgaaaaatcgctaacgccggaactgctggcaaagggagactgttaa

SEQ ID NO: 77146 - DNA, 603 bp, Citrobacter koseri
atgagcaacatcaacaaacagggccgccaagtgcagcgctatgcaaactatggcgtagatatgatggagtgggctgacggtggttacgtcaaacactctgattatctggcgctgctggatgagctggaagccgcagaaaagcggattgctgagtcatccaaagccgcaagcgttagcagtcaatggaaaccagatgtttgtccgattaccgggcgtaagttcttcatgtggattgaccatccgatgcttggatacgttccaacttacggtggcccgttcgatagctacaccattcctaccagggatagtgatggcgagttttcatgcgagcgatacgaccacgatttggggaactggcgggaaggtgaatgcgttggcctttacctgattgatgacgatgaacagtgtcgcgtttacgagcttgaacagcgcatagcagaactggaggcgcggacggtgacgcttccggcacaaaaattttgcccgggtgaatgcatgggtagcgtgctatggagtgaaacagaagtctggaaccaggctatttatgagtgtgcaaaagcgatccgcgccgctggcatccagtctatcaaaggagaaggataa

SEQ ID NO: 77147 - DNA, 963 bp, Citrobacter koseri
atgacccctaacgaaaagcaaaagctccttcagcggcagtctctttctctcgaagacaaaatagtgatgacaaaacgtcgaatccgtgatttctacgaccattttgacggggaggtttattgctctttcagcggaggaaaagacagcacggtattgcgacacatagtactaagtatgggcctgaaaatgccttttgtttttagcaataccgggcttgaaatgcctgaaattgtcgatttcgtaagaaagcaggccagcgaagacgaaaatgttattcaggtgcgtcctaaagttccatttaatcaagtgtggcaggaatatggtttgccgatcggtagcaaaaaggtcgccaaaatgattcgtgtccttcaggagggagacaccgggcgcaacagcaatatgtacaagctgtataacacaggtattaactcgaaggggcagttcgcaagatcatggaaaataccggagaagtggcgcgtatttgtcaacgaagaagcaccacgtatcaccgatttatgctgcgattttctcaaaaaagagccgctggacacttatgcgaaggaaaccggtcgacacggaatcagcgcaatcatggctgacgaaggaggggctcgtgaaatgcgcactcaatgcaacgtatacgatggaaagcggccaaactgcgcccccatgcttttctggcttgaaagtgatgtctgggaatacataaacacccgaggagtagaaatttgcgaagtgtatttcgacagagaagtaaacgggcgacacgtaccggcagagaaaagaaccggctgcatgttctgcggctttggcgttcacatggaaaaagggatgaatcgcttccagcgtatggccattacgcatcctcgccagcactcgatcgttattgaccgaatgggaatgggtaaagctcttgaccttataaacgttaaatacattccggatgatgaggccgccaaatga

SEQ ID NO: 77148 - DNA, 570 bp, Citrobacter koseri
gtgcaaccaaaattcagcgcggtgcagcgcgcttataacacggagaaactgaccatgacgactacacataacgtcactgagttacaaccaagaatgaccagagagcagttgattgatgtggcacgtaatgccgctaaatatctgccggttgcatcagctcagattatgaatgagcttgctaaccgtctcgactgcaccagcgtcgcgctttgtgaagcgatggaacagcgtaaatcactggcaattgaaaataccgttctccgtgaagacgtaacaagctgggctaaagaatgcgatcgcatcgtcgagcgctacacaaaaacacgtagcaacatgcacctactggaagcgcagagagaactgcgcgacctgaccaccccaaccacatccgctttcctggctgaagtgcgggccagtgctatcgataactttgtggatatcaaaacaaagcagcttgctgacatgcatcctgacacacacgcattcggcgcaacttccatgtctatccgtagccagattaacgaattgcaggcattcgccgccaatcttcgcaaaggagtgcagtcatga

SEQ ID NO: 77149 - DNA, 885 bp, Citrobacter koseri
atgaaaaacgcagatgcacctaatttacctacattaattgccgccattctctccaccaaaggtggcgtggcgaaaaccaccgatacggcgaacctcggcggctacctggccgatcaagggctgaaagtcctgatgattgacgccgatatccgacagccgacgctcagcagctattaccctcttgataacgaagcccccggtgggatctacgagcttatcgcgcaaaacgagctggatccagccatcatcatctcgcacacttccattcccggactggatatcatcatctccaacgatccgcgcggcgaactgatgagcctgcttcaggcggcacccgacggtgtgatccgcctgcgccatctggtacgccagataaccggttatgacatcatcctgatcgacaccattggcgcacgcaccatcgcgctggaaatggtgctgttagccagcgatctcattatctccccggtactgccggaaatgctctctgcacgcgagttcctgcgcggtacgctgcaaatgtaccgggatctccagcccttcacccgctacggcattccgctgccgccgctgaaagcggtgatcaacaagctcgaccacaccaacgacgcccgcgaaattcatcacaacctgcttcaggttctccagcacaaacaaaaggagcaggagctgctggtgcccaccgagatcctgatgacgccagtttacgccagcgtggcctatcgccgggcggcatcgctgggtatgccggtgcatcggctggatgctgccagaccgaaaggccgcacaacaccttgcgccgccgaaaccatgcagatgctggcaaaagaactgttcccgcagtttctcgccctgccccatcaacagatggagggcatcgcatga

SEQ ID NO: 77150 - DNA, 375 bp, Citrobacter koseri
atgaaacggaaaatctggcgagcattttgctcttattacgcccagcatcccttcgagaaagacgatgaagtgatcgtgttctttgaagctgccgatcgtgaagaagcgcgggaaacgctgccggtattaatgtcgctgctctggcatatcccgccggaaaaagtggactgctacaacctggaggatgagaatgagctacgggatacgtccggttcactgacgtcccccagagactggccgttatttgaaatcggctggtccaacaataagccgctctactccagcgatttaccgttattactgctgccgccgcatcaacagacccgactatgggaagcctttctggcctgtcaggagggtaatcgagatgagtaa

SEQ ID NO: 77151 - DNA, 1356 bp, Citrobacter koseri
atgagtaagcgcaagcggccacaaccgccccactccgtcgaagcggaacaatcggtgctcggcgggctgatgctggataacgatcgctgggatgacgttgccacacagatttccgcgcaggatttctttatctccgcgcaccggacgatttattcccatatgcaaaccctggtcgaacagggaaatcccatcgacctgatcacgctgagcgaatcgctggaacagcaggagcagctcgaacaggtgggcggcttcgcctacctggcagagctttccaaaaacacgcccagtgccgccaatatcattccctacgcgcaatacattgccagctacggcgagctgcgccagcttctgttactgggcaatgaactgagcgatatggcaggccagccgcgcagcaatgtggccgatgtactgaactttgccgaacaaaagctgtttgccattgcgcagtcgtatcaggagggcggcctgaccgacatcaacgcctgctttgacaacgtgctggcaggcatcgctcagcgctacgaggctgaacgtggcagcctcagcggcacaccttccgggctggaacagctcgataccctgacctgtggtttccagcctgccgacctgattatcgccgctgctcgtccctcagttggcaaaaccgctttcgccctgacgctatgcgtgaacgcgctaatgctgcgccctgctcagccagtgcaaatctacagcatggaaatgtcggcggaacagctactgctccggctggtttctctgattggccgcgtctcacaaacccggctacgcagtggcaatctcagtgataacgactggcagcagattggcatcagcgccaacgttctgatgacagaatggaaagatcgcctgctgctcgacgattccgggatcctcaccccatccctgttacgcagccgggccaggcgatcgcttcgccagcatggaattccctcgctgatcgtagttgattacctgcaactgatgcgttgcggtggtgcggaaaatcgcaatcaggagatctcgacgatctcccactcgctgaaagcactggcgaaggaactacactgccccgtactggcgctatcgcaacttaaccgggcgctggaatcacgccttaacaagcgtccctgcaatgccgatctgcgcgattccggctctatcgagcaggatgccgacgtcatcttattcctctaccgcgacgagctgtacgatcccaacacgctggatcggggtatcgctgaagttattgtcagcaaacagcgcaacggcccgataggcacagtgcgaacccgatttattagcgatcaaacccgcttcgaatcgctcagccagcagggagtggagtcatga

SEQ ID NO: 77152 - DNA, 1485 bp, Citrobacter koseri
atgaacaacaagctgacttcgacggaacttcagtcccgcctgctacagggcaattttgatcggggaagatcgctcgatgaacggttcgccgatccgctgacggaaacctcgatgatcgtcacgctggagcagcttcgcccttacgatctcaatccgcgactgatgcgtaaccccagctatgacgacatcaaggaatcgatccgtcgtcgcgggctggacacgccaccgccgatcacccgtcgtcccgatcaggagtggttcatcatcgccaacggcggcaatacccgcctgtcgatcctcaatgaactgtggcgcgaaacgcatgacgagcggttctggcgcattcagtgtctgtacaagccgtgggccggtacatccgatcaacccatgctgggcgaactacgctgcctgatcggccatctggcggaaaacgatatgcacggcaaactcagcttcatcgagcgggcgctggggatcaacaaggcgcgggagctgtaccagcaggtggaagagtgtcagctttcacaacgggagctggcggagcatctgaagagcgacggctatccgatcaaccagtcacacatcagccgaatggaacaggcgctggagtacctgctaccctgcatccccgaggtgctgtacgcggggatgggccgttcgcaggtggaaaaactgctgtcattgcgggcggcatcattacacctctggcagcgtcatgccgccgaagacgtcggttcatttgacgatctcttttcctccgcactgtcgctgttcaacgaccagcctgaagactttgccatcgagcgggtacaggatgagctgctggggctgatgagtcaggagctgaacgtcgattacaacctgctgttgctggacgtcgatccttccgagcaaaaacgccaggccgtgctcggccctacaccggaaccgccgccctatattccaccggaagaacccgagccacgcccggtaacgcgcaggcgtaagcctgaaacagaagaagaggacattgacgcgccagcgcctctgtctgaaccagaagaagcgccatcgctattgtgtgaagggaccgaacccgtaacggatatctggcgcatcccacaactgtgggataccacggagtccttacgatcggtcagcgatcgcctggcgtgggatctggctgagcattacgccatcgacgaccggataatttcagatgccgatgtaaatggcattggctttcatgtgatgccattcgcatcagatcaccccatgttcacccggccacagtcacgcgcctgttgggcgctgctggcggcactcaacgagatcccgctaacggaagatctggcctctgcactgacgcctgggctcttttttcaacacgatgcagacggcttctttttcagcaatgaatttcttattaaagcattccggctgatccgtattgtccgccggatcaaagaattacagcaggaggcacaacatgctgccgacgattaa

SEQ ID NO: 77153 - DNA, 540 bp, Citrobacter koseri
atgctgccgacgattaatcaggccgttttgtcacaggtgatacaagccctgaaggacggcaatgtgcgctattgcgaagcgctgggctttgaccgcgaggagctgaacgaacttaacgccctgacctttgaagaattaatgcacatgggcaacacctcggcgcagttcctgaaaattaccatcaatcacgatgtattgcgcaaaatgctggttcaggtacgccaggaacaaaaattccagcaactggtcggccaggcggtgcagcttggcggctcaatagcgttaatcagccactacttcgggatatcgactgctgaaatcagcgcccgccgtcggctaatggggatccacgttcgtcaggggcgcaatcaggtgcccggtgaagaggaagaggcagccatctggaaccgctggcaggagatcaaagtggataacatcgactctataccggcactggaagccatgatgctgctggcacaggaacgttcgctctcgctgaccgtggtctggaatctgatccgccagtgggaaaaaagctga

SEQ ID NO: 77154 - DNA, 1134 bp, Citrobacter koseri
atgacaccgtatatccaggcgctgatcgctatgaccggcgacaaactccagcaacggatgcaaaaggatccgacatctgcttccgatagcctgctgtttatgggcaatcaacatgacacggttccgcgtcgcttattgcaggatccgctgttatcgcccagagataaattcgcctggcaggtgatccggatgcaggcacaggacaacggcggcgcggtgttcccctcatacagcgaattgcaggtgcagctctcgaaccgcccgcaggatgaaaaagcctcgcgcagtaccgtcagccgggcattgctgatgctgcgcctgacgcgctggctcagcttgtgccataaggcgcgggatcgggtatccggacgcatcctcgggaatatctatgccctgcacgatgaaccgctgagcgtactggacgccgtgcgctttgatgcgagctatcttcatctgctggagcagtgctcgcgacatgaaaacaaggccatccgcgctactgcgcaaggcattttgtacgacattcgccaggacaccagtctgcgctatttatcgtcgcgtatagaactgctggaagaacgcgcccgctggcagcagcgccagtctcctgaggagactaagccagaaacatccggtctcaatacggtaccaggcaaaatttcacctggtaccgaatcgggactaagccggaaaccggggcctgacggcttagtctcaaatcaggaccaggctcctgtacgtactgtacctacagatctttgtaatagtactaccgcgcgcgcgaacagcttgccaccgaactggccgccggaaattccgttaacccatcctgaaaaacaacttgtcttgcaggccatgcagaacctgccgtctccgctgcgccaggacgtactcgatgacgctgcccagcgcgttgctcgcggcggcatacaaaacccgctcgcctatctgctggcaacactgcgcaaggcgcaggacggtgagtttaatcagtatcggcgcggcaaagcagcggtgccggaattcgtaccgcctgtggtttcagagtcggaaataccggcaaggccgcgtcaaaagcgggatatcagtaagttggttgcggagattcgggcgcagtgtttggggagtggctga

SEQ ID NO: 77155 - DNA, 528 bp, Citrobacter koseri
atgctgaaaggcaatctgtttaaccagcacctgaatgcccgcatgagttccggcggccatgccgacggaagttacaccatccccggcttaggtggcagcctagtttccgggtataacgccagattcgccaatacaacactttctccctttgtcagtttcacgggcttcatctcgcaaagtgatgattactggctatcgaacggaatgcaggcacatccttgtacggctaaatctgcgctggagcaagtcgggtttcggctgcgccagaatattactactcacagtggtatgcagttcattccgtggctgaaaatcgcgctggagcaggagtttgtgcataacaacccggtcagggttaatgacgataatttcaataacgatagcgccggaacacgaggaagctaccgggctggcatcagcgccactctcacgccgcacacgcatatttacgccaacataaattacgagaaaggtgatgggatggaatcgccgtggaccgggaatgcgggtttaagctaccgcttctaa

SEQ ID NO: 77156 - DNA, 1806 bp, Citrobacter koseri
atggaaattattgattttttacgtcaaacccagaatgagattcgcaaggaatatcaggatcaaatggctcagccaggggttgagtcgccttttccggagctgatttttaccgatattgttatgcgtcatatggccgatatcggcatgacattcgatgatgccgagacgtgtcactttatggcgaaagtcagtggacacaatgtgcgtctcagcggttatgccttctcagaagatggcgatcaacttgacctttttgtcagtatttatcacggtagcgacgagctctgtcacgtcccggatgctgagacaaaagcgattgccggccactgcattcaatttttgcagaagtgcgttgacggtaaattatcatccacgctcgatcagtccaatgatgcctggcaactggtgacgaccatcgaacagtcctatgcggaactggagcaaatcagaatttatgtactgaccgatggtcaggtgaaaacccgctggtatcagtcacgggacgtggccggtaaaaccattaaattagaggttatggacattgtccgtttgtttaaccactggcaggaaggtaagccacgcgatgaactgcaggttaattttgatgaggtggctgggggggcgcttccctgtgtctggatcccggatgaaatgggtgagtacgattatgcgctgacggtggttccgggagagacactgcgatttatctatgaaaaatatggcaaccggattctggaagcgaacgttcgctcgtttctgagtcagacggggaaagtcaacaaggggattcgtgacactttacgtgagcagcctgagcgttttatggcttataacaacggcattgtgattgttgccgatcaggtcaggcttggtgaagcaccgggaggtggccctggtattgcgtggatgcaggggatgcagatcgtcaacggtgggcagacgacggcttccatgtttttcaccaaaaagaaatttccggcaaccaatctgcgtaacgtgcgtgtacccgcaaaagtaattgtgctgaaacagacgaataatgcacaagaagagatgttaattgcggatatttcgcgcttctcaaatagccagaataaagtcaatatttccgatctgtcagccaatcgaccagtacatgtacagctggaaaaaatggcaaacacggtgtattgcccggacggatacagtcgttggttttacgagcgagcaaatggcagttataaggttatgctggaacgagaaggtaaaacaccggcgggcattaaacggttaaaagacgcaattcctccatcccgtcggataacgaaaacggatttcgcaaaatatcactgtgcctggctccagcgtccggatttagtcagcctcggtgggcagaaaaactttgccgcattaatgacgatgattgacaaggatactgagcgttatggggatgaactgaacattgaaacttttaaaaattacattgcacaggctattatttataaaaaagcctataagttgattaattcacttttccccgcatttaaggcgaatatcgccgcctatactgttgccgcctattcacatctttatggtaacaaaacggatctggcagagatctggaatcaacagggtatcgaggaaactatggggaatcgtcttgtcagcttggctcaccgagtaaatagccttctgactgaatcggcaaatggcaggatgatttctgaatgggcgaaaaagccggagtgctgggactacgtgcgcagtaaaatctatttctccgcacagggaaaaaaggatgacttctcgcatggtgaaattgcatga

SEQ ID NO: 77157 - DNA, 1029 bp, Citrobacter koseri
atggtgcggctgagtaaagacgatctgctggcggcctggaaagccttagatcgatctcagatagacgaactgcctggcgctcagggctggcgcgggattcggctttttacgcaccagggctgtagctttcatgccgggcgtcgtcagcctgataatgaagaaatgctgattgccgtgtttcctcatcctctttcgcctgggtcggcggcgctgccatcttgtaaaggattccgcgttgagatggccggaacagaggagggggggcagaacggtttgatgatccgtcgccagcaaacagggaatgtggatgtctttacgacgatgattctggatattctccattcgctcctgaacgtttcgaaaccgcgcctgtttgaaactctgcttcgtcggattcgtttatggcaggcgtttatggagcgcgatacccgtccactcagtcaagaagaagaagttgggttaatcggcgaattgacgtgtctggagcggttgatcgagagcggtcttgctccgtcaacggcagtcgaagcatggataggaccgcagcatgggctacaggattttgcactcgatgaacgcgccattgagataaaaagcactacggcagcgaagggtttttgcataactatccactctcttgaacaactggactggcagcgggcaggatcgcttgtattgtgtggtttgcgcttcagcgagcatcccaccggcgcaaccctgaatgacatcattagccgtcttcgtcaacggtttgagggaaacgctacggcggcttgtatttttgagggatcactttgtcatgtcggatatttcactgaacatgctgaactctatacacgtcatttcttgctgacagaggcgttcgcactccccattgaagcggattttccctctttgacgcatgccaatgtcccgttgccggtggtgagtgcgcgctatcaactcgaactccagacacttattcctcaggcccaagattttaaccattgcttgtcagactttgcaggattaccgcatggaaattattga

SEQ ID NO: 77158 - DNA, 2859 bp, Citrobacter koseri
atgagtcttaatcccttggatgacacgcaactgagtgtattgcagattgtgcaaacgttcctgcaaagtcaggataaaagcacgatcacgcccggtattctgcgccaacatattgatatggtttgtcagatgaaacctgagtggagccgccttgatagtcgggagatcctggtcgaagagttgatccgccgttacagcatctggatgggagaagattcttctctgagtaatgacgaagggcatcaaccctggctgaccgctgatgcgaaacgcgagtggcgctactggcatcgatatcgccagtggcttggcaaaacgatgccttggggagtcctggatacccttgaccgttcaacggatcgtgttctgggattacttgagcaaccggggcgggaagggcgttgggaccgacgtgggctggtggtcggccatgttcagtcggggaagaccagccactataccggtctaatctgtaaagccgcggatgcgggatataagataatcattgtgctcgctggtttgcataacaacctccgctcgcagacccaaatgcgtcttgatgaaggatttcttggttacgagacgagcccactcagagaaaaagtgaccatcattggggtgggcgctattgatagcgatcctgtcattcgtcccaactacgtcactaaccgatctgaaaagggcgacttcagcgccggagtggctaagaatctggggatcagccccgagcaacggccctggctgttcgtagtaaagaaaaataagtctattttgaagcgcctgcatacctggattgagaaccatgttgccaccagcgttgaccccatcaccggaaagcgttttgtttcggaattaccgctgctgatgattgatgatgaagcggataacgcctcagttgatactggggaaatcgtctacgatgacgatggaaaaccggatgctgaacatcagccaacggcaataaatagtctgattcgtaagctgttgatgcagtttagccgtaaggcgtatgtcggatataccgctacgccctttgccaatatttttattcacgagagcaatgaaacacgtgacgaaggtccggatttgttcccttccgcctttatcattaatctcggcgcaccctctaactacatcggccctgcgagggtatttgggcgggccaccgcggaaggccggagcggagagttgcctttgattaggcgagtgagtgatcactgtagcgatgacggaaaaagggggtggatgccggtttctcataagagttcgcactatcccacactggatacgctaactcatttcccggactcgttaaaacacgctatcgacagttttttactagcatgctgtgtcagagaattacgcggtcagggagagaaacacagttcgatgctggtccatgtgactcgcttcaataaggtgcaatcggttgtttatgaaaatattgatgcctacattcaggacgtgaggcagcgactgacgcgaaggattggacacgaaccttttttacatcagcttgagtcactctggcaggccgattttttgccgacgaatcaggcgatccgcgaagttatgccgcagcaggttccggacgacgccttcgaatggcaggagatcgtcgacaagctgtataccgtgatagaaaacgtgtcggtacgaatgataaacggaacggcgaaggatgcgcttgattattcggacagtgcgacaggcttaaaagtcattgcgattggcggagacaaactggctcgagggctaacgcttgagggattatgcactagttattttttacgcgcctcccgcatgtatgacacgttaatgcagatggggcgttggtttggttatcgccagggatatctggatgtatgccggctttataccaccgatgagctgattgaatggtttgagcacattgcggatgcgtcagaagagctgcgggaagagtttgacaatatggtcgccagcggcggcaccccacgtgatttcgggctaaaagtgaaatcacaccctgtgttaatggtgacctcgcccttaaaaatgcgtagcgcgcgttcactatggctctctttcagcggcacagtggtcgaaacgatttcgttgtttaaagaacaggagtatcacaagcgtaactacgtggctttccagcgtctaaccgggcgcgtcggtgctggtgcgccgatacctgagagacgacgcggagataagattgaaaaatggaatggggtcatttggcaaaatatctcccctgagccgatcatcgatttcttaacggaatatgagacccatgctcaggccagaaaagctaacagcaaactactggcggattttgttacgcggatgaatcgcgttgatgaactcacccaatggacggtggcggtgatagggggtggcatcgatcgccatcacgatgtttgcggcttttccgtaccgcttatgatgcgtaaagcgtctgaaggggtcactgaccgttattccattggccgtttactttccccacgcgatgaagggattgactgtgatgaatcaacttggcttgctgcgctggaagaaacgcagcgtatttttcatgccgatcccggacgcaatgaagggcgagaggagcccgtcgttccaggtggcgtggtactgcgtcggattaaaggatttggcattaacgacattccagcacagcgtcaaaaaggtttattgctcatttacttactggacccgcagcaggcattgtcggcagcggaatatcaggaagatgccttacctgtggtggcttttggcatcagttttccgggaagccgcagtggggtaacggtggagtacaaagtgaacaacgtactatgggagcaagagtatggtgcggctgagtaa

SEQ ID NO: 77159 - DNA, 1503 bp, Citrobacter koseri
atgacgaccatgcgccatgcgccaccgaatgcagccattatgatcgaagcgctgcgagggctcggttacaacactgccaccgcactggctgacatcatcgacaacagcattagtgccggtgcccgtaaggtcgatctgacctttcactggcgtgagtcggatagctatatcgtggttcgggataatggttgcggcatgtcggccgctgaactggatgttgcgatgcggctgggggtcaaaaacccgctgacaaagcgttcaggacacgatctgggccgcttcggtctgggactcaaaaccgcctccttttcgcaatgtcgccgtctgacggtcgcctccaaaaaagaggagataacgaccatcctgcggtgggatctggacattctcgccgccagtacggacgacggttggtatttgcttgaaggcgctgacccaggaagtcaggaggcgttagcaaatgaggaacctgactcccacggtacggtggtgctgtgggacgttttagaccgaattgtcacccccggctacggtgagaaagatttcctcaatctgatggatggcgttgaacaacatctggcgatggtatttcaccgattccttgaggggaacgctccccgactcactctcaccctcaatggtcgcaaaattaaagcttgggatccctttctcagcgggcatccttccaagccctggcattcgccttcggcaatggcgccaggcgctcctgccgtgaaggtggagtatcatgttctgccgcatcaggatcacctgacgacgcaggagtatcaacaggctcaaggaccggcaggctggacggcccagcaaggattttatgtataccggaatgagcgattgctggtggcgggcaactggcttggactcggaagcccccgggcctggacgaaagatgaaacccaccgccttgcgcgaatccgtctggatatccctaatgatgccgacatagactggaagattgatattcgtaagtcgatggcccgcccaccggtttcgctgcggccttggttaacccaactggcgcaatcaacgcgtgatcgtgcggtacggacatttgcaaaacgcgggaaaatgaataagcgcaagcccggcgaggaacttgttcagctctggcaagcgcagaagacgccatccggtgttcgttatcagatttcgttacaacatcctgttatcagcaatgtcctttcgcaggccggtgagttatctccacaaattcaggccatgctaagactgattgaggaaaccgttccagttcagcaaatctggcttgatacggctgagacaaaagagacgccgcggacaggttttgaaactgcaccgcccgcagaggtgttgtccgtattgcaggtgatgtaccagactatggttggacagcaggcgatgtcaccggcgctggcgaaacagcacctgcaaaatatggaacccttcgataattatcccgaattaattgcactactccccgacgatcaacatgagaaatcgctatga

SEQ ID NO: 77160 - DNA, 2040 bp, Citrobacter koseri
atgcatcgcactatttctgagttttatcgcattccccctttacttattcgggcgctaaaaagcggaatttcctccgtggtggagtttcatctcaacaggggattacccaaagattcacgagattctctgggaaacagcccattgatgattgcggcccagtatggacatttcgctatttgcgaaatgttgttgagtgcgggtgttgatgttgaacatcaaaacaacctcgggcttcgcgctagtgaccttgcgcaggagcaaaaattgcgtgatctgttggcccgttatcgtcagcctctttcacttgccgaactggaacgctctgtggtttcagtcgaggactcagaaacagaggcagaattacccagcgctgaaatcccgatggattttatgctgtgggatgcagaagttgaattgaagcccgccgaagataatctgacgttaagacatgcttccgctgaagcccagcaattattatcacgctatcgcccgaaagataactctgctgagtggagcgatatcgaactcacgctccctgaaccactgacgccagtttctcactctccgcaaaattaccctcatctctcaacgttgctcattggcgcactggatacggggcgtatctctttgcgtgacatctggcatgccggggaagaggatttcggtatgcagtggcctgaattccggctcagcgtagaggcattgatcagggacttaccgctgattgtggatgacgatgatattattccgcctgacgctgctccggcgacattatcggtgagtgaacctcttgaaccctggtttgatgctttcaatgcattgcggcagttcggcatcgttgaaaactatctcgtggatatccgccagtgggatgtcgtggataaaacaaaagaagaacgactcggccagcgcatggatacggcgctaattaatctgataagaatcctggcgggtttatccgaagcggaatatatgcagttgctgcagcccaattacattccggagccagcgcctgagatttctgaagaggaagacgtcgcagaagaagcggatgaggaaatgcctcccgtatccgatgacgatgacgataacgatgacactatcagctttatcgagcttcttgttctgctgagaagtgggaaagcaggcgagtatcaggataatcatatcccccgcccggagtatgccgacctgcaacagatagttgagcgcgcccgaacgctcatccctgatgaaggtcataaaataagtctgtatgtcagcagttacagagaggcttgggaggggctgatccacgccaacttgcgtctggtcgtcaccatcgcgaataaatatcgcgggcggggattagatgtcgaggacctgatccaggaaggtaatctgggtttgatcaaggccgttgaaaaattcgactatcgacgcggatttaaattctccacgtatgccacctggtggatccgccagaagatcagccgcgcgattgccgatcaggcgcagctcatccgtttacccgttcacttctatgagcaattcaggcgctggcgaaacagtcgggatcaattgctgtatcgccaggggataacgcccacgatcaaacggctgcaagcattgactgaccttccagaaaatcaactcaagcggatggcaaaatatgaagaacagacggtgttgattggcgattttcatgatgacgcccaggacagcgaagcggcgctgtcgggagacgcgatcctgaccggaaaggatttcaccagtgctcccgttcagtctctcgagctaagagaatgtgtttcattggtgctggaaacgttgttgccacgcgaaaaacagatcataaaaatgcgttttggcatcggtatgacgcaagatttcacgctggaagaggtgggtaaacagtttgatgtcacgcgagaaaggatacgtcagatagaagccaaagcgctccgtaagctccgctatcacagccgggcgtcgaaattaggcggcttcgtcgaacagtgggaaaccgcgttgagcgagatgcaggaagaagaagaatga

SEQ ID NO: 77161 - DNA, 699 bp, Citrobacter koseri
atgtcggactacaccttcaacatgggtcccctgcgtagtgcgatccatattcagcttcacacccataacgctacccggctgtggaccgggcgacgggcgaccgagaacggccctgcgccaatcatcggaatgccgcgctttatcgaaatcctcaaccagatgcgcattgccgcagaacataacgatccttacgccgatctgtggatgctgcgtatggaagagaaactggtgcaatcgcgtaagctaatgcaagtgatgctggatcaggcgaaagccatgttcagcgaattgccagaaggcatcgatattgaaacctgcttcaatgttcagcctgcccgctttccgctgtttatcaacgccccactggcctatcagggtgtttatctgctgaccgacttcgaccagctcgcccgtcagctcctgctggcctcgcatatcgccgtcatctcccgcagggaaatgcacaaccggttaaataatggcgcaacggttattcgcagcgccttcggtctggcgcagaaatatcacggttccggactgacccgtcaggactttatcgacgatacaccacaggccagagccatcattgaacgtctaggcccgctaccggaagcggtactgagcggcaagctgcgctcatcgttttcatcaccattgcctggcaaggccgaaaaccccggagtcaccgatgatgaataa

SEQ ID NO: 77162 - DNA, 495 bp, Citrobacter koseri
atgatgaataaccccataaccggctatcagccgctggctgatgaagactataaaatgctggcttacgtctcctcgctaaaaggccttttaaagccttttaagagtaagggggagctggagctgctcgagagcaatgcccgaagcgtgcgcgagatgatggaacctttgatgcaacgcctgatccagagcgccagacgctaccccgttcgccaactgccgctgatattcaccatcggcccagccccgtccggcgcaaacttcttgcgctggcggaaccagcagaacaataaatccggcacccctgcattctgcaacctgattggcgatcccaaaatcccgcaacgtgccagagatgccttactggaaatcgagcgggatcgcatcgtgttcaatatgcagatgtcggtgctgaccttcattatccgccaggcgcgggagtgccaggaaaagatgaaccaggcagaaacgctgtatcaggggcggcaaaatagctga

SEQ ID NO: 77163 - DNA, 276 bp, Citrobacter koseri
gtgcagcgggctgaaggggtcactgttcgcgtagggttacgcgcgatttctgccagcagtgtaaatcgcaataactggcgcttgcgcacaaacggatcccgttgttatccggtgggcgccggaaaaatgcaggaggtccgggcggatagcgagacggctgtcggctggctatccgcccggaatgaggctgaacaggagcgtaaagggtgttttgcgcgacggaaacgtcacgagcgcgaacaggcaaaacaagccgcgcagtcaggtatggcgtga

SEQ ID NO: 77164 - DNA, 417 bp, Citrobacter koseri
atgagcgagaaaacttacttcaatctgtacaccagcggcctgggttacgtaaaccgtgtccgcaccgtcaccccaaaacgcggcgaaccctttttatgctgtgacattgccgcattaagcggagccgccgatgacgtggattatgtccgctttgactgcaaagtgaccggcagcgaagcacgtaagctgattgcccgttgcgagcaggcggtcaatgaaaagcgcaaggtgctaatccactttcggttgggcgacttatacgtcgatatgttcacctacagcaaaggcgagcgtaaaggcgaaacaggcgtcagcctgaaagcccggctgctctatattggccttgtcaaaatcgacggtgaagtcgtctggcaggctgggaatcaggaagcagaggcggaagctgatgcagcctga

SEQ ID NO: 77165 - DNA, 429 bp, Citrobacter koseri
atgctgggcggctgcaccgcgccgcaacagccccctgtgcctgcgccaaaacccgcaataccgccagcgcctgaagtggtgcgctatgaccgttacctgttgatcaacacccgccccgacgaagctcagcgcaacccgctgcaccaaatcgtcaacatcaacctgccgctgaacctgaagctcaccgttggcgacgccttcacctggctgctgaaacaaagcggctacagcctgtgcaccaatgaccattccacacagtttctggctggcaaaccgctgccgctttcgcaataccgactcggcccgatgcgactggaagaggcactgaaaacgctggccggaccgggctggctgatgcagagcgatgtactgaaccgcgaagtctgctttcacctgaacacgccgggaaccggagaccatcatgcttaa

SEQ ID NO: 77166 - DNA, 609 bp, Citrobacter koseri
atgcttaaacgtctggcttacctgatagcgggcagcgctctccttcttctggcggcggcgatgttctggtgcgtcaaccgcctgaataccctgatgctggcacagcaacagacacaacggcagataatacagtggcgcgaacagtcacagccagacagcgattatcgcgagctggaggttgccgtaaaaaacatcaccgatcgcacggaagcccttaccagacagcttaacgatgccacccgcgctcaggccgaacgacttcaacccattaccgaacagttcaaagaactgaagggacaaatccagaccctcagcgccagttatcaacacctgcaacaacaaaccgccgcgcgcagccgcgcaaaggcaaaacgccccgtcccctctccgctttgggccgcaaaggcccctttttctcttatcagcagcgagtttcgtgccgggcggcagttcgccgtcatcgcgccatccggctatcgctcgctctcacagcttcagcttgttacccccggcgacagcgtgcagggctggcaactgctgcaactggacggcaaccgcgccactttccgtaaaggcgggcagcggctgacgctgaacgccggagagtaa

SEQ ID NO: 77167 - DNA, 651 bp, Citrobacter koseri
atgcgcagatacctgttgctgtgccttctgctactgccgctgtttgccagtccgcagcaaacccgtattgaagaacagaccatcactcacacacaggcgcagcagtggagattaaccgacagtgaatggcagcgctaccagcaactgcgtcagggcgagcgcggcatctggtcgccgggactcgatcccctcaccacccttggtgtggaagccaacagcgacgccgaacgccagcacttcgctgagctgctggcccgtaaagaacatcagcgggtggagaaagagctggcgttccagcgtgcctacgaccaggcatggaagcggctttacccaacgctgacgcccatccgcagcgtcgtccagccacgactggcgctgttcgttagtgaaaaatgtccggtctgcgagacgctggcgcagaagcttatcaacgacgaccgcccgctggacatctggctggtcaacagccgtaacgacgatgccagcctgcaacgctgggctcagcgccagcatattgatatgcgcaaagtcgaacgcgggcagataacgcttaatcacgataacgggcgctggcaacgcctcggcggcggaaagctgccgctattgctcgaacaacagggggagcaatggcgtcccgtctctgcaccctga

SEQ ID NO: 77168 - DNA, 534 bp, Citrobacter koseri
atggcgtcccgtctctgcaccctgacagtcggcctgctcatcagcgctcacgcctgtgccgtgccgccactgtatgtgcaaatcgcccgccagcagcaggttccggctgaacttctctacgcggtggcccgcgcagaaagcggcacccgactcgcgcaggggctgcatccgtggccgtggacgctgaatattgccggaaccggctaccgttaccccagccgttcttcagcctgccgggcattgctgggcttcgcccgtacccgcagcctgaaacgtatcgacgccggactgggacagattaatctcggctggaacggtcagtggtttgcctcgctgtgcgccagcgttgatccggcggacaatcttaccgtcaccgccctgctactgcgtcagcactacaacgcatctcccggaagctggctggacgccgccgcccgctaccaccatcccgccggaggcaagcctgccgccgtctaccgccagaagatcagccagcaaatgcggctgctctccgcatcagggacgtcgccatga

SEQ ID NO: 77169 - DNA, 408 bp, Citrobacter koseri
atgaaacaccttactccagccatgctgctgtttactttcaccgcgattgccgggcctgccgttcccatgcaggcgctggatgaggcccggttactgccggtcgtcacccataatctgcaccccggtcagcaaccccgtctggcgctcagcctgccagggatgacaccgctgtttttaatcggtgacgatccgcagtccacagaatggctgcgccagcaccacgacgcattaaaaaccctgcacgccactgggctggttgtaaacgtcaccactctggcgcggttgaatgccctgcgggccatcgctccagtgttaacgctgctgcccgtcagcgccgacgatatggcaaaacacctgcccatcagcgcctatccggtgctgattaccgacaaggggctggaacagtga

SEQ ID NO: 77170 - DNA, 2034 bp, Citrobacter koseri
gtgaggctcgattttatcctgcgcccggcggtggagctttatagcgccaccgcggccctgctggcggcggtatggtgcgtggcggctccgcaaacactgctgctgacgccttattccggctggctgctggcgctggcattgctggtactgtctgttctgcggctaaaacagggagcgcgcatcctgctctttcgccgccgcgtgcgtcatttgccgctctggacgctctctgccagccgtatcccgcagttacccgacgcgctgtttctcgggcgcggctttcgctggctacccacacatacccaacggctgtatctgtgccgtctgccacagtgtgaacactggctacggacagaccgcccttctgccagcggcggcgatccgttgctgcacggagtggaactgagcgaaggccgcgtcatactgccgctgcgcgaccgaccggggcatacactggtactcggcaccacccgcgtcggcaaaacccggctggcggagctgctgattgcccaggatatctgccgtggcgacacggtgattgttttcgaccccaagggtgacgccgatctgcttcgtcgcgtctgggcggaggcgcgccgtgccggacgggaaagcgtcttctggctgtttcatctgggatggccggagatctccgcccgctacaacgctgtcggacgctttggccgtatctcggaggttgccagccgcatcgccgggcagctttccaccgagggcaactctgccgccttccgcgagttcgcgtggcgcttcgtcaacatcatcacccgcgccgtggtggcgctgggccagcgcccggattatgcccgtatcgcccgccacgttatcaacatcgacgaactgtttatcgactacgcccgcgtctttttacccggccacgaccgccaggcatgggacaacgtggtgcggattgccggtggcatcactgagaaaaatacgccacgtaatcttcagggacgggacagctacgtcgtcgcactggagcagtacctttccactacccgattacatgacccgatcctcgacggcctgcgttctgccgtgcgctacgacaaaacgtatttcgacaagatcgtcgcctcgttgctgccgctgctggaaaaactgaccaccgggaaaatcgcccaactgctggccccggactacggcgacctcaacgatccacgcccggtgttcgactggcagcaggccattcgccagcgggcgattgtctacgtcgggctggatgcgctgtctgacgctgagattgccgccgccgtgggtaactcgatgtttgccgatctggtcagcgtcgccgggcatatctacaagcgcggcgtgatggacggtctgccgcagatggaggagaaagcagccatcaacctgcactgcgatgagttcagcgaactaatgggcgatgaatttattccgctgatcaacaaaggcggcggcgcgggcgtgcaggtcacggcctacacccagacgctctccgatatcgaagcccgcatctgcgaccgcgccaaagcgggccaggtggtcggcaacttcaacagcctgatcatgatgcgggtgcgggagaccgccaccgccgaattgttgacgaagcaactgccgcaggtggatgtgctcagcaacagcgtcagctccggcgtcaccgacagcgccgatgcgcagggcaacatcgggttttccagcaacacccaggatcgggtaagcagcgttcaggtgccgctactggaacccgcctcactggtgcagctacctaaaggtcaggcgttcgctctgctggaaggcggccagctctggaaattacgtatcccgttaccggacgcagcgcacgatccgctgatgccggaaaacatcgcgcaaatcgcccgctatatggaaaaacagtacgacagcgcgcccgtatggtggaaccatccggaagcagttgtaacggcgaaaaacgaccctattttatggctgaacgacagcgaaaccacggagaaactgaccgatgataccccggacacaccgccagctcgtcagcgttga

SEQ ID NO: 77171 - DNA, 267 bp, Citrobacter koseri
atgataccccggacacaccgccagctcgtcagcgttgaagtgatgtggcctgcgcaaacactgccccttcccctgcaacaggcggtggaagcgctgacgcagggagaaacgtcagaccagattatcgcccggatgaatttgcagggctttcaggcatggcgcgaagctacgtcgccgcaggatgaacacgatatttttcagatacgactggatgaggcgcacgaggctcgattcctctgccgctacgttacgctaccgctgcactga

SEQ ID NO: 77172 - DNA, 684 bp, Citrobacter koseri
atgcccgagcaagtgtcgctaggaccaatacaccgccccggactgctcggctggctcgcattgctgcccggcgtgctggtcagtttttgcctcggcgcatggatgctggcgatagcgctggaatggctgggcgacgcatttttctggcggaacgcctgcgccagtcatagtgggcaggtattgcaggcgacatggcaatggtggcggggttccgctggcgcaccagtgtggttagtagaaaatctggcgcttgccagtgatacgttgcagcaagggattacggcgctgattgcttccctcaacgggcaaagcgggttgttctggacggaaaccgtcacttcggtgatccgctgcgcgttactgtctgcgggtaatgttaccctcaccttcatgctgcggctggcgattctgttgcaggcgctgccgctgtttgcactgaccattaccattggtcttattgacgggctggtaagacgcgacttacggcgtttcggcgcaggccatgagtccgggtttgtttatcatcatgccaggcgtatgatcggctatagccaagcagcgacagggttagtgtggttggcggtgccagtttttctcaagccagtgtatgtgctagtattaggagcagtggtagttggattgacggtatcaatattgttcggggcttttaaaaaatacatataa

SEQ ID NO: 77173 - DNA, 858 bp, Citrobacter koseri
atgataactttattaattttaacgaaaagccgagacctattcaattttattgattcgggtaaaaaaatagttccagattcatatctgatatcaaaaaatgaagaattatcgataaaacatctaaaaattgattcttcatcgaaggctacatcggatccgtttgagttggccaagaataattttggggatttttataatgaaatcaatggattggttgttcttgcagacaatggcatagctcaaaaattaaaggaaaaatataatcatacaatactgattagtgaattaggtgaatattcttctcttcttggtgttcctcataaattaagggagtttcttgaggataaaattctggtatctctaaagaaactattctggttgatgagtttaacaaatgaagggttcactgatatactaaaactcccaaagttaaattttcaaagcagggagttgaattatgtttatgatgagcttgctgaaggtaattcagataattatcaaaagaccaaaaaatatttagtggcattgaaaagaaaaataaaaataccgaaaacaaggcctcattcatcaaagcagttttatgtcgacgagcgggattttttctttgaggcaggtaaagaaaatcattcggcacatgaaacttcttacgagaaaggacactctatattttgtgatttatcagtgaagttcagatttggtataagactcgatgcaaaaaaacattttaacgttactattggggatgaatacgaaacttcggcgtatggggatttttttgggtgccatggacaaattcagagactaaaaaagacatctcatgcgaatatgtttactaacgattatattagtaatttatag

SEQ ID NO: 77174 - DNA, 396 bp, Citrobacter koseri
atggatattaaatcttttgtaagcgaaatgaacacgaagaactggaatgaaactggaacacctcttctaattagcgtattgggctcggaaataaagagacatccagaatatcatgccgaattaggaggtaaaaaactaaagcaatggataatggagaacattgctgtgatcaatgccaaagttatccagcacccgcagcaaaaagaaaaggcaggaattattcctgaaaatgaaaaatatgaatacatggttgttaatgcaccagtaaagattgagcatcattctaaaaatcaattgttagagttgatgtctatcattaataaattacctcaagaagacatagataatatttatatacctacaagcgcactgtgcaaattggcagcattaaaatga

SEQ ID NO: 77175 - DNA, 786 bp, Citrobacter koseri
ttgagtagttatggattaatgaatttacagcgcgaaaaagaaaagattgaccgacttgtctatgatatcggttttcaatatcttcatgatccggctatgcgttcaaaatatatgatcgaggaacgtagagttacatcatattgccttgatgaatatcggtatggaaaattagattttggcagggcgatggatagattacgtgaatatcatatgtctttaactaaatattatatgcaattaaaaatggggagtattaaattatatgcaatagctgagcgtgaaagagaaaggcattctacacttaccataacattaaaacgagttggatttgttagtgggacaatgcaagttatcggtggttttggtttatgtaaagcaacccttggagctgcatgtaaaagttatggagttcctttaatgatgcagggaagcgagaatatttgggaaaatggttattatttattatatcatgaagaccccaggaaaatgcctttgcggtatgcctaccgtcaggcaacaaagcttttgggtggggatgaaaaggatggtgatattgctttttcaacgggagatcttgttctttctttcggttcagcctcaacgctgacattgagaacagattcgtggaaattattccgctatatacaggaagattatattcgcagctggagaaccttgggagctgttggaagcgcgagtgagttagccggtgatgcagttagtggattcaccatttatcaacttcttggtggagaaagtactaactgggctgaattgagggaataa

SEQ ID NO: 77176 - DNA, 348 bp, Citrobacter koseri
atgatcttcaaaacatatgatcagaatgataagtctttaactgaaagtattaaacttgcgggtttaagtgaatataaagcacagaaacttattcgttttgctaatgaaaataaaataagtttgcagaaagcttattggctaaaagatgcaagtgttatcagagttgatattatcatggtttcgattttattactctttgccttttcaattgcacaaaaggacttcagtgaattatggtctttctttttaatattcggtttgtcgttttttgtcattgaattaacctgccgatttcataaaggctactttaagatatggagaatttatatcaagttgcgagggctgtaa

SEQ ID NO: 77177 - DNA, 207 bp, Citrobacter koseri
atggaacgtgacgaactggaagaagaccgtgcagcattcatcgccggcgagattggcggcgtggttattcagttaattattgatggcgttgaaatcaatcgggacaacatcgttgactatctggaggccaagcgcagggcggtagggaatgtgatccacaaggggatactgcgcgattcagctgctatggtgagaaaagggcaataa

SEQ ID NO: 77178 - DNA, 930 bp, Citrobacter koseri
atgaatcgtaatgattatgttttcgctctcagtgaacgcgagcaaataagtaacctattaaaaaatatgccaactggtcattcgattagccggaaaagcttagaagatcgtttggagaaagttgagcgcttaatttcacaagctgacgttcgagaacatgaacctacgcatgctgtgttgacttttagaggtccaacagtagtcggcacgcatggcatttcagcagtatttggcacaaaagctatatcttgttttaatgatgcaatagcttacgtggcatcctctttcaatggtccacttcctgccgcaggcaagataccaaacatagaaaataatcatctcatgattaccgcgtcagcccgtggttctttcggattcgtacttgaagagttcagacctgatgcacctcttgaattcgatgaggaaacccccgtagcaaaagccattgataagactagaaaaatatttcaagcaagcttagataatgatgatgaagaactgtctgatgctatagaaaacttagactctcgtgccttagataaaatcagagggtttattcattatctatatgaaaacaaaacggtttttacactaaaaagccatgattttagtatcgtttttagagagccaaaacagctggaagctgcatatcaacatctcagcaatgataatattcagcaggaaaaaattattgagaaagttatattcctgggaactcttcctaacaagcgccaatgtgaatttatagttttaggtaacactgatatcaggacagctaacattgacaaagcagtagatgacccagatatcataaacaagcacttaggaagcgttgcaacagctacgttcctgaaaaaaactgttggtaatggtaaacctagatacactctggtttctcaacctcaatgggatattaaatcaaacgcttag

SEQ ID NO: 77179 - DNA, 552 bp, Citrobacter koseri
atgggggtaatccccccaatagacgaggctgatcctacaagccagacgcgttccccatacaaaatggatatcgtacgctttgttagtactttttcgcttacccctgcaagaattaaaattcttaagggttttcttaattttcgtatgtcactaagtcaagcagggctagttgaaggttttcagtgggtagatggaagcttcacagaacatattgaactaattgaaaaaaggccgccaaacgatgtcgatgttgtgaccttttttcaattcagcaatggcgataatgatgcgatcgtaatcggtagaaaacccgagctatttgatcatgattttgttaagaaggagttcttagtcgactcctacttccaagggcttaatagtccaagtcacgagcttgttgaaatgactgtatattggtacagtatgtgggcacataaacgcgatctgtcgtggaaggggtttattcaaattccgttaaacccacaacttgatgttgcggcaatgactatacttaattcagcaactactggggaggcaaacaatgaatcgtaa

SEQ ID NO: 77180 - DNA, 156 bp, Citrobacter koseri
atgaacacattcagcatactcgcgatacctttctttgccctttcagtggttctgttgactcttggcgctaccaggaagaaccaggcgagtttcatcgttggtggcgtgtttatggcgtcaagcgtggttaatgccgttatcggcatgtctctttga

SEQ ID NO: 77181 - DNA, 378 bp, Citrobacter koseri
atgctttcggactatgttgaagtgctgtatgcaatcgagttcaccaccgagcatgcccgttcactcttcggaaatcgctctcatgaagatgtgaaagtgatgactgttaatggtgacagcatggcacctactctcgtttccggggatcggctgttcgtcgatatatcagtccggcatttccagactgatggcgtttactctttcgtgtacggcagaactttccacgtcaagcgccttcagatgcagggtgatcgccttgccgttctctctgataacccagcttatgagaagtggtacattgatgaaaaatcgcaagaccagttgtatgtaatgggtaaagcgttaatacacgagtccatcagatacaatcggttatag

SEQ ID NO: 77182 - DNA, 252 bp, Citrobacter koseri
atgcaagaagacaaactcccgacattcgcagaagccattaaagaggtcggtgttattacgatctcttcagcttgtggttgtagcgttcgctcaatctataagtggatgaaaaaaggatgcctcccacgtacagattttactggagagaccaattacgcggcaaaaattgctcaggcctctcgtgggaagttttccacggaatttataaaagcgattagtcggcctcaaaaggctaacgaaaaagcagcataa

SEQ ID NO: 77183 - DNA, 465 bp, Citrobacter koseri
atggtagagcaaaccctgaaagaagttgtgaaagcgatgtgcaaggcgtatccgggagggcgtgaagctatggccggtgctcttggcatgtcggtaacacagttcaacaacaacttgtacgagaagaatggttgtcgtttcttcgaagtcactgaactggaggcgatggaggacatttccaacacgtcattcgttgcggactacttcgctaaacgtcgcggtgcattgctggtggacgtacctcaaatggaagaccttgatcgggttgacctgttcagtcgcgccatgcgcacagctgcggcgcgtggtcaggttgatcagattatcgaaaaggctctggaagacggagttattgagaaacatgaagctgacgagattatggatcatcaccgccgccacctggccgcgcgtgaagaagagatccgagcaattgttgctttgtttgggcgccgtaaaaagaagtga

SEQ ID NO: 77184 - DNA, 339 bp, Citrobacter koseri
atgaacagtttaaaccgattcagaccatctaagcaattcagatgtcttccgctggtggggaaggactctccgttcggctatgtggagagattaaacaatcaggctgaagtgaacaactaccagtctgagaaaacaatggtagaggcttttgctcagatgaatgagaaggggcgtgaggaatggctgaaattgatcggagattcagagaccgaagaggcatccccgtccatgtcatcaggtgggagccacagactcgacgcgttatataccttcgcgaagggtacgatcatgagtgcttcagccctcttgagcaattccagcgtaaatttacagagttaa

SEQ ID NO: 77185 - DNA, 861 bp, Citrobacter koseri
atgagcactaaattaactggttacgtctgggacgcttgcgcttcttcaggcatgaagttgtccagcgttgctatcatggcgcgtctggcagacttcagcagtgatgaaggtgtgagctggccttcgatttcaaccatagcccggcagattggggcaggtgaaagcacggtacgcacagcgattgctcagcttgaaaaagatggctggcttacacgcaagcaacgtcgtaatggaaaccgaaacgcatcgaatgtgtatcaactgaatgtggcaaaacttcgggaagctgcgtttgctcacctgtcagaatctgacgcgtcaaattctgatgcctcaaaatctgccccatcaaaatttgaggcatcaaaaaacagcgataacggcacttttcacccatcagaatctggtggggatccgtcagtaaaatcaaaacaagatccacaagtaaaaataaaaccctcttgtcaggttgcacagcaacccgaccgggaggtgttgattaccgatcaggcaaaaagtgttcttgggtatctgaacctgactaccggttcccgttatcaggtctgtaactcatcgctggagaatatccgtgccaggttgcgggagggttttaccccggaagagttgaaactcgtagtggattacaaaactgaggactggagggaaaccgatcaggaacagtacctgcgtccatcgacgcttttcatccccaagaattttccaggttatctcaagcgagcaggtaactgggagaaggcgggtaggccgaaaaaatcaggagggcagtggctgcgtgaagacccactgttcaaggctaaatacgagtgtgatacgcgcattcctgacgggttcagggggtga

SEQ ID NO: 77186 - DNA, 444 bp, Citrobacter koseri
atgagcattctgaaaacagtccagatgtttattgccatgaatcccggcaccacgaaccgtgagattgctgaatcactcacgcagtacaaccatcagtctgttcagcgcgcggtgtgccgtctgttcgagcttgaactcgcaacacgtaaacgtgacggaaaaaatttccgttactacgcagagccgccagaagggtttcatttcaatgtatgcgagccgacaccagaggtagcgtcactcatggagaaagccacagaactcgaatcgaaaggtctgtatcagcgcgcggcaaccatgtacatggaggcattcagggtttccggcattgaatctgagagaacagcgcttttagttgaacgtcagcgttgtcttggactggctaagccagcggtaacaacagaagacggctgttttctggctggtcgttttgcggggcgctgctga

SEQ ID NO: 77187 - DNA, 654 bp, Citrobacter koseri
atgaaatactcattgatttacgccgatccaccgtgggaatacggtaaccgtgcgagcaacggcgccgccgccgaccactattccaccatgaagttaatcgacatcaagcgtcttcccgtctggaaacttgctgccgatgatgcggtactggcgatgtggtacaccggcacgcataaccaggaggcgatcgaactggccgaggcctggggatttaccgttcgcacaatgaaaggctttacctgggtgaaactgaatcagaatgccgcgttgcgcatcaacaaagcgctgggcgagggtgaagttgccgacttttacgacttcctcgatctgctgaatgccgagacacgcatgaacggcggcaactacactcgcgccaataccgaagatctgctgattgccacccgcggcgccgggctggagagaaagcacgccgggattaagcaggttgtctacagccctctcggcgcgcacagcgaaaagccgtgggaagtgcgccacaggctggaactgctttacggtgatgtgcctcgcatcgagctgtttagccgcagcgcggcgccaggctggaatcactggggtgatcaggctaaatctcctgatgttgaattattttctgccggggtactgccagtatccagaatggaggtcagatga

SEQ ID NO: 77188 - DNA, 390 bp, Citrobacter koseri
atgaaattagtccttccgtttccaccgagcgtaaacacttactggcgatccccaaacagtgggccgcttaagggcaggcatctcattagtgcaaaggggagggcgtaccagagcgcagcatgtgccgcgattattgaacagttgcgccgactccctaaaccgtcgtcttcgccagcatcggtagaaattcttctctacccgcccgattcccgtcggcgggacatcgacaactataacaaggcgctgtttgatgcactcactcatgcagggatctgggaggacgacagccaggttaagcgcatgcttgttgagtgggcgccacgagtagcaggtgggaaagttgaaataacgattaccagacatgaacctctggcgggtgcagccgcctga

SEQ ID NO: 77189 - DNA, 723 bp, Citrobacter koseri
atgcaacagatgaacattaccgtaaattgtccgactcatcatgcagtagtgaacgggcagcaaatgacgatgtcgagtcgggagatcgcatcactggtacagagtaaacacggcgatgtaaaacgctcagctgagcgtctggctgctggtggacttttaaccgcgccgttggcgcagttcgatttcactcataacgggaacgtttatcaggagtaccgtttcaacaaaagggattcgttggtgattgttgcccggctgtcgccagaatttaccgcagcagttgtcgatcgctggcaggagctggagcagggtaattctccggctgttccgaaatctttttctgaagctttacgcctggcggctgatcttgaagagcagaagcaacggctaagtgaagaactggcaattgccgcgccaaaggccgacttcgttgatcgatatgttacagctactggctcaatgactttccggcaggtggcaaagctacttaatgccagagaaccagagttcaggttgttcctgatggacaagaacatcatgtaccgtcttaacggtgtgctgactccctaccaccagcacattgaagctgaacggtttgaggttaagacgggaaccaccaccgtatccaactatgcgttcagccaggcgcgcttcaccgcaaaaggcgttaaatggattggtggactatgggcagagcatattgctaaggggtcgatagcgtga

SEQ ID NO: 77190 - DNA, 990 bp, Citrobacter koseri
gtgagggtattactgacacctgaagtggcgccaatgaccggggtagtgatatttcgccctggcagtgagttgatgcatctgttcagacgtgggcgggttttgattgagcctcagtctgagtctatgacagcattaccgtctggactgttgccggagacagagcaggtgctcaaggacgatccgctgatgcgtgatgtattcgaaaatcagagggtaattaatcgtgctggtggtttaccgtcactggatgcctggcttgagagaaagcttgaatgtcagtacccgcacagtgagtggcatgacaggaattacaccattacccggcatgctccaggagctatccgtacgtgctggggatgtgacttaaaaatacgtgatcagttcactgaaagtcttgcgggaattgcccgtgaaaacctggtatcctggctgcttaaggtagtaaacggtcaattaggcttcagtgaggaccatgtactgacattgccggaattttgctggtggatgatcagaaatgacctggctgacgaaataccggaagcggtagcgcataaagtgctgaggctgaagagtgaaccgatcaggtcagtaacgcgtgaaagcgatattgttccggcattaccggctaaacaactggtacaggagaaagcgaaaaaggtagtggcggtgaaggttgatcctgaaacgccggaatctttcatgctgaggccaaagcgccgacgctgggaaaacgagaagtacacgcagtgggttaaagcccagccatgcgtctgttgcaacaagcaggcagacgacccccaccacctgataggccacggacagggtggaatgggaacaaaggcacacgacctgtttgtgataccgctgtgcagagcgcatcacgatgagttgcatgctgatcatgtggcatttgaagcgaaatacggcgaccagctaatgctgctgtttcggtttttagatcgtgctctggcaatcggcgtactggcgtaa

SEQ ID NO: 77191 - DNA, 366 bp, Citrobacter koseri
atgcgtgatatgtatgaagtgatggaccgttggggcgcatgggctgcggcggacagcagtggggtagattggcaaccgatagctgcagggtttaaaggacttctgcctcatggaaaaaaaacacgcctgcaatgtgatgatgatgaagggattatgatcgatggctgcgttgctcgattgaagaagtataagcctgaggagtatgagctggttattgctcactttgtgatcggcatttcgttgcgtgctattgcgaagaagcggaagtgctcggatgggaccatcaggaaggatttgcagactgcattaggttttgttgatggggtgctgtcaactctaaatgttgatccaaaagtattaggttaa

SEQ ID NO: 77192 - DNA, 492 bp, Citrobacter koseri
atgtctttagatacatctaagtacgagttaaaaggtattatcctggttgctgtgttttttttcatttccgccggattttcttttctctttggtagttctttagtcggaaattccgatgctctgaatctagtggcaaatgtcttcgcggttttatctggttttttattactcgttattaccatgacaagcgatacagcatcaattttagagggattatctgataccgaaaaagaaaatcaaaaaaaacgttttaaagcgaggttctctcggtactacattctttttgtattatacttcattgttctcgtaatgatttttatttattaccttatgcaaaagtcaaataatgagcttttgaatcaatacccattaataaaaacatcactcgagtacgcaatggctttttttattccattttctttcttgaattctttgtttatcccattaaagattaaagagttgtttttagaaaaattcgatcttcattcataa

SEQ ID NO: 77193 - DNA, 825 bp, Citrobacter koseri
atgaattttagagaaagtaaagaagggaattacacgaagaaatcaattgttagagtttttgatgtcaatcacagttctaaagataaattatttgatcaactaaaaaagaataaaaaattcaaagcaaatgcagacttcactatctctagtataaagaaaatccgtataagagaaatcacttattattctaacgactgtttttgccatattaccacttacaatccaaaggaaagtgtatctattacccctgcagcaaatggaaatccaagagatctaattgatgtggataactatgatacctgccattactttctattgataaacaaaaactatatcagagttattttccaaatctcatacacatggccagagctaaagttaaagcaattttttgaacaactaggaatatacgttgaaccgacccctgtgttggactcgcaagttgtatcaagtctccaggatgaaggatttaaagccttacatataaacaccaccattcattcctctaaagtgccaagtaaagataacataattactcgaattgcaaaaaaagttcctaaagttggagataaaggcgtctatggaaacatccgaattaccggaaaagggaatcctgaaatagcgaactctattgaacaaaccccttcattatgggttaatgaattagatagtgatttctatattgtaaccaagaaagataataaaataactggtgataaaataaagttacacaaaatatactacactcttccatatggctcaaagacaattacgcctggaagtgcatacgatatgctttcacactttaagaccaatgtgttataa

SEQ ID NO: 77194 - DNA, 387 bp, Citrobacter koseri
atgtccgatccgatttccggcaccgggttagccggcggcgccctgacgggggccagtgtctatgggctgttgaccggaactgattacggtgtggtgttcggcgcatttgcaggggctgtattttacattgctaccgccgcagatttgagcgcaacccgccgcctggcgtatttcgtcgtatcgtatatcgctggaattctatgctccgggctggtgggttcaaaactggcgacctggacgggttacaacgataaacctctggacgccatcggcgcagtaatcgtttctgcattagccgtcaaaatactgacattcctgaataaccaggatgtcggctcgctggtggcgctgataacgcgccggggaggttcaggtggtactaaatga

SEQ ID NO: 77195 - DNA, 282 bp, Citrobacter koseri
gtggtactaaatgacccgtcagcaactgttaacgcgctgctctgcgcaggggtggtaataaccctgatgttctaccgccggggggattcccggcatcgtccgtgggtatcgcgtctggcgtggcttattacagtcacatacagcacagttccactggcctatctgtgcggcatttaccctcattcctcatgggccacgattggggccaacatcattttcctttccgtgctggtggccgtcagaggcaacgttgcacgtctggttgatcatctgaggcactaa

SEQ ID NO: 77196 - DNA, 630 bp, Citrobacter koseri
atgaatcaacaacaattccagcaggcggctggtataagcgtcggactggccgcgcgctggtttccgcacatcgatgcggcaatgaaagaattcggcatcactgcgccgctcgatcaggcgatgttcatcgcgcagatggggcatgagtccggcgggtatgaaaaactggtggaaagcctgaactatgcagccgatcgtcttgttcccgtattcggcaaacgtcgtattactgagcagcaggccgccgcgctcggcagaacggcaacgcaaccggctaatcagaaagcgattgctaacctggtttacggcggcgagtggggcaaaaagaacctgggcaatcaggttgccggtgacgggtggaaatatcgcgggcgcgggctgaagcaaatcacagggttaagcaactatcgcaaatgcggcatggcgctaaaactggatctggtcacacagccggaattgctggaacaggacgaaaatgcagcgcgttccgcagcgtggttctttgccaccagcggatgccttgtgtattccggcgatgtggaacgtatcacgatcatcatcaacggcggtaaaaacggtcttgatgaccgccgtcgccgttttaatctggcaaaagccgtgctggtgtga

SEQ ID NO: 77197 - DNA, 276 bp, Citrobacter koseri
atgggacttgaaatgattatcggcctggccgcagcggtgattgccgctatcgctggtgcttttggtttcggccagttgcgcggcaccagtaaagcggaagccaaagccgaaaggcagcgcacagaagagaacgccgccgcatcggtagcggcagcagagcgacaggcagaagtaaccagagaggccagtgatgtgcaagaagctattaagcgtatgcctgatgacgatgttgatcgtgagctgcgcgaacaatttacccgccccggtagtcgttga

SEQ ID NO: 77198 - DNA, 297 bp, Citrobacter koseri
atgatggaaaaacagcaaaacggttgccaaattctgcctgtagcaaaagattttaaattctgtctgggccagctggttaatctgcgtatcagtgatgaatggggtgaagttcaggctcgcgcgcagtacctcaacggtgagaatcagtaccttgttcactatcaggcagctgataaatgcgctactgagcgctggtactcagaatcgcagttggtggcggtagaagacgatcgctctccgggtatgccggtgtttggctgcgttgagctgccggaaggtgcgacagtcgaagagtaa

SEQ ID NO: 77199 - DNA, 381 bp, Citrobacter koseri
atgaactacacacaggcattacaggtcatcaacaacattaatttagacgattggattcttagcaacgatgacacaccgtttgtatataaaaacgacatgaatctctcgtttaaaatcgtacgttcggacagctcatttaacgagcaatgggccacttgtcatcctgatcctaatgcaactcaggcaaaaggatatttttcatactctggaaatgttatccatgaggtgtatctggcatccattgatggggggcgagccttgctaccataccctgacatggcaacaaaaagtttcatcacgcgcagcgaatatctcatgtcgcaaatgttcaattcacagttagatcaatatcttcagcaaagcggccttaccgttaaataa

SEQ ID NO: 77200 - DNA, 144 bp, Citrobacter koseri
atgagcattttcaccctgctgggtaggaatgcgtggcaacctggctacaccaaaatcaagaacaccaacaaatgctattggtgttgtcttgacgaaactaacaatcctcaaaaaaaactgcaatttactgttgatattgcataa

SEQ ID NO: 77201 - DNA, 1554 bp, Citrobacter koseri
atggctgattactattctattattacaaaccgtggtaaagagctggaagcggaagcgctggccagcggcactgttatcgttctgtcctggtttgtggtgggtgacggcaacggcaaactggttaagcccaacccggcgcaaacccggctggtgaatgaaacataccggggcagtattgccgaactggttgtttctcccgaacagtcaaaccagttaatggctaaaattgtgctgccaacggacacaggaggctttactgtccgggaagtgggtctgctgactgatgccggtgagctttatgctgtggcgaactgcccgacgatcgataagccggtaggtggtgtcagtgtgaatatgcagtttcgcctggctgtatccgacacatcaaatatcactttagatgttgcgacgggagacgggctgtttctgcgcattgaccagaacctgaaagaaattaaagcgcggggggcagcagcacagaaggcgtcacgggaatcgatcggcgttgttgatgcgacgacaaaacaaaaagggcttgtccagcttaacagcgcgacgaacagcaccagcgagactcaggcagcaactccggccgcagtaaaagcggcgaatgataatgctaatggtcgcgttccagtcgaagttcgcggggttattcgcgatggtcagacaatggcttcagctaatgaaacagggtggtatcgtgttgcagttgtaaatacggatactgtttctgactttcctaaatacccgaatggaaactacttatacggctatggttatgtatttgttgtcgtttctgaaaatacatggcttcagcattattatgcccatcatggtgaggtagcttatcgccaggattggaacgcggggccaacagtcaccgttgggtgggacattgattataacactgctaacaaaccagttgaatcgtatccagttggtgcccccatcccttggccgtcagacgtgactcctgcaggttatgtgttaatgcaggggcaaacgtttgataagaatgcgtatccgttgcttggggctgcgtatccatcaggcgttattcccgatatgcgcgggcaaaccatcaagggtaaacctgccagtggtcgtgcagtactgtccctggagcaagatggtattaagtcgcataaccaccccgcatctgctgcaaatactgatctcgggacaaaagcaacaacgtcattcgattacggtactaaaacatcgtcgtcttttgactatggtacgaaaactaccaacagtacgggggcgcacacccatacattcaaaggtccaaaatttgaatggaagaccgcgcctgctaatggtgcctgggaaatgggcattaataccgacactacaacgacatcttcttctggagctcattcccatacagtaggtatcggtgctcactctcatacagtaggcatcggtgctcactctcataacgttactctgggcgcgcatagccacgcaattacagtttccgcagcaggtaacgcagaaaacacggtaaaaaacatcgcatttaaccacatcgtgaggcttgcataa

SEQ ID NO: 77202 - DNA, 579 bp, Citrobacter koseri
atggcgtttaaaatggctggttcggatcggattattaccatctataacctctccgcagatacaaacgaatttatcggtaaaggtgatggcttcataccggcgcatacgggtttacctgcatattgcactaatattgccccgcctgatgcgccggatggcttcgttgccgtgttcgacgatcaagcaggtaaatgggggcttgtcgaagaccaccgaggaaaaaccgtttacgacatccacacagggcaggccatcgcaattaacaagctgggtaatctgcctgatggtgttgtttcagttgccccggatggctcgtatgttaagtgggatggtaaagcatgggcgcatgatgcagaggcagaaaaactggcactggtagctcaggctacacagcagaaagagagccttcttgctctggcatcatcaaaaattgcacctttacaggatgctgttgatcttggtattgcaacagaagaagaatctgctcttttgattgagtggaaaaagtatcgtgtgttaattaatcgcatcactccagatgacgcaccggatattaagtggcatgaacaaccagcctga

SEQ ID NO: 77203 - DNA, 984 bp, Citrobacter koseri
atgactgcccctttcttgttaagcgttataatcccttgctacaactgccaggattatatttatgaatgcttgcaatctgtatactgccaaatcgatgatagtgttgaaatcattgtaatcaatgatggttcaacagataattctcttaaagagatagaactatttataaacaaaagcaaaaagaacactattaaattgatcactcaaataaaccaaggggtatccgccgccagaaacacaggtatcgatgcatcctccgggaaatatttggcatttctggacggagatgacctttgggactcatccttctggaaaaaaataaaaccgacactagaacccaatgatgttgatttagttgagtttaacgcgaacagattttacgatggatgtaaggagaaaataacacctgtatcaatcgtatcagcaaacgaacttttaacaataaattcagtaagtgacttgcgagaaacatttttaaaaagcgaatggttcccttgggccagagtttacaaaaggtttctattcgatacattgcgatttccagttggcagacattacgaagatatagccctaataccaaagacatatctttcatcaaagagggtcaaacgtatgaccgatgtgcttgttttatatcgagtcagacaggaaagtataactaataccccaaagaaaggtgatatcgatgacatagtatatgctttgggggtttttaacgaattacttaacacaaaatgtaagggcgagattgaaactatagccccctccgtccacttgacatttagtctggcaagaagaataagctcaagtgttcatggctattgctcctttaacaaagatcaaattcacgatataaaaaaagcgataaatccatttctaagcacacaaaaaacgagcaagaaaattaaattcttttttattcgagaatattgcctcataaaaaaaatcaaatataagcttagaacttatcgggcaaaagcataa

SEQ ID NO: 77204 - DNA, 570 bp, Citrobacter koseri
gtgtttgacggcagtgacagggtagatatagagcgtatccttttctggcagccagccaagcgcagccagcgtcttatactgagcgtgggggcgccctcttcaccggcgatttccaatttttgcctttacgactttgacagactgttaagcgaatcatgccagacaatgggggtggcctattcccgttatgctgacgacctgacattttcttgcagcatgccgaacgtattacgcacgctgcctgcgataattgaggcgctgctaaacaggctttttaacagaaggttacgcctgaaccgtgggaagactgtgttctcttctaaagcgcacaatcgccatgtcactggcgtcacactgagcaatgaaggtctcctgtctctggggcgagagcgtaagcgatacatcaagcatctgatcaaccagtaccggtatgatttgcttgatgaagaagataaggcgtatctggtagggctgctcgctttcgcgagccatattgaaccggagttcattcttagaatgaatgcaaaatactcctctgaattgatggatcgcatcaggagacacaagtga

SEQ ID NO: 77205 - DNA, 2151 bp, Citrobacter koseri
  misc_feature (1557)..(1566): n is a, c, g, or t
gtgacgaaacaactcgaacgaagcgccagaggtggaaacctgctcgccgcctttgaactgtatcagcgtggcacagacaacagtccgtctgatgagataatagagaaggcagaggaatggttctctatctgctggaattatctgcagaacgccgtgcgcgatgatgaggctaattacaagcctgaaaacgctttttgcattcgtacactgtcactgaccgattaccgtcgtttctcgcatcttgatgtgaactttgaagacgatctcacaattatcatcggcaataacgggcgtggtaaaaccagcattttatccgcaattgcgaagacactgagttggttcagcgcgaacattcttaaagaagacagcagtggacagcgactcagcgaatatactgacatcaaaaacgattcagtagacaaattcaccgatgtcagcaccagcttcttctttgggaaggggcttaagcatctctccgtgagactttcgcgatcggcactcggtgtggcagaacgacgagagagcatcgtcaagcccgcgaagtcgtttggagatatctggcggattattaatgaaacgagaactgtcaaccttcccacgtttgcgtattattccgttgaacgctcccaccctttgagtaagcctgccaaagatggaacggacagaagggatgaccgctttgatgcttacaatcacgcattgacgggccctgggcgttttgatcatttcgttgaatggtttattgcgctgcataagcgacgtgaggcgagtagctcttcgcagcttgatgaactgcaaactctagtcagagatctgcaacgctctgtagacgggggtatgctctccttaagaccgttgctcgatgacgcgcggcggaaaattcaaattgcgcaattaaaagatgtgacgacagcaaaaaacatgcactccgttgccgcacagatgacaatcgtcgcaagtgcaattacagcggttgttccaagcatcagtaatatttgggtggaaacggcttcaggtgcagatgtcattaaggtcaccaacgatcagcaggacgtatccgtcgatcagatttcggacggtcagcgagtgtttttagcattagtcgctgatcttgcgcgtcgtttggttatgctgaaccctgtgcttgttaatccgcttgccgggcgtggtattgttctaatagatgagcttgaactccatctgcatcctcaatggcagcaggatgttgttactaacctccgggcagttttccccaatgtgcagtttattatcacaactcacagcccaattattctttccacggccgagaagcgttgtataagggtctttggagaaaacagagaaagcgcagagtcatttttagagttgccgccgatccagactcgaggaagcgaaaatgcggagatccttgagcaggtcatgaaggttttttcccttcccccaaatgttgaagaagcccaatggttagatgatttcgaactggcactcacaggtgaatacaaagacctcagcgaaaccgcccgcacgatttatgacaaaattaaagggcattttggnnnnnnnnnncaatggggatatgttgacttggtcgatatttggtcacacctattactcatgcagggtggtttttgcgcctactgcgagtgtcggcttaaccgaaaacacgttgaacactttagacccagaaaagactttccggcactgacatttgaatggactaatttgtttggctcctgtggcgatacacacaaggcggggggctgggaacggtgcggcatatataaagatgacggcgctgagctctacgatgccaaccagcttattaagcctgatgatgatatcccggatgactatttgctattcctgactaccggacgtgtagtacccattccggggttaaccggccccgccctgataaaagcccaggagactatccgcgtttttaacctcaatggtgacccggcgctttttggcagccgaagagccgcgataacctccattatggctgaagttgaggagctttatgctgttcaagacgagattgaagaggaattgtggagtgagatgctccactttgagatccagcggttagaagacgttgagttcagcacggccttaaagcatgcttggcgatataacaatgcttattag

SEQ ID NO: 77206 - DNA, 531 bp, Citrobacter koseri
atggtgtcgcttgaggctgtttcacgcagtacacattcttttttcgccctgtacgataatatttcatggttggataatgccttcggcgatctgtttccttttagaaatatttgtaattccttgttaggagatgcagcaattaagtggtgccaagttttcggcaagaaaagcgaggggaatcactggaagaatctggtggatgacgaactcgtgtttaaagaaaagcttctggcgcatcttgatattacagaggagcattatttaacctactggaaagagatgacagagtttcgtaacgttgcgatcgcacatgccaacccggctttcttcaatgctgataatagtgttccgagtctaaaaatcgcgctgacatctacctgctttacacactgctatttgcgttcattactcgatgaacagcataggctttcccatccggatgatttgaacttttatggagtatgcgcagcggaggccattttgttcaaactcaacgcaccaggtaaatatagaagtgacatagtttgctga

SEQ ID NO: 77207 - DNA, 1242 bp, Citrobacter koseri
atggcaagaaaaaccaagccgttaaccgatacggaaatcaaagccgccaaacctaaagataccgattaccagctgtatgatggtgacgggcttactctgttaatcaagtccagcggtagtaagctctggcaattccgttactatcgacctctgacaaagcagcgaaccaagcagagctttggagcctaccctgccgtctcactttctgaagcgcgtaaactcagagctgaatctcgagttttattagcaaaagacattgatcctcaggaacatcagaaagaacaggtgaggaattctcaagaggccaaaaccaataccttcttgttagttgccgagcgttggtggaatgtgaagaaaaccagcgtaacagaggactatgccgacgatatctggcgctcgcttgagagagatgttttcccggcaatcggtgatatcagtgtcactgagattaaggctcatactctggttaaagcagttcagccggttcaggcaagaggtgcattagagactgttcgccgcctttgtcagcgtattaacgaagtcatgatttatgcgcagaacacaggcttgattgatgcagttcccagcgtaaacatcgggaaagcgttcgagaaaccgcagaagaaaaacatgcctagtatccgcccggatcaactaccacaactaatgcagactatgcgcacggcaagtatcagcctgtccacacgatgcctgttcatgtggcagcttctcaccattacccgccctgccgaagccgctgaagctcgatgggatgagatcgattttgatgctagcgaatggaaaattccagcagctcgaatgaagatgaatcgggaccatacagttccattatctgatggagctctcactattctggaaatgatgaagtctctcagtggtggccgggagtttatctttcccagtcgcatcaaaccaacccagccgatgaacagccaaacagtgaatgcagcgctcaagcgtgctggtttaggaggagtactcgtttcacacggcttacgttctatcgccagtacggcactcaatgaggaaggatttcctcctgatgttattgaggcagctcttgcccatgtagataagaatgaggtccgtcgtgcgtataaccgcagtgactatcttgagcagcgtcgtccaatgatgcaatggtgggctgacttcgtaagcaaggccgacagtgggagcattgttgaaactgggaaaagaaagttaaaacttgcggtctga

SEQ ID NO: 77208 - DNA, 567 bp, Citrobacter koseri
atgagtcatttcaaaggtacagatatatattttataaaagagctgatctatagcaaaggcggcttacccaccattgcaaatactattggccctacaggaatacaggtattaaaacaggtttatcatttaatgtgtgaacagcaggctttttataatggaaaaccattggattataatcagttaaatttatgggataaatttagaatcacacttggacttaatattacagaaaaaactgaagctaatggcaaaacaacttttaacttcgaatattgtggatttactacttttatcactccggttgatggttttggcaggatgttgccaaagtggttctcgaaaaaacataatacaagcgtcccaaccccctatacattcggccgggatcctattcctggtataaatctttatcgtaatacaaaagcaaaattctttatggctaacggtggtgatagtgttccttgtgcaatggcaaaatataacgcaaaatcaggacaattagtttatatcgccagtgaaaatgaatttttacatatgatgcgagaaacaagagacatgaaaaaataa

SEQ ID NO: 77209 - DNA, 744 bp, Citrobacter koseri
  misc_feature (709)..(736): n is a, c, g, or t
ttgattaagaaaaacaaattattgttaccagcactacgaggtgttattggggattgggtatactattcttgcttgatgccaattcctgagttagctgcacgtgttgattacgcccagaatattcataatgataatgccttatcaaagatgattcaacgaagccttgaaggaccaagggcagaacatattgcttcatatctcgagaaaacagaagaaagatttttcaattcattggttttagcaacctacgatggtcgccctgaatggctagaaatcggtgattttaaagcaacaactgatgacagtttaaatgacttcattagtgaaaacacaaaagatacactaggtttcttgagcctttcaggcgatgagaaaatatttgcagttgatggccaacatagactttcaggaataaaaaaggctatagccaataaaacaagctttggagatgaaagattatcagttatatttatagctcatagtgagaaaaaaagagaacgaacaagaaggctttttaccacattaaataaaacagctaaaccagtgaagaagagcgatattattgctttagatgaagatgacaccatggcaataataacacgtagactcatcgagaataacagttggttttcgtctcccaaaatattgattaatgccagtgaaaacattccagctactaacagggtttgcttaacaacaatatctaatnnnnnnnnnnnnnnnnnnnnnnnnnnnntgctttag

SEQ ID NO: 77210 - DNA, 516 bp, Citrobacter koseri
gtgagtgcacgaaaaggcgagcttaatgatctaattgctgatatcgatcatcacaaatccaattgttggtcaatatatttagatctaaaaaaatggcgtgacttcaattccacctaccctctcagatggtcacgttttaggtttgaactaaaaaacaaaggattaatacctaaagaaaggggaatatatgcgttcagtatagcattagagccttcatcattgccagaacatggatatatcctttatatgggtattactggcgatgattccggaggaaatctatataaacgttacaaccaatatcttggttattttaaacggaaagatggaaggcctaaagtttataatatgttgaaacgttgggaaggggatcttttctttagttttgtacctattccagataaacgaatgagtttaagtaaattagaaaccgaatttctaaccgcgataaggccacctgttaatgaaaaagatttcgaagctagaatatcaaacgcaaggagggctgcattttga

SEQ ID NO: 77211 - DNA, 258 bp, Citrobacter koseri
atgaagcggctaatgctatccggcaccctgctcctggtctgcatggtagtgatgttttatctggctgctgacaatacaccgcagattaaccgcagcgacctgctgccctggcgcataatgctgtacggcgttgtttgtggtgtgggctggcatctgtacgaccgcttacccccacatcgtccggcaatccgccgtatcgcgctgatatttatcgtactgattgtactcaacgaaatcgtgccggaggtgttccggtga

SEQ ID NO: 77212 - DNA, 1608 bp, Citrobacter koseri
atgacaacttatctatcaaagaatatcagccggtataaggggagtaatctgcggtacaggttattctttacggcactcacgctgttattttctttttccctccacgcacagtcactttatatagattgctccgctaccgttgacggtgatggctctgccagcaatcccattaattcgatcagtacgcttaacaaccatgagttgcatccgggagacagcatactgtttcgccgtggcactacctgtaatggcgaagtggtcgccgcaacttccggctcagagaatgccccagttatctatgatgcctggggcgaaggaacggcgttacctcgcatagaagcaaacggcaacgaagcggctttccacatgacagatgtcagttgggtaacgttacagaatctggagctttcggccaacggcgatggaaaatccccccgccggggattatgggttagcgccaccgacagtggagaacatcaggggatccgccttcagcacctgaatattcatgatgtccgtggagaaatgccagccacaaaaaatccttcggacagcagcataggcaaatatgcccatgcgtccggcggcattgtggtggaggcgctcggtaacaccgcacccacctggtttagcgggctggatatcagcgataatattattcacgccgtcgatcgcgagggtatctacacctggtccaactggtgtcagcgcccggaactggtcgagttctggtacagcttatgtactgcgaagtggcagccattcaacaatacccatatcagccataatatactttctgacattggtggcgatggcatcgcgcccatgaccagtacgaacagtacggtggaatacaacgtactgaacggttttaatatgcgctccggctcgccaaatgcaggaatgtggtcggccaacagcgacaatatcgtttaccagtacaatttcgcttcaggtggccataccacacaagacggtatgtcttacgatgttgatcactcaacgaatggcattgtctatcagtacaatatttccgtgggcaatgaaggcggctttttcctgctttgcccctatggctatgatgttcccggcaaatcgcgcaatttcgtgatccgttataacctgtccgtagcggacaaaacccgcaccttccaggtatgcagcggcggcgtgattaacggccagatctacaataacaccattctgctgccgccagacacaaccagggcccatcttattctgacagaaggggcaaccaacgatggcgcagttgagctgaagctgactaacaacatcctgatgggtgatggctccggcgttactccagtctgggactacaacgactccgccattactggcgaccacaatctctacaataatgttccggtaatgccctctgacagttatgcgttaatcgacgatccacgactggctaaccccggtccggagaatgtgctctggcgggactatttaccgcaacccggttcaccggccattaatgcggggatcgctgttactggcgctcctgcacacgatgctttaaatcaggctatcggaacaccaccaacaatcggcgcactggaaccggaaagtagctcccggcgataa

SEQ ID NO: 77213 - DNA, 1245 bp, Citrobacter koseri
atgattaaaacacatgacacccgatggaatgtgatcctctggggattctttttcctgttctattactacaactggtcttcctgcttcctgtttttacccatgtggctaacccggatggtggggctggataaaacgcatattggtatggtgttttcttccttcgccgttgctgctatctgcctgcaaccgctgctgggctgggtaacggataagctggggccgaaaaaacacctgctgtggctgatcgttatcctgatggtgctcttcgcgccgttctttatctacgtgtataccccgctgctgcaaagccattttgcgattgggctggtggtgggcggtctgtatctgggatttatcttccacgcaggctatggtgcggtggaagcctttgtcgagaaagtcagccgtaatcggggctttgaatatggacgcccccggctgtttggctgctttggatcggcggcctgcgcgactatctccggtattctttatggtttcgatccgacatggatttactggattggttcggcgttggctttattgctggtggcgatcctgctggttgctcgttctgagccgctgccaggtattgaggcggagcaggtccgccagcaaaaggtgagtgtgctggagttattcaaacttcgccagttctggtatttcacattatatgtattaggtgttgcctgtatttacgatgttttcgaccagcagtttattaatttctttacccgtttcttcgaccatcaggaacaggcggcaagagcattcggttatatcactaccgccgggaatctcggtgatgccgccgtaatgttttttattccactgctgattaataaatatattggtagcaagaatgcactattaattaccggtaccattatgacgattcggatcgtcggttcatcatttgccaccgggccgattgaagtgctcttcttacggatgctgcataattttgaagtgcctttcctgctgattggtattttcaaatatattgctgacgtttttgatactcgtctgtccgggaccatctatctggtgggcgtgatgtttatcaagcagtccgccgctattattttatcgaccgtcgcgggtcatctctacgacaccatcggattccacagcgcctatctgatcctcggcagtatcactgctgcgtttactctgctgtccgctttcctgctgacttcaaccccacgccagaaaatggcggacgcccgcaaacccgccacactctaa

SEQ ID NO: 77214 - DNA, 1293 bp, Citrobacter koseri
atgcaaccgaatattctggtctttttcaccgatcaacagcgttgggatacggtgggctgctacaacccttccgtcagtaccaccccggtgctggaccagcttgcccgcgagggcgtgaagtttgaaaacgcctttaccgttcaaccggtctgcggcccggcgcgttcctgcctgcaaaccgggcgttacccgacgcagaacggctgttatcgcaataatatcgccatgcggcaggatgaagtgacgctggcgaagctgttcaatcaggcgggatatgacactgcctatattggaaagtggcaccttgcagatctggatgaaaaaccggtgccggaagaactgcgcggtggctggcaatactggctagcggcagatgcgctggaacatacgtcgcacccttatggcggtcacttttttgataatgataaccagccggtgcatttcgatggctaccgggtggatgaccagaccaccttcgcgctcgattacctgaaacagcgcccacgggataacccgttcctgctgtttctttcttacctagaaccgcacttccagaacgatatggcgcgttttgtcgccccggatggctacgccgaacgcttccagaccgcatcggtgccaccggatctgattaaccgccccggcgactggccgcagaacctccctgattattacggcatgtgccagaaccttgacgaaaacctcgggcgtattgtcgattacctgaaggccagcggcgaatacgacaacaccattatcctgttcttcagcgatcatggttgtcacttccgtacccgcaacgatgaatacaaacgctcgtgccatgagtccagtattcgcattccctgcgtggcgcgaggggggccattcagcggtggcaggacggtggagcatctggtgacgttgctggatatcccacccacgatgttaatcacagcaggcattacggtgccggatgcgatggtggggcgtgatctgcaaaccgcactggatgctgaacactgggacgaggaggtattgatccagattagtgagtcggaagtcgggcgggcgctgcgcacatcgcgctggaaatatgaaattgtcgcgcccggcagcgatccgtggaatgaggcagccgcagagatctatgtagagagccagctttacgatctgctgaatgacccatgggagcgccagaacctgattgccagcccggaacatgcacggatccgcgagaaattacgtcaggatattggtcgcaaaatgacggagattggtgaagacctgcccgtcattgttccggtggagtaa

SEQ ID NO: 77215 - DNA, 801 bp, Citrobacter koseri
atgactgcatggatgattgtcgcactttgcggctgtggtatggcaaccagcctgctctcggcgctgttcggcgtcgggggcagtatcctgctcgtgccggtgctgcatctgctgtttccgcaatgtgctgtgcaggtgctggccgcgacctccttgacggtggtgatgctgagtgcgttgattaacgtctgcgccttctggcgacaagggatccggttaaatacacggctgctggtgctctggtcgctggggatggcgacgggaatgcaggcgggcgtgtacgccagctttttgctgtcggataaggtgctactgatgttgtttgcactagttctggtggggctggcattacgctgtggattttcgcaccagacaaccagcgaaaacgtccagttagacaaccggacgcgcagcgccgggatgttgttgtgtaccgccggtggtgccgtagccgggttaaccgggctgggcggcggttccgtgctcgcgccgctgatgtcccagctctccgggatcccacgtcagcacatcgcggtgtactgcaactggatgatgctgttcggcagtgccggaacggtcgtcagctatctgtatcgcacggcaccggatactggtgcattgccaccggcgatgcagtttggttacgtcaatatggctattgtggccgtgatttttctctgcacactggcgttccagccgatcagcatgaggttgcgcactctgctacctgaatgctggttacagcgcgttttctccggcgtattgctgatgatagccacgttgattctggtgacgctatga

SEQ ID NO: 77216 - DNA, 1152 bp, Citrobacter koseri
atgaaacacgctttccatctgatggcaaaacctacgggctggcgctgtaatctggcctgtgattactgtttttacctggcaaaagggcagggggggttgcgggatacctgcggacagcggcatatgtccgataaggtactggaggcgtatgttcgccagtacattgcggcatcgtccggcacggaggtgaactttacctggcagggcggcgagcccacgctggccgggcttgatttttatcgccgggccgtggcgctccagcagcgctatgccggagataagcgtattaccaacagccttcagaccaatggcgtactgattgacgacgaatgggcagtatttctgtctcagcatcggtttctggtgggcatatcgctggatggcccggtgcatctgcataaccattatcgcaagacaggcagtggtaagcccgtgtttgagcaggtgatggcggcgctggactgtctgaagcgtcatggtgtggacgtcaatatcctgaccgtagtgaacaatgtgacggcacaagctccactggaaatttaccgttttctgacgcgtgaagtgggggctgaatttctccagtttattccggtggtggagtatgacgcccaatgtgggctattgccctggtcagtgacgggggaagattacgggcgatttatgagcgccatcttcgatgagtgggtacgccatgatgtcgggcgggtatttgttcagctttttgataacgcactggcggcgtggttgggtgaacacccggcgctgtgcgtgatgcagcccacctgtggacgcgggctggtggttgagcagaatggcgatatctacagttgcgatcactatgtggatgcggaacaccggctgggtaatctgctacagcagccgctggaaaagctggttgtcggtaaagctcaacggcggttcggccagcagaaagcgcaactaccagatgattgccagcgttgtccgtggcgctttgcctgccagggtggttgtccgaagcatcgactacacgatcggttgaaccatctgtgtgccgggtatcgcatgatgttcagccatatagatccgtatatggcttatatggcccagcagattcgtgtgcagcagtctccggccaaggtgatgacggtgatagatagtctgaagaagtaa

SEQ ID NO: 77217 - DNA, 738 bp, Citrobacter koseri
atgattatttccgacgccagcctccacagtatctttacgccagctcaggttcagcaggccgccataccaccgccagcggaaatgccgtttctcgcagctccggtgcgtaatcgctccatcttccactacacccacttttcccgtcatgccctgctacgccctatcgctcgtgaaacaggaagtaaaatctatctacaggaagaacccatctgcggtttttggtatctcaaccatggcgtcgtcggtttacaccacacgctggaaaatggcaaagaaatgctggtacgcgcctgccaacaaggggactggtttggctatctggggttgtttggctcggagttctaccattgccacgcctgcgttttgcagacagcatcgctgtgccacgtcattcctcactcaaacagcgattttctgcgtcatcacccgctgttcgcccaatttctgttaaatcaggtggtggcaagtctgtccggtgcggagcatcgcatggcctggatcgcccgttaccgcacccgtcatcgggtcctgagcagcctctggtatctgacgcggtattttcccggctatgactggacgtggcgtgaagtggcagagtttgccggatgcgagacagaaaccgcattacggttcagcaaggaattgagactggccgggatattggatgactcacagcgccgcttgcacgtatgtcacccagaacaactggcggcactacttgctgggactcataattag

SEQ ID NO: 77218 - DNA, 261 bp, Citrobacter koseri
atgactaagcaagactggcacccagccgacatcatcgccgcactgcacaagcgcggcaccagtatggcagcagtttcgcgggaagcggggctggcgtcctccaccctagcgaatgcgctttcacgtccctggccgaaaggcgagtggctgattgctcgcgcactcaacattcacccggcaaaaatctggcctagccgctatgaggaagaaggcgaactgcggcaaccgaaaaatccgctccccgtcaggtgcaggttatga

SEQ ID NO: 77219 - DNA, 237 bp, Citrobacter koseri
atgtcatctatttattctgaacagtatcagcaggttataagactgttgcgttcggcgagacaggatagaggcctgacgcaagcacaacttgcaaaagcattaggtcgtccgcagtcatttgttgccaaagttgaaaatggtgagcgtcgtctggacatcatcgaatttgcccatattgctcatttgctatctttggatcctgctgccgtactgaaaatggttttgcctcagaagtga

SEQ ID NO: 77220 - DNA, 225 bp, Citrobacter koseri
atgacttctgtctactccattgaataccagatggttataaaggcattacgtgaagcgcgggttgctggccatatcacccaagaagagctaggcaaggcgctgggaagaccacaatctttcatcgcaaaagtagaaaacggagaacggcggttagatatcgtcgagtttgttcatctatgccgattggttggtattgatcctgtcagcatcattaataagctatag

SEQ ID NO: 77221 - DNA, 1323 bp, Citrobacter koseri
atgtcagagagcctgcaatctaatacaactcaaacgttacctgacgatagggaagagctgtatcaccttgtctggcgcgagcctgcggagcgaatcacttccctctatagcatcagcaaagaacaactgacaaaacgatgcgctgaattacgaataccgagaccgctcgccggatactggaaggcgctagcgaaaggaactgccccggcggtacctgcgttgcctgatttgaagagtggcaaggtagaaaaatttcccagaaaaaccagccagaccactcctcctcccacaaaaatatcatcgaaagtagcagtgccagcaccgcgaaagcgagcaaggacagcgggtagtggctatgcactgatcgatgacctcaaaacttaccttcctgtctcttccgtcacaaaagacggctactacaaaccaacgaaaaagaaactactcgatctcaacgtttcagaaacgggattcaacagtgctattgattttctgagtcggttctttgctgcactgggaaagcaagggtattgggtacgattagctgaaagcggtgagggacttcattgccagggcatcgatatcaaagaagatccaaaagaaggaggtttgcgttacgacagtttatggcgcccttgttcagccagtattatctgcattgaagatatgctgttcggctttagcctggctgaaatgacggagtatgttccagcaaaagaagttaatggtcgatacatccgtgatgaaacgatgatccgctggataagggaaaagcatgacaagccatttcgctacgtcattaggcatgccttacctacagggcgatttctgctacagctctactcgccgtattcgtcaacaaactggcaggtgcaatttcgacagacaaagcaatgtggccttataagccagatcccgaagctcatttctgcgatgcgtaatgctgttccgttgattaagaagcaacaggaggaggccagagttaaagctgaaaaacggcggattcagtgggaacttgatgagaagagatatcgggaaaaggagcggatcagaagggaaaaagaggcatataacgccagcttggccgagctgaaagctattatggtgcagtgggcagaagataagcgtgttgagcagttttttcgtgaggcggaatcggatgcatctctacttggagaaaagcagaaggaacaggtaatggaacgtctgcggctggctcgtcaacttttatcggttgatacggcggttgagagattgacaaaatggaaaactccggaggagttattagttataaataatagtaggctctatctcggttacgaatga

SEQ ID NO: 77222 - DNA, 1836 bp, Citrobacter koseri
atgtcagttaagttagaaaaactaattattagtaactttaggtctattggcgctgaacctgtttccgtagaactggatgatatagttatattggttggaggaaacaatttcggaaaaagtacaattcttaaagcatatcaagcggcagttaacagtgaaaaaattagcaaggaagattttcacaataaaataactaacgatccagattcttatccagtgattgaacttcacatgatttgcgatggtgatgataggcctggagtgaattttagagatattttggaaccgagccttggccagaatagtcctgttcgtgtaaaagagagatttatttggagtgaaccagggaaagttcctcgaaggttaggatttaggacggatcttggtcgatatccgaatacagattctgatgatgcgccatatcaaccatgggctacagataatgcatctcgaaagaaacgaccaaaagcacatcttgttggtactttcgataatcctgatcagcaaagcgattcaattaaaaatattttggtcgatgttttattagagcaaaaaataagaaatttcactccttcagagcaagttattccttattcatctctttatgaacagtttaatagcctaaaagaagaatttgttggttcgactaagaacgcattagatgaaattgcagatgacatttctgcatatgtttctaaaattgtccctgatcataagttggatatttctcttcaatgtggcaacgtagctgattccaatattaaattatttgattgtaatgagttggaggtttcattcggtaaagagaatcagatgtttccggtttcaaatcacgggagtggtgctaggagaacattattatgggctgtgcttaaaaaaatagctgagttaggttatgagtcttctgataaaggaaaatacaaagcacttggtgatataaaggctcatcttctattactcgacgaacctgagttaagtttgcatccctacgcatgtagagaagcgcgagatatgctttatgatattgctgaaaaaaatgaaaattggcaagttatgattacgacgcactcaccaagttttattgacttaacaaggcaacatactaaaataatccgagttgagaatgagaataataacatcattgcgacaactatatttaaacctaacgatgtcagtttctctgccgatgaaaccgaatcattgaaattattgaacttattgaacccagatacaatggagtttttctttggcggtaaagttttattagttgagggagacaccgagtactctgcttttggtaaaataataaaggatgcaaaaaataatggggaggatgattttaatgatttgttaattgttagatgtggagggaaggttcaagtcgctatgtttatgaaaatactaaatcatttcaataaaaaatattgtgttttgcatgatatagatgcaaaacaaattttaaaaaatcgttggattaaaaatgaacatggtgttaaagagaaaactctcagaatagaggctaatcccgcatggagtaataacgaaaaaattaatgcagagatgaccgagtttagtgatgtatatgcttcagttattaattttgaaacggcatacttcgatcatggtatcgattcaggaaagcctgagaatgccataaacatgttaaagaatacagacgtatatggtgtcgtgaagaatcttttgttgggtattgttaatgcagatgaaaacctgcttcctgaaaatactattagatggactgagttgtcgcaaatcagtgataggtttgattcatatgttcaatctaacccagaggtgattcccaccgccccttga

SEQ ID NO: 77223 - DNA, 2646 bp, Citrobacter koseri
atgatgcgcagcggcaccctgaccgaacaaacggtggacagcctgtaccagaaaggtacgtcgttcgtcgattttctgccgtgggttgaataccagccggaaagcaaaacgctgctgctggatgacgggcgctcggttggcgcagtgtacgacatcacgccgtttggcaccgaaggccgctctccggcaaggctggaagaactgcgcgatatcctgaaggacgcgctccaggacagcttcacggaatacgaccgccatccgtgggtggtgcagttttactgtcaggatgaggacgacaccgcaagctggctggccgcactgcatgactacgccgtaccggaagcacggaactctgattttacccatgcctggctggaggaaatggaacgccatctgcacgcagtttcctgcctggaaggctacttccttgacgatgccgtcagccatacccgctggcgtgctcagcagcgccacacccggatggtggtctaccgctggctacccgccaaatcccgcgatccgttggaagattcgccggaagaggcgctgaacaccgtttgtgaacgaatgatatccgcgctggcgggcgcaggtattcatgcccgtaggatggaatgtgaggccattcgccactggttactgcgctggtttaatcccgccccacagatggccgactcacctcagcagttctggcaacagatggcgcagcaggatggcacgccagaactgcacgactttgccgagagcctgctgtgtagtgagccacgatcactggccgcacaaggtgcatggctgttcgaccagcgtccgcataaggtcattgtgctggacagactgcgcaaaccgcccaccgtcggccatatgaccggagaatccgctcgcggtgacggcattaacgcactgttcgacctgctgccggaaggggtaattatggcgctgaccatcgtcgtctggccgcaggatcggctggaggaacatttaagccgcctcagcgaccgcgccatcggtgagaacgtcgaatcggagtacaccaaaaaagactgtcaggaggtgcgccactggctgaaggacggccacaaactctaccgcagcgcgctggcgttttatctttccgccccggataacggcgaactgacccgacgcgtgcgcagcctgaacagcctgctgctgaacgcgggtatggttccggtacaggagaatgacgaactcgccccgctcagttcatggctgcgctggctgccgatgtgcttcgacccggcgcgagacaagcgccagctctatagccgcttcagcttcgtacagcatctcgccaacctgctgccactgtttggccgcgagagcggcaccgggcatccgggcgtcagctactttaaccggggcggcggaatgctgtgctgggacccgctcaaccgcgaggaccgcgcccagaacggccacctgttgctgctcggtccgactggcgcaggcaaatccgccactctgaacgccaaaatcgcgcagctgatggcgctgcaccgcccgcgtctgtttatcgtcgaggcgggcaattcgttcgggctgatggccgattacgcccgtgaacatggcctgacggtgaataaaatcagcctgaagcccggttctggcatcacgctgccgctgtttgccgatgcgtggaaactggcggaaagcgatataccgtcaacagaaccggatgatgacgatcccgaagacgccgataacgagcagcgcgatctgctgggcgagatggagatcacggcccggctgatgatcaccggtggcgagctaaaagaagacgcccgcctgacacgttccgaccgggcattaattcgcgaagcgattctccatgccgcccggctcaccgcctgcgagaaaagacaaacactgacgcaggatatccgcgacgccctgttttcgctggcacaggatgcagcgctaccggaatcccgccgtaaccgactgtgggagatgggcgaagcaatgaatatgttctgttccgggtttgagggcgaactgtttaaccgtgaaggcgaggcgtggccggaagcggatctcactctggtggacctggcaatgtttgcccgcgaagggtacgaagcgcaactggcgattgcctatatctcgctgattaaccatatcaacaaccttggcgaacgcgaccagcacctggcccggcccatcgtcaatatcaccgacgaggcgcatatcatcaccgtcaacccgctgctggcgcggtttctgaccaagggttcgaagatgtggcgtaagctggggatctggctgtggctggcgacgcagaacctgagcgactttccggatgatgcgaaaaagctgctcaatatgatcgagtggtgggagttactggtgatgccgcccgaggaggtggaacaggtcagccgctttaaatccctgacgcaggaacagcgtcagctactgctcagcgccaccaaagcgccggggaaatataccgaaggcgtggtgctttcgccgcgcgtggaagcactgttccgcgtggtttcccctgccctgtggctggcgctggggatgacggagaaacatgaaaaggcggaacggatgcggattatgcgggagtttgggtgtagtgagctggaggcagctatcaaaacctcaaagaaaacgagctag

SEQ ID NO: 77224 - DNA, 390 bp, Citrobacter koseri
atgcgtaccctgattttgctgttatcgctgcttctgaccgcctgtagcacagaccagaaaacgctgctgccggtggatgaaaacaccaccatgctgaacatctggggcagacagaataacgatgcacaggcgctgtacgacgcacgctcagtcctgcgtcgcccgctggatgacgccacaatgaccgcgcaacaacagcagaccacacgcagcgacgacaatgccacgcaagcgctgttccggcgactgccgaatccggatctggagttgtatatcttccctcatctggcgggtagtgaaggtgtcccggtgccgggatacaccaccgtcttccccttctataaccgggtgcaatacgccctgcccggcgagcggaccgatccgctgtga

SEQ ID NO: 77225 - DNA, 1338 bp, Citrobacter koseri
atgaagcttcaggcgaatatcctgctgcgggttctgacgccgcttatcttgctggcgggcagcgtcctgctgtttcatgcctgtcaggaccgtaaaaccaccccatccaaatcctctgcgcctgcaacggccctcagccacgacgagctgaaagcgctggggattgagggcgacacgcccgccgataccgtcgccacgctggtcggccagatgaagctctggcgcaaggaactggaaacggtaaaagccagtaacgccgcactgttacaggaaaatcagcgcctgcgtgaacgcgaacagaataccgacagccgcatcaatgaggccattaaccgccagcaaaccagctcctcagagcagcaaaacgaattactcagctcgttacagacgcagatccaacagcttaagggaaacaggacaacagacgactcactggccgggctggggattgatgaaccggaaacgacctccggcgaaccactacgctggatagcccccgccgatgctctgccaacggataaaaacggtcgcccgctgcaacctgcgctggcctttccctccacgatgcagaacaccgttccacaacctgaaacactaccgccagccgccgtcaaaccggtctacaccctgccgcagaacagcacgttaatcggctcggtggcgatgaccgcgctgttggggcgcattccgcttaacggcagcgtcaccgatccttacccgttcaaggtgctgattggccgcgataacctcaccgccaacggcatcgagttgcccgatattgaaggcgcggtgatctccggcagcgccaccggcgactggacgctctcctgcgtacgcgggagcttaacgtcaatcacctttgtcttccgcgacggcacggtacgcacgctgcctgctgaaggcgacaaaaccggaagcggcacggaaggcaatatcggctggctgtccgatcctcacggcctgccctgcatccccggcgaacgcaaatccaacgccgcagaatatatcggctcgcagttcctgctggccggatcgtccgccgccgcgcaggcgctggcgaacaaccagaccacctccaccgtggaggatggctccatcaccaccgcgctgacgggcgacagtgggcagtacgtactcggccaggcgctgggtggcggtctgaaagaaagcgccgactggtttaagcaacgctacggccagatgttcgatgccatctacgtgccgcccggccaggccgttgccatccatatcacccgccagttagccatagactacgagcctgacggacggcgagtgaactaccgcacggcaggcgaacgcactggagacctggactga

SEQ ID NO: 77226 - DNA, 789 bp, Citrobacter koseri
atgaatgtctgcccactgctaatcctgctggttgccctgcccctgcacgccgtcgaactggtgaagtgggaacgcatcccgctgccagtggcgctgaacatcgggcaggagcggatcgtctttgtcgatcgcaatgtccgggtgggttatccctccgcgctggaaggcaagctgcgcattcagagcagcaacggcacgctgtacctgctcgccagccagtcgtttgccgccacccggctacagcttcaggacacagagaacggcgagctgattttgctggacgtctccgccagcaagggtgagcacatccgggagccaatgcgcattgtccgcgaagagaagaaaacgcctgatgcgaagcccgatgcagttccagaacccttaccctccacgccgcttccggtcgcgctcacccgctatgccgcacagatgttatatgccccgctacgcaccgtggaacctttaccgggcgttcagcccgaaggcgtgcgactggcaaaaaccatcaccacgctgctacccgctctccccgtcaatgccataccgatcggtggctggcggctggatccttatcacctgacggcgatccggcttcagaataaaagcgccacccggctggaactcgatccacgccagcttcaggggcagttttacgccgcctcctttcagcatcgctggctggggcctgcgggcagcgccgaagacaccaccgtgctctatctcatcacccgcaatcagcgtcctgagcaggcgatcctgccagagcctgagccggagaagaaaaaatga

SEQ ID NO: 77227 - DNA, 627 bp, Citrobacter koseri
atgagcgcctttaagcacgcactggccgcgcgggatgcgcatatccgcactctgcatattgcgctggtcgcgttattcctgctggcatcaggcatgggattcggctggtacagcgctccacgccagcttacagtatatctgccgccggatctccgcgccgccagtcagcgtccgtggtgggaagtgccgcccgccacggtgtacgcctttgcgttttcggtgtttcagcagatcaaccgctggccgaccaatggcgaggccgattatccccgcaacctcagtgcgctacgggcatatcttacccccggctgctatagccagattgaccatgagtttcgccagcgactgcaaaaaggcgagctgcgcgaccgggtgcgcggcgtgtatgaaatccccggtcggggattcaacgacaagcgggtgcagatcctcgaccgtgacaactggattgtgacgctggatctgaccgtcgatgagtatttccactctgaacccgtcaaaagggcgatggtccgttaccccatcaaagtgctgcgctataacattgatcagcagaaaaatccgtggggactggcgctggactgtttctcatcgccgccgcagaagctggaggcggctaaaccatga

SEQ ID NO: 77228 - DNA, 354 bp, Citrobacter koseri
atgagcactatcccctttctcccggaacggctgaaccgcgagcctgcggtgtttcgcggcctgacggtcagcgagctgctgatagcgctgcttgccgggctggccgctggcgcagtcgctggagccattccggcagtactatggcgcaactggagccttgtccccggcagcgccctgcccggcgctgcgctggcgatcctctgcggcgggcgctggctggcgcggctaaaacgcggacgcccggagagctggctgtatcgggcgctggagctcaaactggctcgcgtcgggatcggcgcacaacgttttgtcctgcacgatggcgtctgggccattcgccggagccgacgatga

SEQ ID NO: 77229 - DNA, 327 bp, Citrobacter koseri
atgaaaaaacgcatcttcagatggctgctgtggttcccgaccctgcctgcatatgccgatctgccagagatggaagatccctcacgcggtcagggcgacggtatcatggaaaccttgcagaactacggctatgacatcgtgatcctgatgacgctgggcatctgcgccgtgggttttctggtggtagccaacaactgcatcgccacctactccgaaattcagggcgggcgcaaacagtggaaagatttaggcgcgatggcgggcgtcggcgcggttctgctggtgatcaccatctggttgctcaaccaggcttcggacatcctgtaa

SEQ ID NO: 77230 - DNA, 234 bp, Citrobacter koseri
atgagccctgaacaaatcagcgccttccaggccgccagtctggtgaagcccgatgctgtcagcctggtgatgctcggcctgttcagcgcctttctgctgctgtgggtggtctgggtgctgaatgatgcctaccggggcgtagcaaccgcacgggtgagctggcgagcattaggcagcatcggtgggcgaaccatcttactgctactggtcagcttctggctggtactgagctag

SEQ ID NO: 77231 - DNA, 321 bp, Citrobacter koseri
atgaaacctcgctatatatttgtcatacccgccatagcactataccctgcaatggcagccctcgccgcccccctcaccgagcgcgaagagttaaccctgtccctcaaccagcttagccaaatcgaagcctcgctcaaccgtgcccagcaaagcgccagaaccagcgtcagcgagcgctactacttcgactatctgcgcatccacggtgatatcgccaccctgcgcagcgggattgaacattacctcacccccacccgcgcccagccgagagatacggcagcacttgtcgggcaataccgtgaggagaaaatcaaaccatga

SEQ ID NO: 77232 - DNA, 819 bp, Citrobacter koseri
atggaaacctatgccgtttttggtaacccgattgcgcacagcaagtcgccatttattcatcagcagtttgcgcagcaactgaagatagatcatccctatgggcgtgttctggcgccggttgatgatttcgtgaatacccttaatgccttttttgcgcaaggagggaaaggggcgaacgttaccgttccttttaaagaggaagcgtttgcacgcgcagatgaactgacggagcgtgcggcgcttgccggggcggtgaataccctgaaacgccttgatgatggtcgcttgctgggggataacaccgacggcatcggtctgttgagcgatcttgaacgtttgtctttcattcgtccggggctacgcatcctgctgattggggcagggggggcttccaggggcgtactgttaccgctgctatcaatggattgtgcggttactattgcgaaccgaaccgcttcccgtgctgaagaactggcgcaaatcttcgctcataccggcagtgttcaggcccttcgtcttgatgcgctggaaggccatgaattcgatctgatcatcaatgcgacatccagtggaattagcggtgatattcccgcgatcccgtcatcgctcattcatcctgctgtctgttgctacgatatgttttatcaaaagggaaatacgccgttccttgcctggtgtgcggagcaaggggcaaaacggtatgccgatggtttggggatgctggtggggcaagccgcgcatgctgtttttctctggcatggcgtgttgcctgacgtggaacctgttattgcaacgctgaagcaggaactgtcggcatga

SEQ ID NO: 77233 - DNA, 2004 bp, Citrobacter koseri
atgtttgatggccttattcgcgaacaggatattgcttgggcagcagcactgatgggagttggagacgatggttttgctccggtcggtgatgatgatagtcggcttaaagcaatgctaaatctcgacacgaccgatttcgaggcatgtcccggaagtgggaaaacaacattgcttgttgccaagctagcgatattagcaatgcgttggccataccgccagcagggtatttgtgtactttcacacaccaatgcagctcgtaacgagattaatgctaaactcagcaactcagctgcagggatcgcactctcacggtacccacactttgttggaacaatccattcgttcgtcaatgagtttctggccctgccatggctacgctcgaagggtatagctgtgagctgtatcgacacgcaaatcgccctaatgaaacgttggaatattcttcctaataatacgcgttgggcgttacagcagaatcgattaacagaagcatgtctaatctacactcaacccgactactctggtggcaatactggcagattcgggccacagaccccgacttatcaggcgatactcgaggctcgtcgcacgattagcgagcaaggttatttctgtttcgatgagatgtttgtctgggctaatgagttactgaacaagaatcctgaggcagcaatggatctacgtcggcgcttccccttagtattcatcgatgaagcacaggacaatagcgaggaacaatcggcactgttgcatcgaatcttctgcgctggcgattcaccgtcgcggcggcaacgattcggcgattcgaatcaagcaatctattcacggaccggactcaaaggggcaagtaccgatccattcccaggttccgtagtccatgttcttccgcgaagctatcgcttttcccaagatatagccgataaagtaaagggcctcggcgtcgcgccacaagcattaattggtgccggtccaccagcccgaataaataccgaaccaaaagctccaacaatctttctcttcgacgatgcctcagtgcaatcagtccttccccgctatggcgattatcttattgaatcctttgatgcagcaactttaaagtgtggcgtgtttaccgcaatcgctggagtccacgagctaaaagaagatggcctcgtcccccatgccatagggcattacgtacccacctatgacccctgtaccgcacgaaaggaagcaactccgaacagtttcacgcaatatctggctcgcgcatatattgagattatgggcagcaacaactgcgaaaaattggtgaatgcaacagcctcagcattgctggccgcaagtgagttatcaggtagcatacatagcagagtatcgcgaaaatcaccgcatcgtcgagttgttgagcttttggacgagacagaggcaattacaagctatagggcgctacaagagaaactcttggcaactcgtggaaatattacgcaagatgattggaacacagaattgctcccattaattgtgtcatgcgttaagcagttgagcggctcttcagtaattggcaatagcgtcacggctttcctcgcctggccacaggttaatacgttgcaaggagaggaagtgactctcacacagagttctaattttgtatcttatccaaaaacttctcccctggtccaaatccggctagggtcaatccattccgttaaaggcgagacgcatactgcgacgctggtacttgatagcttctacttcaatcatcatctttgcgaactaaagccttggttactcggaacgaagactggtggttcgacagttaataaaaaagggagaccagtatttgagggttcacgtatgcttggccgattgaagctacattatgtagctatgacacgtccaactcacctcttatgccttgcgatgcgcaaagacgcatttgtagatgaagaacttagtgtgctcgccggtcgcgggtggaacattatcgattgttgtgcttctataattcctaaagactattga

SEQ ID NO: 77234 - DNA, 1914 bp, Citrobacter koseri
  misc_feature (1878)..(1887): n is a, c, g, or t
atgtacatatcagaaattcgaattgagaactttcggttgtttggagccgccgaaaacgcctttgtgctaacactaaatccagggctaaccgcattggttggagagaatgatgcaggaaagaccgctgtgattgatgccatccggttagtgctaggtacacgtgaccaagattttatgcgcattgacaccagtgattttcaccaagccactccgcactctgaacgcgcggatcagatagtaatccgactgagatttagtgggcttacggcggcagatcgtggtgccttttcagaatttctgacctatgaaacgattggggaagcagtcgaaaccgtactcatcatcacttgggtggcaaaacgcaatactaaagaaggaagctcacgccgggtgcttccacccgaatggcgtactggcgctataggggatggaccattgcttgatcttggagcgagatcgctattgacggcggcttatctacgtccccttcgcgatgccgaacgtgcgatgagcgcaggccgaggatcaagattatcgcaaatcctacagcacacaaaggaaatacgtgagacaggaaatgctttcgacagacatatcgatccgccagtcgacccgaaaactttgagtattctcggacttggagattatgccagctatttatttggtgaaagtgaaggtattaaacaagcacgcaagcgtctcaatgaagaatatcttgctccactgtcattcgccaacgatatgctgctagcacggataggcgtcgccagcacacaggaagataacctccgattacgccaactactcgaaaaacttgaacttaccttgactggttcggccgaagtcgataaccatcatagtaggggacttggctctaacaatctgctattcatggcttgtgagttacttctgcttgcagccgaaagcgacggttttccattactattgattgaagaaccagaggctcatctccatcctcagcgccagcttcgtcttatgtcattcttgcaagagcaagcaaaaaaagaacgcactgaccatcaacatatccaaattatcgtcacgacacatagccctagccttgcctcagaactgcatcttgacaatatagctttagttgagggtggccgagcctttccactatgtaaaggtaaaactcagcttagcccatcggactatcgcttccttgaacgtttcctcgatgtgaccaaggctaatctattatttgcgcgggccgtaatgattgttgaaggcgatgccgaaaatattctattgccagtgttagcaaaacttctcggccgcgatttccatcatcatggcgtgtcagttgtaaatgttggtggcgtcggtcttggtcgctatgcacgaatcttcatgcggcaagatcctgagaaggacggaatgattaatattccggtagcatgcatcactgacatggacgtaatgcctgatttagcaccatggatcgtcggcaagctcgaggaaggtcaacaaataccagttataccgccatcgaaacgacaatggcgaattaaggcagattttcccggtaatgcactagagcagcgccgcattattcgacgagctaaagcgtcgggtcagaatgtcgaaaccttcgtagcggatgaatggacactcgaatatgatctcgcttttcatggcctcggtaagcaaatgtatcaggctgcatcgctcgcactcgctgatgaccgactcaacgctggtacagccatcaaagccgacattatcactgctgctgatgcagcttatgaagctatcatggatagttctactgacctagagatgctcggttcgcatgtctacgcgttattcgagtcgaatggagcatcaaaggcaatcgctgcacagtatatggcnnnnnnnnnngtatatggcagagctattagaaaatga

SEQ ID NO: 77235 - DNA, 513 bp, Citrobacter koseri
atgagtgcgataaaacagtataataacatggttcagatgacaagtttctacaacgagcttgaactttctgccatccacccacagtctattacaggtattctggatgaagttgaatttgcattgggcaaaataaataaacggcttgatgaaaccgagaaagttattaatagcgaagaactggccaagttaattatagatgagaaaatattaaccgttcgcgagtgcagacaaaacctcgtaagctatttgaatgaatttacattgtataactgcattcttaacctaaattatataaaaccttacctgacactgcctggggagaagttggtgcatatttccggacttgtcggtaattcagaagagcgtgtaattaagcgagaatttttagctgaggctatcagaattgtaaatgagagagcagggaaaattaaacctttagctgaaggtgagaaatctcaaaaaatggcactaatacacgacctgagcagtaagtgtttcaaaaatggtgagtga

SEQ ID NO: 77236 - DNA, 1398 bp, Citrobacter koseri
atggtcgctgtagatgctatagctccgggtggttttctctcaggcactcctgattatcctcttgcatcgaagcgaataccaagagagaacctgccaccatcggcattaccagaatggaacaaacggtggatagcaaccactgctggactagtgggaacagaaagttatacggattatttacagagatcgatcaaactgttagataaactcgttccgctagttgagaagatactggatgggatcctgcggtgtaaaaccacttcatctaaagttctggaacaacttggggccgtgcatgaagcttcccgcgagcttaccccaccgaaaggaggggagtttattggcttaaatacagaactacatactactccgattcagaatatattattttcctgttccgctgatatgatctggcggtttatatctttacctgaaaggtatggcgcatatattgcgtggctaaaagatctgttaaggaacatagaggaaggtaaggattacccttgggaactcgtaggaggctatccggaaaaatccttcactcgactgaaagaactaatcacatcactacgtttgttgtcagcagcagcgggctctcagggagtaaatcctacacgtttatggcttgcagagtctaaagcggctgcacgtggaggagcattgagcagcgctgtcagagtaataatgcgacagttcaataagttagccatggataagctgttggagatagagggcaggctgagaaatcgagggattgaagcggaactctacgctcgcccagattgggagcaacttttgccgtggccaacatcagagtttctggcgattattgatgttgaatatccagaagattggctgctatggcttgacgaaaatggagaacatattcagagcgcaattggagagcatcatcgtctctgggttattccccgcattgcagggattgtaatatcacaactaaccgttagcgcgatatttaaatttttcgcatctccatacgcggttgatgactggcttgatgaattaaaaatcaatcgacttaacgatacactgactcaagctgcgcaacctgtattgtcacttatcaccgagcttgatggactacgccatttcaaccttggtaccgcagaaagacctcatctggagcagtctgtgcgccaagaaaatgaaaaagcactgattagtgccttgggcaaatttgagaagatagcagaaggcacccaagttcaaatgtgtctccgacaattaaatgaagaatgtattgctggaagaatagacgtagctgagggagggaatgctttgctacatggacaactgactgccggtggagaagcattgttgaacttacaatttaccttactgacacaggatttggtaactgccttagctcaagcgtaa

SEQ ID NO: 77237 - DNA, 222 bp, Citrobacter koseri
atgtcgaacgttagtgaacaaaaagcacacccgctatgcatcctacgcatgactgagttgacggcgattcttgggatctcgcgctcaagtatctacgaaaaactgaatccgaaatcgaggtactacgatgctgagttccctaaaccggtccggctaggggcagcatctgttggttggcgagctactgctattgatgagtggatcgcttcccgaacagtttaa

SEQ ID NO: 77238 - DNA, 1077 bp, Citrobacter koseri
atgaaaacactgaataacaattatctttcgcgattagatcatttacgttttttcgcagcagcattagttataatttatcattgtagagggtttctaaaattcaataatgaattatcaggatttgttgatttagtgaaactgtggatcacaggagggaatagtggcgttagcctatttcttgtgttatcaggctttcttttttgtgtaatatcaaacgctggaaacaaaaacatatcttatggtagtttccttaaaaatagagtattacgcatagcaccaatgactgtactattatgctttatcgctataagtgttaatcgcgtaaactcagacccaatggatatactgcgaatccttaccctgcaattaaatactggacatgcgacaaccggatggggtcagcaatactatccaattgggcaaatttggacaatcgcagttgaattccagttttatttgttgtttccattcattgctatttttatgaagaatgacggaataaaaacattgttaggcatgatcgccgtcatgctcatgattaaatattcacttgttacctttaaaggtgctcctatatacggtattttttatcacactatcatcggcagaatggaccaatttttaataggaatgatcgctggttttatctacttaaaaaaacaaaacactagtctatcactggctgctgtcattctggttatagcactagccggattaaccatcgttctttatctaaataaacaggctatccctgattttgtaacgtttagtctaactattgaagcaatattatggtcgcttgttatctattcttattgtaccgccacattcagcattaatcagcgtattgatgcaactttagcttacctcggtggacttagtttctcaatgtatctattgcacctaccaatttattatattctgcaaagaaagctaataccaatggatactaatataacaatgcatttagttaaggtgattttggtagtgatacctgtaacaattatggtatctgcaataacatatgcttatgtagaaaaaccattccttaaattacgagtaagatatgtaaaataa

SEQ ID NO: 77239 - DNA, 162 bp, Citrobacter koseri
atggctacccaggggattacaccaaccgtagtgcagataatatggcaacacgaatacagaaagcttggtgcagcgccattgggcttcattaccctgactatgcttatctccctcattttccgaagaatcatagtgcttggttcagccgacatgacgctttaa

SEQ ID NO: 77240 - DNA, 807 bp, Citrobacter koseri
atgaaagttgctatagtgggcgcaggtatttctggtgcagttattgcgagattattagcagaggaagggattgagtctgttgtttttgacaaacgttctcatattgctggtaactgtcattcagaacgtgatccgcagaccaacgtcatgttgcacgtttatggtccccatatttttcatacagatgataaagaagtttgggatttcgttaatcagtattcacagtttatgccttacaccaaccgtgtgaaggccatttacaaaggcaatgtttacttactaccagtaaacctgcatacgattaatcagtttttcaataaaacaatgcgtccggatgaagcccgtgctttcatcgaatctaaagctgacaaatctaaaaactttgaagaacaggccatcagcatgattggtcgggaactgtatgaagcattctttaaaggctatacgcgtaaacaatggggttgtgagccgacggagttaccagccagtattttgaaacgcttgccgcttcgttttaactataatgacaattattttaaccaccagtatcaggggatgcccagagatggctataccgatatggttggaaaaattcttgatcacgaactgattgaaataagaacagatactgagttttcagctaccgagagtggggcctaccagcatgtattttggtcaggcgcgctggatggttactttaactttagtgaggggcgtctgggttatcgcacgctggatttcgaaaaattctcagcagaaggtgactcccagggtgagaaatgcttatgctcagtgattcgggtataa

SEQ ID NO: 77241 - DNA, 276 bp, Citrobacter koseri
gtggcttctgtttctatcagctgtccctcctgttcagctactgaaggcgtggtgcgtaacggtaaaagtactgccggacatcagcgctatctctgctctcactgccgtaaaacatggcagctacagttcacttacaccgcttctcaacccggtacgcatcagaaaatcattgatatggccatgaatggcgtcggatgtcgcgccagtgcacgcattatgggcgttggcctcaacacgattttacgtcacttaaaaaactcagaccgcagtcggtaa

SEQ ID NO: 77242 - DNA, 294 bp, Citrobacter koseri
gtggcgcacgtattcggtgaacgcacgttgtccacgctggagcgtcttctgggcctgctgtcggcctttgaggtcgtggtatggatgacggatggctggccgctttatgaatcacgcctgaagggagaactgcacgttatcagcaagcgatatacgcagcgcattgagcggcataacctgaatctgaggcaacatctggcaaggctgggcaggaagtcactgtcgttctcaaaatcggtggagctgcatgacaaagtcatcgggcattatctgaacataaaacactatcagtaa

SEQ ID NO: 77243 - DNA, 381 bp, Citrobacter koseri
atgaatatgcgcattatcagcgcgaaagaccacggcgactccttccgtacgctggaaagcggtcgcgccgtcgcctttatgatggatgatgccctgctggcgggtgaacgcgcgaaagccaaaaaaccagacaactgggagatcgtcggtaagccgcaatctcaggaagcctacggctgtatgctgcgtaaaaacgatcctgagtttaaaacgctggtagatgacacgattgcccaggtgcagacctcaggcgaagcggaaaaatggtttgataagtggtttaaaaacccaatcccgccgaaaaacctgaacatgaatttcgaactgtccgacgagatgaaggcgctgttcaaagaaccgaatgacaaagcacttaactaa

SEQ ID NO: 77244 - DNA, 195 bp, Citrobacter koseri
atgtttgaacctgaagccgcttacgatgaagacgtcgccagcttaaatgatgacgatgtaacgccgggcgcggagagcgaaacggtcatgtccgtgattgatggtgataagcccgatcatgacgatgacaacaatcctgatgacgatccgccgccgccgcgtggtggtcgacccgcattacgcgtagtgaagtaa

SEQ ID NO: 77245 - DNA, 810 bp, Citrobacter koseri
atgaaaaatggtgttccaggagtaagcggttatcagggcccggcgggcggctggggagccgtgaaggcggtctctgcgtcggtgttttcccaaaaggccgtcacgcgcgatattatcgcgatgttcaaaatgaatcaggtcaaaggctttgactgccctggctgcgcatggcctgaccctggccatcgggcgccgatggaactttgtgagaatggcgtcaaagcggtctcctgggaaaccaccagcaagaaagcctcaccggcgtttttccgtcgtcatccggtgtccaccttatggcagtacagtgattacgcgctggaaaatattggccgcctgacgcacccgatgaaatatgatgccgtaaccgatacctggcaagccgtggaatgggacatcgcgtttcaggaaatcggcgaacgcctgtgcagctacgactccccggaacaggtagagttttatacctccggcagaacctcgaatgaagcggcgttcctgtatcagctgtttgcccgcgaatacggcagcaacaacttcccggactgttccaatatgtgccacggcccgaccagcgcagggctgacgcgcgctattggtctggggaaaggcaccgttgaactggcggattttgaccactgcgatctggtgatttgcatcgggcataatccgggaaccaaccatcctcgtatgctgaccacgctgcgcgatgtggcaaagcgcggcgccaaaattatcgctatcaatccgctggcggagcgaggacttgagcgctttagcttcccgcaaagccctaaagagatgcttaccggctag

SEQ ID NO: 77246 - DNA, 246 bp, Citrobacter koseri; identical to SEQ ID NO: 72370

SEQ ID NO: 77247 - DNA, 237 bp, Citrobacter koseri
ttgtggtatgaaatatcggctcaggggactggcccgcttgcaaacatctcagagaaattttgtcttcacggtcactctaccatagtaaaccgaaaagtgttattcaaagttttggcccgttttttcggttatgcgaccctgatcaagcaacgcctgttcaatggtctgttgaagcatccgaattcgttgttccatgctcgccgcgtagtcgcgggtcttcgctttttcctgagttaa

SEQ ID NO: 77248 - DNA, 1590 bp, Citrobacter koseri
atgaacttaacgcaaatttttcgaggcttaattcgtcgtttcactccccgccagtttggtctgttaacgggaatattttgcattatcgcgctgttttctattttgcaggttgcgtcatccctgatgctgtcgttttccgtgcgagacgctcagcgtaacgaacaacgcaaccagcaggcactgctgcaacaaacgaaggtggatgaggcgagggtagcgctgttgtccgcaagcgatctgctgaaccgggcgggcgtttactttatgcaggatgccgcaacgggatcagaaggcagctggcgcccgttgatggatgaagctcagcaggcgctggtacagtcaaaaacggcctgggatgcctggcttgcaatggcccctcataaagacgacggcctgattgagagttatcagcgtttttatagcggtattcaggaacaggcggatggtttgagccagactaacgccatcgacgcgttctttgctgttcctgttcaggcgtttcagacagatttcaatgaaaactatgctcgctttcagcaagagagcgggcgtcagacagagggtggcaggcagcagctgattgccagcctggaagggttgcagcacctctttttgttcatcccgtttgtgctggtggtgattgccctgctggtctggagcggcatgtctcgttgggttatttctccgctgcgccgcctgatcgcccatattaatattctggccgcaggcgatctgtccgaaccgatgccgaaggtgagcgggtttaaccgcgaggtcgcgcaactcagttcacgcattgatgcgatgcaacaggggctgaggcagctggtgcagcaggtgagcgatgccaccaccgcaatggtcggcaacatcgatcagcttgcgcagagcaacaaacagctttatcagcaatcggcgaaacagagcgaagagttaagtagtgtcacctcgcatatctcgtttctggaaacacatgtcgaggacaatagcggctttgccagactggctaatcaacgtgcagccgaggcgcgtcaggtagcggctggcggcgatcgtatgatggagaccgttaaccgttcgatgcaggcgattgttgagcgatcgtcagaaatgcgcgggatcatctctctgattgacagcgtcgcgttccagaccaatatcctggcgctgaacgcggctatcgaagcggcccatgccggagaacaaggtcgcggatttgccgtggtggcaaaagaagtggggctgctggcccgtaaaagcagtcagtccacgcagaacatacaggaacttatccaccactccttgcagggaatcgaggagggttcacatgcggttaatcggctggaagagaatttacagcaggtgatttcgttagtagacaatctgggcatactgttgaatgacatctctggcgccacgttaagccagggggacagcatccaccagatgacggggcagctacaggcgcttaaccgtgcggcgcaagagaccagcagcctggtgaataccgcatcggcatcatcgctgcaactgcatcatgaatctcatcagcttctgaacgcggtggcgcgatttcgtctttctgcctga

SEQ ID NO: 77249 - DNA, 909 bp, Citrobacter koseri
atgaacgcattattatactgtctggtggttgtcatttggggaaccacctggattgcgatttatctgcaacaaggcccggtatcggcgcccgtgtccattttctggcggtttgccgtcgccagcgcgttaatgatgctcatcctgctggcgagcgggaaattacgtaaattatccgggcgcgaccacctgttttgcctgttacagggcggatgcgtcttctgctttaatttctggtgtttttatagcgccgccgcctggatcaacacggggctggagtccgtcattttctcaatggccgtactgttcaatgcggttaacagctttgtgttcttcgggcataaaccgccgctacgcttttattacgctgctggtctgggattaacgggcattatcacgctgttctggcaggatctggccaacagcggctggaaccactcgctgttactggggattggtctgagcgcgctgggaacgtttggcttctctttgggaaatatgatcagcatgcgccatcagagaaaaggtctggaagtcatgaccaccaacagctgggcgatgctgtacggcacactgctgatcgccgccattgcctgtatacgcggcgataacttcacgccgcaatggacgttgagctacctcggcgccctgctgtatctggcaatattcggttctgttatcgcgtttggcgcgtattttactctggtgggacgcatcggccccggcaacgcggcctacagtacgctactgtttcctctggtggcgctgacaatatccacactctatgaaggttacgtctggcaaatgaatgccgttgttggattagtgctgattctggttggcaatctggtaatgttcacgcgtccagaggcgttaatgagtaagttaatttaccgtcgccgggcggcataa

SEQ ID NO: 77250 - DNA, 1440 bp, Citrobacter koseri
atgtccgcacccgtacaacacccgatgtatatcaatggtcaatttgttagctggcagggagacgcatggattgatgtggtgaatcctgccaccgaagaactgctctcccgtattcctgatggcggcgcgcaagaggcgcgtcaggccattgacgccgctgcgcgcgctcagccggaatgggaggcgctgcctgcgattgaacgcgcggggtggctgagaaagatcgcggcagggattcgtgagcgggcagaagagatcagcgcgctgattgtcgcggaaggcggaaaaatccagcagctggcgcaggtggaagtcgcgttcaccgctgactacatcgaatatatggccgagtgggcgcgccgttatgaaggcgagatcctgcaaagcgaccgccccggagaaaatattctggtctttaaacgcgcgctgggcgtcaccaccgggattctgccgtggaactttccgttctttttgattgcccgtaagctcgctccggcgttgttgaccgggaataccatcgtcattaaacccagcgaatttacgccaaacaatgccattgctttcgcgcagatcgtgcatgacatcggcttaccgaaaggcgtattcaacctggtgctgggacgcggtgaaacagttgggcaggagctggcggggaacccgaaagtcgcgatggtaagcatgaccggcagcgtggtcgccggcgagaaaattatggcggcggcagcgaaaaacatcactaaagtttgcctggaactgggcgggaaagccccggcaatcgtgatggacgatgcggatcttgaactggccgtgaaagcgattgtggattccagagtgatcaacaccgggcaggtctgtaactgtgctgagcgcgtttatgtgcaaaaagggatttacgatcgctttgtgaatcgtctgggcgaggcgatgaaagcggttcagtttggcgatccggcacagcgtgatgacatcgcaatggggccgctgattaacgctgccgctctggagcgggtagagcagaaagtggcgcgtgccgtacaggaaggcgctcgcgtggcgttgggcggcaaggccgtggagggcaaaggttattattatccaccgacgctgctgctggatgttcgccaggagatgaccatcatacatgaggagacatttggccccgtgctgccggttgtggcgtttgatacgctggaagaggcgctggagatggcgaacgacagcgattacggtctgacatcgtctgtatatacgcaaaacctgaatgttgcgatgaaggcgatcggcggactgaaattcggcgagacctacatcaatcgcgaaaactttgaggcgatgcagggattccatgctggctggcgcaagtcaggtattggcggggcggatggcaaacacggtctgaatgaatatctgcaaacgcaggtggtctatttgcagtcctga

SEQ ID NO: 77251 - DNA, 234 bp, Citrobacter koseri
atgtacagccagatgtacaaaagcctgattggcgacagcgcattgctgaacacccaggcgatcgcccagctacaaaccgttacgtcgcttgaggcaaatatcctcgcctataacgatacttatttactgacggccagcattgccgccgctacgctaatctggattttatggcgcttgctgcgactgcgtattaccgcccggatggcgctgaaaaaagccaccggaaccaagtaa

SEQ ID NO: 77252 - DNA, 129 bp, Citrobacter koseri
atggataacaaaactaacgtaattaatattgcctactgcacagatgctaattatctggagtatgttgccgtatccattatgtctgtcataatgaataaccctgagcaggtaatgactccaacttattga

SEQ ID NO: 77253 - DNA, 504 bp, Citrobacter koseri; identical to SEQ ID NO: 21717

SEQ ID NO: 77254 - DNA, 861 bp, Citrobacter koseri
ttggcagcatcaccccctgagcaatctctcgcattttttgtctttgtctatgatgtcagcgatgaagacattgcgaagctacagtcgaccagtaataaaattcaggttatcacgatcgataaggctgatattgaaaaatataacaatgattttgcgataaaacatctcaatcgctcaacttatatgcgtctggctgtgccccgtttacttaaagacaaagtagcacgttttatctatcttgatgccgatacgctatgctttgactcactcagtgaaattaacagcgttgatattgataatgttgtttgcgccgtcagccatgactctctcaacattcatgataataaacacgcccggcgattagggctgagcatcgatcactattttaacgctggtttcctttatattaatgtcgcgaactggattaagcatgacattgaacataaagcaaataccgtgttatttgagcaaggaaaatcattgccttactttgatcaggacgcactcaacattgcaatgaacggcaatattacgtttattgataaccgctggaatttcctgtttaactggtttactgacgaacagaaagaaaatttcttctatcacagtgacacgctgccaagaatcattcattttacgggcggaagaaagccgtggtataaagaacatacggggctgtcgcaacagctttatgttttctaccaccatttcacgccctggcggaatgcagagttacgctcttatgcccctcgtatgagacctaccgattatcgggtgtactcccgtcaggcggcaaaaaaaggaaattattttaccgccataaaatggtacgcaaagtacctcaaaaccaagattcattaa

SEQ ID NO: 77255 - DNA, 729 bp, Citrobacter koseri
atgtaccgcgataaaaagccgttttcctgcaaattattcacactgctgcccctgttatgtggcctggcagtgttctgttttgcgcagcaaacgcgggcagatgattattttaacccggcgctcctggatattgataatccccgacaggaaaaaaccgatttatcggtatatgaaaaaggtccaggacaagcaccaggaaaataccaggtatcaatctttattgataataataaagtcgacacccgcgatgtcacatttaaattacagaaagatgttaagggcaaccgttcactccagccctgtttcagcctggatgatttaaagagtctcggcattaaaacgaaggcgtttccgaggctcatggcacaagggaaatgcgcagatttaagcgccattcccgccgcctccgccacgtttcgcgtacgcaaccagcagctattgctcagtattccccagtcagcgctgggccagattccgcgcggttatatcgacccaaaaacgttcgatgaaggcattactgccggtctactgaactacatcagagcgacgcccgccgacagggtgaacaggataacagcagccagtatgtcaacctgcgtcccgggttcaacatcggcgcctggcgcgtgcgcaattactcaacctggaatcgtaacgtcacgggccatgacgaacagcagaaattctcgtcggtttatacctacgcgcagcgcgatatcgtggcgatga

SEQ ID NO: 77256 - DNA, 864 bp, Citrobacter koseri
atgcatatcacgctacgacaactagaagtttttactgaggtgctaaaaagcggctcgacgacccaggcatctgtcatgctgtcgctgtcgcagtcggccgtaagcgcggcattgaccgatctggaaggtcagcttggcgtacagctatttgaccgcgtcggaaaacggctggtggtcaatgaacacgggcgcttgctgtatccgcgcgcgctggcgctgctggagcaggctgtcgaaattgagcaactgtttcgggaagacaatggcgcaatccgcgtttatgccagtagcaccattggtaattacatcctgcctgcggtaattgcccgttacaggaaggactttcccgatctgccgctggaacttagcgtgggcaacagccaggatgtcattacggcggtgctcgattttcgggtggatatcggcctgattgaaggcccgtgccacaatactgagattatttctgagccgtggctggacgatgagctggtggtgtttgccgcaccgtcttcgccgttggcgcaagggccggtaacgcttgaacaacttgccgccgcgccctggatactgcgcgagcgcggttccggtacgcgtgagattgtcgactacctgttgctttcgcacttgccaaaattcgaaatggcgatggagctgggtaactccgaagcgatcaaacacgccgtgcgtcatggtctgggcatcagttgcctgtcgcggcgggttattgaggaacagcttcaggcgggaacgttgagtgaaatcgcggtgcctttgccgcgcctggtgcgaaccctgtggcgaatccaccatcgccagaaacacctttccaatgccttacagcgttttttgcgctactgcgaataa

SEQ ID NO: 77257 - DNA, 249 bp, Citrobacter koseri
atgtccctctgtgtaatggcagaaaatctgctggcaaaaagccgtcaccgtattgaaggcgatagcgtaactgcgaagctttcggccctgatttgtgagaatgatgagggaaacgatgaatacatgtactggattgaattacttgatagtgagggccagatcatgatgaaagaggttactactgatttcatcactgcgagcgacaccttcgaacgcctgaaaagcacaataggcccggcagtcgaataa

SEQ ID NO: 77258 - DNA, 792 bp, Citrobacter koseri
atgcttacaagtaatttagcagttcgtggtgaagttgtcactatgtccagccttgatatcgctgcgctggtaggtagtcgtccatctgatgttaagcgtagtattgaaaggctggctaaatctggcgtaatccaacttccgccaatggctaaagttgagaataaacaatctgttagccctaacaaatttgtcagcgcctatatttttgaaggtgagcaaggtaagcgagatagcattgttgtggtcgctcaactgtcacctgaatttactgcgcgtctcgttgaccgctggcaagaactggaaaagcagattgttgcgccagtattcgatcccgctcgcgcattaaacgacccggtcttccttcgaaatgcgctgctggaatacacagaaaaggttgagcatcttgaagtggcaaacaaagacctctcttcaaaagtggaaagcatggaaaatctatttaaggaaggcatgacgccgactcaattctgcaagatgttgaatggcgttaatgtcatgatggtttgccgtttccttgaggggcgcaagtggctatacaacgaaagcaaaagaagcactcgatggcgagcaggtaattacgctcgtgataaatatctcaccgaacaccagagtaaaattagtgtccacggcggagaagacttcattaaatacacgccagtgctccttcataagggggctgtccgcctttatcagctatacctgaagggcgagttacccatgaagaacacatggaacggcgaacacactcacgataaagaactaaaaggatactaa

SEQ ID NO: 77259 - DNA, 717 bp, Citrobacter koseri
atgctctctaaaaatagcgaagcccagcagtgcgtcaacactaaccgggcctctatcgaaaaatcctgcacaggaaatatcgacatgaatattgtagcgaaatcagagttcaacttcaaaggcattgatttagtgcctgcgccagtaaatgacggaatctggctgacatcgtcagacattgcaaaagctcttgggtatgcatcaagcaagagcgtatcgaccatttactcacgaaattcagatgagtttacaagcagcatgtcaatggtcatcaaaatgaagaccaacggaataaacaataacttacgtgaaaaatcggttcgtgttttctctctccgtgggtgccatctgatcgcgatgttcgccactacaaaagtagccaaagaatttcgccgttgggtgttggatatccttgatcgcgaagttgctcactcaccgatcgccaggaagtttacggacgaagagttatgcacccttgcatatctgtggcgttcggctgcggtgatgtatgaggcatgccgtgaagtacatccgctactgctagtcgcagagcatcgtttggctccacgtttctgctcaattggcactaattacagtcgtgggataaataaagctcgcgagattctaaagcgggaaacgaatcacatcaaagaacaaccatggggagacagtaactggaaaaatgtattttcatacgggacgggagtattgcagtga

SEQ ID NO: 77260 - DNA, 162 bp, Citrobacter koseri
atggaaaagaatgaagtgaagacaactcttcggtatccgtaccgcttcaaagaagaagtaaagcggatcgctgaggaagaggggatgtcagaaaactctgtgttggttcagggtttggcgtggtggttgaagtaccgggagaaaatgcaaaatgctctctaa

SEQ ID NO: 77261 - DNA, 300 bp, Citrobacter koseri
gtgtcggaaaaattcccaagccagatgcaagacaagttcaccgtaaggttccctgacgggctgcgcgatgccatagccgaacgcgccaagcgtaacggcaggtcgatgaactcggagatcgtgcagatactcgaggatgctctatcaaaagatggcgactacatacctcctcttggtagcggcgatccaaatgagcagtttttcgcagaaagctacatcaatggcagattcgagcgcttagaaggaacactaaaagagattattgaaagactagagcgttccggcaaaaagcccacctga

SEQ ID NO: 77262 - DNA, 489 bp, Citrobacter koseri
atgtttaacttcaatactcaaccgttgtttagcgaggcggtcgctcaggagaacccgccggaaggcgccgcgcctcgcgcgggcggcgtgcgcgacacctttgcgcgctggctgaatcaaccgaactggggatggaatgattatgtggaggccaggacacgctatgtcattgatataacggcattgcataatactctgatccagcatgtcagccatttcttccaacaaattcataaagctttagatgcccaggtcgatgtttctgttacggcaggtatggcgaccttttttgccgatttttcgttgtgtctgtcgggattgcaggagagcttgcgcgagagtctggtgacgcgccagcaacatgaatcggttgtgaacagactgagccaacagttacagcacagtatctccgccacccggtggattcatgaagattcccgcctgttacgtgatgatatccagaccctttttgcagccgagcactcatga

SEQ ID NO: 77263 - DNA, 1695 bp, Citrobacter koseri
atgcgtcttgatatgtataagtcaacacttaattcaaccatcgaacaatataatattttaccttatatgctatcgacagataacataataagacgctccttaattgatgaaaatggcgcgcaaaaatattctattaatgaaaaaatagaacatcttaaccgcaatctaaaaactgcggccatattcattcttgatgcccagggtaaagcgattgcatcaagcaactggaaagaggtcggcagttacgtcgggcaaaattacagttatcgtccttattttaaacaagctatggcaggacagaatggaaaattctatggcatcggtagcacgactaacacacctggattttttctctctaccgggataaaggaaaacaataaaattatcggcgttgtggttgtaaaaatcagtctgaatgagattgaaaaagcctggtcggaaggaccggaaaatattattgtaaccgatgaacacagtattatatttttaagttccagaacccaatggaagatgaagtcactgcaaccacttcccatcgacataatgaaaaaattacaatctacacgacaatacagtatcaataaccttaaacccgccgattactatccttgttttaaattaggccgttttatttttctaataaatgacacacatcagtcttgtcttatccctggattttattctcaaagcgtcaccatccctgaatttaactgggaaatgataattattatgccactagagaatatttactggacgctgagtgtaaccttcacaatcgccattgtgatctatttgctggtgttaacatttataaattactggcgtatgcgtttaaaaacccagaaattgctggcgcaaacaaatgaaacgctggaaaaacaggtcaaagaacgtaccctggaattagagtcaatcaacaaaaaactggtccaggaaatgaaagagcgcagtcaggcggaacaagttctgcagctgacccgtagcgaacttgcagaatccagtaaacttgccgctctggggcaaatggcgactgagatcgctcatgagcagaaccaaccgctggctgcactccatgccttaactgacaatgcgcgtattatgctgaccaagggaatgtattcccaggttgatcagaaccttaaatatacaatctctgtaattgaaagaatgacgcagctaatttccgaacttaaagcatttgcttcccgtcatcgggtaccaaaaggatcagccgatgttatcaaagttatgtaccgagcgattgagctgcttaatcatagtatggaaaaaaatcatgttgagcggcgaatcaaagcctcctcgacgccgctttttgttggttgtgatgaactgggtctcgaacaaatatttagcaatcttatttctaacgcgcttgatgcaatggagaacggggcgaataaacgactggacattgctctgtgtcgcgtggatcagcagattattatcacacttaaagatacggggcccggtttttctccacaagcaatagaccgtatatttgaaccctttttcacgactaaacgcagaggaatggggttaggtctggcaatcgtaagtgaaattgtcaggaattccaatggaacaatccgtgcagataaccacccggaaggtggcgcaatgattacattaacatggaaagagtggcgaggagatcataacgaaaatgagcaataa

SEQ ID NO: 77264 - DNA, 1344 bp, Citrobacter koseri
atgagcaataacatcaccattatttatattgaggacagcgacgacgtacgtttcgcctgcgaacagacgctaatactggcgggatatcatgttatttcgttccccgatgcggagcaaagtttaccaacaattcagcatcagaccaatattattgttctcactgatttgcgtctgccgggattatctggactggatttactcaatcaaattattaagatcgatgccgaaattccggtaattttaattaccggtcatggcgatgttgaaatggcagtggaagctatgcgtaacggcgcatgggattttatcgaaaaaccctgtagctcggaaaaactactctcgattatcgcccgcgcggcagaaaaacgtcgtctggtggtagaaaacaaacagcttctgagccgtttgcaacaggaaaaggggccgctgttgattggtcgtagcccgcaaatgcagaaattgcgccagatggttatcaacgtggcggatactgatgccgatgttttaatttgtggtgaaaccggcagcgggaaggaagtggttgccagaatgctgcaccacggtagcactcgtagcaatggtcagttcgtggcgcttaactgtgcaggcttgcccgaaaccctgtttgaaagcgagatattcggccatgaacccggcgcgttcaccggcgcaatgaaacgacggattggaaaaatcgaacatgccagcggcggtacgctatttcttgatgaaattgaaggtatgcctctgggaatgcaggtaaaactgcttcgcgttttacaagagcgcataattgaaagactgggttcaaatcagttgattcccgtcaattgccgcgtgattgccgccacaaaagaggatttgttacgccatagcgaggaaaatcacttccgttccgatctttattaccgtctcaacgttgttaatctggccattccgccactgcgccagcgacgcgaagacattcccgaacttttttactggtttgccagtcaggcggcgcaaaaatataaccgggcgttgccggatatctcccctatgctcctcgcctggctgcaatcacaaagctggcccggcaacgtgcgggaactaaaacacaccgccgagcgttttgttctgggattaatgattcagcaccagcccgttcctatgacgcaacaagaggaacgtggcctgacggcctgtatcgacgcctttgaaaaaaaactgattgaagatatgctgcggcaaaccggcggtcaggtcagtttgactgcgcggctgttacaattaccgcgcaagacgttatatgacaagctgaataaacaccagattctgccgcagacctaccggtttacggagtag

SEQ ID NO: 77265 - DNA, 1074 bp, Citrobacter koseri
atgtcattgcaaatcgcactggaaaaggcgcgttggttaactgctggattgctggagctgaatggttgtgatgcagatatcgctcaggatgttgctgaacacatgattgaggccgagcgttatggctttccaagtcatggtgtcacgctgttgcccaaatatctggaaaacatcgccagaggtgatgtaacggttaatgcccgaccggaagtgttggtcagcgaagatcatttgttgtgttttcacgctcacaacggttttggacagcatgcggcgaaagtcgcaataaatgcggcaattgagcgtgcgaaggcgaaaggattttgcctgttgacgctgcgtcatgcacatcatttagggcgtatggggcactttggccaaatggcgagcgataaaggcctggtgatgctggcgatgagtaacgtcactggtcgcccggcgctggttgcgccatggggaggagcagaggcgcgtatgactaccaacccgttctgttttgcctggcctttcaaaggtggacgcccggcaatgctggttgattttgccaccagtagcatggcgctgaacaaagcgcgcgtaatgtcggttgaaggtaaacaagctgcaccgggtcaactgattgatgccgatggctaccccagtgtagacccgggcgtactgtttacatcgcctgcgggggcgttactgccatttggcgaacacaaaggctttggtttgtcgctgatgattgagatgatggcggggattttatccggcggcgacacaatagcggaagatcaccaggctggcggttctgcacacaatcatctgtttgcattactgattgatcccgataagttttctgatcgcgcagacgagaaaggacgcttcttcgccgattatctgttggcgacgcgcccgcagtcaggtggacggcccgtgatctatcctggaataccggaagcggcaacgggggcgcgtaatgagaaaaccatcaccatccctgcatcgttctggtcgtgggtagtggagcgctacgctggaaaaggaattgatttggggctgaataaccagctttcagcattagccagttga

SEQ ID NO: 77266 - DNA, 1500 bp, Citrobacter koseri
atgtcatcagttcctaatggtgctatgcaaaagcgtagcattattcctaattctggtttatgtctggccgttcttgccggtcttattattatgtttctgccgctgggcgacactctgccggtcgccggacaaaatatgattgccgtattagtatttgcgattatcgtctggatcagtgaagcgatggattacaccgccagcgcaatcgtgatatccgcgttaatcatctttatggtcggtttcgcgccggatatgaataatccagatacgattctcggcacgacaaaagcgctgaagttaacgttatcgggattttccaactctgcactggcgctggtggcggcggcgatgtttattgcggcggcaatgactatcaccggactggataagcgcattgcgctatttacgatgtcgaaaatcggggccagcagtcgcagtattttgattggcgcgattgtggtcaccattgttctgagcttggttgttcccagtgctaccgcacgtactgcctgcgtcgtgccgattatgatgggggttattgcggcgtttaaagtcgataaacattcccgcctggcagcctcaatgatgattgttatcgcccaggcgaccagtatctggaatgtcggtatccagacgtctgctgcgcaaaacctgctttctctgggcttcattaataaaacgtttggcgcaggccacaacgtcagttggctagactggctgctggctggcgcgccgtggagtctggcgatgtcggttattctctattttctcgtgcgcaaactcttgccgccagagacggaaaccgtggaaggcggtagcagcgctatcaaaaaagcgctggtagagctggggccgacgacgggcaaagaaaaacgcctgattgttatctctctgttgctgctggtgttctggtcaacgggggggaaactgcacagcattgacaccacctctgtaaccttagcaggactggcgataatgctgatgccgggcattggcgtgatgcactggaaagaggtagagaaacgcgttcagtggggcacattgctgatgtttggtatcgggatcagcctcggttcgacgctgcttgatacccaggccgcttcctggatggcgaactatgtcgtgcaaggttttggtcttgatgcgctgccgcctctggcgatcttcgccattctctctgcgtttttaattgtcatccatctcggattcgccagcgccactgcgttaaccgccgcattgttgcctattttgatcagcctgttaagcagcctgccgccggaactgggcgttaatccaatcggtatgactatcctgttggcctttagcgtcagtttcggttttattttgcctattaacgcgccgcaaaacatggtttgtctgggaaccgataccttcacgccgcgccagttcactcgcgtagggatttggctttctctggttggttatgtgctgttgctggtgtttgccgccacctggtggaaagttctgggtctgatgtaa

SEQ ID NO: 77267 - DNA, 873 bp, Citrobacter koseri
gtgagcgttttaatcgacaaatatacccgcgtgttggtacaaggtatcaccggcaagaatggcacctttcatactgagcaggcgattgcctacggcacgcaaattgtcggcggtattacgccaggcaagggagggcagcggcatttggaccgaccggtatttaattcaatgaaagaggccatgcgccagacgcaggccgatgccagcgtgatttatgtcccggcgccgttcgtcctggactccgttgtggaagccgttgaagcgggcgttaaattgattgtggtgatcaccgaaggcgtaccgacactggacatggttaaggtgcgccgcctgctggattgccatccggaggtgcgtttaattgggcctaattgtccgggaattatcactcccggagcctgcaaaatcggcattatgccgggtgatattcatcgtccgggacgcattggcattatttcccgttccggcacattaacgtatgaagcggttgcgcaaactaccgcgctgggtctcggtcaatcgacctgtatcggtatcggcggagatcctattcccggaacgaattttattgatgcgctgcgtttatttgctgacgatccgcaaaccgatgcggtcattatgatcggtgaaattggcggcaatgcggaggaacatgctgcagagtttattcgccatgaaatgaataaaccggtaattggctatattgctggcgttaccgcaccgaagggaaaacgtatggggcatgccggagccattatttccggcagcagcggtagcgcagaagataaattccgcgctttcgataaagcggggatgacctggacacgaaacccggcacaaattggtgaaacgttgtggaatgcgattaagtaa

SEQ ID NO: 77268 - DNA, 1170 bp, Citrobacter koseri
atgaatttacatgagtatcaggctaaatcattactggccggtatgggtatgccatgcccgaaagagatagcgattcaacatattactgagttgccggaagcctggcgcactatttccagtgaaaacaaaggcgcggtgctgaaagcccaggtacatgctggtggacgtgggaaagctggcggcgtgaaggtgctcacgcagttttcgcaggcggaaacgttcgccgtacagatgctgggttcgcaactggtgacctaccagaccgggtcggaaggtcagtatgtcagccgcattctggtgtgcgaaaacatctatccggtacgtcaggaactctattttggcgtagtggttgatcgcgaaagccagcgcgtcacgtttattgtcagttctgaaggcggtgtggagattgaaaaggtcgcacatgacacgccggaaaagatcgataaagtgagcgtcgatccgcttactggcattcagccttgccatgtgcgtgagttgtttgcggtgctgggactggagaaaacgttgtattccgggttcagccaattggtgaatcaggcatggaaggcgtttaacgaactcgattttgcgctgctggagattaatccgctggtgatctgtgaaaatggcgagtttatgtgcgccgacgcaaaagttaccctggatgataacgcattgtatcgtcaccctgaattacaggcgttacgcgatgaaacgcaggaagatgagcgggaaaaccaggcggcgaaactcgaccttaactatgttgcgttggatggcgctatcggctgtatggttaatggtgccgggctggcgatggcgacaatggacattataaaactctatggcgcgcaacccgccaactttcttgacgttggtggtggtgcgacgcaggaacgggtcagtgaagcatttcgcctgattgtctccgataaaaaagtacagggaattctggtcaatattttcggcggcatcgtgcgttgcgacatgattgctcgcgccattatccacgcgctgcatgaagaacaaattaccctgccggtagtggtgcgtctgtccggcaaccatgcgactgaagggcagcgtttgttggcggaaagtggtctcgcggtagaagccgttgattctctcgatgatgccgcgaagcgcatcatcgcattgctgaaatga

SEQ ID NO: 77269 - DNA, 1419 bp, Citrobacter koseri
atgaaaactctttttgacgtcgcggtaatgggcggcggtcctggcggatatgtggcggcgctacgggcggctcagcgtgggctgacggtggtctgtattgatgatggcgttaatgccctgggcgagccatcgccgggcggcacctgcctgaacgtcggctgtattccatcaaagtcgctgctgcaatcatcagaactgtttgtgcaaattcagcatgaggcagggattcacggcgtgaaagtcgcggatgtttcgtttgatgctgcggcgatgatccagcgtaaggacgctatcgtacgccgtttgacacaggggattcgtctgctgtttgacaaaaataaggtaatgcatgtttccggtctggcgacgttacagggacagcaggacgattgctggcagttaacggtcaacgagcagacgattagcgcgaaaaacgtggtgatcgccaccggttcacagccgcgccagcttgcgggcgtgacggtagacaacacgcacattctggataatggcggggcgctggcgttaaccgattgtccggtgcgtctgggggtgattggcgcaggtgtgattggtcttgaactcggttccgtctggaaccgggtcggcgcacaagttacgctgctggagatggcggaaaccttcctgccagcgctggagccgaggttggctggcgatgtgcgtaaagcactggcggccagcggtctggagatgcgattcggcgtcagtattgatgctatcgaacggcagaatgatgaggttgtgattcgctggcggcagggcgataacgcccaggagacgcgcgtcgataaactgattgtcgcaattggccgtgaaccgcgcctgtcaggcgtcgatctggctgcactcgggcttgtgccggatacgcgtggcggcattgacgttgatgcgctatgccgcaccggaaaaccaggtttgtgggcgattggcgatgttgtgcgtggacctatgctggcgcacaaagcgatggaagaagggctggttgtcgctgaccaaattgcgggtctgcccgtcgaaccggtcaacttcttgctgattccatccgtgatttatacccagccggaagtggcgtggatcggcgagaacgaagtgacgctgaaagccatcggtataccgttcactaaaggtcattcactgtttgcgggcaatgggcgcgcgctggcgctagggcaggacggaggacgttgcacactgtacgcggacaaacgtactgaccgtgtgctgggcggagcgattgtcggcccgcaggcttctgaattaattaatgaaattgcgctggcgatggcgtttagcgcttcaggagaggatatcgcctgtacggtacatgcgcatccgacgctcagcgaagtcatacatgaagcggcaatggcgctgaataagcaggcgctccacggataa

SEQ ID NO: 77270 - DNA, 1164 bp, Citrobacter koseri
atgattgaaattactgtccctcaactaccggaatcagtgacggaaggcacgctgacggcatggtgtaaaaacgaaggtgatttcgtgcgtcgcgacgaggtggtggcggaactggaaaccgataaagtgatcctcgaaatccccgcgccgcaggacggcttgctggcaaagattatggtcagcgaaggcagttccgtagtttccgcgcagcgactggcgcaactgacgccgcaggcggcgggtacggaatcagccgctacatctgtcgaaccgcccgccgccatgcctgccgctcggcttgaagcgcaacgcagcgatgtggatcttgctgctgtgaccggaagcggacgtcagggacgtattctgaaagaggatgtattgcaacatgcgcaatctgttgccccggcaaccgcgccagtggttccagccccggtgatgccacgtcggcccacgtcaatgggggctcgcgaggagcgccgtgagccgatgtctcgtttacgcttgcgtatcgctgagcgtttgctggcttcacagcgggataatgccattctgacgaccttcaacgaagtcaacatgcagaatgtgatggatctgcgtgctcgctggaaggatcgttttgcggaaaaacatggcgtgaagctgggctttatgtcgttctttgtcaaagctgtcacccgcgcgcttgagcgtttcccgatagtcaatgccagcgtagacggcaacgatattctctggcacgactactgcgatattggcattgcggtgagcagcaatcgcggcctggttgtgccggtactgcgcgatgcgcaaactttatcactggttgaaatcgaacggcaaatcgctgattacgccgcgctggcgcgtgccggaaaactgccgctggaagcgttacagggcggtacgttttctgtcaccaacggcggtacgtttggctcaatgatgtccacgcccatcatcaacccaccgcagtccgccattctcggtatgcacgccattacaccgcgtccggtagtggaaaagggtcaggtggtgatccgcccaatgatgtatctcgcgctgagttacgaccatcgcattattgatggccaagaagcggtacagacgctggttgcaatccgcgaactgctggaagcaccggaacagctgttgctggacctgtaa

SEQ ID NO: 77271 - DNA, 2745 bp, Citrobacter koseri
atggagaacacaacctcgcccgatgcattgctaaacgctgacaatgccagctggcttgaagaacactaccggacctggctgcgttcgccagagatggttcctgaagactggcggcgcttttttcttacagaagagttcctctctgacgacagtgccgccacgagcaacgtgacaggcacaacgatcaaaaaacaggcagcggtaacgcagttgatccaggcctggcgaaatctcggacatttgcgtgcgaaactcgatccgctggacatgatgcaaccccctgatgtgcctcaactgacgcctgcgttctgggggttaacggcggaggatttaaatcaggaatttagtgctgcttttggcggacgccatacccaaatgccgctcaaacaaatcatcgccatgctggaacaagcgtgggctggcagttgcgcatatgaactggcgcatctggataatagtgacgagattgcctggttactggagcgtattgagcgcggcaacgtccccgcgccggatgcgcaaacttgcatgctccgctttgaaaaactggtggcggcggaaactctggaacgttatctgcacactcgttacgtcggtcaaaaacgtttctcgcttgaaggcggcgaaagtgcgatctccgcgctgaatacgctggcgctgcacgtgcgtgaacagggcgtggacgaactggtcattggtatggcgcatcgtgggcggctaaatgtgctggtcaatttactgggtaaagatccggcccagctctttgccgaatttgaaggtaaacaggccattggcgaaggttccggtgacgtaaagtatcacatgggctattcctgcaatatgcaaacgcctgtgggagcgctgcatatcgcgctggcctataacccatctcacctggaaatcgtcaacccggtggtgcttgggcaggttagggcgcgacagaaccggcgtggcgaaaaggggcagacaaaggtgatgggcgtgctgatccacggtgattcggcgctgggcggtcttggcgttaatcaggccacctttaatctgtcgcagacgcgcggctatggcactggcgggacaattcatctggtcattaataatcaggtcggatttaccacttctcatttacaggatatgcgttcatcccgttattgcaccgacatcgccaaaatggcggcggcaccggtaattcatgtgaacggtgacgatgtggacgccgtctgcgaggcgataacgctggcctgcgactggcgcaatattttccaccgcgacatcattgttgatctggtttgcttccgtaagctaggtcataacgaaagcgatgaaccccgtctgacccaaccgcaaatgtatcaggcagtggactcccacccgggtatgcgtacccgctacggcgacgcgttgatccagcgtggcgtactgacccccgcgcagcaggagcaaaaaatcaacgaataccgtgactggctggatgcctgccagaaacgcgatccgctgccgacaccggattccacacatccgtttagcgctaattgggatggtttaaccaatccgcagtggagcgtacagccagaaaccgggctgtcatgtgaagaattgtcttattacggcaacatcattaccacgctgccggacgaggtgaccgcccatcctacgctcaaacgtcagcttgccttgcgcaaagagatgaccgcaggcgtacagccagtcgattgggggatggcggagatgctggcctatgcctcgctggtggataatggatttggcgtgcgtttgtccggtgaagattcggggcgcggcacgttcagtcatcgtcatgccgttgtgcataatcaggcgcaagccggttgttggctgccattgcaacatatccgcgaggggcaagcgcctttcgaggtctttgattcggtactgaatgaagaggcgatgctggcctgggagtatggctattccacctctgcaccacagcaactggttatctgggaagcgcagtttggtgattttgccaacggcgcgcaggtggctatcgaccagtttatctcttcaggcgaaaccaagtggggacgctatagcggcttaaccattctgctgcctcacggctacgatggacaggggccggagcattcctccgcccgccctgaacgttggctacagctttgcgcggaacacaacatgcacgttgttgtaccaggtgaatccgcacaaatgttccacctgttacgcgggcaggttttacgttctgcgcgcaagccattggtggtgtttgtgagtaagcgcttgctgcgttttaaaggcgcgatgagcgaactctcgcaatttagcgcagggatgttcaggcctgtgattaccgatgcttatccacacgatccggcactggtcaaacaggtcattctgtgtagcggccaggtctattacgacgcattagacgcccgcaagcagcgtggcctcgaagacagtgtggcaattgtgcgtgtggaacaactttatccattcccgactgacgagctgaacgcagcgctggcgcagtggcggcactgcccgcactgggtctggctgcaggaggaacctgaaaatcagggcgcatggcggcaaattcgtcacgaactggcgtcgctgacgctggagaacccggactggcgttacgcggggcgtccggcggctgccgcgccagcgacaggctatgggcgcgtgcataaacaacaaattgacgattttcttgcggatgcgttcgctcccgtccagccataa

SEQ ID NO: 77272 - DNA, 240 bp, Citrobacter koseri
atgttcaggataatccagcctaatacctggtacgccgatccccacggcgcgccatgcaaaatcctccgcgctacccacgaagtaatccactacatccgtaacggtcgcacctgcattgccagcatgggccgctttaatcaggatttcgagccgctgaccaaagcacaggccgagcggatcgccgaagaaatagaaacagcagaacacctgaagaagctgcgcgcccagcgtgcggcatga

SEQ ID NO: 77273 - DNA, 192 bp, Citrobacter koseri
atgcgcatcaccataaacgttaattccactcttgatgtggaggcagccataacggccctacgccacttcatcaaagagaagaagccagatgatggaaccagtgatgtgttgggcgttggcgtaactggtggctcctacttttccgttggcgttaagccgaacggaaattacacagttaagcagcaggaatga

SEQ ID NO: 77274 - DNA, 753 bp, Citrobacter koseri
atgcgagtagataatgaagttctgaatgtactgagtgcggcagagtgtaatggaccacaactcttccttaccggtcagcttgatcgaaacctctacaccaggaccaataaagttttggaggccgctggagggaaatggaatcgcaaagccaaagcgcacatttttgataccgacgcatcagaccgcatcgagcaaattattcttaccggcgatgtagtggtaccgaaggatgattttgagttcttccctaccccgcctgccgttgtaaggcatgtcattcacttagcagatatccgggatgggatgcgcgttcttgagccgagcgccggacaaggtgctattgctaaagcagcacacagcgcagcaacagatgtgatgatcgatatgtatgaattgatgccagcgaacaacgacatccttcacggtctcaatctccggctttcaggtatcggtaagccgactgacttcctaactgtcgagcctgaaccggtttatgaccgcgtggtcatgaatcctcctttcggccgacaggcggacatcaagcacgtttctcacgcactgaaattccttaagccgggcggcctgctggtatcggtaatggcttcatctgtgacgtttcgcagcaacaggctgacaactgatttccgccagctcatcgaggaacgcggcggccacatcgaagaactacctgaaggtgcatttaaatcatctggaacgatggtgaataccgtcatcgtggtaattccaggctga

SEQ ID NO: 77275 - DNA, 246 bp, Citrobacter koseri
atgagcgaaatgaccttaatcgtgcccaacgactgggtaaccgaagaaaagctcgtcgagattaccggccttcgcccgggcactatcgagcgggcccgaaaaaaatgctggatggtcggccgggaataccttcacgtctcgcctgacggcgtgccgaagaaaaacagcgaatgcatgtacaaccgtaaagcggtcgaccagtgggttgagagcatgtcaaagaaacagccgggtgcgcgccaatga

SEQ ID NO: 77276 - DNA, 1296 bp, Citrobacter koseri
atggctaagtcagcatacccaacaggcgtggagaatcatggcggcacgctccgcatatggttcatctataaaggcagccgcgtgcgtgaaagcctcggcgtgccggatacaccaaaaaacaggaagatcgctggcgagctgcgcgcgtcggtgtgcttcgcaattaagaccggtaacttcaactatgcggcccagttccctgactcaccgaacctgaaaagatttggcgtggagagtaaggaaataaccgtgctggagctggcgaacaagtggcttgaactgaagcgtatggagatcagcaccaacgcgatgtcacgctattcatctataacgcgcaacatggtgcccaggattggcggggataagttggcatctgcggtgacacaggaagacttgctgtttatcaggaaggagttgttaaccggttatcacgtattgaagacaggacagaaaacgccagtaaaaggtcggtctgtcagaaccgtcaataactacatgagaacgatgtcaggcatgtttaacttcgctgcggacagcggttatgttaaggcgaatccgtttaacggtatttccatgctcaaacggtcacgtactgaaccagatccacttacgcgtgaagaattcgtcagactgattaatgcgtgtacccaccagcaactgaaaaacatgtggtctctggctgtgtacacaggagtgcgccacggtgaactggtgtcactggcatgggaagatatcgacctgaaagcgggaacgatgatgatccgtcgcaaccacactttaacgaaggagttcacccttcctaaaactgaggccggaacggatcgcatcataaaccttattcagccagccatcgatgtgctgaagaaccaggctgaaatgaccaagttaggcaagcagtatcaagttgaggtgaaactgcgtgaatacggtcgtactgatgtgcatccatgcacgttcgtgttcaacccgcagatcgtatcgcgtaatggccgtgccgggcatcattacgctgtggggtcgatcaaccagtcgtgggaggcggcaatgcgacgcgccggaattcgctatcgcaaagcataccagtcacgacacacatacgcatgctggtcgttagctgccggagccaacccgaacttcattgcgaagcaaatgggccacaccgacgctcaaatggtttaccgggtatacggatcctggatggctgaaaacaaccaggaccaggtactcatcctcaaccagaaattgagtgagtttgccccacccatgccccacgcagtaggatcggataggtattaa

SEQ ID NO: 77277 - DNA, 480 bp, Citrobacter koseri
atgcgtactcatcaactgaataagtcccgtaaactgtatcgcagcgtcaacacgactacgcggcaccattctaataatccaggtgcagagtatcgctgggaacgcaatcgtaaaaaagccggagatgagctactggtaaagcgcgagacaatgcatggcagacagaatcgtggccgagactacaccccattgttttattttctgatcaagcagattggcaaaccgtgggatgaaatattcagcgaaatatgtggacgtcttgataccaccgagcctgtattctggttggtcgcgctacatgagcatcagcgaagggatttagtctgcattggcgaaagcagtttttatccgggtttgtttgttgatgagaatggaattctgcaacaggtaaacccttcaattacgagaaaggacgttaaagtgacttgccgctgctgtacacacacttatattggtgaacctgtaccctggatagattga

SEQ ID NO: 77278 - DNA, 243 bp, Citrobacter koseri
atgttcgttgaactcgtttacgacaaacgcaatgtagagggtctaccgggtgcaagaaacatcatcctgaccgagctgacaaagcgcgtacaccagatcttccccgacgccgacgtgagggttaagccgatgcaggcgaacgcattaaacagcgattgcacaaagactgaaaaagaacgactaaacagaatgcttgaagaaatgttcgaggagtctgatatgtggctggtggctggtatctga

SEQ ID NO: 77279 - DNA, 1395 bp, Citrobacter koseri
atgataacaagaaaatcattattgtatggcttgtcaatatctgtactatcgttaacatgtgcttcttttgcatataattcattctttaaacaaaaagatgctctattaattattggatacggccagagcttgatgacgggtatggaagggtggccagctctaagtaacaaagaaatcgtagacaatgcttttatgatcggggagtctgtaaggccaacagaaagacattcagcattttacagaacaaatggcagtggctttagaaccatatcttcagtagttcaaaaccccgataaaccatcagaaatatataatcacaatgacgtgtctattctcaaaagaaattctttagctgaaggtgaggaaccaatcgttccggctgttaaaattttagctaaagaacataataatagtttttttgttggtatgaatgccggggcttctggtgctgatataaggcaactttcaaaaaaagatcttcatggttattataacaggtatcttgatgcagtatctatatttaatagcaatgcaatagatgttggtttggtgccaaaagttatgtcaatagtttttatgcagggagaaatgaattacatgcctccatactctggagcaccaactacacaagaagactatggacgttatcttcagaatctttatgaagatatggaaaaagatgccgttaatattaccgggcagaaaaatccaccatttttctttatgtatcaaacaacgggagcttatacgtcagataagaataatttatccgtcggcatggcccaacttagtttctccaataagaataaaaatgtttttatggtagggcctacctaccagtaccctgataaaggaaatgatataaataatgatgcgcatcttgatccaaatagctacaggtggtttggtgttcaactggcaaaagtgatgcataaggtgattgatgaaaacatcaactggagtccacttcaaccgatctctacatcattattgaatggaaaaattgttattaaatatctcgtgccatctcctccccttcggtttatgggggcatatgacagatattcacttgttatgcatgaagataagggatttactctatatgacggcagcggacgtgtagacatatcatccgttgaaattacttctcctgacgagataacaataacgcccgcgcgaagaattaacggtatggcaaaattattttatgctgataaaacataccataacggaaatggaaatgtggccgacagtgatagcactgtttcacctttgaactatgaatacatcgaaggaagcggacagtttccagaatcaaacataaaagagttggtcgggaaaccgtatccattgaacaattttagcgtggctttctattcttcagttgatgaatga

SEQ ID NO: 77280 - DNA, 192 bp, Citrobacter koseri
atgcgtatagcacttgtccaaaacggtactgttattaacgtcgtgatatctgacgatatcgaaattatcagggaaaatacggaggatgatattgacgttatcgcctgtgacggcgaattgttgggtattggctggactctcgacgagtctggtgagtttgtacagcctctattagatatcgaaccgttgtag

SEQ ID NO: 77281 - DNA, 903 bp, Citrobacter koseri
atggcacagaatgactttaaaccgttcgcgactgctccgaatgctaatgttacaccacaggcagactgggaaaatcttcctgcgttgcagtctggatttactacaggtaaggcttccagcgcacaggtgaataaggcagtacgacaatcaacttttgttgcatcagctatagcgcagtttattagtgagaagacaaacagcgatgtgttagatgatggtgatgttgatttgtttgtagaaaaattatccagttcactaagtggtagtttaattgcggtaaaaaccattactacaactcaaacataccacgcatcagaaggaactcgttttgtgattgtggagttgctgggcggcggcggcggcggcggcggatcagcagtaacaacagcggaacagcaatctgttggtggcggcggcggcgctggaggatatataaaagcaagggttaacgatggttttgacggagcattagttactatcggagcgggtggtacaggtgttaatggcggaaccggaacttctggcggaacaaccagttttggaaacgtgttaatcgctactggtggcgcaggtggaaccgttgtgccaaatacgatcattccttatgctggcggcgatggtactggtggattaccgaccgggagcaatcccatcgtgttggcaaaaggctccagtggcggctatggaattatgtattcaaccgcatttgcaacatcaggagcaggagccgcatcatttttgtacccaggtggttccggcgggggaactcaaaacccaagagatggttatagcgctacggagtatggatgcggtggcggtgcaggaaacagcagggcttcagggacttcaagggctggaggtgatggttatcaggggatcgcaataatttgggagttttcgtga

SEQ ID NO: 77282 - DNA, 753 bp, Citrobacter koseri
atggcagtatcagaccagacccgcagtggcgatcttgccgaaacattcaaatctgagcgggaaaaaacaaagaaccagatccgcgtcgctttgcctggcattatccagtcatttgacccggatgcggttacggcggttgtgcagcctgctatccgttacgttgaaatcgataacgacggcaatcgggtgactaaaccttacccgctgctggtggatgttcctgtggtattccctgccgccggaggcgtcactttaacactgccggtgaaagccggtgatgagtgcgaacttaggtttcaggaccgatgtattgatttcttctggcaaagtggcagcgtgcaggaacctgttgatgaccgagtacacgatttgtctgatgccacctgctcggtggggcaaatatcccagcccaacaaaattaagaatgtcagcaccacatcggcgcagctgcgaagcgtcgatggcagtacttatatcgatctcaaccccgcgacgaaaaaaattaaaattgtggcgccaggtgggctggatgttgttacccctctggccgacttttcggagaaagtcactattcacggtttgttaacgtggatggggggcatgctcggttctgttgtctcgggcgttgcatccaaaatcaccggtgctgttgaattcatcggtacagttaaagctaatggtaaatcaatcgacgaaacgcacactcacggcggggtacagcgtggtggaagcaataccgatgaggtgaactaa

SEQ ID NO: 77283 - DNA, 588 bp, Citrobacter koseri
atggatattctctctacgctgtttcagcagcagagccgcaaaatagggatgattatccccagcgttgtcgtttctgaaaagcacagcgacacgctggagataacggaacatcccgttgaggtcggagccgctgttgctgaccatgcctataaaaaaccgtcagaagtggtgatggaggtcgggttttccggaggaggggcgttactggatttcgccagcagcctgacagccaccggcttactcggtatgagtccgcagcagacatatcaggagatactcaatttacaggcaagtcgtataccgttcgatgtggtgaccgggaaacgactgtacagcaatatgctgatccgcgcgctggaggtgacgacagacaaaacgacggaaaatgtcctctctgctgttcttaccctgcgcgaggtgctcatatctcagacgcagcaaatcaccgtcgcggacaaatccgacatgaaggatggcgtgggcacatcccctgtgctcaacactggcacgaaaaccacaaaaccgcccaataactccctgctgaaaagcatcagcgggagcgcggcatcaatactggggatcggctga

SEQ ID NO: 77284 - DNA, 1986 bp, Citrobacter koseri
atgaacgctgagacgattaaagactttctcgtctccctcggtttcgatattgatgaagcgggataccagaaatttgagtcagttctgactggcaccacggcaaacgccatcaaagcaggtctggctgtggaaggggcggcgctgtcagtcgtggcctacacggcgaaaattgccagcgggatggataacctctactgggcctcgcagcgcaccggcgcaacggtggaggggattaaatccatcggctacgcgttttctcaggcgggaggcagcgccgatgccgcgcgcagctcactggagagtcttgcgcgttttgtgcgtaccagcccaggtgcggaagggtttcttaatcgcctcggggtgcagacgcgagatgccagcggcaatatgcgcgacatggccgccatctttacgggcgtcggccagcgcctgagcaacatgcagtattaccgggctaaccagtatgcgcagatgctgggcatcgatgaacagacactgatggctatgcgtcgcggtgtgggccagttcagcgcgcagtattctgaaatggcgaaggccattggctttaattcagaccaggccgcgcagtcgtccaaccggtttatgacctcgctaaaatcgtttggcgaaatggcgggcatggcgcgcgacaaaatcggctctaatcttgctggtggactggcggggtcgctggacatcctgcgccgtcatatcctggataatttcccgcgtattgagcagacgctgacgaaagctgttaagggcattctggcgctcgggggcattatcgggcgactgttcttccggcttatcgaaggggcatcagaccttattgactggtggcagtcacttgataaacagacgtgggaaatgattgcgctgctgggcgcgctgacggttgcactgcgcattctcaacagtacattctggatgtctcctgttggcctgattacagcgctggcggcgtctattgctctgctgtgggaggattacaggacctggaaggaaggcggtcagagtctgattgactgggggaaatggaaacctgaagtcgatgccgcgctgaagatgacgcgtgacctgcaaaagacagtcagtgatctggcgaaagcgctggcgaaactgctcaatattgaccctaaatcatggtccctgaagtgggatttcagcaacttcattgaccagatgggcgaattcagcaggatgctgaatatgatcgccgacctgctgaatgccatcaaagacgggcgctgggcggatgcgaccagccttggtaagcaactgcttaatcaggggagtgggcagccgtccgccatgcctggagtgaccgacagcgccaacggcgccgccgactggattaaacagcgttttgggtttgatccccgcagcgtggggcagactgttcgcggctggtttggtgctgacgatgaaccggggcaacatgtacaggctgcgaaacgcggtgagcgaaataacaacccgggaaacctgaattttgcagggcaggcgggagcaacccttgaaagccctggagggcggtttgcccggtttgagactgcatacgatgggttgcgcgcgttgtcgcgtcagttgatgttgtacgctggccggggaattaacagtgtggagaagatcatctccacatgggcacctgcatcagacaacaacaataccgctgcttatatccaggctgtttctcagcggctgggggtagatccccgcgtggcgctgaacatgaacgacccgcaaaccatgtccgctttaatgagtagcatcatccatcacgagaacgggagaaatatttactcccgggaactcattggaaaagccgctgttgcgggtattggcggcgcacaggttagccagaagaacaactattacatttacggtggcggcgatccccgtgcagttggttcggaggttgagcgtcggcagcagtcggcgaatgcgcaggtaatgcgcggcaaccaggttaaggtgggttaa

SEQ ID NO: 77285 - DNA, 1269 bp, Citrobacter koseri
atggccctaacggatactaaagttcgttctgcaaaacctgaggagaaagagtattcacttgttgacggcgacggcatgtccttacttgtaaaacctaacggttcaaagtattggcgatttcgtttccgttttggtggtaaacaacatttgatggcgttcggcgtttacccggatgtttcgctggctgatgccaggaagaaaagggaagaggccagaaggttggtagctgctggtatcgatcctcgtgagcataaacgtgctgtgaaagaagagcaggcaaaagagattattactttcgagaaggttgccagagagtggctcttgaccaatcagaaatggtcggaagatcatgctaatcgcgtaaaaaagagcctggaggacaatatcttcccggcaattggtgctcgcaatattgctgaactgggtactcgcgatctgttaattcccattaaagccgtggagacatctggacgtcttgaagtggcttcccgtcttcaacagcgcaccacggccatcatgcgttatgcagtgcaaagcgggttaattgattacaacccggcgcaggagatggcgggggcggtagcttccagtaatcggcagcatcgtccggcgctggagttaaagcgcatccctgaattactccagaaaatagacggctataccggcaggccgctaacccgctgggcaacggaactcactttgcttatctttattcggtccagtgagctgcgttttgctcgctggtcagagatcgattttgacacgtcaatgtggaccattccgccagagcgagagcctattcccggcgtgaaacattctcagcgaggatcaaagatgcgtacacctcatctggtgccgctttcaaagcaggcgctggcgatcctgaagcagataaaacagttctgtggtgaacatgaactcatttttattggcgatcacgatccgcgtaaacccatgagtgaaaacaccgtgaacagtgcattgcgggtgatgggctatgacactaaagttgaggtttgcggtcacggtttccgcacaatggcctgtagttcgttaattgagtcagggctatggtcgaaggatgcggtagaacggcagatgagccatatggaacgtaattcggtgagggcggcgtatatccataaagcggaacatctggatgagcgaaagctgatgttgcagtggtgggctgattttctggatgctaacagggaacagagtgtcagcccttttgactatgcaaaaattaataatcctttgagaaggtga

SEQ ID NO: 77286 - DNA, 2016 bp, Citrobacter koseri
atgtcttattatgccagtcagtattacagtaattataaaagtggtggtaatgatgaaagcagctacgtaagtctgaacagtgggctaaatctgtttggctggcagttacattcgaatgcaaacttcacgaaaagtaatgatgccagcggagaatggaaaaataatacattgtatatggaacgtggcatccctgaaatattaggaacgctacgtgccggggatatgtataccggaaccgatctgtttgactctgtacgtttcaccgggatacgtatctggcgcgatatgcaaatgctgcccaattcgaaacaaaactttacacccattgttcgtggtattgcacaaagtcatgctttagtaaccattgaacagaatggctttattgtctatcaaaaagaggttccgcctggcccatttgcgattgccgatctacagcttgctggaggtggtgccgatttggatgtcagtgtaaaagaagctgatggttcagtttcccattatcttgtgccttattcatctgtacctaatatgctacagtctggcgtatcaaaatacgatattgcggcagggcgtagccatatagaaggcgcgacaaagcagacggattttttgcaagccaattatcagtatggattaaataatctactgacattatatggtggcactatgctgtccgaccattaccaggcctttacattaggcactgggtggaatacacacattggtgctgtttctgtggatgccactcagtctcatagtaaacaggataatggtgatgtttttaatggtcaaagttatcagatagcgtggaataaatatgtttcacaaacaggtacgcagtttgcgttagcagcctatcgttattcttcacgtgattaccgttcatttaatgatcatgtctgggcgaataataaaaacagctatcatcgggataacaatgatgtgtatgacatcactgattattaccaaaatgattttggtcgtaagaatagtttttctgtcaatataaaccaggggttaccagagggatgggggaacctggcactgagcggattatggcgtgattattggggacgcaatggcagcggaaaggattatcagttgagttattctaatgactggcggcgtattagttataccttgtctgcgagtcagagttatgatgaggataatcgggaggataagcgtcttaatatttatatttccatcccattctcctggggcgatggcgtcacggcaacggaacgcgatctctttgtttcaaactcaacgacgtttgataacgaaggctatcagtcgaataataccagcctaagcggcattgcgggtggtcgagatcaatttagctatggcgcgaatcttgcgcatcagcggcaaaataatgaaacaagcgcaggtggaaacctgacgtggcgagcgccggttgcgacggtaggcgccagctatagccagtctaataaataccggcaggctggtgggaatatccaggggggaattgtcgcctggtctgatggcatacatttaaccaaccgcctctcagatacacttgccattattaaagcgcctgggttagaaggggcagcagtgcaaggtcaccgttatctgaccacggacaagaatgggtatgccatatatgacagtctgacgccatatcgtgaaaactttttaacgttggatctttcccatacctacagtgatgtcgaactacgcggtaatcgtaaggggattgtgccttatcgtggtgcggttgtgttagctgagtttgaaaccgacaggcgcaagccctggtattttctggcgcgacgtccagatggttctccattaaccttcggttatgaagtagaagatcattccgggaaaaatgttggcttagttgggcaaggaagtcgcctttttatccgtacagataatgttcctgcctctttgaaagtcgcgacaaacaagcagcaaggattgttttgcattattacttttgatggcgtaattgatgagaataagacctatatttgccgatga

SEQ ID NO: 77287 - DNA, 204 bp, Citrobacter koseri
atgaaagaaaaaaacaactttatacgtctacctgaagttctggaaagaacaggattttgtaaagcttggatttatcgtttgattagtcgtgacgaattcccttcacctataaaaatcggtgatcgtgcaatcgggttcgtagaaagtgaaatagatgcgtggattgatgaaaagatttatttatcaagaaataaagccgcctga

SEQ ID NO: 77288 - DNA, 546 bp, Citrobacter koseri
atgaatgatgtaacggcattcaacaactgcatgaacgtgttctggcgacagcatgaagccgaactctctcgctttctgacatcgaagacaggcgatagagaaaaagcggcagaccttctgcaagagctattcctgcgtgcccgtgttcattcagacagtttctgcgagatggagaatccgcgagcctggctgtatcgggcggcgaggaatctgctgattgatgagtaccgcaataccagggaattcgttgagctggaagaagaggtccatttgcccgatgtttctcctgatgcaatctcaacgctggatatttgtctgcctgaaacattacaggctttacccgaagatgagcggtggctgattgaagaatccgaccttaaccggcgtccccaacagtcccttgccgatgaactgggaatcacgcttacagcgtttaaatcccgtctgcttcgggccagaaagcacctgaaagaaactatgacagaactttgtcagattgaggcgggtgacacgtctcccgtctgctgccacaaaaaaatgaattaa

SEQ ID NO: 77289 - DNA, 192 bp, Citrobacter koseri
atgcaggcagccctggattatctccgggaacagggtgaaaccgtgaatgatgaagatgtcgcacgcctctcaccactttgctacggacatatcaatatgctcggccattattccttcacgctggcagaactggtgacaaaagggcatctgcggccattaaaagaggcctcggaggaagaaaatattgcttaa

SEQ ID NO: 77290 - DNA, 681 bp, Citrobacter koseri
atgcgcacaaatgctggccgtgagcgcgatttccgacaggaacgccagcatctcctcgatgcactggccgttctgctggtcagcggttgcgacattgccacgtttaacgtcgccctcaacagttcacagatatgcaaggcgttaagtccaaaagattcccggggtgaggtaatacctggtgaagaggtcacgccttcccgcatttgccgcgcactcgatctgttagaaaattacggccttatcgagccgtacatgcgtcgcctggacccgtacacaaaaacatacctcccgcgtcatgtcacgttaacagagcagttcttcaggctcctccaggtcaatctcgatctgctgttcaaagagcgtgaagaacgtctgcgcgcgctggctgaggggattcttgcccctggtgaagtgatgtccgtaaaagcggccagacagcgcttctttgacgagaaagtggcgcaggccctgaaggttcgccgcgagcgagcgatagaacagaagcgcctatcccgaattgctcgttctacccagctcgatgaccggcagttccagattgcagcctggctgatcaacacgcggccggaagtctcaggcatgactccggatgatttcgagttgctggtctaccattacctgcgtcagatcaagctcaattttgacactgagccaccaggctaa

SEQ ID NO: 77291 - DNA, 237 bp, Citrobacter koseri
atgtcgcagcctggaaatgcagtttcctcatcgaaagaaaaacgtgcgtaccgcaaaggccatccgctaagtgcttctgagcgacaacaaagttttgttgcgcggaaacgtgaaacgcacaaagaaattaagatccttgtgcctaaagagctcaagagcaaatttcaggaaatgtgtgcagaaagcggtctgagtcaggcagaactttttagccgtttaatcgacaaagccagttaa

SEQ ID NO: 77292 - DNA, 564 bp, Citrobacter koseri
atgcaaacaatttctaaaaaacatatgtgccgatggcttctgcccggcctgctcggtctggttctgtgcgcgcaagtaccgaatacttacgctgccaccattgaggcaggattttctccagaaggtacagctctccagctggttcttaagacaattgagaccgcgcaacaggaaatccgtctgatgggctattccttcacctctccggaggtggcctgggcacttgtcagggcaaaacgtcggggtgtcgatgtgggcgtggttctggactggaaagctaataccggaaggaacaacaacgccagtaaagcagctatgaaccttctggttggtgctggtataccggttcgtacagtcagtgcctacaaaattctccatgacaaagtgattgtcgttgatggccgcaacacccaggccggctcatttaacttcagccgggctgcagactgttcgaattcggagaacgtgcttgtcgtctgggatgacccagtcttagcccgcagctacctgaaccactggacatcccgctgggcgcagggaacggactggaaacagacgtactga

SEQ ID NO: 77293 - DNA, 342 bp, Citrobacter koseri
atgacaaataagcaaatcgctttatatgcggttatctctggttgcctgtcattaagcgggccgacgtttgcttcgtcaaaagggcctgtacttatccattcagaactacctgaacagattctggctgagcctcacgcggtgccggagctggtcacgactaacgtgcttctgcggcagattcttgcggaggtgataaagacaaatagcctgaaggaagataaacgctgtagcgatggtgaaaagaactattctccgggctacatcatcagcgttggcaataaaacgctgcgttgtgatattgccaaagattacccgcaatggatcgagggggacaaagcttga

SEQ ID NO: 77294 - DNA, 732 bp, Citrobacter koseri
atgagtccgggaaaatctgttgccctgcatcctttcaggccggtcctgaatttttccgcgctgcagcgcgatgtcatccggatggccgcatttatggcaatggtgggggaccacatcgccactgcctttcagctggatatgcccttactgaacattgccgggcgttgtgcattccccctgtttgcgctggtcagcggctgtaacatggcaggcaaaaccctgcgtcagcacagcctcaaccgcctgtggctgatggcactcctggcccagccgggttactggctggccttcagggaagccggactcatgtggtggcaactgaatatcctgtttgccttcgccgttgtcatgcaggtgacccgcttcctgcaggcggcgaccgtgcttaatggcgttgcggctttcacggccctggtggggtatctgccgcttagctctgccagttacggtatacccggtttgctgatgctcgccggcgcgctgcttatctggcaggtccgggactcactgcggtcagccctgtttgctgtctggctgttgctggtcgccctgcttaatgcccggcatggtgatgtgatgacgctctccggcgtactgctgacgttgactgtgctgttttgcgtgcacgggctggtaccggctctcggacgacgcctgcaggccggacggtggtttgcaccagcgtatgccctccatctgctgtgtattggttttctggtcagtgttctctga

SEQ ID NO: 77295 - DNA, 567 bp, Citrobacter koseri
atggttaccggaataatcatcattgccattctgctcgccggatttgtggtattgctcaggcaggccggttcagcccggcatccacttttgcagagactgcgtgaaaaagggattcggccgggcagaactgaactgttgctgtgccgccgaccgtcgttcgtcagtgccggtcagctgatgacggagcgggagcagcgttttctgcgccggctcgacagggtgaccgatacccgccagtggcggctgtgcccgcaggttcgagtggccgatatcgtcagagtggcgcccgaccgtaaatccgggagccgtgaatggtggcagctgttccgcctggtatcgcaatggcattgcgatgtggttatcacggaccgcgccgggcgaatcattgcggcagtggcgctggacgaccgttcccatcaggcaccgaaacgtcagcggcgtgacctgctgctggaagaggtgctgaaacaggcgggtatcccgctgctgcgtggcgatgatgagcaacaactggctgagcgcgtcagggcacacctttgcgcacaacgaccggaggctgccgcatga

SEQ ID NO: 77296 - DNA, 5298 bp, Citrobacter koseri
atgctctccatttcttccatcaagggtgatgcgggctattacagccacgaagacaactactatgccagcggttcactggattcccgctggatgggggaaggcgcggagaagctgggcctgaagggggaagtggccagcgccgatatggatgcggtccgccagggcagactgcctgatggcagtgacctgtcccggatggtggatggtgtcaacaaacaccgcagtggctatgacctgacgttctccgcccccaaaagtgtgtccgtcatggcgctggtcggggaagatcggcgttttattgaggcgcataaccgggccgtggcggtggtgatgaaggaggtggagcacctggtcagcgcccgcatcacgcaggagggaaaaacggaaacggtgctgactggcagtatggtggctgcgttgtataaccatgacacctcccgggacctggacccgcaggtgcacacccacgccctggtctttaatgcgacattcgccgatgaaaaatggcggtctctggccagcgatacccggatgaaaactggcttttctgagaatctgtacgccaccaagatagcgctgggaaacctgtaccgttctgccttacgtgaagacattgagtcgatgggattcgaaacggtggcggcgggtaaacatggcctgtgggagctgaaggatgtgccggtggacatcttttcctcgcgcagtcaggcaattcgggaagccgccgggcctgatgcgtcagcaaaatcgcgtgatgttgccgcactcgatacacgacaggctaaagcctgggctgacccggatttgctgaaagctgactggcgccgacgcttaacggatgaaaaatttgatatcggacattacatcagtcaggcgcaggcgcgtgtggaaattactggttctgttgttgctggccagggggggatgcgggcgccgggccagccggggatcgggtcttccggcgaagcagctgacgaactggtgcagaaggcggtcagcgacacaatctccgcgctgtcggacaaaaaggtccagtttacctggtcggaaatgctggccggcacggtcagtcgtctgccctccgcaccaggtctgtttgagcaggcccgtgccggtattgaggccgcgattgaagggcagcgtcttattcccctggacagggagaagggcatcttcacctctgatatccacctgctgaacgaactcagcgtccatcagctggcgcgtacggccgttgcggagcaaaccgtgctggtctttcctgaacgggcacaggagcgcgatatacctgccggggatgctgtctctgtgctgtcgcaggataaaagccctgtggccattctcagcggtcgcggaggcgcgcagaccctgcgtgatcgcacggaagatgtggccatgatggcccgctcacagggccgtgaggtgatggtgattgcagccgacggtcgcagtggccagtttctgtcagaaagcccgcatctggcaggccatgtaatgctgcgctcgcagatgaatgcagacaccgtattgccggtgcagggcacggttatcgttgaccgggcggagagactgtcgctgaaagaaaccgtgctgctgcaggaaaaggcgctcagcgccggggcgcagctgatatttatggacacggagaaccggcagggaacgggcaatgccctgtcggtgctgaaagaggcggatattccccagtaccggttttacggcacgcagctgccggaggtacgactgatcagcgaggcggataaacggagccgttatggccagctggcgcaggagtacgtgcgcctgtctgctgaagggcgggatgtcgtggcccaggtgaccggtacccgggaacagcaacaactgacggaggttatccgggatacgcggcgtgaggccggagagctgggccgggagcaggtgacactccgcgtactggagccggtgtggctggacagcaaaacccgtcatcagcgcgataactaccggcccgggatggtgatggagcagtgggacgctgagaagaaaacaatgacgcggcacaccattgaccgggtggctgaggccactaacagcctggtgctgcagggggaagacggcaccaggctgaccctgaaggtgacgcaactggacggcagctggagcctgtaccgcagccggacactggaggtttctgaaggggaccgcgtcagggcgctggggcgtgagctgaagggagccatcaaagcgaaagagcagttcaccttggcggggctggaaaacggcgcagtacggctgcgcagcggggaccgggaactgcgtctgcccactgaacgggccgtgaagctgactcatgactatgtggaagggaccggggcgggtaccagcgcctcgcgcacggtactggccgcagtcggtccgcgagggctgaataaacaggccctgaacgcgctggcgcagagcggcagcgacatccggatttatacgccgcttgcgcctgagcaggctgcgcgcaaagtggaaagcgtgtctgccgtgcgactggccagtgaccaggtccgtcagtcgaccggcgaggcaaatctggataccgccatacaggccagtcgggaccgcctgatgtcggatgcagagcaggccgtcagtctggccatcccgcgcgcgcagcagggacaggtacacctcagtgaaattaccctgctgtcagaagcggtaaaatccggccagccgctggctgatgtccggactgaaatcgcccggcaggtgaacagcggggagctgattcagctggattcggtttccggggcgggaaacagggtgcttgttccgcgcgtggcgtatgagatggaaaagaccatcatccgccatattgctgagggtaaggatgctgtacagcccctgatggcgctgacgcctgcctcagtgctggcaggtctgacggcaggccagcgggaggccacacggacggtactggagaacaccgaccgctttatggccattcaggggtatgccggggtggggaaaaccacccagttccgggcggtgatgggtgccctgaacaccctgtctgaatccgtgcgcccgcaggtcattggcctgggacccacgcaccgggccgtgcatgagatgcgtgaggccggagtggatgcacgaacgctggccagtttcctcagtgaaacccggctggccattcaggccggagaaacaccggacttccgcaatgtcctgttcctcaccgatgagagctcgatggtgggcaaccgcgatatggcagagctctatcagctggttactgcaggcggcggacgaatggtctccagcggggacaccgcgcagctgcaggccatctcaaccggtcagccgttccgcctggtacagcagcgcagcgccatcgatacggtggtgatgcaggagattgtccgccagaccccggcgctgcgtccggcgattgaaagcatcatcgcaggtcaggttgatacatcactgcgccaggtggatgacgtcagcccgcaacaggtcccccgtcaggaaggggcctgggtgcccgggaattccgtcatggaaattcgtgctccgaaaaaggaccaggagcaggacactcccgccgccgatgaacagacactgacaccagagcaattgtcactggtccggactgacatcattgaagccatccgggatgactggatggggcgcaccccggaggcgcagctgcagacgctggttgtggcagaacttaacgctgaccgtcacgccatcaatgatgccattcatgccgcccggcatgagaaaggcgatacaggtgctgaagaacgcacgttcaccgtcctggagccgctccgggtgcctgacaacgccctgcgtgcggctgaaacctttgcggagtataccggcgccgtggccatgatgaacgagcgctactggactgtagcggaggtggatacgcaggacgccgtggtcacgttgcgtaatgctgacggggagtcggtgctgatctctcctcagcagaacactgcacaggatatttccctcttcacaccccgcgatctgacgatcagtcacggggacagggtgcgctttacccgctcggacaacgaccgcggctatgtggccaacagcctgtgggaggtggccgggttcactgacgacggggccatccgcttccgccagggagagcaggagaaaattgtcgacccgcaggccatgacggaggaccgtcatattgacctcgcctatgccctgacggtgtatggcgtacagggggccagtgagcgctttgccattgccctgaccggtaccgaaggtggcaggaaaagaatggcgtctctggagtccacttatgtgacgctgtcacgagcaaaagagcatgtgcaggtctataccgacgatctggctggctggagtgccggtgcccggcattcaaatgccggacagaccgcccacgacctgctgcaccagaaaagtgaccacgaatccgacaccggcaaccgactgctggccaccgcctcacgactggataaaaccgcgctgggacgccgggttttggcggaaaacggcctggagggcgaaacaatggcgcgcttcattgctgccggcaggaaatacccgacaccgtatgtggccctgccggcgtggacccgtcacggacaggaagccggggcactgctgaccgaaatccgcattgaggatgacgggatgcgcgtggtgctcagtgatgagtcccggctgcgtggtggggaggatgcacagttcgccggcctgcaggccagccgtaacggacagacactcattgctgatgatgcacagacggcgctgcgcctggcacaggagaacccggagagcggggtggtgatacgcctgcacggtgaagaacggttgctcaatgcagcccgcctgaccggaggacgaatcacggagcctgatgaggtggcacggacagtgcgcagtgtggcggaggttgaatcggcagcgaaagcggaagaccccattacgctgcctccggacgagcagcagaaactggcagaggcacaggaaaaagcggcccgggagctggcggagcaggcccggcaggaactgctgccggcagtgccgggtgaggagagcaccagacccgaacccctgttgtctgccgatgaagaacgtcgcctgcgtgatggtacagcccggggagaacgtgagctggatgaggccattcaggaagcggtggcggaaggtcggggtatccgccagcaggtgcgcgaacagatgctgcgtaccgagcgtgagtgggtggtgaatgtaccggaaaaagacattgagctggaaaaaacgctcggtggggactga

SEQ ID NO: 77297 - DNA, 2304 bp, Citrobacter koseri
atgcagacagacctgtatccggcatgtctgctggttaccagcttccgggaaaatataatgagcctgaatcctcgcgacttaacgcagggcggtcaggtcgcttttatgcgcctgaaaatgttcctgcaaataaataacctgatttcttattacgttattatggggacggtattatttggtattgccgtactgctgatgcgtatgagtattcagaatctgaccaacggcattatttactggtttgtgcgggtaatgtcgccttttactgaaaaaatggtcagtcagcctgtctataccatccgttattacgaacataacctgcagtacagcgccaggcaggtgttgagtgacagttacaccatgtactgcggccaactgctgaaacaggaactggttattgcaggatgtgccgcgctgctgatcgcctttctggccacgctggccgtgtactggtatctcgggcgtgctggccgtaaacagagtgaggatgaaattatcgggggccgggtactctgcgaatcgccaaaagaagttgcccggatgatgaaaaaacgcggggaagcatccgatattcgtatcgatgacctgccgctgaagctggattctgagattcagaatatggctatgcatggcacggtatcaaccggtaaatccaccctgatgcgcaagattttaaaacagcttcgtgacaggggcgatctggtcattatctacgacaaaggctgtacgttcgttgaggacttctacgacgaatcccgggataaagtacttaacgcgctggattcccgttgcccaaactgggatttgtgggaggaatgccgctctatcgccgaactggagaatgccagtacgacactgatcccggccagtagcggtgaagatcctttctggcagggcagtgcgcgcaccatcttcgcggaaggtgctgagcgcatgcgtaaggacgaagatcgcagctacaacaaattcctgcgcacactgctggccataaagctggaccagctgcgggctttcctggccggtacgccagcctccactctggttgacggaaaaattgagaagacagccatctctatccggagcgtgctgacaaactacgttaaagcgctgcgctacctgcagggcatcgaccgtccgggacgggagaagtttaccatccgggaatggatgaaaggccagaccgataaatcgaagaatggctggctttttattacctccgatgaacagaaccacgagtccctaaagccgcttatttcactatggctcagcattgccgccaccagtcttctcgctatggggccgaaccggcagcggcgtgtctggttcttctatgacgaactggcgtcgctgcataaattgtcctcattaccgaggattatttcagaagcccgtaaatttggcggttgttttgtgctgggttttcagaacatcgcacagatggaagaaatctatggtcctaaagccgccgcgggactgtttgacctgctgaacaccaaattcttctttcgttccccgagtgcggaaattgcgcagtttgtggaaaaagatctgggggaaacccggcgtaaaaaattcaacgaacagaccagcttcggccatgagcaggtccgtgacgggatttccttcggcaaggaggaagaacgtgtcacggtggtgacctattcagacgtccagaaacttaacgatctgcagtgttatgtcaccctgcccggtgactatcccgttgtaaaactctctatgagttatgaggctatgcccaaagtggctgatgccctgttgctgcgtgacgtacagacgagtcttgatcagacacttgaggatgagattcggcggcgtagtgaagaagaacggcacaagtttgccggattgtttgagggagaatcgttaattcaggctgttccgggcggtgcgtttataccggagggtaatctttcgaatactcctcccccttctgccgacctggtggctgctgttcttgcggaagcgaacacgcctcctgcgacgtggccattgcagacaaagggtgcttccggcgatgcagataccgaaaacacggcttccactgcagttgccgctgaaggcgcctcagcctcgaccggagggactgagcgggatatcgaacaggatttaccacaggatattcccccgggcctgaacagcgacggtgaggttgtggatttcgcagcgtatgaggcatgggctcagacctcacaccagactcgcgatatgacccgcagggaagaggtcaacattaaccatgcgaaagataaaacgcatgagatggatgacgggagggaatactga

SEQ ID NO: 77298 - DNA, 738 bp, Citrobacter koseri
atgaaacataacgttaagctgatggcaatgactgccgttttatcctccgtcctcgtgctctctgggtgtggcgcgatgagcacagcgattaagaaacgtaacctcgaagtcaaaactcagatgagtgaaaccatctggctggagccgtcctcacagaaaaccgtgtatctccagataaaaaatacctctgacaaagacatgtccggcctgcaggcgaaagtgaccaaagctgttcaggataagggctataccatcacgtcatcgccggacagcgcacactactggattcaggccaatgtcctgaaagccgataagatggacctgcgtaccgcccaagggttcctgagccagggctacgaaggcgcgatagcgggcgctgcattaggtgcggggatcaccggttataattccagttctgccggcacgacattaggtgttggcctggcggcgggcctggtgggaatggccgctgacgcgatggtggaagatatcaattatacgatggtgacggatattcagatttctgaaaaaaccaccgcaagcgtgcagaccgataatgtcgccgccctgaaacagggtacttctggatataaagtgcagaccagcacgcagaccggtaatcagcataaataccaaacccgtatcgtgtcatctgccaataaagttaacctgaaattcgaagaagcaaaacctgtcctcgaagatcagctggcgaaatctgtcgccaatattctgtaa

SEQ ID NO: 77299 - DNA, 561 bp, Citrobacter koseri
atgaaacgttcagaactggaaaaggatgctgcatacattctggataagtttaaacagctagactatgagattccatcaaaccgccaaattctgaaggttattttttataagttggtgattgtttatgtatttcagttgctgtttattgtttctgatatttttataaattcaaatgttagtgagtatcattattttgatacatttgtgctgtctctggggtctaatgctttttttagtcttgcttttttaatgtcaacatacaatcttgttagcctaaaactttctttaggcagcgaaatcacagagcaatcggttttgttaaaattggttgagagaaaaattaactcttatagtctatttctcctggcagtgaatgctattgttggatgtattttactgtcatcgggggaacggtttgtagcaggactgggattctcatggtttgtaacgtatttaattagtatgctgacgctacaaacatctctttctagatatatgactcctgcggtggttagcagtttgtcaaaagtgaaagagttgctttctgcctcaccaaaataa

SEQ ID NO: 77300 - DNA, 2898 bp, Citrobacter koseri
atggccgttgatacgatttacaccgttgccggcggggcgtggtttcaggatacgctcaatggcgtggcggcattttttaacagcagagccggagactcactgattgctatggccaccgccgtatcggtgattgtcggggcggcaacctatatccggacgcgcaatattatggacctggtcaaatgggccggattttatgtcctggtgattgccgttctggtcggggacaagcggaacgtgcagattattgacctgtctgagccagcggctatctatcaggtggataatgtccctactggccttgcagcccctgccagcctgatcacccgtattggtgccggaatggcacaggtttacgattttgtgtttgcccgtccggacgcgctgacttacagcaaaaccgggatgctgtttggcgcgcagctggcggcggggagcagtgatttccggttctctgagccggaaattcagcgcatgttctctgattacgttcataactgcgtggtgggtgacattatgctgaacaacaagtacagcattggcgacctgatgaattctacagacccctacgcgctgatattcagtaaaccgagtccgctgcgtggtctgtatgacaaaaaccgcaattttctgacctgcgagcaggccacaaccaaaataaacactgattcgagtgatatcagtggcaggaatatgttcccgtttctccagcaggtgcttaaccggatgcacggtttcacgaaccaggtctttggtccgacaaacggtgccagtacggcactgttcaccgaaatgctgggcgacagctataactattttcacggcaattccatgacctccaccgaaatcatccgtaagaacgtggtgatgaatggcctgcgcagtggtctggagagcttttcagcgcagaatggcgatactgccgggctggtgaacaccgccacgcagacctcgatggcaaaaatgcgcctgtctcaggcaaccagtgcgtccatcgctgccaacacgctgccggtgatgcacagcgttctgctgggcatgacaatggcgctgttcccggtgctaattgttctggccgtggtgagttccttgtcctggaccattataaaaggctatatctacaccattgcttatctgcagatgtggcccattctgttctccatactgaaccatgcaatgaacttctatctgcagggtaagctcaacgggacggcggtgacgctggccacctttgaccaggtgcagaatacctattccgatattggcaccacagccggctggctggcactgtccatcccgtttatcgcatggggtatggtgaaaggtttagggcaggtggtatcgcaggcggggaactatctgggacagaccctgcagtcagcctccacacagtcgtcttcgcaggcgattgacggtaactggtcctataacaatatgacgacggggaatgtacagggtaataagtgggataccaactacagccatcgtgaaggccatatgacgaaccagcttgagagcggggcgacgaaaaccctgacgtcatccgggcagtcggtctacaacaccacggaagcaatttcaaaattaccggtcgatattgcgctgggtaaaactgcatccagcagttggcagcagcagcaacgtgatgccctgagcgaagcgcagagcctcagcaacagtctgtcacagacctccagcctggccacctcgcagatgagtcagtggagccagcagaggggaaacagcgacaccacggtgacaggcagcgatgcctctgccagcagcaatctgaccaaagcgctgaacaccattcagtctattggttcccgctatgcccgggatgaaaataccactctggcggaagggattcgggcagcggcaacgaagagtcaggatatgagttttggcgccggggccagtgtgagcgggaaactaaattctgagcgtcagtttgcaggtaaaatcgctgaatttgctacaggcgtttccgtcggtgcagaggcgcatctgaagggagaatatacgtggcggagcggttcctcccacggcaccagttccgatctgacccagcagggcgggaccagcaaagggttcagtgctcaggagcttaaggatttccgcgatgcaatggacgtggtgacctccagccgcgtcaccgacagcggcagccatacggacaatgcctcggcctcgttggcgaaccagctgtcgtccaccttctccagcctgaaaagccaggcatcgcagtataatgatgcggttacccgcagccatgaatactcacagctggccagctatgcagagaacaacagtgccagcattaaccagaactactcgcaggagtttgtcgggtatgtcaccagtaagcgtccgggtgaagctgaccagctgctttctgacgcggccagcccggaagtacgtgccgagcgtgacagactggcgcaggcatttgtggaagaccgcatgaagccgcaactgctgcaggagtttgagcagaacaggggccgtaccggtgaggggatgggaagtgtgggagcttcctctggtggcggtaatctgcagagtgaatatgatacgcaacagacacaaatggaaaaccgggcaaatgctggcggtgtgagactgcaggatgatgttagcagtgatgtggctgacagacgccgtcacgctgaatctcaggtaaatagtgaaaaaaatactgtgatctcatccggcaatacaccgaaggaagaatacaatcgcttgcagagtgagcatgaacagggtaataaaaactttaatgatgccaagagtgctgaagaaaaaaggcaaaatgattggatcggtgataatggtgtagggagaaaggaattgaatgatatcaaagataacctgcaaaaaaagtttgaccgggattga

SEQ ID NO: 77301 - DNA, 1362 bp, Citrobacter koseri
atgcgactgaaaccgctctgcctggcctttgcgctgggcctgtacagtgcaggaacggcacatgccgggctgcaggatgacatgaattccttctttaatgacatgagttatgccagcaacaccacttcggcaaaagcctggcagggacaggccgcacgttatgtctccgggggctcgttttatgcgcgcactggcaacaagaacattcagctggtttctattagcctgccgtccattaacgccgggtgtggcgggattgatgtgtatctgggggcgttctctttcataaactccgaccagattatggcgtttgtgaaacagacgatggctaatgctgcgggctacttctttgaccttgcgctggaaaccaccgtaccggaactgaaggctgcgaaagacttcctgcagaagatggccgctgatattaaccggttcaatatgtccagctgtcaggcggcaaaggcgatggtcgacagcgtggcatcgctgtggggagagagccagcagaacgtctgccagtctgttggcgggcagaaaagtgtcttctctgactgggttgcctcccgccaggggtgtacttcaggcggcaaatacggctccgtcgctgacaaggccactggcgcggaaaaggaccaggtactgaaggatatcaacctgatgtgggatgcgctcggcaacagctcgctcagcagcaacgcagagctgcgtcagttcgccatgagcatcagtggttcggtgattttcggcagtaacggcgaattgcgggttctgtcttcaatggcatcggaccgcagcctgctgacagcgatgatgagcggggggacggcaaaggtatacgtttgcgataaccagaataaatgcctgtccccgaccctgaataacgtgacgatttccgcagacaaatcccttattaagatggtgcaggacatgctgaccagcatcgagaacaaggccatcaccgacacaccgctgacggaaaaagagaagcagttcatcaacagtacctccatccccatcctctcctggattgtggaccagtcgtcactgagcgtctcgcagtccctgtttgctcagctgacggattacatcgcggtcgatatttatctgcagtatctggaagccgtgatgaaggtggttaacggatcgcttgccaccaaagattacccgggcgccaacatgaaggagctgaaaaatggcctgtccgatgccagacaggcccttaactcgctgcgtatggaggtacagattaaggaggatgcccttatctccgcgcagcagcaaatccgctttatccgccagcaggtctcctcaaagatgagcgatcgtgtgctgggtaactaccagttcagcagggtgaattga

SEQ ID NO: 77302 - DNA, 612 bp, Citrobacter koseri
atgcttactactgtattgcggaccgccatcctgatggcggcgatgctggctggctgtctgcaggccgggacactggatgatattcgtgcccttgaagccggaaaaacgggccggagcgcacccgcgatggattcgctcagtctgccagaaaacggggcagcaacaaccacagaccgtaatgttcagaatacgtcacccgtctggtattcactgagtgataaccggaaagtgaaggtccaggactggaaggtggtgctgttcatgcagtcgacctgtccgtactgccgccagtttgcgccggtgctgaaagccttttctcagaagacgggctttgatgtctttcccatcagccttgacgggaagggtgatgccgaattccctgatgtgcttcccgccacgccggatgtgatggtggaatattttcagagtggcctgccggtggccacgccaaccacctttctgaccaacgtcaacacgatggaaacctggccgctgctgcagggtgccgcagaggcaggtgagtttcgtagtcggctcaatgaggtgctgcgtatggcactggatcggcagtcagggaaaagcattccactcaacgctcagggacaacaataa

SEQ ID NO: 77303 - DNA, 777 bp, Citrobacter koseri
atgagatgtattgccggtgcgctagccctgatgatgtcagtatcgctgcatgctgctcccgaggatgtgctggcacctgagtatgcccgggaagagggatggcagtggtacaaccccagtgctgaagagaccgagcctgaaccggcggcgccgaccctacgggaacgtctggccagcatgacaccatctgagcagaaaaaggtgctccagcaggcaacacgtgaagcgctggacaccgccattctgtatccctctgcggagaacttccgccgctttatgacactgcagaacttctggactgaccgggcaacggacttcacccagacggcgaaactggcccggctgaagtatccggagctggattacaacgtgaagcgcagccattacaacggcacggtggaagcccgcctgacggaagagaagaaggtccagagtgcggttatcagccaggtggcgcagcgctatggcctgttctttttctaccggggcaacaatgccgtcgacaacctgatggccggggtgatacgggctttctgtgaagatcgcgggatcagcctgatggccgtcagcgtggacggtaaactcagcgaccagctgccgcaaagccgtcctgacagcggacaggctgaaaaaatgcgtgtcacccacttcccggccacgtttctggtcgacccgaaaactcaccagtggcaaccccttgcatggggctttatgagccacgacgacctggatcgccagatggtcagcgtccttacccactttgcacctgactactga

SEQ ID NO: 77304 - DNA, 1854 bp, Citrobacter koseri
atgaaacactatcttcctttactgatggcgatgacatcgttctgtctggtcgcgccgcttgtcgccaatgaccagtttaatcagggcatgcagcagggtaacgccagcaaagggcagggggccagcgctatacaggggtttaagccggcggaagtgatccccggctataccgactcgccagctgaaagcggctattacgggggcgtcacgtcgtccggggtggacatgacctctcccggttcgacggcgctgaacacgtctgaggccgggaaaaccatcaccgaatccattctgaacacgccgccggataacaagccttcactggatgcgccgtttatctctgaagggctggcgatgaaagacaaggcggaggccatcaccggcggcgggtttgacggttgcgtggaccagcctgccagctttaccgaaatcaccactcaccagtgcctgcgggacaccaaaattgagcagtactgcacacgcaccgcgaccattaccggggactggaaaaacaccgaggtttaccggtatgtgacgatttctccggggcagttccgctacagccagaacggaaagcaactggtattcagcgtgacctctccggttacgggcgtcgtgatgaatgcacaactgaaggtgtattccagtttttattttcttaactcccgttatacgttcatgaactctgtgttcaacgtcgggaccgtaccgggcgcgacggatacgttcactctgagtggtgcgccggggctgaatattaccgaaggacaggtgctgacgggctccggttgcacagctaacggcaactgtatcagcggtggtaacggggactggcaggtttatcaatcgctggccagtgggaaatcgacgtttacgctcaccatgtacgtcagagtcagcgaaaaagaatgggtgccacgggttgaatggtctgaaagctgcccgttcagtaagaccgaaggggccatgaccggctcacagtgtgtggagccgggggagacacggaccgtcgttgtgggcggtaaaacgtacagcattcatcaggactgctggaaatggcaggacacctacctgacccagaccgagaccgaaggcacctgcggggagttcataaagaatccggcctgcacggtgacccgcagcgagtgtgccgatacggtcgacggcttctgcgtcagccagcaggttacctactcctgtgaacgtaaaaaggagggtaacggccagatttgcggcggggaattcttctgcaaggacggcagctgcgcccaggcgcagacaggaaccagcaacatgttcggtcaggccgtctcggcgctcgcggcagtggccgccgctggcgaggatgtggccgcgctcaatggtgtggacgtccgcgcctttaccggcgaagcgcagcactgcaagaagatggcggtgggcttcaataactgttgcaaggactccggctggggccaggatgtgggcctgtcgagctgcagcagcgaggaaaaggcgctcggcaaagcgaaggataaaaagctgacggtgtatgtcggggaatactgcagcaagaaagtgctgggcgtatgtctcgagaaaaaacgtggttactgcgtgtttgattccaaactggcgcgtatcgtccaggagcaggggcgtcgtgaccagctgggcgtggggttcggtaaaggcaagtcaccggactgccggggcatcacggtggatgaactgcagcgactcgactttggcgtgatgaacttcagcgatttctatgatgatcttaatgccggcagtgaaatcccggaagaccaggcattactgaaaaaggcgcaggacatcattgccgaaaaaatgcaggagaacgcgccatga

SEQ ID NO: 77305 - DNA, 615 bp, Citrobacter koseri
atgaaacgagtactgatatcactggccctgcttctggcctgcggggccggaatggccagcgatcatactgagaaccgtcagtttattcacgaccagctacagatggatcgccagcgctttcgtgcccttcagaccccggagtttctgcaacggcagtggtcagcgggggcagagaaccaggcgtttctggacgcgcaggcctcgcagttgcgccaatccatgcagcccggggagcgcccggtcgatgcagccctggtatttgtgtccttctcgatgccaccggatgaactgaagcagcgcgtgaaggatgcggcggaactcaatattccggtggttatccgggggatggtgaacggcgacatgcgggccacggcgaatgctgtagctggtctggtaaaagagagcaataccggaggcgtgcagatagacccgaccacctttcgtaagtacaacattaccgccgtaccggtactgattgtcgcctgcggcaaccagggcgatacagttgaccggcttcagggggacctgaccttacatcaggccctgaagcgggtggcggaggtgggggactgcgctgacacggcccggaacctgctgcgtggggaggtgcaatga

SEQ ID NO: 77306 - DNA, 360 bp, Citrobacter koseri
atgctcgtgagtaaaaaaaagtatgactttctgctcgatcgctacgagcagtccgcctcccgtgcggacttgctggagcgtcagctggcagacctgaacggcgcgcttaagaaaaatggcggcccgtacaaatgcgttctggaatgccgcgaagcggcgatggcgctgtcatcgtcagggcgtgaaccgacatggcagacgctggagcgtctggcgtttgttgacaggtggataagtggtctgcttccggcactgacacgccagatatctatccaggaatggcaggagatgctggacatttgttctgcagatcacgcctacggtatgtcgcaccaccagtcacagggggaaacgcgatga

SEQ ID NO: 77307 - DNA, 996 bp, Citrobacter koseri
atgaaacgttatctggccggtctggggctgatgctgctgtgtctgaccgggatgagcggcacggcacaggcggcttcagcagaatgtgaggggaattttgttaacccgatcaccgatgtctgctgggagtgcatctttccggtgaccatcggcaatgtgccggtagtcaaaggtcgccagccggacacgccgaacccgtcgatgcccatccagttctgcccgatgggcattctgtaccgggtggggctggccattggctactgggagccgatggcgctgacggacgtgacgcgttcaccgtactgcatggtgaatctgggcgggttcaatatcaatatcggtaacgtcggcagcgggaccggaggacaggaaaaccgcgcaaatcccggcgcgttctaccatgtccactggtacaaatacccgctcacctactggctcaacattatcacctcaatgggctgccttcagggcggcgacctggatattggttatctgtccgagctggacccgatgtgggacagcagttcgctgagcatgatcatccagcccgaagccattctctttggcaacgttatcgcgcagggggcctgtgcggcagacgccgtggcgagtctggtggggaaacccattgatgccctgttctggtgtgccggtagccagggcagcatgtatccgtttaacggctatgtctctaacgaattcagccccctgcagacctctttactgctcagtgaacgtatggcgttcaaactgcaccgtcagggcattgtgatgaacagtatcggtgaaaacaccgccgtgtgttttgaatatccgtccccgatcatccctaaaagccgctggcggtatcacctggttaataaataccccgatgcaggccagtgtcatccgctgggccgtagtgtgacccgctgggaagccggcaaaaacatgcccaatgaccggcgtaacttcggctacctcttctggcgcaagcgcaactgcgtcttcctgtaa

SEQ ID NO: 77308 - DNA, 636 bp, Citrobacter koseri
atgaaaaaagggctgctgacactgttgctgatttccggcgtagcacaggcaaaaaatctggggacatggggggaaatgtaccccattgctgagcaggacatgctcactaccatccagacacgcctgaaggcaatggaggccagtggtgagatggcccgggagcaggaagcattcaaacagcgcgtcattgaaaatactctgcgtcccaggccggttgaaggactgacactggcgcaggagaacaccacgcactatatcgatccatcgctgacggtcagtgaagatctgaaagaccatcaggggcgggtgttcgcccataaagggcaggtgattaacccgctggatacggtgccgttcaccgacacgctctattttattgatgcagataacccgcagcagctggcatggatgaaggcacagaagcccgggacactgacgtaccgcgtcattctggttaacggggatgtccgtgaggccacgaacgccctcaatacccgtatctattttgaccaggacggttcactctgccggaagtttaagctgaaagctatcccggcccgggtgacgctggcagaagatcgccgccgtcttcgggtggacacgttcgccctggatgcgccggaggtgaagccatga

SEQ ID NO: 77309 - DNA, 465 bp, Citrobacter koseri
atgactactgaccaaaaacttactcctgctcagtctgaatcccctctcacttccgatgatgtcaggaaggggataaacatcacagcgggaggacacaggcgggagcaacgtcgccgtcgttgcctgctcaatctgctactggtcgctgccaccattatgtgtatcaacgcggcggtaacgacgctgctgattagctggcgtacgccgacggtggtgtcctttgatatgaaaaaaacgctggatcagttcacagaacaggccagcgctcagtcactggatgaggctcagactaaggctcttaccgaacgatttatgaccagcctcaatgcggagctgcaggactggcagcgccgccatgatgcactcatcctggtgacgcctgctgtggtcagcggggcgggcgacatcactggtgagattcagacaggggtggcacaccgaatggcggcaggaggcggcaactga

SEQ ID NO: 77310 - DNA, 2592 bp, Citrobacter koseri
gtgaaaaaatttctgaacgtactggaaaatctgcagaacgccttccggatgccggatggcgcgtcggagatgacgcgcaatctggccagcctggactttccgcagctgaccagcgtcctgccataccgtgactatgaccgtgacagtgggctgtttgtgaaccgcagtacggtgggttttctgctacgtgcagagcctcttatcggcgctaatgaacagattgtgtatgtgctggaagatctcatcaaaagcaagctgccgcgtaagacgccaatatcgttccacctggtctccagcaagctgatcggtgatcagcttgaccggggcctgtctgagttccgctggcaggggaagcatgcggacaaatttaaccgtatcacccgggcatattatcagcgcgcagcgcagcagcagttcaacagcccgaccggcctgccgctgaccctgcgtgactaccgtctgtatatttcttactgcgtgaaggcgaagaagcggacggcggccgtgatgacggaagtcgctcataccctgaaagtgctgcgttcttctctggacgcggcaaaaatttacacgcaggcggccgatgaccaggagctggccacactggttcacgggatgctgaatgcccgtcatgatcagctgtacccggatgaggttcgtgtcggcaaatttgatgagctgcatcagcgctgtgttgaccagcgtatcggtatcgatgtgcgtccggatgatgtcctcatcagtcttgccgaccgtcagggcagcgtgacctccacgcgggccatgaacttcatgctggagaacaacccggatatgttcatgctgtggatggggggcgataacctgtccaacctgctcagcccggacctgaccatcgccagcccgttcgtcatcacgatggtgatggaggccgaagaccaggtggcgacgcagggagaagccacgcgcaagtatctcgaccgggagaaaaaagcaaactcgccctatgccaccctgtttcccagcgtggccaaacaggccaaagaatggaaggaaatccgcgagcatcttaacagcaaccagacctgtattgtccgctattactataacgtcaccacgttctgtccggatacggatgaggatgcgctggtctgcgaacagcaggtcattaataccttcaagaagaacggcatagatctgttttccccgacctatatgcagttccgtaactggatagcgatgatccccttcattcatgcggaagggctctgggaagacatcaaaatgggcggagccacttgccgggcggagagtatccaggccgtgaacctgctgccagtagtggccgacaaccggttgtgtcaggggggattgctgacgccatcctaccgtaaccagctggcattcctcgatatctacggcgacgggatgggtaacaccaactacaacatggcggtcaccggcacctcgggggcaggcaagactggtctggtccagcctatcctgcgcagcgtgctggattccggtggtatcgcctgggtgtttgacatgggggacggctacaaatcgttctgtgagaacgtgggtggcacgtaccttgacggtaagtcactcaaattcaatccgtttgccaacatctccagtatcaatgagtccggggaacgtatccgtgaccagctggctgtgctggcaagccctaacggtacgctggatgaagtccatcacagtctgctgctgcgcggggttcaggaggcatgggaagcgcacagggaaaaagcccgaattgaccacgtagtgcagaagctgacgaccatccgtgaggatgataaataccagaactcaccgggtatcaccaaccggctggatgaaattatcgaactgctcggtaagtactgctcctggggaatttacggcgaatactttaacagcgacgagccgtcactgaccgatgatgcccgctttatcgtcctggagctgggggggctgcaggacaagcctgacctgctggttgcggtaatgttttctctcatcatctacatcgaagacaaaatgtaccgcacgccgcgcagcctgaagaaatgttgcaccatcgacgaaggctggaagctgctcaactttaaaaatgagaaggtcggtcagttcattgaaaccggctaccgtacggtacgccgccaccgtggcgcgttcatcaccatcagccagaacatcaaagactttgacgccgatgatgcttccggagctgcaaaagcggcctggggtaactcagccttcaaggtgatcctcaaacaggatgcctctgagtttaagcagtataaccagaaccgtcccaaccagttcagcgagctggagcgtagtgttatcggcaagttcggtgatgccaaagaccagtggttctcctcctttatgctgcgcatcaacgatacctgcagtttccatcgtctctttgtcgatccgctcagtcgagcgatgttcagttcaaagggtgatgacttcgagtttatccgccagtgccgggaacaaaacatggatatccatgacgctgtataccagctggcacaacgtaactttcctgatgagatgcgcgaactggaagcgctcgcggaggctgcatga

SEQ ID NO: 77311 - DNA, 615 bp, Citrobacter koseri
atgaaaaaaatcacacttttgctggcaggcagcgccctgctgttatccggttgtgccggtgtcaaaagcagtttcgactgcgatgccacaacgtctgatacctgtatgaccatgacgaaggctaatcaactggcccgggacaaggcggcaaaacaggcgggaaagccggctgcgggcggactgccttccctggttaatttaccggccacctctgctgtggggattccgtctgcatcccgttccgccgtcagtcccccttccggcacgcggaccgtcagcaccacgccccccgtatctgcaggcatgtccgcaggtgtaaacacaaacacgacaacgtcaacactgacgccccgtccggttgccggaacgccggtcacaaccaccccgtcatcagtggcttaccgtccggtcgtctctgtggtcacaccgacaccgtcatgccagaacgtgcgttgtgacaatcccggatctgtgcacccacaacgcagccaggaccagatagccacggtctggattgcgccctgggtggacagcgataacgccttccatcagcccggtcgggtgtcatttgtggtcagtcctgccgactgggttcttccggccagggtaaattaa

SEQ ID NO: 77312 - DNA, 225 bp, Citrobacter koseri
atggcagacgtactggaccagttgcaggagcaggaagacctgattcacaggctgcacattcaggcggtcagacaacagttgagcgttaaaggcgaaagccttacccggtgtgaatgttgtggaaaccgtattcaggaacggcgccagaatgcgatacctggcgtgcgtacctgcactgagtgtcagcgggtactggaaattcgggaaaaaaattatcagaggtga

SEQ ID NO: 77313 - DNA, 1362 bp, Citrobacter koseri
atggccaacgttaataaagtcgtccgccgtcgtcaggttgccctgcttatagctcttgtgctggggattggtgctggcggtgccgggacatggatggtctcagagatgaacctgaagaaagcgccgcccgcaaaagcgccaaaaggagaacccgcgccggatatgaccggtgtggtcaatcagtcatttgataacaaagtccagcgttctgccatcgcggaagcccagcggcttaataaggaaacgcagacagagattaaaaaactgcgtaccgaaatggggcttgtcagtcgcgaccttaaaggcagtcaggatcgcattcgtgaactggaagaccagaaccagttgctgcagacacagcttgaggccgggaagaattttgactctctcagtgccgaacctctgccgggggcgctggcctctcaggggaaacctgcacccgctggtaatgttccccccccgaccagtttctggccagcaggcggcggacaggccccggctgcgccggtgatgacccccattcagcgtccgggaatgatggacagtcaggaattcagtctgccggataccgggcctaaaaagccccgtttcccgtggatttcttccggcagttttgctgaagcaatcgtcgtggaaggggctgatgccaatgcgtccgttaccggcgataaaaataccgccccgatgcagctgcgtctcaccggcaaagttcagatgcctaacgatgaagagttcgatctgacgggttgctttgtgaccctggaggcatggggggatgtttccagtgaacgagccatcgttcgtagtcgctcaatcagttgcaagctgggtgatgacgacatcgaccagaagattgccggtcatgtgtcctttatgggcaagaacggcatcaagggcgaagtggttatgcgtaacggtcagatcctgctgtatgccgggggcgcgggcttcctggacgggatcggcaagggcattgagaaagcctcctccactaccgtgggtgtcggcgcaactgccagcatgagcgccggcgatatcggccaggcagggctcggcggtggtgtcagttctgcggccaaaacactctctgattactacatcaaacgcgccgaacagtaccaccccgtcattccaatcggtgcgggcaatgaagtcacgctggttttccaggacggtttccagctcgaaacactggaagaagcgcgcgcgaaagcggctgcacgtaagaaacaaaatcagccttctgcctcatccacgcctgctgccatgccaggtaacaccccggacatgctgaagcagctgcaggacttcagggtaggggacaccgttgatccgacgaccggacaggtcgtcacacagtaa

SEQ ID NO: 77314 - DNA, 741 bp, Citrobacter koseri
atgaaaaataaccttccggcgttattgtttggtacagccatgatggtcgttgtgcccccggctgcgcaggcacagtcacctgccacgatcagccttccacagggcgggcagttccggctgagtatcagcaataccgatcctaacatgatttttatccctggagacaaagtcaccgccatcacagcgcctgggggaatgctggcagacaagcgactgacaacggccggaggtgtgctgttcacctcggtggccacacgcacgttcacgatttttgtagaaacagcgctgggccagaccttctctgtcgtggccactcccgtaaaaggcgaaggtcgcgtctatcgactgatgagcgcagaaccgccctcacggcctgaaacccgtaaatgggaaaccgctcaggcttacgaaaagctgctcatcagccttaaccgtgccgtgctgacgggcgacatacctgatggctacggcgaagtaaaacctctttctgacggtattcgtctccccggtggtttttctgttacccccctgaaagcctgggcgggcgaccagctgcgtgccgatcgttatgagctgcgtaatgccaatacctggggggtggcgctgcgggagcaggacttctggaagcccggggtgcgtgccgtgatgtttgataacaacgcacagactctgattggcggaggaagaatgaccgtcaccgttatccgtggaaacggggagggggaagatggccaacgttaa

SEQ ID NO: 77315 - DNA, 564 bp, Citrobacter koseri
atggaaattagcgctcgtaattcatccaccaaaattattgccgttattattctgtcactcacgacactggtctttattctgggctttgccgtggcatggctggctgtgaccaacagagcactcatccacgagcaacgtacagtcgtcactccgatgacctacaacgcgccttttgtggtatccgaaacgaaagccgataccgagtatttccggatgatgacgctgtccttcctggccctgcgtctcaatgttgcccctgaaacggtcgattccaaccacgcctttctgatgacctttgtcgaacctgatgttcgggcggattttgtaaaagtcctggatgaagaagctgcacagattaaagccaatgatgtgaattccactttctacaccacagaaatcaatgtctatcccgttgacggccgaatcgatgttcgcggcgtgctgaaaatgtggattggtaactctaagccttccacggaaataaaaacctaccggcttcgtctgaagtataccggaggctttacccgtatcggccggttctatgaggtgaccaatgaaaaataa

SEQ ID NO: 77316 - DNA, 306 bp, Citrobacter koseri
atggagggaaacgatttagacaaataccgtttcccgaaaaccctgtcagagcagaaccgcattattggactgccccttgatgaagctatccccgcagcggttgttttgctgtggggatttttcaccaagaaatatttattcagtctgattattgcggcagttatctggcaactgatcagggcggcgaaacgcggaaaaagctcccgctggttatacaactggtgttactggtatttgcctactgaattattccgggttgtctaccgcgttattcccgattccagtttcaggaaatggataaaataa

SEQ ID NO: 77317 - DNA, 360 bp, Citrobacter koseri
atgaatttatccttatcaaaaggcggcctccccgcgtctgtaaaaaaccgtgcatggcagtactgccagatggcatggcgtggtgtgaccagtaaaaaagcgctgtcccgtctggccgcgctgtctccgctgctgttactcggtgtgggacagatggccaatgcaaccgacctgctggccgggggcaaggatgatgtgaaagccaccttcggtgccgactcattcgtcatgatgtgtatcatcatcgccgaactgattgtcggtgtggcgatgtatatccgcaccaagaacctgctgatcctgctgggcctggttgtggttatcgtcttcaccaccgtcggtcttaccttcatcaactga

SEQ ID NO: 77318 - DNA, 234 bp, Citrobacter koseri
atgaaggagccaaaatctaatatcagaaagctaattgacattggtggattaattggcaaaaaagtgaatattagctgtagtctggatgaagccattgatgaactattaatggagagtgcactcaagagtgggaggagtaaaaaaagagaagctgaattaagactggaggatcatttacgaagattttctctcgtacctgctgaagaacagtatattgaaaaaaaagtggattaa

SEQ ID NO: 77319 - DNA, 450 bp, Citrobacter koseri
atgcctgttattgacccagtacattttatgtatgaacgtaatcattttccatctttgacagataaagagtttgaaacgttagttttatactgtcagatgatgaatgttcagatggttgctgattatcagaatcgtaagcctgatgtaatcattaggcatttgaagagttgcagacaaaaaattggtgttgagagcgactttgagctttacttcatagtaataaatacgtttgtaaactttgagagagtttttccggagttaacatcagaacagataaatattctggctgcattttccttctatccaaaaaggtcaacaattgcccggcgttttggtatatatcggtgtgatatatatgatgagctgattaaaatcaggaacaaccttggcattgaagatttggagtctctcaggatgctttttttcatgaagattacagtttttttgtaa

SEQ ID NO: 77320 - DNA, 384 bp, Citrobacter koseri
atgccaaaaatacagacttatgtgaacaataatgtttatgaacagatcaccgatctcgttaccatcaggaaacaggaaggtatagaagaggcatcactttccaatgtttcttcaatgctgctggaactgggcctgcgcgtctatatgattcagcaggaaaagagagaggggggatttaatcagatggagtacaacaagctcatgctggaaaacgtttcgcgggtacgtgctatgtgtacagaaattcttaaaatgagcgtcttaaaccaggagtcgattgccagcggtaattttgattacggcgttatcaaacccgctattgataagtttgccagagagcaggtcagtatattttttcctgatgatgaggatgatcaggagtga

SEQ ID NO: 77321 - DNA, 456 bp, Citrobacter koseri
gtgaggaaaactctgattactgggctactggcgataacgttttctgttaatgcgcgggactgttttgaaatggcgggcagggattataggatcgagccggatctgttacgggcgatttcgttccgtgagtcgtcatggcgtgataatgcgctcaacgttgtatcacagagcgaatatgctgtcggcaagatgcaaatacactcacaaaatttttcgcatctggctcagttcgggatcactccccgacaactttatactgacagttgcctgaacatttacactggcgcttactaccttgccattgcttttaaacgctggggatactcatggcgggctgtaggggcttataatgcaggatttcgtgaaacggaagtacaggagaaaaagcgccagcaatatgcaaaagaaattcaggcaatttatgttgccatcaaaaaaaatgcgccaccagagtga

SEQ ID NO: 77322 - DNA, 531 bp, Citrobacter koseri
atgcacacaattaacgtcaaaaccgccactcgtgaatcagccgaacaatttaaaacagataaattccagcgctattgtgtaatcgatgataatgaacgacttgatttcatccctgccctcttttttacaccaactgcagacaatatgatcgccagctggttacgccagcattcagattatgatggtggtttctggaactactggatcattccgcagggtgttggtggaaatgtggcaccgaacaaaattatcttcactactacacaaaccggatatatcgcacctgcaggagaacaacgatataacatgtgcattcctggtaattattttgaatcagaggtcagtgccgatgctgccggaattattgcaacgttgatgataatgaactggctgtcctggcaggcagccgatatggggactgaatatgcgaaagtctgtaaatatcttgtcgcccgtcaggatgccctgaaggattatgtcagtcttattcaacatccggaacgtggattgatatggcgggctatcgattaa

SEQ ID NO: 77323 - DNA, 834 bp, Citrobacter koseri
atgtcacaactgagttttgtcgatgtctttgatatggccagagagagcgcaggcggttgttgtgtcactcaggatgcggaggctggtaacgggtatttcccgtctgttcacaggctgatgagtgcacagtacagccggagccgctttatcagcgtgttcaggtccacaggctgccatcttcggcgctgggaagtgttcagcgattttctggcgctggcagccagtgagctggatatggcccggataagaacgccggagagtatggcgcactgtcagaaaatttgcgatcgctacaccaccgccgatattgagaacatgaacgaaatgttcagcctgatggtgtgtgcgctggaggcaaaatttcatgattttctcggcgcgattttcatggagcttgaactcggagataattttcgcgggcagtattttactccctattccgtacagtgcctgatggcgcgcctgctgatgccaggaattcaggacaccatccggcgggaaggaatagtgacagtcagtgaccccgccagtggtgcggcgggaatgctgattgcttatgcggagtgtctgcttgaagcagatatcaatccttcctggcacatgttcggcagttgcatcgatattgatcctgtggcggctgatatggcttttatccagttgtcactgctgggtattgctgcggaagtggtgacgggtaacacactcactatgcagtttaaccgggtgcggtatacgccagtgtattacttcaacgactttgaaaaacgtctgtcggacctgaaccgacacagggttatgctggcatttatgcgtggactatcggatgccacgtaa

SEQ ID NO: 77324 - DNA, 147 bp, Citrobacter koseri
atgcaatttgacccgcaaatcgtcgcacaggcgaacgcatttgtaaatgccctgcgcagtggtaaacgcgcccgtgttccggccttaaaactggagcactggcagcagttcatgacagtggtatacgctggcctcggcctcgcgtga

SEQ ID NO: 77325 - DNA, 348 bp, Citrobacter koseri
atgcatttacacctgactgaatcttccgctgtgccggggatgcagaccaccgctgaggctgagcgggcctactggctgaaccgtgaacaggcggcggtgaaagcccctgctgaaatcgacgtacacgctttccatgatgcgctggggctgatgtacccgatgaactggcgaagcagtgagaacggtgagtgcgaaaccttcatgctggcagaaatgatctgcggcaacgtgaccgaaatttatgcacgaatcggtatccgttattaccggatgcgtgactacagcaaccttgaccacgcggaaattctggcccgcgttaaggaggtatcagataagagccagaaatga

SEQ ID NO: 77326 - DNA, 405 bp, Citrobacter koseri
atgaacacacaaaacgtcagcatcaaaatcgccgctcaaaaatcatccgaacgatggggttcagacccaaaagcgcgtctggactgtgttatcgcagaacagcgttcgtacctggctcagctgtgccaggtctggaatcttcagttgagccagaaagacgaggccgaggaagtcctgcgtcttctcagtctgatgagtgacaacgttcacaaggaaggcgtgttgtgctgggaacgttcatatccgctggtttcgttctatgtcgtacagccgtggttgcaggctaaagatcatgccatccgcttatacggcgttatcggacgtgaggcgtgggaagtcgcgcgaaaagacctttgcaacaacattaatttttcccaggccatgatgcgcctggaagaatgttaa

SEQ ID NO: 77327 - DNA, 375 bp, Citrobacter koseri
atgagatactggatactggttgttctgctaaatggattgtttgcgctggtcattcactttgccgcgccggaattgttcggaagtactgagcattatgtcggcgctgggatctgtgctctgatagcgatagttattacctggcgagatcctccagggatgctggacaacgtgctcttatttctctttaagtggggaattgtggcttcaggtctggcgttttttttctggggtatcggatacaagctggaattctggggaaatcacaaccccgatgaagttttcaccagcacttttgacatccttctgccaaatctggcattgctgagcggtattgtgattctggttagtgcctggatatcctggaggcaaaggtaa

SEQ ID NO: 77328 - DNA, 204 bp, Citrobacter koseri
atgactcacgtatttgtttatctcgttatcgcttcatctgtacacggtggcagcagctggaacgtaacccctatgcctaatatggatgtttgcaatcagttcagcgaaagtatcactaaaccccggggatttgaccttaatttcccccgggcaagcctggttcgctgtgttgaggtaaagactgataagcctgttaatccgtaa

SEQ ID NO: 77329 - DNA, 354 bp, Citrobacter koseri
atgaagtggcgttactcgttgcgctggagactgccccggacaccatgtcccggaccgcaggaactggtgtcagaagtggtggaggccgggaagcccgctcctgaatcggtgatggcccgctgggtggcaggtgtcgggtatgcggtgtgtgtggatttcctggatgacaggcagatcaggcgctggagcgatgagcggaaagcggctacccgcagacgaaatctggagcgccgcgtaaaccggatcgcgccactgtttgctgatgagcttatcgagcgggaactggaaacccgaccggagtattttcagggaaagaccatgaatatgcctcccaaaggaggggagtcatgctga

SEQ ID NO: 77330 - DNA, 729 bp, Citrobacter koseri
atgatcccggcaaacctgtcactggtccctctgagtcatgagcgtcgtgcggtaatgcaggccatcgcagaggtggaagcaaaatacgagcgcggtatcggtgtcgctgaatttccctatgcccgcacctttttccgcatcctgaacggcagtaagcgtgtcaccgtaaaggatatcggctggttctctccagggctgacggatcagtcgctgcggggaaataaacaggactggctggcggcgatcgaccggctgattgaaagtcgtggcgcatgttgctggttacccctgtcgctttctgatggctggcgactgttcccggaaacgaagtttcagatgcaggagcgtacccgaaggcacagtgaactgggtgctgaaaaatacacccgccagcgccgaaaagaggcgtgccagcgcgaaatggcgtatcaggcgctggcggggcaggcggaaattgagctggcttttcataccccggaaacggtcagcagctggagcgcacgctggtcgggtactgaactgcgccagtacgacctggaggaaatgttctggcgctggagtgagcgttttccgtcactggcatcgatggaacgctggatgatggcgaatcagccattctggagtgtgatggtggagtctgatgctctcgctaaagaaagcccggaaccggtcagacaactggagcgatggatggtacccaacaagctgatacaccggagccatgcatga

SEQ ID NO: 77331 - DNA, 432 bp, Citrobacter koseri
atgcgtaacattattacccctgatgtgctgaaaaccatgatcccccaggaatatgaggactggcgggaaggtggcgaagatttacgccgcgaactgacccatgccgtgatgcgtgaccttgactgtccggctcactgggacctgaacggcgagtaccgcagtgagttcggcggttttttcccggtgcagatccgtttcacgccatcccacggcaatttcagcctggcagtgtgcagtcccggtgatatcagcccgtcctggatggtggtgtttattcctgccagtggtcgccctttctctgtgatctgcacgctgccagcctggtcgccggaggttatcagccacacgttgagtcttgtcgcccgcctcgatgccgatggttacagtcaggccagtatcatcagcgttctggcgatggagggtacattatga

SEQ ID NO: 77332 - DNA, 2034 bp, Citrobacter koseri
atgtcagtaaccgagtctaaagcaaaaaaggttaaaaaagccagccccaaagcgtcaacgcgtaaagctgatgctcagtcagacgtcctggttgccgtactggacagtgcccctgtcagttacaccgcatggtcccgcctgtttatcggggatctcaactgccgtcttatcccgcacacgccggaagaaatcaggggttatgccgacagtattttcgcggtcgggcaaatccataacatcgtggtcgtggaatgtgatgatggtcggctggaagtggtatgcggcggtgggcgtaccaaagccatcggtttgctggttgaagaagggaaggtcgaccccgatcacgaatggatctcctgcaaagtggttccccgcgaactggcgagggctatctctctgactgaaaacggcagacacaagacaatgcaccctgccgagcagatcgccggattccgttctctggcagaagaagggaaaacaccagcgcaaatcggggacctgctgggctacggtgtgaagcacgtccagcgcatgctcaggctcgcaggactggctccggttcttcttcaggcactggcagaggacaaaataaccaccgaacactgtcaggcgctggcgctggaagataatcccgaccgtcaggtgcaggtgtatgaggctgcgtgtcgtcagagttggaacaataaaccggaagtgcgtgtgatacgtaatctgatcaccgacagccaggtttccaccctcaacaacagcaagtacgcatttgtaggggaaaacgccttctccggcgatgaaatccgcgctgacctgttcagtgacgaacagggtggttttgtggacaaactggcgctggatacggccctgctggaaaaactccaggtggtggcagagtgcctgaaagaggccgagggctgggcatgggccaccggacgcctggatgcggtcagttatcacggcgaagacagtgtggtgtaccggattcagcatgaacctgacgcggtttacacggagcaggaacagcagcgcatggatgaattgcagggcgagtatgacgagaaccagaccgccagcgatgaaacagacgcgatggagtcagagatggaggccatcgaatgcgcggcacagctccgggcatggacgccggaaatgcgcgcacagtccggtgtggtggtgtcatggcgtcagggtgacgtttatgtccagcgcggggtgatcctgcgtgagcagtctgaaacggaagacgaacctgctcaggttcctgtatatgagcgccagcccgaacccgttgacgaaatcagtctgcctctgctgacgaagatgtcctctgaacgtacgctggcccttcaggctgcgctggtacagaagccagagaaaacggtagctctgatggtctggcgtctgtgtacctgcgttttcgataactgtaccacgacccgtcatccgttcgtgatgcgtcttgaggtgcatcacaaccgtctggtcagtgaagccccgtccggtgaagagggaaaagcgtggcagtcccttatgcaggaaaaagcccgtctggaggcgctgttgccggaaggctggaaaaaggatttcaccaccttttttacccttgacggaaagacgctgatgtccctgatggtcttctgtacggcctgttctgtcgatggtgtgcagaccagaacgatgggacataccacacgcagtgatcttgatggtgttgaacgtgctgttgatttcaatctgcatgaatggtggcagccgacgaagaacaatttcttcgactacctgaaaaagccacagattgttcaaatcctcagtgagaacggtttgagcggggccgccagcgatgcgctgaaaatgaagaaatctgacgcagcggacctggctgaaaccatgatggcccgtcactgtcctcagtgggtgcctgtctggatgcgcgcccctgatgcaaaaacgccggatgctgaagcagaaaataacgcttctgatgctaccgccactgacgtcccgcctgtggctcacaacaacattccagatgcagcctga

SEQ ID NO: 77333 - DNA, 309 bp, Citrobacter koseri
atgccccgttttgaccagcatgatgaaaacgccccgcaaccagcggggcaggaaaaggagaaagacatgaccagcaacgttataccgccccttcagtcactgccagatggcacattcactcgcgaacaggctgaagcggtcgcagcgcagtatcagaatgtcgcgattgaagacgatcagggaacgcactttcgcctggtggttcgtcagaacggcgaaatggtgtggcgggtatggaattttgagccgggtggtgagtacctgatgaaccgttatatccgggactacggcatccgtaaacagcagtaa

SEQ ID NO: 77334 - DNA, 555 bp, Citrobacter koseri
atgacagtacgcggcatcaacaaagtcatcatcgtgggtaatctgggccaggacccggaagtccgttatatgcccaatggcggcgcggtcgctaatcttagcctcgccacttcggagtcctggcgcgataaacagaccggagagatgcgcgaaaacaccgaatggcatcgcgtggtgctgtttggcaagctcgcggaagtggccagcgagtatctgcgcaagggcgctcaggtgtacgtcgaagggcagttacgtacccgcaactggcaggacgacagcggcgtaacgcgctatgtcactgaaatcgttgtcggacagaacggcactatgcagatgctgggcggtcgtcgtgacggcggtcagccacagaacacggctccacagcaacccgcacaaccgcagagtcctgccgctccggcacaacctgctggctcccctgaaaaatccccgaaaaaaggcggcagaaaaccccgtcagactacagcgccgtctcagcaggtgccgcagccgttaccggacgattatccgccgatggatgatgatgccccgttttga

SEQ ID NO: 77335 - DNA, 312 bp, Citrobacter koseri
atgtctctgatgtttgcagccgtgactcttttaaccggtattaacctgttgtttattccgtttcagcctgtaccggctctgtgggggggaatcctggccgttgcttttatactgatgaatgtcgtggcggataaattgcgtctctggagtggcgttgcatggattatcgttgccggcatcatcataacgttgatgctgaaggggaaggagccgggtgacgaattaagagtgctgatcaccgtttttgctttcctggcttcagcctggtacagcgttgtgcagtacagaaaagaaaagcattttcgctcctga

SEQ ID NO: 77336 - DNA, 261 bp, Citrobacter koseri
atgcatatgtcgaagtggaatatcgcctctttctcaaaagaagagcaggataaggtctcagtcgataaagccgccgccgctgttgcctggcaggaacggatgaacaagcctgtggtgccagagctggctgaacgggaacagcctgaacatcttcgccagtatttccggcaaaggctggaagttcatcggcagaacagtcagcagctgccgcgcgcaaatgcgcccgaatataataaacccggtgatgagcagcagaagtga

SEQ ID NO: 77337 - DNA, 192 bp, Citrobacter koseri
atgaaacttgcaccacaaagccgtgagatcctgcgacagtacaaagccctgattaatgcccgccgacgtgatgccggtcagcgggaactgaccaccgcgcaggtgatggatgaaatttgttactacatgacgtgtcagtgtgccgtgtacatcggcggtcatttcatcttacagggcggtaaagggcagtaa

SEQ ID NO: 77338 - DNA, 507 bp, Citrobacter koseri
atgagcactacgaccaccacaccggctgtttacgtgggcacctggcataaatacaactgcggcagcattttcggcaaatggtttgatctgacggagtttgacggcagggaggatttttacgaggcctgtcaggcactgcatgccgatgaatgggatgccgagtttatgttccaggactgggaaggtatcccgtcacacttcgtctctgaaagctccattgactgggattttatcgccgcttacaaacgcgccgaagaagagagcagggaagccgcttttatcgcctgggcggagtataccggcgagtgtgactatgacgcgtttgatgatgcgtaccgcggcgaggcggaaagtgaggaggactatgcgcgggagatggttgaggacaacggcctgttaaatgaggtgccggagccgttgcgcagctatttcgattttgaagcctgggcgcgtgacctgttcagcagcggctatgtgttccatgacggttatgtcttcagcaactga

SEQ ID NO: 77339 - DNA, 780 bp, Citrobacter koseri
atgcaggaaaccaccacgttaaacgcccttgtgatgcgccgtgcgcgcgatttgattgctgattatggatggcctgaccataccgatgttgatcagcgtgatccggtcaataaaccgggctggataagcatttatgtccgtctggatgcggcaaatattgttcatctgctgcctttgctttgtaccggtgacgtacccgcagagctgcaaagtgccatgacaaaaatagccgggacgccagcgcagattattttatccggcagccgctatgccgacgcgccgcagcttccggaggacggaacacagatagcgttcccctgggccggggaatggctgacggagccggagattcaggctgtaacggattgcctgtcccgcgccgtgcgggatgtctcccggcaggtatgggaggatgcgcgccggataaaggcggcgctgaccacgcgcggggaaacgctgttttatcgccagacccgaaatttccgtctggttgtgaaggaaaatgatatgccctgctggctggacgatgatgacaatttgccggtggtgctcgatgccatcctgaacaaaggggcacgctacagcagcgtcgagttctttgttatcagcgacaaagttgatcaaatcctggcatgtggccagatgtgcgatgtgctgcgtattccgggcgagcctccgcgccggtggatggatttaaccctgttacatgaggtcatggcagaagcgcgtgcagaaatcagtcttgtccgcaatgccctgtcagcaatccggccagtgtag

SEQ ID NO: 77340 - DNA, 420 bp, Citrobacter koseri
atgtacggaacctgtgaaaccctgtgccggttgttaggtgagctgtatcccgcagaaaccccgctgaacctgattatctggtccccggcggatatcgaagcgctggccgacggaatggaatatgccgtttcggagcaggacacaagggcggtactggcgcgtatggacgccattccggaggaacaacggcttgagtcgggcgtgtctgccggtgcggtgatggatctgattgaacaggtgaaagaggccgcgtcgggagtggtggtgccggtggaactgcttgaaaccctgctgatcactgccgaacaggcgttatggcacagggaatggaccgcccgggatgagaaccatccggtgccggaaagcattacccgtcgcctggctgatgcggcgaaagttcgcgccttactgaaaaaatga

SEQ ID NO: 77341 - DNA, 222 bp, Citrobacter koseri
atgaactatgcaggacacgaaaaactccgcgcagaagtggcagcagtcgccaacaacatgtgtgacctgcgggcgacgctgaacgggatggagcaccgctatcgctttgactccgatgtgctggccgaacgcctgacccgtcagaccctttttcgcatcaatgccctgtttatggcggcgtacaacgaaattcttgagctggatgcctgctttaaggactaa

SEQ ID NO: 77342 - DNA, 672 bp, Citrobacter koseri
atgtgcggtcggtttacgcagtatcactcccgcgagaagtacctttcctttctcggagaagaagcagaacgggatattccgtatgatccggaacccgtcggccgctacaacgttgcccccgggacacgggtattgctgctgagcgaacgccgctcgcagctgcagcttgatccagttcactgggggtatgccccggagtggtggaacaagcccgctcttatcaacgccagaagtgaaactgcgaccggcagccggatgttcaggccactctgggagcacggacgggccattgtttttgccgacggctggttcgaatggaaacagcaaaacggcgtgaaacagccgtttttcatttaccgtaaggacggaaatccactcctgctcgcagccatcgggaaaccaccttttgagaacggcaatgaccaggaaggcttccttatcgtcacagcagctgcggatgagggactgctggacattcacgatcggcgaccgctcgtgtactcaccggctgccgcacgtaaatggctcagcgaaaacacaaccggtaaagaggcggaagacattgcctgtgagggcagtctttcggccgaagatttcacatggcaccccgtcagtcgggctgttggcaatccccggagccagggccgggaacttattgagccgctggcttag

SEQ ID NO: 77343 - DNA, 423 bp, Citrobacter koseri
atgatcctttttgtcactcccgcatctgagccagcactgtctaccgcaccacttttcacagagcgctgtccggcaggttttccgtcaccggccgcggactataccgaagacgaactggatctgaacgcctactgtatccgtcgccccagcgcgacctactttgtccgggccattggtgattcgatgaaagatatgggcctgcactccggcgatttaatggttgtcgataaagcagaaaaacctatgcagggggatattgtcatcgcggagacagatggcgagttcaccgttaaacgcctgcagcttaaaccccggattgctctgctgccgatgaatcccgcctaccccaccctctatccggaagaactgcagatattcggcgtggtgatggcattcatacataagacgcggggtagcaactaa

SEQ ID NO: 77344 - DNA, 1272 bp, Citrobacter koseri
atgttcgccctggctgacgtcaacagcttctacgcgagctgtgagaaggtgtttcgtccagacctgcgtaacaggcctgttgtggtgctcagtaataatgatggttgtgtcatcgcgcgcagtgccgaagcgaaacggcttggtattaaaatgggcgtcccctggttccagctgaagacggcacaattcccggagccggtcatcacgttctcgagcaattacgagctctatgcatctatgtccaacagagtgatgtctcaccttgaggagctggcgccgcgcgtggagcagtacagcatcgacgagatgtttctggatatcaggggtatagatggctgtatggattttgaggatttcggacgccagctgcgcgagcacgtgcgaagcggaacggggttgaccatcggcgtcgggatggggccgaccaaaacgctggctaaaagcgcacaatgggcgtctaaggaatggcggcagtttggaggcgtgcttgctctgacttcaggcaatccaaagcggacggagaaactgttgtcactgcagccagtagacgaaatctggggggttggccgcaggatctcgaagaaactgagcacaatggggataacaactgcactgcagctggcgcgcgcgaaccctgtatttatcaggaaaaatttcaacgttgtgctggagagaaccgtccgggaactcaacggagaaagctgtatttcgctggaagaagcgcctccgccgaaacagcagattgtctgcagccgctcctttggggagcgtgtaacgacatatgaagccatgcggcaggcagtctgtcagtatgctgagcgtgcagctgaaaagctgcgcggcgagcgtcagttctgcaggcatattgccgtttttgtgaagacgtcaccgttcgctgtaaacgaaccgtattacgggaatgtggccagtgaaaagctgatgactcccacgcaggatacccgggacatcatagccgcagcggtgaaagcgctggatcggatctgggtgaatggccatcgatatgcaaaagcaggttgcatgctcaatgatttcactcctaccggtgtttcacagctgaatctgttcgatgatactcagccccgaagcaacagtaatcagctgatgaaagtcgtggacggtattaaccattcaggacttgggaaagtctggtttgcgggacgaggcattgctcctgagtggcaaatgaaacgagaaatgctttcaccagcctatacgactcgctggtctgatttgccaatagccaaactatga

SEQ ID NO: 77345 - DNA, 165 bp, Citrobacter koseri
atggcatcttttttttacttttttcaccatgcttttttgatgcttattgcattgattataaagttttttttaaaattctttcatagtgaaatcaccacgagttatcttgtgtttttgcttcgtcatagtttggctattggcaaatcagaccagcgagtcgtatag

SEQ ID NO: 77346 - DNA, 972 bp, Citrobacter koseri
atgaaaaaggttttagctagagggcgcgttctgggtaatagcaattcagagttcgcccgtatgctggagagtgacggagatgtcaaaacctttacacttaaatcaggtaagcaggccaaatttgtcaaaacggtagtgttaagcggagagattgaattaaagacgttcgttgatgcttcggttaatggacgcgatcaggctatgctttcgcgcgagtcagttactgacatttcccgcacgattaaacttcaacaattctttcctgctattggtcgggaagttaacggacgaattgaaatattagacggtactcgtcgtcgggctgcctgcatctataacaacgtaaaattcgaaattttggtaacaaaagacgatattgatcttgcagacgcaaggcagcttgcaaaagacatacagactgcaagagagcatagtcttcgagaactgggaaaacgactggaagttacctatgggaccagtatgactaaagaagagattgctctggctgaaaatatctcttctgcaaaagttacacgggcatttcaggcggcatcagtaccggacgaaatgatctctgtatttcctgtaataaatgatatttcgctgtcggattatcaatttttattgaaactgtctgaagaagcaaaccacaaaaaaacgtcagtgaaggagttgatggataaagtgcggcaaaagctgatggctctgcctgattatccagcaattgataaaagcaaaatcttgtcagtctttcgggcagagagcaaagctcttatggagccgcctgcaaaaactgttgaaactgagaagttgaaagagtttgctgatcgcaaccagtttgcaaggaagaaaactgactcgaagaagcggcttgttgtttatgaattctcacgtatatctaatgaagtgcagtcagagattgatgaagctattaagcgtattcttgaaaaactgccttcatcggggggataa

SEQ ID NO: 77347 - DNA, 1206 bp, Citrobacter koseri
atgaaacgcgattacggtagtgtgggtactatagcgctcagagcaagtgctttactccaggctatgagccgggatatcgaggagcaaaggaaagaatttaatctgactgaatatcatcagacatatactcgaaatgctgtggcaaagttaccaaaattgagccgtcgtatagttgaattggccgtaaaagaaatggaagaaagcggctacgaattcaataaaaagcaagttggcaacgtcgagcaatacgcattaacaattcagaacgtcattgatatatacgcccaccggcagatacctaaataccgtgatattcataaagatccttatgtgatttttgtcgtaaacctaaaaggtggggtatcaaaaacagtcagtacagtaacgcttgcacatgcgctacgtgtacaccaggacttgctccgccatgatcttcgtatcctggttatagaccttgatcctcaggcatctagtaccatgtttttggaccacactcatagtattggtactgttctcgaaacagccgctcaggcaatgctgaatgatctcgatgctgaaacattgcgagaagcggttattcggcccaccattattcctggcgttgatgtgatccctgcatctattgatgacggcttcgtggcgagccagtgggagtctttggttgcagaacatttacctggccttaagccttctgaagtactcaggaaaacaatcattgaccgtatcgcaggtgattacgattttgtgttcattgatactggccctcatcttgatcccttccttctgaatggtctggctgcgagtgatttgctactaacccctacccctccagcacaggttgatttccattcaacccttaaatacttaacacgtttgcctgaaatgctcgaacgtcttgaagaggaaggtgtagagccacgcctgagtgcaagtattggatttatgtcaaaaatgaccagtaagcgcgatcatgagacgtcccatagtctggctcgtgaggtgtatgcaagtaacattctggactcgtcacttccacggttggatggattcgaacgatgtggtgaatcttttgacaccatcattagtgctaaccctgtttcgtacccgggaagtgcagaggcactgaaaaaagcacgtaccgaagcggaacgttttactaaagccgtttttgatcgcattgaatacattcggggagcgtccaaatga

SEQ ID NO: 77348 - DNA, 1827 bp, Citrobacter koseri
atgcgactcagaaaaataaaactgacaaatttcaggggctacagaaacacaacggaaataaacattgatgagggaatgacgggtattgtcgggcgtaatgatttcggcaagtccaccattcttgaggctctggctattttttttgaaacggaagggatgaaggctgacagaaatgacatgaactgcttcagcctgagggaaggcgcgagccgttttgaaatcgcgtgcgagtttgatgatctgccggagtctataattatcgacgaacgcgtgcagaccacactcgcctctgaacatctgctcaataaagacggtaatttcgagatcgtaaaatcctttaaagccacaacgacaggtaaacctgaacaaacctgcatccgctgcatgcatcctgcgcacgagcccctgagaaatttaatggggatgaaaatggcggagctcagggccgtgggaaaagccgttgaagaaaatgtggcagataaacgcacggcatccttatggcgccaggctatcagggaagccgccgttccttatgactgcgcggaaattttactggatgtcgacaaggagtttggtaccgacacaaaatcgctgtggggcaagatcctcgatttactgcccacgtttgcgctctttaaagccgacagggagagcagcgacggggattccgaagccaaaaatccccttcagcaggcggtgaaggatgctcaggctgcactgcaggataaaatcacagcgcttgaaaacgaaattcaggacagtgtgctggatgtcgcccggcgtacgctggataaattacgggaaatggcacctgaactcgccagtgaactgacgccacgatttaaggagaaaccgaagtggaccttcagtttcaccctggacggggaaaatggtatccccatcaataagcggggtagcgggataaggcggctaattctgctgaattttttcagggctgaagccgagaaaatggtggcgaatacgcagcgaaatgtcatttacgccattgaagagcctgaaacatcccagcatccgaactaccaggttctgctgatgaaagcgctgctggcgttagcctgccagccacaccgtcagattattgtcaccactcatgtgccggcacttgccggactgatccctgtcgacggtgttcgttatgttacccgggatcggtcaggagaacctgtcgtaaaaatgcctgatcacgcggtactgaaggaagccacggaaagcctgggagtgctgccggaaaccggcatggaacgcgcgaaaggcattgtgctggttgaaggaaaatcggatgtcaccttcctgaggcatgccgcacgttcactgaagcagtccggtgtactgcccgcctgcctggaagatgtcagcgttgtacctgttctgataggggggtgcgggagtgtcaagcactgggtcaccttaaacctggccaacgatctgggcctgccctggtgcgtatttctggactccgatacgggcggagatccctctcaggcccagtcaattcagaagcgaaagaaagaagtcgaggaggccgggaggatgttttttgccacgcgtaagcgcgagatagagaattatctttgcccggatctcattcatgaactcaccggcgtacaggtcacctatacggacacctgtgatgcaaaaaaaattatcggcagggcggtcggcatgaagcctgataatgtactggatacattctggccccggatgacgggggataaaatcctcgccagatccacctatcatgatggtgtgcaggaaagagtggagctgaaagagatcctgaccgaaattatctccatgacgcactga

SEQ ID NO: 77349 - DNA, 351 bp, Citrobacter koseri
atgaaaatcaaaacctcccttctggttattttaatgttatccatgcctgctatttctgctgaacattctgatatgaagatgggtgacatggggtcatctgcctcgtcgcaggcatatatgtccggcatgaatgaaatgcatgagaagatgatggctgcggttaaggaacccgaccctgacaaagcctttgcaaaaggcatgatcgcacaccatgaaggcgcaatagccatggctgaaacggagctcaaatacggcaaggatccggaaatgagaaaactggctgaggacatcattaaagcgcagaaaggcgaaatcgaccagatgaacaaatggcttgataaccagaaataa

SEQ ID NO: 77350 - DNA, 432 bp, Citrobacter koseri
atgaaaaaaattgtactggcaactgctttaggttttggcctggtgtctgcgtcatgggccgctgaaaccgtgaacattcacgagcgcgtcaataatgcccaggctccggctcaccagatacagtcagcttctgtcccgtctgctgtccagggggagacctcccggatggccggaatgaatcagcatgaacaggccatcattgctcatgaaaccatgaacaatggctctgcggaagcgcaccagaaaatggctgaaaaccatcaaaagatgatgggaaatattgccgtcaacgatacccgcccgtcagtctcgttcgcagcgatgaatgaacatgaaagagcggccgtagcccatgaaaccatgaataacggccagtccggggcgcaccaggcgatggctgaagcgcatcgccgcatgatcaacgctggctga

SEQ ID NO: 77351 - DNA, 1479 bp, Citrobacter koseri
atgcgtaaaatgctctccaggcgccctttctctctcgccctgcggctgaccttttttatcagcctgtccacgatactggcgtttatcgcctttacctggtttatgctgcattccgttgagaatcattttgccgagcaggatgtcagcgatctgcaacaaatcagcaagacaatgcacggcatactccagtcgccggccgatcctgatgaaaaaaagataagcaaaataaaggagtcgattgccagttaccgtaacgttgccgttctgctgatggatccgcagggaaatatcctgttcacttcggcacagggggcggcattacgtccggcgatgaagacggcggacttcggctcacacactcgcgcgcaggatgtttttctctggacggtggaagatccggtcatgcccgtgcacggcgggccgggcatgaagatggaaacctaccggattatcgcctcttcaggaaccgcgacactgcagggaaaaaaccagaactatgtcctgctgacgggcctctccatcaattttcatcttcactatctcgacgcgctgaaaaagaatctgattgcgattgctgtagtgataagcctgctgattgtgttcatcatccgcattgcagttcgtcagggacacctgcccctgcgtaacgtcagtaatgccattaaaaatatcacctcggaaaatcttgatgcacggctggagccctcacgtgtgcccattgagctggagcagctggtcgtctctttcaatcacatgattgagaaaattgaggatgtttttacccgacaggccaatttttctgccgatattgcacacgagatcagaacgccgattactaatctcgtgacgcaaactgaaattgcactgagtcaggaccggacgcagaaggagcttgaggatgtcctctactccagtcttgaggagtataaccggatgaccaagatggtcagcgatatgcttttcctggcgcaggcggataataatcagctgatcccggaccgggttatgttcgacctgagtgcggagatcatcaaagtcttcgatttcttcgaagcctgggcggaggaacgtaacatcacactgaaatttaacggggtgcattgccttattgaaggtgatccccagatgttcagacgcgccatcaacaatctgctctctaatgccctgcgctatacgccggaagatcaggcggtaaccgtatcgataaaggaacaggaaaattatttcgaactcatgattgaaaatccggggaaaccaatccctgaagaacatttatcaaggctttttgaccgcttttatcgtgtggatccttccaggcaacggaaaggtgaaggcagtggaatagggcttgctattgtaaagtcaatcgtggaagcacatcacggcagggtccatgtggaatcggatgtacgctcgacacgtttcatattatcagtgccaaggcttgaaaaaataataaatagcaccccacaatcgtga

SEQ ID NO: 77352 - DNA, 681 bp, Citrobacter koseri
atgaaaatactgatcgttgaagacgaaatgaaaaccggtgaatacctcagcaaggggctgactgaagccggattcgtggtcgatcatgctgataatggtctgaccgggtatcatctcgccatgaccgccgagtatgatttggtgatcctggatatcatgctgcctgatgtgaacggctgggatatcattcgtatgctgcgcaatgccggtaaggggatgccggtattattactgaccgccctcggcacgattgaacaccgcgtaaaagggcttgagttgggtgcggatgattacctggtaaaacctttcgcgtttgctgagcttctcgcccgggtacgaaccctgctgcgacggggtaatacggtgatcacggagagccagttccaggtggccgaccttacgattgatcttgtatcaagaaaggtcagtcgcgccgggaaccgcattttattgaccagtaaggagttcagtctgctggagtttttcgttcgtcatcagggggaagttctcccgcgctctctgattgcctctcaggtctgggacatgaattttgacagtgacacaaatgccattgacgtcgcggtcaagcggcttcgcgctaaaatagacaatgattacgagccgaagcttatccagacggtacggggcgtgggctacatgcttgaggtccctgatgcgtaa

SEQ ID NO: 77353 - DNA, 1386 bp, Citrobacter koseri
atgttcaaattaaaactacttagcatcagcacgatattcatcctggcaggctgtgtctctctggcgcccgaatatcagcggccggcagcaccggtaccccagcagttctccctgtcccgcaacagcctggagccggcggtgacgggataccaggacaccgggtggcgtaacttttttgccgatcccgaggtgacccggcttatcgctgaagccctgaccaataaccgcgatctcagaatggccgccctcaaggtggaagaggcccgggctcagtacaacgtcacggatgcagaccgttatcctcagctaaatgcttcttcagggatcacctacagtggtggactgaaaggggacaaaccgaccacccaggaatatgacgcaggtctgacgctcagctacgagctcgattttttcggcaagctcaaaaatatgagcgagtctgacaggcagaactatttcgccagcgaagaagcccgtcgtgccgtacatatcctgctggtctcaaatgtttcccagagctatttcagtcagcagctggcttatgaacaactccgtatcgcacgggaaacgctgaagaattacgaacagtcctatgcgttcgttgagaaacagctggtcaccggcagtacaaacgttctggcactggaacaggctcgcgggcagatagaaagtacccgtgcagagatcgccaagcgagaaggcgacctggctcaggccaataatgccctgcagctggtactgggaacgtatcgcgcgcttccatcggaaaaaaggatggaaggcaatgcgatcaaaccagtaaaactgccaccaaacctgtcatcgcagattttgctgcagcggccggatattatggaggcggaatatcagctgaaagccgctgatgccaatatcggcgcagcgcgtgccgcctttttcccgtccatcacgctgaccagcgggctttcggcaagcagcacggaattatccagcctcttcacaccggcgagtggaatgtggaattttatcccgaaaattgacatcccgatttttaatgccggcagaaacaaagccaatctgaaactcgctgaaattcgtcagcagcagtcagtggttaattacgaacaaaaaattcaggcggcatttaaagaggttgctgacacgctcgcgctgcgggacagcattaatcagcaactggaggcacaacagcgttatcttgactcattacagataacgcttcagcgtgccagaggattatattccagtggcgccgtcagttatatcgaagtgcttgatgcagaacgttctctgtttaccacgcagcaagccattctggatcttacctattcccggcaggtcaatgaaattaatcttttcactgcgctgggtggcggttgggtagagtaa

SEQ ID NO: 77354 - DNA, 354 bp, Citrobacter koseri
atgcgtaattcacttaaagcagttgtatttagtgctctttccgtaatgttttcagcggggctgcatgcagaaacccatcagcacggcgaaatgaatgctgccggtgatgcctcagcacagcagataattaaaggaacgggggttgtcaaagacgttgacctcagcagtaagaaaatcacgatttctcacgaagccatcccggcggttggctggcctgctatgactatgcgctttacctttgtgaatgcagacgacagcattacggcgctgaaggcgggcactcatgttgactttacgtttgttcagcagggcaatatttctttactcaaaagcatcaacgatacgcagtcctga

SEQ ID NO: 77355 - DNA, 1293 bp, Citrobacter koseri
atggcttcttcaaagataaaatatgctgcaataattatcagcagcctcatagcgggagggctgatatctgtcactgcctggcagtttgtaaattccgcacagaaagctgaaaaaacagaaaataccgaaaaggaacgcaaggtgcttttctggtatgaccccatgaagccggataccaaatttgacaaacccggtaaatcccccttcatggatatggatctggtgcctaaatatgctgatgaaaacgaagataaaggcagcagcgggatccgtattgacccgactcaggtgcagaatctgggactgaaaacacaaaaagtctcgcgcggaatgctgaattattcccagacaatccctgccaacgtcagttataacgaatatcagtttgttattgttcaggcccgttctgacggcttcgttgaaaaagtctatcccctgacaacaggcgatcatgtgaagaaagggacgccgcttatcgatattaccattccggaatgggtggaggcgcaaagtgagttcctcctgctgtccgggaccggcggcacgcccacgcaactgaaaggcgttctggaacggcttcgcctggcaggcatgccggaagaggacattcagagactgcgttccacccgcagtattcagacccggtttaccattaaggcacctatcgatggtgtcatcactgcgtttgacctgcgtaccggtatgaacatttcgaaagataaagtagtggcccagatccaggggatggatccggtctggatcagtgcggcagtcccggaatccatcgcctatctgctgaaagacacttcacagtttgaaatatcggtaccggcttatccggacaaaacatttcatgttgaaaaatggaacattctcccgagcgcagatcagacaacccgcacgctgcaggtacgtctgcaggtcacgaacaaagacgaactgcttaagccgggtatgaatgcgtatctgaaactgaatactcaaagccaggaaatgctgctgataccgagccaggccgtgattgataccggtaaagaacagcgtgtgatcaccgttgatgatgaaggccggtttgtgccgaaaaaaatccacgttctgcacgaatcacagcaacagtctggtattggtagcgggctgaacgaaggcgacaccgtggtggtcagcggcctcttcctgattgactcggaggctaatattaccggtgcactggagcgcatgcgccatccagaaaaaacggacgacacaatgcccgcaatgactgaccagcctgtaaacatgcattcaggacactga

SEQ ID NO: 77356 - DNA, 3147 bp, Citrobacter koseri
atgattgaatggattatccggcggtcagtcgccaaccgtttccttgtgatgatggcagccctgttcctcagcgtctggggaacctggacaatcatcaatacccccgtggatgcgcttcccgacctgtctgatgtgcaggtgattatcaaaaccagctatcccggccaggctccgcagattgttgaaaaccaggtcacctatccgctcactactaccatgctgtcggtaccgggcgcaaagaccgtgcgcggcttttctcagtttggtgactcctacgtgtacgtcatttttgaagatggtaccgatttgtactgggcgcggtcacgcgttctggaatatctgaaccaggttcagggcaagctgcctgccggtgtcagttctgaaataggtcctgatgccaccggcgtgggctggatatttgagtatgctctggtcgatcgtagcggaaaacacgaccttgcggaactgcgctccctgcaggactggttcctgaaatttgaactgaaaaccattccgaatgttgccgaagtggcgtcggtgggcggcgtggtgaagcagtatcagatccaggtgaatccggaaaaactggcacagtatggcatcagcctgcccgaagttaagcaggcgcttgaatcctctaaccaggaggccggtggctcatccgttgaaatcgcagaagcggagtatatggtccgggccagcggctaccttcagaccattgatgatttcaataacatcgtcctgaaaaccggcgagaacgggatcccggtttacctgcgtgatgttgcccgcgtacagatcgggccggaaatgcgtcgcggtattgccgagcttaacggccagggtgaagtggcaggcggcgtggtgattttgcgctcaggtaaaaatgcgcgcgaggttattaccgccgtgaaggataagctggatacgctgaaggccagcctgcctgaaggtgtcgagattgtcaccacctacgatcgcagccagttaattgaccgggccattgacaacctcagctataaacttcttgaagagtttattgttgtagccattgtctgtgcgctgttcctctggcatgtccgatcagcactggtggcgattatttctctgccgcttggcctgtgcatcgcctttattgtcatgcacttccagggcctgaacgccaatattatgtcgctgggggggatcgcgattgccgtcggggcgatggtggatgcggccatcgtcatgattgaaaacgcgcataaacggctggaagagtgggaccatcagcatcctggcgaggagatagataacgccacccgctggaaggtcatcaccgatgcttccgtggaagtagggccggcgctgtttatcagcctgctgatcatcaccctgtcgttcattcctatttttaccctggaagggcaggaagggcgcctgttcgggccactggccttcacgaaaacgtattccatggcaggtgcggccgcgctggccatcatcgttattccaatcctgatgggattctggatccgtgggaaaatacccgctgagaccagtaatcccctcaaccggtggctgattaaggcgtatcaccccttactgctcagggtacttcactggccaaaaacaaccctgctggttgcggccttatccattttcacggtgatctggccactgagtcaggtgggcggggagtttctgccgaagatcaacgagggagatctgctctacatgccgtcaacgctgccgggcgtgtcgccggcagaggcagcggcgctcctgcagaccacggacaagctcatcaaatccgtgcctgaagtggcgtctgtttttggcaaaaccggtaaggctgagaccgcaacggattctgcgccactggaaatggtggaaaccaccattcagctgaaacccgaagatcagtggcgaccgggcatgacgattgacaagattgttgacgagctggataagacggtccgtttaccgggtctggcaaacctgtgggttccccctatccgtaaccgtatcgatatgctctcgaccgggattaaaagcccgatcggtatcaaggtttccggaaccgttctgtcggatatcgatgcgacagcacagagtattgaagcggtagccaaaaccgtgccgggtgtggtatctgctctggctgaacgtctggaaggcggccgctacattgatgtcgatatcaaccgggaaaaagcgtcccgttacgggatgacagtcggcgatgtccagatgttcgtctcctcagccatcggtggcgcgatggtaggcgaaacggtggaaggcgtcgcccgctacccgattaatatccgctatccgcaggattaccggaacagtccgcaggccctgaggcagatgccgatcctgacaccgatgaagcagcaaatcaccctgggtgatgtcgctgatgtgaaggtggtttccggaccgacgatgctgaaaacggaaaatgcccgacccgccagctggatctatattgatgcccgcgaccgggacatggtgtcagtggtaaacgacatcaagacggccatcagccagaaggtgaaactgagaccgggtaccagtgtatccttttcagggcagtttgaattactggagcatgccaataaaaagctgaaactgatggtaccgatgacggtgatgatcattttcattctgttatacctggcgttccgtcgcgttgatgaagccttactcattctgatgagtctgccgttcgcactcgtcggaggaatatggttcctctactggcagggcttccatatgtctgtggccaccggcaccgggtttatagccctggccggggtggcggcggagtttggcgtggtcatgctgatgtacctgcgtcatgccatcgaagcgcatccggaattgtcccgtaaggagacgttcacaccggaaggccttgatgaagccctttatcacggtgccgtgctgcgtgtccggccgaaagccatgaccgtggcggtgataattgcgggtctgctgcccatactctggggaaccggcgccggttcagaggtcatgagccgtattgcggcgccgatgattggcgggatgatcactgctccgctgctgtcgctgttcattattcctgccgcctacaaattaatctggctgcgcagacataaaaaaagcgtgtcttaa

SEQ ID NO: 77357 - DNA, 441 bp, Citrobacter koseri
atgaaaaaagtggtgttagtggccctggctctcggcctgtcactgccggcaatcgcaagtgaaaaagtcatagatatgtacaagtctgaacactgtgggtgctgttccttatggggcaaggcgatggaaaaagacgggtttaaagtgcgaacacacgtcatgaacgatcaggcgctgtcagccctgaaagaaaagtattctgttccggcaggactacgcagttgtcatacagcggttgcaggcgagctggtcatcgaaggccatgtcccggcgacgacgatacatcaggcaatgcagtcaggttcgggtatttacggtctcgccacccccggcatgcctgcaggcagcccgggaatggagatgggcgaccgaaaagaggcttacgatgttatcgcctttgccccggatggaagtcagaacgtcttccagagaatcgaatag

SEQ ID NO: 77358 - DNA, 2454 bp, Citrobacter koseri
gtgaaaaatgataatgcagtgaaacacgttcaccagcctgcttctgaacagacgcgatccgcagacgacagtcagtcagtgcgaaaggtaagggaccccgtgtgcggaatgtccatcctgccggaaaaggcgcacagcagcatcagattccatgatcatcagttttacttctgctctgccagctgcgagagcaaattttcagcccatcccgatcattatctgagcggaaacgccagtgaaacctcccatcatcatgaccatcatgaagccagccctgaaagggtagaaccgtcacaccggcagagtgagaaagcgatgtctgacggcgtgtggacatgtccgatgcatccggagatacgtcgcagtggtcccggaagttgccccgtttgtggaatggcgctggaaccgcttgttgccacggcatccacgggccagagtgatgaacttcgcgacatgaccagacgcttctggctgggattgctgttgacgttaccggttctggtgctcgaaatgggatcccatttgtttccgaaaatgatgcaattactgccgccacagtacaacgtctggctgcagttgcttctggccactccggtggtgttgtggtgcggatggccattcttctcgcgtgccggagcctcgctacgtaaccgctcgctgaacatgtttactctcgttgcaatgggcacgggagtggcctgggtgtacagcgtcatcgccacgatctttccctctctgtttcctgcatccttcaggatcatgaatggccaggttgccgtgtattttgaagcggcctccgttatcacggtgctggtcctgctggggcaggttcttgagttacgggcaagggaacaaacgtcaggcgccattaccgcgttgctgaatctcgcccccaaaacagccagacgtctggatcctgatggccatgagacggatatcaaagcagaagacgtcctgcctggcgataaactccgtatcaggcccggcgagagtgttccggttgatggcatcgtgctcgaaggccgtaccaccgtggatgaatcaatggtaaccggggaatcaatgccggttaccaaaacggaaaatgaccgcgttatcggaggaaccataaatcagaccggtagcctcatcatgcaggcggagaaagtcggtgatgaaacaatgctgtcccgtattgtacagatggtcgctgatgcgcaacgctcacgcgcgcccatccagagaatggctgacagtgtctcgggatggtttgttcccctggtaatactcattgcagttgtcgcgtttgtggtctgggctgtctgggggcctgaacccagggtggcacacggtctgatagccgcggtttcggtcctgattatcgcctgtccctgcgcgctgggtctggccacacccatgtcgataatggtgggggtgggcaaaggggcccagtcaggggttttaatcaaaaatgctgaatccctggaacgccttgaaaaagtgaacacactggttgtcgataaaaccggcacgctcacggaaggtgcgcccacggtgactggcataatcagcctgaagccgggcggcgaagaggcgctgttacgtgtgacggccgccgtagaaaaaggatcacagcatccgctgggtatggcagtggtcaacgccgcacgtgaaaaagggatcacggtgccggctgtcagtgattttaatgccccgtcgggtaaaggggtttcaggggatgttgaagggctgcgggttattatcggtaatgagctggccatgcaggaaaacagtatcgttattgatagccagaaggcgactgcggatgccttacgcagggaaggcgctaccgttatctatgtggcgacagacgggcagcttgccggcctgatcgctatttctgatcccctgaaagcaaccacgcccgacgcacttaaggccttgcgtgaggcgggtatccgtattgtcatgctgaccggggataaccagcttaccgctgaagcggtggcgcataagctcggaatagaagaggttgaagccggggttctgcctgatggtaaaaaagcagtgattagccgtctgaaagcatcaggccatgtggtggcgatggcgggagacggcgtgaatgatgcacctgcactcgcggcagctgacgtggggattgcaatggggacggggacagatgtggcgatagagagtgccggcatcacgcttcttaaaggtgacctgatgatgctgaacaaggcccgacaactgtccgagatcaccatgaagaatatccggcagaatctgttttttgcgtttatctacaatgccctcggagtacccgtggcggcaggcctgctttatccggcgtatggcatactcctctcgccggtgatcgcggcagcagcaatggccctttcctccgtcagcgttatcgtcaatgcgttacgtctcagaagtatcaggctcggcaaagaagcgcatgaataa

SEQ ID NO: 77359 - DNA, 198 bp, Citrobacter koseri
atgaaaagtaccacttatgctctgattgctgtcgccgcgatcgcggtatttgcacttttacgggagcactggtcacatctggccggctactggccttatctgttgctgctgatatgtcccctcatgcacctgtttcatggccacggagggcacgggcaacatcagcatcacgacgggtcggatgataaaaaaaactga

SEQ ID NO: 77360 - DNA, 741 bp, Citrobacter koseri
atgtactctaccgatgttgtaaaagataatgcttatgtagctgcctcccgtgcaggcctggaaaaaaatgaaattgctgtcctccagcgctccctgcctccccggtacgatcttcgacatttaaaaaataatgaatcactaaaactcctgcttcaaaaaaaagcaggacaatcccgggtcgtggcctataaattcacgtcaggtaaatttaattacaccgcttatcgtatttcagacaagaaattctacaacctgtcggataccggcagcagggccggactggattatccgctgccggtcaccgcaagactcagttcacctttcaacccggcccgccttaatcctgtgtcggggaaggtcagtccgcataatggtattgattattcaatgccaatgaatacgaaaattgtcagtgttatcaacgggaaagttacccgggccgaatacaacagcaccatgggctattttgttgaagtgtccggcaaagacaatgttaaaacgcgttatcttcatctcagtaaaatcctcgttaaaaaaggaacgtcagtttcccggggaactgctatcgcgttgtccggtaacagcgggcgctcatccggtcctcatcttcattatgagctggtcattaacaataacccggtcaattcactggctttcagggcggcagggcctgcggataacaataaactcgaacagcacgcgtacgcccatgcccgtgactatgggcgatatctggactga

SEQ ID NO: 77361 - DNA, 447 bp, Citrobacter koseri
atgaaaatttttatcgcagttattatattatccacgttatctatgggttcagcgtttgctcagcccagtaacctgtctcatgatgcacatcgcttcgtaaataatgccacagcgtttcctcatgttgaggcagccaggcatgaacaaccccgcgtaaaaataaacaaagccagcgcaatttctttctcagaaatgaatgaacatgaaagagcaattattgcccattcctttatgaataacagtacgtcgtatgcccatcaaaaaatgattgaggggcataaaaaaaagctgaacaaaagtgagacaaacacagcatcctcatccttcagtgaactgaatgccggagacaaagccgccctggtccatgagcgtgtcaataacgcaggggctgaagctcaccagatacaggcgagaaaccttcgtggattgtatgaaaataaggagtag

SEQ ID NO: 77362 - DNA, 1818 bp, Citrobacter koseri
atgcagttaaaaacgtcacgacgaacatttctgaagggattaaccctctctggcgtagccggaagtcttggcgtatggagctttaatgcgcgctccaccctgagtctgccacctgcagcgtccctgcagggcaccaattttgacctgaccattggagaaacggcagtaaacatcacaggaagcgaacgtcaggccaagacgatcaatggtgggctgccggggccgaccctgcgctggaaagagggtgataccatcaccctcagagtcaaaaatcgccttgatgaacagacgtccatacactggcacggcattattcttccggccaacatggatggtgtgccggggctcagttttacgggtatcgaaccagatgatacctacgtctataccttcagggtcaggcagaacgggacgtactggtaccacagccactcagggctccaggagcaggagggggtttacggtgccatcattattgatgcccgggaaccggagccctttgcttatgaccgcgagtatgtggtgatgttgtctgactggacggatgaaaatcctcacagcttgctgaaaaaattaaaaaaacagtcggattattacaatttcaataaaccgaccgtggggtcttttttccgggatgtgaacaccaaaggtctgtcagccaccattgccgaccggaaaatgtgggctgaaatgaaaatgaacccgactgacctcgccgacgtcagcggctatacctacacctatctcatgaacggacaggcgccactgaaaaactggacagggctgttccgccccggtgagaaagtacgcttacgctttatcaacggctcggcgatgacctatttcgacattcgcataccaggcctgaaaatgacggtggtagctgcggatggccagtatgttaatccggtcaccgtggatgaattcaggatcgctgttgccgaaacctatgacgtcatcgttgagcctcagaatgaggcctataccatcttcgcacaatcgatggatcgtaccggttacgcacggggaacgcttgccacgcgagagggtgtaagtgctgccgtccccgcactcgatccgcgtccattgctgacaatggatgatatgggtatggggggaatgagccatgatatgtcagggatggatcacggccagatggcgggaatggataacagcggagagatgatgtcaatggacggctccgggatgccggacagcgcggcaccctccacgccaatggatcacagcagtatggccggtatggatcattccctgatggctggaatgccgggaatgcagagccatcctgcgtccgaaaccaataatccactggttgatatgcaggcaatgagcgtctccccgaaattaagcgatccaggcatagggcttcgcaacaacggtcgtaaggttcttacctatgccgatctcagaagccgctttgaggatccggatggaagagagcctggccgcaccattgaactgcatcttacagggcatatggaaaagtttgcctggtcctttaacggtatcaagttttcagacgccgcgccggtggtgctcaaatacggtgaacgactcaggatcacgctggtcaatgacaccatgatgactcaccctattcacctccatggtatgtggagtgatctggaagatgaaaacggtaatttcatggtgcgtaaacataccattgatgttcctcccggaacaaagcgcagttacagagtgacagctgatgcactgggccgctgggcttaccattgccatctgctctatcacatggaaatgggaatgtttcgtgaagtccgggtggaggagtaa

SEQ ID NO: 77363 - DNA, 894 bp, Citrobacter koseri
atgcacatgaaaatgaatacctgcgccatatctgtgcttgcagctggtttgattgcatcacctgtcgcgtttgctgcgggaacgcccgccgacccgcactccgggcatgatatgtccactatgcagatgtcagccgatgccggtcttactgaaatgacggccatggagcccgtggtcactgagagcagaacgcctgttccgcccgttaccgaagccgatcggaaggctgcgtctggcaatttaaagggccatgctgtccatgacagcgcaattaattacctggttcttctcgatcagcttgaatggcagcgttcagacaaccggaataatttcaactggagcgtgaacagctgggtgggtggtgatatcgaccggctgtggatcaagagcgaaggtgaacgaagtggtggagagacggagacggcagaagcccagtttctctgggggcacgcagtaggcccatggtgggatttggttgccggtataagacaggatttcagaccgggatctgcccggacgtgggctgccgtcggtttccaggggttagccctttacaactttgaatccgaaatcacggggtttgtcagtgatggcggaaaggccgcccttcgcctgggaggagaatacgacgttttactgactaaccggctgatactgcagccatcctacgaggtgaatatctacagccaggatgatgaatcgcgggggcggggcagagggatatccgataccgaacttggtctccggctacgttatgaagtccggcgtgaatttgcgccttatattggcgtttcctggaatcagctgtacggaacaacgtccgacatggcgaaaagggaaggcgaaaaagacagtcagatagtattcctggcgggcgcaagaatctggttttaa

SEQ ID NO: 77364 - DNA, 381 bp, Citrobacter koseri
atgttgatattaaaaaaagccattctgacgggtgggctgattatgggcgtcgctttttctgctatggcgcatccggaattaaaaagctcggttccgcaggctgattcagccgtgccggctccggagaaaatccagcttaattttacggaagatctgaccgtaaaattctcaggcgcgaaactgacgatgaccggaatgaaaggtatgtcgtcgcattcaccgatgccagtggcggctaaagtggcaccaggatctgatcccaagtctatgatgattatcccgcgtgaacctttacccgccggcacttatcgtgtggactggcgtgcggtttcatcagatacacatcctattaccggtaattatacctttacggtgaagtaa

SEQ ID NO: 77365 - DNA, 930 bp, Citrobacter koseri
atgaacgacctgattataattgttatccgtttccttctgtatcttgatttaatgattttatttggattgcctttcttccagatatatggaataagcggcgtcaggaatgagatgcataatttaattaatttcaggtcgtttatcgctttagctgtactgatcggcatcctgctgacaggcatgaatatgctgctggtatccaatgccatgagcggggtgacagatttcagagaattatccattcatattatcgaaatggtgatcgaagaaaccgacgttgggatcagctgggttgtcagactctttgccctgtttatcacactcggtgggctgttcctgtacactaaaaacagagtgctttcctgtctgctgatgaccatcagcggcgccgtggcgctggccacactggcatggggcggacatgccgttatgcatgatggcgtacattactatctccacttgttcagcgacctgacacaccttggcgcagcaggagcatggaccggcgcactggccgcattcgccatcttactgatgcgcaaagataaccataacgcccggagcgtcagcattatttctgattcattagcaagatttgcaacggcaggaaccgtgatcgtggtagccctgagcctgagtgcgctggtcaactatctgtatattgctgagggtgagttagcccctctgttcagcagcgcctggggaagtattttgcttgcaaaaacagcgcttttcgttctgatgctcctgctggcagcagcaaaccggtttcaccttggtccccggcttgaggtcatggtcagggaaggcaattatgttcgcagcgtcgcgctgatgcgaaacagtatcctgaccgagttcgtcattgctgtcaccattctgggggctgtctcctggcttggaatgcttgccccgtctcaggccagctag

SEQ ID NO: 77366 - DNA, 681 bp, Citrobacter koseri
atgcagcgtatattaatcgttgaagacgaacagaaaacagggcgctatctgcagcagggactgattgaggagggatatcaggccgacctcttcgataacgggcgcgacggcctcagagcggcatcaaagggatcttacgatttaatcattctggatgtcatgctgccttatctcgacggatggcaaatcatcacgtcgctgcgggcctcgggtcatgaagagccagtattgtttctaacggcaaaggataacgtacgggataaagtgaaagggcttgaactgggtgctgacgactatctgatcaaacctttcgattttaccgaactggttgcacgcgtgaaaacgctactgcgccgggcacgtgcgcaaagtgccacagtctgcaccattgctgatatgaccgttgatatggtccgtcggaccgtaacccggtcgggtaaaaagatccatctcaccggaaaagaatacgtgctgcttgagttgctgcttcagcgtacgggagaagtattaccccgaagtctgatctcatccctggtctggaatatgaattttgacagcgacacgaatgtgattgatgtggccgtgagacgtctgagaagtaaaattgatgatgactttgagcccaaacttatccacaccgttcgcggtgccggctatgtactggagatcaaagaagagtga

SEQ ID NO: 77367 - DNA, 1401 bp, Citrobacter koseri
gtgaagttcaatatttctctgaccacccggctgagcctgatattttctgcagtcatgctgacggtatggtggctttcaagttttattctgatcagcacactgaacagctattttgacaaccaggacagagatttcctgacaggaaaactccagcttactgaagagtttcttaaaacagaaacttacaggagcaaaacggatattaaatccttatccgataaaataaatgacgcgatggtagggcacaatggattattcatttccattaaaaatatggaaaatgaaaaaattgttgagctctacgcaaaaaattcgctggtccctgcaaccctgctgaaccagtccggagatattctggactatatgatccagactgaagaaaataataccgtataccgcagtatctcgcgacgtgtagccatagcgcccgaagaaggtaaaagtaaacatttcatcattactgtcgccacggatacagggtatcacaccctgtttatggataagctcagtacctggctgctctggtttaataccggtctggtttttatttcggtttttctgggctggctgaccacacgaatcggcctgaaaccgttgcgggaaatgaccagtctggcgtcatccatgactgtccacagccttgaccagcgtctcaatcccgatcaggcgcctccggaaatctctgagaccatgcgggagtttaacaacatgttcgaccgcctggagggatccttccggaaactgtccgatttctcttccgatattgcgcacgaactgcgtacgccggtcagtaatctgatgatgcagacgcagtttgccctggccaaggtcagagatgtttcgcattaccgtgaaattttatttgcgaacctggaagaactcaaaagattatcacgaatgaccagtgacatgctttttctggcccgttctgaacatggtttgctgcagctggataaacaagacgtgaatctggcggaagagctgaatgaattacgtgagctgtttgaacccctggccgaagaaacaggaaaaacaatcaccgttgaaggcgacgggatcgtggcaggggacagtgacatgctgcgacgcgcgttcagcaacctgctttccaatgccattaaatattctccggataatacccgtacatcgatacagatcgctcagggcagtgactatgttgaagtggttatttcgaatccggtgtcaggcggcgtgcctgcaaatctggagcgcttgtttgatcgcttctatcgcgcggactcatcacgtgttcataacactgaaggggccgggctgggattatccataacgcggtcgatcattcacgcacatggcggagagctgtcggctgaacaacagggccgcactatcctctttagtgtacgcctgttgatgaggtga

SEQ ID NO: 77368 - DNA, 435 bp, Citrobacter koseri
atgaaaaaaacgcttgtatcatttttagccattatggctgtcacctcatccgcctgggctgcagaaaccatgaatatgcatgaccaggtaaataatgcccaggcaccggcccatcagatgcaatcttctgcgtccagaagcgccgttcagggtgaaggaatgaaaatgatggatatgagtaaccacgagcaggccgcgatgtcacatgacatgatgcagaacggcacatctgccgcgcatcaggatatggctgatatgcataaaaaaatgatgaacgccaaaactgaaaccaccggcgaaagcgcaaagtcattctccaaaatgaatgaacatgagaaagccgctgtggtgcatgagaaggcaaataacggccagtcttctgttattcatcagcagcaggctgataaacaccgcagtcagagcgcccagaattaa

SEQ ID NO: 77369 - DNA, 597 bp, Citrobacter koseri
atgtcacgagtttttgcttactgtcgggtctccacgcttgaacagacaacggaaaatcagcgcagggaaattgaagcagccggttttaccgttaaaccccagcgcctgattgaggaacaaattagcggttcggtagccgccagcgaacggctcggttttgccaggttacttgaccgcatggaaaatggcgatgtgctgatagtgaccaaacttgatcgcctgggccgtgacgcaatggacgtgcgaaagaccgtagagcagctggcagcgtccgatattcgcgtacactgcctcgcactgggtggcgtggatcttaccagcgcggccggcaagatgaccatgcaggtcatttcggcggtggcagagtttgagaaagacttgctgattgagcgcacacattctggccttgcaagggccagagcagcaggcaaacggtttggtcggccaccggcgctgaaccaggaacagcggcaggcagctcttgaacacctgaaagctggtgccagtatcagcgccgttgcccgcgagtttggtacctcacgacaaaccatcatgcgcctgcgtgatgatgcagtcagcccggagttaccagaataa

SEQ ID NO: 77370 - DNA, 930 bp, Citrobacter koseri
atgaagaagaaaaacagcacacccactcctcacgatgccacgttcaggcagttcctgacgcaaccggatattgcccgggatttcatggaaatccacctgcccacagagctgcgtgcagtctgcgatctcagcacgctgaaactggaatccggctcgttcgttgaggatgatctccgccagtatttcagtgacgttctctacagcctgaaaaccacagcaggtgacgggtacatacatgtcctcgtggaacaccagtcaacgccggacaaacatatggctttccgcctgatacgctatgcggtagccgccatgcagcgccacctggaggcagggcataaaaaactgcctctggtgataccggtgctgttctatacgggtaaacgcagcccgtatccgtactcaacccggtggctggatgagtttgacgatccggcgctggcaggcaagctctacagcagcgctttcccgctggtagacgttacggtcattccggatgatgaaatcgctggccatcgcagtatggccgcactgactttactgcaaaagcatattcaccagcgggacctggcagaactggttgaccggctggcgcccatcttgctggccggatatctgtcttcatcacaggtaatatcgctggtacactatatagtgcaggcaggcgaaacatcagacgccgaagcctttgtacgcgaactggcacagcgtgtgccgcaacacggagacgcacttatgaccatcgcacaacagcttgaacagaagggcatcgagaaggggattcagctcggtgaacaacgcggcattgaaaaaggcgagcgcgaagccacccttaaaattgcccgtaccatgctgcagaacggcattgaccgtaataccgtcatgaaaatgaccggactgactgaagacgacctggcgcagatccgccactaa

SEQ ID NO: 77371 - DNA, 612 bp, Citrobacter koseri
gtgacgctgacagaaaaatcaggccatctggcatggtgcgccctggtggcgcttgcgctggccagacagaacggcgatatgctgtcagctgctcaggaaaatctctttctcacccgatggctggcgaccgcgctgaaacaacggcgtttttcgcgtgatgttgcccccgatatcgaatggcttctgaaacagggacgtcagctgggcgtcagcgcgaagctggccagcaagctgaattacctctggcgctcctgcaccggcgagttgactgaacagaacgatctgttccggctgacctatgcgctggaaacagccaaagatatgcactggaactaccgtctgctgagcgatcgggaatggtccggccggaatgccgtggcgctcagtgcgggtgtgaacgccatttatctctcacgggtcaacctcgatgttgcttttgacgacagcggccgacagataaatccactgacagcgcgtctgactgggaacgtagcgggggtaatgaagctgtttaatcgctgtggctggcaggcagagcctgagtctggtgcctccctgccccaccagtattcgctgatggccgggcagggagtgccaggaaagggggattag

SEQ ID NO: 77372 - DNA, 396 bp, Citrobacter koseri
atggaaaatatgatgaaaactatgcgtgagcatttccccgcgcgaacagaggtgatcgaacagtctctggatatgtttggtatcaaacgaaatgaggacgggacgttactcttcccccgtcactccgataaacgttttcccgttgcacgtatccgtaagcgactggcggcatatggctggcgaggggaacgcctgaataaggaggtggcgcgtatcgtcgcgggccctgatatcctccctgacaggagggaatacagcattattttcccttacggatgggagaagaagcagctgacgcgtgagatgcggaggatgtttccccgtaagaccggccgacgtgtgctgattatgctcgatgaattacatcagtttattgactcacgggagaagcagtga

SEQ ID NO: 77373 - DNA, 864 bp, Citrobacter koseri
atgcgtgatgatgacaattcagacgcctgtgatgaagcgccccgggcggaggaaaaatgctacaccagagggcgacttcgggatgagttcaggatgaagccagcccccggtgtggaaccggtcagaatgtacaaaagtccttacggcgggaaatacggcgtatggcggctggctgactgcgtcccgatgcgggcgaaacgcccacagacagaaaaacagcggcaggccagcgctcgtctgggcctgctggcccggatgaagagtgagcgtggcaggttcgccatgctggcacatacctggttagcgctggacccagtcttcctcgataccgaaacgaccggacttgatgctggtgcgcaggcgctggaaatcggtctggtgaatgcccgcggtgagaggatatttgagacccgtcttaaacccactgtcgccatcgatccggcagcagctgcagtacacggtatcagtgacgaggatctggtcagagcgccatcgtggcctgatattgcacagcagctgcagcaccatatcggccggcgcccgctggttattttcaatgctgagtttgatacgcgcattctgaagcagacagcggcagcgcataacgaccctgccagctggctggactctttgacggtgtactgtgccatgcggctcgctgcgggttattacggacccaccaatcgttacggtaccatatcgctttccggtgctgtcagtcaggctggcctgcgctggatcggggaggctcattccgccgtcactgacgccgttatgacagcacgggtggtaaacaatattgccggatactggcatgaactccagtgtgaaatgaatgatgacgcagggagtgagactgcataa

SEQ ID NO: 77374 - DNA, 1116 bp, Citrobacter koseri
atgcgtccggcaacatacgaaccagaacagattattgaagcagggctggccctgcaggctgaaggacggaatatcaccgggttcgcactgcgtaaccaggtgggtggcggcaacccgacacgtctccgccagatatgggacgaataccaggcatcacagagcacggtcgtcactgaacccgttgccgagctgcccgtggaagtggctgaagaagtgaaggccgtctccgccgcgctgtccgaacgcattacccaactggcgaccgaactgaatgataaggctgtccgggctgcagaacggcgggttgcggaagtcacacgtgccgccggggaacagaccgcacaggcagagcgggaattggccgacgccgcacagacggtcgacgacctggaagaaaaactggatgaactgcaggacggatatgaccggctgacgctggcgctggaatcagaacgtacactgcgtcagcagcaggatgtggagatggcccagctgaaagaacgtcttgcggccgcagaagagaatgcccgtcagcgagaagagcggtatcaggagcagaaaacagtgctgcaggatgcgcttaatgcggagcaggcccagcacaaaaacacgcgggaagacctgcaaaaacggctggagcaaatttctgccgaagctaatgcgcgtaccgaagaactgaagtctgaacgcgataaagtcaatacactcctgacccgccttgaatcgcaggaaaatgcgctggtctcagaacgtcagcagcatcaggccacccgcgaaacgctgcagcaacgcctcgagcaggccgtcgctgacgcgcaggcgcgcgccggtgagcttgcacttgaacgtgacagagtcagcagcctcaccgcgaggctggaatcgcaggaaaaggcctcctcggagcaactggtgcgtatgggcagtgaaatagccagtctgacagatcgctgcacacagctggaaaaccagcgtgatgatgcccgtctggagacgatgggggagaaagaaacggtcgcggcactgcgtggtgaggctgaagccctgaagcgtcagaaccagtcactgatggcggcgctttcgggcaataaacagaccggtggccagaatgcgtga

SEQ ID NO: 77375 - DNA, 489 bp, Citrobacter koseri
atgccgcaggatgaatcagtcgtcgaacgggccagggaatactttttccggcaccaccggtatacagaggaagacctggcatctgactaccaggcagaactgcgtaactacagggatgacacctgggaagcaccgcaacgggccgccaggcttagtgcggccgtcaagcgctacaaaacgtatgagatgttgtacttcttcttccagatcgctgatgaggccgggctggactacactccgctggttgtgaagcgcctgtgcgctcatcttttcgacaggcagggcagccagaatattattgttgatatctttggccagaagggacgtatgcaccgcagccatgacagtgatcctgacattattgctgccgttgccgaacgctaccggcagcaggcagacgaccactggcagatcgtcctgaagaatatcgggagagtgaagcaggactaccggaaaaatcagaacagggagaaaggcgcaggggattaa

SEQ ID NO: 77376 - DNA, 978 bp, Citrobacter koseri
atgagcgttgaaccgggaagaggtaaatttgtcgatcaggcggcagaagccaggccttctgtctggcgcagaacagctgggtggatacgtgaggagattctgcattctctgggaaggccagcccgcctggagggggcgattgcttccgggcagctaattccctgtccgatcatcgcccctgtcgacacgttctggacacggtcggtggtctactggcaggactggatgtcttcttctctgtcatcatttcattcccgcccctggacgatcgactaccgcaaaccgggctaccagcgccggcttgaaagccatgcacttgctgttcctgaggttcagcaactgattagaaaagaaaatgtctctcatttttcatgcgacatcacggatatccgggggatttcggcttcgaaatcaatggatcatgatatccgggacatcgatgagtttcccttactgagatgccgtgagctggctgaacctgtgactgaagagcacctgcagaaaaatatgcgtcactgggaattacggctcgaccggatgctgtttgctgaatatccgtgggcagagcggaggctctactggctgaacgacggtggctcacaccattttggcgcagcccgctatcaggcatgccgcctgggcattgcggttccactaacaggcagactctgtcgctacggtgtaaatgtgccgatgatctccgctatacgtcagcaatggcatctgtttgctgttccgacagatgaactcttcagcagctttttcgacgccatgaatgcctttgaatgcccgtttggtaattccggtttgccgcgtcacatgcatgatacggataagtcaggagttgctctcaaactggtctggcttgaacgtggccatcccagagccagtgctgttgctaatgtactttcagccgcaggttttcctgatttcgggaagcagctccagcaactggccaaagaaccttcgccacgttga

SEQ ID NO: 77377 - DNA, 354 bp, Citrobacter koseri
atgccagaaatctcacccctacaacttttcaaaaccctgtccgatgaaactcgtctgggtatcgtgctgctgctcagagagatgggagagctgtgcgtgtgcgacctttgcactgcgctagaacagtcacagcctaagatctcccgccatctggcgatgcttagggaaagtggcctgttgctggatcgcaagcaggggaaatgggttcattatcgcttatccccgcatattccttcctgggctgctcaggtgattgagcaggcctggttaagccaacaggacgacgttcaggccatcgcccgtaagctggcatcagcaaactgctctggcagtggtaaagctgtttgtatctaa

SEQ ID NO: 77378 - DNA, 363 bp, Citrobacter koseri
atgaaaacgttaaccgtgtttgatcctgcgatgtgctgcagtaccggcgtttgtggttcagatgttgatcaggttctggtcgatttttctgctgatgtgcaatggctgaaagggcgtggtgttcagatcgaacgttttaacctggcgcagcagcctatgagcttcgttcagaacgaaaaagtgaaatcattccttgaagcatcaggcgccgaagggcttccgctactgttgctggatggtgaaacggtgatggcggggcgatatcccaaacgcgctgaactggctcgctggtttggtattccgctggagaaagtaggagtggctccgacaagctgctgtggtggtaatacttcctgttgttga

SEQ ID NO: 77379 - DNA, 1752 bp, Citrobacter koseri
atgaattttttacagaatatcccgccttacctgtttttcactggcaaaggaggagtaggtaaaacctcaatttcctgcgctacagctatacgcctggcagaacagggtaagcgcgtcctgcttgtcagtactgatccggcgtctaacgtcggtcaggtattcgatcagtctattggcaacactatccagtccgtgtcttcggtgccaggcctttcggcgctggagatcgacccacaggacgctgcccagcaataccgcgccagaatcattgacccaattaaaggtcttttgccagacgacgtcgttaacagtatcagcgagcagctttcaggcgcttgtacgacagagatcgctgcgttcgatgagtttactggcttactgaccgacgcttctctactgacccactttgatcacatcatttttgatactgccccaacgggccacactattcgccttctgcagcttcccggagcctggagcagctttattgaaagtaacccggatggtgcttcctgtcttggtccaatggctgggctggaaaaacaacgcgagcaatatgctcatgctgtcgaggcattatccgatcctgaacgtacgcgcctggtgctggttgcgcgattgcaaaaatcaacattgcaggaagtcgcccgcactcatgacgagctatcagccattggccttaaaaatcagtatgtagtcattaacggtgtcctgccagcgagagaagcagaacgtgatgcactggccgctgcaatatggcaacgggagcaagaggctctgacaaatcttcctgtcgggttagctgagttgccgatagacactctattcctgcagccgctgaatatggttggtgtgtccgcattgaaaggcctgcttaacgaacacgctgagatagcatcgcttccagaacaaagcatacagaacaagccagagaacatgtcgctgtctgccatggttgatgatatcgcccgcagtgagcacggtttgattatgttgatgggtaaaggtggtgtgggtaaaactacgatggctgctgctatcgccgtccgacttgcggacatgggttttgatgtacatctcactacctcagatcctgctgcgcacctgagtacaaccctggacggtagcctcaataacctgcaggtcagcagaataaatccacacgatgaaaccgaacgctatcgtcagcatgttcttgagacgaaaggcagggatctggatgaggccgggaaacgactgctcgaagaggatttacgttctccttgcacagaagagattgcggtattccaggcgttctctcgcgtaatccgtgaagcaggtaaacggtttgtggtcatggatacggcacctaccgggcatacgttattactgcttgatgctaccggggcttatcatcgtgagattgccaggaagatgggagataaaggtcattttaccactccgatgatgcagcttcaggacccagtacgtaccaaagtccttctggtcactctgcctgaaaccacaccggtactggaagcggcaaacctgcagtccgatcttgagcgtgcggggattcatccctggggctggattattaataacagcctttccattgcacagacccattcaccattactttgtctgcgtgctcaacaagagcttccacagatcaaggccgtgcagagcacgcatgccaaacgtatcgcgttagtacctgtactggcatcagagcccacaggcatcgataaactcagagagctggcagtttaa

SEQ ID NO: 77380 - DNA, 1290 bp, Citrobacter koseri
atgttactggcaggcgctatttttatcctgaccatcgttttggttatctggcagccgaagggattagggatcggctggagtgcgacgctgggcgcagtactggcgttgatctctggcgttgtccattttggtgatattcctgttgtgtggaatatcgtctggaatgcgacggcgacctttattgccgtgataattatcagccttctgctcgatgaatccggctttttcgaatgggcggcgctgcacgtttcacgttggggtaacggtcgggggcgtttgctgtttacctatatcgtcttgctcggcgcagcggtggcggcattgtttgccaacgatggcgcggcattgattctgactccaattgtcatcgccatgctgcttgcattaggtttcagtaaaggaactacgctggcatttgtcatggccgccgggtttattgccgatacggccagtctgccactcatcgtgtcgaacctggttaacatcgtttctgcagacttctttgggctgggtttcactgagtatgcgtcggtaatggtgccggttgatatcgccgccattatcgccacgctggtgatgctgcatctgttcttccgcaaagatattccaccgacttacgacctggctctcctgaaagcaccggtaaaagcgattaaagatctggcaaccttcagaaccggctggatagtgttgatccttcttctggttggctttttcgtccttgagccgttgggtatcccggttagcgcgattgcggctgttggcgctgtgatcctgtttgcggtggcgaaacgaggccatgccattaacactggcaaagtgcttcgtggcgcgccatggcagatcgtcatcttctctctggggatgtatctggtggtctatggtctgcgcaacgccggactaacagaatacctctccggtgtgctcaacgtgctggcagataaaggactttgggccgcgacgtttggtaccggcttcctgacggctttcctgtcttccatcatgaataatatgcctaccgtgctggttggcgctctctctattgatggcagcaccgcaacaggcgttatcaaagaggcgatgatttatgccaacgtgattggctgcgatctgggaccgaaaattactcctattggtagcctggcaacgctgctctggctgcatgtcctttcacagaagaatatgaccatcacctggggatactatttccgtaccgggatcgtcatgactctgcctgtgctgtttgtaacgctggccgcgctggcgctacgtctctctttcactgtgtaa

SEQ ID NO: 77381 - DNA, 426 bp, Citrobacter koseri
atgagcaacatcaccatttatcacaacccttcctgcggcacgtcgcgtaatacgctggagatgatccgcaacagtggtactgaaccgaccgttattctttaccttgagactccaccttcacgcgatgagcttgtcaaacttattgcagatatgggcatttccgtccgggctttgttgcgtaagaacgtcgagccgtatgaggagctgggtcttgcagaagataaatttactgacgaccagctaatcgactttatgctgcaacatcctattctgattaaccgtccgattgtcgtgacgccactcggaactaaactttgccgtccttcggaggtggttctggatatccttccagatgctcagaaagcggctttcaccaaggaagatggtgaaaaagtcgttgataatgcaggtaaaagactgaaataa

SEQ ID NO: 77382 - DNA, 1758 bp, Citrobacter koseri
atgaatatgccatttttaaaagacattcccccgtttatctttttcaccggtaaaggtggagtgggtaaaacatccctagcctgtgcaactgcggtatggctggccgatcagggtaagagaacgcttctggtgagtaccgatccggcttccaatgtcggccaggtatttagccagactatcggccaccgaatcactgatatcaccaccgtagaaaatcttgcggcgatggaagttgatccgatggctgcggcacaggcttatcgcgaccgtgtgctcgaccctgttcgcgagctgatgccagccgatgtggtcagcagcattgaagagcagctttcaggttcatgtaccacagaaatcgctgcatttgatgagtttactggtctgttgaccaatcatgagctgcgggaaaaatatgaccatatcgtatttgataccgcgccaaccggtcacaccatccgcatgcttgagctgccgggagcctggagcggttatctggaagcgaatcctgatgccgccgctaacctcggaccgctggtagggctggagaaacaacagcaccagtactccgatgcggttaaagcgctgtctgatgcagctctcacacgcttagtgctggttgcccgtgcccaggcttcaacgctgaaagaggtttctcatacgcacgatgagctgtctgctatcggtttgcagcatcaacaccttgccattaatggtgtgctgccgccgtttgcgggtgagaatgatccactggcgcagagtattctggctcgggaagaaaaagcattacaggcaatgcctgataatctggctaatcttccccgctcacagctgtatctgaagccatttaatctggtcggtctggaagccctgcgtgagttatttacagagagcaaagcctcactggctctccctgctaccacgctgaatgctctggatttaccgaaacttgcttcactggttgatgaactgagccaaactggcaaagggctggtcatgacgatgggtaaaggcggagtgggcaaaacgaccgttgcggcatcagtcgcggtatcgctggcgaaacgcggccacaaagtccacctgaccacatccgatccggcagcacatctgtcttgcacgctggatggctctctgcccaatcttcaggtcagccgtatcgaccctaaggtagagacagaacgttatcgccgctttgtcctggaaaatcagggcaaaggattagatgcagaagggctggcggtgctggaggaagacctccgctcgccatgcactgaagagattgctgtcttccaggcattctcacggatcatcaaagaggcagacgaccattttgtcattatggacaccgcgccaacgggtcacacacttttgctactggatgcgactggagcctatcaccgggaaatggtgcgccagatggggcaaacacatgaccatgtgatgacgccaatgatgcaattacaggacccggagaagacgaaggtgattatcgtgacgcttgccgaaacgacacctgtactggaagcagcaaacctgcagcaggatttgcgtcgcgctggcatcgagccgtgggcatgggttgttaataacagcctggcggcagctgaaccgtcttcacccctcctgaagaccagggcgaaccgcgagcggcctcttatctctgatgtcaaagagctgtatgcaaagcgtattgcattaacagcgctacagagcgaagagcctgttggtattgacctgctggaagatatgacgacgtag

SEQ ID NO: 77383 - DNA, 456 bp, Citrobacter koseri; identical to SEQ ID NO: 25798

SEQ ID NO: 77384 - DNA, 396 bp, Citrobacter koseri
atgtctgaaccacaaaagtctgaaccacaaaagtctgaaccacaaaagtctgaaccacaaaacgggcgcggcgcgctcttcgccggtgggctggccgccattcttgcgtcggcctgctgcctggggccgctggttttgatcgccttggggttcagcggggcatggatcggcaacctgacggtgctggaaccctatcgcccgatcttcatcggcgcagcgctggtcgcgctgtttttcgcctggcggcgcatctaccgcccggcgcaagcctgcaaaccgggtgaggtctgcgcgattccccaagtgcgagctacttacaagctcattttctggatcgtggccgcgctggtcctggtctcgctcggatttccctacgtcatgccatttttctattaa

SEQ ID NO: 77385 - DNA, 276 bp, Citrobacter koseri; identical to SEQ ID NO: 25796

SEQ ID NO: 77386 - DNA, 426 bp, Citrobacter koseri; identical to SEQ ID NO: 25795

SEQ ID NO: 77387 - DNA, 1686 bp, Citrobacter koseri
atgaccaccctgaaaatcaccgggatgacctgcgactcgtgcgcggctcacgtcaaggaagccttggagaaagtgcccggcgtgcaatcggcgctggtgtcctatccgaagggcacagcgcaactcgccattgaggcgggcacgtcatcggatgcgctgactaccgccgtggccggactgggctacgaggcaacgcttgccgatgcgccaccgacggacaaccgcgccggcctgctcgacaagatgcgcggctggataggggccgctgataagcccagtggcaacgaacgcccgttgcaggtcgtcgtcattggtagcggtggagccgcgatggcggcagcactgaaggccgtcgagcaaggcgcgcaggtcacgctgattgagcgcggcaccatcggcggcacctgcgtcaacgtcggttgtgtgccgtccaagatcatgatccgcgccgcccacatcgcccatctgcgccgggaaagcccattcgacggcggcatgccacccacaccgccgacgatcttgcgcgagcggctgctggcccagcagcaggcccgtgtcgaagaactccgtcatgccaagtacgaaggcatcctggacggcaattcagccatcaccgttctgcacggtgaagcgcgtttcaaggacgaccagagccttatcgttagtttgaacgagggtggcgagcgcgtcgtgatgttcgaccgctgcctggtcgccacgggtgccagcccggcggtcccgccgattccgggcttgaaagagtcaccctactggacttccaccgaggccctggcgagcgacaccattcccgaacgccttgccgtaatcggctcgtcggtggtggcgctggagctggcgcaagcctttgcccggctgggcagcaaggtcacggccctggcgcgcaataccttgttcttccgtgaagacccggccatcggcgaggcggtgacagccgctttccgtgccgagggcatcgaggtgctggagcacacgcaagccagccaggtcgcccatatggacggtgaattcgtgctgaccaccacgcacggtgaattgcgcgccgacaagctgctggtcgccaccggccggacaccgaacacgcgcagcctggcattggaagcggcgggggtagccgtcaatgcgcagggggccatcgtcatcgacaagggcatgcgcaccagtagcccgaacatctacgcggccggcgactgcaccgaccagccgcagttcgtctatgtggcggcagcggccggcactcgtgcggcgatcaacatgactggcggcgatgcggccctggacctgaccgcaatgccggccgtggtgttcaccgacccgcaggtcgccaccgtgggctacagcgaggcggaagcacatcacgacgggatcgagaccgacagtcgcctgctaacactggataacgtgccgcgtgcgcttgccaacttcgacacacgcggcttcatcaagctggtcatcgaggaaggtagcggacggctcatcggcgtgcaagcggtggccccggaagcgggtgaactgatccagacggcggtgctcgccattcgcaaccgtatgaccgtgcaggaactggccgaccaattgttcccctacctgaccatggtcgaagggctgaagctcgcggcgcagaccttcagcaaggacgtgaagcagctttcgtgctgcgccggatga

SEQ ID NO: 77388 - DNA, 366 bp, Citrobacter koseri; identical to SEQ ID NO: 25794

SEQ ID NO: 77389 - DNA, 237 bp, Citrobacter koseri
atgaacagcccagagcacttgccgtctgagacgcacaaaccgatcaccggctacttgtggggcgcgctggccgtgctcacctgtccctgccatttgccgattctcgccattgtgctagccggcacgacggccggcgcgttcatcggggagcactggggtattgcagccctcacgctgaccggcttgtttgtcctgtctgtgacgcggctgctgcgggccttcaagggaagatcatga

SEQ ID NO: 77390 - DNA, 213 bp, Citrobacter koseri; identical to SEQ ID NO: 25793

SEQ ID NO: 77391 - DNA, 621 bp, Citrobacter koseri
atgagcaataaaattcttaaccctgtagtgcttattcataagcgcgaaaacagtgacacctacgccgttgcgatcaccagcggcagccaggactatcatgacgccgttctgatggcgacgatggaaccggacatgaccggcgatgatgtggatacctggagcaaaaccggctactacatggctgctgagatcgagacgctgcggcggatctgctccgaggcttaccagtgcgtgggcgttctcgcagacaggtgcggcgcattagatgactcgggtttcattaagcttctggataatctttcacagatgaagctggttcatgatgatttactgccgttccagctcagtttctgtgaaaagagcgagcttacccacgcagcggacgccgggcaaagcggcgataaacccgtagcggtgccggtcaacgacgtcactgatggtaaaccgttgaccgctggcaccagtatttcgttcaccatcaacgaactctccgcaatgtttggctggatgataccgccgtacgtcgtcgccaatacgcacacagacgagttcaacgaattgcgtaataaagtcttttacgcactgcgtgatacccggcacaggggtaggactgatgaataa

SEQ ID NO: 77392 - DNA, 237 bp, Citrobacter koseri
atgagcaatgttattcagttagctcctaacgagtgggtttgcgaaagcgttcttatcgcggttaccgggctcaaacccggcaccatcctccgggccagaaaagagtgctggatggttggccgggaatatatccacgtctcaccagatggtaacccgaagccatccagtgaatgcatgtacaaccgtaaagcggtcgatgcctgggttgcgtcgatgaaaaataaacagccagggtga

SEQ ID NO: 77393 - DNA, 1314 bp, Citrobacter koseri
atggataaagtcatatatccaacaggcgtcgaaaatcacggtggaactttacgcatctggtttaattttaaaggtaagcgtgtcagggagagtctcggtgtccctgacaccgctaagaacaggaagatcgccggagaactgcgggcatcggtatgttttaccatccgcacaggaacatttgattatgctgcacagtttcctgactcccctaacctcaaggcttttggtgtaagtaaaaaagaaattacggtgaaagaacttgaagaaaaatggcttgatctgaaacggatggaaatttgcgcgaacgcattcaatcgctatgagtctgtcgcaagaaatgtggtgccaaggatcggaggtaatcgactggtgtcagcggtaactaaagaggaattgctgtatctcaggaaagatttgctgaccggttaccagaatccggggaacggcaaaaaaccagcaaaggggcgaagcgttgttactgtgaattattacatgacgacaatagccggaatgtttcagtttgctgcggatcacggttacttagaggtgaacccattcgagggaattaagcctctgaaaaaagccagggcagaaccagatccactgactcgtgacgaatttattcgcctgatagatgcatgccggcatcagcagacgaaaaacctgtggtcattagcagtgtacacaggaatgcgtcacggggaactggtctccctggcctgggaagatatcgatctgaaggcgggaacaattaccgtcaggcgtaattatacgaaacttggtgagttcactctaccgaaaaccgaggcaagcacagatcgggtggtgcatcttatccagccagcaatcagtatcctgaaaaatcaggctgaaatgacaaggctgggcaaacaacatcacatcgaggtgcagttacgtgagtatggccgttcggtgaaccatgagtgtacattcgtctttaacccacatgtggtaagacgaagtaagcaggtcggatttatctaccaggtagattctataggcgactcatgggaagcggcgctaaagcgcgcagggatcagacacagaaaggcgtaccagtcacgacacacttatgcgtgctggtctttatctgctggtgcaaacccgagttttattgccagccagatgggacatgcaagcgctcagatggtgttcaatgtgtacggtgcatggatggctgacagcagcgcagaacagatcgcaatgctgaatcagaagttggcagattttgccccattgatgccccataaccaccagcgcagtacaggagcattattaaaatcagtaagttaa

SEQ ID NO: 77394 - DNA, 855 bp, Citrobacter koseri
atgtctgatatggggttaggcttgccacaattcgaagcctttctggaaggcttgaacgtgcccaatagctgtgtgctcaataaacccctgttcaaaaagatgtttcaggagcacgccgacctggacgctaaagacaaaaaggctctgaaggacgatgttgataaaatccgctggctctacaccctaaagcccagcaccatcaatatcgcgccttttagtgacgacctgcgcgactatggtgagctggtctttctgcacgtggaattaagcaataccaaaagcgcagaacgaattggtcagctgatcaacagggcgataccttacccattagtaattttctttgtgcacgctgaaaacaaaggcagagaggtcactggcgattcggattcaaacgtacgcgaaaaacaacacgacaaagaacaactggctatctgtctggctgacaaacgcataaacaaagccgatcaaacaaagtgggtcattgaagatttccagctatcgccttggttatcattgagcaacgtaacggacatcgccaaagtattttttaacagcctgaactttaccagcttgccgcacagtaatttctggcagttctaccaagcctttatgtgccgtgtacaagcgcttcaatgtgctgaagtcagtgggcgcttttgtttggtggatggtttagtgaatggcgaagctgcagagcagcagcggcaacaattgcaacattaccgtcaaatcgagcaggacattaaaaaactacgcgcccagataaaacaggccaagttcagccagcaggttgtgttgaatacccagattaaacagcaggaacagcggctcaggcagattgctgaaaccctgtaa

SEQ ID NO: 77395 - DNA, 3267 bp, Citrobacter koseri
gtgttactggataacaaaaccagcggctacgttggtatcgaactgaaaaaacataccttttctggttccaggctctctgttctgtccagcctgtttaccttatacggttttgcctcgctgaagcacgagttgaagcagctggagtctgcaaggattattttcagcgaatgggattcgctcaatctgcagaacctggttggttctgattcagacgttcgcctgctgaatcagctgcaacaaaaaagcatcgccagtgagttctcgcaatggctggcaaacaaggctgaagtgaaagccagtgtgcggcctcagccgggtcagaatattattcatcttggggctaccgagcaaagttttgccatcagcggcagtgccacgctcagtccaactgggctcggcgacgtgcgctccgactccctgcacatgaacatgggcttgtctgaccctgagagcacccggcagcttttgacgtggtttgataatgtctgggctgatgaacagaattttcgtgatattaagaatgttctaattgccaaattggatgccattgccgccgatcaaccggccagttttatctatttcctcacgctatttcatttgttcaaagacttcctcgaagacatcgacgaagacaacatcatccgcagtaaaaccggctttaaagataccctggtctggagtaaactctacaaattccagaaagacggagtgctgggtgcaatagacaagctcgaaaagcaccacggctgcatcattgccgacagcgtgggtttgggtaaaacctttgaagccttggctgtgatcaaatactacgaactgcgtaacgatcgggtgcttgttctatgcccgaaaaagcttcgtgacaactggactatgtacacggtcaacgataagcgcaacctgctcgcagctgatcgctttaattacgacgtactgaaccataccgatttgacccgaccgaaaggctactcgggcgaaatcaatctggagacactgaactgggccaattacgacctggtggtcatcgacgaatcccacaacttccgtaacacaccgagcaaggcggaaggtaaaagccgctatgagcgcctgatgaacgacattatccgctcaggcgtaaaaaccaaagtgctgatgttgtcggcaacgccggtcaacaaccgcatgaacgacctgaaaaatcaggtcgccttcattactgaaggtcgggatgatgcctttgccgaacagggtatcaaaaatattgaatccactctgcggcttgcccagaagcaatttaaccaatgggtcagtgagccggtcgaaaaccgtaccaccgcagccttgctcgacattatgagctttgactacttcaaactgctcgatatcgttaccattgcccgttcccgcaaacacatagaaaagtactacggcaccgaagatatcggccgcttcccaactcgcttgccaccgaaaaacatctatgccgacatcgatgcatccggcgagtttccgccgttaaaagaggtcaacaaaaccatccggcggctatccctggcgggttattctccgctgaaattcgtgcgcgaagctaaaaaagccgaatacgcccgtcgttacgataaagccgtaggcgcaggtaaaggggtgttcaaacaggtagaccgtgaagaaagcctgattcacctcatgcgcgtcaacttgctcaagcgaatggaaagctcaattcactcgttcacgctgacggccactaagcttgctcagcaggttgaccgactgctggccaaaattgatgcccacgaatcagaagatctgacggagctgaatatcgaggatatccacgactttgaactggagtccaccgaactggaaagttacatggtgggcaacaagaccaaagtgttgctgcaggatatggatctgattcgcttccggcaggaactggaggccgaccgcgagtttctgacttacattgctgatactgcacaacgtgtgagtgctgctcgtgatgcaaagctggctcagcttaaacagaccattgccagcaaggtggctaacccgctaaatcctggcaataaaaaggtgatcgtgtttaccgcgttcgccgacacggctcaatatctttatgtccatctggcgcaatgggcgcattccgaactgggcattcacagtgcattggtgacgggcggcggtaccaataaaaccaccatgacgggcttaggttccgacctcaacaatattctggccgccttctctccggtatccaaagagcgcggcaaagtagacccaaccgccactaccgaactggatttactgatagccaccgactgcatcagtgagggtcagaacctgcaggattgcgatacgctcatcaactacgacattcactggaatccggtacgtatcattcagcgttttggccgtatcgaccgtcttggtagtaaaaacacgcaaatccagctcatcaacttctggcccaacatggagctggatgaatacatcaatctggaagcgcgtgtctcggggcgtatggtgttgctggatatatctgcaactggcgaagagaacgtcatcgatgaaaacgccaaagacatgaatgaccttgaataccggcgcagacaattacagcaactcaaagacgcagtagtcgatctggaggacatgagcggtggtgtatccattaccgaccttaccctcaatgacttccgcatggatctgtcaggctacatgaacgacaaggcccgtctcgcaacgcttgagcatacaccgctagggctgtatgccgccgtcagcattgacgaagatatggtcgccgatggcatcaaacccggcgtcatcttctgcctgaagaatatccgcagcggtaaagaagcggttcaggtagatgataattacccgctggcaccttacttcctgatctacgtgaccgctgatgccgaaggcagcactgtggttgagctgaacttcacccaaagtaaaaagatactcgatctgctcaagcgtgaagcctttaagcacaaagcgcccgatcaacccgccatcaccgaagttaaccgcatgacacgccacgggcgtgatctgagccactttcagcacctattagctgtcgccgtagatagcattgccgggaagagcgaagaaaaaggcattgaaagcctgtttgccaaaggcggtaccgtacttaccgccacctccagtcagggcattgaagactttatggtggtgtcctacctgatattgacagccgctactcagggaacagaaggtcaaggagagcgtgatgtctga

SEQ ID NO: 77396 - DNA, 180 bp, Citrobacter koseri
atgagtgagcaaataatgaccgtcaaggatgtcgcgtcgtacctaaagctcaacgagcgaactgtttaccgtatggcaacgtcagcgaaaatacctgccttcaaagtgggcacatcctggcgtttcaaacgtgaagacatcgaaaagtggatagaagaacacaagaatgacagacaataa

SEQ ID NO: 77397 - DNA, 162 bp, Citrobacter koseri
atggttgtagacgtacgctacccgttgggtagtaatcatattcatttccccctaacttgggctgcttatatttgcttgacaacaggtaataatgttgcccaacatgtgataaacctgtactatttcgacaataaaacattaccttcaacagagtacggataa

SEQ ID NO: 77398 - DNA, 168 bp, Citrobacter koseri
atgattaattatggctgcactgtgctgcagatagccgttgaactgaaacggcacccggtaagcgtcgttaacacgctggcgaagtacgtggacgatgacagtatcgagaatcgcatttctcaatatttttacgatgtccctgttcgggagttcattcgatggttgtag

SEQ ID NO: 77399 - DNA, 435 bp, Citrobacter koseri
atgtccaggacgcctgattcacggttacgcattgagggctttcgtaaagcagaggcttctctgaaacttgaaggaatggaccccagtggtacgccactttacgagtccattaaggcacgtattatttcaggtaatctgacgtatgagcaggggcgttcagagattcttgcatactacacaaaagcagatgccgccgggcctgccacagtaggagaaattctgacagaggagtttttaaaaccgctgaacatgtctcatgatgaactggcggaagctatgggtatttctcggcaggatgttgaagatatcatttgcggtatgcgtcgtcttagtgatgatgaagcccgcgttcttgctgacatatttgggactgatgaggatttctggcgcaaccttgagacgttgcaagattttcaggaactacgatggaaataa

SEQ ID NO: 77400 - DNA, 174 bp, Citrobacter koseri
atgaaaaataaaattatgatggtttttattctaatcatttcaatgattatatgttcttgcgaaaaaaacgataacgattgctcatcgacggcagacaataaatttgatgcacatagatccgataagtgtgcattgcgtagtaataacaatccaagccctaaacgagaatggtaa

SEQ ID NO: 77401 - DNA, 360 bp, Citrobacter koseri
atgagaatgaccaaccgcaaaaaagagatactcagctactttgaacctgatagcctcgattgggttactggtgagattggtgcgccgccgttcgatgtgtcgggcgtggcctaccttcttcatggcatggcgtcgttcgataagcgccaccagctcgaatcaacccggcgaactcttgaaagtatggttgctggtgggttgcttgagcgtgtgacggtgtatgagtctcgtcaggtacggcgcggcggtgagactaacgcaacggtcgtgcgttacggtttacccggtcattgtgctgttatgcgcgatactggcggcgctgataacgcaatatcaggtgaatacatgcgggtcagttaa

SEQ ID NO: 77402 - DNA, 543 bp, Citrobacter koseri
atgtaccagctaaagataaccatccgagacagcaaaccaccaatatggcggcgtgtgctggttccagagcaaatcccctttagtgaacttcacgcggtgatccagttggcttttggctggaatgacgaacatctgtatatgttcgagaaaggccgtaaaggtgatctaggtagcgagtatcgcgtatggggtgagggtgaaagcatgggtaatgcggcaatcacaccactatgggcagcgctccagaatgatggtgacaagctggtttacacgtatgactttggcgactggtgggattgcgtcattgtgctggagaagcaaacacacgatacgagtaatcagcccattagctgcctgcgtgggaaaggcaccaccccggcggaaaactcaggcggcttgcatggttacaatgaattgctattacaggccagagagtctgataatcctgagcaggccgagatccacaatttcctgatgctggatattgaacgccgggtttacgacctgagccgcatcaacgacagattgcaggctattaactga

SEQ ID NO: 77403 - DNA, 612 bp, Citrobacter koseri
gtgagagacagaacgcgcagctatacgaccgacctgccccgtatagggttgccattccttgcgaacatgcgtagcaggctggcggatgctgaaccgggtacgcagctttatacccagaccgaaagcggaatgttgtataccttccggcaagccgacagctacgccatgacaatcaacggcgtgacgcgggctattcgcaccataaccacgaaggccgggtatggcgtccgggaatggtacgtttgtccccactgtatgaaacgggctgcaaagctgtatatcggcaagaaagatattggttgccgggaatgctggaaactccactacaaatgccagagcgccgacagactggacaggatgcgcatgaagatacgccagcagcgatacacgatttggggcaacaatgaccttaccaataatctgtttaatgacattcgcatgttcccaaaaccaaaggggatgcgctgggctacgtttgacaggaagcgggcagagttatcagttatggagatggcttactggcaggcattcagtccggtagtagatagaatcaggggcgtggttgagcgtaagacggggaaagcagcgcgagctatagggctggagttgtag

SEQ ID NO: 77404 - DNA, 885 bp, Citrobacter koseri
atgcagcagtaccagcagcaggagcaggccgttctaagccagtcgtataaaaacggccaactgacttatgcggaatacatcgctgccaaacagacaacagacgctcagtatctcgcgctcagaaccgcacaggaaacacagtacgaacagcagcgcattgaggcgcagtgggaaattttccgcaatcaaagccaggctaacgagttgctggcatcatctctggatggtctgcaaagtggggccagtagcgccattaccggtcttattaacggcactcaaagcctgcaagaatccttcgctaacatcggcactacaatcctaaacagtgttgttggcagtctggtacagatggggatggagtacgttaaaagcgcggtgatggctcagtctgctaacgctaccgccgcaacaagcgccgcggcaacaggtgcgagtattacggcttctatggctccagcagcggcagctacaaacatcgccacgatggggcaggcgtcaactatcggcatggcggctatgtcggctgctattcctgcaatggttgggctgtttggtggtgctcgttacaacggtgggccagtaaatggcagctcaatgtatcgtgtaggtgagcacggaaagcctgagatattccaggcggccaatggcagccagtacatgataccgggcgacaacgggcgggtgataagtaacaaggatatgcagggaggcggtggcgcagtcattcaccagcagatgaatgtgactattcacacgacaaatggcattacagaggaaaatttacggcagattgaatcccgaatgtataaagttgggagaaaagcggccctggatgagatgtttaaccaacagaggccgaaagggatattgcctccaaggagatag

SEQ ID NO: 77405 - DNA, 447 bp, Citrobacter koseri
gtgtcagcagccaagaaagctgagtctcaggcggagcgtaatgcaagagtcctcaatgaatatcggcagaaagcagatatatcagcagattcaaccagcgatctgtctagggagcaggcgattcttgccgctcgccagaagttagctaaccctactcctcagcaaattgcccaagtagaaaaggatgccgcagctgcatgggataaagccgcagctctcaaagctcaaaatgctgtccctgaacttaaagagaacgccaattacaatgtccagcgcaaagctctggagagtctgaaagaccagagggacgcgaacggtcagctcatcctttcgcagcagcaatattaccaggcgagtgagcagcttgagcagcagcaccaggttaatttagccaaaatcagagcagagcaggcatctgttaaccccattgccgaggctagaggatag

SEQ ID NO: 77406 - DNA, 387 bp, Citrobacter koseri
atggagcagttaaccaggctggcagataccatcgcagaaacctatgttcgtgaactggaacgagtgaccggcggaaatacagttgaatataacggcgcctcagggcgtgtagttccccataaattgtcatctgggctggtggacaatgttatctctgccgttcgtgaagacgctgacaaggaagcttcggcatataaattactggtgcggttaattgatattaacgggcgcgaataccggattacagcgcatggcgcactggtgatagaaagtatgctcaggcatggcgtgacgccgaaacacaggggcttaaggaaggtactcaggcattccgagactattacaatgtcaggctccagacataccagcagcaacaagctaatttaa

SEQ ID NO: 77407 - DNA, 171 bp, Citrobacter koseri
atggctacaccatcagttaaaccagtattgctcagtcgtggccaaattgaacagcttcgagccctgcaggagcaggagcgtaaaaaatccccgctgggtctcgccccaacaattcacgtcatcgcgcgtcagctaatggatcgcgccctgaatatgccgaaggaggcgtaa

SEQ ID NO: 77408 - DNA, 474 bp, Citrobacter koseri
atgaaggttgtctgggctatatgcgccatcgctctgacgcttaccggctgcggtgagaagactgacgaacaattaatagggagtgcgcaagaagctgtaagtaaagagctggcgagtaactataagccaggcgaatgtgataactggaaagttatggcctccggcggagtgacctcgaacagtgcggcggtagctgtctgcgataatgatttcaatgtcagcaagggccttacattttccgaccttaagatttatcgccatgataaacgtgctgccatctgtggcgttgtatctggacatacagacgtaagccgtataggtgcgcgatttatttatactgtcggcgataagaaaattgtcaccataaaacaatcaaaatatccgctgctaagccgatataaagatccggcaaatattgatcttatgaagctacaaagagatcaatatgatttgagggcaaaaaattgccagtaa

SEQ ID NO: 77409 - DNA, 276 bp, Citrobacter koseri
atggtaaacgacagtaaagccgaggctctggaagcaaaggggctgtatcgcagggcagcgacacgctggcaggaagtcatgatgttttgtgctgaggacgatgatcgggaatgggtaaagcagcgccgtgatacgtgtctgacgaatgcgaagcgcccgccagtgaaaaccgatgattatggcgatctgcataaagcagtcactgagacacaacaccgcatgggaattgccagaccgaacggcgaagcattcaggctgaagggcaaggctgtttag

SEQ ID NO: 77410 - DNA, 435 bp, Citrobacter koseri
atgacagcacaaatttcagcatacgggcggctggtggcagatccccagacccgcaccacaacgaatggtaacaacatggctatggcacggctggcggtgtcactcccctgtaatgcggcagaggcgggagagtcaaccttctggctgggcgttattgcttttggaaagcaggccgatgcgctggcaaagcaccggaaaggcgaccttgtgagcgtggcgggcaatatgcaggtgaaccagtggacagggcaggacggtggcacacagaccggatatcaggtgattgccgacagtgtgatcagcgcaagaacggtgcgccccggcgggaaggcaggacagcaggggcaggcaacggacgcactgagacgtgcgcagcagccatcccgtgatgaatacgaccagcgcccaccattcgacgatgaagcaccattctga

SEQ ID NO: 77411 - DNA, 2772 bp, Citrobacter koseri
atgcgtaatatcgaccttatccgcgaagtgaccgccgccgctgctggtaactggccttatgtgctggctggcatgtctatcgacgtgcctgattcatcacgccgtcataccccctgccccgcgtgcggcggtacggatcgcttccggtttgatgataacgggcgcggcagctttatctgcaaccagtgcggcgctggcgacggtttagacctgattaagaaggtgaacaactgcgacaccacagaggcggcacagcttgccgctgatgtgctgggtattgattaccgggcagcgcaaaccgacccggcggcagcgagccagagaagggagcaactggaggctgaccgccagcagcgtgagcaggagcgccagaaacaggcagcagaggacgcagagcagcgaagggctacgtttgcccgtctgtatgccggaatgcgccagagcgtcacacggggcgaatctgagtacctgcaatcaaaagggctgaccgggtttaactatccggttatgccggatggttcgttattgctggagctggtggacgaatccggcgcagtggcagcagcgcagaccattacaccgcagggagagaagcgacttctgacaggttcagcgaagcgcggggcatatcacgccgtaaacgcaccagaacagccgcagagcgtattaattgccgaggggctggctaccgctctgtctgttcacctgatgcgcccggaggcgctcacagtggcggcaattgacgccgggaacctgatccacgttgccggagtaatgcgccggaaacacccgcagtcgcaaattattatcgccgcagataacgaccaccctacagcagcctccgaaaccggagccaccaacatcgggaaggaggccgcagagaaagcggctttatccgtggctggctgggtatcgctgccaccgactgacagcaaagctgactggaacgactaccaccagaaacacgggctggaagtcgctacggctgcgtttaacgattcgatgtaccagccgcagggggaatgcgtgaaaccacaactacaggccattgagggcggtaaaactgaccagccagagaaagaccctctaaaaccgcgcattgagagccgcaaagatggcgtttactggatcacgcctaaagtggacaaggaaagcggcgagattatcaacaatgaaagctggctggcctcaccgatggacgttattggcgccgggcgggacgataaggatcagtatctgatattgcgctggctggcctttggcgcaggcataccgacaacagcggctatccccctggctgatatcggggagcgcgaaggctggcgcaccctgaaagcgggcggggttaatgtcaccacgaaaagcagcttacgggcgattctggccgactggctacagcgtagcggctcccgtgaattgtggcgtgttgctcacgctactggctggcagtgcggggcatacatcatgccggatggggagataatcggcgcacctgcgcaacccgttttattcagtggccgcagttctgccgctgccgggtacaccgtggcgggaacctcagagagctggcgtaacagtgttgcgcggctggcatacggtaactacgcgatgatgacaggcattgccgccgcactggcagccccgttaatcgggctggcgggtgctgatggtttcgggattcacttctatgaacagtcgagcgcgggtaagaccaccacagcgaacgtcgccagcagtctgtacggcaacccggacttattgcgcctgacgtggtacggcacggcgctggggctggcaaacgaagccgcagcacacaatgacgggctgatgccactggatgaagtcggacaaggggcagacccggtaagcgtgtctcagtctgcttacgcgctgtttaacggcgtggggaaattgcagggggcgaaggaaggcggcaaccgggatttaaagcgctggcgcaccgtggcgatcagtaccggggaaatggacttagaaaccttcatagccaccgccggacgcaagaccaaagccgggcaactggtgcgcctgctgaatatcccgctgagtaaggcggtgcgcttccacgaccaccagaacggcaaacagcacgccgacgcgctgaaagacgcttaccagcaccatcacggcgctgccgggcgggagtggatcgggtggctggcagaccaccagcagcaggccattgataccgtgcgtgagtgtgaagcccgctggcgcagtcttattcctgcagactatggcgagcaggttcaccgcgtggccgcacgctttgccattctggaggctgctttgctgctgggcgaggtagtaaccgggtgggatgctcagacgtgccgtgatgcgatacagcacagttacaacgcttggctgcgtgagttcggcacggggaacaaagagcaccagcagattattgagcagacggaggcgtttttgaatgcgcatggcctgagtcgctacgcaccgttgggttatgacccccgtgatttacccatccgtgatttagccggatacaggaagaaggggaaccacgaaagcgacccgataattttctacaccttcccggcgaccttcgagcaggagatagccaggggattcaatgccaaacagtttgctgaggtacttaaacgtgtcgggatgctcaccccgccgaccagcggcagaggttatcaggggcgtgtgcgagaggatggcaggcaaatccgcgtttatgtgctcaactttatggcagaggaaagcggccagccagaggagtaa

SEQ ID NO: 77412 - DNA, 348 bp, Citrobacter koseri
atgattaccaaaaacttccgactgaatgcgctggcaaatcagtacgcagcggcgctgtatagccacgtcaccgccaccagcggcgacgagtatttcgtgattgatgcggccggcgagtccgtccgtgtgaacattctgggcggcacaaagggaatgcgcgaccttgtggacggctacgcgctgaaagcaatcaaagagcattacccggcggctcagtgggaaagtatcgggatagcgtacctgtcacgatgcgttaatgctggcgggctgactgatgcgggattagaggcgtggggcaatatgaccgccgacatgggcgcgaccgtggcaggaggcaaccatgcgtaa

SEQ ID NO: 77413 - DNA, 627 bp, Citrobacter koseri
atgagcaacgtactgaccattaaaccgggaaatcccgacctgttccacgcagaagccacaccgcacggcgtaaacatcatgacccgcaatgatgccgggatgtatgagcatgtttgccttgtcccctattcagacgcggtaactcatctcgatagcggcaggtatgacgacatccctgatgaaggatttaccctgcatctggcagtggctgacggcggggagcgtggctggttcgcctttacagcgcagcacgaagtaacaatgtggcgctggctgattgctgcgacgttcatttctgagatgaagcgtaataacggcacaaccaccgttacagagtctgacggcacatcgtcgcaggtggcgatttactccaatggcacagcgggcattgtgatttacccgtttgctgaacggctggcgatggcgaacaacatcgagggcgcaatgattgagcgctacggcgttgagcagggaacagagaacgccattgtgttctaccgcgccatgctggatgcggaacgcggagagctgaccccattcgggcgtgaaacgctggcagagctacacgatcacttcattgccgatctggatgaaaacggctggcctgaaatgccagcggcgcactga

SEQ ID NO: 77414 - DNA, 222 bp, Citrobacter koseri
atgagccagttacaactgattgatgctgccttccagattgaacaggcacaggctgttttatccatgtggctggagagcacctccaataaaacagatcccgatttaccgcgcctgattggttccattctgacgctgttacacggtgtaccagaagcaatgagcgaggctgaaagcaagctggctgaccatgtaatgcgtgaatatcgggagggcaaagcatga

SEQ ID NO: 77415 - DNA, 264 bp, Citrobacter koseri
atgaacattaacgctttataccgccatccgtccgagcttgaagccgaagcgatgttatcccgcgagcaggcttacccggatgattttacgctggcagaccgtacagcagaacggatgacccgcgcccgcgatgggttggctcacgtaatgaccgaattagccccgcacatggacgcagagcaaacagcagccgtccagtgctggctgatgaaggttttggctattgtcgatgccaccctgattgatgcggaggccagcgcatga

SEQ ID NO: 77416 - DNA, 825 bp, Citrobacter koseri
atgcccaccgtccagaataaagcctttcccttggctggcctgatgtatgcaaatgttaacgtctggagcaaagcagcccgccgccagattgcgacaaatagcgacgtttggaacctgtcaaaacctgacatttgccaccaccagatctttacaaatcttggtgttttcgggacaagtacgcacgcgcatgaatgcgaagctggcataacagtgccagctaatgccagctcctcattttctcgtcgtggtgacgaggagagtttcgagaccagtacgcgcacgcgcgaaggtgagtttctggagtccataaaaaagggcttgccgactatcgccaacccggtttatggttatagcgcaccagcaaaatctggtgccgggattggcgtcctgataatgttacaggcgacacatgacgcgccgagcgtctttttttgtgtcctcgcatctgcacccctctttcccagcgatatggctatagcccatattgctcaaaaagtaatggtgggctggatgggggcggagcgatccgcgccggtttcctgtaacgccggttacgccaaccctgttcagctcaccaccagtgaaattggcgtttccggtggtgggaataaatcccagttacaggaggctgccataatggctactacccctacccaaaatccgcaatttatctggttaatcgctgccgttcgccgcgacatgccgacaattaccgccaaaatccatcacattgctgctgaaactgagcgcgaagctcgccgcacgctggcgcgggatcacgtctgtttctttgcaggccgtatccgtctggaggtggccgcatga

SEQ ID NO: 77417 - DNA, 588 bp, Citrobacter koseri
atgactatcgaaaaaagccgattcaattcggaggccgccccacaatcctgcgttacccagaaaattattcctcaagcggtcgagggcgatatttctgttatccggtttggtggcatcaaagttcgcatcgtcaatatgggcggtgatccgtggtttattgccaaggatgtttgtgcggcactggaaattgtggatcacaaagtgcctatgcgccgactgaacgacaacgaaaaggaggggtattcaatacccacccttggtggcattcagacaatgacaattgtctctgagtctggtttctacaaactgatcgcccgcagccgtaaagcgtcaatccccggaacggctgccaaccgattcagcgagtgggtatttggtgaggttatcccgtctattcgtaaaacaggctcctatggtgtgccgttcgccttcctgaacgaccacagcaaacgcaaagcagcttacgacaagaaggccagcaagcgcggtaaagacctgcaagcctgcaaaggtgagaagtcccgccttatcgccgaagaagttgaattatggcgcaaatatcaacctcaattgccggaggttcactaa

SEQ ID NO: 77418 - DNA, 435 bp, Citrobacter koseri
atggaaaagaaaaaccgcccagtacagcaggcggctaactcagatattcgcacgtctgatattacgccgaccaccagcccggtacaaggacctaagcgtaccccaaagaaacaccgcgcccgcgtctatatgctgcgcactggcgtagagggatggacagaaaatgacatcctgcgctactgccgtctttcatccgggcgcaattatgcgtctgaactggagcgccagcttgatattcagcttgagcgtatcgacgaaaagaatcccgacgggatcgggtcacatttacgctatcgctttaccgggcgcggtgacgttctaaaagttattcggcttgtgaaccataacgccgacgctggcggctatcagggactttctcagcctgaaattgccgacattctcaatctatacccggacaatctcaccgccgcataa

SEQ ID NO: 77419 - DNA, 204 bp, Citrobacter koseri
atgattacagataccattcccaaaaaaggatatatccgtcgctttcgcctggctgaattgctgggcgttagcgtttccactattgaccgcaaggtgcgcaacggctcacttcctcgcccggttaagctgggtgagaaaataaccgcatttgacgcggtagagattaataactggctggcagaacgacgcgggaaggtggcgtaa

SEQ ID NO: 77420 - DNA, 825 bp, Citrobacter koseri
atggcaacagataaaagcaaagccaatggtttaaaggaaagtgtatgggaaaaaaatgatatcccgccgcttgaatactgctccctaaaccgggcgaccagattgttgggctgtgaaatagatgatctgtggcattggcaaaatataggagcgataaggtttgccatagacattggaactgatgtgccaatgaatggagcaatattcccgccagaaagcgatgaaaacacaatcaagctagagagcgtgatcgatatggtaaagctgattagtgatgctgtcgtttatcatggtttatacaagaagggtttcgaatttacacttactggcgatccagcaatttcaaatggtcagattaactttgaaggtctttgtggcggtgtctttaactttgaactcactatagacaggaataatcctgagcgttggggttccaaaaactttgtgaggatagaagaaaatgagtatgccgatctcttcatcagggttggagagttgagtgatttagacggtcaagaagataaattgttcattacccgtgcatacatcgaggagattcataatgccaaagaaaatggattctatttgagttcaaaaggctatgtcggacgtagatcgttgccaacggtacgcattacttcttaccagtcagagatgattgcctctttgttgaggattgtcggattctctgatgatgaaatacataacctgccagcagagcaaatcaacaccaaattggggcaaatggctgccgtgaaaggggttcgtatagcccagccagataaaaatacctgggccaagtggagagaaagatttacccggtga

SEQ ID NO: 77421 - DNA, 1263 bp, Citrobacter koseri
atgccaaaacttacagacatgcagatccgcgcatggattaagagcggggaaagattcgaggggcgagcggatggcgacggcctctatctgaggttccgtaaagaggataaaactcctttttggcgttatcggtataagctggcggggaagtcccgcacgatgatgatcggctcttactccgatttctcacttgccaaagccagagaggtagctaaagaactatccgcacgggtagcccttggatatgacgtagccgcagaaaagcaggaacgtaaagccgaggcaatagcgaagattgaggctgagaagaacgctattcacgtttcagagcttgccgctgagtattattcccgccagatagaaaccacctataaacacccggagcttttccgcagtagtctgcaaaagaatatcgtagcgctcattggacggatgaaagttgaggacgttcgaccacgccatgttgatgccgtcctgcaggatgtcttagagcgtggctcccccacagtggctaatgatgttcttcgaatgctcaaacggctgtttgattatgcagtggtacgcgggatgattgaggttaacccggctatatcctttggttcgaaagatgccggagggaaggagcaggggcgcaaacgagcattgagccgtgatgaactaatcatgttctttaaagcgttgcgccgtggcaggggtataagccgggagaatgaactcacattcaaaatcattctggcgctgggtgttcgaaagatggaactatgcgctgctgaatggtctgaatttgaccttgataatcaggtttggcatctgcctggctctcgggctaagaacggcgatgatatcgatattccgctgccagtgccggtgatcgaatggataaaagagattcgacttttcgccggagatagccgttggttaatcccagccagacgagccagaacaacggcgcacgttagccggtccacgcttaatatggttatgccgtccgtgctgaaagaaatggcagatgttgagccgttcagtattcacgacctacggcgcaccatgcgtacccagatggcggcgattggtattgacccgctaatagccgaacgttgcttgaaccacaaaatacccggcatagagggaatatataaccgtcaccagtattttgatgagcgtaaagcagcgctcgcgcaatgggctgatctgctggtggcgctggaaagtggtgaagattacaacgtgacgccaatcaggaagacgcataagctatcgtaa

SEQ ID NO: 77422 - DNA, 621 bp, Citrobacter koseri; identical to SEQ ID NO: 77391

SEQ ID NO: 77423 - DNA, 147 bp, Citrobacter koseri
atgaataaagcgtttgaaatgtgggtgcgccagcggtacggaagccgctacgacctgtccagggatcaggaggggttttactgccgtgaagtggttaagcgaatgtttgaaacgtggtgccactgccgtggcctgaatgtggcgtga

SEQ ID NO: 77424 - DNA, 186 bp, Citrobacter koseri
atggaaaaacaatataaagtaaaagaggtgtgcagcatgctgggtatgcaccgtgcaactctttatcggaaaattgcaaaaggggaaattgatccaccgataaaggacggatgccggatgacaagattccttgaatccagcatcataaaatatcaggagcgacttaaatccagttctcaggtatga

SEQ ID NO: 77425 - DNA, 1194 bp, Citrobacter koseri
atgcctttaacagacacaaaagtaaaaaacgctaagccgcaggataagccctactcgctacaggatgggcagggtctttatctcgaagtcagaccaacgggagcaaaattctggcgctaccgttactggctgacaccaactaaagatggtcgctatactatcggtgagtatcccgccatttccctcgcagaagccagaaaagaaagagagtgggcgcgagaacaggttaaaaaaggcctcagtccgacagaagcaagacgacaggaaaagcaacaaaaccttgcggaagcgtccaatactttcaggctggtcgcaaaggagtggatcgagaagaaacgccccacatggacggccggaacatgcagccaggttgaaactttccttgctataaactgctatgatgtgtttggtgataagccgatccgtgaagtcactgcacatgaaattcttgccgtgttgaaagagatggagaagcgcggatcggcatcttcagctttaaaggtaaggcaatggtgctcagccattttttgctatgccgtttccaccctccgggctgattcagatccagcggcggcacttaagggggcaattatcccacccaaaacgaataattccaggtgtcttacgcatgatgaactgcgtcggtattttggtgcattgtctgaatatcgcggacatccgcaaacaaaacttgcgcttatgcttctaccatttacattcgtcagacagggagagcttcggcgcggattgtggagcgaggtgaattttgaagaaagtctgtggattattcccggggaaagaatgaagatgaaccgcccgcattctgtgccgttgaccagtacaacaacaaaacttatgcgccagctaaaggctgtgtgtggtgataatccgttgatggtgcctggcataagtaattcacgcgctcctcttggtgacagcaccattaaccgggctattgagtatcttggctttccggcaaaatacataaccagtcacgatttccgggccacagcttcaaccacactgtacgaaatggggtaccggcgcgagattatagaaaagcaactagcccacgctgaaaacaaccgggttgtcgccgcctataatcacgccgagtatttgcaggagcgaagggcgatgatgcaagtatacgataactggcttcgtagcttcatacctgagaactggatttaa

SEQ ID NO: 77426 - DNA, 924 bp, Citrobacter koseri; identical to SEQ ID NO: 75581

SEQ ID NO: 77427 - DNA, 597 bp, Citrobacter koseri
ttgcgctcgctggtcagtgagcgaaatatgcaggtatcgcagaacgggcgcgtttaccccggctatggtggcaatgtcgatggcaccatagccaatgccgccacccggctggcatccagcgccggaaatatcctcggcagcattgcggcgttcccggcgtttgacagcgtacgtcaggcgctaccgatggtacaggcgctactgcaaatggcgctggtgatctgtattccgctggtaacactctgttcggcatgggatgtgaaagtagtgatgacactgacgtttgtgcagtttgcgctgttcttccttaccttctggtgggaactggcgcggtggctcgatagctggctgctggatgtgctctacaacagtgatacccacagtagctggaatctggccgggatccagaatacgcaggatgacgtgatcattaatttggtgatggggtcgatgtttctggttctgccgactttctggatgggggcgatgacgtgggctggggtgagagttggcatagcggtgaatggggcgctggcgggcggggttaaggtggcacaggatagtgggggtaaggctggggggatgcttgggaggtga

SEQ ID NO: 77428 - DNA, 174 bp, Citrobacter koseri
atgagcaacgaaatgacccaggcagaattagcaaaagttaacgcagagattgcaaagctgattgctgagacatcaaaactcaacagggaatcagcctggtatccgattgtagtcgcatcaggactcatcggcgcggtagcaaccattaccaccgtactgctcaaatttttctaa

SEQ ID NO: 77429 - DNA, 261 bp, Citrobacter koseri
atgcgactgattaatgactacgctccccctactccagaagaccttaaccagctcaaagaacagcttggttataccggcacacaaatggccgatctggctggcgtagcaagcaacagtcaatggagaaaatatacagggggcgagtcaccgcgcgcgatgtcaccgcacatacttttttttattgccgctcaattatcactcaataacaatgaattgaataaaatattaggaaaaatgcgtgaaatcggagctaagttataa

SEQ ID NO: 77430 - DNA, 510 bp, Citrobacter koseri
atgtttaattactggattttagtgctaaaaaaacgggtttctcctatagctgcttctatatttttaaattcatcacaatccagcaggaaaaagaaaaacaagatactcgttaaagctggaatagaaacaaatggaagcttcactattagacccccgttcttctttgagaaggggcatattcagataggagacaactcttacataaactcagggtgcgtaattttagatcatgcacaggtgattattggtgagagtaccttcattgggccacatgttactctaacaaccgtcgctcaccctgtttcaccgaaagaaagatgctccgggttattaaaataccccatacacataggtaacaacgtttggatcggtgctggagcggttattttacccggagtgactataggtgacggaagcatagtggcagcgaatagtgttgtgaattgtgatatcccgcctaattcactttacgccggtacgcctgcggtatttaaaaaagtattagaataa

SEQ ID NO: 77431 - DNA, 576 bp, Citrobacter koseri
atggcttttgaaatgactgattcagaccgaatcgttactatctataacctttctgctgacacaaatgaatttattggcaagggggatgggtttattccagcacatactggattacccgcatacagcactgatattacccctccatcagtccctgctggattcgttgccgtattcaattctcaaagccaagaatggtcactcactgaagaccatcgcggaaaaactgtttacgatatccaaacgggacaagctatagaaattaatcagttaggctctcttcctgataatgtagtctctgttgctccagacggtatttatgtaaaatgggatggtaaaacatgggttcatgatgcagaaacagaaaaaatggctctggtgtctcatgctagacagcaaaaagatagcctccttgaattggccgcatccaagatagctccacttcaggatgctgttgatcttgatattgcgacagaagatgaagcaactcttttgctttcatggaaaaagtatcacgtattgattaaccgtatcaacccagatgacgcaccggatattaattggcctgatatggagtaa

SEQ ID NO: 77432 - DNA, 588 bp, Citrobacter koseri
atggcgctgaatgatgaatacacccggcttctttatcacctgctccctcccggccccgcatgggaaggaaagaacccgttgattgaaggtctggccccgtcactgacccgcgtacaccagcgcgcaggcgcactgatgaatgaaattgacccggcaaaggcgactgaactgattgaccgctatgagggtctgtacgggctgccggactcctgcgcccccgatggtgtgcagacgttacgccagcgccagcagcgtctggatgcgaaagcaaacgtcgctggaggcattaacgaacagttttaccgtaaccagcttaatgctctcggttataccacggccaccattgaacagtttcagaacctcgacagcacgcctgatcctgaatggggtgagttctggcgttactactggcgcgtgaatattccggctgacgcgaatgttcactggcagacatgcagcagcacctgcgattcagcgatcaggacatggggcgataccgttgcggaatgtgtgatcgacaaacttgctccgtcgcacaccgttgttgtttttgcctatccggaaggaacagaagatgcatcgaattga

SEQ ID NO: 77433 - DNA, 1080 bp, Citrobacter koseri
atggctgacagtcaatttgcacgtcccgaacttccgcagttgatcgccaccattcgcagcgatttactgacgcgctttcagcaggacgttgttttgcggcgtatggatgctgaggtttacgccagggtacaggcggccgccgttcatacgctttatggctaccttgattatcttgcccggaacatgctgccggatttatgcgatgaggactggctataccggcatgcgaggattaagcgatgcccgagaaaagacgcggtggctgcaagcggttttgttcgctgggatggtattggcggtacaccgacgctgcctgcgggtacacagatccagcgcgatgaccagatgactttcaccaccacgcagaccgtcagggcctccggtgggctgttacgtgtgccggttgttgctgacgttgccggtactgccggtaataccgatgatggcaccgcgttacgcctggggacgccggttagcggtattccatcaaccgggtacgcagatacgctgaacggcggtgatgatgtggaggaactggagacgtggcgggcgcgtgtgatggagcgctactactggataccccaggggggtgcggatcctgattatgttatctgggctaaagagattgcaggtattacccgcgcgtggacgttccgccattaccaggggatcggaactgtcggtgtgatggtggcgaccagtgacccggcaaacccggcacctggtgacgatgttgttcaggccgtgcgtgaacatattctgccacgggcgccggtggcgggcagtggcctgtttgttttcgcagccgcagaaaaagttattccggtgaccatcgcgctggcgaaagacaccccggagattcgtactgccgttaccgcagagcttaattctctgatgctgcgcgacggccagccatccgggaaggtttacgtatcgcgcatcagcgaagccatcagccttgcgactgacgaagtggcccaccagctgcgcgcgccgacggtcgatgttgtgctggggcagactgagctgccggtactcggagatatcacctgggagacctacacggaggcgactgaatag

SEQ ID NO: 77434 - DNA, 414 bp, Citrobacter koseri
atgatcctctatgttaatggaatccgtaaggatgccacggatccgctcgaccttttgacgcgcgccgtggtgatttctctcttctcctggcgccgcgctgagcgggacgataaaaccccgcagccatacggctggtggggagacacctggcccactgtccagaatgaccgtatcggctcccgtctgtatctgctgaagcgacggaaactcaccaacaaaaccccgcaggatgcccgcgaatatatgcagcaggcgctggcgtggatgactgaagacggcgtggcggcgcgcattgatgtgatctctgagcgtacagggacagataccctggccgctggtgtgacggtttatcagcgtgacggggcaattcacaacattacctttgacgatatatggagcgaactgaatggctga

SEQ ID NO: 77435 - DNA, 507 bp, Citrobacter koseri
gtggcgcgcgctgttattaccgcgctcgatacggcgaaaaaatgccaggcggccgggctgaaactcattgcaggagaacccaaggagggcgttgagcatctggagccttacggttttacctctgctgcgcaggacggcgcggaagcggtggtgctgtttcccggcggtgaccgttcccacggtgttgctgttgttgttgccgacagacgctaccggctgaaggggctgaaacgcggagaagtcgctatttatgacgatctgaaccagtcggtcaccctgacccgtaacgggattgttgtggatggtggcggtaagctgattgtgttcacaaacgcccccaaagcccgctttgaaatgccgatcgaatccaccggtgacatcaaagataactgcgacggcagcggtaaaaccatggcgcagatgcgcgcaacgtataacggccacacccataaagaaaatggcgacggtggtggaacgaccgacaagccagaccaacccatgagctga

SEQ ID NO: 77436 - DNA, 1062 bp, Citrobacter koseri
atgaacgataccgtttttttacgcgtcaacgggcgcgagtggggcggatggacgtcagccagaatcggggccggaatcgaccgtattgcccgtgattttaacgtcgccattaccagtcagtggccgggcagccaggacggtatgccgcagatcaaaaatggcgatctggttgaggtttttattggcgatgacaaagtgattacgggctgggttgaagcactgcctttgcgctatgacgccagcagcatcagccgcggtatcgtcgggcgcagcaagacggcggatctcatcgattgcagcgcagcacctgcgcagcaaagcgggaagaacctgtttcgcattgccagcgcgctggctcagccatttggtatcgaggttgttgatgccggagtgccggcggcagctgttatcgatgcccagcctgagcacggcgaaaccgttgtggactgcctcaatcgcctgttagggcaggcgcagacgctggcttatgacgacgaggaagggcgcctggtactggggaaacctggcggcatgaaggctgttaccgcgctggtgctcggagaaaatatcctttcctgcgacacagaacgcagcgtgcgtgaccgtttttcagattaccttgtcacaggccagcgcccgggcaccgatgatgattttggtgaggcgactatcgccgccatccggcaaagcactacggatgctggcgtaacccgctatcgtcctcatacccttcagcaatccggcacggccacaactgacagctgcaagtcgcgctgtgagttcgaagcgcgccagcgggctgccaaaactcaggaaacaacctacaccgtgcagggatggcggcaggggaacggcgaactgtggaagccaaatttatcggtggtggtctacgaccctctgaatggcttcgataatgaaacgctgattatcgccgaggtgatctacagccaggatggcaacggtacgaccgctgaaatcagggtcgggccggaagatgcctatcttcctgagcctacaaaaccaaaggcgaagaaaaagaacagaggggtgatcgatttctga

SEQ ID NO: 77437 - DNA, 1341 bp, Citrobacter koseri
atggcgtttttttcttcgccggactggcgcgaccgcctgcgcgatgcgtcattccgtggggtgccattctccgttgaggatgatgatgcctctttcgggcggcgcgtccagacccatgaatacccgaacagggacaaaccctttacggaagatttgggacgggccgcgcgccggttaactgtcaacgcttacgttatcggggatgactacgccgataaacgggatcgtctcattgccgctgttgaaacggcagggccgggaacgctggttcatccgcaatacggtgagatgcagggcagtattaacggaaccgtaaaggtatcgcacagcagccaggaagggcgcatgtcgcgaataatcttcgaatttgtggagagtggtgaacttacctttcctgtcgcaggtatggcgacggcgcagcgtctgaatgagtcctgcgggctgtttgatgatgccattgacagtatgttttctgcgtttggcctctcaggcattgcggatttcattcagaatgacgttattgccgatgcaacggcgatggtcaataccgttgctgatgcattcaacatggtggattccggcgtctctgcggccatgcgtctgttgcagggggatttatccgtcatactgatgccgcccggcgctgcaaatgattttgttcgtgcgttacagaaagcctggcgcgccggtgatcgtctgagtggtgatacctctgatctggtcacgatgataaaaaccctgtccggcattacgctggatcctggtctttctcccaggggaacctggaccactgattctggttcagttatcacccaaaagacacagagcaatttgatcgcctcggctatccggacaacggccatcagtacggctgccagtacggtgactgcgctggcacagccgcgtgatgtgtctggtctgtggggaacaaatcaaccagcagggatcggtagtgactctgacattatcaatatcacacacccggcgctggatggcgctcagaccgtcagcaacgacagtcctccaccgaactatgaggatctgagagatatccggacagcgcttaataccgcgattgatcaggagcagttgcgcatcattgatgatgtgcttttccagcaaatttccgtgatgcggactgacctgaaccgcgatatttctgcacggctggcgcaggttgagcgcaccgcgcagcgaacgcctgatgatgttctgcctgcgctggtgctggctgctgcgtggtatgacgacgccgggcgggagtccgatattctgacacgcaatcctgtccgccatcctggctttgtgccggttgaaccgctgagggtgcccgtgcgatga

SEQ ID NO: 77438 - DNA, 1929 bp, Citrobacter koseri
atggctgacagtttccagttaaaagccatcatcaccgccgttgaccagttatccggcccgctgaaagggatgcagcgggaactgaaggggtttcagaaggaaatggcagggctggcgctgggggctgctgctgccggaacggcaattcttgcttcgctggcaatgccggtgaattctgccattggcttcgaatcgaaaatggccgacatccgtaaggtggttgacgggctggacgataaaaaagcctttgcgcagatgagcgacgatattctgaccctgtcaacccggttgccgatggcggcggaaggtatcgccgaaatcgttgctgccggggggcagtccggtattgcccgcagtgatctgatgcagtttgcaaacgatgcggtgaagatgggcgtggcgtttgacaccactgctgaagagtcaggccagatgatggcgcagtggcggacggcgttcaaactgacgcaggatgatgtggttgtcctcgctgataaaattaactatctggggaataccggtccggcgaatgcgaagaagatttctgatatcgtgacgcggatcgggccattaggcagtgttgccggggtggcctccggtgaaattgcggcgatgggagccaccattgccgggatgggcgtagagtctgagattgcgtcaaccggcatcaaaaactttatgctgtcgcttaccgccggaaactccgcgacgaagtcgcggaagcgggcgatggcttttctgaagctgaatccggcgcaactggctgccgatatgcagaaagattcgcgcgcggcgatgctgaaagtgctggactcgttggcgaaggtgccgaaagcaaaacaggcatccgttatgaatgccctgttcggcaaggaatcgctgggggcgattgcgccattgctgacaaaccttgacctgctgcgcaccaattttaatcgtgttgcggatgcgcaggagtacggtggttcgatgcagaaggaatacgcatcgcgcgcggccacgacggaaaaccagctgatcctgctgaaaaacagtatcaatgcgatttctgtcacgcttggcgacacgtttttacctgcgattaatgaggctgcggaagaggtcaagccttatctggaacaggtcagaacgtttgtccgggcaaaccctgaactggtgcagtctgccgcgaaattcggcgccgcactgctggctgtcggtgtgtcgattggtacgctgtcccgcgccattaaaatcctgaacagtgtcattaatctctctccggcaaaaatagcgattgctgcacttgtcgttggcgccatgctgatcattgagaactgggatgaagttggccctgtaattaaagccgtatggaaagaagtggataacgttgcacaggcgatgggaggctgggaaaacgtgataaagggtgttggtctggttatggccggatcctttacggttaaaacaattggtgctttgcagcagtcagtgttgctggcaggccagttatccggactgctgggtaaaataggcagaatgggagccatgacgctgacaatcggcgttgcggtatcactctttaaagaacttcaggatatgggaaaagcagccggtgatgcagggatggacgctggctcttttgttgtccagaagatgcagacgaaagaacgggagcggggatacaacggttttattcccagacttaaagaaatcctgggtatggacgctccgatcccggaagggcgttatcaaccttctgttccactaaacaggacgccgggcgttctggatcgtgctgtttcatcaacaacgcagcgcagtgaactcaaagtgacctttgaaaatgcccctcaggggatgcgcgtgactgatattccggcctccggtaatccgctgatgggtatttcccacgatgtgggctattcgccctttaaaacccctcgttaa

SEQ ID NO: 77439 - DNA, 327 bp, Citrobacter koseri
atgacaaaagaactggtgcttaaaaagccgattatggcgcacaacgaaaaacttcatgtgctggagctgcgtgagccgtcctacgatgaaattgaggcgacggggtttccgtttactgtttccgctgaaggggcggtaaaactggacagttccgttgcgctgaaatatctcccgctacttgccgggatcccccgatcttcggcggcgcaactgacaaaactggatattttcaaaggctgcatgctgatcctcaatttttttacccaatcggagacggaggaaacctcagaagccggctctacaacaccgcacactactggcgaataa

SEQ ID NO: 77440 - DNA, 357 bp, Citrobacter koseri
atggcaaagattgctggaacgacgtatttcaaaattgacggccagcagctgtcgatcaccgggggcattgaagtccccatgaacacaaaagtccgtgatgacgtgatcggcttggacggttctgttgactacaaggagacgagccgggctgcgtatacgaaggtcacggccaaagtgccgaagaacttccctgtcagcaaaatcacatcgtctgatgccatgaccatcacatcagagctggcaaatggtcaggtgtacgttctctcaaacgcctggctgcacggcgaggccaaccataaccccgaagagggcacggtggatctggaattccacggtgaggaaggattttaccaatga

SEQ ID NO: 77441 - DNA, 1515 bp, Citrobacter koseri
atgaccgtaagctttaacactataccggcggataaccgggtaccgctgttttatgccgaaatggataacagcgcggcgaataccgccctgggtggtgctccctccctccttgtcgggatggcattaccggaatcagatatgccgctgaatcaactggtgatcatgccatcgaaggatctggcaaaaaaaatggcaggtcgtggcagccagctggcgcgtatggttgaagcatatcgccaggttgatccgttcggagaactctgggtgattgccgtacctgataatggcgaggtggcgaccggtacagtgacgatcaccggcactgtgacagatgctggttccgtgaatctttatgtcggtacccgtaaggtgcaggtgacggtggcgacgggggacaccggcgatcaggtggcacaggcgctggtaagcgttattaataattatcctgatttatctgtcagcgctgaataccagggcacatccggcggagacgctcagggaaccgttaatctttctgcggtgaacagcggaacggtgggcaacagcatcccgttaaccctgaactactacggtaccgccagcggtgaagaaactcccgccgggctgagtatccagatcggcaaaatgagcggtggtgcaggcgatcctgacctgtctgaggcgattgccgcgatgggggacgagccttttgactatatcggcctgccgttcagtgatgctaactcccttcaggcgatgtctgttgaaatgaacgacagctccggacgctggagctacattcgccagctttatggtcatgtctacacggccaggaccggaacgctgtctgagctggtggcctatggtgatacgttcaactatcagcacatcaccattgccggttatgagaaagaggtacagacgtgtgttgatgagctggtgggctatcgtctggcgcgggcagctgttttcctgcgtatcgatccggcacgtcctacgcagaccggagaactcaccggtgcgctacctgcaccaaccggcaagcgctttaccatcaccgagcagcagtccctgctgatgcatgggattgcgaccgcgtacacggaagccggcgtgctgcgcatccagcgtgacatcaccacttacaaaaccaatgcctacggtgtggcggataacagctatctcgacagcgagacgctgcataccagcgcttatgtgctgcgccgcctgaaatcggtgatcaccagcaaatatggccgccataagctggcgaacgacggtacccgcttcggtcccggccaggcgattgtcacgcccgccgttatccgtggtgagctgggttcaacgtaccgacaactggaacgtgagggcattgtggaaaactttgacctgttccagcaatacctgattgttgagcgtaacgcgaacgatccgaaccgtctggatgtgctgttcccgccggattatgtcaaccagctgcgcgtgtttgctgtgcttaaccagttccgcctgcaatacaacgaggaggccgcataa

SEQ ID NO: 77442 - DNA, 159 bp, Citrobacter koseri
atgtttgtgaaacccaaagaggggcggtccgttccggatcccgcccgaggcgaccttttgcctgctgccgggcgaaatgttgaggaaagcgcctggtggtaccgccgggaagccgccggtgacatcgagaaaatctcacgtaaaggggataaaaaatga

SEQ ID NO: 77443 - DNA, 558 bp, Citrobacter koseri
atgaaactgacacccattgtggccgcgctgcgtggccgctgcccgcgttttgaaaatcgtgtgggtggtgccgctcagtttaaagcgatcccggagtccggaaagctgaaactgcccgccgcctatgtcgttccgtcagaggatgtaacaggggaacaacgttcccagacagactactggcaggatttgacggagggcttttctgtcattgtcgtcctcagtaatgagcgcgacgaaaaaggccagtgggcatcttatgatgcggtgcatgatgttcgtcatgaactctggaaagccctgctgggctggtgtccggatccgaacgcccatgaaattcagtacgctggcggcatgctgctggagctgaaccgctatgaactttattaccagttcgacttcacggtgaagtatgagatcgacgaggcagacacccgccagcaggacgatctcgacgcgctggatgatctgaagctgattagcatcgatgtggattacatcgaccccggcgacgggccggacggtaatattgaacaccgcactgaaatctcattcccgtaa

SEQ ID NO: 77444 - DNA, 513 bp, Citrobacter koseri
atgcagaacaaagcatttttacacgttgatttcgagcagccgaaagaactggcgtttaaccgcgcgcgactccggcgggcgtttgttcgtatcggacaggtgcatatgcgtgatgcccgtcgtctggtcatgcgccgggggcgttctgcacccggagataacccggcataccgaaccggcaaacttgcccgttcaatcggctattacgtacctcgcgcatcaaaacggcgcccgggattgatggtgaagattgctccgaaccagaagaacggagaggggaatcgccatatttccggtgccttttatcctgcttttctgttttacggtgtgcgccgtggcgctaaacgtaaaaaaggccatcatcgcggtgcatccggtggtagcggctggaaaattgctccacgtaataactatatggccgaggtgctggagcggcggcgcagctggacccgatatgtgctgtcgcgtgagttgcgcaagtccctgcgtcctcagagaaggaaaaagaaatga

SEQ ID NO: 77445 - DNA, 438 bp, Citrobacter koseri
atggctggtcgggccttacaggtatatcccgctatgaaactcagacaggcgcagaccagcgcgacctacattttgccggacccgggcgaactggataaacgcgttaccattcgcctgcgggtggatgagccggatgatgattttggcgtgtcccccacgtatccggatgaaatccgtacctgggcaaagatggcgcaacccggtgctgctgcttaccagggctccgtgcagacagagaacaccgtaacgcactatttcacgatccgctggcgccggaatattaccgccgatcatgaggtggtctgcgacggtcagagttaccgcatccgccgtgtgcgtgacctgaacagtaagcgccgctttttgctgcttgaatgcgaggaacttggcaccgatcggggatctggctatgcagaacaaagcatttttacacgttga

SEQ ID NO: 77446 - DNA, 315 bp, Citrobacter koseri
atgctgctgaagatggaagaaatcaaactccagctccggctggacgaggattttaccgacgaggacagcctgctggagttgctgggaaacgcggtacagagccggactgagaattttctcaaccgtaagctgtatgcaacagagccaactgacgatcccgacgggctggtgatgtcggatgacgtgaagctggctttactgatgcttgtcacccacttctacgagaaccgctcggcggtcactgaggttgaaaaacttgagttaccgatgagcttcaaatggctggtcgggccttacaggtatatcccgctatga

SEQ ID NO: 77447 - DNA, 1230 bp, Citrobacter koseri
atgaaacttcatgaactgaaacagaaacgtaataccattgcgaccgatatgcgcgcgctgaatgaaaaaatcggcgataacgcgtggactgaagagcagcgcaccgaatggaacaaggcaaaggcagagctggaagcgctcgatgagcgaattgcccgtgaagaagagttgcgtcgtcaggatcaaaactatgttgacgaaaacgagcaggagcagcgcaacagcctggatactgataaaaatccgcagcatgatgaaaagcgcgggcagatttttgacaagtggatgcgtcacggcgccagcgaactgacttccgaagagcgaaaagcgctgcgtgaattgcgtgcgcagggcgtagctccggatgaaaagggcggctataccgtgccggacactttccttgcgaaagtcgtcgagcagatgaaggcttacggtggtatcgccagcgtggcgcagatcctgacaacctccgacggacgcactatggaatgggcaacggctgacggtacagctgaggtcggtgtcctgctgggcgagaatgaagaagccggtgaagaagataccgaatttggcatggacagcctgggcgcgctgaaaatgacctccaaaatcatccgcgtgtctaacgaactgttgcaggacagcgcaatcgacatggaagcttatcttgcccgccgcattgcagagcgtatcggccgtggtgaagcgcgttatctgattcagggtaccggtgctggcacaccgaaacagccgaaaggtctggccgcttccgtgagtggcaccacgcagactgcggccgccgctgcggtgaagtggcaggaaattcttgcgctgaagcacagcattgatccggcgtaccgtcgcggtccgaagttccgcctggcatttaacgacaatacgctgaaactcatcagcgagatggaagatggtcaggggcgtccgctgtggctgccggatattgttggcgtggcgccagcctctgtgttgaatgtgccgtatgttatcgatcaggagattgatgatatcggggcgggtaaaaaattcatgttctgcggtgattttgaccgctttattatccgccgcgtgcgctacatgatcctgaaacggctggtggaacgttacgctgagtttgatcagaccggcttcctggcgttccatcgcttcgactgcatcctggaagacacctccgccattaaagcgctggtgggcaaaggcagcgccagcagctga

SEQ ID NO: 77448 - DNA, 606 bp, Citrobacter koseri
atgagtaacgaccgtgaaatccgctgttacagcggtgaggttcgtgctgaaacgcatgacaacgacccggcacgcatcatcggttacggctcggtgttcgacagtcgttcagagttgatattcggatcattccgcgaaattatcaggcccggcgcgttttccgatgtgcttgatgacgacgtgcgcgcactgtttaaccacgatcctaattttattctcgggcgcagcgccgccggaaccctgtcgctgtctgtcgatgagcgtgggctgcgttacgacattctggcgccggacacgcagacgattcgtgatctggtgctggcgccgatgcagcgtggcgatatcaaccagtcctctttcgctttccgggtcgcccgtgatggcgaagagtggtaccaggatgaagatggcgtggtgatccgtgagataacccgtttttctcgtctgctggacgtcagccccgtgacgtatccggcctatcaggaagccgattcggcagtccgttctatgaaagcctggcaggaggcgcgcgacagtggcgcgctacagaaagccattaaccaacgaatggcgcgtgagcgcgtcctgacccttcttaatgcataa

SEQ ID NO: 77449 - DNA, 1221 bp, Citrobacter koseri
atgctatttgatgctatttaccggagcagctcgctggaaaatcccgccgttccgattactgccgaggctgccgagaacgacggaatttttaacggtgacgtgattgttaatccccgctcagcgatgaaactggcggcggtgtatgcgtgtatttacgttatttcttctaacgttgcgcagatgccgctgcatgtgatgaggcgcactggaaaaaaggtggaaaccgcccgcgatcaccctgtgttttatctggtacatgacgagccgaacgcctggcagaccagctataagtggcgcgaactgaaacagcgacacattctgggctgggggaatggttacactcgggttatccgccatcgtcgttccggtgaggtgacgggacttgatgcctgtatgccatgggaaacggcgctactgaataccggcgggcgttatacctacggcgtttataacgatgaaggggctttcgccatcagcccggaagacatgatccacgtcagggcgctgggcaacgatcaaaaaatggggctcagtccgatacttcagcacgctgaaaccattggcatggggatgagcgggcagaagtacactgaaagtttcttcagcggcaacgcccggcccgcaggcattgtctcagtaaaaggggatttgaatgataactcctggaaaagactgaaagagatgtggcaaaaagccacagcgatgctgcgcagccaggaaaacagaacaatgctgcttccggcggagctggactataaagcgctgactgtctccccggttgacgcccagcttatcgacatgatgaagctcaaccgttcaatgatcgccgggatattcaacgtaccggcacacatgattaacgacctcgaaaaagccaccttttccaatatatctgagcaggcgatccagttcgtccgctacaccatgatgccgtgggtagcaaactgggagcaggaacttaaccgcaggctgttcacacgggcagagcgtcaggccggttattacgcccggtttaatctggcggggcttttgcgcggtacgtcaaaagagcgcgcggagttctatcactatgccatcacggatggctggatgagccgcaatgaggcgcgcgcattcgaggacatgaaccctgttgacgggctggatcagatgctggtcagtgtgaacgcatcacagccggtcgaaaaccagaaaaaacaggagcagaaagaaaatgagtaa

SEQ ID NO: 77450 - DNA, 162 bp, Citrobacter koseri
gtgaaatcactaattattgatgtggccgggctggcaggcttcggcgcgctggtgggcggtatatacctgaaatttggcgcggcggttgctcttatggcaggcggttctggcctgcttttgtgggcgctgctggcagccaggagtaagaaaaatgctatttga

SEQ ID NO: 77451 - DNA, 1731 bp, Citrobacter koseri
atggctacatatccgaacgtcaatgcggcgaaccagtatgcgcgggacgtcgtgaacgggaagattctggcctgtcggttaaccattcttgcctgtcagcgacatctggacgatctggagcgcgctaaagatccaaaatggccttaccgcttcgataaaaataaggcagagcgatttctgcgatttgcccaaaaaatgccgcacacctccggcgaatgggcgcgcagaaagctgcgtattgagtttgagccctggcaaaagttttctctgggcgtgccgttcggctgggtacgtagggataacgggtttcgccggttcacggaaatatacattgaggtgccccgtaaaaacggtaaatcggcgattgctgccgctgtcgggaattacatgttctgcgctgatggcgagtatgcggcggaagtttactgtggcgccacgaccgaaaaacaggcgtggaaagtgtttgcacccgcgctggcgatggtgaaaaaactcccgtcactgcgtcagaaattcagcatcaagccctgggcgaagaaaatgacccgccctgatggttcgttgtttgcgccagttatcggtgaccccggcgacggcgattcaccgtcctgcgccatcatcgatgagtatcacgagcatgataccgatgcgctctataccacgatgaccaccgggatgggggcgcgtgaacagcccatcacgctgatcatcacgacagcgggctttgatattgcttccccctgctatgagaaacgcacgcaggttgtcgagatactggaacgcatcagggaagggggcgaaaacgaggctatttttgggattatttatacccttgatgacgaagacgactggactcagccggaagcactcattaaggcgaatccaaactatggcgtgtcgataaaagacagttttctcagggcgaagcagttgctggcgatgtccacgccgagccagaccaacaagatcctgacgaaacacttcaataaatgggtaagttctaaagcggcttactacaacttacagaagtggatggccgcagcggataagacgctgaagttgtcagactttgccggggaagagtgttatctgggcatcgacctggcatcaaaactggatctgaacgccgtcgtgccgatttttcggcgagaaatagacggcctgagccatttttattgtgtcggcccgatgttctgggtgccggaggatacggtgtattcgaccgatccggcactgaaaacaaccgctgaacgttatcagtctttcgttaaccagggggttctggttcctactgacggagcagaagtcgattatcgaatcatttttgaatccattcttgctttacgggacaccataaagattgcgtcgtgtcctatcgatccttatggggcgacgggcatttctcatatgttgctggatgaggggctggagccgataacaatcacccagaattacaccaatatgagcgatcccatgcgtgagattgaagcggcgattgccgccggacgttttcatcatgacggcaacccgctgatgaactggtgtgtgtcaaacgttgtcgggaagtatctgcctggcagtgatgatgttgtccgcccggtcaaagagggcggtggtaacaaaatcgatggtgccgtcggcatgatgatgggtgtgggccgcgccatgctgaatgaaccgaaagacttcctttctaacctcgatccggatgaggacctgttattcctgtga

SEQ ID NO: 77452 - DNA, 438 bp, Citrobacter koseri
atggggggtgttgttagatcttcaggcggaggtcgaaaacggattttacccgtcggacaaaaaagcaaactgaccaggatcgcgccgcccgacgaactgatgggggatgtcgcgatccgtctctggaaaacacagagcaaaattttaattgagcgaggcgtgtttgaactggaggacgccccgattttgctggcgtactgcaatgcgtttcatctgatgcttgaagccgaaaatattattgcgaaagacggcctgacggtatccagcgaaatgggcggtgaaaaaaaacacccggccattaatgtcagaaatgactctgtatcgcaactcgcccgtctgggttcacttcttgggttagacccgctcagccgcattcgtatgaccagcggcaaaaatgatccggacgatgaagggaatgaatttgatgagtttgactga

SEQ ID NO: 77453 - DNA, 363 bp, Citrobacter koseri
atgccaccgagaacgccgaaagcctgtagaaaacgaggctgccggaacaccacgaccgatcgcagcggctactgtgatgagcataaaggtgatggctggcagcagtacaagcccggtcagacacgccaccagcgaggctacggaactgcatgggatcgacggcgcatccggatactgaagcgtgatggcgggctctgttgtgagcaccgcaggcagggggtggctgtcgaggctcgccacgttgaccacatcattcctaaatctcagggcggcacggatgatgatgcgaacctgcaaagtctctgcaccgcctgccaccgggcgaagacagcccgcgaaggacgcaacaggggggcggggtaa

SEQ ID NO: 77454 - DNA, 615 bp, Citrobacter koseri
atgacactgttctcaaatgaactgcaaaacggcctggtgtggttgcccgagctgggaatgggacgttatcccgttccttctgaccggccctataacgcggattacttcgcgcgctatcaggcgatggccgatacatcgatggggcagcaactgacggcggcacgtattcagcttgtgatgcgccactatcaggggcctgtgctggatgtggggatcggctcaggtcagtttgtcagcagttaccccggcgcgctgggcttcgatgttaatcctgcgggcgtggcctggctgcatgaacgtaatgcttacgccgatctgtatgccagccgctggcgggcgcttacgatgtgggatgtgctggagcatatcgatgatccggaacgcgcggtacgacaggcgaaagagttcgtttttgtttcgctcccgatatttgacaacgctgaacatattctgatttcccgccattaccgtaaggatgagcacatctggtactggacgcatgaagggctgctgatgtggttcgaagcgcagggattcacctgtgttgagcacaacacgattgaaagcaggctgggccgcgacgggataagcagctacgcattccggaggaaatag

SEQ ID NO: 77455 - DNA, 870 bp, Citrobacter koseri
atggcattaagacgaaaggtctgcatccgagggatgtacgggcttggtgattctatttatcagcgtgcgtttgtgcgtcagttctccggagcgttcctgcgtactccatggccggagctttactctgatctggatgtgcgatttgtccgctccggtaccagcctgcgaacgcagcgtaaaaatgaagagaaaacgggcgtggtgtatgtgagggaagcggcgcgcccgtcagaagtcctgactatcttctatggtccggaagagctgaagaaaggttccattgttgacgccatgacatggcagttcggcaaggcggccagcgtgttcgatctgccgtcgtatggtgggtcaccagtgacggcggataagccgatcgcagttattcgtcctgcaaccgtccgtaaagagtgggcgaacccggcacgcaatcctgatccgaaatatctggccgctgctgccagggaactgcgcaagcatttctacgtagtaagcctggctgatctggaagatggggaagagtggctggtgggtgagccacctgaagccgatttgcaactgcacagcggcgagctgtctctaaccgaaatgctggcgttggtggaacattccgccgttgtcgtttctggtgtgggctgggcgctgcctgcggcagtctgctacaaaacgcctgttttcatcattcagggcggctgcggcgcccacaatgccccgcatatcgttacagatcctgaaatggacctgtcctgtgtcggctgggcgcagcccgatgattactgcatgtgcgccagcatggaacacgactgcaacaagcacatcacaggttttctggacaaattcaaaggctggttacatgacactgttctcaaatga

SEQ ID NO: 77456 - DNA, 540 bp, Citrobacter koseri
atgaggacttttgcgtgtgtcgccagcggcccatcactgacatacgatgattgtcagacacttaatcaagccgatattccgataatcgcggtgaacacttcgtggcaagcgactcctttttgcgccgctatctatgcggctgactgctgctggtgggaagaaaaccacagcataatcgcttcatctgctgaaagatggtgcggcgatgagtttaccgcccgccgctttggtattaactgctttccctctgcgttgcccggttccttcaactccgggcaacgtgccattgaactggcgctccatctgggggctcgccgtgttctgcttctgggttacgactgctcaatacggcacggcacccactggcacggcaaccaccagttgctggctaatccggataaattcagcgtggcgcgctggcatggtgagttcagccgcctgctggctatcgctggtggtgccgaaatcattaactgttcccgctatacgcggcttacctgctttccccgccagccgttagaggctgcgctttctctgtag

SEQ ID NO: 77457 - DNA, 246 bp, Citrobacter koseri
atgaagattaaattaattggtggcccatatgatggcaggatcattgacgtggaggaaagccacgggctccctaagcagagttcactttattttccacctccattatctgcaccaagaaaattaacggcagatgatttttctccgggatcgtcagacattccagttcaagaatttttgtatgcgctgaatagagcctacataacagataaggctcacaacttcgaataccactatcaaggtcgctaa

SEQ ID NO: 77458 - DNA, 231 bp, Citrobacter koseri
gtgaacgcagagaacctaagtgaagcgtattacatcaataacgagataaaagaactacagcgacagaaaagcattctggagagtggtgcagggcttggggtaacaatccaatctacctatcaggataatgcctttttggatgctatacgcccacatgctgtggctgagcttgaccgtcgtattgaggaaaaaagagccgtactggttaatttaggcgtctccttctcttaa

SEQ ID NO: 77459 - DNA, 1593 bp, Citrobacter koseri
atgagtcaggactatctcgcccgtatcgccgcgctggaagacgcgcttcgccagaaagacagtcagcttagtctcgttgctgagactgagtcgttcctgcgttcagcgctggcgcgcgctgaagagaaaatagagaacgaagagcgcgaaatagagcatctgcgggcgcagatagaaaaactacggcggatgctgttcggtacccgttctgaaaagctgcgccggcaggttgaagaagccgaagccctgctgaaacagcaggagcagcaaagcgatcgttacaacggccgggataacgatcagcaggttccgcgtcagcttcgccagtcgcgccatcgtcgtcctctgcctgaccatcttccacgcgaaataaacaggctggagcccgccgaaacctgttgtccggactgcggcagcgatatggcatacctcagcgaagtcagcgcagagcagctggagctggtctccagcgccctgaaagtgctccgcacggtcagggtgaaaaaggcctgcacccgatgcgactgcatcgttgaagcgtcggcaccatcacgccccatcgatcggggtatcgccgggccgggtctgctggcccgcgtgttaacggccaaatactgcgagcacctgccgctctatcgccagtgcgaaatctttgcccgccagggcgtggatctgagccgggctctgctctccaactgggtggatgcgtgttgccggttgatggcaccgttggatgaagccctttatcgttacgtgatggactgccgcaaactgcatacggacgataccccggtgccggtactggcaccggggaggaagaagacgaaaaccgggcgcatctggacgtatgtgcgtgatgaccgaagcgctggatcgtcagacccgccagcggcgtggttcgccttctcccctgaccgacaggggaaacatcctcagcagcatcttcgccattatcatggcgtactgcaggccgatgccttcgcagggtacgacaggttgttcagcgcagagcgtaacggtggcccgctaacagaagctgcatgctgggcccacgcgcgtcgaaaaatccacgacgtctatataagtactcagacggccaccgccggggaagccctgaaacgtatcggtgagctgtacgcggtagaagaggaaatacgcggcctccctgcaactgagcggctggcaaccaggcaatcccggagtaagccgctgctgatatccctgcatgactggttggtggagaaaagcgccacgctgtcgaaaaaatcccggctgggcgaggcgttcgcttatgccctgaaccagtgggatgcgctgtgctactactgtgatgatggtctggcagagcctgataacaacgctgccgaacgagcccttcgtgctgtctgccttgggaaaaagaattttatcttcttcggcagcgaccacagcggtgagcgaggagccctgctgtatggtctgatcgggacgtgcaggctcaatggcatcgatccggaaacctacctccgccatatcctgagcgtactgccggaatggcccagcaataaagtggctgaactactgccatggaacgtagagctcaccaataaataa

SEQ ID NO: 77460 - DNA, 351 bp, Citrobacter koseri
atgatatccctcccgtcaggtacccgtatctggctggttgctggcgtcacggatatgcgtaaatcgttcaatggtctgggcgagctggtacagcatgcccttgatgaaaacccgttctccggccacctgtttatcttccgtggccgcagaggtgacaccgtaaagatactctgggccgatgctgacggcctgtgcctgttgaccaaacggctggaagaaggacagttcatctggcctgctgtacgcgatggtaaaatcgccattacccgctcacaactcgccatgctcctcgataagctggactggcgtcagccaaaaacagctcgtcttaactcactgacaatgttgtaa

SEQ ID NO: 77461 - DNA, 405 bp, Citrobacter koseri
atggaaaatactgccaactggcgaactgaatcccgcacagtctattctaatgactttaaacttcgcatcgttgagctggcgtctcaaccggatgccaatgttgctaagatcgcccgcgaaaatggagttgctcacaacctcatttttaagtggctgcgcatgtggcaaaacgaggggcgggtatcacgtcgcctgcctgcgaccatcaccccaccttcagagctgtcactgttacctgtcgagatcgtatctgaaccaccaacatcagataacggttccgggcagtgtccgctgaatgcttcctcctgcagcgtggagttccgccacggtaaaataagcctcgaaaacccctcgccggagttgctgggcgtgctgctccgcgagctgaccgggagaagccaatga

SEQ ID NO: 77462 - DNA, 225 bp, Citrobacter koseri
atgtgggtgatctacacaacgaatgccatcgagtcgctgaacagcgtgatccggcatgccatcaaaaagcgtaaggtgctcccgacggatgatgcagtgaaaaaggtggagtggctggcaatccaggcggcgtcacagaaatggacgatgccgctgagggactgtcgtatggcgatgagccgctttattatcgagttcggtgaccacctggccggtcacttctga

SEQ ID NO: 77463 - DNA, 237 bp, Citrobacter koseri
atgaccgcgaaacaacgcaacacactgagcgtgaccatgacggtagagcgtgccttactggtccgggcgcgtgaggcgggtattaacctgagtgcgaccctgaccgccgccctggatgcggagcttcgtcaccatgaagccaaaaaatggcaggaagagaacagggaggccatcgacgcattaaaccgtttccatgatgagtatggctgtttcagtgatgaataccggacattttaa

SEQ ID NO: 77464 - DNA, 315 bp, Citrobacter koseri
atgcagttcaccgtatacggtaataccggtaaaagcgccgtttaccccctgttgcttgatgtcacaagcgatatcattggacaactgaaccgccggatcgtgatcccgttgttgcctgttgacaggtatccggcaggccgccgcccggatcgtcttgtccccgtggtcagactgactgacggccaggaatacgcggtcatgacccacgaactggcgagtgtccctgtccgggcgctgggggcggtgttctgcgatgcgtcgcagtaccgcactcaggtgaaggccgccatcgatttcctcattgacggcatttag

SEQ ID NO: 77465 - DNA, 753 bp, Citrobacter koseri
atgctaattcataacgttgctgaaagaaatgaagccgcaaaccggagaatggaggcattactgagttttcttaaggaagaaactttctctgactttttgaccttaaaaaaagttgtcggctataaaggaagacataaccatgccatgtataacctgctgaataaagcggtggcactggggtttctgagtaaacatgaatatccggtactgaccgggaaaaaagcattgtggggaataaccatgccggggctggcaagggtggttaacgcagatgaccctgtttttcccgcttattttgagccgggaaaactccggcaccggacgctggagcatcgcctgttaaaccagcgggtcaggctggccctggaggaaaaaggcggtacaggctggcttaacggcgaccggggggcatttatagcgcggtatccgggcgtccggcaccgaccggacggcatcattaccctgagcagtggtgccatcatcgcggtggaaaccgagcgctcgctgaaaacccgcgcccgctacatcaccattatcaacagtcatctggccgccagcgacgccggatgctggcactatgccatgtatgtcatgccggacgataaaacccgcgtgtcgcttggcaggctgtttgacagcatcaggacggtgatgaggaacagtgttcccgttccgtttgatgcgaagaaccgggaaatgtttctgttccgcacgatagccgaactggaacaggctcccgacagccacgactaa

SEQ ID NO: 77466 - DNA, 1737 bp, Citrobacter koseri
atgggaactcatctgatgcaaaggctgaatgccttttcggatgccttttctgtttttctgctctggctgcaacacaacccggtcatattatccctgtttgccgggctgacgctgccctttatttttcatctgtcacgtgaggaaagaaaaaatgcccccttctggttaaaatcggtggcgtgcgtgtccatcttcttctttatatccggcccgctgtcaccactgaccattcaggggctgagttttttctttacggtactcgataaccacattctgctcaggttatcactctggatactgacgatcggattgacgcttgccggtctggcctttcacattaccgcccgacggttactggccggagaaatcgacagtttaaaacaccggatgattaagaaaagcaaactggaaaggaatatcagaacggatgttcgtgacgtcagggatatgttgcctgacagcatcgaatataatccgctggattatattaatctgaaaaaaggtattttcatcgggctggataaagacaatcagccacaatatatcaccgccgaagaatttcagacccagcacgccgaccttatcggcaccaccggctccggtaaaggggtgagcgcctgtgtcctgctttatcaggcaatactgtcaggtgaaggggtatttgttgaagatcccaaaaatgatgagtgggctccgcatgtcctgcgggacgcctgcctgaaagcggaaaaaccgtttgtcctgattaacctgaatgaccttcatttccagctggatttactggctgatatttctcatgaacaactggaggagctgtttaatgccggtttcagtctggggaaaaaaggcgaaggcgctgacttttatcgtattgccgaccgacgggccgccagaaatacggcggctatttatgaaaaaggcatgacattacgggatttattcaataccgactttgtgaaatctctcagtgaagatgtgcctgctttttatggcgagctggaggaaatcgccctggttaattccattaacgcccacaatggattttcattaaagacaatatttaatgagggtggctgctgttacatcattggctcgatgcgtaatcagaaaatcatttcggcacaacgcatgattttgacccgtctgattcagatagccgaaacacgggaccggataaaagggaaaccccggcctgtcgctatttttcttgatgaacttaaatatcacctttcccgcccagcgcttgaggggcttggcgcggcaagagataaaggtgtgcatatcatcatggcgcatcagtcggtgaaagatttatatgactgcccggcagatctggagggtgatgccgtcgccggttcggtcatcgaaaactgtaaattcatgctggtttatcgccttcgtgatccggataccgccgactgggtggccagaatgaccggctctattctggttgacgatgagatgaggaaagtgaaaacggatatttccctgacggagaaaatggaaaccgaccggatgatccgccaggcggaacgctattatatcgacagcaatatgctgcttaatctgccgaaatttgtcggttttgtatttacctggaatgacctggcgaaggcgacaaaactctttcacataccggcgaaaaagcaatatatcgacctgctgtcatttgagcataaacacccgctgtataccgaaaaagaccatcaggttcacaaaccttccattaacctgtga

SEQ ID NO: 77467 - DNA, 306 bp, Citrobacter koseri
gtgaacaaagaacacctgtttatttctaacattcactcaacacatcaggacagaatatctgttacgtgtatctataattctctgtcaaaagaagcctgccggggatgtgggctttattatgagatatatgaaagccggtttatccatttattgcgacatcatctttcacagcttaatgaaccggacgcagagaagctcaggcgatatgccgaaagtcagggaacgaagaccgatgatgaaacgtaccgtgcggcattaaacgcagaacgggaatgcctggctgaaatagcccacgaacagaggtga

SEQ ID NO: 77468 - DNA, 303 bp, Citrobacter koseri
atgaaatattccgctattacggcggcaatgttgtgcattgctgccgggacgcctgtttattcatttgctgctgacccgtgcgaagtcgtgctttgtctgtacggtaaagcaaccggaaacagtggagggagcgaatgccattctgctgaacgggccttttttaatatcgtcaaaaagaaccggcacggatttttacccaatcatacgctgaatgccagaaaagttttcctgggggaatgcgccagtgcggatccggcagcggtgaataaaattctgtccagatttggccgggtcagagggtaa

SEQ ID NO: 77469 - DNA, 399 bp, Citrobacter koseri
atgatgaaggttatcaatatgctgctcttttcgctggtactttccggctgttcttcacccccgccaccggttcctgttgaatggaataaaccgggccagtcagtcaataccggtttaccgcaatggcgggacaatctggttattattccttctccggtggttaatgataaatggttattgtccattcatgcacggaattataatgagacacgctggacgcccgctgtattttacgcggtcgcccactcagcgcgtattgttgttgcagcgccatcaggcgcagatttttttacggcaaaaaactggctgcgtcagtatggcgcaaaaggcgttattgcatatcagccggtctctgactgcctgacatgcagcgatacccgcatttatttttcgcgttaa

SEQ ID NO: 77470 - DNA, 1026 bp, Citrobacter koseri
atgaccgctaaaaacatctccctggaccgctataagcagcgattttttggcgattttctggcgcttcccggactgacggagatcgccgttaatcgtccgggtgagcttttcaccaaaattaacggtgtctgggagcagcacgccgttccgctggattatgagggctactacaacttcgcccggtgtctggcgaagcatcacggcgacaatatcgaagatatcaagccgggactgtccgccacgctggaatccggtgagcgttgtcaggtcatcgtccccccggcctgcgagcgtgacacggtgtccatcacgctgcgtaaaccctcacgggttcaaatcccgcatcaggactatatcgacgccgggttttataaccgggtggccggtacagaaaaaacgcagacacatgatgaggaattactgaccttatatcacgcgaaagatattccgcgctttatggagaagtgcgtggagtacggtaaaaccctcgcggtggccggggaaaccagtaccgggaaaaccacctatatgaagatgctgattggttatatcccccctcatctgcgtattacgaccattgaagataacccggaaatcaccttctttattcataaaaactacgtccaccttttttatccgtcggagtcggcagatgaaaaatggtcaatggtgacgcccgccagcctgctgcgctggaattaccgcatgaatcccgaccgcatattattaaccgaagtgcgcggcggtgaagcctgggattttctcaaaataaccggctccggtcatgagggcagtatgacctcccttcatgccggttcggcaagggaagcggtggacgggtttattacccgctgctatgagaatccgcaatgcgcccgactcccttacacctttatgttacgcaaggtactggacagtctggacgttatcgtgagtatcgacctggacggtaatgtgcgccggatgaatgatatttatttccggccactgcaccgtagcgctttttttgaggagatgaaagcatga

SEQ ID NO: 77471 - DNA, 1221 bp, Citrobacter koseri
atgaacgacgaacacccgcatcctgaacctgatgagtcccgatcctccccggcgcaaccggaggacgacattgctgcacttgagcgcgaggcccgtgccaggcgggaagcggcgcttctcaccatgcaggaggatgaagagaacgatccggtacaacccgctatcaacaaactgaaaaagcgcaggcgcgggaaagccaccgcgtttctggcgctcgccgccgttgcgctgattgggctggcatgggcgggcaactgggtataccgcaatcttctctggccaccgggtgaagaaaaacgacaggatgccgcgccacagccgaaccggagcgattaccggcagcgtaccgatctgggggcgcacgataccgcggcggacacaccagaaccggtggacagcatcccgcgcagtacgacggtcaccgggccggagacgccaccggaactggataaagcccgttttttggtccggagggacaactctgccgctgcggcccgaaacccggtccggacccgacagcaggaaatgacacaggcaacctctactggtcagcagacagacaccacaccgacaccaacggaatcgtccccggcagcggtccggcgcattccttacaacccggatctgtatgtgccggaaaataccgccattccctgctcactggattaccgctttgtctcggatcgggcggggaaaatccgctgcacgatcgccgacgatatctggagcgccagcggtaacacgaagctgattgaaaaagggaccaccgccacgggcatttaccagacgggtgcggaaacgggaatgacgcacggacagggccgcgccttcctcatcatcacgaaactgcgtacccgccagcccccttatcttgatattccgctggttgatacccgcgctgccggggaactgggcgaggcgggtgttgacggctggatcgattcgcatttcagcgagcgattcgggggcgcattactggtcggtatgatccccgatgttgcggcatgggcttccaacagcgcgggtcagaaagatcgtaataccgactacaccgaaaacagccgtcaggccatggcagatatggcacgaaccacgctggaaaacagcatcaatatcccgccgaccgtgcacaaaaatcagggtgagatcatcaacctggtcaccggacaggatattgatttttccggcatctatacgctgaggatgaaaaatgaccgctaa

SEQ ID NO: 77472 - DNA, 906 bp, Citrobacter koseri
atgaaaagcatcatctttatcctgcttgcgctgatgttgtgcggcaccgcatggagtgccgccatcccacaggcgagccgctacgacgcccgcgttcagcaggtggtttataacccgctgaacgtcaccgtcgtcagtacccggcccggcttcatgaccacgctggtctttgacagcgacgaggcggttatcagcgccagacccggttttgaggaggcgtgggaagccacgccggtcgccaaccgggtcagtgtccgcccggtagcgctcgttcagggtgcgcccggcgcggacgggaacaccacacaggtggtcatcccgcccaacagtcgggactggcacaccaacctgctggttgtcaccacccggcggctgtacaacgtcgagctgaacgtcattgatgataaatccccgcagcagcccgcttaccaggtgagttaccgctatccgggcgaagaccgggagaaggccagccgtgagacagcgaccagcgcgctggagcgtgagcaaaaacagcagcaggccgacattcagcaggccctgaatgccgcgcagacgccgcgcaactgggactacctcagttatccggggcgcgacagcgtccggattgtcccggatttcgcgtatgacgatggccgctttaccttcgtgggcttctccccggccaaatccattccctccgtgacgaaagtgctgaacggccaggaacatgtggttaacagcagtgtccgccgaaaaggcaacttcaccgtactgctcattcaggaggccacgccccgtctggttctgcgttccggcaacgccgtggtcggcctggaaaatcgtggatttggccgggtccgggccgctgatggtgccaccgtctccccgcaggtcgaacgggtggaaaagcccgccacccactga

SEQ ID NO: 77473 - DNA, 684 bp, Citrobacter koseri
atgagtgaacaaaccctcattgcggattcccgcaccttcgagcagcagatgattgagcgggacaaacgcgccacaaaagccgggtttatggtgggcggcacgggcctgcttaccgccatgctggcgctcatcgccctggtgctgatgctgcccctgaaacagacggtcgttgaactgtacaccgtggataatcataccggacgtgtggagcacgtcacccgtgtgtcaaaaacccacctgacggcggaagacgcttatcagaaggcgatgaccgccagctacgtcaggctgcgtgagcggtatgtctatccctccctccaggacgattacgccacggtacagatttacaacagccctcaggtcaacgatgactatctggcgctgtatgccggtaaagacgccccggacaaggtgtatcagaacggggcgcataccgtgcggatcgacattctgtcaaaccagctcaccgggggcactgaccccgacaaggtcgccaccctgcgttacaaaaagattatccgccgcctcgcggacaacagcacccgcaccgaatactgggatgcccgcctgacgttccactccgaccccggcagggaaatgagcgacaccgaacgggaagttaacccgttcgggtttaccgtgaccagctggcaggcagaccgtgaaatccggggaggcgaataa

SEQ ID NO: 77474 - DNA, 138 bp, Citrobacter koseri
atgaaacgcttgattgcgctggctttgctgtgcgcgctttccggctgcgcgcagtctccccgtcctcctgcttttagcggccagggcgtccccgtgaacaccccacagattatggcggagttaaacagttatgagtga

SEQ ID NO: 77475 - DNA, 1068 bp, Citrobacter koseri
atggctgatctcggtacatttgaatttatagagaagcagctaattggtggaataacacaatccaccagtggtctgatgatggaacattctgcaatggttatgggactggcggcggcgtcagccaccctctatatcctgtggcgtggataccagactctggcgggtaagctgtccacgccgatggaagatgtcatgtgggacctcatgaggatggcgatcattctgtcttttgtggcaaacgtcagcggttatcttgacagcgttatcgactctattaatggtttaaaggagggattttccggcggcgataatatatggcagatgttagatacgctatgggataaagcaaaggtactcggaaaaacactgcatgacatggataattcaacatacataaaagatgagggcatgactgctcagctttatgtctggcttggggtgttcgttttaatgttggtcacagcctttgtctcaatgatcgcggaggtgatgattttactgctgagtattactgcgcccatattcatattctgtctgatatatggatttttacgccctatgtttaataactggctgcaaaatatatttgcagccatattaacggttcttttttcagccttatcattaagaatggttataaattttgtgaccaaaatattaacgcaatcactggccggagctgcaaaagccaatattgtggagttaggcgcacaggtctgccttgccggtatctgcgcggcaatactggtttacctctccgccaggctggccggagcactcgccggggcgagtgcgaccatatccatgcagggactggcggcggtgggtattggcgctgcggcatttggtgccggaaaactggcagcaggagccgggaagcagacaacccgcgccgttcaggacacgctccagggctggagagatgccagcgcgggtaaacccggcagcggtccgggatacagcgcggcgaaagcgcgtaagtatgcgattgagcagatgatcgcccgcaacgaagcccggcgactggcacaagccagagactcggcggttcagaaattccatcgttaa

SEQ ID NO: 77476 - DNA, 228 bp, Citrobacter koseri
atgaataaaatcatcgttatcttaaccctttcatttattacaataatttccggatgtgacgaggaagccaaaacaacacaatggtatcgtgatcatccggatgaattaaaaacggtttatgaaaaatgccagaaaaccggcagtgcttcagaaaactgtaaaaatgccaacgaagcgcattatcagatccagcaactcaatgctcccacacttaaattccatgagtag

SEQ ID NO: 77477 - DNA, 705 bp, Citrobacter koseri
atgaaaaggcgttttcatgccctgattttcgcgtgcgtgatggtcagcccgctggcacatgccggtattcccgttctggtggatgctgacccactgcgtgaagccgaatggctgaaagaagcgcagcgctggatgcagactgcgcagcattatcagagccagatccaggcgtataaagatcagttggcaacggccaccggcatccgtgatattgctgactttgttgaccaggccaaaagcctgaaatccgaccttgagaagctgcgcaagccagggcaggcactcaatgatctgctgctttccggcggttcttccgggcagttcgatgccctgtacgaaaagtataaaattttcgacacctgcaacacagaacaatccgaaaattacgccagggtctgtaagcaacaagtcatcaataaggcgattcagtttgagcagactgacgagatacaggggcaggtcagccagatgctgggggaaattaacagcctctcaaaccgtattgcactttccagagacacaaaggagtctcaggaccttgccaacagtattcagctaaaatcagtaatgctgaacacgctcactgaccagtgggaaatcagcgtgaaggcagcagaacagcgcgaaaaagtgctggagaacgagcgtattaaacagtggaatcagcagcaattaaatgctcccacattgaaatttcatgaataa

SEQ ID NO: 77478 - DNA, 2745 bp, Citrobacter koseri
atggcaaagctgctcaaggcaatgaaacgtccggcggcactgtggggggtgccgatggtgcccctgctgggtgtcacgggatttaccatcatcatcgctgtctggacttctgtcgcgttccttgccctgctcccggttgaatttctggtgatgaagtcgctcacccggaatgaacccctgcggttcagcctgattgccgtctggctcagggcaagaggaaaaccggcagcaaaccgtctgttcggcgcaaccgcctttatgcccgttgagcatgaggccgttgatatcacggagtttctcaccaccatgaaactgaatcagtgtgccacgctcagaaagtacataccgtattcatcgcatattcatcagcatgttgtccgctcaccagacagtgacctctactgcacctgggaactgacgggcaccccgtttgactgcgaatcagaagaaaccctcagtattgaccgcaaccagttgcacggactcatccgctccttcgagggaatgccggtcaccttttatatccataacgtgcgggagccgttctcggattcactgcacaaggcgtccggcaacccttacgccgatgaaatcagccgtctctattatgcttcgctggcggcggatccgtttcgccgtaaccgcctgttcctgaccgtctgctaccgcccgtttgtccgtctggaaaaggccggacgcagacgtatgaaagacggtcagaagctgaaaaagcttggcggcgcgctgcgggaaatgctggaaatcaaaggctcactcgataccgcactgtcacgctacacggcccgtcctctcggcaccttcaccgaaggcaacgcggtattctcctcccagttagccttttatgagtacctgctgacgcaccagtggcgcagggtgcgcgtcacccgcactcccgcgtattcggtgatgggatcggcagcgctgttcttttcggcagagtccgggcagataaaccacgtcagcggcacgcactatttccgggggctggaagtgaaggagttcccggaggagacggcgacggggatgatggactcgctgctgtatgccccctgtgattacgtggtaacgcagtcttacacctgcatgtcacgcgaggaagcccgtaaggccatcaaacgcacccgccgtctgttaatgagttcggatgatgacgcggtatcccagcggctggatctggatgtggcgcttgacctgctgacatcggggaaaatcgcctttggcaaacaccatttctccctcatggtgttttcccgcacgctggacagtctggtggccgataccagtgaaatcagcaatgccctgaacaatctcggcatcaccccggttccggcagcgctttcactgtcagcggcgtatatggcgcaactgcccggtaactatcgcctacggccacgcctgggcgaactgagcagcaagaactttgtggagctggccgcactgcacaacttctaccccggcaaacgcgataacgccccctggggagatgcgatggccctgctgcgcaccccgtcaggggatggctactacctgaacctgcacaacacgctggcggacaaggacgagttcaacgagaagaacccggccagtacctgcattctcggtaccaacggttcgggtaaaaccatgctgatgacgtttctggaaaacatgcagcagaaatatggccgcgcggacagtttttcgcccgatacgaaaacgaaacggctgacaacggtgtatctggataaggaccggggcgcggaaatgaatatccgggcgctgggcggccgttacttccgtatcacgcatggcgaccccacgggatggaacccgttttcgctgtcgcccacaaaacgtaatatcagttttatcagccagttgatgaaactgctgtgcacgcgtaacggtgcgaccatcacgccccgtgatgagcgtcgcctgaacgacgccgttaatgccgtgatgagcaatgagccgcaataccgtacctgtggtattacgcgcctgctggagaatctgccggagcctgccacccgtgaggcacaggagaacggtctgagcatccgcctgtcgcagtgggcgcagggcggcgagttcggctgggtgtttgataacgccacagacaccttcgatatcagccactgcgataactttggcattgacggcacggagtttctggatgatgcgaacgtctgtgcgccgatctccttttacctgctgtaccgcattaccactctgctcgacgggcgacgactggttatctttatggacgagttctggaagtggcttcgggacccggtctttaaggatttcgcctataaccgactgaaaaccatccgtaaactgaacgggatgctggttgtgggcacccagtcaccggcggagatcatccgggatgaaattgcgcccgccgtgattgagcagtgcggaacgcaaatcctggcagccaaccccggtgccgaccgggagcactatgttgacgggatgaagtttgaaccggaagtgtttgatgtggtgaaaaatctggatccgcaggctcgtcagtatgtggtggtaaaaaatcagttcaggcgcggcgacacccggcgctttgccgcccgcgtgacgctcgatctctccggtatcggcagatacacccgggtcatgagcggcagcgccgataacctcgaaatcttcaactcaatttaccaggaagggatgcagccgtatgaatggctggactcctacctggctcaggcactctga

SEQ ID NO: 77479 - DNA, 294 bp, Citrobacter koseri
atgacacgtttccacaagcttaaggcggcagccagccccgtttctgctggtgtgctgacggctttttctgcaaccccggcgtttgccgacgggtttcagcgcgcaaacacggtgatggaaaaagtctccactggcctgcatggcctggcggccatcaccatcaccgtggccgtgatctgggtgggttacaagacgctctggaaaggcgaaagcctgtcccagtgcgcctacatcatcatcggcgggatcctgattggcgggggcagtgagatcggtgcgctgctgatgagctga

SEQ ID NO: 77480 - DNA, 711 bp, Citrobacter koseri
atgctttccaccactgtttttctggcggcggccatgcagtgtgccgccagcattcatccgtccaccgcacttgatgtggcacgggtggaatccggttttaatccttatgccatcgccgagatagtccccagggccagaagagcctccggtgacaattctgttatttcccatcttcccgccagtcgggccgatgccgagcgcattatccgacgtattgccatacataaccggcgttattccgtcgggctgatgcaaatcaccagcaccaatttccgtcactacggcgtgacggccaccgatctgcttgatccctgcaccaatctgtctgtctttgaacgcatcttcagcgactgctaccgccgtggcggcaccctgaaaagggcgctgagttgttattactccggcaatttccgtaccggacaacagccggaagccgcgttttccgggacgagctatgtgcagcgaatgggtttaacaccggcatctccccgctatgccgtacccggcacccgcgaggatagctctgccactgcgacttccctgaaggccatccctgccgatcccccgtcccgcccccgcgtgatctggccggggaccgtcgtgcgtggcatccccgcgaaacttcgtcaggacaacaccgccatcgcaccgctctccgcgtcgtcactgcgccggagtctctcccggccagcccatgaggaggaagaataa

SEQ ID NO: 77481 - DNA, 234 bp, Citrobacter koseri
atgagaaaacccgtttattacgcctatgtcacccaggaaactcagccggatttgcagggcgacaaaaatacgtactggacaaaagtcggtgtggccttttcccataacggtaagtccggcctgaatattgtcctgacgcccggtattgccgtctccggcaaactggtcctgcttgaaccccgggaggataacaacccgccacagagtacggtacccggcgaaacagcgctttaa

SEQ ID NO: 77482 - DNA, 210 bp, Citrobacter koseri
atgccggatgaaatcgaccgcgatcaggagtttaatgagcagcggctggaagagatgattgaacagagccgttttaaaccgagaacaacaccatcattattccactgtcgtttatgcgataagcctattcctgaacaacgacgacaggcactcccgggcgtaacaacctgtacggaatgtcaggataaacttgaacaccgcaagtgttaa

SEQ ID NO: 77483 - DNA, 588 bp, Citrobacter koseri
atgaccccgacactgaattacgctgtattaaccgatgccctgtgtgcgctgaaagaagggaatattcgccattgtgaatcgctgggattcaccttagacgaaatgactgcccttaatcagctgtcgcttgatgagttgtttgttgtcagcagggcctcagccctctttatctcggtcaatatccgtcatgatgttttgcatcatttgctggctcaggcccgcaaggaataccggcgaaaacagcaggttaaccgggcgattcatctgggcggctctattgccttgctgaatcagtactttggccttacctccaatgaagtctgccttcgtcgccggttgctgggtgtcagcgtgccttttggccggacgcctgaacccgacgaagagacggatgccgctatctggcagcaatggcaacaatgccgggtagacaaccttgagtcacctgatgcactgaccgccatgatgcaggtaaccgaaaccctgctaccgaaagccggagggctgtcactcaccacggtctggaagcgcattgcgcagtgtgagcaggaagccgctgcttacaggaggcccctccatgccggatga

SEQ ID NO: 77484 - DNA, 186 bp, Citrobacter koseri
atgacatcacatcagttattacgcctgagacaggttgaagagaaaaccggtctgaaacgctcgcaaatctatctgtatatgaaagacggcacctttccccgttcaataaagattggcccggccagtgttgcctggctcgaatctgaaattgacgaatggataaaccttaaattatccagccgctaa

SEQ ID NO: 77485 - DNA, 927 bp, Citrobacter koseri
atgagtaaggacaatttcccctcccccacaccaggtatggatacggaatggataaccatcggggaagcgacagaaatcgcacatgatctggtaacaaaaagagtcactgacagtgatatttaccgccatgcactgtatggtgacattacattatcgatttattttcagtcccccgtcattttacgcaaagtcagagtatccgaatataaagtgacactcaggcctgttaccaattcattaattcaccggttgtgctttcttgaccgaagcagtttcctccgtcattccagcctcatggtcagcaccggtggaaaatatatattcccgagaaaccggattattgacaccccactgagtggtcatgaatctctgctgatacagcacttactggcccgttcgctgtcactcccgttaccggaagaacatcatgttaatcatggtatttctgtcatcattgccggggaaatatttcagctgtttgagcagacaacatggcgggagaggatcaagaaacaaattatgcaccttcccaaaaatatcaccccggatatttatgcacatccttcatataaaaaaatgagacgatgttctcatcataccttctttcccctgtattatcttccggccgatgcctgctttgtcatccgctgcagtgaactggataaactcatgaaacctggcggtggagaaaatatctctccggagagcccttcacgcacacggatatctaccccactttcccgactgttctggctttcctgtcggcgtaatgacaccatcagtcccctgatgaatcagccctataaactgctgtccatttttgagcagtgggcatcagaggagggtattaccgatcacctgagtggtgacacactgaaaaccgcacttgaaagaggttctcccgataagaggagctcgcgcaaataa

SEQ ID NO: 77486 - DNA, 243 bp, Citrobacter koseri
atgcattatctttctttaactctgcccgtctttttacaaagaaaccatggtatccttttccatatcctcatcataaagagctcaattaacattcagctaacatcatatcacttccggttttatttcgcccttaagaataaagctactgcaaaaataacatttactgtaataaattctttatcatcattgttctgtttcccggaagggaaatcagagcatcgcatcaacattgaatatacgtga

SEQ ID NO: 77487 - DNA, 1269 bp, Citrobacter koseri
atgttaactgacagcaaaatccgctcagccaaatccctcacaaaatcctacaaactcaccgattcacaaggcctgtatctgacggtatcgggcagcggctctaagttatggtatttccgctaccgcctcgccgggaaagaaagccgtctggcctttggcccctatcctcagatcacgctggcggaagcccgcgaaaagcgcgatgcagcacgtaagttgcttgcatccggcatcagcccttctcagcttcacaaggcgcacaacaccgccgttgatgaatcccgcacattccggcatacggcaatggcgtggcacaccagcagtcttaaactctggtcggaagcccacgccggtaaaattctcacttgccttaaacgctacgttttccccgttatcggcgcgatggatatcgctgagattgaaacccgtcatctggcgcaactggttaaggccattgacgataaaggcgtgcatgatgttgccggacgggttcgccagcatctgaccaaaatcatgcgccatgcagtacagcaaggtgtgattaaatacaatcctgcttacgatttagagggagtcgtgaccccgttggtgacccggcatcaccccgccctgcccctgaatcgcctgccggagttgctggaaaagatggatgactacaaaggcagggaactgacccgtctggcgctggatctcagtctgcatgtctttctgcgttccagtgagctacgtctcgcacgctgggatgaatttaacctgaaagcccatatctggacagtgcctgcaaagcgtgaggccgtaaaaggcgtgaggttttcagagcgtggtgcaaaaatgaaggatgaacatctggtgccgctgtcgcaacaggcggtcgccctgctgaagcagattcaggcgatttccggcgaatcagtcttcgtttttccgggcgcacataccctgaacaagccgatgagtgagaacaccatcaacaaggcgctgcgcgtgatgggctatgacaccaaaaccgaagtctgcggccacggcttcaggaccatggcctgtagcgccctgaacgagtccgggcgctggtcaaaggatgccattgagcgacagatgagccacaaagagcgcaacggagtgcgggctgcctatgtgcacaaagcagagcatctggaagcccggatcgaaatgatgcagtggtggtcggactatctggatacctgtcgggagaagtatgtgccgtcgtatatttatgcccggcagcataaggtttctgcaggcagctaa

SEQ ID NO: 77488 - DNA, 192 bp, Citrobacter koseri
atgaacggcaatcgtatcccagcgcctgagccagccgtcaccgtgcagaaagaaaacggcatcctcctcatgccggggaagattcaccacctctccccggaacaaaaaacggttttcggcaatgcgattagcgaccggcagcatggggaacaggccgcattcgccgggttttacgccgcatccttcacgtaa

SEQ ID NO: 77489 - DNA, 681 bp, Citrobacter koseri
atgaaccccatcgtaattaatcggcttcaacggaagctgggctacacttttactcatcaggagctgttgcagcaggcattaacccaccgcagcgccagcagtaaacacaatgagcgtttagaatttttaggcgactcgattttgagctttgttatcgccaacgcgctttatcaccgcttcccgcgtgtggacgaaggtgatatgagccgtatgcgcgccacgctggtgcgcggcaatacgctggcggaattggcccgtgaatttgatctgggtgaatgcttacgtttagggccaggtgaactgaaaagcggcggctaccgtcgtgaatctattctggcggataccgtagaagcgttaatcggcggcgtttttctcgacagcgatatccaaaccgtcgagaagttgatccttaactggtatcaaacgcgcctgaatgaaatcagcccgggcgataaacaaaaagatccgaaaacgcgtttgcaggaatatttgcagggtcgtcatctcccgctgccgtcttatctggtggtgcaggtgcgcggcgaagcacacgatcaggaatttactatccactgccaggtcagcggcctgagtgaaccggtggttggcacgggttcgagccgtcgtaaggcggagcaggctgccgccgaacaggcgctgaaaaaactggagctggaatga

SEQ ID NO: 77490 - DNA, 573 bp, Citrobacter koseri
atggttaacggcatcatccgtccgctgtggatggaaaaccagaccgacaacattgcggctattcaggctggcaccacacccccacacatcattacagaacagttttttgacatgatttggatgggcggcgcgggcgcaacgttgtcgctggtgttagccatgcttttctttgcacgcagtaaaaacatgcgggaagtggcgcggctcggtgccggagcgtctgtgttcaacatcaacgaaccgattctgttcggtctgccggtgataatgaatccgataatgctgatccccttcaacctggtgccgctggtgctggtcaccatacagtataccgcgatgaagctcggcgcggtcgccgtcaccacgggcgtctttattccgtggacgctgccgccagtcattagcggttttatcgttaccggacatattagcggcagcgtcatgcagctcattaacctgctgattggcgcaatgctgtatctgccctttatgcggatcgtcgataaacagtaccgcgcggcggaacgggctgccgtaacacagcccgatgcaccacttgcaaaacaggagtaa

SEQ ID NO: 77491 - DNA, 2043 bp, Citrobacter koseri
  misc_feature (847)..(856): n is a, c, g, or t
gtgaccagcggagcggatttgctggatgccaggtacagcggtggccgcgatgtatatgacggctacattattgatgacatctactgcgaacagggcaatgaatacatcagctttaccagtaagcccgatattctgaaactgggtcaggccttgggagaagttgatccggatgaatttaaacgcctgcagatccgcaaaaccattgaagagcatctcgataaagaaatgcgcctgcgcccacagggcattaaggtgctgagcctgttttttatagacaaggtcgccaactaccgctggtatgacgaagacggtaacccgcaaaagggtaagttcgccctgatgtttgaggaagaatacgatcgcgccattcgcaaacccaagtacagccagttatttgaaggtgccgatttggatacagctgcacaaggcgtgcataacggttattttgcgatcgataagaaaaaagattcgtcaggcaaggaaatgctcaaagaatctaaaattggaaaagatggcaaggcggcaagcagcgaatctgatggaagtgcttacaacaccatcatgaaagacaaagaatggttgttgagttttggttgcaaacttaaatttattttttcccactcagccctcaaggaaggctgggacaacccgaacgtgttccagatctgcaccctgaacgaaaccacatctgtcattaaaaagcgtcaggaaattggccggggtttgcgcatctgtgtgaatcaggatggcgagcgagtgcatggctttgcagtgaacactctcaccgtgatggccaatgaatcctacgagcaatttgccgagcaattgcagaaggaaatagaaaacnnnnnnnnnnaaaacgaggaaggcatcaagtttggcgtggtcgagaagcacctgtttgccaatatcgtggtaccggttgacgaccacaatcacgaatacttaggtgccgaggcgtcgaagcagttgtgggaacacttgcagagcgaaggctacattgacagaaagggtaaagtgcaggatagcctcaaggcgtcattgaagaacggtactctggcgttgcctgaggcattccagccccatgcagcacagattgtgtcggtactgaaaaaagtatccggtaacctgaacatcaagaaccgtgatgacaaagccaaggtttccttgaacaaagcggtctatctgagtcccgagttccaggctctgtgggatcgtattaaatacaaaaccacgttccgtgtggactttgataccaacgcgctgatcgaaaagtgcgccgaagagatcaaagttaaccttcaggtgggcaaggctcgcttcacttaccgcaaggcgaaggctgaaattgatcggggtggcgtgcacacagagaagaccgttgaagcaaccagcgtgtacgaatcccgctcgttcgatttacccgatttgatcacttacttacagaacgaaaccaacctgacgcgccgcaccattgttgccattatcaacaaaagtggtcgcctggagtcgttcaagaacaacccacagaagtttatcgaacaggcaggtaacataatcaaaagccaaatgcgtctgtttatcgtcgatggaatcaagtaccacaaaattggtgatgatcagttctatgctcaggaattgttccaacaaaacgaattgtttggctacctgaaagacaacatggttaaagctgagaagtccgtttttgactatgtagtttacgactccgatattgagctggaatttgcctcggccttcgagcgaaacgaggatatcaaactttacgccaaactccccggttggttcaaaatcgataccccattaggcggttacaaccccgactgggcggtgctgatcgaaaaggacggaaaagaaaagctctatttcgttgttgaaaccaaaagcacgctcttctcggtggaacgacgtccggaggaaaatgccaaaatcaaatgtggttatgcacactttgaagcactgggtgatgaggtgaattttactgtatctaattcgatggacgagttttcaagcaggtatgcgtga

SEQ ID NO: 77492 - DNA, 678 bp, Citrobacter koseri
  misc_feature (660)..(669): n is a, c, g, or t
atggaaaccggaacgggtaaaacctatgtttacctgcgtacagttttcgaaatgaaccggctctatggctttaccaagtttattatcgtggtgccgtccatcgccattaaagaaggtgtgcagaagtcactggaaattacggcgactcattttaaagagctgtacgaaaacgttgccttcgactatttcacctacgattccagtaagctgtcggatgtgcgtaactttgcgaccagccctgacattcagatcatggtgatcaatatcgatgccttccggaaaagctttaccgacccggagcaagagaacaaagccaacatcattcaccgggcacacgaccggatgaccggtgccaagccgatcgaatttatccagcaaaccagcccaattgtgattgtcgatgagccgcagagtgttgacaccacagataagagtaaagaggccatcgcctcgcttaatcccatgtgtacactgcgttattcagctacccatgtggaaaagcaccatatgctctacaagctggattcagttgatgcctacgagcaaaaactggttaagcagattgaagtggcaggcattgaggttaaggacggccacaataaggcctttatcaagctggtcagtgtgaacaataaaaaaagcccgatcagtgccaaaatnnnnnnnnnnctcgcctga

SEQ ID NO: 77493 - DNA, 489 bp, Citrobacter koseri
atgatttccgcccctgagccactccgtgccgaacatgtactatcttcattctgttgcggcgtggagtctatggacaactggctaaaactacgggcgatgaaaaatcaggtcactggagcatcacgaactttcgtcagttgcgatgattcaaaagtgttggcgtattactcattggcttccagtgctgtagcaatgaattcagctcccggacgttttcgccgaaatatgcccgatcctatcccggtcgtgatgttggggcgcttggctgtggatacgtcattgcatggccaaggtgttggccgtgctctggtacgtgatgctgggctaagagtgattcaggttgctgatactatcggcattcgtgggatgctggttcatgcgctgtctgatgaggcacgggaattttatctacgggtggggtttgaaccttcgccgatagatccgatgatgctgatggtgacgttgggggatttggttgggagtttttaa

SEQ ID NO: 77494 - DNA, 294 bp, Citrobacter koseri
atgccagcgacgaacagcgtttctgttaaacgcgaaacactgaatttacgcatcaaacccgcagaacgggatctgattgatcgtgcagctaaggccagaggaaaaaatcgtaccgattttgtccttgaagctgctcgcgctgccgcggaggaagcgttgatcgatcagcgcatcatcatggcagatcccgacgcttatcaggaattccttgcccgtttggatcaagctccctctccgaatgccgcgctgcgtaaaaccatgcaaacacctgcaccgtgggaacagaaaaaatga

SEQ ID NO: 77495 - DNA, 1875 bp, Citrobacter koseri
atggcagatatctctatgaaagcaaaggatgaaaatgctttgctgatgctgttaggccgactgagcagaggcttaacgaccttaacatcctgggccggggcactggtgctgtttatcaacgtactggtggtattcgcatccgttatctggcgctacgcattgcattcaccgattcactgggcggaagaggtggcgcgtgcgctgatgattgccctcgtcttttttggcgtggccacgtccacaggcagaggcgggcatattggcgtcgatctgttcctgcgttttttgcccgagcaggtgcgcccttatgttatccacgccagtcgttgggtgctgtttctggtgtcggtggggctggtgatttccagctatgacctggtgcaggccgcgcgggtacaaacgaccgagaccggcctgccgcagacgatttacgttatcccggtgttgatcggttccgtggtaatgatggtggccgcgctggaacatgcgctgcatgaacgcgcgcgggttgttctgctcagcggcggcggaatcctggtgctggcggcgctggggtatctgaaactctcgctgatggccgatccggccagcgcggcggcgggactgatgctgatctgttttgcgctgggtatcctggccggtgtgcctatcgcgtttacgctgggcatgtccgcaatggtgttctttatttgcgatccgtcgttaccgtttgtctttttctctcagcaggttgccgccggggtggatcacttcgttctgctggcgattccgttctttttacttgccggggcggcaatggaaatcaacgggatgtcaacgcgtctggttgagctgattgtgcgcgggatggggcgctttcgcggcgggttaaacatgacgaccgtgctgtcgatggccttcttctccgggatttccggttccaaactggcggatgtcgccgcggtgggcggtgtcttgatgcctgcggtgcgtcgcgctaagcaggacagcgaagaggccgcaggggtgttcgccgcatcggcggtgatggcggagaccattcctccgtgcgtaaacctgatcgtgatggggtttgtggcgaatatctccatcggcgcgctgtttatcgccggcctggttcccgccgtctgcctgctggtactgctgatgatcgcggccaaccgttttggcggaaaaattaacgtcagcgaggcttacccggttttacgcccgcgtgcgcagctctaccttggcgccgccgtggggctggtcatgatctttatgattggccgtggggtgatgatggggattgccacctcgacagaaatctccgcctttgcggtgatttacgccatcgttgtcggtcgcctggcgtttcgcgagctgacgctgaaagcgacggtaaaaatgtttattgatatcgcggccatgtccggcgtactgctgttcatcgtcgcctgcgcgaccagcctttcttatgcgctgacgatacagatgattccgcagcaaattgctgaactgctggtggggattggaatggagcagggcgcctggctgttcctgctgttgaccattgtgattctgattatctttggcgcggttctggaaggtgcgccagcgttgatcattttcgcccctatcctggtgccaatcgccattcagcttggatttaacccgctgcatttcggtattgtcatgattctggcgatgggctttggcttattttcaccgccgattggattagggctgtataccacctgcgccatctgcggcgtggagatgaaacatgttattcggccaatggcgaaatatctggcggttgttttcgtcggcatcatcattgtggcgatggcgccgccattaaccacctggttgcctggactggcaggctactga

SEQ ID NO: 77496 - DNA, 486 bp, Citrobacter koseri
atggtactagccctgtgtattcgtgggttgcgaaagggtattgaaatgagcgaaacatatttttatagtgcaaatactaatgcattttatccactctcattgaaaaatgagtatgttaatacaaactcttggcctgatgatttggttcaaatatcttccatatattatcagcgcataatggatagtcaaaccaaagggtttcggattttacctaacgaacagggacagccaacgataaaaaatcctccattacctacagaagaagaaaaaattgccacagcagaggcgaagaaagctgagttgatgcaaaaatctaatgaggcgatgacgccgcttttgtatgcagttgagttgaaaatggaaacagaggaggaagccgcattactaatagaatggaagaggtatcaagtcctgttgagtaggattgatacatcgaaaccagacttaatcaattggccttcagccccgttacaggggctttgttaa

SEQ ID NO: 77497 - DNA, 522 bp, Citrobacter koseri
atggatctcgcgctgatacgaaaatactggaagccactggcgataactctgctggtggcttttttgttatggcgggcatacagcgcggggttcgattctgcggatgccaactggaaagggaagtggttacagcgcgatctggctgactctactgctgcgttgcacagggatgtatccgaacgggcagaagaacagcgccgccagctcgccgtagatgaagaacgggaaagggcagatgaagaactggcaaaagtgcaggctgatgttgatgctgctaaccgtgctcgtggcgggttgcaacagcagctcacaaccctacaacggcaactcgccagaagtgaaaccggccgcatttccgcccttgcagcagcaggcgcggcaaaagcccagaccggaatactgctcgcccagctgctcggcgaagctgacgcaatggcgggagaattcgcaaaagaggctgatgagcgctatgtcgccggaagcacctgcgaaagaacctacgataaagtgacacatcgatag

SEQ ID NO: 77498 - DNA, 1317 bp, Citrobacter koseri
atggccgctaatcttaccgagactgctatacgcggattgaagacaaaaagcacgtcgtactacgtgtggagcaacagtgctcagcgtggtaccggcaggcttggcgttaaggttcagccttcaggcagcaaagttttttatttccgttactacgttgagaaagggaagaaagagaaattcattcagttgggcatctggcctgagatgaaactggtgacggccaatgagctggcgaaaaaatatggagcctggcttgttgaaggaaaagagccgcagcaagagcttgagcaacagcgcctggccgaacagcacatcatgcagatccatcgctcgcagggctcgtttaaagagctggtacatggctacgttaacaagatgaagctcgacaataagcggacctgggccgatgttctgaagcgtcttgaaaaagagtgctattcagtcattcctcgagagaccaaagcgaaggatgtcacgccattacagatcaaaaccgtcctctcaggcattatccagcgagatgcggtggtccatgcgaaccgaattcgttcctacctgatggcggcattcaactatgggcttaaagccgataacgatccgatgaataccagcgtgggcattacgttcgggcttgaagttaatccggtatcggccataccgaagcagtcctctgcggagaaagtgggtgatacatggttaatgctggaagagctacgttttgtcatggagcagttcgctcaggcaactaacgttgggccgttgatgcagcaccttatccgcttctgcgtttatgctggcgggcagcgaccgtttgaaatgattgccagccaatggagcgcgattgactggcagcaaaagacgttactggtcatagccgatgtatcgaaaaacaaacgggagcacctgatcccattgactgaatcggcattaagtgaattagcctcagtgaaagaactgactaaggaaagtaacagcccctatatcttcccgctctcgaccaacggcgaacgaccggtacgtaccgatagcctggcccgttccatcatgtatttccgggcttttaatcctaagtttaaagttttcacagcgcgagatttacgtcgcacatgtaaaacgctgatgggggaggcggggatcagcaaagagatccgcgaccgtatccagaatcacgctttgaatgacgtcagctcgaaacactatgatcgttatgattacttgcctgaaaagcgcagggcgcttgagatctgggaagatagggtcaacaactatcagcgacagcaggaaaacaacgttgtgaacttgtttggacggaggtaa

SEQ ID NO: 77499 - DNA, 393 bp, Citrobacter koseri
atgcaatcccggatgacaaaggacattgtcctgaacgcactgctgatggctgtatggcggcgtaatcccgaaaaacaggtgctggttcattcggatcagggcagtcagtacacaagccatgagtggcagtcgttcctgaaatcacacggcctggagggtagcatgagccgtcgcggtaactgccatgataatgcggttgcagaaagttttttccagttgttgaaacgtgaacggataaagaaaaagatctacggaacgcgagaagaagcccgcagtgatatttttgattacatcgaaatgttttataacagtaagcgtcggcatggttctagcgatcagatgtcaccgacagaatatgaaaaccagtattatcaacggctcggaagtgtctag

SEQ ID NO: 77500 - DNA, 1524 bp, Citrobacter koseri
ttgataatcagcgaaatgcaacgcaagcttgccacatgggcagccaccgatccgtccctacggattcaacggctgctgcgtctgataacacaaccagaatggctggctgaagcggcgcggatcacgctttcatcaaagggggcccatacccccggcgttgatggcgtgaacaaaacaatgctacaggccagactggctgttgagctgcaaatcctcagggatgaattactctcaggccactaccagcccttgcccgccagacgggtttacatccctaaaagcaacggcaaactgcgaccactgggtatccccgcgttgcgggatcgtattgttcagcgggccatgctgatggcgatggagccgatatgggagagtgattttcatacgctctcatatggcttccggcctgagcgcagtgtccaccacgcgatccgcacggtgaaattacagctcacagactgtggtgaaacccggggacgctgggtgattgaaggcgacctgtccagttacttcgacaccgtacatcatcgactgctgatgaaggctgtacgccgcaggatcagtgacgcacgtttcatgactctgctgtggaaaaccatcaaggcgggacatatcgatgtcggtctctttcgggcggccagtgaaggtgtaccacagggcggtgttatatcgccgctattatcgaacatcatgctgaatgagttcgatcaatacctgcatgagcgctacctgagcgggaaagccagaaaagatcggtggtactggaataacagtatccaacggggccgaagtacggcggtcagagaaaactggcagtggaaacccgcggtggcgtactgccgctatgccgatgattttgtcctcatcgtcaaaggcaccaaagcacaggcggaagccatcagggaggagtgtcggggtgtgctcgaaggcagtctgaaactcaggctgaacatggataagactaaaatcacccatgttaatgacggctttatctttctggggcacaggatcattcgcaaacgcagtcgttatggcgagatgcgagtggtctcaacgatcccgcaggagaaagccagaaacttcgccgcatcgctgacagcactgttatcaggcaactacagtgaaagcaaagtcgatatggctgaacaactcaaccgaaaactgaaaggctgggccatgttctatcagttcgttgattttaaggccaaagtcttcagttatatcgaccgtgtcgtgttctggaagctggctcactggctggcccgcaaataccgtacaggtatcgcttccctgatgaggtggtggtgtaaatcaccgaaaccgggtcagagcaaaacgtgggttttatttggtaaaaccaatcacggcaagctcagcggcgaaatactgtaccggttggtggggcaaggcaagaagctgttccgctggcggctacccgaaggtaatccctatctgaggacggagaccagaaacacgtatacatcgcgctttacagaagtggcaatggcgttcgccagcatttaa

SEQ ID NO: 77501 - DNA, 1152 bp, Citrobacter koseri
atgagacgaacatttacagcagaggaaaaagcctctgtttttgaactatggaagaacggaacaggcttcagtgaaatagcgaatatcctgggttcaaaacccggaacgatcttcactatgttaagggatactggcggcataaaaccccatgagcgtaagcgggctgtagctcacctgacactgtctgagcgcgaggagatacgagctggtttgtcagccaaaatgagcattcgtgcgatagctactgcgctgaatcgcagtccttcgacgatctcacgtgaagttcagcgtaatcggggcagacgctattacaaagctgttgatgctaataaccgagccaacagaatggcgaaaaggccaaaaccgtgcttactggatcaaaatttaccattgcgaaagcttgttctggaaaagctggagatgaaatggtctccagagcaaatatcaggatggttaaggcgaacaaaaccacgtcaaaaaacgctgcgaatatcacctgagacaatttataaaacgctgtactttcgtagccgtgaagcgctacaccacctgaatatacagcatctgcgacggtcgcatagccttcgccatggcaggcgtcatacccgcaaaggcgaaagaggtacgattaacatagtgaacggaacaccaattcacgaacgttcccgaaatatcgataacagacgctctctggggctttgggagggcgatttagtctcaggtacaaaaaactctcatatagccacacttgtagaccgaaaatcacgttatacgatcatccttagactcaggggcaaagattctgtctcagtaaatcaggctcttaccgacaaattcctgagtttaccgtcagaactcagaaaatcactgacatgggacagaggaatggaactggccagacatctagaatttactgtcagcaccggcgttaaagtttacttctgcgatcctcagagtccttggcagcggggaacaaatgagaacacaaatgggctaattcggcagtactttcctaaaaagacatgtcttgcccaatatactcaacatgaactagatctggttgctgctcagctaaacaacagaccgagaaagacactgaagttcaaaacaccgaaagagataattgaaaggggtgttgcattgacagattga

SEQ ID NO: 77502 - DNA, 231 bp, Citrobacter koseri
atgagccgtcgcggtaactgccatgataatgcggttgcagaaagttttttccagttgttgaaacgtgaacggataaagaaaaagatctacggaacgcgagaagaagcccgcagtgatatttttgattacatcgaaatgttttataacagtaagcgtcggcatggttctagcgatcagatgtcaccgacagaatatgaaaaccagtattatcaacggctcggaagtgtctag

SEQ ID NO: 77503 - DNA, 450 bp, Citrobacter koseri
atgacgattcacaatatgcaatttcgcatcattcgtaccgccctgaaccacatgggcaaagttattcataccagagatttaacacctcgctcacgggaacgctggtattgctgctcctgcaacaatcctttgagactacgctggacgcatgacagcggcggttattttgaacatgacctggaagaagctgaagaacttaagttaagacagtgcgagtatcaggccattccccaagagaaaccagtatcagcttttgagcaggcagttaatgcactgatggaacgtgatgacacaccatctacaggtccctcaaaaaaggattatttccgcgtgctctgccagcgtgaatattatggtctccggtgctgtccggaatgcaggcagcatatctacagtacggaaatgaaactctttgatattctcactgttcctgaaaaatttgcgaaatga

SEQ ID NO: 77504 - DNA, 207 bp, Citrobacter koseri
atgaccacaccaaccagcctgcttaacgataagtttgtcgatatggcattcattacacagctcaccggcttaaccgacaaatggttctacaaattgatttcattgggtgaattcccaaaacccattaagcttgggcgtagctcccgctggcttgaaagcgaagtggaagcctggctacagcagcgtatcaccgactccagaggctga

SEQ ID NO: 77505 - DNA, 582 bp, Citrobacter koseri
atggaatacgtaatcaactcaaaccacaaaccagactattctcttcagtcagtattatttaaccatcaggaccggttatttgactgtcattcgaaattactcatgcttcgggtggatttcgcatacaggaaaaactctgattcatacgcgtatggtgatattcatcaactggtggctgagatgacatggctgactgagcaatgcgcagagatatctggtctggagggatatgcctgggtaatggaatatgggggagatcaccgttaccacattcatgcggcgttttatatcaatggtcagagccaccggaaggcctggtgcttctggaaatccatccagttgctgtgggaggacattacggacggagaaggctacgcgcaccggtgtgagcctaagggacattaccgggtgcgaggtgaacgagtaatcaacttttctgatcgcagaggaagggaaggtatgcagtacatcctgagctatctgggtaaacagtcgcagcgtacagagcgccggatttacagagtcagcgcagtcccggtagtgtccgtaacaggcagaccccggagtcgcgttatcggctaa

SEQ ID NO: 77506 - DNA, 1104 bp, Citrobacter koseri
atgagaagggacggactgaatgatttttatgaagtgaactttctgaggttaagggagatagatgccacgtatccatcggaacccatacgttacgtggacctggctgacatatacagcttcatcagctttaaagatgcagaatgtgaaaaaataccgcctgataaactttccactaaaaaaagaaaaacgcaggtaacagacggctacgcatgcaatcttttgtcggacattcttaaatatgagaattcattacgccctggctcatcccgttctctcgcgggaacgcataaatatttgaagcttcattgcgaagcaaccccagaatataaagaagaactgaagaaaaatcttattcataaagaagatgtgctacttaaaatccagactgaatataacaaaataaaaaataaagcatccggaaaaatcacaataatcccaatcagctttcacctcagctgcaagacaaatggaatacttgaacacatcatcgatgacttaaccataattaacatagccttttcctcgatgatgagtaaaataaaacatcgcacaatgtacagccggatagccggacatgtaagactgggcatgctgggcgagaattttgagcctttcgcccatgtgttattttttattcaggacggggctgtcagtcatgactttatcagggaaattattgaggtctggtactctttcatccctgaagacattgaatgcctggtgggtgtttctggttttgactttaatttcttactcaacttccagcgtgaagtcatcaacaaacaaaaaagttctcccacgccaggaggaatagactttttcatatccgacatactgaatccgttccctgatgtcactgcacctggctatcggcgtcatgaaccctgcacattattctcccgtctgctcagaagaacagaaagggaagataacatcaacagaacccaccgacgacgtcttgctgacagggaggcagaaatcagtgcgactaaaaaaaagagtggttatgacaaactgaaaaacacaccagcaattcacagggaatattttttaagaattgcaaaaaaaatcaacaaaattccttttatgcgtaccataaactga

SEQ ID NO: 77507 - DNA, 888 bp, Citrobacter koseri
atgaaacatccttcgggctatgcccttatccgtcgccatctgcggcgctatccccgtattctgcggcagcatcttctccgggagctcagccgcctcgtcgcgtatgaacccgtgattggcatcatgggcaagaccggcgtcggcaaatcctcgctgtgtaatgcgttgttccggagtgaagtctgtgcggtgaatgccgtggaggcctgtacccgtcagcctcagcgtgtacgtctgcgcttcggtaaccattacctgacgctggtggatttacccggtgcgggagagagcatcagccgtgacaacgaataccgtgagctgtaccgcgaactcatgccacaactcgatatggtgctgtgggtgctcaaggccgatgaccgcgcattctcggtggaagagcttttttatcaggaggtattcgcacaatacagcggaccgctgccaccggtgttatgggtcctcaaccaggtggataaaaccgaacctgcagcgcactggaactggttatcggcgcagccatcagcattgcaggctgaacgtattatacagaaacaacagaccgtggcccgtcagatgggaaccgcagagacgaatatttttccggtgtcagtcagggggcggtaccaccttccccgtctggtggaggcgatgattacccgtctcccaaagcaggcccgcagcccgctggtgcctcacctgcaaagcgggtaccacacccccggcattatcactaccgcccgcaacagctttggcgatgccgtggtggaagtgattgacgcagtcatcgacctggccccgttgccacaggctgcacgttacgcgctccagaccgtcacacacaccgtggcccgagcggcccggaccgtctggtccttcttctttggctga

SEQ ID NO: 77508 - DNA, 402 bp, Citrobacter koseri
atgaaaaggttttttatggcgctgaccgccagtctgttgttcacctcacttccctccctggccggcagcgatatgcccgttaaagtggaggtcagccatgccggccatgagtgctatggctgcatctatgtcaccgtgacagcaaaaaccgacaccgttctgataaagaaaatcgatgttaacaggggaaaatgcccgatgctgacacaccgaaaaatagcctacaggggccggaatgtggatggctggtggcccacagataaaccgttcacaccccgtaaaatgaccttcgctgagagtgtcttctggaaatttggtcacactttggattttggtaaagcctgcaattttgttgaggcccgggtgttcaccgatcagggcacattcaccgtcagccagtga

SEQ ID NO: 77509 - DNA, 468 bp, Citrobacter koseri
atgaaaaagaaaatactgcttttcactcttctgatatctgctctgactccggcagtgtcacaggccttcggtaaccgtgatacctgggccagcggctggggtcagggcgtgtctgagtttgtaattctggggaaaggacagtcacagctttacctgacctgcgaagacaccggctcacaagcggccaccctgaccttcaccgacgcaaacggtcatcaggtcaggatggataacggccagtcgctggacatgaaaattgacgatgaggagcctgtcagcgtcagtgacagcgagtcacatgtgggctcagacaacgtggcatgggcatgggataaactgcgcaccggtaagcgggtcattgtgtccggggagggcgtaaaggcagccgtgtttacgcttaacggtgcggggaaggtccttcccgcgttcggggacagcggctgtctgccgaaatatgccctgccgtaa

SEQ ID NO: 77510 - DNA, 150 bp, Citrobacter koseri
atgcagaccactgataatgcgtcgctgccacccggccccttcacccgccgacaggcggaagccatggccgcacgctatctcaacgtcaccgtcgaagacgaccagggccccattttcgtctggtcatccgcgactgccgtggcatgctga

SEQ ID NO: 77511 - DNA, 819 bp, Citrobacter koseri
atgcgcttagccagccgttttggtgcggccagtctcgtacgccgcgaccgcccactgacccgtgatgaactggcacactatgtgcccagcgtattcagtgaagaaaagcacgaatcacgctcagaacgttatacgtatatcccgaccatcacactgcttgataatctgcagcaggaaggcttccagccgttctttgcctgccagacccgcgttcgcgacctgaataaacgcgaccacacaaagcacatgctgcgtctgcggcgtgaggggcaaatcaccggcaaacaggtccccgaaatcatcctgcttaacagccacgacggctccagctcataccagatgctgccgggcctgtttcgctttgtctgccagaacggacttgtctgtggcgaaacctttggtgaggttcgcgtaccgcacaaggggaatgtggtggataaagtcattgaaggggcttatgaggtgctggggatatttgaccgggtggaggagaagcgggatgccatgcagtcactgctacttcctccgccggcacaacaggcgtttgccagagccgccctgacgtaccgctttggggaagagcaccagccggtgacggaagcacagattctgtctgcgcgacgctggcaggatgaaagttccgacctgtggaccacctaccagcgtatccaggaaaacctgattaaaggcggtctgccgggcagaacaacgaaaggtaaacgggcccacacccgtgcggttaacggcattgacggcgacgtgaagctcaaccgcgccctgtgggtaatggcggaaagcctgctcgggagcctgaagtaa

SEQ ID NO: 77512 - DNA, 264 bp, Citrobacter koseri
atgcagtgtattcctggcggcgtgattcaggtttcgccacatccgttctccctgatcagtgagcaaagctgccgctccatctctgatgacgacctgtgcgcctggtgctctcaccttctttatcgtcccggtgaactcagccagtgcggcataagtatccctgaggggcactggccttcacgctgtgatgatgatggctatgtgcagttctgtccgtcactttgtcacaacaacccacatgaaaatacaaaggaaatcaaatga

SEQ ID NO: 77513 - DNA, 477 bp, Citrobacter koseri
atgaacaacatactcaccctgaccagtccggtgactgaatctctcacctcaccacgtactgatacagaccgcatcgaatgcatgcccgtacccgatgaacagcgtgccgccttctggccacagcactttggcagcgtaccgctgtggataaccctggagccgcgaatcttcgcctggatggaccgcttctgcgcggattacagcggcggtatctggaatttttattcactcagcaacgggggcgcgttcatgactcccgaagctggcagcgatgaaaaatggtcattgtttaacagtatgaacggtaacggcggtgagctcagcgccgaagcaaccgggattgcagtctgccttatcgcttacagccatcacgcctgccggacagaatgcgatgccatgacggagcactattaccgcctgcgcgattacgcgctgcatcatcctgaatgcaacgccatcatgcacatcatcgactga

SEQ ID NO: 77514 - DNA, 480 bp, Citrobacter koseri
atggaacaacagctaccactgtttgccactgcactaccggcatccgcacagcagaccatcagggatgcgttaatcctgctggcgtgccagctacgtgaacccggcgcgtcattcacgtccagccatgcggtccgggactggctgcgtctgcagcttgccacccttgaccgtgaagccttcaccgtcctgtggctggataatcagcatcgcctgatagtccacgacacgctgttcctcgggacggtcaacgctgtcaccgttcatccgcgtgaggtcgttaaatccggtctgaaaaataatgccgccgctgtcgttcttgcgcataaccacccgtcgggtgaggcagaaccgagtaaagccgaccggctgattacagagcgcctgcagcaggcgcttgagctggttgatattcgtctgctggaccacctgattatcggtgggatggatatcgcctcgtttgccgaacgcggctggctgtag

SEQ ID NO: 77515 - DNA, 222 bp, Citrobacter koseri
atgaaaatcatcagtaagcgccaggcgatggcgatataccgtcagcatccgcagtcccggttgtttcgcttctgtaccggccggtatcagtggtcaggcagtatctgccactatgccggtcgggaagtgcaggatatcagcggtgtgttggccgtattcgctgaacgccgccaggaccgtaacggcccgtatgtcgtattgcgcagcgttaccctgaattaa

SEQ ID NO: 77516 - DNA, 366 bp, Citrobacter koseri
atgcagaatacaacaaatccagcaacccatgatattgccggaccttggtggggacttaaacccaccgtcacgccgtgctttggcgcacgactggtgcaggaaggcaaccggctgcattatctggctgaccggtccagtatcgccggaacattcagcgatgcggatttacgccatctcgaccaggcgtttcctcttctgctgaagcagatggagctgatgcttaccagcggtgagctgactccacgccatcagcattgtgtcacgctatatgcgaaagggttgacctgcgaggccgattcgctcggctcgcatggctatatctatatcgctatttatccaacaccaggcaacagcgtaacccgttaa

SEQ ID NO: 77517 - DNA, 342 bp, Citrobacter koseri
atgcaaacccagtcattatccccaacgcgggaggcttcttcgcgcccgtcccctgtagagatttggcagcggcttctgggccgcctgctggatcgccactacggtctgacgctcaacgacacgccgttctgcgatgaagcagtcattcaggaacatattaacgccggtatcacactggctgatgccattaactttctggtggacaagtacgaactggttcgtatcgatcgcaggggagttagcaggcaggaacaatcgccttatcttcgggctgtagacattttgcgggcgcgacaggcaacgggtctgttacgacaaggccataatctttcgacacgctga

SEQ ID NO: 77518 - DNA, 834 bp, Citrobacter koseri
atgcaaacagaagctgaagtcttaactgaccataatgagataatttgctcaaccagtatcgaacgcatcgtcacaggacgtgatgctgcgctgagcctgatggaaatcctgaaccataagcttgatgatatctcacggctaacctccagcatcggtggtgatgtggcggagcattgggcgatgcgagagggccattcctttgactgctggctgatgcaaccagtagataaagcgatgccggtgattacccgcaatatcgatcgcagtatctggcgcgatctcatgctgaagtccgggatgttgaccttgatggatgccgaagcccgcagccagtgggctaaaaacctcgaagagggcgatcttccggccatcagtgaagccaacatcctgagtacctttgaacaactccaccacaataaacaggatgttttcgaacgtgggattatcaacgtattcaaaggactaagctgggactataaaaccaacaatccctgctgtttcggcaagaagatcatcatcaacaatctggtgaagcacgaccgatggggctacagcctgaactggggctggcggcgcgatcagttagctgatctggaacggatgctctacttgctggatggtaaaaccattcccgataaccggcatgatgtctccatccggtttatggattttgtgcgcgacaatccgtatcagcagattttcgaagatgagttgttcactattcgataccttcagaagggcagtggacatatcacgtttaaacgccttgatctggtggagaagataaatgacatcgtggcgaagcactttccggggatgttgcctgctaaatga

SEQ ID NO: 77519 - DNA, 249 bp, Citrobacter koseri
atgggttcgcttactaaacaaaccatcagtgcacagatacccgttgaattagctgctgctgttgaaaatctggcaattgagttagaccgttctaagagctggattattaaagaagcgttgaccagtatgctggccgaaagagaacggcgtcaccagagcatccaggccggtcttgcggatgtggatgccggtcgcgtggtgagccactcggacatggtggattttgctaatcgcttaaagaaatcctga

SEQ ID NO: 77520 - DNA, 798 bp, Citrobacter koseri
atgttacagaacaacatcaaacagcttcgtacccagctatctatcacccaacacgaactggcatttatggtcggcaccagccagcagcaaattcagcgtatcgaaaccggaaaagtcgccgcaaagttgagtctcgcgcaggcaatatgcaatgccctggataagcctctaaatgtcgtgttcccggaaagcgatcggttgataaacgacttccgcaagaagcgtcgtaaaaccgatgaagatcttgaagtgatagccacaagtggcattgaaatggacagtggtctctggaccgtaaaactttggctacagggacatcaggactatttgctgttgcccatttcagcggcggataagcggaggttttattattattttcaggaaaaaaccgccccaaacacagagcgcttcttcgtttttgattcttccgagtatcgttatgcgttaaatgtgcgtgaagtggtatttcaccagtttttgtctgatggtctgcggccaattgttgacgaagaggatgatgcctacgaagacgattattttaatgtccatatcactttggcgaacggagggggtgatattccactgtgcgttgagtctgatgcggcgcaaaacgaagaggtggatgatatcggtcagctgaatgcgttctttgaaacgctggatggcgagcctgaaacaacggatcgttacatgctgaccgacgaggatggggaagatgcttttatccgtattggttctattgcgatggtgcgagtcgcgcttgacgcgttagagcctgtggaagaagacgaggagtga

SEQ ID NO: 77521 - DNA, 228 bp, Citrobacter koseri; identical to SEQ ID NO: 75560

SEQ ID NO: 77522 - DNA, 357 bp, Citrobacter koseri
atgccgcatcctgagcagttcgcttcacgtgaggattattacggcacgctactgcatgaactgacgcacgctaccggacacgcttcgcggctgagtcgggacggcatcactgccggaaaccatacctttggcgatccgacgtacagttttgaggaactcgtcgccgaaatgggatctgcatttctctgcgcccatgtcggcattcaggcgaaactacagcatgacagctacatcgcatcgtggctcaaggtgttacagcaggacaaaaaagcgattttccgcgccagcgggttagcgcgtaatgcctgcgagtatctgcttgaacgggcgcagcagccgttagcgctgagcgcatga

SEQ ID NO: 77523 - DNA, 273 bp, Citrobacter koseri
atgaaactgattatcacgccccagcgtgcggatattgaatgcagctattctgtcacgggtgacgtactgactgcggtcgtaggtggaaaatctgacactttcgacttctcaggcatgcccgatggcgaggctggcgggttttgctcattactggaaccgtgcccggttctgagggcagtaaaaaagaatggcgagctgtctgttaccgtcattggtttttacggagaagatgctggtgtgctggaaaaaacagaacgggtcgaggtgtactga

SEQ ID NO: 77524 - DNA, 963 bp, Citrobacter koseri
atgccttcaggattactgattgatttgaacgacggcggtccacgcatggagattaccgcagggatgcgctgcccttcctacttgctgtctgttgctgatgcgtggaatgtttctcagtcgataaccatccccagaacagcgggtagtgatgtgtttgtcgcaccgaaaaatactgtagatatggaatactacggccccaatcttataccaactattatgatgctggattcgtgtaccgtgtcaggtaatacgctggcgcaaaatatctggtggagcgatagtatcagtcatgtacagagaacctttgcggccactgtatgggaaatattacccgtcgcaacgggaagtgcggggctgctcatcagcaacagcactgatttcaccgctatcactaacaacacgaaagccgggttttgtgtgtggcgcggcgatattacgttcaccggttcatggactacgcccacaacatctataccgcgatcgaattatgttgttttcgcgaaatggagtgcggcaggagtcacgattgagtttgacggtaacgttatcacggcctaccaggaacgggacggtgataatgtggctgcaacagtcaccatgcgtgttgccatattcgcaagtggtatcgggccaacacctggcacaggtctgaatatcattaacgcacaggggcagtgtgtgttttcaacgacaagcagaccgtttgtctacctcgggaataaatacgccccatcgtggaataataccgatatcggtgacagcatgatcatgctcggcagatacggatttcagagcatcagagcggagggatggtcgcgtctgaagtgggcagggctggtcagaagcggtaatgttgtgcgatgtgcaagaggccgtcaggtggcggtctgggatcagaattactcagttgtaaaccgacgtctgacgggaatagatattccctgcatcccggccatttattaa

SEQ ID NO: 77525 - DNA, 288 bp, Citrobacter koseri
atgattaaattgctgcatggagctgtaatttgcaggcctttcgcaaagcaacctgtgctaagtgaaaaagaaaagaagcaacgtgaaattgatgatgttgaaaggtgttgccgattcgaggctgacgactgggatgctccagactttaaagcggttttggggcctcataactggcgcagctacattacgccacagctcaaagacgcatggccgtcattcactgactggcaaaagaaagtgatagctcatgcgttggatgatgctgcatcacacgaagaatgggattaa

SEQ ID NO: 77526 - DNA, 438 bp, Citrobacter koseri
atgcccgttaaaggtatcaagcgtgttcagatgaacacccacaaggtgctggcagaaattgccgggccacgcacagaaagagtgctgactgaggtcatgattgtcggatcgtctcacgccgcgctacttactcccattgacacatccactcttatcaacagccagtacagaaagcttgaaccaatgccaggtgggatgcagggaaaggtcgggtacacggctgcatacgctgccgccgttcatggcatgtccgggaagctaaaaggccagccgcgtgaacacttcggcagaactcgcgctggaaaagaattcggtggcggcacaggaaaaggtaactattgggacccggacgctgaaccagaatttctgactaaaggctttgagcgtgacggtctcaacgagataaaggccatcatcaagcaagggtacaaagtatga

SEQ ID NO: 77527 - DNA, 1323 bp, Citrobacter koseri
atgaaattaaaggtcaaccacgaagcaaagcgtccagttccggcgtcgaaaaatggtgagcatattcaggtcaacatcaccacgaaggtgaacagccagtctatccggcgcgaaacacataacggtcgtgagcatctggtgctgcctagctacacgctgccggccaatgtcgttatgaatggcggtctgtacacgcaggaagaaatcgacgcccattatcaggggcttgaaggcactctggcgccactcggccatcctcaggttaacggccagttcgtttctgcattctccccagagggaattaacgcaggccatattggcgcgtggaaccgtaacgttaagaagtccggcaatcgtatctacgtagaaaaatgggtggatgtggctcgagcagaagagtcggaaggcgggcgagaactacttgagcgcgtcgcagctattgagcgtggcgatgacgttccgcccattcataccagtgtcgccgctttcctcgaccagcttgaaccaaacgaacagcagcgtgctaccggagccgagtgggtggcgaagatccacagcatggaccacgacgcgatcctgctgcatgaagtcggagcagcaacacccgagcaaggtgttggcctgatggtcaatgccgatctggctcagccgcttaaggcgaactccggcgcgctggtgggcgaatcctaccgggagcgcgaacagcgtctcgatcgcgcagctaaagcgaagtttgcggcgggcgcggatgaatacgcctggattgctgacttcactgactcgcaagcggtaatcatccgcaacggcggcaccgctgaggtttttggctacaaatcagagggcggcgttatcaccttcgacgataccggcaccgcagtagcgcgccaggagtcatgggtagccgtagtcgccaacaaattcaaagctctattcacaccgcaggaacagcctgcaccaaaccacaaaacggagggcgacatgcctttaaccactgaagagaaacaagagctgatcagcgaaatcggtaaaggtctggccgccaacttcgccgaagccctgaatccgattaaggacgcgatcgtcggcctacaggccaaccaggacaagctcactgaaacgctgactgctaactctcgtgccgaagagaaaaccaagcgtgaagcagtggcaaaagttcacggcgagattgtcgctaatgcgctgtcaggtgaagcgctggacgcgatgtttaaaacaatcggtgaatccgcgccgcttggcaccaactctgcacaacagcagaaagaaaccggtgcgccgaaccctgacgaatacttcaaataa

SEQ ID NO: 77528 - DNA, 951 bp, Citrobacter koseri
atggcgacaaagaaggcgaagccaccaattctaccgcgtaactatcaggatccgaccggagccgatgcgctggaacgccgggcaatgaaagacttcgccaggcggatgaataagattggcaaagcgtacaaatcagcactcgacaaaataccttcctccctcgcagtaaacgccagatacgaataccagctaaacccaacgctgctctccatcatcctgaacgatgccagttacctggtggatcaggtgctgcttgaaggtggcgattacgacctgtggttttacgagtacatcgatctggcttcggagaaaggtaccgggcagtcgttctacaacctcagccagcagtcaccggtgtacgccgccgggcgggagtcactggcatccatcctcgcaagcgacccgtaccagcaacgaatggcgctggtgcatgcgcgcgtgttcgaggaaatgaaggggattactgctgatgttaagcgagatatggcgcgagtgctgactgatggagttgggcgagggcttaatccccgcgacattgcccgtaacctcacggagcagaccggcatcgagaagcgccgggcgaatcggatagcgcgcaccgaggttacaaatgcccttcgccgtgcgcgctgggatgaatcagaagaagtgatggctgatcttgggcttaatctcaggttgctgcacctttcagcattaagcccaaccacgcgaataaagcacgctctgaggcatgcgcacacctacacagttcaggaggtaagggactggtatgcagttgatgcaaacgcaattaactgcaaatgcggccaggtggaagtgcttgttgatgcagatggtaagccgctttatccgaacgtcatcgagttggctaagaaggaattcgacagccactggaagaagatgaaggtcaaccattccagttgctgcggttataaacacgcggcatag

SEQ ID NO: 77529 - DNA, 1350 bp, Citrobacter koseri
atgactgacaaattaacgctagccgtcaatcacgcgctgaatgacgtcaggcttgctcgcgcccgtatggggctgatggcgccaacgatggggctggacaataagcgccattccgcttggtgcgagtatggctttcctgagcaggtaacctacgaaaacctctacgctctctaccgacgcggtggcatagcccacggcgcagtagagaagctggtgggcaagtgctggcagactaacccggaaatcattgagggtgacgatgcagacgagagcgaaaacgaaaccgcctgggaaaacaagtcaaagcaggtattcaacaaccggttctggcgctcattcgctgaggcggatcgccgtcgtcttgtcggtcgttatgcaggaatacttctgcacgtccgcgatgaaaaagactggaaccttccggtaaccaaagggcgaggtcttcagaaaatatcagtagcatgggctggatcgctcacggtcagcgagtgggatactggcctgaactcgaagacttacggtcagccgaagatgtggcagtatgccgaacggttgccgaatggttcaagccgccgcgtcaatattcaccccgatcgcgttttcatccttggtgattactcagacgatgcgatcggcttccttgagccatcctataacgcctttgtcagtctggagaaagtcgaaggtggttccggtgagtcattcctgaaaaacgcggcgcgccaacttgctctaagtttcgatagagagattaattttggcgagatagcgtcgatgtatggagttagcgttgatgaactgcaggacaagtttaatgacgcagcacgcgagatgaaccgcggaaacgacgttttgatttccctgcaaggagcaagcgtaacctctctggtttctccagtttcagacccgtctccgacctatgacgtgaacctgcaaaccgccgctgccggggtagatatcccgacgcgtattcttgttggtaatcagcaagctgagcgctccagcaccgaagaccagaaatatttcaattctcgctgccagtcgcgccgcgtggacctttctttcgagatagaggacttctgcgacaagctcatcgatctgcaaataatcgacgccgtcggtcagaaagcggttatctgggatgacctgaacgagcagaccggcactgagaagctcaccaatgctaagaccatgggcgagattaaccagacgttccaggggagcggagagaatccggccttcagccgtgaagagattcgtacagctgcgggttatgacaatgacgacgaagagccgttaggagaagaggatggcgacaaagaaggcgaagccaccaattctaccgcgtaa

SEQ ID NO: 77530 - DNA, 456 bp, Citrobacter koseri
atggctgcattaaaaccggaagtgaaagccgccatcgttcaaatgcttgcgtgctatgacagcctgtcgattgttgtcgatgctatccaaaaggattacgggataaaggtcaccccgcaacaagtcgaatcgcacgatccgacgaaggtcagcgggaaaggtttggctaaaaaatgggtcgatctgttcaacgctacccgcgaccgcttcctcaacgagatatccgacatcccgatcgccaataaggcctatcgtctgcgagttctagaccggatgatgaacaacgccgagaagatgagaaacatcgcattagcgaccgaaatcatcgagcaggcggcgaaggaatgcggcgatgcctacactaatcgccagaaagtcgagcacacaagtcctgatggcagtatgaatccgaagccgaccatcatccagctactacccgtagagccgaaagcatga

SEQ ID NO: 77531 - DNA, 639 bp, Citrobacter koseri
atggcagagagagaagaaaaaaggccatatcctccggttaacttcatcgcctccgacaactggcagccatacacgcggctgatccccgcaaacgaagtgcatgagtggataagccgacaaatactcagtgatgacggaagcatccataaccctgaccacgaacacctgcttgaagccgatctctgcttcatgtgggcgtctgactcgttcgcgaagaaagggcgctacgttctcggccaggccgaacaggtaatgctccgtgccggcggatggcagaaagccagaatggagcagcagatgtatgaatggttcgggcgcattccgaagttcatcatcacgctggcagccgattactgctcacaatgcagtgaccttgaattctgcgcgctggtagagcatgagctttaccacatcgcccaggccactgatgattacggcgcgcctaagttcaacaaagagactgggcagccagtgcttacattgcgcggccacgacgtggaagagtttgttggcgtggttcgccgatacggagcgagtgccgacgtgcaagagctggtggacgcagccaatcaacctgcagaggtggcaaaacttaacatcgccagagcgtgcggaacgtgcatgctgaaactggcttaa

SEQ ID NO: 77532 - DNA, 474 bp, Citrobacter koseri
gtgattggcgcgctgattaagcgttactggttgcaatttctggtgctggtgttaatcggcgtactggcgttcctcatgaaccactaccgcgacaacgccatcacctacaaagaccagcgtgataaagccactgagaaactcagcctggcgaacgccaccatcaaagacatgcagacccgccagcgtgatgttgctgcgctggatgccaaatacacgaaggaattagccgatgcgaaaaaaaccattagcgatttgcgtcgggatgtcgattctggcgctaaacggctgcgcatcgccgcaacctgcactggagtgtcaaaagccacctccgccaccggcgtggatgatgcaagagcccccgaacttactccagacgctcgacggaattatttcgatcaccgggacggaatcgcaaccgctgacaaaatgattcgcggcatgcaggaatacatcagcactcagtgcctgaaatga

SEQ ID NO: 77533 - DNA, 441 bp, Citrobacter koseri
atgcaaaccagcgaaaagggcattgccctgatcaaagagttcgaaggctgtagactcaccgcctaccaggacagcgtcggagtgtggacgatcggatacggatggactcagcctgtcgacggtaaaccgatccgcgccgggatgacgattaagcaggaaactgcggagcgcctgctgaaaaccggactggttagctacgagagcgacgtatcccgcctggttaaagtggggctgactcaggggcaattcgacgccctgatgtcgttcacgtataacctcggcgcccggtcactgtcgacatcgacccttctgcgaaaactaaacgccggtgattgcgctggtgcagccgatgagttcctgcgctggaataaagcgggcggtaaagtcctgaatggtctcacccgtcgccgggaggcagagcgcgctctgttcctttcgtga

SEQ ID NO: 77534 - DNA, 276 bp, Citrobacter koseri
atgacatggcagcttcttctgatggatgcaaacgccatagtttgcctgttaatcatggtcaggctgatgtttttccggaaagagggaaagcgtcatcgcctgagtgtcgcggtgctggcctacctggtcatccttgccgccggattcaatgccttcaacatactgctcggccactacgttcaggttaacctcggcgatctgctgcttaactctgtcatctgcatggcggtgtggctggcgcgcggtaacctggcgaaggtcgttataacggagtag

SEQ ID NO: 77535 - DNA, 402 bp, Citrobacter koseri
atgtctgagtccttcactatcgtaggcgttggccttacatcgtcatcagtcggtgtaacctttgccacgctgttccctgaggcgactccagcagtgatgctcggatcgcttgccggaacggcgctatacgttctgacctcagatccccatcaactctggaagcaggctatctttgcgctgatatcgtttatcagtggcgtgttcttctctgtgccaatgtcgaaaatcatggccgggatcataaacacgcctttaagcctgatgaagccaccggccagcatagaggtatctccagctgtaggtgcaattgtcactgcttccatttccgtggcagtcctgctgcgtattctccgcaaatccaaaagcgggaagatgcctgggctgggggaggaagataaatga

SEQ ID NO: 77536 - DNA, 1182 bp, Citrobacter koseri
atggcgatcagtgacactaagcttcgctctatctatggtaaaccatattccggtccatctgaaatcacagattctgacggacttgggatacgtataacccctaaaggtgtcgtcagcttccagttccgttttcgctgggatggtaaacagcaccgtttgggacttgggcgctaccctgctattaccctccgcgacgcgcgtaacatggttgcagatttacgggagtccgtcgatagaggtattgatccgcgcgtgcttgccgggagcaataaatcaaagaaaaagccaacagtaaaagactgcctggattactgggaggaaaactatgttgatgtggccctcagggataagacaagggcactttataaatcgacagtcataaagcatatgagtgatgcttttgctggaatgccgatcgaggaaattccagtacgcctgtgggttgagcgatttaccgaagaagaacggttaaacccacgccgcgcccgtcagttgctggtgcagcttcgctcagctataggatggtgtacgcgcagacaatttatcagcacaaccgaactgatgctactacaaccaaaagacgtaggtattaaaccatcggttggagaggttactctcagctataaccagcttgctaaaatatggctggcaatagaacggagtaggggatctacttctaacaagctgcttcaccaattattgatgctttatgccgccagaaacagcgagcttcgcttggccgtaaaagacgaatttgaccgggaagagggggtatggaccgtcccagcagaaaagagtaaaacgaacaagattatcaggcggccactattcgacgcagctgatgagttgcttaaaaaagcagaaatgacatacgggaataccctttttcctgggccagatctaaaaaaatctatgactattgccggtgctaacaggtatctcggcaggattaaagcgtcgctgtgtatcggtgaatttaccgcacatgatttcaggcgcactcttgcgacgaggttatcagaggagggagtagccccgcacgtaattgaaaaaatgctggggcatgagctgggcggcgtactttctgtttacaacaaacatgactggatcgctgaacaaaaagccgcctatgagctatacgccgaaaaaatattctggcacatcaagaagatttctggttaa

SEQ ID NO: 77537 - DNA, 192 bp, Citrobacter koseri
atgagtaatattgaaatgattgacgaaaaagaagtaatgcagatgatccgggtttcgtctcgtatgactatctggaagtacaccaaacatcataacttcccgaaaccaatccgaacccaccccaagcaatacttacaatctgaggtggaggcgtggattttaaacggtggcattaaccagaaatcttcttga

SEQ ID NO: 77538 - DNA, 147 bp, Citrobacter koseri
atgaataaagcgtttgaagtatgggtgcgccagcggtacggaagccgctacgaccttacgagggatatagaagggttttactgccgtgaagtggttaaacgaatgtttgaaacgtggtgccactgccgtggcctgaatgtggcgtga

SEQ ID NO: 77539 - DNA, 480 bp, Citrobacter koseri
atgagcaacaaaattcttaacccgatcgtgcttatccataagcgcgaaaacagtgactcctacgctgttgcgatcaccagcggcagccaggactatcacgacgccgttctgatggcaacgatggaaccggacatgaccggcgataacgccgatacctggagtaaaaccggctattacatggctgaggagattcagcgcttacgccagcagttgatcgccccattgagcataggggagttaattcagcgcctggaatctcagactggcgaccgctgggagagagtggttaacgatgtcactgatggtaaaccgttgaccgctggcgccagcatttcattcaccatagacgaactctccgcaatgtttagctggatgataccgccgtacgtcgtcgccaatacgcacacagacgagttcaacgaattgcgtaataaagtcttttctgctctgcgtgacgcccggcacagggaggacggttga

SEQ ID NO: 77540 - DNA, 276 bp, Citrobacter koseri
atgggaattgaaatgattatcggcctagccgcagcggtgattgccgctatcgctggtgcttttggtttcggccatgcgcgcggcaccagcaaagcggaagccaaagcagacaagcagcgcaccgaagagaacgccgccgcatcggtagcggcagcagagcgacaggcagaagtgaccagagaggccagcgatgtacagcagactgttaaccacatgcctgatgacgatgttgatcgtgagctgcgcgaccaatttacccgccccggtagtcgttga

SEQ ID NO: 77541 - DNA, 342 bp, Citrobacter koseri
atgctgctgtgttcacattcaatctcgggtaaattcccatatccgcctgaaagagagcaaccaatgagcgaagctaagtcgcaggacgacagtgctgttaagggccaccccatgaagatgaaacatctgagcgaggcatacagcatttctaagcaggttgctgaattgcatcggatgcggggtattgttgctggtggcgctggtcttggtgtaaccattcagtcaacctatcaggatgatgctttcatagagaatatccgcccgtatgtcattgatgagcttgatcgccgcatagcggaaaaaaatgaactcctcgaagcgctgggcgtttccctcgaatag

SEQ ID NO: 77542 - DNA, 384 bp, Citrobacter koseri
atgaaagaaataacagttatagttgctggcttgccttacgcctgttcatttaccgtaggttatgaaacagataatagcgataaagagaatgcactttccgcattgattaaatctgcgatgttagcagggcgtgaaattgataaaaaaattaccatcagtgaacaaatcattcatattgctgatacagaagattctggtaatggaaaacaaatatatgaggtggtttttgaactgaatgatggtaaaaaaatcctcggctattcggatcaagatgaaccgagtacgaacggtgatttttaccactgtgcggctaacaaagacctgaaggggcgagttatcgttgcggctaaaaatgtcattatttcccgctttactcctctttga

SEQ ID NO: 77543 - DNA, 1005 bp, Citrobacter koseri
atggcatcgataaaagaatccactgatgccaatggacaatcaaaatattacgtccactggaaggatgaaaaatccggtcatggacgccgccgtatttttaagaatattgatgatgccgcacatcttttctggcaaaaacagaatattgagctggattgtcgaacagccagctggcgcggaatagaccattcgtggacttttcagaaactgttgatgtttttcctgggttatcaggtcaataagctggaaaaaaatatcattcgtccgtcgacttacgcgaaatgccgccacgaccttctggccgtacagggaccgatactaaaagagaatatcttgcgtatcagtagcagggatatcacggattcaatccgcccaggctgccagcgctggatccgttcggcatatttctacctggaggaaaaacggctcattacgtttaatccggtagatcgtcccgctcgtcgacaccgcaggccgattactattccttcaagagagacggtgcggaagttgctcgatacggcaccgcgacgggaacgtattgcatgctggctggggatttgcggcctgcgcctcggtgaagtgctggcggtgacttacgaggatatatcgcccgagataattcagattcggaggcatatcgtcaacggtgtgatccgtgaaggtcttaaacgcggtgtggaacgacaggtcagaatgccgaaagaacttttatccttgctggatgtgaaattgttaggaacgtctcagccgctggttgcgaatagctttaccggcgcgccactgtccatcaactatggaacacagggtgtgctgcaaaaaacactggcaactcatggcatcagaaaatttcatcaccttcgacattttgccgtatcgcgactggccgccagaggggttgatattacgcatgtttcccgtctcatcgggcatgtgaatatcaaaaccaccattgacgtttacgggcatctgttttgcgcgccggtagacatggatctggactga

SEQ ID NO: 77544 - DNA, 603 bp, Citrobacter koseri
atggctcctaaaaaaagcttcagaaaagcctacgtcggtatcgttatggacatggcattagcccgtagcaaaatcagcaatcggatggttgctcagcgcttaggtgtggacgagacgacgatccgtcgctggcgtaaagagaatatcgagtttgagcgcgctttcactgaggctcgcgaagctctcagagagaaaattaaccgcgtcgccggtaagagcctggacgttcgtaaacggaaggttgtcaccacatcgccggacggtgtgaaaaccacgattgaagatgtgctgcccacgcacaacgatattgctgttttctcgaaggcgctcggtcttggtaccagcatctatagcgaggaagaacgccagcgtaatgtgttgcgtgatgtcatgaaacataaggttgccggaaaatactccgcactggaggcagcgcagctacttgaggctgaggggataaaagctcctccaactctgcttatggagcttggcgcgccgaaaatattcgaacctttcaccaatagtgacgaggcagccaaagctgaagcggcgaacatgagccctcacgaggcagcagatatctacaaaaaattcatgggctga

SEQ ID NO: 77545 - DNA, 549 bp, Citrobacter koseri
ttgagtaacgacagcactgtacgcggttatctgacgcctgtcggggatatcccgaaatacgatgaggagctggagcgggaaatcagccggtggattcgtggtgtttctggcctgccggcaacgctggttttcccccggtggactgacccgcagccgcagatccccggtaacggggtgacgtggtgcggtttcggtatcactaccgttcctctgcctgagtatccggcgcatgtccagactggcgaagacgcctcagaacagtgggcgtgggagcgcgtgacggtcatttgttgcttttatggtccgcagggcgcaggcagggcaaatacattccgcgccgggctttttgtcgagcaaaacaacgctgagcttaaccgggcaggattatccctcggtgaagtcggcacaatttataaccttcccgagcttattaataaccagtgggtgaggcgctatgacctcactgtcgcgctgacccgcaaaaccatccgcacctacaacattaaatccatcgttgacggcaatgtcacgatttcaaccggagattga

SEQ ID NO: 77546 - DNA, 1152 bp, Citrobacter koseri
atggcgaaaggcctgcctttaaaccgcgtcaccaacgttacggtgacgctgtccgccagagctgcacagggccgaaatttcggttcaatgctgattctgggtaactcaactgtgattccgattgccgaacgtctgcgcctgtattcagccccggacgatatcggcgatgatttcggcgtggacagcgaagaatataaagcggctgtcatctggttttcccagtcgccgcgcccgactcagatttatgtggggcgttgggtggaaaccctcgtggacggagagaccggagagccggaaacgcttctggaggccgtgaatgccctgctggattacaattcctggtacggactccacctggcggtcccggagggcgattatccgtctgacgcagacatgattgctgtctcggcagcgattgagtcggctaccgtgtcccgtattctggcaatcacttcagatgaggcggacattatgagcgccgccattgaaacggatctggcgtcaaaactgaaggcggcgaaatacagccgttcctatattcagtattcgtccaccagtcgctatgctgcgctgtcttcgtttggccgtgcctttacggtcaacttcaccggcagcaataccacgatcaccctgaagttcaagcaactgccgggcgtcacctacgaaactctcggtacatctcaggccaatgcgctggaagcgaaaaattgtaacgtttacgtgtactacgagaacgatacagcgattcttgagcagggcgtgatgtgtaacggcgacttctttgacgaacgccacggcctcgactggttgcagaacgcggttcagaccgcagactacaacacactgtacaccagcaccacgaagatcccgcagaccgacgcagggacaacgacccgtattgccaacattgagaaggttctggatgtcgcagaaactaacggtctgtttgcgccggggatctggacgggtggcccgatgggacagctcagcaccggcgataccctgacaaagggatattacacctgggctgacacggtggataaccagttacagactgaccgtgaagcgcgtaagggcgtgccgattcaggttgcggcaaaactggccggggccgtgcactatggcgacgttgccatcaccgtagtacgttaa

SEQ ID NO: 77547 - DNA, 441 bp, Citrobacter koseri
atggctacgtattcttttctcgatgtctccggcactctggccggacctaccggaacaattgatatgggttccggttccgcgaactcagatgaaggcattgttgtgaccatgactgaagccaaaaacaccatgacgattggtgctgatggtgaagtgatgcacagccttcacggtggcaacagcgggacgcttacagtaacgctgctgaagacctccccggtaaacaaaaagctgtcgctgatgtataacgcgcaacggctgtcctccgccctgtggggaaacaacgtgatcgttgtgcgtaacaaagtttccggagacttctttacggcgcgttcatgtgcatttcagaaacagcctgactggaataaccctaaggttgccggaacggtgtcctgggtgttcgattgcggcaaaattgacggcctgctgggggagttttaa

SEQ ID NO: 77548 - DNA, 453 bp, Citrobacter koseri
atggaatttgaaatcaaaggtaacgaatatcgcgtggcgaaactcagcgtttttgaccagctgaaagtcacccgtaaattgctgccggtgctggctggcctggtggctgatttcgggagcgtacgctcccttcttcctgctggcgggcagattgacaacgcgcagttcgatacgctggcgccggtgcttgaaaaagttctgccgcgtatcgctgaagagctgtcagcactcagtgatgacgataccagtgcgattattcatccctgcctgtctgttgtggtgcgaaaaaatggcactctctgggcgcccgttttccgcagtggcgaactgatgtttgatgacattgatctcttcacgatgctgcaactggtggcgcgggtggtcgccgattcgctgggaaattttttgcccgggagccctaccagcgcgacggcggaccagcctcagggctaa

SEQ ID NO: 77549 - DNA, 348 bp, Citrobacter koseri
atgaagcgtatgaagttagctctgataatttcgttactattctcctgctcagttgctttcgctgatttacaatgcggcggatatcgacttcatgcagccgataacggttggacaaaaatcaacgacgaacaggttacatctcagaaaattaagtttcttggtcagaaagatgactgggataacgttaaaactgacatgggactgatgccttcccgtgatggcaacaactacggttttgagtttgtgaagcgtaacggaaaagctttccttaacgtccagttactgcagaacagtttggacgcgccgaaaatcatcggatctttcccatgtaaaaaaatatccggctaa

SEQ ID NO: 77550 - DNA, 276 bp, Citrobacter koseri; identical to SEQ ID NO: 36734

SEQ ID NO: 77551 - DNA, 300 bp, Citrobacter koseri
atgccaacagcaattgaaaaagccttggattttattggtggtatgaacacttcggcgtcagtaccccattcaatggatgaaagcaccgctaagggaattctaaagtatttgcatgacttaggtgtgccagcgagtccggaagttgtgatggcacggggtgagcaggagggatggaatcctgagttcacgaaaaaagtggccggatgggcagaaaaagtcgcctccggtaaccgcatccttatcaaaaacccagagtatttttcgacctatatgcaggagcagctcaaagaactcgtgtga

SEQ ID NO: 77552 - DNA, 1815 bp, Citrobacter koseri
atgccgttaatcgccgggattgatatcggcaacgccaccaccgaagtggcgttggcacagcatgggcagtttatcgccagcgggattgtcgccaccacgggcatgaaagggacgcgggacaacattgccggggtggtcgcttctctgcagcaggcactggataaaacaccgtggtcgcttcaggccgtggcgaaaatctgcatcaatgaggccgcgccggtgattggcgatgtggcgatggaaaccatcactgaaaccatcattactgaatcgacaatgattggccataacccgcaaacgccgggtggcgtcggtgtggggatgggaaccaccatcagcgtggataagctggcatcactgagcgaggattgctttgcacagggctggatcccgctggtgggcgaagagatcgatttcctcgaagcggtctggcttatcaatacggcgctcgatcgtgggatcaacgtggtggcggcgatcctgaaaaaagatgatggcgtactggtcaacaatcgcctgcgtcgggcaatgccggtggtcgatgaagtcacgctactggagaaggttccggaaggtgtgctggcagcggtggaagtggcggccgccgggcaggtggttcgggtattgtcgaatccttacggcatcgcgaccttttttgccctgacgccggaggaaacgcaaaccatcgtccctatcgccagagcgctgattggcaaccgttccgccgtggtgctgaaaacgccgcagggtgatgtgcagtcgcgaacgatcccggcgggtaagatctttattcgtggcgaaaagcgcggtggggaagccgacgtagcgcaaggcgcgcaggccattatgcaggcgatgagcgcctgcgcgcccgtgtgcgatattcgcggtgaagcaggtacgcacgcgggcgggatgcttgagcgggtgcgtaaggtgatggcctcgctgaccggtcatgacatggacgccgtgcatattcaggatcttctggcggtggatacgtttattccccgcgcggtgcaggggggcattgccggggaatgttcaatggagaacgccgttggcattgcggcgatggtgaaatccgatcgcttacagatgcaggctatcgccagcgagctgagtgcgcggctaaacacgcccgtcgaagtcggtggcgtggaagccaacatggctgtggctggcgcgttaacgacgccgggatgcgccgctccgctggcgatcctcgatttaggcgcaggatccaccgatgccgccattatcaataacgatggcgtagtgaaggcggtacaccttgccggggcggggaatatggtcagcctgttgattcaaacggagctcggcttaagcgatccgtttttggcagaggaaattaaaaaatacccgctggccaaagtggagagtctgttcagcattcgccatgagaacggcgtggtggagttttttcgcgagccgctcagcccgtcggtgtttgccaaagtggtgtatctgaaagacggggagctgatcccggtagataaccaaatctcgctggaaaaaattcgtctggtgcgccgtcaggccaaagagaaagtctttgtgaccaactgtctgcgcgcgttacgtcaggtttcgcccggcggctcgattcgcgatatcacttttgtggtgctggtaggtggctcatcgctggattttgaaattccgcagatgatcaccgatgcgctggcgcattacggcgttgtcgccgggcagggcaacatccgtggcactgaaggcccgcgcaatgcggtggcgaccgggctggttttagccggagaagcaaaaaaatag

SEQ ID NO: 77553 - DNA, 429 bp, Citrobacter koseri
atgaacgacaacatcatgaccgcgcaggattacccattagccacccgctgcccggagaaaatccggacgcctggcgggaaaccgttaaccgacattacccttgagaatgtgctggcaggcaaggtcggaccgcaggatgtgcgtatttctcagcaaacgctggagtaccaggcgcagattgccgaacagatgcagcgtcacgccgtggcgcgcaatttccgtcgtgcggcagagctgattaccatcccagatgcccgcattctggagatctacaacgcgctgcgcccgtttcgttcttcatttgcggaactacaggcgattgccgatgaactggaatatacctggcatgccacggtgaacgccgcctttgtccgcgagtcggcagaggtgtatcagcagagaaacaagctgcgcaaaggtagccagtga

SEQ ID NO: 77554 - DNA, 585 bp, Citrobacter koseri
gtggaatgcacaactgaacgtaagccggttttcaccttgcaggtaagcgaaggcgaagcggctaaaggggacgaacgcgtagatgaagtggtgattggcgtcggtccggcctttgataagtatcagcacaaaaccctgattgatatgccgcataaggcgattcttaaagagctggtggcaggtattgaagaagaggggctgcatgcgcgggtggtgagaattctgcgcacctcggacgtttcttttatggcgtgggatgcggccaatctcagtggttccggcattgggattggtatccagtcgaagggaaccacggtgattcatcagcgcgatctgctgccgctgagtaaccttgaactgttctctcaggctccgctgctgacgctggaaacctatcgccagatcggtaaaaacgccgcgcgctatgcacgcaaagagtcgccttcgccggtgccggtggtcaatgaccagatggtgcgccctaaatttatggccaaggccgcgctgtttcacatcaaagaaaccaaacatgtggtgcaggatgctgcgcctgtcacgctgcatattgtactggtgagggaatga

SEQ ID NO: 77555 - DNA, 1668 bp, Citrobacter koseri
atgagaagatcaaaacgattcgaagtgcttgcgaagcgccctgtaaatcaggatgggctgattggcgaatggcctgaagaggggctgatcgccatggaaagcccctacgatccggcttcgtcggtgaaggtagagaatggtcgtattgttgagctggacggcaagagccgcgccgagttcgacatgattgaccgttttattgccgactacgcgattaacgtggctgaaactgaacgggcaatgcggctcgacgcgctggagatcgccagaatgctggtggatatccacgtcagccgggaagagattgttgctattaccaccgctatcaccccggcgaaagcggtggaggtgatggcgcaaatgaacgtggtggaaatgatgatggcgctgcaaaaaatgcgcgccagacgcacgccgtccaaccagtgccatgtcaccaacctgaaagacaacccggtacagattgccgccgatgcggctgaagcggggatccgtggtttttcagaacaggaaacgacggtcgggatcgcccgctatgcgccgtttaacgccctggcgctgctggtcggttcccagtgcggtcgccccggcgtgctcacgcaatgttccgttgaggaggcgactgagctggagctggggatgcgcgggttaaccagctacgccgaaaccgtgtcggtatacggtacagagtctgtgtttaccgacggcgatgatacgccgtggtccaaagcgtttctcgcctcggcctatgcgtctcgcggactgaaaatgcgttacacctctggcaccggttcggaagcgctgatgggctattccgagagtaaatcgatgctctatctggagtcgcgctgcatctttatcaccaaaggcgcgggcgtacaggggctgcaaaacggtgcggtcagctgtattggcatgaccggcgcggtgccgtcggggatccgcgcggtgctggcggaaaacctgattgcctcaatgctcgaccttgaagtggcctccgccaatgaccagaccttttcccactctgatattcgccgtaccgcccgtaccctgatgcaaatgcttcccggcaccgactttatcttctccggctatagcgccgtaccgaactacgacaacatgtttgccgggtcgaacttcgacgcggaagacttcgatgattacaacattctgcaacgcgatctgatggttgacggcggtctgcgtcctgtaaccgaagaagaaaccatcgccatccgcaacaaggcggcacgcgccattcaggcggtgttccgcgaactgggcctgccgctgattagcgatgaggaagttgaggccgccacttatgctcacggcagcaaagatatgcccgcgcgcaatgtggtggaagatctggccgccgtggaagagatgatgaagcgcaatatcaccgggctggatatcgtcggcgcgctaagccgtagcggcttcgaagatatcgccagtaacattctcaatatgctgagacagcgcgtcaccggtgattacctgcaaacgtcggccattctggatcgccagtttgaggtggtaagcgccgttaacgacattaatgattatcagggaccaggcaccggctatcgcatctctgccgagcgctgggcggaaattaaaaatatcgcgggcgtggttcagccaggctcaattgaataa

SEQ ID NO: 77556 - DNA, 429 bp, Citrobacter koseri
gtgaataagagccaaccaatcgccaccattacgctggcggcggcgaaaaaaatggcgcaggccgtcgaggctaaagcgcttgagatcaacgtgccggtggtcttttccgtggtggatcgcggcggcaacacgctgctgatgcaacgcatggacgacgcgttcgtcaccagctgtgatatttctcttaataaagcgtataccgcctgctgtctgcggcaggggacccatgaaattaccgacgcggtacaaccgggtgcgtcactatatggtttacagctaacgaatcaacagcggatcgttatttttggtggcggcttacctgtcatgttaaacgataaattaatcggtgctgtcggcgtaagtggcggtactgtcgaacaagacatgttattagcgcaaaccgcactgaattgtttctctgaattataa

SEQ ID NO: 77557 - DNA, 1164 bp, Citrobacter koseri
atgagctatcgtatgtttgattacctggtgccaaatgtgaacttttttggcccgaatgctatttccgttgtcggcgaacgctgcaaactgttgggcggtaaaaaagcgctgctggtgactgataaaggtctgcgagccattaaggacggcgcggttgataaaaccctcgaacatctgcgtgaagccggtattgacgtggtggtgtttgacggcgtcgagccaaaccctaaagacaccaacgtgcgcgacggcctggacgtttttcgtaaagagcaatgcgatatcatcgttaccgtcggcggtggtagcccgcatgactgcggtaaaggcatcggtatcgcggcgacgcacgaaggcgatctctatagctatgccgggattgaaaccctgaccaatccgctgccgccgatcgtcgcggtgaataccaccgccggtaccgccagcgaagtcacccgtcactgcgtgctgaccaataccaaaaccaaagtgaagtttgtgattgtcagttggcgcaacctgccgtcggtttccattaatgacccactgctgatgctcggcaaacctgcgccactgactgcggcaacaggaatggacgccctgacccacgccgttgaggcctatatttcaaaagatgccaacccggttaccgacgccgccgctatccaggcaattcgtctgatcgcccgcaacttacgccaggccgtagcactgggcagcaacctgaaagctcgcgagaatatggcctatgcctctttgctggcgggtatggccttcaacaacgccaaccttggctacgttcacgcgatggcgcatcagcttggcggtctgtacgacatgccgcacggcgtggcaaatgccgtcctgctgccgcacgtggcgcgctataacctgatcgctaatccggagaaatttgccgacatcgcggagtttatgggtgagaacactgacggtctgtccaccatggatgctgccgagctggcgattcgcgccatcgctcgcctgtcagccgatatcggtattccgcagcatctgcgcgagctgggcgtcaaagaagccgatttcccgtatatggcggaaatggcgctgaaagacggcaatgccttctccaacccgcgcaaagggaacgagaaagaaattgccgagatcttccgtcaggcattctga

SEQ ID NO: 77558 - DNA, 354 bp, Citrobacter koseri
atgtcactttcatcaccgggcgtaaatctgttttatcactcacgctggctggatactcgcgtgcttgatgagctgtgctggggactggaagagcaaggcgtcccttgccgggcaatctgttgcgacgagcatgactgcgcgctggcattgagcaaacttgcggccaaaagctcaacgctacgtgtcggtctgggtcttaatgccacgggtgatattgctttaacccacgcccagttgcccgaagatcgggcgctgatccgtgggcatatccgcgccggagcagcccagctccgcgtcctcggcgccaatgccggtcaactggtcaaagtacttcccttcagcgagataaaataa

SEQ ID NO: 77559 - DNA, 531 bp, Citrobacter koseri
atgtaccgcatctacacccgaactggcgataaaggcacgaccgcgctgtttggcggcagccgtatcgacaaagatgacatccgcgttgaggcctatggcacggtggatgaactgatttcccagcttggcgtctgctatgccagcacgcaccaggctgaactacgccaggatctgcacgccatgcagaagatgctgtttgtactgggtgcggaactcgccagcgatgagaaaggactcgcgcgcttacaacagcgtattggcgaggaggatattcaggcgctggagcagcttattgaccgcaatatggcgcaaagcggtccgctcaaagagtttgttattccggggaaaaatctgccatcggcacagctacacgttgcgcgcactctgacgcgccgactggagcggatccttatcgcgatgagcagaacgctgacgttacgcgatgaacccagacgctatatcaaccgactgtcagacgcgctgttctcgatggcgagaattgaagaaactagtccagatgcttgcgcttaa

SEQ ID NO: 77560 - DNA, 1926 bp, Citrobacter koseri
atgacggcgcacacgcatagcatcgggaaggaagtctcttcagtcattgcccagtcatggcatcgttgcagcaagtttatgcagcgggaaacctggcaggcgccgcatcaggcgcaagggctgacctttgagtcgatttgtcgtcgcaagacggcgttgctgacgattgctcaggctgcgctggaagatgcctgggagtttatggacggccgcccgtgcgcgctgctgattctggatgaatcagcctgtattctcagccgttgcggtgatccacagacggtggaacagctggcggagcttgggtttcgcgacggcagctactgtgcggaaagcatcattggcagttgtgcgctgtcgctggcgacgatgccgggccagccgacaaaaacttctggtaaacagcattttaaacaggcgctgcatccgtggtcgttctgctcgacgccggtcttcgataaccatggtcgactgttcggctccatctcgctgtgttgtctggtggagcatgagtgcgtttctgatttatccctgacgctggcgattgccagagaagtcggcaactctttgctgaccgacagcctgctggctgaatccaaccgccatctgaaccagatgtacgggctgctggagagtatggatgatggtgtgatggcctggaacgaacagggcgtattgcagttcctcaatgcgcgtgcggcgctgcttttgcatctcgatgcgcaggccagtcagggaaaaaacattcacgatctgctcaatctccccatgctgctgcgccgggcgatcaaacatgcccgcggcctgaatcacgtcgaagttacctttgaaagccagcatcagtttgttgatgccgtcatcaccctgaaaccgattgttgaggagcagggcaacagctttatcctgctactgcatccggtggagcaaatgcgccagctgatgaccagccagctcggcaaggtgagccacacctttgagcagatgtcgactgacgatccggaaacccgccgcttgatccattttggtcgccaggcagcgagggggagtttcccgatcctgctgtgcggggaagagggcgttggtaaggagctgctgagccaggccattcacaacgaaagcgagcgcgccagcgggccgtatatcgccgtgaactgtcagctttatgccaacagcgtgctggggcaggattttatgggcagtgcgccaaccgacgatgaaaatggccggttgagccgtcttgaactggcgaacggcggcacgctgtttctggaaaaaattgaatatctggcgccggagctgcaatccgcgctgttacaggtgatcaagcagggggtattaacccgcctggatgcccgtcggttgattccggtggatgtcaaagtgatcgccaccaccacggttgatctcgccaatctggtggagcaaaaccgctttagccgtcagctgtattacgcgctgcactcttttgagatagtgatccccccgctgcgggcgcggcgtaacagtattccctcgctgatttatacgcggctgaatagcctgaaaaaacgtttttcatccagtttgaagatcgacgacgacgcgctggcacagctggtggcctattcgtggccgggcaatgactttgagctcaacagcattatcgaaaacatcgccatcagcagtgataacggccatattcggctgagcaatctaccggattatctgtttgccgaacgtcctggtctggagactgcgtcttcactgctgccagccagtctgacctttaccgctatcgaaaaagaggcgattatccatgctgctcgcgtcaccagcggacgcgtacaggagatgtcgcaactgctgaacattggtcgcactaccttgtggcgcaagatgaagcaatacgatattgatgccagccagtttaagcgcaagcatctggactag

SEQ ID NO: 77561 - DNA, 1098 bp, Citrobacter koseri
atgctaaaagttattcaatctccagccaaatatctccagggtcctgacgcttccaccttgtttggtcaatacgctaaaaatctggcggacagctttttcgtgattgcggatgacttcgtgatgaagctggcgggagagaaggtactaaacggcctgcacagtcatgacattagctgccatgcggaacgctttaacggtgaatgtagccatgttgaaattaatcgcctgattgccattttgaaacagcacggttgccgcggcgtggttgggattggtggcgggaaaacgctggataccgccaaagcgattggctactaccagaagttgccggtggtggtgatcccgactatcgcgtctaccgatgcgccaaccagcgcgctgtccgttatctataccgaagccggtgagtttgaagagtatctgatctacccgaaaaacccggatatggtagtgatggacactgcaatcattgccaaagcgccggtacgtctgctggtggccgggatgggcgatgcgctctcgacctggtttgaagcgaaagcctgttatgacgccagagcgaccagcatggcgggcggacagtccaccgtggcggcgctgagcctggcgcgcttgtgctatgataccctgctggcggaaggcgagaaggcacgctttgccgcgcaggccggcgtggtgaccgatgcgctggagcgtattgtcgaagctaacacttacctcagcggcatcggctttgaaagcagcggtctggcaggggcgcatgcgatccacaacggctttacgattctggaagagtgccaccatttgtaccacggtgaaaaagtcgcctttggtacgctggcgcagctggtgttgcaaaacagcccgatggaagagatcgaaaccgtgctgaatttctgtcagaaagtaggcctgccggtaacgttagcggaaatgggcgtgaaagaagacgttgacggcaagatcatggccgtagcaaaagcgacctgtgcagaaggtgaaaccatccacaatatgccgttcccggtaacgcctgaaagcgtacatgccgctattttgacggcagacctgctgggacagcagtggctggcgcgttaa

SEQ ID NO: 77562 - DNA, 1659 bp, Citrobacter koseri
atgtctcaattcttttttaatcaacgcccccatctcgttagcgacgtgatcgacggtacaattatcaccagcccgtggaataacctggcgcgtctggagagcgatccggccattcgcatcgtggttcgccgcgaccttaacaaaaataacgtggcggtgatctccggcggcggttcaggacacgaacccgcgcacgttgggtttatcggcaaaggaatgcttaccgcggcggtctgcggcgacgtgttcgcctccccgagcgtggatgcggtactgaccgctattcaggcagtgaccggtgaggctggctgtctgttgatcgtgaagaactacaccggtgaccgtcttaatttcggtctcgccgccgagaaagcgcgacgcctgggctacaacgttgaaatgctgatagtcggtgacgatatctccctgccggataacaaacatccgcgtggcattgcgggaaccatcctggtgcataaaatcgccggctatttcgctgaacgcggctacaacctcgccaccgtcctgcgtgaagcgcagtacgcagccaacaacaccttcagcctgggtgttgcgctttccagctgtcatctgccgcaagaaaccgacgccgcgccgcgccatcatccgggtcatgcagagctgggcatgggtattcatggcgaaccgggagcctcggttatcgatacccaaaacagcgcgcaggtggtcaacctgatggtggataaactgctgacggtcctgcctgaaaccggcagagtggcggtgatgattaacaatcttggcggtgtatccgttgccgaaatggctattatcacccgcgaactggcaagcagtacgctgtacccgcgtatcgactggctgattggtccggcctcgctggtcaccgcgttggatatgaaaggattctcactgacggccatcgtgctcgaagagagcatcgaaaaagcgctgctgaccgcagtggaaaccagcaactggccgactcccgtcccaccgcgtgaaatcagctacgcgccatcatcccagcgcggcgcgcgcgtggaattccagccctctgccaacgcgctggtcgccgggattgtggagcttatcaccggaacgctttccggtctggaagcacatctcaacgcgctggatgccaaagtcggcgatggcgatacgggttcaacctttgccgccggcgcgcgtgaaattgccagcctgctacagcgtcagcagcttccgctggatgaccttgccacgctgttcgcgttgattggcgaacgtctgaccgtggtgatggggggttccagcggcgtgctgatgtctattttctttaccgccgccgggcagaaactggaacagggagctagcgttgccgaagcgctgaatacaggtctggcgcagatgaagttctacggcggcgcagacgaaggcgatcgcaccatgatagatgccctgcaacccgcactgacctcactgctggcgcagccgcacaacctgcatgccgcttttgacgccgcgcaagccggagccgaacgaacctgcctgtcgagcaaagccaatgcaggtcgcgcatcctatctgaacagcgaaagcttgttgggtaatatggaccccggcgcgcatgccgtcgcaatggtatttaaagcgctggcggagagtgagttgggttaa

SEQ ID NO: 77563 - DNA, 888 bp, Citrobacter koseri
atgccgggcaacctgaaagatattttacgcattgtcagcgcccgcctgtttaatttgcagtcgcggagccgcgcgtggattgtcggcaaagaacattatgatattgggaacgatctttttgcgctgatactggatccgcacatgcaatattcctgtggttactggaaagacgccaccacattagacgaagcgcaaaatgccaaattgaaaatgatttgtgagaagctacaactcaaaccgggtatgcgtttactcgatatcggttgtggctggggcggactggcggaatatgcagcgcgtcattatggcgtggcggtcgaaggcgtcactatctcaaaagagcagcagaaaatggcgcaacagcgctgtgaagggctggacgttaacattctgctgcaggattatcgtgacctcgataaacactacgatcgcattgtctccgtggggatgttcgaacacgtcgggccgaaaaactacgacacctatttcagcatcgccgaccgttgtttaaaaccggacgggctgttcctgctgcataccattggcagcaacaaaaaggggatgagcgtcgatccgtggatcaataaatacattttcccgaacggttgcataccggcgatttcgcatattgccgaggccagcgaatcgcgctttgtaatggaagactggcataactttggcagcgattacgataaaacgctgatggcctggcatgagcgttttaatcaggcatggccggagctgtcttcacgttactccgccaccttcagaagaatgtttaattactatttatgcgcctgcgctggggctttccgcgccagagatattgagctttggcaggtactgtttagtcgcggcgtcgagggtggcctccgcgtttatcgttaa

SEQ ID NO: 77564 - DNA, 939 bp, Citrobacter koseri
atgaataataactctgtcattaacattgcctactgtacggatgctaactatttagaatatgttgccacatcaataatttcagtcttaatgaataatcctcgacaatcattgtcattttacgtctttgtttatgatgtcagcgatgaagatatcgcaaaattgaaattaaccagccattttattcaggttataaaaatagaaaaagaggagatagagaagtatgatgacaacttcactatcaagcaccttaaccgttctgtttatatgcgacttcttgttccccgcttgcttaatggaaaagtagaaaaatttatctatctagatgcagacactctgtgctttgatgagattagtagtatcaatgacgtagacattagtgatgtaatttgcgctgtcagtcatgactcgatagataccaaagacaatagacatgcgcatcgacttgggctgaatagcgatcattattttaactcaggattcctctatattaatattgccaactggatacaatatgatattgagaataaatccaacatagtgttaactgaacaaggaaattcactacgttttccagatcaagatgccctgaatattacgatggatggccgtgtcaagttcatagataatcactggaacttcttgtttacttggtttacagacgaggaaaaagaaaacttcttctactcccctaacagtatccctaagatcattcattttaccgggggtagaaagccatggtatcaagagcattccgggttagcccagcatatttatgttctctaccatcatttaacgccatggcgtgatgctccgcttcgctcatattcctcacgaatgaggcccactgattatcgagtttatgcgcgccagtttgctaaaaaaaggaagtatttttcttcttttaaatggtatttaaaatacctcaaaagtaagttttag

SEQ ID NO: 77565 - DNA, 591 bp, Citrobacter koseri
atgagtgttgttgagacgttaagagagttttcagaagtatggaagctttttagtgagattcctgatgacgcgacacttaatgttgagttggcatctctgtatcttggtattagtgtaaaatcacttgctcgatataggcaaaatggcgggggaccagcatatatccagtaccaagtagaaaatagcaaagcgagaaaccagcgagtaaattacttgctaaaagatcttcgagcgtggcgtgataatcataaggtccaaaatactatgcacgcagctcaaatccgtggattaacatttacgtcattaaccgatttatgtgagccacatccattttggctgtctaatttttcaggacaaaaaataatatctcatgctttgacaacctctgatgatctttttagaaagttattgtcagagcctaatgttgatatagtctggatttctgttgagcaggctattttcaaagagtgggaaaataaaaatgaacgaattatttggcacaatattttcataacaattctaaataatttgagttatgcttcagaagcagcgcaagaaagatatacaatgaatgatgtcttggggagttaa

SEQ ID NO: 77566 - DNA, 150 bp, Citrobacter koseri
atgcgactcagtgaaaagtatggacgttggggcatcgtatgcggtggcaccattgttcaggggggagcacacagcaatcgccttgcctcggaaggcgtgaatgtttgtgtcgttggatcgtctaccgtggcgaggtcactccccctgtaa

SEQ ID NO: 77567 - DNA, 2115 bp, Citrobacter koseri
atgcattgcaccgacgccgggctggaagttcgtgcattattacctgatgccaccgatgtgtgggtcattgaaccgaaaaccggacgcaaagtcggcaggctggaatgccttgattcgcgcggtttctttagcggcattctgccgcgtcgtaaaaatccttttcgctaccagttggccgtcatctggcacggacaacagagtctgattgatgacccgtaccgttttggtccgctgttgcaggatctggatgtctggctgctgtcggaaggcacgcatcttcgcccctatgaagcactgggcgcacatcccgatacgatagatgacgtcgtcggtacgcgcttttcggtctgggcacctaacgcccgccgggtgtcagttgtcgggcagtttaactactgggacggtcgtcgccacccgatgcgcctgcgtaaagcgtccggtatctgggagctgtttgttcccggtgcgctcaacggtcagctgtataaatttgagcttattgatgcccacggccatttgcgggtgaaggccgatccttacgctttcgaagcgcaaatgcgcccggacagcgcctcgctaatctgcgggatgccggaaaaggtcaggcagccgccggggcgcaggcaggctaaccagtccgatgcgccgatatcaatttatgaagtacatctgggctcctggcgtcgtcataccgataacaacttctggctgagctaccgcgagcttgccgaccagctggtgccctatgcaaaatggatgggctttactcacctggagctgctgccggttaacgagcatccgtttgacggcagctggggctatcagccaaccgggctgtacgcgccaacccgtcgcttcggcacccgggaagatttccgctactttatcaacgcggcccatgctgcgggtcttagcgtgatcctcgactgggtaccaggccatttcccggcagatgattttgctctcgcctcgtttgatggcactgctttgtatgaacatagcgacccgcgcgaaggttatcatcaggactggaacaccctgatttacaactacggtcgccgcgaggtcagcaacttcctcgttggcaatgccctgtactggattgagcgcttcggcattgatgcgctgcgggtcgatgcggtggcatcgatgatttatcgcgactacagccgcaaagaaggcgagtgggtaccgaacgaattcggtggacgggagaaccttgaagcgattgaattcctgcgtaataccaaccacgtactgggtgaacagacgccgggggcggtaacgatggcggaagagtcgaccgattttgccggcgtttcacgtccttcatccactggcggtctggggttctggttcaagtggaatatgggctggatgcacgacaccctcggctatatgaagctggatccggtgtaccgtcgttttcatcacgacaagatgaccttcggtatgctctacaactacaccgaaaactttgtcctgccgctctctcatgacgaagtggtgcacggcaaaaaatccattctcgaccgcatgccgggcgatgcgtggcagaagtttgctaacctgcgcgcttactacggctggttgttcgccttcccgggtaaaaagctgctgtttatgggtaatgagtttgcccagggacgcgagtggaaccacgacggaagcctcgactggcatttgctggagggcagcgacagctggcaccacggcgtccagcggctggtgcgcgatctgaaccatacctatcgttaccacaaagcgctgcatgaactggatttcgacccttacggcttcgaatggctggtggcagacgatcatgaatgctcggtgtttatctttgtccgtcgcgacaggaagggaaacgaaattatcgttgccagcaacttcactccggtaccgcgccatgactatcgttttggcatcaaccagccaggccgctggcgcgaagagctgaacactgactccatgcactaccacggcagcaataccggtaatggtggtgtcgttgaaagcgatgccattgccagccacggtcgcgaacattccctctccattacgctgccgccgctggcgacgatctggcttacgcgggggcctgataatgaataa

SEQ ID NO: 77568 - DNA, 1281 bp, Citrobacter koseri
atgagtaaacctgaatataatggcaatgtcatgctggcacgccagttaccgcttaaatctgtggcgttgatcctggcgggaggtcgtgggacgcgattaaaagatctgacagcaatccgggcaaaaccggcggtacattttggtggcaagttcagaattattgattttgctttatcaaactgtattaattccgggatcagacggattggggtcattacacaatatcaatcacattccctggttcagcatattcagcgcggctggtctttcctcaatgaggagatgaatgaattcgtcgatttattgcccgctcagcaacgtgtgcatggtgaaagctggtaccggggtactgccgatgccgtcacacagaacctggatattatccgacgctatggcgcggaatatgtcgttattctggccggtgatcatatctataaacaggattattcccggatgctgattgatcatgttgcaaaaggcgcccggtgtactgtggcctgccttcctgtacctgtggaagacgcgagtgcttttggtgtcatggctgtggatgaaaatgataaaatcattgattttattgaaaaaccttctaatccccctacgatgccgggggataaaaccaaatcgcttgccagtatggggatctatgtattcgatgctgaatacctctatcagttactggatgaagatggccgggatgaacagtccagccacgatttcggcaaagatattattccagcaattacggcatccggagaagccagggcacatcctttcccgcgctcctgtgtgcagtcagacaatcatgcagaaccatactggcgtgatgtcggcacgctggaggcctactggaaagcgaaccttgatttagcttccgtggtacctgaactggatgtttatgatcgcaactggccgatccatacttatgtggagtctttaccgagcgcaaaatttgttcaggaccgcacaggcagtcatggaatgaccatgaattcactggtctccggcggctgcattatatccggttctgttgttgtacattcagttttattctccagcgtacggattaactctttttgcaatattgattcagcagttttattacccggtgtgtgggtagggcgttcctgtcggttacgacgctgtgtgattgatcgtggatgtgtgatccctgaaggaacggtcattggtgagaatgctgtcgaggacgcccgtcgtttttatcgttctgaagaagggaccgttcttgtcactaaagaaatgatgaggaggactgaataa

SEQ ID NO: 77569 - DNA, 483 bp, Citrobacter koseri
atggaaccacctgtaagtgatacctcacccgggttgaatgcagaaactctgaagcttgctattgcttataaacttatgtttattgttggaaaggatccatcacttgccaataagcatgagtggctcaacgctacgctgtttgccattcgcgatcgtcttgtcgaacgctggttgcgggcgcatcgggcgagggtttctcaggaagtgcggcaggtttactatctgtcgatggagtttctgattggacgaaccctctctaatgccttgctgtcactgggtatctatgatgatgttaaaacggctctggcagaaatggggctggatctggacgcattgatcgatgaagagaacgaccccggtctgggcaatggaggtctcggtcgcctcgcggcttgttttcttgattctctggccacgctgggcctaccgggacgcggctacggtatccgctacgactacggaatgttcaggcaaaatatttaa

SEQ ID NO: 77570 - DNA, 726 bp, Citrobacter koseri
atgaagtctcctgactactggttagaatacggggatccgtgggaatttgaacgccataagacgcggtataccgttcgtttcggcgggcgaattcaacaggagggtaaacattcgtgctggctggaaaccgaagaaattatcgcggtcgctttcgatcagatgatccccggttatgagactgatgccactaacaccctgcgtctttggagtacgcaggccagcaaagaaattaatctggggaaatttaatcagggtgactatttcgccgcagcggaggataagagccattccgaaaatgtttcccgcgtgctgtacccggacgactcgacctgttcagggcgtgaacttcgacttcgtcaggagtatttcctcgcctccgccacagtgcaggatattctctcccgccattaccagctatatcagacttatgacaacctgacggataaaattgcgatccacctcaacgacacctatccggtgttattgatcccggaactgatgcgtctgctgattgacgaataccaatttatctgggatgaggcgtttgaagtggcctgccaggttttctcttacaccaaccataccctgatgagtgaagcgctggagacatggccggtcgatatgctgggggaaattttgccacgacatttacagattatcttcgaaattaatgactattttcgtaagcgtgcagcgagaaccgtattgacggggacgtgttattga

SEQ ID NO: 77571 - DNA, 441 bp, Citrobacter koseri
atgacggcagagcaacgtgcacaacgccttgctgaacgtcagcaaaaagcaaaaccacagctaaaagccctggaaagctggctgcgtgaaaagatgaaaatgctgtcgcgacactcggagctggcgaaggcgttcacatacgccctgaaccagtggccggcactgacgtactatgcggaggatggctgggccgaagcggataacaacatcgctgaaaatgctctgcggatggtcagtctgggtcgtaaaaactggttgttcttcggctcagaccacggtggtgagcgtggagcgttactgtacagtctgatcgggacgtgcaaactgaacggagtggacccagaaagctaccttcgccatgtccttgacgtcatagctgacaggccggtcaaccgggtcagcgagctgctgccctggcgagtagcgctgccaactcaataa

SEQ ID NO: 77572 - DNA, 219 bp, Citrobacter koseri
atgccgttgccttccctgcgcatggtcagcaccgaaccagtaatgaggtgcgtaaacaaggtgtttttatctcagaaagcggcgttctttcagtctggctgcgacacgacgaccagggtaactccaaaaaaacacccgaaagcactggaagaaaaaatggctcgtgaaggtatcgaactcactgagaccgagagcgttcagaattctgtgtcacgttaa

SEQ ID NO: 77573 - DNA, 663 bp, Citrobacter koseri
atgaacaaacctacacgcggacttcgctcggatggtgaagccacacgagcccggatacttgaggcagcgggtgaacttttcgccaggacgggatacgccgaaacacccaacaaggccatcgccgccctggcgcaggtagatctggcatcaatcaactaccattttggcaaccgcagcggtctgtaccagactgtattggcggagtcttacggtaaggtactgggtcttgccaacctgaagcagcttgtcgacagcgagttggctccagcgtcgaagttgcgtttgctgattgagcaattggttgcgctcgcgacgcaggaacctcaggcgtggcagctgcgcgtcctggccagggaaatcctggcaccgacatcgcatttacagacacttttccagaacgaggcacggcccaaggtggcgctcctgaggcgcatgctcggcgagatcacacagataccgccagatgaccccgcgctgacccgctgcctgctcaatgtggttgctccctgcctgatgctgctggtcggtgggcacaattttcccggccccttgcaggaagtcttccggatgccttctcaaacgattgcggatcacctttttcacttcgtcttgggtgggctggcatccatcaaagatcaatacaaacgcaatgtgaagctttag

SEQ ID NO: 77574 - DNA, 1002 bp, Citrobacter koseri
atgaagaaacctctcattgccctgggtctccttgtagtgctggcgctcggcgcatgggcctggatgcacccacgggacaaaggtcaggacggcacgctggtgttgtacggcaacgtggacatccgacaggtgtcgctggcgttcgatggcagcggccgcgtggctgaaatgaaggtcgatgaaggcgatgcggtgaaaaccggcctggtgctggccacgctcgacacccaaaccctgaccctgcaggctgaacaggcgcaggcgcagattggcgtgcaacaacaaaacctgctacgcctgaagaacggtgcgcgtccgcaggaactggcgcaggcgcgcagtagcctgagcgccgcgcaggcagaagcggctcgcgcacagaaggatctggcgcgtttgcagggtatcgccgacagcaccaatgggcgcggtatcagcgagcaggaactggatcacgcccgtaccgccgtgcagatcgccaatgcacaatctgcgcagcagcatgaggctttgcgtctgaccgaaatcggcccgcgcaaggaagacattgccgccgctgaagcacagctgaaagcctccgagacccaattggcgctgttacagcatcagatttcgcagggccaactggtctcaccatctgatgccgtggtgcgttcgcgcctgctggagcccggcgacatggctactccgcaaaagccggtgtacgccctggcgatcactgagccgaagtgggtgcgggtgtatgtgagcgagtcggatcttggcaaggtcaaacccggccagagcgcacgggttaccaccgacagtgcgccggacaaacctgtcgccggcaaggtcggctacatctcctcggtagccgaattcacgcccaagtcggtgcagaccgaggaactgcgcaccagtctggtctatgaggtgcgggtgattgtcgaagacaaggacaacgtgttgcgtctgggccagccagccagcgtcgtactgagcaacggtgacgcccaatga

SEQ ID NO: 77575 - DNA, 1161 bp, Citrobacter koseri
gtgaatgagtcactggggtattccgctggcgaccaggtgattatcacgctggctaaccgcttgcaggagaggttcgggccgcatcactttatcagccgggtgggtggcgcgcagtttgttgtggtggcgagcgcctgtcgtgttgatgaggcctcacacctggctgagcttatgcagcatatcgttggcgctgaaatgagcgccgccgggcagaccttcgagcttaaagcctgtattgggatcagccattccattggcggcgacagggaaacgctgctggcccacgccgagagcgcgatggagcgggtacgtgaaagcggtggaagctatcagttttttaacccggaactgaatcaggccgtcatgcaacgtctgaaactgggcatggcgctgcgaaatgcgattacggaggggcatttgcggctggaatatcagcctcagatcagggctgcggacgggcaggtatacggttttgaagcgctgacccgatggcacgatccgcacgccggcgacatctctccagggacgtttattcctctggctgaagagacgggagagatagagcatatcggcctttgggcgctgcgtgaagtttgccgacagctttttgaatggcggaaaaagggcacgaatgtgtcggcggtatctgtaaacctgtctgctcataacttccgtaagcctgatttaccccgttatatcgccgacctgctgaatgaatatcagctgcccggcaatatcctgaccattgaaattacggaaagcgccatgatggaactgacggacgagatgcttgcgcgggtcagggagattcgtgcgatgggcgcgggggtctcaatggatgatttcggcaccggcttttccagtctggccagcctggcgtatctgccggtgacggaggtcaaaattgataaaagcttcattgaccggttcgcccgcgatcgtcgcgtcaatgcgctggtcgaagcggttgtcagtattgggcataacctcgacctgacggttgtggcggaaggtgtggaaaatacccatcagcatcagcaactgagaaaaatgggctgttccgtacttcagggatttcttttttcccgaccattgtcggcgaatacgttaccggtatggctagaggcttaccgttcacccttgcaggatgcacaatcatga

SEQ ID NO: 77576 - DNA, 204 bp, Citrobacter koseri
atgcgcgaactaagagatgactcgctcattgacatgaagtttataatggaggattctggattctcagatcgatacttctataagcacatccagaaaggaaacttcccaccaccaatcaaatatggccgcgcatcaaaatggctatatggtgattatcaggcctggaaacatcggcatatatctggcatcaaaaaagcatcatga

SEQ ID NO: 77577 - DNA, 243 bp, Citrobacter koseri
atggggaagatgacatttgtcgttgagtttgaagatggcaaggagcctccagtaagcgccaacatggatatctccggtggtcgacttgttgctgcggcattctatgactatcgcaatgactattttactgatgaacagaaagacgtaatcgctgacttgattagccatgaagaaatggagggatttcttagtggtgagtcagcaacagaattgaatgcaaagcttgacctccttacctactga

SEQ ID NO: 77578 - DNA, 192 bp, Citrobacter koseri
atgcgcatcaccataaacgttaattccactcttgatgtggaggcggccataacagctctgcgccacttcatcaaagagaagaagccagatgatggaaccagcgatgtgtggggcgttggcgtaactggcggaacctacttttccgtgggcgttaagccgaacgggaattacacagttaagcagcaggaatga

SEQ ID NO: 77579 - DNA, 240 bp, Citrobacter koseri
atgttcaggataatccatcctaatacctggtacgccgatccgcacggcgcgccatgcaaaatcctccgctctacccacgaagttatccactacatccgcaacggtcgcacctgtatcgccagcatgggccgctttcagcatgaattcgaaccgctgaccaaagcgcaggccgagcggatcgccgaagaaatcgaaacagcagaacacctgaagaagctgcgcgcccagcgtgcggcatga

SEQ ID NO: 77580 - DNA, 348 bp, Citrobacter koseri
atggattacaccaaactcagtgatggtgaaataagtgtcaggctcgcatattttctgaagccaaaatacagcgccaccattcacccgcacgagagtactgccgcgcagctgtcatggaactggttcaacgcggtacagaacatcggttatttcccgctgcggcgcgccgaagagctttacccggcaatgaagaagcatcggatcggcctcatcccatcaggaaagaccgtctggcaggcatttcacgagtctggtatcagcgcgactcaccgcaacccgcttcgcgctgtggcaatcgtctaccttcttttgcaggagtcagccaatgttcaggataatccatcctaa

SEQ ID NO: 77581 - DNA, 549 bp, Citrobacter koseri
atggggctgatcaagcgtgaaaaccgtgttggggtaaataacggaaaaggtaacacttccaacgtgtattacctgaacttagatgtgacacctatgccactaaaaagcacaggggtatgccacgaggaagcaccccctatgccaccagatggcacaccccctatgccaccagatggcaccagaaccagtcactcttttgaaccagtcaatgaaccattaaacacccaagccgctgtcgcgacttgcgatggtgagactgaagaaagcgcagacgttcacgaaagctcgagtagatatgcattcgaagggcagatcgtgagactgaaccacaaggactatcaggcctggaagaatctctacccgttgattgacctgaactacgaactccagaagctggatatcgagttcacccatgagaaaccgaaaaactggtttatcaccgcaagtcagaaactgagctaccaaaacaagcaagctacagctcgcggtaagccatcttctaagccagacctgaccaacactgactggatttacggggtgcaactatga

SEQ ID NO: 77582 - DNA, 168 bp, Citrobacter koseri
atgaaaggcaaacaggcaatcatgcgttatctcgaaatgcaccggactttcacagcaagggatgtggcaacagagtacggaatatcactgagttgcataaccaagaacgcccttgagcttgagaagaagagggtaatcatccggcttagcaaagtctgcgaacggtga

SEQ ID NO: 77583 - DNA, 708 bp, Citrobacter koseri
atgagcaacatcgacaaacaggcgctgcgggaagcggcggaaaaataccgcacaacatatgccgctcatctcaaaaacccaagaaattatgatgagctggatgcatgggataaggctaccagtgagtttatggcgttagttaataacgacgagctcaacatcatcgcgtcattgatagacgaaattgacatggaaacaggatatcgggagggggcgtttgttgcatgtaatcgctggcataccaaatttagagagacagaggcaaagctggaagccgcagagaacaacctcattgatagcgaatgtcatgtcgctgaactggaggaagcgctgcgtgataaacaggcgttacttgaggcgctggataattccctctgcgagcttctaccaggaactcagtacatggatccgccagacggtgggaacgtaactcccattgagcaggtgcggcgcatggttgctggctatcgtgagcaaattgaagccgcagagaagcgcatagcagaactgcgagactggaatgcaggacttgcgcaagagtcattcgaacgacagcagcgcatagcagaactggaggcgcggacgcccacagttaagatgccagaacctttcaaactagctaaatcatcgagcggattaacgtattactacgcagatgaagttgataaagcgctggccgcagcgagcatcaacatggaggctgagtga

SEQ ID NO: 77584 - DNA, 225 bp, Citrobacter koseri
atggctaattcattactggaaacctgcaacaactggcagattcggcgcgctgagttactggctcacaaccctgacatagcaatgacaatcgatcaactggactctctgattgagcgcactgtgcgctctgcaattgagatagcgcaccgcgtggattgggactttcgtgaagctgatcggttggcgaaagaagttgccgccgctggcatcggtaagggggagtga

SEQ ID NO: 77585 - DNA, 519 bp, Citrobacter koseri
atgaccactattaccagggaacgcatgaaagaaatacgagacttcgatacctgcgtaacgctggaggagtcagcagagctggcgcgtatcgcgctggcatcgcttgacgctggcagtgacagccacccggcgcacggcccgctctcaaattaccgcctgtaccgcattcgtgaaatcctgagcaaagcagcagcacaacgcgatggcggtaacatcggttacgcaatgtctgatgctgtgaaagcgtttgatgaactgctggaagtgcgtaaggaggagcctgttggtgagttctatcacgaaaaacaaggtggctggtatcaaatttcagagggtgacaaagtccctgataacaggcgcatcccgctctacaccgccccgccagcgccggtatctgtgcctgaagattttctctgcatgcttactggtcgagctaaatatcttcgaggaaaaggagaagttaaatcacctgaattgttagaaagggccgccgccatgctcaacggaggtaaatcgtga

SEQ ID NO: 77586 - DNA, 651 bp, Citrobacter koseri
gtgaaaactatccagttatctgagcgcgagttgtcgataatctttagcttaatggcaccgccgtaccgcgctgaagatattcgctctgacgagttcaacgaattgcgtaataaagtcttttacgctctgcgtgatgctcagaacgatgaacctgtaagtaatcgtgatgagttgccagaagaaaaaggcgcatcgctccaactgcgtaatttaatccggcggcgccatgctgaatggtctgataccacgttcggaaatgttggccctgttggtccacttaagcacctgtcgaaagaggcgctggaagccgcagcagaacctgacgacctcagcgagtgggctgatatgcagttcctgttatgggacgcccagcggcgcgccggtatcagtgacggtgaaatcacagcagcgatggaagaaaagctgaaggtgaacatggcgcgccagtggcctgagccgaaggacggtgaaccacgactacacattaaggaggctggcaactctccggtaattccggattgttggtgtcacacttgccgaccggtgaagatgaatgacattcgtttcgtcgtttgccctgaatgcggcaataagcgctgcccgcatgccaatgaccacaggaatgcatgcaccggaagcaacaagccatga

SEQ ID NO: 77587 - DNA, 237 bp, Citrobacter koseri
atggataagaaaaactacttaaggatagttgcagcttttattgttgcacttatgtttataattgttccagcagataaaatggttaatgacaagtcatttgatttaacttacaaattcatttggaatcttggggttcctgaaggtgacatattcccatatgtcgttaatgttccgctcattgcggcgcaagtttttggcgtccttgccatagtatggttactcggtagagttaagtaa

SEQ ID NO: 77588 - DNA, 450 bp, Citrobacter koseri
atgaaacagcaatttcacctcgtaaacgaatccgttaagcagaacgccatcaacttcatccgtgagctgcctgtcgacgctaagcgcccgctgattcttgatatcaaagagatgacccgcacgctccagcaaaacaggaagctttggccgctgctgaaagacctctccgatcaggttctctggttcggcaacaaatacgactcagacgactggaaagatttgataaccgcaatggtcgccaaatccaagaaacaggagcagagaatggctcctggtctggatggcggcattgtgatgttcggacagcgtaccagcaagatgactgtgcgtcagatggtagaagtcatcgaggctatctactggttcggcactcagcagaacgtcaaattcagcaacaaatcccgtattgaaattgaatgggctaagcagtggggtgatcgcaatgcgtaa

SEQ ID NO: 77589 - DNA, 627 bp, Citrobacter koseri
atgcgtaaaccaacccgccgcagctgcaaaatctgcaagaccaaattcactgctacctacgacaacgtctggtggtgctgtcctgagcacggcttcgagtacagccagttgctattggctaagaagaaactggcagcagagcgcaaacgcaagcaggaaactcaacaggaacggcgctctctcaaggtcagaaaggatgctctcaagtctaaatcacagtgggataaagaagctcaggcggcgtttaaccgttacatccgaatccgtgatgaaggaaagccctgcgtcagctgcggaagcccgctaacaggaaaaagtaactacctgaccggcagcgccatagacgcgagtcactaccgttcgcgcggcgcggcatcgcatctaaaattcaacgtttttaacgtccactcggcctgtactcgctgtaaccgacagttgagtagcaacgctgttgaatatcgaatccgccttattgagcgtattggtctggaacgcgtcgagcgtctggaagcagacaacgagccgcgccggttcgatatcccataccttcagcgcatcaaatccatctttactcgcaaagcacgtcaactagagaagcgccgagttcgtcgtcaggaggccgcatga

SEQ ID NO: 77590 - DNA, 123 bp, Citrobacter koseri
atgaactacgccgacttcctccgataccaggccgaaagcgttaagcgcgctatgttgctgccagtagcaaagcacagccagcaacagcaaaaaacaaaacagaccgcaggagaagccgcatga

SEQ ID NO: 77591 - DNA, 690 bp, Citrobacter koseri
atgaacaatcagcaactggaatacgtacgtcagcagctcattgtggcgaccgcagatctgagcggtgcgactaaagggcaactggtagctttcgccgagaacgcgcaattcactgctacggcgcgcagccgggggcggaagaaagtctatgacgtgcagagaaaacgcatggttaaccccgacgggccgccaatgagcggcagccagtcccgcgcgaaaggatcatccattgcactggttaatccggtagagttcggcaccgcatcatggcgccgcgctgtcctgtcgctggaggagcaccagaaggcatggctgctgtggaactacagcgagaatatccacttcgaataccaggtggcgatcactcagtgggcgtgggcagggttccgggagcagctcggcgcgaagaaagtggccggcaagacgatggagcgcctgaagaagcttatctggctggcagcccaggacgtcaaagcggagctggctgggcgtgagacgtacgaatatcaggccctggcgtcgctggttggcgtaacgccaaagaactggtcagaaacgtttacggaccgctgggtggagatgcgccgcatcttcctgcgcctggacagcggtgctttattgcaggttacgcgatcacgttcacaacaaaaggcgacaaatttagactcaagtcttgcaaaactggattga

SEQ ID NO: 77592 - DNA, 1617 bp, Citrobacter koseri
atgctgaacatcacaccgaactttgcacaggaacgcggtcttaatctgctccgccgtaagtggaagcagaagcgcaccttcatgatgtatgcgcctaccggcagcggcaaaaccgggttagcggcattcatcgtggcgggtcatgcctcgcgcggactgagagtgatgttcgtggccccctttacggttctcgtgactcagaccgtacagcgttttgttgaatatgggctgccggaggatgaaatcagcattctctggcgcgatcacccgtcatacaacccgaacgcactcattcagatagccagcgctgatacgcttatccggcgtgatttccctgacaatattgatctgctgattatcgatgaagcgcacatgaagaaacgtgcgatgctggagtggatacgtgacgctgaatttcgggttgtcggtctgtccggtacaccgttctcactgtggctgggaaaatactacgaagagctcattaaacccaccaccattagcgaactcattcagcgtggcgatctgagccagtacgaattctatgcaccgacaaagcccgatctgaaaggcgtcaaaacagcgaacacggctgactatggtcgtgattataacgaaaaccagctggcggaaatcatgtgcggttccgacctggtgggtgacatcgttgataactggctgcgcaacggtcgtgacctgccgacggtggcgttctgcgtcaataaggcgcacgccaactatgtgaccatgcagttcaataaggcgggagttaacgccgaagtcatggtcgctgaaactccgcacgaagaacggcagttgatgattcatcgtttcgagacgggcgccacaaaaatcatcgtcagcgtcggcgtactggtggccggtttcgacagtgatgttcgttgtgtcatttatgcgcgaccgacaaaaagcgaaatccgctggctccaggcgctggggcgaggcctgcgtaccgcacccggcaaagatgcctgtttgatcttcgatcacagcgggacggttcaccgtctggggttccctgacgctatcgaatacaacgatcttccttcaaaaaatgacggcatgaaagagtcagcgacgcgcgcagctgaggatcgggaagaaaaactgccgaaagaatgccccgaatgccatttcatgaagccagccggtgtctacgtctgcccgaaatgcgggtttaaaccgctggtgggtgaggatgtggaaaccgatacacagagaaatatcaaaaaactcaaatcgggcgggaaggtttacaccaaagcggacaggcagtcctggtggagtcagatcaagttttatcaacgccagcgcatatcgatggggaaaccgatcagtgatggctggtgtgctcatactttccgcgaaaaatttggtgactggcccaacggcctgagtgatttcccgatggaaattaccccggaggtaagcaactacatcagacacaaacttatcagattcgctaaggggaaggaaaaggcgaccgcacaggctgaagccgtaaatcctgctcctgaatcaggagtcacccacagaattattaatgcaaaacgccaggtagagaacattcgcagtacgcttgggagaaaaacagcgtga

SEQ ID NO: 77593 - DNA, 303 bp, Citrobacter koseri
atgaacataccggaaagcaacttcgataacccaatgttgccggaaaaccactcacaagcggatgccgagtggattaagcagcagttactgaggctacctccgtcactgaggcggaaggtcttgctgaaatatgcagaagtttacgaagtcatgtttgacgccgaaccggtttcataccgcaaggagaaccgggcaaggcatgaggccaatgtacggcttcgcaagttcgttgaaacacacggacgggcaattcaggggtatacggctctaccgcccctggtgggaacgcaacagcgctcctga

SEQ ID NO: 77594 - DNA, 225 bp, Citrobacter koseri
atgagcggtatcaagagcttaaggctgaaagcaaaagtgacccagggtgagctggctgcgttgatcgccagttctcaaggggctgtgagccactacgaaactggtcgtcgaatcccagacattgaggtggggaagcgaattgtgagcgcttttaagctgcttggatatgaaaccagtctggatgaggttttttccgatgaacataccggaaagcaacttcgataa

SEQ ID NO: 77595 - DNA, 669 bp, Citrobacter koseri
atgactatgaaacagagatggcaggacctggctaaaaccaggatgaaagaagtcggaatgactcaagaacagctagctgaggcactcggtataacacagggtgggctaggccattggctgaacggaagacgtgaacctaatctggaggtcatagccaaaatttttaaaattctacaaatgccaggttttgtggttaacgctgacggcacagtgaacgacgcaagagctgatcacaatgtgtcatttcacgaaatcaatgaatcgaaaggaagctatcctgtaatcagttgggtaagcgcaggggattggatggaagcagtagagccatatcataggcgcgcaatcgaccgctggtatgatacaaccgtggaatgttcagaagattcattttggttagacgtcagaggggattcgatgacatcgccagttggtcttagcatcccagaaggcatggttattctggtcgatccccaagttgagcccatcaacgggaagttagttatagctaagcttgatggggataacgaggccactttcaaaaaactggttatcgatgcaggccaacgatttctcaagcctttgaaccctcaatatccaatcattcccataaacggtaattgccgtattatcggcgtcgtagtagacgcaaaaataaccaacctgccatag

SEQ ID NO: 77596 - DNA, 279 bp, Citrobacter koseri
atgagcgctaaccaagaagtaaaaccgtttgacatccatcagaaattaaaaaacagcaagtacccgtggagctatatgcatagtgtaggctctcaccaatgtgatgctggttatgaattccgaaccatctttcttgatgaaatggaacacgcgatatatgagcgtcatggtaattattttgttctgatcgattttttcaaaaactacgatgaagcttgcgatgaagcgaaaagcatcattgacgataatcctgacctgaaaaaattatttaaacattaa

SEQ ID NO: 77597 - DNA, 384 bp, Citrobacter koseri
atggatattatcgtcagaaatgaagctgtaaagaccaaggttcattctgttatccaggatgatgatcttctttatataaataaagcaagtaaaacagcagagtgtgccaataaatatgcgcatgaacttcgtgcggagtttatcgagttactgatgccagcaatcacacgcactgatgtgaaggtggctgggcgattcacctcgttactgaatgagctttgtttcatgaccaaaatgacaatggagaatacatccaaagggggggcaataatgaaatttctgaaagataaagcagcacataaaacagcaacattacttgcccgctatggcaatggctacctgcatattgcaaacctttttctgcgcaaagcatatgggcggtaa

SEQ ID NO: 77598 - DNA, 1488 bp, Citrobacter koseri
atggagcccgctaaaacatgccagcgctccatcagcctcgaaagacggcttgcggcaacttacctggtagctggtctgatcaccgccggtctggccggctgcgccgctggccctgattttaagcgtcccaccgcacccgatgtggctcgctacactgcaataccagtggctgatagaaccgcgtccgctcccacgcagttcggcgaaacacaacgtctagtcgaagggcttccgatcgaaacgcaatggtggcaaagcttgggttcatccgcactcgacggactgataaacgaagctttccatgtcagcccgacgctggcgagcatcagcgccaatttgcgacacgcgcgggagcttcttgccgcacaggcgggctcgacgcaatatccacaggtagatgtcgcactgggatctcagcgccagcaaatgagtcccagcagccaagggttgagcggagacgcacgtcaattcagcctctacaacgccagcgttggcgtgcattacaacctcgatctggctggcggcaaccggcgcgcactcgaagccttggctgctcgcgccgactaccgtcgcttcgaactgaatgctgcgcgcctggcccttgccggcaacatggcaaccgctgccattaaccgagcacgcctcgccgcgcaactagaagccactactgccattttgcgcgtgcaggatgagcaactgcgcctagcccatgaacgcgtgcgtatcggtcaggcctcacctgatgaagcgttgagcctacaagctcaggcggagcaaacgcgggcagaactgcatgcgctgcgtaaacaactgcaacaaaccgaacatctactggcggagctagccggtcgtgccccaggcacgggtggcatcccggccttcactctggccgatttcactctgcccgtcgaaatgccgctcgtcgtgccctcagaactggtgcgccgccgaccggatatccaggcgtcagaggcgctgttgcatgcggccaatgcagactatggtgtggctgtcgccaagctctatccacagatcaacttgagcgccaaccttggctctcaagcgctgaccaccggtgccctgttcggtggcggttcggcagtgtggggcttggttgcgcagctcacccagcctctttttaatccagggctacccgctgaaaaaagagcggcgctcgccgcttttgatgccgccgcagccaattaccagagcgtcgtattggagtctttgcgtaacgtcgccgacaccctgcgcgcggtggaaagcgatgcacaaactttgactgccctcgctgccgctgatatggctgcacaggcctccttgcagtcggtcgagcggcaataccggctgggcgcggccagctacctgcaactgctcatcgcgcagcaacagacacagtcaatccggatcaatatggttgcggcccaggcacaacgcctagtcgatagtgttgctttatatcaggccctgggaggtggtgtcagttaa

SEQ ID NO: 77599 - DNA, 474 bp, Citrobacter koseri
atgacccaccgcaaacacagccacgcatttggaactattaccctgaccgttacggcctgcctgcttttatggggtattcagttgccagcttgggctggtgacgctacccaggctgaaccactggcgctacgcaagatcatgcaggaactcgggcgcaacatgcaggctattaccggtgcgatttcgcaggaggaatgggttaaggtcgttcagctcgccccaaaagttgcggcacaccccgagccaccgcttactgaaaaaatgcgcatccttgcttacctcggcgctgatgcgaccaagttcagaaactttgacgcgcagactcacgaggcggcgttggccatgaagctggctgctgcgagcagtgacggcaaggcggtgatccaatcattcgcccacgtgcaggaaagctgcttgggctgccaccaagctttccgtaaacctttcgtggagcatttttatggagcccgctaa

SEQ ID NO: 77600 - DNA, 711 bp, Citrobacter koseri
atgagtggcaaagggatccacatcgaaagtttaagcaagcggtatggcgatggtgacaccgctgtctttgccttgagagacgtgaatatgcatgttgcgcctggtgaagtggtgggactgatcggcccttccgggtccggcaagagcacgctgctcaagtgtctgggtgcggtgatcgaaccgaccgccggtcgcatgacgctgggcgatgaagtgatctacgccgatggctggaaagtccgcgacctgcgcgccttacggcgtgacaagatcggtttcgttttccaggcgccgtacctgattccgtttctcgatgtcaccgacaacgtggcgcttctgccgatgcttgcaggcgtcgcgaatggagagtcgcgcgcgaaggcactggaattgctcacagcgcttgatgtgcaacaccgagctcgcgcaatgccctcgcaactctccggtggcgagcagcaacgggtcgccatcgcgcgcggactggtcaatcgtccgccggtgatcctagccgatgaacccactgcgccgctggattccgagcgcgccatggctgtggtccgcatcctcaacgacatggcccgcaagttcgagaccgccatcatcgtcgtcacccatgacgaaaaaattatcccgaccttcaagcgtatctaccacattcgcgacggcgtgacccatgaggaagctggcgaagggcgggagttcgaatga

SEQ ID NO: 77601 - DNA, 1206 bp, Citrobacter koseri
atgatcagcctggccggccgcgacattctccatgcctgggggaaattcgtcttcaccggcatcggtctgggtctgctgatcggcgtcaccctagtcatggctggggtgtaccgaggcatggtggacgacggcaaggcgttgctcgacaacagtggcgctgacctttgggtggtgcaaaaggatactctgggtccttatgcggagtcgtccagcctcaacgatgacgtgtatcgcgccattctcgccatgccgggagtctcacaagcagcgaacgcgacctacctgaccatgcaggtacgcaagggcgagagtgatgtacgcaccatggtggtcggcatcgcgcccggtgcgttgggggctacacccggatggcctccttatctcgtcgctggacgccagatcacgcgcggtcactacgaggctgtggccgacatcgccaccggcttcaaactgggagatcgccttgccattcgccgcaatcattacaccgtcgtggggctgacacggcgcatggtgtcgtccagcggcgacccgatggtattcattccgctcaaagatgcccaagaggcccagttcctcaaggacaacgatgccatctggcaaagccggcgtcgcaccgaagccaacccggtcttcaatcgacccggtgatccaggtttgctggatgccgtgattgcttcacagagcagcaacgcgttcgtcaatgccgtgctggttacgctaacacccggccatgcgccggacgaggtggccgaatccatccagcgctggaagcgtttgacggtctacacccgggcacagatggaagacatcctcgtaggtaagctgatcgccacctcggccaagcagatcggcatgttcctggtgattctggccatcgttagcgcggccatcgttgccttcatcatctattcgctgacgatggacaaaatccgtgagatcgcagtgttgaagctcatcggcacacgcaaccgaaccatcgccgcgatgatcatgcagcaggcgctcgccctgggcgtgattggcttcgtggtcggcaagatcacagccaccttttcagcaccggcttttccaaaatatgtcctgctcacgccaatggattcggtcgccggtttttttgccgtgctcgtgatctgcgttctagctagcctcgtcgccattcgcatggcactcaaggtcgatccggccgaagccattggaggttga

SEQ ID NO: 77602 - DNA, 1152 bp, Citrobacter koseri
atgaaaaagttacccttgcaaggccgcaccctggcgctgcttgccgtcatcattcctttgctggtgctttttatttttgtcggtctgcgatcagggccgctcgccccggtcgctgtgacggtggcaagcgtggaatcacggactatcacaccggcgctgttcggcatcggcacggtgggggcgcgctacacctacaagatcgggccgacgtttgccgggcgcgtcaaacgcctggaggtgcatgtaggcgaccaggtcaaggccggacaggtgctcggcgagatggaaccggtcgacctcgatgatcgggtgcgctcacaggagtcggcattcaagcgtgcggaagcggctttgcgcgaggcagaagcccggcaagcctacgcgcaaacccaggcgcgccgctacgagcaattgtttgcggtgcgctcgaccagcgaggaaatcgtcaccaccaagcggcaggaactgcagatcgccgatgccgccttatctgccgctcgggaagatattgtccgggcacgctccgaccgcgaaggactcgtcgcgcagcggagcaatctgcgcctgatcgcgccggtcgacggtgtagtcgccgtgcgcgatgccgatcccggcacgaccatcgtcgcgggccaggccgtggtggaagtgatcgaccccaagagtttgtggatcaatgcgcgcttcgaccagatcagcgcatcggggctggctgaggggttgccgactcttatcgtcctgcgttcgcgtggtggccagaccttgaaaggtcgcgtgctgcgggtggaacccaaggccgacgcggtaaccgaggaaacgcttgccaaggtgatattcgataacaaaccagaacctttgccaccggtgggtgaactggccgaagtcacggttgacttgccggcgctcccggccgctccactgatccccaacgcttccgtccagcgtgagggcgacaaagttggtgtctggcaaatcgtggatggtgatctgcatttctccccggtcaagctcggcacttccgagctcaatggttacgtgcaggtgcgcgaagggctcaagaatggggaccaggttgtgacctatagcgaaaaggcactgacggcgcgcagccgcatccatgtggtcgaccatatcccaggagtgtcacgatga

SEQ ID NO: 77603 - DNA, 609 bp, Citrobacter koseri
gtggacacccatccaaagcatctgccggccgatgaacgtcgtgccgtaactgtcgagtccgtcgtggcgcttgccgcttcacaaaacccaagcgagataaccactgcggctatcgctaaacacatgaacttgacccagggtgcgctatttcggcacttcccgaacaaggaagccatttggcaggcggtcatggagtgggtagcagagcgcctattagccagaatcgatcgatccgcccaaggaatcgagtcgcccttggcagccatggaggcgatgttcatgagtcatatcgaattcgtagctgagcacccaggcgtgccaagaatgatgtttggtgagcttcagcgtgccgaatcgacaccggccaagcgcatggtgcaaaccttgattcagcgctacggcgaacgtttgcatcgtctcatcgagaaaggcaaggccagcggcgagttgtctccctcgcttgacaacgaggcggcggcaacgctgttcattggcacgatccagggcttggtcatgcaatcgctattggcgggtgatgtgggacgtatgcaccgcgatgcgccgcgcgtctttgcaatttatcggcgtggcatagggagtgcggaatga

SEQ ID NO: 77604 - DNA, 219 bp, Citrobacter koseri
atgacgccagaagagcagaaaaatgccctgagaaacatagccagaaaagttaatgatgaggtcaaggcgaagagaaaatccttccctgccgttagctgcgatgaaatatcaaggccaattctgaacgggtgtatgccactggttaaacagcttggtttaacgccaagccacctttacgtagaaatcggcattttgaacggaattattaaggagcgttga

SEQ ID NO: 77605 - DNA, 618 bp, Citrobacter koseri
atgatggagcaacgcacccctgaatggtttgctgcgcgctgcggcaaggtcacagccagtcgactggctgatgtcatggcccggactaagtcgggctactccaccagccgccagaactacatggccgagctgatttgccaacggctgaccgggaagctggaggaagggttttcgaatgccgcgatgatgcgcggcactgaacttgagccagtggcgcgcgaaatgtacgccctgaatgagtttgatgcggcaatcactgaagttggactcatcgatcacccaaccatacctggattcgcagccagcccggacggacttgttaacgacgacgggcttatcgaaatcaaatgtcccaacacctggacccatcttgaaacgctgaaaactggcgagccaaagcgccagtacatgctgcaaatgcatgcgcagatgatgtgcaccgggcggaaatggtgtgatttcgttagtttcgatgatcgcctgccgcctgacctcgcctatttcaagaagcggattcatttcgatgaagagctggcgcgcgaaatcgaatctgaggttaagagcttccttgcagatctggaatcggaaattcagaaaataacagagcgtgcagcatga

SEQ ID NO: 77606 - DNA, 747 bp, Citrobacter koseri
atgagtactgcactttccaccatggccgggaaactggccgcacgcctcggcatggatgccggtacagacctgatgaatacgctgaagaatacagcgttcaaaggtggcaacgtcacggacgagcagtttacagccctgttgatcgtcgccaaccagtacggcctgaacccatggaccaaagagatttacgcattcccagataaaggcgggattgtcccggtcgttggtgttgatggatgggctcgcattatcaacgaacatcctcagtttgacggcatggagttctcttacgacaaagaggaaggcgcgtgcacctgcaagatttaccgcaaagaccgcaagcacccgacaatcgtcaccgagtacatgggcgagtgcaaacgcaacactcagccatggcagtcccaccctacccgcatgcttcgccacaagacgctgatccagtgcgcgcgtctggcctttggtttcgctggcatcttcgaccaggacgaggccgagcgagtgattgaaggaacaacggcagaggttcatgcgggccatgaatcagatagccgccgcccggaactgatcgcaaaaggtgagtccgccgcgcgccttggaaccgttaagtatcaagagttctgggtggcgctgagcgctgaagagaaacaggtgatcggcgcagttgagaaacgacgcatgtatgacatgagtcttgctgtcgacaacgccgaacctgtcaatgtcgcagagacggaggctgaatga

SEQ ID NO: 77607 - DNA, 972 bp, Citrobacter koseri
atgagcgaagtaatggacttaactgtcatcgaaatcaagccggagcaggcgccagtgctttacgtatcgggcggccttgatgcttatctcgagcaaatccgccaggcagtaaacgaagtgccggacctgtccacgaagaaaggtcgtgaccgtgtcgcctctctggcggcgcaggtgtcccgcagcaagacggcaatcgaaaagccaggacgtgagtacctgaaacgccttaaagaggctgtgcgtccggctgaggccgaaattaagcgattcgttgacgcctgcgacgagctgcgcgatgcgacccgccgcccactcaccgaatgggaagccgagcaggaacgcatcaaggctgaagaagtcatgaacgcactgcacgccgaagcgcttgaaatgaacatcaagttcgatcaggagctggcggccaagttcgaagcggaccacgaaatggctctgctgatgaacaaggagattgatcgcgaccgcgaagaacagcgacgcctggcggaacaggctcagcgtgaacgtgacgagcggctgaagcaggaagcggcagaacaggcccgccgcgatgccgaagcgaaacacaaagctgagattgaagccgcagcgcgccgtgaggctgaagagaaagcgcgggcagagttggctgaacgccagcgcatcgaagcggaacagcgtgcggcacgcgagaagcaggaagcagaagcccgggcggagcgcgaaaaagccgcggcggttgaagccgagcgcctgaaggcaaaacaggcagaagagaaacgcctggccgaagagaagcgcatcgccgacgaacaggcaaaacgcgaagctgacgtgaagcaccgtaaggcggtcggcaccaacatcgttaacgcgctcaccagccaaaccagcttaacccgcgaacaggctatcgaagtgcttgccgctctgaaagatgacctgattccctgcgcgaaaattcattactga

SEQ ID NO: 77608 - DNA, 207 bp, Citrobacter koseri
atgattggaatgcactacggcaccgcatcagtgccacgtagcgaggttttaccgggcacaatgctgcaacaccacggcaaaacttatcgcgcctctgcgaacgttgagaaaggcctgtacgccttcaacatcttcgaaaaaaccatcatcaaaagtgattccgtcgttgtgctgctgaatgagcgcggcgagccgatggttcactga

SEQ ID NO: 77609 - DNA, 159 bp, Citrobacter koseri
atgaaagtcacccacaacggcaagcagtacaccgccaaaaagctcaacgataacgagtggcagctgacgtcggtatcaaacccgcgtgaaaagatgacgcttaaccgccaacagatgaatatcgccggcatcctgaaacaggtagaggtgaaggtatga

SEQ ID NO: 77610 - DNA, 243 bp, Citrobacter koseri
atgagcaacaaaactggtggtccagctttcccagagttaggcaacgttggttgcaactcagactggaaaagtgaatctggaatgacgctgcgcgactacttcgcggcgaaggctatgcagtcggctttgttagcgccgaagccagagaacccggtggaacgcatggatatttatgctcagtcagtagctgaaatctcttacgagatggctgatgcaatgctccgcgcccgggaggcgtcatga

SEQ ID NO: 77611 - DNA, 540 bp, Citrobacter koseri
atgtctgatgctgtgaaagcgattgatgaactgctggcgttgcggggcgctaagccgataggaatcaccgacagaagcgagattgaatgtctgaagcgaggcgagatggctaacgttatgcctcccgattacaaaggagttgatgctggtgatgaagtttttgtctacaccaccccgcctgtgccggtagttcctgcaactcttccgtgcgccgttgagttaaagccaggtcttatcattggcaaaggctgcaaaacagaaactttgctgactgctctgcaacgtcgcgccgactattacgctgaaattgacgctatgacgccggaagaacgcgcagaacatgacgccaatatcgaagcattcaaagccatgttgccacagccaacaccggtagtgcaggaggacctgttgagtatggctgcttcagcgatagaagacttattggagcataccgaccctaatactaattattattctggcgtgtgggccgatgtgcctggtaagttacgcgccgcgatgctcaacggaggtaaatcgtga

SEQ ID NO: 77612 - DNA, 555 bp, Citrobacter koseri
atgtctactcaactcgcatttcatgatgttaaattcaatcttgtaaagcacaataaccagatatggttcacttctgctgagcttgccacagctttaaaatattccaacgttcgtgctgtcagcggcatttacaaccgccacaaagatgaatttacagacagtatgagcttggtactcaaattgaataccaagggttttggcggtggaaattcagcaaaagacacaagagttttctctcttcgcggcgctcatctgatcggaatgatgtctgatacaccggtagctaaagaattccgccgttgggtgctggatattctggatcgggaagttggtgcgccagtaacaaaacctgttccagcccgaccaactcatcgccacaatccgccaaccttccgctacatcatcaccctgacatacaaagacgtggttaccggacaggaagaaaccttccgaggtggcgctaatactcctggcgaaatcatccagggtactgctaaacggttcggcatttttgtgtccgagatgataacgatgcccgttggtgcatattactaa

SEQ ID NO: 77613 - DNA, 456 bp, Citrobacter koseri
atgactcttccagtagacggcatcaaactccatcgaggaaacttcgcggccatcggccagcagattcagccattgctggatgccgggcaatgtttccgccttcaggttaagccatggcgagagaagcgcagcctgtcgcagaacgccctcagccacatgtggtacacggaaatcagcgaatacctcatcgcccgcggcaagaccttcgctacgcctgagtgggtcaaagacgcgatgaagcacacctatctcggctacgaaagcaaggaccgggtagacgtcgtgtccggagaggtaaccacggtccaatcactccgccatacgtcagagctggaaaccggcgaaatgtacatcttcctgtgcaaagtcgaagcctgggcgatgaatatcggctgtcacctgaccattccgcagagctgcgagtaccagcagctgcgcgataagcaggaggtctga

SEQ ID NO: 77614 - DNA, 171 bp, Citrobacter koseri
atgtcaactccactttcccgcgtcatcacgaacgaaatcttccgcgttccggtgcgccgcaagcgtaagccagcggttaagccgtccgacatcccgactttcaaggactacaccgcccgcctggtggatcagaaatggctgcgtctcgcggcgaggagaaaatctgcatga

SEQ ID NO: 77615 - DNA, 669 bp, Citrobacter koseri
atgagcatgtatcaacgcattaatggcgctgactggcgcaatattttcgtcgtcggcgatctgcatgggtgctacacgctgctgatgaatgagctcgaaaaagtttcattcgaccctgcgtgtgatttgctgatttcggttggagaccttgttgaccgcggcgcggaaaatgtcgagtgcctggagttgattactatgccttggctccgggctgtgcgaggaaaccatgagcagatgatgattgatgggctatcggagtatggggacgtcaatcactggttggcaaatggtggcggctggttcttcaatctcgactatgacaaagaagtgctggctaaggctctggttcacaaagcagctgagctgccactcgtcatcgagctggttaccgctgagcgtaaaatcgttatctgccacgctgactacccgcataaggaatatgcgttcgataagcccgccccgaaagatatgttcatctggaatcgtgagcgggttagcgacgctcaggacggcattgtctcgccgatagccggtgctgatctgtttatcttcgggcacacccctgcgcgccagcccctgaagtatgccaaccagatgtacatcgacacaggagctgtgttttgcggaaacctcacgctggtacaggtccaaggtggtgaccatgagtaa

SEQ ID NO: 77616 - DNA, 285 bp, Citrobacter koseri
atgagtaaaacctaccgcagcaagaagtggctcgccgcagtcggccagattgagcaatgcgtcctgtgcggagcgtggggcgtgcaggtggcgcaccgcaacgagggtaagggtatcggaatgaaaacagacgactgcgccaccgctgctatctgcgtcacctgtcattcagagatcgataacggaaagggtttgagccgtgacgaacgccgccagttaatggaccgcgccattgtactgaccgttatccagattgcccgtcgtggcttggtggtgcccgcatga

SEQ ID NO: 77617 - DNA, 360 bp, Citrobacter koseri
atgaaaatctacgacatcacaccaatcggcaagcctcgaatgacccgcgctgataagtggaagcagcgccctcctgtaatgcgttatcgagctttttgcgatgaggtccgcctgcgcaagctgaccatgcctgaatccggatcacatgtgacattcgttctaccaatgccaccaagctggagtaagaagaaacgagcggagttcgccgggaagccccaccaggccaagccagactgcgacaacatgctgaaagccctgatggatgcgctttatgaggatgatgctcacatctgggattgccgcatcacaaaggtctggggagagaaggggcagatcattatcggggagtgcgcgccgtga

SEQ ID NO: 77618 - DNA, 498 bp, Citrobacter koseri
atgaaactggaattaaccaacgaccagcatcaatgggtagaccagtggctccagttgtggggcgcatggtgccagaccggcaagattgataaagcgatgatcaacatgattgccagattcatggctaccgtcgatccccagcaagcatcacggccggtatgtagtgatgatgacgggatgctcattgatgctgtcattcgccactacctgaagaatgtggatgaaaatgcctggcgggttatcttcgcctactacgtatgtaactccagcgagatccgaattgcatcatggcagcatgcagtaagtaagcctcgccttatgaagacgcgtggcggcaatcagtacaaacacccaagcatctcgacaatccgtagagaggtgaagcaaatcatcaatgcttcattgttctgtttataccaaccgcttcaaaatgcgtttaacgatcgcgaaaatgtgaggaaaattgcaaataaatcacacaacgtgcttgcaatttaa

SEQ ID NO: 77619 - DNA, 1086 bp, Citrobacter koseri
atgctttttacatacactcccttgtcactagaagaaaactggttaaattcaacaattattaatatattgaacgtttctatgcgatcaattcttaatggtggtgatgtttcttcatggcctgatataatacctcccaatcggcggttacagctacagactcgtagtggtatcagagatcgtattttaaattttctaagggaatttattgaattagaacgtgtgaatcaagaagcattgttgattgctatggaacagcaaacttctttgcctaacgttttatatgatgattcagtttgtactggaattggtgagtttccagagaatatgcgaaaagtagccgatgatttattccggtttctttttgaaaaacagctaacgactataaatatattgggaaaatgcttacgtgatattcattatgaagctatttattatcaccttccatggagaatttgtccattctgtggattggggtatttaagagcacctggggctccaaggcatgcccttgatcattttatgcctatttctaaatatccttttgctggagctgattttcgtaatcttccgccaatgtgtagcgagtgtaattctgattttaaaaaaaatacagacgtcttaattgatgaagatgggcataggcggcattgtgtagatccctaccatgggccattttttaaagttagcttatccgaaagtataccttttgcgggcagtatcagaggtgctattagacttccaaaatgggatattaaatttattggtgagccgcaggagcaagctgaaaattgggaccgtatttttaaaattagagagcgttataaacgggacgtcctcgatgttgattttagattttggcttgagcaattttccatatggtatttaagcagtaatcaaggtcaattattaggcaatgaaattgctgcttctattccaggatatattgattctgttctccaggtcggacttgctgatcgtgctttcttgaaagcacaggtttttaagctattacatgttgaatgtttagatcctgaccgtggagatgacatgaaagcttttttggaggatttaatgttgtatacatga

SEQ ID NO: 77620 - DNA, 1599 bp, Citrobacter koseri
atgaggctacgctacctaaaagtagaaagctcttctaccaatggggggttgtttgatgggcttgaggtctggtttgggcgtggagcggatggaaaacaaggtgaagcattgtcacctctttgtttaatcggtccaaacgggtcgggtaagtcccagtttttacaattaatagcagagatttttcaggccgcatggcatgaacatgcgcctcaggaagaacgagcaagtgctaacaatgatgtgctttttgaactgaattatcttattgggcttgatagtaataataagctaacagatgttaagctggttcgaactaagcaaggtcgaaatattggccccattcaactttattgtgatggcttgcaagaaccaattagtactgactcacctgagtttggtaagtatcttccttcaatagtaatcggttatacatctggagataatgagacgctgagcttgccatttcagatcagtcgaagcgggtatgcaaacgatgtggcaggagctgctttgggggattctgcctcaatgaacctgccagataatcgattaatgatgatcgattatggtaccaatcttgaggtgttattctctaatcttatgcttggaaaacaagagattagagatgagattctgagacatgctcgtctttcagatattgcctcttgtcgctgtgtcgtacgtttggctcattcggcagcgccaaaaacgtcggtgaaaaggaatagaaatacagggcggaaaggtattcaattaaccgatgaacttgaaaatattatcttgtctttgaaacgtacggcgacttgttggaccgaagataagaaaactgagacatatatttttgacttttttataaatgaagctactcgtgatgctttttcctatttttggaatgatgctttctcactttatcgtgccctacacaaactggcattattgaatgatttggcgattccgagacctgctcgtaaacgtttagagagggcagtaaaggaacgccgttttgcctcgcggttaccagaaccgcaacaagaggatatggttttcggttttgaagaagttcgtttctggcctgttggtgaaaggaagaatgctgttgactatgtgtcactatcagatggtgagcatcaacaagcattgattcttggtatatacgcaatgataaacgaaaagaatgcattatttcttcttgatgagccagaatcacacttcaatccacaatggcgagtgaagtttgttcagcgtttaatggatttaagaggttcgagagatgaccaggagcttctgcttacatctcacgctccttttgtcccatctgatatgccaagagagcaaatattaatattttcacgctataaggacaagattatagttaaagagcccgaaatcgaaacgtttggggcaacttttgaccgaattcttgagagttgttttgaaattagccctcctatatcaaagattgccgaggagagaataaatgagttacttaaatcagatgatgtagaaaaaattgaacaggttttaaatgagtttgggcagtctgtcgagaaagcatttttggcaaatcatttacggatgttgaaaaagaaaggtaactga

SEQ ID NO: 77621 - DNA, 210 bp, Citrobacter koseri
atgaagaatcccattgaaaacctattagaagatagtaaaaattggcctgacaaggggttattattcgaagagatagctaaacgaaatgctatcccatatgacactatgcgagatataatttttgcactattagcagaagaaaaacctaggctaaagcagatttttgataaggaaactgcgagtatgtatctgcagagggtaaaaaaatga

SEQ ID NO: 77622 - DNA, 219 bp, Citrobacter koseri
atggaaccagaatatttctgcacaattacttgcgaaaccaccttaacgcatcttttcagggaggatatcaactatgaagtctttctgattgacggtgattactttgtgactgaccaggaaagcaaccaaaaagaagttttcaaatctgattacaacgaaaacgtctggctcactactgatggcaaaagcgctcgattcatcgagtgcaacgcgagatag

SEQ ID NO: 77623 - DNA, 456 bp, Citrobacter koseri
atgataagattattggttagtatagttatcatatctttgctaactatgtttagcagcactgtctggagtgttcgtccggacagcttttttgcatctactgttttcaccgttgccggaattatgttttctataggtcttgggttgatcgtcacattcaatccaagtggtgttaaaaacactaactacctaagagcaatcagaagaaatgttgctaaagtaaggaattcattcctgcttcacttcggattgactacatttttttacattataaatcaatatgttgctaattatgaaatttctttcctcttgttccataaagtgacgatactgtttagcgcttcaatttttttatgccttatgatgatattctcatcaatttatttcataataaatttcatagagttacagcgcttaaataatgacatatttgacgtggtaaacaaagaaactcgttaa

SEQ ID NO: 77624 - DNA, 1011 bp, Citrobacter koseri
atgccaacaaatgaagaaattgtattacctttgagcagacctaaacagattactcttcgtgcttttgagataaaaaatccaaatctatcaaaaacatctagtaacgctaaaacgtcattaacctccagacttgctcaggtaaagttggctaaagaaaggtgcatggttcttaatccagaagaccctaaccaagaaagagatgtactctcttactttaaagaatcaactatatcaaattcagtgttttgcaccatgttaaggataacttctgataaggatgttcaacacattaccgacacgctatttgagaaagaagttttctcgatggatgatatcgagactgctcatatcgacgcttcggcaatatgtaaaaaccattattatttttcaatgactgatgaatatttagtcactaatttaccattaaataaaacaatcgctcgtcttcaaacttatcttagctggttcactaataatgatttactagaatttacacctttaatttcagctaagggccaaactaagttaagcgatcttaaggcaattattgttagagatcctgaaccattgagtggccaggaagtgagcgtcgtacaagatagtaatgctacaagcgtacctgcaacaactgaagggaaaaaatcaattaaattgacccaaaaagttctagatatcataagaagttccatgtcagatactgaacagcttaacgatattgccctaagccagatgatatctgcagagctgttgattaaatttaaaaagccacgaaaaatgactgaagatgagtataaaaaagctcttggtgcttacctaaaaccggtcagtgatcttgataacatttctttcaaacgtaaggataacaagaccgaagttaagggtaaggatttacttcttacaaaacgagtcagcattgaaacaacgcagtctggaaagttagtagaacatcaattgctacaggaaatgagcaaatttctggtagaattgagtaatgataagattattggttag

SEQ ID NO: 77625 - DNA, 642 bp, Citrobacter koseri
atgacgcaaggtgctctcgctgaagccgttggtatggctcagccaagcgtttggaagctagttagcggtggcgcaaagggctcacgaaagacagtgcagattgcaaatgtcttaggagttagtcctgaatggctaagtgatggcattgggcctatgaggctggatggtcagcagccattaattccagcgcagaaatcaggatcggacgtattccgcattgatgttcttgatctttcggtcagcgcaggtgatggcgcagtgaacaatgagttcgttgaggtgcttcggtctgttgagtactcggtagatgatgctagacagatgttcaatggaaggaaggcagatcagataaggattatcaacgttcgcggagatagcatgtctggaactattgagccaggcgatctgctttttgtcgatatcaccattcagagcttcgacggcgatgggatttatgcattcctttatgacggcacagctcacgtgaagcgccttcaaaagatgaaggacaagatactagtcatctctgacaacaagacatacaccccatgggatccgattgagaaagaagaaatgaacctgctgtatgttttcgggaaggtgatcggcagcatgccgcagacgtataggaagcatggatag

SEQ ID NO: 77626 - DNA, 231 bp, Citrobacter koseri
atggtcaacaaagctattaactcggccattgagttcgtaggtagccagcaaaagcttgctgatgcctgcggagtcaaacagccgtccgtatgggcttggttgcacgggaagaaaaaggtttcagctgagaacgcaaaacgcattgagctggcaactgatggaaatgtccctgcctaccaaatccgacctgatttgtctgacctgttccctcatccgaaacaggcagtttag

SEQ ID NO: 77627 - DNA, 855 bp, Citrobacter koseri
atgactaaccaaatcatcatctccgatatcaccatccataaagacgctcaggggcgctactcgctgaatgatctgcatcaggcatcaggcggcgaagagaaagacaaacctgcaaactggcttcgcttagataaaaccgttgaattaattgatgaaattttaaatgctcagatccgagcatttaaacctgttgattcccgtaaaggacgctacggtggcacttacgtttgcaaggaactggtttactcttatgccatgtggatcagcgcctctttcgctctcaaagtgattcgggcatatgacgcgatggtatctggtaacgtggaaattaagccaaaaattcgccagtgcacagcaaaacaactcaccccgctgcgccagacggcagaacggttaatcacgactggcctcggtaaaatctatcccgatatctggaagttagtgcatcagcgcttcgacgttgagcatattcatcagttgcatcctgagcaggtcagcgaagccatcgaatacctgaccgtgctggaaggtgaatatcttggacgcgagacgcttcctgcaacttcgtcagggcatctcaccagtgaagaactttgcaccctatgctgggtatggaatgccgccgaatacatgcgggaaaaaatcgaactggcatacccggcactgagaactctcaaatctgaatacgctccaagtttctactcaatggcacttgagtatcagcgaaccctggaagccggaaggaagattctcgaacgtgaaacaaaacacattgctcctaaccctcacagcatatcagatgaaaactggcgacgagtgctgcctcgtttacgccaagtaaattacctcaactga

SEQ ID NO: 77628 - DNA, 303 bp, Citrobacter koseri
atgaatagcaagatggatgacaatattcactttgtagacttcccaaaacatggtggtggcggtagcggcagtgacggaggcgatatgtacacacgcgagagacttgcaagacttgaagccacagacgaactgcgagagcgaaacatccgaggcattgaatctgagctgaaaagcatcaaccaaaacctttcatcaatggaaaagcgattcattgataagatcgacgacaaccaaaaatggctggttggccttttggtatcggcaatacttgttccattattcattgctttagttaccaagtga

SEQ ID NO: 77629 - DNA, 531 bp, Citrobacter koseri
atgcactatccaaccgtatctgtaaacggtgtatccgttcgtgtcgataacgaagggcgttacagtcttaacgatcttcatgctgcggcagtagccaacggcgaagccaccgagtcacaaagacccagcgttttcctccgcagcgcccagatcaaacgtttcgtaaaagccctcaaatccaaagcactaaaaagtgcttcggaacaaaatcaacctcttagagtaataaaaggcggtgatcaaagtggggcttggggcgtcgaacttctggctattcgctacgcggcctggattaagcccgaatttgaaattgaggtatacgaggttttcagaacagtagttcgcctcggcattaatgtcatgtcccgcctgaacaaaatcgaccatgtgattaacaccgaaacaaaagcgattagccagtgtgccagccagatggccaggtggggtgttggcggtcgtaagcaattgctccacgccgcgcgcgatcgtgtcgctgatgaggtccaattgtatttgccgggaatagtgtga

SEQ ID NO: 77630 - DNA, 348 bp, Citrobacter koseri
gtgaaaacaaacctgattgaaacccgccgccgtcatcttgtccgggcaaaactcgattcaatgatgcggagaaccggaagttatttccagatagttaagctggaagatggttcaaaattaccagttgaacttgacgaagatattttgacgaaagcgctgataaaacttttcgaagcgatgatttatgacatgcataaacatgagcaggcagaggacttaatttctgaacattattcagcatgcgtgggtattaataaattaacacccgatggtgtggattttatgaatgctgttattgcaacgctggcggaacaatcattaaaagcggaggagttaactgatgattag

SEQ ID NO: 77631 - DNA, 273 bp, Citrobacter koseri
atgattagtcagaatacatttttacgcaatagcgctcctacccattctcggtcgctgacggctgatctgcatgtttcgccggatttctccgggcgagtgctggtttatgtgcgtaacggtctggttacagttcgacgccttgctgataacgaacatcttttgacgctgaccggatttatcgaaatggcccgccaggctggctgggttgtcactccatctgaagacgtaatggaggtttgcgccagtggcactaacagcaatcaggattcctga

SEQ ID NO: 77632 - DNA, 576 bp, Citrobacter koseri
atgaccttcaaaatgagtaaagaagcgcagactattaaaatttacaatcttcgtgctgatacaagcgaatttattgggggcggggatgcatacattcctgcacatacaggcttaccggcctactgcactgatattgaacctccagaggctccaactggtcatgttgctgtttttgacgacaacgaacaaaaatgggatgtggtcgaagaccatcgcggtaaaacggtctatgacatccagactggacaggctatttctatcgaatcactgggatcattgcctgataacgtagtttcagttgcaccggatggctcatgtgaaaaatgggatggcaaaaaatgggtgaaggatgaagaagcggaaaaagccgccaacatcgccgacgctcaaaacactaaagccagcctgatgcaggaggctaataacacaattgctatgcttcaggatgctgtcgatctcgatatggcgaccgatgacgatgtgcagttgctgaccgcctggaaaaaataccgtgtgctgctgagtcgggtaaaacaggaagatgcgccggatattaactggccttcacacccatga

SEQ ID NO: 77633 - DNA, 450 bp, Citrobacter koseri
atgaacgaacaagcgaacaaaattctcgttgagctattacagaaagcggcgaatggcatcgatgctgcggtgtcatttagccaggcgcagattccggaagttgtgcatcagttgctggtttggaacttagtacacagcctgatcatgacgttgatagccatttcaactatccctctaattttctggtttgtgaagagacagtgccaaaaagttgaaatcggcaaattcggcaatgaaggatattcatgggacaggggtaatccaaagtacagccccactatggtatgggacagcaaaggagagcttagcttcctgatagtaccaggagccgcagtgctgtgtttctgggggttatgggtgattgctgtagtaacgaagatgacgtggctaaaaatttggcttgctccgaaattgtacctccttgaatacgcagcctcactaattaagtag

SEQ ID NO: 77634 - DNA, 123 bp, Citrobacter koseri
atgaataaactccacacaatttctgagatgcttaaactggctggtcgtcttaatgaaatcgttgcagaaatgcaatctcgcaaggacgctatccttgcagaaatgaacaagaaagctgcataa

SEQ ID NO: 77635 - DNA, 348 bp, Citrobacter koseri
gtgacccaagaatttagagatgctgtaaaagtgacggatgcagaagcttcttttcaagaaaggcaactgtatcaggttcagatagctgtgaaggctctgattgatttcgttgtcactagctttgaagagttgggtatcgaaaagttgcatgagctcgttgatccatcacttgatgaggttcatgagatcattcttaagcttgataccaaggccaaacagcttggcgctcttgacctacagcaggtattgctaacggcacagatactgattcgtgatatcaaacagaaaaacccagatctgtgtgcacaaagctccaaaattctcaaaggggctataatttttaaataa

SEQ ID NO: 77636 - DNA, 2742 bp, Citrobacter koseri
atggtggccgcgcaactcaagatgccagtggaaagttggagcgagtacggccagcgcgaacagacacggcgggagcacttggtcgagctgcaaacggtttttgggttcaagcccttcaccatgagccactatcggcaagccgtgcatacattgaccgagctggccttgcagaccgacaaaggcatcgtgctggcgagcgcacttgtcgagaatctgcggcggcagagcattatcctgcccgccatgaatgccatcgagcgcgcaagcgccgaggccatcacccgtgccaaccgacgcatttacgcggcgctgaccgattctttgttatcaccccaccgtcagcgcctggacgaacttctcaagcgcaaggacggcagtaaagtgacgtggctggcatggctgcgccagtcgcctgccaaaccgaactctcgccacatgctcgaacatattgagcgcctgaaatcctggcaagcacttgatctgcccgcaggcatcgagcggcaggttcaccagaaccgcctgctcaaaatcgctcgtgaaggtggccagatgacgcctgctgatctggcaaagttcgaggtgcaacgacgctatgccacgctggtagcgctggccatcgaaggcatggccaccgtcaccgatgaaatcatcgaccttcacgatcgcatcatcggcaagctgttcaacgcggccaagaacaagcatcagcagcagttccaggcttccggcaaggcgatcaacgacaaggtgcggatgtatgggcgcatcggtcaagcgttgattgaggccaagcaaagcggcagcgatccgttcgccgccatcgaggccgttatgccctgggacaccttcgccgccagcgtcaccgaagcgcaaacattggcgcggcctgccgactttgatttcctgcaccacatcggtgaaagctatgccacgctacgccgctacgcgccgcagttcctgggcgtgctcaaattgcgggctgcgcccgccgccaagggtgtgctcgatgccatcgacatgctgcgcggcatgaacagcgacagcgcgcgcaaggtgcccgccgatgcgccaaccgcattcatcaagccgcgctgggcaaagctggttctgaccgacgacggcatcgaccggcgttactacgagttatgcgccctgtcggagctgaagaacgcgctgcgctccggtgatgtctgggtgcagggttctcgccagttcaaggacttcgacgaatacctggtgccggtcgagaagttcgccactttgaagctggccagcgaattgccgctggcagtggccaccgactgcgaccaatacctgcatgaccggttggaattgttggaggcgcaactcgccacagtcaaccgcatggctgcggccaacgacttaccggatgccatcatcaccaccgcgtcaggcctgaagatcacgccgctggacgcggcagtaccagacgccgcgcaagccatgatcgaccagacagctatgctgctgccgcacctcaaaatcaccgagttgctgatggaggtcgatgaatggacgggcttcacccgccacttcacacacctgaagaccagcgacacggccaaggacaaaaccttgctgttgacgacgatcctggccgacgcgatcaacctgggtctgaccaaaatggccgagtcctgccctggcaccacctacgccaggctgtcttggctgcaagcctggcacatccgcgatgaaacctattcgacggcgctggccgagctggtgaatgcgcagtttcggcaacccttcgccggcaactggggtgacggcaccacgtcatcgtcggacggccagaacttcagaaccggcagcaaagcagaaagcactggtcatatcaacccgaagtatggaagcagtccaggacggactttctacacccatatctccgaccagtacgcgcccttcagtgccaaggtggtcaacgtgggcattcgtgattcaacttacgtgcttgatggcctgctgtaccacgagtcggacttgcgcatcgaggaacactacaccgacacggcaggcttcaccgatcacgtgtttggcttgatgcatttgctgggatttcgcttcgcgccgcgtatccgtgacttgggcgaaaccaagctattcatccccaagggcgatgccgcctatgacgcgctcaagccgatgattagcagcgacaggctgaacatcaagcaaatacgcgcccattgggatgaaattctgcggctggccacctccatcaagcaaggcacggtaacggcttcgctgatgctgcgcaaactcggcagctacccgcgccagaacggcttggccgtggcgttgcgcgagctggggcgcatcgagcgcacgctgttcattttggattggctgcaaagcgtggagctgcgccgccgcgtccatgcggggctgaataagggcgaggcgcgcaacgcgctggccagggcggtcttcttctaccgattgggtgaaatccgcgaccgcagttttgagcagcagcgctaccgggccagcggcctcaatctggtgacggcggccatcgtgttgtggaacacggtatatctggagcgtgccaccagtgctttgcgtggcaacggcacggcgctggacgacacattgttgcaatatctgtcgccgctggggtgggagcacatcaacctgaccggcgattacctatggcgcagcagcgccaaggtcggtgcggggaagtttaggccattgcgaccgctgccaccggcttag

SEQ ID NO: 77637 - DNA, 2742 bp, Citrobacter koseri
atggtggccgcacaactcaaggtgccggtggaaagctggaacgattacggccagcgcgagcagacacggcgggagcacttggtcgagctacaaacggtgtttggattcaagcccttcaccatgagtcactaccggcaagccgtgcatacattgaccgaactggccttgcaaacagacaaaggcattgtgctggccagcacccttattgaaaacctgcggcggcagagcatcatcctacccgccattaatgccatcgagcgcgcaagcgccgaggccattacccgtgccaaccggagcatccatgcggcattggccgattccttgatacctgtccatcgccagcgcctggacgaactgctcaagcgcaaggatggtagcaaaatgacgtggctagcgtggctgcgccaatcgcccgccaagccgaactcgcgccacatgcttgaacacatcgaacgcctcaaagcctggcaggcgcttgacctacctgctggcatcgaacggcaggtacaccaaaaccgcttgctcaagatcgcccgcgagggcggccagatgacgcccgccgacctggccaagttcgagtcgcagcggcgttacgccaccttggtagcactggccatcgagggcatgtccaccgtcactgatgaaatcatcgaccttcacgaccgcatcatcggcaagctgttcaatgcggccaagaacaagcatcaacagcagttccaggcttccggcaaggcgatcaacgacaaggtgcggatgtatgggcgcatcggtcaggtgctgattgaagccaaacaaagcggcggcgatccgttcgccgccatcgaagcggtcatgccatgggacaccttcgccgccagcgtcaccgaggcgcaaacgctggcgcggcctgccgattttgattttttgcaccatatcggcgagagttacgccacgctgcgccgctatgcgccgcagttcctggacgtgctcaaactgcgcgccgcgcccaccgccaagggtgtgctcaatgccatcgacgtgctgcgcggcatgaacagcgacagcgcgcgcaaggtgcccgccgatgcgccaaccgcattcatcaagccgcgctgggcaaagctagttctgaccgacgagggtattgaccggcgttactacgagttatgcgccctgtcggagctgaagaacgcactgcgctctggtgatgtttgggtgcagggttcgcgccagttcaaggacttcgacgaatacctggtgccgatcgagaagttcgccaccctgaagctggccagcgaattgccactggccgtggccaccgactgcaaccaatatctgcatgaccgactggaattattggaggcgcaactcgccacagtcaaccgcatggcggcgaccaacgacttaccggacgccatcatcaccactgcatcgggcctgaagatcacgccgctggacgcagcggtgccagacgccgcgcaagccttgattgaccagtcggcgatgttgctgccgcacctcaagatcaccgagttgctgatggaggtcgatgaatggacgggctttacgcgccacttcacacacctgaagaccggcgacacggccaaggacaaaaccttgctgatgacgacgattctggctgatggtatcaatcttgggctcaccaagatggccgagtcctgccctggcaccacctacgccaagctgtcttggctgcaagcctggcacgttcgcgacgaaacctattcgacggcgctggccgagctggtgaacgcacagtttcgacaacccttcgccggaaactggggcgacggcaccacgtcatcgtcggacggccagaacttccgaaccggcagcaaggcagagagcaccgggcatatcaatccgaagtatggaagtagccctgggcggacgttctatacccatatctccgaccaatacgcgccattcagcgccaaggtggtcaacgtcggcttgcgcgactcgacctatgtgctcgatggcctgctgtaccacgagtctgacttgcgtatcgaggaacactacaccgacacggcgggcttcaccgagcatgtgttcggcctgatgcactttctgggattccgattcgcgccacgcatccgcgacctgggcgacaccaagctgttcattcccaagggcgatactgcctacgatgcactcaaaccgatgattagcagcgacaggctgaatatcaaggctattcgcgctcattgggatgaaatcctacggctggccacttcgatcaagcagggcacggtgacggcctcgctgatgctgcgcaagctcggcagctatccgcgccaaaacggcttggccgtcgccctgcgcgagctggggcgcatcgagcgcacgctgttcattctggattggctgcaaaacgtggagctgcgccgccgcttccatgcggggctgaataagggcgaggcgcgcaacgcgctggccagggcggtcttcttctaccgattgggtgaaatccgcgaccgcagttttgagcagcagcgctaccgggccagcggcctcaatctggtgacggcggccatcgtgttgtggaacacggtctatctggagcgtgccaccagtgctttgcatgcccacggcaaggcgctggacgacacgttgctgcaatatctgtcaccgctggggtgggagcatatcaacctgaccggcgattacctatggcgcagcagtgccaaggtcggtgcggggaagttcaggccattgcgaccgctgccaccggcttag

SEQ ID NO: 77638 - DNA, 405 bp, Citrobacter koseri; identical to SEQ ID NO: 77326

SEQ ID NO: 77639 - DNA, 348 bp, Citrobacter koseri; identical to SEQ ID NO: 77325

SEQ ID NO: 77640 - DNA, 147 bp, Citrobacter koseri; identical to SEQ ID NO: 77324

SEQ ID NO: 77641 - DNA, 834 bp, Citrobacter koseri; identical to SEQ ID NO: 77323

SEQ ID NO: 77642 - DNA, 369 bp, Citrobacter koseri
atgaccgggatcctgttagggcaagaagtccgtaagcgtaagactccgcaagagaaaattgccatcatccagcaaacaatggagccgggcatgaacgtctcccacgttgctcgtctgcacggtattcaacccagcctgctgtttaaatggaagaaacaataccaggaaggcagcctcaccgccgttgcggccggagaggaagtggttccggcttcggagctggcagctgcgctcaaacaggtccgggagctacagcgtcttctgggtaagaagacgatggaagttgagatcctcaaagaagcggtggagtacggccagtcgcgaaaatggatagcgcacgcgcccttgttgccaaaggacggggaatag

SEQ ID NO: 77643 - DNA, 822 bp, Citrobacter koseri
atgagcgtgtcgcgtgcgcagctatcactgcgggtgaaccgttctgccgactggcaggacaggcgcagaaaccgacgtaatgacgaagcggatgctgagatattatcgggcatcctcgatatcatcagcgacatgcccagctacggctaccgacgggtgtggggtatcctgcgtaagcaacgtcgtgtagagggacttccatcggtgaacgccaaacggctttacaggataatgagcgagcataacctgctgttgctgcatgataaatctgagcgcccgaagcgggagcataaaggcaaaatcgcggtagctgagagcgatatgcgctggtgttcagacggcttcgagttcggttgtgacaacggcgagaaactgcgggtgaccttcgcactggactgttgcgaccgggaagccatagactgggcggcgagcaccggaggctacgacagttcaacggtacaggatgtgatgctgaggtcggtggaaaagcgcttcggtagcacgctgccggctaacccggtgcaatggctgacggataatggttcagcgtacaccgcgcatgaaacgcggaagttcgccagagaactgaatctggagccatgtacaacagcggtgagcagtccgcagagtaacggcatggccgaacggttcgtgaagacgatgaaggaagattacatcacgttcatgccaaaaccagatgtgcgaacagcgatcgagaaccttgcagcagcgttcaatcattacaatgaaaaccatccgcacagcgcgctgggatacaactccccaagggaataccggcgacagcggacatcgttaacttaa

SEQ ID NO: 77644 - DNA, 216 bp, Citrobacter koseri
atgaaccagagaaatttgaaggatttacagaattttgactttctcgcgaagagttttgcccgcatgcatgcggcaggttaccgcgtagatattaagaagattacaggcaatatgtcagcagagttgcgggtatggtttcttgagcgttacgaacaatactgcaaagaggcactaagcgacagggacgcagacgcaagagaaaccgggattcattaa

SEQ ID NO: 77645 - DNA, 1206 bp, Citrobacter koseri
  misc_feature (1148)..(1157): n is a, c, g, or t
atgaagggaatgcagaagattaaaagaggtaaatgtttctcaggaattattcactatgctttgaaatcagtatctcatcataaaactgtaccaagaataatcggtggaaacatgctgggaaactctactactgagttaatcgatgaatttaatacagccaaaaagcttcgtggagatatagtaaagccggtgtggcacaattcacttcgattaccaaaagatgatacgcttacagattatcagtggtctaatatcgctgatgattacatggcacgtatgggtttctcggaaacacatctaaaatgctatgttctacatgatgatattaacggtcaacatatccacattatcgcctgtcgtattgatctcattgatggcagactctacttaggtaaaaatgaaaatctcatcagtacgcgtattatccaagaactggaagaagattataaattaactcgaactaaagggtcatcagctactggagcgccatcatctaagtcgaaaaatagaaaaagtcgtggtgaggatatgttggaaaaaagaactggtaagtcatgttctaaagtcataatccaggaaactattgaaaccttgcttgtcaaaaatctttcgactatagaatttgtacatcaactaaaagaaagaaacattgtagctgttccaaacatctcatctactggtcgtatgaatggcttctcgtttaaatatggaaatatggctttcaaagcatcgcaattaggaaaaatctactcatggtctgctttacagaacaggatcaattatattccagatcgcgacaacgcttttcttttcaatttaaaagcatcttgcagggaaacactcaatatgataaccccttctgggattgtaatagaagaggttaatcccacgatagatatgcttgcactttgtaaaacttctgataacgatagatacgataccgattataccaaagaatgtatctcgacaattcctagtaatagcgaagggatgttaactgatgctccaaaattaagcttagaaataccaaagtttagatggctagaaacaattccctatattgatgcagttattagtctactaaaaaacatcaaaatactaacactcaaacgaccaaaaaaccctgatattatcaacaatataagagnnnnnnnnnnatataagagttgcgaatatagcccctttatgcctcgccacaacagctga

SEQ ID NO: 77646 - DNA, 900 bp, Citrobacter koseri
atggctaaacagaaaatgctcgtcttgacctctggcgggcgtacatctcaatacatggctaagcgcctgatggatgaatgccagagcgaatatgaaatggtgcgcgtctttgctaataccgggcaggaaatgaatgagacgctagattttgttcatcaatgtgatgtgcaatttggttttaacactgtgtggattgaggccgacgttcgcggtgggcgtaatgcaacagcgcataaagtcgtgacgtatgaaacggcatcccgctccggtgagccgtttgaaaaagtggttaagaaatacgggataccaaatgcgagttacccgcattgcacccgcgaactcaaagagaacccgattcacagctatatccgctctatcggctggaaaaagggcgaataccttaccgccatcggtatacgcgccgacgagccacgccgagttaagcgtggcatatcgagccagaataaacagattcgcgtctatccactggtcgatattttcccttccgacaagctggatgttctggacttctggtctgagcaggaatttgaccttcaaatacctgaatacctgggaaactgcaaagcctgttttaagaagtcaaacaacaagcttcagcaggtttaccgggataactggcatcacttcgacatcttcgcatatctggaaaaccaatacggcaaagttggcggcaacagtatcgcaggacaaaaatccgaggagccacgcaaattttatcgcggctatcgcagcgttcgcgagttgatagcgacctttgacctgtcagaaccggcaccaaaagacgatccggaagcatatgagggctgcgctgcgtcctgtgaggcattcatgggtgatttggattccccgacatggggtgatgaggctttgaatgactga

SEQ ID NO: 77647 - DNA, 159 bp, Citrobacter koseri
atgactgacaaattattgagtgacgacgtgaaaatcatacgtcgtcaaatttccgaagatatgccgtacggtgaggtaattaacttcatggttaatcaacttggactgactcataaagaagcggttgcagcttacgaagaactaagcggggaggactaa

SEQ ID NO: 77648 - DNA, 372 bp, Citrobacter koseri
atgaccactattaccaaaaaacaacgcgcagagctgcgcatgaagttcggtggtcgctgtgcttattgcgggtgcgagttaccagaaaaaggctggcatgctgaccacgttaagccagtcattcgttttgaaggacagatgcttcaccaggagcgggatgaaatcgacaatctggtcccggcttgccacccatgcaatctgcacaagcactgcaatagcctggatgattaccgccgaattattgacgatggtcgcagggagttcctgcggtccggcaagggaaaggctctggtgcgcatggggttagttgagatgaaacccgatccggttgtgttctggttcgaacagtatcaggcaggagtagcatcatga

SEQ ID NO: 77649 - DNA, 837 bp, Citrobacter koseri
atgaaactggaagcatcgctaaaacatttcagccctcaggggatgcacatcagcgacagcgtgaaaggcacatcaccggatcgtataaccggtactgatgtaatggccgctattggggccaccagcagccgcgcacgattcggcctgtctgctttcttcggtaaggccgggatcagcaaaacggatgagcaactggcggttcaggcgctggcgcgtcacgcgatggagacggctccgaagaacgtcaggaagggcgcaggtagtgagttcggctggtgcatgcaggtgctggcgcagtttgcatttgctgagtattcccgttctgcggccaccagcgcgacatgtcacagttgcaatggttcggggtgtgtaacggtgacccggataatccgcaaagtatcttacccgtggggtaaagctccatactgggccagcaagtcccgcgccgttcgtccttcagactgggagcaatggaacgaagttacagagagtgcccccgctgtttgcgaggtatgtgatggtaaaggcattctgagcgctcgctgccgttgtggtggcaaaggggaggtgctcgatcgcaaggctacgaaagaacatggggcgccagtgttcaaaacctgcgaacgttgtggtgggaatggcttttcttctgtgccgtctacggctgcgtacaaagcgattctgaagcgtgtaccagagttgcacgtcagaacatggacccgcaactggaagccgtttcttgagtcgctggtggacatttgcagccgggaagagcgtaaggccgatactgcttttcagaatgcgaccagttttaatgatgatgtgaacaaaatttag

SEQ ID NO: 77650 - DNA, 540 bp, Citrobacter koseri
atggggcttatcaggcgcgagaaccgcgttggcgtcaacaacggaaaaggtaacacgtcaaatgtgtattacctcaaattagatgccaaccctatgccattaaatggcacaggggtatgccaccagatggcaccccctatgccaccagatggcacaccccctatgccaccagatggcaccagaaccagtcactcttttgaaccagtcaatgaaccattaaacacccaagccgctggcgcgacttgcgatgaggttggtcctgtcgatcatgaaatttctggtaagtacgcattcgagggacaggtcgttcggctgaaccacaaagactaccaggcatggttaagtctgtacccgctgatagacctgaactacgaactccagaagctggatatcgagttcacccacgaaaagcccaaaaactggtttatcactgccagccagaaactgagctaccagaacaagcaggctgcatctcgcggtaagccatcttccaagccagaccttactaacactgactggatttacggagtgcagctatga

SEQ ID NO: 77651 - DNA, 729 bp, Citrobacter koseri
atgaaaagccttgcagagcagatgcataactttgaccgcgagcagatgcgccgagttgcgaacaacctgccagagcagtacgacgacaagccgcagttagaacaggttgcccaggtcatcaacagcgtgttcagccagttactggccgctttcccggcaactacggcaaaccgcgaccagaccgagatgaacgaaatccgccgtcagtgggttatggcttttgctgagaacggaattaccacaatggcgcaggtcgatggtggtcttcgtgtagcccgtcgtcaggagcgtccatttttgccgtcgccgggtcagtttgttgcatggtgcaaagcggaacaagcggccgccgctggtctgcctgacgcgaatgaacttgtcgatctggtttatgagtattgccggacgcgcggactgtacccggatgctgagtcctatccgtggcccgggagaattgacgggcagcatacgcaggaatcatctgccagctactggctggttacatccctgtattcaaacatgcgagccaacgcactcagcgacacagaactgcggcgtaaggcatcagaagaactcgttcacatggcatccagaattaatcgcggtgaaaccattcctgaacctgtaaagcaacttcctgtcctcggtggcaatcctctgagcaaagcacagggtctggcaaagattgctgaaattcgcgcaaaacacggactgagggggaagcactga

SEQ ID NO: 77652 - DNA, 279 bp, Citrobacter koseri
atgaaaattttaaaactgagtcagcaggcaacagtttctcgtccggtcgattcgattatcggttgggaagagaaaacaatctacgagccagtttttgttgtggctgagcatattgagtcgtttttgtttgctggagtaagccacatcaaaatgacctcgggcgaaaagatcgttgtacgagaaacacctgaagaaattctcacgctgcttggcgtcgatgttcaaacggatagcctgaaaacatggggtgaaattgcgcagaaggaggccgcccaatga

SEQ ID NO: 77653 - DNA, 378 bp, Citrobacter koseri
atgccaccagatggcaccagaaccagtcactcttttgaaccagtcaatgaaccattaaacacccaagccgctggcgcgacttgcgatgaggttggtcctgtcgatcatgaaatttctggtaagtacgcattcgagggacaggtcgttcggctgaaccacaaagactaccaggcatggttaagtctgtacccgctgatagacctgaactacgaactccagaagctggatatcgagttcacccacgaaaagcccaaaaactggtttatcactgccagccagaaactgagctaccagaacaagcaggctgcatctcgcggtaagccatcttccaagccagaccttactaacactgactggatttacggagtgcagctatga

SEQ ID NO: 77654 - DNA, 729 bp, Citrobacter koseri
atgaaaagccttgcagagcagatgcataactttgaccgcgagcagatgcgccgcgttgcgaacaacctgccagagcagtacgacgacaagccgcagttagaacaggttgcccaggtcatcaacagcgtgttcagccagttactggccgctttcccggcaactacggcaaaccgcgaccagaccgagatgaacgaaatccgccgtcagtgggttatggcttttgctgagaacggaattaccacaatggcgcaggtcgatggtggtcttcgtgtagcccgtcgtcaggagcgtccatttttgccgtcgccgggtcagtttgttgcatggtgcaaagcggaacaagcggccgccgctggtctgcctgacgcgaatgaacttgtcgatctggtttatgagtattgccggacgcgcggactgtacccggatgctgagtcctatccgtggcccgggagaattgacgggcagcatacgcaggaatcatctgccagctactggctggttacatccctgtattcaaacatgcgagccaacgcactcagcgacacagaactgcggcgtaaggcatcagaagaactcgttcacatggcatccagaattaatcgcggtgaaaccattcctgaacctgtaaagcaacttcctgtcctcggtggcaatcctctgagcaaagcacagggtctggcaaagattgctgaaattcgcgcaaaacacggactgagggggaagcactga

SEQ ID NO: 77655 - DNA, 300 bp, Citrobacter koseri
atgaaaggaaaacaggcaattctgcgttatctcgaaacgcaccggaccttcaccgcgaaggatgtggcaaccgaatacggaatatcactgagctgcataaccaagaacgctcttgagcttgagaagaagagggcaatcacacggcttggcaaggtctggcgaacggttacttatcgcctggcgacaccggaagaacaggctggtacggcgcgcagctgcaccaacgggatattccaggagtgccgcaacagcgctgttatgaagagggtattgatggtttgggggagggtaggggtatga

SEQ ID NO: 77656 - DNA, 279 bp, Citrobacter koseri; identical to SEQ ID NO: 77652

SEQ ID NO: 77657 - DNA, 243 bp, Citrobacter koseri
atgaaacaagataacatcatccaaaaagtctggagcctttgcaacattttgcgaggtgacggcataacttactatcagtatgtgtccgagctcagctacttgcttttcctcaaaatcgcggaagaaaatgggacagagacacttatccctgagggggctcgttgggcagatttggagtcacatggttatcaaagccatttatgcgtttcctacgacagtcttttctcattcagagaaccttaa

SEQ ID NO: 77658 - DNA, 1023 bp, Citrobacter koseri
atgaccatcaccactgtcggtatcgatcttgctaaaaatgtgtttgctgttcactgcattgaccaaaatggtaaagctgttctggttaaacccaaggtgtcgcgtgcagcactttctgaactcatcgcaggtttacctccctgtgtcattggaatggaagcctgctcgggtgcccactattgggcaagattattcaggcagtatggccatgatgtccggttgatggctccgaaatttgtctcaccctatcgcatggcgggtaagaccgggaaaaatgatgcagctgatgcaatagctatttgtgaggcagtgcagcggccgcatatgcgctttgtaccagtcaaagacgaaagccagcaggcaatgcaatgcttacatcggacaagacagggatttatccaggaaagaacagcaacgtataaccgtcttcggggcctgatatctgaattcggggttattgccccacaaagcactgatgctctgcgtcatgttgtttctgaccagaaggaaactctgccagtacaggtcaggctgtgcattgatgatctattgacacatgtcactaatattgaagagaaaatcgccgaatatgacagggtattatctcgtgtggccaaaacagatcatcgcagccagcagttaatggaactgaaaggtgttgggcccaccacagcgagtgcgctggtcgccagtattggcaatgcccatgattttaagaacgggcgccaactggcagcctggttggggctaacgccatcacaatacagtagtggcggaaaatcaaagcttggcaggataacaaaagcgggtgatgcctatctgcgaaccctactggtccagggagcccgttctgtaatggtaggggcagagaatagaacggacccgtttagccgttgggtctgctcgttgattggtaggcggggatactggcgtgctgtcgttgcaatcgccgccaagaatgcgaggttgtgctgggcatcattacattacggcgatgacttcagactgtattcaacaacatga

SEQ ID NO: 77659 - DNA, 213 bp, Citrobacter koseri
atgaatgcagaacaaatactttccgagaacggaactgtccacaaaatcgcgatggatattgatcgcgtaatcaatacgcttgagtacgcagaatcagatccagatgttgcatataaaccagcggcactcattaaaatttgtatcaatcagttaaaggagaatctttctgttataaaccacgaacttggttatgattggccggagaataaataa

SEQ ID NO: 77660 - DNA, 423 bp, Citrobacter koseri
atgaaaactcccttagatatgcttcatgacatcgtcgctcaaatttccgaaggcaatacactgctggaaatgctttataaaaacaccgaagaaatgaatgaggatactgattgcggcttagcctgcctcattcgctctttcgataaaactcgtgaaacagcttacgcatatattgaagagttagcaaaaaatgaaaaggcaaagtcgccccctctcagagggaatagtgacgatgtttccgatgatgtttttcatgcaacggtcagtgcggcaaaactcagagaactggctcacgtatataacgagtcgtatttttcaggaaaagacagtgatgacgccgattgcctgatggcatcacttattttcgacaatgccattaaagtgcatgatttactgaaagacattgaaaataaattaagttaa

SEQ ID NO: 77661 - DNA, 264 bp, Citrobacter koseri
atgaatattatatctgtagaaaaaaacaaagtgcataaaacgacagaagggatgaaacagcatcaggaccgtccatatgaatttaatcagagcatccacgctcctgtaatttcaaatctggaacgcagccttgctattacaggcacattgttgacaagggcagacctgccaaatagagaaatcatagctaaagcacattattttgctcaggtagcactggctgaagcgcaaatgagaatgaataatgatattcatcaaagataa

SEQ ID NO: 77662 - DNA, 1005 bp, Citrobacter koseri; identical to SEQ ID NO: 31749

SEQ ID NO: 77663 - DNA, 555 bp, Citrobacter koseri
gtggctcaactcagccctgaatttaccgccatactggttgatcactggcgcgaactcaaagaagaaaacacgcgcctaaaaaacaatgccctgacatcacagtcagtaccaacggcaaaccacgatatcctttcgttggcccgtgttgtggccgaagcgacggcatcagcgacgatgaaagcggtcatggaagtgagcaacgctaacctggttgccgctgctcctgtatctcccgttgtgccacaacagcacatcagtaccgctgaattcattaacacggatgctgaattcgttccggtacacaaggtgtcatgggaaacagggctgtccgatccatcctgccgtcgccttgtccagttcgcaaacctgccatccaggcagttaccgggcgttcgcggtctgtgtgtacatcgtgaatcattcctgcatgcctttcaggtgctgctggaagaatcgacccgtccgggtggtaagcgcaagcgttggcagcaccctgagtttggcggcttcattctgcgtaaagatccgaaagagatccctggggagagtgactaa

SEQ ID NO: 77664 - DNA, 426 bp, Citrobacter koseri
gtgaccataaatagcgatatctggatgccggcaggttcagtcgaggaggcccaccagcgggccttaacatgggtgtgcgatgcgtatctgttctatctggtcagcctgcaccgtcgcccggtgtaccgccaccagtacggtgatatttcgcttaaccagccagccctacagggttttattgactcctacctcaaagataaggggtggaataccgaacgacgaacggcgcattacatcgatattctggacctcatcaaatacaagccccgcagcaattcgggatttatcgactgggggacagtgccgacacttactccgcggggtatgcgctggatgaacgcctgcttctcccgtcttggcgaaatggttaacagctatggtggctgggaaaactacgtaaaagaaactactggagattcaatttaa

SEQ ID NO: 77665 - DNA, 456 bp, Citrobacter koseri
atgccatcacagcctgtgccaacggcaaaccacaatatcctttcgctggcccgcgttgtggccgaagcaacagcatcagcgacgatgaaagcggttatggaagtgacgaacattaatctgctaacggctgcacctgcatccccgacagatcaaccgacgccgatcggcgctggtgctgaatttgtgaataccgattctgaatttgcaccggtacacaaggtgtcatgggaaaccgggctgtccgatccttcctgccgtcgcctcgttcggttcgcaaacctgccatccagacagttaccgggcgttcgcggtctgtgtgtgcatcgtgaatcattcctgcatgcctttcaggtgctgctggaagaatccgttcgtccaacaggtaagcgcaagcgctggcagcatcctgaatttggcggttttgttctgcgtaagggggtttccagtggcgaatag

SEQ ID NO: 77666 - DNA, 402 bp, Citrobacter koseri
gtggcgaatagtgaattgcatctggcccaccagcaggcgctggcatgggtgtgcgatgcttacctgttccatctggtcagtcttcaccgtcgtccggtatatcgccatgcgcacggcgacatctcacttaaccagccagcattgcagggattcatcgattcgtatctggaagacaagggctgggatatggaaaaacgccgcgcccattacatcaacattctggacctgatcaaatatatgcatcgcagcaattcggggtttattgactggggtactgtgccggcgctaaccccacgcgggatacgctggatgaatgcctgcttttcccgtctgggggaaatggttaacagctatggcgggtgggaaaactacgcaaaagaagctgcgggagaatcaatctga

SEQ ID NO: 77667 - DNA, 228 bp, Citrobacter koseri
atgaacaaccaattacttgcttggcgtaagtcttcaacaaaagagcagtgggcagatcttgctaaaaaatcaggcacatcttcgggatacctaaatctcattgcctacggctatcgcaatgcctctcctcgcctggccttggcgatcgaaagcgcatcaaagtcattcgtggataagcccgttatcacaaaagaacagttggttttcaagataggaactgaggtgtga

SEQ ID NO: 77668 - DNA, 690 bp, Citrobacter koseri
atggacataaaaagcatacgtaaatcaaaccttgagcagctcattgttgagttcctgaagcgcgacagacatacgacaaaagcagctttcgcagaattgtgcgggataagccctgcccagttgagccagttgcttgggggcaatagtcatcgaaacataggcgacaaaatggccagaaagattgaacaggccttggatcgtccgtttgggtggttggatagtccacacaatgctcctgacagtattaaaaacgagttggagtatgtcggaacaatcagaccgggagcagtaccagttgtaggggaagcgattcttgggattgacggaatgatcgatatgctagagatccacgctggatggttacaaatatacagcgcggatagggatgcctatgggctgaaagtgaagggagacagcatgtggccgcgcatacagtctggagaatatgtcgtcatagagccaaacacccaagttcatacaggtgatgaagtttttgtacgaacaaaagacgggcataacatgataaaaatcatgagtaaaactcgcgatggcgattatcaattctcaagtgtaaacagtgatcacaggcccatcaccttaagtcctgatagcattgagaaaatgcattttgtttcggctattgttaagcatacgcgttatgttgacaatgatgaaatgcccactctgtaa

SEQ ID NO: 77669 - DNA, 579 bp, Citrobacter koseri
atgagcagtaaatacgacattccagaagctacgccaaacggcatcaaaatcgggaaccgtgtaattggctggtcaggtgcggtgaaacagttcgatggttcgcgttttgactcccgaccatcggaagggttgcgttggttagcctgcattatggatgccgaggcttctggctgggtggctttgtacgtcaagaaggaactcatcctgtggcgctggcttgtggcaacggtgttcatcaacgaagagagggacaggaacggcactatcgatatccctaacgagtccggaggagtcgacaccgcagttatttattcgggtaagaaaggcgatctgagtatctatccgggcccactgcgcctttctctcgccaaccacgtagaaggtatcgcgattgagaaatacggcgtggagaagggttcaaagatggcccttcggatgtaccagaacatggtgattgcagatcccggagacggattcaggatgtcaccctttgggcgagaagggcttgagatgcttcacgatgactacatcggaatgattaaaaccagcggcataccagaaatgccagttatgcactga

SEQ ID NO: 77670 - DNA, 258 bp, Citrobacter koseri
atgcaggacgaaaagcagcaaccgtatttttttaatccgggcatgtcagccgaacagcttgaggactggctggggcagcaaaaacttcacctcactcactttaactgcctggtgaaagaaaaagccgctcttgaggaacggctcagtgagatttcagcagaaattgaacggatgtctactggtggttttgaaggaaaactgagttttctttgggagcccagtccgcttctgagaaatcatcaacaggatagtgactga

SEQ ID NO: 77671 - DNA, 408 bp, Citrobacter koseri
atgcgcgatattcaactggtacttgagcgctggggcgcatgggcggccaataatcatgaagatgttgcctgggcaccgattgccgctggatttaaaggacttcttccggccagggtaaaatcgcggccacaatgttgtgatgatgatgcgatggtcatctgcgggtgcatcgccaggccgaataaaaataaccaggacctgcatgatttgctggtggattattacgtgatgggcatgacgtttatggcgctggcccgcaagcatggttgctccgacggtcatatcggtaaaaagctccagaaagccgagggcgttgttgaaggcatgctgatgatgcttgatgtgcggctagagatggacagatatgtaacgcgggagcccgaggttaaattagtggctggtaaataa

SEQ ID NO: 77672 - DNA, 498 bp, Citrobacter koseri
atgatcgccaaaaaatcaccagaagaaattcagagcgccattgatcttatcaaagacttacccggcgtccccacgtggatgcttgacgcaaataactacggttccgaggcgccactgacccaggaggaactgtacgaattcgcagagtttcacactaagcaacttagggttaacgccgctctgcattacctcaattcctgtgatgatcgtttcggtcgcaaagagaatggtcagcaggttttccgcgcgccgggagttgtcattgagattgatcagaacgttattaaaaccctgctcatccaccaggtcgagcgctacgtgatggaagaaaagccagaagaaaaatatctggcccccatgcgcttctatatgggcgatgaggttaaccggaaagaacatggttcaacctggcttatcgacttcatcgacagtgtgtttatcgaaggtgcaaacgagttcaaaaacctgttcgacaactgcggcagcactatccattaa

SEQ ID NO: 77673 - DNA, 219 bp, Citrobacter koseri
atgccaaaacaggcagaaaaagcaaatttacaccccacgcacaagtgctcgttttgcggaaaaaccaacaatgatgtcgcctcaattattgcaggtgatggcgtatgcatctgcgatgagtgtgtatttctctgcgtggaaattatttttaatcagaacaggagattacaaagtgagcatgtcacttatggcgaaagcaatgggggtcaaggtgggtaa

SEQ ID NO: 77674 - DNA, 387 bp, Citrobacter koseri
gtggtggtgcatagcatggacaggttggcacgcaaccttgatgacctgcgccgcatcgtccaagggctgacacaacggggcgtgcgcatggagttcgtcaaagaagggctgacgtttaccggcgaggactcaccgatggccaatctgatgctgtcggtcatgggagcctttgctgagttcgagcgcgccctgatccgcgaacgtcagcgcgagggaatcgtgctggccaagcagcgcggtgcctaccggggacgaaagaaatcgctgaacagcgaacaaattgtcgagttgaaacggcgagttgcggcaggcgaccaaaaaaccttggtggcccgtgacttcggcatcagccgcgaaaccttgtaccagtacctgcgggaagactga

SEQ ID NO: 77675 - DNA, 504 bp, Citrobacter koseri
atgatgactcaaggcaccttggtcgatgccaccatcattgaggcacccagctcgaccaagaacaaagagcagcaacgcgatccggagatgcatcagaccaagaaaggcaatcagtggcactttggcatgaaggcccacattggtgtcgatgccaagagtggcctgacccacagcctggtcaccaccgcggccaacgagcatgacctcaatcagctgggtaatctgctgcatggagaggagcaatttgtctcagccgatgccggctaccaaggggcgccacagcgcgaggagctggccgaggtggatgtggactggctgatcgccgagcgccccggcaaggtaagaaccttgaaacagcatccacgcaagaacaaaacggccatcaacatcgaatacatgaaagccagcatccgggccaaggtggagcacccatttcgcatcatcaagcgacagttcggcttcgtgaaagccagatacaaggggttgctgaaaaacgataattaa

SEQ ID NO: 77676 - DNA, 150 bp, Citrobacter koseri
atgagcatgaccatttattgtattttgtacgatcgcatttggtttaggcagtccagccatatcccacgcaattgccccatattcatgatccacatcaaaaacaaaaccatttataaaatatttattattatatcctatatatttctttaa

SEQ ID NO: 77677 - DNA, 246 bp, Citrobacter koseri
atggggattgacccggtacacttcgggatcatcatgacattcaacctggctatcggtatctgtaccccgccggtcggcagcgcactgtttgtcgggtgttctgtgggcggtgtcagtattgataaagtcctgaaaccactggtgccgatgtatatcgcactgattgcggcgctggcggtggtgacctatttccctcagctcagcctgtggctgcctgagttagtcctgaactatacaccttcgtaa

SEQ ID NO: 77678 - DNA, 864 bp, Citrobacter koseri
atgcataaacgtaactccatgttaaatggcaactcactcaggtttcgggacgaacaaccgcaggcaagtgattttagtagctggcataccatgaaccctgtacagcgcgatatggcctttatggacggctcatttatcacacaaagccatcacatcttgctgctcacgcccgaagaagcacagcaggtgatggacgatttaatgggcggagtggataaatttttttcctaccgtgcagcaccaggtaatatcaaagatggcctggatggcttccgcagtctctctaagctcaccacctattacaattccgcacaagagctggtctttaatttcagggcaatccgcattcaagccattgaatacaaagtcggcggtaaaacctatatcaaaattactggatatcctgccctgcgccggattcttaacggaacccgctacggggcaagccatccacagatgctggaaatggcattgggtaaacgtgggctttataacaatatccgaaatggtgttaaatattgcatctacttctcacttgcctggcgggcaattgaactaatttttaagtctgattatgatctggtggattttttggtagatatctcaatggatgccgcaaaggcggtggtgtcgggggtagtgattggggtgctagttactggagtattggcaatacttagtgttcctgtagtaatcacaactcttggcattattatcgtaggattatttttcaactatggattaaattacctagatgataaaatagagctatcagcttcattaaagaacaaacttcgcgactatcttcaccatagtaaacatgaaaattatggttttaatagcccttatttttactctttttaa

SEQ ID NO: 77679 - DNA, 1230 bp, Citrobacter koseri
gtgctgacgctgacagggccagtctttacgctgtggcctggcggccagccgaccgacacggtgacgaccaccggcggctctgcggcggcgacggtcgcaacggcaggagacaccccggtggtcggcgatatcccggcgcagaccgcgcctccgacctcagccaatctgaacgcgtggttgaacaccttctataacgcggaagaaaaacgaaaaacgccgttcccgacggcgctgccggccgatgcgcagccgtttgaactgctggtgatcaacatctgttccctctcgtggtctgatgttgaagccgcaggcctgatgtcacatccgttatggtcgcatttcgatattctgtttaagcactttaactccgccacctcctacagcggcccggcggcgatccgcctgctgcgcgccagctgcggccagtcgtcgcacacgaatctgtatcaaccggcaggcaacgactgctacctgtttgataacctgtcgaagctgggcttcacgcagcatttgatgatgggtcataacggcgaatttggcggcttcctgaaagaagtacgtgagaatggcggtatgcagacggagctgatggatcaaaaagggctgcccgtcacgctgctgggctttgacggttctccggtttatgacgacaccgccgtgctcaaccgctggctggaaaccaccgagaaagatcagaactcgcgtagcgcaacgttctataacactctgccgctgcacgacggaaaccacttccctggcgtcagtaaaacggcggattacaaaattcgcgcgcaaaagctgttcgatgagctggacgccttctttaccgaactggagaaatcgggccgtaaagtgatggtggtgatggtcccggaacacggcggcgcgctcaaaggcgacagaatgcaggtttccgggctacgcgacatccccagcccgtcgatcaccaacgtaccggcagcggtgaaattcttcggtatgaaaacgcctcatcagggcgcatcgattgagattgaccagccgagcagctacctggcgatttccgaactggtggtgcgcgcccttgacggcaaactgtttgtcgaagacaacgtcaactgggatcagctcacccgtgggttgccgcagaccgcgccggtcgctgaaaacgccaacgcggtggttatccagtatcagggtaaaccgtatgtgcgtctgaacggcggcgactgggtgccttatccgcagtaa

SEQ ID NO: 77680 - DNA, 1191 bp, Citrobacter koseri
atgaagctaacagcccgacaagtagagactgcaaaacctaaagataagccatacaagctctcagacggtggtggactttatcttgagatagcaaccagcggctctcgctactggaggttaaaatatcgctacggcggtaaagagaagcgcctagcatttggtgtctatccggaagtatcacttgcagaggctcgtaacagaagagaagtagctaaaaagacattagctgcgggaagtgatccagcagaagtaaagaaagcggagaaaatagctcaaaagctcaatattgagaacacattcgaagctgtggctcgcgaatggcaccagtcgaaagccgaccgctggtcacttcgttatcgcgatgaaatcatcgatacctttgagaaagatatcttcccctacatcggcaagcgccccgtgtctgaaattaagccaatggaactgctggaaacactccgtcgaatggagaaacgcggagcgctagagaagatgcgcaaagttcgtcaacgctgtggtgaagtatttcgttatgccatagtcaccggcagggccgagtataacccagcgccggatcttgctactgccctcgcaacacccaagaaaacccatttccctttcctctctgtagaggagttaccgtatttcctcaaagatctctcaggctataccggtagcgtcatcacgaaaacagcaacccagatcatcatgttgacaggcgtacgaactcaggagctacgttttgctcaatgggaagatatcgattttgaaaaacaactatgggagatacctgccgaggtgatgaaaatgaagcgaccccatatcgttccgatgtcggaccaggtagtggacctatttaaatcgcttaaaccgattaccgggcagtatccattagtgtttatcggacgcaatgatcgaactaaaccgatctcaaaggaaagtgtgaatcaggtgatagagctgctgggatataaagggaggcttacagggcacggtttccgccatacgatgagtacgatcctgcatgaggagggctttaactcggcatggattgaaacgcagcttgctcatgtagataaaaacgctattcgtgggacctataaccacgcgcaatatctggatggacgtagagaaatgatgcagtggtatgcggatcatatcgaccagcttatcagttcatcagcaaacagttag

SEQ ID NO: 77681 - DNA, 882 bp, Citrobacter koseri
atgcgcaccaaagaacgacttccccggaaacgctattctcctgaatttaaaatggaactggtcaggctggcccttgaacaaaaaggcagtatcgccgctctggcccgtcaacatgacgtcaacgataatctgctctttaaatggataaggctctggcagcgtgaagggcgggtctgtcgaccccgaaaaaatgcatcgtcgcttcctgccctgatacccgtgcagcttcacccgcagagccatctcgctggcttcagcggtgttctgcaggcggatgcgtacgccgggttcaacgagctgtacctcaatggccggataacggaagccgcgtgctgggctcatgcccgccgaaagatccacgatgtacacgtccgcaccccgtcagcgctgacggaagaagccttgaggcagatcagtaagttgtacgccatagaggcggatataaggggaatgccggcggagcagcggcttgctgaacgtcagcgaaaaacgaaaccgctgttgaaatccctggaaagctggctgcgtgaaaagatgaagaccctgtcacgacactcagaactgacaaaagcgttcgcgtacgcacttaaccagtggtcagcactgacatattatgcagatgatggccgggccgaagcagacaacaacatcgctgaaaatgccctgcggacggtcagtctggggcgtaaaaactggttgttcttcggctctgaccacggtggtgagcgaggagcgctgctgtacagcctgatcgggacatgcaaactgaacgatgtggatccagaaagctacctccatcacatactggacgtcatagctgactggccgatcaatcgggtcagcgaactgttgccgtggcgcgtagcactgccaactgaataa

SEQ ID NO: 77682 - DNA, 288 bp, Citrobacter koseri
atgaaaaaaacccttgctaccctcatctctatcatggcattcacctccatatcatgggcgtcagaaatgatgagtattaccagacctacgatgtctcatgaaaaaacacagaacaataattctttagtatgtaaaaatatgatagaaactcaaaaaaaaatgatgaaaacacatatagcaacaaaaaatgataaagctcatatgtgtactgaaatgagcgaatatgaaaaaaatgcatttaccaatgacaatgtaaataaagtcaagatttcaataattaataaataa

SEQ ID NO: 77683 - DNA, 279 bp, Citrobacter koseri
atgtttatcagctacagcgacgtgcagttgaaaaaagcaaccgacgagactccactgtcgttaacctatatctgctgccgtgaagcggatccggagggagcctgctggcatatgctgacctcagagaaggtggaaaacacggaacaggtaagggctatagtggattattacgaacggcggtggctgatagaggaatatcacaaggcgtggaaaagcggcggtgtacaggtggaacacagttgcgaatgcagacgcgggacaatctggagcgaatggtga

SEQ ID NO: 77684 - DNA, 675 bp, Citrobacter koseri
gtgaaatcctcccgctcttccgctgaagttgaaggtgccaatcgactgatgcgcaaccctgctgtgttgcctgacgccattgctgacgcgggctttgctgcgacgaccagagccgctgctgaacacccgctcctgcttgcactggaagacagcacctcactgaattttggccacagtaccgttcgggaggaactgggtagcatcaccaatagccagcgcgcccgtgggcttcaggtacactctgtcccgctttatgcgccgggctgcgctcatatggtcggtctgattgaacaacagcgctggagccgtgaatctgacagttacggtaaaaaacaccagcgtaaacaacgcccttatgaagagaaagagagttacaaatggcagagagcttctgagcatatggcacaacggctgggcgaaatccagccacatgttatctctgtctgtaaccgggaggcggatatctggcattaccttgactataaactcagccagggacagcggttcgtggtccaggcggcacagaaccgtctgctggcagaggcccccggcaaactgttcagcctgccggagcatctgacagaggcaggctgtcatacgctgcatgtggagcagaaaggtggtcggcagcccggctggcacaaatgtttatcagctacagcgacgtgcagttga

SEQ ID NO: 77685 - DNA, 525 bp, Citrobacter koseri
atgcaaaaaccttgcgtcgctggttgccttctgcaggtctggtgtagcacagggcagcgccaactctgcacacccgtgatccgcataaagcggacagcaaaacgcgtagtgacgcccggtcagaatgaaaaatattatctggcaggtgcgttgcacagcggtacaggaaaagtcagcaataagggcggcaacagcaaactcagccttatttatcagtctgttgaagtacctaaagcctatgtgccgacgggcaaaacgataacgcttatcgtggataactccattatccataagagggagaaaacacgaaactggctgaaggcgaacccgaacttcagggtaatttatcaaactgtatactcgccgtgggtgaatcatgttgggctattacggaaggtgtcgcacgatacaataacccacaatcatcaatgccgcgccatgtggcaactgctgaaaaaagtccaccattttatggaagccgccagtccgttccccggaagaaagcatgggctggcaaaagtgtag

SEQ ID NO: 77686 - DNA, 438 bp, Citrobacter koseri
atgttgctgtattttggcccccgtcagggggcttttttatctgactctgcaacaattaaacagtacctacccgaaaaagatttattttatgaaaataataaacgctctttctgttatattgttgttgtcgctgccagtaatttccgcagaacattagaaatgaaaatgtctgatgtgtcctcatcggcatcctcacagaaatatatgtccggcataaaaagcattcatgacaaaatgatggccgccgttaatgtatccgatcccgacaagacttttgcaaaaggcatggttgcacaccatgaaggggcaatagcaatggctgaaaccgagctgaagtacgggagatatcctgaaatgagaaagctcacacaggacatcattaaaacacaaaaaggtgaagttgagcagatgaataaatggcttagcagtcaaaaataa

SEQ ID NO: 77687 - DNA, 432 bp, Citrobacter koseri
atgaaaaatatcgtattagcatccttgctgggctttggcttaatttcttcggcctgggccactgaaaccgtgaatatccatgagcgggtcaacaatgcacaggcacctgctcaccagatgcagtctgctgcggcttctgtcgggatccaggggactgctcctcgtatgaccggtatggaccagcatgaacaggccattattgctcatgaaaacatgacgaacggatcggcggatgcgcaccagaaaatggtggaaagtcatcagaagatgatgggaaataacacggtatccacgaccgtcccgtcaacgtcttacgcggcgatgaatgagcatgaaagagcagcggttgcccatgaattcatgaataacggacagtcaggcccacatcaggccatggccgaagcgcaccgccgcatgatcaatgcaggctga

SEQ ID NO: 77688 - DNA, 1188 bp, Citrobacter koseri
gtgctctttagttcagcgcagggggcagcactacgcccggctgtgaattcagcagattttagcgagcacagccgcgcacgggatgtctttctctggacggtggaggatcctgcgagaccgatggataccgggtctgaaatgaagatggaaacgtaccggattatcgcctcctctggccaggcgatatttcagggcaaacaacagaactatgtcatgctgactggcctctccattaattttcatctccattacctcgatgcgctgaaaaaaaatctgattgcgatcgctgtcgtgataagtctgctaattgttctgatcattcgcattgctgtccgtcaggggcacctgccccttcgtaatgtcagcaatgtcattaaaaacatcacctccgagaatcttgatgcgcgtctggaaccgacacgcgttcccattgagctggagcagctggttatctcgttcaatcatatgattggaaagattgaggatgtttttacccgccaggccaatttctctgccgatatcgcgcacgagatcagaacacccatcaccaatctggtgacgcagactgaaatcgctctgagtcaggatcgaacccagaaggaacttgaggatgtcctctattccagccttgaagagtataaccggatgaccaaaatggtcagcgacatgctgttcctggcgcaggcggacaataatcagctgatacctgacagggttcggtttgacctcagagcagaggtcatgaaagtcttcgagtttttcgaagcctgggccgaagaacgcaatattatgctcaaatttaacgggatgccctgcctggttgagggagatccacaaatgttcagaagagcgatcaataatctgttatccaacgccctgcgttataccccagagggacaggcaatcaccgtctcaataagagagcaggagagcttttttgaccttgtgattgaaaatccggggaaaccaatccctgaagagcatttatcaaggttgtttgaccgtttttatcgggtggatccgtccagacaacgaaaaggagaaggcagcggcatcggccttgcgattgtgaagtcaatcgtggaagcacatcacggaagagtgcaggtggaatcggacgtacactcaacgcgttttatcttatccgtgcccagactggagaaaatgattccggacacccagtgctga

SEQ ID NO: 77689 - DNA, 300 bp, Citrobacter koseri
atgcatagcaaaccgtccagacgtccttcctcactcgctctgcggctgaccttttttatcagcctgtccacaatactggcttttatcgccttcacctggtttatgctgcattctgttgaaaatcattttgccgagcaggatgtcagtgatcttcaacaaatcagcaccacacttagccgtatactccagtctccggcaggtccggatgaaaaaaaagtaagtaaaataaaggaatcgatcgccagctaccgcaacgttgcccttttgctcctcaatcccagggggggaggtgctctttag

SEQ ID NO: 77690 - DNA, 354 bp, Citrobacter koseri
atgcgtaactcacttaaagccgttttatttggtgctgtctctgtcatgttttctgccggccttcatgctgaagcacatcagcatggtgatatgaacactgccagtgatgcctcggtacaacaggttatcaagggcaccggtgtcgttaaagacattgatctaaaaagtaaaaaaattactatttctcacgaagccatccctgcagtgggctggcctgcaatgaccatgcgtttcacttttgttaatgctgatgtaagtatcaaagcgctgaaaattggtagccatgttgatttttcatttattcagcagggcaatatctccttgctcaaaagcattaacgttacgcaatcctga

SEQ ID NO: 77691 - DNA, 441 bp, Citrobacter koseri
atgaaaaaaataattttaatgaccctggcttttggcctttcacttccggcaatggcaggtgaaaaagtaatagacatgtacaagtctgaaaactgtggttgctgttccctgtggggcaaggcgatggaaaaggacgggtttgaggtacggacccacgtcatggatgatcaggctctgtcagccctgaaagaaaaatatgctgttcctgctgagctgagaagctgtcacaccgcagttactggtaatttgatcattgaaggtcatgtgcctgcagccacgatacataaggcaatgcagtctggttcagggatttatggccttgccacccccggcatgcctgcgggaagcccgggaatggagatgggggcccgtaaagaggcttacgatgttatcgcattctctccggagggcagtaaaaaagtcttccagcgaatcgaatag

SEQ ID NO: 77692 - DNA, 198 bp, Citrobacter koseri
atgaaaagtaccacctatgcgcttattgctgtcgccgcgatcgcggcatttgccctcctgcgcgaacactggtcacatgtggcaggttactggccatatcttttattgctggtctgcccgctaatgcatcttttccacggccacggagggcatggagatcatcaacatcacggaagtggaaacgataaaaaaaattaa

SEQ ID NO: 77693 - DNA, 738 bp, Citrobacter koseri
atgtattctaccgatgtcgtaaaagaaaatgcttacctttcagccacccgctctgggctggaatcgagcgagatcgctatccttcagcgctctttgccttcccggttcgatctgcggcacttacaaaagaatgaatcattaaaactcgtactgcaaaaaaaagcgggaaaatcacgtgtagtggcctataaatttacatctggttcatttaattacacggcgtatcgtatatcagataaaaagttctatagccttgccgatacttccgggaaagccagtctcgattatccgttaccggccacagcaagactcagttcaccttttaatccggcacgacttaacccggtatcggggaaagtgagtccccataatggcattgattattccatgcccatgaacacgaaaatagtcagcgtcatcgacggaaaaatcacccgggccgaatacaacagtactatgggatattttgttgaagtcacgggaaaagccggtgttaaaactcgctatctccacctcaataaaatactcgttactaaaggggccagagttacccggggaggtgctattgcgttatccggtaacagcggacgttcatccggtcctcatctgcattacgagctaatcatcaataacaatcctgttaactcactggcgttccgggcagcggcacccgctgataacaaactcgaacagcatgcctttgcgcatgccagagactacgaacgatacctggactga

SEQ ID NO: 77694 - DNA, 450 bp, Citrobacter koseri
atgaatatattaatcactaccactgcgtttgcagctttattttgtggggcagtttttgccaagtccagtgatattgcccatgaagcacatcgattcgtgaataatgcctcagccgtcagtcatgttaattcctcgacgcatgaaaacttgccggacaggattaataaaaacagcacgccatcattctctgaaatgaatgaacatgaaagggccattgttgcgcattcatttatgaacaacagcgcgtcctatgcacatcaaaaaatgattgaggaacataaaaaaatgctgaccgggagtgatgcaaattcagagacatcatcttcttcttttaacgaactgaatgccggagagaaagctgccctcgtgcatgagcaggtcaataatgccgctgcggaagctcatcagacgcaggcaagaaagcttcgtgggctgtattcgtccaggtaa

SEQ ID NO: 77695 - DNA, 897 bp, Citrobacter koseri
atgcgaatgaagagaagttttaaggccataactgttctggtcgctggtttgtttacctcaccgttttctattgcggcgggctccgtctctgcagatcctcatgccgggcacgacatgtcttccatgcagatgccggtagatgagaatttcactgagatgacgtcaatggagcccattgtaactgagagcagaacgccaattccgcctgttaccgatgccgaccggaaggctgcattcggcaatttaccggggcatgcgattcacgacagtgcgattaattatctggtcttgctggatcaactggaatggcaacggtcggataacaccaataatttcagctggagtgttaacagctggattggcggcgacactgaccggctctggctaaagagcgaaggcgaacgaagcggggggaaaacggagacggcagaagcccagctactctgggggcatgcggttggcccctggtgggatttggttgcgggtgtaagacaggatttcagacctgcttcagcccagacctgggctgctgtcggttttcaggggctcgcgctctataattttgagtctgaaattacggcttttgtcagtaatgacggaaaagcagccctccgtctggggggagaatacgacgttttactgactaaccggctcatactccagccatcctatgaggtaaatctctacagtcaggatgatgaatcgcgggagcgcggcagaggattagctgacacagagctgggccttcggctgcgctacgaaatacgccatgagtttgcaccctatataggcgtctcctggaatcagctttacgggaaaacgtccgatatggcgaaaagagagggtgagaaagaccatcaggtagtattcctggcgggagccagaatctggttttaa

SEQ ID NO: 77696 - DNA, 930 bp, Citrobacter koseri
atgaacgacctgattatgattgttattcgttttcttctttatcttgatttgatggtaatatttggattgccattttttcagatatatggattaagtggtgtcagacatgaaacgtataacctgactaatttcaggtcgtttataacctttgctgttgttgcaggcatcattcttactggcattaatatgctcctggtatctaatgccatgagcggagtaactgatctcagggaattatccatccatattatcgagatggttatagaagaaactgatgtaggtattagctggattgtcagactctgtgcactgtttaccactctcggtgctttgttcctttacactaacaagagactattgtcctgcctgctgatgacgatgagtgggggcgtggcgctggctacacttgcctggggaggacacgccgtcatgcatgacggtctgcattactatctccatttactgagcgatctgactcatctcggcgctgcaggtgcctggacaggtgctctggttgcatttgctatcctgctgatgcgcagaaacgcgcacaatgcacagagcgtcattgtgatatctgactccctgacaaaatttgccacggcaggtacggtgattgttgtagccctgatcctgagtgcgatggtcaactatctgtatattgctgaaggtaacttaacccccttattcaacagctcctgggggggaatattgcttgctaagacggctctgtttgttctgatgcttcttctggctgcagcaaaccggtttcacctgggcccccggcttgaaattatggtcagggaagggaattatgatcgcagcgttgccctgatgcgaaacagcatcctgacagaattcgttgttgcgattatcattctgggcgccgtagcgtggctcggaatgcttgctccgcctcaggccagctag

SEQ ID NO: 77697 - DNA, 435 bp, Citrobacter koseri
atgaaaaagatccttgtatcatttgctgccattatggctgtcacttcaaccgccatggctgcagagacaatgaacatgcatgaccaggtaaataatgcccaggcacctgctcatcagatgcagtcaaccgctgaaaaaagcgctattcagggagacagtatgacgatgatggatatgagcgggcacgatcaggctgcaatgtcccatgaaatgatgcaaaacggcaacgcttctgcccaccagggcatggcggaaatgcataaaaaaatgatgaaaggaaaatcaggagccaccaacgaaacagcaaagtcattttctgaaatgaacgaacatgaaaaagccgctgttgtgcatgagaaggcgaataatggtcagtcttccgttgttcaccagcagcaggcggaaaagcatcgcagccagatcacccagaattaa

SEQ ID NO: 77698 - DNA, 906 bp, Citrobacter koseri
gtgataaaaaaaatttgccaggtgattgacggagagtacgtctgtgacattgatatcagtgtggaggagtggaaatttttattagtaaatgaaagagtttttgatgaaaaaagcattgcggcgttaaaaaaatggttcattgaaccaaatcattcttgcacatgtttcgatattggtaaaaagtacgatctgcacagtatgagtgctaatggtgttattaatggactgggtgggagagttcaaaaagagctcggacgattcgaagtcgaaggaatcggaaatatcgcgtccggtacaaaatttattacagtcatgaagagtaaagaaatcgtcgggaaacccaaaagaaatttatggacaattcgtgaggaacttgttcaggcaattaacgaacttaatttttttggtacaacagaaatggcttgcagtgagtattattctgacgatgagttaatcaatgccatagaggaaagtaatatctttgacgacgctcaggtgtttgaatatacaggagaagccaaaccaaagaaaaatgcaatagaagtaaaaaatggcctctcgtatcccaggagtaaaggggtatccaaaaatgcactgaataaagcaggttacatatgtgaaatcgatagcgaccacccaacattcagaaggcgaaactcacccttaaattacactgaacctcatcacattgtacctatgtctaggcaagatgattttgacatctctcttgatgtcgaagaaaatataatatcgctgtgttgcaactgccataagcaaattcaccttggtcagggatatgaagatatgctggagaaaatatacactgagagaaaagagttattaaagaaagttggtgtcgatatatcactggaaaacttgattcattattacaaaatggagagttag

SEQ ID NO: 77699 - DNA, 150 bp, Citrobacter koseri
atgaattattacttccccatttctgatgcgggtaatgtggtaaccctgcgggcttttctgcagcaggccgttgaccattatcccatgctggtggtattcagtgttaccaacggtgcgaaagcaatccctgaaatcagatcttgggggtaa

SEQ ID NO: 77700 - DNA, 249 bp, Citrobacter koseri
atgacgatacggtttagaccaacggagtatgtgattaccgctgatggtgaatgggtggctgtcgatgcgctctcatatcagcatgcccggccgctgttatgtggatcctgccatacgccagccatcgtgacgaagggtgataatggctggcagctggttcaccggccgcgttcagaagccgacagacggcgggtgattcgctgttgttaccttccccccacgttttcaacagggatccggggattgtaa

SEQ ID NO: 77701 - DNA, 456 bp, Citrobacter koseri
atgcttatgatgtcatgccatctcgccctcaacagcaagggggcgatgagccgctcccgggacgccatcagcgagtctgctgggggctggcgctgtacgtcctgcggatgtcgtctggtgctgcacccgggagacagcaatacacctccctggtttgagcatgaccagacgtcagcagatgcatctgcgctggcatactgccagtatcgtcagcaccgtgacgggttgcctggagagcgtctcagagtgatgttgtactccgtccatggacaggatatccgcatggggatgcagtcctggtactgtgtctggtgcggaagtcattatgagggcgagaagcattgtgtggcctgtaacaccggtatttacagcatcgaagacacggtcgggcagggtgacatccatccaattgatgatacggcgcagcgcccatcagcagacctgggaggctactga

SEQ ID NO: 77702 - DNA, 336 bp, Citrobacter koseri
atgtacgcaaaattattcatggcccgcaacagtgctggtcgcctgacaggtgccagaaccgcattaggctctcctgacgaacgttatacctgccatcactgcggtagtgtgctggtgctgcgcactgagtctgaacacccgtggtttgcgcataacgatgctgcactcactgtaggcaggcaaggctgtccatacatccatcctgatgttgatgaagttctgttgatactccagctacgccgttacgtaccgaatgcaatgccggtgatagggcatgctgttcataactgcccgctatatgaataccgcaaggccggggaggtctcatgcttatga

SEQ ID NO: 77703 - DNA, 141 bp, Citrobacter koseri
atgacaaagaaacatacccgtaagacatggcaggccccggtacgctggatttgtctgcagtgtcaccgccagtactgtggtgagcgtatgtgtccgtactgctacagcacggccaatgtgatagccgccacagctcactga

SEQ ID NO: 77704 - DNA, 210 bp, Citrobacter koseri
atgatgaataccgatatccctgtcctgaatgatcagtttgtcgacatgaagtttattacccggttaacaggcttaacggataaatggttctacaagcttattcaggatggggcattccctaagcctatcaaactgggacggagctctcgctggctccagagcgaagtggaagcctggttacagcaacgtattgctgaatcacggagctga

SEQ ID NO: 77705 - DNA, 609 bp, Citrobacter koseri
atgcattacgaaatagagaccaatggcaaataccagatgaacgaacagatactcagtgatctggtcgaacacttctacagactacttaccaaatattcaaaggtgatcccgttacgtatagatttcgggtatcgacgtacagatctctaccgttatccggatgactgggatatgtatcgccttgcagaggagctaatgcgtgatggaaaaatagtgggttattcatgggtaatggaatattcaccccgcaagagacttcatttccatgccatgttctatctcgatggtcagagctttaaaagtagttatcgaatagcaagatatattggtgagagatgggtagccaaaacggagggggaagggactttccatatatcgaacagaaaatcctatcatcaggtaagtggtacgaagatgattcaccataacgacagagcccgccagagggaaattgagtacatcctcagctatatggcaaagggagatcagaaagaggaatttgaagaacttatttacggcaccagcatagttccactaaacagtggacgtggtcggccaagaaaatcttatatgacagaaaatatacttcaacaactctgttgtagatag

SEQ ID NO: 77706 - DNA, 1140 bp, Citrobacter koseri
atggtggataaaaaaagacaattagacatgatgaaagatttcatcgcatttaatttacgtaaggaggattatgggtatgaggcgaaactaaaatattacggtgatattagtgaacgatatactttaattgatctcaatacttccggagcatctgataagtcagtgagtttgtcaaatttgctcgatgatatctacgatctacaacttaacccaccatcctttccccgcagaacaaatcctgattgtcgctatagaaatcaaacccggatttcagtgagtttgtctattgaacaaagtaaccggcgatcaaaatatctgagggaacgtttggttaaatcgattaaagacaaagaagatattgaacaatctttaaatgaacattatcggggattaacatctcagcatggaaaattatccttattaccatttgccttttatctttctgatggttgggttaaacagcatgaagaccttgaagaaaaatccccgttggaggctttgaaattatcaaatgaggaactaaagagacgctttgataaaataataaaaacgataaaatccaataagagatacacaccagtccgtggatactctcgccttgttttggtggatgaagattatcgccctttttatttggtgaattttttccttgaggggattgagttaaatgacttacttatttctgacatatgggaacaatggctgaaatccagaccagataacgaaagggaagatgagcagcatgggtgcttttatttttttgagtcacagcacaaaccccatgccgaggatgtccctggattaataatgcgcagcccaggacatagcataagacattttgaaaatgaggggggtatacttatagatgaattttcaagtttagtaggtagctatgtatctagttttaaaaaacgtatagtaaaggctctggcaaatacaccaaagggacatcaagcattctttcaattacaggcaatgcggttcaatacactaggtaatattcgtgccataagtttctcagatgacttaacttatcgcacagctaaagaaaaaaaagagaaggctgacaaacgaaaaacaaagaaagaagatgctgctaatacagaagtgaaaaagaaaaacaagaggactcaggtttaa

SEQ ID NO: 77707 - DNA, 888 bp, Citrobacter koseri
atgaagcaatcatccggatatcaggttatccgccgccatttacgccgctatccccgtacattacgccacacgttgattaaggagctcagccagcttattacttacgaacctgtcattggtattatgggaaaaacaggcgcaggtaaatcgtcgctctgcaatgccctgttccgcagcgaagtctgcgcagttaatgccgtggaggcctgtacccgtgaaccacagcgtgtacgcctgcgatttggtcagcattaccttacgctggtggacctgcccggtgtgggcgagagccagagccgggatagtgaatatcgtgagctgtataaagagcagttaccgaagctcgatatggtgctgtgggtattgaaagccgatgacagggccttctcgatagaagagcagttttatcaggcaatcctggcacagtgcagcagcaccatgccgccggtgctctggatactcaatcaggtggataaagttgagccttctgaacggtggaactggcgttctgcgacaccatctggtgctcagcttgagaatatcagacgaaagcagcaggccgttgccggtcagttgggaatacaggatgacgtgattatccctgtatccgtaaaagggtgttaccacctggcccgtattgtggagcaaatgataaaccacctcccaaagcaggtacgcagcccgctgctgccccatctgcatcagtcctatcactccgcgcccgtccgggaaaccgcccgcagcggctttggcgacgccgttgttgatacccttgaccacgtcattgacaacacaccactgccactgcttgtccggcaggccttgcaggctgtgacacacaccgttgcccatgtggcccgcagcgtctggtccttctttttcgattag

SEQ ID NO: 77708 - DNA, 153 bp, Citrobacter koseri
atgccactggttttgttatggatttttctggccgttgtgctggggtttctggccaaaggtgccggaaggtcattctggggatggtttattctcgcgatgataattgacccgattcttgccgggttgctcttctttctcattgtcagagactga

SEQ ID NO: 77709 - DNA, 438 bp, Citrobacter koseri
atgaagaaactgaccctgcctgcactggcacttctggcgctctcatcctcaccggctatggccgacggagactggggatatgccagcggagagtattactacacgattaaccgaaacagcacgttttccatggatgacacgcccggatatgaatatatccaggttcagaccaatgagagaaacaagaaggcctgccagacgccggaggctgacaacgtcacactgacgctgaatgaacacccggttcagggtgagcgccatatatggcagaaaaaaggcgaatgccagatatccctgattattcggggtaaagccactcagcaatggctggtgaattatctgcgcgaatatggccatgtcgtcacgctctctgatattaccggcgagtttaaaatcagcgggcgtggctttaaagatttctgggacgctaatcagtga

SEQ ID NO: 77710 - DNA, 429 bp, Citrobacter koseri
atgaaaagtttaatgaatatggtgttgagtgccgcggtattacccctggcaatccctgcggttgccgccaccatcacaacccaggtcagtatccctgacagcacctatacgctggccagcaccgtaaacggggatggcctgtggtgcaatggctgcggcggaaaacaggagtgggtccatatcgacagcgatgaaatgatgacgctgggcgcaggaacgtctgtcgcagcctccggaggcaaattcgctattctgcataccgatatgggcatgtcctgcccggcgggcaatatcgctgttctgaaccttgaaaccggaaaatacgtcggccccgaaattgatgaatgtaatgacgaaaaagttgattacaaaatcagtaacggtaaatggtgggtgaaagtccgcaaccacatgtactccggaaaataa

SEQ ID NO: 77711 - DNA, 552 bp, Citrobacter koseri
atgcctgccattaccgacctcagcgcccgactgaacacaaaaacgctgaattttgtcttactctcattcgttaccttcggtatctatccactgatgtggctctaccgtaagcaaagcatcattatcgataccactaaggtttcgttttcctctgacctttacgtgctatggatagccatctgctacggtatttcgcgccagctcagtgtaatgggcaccaccgacccggaactctatggttatgacccgaccatggatgccattgccatgctcggcggcgtgttgtccattgccagtggtgtgatgtacatcatctgggcctttaaagcccgcacagcactacaaagctacgtgctgaacacctttaagttcgaactgaagatgaatgtgttctacgtcattatcttcaatgtcttttatatcacttactgcatcaatgcgatgccggaggcttttgctaaacacaaaattatccagggtggcttaacggctacgcctgctgaagccactttaccggcagagaataccccaaccaatacggagccgaagtaa

SEQ ID NO: 77712 - DNA, 819 bp, Citrobacter koseri
atgaaattagccagccgttttggtcgtgtgaacctgattcgtcgcgaccgccccttaacccatgatgaactgatgcagcatacccccagtgtgttcggtgaagagaaacatgtttcccgcagtgagcggtatgcctatatccccaccatcaccctgctggagagcctccagcgcgaaggttttcagcccttctttgcctgccagactcgcgtccgtgaccagagccgccgggagcacacgaagcatatgctgcgccttcgccgtgccgggcaaatcaccggtcagcaggttccggaaattattctgctcaactcgcatgatggctccagcagttatcagatgctgccggggctgttccgtagtgtctgctgtaacggcctggtctgcgggacgtccttcggtgaggttcgcgtaccgcataaaggcgatgtggtggaaaaggtcattgagggggcttatgaggtgctcggcgtatttgaccgggtggaggagaagcgtgatgccatgcagtctctgttgctgcctcccccggcgcagcaggcgctggcgaaagcagccctgacgtaccgttttggagaagagcatcaaccggtcacagagacgcagattctggcaccacgccgctggcaggatgagcagaacgacctctggacggtcttcaatcgtctgcaagaaaacctgcagaaaggcgggttatccggtcgttccgcacagggcaaacgcagccggacgagagccgtgaacggtatcgacggtgacattaaattgaaccgcgcattatgggtaatggccgaagaactgcagcaggcacttagctga

SEQ ID NO: 77713 - DNA, 246 bp, Citrobacter koseri
atgtctgttctccctgaaaatacccacaaggccggcgtttatccggggtccctcagcgataccgttttctgccgttccatctccgatgatgacctctgtgcctggtgcgcatacctctgctaccggcctggcgaactcagcttgtacagactggcagatgtcggtggcgtatggccctgtctgagcgatatcgatggttatgcacattcgtgtccccggttatgtctgctgttaatgccggactga

SEQ ID NO: 77714 - DNA, 462 bp, Citrobacter koseri
atgaacatgaatcattcgtccgtgacagcggacacagaacaggtcccgaccatcaccgccacgctgctgcccgatgcactacgacttcatttctggccgcaacattttgccggtatcccgcagtggatactgctggagccccgcatcttcgcgtggatggaccggctctgtgaggattaccacggcggcatctggaatttttatacactcagcaacgacggcgtgtttatggcaccggagccggatgaagacgacaggggccagtgggctctgtttaatgccatgaatggcaacagagctgaaatgagcgctgaggcggcgggtatcgcggcctgtctgctggaatacagccaccatgcctgccgcacggagtgtgatgccatgacatcgcacttttaccggccgagggacttcgccctcaatcatccggaatgcagtgccattctgcatattatcgactga

SEQ ID NO: 77715 - DNA, 480 bp, Citrobacter koseri
atgaaacaacagctatctttatttgccccggcgctgccagcatctgcacagcataccatccgggcagctctgaccctgctggaggggcaactgcgtgagcccggtgagtcatttacctccagccatgcccttcgcgactggctgcgactgcagctctcaccggaacagcgggaagtctttaccgccctgtttctggataaccagaaccgcctcattgcccatgaagtactcttccggggcaccatcaacagtacacaggttcatccccgggaaattgtaaaagctgccctgcagcataatgccgctgcggtggtggtggcgcataaccatccctcagggtatgcagagcccagtcaggacgaccggaacattaccgggcgcatcagtgaagccctggcgctggttgatatccgcctgctggaccacatggtcatcggcggaatggagattgtgtcctttgccgaacgcggctggctgtag

SEQ ID NO: 77716 - DNA, 222 bp, Citrobacter koseri
atgaagattatcagcaagtgtcaggccatggcgatataccggcagcatccgcagtcccgcttgtttcgcttctgtaccggcaaatataagtggtccggcagtatctgccactatgctggcagggaggtacaggatatcggcggcgttctggctgtcttcgctgaacgccgccaggaccgcaacggcccgtatgtcgtattgcgcagcgtcaccctgaattaa

SEQ ID NO: 77717 - DNA, 360 bp, Citrobacter koseri
atgcagaacacaacaaatgcagcaaaccatgatatttctgagccctggtggggacttaaccccaccgtcacgccatgctttggcgcacgactggttcaggaaggcaaccggctgtattacctggcagaccgtgccagtttcgccgggacattcagtggtgcggatttaggtcaccttgaccaggcgtttccggtactgctcaaacagctggagcttatgctcgtttccggcgaactcaatccccgccatcagcactgcgtcacgttatatgcaaaaggactaacctgcgatgccgatactctcggatcgtatggctatgtttatctcaccatttacccaacaccagcgacaaccgtctga

SEQ ID NO: 77718 - DNA, 333 bp, Citrobacter koseri
atgaaaattttaccgatatccccggcacgggtggcacagtcctgcctgtcgcctgttgaaatctggcaacagttactcacgcacctgctggagcagcactatggtctgaaattgaacgatacgccgttcagtgaagaacgcgtcattcaggaatatatcgatgcggatatcacgctggttgatgccgttaatttcctagtggaacgatatgagcttgtacgtattgaccagataggtttaaccagtcaggatcaagaaccttggctaactcctgtggatgttcatcaagcgaggttcaacttgaccttaaccactcataaatcaatcaactaa

SEQ ID NO: 77719 - DNA, 879 bp, Citrobacter koseri
atggatttaaaccagctcagaacccttgttaccgttgcagaaacagcgagcctgaccagggcggccagtcaactgtttctgagccagccggcggtaagcgctcatatcaaatcactcgaaactgaatttaatgtacggcttttcaaacgtaccccacgcggtatggaactcactgcatccggtctgattatgcgggacgaagcccgcctcgctcttgatgctgtcagtaaatttgtgaatcgggctcgttcgcttcatgctactgaaatctgcgccctcggcacgatttccgttcctgtgatactcaatctaccgcaggttctttcccagctacgtcagcggcatcaaaacgtcagcctgactatcaggcaaaatatttccggtcatatcattgacagccttctcgccggggagctggatgcgggttttatcattggagaagtacacggagaccggctgggtgtgatcacggtttctccaatcaccctgtgcattgttggccctcgcccctggaaggcacagcttgagactgccggctgggataagcttcaggagtttccgtggattgccacaccggaaaaatgttctttcagttctatagctcgtgattttctgcaaagacatggtgtaagcgttcagccggccatcgtcgctgatcaggaaaaaacgctggccgagctggttgcaatggaggctggcataacccttatgcgggaggatattgctctggttctccaggataacgaggagctgtatatctggcccggagagaaaacggtgagccagctctgctttgtatgggatcgtgaaaaagaaacctcccctgtggtagctgcactgatcgatacggtgagagatatctggcaggtaccggcctga

SEQ ID NO: 77720 - DNA, 966 bp, Citrobacter koseri
atgaatacttatattaaaggattgctctgctgcctgctggcaacagtgtcatggggagccatgtttcccgtgatgacacatgccctgacccggatagatccgtttaattttaccacactccgttatggtattgcgggtattgctttcgctctgctgttactgttccatgaagggcgtccggctttccggctggagaatgaacgttgggtgctggcctggctgttcgggactctggggtttgccggattcggtttcctggtgttcctcggccagcatcttgcaggcccgggcggagccctgaccgcatccatcatgatggccactatgcccatgctgggcctcctcacgatctgggcgctgaaaaaagtccgtccacgggccagcaccttcgggtttatcctgttgtccttcagcggagtggtgctggtgatcactgacggtaatttgtccgcagtcctgcactctccggccagcctgacagccaacctgctgctgattgccggcgcactctgctgggtcttgtataccatcggcggaagttattttccgggctggagtccgctgcgttataccacgctaaccacactgctgggtatgacgagcgtggtcgccacagacctgctgctgatggccacaggtatcattacggtaccggatgccgctgcggtcaccgccgtgatcccgcatttgctgtatatggctctgatcgcaggtctgatggcggtattgtgctggaacattggtaaccgtattgtcacacccaccaacggtgtgctctttatggatgttgttcccgtcaccgcctttattgtttcggcgctgaacggcgtggtaccgacgcacgtacagattgccggtgccacgctcacagccaccgcgcttgtgttcaacaacctcagccagcgtaaaatggcgcgacaggccgtacagagcaccgtgctgaaaacctccgccgcccgccgttaa

SEQ ID NO: 77721 - DNA, 1497 bp, Citrobacter koseri
atgattacgctcagcagaatgactgagattgctgccttgcgcggcaatcagacctgtattaccgacaataacggacagtacacctggaatgagatcacccaacagaccgaatcccgcgtagtcttccttcgccggactttcagtgaggagcagttgcgatcggtctgctatctgtcaaaaaacagtgcagaactggtctgctggctggcagcattcgccacgctcggcattccggccagcgggctggattactcgcttcccgcagagacgctcagcacgctgattgggcggataagacccggtttattgctggtttccttcaacctttttacagccgatgaactcagtcatctgaataccgtcggcacgagcatgctggccgttgatgccctgactgatccggtgatcgacagtattggagaactgcaccactcggaactgaactgcctgctgtccacgtgcacaccgccaccgtaccgcggactttccctgacgtcaggaacgagttctgtacccaaaatagccctgcgctaccaatcttttgatgcccgccgtttcgcatggtttacccgtcaatttggcttcagcgacgctgatggcttcatgctcattctgtctctttaccatgctgccggtaacggctgggcgcgaatgtttatgggactgggagccccccttcatctggtcgaccagtatgatgagcaggcccttgcgcggacgctttctcgagagtgcgtacgcgcgacggtaatgacccctaatcttgtcacctggattacgggccttgccacccggcttccccttcggcatcacctgcgctgggtgctggtcgggggcagttatttccctgtcacgagcaaacaggccgcccgcgccgcctttggtaatattttctgtgagtattacggctgcacggaaacaggggtgaatgtactgtcagagccggccgacatgcaggcctgtccagagagtgtcggccgtccctttgacggtaaccgggtgatgatccttgatgaagacaacagaccgctcaggataggggaaaaagggagagtggccatctccagctatatgctcatggatgagtatagtgacggaagcaggccgttcatcacgatcggagatgaacgttacttcctgatggctgattacggctatctggatgacggcggcagactgtttctgatgaaccgtaacggtgaaatccgcagtgaccatgatatttaccgcattgaggaaaaaatccgctcactgccctgtattatagatgtggcactggttacagtgcagcttcaaggggtcaatcatgtcagatgtattttcagtactgagcagagccgcaaacaaaaattcatgcgtctgattgaaaaaataaatgagcaagctttcacaaccggcgtcattaatttctccgcacaccgggttgataaaataccctacagcccgagtggaaaagtccgttacggtgaaattattcgtatgatggatgcggcataa

SEQ ID NO: 77722 - DNA, 1386 bp, Citrobacter koseri
atgaacgccagagtgataaatatgaccggggccacgcctattctaagcaggcttgaatctcttcgagagaggaaaattttttctttccacgcgctcccgatatccagttacgggaatagcgacattatcggtgacccgaattatgaaatttcggaatgtcctgaaggctccttcaccggagaacttttcgataatttctttttcccttcaggcattatttcagaatcacagaaaatgacagctggactctataatgctgacgcatcattctatattaccagcggaaccagtacagctaaccagatcgctatttcagccctatgtaaaaagggagatcgtattctggctgaccgtaactgccaccagtcagttcatttccacacgcagtcaatcgatgttgaagtccattatctctgcccggaccttcggacggaggacggtgaaatcagtgcctggtcatatgaacaccttgaacaaactcttcttacgctacaacaaagtggcaaagcctgtgatgtggtgattcttaccgcgcagtcctatgaagggatcatttatgatattccgggtgttcttgaacgacttctggcggccggcatcagcacccgacggttttttattgatgaagcatggggcagcctaaattatttcagtgaagacacacggcccctgacagcaatgaatataggttcgctgcttgataagtatcctgatctggacgttgtctgcacccactccgcacataaatcccttttctgtctccgacaggcctcaattgtccactgccgtggcaccgatagcctgccggacagaattgaaacagcaaaataccgcatccataccacctcaccaagctacccgatcatagcctcgctcgacgccgcacaggcggtgatggccggacatgggaatgcacttgctgcacacgcgcgcgggctggtaagcaaatttattaccggcgtatcttcactgaaaattcctggcatcgaggcggtgtgcctacaggttttcagctcacacaaccatattcattatgatccgacaaaagtgatgcttgacgtatcttcactcgggacaggagcagagattaaacagtatctctgcgaggaaaatatttatgtaaagagatacttgaataatgtgcttctctttaatttccacattggcatcaatgaccaggctgttacttcactgctttttgcactgaataaaatcagtcagagaaaatacggcaataccacttccgaaacggagatttcggataaatttattatcccctatcctcccggtgttccgcttgtttttccgggggaaattattgatgacggtataagaaataaaatcgatgaataccggaaaaacggttttctaattatcgcagcctga

SEQ ID NO: 77723 - DNA, 1716 bp, Citrobacter koseri
atgaatacgctacaaattttgagctttgttggttttacgctactggtggcggttatcacctggtggaagttacgaaaagcggataccggttcgcagcagggatattttctggcgggacgttcgttaaaagcgccggttattgccgcctcgctgatgttaactaacctctcaacggaacaactggtgggattaaccggccaggcttaccgcagcggtatgtcggtaatggcatgggaagtcatctccgcaattccgcttatttttctggcgctgatctttctgccacgctatctgcaacgcggcattgcaacgatcccggattttattgaagagcgctatgacaaaaccacccgcatcattatcgattgctgttttttgattgcgacgggaatctgttttttacccatcattctgtattccggcgcgcttgcctttaacagcatgtttcatgtcactgaaacctttggtatttcacaacatacggcgatctggctgatggctgtcgtgctggggattagcggcatcctgtatgctgtcgtcggcgggatgcgggcgattgccattgccgatgtgattaacggtatcggtctggtgattggcggcctgatggtgccgctgtttggtctgatggcgatggggaaaggcagtctgagcgaaggtattacgcgtttaacccaggatcacagccagatgctgaactcgattggcggcagcaacgacccggtgccgattggcgcggcgttgaccgggcttatcctggtcaatacgttctactggtgcaccaaccaggggatcgttcagcgtacgctggcatcaaaaagtttatcggaagggcaaaaaggggcgctgcttacggcggtgttgaagatgctggacccgctgattctggtgctgccgggcgttatcgcttttcatctctttcaggatctaccgaaagcagacatggcctatccggcgctggtgaacaaagtgatgccgctgccgctgattggcttttttagcgcagtgctgtttggcgcgattatcagcgcattctgcggttttttgaacagtgcttcgaccctgtttagcctcggtatctatcgccgactgattaatgaacaggccagccccgataaactggtcactgttggtcgtcgctttggctttattgtggccgtgatctccgtgctggtggcgccgtggatcgcctatgcgccgcaagggctctacagttggatgaaacaactcaacgggatttataacgtgccgttggtgaccattgttattatgggcttcttcttcccgcgtattccggcgctggccgcgaaggtcgcaatgggacttggtattgtcagttacatcaccatcaactacctggtgaaatttgattttcatttcctctatgtgctggcctgcaccttctgtatcaacgtcgtggtgatgctgctcattggcgtgattaagccgcgtgcaacgccgtttaaatttcatgatgcgtttgcggttgacatgaaaccgtggaaaaacgtgaagatcgccgctattggcgtcctgttcgcgatgattggcgtctattctggtctggcgcagttcggtggctatcagacccggtggctgaccattctcagctacgccatcaccgctgcggtggttgtttacctgatttacagctcatggcagacgcgccattccgcgcctgtggtttatgtttctgacgctaaggataaagcatga

SEQ ID NO: 77724 - DNA, 306 bp, Citrobacter koseri
atgcccgtcaggctgttccgtaacctctcgctgatccacctggaagggtcgaaatttgattatattgagaaagagtgcggcatcaccatcagtggcaactatgaaagcctgacgcccgtactggccgataaacagctctccgcgcaaatgaacgtccccgagcaaacgccgctactgcgaatcacatcgctttcttacagcgacagcggggagtttttgaattattcggtcatgttcagaaatgccagcgaataccaggtggactaccatttacggcgcgtccacccggatgcaaacctgacctag

SEQ ID NO: 77725 - DNA, 816 bp, Citrobacter koseri
atgagtgagcatcaaccatttgaagtaatgaaacagcttgatgatcagggtattgagttttggtcagcgcgcgcactggctaaggctcttgaatattcagagtatcgacattttgtacccgtgctgaaaaaagctgtggaatcatgccgtaccagcggccagttagcctgcgaccatttcgaggagatcctcgctatggtacggattggttccggtgcgtgtcgggaactgaaagatatgaagttatcccgctacgcctgctatctggtcgttcagaatggggacccttcaaaacccgtcattgcggcagggcaaacgtactttgccattcaaacccgacgccaggaattggccgatgatgccgcttttaagtccttgcgcgaagatgaaaagcgcctgtttttacgcaatgaactgaaagaacataataagcatctggttgaaactgctcagcaggctggtgtcgagaccacttttgactttgctatcttccagaaccatggctacaaggggctgtatggtggtttggatcagcgagccatccatgaacgtaagggattgaagaaaaaccaaaaaatactcgaccatatgggctcaactgaactggcggcgaacctttttcgggcgactcaaacggaagaaaagctgcgtagggattctgttaatacgaagcagcaggccaaccaaacgcattacaatgtcgggcgtaaagtccgccagaccatcgaggatctggggggaacaatgcctgaagcgctgcctttaccagaaaaaagcattcagcaacttcagatttctattaagaaaaagacctga

SEQ ID NO: 77726 - DNA, 222 bp, Citrobacter koseri; identical to SEQ ID NO: 72367

SEQ ID NO: 77727 - DNA, 135 bp, Citrobacter koseri
atgattatggtcgattccttagtgttaacaagcgttatgcagctgcattttcttatccgaatgatcctgagaaatttatacatgagattgctaaagcagggtatgccacaaatcctgcttatgaaaagaacatag

SEQ ID NO: 77728 - DNA, 234 bp, Citrobacter koseri
gtgctgtgcaacccgccgttccatcagaaacatgcgctgacggataacgttgcctgggagatgttccaccatgcgcgccgttgcctgaagatcaacggcgagctgtacattgtggcgaaccgtcacctggattatttccacaagctgaagaagattttcggtaactgcaccaccatcgccaccaataacaaattcgtggtgttgaaagcggtcaaaaccggtcgccgccgctaa

SEQ ID NO: 77729 - DNA, 417 bp, Citrobacter koseri
gtgatcgacctggtcgccaaacatatccgccttgagccaggcgccttgcccgatggcggtaacacccggcaaaatgcgcggcgtgacttttgccgggatcagcatctgcccgttattgttaaatacgcgcaccgtgtcgccctgtttgatgttgcgcgctttcgcgtcaatggggttaatccagatctcttgcgggcacgcttgctgcaacacgtcaatattgccgtagctggagtgggtgcgggctttatagtggaaaccggtcaattgcagcggataggttattcggatgggatcgtcccagccatcaaaccctggcgcataggcgggcagcggatgaacgatctcatcgttttccagctcccaggtgtcggcgatggtcgccagccgctcggagtagatttcaatcttccctga

SEQ ID NO: 77730 - DNA, 513 bp, Citrobacter koseri
atgggtgtgggcgatgttgccatgctggttaatcagcgtattgctggcgtagcaccacataaatttgatcgggacgtcaagcttatctttaccgcgcacgccgtcgcgtgtggcggtcatttccgcgccatgatcgatggcgtctgtccaggtaaaaacggagatctgcgtttttaccgggttatccagcatagaaaaccactctacgccgaggtcccaggtgccttcacgcacgccggagttgccgccgttgatcccgacgttgccggtcaggatagagagcatggcgatcgcgcgcgcagtctgttcgccattggagtgacgctgcggcccccagccctgacagatatacgccggttttgccgagccgatttcccgtgccagctggatgattttttccgccgggatactggtgatatgtgcggcccattccggtgttttggcaataccgtccgggccatcacccagaatataggctttatagtgcgcattacgcggcgcgctggcgggtaa

SEQ ID NO: 77731 - DNA, 273 bp, Citrobacter koseri
atgtacggcttcgttgccgtaatctttcagaatacgcttcaggttgtcgccaatggtatccagcgcttcatcccagctgatacgttcaaatttgccttcgccgcgtttaccgacgcgtttcatcgggtatttaaggcgatccgggtgattcatacggcgacggatcgagcgtccgcgcaggcaggcccgcacctgatgattgccgtagatgtcatcgccggtggtgtcggactcgacccagtacaccgcatcatctttcacatgcagccgtag

SEQ ID NO: 77732 - DNA, 438 bp, Citrobacter koseri
atggctatttttttcagctcattaacgcgtggcttctatgatgaccagatgaaagaggtctatattgaggcgggggcgtggccgggggacgcagtgccggtttctgagcgctggtatgaatatttaattcagggacagtcggaagggaaaatcataacagctgatgaatacggttcgcccgttctttctgaccccactccgccgtccacggaacaactcattcaggaggccgaacaaaagaaagctgaattacttgctatggctgatgctgcaatagctccgctttcccgtgccgtaaagctgaaaatggcgacagatgaggaagctggaaagctcgaagaatgggagcgctacagtgtgatggttaaccgggttgataccagtaaagcacctgatattgactggccggaaaaaccgactgaatatacggcacagtga

SEQ ID NO: 77733 - DNA, 1131 bp, Citrobacter koseri
atgcatcgaattgatacagccacggctcaggttgataaatttgggccggggaaaaatggctttacgaacggagacccggcaaccggccgccgcgcgacggatcttaacagtgacatgtgggatgccgtacaggaggagatctgcgccgttatagagtggtccgggctggcgctcaacaaagaagaacatgaccagttatatcaggctattgtcaaaattattacctcaaaaatcccggatgcgttactgaaaaaaaataacctgtctgatgttgcgaataaagccattgctcttgccaacataggcggcgttccttcgacgcgcaaagtaaacaagcgtgcattatcaagtgatattacgctaactgccgatgatgttggtgcaatgcctgtcgaagttaacggagttatcagggatggcgcgacaatggcagcagcaaataaagggggatggtggcgcgttgttgttacgaatcctgatgctatgtcagattttcctgcccggccgaatggtacaaagctgtatggctatggatatatgtttgtcatgttgagcgaaaactcatggcttcagcactattattcacatcgtggcgaagtcgctattcggcaggaatggacaacggggccaactacagatgtggcgtggaatattgattacaatcccgcgaataaacccactgctgacgatgtcggggcgtatacgaagggagaaagcgataacaaatttcaacctaaagggaattatactcctgccggcgaggcttatacaaaaacagaaagtaatgatcgttttcagccaaaaggaagttatacgcccgcaggacaagcctatacaaaagccgaatcagattcccgctttaatcttaaaaatacagcgagtaaagcggcaaatggctgggaaaaagatgcttcaaccgggatgattacacaatgggggagcggtacatacagtaaaaatgcccggataacgtttcccgtcgcatttcctaatggctgcatggtggtcgtcggtaacgatacaggttcaggtgttgtgggaacagcgctcggaacaaaagataatacagggttcactatgtatgcgaattctaccacggtgtcgcttaactggattgccaaggggtactga

SEQ ID NO: 77734 - DNA, 453 bp, Citrobacter koseri
atgactaaggcggcgttggcatttgttattatggtattttctcttcctgctctcgcaaagaaaactttaacggatgattttgtgaaagagatagaaacagcgatcaattcaacaggtgaagtttctgcatcagttgatattgattgccctgctaaatctgctagcggaaaagttctcgttacacatgtagattatgagtatgggaaaagtaagggagtgtttgtatttaaagatactaatgacaccccagctgagatgacttctattatccctgtgtatcctgatgatgaccttgattcagaaacgataaatggttgggattttgtgtttaaaatgcccaacggtcagttttttataacagtaatgaaaaatggaaaaacaaaagctggagttaacaaaaacggaacatcggggattacagaaataaactgtaaggcatctattcctcagtag

SEQ ID NO: 77735 - DNA, 1962 bp, Citrobacter koseri
atggctgacagtttccagttaaaagccatcatcaccgccgttgaccagttatccggcccgctgaaagggatgcagcgggaactgaaggggtttcagaaggaaatggcagggctggcgctgggggctgctgctgccggaacggcaattcttgcttcgctggcaatgccggtgaattctgccattggcttcgaatcgaaaatggccgacatccgtaaggtggttgacgggctggacgataaaaaagcctttgcgcagatgagcgacgatattctgaccctgtcaacccggttgccgatggcggcggaaggtatcgccgaaatcgttgctgccggggggcagtccggtattgcccgcagtgatctgatgcagtttgcaaacgatgcggtgaagatgggcgtggcgtttgacaccactgctgaagagtcaggccagatgatggcgcagtggcggacggcgttcaaactgacgcaggatgatgtggttgtcctcgctgataaaattaactatctggggaataccggtccggcgaatgcgaagaagatttctgatatcgtgacgcggatcgggccattaggcagtgttgccggggtggcctccggtgaaattgcagcgatgggagccaccattgccgggatgggcgtagagtctgagattgcgtcaaccggcatcaaaaactttatgctgtcgcttaccgccggaaactccgcgacgaagtcgcagaagcgggcgatggcttttctgaagctgaatccggcgcaactggccgccgatatgcagaaagattcgcgcgcggcgatgctgaaagtgctggactcgctggcgaaggtgccgaaagcaaaacaggcatccgttatgaatgccctgttcggcaaggaatcgctgggggcgattgcgccattgctgacaaaccttgacctgctgcgcaccaattttaatcgggttgcggatgcgcaggagtacggtggctcgatgcagaaggaatacgcatcgcgcgcggccacgacggaaaaccagctgatcctgctgaaaaacagtatcaatgcgatttctgtcacgcttggcgacacgtttttacctgcgattaatgaggctgcggaagaggtcaagccttatctggaacaggtcagaacgtttgtccgggcaaatcctgaactggtgcagtctgccgcgaaattcggcgccgcactgctggctgtcggtgtgtcgattggtacgctgtcccgcgccattaaaatcctgaacagtgtcattaatctctctccggcaaaaatagcgattgctgcacttgtcgctggtgccatgctgatcattgagaactgggatgaagttggcccggtcatcaaatcagtctggcgggagattgatcgtgtgattgaacagcttggcggctgggaaagtacaatcaaagggatatctgcgctggctgcgttgtatatcggcgtaaggatggtgacaaatatccagacggccattgcaacacagaagcaatggactgctgcggccggggcgacgggaagagcgcttcgtggtctgggtaaaatcagtcttatcggtgggctggtggaacttggactgatggcgcaggagtttgagaagcagcacccctggctgataaagaacttcgcggccagtacgctgaacagcggcattggactgaatggcaaaatggaagaatggggcaaggacttccatgattttgtgtatgaaaaaacaggctggcagatgcccagaggggacgggtatttttccggtaacggatatcagcccgctgtttcgttaaatcgccccgcgacgtcttcaggtctcaccagtccgttagcccctgttcagcagcgcagtgaacttaaagtgacctttgaaaatgcccctcaggggatgcgcgtgactgatattccggcctccggtaatccgctgatgggtatttcccacgatgtgggttattctccattcagaaataaataa

SEQ ID NO: 77736 - DNA, 276 bp, Citrobacter koseri
atgggtatcgaaatgattatcggcctggtcgcagcggtgattgctgctatcgccggtgcttttggtttcggacatgcgcgcggcaccagcaaagcggaagccaaagcagacaagcagcgcaccgaagaaaacgccgctgcatcggtagcagcagcagagcgacaggcagaagtgaccagagaggccagtgatgtacagcagacagttaaccacatgcctgatgacgatgttgatcgggagctgcgcgaacaattcacccgccccggtagtcgttga

SEQ ID NO: 77737 - DNA, 627 bp, Citrobacter koseri
atgaaccaatcacaatttcagcaggcggctggtataagcgccgggctggccgcgcgctggtttccgcatatcgatgcagcaatgaatgaattcggcatcactgcgccgctcgatcaggcgatgtttattgcacaatgcggccacgaaagcacaggcttcactaagttggtggaaagttttaactatagcgtcgacgggttagccggtttcgtaaaagtaaaacgactcactcaggatcaggccaatgcactcgggcgaaaaacatacgaaaaagttctgccgctcgaacgccagcgggcgattgccaatctggtatacggtaaccgattcggaaataaagctgctggtgatggctggaaatatcgcggacgtggaattatcgggatcaccttcctgggcaattacatgaagtgcggtaatgcgttgaagctggatttagtaagcaaccctgagttgctggaaaaagacattaacgccgcccgcagtgcagcctggttctatgcttcagaaggctgtttacggtatccgggcgacctggtgcgcgtcacgcagattatcaacggtgggcagaacggcattaaagaccgccgtgaacgttacgccaaagcgaaagccgcgctggtctga

SEQ ID NO: 77738 - DNA, 279 bp, Citrobacter koseri
atgttaaatgatccttctgcattctttaatgcgttaatttgtggggtgatcgtggttgcgctgatgttctaccagcgcggcggcgcgagacatcgccctttgatatctctgatggcttattttacggtgctggtatacgccagcgtcccattccgctacctgttcggcctgtatcacgaatcacactggtttgtggtgctggtgaatatcctgatctgcgccgccgtgctatgggcccggggaaacgtggcgcgtcttgttgatgtactgaggcactaa

SEQ ID NO: 77739 - DNA, 393 bp, Citrobacter koseri
atgtccgatcctgtaaccggctccggcgctatgctcggaggtgggctggtgggttccgtaatttacggaatcttcactcataccgattttggcgttgtatttggcgcgtttggcggcgcggttttctacgtcgcaacggctgcaaatcttacccgtggtcgtctggctgcatacttcatgacatcgttcattgttggtgtgcttggagccggattattaggttcaaaactctcagcctggacaggctacagtgatcgcccgcttgatgcgctcggtgccgtgattgtatctgccatcactattaaggtgctgacattcatcaacagtcaggatctgaacagcctgttcggtatgctttcgcgtctgcgcggaggagggggcaatgttaaatga

SEQ ID NO: 77740 - DNA, 459 bp, Citrobacter koseri
atgtccgaataccatagcttgcttcacgttattcgatcgcgtgtatgcgaaaacagaaatatgtctcactccgcttattatcagggtagccagcaggacaatcagatcaggaacagagcggcactaatatttacccttgagatgatactccaccaacacagaataaagtatgcaacaattttcaatccgcttgagggaaaagatgcgctctatcatctgatatttatgaaaacgaactggttaccatccgatatcagaaaactcccccttgaagacgctttattcgttatacaagaggaactaagaatagagaatctttccactgatgcgcaagatgctctgaagagctttaatctaccgtctgtggcttttcggtttgaggattttccagaagcggattggaactatatggaaaactcaacattccttcgaagcctgatgctgaaagcagaccaatag

SEQ ID NO: 77741 - DNA, 270 bp, Citrobacter koseri
atgcaggacgaaaagcagcaaccgtatttttttaatcctggcatgtcagccgaacagcttgaagactggctggggcagcaaaaacttcacctcactcacttcaaccgtctgatgaaagaaaaagccgctcttgaggaacggctgggggaaataaacgcgtctattggtctgctttcagcatcaggcttcgaaggaatgttgagttttccatatagttccaatccgcttctggaaaatcctcaaaccgaaaagccacagacggtagattaa

SEQ ID NO: 77742 - DNA, 927 bp, Citrobacter koseri
atgaaaaaagaagatataaaagaaatcgtactcgatcttaaacgtagcggcaaagggtacaaaaccatctcgcgcgaaacgggcgtcaatatcaataccgtgaaaagtatctgccgccgttccgggttatttcgggacaatcctgaacaccgggtgctcttcaccataccggaaccgaaatacagcaccgaactggcgacgattaagcctctgccaccgcagcaggtgatcaccggacataaacagacggatgcatacctgtgggtgctggaggttatcaaaactggcgagcctgtccatattgccgcagcggaagctgcgctggaaaaactgaccatcacgccgaaagaggcacaggaacggtatacacgatatttgcagcagaacggcgcgggctggacttccgtgttttcgacaatgtggctcgataacccacagcactttatcagcaatgcgaaatcacagcgggagaaggccgcgaaggttcgtggtgcttttggcaatcatgaggctgtttttgatcctgttccggctgagtgtctcattgagtcccggtatgggccttaccaggggatttactgtgattacatgcaggagggagacggagagtttatttatacagacgtgcttccggcaccttataccctcagcgacgtcgttcgggaataccagtactgggactggttgtcgcagatgcgggtggcagcgtacaaagagctgcatcccggtgagtacgcctgggagagttcacatatctggcacagggaaaactggctggaaaagcaactggaaatcatcaggccgatcagccgcgaggaggcgctgaatgtactcaaatggtatctggagagtgagaactttgcagatacgggcaggcgtcaggacggcgtttatctgaacctgatcggctcacatcagggtgattaa

SEQ ID NO: 77743 - DNA, 393 bp, Citrobacter koseri
atgacagcacatatcgcggcacacggccggctggtggttgatgtgcagagcaaaacgatcagcaacggtaactgtatggcatttacccggcttgcggtgtctcttccctgccgggatgccgagagtggtgaacttacattctggctggcggtaacggcattcggcaaacaggctgattatctgctgaaacatcagaaaggtgacctgattagtgtttccgggaatatgcaggccagtcagtggaaagggaataatggtgtgttgcagacgggctatcagatggtggcggattcagtgatcagcgccaggactgtccgtccgggaggccggaagaaaagcgcaggcgggcaaccggcaccggaagatgatttttcggatgacgtgcctttctga

SEQ ID NO: 77744 - DNA, 2142 bp, Citrobacter koseri
atgaaaaaggcacctaattttaagcacctgccagaggataagtttactgaagccgttatttttgccggatctgaggcttattctcacgccagaggctgggaagaggggatgggtaaacaggtggcccgagactcaacgcctccggtttatcttggcccgaagcaactccaggagctggggaacctgagaattgttgatgacgggcgtcgttctgcccgcgtctatctggctggcgatattgagcccgttctgattaatgccattgcagaaaagctggcgctggcgggcgtgcaggaggcgaaattatacaagggtatccctgaccgccagcctgaagactggagagaatatctgtccaggctgcgtgagcagtctgagcgtggagagcacatggttctgcaactcccggcgttcaaaaaaggcgcggtgtcagaaactgatgatgaacttaagccccgcgttgaaagccgtgatgatggcgtcttctgggttacaccaaaagtcgataaggaaagtggcgaaattatcgctaacgaaagctggctgtgttctccgctggatgtcgtgagtatcggtagtgacggcagggagcgttatctgatcctgcgctggcagccggaaggcgaaaatacaccagtaacccgcgccattccgcaggcggatattggtgaacgggagggatggcggatgttaaaggcgggcggcgtgaatgtcacgaccaaaaataacctccgggctgttctggctgactggatgcaacgtagcggtacaggtcagttgtggcgtgttgtacatgccaccggctggcagtgtggcgcgtatatcatgcctgacggtgaaatcattggaaaacctgaacacccggtgctctttaacgggcgcagctctgcggcagccgggtacacgatcaaagggggcagcaaaagctggcgcgacagtgtgggcgctcttgctgacggtaactggtcgatgatgacggcagttgcggctgcgctggctgctccacttatcggactgaccggcgctgatggtttcgggatccatttctatgaacagtccagcgcaggtaaaaccaccacagcaaacgttgcctccagtctgtatggcaatccggatgtattacgtctgacctggtacggaaccgcgctggggctggcaaacgaagctgcggctcacaatgatgccctcatgccactggatgaaatcggccagggggccgatccggtagaggtctggaaatcagcttatgcgctgttcaacggaaccgggaaactacagggggcaaaggaaggggggaaccgcgagctgaagcgctggcgcacagtggcggtcagtaccggtgaagtggacatggaaacgttcgtggccggagcgggtcgcaaggctaaagcggggcaactggtgcgcctgctcaacattcccatgagtcgcgcggttgccttccacgggcacaaaaatggcaagcaacatgccgatgccattaaggacgcttaccagaatcatcatggcgccgccgggcgggagtggatccgatggctggcggaaaaccgcgaagaagccgttgcggtagtccagtcagcggaagagcgctggcgcaatcttgtcccgtctgattatggcgagcaggttcaccgtgtggcttcccggtttgccattcttgaggctgcgctgctgctcggaaaggtgattacaggctgggatgaacagcactgccgggatgccattcagcacagctataacgcgtggattagcgtgtttggtacaggtaacaaagagattgaacagattattgaacaggccgtgcagttcctgagtaccttcggtatgcgcaggtttgctccgttaccctatgacgaacaaagcctgccgattagcgagctggccggataccggaataaaggaaatcaccatgatgatccggtgttgttttatgtcttacccgcagtgtttaaggctgaagttgccaggggattcgacagcggccagtttgcacgcacgctgtgtgacgccggaatactgaaaaagtcaccgagtgataaagggtatcagacgctcaccccgcggctccggcatctggggaatattcgcctgcgttcatatttactggttcagcttgacgaaagtgaggagacagtccaatga

SEQ ID NO: 77745 - DNA, 660 bp, Citrobacter koseri
atgcgtaacacagagatgaaaaacgtcatgggtaatacagggccgcatgataaatgcggagaaataagtcgtgcggaagcggagaaaaataacattctttatttttgttgccaggcggacggcagcgatcagtttatgaaatcagaatccccaggaacggtcattgaggaactggacagcggacggtatgacgcggatccggtatcaggtatgcgtctggcggccgcgctgtgggcgggaatgagtacgggctgcttcacgctgacggatgagcagcaccttgtactctggcgctgggtggtggtgtccgtgtatatccgcgagatgcgggacgcccacggaaaggtcagcgtgaaaaatgagcagggagagcctgaagaggtcactgtgtataccggagaacatggcggcatcgtcatctacccgtggtcggagcgttttgctctggcgcatcacgttgagggactggcgtatgaagtgtttccaacagaaaaggccgcggaaatggcgatggcaatttaccggagcatgcttgagcacgatccggtgaccggatttcgcatgtcggtacagggactgaaggggatggcgcttcttcatgacggttttattgagacgctgcaaacggaaggtattccggcggcaccggtagttcactga

SEQ ID NO: 77746 - DNA, 384 bp, Citrobacter koseri
atgagccagtcaaataattctcttgaattaaaccggaagcatatcgctgacgcctttattcattattgtcgtctgcgtaacagcggatcagcagttctcaacctgatggtgaaaaaacaggtcgtggcgctggataacctgacaggggaggcaatagccagttgccttatcaacagcattgaactccagtgctttcgcaagttcggcagggataagggggtggcgatgctgagcgaaacctacgccgggatgctgactaaagacaacagccgcctgacatcagaaggggtagagttcatgaatgaagttatgaaagaagcagtgacagcggcgctggataatcccggaaataataactttggcctggagatttatcatgcgtaa

SEQ ID NO: 77747 - DNA, 306 bp, Citrobacter koseri
atgagcaacatcgaacaactgcttacccgttgcgatttgcataaagaggatgatgaggcgctggtggcgatccgtatgcattccgaaggtgcttatgagggcatcatgtccgggctggggtctgtcggcaatattgtgttctgggcctgtgacaacaaaaactataccgatgaaatggcgcgcgaggatttgtgtaatcttggcgaaatgctgatgcatttaccaggtattgcggcagcgctgaaatttaatgcggatgaggcggatttcaatatcatcgaacgcagacaaaaaagcggaaaataa

SEQ ID NO: 77748 - DNA, 765 bp, Citrobacter koseri
atgaacatggggtgtgcaatggctgataaaactgaactgatggcaggctttagcgtggatgaaacttctggtgaaattgattcggatacgctgctggaaatggtgaacgaaacccgccttgaatgcggtgaaaaaccgattcgcaacaacgtgttcatcgatcgcattaaggatgagctggtgggggagttttacaaaacttttgtaaaacccagtagcacaaagggtggacgtccatcggaggggatcatcatgcagatgaaacaggccctccgtgtcgcagccagggagtcaaaatctgtccgtcgcggactggttgacaagctggaagcccgttaccagccagtgcctgtacaacgtgaattatccactatggaaattctccagattgcgatggcatctgagcagggccgcctcgcagcagaagaacgcgccgatcatgctgaacgcactaagtcacagattagtcgcaagcgtgaagcttccgcccttggaaaactcagcgccgtaacacgtcgctgccgggatctggaagagcagcttggcgaaagcgtaaaacacgcaactatcaccagggttgagaaggcaaccggccgcaagggtgaatttaaattcgcaccactacgccgctggtgccgcgacaacggtgttgaggccagggatgtgcctgatgagcgttacggcagcgtgaaggcgtggcctgctgaagcatggctggctgtttacgggattgatctgaaaaaactggccggaggtggtgtatga

SEQ ID NO: 77749 - DNA, 228 bp, Citrobacter koseri
atggataagccacatatttaccgtaccgatgaagatgtactgccgaacctgcaacgctcactggatctgatgaactgcgcagcccgtattttgggttcaggtgagaagaatttgcagatgtacgtgatatcacttgttgatgttgccgcccatctgacgcagcaatcgacgaatgctctggatctgggtgaacaggctgacaatgaacatggggtgtgcaatggctga

SEQ ID NO: 77750 - DNA, 171 bp, Citrobacter koseri
atgcgcaacgttaaagccggtattggccttgatgctttgcacaagattcaggcgcttgcgtccgcggccggatttctcacttccagtgtggaagaagagcaattgtgtcttgaactcattgagctgattgaaaagatcgcccgggaagcggtggaggccgacaatggataa

SEQ ID NO: 77751 - DNA, 405 bp, Citrobacter koseri
atgtctgacatcctcaaaaccgttggctcgagcgttcaccttgatcggcagggcaggaattacgttgggttctgccctttccatagtgagaaaacaccatcattcactgttgatcccgctgctcagacattccgttgcctgggttgtggcgcccacggtgatgccgaagaattcgcgaaactgttactggagaaagggcttcgtacccttctgagcgtaaaccttcatgtatccctgaattttacagggcgtgtggtggttcagcttaaggaaggccgtcatgtgtgtgactacccgctggtgaatggtgagcatgtagccactctgccgtcgtttctggaaatggcccgccgggcgggctggtctgtcacacctgaacagggggtatgcaatgcgcaacgttaa

SEQ ID NO: 77752 - DNA, 288 bp, Citrobacter koseri
atggcatgttctcatgatacccaaactcgccctgaatttacatatctgtttctgggcactccgtcagataaacccggtgtgacgcccgttgtcctgcgtgctgaagcaaacacagaacagcaggcccgtttgcatttccttaactgggatctggtgtttgctgcgcagattcgcaccagggcaccatgccgccttcagttgacagacggtgatgatcatttctcctggattttcgagcagcgtttcgacgcatgcacctccggtgttcaggaggtggctcatgtctga

SEQ ID NO: 77753 - DNA, 186 bp, Citrobacter koseri
atggcaacaaagtcagtgaatgcaaaatctaaaagaatcgatgcacgtgtccctcttcctttagtggatgcaatggaaagcttgaaagaggctggagaaagtacaggacagttcgttaccatagcaattgaaggcgaaatcaaacgccggcagcgcaaaatgtcaaaagataacccaaccaactga

SEQ ID NO: 77754 - DNA, 162 bp, Citrobacter koseri
atgggcaaagatccgctgaagaccaaagtaagtgaagggcttgcgaaaatgcacaaagctggagaattcgtctccgaagaaaaagcattggaacttgcagataaagcacgtaaagatgctgaagaaaccaggaaacaacatctcaaaaagcttgaacaataa

SEQ ID NO: 77755 - DNA, 618 bp, Citrobacter koseri
atgaataaattaaatgccctccccgggcagggcctcgctcaacctgaaatcggtcagagcgttaattgtcgcgagctgaagttccatgatcagacagtgattccgtatgacaatggcgacgggaaaatttggttcactgctgacactttggccgggctgcttgggtatgccaataaagataaagtgctgaaccttttttatcgccatgaagatgagttcagcccatcaatggcaacggtcaccaaagtgagggtgaacgggataaacaatagcttacgtgaaattgatacccgtcttttctcaccgcgtggtgcccacctcatcggcatgtttgcccgcacgaaaatagcgaaagagcttcgcgtgtggttgctggatttagtcgagaaagagggggctgcacctcagcctggtgtccaccacacgattgagcagatgcgaaatattgttgcagcagcctggaaggcttcagacgaggattcttccgatgccggccgccgtcttcgtaagcgccaggatgatttgcctgagctggtaaaggcgcaaaagctggtggatgaaattggtcagattccatttgagttaattggtggcgggaaagtcggggtatctgtatga

SEQ ID NO: 77756 - DNA, 198 bp, Citrobacter koseri
atgtcgcaatcttttattcgtctttctgaagtccagcgccgtactggttacagtaaagcctggatctaccgccttatgagccagggtaaattcccgtcctctgtcaaaatcggttctcgtgctatcgcctttatcgaaagtgaagttgatggctggattagccagcgcatcgaagaatcacgcaaggaggttgcctga

SEQ ID NO: 77757 - DNA, 456 bp, Citrobacter koseri
atggctggttgggggagtaatgatcattggtctgcgcctcatttcgatgtatatggcttcagacgctcggacttaaaaacgttagcagaaaagctaggtatggacttgtctattccattagacgaaataacacctagtgttcctgattctacagatagcaaaccattgagcgaagctgacgttgaaatgttgcgtatggaaattgatacgcttaaacggcaagtacgtaagttagaaagcgaacgtccaattctcattaaaaaatacagagaggatgatccactttttcttgccatacaaataagaaataaagagtggtctaaatatgaccatgataacgatagagctacgcgggcaaatcaggcatctattaagcaagaacttgagaatatgggattcaccagtcgtcaggctgagtctatcgaattggttgcttgtcctattaagcgaggatga

SEQ ID NO: 77758 - DNA, 354 bp, Citrobacter koseri
atgttagacatagctgaagtgctcaaagcgcgcgagagtgagtttgttagcctgagagagttagttacacgtattcgtttgcatcaaccacatgtcagtgagacccaaatcgcagattttctttatatagaagaatcgaatggcgatcttcctgaatgggttaaacaaggtatagccggcacaattgagcctacctatactgacaaccattatgatggtgacccatcgttaatatctctcctcaaagccatacgtgaagaaggatatatgcctgaagtcgctcctaagatcgaattagctcgttctacagttggcgaaccgccgatggattttgacgatgatatcccattctaa

SEQ ID NO: 77759 - DNA, 1188 bp, Citrobacter koseri
atgaagttaacagcccgccagatcagtactgcgaaaccaacggaaaaaccatacaagctgtctgatggtggtggtttgtatctgctggttaacccgaacggctctaggtactggcgcatgaagtaccgctatgcaggtaaagagaaactgctatccattggcgtgtatcctgatgtaacgcttgcggaggccagagacaaacggactgaagctaaacgtatgcttgctgcgggtgacgatccgtctgaagtaaaacaggccgccagagaggcaaagagtcttgcggttaataactgctttgaactcttggcgcttgaatggcatgagcataagaaacctaactggtcttcaggctacgctgacgacatcctggaatatctgaaaaaagacatattcccgtatatcgggaagaaagccgtaacggatatcaagccagtgactatgctctccgtgctgaaaaagatggaggatcgcggtgttctggataagttaaagaagaccaggcaggcctgccgccagatattcacctatgcaatcatcactggcagagcggagtttaatcctgttgccgatttagctggcgccctgaaaactccgaagcaacaacatttccctcacctgatgccagcgcagatcggccccttcattcaggccgttaatgcttacaccggaagtaaggttacgcgagcggccacgttattgttgatgtataccagtgtcagaaccattgagcttcgcgcctctgaatgggccgagttcgacctggacaacgatttgtggcagatcccaaaagaacgcatgaaaatgcgacgcccccaccttgtaccgctttcacggcaggttaaatcacatctgttagagctaaaagagatcaccggctggggcaagtatgtttttcccggacgtaatgatgcccgcaagccaatgagtgaggccagtattaatcaggtgatcaaacgcataggctttgcagggagggtaacaggacacggattcaggcataccatgagtacagtgttacatgaaaaaggattcaattctgcatggatagaagcgcaactggcacatgctgacaggaatacgatacgcggcacctacaaccatgctcagtatcttgatggccgacgggagatgcttcagtggtatgcggactatctggatgagctggctaagaagcccgttggttaa

SEQ ID NO: 77760 - DNA, 123 bp, Citrobacter koseri
atgacacagattattacatttgtgccatccctgaaggtgaaaatgccggatcgcagcgtaaaccagaacacggcttcggggcgaatagagccgaccatgtttaatgcattattgaggaaatga

SEQ ID NO: 77761 - DNA, 351 bp, Citrobacter koseri
gtggcgctgctgggtaatcacaccgcgaccgggctcggggtgcgtctgtctcatctggcgctgctgcgttttatggcgccggtctttctgaccgccgccagcgtctcctgcgtgggcagcctggggtttgtcggcctgatggcgccgcatatggcgcgtttttgcctgcgcggagggcaaatggcgctgctgtggggcagtgcactcattggcgctctgctggtgctgctcacggataccatcgggcgtctggcctttgcgccgctgcaaataccggcggggatcgtgattgcgctggtcggcggccctttctttttactgttgctctggcgtcgccgggatcgtttgtaa

SEQ ID NO: 77762 - DNA, 498 bp, Citrobacter koseri
atggctacattatcggtcgcaaataaagcgccgtcgctgatcggcggggcaatgattatcggtggaaccattattggcgcgggcatgttttctctcccggtggtgatgtctggcgcctggtttttctggtcactgctggcattaatttttacctggttttgtatgctgcattccgggttaatgatcctggaagcaaacctgaattatcatattggcgccagcttcgacacgattaccaaagacctgctgggaaatcgctggaatattattaacggtctgaccgtcgcgttcgtgctgtatattctgacttacgcctatatttccgccagcggttcggttattcaccatacctttgcacaaatggggatcgtctttccggccaggctcggcgggttattattcgccctggcggtagcgtttattgtctggctaagcacccgggcggtgagccgtatgacaccattgtgctgggcgccaaaattctcaccttctttatga

SEQ ID NO: 77763 - DNA, 165 bp, Citrobacter koseri
atgaaaattatcagtaaacgccgggcaatgacgatataccgccagcatcctgagtcccgaatctttcgctactgcaccggaaaatatcagtggcacggtagcgtctgtcattacaccggtaaggtagttcctgacattcccggcgtgctggcggtatacgcctaa

SEQ ID NO: 77764 - DNA, 477 bp, Citrobacter koseri
atgaaacagctttcctttttacccggcgagataacgccacaggatcggcgtctcatccagcgcgccctcagggttctggaccggcatctgcatgagcccggcgtggccttcacctcttcacatgctgtccgtgaatggctgcgactgcatatggccgcgcttgagcgggaagagttccgtgtgttgtatctggacaaccagaatcagttgattgcccatgagacgctcttcacaggcacgattaaccgtaccgaggtgcatccccgggaagtggtgaaacgtgccctgtacttcaacgcggcggcggtgatactcgcgcacaaccatccctctggtgagacaacacccagccaggctgacaaagcccttacgcagcggctggtacaggtacttcaactggtagatatccgagtccctgaccatctgattgtcggtggcaggcaaatctattcgttcgctgaacacggtttgctttga

SEQ ID NO: 77765 - DNA, 450 bp, Citrobacter koseri
atgacacaacacaccctcatcctggctaacgagccacagttgattatcaccgctacagctgtacccgatgaacaacgtatcggcttctggccacaacactttggttctattgcgcagtggataacgctggaaccacgtattttcgcctggatggaccgcttctgtgatgagtacagcggtggtatctggtccttttacacgctcagcaatggcggcgcgtttatggcccctgatgctgacgttgacgataaatggcatctgttcaacggcatgaacggcaatggtgcgcaaatgagcgtggaagccgcaggtatcgcagtctgcctgattgaatacagccatcacgcctgtcgcaccgaatgcgatgccatgacggagcactattacctcctgcggaactatgccctgcagcatcctgaagctcacgccattctgcgcatcatcgactga

SEQ ID NO: 77766 - DNA, 225 bp, Citrobacter koseri
atgtccccatcagtgttgctgccaccgggaccgttcacccggatacaagcggaagttgtcatggtaacgtatcgcaatatcaccattgaagacgaccagggtagtcacttccgactagtggttcgtgaccccgaaggcctgatggtctggcgggcatggaactttgaacctgacggcggagctgggcttaacctttatatccggcagtacagcacagcattataa

SEQ ID NO: 77767 - DNA, 468 bp, Citrobacter koseri
atgacaatacgttcactaagccgatttatgctggcgggtgtactgctcgccagctttaatgtctctgcgatcccggggctctggcagcagggttacggtcagggcaatacggaatacagcgtcacggatgctaacgggcagacctttaccatcaactgcacaggaaacccggaccagaatggtttctatcagcattcagtctttcttacccttgctggggacaaaacggtcagctcacatgatgacaatactgacatcaccgtggtgatggaccataagcaatatgccgttccctcaacacttggatggcgtaacggcgataacgcctggtttgacttcatcatggatatccgtaagaccgggcagtttgacgtttacgtcaatgaccgtaaagcggggactttcactgtggacctgaagaacgcagagaaagttctacccattcccggagactgcagtaacgactga

SEQ ID NO: 77768 - DNA, 444 bp, Citrobacter koseri
atgaaatgtaaaacactacctctgatggcgatggttgccaccactctgtttctgagcgcctgcgatgacaggagtgatgacctgaaagctatcagtaaatttaaggacctcacgcctccgcgcttcagcgatgtggtcagtcggcaggatgatgtcagcgaagaatggtcacaggttggcttttcatcaggtctcaccctgcaggtcttacgtacccgtgagtcgcccgatggctgcgagggcggtagttactactacctcgtggatatgcaggaaaaaaccgtccagccgctgatgaatgcgctttgtattgccgacaatatcaaactggaataccacgaggttacggacccgtataccaaagaaagatactttgagtacgcccatgacggcaaactgatgggtcgactgctgataccctcgaaccctgacaatcaggaataa

SEQ ID NO: 77769 - DNA, 237 bp, Citrobacter koseri
atgcccgttattgccattatcgccattgttgtcatcgtcatcattctgaataaaaccggggtgtccgacagtctcgcggccctgacccttgccactgttgccgcactgctgacgggaggtggcgcagccggtgctgccagtgtcgcgctgacaccgttcgtcggcgtgccggtgggtattttcgtcggcatttatgtatttaccaaagtggtacgtctgatttcagggaaaaaataa

SEQ ID NO: 77770 - DNA, 702 bp, Citrobacter koseri
atgacacaggcagaacgccgccatgaccggctggctgtcagactgtcactgataatcagccgtctggtggcgggggaaacgctgagtgtgcgtaagctggccgctgagtttggtgtgtcggtgcgcacgctgcggcgtgattttcgtgagcggctgatgtatctggacctggagtatcagtccggatattgccgcttacgcacagcgggcagtgagacgcagatggtgcccgacgtgcttatctttgcccatcgcagcgggatggccggtctttttcctggctttgaccgccgcctggtgaacgcactgctgatgtgcgatgagtctccctgcgttatagcacccgccagtcctgttccttcgccaacaggcgcattgtctttctggcgactaattcaggccattaccgggcgcaggcgggtaacgctgattgccgaggagcagcgctgtgagcggctggctccctgtcggttactcatccaccagcaggcctggtatctggtggcagagcacgacggacatatcgccgtattctccttggatgaaatccatctggttcagcccctgcaggagactttccggcgtaacgacagtctgtgtcgtcttgttgaagacccgggctttattcagtccttaccccattttcgctttatccagcagtcactgcttacgtttgttccggccgacagctcaccagaatag

SEQ ID NO: 77771 - DNA, 822 bp, Citrobacter koseri
atgacccgtctggcttcgcgctttagcgccgcaaatcttatccgtcgtgaccgtccgttaacccgtgaggagctgtttcgcgtggtgcccagcgtattcagcgaggacaaacacgagtcccgtagtgaacgctacacatacatacccaccatctccctgctcgacagcctgcagcgggaaggcttccagccgttctttgcctgtcaaacccgtgtgcgtgacccggcgcgtcgtgagcacacaaagcacatgttgcgtctgcgccgggagggacagatcaccggtaaacaggtcccggaaatcattctgcttaactcccatgatggcaccagctcttaccagatgttgcctggcctgttcagggctgtgtgccaaaacggtcttgtctgcggtgagtcgtttggggaggtgcgggtgccgcacaagggggacgtggtaagtcaggtaatagaaggggcgtatgaggtactggggatttttgaccgggtggaggagaaacgggatgccatgcagtcgttgctgttgccatcaccggcgcagcaggcactggcaaaagctgcactcacgtaccggttcggtgaagaccaccagccggtgactgaatcgcagatactgtccccacgtcgctggcaggatgagagcaatgacctgtggaccacctaccagcgtattcaggagaacctgattaagggcggtctcagtgggcgtaacgccaaaggaggacggtcacatacccgtgccgttcgtggtattgacggggacgtgaaacttaaccgggcactatgggtgatggcggaagcgatgctcacgcagctgcaataa

SEQ ID NO: 77772 - DNA, 864 bp, Citrobacter koseri
atgaataacccacgaggtttaaagtcactaaaccatactctttccggcctaccgcaatgggtgtctgagcgtatattgcagcagataaatcagttaacccgctacgagccagtgatcggcattatgggtaaaaccggggtggggaagagtagtctgtgcaatgccctgtttgctggagatatatcaccggtcagcgatgtggctgcctgcacccgtgaacctttgcgatttcgcctgcaggttggcgagcgctatatgaccgtcgtggatttacccggtgtgggcgaaagtggcgttcgcgataccgagtatgctgcgctgtaccgagaacagctttctcgcctcgacctggtgctgtggctgattaaggccgatgaccgggcgctggcagtggatgaacacttttatcatcaggtgattggtgaggtataccggcataaagtgctgtttgttatcagccagtcggacaaggccgaacccaccagcggtgggggaccattgtctacggcgcagaagcagaatatcagccgcaaaatctttctgctgcatgagctgttccagcctgtgcatccagtatgtgcggtgtctgtccgactgcagtggggactgcgggtgatggccgagcggatgattaagtgtctgccacgcgaagctaccagcccggtggtgtcgcaactacagtcttcctttcgcacgacggtagtccgggagcaggctcgtagcgattttggtgaaaccgtcggtgctgtactcgatagcatcagtgcctttcccctgatacccgccccagtgcgggccgtcattcaggccatgcgcaccactgtggtgtcagtggcccgcgccgtctgggatttcttcttctga

SEQ ID NO: 77773 - DNA, 573 bp, Citrobacter koseri
atgttttatcatgaggttcgtcacttcgaaacgcagcagcataaagatgattccacgctgaagtatcttcatctgctgtctgagaaacttgtttttcgtattcgatctgaaccaataatgtccttttctcttccaatgtttgatgaatgggattcttacaaaaaagaatttaaggcaaagatagaagaaaatattgaagttcatatgccagaagatgatggtatatctaaatatgtttacttatgtataaaaaagcatcctgttgaaaagttcgagttcgatttaatccagataacaattccattcttcattgttgacaagtatttgtttgatattcaatcaatctgctacgttcgcgctattgatttttgcaatattggaattaatgaatacatgcagagaaataagaagtatctgcatacagcgtatctttcatgggttcctgttgcggcctttcgggatggggttgtttttgttgcagctttgcacatcgataaagcgttgcctaatcaactatatcctcctaaaaccaccattaaccttccttacgagtactggaagtatttaggatga

SEQ ID NO: 77774 - DNA, 324 bp, Citrobacter koseri
atggagctttcgaaagcagcagaaaccctgaaagagctcggtcatcctacgcgcctgagcttgtatagagagctggttaaagccgggcatgaaggtctaccggttggcgagctgcagaagcggctcgaaatcccagcgtctacgctgagccatcatctttcctcgttgatatcagtttctctgataaggcaggaacgtcagggtagaacgctcttttgccatgctcgatatgaaaaccttgaggctctgattgccttcctgacagaagaatgctgctcagggactgacgactgcctcaccatgtcccagaagacggagaagtaa

SEQ ID NO: 77775 - DNA, 714 bp, Citrobacter koseri
atgacaggtgatcttaagaatgttggttcggatttgttcgacacttcaatcacagaggcaagattaggtgtccctgccgttcctcatcctccgcgaatcctcatgctatacggctctgtacgtgaacgctcttacagccgactggcaacggaagaagcggcaaggttactgaccgccatgggcgcagaagtgcggatcttcaatccttctggcttgcctcttcctgatgatgcgcctgactcgcatcctaaagtcatggaactgcgcgagctggttcgttggtccgaagggatggtgtggtgttcccctgaacgccatggtgcgatgaccggcatcatgaaagcccagattgactggataccactttcggaaggcgctgttcgcccttctcagggaaaaacgctggccgtaatgcaggtctgcggtggctctcagtctttcaatgccgtaaaccagatgcgcattcttggccgctggatgcggatgatcaccatcccgaatcagtcctctgtggcaaaagcctggcaggagtttgatgaaggtggacgaatgaaaccgtcgtcttattacgaccgcatcgtggatgtaatggaagaactggtgaaatttactctgctaacccgaggtaactcagcctatctcgttgatcgctacagcgaacgaaaagagtcggcagaagagctttcccggcgggttaatcagagcaaaatttga

SEQ ID NO: 77776 - DNA, 546 bp, Citrobacter koseri
atgagtgatgtaacggcattcaacaactgcatgagcgtgttctggcggcaacatgaagccgaactctctcgctttctgacatcgaagacaggtaatagcgaaaaagcagcagaccttctgcaagagctattcctgcgtgcccgcgctcattcagacagtttctgcgagatggagaatccgcgagcctggctatatcgggcggcgaggaatctgctgattgatgagtaccgcaccaccagggagtttgttgagctggaagaagatgccccattaacagacgcatcccctgatgcaatctcaacgctggatatttgcctgcctgaaacattacaggctttacccgaagatgagcgatggttgattgaagagtccgaccttaaccggcgtccccagcagtctctggccgatgaactgggaattacgcttacggcgtttaaatcccgtttgcttcgggccagaaagcacctgaaagaaacgatgacagaactttgtcagattgaggcggatgacacgtctcccgtctgctgccacaaaaaaatgaattaa

SEQ ID NO: 77777 - DNA, 363 bp, Citrobacter koseri
atgtcaaaaattgagatctttgaatctgcaggctgctgcgcaaccagtagcgttgtggtcagtgacgaagccgtcaaatggaacgccagcgccgaatgggcgaagaaaaatggcgttgatattcagcgatatagcctcgcgaagaacccgcagcagttcctgaatacgcctgttatcaaagagtttctgaatacatcagggatggagtccctccctgtcaccttactcgacggcaagcaggtgatggctggcaaactcccgactcgtgaagatatcgcccgctgggcaggtattccgcttactcaggactggagtgaggacagcacgcaaccacgctgctgcagcattccacgtatgccttaa

SEQ ID NO: 77778 - DNA, 537 bp, Citrobacter koseri
atgcacattattaatgctgaagaacagcatattaccgcgatacgcaatatctatgctcaccatgttctgcatggtacaggtagcttcgaaaccgaacctccggatacgcaggaaatgcttaaccgactgaggagcattcagtctcgaggattcccatggtatgtcgctctgcatggcgatacggtcatcggctactgttatatttcccgttaccgcgaacgccatgcctatcggtatacggtcgaaaattcgatatatattgattcggcttatcagcgacagggcgtcggaaaaacactgctcgatcatgcattaaaatgggccgagtccgaaggctatcgccagatgattgctgttgtgggtgacagcgctaacgtcgcttctgtagcgcttcatatccgcgcaggatttactgaaataggtacattgaaggacattggtttcaagcatggccgctggcttgacacggttttgctgcaaatgaaacttggtgaagggaatagtactctgccagaagattcagatcttatgctctga

SEQ ID NO: 77779 - DNA, 663 bp, Citrobacter koseri
atgaaaaggttttattcgcagaagatagatagtacactatgtgtactacatactgaaaagtacctaatcatgaaagacaaaaaatttaaattcattgttttttttctgacattctttattttttcttgtgtaaataatgtagcatttgcttcaaataaaacaataagcgcacaaccaacagaaaaaaaacttatcgatgataagcaaaatattccacctgagaatatcaagccttatcttgaatcaaaagaaataattgaactaacgtctttaattaactctcagaaaaatgaaattgaagtaatgaggaataaaataaattcattagagaatagtagtggaatgaattttgccgtatggaccggtattttattagcctcagtggcagtaatactgacagtacttggtattgcaatggctgtgttttcatttttcggatataagaaaataatggatagtgttaaagaggttgcgacgaccatatctactacagaggcagctattgtttcagaacgactcgcacctacagtaacagaagatgtgttattaaaacttatagaaggtagaagtttcgataaaataatttacgaagctgtacaaaaagtaacgtatcgagggattagattttcatcagaggacatgctggaggaggaaccaagatga

SEQ ID NO: 77780 - DNA, 501 bp, Citrobacter koseri
atgattatgactaactctaacgaatggttttctctttcagatgagcaagtatccttaattaaaaaaatgcaggaagagtttccaattcctgtaggtgcaatagctaaggaattaggggtaaccgttatgaaagcaactttacccgcaggaatctcaggtgaaattaaggaagacaacggccgttttgttataagagttaatcgtcatgatgtaaaagaaagacagcgtttcaccattgctcacgaaatagcccacttcctgttacatagagatcgtattggagatggtataacggatgatattctttatcgttccaagctttcagactatatggaggttcaagctaatagacttgcagcagatatattaatgccttggcatttaattcaactaaaactatccgaatataaggagttccgggaagaagagaaatatgaaaaaatagctgacgaggcagaggtatcgactacagctattaaaattcgactcggaaaattataa

SEQ ID NO: 77781 - DNA, 537 bp, Citrobacter koseri
atgaaacaacatgctgggggattggtgggaaacaagctagtttttgtgatcgtattcttaaccatcactataaccggcatggtgactttttggctgggtgcgtccagccgggtagataatgacaaaagagcattaatccagcgcgtagattcgctgctgtttgaagcaaaacagatatcagattcgttgaccgcgcatttaacagaacgctgctcagatgaaacggtgcgtatgctgacgaaacagatacaccgttatccgcatattgggggcattttcctgttgcaggattcgcgggtatattgctcatccgggatggcgaaacctgaactcagcaatttaaccgcaggggagaacggtaatcggctatttttagttgatgaaacgccggcatttcgcggggagcctgtattagcctacgttactgtgagaggaaataacgcaatagtggtgacgatcagcacctactggtttaagtcgctgcttgcagacagtcgtttacttgttaacgtgaatggaaatattcatctccgatga

SEQ ID NO: 77782 - DNA, 459 bp, Citrobacter koseri
gtgacgattgtcggcatcgcgtttagccaaaactacagcgtggaacgtgatgtccgcatgaaagcgggcgacagcgtcagcatccacgactatcaattcaccttccgtgaagtgaaggagattaccggcccgaactatcgcggcggggtggcgattatcggcgtgacgcgggaaggtaaagcagaagcgacgctgcatgcggaaaaacgtttttataacagcaccagctcaatgatgacggaagcggcgatcgatggcgggatcacccgcgatctgtatgccgctctcggcgaagagctggacaatggcgcatgggcggtgcgcctgtattacaaaccgtttatccgctggatctgggcgggagggctgttgatggcgcttggcgggttgttctgcctgtttgatccgcgctatcgccagcgttcatgcccgcaaaaaaccgcgccggaggctgtatga

SEQ ID NO: 77783 - DNA, 1359 bp, Citrobacter koseri
atggcacacacatctatcaatcacaccatcatccgtaacgggatctactacgtcagctttcgcctatccggtagtaaatatttccgtcgttctttagagacggatagctacagccatgcgcaactcctgatgtcatttgcttctccagccattccattagtcaaacgtggaaccgtccacccggatcagtttggtcaacgtctttcagatttcagtaaccacttaaagcaacagaatgaaaactgggtagcccagcaatttcttaatggcgacttacgcaaacctcagttgatacctgtacaggaataccgggaggtggttcaccgtgtacctgtggtaataccgcaagaaccagttgaacaaaaggaagttctaacgctggctggcgcgtggaatatgtacaaaagggagaaagctcaaaactggacaaaggcaatctcacaggccaatgaacggtttatggaagtgctgttgattgtcctcggtacaacaaccgatgtcacgacgatcaccaaacaggacattaagcaggtgatggaagttgttgaaaacctgcctaagcgtgttgtgcagccttatcggtcgatgactgttcagcaactgatcgagtgtgatgatgtcccgcctgaagatttggttggcgctgagtctatccacaagcatttgaagatttacaaatcgctcttcaaaaccttcctgactgataataaagatattctggagaagtctccgacagatggagtagtcgccgcaccgtcaaaagcgagatttggcgcatacagtgcggcagaaatgagaaagtttgtggggtgggcgctcaagcagcccgacggctggcagaagtggatcaccttgttgttggcatacaccggagccagaagaggtgagattgctaaactggagaaatcacagatcaagtatgacgaggacagtcagcggcactatctcctgatagcagaaggagggcaggggaaaactgagaatgcaacgcgacaagttgcgatccaccccaaactgatcgagtggggtttcctcgattttgttaatcggcagtggaaagagaaaatcttctcgccagtgtcgggcaagaacatgccgaagatcggcaaagtgttagctgacgttcgcgatcagcttggtattccgtaccttgatgattacggacagcgccgcttggtgcatagtttcaggcacacaatgatctctacctgtttggcgggttgggttggcaacttagcgcacctgcaacaagtggttggacatgagaaaagcggatcggggattactaggcgttatcttcacacgttccctttatcaactatctgctatgtgattgatgggttgagctggacaagctga

SEQ ID NO: 77784 - DNA, 1572 bp, Citrobacter koseri
atggttgctcgctccaatcttgtgaatttagatgcgctgattaagcgtgctgatttggctttaaagatccaagatcattcatcatacgaaacgctgaacagcattcctgcaagagaattgaaatcgggaagcggaatcgctgccttacttcgaaaacctgatttccaacgagaaaccaatcattggggaccagaacaagttgtatcgctactcgaatgttatatcaacggtgatttaataccctctgtcattttgtggcgatcttctaccaatctcttcgtgattgatgggggacatcggctgagtgctttacgtgcatgggtcgaagatgattatggggatggccatgtatcccaccagctgtttgggcacgatattcctcgtgaacagcgccgcgcagcagacagaaccagaaaacttgtaaaggatcgggtcggtagctgggaatattatcagaaactacttgcagacgatgcttctttgactgaagagcagcagagaagaattagtgtattaacttctcgtggaatctctgttcagtgggttgtaggtgatgttgataaagcggaaacatcattctttaatatcaacatgaaggggacaccactagatgctattgaggaaatgctcctaaaaaatcgtaaaaagagcataccaatagcaacacgtgcgattatccgtgcgggcagaggccatcggtattggtcagaatttgatcaaagcattgcgcaacaacttgaagaaaaatctgcaaagttgcatcgaatgctttttgaacctgaagtagatcgcccgattaaaacacttgatcttccgttgggaggatcaagaggtgttaggactgcgatccaagtattaaaagatttcttactgattactgattgtagtcagaatggggtgttgaagaagattgaggattatcccgatgatgtatcaggcgcagatacattaagaattctttccaaagctacaacactgagcaacagaatcactggtaacggtgatggtagtttggggcttcatcctgcgatctatttttatggaccaacaggaatacattccacaccgatgtttttgggtacagtattactagttgcaaaacaactttctaataataataaccaattcttcagagactttatatcaatcaggtccaagcttgaaaaaataatgattgaattcaaagatttgatagcaatgattgtgcaaaagcctggaagtaatgttcgagtgactcgttactctgattttttgaactcagtaattaaatcgctgaagcttggggatagcattgatgagagtaagctcattgaactagctgaattggagggcaggatcatctctggcgattttaagagaacgtctgcgaaaataagtgatgaacaaaaaagtaaggtttttatagaggttgcactccgtaatgccctgaaatgccctatttgtcagggatatctcgatacagagaaatcagtttcatatgatcatatagtgcgtgtacgtgaaggtggggatggaagttctgacaacgtacagctaactcatccttactgtaaccagtcggtgaagtgctaa

SEQ ID NO: 77785 - DNA, 210 bp, Citrobacter koseri
atgagaggtattctgttgatttgcggtatgttgctggcttttaatactgcggcaagcaaaatcaccatgagcaaccccgacgagcaggagttgcagggcgggaaacggtcgtgtacttacgaaaacagtatttacctgtttacgtttgtgactcgctcgcagacctgcccatactcaaaaaccttcaacaccgaggactctgaaaaatga

SEQ ID NO: 77786 - DNA, 789 bp, Citrobacter koseri
atggtgtacttaatctattcagctatggaggctgttttgaaaaagattcttgcattacctcttatgttcttttccttctcgtccttctctgaaggcgttccgtctacagatgtacaaccataccctgagtacctggcggcctatgtaaaaacgttgattgctgctggatgtgaacaaacattgaaaggcggttctgaggacgtattgatcaaacgggcaacggagggtatgaagaagggcacgacgagttacgataatgtacacaatgctatcgtgttgggggctggtttcggtaatggactgaaggaaaaaggaaaacttatcacaaaagaaaaaatcgcgattgatagttgtggtggcgcagcggcctataccatgatgcaaaaagagtttataaaaacggtcgttgctagtatgactaatccggaacaatcgcaggttgccgatagtaaacccaaagtgccagcttctgatgatggaatttaccgtacaacagcaaaagctctggcagaactgtacagcgctaatgaagttgcagctgatgacaaaattggggggcgtaacgtcgaaatcacaggaattgttcaggatataactaaaaatttcacggatgatgtagttcttaaacttgaaagtggtaatcgatttatgcctgtgagtttaagcatggaaggatcagaaaagccgcaggcatcgaaacttaggaagggacagaagatcgttgtaacgtgcggcaagatgcaactgttcatcggtgcgccatcgggtagcaactgtaaatttaactga

SEQ ID NO: 77787 - DNA, 177 bp, Citrobacter koseri
atgaatatttcattcccggatgacacctaccgcacattgctgaaagaggcgaaccaccgcgatatgccaatggcaaaattatgtagtgaactgctgcaaacagcggcaaaaatcattgaaaagaataaaacagataaccagcgaggatattatgacgaccgagaaagcagaaagtaa

SEQ ID NO: 77788 - DNA, 795 bp, Citrobacter koseri
atgacgaccgagaaagcagaaagtaaactttacgaatccctaccgcagccgaacgaagacaaaccgatcacggttgatactttttccccttgggtgattccggttgctcgcatcaagcgcttcaacggagtgaaaaacagcccagaaattatggctgtctacagtcacctacttggttggaagaaaacgacaggagagatccgtccttctcaacaatacattgctgattgctgttgtatgggcctctcaactgttcagaaaaaagtgaaggtgctcgtaaaaatgggatggattacagcaacgccagcccgtaagccaggtagtaaagagatctcccatactgactacacagttaaagatcctgaggaaattttagcagaacaaaacgctgggttgtcacagcaaggcgacgcagtagtaaccatcgcaaaaaatcagaaagttaaagccgaggagagcggcaaagatgagcagaaacaacagcaaaaatacgaacaaccaactactgtggcttctgagactgccgcgcctgttgctggaaaaccagacggcgtacctcatgtggatgctcctatcgatgctgatctatccggtggtggtgatgcggtgactgtgggaaatgttgttgagttttcccgtggtggtaggcccagaggtagttttaagccttcatatccggagcatgatcaggaggaaacttatcaaggatattcggaatacatagaaccagacccttactacgaaccaacccaggcagattttgaggacgcagaggcattaatttacggaggataa

SEQ ID NO: 77789 - DNA, 525 bp, Citrobacter koseri
ttgtgtgaaaacgcgagcggcgaactgaccgcagatgataaaaccaaacgtctgattgaatacgttcaggcactttcccagaaacaatccccaaaactctcgaaacggctaaaatccggtctggtcaaacgtgaccctatcgtacaattacgctacgcaaaataccttttggtgattggcctgggtgttaacgaggttgcgctcagaaccagattgcctctgaaagcggtgcaggagttggctgtctcgtacaatccccgatttcggaaaatcagcaatcgccgccagtgcgatatggaaaatattgctgtcgatatgctacgtcgtggagacagtctggcaaaaatctgccgattcctagacctaccgctttataccgtagtccaatacctgcggaaatctggtgtgaaggaggaggaaataaactcccggattccgccagcagataacccgctatttatcgagtaccagaagactgctcagcgcaaggcgaaggccaaatataaaccgctgtcgctgcactaa

SEQ ID NO: 77790 - DNA, 378 bp, Citrobacter koseri
atgaccacaataaaagaccggattttcgccgctatgcatggcatgtcagcagaacagtatgcattggaaaaggcgcgggataatctaaagagcgtcaccgataactttctggggaaacatcccgaatatctccgagggagatttgccgaaggcaaacccgccaacgggttagaactactgaaatcagcctcggctgatacacccaccaaaaccaagcggattacaaaatcgttgggtgctgatagccgtccggttgtctcacataccaccgatcacatcgatcctgaaatgctggcgaaagctaaagcagcggctgctgctctcgcaaaatccgatcctgatcgttacggcaatatcatcaagcagcagggggtgtga

SEQ ID NO: 77791 - DNA, 2130 bp, Citrobacter koseri
atggcgaatggcaatatcatagcgactaaaaccgtaaacgaggtcacatggagcgtagacagaacaagctacggtcgcgccctgaaagctgttaaatccatcaaggctgctcacgaaaagccatctaaagcgctggagaaggcccagaagcgtactgctcagagtgaaggcaaatcagcactagccgcagcgaaagcccagacggcaaggcttcgacaggctgaacaactgtcaaaacagcaacagaaacaagctcagatacaagccaaaatggcgcgggatgcagtcacccacgccaataaaatgacctcattacaggctcgccagctatcccaacaggaacaagcagcacttcagaatgctcgtttagccgtggtatctgcaaaagtgagagcagcaagccagcatagggccatgacctataaccccaacatgcctggagttcactccgatccatctctggtggtacgtcaaaatgcagcgatgcagcgcggtcatggtgctgtagcatcagacattgcagccacaaaaagagctatggccctggaggagaagcgccagcgtgagaaagaagccagcttgaaacgtcaaagcgccgcttacgatacactccgcagggcaagcttgacgatcagtcatatcgaaggtgcatctctggctgacaagatgaaagcggtgcaggccattaaggaagccaccaagggctacgaacagcaacgttattcaatttcagaaatgagacacgaactagctaaggccaccctcgaaaccagacgacaggcacgtattaaccgccagatgattaaggatcgagctaaagcagagcgagcagggcgcattaatgttcaacgtctgagccgtgaacgtagcgagcgtggttatggtggccttgccgctgctggggttattggtggcgctgcattgatcggcagtatggggatctctaaagctggggcagtgttgcaaagtagccttgagcgtaaccaacagatgaaatcccttcaatctcaaggagtatcccgccttgaatatgaggcggtgcgggatgttgtcgccaacaaaaccggctttaaaatctcgcctgataagatgctggatttacaggccgattatcgggacaaagtgggccagttgacggctaacggagtctggaagaccgacaagagcggaaaggcaacgctatcaggtggtggggaattgggtgacctcatcaacgccattgcaggcaaatccaatgcagccacggcaaagcgcgttgttaaagaactcgataaactcgacttcaacaccttcctagtttacctgaaacaattgcaaaaaacgttcaggtttaccgataaagaaatggctgcattcggcgagagtatcaacgatgctagcaaaatactccctgcatttgctgatggtggtgacgctgttcagaaacgcatggatgacctcgcccgtaatggttacgctctgagcgaagcacaacaggcaaacctcgataaactctcagcgctgaacactgaatacagcagagtgcagaccagcttgtctgatcatttctccgcctcgttcgttgctggccttggtgagtacggtcagagcaccgataatctgagtaaggggatggctggcctgatcccgattaccaatgagttgggtaaatcctttggcgaaatgtcagcggcagtgctgaaaattacatcctggttcggttctattaatcctgagaataagcatgaacagctatcggagaacgggctttactataaggattcaatggtgggccgtgtctggcagtcgttcctgaatggtgttgagagcattacccgcgctagtacaatcccaggggtgcaggggatgccgtcagagtcttccggatttggtgcagcatggaacaactcggcgttagcgctgaatgtaccaggcctgaacactcagcaatcaccaacattcacggtcccaggattggatgggatgaacccacgacagccgatcccggtcagcgttaccgggcaggctgagattaaactctcaccgcttgatgttaacgttaatgatggtgcgattaacggtctgattgatacaaagctgagggattatgagcaggcacagaacaacatgatccttggcattgctcaataa

SEQ ID NO: 77792 - DNA, 342 bp, Citrobacter koseri
atgaaaatgggaacaactgaacgttcttacaatgacgcgatcgtgtatgccgctgatccgaactttgaccgaaagaccattactgtcgatctggctgttgatgtccagccgggtagctgcattaccagcgccggggctgcatatgtctctggtgatgattgtcttctggttctgagcaatcaccgggcgggagatgatgcatatgtcatcgttgccgaccgtgggatctacatcaaacaagacaccatcattgccgtgatgggcgcgaccgctggcgcgaatgcagttgcagcactgaccaaaacgggcgcaatccgtaccagcgcaccggacgcagaataa

SEQ ID NO: 77793 - DNA, 1035 bp, Citrobacter koseri
atgggactatcaaccaatttcagctttgctgaccacaccaacacgtttgtaaacctgccagcacaaaatacgctgctgaccacgcttaatattttcagcgaccgccagatttctacaagtccgaaagtgagccttgatgtgattgacgaaatcgctcagaaagtggcaagttcggttaaccgttacggttctgagtggtcagctattcctaagcgcagcgccagcaaccacctgatcgaagcgcctttatacgcaacgcaagatcgaatcactgccgccgatgtccagccttatcgcaaaccaggaagtgatctccaagctacgatcatggatgcggtcacggcttcagctttggcgatgcatgataaatacatgcgtaccaaagagaagattttcgctgatgcacttttccgtaatacagtggacgccccatacacacagcagccgatcatttcctgggaagatgaattcggataccagcaggcaactggaacgattaaaaccaacgttagctctggtgatccactccgtagcctcgatgacgctgtgaccgctgctaaagtgcgtatgggtggtcttgctggtcagcttgacggctttgttctcttcgctggtagcaacgtctatcgcggcattaagtatcacccagacgtgcgccagaacgtgcaattcgggattcttgatcgtgatgtactgtttaacaaagaggttctcccggcgttcagcactttcctgatcgataacgttcgaattgtggaagtgacggaccaaaatctttatggaattggtccggatcaatccttccttgttccacgtttcagtaaacctctatcgtctaacatcgctctgcctttcggttacgtagctactgcaaccagtcgcgatctggaactggcattcgctgatccggtcgatttccgtatctggtctctacaggacaagtttaagaacgtggagattttctccgaaagctcaatcctgcctgtagtgtaccgtcccgatatggtcactctgttgtcgaacgacgcagcgtaa

SEQ ID NO: 77794 - DNA, 204 bp, Citrobacter koseri
atgaaaattcaattccaaacgaacaacggcttcccgttgctcactgttgcagacgagcgagttttagattttctgaacgttagcgccgtgtgtcggttcctgaaggttccgcgatcctcgttcatgatggacgttgagcaaaacgggcttgagaaggcaatcagcgaagcgctgttgaagttgagaaagaagaaagcaatctga

SEQ ID NO: 77795 - DNA, 231 bp, Citrobacter koseri
atgagcggtaaagactacaacgtgtatcaaggtgccgatggtgtttggcgtggcaagcgtcaagatgcaactcgcgctagtgtcacaggaactacacagaaagaagtgtttgaacaagtaagagaatttgctaaaaaaagcggggctgaggtgtctattcacagggctgataataatcagatccgtgaaaagaacagctacggcaatgacccgaaaaaaactaaaggctga

SEQ ID NO: 77796 - DNA, 393 bp, Citrobacter koseri
gtgagcaaagaagatgacatcaggctggatcagaaagtccgggccgcatggatgtactacattgcgggtttaaatcaaagtgagatagccagccagcttgggacgtcaagaccggtggtacaacgccttatcgctgcggcgaaagaggaaggcattgtttcgattggtctgcaccatcccgtcgcgaactgcctcgattacgcgcagcttttgcaggaaaagtatcagttaattaactgcaatattgttcccgcctacagcagcgaaagcaccctcgacagcgtaacctttggctgttatcaactgatggcccgctacttacagggcgacaaaccgacggtagtcggcattggttccgggttgacgctgaaaaaaaaccatcaaacgtattga

SEQ ID NO: 77797 - DNA, 2529 bp, Citrobacter koseri
atgatcgagagcaatgttatagataaaaaattattgacaaaaaaaagaagcgttaaagatttagcggattatatcaaaattagatctggagcatcccccaattactctctttttcttggtgctggtgcatctgttacatcgggaattcgaacaggttatgaattagtccaagagtggagagaggagatttatactagattttcgcaacaaccttattcaaaccacagtaaagctaaagaatggttagcagaacagcatcctgactggtacgatcaaaataacgagtactcatctctttttgagaaaaaatttgacttaccatctcaacgcagacgatttgttgaactccaagttgacaaaaaactaccttcaattggttatgcctatctcgttgaattatttgaatcaaaattctttgatactgtattcactacgaattttgatgatttgattaatgaggccttttatcaattctcatcagatagaccacttttatgtgctcatgattcatccataaaaggtgtatccgttacatcatcccgccccaaaataataaaacttcatggtgattatttattcgatagcattaaaagttctctgaaagaaactgagtcactggaaaacaacacaagagaaaaattaatagaattcactaaagaatatggattgatatttgtagggtatgcgggtaatgataattctataatggatacattaaaatatttactaaagcaggaggattacttaagaaacggaatatactggtgcagaagaccgggagatcaaataactccagagttattcaaactactcaatcatgacaaagtttactgggtagaaatagatggttttgatgagttcatggcagaactagtccacgaacttggtggagagctttctcttggtggaaatcaaaaatccacaaaaagagagagaatgataaataatttcataaaagacgaatatagccttgaaaaaaacacttttattaaaaatgatttaaccaaattaaaaaaacacacactcacacgtgacatttcatcattaataaatgaactttcacaaagcgattccgacgaacaaaaaatacctgaggaagacttcaaaaatctcctatttattgataataacgacaatattaaatcaaaatacctccggcgtctcatagagattaaagaagatcaaaaagacaccaagtcagctctggaatatagtgacaaactaatcgaacttgacgaattcaacattagttatgttttatccagaactaatatattcatagacatcaaagacaaattaattcatttaaaaggattgcttgaaaaattcagatatagcataagccttagaaatcatctctgccggattgctctaacatatttggaaaataatgatgagaaattaataacattcaaagaaatacacaaattaatagaggaaagtctcttccaaaataatagccttgacaataacgcctggaagctaaaatacgatacaatcgtatccgaacatcagtccaatcatgataaaaaggaatgtaatgaaaatattatagagttacttgacaggatcaaatcaattaaccaaagtcatgacacatacttaaatatatattctgatttctcttgttcctcacacactaaaaaagatattgtagcatgcatagatacattgtccaatgtatataaaacatcttccaaaaataagaaaaggaatatattaaaatacttaacaaagctatatctatccttattcgaaactgaatatgataatgatacgccagaagcaatgagacaatttatagaggaatatcaagaggatgatgacatttccaaaatagctccattcattatattcaaagcaagatatgaaattggttgcaacaaggacagtaatgctgctatagcacttgcgaaagaggcaatggatagcccttggaaaaacaatcatattgaaagcatcactaacattttattaatcgatagtgacaacatcccattggtagaggagtttattgaaaatttaccaagggatacttccgatgttcttatattaaaaataaaatctgatatatcgatactaaaaggcgattataaaacatcgattcaattacttgaagaagcctataaagaaggctgggattttagcgattatacattaggaagggcctatactaatctattagcgaaaaattatcacgacacaattagaattgttgatgaaagtctcaccaaaattaaaaattttagagagaaagatgtattaatagttaatagagaaatcgccaagaaaaaaatagggcaagaagtaattaaacatgaggttcgttcaataatagctcatcacaaatctaaaggagatgttgctatgtgtgcatttttccttttagatgatcttaaaaatgcaaacaaactattgcaaaatttaatagagcaagacttcatgaattattacagattttcggcatggccagctttgcctgaaaatatactttcaccttatagcttaaaaataaataacgctgcttaa

SEQ ID NO: 77798 - DNA, 225 bp, Citrobacter koseri
atgaaaatccaataccaggactacggcgccgtggcgaatatcgtgatcaccagcaccgtgtttgagttccggaaacataaccgtgtagttgacgctgccctgctctgtacgccgggaatcgttgcaacccggagtggcgtgtttttcatgaaatcggttttgtccggtaaatcccgcgatatgttgcgggcctacaaaacaatccagcgggaggcgaaacgatga

SEQ ID NO: 77799 - DNA, 219 bp, Citrobacter koseri
atggcaaagaaacgcagtagcaagacccgtcaggggttgtgcggtttaacgctggcgcaggggcaccggctgacacgggatcctgctaatgaaaacgctcagtgtgagcagtttgtagagcggttcagcactggtgatggcaacgtgaaaatgccactgaatcgcagtatgcgccgttatgcgaaacacatcgggatcgaactgaaggaggctaaataa

SEQ ID NO: 77800 - DNA, 417 bp, Citrobacter koseri
atgatcgacaacagaaccgccagcgtgattgacctagcactacaaaaacacgacacgccagttggcccgctgttcgtggcagtacgccacggacgtattaagaaatgtttcagccgcgacacagcgatccgctatttagcgttcttcatgactacctgggctttcgaggcatctggcttccggtgccgccatcctgatgtaaaggtctgccatccggtacatggcgaagtatggcagcgtggcggcgttacgaaagagtaccactttgcccaccagcgctgtgagcgtcgactacgccgcattcttgcccgtaaacgcgaaatgcaaaagtggtgcgcgaagtgggacgcctttcatggtctcgttgtgaaagaacaggcggagctacaggcctgtaaaccggatggggtgcgctaa

SEQ ID NO: 77801 - DNA, 150 bp, Citrobacter koseri
atgcggatgacattatatacaaattatttcgccgtgagggggggggtatttgttcatgttgatacttttcgctcttttgaagatgccagtaaagaggcgcaggaaataattaagaactcagctaaattaagctggctggcaaacagctaa

SEQ ID NO: 77802 - DNA, 417 bp, Citrobacter koseri
atgacaacccagacttcgcgtgggatccgtaacaataaccccggaaatattcgctggggtgatgactggaaaggactggtcccgaaagatcaacgaactgacaaagcattttgccagttctcaaccccggaatatggcatccgggcaatgatcatcattctgcgtaattatcagcgtaaatatgggctgaacacagtagccggtattatcaagcgctgggcgccaccgaacgagaatgatacgcaggcatatataaacagcgtggcgcaggcaaccggcgtttctcctgatcagaaaattgataccagcgacagccgctttatgatgaaactgttgcaggccatcattaagcacgagaacggtagccagccttatagctttgatacatttgtacgagctgtcgaactggcgggttaa

SEQ ID NO: 77803 - DNA, 522 bp, Citrobacter koseri
atggatctcgcgctgatacgaaaatactggaagccactggcgataactctgctggtggcttttttgttatggcgagcatacagcgcggggttagattctgcggatgccaactggaaagggaagtggttacagcgcgatctggctgactctaccgctgcgttgcacagggatgtatccgaacgggcagaagaacagcgtcgccagcgcgccgtagatgaagaacgggaaagggcagatgaagaactggcaaaagtgcaggctgatgttgatgctgctaaccatgctcgtggcgggctgcaacagcagctcacgattctacaacggcaactcgccagaagtgaaaccggccgaatttccgcccttgcagcagcaggcgcggcaaaagccaaggtcgccagcctgctcgccgagctgcttggtgaagctgacgcaatggcgggagaattcgcaaaagaggctgatgagcgctatgtcgccggaaacacctgcgaacgaacctacgataaagtgacacaccgatag

SEQ ID NO: 77804 - DNA, 495 bp, Citrobacter koseri
atggctaacaccattctttaccggatgcctgcgggcattgccggggcgatttcacgcccgcaggatttaaccgtagaaccgcatattctcgatgcgactaaacccttcccggcgtatggcctgggcggaaagattgtcgggggtaagttcgttcctgttgaggcggctgatccggtcacggttctggcggggatttttgttcgcccttacccgactgcatcacagcccgataagattcgacaggtcggcactggttacaacttcgctggcgataaccttaaacgtggttatgtcacggttaacattggcggtgacgcttcagcggttgctctcaatgcgctggtctacatgcgcgtcgataatccaacggattccagccccctcggcgcattcctcgctgctgctgacggtgaaaacaccgtgcagatcactaatgcctatttcaatggtcccggcgatgccgacggaaacattgagctggcgtacaacatttaa

SEQ ID NO: 77805 - DNA, 189 bp, Citrobacter koseri
atgctcaacagcctgcctgacgggctgtcttatctccttgacccggtggatgccgggttaatcccgtacaacgcgctgaaggatggatctgtcgatctgtgcgatatcgcgctgatgaatgaccatctggccgtgaaggctgacaaccaacgccgtattgataaatggagagaggccaatgaacgctga

SEQ ID NO: 77806 - DNA, 561 bp, Citrobacter koseri
atgagcaatatggaaggaaagtctaaactcatcaaagatcaagaagatgagttgactgagagagcagagttattaatcaaacaccaaaaagaacaatatgaatcttcggtcgaaaggattcgtcgacttgaggataaagcattaaagacatttggttctcttagcattgtgattacggttgcacttcttgtggttagatattggtggaaagatatatttcccgagcactacactcctctgcatgctttttgttggttttttcttattgtgtttatttccacatgttttatttcatgggggttcgcttttagtgcaatgcaattacaggacttagagtgtccatcatcagatgcaacagaaatggaaagattttacatgggtaataaaatttataattctttgtcagcctatgcaaaagaatattctaggctgacaggtgtggtagataaaaaacatatagaaaaatcgaaaattattaatttttgtttcgaatctatgctctatagtgcttggtcgtttgtttttttcttaatccttgttgtgataattaaacttaattag

SEQ ID NO: 77807 - DNA, 186 bp, Citrobacter koseri
atggcagaaaatactaagggcagtgtaaaacaaatagtaaataatccaccaacaatagaagacaaaaagtctcatcaggtatatacaccttcagagccaattagatacgatagttctattcctgttcctgggagcaaggtagttacagaaagctaccagccaccagttagtaaaaaaggtaaatga

SEQ ID NO: 77808 - DNA, 570 bp, Citrobacter koseri
atgaccttcaaaatgagtaaagaagcgcagactattaaaatttacaatcttcgtgctgataccagcgaatttattgggggcggggatgcatacattcctgcacatacagggcttccggcctactgcactgatattgagcctccggaggctccagccggtcatgttgctgtttttgacgacaacgaacaaaaatgggatgtggtcgaagaccatcgcggcaaaacggtctatgacatccagactggacaggctatttctatcgaatcactgggatcattgcctgataacgtagtttcagttgcaccggatggctcatatgaaaaatgggatggcaaaaaatgggtaaaggatgaagaagcggaaaatgcagctaaaattcgcgaagctgaagctacaaaaaatagtctgatgcaaaccgcaaatgaaaaaataacgctgctccaggatgccgtggatctcgacatggcaacagatgaagaaaaggagttacttttaaaatggaagaaatatcgcgttctgttgagccgggttgacacttcgaaacctgagtggcctgaacaatcttcctga

SEQ ID NO: 77809 - DNA, 795 bp, Citrobacter koseri
ttgataccaaaaaagattcactatatttgggtaggtaataaacctaaaccccaatttgttttagagtgcatcgctacatggaaaaaattcctcccggattatgaaattatagaatggggcaatgaatgtctggactccattaaaaatacttatgcgattgaagcgtataaaaatgaaagatgggcttttgtgtccgactatataaggctatacgccttataccatcacggtggtatctatctggatacagatgtcgaggtaacaaaaggatttgataaccttctatcactcgatttttttagttgccatgaagtgtttaatggcaaaactctccctattacatcagcggtaatgggtgcttctaagggtaatggtattataaaagatttacttgatacatataaaaacaaaaaattcataattaaaaacacatttgacctaacaccaaatacactgctaatcactgagttccttgtcaaaaaatttaatatatcccaaccatttttatctgacaacacaattcacctaagagaaaatgaaataattttcccatcaaattatttttgcgagaggattgataataaaacaaattattccatacatcacttctccggctcctggttactatctcataccagaaaagataaattaaaaattttcaacagactgatcgttagtcgattaaagaaaaaatcagataaaggagaactccctattctatctaatgaaaaaccacttttttcagttaagctaacgaaaaaaatctcatatttactcttacttagaaccccatga

SEQ ID NO: 77810 - DNA, 819 bp, Citrobacter koseri
atgactaaacagattatgcatcccggccatgtcgctgaggtttgcagccaaatcaaaaaatcaaacaacagagatttcatctctgatggatttcgccaattgctaagccagctgccgatggggtttcatgatgtaaccgccacgactgtgtggcggtcgaggaaaaccgatgtggcccacccggaagggttcgatcatgttaccgatattatttatccacccgcgcagtacgccagaaccggaaggctaaatacggaggggatgtctattttatacacatctatcagcaatcatggatgcctggcagaaattggagcccagcggggggataaagttcatgtgtccgcattcaccctgaaaccagagcagagactgcattgcggctttttgggcgatattgttagggcacataaatggagtagcgaagattttccacaggtacaaaagatccttgagccgtatacggaagcgcaaaaaaccagtattttcatgatagacagtttccttgctgaaacacttgccgatagccgagcgaaggaaaaccactacctgcataccacaacacttgctgatgtcatccgcaatgggaaaaatgcgttggatgctatcgtttatcctggagtggagtcctccggcgccaagaactatgcaatccactgcgacgcgatgtttaaattcaatattgcagatatgtacctgctagagattatccaaaagtatccctacgggctgtatgaatggcggctacttaagcaattagaaagctatgatgatggccgaattatctggaaagagccatgctgtacgaatgtcgcatga

SEQ ID NO: 77811 - DNA, 351 bp, Citrobacter koseri
gtgattactgaacatgacgggaatgactggctttattgcctggttagggattgccgtcagccacactaccgttttcgacgtggatatgtacagcagggccataacgttgacatcctgccttatcgttcagcgtttttccctgcggggactatctttgccttcttactctacctggtagtaacaccaggccagaactatcaagcgtttttgcatgacaaaatcgactggtacggagtggcgtccacctatatcagtattccgatatttttggtgttatggacggactataagataaccactcgcagtcgatggataaggtatgacgagatgcgttttaataagcaggagtaa

SEQ ID NO: 77812 - DNA, 591 bp, Citrobacter koseri
atgattaccggtatcctgcgtggggcacctgacgccgggttgcataactggcaaacaggttcagggccatttgcaggcaatatcttcagtatgatcggcgtggcgatggttgttggtgtttctttccatgggactgaactgataggtattgccgcaggtgaggctcaagagccagagaaagccattccgcgcgccatgcgccaggttttctggcgaattttgctgttctacgtttttgcgattctggtgatcagcctgattgtgccttataccgatccgcacctgctgcaatccgatgtagataacgtcagcatgagtccgtttacactggtattccagaatgcagggttattatccgccgcggcgatcatgaatgcggttatcctcacctccgtggtctcagccggtaactctgggctatacgcttcaacccgcatgctctttaacctggcgcgtgaaggaaaggctcctgcattttttacccatctgacacgtaacggcgtgccgctgcttgctttgctggcaactgccatggtgtcggcactgtgttttttatcgtcgatgtttgataacgcatctgtctatatgtga

SEQ ID NO: 77813 - DNA, 492 bp, Citrobacter koseri
atgtctacccctgtattccgtcaggccactgccgccgatgtcgatcgttgctatgatattgaaatcacatcctacgaaggggatgaagccgcaacgcgcgagaaaattgccacccgtattaaccgctatccggaaggtttcctgtgtatggagctgaacggcgacgttattggtttcatcaatgcaggctgcgcatgggaagtcgtgatgtctgatgaagagtttaaagaactggttggacacgatccggatgcacccaatgccgtgattatgtctgtcgtggttcacccggattaccagggcaaaggatactcgtcgttgctgatgcgtgaattcgtagcgcatatgaaagcaatgaacaaaaaaaccattcacctgttgtgtaaagatcgccacgtcgatctgtatgcccattttggttaccagtatataaaaccgtcagaatcagaccacggtggaatggcctggcatgaaatgatgatgacactctga

SEQ ID NO: 77814 - DNA, 951 bp, Citrobacter koseri
atgatgtcgacgttgcgcaagaccgatctgaatttattgcttatcttcgattctctttatcggcatgggagcgtaacggaagcagctaacgaaatggcgctaagtccatcggcgctgagccatgcgctcaatcgtttacgtgcctcactggatgatcccttatttgtgcgcaccggcggacgcatggtgccaacgtcaaaagcagagagcattgccgccaacgtttccgccgctctgagcagtctctcgacttgcctgcatgagcctgaacactttgagccggaaaaaagccgggagacgtttacttttgccgccacggactacactgccgctgtgattctgcctggcctgatcgcgagagttaacagcctcgcgccgggcattaccattaagcttatctactcacgcgattttaacgccgatgaagatctgctttcgggtaaagtcgattttgcccttggttttgaagaagagcagaaaaacccccgacgaggtattgagtccattacctgctttactgatgattacgtggttgctgtacgacgtggtcatcctgaaattcatgattcccttacccatgagcgctatcttagcgccggacacgtggtagtacgcccatggctggaatcccgtggtgctatcgaccgttatctggaaagtcagcaggtacgccgccgaattgttgttgaattgccaagtctgatgattgccccgctcattgtttcaaatactgatctggtcatcacgcttcccaagcggggcatctcatctgtttttgatatgaaaaatcttgtggtgtttgctcctccattcccgacaccccagtatattctgaaggtttattacagcccacagctcagtaactcacctggacatttatggatgaaagagcaaattttgcaggtttgcgagccgcaaaacccgattacgtcaatgaatgcagccgattaa

SEQ ID NO: 77815 - DNA, 1182 bp, Citrobacter koseri
atgaaaaatatgaacagtcaccccctgaaattatcaacccgcttaacacaaatggggcggaatactcgcgagcagcacggttttgtgaacagcccggtgtatcgcggttcaaccgttgtatttgaaactgttgaagatctcgaaaacaatcgagcggcctttgcttacggtactctgggcacgccaactattaaaaatctggaagatgcatggacggagcttgcaggggctgctggcacagtgatgtcaccttctggactgggcgccgtggccctggcgctaatgacgacactcaaggcaggagatcatctcctgatgccggactccgtataccgcccaacgcgtaatttttgcgatctcacgctgcaaaaatttggcgtcacaaccacttattacaacccgatggtgggagaaggcatctgcgcactgatccgccctgaaaccagcacgctatttctggagtctcccggttcgcaaacctttgagattcaggacgtcccgctgcttacccgcattgcacgtagccggaatattaagactatcatcgataacacctgggcaacgccgctgttcttccaggcacatcaacacggctgcgatatctctgtggaagccgggaccaaataccttagtggacattctgacttgctgatggggatggtgagcgctaatgccgagacctggcctgcgctacgtgccacctatgacagtatggccatgttaccgggtgcagaagactgtttcctcgccttacgtggtttgagaacgttgcatattcgtctgaaagaagcggaagcacgggcactggcaattgctcactggcttgcagaacaacctgaagtcaaaacggtactccaccccgcaatgccggattgtcctgggcatgaaatatggaagcgagactttacgggatcgtcaggactgttctctgtggtgcttgatcccgtattcagcaaagaggcggtaacacgcatgctgaatgacatgcagctgttcggaatggggtattcctggggcggttttgaaagcctgattattcctttcgactgccgggaatatcgaactgcgacaacctggaacaagaagggagaaaccctccggctccagattggcctggaagatccggatgacctgatcatcgatctgcgtcaggggcttaatcggctgcattcattgacgtaa

SEQ ID NO: 77816 - DNA, 1272 bp, Citrobacter koseri
atggtaaacagtgaagatgcagtgattaaacatagaatcccattcaccacctacgatctcggatgggtaatattgtgcatcggcatggcgataggcgcaggtattatctacatgccgattcaggctggtgtaaagggaatatgggtatttgttgcctctatttcattaagctatccagcaatctactggcttcaggacttgtaccttaaaaccttaacccagaccccagcctgtgacagttatgcagaaattataacccagtatcttggtaaaaactggggaggattgttaggcgtcgcttactttttaatgttgctaatgggtattttgaattatgccatgagtctggtaaacgacagcgcagcgtatttgcatagctaccacattaccgacgattttttatccaaaacagcatggtatcccctgattttattaggtgtgatggtgttgattgctaaccagggtgaaagatggttgtttcgtatctccggaccgatgattttctttaaacttgccgtgattgtctttcttggcgcggtaatgaccccgtactggagtatcagcaatatctctgcttttcctcctgtcatgagctttctacgggatgttttgctaacgctgccatttacgttgttttcaattttgtttgttcagatcctcaacccaatgaacatcgcgtatcgcaaactggaggccgacccggtcatagcttcactacgagcgatccgtgctacgcgcattgcctacatcgtacttgtcgtcagcgtgctgttcttcgccttctcctttagtttctctattaccaaagaggaggcagcgtcagcccttgaacaaaatatctctgctctggcgctggcatcacaaatcatgccgggaaatttagtgagcatactttcggtaacactgaatatctttgcaatattaacggcattcttcagtatttatctggggttcaaagaagccattatgggactaacggttaatatgatatcccgcatctcaggcagcgaaaacattaaccgcaggttgctttcaatcattattgccgtagcgattgtcgtatttctctgggtttgggtcagttttgatttttcagtgatgctgctcatgcaaatttctggcccagtatttggactggtagcctgtttaataccattctatctggtgaaaagagtctcggcgctggacaacctgcgagccggtaaaaattattatgttgcattttatggcgttcttctttgcatctcgccctttttaaaatttgttgaataa

SEQ ID NO: 77817 - DNA, 600 bp, Citrobacter koseri
gtggcgtttggttgcacccacattccgcatatttcaaatgcctttcagcagttacaccctggtgtgtgcattaacgtcacgcttgacgaccgtctgattaatctggcgcgcgatgagtttgatatcgccttaaggatatcttcggaagcggcacaatatgaagacgatgatacgtgcctgatggatatcagctggttctactgtgcctctccggaatatctgaaatgtcatccgccgatttacacccccgctgatttacgttttcatcagtgtctggtctacccgcaaatgaccagcgagggacgatggacatttcaccacggagtcaagagtgaaacggtaaaagtaatgccctatttttcgtgtaattccagcctgctattactgcaaagagcattagcccatggtggggttgcctgtctgccggattatctggtgagccattatctggattccgggaagttaatacgtgtgttgccagctcacgatcctggcgtcacacatcgtttgcaggccattgtctcgccttcagtacaggaggacaaaactattattcatttcctggactttctgaagactgcattacgggaaaaaatgtga

SEQ ID NO: 77818 - DNA, 276 bp, Citrobacter koseri
atgaatacacccaaactttcaggctatctcaaccagtttcaggtgcttatcaaagtggcagaaacaggtaatcaatcaagggcagccagagaactgggattgaccccttcagctgtcagcaagagccttacccaacttgagggggttgttggcaatgcgctgatttctcgcgagtcgcgtccaattcagttaacggcaagcgggagacgaatacttcaggtggcacgacgggtgattgctgacattgaagggactggctgccagcgtagaaactga

SEQ ID NO: 77819 - DNA, 216 bp, Citrobacter koseri
atgcgtttgttaaatatctttgtctttttgtttactgcacttgtagtagtgaaaactattcacgataaccctccttttctctgctcgatatttttgtttcatctcctgagttcagcgttagtcatgggcgcgttttccttttgtttattttcgatactggaactggcgtcatggccattgcttaaatctatagactggaagctggaaaagagatga

SEQ ID NO: 77820 - DNA, 288 bp, Citrobacter koseri
atgttcaggataatccagcctaatacctggtacgccgatccccacggcgcgccctgcaaaatactccgagctacccacgaagtaatccactacatccgcaacggccgcacctgcatcgccagcattgggcgatttcagcatgaattcgagccgctgaccaaatcccaggccgagcggatcgccgaagaaatcgaaacagcagagcacatcgaaaaattaaggagcatgagacgtgatcggaatactcaagccggtaccggaatcgcaatggcctgtacgatgccatga

SEQ ID NO: 77821 - DNA, 369 bp, Citrobacter koseri
atggattacagcaagctaagcgattttgagattaacaaattggtcggcgatgtcattttcaaagggctctggtcatgcaggccgggaactgcgggaaataaaagtgactcatggttttacggtaacgcggatgcttcgctcaacccgctaacaccgcttcccgactactgcaacgatgcggctgccgcatggccgattatcgttgagagcagaataagcatcatcaaccttgaagtggatgaatggggcgcccgcggtgtagcagactgccgctctaagcgagccatacatcaaaactctttacgtgctgccatgatggtctacctccaaatgcaggagtcagccaatgttcaggataatccagcctaa

SEQ ID NO: 77822 - DNA, 222 bp, Citrobacter koseri
atgaccgctgaaatcatcgaccaagccaacgagcttacacagcagcgcatcgacatggctattgccgctcaccgcctcaaccgcaacgccgtatcagctgagcgttgtgaagaatgcgacgacccgattcccgagccgcggcgcgctgccgttcccggctgcaaaacgtgttccagctgccaggaagagatcgaactcaagaataagcagagggggatgtga

SEQ ID NO: 77823 - DNA, 255 bp, Citrobacter koseri
atgagcatggaaaaattcattaagccttttcctctgtcagatataaaaactccgcgaaatggcgctgaaatcttgctggacaactactggcttacgaaagatgggatgtactttaaatcaaagcgcggtggcactcaccagtgcaaccgagataagcgcgtagtcgatacagtttatgccgacctcctgtcatctggatatgaatgcacttacatccctatcgcatatatcaagagagattctcatgaccgctga

SEQ ID NO: 77824 - DNA, 612 bp, Citrobacter koseri
atgaatatgaaaactgaaaaagtcgtgatgatggacagcgatgaagcggccagcatccagactgtaactggttgggtagaccgccaaggtcgcttctggggcagtgacgagcatcaggctcgttggtgtggtgccactcatcgtaagtgcaaaaacaaacctgacgagcacccgattcatagcactaatggctattgcgaagaatgccaccgcgaaagccgccaggcgaagttcgccacctatgaacgcgcggtatgggccggagagccgctagttatctttgatgatgaccagtactttttcgacgctgaatctctgtccgactattgctatgagcactccctgctgccgagcgagttgcagttaatgatctgcgtacctaactacccgccggagttcgacctggaacagcactgcgaagagataatgcctgatggtgatgactattactgcttgccgcaagctgtgcgttatgccgccgaggcgctgaataaggcgctgaaagaaagtgctccagtatcgtggagcgccagcaacagagtggcgatcgtctcagacgacgtgctcaacgacgagcagaaggccgaaattatggcggagcgcgccgcatga

SEQ ID NO: 77825 - DNA, 219 bp, Citrobacter koseri
atgacgccagcaaatgaaaacgccatccgcgccgcctgccgccgctgcaccgaggaaatccagcaggccatgcgcaagaagccaaagcctaactggaacgaaacggtgcctcccatcatcaacaagcatcacaagaaaattgaagctctgggagttagcctcctggagttcgtcgtatacacaggcaggcttaatcgccgcttcggagcagaacaatga

SEQ ID NO: 77826 - DNA, 462 bp, Citrobacter koseri
atgggcgaactttggcaaccctttgaaaacctgttcctgcatgagattgggacaaagatgtccctctcagaaatagcagaaaagcttgagcgctcagaatcggcaataactcgccaggcatcacgtataggcgcaccacttatcagcaggatgaccggcagacgctggactaaagccgaattattccttctcaatcgattcactcctgaagaagtcgccgcagcaaccgggcgctctatctactccgtacgcagcaaattacagtctctgaccagaaagtcaggaggaaaagtcatgcctgaatggactaccgaagagctggcgctgctgtggcgacactcaaacgcagaagtcgcagagatgaccggtcggagtatcgaagaggtcggtgataagcggctgcaaacgaatattgagcgtaatggctgggatgttaacgatccagagcgggaggatgcatga

SEQ ID NO: 77827 - DNA, 918 bp, Citrobacter koseri
atgagcttaacccttgttgatttcgtcaaacaacaggagccgcttttcactaaggcggccactgacgagcggatggtgtgggcgaaggaaagccagttcgccatccagctatttcagaacaacgactacctcgccaaagttgcattccagaaccagaccagcacgcagaacgcaatcatcaacgttgcggctatcggcatttcgctaaacccggcgcagaagctggcttacctggtaccgcgtaaaggggctatttgcctcgacatcagttacatgggcctgatgcacattgcgcagcagtccggcgccattaagtggtgtcagtcggcaattgttcgcagaaacgaccaattccgccgcgaagggctcgataagccgccgatccatatctacaacgactttgataccgaagaacagcgcggggacattgtaggggcgtatgtaacggtaaaaactgacgatggtgattacctcacccatacgatgcgcatcgatgccatctactccatccgtgaccgatcagaagcatggaagaagtacaaatctgacaacagtaaaaagtgtccatgggtcactgacgaagaacagatgatcctcaagacggtcgtgaagcaggcagcaaaatactggccgcgccgtgaacgcctggatgccgccatcgaccacgttaacaccgagggcgaagaaggtatcaacttttcagccgaacgccagccagaacgcgatgtaaccccagcagggtacgaaattatcaaagagattaacgacgtccttatcgcaatggataagacatgggaagaaaacctgctcccagtctgttcgcaaattttccgtcgtgatattcgcgattcatccgagcttacccaagccgaggctgttaaggccctaggcttcctcaagaagaaggcggcagcatga

SEQ ID NO: 77828 - DNA, 168 bp, Citrobacter koseri
atgaataacaaaacagtcacccacaacggcaagcagtacaccgccaaaaagctcaatgataacgagtggcagcttacgtccgtcgataaaccccgcgataaaatcacgatgaaccgctggcagatggatttagctgggttattgcagcaagtcgaggggaagccatga

SEQ ID NO: 77829 - DNA, 489 bp, Citrobacter koseri
atgactaaaaaattcgaactcgtcgccgaattaacgaaagagtttttcggcagaaaattattccgcattcgtgcagttgtctctttcggcgatgtttccgaaggtgatttgggtgggtgggtggaaaaggaaaacaacctagatcaatccggcaatgcgtgggtgtccggcgatgcgcaggtgtacggcaatgcgtgggtgtccggcgatgcgcaggtgtccggcaatgcgcgggtgtccggcaatgcgtgggtgtccggcgatgcgcattggatcactatcggcccaattggttctgagaatggatttctgactgcttttcggcagaaagataactcaattgtcgtgagtcgaggatgtttctcaggaacgatcgacgagttcgagtcggcagtaaaagagcgacacggagacagtaagcacgctcaaatttatctggcactgatccccgtaatcaagttgcgtctggatgaggtgagtgatgaataa

SEQ ID NO: 77830 - DNA, 162 bp, Citrobacter koseri
atgggagcaagtaaaggcaagtggcgttttgatagtcgcagctcaaaggaacaaaagcgtgactggattaactggaaggccgactcgttaattagaggtgggcacaccaagaaattcgcctggcagaaagccaagcaactttacagagagttatcgagatag

SEQ ID NO: 77831 - DNA, 276 bp, Citrobacter koseri
atggttacgttcgatgagttatacgagtttattaaggttcacaggctgcattcgcgatttgaaggccgcaatgaggacaaattttggggcaaggattattcaaagcgcatcactcagatgtatctggatgatttgattaattatgggcatagctacatgacacgtcatgagcatatgtatggacgtggttttaagttcgatgccgacttgaatattgattatggagaacatgttgaatacccgcataagccggtaaacctaacacatttattttaa

SEQ ID NO: 77832 - DNA, 300 bp, Citrobacter koseri
atggaaaattcaaccacacgcaacaaagtgcaggcgcgacgaattgagtcgtggctgcttaatcagatcgccattcgtggaacaaccacagtggcaaaagctatgggcatggataagtccagcatcagtaagtggaaagagagcatgctgccgaaagtggcaatgcttctggcggtactggaatggggcgtcgttgacgacgacatggcaagactggctcgggaagttgctggtctgcttacaaagaaaaaacgcccggcggcaaccgagcgttcagatcaaatcaccatgcaattctga

SEQ ID NO: 77833 - DNA, 855 bp, Citrobacter koseri
atggcaaatactgccgaagtaatcaatttccctgtgcctgacgtggcacttaaggagccgcgcgtggcagatcttgaagatggctatacgcgcatcgctaatgaattactggaggctgtcatgctggccggattgtctcagcatcagctgctggtcttcatggctgtcatgcgcaaaacctacgggtttaacaaaaaggtagactgggtcagtaacgatcaattatctgctcttaccggtatctttccgcacaaatgctccgcagcgaaaagcgcgttagttaagcgtgggatatttacccaaatcgggcgaactgtaggaattaacaaagcagtaagtgaatgggtgaaattacccaaatcaggtaataaaaataaagtttacctgaaagaggtaacattacctgaatcaggtaagaaaagtttacccgaatcaggtaacgacgtttacccaaatcaggtaaacacaaaagacaaacatacaaaagacaataaagacaatattaataaaccccctaaatcccccaaaccggcttcgttcgatcctgctggtgttgaccttcctgaatggctgtcagtttcagtctggaagtcatgggtcgattatcgtcgcgacctgaagaaaccgattaagtctcagcagacggtaacccaggccatcaacctgcttgagcgttgcaagtgcagcggataccagcctgaagaaatcatcaaccagagcatcgcgaatggctggcagggtttgtttgagccaaagatcgccaagcagacgcctcgcgcgcagtctcgcgtatctgagaactttgctggcaaagactatggccagactgaaattccgtcatgggcgagggactga

SEQ ID NO: 77834 - DNA, 855 bp, Citrobacter koseri
atggaactgctcgaaaaaatcgacgctatcgaaaaaatgctggaagtactcgacaggccgccagagcaactccctaactgcgagaccgtctgcgaaacggtgttttgcgagaaacatggcgaatacgaacagcgtaagcgcgtgttaaccagcagtctgatcaagttgccttcaccgccgactcgctgccctggctgtctgcgtgatgagttgacattcctgtatgccgagaaaaaacgctgggaagaccgcacgcgccagcagaacatcgatcgcctgctgcgccagcttgaaatccctgagcgctttgtgacgtgtacgctggaaaactacctgccggtgggcaaagagtcagaacgcgcgctgcgggtttgtcaggcatatgcagcgaagtggccagagcgactgaagcagggtggcggactggtgatgtgtggcaagccgggtaccggtaaaaaccaccttgccctggcgatcgctcgttatgtcatcgagaaccaccagagcccggtaattttcaccacagcgctgaagattgcccgtgagttcaaatcaacgtggtcgaaaacagcgattcgctgcgaaaacgacgtgatttctcaattcaccactcctgacctgttgatcatcgacgaggtcggcgtccagttcggcagcgaggctgagaagctaatcatgttcgaaatcatcaacacccgctatgagcggatgaagccgaccatcctgatcagcaaccagaccaaagaagaactggcagcattcatcggtgaacgtgtcatagaccgcatgagcgacggcggtggctgcactctgtcattcacctgggattcataccgctcgaagggggccgcatga

SEQ ID NO: 77835 - DNA, 411 bp, Citrobacter koseri
atgatggacggcttaaagcaacgcattctcgattacgtatcagctaaccagccagccaaggttgacctgatttacaaggagcttggcatctgtcgtaaccggtattacgaagaggccaagcaactccgtttcatgggcatgttgcgcagcgtacctggtatcggtgtattccccggcgaagatgcttatcagcactggctgaaaagtggtggatacgaagaaatcagacgacgcgctgtcgatgcaaacctgagtagccaggaagcgaagggcatgaagaaaccgcgcaacagcgacgacccgaagatgttcgtaccatatgacccggcgaagaatggagtggttgctgagttcatgcaaagtgatgcgagaaagcgtctgatgatgatttacgggagaactggagcatga

SEQ ID NO: 77836 - DNA, 300 bp, Citrobacter koseri
atgaaagaagcacgtaacacacgggaaattatcgaagctgagtacccggaattccctgaaaccatcctccacgctgaactatgccgggcatgtgctcgcgtagacggtcgcagcatcaagcagtcgcttaaggccttcgctctggcgcgtatcgaaaaggttgagagcaagccgcttaaaggcgcactggaacagatggcatccagcatgtttccagagacagagatagcccgcatacgcgcttgtgtaggccgcatggagtcggcactggttaagacattcggagtgaagcgagcatga

SEQ ID NO: 77837 - DNA, 282 bp, Citrobacter koseri
atgacaagcagagagcagtttgaagaatgggttacaaaagaaaccgggtttgatttatggcgaactgaatttccaatgactgaatgggatgaccagcaatacaaatgccatcaaacaaaccttgcatggatggcatggcaagcatcacgcgcggaggttgagattaagcttccgacagaaaacgagcttcaccagaaagtatgcagccaatgcgccagcgaaagtcttgaaatggtagaggaagccatacgctattccgggataaaagtgaaggattgctga

SEQ ID NO: 77838 - DNA, 576 bp, Citrobacter koseri
atgaccgtatacgaaatggaaggttttctccgtggcaaatgtgtgcccggtgacatgaaagttaacgagagcaacgcgcagtatctggtgcgtaaattcagtgaattcgaaacaaagctttccgagtccaatcgcgaattccgtgctgcagacgcaactatccacaatctggaacttaagatcacagacatggcagtacagctcgctaacgccgagagcaagtgcagggagctggctgcggagaatgaaaagcagcagacacatagcgaagctatggcggtagacaatgcagcattgcgtgaagtagttgaacgcgtggtaaatcaatttgcaatgagcggtatttctccagaggagaagtcagtaaatccagcgaaatcactcatgtttgatgctaaatcagcactgtttatgccagccaccgacgctttcctggctgaagtgcgggccagcgcgcttgagtattatgcaaacctgttcaaggacactgtgaatatggacgtaaagcacaatcaagagtttcacaagggaacgctctatgttgctgaccaacttcgcaaaggagccgcgctatga

SEQ ID NO: 77839 - DNA, 213 bp, Citrobacter koseri
atgagtaaaccaaccgatgaagaaatcatccaggtacttcgtgaccatggcaattgcatgacctatgtggttactcactggttacgcgataactacaggggtatcaagacagcctacgtgttgcgccgtctgaagaagctagaggcggcgggaaaagttcgccgcgttaaaagtagctacgcagtccaaatctgctgggaggccgcccaatga

SEQ ID NO: 77840 - DNA, 570 bp, Citrobacter koseri
atgaacactattaccagagagcttatcgccgcatatcttaacggtgaagttaaaacgctcactagcggcgaacaaaaagagctggcgcgtatcgcgttggcatcgcttgaggctgacagtgacagtagcatccacccggcgcacggcccgctctcaaatgaccgcctgcaccgcatcagcgacatcctgagcaaagccgcagcgcaaagtgacggcggcaatcttggttacgcaatgtctgatgctgtgaaagcgattgatgaattgcttgaggtgcggaaggcggagcctgtggcatggactgacgaagaggaattacgtgacgtgcgcagggtagggtttggtgaaatgttctcagttgaacctatttctccgaatgctgatatgtgccgtgtgataccgctctacaccgcccagccagcgccggtagtgccgcccgcaattgaacctgattacgaagtcattaaaggcattcttccaacggcgaaccctgatgaatatgcatgctgtattgctgctgatatgtggaacgcctgccgcgctaccatgcttaacggaggtaaatcgtga

SEQ ID NO: 77841 - DNA, 141 bp, Citrobacter koseri
atgtctaagctaactttcgtcattgagtttgaggatggtaaagaacctcctgttcatgctcacatggaggcgtttggcggcaaggtcgttgcggtggcgttccgtgacgcactggaagaaccggataaggatgaagactga

SEQ ID NO: 77842 - DNA, 258 bp, Citrobacter koseri
atgtcagactggaacatcgcagcaaaaccgaaagacgagcaggacaaaatcaacgtggatttagcggcaagcggcgtagcgtacaaagagcgcctgaacatgcctgttatcgctgagcaggtagcgcgagagcaacctgagcacttgcgcgagtatttcatggaacgtgtcagatactatcgtgagcaaagcattcagttaccgcgcgccagtgacccacgctacatcgaaatggctgagcagaacgccaaaaagtag

SEQ ID NO: 77843 - DNA, 438 bp, Citrobacter koseri
gtgagcatcaaattctaccttcgagacgagcaggttcgtcgcaacctcatcgattacatcaataaacagcctgtcagcgctgatttcccgctggtggtcactctttccgaccctaagcgaacccttcctcaaaactctctgttccatgcgttgtgtggcgatctggttaagcatcgcgtccagtgggctggctcggcatggtcacaaccttcatggaaggcaattctggtatccggtcattccattgccactggcgggcaggggaaggttattgccggtcttgagggggaacttgtcgccatcagggaaagcacatcatcaatgggtatcaggcgcatgaacagcctgatcgaatacacccaggcatttgttgtcagccagaacatccagcttcgcgacgtccgttatcgcggcgattactttgggagagcgtcatga

SEQ ID NO: 77844 - DNA, 669 bp, Citrobacter koseri
atgagtatctatcaacgcattaacggcgctgactggcgcaatatctttgtcgtcggcgatctgcatgggtgttacacgctgctgatgaatgaactcgacaaggtttcgtttgacccggcgcgtgatttgctgatctcagtgggtgacctcatcgaccgcggcgcggaaaacgtcgagtgcctcgatctgattactatgccgtggttccgggctgtgcgcggaaaccatgagcagatgatgattgatggactttctgaatacgggaacgtaaatcactggctggtaaatggtggtggttggttcttcaatctcgactatgacaaagaggttctggccaaggctctggtccataaggcggctgatttgccactcatcatcgaactggtcacttccgatcggaaaatcgtaatttgccacgccgattacccgttcaacgaatatgaatttgataagcctgtccctaaagatatggtcatctggaatcgtgagcgggttagtgaagctcaggacggtattatctctgagatatccggtgctgacctgtttatcttcggacacaccccagcgcgccatcccctgaagtatgcaaatcagatgtacatcgataccggtgccgtgttctgcggaaacctcacgctggtacaggtgcaaggtggtgaccatgcgtaa

SEQ ID NO: 77845 - DNA, 213 bp, Citrobacter koseri
atgacaccgtctgaattaacaattcatatcctcgcgtttattggtctgattagttgcattctgtttggcgccgtatggatatgcgcggcattccgaattctttgggtgtatgccaattattcagccagtaaagccataaaggcccatcggttcgccatgaggacgaaagccagaacaaaggcggcgtggaaacggtgggggatagatgtatga

SEQ ID NO: 77846 - DNA, 810 bp, Citrobacter koseri
atgaatctcgaatcaatcgctaaatattttgcgcctaaatcaccgatgttcagtgactctccgcgcgcgacggcatctgacagccttactggcactgatgttatggccgcgcttgggcttgtcggacataaatgcggatttggttttgatctctatctggcaaagattggcattagcaacccggatcgggcaatggagtctctttatgaatcagccgttgagttatcgcgacgctacaaatcagtttcagaactcaatgacgatatccgccgaagagtccttgaaattatgtgcgcattcgctttccaggattattcacgcagcgcagcaagcgttcgtcggtgcgattgttgcgatggaacaggttttactgaagcagaggtgtttactaataaagttaccttcccgcgggggaaagcaccgtcatgggccaaaatgtcacgcgccgttgtcccgggtgactgggagaaatggaactcagtacgcgaagtggtcaaggttaaatgcaaatcatgtaacggaaagggtgttatcagcaattcgtgtcgatgccacgggaagggcaaggtgctggacaagaaggaaagtgatctccagggcgttccagtgatgaaatgctgcgatcgctgcggcgggcgtggttatgcgagattaaagttctcggtagttctggaaggcataagaaccgtaacggatataaaaaaaacgtcagcatacgagcagcttcagccacttttcgaagcgctggtaagtgaatgccacaaacaggagtcttttgccgattctgttctctcaaaagtgacgcgatga

SEQ ID NO: 77847 - DNA, 273 bp, Citrobacter koseri
atgaagatggacgaaagatacagcaacgcgacatacggcagcgctggtcttgcggctttctttgccagcctgtcattgcaggactggggcttcatcattggcgtcgctttcagcatcatcctcggcgtcctgacatacaggctcaataagcgtgagcaaatgaagcgcacgaagatactgcaggacattctgaataagactgattcaagcaacccatctgctacagccaaagttctcgccgatctcggacagaaagcaccgaaggaaatctga

SEQ ID NO: 77848 - DNA, 489 bp, Citrobacter koseri
atgaacagcaccctgataaataaaattgctgcctccatcggtggcggtgcgattgcgatcgcaacagtcatgctgtcaggtaaggatggtcttgaaggtcgagaatatgtggcctaccgagatgttgtcggagtgctgactgtctgcgatggtagcgccggatccgacataatccccggaaagcggtataccgataaggaatgcgatgctctaacccggaaagatttaacgcgtattgccgcgcaggttgatccacatatcaaagtgccgactactgaaactcaacgagcagcgatttactctttcgcgtacaacgttggcgcttctgctgccatcaactcaacactactgaaaaaactcaatgccaaagaatacgcagcggcatgcgcagaattaaagcgttgggtgtatgccggcggtaagaagtggaaaggcctgatgaatcgtcgcgatgtcgagtatgaggtttgcacctggagtcagaaatga

SEQ ID NO: 77849 - DNA, 462 bp, Citrobacter koseri
atgagcaggttaaccgcaatcatcatcgcttttatcgtctgcatcatcgtgtcgcttggttgggctgttaatcactaccgcgacaatgctatcgacttcaagaagcaacgagacgcggcggttaacgaagcttctctggcaaaagcaaccattaccgacatgcagacaaggcagcgcgatgttgccactctcgacgcaaaatacacactggaactcgcagatgctcaggaaactatcaatcagcttgagcgcgatgttgctactggcaagctcaggctgcagctcaacgcaaaatgtcccgcgaacggagcgaccagcaccggcagcatggtcgatgcttccagcccccgacttactgactccgctgaacgggattatttcaccctcagagagcgaatcgtcacagtaacgaagcaggtcgactatctgcaggactacatcaaagagcagtgcctgaaataa

SEQ ID NO: 77850 - DNA, 483 bp, Citrobacter koseri
atgaatggtctcgaaagctatttctattatgatgagtcatctccgagctatttgagaaacagagtaactcgcaactccaaatcaaaagcagatatgcctgcgggcactagaaaccatacagggcactatcaagtgatgctgaatggcgaaagattacagattcatcgcattgtgtatgagctgttttttggagcaattccagatggcatgctcatcgaccacgttgatggaaacccaagcaataattctattgaaaatttgagattagcaacaagtcagcaaaattctttcaataggaaagtgcagagcaaacatcagccactaccgaaggggatatccagagggtatggcggaaaatatattgctcaggtgtgtattggaaattcaaaaatcaggaagtcatcgacagatattgatgctcttgcctcatggctggaagttcatcgaaacagcctgcatggagatttcagctgtaatggctaa

SEQ ID NO: 77851 - DNA, 435 bp, Citrobacter koseri
atggcgaccaaaaagaaaactggccgcccttctgattacttaccagaggtggctgctgacatctgcgcactgcttgccaatggtgaaagcctacgcaaagtatgtgagcgcccgggcatgccaaacaaggcgacagtgttccgctggctggcaatgcatgatgagtttcgcgaccaatacgcgcaagccactgagacgcgtgctgatgcgattttcgaagatatgttcgatatcgctgacggtgtgaatgaagaggctgccgcagtagccaaagcacgccttcgcattgatactcgcaaatgggcgctggccaggatgaatccgaagaagtacggcgacaaggttagccaggaaatcgaccataaatcatccgacggcagcatgacgccgaagccgactatcatccagttacttcccgttgagccgaaagcatga

SEQ ID NO: 77852 - DNA, 321 bp, Citrobacter koseri
atgattgatcagaaaactgtagtacaagttaattacggacaagaaaaagacgttgttttgggagagattgttaagttcagctattaccagccgactcctggcgggcatattgaggttacagcaagtggtattctttcagactgctctttagtttgcaaagaattggtcgcacgcgtaggcgagatgattcaggtacgccttgtatcttcagtaagtaattctgagtttactatcaaacttgaccagttatcagttaacgaatcccctgtagatccaggtgcaatcgaaattttcttatcaggcatccagccagataagtaa

SEQ ID NO: 77853 - DNA, 960 bp, Citrobacter koseri
atgacgaagaagaaagcgaagtcaccgatactacccggaaaccttaaagatccgacaggcgcagaccgccttgagcgcggagcaatgaacgagttcgccagacgaatgaagcgcattggcaaagcctacaaggacattctcgaccgcattcctgcatcaccatcagtaaaccagcgctacaccttcgatctagactccacacagttatcaatgctcctcagcaatgcctcattgctggtggatgagatattgggggcagataacgagactgggttctggttctggactgattacgtcaacccggcttatcagcgcggcacggcgcaggagttcgccaatctgtcacagcagtctgccgtgtacgcggcaggacaggaaagcgtatcggcaatcctcctgagtgagccgtaccgccgcagactgattctggttcgcgctcgcacctttgaggaaatgaagaacctcagcgccactgtgaaagccgacatggcgcggatactgactgatgggctggggcgcggacagaacccgctggagatagcgaagcgcatcactgagcagacaggtattgagtctcgccgggctaatcgtattgcccggacggagattaccaccgcgctgcgccgtggacgatgggatgaatcagatgaagcaacggagcaatacggaatactcacccgtcaactgcatttgtcagcgctcagcgcgaccacccgccagactcacgcgttacgacatggaaagctctatacaacggaagaggtgagggagtggtacagcatcaatggaaacgcaatcaactgcaaatgcactcaggtatctgttcttgttgatgaggcgggcaatcctctttatccgaacgtcatcgaaatggccagaaaaaggctggagaaagcgaaacaggcaggactggttcccaatcattcgcattgcggttgtgggcgcaagcacgctgcataa

SEQ ID NO: 77854 - DNA, 462 bp, Citrobacter koseri
atggcacgttatcgtcgcgttaatatcgacggtcagtctctgtacaagaccgaaacccgcgccgcagccgcagcactgctgcctggaacggctgctgttatcaatggcgacaatgagtttgcgcaggctacagcgcttactggtcgtctctacatcatcgacgtcgcctaccatcaaggcttgaaaatcaccgaagcagttcccgctggtgattcggctgtgggcaactacgtagaagaaggccgtgagctggccctgctatgtgtggcgggaacctacgccaaggatgacccgattaagttgggcgaaaatggtcagttcaccaaggcaacggcggacaccgattcggtgatcggctacagccaggatgatgcaaccattgccgccagcactaccgatttcatccgcgtgcgtatgcgcgttggcactgtagctgccccggcagaaaattcaggagaataa

SEQ ID NO: 77855 - DNA, 1098 bp, Citrobacter koseri
atgtattttacccccgaaacactggctgctaacagccgactgcgcgggcactggaatgagctgtgggccaaccgcaacattttcaaccatcatcacgacatgatggttaacgcatatcgccagagcatgacccccgaaatgctggcggctaacgctgttggtggcttcgctcgtgaattctgggctgagattgatcgccagattatccagatgcgcgatcaggaaattggcatggaaatcgtcaatgacctgatgggcgtgcagactgtattgcctatcggcaaaaccgcgaagctgtataacgtgtctggtgacatcgctgatgacgtgtcaatcagcatcgatggtcaggcgccgtattccttcgaccatactgaattcggttctgatggtgacccgatcccggtattcactgccggttacggcgtcaactggcgacacgcggcaggtctgagcactgtcggcatcgatctggtgctggaatctcagtctgctaagctgcgtaagttccacaagaagcgcgtcaacttctatctgaacggtgactccagcattgttgttgatggtctgccagctcaggggatgaaaaaccaccgtaacacgcagaagatcaacctgggcagcggagcgggcggcgccaacatcgaccttaccactgcaaccccggcgcagttgctggccttcttcggcccgaccggtccgtttggcctgacggctcgcaccaacaaagtaactgcttacgacaagctgtgggttagcccggaagtgtgggccaacatggcgaagccatacctggtagacattaacaccggcaccaatgcgttactgagcggaacggttctggatgcgatcagtaagttcattcctgcgaagtctatccagatgacctacgcgctttccggcaatgagttcctcgcctatgagcgtcgtcaggacgtgatttctccgctggtcggtatggctgtcggcgttgtccctctgccgcgcccaatgccccagtcgaattataatttccagattatgagcgctgagggtttgcaaattaagaaagacggcgaaggcctgtccggcgtggtttacggtgcgaatctggcataa

SEQ ID NO: 77856 - DNA, 243 bp, Citrobacter koseri
atgccccgctccggcggggctaataaggtgcataacatgatcccagaagatatgaagcaaccatttccttacacgcagtttgctgagatttcatcgttgagcgtcgccaacgagatcagtcttgcgatatccagcaccaccgaactagttaaagactcgtcgagcgtggaacgattgattctcctcaagcatcttcgcgcgctttgcgaccttcaactcaataaattatcagggctggaatag

SEQ ID NO: 77857 - DNA, 3108 bp, Citrobacter koseri
atgacccagaacgtcggcgatattgaatatgttattaaggctgatacggctcagctattgcgtgctgacaaacaggttcgtgacgtaaccgacggcatggaaggcggtttcaagcgggctgataaggctgcatcatctctcacctcctcgttcggatctttgagccgggttgccacttctctgatggctatcttgtcggttcaacaggtctctcagtatgccgatgcctggacaacgctcaacaacaaattggctaacgccatcaggccaagcgagcaactggtcgatgtgacggagcgcgtatttaatatcacgcagcaaactcgcgggagtctggatgctacggcttctttgtacgccagacttgaacgagccacccgggaatatggaaccagcgctgatgatctggctaagctgacaaccataattaaccaagggtttgttgtctccggtgcgactgcacaagaggccgaaaacgccattatccaattgtctcaggggctggcatctggcgctctgcgcggtgaagaatttaactcagtgaatgagcagggcaaccgcctgatcgttgcacttgccgactcaatgggtgttggtattgggcagatgcgtcagatggccgccgccgggaagttaactactgatgttgtggttaacggattactttcacaaggggtgacgatcggcaatgagttcgccaataccacgacaactatcagtcaggcgttgcaggttgccgggaacaacatcaccaagttctttggtgaaaactccacggtaaaaaccggcacagccatttttaacgatgccgtgatcagcgtcagtgagaacatcggcgctcttagcgccatcctgaccgccgctgctgctgttatgggtagccgctacgttggcgcactgacaatggctactgctgcgaaggtaaaggtcgccgtagctgcacgaaatcagtcagcagcagagatgcaggcggcgcaagccgttgcaaataaagctgccgccgacctccgtgcagccgctatcgcaaaagaacgggcgctggacgagatccgccttgcggagatgatgaagcagacagcggttagtgcgacgaatgccgccgctgccgagcaacgcttatctgccgctcgcgtagccgctgctggtgctgttgataattacaatcgcgctctggcagcaaataaagcggcacaggctgggttagctactggagcagggttggttagccgaggattgtctctcataggtggcccagctggtgctgcgatgctcgcggccagtgcgattctatatttctctcagcgagctaaagaggccagagacgatgccaataacctggcggatagcgtcaacgaactgagcgctaagttccagaccatgtctcataccgaactggcggcaaccattggcaaattaagccagaatctgccaacccttagcgatgcggtagccgatgcacagaaagaatttaacgacgctacagctgctgttcagaggcaagaaagggagatcgctaactggggaacgaacactactcgaggccgtcaggctgctgaagcattaggtggtgcccaggataaattagcgattgcaactctcgatcttgagcgtgctcagaatcgccttagccagacgcagaacgctattaacattggacgcgccacgcttaatggcacgatgaggcaagggattgatctgcttcgccgggatggtgaggaagcaggtatcactgccggtatgatgggcaagcttggcgatatgatcaatttcgccgccaaagcgaaggagaaattcaactccagcagtttgatggtagagcgtccgaaagacgttcaggactaccttgataaactgcaagatcaggtgacactccagagcgagcttaacgatcgtaagcgtgcgcagttgaaggctgagcaggacatcagaaaacttggtggaactgaagctgatgtcagactggcgagggaaagagctgctgctgaatacgacgcccagcaagctcagcagaaaggcaaaaaggaaaccaaagacgccgcgtctgaggcgacgaaagctgccactgcaatgcagtcaaatgcgcagaagattgcggactataagcaaagggccggacttgctgcaaccaccacgcaagagctatctcgtgaacaggccattttaagggctgagcagtctttaaatagtagcgctacgaaagagcaaattgcggatatccgcaaatatgcagcggccgaatgggatgcagccaatgcggttaagatgcgacagcaggcagagcaaggtaaaaagtttgctcagcaagaaatagccgcatacaaagtaatgccagacgcccagactggaaactccattgatcttctggctcaaatcgatctggaggagcagcaaaagcttgctgctctggcaaagtatcaagctattgataaagaaaacacccagctttacgaggatgctaaaacagccattcaggcgcaggcggcaaacgagcgcattaatatagccagaacggaagcacagaggcaggttgatgtggttaataccatgctcaacggaatttctcagggattcgacgggttggctaccattattgccaacagtaaaggaaagaataacacggcatacaaggcgcttttcgcaatcagtaaggggtttgctactgctcaggcggcgttaaaccttcaactggcgatctccaatgctatggcgtctgggccgtttccatggaatatggctgcaatggcacaagtcgcagcagcaggcggttctctgatatccagcattgctagcgttggttatagcggcggtcgtcgctacggcggcacggtatctgctggcaacgcctatcgagtcaacgaggatggtcgttctgaaatcttccagactgctggtggtcagcagattttcatgccgaaccagtcagggaaggtgatatcggctgataaggcgggagggggaagcagtgtggttcagcacatcaccttcgaaatcaacaccaccggaggcatagacgacgcgactatggcgaagatgacgcagatgatgaagcaggtgagcctcaatactatccgcgaccagcagcgacctaacggcttattacggaggtaa

SEQ ID NO: 77858 - DNA, 696 bp, Citrobacter koseri
atggcctatggtgcatacttctattctggatctatggggtgggttacgcctgacatgaccccaatgcattttgataaaaaaataacaaccactgtaacaatggagagcggggcgattagcgcttgggttagtacaggaattccatcttccgtccccatgatcccatttgtacaggttgagggtgctaattcaattgtaaccatagaaactgttgtaagaaatggattatggcaaatagagtttggtagagggtctggttctacgccagtagcaacctttacagcaaggatttacatatttagaactgtagtccctcaacctctgccagattgggggatagcaatctttaattcatcaggacaatgcatattaacaaatgaaacaaatcctctgcgtataacagaaagtttaactttgcagaaaggcggtcttggtgtgccagcacaaacaaaaacataccaaggacgaagcatggccgtctatccatcatccacaggctatacaattggtacaattaacgacggcggcagtgggccgccgttaatggttcaggcttggagcgcatattgcgcccaaaaaaacgggagtaacacccttattactcctgcatatgtaaaaggcacatcgggagcaataaattattacttctcaccttcaatcacgacatatgttattgatacatcatattatgattaa

SEQ ID NO: 77859 - DNA, 540 bp, Citrobacter koseri
atgactaaccaactaacaaaaccatccatcgacttcacttttgaagatcacgaaattcgtacagtaatgcgcaatggcgaaccgtggttctttgccgccgacgtatgcaaagctatcgccctcgataacacagcaattcgtaaacttgatgatgatgaaaagggtctgcattcaacgcagacccccggtggaatgcaggaaatatccatcatttctgagtccggtctgtacaccctaatcctccgctgccgcgatgcagtgaagcaaggaacattgccgtggcgcttccgcaaatgggtgactaacgaagtcctgccgtctatccgcaaaacaggccgctaccaggtggaagaaaaacgtcagcaggttccagtattccgatacgttatcaccctgcactaccgtgatgttgtcaccgggcaggaggaaacactcagcggcggcgcgaacactccagaagaaattgtgcgcggcacagcgaagaaattcggcatcttcatcccggaaatgctgaatatgccggttaacgcctactactaa

SEQ ID NO: 77860 - DNA, 360 bp, Citrobacter koseri
atggcaaaggttaaaatccatgcagcaaattttccatatttagaggtgaatgctactggtggctgtctatttattaaaacgggtgcgtttcagctgacgggtgaaacgatccatgcaagtaagctggttaccattgatgttgcaagtgaagatagcgtgaagaaagttggtggcgctattggatggggcgttgttggcggagtgctggctggccccgtcgggatattggctggcgcactgcttggtggaaataaaaaagaagtaacatttgttgccgagatagaagatgggcgcaagttcatgggaaccacagaccacaaaacatttataggacttcaaggtgccgccatgaagttttga

SEQ ID NO: 77861 - DNA, 459 bp, Citrobacter koseri
atgtcccacccatgccccatcacatcacagggcagccatcaagcttaccagcccatgcgtcgttgtaacgtcgcagcatccggcaaccattctatattcgcactatcgaacgatcgccagccagccgcacccgggtctgcatacgacgcaactgcggcaattcaaaccgctgaagaatgttcatcagcaggtagcacaggccagtgcacattttcaggaaaaccgtcctgttcaggaagatcacgcaagccctgtctatatacgccccaggcggttttatcccccggcgcatcgggtagcattctccagtccgagtcggccagaaggatgtttctttttgccctcacctcttctgccttaacgcttttttcactgacccagttaacctttcccatcagtacacctcgacccgttctgttttttccagcacaccagcatcttctccgtaaaaaccaatga

SEQ ID NO: 77862 - DNA, 516 bp, Citrobacter koseri
atgattccacagatttctcaggcacctggcgtcgttcagctggtgctcaattttttgcaggcgctggagcagcaagggtttaccggcgatacggcaacgaattacgccgatcgtctgacaatgtcgacagataacagtatctatcagcttcttcctgatgctgtggttttcccgcgttcaacggcggatgtggcgcttatcgcccgtctggcggcagagtcgcgcttcgcctcattgatttttaccccgcgcggcggcggcaccggcaccaatggtcaggcgctgaaccagggcattatcgttgatatgtcccgctatatgagccgcattattgaaattaacccggaagagggctgggtgcgggtcgaagccggggtgatcaaagatcaactcaatcagtatctgaagccgtatggctacttctttgccccggagctttcgaccagcaaccgtgcgaccctcgggggggatgatcaataccgatgcgtccggtcaggggtcgttagtttacggtaa

SEQ ID NO: 77863 - DNA, 483 bp, Citrobacter koseri
gtgatttttatccctgcgcttatttccacactggtttcattgctgaagtttatgtatgagcacagcgaaaagcaggaagggattaacgcggtgatgcttgattttactcacgttatgattgatatgatgcgggcgaataccgcgttcctgaacctgttctggtataactcgccaacgccggattttcaacacagtctgaacattgttttctgggtgatttttgtgttgattttcgttggcctggcattgcaggactcaggcgccaggatgagccgccaggcgcgttttctacgcgaaggggttgaagatcagcttattctggaaaaagcgaaaggcagcgaggggttgtcacgcgagcaaattgagtcgcgcatcgtggttccgcatcacacgatcttcttacagtttttcccgctttatatcctgccggtgattatcatcgtgttgggctacgttttcttttcgcttcttggatttgtgtag

SEQ ID NO: 77864 - DNA, 336 bp, Citrobacter koseri
atgaaatttgtctcttttaatatcaacggcctgcgcgcccgtcctcatcaactgtcagccattgtcgacaagcaccagcctgacgtgatcggcttgcaggagacaaaagttcacgacgatatgtttcctctcgaagaggtagcaaagctcggctataacgtcttctatcacggacagaaaggccattacggcgtcgcgctactgaccaaagagacgcctgtttctgtgcgccgtggttttcccgacgacggcgaagaggcgcagcgccgtatcatcatggcggaaatcccgtcgccgctgggcagtatcaccgtcattaacggttatttcccgtag

SEQ ID NO: 77865 - DNA, 1536 bp, Citrobacter koseri
atggctacgccgctacggtacgcagtaaccctgctggtctggggcgtgatggcggtcatctggttgccgctggttcctgccgcattcacgcttatcacgcccgcgttctccgctacgcactggctggcgctgtttagcgatccacagcttccgcaggcgctgcgggcaacgctggtctccgtcaccctggcggcaaccggcgcgctggctattgcgctgacgatcgtcgtcgcgttgtggcctggcgcaaaatgggcgcgtctttgcgcccgcctcccctggctactggccattcctcatgtggcctttgccgccagcgccctgctgctttttgccgaaggcgggatgctttatcgccttttcccctcgctcacgccgcagatggatcgctatggcatcgggcttgggctcacgctggccgtcaaagagagcgcctttctgctctgggtcctgtcggcattattaagtgaaaaacagctttcgcagcaggtcatcgtgctggataccctgggctacagccgtctgcaatgcctgagctggctgctgttacccgccgttgcgcctggattaggcgcggtaatgctggcgattgtcgcctggtcattatcggcagtggatgtcgcgatgattctggggccgggcaatccacctacgctggctgtgttaagctggcaatggctgagccagggcgacgccgaccaacaggccaaaggcgcgctcgccagtttactgctcgtggcgttgcttatgctgtttgccctgttcggctatctcatctggcggggatggcaacgcacccttcctgccatcaacggtcttcgccgccagcgcttatcaggcagaagcggaaaaacgttggcgctaacgctgccgttaagcggcatgctgtgcgtggcgctgctggcttgtatggctgaacccgcgtcggtgaaccgcgaagcgctggtgaacagcctgcaaatggggctggcgtccaccgtgctggggttgatgacgctgttcttatggctggaatgggggccgcaaaccgggcaccgctgggtctggctgccaatactgctgcctgcgctgccgttggtcgccgggcaatacactctggcgctgctcgccgggcaagacggccagtacgctaccattatctggggacacctgctgtgggttatcccgtggatgttattcgtcctcaaacccgcctggcagcgcattgacccacggctggtgctgatcgcgcaaacgctgggctggacgcgggctcgtatcttctggcgcatcaagtgcccacttttactgcgccccgcattgtttgccttcgcggtcggcttttccgtcagcatcgcccaatacatgccgacactctggctgggcgccggacgctatcctacgctcaccacagaagccgtggcgctcagcagcggcggcagtaccacaattcttgcgtcgcaggcgctatggcaactgctgttacccctgctggttttcgcgctgacggcgctgtgttcacgcgtcattggccactatcgtcaaggactccgctaa

SEQ ID NO: 77866 - DNA, 957 bp, Citrobacter koseri
atgaaagcgccagttctttccattgttgtgccttgctataacgagcaagatgtctttagcctttgccttaatgagttatcgtctcgtataaatgagatgaaagacaaagggaaaatagacagagaaagtcaaatagtctttgttgatgacggaagcaaagataatacctggcgattaatagaagaagcatcaagaggaagccgtctagtgaaaggggtaaagctttcacgaaataaaggccatcagactgcattaatggcaggattatcatcatgcactacatctgacattactgtaagcattgatgctgacttgcaagatgacaccactgtaattgaaaaaatggttgactcctatatctccggtcatgacatagtctatggagtaaggaacgacagaacctcagatagtttctttaagaagtttacagcagaggcattctacaaggtaatgactaaactcggtgtaaatcaggttgaaaatcatgctgattttagattgttaagtcggcgagcgctcaactctcttttacagtataaagagcaaaacttatatattcgaggtcttatccccctgatcggatatccaagtgataaagtgtactattctcgtcatgagcgagcggcaggagaatcaaagtacccgctcagaaaaatgctggctcttgcccttgaaggaatcacatcgttctcagtaactccgttgaggatcgtaaccgctttaggttttattatctctatactttcatcaattggagttatatatactcttgcccagtattttcttggacatactgttagtggatgggcgtcgatgattttagctgtactatttataggtggagttcaaatgctctgccttggtgtgattggcgagtatattggtaagatatatattgaaagtaaaaaaagaccaaagttttttatttctgaggtaacggaaaatgacaaagaataa

SEQ ID NO: 77867 - DNA, 1701 bp, Citrobacter koseri
atgacaaagaataataaagtatattttatatcctttgtgattgtgttagttttagctctgttaaatgtgcatgtattcatgggtaatgaacagagcgtgtacttttgggactccaaaaatttttggatgcaatggatgagatacgccgatctgttgttccagagcccattggactggggcatgtctgtttacacaacagtaacaaaggatgactataacgctctgtctacagcattattattcccatttaaatttctgcccatcgactcaagaagtgcttacatatacgctataaccattacatatttaatccctgtaattttattggcaacatttattttattaaaaatatttgaaagcaagtcaccattctatgtaataacaacagctattcttgttgtattatatactccattctggaaaccgactcttagaggtttgcctgatgttgtcggactgatacctgttctctgtgtgatttattttacgataaaaaatgacttatcaaacagagtattgttatttaaatcagtttttctcggcattctgttatggatgccatttgcattcagaagatggtatatatttacggtcatcaccttatatataaccttgcctttttttgtggctttttatcatgatgttaagtttaagttcgagttaagtaaagcaaaaaacatactgattaactttttcatctcaggaataatcactgttgcccttgcgttattaattcagaaagagttaataaccagaataatatctacagattactcaaccatgtattcagcttaccaatatggattctcaaaatcacttatggtgatctttggagatattggtttgtttatgatgccattttttatatttggcataattagtgccatttcaaacattaaaacaaagcaaagcgtttttgttcttttctctgctttctcgtttgttatcagtgtactattatttactggtactcagacacccggcattcatcatgttctaccattctcactgtggttcttgtttgtttctatttttggactaaattacatatcatcattattcaagaacaaggatgccgaacattctttacttactataattatggtaggcatgacgcttatatctgttagcacttttaacaaaccattcccttcttataaaaatgacttccatatattccctgatggattatacccatataaggtttctaatttcgacgaatacaaaaggctgagtgatagacttgtagcccttacaaatagtggcgataaaatatctgtatttagctctaactacatcttaaatgatgatatgttacttacaatatctaatttcaagcttacccctcgtgtattccgtgtatctcaagtggacttgcgcgataaactcagggtggaagctttctccacaaaatatgttgtggttactgaccccatacagttgcatttaaacaaggatgggcaaagggtcatttcttaccccgcgaccttattgttaaataaaaagggtataggttcagcatataaaaaacttgacgaaaaataccagctaagcaaaggggtttctgcatacatttatgaaaaacagagaccatttactgagtctgagtcccaagactttataaaaaacatagttaatatgtaccctcaatggaatgaactatacaataattctaagacattaaaattattatctgaataa

SEQ ID NO: 77868 - DNA, 2019 bp, Citrobacter koseri
atgaccacctataacaccaaagaacctcttggttctgcatccgccaagattctttatgataacgcccagaactttgatcacctttcaaatgaccaggaaaatgagctatggcctgatcgttttggtaaaaatcgccttacatggcacggaatggaagagcgttataaaacagcgctcgcaaacctcggtttaaatcctgtcgggacatttcagggcggggcggttattaattccgctggtgacatcattcaggatgaaacaacaggcgcatggtatcgctgggatgatctcacgaccctgccgaaaaccgttccatctggttctacccctgactcaacaggcggtacaggtgtcggaaaatggctggccgtagatgtcagcgatgtcctgcgccgcgagctggcgttgccaaccggtgcagaacagatcggctatggtgatgtgacggttgccgaacgtctgtcttatgacgtgtatttcactggaggaagtgattccacaatagaagagattcaatcgtttattgatgcaaacgaaggttgtacgattcaatttcctcccggcgattatgacatcacagactggttgttcgttcctgcaaacaccaagctaaaaggagcacaggagatatcagtaaaaagccacaacatgaatcatcctgagtacacatcaataatagatagtatgttttctgctcccggcattacacggtttaacctgaaaggggcgccgacaaaatacattgtaactgatgtggtagaggctactgacgatgcgtcgatttctgccggcataaccctgagtgacgagaactcaggcttagaaaacattctcatcgctggatggcgtgagctaacagatagctcttacgaaaggccaaatgtcgctggttccgtggatgcaggagccacaccgtgctttgacatgggtatcttcattccggctatcagcggttgctctgtcaagggagttgctgttatagggtatttcagttccgggtatgcatgtctttatcttgatgcctcccgttcttatctaaataatggctcaggcaacacatttaacattgatgaccgccttaagagcaacagcatgtgtgaccttacggtgcaggattgtttcttctggcccatggattacaacactccgacgcaaaacaccggtgcagtatcagcctacggtatcaagcttaaaggtacagacagagatattcgagacctgactaagtatccaacagttagcggcgctgccagcaattggatttggggtgggcatggaacgtcggatcagttctacattaatacagtagctcgcggtatttattttgatgcatcattgcgcacgtttaacggcgacactcgcttgtcagatacaactacaggcaataacgggtatcccacagagagtatggctgggcgtggaagtaaaatattcttcacaaactgtacattccggttggggaatatttatctcaatcgtgtaacgaatttcaatatggttaactgttatggagaagccggaactttcactcagaccaaccttactggacgcgtaactgtggttggaggggatattctccaaagttaccaatccgtaacgctaccaaatgttgatggttcaaccccttcagtcccatatgatacgaacacatcacctatgcttttctcgtatggtagcgggaagaatgatagatttcagttatttcatgccagtccttctaatgtctattttcgtccgcattttgataacaaaattgcaaatggatattatgatggaacaactcgatgggcttggtctaatacatatacagtacagttaactacagctagtattacatgttttggaacagctaactctgttaactttgtaaaacctccgcgcctgccaagttttactaccgcaggaaggcctgcccttggtcttgttgacgcaggtgcgcagatattagatacaactttaggttacgctataacatggaccggatcggcatggaaaaatggtactgggacgatagtgtaa

SEQ ID NO: 77869 - DNA, 759 bp, Citrobacter koseri
gtgaacagcgcggttcccagcaacgttttctgtgattcgatatccgcgcggaaaagctatcttctgctgactgacgggctcgcttctgtcgcgcgcgaaggcgttaagccctggtcgggggttatcagtccgcatgagatgaccgaggacctgcaaatcacgttcgtggctccgtctgacaacgactatgacggtgtggacgttgttacgtatatcaacggaacgacatgggcgaaggaaacggtacagtgccggacaccggataatccaacgcccgtaaaaatcgaagacacgacatcaaccgaactggacgcgctttgctataacgtcggcgatcgtatcgtgctgaccgacgatataccgggcagccagacgattagcgcgctgattgaagagatggataccactgataacaagacaaagtttacggtgacggagcctcttgactggtctttcgggaaccctcgcgtgctgatacgttaccaggatggcaccgcttctggcctgatggttgcaacaagaatgggggattatcaggtgctggttcccgagcaaccagaattcagctctattattcttaatgatcctgccattgagccgccgcgtctggttttctgcgactcttcggaggtcggttataacgcaatcatctcagaaatagcgccgcagtccgatggcacgtgccaggtaacggcgaaacagtataaacccagcttctacaattatgacgatgccacttatcccggcaatgtaacctga

SEQ ID NO: 77870 - DNA, 456 bp, Citrobacter koseri
atgaaaaacaaattgttatttatgatgttaacaatactgggtgcgcctgggattgcagccgcgacaagttatgatctggcaaatgcggaatataattttgcggtaaatgaattaagcaagtcttcatttaatcaggcagccattattggtcaaaagggcacttataatagtgcaaaaacacgccaggacggctcaaaacttttatctgttatttcacaagaaggcggaaataaccgagcgaagattgaccagtcaggagcttataaccttgcatatattgatcaggcgggttatgccaatgatgcaagtatatcgcaaggctcttatggtaatactgcaatgattattcagaaaggttctggtaataaagcagatattacgcagtacggtacgcaaaaaacagcagttgtagtgcagagacagtcgcgcatggctattcgcgttacgcaacgttaa

SEQ ID NO: 77871 - DNA, 456 bp, Citrobacter koseri; identical to SEQ ID NO: 73444

SEQ ID NO: 77872 - DNA, 333 bp, Citrobacter koseri
atgaatacgctattactccttgccgcgctctccagccagattacatttaataccacgcaacaaggtgaaatttacaccattgtcccccaggttacgctcagcaaaccctgcgtgtgcgaagtccaaatttttgccgttcgtgatgggaaaggagggcaaagccgtacacagcagaaaacaaccctttctttgcccgctaatcaacccattgatttaacgaaactcagtttaaatatttccccggaggactcggtaaaaattatcgttaccgtttccgacgggcagtcgttgcatttgtcgcagcaatggccatctcctgagaagtcatcttaa

SEQ ID NO: 77873 - DNA, 324 bp, Citrobacter koseri
atgtttgcgttgtgttcgaaaaatatcctcggagcaggccttggcgtctgcgttctcttttcttcctctgttacagctcaacaaatcactaccggcggcgttattcattttcgtggtcagattgtcgaacctccctgtgaggtcagtgcccggcagcaaaatattgacatgacatgcgtgaataatggccagatgaaaactaaccgttttaccctgcaacaggttacaaccgccccgcaaagccttcgacaaattgcatccgtgagagtcaattatctcgatccgcaacaacgtctggcaattatgagtattgaataccaataa

SEQ ID NO: 77874 - DNA, 534 bp, Citrobacter koseri
atgaaatcgcgtattcatgtacaacatggcgacataacccaactcacggtagatgtgattgttaatgctgccaacgcttcattactggggggcggtggcgttgacggcgcgattcatcgtgcagcgggtccggcgctactggaagcctgcaaaaaagtcaggcagcagcagggcgagtgcccggcaggacatgcggtcattgctctggcaggcaatctgccggcgaaagcggtgatccatacggtggggcccgtctggcgtggcggcgatcacaacgaatcccagctcctggaagatgcctatttcaacagtttgcaactggtgctggccaatggctaccggtctgtcgcgtttccggcgatcagcaccggtgcttacggctacccacgccccgccgcagcagagatcgcggtcaatacggttgcggattttcttgcccgccacgcgctacctgagcaggtatactttgtctgttatgatgaagaaactgcccgactttacgagcgattactgacccaacaaggtgatgagtga

SEQ ID NO: 77875 - DNA, 1431 bp, Citrobacter koseri
atgagtgagttgacccgacttgagcgcgctgttaccccgctgtgtgaacgtcatcccggcgaatgcggcattctcgccctggatgacagcctggatgcctttgccgcacgctatcgattaacagaaatggctgaacgcaccctggatgtgcagtattacatctgggaggatgacatgtccgggcgcctgctgttttcgatattattggcggcggcaaagcgcggcgttcatgttcgcctgctgctggatgataacaacacgccggggcttgatgatacgctgcaactgctggatagccaccccaatatcgaagtgcgcctgtttaatcctttctcttttcgtatgctgcgcgcgctggggtatttaaccgactttgcccggcttaatcggcgtatgcataataaaagctatacggcagatggcgcagtcaccattgtcggcgggcggaatattggcgatgcctattttggcgcaggtgaagagccgctgttttccgatctcgacgtgatggcgattggccctgtcgtaaaagacgtggcggatgattttgaacgttactggcactgcaaatcggtttcaacgctgcaaaaagtgttgtcgctgtctgagcaggaaatcacccgacgcatagatttaccggattcctggtacaacgacgacattacgcgccgctatttgcataagctgaaaaccagccactttatgtcccatcttgatcgcggcgctttaccgctgatatgggcgaaaacccgtttgctcagcgacgatcctttaaaaggcgaggggaaagcgcagcgtcattcgcttctgccgcaacgcctgttcgatgtgatggggtcgccaacggaacgtatcgacattatttccgcctattttgtccccacccgggcgggcgtcgcgcaactgctgcaactggtgagaaaaggggtcaggatcgcgattcttaccaattcactggcggcgaacgatgtggcggtcgtccatgcgggctatgcgcggtggcgtaaaaaacttctgcgctacggcattgagctctatgagcttaaacccactaacgggcatgcggttgaacttcacgatcgtggtttaaccggtaactcaggctccagcctgcatgcgaagaccttcagcattgacgggaataaggtttttatcggttcgctcaatttcgatccccgatcgacgttactcaataccgaaatggggtttgtgattgaaagcgaaacgctggcaacgctgattcataaccgttttatgcagagccagcgtgatgacgcctggcaactgcggctggatcgttggggaaggattaactgggttgatcgccacctgcgtgacgaggtggtactgaaaaaagaacccgccacaggattctggaagcgggttctggtgcgactggcgtctgtcttgcccgtcgaatggctgctttaa

SEQ ID NO: 77876 - DNA, 1161 bp, Citrobacter koseri
atgaatccagtacctccacagcgtgaatattttcttgactccatccgcgcctggctgatgttgttggggatcccctttcatatctcgttgatctattcaagccatacctggcatatcaacagcgcagagccctcatggtggctgaccctgtttaacgattttgtccacgcatttcgcatgcaggtcttttttgttatttccggttatttttcgtacatgttattcctgcgttatccattaaaacgctggtggaaagtgcgtgttgaacgcgtaggtattcctatgctgacggccattcctttactcaccttgccgcaatttatcatgctgcaatttgtcaaaggaaaaaccgaaaactggcacacgctttctttgtatgagaaatacaatacgctggcctgggaattaatttctcatctgtggtttttattagtgcttgttgtattaacaaccctgagcatgtgggcattcagccaaatcaaaaaaagcgcggaacgcacaacgaagccgttattcgccgccgtttcgatgaccaaattgacgcttatcttctttatccttggcgtcggttacgccgcgctgagacgcgccatttttatcatttatccctctattcttagcgatggcatgttcaatttcgtcgtcatgcaaacgctgttttatctccctttctttatcctgggcgcgctggcattcatcaacccggcgctgaaagcgctgtttaccgtaccgtcacgcggatgcacgctggctgcggcgctcgccttcgttgcctacctgctgaaccagcgttatggcagcggcgatgcctggatgtatgagacagaatacgtcattaccatgctgatgggattgtggatggttaacgtggtcttttcgctgggccaccgtttacttaatttccagtccgctcgcgtcacctattttgtgaatgcatcgcttttcatctatctggtgcatcatccactaacgctgtttttcggcgcgtatattacgccgcatattacgtcgaatctgctgggctttttatgcgggctggtctttgttatcggtattgcgctggtcctgtatgaactgcatttacgggttcccgtactgaaatttttattttcgggcaaacccgcggttaaacgtgataacagcaaggctgtcgccagttaa

SEQ ID NO: 77877 - DNA, 1554 bp, Citrobacter koseri
atgaaacataaacgacaaatgatgaaaatgcgttggttgggcgcggcggtaatgttaacgctgtacacatcgtcgagttgggcgttcaccatcgatgatgttgcaaaacaagctcaatccttagccggtaaaggctatgaggcgccgaaaagtaacttgccctccgttttccgcgacatgaaatatgcggactatcagcagatccagtttaaccgtgataaagcgtactggagcaatatcaagaccccattcaagctcgagttctaccaccagggtatgtacttcgacacaccggtcaggatcaacgaagttaccgcaacgacggtaaaaagaatcaaatacaacccggactatttcaattttggcgatgttcagcatgataaagacaccgtcaaagacctcggcttcgccgggttcaaagtgctgtacccgatcaacagcaaagacaaaaacgatgaaatcgtcagcatgctcggtgccagctatttccgcgtcattggcgcaggccaggtctatggcctttccgcgcgtggtctggcgattgataccgcgctgccttccggtgaggaatttccccgctttcgcgagttctggattgagcgtccaaaaccgactgacaaacgtttgaccatctatgcgttgctcgattccccgcgtgcgaccggggcataccgcttcgtcatcatccctgggcgtgacaccgtggtggacgttcagtcgaaagtctacctgcgtgataaagtcggtaaactgggcgttgcgccgttaaccagcatgttcctgtttgggccgaaccagccgtctccggcaaccaactatcgcccggaattgcacgactctaacgggttgtctatccatgcgggcaacggtgaatggatctggcgcccgctgaataacccgaaacatctcgcggtgagcagctatgcgatggaaaacccgcaagggttcggcttgctgcaacgcggccgccagttctcgcgctttgaagatttagacgatcgctatgacctgcgcccaagcgcctggatcacgccgaaaggcgagtggggcaaagggaaaatcgaactggtagaaattccgaccaacgatgaaactaacgataacatcgtggcctactggacgccggatcaactgcctgaagcaggcaaagagatgaacttcaagtacaccatgacgtttacccgcgatgaagagaaacttcatgcgccggagaatgcctgggttcagcagacgcgtcgctctacgggcgatgtcaaacagtctaacctgattcgccagcctgacggcaccatcgccttcgttgtggattttgtcggcacagatatgaaaaagctgccgcaggatacccctgtcacggcgcaaaccagtattggcgataacggcgaaatcgttgagaactcagtgcgttataacccggtgacgaaaggctggcgtttgacgctgcgcgtaaaagtgaaagacgcgaagaaaaccactgaaatgcgtgctgcgttggtgaatgccgatcagccgttgagtgaaacctggagctaccagttacctgccaatgaataa

SEQ ID NO: 77878 - DNA, 2499 bp, Citrobacter koseri
atgccgctttcagacattgagaaagcggcgctgccgaaaacggacatccgcgccgtccatgagacgctggatgttgagcatcgagcttactcgcgagaagacgattcaccgcagggatctgttaaagcgcgccttgagcaggcctggccggattcgctggccgaagggcaactgattaaggatgatgagggacgcgatcagttgcaggcaatgccgaaagcgacgcgttcttctatgttccccgatccctggcgcaccaacccgctgggtcgtttctgggatcgcttgcgcggccgggacgtgacgccgcgttatctctcccgcctgacgaaagaagagcaggagaacgagcaaaaatggcgtaccgtcgggacaatccgccgctacatcctgttgctgctgacgctggcgcagacggtggttgcgacctggtatatgaagaccattcttccttaccagggctgggcgctcattaatcccgccgacatgatcgggcaggatctgtgggtctcctttatgcaactgctgccgtatgtactgcaaaccggcatcctgatcctgttcgccgtgctgttctgctgggtgtctgcggggttctggaccgcgcttatgggcttcctgcaactgctgattggccgcgataaatacagtatttcagcgtcaacggtgggaaatgagccgctgaatccagagcaccgtaccgcgttgattatgcctatctgcaacgaggacgttgaccgcgtgttcgcagggctacgcgctacgtgggaatcggttaaagccaccggcaacgcagcacatttcgacgtctatatcctgagcgatagctacaaccccgatatctgcgtggcggaacaaaaagcgtggatggagctgattgctgaagtgcagggcgaaggacagattttctatcgccgtcgccgccgtcgtgtgaagcgcaaaagcggcaatatcgatgacttctgccgtcgctggggcaaccagtacagctacatggtggtgctggacgctgactcggtgatgaccggcgagtgtctgagcggcctggtgcgtctgatggaagcgaacccgaatgccgggatcatccagtcgtcgccgaaagcgtccggtatggatacgctgtatgcgcgttgccagcagtttgctacccgcgtgtacggcccgctgtttaccgctgggctgcacttctggcagttaggcgaatcgcattactggggccacaacgcgattattcgcgtgaagccattcatcgaacactgtgcgcttgcgccgctgccgggcgaaggatcgttcgcgggttccatcctctcgcatgacttcgtggaagcggcgttaatgcgtcgtgcagggtggggcgtctggattgcctacgacctgccgggttcgtatgaagaactgccgccgaacctgctggatgaacttaagcgtgaccgccgctggtgtcatggcaacctgatgaacttccgcctgttcctggtgaaagggatgcacccggttcaccgtgcggtgttcctgacgggggttatgtcttacctgtcggcgccgctgtggtttatgttcctggcgctttccaccgctttgcaggtagttcatgcgttgaccgaaccgcaatacttcctgcaaccgcgccagctgttcccggtctggccgcagtggcgccccgaactggcgattgcgctgtttgcatccacgatggtgctgctgttcctgccgaagctgctgagtattatgctcatctggtgtaagggcacaaaagagtatggcggatttgtgcgcgtaacgctgtcgctgctgctggaagtgctgttctctgtgctgctggcgccggtacgcatgttgttccacacggtgtttgtggtgagcgcattcctcggctgggaagtggtctggaattcaccgcagcgtgacgatgactctaccccgtggggtgaagccttcatgcgtcacggttcccagttgctgctcggcctggtatgggcggttggcatggcctggctggatttacgtttcctgttctggctggcgccgattgtcttctcgctgatcctgtcgccgtttgtgtccgtggtttccagccgttcaacggtgggcttgcgcaccaaacgctggaaactgttcctcatcccggaagagtattccccgccgcaggtgctggtggatactgacaaatacctggcgatgaaccgcaatcgcacgctggatgacggctttatgcacgcggtgtttaatccgtcgtttaacgcgctggctacggcgatggctacggcccgtcaccgcgccagtaaggtgctggagattgcgcgcgaccgccatgtggagcaggcgctgaatgaaacgccggaaaaactgaatcgcgaccgccgtctggtgttgttgagcgatccagtgacgatggcgcgtttacactatcgcgtctggaattcaccggaaagatattcatcgtgggttaactactatcagggtatcaacctgaacccactggcgttgcagaagaagtaa

SEQ ID NO: 77879 - DNA, 228 bp, Citrobacter koseri
gtgcgaataatcgtggttggcgtaatggcgctacttctgagcgggtgcggcagcatcattagcaggacgatccccggacaagggcacggcaatcaatactatcccggcgtgcagtgggatgtccgggattccgcgtggcgctatgtcacggttctcgatctgccgttttcactggtttttgatacgctgctgctgccgctggatatacaccacggcccttatgagtag

SEQ ID NO: 77880 - DNA, 375 bp, Citrobacter koseri
atgactatgtacgccacgctggaagaagccattgatgcagcccgtgaagagtttctggctgacaacccggaactcgaacaagatgaagccaatgttcaacaactcaatatccagaaatacgtgctacaggatggcgacatcatgtggcaagccgagttttttgccgatgaaggcgaagaaggcgaatgtctgccaatgctgagtggcgaagcggcgcaaagcgtctttgacggcgattatgatgagatagagattcgtcaggagtggctggaagagaacactctgcatgagtgggatgacggtgaatttcagctcgagccgcctctggataccgaagaaggccagactgcggcggatgagtgggatgagcgttaa

SEQ ID NO: 77881 - DNA, 1221 bp, Citrobacter koseri
atgtcaccctctgatgtccccataaactggaaacgcaatctcaccgtagcctggctgggctgttttttgaccggcgcggcgtttagcctggtgatgccatttttacctctctacgttgagcagctcggcgtaacgggccacagcgcgctgaatatgtggtcggggctggttttcagtatcaccttcctgttttccgctattgcctcgcctttttggggcgggctggccgatcgcaaagggcgaaagatcatgctgctgcgctcagccctcggcatggcgatggttatgctgctgatggggctggcgcagaacatctggcagtttctgatcctgcgcgcattgttaggtctgctcggcggatttgtgccaaacgcaaatgcgcttatcgccactcaggtgccgcgtaataagagcggctgggcgttaggaacgctttctactggcggcgtcagcggcgcgttgctcggccctctggcgggcggattacttgccgaccagtacggattacgccctgtcttcttcatcaccgccagcgtgctgttggtctgtttcttactgacgctcttttttattcgcgagcgttttcagcctgtcagcaaaaaggagatgttgcacgtccgggaggtcgttggctcactaaaaaacccaaagctggttttgagtctgttcgtcaccacgctgatcattcaggttgcaaccggatcgatcgcgcctattctgacgttatatgtgcgagagctagccggtaacgtcagcaatatcgcatttatcagcggaatgatcgcctcggtgcccggcgtggcggcgttgctcagcgcgccccggctcggcaaactgggcgatcgcattggccccgaaaagatcctgattaccgccctgattatctctgtcctgctgctgatcccgatgtcattcgtacaaacgccctggcagcttggcgtgctgcgctttttacttggcgcggcggacggcgccctgctccctgccgtacagactctgctggtctataacgccagcaatcagatcgccgggcgcatcttcagttacaaccagtcatttcgcgatattggcaacgtcacaggcccgttaatgggggcggctatttctgccagctacggttttcgcgccgtgttttgcgtcaccgcaggcgtcgtgttgttcaacgcaatttattcgtggaacagcctgcggcggcgcagagagaccctcgcggcaaaatga

SEQ ID NO: 77882 - DNA, 921 bp, Citrobacter koseri
atgacgaatttacctaagttctccgttgcgctactgcatccacgttattggttaacctggctgggtattggtgctctttggttggtcgtgcaattgccctacccgatgatttacaaactgggttgtgcaatgggacgtctggcgttgcgttttatgaagcgccgcgcccgcatcgcctatcgtaatcttgaattgtgctttccacagatgagcgagcaagaacgccaccagatggtggtgaagaacttcgagtctgtcgggatgggcgtgatggaaaccggcatggcctggttctggtccgaccgccgtatttcacgctggacagatgtcagcggcgttgagcatatccgcgacgttcaggcccgggagcgagggattctgctggttggcctgcactttctgacgctggagctgggcgcgcgccagtttggtttgcaacagcctggcattggcgtttatcgtccgaatgacaatccgttgcttgactggctacagacctggggacgtatgcgctccaacaagtcgatgctcgatcgcaaagacctgaaaggcatgatcaaagcgctgaaaaaaggtgaagtggtctggtatgcgccggatcatgactatggcccgcgcgccagcgtgtttgtcccgctgtttgccgtggaacaggccgccaccacgtcaggaacctggatgctctcccggatgtccaacgcctgtctggtgccgtttgttccgcgtcgtaaacccgatggcaaaggctatgagctgattcttctgccgccggaatgctcaccaccgctggatgacgccgaaaccaccgcggcctggatgaacacgatcgtagagaaatgcatcatgatggcgcccgagcaatacatgtggttgcatcgccgtttcaaaacgcgtcctgaaggtatgccctcccgttactga

SEQ ID NO: 77883 - DNA, 1053 bp, Citrobacter koseri
atgccagtgttacacaaccgcatttcgaacgatgcgcttaaagcccggatgttagctgaaacggagccgcgcacgaccatctctttttataaatacttcacgatcgtcgatccgcagagcacgcgcgacgcgttgtaccagatgtttacctcgctgaatgtttttggtcgcgtttatctggcgcgtgaaggcattaacgcacagatcagcgtgccgcaaagtcaggtcgcggcgtttcgtgagcaactgtatgcgtttgatcccgcattaaacggcttgcgtctgaatattgcgctggacgatgacggtaagtccttctgggtgctgcgtatgaaagtacgcgagcggattgtggccgatggtatcgacgatccgaattttgatgccagcgacgttggcgagtacctgaaagcggcggaagtgaacgccatgctggacgatcctgatgccgtgtttatcgacatgcgtaaccactacgaatatgaagtggggcatttcgaaaatgcgctggaaattccggctgacacgttccgcgagcagttgccgaaagctgttgaaatgatgcaggagcatagagacaagaaaatcgtcatgtattgtacgggcggtattcgttgtgaaaaagccagcgcctggatgaagcataacggttttaacaaagtgtggcacattgaaggcggcatcattgagtacgcgcgtaaggcgcgcgagcagggactgccggtgcgtttcattggtaagaactttgtgtttgatgagcgcatgggagagcggatctctgatgaggttatcgcgcattgtcaccagtgcggcgctccgtgcgacagccataccaactgtaaaaatgatggttgccatctgctgtttattcagtgcccggcttgcgccgagaagtttaaaggctgctgtagcgagctgtgctgtgaagagagcagtttgccggaagaggaacagcgccgtcgccgcgctggccgtgaaaatggcaataaaatcttcaataaatcgcgtggccgcctgaataaccaactgggcattcccgacccggcggaataa

SEQ ID NO: 77884 - DNA, 576 bp, Citrobacter koseri
atgaaaaaaagcctgctgggactgacttttgcttccctgttattcaccactggttctgcaatcgcggcagactataaaattgataaagagggacaacacgccttcgttaacttccgtatccagcacctgggttacagctggctgtacgggacgttcaaagatttcgacgggacatttaccttcgatgaaaaaaatccggctgcggataaagtgaacgtcaccattaacaccaacagcgttgataccaaccatgcggagcgtgataagcacctgcgtagcgctgatttcctgaacgtggcgaaattcccgcaggcgacgtttacctcgaccagcgtgaaaaaagatggcgacgagctggatatcaccggcgacctgacgctcaatggcgtcaccaaaccggtcacgctggaagcgaagctgatcggccagggtgacgatccgtggggcgggaagcgcgcgggctttgaagcggaaggtaaaattaagctgaaagacttcaacatcaccaccgacctcggccctgcatcgcaggaagtcgatctgattatctcggtggaaggcgtacagcagaagtaa

SEQ ID NO: 77885 - DNA, 573 bp, Citrobacter koseri
atgcaattcaaaaatactcctcagcgctatggcgccatttctgtattgcttcactggctggtcgccattgttgtatacggcatgtttgccctgggtttatggatggtgacgctcagctattacgatggctggtatcaccaggcgccggaattgcataaaagtatcggcatcctgctaatgatggggctggttatacgtgttttctggcgtttcgtctcaccaccgccaaaggcgctgaaaagctattcacgcctgacccgtctgggtgcggcggtgggccaccttgcgctgtatcttctgctcttcgccattgtgatcagcggctatctgatctcaaccgccgacggcaaaccgatcagcgtgtttgggtggtttgacgtgcccgccacgctggccgacgcgggcgctcaggccgatcttgccggtagcctgcacctgtggctggcctggagcgttgtgattctgtctgttctgcatgggttaatggccctgaagcaccatttcatcgataaagacgacaccctgaagcgtatgctggggagatcgtcacctgactatggagttgaaaaatga

SEQ ID NO: 77886 - DNA, 165 bp, Citrobacter koseri
atgacccaatggcctcgcaaacggggccgtttctttttgaggagtcaggctgtgcgtcgtatttttcactatctgatcaataatattcgtgagcattttatgctctacgttattttatggtcgctgctggccatcatggacattatttatatcatgttcttttaa

SEQ ID NO: 77887 - DNA, 1119 bp, Citrobacter koseri
atgaaatacgacttaatcattattggcagcggttccgtcggcgccgcagccggatattatgccactcgcgccggactgaaggttctgatgacagatgcccatatgccgccacatcaacagggcagccatcacggcgatacccggttaatccgccacgcttatggcgagggtgagaaatacgttcctctggtgctgcgtgcgcaaacgttatgggaagagctttcaacgcataatgaagatcccatcttcgtccgctccggcgtcataaacctcggcccggcggactcgccatttctggcgaacgtggcgcacagcgcacagcaatggcagttaaacgttgagcaactggatgccgccgccatcatggcgcgctggcctgaaattcgcgtccctgacaactacattggcctgttcgaaacggactccggttttctgcgcagtgaactggcgatcaaaacctgggttcgccttgccgaagaggccggctgcgcgcagctctttaactgccccgtcaccgcccttcatcacgataacgacggcgttaccgttgaaaccgctgacggcgaataccgcgcgaagaaagtgctgatcagtgccggtacatgggtacaggcgctggtgccggaactccctatccaacccgttcgtaaagtttttgcctggtatcaggctgacgggcgctacagcatgaaaaataacttcccggcgttcactggagaactcccgaacggcgatcagtattacggttttcccgccgaaaacgacgcattaaaaataggaaaacacaacggtggtcagttgattcactcaccggaagagcgcaagccgtttgccgccgtcgccagcgatggttccgaagcgttccccttcctgcgcactatcctgcccggcattggctgctgtctgaacggcgccgcctgtacctatgataattccccggatgaagattttattatcgatacattaccgggacatgataatacgctgatcgtcaccggtctgagcggccacggctttaagttcgcctcggtattgggcgagattgccgccgatttcgcgcagggtaaatcgccggcttttgacctgacgccattcaaactgaaccgctttacgcaataa

SEQ ID NO: 77888 - DNA, 255 bp, Citrobacter koseri; identical to SEQ ID NO: 73427

SEQ ID NO: 77889 - DNA, 246 bp, Citrobacter koseri
atgcgtattgaagtcactatagcgaaaacgtcacctttgcctgctggcgcgattgacgcgctggccggtgaactctcccgccgtatccatcactcttttccagataacgcgggcaatgttgtcgtccgttatgccgcagccaacaatttgtcggtcattggcgcgacaaaagaggataaagaacgcatcagcgaaatcctacaggaaacctgggaaagcgcggatgactggttcgtcaatgaataa

SEQ ID NO: 77890 - DNA, 1044 bp, Citrobacter koseri
atgactgcaccatcccaggttttaaagatccgccgcccagacgactggcacgttcaccttcgcgatggcgacatgttaaaaactgtcgtgccttacaccagtgaaatttatggccgcgcgatagtgatgccgaacctggcgccgcctgttacgacggtcgatgcggccatcgcataccgccagcgcattcttgatgccgttcctgccgggcatgactttaccccactgatgacctgctacttaacggatacgcttgatcctgatgagcttgagcgcggattccgcgaaggcgtctttaccgcagcaaaactctatccggccaacgcgaccaccaactccagccacggcgtcacctctgtcgatacgatcatgccggtactggagcgcatggaaaaactcggcatgccgttgctggtacacggcgaagttacccatgctgatatcgatatttttgaccgcgaagcacggtttattgaaacggtgatggagccgctgcgccagcgtctgacggcgttgaaggtcgtgtttgagcacattaccaccaaagatgccgcagagtacgttcgcgacggcaacgagctgttagccgccaccatcacgccacagcatctgctgtttaatcgcaaccatatgctggtcggcggcattcgcccgcatctgtattgcctgccgatcctcaaacgtaacgtccaccagcaggccttgcgtgaactggttgccagcggatttagccgtgccttcctcggcaccgactctgcgccgcacgcccgtcatcggaaagaaaccagctgcggctgcgcaggctgctttaatgccccgacggcgcttggcagctacgctacggtctttgaagagatgaacgccctcgcgcattttgaagcgttctgctcactcaatgggccacggttctacggcctgccggtcaatgaaacctacgttgaactggtacgcgaagagcagctcgtcccggaaagcatcacgcttgccgatgactcactggtgcccttcctgggcggcgagcgcgtacgctggtcagtaaaataa

SEQ ID NO: 77891 - DNA, 663 bp, Citrobacter koseri
atgccgccaccctttcagttttttctgctggtgcgcggcgtgctggtgccacatgctgctttgtgtcaggattacgacacgggcatcatgttgaggaaccccatgaaaaagattgtctttgccgctgcattgttggttagcggcctgttggttggctgcaaccaactcacgcagtacacggtaagcgagcaagaaattaatcaggcgcttgaaaaacggaataatttttccaaagacattggcttaccgggcatcgcggatgcgcatattgtactgacgaatctcagcagccaaattggccgggaagagcccaacaaagtcacgctaactggtgatgcgaacctggatatgagctccctgtttggcagccagaaagccaccatgaaactgaagctgaaagcgctaccggtctttaacaaagaaaaaggcgcgatttatctgcaagaaatggaagtggtggatgcaaccgtaacgccggaaaaaatgcaatcggtgctgcaaacgctgatgccttacctgaatcagtcgttgcgtaattattttaatcagcaaccggcctacgttttgcgtgaagacagcagcaaaggcgaagcgctggcgaaaaaatatgccaaaggcatagaggtgaaaccgggcgaaatcatcatcccgttcaccgactaa

SEQ ID NO: 77892 - DNA, 648 bp, Citrobacter koseri
gtgaagctttatatttacgatcactgccctttctgcatcaaagcccgcatgattttcggcctgaaaaatattcccgttgagctaaacgtcctggcaaacgacgacgacgcaacgcccacccgcatgatcggcaaaaaaatggcgcccattctgcaaaaggacgacagccgttatctgcccgaaagtatggatatcgtccattatgtggacaaccttgacggcaaacccttgctgatcggaaaacagaaccccgcgattgatgagtggctacgcaaagttaacggttacgccaatcgcctgctccttccgcgtttcgcaaaatcggcatttgatgagttctccacgccgtcggcgcggaaatacttcaccgagaaaaaagaggccatgattggcgactttggcgaaaatctggcgcattccagtgggctcatcaaaaacatcagcgacgatctgcgcgcgctggataaattgattgtgcagcccaatgccgtgaacggtgaactgtctgaagacgatattcatctgttcccgttattacgtaacctgacgctggtcgcaggcataaactggccaacccgggtcgctgattaccgtgataacatggcaaaacagacgcaaatcaacctgttatcgtctatggccctctaa

SEQ ID NO: 77893 - DNA, 1209 bp, Citrobacter koseri
atgtcgcgtgtctcgcaggccaggaacctgggtaaatatttcctgctcatcgataatatgctggtcgtattaggctttttcgtggtgtttccactgatctccattcgctttgtcgaccagatgggctgggcggcattgatggtcggcattgcgctcggcctgcgccagttcatccagcaagggctgggcatttttggcggcgcgattgccgaccgttttggcgcgaagccaatgattgttaccgggatgcttatgcgcgcagccggattcgcgacgatggggatcgcccatgagccctggctgctctggttttcctgctttctttccgggcttggcggcacccttttcgatccgccgcgctctgcgctggtcgtcaagctgattcgccctgaacaacgcggtcgtttcttttcgctgttgatgatgcaggacagcgcgggtgccgtgactggcgcgctattgggtagctggttgttgcagtacgattttcgtctggtatgcgcgacgggagcggtactgttcgttttgtgcgccgcgtttaacgcctggctgcttccggcgtggaagctgtcaacggtgaaaatcccggtacgcgagggcatggggcgcgtcatggcggacaaacggttcgtgacttacgtactgaccctggcgggatactacatgctggccgtacaggtgatgctgatgctgcccatcatggtcaatgacatcgcgggatcaccgtccgccgtcaagtggatgtatgcgatcgaagcctgcctctcgctgacgctgctctacccaatcgcccgctggagcgagaaacgttttcgcctggagcaccgcctgatggccggactgctgctgatgtcgctcagtatgttgcctgtcgggctggtcggtaatttacagcagctcttcacgctcatttgcacgttctatatcggttcggtcattgcagaaccggcgcgtgaaacgctcagcgcctcgctggccgatgcgcgggcgcgcggcagctatatgggcttcagtcgactgggtttagccattggcggcgcgatagggtatatcggcggaggatggttgttcgatatggggaaagcgctgcaacagcctgaactgccctggatgatgcttggggtaatcggaatcatgacctttcttgcgctcggctggcaattcagccacaaacggacgccacgcggcatgctggagccaggcgcctga

SEQ ID NO: 77894 - DNA, 585 bp, Citrobacter koseri
atgtttggctatcgcagtaacgtgccaaaagtacgcttaacaaccgaccgtctggttgtgcgtttagtacatgagcgtgatgcctggcgtctggctgattattacgcggaaaatcgtcattttttaaaaccctgggaacccgttcgtgatgaaagccactgctatccttcgggctggcaggcgcgtctgagcatgatcgccgagtttcataaacagggttcagcgttctatttcgcgctgctcgacccggaagagaaagagatcatcggcgtggccaatttttctaacgtggtgcgtggctcattccacgcctgttatctgggatactccatcgcacaaaagtggcaggggcaggggctgatgtatgaggccttaacctcggcgattcgctatatgcagcgtacgcaacatattcaccgtattatggctaactatatgccgcataataagcgcagtggcgacttgctggcgcgactcggctttgaaaaagaagggtatgcgaaagattacctgttgattgacggacagtggcgcgatcatgtgctgacggcgttgacgacgactgaatggacccccggtcgctaa

SEQ ID NO: 77895 - DNA, 648 bp, Citrobacter koseri
atgaaatacgaactaaccgccactgaagcgcgagtgattggctgcctgctggaaaaacaggtgacaacgccggagcagtacccgctctcggttaacggcgtggttaccgcctgcaatcaaaaaaccaaccgtgaaccggtaatgaacttatcggaacatgaggtgcaggaacagcttgataacctggtgaaacgccattttctgcgaacggtgagcggcttcggcaatcgcgtcaccaaatatgaacagcgcttctgcaactccgagtttggcaatcttaaactgagtccggcggaggtggcgctgatcgctacgctgctgctgcgcggcgcccagacgccaggtgaactgcgcagccgtgcatcccgcatgtatgaattcagcgatatggcggaagtggaatcgacgctggaacagcttgccgcccgtgacgatggcccttacgtagtgcgcctggcgcgcgaaccgggtaagcgtgaaagccggtatatgcacctgttttgcggcgaagtcgatgagccggtgagttcagatgacgcgccgcaggcggcgtcgggcgatctgcatgcgcgcgttgaggcgctggaaggcgaagtcgcggaactgaaacagcgccttgattcgctcctggcgcacctgggagactaa

SEQ ID NO: 77896 - DNA, 924 bp, Citrobacter koseri
gtgaaaaaattacgtatcggtgttgttgggttaggggggatcgcccaaaaagcctggttgcccgtgctgggcgcatccggcgactggacgctacagggggcctggtctccttcgcgggataaggcgctgcgcatttgtgaaggctggcggatgccgtacgttgagtcgttgccagcgctggcgtcaacctgcgacgccattttcgtccactccagcacggcgacgcattatgaggtggtgagcgaactgctcaatgccggggttcatgtctgcgtcgataaaccgctggcggaaaacctgcgcgatgcggaacggctggtggcgttggccgcgcgcaaaaatttgacgctaatggtcgggtttaaccgacgcttcgctccgctctaccgcgatctgaaagcgcaactgggcgccgccgcttctgtccgtatggataaacaccggacggacagcgtcgggccgcatgatttgcgtttcacgctgctggatgactacctgcacgttgtggacaccgcgctgtggctgacggacggcaaggcgcaactgaacggcggcacgttgcagaccaacgatcttggtgagatgctgtatgccgagcaccattttggggcggatcagttgcaaatcaccaccagtatgcaccgtcgcgccgggagtcagcgtgaatgtgtgcaggcggtgacggacggtggcctgtttgacgtgacggacatgcgcgaatggcgcgaggaacgcggtcagggcgtggtgcataaacccattccgggctggcagacaacccaggaacaacggggatttgccggatgcgcccgtcattttattgaatgcgtgcaaaatcagacggttcctgaaacggcgggcgaacaggcgattctggcgcagcgcgtcgtagagaaactctggcgcgaggcaatgagcgaataa

SEQ ID NO: 77897 - DNA, 1602 bp, Citrobacter koseri
atgcctttatccggcctgcggtcggccatgcaagggttttgctccagggtctggaatacaacactgatgaatttattaaaatcgctggctgccgtcagctcgatgaccatgttttcgcgcgtgcttggttttgcgcgtgacgcgattgtcgccagaatttttggcgcagggatggcgaccgacgcctttttcgtggcattcaagttaccgaatctgttgcggcgcatttttgccgaaggggcattttcccaggcgtttgtgccgatccttgcagaatacaagagcaagcagggcgaagaggcgacccgggtttttgtctcctatgtctccggcctgctgaccctggcgttagccgtggtgacggtggccggtatgctcgccgcgccgtgggtgatcatggtaaccgcgccgggttttgctgataccgctgataaattcgccctgaccaccaaactgctgcaaatcacctttccgtatattctgctgatttcgctggcctcgctggtgggcgcgatcctcaacacctggaaccgtttctcgattcctgcgtttgcgcccacatttctgaacatcagtatgatcggctttgcgctgtttgccgcgccgtattttaatcctcccgtactggcgctggcctgggcggtgacggtgggcggcgtgctgcaactggtttaccagcttcctcatctgaagaaaattgggatgctggtattgccgcgcatcaattttcgtgacgcaggcgcgatgcgcgttgtgaagcaaatgggcccggcgatcctcggcgtttcggtaagccagatatctctgatcatcaacaccattttcgcctcgtttctggcttccggttcggtctcctggatgtattatgctgaccgactgatggagtttccgtcaggggttctgggcgtggcgctgggcaccattttgctgccttcactgtctaaaagttttgccagcggcaatcatgatgagtattgccgtctgatggactgggggctgcgtctgtgttttctgctggcgttgccgagcgccgtcgcgctgggcattctggccaaaccgctgacggtatcgctgttccagtacggcaaattcaccgcctttgatgcgtcgatgacccagcgcgcgctggtggcctattccgttggtctgatcggcttaattgtggtgaaagttttggctccgggattttactcgcgccaggatatcaaaacgccggtcagaatcgccattgtgacgctgatcatgactcagttgatgaacctggcgtttatcgggccgttgaagcatgccggtctgtcgctgtctattggtctggcggcgtgtctgaatgcgtcgctgctgtactggcaactgcgcaaacagaaaatctttactccgcagccgggctggacgtggttcctgactcgcctggtgatttccgtgctggtgatgtccgccgcgctggttggcatgttgcatattatgcctgagtggtcagaagggacgatgctgtggcgtctggcccgactgatggcggttgtggttgtggggatttccgcctatttcgccgcgctggcggtgttgggctttaaagtgaaggaatttactcgccggacggcatag

SEQ ID NO: 77898 - DNA, 423 bp, Citrobacter koseri
atgactcgtctgtcagaaattctggatcatatgacggctgtcctcaatgacctgaaaaaggtgatggatgccgagcagcagcagctctccgtaggtcacattaacggtagccagttacagcgtattacagaagaaaaaagctctttactggcgacgctggattatctggagcagcagcgccgtcttgaacaagatgcgcagcgtaacgttaatgatgatgtcgccagacgctggcaggcgattacggaaaaaacgcagcatttacgcgatctcaaccaacataatggttggctgctggaagggcagattgaacggaatcatcaggcgctcgacatgctgaaaccgcatcaggaaccgacgctatatggcgcgaacggtcaaaccgcctctccccaccgcggcgggaaaaaaatctctatctga

SEQ ID NO: 77899 - DNA, 294 bp, Citrobacter koseri
atgagcattgaccgtacctcacctttgaagcccgttagcactgtccaaccgcgcgaaaccagcgatgcgccggtacaaaaagcgcgtcaggaaaaagcgtcaaccacgaccagtaccagtgtgaagttaagcgatgctcaggcgaaactgatgcaacccggcaccggcgatatcaatatggagcgcgtggaaaccctgaaaacggcgattcgtaacggtgagttgaagatggacaccggtaaaattgcagactcgctgatccgcgaggcgcagagctacttacagagtaaataa

SEQ ID NO: 77900 - DNA, 660 bp, Citrobacter koseri
atgcaaacgttaaaacgtggaatagcgctgctggcgctgctgttcagccccctgacgatggcccaggatctgaatgcccagttaacggactggttttctcagcgtctggcagggttcagcgatgacgtcgtcgtcacgatccgcacgtcgcccaatctgttgccgaattgcgaacagcccgcgctgagcgtaaccggaagcgcgaagttatgggggcatgtgaacgtactggcgcgctgcgcgaacgaaaagcgctacctacaggtaaatgtacaggcaacggggaattacgttgttgccgcggcccccgtcgcccgtggcggtgcgcttggcccggctaacatcacgctaaaacgcggacggctggatcagcttcccccgcgaaccgtcctggacatcaaccagattcaggacgctgtcagcttgcgcgacctcgttcccgggcagccaatacagctcagtatgttgcgccaggcatggcggataaaagccggtcagcgcgttctggtggtggcgaacggcgacggatttagcgtcaatgcggaaggccaggcactgaacaatgccgccgtcgcgcaaaacgcgcgcgtacgcatgttgtcaggccaggtcgtgagtggaaccgtcgatcctgatgggaatattcttattaatctataa

SEQ ID NO: 77901 - DNA, 417 bp, Citrobacter koseri
atgctcgataagctcgatgccgccttacgttttcaacaggaagcgctgaatctgcgcgctcaacgccaggaggtgttggccgctaatatcgctaacgccgacacccctgggtatcaggcgcgtgatatggatttcgccagcgaactcaaaaaagtcatggtgcgtggccgggaagaaaccggcgggatcgcgttgaagctcacctctgcacaacacattccggcccagaccgtcgcgtctccttcggtggatctgctctaccgtattcctgaccagccgtcccttgatggcaataccgtcgatatggaccgcgagcgtacgcagtttgcggataacagtctgaaataccagacgggcctcaccgtgttgggtggacaaatcaaaggcatgatgaatgtgctgcaaggaggaaactaa

SEQ ID NO: 77902 - DNA, 405 bp, Citrobacter koseri
gtggcgctgttaaacatttttgatattgccgggtcggcgctcaccgcgcagtccaaacgtcttaacgtggcggccagtaacctggcgaacgccgatagcgtcaccgggccggacggtcagccgtatcgcgctaaacaggtggtctttcaggtagacgcggcgccaggggcggcaaccggtggggtaaaagtggcggatgtcattgaaagtcaggcgccggacaaactggtgtatgagcctggcaacccgctggcggacgccaatgggtacgtaaaaatgcctaatgtggacgtggtcggtgaaatggtcaacaccatgtcagcctcgcgcagctatcaggcaaacgtcgaagttcttaataccgtgaaaagcatgatgcttaaaacgctgacattaggccagtaa

SEQ ID NO: 77903 - DNA, 699 bp, Citrobacter koseri; identical to SEQ ID NO: 73412

SEQ ID NO: 77904 - DNA, 1206 bp, Citrobacter koseri
atggccttttctcaagcggtcagcggtctgaacgcagcagcgaccaacctcgatgttattggtaataacatcgccaactccgccacctacgggtttaaatccggtacggcgtcttttgctgatatgttcgcgggctccaaagtgggcctgggcgttaaagtcgccgggattacccaggactttaccgacggcactaccaccaacaccgggcgtggcctggatgttgcgattagccagaacggtttcttccgtctggtagacagcaacggctccgttttctacagccgtaacggccagttcaaactggatgagaaccgcaatctggttaacatgcaggggctgcaactgaccggctatccggcaaccggaacgccgccgacgatccagcagggggcgaacccaggcccgatcaccatcccgaacaccctgatggccgcgaaggcgactaccacggcgtctatgcagatcaaccttaactccagcgatgaactgccgtcgaaaacgccgtttgatccgagcgatgcggattcctataacaaaaagggtaccgttaccgtttttgacagtcagggtaacgcccatgatgtgaatgtgttctttgttaagacgcaggacaacacctgggaagttcacaccatggacagcagcgatccaaccgcgacgccgacgttgtctaccacgatggaattcaatgaaaacgggatgctggtttctggcggttccgccaatatcgtcactggcgcaattaatggtgcggacccagcctctttctccctgagcttcctgaattccatgcagcagaacaccggtgcgaacaacatcgtcgcgaccaaccagaacggctataagccgggcgatctggtgagctatcagatcaacgatgacggcaccgtagtgggtaactattccaacgaacaaacgcaggttctggggcagatcgtgctggctaacttcgccaacaatgaaggtctggcttctcagggtgataacgtctgggcggcgacgcaggcttcaggcgttgcgctgcttggtacggcgggtacgggtaacttcggtaagttgaccaacggcgcgctggaatcctcaaacgtggatttgagtaaagagctggtgaatatgatcgtcgcgcagcgtaactatcagtcaaacgcgcagaccatcaaaacccaggatcagatcctcaacaccctggttaacctgcgctaa

SEQ ID NO: 77905 - DNA, 756 bp, Citrobacter koseri
atggatcacgcaatatataccgccatgggcgcggccagtcagacgcttaatcaacaagcggtgacggccagcaacctggcgaacgcctccacgccgggttttcgtgcgcaacttaatgcgttgcgcgcggtgccggtggaaggtctctctttaccaacgcgtacgctggtggccgcatccacgccgggagccgatatgacgcccgggcagatggattacacctcgcgcccgctggatgtggcgctgcaacaggatggctggctggttgttcagaccgctgatggtaacgagggatacacccgtaacggcagcattcaggtagacccgaccgggcaactgacaattcaggggcatccggttatcggtgaagccgggccgattgctgttcctgaaggttcagaaatcactatcgcggcagacgggactatctctgcgcttaaccctggcgatccggccaataccgtcgcaccggtaggacgtctgaagctggtgaaagcgcttggcagcgaagtgcaacgcggcgatgacggtatgttccgtttaagcgcggcgacacaggctgcgcgtggcccggtgttgcaggctgacccgtccattcgcgtgatgtctggcgtactggagggcagtaacgtgaatgcggtgtccgccatgagcgatatgatcgctaacgcccgccgttttgaaatgcagatgaaggttatcagcagcgtggatgacaatgccgggcgcgctaaccaactgctgtcgatgagttaa

SEQ ID NO: 77906 - DNA, 783 bp, Citrobacter koseri
atgatcagttcattatggatcgccaaaaccggcctggacgcgcagcaaaccaacatggatgtgattgccaacaacctggcaaacgtcagcaccaatggttttaagcgtcaacgcgcggtgtttgaagacctgctgtaccagacgattcgtcagcctggcgcgcagtcgtcagaacagacgaccttaccttctggtctgcaaatcggtacgggcgttcgcccggtcgccaccgagcgtctgcatagtcagggcaacctgtctcagaccaacaacagtaaagatgtcgccatcaaagggcagggcttcttccaggtgatgctgccggatggcacttctgcttatacccgtgacggttctttccaggtggatcagaacggccaactggtcacggcgggtggcttccaggtacagccagcgatcaccattccggcgaactcgctgagcatcaccgtgggtcgcgatggcgtggtaagcgtaactcagcaggggcaggccgcgccggtacaggtggggcagcttaacctgaccacgttcatgaacgatacgggtctggaaagcattggtgaaaacctgtacaccgaaacgcaatcctcgggtgcgccgaatgagagtacgccagggcttaacggtgcgggtctgctgtatcagggctatgtcgaaacctctaacgtaaacgtggcggaagaattggtgaatatgatccaggttcagcgcgcttacgaaattaacagcaaagcggtatcgactaccgatcagatgctgcaaaaactgacgcaactctaa

SEQ ID NO: 77907 - DNA, 753 bp, Citrobacter koseri
gtgtcgtccggtgagggaaacctcaccggcacactgattttgaagatgaaggcaatgcaaaaatacgctgcgcaccattacccgattatggccctgctggtggtttcactgacaggatgtgcctggataccttccacaccgctcgtgcagggcgcgaccactgcacagcccataccgggcccgactccggtggcgaatggttccatttttcagtctgcgcagccgatcaactatggctatcagccgctgtttgaagaccggcgtccacgcaatatcggcgatacgctgacgattgtattgcaggaaaacgtcagcgccagtaagagctcctccgccaatgccagccgtgacggtaaaaccaacttcggctttgatacggttcctcgttatttgcagggattgttcggcaacgcgcgtgcagatatggaagcctctggcgggaactccttcaacggtaaaggcggcgcgaacgccagcaatacctttagcggcacgctgaccgtaaccgtcgatcaggtactggcaaatggcaatttacacgtcgtgggtgaaaaacagatcgccattaatcagggcactgagttcatccgcttctccggggtcgtgaacccacgcaccatcagcggcagcaactccgttccgtcaacacaggttgcggatgcgcgcattgaatatgtcggcaacggctatatcaacgaggcgcaaaatatgggttggctgcaacgtttcttccttaacttgtcgccgatgtaa

SEQ ID NO: 77908 - DNA, 1098 bp, Citrobacter koseri
gtgtttaaatctcttgttggaattgtactgatactggcaaccaccctggcgcatgccgatcgtattcgggatctgaccagcgtgcagggggtgcgggaaaactcgctgattggttatgggctggtggtcggcctggacgggacgggcgaccagacgacccagacgccctttaccacccagacgctgaataacatgctgtctcagttggggatcaccgtcccgacgggcaccaatatgcagttgaaaaacgttgcggcggtaatggtcacggcgcaatttccggcattcggtcgccaggggcaaacgatcgacgtggtggtgtcctcaatggggaacgcgaaaagtctgcgcggcggtacattgctgatgacgccgctgaaaggggtcgatagccaggtgtatgccctggctcagggaaatattttagtcggcggcgcaggggcgtctgcgggcggcagcagcgtacaggttaaccagctcaatggcgggcgtatcaccaatggcgcaattattgaacgcgagctgcccagccagtttggcggcggaaataccctcaatctgcaactgaacaacgaagacttcgcaatggcgcagcagatcactgacaccatcaaccgcgcccgtggctatggcagtgcgaccgcgctggatgcgcgcacgattcaggttcgcgtacccagcggcaacagctcgcaggtccgtttcctggcggatatccagaatctggaggtgaacgtcacaccacaggacgcgaaggtggtgattaactcccgtaccggttccgtggtgatgaaccgtgaagtgacgctggacagctgcgccgtcgcgcaaggcaatttgtccgtaacggtgaatcgccaggcgaacgtcagccagccggacacgccgtttggcggggggcagacggtcgtcacgccacaaacgcagattgatttacgtcagagcggcggttcgctgcaaagcgtccgttccagcgccaacctgaacaacgtcgtccgcgcgctgaatgcgctgggcgccacgccgatggatctgatgtccatcctgcaatccatgcagagcgcgggttgtctgcgcgccaaactggaaattatctga

SEQ ID NO: 77909 - DNA, 951 bp, Citrobacter koseri
atgattggtgacagcaaactgttggccagcgcagcctgggatgcgcaatcgctcaatgagctgaaagccaaagcggggcaagatccggcggcgaatatccgcccggtcgctcgtcaggttgaagggatgtttgtgcagatgatgctgaaaagcatgcgtgaagcgctgccgaaagacggcatattcagcagcgatcaaacgcgactgtacaccagcatgtatgaccagcagattgcgcagcagatgaccgccggtaaagggttgggactggcggagatgatggtcaggcagatgaccgaggggcagacgcagcctgcggaagaagcgccgcaggtaccaatgaagttccctctggaaacggtgaccagctatcaaaatcaggcgctgacgcagctggtgcgtaaggcgatgccaaaagcgccggaaaataatgatgagccgctgtccggcgacagcaaagacttcctggcccagctttcgcttccggcacgcctggcgagtgaacaaagcggcgtgccgcatcatctgattctggcgcaggcggcgctggagtcgggatggggtcagcgacagatccgccgtgaaaatggcgagccgagctttaacctgtttggcattaaggcctcgtccaactggaaggggccggtaacagagatcaccaccaccgaatatgagaacggcgaagcgaagaaggtaaaagcgaaattccgtgtttacagctcctatctggaggcgctatcggattatgtggggctgctgacccgtaacccgcgctatgccgcagtgaccgccgcgtctaccgctgaacagggcgcacaggcgttacaaaatgccggttatgcgaccgatcctgactatgcgcgtaaattaaccagcatgattcaacagctgaaatccatgagcgacaaggtgagcaaaacgtacagcgcgaatctcgacaatctcttttaa

SEQ ID NO: 77910 - DNA, 1635 bp, Citrobacter koseri
atgtccagcttaattaacaacgccatgagcggacttagcgcagcccaggctgcgttaaatactgccagtaataacatctccagctataacgttgccgggtatacccgacagacgacgattatggcgcaggccaacagtacgctgggagcgggcggttgggtcggtaatggcgtctacgtttctggcgtacagcgtgagtatgattcttttattaccaatcagttacgcgcggcgcagaatcagagcagtggtttgaccgtgcggtatgagcaaatgtcgaaaattgataacctgctctccagtaccaccagctcgatttcgacctctctgcaaggtttcttcaccagcctgcaaacgctggtcagcaacgcggaagacccggcagcgcgtcaggcgcttatcggtaaagccgacggcctggtaaaccagtttaaaacgaccgatcagtacctgcgcgatcaggataagcaggtcaatattgccattggctccagcgttgagcagatcaacaattacgcgaagcaaatcgccagcctgaacgatcagatttcccgtctgaccggggtgggcgcgggcgcttcaccgaacgatcttctcgaccaacgcgaccaactggtgagtgagctgaaccagattgtcggtgtggaagttagcgtccaggacggcggcacctataacctgacgatggcgaatggctataccctcgtgcagggcagcagcgcccgtcaactggccgcggtgccgtccagcgccgatccgtcacgcaccacggtcgcctatgttgatgcgactgccggaaacattgaaatcccggaaaaattgctcaatagcggctcgcttggcgggttgctgacgttccgctctcaggatctggatcagactcgcaataccctcaaccagctggcgctggcctttgccgaagcgtttaatgcccagcataaacagggatatgatgccaatggcgatcagggcgaggacttcttttccatcggtaaaccgtccgtattgagtaatgcgaaaaatacgggtagcggaaccttgtctgcggaagtcaccgacagttccgcggtacaggctaccaattataagctggtatttgatggtcaggactggcaggtcacgcgcttgtcagacaacaccagctttaaggcggttgaaaccaacgggaaactgacgtttgacgggctggaagtgacggtcggggcaggggcaaatgcgaatgacagctttaccctgaaaccggtcagcgatgccattgtgaacatgaacgtgctggtgaccgatgaatccaaaattgcgatggcttccgatcccgatgcgggtgggagcgataaccgtaacggtcaggcgctgctggatttacaaacccagaaaacggtaggcaataagtcctttaatgatgcttatgcgacgatggtcagtgatgtggggaacaaaaccgccacgttgaaaaccagcagcacggcgcagggcaatgtcgtgacgcagttgtacaaccagcagcaatcgatttccggcgttaaccttgatgaagaatacggcaacctgcaacgctaccaacagtattacctggcgaacgcccaggtgctgcaaaccgcgaatacgctgtttgatgcgctgttgggcattcgctaa

SEQ ID NO: 77911 - DNA, 954 bp, Citrobacter koseri
atgcgtatcagtacccagatgatgtaccagcagaatatgcgtggtatcaccaattcccaggctgaatggatgaagtacggtgagcagatgtccaccggtaagcgcgtgattaatccgtccgacgatcctattgccgcttctcaggctatcgtactcgctcaggcccaggctcagaacagtcagtatgcgctggcacgtacctttgcgactcagaaagtgtcgctggaagaaaacgtgctaagtcaggtgacagctgcaattcaaactgcgcaggaaaaaatcgtttacgccgctaacggcaccttaagcgatgatgaccgcgcctcgctggcgagcgatctacaggggattcgcgatcagttaatgaaccttgccaacagtaccgacggcaacggtcgttacattttcgcaggctataaaactgaaaaagcgccgtttgatcaggcaaatggcgactatagcggtggcactgaaaacatcacccagcaggttgatgcttcgcgtacgatggtgattggtcatacgggcgatcagatttttaatcgtattaccagtaatgccgtaccggagcctgataacagcgcttcagaaaccagcctgtttgcgatgctggatacagccattgcagcgctgaaaacgccggttgctgacgatgatgtgaagaaggcggaagctgctgcggcgattgataaaacaaaccgtggcctgaaaaactcccttaataacgtcctgaccgttcgtgcggaactgggaacgcaattgagtgagctggattccctggattcattgggaagcgagcgcgcactgggtcaggcgcagcagatgagcgatctggtcgatgtggactggaacgcggccatctcgtcgtatgtaatgcaacaggctgcgttacaggcgtcctataaagcgtttagcgatatgcaaggaatgtctctgtttcagttgaacagatag

SEQ ID NO: 77912 - DNA, 3204 bp, Citrobacter koseri
atgaaaagaatgttaatcaacgcaactcagcaggaagagttgcgtgttgcccttgtagatgggcagcgcctgtacgacctggacattgagagtccaggacacgagcagaaaaaagcgaacatctataaaggcaaaattacccgtatcgaaccgagtctggaagcggcttttgttgattacggcgctgaacgtcacggtttcctcccgttaaaagaaattgcccgcgaatatttccccgccaactacaacgcccacggccgtccaaacattaaagatgtgttgcgcgaaggtcaggaagtgattgttcagattgataaagaagaacgcggcaacaaaggcgctgcactgacgacgtttatcagtctggcagggagctatctggttttaatgccgaacaacccgcgcgcgggcggcatctcccgtcgcattgaaggcgacgatcgcaccgaattaaaagaagcgctggcaagcctcgaactgcctgacggcatggggcttatcgtgcgtaccgcaggcgtcggcaaatccgccgaagcgttgcagtgggacctgagcttccgcctgaaacactgggaagcgattcagaaagccgctgaaagccgccctgctccattcctgatccatcaggaaagcaacgttatcgtccgcgcattccgtgactacttacgtcaggatatcggcgaaattcttatcgataatccgaaagtgcttgagctggcgcgccagcacatcgcggcgttgggtcgcccggatttcagcagcaagattaagctttacaccggcgaaattccgctgttcagccactaccagatcgagtcgcaaattgaatccgccttccagcgtgaagtgcgtctgccttccggcggctctatcgttatcgacacaaccgaagcgttaaccgcgattgatattaactccgcgcgtgccacacgcggcggcgatatcgaagaaaccgcgtttaacacaaacctggaagcggccgatgaaattgctcgccagttgcgcttgcgcgacctcggcggcctgatcgttatcgacttcatcgacatgacgccagtacgccaccagcgtgcggtggaaaaccgtctgcgcgaagcggtacgtcaggatcgtgcgcgtatccagattagccatatttctcgttttggcctgctggagatgtcccgccagcgtctcagcccgtctctgggcgagtccagccatcacgtctgcccacgctgtagcggcaccggcaccgtccgcgacaacgaatcgctctccctgtctattctgcgtctgattgaagaagaagcgctgaaagagaatacccaggaagttcacgccattgttccggtcccgatcgcctcttacctgcttaacgaaaagcgcaccgcggttaatgctattgagactcgtcaggatggcgtgcgctgcgtgatcgtaccaaacgatcagatggaaacgccgcactactccgttctgcgcgtacgtaaaggggaagaaacgccaaccctgagctacatgctgccgaaactgcatgaagaagcgatggcgttgccttctgaagaagagtacgccgagcgtaaacgccctgaacaaccagcactggcgaccttcgcgatgccggaagtgccgcctgcgccgacgccagcagaacctgcggtgaaagcagcgacggcagcaccgaaagccgttgccactgcgcctgcacagccaggtctgcttacccgcttcttcggcgcgctgaaaaacatgttcagcggcagcgaagtcgccaagccgattgaacaacctgcaccgaaagcagaagaaaaaccggagcgtcagcaggatcgccgtaagtctcgccagaataatcgccgcgaccgtaacgatcgccgtgacaaccgtgataatcgcgacaaccgcgctgaaggcggtgaaaaccgtgatgacaaccgtcgtaaccgtcgtcaggcgcagcagcagaacgcagaagcgcgtgacaaccgccagcagtctaacgacgttgccgataaggcgaagtccggtgacgagcagcagacgccgcgtcgtgaacgcaaccgtcgtcgcaacgatgaaaaacgtcaggcacagcaagaagtcaaggcgttgaatctggatgagcaaccagctcaggaggcggaacaggaagaacgcgttcgtcaggcgcagcctcgccgcaaacagcgtcagctgagccagaaagttcgttacacagactctgcaacctctgaagcagaagctgtcgcaacaccagtcgttgaagacgctgtcgccgcccagcctgctacgcaaagcgcgcctgctcagcgtactgaactggcgaaagttgacctgccagcgatcgcagacgttgcaccagcagagcaggaagaaaacggcgaagcgcgtgataacgcaggaatgccgcgtcgctcccgtcgttctcctcgccacctgcgcgtcagcggccagcgtcgtcgtcgctaccgcgatgagcgttacccgcttcaatcgccaatgccgttaaccgtcgcttgcgcttcaccggaaatggcgtctggcaaagtgtggattcgctaccctgtcgcccgtcctcaggatacgcaggttgaagcacagcacgaagaagagaccgtacaagctcagccggttgcagtagagccgcaggtcgtcgctgccgcagccgaacaggttgtagacgcaccggttcaaactgaaaccgttgtcgctgaacctcagcccgctactgtggaaacaacgcatcctgaagtgattgccaccccgattgaagaacaacctcaggtgattgcagaggctgacgtccctgttgcgcaggaagtcgctgcacaagcggaacctgtcgctgacgttcaggaacccacgacggctgaagaatccgctgacgttgtcatcgccgaaccggaagagattgttaaagaaacggttgaacctgtcgtggttgccgctgaaccggaagagattgtcgctgcgcctgtcgccgttgccattgccgttgctgaaaccgtgtcagaaagcgcggtaaccaccggggagaaacccgtcagccacgccagtgcgccgatgacccgcgcgcctgcgccggaatatgtcccggaagcgccacatcacagcgactggcagcgccctgccttcatctttgaaggtaaaggtgcggcaggtggtcatagcgcaacgcatcaggccgccgcaccagccacgcgcccgcagcctgtagaataa

SEQ ID NO: 77913 - DNA, 996 bp, Citrobacter koseri
atgagtggcgctaatccttatggctatttagaatcggcccccatgaaaactgagactccatccgtaaaaatagttgccattactgccgacgaagcggggcaacgcatcgataactttttgcgcacgcaactcaaaggcgtaccgaaaagcatgatttaccgcattttgcgtaaaggcgaagtgcgggtgaacaaaaaacgcatcaaaccggaatataagctcgaagccggggatgaagtgcgtattccgccggtgcgcgtcgccgaacgcgaagaagaggccgtttcgccgcatttgcaaaaagtggcggcgctggccgatgtcattttgtatgaagatgaccatatcctggtgctgaacaaaccttccggcacggcggtgcatggcggaagcgggttgagcttcggcgttattgaggggctgcgcgcgttgcggccagaagcgcgtttcctggaactggtgcatcgtcttgaccgcgatacctctggcgtactgctggttgcgaaaaaacgctcagcgctgcgttctttgcatgagcaactgcgtgagaaggggatgcagaaagattatctggcgctggttcgcggccagtggcagtcgcatgttaaatcggtacaggcgcctttattaaagaatattctgcaaagcggcgaacgtattgtacgtgtgagtcaggaaggaaaaccctccgaaacgcgctttaaggttgaagagcgctatgcgtttgcgacgctggtgcgctgtagcccggtgacaggacgtacgcatcagattcgtgtgcatacgctgcatgcgggccatccgatcgcgtttgacgatcgttacggcgatcgcgaatttgataagcagcttgcgggaacggggctgtcacggctttttctgcacgcggcagcgctgaagtttacccatccggggactggcgaggtgatgcgtatcgaagcgccgatggataaccaactcaagcattgccttcaggtgttacgtaacaaagcctga

SEQ ID NO: 77914 - DNA, 585 bp, Citrobacter koseri; identical to SEQ ID NO: 73401

SEQ ID NO: 77915 - DNA, 522 bp, Citrobacter koseri; identical to SEQ ID NO: 73400

SEQ ID NO: 77916 - DNA, 174 bp, Citrobacter koseri; identical to SEQ ID NO: 73399

SEQ ID NO: 77917 - DNA, 1134 bp, Citrobacter koseri
gtgaggatttccccgcgtaagcggggaaacaccaaaccaggcagcgacgataccttgacacgtctaaccctggcgttagatgtcatggggggagattttggcccttccgtgacagtgcctgcagcactgcaggcactgaattctaattcgcaactcacacttcttttagtcggggatcccgataccatcacgccattacttgccaaagctgactttgaacaacgttcgcgtctgcagattatccctgcacagtcagttattgccagtgatgcccggccttcgcaggctatccgcgccagtcgcggcagctcaatgcgtgtggccctggagctcgtgaaagaaggtcgagccgaagcctgtgtgagcgccggtaatacgggcgcgctcatgggacttgcgaaattattgctcaaaccccttgagggcattgagcgtcctgcgttgatgacggttttaccgcatcagcagaaaggaaaaacggtggtgctggatttaggcgccaacgtcgattgtgacagtaccatgttggtgcagtttgccgtgatggggtccgtgatggcggaagaggtgattgggataaccaatccccgcgtggcgttgctcaatattggtgaagaagaaaccaaaggtctcgacagtattcgtgatgcctctgcgttgctcaaaacagtcccttccatcaattacattggttatcttgaagccaatgaattattgacgggaaaaactgatgtgctggtatgtgacggatttacaggtaatgtcacattaaagacaatggaaggggttgtcaggatgttcctttcactgctgaaatctcagggtgagagtaaaaaacggtcgtggtggctgctgttattaaaacgttggttacaaaaaagcctgacgaggcgattcagtcacctcaaccccgaccagtataatggcgcctgtctgttaggattgcgtggcacggtgattaaaagtcatggtgcggccaatcagcgagcatttgccgtcgcgattgaacaggcagtgcaggcggtgcagcgacaagttcctcagcgaattgccgctcgcctggaatctgtatacccagccggattcgaactgttggaaggtggcaaaaacggacactcacgggtgcacaattaa

SEQ ID NO: 77918 - DNA, 954 bp, Citrobacter koseri
atgtatacaaagattattggtactggcagctatctgcctgaacaagtgcgtactaacgccgatttggaaaagatggtagagacgtctgacgagtggattgtcacgcgtacaggcatccgtgaacgccatattgcagcgccaaacgaaacagtcgcgacgatgggctatacagccgcaaaccgcgcgcttgaaatggcgggcatcgataaagaccagattggcttgattgtggtggcgaccacgtcagcaacacatgctttcccaagcgcagcatgccagattcagagcatgttgggcattaaaggctgcccagcgtttgacgttgcagcggcctgcgccggttttacctacgcgttaagcgttgccgatcagtatgtaaaatcaggcgccgttaaatatgcgctggtcatcggttccgatgtcctggcgcgcacctgcgatcccaccgatcgcgggacgatcattatctttggtgacggcgcgggcgcagcggttctgagcgcatccgaagaaccaggcattatttcgacgcatcttcatgcagacggcagctatggtgagttgctgacgctgccaaacgccgatcgcgtcaatccagaaaatccgatttatctgacgatggcgggcaacgaggtgtttaaagtggcggtaactgaactggcacacatcgttgacgagacgctggcggcgaataatctggatcgttccgctctggactggctggttccgcaccaggctaacctgcgcatcatcagcgcgacagcgaaaaagctgggtatgtcgatggataatgtggtggttacgctggacagacacggcaacacctctgcggcctctgtgccgtgcgcgctggatgaagccgtgcgcgacgggcggattaaagccgggcagttggtattgcttgaggccttcgggggtggattcacctggggctccgcgctggttcgtttctag

SEQ ID NO: 77919 - DNA, 930 bp, Citrobacter koseri
atgacgcaatttgcttttgtgttcccggggcagggttcccagacggttgggatgttgtctgaaatggcagccagctacccgatcgtagaagaaacctttgctgaagcttctgcggcgctgggttatgatctgtgggcgctgacgcagcaagggcctgcggaagaactgaataagacctggcagactcagccagcattgctggccgcttccgttgcgctgtatcgcgtatggcagcagcagggcggtaaagcgcctgcgctgatggcgggacacagcctgggggaatactccgcgctggtatgcgctggcgtcatcgatttcgccgacgcggttcgtctggttgaactgcgcggcaaattcatgcaggaagctgtgccggaaggcaccggcgcaatggcggcgatcatcggtctggatgatgcgtccatcgccaaagcgtgtgaagaggcggctgaaggccaggtggtttctccggtgaactttaactctccgggccaggtggttatcgccgggcataaagacgcggttgaacgtgcgggcgcagcctgtaaagccgctggcgcaaaacgtgcgctgccgctgccggtaagcgtgccgtcacactgtgcgctgatgaaacctgcggctgataagctggcggttgaattagcgaaaatcaccttcaatgccccgaccgtaccggttgtgaataacgttgacgtgaagtgtgaaaccgacgctaacgctatccgtgatgcgctggtacgccagctgtacaacccggtgcagtggacgaagagtgtagaatttatcgcagcacaaggtgttgaacacctttatgaagtgggtccaggtaaagtcctcactggtctgactaaacgtattgttgacaccctgacggcctcggcgctaaacgaaccggcggcactgtcagcggcgcttgagcaataa

SEQ ID NO: 77920 - DNA, 735 bp, Citrobacter koseri
atgagttttgaaggaaaagtcgcgctggttaccggtgcaagccgtggcattggccgcgcaattgctgagacgctcgttgcccgtggcgcgaaagtcatcggtactgctaccagcgaaaatggcgctcaggccattagcgaatacttaggtgcgaacggtaaaggtctgatgttgaatgtgaccgatccggcatctattgaatctgttctggaaaatattcgcgcagaatttggtgaagttgatatcctggtcaataatgccggtatcactcgcgataatctgctgatgcgaatgaaagatgatgagtggaacgatattctcgaaaccaatctgtcatctgttttccgtctgtcaaaagcggtaatgcgcgctatgatgaaaaaacgtcatggacgtattatcactatcggttctgtggttggtaccatgggaaatgcgggtcaggccaactacgctgcggcgaaagcgggtctgattggcttcagtaaatcactggcgcgtgaagttgcgtcgcgtgggattactgtcaatgttgtggctccgggctttattgaaacggacatgacgcgtgcgctgtctgatgatcagcgtgcgggtattctggcgcaggttcctgcgggtcgcctcggcggcgctcaggaaatcgccagtgcggttgcatttttagcctctgacgaagcaagttacatcactggtgagactctgcacgtcaacggcggaatgtatatggtttaa

SEQ ID NO: 77921 - DNA, 237 bp, Citrobacter koseri; identical to SEQ ID NO: 73394

SEQ ID NO: 77922 - DNA, 1242 bp, Citrobacter koseri
gtgtctaagcgtcgtgtagttgtgaccggactgggcatgttgtctcctgtcggcaataccgtagagtctacctggaaagctctccttgccggtcagagtggcatcagcctgatcgaccatttcgatactagcgcctatgcaacgaaatttgctggcttagtaaaggattttaactgtgacgacatcatctcgcgcaaagaacagcgcaagatggatgccttcattcaatatggaattgtcgctggcgttcaggccatgcaggattctggccttgaagtaacggaagagaacgcagcccgtattggcgccgctatcggctctggtatcggcggtctcggactgatcgaagaaaaccacagttccctggtgaacggtgggccgcgtaagatcagcccgttctttgttccgtcgacgattgttaacatggtggcaggtcacctgaccatcatgtacggcctgcgtgggccaagcatctctatcgctaccgcctgcacctcaggcgtacataacatcggtcatgccgcgcgtatcattgcatacggcgatgcggacgcgatggtagcgggtggtgcggaaaaagccagtacgccgctgggtgtcggtggctttggcgcagcgcgtgcgctgtctacacgtaatgataacccgcaagcggccagccgcccgtgggataaagagcgtgacggctttgttctcggcgatggcgcgggcatggtggtactggaagagtacgaacatgcaaaagcgcgcggcgcgaaaatttatgccgaaatcgttggcttcgggatgagcagcgatgcttatcacatgacgtcaccgccggaaaacggcgcgggcgccgcgctggcgatggtcaatgcgctgcgtgatgcggccattgagccgggtcagattggttacgtcaacgcccacggtacgtctacgccggcaggcgataaagcggaaactcaggcggtaaaatctgtctttggcgatgcggcaagccgtgtgctggtcagctcgacgaaatccatgacgggtcacttgctgggtgctgcgggcgcggtagagtccattttctctatcctggcgctgcgcgaccaggctgttccgccaaccatcaacctggataacccggatgaaggttgcgacctggactttgtgcctcacgaagctcgtcaggttaacggaatggagtatacgctgtgtaactccttcggctttggcggtactaacggctcgttgatcttcaaaaaggtctaa

SEQ ID NO: 77923 - DNA, 810 bp, Citrobacter koseri
atgttcttaattaatggccgtgaacaggattctcttgccgccagcgatcgcgcgacacagtttggcgatggctgtttcactactgcgcgaatccgtgacggtagaatttgcctcctgcccgcacaccttcgccgtttgcaggatgcctgcgaaaaactgctgcttcccttcagtcaatggacggaactgcaacacgaaatgacggcgatggcagcaggccagaacagtggcgtactgaaagttatcctgagtcgtggcagcggcggcaggggctacagcccgtcaaactgccgtgaggccacgcgaattttatccgtttctccttatcccacccattatgaacgctggcgtacggaaggtattacgctggcgctaagccccgtaaggctggggcgtaaccctatgcttgcgggtataaaacaccttaaccggctggaacaggtactgatccggtctcatcttgagcagacaaacgccgatgaagcgctggttcttgacagcgagggatgggttacggaatgctgtgcggctaatttgttctggcgtaaagagaatgtggtgtacacgccgcgcctggatcaggcgggggtaaacggcattatgcgacaattttgtttacagtcgctggcacaatcgcctttccaggttgtcgaagtgtatgccagggaggacgcgcttatgcaggccgatgagatggttatctgcaatgcgttgatgcccgtgattcccgtgcgcgcctgtggcgataaactgatgtttgcacgttcattgttcgattttttagccccactttgtgagcacccgaattag

SEQ ID NO: 77924 - DNA, 1023 bp, Citrobacter koseri
atgaaaagaatgttacgctttttccttctgctggtcgttgtgttgggcattgccgctggcgcaggaatgtggaaagtgcgccaactggccgacagtcccttgttaataaaagaagagacgatctttaccctgaaggccggaaccgggcgtctggcattaggcgatcaactctacgccgacaagattatcaatcggccgcgcgtgtttcagtggttgttgcgcgttgaacctgaattatcaaactttaaagcgggcacctatcgtttaacgcctgatatgaccgtacgagagatgctgaaactgctggaaagcggtaaagaagcacagttcccgctacgtctggtcgaagggatgcgcctgagcgattacctgaatcagttgcggaatgcgccttatattcagcatacgcttagcgatgaccgttacgaaaccgtcgcgcaggcgctgaagctggagaacccggagtggcttgaaggctggttctggccggacacctggatgtataccgccaacaccaccgacgtcgcgcttctgaagcgtgcgcatcaaaagatggttaaagcggtagatgacgtctggaaagggcgcgcggaagggctgccttataaagataagaatcaactggtgacgatggcgtctattatcgagaaagagacggccgtcgccagcgaacgcgatcaggtggcatcagtctttattaaccgtctgcgtattggtatgcgtttgcagaccgatccgaccgtgatttacggcatgggggcgagttataatggtaagctgtcgcgcgcggcgctggaaacgccgacggcgtataacacctataccatcaccgggttgccgccaggtcctatcgccatgcctggcgaagcctctttgaaagccgccgcgcatccggcgaaaacgccgtacctctattttgtggctgacggaaagggcggtcacacgtttaacaccaatcttgccagccataaccggtcagtgcaggactacctgaaagtgcttaaggaaaaaaatgggcagtaa

SEQ ID NO: 77925 - DNA, 642 bp, Citrobacter koseri
atgggcagtaactatatcgtcatcgaaggcctggaaggcgccggaaaaaccaccgcgcgtaacgtggtggtggagacacttgagcaactgggtattcacgacatgatttttacgcgtgagccgggcggcacccagcttgcagagaaattaagaagtctggtgctggacatcaaatcggtgggtgatgaaacgatcacggataaagctgaagtgctgatgttttatgccgcgcgagtgcaactggtggaaaccgttatcaagcctgcgctggcgaaaggaacatgggtcattggcgatcgccatgacctgtccactcaggcctaccagggtggcggccgtgggatcgatcagacaatgctggcgacgctgcgtgatgcggtattgggcgacttccgtcctgacctgaccctgtatctggatgtgacgccggaggttggcttaaaacgcgcgcgcgcgcgcggcgaacttgaccgcattgagcaggagtctctggatttcttcaatcgcacgcgtgcccgctaccttgaactggccgccagcgatgccagcattcgcaccattgatgcgactcagccgctggaggctgtgatgaacgatattcgcacaaccgtgacggcctggatcaaggagcagggtgcatga

SEQ ID NO: 77926 - DNA, 1005 bp, Citrobacter koseri
atgaaatggtatccgtggttacggccagactttgaaaaactggtagcaagctatcaggcgggtcggggccaccatgcgttactgattcaggcgttgcccggaatgggggatgatgcgctgatttatgccctcagtcgttatttgctgtgccagcaaccggaagggcataaaagctgcgggcgctgtcgtggctgccagttaatgcaggcgggtacgcatcctgactattattcgctgttgccggaaaaggggaaaagcacccttggcgtggacgcagtacgcgatgtgggcgagaagctgtacgaacattctcgacttggcggcgcgaaagtcgtgttgatcccggatgcggccctgctgactgatgccgcggcgaatgccttattaaagacgctcgaagagccgccggagcaaacctggttcttccttgccagccgtgaaccggcacgcctgctggcgactttacgcagccgctgccgtctgcatcatcttgcgccgccatccgaacaatacgctgtttcctggctttctcgtgaagtgacaatgtcacaagagacgttgctggcggcgctgcgcctgagcgcaggggctcccggcgccgctctggcgttgttgcaggccgacagctgggcgcatcgtaacgcgctttgcgaagcgctggcgaatacgctgcaatccggcgactggtatatccttctgtcggtgttgaatcacgaacaggccgccgtacgtttacactggctggcaacgctgcttatggatgcccttaaataccggtatggcgcttccagcctgacaaatcaggatgccggaacgctggtggcgtcgatagctgaacggttatccgtcgcacgtatccaggccatactcagcgatgtctgccattgtcgcgaacagctgattaacgtgaccggattaaaccgcgaactggtattaaccgatcttattctccgcatagagcattacctgcaaccaggcgccatgttgcctgtttcccatctttga

SEQ ID NO: 77927 - DNA, 798 bp, Citrobacter koseri
atgtttttagtcgactcacactgccatcttgatggcctggattatcaatctctgcataaggacgtggatgacgtgctggcaaaagccgccgcgcgcgaggtgaagttctgcctggcggtggcgacaaccctgcccggataccggagtatgcgcgaactggttggcgagcgggataacgttgtgttttcctgcggcgtacacccgttaaaccaggatgaaacatacgatgtggaagacctgcgtcgctttgccgctgaagaaggcgtggtggccatgggggagaccgggctggattatttttatacgccggaaacaaaagttcgccagcaagaatccttcattaaccatattcagattggccgtgaattaaataaacccgtgattgtgcatacccgtgacgcacgcgccgatacgctggcgattttgcgcgaagaaaaagtgacggattgcggtggcgtactacactgttttacagaggacagggagacggcgggtaaattattggatcttgggttttatatctctttttccgggatcgtgaccttccgcaacgccgagcagttacgtgatgccgcccgctatgttcctctggatcgtctgctggttgagacggactctccttatcttgctccggtgccgcatcgtggtaaagagaaccagcctgcaatggttcgcgatgtcgcagagtatatagccgtattgaagggtgttgccgttgaagaactggcgcaggcaaccactgaaaactttgcccgcctgttccacatcgacgcttctcgcctgcaatcaacccgttaa

SEQ ID NO: 77928 - DNA, 1434 bp, Citrobacter koseri
atgtttaagaatgcatttgctaacctgcaaaaggtcggtaaatcgctgatgctaccggtatccgtactgcctatcgcaggtatcctgctgggcgtcggttccgctaacttcagctggctgccagccgttgtgtcgcacgttatggcagaagcaggcggttctgtttttgcaaatatgccgctgattttcgccattggtgtcgcactgggcttcaccaacaacgacggcgtttcggctctggcctcggttgtcgcttacggcatcatggtcaaaaccatggccgtggttgcgccgctggttctgcatttacctgctgaagaaatcgcagcaaaacacctggcggataccggtgttctcggggggattatctccggtgcgattgcagcgtacatgttcaaccgcttctaccgtatcaaattgcctgagtatctgggcttctttgcgggtaaacgctttgtgccgatcatttctggtctggctgccatcttcaccggcgtgatcctgtccttcatttggccgccgatcgggacggctatccagacgttctctcagtgggctgcttaccagaacccggttgtggcgttcggtatctatggcttcattgagcgctgcctggtgccgtttggtctgcaccatatctggaacgttcctttccagatgcagatcggtgaatacaccaacgcagcaggtcaggtgttccacggcgacattcctcgctatatggcgggcgacccgactgcgggcaaactgtccggcggcttcctgttcaaaatgtacggtctgcctgctgcggctatcgcgatctggcactctgctaaaccggaaaaccgcgcgaaagtgggcggtatcatgatctccgcagcgttgacctcgttcctgaccggtatcaccgagccgatcgagttctccttcatgttcgttgcgccgatcctgtacgttatccacgcgattctggcaggtctggcattcccgatctgtatcctgctgggtatgcgtgacggtacatcgttctcgcacggtctgatcgacttcatcgttctgtctggcaacagcagcaaactgtggctgttcccgattgttggtgcaggttatgcgattatttactacaccgtcttccgtgtgctgattaaagcgctggatctgaaaacgccgggtcgtgaagacgcgagcgaagacaacaaagtgggcgcaaccagtgaaatggctccggccctgatcgccgcgtttggtggtaaagagaacatcactaacctcgacgcatgtatcacccgtctgcgcgttagcgttgctgacgttgctaaagtggatcaggctggcctgaagacgcttggcgcagctggtgtcgtcgtcgcaggttccggcgttcaggctattttcggtacgaaatccgataacctgaaaacggaaatggatgaatacattcgcaatagctaa

SEQ ID NO: 77929 - DNA, 2199 bp, Citrobacter koseri
atgtctttcacaacacacacccaggatgagcagcgtcagcctgccgcagttcccactctgctggcagcctgcatcgctatggcattgatgccttccaccagcttcgccgctaccacaacagaagaaacaatcgttgttgatagcgcatcacaagccgacacgtccagcgatgaagaacaggactacaacgttaaaacgacaaccgctggcactaaaatgcagatggcgcagcgcgatattcctcagtctgtcagtatcatcagccagcaacgcatggctgatcagcaattacaaacccttggcgatgtaatggacagcacgctgggtatcagcagaagccagtcagactccgaccgcaacctctactactcacgcggtttcctcatcgacaactacatggtcgatggcatccccacctattttgaatcacgctggaatcttggcgatgccctttctgacacggccctgtttgaacgtgtggaagtcgtacgcggcgcaaatggattaatgaccggaaccggcaacccttccgcgtctatcaatatgatccgcaaacatgccaccagccgtgaattcaaaggtaatgtgtctgcggaatatggaagctggaacaaacagcgttacgtaaccgatttacaaagcccgctgacagaagacggtaacgtacgtgcgcggattgttgcgggttatcagaacaatgactcatggctggatcgttataacagcgagaaaacattcttctccggcattatcgatgccgatctggggagcacaaccagcctttccgccgggtatgaatatcaacgcatcgacgttaacagcccgacctggggcggtttacctcgctggaatacggatggcagcaccaacaaatatgaccgctcgcgcagtaccgctccagactggacctacaacgataaagagtttaataaagtctttgtcacgctgaagcagcgttttgcggatacctggcaggcaacgctcaacgccacgcattctgaaatcaaattcgacagcaaaatgatgtacctggatgcctatgtcaataaagacaccggtatgctggttggcccttacgccaactacgggccagagtacggttacattggcggtacgggctggaacagcggcaaacgtaaagtcgatgctgtcgatcttttcgccgatgggggctacgacctgtttggccgtcagcataacctgatgatcggtggaagctacagcaaacagaataaccgctatatgaatacctgggcgaacgtattcccggatgaactgggcaatttctacaactacgacggtaacttcccggaaacaaactggggtcaacaaaccgttgcccaggatgataccacgcacatgaaatcgctctatgcagcgactcgcatttcgctggccgatccgctgcatctgatcatcggcgctcgctacaccaactggagtatcgacacgctgacctaccggatggagaaaaaccataccacgccatatgccggactggtgtatgacattgatgataactggtctgcctacgccagctatacttccatcttccagccacaaaactatcgtgatagctcgggtaaatacctcgcccctattacgggtaacaactatgaagtgggcttgaaatctgactggatgaacagccgcctgaccaccacattgtcggtcttccgtattgagcaggataacgtcggtcagtcgaccggtagaccgatttcaggtagtaacggtgacaccgcttataaagcggtagatggaaccgtcagcaaaggcgttgaattcgaaattaacggcgctatcaccgacaactggcagatgactttcggcgcaacgcgctttatcgcagaagataacgagggaaatgcggtgaatccgaacttgccacgtacaaccgtgaagctgtttaccagctaccgtctgccagtcatgcctgagttgaccgtcggcggtggcgttaactggcagaaccgtgttcacggcagcgacactgtcacaccatacggcacatggcgcgcggaacaaggcagctatgcattagtggatctgttcactcgctaccaggtaaccaaaaacttcgccgtacagggcaacatcaacaacttgttagacaaaacctacgacaccaatatcgatggttctattgtctacggcgaaccacgtaacgtcagcattactgcaagctatcagttctga

SEQ ID NO: 77930 - DNA, 360 bp, Citrobacter koseri
gtggcagaagaaactatattcagcaaaattatccgtcgtgaaatcccctcggatatcgtttaccaggatgaactggttaccgcatttcgcgatatttcgccgcaggcgcccacgcacattctgatcatcccgaataccctgatcccaacggttaatgatgtcacggcggagcacgaacaggcgctgggccgtatgatcaccgtcgcggcaaaaattgccgggcaggaaggcattgccgaagacggctaccgcctgatcatgaatactaaccgtcatggcgggcaggaggtttatcacattcatatgcacctgctgggcgggtgtgcgctggggccgatgctggcgcataaaggcctctga

SEQ ID NO: 77931 - DNA, 375 bp, Citrobacter koseri
atgaccagaggatgccttgcgatatcactggccttactgttgcttgcgggttgtcgctcacaccctgaaattccggtcagtgatgaacagacactggtgatggagtcaacgctgctggcggccggtatcacggcggaagcgcctgcgttgacgacgtccgatattcagccttctgcatcctcacgcctctataacgaaaggcaagaacccgttaccgtgcattatcggttttactggtatgacgccagagggctggaaatgcatcctctggaagcgccacgcagtgtgactatcccggcgcgttcgtcggtcacgctgtatggcagcgccaattatctgggggcgcataaggttagactttatctttatttgtaa

SEQ ID NO: 77932 - DNA, 642 bp, Citrobacter koseri
atgacgaaaatgaatcgctacgcactggtggccgcgctggcgatattcctctccggttgtgtggggcaacgtgaacccgcaccggttgatgaagtcaaaccggcgccggaacagccagctgagccgcagcagcctgtgccggtcgtgccatcggtgccgacgatcccgcaacagccgggcccgattgaacacgaagaccagaccgcacagcctgcgccgcgcgtgcgccattatgactggaacagcgcgatgcagccgatggtcggaaaaatgctccaggctgatggcgtaacggcgggtaacgtactgctggtcgatagcgtaaataatcgcaccaacggttcgctcaacgcgggcgaggccacagagactttacgtaatgcgctggcgaataacggtaaatttacgctggtttccgcgcagcaactggcgatggcgaagcagcaactgggtttatcaccgcaggacagcctcggtacgcgcagtaaagcgattggcatcgcccgtaacgtaggggcgcaatatgtgctctattccagcgcggcgggtaacgtcaatgcgccatcgctgcaaatgcagttaatgctggtacaaactggcgagataatctggtcaggtaaaggtgcagtccagcaacaataa

SEQ ID NO: 77933 - DNA, 825 bp, Citrobacter koseri
gtgcagtccagcaacaataatctactgacgcgcgacgacgttttgtcgcgctacttcccgcaatatcatcccgtcgccgcctgccacaacggattaagcggcgggagttgcatcattgaacatgacgcccgccgtctggtgctccgttgccatcatgatccctttgcgcctgaatctgattttttgcgtcagtatcacgcattgtcacgtttaccggaaacccttgcccccagaccgcgtttttatattcccggctggatggcggtggactatttgcagggagaggtaaaatctggattaccggataccgacgaactggcgggtttactgtatcatctgcaccaacaaccgcgttttggctggcgtatttcgctgttaccgctgcttatgcgctactggcaggggagcgatccggcacgcaggacgccgtactggctacggatgctaaaacggctgcgagcggcgcgggaacctcgtccgctgcgtctggcgcctttgcatatggatgtccacggcgataacctggtacagacggcatcggggctacggttgattgactgggaatacgccggggacggcgatatcgctctggaactggccgccgtatgggtagaggatgagcggcagcatcaacggctggtggcatcctatgccgccgttgcgcatatctgtccgcaaacgctatggcggcaggtcaggttatggcgcccctgggtaatgatgctgaaagccggatggtttgaataccgctggcagcaaaccggcgaacaacaatttatcaggctggccgacgacgcctggcggcagctgaaaaagaaaggataa

SEQ ID NO: 77934 - DNA, 1026 bp, Citrobacter koseri
gtgggtccagtaatgttggatgtcgaagggtttgaactggacgcagaagagcgcgagattctggcccatccgctggtgggggggctgatcctctttacgcgtaattatcatgacccggagcagctgcgcgagttagtccgccagattcgggcggcttcgcgcaatcatctggtggtggcggttgaccaggaaggcggacgcgtacagcgttttcgtgaaggttttacccgcctgccagccgcacaatcttttgctgcgctgcacgggctggaagaagggggcaaactggcgcaggatgctgggtggctaatggccagcgagatgatcgcgatggacattgatatcagtttcgcgccggtgctggatgtcgggcatatcagcgcagcaattggcgagcgttcttaccatgccgatccgcttaaagctctggcaatggcgacgcgttttatcgacgggatgcatgctgccggaatgaaaaccaccggtaagcacttccccggacacggggcagtcactgccgattcgcacaaagaaacgccaaccgatccgcgtcctgaggcggaaattcgcgccagggatatgtcggtgttccgttcgctaatcaccgggaacaaacttgatgcgattatgccggcgcacgtcatatacagcgatgtcgatccgcgtccggcaagtggttcaccgcactggctgaaaacggtgctgcgtgaggaacttggttttgatggcgtgattttctccgatgacctgtcgatggaaggagcggcgattatggggagctacgcagagcgcgggcaggcgtcgctggatgcgggttgcgatatgatcctggtctgtaataatcgtaaaggagcggtcagcgtgttagataatctgtcgccgatcaatgcagaacgtgttacgcgtttgtatcataaaggttcattttcgcgtcaggagttgatggactccgcacgctggaaaacggtcagcgcccagcttaaccagttgcatgaacgctggcaggaagaaaaagcaggtcattaa

SEQ ID NO: 77935 - DNA, 543 bp, Citrobacter koseri
atgattatctatttacacggttttgactccaacagtccgggtaaccacgagaaagtgttgcagctacagtttattgattcggatgtcagactgatcagctatagcacacggcatcccaaacatgacatgcagcatctgctgaaagaagtagacaaaatgttgcaactgaatgtggacgatcggccattaatttgtggcgtaggactgggtgggtattgggcggagcggattggcttcctgtgcgacatacgccaggtggtattcaaccctaatctgttcccctatgagaacatggaaggcaaaatcgaccgcccggaagagtatgccgatatcgcaacgaaatgcgtcaccaatttccgcgaaaaaaaccgcgatcgctgcctggtgatcctgtcccggcatgatgaagcgctggacagccatcgttcggcaaaagagctgcatcatttctatgaaattgtctgggacgaagagcagacccataaatttaagaatatctctcctcatttacagcggataaaagcgtttaaaacgttaggttaa

SEQ ID NO: 77936 - DNA, 1305 bp, Citrobacter koseri
ttgactacaccattgaaaaagatcgtgattgtcggcggcggtgctggcgggcttgaaatggcgactcagttgggtaaaaaactgggtcgtaagaaaaaggcaaaaatcacgctggtggacagaaaccacagccatctgtggaagccgttgctgcatgaagtggcgaccggttcactggacgaaggcgtggacgctctgagctacctggcgcatgcgcgtaatcatggtttccagttccagttgggttcggttatggatatcgatcgtgaagcgaaaacgatcaccattgcggaactgcgtgacgagaaaggggaactgctggttcctgagcgtaaaatcgcgtacgacaccctggtgatggcgctgggcagtacctctaacgacttcaacacccctggcgttaaagaacactgtattttcctggacaacccgcatcaggcgcgtcgcttccatcaggaaatgctgaacctgttcctgaaatactcttccagcatgggtgttagcggtaaggtcaacattgcgattgtcggtggcggcgcaacgggcgtggagctttctgcggaactgcataacgctgtgaaacagctgcacagctacggctacaaaggcctgactaacgaagcgctgaacgtgacgctggttgaagccggtgagcgcattctgcctgcgctgccgccgcgtatttccgctgcggcgcatagcgaactgaccaaactgggcgtacgcgtactgactcagacgatggtgaccagcgcagacgaaggcggtctgcacacgaaagatggcgaacacatcaaagctgacctgatggtgtgggcggcagggattaaagcgcctgatttcctgaaagacattggcgggttggaaactaaccgcatcaaccagttagtggttgaaccaacgctgcaaaccactcgtgacccggatgtttatgccatcggcgactgtgcttcctgcgcacgtcctgaagggggctttgtgccgccgcgcgcacaggccgcgcatcagatggcaagctgcgcactgaataatattctggcgcagatgaaaggcaaaccgatgaaagactatgtttataaagatcacggttcgctggtatcgctctctaatttctcgactgtcggcagcctgatggggaacctgatgcgcggttcaatgatggtggaagggcgtattgcgcgttttgtttacatttcgctttaccgtatgcaccagattgcgttgcacggttactttaaaaccgggttaatgatgttggtaggcagcattaaccgtgtgattcgcccgcgtctgaaactgcattaa

SEQ ID NO: 77937 - DNA, 540 bp, Citrobacter koseri
gtgaataaatcaatgttggcgggtatagggattggcgtagctgctgcgctgggtgtggcggcggtggccagtctgaacgtttttgaccgtagcccgaaatatgcgcaagtcgtatcagccacacccataaaagaaaccgtcaaaacaccgcgtcaggaatgccgcaacgtgacggtcacgcaccgcaaacctgttcaggacgaaaatcgcattgccggttcggtgcttggcgcggttgctggcggcgtgattggtcatcagttcggcggtggtcgtggtaaagatgtggcgaccgtcgtcggggcgctgggcggagggtacgccggtaaccaaatccagggatcaatgcaggaaaatgacacctacacctctacgcagcagcgttgtaaaacggtgtatgacaagtcagagaaaatgctgggctatgacgtcacttacaagattggcgatcagcaggggaaaatccgcatggataaagatcccggaacgcaaatcccgcttgataataacggtcaattgattctgaataacgacgcgtaa

SEQ ID NO: 77938 - DNA, 636 bp, Citrobacter koseri
atgacaactgactcgacaggttgcgtaaaaaaaagccgtggccgaccaaaagtgttcgacagggaagccgcgcttgataaggccatgacactcttctggcagcacggctatgaagcaacatcgctcgccgacctcgtggaagcgaccggcgcaaaagcgcccacgctgtacgcagaatttacgaacaaggaagggttgttccgcgcagtgctggaccgctatatcagccgttttgcggcaaaacatgaggcccagctcttttgtgaagaaaaaagcgttgagtccgcgctggaagactatttcaccgccgtcgcgacatgcttcaccagtaaagacacccctgccgggtgctttatgatcaacacgtccgccacactggccgcctcctcccgtgaaatcgcccatacggtgaaatcccgccacgcgatgcaggagcagacgctgacccagtttttgcgccagcggcaggagcgcggggaaattccggcgcactgcaatccacaaacgctggcggaatatctgaactgtattttacaaggaatgtcgatcagtgcgcgtgaaggcgcgacgtttgacaaactgatgcagataacccgcaccaccctacggctgtggccggagatgctgaaggcttag

SEQ ID NO: 77939 - DNA, 258 bp, Citrobacter koseri
atgaaaaacgtaaaaaccctcattgctgccgctgtactgagttcactctctttcgcaagtttcgctgctgttgaagttcaggcgacgcctgtagatcaacagaaagtgggcaccatttccgcaaccgccgggactaacctgggatctctggaagatcaactggcgcagaaagcggatgaaatgggcgcgaaatctttccgcattacttcggtaaccggtcctaacaccctccacgggactgcggttatctacaaataa

SEQ ID NO: 77940 - DNA, 969 bp, Citrobacter koseri
atgataatgaataacatgcgactttcccgctggctggcgttttttacgctcgccgcgtccgtagcgctggcgataccggcgcaggcgaacacctggccgcttcctcctcccggcagcaagctggtgggcgaaaatacatttcacgttgtcgaaaacaacggcggctcgctggaggcgattgctaaaaaatacaatgtcggttttttagcgttgctacaggcaaacccgggcgttgatccttacgttccccgcgcgggcagcgttctgaccatccctctgcaaaccttactgccggacgcgccgcgcgaaggtattgtgattaacctcgccgaattgcgtctgtattactatcctcccggaaaaaattcggtgaccgtgtatccaatcggtatcggtcaactgggtggcgatacgttgacgccaacgatggtgactaccgtttcggataagcgcgcgaatccaacctggacgcctacggcgaatatccgcgcccgttacaaggctcagggaatagacctccctgccgtggttcccgccgggccggataacccaatgggccatcatgcgatccgcttagcggcttatggcggcgtctacttgctgcacggcacgaatgctgatttcggtatcgggatgcgcgtcagttccggctgtattcgcctgcgtgacggtgatattgagacgctgttccgtcaggtcacgccgggtacgaaggtcaacattattaatacgccgatcaaagcgtccgttgaacctggcggcatgcgcctggtagaagtccaccagccgttatcgaagaatattgatgacgacccgcagatattgccgatcgtattgaacggtcaaatgcaggctttcaaagatgccgcacagaccgatgccgccgttatggagcatgttatggaagtgcgttcaggaatgccggtcgatgtcacccgccatcccgggataacgcagcagtcgatgtaa

SEQ ID NO: 77941 - DNA, 3447 bp, Citrobacter koseri
atgcctgaacaacaacgttatactctgccaaccaaacccggcgatcagcgccagttgggcgagcttaccggcgccgcctgcgccacgctggtggcggagattgccgagcgccatgctggcccaatcgtacttattgcacctgacatgcaaaacgccctgcgcctgcatgacgaagttcgccagttcaccgaccaactggtgatgaatctggcggactgggaaacgctcccttacgacagcttttccccacaccaggaaatcatctcttcacgcctgtccacgctttaccagttgccgtcaatgcagcgcggcgtattgattgttccggtaaatacgctgatgcagcgcgtttgcccgcacagttatttgcacggccacgccctggtgatgaaaaagggtcagcgtttgtcgcgcgacgccctgcgcgcacagctggatagcgcgggctatcgtcatgttgatcaggtcatggaacatggtgaatacgccactcgcggcgcgctgctggatctgtttccgatgggcagcgaacagccctatcgtcttgatttttttgatgatgaaatcgacagcttgcgcctgtttgatgccgatacccagcgtacgctggaagaagtcgacgccatcaatttgctgcccgcgcatgaatttccgaccgataaaacggccatcgagctgttccgcagccagtggcgtgacacatttgaagttaaacgcgacgccgagcatatttaccagcaggtcagtaaaggcacgctgcctgccgggatcgaatactggcagccgctgttcttcaacgagccgctgccgcctctgttcagctacttcccggcgaacacgctgctggtgaataccggcgcgctggaaaacagcgctgaacgcttccaggccgataccctggcgcgttttgaaaaccgtggcgtcgatcctatgcgcccgcttttgccgccggaatccctgtggctgcgggtcgatgagctgttctccgaactcaaacgctggccccgcatacagttaaaaaccgaacatctgccaggtaaggcggcgaataccaatctgggtttccagaaactgccggatctggcggtacaggcgcagcaaaaagcgcctctggacgcgctgcgtagatttcttgaatccttcaacgggccggtcattttctccgtagaaagcgaaggccgccgcgaagcgctcggggaactgctcgcccgtattaaaatttcacccaaacgaattttgcgcctggatgaggcgctcgacgccggacgttacctgatgattggcgctgcggagcatggcttcatcgatacgcagcgtaatctggcgcttatttgcgagagcgatttgctgggtgaacgcgttgcgcgtcgccgtcaggactcacgccgcacgattaaccccgacacgctgatccgcaacctggcggagctgcatcctggccagccggtggtacaccttgagcatggtgtggggcgttatgcgggtatgacgacgctggaagccggcggcatcaagggcgagtacctgatgctcacctacgccaacgacgccagactgtacataccggtgtcatctttacatctcatcagccgctatgccggaggcgccgaagagaacgcgccgctgcataaactgggcggcgacgcctggtctcgcgcccgacagaaagccgcggagaaagtgcgcgacgtggcggcagagctactggatatttacgcccagcgcgcggcgaaagaaggtttcgcctttaagcacgatcgcgagcagtatcagctgttctgcgacagcttcccgttcgaaaccacgccagaccaggcgcaggccattaacgccgtcctgagcgacatgtgccaaccgctggcaatggatcgtctggtgtgcggcgacgtcggcttcgggaaaaccgaagtggcgatgcgcgccgcgttcctggcggtggaaaaccacaaacaggtcgcggtgctggtgcctaccaccctgctggcgcaacagcatttcgataacttccgcgaccgcttcgccaactggccggtgcgcatcgaaatgctctcccgtttccgtagcgccaaagagcaagcgcagatccttgagcaggtcgctgaggggaaaatcgacattctgatcggcactcataagctgctgcaaagcgatgtgaaattaaaagatttgggcttgctgattgtcgatgaagagcaccgtttcggcgtgcggcataaagagcgcatcaaggcaatgcgcgccgacgtcgatattctgacgctgacggcaacgccaatccctcgtacgctcaacatggcgatgagcggtatgcgcgatctgtcgatcattgccacaccgcccgcccgtcgtctggcggtaaaaaccttcgtccgcgaatatgacaacctggtggtgcgcgaggctatcctgcgtgaagttctgcgcggcggccaggtgtattatctgtataacgacgtggagaatatccagaaagccgcagaccgactggcggaactggtgccggaagcccgcatcgcgattggtcacgggcagatgcgcgagcgcgaacttgagcgtgttatgaacgacttccaccaccagcgctttaacgttctggtgtgtaccaccattatcgaaaccggtattgatattccaaccgcgaacacgatcatcattgagcgcgccgaccatttcggcctggcgcagctacaccagctacgtggtcgcgttggacgttcgcaccatcaggcgtatgcctggctgctgacgccgcatccaaaagcgatgacgaccgacgcgcaaaaacgcctggaagccattgcctcgctggaggatttgggcgccggttttgcgctggcgacccacgacctcgaaattcgcggcgctggcgagctgcttggcgaagatcagagcgggcagatggagaccatcggcttctcgctgtatatggagctgctggagaacgccgtggatgcgctgaaagccggacgtgagccgtcgctggaagacctcaccagccagcagacggaagtcgaactgcgtatgccgtcgctgttgccggatgattttatcccggatgtgaatacgcgtctgtcgttctataaacgcattgccagtgcgaaaaacgaaaacgagctggaggagctcaaggtagagctgatcgaccgtttcggcctgctgcctgacccggcgcgcaatctgctggatatcgcgcgtctgcgccaacaggcacagaagctgggcattcgaaaactggaaggcaacgagaaaggcggtacgatcgagtttgccgagaaaaatcacgttaacccaacctggctgattggtctgttgcaaagacaaccgcagcacttccgcctcgacggcccgacacgcctgaagtttattcaggatctggcggagcgtaaaacgcgtatggactgggtgcgccagtttatggcgcaactggaagaaaacgcggcggcgtaa

SEQ ID NO: 77942 - DNA, 1074 bp, Citrobacter koseri
atgaaacaaaaagaattgtggatcaaccaaatcaaagggttatgcatctgcctggtggtcatttatcactctgtgattacgttctatccccacctgaccgctttccagtatccgttatcggagatcctgacgaaatgctggatctactttaacctctatctggcgccgtttcgtatgccggtgtttttctttatttccgggtatctgatccgccgctatattgacagcgtgccctggggaacctgtattgataaacggatctggagcattgtctgggtactggcgctctggggagtggcgcaatggctggcgcttagctggctcaaccactggctggcgcccgaacgcgacatcaacaacgcctccaacgccgcttatgccgggtccgtcggcgagtttattcacggaatgctgacggccagcaccagcctctggtatctgtatgcgctggttgtctattttgtgctgtgtaaaatcttcagccaatgggcaaaaccactgttcgtactgtttgtactgctgagcgtgacgataaacttcgtgccaacgccgtggtggggaatgaacagcgtgatccgcaacctgccttactacagcctcggcgcctggtttggcgccacgctgatggagtggattaagcatgtcccactgcgtcgttatgctatcgcgtttgcgggcattgcgctgctcgccgtcatcgcctggctggctaatgtatccctgctgctctcactggtgtcgattgtgctgatcatgaaacttttttatcagtatgagcagcgcttcggcatgcgttcttccagcctgctgaatgtcatcggctcaaacactattgctatctatacaacccaccgtatcctggtcgaagcgttcagcttaacgttgattccgaaaatcaacggcgcggcatggtcgccgcagcttgagtttgctctgctgttggtttacccctttgccagtctgctgatttgcacgctgacgggccttaccgtccgaaaaatttcgcaacgcctgtttgccgatctcttcttctctccgccttcactccctgccgttaccagctattcgcgttaa

SEQ ID NO: 77943 - DNA, 1308 bp, Citrobacter koseri
ttgatacttttcagaattacgctgacgaacacttacggttcagtcatttacccattccgctttcgcttatatactcagggctttgctaacagcaaccagacggatttcatgtaccaacctgtcgctctatttattggcctgcgttatatgcgtgggcgtgcagcagatcgtttcggtcgtttcgtctcctggctttccaccattggcattactctcggggtgatggcgctggtcacggtattgtcggtgatgaatggttttgaacgtgaactgcaaaacaacatccttggcctgatgccgcaggcaattctctcgtctgagcagggctcccttaatccacagcagatacccgaaaaagcggttacgttgaatggcgtcaatcgtatcgcaccgcttaccacgggagatgtcgtgctgcaaagcgcgcgtagtgtcgccgtgggcgtgatgctgggtatcgacccggcgcaaaaagatcccttaacgccgtatctggtcaatgtgaagcaaacctctcttgaaccgggcaagtataatgtcatccttggcgagcagcttgccgggcagttgggcgtcaatcgcggcgatcaaattcgtgtgatggtgccttccgccagccagttcacgccaatgggacggctgccgagccagcgtctgtttacggtgattggcaccttcgcggcgaacagcgaagtggatggctaccagatgctgaccaatattcaggacgcgtcgcgtctgatgcgctacccggcgggcaatatcaccggctggcgcttgtggctcaatgagccgctgaaggtggataccctcagccagcagacgctgccggaggggacgaaatggcaggactggcgtgagcgaaaaggtgaactgttccaggccgtgcgcatggaaaaaaacatgatgggtttgctgttaagcctgatcgtcgccgtggcggcgtttaatattattacttcgttaggtttgatggtgatggagaagcagggcgaagtggctattttacaaacccaggggctgacgccgcgccagatcatgatggtgtttatggttcagggcgccagcgccgggattatcggcgcgctgctgggggcggtgctgggcgcattgctggccagccaactgaataacctgatgccgatcattggcgcattcctggatggcgctgcgctgccggtggcgattgaaccgctacaggttgttgttattgcgctggtggcgatggccatcgcgttattgtccacgctgtatccttcctggcgcgctgccgccacccaacccgctgaggctttacgttatgaataa

SEQ ID NO: 77944 - DNA, 702 bp, Citrobacter koseri
atgaataagatcctgttgcaatgcgacaacctgtgcaaacgctatcaggaaggctccgtgcaaaccgacgtgctgcacgatgtcagcttcagcattggcgaaggcgaaatgatggcgattgtcggcagctccggctccgggaaaagtacgcttctgcacctgctgggcggcctggatacgccgacgtcgggcgatgtcatttttagcggccagccgatgagcaaactctcgtcggcggcgaaagcggaactgcgcaaccagaagcttggctttatttatcagttccatcacctgctaccggatttcaccgcgctggaaaacgtcgcgatgccgctgctgatcggcaagaaaaaaccggctgaaattaccgagcgggcgcgtgaaatgttgcaggcggtggggctggatcaccgagctaaccatcgaccatccgaactttccggcggcgagcgtcagcgtgtcgccatcgcccgagcgctggtcaacaatccgcgcctggtgctggcggatgaaccgaccggcaacctggatgcgcgcaatgctgacagtattttccagcttctgggcgaactcaatcgcgctcagggaacggcgtttctggtggtgactcacgatttgcaactggcgaagcgaatgagccgtcagcttgaaatgcgcgacggtctgctgacggcagaactgagcctgatgggagctgagtaa

SEQ ID NO: 77945 - DNA, 1245 bp, Citrobacter koseri
atggcttcgcctttatcgttattgatcggcttgcgctttagtcgtggtcgtcggcgcggcggtatggtgtcgctgatttccgttatctcgactatcggcatcgcgctgggcgtggcggtactgattgtcggtttaagcgcgatgaacggttttgagcgcgagctgaacaaccgtattctggccgtggtgccgcatggtgaaattgaagcggtgaatcagccgtggactcactggcgcgaagcgctggaaaaagtgcagcacgtacaggggattgcagcggcagcgccctatatcaactttaccgggctggtggagagcggggcgaatctgcgcgcaatccaggtgaagggcgtggacccgaaacaggaacagcgcttgagcgcgctgccgtcgtttgtgcaaaaccatgcctgggataacttcagggcgggcgagcagcagatcatcattggcaagggcgttgccgatgcgctgaaagtgaagcagggcgactgggtgtcgatcatgatccccaatgccagcgccgatcataaattgcagcagcctaagcgagtgcgtctgcatgtgacggggattctgcaactgagcggtcagctcgatcacagctttgccatgatccctatggaagacgcgcagcagtacctggatatgggggccagcgtgtccggcatcgcgattaaggtcaacgatgtctttaacgccaataaattggtacgggacgctggcgaagtgaccgacagttacgtttacattaagagctggatcggtacttacggctatatgtaccatgatattcagatgatccgcgccatcatgtatctggcgatggtgctggtgatcggcgtggcctgcttcaatatcgtttcgacgctggtgatggcggtaaaagataagagcggcgatatcgcggtattaagaaccttaggggcgaaagatggcctaatccgcgccattttcgtctggtatgggctgctggcgggtctgctcggcagtctgtgcggcgtggcgattggcgtggtcgtctcgttgcaactgacccctattatcgaaggcatcgaaaagctgatagggcatcagttcctttctggagacatctattttatcgacttcctgccatccgaattacactggctggacgttatttacgtactggttacggcattgttgctgagcttgttggcgagctggtatccggcgcgacgcgccagcaatattgaccccgcgagagtgttaagcggccagtag

SEQ ID NO: 77946 - DNA, 912 bp, Citrobacter koseri
atgcattacgggtttgacattggcgggacaaaaattgccttaggcgtgtttgataacgagcgacgtttgcgctgggaaaaacgcgtaccgacgccacgcgaaggctatgaggcttttttaacggcggtctgcgatctggtggcggaagccgaccagcggtttgacgtaaaaggttccgtgggcattggtattcccgggatgccggaaacggaagacggaacgctgtatgccgccaatgttcctgccgccagcggtaaaccgctccgcgccgatctcagcgcccggctggatcgtgatgttcgcctggataacgacgcgaactgctttgcactgtcggaagcctgggatgatgagttcacgcagtatccgctggtcatggggcttatcctcgggacgggcgtaggcggcggactggtgctcaacggtaagccgatcaccggtcgcagctatattaccggcgagtttggtcatatgcgtttgcctgtcgatgcgctcaccctgatggggttcgattttcctctgcgtcgctgcggttgcggtcaactgggctgcatcgaaaattatctttccggccgcgggtttgcgtggctgtatcagcattactatcatcaacctctacaggcgccggagattattgctttgtgggagcaaggtgatgaacgcgcgcgtgcgcatgttgaacgttacctggatttactggcggtctgcctggggaatatcctcacgatcgtcgatcccgatctggtggtgattgggggaggattatcaaacttcactgctataacaacgcaactggcagacaggttgccacgtcatctccttcctgttgctcgtgtaccgcgtattgaacgggcgcgacacggtgatgcgggcgggatgcgcggcgctgccttcttacatcttaccgattaa

SEQ ID NO: 77947 - DNA, 822 bp, Citrobacter koseri
atgcagtcgcgtcgggctcatcgattaagccgttttcgtaaaaacaaacgccatttgcgtgaacgcctgcgtcagcgaatctttttcagagacagagtggtgccggaaatgatggaaaaaccaagagtattagttcttactggagcgggaatctctgccgaatccggcattcgtacatttcgcgccgctgatggtctctgggaagagcatcgggtagaggatgtggcgaccccggaagggtttgcccgcgatccagaactggttcagtcattttacaacgcccgccgtcagcagttgcagcggcctgagattcagcccaacccggcgcatgtcgcgctggcaaaactggaagaggcgctgggcgatcgtttcctgctggtgacgcaaaatatcgataatctgcatgaacgcgcgggcaacaagaatatcatccacatgcacggcgagctgttgaaagtgcgctgctcccagagcgggcaaattctggactggacgggcgatgtgacttcagacgataagtgccactgctgccagttcccggcttcgcttcgcccgcacgtcgtgtggtttggtgaaatgccgcttggcatggatgagatctatatggcgctggcgatggcggatgtgtttatcgctatcggaacatccgggcatgtttatccggcggccgggtttgtgcatgaggcccgcctgcacggcgcgcatacggtcgagctaaatcttgaaccaagccaggtcggcagcgagtttgaagagaaatattatggcccggcaagccaggtcgtaccggcatttattgagaaattattgaaaggactgtga

SEQ ID NO: 77948 - DNA, 1047 bp, Citrobacter koseri
atgaaaaaatggtcacgccacctgctcgcggcgggtgctctggcactgggcatgagcgccgctcacgctgatgacaacaacacgctctatttctacaactggaccgagtatgttccaccaggactgctggaacagttcactaaagagacgggcattaaggttatctattcgacctacgagtcgaatgaaaccatgtatgccaagctgaaaacgtataaagacggcgcctacgacctggtggtgccttccacctattacgtcgataaaatgcgtaaagagggcatgatccagaagatcgacaaaacgaagttaaccaacttccacaacctcgatcctgaaatgctcaacaaaccgtttgacccgaataacgactactccatcccgtatatctggggcgcaacggcaattggcgttaacagcgacgaaattgacccgaaaaccgtcaccagttgggctgacctgtggaagcctgagtataaaggcggcctgctgctgactgacgatgcgcgtgaagtgttccagatggcgctgcgtaagctgggttactccggcaacaccaccgatcctaaagagattgaagcggcgtataacgaactgaaaaaactgatgccaaacgtggcggcgttcaactccgacaacccggctaacccgtatatggaaggcgaagtcaacctggggatggtgtggaacggttctgcgtatgttgcacgtcaggcagggacgccgcttgaggttatctggccgaaagaaggcggtattttctggatggacagcctttctattccggcgaacgccaaaaacaaagaaggcgcgctgaagctgatcaacttcctgctgcgcccggatgtggcgaaagaagtggcggaaaccatcggttatccgacgccgaacctggccgcacgtaagctgttaagtcctgaagtggcaaatgataaatcactctaccctgatgccgacaccatcaataaaggggaatggcagaacgatgtgggttccgccagtgctatctatgaagagtattatcagaagctgaaagcgggacgctaa

SEQ ID NO: 77949 - DNA, 780 bp, Citrobacter koseri
atgatcggtcgactgcttcgtggcggttttatgaccgctatctacgcgtacctgtatattccaatcatcatcttgattgtgaactcctttaacagttcgcgctttggcatcaactggcagggctttaccaccaactggtacagcctgctgatgaataacgacagcctgttgcaggcggcacagcactcgctgacgatggcggtgttctcggccacctttgccacgatcatcggctcgctaacggcagtggcgctgtatcgctatcgttttcgcggtaaaccgtttgtcagcggcatgctgttcgtcgtcatgatgtcgccggatattgtaatggcgatttcactgctggtgctgtttatgctgctcggcatccagttgggcttctggtcgttgctgttttcgcatatcaccttttgcctgcccttcgtggtcgttaccgtttactcgcgcctgaaagggtttgacgtgcggatgctggaagcggcaaaagaccttggagccagtgaagtcacgattttgcgtaagatcattctgccgctggcaatgcctgcggtcgcggctggctggttgctcagtttcaccctgtcgatggatgacgtggtggtttcgtcattcgtcaccgggcctggctatgagattctgccattgaaaatttactcaatggtaaaagtcggcgtttcaccggaagttaatgcgctggcaacgattttgttggttctgtcgctggttatggtcatcgccagccagcttattgctcgtgataaaaccaagggccgttga

SEQ ID NO: 77950 - DNA, 858 bp, Citrobacter koseri
atgaagaacacaagtaaattccagaatgtggtgattgtcactgtcgttggttggcttgtgttgtttgtctttctgcccaacctgatgattattggtaccagctttttgacccgtgatgacgcgaacttcgtcaaaatggtctttacgctggataactacgctcgtctgctcgatccgctctattttgaggtattgctgcattccctcaatatggcgctcatcgccaccttcgcctgcctggtgctcggctatccctttgcctggtttctggcgaaactgccggaaaaagtgcgtccgctgctgctgtttttgctgatcgtaccgttctggaccaactcgctgatccgtatttacggcctgaaaatttttcttagcaccaagggctatctcaacgagttcctgctgtggctgggtgtgattgacgccccgatccgcatcatgttcacgccgggcgcggtcattatcggtctggtctatatcctgctgccgtttatggtgatgccgctctactccagcattgaaaaactggataagccgctgctggaggccgcccgcgatctgggcgccagtaaattgcagacctttattcgcattattattccactgaccatgccggggatcatcgccgggtgtctgctggtgatgctgccggcgatggggctgttctatgtctctgacctgatgggtggagcaaagaacctgctgattggtaacgttattaaggttcagttcctgaacattcgcgactggccgtttggcgcagccaccagcattacgctgacgattgtgatgggcctgatgctgctggtttactggcgcgcatcgcggctgctgaataagaaggtggaactcgaatga

SEQ ID NO: 77951 - DNA, 1137 bp, Citrobacter koseri
atgggacagagtaaaaaattgaataaacaaccgcgttcgctttcaccgctggtacaactggcgggaattcgcaaaagcttcgacggaaaagaggtcatttctaatctgaatctgaccatcaataacggcgaattcctcacgctgcttggcccctctggctgcggtaaaacaaccgttctgcgcctgattgccggtctggaaaatgttgatgccggtcatattatgttggataaccaggacatcaccgacgttccagcggaacaccgctatgtgaacaccgtctttcaaagctatgcgttattcccccacatgaccgtatttgaaaatgtggctttcggtttacgcatgcagaaaacccccgccgccgagattacccctcgcgtcaccgacgctctgcgcatggtgcaactggaagagtttgcgcagcgaaagccgcatcagctttccggcgggcagcagcagcgtgtggccatcgcccgcgccgtcgtcaataaaccgcgtttattgctgctggatgaatccctctccgctctggattacaagctgcgaaagcagatgcagaacgaactgaaagcgttgcagcgtaagctgggcatcacttttgtgttcgttacgcacgatcaggaagaagcgctgaccatgtctgaccgtatcgtggtgatgcgcgacggcattattgagcaggacggcacaccgcgagaaatctatgaggaaccgaaaaacctgttcgtcgccggattcattggcgaaatcaacatgtttaacgccacggtaattgaacgtctcgacgaacaacgcgtacgcgccaatgtagaaggacgcgagtgcaatatttatgttaactttgccgtcgttcctggtcagaaactgaacgtactgttacgcccggaagatctgcgcgttgatgaaattaacgatgataaccacattgaaggtctcattggctacgtacgcgagcgcaactacaaaggtatgacgctggaatccgtcgtcgaactggaaaatggcaaaatggtgatggtcagcgaattcttcaatgaagacgatcctgacttcgaccactctctcgaccaaaaaatggccattaattgggtagaaagctgggaggtcgtactggctgatgaagaacacaagtaa

SEQ ID NO: 77952 - DNA, 1227 bp, Citrobacter koseri
atggataaactacttgagcgttttttacactacgtgtcgctggatacccaatcaaaggcgggcgtacggcaagtgcccagcactgagggccagtggaaattattacatttgctcaaacaacagctcgaagaaatggggctggtgaacgtcacgttaagtgacaaagggaccgtcatggcgacgctgccagccaacgttgctggcgatattcccgcgattggttttatctctcatgtggatacctcacctgatttcagcggtaaaaatgtgaatccgcagattgtggaaaactaccgtggtggcgatattgcgctagggatcggcgatgaggtgctgtcgccagtgatgttcccggttctgcatcaactgctggggcagacgctgatcaccactgacgggaaaacgctgctgggcgctgatgacaaagcgggcgtggcggaaatcatgaccgcgctggcggtactgaaacagaaagacattccgcacggtgatattcgcgtggcctttacgccggatgaagaggtcggtaaaggggcgaaacattttgacgttgaggctttcggcgcgcagtgggcttataccgttgatggcggcggcgtaggggaactggagtttgaaaacttcaatgcggcctccgtgaatatcaaaatcgtgggcaataacgtacaccccggtacggcgaagggcgtgatggtgaatgcgctgtcgctggcggcgcgtattcatgccgaggttccggcggatgagagcccggagacgaccgaaggctatgaaggcttctaccatctggcgagtatgaaaggcaccgttgatcgtgcggatatgcactacatcattcgtgatttcgaccgcaaacagtttgaagcccgcaagcgcaaaatgatggagatcgctaaaaaggtcgggaaggggctgcacccggactgctacatcgagctggtgatcgaagacagctattacaatatgcgcgagaaagtggtcgaacacccacatattctcgatattgcacagcaggcaatgcgtgactgcgatattgtgccggatatgaagccgattcgtggcggcactgacggcgcccagctttcgtttatgggcttaccgtgcccgaacctctttaccggcggctataactatcatggcaagcatgagtttgtgacgctggaagggatggagaaagcggtgcaggtgattgtgcgtattgcggagctaactgcgaagcagcagtaa

SEQ ID NO: 77953 - DNA, 1122 bp, Citrobacter koseri
atggaatatcaattaacacttaactggcccgaatttcttgaacgccactggcaaaaacgcccggtggtgttaaaacgcgggttcaacaacttcattgatccgctctcccctgacgaactggcgggactggcgatggaaagcgaagtcgatagccgtctggtcagtcatcaggatggtaaatggcaggtcagccacggcccgttcgagagttacgaccacctcggcgagaacaactggtcgctgctggttcaggccgtaaaccactggcatgaacctaccgctgcgctgatgcgccctttccgcgcgttgccggactggcgtattgacgatctgatgatctccttttccgtccctggcggcggcgtgggtccgcatctggatcagtacgatgtatttatcattcagggaaccggtcgccgccgctggcgcgtaggcgagaagctgcaactgaagcagcattgccctcacccggatttgctccaggtcgatccttttgaagccatcattgatgaagagctggagcccggcgatattctgtatatcccaccgggattcccgcacgaaggctacgcgctggaaaacgcgatgaactactcggttggtttccgcgcgccgaatacgcgtgaactgatcagcggttttgccgactacgttctgcaacgcgagctgggcagcacctattacagcgacccggatatcccgccgcgcgagcatcctgccgacgttctgccgcaggagatggacaagctgcgtgaaatgatgctcgacctgatcaatcagcctgaacactttaaacagtggtttggcgaatttatctcccagtctcgtcacgaactggacatcgcgccgccggaaccgccgtatcagccggatgagatctatgatgcgctgaaacaaggcgatgtgctggtgcgtctgggcggcttacgcgtcctgcgcattggcgatgaggtctacgccaacggtgagaagattgattctccgcaccgcccggcgctggaggcgctctccagtcacatcgtgctgaccgccgagaattttggcgatgcgctggaagacccgtcgttcctcgcaatgctggccgcgctggtcaatagcgggtactggttcttcgaagggtaa

SEQ ID NO: 77954 - DNA, 1464 bp, Citrobacter koseri
atgaataaattactgcgtcatctttttcctttatcgctgcgcctgcgctttctgctggcgacggcaggcgttgtgctggtgctctctctggcctacggcatggtcgcgctggttggctacagcgtcagttttgataagacaacctttcgcctgttacgcggtgagagcaaccttttctacaccctcgcgtcatggcaaaacaataaaatcaatatcgagatcccggaaaatctcgatatgcaaagccccacgatgacactgatctatgatgagaacggcaagttgttatgggcgcagcgcaacgttccctggctggagaaacgtatccagccggaatggctgaaagccaacggttttcatgaaattgaagccgatgtcgacgccaccagcacgttgctgagtgaagatcattccgcccaacagcagctcaaagaggtgcgggaagatgacgacgatgcggaaatgacccactccgtggcggtgaatgtctatccggctaccgcgcggatgccgcaactgacgatagtggttgtcgatactatccccatcgagctgaaacgctcgtatatggtctggagctggtttatttatgttctggcggcaaacctgctgttagtcatcccgttgctctgggtcgccgcgtggtggagtttacgccctatcgaagcgctggcgcgtgaagtgcgtgagctggaagaacaccaccgcgaaatgctcaacccggaaaccacgcgggaactgaccagcctggtgcgcaacctcaaccggctgctgaagagcgaacgtgagcgttatgataaataccgcaccacgttaaccgacctcacccatagtctgaaaacgccgctggcggtattgcagagcaccctgcgttcaatgcgcagcgaaaaaatgagcgtcagcgacgccgaaccggtcatgctggaacagatcagccgtatatcccagcagatcggttattacctgcatcgagccagcatgcgcggaagcggcgtgttactcagtcgcgagctgcaccccgtagcgccgttactggacaatctcacctgcgcgctcaataaagtgtatcagcgtaaaggggtcaacattagcctcgatatttcgccggaaatcagcttcgtcggcgagcagaatgactttgttgaagtgatgggcaacgtgctggataacgcctgtaaatactgcctggagtttgttgaaatttcagcccggcagaccgatgagcatctgcatattctggtagaagacgacggcccgggcattccgcaaagcaagcgtgatgtggttttcgatcgcggtcagcgcattaacaccctgcgaccagggcaaggcgtggggctggcggtcgcccgtgagatcactgagcaatatgaagggaagatcgtcgccggtgacagtttgctcggcggagcgcggatggaggtgatttttggtcgccagcacccgattcagcgcgatgaatga

SEQ ID NO: 77955 - DNA, 675 bp, Citrobacter koseri
atgatgcgcgtactggttgtcgaagataatgccttattacgccaccacctgaaggttcaattacaggatttggggcaccaggttgatgacgcagaagatgcaaaggaagccgattattatcttaacgagcatctgccggacatcgccatcgtcgatttaggcctcccggatgaagacgggctttcgctgatccgccgctggcgcagcaatgacgtttcccttcctgttctggtattaaccgcccgtgaaggctggcaggataaagtggaagtgctgagcgccggcgccgacgactatgtgacaaaaccgtttcatattgaagaagtggtcgcgcgtatgcaggcgttaatgcgccgcaacagcggtctggcctcgcaggttatctctattccgccttttcaggtggatctctcccgccgtgaattgtccgtaaatgatgaagtgataaaactgacggcgtttgaatacaccattatggaaacgctgatccgcaataatggcaaagtcgtcagtaaagattcgttgatgctacagctctacccggatgcggaactgcgtgaaagccataccattgatgtattgatggggcgcttacgcaaaaaaattcaggcgcgatatcctgatgatgtgattaccaccgtccgtggtcagggatacctgttcgaactgcgctaa

SEQ ID NO: 77956 - DNA, 513 bp, Citrobacter koseri
atgaaatacccgactggtgttgaactacataacggaaaaatcagaatcacatttatctatcgcggcattcgttgccgcgaagttctccagggttgggttgtcaacagtagcaacattaaaaaagcgggcaatctgcgcgcagcaattgtgagtgagatacagctcggtaagtttgactacgcagatcgtttcccggaatcaaaagctcttaagaaattttcgtccacaaaacggatctccacattcaaagaactgagtgatttttttacagatacaaagtcactggaggtatctgaagccactttgctatccatcacatccgtcgttaacaccctgaaacgagtagtgggtgagaacacacgcctggttgatattcagcacgcagatattctgaattaccgcaaagagctcctgaccggagaagttttcaacccttcaatgccaaaccgcatcaaaaatggggcgcgccctcaacagtcaataaacagatggctgttttatcagaaatgctga

SEQ ID NO: 77957 - DNA, 216 bp, Citrobacter koseri
atgtcacaggtaatttttaacgaagagtgggttgttgagtccagacttaccgaaagaacaggacttactgaaggacaaattaaaaattatcgcctgaagctatgggttgaaggtgttcacttcaagcgccttactgcgcctggacagactgacaactctaaaggtctgctttggtacaactacccgaagattaatcagttagttcaggatgcttaa

SEQ ID NO: 77958 - DNA, 759 bp, Citrobacter koseri; identical to SEQ ID NO: 77869

SEQ ID NO: 77959 - DNA, 2019 bp, Citrobacter koseri; identical to SEQ ID NO: 77868

SEQ ID NO: 77960 - DNA, 1701 bp, Citrobacter koseri; identical to SEQ ID NO: 77867

SEQ ID NO: 77961 - DNA, 957 bp, Citrobacter koseri; identical to SEQ ID NO: 77866

SEQ ID NO: 77962 - DNA, 1371 bp, Citrobacter koseri; identical to SEQ ID NO: 73294

SEQ ID NO: 77963 - DNA, 642 bp, Citrobacter koseri; identical to SEQ ID NO: 73293

SEQ ID NO: 77964 - DNA, 1107 bp, Citrobacter koseri; identical to SEQ ID NO: 73292

SEQ ID NO: 77965 - DNA, 462 bp, Citrobacter koseri; identical to SEQ ID NO: 73291

SEQ ID NO: 77966 - DNA, 654 bp, Citrobacter koseri; identical to SEQ ID NO: 73290

SEQ ID NO: 77967 - DNA, 1251 bp, Citrobacter koseri; identical to SEQ ID NO: 73289

SEQ ID NO: 77968 - DNA, 816 bp, Citrobacter koseri
atgcgcgcattgcctcgcagggtaacaatagcccgtcgcaacctggaactttgctttaaggcgttacctgcgaaggagcgtgaaaaattactgattaaaaattttgagtcggtaggcatgggggtacttgaaaccggtatcgcctggttctggtcagacaggcgtttacgcaaatggtttacggttacgggttatgaacatatggaaagtgcgcgagctgaaaataaaggcgtgcttctcatcggtatacactttcttactcttgaacttggggcgcgcatatttgggatgctcaatccgggcattggcgtatacaggccgaacaataacgcgctgtatgactggttgcagacgcggggacgtcttcgctcaaataaaaccatgctcgatcgctatgatttaaaaggcatgataagagtgctcaaacaaggtgagattgtctggtatgcacctgatcatgactatggcgctcgtaacagcgtgtttgttcctttttttgatgttcccgatgcggcgactaccgcaggcagttacatgcttgtcagaagcgcgcgcccggcggttgttccttttgttccccgacgccgagcggatggaagagggtacgagctgatcatcctcccggatatcggccatgaactgtatgacgagggcaaggaaaccgttgcgaccagaatgaatcgggcgattgaacgcgcaatcagcctggctcctgaacaatatatgtggctacaccgtcgctttaagacccgaccagcaggcaagccggccctgtatgggaagaaggaaaacgcgattgagagtaacggcgaatag

SEQ ID NO: 77969 - DNA, 132 bp, Citrobacter koseri; identical to SEQ ID NO: 73287

SEQ ID NO: 77970 - DNA, 258 bp, Citrobacter koseri; identical to SEQ ID NO: 73286

SEQ ID NO: 77971 - DNA, 429 bp, Citrobacter koseri; identical to SEQ ID NO: 73285

SEQ ID NO: 77972 - DNA, 1095 bp, Citrobacter koseri
atgagaaaaataaataaaaccattttatggatgctgctgctttgcatcgttcttggcgcagtaattgttttagcggggcaatggacgttacataaaacatcgagcactgaattttgtctgtcttgccatacgatgcaggcgccttatgaggagtatacgggctcggttcacttccagaatcagaaggggattcgtgcagaatgcgcggattgccatatcccggaaggcggggtggattacctggtagccaagctccttgcctcgaaagatgtctatcatcagttcatcaccaaaaaaatcgacacgccagagaagtttgaagaacatcgtctggagatggcacaaaccgtttgggcgcagttgaaagccagcgactccgcaacctgtcgtagctgtcatagcatggatgcgatggatcttgacgcgcaaagcgctgatgcccgcaaaatgcaccaaatgggcattcaggaaaaacaaacctgtattgattgccacaaaggcgtcgcccacttcccacccgaaataacaatggacgacagcgccctcaaagcgcttgaggcccagtctgcatctacccccgcatctgcaaaaacgctctatgccgtaagcaataccgcacttggcgatctggcaacggtctatccggccacgcaaatgcatgtcctgaaatcgacggaaacgtcacggctggtggagattcgcgggagccagatgcaggggagcgagcaggttatttactacgcggcaggccagcggttgatccttgccagcctgagtgagaaagggcagcaatcactcaacattttctctgactggaaaaaagatgattacggtaacgcgtggcgggatgtggcgctacagggcgagtggagtggctctgcgctcgccagccgcgaaccgatgtgggactacgcgcgcaaactcgacaatgtgtattgcgcaggctgccatgcgccgattcctgcgaagcattttaccctcaatgcctggccctctgtggcgaaagggatgggggctcgtaccaacatcagtgaaaacgaactggatatcctgagccgttacttccagtacaacgcgaaagacatgcatgaatag

SEQ ID NO: 77973 - DNA, 2445 bp, Citrobacter koseri; identical to SEQ ID NO: 73283

SEQ ID NO: 77974 - DNA, 651 bp, Citrobacter koseri; identical to SEQ ID NO: 73282

SEQ ID NO: 77975 - DNA, 639 bp, Citrobacter koseri
gtgttcgcagagtatggagttctgaactactggacgtatctggttggggccatttttatcgtgctggtgccggggcctaatacgatatttgtgctgaaaaacagcgtcgggcgagggatgaaaggcgggtatctcgccgccagcggggtgttcattggcgatgcggtgctgatgtttctggcgtacgcgggcgtcgcaacattaataaaaacaacgccggtgctgtttaatatcgttcgttatctcggcgctttttatctgctgtatcttggtgcgaagatcctttacgccacgctcaaatcgaaagggagcgaagtggcgcatgatgaggttccgtttggcgcaatctttaaacgtgccttaattctgagcctgaccaatcccaaagccatccttttttacgtttcgtttttcgtccagtttattgacgtcaatgcgccacacgcggggctgtcattttttatcctggcgacaacgcttgaagtggtgagctttttctatctgagcttcctgattatttcgggcgcttttgtaacgcagtacattcgcacgaaaaagaaactggcgaaggtggggaattcccttatcggtttgattttcgttggttttgccgcacgtctggcgacgcttcagtcataa

SEQ ID NO: 77976 - DNA, 363 bp, Citrobacter koseri; identical to SEQ ID NO: 73280

SEQ ID NO: 77977 - DNA, 183 bp, Citrobacter koseri; identical to SEQ ID NO: 73279

SEQ ID NO: 77978 - DNA, 657 bp, Citrobacter koseri; identical to SEQ ID NO: 73278

SEQ ID NO: 77979 - DNA, 2148 bp, Citrobacter koseri; identical to SEQ ID NO: 73277

SEQ ID NO: 77980 - DNA, 249 bp, Citrobacter koseri
atgggcattatttcatggattatctttgggcttattgcaggtattctggcgaagtggattatgcctggtaaggatggcggcggattcttcatgacgatcatcctggggatagtcggtgccgtggtagggggatggatcagcacgttcttcgggtttggcaaagttgacggcttcaactttggcagctttgccgtagcggttatcggcgcgattgtcgttctgtttatctacagaaaaatcaaaagttaa

SEQ ID NO: 77981 - DNA, 255 bp, Citrobacter koseri; identical to SEQ ID NO: 73275

SEQ ID NO: 77982 - DNA, 348 bp, Citrobacter koseri; identical to SEQ ID NO: 73274

SEQ ID NO: 77983 - DNA, 708 bp, Citrobacter koseri
atggaactttcccctgttaaagacacgctacgtattgcgctggtgggtgattacaaccccgatatcgtggcgcaccaggccattccccttgctattgatgatgcggccgccgtgctggagttaatggcggactatgactggctgacgacgcctgacatcaatagtgacgaagatttggtgggctatgatgccatctgggttgttcccggcagtccctataaaaataccgaaggggcactgattgctattcgctatgcccgtgaaaacagcattccttttctgggaacctgcggcggattccagcacgcgatcctcgagtatgcccgcaacgtgctgggctggcgcgatgcggcgcacgccgaaactgatgcttccggccggatggttatcgccccgttgagctgctcgctggtggaaaaaacggatgatatcgaactgagggcgaatacgctggtcgccaaagcctacgggcaggacgttatctccgaagggtatcactgcaactacggggtatcagaggattttgccgctgaacttgagaatggcgatttgcgggttaccgggtgggatgaggcgggagacatccgtgccgtggaactggtaacgcatccctttttcgttggtacgctttttcagcatgaacgtggcgcgctggcgggaaaacccgttcccctggtgcaggcgatgctgcgagccgcacggggataa

SEQ ID NO: 77984 - DNA, 1188 bp, Citrobacter koseri
atgactatttccccttcattacgtggcaaaaacgctgcattattgattgccggtattctgatgattgcgacgacgctgcgcgttaccttcactggcgctgcgccgttactggagacgattcgtgcggattacgggctaactaccgcacaaacgggcctcctgaccacgcttcccttgctggctttcgcgctggtctctccgctggcggcaaacattgcgcgccggttcggcatggaacgtagcctgtttgccgccatgctgttgatttgcttcggtattgccgtgcgctcgctgccttctgccagcttcctgtttaccggcacagccattattggttgcggtatcgcgctgggaaacgtgctgctccccgggctgattaaacgcgattattcgcagcatgtggcaaaactgaccggcgcctattcattgacgatgggcgccgcagcggcggtgggttcggcaatggtcgtacctctggcgttgcatggctttggctggcgcggcgcgctgttaatgctgatgctgtttcccctgctggcctttcttatctggctgccgcagtggcgcaacacggccaccgccaacctgagcagctcccgcgcgctacactcgcgcggcatctggcgatcttccctcgcctggcaggtcaccttattcctcggcattaactcgcttatctattacgttatcatcggctggctgcccgcgattttaatcagccacggctacagtgaagcgcaggccggatcgctacacggtctgctgcaactggcgacggctgcgccgggactgttgattccgctcatcctgcaccggttcaaggatcagcgcagtattgccgcgctggtatcgctcatgtgcgctctcggcgcggccgggttctggtttgtgccggaacaggcggtgctgtggacgattctgtttgggtttggctctggcgcgacgatgattttgggtctgacgtttatcgggctgcgcgccagttccgcgcaccaggcggcggcgctttcaggcatggcgcaatctgtcggctatctgctggcggcatgtgggccgccgttgatgggtaagattcatgatgccaacggcgactggcacatcccgctaattggcgtggcggttctggcggtcgcgatggcgatattcggcctttatgccggacgcgatcgggagatcgcagcaaaataa

SEQ ID NO: 77985 - DNA, 789 bp, Citrobacter koseri
atgattggcctgagactggatggctacgagcctgaccttcaccatgatgcggctgtggccttttgcattcgcgctcgcgaagatgagcttttcagtccgctgcatcaccatcgaaaagggcaactgatcctggcgctgcatggcgctattacctgcgaggtagaaagcgccatgtggatggtgccaccacagtatgcggtatgggttcccggcgaaattccccacagtaaccacgtcacggcgggggcggaattatgttttctgtttattgagccggatgcggttgtgatgccggatcgctgctgtacgctaaaaataacgccattgtgccgggagctgattctggcgcttgccgcgagaacggatattcagcgtaccgagccaatgacgcagcgcctgacacaggtcttgtttgatgagcttccgcagcaaccacaggagcagatgcagcttccggtttccgggcatcccaaaatacgtcaaatggtggagacgatggcgcgtgaaccagcccgctggcaaacgctggggcagtgggcgagcctgttcgccatgagcgaacgcaatcttgcccgactggtggtaaaggaaaccggcctgagctttcgtcgctggcgtcaccagttgcagcttattctggcgttgcaggcgttgattgacggacacagcgtgcagcacgtcgcccaaacgctgggttatgattcaacgaccgcgtttatcaccatgtttaaaaaggggctggggcaaactccaggccgttatctggccgggcttactgcttcccaataa

SEQ ID NO: 77986 - DNA, 447 bp, Citrobacter koseri
atgtttgatgtcactctgctgatcctgcttggactggcagcgctgggctttatcagccataacaccactgtcgccgtttcaattctggtgttgatcattgtccgcgttaccccactcaatacgtttttcccgtggattgagaaacaggggctgaccgtcgggatcattatcctgactatcggcgtcatggcgccgatcgccagcggttcgctgcctccctctacgctcattcactccttcgtcaactggaaatcactggttgccatcgccattggcgtcttcgtctcctggctgggcgggcgcggcgttacgctgatgggaagccagccgcagctggtcgcgggtttactggtggggacggtactgggcgtcgcgctgttccggggcgtgccggtcggcccgctcattgccgcaggcctggtgtcgctgattattgggaagcagtaa

SEQ ID NO: 77987 - DNA, 504 bp, Citrobacter koseri
atgaatgaagtcgctaagggaatcacggctcaccagcgtttgattacccttttatcgcaggaaggcgccacttatcgtgtactcagccacgaggcggtcggtaagtgcgaagcggtttcggaaattcgcggcaccgcactgggccagggggcaaaagcgctggtgtgtaaagtgaaaggcaatggcgtcaatcaacatgtcctggcgatcctttccgctgaccagcaggccgatctcgcccaactcgcaaaccatctcggcggactaagagcttcgcttgccagccctgccgaggtggatgcgctgaccggctgcgtctttggcgcgatccccccttttagcttccaccctaacctgaagctggtggccgatccgctgttgttcgagcgcttcaacgaaatcgcgtttaacgccggtgtgctggaaaaatcggtcattatgaataccgacgattacctgcgcattgcgcagccggaactggtcaattttcgccgagcgcaataa

SEQ ID NO: 77988 - DNA, 1488 bp, Citrobacter koseri
atgaaattgcatcataaagcgctcaggctctttatctccgcaagcgtcattgtactgacgtcctcttttctggcttatgaattgatcgccagtgacagggcgatgaatgcctatatgggctatatcatcgaaaaggcagactcttcatttttgtatgacaagtaccagaatcagagcattgcagctcatttaatgcgcacgttcacggagcccaaagcaccgccatccgatgaacaacaatatgcgttatgccgcggatttgaaacagacagcaatacccacggcatcaatctcaccactcataataacccatcgctacatggaacactgcaaaccgccgaggcaaactgcgcgatcgtagctgacgacgctcctctgttgttcgcttttgatcaggcggtggcggcgaatcgtaaccagaaggattatggtaaagggctgggcactgtagaagataaattccactactatctggatattaaaaaacgctacgtctatttttataacctgattgactccagacaattttttatgcaccactggtcttttctgcgaaaaggaacgctgggaatcaaccgtaacgatattgatggtcaattcacagggcgaacagtgctctcaagcatttatcaggacgatcttactgaaaaaaatgtgatgagttttttaactcccgtttatctacatggaaagttaaaaggcatagtaatggtggatattaaccaggataacctgaagaatattttttacactcaggatcgtccactggtctggcgctatctggacgcgactctgttcgacctgaattcagagaaaaaaatcattgtccatcagagcgaaaataacctctttaattatgttaattatgttcacgacctgccaggcggcatccgtgtcacattatctctcgacatcctgtattttattgtctcatcatggaaactgttcgccttttacctgctcgttaccgctacgttactgaacatggtcagaatgcattttcgcctttaccataatgtcaatcgtgaaaatatcagcgatgcgatgaccggcctctataaccgtacaatcctgacaccgcagcttgaacagcgtttgcagcgactggtcaacacaggcacctccgtgacgtttatcgccatcgatctggataggttgaaagtcattaacgacacgcaggggcatcaggaaggcgatcgcacaattacattgctggcaaaagccattgaagcatcggtgcgtaaaactgattacgcaataagattgggaggtgatgaattttgtgtaattcttatcgatccagttgtaccggcaacaactttacctgagcgtattgccaataagttgcgaatcatcgcgccagataaggtgattagtttttccgctggactttatcatatgcggcctgaggatacgatccaggacgcatacaaggcctctgatgagcaactctatctcaacaaacaacaaaatcatgcacgtttgtga

SEQ ID NO: 77989 - DNA, 771 bp, Citrobacter koseri
atgagtgcgaatgaaaaagcgggccatacatttttagcaagcctgggcaaaacccgtctgcgtccgggcggcattgaggcgacggagtggctgttcagccagtctcagctgacgccgggcagccaggtgctggaagtggcatgcaatatggcgacgaccgccattgagttggtgcaacgttttggttgttcggtctacgccatcgatatggataaaaacgcgctggcaaacgcgcggaacaatgtcgcggcgcacgggctggaaaatcacatccatgtcatggccgccaatgccaacagcttaccctttgccgataacagtttcgatgtcgtgattaacgaggccatgctcaccatgtatgccgacaaagcgaaagcaaagctgatcggtgaatattatcgggttctgaagccgggtggccgtctcttaacgcacgatattatgctgaccagccagaagctggcggaaggtgagcagaaccagcttcagcatgtggtgaaatcgaatgtaagcccgatgaccaaacaaggctggcgcgatctgttgctggattccgggtttgagcaggttttacagcagaacggtgaaatgtcgctgatgtctccgcgagggttgattcgcgatgaagggctgaaaggggcgcttaaaattgtttataacgggctgtgcatccgtgacaatcgcagccgttttatcaagatgtttcgcttctttaaatcacagcgccatcagttgaattacattgcctgctgttcggttaaggggaaataa

SEQ ID NO: 77990 - DNA, 1284 bp, Citrobacter koseri
atgacctggtttattgaccggcgtcttaacggtaaaaacaagagcatggtgaaccgccagcgcttcttacgccgttataaagcgcaaattaaacagtcgatctccgaggccattaataaacgttcggtgaccgatgtagagagcggcgagtccgtctcaatcccgacagatgacatcagcgaaccgatgtttcatcagggacggggcggcttgcgccatcgcgtacaccccggcaacgatcatttcgtacagaacgatcgcattgagcgtccacaaggtggcggcggtggttccgggagtgggcaaggccaggccagtcaggatggtgagggtcaggatgaattcgtctttcagatttccaaagatgagtatctggatctgctctttgaagatttagcgctgcctaatctgaaaaaaaatcagcaacggcagcttactgagtataaaacccaccgcgcgggttttacctccaacggcgttccggccaacatcagcgtggtgcgttccctgcaaaactctctggcgcgccgcacggcgatgactgcgggtaaacgtcgggagctgcgcgcgcttgaggacgacctggacatcatcaccaaaagcgaacccgcgcagttgctggaagaggagcggctacgtaaagagattgccgaactgcgggcaaaaatcgaccgtgtcccctttatcgacacctttgatttacgctacaaaaattatgaaaagcgccctgacccttccagccaggccgtgatgttctgcctgatggacgtatccggctcgatggatcaggccaccaaagatatggccaaacgtttttatatcctgctctacctgttcctcagccgaacctataagaacgttgaagtggtctatatccgccaccatacgcaggcaaaagaggtggatgagcatgagttcttctactcccaggaaaccgggggcactatcgtctccagcgccctgaaattgatggatgaggtagtgaaagatcgctacgatccggcgcagtggaatatctacgcggcgcaggcttcggatggcgataactgggcagatgactctccgctgtgtcatgagattctggcgaaaaaactgctgccggtggtgcgctattacagctatatcgaaatcacccgccgcgcccaccagaccttatggcgcgaatatgagcatctgcaatcgacctttgataactttgcgatgcagcatatccgcgaccaggatgatatctatccggtcttccgtgaactgttccagaaacaaagtacgacaagtaaagactag

SEQ ID NO: 77991 - DNA, 1935 bp, Citrobacter koseri
atgaatatattcgatcactatcgccagcgctatgaagctgccaaggacgaagagttcacactgcaggagtttcttaccacttgtcggcaagatcgcagtgcttatgccaacgcggcagagcggctactgatggctattggtgagcctgtcatggtcgatactgcccaggaacctcgactttctcgactcttttcgaaccgggtcatcgctcgctatcccgcattcgaagagttttacggcatggaagacgcgattgaacagattgtctcttatctgaaacacgcggctcaggggctggaagagaagaaacagatcctgtatctgttggggcctgtagggggcggtaaatcgtcgctggccgagcgactgaaatctttgatgcagcatgtgcctatttatgttctgagcgccaacggtgagcgtagtccggtaaacgatcatccgttatgcctgtttaatccgcaggaggacgcgcagattctggaaaaagagtacggcattccgcgccgctatctcggcaccattatgtcgccgtgggccgcgaaacgtctgcatgagttcggcggggatattaccaaattccgcgtcatcaaagtctggccgtccattctggaacagattgctatcgccaaaacagaacctggcgatgaaaacaaccaggatatttccgcgctggtcggcaaggtggatattcgtaaactcgaacaccacgcgcaaaacgacccggatgcctatggttattccggcgcgctgtgccgcgctaaccaggggatcatggaattcgtcgagatgtttaaagcaccgattaaagtgctgcatccgctgctgaccgccactcaggaaggtaactacaacgggacggaaggtatctccgccctgccgtttaacggtattattcttgcccactcgaacgaatccgaatgggtgactttccgcaacaacaaaaataacgaagccttcctcgaccgtgtttacatcgtgaaggtgccgtattgcttacgcatttccgaagagatcaaaatctacgagaagctgctgaatcacagtgagctgactcatgcaccatgcgcgccgggtacgctggaaaccctgtcgcgcttctcgattctttctcgtctgaaagagccggaaaactcgagcatctactcaaaaatgcgcgtctatgatggtgaaagcctgaaagataccgacccgaaagcgaagtcctatcaggaataccgggattacgccggcgtcgatgaagggatgaacggtctgtccacgcgtttcgcgtttaagatcctctcccgcgtgtttaactttgaccatgccgaagtggccgccaacccggtgcatctgttctacgtactggagcagcaaatcgagcgcgaacagttcccgcaggagctggctgagcgctatctggagttcctgaaaggttatctgatcccgaaatacgccgagtttattggcaaagagatccagaccgcctatctggaatcctattccgagtacggacagaacatttttgatcgttatgtcacctatgcggatttctggattcaggatcaggaataccgcgacccggataccggccagctctttgaccgcgagtcactgaacgctgaactggagaaaatcgaaaaaccggcgggcatcagcaacccgaaagatttccgtaacgagatcgtcaacttcgttctgcgtgccagagcgaataacagcggtcgcaatccaaactggaccagttacgaaaaactgcgcacggttattgagaagaaaatgttctcgaataccgaggagctgctgccggtgatttcgtttaacgcgaaaacctcaaccgacgagcagaaaaaacacgacgattttgtcgaccgcatgatggagaaaggttatacccgtaagcaggttcgcctgctgtgcgaatggtatctgcgcgtacgtaaatcgtcttaa

SEQ ID NO: 77992 - DNA, 747 bp, Citrobacter koseri
gtgaccaaactcaaacttctggcatttggcgtgcttatcgccacatcagctggcgtagcgcaagctgaaaacgacttgacgctgggcgctggcgttggtgtggttgaacatccttacaaagattacgatgctgatgtgtatccggtgccggttatcaactatgaaagtgataacttctggttccgggggctgggcggcggatactacctgtggaacgacaaagcggataaattgtcgattaccgcgtactggtctccgctgtactttaagccgggcgacagcgacgatcgccgactgcgcgaactcgacaagcgtaagagcaccatgatggcgggcctgtcttacatccacaataccgaatacggtttcctgcgcaccacgctggcgggcgatacgctggataacagcaacggcatcgtgtgggatctggcctggttgtaccgctataccaatggcgcgctgacgctgacgccgggtattggcgtgcagtggaacagcgaaaaccagaacgaatactactatggcgtttcgcgcaaagagtcctcgcgcagcggcctgcgtagctacgatccagaaagcggctggaacccgtacctggaaatcagcgctaactacaacttcctcggggactggagcgtttacggtacagcgcgttatacccgtttgtcggatgaagtgaccgacagcccgatggttgataaatcctggaccggcctgatctcaaccgggatcacctataagttctga

SEQ ID NO: 77993 - DNA, 885 bp, Citrobacter koseri
atgattaacacaattttcgctctcccggtcatcgaacaaattacccctgtcctctcccgccgccagctcgacgagcttgacgtgatcgtcgtcgatcacccgcaagttaaggcgtcttttgcactccagggcgcacatttgctctcctggaaaccagcaggcgccgaagaagtgctgtggctgagcaacaacacgccgtttaaaacaggcgttgcgctgcgtggcggcgtaccgatctgctggccgtggtttggcccctctgcgcagcagggtctgccgtctcacggctttgcccgtaacctgccgtgggcgctgaaagcccacaacgaagacgacaacggcgcggtactgacatttgagctacagagcagtgaggcgactcgccagtactggccgcacgatttcaccctgcttgcgcgcttcaaagtgggtaaaacctgtgagatcgaactggaagcccacggcgaattcgaaaccacgtctgccctgcacacctactttaacgtcggcgatatcgccgcagttaaggtcagcggtcttggtgaccgtttcattgataaagtgaacgacgccaaagaagatgtgctggcagacggcatccagacgttcccggatcgtactgaccgcgtttacctgaacccggaagcctgtagcgttatccatgatgatgcgctgaaccgcaacattgacgtcatccaccatcacaacattaacgttgtgggatggaaccctggcccggcactcgccgccagcatgggcgacatgccggatgatggctacaaaacctttgtctgtgtggaaacggcttacgccaccgcgccgcaaaaagccagcgaagaaaaaccgtctcgcctggtgcaaacaattcgcgtcgcaaaacgttaa

SEQ ID NO: 77994 - DNA, 996 bp, Citrobacter koseri
atgactatcaaagtaggtatcaacggttttggccgtatcggtcgcattgttttccgtgctgctcagaaacgttctgacattgagattgttgcaatcaacgatctgttagacgctgaatacatggcttacatgctgaaatatgactccactcacggtcgtttcgatggcaccgttgaagtgaaagacggtcatctgatcgttaacggtaaaaaaatccgtgttaccgctgaacgtgatccggctaacctgaaatgggacgaagttggtgttgacgtagttgctgaagctaccggtatcttcctgactgacgaaaccgcacgtaagcacatcactgctggcgcgaaaaaagtggttctgacgggcccgtccaaagacaacactccgatgtttgttaaaggcgctaactttgacaaatacgaaggccaggacatcgtttccaacgcatcctgcaccaccaactgcctggcgccgctggctaaagttatcaacgacaacttcggcatcatcgaaggtctgatgaccaccgttcacgcgaccaccgctactcagaaaaccgttgacggcccgtctcacaaagactggcgcggcggccgtggcgcggctcagaacatcatcccgtcctctaccggtgctgctaaagcggtaggtaaagtactgccggaactgaacggcaaactgactggtatggcgttccgcgttccgactccgaacgtatccgttgttgacctgaccgttcgtctggaaaaagcggcttcttacgaagacattaagaaagcgatcaaagctgcttccgaaggcccgatgaaaggcgttctgggttacaccgaagacgacgtagtctctaccgatttcaacggcgaagtatgcacttccgtgttcgatgctaaagcaggtatcgcgctgaacgacaacttcgtgaaactggtctcctggtacgacaacgaaaccggctactccaacaaagttctggatctgattgctcacatctccaaataa

SEQ ID NO: 77995 - DNA, 414 bp, Citrobacter koseri
atggctaatcaaccctctgcggaagatctgaaaaaaaagttgtccgaaatgcaattctacgtgacgcagaatcacggtacagaaccgccatttaccgggcgtttgctgcataataagcgtgatggcgtctaccactgtctggtctgcgacgcgccgctgtttcattcccaaaccaagtatgattccggctgcggctggccgagcttttacgagccggtcagtgaagaatctatccgttacattaaggacttttcccacgggatgcagcgtatagaaattcgctgcggcaactgtgatgcgcacctgggacatgtcttttcggatggcccacagccgacgggtgagcgttattgcgtcaattcggcctcattaagcttcaccgatgatgaaaatggcgaacaaactaagggctga

SEQ ID NO: 77996 - DNA, 276 bp, Citrobacter koseri
atgaatcttgatgagatgatcgacagcatgacgccggaagtttatcagcgcttatctaccgccgttgagctgggaaaatggccggacggcattgcgctaacgccggagcaaaaagagaacagcatgcaactggtgatgctctggcaggcgcggcacaataccgacgcgcagcatatgaccattgataccaacggtcagatggtgatgaaaagtaagcagcagttgaaagaggattttggtattgcgccaaaatcgattgcgacgctgaaactgtaa

SEQ ID NO: 77997 - DNA, 642 bp, Citrobacter koseri
atgacgacccgggccttactgctggttgatttgcagaatgatttttgtgccggcggcgcactggccgtccctgagggtgacagcacagtggacgtagcaaaccgtcttatcacctggtgtaaagcgcgcggcgacgcggtgatcgccagccaggactggcatcctgccggacacggcagtttcgccagccagcatcaggcgcagccctacagccagggacaactggacggtttagcgcaaaccttctggcccgatcactgcgtacaaaatagcgacggcgcggccctgcatcccctgctcagacagaacgccatcgacgcggttttccataaaggcgagaatccgcaggtggacagctacagcgccttttttgataacggacgccgccagaaaaccgccctggacgcctggcttcgtgagaacggcgtacagacgctgatcgtgatggggctggcgaccgattactgcgtgaagtttaccgtgctggatgcgctgcaactgggttatacggtgaatgtgattaccgatggctgccgtggtgtgaatattcagccgcaggacagcgcgcacgcctttatggagatggcggccgctggcgccacgctgtatacgctggttgactgggaagaaacgcagggttag

SEQ ID NO: 77998 - DNA, 1017 bp, Citrobacter koseri
atgcagaagaaatcgatttacgttgcctataccggcggtacgattggtatgcagcgctcggaacagggttacattccagtatcaggccatctccagcgccagctggcgctgatgcccgaatttcaccgcccggaaatgccggacttcaccattcatgaatatgccccgctgatggactcatccgatatgacgccggaagactggcagcatatcgcagaagacattaaagcgcgttacaacgactatgacggctttgtcatcctccacggcacggacacgatggcgttcaccgcctcggcgctctccttcatgctggagaatctgggtaagccggtaattgtgacagggtcacaaatcccgctggcggagctgcgctccgatgggcagattaatctgctgaatgccctgtatgtcgccgcgaattaccccatcaatgaagtcaccctctttttcaataatcggttgtttcgcggcaaccgcacgacaaaagcgcatgccgatggctttgacgcgttcgcctcccccaaccttcagccgctgctggaagccggaattcatatccgtcgcttaggtacgccgcccgcgccgcacggcgaaggcgagctgattgttcacccgatcacaccgcagcctattggcgtcgtcaccatttatccgggaatttctgccgaagtggtgcgtaacttcttgcgccagccggtaaaagcgctgatcctgcgttcttacggcgtcggcaacgcgccgcagaacaaagagttcctcaaagaactggaggatgcgagttcacgcggtatcgtggtggttaacctgacgcaatgcatgtctggcaaggtgaatatgggtgggtatgccaccggcaacgcgctggcgcatgcgggcgtgatcggcggcgcggatatgaccgttgaagcaacgctgactaagctgcactacttgttaagccagaatctggatacacagaccattcgtaccgcgatgacgcaaaatctgcgcggtgaactgacgccagacgaataa

SEQ ID NO: 77999 - DNA, 1857 bp, Citrobacter koseri
atgcgaaccctgtggcgatttattgccggattttttaagtggacatggcgactgctgaatttcgtccgggaactggtgctcaacctgttcttcatctttctggttctggtgggcgtcggtatctggatgcagcttagcgatggcaataccagccaacaaactgcacgcggcgcgctgctgttggatatttccggcgtgatcgtcgataaaccgtccagcaccaaccgcctgggcgtcattggccgacagctgtttggcgccagctctgaccgcctgcaagaaaactcactgtttgatatcgtcaacaccattcgtcaggcgaaagacgatcgcaacatcaccggcatcgtgatggatctgaaaaacttcgcgggcgccgatcagccttccatgcagtacatcgggaaagcgctgcgcgaatttcgcgatagcggcaagccggtctttgccgtaggcgacagctacagtcaggggcaatattacctggcgagcttcgccaataaaatctggctttctccgcagggtacggtcgatctgcacggcttcgcaaccaacggcctgtattacaaatccttgctggataagctgaaagtctccacgcacgtcttccgcgtcggcacttataaatccgccgtggaaccgtttatccgcgatgatatgtcgcctgccgcgcgcgaagcggacagccgctggattggcgagctgtggcaaaactacctgaacaccgttgcggcgaaccgtcagatccccgcgcagcaggtcttccctggcgcgcaggctatgctcgacgggctgagcaaagtggatggcgataccgcgaaatacgcgctcgacaacaaactggtggatgcgctggcgtctaacgccgaagtggaaaaagcgctgaccaaacagtttggctggagcaaagcagaaaacaactatcgggccatcagctattacgattattcgctgaaaacgcctgccgataccggcgacggtatcggcgtcgtgttcgccaatggcgcgattatggacggtgaagaaacaccgggcaacgtcggcggcgacacgacagcgtcgcaaatccgcgatgcgcgcctggacccaaaagtgaaagcgattgtgctgcgcgtaaacagccccggcggcagcgtcagcgcctctgaagtcattcgcgccgaactggccgctgcgaaagccgcaggcaagccggttgtggtgtcgatgggcggaatggcggcatccggcggttactggatctccaccccggcaagctacattgtggcgaacccgagcaccctgacaggctcaatcggcatttttggcgttatcaacaccgttgagaacagcctggattcgatcggcgtgcataccgatggcgttgccacctcgccgctggcggacgtttctgtcaccaaatcgctgccgcctgaagtgcagcagatgatgcagctcagcattgagaatggctacaaacgctttatcacgctggttgccgatgcgcgtaagagcaccccggcgcagattgataaaatcgcgcaggggcatgtctggaccggccaggatgcaaaagcgaatggtctggtagacagtctgggtgactttgacgacgccatcgccaaagccgcagagctggctaaactgaagcaatggcatcttgagtattatcaggatgaaccgacattcttcgacagaatcatggacagcatgtccggctccgtgcgcgcgatgctgccggaagccattcaggcgatgctcccggcgccgctggcgacagccgccagcgcggtaaaagcagagagtgataaactggctgcctttaacgatccacaaaaccgttatgcattctgcctgacctgcgcgaacgtgcgctaa

SEQ ID NO: 78000 - DNA, 552 bp, Citrobacter koseri
atggacgcactcgaattacttgtaaaccgtcgtagcgcctctcgtctggccgaacccgcacctgcgggtgaacagttacaaaatattctgcgcgcgggcatgcgcgtacccgatcacaaatccctgcaaccctggcgtttttttgtgattgaaggtgaggggcgtgagcgcttcagcgctgttctggagcagggcgccattgcggcggaaggcgatgagaaagcgatagagaaagcgcgcaccgcgccatttcgcgcgccgctgatcatcacggtggtggcgaaatgcgaggagaaccacaaagtgccgctgtgggagcaggagatgtcagcaggatgtgcggttatggcgatgcagatggcggcgattgcgcaaggcttcaacggcatctggcgcagcggcgcgttaaccgaaagcccggtggttcgcgaggcgttcggctgtcgcgcacaggataaaattgtgggcttcctctatctgggcacgccgcagctgaaagcgtcaacgaccatcagcgtaccggacccgacgcctttcgtgacgtatttctaa

SEQ ID NO: 78001 - DNA, 1044 bp, Citrobacter koseri
atgagcgagcacgctattcgtttaacgcaatacagccacggagccggttgcggttgtaaaatttcccctaaagtgttggaaaccatcctgcacagcgagcaggcgaagtttgtcgacccgaacctgcttgtgggcaatgaaacccgcgatgacgcggcggtatacgacctgggtaatggcaccagtatcatcagcaccaccgacttctttatgccgattgtcgataatccgtttgattttggccgtattgcggcgaccaacgccatcagcgatatcttcgcgatgggcggcaaaccgattatggcgatcgccattctgggctggcccatcaacaaactgtcgccggaaattgcccgggaagtcaccgaaggcgggcgttttgcctgtcgtcaggcgggtattgcgctggcgggcgggcactctatcgacgcgcctgaacccatcttcggtctggctgtcaccggcgtggtgccgaccgagcgcgtgaagaaaaacagcaccgcgcaggccggatgcaaactgttcctcaccaagccgctgggcattggcgtgttgaccaccgccgagaaaaaatcactgctcaagccggcacatcaggggctggcgacagaagtgatgtgccggatgaacattgcgggggcgtcgtttgcccatatcgacggcgtgaaagcgatgaccgacgtgaccggttttggtctgctggggcacctcagcgaaatgtgccagggcgcaggcgtgcaggcgcggatctgctatcaggacattccaaaactgccgggcgtcgaagagtacattaaacttggcgcagtgccgggggggacggagcgtaatttcgccagctatggccatctgatgggcgacatgtcgcgcgaggtgcgtgacctgctgtgcgatccgcaaacgtctggcggtctgctgcttgcggtgacgccggaagcggtagaggaagtgaaagtcaccgcggcggagtttggtattgaactgacggcgattggtgaactggttgacgcccgtggcggtcgcgccatggtagagatccgttaa

SEQ ID NO: 78002 - DNA, 1944 bp, Citrobacter koseri
atgcggttgtttattgccgaaaagccgagtctgggccgcgccattgcggatgtgctgccaaagccgcaccgcaaaggcgacggctttatcgaatgcgggaatggacaggtggtgacctggtgcatcggccatctgcttgaacaggcgcagccggacgcgtatgacggtcgttatgcgcgctggaatctggccgatctgccgattgtgccggaaaagtggcagctccagccgcgtccttccgtgacgaagcagcttaatgtcattaagcgctttttacatgacgcaagcgaagtgattcacgcgggagacccggatcgcgaagggcaactgctggtggacgaggtgctggattatctgcaactgtccccggaaaaacgccagcaggtgcagcgttgcctgatcaacgatcttaacccgcaggcggtggagcgtgcgatttcccggctgcgcgccaacagtgaatttgtgccgctgtgcgtctccgcgctggcgcgcgcgcgcgccgactggctgtatggcattaacatgacccgcgcgtatacccttctcgggcgcaacgcgggctaccagggcgtgctctcggtagggcgtgttcagacaccggttctcgggctggtggttcgccgcgatgaagagatcgagaacttcgtcgccaaagatttctttgaagtgaaagcgcatatcgtcacgccagctgaggagcggtttaccgccatctggcaacccagtgaagcgtgcgaaccgtatcaggatgaagaggggcgtttgctgcatcgtccgctggcggagcatgtggtaaatcgtattaacggtcagcccgcgatcgtcaccagctataacgataaacgggaatcagaatctgccccgctgccgttttcgctgtcggcgttgcagattgaagcggcgaaacgctttggcctgagcgcgcagaacgtgcttgatatctgccagaagttgtacgaaacctacaaattaattacctatccgcgttccgactgccgctatctgccggaagagcattttgccggacgccatgcggtgatgaatgccattggcgtacatgccgcggatttgttgccgcagccggtggttgacccggacacgcgaaaccgctgctgggatgataaaaaagttgacgctcaccatgcgatcatcccgactgcgcgcagttcatcaatttccctcagcgacaatgaagcgaaggtgtacaacctgatcgctcgccagtacctgatgcaattctgcccggacgcggtatttcgcaaatgcgtcattgaactggagattgcgaaggggaaattcgtcgccaaagcgcgttttctggcggaggccggatggcgaacgctgttgggcaataaagagcgtgacgaagagaacgacggtacgccgttaccggtggtggcgaaagacgacgaactgctgtgcgaaaagggcgaggtcgttgagcgtcagacccagccgccacgccattttaccgatgctacgctgctgtccgccatgaccgggattgcccgtttcgtgcaggataaagatctgaaaaagatcctgcgagcgaccgacggactgggaaccgaagcgacgcgcgcgggcattatcgaactgttgttcaggcgcggattcctgaccaagaaagggcgttacattcattcaacggatgccgggaaagctctgattcactcgttaccggagatggctgcccgaccggatatgacggcgcactgggagtctgtcctgacgcaaatcagtgaaaagcagtgccgctatcaggattttatgcagccgctggtcggcacgctttttcagttgatcgatcaggctaaacgcacgccggtacgtcagttccggggcattgtcgcgccaggcggtggcggcgagaagaaaaagagcgcgccccgtaagcgagcggcgaaaaaaagcccgccgtcagaagaggcgagcgtataa

SEQ ID NO: 78003 - DNA, 1344 bp, Citrobacter koseri
atggatcagacatgttctctggagtcgtttctaaaccatgttcaacagcgtgaccccaatcagaccgagttcgcgcaggccgttcgtgaagtaatgaccacgctgtggcctttccttgagcaaaatcctcgttatcgtcagatgtcattgctggaacgtttggttgagccagaacgcgtgatccagttccgcgtggtgtgggtggacgatcgtaaccaggtgcaggttaaccgtgcctggcgcgtacagtttaattccgccatcggcccgtataagggcgggatgcgttttcatccttccgttaacctctcaatactgaaattcctcggctttgagcagacgtttaaaaatgcgctgaccacgctgccgatgggcggcggtaaaggcggcagcgatttcgatcctaaaggcaagagcgaaggcgaagtgatgcgtttctgtcaggcgctgatgacggagctctatcgccatttagggccagacactgacgtacctgctggcgatatcggcgtgggcggacgtgaagtgggctttatggccggtatgatgcgtaagctctccaacaacagcgcctgcgtgttcaccgggaaaggcctctcgtttggcggtagcctgattcgcccggaagccaccggttatggcctggtgtactttactgaagcgatgctcaaacgccacggtctgggttttgagggtatgcgtgtggcggtgtccggttccggcaacgtggcgcagtacgctatcgagaaagcaatggcgttcggcgctcgtgtggtgacggcttcggactccagcggcaccgtcgttgatgagagcggcttcaccgaagaaaaactggcgcgcctgtgcgaaatcaaagccagccgtgacgggcgcgtggcggattacgcccgcgagtttggtctgccctatatggaaggcaaacagccgtggtcagtgccggttgatatcgccctgccgtgcgcaacgcagaacgaactcgacgtggacgccgcgcgcgtgctgatcgccaacggcgtgaaagcagtggcggaaggcgccaatatgccaaccaccattgaagccaccgatttgttcctcgaagccggcgtgctgttcgcgccaggtaaagcggccaacgcaggcggcgtggcgacctccggtctggagatggcgcagaacgccgcgcgaatgagctggaaagccgagaaagtggatgcgcgtctgcaccacatcatgctggatattcatcatgcctgcgtggaatacggcggcgaaaacaaacataccaactatgttcgcggggcgaacatcgcaggcttcgtcaaagtggccgacgcgatgctgggccagggcgtgatttaa

SEQ ID NO: 78004 - DNA, 276 bp, Citrobacter koseri
atgcatcgtttatttatcgcggcagcagcggcgatggtctcttttgccgcgctggcgaatcagcattatcgcccggatgtggaggttaacgtcccgcccgaagtgttcagctccagcgggcagcgtgcgcagccctgcaatcagtgctgcgtctaccaggatcaaaactattcggaaggggcggtgattaaagccgaaggcgtgctgctgcaatgccagcacgacgaaaaaacgctcagtacgaatccgttggtctggcgtcgcgtaaagccataa

SEQ ID NO: 78005 - DNA, 423 bp, Citrobacter koseri
atgaatatgatgaaaaccattgatgtcgtcgccgcaatcattgagcgtgacgacaaaatattgctggctcaacgcccggaacacgccgatcagccgggtatgtgggagtttgccggaggcaaagtggagtccagtgagacgcaacctcaggcgttgattcgcgaactgcgtgaagagttgggtattgaggcagttgtcgggcgctatatcgccagccatcagcgcgaagtctctggccggctgatccatctgcacgcctggcacgtcccggcgtttaccggcgccgtcaccgcgcattatcaccagaacatgatctggtgttcgccaaaagaggcgctgcgttacccgcttgcgcctgcggacattccgctgttagaggcgtttatggctttacgcgacgccagaccaacggattcgtactga

SEQ ID NO: 78006 - DNA, 570 bp, Citrobacter koseri
ttgaacgatccacaaccctgggttagcccattgacccatatcccttccagtctgaaacctctcgtcgctacgcagaaaaagcattacggcgacgttctgcaccccacgcgctggtgggggcgaatgccgtttctgttctggctggtggcgctgtttgtcgggtttctggaacgtaagcgcgcgcggttaacgccggtgatgcgcgcgttgttgatgacgcgcgtttcgcaggtgtgccattgcgccttctgtgtggatgccaacagtttacgtctggccgaacggtgtggggcgctggataaagtacaggccgttgccgggtggcaatcgtccacgctgttcagcgaggaggagcgtgtcgcactggcttatgccgaggccgtgaccgccacgccgccgcaggttgatgaggcgctcaaggcgatgatgaaacgctattttactgacgacgcgattaccgaaatgacggcgctgatcggctttcagaacttgtcagcgcgttttaatgccgcgctggatattccttcgcaagggctgtgtgacgcattgaaaggagcgccacatgtttga

SEQ ID NO: 78007 - DNA, 636 bp, Citrobacter koseri
atgtttgatcggcatctgcacccacgggttaaaccgctcctgcaccgctgtgccgcgtatctcgataaaccggcgatcaccccggacggcctgacgctgttcggatttgccattggcgtgctggcgctgccgtttctggcgctgggctggtatctggccgcgctggcggccattgtgctgaatcgcctgttcgacgggctggatggcgcgctggcgcggcgcagagggttaaccgatgcggggggatttcttgatatcaccctcgactttctgttttacgcgctggttccgtttggctttatcctggccgtaccggaacaaaacgcgctggcagggggctggctgctgtttgcgtttatcggtacgggcagcagttttctggcgtttgcggcgctggcggcgaagcatcagattgataatccgggctatgcgcacaaatcgttttactatctgggcgggttgaccgaaggcaccgagacaatattgctttttgttctgagctgcctgtttccgcgttattttcccgttctggcgtgggtatttggcgcgttgtgctggatgaccaccctgacaagggtctggagtggatacctgacgctgaaggctatccggcctggaaaaagagcctccccgtag

SEQ ID NO: 78008 - DNA, 1308 bp, Citrobacter koseri
atgaaacgtgtttctcaaatgaccgcgctggcactggcttcaggactcgcctgcgcttcctcctgggctgctgatatggcgcagtcgcttaccttcagccagctacagcaaaaacagggcgccgcaattgatacgcgccagagcgctttctacaacggctggccgcaaacccttaatggcccttccggtcacgaaccttccgcactgaatctgtcagcctcctggctcgataaaatgagcgacgagcagctcgccgcctggctgcaactgcatcagctcaggaaagacgccccgctggcgctgtatggcaatgacagtggcgtacaggcggtgaaatcacgtttacagaaggcaggcttcagccagattgctacgctgagcgatgcactgaccgatccttcccgactgcaaaagctccctcacttcgagcaattagcatacccacagtggttgcatgcccttcaacaaaaccagccggttacggctaaaccggcgggagactggaaggtgattgaagcaggctggggcgcgccgaaatattatctgctcagccatattcccggcgccggatacatcgacaccaatgaggtggaaagcgaaccgctgtggaataaagtctctgacgcgcagttgaaagcgatgctggcgaaacacggtattcgccatgacacgacggttattctgtatggccgcgacgtatacgctgcggcgcgcgttgcgcagattatgctctatgcgggcgtgaaggacgttcgtctgctcgacggcggctggcaaacctggtccgatgcgggtctgccggttgaacgcggcatgccggctgatgtgaagccggaacccgactttggcatggcgatcccggcgcagccgcagttaatgctggatatggaacaggcccgcgccctgctgcaccgtcaggacgcatcgctggtcagtatccgttcctggccggaatttatcggcaccaccagcggatacagctatatcaagccaaaaggcgaaattgccggcgcgcgctggggacatgcgggcagcgactccacgcatatggaggatttccataacccggacggcaccatgcgcagcgcagaggatatcgccgccatgtggaagcagtgggatattctgccggatcagcacgttgccttctattgcggcaccggctggcgcgcctccgaaacgtttatgtacgcgcgggcgatgggctggaaaaacgtcgccgtgtatgacggcggttggtacgaatggagcagcgatccgaaaaatccggtgtccaccggcgagcgcgacccggacagcagtaaatag

SEQ ID NO: 78009 - DNA, 633 bp, Citrobacter koseri
atgctcatcgttcaacatctcacgctgcgccaggacaatcaccgcttattgaatcaggtcgcctttcaggtcaaaaaaggtgacattgtcacgttaatgggaccctccggtagcggaaagtcttcgctgttttcgtggatggtcggcgcactgccgtctcagtttcaggcctccggcgagctttggctcaacgaacgacgcatcgatacgctccccaccgcgcaacgtcaaatcggtattttgtttcaggatgccctgctgtttgaccatttcagcgtcgggcagaacttactgctggcgctgcctgccgcgataaaaggggcggccagacaaacggaagtgcggcatgctcttgagcgcgccgggctggacgggttcagccgccgcgatccggcgtcattgtccggcggccagcgcgccagggtggccctgcttcgcgcgctgctggcgcaaccgcaggcattactgctggatgagccgttcagccgactggacgccgggcgccgcgacaccttccgccggtgggtctttgccgaagtacggcaacaaaatattccggtggtacaggtgacgcacgatatccaggatgttcctcccggcggcacggtgctccagatggaggcgtgggcgtga

SEQ ID NO: 78010 - DNA, 1536 bp, Citrobacter koseri; identical to SEQ ID NO: 77865

SEQ ID NO: 78011 - DNA, 1164 bp, Citrobacter koseri
atgcgtcgtactctattactggcgggtctgctgttgacgggccatgtgcaagccgtcaaaaactggcaggcggtgaaagatgaagccaaaggccagaccgtctggtttaacgcctggggcggcgacaatgccgttaatcagtatctcgactgggtcagcggcgagatgaaaacgcattacgccattaacctcaggattgtccggcttgcggatgccgccgatgccgtgaaacgcattcagactgagtccgccgccgggcgtaaaaccgatggttccgtcgatctgctgtgggtaaatggcgagaacttccgcacgctgaaagaagccggactgctgcaaactcactgggcggaaacgctgccaaactggcgctatgtcgatacgcgcaaaccggtacgcgaggatttttccatgccgacgcaaggggcggagtcaccctggggcggcgcgcagttaaccttcattgctaaccgggatattacgccgcagccgccgcaaagcccgcaggcgctactcgcttttgcgaaagcccatcccggtactgtcacctacccacggccgccggattttaccgggacggcgtttctggaacagctgttactggcgttaacccctcaaccggatgcgctcaaggtcgcgccggatgacgcgacgttcaattccgtcaccgcgccgctatgggcatatcttgatgcgctgcatcccagcctgtggcggaagggaaaagacttccctccctctcccgcccggatggacgcgctgctgcaagccggttcgctgcgcctgtctctgacgtttaatcccgctcatgcgcagcaaaagatcgccagcggcgaactgcccaaaaccagctacagtttcggtttttcacaaggcatgattggcaacgtgcattttgtcacgatcccggcgaacgcccgcgccagcgcaggcgcaaaggtggttgccaatttcctgctttcccccgacgcgcagttgcgcaaagccgatccggcgttctggggcgatccttccgtgcttgacccgcataagctgcccgccgggcagcgggaagcgttacggtcgcgcattcctgacgggttgccgcctacgctggcggaaccgcattccgcatgggtgaacgcgctggaacaggcatggctacgccgctacggtacgcagtaa

SEQ ID NO: 78012 - DNA, 675 bp, Citrobacter koseri
gtgaacgcgaaaaaacgactgctctcaggttttttaatcatctgcatcgccggggtggtgtgggctttgccccccggttttctctcccttgataccctgaaacgctatcacacgatgctggcggcctggcagcaacagtcgccattcctgagcgccggtctctattttctggtctatacgctggtggcggccttatcgattcccggcgctgcgctgctgacgctgctcggcggcgcgctattcggactctggcaaggaacgctgctggtctccttcgcgtcaaccctcggcgctacgctcgccatgctggccagccgctacctgctgcgggagtggatctcccgccggttcgcacgccagatgcaaaccgtaaatcatggtatggcgcgcgacggcgccttttatctgtttgcgctacgcgtaatgccgctgttcccctttgttctcgttaatttactcgccgggttgacgtcaatccgcgtacgtcaatactggtggatcagtcaggcgggcatgtttccggcaacggtgatttatctcaacgccggacgccagctcagccagttgacatcaatacgcgacatcatttcccccggtatgctggcggcctttgccctgctggggctgttaccactggcctcccgttggctggttaagcgttttttacgatcctaa

SEQ ID NO: 78013 - DNA, 363 bp, Citrobacter koseri
atgggggatatgaatatcagcccaaccgatctggatatcggcattggcgaagagaaccgcaaacgctggctgcgtaccggtaagtgctctttcctgccggaagagcgcgagtggatggatcgcctgattagctgggggctggtggataccttccgtcacgcgcacccggaaacggtcgataaattttcatggtttgattaccgctcaaaaggtttcgacgacaaccgggggctgcgcatcgacctgctgctggcgagcaatccgctggccgaacactgcgttgaaaccggtattgactatgaaatccgcagcatggaaaaaccgtccgaccatgcgcccgtctgggcaaaattccgggtctga

SEQ ID NO: 78014 - DNA, 336 bp, Citrobacter koseri; identical to SEQ ID NO: 77864

SEQ ID NO: 78015 - DNA, 1221 bp, Citrobacter koseri
atgtctctgtcaattacgcgtgaaaattttgatgaatggatgatgccggtctatgccccggcaccttttattccggttcgtggagaaggctcacgtctgtgggatcagcaggggaaagagtatatcgacttcgccgggggaattgcggtgaatgcgctcggccatgcgcacccggctttacgcgaggcgttgaatgagcaggcgagcaaattctggcataccggaaatggctacaccaacgagccggtgctgcgactggcgaagatgctgattgacgccacctttgctgaacgcgtcttcttctgtaactccggcgcggaggccaacgaagcggcgctaaaactggcgcgtaagtatgcgcacgatcgttttggcacgcataaaagcgggattgtggcattcaaaaatgcctttcatggccgcacgctgtttaccgtcagcgcaggcgggcagcccgcgtattcacaggatttcgctccgctgccgccggatatccgccatgccgtgtataacgatctcaacgcggccagcgaactgattgatgacacgacatgcgcggtgatcgtggagcccatgcagggcgaagggggcgtactcccggccacgaaagcattcttacaggggctgcgcgaattgtgcgaccgacacaatgccttgctgatttttgatgaagtacaaacgggggttgggcgtaccggcgagctgtatgcctacatgcattatggcgtcacccccgatctgcttaccactgcgaaagcgctgggcggcggtttccccatcggggcgctgttggccactgaaaaatgcgccagcgtgatgacggtaggcactcacggaaccacctacggcggcaacccgctggcttctgcggtggcgggaaagctgctggaaatcgtcaatacgccggaaatgctgaacggcgttaagcaacgccatgactggtttgtcgaacgcctgaacgccataaatgaacgcttcggattgttcagtgaaattcgtggactggggctgcttattggctgtgttctggaggctgagtttgccggaaaagctaaacttatttcacaggaagccgcaaaagccggggtgatggtgctgattgcgggcgctaacgtggtgcgtttcgcacctgcgttaaacgtcagcaaagaggaagtggcaaccgggctggatcgctttgcgctggcctgtgaacgcatcaaagcaggaggttcgtcatga

SEQ ID NO: 78016 - DNA, 1035 bp, Citrobacter koseri
atgatggtgatccgccccgtcgaacgacgtgatgtcagtgcgttaatgcagcttgccagtaaaaccggcggcggcctgacctctctgccagcagatgaagcgacgctgacgtcgcgtattgagcgtgcgctaaaaacgtggcgtggcgaactgccgaaaagcgaacagggttacgtgttcgtgctggaggacagcgatacgggaagcgttgcgggaatttgtgcgattgaggtggccgtggggttgaacgatccctggtacaactatcgcgttggcacgctggtgcatgcttctaaagaactgaatgtctataacgcgctgccgacgctgtttctcagtaacgatcataccgggagcagcgaactgtgcacgctgttcctcgatcccgactggcgtaaagagggcaacggctatttgctctctaaatcacgctttatgtttatggcggcgtttcgcgacaaatttaatgaaaaggttgtggcggaaatgcgcggcgtgatcgacgaacacggctactcgccgttctgggaaagcctgggagaacgctttttttctatggaattcagccgggcagactatttatgcggcaccgggcagaaggcgtttattgctgagctgatgccgaagcaccctatttacacccatttcttatcggaagaagcgcaggcggtgattggcgaagtacatccgcaaacggcgccggccagaacggtactggagaaagaaggtttccgctaccgcaactatatcgacattttcgacggcggcccgacgctggagtgcgacattgatcgggttcgggcaatccgtaaaagccgcctgctggacgtggtggaaggccagcccgcagcgggcgagtttccggcgtgtctggtcgccaatgaaaattatcatcactttcgcgccatgctgattcgtaccgacccggatacgcaacgtctggtgctgactgcggcgcaacttgatgcgctcaaatgccacgcgggagatcgcgttcgtctggtacgtctttgcgctgaggagaaaaccgcatga

SEQ ID NO: 78017 - DNA, 1479 bp, Citrobacter koseri
atgactttatggataaatggcgactgggtaactggtcagggggagcgccgggtcaaaacgaatccggtgaatggtgaagtgctctggcagggcagcgacgcggatgcgacacaggtcgctgaggcagggcgtgcggcgcgtgcagcgtttccggcctgggccaggctgcctttcgccgcgcggcaggccattgtggaaaaattttccgccttgctggaggttcataaagcggagttgacggcaattattgcgcgagaaaccgggaagcctcgctgggaagcggtgacggaagtgacggcgatgatcaataaaatcgctatctcggtgaaggcataccatgcccggacgggagaacaacaaagcgaattgccggacggggcggcgacattgcgccatcgtccgcatggcgtgctggcggtgtttggcccgtacaattttcccggccatttacccaacggccatatcgttccggcgttgctggccggaaataccctgatttttaaaccgagcgagctaacgccgtggactggcgaagcggtgatgaaactgtggcaacaggcggggttgccgcctggcgtactcaacctggtgcaaggagggcgcgaaacgggacaggcgctcagcgcgctggacgcgcttgacggcctgctctttaccggcagcgcgaatacgggatatcagttgcaccgtcagttatccgggcaaccggaaaaaatcctggcgctggaaatgggagggaataacccgctcatcattgagaatccagaggatattgatgcggcggtacacctcactattcagtcggcgtttgtcaccgccggacagcgctgcacctgcgcccgccgtttgctggtgaaacgcggggaacagggcgacgcgtttctggcgcgcctgctggaggtgagtcagcgtttaacgccgggtgagtgggatgatgaaccgcagccgtttatcggcgggctgatttccgaaccagctgcgcgtcatgtgtatgaggcctggcagcgtcttgaggcgatgggcggacgaacgctgctggccccacgtatgctgaaagcgggaacgtccttgttgacgccgggcattatcgaaatgaccggcgtgaagcaggtcccggatgacgaggtgtttggcccgttactgagcgtctggcgctatgagcgctttgatgaagccattcgtatggcgaataacacccgcttcggtttgtcgtgcgggctggtgtctcccgatcgtaagcagttcgaccagctactgctggaggcgcgtgcgggtattgttaactggaacaaaccgctgaccggagcggccagcacggcgccgtttggcggcgttggcgcgtcggggaaccatcgccccagcgcctggtatgcagcagattattgcgcctggccgatggcgagcctggaatcgccgacgcttgtactgcccgattcgctcagtccggggctggacttctctcgcgaggaaccggtatga

SEQ ID NO: 78018 - DNA, 1344 bp, Citrobacter koseri
atgaaagcgcatgaagtgaattttgacggtctggtggggttaacccaccactatgccgggctgtcctttggtaacgaggcgtcgatacagcatcgctttcaggtgtcgaatccccgcctcgcggcgaagcagggcttactcaagatgaaagcgctggcggatgcggggttccctcaggcggtcatccccccgcacgagcggccgtttattcccgtgcttcgtcagctaggttttagcgggcaggacgagcaggtgctggagaaagtggcgcgccaggcgcctcactggctctccagcgtcagctccgcttcgccgatgtgggtggcgaatgcggcgacggtatgtccttcagcggacgcgcttgacggcaaagtgcatctgacggtggcgaacctgaacaacaaatttcaccgcgcgctggaggcgccgaccacggcgtctttgttgcgggccatcttccgcgacgcgcagtttttcgcagtgcatgacgcgctgccgcaggtggcgctgctgggggatgaaggcgctgccaaccataaccggctcggcggtgattatggcgcaccgggcattcagctgtttgtctatgggcgtgaagagggcgtcgacacgcgtccggtgcgctatccggcgcggcaaacccgcgaggccagtgaagcggtggcgcgtcttaaccaggtgaatccgcatcaggttatctttgcccggcagaatccagacgttatcgatctcggcgtgttccacaatgatgtgattgcggtgtcgaaccgccaggtgctgttctgccatgaacaggcattcgcaaagcagggcgagctgatgcgccagctccggtcgcgcgtggcgggatttatgccgcttgaggtgcctgccagggaggtttccgtgcaggatgccgtcgccacgtacctgtttaatagtcagcttttaagccgcgatgacggctctatggcgctggttctgccgcaggagtgccgggaacatgccggtgtgtggcggtatctgaatgcgttgctggcggctgataaccccatcagcgatctgcgcgtgttcgacctgcgcgaaagtatggcgaacggcggcggcccggcctgtttacgcttgcgcgtggtattgaccgaggatgagttgcgggcggtgaatccggcggtgatgatgaacgataccctgttcagtacgctcaatgactgggtggatcgctattatcgcgaccgcctcaccgccgccgatctggccgatccgcaattgctgcgtgaagggcgggaggcgcttgatacgctgacgcaactgcttaacctggggtcggtgtatctcttccagcaggagggcgcagggaatggataa

SEQ ID NO: 78019 - DNA, 969 bp, Citrobacter koseri
atggataactttctggcgcagacgctggcaggaatatcccccgatattacgcaaggggaaacggagagctttcactggcgctggcagatgcctggtgtgcttgaacttacgcctgccgttgaggttgaccgcgctctggtgctctctgcgggcatccacggcaatgaaacggcgcctgtggaaatgctggacgcactcctttcggcgctgtttgaagggaaaatccccctgcgctggcgattgctggtgattctggggaatcctccggcgctggccgagggggtacgctattgccatagcgatatgaaccgtatgttcggcgggcgctggcagatgttcgaggagagcggggaaacgctgcgcgcccgcgagctggaacagctgctggaggatttttattcccgccgcaaaacgcggatacgctggcatctcgatctgcatactgcgattcgcggctcccgccacgttcggtttggcgtcttgccgcaacggccgatcccctgggatgaacactttttgtcatggctgggggcagcagggctggaggcgctggtttttcatcaaacgccgggcggcacctttacgcattttagctgtgagcattttggcgcgttgtcctgcacgctggagttgggcaaagcgctgccgtttgggcacaacgatctgacgcaatttacccctaccgcacaggcgctggcgacgttgctggcgggagaaaagccgatggaagggggaacgaggccgattcgctatcgcgtggtggcgcaaattacacgccgcagcgatgcgtttgttctctgtatggataaccagacgctgaatttcacgccgttcaaagaaggaacgctactggcgcaggatggcgatgagcaggtgatcgttacccatgatgttgaatatgttctctttcctaaccctaatgtggcctgtggtttacgcgctggcctgatgctggaaaaactcgcgtaa

SEQ ID NO: 78020 - DNA, 489 bp, Citrobacter koseri
atgcgtaaattaactgcactgtttgttgcctctaccctggcgctgggcgctgcgaacctggctcacgcggctgataccactaccgctgctccggcagatgcgaagccgatgatgcaccacaaaggcaaattcggtccgcatcatgacatgatgttcaaagatttgaacctgaccgacgcgcagaaacagcaaatccgcgacattatgaaaggtcagcgtgaccagatgaaacgtccgccgctggaagagcgccgcgcaatgcacgatatcatcaccagcgacagcttcgataaggcgaaagccgaagcgcagattgcgaagatggaagaacagcgcaaagccaatatgctggcgcacatggaaacgcagaataagatctacaacattctgacgccggaacagaaaaaacagtttaatgccaattttgagaagcgtctgacagaacgtccggcgccggaaggtaaaatgccaacaccacctgctgagtaa

SEQ ID NO: 78021 - DNA, 576 bp, Citrobacter koseri
atggaatactttgatatccgtaaaatgccggtaaacctctggcgcaatggtgcgggcgaaacgcgcgagatttgttgttttcctccggcgacgcgggattttcactggcgcgccagtattgcgtctatcgccgggaacggggagttttcccttttccctggggttgagcgcgttattacgttactggaaggcggagaggtgatgctggaaggcgtgaatacgtttacccataccctcaagcgacatcagccattcacgtttgcaggcgatagcgttgtgaaagccacgctgtcggaagggcaaatgtcgatggatctcaatatcatgacccgacgcgatcgctgtaaggcgaaggtcagggttgccgatcgcacgtttacgaccttcggttcgcgcggtggcgttgtgtttgttattagcggcgcctggcaactgggagacaagctcctgaccgccgatcagggcgcctgctggcatgacgggaaacacacgttacggttgttgaagccagaaggacagctgttgtttagcgagattacgtggttgccgggttatacgccggacaccgtccagtaa

SEQ ID NO: 78022 - DNA, 831 bp, Citrobacter koseri
atgacgctacagcaagagataatccgggcgcttggcgcaaaaccgcacattaatgcagaagaggaaattcgccgtagcgtagatttcctgaaagcgtacctgaaaacatatcccttcctgaaatccctggtactgggtatcagcggagggcaggattcgacgctgacgggcaaattgtgccagaccgcaattactgaactgcgtgaagagacagggaacgacgccctgcaatttattgccgtgcgtctgccattcggcgtgcaggccgacgagcaggattgtcaggatgcgatcgcgtttattcagccggacagagtcctgaccgtcaatattaaaggcgccgttctggccagcgagcaggcgttgcgtgaagcaggcattgaattaagcgattttgttcgcggcaacgaaaaagcccgcgaacgcatgaaggcacagtacagtatcgccggaatgaccaacggtgtggtggtcggcaccgatcatgccgccgaagcggtgacgggtttcttcactaaatatggcgatggcggtaccgatattaacccgcttttccgtctgaacaagcgccagggaaaacagctgctcgccgcgctgggttgcccggaacatttatataagaaagcgccaacggcggatctcgaagacgatcgcccttctctgccggacgaagcggcgctgggcgtcacctatgacaacattgatgattatctggaagggaaaacgctggatgccagcgtcgcgaaaatcatcgaaggttggtatatccgaacggaacacaaacgtcgcacacccattacagtatttgacgatttctggaagaaatcataa

SEQ ID NO: 78023 - DNA, 342 bp, Citrobacter koseri; identical to SEQ ID NO: 73234

SEQ ID NO: 78024 - DNA, 321 bp, Citrobacter koseri
atggaaaagaaacacatttatctgttttgttctgcgggcatgtcgacttctttactggtatcgaagatgcgcgctcaggctgagaaatatgaagtgccggttattattgaagcatttcctgagacgctggcaggagaaaaaggtctttcagcggatgttgtgttattaggcccacaaattgcttatatgttacccgaaattcagcgtttgttacccaacaaacctgtggaagtgattgactcgctgctgtacggcaaagtcgatggtttaggcgtgcttaaggctgctgtcgcagcaattaaaaaagccgccgcaaattaa

SEQ ID NO: 78025 - DNA, 1359 bp, Citrobacter koseri
atgagtaacgtcattgcttcacttgaaaaggtactccttccttttgctgttaaaataggaaagcagccgcacgttaatgcaatcaaaaatggctttattcgcttaatgccgttaacccttgcgggggccatgtttgtattaatcaacaacgttttcctgagctttggggaggggtcgtttttttattctttaggcattcggcttgatgcttccaccattgaaacattgaatggcttaaaaggtattggcggaaacgtctataacggtacgctcggtattatgtcgttaatggcgccgttctttatcggaatggcgctggcggaagagcgtaaagttgatgcgctggcggcggggctgttatccgtggcggcctttatgaccgttacgccatatagcgtaggcgaagcttatgcggttggcgcgaactggctgggcggtgcgaatattatctccggtattattattggtctggtcgtggcggaaatgtttacctttattgtgcgccgtaactgggtcattagattaccggacagcgtcccggcgtcggtttcccgttcattctcggcgttaattcctggctttattattctctccattatggggatcattgcgtgggcgctggcgaactacggttctaacttccaccagatcattatggataccatttctacgccgctggcatcgctgggcagcgtggttggctgggcctatgtgctgtttgttccgctactgtggttctttggtattcacggctcgttggcattgaccgcgctggacagcggtattatgacaccgtgggcgctggaaaacatcgccatctatcagcagtttggttccgtggatgcggcgctggaagccgggaagacgttccacgtctgggcgaaaccgatgctcgattcctatattttcctcggagggagtggcgcgacgctgggtctgattatcgccatcttcctggcctcgcgtcgtgcggattaccgccaggtagcaaaactggcgctgccgtccggtatcttccagattaacgaaccgattctgttcggcctgccgattattatgaacccggtgatgtttatcccgttcattctggttcagccgattctggccgccattacgctgattgcgtattacctggggattatcccgccgattaccaacatcgcgccgtggacgatgccaaccggtctgggagcgttctttaacaccaacggcagcgttgccgctctgctggtcgcgctgttcaacctgggcgtcgcgacgctgatttatctgcctttcgtggttgtcgccaacaaagcgcagaatgcaattgagcaagaagaaagcgaagaagaaatcgctaacgcactgaaattttaa

SEQ ID NO: 78026 - DNA, 351 bp, Citrobacter koseri
atgttggatctcgaaaacgtagcgggtacgccgtcagaggctgaagaactcgaagaagtggtgatggggcttatcatcaactccggtcaggcgcgcagcctggcttatgcggcgctgaaacaggccaagcagggtgattttgctgcggcaaaaacgatgatggagcagtcgcggatggcgctcaatgaagcgcatctcgtgcagacgaaactgattgaaggcgatcagggcgaaggtaaaatgaaagtcagcctggtgctggttcatgctcaggatcacctgatgacgtcgatgttagcgcgggaactggttacagagttaatcgagcttcacgagaagctggaacagtga

SEQ ID NO: 78027 - DNA, 843 bp, Citrobacter koseri
atgatgcagctacaggttaacgcaccggagatcgctaccgctcgtgagcaacagctttttaacggcaagaatttccatgtgtttatctataacaaaactgagagcatcagtgggctgcatcagcatgattattatgaatttaccctggtgttaacggggcgctactatcaggaaatcaacggtaaacgtgtgctgctggagcgtggtgatttcgtgtttatcccgttgggatcgcaccaccagagtttctatgagttcggcgccacgcgtattcttaacgttggtatcagtaagcgtttttttgaacaacactatcatcctttattaccgttttgttttgttgcgtctcaggtataccgggtcaacagcgctttcctgacttatattgaaacggttatcgcgtcgctgaactttcggggaaacgggttagatgagtttgtagaagtggtcaccttctacatcattaatcggctgcgccatcaccgtgaagagcaggtgattgacgatattccgcaatggctgaaagcgaccgtggagacaatgcacgacaaaacgcagtttggtgaaaacgcgctggaaaatatggtgcacctgtccgcaaaatctcaggagtatctgacccgcgcaacgcagcgttattacagcaaaacgccaatgcagattattaatgagatccgtattaattttgcgaaaaaacagctggaaatgaccaactactccgtaacggatatagcgtatgaggcgggttacagtagcccaagtctgtttattaaaacgtttaaaaagctgacctcatttacaccgaacagttatcgtaaaaaattaactgaatttaatcagtaa

SEQ ID NO: 78028 - DNA, 1356 bp, Citrobacter koseri
atgagccagaaattaaaagtcgtcacaattggtggcgggagcagctacacccctgaattactggaaggttttattaagcgttatcatgaattgccggtttctgaattatggctggtggatgttgaagacggaaaagagaaactggatattatttttgacctctgccagcgcatgatcgacaaagccggtgtcccgctgaaattatacaaaacgctggatcgtcgcgaggctttgcaaggggcggatttcgtcactacgcaactgcgcgtgggtcagctgaaagcccgtgagcaggatgaacgcattccgctaagtcacgggtatctggggcaagagaccaacggcgcaggcggcctgttcaaagggctgcgcaccatcccggttatctttgatatcgtgaaagatgtcgaagaactgtgcccgaacgcgtgggtcattaacttcacgaacccggctggcatggtgacagaagcggtttatcgccacacccgctttaagaaattcatcggcgtatgcaatatccccgtggggatgaaaatgttcatccatgacgtgctggcattgcaagacagcgacgatctgtcgatcgacctgtttggcctcaaccacatggtgtttattaaagacgtactggtgaatggcgaatcgcgctttgctgaactgctggatggcgtggcgtccgggcagttaaaagcgtcaacggtgaaaaatatttttgacctgccgtttagcgaagggcttattcgctcgctgaatatgctgccgtgctcctacctgctttactacttcaagcaaaaagagatgctggcgattgaaatgggcgaatactataaaggcggcgcgcgcgctcaggtggtgcagaaggttgagaaacagctcttcgatctttataaaaatccagagctgaacatcaaaccgaaagagctggagcagcgcggtggggcttactattccgacgccgcatgtgaagtgattaacgctatctataacgataagcagacggaacactacgttaatatcccacatcatggtcatgtggataatatccctgctgactgggcggtggagatgacctgcacattagggcggaatggggcgacgccgcacccgcgcatcacgcatttcgatgaaaaagtgctgggcctcatctataccatcaaagggtttgaagtcgcagccagtaaggcggcgctgagcggcgagttcaatgatgtgctgttagcgcttaacctgagcccgctggtgcactccgatcgcgatgcggaaaccctggcgcgggagttgattctggcccacgagaagtggctgccgaattttgcggaatgcatcgagaaactcaaaggcgcacaacactaa

SEQ ID NO: 78029 - DNA, 759 bp, Citrobacter koseri
atggaacgcttattgattgtgaatgcggatgattttggcctgagcaagggacaaaactacggcattgtcgaggcttgtcggaatggcgttgtgacgtccacaacggcgctggtcaatggtgacgccatcgaccatgcggcgcagctgtgccgtgacgtgccgaaactggcggtggggatgcattttgtactcaccttagggaagccgctgacggcgatgccgggtttgacgcgtgaagggctgctgggaaaatggatctggcaaatggccgaggaagataccttgccgctggatgaaatttcgcatgagctggagtgtcagtatcagcgttttatcgacctttttggccgtgagccaacgcatctggacagtcatcaccatgtgcatatgttcccgcaaatttttcccattgtggcacagtttgcggcagaacgcggcgttgctctgcgtatcgatcgccagtcggtgcttaatgctgacgatctgccggtagcgttacgtagctcgcagggattcagcagcgagttttacggcgacgctatttcagaagcgctgtttcttcaggtgctggatgcctctgctgacagaggcgaaaagtcactggaagtgatgtgtcatccggcgttcatcgacaatatcatccgtcagagcgcctattgttacccccgcttgactgagcttgacgtgctgacgtctgcgtcgctgaagtatgcgattgcggaacgcgggtatcgtctcggcagttttcttgatgtctga

SEQ ID NO: 78030 - DNA, 1392 bp, Citrobacter koseri
atgaattttccattaatcgcgaacatcgtggtgttcgttgcactgctgttcgtgctggcgcaaactcgccacaaacagtggagtctggcaaaaaaagtgctggtcggtctggtgatgggcgtgatcttcggtctcgccctgcacaccgtttacgggtctgacagccaggtattaaaagactccgttcagtggttcaacatcgtcggcaacggctatgtacaactgctgcaaatgatcgtcatgccgctggtcttcgcgtctattctcagcgccgttgcgcgtctgcataacgcgtctcagttgggtaagatcagctttctgaccattggcacgctgcttttcactaccctgattgccgcactggtgggtgtactggtcaccaacctgttcggtctgacggcggaaggtctggtgcagggcggcgcggaaaccgcgcgtctgaacgccatcgaaaccaactatgtcggcaaagtcgccgacctcagcgtgccgcaactggtgctgtcgtttgtgccgaaaaacccgtttgctgacctgaccggcgcaaacccgacctccatcatcagcgtggtgatcttcgcggcattccttggcgtcgcggcgctgaaactgctgaaagacgacgcgccgaaaggcgaacgcgtgttaatcgctatcgataccctgcaaagctgggtgatgaagctggtgcgcctggtaatgcaactgacgccatatggcgtactggcgctgatgaccaaagtcgtcgcagggtctaacctacaggacatcatcaaactgggtagcttcgtggtcgcatcttatcttggcctgatcatcatgtttgtggtgcacggtatcctgctgggcgtcaacggcgttagcccgctgaaatatttccgtaaagtatggccggttctgacgttcgcctttaccagccgctccagcgccgcgtccattccgctgaacgtggaagcgcaaacgcgtcgtctgggcgtaccggaatccatcgccagcttctccgcctcttttggcgcgacgattggtcagaatggttgtgcaggcctgtacccggctatgctggcggtgatggttgcgccgactgtcggtattaacccgcttgatccggtctggattgccaccctggtcggtattgtgaccgtcagctctgccggtgtcgcgggcgtcggcggcggcgccaccttcgctgcgctgatcgtcctgcctgcgatgggcctgccggtcacgctggtcgcgctgctgatttccgttgaaccgctgatcgatatggggcgtaccgcgctgaacgtgagcggctcaatgactgccggtacgctgaccagccagtggctgaagcagacggacaaaacccttctggacagtgaagacgatgccgaactggcacatcattga

SEQ ID NO: 78031 - DNA, 591 bp, Citrobacter koseri; identical to SEQ ID NO: 73226

SEQ ID NO: 78032 - DNA, 762 bp, Citrobacter koseri
atgattctggatgcgtttagtcttgcaggtaaagtcgcgatagtgaccggatgcgataccgggcttgggcagggtatgacgctggcgctggcggaagcaggctgcgacatcgtcggcgttaatcgcaaagtcccccacgatacggcagcaaaagtggcggcgctcggacgccgttttatggcgatccaggccgacctgagccagcaacgcgctatcccggctatcgtcgcgcaaacggtcgaacagtttggccgaatcgacattctggtgaacaacgccgggacgatccgccgcgaagacgcgctgtcgtttagcgagaaagactgggacgatgtgatgaatttgaatctcaaatccgtgttctttctctctcaggccgtcgcacggcaattcctgaagcaaggtgatggcgggaagattattaatatcgcctcaatgctttcattccagggcggcattcgcgttccttcttataccgcgtcgaaaagcggcgtattgggcatcacgcggttgctggcgaacgaatgggcggagcaccacatcaacgtgaacgccatcgctcccggttatatggcgacgaacaatacgcagcagctgcgggatgacgccgcacgcagcaaagagattgttgaccgcattccggccggacgctggggcacacctgccgatctgcaaggcccggttgtctttctcgcttcttcggcgtctgattacgttcacggctataccctcgccgtcgatggcggctggctggcgcgctaa

SEQ ID NO: 78033 - DNA, 669 bp, Citrobacter koseri
atgtcaaccccgcgtcagattcttgctgcaattttcgatatggatggactactgatcgattccgaaccgctttgggatcaagctgaactggaggtcatggcaagtttaggcgtagatattacccgccgccatgaactcccggatacgctgggtttacgcatcgatatggttgttgacctctggtacgcccaacaaccgtggaatgggccagaccgtcaggcggttaccgaccgaatcattacccgcgccatctcactggttgaagaaactcgcccgctgctccccggcgtgcgcgaagcggtcgcactgtgcaaatctcaggggttaatggtcggtctggcctccgcttcccccctgcatatgctggaaaaggtgctgaccatgtttgatctgcgtgaaagtttcgatgccctggcctctgcggaaaaactgccttacagcaagccgcatccgcaggtatacctcgattgcgcggccaaactgggcgttgacccgttaacctgcgttgcgctggaagactccgtcaacggcatggtcgcctcaaaagcggcgcgaatgcgctcaattgttgttccggcggaagagggccagcacgacccgcgctttgcccttgccaacgtcaaactgacttcgctggctgaactgaccgcagcgcatctgcgcggttaa

SEQ ID NO: 78034 - DNA, 861 bp, Citrobacter koseri
atgtggcaggctatcagtcgtcttttaagcgagcaattaggtgaaggcgaaatcgaactgcgtaatgaactgcccggcggagagatccatgccgcatggcatttacgctatgcgggacgcgattttttcgtcaaatgtgatgaaagagagctccttcccggctttacggcggaagctgaccaactggagctgctttcccgcagtaaaaccgtcaccgtcccgaaagtctgggcgcagggctcagacagagactacagttttctggtgatggattatctccctccccgtcctctggatgcccacaacgcctttatcctcggtcagcagcttgcccatttacatgaatggagcgaccagccccagtttggccttgattttgataacgccctttccaccacgcctcaacccaatgcctggcaacgacgctggtcaacattttttgccgaacaacgcattggctggcagctcgaactggcggcagaaaaaggcatcgcatttggcaatatcgatgcgatcgttgagcatgttcagcagcgtctggcctcgcatcagccgcagccttcgctgctgcacggcgatttatggtcaggaaactgcgcgcttgggcctgatggcccctatattttcgatcccgcctgttactggggcgacagggagtgcgatctggccatgctgccactgcataccgaccaacctccgcagatctatgatggctaccagtccgtctctccgctaccgctggattttctggatcgccagccgatttatcagctctataccctgctcaatcgggcgagactgtttggcgggcaacacctggtggtggcgcaaaaagcgatggaaaggttgctggcggcatag

SEQ ID NO: 78035 - DNA, 288 bp, Citrobacter koseri
atggccagtggtgatgtcatccgctatgtcataaccgtgaaatttcatgaagactcgctgacagaaattaacgagttgaacaaccatctgacgcggtgcggttttctgctcaccatgaccgacgagcaagggcatgtacatgaactgggtaccaatacatttggttttatcagcgccctgagcgaagatgagatcgccgcgcttaccgccgggctggcggaaagcgctttagataagaaaccagaaatatcggtcatgacatgggaggagtggactaaagaccgataa

SEQ ID NO: 78036 - DNA, 930 bp, Citrobacter koseri
atgatacgtatctatacgttaacacttgcgccctctctcgatagcgcaacaatcaccccacaactctatcccgaagggaaacttcgctgttcatcacccgtttttgaacccggcggcggcggaatcaacgttgcccgcgcgattgcccatcttggcggaaccgcaaccgcgattttccccgcaggcggcgcgaccggcgaacatctggtcgcacttctggccgatgaaaacgtccccgtcgtcaccatcgacgccaaagactggacgcgacaaaacctgcatgttcatgtggagtccagcggggaacaatatcgctttgtcatgcccggcgccgcactcgacgatgacgaatttcgccagattgaagaacaggttctggagatcgaatccggcgccattttggttatcagcgggagtctgccgcccggcgtcaagctggaaaaactgacgcagcttattgccgccgcgcagaaacagggcatccgctgcattattgatagttcgggcgatgcgctcaacgcggcgttatctctcggcaatattgaactggtcaaaccgaaccaaaaagagctgagcgcgctggtcaatcgcgaactcacgcagcctgacgatgtgcgcaaagcggcgcaggaaatcgtgaagagcggcaaagcgcgccgcgtcgttgtatctctggggccacagggggcgctggcggtggatagcgaaagctgcgtccaggttgttccccctcccgtcagaagtcaaagtaccgtcggcgcgggcgacagcatggttggcgcaatgacgctaaaactggcggaaaacgcctcgctggaagagatggtgcgtttcggcgtctcggcaggcagcgcggcgacgttgaatcaaggaacacgtctgtgttcccgggacgatacgcagaaaatctacgcctggctttctcagtga

SEQ ID NO: 78037 - DNA, 759 bp, Citrobacter koseri
atgaagcttttgaagacagtacccgctgcattaatgttggcagggggcgtatttgcgtcaatgcatgccgctgctgatgattccgtttttactgtcatggatgatcccgccactgcgaagaaacccttcgaaggtaacctgaatgcgggctaccttgctcagtcaggcaacacgaaaagttcttctttaacggctgacaccacgatgacctggtacggtgcaaccaccgcctggtcgctgtgggggaatgccagcaatacatcctccaacgatgagcgctcttcggagaaatacgcggtaggcggccgtagccgtttcaatatgaccgactacgattacctgtttggccaggcaagctggctgacagaccgttacaacggttatcgtgagcgtgacacactgaccgccggttatggccgtcagttcctcaacgggccggtgcacagcttccgttttgaattcggtcctggcgtacgctatgacgaacataccgatggcaaaaccgagacccaaccgctgggctacgcttccggtagctacgcctggcagatgacggataacaccaaatttacgcagggcgtgtccgttttcggcgctgaagataccaccctcaactcagagacggcgttgaatgtcgcgatcaacgagcattttggtctaaaggtggcttataacctgacctggaactccgaaccgcccgcaacggcgccggaacataccgatcgccgcacgacggtatcgttagggtataagatgtaa

SEQ ID NO: 78038 - DNA, 1929 bp, Citrobacter koseri
atgcctgttattactcttcctgatggcagccaacgccattacgaccacgctgtaagccccatggatgttgcgctggacattggtccaggactggcgaaagcctgtatcgcaggtcgcgttaatggcgaactggttgacgcgtccgatctcattgaaaacgacgctcagctggcaatcatcaccgcgaaagatgaagaaggtctggagatcattcgtcactcctgcgcgcacctgttagggcacgcgattaaacaactttggccgaacaccaaaatggctatcggtccggttgtcgataacggtttttactatgatattgatctcgaccgtacgttaacccaggaagatgtcgacgcgctcgaaaaacggatgcacgagcttgctgagaaaaactacgacgtcattaagaagaaagtgagctggcacgaagcgcgtgaaaccttcgtgaagcgtggagaaacctataaggtttctattcttgatgagaatattgcgcatgatgacaagccgggcttgtatcatcatgaagaatatgtcgatatgtgccgtggcccgcacgtgccgaacatgcgtttctgccatcacttcaaactgatgaaaaccgcaggggcatactggcgtggcgacagcaacaacaagatgctgcaacgtatttatggtacggcgtgggcggataaaaaatccctgaacgcctatctgcaacgccttgaagaagccgccaagcgcgaccaccgtaaaatcggtaagcagcttgacctgtatcatatgcaggaagaagcaccgggtatggtgttctggcataacgacggctggactatcttccgtgaactggaagtctttgtgcgttctaagctcaaagaatatcagtatcaggaagttaaaggcccgttcatgatggaccgtgtgctgtgggaaaaaaccgggcactgggaaaactacaaagatgcgatgttcactacctcttcagagaaccgtgaatactgcatcaagccgatgaactgcccgggccacgtgcagatcttcaaccagggtctgaagtcctaccgcgatctgccgctgcgtatggcggaattcggtagctgccaccgtaacgaaccgtcaggtgccttgcatggcctgatgcgcgtacgtggcttcacccaggatgatgcgcatatcttctgtactgaagaacagattcgcgatgaagtgaacgcctgtattcgtatggtctacgatatgtacagcacctttggcttcgagaaaatcgtcgtcaaactttccactcgccccgaaaaacgtatcggtagcgatgaaatgtgggatcgtgctgaggcggatctggccgttgcgctggaagaaaacaacatcccgtttgagtatcaactgggtgagggcgcattctacggtccgaaaattgaatttaccctgtatgactgcctcgatcgtgcatggcagtgcggtacggtacagctggacttctctctgccgtctcgtctgaacgcctcttatgttggcgaaaacaacgagcgtcaggtgccggtgatgattcaccgcgcgattcttgggtcaatggaacgtttcatcggtatcctgactgaagagttcgcaggcttcttcccgacctggcttgcgccggttcaggtagtggtgatgaacattaccgatactcagtctgaatacgttaacgaattgacgcagaaactacaaaatgcgggcattcgtgtaaaagcagacttgagaaatgagaagataggctttaaaatccgcgagcacactttacgtcgtgtcccttacatgttggtctgtggcgacaaagaggtagaagcaggcaaagtagccgtgcgtacccgtcgtggcaaagacttgggcagcctggacgtaaatgaagttatcgagaagctgcaacaagagattcgcagccgcagtcttcaacaactggaggaataa

SEQ ID NO: 78039 - DNA, 435 bp, Citrobacter koseri; identical to SEQ ID NO: 73217

SEQ ID NO: 78040 - DNA, 198 bp, Citrobacter koseri; identical to SEQ ID NO: 73216

SEQ ID NO: 78041 - DNA, 357 bp, Citrobacter koseri; identical to SEQ ID NO: 73215

SEQ ID NO: 78042 - DNA, 984 bp, Citrobacter koseri
atgtcacatctcgcagagctggttgccagtgcgaaggcagccattaaccaggcgtcagatgttgccgcgttagacaatgtacgcgtcgaatatttgggcaagaaagggcatttaacccttcagatgacgaccctgcgtgaattgccgccagaagagcgtccggcagccggcgcggttatcaatgaagcaaaagagcaggtacaacaagcgctgaacgcgcgcaaagcggatttagaaaacgcggcgctgaatgcacgtctggcggcggaaaccatcgacgtttctctgcctggacgtcgtattgagaacggtggtctgcatccggtaacacgtaccattgatcgtattgaaagtttcttcggtgagcttggttttaccgtggcgactggcccggagatcgaagacgattaccataacttcgatgcgctgaacattccaggccatcatccggcccgcgctgaccacgacactttctggtttgatgccacccgtctgctgcgtacgcagacttccggcgtgcagattcgtaccatgaaagaacagcagccgccgatccgtattattgcgccgggccgagtgtaccgtaacgactacgatcaaacgcacaccccgatgttccatcagatggaagggctgattgttgacaccaacatcagcttcaccaacctgaaaggcacgctgcacgacttcctgcgtaacttctttgaagaagacctgcaaatccgtttccgtccttcttacttcccgttcacggaaccgtccgcagaagtggatgtaatgggcaaaaacggcaaatggctggaagtgctgggttgcgggatggtgcatccgaacgttctgcgcaacgtgggcatcgacccggaaatctactctggcttcgcgtttggtatggggatggagcgcctgaccatgctgcgttatggcgtgaccgatctgcgctcattcttcgaaaacgatctgcgtttcctcaaacagtttaaataa

SEQ ID NO: 78043 - DNA, 2388 bp, Citrobacter koseri
atgaaattcagtgaactgtggttacgcgaatgggtgaacccggcaatcgacagcgatgcgctgtcggatcagattacgatggctggtctggaagtggatggcgttgacgccgtcgccggtgagttcaacggcgtggttgtgggtgaagtggtggagtgcggccagcacccgaacgcagataaactgcgcgttacgaaagtgaacgtgggcggcgaacgtctgctggatattgtctgtggcgcgcctaactgccgtcaggggctgaaagtagccgttgcaactatcggcgcggttctgccgggcgatttcaaaatcaaagccgctaaactgcgcggcgagccgtcggaagggatgctgtgctccttctccgaactggggatttccgacgaccatagcggcatcatcgaattgccggcggatgcgccgatcggaaccgatatccgcgaatacctgaagcttgacgataacaccattgaaatcagcgtgacgccgaaccgcgccgactgcttagggatcattggcgtggcgcgtgatgtcgctgtcctgaacaaaatcgcgctggttgagccggagatcgcacctgttgcagccaccatcaatgacacgctgccgatcgcggttgaagcgccggatgcctgcccgcgctacctgggtcgcgtggtgaaaggcattaatgttaaagcgcctacgccgctgtggatgaaagagaagctgcgtcgctgcggcattcgttccattgatgctgtcgttgacgtcaccaactatgtactgcttgaactgggtcagccgatgcatgcctttgacaaagatcgtattgaaggcggtattgtcgtgcgtatggccaaagagggcgaaaccctggtgctgctggacggcacagaagcgaagctgagcaccgatacgctggtgatcgcggatcaccacaaagcgctggcgatgggcggtatctttggcggcgagcattccggcgtgaatgaggaaacgcaaaacgtgctgctggaatgcgcgttctttagcccgctgtctattaccggtcgtgcgcgtcgccacggtctgcatacggatgcttcccaccgctatgagcgtggtgtggacccggcgttgcagtacaaagcaatggagcgcgccacccgcctgttgatcgacatttgcggcggcgaagccggtccggttatcgacgtcacgaatgacgccacgctgccgaaacgcgcgaccattacgcttcgtcgtagcaagctggatcgtctgatcggccatcacattgccgatgagcaggtgagcgatattctgcgtcgtctgggctgcgaagtgactgaaggtcaggacgagtggaaagcggtcgcgccgagctggcgtttcgacatggagattgaagaagatctggtcgaagaagtggcccgcgtgtatggctacaacaacattcctgatgagccgattcaggcgggtttaatcatggggactcaccgtgaagccaacttgtcgctgaagcgtgtgaaaaccatgctcaatgacaaaggctaccaggaagtgatcacctatagctttgtcgatccgaaggttcagcaactgctgcatccgggcgaagaagcgctgttgctgccaagcccgatctccattgagatgtcggcgatgcgtctttcactgtggaccggcctgctgtcaacggtggtctataaccagaaccgtcaacagaaccgcgtgcgtatctttgaaaccggtctgcgtttcgtgccggatacccaggcaaatctgggcattcgtcaggatctgatgctggcaggggtgatttgcggcaaccgttatgacgagcactggaatctggcgaaagagaccgttgatttctatgatctgaaaggcgatctggaagcggtgctggatctcaccggcaaactggccgacattcagttcagggcggaagcgaatccggcgctgcatcctgggcagtccgcggcgatttatctgaaaggtgaacgcattggttttattggggttgttcatcctgagctggaacgtaaactggatctgaacggtcgcactctggtgtttgaactggagtggaataagctcgcagaccgcgtggtgcctcaggcgcgcgagatttcgcgcttcccggctaaccgtcgcgacatcgcggtggtggtcgcagaaaacgttcccgcagcggatattttatccgagtgtaagaaagttggcgtaaatcaggtagttggcgtaaacttatttgacgtgtaccgcggtaagggtgttgcggagggttataagagcctcgctatcagcctgatccttcaggataccagccgtacactcgaagaagaggagattgccgctaccgtcgccaaatgtgtagaggcattaaaagagcgattccaggcatcattgagggattga

SEQ ID NO: 78044 - DNA, 300 bp, Citrobacter koseri; identical to SEQ ID NO: 73212

SEQ ID NO: 78045 - DNA, 981 bp, Citrobacter koseri
atgctgacttttgcctgccaacaacagcgccgcaatgtgcgctggttatccagtctgtcggtgcttatgctgctggcagtggtattaagcctgtgcgccggagatcagtggatagcccctggcgactggttcagcgcccgtggtgaactgtttgtctggcagatacgactccctcgcacgcttgctgttctgctggtaggcgccgcgctggcgctgtcaggcgcggtaatgcaggcgttatttgaaaacccgcttgccgagcccggattgcttggcgtctccaacggcgctggcgtgggccttattgccgcagtgctactggggcaaggtcagttacccggctgggcgctggggatttgcgctattgccggcgcgcttatcatcacacttattctcctgcgatttgcccgtcgacatttatcaaccagccgcctgctgctggcgggcgttgcgcttggcattatttgcagcgcgatgatgacgtgggccatctatttttcaacctccttcgacctgcgccagttgatgtactggatgatgggcggattcggcggggtggactggcagcaggcctggctgatgattgccctgattccggtttcactctggatttgctgccagtcgcagccgatgaatattctggcgctgggcgaaacgtccgcgcgtcagctggggctgccgctgtggttctggcgcaatttgctggtggtcgccacgggctggatggtcggcgttagcgttgcgctcgcgggttcgattgggtttatcggcctggtgatcccacatatattacggctttgcggtctgagcgatcatcgcgctttgctgccgggctgtgcgctggcgggggcgatagctctgctgctggcggatgttatcgcccgtctggcgctggcgtcggcggaactgcctatcggtgtagtgacggcgacgatgggggcgccggtcttcatctggctattattaaaatccaggcgctag

SEQ ID NO: 78046 - DNA, 879 bp, Citrobacter koseri
atgtggcaacggatgaaatggggtctgtgtgtgctggcggcactcagcggttctgcgatggccgcaccgctgtcggcgcaatacgtgtcgactatcgcgacgcaggaagaacagcgtcttcatgcccggattggcattgcggtacttgatacggcgaccaacagtatcacccattatcggggagaagaacggttcccgttaaacagtacgcacaagccgctgttatgcgcagcgttattacgcgaagtcgacaggaaggtgctggcgctttctgcttcaacgcagtttgaaccctcgcagctggtggagtattcgccgattactgaaaaacatgtggcgccagacgccatgagctgggcgcaattgtgcagcgcggcggtaagctacagcgataacacggccgccaatcttatcgccaggaagctcaacgggccgcaggccgtcacgcagtttttgcgtgattcgggggatacgataacccgcctcgatcgctatgagcctgaactgaacagcgccattcccggcgatgaacgcgattccacgacgcctgtcgtgatagcgcagacgctcaatacgctactgctggggaatgtgttgcagccatcctcaagagagcagcttatgcagtggatgcgggacgacaaagtggctgacggtctgctgcgttcggtcttgccggacggctggaaaatcgcggataaaaccggggcgggcgacaatggctcgcgttctattgtcagcgttgtctggccgacatcacaaaaacctctgctcgtggttatctatattacacaaactccggcgacaatggcgcagcgtgacgccgcgattgtccgcatcggggagtcgctgttttcaacactcgcagtctatgattaa

SEQ ID NO: 78047 - DNA, 552 bp, Citrobacter koseri
atgcaagataccattctcaacactgaagtgacgacgatcgacggggatgtcaccacgcttgagaagtacgccggaaacgtactgctggtggttaatgtggcctcgaaatgtggcttaacgccacaatacgaacagctggagaatattcagaaagcctgggccgatcagggctttacggtgttaggttttccctgcaaccagtttcttggtcaggaacctggcactgaagaggagattaaaacctattgcagcaccacctggggcgtcacattcccgatgttcagcaaggttgacgtcaatggtgagaaccgccatccactgtatcagaagttgattgccgcagcgcctgccgccgttgcgccggaaggtagcggtttctatgagcgcatggcgagtaaaggccgcgcgccgctttacccggacgatattttgtggaactttgagaagtttttaatcggcagggatggacaggtcgtacagcgtttctcaccggacatgacgcctgaagatccggggatggtggaaagtatcaaaatcgcgttggcaaaataa

SEQ ID NO: 78048 - DNA, 750 bp, Citrobacter koseri
atgatctcgttgatgcagttacagggtgttgccgaaacgacgcgtctggggccgctttccggcgacgttaagcctggcgagattcttcacctcgtggggccgaacggggcagggaaaagtacgctgctggcgcgtatggcgggcttaaccttcggggaaggcactgtcatattcgacggcgcgtcgctggaggcatggcctgcggcgaagctggctcaacatcgggcctatctcgcgcagcagcagaatcccccattttcaatgccggtctggcatttcctgacgctgcatcaacctgataaaacgcaaacgaacctgctgaatgacgttgcgcaggcgcttgggctgagcgacaagctggggcggagcgcgaatcaactctccggcggcgagtggcagcgtgtacgtctggcggcggtgatattgcaaattcaccctcacgctaacccgcacgggcagcttctgctactggatgaaccgatgaacagtctggacgttgcgcaacaaaacgcgctggataggctgctgagccagctatgcagccagggtatcgccatcgtgatgagcagccatgaccttaaccatactctgcgccacgcgcatcgcgcctggttgctgaaacaggggaaattgatcgccagcgggcggcgtgacgaggtgctgacgccgccaaacctggcccgggcatacggcatgaacttccgtcggctggacgttgaaggccacagaatgctcatatcaaccacttaa

SEQ ID NO: 78049 - DNA, 465 bp, Citrobacter koseri; identical to SEQ ID NO: 73207

SEQ ID NO: 78050 - DNA, 714 bp, Citrobacter koseri
atgattgtttcactggataacttttatcattctcacctttattttgttcctgcccgaaccgagaaagagaaactcgtcggactggagattgttgcaaactttgtcactgaagacggtaatgtccgtatgccgacggagctggtcatgccgcgcctgtcagcagaagaacagcgttgtctgttcgaagaaaaactcgcattgctggaaacgtgccaacatttttttattcaacataaacttattgcctggattaatttaacgccagccgtcgtcgcatcattattatcagacggcgagtttgtatcccatgtaaggcgctttccatttttggaactgatgattaatgagaattatcctgaattaagtcttgggaaagagaatcaaattctggctgagttagccggacgatttcccctcatccttgccaattttggcgctggcgatacatcgataaaagcgatctttgatggtctcttcaaacgcgtcgcgctggataaaaactttgtccagcaaagatccgcaagtctttcttttgaaccctttatgcaggctattatttcgcagatatcaccgtgctgtgattcgataatgattgcgggtattgatactgaagagatgctggcgcggatatcatcaatgggatttagcgcgctgcaaggatgtttatggcctgccgtgccagcgagccaggttacgacgctggttcagggataa

SEQ ID NO: 78051 - DNA, 1443 bp, Citrobacter koseri
atgaccctgtcttttacatcccgctggcgtgacgaactgccagccacatatacagcactttctccaactcctctgagtcatgcccgcctgatttggcataacgatgcgctggcgcagcagctggcgataccaccttcgttgtttgatatggaaaacggcgcaggcgtgtggggtggcgagtcattactgcccggcatgtcgcctttggctcaggtttatagcggccatcagtttggcgtctgggccggccagctcggtgatggacgcggtattctgctaggcgaacaactgctggcggacggcagtacgcttgactggcacctgaaaggcgccggactaacgccatactcccgtatgggcgacgggcgagcagtgctgcgctcaacgatccgtgaaagtctggccagcgaggcgatgcactatcttggcatccccacaacgcgggcgctgtctattgtcaccagcgacacgcctgtttacagggaaacggttgaatccggcgcgatgctcatgcgtctggcgcaaagccatatgcgtttcggtcatttcgaacatttttactatcgacgtgagccggataaagtccgtcagctggccgattttgcgattcgccattactggccgcaatttcaggcggaagaggacaagtatgcgctctggttccgggacgttgtggcgcgcacggcgaggttgattgctgactggcaaacggtaggttttgcgcatggcgtgatgaacaccgataacatgtctgtactggggctgacgatagattatggccctttcggtttcctggatgattatcagccagggtttatctgtaaccactccgatcaccaggggcgctatagcttcgataatcaaccggctgtcggattgtggaatctgcaacgcctggcgcaaaccctgtcgccgtttatgccggtcgatacgctgaatgatgcgctggatggctatcagctggcgctgctcacgcgctacgggcagcgcatgcggcaaaaactgggcttctttaccgagcaaaaagaggacaatgcgcttctcaacgagcttttcgccctgatggcgcgcgaaggcagcgattatagccgaacgttccgtatgttgagtcagactgagcaacagagcgcggcatcgccgctgcgtgatgaatttatcgatcgcgcggcctttgacgggtggttcagccgttaccgggcgcgtttacagcaggagcaggtggatgacgcaacgcgtcaacagcacatgcagcgcgtgaatcctgcggtggtgctgcgcaactggctggcgcaacgcgcgatagccagcgctgagcagggggatatgggcgaattacatcaactgcatcaggttctgcgcgacccctttgccgacagagatgacgattatgtcaaccgtccaccggactggggtaaacggctggaagtcagttgctcaagctga

SEQ ID NO: 78052 - DNA, 192 bp, Citrobacter koseri
atgccacatatggacgacattgagttacttcattttaaggaaagagacagcgtgcccccttcccctgctgccgagcggcgtatcagcagccagacattgttaggccctgaaggcaaagtcatcatcgatcatgacggccaggaatacctgctgcgcaagacgcaggcaggtaagttgctgttgaccaagtag

SEQ ID NO: 78053 - DNA, 1047 bp, Citrobacter koseri
atgaacagaaccgacgaactgcgtaccgcgcgtattgacagcctggtcacccctgctgagctagcgctacgtcatcctgtatcatcctccgtcgccagccacgttactgactcccgacgccggattgaaaaaatattaaatggtgaagatcgccgcctgctggtgatcatcggcccctgctcgattcacgatctggacgctgcgatggaatacgcaacgcgcttgcaaacgttgcgcaacacgcatcaggcacgtctggaaatcgttatgcgcacctattttgaaaaaccgcgtacggttgtgggctggaaaggcctcatctccgatcccgatttaaatggcagttaccgcgtaaatcatggcctcgaactggcgcgcaagctgctgttgcaggtcaatgagctgggagtccccaccgccaccgaatttctcgacatggtcaccggccagtttattgccgatttgatcagctggggcgccattggcgcgcgcacgacggaaagccagattcaccgtgaaatggcttccgcgctctcctgcccggttgggtttaaaaacgggaccgatggcaacacgcgcatcgccgttgatgcgattcgcgcgtcgcgcgccagccatatgttcctctcgccggataaaactggccagatgacgatttatcagaccagcgggaacccgtacggccatatcatcatgcgcggcggtaaaaaaccgaattaccacgcggaagacatcgctgccgcctgcgatacgctgcatgagtttggtctgccggaacacctggtggtggacttcagccacggtaactgccagaagcagcatcgccgccagttagaagtttgtgatgatatctgccagcaaatccgtaacggttctaccgcaattgccgggatcatggccgaaagtttcttgcgtgaaggtacgcagaaaatcgtcagcggtcagccgctggtgtacggtcagtccattaccgacccttgcctgaactgggaagatactgaattactgttagaaaaacttgcctcagcggttgatagccgtttttga

SEQ ID NO: 78054 - DNA, 834 bp, Citrobacter koseri
atggataatgttgttgatcgccatgttttttatatttccgatggtacggccatcaccgccgaggttttgggtcatgcggtgatgtcgcaattccctgtgaccatcagcagcattacgctgccgttcgttgaaaacgagagtcgcgccagggccgtgaaagatcagatcgacgcgatttatcagcaaactggcgtgcgtccgctggtgttctattcgattgttctgccggaaattcgcgccatcatcttacaaagcgaagggttctgtcaggacatcgtgcaggcgctggtggcgccgctacagcaggaaatgaagctcgacccaacgccaatcgcgcatcgcacccacgggcttaaccccggcaacctcaacaagtatgacgcgcgtatcgcggcaatcgactatacccttgcgcacgacgatgggatctccttgcgcaatctggatcaggcgcaggtgatcctgctgggggtttcacgctgcggaaaaacgccgaccagcctctatctggcgatgcagtttggcatccgggcggcgaactacccctttattgctgacgatatggataacctggtgttgcccacgtcgcttaaaccgctacagcataagctttttggcctgaccattgacccggaacgtctggcggcaatccgcgaggaacgccgtgaaaacagccgctacgcatcgctacgccagtgccggatggaggttgcggaagttgaagcgctctaccgtaaaaatcagatcccttgcctgaacagtactaactattcggtagaagaaattgccaccaagattctcgacatcatggggctgaatcgtcgaatgtactaa

SEQ ID NO: 78055 - DNA, 2379 bp, Citrobacter koseri
atgtccaacaatggctcgtcaccgctggtgctttggtataaccaactcggcatgaatgatgtagacagagttgggggcaaaaatgcctccctgggtgaaatgattactaacctttccggtatgggtgtttccgtaccgaatggttttgcaacgaccgccgatgcgtttaaccagtttctggatcaaagcggcgtaaaccagcgtatttatgaactgctggatcaaacggatattgacgatgtcaccgcgctggcgaaggccggcgcgcagatccgccagtggattatcgacactcctttccagccagagctggaaaacgctattcgcgatgcctatgcacagctctctgcggatgatgcgcaggcgtctttcgccgtgcgctcgtccgcaacggctgaagacatgccggatgcctctttcgccggccagcaggaaaccttcctcaacgtgcagggtttcgatgcggtgctggtggcggtgaaacatgtttttgcctcgctgtttaatgaccgcgctatctcttatcgcgttcaccaggggtatgaccatcgcggcgtcgcgctctccgctggcgtacagcggatggtgcgctccgacctggcttcgtccggggttatgttctctattgataccgagtccggtttcgatcaggtggtgtttatcacttcagcctggggtctgggcgagatggtggtgcagggcgcagtcaacccggatgaattctatgtgcataaaccgacgctggcggcgaatcgcccagcgatcgttcgtcgcacgatggggtcgaaaaaaatccgaatggtttacgcgccaacccaggagcacggcaagcaggtcaaaattgaagatgtgccgcaggaacagcgcgacatcttctcgctgaccaacgaagaagtgcaggaactggcgaaacaggccgtacagattgagaaacactacggtcgcccgatggatatcgaatgggcgaaagacggccataccggcaaactgtttattgtacaggcccgcccggaaaccgtccgttctcgtggtcaggtaatggagcgctacacgctgcatgcgcaggggaaagtggtcgcggaaggccgcgccatcggacatcgcattggcgcgggggcggttaaagtcatccacgacattagcgaaatgaaccgtatccagcctggcgacgtgctggtgactgacatgaccgacccggactgggaaccgatcatgaagaaagcggcggccatcgtgaccaaccgtggcggtcgtacctgccacgcggccattattgcccgtgaactgggtattccggcggttgtcggctgcggcgacgcgacggaacgcatgaaggatgatgaaaacgtcaccgtttcttgcgccgaaggcgataccggctatgtctatgctgacctgctcgacttcagcgtcaaaagttcaagcgtggacaccatgcccgatctgccgttgaaagtcatgatgaacgtcggtaacccggatcgcgcctttgacttcgcctgcctgccgaatgaaggcgttggcctggcgcgtctcgaatttattatcaaccgaatgattggcgtgcatcctcgcgcactgctggaatttgatgaccaggatgcgaaactgcaaaacgaaatccgcgagatgatgaaaggcttcgattcaccgcgtgagttctatgtcggtcgtctgacagagggcattgcgacgctgggcgcggcattttatccgaaacgcgttatcgtgcgcctgtcggatttcaaatcgaacgaatacgccaacctggtgggcggcgagcgttacgaacccgatgaagagaacccgatgctgggcttccgtggcgccggtcgctatgtctccgacagcttccgcgattgcttcgcgctggaatgtgaagcggtgaaacgcgtgcgcaacgatatggggctgaccaacgtggagatcatgatcccgtttgtgcgtaccgttgagcaggcgaaagcggtagttgacgagctggcgcgtcaggggctgaagcggggtgagaacgggctgaagatcatcatgatgtgtgaaattccgtccaatgccctgctggctgaacaattcctggagcactttgacggcttctcgattggttctaacgacatgacgcagctggcgctgggtctggatcgcgactccggtgtggtttctgaactgttcgatgagcgcaacgatgcggtgaaagcgctgttgtcgatggcgatccgcgccgcgaagaaacaaggcaagtatgtcggcatctgtggtcaggggccgtccgatcacgaggacttcgccgcctggctgatggaagagggaatcgacagcctgtcgctgaacccggacaccgtcgtacagacctggttgagtctggctgaactgaaaaaataa

SEQ ID NO: 78056 - DNA, 1113 bp, Citrobacter koseri
atggtaaatcttcgtcagcccagggatatcgcgcaagtgctgctgtcggtgctgtttttagccatcatgatcgtggcctgcttgtggattgtgcgtccctttgtccttggttttgcatgggcgggtacgatcgttattgcgacctggcccgttttgttacgtttacagaaaatactctggggccgccgttctctggccgttctggttatgacgctgttgttggttctgctgttcattattcccatcgccctgctggtcaacagcatcgtggacggtagcggcccgctcatccacgccgtcaccgccggcgacatgacgttgcccgacctggcctggttaaacagtattccgctgattggcgccaaattgtatgccgggtggcacaacctgctggatatgggcggcacggcgatcatggcgaaagtgcgtccttatattggcaccaccacgacctggtttgtgggtcaggccgcgcatatcggtcgctttatgatgcactgtggtctgatgctgctgttcagcgccctgctgtactggcgcggcgaacaggtggcattgggcatccgccacttcgccagtcgtctggctgcgaaacgcggcgatgccgccgtgctgctggcggcccaggccatccgcgccgttgcattgggtgtggttgtcaccgcgctggttcaggcaattctcggcgggattggcctcgccatttccggcgtgccttacgcaacgctgctgacggtcgtcatgatcctctcctgcctggtgcaactggggccgttaccggtgttaatcccggcaatcatttggctgtactggacgggcgatacgacctggggcacggtgctgctggtgtggagctgcgtggtcggtacgctggataacgtgattcgcccggtattgattcgtatgggcgctgacctgccgctgatcctgattctctctggcgttatcggcgggctgattgcctttggaatgatcggtctgtttatcggtccggtattgctggcggtttcctggcgtctgttctccgcatgggtgcatgaagtgcccgcgccgggaaacgaccctgacgaactcctcgaagaactgggggagattgaggacagtcataaataa

SEQ ID NO: 78057 - DNA, 516 bp, Citrobacter koseri; identical to SEQ ID NO: 77862

SEQ ID NO: 78058 - DNA, 2589 bp, Citrobacter koseri
atgatcaataccgatgcgtccggtcaggggtcgttagtttacggtaagacatccgatcatgtgctgggcgttcgcgcggtattgctgggtggcgatattctggatacccaggcaatgccggtcgaacttgcggaaacgctcggtaaaagcaacaccgcgatcggtcgcatctataacaccgtataccagcgttgtcgggaaaaccgacagctgattattgataagtttcccagactcaaccgcttcttaacgggctacgacttacgccatgtctttaacgatgagatgacggagttcgacttaacgcgcgtgctgaccggttctgaaggcacgctggcgtttatcacggaagcgcgtctggatattactccgctgcctaaagttcgccgtctggtgaacgtcaaatatgactcttttgattccgcgttgcgtaacgcgccctttatggtcgaagcgcgggcgctctcggtggaaaccgtcgattctaaagtgcttaatctggcgcgggaggacatcgtctggcactccgtcagtgagctgattaccgatgtgcctgataaagagatgctgggcctgaacatcgtcgagttcgccggggatgacgaagcggctattgatgctcaggtgagcgccttgtgccagcgtctggatgagctgattgctcgccaggaagccggagtgatcggctggcagctgtgcgcggagctggcgggcgtggagcgtatctatgccatgcggaaaaaagcggttggtctgttgggtaatgccaaaggcgcggccaaaccgattccgtttgcggaagatacctgcgtgccgccggaacatctggccgactatattgctgaattccgcgcgctgctcgacggtcatggcttaagttatggcatgttcgggcatgttgatgccggggtgctgcacgtcagacccgcgctggatatgtgcgatccgcaacaggaaattctgatgaagagtctttccgatgatgtggtggcgctcaccgcgaaatatggcggtctgctgtggggcgagcacggcaaaggttttcgcgctgaatatagcccggcgttttttggcgagcagctttatggcgaactacgcaaagtgaaggcggcgttcgacccgcaaaaccgcctgaaccccggaaaaatttgtccgccggaaggcattgatgcgccgatgatgaaggtcgatgcggcgaaacgcggtacttacgatcggcagattccactggcggtgcgtcaggtctggcgcggggcgatggagtgtaacggcaatggcctgtgcttcaactttgacgccaaaagcccgatgtgcccgtcaatgaaaatcagcctgaatcgcattcactctcccaaagggcgcgcgacgctggtgcgtgaatggttacgcttgctggccgaccgtggggttgatccgctacagctggaaaaagagctgccggaaaaacgcgccagtcttcggacgttaattgcccgtacacgcaacagctggcacgctcgtaaaggcgaatatgatttctcccatgaggtgaaggaggcgatgtcgggttgcctggcgtgcaaagcctgctcgacacaatgtccgattaaaatagacgtgccggagttccgctcacgcttcctggcgctttaccacacgcgctacctgcgtccgctgcgcgatcatatggtggcgacggtcgaaagctatgcgccattaatggcgcgggcgccgaaaacctttaacttctttctcaatcagccgttggtgcgaaacctcgcgaagaaacatatcggcatggtggatttgccgctactttcgacgccgtcgctgcaacagcaaatggtcgggcaccgttccgccaatatgacgctggaacagattgaactcctgagccaggagcaaaaagagcgtacggtgctggtggtgcaggacccgtttaccagttactacgatgcgcaggtggtggcggattttatccggctggtagaaaagctcggcattcagcctgtattgctgccgttctcgccaaatggcaaggcccagcacatcaaagggttccttaaccgatttgcgaagacggcgaagaaaacggccgaatttctcaatcgggtggcgcagctgcgtatcccgatggtcggtgtcgacccggcgctggtgctttgctatcgtgatgaatacaaacaaaccctcggcgaacagcgtggtgatttccacgtacaactggtgaatgagtggttgccgacggtgctggcgtcccgacagcctcttgccgtgagcggtgagccctggtatttctttgggcattgtaccgaagtgacggcattgcctggcgcaccggcgcagtgggcggccatttttgcgcgcttaggggcgaagctggagagcgtcagcgtaggctgctgcggcatggcgggtacttacggccatgaagtgaaaaatcatgaaaattcgctggggatctatgcgctgtcgtggcaacaggcgatggcgcgactgccgcgcaatcgctgcctggcgaccggttactcttgccgcagccaggtaaaacgcgttgaaggcaccggggttcgccatccgttacaggcactactggagattattggatga

SEQ ID NO: 78059 - DNA, 411 bp, Citrobacter koseri; identical to SEQ ID NO: 73198

SEQ ID NO: 78060 - DNA, 189 bp, Citrobacter koseri
atgtctaccgatttagacccaacccaactggcaattgaatttttacgccgtgataaaaccgagctttctccagcccagtatttgaagcgcttaaaacaattagagctggaatttgccgatttactcacgctctcttcctctgagctaaaagaagagatttactttgcctggcgtctgggcgttcattga

SEQ ID NO: 78061 - DNA, 852 bp, Citrobacter koseri
atgaaaatcaaaacgctggcacttctgctgtcgctgactagcgcgccattgttcgccgccccgctgcaactcgacgtctataatccgcaggaaaacgcgattttcccggtctcttccacgctggtctctggccctaaagaagccattttattcgacgcgcagttcagtaccaaagacggggaaaagctggtcgagatgattaaaaagagcggcaaatcgctgaaagccatcgtgattacctccggcgatccagatttctattttggtctggaaccgattgtaaaagccttcccgaacgtgaaagttctggcaacgccgcatgtggtggaacacattcgcgcaacgaaagacgccaaactgcaatactggggcccgcaaatgaaagatggcgcgccagcggcgctcaccatcccgcaggcaaccaccgagacacaatttacgattgatggggaaacgctggaactgcgccacccgaacgattacgccgcttacgtctgggtcccggcgaaccgcgcaatacttggcggaacgggaatcgcatccggtatccatgtctggacggcggatacccagtctcctgagcagcgtgcggcctggcgtcatgtgttgacagagatgcacagtttgcagccgacccaggtgattccgggtcactatatcggtgagcgtccagcaggcgacgccgctatacgcttcacgcaggattatctgcaatcctttgagcaagcgcttgaggcgaaaaaagggtcagagtatgtcatcaaaacgatgaccgccgcctggcctggcctcgctgacgaaagttccctgacgctgagcgcgaaagtgaataccggtgaaatgaagtggtaa

SEQ ID NO: 78062 - DNA, 894 bp, Citrobacter koseri
atggacagagtgatggcggcaacggtgtttaaccatatctgtgatttgggtagcctgagcgcggctgcgcgcgcattagggatctccaggccgatggtgagccgttatctggatgaaatggagaaatgggccggagccagacttattcatcgttcgtcgcgccgcctgacgatcacgcctgccggagaagacgcgttgatgaaaacgcgaacgctggcgcggctttccctggatattgcgggggcgaccgggcgagaggtaccgtccggcacgttgcgcgtcgcctgcgcccatttcaccgcgatgcatattcttgccccgatgctgcccgcttttttagcgcgttaccctgaattgcgcattgaagtggagattaataatcagcctgtcagtttagtgggggagcgtattgatgtggcgatacgcattaccgataaccctgagccagggacaattgcgcgtcggcttggtgactgtgagtctgtgctctgcgcgtctcctgactatctgcatcgctatggcacaccgcagacgccggaggcgctggcgcaacacaattgcctctattacagcggatttgctggaaaatcctggcattttctggatgagcagggagaaccgatctctgttgcgatcaagggcaacctgagtgccggaatctcttcacttttgtgtgaagcggcgctggcagggatggggattgcgctggtgccggaaaaagaggcgcgagaggggctggcgcaggagaaactggttcgtttgttgccccatctacaaccgcggcaattggccgtatacgggttatacctttcccgtgagcatcagcccgccgcgctacgcctgtttcttgaggcggtgcagggcgcgatgcgcgacggtgaagcctgttcctga

SEQ ID NO: 78063 - DNA, 369 bp, Citrobacter koseri
atggaattgcattcaggaacatttaatccagacgattttgcatggcgtggtctgacgctaacgcctgaggcggcggcgcatattcgtgacctggtcgcgaagcaacccggcatgcttggcgtgcgtttaggcgtgaagcagacggggtgcgcgggatttggttacgtgctggataccgtcagcgagccggaaaaggacgatctgttgtttgaaacggagggcgcgaggttgtacgtgccgcttcaggccatgccgtttattgacgggacagaggtcgattatgtgcgcgaaggattaaaccagttatttaaatttcataacccgaaagcccagaacgaatgcggctgtggcgaaagcttcggggtatag

SEQ ID NO: 78064 - DNA, 1488 bp, Citrobacter koseri
atgtctcgtaatactgaagcaactgacgatgtcaaaacctggaccggtggtccactgaattataaagaaggcttcttcacccagttacagactgacgagctggcaaaaggcatcagcgaagaggtcgtgcgtgcgatttccgccaagagaaatgagccggagtggatgctggagtttcgccttaatgcgtacaaagcctggcttgaaatggaagagccgcactggctgaaagcgcactacgataagctgaattatcaggattacagttattactctgcgccatcgtgcggtaactgcgatgagacgtgcgcgtcagaaccgggtgcagtacagcaaaccggtgcgaatgcgtttctcagcaaagaggtggaagacgccttcgaacagcttggcgtaccggtacgtgagggtaaagaggtggcggtggatgccattttcgactccgtttccgttgccaccacctaccgggaaaagctggcggaacagggcatcatcttctgttcgtttggcgaggcgattcacgatcaccctgagctggtgaagaaatatctgggcaccgtggtgccgggtaatgacaacttttttgctgcgctgaacgctgcggtagcgtctgacggcaccttcatttatgtgccgaaaggcgttcgttgcccgatggagctgtcaacctatttccgaatcaacgcggaaaaaacagggcagttcgaacgcaccattctggtggcggatgagggcagctacgtcagctacatcgaagggtgttctgcgccagtgcgcgacagctaccagctgcacgcggcggtggtagaggtgatcatccacaaagatgccgaagtaaaatattccaccgtgcaaaactggttccccggcgataacaacaccggcgggatactgaacttcgtcaccaagcgcgcgctgtgcgaaggtgaaaacagcaagatgtcgtggacgcagtccgaaacggggtcggctatcacctggaaatacccgagctgcattctgcgcggcgataactccatcggtgagttttactctgtggcgctgaccagcggtcatcagcaggccgacaccggcaccaaaatgatccacatcggtaagaacaccaaatcaaccattatttcaaaagggatctccgccgggaatagccagaacagctatcgcgggctggtgaagatcatgccgacagcaaccaacgcccgtaactttacccagtgcgactcaatgctgattggcgcggactgcggcgcgcacaccttcccgtatgtcgagtgtcgtaataacagcgcccagcttgagcacgaggcgacgacgtcgcggatcggtgaagatcagctcttttactgcctgcaacgcggcatcagcgaagaggatgccatctcgatgattgttaatggcttctgtaaagacgtcttctctgaactgccgctggaatttgccgttgaagcgcaaaaattgctggcaatcagccttgaacacagcgtcggttaa

SEQ ID NO: 78065 - DNA, 747 bp, Citrobacter koseri
atgttaagcattaaagatttacaggtcagtgtggaagataaagcgattctgcgcggtctggacctcgacgtcagacccggagaagtgcatgctattatggggccgaacggttccgggaagagtacgctttccgcgacgctggcgggccgtgaagattatgaagtggttggcggctctgtcgaatttaaaggcaaagatttactggaactgtcgccagaggatcgggcgggcgaaggcatctttatggcgttccagtatccggtagaaattcctggcgtcagcaaccagtttttcctgcaaacagcgctgaatgccgtgcgcagctatcgtggtcaggagtcgctggatcgttttgattttcaggatctgatggaagagaaaatcgcgcttttgaagatgccggaagatttgttgacccgttcggtaaacgtgggcttctccggtggtgagaagaaacgtaacgatattctgcaaatggcggtgctggagccggaactgtgcattcttgatgagtctgactccgggctggatattgatgcgctgaaaattgtcgcggaaggcgtcaactcgctgcgtgacggtaaacgttcgttcattatcgtgacgcactatcagcgtattctggactacatcaaacctgattacgtccacgtcctgtatcaggggcggattgtgaagtccggcgatttcactctggtcaaacaactggaggagcaaggatatggctggcttaccgaacagcagtaa

SEQ ID NO: 78066 - DNA, 1272 bp, Citrobacter koseri
atggctggcttaccgaacagcagtaacgcgctgcaacaatggcaccatctgtttgaggcgcagggcgaatcccgctcggcgcacgcgcagcagcatttacaacagatgctgcgcctggggctgccgacgcgtaagcatgaaaactggaaatacacgccgctggaagggttggtcagtagccagtttgtcagccgttttgccgaggttactcaggaacagcgcgacgcgctggcgctggatatcgacgctgtgcgtctggtgtttgttgacggcaagttcagcccgcagcttagcgacagcgctacagccagcggtttcgacattgcgatcaacgacgaacgtcaggcgctggccgcaccggttcagccggagattttcctgcatctgacggaaagcctggcgcagagcgtgacgcacatcagcgttaagcgcaaccagcggccctctaagccgttgctgctgatgcacattacgcaggggctggaaggcgatgaggtcaacactgcgcactaccgccaccacctggaactggcggaaggggcagaggcgacggtgatagagcactatgtcagccttaacgcggcacggcatttcaccggggcgcgtctgaccatgaacgtggcggcgaatgcgcatctgcaccacatcaaactggcgtttgaaaacccggtgagccaccactttgcccataacgacattctgctggcggcggatgcaagcgcgcacagtcacagtttcctgttgggcgatgccgtgctgcgacataacaccagcacccagttaaacggtgaaaacaccacgctgcggattaacagcctggcgatgccggtgaaaaacgaagtgtgtgatacccgtacgtggctggagcacaataagggttactgcaacagccgtcagttgcataaaaccattgtcagcgataaaggtcgggcggtattcaatggcttgatcaacgtggcgcagcacgccattaaaaccgacggacaaatgaccaataacaatctgctgctcggtaaacttgccgaggtggacaccaaaccgcagctggagatttatgccgatgacgtgaaatgcagccacggggcgacggtaggacggattgatgacgagcagatgttctacctgcgttcacgcgggattggagagcaggatgccagacagatgattctctacgcgtttgccgctgagttgacggaagccctcggcgatgacgcgcttaaacaacaggtgctggcgcgaatagggcttcgcctgccgggaggcatagcatga

SEQ ID NO: 78067 - DNA, 1221 bp, Citrobacter koseri
atgacatttcccatcgaaaaagtgcgggctgattttcccgtcctgacgcgtgaagtcaacgggctgccgttggcgtatctggatagcgcggccagtgcgcaaaagcccaaccaggtgattgacgctgaggcagagttttaccgtcatggctatgcggcggtgcaccggggcatccatacgctgagcgcgcaggccaccgagaagatggaaaatgtgcgtaaacaggcatcgctgttcattaatgcccgttcagcggaagagctggtgttcgtgcgcgggacgacagagggcatcaaccttgttgccaacagctgggggccggagaatgttcgggctggcgataacatcatcatcagcgagatggagcaccacgccaatattgtcccctggcagatgctgtgcgcgcgtacaggggcggaactgcgcgtcattccgctcaatacggacggcacgttgcagctggatacgctcccgtcgctgtttgatgagcgtacccgactgctggctatcgcgcatgtgtcgaacgtactgggaacggaaaacccgcttcctgaaatgatcgcgctggcgcatcagtatggcgcgaaagtgctggtcgatggcgcgcaggcggtaatgcaccatgcggtggatgttcaggcgctggattgtgatttttacgttttctccgggcataagctgtatggccccaccggtatcggcgtgctgtatgtccgggaggaactgcttcaggatatgccgccgtgggaaggcggcggttcgatgattgcgaccgttagtctgacggaagggacgacctggaccaaagcgccctggcgttttgaggcggggacgccgaacacgggcggaattatcggcctgggcgccgccattgaatacgtctgcgcgttagggctggcggaaatcagcgaatatgaacaaaacctgatgcactatgcgctggaacagctggcggacgtgccggagttgacgctatatggcccggctaaccggctgggggtcatcgcctttaatctgggcaaacaccacgcctatgacgtgggcagcttcctcgacaattacggtatcgccgtacgaaccggccatcactgcgcaatgccgctgatgacgtattacaacgttcccgccatgtgccggtcgtcgatagcaatgtataacacccatgaagaagtggatcgtctggcaaccgggctaaaacgtattcaccgcttactgggataa

SEQ ID NO: 78068 - DNA, 417 bp, Citrobacter koseri
atggctgcgctaccagataaagaaagattgctgcgtaattttcagcgttgcgccaattgggaagaaaagtatctgtacattattgaactggggcagcgtctggcggaattaaatgagcaggatcgtcgcccggaaaatagtattcagggatgtcagagtcaggtatggattgttatgcgtcagaacgctgatggcgttattgaattgcagggcgacagcgatgcagcaatagtaaaggggttaattgccatcgtcttcattttgtatcatcagatgacgccacaggatattgtgaattttgatgtgcggccgtggtttgaaaaaatggcgctgacgcaacatctcacgccctcccgttcacaaggactggaagctatgattcgcgcgatccgcgccagagccgcaactcttagctaa

SEQ ID NO: 78069 - DNA, 1005 bp, Citrobacter koseri
atgaaacgtgcgtctctcattgcagttacacttttcggcgcttacagcgcatttcaggcggcctgggcagtggattaccccttgccgccagcaaacagtcgccttgtcgggcagaatcaaacctataccgtgcaagcgggggataaaaacttacaggcgattgcccggcgttttgatactgccgcaatgctgatcctggaggcaaataataccatcgcgccggtccctaaaccggggacgccgattatcattccatctcaactgttattacccgatgcgccgcgtgaaggcattattgtgaacctggcggagttacgactctattatttcccgccgggtgaaaatagtgttcaggtttaccctatcggtattggtttagaggggctggaaacgccggtaatggcgacgcgcgtcgggcaaaaaatcccgaatccgacctggacgccgacggcaggtatccgcaaacgctcgcttgaacgcggcattacgctgccgccggtggtgcccgccgggccaaataacccgttaggacgcttcgccctgcgcctggcatacggcaacggtgagtatctcattcacggcaccaatgccccggacagcgtcgggttacgcgtcagttccggctgtattcggatgaacgcgccagacattaaagcgctgtttgcgcaggtcagaacgggaacgccggtacgggtgattaacgaaccggtgaaattcgccgtggaaccaaatggaatgcgttacgttgaagtacatcgcccgctgtcgcctgaagaggagcaaaacgtacagacgatgccgtatgtgctgccagcaggctttacgcagtttaaggcgactcaggaggtggatgaacgcctggtggaaaacgcgctgtatcgccgggcgggatatccggttgccgttacatcagggcaggcgccggtagcttctggtcgctctgtggtggagtccgcgcaaaacagccaacccgggagcggcgctgaaacccaggcaacgcagtag

SEQ ID NO: 78070 - DNA, 237 bp, Citrobacter koseri; identical to SEQ ID NO: 73187

SEQ ID NO: 78071 - DNA, 1413 bp, Citrobacter koseri
atgaaaaagacgaaaattgtttgcaccatcggtccgaaaaccgaatctgaagagatgttaaccaaaatgctggacgcaggcatgaacgttatgcgtctgaacttctctcacggtgactatgcagaacacggtcagcgcatcaagaatttgcgcaacgtaatgagcaaaaccggtaaaaaagccgcaatcctgctcgataccaaaggcccggaaatccgtaccattaagctggaaggtggtaatgacgtctccctgaaagcgggccagaccttcactttcacaacggacaaatccgttatcggcaacagcgaaatggttgccgtcacttacgaaggtttcacttctgacctgtccgtaggcaacaccgtactggttgacgatggtctgatcggtatggaagtcaccgcgatcgaaggtaacaaggttatctgtaaagtgctgaacaacggcgacctgggcgaaaacaaaggcgttaacctgccgggcgtttccatcgcgctgccagcactggctgaaaaagacaaacaggatctgatcttcggctgcgaacaaggcgttgactttgttgccgcgtcctttatccgtaagcgttctgacgttgttgaaatccgtgagcacctgaaagcgcacggcggcgagaacattcagatcatctccaagatcgaaaaccaggaaggcctgaacaacttcgatgagatcctcgaagcgtctgacggcatcatggttgctcgtggcgacatgggcgttgagatcccggttgaagaagttatcttcgcgcagaagatgatcatcgaaaaatgtatccgcgcgcgtaaagtcgttatcaccgcgacccagatgctggattccatgatcaagaacccgcgtccgacccgcgcagaagctggcgacgtggcgaacgccatcctcgacggcaccgacgcagtgatgctgtccggcgaatccgcaaaaggaaaatacccgctggaagccgtcaccatcatggcgaccatctgcgagcgtactgaccgcgtgatgaccagccgtctggatttcaataacgacagccgtaaactgcgcatcaccgaagcagtgtgccgcggcgcggttgaaactgccgaaaaactggaagcgccagtcattgtcgttgcgactcagggcggtaaatctgctcgcgcagtgcgtaaatacttcccggacgccaccatcctggcgctgaccaccaacgaagtgaccgcgcgtcagctggtgctgagcaaaggcattgtgccgcagctggtgaaagaaattaactctactgacgacttctaccgtctgggtaaagaagtcgctctacagagcggtctgggccagaaaggcgacgttgtggtcatggtttccggcgcgctggtaccgagcggcacgaccaacaccgcatctgttcacgtcctgtaa

SEQ ID NO: 78072 - DNA, 1146 bp, Citrobacter koseri
atgaaatcgtattccacacttagcgtccatagcggaaccttttctgacgcgcacggcgccgttatgccgccgatttatgcgacatcgacgtttgcgcaacccgcgccgggtcagcataccggatatgaatattcacgcagcggcaacccaacgcgccatgcgctggaaaccgccattgccgagctggaaggcggtacgcaaggttatgccttcgcgtccggtctggcgggtatcgctaccgtgcttgaacttctcgataaagacagccatctggtggcgattgacgatgtctatggcggcacctatcgactgattgaaaatgtgcgccgtcgcagcgccggattacaggtaagctgggtaaaacctgacgatctggccggtattgaagccgcgattcgtcctgatacccgcatgatctgggtagaaacgccgacaaatccgttactaaaactggccgatctggcggccattgccgatatcgcgcgtcgccaccagcttatcagcgtggccgataacaccttcgcttcgccgttgatccatcgtcctcttgatctggggttcgatatcgtggtgcattccgcgacgaaatacctgaacggccattcagacgtcgtcgccggactggcggtcgtcggggacaacccggcgctcgcacaacagctgggttatctgcaaaacgccgtcggcggcgtactggacccatttagcagttttctgtcattacgcggtattcgcacgctggccttgcgaattgagcggcacagcggcaatgcgctgacgctggcgcaatggctggaaaaacatccggcggtagaacacgtctggtatccggggctggcgtcgcatcctcagcatgcccttgcgcgccagcagatgtcacagttcggcgggatgatctccatcgtcataaaaggcgatgaccagcgcgccactgacgttatcacgcggctgaaattattcaccctggcggaaagcctgggcggtgttgaaagcctcgtcagccagccgtttaccatgactcacgcctctattccgcttgagcagcgtctggcgaatggcatcaccccacagttgattcgcctgtcagtgggcattgaagatgttcaggatttgcaggacgatttagctcaggcgctcgccgggtag

SEQ ID NO: 78073 - DNA, 1371 bp, Citrobacter koseri
atgacaacgtttcactccgtaacggaactgattggcaatacgccgctgcttcagttgcataagctgaatagcggcgtaagcgaactctttttgaaactggagaaccagaatccgggcggttcgattaaagatcgcgtcgcgctttctatgatcaatgaagcggaaagacaggggctgctaaagcccggcggcacgattattgaagcgacggcgggcaacaccgggctggggctggcgctgatcgccgcgcaaaaagattatgccctgacgctggtcgtgccggacaaaatgagccgtgagaagatcttccatttacgcgcgcttggcgcacaggtggtattaacccgctcagacgtcaacaaaggtcatccggcctattatcaggattacgcacgccgtctggcgcaggagacgcccggcgccttctatattgatcagttcaacaacgccgcgaacccgctggcgcatgcttccaccaccgcccccgaattgtttgcccagatggatggccgcattgacgccatcgtggtcggcgtcggttccggcggcacgctgggcggtttacaggcatggtttcgcgaacactccccgcacacggagttcgtgctggccgaccccgccggttcaatccttgccgatcaggtcgagacaggcacattcggcaccgccggctcctggctggttgaagggattggcgaggactttattccgccgctcgcccacatcgaatccgtttcacaggcctttcgcatcagcgataaagacgccttcgccacggcgcgcgagttgctcagaaccgaaggcatccttgccggttcatcgaccggtacgctgctcgccgccgccctgcgctactgccaggcgcagacgcagccaaagcgcgtggcgaccttcgcctgcgatagcggcaataagtatctctcgaaaatgtttaacgatgactggatgcgccagcaagggctcatcacccggccacaggctggcgatctgagcgacttcatcgccttacgtcatgacgaaggggcaaccgtgaccgccgcgccggacgatacgctggcgaccgtgctggcgcgtatgcgcctgtacgatatttcgcagttgccggttcttcaggaggatcagcttatcggcatcatcgacgaatgggatctgattacgcatattcagggcgataacccgcgtttttccctcccggtaaaagaagcgatgacgcgcgaggtagtccggcttgataaacgtgaaccggaaagcgcgctgaaacctatttttgatcgcggccaggtggctgtgattgtcgacaacgaccagttcctcggtctggtcacccgtagcgatgtgctcacccactggcgcaaccgcctggataaataa

SEQ ID NO: 78074 - DNA, 1023 bp, Citrobacter koseri
atgatcgtcctgaaaaatatttcgaaagtttttacgcccggcaagctgtctattaccgcagtggataacgttaatctgacggttgaacagggacaaatttacgggattattggctacagcggcgccggaaagagtacgttgattcgtttgctgaacggtctggaaaaaccgaccgtgggcagcgtgaccatcaatggtcacgatatttcagcggcgacaggagagtccctgcgccaggcgcggctgaaaatcagcatggtgtttcagcacttcaatttgctgtggtcgcgtaccgtcagcgaaaacatcgctttttctatgcaaattgcgggcgcgccaaaagcaaaaatcaaggcgcgggtggcggagctgatcgacctggtgggattaaccgggcgtgagaatgcttacccatcccagctgagcggcgggcaaaagcaacgtgtggggattgcccgtgcgctggcaaataacccggatgtgctgctctgcgacgaggcgacttccgcgctggacccgcaaaccaccgatcagattctggatctgctgctcgatattaatcgccgcttccagctcacgattgtgcttattacccacgagatgcatgtggtgcgcaaaatctgcgatcgcgttgcggtgatggaaaacggcagagtggtggaggaaggcgatgtgctgaacgtctttactcatccgcaacagccgattacccggcagtttgtccgccaggtaagtcagtatgccgaagaggaagcgtttaacccgcagctggcgagcgagctgggcgggacggtgattaagctgaccttcaccgggcacagtacgcatcagccgatcgtaggggagcttaccctgcgttacggcctgcctttcaatatcttacacggcaagatgacgcaaaccgcgcatggcgtgtttggccaactgtggctgcacgtcgtggcgacggaagaacaactgaataatattctggcggatttgcggcagagcgatattgaaggtgaggtagtacaacatggttga

SEQ ID NO: 78075 - DNA, 669 bp, Citrobacter koseri
atggttgagaatctgtttccccatctgaaatgggaacaactttttgcggcaacgcaggaaacgctctatatgacggcgctttccggtatcgcgacgtttgtgctggggattgtactggggctggcgttatttttgaccgcgcgcggcgggctgtttcagaaccgcacgctgtatagcgtcatttcgctggtggtgaatatttttcgctcgatcccgttcatcattttgatcgtcttgctgatcccgtttaccaaagcgctggtcggcaccattctcggggcgaacgctgcgctaccggcgttgattgtcggggcggcgccgttttatgcgcgtctggttgaaatcgcactgcgcgaggtcgacagaggcgtgattgaagccacgcgttcgatgggcgcacgtctcagcacacttatttttcgggttttactgcctgaatcatcacccgcactggtgtccgggatcaccgtgacgctgattgcgctggtcagttacagcgcgatggccggagtgattggggcaggcggtttagggaacctggcttatctggaaggattccagcgcaaccacaacgacgtcacgctggtggcgacggtgactatcctgatcatcgtcttcattatccagttctgcggcgatgtgatcacctctctgttagataaacgctaa

SEQ ID NO: 78076 - DNA, 813 bp, Citrobacter koseri
atgaaaaaatcactgacattactcgccgcagcaaccttaagcgccctgagctttgcctcctgggcggatacgctgaccgttggcgcctctaacgtaccgcatgcggaaatccttgagcaggcgaaaccgattctggcgaaacaggggatcgatctggagattaaacctttccaggattacattctgccgaataccgcgctggccggtcgtgaaattgacgccaactacttccagcatatcccgtacctgaatagcgtgctgaaagatcatgcgggtgataaaacctatgatttcgtcagcgccggggcgattcatattgagccgatcggcatctactctaaaaaatacaaatcgctgaaagatctgccggaaggcggcaggatcattatgcgtgacgcggtatctgaagagggacgtattctgtcgatctttgaaaaagagggcgtgatcaaactgaagccggacgtggataaggtcagcgcgcgcatcagcgacatcgtggataacccgaaaaaactgaagttcctgccgaacgtggaagcggcgctgttaccacagatgtacaacaacgatgaaggcgatgcggtggtgattaacgccaactacgctatcgacgcaggtctggacccggttaacgatccgatcgccgttgagagcggagaaaacaatccgtacgccaacatcattaccgtacatcgtggcgacgagaagaaaaaagacatcgtggcgctggttgacgttctgcactcaaaagagattcaggactggatccgcacgaagtacaaaggcgcggtgattccggtcaataactaa

SEQ ID NO: 78077 - DNA, 210 bp, Citrobacter koseri; identical to SEQ ID NO: 73180

SEQ ID NO: 78078 - DNA, 627 bp, Citrobacter koseri
atgaaccaggtcgaacgtccaatattagattttggcttaacgcggctcgaatttctgcgtatatcaggaaagggtctggcaggattaactatcgctcccgcgctgctgtcactttttggctgcaaacaggaagacgttgatagcggtacggtaggactgataaacacgcccaaaggggtattagtgacccaacgcgcccgctgcacaggctgccatcgctgcgaaatctcctgcaccaattacaacgatggcgctgtgggctcgttcttctcccgcattaagattcaccgtaattacttctttggcgacaatggcgtcggctccggcggcggcctgtacggcgatttaaactacaccgcagatacctgtcgccagtgtaaggacccgcagtgcatgaaggtctgcccaatcggcgcaattacctggaaacaggacgatggctgcatcgcggttgatcataagcggtgtattggctgtagcgcctgtaccactgcctgcccctggatgatggctaccgtaaacagcgaaacgaaaaaatcgtcaaaatgtgttttatgcggcgagtgcgccagcgcctgtccaacaggggcgctgaaagttatcgagtggaaagatattactgtttga

SEQ ID NO: 78079 - DNA, 2103 bp, Citrobacter koseri
atggctaacggttggacaggtaatatattacgggtcaatcttacaacaggcgatattaccctcgaagattccagtaaatataaaaaatttgtcggcggaatggggttcggctacaaaattatgtatgacgaagtcccgcctggcacgaaacctttcgatgaaggaaataaactggtatttgccaccggcccgctgaccggatctggcgcgccctgtagttcccgcgtcaatatcacttcgctctctacgtttactaaaggtaatttggttgtcgatgcgcatatgggcggcttctttgcggcacaaatgaaatttgccgggtacgacgcgattattattgagggtaaatccgcttcgcctgtgtggatcaatattaaagatgacaaggtcagcctcgaaaaagcagattttctgtggggcaaagggacgcgcgccacgaccgaagagatctgccgtatgaccagcccggagacctgcgtggcggccattggtcaggcgggtgaaaacctggtgccgctctcctgtatgctcaacagccgtaaccacagcggcggggcgggaaccggcgcggtgatgggggcgaaaaacctcaaggccattgccgttgagggcaccaaaggggtcaatattgccgatcgcaaagagatgaagcggctgaatgactacatgatgacggagctgattggcgccaataataatcatgttgtgccgagcaccccgcaggcatgggcggaattttcctcaccggcctcgcgctggacggcgcgtaaaggtttgttctggggggccgcagagggcgggcctgttgaaaccggcgagatcccgccgggtaatcaaaatacggtcggctttcgcacctataaatccgtgtttgacttaggtccggcggctgaaaaatacaccgtgaaaatgagcggttgccactcatgcccgatccgctgcatgtcgcagctcaatattccacgggtaaaggattttggcgtaccgagcaccggggggaatacctgcgtggcaaactttgtccataccacgatcttcccgcacggcccgaaagattttgacgacaaggacgatggccgcgttatcggcaatctgatcggtctgaacctgtttgacgactacggtatctggtgtaactacgggcagttgcaccgtgacttcacgtattgctacagcaaaggcgtgttcaagcgcgtgcttccggctgaggaatatgcggagatccgctgggatcaactggaagcgggcgatcccaattttattaaggatttctactatcgcctggcgcatcgcaaaggagagttgagccatcttgcggatggttcatacgccattgccgagcgctggaatctgggtgaggaatactgggcgtacgataaaaacaaactgtggtcgccgtttggctatccggtacaccatgctaacgaagcgtcggcgcaggtgggggcaattaccaactgcatgtttaaccgtgactgcatgacccacacccacatcaactttattggttctggtttaccgctgaagctacagcgagaggtcgcggcggaactgtttggttctgaagacgcctacgacgagactaaaaattacacgccgatcaacgcggcgaaaatcaagtatgccaaatggacgctgctcaaagtttgcctgcataacgccgtgacgctgtgcaactgggtctggccgatgaccgtttcgccgttgaagagccgaaattatcgtggggatctggacctggaagcgaaatttttccaggcggtgaccggggatgaaaccacccaggcgagccttgatttagccgcagaacgtatcttcacgctccatcgcgcctataccgtcaaactgatgcagaccaaagatatgcgcaatgaacacgatctcatctgttcgtgggtttttgacaaggaccccaacattccggtgttcactgaagggactgacaaaatggatcgcgacgatatgcgtgaatccctgacgctcttttataccgagatgggctgggaccctgaactgggatgcccgacgcgagaaacgttgcatcgcctcggtcttgaggatgtcgccgccgatctggccgcgcagaatctgctgccagcgtaa

SEQ ID NO: 78080 - DNA, 645 bp, Citrobacter koseri
atgagtcattcagagggcgaacactccacgcctgaggtggatattgaaaagcggcagtggctgcaaggcttacatcagcatgaaaggcgagtggatgaaccggcgcctcccgcgagtccggcagagatcatggcggagttcatccgccagcattctgcttcaggccagctggtggctcgcgcgcttttcctgcaaccgccgtattcagtggaggaagaggcgttaacgccgctgctggagatgctgcttcagagcgagacgggggcggatatcgcctgcgtacagggtgctcaggatgattattactactcgacgcaaaccatgaccgctaactatgccgacatgtgcgtgcaggtggtggagaacgatatttgccgggctatcgcacaggcggtgcgttttgattgccagacctatccgcgaccctacaaggtcgccatgctggaacaaccgccataccgctttgcgccgcagcaaatagagacagcccttgccgcgatcgacacgcacccggattacgcggatattcgccgtgtggcgtcgtccaacgacgtgccgtatctgtttagcgaacgttttatgagctacggcaaggcatatggcttatgcgaatggcttgaggttgagcagtttcagaatccctga

SEQ ID NO: 78081 - DNA, 672 bp, Citrobacter koseri
atgtccttcactcgacgaaaatttgtgcttggtatggggacggtgatttttttcagcgggcccggccaaaatttgttagcgaacacgaagaatagcaaagcggtgcgttatgccatgattcatgacgaatcccggtgtaacggctgcaatctctgtgcccgggcgtgtcgcaagaccaaccatgttccggctcagggcagtcgtttatccatcgcgcatattcctgtttcggataatgaaaacgaaaccgtttatcactatttccgccagtcctgccagcactgtgaagatgcgccctgtattgatgtttgcccgactggtgcctcctggcgtgatgagcgcggtattgtgcgggtagatgaatcgcgctgtatcggctgtagctactgtataggcgcttgtccgtatcaggtgcgttatctcaatccacaaaccaaagtggcggataaatgcgacttttgcgccgaatctcgcctggcaaaggggttcccgccgatttgcgtgaatgcttgcccggagcacgcattgatttttggtcgtgaagacagcccggaaattcagacctggctgaaggagaacaaattctatcaacaccaactcgcaggcgccggaaaaccgcatctgtatcgccggttcggtcaacattatttgattaaaaaggaaaatgtatga

SEQ ID NO: 78082 - DNA, 786 bp, Citrobacter koseri
atgaacgcgtcgcagaatgctgaacagttccatgcccaactggcgaactatgtccccgtgttttctcccgaatactggcctgtctggttagtcatcgccggactgatgctggtagcgatgtggctggtgttggggctgcatgccatgctgcggtttcgcgccgccaacaaagccgcggccggtcacggtgaaaaggtttacctgtactcaaaagcggtgagattgtggcactggtcgaacgcgctactgtttgtgctcctgctcggcagcgggctgatcaatcatttctcgctggttggcgcgtcggtgatgaagagcctgctgacggtgcatgagatctgcggttttctgctgctggcgtgttggctgggttttgttttgatcaacatgctgggcggcaacggacaccattatattattcgccgcgagggctggattgaccgggcgatgaagcagacccgcttctatctgctcggcattatgcagggtgaggaacatccgtttcccgccaccacacagtctaaattcaacccgttacagcaggccgcttatctcggggtgatgtacggcctggtgccgctgttgctgataaccggactactgtcgctttatccacaggcggcgggcgatctgttccccggcgtgcgttactggctgttgcaggcgcatttcgcgctggcgatcgttagcctcttttttatcttcggtcatctttacctttgcacgacaggtcgtacgcccggtgagaccttccgctgcatggttgatggctatcatcggcactaa

SEQ ID NO: 78083 - DNA, 813 bp, Citrobacter koseri
atgatcattacgcgagaggatttacgtacctggcgagtcgggcccgtcatctatcgttggtttgtccgtcgctttccgaatggcggcagctacgccgacgtgcatcgggcgctgagcagtgaaggctatctcgactgggcaaatagcctggtggaatatgcctggtcgcgctggctggatgaggagagctttgcgcgtcaggatatcagcgcgatggacagcctggtgagtgcgcagtcgcactacggtaatagcgaacacattgcctgcgcggacgataacgttcatctgggatgtgcgggcgataacgtcaaaattgccagcgtggggtacgcttcgcagattgccagcgcggggtactgcgcgcgcattggcagcgcaggctacaacacgcatataggctgttccggcgatcgcgcgcgggtggcggtggcagggaactcaacccgcgtaagctgcgccggtgacgggagtcgtattgccagcgcgggaatgcgggtgcgcatcagcacgctgggtgacaggagcaatattgccagcaatggcgatctggcgcaggttgccagctttggcgccaatgccagaattgccaacagcggagagaatgttcatctcgttaccagcggtgacaatgcggtcatcgccagcaccgggcacgttgactctctgatactagggcccggcggctgtgctgcgctggcgtatcacgatggcgaacgtacccgttttgccgtcgccattgaaggcgagaacaacatacgcgccggggtaaaatatcgcctcaacgaacaacatcagtttgttgaatgttga

SEQ ID NO: 78084 - DNA, 678 bp, Citrobacter koseri
atgatcgctaatatttcggtcattaccgacaatctggattacctgctgtggggacgcgctgctgatggtcaacccggcggcgtgcttctcacgttgttgatggcgctgggtgctggcgtgctggcgcttcccggcggggtggttctcgcctgtcttgcctggcgatttccgggcgttatccgtaatgggctgtttctctgggcggaatttattcgcggcattccgctgatcttcgtgatcttctggatgtggtatttgctgccaatgcttaccggaagcgatcttcccggcgccgttaccgtcacgctggcgctggcctggtttactgcggcatcggtgatgcactccgtttatgctggcataaacgcgcttcctgccgggcagtacgacgcctcggtagtgcagggatttcgcccgtttcaggcattatggctcattctgcttccccaggtgctacgcaatgtaatgccgtcattgaccggcatttttatcggcctgctgaaagacacgtcgctggcgtttatcgttaatgttcctgaactgactaccgtcgccggccaggtgaatagccgggtacagatttacccggcggccatttttatctttaccggactggtctattacctgctctgttttggcctggagagattcacccgtcgacgattcgccatccgataa

SEQ ID NO: 78085 - DNA, 780 bp, Citrobacter koseri
atgcttactctggactggcagggggtgctgagcgagcaacctctgcaatgggtcatctcgggttttttgaccacgctctgggtaacgctggcaggcgttttgctatcgacactgctggcgattatcctgctcgcgctacgtctctccggcaacgcattcggtcgccgtctggtcgccgcctgggtctcgctgtttcgcaatacgcctctgcttgtgcagttgatgttctggtacttcgcagcgtggaattttctgccccgtggcgtgattgatttcgttaataccgatcatttttggtcgatcctgcctggcgatgtctggtggctgacgccagaatttctctgctccgcatgggggctgggggtattcacatcggcctttctggttgaggagatcgcatcggggttgcaggcggtatccgccgggcagcgagaggccgctgtatcgcaaggtttttccgcatggacgaccctccgccatattctgctcccccaggggctggcaaacgcctggcaacccatcgtggggcaataccttaacctgatgaaactctcatcgcttgccagcggtatcggctttgccgaactgacctatcaggtgcgacaaattgaaagctataacgcccatgctctggaagcctttgccgtcggcaccgcgctctatttgctgaccggcattgtattgggtctgctactggcgcggctaaaccccgccccggccaaaagagtgaagcccaaaacgcgtattttcagcctcaggagtccacaccatgatcgctaa

SEQ ID NO: 78086 - DNA, 819 bp, Citrobacter koseri
atgctctcaggtttgtttacccgctccgcagcttcggctgcggattttacgcatttgcgtcaggcgcgcgttgaactgcgcgatgtgatcaaacagtacgacgggcaccgggtattaaacggtgtcaatctgacggtggaacccggagaagtcgttaccatccttgggccatccggttcgggaaaatccacgcttattcgactcatcaaccagcttgagtcattaagcggcggcgatatttttatcgatgataagcccattggtcagctcaagggcgcagcgctgcgccagttacgcagccgcattggattcgtattccagcaattcaacctttacgcccatctgacggcgcagcagaacattacgctggcgctggaatatgtgcatggctggaataaagaggccgcccggcagcgggcccgcgagttgctggaccaggtgggtctggctgaaaaagccgacgcatttgccgcccagctctctggtggacagcagcagcgcgtcgccattgcccgcgcgctggcctcctctccgcaaattatcctttttgatgagccaacatccgcgctggacccggaaatgatcggcgaagtcttacaggtaatgaagaaccttgcccacagcgggatcaccatgatcgtcgttacgcacgagatgcacttcgcgcgcgaaattgccgaccgtgtcgtgtttatcgacggcggcgatattctggaagtcgcctcgcctgaagcattttttacccgtccgcagcaccccagaacccagcgcttcctgaagaaagtgctcgatccgttacaccaggagtcatcgttataa

SEQ ID NO: 78087 - DNA, 834 bp, Citrobacter koseri; identical to SEQ ID NO: 73170

SEQ ID NO: 78088 - DNA, 180 bp, Citrobacter koseri; identical to SEQ ID NO: 73169

SEQ ID NO: 78089 - DNA, 141 bp, Citrobacter koseri; identical to SEQ ID NO: 73168

SEQ ID NO: 78090 - DNA, 903 bp, Citrobacter koseri
atgaaaaacatctttacactgacattcctcgcgctaagctgcctttccacgcacgctatagccagtgaaaaacttgccggtaatgaaattctcgccgttcagaaaggcggtgtcccggataagatttatgaaaacaacaagcctcatttaagaattgcgacctataacatcggcaaaaatgaagcgtccgaaaatgtagctgatttcacgtcgcttaacgccgctatcaaaaaaattgcagctgatatcattgcggttccagaggttgataataaaaccgcaagaagccaaaagattgatcaattgaaaacgatcgctgatgcaaataactatcactatgcctttggtaaggcgctggattttgacggtggtgaatacgggctcggcattttatcgaaatacaaaattcagcatactcaggttatcaatttaccctcaggcgatgcagaacaacgggtagcattactggcgcaaattgaggttccaggtttcgatacgccggtactggtcatggttacccaccttgactggcaaaaagatcctaccatgcgaattgagcaagtccgccatctgctggatgtcagtattggcgatgcgtcatccgattttaaagatatcgcctcttcaataaaaattctggctggcgatttcaactctacccgtgacgaacagccgttaaaagaaattagctatttctttaatccggttgagaaacaggggacggattatcgtacatggcctgcggttaacccggcgattgatattgaccacatcttcactttcaaggggcaaaaatgggatgtgaagaagatagaaattccgcataactcccctgctttcacctggtcgtcggcaagcgatcatctcccctttatcgcggatatggaactcaccgagcagtaa

SEQ ID NO: 78091 - DNA, 939 bp, Citrobacter koseri
atgtatggccgtgagtatcgaaacgggcgtcgtcgcatggcgccgtttttagcaatctcttgcattactctgctgtatggcgcgaaagggtatgccaggccggatatggagccgctgggaccgaatatcgccgatcggggttccgcgttttaccatttcagggttgaaaatttcgactccgccgacggaaaaaggcattacaaggtctggaccggcattcctgataaaacgccgccagcgtcgggttatccggttctgtatatgctggatggcaacgcggtgatggaccgcctgacggaggacttgctgaaacaactggcggaaaaaacgccccccgttattgtcgccatcggctaccagacccacttaccctttgatctgaacggcagagcctatgattatacgcccgcgctggaagtgaaaagcggggcggaggggcgctatcgtcgaccgggtggcggcagtggggacttccgtcgactgctggagacgcgtatcgcgccgcaaacggaacaagggatcaacatcgatcctgaacgacgcggcgtatggggacactcctacggcggcttattcgtccttgattcgtggctgtcgtcgtcattttttcggttttactacagcgccagcccatcgctgggaagagacaattcctcgttgttaacccggttaaccacaatggatgccgcgaaaaattgccataagcgtttatttttcatggaaggttccgcttcaccggggaaaaacgtgcagactccggtttccgatatcctgaataaaacccgcgacgccgtttccgccctgcaaaaagacgggcttgcggttgcctggtggaattacccggggttgacgcacgggccgatgttcaccgcctcttttcagagcgcgttactgaatatgagcgcggaggagactcccggggcagcgcgctgcgattaa

SEQ ID NO: 78092 - DNA, 2301 bp, Citrobacter koseri
atgataaaaaaggcatataaattatcgcttttgagttcgcttattgcagggagtctggcaattcctgcggtacaggctgacgacatcaaaacagcggcaaaccagaaagcagaacaaacaaacgccagtaacccaccggagaaacaggctgcccgcgacaaagaaataaacagcggcgaaaccatggtcgtgacggccaaagaacagacgctccaggcccctggcgtctctatcattgacagcgaggccattaaaaaacggccgatacagcgcgacgtcgctgagatcattcgcaccatgccgggcgtcaatctcaccgggaactctaacagcggacaacgcgggaataaccgccagattgatatccgcggcatggggccggagaacactctgattctgattgacggtatgcctgtctccagccgcaactcggtgcgctatggctggagcgatgagcgcgatacccgtggcgacaccaactgggtgccgccagaaatgatcgagcgcattgaggtcatccgtggcccggccgccgcgatgtacggcagtggcgcaatgggcggggtcgtcaatatcatcaccaaaccggcgacggacgaatggcacggcagtttaaatacctattacaactttccacagcacaaatccgaaggcagcaccaaacgctataacggcagtttaagcggcgcgctggcggataatctgaccctgcgagtctacggtaactggaataaaacgcaggctgatgcccaggatatcaacgaaaaccacacgaccccgcgtatcggttcttatgccggtagctaccccgctggccgtgaaggttttatcaataaagacatcaattcagctctgcgctgggaatttatgccgatgcaggcgctggaactgggggccggctacagtcgccacggcaacctgtatgccggtgatacgcaaaacaccaacagcaacgcgctggtaaaaaaatattatggcaaagaaacaaacgttctctaccgccagacgctcagcctgaaatataccggcgcctgggacagcggcgtcaccaccaataactatgtgcagtttgaaaaaacgcgtaatacccgcctcaatgaaggcctctctggcggcatctcggggattttcagcccgtcaaatgaagggttttcgaccatttcgttgtatgacaccaacctgcactcggaagtgaatatcccgcttgacctgtgggttagccagacgctgacctttggcgcggaatttaaccaccaggcgatgaaagatccgtcgtcgaataccgaatccaccaccggcggaggctcggttccggggattgccgataccgggcgcagcaaatacagctcagcggatatttacggcatctttgcggaagataaccttgaactgacggacagcactcgtctgacccctgccgttcgcttcaaccaccagagtattagcggcagtaactggagtccgtcactgaacctctcccaggaactgggcggcgacttcacgttgaaactgggtattgcccgcgcatggaaagcaccaaatctgtatcagaccaaccccaattacctgttgttcagtaaaggccagggatgctacggcggcggcgcctgctatctgcaaggcaaccgcgatctgaaagcagaaaccagcgtcaataaagaggtagggattgaatataatcatgatgaagtgcaggccgggctgacctggtatcgcaacgactaccatgacaagattgcagccggtgactcggttgcgggcaaagccacctccgcaaatatttatcaatgggaaaacgtgccaaaagccgtcgttcaggggctggaagggacgttcaatttcccgctcgccgatacgctgaagatgaaaaataacttcacctatatcatcgagaacaagaataagaagagtggagattacctgtcggttattcccaaatacaccatcaactcaacgctggagtggcaggccgctaacgatctgtcggtgcagggtacgctgacgtggtatggccgccagaaaccgaaaaaatacacttatcaagggaaccccacttcgggcagcgaaacccgacaggtatcgccttatgcgctggtgggcatgagtgcgacttacgcggtgacgaaatatgtggatgtaaccgcagggatcgataacctgttcgacaagcgccacttccgtgaaggaaatgcccagactaccggtaacgccaccacgggcgcgtatctgtggggagctggtgcgaacacctataacgaacctggccgcacctactacatgcaggtggggctacacttctga

SEQ ID NO: 78093 - DNA, 1374 bp, Citrobacter koseri
gtgcaaaagtatatcagtgaagcgcgtcagttattggctctggcaataccggtgattcttgcgcaaatcgcccaaaccgcgatgggattcgtcgataccgtgatggctggcgggtacagcgccacggatatggctgccgtcgctatcggcacatccatctggctgcccgccattctgtttggtcatgggctgttactggctctgaccccggttatcgcgcagctcaacggctctggccgccgcgaacgcatcgctcaccaggtgcgacaaggcttctggctggcgggctgtgtgtccgttctcattatgtttgtgctatggaatgccggatacattattcgttctatgcataacattgatcctgcgctggcggataaagccgtgggctatcttcgcgcgctcctgtggggcgcgccgggatacctgttctttcaggttgcgcgtaaccagtgcgaaggtctggcaaaaaccaaacccggcatggtcataggcttccttggcctgctggtcaacattccggtgaactatatattcatctacggtcacttcggtatgccggaactcggcggcgtgggctgcggcgttgccacggcggcggtctattgggtgatgtttatcgcgatggcctcgtatgtgaaacgtgcgcgttcaatgcgcgatattcgcaacgagcgcggattcagcaagccggatacggaggtcatgaaacgtctggtacagctaggtttgccgatcgccctggcgctgttttttgaagtcaccttgtttgccgtggtggcgctgttggtttcaccgctgggtattgtggatgtcgcaggccaccagattgccctgaacttcagttcgctgatgttcgtattgccgatgtcgctggcggctgcggttaccatccgcgtgggctatcgacttggccagggctcaacgctggatgcccagacagccgccagaaccggactgggcgtcggggtttgcatggccgttatcaccgcaatttttaccgtgacgctgcgtgagcctatcgccctgctctataacgacaatcctgaagtggtcacgctcgccgcgcaactgatgctgctggcggcggtgtatcaaatttccgattcgatccaggttatcggcagcggtattttgcgtggttataaagatacgcggtcgattttctttattacctttacagcttactgggtgctgggattaccgagcggttatatcctcgcgctgaccgatctggtggtggatcgcatgggaccggccgggttctggatgggctttattatcggcctgacgtctgcggccattatgatgatgctgcgtatgcgatacctgcaacgccagtcatcagcgattattttgcagcgcgctgcgcgataa

SEQ ID NO: 78094 - DNA, 642 bp, Citrobacter koseri
atgtttacaggtattgtgcagggcaccgcgaaactggtgtcgattgatgaaaaaccgaatttccgcacgcatgtcgtggaattacctgaacacatgctggacgcgctggagacgggcgcatcggtggcgcacaacggctgttgcctgaccgtcactgaaataaacggtaatcagatcagctttgacctgatgaaagagacgttacgcattaccaatcttggcgatctgagcgtcggcgatctcgttaacgtggagcgtgcggcgaaattcagcgatgagattggcgggcatttaatgtcgggtcacattatgaccacggctgaaatttcgaaaattctgacctctgagaataatcgtcaggtctggtttaaagttcaggacccgcagctgatgaaatatatcctgtataagggattcatcggcatcgatggcatcagtctgacggtaggggaagtgacgccaacgcgcttttgcgttcatctgatcccggagacgctggaacgcaccacgctgggtaagaaaaaactgggcgctcgcgtcaatatcgaaattgatccgcaaacccaggcggttgttgacaccgtcgagcgcgtgctggcggcacgggaaagcgcggcgaatctgcatgcaggcgacgcgtaa

SEQ ID NO: 78095 - DNA, 1149 bp, Citrobacter koseri
atgagttcatcgtgtatagaagaagtcagcgtaccagatgatgactggtatcgtatcaccaacgaattgctgggccgtgcgggtatcgccatcaatggcactgccccggcagatattcgtgttaaaaaccccgattttttcaaacgtgtattacaggaaggatcgctggggttaggtgaaagttatatggatggctggtgggaatgcgaccgactggacatgttttttagtaaagtcttacgagccgggctcgaaaaccaactcccccaccatttcaaagatacgctgcgtatcgcgggcgcgcgcctgttcaacttacaaagtaaaaaacgcgcctggatagtcgggaaagaacattacgatctcggcaacgatcttttctcccgcatgctcgacccgtatatgcaatattcctgcgcttactggaaagatgccgacacactggaatccgcccagcaagcgaagctgaagctcatttgtgaaaaactacagttgcagccgggtatgcgcgtgctggatatcggatgtggctggggcggcttgtcccagtttatggcgtccaattatgacgtcagcgtcgttggcgtcacgatttccgccgagcagcaaaaaatggcccaggaacgttgcgctggtctggacgtttctattcggctacaggattaccgcgaccttaacgatcagtttgatcgcattgtgtccgttggtatgtttgaacacgtcgggccgaagaactataaaacctattttgaagtggtcgaccgtaatttgaaaccggacggtattttcctgctccacactatcggttccaaaaagacggataataatgtcgacccgtggatcaataagtatattttcccgaacgggtgcctgccgtctgttcgccagattgcgaatgccagcgaatcgcatttcgtgatggaagactggcacaactttggcgcagattacgacaccaccctgatggcctggtattctcgctttatcaacggctggccggaaattgcagataattacaccgaacggtttaaacgcatgttcagttattatctgaatgcatgcgccggggcgtttcgcgcccgtgatatacagctatggcaggtggttttttctcgtggcgtcgaacacggcctgcgtattccccgctaa

SEQ ID NO: 78096 - DNA, 1206 bp, Citrobacter koseri
atgcaacccggaaaaggttttttagtctggctggcgggtctcagcgtgctgggctttctggcaacagatatgtatctgcctgcgttcgcggcaattcaggccgacctgcaaacaccggcggcggctgtcagcgccagcctcagtctgttcctggccggtttcgccgtcgcgcaactgctgtgggggccgctgtcagaccgttacgggcgtaaacccattttgctgctgggtctcttcatctttgcgctgggcagtctggggatgatgtgggtcgaaagcgctaccgggctgctggtactgcgttttattcaggcggtgggggtttgtgccgctacggtgatctggcaggcgctggtgacggattattatccaacgcaaaaaattaatcgcatcttcgccaccattatgccgctggtcggtttatcgcccgcccttgcgcctttactcggcagttggatcctgacgcatttttcctggcaggccatttttgccacgctgttcatcattacgctgatattgatgctgcccgccttacgcttaaagccaacaacaaaagcacatgaccacagccaggaaaaactgaccttcgccagcctgctgcgttcacaaacttatcgcggcaacgtcctgatttacgccgcctgctccgccagcttttttgcctggctgacgggttccccgtttatcctcagcgaaatgggctatagcccggcggtgattggtctgagctatgtaccgcagaccatcgcgttcctggtgggcggttacggttgccgcgcggcgctgcaaaaatggcagggtcagcagctgttgccctggttactggttctctatgcgctgagcgtggtcgccacctggggcgccagcttcatcagccatgtttcgctgacggagatcctgattccattctgtgtgatggctatcgcgaacggcgcgatctaccctatcgtcgtcgcccaggcgctgcgccccttcccacaagcgaccggacgcgcagcagccttacagaacacgctgcaactgggtctgtgtttcctggcaagcctggtcgtttcgtggctgatcagcacgccgctgcttaccaccaccagcgtaatgctgtcgacggtggctctggcggcactgggatactggctgcaacttcaggcgcaggaaccggccgcgcgcgcagcaaacaccgaagttgcgcacagcgaatctcactaa

SEQ ID NO: 78097 - DNA, 933 bp, Citrobacter koseri
atgtggtcagaatattcactcgaagtggttgatgccgttgcccgtagtggcagctttagttctgcggcgcaggagttgcaccgcgtgccttctgcggtgagctataccgtccgtcaactggaggagtggttggcggtaccgctttttgaacgacgccatcgggacgttgaactgacccccgccggggcatggtttttaaaggaagggcgctctgttatcaaaaaaatgcagatcacccggcagcagtgccagcagatagccaacggttggcgggggcaactggcgattgcggtcgacaatattgttaagccggagcgcacccggcagatgattgttgatttctatcgtcattttgatgatgtggaattgctggtctttcaggaggtatttaacggcgtctgggatgcgctgtcggacgggcgcgtggagctggctatcggcgcgacgcaggccattccggttggaggacgctacacctttcgcgatatggggatgctgagctggagctgcgtggtcgcccgccatcatccgctggcgtcaatggctggcccgctcagtgacgacacgttgcgcaactggccgtcgctggtccgggaggatacctcgcgtacgcttccgaagcgcatcacctggctgctggataaccaaaaacgcgtggtggtgccggactgggaatcttcagcgacctgcctctcagcgggactgtgtgtgggaatggtgccgacccactttgctaagccgtggatcgacagcgggaaatgggtggcgctacagcttgagaatccgtttcctgatgcggcgtgctgtctgacgtggcagcagaatgacacgtcgcccgcgctggcctggttactggactatctgggcgacagcgaaacgctgaataaagagtggttacgggagccggaagaggctcccgcagaaggggattaa

SEQ ID NO: 78098 - DNA, 1026 bp, Citrobacter koseri
atggcaacaattaaagatgtggcgaagcgagcaaacgtttccactacaaccgtatcacacgtaattaacaaaacgcgcttcgttgcggaagagacgcgcaacgcggtatgggcagccattaaagagctgcactactctcccagcgcggttgcccgcagcctgaaggttaaccacaccaaatcgattggtttgctggcgaccagcagcgaagccgcctattttgctgaaattatcgaagccgttgaaaagaactgtttccagaaaggatatacgctgattctgggcaacgcctggaacaacctggaaaaacagcgcgcgtacctctccatgatggcgcaaaaacgcgtggatggcctgctggtcatgtgttccgaataccctgagtccctgctctctatgcttgaagagtatcgccatatcccgatggtggtgatggactggggcgaagccaaagcggactttaccgatacggtcattgataacgcctttgcaggcggctatatggccggtcgttatctggttgaacgcggccaccgtgaaattggcgtgatccccggcccgatggaacgcaacaccggcgcaggtcgtctggctggctttatgaaagcgatggaagaagcgctgataaacgtgccggaaaactggatcgttcagggtgatttcgagccggaatcaggctaccgcgcgatgcagcaaatgatctcccagtctcaccgcccgacggccgtattctgcggtggcgacattatggcgatgggcgcattgtgcgccgctgacgagatggggctgcgcgtaccgcaggatatctcggtcatcggctacgacaacgtgcgcaacgcgcgttactttacgcctgcgctgacgacgattcaccagccgaaagattctctgggtgaaacggccttcaatatgctgcttgaccgtatcgtcaataaacgcgaagagtcgcagtccattgaggtgcatccgcgtctgattgagcgtcgctctgtcgccgatggcccgttccgcgactatcgccgttaa

SEQ ID NO: 78099 - DNA, 1167 bp, Citrobacter koseri
atgaaaataaattatcccttactggcgctggcaattggcgcatttggtattggaaccaccgagttctctccgatgggcttgttgcccgttatcgctcgcggcgtggatgtctcgattcctgcggccggaatgctaatcagcgcgtatgccgttggtgtgatggtcggcgcgccgttgatgacgctgctgctttcccatcgcgcacgtcgtaatgcgcttatttttttgatggcgatttttaccctcggaaatgtgctgtcggccatctcgccggattacactacgttgatgctgtcgcggattctgaccagcctgaatcacggcgctttcttcggtctggggtcggtggtggcggccagcgtcgtccccaaacataaacaggccagcgcggtcgccaccatgtttatggggctgacaatcgccaatattggcggtgttcctgcggcgacctggctgggggaaaccattggctggcgtatgtccttcatggcgacggcggggctgggcgtaatttcaatgattagcctctttttctcgttgccgaaaggcggggcgggagagcgccctgaggtgcgcaaagagctggcggtgctgttgcgaccacaggtgttatcggcattactgaccaccgttctgggcgcaggcgcgatgtttacactctatacctatatcgccccagtgctgcacagcattacgcatgcaacgcctgctttcgttaccggtatgctggtactgattggcgttggcttttctatcggcaactatctggggggaaaactggcggatcgttcggttaacggcaccctgaaaggatttttgctgctgctgatggtgattatgctggcgatcccgttcctggcgcgcaacgaagtgggcgccgctatcagcatggtggtatggggggcggcgacattcgcggtggttccgcctttacaaatgcgcgttatgtgggttgccagcgaagcgccaggcctctcttcatcggtcaatatcggtgcctttaatctcggtaatgcgcttggcgcagcggcggggggcgcagtgatttccggtggtttgggctacagcttcgtaccggtgatgggggcgattgtggcagggcttgcgctgttgctggtctttgtctctgcgcgcagacagcctgaagacgtttgcgtggcgaactaa

SEQ ID NO: 78100 - DNA, 582 bp, Citrobacter koseri
atgtcgtttgaattacctgcattaccgtatgccaaagatgctcttgcaccgcacatttctgctgagacgctggaatatcattacggcaaacatcatcagacctatgtgaccaaccttaacaacctgatcaaaggcacgccgtttgaggggaaatcactagaagagatcgttcgcagcgctgaaggcggcgtcttcaataacgcggcccaggtctggaaccacaccttctactggaactgcctggcaccagatgctggcggcgaaccaacgggtaaactggctgacgccattgtcgcgtccttcggcagctttgccgatttcaaagcgcagttcaccgacgccgcaattaagaacttcggttccggctggacctggctggttaaagggacggatgggaaactggctatcgtctctacgtcgaatgccggtacgccgctgaccaccgacgccacgccgttgatgaccgtggatgtgtgggaacatgcctactatatcgactaccgcaatgcccgtcctggctacctggagcacttctgggcgctggtaaactgggagtttgtggcgaaaaacttcgcggcataa

SEQ ID NO: 78101 - DNA, 822 bp, Citrobacter koseri
gtggcgcggataaaccggatctcgatcacgctctgtgctttgctttttaccacgctcccttttacgtcaatggcgcatgcctcccggcaagccagggcgacgcctgccgcgcatgtcacgaaaacggcagataagcagaagaacaccgcgaccagcaagaaaaaaacgaagactgcaaaaaaagccgtgagtaaaacccaaagtaaaacggcctccacatcgaaaaaacgtattgcctcccctgcgaaaaccaccaaaaccagcaaaaccgcaagccgtcgtagcaaacccgccaccacacaaaccgccgccgtaacctggacggaaaaatgtacgccgcgcaagggtcgtaagccgcattgtgtcaaagtaaaaggcgccccgcttgccattgccgatgcgcataaagcgaaaatgcagaaagccaccaacacggcgatgaataaattaatgaatcagattggcaaaccgtatcgttggggcggaacgtctccacgaaccggttttgattgcagcggtctggtttattacgcgtataaggatctggtgaaattccgcatcccgcgtactgcaaatgaaatgtatcatttgcgcgatgccgcgccgattgaacgtggcgaactgaaaaatggcgatctcgtgttcttccgtacccagggtcgcggtaccgccgatcacgttggcgtttacgttggcaacggcaaatttattcagtctccgcgcagcggtcaggaaatacagattacctctcttagcgaagattactggcagcgccattacgtgggcgcacgccgggtcatgacgccgaaaaccattcgataa

SEQ ID NO: 78102 - DNA, 348 bp, Citrobacter koseri
atgagcaccactatcgaaaaaatccagcgccagatcgctgaaaacccgattctcctgtacatgaaaggctctccaaaactgccaagctgcggtttttccgcacaggctgttcaggcgctttctgcctgtggtgaacgttttgcctatgtcgatattctgcaaaacccggacatccgcgccgagctgccgaaatatgcaaactggccgaccttcccgcaactgtgggtggacggtgagctggttggcggctgcgatatcttaattgaaatgtaccagcgcggtgagttgcagcagttgatcaaagagactgcggcaaaatacaaaaccgaagagcctgacgctgagtaa

SEQ ID NO: 78103 - DNA, 648 bp, Citrobacter koseri
atgtccgataacgctcaactttccggtctgtgcgaccgttttcgtggtttttatcctgtcgtcattgatgtcgaaacggcgggattcaatgccaaaaccgatgcgctgcttgaggttgccgccatcacgctgaaaatggatgaacaaggctggctgatgccggacacgacgctgcatttccatgttgagccgttcgaaggcgcaaacttacagcccgaagcgcttgcctttaacggaatcgatccttctaacccgctgcgcggcgcggtcagcgagtacgatgcgctgcatgctattttcaaaatggtgcgcaagggaattaaagacagcggttgcaatcgtgcgatcatggtcgcccataacgccacgttcgatcacagttttatgatggccgccgctgagcgcgcttcgctgaaacgtaaccccttccaccccttcgtgacctttgacactgcggccctgagcggcctggcgctgggacagaccgtactgtcaaaagcgtgtctggcggcaggaatggagtttgatggaacgcaggcgcactctgcgttatacgacaccgaacgaacggccgttctgttttgcgaaatcgttaaccgctggaagcgtcttggcggctggccgttgccagtaccagaagaggcataa

SEQ ID NO: 78104 - DNA, 408 bp, Citrobacter koseri
atgcgtttacttcataccatgctgcgtgttggcgacttgcagcgttccatcgaattctacaccaacgtactgggcatgaagctgctgcgcaccagcgaaaacccggaatacaaatactctctggcattcgtgggttacggcccggaaagcgaagaagcggtgatcgagttaacttacaactggggtgttgataagtacgagctgggcacggcctatggccatatcgccctgagcgtcgataatgctgccgaagcctgcgagcgcattcgccagaacggcggtaacgtcacgcgtgaagcgggtccggtaaaaggtggctccaccgtcatcgcgtttgttgaagatcctgatggctacaaaattgaactgattgaagccaaagacgccggtcgcggtctgggcaactaa

SEQ ID NO: 78105 - DNA, 1098 bp, Citrobacter koseri
atgtcatctgagaaactgtttaccccgctgaaagtgggcgcaattacggcagcaaaccgtgtgttcatggcccctctgacgcgtttgcgcagcattgaaccgggcgacattcccaccccgttaatggccgagtattatcgtcaacgcgccagcgccgggctaatcatcagtgaagcgacgcagatctccgcacaggcgaaaggctatgcgggcgcgccgggtctgcacagcgcggagcagatcgaggcatggaaaaaaattaccgctggcgttcatgccgaacaggggcacattgctgttcaactctggcataccggtcgaatctctcattccagcctgcaacccggtggccagcctcctgtctccgcgtctgcgatcggcgctggcacccgtacctcgctgcgcgatgaaaacggccaggccattcgtgtcgacacctcaataccgcgcgcgctggaaaccgacgagatcccaggcatcgtcaacgatttccgtcaggctatcgccaatgcgcgtgaagccggtttcgacctggtagaactgcattccgcccacggctatctgctgcaccagttcctttccccgacgtcaaaccatcgtactgaccagtacggcggcagcgttgagaaccgcgcgcgtctggtgctggaagtcgtcgatgccggtattcaggaatggggggcagatcgaattggtatccgtgtttcccctatcggcacattccagaatgtcgacaatggcccgaatgaagaagccgatgcgctctatctgattgaggaactgggtaaacgcggcattgcctatctgcacatgtccgaacctgactgggctggcggcgaaccgtatactgacgccttccgtgagaaagttcgcgcccgcttccacggcccaatcattggcgcaggcgcctatacgccggaaaaagcggaagacctgctcaataagggcctgatcgacgccgtcgcgtttggccgggcgtatatcgctaacccggacctggtagctcgtctgcaacgcaaagcagaactgaatccacaacgcgcagaaagcttctacggcggcggcgcggaaggttacacggactatcctaccctgtaa

SEQ ID NO: 78106 - DNA, 600 bp, Citrobacter koseri
atgaacaaacagactgaacatgatacccgcgaacatcttctggctaccggcgagcagctttgtatgcagcgtggcttcaccggaatgggattgagcgagctgctcaaaaccgccgaagtgccgaaggggtcgttttatcactattttcgttccaaagaagcgtttggcgtcgccatgctggaacggcattacgccggatatcatcagcggctggcaacgcattttgacgccggtgcgggcaactaccgtgaccgcattctggcttactatcaggaaaccctgaatcagttttgccagcaaggcactatcagcggctgtttgaccgtaaagctgtccgccgaagtatgcgatctctcagaagatatgcgcactgcgatggacaaaggcgcgcggcatattattacgctgttagcgcaagcgctggaaaaaggacgcgaagctcgctgtctctcttttgctggcgagccgctgcaacaggcgcagatcctgtatgcgctgtggttaggcgcgaatctgcacgccaaaatttctcgcagtgccgccccgcttgaaagcgcgctggcacatgtaaaaacgattatcgcaacgcctgcggcttaa

SEQ ID NO: 78107 - DNA, 240 bp, Citrobacter koseri
gtggccgagcagttagagttttttcccgtcccaagcccgtgccgggggatctgtcagtcggatgagcgcggattttgtcgcggctgtctgcgcagtcgggatgagcgtttcaactggcaaaaaatgagcgacgccgagaagcagaacgtgttgcggctttgtcgtcagcgtcttatgcgcaaattacgcgcaaacaaaccgaacccgcaggaagaacctcaacaaccctcactcttttga

SEQ ID NO: 78108 - DNA, 897 bp, Citrobacter koseri
atggttcagcgtatcactattgccccgcaaggcccggaattttcgcgcttcgtgatgggttactggcgtctgatggactggaatatgtctgcgcgtcagctggtcagctttattgaagagcatcttgatctgggcgtcacgaccgttgaccatgcggatatctacggcggttatcaatgtgaggccgcgtttggcgaagcgttgaaactggcgccgcacctgcgtgagcggatgcagatcgtaacgaagtgtggtatcgccacgaccgcccgggctgaaaatgtactcggccattacatcactgaccgcgaccacattgttgccagcgctgaacagtccctgaaaaatctggcgaccgaccgtcttgatctgctgctcatccatcgtcccgacccgctaatggatgcggacgacgtcgcggaagcattccagcatctccaccagagcggaaaagtgcgccactttggcgtctctaactttaccccggcccagtttacgctgctgcaatcgcgtctgccgtttacccttgccacgaaccaggttgagatttcaccggttcatcagccactgctactggacggcacgctggatcagctacagcaactgcgtattcgaccgatggcgtggtcctgtcttggcggcggtcgtctgtttaatgatgatgaattcgcgccgctgcgcaacgaacttgctgcgattgcggaagagctgaacgcgaccacgattgagcaggtggtatatgcgtggattttacgcctgccgtctcagccgttgccgattatcggctccggtaaaattgagcgcgtacgcgcagcgattgaggcagagtctctgacgatgtcgcgtcagcaatggttccgtatccgcaaggcggcgctaggttacgacgtgccgtaa

SEQ ID NO: 78109 - DNA, 522 bp, Citrobacter koseri
atgaagcgtttgagtctggcaatgttaaccctgctggcctgtgcgggtgcacaggccgccagtgaagaagtgacgatgaatctggtgacttcgcaaggcgtcgggcagtcgattggcagcgtaaccattgccgaaacggataaagggctggagtttactcccgatctgaaagcgctgccgccgggtgagcatggttttcatatccatgctaacggcagttgccagcctgcgattaaagagggtaaagcctcggcggcagaagcggcgggcgggcatttcgacccgcacaataccgggaagcacgaggggccggaaggcgccgggcatatgggcgatcttcccgtgctggtggtcaataatgacgggatagccaccacgcctgttactgcgccgcgcctgaaatctcttgatgaaatcaaagataaagcgctgatgatccacgtcggcggcgataacatgtccgatcagccgaaaccgcttggcggtggtggcgagcgttacgcctgcggcgtcatcaaatag

SEQ ID NO: 78110 - DNA, 2016 bp, Citrobacter koseri
atgaagctccctcacctgacctggcgcgatacgccctggttcaaggcaacctctgggcaatggcgctatgcattgcgcaataccctcgccatgtgcctggcgctgacgttcgcctactacatcaatctggatgagccatactgggcgatgacctctgccgccgtggtaagttttccgacggtaggcggcgtgatcagtaaaagtctggggcgtattgccgggagtttacttggcgccaccgccgcgctcatcatcgctggtcatacgctaaacgaaccctggctctttttattaagcatggcggcctggattggcttttgcacctgggcctgcgcccatttcaccaataacgtcgcctatgccttccagctggcgggttacacggccgccatcatcgcctttcccatggtcaacattatcgaggtcacacagttgtgggatatcgcccaggccagggtctgcgaggtgatcgttggtattctttgcggcggcatgatgatgatgatcctgcccagcacctctgacggcacggcgctgttgaccgcgctgaaaaatatgcacgcacggttgctggagcacgccagcctgctctggcagccggaaaccaccgatgcgatacgttccgcccatgaaggggttatcggccaaattctgacgatgaacctgctgcgcattcaggcattctggagtcactaccgttttcgtcgccagaacgcgctgcttaacgctctgctacatcagcagcttcgcctgaccagcgtcatttccagcctccgcaggatgttgctgaactggcccaacccgccggagcagacccgcgatgtgattgaacaactgctggccgcgctggctaatccgcgtaccgacagttataccgtcgcgcgcattattgccccgctacatccgaaaaaccgacaggattaccgccacgtcgccttctggcagcgattgcgctatttctgccagctctacttacacagcagccatcagctacggttgctggaaaacggcgccgcagtcgatgagatcaaagtaacgcgcagccccggtctggcccgccatacggacaacgccgaagcgatatggagcggattgcgcacatttaccaccctcatggtgattggcgcgtggagtatcggttcacaatgggaatccggttcaggggcgttaacgctggcggccatcagttgcgtgctctattccgccgtcgccacgccgtttaaatcactctctttattgatgcgcacgctgattctgctctcgttgttcagcttcgtcgtcaaattcggcttgatggtgcagataaccgatctctggcagtttttgctgtttctgtttcctttgctggccacgatgcaactgctgaagctacaaatgccgaaactcgccgggctttgggggcagttgatcgtttttatgggatcgtttatcgccgtcaccaatccccccgtgtatgactttgctgattttcttaatgacaatacggctaaaattgccggggtcgcgctgtcgtggctggcgtttgcgatcctgcgtccgggttcggatgcccgcaaaagccgtcgccatatccgcgcattgcgcagagattttgtcgatcagctcagtcgtcatccatcacacagcgagaatgagtttgaatcgctgacctatcatcacgtcagtcaactcagcaatagccaggatgcgctggcgcgacgctggctgttacgctggggagtagtactgctgaattgttcacatgtggtgtggcaactgcgtgcctgggaaacccgctccgacccgctttcgcgcgtccgggatatctgtattgccttgttgcgcgacgtgatgagcgagcgcggcgtacagcaacgaccgctggcggccacgctccaggagctacagcgtatttgcaacacgctgtcgcatcatcatcaacctgcggctcaggaactggcggcgctcatctggcgattacactgctcgctgtcgcagcttgagcaagcgccgccgcagggttcactgacgtcctga

SEQ ID NO: 78111 - DNA, 861 bp, Citrobacter koseri
atgtcgcttaaaacaatgaaatacttttcaacgattgtggttgcggccatcgcggttctggccggttggtggctatggaattactacatgcagtctccgtggacgcgcgacggtaaagtacgggcggaacaggtgagcattacgcctcaggtctccggcagcatcaccgaactcaatataaaagataaccagttcgtgaatgcaggcgatctgctcttttctatcgataagaccccttttcacatcgctgagcttaatgcgcaggcagaactggctaaagcccgctccgatttagcgaaagccaataatgaagccaaccggcgtcgccatttatcacaaaattacatctctgtcgaagatatggacaccgcaaacctgaacgttaaagcgatgcaggccagcgtcgaagcggcggaagcgtcattaaaacaggcgcaatggcaattagcccagaccgacgttcgcgcgccggtcgcgggctgggtgacaaacctctcaacgcgcacgggggattacgccgccaccggccaaccgctgtttgcgctggtcgacagccactcgttctacgtcatgggatatttcgaagagacgaaactgcgccatattcgcgaaggcgctccggcgcagatcaccctctacagcggcaatgtgaagttacagggtcacgttgccagtattggccgggcgatttatgatcaaagcgtggagagcgattccggcctggtccctgacattaaacctaacgttccctgggttcgtctggcacagcgcgtgccggtgcgtatcgaatttgatgcgttacctcatgatgtcacgctggtttcgggcacaacatgcagcgtggctatcggtcagcgctaa

SEQ ID NO: 78112 - DNA, 237 bp, Citrobacter koseri; identical to SEQ ID NO: 73145

SEQ ID NO: 78113 - DNA, 435 bp, Citrobacter koseri
ttggaatcgccactaggttctgatctggcacggttggtgcgcatttggcgtgctctgattgaccatcgcctgaaacctctggagttgacgcagacacactgggtaacgctgcataatattcaccaacttccgccggatcagtcgcaaatacagttagccaaagcgatcggcattgaacaaccgtctctggtgcgtacgctggatcagcttgaagacaaagggcttatctcacgacaaacctgcgccagcgatcgtcgcgccaagcgaattaagctgacggagaaggcggaaccgctcatcacagagatggaagccgtgatcaataaaacgcgtggagagattctggaagggatttcgccgcaggaacttgagctgttaattaagctgattgcgaaacttgagcacaatattattgagttgcagtctcagaactaa

SEQ ID NO: 78114 - DNA, 468 bp, Citrobacter koseri
atgattaaacgtgtgctgatcgtttcactgatgggcttatctttagcgggttgtgtgaataacgatagcctgtccggtgatgtctataccgcgtccgaggcgaaacaagtgcagaatgtcacatacggcactgtcgttaacgttcgtccggtgcaaatccagggcggtgatgactccaacgtgatcggcgctatcggtggtgcagtgctcggtggtttcctcggtaataccatcggtggcgggacgggtcgttcactggcgacggccgctggcgcagtcgcaggtggcgtagcgggacaaggcgtccagggcgcgatgaacaaaactcagggtgtggaactggaaatccgtaaggatgacggcaacaccatcatggtggtacagaaacagggcgatacccgtttctccgcaggtcagcgtgttgttctggccagcaacggcagccaggttactgtttctccgcgctaa

SEQ ID NO: 78115 - DNA, 1122 bp, Citrobacter koseri
atgaaatcgggccgttttatcggcgttatgtctggaaccagccttgatggcgtcgatgttgtgctggcggcaattgatgaaacgatggtcgcacagcaggcgagcctgacctggcccatccccgttcatcttaaacaagccattctggatatttgccaggggcaacaactcacgctttcccagtttggccagttggatacgcagctcgggcagctttttgccgacgcggtgaacgcgctgctggcgcaggaaaaactgcggccgcgggatattgtcgccatcggctgtcatggtcagacggtctggcatgaacctaccggcgctgcaccgcataccttacaaatcggtgataacaaccaaattgtcgcgcgaaccgggataacggttgtcggtgattttcgtcgtcgcgatattgcgctgggcgggcaaggcgcgccgctggttcccgcgtttcaccaggcgctgctggcgcacccgacagagcgtcggatggtgctgaacattggcggtatcgccaacctgtctttgctcataccgggtcaaccggtaagagggtacgatacaggaccaggcaatatgctcatggatgcctggatctggcggcagtgcgctaagccttatgataaagacgcgcaatgggccagcgaagggaaagtgataattccgctgctgcaaaatatgttgagcgatccctatttttcagcgcccgcgccgaaaagcaccgggcgtgagtatttcaactatggctggatagaacgccacctttcggcctttcctggcctcgctccccgtgatattcaggcaacgctggctgagctgaccgcggtgacaatttctgaacaggttctgttaagcggcggctgcgagcggctgatggtgtgcggcggcgggagtcgtaaccctttgctgatggcgcgtctggccgggttgctgccgggtacagaagttaccagcacggatgaagccgggatcagtggcgatgatatggaagcgctggcgtttgcctggctggcgtggcgcacgctcgccgggttgccggggaacctcccttcggtgacgggggccacagaatccagcattctgggggccattttcccggcgaacccacgaactcagagttaa

SEQ ID NO: 78116 - DNA, 324 bp, Citrobacter koseri
atgaaaaaactgctcattgtatgtctgcctgtgctcctgagcggttgtagcgtctacaaccaattgcttgagcgtatgcaaacggacacgctggtatatcagtgtgatgaaaaaccgcttaccgtaaaaatgaacaatacccggcaagaggtgaattttgtttacgacaataaactgctgaacctcaaacagggcatgtctgcgtcgggagcacgttacacggacagcatctacgtcttttggtcaaaagacgatggcgcaacggtctataaacgcgacagaattgtgctgaataactgccagttacaaaacccgaagcgttga

SEQ ID NO: 78117 - DNA, 657 bp, Citrobacter koseri
atgtctgataacgacgaattgcagcaaatcgcgcatctgcgccgtgaatacaccagaggcggcctgcgtcgccacgatcttcccgctgaaccgttaacccttttcgaacgctggctgggtcaggcatgtgatgccagactggcggacccgaccgcgatggtggtcgccaccgtcgatgaaaacggccagccttatcaacgcattgtgctgcttaaacattacgatgaaaaagggatggtgttttacaccaacctgggcagccgtaaggcgcatcacctcgaaaataatccgcgtatcagtctgttgttcccgtggcatatgctggaacggcaggtgatggtgactggcaaagcggaacgcctttccacgcttgaagtggtgaaatacttccacagccgcccgcgcgacagccagattggcgcctgggtgtctaaacaatccagccgaatctctgcgcgcggcattctggaaagcaagttccttgagctgaagcagaagttccagcaaggggaagtcccgttgcccagcttctggggcggattccgcgtcaatattgaacagatggagttctggcagggcggcgaacaccgtttacacgaccgctttttataccagcgcgaaaacaacgcgtggaaaattgaccggcttgctccttaa

SEQ ID NO: 78118 - DNA, 1275 bp, Citrobacter koseri
atggcaagcagtaacttgattaaacaattgcaagagcgggggctggtggcccaggtaacggacgaggaagcgttagcagagcgactggcgcaaggcccgatcgcgctctattgcggcttcgaccctaccgctgacagcttgcatttggggcatcttgttccattgttatgcctgaaacgcttccagcaggcaggtcacaagcctgttgcgctggtaggcggcgcgaccggtctgattggcgacccgagctttaaagccgctgagcgtaaactgaacaccgaagatactgtgcaggagtgggtggataaaatccgcaagcaggttgcaccgttcctcgattttgactgtggtgacaattccgccattgccgcgaataactacgactggtttggcggcatgaatgtgctgaccttcctgcgcgacatcggcaagcacttctccgtcaatcagatgatcaacaaagaagcggtgaagcaacgtctgaaccgtgacgatcagggcatctcctttaccgagttctcctataacctgttgcagggttatgactttgcctgcctgaataaactgcacggcgttacgctgcaaatcggcggctctgaccagtggggcaacatcacctccggtatcgatctgacccgtcgtctgcatcagaaccaggtgttcggcctgaccgtaccgctgatcaccaaagcggatggcaccaagttcggtaaaaccgaaggcggcgcggtatggctggacccgaaaaagaccagtccgtacaagttctaccagttctggatcaacaccgcagatgctgacgtgtaccgcttcctgaaattcttcaccttcatggacattgccgagatcaatgcgctggaagaagaagataagaacagcggtaaagcgccgcgtgcccagtatgtgctggcagagcaggtcacgcgcctggtgcatggcgaagaaggtctggttgcggcgaaacgtatcactgaaagcctgttcaacggtaatctgagcgatctcagcgaagccgatttcgaacaactggctcaggatggcgtgccgatgatcgagatggaaaaaggcgccgatctgatgcaggcgctggtggattccgaactgcaaccgtctcgtggtcaggcacgtaaaaccatcgcctctaatgcggtgaccatcaacggtgaaaaacagtcagacccggaatatttcttccaggacagcgacattttattcgggcgctacacgctgttgcgccgtggtaaaaagaattactgtctgatttgctggaaataa

SEQ ID NO: 78119 - DNA, 861 bp, Citrobacter koseri
atgaagaatatcctcgccatccagtcgcatgttgtgttcggccatgcgggcaacagtgctgctgaatttccgatgcgccgtcttggcgcaaatgtctggccgctgaataccgttcagttttctaaccacacgcagtatggcaagtgggcagggtgtgttatgccgcccgaacatttgactgaaattgttcagggtattgcggatattgataaacttcagacgtgcgatgcggttcttagcggctatctgggttccgcagagcagggtgagcatattctggggattgtccgtaaagtaaaagcggcgaatccacaggcgaaatatttctgcgatccggttatgggtcatcctgaaaaagggtgcatcgtggcgcctggcgtcgctgagttccacgttcgccatgcgctcccggccagcgacattatcgcgcccaatctggtggagctggaaattctctgtgaacatgcggtcaataatgttaatgaagctgtactggctgccagggagctgattgctgaagggccgcaagtcgtgctggttaaacatctcgcccgggcaggatacagccccgaccgctttgagatgttgctggtgacggcggatgaagcctggcatattagccgtccgcttgttgatttcgggatgcgtcagccggtgggtgtcggggatgtgaccagcggtttgttgctggtaaaactgttgcagggcgcaacgttgcagcaagcgcttgaacacgttactgcggcggtatatgaaattatgatcgccacgaaaaatatgcaggaatacgagttgcaggtggtggccgcgcaggatcgcattgctaaacctgaacactatttcagcgcgacgcagctgtga

SEQ ID NO: 78120 - DNA, 606 bp, Citrobacter koseri
atgaaactgttctacaaaccgggcgcctgttctcttgcttctcacatcaccctgcgggaaagcggtattgatttcacgctggatggcgttgatctggcgaaaaagcgtctggaaaacggcgatgattatttcgcggtaaacccaaaaggacaggttccggctctgctgctggacgatggcaccttactgaccgaaggcgttgcgattatgcaatatctggcagatagcgtgcccgatcgtcagctgttggcaccgacaggcaccatctcccgctacaaaacgctggaatggctcaactatattgccacggagctacacaaaggttttacgccactcttccgcccggatacgccagaggaatataaaccgattgtccgtgcgcagctggagaaaaaattgcgctacgtgaatgacgcgctccaggaaggccagtgtctttgcggccagcgtttcacgatcgcagatgcctacctttttaccgtgttgcgttgggcgaaagcggtgaagctgaatatggaaggattaagccatatcgacgtttatatggcgcgggtcgctgaacgcccctgcgtggcggcggcgctgaaggcggaaggtttgaactaa

SEQ ID NO: 78121 - DNA, 1506 bp, Citrobacter koseri
gtgtctactgcaaacaataaaccaactgaaagcgtcagtttgaacgctttcaaacaaccgaaatcgttctatctcattttctctattgagttatgggagcgttttggttattacggcctgcaaggaattatggccgtctacctggttaaacaactgggtatgtcagaagcggattccatcacccttttctcttcctttagcgccctggtgtatggtctggtcgccattggcggctggttaggggataaagttctgggcaccaaacgcgtcattctgctgggtgctatcgtactggcgattggttatggcctggtcgcctggtccggtcatgacgttgcgatcgtctatatgggtatggcgaccatcgccgtaggtaacggtctgttcaaagcgaacccgtcttctctgctgtcgacctgctatgccaaagatgacccgcgtctggacggtgcattcaccatgtactacatgtccatcaacatcggttccttcttctctatgctggcgacgccgtggcttgccgcaaaattcggctggagcgtggcgtttgccctgagcttcgtcggtatgctcatcacggtggttaacttcctgttctgccgcagttgggttaaagattacggctcaaaaccagacttcgaagcggtacatttcggtaaattgctggcgactatcgcaggcgttatcgtgctgatcgctatcgcgacctggctgctgcacaaccagggcattgcacgtatggttctgggcgtgatcgctctgggtatcgtgattatctttggtaaagaagcgttcgcgatgcagggcgcggcacgtcgtaaaatgatcgtcgcattcatcctgatgctggaagcgattatcttctttgtgctgtacagccagatgccgacgtcactgaacttcttcgcaatccgtaacgttgaacacactatcctcggtatcgcggttgaaccggagcagtatcaggcgctgaacccgttctggatcatcattggtagcccgattctggcggccatctataacaagatgggtgatacgctgccgatgccgaccaaattcgctatcggtatggttctgtgctctggcgcgttcctcgttctgccgctgggcgcgaaattcgctacagatgcaggcattgtgtctgttaactggctcatcctcagctacggtctgcaaagtatcggtgaactgatgatctccggtctgggtctggcaatggttgcccagctggttccgcagcgtctgatgggcttcatcatgggtagctggttcctgactacggcgggcgccaacctgattggtggctacgtggctggcatgatggcggtgccggaaaacgttaccgatccgctgatgtctctggaagtttacggtcgcgtattcctgcaaatcggtgtcgccactgcggttatcgccgcgctgatgcttatcaccgcgccgaaactgaatcgtatgactcaggatgatgaagaaaacgcgaaggccgccaaaaccgctaccgcgtaa

SEQ ID NO: 78122 - DNA, 636 bp, Citrobacter koseri
atgaacaaaacaaaacgactggaaatattaacgcgcctgcgtgacaacaatccgcaccccacaacggagttaaatttcacctcgccgtttgagctactcatcgccgtattgctgtcagcccaggccacggacgtcagcgtgaataaagcgaccgcaaagctttatcccgtcgccaataccccggcggctatgctggagcttggcgtcgagggcgtaaagtcgtatatcaagactatcggcctgttcaacagcaaagcggagaatgtgattaagacctgccggatgttgcttgaactgcacaatggcgaggttccagagaatcgggcggctctggaagcgctgcccggcgtcggacgtaaaacagccaacgtggtgctcaataccgcatttggctggccaactatcgccgtcgatacgcatattttccgcgtctgtaaccggacacagttcgcccccggtaaaaatgtcgagcaggtggaagaaaaactgctcaaggtcgttccagcggaatttaaagtcgattgccaccactggttaattctgcatggccgctacacctgcattgcccgtaaaccacgctgcggctcctgcattattgaagatctttgcgaatacaaagagaaagtcgatatctga

SEQ ID NO: 78123 - DNA, 693 bp, Citrobacter koseri
atgagcgaaattaaagacgttatcgttcagggcttgtggaaaaacaactcagcgcttgtacagctgcttggcatgtgcccgctactggcagtgacctccaccgccacgaacgcattaggcctcggcctcgccaccacgctggtgttgacgctgaccaacctgacaatttccgccctgcgccgctggacgccagcggaaatccgcatcccaatctacgtaatgatcatcgcgtccgtggtcagtgcagtacagatgctgatcaacgcttatgccttcggcttgtatcagtcgctgggtatcttcattccgctgattgtaaccaactgcatcgttgtggggcgcgcagaggcttttgccgcgaaaaaaggcccggcgctgtccgcgctggacgggttttccattggcatgggggcgaccggcgccatgtttgtcctcggctccatgcgtgaaatcatcggcaatggcacgctgtttgatggcgctgacggtctgctgggcgactgggcgaaagtgctgcgcgtggagatttttcataccgactcgcctttcctgctggcgatgctgccgcccggcgcttttattggcctggggctgatgctggccgtgaagtaccttattgacgagaaaatgaaaaaacgccgcgccgaagccgttgccgctgagcttccgtcaggtgaaacagggaatgtgtaa

SEQ ID NO: 78124 - DNA, 621 bp, Citrobacter koseri
atgctgaaaacgattcgtaaacacggtatcacgctggcgctgtttgccgcaggctcgacgggactgacggcggccattaacctggtcactaaatcgacgattgccgaacaagcggttctccagcaaaaagcgttatttgatcaggttctgcctgccgatcgctacaataataccttgcaggacagctgctttctggtgaatgctccggcgctgggcaaaggtacacaccgcatctatatcgcccgtcaggacgataagcccgtcgccgccattcttgaagccacggcgccggacggctattctggcgccatacagctcctggttggcgctgatttcagcggcacggtgctgggtacacgcgtgacagaacatcatgagacgcctggcctgggcgataaaattgagctgcgcttatccgactggatcacccacttcagcgggaagaccatcggcgctgagaacgatgctcactgggcagtgaaaaaagacggcggtgattttgaccagtttaccggcgcaaccattaccccccgggcagtggtcaacgcggtgaaacgtgcgggtctgtacgcgcagaccttaccggcgcaacttcctcaacttaccgcctgtggagaataa

SEQ ID NO: 78125 - DNA, 1053 bp, Citrobacter koseri
atggtattcagaatcgcaagctcgccttatacccataaccagcgccagacatcgcgtatcatgatgctggtgttaatcgccgcgctgccggggattgccactcagctatggtttttcggttggggcacattgttccagattatactggccgcagtcagcgcgctggccgcagaagccgccgtgcttcaactgcgtaaacagccaatcgccgctatcttaaaagacaattcagcattgctgaccggtttgctgctcgctgtgagcataccgcctctcgccccgtggtggatggtagtattgggcaccgtatttgccgtcattatcgccaagcagctttacggcggtctggggcaaaacccattcaacccagcgatgattggttatgtcgttctgttgatttcattcccggtacagatgacaagctggctcccgccgcatgacatcgccgcaacggcgccaggccctctggatgcgttgcaggtcatcttcaccggacacaccgccagcggcggcgacatgaatacgttacgcatgggcattgacggcatcagccaggctacgccgctcgatacgttcaaaaccgcgttacatgccgggcacgccgttgaacagattatgcagtaccccatctacagcggcatgctggccggtgcgggctggcagtgggtaaacatcgcctggcttattggcggcgtgtggctgctctggcaaaaagcgatccgctggcacattccggtcagctttttagtgacgctggctgtctgctccactctgggatgggcattcgccggggattcactggcgtctccgcagttgcatctgctctctggcgcgacaatgctgggcgcgttctttattctgaccgatcctgtcaccgcctcgacaaccaatcgtggtcgtctgatttttggcgcgctggcgggtttgttagtgtggttgattcgcagtttcgggggatacccggacggtgtggcgttcgccgtactgttggcgaatatcacggtgcctttgattgattactacacccgacctcgcgtctacgggcatcgctaa

SEQ ID NO: 78126 - DNA, 1932 bp, Citrobacter koseri
atgcttaagttattctctgcattcagaaaagataaaatctgggatttcgatggcggcattcatccgccggaaatgaaaacccagtcaaacggtacgcctctgcgacaggttccactggcgccgcgctttatcattcctcttaagcagcatattggcgctgagggcgagctgtgcgttaacgtgggcgatcgcgtcctgcgaggccagccgctgacccgtggtcgcggccgcatgctgcctgtccatgcgccgacgtccgggaaagttatcgcgattacgccccactctaccgcgcacccgtcggccctggctgagcttagcgtgatgattgatgccgatggcgaagatcgctggatcgaacgcgacggctgggcggattatcagcgccgcagccgcgaagagctaattacccgaattcaccagttcggcgttgccgggctcggcggcgcggggttcccgaccggcgtcaaattacagggcggcggcgataagattgaaacgctgatcatcaatgcggcggagtgtgaaccctatatcaccgctgatgaccgcttaatgcaggattgcgccgcgcaggtggtggaaggcatccgtatcctcgcccatattctgcaaccgcgtgaggtcctgataggtatcgaagataacaagccgcaggccatttcaatgctgcgtgccgttctggccgatgcgcatgatatcgcgttacgcgttatcccaacgaaatatccttccggcggcgcaaaacaacttacccagctcctgaccgggaaacaggttccgcacggcggccgctcttctgatatcggcgtgctgatgcaaaacgttggtacggcttatgccgtcaaacgcgcagtgattgacggggaaccgatcaccgagcgcgttgtgaccttgaccggagagtccgtcagccgtcccggtaacgtctgggccaggctggggacgcctgtcagccacctgcttaatgatgcgggcttctgttcttcagccgatcaaatggtgattatgggcggcccgctgatgggctttaccctgccctggcttgatgttcccgttgtgaagatcactaactgccttctcgcgccttccgctacggaaatgggcgaaacgccggaagagcaaggttgtatccgctgtagcgcctgtgccgatgcctgtcccgccgatttgttgccccagcagttgtactggttcagcaaaggccaacagcacgataaagccaccgcgcataacattgccgactgcattgagtgcggtgcttgcgcctgggtatgccccagcagcattccgcttgtgcagtatttccgtcaggaaaaagcggagatttacgcgatcgcgcaagaagaaaaacgcgcggctgaagcgaaagcgcgttttgaggccagacaggcgcgactggagcgtgagaaagccgcacgccttgagcgccataaaaatgcggctgcacaacctgcggcaaaagatcaggatgccatcgccgcagcgctggcgcgcgtaaaagagaaacaggcacaggcgactcagcctgttgtcatcaacgcgggagagaagccggataacagcgcggttattgctgcccgtgaagcgcgtaaagcacaggcgcgcgccagacagacggagaacataccggccgctgcggaacccgccgagccggtcgacccgcgcaaagccgctgtcgaagcggcaatcacccgcgccaaagcgcgtaagcaggaacagcaggccgctgcggaacctaccgaaccggtcgacccgcgcaaagccgccgtcgaagcggcaattgcccgcgccaaagcgcgtaagcaggaacagcaggccgctgcggaacccgccgaaccagtcgacccgcgcaaagccgccgtcgcagcggcgattgcccgcgttcaggcaaaaaaagcagcacagcagcaggttgttaacgaggaataa

SEQ ID NO: 78127 - DNA, 579 bp, Citrobacter koseri
atgaatgctatctggattgccgtagtcgctgtgagcctgctgggcctggcattcggcgccatcctggggtatgcctcccgccggtttgccgtggaagacgaccccgttgtcgagaaaatcgacgaaattttaccgcagagccagtgtgggcagtgcggctatcctggctgccgcccttatgctgaagccatcggtagtcagggtgaaaaaattaaccgctgtgcgccgggcggcgaagcggtgatgttgaaaatcgcaacgttactgaacgtcgatccgcaacctatcgatggtgatgaacaagaagttgcgccagtgcgtatgctggcggtcatcgatgaaaacaattgcatcggctgcactaaatgtattcaggcatgcccggtggatgccattgtgggcgccacgcgcgcgatgcatacggtcatgagcgatctctgcactggctgtaatctgtgcgttgacccgtgcccgacgcaatgcattgaattacgcccggtagcggaaacacctgacagttggaagtgggatttgaacaccatccccgttcgtatcattcccgtggaacaacatgcttaa

SEQ ID NO: 78128 - DNA, 582 bp, Citrobacter koseri
atgactgattacctgctgctctttgtcggaactgtgctggtcaataactttgtactggtcaagtttctgggtctttgcccgtttatgggggtttccaaaaagctggaaaccgcaatgggtatggggctcgccaccacgtttgtgatgacgctggcgtctatctgcgcctggctgattgacacctggattttgattccgctcgatctcatctacctgcgaacgctggcgtttattctggtcatcgcggtggtagtgcaatttactgagatggtggtgcgtaaaaccagtccggcattgtaccgtctgctggggatcttcctgccgctcatcaccaccaactgcgcggtgcttggcgtggcgctgttgaacattaacctcggtcataattttttgcagtcggcgttgtacggtttttccgccgccgtcggcttctctctggtgatggtgctgttcgcggcgattcgcgagcgcctcgccgtggcagacgtccctgccccttttcgcggtaacgcgattgcgctgattaccgcaggtttaatgtctctggcctttatgggctttagtggtttggtgaagttgtaa

SEQ ID NO: 78129 - DNA, 441 bp, Citrobacter koseri
atgaccacaacaccggcacaacgcatcgggggctggttgcttggcccactggcctggctgttagtcgcgttactgagcgcctcgctcgcgttattgctctatgctactgcgctggctacgccgcagacattccatatgctcagtgagcaaagtaccggcaacctgttgttgtggggcgtttcgtttattaccgccatcgcaatgtggtattacaccttatggttgaccatcgccttcttcaagcgccgccactgcgtgcctaaacattatattatctggctgctggtgtcggtcttgctggcaattaaagcctttgccttttcgccagtctcagacgcgtttgcggttcgccagctgttgttcccgttactggcggccgcgctgatcgtaccctatttcaaacgctcggcgcgcgttaaagcaacgtttgtgaacccgtaa

SEQ ID NO: 78130 - DNA, 216 bp, Citrobacter koseri
atgacagttcaggattatttattaaaattccgcaaaatcagttcgcttgagagcctggaaaaactgtttgatcaccttaactacaccctctctgacgatcgggagatcatcaatatgtatcgcgccgcagatcatcgtcgcgcggagctggtctcgggcggtcgtctgtatgatgtcggtcaggtgccaaaatcagtctggcattacgtacaataa

SEQ ID NO: 78131 - DNA, 1041 bp, Citrobacter koseri
atgagtgacaacatccgggtagggctaattggttatggttatgccagcaagactttccatgcgcccttaatcgtggggacgccgggtctggaactggcggcggtttccagtagtgatgaaacaaaagtgaaggcggactggccttctgtggcggttgtctcagagcctaagcatctttttaacgatccgaatatcgaccttatcgtcattcctacgcccaacgacacccattttccgctggcgaaagccgcgcttgaagcgggaaaacatgtggttgtggataaaccctttaccgtgacactgtcacaagcccgtgagctcgacgccctggcgcgcggcctgggacgcgtgctttctgtgttccataaccgccgttgggacagtgatttcctgacgctgaaaggattactggccgatggcgttctgggggaagtggcttactttgaatcccatttcgaccgtttccgcccgcaggtccgcgatcgctggcgcgaacagggcggccctggcagcggtatctggtacgatctggcgccgcatctgctggatcaggcgatcaatctgttcggtttaccggtcagcatgacggtggatctggcgcagcttcgtcctggcgcgcagtcgacggattatttccacgcgatattatcctacccgcagcgtcgggtgattctgcacggtacgatgctggcagcggcagaatcagcacgttatatcgtgcacggctcacgcggcagttacgtgaaatatggcctcgatccacaagaggaacggttgaaaaacggtgagcgactgccgcaggaagactggggttacgacatgcgtgacggcgtgctgacgcgcgtggaaggcgaagaccgtgtggaagagacctggctgacggtgccgggtaattatccggcttattatgcgggcatccgtgacgcgctgaatggcaacggtgaaaacccggttccggcgagccaggcgatccagattatggagttgattgagctggggattgaatcagcgaagcatcgctctacgctgtgcctcgcgtga

SEQ ID NO: 78132 - DNA, 123 bp, Citrobacter koseri
atgataaataatcgcttaaaaatggggacttacagcaatatcgccattttttacgatatgcgtaaagcgcctggatgcacaattcagtataaaatttcacacacagacgaaaaagcagaataa

SEQ ID NO: 78133 - DNA, 3192 bp, Citrobacter koseri
atgaaagtatcaaaattctttatcgacaggccggtttttgctggagtactgtctgcgttgttcattctggcagggattatcgccatatttcgtctaccggtatcggaatacccaccggttgtccccccatccgttatcgttcatgcccagtatcctggagccaatgccactacgattgcacagacggttgcagctccaatagaggaaactgtgaacggcgtagagaatatgctgtatatgcagtcactttcaaatgaggatggcaatctctatctgacagtgaccttcaaactgggcacagatcccgatcaggctcagcaatgggtgcagaaccgggtgtcgcaggctctgccccggttacctgaagatgtccagcgactgggtgtcacaacgaataaaagctcgccgaatatcacacttgccgttcatatgatatcgcctgatggcagatataacgataattacatcagtaattacgccatacgtaacatcaaagaccagctctcgcgtattgagggagttggccaggtatcagtatggggccccggtggttacgcgatgcgaatctggcttaatcctgatgctatggctgctcgcggactgacgacatcagatgtcgcctctgctatccgtgaacaaaacgcccagtcaccagtgggaagcattggcgcagcccctatggcagaagaaacaccgttacagttgtcagttaatgccagcggtcggcttaaaacggctgaagaatttggcaacattgtgctccatgcccgacaggataccagaacgacattattgaaggatgtcgcccgtattgaactggccgctgaaaattatgccatgcgtacttacctggataaaaagcctgcggtagcgctggccatacaggagtctccgggcgcaaatgctctggaaattgcctcacaagtaagtcgcacaatgaaagatctgaaaaaacagttccctgaaggactggattaccagatagtttataatccaaccaaatcagtcagggcgggtatagaagctgtgcttcatactctttttgaggccatactcctcgtggtactggttgtttttcttttcctccagacctggcgagcatcaatcattcctctgctggctgttcccgtttcgataaccggcacaatggcatttctgtacctttttgggttttcaatcaatgccctgagcctttttggcctcgtcctagctattggcattgtcgttgatgatgccattgttgttgttgaaaatgtagaaagaaacatagaaagaggcatgacgccatatcatgccgcctgcaaggctatgcaggaagtcagtagtcccattattgcgatcgcgctgacgctgagtgccgtatttgttccgctggcttttatgagtggcctgaccgggaggttttatcagcagtttgcagtgacaatagcagtttcaacgattatctccgctattaactcccttacgctctcaccggctctctctgccatgctgctgaagtcacgtgattcagacagcgactggcttacgcgcattatgcatcgtagttgtggacggttctttactgttttcaaccgcctgttcaacagtagtgccaggcgatatgaaaaaggtgttggcgcgcttggccagcgcaagattctgattatggtgatttatggcattctgctggcaattacgctgttactgggcaggtctgtacccggggggtttatccctgctcaggataaagaataccttatcagttttgtgcagcttccagctggcgcatcattgtccagaacagaccgggtactggaaaaaatgaatgaaatagcacgaagtgagccaggagtatcttccacatcttcttatgctggattgtctgtaaacggcaccaccacaagccctggttccggtctgacatttgtcctcctcaagccttttgagcaacggcctggcatcagcgcagatgatgttgccgcctctctgaatgccagatatcagtcacttcctggcgcagattttgcggccgttttcccggcaccacccgttatgggtctgggttccctggggggattcaaattgcagcttgaagacagaggaaatatcggttacgacggaatggccgaagtacttcgacgctttcaggcagaagcagctaaatcacctgtgctgacgccacttttttcaacataccagaataattttccacaaattaatgtcgatattgaccgtaatcgcgccaaacaacttggggtgaacatcagtgatatcaccgagacattacaatcctatcttggctcatattatataaatgatttcaatataataggtcgtgtatatcaggtaagaatgcaggccgacgcagagttcagggcgaccccggaggatatactgaaactacagacccgaaatgccgatggcaatatggtaccgctgtctgccatagcccgtattgagccgacacacggtcctgagctggttacccgttataacggttttacagcggtcgatcttagtggcgcgcctgctccaggctattcttcaagtcaggcgatggaagagattgaacgtatagcgatgaaaacacttccacccggcgtagagtatgagtggacagacctgacctaccagcaaattcttgcaggcaacagtgccgtctggattttcccactctgtgtattccttgtattcctggtgctggctgcccagtatgaaagccttacgctccctttggctgtgattatgattgttccaatgagtatcctttctgcacttaccggggtgtggctcactcatggggacaataatatctttacgcaaattggatttatcgtcctggtcgggctggcatctaaaaatgccattcttatcgttgaatttgcccgtgaacttgaactttcaggtaagtctgcctgtagcgcagtgaaggaagcatgccgtctcaggctgcgtcctattctgatgacctcactggctttcatcatgggtgtaatccccctgatgatatcgcatggcgctggcgctgagatgcgtcagtctatcgggatatcggtattttctggaatgcttggcgtcaccctttttggcttgtttatgactcccgtgttctacctgttagcccgacaaatatcagggaaaccactgcactcggccactttaccggacgcgcctgaggaacggccggtaacagaacaggcttcagactaa

SEQ ID NO: 78134 - DNA, 1092 bp, Citrobacter koseri
atgtcgagaaaaaatacaattttgttagcactagtctctcaatcagttgagggagtgttgaatttatataccattaaaaatggtgaaatatattatcatcggaggataaatgcaggtgataaagtgatgcctctggcactatctgctgatggaaatgctctttttgctcatactcgtgggctaaaaaaagagattctttactatccacgtaaatggttaatagtagaaaatgagcccctcgtgagaacagtagttgaggataactttgtttttcttgctgtgtcgccgttttctcgttttttatacgctgtgtcatatgaagcccatcgcttagttgtctttgatctggatgcgttgaagcgcggagaacccctggtggtaacaacggtggaaaatattcctcatgctcactctgtggctgtttcatcggatgaacgttttgtatatatctcgtcattatcagctggttttgtcgccacattgcaatggcaatgccagtcgctggttgttgttggacgtcaacttattgcggcagattttggccctcgccatcttagacttcatacgccttctgcgaggctatatgctattagtgaatttaagggacaaattgcaacgatgtgtgtgaatccgcaaacgggccagcttgctcttgaagagatatcttctcgaccggtggcgcttgcgggtttacaggatggtttccctcgtcctactgcaactgacactgtccagccttctgctgctttgttggcagggaggtgctgggggtctgagattcagattactcctgatgaacgcaccatacttattgccgaacgaacttccagccgcattttactctggcagcgcaatgcctcaggatgccttatctgtcgctcatggattgaaactgaaactcaaccgcgcagtatacagcttagcccttgtgggaattatctgatgagttgtggtgagaaatcgtcaatggttgcgctttataaaattgatcatttaaatggcaaacttgtattagttgatcgtgcgcccggaggcaatggagcaaactgtattgaaattattacgttgcaaagaggtgagaaaatgttgtga

SEQ ID NO: 78135 - DNA, 1446 bp, Citrobacter koseri
atggctttaacagattccccccaggacaaagcactccggcaggaacgccctgactctgggcagatttcagggctggcgctgttggttgccagcgcattttttatggagtttcttgatggaacggtgattgctactgctcttccggatatggcaaaggcgtttggtgtcacggcgatagaccttaatattggcatcagtgcctatctattaactctggcagtgctgatcccggccaacggttgggttgcggagcgtttcggcgcacgaaacgtctttactctggcgctgtgcatttttacactttcatccctgttatgcggtctgacccataacgtaactgagttcgttctgatgcgtatccttcagggaaccggcggcgcgatgatggttcctgtaggacgcctggtcgttctgcgcaccactcctaaagatcaacttatcaaggccattgccacgctaacctggccagcgttggtagcccccatcattgggccgccgctgggtggattcattactacctacgccagctggcactggatcttctttctcaacgtccctctggggctgattgctattgtattagcattgcggatgatgccaaaccaatcggctaaagatcgcagaccatttgatttcacagggtttgtcgccactggcataacgatgctgagcctggttgccgggctggaaatgttcagccagcaaaatgttagcctgttcgaagttgcagtaaccattacaattggactcgccaccctgttctggagtattcgtcatcttttgacctgtaaaacgccactgattggcctgtcatcgctctcggttccctcatttcgtattagcatgcgcggaggatttatccttcgtgcgacgattagctcagccccctttatgctgcccctgatgtttcaggttggcttcggaatgaacgcgtttgaagcaggctcaatggtgctggccgtttttgcaggcaacctggcgatgaaacccgcgacaacaccgctaattcgctattttggcttccgtaagctgcttatcggtaacggtgtcgcttgcgtattgacgctgttgctttgtgcactgctaacgcctgactcgccgcatctggtaacgctggtgctgctgttcctcggcggattaagccgttccatgcagttcactggtatcagttcgctggccttcgctgaagttccgtcccaggagatgagttcagccaatacgctgttcagtacttcacttcagctcgccagcggactgggagtgacaatgggcgcgctaagtattcgcatgggcagcatcctcagtgaggatcttggttacgccaccgttcctggaatggggtttcgcctgggatttgtcgtcatcgcgattatcactgcgctcggagtgtatgacatgacgcggcttgcgccaaatgcgggtatcaacgtctcgctgaaaaaatag

SEQ ID NO: 78136 - DNA, 318 bp, Citrobacter koseri
gtgctgggcagtctgcgtatcagagaaagcgtaagcaaaattgatgggaaaattggtaagcggcttggccatgaaaaacaatggtctctacaacacgacctcaggcgaacgctttcaacccatctgagtgatttgggcgttgagtttcatgtcgtggagcagctgttaggccatgcattacctggtgtggcgggtatttataaccgaagtaaatttatggcgaagaaactggacgatttggagctctggacaacatatctcaatagcatctcaagtgctgagtcaaaagtgatgagcctcaaacaaaaggcaggctaa

SEQ ID NO: 78137 - DNA, 378 bp, Citrobacter koseri
atgaataaaacgaatctcactgtattacctcccgaagaatcactggctgaccttgcgcattttgcctggtgtgcgctggtgggattacggctggctcagcaggacggccaggcacgttcaccgctgaccattcacacttttctggtccgctggctggcggatgtacagaaacaacgtcggtttccgcgctctgttgcgcccgacatcgacagcctgttgcgtctggggatgatgaaaggtccagcagctactctgttgcagcggctggaatacctctttgacgcctgcagcaacccggttaccactgagacagtggataacggacgtcaaagcataccggatatgtgctgggcagtctgcgtatcagagaaagcgtaa

SEQ ID NO: 78138 - DNA, 552 bp, Citrobacter koseri
atgaataactatcacaccgatgcagtagccggtagcgctgcggatccagcaaatatacgcgcatttctgcaacaggctattgatcattacccccgactggcagcattcagctttacgctggcgttgccgtaccgtgaaactcaggccgattaccgcttgctgaccctgagatttcacactgaggtctggcagcgaatgggcgaatattcgtggcaacgccggcagtcgtgtcagagttcaccgccgacactgttacgctggatatgggaggcggccagcgcaccagaatgcaaaatggtgctgttgctcaaccttgatacgctggggagagtccacgatgaaagtgttcagcaggggattagcgagatactcattgatgcatggataacagtaactggcgcaaatcgtaaagacgtaacgaatataacgccagtcatcctgaaccgtgttgcccggggagtcttcacaacgccttttaaccagcttatcgcgcagattaaggcaatgacggtacccgtcactctcgcccggactggcgttatttgcccctga

SEQ ID NO: 78139 - DNA, 141 bp, Citrobacter koseri
atgtcgcttgcctggtactgcgcgtggtatagcaatcattatcagggcatgaagtattgcgcccgctacctgaccggcatttacagcatcgaagaagctgactgccggatgcattaccgctgctacacgctccccggataa

SEQ ID NO: 78140 - DNA, 321 bp, Citrobacter koseri
atgcgcatactgaagtgttatctcgcgaacgatgcttcaggcagcttcgtcacggcggatgatgccgcgagggcgccgggcagctgtgcatcctgtggctgtgtgctgtacctgctgacgggctttggtgagaaaccttggtttgagcacgaccagcagactgtcgctgaacatgtgctgatgaactgtgcgcatctggacccgaaggtgaaggccgaagccggcacaacaaactgcacagtattatccgtgggctggatgcgccggttatgtcgcttgcctggtactgcgcgtggtatagcaatcattatcagggcatga

SEQ ID NO: 78141 - DNA, 186 bp, Citrobacter koseri
atgtggtacacggcaatctggtccggtatttcgatggctggcttcacgaagatcccggtgtcatggctgacgcgcggcaataacactgagcttgaacaagcgctgggacgggccgcttatcttgccaaacgcgaaaccaaagcgaccggtgactgtgagcgtaacttcggcagcagccggagctga

SEQ ID NO: 78142 - DNA, 1755 bp, Citrobacter koseri
atgacaacctttgtcggacgcaacgacattggcaaatcgacgatccttgaagcgctggagatcttctttaacaacagcgtggtatcgatcgaaaaaggcgatgcctgtattcacagtggacaggacaatgtggagatcacctgcgaatttatcgatctcccccgttccctcacactcgattctggcgcggaaaccacgcttcaggaagagtttctgctgacgggaaccggctcactgaaaatccgtaagatctttaactgcagtaacaaaaaaccgacagccgagatttttgtcattgcaaaccaccctgctgctgccggttttcagaatctcctggaacttaaggaaaaagaacttcaggctagggtgaaggaactgggactcgatgtttcgcttaaggggaatcccgggatgcgaaaagccatatgggcagcctcagctgatctgcaactaacggaaacactacttcccgtcagcaaagccaaagaagacacaaaacgcatctgggaccaaattgagagctggttgcccatgtttgcactcttccagagcgacagaagcagccgggattccgacgatgaagtacaaagcccgatgaaggccgctataacggctgcactggcggaagttcaggacgatattgccaggatccagttgagggtccagcaaaaggctgaagagattgcccgaaacacacatgaagcgctgaagaccattgaaccaggtctggcaagcgaacttacccctgaatttacccctcccacaccggcaaaatggcaagggctgttctccgttggtctcaacactgacggagggatcccgctgaataaacgtggcagtggcgtccgtcgtctggtgctggtgagcttttttaaggccgaagcggaacggcgtctgaaatccagcaatcgtcgcagtatcatctacgccattgaagagcccgaaacctcacagcatcccaattaccagcggatcctgattgagtcgtttaaatccctgtctctggaagcgggctgtcaggttatcctcaccacgcacagtccgggctttgctgcggagctaccaggggacagcatccgctttgtatcccgtgatgccgctaccgggcagccgaccatccaggccggtgctgatgtttttggcaccgttaccgatacgctgggcgtcacaccagacaaccgggtcagactgctgttctgcgtggaaggaccgaccgatgtcgccgcctttaaagcactcagtaaagcgctgcatacagaagacaacacccttcctgacctggagagtgatgaacgtgtggcgtttattgtactgggcggtggaacgcttaagcactgggtgaatgaaaactatcttcgggccctgaaccgcagggaaattcatatctacgaccgtgatgtgcctgcctatgctgaagcggtggatgccgtcaactcccggggtaacggatgctgggcagcacagacgctgaaacatgaagtcgaaagttatctccatcccgatgccattcacgaagcctttggggtgatgatcaccgttaccgaccatcccgtgggtggtaaagcaacgcccagggtgtttgcagaagcctattctctggctcagcgctttgacggcgtgatgaaagacaacgccgccaaagcccgcctggcagagcgggcgttccctttgatgactgctgcccgtatccatgaacgagatccggaaggtgaagtcatcggctggatgcgcaggatacgtgacatgatccagtga

SEQ ID NO: 78143 - DNA, 180 bp, Citrobacter koseri
atggtaatcttggggccctatgaacccgtcgatgattacctggtcgccataattgatgactacggtgtaccgattgaaaccgcgctcagcgatgaagaactgtgggcttgtgcagcatccggtcaggggcgtctgtaccggaagccagaaatgcacgggaatgaaaatagcgatggatga

SEQ ID NO: 78144 - DNA, 216 bp, Citrobacter koseri
atgtctgcaggcgtaaagtacgagtttcaccattttggtatcccgctgctggacggggatacctcaggcaagttcagtgccagtgccgggatgtataccaaaggtcattctggaaaattccaggtgcagtggtatcgttttagtggtgattcgcctttgcatccgttgttgaaaaccgttacgcatgtggcgtttaaggttagtagccttgcttaa

SEQ ID NO: 78145 - DNA, 219 bp, Citrobacter koseri
gtgggcgcggcatttacgattggctccgatctatgggatgcctataaagcacatgagcgggaactggaagaggtgaaatccttactggcgaaaatcattaaggagccgtttaaagatatctatgacgtgcttgatccagatgaaaaatgttcgtttttttttgcgtcacagatccaaaacctggaacaggtggtcactgagctgaccgagaaaagctag

SEQ ID NO: 78146 - DNA, 582 bp, Citrobacter koseri
atgatgtctaatatttttgattttgaagctgatgaacagcttccgactggagctaacgttgcagttaaattttctctacctgaagggcttgtacgtaatttgagcctttatgctcaatctacttcgcgttcgaagactgaaattgttcgtgaagcaattgagaacagacttcgtaatgatccttcctggtgtgctggtcttttcttttttgaaaaaaatgaagagaaaaaagatgaagaaagtgtattggaaatgctgcataaagcgcctaaaggcactttattgaaggttgttggtttgaataaagacgctcccgatagtgctaatgtcttaatttgtaacttcgttagggctcgtgggcgtcagatttcttttgatattcctgtaaactttcgccctacccctttgaatgactctcgcttcactgatctttcttctgtgaaattagttgggggacaaatggtgctgccgcaatccgatcaaaatatgggaccttttggtcttactcagcgttggatttatacaattgatgttaaatacatttgggatatagattgtacccatcctgcctttttatattga

SEQ ID NO: 78147 - DNA, 681 bp, Citrobacter koseri
atgtctgtcaggaaagaattactaaaaaatagtctttttaatcaggttgatgatagtgtttccgcacctatatcgatccgccttccgaccgtcttaaacaatgaattagacgaactgtctttgagccttgatcgctccaggagctcgctgatcagcgagttcataaaggcgggaatagctgacgctaatgaattgttaaaagagagctctctgatcagcgatgagttgaaagagcaactggttgatcagcgtgaggataacgctgctagtttcatggatagaaaagccttcatgttaaatacgaactacaataacgatgaagaaactcatttcgatatgctgaaaaatcaagaggccgcagccttttgcaaaggctggaaggaatatatctgccagctttctaaaggagataaggtttatttgtatcagagcggcgttggcatcattgcttctggggttgtggatggtgagctggtgaaaagtgagcattacggcgtagctgatgataaatatgctaagccgctcaaagattttaaaaccggcttcagggctatctctgcgcgtcgttttaaagagttaaccggaggcggggctaatttccgtagaacgatgattgagctcacttcgatgcagtctcatgctattgctcaagagattgaaaggcttacctctaaatcctga

SEQ ID NO: 78148 - DNA, 132 bp, Citrobacter koseri
atgtacgcaaaatcgtttattgctctcgatggtaatcgacgcctcacgggagcgatcattgcccagatttatccttacgatcactacttctgtcacctctgcggcagcgctctgatattccacccggaatag

SEQ ID NO: 78149 - DNA, 264 bp, Citrobacter koseri
atgcagtgtattcccggcggcgtgattcaggtttcgccacatcagttccccctgaacagtgagcaaggctgccgctccatctctgatgacgacctgtgcgcctggtgctctcaccttctttatcgtcccggtgaactcagccagtgcagcgtaagtatccctgaggggccctggccttcacgctgtgatgagaatggctacgcacagtcctgtccgtcacttcgttttaacaacccatccgaaaatacaaaggaaatcaaatga

SEQ ID NO: 78150 - DNA, 483 bp, Citrobacter koseri
atgaacaacatgctcaccctggacgacaataccgtcgactcagcatccactgaacaacagcacgcaaccgcaattgtctgcacacctgtaccggatgaacagcgcattgccttctggccgcagcactttggcagcattccacaatggataatccttgaaccggctgtttttgcgtggatggagcgtttctgtgagcactacaacggcggcatctggaatttttatactctggccaacggtggggcatttatggctccggacactgacataggcgacgatgaaaaatgggtgctgtttaaccccatgaacggcaacggcgcggagatgagcgctgaagccgccgggattgcggtctgtctcatcgcctacagccaccacgcctgccgtacggaatgcgataccatgaccggacactattaccgcctgcgcgattacgcgattaaccacgcggaatgcaacgccattatgcgtattattgactga

SEQ ID NO: 78151 - DNA, 480 bp, Citrobacter koseri
atggaacaacagctaccgttatttgccgcctcattaacgtcatcagaacaacacactatccgggaagccttaaccctgctggagtaccagctacgtgaacccggcacgtcatttacctccagccatgcggttcgtgactggctgcgtctgcagcttgccacacttgaccgcgaagctttcaccgtcctgtggcttgataaccagaatcgactgatagcccacgacacactgttcctggggacgatcaacactgtcaccgttcatccgcgtgaggtcgttaaatccggcctgaaaaataacgctgccgcagccattcttgcgcataaccacccgtcgggagaggctgaacccagtaaagccgacaggctgattacggaacgtctgaaacaggctctggaactggttgacattcgcctgccggaccatctgatcatcggcgggatggatattgtctcttttgctgagcgcggctggctgtaa

SEQ ID NO: 78152 - DNA, 222 bp, Citrobacter koseri
atgaaaataatcagcaaacgtcaggcaatggcaatataccgtcaacacccgcagtcccggttgtttcgcttctgtaccgggaaatacgagtggtccggcagtatctgccactatgccggccgggaggtgcaggatatcagtggtgtgctggctgtattcgctgaacgccgccaggaccgcaatggcccgtatgtcgtattgcgtagcgtcacgctcaattaa

SEQ ID NO: 78153 - DNA, 366 bp, Citrobacter koseri
ttgtcgaatcaactacctccagtaaaccatgatgtctctgagccctggtgggggctgaaaccgggcatcactccgtgttttggcgcacgactggtacaggaaggcaaccgcctgcattatctggctgatcgggccagtatcgccggtgtgttcagcgatgcggatttacgccatctcgatcaggcatttccggtactgctcaaacagctggaattaatgctggtttccggtgagctcaatccccgccatcagcactgtgtcacgttatatgcaaaagggctgacctgtgaagcagattccctcggatcacatggctacatttatacagcaatttatccgacaccagacgacagcataacccggtaa

SEQ ID NO: 78154 - DNA, 381 bp, Citrobacter koseri
atgcaaaccttatccgccatcccgaagcggaaggcaccgtcacgcccgacgcccgttgaaatctggcagcaacttcttacgtatctgttaaaaagacattacggcctttcgcttagcgacacgcaattttccgatgagaagattattacgcaatatattgacgccggtatctcactgtcagatgcactcaattttctcgttgaaaaatctgaactggtgcggattgatcgtcccggtttctccattaagcatcagtccccttttatcggggtgattgatattctccgggccagacgggcaacgggtttgatgcaacgtaacgggtataaaaggatcactcttctcatcgctggaaatgcagctcgggagcaacattcatga

SEQ ID NO: 78155 - DNA, 492 bp, Citrobacter koseri
atgaaactatccctgacggcagaagccgatgctatcaatgtactggccctcaacatgggtcgtatcgccgtcgatatcgatggtattgagctggcagcgctgattgatgtggtcagtgacaacgggtattcccttcgcgttgctgacgaacccgggaagctgattgttgaagatcctctgccacgcgccgcctgtctgaacgggatccagtgcagtaccgcacatatcacggaggaagacaatgctctgctgtacaaacagtcgcatcagcatgaagactttggtgagtctgaatggattttgtacaccggatcgggttatctgctcaacctgggcgcgtggtcgtttccggtattacgcctcaaacgtctcggtctgtcgaaagcctgtcgtcgcctggtggtggcgcttatgcgtcgttactccgtcagtattgttcatcttgatgcctgtggcgaagtgctgccaggttttcccacatttgactggtaa

SEQ ID NO: 78156 - DNA, 201 bp, Citrobacter koseri
atgccagagttaaccactgaagtcgctctcaatagtctgactggctggctgcaggacaatatcgataacggtacgaggatcatcttcgacaacgacgaagacaacaccgactcagcaaagttgttgtcctggattgagcaggtgcgaaatgatgttcgcgcccgctcaatccagcttctgcaacagaccagaactgattaa

SEQ ID NO: 78157 - DNA, 849 bp, Citrobacter koseri
atgtcagaccttaccttcaccgaatccgaagtgttaaccagccacaccgacatgatttgctccaccagcattgagcgcatcgtcaccggacgtaatgccgcgctggcacagattgaagcgctcattcagcaactcaacgatatttcaacactgacccgcagtattggcggtaaaaccgctctggactgggccatgaagcaggaattccgctgtggttgctggttgatggaaaaaccagaaacagcgatgaaagccattgcccgtaatctcgatcgtggtatatggcgcgatttaatgaaaaagtcagggatgctttccatcatggacgctcaggcgcgtgatcagtggtacagaaaccttgagggagagaacattcctgcagtcagcgaagccaacattctgagcacttttgagcaactgcatctgaataaaggtgatgtgtttgagcggggtgtcattaacgtcttcaaagggttgagctgggattttaagacgaacagcccctgtaaatttggagggaaaatcatcgtcagtggactagtcaaatgtgaccggtggggatttgggcttctctggggcaggcaacacgatcggttagctgaccttgagcggatgctgatgcttctggacggaaaaccggttcccgacaaccgtgccgacgtcacccgtcgtctcgccgatcatatccatgaaaacaggcacagcaatcgttacgaggatgagatgtttgcaatcaaatactttcagaggggaactgctcatatcacctttaagcggcaagaactggtcgataagctgaatgacatcatcgcccgtcactaccctggaatgctggcatccggacagtaa

SEQ ID NO: 78158 - DNA, 339 bp, Citrobacter koseri
atgaagctcacaaagccccatgtcagtgggcgacttcattctaaagatttcatcagacatcacaagaagactattccgtatattctcagaggggaaaaatgtattcagcgggggaataactattcagaccatgtcagcggtgtcaattatactggtcagaaaaaaataacacaggatatagtgcagaaacataaaatatataaccatactaccaatgtgactattgcagtgccatccatggcacatagctttattcagacttatttactgtctatatttttctttccttacagtctgctacagacatctctgttttttgttttattccagatgccataa

SEQ ID NO: 78159 - DNA, 573 bp, Citrobacter koseri
atgccggatggcggcttcgccttatccggcctacggtactacggtgtggtgcgggtaatgccggatggcggcttcgccttatccggcctacggtattacggtgtggtgcgggtaatgccggatgacggcttcgccttatccgacctacggtattatggtgtggtgtggataatgccggatgacggcttcgccttatccggcctacggtattacggtatggtgcgggtaatgccggatggcggcttcgccttatccggcctacggtattacggtgtggtgcgggtaatgccggatgacggcttcgccttatccgacctacggtattatggtgtggtgtggataatgccggatgacggcttcgccttatccggcctacggtattacggtatggtgcgggtaatgccggatggcggcttcgccttatccggcctacggtattacggcgtggtgtgggtaatgccggatggcggctttgccttatccggcctacggtactacggtgtggtgcgggtaatgccggatggtggcttcgccttatccggcctacggtactacggtgtggtgagattgtag

SEQ ID NO: 78160 - DNA, 132 bp, Citrobacter koseri
atggtatggcgtttaggggtggataacgtcaccaacgagcaatactggtctggcgtatccgactacgatggcgtgtatgtgttccgtggcgaaccgcgtaccctgaagctgtctgttaattacgacttctga

SEQ ID NO: 78161 - DNA, 543 bp, Citrobacter koseri
ttgccgatgggggaagggttttgtaggcccggtaagcgaagcgccaccgggcatggcgacggatggcggcacaagcgccttacccggcctacgggagagggattttgtaggcccggtaagcgaagcgccaccgggcataacgccggatggcggcgcaagcgccttatccggcctacgggagagaggttttgtcggcccggtaagcaaagcgccaccgggcatgacgccggatggcggcacaaacgccttatccggcctacgggagagggattttgtaggcccggtaagcaaagcgccaccgggcatggcgacggatggcggcacaagcgccttacccggcctacgggagagggattttgtaggcccggtaagcgaagcgccaccgggcataacgccggatggcggcgcaagcgccttatccggcctacgggagagaggttttgtcggcccggtaagcaaagcgccaccgggcatgacgccggatggcggcacaaacgccttatccggcctacgggagagggattttgtcagcccggtaagtga

SEQ ID NO: 78162 - DNA, 186 bp, Citrobacter koseri
atggcgccgctgataggggtgatcggttcattgcaggcgatggaagccatcaaattgctggcgcattacggtcaacccgcatccggcaaaattgtgatgtacgacgcgatgacctgtcagttccgcgaaatgaaattaatgcgcaatccgggttgcgaggtgtgcggagcacaggtgccggcctga

SEQ ID NO: 78163 - DNA, 207 bp, Citrobacter koseri
atgacagtcgataacgacgatcatttcgcacttcttgtcatcctgcaaaatttcatgcgtacggttaatttcggaatgctggttaatcaggcagttaccggcatagttccagatcattttgatgggaacgtcgagtttatctttgccgcgaaccccgtcacgcagcgccgtcatttccggcccacgctcaatggcatcggtccataa

SEQ ID NO: 78164 - DNA, 327 bp, Citrobacter koseri
atgaccttcagggtcgcgctgcttaaagatgccctgcttgcggaatgcttcgaatgtcggcagttcgggaatcgcctgacgcgactgttcgtacagatgacgcatccactcttcttgcgtacgcccttcggtaaactgctgctccacaccgagacgcttcgccagctcgctggtcatctgatagatagtcttgcactcaaagcgcggtttaatggcctggtcggtgaaaataacgtaggacatgttcccgcaggaggcatccagcgcgaagtccatctgctcagaagcggtgcagtccggcagcagaatatcggcatatttcgctga

SEQ ID NO: 78165 - DNA, 327 bp, Citrobacter koseri
atgggacggattccccttagcgagaggagaaggacgctgggtcgtcaggacgttaatacatcccccctgatccacgcgttttgcatccgggtcataccaggcgccttcgcccaacgcaacgacgcccggcatcatgcgcggcgtcactttcgcctcaatatgcaactcgccgcgaccgttgaagatacgcactttgtcgccgttgctgatgccgcgtttttgcgcgtccatcgggttaatccacatctcctggcggcaggaagctttcagaacgtccacgttgccataggtagagtgcacgcgagatttgtagtggaagcccgttaa

SEQ ID NO: 78166 - DNA, 459 bp, Citrobacter koseri
atgccgttcactttatgtcccgcatttctctggcgcttcatcacccgtgaacgtgttaaggaggctcgtcgccgcctccttaacaatcctggctcccggcgggaaaattgttgcttcgcaataccctccgcttattcctccaggctaccggggcgggcgcgaggtagcgtccctgcaaaacacgccctgaacccgcatccatgcgggttcctccggccttacggaaacacgtcggcaattttcagccggacccgcctgcacctgaccatttctgcggtttgtttttttaacagcaaaaccggtgcaactgaaaatcagggcattgcagcaatgcccctgttccggctgaaaatcgatgagacgttgacggctgaccgggtccgcacgcagggacgcgggcggaggggacggcctgccgggacgcaggctcggccccgacccgaaaggcagacggaataa

SEQ ID NO: 78167 - DNA, 1200 bp, Citrobacter koseri
atgtgtataagagacagacctcaaggcgggaaaatcgatgtttccagccgtgatcatctggacagcttcatcaaggattacaattcactgtatggcactagctattcagctaatgactcgaaaagcttttacaattattacaaaaacattgcacaacgaaccaaagaaaaaggaattgacattctgctggtggtcaatatgttcctaacgggatttgatagcccagctcttaatacgctttacgttgataaaaatctgcgttaccacgggctaatacaggcattctcccgaaccaaccgtattcttaatgagaagaaaagccatggtaatatcgtctgcttccgtaacctcaagaaagccactgatgatgctatagcgttattctcgaacaaagacgcatcttcagtcgtgctggttaagccttttgaggagtatttgagcgattatcaagctgctgtagataccttgttgaccctgacacctacagtggaaagcgtggacagcctccctgatgaaaaagctcagcttgcttttgtgacggctttccgtgacatgatgcgattgaagaatatcttggagagctttgctgattttgatgaggtaagtaagcctttatcggatcaggctcttgccgattataccagtaaatatctcgatatttatgataaggtgaaaaaacgcactgccaaagataaagtctcgattctggatgaggtcgattttgaagtgtcactgattcatcgggatgaaattaatgtcggctatatactgaggctactttctggcatccaggcaatgccacctgaagagcagcaaaaacagaagaagcaagttatggatatcgttgacagtgacgtcacactgcgcagcaaacgcgaactgattgataacttcatcgaagaaaacctcctgcatgtttcgcatgatgaagatattacccaggtctttgaaacctacgttgaacatgaaaaacgtaaagcggttgcaacactatgtgctcaagaaaatctggatgaaagaaaggttgccgccttgctggataactacctgtataccaatgtgatcccacgcgaagacgaggtagcaagggctctaacgtggacacctaaaatacttgagaggaagactgttcttaaacgtgtctatgacaaggtctgtggtgtgattgatacctttatcaacggaatgcgtgggttctaa

SEQ ID NO: 78168 - DNA, 441 bp, Citrobacter koseri
atgataataaatttcctttttagagttcttctgacatttaacgcaacatcgttgttggctataattttctttgtacaaaagaaatacactctatattattttttccaagagtttgaatacagtcattggttgagtttattaccaaaaatggcatcatatgtattttacatgctaatacctatattactaacttggattagtttgcttttaagctctaaactgggaaaggatgaatttagagaaggcgaagtggtttctgtggagcatgctaacaactcattcctcccaagttatcttggttatttctttgtcgctttaagtataactagttggtctgccttgttttttgttagccgtcacaaatataaaacccctaatgaaatcaaaatacccattgcttttagaatcaacaattatacctttatcgaaaggaaaaaatga

SEQ ID NO: 78169 - DNA, 831 bp, Citrobacter koseri
atgaacaacatttttgcgaaagtaaaaggacctcgtaagaaacctttttttaaattggtatcagactacactctgtttgacgatttggatttatctactattagcctcatcccatataacccagaccataaactcgatgatgattcatggttcaaaattgatgattttagtcaacaaccattctgtgtatcatgtcttaagaatgagtttgattctaaggacttcgacgatttaacaaaaagaaacttcactaagatttcatacatattctctcatcagaatgaagatttttattttcagaaaataaccccttcactgtttattaagagaaaaacaattgcttttggtgaaacagcagagatagaagaaaatgaaggacgactgattgttaatcatagtcctgatgctgtatatctcaaggatagaaatatattattattcagaaaccttgccacaatttcaagtatctttaaaggtatcgatgtactgtacaaagaagctaccgcagaagaagttaagtcgtttttaagtgaatccttcattgtactttctaatgactatgatgtagagaaagtgtcaaaaccaaaccgaaagagaattgcgttagctatggatactcttgcagcgatgccagttgaagaccgaggtgagatgctgaattacattaatgattattgtgctgaaaaacttaaatacgacactgcagagtgtaaattcgaagtatcatcagaagaagaattaaaatatttactgtatggtatcgaacaaagattttacactactagatttggtaatgaaaagagattagccaactcaatactaagactgtaa

SEQ ID NO: 78170 - DNA, 1257 bp, Citrobacter koseri
atggcgctcactgacgctaaaatccgtgcagctaaaccggatgaaaaaccttacaaacttgccgacagcggcaacatgtttttgctcgttcaccctaacggctcacggtactggcgactccgctaccggtttctgggcaaagagaaaacgctcgctctgggggtctatcctgaagtctcgttatcagaagcaagggaaaaacgcgatacggcgaggaagctgatagctgagggaactgacccgtgcgaacagaaacggatcaaaaagtctgtacctgaaacagctcagacattcgaaggcatcgcaaggcagtggcataagagcaacaaaaaatggtcagcctcacatagtgagaagatactaaaaagcctcgaaactcatgtgtttccctttattggctcacgtgatattaccgccctcaggactcccgatttacttgttccagtaaaggctgccgaagccaaagagatctatgagattgcagcgcgccttcagcagcgtatcactgcaatcatgcgctatgctgcccagtcaggcattatcacctataaccctgccgtggatatggctggcgcgttaaccacggtgaaacgccagcaccgccctgccctcgccttaaatcgcatttcagagcttcttgaacgactggatgcatacagaggacaacctctcacccgactggcaactaaactcactctgcttatcttcatccgttccagtgaactacgctttgccaggtggtctgagatcgacttcaggaaagccatgtggaccattcctcctgagcggaaacctattgaaggggtcaagtattcccatcgtggctcaaaaatgcggacagagcatctggtgccactctccactcaggcactggatattctgaaagagatccacaccatcagcggggaatatgaattgattttcactggcgatcacaatccgtggaaacccatgagtgaaaatacggtgaataacgcgctgcgtcttatgggctatgatacaaaggtcgatgtctgtgggcacggcttcagggcaatggcatgcagttcattgattgagtcaggattgtggtcaaaagatgctgtggagcgacaaatgagccatcaggagcgtaacggtgttcgtgccgcgtatatccataaagcggaatttctggatgagcgcaggctgatgctccaatggtgggctgattttctggatgcaaaccgtgaaaatccggtctcacctttcgattacatcagacaacaacacttataa

SEQ ID NO: 78171 - DNA, 1062 bp, Citrobacter koseri
atgagttttttaacggatgaagaaattaatgcactgacaataaaacgaatgatttttcatgtcgttggtggagaactggagatccccgtgctgctcagtgaaatatcaccacctgaacacgtcgatttttttctggaacggattaagtctgcattaagcggtaacatgttccggtttacggagttgtccaataccgaacgtattcttcgcctcataaggaacaatgccgatactgataccagttgcttcactgaacagtccacttttctggcaaacgattttcagtctcaccaccacacaaaaaatgccagtatgggagtattttttctttttgagcttcacgccctcaacgatgagaaactgtttgctctcattaaatatgataatgaggatgtggtacgttacgtgctggatgcggaggggaacgagtttcaggttcccagactcgaacgtttccgcgaaagcttcgtcaagaaagcagaagccatgcagaaaattgctctggtccgcctgacggcagatgctcagggtggacaagttgttgtacgggatcgcagcaaacgaaccaatatctccgtttattttgagcgttttctacaggtacagcgcgtcaacaatacaaccgacctcagcgacaaactggttgccgcactcaaggatgtcttcaaaaagcaccgcgacctgttaccggacgacatcagacgtagcggtgttaacaagatttatgaaacgctacatcacggggcgcaggattttaacaccgatgagcccctttccctgctgaaccagatttttgggccaatggaagaagatcatccactggtcaaatcctttacccgtaaaataaaagacctgggaatttcaggtgaatctttccggatcacccctgagaacatccctaagccacggaaaagaaaactggaaactctggaagatgttattgttatctacgatgaggataatgccccggacatccaaacgatggaagacgggcgaaaacgtatagtgatagtgactgcagggctggtgacagatgacatcgatactggaaaaaatcggtaa

SEQ ID NO: 78172 - DNA, 1485 bp, Citrobacter koseri
atgacatcgatactggaaaaaatcggtaaggcaattgactgctcacgccgcgcatctgatctggtgatcacggaggatcagcagacaaccacccggaaactgttcatttccggtaccatggataatgacacccttcagttatggggggaagtgacagatgctgattccgaaaacctccggatcacctttgttgatgacagccgggatgatatccaccctgcgcagggtatccccggtcagaagcactttatcactatcatcagcgatgagattcccgggattctgcgactctttacccctgaagggtggcgtacatttttactcggggatcccgggcttcgtcagtatcgccttatctacgccctgttcgtcagcgaggcatttgaaacacaacagtggaaggtcgagccgtgggaaaaaatgcacccggaggagagtggcatcgacgttattccccagacaacctccgtcacaaaaagtatcatcagatgcttttcgaccgactttcttcctccggatactatagccccctggatcttagtgtccggagacaaattgacagacggatcaatgaggctctgggcatcactcgcctgccgggagttattgaaatgtttcgtcaatgagctttttgccgccgaaataaaaaaggtcggactatcaggaaaaccgccgcgaaaaatcccattcggagaagaacatgcggccctgcccgccttttatgtcattcaggaaacggcaaaatggatttttcttgaaggaaatgaaacagagcttaaacatacctttctgtccagtgaactggccagagaatggcctgagggtgtcacgttttgtgaaggcattgtgtgtcgacttcccccggcactggagtcagcccggctgctctacaaggcccatatccggacagagggaaaagacaccctgaaatcactgggtgatttgcgaaaaggcctgacagaggacacccaaaaaattttgcagcagtcgcgggatctgtcttccgcgttgtggaaagatatggctctggtcatcagcactctggtccttcgctacagtctggaggccctgaaggaaagtggcccgcaaaaagtgtatgccttggcattttgtgcactggccctgtatatcgccatctcatacggaatgtcggtctatatcaaccgtcatgccctttcactgctggaaaaaaacagaaccatctggagaagtaagttatatggttttctggatgaacaggattatcaggaactggcaggttttcccgtaaaggccgcaatacggtcatatcaccgggttgagcgaataacgtcggccattgtgctcattctggtcacgctattacttacagctgcagcaagtgaattctggtcactcagtatgctcctgcagtcgggctacacctgggttatgagtgcgttacagattctgactcccccgtgggctctgcgcagcccgaacggttttactgtctatccttcatga

SEQ ID NO: 78173 - DNA, 129 bp, Citrobacter koseri
atgtttgtggaactcgtttacgacaaagggaattttgtgaggttggggagttctaagtcgtatgaaaaattcaaatcaaaggcgattcaagattatggaggaatgccgcataaagaaaaaaacatttaa

SEQ ID NO: 78174 - DNA, 366 bp, Citrobacter koseri
atggcgggaaaggcggcgcacgttgctgctgatgttttgtgttgcccggtggcgctacgcttaccgggcctacgtgctgatgtcttgttttgcccggtggcgctacgcttaccgggcctacgtgctgatgtcttgttttgcccggtggcgctacgcttaccgggcctacgtgctgatgtcttgttttgcccggtggcgctacgcttaccgggcctacgtgctgatgtcttgttttgcccggtggcgctacgcttaccgggcctacgtgctgatgtcttgttttgcccggtggcgctacgcttaccgggcctacgtgctgatgttttgttttgcccgatggcgctacgcttacggggcctacgctga

SEQ ID NO: 78175 - DNA, 1089 bp, Citrobacter koseri
atgagcaacactgacatccgcgtcgttaccggcccggctaactacttttcccataccggcagcctctcccgactgaaggattttttcagcgccgggcaactctccgccgcagtatgggtgtatggcgaacgtgcgattgccgccgcccgcccttacctgccggatgcgtttgatcttccgggagccagacacctgccgtttaccggccattgcagcgaaagcgatgtgaaacaactggccgcgaaagcaggcgacgaccgccgcgtagtgatcggtatcggcggcggcacgctgcttgataccgccaaagcccttgcccgtcggctacaactccccttcgtggcgatcccgactatcgcggccacctgcgcggcctggacaccgctgtcggtctggtacaacgatgctggtcaggcgctgcactttgaaatttttgacgacgccaattatctggtgctggtagaaccggaaatcattctccgcgcgccagaggcctatctgctggccggcatcggcgacacgctggcaaaatggtacgaagccgttgtattagcgccacagccagaaaccttaccgcttaccgtgcgtctgggcattaacggcgcgctggcgatccgtgatgtgctactggagagcagcgaacaggcgctggcggacaaagagcgtggagaactcacccaggcatttcgcgatgtggtggatgcgattattgccgggggcggcatggtcggcggtcttggcgagcgttatacccgtgtggcggcggcacacgccgtccataatgggctcaccgtattgccgcaaaccgagaagtttctgcacggcaccaaagtggcttatggcattctggtgcaaagcgcattgctgggtcaggatgaggtactggcgcagcttatcgccgcttatcagcgctttagtctgcccactacgctggcggcgctggatgtcgatatccagaaccaggcggagattgataacgtgattgcccacaccctgcgcccggttgaatccatccactttctgccggtgacgttaacgccagccacattacgcgccgcgtttgaaaaggtagagtcgtttacggtttag

SEQ ID NO: 78176 - DNA, 561 bp, Citrobacter koseri
atgttatcctgccagagtatttttaccgatggggttatgaggcatactaagtcggagcgtccgaaactcttactaacggaatatgaaaataacttacaaatcatgcatgtgataaaacaatataacgacctggtacgcaggataagtgtttataacgaattagatttttatgccgtacacccccaatctatagctggcgttctcgatgaggttgaacatgcattgggaaagattaataaacggcttgatatttccaaagaagacgtcggtagtgagatgctggcagaaataatgataaccgagaaaatactgactgttcgtgaacttagcaaagttctgatcagctacttacccggatctacgctttataactgtatactcaatctggataacatcctaccatacctgaaaattcccggcgagatattgattaatatttccaacttcagagcgcttgctgaaggaagtgagcgtaaacgtaaaataatcgcaaatgcaatcctaattgtaaatatcatgcaggggagaataaaaccgcagaaaacagtagtagaaggatga

SEQ ID NO: 78177 - DNA, 735 bp, Citrobacter koseri
atgaataatcaagaacgctactatcaggtatcacgcttcccaagcgattcaacaccaaaggaaattggctttaaaccaacatctgatggtaaagtgccagagaattatttattttttcggttagatgcggaaagaacaattcgaactattaatgcaatttttgaacagaatgaagaaaaacgtttggaattttatgagcaagtatatcaagctgcaagagtttgtttttctgggagagagggagatttttcatccgctgaacaagctttaaatgaaataaaaaagactatactgacttcatcatggcttacagtcaggaacggtataatgactgtttatggattatttgcgttagccgcaattgtattacttggtattgctcagctttgttatcatggaaaactatataatatccctttagtgctaattggtagttgcttaggatcgtggctttttgtgtctatgaagacaagtagcataacatttgatgatatttacgaaagtatcagtcagcatcgtagtttattaataaggcttatttatagctgtgtgttatcgttggttgcaaatctatgtttgttagctgggtttattgaaatgaaaattggagagatatcaacagcaatgatatccgataatggatttatagccattgcaactggtgtgttttttgggttaggtgagtcatctttagcatcaaagctttcagataaagtaaaaggtactttttcttaa

SEQ ID NO: 78178 - DNA, 2535 bp, Citrobacter koseri
ttgctaaggaaagggtggtttatgaaaagaaataatccgattcaagtaatactcaagtctgggcagtataaatatacacccaaaccgaaagttggaggggggaataccgatttttatgctgatcgggatgatgccttcataaagcacaaacgagacctcctagatgaagtaaatgctgttcgaggccaattgcaccattcggggtttggtcttgggcttgtcaaagttgagctgaaccctcaggctcttgcgaaatcacatcgtccagtagattgtctgttcccgagtgagaaggctcctctcgttggtgcattaggtattggtgagttgctaattcaagttacggataaaaatctcgtacatctatataataaaatagatggtgcagaagagcataccactaaagttttcgatgaaaagcaacaaaagatagtaataaaacctagcgcagctaaaagtgaaacaggtgcaatagatcgtattagcttttatggaaatgaagagaaaatttctttctcgcaggaagagttaaatgcatggcgagaggatagtgatgaagggttttcaggataccaggtcgagtttgttaattttaggacggttgattccaaattcgtcactataacatcacatgatatttttttgatgcgaagtgatttgattgaaaaattaaaaatattaggttctggtgtgtatgttacaaagataagtaagcatcaagaagtccctgaaataataattgtacagttgctgaagccaactaaagggtatgattttaaggtaagttttaacgaaagacttgatgtcaaattttctttggatgatgtggacctctctgctgaaaggcatagactattactttcaatcctgtcgtcaagtcctttagtaaaaagagtatccttactaccaaaaatatctcgagttacatctttacttagttcaattgaaaataaaatcatcctgccaacgaggactgatggaatagattatcctagagtaggagtgatcgatagtggtattcataatccaaaactttctgactggtgtgtagcgaagtcaaatgggtttgatgctgatgactgtgatccaaatcatggttcacaggttgctagtctacttgtaggtggcggagcattaaatcctgaacttggatttattgatgatgacggatgccttctctacgatatttggattcccgtacataatggtaaatccaatactttcactagttactttgctgaccatggcgagttttttgactggcttgatatggaagttggtgatgctgttaggcaaggttttagaattttcaactttagcttaaatttcaaagatttcgtaagagacgactcatacagttttgcagcagctcagattgatagaatttccaaaaaatatgatgttatttttgtcgtctcatcaggtaacttgcgtagacttgatttcagacgctcatggtcggcatctcccccagccctgcatatctcagatgtggacagattgtctcagccaagtgagtcagtcagtgcagttactgtaggagccgttaatcctccggggtgtgaaattaacacgcatggtgcaccaacggtctatacgcgacgtggacctggagtagctatgggtgttaagcctgatgttattcattatggcggttttgcctctaaaacaggcaagagcggattattttgtatggatggtcaagggagtattgtagaagaagcaggtactagcttctcagcccctttagtctcgaaaatactcgccagtttgaatcagaggacagcaggaaagttatctcgtaactctttagtcgcgatgcttattcatcattcaaatttgaccgctcctctcatcgacaaaaatgttgatgtttctctcgcccgtcgttttgcaggattcggcatgccgcttgtttcacgtgatatgctgaatacagatgatagtagtattacgttagtattaacggggagtctaaagagaagtgaggttttggagtttgatttcaactggccccgtagccttacaagcgcagaaagtaaatgctctggcaaggctacattaacaattgcatacgagcctgtgattaatcagaattacggagcagaatattgccgggtgaatgtagatgcagttcttcagcaaaataaatatgataaaaaaaataatgaatggtcttatcggaaaaattgcacctccgtatgggagaatcgtcttggtaaagaggttaattacgaaaaaagccaaattgaacatgggctgaaatggtggccagtgaagaagtatacttggagttcaactcgaggtgttggtacctctgatcaatggcgtttaaaaatcagctctatcgagaggagtcccggcgaatttccagatgaagagattaattttacggtgttactaacgattgaagacatccaaaacaaaactaatgatcttttcaacgaggttagacaagagcttggctcaattggtatcgaatttgaagatatcaccgttacacaacagctaaatgttaaagcaggtcaatcatga

SEQ ID NO: 78179 - DNA, 1176 bp, Citrobacter koseri
gtggaaaactttcgaatcgtatcagcactatgccgacaagttatcaaagatggggcatctccaggggcgttacagcaaatggagcgtctttatgaagcacttaaagaaggtcagcatactgccgaagcaaaaatgctgcgtggccttattaacaaagcagagacaatccgagctgttgaaccagcaagagtagaattgtcacgagcatctttcttacggaaacaagagcttagaagtaatgtcaaagttccagttgataaagaaactggagcacctttagcccagcttattctccctgaagatctatatgacgctgaaatgccagtcatgcctgatgaactgtcttctgcagtcggtcaacttgttgaacagtggaacaacttggataagttggcacagtttggcgtaatgccatctttgagttgcctgctctttggggtaccaggaacgggtaagacgatgcttgcgttttatattgcaaaggaactgaatcttcctattgtaatggctaagttagatagtcttgtttcatcgctacttgggaccagtgcaagaaatattaataacttgtttgattttgctgctcaatacgattgcctacttctccttgatgagttcgatgctgtggctaaagcgcgaaatgataaacatgaagtcggtgaaatcaagcgcattgttaatacacttttacagtgtatagatgcgagagctaaaactggaatgacgcttgccataacaaatcacgaagttttacttgatccagcggtctggcgtagattcgagctgcgaattcttgtcccaagaccaaactatctcgcacggatgaagattatagaaaaatatatttcaccattgagtttttcacaagaaaaaataaagttcctgaccgttttaactgaagggttcaatggctctgatattttgttgatgctaaaaagtttcaagagaatggcagcaattagtcaagtggaaaatacatttattgaaatggtacagtcatttgctgtgattcatgcgggaatcgaagagaatgattttattcatttgctgtcaaaacgtgaagatgcagttttgatgagcttacttaacaagaagtatgatttcactcagaaagagatagctcaggtatttgacattacacagtcaaaagtttcgagaaacataaaagagtcctga

SEQ ID NO: 78180 - DNA, 237 bp, Citrobacter koseri
atgtttgaaaatagaacaaaatgcacacaagtgggctttcttgtgggtagcatcgagatgctcattgctaatgaagtattcgattttttcaaatttatcgcaaaaaaatgtgttttgatgcattttaatggattcaggtattggttttttcattttttattcattacaatgaaggtgtggttgcatctgtcagtatctatcactataatctggttaactgaaatactgtataaataa

SEQ ID NO: 78181 - DNA, 876 bp, Citrobacter koseri
atgcataaatctgaaggccttcaggccattgagaagccgctggcttctctccctaacactatccgcaaccatattcttgaacgtcttcgtagcctagcgcagtacgaacctgtgatcggtatcatgggtaaaacaggggctggtaagtcgtcgctctgcaatgccctgttccagggcgaagtcacgccaatcagcaatgtgtcggcctgcacacgcgatgtgctgcgcttccggctccgcaatggcaatcacagcctgatgattgttgatttacctggtgtgggtgaaagcgagcaacgcgacgaagaatacgccgcactttatcgtcacatcctacctgagctggatttggtgttatgggtcatcaaagctgatgatcgggcactgtcagtggatgaacacttctatcgtaaggtgatgttggcgtatcagcatcgggtgttatttgtggtgaatcaggctgacaaagctgccccctgccatcagtggaataccaccagcaatacaccatcttatagccaacaatcgactattgaggccaagcggagcgcagtacagcagctctttctgccgcaccatccagtcagtgttatatcggcccaaactggttgggggctggatgcgatggtagagacgatgatgcacagcctgcctgaccgggccgccagcccactgacaacacaactgcatggaaggctctgcaccgaaccggtaaaaaagcaggcacgcgagcgctttggtaatgcagtggatgaaatgattggcactgtggagtcatcatcttttctaccagcgcctgtaagggctgtgattcgaacattacgggaagcagtggtgactgttgcccgtgccgtctgggactggattttcttctga

SEQ ID NO: 78182 - DNA, 366 bp, Citrobacter koseri
atgaacaatcactcagaatccggtaccaaaccggagaatcttacctgccagcagtggggactaaagcgcacgatcacaccctgttttggcgctcgtctggtgcaggaaggcaaccgggtgcattttctcgctgaccgggccggattcaacggtgctttcagcgacaacgatgcattacgcctcgaccaggcctttccgttgatgctcaaacaactggagttgatgctcaccagcggagaactctctcccaggcatcagcactgcgtcacgctatatcacaatggactgacttgcgaagccgatacactcggctcctgcggttatgtctacatcgctgtttataccgaacagcctgaaccccattaa

SEQ ID NO: 78183 - DNA, 3318 bp, Citrobacter koseri
atgacgagtccactgtgcgcgttgctttcagactctaggctatatgacttgttcggagatgatcaaaatctcactgtaagccaaatctgggtattggagatcgagtgggaagattcaagtgaactacgttttctgtatggtcggtcactatcaggaaactaccaatcaaacagttggagcgggagcgctagttccaaaatgcgacttactgagaattgctcagtcagaactcacgccttgacacttcatacctctaccgagagattgagaactttccttgagcacttcatctgcggagagacgtttcagaaatcttgccaactctccgggctgaatatcagcgacaaattggctaaggcgataggaacaagcacattttgtgtgaatcccatcacacgccctgtaatgcatttgccgacacgcgattattatagatttcaaactaatcggctaagcccaaccagctattccagtgttgacagcggcgcaatttccctgagagaaaaatcaaatttattcaatgtgttggaaggatatgacacgaagattgccaaatttgcatgccaagtattgaatgcagatactggcttagatttctccacaattgactcttggagaattggagactttgagttcatctgtgctcctgggctcaatgctacagagcgcagcaagtatgacttatccttgaaggggcagcagtcatctctgactctattcgaaccactgacccgagaaccttccgatctgttggttattgtcaaggcgtacagtgacggtagcattcagtcctcttatatcgccaacctcagcaagaacgcttcataccctctccatcacacatttgaactcaaagtgtttcaggaccaagctagcacagcttatacaatggagatttatgcgcttggaataaatggtgagcaatcattcctcctgcttcaaaccggcgcagatttcatgcgcgaaatgaatttcaacatgcagctagtcgaacccattagggcaaactaccaattcgaatggttggcaaaaaaagtaccgaaaagggaaaaggccagactggagacagcagaacagattgggcgtgctattagtagtccctctcggtcaaaaatgggcgggtatgcggatgatccatgggttccactcaaccggctcatccagaacaaaatcaaacagttatgcccaaaaaaatccgacgggcggttctttcctactctcaacgacagcagcggtatgagccgtctcgagttgaaagattggctcaaggacattttcgaacggcaccacgacgcgaaaattgcttggatcgacccatatatggaggatgtagggattgagcttctcaaccgactgggcactgctactgctgattaccttgtcatcacgacggaaaaaatgtcgaatgatgacagcataaaagaggctggtcagcccaaccgtgttgaaaatcttctagcgagatgttcaggttggaataatggctactttggaagtgtttgcctcaaaatactcgcagtaccagagaacaaactccacgaccgcatgatcctcattcgctcagccaatggtcagccgttagctgggtaccatctttccaattcagttcagagggccagcgagaaccatcctctattggcaacccctattcctctggacgtgattccgcatgtatttgagtacgttgatcagattatccaaagcacactctatggagagggtaatccccaccttcctgcaagaataattttcaattctgccgacattagcccatgtgaggaggtgaagcctaaagggctaaatcacaattcctcatttgctgagctaccatgcgctggtagcgtgctagcctggtggcttgatgatgagcagctttcaaacttgtcaggagctgtactcatggagcagatgagtgccaaaggatacattaaagatgggaaacttgacgaagatcgctttgacgctcttcccggcaaattttggactgaagggttgccaatagcagatttctactcagcttgggatgtccttggttatgtcatagccaactccccggctagtcgctatgcaggcagcctctacaataaggagcaatcagtattatccgaacctgtgaaggttgcactgttggagcacatctctccctccagagcaaaagcactgcaaccacgtctcacaaaaaaacaacttgacattgaacactaccgttcacaggaacttacagcactactgctttcaaaaaatgatccgttcagtacattcacatattcacccgtagatacctcatggagcgactactactccatacaactcctatggtcgcaagctccaaagcagttggtatcttggttaaacacaatattctctgaaccaatcaagtctcctcgtacccacgcgcttgtggttgaagctcttaagcatatttgtttgtgcgttagctttgacaagcatcatgagcaaattgatgcgcttttgcagagcaatgtgagtgtaataatctggatagggcttcatgctcttgaaaacgcccttaataggggagtctggggaattgaagccctttcaaaaatcgaccatatcgaatcagccactgttcgacgtaccattttgtgctggctgatcaacgaagccaactaccttaattcggagattaaaccacaactcatcgcttgtttaatccaatcgttaaaggctcctctcgcagacgatgagctcaaggatattcttcaacctgttcggggtcgcctcggcaggctacaccatttcacgccttggattcttgaatccatgctcgtacccatgctggaaaaaagaacaatcgacatctctcaagttgcccatcagtggttgacagagctgactacccaatggcgtacagcactcaagaatgagagtctctattttactctagatgcggacggtgcgttcaccgatgagctggctattgcgaccaaatacctaagctcagcagatcgagtggagattgtcagagaacttaggaaagtctttgatgcactggctcggaccatcaggcggccgatgagcgcgcagataagctggaaatcctacaacaatgcgcaccaagtaaacctctggctctatgcgctcgctcgtaggattacaacattggtgcctgatgagttaccactgttgaatgaacttctacttgaaagcgaagaaattatagaacgaatcaccccctcaactcggcgctggagttcaagcaaagacctgctcacttatttaaatggcgatcccgaacagattggatcacatggtctacatcaaattattcagagagcaatcgagccacggtga

SEQ ID NO: 78184 - DNA, 189 bp, Citrobacter koseri
atgagggaccttcgtaatccatcacagttacctacaggtcccataacggaaactgcctgttgtgcttacgcccgctgcaagagccacgacgtacacgtctgcacctcgtcagtcctgactgagggcgccctgaaacagatcggcgggttgtatgtcatcgagacggaaataaggggaatgcaggcataa

SEQ ID NO: 78185 - DNA, 348 bp, Citrobacter koseri
atgaaaacgctctcaagacactcagagctggcgaagacgttcgcgtacgccctgtaccagtggctggcactgacgtactatccagagggtggctgcgctgaagcacataacaacatcgctgaaaatgcgctgcggacggtcagtctgggtcgcaagaacttcatgttcttcggctccgaccacggcggtgagcacggagcgctgttgtacagcctgatcggtacatgcaaattgaacggcgtggatccagagagatacccccgtcatgtgctcaacgtcatagctgactggccagtcaatcaggtccacgagctgttaccatggcgcgtaagcctgccagctgaataa

SEQ ID NO: 78186 - DNA, 213 bp, Citrobacter koseri
atgactaaaaaacaatactatgaggaacaattagctttaatcaatcgagctaataatatacgtgatgaggacttggtggaaactccagattttgattctcacgaagaaattgttcgtgctattatgaaacagcaagcatatatggctgaacaagtaaaaaaaaatattttagtaagttcccttaaagaagaaaaagaattcaattcaatttaa

SEQ ID NO: 78187 - DNA, 495 bp, Citrobacter koseri
atgccagcacaagtagcttttcatcgtgatttttactatggaaaacatagaagcacgtacttttgtgactttccaatgcttaatgccgatccactaaaccccaacaatgaagctttgtttttttctacattcgtagcagatgtaaaaaaagggaacttgcttgacgggaaaaataaagattcctacagtgactcatttggtaaggaactgcctcttttgattggctataaagcatcaaaattgtggcattgtcatgttgggccttttgattactccacttcttacttgcagaaaaaaatccgtgagctaaaccttgggggactaacttcagcggctatagtacattataaatggtatgatccttcaaccaaaacgaaacttatcattatttcgtttagtcctatacacactccgtttccagggacagatatgaagcctaatcaccttctaagccgtggaggactcttgtttagccatcaaataattaattcctaa

SEQ ID NO: 78188 - DNA, 1038 bp, Citrobacter koseri
atgacttgggggttaaacccgggaagtcttcaaacactacttgatcggggctttgtaaaagttacagctaacaaacggaaaggaagccaaggctatagcgtctattatttaacaagtggtaaggtaaaagctcttgaccaagggcaagcagtgattcgaaacagaaatccagatggttcagttaacgctttttatgtcgaagggcaaaaagcaattcccacaaccatgtggttgcgagaaagccataatgctcaatctcatggtacgaaactgctatcaaaattcttacctgatagaaagtttccttatccaaaatcactctatgcggtagaggatgctctgaggttcttcgtaaaaaacaatccaaatgcgataatattagatttttttgcaggctcgggtactactgctcacgcaataatgcgtctgaatcgacaagataatggcaataggcaatcaatctcagttactaataatgaagtttctgcagatgaacagttacagttgagaaacgcaaaacttcggcctggagataaagagtgggagatgttaggtatatgtgaatatataactaaacccagaattcaagcttcaatcacgggaaaaacacctgaaggaacgaacgttaagggtgaatacaaattttatgacggattccctatggaagttggttttgaggaaaatgctgaattcttcacactaacctatgaaacacctgttgcagttcaacataacatcgcttttgaacgtatagctccattactttggatgcgtgcaggttctcaaggacgacgaatcgagaaaataccaaatcaaggatgggatgtggttgaaaactatggtgtactcgtagatctcgatcaatcgacaacgttctgtaaggcgctaaaagataataaaggtacacgtatcgcctatatagtaacagatgatgatcgtcgttttcaggcagtagctcgctatttaccagattcagttgagcctgttcgtttatatgaatcttatttgtctaattttcgtttttctatgggccgttaa

SEQ ID NO: 78189 - DNA, 2583 bp, Citrobacter koseri
atgaagtttacacttaaagattatcaagaagatgccgtcagagacgttcttatcaatttaaggaaagcatctaagcgttggcttgatgatggtgacaaacatgctttctcactaactgcaactactggtgccggtaaaactgtcatggcagcagctgtgttcgaggctctattttatggtgatgataactttgatttcgaaccagatcctggtgctgtagtcatttggttcagtgatgatccttcattgaatgaacaatccaaatttagattattggaagcttcggataagatttcccccaatgatcttattgtagtacaaaatacatttaaccgtgaatcatttaaaccaggaaaaatatatttcctcaacactcagaaacttagtaaaaatagtttgttggttcgaggttctgaaatagacgaagacggttatgacaaaactggtcataaagctatgcctgaccttcgtgattttaccatttgggatacaattcaaaatacaataaatgatccttcattaagtttaattttattgctggatgaagctcacagaggaatggggtctggatcaaaactaggtgagaaaactacaattgtaaaacgattaattaatggaactgaatctgtatccggaattccagttgtatggggaatatctgcaaccgtagagcgattcaattatgctgtagcagatatgcaaggacgagccactttaccaaacgtagttgttgattccgcgaaagtacaagcctctgggttgctcaaagataccatcattctcgatgtaccaactgagacaggtcaatttgacactgttttagttcgtcgagggacagataaattaaaagatatttcatctgcttgggcagcttatcaccaagagcaaggtgatgcggaagaagttattccactcatggtattacaagtacctaacacaccagaccataatgagattggtcgagcattagatacgatctatgaacgctggccggaaatgccagatgatgcaattgctcacgtgttcggtgaacataccacccaaacattcggacgatacaatgtccctcacatctccccagaaagagtgcaagactctaaatgggtacgcgtattgatagccaaagatgctattagtactggttgggactgcccacgggctgaagtcatggtgtcgtttcgtcccgcaaaagacaaaacacatattactcaactactcggacgcatggtaaggacgcctttggcacgacggattcctggtaatgatcgtttgaactcagtggattgtttattgcctttttttgatgaaaattcagtaaaggaagtagctgattatctgatgacgggaaatgatggtggcgataaacttcaaggccgcaggattcttgtcaaccccgaagaaatgcttcccaatcaattagttcctgagatggtttgggaaaaaatgctttccctcccctctcagacaatgcctaaaaaacaatcaaaaccaatcaagcgattaacttcgctggcacatgaacttgcgtttgatgaaattttgcccaatgctggcgcattagcccacgctgaaatgcataaagtattaaatgcagcacgccagcgttacaaagatcaaattatagaagcaagacaatcagtccttacagttgaaggtcgaacactgaacgcaaatctgattgataaaaaaacgtctttcgatgagtttttagaagcagctgattattctgttatagatgatgcctatcgtcgagcctgcagagctattagccctgatcttgcaaattcatatagtgaatttctggcaaaaacagaatttgatacagacgattatgaagaagcgttaatggatgctcatgcaacggtcgctgcactcggacttgttccagaaatacaaggatatttagaatctgaagcagataaattagccaaaagatggctaacgcattatagaataaccattaaagggctatctgatgaacggcaagatatataccgtgaaattcgtgaaatgagtacagagcctatggatgttgatcttgccagacctacgtcatggatgcagccaaccactattagagaaatggatagttctgaaaaagcattaccaacgtatgaaaagcatatgttgtgtaattcagcaggtttgtttccagatgatttcaatgtatgggaaaaggatgttcttagtattgaactaagtcgtgctgactcaattgcatggtatcgcaatcctgctcgtgcaagccaagattcattgggagttacctatgaagatgctggtacgataaaaatgatgcgccctgactttattttctttgcacagttgactgatggcacaattgtagcagatattgttgatcctcacggcactcaatttagtgattcaattcctaaattaaaaggattagttcaatatgctgagaaatcaggagagttttatcgtcgaattgatgctatagcgaaagttggtgatgattacaaggttcttgatcttaaagaatcgaaagttcgtaaagctatcacatcggcaacgtcagttgtcgaattatacagtagtgatattgccacaaattacatataa

SEQ ID NO: 78190 - DNA, 234 bp, Citrobacter koseri
atgacgactgaacaagaaaaaagaatttctgaagaagagtttgaaacgatgtacccccgtagcaagtatgattacattcgcactcatcatcgagaaaaaggacatttaggacaaaccgaaatcgatagctatgatatcaaagataaaacaactggtgagacggtcttaaaagccacctataccgatcacaccaatgttaaaggtttacaatctattagatactgggagatttaa

SEQ ID NO: 78191 - DNA, 381 bp, Citrobacter koseri
atgaataccgtattgaactcacgcgaagaagcccttaaccgaggcaaactgattaaccttgatggcgaggcgctggacgctggcttgccgctggatctggccataactctttcggcccacaagcactgtcttgaagaccggaatgacaacgccatcagggacctgctgaaaggtgttgaaatggcagtagtagtggcctttatctcccaccaaccgccgcaacgcaccattcgtatcgattaccgctcggtgctgacgcagaaaaccaacggcagcacgctgcagcaaaccgtcaggctgacattacgcgttcatttttctgagcaaggcatccccatcgccgccactctggggctgatgggggaaagattcccttactga

SEQ ID NO: 78192 - DNA, 189 bp, Citrobacter koseri
atggacttggttaatcatgaaccttttttaaatcagttgaaacaagaagtggttcatatggctgatgattttattcattatcaatccaaatttataaaattacagcatgcacttatagatctgattgattaccttgatccgaaatatatcagggttactgagaataagcgtagaaaaatactactataa

SEQ ID NO: 78193 - DNA, 294 bp, Citrobacter koseri
atggatgtggcattggtttccagtatgattagtggtttggttgctatcgtagcggttgtcattcccgcctttaatcagaatcgaataaacaaaataaatcagatgcaagagtcaagtaaaaaacataagttttatcttgaaccattaataaaatcttcagcagatctacaaagtagaatatataatataaccgaaggtggatttcttggtggttattatcatggtggtaaccagagacaacgggactatgtcatactgcacacaacgtatttattttcacggttttttgcttga

SEQ ID NO: 78194 - DNA, 669 bp, Citrobacter koseri
atgaaactgctgctattcacaatgttggcgtttatattgatagcagtcaacaacacttctactgcatccagagctacgcctttcgtagtgcgttacgaccgctatctgctggtcagcacgtcgccgcaacagccgccactcgaacagcttaccgccctgtccgttccgcccggttttcacccgacggtcggggaagcgctgcagtacctgctacgcgacagcggctggagcctgtgtcttgccgatgcgcgccgggcgcagctttatagcctcccgttaccgctgagccagtatcacaccggcccgctgcgcctgaatgccgccctgcaactgctggcgggcccggcgtggcggatgacctccgacgaaaaccaccgcgaagtctgtttcgccagcaaccataccctccccccgacggtggcttaccgtcatcccgtgtccctccgccctttggggccgttaacggccccgttttttctcgccggaaccgtacagcgtggtgatatccacctggccgtaattgtgccgcccgaagccgtttacctccatcaggtggtgtggctgcgcaggggagagcagtggcatggctggcggctggagcggtttgatgagtaccgggcggtattccgccacggtaaacgccagctaacgctgaaagtaccggagtaa

SEQ ID NO: 78195 - DNA, 453 bp, Citrobacter koseri
atgagacaagagcgggcggaactggttattgctttgcaatcgcatccatcgggaaatgacattgtgatgctgctggaaaaaggggcaactcgcgtatttatggccaacaggctcctgcagaaactgttcatcgccctggcctatacgctggtgagttttatgcagcgcctgatatggctttccgctatgctccccctgcttttcctgtgtgttgtaatcgggctaaccgaagggctggtgcggcgggatctgaggcgctttggctccgggctggaatctacattccttcaccgttatgtcatcaggtccggcagttcggtcgccacaacgctttgggtgtgttatctggcgcagccgctgtttctgcctgcaatgctgattttactgcctatcaacttatggttcgggataacagtatggatggtagctgggagttttaaacgctggctataa

SEQ ID NO: 78196 - DNA, 1644 bp, Citrobacter koseri
atggcaaatgacatcgagaaattcaaatcagcttctattcaagactcttggaaatatatttgccaacttcgcgttcaacttcataaaaataaagcaagcttagtattaggcgctggaattagttgggatcttgacttacctctttggggagagttaattaatagaattaaaacttcaatacaagataaagctcctgaagtgaatactgtgaatgacgcaccaggcaaagctgcgcttgttttatttgaaatgtttttttcatataggaaaaaagaaataaaacaaacgaatcaatattcaagcgatgttttaattgaaaggaaagtcttagctgattggcgggaaatcatccatcaagcgctctatcaagagactaatactcacaagagaaaagatactcttaataatcatccttatttcattgaaatgatagagttcattaaacactcagaactcacagtaaattataactttgatgattatatcgaatacggtttatcgtgtgaagaactaaatccaacacgacatgaacgaccttatcaaacagtttggtcacatcattctcagtttacaaaagacaaatgtgtcatataccaccctaacggttttttaccattagataagaaaaaatttcagagcgaggagttaatattctctgatggtgcctttgctgatcaactactcgatggcataggtgggaatttatctacattgcttcacgtcctgacaaagaaaacgagtgtattgattggtcattccttaactgattcgactcttttacatttactccgtaaatctagctccattagcccaggaaattataactactatataaaatatatagatgaaagttcagaagtgttggatccaaaaagtaaatcggcgatttttgaagcgaatttcaataattataatttaatcactttgttttttaccaatgaagaaattaaatattttttgaaagctattacgatgcctgaaacagattttctgcggatatctgatattttaggacttcccacgaaatacaattattatcttgtgggggccattggtaccggaaaatctacaatagttagtcagtttggtaacttaattacacttgatgagtggttcgatgagcgaccaagtgatatggctctttcaccagaccatctttcttcaacaaaaaccatgacaatagactcatggaccaatgaacagtttggtaagaaaaataattatttgcaaaataaaaaaataggtatctatcttattgatagatcacctttagatccactttcatttgtggtaaatatttctgaaaaagaaagagccaagcttatgttagaacaaggcattaggccagggaaatcaaaaatggaaattgcatctggggaaatcatacatatggttggtgactcagatgaaatttggtcaagattaataacaaaaagaaaggaaagtgactggcctcaacagaaaattaatgaattgcaacaaaaaagtttgaaaatttacggacctctcaaaccgaaattaatacattcaactaacagaaaagaaaatgatgtaattcgtgatgttgcgagaataatattttcatcttcatattcaccatccgacctaaatagacacatggaggatattgcaaatgaaaaataa

SEQ ID NO: 78197 - DNA, 429 bp, Citrobacter koseri
atgaaaaataagagaaccatctatttggcagcaccattatttaatgaggctgagttatcctataaccaagcattgaaggaatgcttagagcctgcatttaatgttttcttacctcaagaagatggactcttgttaagagatattgttacagataacatcccacctaatattgctgaaaaaaaggtttttgaagcagatataatggcaatgaataatgctgatataattctagttgtacttaatggagcacatatcgatgaaggtgttgcttttgaattgggatattgttttgccattggtaaacgttgcattggtttaaaagaagacatacgacaggcgttaccaacgggaaacaacccaatgattagccaaagttgtgaaagaatatttgataacaaaaattctttattatcatggattatgccatag

SEQ ID NO: 78198 - DNA, 564 bp, Citrobacter koseri
ttgagcaaggaatacgccgagtttagcattgacgctttgattgaatcaaagacgcttgaatctatcccttttgttagcactgtggttggaatatacaaagttgccagttctgtaaggagtcagctatttactgaaaagattattcgtttcctcactcacttctcagacctacccgacgctgaacggattcatatgactgaacggttgaatgaaaacgataagtttgctggcaaggcaggtgcaagactgattgagatcatcgaccggatggaaagcgaaaacaagcctgaagttgcggcagaatttctcaagtcattcgcacgggaagaaatagattttaatgttcttcggcgtttgctgattgctcttgaacgtattccctcatttgatatcagagaactggcgtcttttgttgctattgaccctgaccaaccagtggaaatggatgaagcctttttagatagtctggttaatgctgggttgggaaagagcaatggagcatggaaaagtgtaattgtccctacggagttatgcatagcctttgtgcgcgcgggaaggttataa

SEQ ID NO: 78199 - DNA, 309 bp, Citrobacter koseri
atgcgccatagctcaatattcctgttactggttttttccatagggccgcaggcctgggcctccccggaatccacccaactcgccctcgcgctgaagcaactcgacggcgttaaaacctcactggcgcgtgcccaaaccagcgccagcacagacccgcagtcacgctacttcttcgactacttacaggcgcagcaggacatcactgccgttgaacagggcattcgccactaccttaccccggcaagggcacaacctcgcgcagtccaacccctgagcgccagttaccagcgggagaaacccgatgactga

SEQ ID NO: 78200 - DNA, 666 bp, Citrobacter koseri
atgactgagcaaatcaagaaaatatactgtaataattgtgcctgtgaaactaggcattcaatccttttttataaggaaaaaagagatgtagaggaagtcgaaaatcaagtaatttggtatgaagataataattattatttctctgaatgtttgggttgtgagagcataactttacatattgaatccacttatagtggcctgaatgatgaagttgtagtcacgcaattcccaccaaaaataataagaaaagaacccaagtggctataccgcattgatggtgatggaattttttttgaggactccgataaagttgaagtattcagggagatttacattgcattaaaaaataacatgcctcgattagctattatgggcgtcagagcattactagaaatcgtaatgattgaaagcattggcgatcaaggttcatttgtgaagaatctgttaaaattaaaagatgatggctatatatccaactatcagtttgaagccataaacaaagtcatagaagccgggcatgcaagcatgcacagaagatacaaagcctcttatgaggaaatttcaagtataatggatataacagagaatattattgaatctatttatattaacaagttaaacataacaaaacttaatatcccccctagagtcaaaaaagacaaatag

SEQ ID NO: 78201 - DNA, 672 bp, Citrobacter koseri
atgcaaaagggaagttctaatttaaaagatactatgcgagtttattatctcactagtgcggaatacgcgattagtaatcttgctctcaaaagaattaaggtttcgagatatcaagatcttaatgatccatttgaattgcttgctgctgacttaagcgataaaaccgttagaaggcaattacgaaaaattaagaaaaaaattgcggacgaacaaggcattatttgttttagtacaacttggaataatcctcttctatggggacattatgctgataagcatagaggaatagcactcggctttgatattccaaaatcgatgctgcaaaaggtagagtatgaaaaagacttgtccaagataacactagagaagtgttctgatgaaagttatattaaagaattatcgttgacaaaatttgagcattggagttatgaagatgaatatcggctgcatattaacctaaatcttgaaaatgaagattcaggattgtattttaaacatttctctaatgaaattgatttgaaagaagttattcttggtgttaaatgtactgtaccgatatcatctatgcgtaaatttttcgaagaaaagaacgaggaagtgaaagttattaaatcgagaatcgcatataaagattttaaaatagttgagaataggcttgcaacaagaaaataa

SEQ ID NO: 78202 - DNA, 321 bp, Citrobacter koseri
atgaatacaagtaaccattacaacgatattttttgccgtcgcctgaagcaggcgcgactggcaagtgggctttctcaaaaacgactggggatcgctgcgggaattgatgaatttgtcgccagtacgcgcattaataggtatgaaaaaggcgtacatgagccgggaacggagattgtgcagaaactggctgaggttctgcgagtgccattggcttacttttatgctgaagatgatgatttggcggagttgatgttgattttcctgcaaatgaataagcatgagcgagaggatatattgaaatatgcaaaagggaagttctaa

SEQ ID NO: 78203 - DNA, 345 bp, Citrobacter koseri
atgcaaaaacgacttagacaacgggatgttttcatccgtcgattaaaagaagcccgacagcgcttagacatttctcagactgctgtggggattgctgcggctgtagatccttctgttgcaagcacccgtttcaatcgctacgagaaaggtgttcatgagccggatatggaaaccgctgcacggatagctgatgtgctgaatgttcccctaccatggttgttcacttcggatgagaatcttgctgaactgattctcaactttgctgccctctctcctgacgcgcaactccagttactcgaaacgtcccgccagatggtaggtatctcctctgaagatgatgcttaa

SEQ ID NO: 78204 - DNA, 873 bp, Citrobacter koseri
atgatttctccagaaatgctgcaatccgccatctctaacgtctctgtctggcgtcagggtgacgtatgcgcgccgcataaaccgctgctgctgttgtacgtactgtcgcagtacaaagcaggccatccacgcctgtttaactacggtctggaaatccacgaaccgcttactcgcctgctgaaagagtttggtcccaagcgacgcaccgattaccccaatatgccgttctggcggctgcgaactgacggcttctgggagatcgctcacgcagaaggctgcaaaccgcgtaagggcaatactcagccgacaaagaaagaactgattgataaccaggtggcgggcggcttcgatgaggcggcttaccaacaattgctggcacatccagagatgatcgaccaactggctcagaagatcctcaccgatcgcttcccggaaagtattcagcggatcctggccaaccaactgggattcgattttatcgatcgctccaggaaccgcgatccgcgtttcagggatatcgttcttcgcgcttaccactcacggtgcgcgttctgtggttacgatctcaggctcgatggcgcgctggttggtattgaagcagcgcatattcactggaaagcatatgggggtccgtgcgtggtaaacaatggcctggcgctctgtacattacaccatgacgcgtttgatatgggggcgttcgggctggatgagagtatgaccatccgcatctccggcggcgtcagtcgtagtccggtggtagaccatctgttctggcaccgggacggccagcagttattcctcccttatgacaaaacgcagtggcctgctgaacagtatgtcggctggcaccgtaaacagattttcaaagcctga

SEQ ID NO: 78205 - DNA, 207 bp, Citrobacter koseri
atggaacgcttcttccggagcctgaagaatgagtgggtaccagtgcctggttacataagcttcggcgatgcagctcacgcaataacggactatatcgttaggtattacagcgcgctcgggccacacgagtataacggtgggttaccaccaaacgaatcggaaaaccgatactggaaaaactctaaaacggtggccagttttagttga

SEQ ID NO: 78206 - DNA, 123 bp, Citrobacter koseri
atgtcgcaacatgtgtcgttcgtaagcccctcccatactcaccatcgccgcgtactttttgctgatctgatgaagtatgaagagttacgtgataagaaagccatgcatgtagtggtcaactaa

SEQ ID NO: 78207 - DNA, 540 bp, Citrobacter koseri
gtggctactgttgtaagtgttaaagcaacttaccaaccgttacttgcccccgaagtaattgatcaacttgcccagcaggtcctgataggtcacttcccggaaagtattcagcggatcctggccaaccaactgggattcgattttatcgatcgctccaggaaccgcgatccgcgtttcagggatatcgttcttcgcgcttaccactcacggtgcgcgttctgtggttacgatctcagactcgatggcgcgctggttggtattgaagcggcgcatattcactggaaagcgtacggtggtccgtgcgtggtaaacaatggcctggcgctctgtacgttgcaccacgatgcgtttgatatgggggcattcgggctggatgagagtatgaccatccgcatctccggcggcgtcagtcgtagtccggtggtagaccatctgttctggcaccgggacagccagcagttattcctcccttatgacaaaacgcagtggcctgctgaacagtatgttggctggcaccgtaaacagattttcaaagcctga

SEQ ID NO: 78208 - DNA, 201 bp, Citrobacter koseri
atgaaccaacaagatataaacgcattgaagaattttgattttctggcgcgcagttttgcccgtatgcacgccctgggccagccagtggatatcaatgccgtgaccggcaatatgagtgatgaacagcaagcatggttccgggagcgatacgaccactaccgaaagcaggctgagcgggcgcgagtgatagaactgcggtga

SEQ ID NO: 78209 - DNA, 915 bp, Citrobacter koseri
atggtgccacttaagaagaaagatccggatggttccgttatgttgcagaataaacaaggacagttttcgttcggtactccatcgttagataccatcctggcgaaccggatcatatttatcggtgaatcaatacacggcattgcagaattcagtcagtttaaaaaagagcttataaaacacattaatgggcgaaactggatcgtgttgttcgaagcggatgcaccgggaatgaagctatcgcagctacgcggggatactgaggaacaatttcttgataattttccccgcattatgcagacgttccagacaagagaattgattgcgctggctcagaaacagggttttccctgcctgggcattgatgttattccccgccgtagtgatgctgattttccacaggactggaaagccgacagatcgtcgtttatccaccactacattacggcgcgtaagtctgataattggttatcgtggaggtcggcaaaaatggcgcaatatatcagagagatagccagtcaccacccttcctcacagttactggttttcctgcataatatgcatatcaaacgtgatggccgaagtgagcggtcagaactgaggctgatgtctgcacgggagcaccttgataaggattttgcaggccagatgtatagtattgcgcagtttgcccgtgctggcagggcatgccataacgatctaacagccttcgatttcgaaattaacgatccgcaggctattgaaacgctaattgatcctcaaagcagcggttggcgactgtttaaatgcgaaaatctggttcagatgaaagtggcttatcaccatgcctttgagagggaagccattgatatcaggcggcaatatgagtacgcggtgctgtatggtcgggtaacccctcctgagtttataaaaaagtga

SEQ ID NO: 78210 - DNA, 267 bp, Citrobacter koseri
atgctccttataatatcattcatggttcggattcatatatacctctattttttagcgttaatttcaatggaactaagtttgggatctatgaagagaagtatagatattacacagatgtcgatgagttttactggacgtctcaaatcgttctttgcatccttgatgataataatcttgaggtatggaagtataaagaaagattttctgtccttaatgacctttttgataatgttaggtataagcaatcagggattgaagatattttaa

SEQ ID NO: 78211 - DNA, 501 bp, Citrobacter koseri
atggaaatcttttcgtgggcaaatttcggaaatgttctaacttggttgtcagtatttgcatcgatcgttggtggcatatacacaatcttggtatatatcagagtggcagatatagaaaataaatatctcgttaaagttagacttcctgaactgatttcaaagcttcaggatcaaaataaagatttaccaaaacttctttctgaatttgaacaagacaatactagtaataagaaaaaaagcgcagtatccgcttctgttcattcaacaataataatattggaagatgttaaacggaagttggaacttgataaaaatcagtttaaatattcaagccctccaatatcaaaatggttactttcagtaacagatgaaaaattatctagaatgcttagctccagacatctcgacattgaaggattatggggaatccaatcagagttaagcagtgtaattatgcacttagaacaaataaatttagatttaggatggacgagatcatga

SEQ ID NO: 78212 - DNA, 1677 bp, Citrobacter koseri
atggcactaacagatcgcgctatagtccacgccaagccttgtggcaagccgtataagctcagtgactcgcatggactttacctgctggttaaccctaacggttcaaaacgctggtacatcaagtaccgctttggaaataaagagaaaaagctcgctttaggaccttatccgcttctgacgcttgcacaggcaagacgcatgcgtgaagaggcccaattactgctgatttccggcatcgatccgagtgcacaccgaaaggctgaacgccttgctgtaacgccggaacatacgtttgagtccgtagcacgcgaatgggtctccagcaacgtgaactggtcggcggaacataagaagcgggtgctgcgttatttcgagctttacgtattccccacgaacggcagttgcgacatcaccaaaatgaaggttaaagacctgctggtacccatcaaggaggtggagaaagctggcaaactggatgtcgcttctcgtctccagcagcgtaccgcctgcgtgatgcgctacgccgtccagaacggcattatcgatcataaccctgcatcggatttaaccggcgcggtctccacgcccaaagtgcgtcaccaccctgcattagatttgaatctaatccctgatttcctggaaagagtcgacgactttaaaggccgtcaactgactcaactggcggtaaagctggcgttactgctattcatccgctccagcgaactgcgctttgcccgctgggatgagattgatctgcgtaacgccatgtggacaatccccgccgagcgtgagccgatccccggcgttaaatattcagcgcgtggggcgaagatgcactccccacacttggtcccattgtcgcgtcaggccatcgaactgctgcacgaggtgcggcagcgttgccgaccgggaactgaactggtattccccggcgatcataactaccgcaaaccgatgagcgaaaacaccatcaacaaagcgctgcgggtgatgggctacgacacccagaaagacgtctgcggccacggttttcgcactatggcctgtagcgcgctggtggagtcgggcctgtggtcaagcgacgcggtagagcgccagatgagccatcaggagcgcaagcgcgtgcgggcggcgtatatccacaaggcgcagcatctcgaagaacgtcgggagatgatgcagtggtgggcggattatctggatgcaaaccggttcaggcatgttatgccgtatggcttcaaaaagtcgccgggaggcgcactcgaccatatgagtttccaggagcgcaatgaccggcagctagaggagctgaaagccagaatactggctgactcggaatggctgacggcgtctgaattatccgcaaaagcgggctttcgttccgccgatcctgatgctggcccgaaaggctggaaagccgccgggaagatattctcgctgaaggtcgatggtgaggatttgtacccggattatgttctggatgagaaaatgaggcccctcaaggttgtcaggctgattctctcgctgttcaaagaacgtaagaccccgtgggggctagcaatctggttcggctcggcaaatcgcaggttgagaggagggaagccgaaagatttgctgatttcgaagtcagagttggttctgatggcggcgcaggatgaggtggagtcgggggagtag

SEQ ID NO: 78213 - DNA, 276 bp, Citrobacter koseri
atggaagtttactggacgcgtaaagctcaggatgacctggagcgtatctaccgttttgcccttcagtacagccgccagcacgccgatgacgttttggatcgcctgattattggttgtgctggtcttacagcgcatccggcaattggcgtacagcagactcggtatgaacctcgtgaggtccgaaaagtattattcgatgattacgaggttcactacgaacttcgcgataatgacatctatatcgtggatctctggcataccaaagaagaacgatga

SEQ ID NO: 78214 - DNA, 357 bp, Citrobacter koseri
atgaaaaacaccaaaaaccatgatattgccgaaccctggtggggatttaaacccaccgtcgcgccgtgctttggcgcacgactggtgcaggaaggcaaccggctgcattatctggctgaccggtccagtatcaccggaacatttagtgatgcggatttacgccatctcgaccagtcgtttcctcttctgctgaagcagatggagctgatgcttaccaccggtgagctgactccatgccatcagcattgtgtcacgctatatgcgaagggattgacctgtgaggccgattcgctcggctcgcaaggctacatctatatcgcgatttatccaacaccaggcaacagcgtaacccgttaa

SEQ ID NO: 78215 - DNA, 297 bp, Citrobacter koseri
atgcagcacatccccgatggcgtgatacaggtcacgtcatacccgttttccctgagccgccaggctgattgccgctccatctccgatgacgacctgtgcgcctggtgttcacaccttctttatcgcaccggtgaactcagcctgtgcagcttaagcatccctgaagggctctggccctcgcgatgtgatgacgatggctatgtgcagttctgtccgtcacttcgtcacaacaacccatatgaaaatacaaaggaagctaatgaacaacatactcaccctgaccagcccggtaactga

SEQ ID NO: 78216 - DNA, 819 bp, Citrobacter koseri
atgcgtttagccagccgctttggcgcggtgaacctggttcgccgtgaccgccccctgacccgtaatgaactggcacactatgtgcccagcgtgttcagcgaggaaaaacatgaatcacgctcagaacgttacacatacattcccaccatcaccctgcttgataatctgcagcgggaaggctttcagccattctttgcctgccagacccgcgtacgtaatcccgataagcgcgaacacacgaagcatatgcttcgcctgcgccgtgaaggccagattaccggtcagcaggtgccggaaattatcctcctcaacagccatgacggctccagttcatatcagatgcttcccggcctgtttcgctttgtctgtcagaacggacttgtgtgtggcgaaacctttggtgaggtgcgtgtgccgcataaaggcaacgtagtggagaaggtgattgaaggggcttacgaagtgctgggcgtatttgaccgcgtggaagagaaacgcgacgccatgcagtcgctgatattacctccaccagcgcagcaggcgtttgccagagccgcgctgacataccgctttggtgaagatcaccagccggtaacggaatcgcagatactctctccacgccgctggcaggacgaaagcaacgacctgtggaccacttaccagcgtattcaggaaaacctgattaaaggcggcttgtcgggacgaacgaccaaaggaaagcacacccatactcgtgcggttaaaggtatcgacggtgacgtgaagcttaaccgcgccctgtgggtgatggcagaaagcctgctggagagcctgaagtaa

SEQ ID NO: 78217 - DNA, 342 bp, Citrobacter koseri
atgaaaagtatattactcgccgcattactcggcctggtttcgtattctgctgtggcagctgaagcaccttttacagtaagtgccggtcccagcaacgcaggagcactttacagcaaggtctatatcacgtcccggtcagattcggtggtgataaagaaaattctcgttaaccgtggcaactgccaggatgcggaagccatgccctggaaaccagtcaggctgggattcggtaattcagtggaccggctgttcgtcggtaaagggtttatgtcggcctgcagaatactggaaattgcagtagatactgaccagggctcctggtcctttaataccagccagtaa

SEQ ID NO: 78218 - DNA, 465 bp, Citrobacter koseri
atgaaaaaagtacttttaattacaacgctggtaactgctgctctgatacctggtgcctctcaggcttctggcaaccgtgatgcctgggtcagcggctatgcgcagggcactgcggaatacaccatcttgggcaaagggcagtcacaactttacctggcctgcgacagctacggtgacaaacctgaaacgctcatttttactgatgaatccggacggcaggtcagtacggacagtcatcagcgcatcatggtgaaaattgacggggaagaagccgctgacgtcagtgaaacagcaagtcatgtaggggcggataattttgcctggatgtgggacaaactgcgcacaggtaaacaggtcactgtctccggcgatggcgtgaagcctgccacctttaccttgaaaggcgcgggcaaatctttacctgcatataaagattcttcctgtgtggctgagttcgcacgctga

SEQ ID NO: 78219 - DNA, 255 bp, Citrobacter koseri
atgccattcattcttctgtggggcggactggccctgctaccggagtttattgcgtccggtaccagcctttcattccggtgctggtttattactgggctgattatcgacccgatacttgccggactgttgtacttgttatcgtctgcgaccgtgcatgaaaacccttctgcgaatgcccggaaaagcgccccgctggttcaactatctcatcaactttatagcctgcctgctgttcattacctccactcctggtga

SEQ ID NO: 78220 - DNA, 888 bp, Citrobacter koseri
atgaaaaaaccttccggttatgcccttattcgacgccatctcaggcgctacccacgctcactacgccagcatttaattaaggaacttaaccagctcgtcatgtatgaacctgtaattggcattatggggaagactggcgtcggcaaatcttcgctctgcaacgccctgttccgcagtgaaatttgcgccgtcaatgctgtggaagcctgcacccgacagcctcagcgtgtgcggctacgctttggcaaccactatctcacactggtcgatttgcccggggtgggcgagagtcaggcccgggacggtgaatatcgtgagctttaccgtgaactgttgccgcagctcgatatggtgctgtgggtgctcaaagccgatgaccgggcttatgcggttgaagagcagtttcataaggacgtattcgcgcagtactgcggaccgctgccgccggtgttatgggtactcaatcaggtggacaaaactgaacctgctgagcaatggaactggccctccgctcaaccatcggcactgcaggctgaacgtattacacaaaaggtacaagtcgtcgcccggcagttaaatatcactgaagccggtattctgccggtctcggtccgggggcgttaccggttggcacgtctggtggaggcgatgataacccggctcccaaagcaggcccgcagtccgctggttccccacctgcagtccggttatcgcacggaagctgtcgtcagcactgcccgcagcagtttcggtgatgccgtggtggatgccattgataaggttatcgggctgacccctttaccgcagctggcccgcgcggcactgcaggccgtcacccataccgtcgcccgtgcggcccgttctctctggggatttttctttggttaa

SEQ ID NO: 78221 - DNA, 1179 bp, Citrobacter koseri
atgagtatgtgggatgactttcgggtatttgacttacgacgtgaagatcgggcttatgagaaaccccagaaaaactggggagaggtagacgcacagtacagtttttttcttttttcaggaaaaaaacttccctgcgaaatccatgaccttcttactttgatgtacaaagagcaggcagtcagtggtaacagagagtttgccaaacctcatgcccgtttccgtgacaaaaaagaaataaagagtgaacaaataaaaaataagaacaaaaaactactggcttcatccattaatgataaggaacaggcacttacgtatctgatcacgcattaccatgagatggataaaaaatctcgcccgattgaaatgcttacgcttgctttctgtctgcctgacaactggcagggtgaggaaaaaatacgcgccaagataaaacaatatgagctcttcccccaggcacttaacgagctgagacggcgttttacgatattaaagaaaaaaatcatatcagatcgcctgtacgcagttgcttgtgggtattcaagactcattttaatcaacgataagtttgaaccttattatcttgtgaatttctttttcagaaaaaataaagataatattgttgacggtaatatctcattggatatttatgataaatggattgattcaggagataagaaaaatcgtcagcatgaaagagtttattattgtctttttgaaaatgcctcccgtcctgagattgaaaataatgacaggttgtttgttttgtcgtcacaggcttttctggagtcatgtcgagcagttccggatgatatcactttaattataacaaaaaatactaatgggttttctgaggaaaataatcgcaaaggttatctaagatttattcgccttcagtctcaaatatataacactatccctagtgttcgcagcctttcacgctcggctgagtttacctacctaaatgcggagagaagggaaaaaagaaagttaaaaaagaatgcgaaaaaaccccggttacaaaatcaacgtgacaagccgaaaaatagcatattacctggggaagtatcggctaaacataataaaaatccttctctggaaagtggtgatgttttatttgatgaaataattccttccaatatagaagaacatctccggcatctgaaaaagcattcattttaa

SEQ ID NO: 78222 - DNA, 576 bp, Citrobacter koseri
atgctccacaataccaaccgaaaccacgtacctgacaatactctacagaacgtattattcgatcatcagaaggagttattcgaacggttttcaaaactactcatgttacgtattgattttgcctatcgtaaagacagcgagtcgtttaaatctgctgatgttaatcaaatggtcgcggatatgatctggttaactgagcaaagcgcatatatatcagggctggtaggttatgcctgggtactggaatatggagaagatcaccgttaccacatccatgctgcgttttatattaatggtcaacgtcacaggaaggtctgggttttttgggaagcgataaaagcactatgggaggacataacggatgaagaaggctatgcgcataggtgtgagcctaaggggcattaccgtgtgcggggagagcgcgtggtgagttttaccgacagtaaaggacgagaaggaatggaatttattctgagctacttggggaaacagtcccaacgcacagcgcaccggatctacagagtcagcattgtcccgacaccagtagtcagtggcaggcggcgtaagctgagctga

SEQ ID NO: 78223 - DNA, 207 bp, Citrobacter koseri
atgaccacacccaccagccttctcaacgataagttcgtcgatatggaatttatcactaagctcaccggcttaacggacaaatatttctataagctcattaaagacggcaggttcccaaagcagattaagttgggcagaagctcccgctggcttgaaagcgaagtggaagcctggctgcagcaacgtatcactgactccaggagctga

SEQ ID NO: 78224 - DNA, 465 bp, Citrobacter koseri
atgagtgattgctggcaatccggtaataccaccaacggtgataaagaacaggttgtacgccccactcaggcggttctgtcagtccagacgggagatgtggtcattagcctgattcatggtaaggccgctatcgtcagcccaaagcatgctgggcgtctgctcagtaataactatgttagggtcgaagttgacaggcagaaggttattcctgcgtggtttgtctggcacttcaatgaaagcagggaaagccgccgccagcaggttatggcaacgcagggatcaacgtttgtattgcgtttgtctcttactgaggtacgtcagtttactgcaacgctgcctcctcttaataagcagaaggcaatcggtgggctttatctgtcaaccattgaaaaacgccattaccaggagcgcctggccgcactaaacgaacaacagatcctgagccagctcagtgatatgatttag

SEQ ID NO: 78225 - DNA, 1608 bp, Citrobacter koseri
atgtcgccccagattgaagcacagaatttaagtgaactgcaaagccgcctttggaatattgcagataccctgcgtggcaagatgaatgccgatgaatttcgtgactattgccttggtttcatcttttacaagtatctttccgagaagtttgtcacttatgccaacaacatcttgaaagaagacgggattaagtataacgaactgaccgctgatcatccggcttatcaggacatcattgatgcggtaaaagacgacagcattcagacgcttggttactttctgcctccaactgacctgttccacaccatggctcagcgtgtcgcgaaagatcagaaaggtgctggagaaggttttatcttggaagatcttgctactaccctgcgtaatattgagcaaagtaccttgggcactgactctgctgatgacttcagtaacctgtttgaagatctggatttaggctccagcaaattgggtaagactgccaaatctaaaaatgagctgattggtaaggttatcaccgaactcgacaaactaagttttaacctgagcgaagccagttctgacattctgggcgatgcttacgagtatcttattggtcagtttgcatccggtgcaggtaagaaagcgggtgagttctatacaccacagccggtttccacattgctggcgaaaattgttaccacacataagctgaaactgaaaaacgtctatgatccgacatgtggctctggttctttgttactgcgtgtgaaacgtgaagcctcttcggtgggtaaaatctacggtcaggagatgaaccgtaccacctacaacttggcgcgtatgaacatgatcctgcacggggttcactatgcggattttgaaatcattcaggaagatacgctagagcatccgcagcacacgcatctgaagtttgatgccattgtcgccaacccaccgttctctgctaaatggagtgctagtccgctgtttatgaacgatgaccgctttgcacagttcggcaaactagctccgtccagcaaagcagatatggcgtttgtgcagcacatgttccaccatctggaagatgatggcaccatggccgtggttctgccgcacggtgtattgtttcgtggtgcggcggaagggcatatccgtcagtttatgattgagaagctgaactgcattgatgcggtaatcgggttacctgccaatatattctacggcaccagtatcccgacttgcgtgttggtattgcgcaagtgccgtaagcacaacgaaagcattctgtttatcgacgctagtaacgagttcgaaaaggtgaaaactcaaaatcgtttactaccggaaaatatcgacaagattgcagatacctacaacgactggaaagcgatcgataaatacagccatctcgcgacgctagaagagatccgtaacaacgattacaacctcaatatcccgcgctatgtcgatacttttgaatcggaagatgagattgacctcaatgcagtggctcaggaaattcgcgttctggaagagaaagtggtagagattgataagaccattgctgagttttgtaaggaactgggaattgatgtgccgtttactctggctaagggggataaatga

SEQ ID NO: 78226 - DNA, 447 bp, Citrobacter koseri
atgattcagtcactaggtacaattatgagttcgtctgctgccgtaaccgttctgaccggcgtaaccgtttttgttgttggtcaactcatcgcaaaaagattcattgagccttatatatcattcagagaacaattagggaggattacagcgtttttattacgtgagcaagcgacgatcacaaatttcagagctaatcatgaaaccatccacgatttgaaagatgctgcttctcagttaatggcaaagtatgcagccttgcctagtagcctaaaaagaagctatgtaggtataaagtttgtaccatcaaaggctgaagttcttagcgcagcacaaaaccttaatgagattacctcaatacttgctggcaacagtaagggaaatacctacaatctcataaaggagattggactcaagctcaatataccaactacttattcttctcattaa

SEQ ID NO: 78227 - DNA, 828 bp, Citrobacter koseri
atgattaatacaactgaagatatcatcgatatgacctcgttgattgaagatttattaaaaagcaaaggagccactggtagtggtttgaaggatttaaggttatcaattaaggataaactttcggcagaatgccataaccacttaaaatatataggacatattcgtaatcaagtagcacatgaaagatataaacccactgtcaaagagtatgctaatcttaatgaattatataaaaagttacttgatgaattgaagccaaaagatttcgaaagtaccgaccatataaatcttgaagacgcaaaggataaattaatatttaataacgaaaactttaaaaatatttatgatattacttgtcaaatttattcctctaaagcttcgtacatgactgcagaaaaaaaattagcagaagtgaataataatgatgtaattaaaaaatataaagaatgcacttttgaaatagatgatttggcaaaagaatattgcaaatttaagggctgggctattgtacgtattaatggcgaaaaaaccaaactctcatatgatgtggttactcttcttctcgaaagagaaaggcttattaagtggctacaaaaatccaggacggatataatagaagaatcaatacaaagagagagtatgatagcacagtttccgccatatttattgtcttatctatcgggtactgacagtaatgaacttgataagacgatatttgatattaataaaaaatttgagaaagatgacagcattaacattacaaatgctgatattgttgcaggtattttaacagtggcatttgggttatttatatctgtcataaagtaa

SEQ ID NO: 78228 - DNA, 237 bp, Citrobacter koseri
atggcagttatcagcaaaaaagaagaaaaaattaaggctacttgcgaatcgttgcaacccggattcacctttgaagaatttctggaagcttttaaaacgctttatccaaaagattgggataaagtggggagagaatatgcaaaacatgaacgtaaaacgaagccaggcaaaagccacccaatgccagaaccagtacagtacatgaaaaatgctttgaacgtgcatctgaagaagtaa

SEQ ID NO: 78229 - DNA, 657 bp, Citrobacter koseri
atgttcgtttttggttacctccgggcatcaacatcagagcaggatgccagtcgagcaaaaaatgcactgaaggcatttgtaaaccaacatggccaccgtattgctggctggtatatcgataatgtctccggtactacaatgaaccgtcctgaactgctcaggcttcttggtgatgctgaaccaggtgatgtcattctcattgaacaggtcgacaggcttacccgtctggatgatacaggctgggagacactcagaaagcaaatcaccgacaagcagctggccatcgtcagtcttgatctaccaaccagccatctggcgctatccagcacagtaagtgatgactttacccgaagcatgctgaaggccgtaaatggcatgatgctggatatgctcgccgctattgcccgaaaagactacgaggatcggcgacggcgccaggctgaaggtataagcaaagcaaaagcggagggcagatatcggggcagggtagccgatgcacagaaacatgaattgatacgcactctgcgtctggcccacggaaaatcactgcgtgaaacagcccgcctggctggcgtatcaaagatgacagttatccgggtctgcaatgctcagaacgtaaatcaagataactatagaggacatagtgatgacaaataa

SEQ ID NO: 78230 - DNA, 255 bp, Citrobacter koseri
atgacaaataaatcagagaccaacgggcgttacggttatcttttcgaagagccagtagatgaaagatctggtgatatctttatcgatttaggaaatctaccgccagagatgaagcagactattctcttgctcgtgaaaaaagcagctgaccgtgatgtggcggagaaggcgctgttcgacataatgaagcaaattgagtttgatgtaactgctgctgaattggcagcatatctttttaaaccaggtcacgcttaa

SEQ ID NO: 78231 - DNA, 252 bp, Citrobacter koseri
atgaagatggccttagcgttcgcgctggttatggtactgataggttgcgacccgaccgaaacgccagagaaccttgttactgactggtgtcagatctccgctttacgtcagcaatggcacctgtttgctattccggcagacaaactcttaggcagctttttcgacgccataaatgcctttgagtgcccgtttggtaattccggtttgccgcgtcacatgcatgatagttggtttcaaactcgtctggcttga

SEQ ID NO: 78232 - DNA, 963 bp, Citrobacter koseri
atgatgaaagcagcagtttatgacgcggcgggagctcccggcgtcttgaggtatgccgacattcccgccccaaccgtcgggcctaacgacgtactgatttccgttgaggcgatctcaattgaaggtggcgacctgatcaaccgccgttcgactccgccacctcagtcttcttgggttgtcggatacgcggcggcgggcacagtggtggcgaccggatcgaatgtcacaagccgcagagtcggagatcgcgtcacggcgtttgacatgcagggctcgcatgcttcgctctgggctgtgccagcggggcgtacatggcgcatacccgatggagtggatgcaacagatgcggcggtattgccgatctcgttcgggacggcgcatcactgccttttcgcacgcggcggactcgcacgcggcgaaactgtcctcatccaggcggcagccggcggcgtgggccttgccgctgtccaacttgccgcgcaggccggtgccacggtcatcgccgtggccagtggaacgcagcggagcagccggctgattgaggtcggcgccaatcatgtcgtggatcgcactgcccatgacgtcgtggacgccgtccggcagatcacgcatggagctggcaccaatctcgtcgtcgatccggtgggtacgacgctgcagagttctcttgcttcgcttgctccagaaggtcgtcttattttcgtcggcaatgcaggtggcggcgatttggtcgtcgatctgtggccagccatgcaggccaaccagacgctttcgggcgtattcatgggaccgctttttgagacccctgcgatccgctcaaccgtggatgagctgttgcaagctgttgctgacggacgcatacgcaccatcattgaccgaatattccccctggcggaggctgctgcggcccatgcctatgcggaaacggccaagccgctgggccgcattgtcatgagaccgtga

SEQ ID NO: 78233 - DNA, 198 bp, Citrobacter koseri
atgatggcgtcgtcagacatttcatctgaggggatagaccgcatgcgcaaagcatatgccaatgatgttggcgttcttccgccaattgagattgcatcaataattgaggccggaggtttcgagccttccgtgcagttttttcaggccggattgattcatgcatggctgtcaaaacgcgtcccgaacaatttcgcctga

SEQ ID NO: 78234 - DNA, 390 bp, Citrobacter koseri
atgacaacacgcgaagcaattttcccctccggtcgacaggcgctctatgagcgcaaccggtattctccggccatcaaatccaacggactcttgtttgtttcggggcaggttggctgccgcgacgatggctcgcccgaacccgacctcaaagcgcaggtcaggctggcattcgataacctcaatgccgttcttacggcggcgggctgcacattcagcgatgtggttgacgtcaccctctttgtcgtcgatccggagtcgaacctcgacgctatctggagtgtccttccagaatactggggagaagcgccttatcccactttgaccggggttggcgtgacgtggctttacggattccagttcgagattaaggtcattgccaaactaccctaa

SEQ ID NO: 78235 - DNA, 939 bp, Citrobacter koseri
atggatcgtttcgatgcgatgcgcgcctttgctcgtgtggttgaggcaggtagcttcacaaaggctgcccaaacgcttcatatgagcaaaaccacggtgacgcagctcattcagcagttggaagcgcggctgcgcgtcaagttgctccatcgcaccacccgcaagctcagtgtaactcccgatggcgcggcctactacgagcgcgtcatccatctcttggcggacatggaggatgccgaaaccagcctgtccagtgcggtgactacgcccaaagggagactccgggtggatgtgcccagtccgctggcccgcctcgtcctggtgcccgcgctaccggccttccatgcactctacccggatattcagttcgacatgggcgtgagcgaccgggtggtggatctgatcagcgacaacgtggattgcgtcttgcgaggtggcgaaatcaacgacaactcattgatcgctcgccatgttggcgatttgcaaatcggtgcctacgccgcaccaagctatgtggaacgccttggtgcccctgcacatcccagagagctggaaaacactgaccaccgcatagtgggattcctgtcctcacgcaccggcaggattgatcctctggtgctgcactgtaagagtgaacgtattgaaatcaggagtagctatgtactcgcagtagatgatggcaatgcctacctcgaagcggggttggctgggttgggagtgattgcactgcccacctatatggcggcagcacatcaggcttgtggcgccttgattccgttatttgaacaatggcggttcaatccaatgccgctgtacttggcctttccaccgaaccgccatgtcagtgccaagctgcgagtttttattgattggatcattgagttgatgcagcagcatgctccgaatttcagcaatcagcaacgacatcccagcccctga

SEQ ID NO: 78236 - DNA, 531 bp, Citrobacter koseri
atgaataaaaagattgtttttttgttgctgtccgttgtctccagttcaggttttgccgcgagcacacccgtccctgctccttctgaggcttgccactttctttcagcaatgccctttattaaaaccccgtcaacctataaaccttactttgaaggtagcgaagaatattcatgtgggacaccctattttgaaatagaaacaccgggtagtggtgtcactatgaataacaatatcgcttactatgtgtctggtaacgatgctgaaataaagaaattgatgctcatggttaatatgaataatcaagaaccagatgcagttaaaattgccagaagttattttataaatggttcatttgagataatgaaaaagatgtttcctgattcccccggaaaagttgctgatattgtcagtttgctaagtgatggaaaagatggtgaatggggggtcgatgggtggaaggtgacttcggcgaaaaaagtctggccgacaggcagaggctatgagcttcgtttcactgtgacaacagactaa

SEQ ID NO: 78237 - DNA, 1284 bp, Citrobacter koseri
atgactaagtttcgtctgtctgctgcttccatatttcaccgcccacaaattctggtcgtgttgatgctgattttgctggccgtcttgacgttctggtatttccggatatctggaaaggagacgtcatcaccagcggagcagtatgagtgggtacaggtgcagccacagaagattgagcagcagttaggccttgttggccgtatccaggccgcgaggcaggaaacattgtccgccccttttgagggcacgattaccgatatggctgtgcatgaaggggagactgtgagggcggggcaagagcttgtccggctcgatcctggtcaggcagagatacagctgagacaggctcaggcagaactgcttaaagccaggcgggaggtccagcagtttcgcacctggagcagcagtcctgaagtttcccgcgctcgtcgggcagaacaggcggcacacgccactctggaaactacacaggcaaacttacgcgatacccgcgcattgtttgaaagggggatagtggcacgtatggaggttgatgcgcttattcagcaggtgcagacacagcagcaggatttgctcacagcgcgggaagaacgccgcgttattgaggcgaggggagaaggggaagaaagccggatcgccgaaatggaactaatgaatgcacaggtgcgttatcaggccctcagaacacaaagcgagaaacagatactaaaagcaccctttacaggactggtggtcaggtccgtcacaactgacggcggcaaaaccgcgattcccctgccgggtgagatggtaagtcagggagcgccgctgatgacaatcattggcctggatcgtattcaggtgctggcccaggttgatgaagctgaccttcacctgttgcgtgaaggcatgcaggtacaggtcaccggtgatggttttacagggcaggagctggcagggcgaatcatgtccattgctgtgcagagcaatgcgccggattcacctggcgttacggcaaattatgatgtggtggtgtccattgatacgccccgggcggcgtctgtttatccggtcaggctgggaatgagcgcccgggttgtgatcaccctctacagcaatgagcaggggattattgtccctccagaggcgttacagactgatgacgagggagatgtatgggtcatataccgggccactcctcatgcccggtcctccagaattcgtgttgagcccggccgggcagtttctgaaggaatagaaataaatgggatacaatccggttatattcagagaccagtgcgttaa

SEQ ID NO: 78238 - DNA, 1494 bp, Citrobacter koseri
atgaatagactgtattttcttttttcgcttctgcccgttattcctttttcgtccctggcatggtcagacactgcatcattgcagccatcgcaggcgatgccccgtcagggcctgcctgcctcgtccgtggcaacggcagtttcccttaatgaccggaccattgatctcacactgagtgacgccatttatcttgggctgcgggacaaccgttcaattcgcagtatgtatctcgatcgcatagcccagaaatttgacctgcgcgttgcagaagaccgtttcacgccgaaactgatgctgagtgccggttatatttctgaacgtaatcaggatgatcgctggcgccagggaaatataacccccacaacgacgctgctcacaccttatggcacgcgggtaagcctcggatgggcaggccgtcatacccggtcaagggacgcaggccgctccagtaatgacggggcgaacatttcagtgatccagccgctgttgcgtggtgcaggaaaagaaatagccaccgctccggttcgtatggcccggctgaatgagcagcttaaccggctgagtctgaagcttaccgtctccctgactgtcacaagaattattaccgcttaccgggagctgttacaggcacaggagcaggtaaaaatcgcaagggaatcccttgcccgctcccgccaactggtcggcgttaaccgggccatgatagcggccggccgcatggctgaatttgacatcgtgcagactgaggctgacgttgcgtctcaggaactcgctcttgaagacgcgcgcaatcagctggatgcaactcgtctggcgctgctgcagttgctggcacttgatctgaacacgcctgttgtggccagtgatgatcttcaggtccatcaggtggaagtgaatacacggcaggcattcctgcaggcggaagcgtctcagccggcatggctggcgcagcttattaccagtgagcaggctgccattgatcttgcggtggctggcaataaccgtctgtgggatgtgtccctcgtaggcggagccagccaggtgcacgatcgtagtgagcatggcggagcatcccgcacctgggataattatatcggagtgcaggtggaaataccggttggagacctgagtgcccggcaggcggaggtccaggcacaggtcaatgtgaaaaccagcgttttacggcagcaggaagccagtcagcagttggagcgcgatgtgacaaatgccgtccgtgatattgccacccgctggcggcaatatgaaatcgccctccgggtcagggatctctcccggcgtaagctggaaatcgaacgggaaaagctgacggtgggacgttccagtaactttcaggttctgagcttcgagaatgacctgagaaacgcagaatacgccagactgaatgccctgataacctacctgaatacccagactcagctggatcaaacgctgggtaccacactacagagctgggatattactttaaatgactaa

SEQ ID NO: 78239 - DNA, 1098 bp, Citrobacter koseri
atggctgttgtggctgtgctgaacatcggccataacgcccgaattcaggcaatgagcgtctttaaaggaatgggcagtgacctgtttgttgccggcgttcagttaccggcaggtgcaggaactaagacgactccttccattgttacgcttgatatgaatgcgttaaaccgggcaatacccggtatctcatcggcagcgccactgattccggtgaatatggagccacgactgaaagggaagactctgaacattacagtcctggggagcaatgccggactggctgacacgctggatctgcaactggagcaggggagattcctcagccgttatgacgcactgaacacctatgctgtggtgggggcgaacgtcgcaactgagtggcggaatgccggcgtgcagattgcgacaggcgacagaatacagctcggtggttatctttttgaaattatcgggatactgaaaaagaaaggacaaaacacgctgctgcccgtttcagcggatgactcaattctgctgcccattgaaggaatgcaccgcatcattcctcatccacagatttccgctgtccttgcacgctatcccggtcattatgaaccggagcagaacgcacggcgattccgtctgtggctgacgactcagtttcccggattcgacgtaaacgtgcagataccacagttgctgcttgacggaatggcgcggcagtcacgtctgttctccttgcttctcgccgggctgggggggatcgcgctcctctccggtgggatcggtgtgatgaacgtgatggtgatgaatatttccgagcgacgccgcgaaataggcgttcgtatggcgctgggcgccagaccggtggatatcgcctgtctgtttctgtctgaggctgttgtgctggcaacagccggggcgttcaccggtgcggtagccggtctgctggcatcctggttattcgttcattactccggatggccatcattttcactgtcagcgatctcattaccactgggtattggcagcgcgatgataacaggccttttttttggactatcgccggcgatcgctgcatcgcgtctttctcctgtgcaggccctgcgtgatgaatag

SEQ ID NO: 78240 - DNA, 717 bp, Citrobacter koseri
atgctgatgcctgccgcaccgcgttgccgtgacattgtccgtctggaaagtgtcacacgggtatatggctcgggcgcatccgggcagaccattctgcatgatgtatccctttccattcccgccggccagagttgtgccatcattggcccctccggttcgggaaaaagcaccctgctgaaccttaccggactgctcgataagcctacagccgggcagattttcctggatggtgcagacatgacgcaggcggcactacaagtctgcgcgcgagtgcgtaatcagcttatcggatttgtcttccagagtttcaatctcctgccgcggcttgatgcactggataatgtggctctgcctttactgtatcgcggagtatctcgccaggcagcccgtcaggccgcactggtgcagctcgaacatgtggggctggccagccgccgataccaccggcccgcagatttatccggtggccagcgccagcgcgtcgctattgcacgggctctggtgggggaacccgcgcttatactggcagacgaacccacagggaatctggacaggcagacggcacaggaaatcattactctgttgttaagattaaacagcagtaccggtaccacactggttatggtcactcacgacaatgatatcgccaggcggatggagcggtgcatacaggtgcatgacggccgggttgccggggtgcagcatgatgtgtcctga

SEQ ID NO: 78241 - DNA, 942 bp, Citrobacter koseri
atgatcattaatacttcaactaacgcgtacagccagatgcagaatacatcgggcgttgctgataaaaaagtcagcctccagcctgttcaggcgaacagcattcagaataacacttcatctgcttccgggcaggtcactctcagcggcagggggctgatgatgtccaggttattcggagattcgaacgctaaccctcccgttcagacgcagttgactaaagacactatggcgatgaagggcgttaattttctgacggaaagtgatcgaaatatgctgtctgatctgtatgcgaaagcgcagcaggatggggtggatctccgctatgtggacgatatagcacgggatatgggagattaccgtatgttcagcggcgtgatggcaaatcttaacaatggaaacttttatgatgataccgggcatcgcctgacttataaatttacagaagaagatacctccgtcgcaaaccgtatcctgaacggaaacggcaccgccagttctccgcttgactccggttttctgaagtatgagctcgaccctggtttttctcccacacaccgtgcacattttgattttctggaagaagtggtgaacaagtctggcagtggcgaacctttcgactccaggttctcttcgtatcaacaggtacgcaatgatcggtttgttgttgaaaccgacagtgaagtgactttgcagacagaagagcccgactggggaagtgttgatggtgtgttttatgttaccgaaaaagggatgaaaaatggtttccgcctggaaggcggaaaagtggtacaggacccggtggctgcactgcagaacccgtcagatctccctaaaacgctgctggattactttctgaaccgggaaaaagctgatgaacagactttcatctcgctgtttgattatctttcatccggtctctttgccatgacaggtaaggaatag

SEQ ID NO: 78242 - DNA, 468 bp, Citrobacter koseri
gtgaaaaagacactggtgtcgttatcccttctggcttcagttgcactggcttctttcccggccctggctgcaactggctcatttaccaaaacaagcacagcccccaatattactgtttattcaaacgggagtgcttcaacagccctgaccaattttatggtcaattcaactgatttcccgtcaggtgtactgagcaaagccaagacactgacgctggtaagatattctcttgcatcatatccggcggcaatcactgaaaatgttcagctatgctactaccgcccgtatactgcatccccggcaaaatgcatttctgtcactccaggttcatcttcaaccactaccgaatttaacagctacacctttaacaatggcgcacagcttcaggtccgccgcgacgtaaccggtgcaccgggtcagcttcagccgtcgcgtcaggaaagcgtcactattgaatatagctactga

SEQ ID NO: 78243 - DNA, 726 bp, Citrobacter koseri
ttgcaggattcgctattactgatggccgtgaagaggcagccgcaggctgagaaaaactggcaacgtatccgtatggcggaaaaaaaatcccggcggcttatcctgatatctcagttggctgcatggagtgatgctgcggaggtgcgcctgcaacatacattaccgctgggactgtttgccggtttcccggcattacaggtgccggaggacgtcatggggcgtctctcccgcagttatgcgcgcgagcttgccgactggcggcgtggcgaaaaagttattgtcatctgcgaagccgagccgcctgaaacgatctttacccgtcaggggggacgcaatataccgcacagcaccagtaaagtgattgatgttgcactgatgacggtcagcctacgctatataccgctcgattcccgttacgaggggatggttgaggagcgtttgtggcaggagaaacgagctttcatcaaaccgctgcgctatgacggagaggcggaggtattcccggattttgtattaacagatatacctggtgtcgacgcgctgccaatggaagttttcggtatgaaaacgcccggttacctgcagcgtaaactggaaaaaattaagcattacgaccaggaatatggaccgggtaaatggtggcagtggaatgcggcggactgtcctgatgcgcaggacattccgtcttttccagcgcgtaagtctgaaatatccggcgtcagttaa

SEQ ID NO: 78244 - DNA, 579 bp, Citrobacter koseri
atgaccaaaaaggatatttacccagtaaggtttgtggggctacgtggtagcacagactgtgatgcaaccttcagaactgagaacaacgagcggtggcagcgttggctcagatatgcccgcgccaataaagccactaccatagttacctgtctctgcctgccggcagaggatgaaccagtcaggcgccggatgaaggtaaaccgctcacagcgtacagaccagtgctggctttctacctactcgtatacggggcatgagcatgccccggattgccgatattactctgtctggccggatgaacgacaggctgctatctacactgctgatgtgctgaaaatcgcgactgatggaaccctcgtcgtacggttgcccactggccttcaaaagaaggagcagcagaataaaacatcagcagaaccgccagaaaaatcaggaaccagcagcagacgtcggcgtcatcctgcgatgcaattagcgggcctgcttcatctgctgtgggaacggtcaggaatcaatgtctggcacccggcctttgacaaaaaaaaaacggactccgggttgggtaagctggaaacttag

SEQ ID NO: 78245 - DNA, 882 bp, Citrobacter koseri
gtgactgacgctcagacctcgttttcacattaccgacaagtcaaaaatcctttccctaagttcgtggtgccgaagaaaaaaggcagcaacgaggagaaagcgacactaccgttctgccgtaagctgatggcgaaagccgaaggcttcacgtcccgttttgacttttccgtccatgtggcgttcgtacgttcactcggtaagcgtcatcgcatgccgccattgttgcgccgtagagctattgatgcgctgctccaggggctatgcttccactatgacccgctggccaaccgtgtacagcgatccatcaccaatctggccatcgagtgcggtctggccaccgagtcaaaaagtggcaatctgtccatcacccgcgccacacgggcgctgaagtttatggcggagctggggctgattacctaccagaccgagtatgacccgcagattggctgcaacatcccgaccgatatcaccttcacgccggcactgttctccgcactcgacgtctctgacgtggcagttgtggcagcccgccgcggccgcgtcgaatgggaaaatcagctgcgtcagaagcagaacctgaagccgctggagatggacgagctgatagcgaaggcctggcggtttgtgcgcgaacggttccgcagttaccagtccgaacgtaaactacatggactgaaacgcgcccgtgcccgacgtgacgcaaccagaacccgtcaggacattgtgacgctggtgaaacagcaactgacgcgtgaatacgccagtgggcgctttaccggcggtcatgaagcactgaagcgggagctggatcggcgcgtgaaagagcgcatgatgatgtcgcgtggtaacaactacacgcggctggccaccgtccccatataa

SEQ ID NO: 78246 - DNA, 279 bp, Citrobacter koseri
atgtctaatgttgtaaatccagttacttcctcatcagaatccaagcggtcttaccagaaaggaaggccgatgaccgccagtgaaagacaactggcggccatcgcccgtaaacgaaaaacacataaagaagtgaaggtttttgttcgtaatcctctgaaggatttgatgattgaagtttgcgaaaagaaaggtatcacccaggctcagttcattgaggatttgcttgaacgggaattagtcagccagggaatgctggatgcaaagacttcacattcataa

SEQ ID NO: 78247 - DNA, 207 bp, Citrobacter koseri
atgacagaagaacaacaacgaatagagcgagccatcgagctggcctgtcgctatggcggtactgatgaaatacatcatttgcaatgggttctggatcaaatggttcgggaactggccggagagcgctacgttcagattgttgctgatgccatcggcggagaggatggcaccagcacctacagatggaatgttgggatcgcgccataa

SEQ ID NO: 78248 - DNA, 5193 bp, Citrobacter koseri
atgttgtcgctaagcacaattagcggtgatgcgggatattacagcggcgcggaaaactacgaaatcattcacgatgataaaggccagtggttaggtgatggcgcggagcgtcttaacctcactggcgcgattaaccccgcagagctggataatattctgaaaggccatttacctgatggcacccgcataacccgacaaaaagatggtgcggaatctaaccgcccaggtctcgatctcacctttggtgcaccaaagagcctctcaatccttgcccttatgggcggggataaacgcctgattgctgcgtttaaagagtctgttaccgaaacgctggcacaggtggaaaaatccgtcaactgcagggtgacagagcagggggatacgcgcataaaagaaaccggcaacggtatttttgccatgttcacgcatgacactaaccggaacggagaaatgcaccttcactcacacgcattgctgctcaatgccacgcacgatggcgagaagtggcgggcgctggggagtgacctgcacaaccgtaacggtatccgggaacaactgtatgacctgcagattgcttatggccagatgcagcgtgaaatactgcgcccgaaaattgaggcgctgggatacacgaccgttaacagcggaaaacatggcatgtttgagctggccgaagtcccgcgagacgtgatcgaaatgtattccacgcgcacggccgaaattaacgaggcggttgggcgggatgccagcgcaaaatcacgcgagatcgccgcgctggatacccgcgagaaaaaagaatttgtggatggtcagacgcgcctcgctgaatggcaggaaaagttgtccggtcacacgtttgaccctgttcagaccgttgataaagcgatgatggtcagcacgaccggccatgtgttagacgatcccgaacacgcgcccgaccgcagtaaaccacaaatcagcgtggaggaacgacttgctgagattcaggaggcgatcaccaaaaccgtggccgcgctttccgatcgtgcggtgcagttctctcatgcgcaggtgatgagccatgcggcaaagctgttaccggccgcacccgacacccttgagttgttacgcggggggataaatcacgccatcgatgctggccagcttattccgatggacaaagagaaagggctttttacctctcatattcatttgctcgatgagctgagcgttaagcagctggccggtgagcatatgagtacgggaaaagttgcaataaaccagggtaaaagcaccacggagcataccggcgtttatgcgcagctggcgaacgaccgcaacccactcgccattgtggaaggaagggggggcgcagccgttcagggggagcgtgtatcgcaactggcagaaatggtcagttcacaggggcgttcgcccctgattatttccccgaccgctaaagccaaaacgtatcttcagaaggatgccggtataaccgcacctgttgcgcagcgtacagcattaacaggcgatatggcacttaatggcctttccaccgtcattgtgcagcaagctgaaacgctggggcttaaacagtcgcttttgcttcttgaacaggcaaacgccaccggcgcacaggtgattttcatggacagcggccagagcaaaggtacgggctacgcgctgggtgttctggaagccgaaggggttaagcgacatcagtttaatgacgcgccgcgcccgaccgtggaaatcgaaacagccaccgacaaaaacgagcgctatcaccagattgcaacggcatacctggacagcatcgccagtggtgaaaatacccgcgtacaggttactggtgagaaagaacagtcacaactgactggcctgatccgtgaacaaatgcggcatcgtggtcagctcacaggcgacacgtacaaaattgaaacccttacgccggtgttcctgaacagacacaaccggcagagtcgtgagacctatcgtgccggaatggtgatggaacgctttaaccaggaagaaaagcgtatggagcgctacaccattgatcgtgtcggggaggagaataataccctgcgactggtggatgcagacggcaacaaacagccgctcagattgcgtgacgtgggcgaaaaatggaacctgtttaagccgggttctgttgaggtggccaccggcgacacgctgaggattttagggcgtgaggcgcgaggccagcttaaggccggtgaaaccgtcacagtcaccggcaccgacaagaacggcaggttgcagctctcacacacaggcaacctggacgctgaaaaagccagccgtaagccagtggccgttgatttcgcgcagccgctcaaactgactcatggttatgtggagtcgctgggggcaagtgtgcaggataacgccagggtgttagcggccattaccacgcgtgaactgagggaggaaaccattaaccgagtggccgcaagcggcaaccggatcacgttgttttcagccgtggataagcaacgcgccgccacccgcctggagaaaatgaccggcgtcaaactgatatccgagcagttgcagaatgcaaccggcatcgagggcgcgggagcggccagtaccggtgccagagaaaacgccatgactgatgcgcaaaaggccgtaaatattgcgctcagtgaagtgcagaatcacaaagttgcgtttcagactgcggagatcctcaccacggcaatcaaagttaatcctcatgttccccctacggcgctacacaatgaggtcagacgccagctcaatgacggcgatctcatccccgtagagggtaaaggtggcttagtggttccccgcgtcatgtacgaaatggaaaagagcattctgcgcgatattgcggaggggaaaaacgccgtatcaccccttatggccagcgtgccgccaacggtactggaagggttaacggaagggcagaagtcagccacgcggcttattctggagagtacagaccgctttaccggtgttcaggggtatgcgggggtagggaaaacaacgcagttccgcgccgttgcttcagccatcagtatgatccccgaagcacagcgccccgaaattatcgggcttgcgccaacacaccgcgccgtgggtgaaatgcagaacgcaggtgttaaagcacaaacacttgactcgtttttattcgagcacgccacgcagctgcagagcggtgaaacgccagactacagtaataaagttttcctggtcgatgaggcatcaatgacgggaaacaagaaactgagtgaaacgtactccatgatcaaaactgccggtggccgtgctatcaccagtggcgatgatgcgcagctgaaagctatcgataccgggcaacctttcaggcttgcacagcagcgctcagcgatggattttgccatcatgaatgaaattgtgcgccagaaaccggaactcagggaggctgtttacgcgatgatcgagggtaatgccagagccgcgctttcgaaaattgagcaacatttacctgattatgttccacgccatgctgacgcgtatatcccgcaaagctcagtcatggaaattagcccgaaaaacgacgacgaagttaaagcattatccgaagccggtaagccagtaaatgtggttgaagccattgcgcgtgattattccggccgcacggaaaacgccagggataacacgctgattgtggcacacatcaatgatgaccgtcgcgccattaacagggcgatacatgaacagttgttaaagagggatgaaatcaggaaccccgcgatggtgcagttttttgaaccggtgcgcgtcaccgattcagatgcgcgaacgcttaacgcatggtctgaaaatatcggcaacgtggccgtgttaaaccgcgattactggacgatcaccggcactgaccaaaaagccggtgtcgctatgctgaaaaatgcagacggaaaagaactgcttatctctccgtttgataactccacgcaacagccgcagttttaccattcacgcctggtacagattgcagaaggtgatcggctgcgtttcaatcgtactgacaccgaacgtggttacatcaataacacgctcatgaacgtggagaagattgatggccagcgcctcactttgcgtgatattgaaagcggcagtctgcgcaccgttgacctctctcagaatgaaaacaagcatcttgacttaggctacgccgtcaccgcatacggcgcacagggtgccagtgaacgctttgttatcacactggaaggggtaagcggcagccgtaaggctatggcttcacctgatgcggcttatgtgtcgctttcccgtcataaggagcatgtgcaggtttacacggacaatcgcgaggggtggctgaaagcgctggatgagcacaaagacgcggaaactgcgcatgatgtcttacatgcaactgatgatcgcatgagccgccgtgctgacgcgattctctcgatatcgcggccgcttaacagtgtggcacatggacgtaatattcttttccggcttgagcaggatgcagataaaacgctcgggcggtttgtacccggcacatcgcgacatcagtctgcatcgctggcatttccggcatggaatgaacatggccacaaaacaggcgtccttatgatgcaactgagcaagaacggccacagtaccgagacactggaaattgtgggcgcaagcgatgcgcggtttgtggggattcagcaaagcagtaacggtaatgtgatgatggctgacagtctgcctgatgcgttccgtatagccaccgctaacccggataccggcgttatgttgcgtttcagcggcgacggcgttccgcataaccccggaaaaatcacaggaggcgaccagctggtcacgccggttctcccggagctgtcagaagctgcattaaaggaaacacataaaacaccggcagagctgcttaaagaagccactcagcagagcaaggatgaacagaagccggatcttgtcgtgccggttgattcattaccggaagccatcaaacggatcggggagaaaactgaaacggagcaggataaaactgcaaatctggcgcaaaaagcactcgatatttataaaggcagtgaatctgttaatcattcagtttcacataatgaaattgcagagattaagaagcccgatcacctccgtaatatagagcgtgatattacaaaatcttttgaggattaa

SEQ ID NO: 78249 - DNA, 2370 bp, Citrobacter koseri
atgagcttcaaaacaggtgacataactcgcggagggcaactggcattattgcgctttcgcatgtttatgcaaatcaataatgtgttgttctattatgttgttattggctggttgttaattgtctcatgtgcaatttatttacgtctcaatacggagattttttataacggtgtacatttctggtgggctcagtcgcttattccgtttaccgaaattatgaaatcgccgccctctttcgaattatggtacaagggcaaaacttacatctttacatgggagcagatgcttaccgacccttacgcagtatggtgcgggttaaagttacgtgatgaggtcgttacctgtttacttgtttcatctgttttcgtggcggctttctacggcgtggtttttttcgtgcttgcacgtattggccgtggacaaagcggggatgaagtcatagcggggcgcaccttcgagccggtcaaaaccgtcgcccggatgttacgccagcgcggggaggcgtcggatatggttatcgacaaattgccgctcaagaaagatgccgagattcagaactttgcgatgcatggcaccgttggcacaggtaaaagtaccctgatccgcaaaaaactgctgcaccttaagcgtaagggtgcgccggtgatcctctacgacaagggttttacgtttgtggaggagttttacgacccggaacgcggtgacattattctcaatcctcacgacaggcgttgtcctcattgggatatgtggggggagtgtcagaatctaccggattttgagtctatgactgaaacgctcattcctatggggaacactgccgatccgttctggcagggttcagcacgtaccatctttgctgagggtgcggaacggatgcgcaatgataaggacaggagctacaacaaatttttgcgcacgttactcagtgtcggactggacaagttacgtgcctaccttgacggtacaccggcggccacgctggtagatggcagtatagaaaaaacggcaatttcaatccgaagcgtactgaccaactatgtgaaatcgatgcgttatctacagggaacggacgatcccgacaagccccggtttactatccgggaatggatgaaagaaaacgccgataagccacgccccgcgtggctttttattacgtcgaatgaacgctatcacgaatcgttaaaaccgcttatctcgatgtggctggggatcgcctccaccaacctgctttcactggagccaagtcgccgccgccgaatctggtttatttacgatgaaataccgtctttgcataagttgccaagcctcccgcgagtgctggccgaggggcgaaaattcgggggatgttttgtcctgggattccagtctttcgcacaaatggaggaggcttacggccatgactttgcaaaagctatctatgacctgctcaacacaaaatacttcttccgaagccccagcgcagaagtggcaaagcacgttgccaccgatttgggggaagtggtgcgtaagcggttcagtgaacaaacgtcatttggtagcgaacaggtaagggacgggatcagctatggcaaggacgaagaacgcgtactgataaagagctattcagatgtgcagaagctcaacgacctggagtgttttgtcacgctgcccggagactatccgatcaccaaacttaagctgaaattcaccaggctccctgtcgtggccgaggcgcttattgagcgtgacattattactgcccttgacccgcagattgaaatgagtctggtgtccatcgaaagcgaagaacgcaaggctgtgcagggactttttgaaagtgatcccaaaccggcacaggaatcaccactgcgcgagaaggctgctgctgtgtttggtaataaggcagaagatacaacctctcagggtctcccggatgaacagaaacagaagcgcccccgtaagacgcgccagaagaaaacacacctggtggctgttgaagggcttaaggaaggtgagcagcttgatacccgaaccggcgagatagtcaaagtcgcccccgcatccggggttgatctcgatattggcgaggtcggtaatgtgaaacccagaaccagtgctggcgtggacgaagccgcagccgtgcaacgcaataacccacctccgacagatgaggacgacgacagcactgatgctgcggctgtccccggtggtggacgacaaaatgaaatacccattactcaggctcccgttacgttgtcacctgaaaatgagagaaacgtcgctgatgattatggcgactatgagcaatacctctctgaaacccgccagcgtattgagcaggaagaacgcaactttattcccacctacggaaacgaaccggagatgtaa

SEQ ID NO: 78250 - DNA, 456 bp, Citrobacter koseri
atgaaagccctgttaaacgccttgcttttgctcatggcgttaggcagctgtggtgctgcaaacgccttttgtttccgggaggccgccgataagtatggtgtaccggtcgccctggttgttgctatctctaatcatgaatcatctttaaaccccagagccactaatgtgcagagttacggaactgattacgggcttatgcaaataaacagtgatcatattccgaaacttatcaaaatgggtgtgataaagagagcggatgatctttttaaaccttgtctcaatgtgcaaataggaacgtggatattagccactcatctggctaagtgtggttacacatgggagtgtatcggaagttataatgcaggattcagaaaaacaaaaaggcaggaagaacgacggaaacagtatgccggatatatcaaagaacaatataaacgcatggggatcgaattatga

SEQ ID NO: 78251 - DNA, 528 bp, Citrobacter koseri
atgtttagatttttagcagcattaggtcttgtgataggggttgcctttagtcctgtaaaagcctcaacggaggcttttggtattacgctgggcgaaacgacccttgagcagctaggaaaaaaattcccttcactaaagaaagagagtctgcaaggggatatgattcgttatgccatagataaagaagaccttaactatgacaagattaaggggcctttacgggttttcatcgaaccgccgactggtaaagtggttgttatttacgcatttctaaataaaggcatggaaggatttgaggaaacaaactctgttcttgcaagaaagtataccaaaaagaaactgataaatcctttcgtaggtgataaatatgctagatatgttaatggaagtgatgtaattgaacttaatgcgccgcatatggattttgaaatgtcacttatttatttaactaaagcacgctatgatataatgcaggaaaatcgcgctgctgccaaaaaagaaaaagccgctcaggataacgccctttaa

SEQ ID NO: 78252 - DNA, 525 bp, Citrobacter koseri
atgataaaaatcaacagctatatgaattttttttattttgttttgttctcgactgcgctggttgtgtgtataagttttgattatatgtatctggcgtcttatgccataacgtttcttatttcttttatgggaggaacgtttgcggtttatcatcatgtccattctaaatccatcattgtgggtgggcgaatatatgagataaaagaaagtatcggattgttaaaatttatttttatctatagtttttgcttgtgtgtgactttgttcacactattagcttctggttatccgattaccatcagtttagttgttcagggcgtaagttgttgtacttcattggcactgatttttatcagtatatggagtcgccatgaatcttacttaaaagctcaagctgatattttgaagaaactgtctgatagtgagttactcacatctgatgagattgatctcataaatcagaggcaattgcgccgtacctatacccctgtaaatagagttcgtcgacctcatgggttatggtaa

SEQ ID NO: 78253 - DNA, 3126 bp, Citrobacter koseri
atgattgaattatatgtttacagcgccggtggctggatggttcagacactaaacggtatcgcggcattctgtagcagccccacgtttaagaccttaattcgctgggggctgatgctttccgtgcttgtctccgtttatatctggacaaaaaagcgtgaccttcagttattaatcaatttttttctgatcttcatgtttattcccacgattctggtaggcgttaaaaaaagcgtacaggttatcgatgtaagcaatatcacggaggttaaaaagattgataacgtaccgctggggcttgccgccccgatcggcttactctccagtatgggatatgcgattgcgcggggatatgaaatcatcgtggcgcagccagccgacgcgctgcaattctcaaaaacagggctgatgtttggttctaaaatcgtgtcaaagagcaccagttttgacctgatgaaccctgctggtatcagcatgtttaacgactacgtgaaaagttgtgtggtactggatatttatctttcccataaatactcccttcagcagctgatgaactcgaccgaaccttatgatctcatctttgcgaatccaagcccgttacgcgggattttcgtcgatggcgcttttcagacatgccaggtcgccgcgagaaacctgcaaaccatgcttgtgagtgaaacaaatgttaatggcaccacgtttactcactatgcgcgtaagttattcccgaatcgtgctgatgccgcgccgttgctggggcagatgatgggggacagttacagctactttatgcagtcaggacgcacggccagtgaaatcatgcgtcagaacgtcaccatgaacgcgctgagaaatggccttatttcatacggctcagccaataacgccactgcgggaatggtaagccttgccggagatatggcagcacaacgccagatgattcagaactccaccggcgcaatgattgccacacaatatttgccccttctgcataccatattttttgccattcttattggcattttcccgtttatggtggtgatggccagcattaacacgctttctatgagagtggtgagaatgtacatcatggcgttaggtagtctgcaactgtggccaattgcgtttgcaatctgcaacggtgcgatggtgtggtttttgaaagcagattccccgaccgggatcacgctttcaaatatgtctcagctgcaacagcaacacgcaatggccgggtcgatggccggatggctgatgacgtcgatccccgttatctgctggggagtgatgagcggcattggcgggattatgtctactgctgcgagtacctttgttgcatcggataccggcgcggccgcgcagagtgccggacgcgtggccgagggcaattacgcgtttaacaatatgcagatggaaaacgtgcagggtaataagtgggatacgaaccgcagctatgccgccggagcaaatacgcaacagctggagaatggcgcgatggtcacacagacagcggggggcgcgatggttgccaataccgccccggcgatgtcgaaccttgccaccaatattaactttgcgaagatgcagcagtctatggcgcagcagcagtaccggcaaagcgagagcgaaacgcaaacccgactggagggctggcgtagtgactctgctcagacgttccagcaattgcagtcatttgctcatcgtcatggtgacaacttcagccgtggtattgacagcagggagggaagcaacagccaggtaagtgaaggaacgcaaaaaatgatggatgccgtgcaaagttatgccaggtcgcatggtgtcagcgaggcggttgcatttagtgagctggaaaggaagtcaaaagagggatatgcagatggccatgtgagtgtagaagctggtaaatcgggtgtcgttgggctgcttggtaaagctgtaggtgtcgaagcaagtgttggtggctctgctgggctaaaagcatcaactggatcagaagctacagttactcaatcgggtaacacagatgaaacgacccgcgagagcaatgatgcccgtctatctcagtcgtttagtgaagggtggagcatggttaagagtgcctcttacgacaaatcctcctctcaggttgaatctgatggtatggatcagcttaaacaggttcagcaatccatgcagcagacggacagccactatcaggattacaaccgctctaaagcacataccgaggagcttagccgtatggccagcatgagcgacagcgaaagcgcaacggtcagcagtaacctaagtcaggagtttgttagctggatgcaggggagaaatccggcagaggctcaacagcttctcaccaatactgactcagctgagaatcgcgaacaacttgctcagtatgcaaatgagtttgtttcggaacgtgtgaaaggacgcatggaacaacataatcagactgcgcttgcaggaggggaaactggattccaggctaatccacagtacgcatcagggcaatcagcccaggagcaaagtcagcctgtaacccaatcaggtacaaggggagaagcaggagggctgtatatgtcagggcaacccgcccaggagcaaagccagccagtaaccccatcaggagccaggagagaaagcggggggctggttaattcactgcatgtaccagtgcaatcaacccaggaacaaaaccatcctgtagccttgtcaagtgagagccggccttatagccagccaacccagaccgaaaaccctagctcggcaggggaatccccgcagaatggtacatcgagacctgcagaggcaccgcagccatttaacagtgctaagcagtttgaggacgcacggaatgctatgcagagtgaaagtaatccattcaggcaggatgtggttgcgcaacagcagcaaaaccagtcaactattgaacagaatggagcaaatcaaaactcacaaaaagagttgataggggaacaacgaaacgaacttaaaaatgacattagtagtagatctgaaaaggtaggcgaagatattcggaaagcccaggagcatcaagagttactcaatgctgccaaaaatcctgccgacttagaaaataaagctaatgagctattgccaccacagaaaaataactaa

SEQ ID NO: 78254 - DNA, 1386 bp, Citrobacter koseri
atgaaaaaaacagcattaatggccgcaaccgcaatttttattttcactggtacagtgccggaaagtcgtgctgaccttaataacgagctgggcggcttttttaacagtatgggggcggcaggcagtaacgtaacgtcaccgcaagcctggcaggggcaggcagcgacctatatgaccggtggcgggatttatgtacgtaatcctaataaaaccatccagctcgcttccgtgacgcttcccagccttaacgccggatgtggcggcatagatgcgtttttaggttccttctcgtttatcagtaaagatgagtttgtcgcctttgcaaaaaacatcgtcagctccgcaccaggtctgtttttcgatctggggcttaagacggtaacgcctatgctggcatcggctaaagactacttacagaaactggcttcagatattaacagtatgaatatgagcagttgccagagcgcgagagggattatcggcggcttatggccagcgacgcaggaaacaaaagatgatctctgtaaaaccatcggcacaggcgacggcaatatgtttactgactgggcggctgcgcgtcaggggtgcggcgtggggaatcaggccagcaaagcggaaagcaaggtaaaggataaggccgaatataaagaccttattttaacaagcaaaaatgtggtgtgggatttgctgagcagtaacgcgctttttgctgatgatcgcgagttaaaagaaatggcgatcacactcaccggcacggtgatttttgatgcgcaatcgcacccgttacccattccctcccgcgccggtgataccaaactggtaaaagccatcatggacggcggcagcgcggagatctaccgttgcagtgataccgacaagtgtctgaccatgcgagcgcagagcgtcactatcgccgctcagaatggccttaaccggcgcgttgtgcagctcatgagtgatatcgcggctaaagcccggagcgatgagcaggggctgaatgacaaagagaaagcgtttattaactcaaccaatatcccggtactgagttacatcattgacccgctggcagtcggaatgaatgaaagcgtggccatgcgcatgagcggttacattgctcacgatatgctcatcaaatatatgcgtgaaattatcgacaatacccgcgccgcgattgccaataagccgctcaatgaggccgcgctcaaggttattaatgacaatatcagtattgcctatgagcgcctcactcagttgcaaaacgatattcagatccagcagagcacattgcaaagcgtcatgaatgatatgtcctacatgcgccagcagctctccagttcgatgctgagtacattccagagcaattaccgttttgaggatggccaatga

SEQ ID NO: 78255 - DNA, 480 bp, Citrobacter koseri
gtgaacaaatatgattacgtacatggcatgtgcgcgttgcggcgtgccgcatttttctcccttgttaccgctccggcgttggcgctttttgtctgtttcatcatgctgtcatttaataactccattgccggaagtttcctttccgaggcacgaaagctggtcgcgggtgccccggaggggaaggtgaatatctccgccttttgccagcaaacgtatcttccaaagaccccgcagcacgacacgtctgatgagccggtgaagtcaataaagcccgcaccgcctgttttaaagcctgaactggttatctgcaaaaaagaaattatatggggggacgctgagcgctggagaaaggatacagatcggactatccgcaatgcgtatctgttttctgtctttatggggctgggcgtctggttatttctgaacggtttcccccgtatatcccttccgcgtggctttttctggagaaagaaaaaatga

SEQ ID NO: 78256 - DNA, 639 bp, Citrobacter koseri
atgcctgataaaactcagcgttcgggggctgatagtaagctgctgttaagactcatttctcttgaaagcaaactgcttgagttgtacgcggaatcacgatggggatgcataacagcgtacagacttaataaaactatatatgaacttaatgaagtagcctgggatatcggctgggaatactcaggcagattctccagtctgtctgatgcctgtaccgatgtactctcatcaattaagacactgtccgaaaaaatcacgcctggggagtggaacgatagagtagggcttggcgaatatgatcgctgcggttacgaacggactatgagagagtgggaaataaaagcaaaggatgaaaagagaatttttctggatagtattccattcagaaaaatttgcggtgacccgaatggttctgatggatatgtctatattcaggaaatgctgagtcgggatactaatttttgtgtcaaagaaatgtataacgatgaagaaataatcgccgtattaagtaatgaaggtgatgcgatcgcggttgcacgttacgctgcttcgcatgatggcggttccggcgacgtctgtatcatttcgtcacccttgcctgtcactcatcactcttttaatgactggtttatgaattaa

SEQ ID NO: 78257 - DNA, 546 bp, Citrobacter koseri
atgaaactgaaaactctgagcgcccttacgggcgctttattgtgctttgccacagccatgcaatccgtttccgcgtcagtcaattcctctgtcattgatgaggtacgcgagctggagaaactcaaaatgaaaccggcacctgccgaaactgccgggaaaaaagcgcttttaccgctcagtaatggccagcagattgaccccgctgaatggaatgtcgtgctgtttatggcgagtgactgtagttactgcaaacgctttgatccggtgctcaagaaagtgagcgaaaacacaggggtaaatatctttgcttataccctcaataatgaacccgacagcacgttccccaatgcgctaccggctcccccaacggttgtggcggcgttttttgcgcagggattacccattgccacacccacaacgttcctggtgaatgtgaaaacaatggatacctttcctttattgcagggggacgccacacagcagcaaataacggacaggctcgataccgtatttattgaagcgctaaagcgcattcagtctgattaa

SEQ ID NO: 78258 - DNA, 786 bp, Citrobacter koseri
atgcagaccgtgaaaaaagtgttactggtggctctgatggccatcagcgtgacggggtacgcgcaaaccgaaccccggccggaaaaggagcaggaaagagggtggcactggtatgaagtgaagccgccagaagaacccgaacacgaaccagaaccgacgccgcccccggaaaaagtatggcgcgaagaaaacgcaaccgagttcagaaagacgtttcagaaagcctatgaaaaggcactggataaagccctgatgtttccgacagcggagaactttgccgagtacaaacgtctgcaggatttcattgtgaataaatcaacgcgatttgcacagagcagccgtgaggcatatctccggttcccggaactggactataacctgcaatacagcaacgctaacgccaccgcgccgatttactacaaagagcagcgtcgcaaagagcaggaagcgataacagaactcaccagaacgaacgggctgtttttcttctaccaggggaaaaatcccattgatgtggggatggcctacgtcgttaaggcgtttgctgaaaactacaaactcaaggtgctgatgatttcagtggatggcgagatcccctctgatttacctgaatcactcaccgacacaggacaggccgcgaacatgaatgtgcatcatttcccggcgcttttcctagtgaacccgaaagagaaaagctatcgccccgtttcttacggattccgggcgcaggatgcgctggccgcgcaattccgtttaatcgcgacagacttcgaacctgatttctaa

SEQ ID NO: 78259 - DNA, 987 bp, Citrobacter koseri
atgctcagaatactatttctgttcgttatagctatttgttttcaggtaaatgccgcagatttagggactccggtcaagagagaatgtatagaaccagggggaacgaaaacagaaacctatcagggtgtgacccagactttcactgccagctgctggaaagaggtgctctattacgaaatccagaaagaaaataacggaacatgtaaggcgtatataaacgataaatcctgtacgcggatcagttctcaatgtaatgacctgatcaatggtatttgctactcacaaaaagaagtttatcagtgtcagagtaaatccaccggtaatggccagatttgtggcggggagcttttttgtaaggacggaacctgcatggaaacgaaagaggataaaaacaaccgtttcgcagaagctgtttccgcactggcggcgctggccgcagcgggtgaggatgcaaaaggcgattcaatgaatgtgcgggtttttaccggcaaaccacagtcatgccgcaaagctatggccggttttaaaaattgctgccagtcaggtggctggggcgaggatattggtctcgcgcactgtagcgatgaagaaaaagcgttaggtaaggcaagagagaagggaataacggtcaaggtcggtacatattgcgggacagaggtattaggtgcctgtgtgcagcagaaaaccggctattgcgtctttgagtccaaactctcaaaaattgtgcaggagcaggggcgaaaaggtcagctggggattagctttggtagcggtaaaagcccggactgccggggaataactgtggatgagctgggggaactgaaatttgataaaatggactggtcgtccttttttgacgatctggccagacaatccaacgttccccaggatcagcaactgctggatcgcgtcaacaacagcatggcgggattcaaaaacaccgccgatccgaacatcaatactaacccgaccacaccgattaaataa

SEQ ID NO: 78260 - DNA, 936 bp, Citrobacter koseri
atgaataaaatacgatatcttcccctttttctggtttccgcagcgctctcagcaagcgccagcgacagtgacaattttacttctggcgttgaatttgcgaagggtaacaaaggcacagtagaggggcaattcaataaagccggtaacaacattaatgactttgtgccagaggcagatgctaatggcgcacaaaagaaatacggcgaatattatggcggggtggacagttccggcagcgatatgaatgcgcccggactggagcagtttaataccacgcaatgggggcttgcgatacaggaacataaacgtaatgcaccgaatatgcctggtgtgagaccggatgatgattttttaaataatggcaaagatgcgattaataatgctgaaaaaaccttcgacccccaattatgtaaggatgtcagctacgataaagtcaccacaattaaacatgaatgtgaacgcgatttaagcgtaatgacaacgtgtgtggtatcgaaaatcattaaatggtcaggtggacagggggttgttaaaccactgacattaagctccagagagaaccgtactgcgtcgggtgacttacttccgataacaggttcgtcggggaactatacgatgacctatcgttgggtaatggcgaaagacggctaccttagcggtggtaaagtcacttatggtggacacgagacgtactggcaagggattacacttagtttttctggatgggtgaacatcccctctacgtttgtaaaagccgggcaggaaataacactcaccgctaatgcaaaaggctgggggattctgcctcataactacctggattacaccacccgtacttatcctcacggtgaatttatagatataacgtataacttccaggagcaaacggtgaaaggtgaaattcaggaagtcaattcatgtgatcagggaaaataa

SEQ ID NO: 78261 - DNA, 762 bp, Citrobacter koseri
atgaaaagagcaacgattgcgctttttgcgtggttttttgccgtggccgctgcactggctaatgcacctctcagcgatgaggatgcggcttatctttcctcactgccagaccagttaagccagcaagctacaacggcggttgaccccctgcatggggttaagattaacgatgccatgacgcaggaaaacgccgattttatccgtcagacgcagcagcgtgttgaagaatacaaaaaacaggaaacaccggcgttcctgaaggaattgcagaagcggcaaccgttcccgcagggaatggagccggatgcggaatttatgcaaaaactgactgaccgccagcgtcaggctatggagcagatcgaacaacgcgggaaaggtaaacagcagccgcagagtgaggcgtattacttcctttctttctccatcccggacgaacccattaagcgcatgatctcccaggccagccactacaaaatcccggccacggtgagaggtctgattgagaacaacatggaaaagaccaccgcgaaaatgtttgagctggttaaggataacaatcaggggggcgtggctatcgatccagaaccgtttaagcgtttccatattgatgctgttcccgcgctggttgttcagtgtggtcaaaaattcgatgtggtttacggtgatatcagtctgaacgggctgttacgtaaagtgaaagagggcggcgattgctcagatgtcgccaggcgtattctgagaggcgcggataaagatgaataa

SEQ ID NO: 78262 - DNA, 990 bp, Citrobacter koseri
atgagaaatagcctgttgctgttggtgctggcatgtctgtttttcaatgcaccgaaagcggaggcaagcgcggcaaattgccaggggcgttttgttaacccgattacggatgtgtgctggtcttgtatgttcccgatgacaatgggatctatccccctggtgcagggaacgatgagagacaccccgaacccggccagccctatacagatttgccctatgggtattttttatcgtgtcggtctggcgattggattctgggaaccgatggcgcttactgatgtaacccgatcaccattttgcatggccagcatgggcggttttactgttgatgtcagcggcgcgcgtggcgatggtgttggcgatcaggtcaatcatgaggtgccggaagttttctatcatgttcactggtacaaatacccggttcttttctggctgaatattcttacttcagtgggatgtatgcaaacaggagatatggatattggttatctttcagaacttgatccgacctggaatgatgatgtgttagccgcctggcttacgcctgaacaatcgctttttggtaatgtccttgcgcagatggcctgtgccgctgatgcggtggcgagtaccgtttacccgcttgagccacttttctggtgcgccggtgcgcatgggtctatttatccccttaccggtagtaataacaaccagtacacgccgttacaaatgaccgcgctgatgagtgagagaatgctgtttaaactccaccggcaagggatggtgtggaactcgatcggcgctgatgtggccgtatgtcatcaatatccttcgcctatcgtgcctaaaacgcgctggcgttaccaacagacgataatgatccctgatgtgattaaaggccatcctttcggggcttccacgattacctgggaaatggggcatatcacccccgctgatacatacagttacggtctgctactctggcgaaagcgaaattgcgtctatctgtaa

SEQ ID NO: 78263 - DNA, 642 bp, Citrobacter koseri
atgaaaaggcggcgcacactttgcgcctttcttatgcttgtagcggccaccgccgccacaggcaaagagttaggcacatggggcgacctgtaccccatacatgagcaaagcatgttagattttattcacgatcggctgactcagatggagcaaagcggcgagctggggaagttgcaggaggaaactaaaaaacgtgttatcgcctcaacgctgagacctaaacccacgccgaatatacgcacagccaccaaatcacatactttcacttttgacccttctattgtggtggaaaacgatatagccgaccacaagggacgggttttcgcgcacaaagggcagagggttaaccctgctgataatttcccgttcccctatgagattttctttgtggacggcgacaacgcgcggcaaatggcatgggtgaaaaaacaaaacaccggtgttaagcgaaaaatagtgatgctggtaaatggaaatattaacgaggccggtaaggagctgggcgaggcggtttattttgatcagaacagcgcattcacaaagcgttttcatattgaagagatccccgcgcgggtgacgctggcgacggggggaagattgcttcgtgtggatgtgtacgacctgagaggggagacaccatga

SEQ ID NO: 78264 - DNA, 366 bp, Citrobacter koseri
atggaaaagaaatcaaagttctcctttatgagcctgagtgactggctggcgggggtacaaattatcatttttatcggtggcctgtttttattagcgtggattgttaaacaacaatccggtattgattattttgatatgcgcggaacggttgatacttttacattgcagacagcagataaaaatctcagcgatcaggataaacagaaaatgattgagcgctttaatgatgcacttgatcagtcgttaactcagtgggctgagagtaccggtaaaccaatttatgtaaaagccgctgtcgtaaaaggcgggaacgatataacggctgacatccaggctgatatcgcacggcgtatgaggactcagtga

SEQ ID NO: 78265 - DNA, 2601 bp, Citrobacter koseri
atgactatcattaacgcgaccatgaaagcggtaaaatccctgattacgcccaacggggcaagagcggccaatgatgcgctggcagagatgagctatccgcaagtagccagtttacttccttaccggttgtacgatgaggagttcgggatattcatcaacaaaaaaacgattggttttgtgctgaaagcgcccccgcttatcggggggaatgaggccatcgttgacagccttaatgacctgataaaaacgaaaatcccgcgcaacagtacgctgacggtacacctcaaatcgtcccccatcgtgggggatattcttgattacgggttgcaggatttcagctggacggggaaggaagccgataagtttaaccgtatcacaagggcgtattaccagaacgccgcagtaaaaggcttcaaaaccccgtcagggttgcccgttacgctgagaaactatgaactctatttcagctatacggaacccaaaaaaggcgatcctgaagcaacaaaaatcaagttcaagcacattcaggagacaatcagcgcttcacttaaaggcgcttatctgcatgttgaaccggtggatggtgacgggctgttaaacatggtgcataacctcatcaaccatcgtcccggagaaatatttaaggagaaaatcagctataacccgctggaagatatcaactatcagtgtgttgagcctggtattgaatttgatatttaccctgatgagattaaatactcacttcctgacccggccgggggacgtcaacggtgccgacttaccaactttatgctggataagaatccagaaatgttcaggttgtggcaaagcggtgacaatatcagcaacctgttaaacccggctaattccattcctgatccgtttgtcatgacatttatcattgaaacggaagaacaggcggcaaagcagaatgaagcaacgcgcaagtttctcaataaagacaagctggccaactccacgatggccaagatactgccatcaatccggcaggagcgtgacgagtgggaagatattcgctcccgactccttagcggagagagcgctcttgttaaatttcactacagcatcacgctctttacggaagataacgatcacgcaatattgaccgctgagcagaggctaatcaacacctacaaaaaaaacgggatagaccttgtaaaaccagaattcaagatgttacgcaactggatgggaatattgccgtttatggccggagaaggactctggcaggatctgaaaatagacggagcctgtcgccgttctgaaagtatccaggccgttaaccttatgccggtagttgcagataatcgcctgtgcgaaaaagggctgttggcgccgagttaccgcaatcaaattgcttttattgacgtgttcggtgatggcatggggaacaccaactcaaatatggcggtcagcggtacatccggcgcaggtaaaaccggccttgtccagcctgttcttcgcagtgtgctggacagtggggggctggtatgggtgtttgacatgggggatgggtataagtcgttctgtgacaacatgggtggcacctacatcgatgcttctcaggtgtcatttaacccctttgcgaatgtgaccaatattattgagagcggtgagcgtatacgcgatctcatgggcgtgctggcctcgcctgatggcaatctggatgaggtacatgacgcacttttactttcagccgttgaaagtgcgtggaatgagaagaagaacgaggcgcttattgatgatgttgttgccgttcttgcccaggatgttgagcgttatcgccaggagggagcacatacactcgcttcccggctggatgaaatgatcgtcctgctggggaaatactgtagcggtggtctgtacggtgagtatttcaacagtaaaaagccgtctctctcagatgaagcccgactaatcgtgctcgaaatggggagtttagggaagcggccggatcttctggtggcggtgatgttctcattaattctctacattgaggataaaatgtaccactcgccccggacgctcaaaaaggtatgcgcgatagatgaagggtggaaactgcttaactttcagaataagaaggttggccagttcatcgagacgggttacagaacggttcgccgtcaccgtggcgcatttattactatcagccagaacattaaggactttgacagtgttgatgcatcgagcgccgcaaaagcagcctgggggaactctgcgtttaagattgtggctaaacaggatgcctcagaatttaaagcctattgtgagcgtaacccgtcccagttcaacgagtatgaaaaagcgattattggccggtttggtgatgctaaagatcagtggttcagctcatttatgcttcgaataaatgatacctgttccttccaccggcttttcgttgatccactttcccgcgcaatgtacagctcgaaaggtgaagatttccagtttatagaggagaaacgtaaacagggctggcatattcatgattccgtttatgcccttgctcaccgtaacttcccacaggaaatggctgaactggaggaatgggcgaatcgcttcgatctggccgcatga

SEQ ID NO: 78266 - DNA, 465 bp, Citrobacter koseri
atgaaactgaaaccactgtttgcactggtgggcgtggcgctgctcgctggttgttcaggaagtaaatcaacgtttgactgtgatattactgccagcgatgtttgcatgacgattagccaggcaaatgagcaggcgaagctgaaaacacaggaaaagcagagcgggggtgcgaggtcattgccagaggtggctaaaccatccccgaagctcatttcaccaccgggtatttccggtactaaagtgattaccccggcacctgtaaaatccgatcatcgtgtttctggcgtggttaaaacaccgctgaccagtcctgtttattcttcccctcttaaacccgcagaaaagcccgtcagggcagcagagcgaaccgggaagatttgggtcgcgccgtggattgattcagacggcgcttatcattctgacagcatgatttctattgttgttcagcctggagagtggcactaa

SEQ ID NO: 78267 - DNA, 1377 bp, Citrobacter koseri
ttgaaaaatatcaatcttgtcacgaagcggcgacagaacgccatttttctgggggttgcgctggcgctgggggggacggccttagccgggatgttagcttacgaccactttaaaacgccaaaaaaatccgcgccggttacacaacctgcgccggatcttacgggtgttgtggatacaaactttaccggcaaggtacagaccgccgccattgaggaagcgcaaaaactcaacaaaatgaccactcagcggatgaatgagataaacaaccgtctggatgctctcaaccgtgaaaacgaagatctgaaaaaacagcttatttctgtccagcagaaccgggatcaggagcgtaataagggaaccagcgctgacaaccctccggcacctaaccttccggcttctgcccctgatgttcagccaggtaattaccgccctgattcatataatgtgcgacagcctggctatcagaaccagcctgacgaactgcgcattgtcgataaccgcagcgcggtattaagcaggaaaacgtttgattatacgaaaggcgaggatgaggatgccccccgcttcaagtttccttatgtgccttccgggagtttttctccgtcgaaaatcattgaaggcgctgacgctaacgccagcgtgaccgggcagaatgacactgcgccgatgttactgcggattaccggcctcactcagttacccaatgataaaacgctggatcttacggggtgttttgtttccctggaggtgtatggcgatgtatccagtgaaaggggggaggtcagaacccggaaaatcagttgcatcattgacgatgagacaattgatcaggaagtaaaagggcatgtgtcgttcagggggaaaaacggcatcaaaggggaagtcgttatgcgcaacggcgagatcctgggctgggcgtggggagccgggtttgttaacggtttaggcggtggactccagcagatggggcaaacgcaggttgggatgggggcaacggccacaccaggctttggtgatgtctttaagagcggtatgggcggcggtgcttccaaagcggctaatacgctcagcgattattacattaagcgtgccgagcagtatcacccgattatccccatcggcgcggggaatgaggtggagctggttttcaatgatggattccagctcaaaacgctttctgaattagcgaaagaagtcgcgcagaaaagagaacgcagtgacagcggaaaccgtgttggtgaagctgtaaaccagactgcttatcagactcaggccgaagcgaaaaatgccactgagttagcgaaatacaaaattggtgacatgctcactcaggaagattttaaacgagctgcgtcccaactcccttctgataattaa

SEQ ID NO: 78268 - DNA, 726 bp, Citrobacter koseri
atgaatatgagtaataaaaacaggtggcggctgattgccgcccttccggtgctggtttcgctggggggaacggcagcaggtttaagcgggaaaagcggagatacatttaatatttctcttagccgtgaaaaccctaatcttatatctgtgaaaggggacaagataaccggccttactaatctgggcggaacattactggatcaggaaaaaattggtaatggtgcgctgaccctgcttgccagtggtgaaaagccgtttaccctggtactggaaaccaaaagcggtaacagctatctggttaacgtgacgccacgtaatggtatgggggcatcttataccattcacgggacagagccggtaagtctgaaaaatgtaattaagtgggaaaaacagaccccgtatgagtctttaattgtcgatatcaattctgcaatggctaacggtaaagagccacctaattacaccctcattaatactaaacccacgcaggtgagctggcctggtattcccgcaacgctggagcgaacggcgctttatagcggcgggaatctcagcatcgagcgctacacaatcactaacccccttcattattcgctggccttacgtgaaagcgattttgaagggggcggtgtgcgcagcgtaatgttccttcctaaagcctccagccttgttgccggtggacgtatggaggcgattattgttcgtgatgtgaggaacgagccttga

SEQ ID NO: 78269 - DNA, 564 bp, Citrobacter koseri
atgaaattgaaagcatcgcccaatgaatcaaaagtatatgcctggataatttcaggtctggttttctttcttatgattgcgttattttcaatcgcgcaattagctattactaacagcaaaatcctcaataaaaaggagaaaattatcattcctatggcgttcaattccccgtttattatctctgaggagacaatgagcgccacgtatattcagcagattgcgacttcctttctcccgatgcggttaaacgttacgcctgagaacgttgaccgtaaccatgaatttttacttggctgggtacaacccgcagcacggccagaaatgaaagtgctacttgataaggaagccgaacaaatcaaggcgaatgccgtttcatcctcatttacgccatccagtttcagggtataccccaaagaactgatcgtggatatatccggcgagcttataacctggattggaagcagtagcccaatagcggaaccgcgagtgtaccggcttgagcttgatgctgccgatggggtgctttacctcaaatcctttgcagaggtgaaaaagaaaaaatga

SEQ ID NO: 78270 - DNA, 306 bp, Citrobacter koseri
atggaaaacgataaagatcatcttaagtatcgttttcctaagaccctggacgtcgaaacaaaaatcatctttttctctatagatgaatgtattctggcgttatccccaccgttaatcgcatttatattttttaatgccataaccgtggggatgattataggtgctatcttatatatatggattaaacatctgaaaaaaggcaagggcagtcgctggctttatagctggctttactggcacatgcctgattttgttttttccttttataaggttgtacctccatccagtcttaggaagtggctatga

SEQ ID NO: 78271 - DNA, 345 bp, Citrobacter koseri
atgaaagcagaagttatcaataacgaaggtttttacatggaatctgattctcactctcaggcttccagacattcattttttgttttctccattatccttgtggtactggcgacaacattattctttgtaacaggtagtacgtgtaatgcggaggacttgcttaaatctggtgatcaggcagtgacagatactgtaggtaaggattcgtcggttattcgctggatgctgattctggaaatcctggctgcaattcttctctacgtcctcactcgtaacattcgggtgttaggcgggatcattgctctttccatctttattaacattgcttacgttatcgtgggataa

SEQ ID NO: 78272 - DNA, 453 bp, Citrobacter koseri
atgacggcaagaaccgtcgataagtcgaaaggcacaagtatcagcatcagaagaagtctttatgaaaaagtgttttctgttgtttcagagataaatttcaaatgtggtatgtttctggggcgaggtattcagcagtctgatatttttgaatgcctcgcccttcgttttacctccagattaatggggctgacggagcttaatcttaatcatcagttaagagaccgaagtaatcctggtgttcgtaaaacaactgtttatttaaatgctaaaacctctttagccttggataaccttgtttctgcgataaacggaatattaaacaaaaaagatgtgtatgtaacaaaggctgatattctcgaacttcttattattcagtgtctggatgatgtactgagctattttttctcaatggctaatgacagtaataaatcgagcgataacaagaacgcctga

SEQ ID NO: 78273 - DNA, 444 bp, Citrobacter koseri
atgaaatggtatgtactggcttttacacccactcgttttaaatcagtattttcctttctggactacctgaacgtttcatggttttgtccaatggaaactgttgactatcgtaggccggataaagtcataggttacagaaagaaagatcgccccctcttccctggttatcttttcataaaaacagatttcgaatgtgttcaccctactaatgttactgcgcatccgtacattatgcggtttatttcattcggcgctgagcctgttcctgttcctgataagatgatcatggagctgatggaactgaaaaatgtatcggaagtatcaagaggtgtgagatctattgatcatgattttgcagcaatactgttaatggatgaacctcagaaaaggagtatcgccttgcttaactatattgctgagaaatttcagtgttgcacttcctga

SEQ ID NO: 78274 - DNA, 378 bp, Citrobacter koseri
atgccaaaaatacagagctatgtttcttccacggtatacagaaaaatgagcgacattatagataatttgctcaaagacggggcagaacgtcacgaagcaaacatatcggctttggctgctaagttgatagacatggggataattctctatgagctacagaataaagagagtgaaccagctgcgaatgatggtgagcaagagggcgataatgcaactttagtgatagaaacgcttaaacgagccatgaaagcggaaatgtatgcaaggttaaccctgcaactcactctcgatgaaaaccttaaaaacaaggttggtagctatgacgacataaagcaaagtatagaaacacaggtggactcagctgtaagtggtgtctaa

SEQ ID NO: 78275 - DNA, 186 bp, Citrobacter koseri
ttgcgcgaacaatctgactccgttgacaacgatcactatgagggtgtccatatgtcaacgatggaaattgtaattctggcaggaaagattgtaaagcatgaagcggttttaatgccccggttgactccgtgggagctgggtgaatttggggggcggttaaacaatcctggtgaagatctgctgtag

SEQ ID NO: 78276 - DNA, 183 bp, Citrobacter koseri
atggaaagagaatttagtgcgctggcctctttgaaacggaatattaaattctggttcgaacgttgtgagtgcaataaagaacaggtaatcagaaatatcgacggttggtttgatttcgcctatgcaccatgcgaacaaaaagcggcaaaagaggagatgatcgaaaaactgagaaatgaataa

SEQ ID NO: 78277 - DNA, 309 bp, Citrobacter koseri
atgacagctaaaaaaaagctctttgtgcgcaatattcattcccgcaatccgtttgatgttattcgcgcggacgtagtgctggcacgtatggaaaatcaggctaatcgtgggtgtggtctgcactacgagatttataattccagactattgagtatggccatgcactacctggcagaattgccgttaaaagaccgcccagtattcatcggagcagctgcgaaaagggggtatatgctaacaatagcagaagaagaacgcgcatatgaggagtgtgccgatctgatgaatgaactggaagaggattactga

SEQ ID NO: 78278 - DNA, 219 bp, Citrobacter koseri
atgaacacacacaacttcaacgtcaaaaccgccaccaaagaatcttccgaaagatgggaaatatcatgcccggaaccaattgcagcaaaggtactgacattccacggacaaaatgccagctatgcatttaatgttctggctgatttgaaagcctccggtgcttcatatacgcgccggaatattattgcggatatgttcctccgtttaggtgttaattaa

SEQ ID NO: 78279 - DNA, 213 bp, Citrobacter koseri
atgcctagacaacatcaggatagcctcttagatgccgcaaggcaaggagaagaaggccatgaaactgccacgaagtaccctgatctggtgcgtattaatagtgtgcctcacactactgatattcacttacctgacccggaaatcgctctgcgaaatacggtacagggacacgaacagggaggtggcggcttttatggcttacgaatccgctaa

SEQ ID NO: 78280 - DNA, 327 bp, Citrobacter koseri
atgaagtggcgctattcactccgatggaaacagccacgcacaccgtgtccgggtccgcatgaactggtatccgaagtcgtggaggccggtcagccggcaccagaatccgtgatgtcgcgttgggtggccggcgcgggatacgcggtatgcgtggattttctggatgagagacaggtcagacgctggagcgatgaacggaaagccgccgcccgcaggcgaaatctggaacgccgtgtaaaccgtatagcaccgttgtttgctgaagaactcatcgagcgggagatggcgtcacgcccggattatttttgcggaaaatcagcgcgataa

SEQ ID NO: 78281 - DNA, 729 bp, Citrobacter koseri
atgatccactcatcacacgcccttgtcacgctgaagccagcccgtcaggcggcattacaggccattatgacggtagaagagtcccgcaaccgtggggctcgcctgccagcactgccacatgtgcgcacctttttgcgcgtgctgacaggcagcagccggattaatacagcggtggcgcagcgcattcccggtctgaactgggagccgaagaaccgtatgaccagcctcaaacaggtggaagaagcgctcgatcgcctgattgccagcaagggggaacattgcccgctgccgttatccacggatgtgcaggccgaactgttcccggaggtgatgcacacgcgcacggaccgccggatgcagcgcgagaaaattgctttcacccgtaaaatacgccgggaggaaagggcgctggagcatacctggctgttgcgacagaacctgctgggacaggccatgacagagcttaattttcagtcaccagataccgtcagtacctggtaccggcgctgggctgacgagtttgacgcgcgggagctggagcgtggattctggcagtggcggacgaggtttgcctcgctgaaacagctggactggctgcgcgacagcggagagccgctgtacggcgtcatgcatgaaatccggtttatcgtcagggacatcccggagcatgtgcgacaggctgaacgctggctggttccgaacaagctgacggaccggagccggggatga

SEQ ID NO: 78282 - DNA, 2046 bp, Citrobacter koseri
atgtcagtcaccgagtctaatgcaaaaaaaaccaaaaaagccagtcccaaagcgactgcgcgcaaagagggcgcacaatcagatgtcctggttaccgcactggataacgccccaatccgttataccgcctggtcccgcctttttatcggggaactgaactgccgcatcatcccgcacacgccggaagaaatcagggggtatgccgatagtattcatgcggtcgggcagatccataaccttgtggtggtggaatgtgacgatggtcggctggaagtggtatgtggcggcggccggacaaaagcgatcgggctgctggtcggggaaggcaaggtagatcctgaaaacgtctggatttcttataaagcggtgccgcgtgaactggcaagggctgtctccctcactgaaaatggcagacacaagaaaatgcaccctgccgaacaggtcgccggattccgctcactggctgaagaagggaaaactccggcgcaaatcggtgatttgctgggctacggtgtgaagcacgtccagcgcatgctgaagctggcagggctggctccggtcattcttcaggcgctggctgaggacaaaattaccacagaacactgtcaggcgctggcgctggaagataacactgaccgtcaggtgcaggtctatgaatcggcctgtcgtgagagctggaacaataaaccggaagtgcgtgtgatccgtaacctgatcaccgaaagtcaggttcccactctcaacaacagcaaatacgcatttgtcggggaaagcgcattctccgtcgaagaaatccgcgctgacctgttcagcgatgagcagggcggttttgtggacagactggcgcttgataccgcactgctggaaaaactccaggtggtggcggagtgcctgaaagaggccgagggctgggcatgggccaccggacgcatggaggcggtcagttatcacggtgaggatgcgatggtctaccgcattcaggatgaacctgaagcggtttacacggagcaggaacagcagcgccttgacgaattacaggatctgtacgacgaaaaccagactgccagcgatgaaaccgacgcgatggaagcagagatggcgattatcgggtgcgcggcgcagatccgggcgtggacgccggaaatgcgcgcacagtccggcgtggtggtgtcatggcgtcagggggacgtgtatgtccagcgcggcgtgatgttgcgtgaaacgtcagaaacggaagaagaacatgttcaggttaagacatatgaacgtcagcctgaacctgtggacgaaatcagtgttcccctgctgacaaaaatgtgtgcggaacggacgctggcagtccaggcggcactgatgcagcagccggaaaaatccgtcgccctgctggcatggacactctgcctgaacgtgttcggcagcggcgcgtataaccgacccgcgcagatctctctggactgtaagcattattccctgacgaatgttgccccgtccggtaaagagggcgtggcgtttctggccctgatgcaggaagggcaacggctggaagcgctgctgccgcagggctggaaacaggacttcaccaccttttttaccctcagcaccacagaccttagcgccctgctcagtttctgcacggcatgcagtcttgacggtatgcagacgcgcggcaccggaggcaccacccgcagtccgctcgatacgctggaaacggccctcgctttccacctgcgtgactggtggcagccgacgaaagccgatttcttcacaggccttaaaaagccgcaaatcatcgccgcgctgaacgaggccaacctgacaggtgcggcgcgggacgcggagaagatgaagaaaggcgatgcggctgaactggcagaggacaaaatgcgggacacccgctgggtgcctgtctggatgcgcgcccctgatgcagaaaaagccccgtctgatgcagaaaacaacgtatctgataccgaaaaaggcagtgctgatgcacccgatacggcttctgatgcagacagccaccacaccctgcccgatgcagcctga

SEQ ID NO: 78283 - DNA, 243 bp, Citrobacter koseri
atgacagacagtaccacgtcacccctgaagtccctgcctgatggcacgttcacccgcgaacaggccgaagcggtggccgcgcagtatcagaatgtcgccattgaagacgatcaggggacgcactttcgcctggtggttcgccagaacggggaaatggtctggcgtacatggaattttgaaccggggggcgagtactggatcaaccgctatatccgggattatggcatccgtaacacgcagtaa

SEQ ID NO: 78284 - DNA, 546 bp, Citrobacter koseri
atggcagcacgaggcgttaacaaagtcattctggtcggtcatctggggcaggaccctgaagtgcgttacatgcccaacgggggcgcggtggcaaatcttaccctggcgacgtctgaaacatggcgtgacaaaggggacggggagatgcgcgaacacaccgaatggcaccgtgttgtcgtgttcggaaaactcgcggaaatcgccagtgaatacctgcgcaagggtgctcaggtctacatcgagggccagttacgtacccgaaaatggcccgatcagtccggtcaggacagatacaccactgaagtggtggtcaacgtgggtggctccatgcagatgctgggcggtcgccgtgaaagtcagcctcagagtggtcagcagttcagcggacagccgcaacaggcggcgcaaaccccacctccggcagcgtccggcggggcaaaaggtcggggcaggggcgcaaaaggcaaaaacgccactgctgccgcgcagcagccgccagcgcaacccgatccggcgtatgacttcgacgatagcatacccttttag

SEQ ID NO: 78285 - DNA, 264 bp, Citrobacter koseri
atgctgatgatgcttatcactgtcagtcatatttcctctctggctttgctgacgccgggcgacttccctggcgggaaccggggctgtcatgcttcgcaccgagccagctgcgctgtctctgcccggcccctccggggcagcgggtttccatcccactgtcgcaacgtcaacaccgggcttgcagcgcccgttccggccgcgccgcccctggcgcgccgtggcctgcgcttccggcaccccggcggtaaagctgccggggtgtaa

SEQ ID NO: 78286 - DNA, 564 bp, Citrobacter koseri
atgcatagcgaactcagggaccgcattcaggcgatgcgggccagactcgacgggcgcacacccgttaccgaaatccgggccagctcacagctttttgtcacccccgctccggtctgtcgtcagctggtcgatctggcggatattacggattcagaccggattctggagccggaggcggggacgggggctattttacgggccatccgggagctagccccgctggcgcggtgtgacgccgtggagcttaacgcggcgttagccggacatctgcgggcggcatttccgggcgtgactgtctggtgccgggattttctggagtggcagccggaaacccgctacagcaaaattctgatgaatccgccgttcagccatgcgcaggatatccggcatatacagcacgctttaacgctgctcgactccggcgggacactggcggcgatttgcctcgacgggccacgccagcagaagatactccgccccctgtcggacgtctgggaaccgctgccgcgtggcacgttcacgtataccgctgtttcaaccgttctgctcagaatacaaaactga

SEQ ID NO: 78287 - DNA, 1383 bp, Citrobacter koseri
atgacacaatccaccgcactggcactgactgccgacatgaccccgccgccagcgtccgaagacagccccacgcagtcgtaccgggcgacgtactccccggatgacaacaaactgcgcctttatgccgcgttacgcctcgatgatgagacttatcagaagatccacgccgtgggttttcgctgggcaccaaaacaggcgttgtttgtcgcgcccgcctggacgccagcccgtgaggatacgcttctgtcccttgccggagacattgaagacgacgacaacaccctgtttgaacgtcaggagcaacgcgccgaccgtttcagcgtctacagcgacaaacgcgccggagagtcagaacaggaactcgtacatgtggatgcgctggcgtcggctattccggctggtcagccgatcctggtcggccatcacagcgagcgacgcgcacgccgggatgcgcagcgcatcgagaacggtatgaaacgcgccgtgatgctgtttgaacgtgcggaatactgggcggaacgggcgcaggcatccctgcgtcacgcgaagtataaagaacgctcggatgtgcgctatcgccgtattaagaagattgaggcggacctgcgcaagtccgaaaagaccattgcacagtcgcagaaatatctgacgatgtggcgggcggaaacgctggatctgaaaatggcgcagcttatcagtaattacgatcacattactgcctgtttcacgctggataagtacccgcgtccgccggagaaaagccagaacgaaggccggatgtccctgcattccgcacttgataacgggattatcacctttgaacaggcccgcgatatcgcggttcgctgtcacgagcgttcgatccgtcatcagcagcgctgggttaatcattaccggaaccgcctggcgtatgagcgggccatgctggacgaaagcggcggcgtggtcacccgtacgcaggagtttgagctgggcgggcaggttcagagccggagtgagtggctgaccatcatccgcatcaataaaagcaacggcgtggtcagttcggttgtcaccccgtcttacagctttatgggctacaaagggacaatgacgctgacgcccgatcgtatcaccgactataaagccccgaccaccgaagaggccatcgctgcgaaacaggccgcaaaacgtccgccgatcgtcaactatccgggtgagggtttccgggagatgacaaaggccgaatgggctaaaaccccggcagattataaggccgtccggggtgtggcggaaaatgatgagcatggcgcgtaccggttccgccgcatcatgaccggcggttatacgctcgatacggtgtacatcaccgacatgaaaaccgtcgaaattccgaaaaaataa

SEQ ID NO: 78288 - DNA, 231 bp, Citrobacter koseri
atgatcgtcactattgtttcaccttccgcagaggctgtaaagccccgccgacataagcgcatcagtcgcgccgagctttccgtgtcagagattgacccggcgttaaaggcattcgggcggcatatcgccaggagtatccgcaaggggcgcggcgttcacattcccgcgatgaaaaacgccgctatcgggcaggtgctccgcacccttgaactgaaacgcgcatttaactga

SEQ ID NO: 78289 - DNA, 135 bp, Citrobacter koseri
atgtttcgcgggaacctgctgctgtattccctctggtatgaacttcacccgtttgagaaccttcgccgcaagggcgtaaacgagcacggcccggtgcagatgtccggggtgagcggtcaattttttacggtctaa

SEQ ID NO: 78290 - DNA, 156 bp, Citrobacter koseri
atgccggttgacaggtttgtctggccagtgtgtggtgttttctgcctgccggtgataatacgtttcctgttcctgttcctgttcctgttcctgttcctgttcctgttcctgttcctgttcctgcttatgattatgctccctgtctggtttcgctga

SEQ ID NO: 78291 - DNA, 255 bp, Citrobacter koseri
atgtccggatttaatctcgccgcaaaatccagagaagaacaggataaggtcgcagtggacctggtggcgtcaggtgtggcgtataaagaacgtatggctatgccggttgtcgctgaactggtggtcagggaacagtctgaacatctgagagagtatttctgggcgcggctggagcattaccgccaggtcagtgcgcagctcccggataaaaattccccggaatatgcaaaaaatagtgatgaggttaaaaaatag

SEQ ID NO: 78292 - DNA, 438 bp, Citrobacter koseri
atgtacggaactgtcagcgatatctgctgtaatttactgaaagtctttgagaataaagaaaaaattgccgtgattatctggattgaagaagatgtgcgggaagtgggagcggcatttaatccgactgttcccgacacgcaggcggtactgcgcgcgatcggggacgcggacagcgatgcactctggcgtgacggtattggccggaactttgttgaaggagaactgcgacggctggccgcgctgcggccaccccgtcagattgccattcctgaagatgcgctgcgcacacttcttcccctgatggaagccggaatgaatatcccgcgttatcagacgcaggacaggatcgccgaagaagaggccgcgctggatacgctgcgatacctgctttccacagataccacggcgcataacctgaccggaggaaaccagccatga

SEQ ID NO: 78293 - DNA, 429 bp, Citrobacter koseri
atgcagcatgcagcccatcagcacaccctgaacgtcgaagaatgcgatcgtctttccttcctgccgtatatgtttggcaatgattttatgctggctgaattacaggtgtacgcgctggcgaaacagtggatgcctgaatacagcggcggtttctggcattttatccgtctgccggaaggtggcggttacatgatgcccgattgtggtcgggtacatatgatcaacagtgaaaactggtttgatcgcaccgtcagcgctgacgcggcggggatcattctgacctctctcgcgattaatcgccgttgctggacacatcacgactgcggccatgccgcgctgacccgcctgtacatgttgcgtgatacccagctctggaatcacattacctttcaccctgaatgcaacgccatttatgccgcgctcgactga

SEQ ID NO: 78294 - DNA, 768 bp, Citrobacter koseri
atgaataacgataccctgaacgccctcattctgcgccacggtgacagccttctgcgccggtccggctggcctgaaagtgtcggtgtgatacaggtggccccgcaggaggttcccggctggctgtccgtcagcggcgtgctcagcgcggatgaaatcctgacgctgaccaaccgcctttgtcagaccctcagtggcgggcgggcgcacctgttgatcgccagtgcgcagcggctgacaggaacgcctgcccgcctgcatctgtacccggtggaggcttacccccgccccgaagcgttgccggactgtacgcgcatcagtctgccttacgcgcaggaatggctgacaaaagccgaatgtgacgacctgctggccttcctgaaagattttactgaccgggtatgcgaaatcgcccgtcaggacgcgaaacgcctggcagcggcgatggctccgtcagccgtgccgcgactgatggagaagcagttcggagactggcggctgctggctgatgagtatgaccatgagaactggctggacaacgacgatggtgagttactggataaggtgctggacgcggtactgatccgggaggcgcggttctgtccggttctgctcacactggtgaatgagcgccgggaggaaattgaaggcgccggggtgatgaccgacattctgcgtttcccgggggaaccggtacgccgctggtttgaccgccgcgtgctgcgggatgtggtgaacgaggtccgcagcactgacccggccggggagtaa

SEQ ID NO: 78295 - DNA, 411 bp, Citrobacter koseri
atgatgtatggcacccgcaaggaactgaataaaaagctgaaacgtatgtttggcaacgacgaacgctttgccctgctggtctggacaaagcaggacgtacaggcgcaggtggagaacatgacggaacgcgaggccgacgcgattttgcagtacattggccgcaccggcactggcgaccataccgaagagggcgtttcataccacacggtacaggcgctgtatgccagattacgggcagatgtcccgacagtcagtgttcccgccgacctgctggcccgcctgactgacgtcgccgggctggcgctggatgcaggggatgctcaggcatggccgcttgttcgccggcattatcctaccgtggctgacgctcaggcggatattgcgcgactcaggcaacaactggcggcctga

SEQ ID NO: 78296 - DNA, 222 bp, Citrobacter koseri
atgaactacagcggacacgagcagcttcgcgcggaggtggcggaactggccagctgtatgtgcgacctgcgcgccaccctgaaagtgctggaagaacgctggcactggcagcacgacggcctggctgaacgcctggccgggcagagtctgcgtcgcattaacaccctgctgaacgaggcttacaacgaaacactgatgctcgacgagagctttaaagactga

SEQ ID NO: 78297 - DNA, 681 bp, Citrobacter koseri
atgtcccgttttatcctgggtaactgcgtcgatattatggctggctttcctgaccgtgccgttgatttcatcctcaccgatcccccgtacctggtcggtttccgtgaccgttccggccgcagcattgccggcgacaaaaccgacgaatggctgcaacctgcctgcaatgagatgtaccgcgtactcaaaaaagacgcgctgatggtcagtttctacggctggaaccgcgtcgatcgttttatggcggcgtggaaaaatgccgggttcagtgttgttggtcatctggttttcccgaaaacctacacatcgaaggccgcctatgtgggctaccgccacgaatgcgcttacatccttgcaaaaggccgtccgcccctgccgcaaaacccgctgaatgacgtgattgcgtggaaatattcaggcaaccggcatcatccgaccgaaaaacccgtaaccagcctccagccgctgatcgagagcttcacacatccgaacgccatcgttctcgatccgtttgccggttccggctctacctgcgtggcggcagctcagtcggggcgccgttacatcggtattgagctgatggagcagtaccaccgggccgggactgcccgcctgtcagccgtacagcgcgccatgcagcgcccggccgccaacgatgtcttttacccggaggccgcgtga

SEQ ID NO: 78298 - DNA, 336 bp, Citrobacter koseri
atgaacacatggcttgcagggttaagtgtcgaggtcgatggcactgaaatgatggtgcatcacctgattacagcgacagatctggaacatgcggaatccggcatcatggaaatgggacgaacctggtggccagcgctgaaacgggaggatgaccggcatcgctgggagtatcccggtggcgtggtctggttcaacagcatcattctcctcgatgacgtggaaaacagtatcctgcgcggtctgaaatttcttgatgcgtggactgtgaccggcacacctgacgcccctgtactccgcgacgagtgggggaatgactggcgggatatcacccgctga

SEQ ID NO: 78299 - DNA, 222 bp, Citrobacter koseri
atgaccgtaaaagcctttatcactcgtttgtcacgttttcccgatgatgctctctgctgcgggacattctggctggctgatgactttctggcgctggacagcactctcactgaagacgatatcgacgccgcaatggagctggcgcaggacagccatgatgcgaatgacggatttaactggagccacctgcaatgggcaatcaatgaggtgacacgagtatga

SEQ ID NO: 78300 - DNA, 1275 bp, Citrobacter koseri
atgtttgcgctcgctgacgtcaactcgttctatgcaagttgtgaaaaagtgtttcgtcctgatctgcgggacaagcccgtcgtagttctcagtaacaacgatggctgcgtaatcgcacgctcaaaagaagcgaagctgctgggcataaaaatgggcatgccgtggtttcaactgaagtcggccgaattcccggaaccggtgattccgttttccagtaattatgaactctacgcatctatgtcgaacagggtcatggcacacctgaaagagctggcgccgcgcgttgagcagtattcgattgacgagatgtttctggacattagtggcatagaccgttgtattggctttgaggattttgggcgccagttgcgcgagcatgttaaagcaggcaccggtctgaccattggtatcggcatagcaccgacgaagactctggctaagagttgccagtgggccagcaaagaatggccacaatttcgaggtatacttgcgatttcgcatgcgaaatctaagcgcgccagcacccttctttcacttcagccggtggaggaaatctggggagtaggacggcaaatagcgaagaagctgaatacaatgggtgtcaaaactgctctgcaactggcgcaagcaaatccggttttcatcagaaaaaatttcaacgtggttcttgagcgaactgtcagggaacttaatggagatagctgtatctgcctggaagaagctccacctccaaaacagcaaatagtgtgcagccgtagtttcggttcacgcataacagaatacgaagctatgcaccaggcggtatgtcagtacgcagagcgtgctgctgagaaacttcgaggcgaacatcagttctgccggcacatcgacgttttcatcaaaacctccccttttgccgttaatgaggtgtattacagcaacgtagccagtgaaaaactcctcatgccaacccgtgatacccgggacattattaacgctgctgtgaaggctctggatcggatctggcttgatggccatcgctatgcaaaagccggcgtgatgctgaatgacttcactcctttcggcatttctcagttgaatttgtttgatgagatacagccgcgtgctaacagcgatgagttgatgaaagttctggatggcattaaccactcaggccttgggaagatatggtttgctggaagaggtatagcgcctgaatggcagatgaaacgagatatgctatctcctgcgtataccacccgctggaaagatattcctatcgcgagaatctgttaa

SEQ ID NO: 78301 - DNA, 969 bp, Citrobacter koseri
atgaagcaaagaaaaacaattggcagatctattaactcacaaagtactgctgaagaccgctcttcttccgaaagaacgcaattctttacgttaaaaactgggcgaaaagttaaatttacctttatgaccattgctccacaggatgtggaagcaaaaacttttgtccgtcaggaaacaaatggacgtgatcaggaagctctcaccaaagcatcgctaaaagacataatcaagacaattaaatttcagcaattctttgcctgcatcggagtatggcatgacgataagattgaaattcttgacgggtcacggcgccgtgcttctgccatttttgctcatactgggctggatgtaatggtaacgtcagaaaatctttcggctgaagaagcaagacagcttgcaaaggatattcaaacagcaaaagagcacaatctacgggagatagggctacgtctgctgcaaatgaaagagcgcgggcttaaccaaaaagaaattgccgaacaggaaggtatgtcccaggctaaagttacccgagctctccaggcagcagccgttccgccggaattgattaaactatttccagtgcagtcggaactcgctttttctgattataaaatgctgatagatattcatcagaacctgaatttaaaaggaattagtcttgaagatctgaccgaatgcatctcggttaatcttgatgaaatcatggcaaacagtgatttgccagaagatgatcaaaagcacgatatcctgaaactaatctgtaaagccagtcagtcactgatagctgcgccaccgaaagaaaaaccagttgtttcaccattatgggaatttaatgagaaagataaatttgcgaggaagcgtataaaaggtcggtcttttacatatgagttttgccgcctccccaaagaggtccagcaagagctagatgaagcgataaacgaagttctgatgaagcgtttttcttcttaa

SEQ ID NO: 78302 - DNA, 1206 bp, Citrobacter koseri
atggaaaacatagagcagttgaaaaaagtggctgtgcgtgcccataagatgcttgtctctcttagtgaaaacatacggcaacagaaagacgaaatgcatcttaacgagttttatcaggtatacagtaaagcatcgttgtataagctaccaaaactaagcaaaggtattgttgaatacactgtcaatgaaatggaagcgaacgggtacagctttaataaaaagccgtccggaaacaccatgaagtatgctatgacgctgcagaacgtcattgatttgtatcatcatcgcggggttcctaaataccgtgatcgctttcatgaagcgttctgtatttatgtatcaagcttaaaaggaggtggtacaaaaactgtttcgactgcttctctggcgcacggattaagggcacatcctcacctcctttatgaagatctacgcatacttgtcattgattttgacccgcaggcatcgcttacgatgtttatgagtcatgagttgtcgatcgggcttgtagcagagactgctgcacaagctatgcttcagaacgtcagtcgagaagaactactttctgatttcgttgtacagtccgtagtaccaggggttgatattattcctgcgtcaatagacgatgcgttcatggcagagagatggaaagaactatgcaatgaatatctacctggtcaaaatattcatgccgtcctcaaagagaatattatcgataaattgaagcatgactacgattttatcttcgtggattgtggcccacatttagacgcgtttctgaaaaatggtattgctgctgcagatctacttttaacccccctccccccagcgactgtggattttcactcctcacttaaatatatagcaagccttccagagctgattgcaaagatagaggaagatggtcaggaatgtaagctgctgggaaatatcggcttcatgtccaagatcctgaataagcctgatcacaaaatttgccatagccaggcaaaagaggttttcggcggggacatgctagatgctgtattgccaaggctggatggttttgagagatgtggagaaacctacgataccgtaatttctgctaaccctgcgacatatgacggcagtgctgaagccttgaagagcgcaaagctggcagcagaagatttctctaaggcagtgtttgatcgaattgagtttatcagaactaataggggggcataa

SEQ ID NO: 78303 - DNA, 708 bp, Citrobacter koseri
atgactacatcaacttcccctgtccaggtcaaaaaagcagttaacattagccagtcaaatgaactgacagaggctgcataccaccttcctctacaggcaaaacgtgttttgtggttatgtctgatgcaatgttatttcaacaaagaagaccctgcagaagagtcgccagtcttctcaataaccgttgcggattacgctaagttttttaaagttggtattgatactgcttccggcgatgttaaaaagggggtaagtgttcttgccgacagcaacgtaaccttctatccgaaggaaggggagttcgaagaagttaagcgtccctggcttgctgaggctggtttaaagcgaggccgtggtaagtggcaaattgagtttaactataaagttatgccgtatctgatgggacttacaagccagttcacaacttattcattgtacgactgcggtaagctcaagagtgtgaaagtgatacggctatatgagagtctgtgtcagtatcgacagtctggcatatggataaccactcctgagtggttatctgatcgattcatgctacccgcttcccagcgaaccaatatcgcggagatgaaaagaacctttctgaatcccgcgctgaaaaatattaacgaaagtaccccgctcaaagcctcgatgaggcaagtggaggacggtaaactcatttttactattgttgatcgcaacagctga

SEQ ID NO: 78304 - DNA, 381 bp, Citrobacter koseri
atgaaatgttgttatggattaaaaattttctttttcctcatgttattattcacccaacatgcaaacgcaaaatctccctgttacaagttagcaactactgcgttcttcaacagcagtcttgcgccgacgactttgacacccgatagtttaaaagatgcaaatcttgaaatggcagatggtgaaacgttctgcaaacgtcttgttcaggccgtcaaaaccaagaaaacaacatccgggataatgagacaaaaagcggatgacatgctcaaggccgcaaaaggtgactttgagcacgatggcgatatggataagcttgaacttgcaaaatatcattatgacctagtcgttggctctgcccgtattgcagaagaacagccttaa

SEQ ID NO: 78305 - DNA, 351 bp, Citrobacter koseri
gtgtttcgccgcaaacaactgcccgaccaactgacggagagctggcaaaagtgccgtctgatattatttatgtctcccggtttgcccctccataatgaagaatattacgctatgagtttttattacacccttgacatcgaagacgggatatatgtttttgaacgtcttgaccgccgtgatttcagctcagtggaatggcatatcgacggggcatttttcagtaatcccgcttacccgaccgatgatgagatagccttactggatgttgcctggcaacacccggagagcctgaaaactgtatggccgctgtttctggaacaccttttcaactatcacattaaaaaatcataa

SEQ ID NO: 78306 - DNA, 552 bp, Citrobacter koseri
atgcgccgatcacttattctcgccttcgcggttattccactttatcagcccctcacacaacccctggccgcaccggctcccacggtggtctatctcccgtccgggaccggactcacccatgcctttttcaggtacaccgaccacaccgcgttgataagaagtgttaagttgctggaaaaattcggctttaacacggccacggtggccgaaacgctagatctgaacacatggactggcggcacgatcacgttccgcccagccagtggtgcgaaaccacttgacctcgccgatgtgctggccacactgcataacacgctccagcctgtcgcgcagacggccacggattcggtgataatcaaaaataccccggtaaacctgcgtgaaaacagcgtgactgtcgcactgtcttaccaagtggtaaaagatggcacagctgtgaacggaaacacacagctcgatatcccggtcaacggactggccctgaccattattaaaaccggcgataaccaattattatctatattatcccgcgcacctcagaccaatagataa

SEQ ID NO: 78307 - DNA, 309 bp, Citrobacter koseri
atgtatcaggacgtacttgatgcactgaatgccagtaaaacagtggcgcagcatgaaaaagcattacacgatttatattccagagcaaccgatgctacattaaagcagtatattcttgatatagtcgtgttagtccaaagtataaataaagcgataagtgcaaaagcaaagaataaaaacttaacgcagacacaaagaaaaacagcagccgcagaggcaaaagatgacaaagcaaaacaattcatactggccaactctcaggtcgaatgtgtgaaaaaactcatcgactactgcctgagcaacatttag

SEQ ID NO: 78308 - DNA, 435 bp, Citrobacter koseri
atgaaagattcagattcaattggttggttagtggagcatgggagtagtgcagatcttcgccttgcaaaagaaatcatcgattctgcgttacgagctaaactcgaatatgaaactcaatctgaccgttgttttgaatatggtgtggcattaaaagctaaaggttttggttatgttactcttgaggttccggcattgggtatcaataagggtatccagtatcaggaaggcgatgatattgatgcaatagctatagaaatcattaagcagcattttgaggatgactggttatgtgaatatgggcaggactacgctcccccacgttctgactgggctgttaattttcccgaatacgcagatcatgcttggcgatttgttacagtactgacacccgtatccccctctatagaagaaaaatatagtagttccagtgaataa

SEQ ID NO: 78309 - DNA, 237 bp, Citrobacter koseri
atgccttggaaacaaaaagttgcacgaggatttggagatattgattgtatttttgccgcgcacccgagtgacgaacaagatgcccttgccgccatgaatgacgcaaaggcagcaggagcatctttcgatgattttgaaaaggaaatggtctggcatatctacaagcaagtaactgcacctggaatgcttcaggagcacattgccgaacaggttgccacagctaaaaagatgtggtga

SEQ ID NO: 78310 - DNA, 252 bp, Citrobacter koseri
atgagcagcaaaaaagaagttgagttagaatttcgtaccaagcagcttgagcgtaaggtgaagggcatgcagcagcgtatggaggtggttaatgctaagtttgaccagattacctccaagcaggatcgccgaatccgtgatttagagatcaagaacgctgtacaggtcgataaaattcctcagcgtaaagtggcagagatttatgagttgtcaccaggtcgtgtgagtcagattgtccgccgcgctggataa

SEQ ID NO: 78311 - DNA, 645 bp, Citrobacter koseri
atgagtgtggtggaagttttgcgggagtattcagaggtatggaaactatttggtcaaatgcctgattctgccactgtaaatagtgagcttgcttctgtctttcttggcataagcatcaaaacctttgcccgatatagacaaaatgggggagggccaccttatatccaataccaagcagaagatacgaaagcgagaaatcagcgggttctctatgtattacatgatctgcgagtttggagagatacccataaagtaagtagttcaatgcatggtgctcaggttcgtggcttggcttttacatcattgaccgattttatagaagaacatccttttattgttaaaaataaaatcatccaaaaaaggaaaataaaaaggttaggagttagagattcagatactgacatatacgatgatgtcatcttagggcatatactctgtgtggaagaaacagttttaacaagcaaaatatctaataacgatttgcaagttatttggatttcaattgaagaagctttgaaaaaacattgggaacataacgataataaaaatatatttttagaatgttttaagctgtgctcacaagaaatcattacaaacgcagaaataattagtgattataattttttaaaacagcaattgaggtga

SEQ ID NO: 78312 - DNA, 1572 bp, Citrobacter koseri
gtggccccaagtgatacccctttaaactcacataaacccataaatttgtataccagaagtattctagctactatctggtatacacacttgaaccactggtatacatcgatgaaaatgacactcaatcagtcgattataatcaataagttatctatcgacgtgaaaccgagccttgatccgcaaggcagagtagtctacttacccaatccagagcgaaaaccgtatcttatcactgataatcaccgggattcaccagttggttttggtgtcaaaatcagtgcaacgaaaaagacctatatcgttcagcgacgagtctcttctcctggcaatcgccctaagacagggggaaaatccccatctgaggttatcaggtctacaattggcaatgtctctgatttcgctaacatcgatcaagcccgcgaggttgctcgcaatttagttcaaaccatgaagttgaccaaaaggaaccctaacaaaataaaacgggagtccgatgcttctgaactcactatcagtgaagtgtttgcacaataccgccagcatctgctgggtagagcgaaaccagctaaacccaacaccttggctgtattagataaagcagaaaacaggctttctgagtgggctggtttgcgagttaaagatcttactggtaatgagattcttcggaagtttgatgagattgcttcaagagccagaacagcagcggaacagacctttaggtggattaatgttgctgtcagacatgcaatcgaaattgaagccagcaatgcccagacccagcaacgacaaccctccatgtcctacaatccattctctatcttgaaagttcagaagaagttcaggactcgttctgagcttgaggatagctatcgtgcgaaaggtgtgcgaaacccactttctccgaaagatacacttggtcggttcttgactgcattacacaataagagaagcttcaaccgccttgggtgcgattatctgctactcaccgttctcttaggtgctcgtaaggaagaaacagcatctttatgttggagggaagctctcaccagtgaagaagcaaaaacgataagctatgttgacctgagtaacagaactatccgtttttacgacactaagaatcgaaacgatcacgagcttccgatttgtgatgccgtcaaaagaattttggaagatagaagagatattgtccaggaaacagaaactcgtccagaaagactgaagtgggttttccctgctcgttctaaaagaagcaaaatcgggcattactctgacagtaaaagtttgcgggaatacttgtgccaagaggcgggcatcctgaagcttggtatgcatgatctacgaaggacatttggtagggttgctgaagaacttgtttcatatgccgtcgttaagagactgcttaatcacagaaatacaacagatccaacagaaaggtatgcagaacctgatcaagaacggatttttgaagcattacaaaggattgagttgcatatgcttatgactgctcctaaattatacaatgtgttacttgcttcggctaagtatcctccattacctgaaacgagggagtga

SEQ ID NO: 78313 - DNA, 189 bp, Citrobacter koseri
atgaaaaaaataagtttaaccaaaatgatcatattaggcctgatactcggcatgattgccggggtggccattaataatatggcatcggctgaaacagcaaaatcgtacgcccaggacatctctatttttaccaccatatttttgcgcatggtaaaaatgattattgccccctcgttatttcaacgttag

SEQ ID NO: 78314 - DNA, 1017 bp, Citrobacter koseri
atgccgctggctctgggcggactggcgcaggtgtggggagagtggccgcttagcggtacgctcagtgcgacaagagcgataccttatgtgggagccctggcttccgctctgtatatttcgtccgctggcgaaggcagcgcgcgcgttcccgagcgtgatgaatactggtacgaagagaccctcagacagaaagcgctaaccggaagtaccgccaccacccgggtacgctttttctggggtaccgacactcacggcgcaccgcaggtctatggcgtacatacaggggaaggtaccccttatgaaaacgtccgcgtcgcgaacatggtgtggaatgatgaacatcatcgctatgaatttacgcctgctcacgacatagacgggccgttaatcacctggacaccggaaaaccccgtgactggtgatttacctaatcacaccggaagcaatgttccaccgcttgatcagccaaccattctggtgacaccaatcccggatggcaaaaatgagtacaccacgcccccgttcccggtgccggatgtcgccgattttaacgattatattctggtctttccggccgattcaggcattcagccgatatatgtatacctgaaaacagcccgggacgaacccggtacagcaaccggccacggtgaaattctatccggaaatggtcgttggcttgaggccgccagttcagggctgggagcgccgatacctgcacaggtcgcagataagctgcgaggaagaacgtttcgcaactttgaccatttcagaaaagagttctggcttgcggtatcagagtgtcctgagctaatgtcacagtttaaaaaatcgaaccaattccatattcttaacggtaacgcgccatttaatattccttctgaacgggtgggaggcaggaaaaggtttgaaattcatcacattgattttatccgtgatggtggtgaagtctatgatatggataagatgcgcgttaacacagtaaaaaatcatatcagcattcactcaaataaatag

SEQ ID NO: 78315 - DNA, 279 bp, Citrobacter koseri
atggaactaaaaaaacggattgaagattataccgaagccgaattcatagaattcctgaatgaatttttcagtaacgttcacaatctgaaaggaagagaacttgaatctcacattgattcgttagtcgatcatttcgataaaatcgtggaccatccagaaagtaatggtttgattttctatcccccggatgacagggaagacagcccacaaggcatcattgaagaaattaaaagatggcgcaaatctcagggacgcccatcattcaaagactctgagtaa

SEQ ID NO: 78316 - DNA, 180 bp, Citrobacter koseri
atgacacgggctaaagctgaaaccttgtcgtttcggacatctagagaaattaaactgttgttaaaagcagcagctgacaaagagcatcgttctctggcatccatgcttgagatcttaatcttggactatgccagtaagcacgctctacagcctgctgaacgtgatacgttacggaaatga

SEQ ID NO: 78317 - DNA, 789 bp, Citrobacter koseri
gtgtctcgattgactgatttaattgcaagagccagaattaaagattcagctttaggagaagaacttgaaaaagagtttaaagctctttcactacgaagagcatttggtcttaattttgaacgtcataagcctgaaagtattgaattgccaggacgacctgttcgtaagggcgacaaagtaaggatattaccacctcggggaagtcacaaaaaaggagatcaaacattatggaaagttattaagattagcaaagttaatggtgccaggattgctgaattagttaagattggtgtagaaacccctgagacgaaagatatgatggtagatgaccttgtagttgtcgccgaatttcgagattatatctatccaggtttagttagtacaggtaaggttgaaagaggtggaaacaaaccttttcatactgtaataaatggggaaaacttccatgcattagaggccttaacctatacgcataggggtaaaattgacgctatatatatagatcccccatataattcaggagcaaaagactggaagtacaataatgattacgttgaagcagaagatatctatcgccactcaaaatggttggcgatgattgaacgaagattgctcattgcaaaggaattattgaatcccgagaattcagttctgattgtatcaattgatgaaaaagaatatcttcgcttagggttgcttatcgaacaaatatttaatggtgaaaaagtacaaatggtctcatctgctataaatgcaacaggtaccattcgagtaaacgaattcaggtaa

SEQ ID NO: 78318 - DNA, 1950 bp, Citrobacter koseri
atgttattcaatcagtggttaagcaatataaaaatcagtagaaagctgtcagcaggatttgggggggtgctgtttctggttgctattgccacgatactcagcgtgctgcgttttaaggaaatacgtgacgtctatataaaaactaacctgatgtataatatcaatattgaagtcttccaggcgaaaattaaccggttgaaatatttctacggtgatgaaaaatccggccagatgatgtcagattatgtcagtcatgcatcggagctggcagccagcgcagatgaactgttgtgggcaccgggggagctgacggttatcaataaagtagtggacaatcttaagagctttcagtccagcatcagtgaaatgcaaaaagcgacggcagatatgcgtactttgcgcgatgagctggataaacttgttacagaagatctcacaactcgttataccgcgctcgttcgagcgtcggtcgctgagacagccctgagcacacaaatttatgagcaactgttcgctattagtaccgtccgcgacgcggcgcgggttgtgcgttataacccgaccattgcgtctcgcaatggcttggaaagccggttcaacagcacacagaattcagtacagtcactgatcgaacaactgccggaagagatcataacaccgctgcagtccctgtgggataacacagtgaaataccacgatctgagccttcgttattttactgctgctggtgccctgatcgcagcagaagataaagtaaaaaccagtggcgatctcagcagcgcgtcactgagggagatcattgcgctggtgaaagcacataacgatgaactggcgttcagttctggcaccattgctgccgtgatcggtattcttgccatcctgattggcataattgtttcctggtgggccatctgtcagattacccgcccaatcgcgcgcaaccttgcactggcagaacgtattgccggcggcgatctgagttcaaagatcactgctagcggtagagatgagtttggtcagcttaccacagctatgggacggatgaatgacacgctgcgttcaatgatccatgaagttcgtaacagtgtaagccaggtttcccgtgcggccacggaaattgcagaaggtaactctgacctttcctcccgaaccgaacagcaggcggctgctgtggtggaaaccgccgcaagcgtggagcaactgaccgcgacggtaaaaaataatgcagataacgctcgcaatgccagaagccttgctgcacaggcttctgaaaccgctggtgaaggtggtagtgttatgcgtgaagtagtaaacactatgaatgatattcacaacagctccagcaaaatcgcggatataactgccgttattaacagtattgccttccagaccaatatcctggcgttgaacgccgcagttgaagccgccagggcaggcgagtctggacgtggtttcgctgtggtggcaagcgaagtgcgtaacctctcccagcgcagctcccaggctgcgaaggatattgagcagcttatcagtgagtcggtatcccgcataagcaagggtagtgacctggtggctaaagctggagaaaccatgtcgcaggtagtcagttcggtcacccgggtaaatgatatcatgggcgaaatatcttccgcttcagaagaacaaagccggggtataaatcagatagcacaagctatgggcgagctcgacagtaccacacaacagaacgcctcactggtcagtgaatcctcaaccgctgcaggtgcactggaggaacaggctcatgtactggaaaatcttgtggctgtcttccgtctggatgattatgcaggcggcgttgtgttaccgggtatagaagatacaaccagaaagtctgcaacacgaattagcgaagaaccggctgccagaaccgtaccgactgctggtgataaaagctggagcaacttctga

SEQ ID NO: 78319 - DNA, 1299 bp, Citrobacter koseri
atgcgggctgtccaggttcgggaaatagccagtagattaggtcgccatgttgctattcttggagatttacaggggcctaaaattcggatttcgacgtttaaagaaggcaaggtatttcttaatgccggggaagaatttttgctcgatacgaatctgggtaaaggggaaggtgataagggaaaggttggcgttgattataaggtattgcctgacgatgtgtctcaaggtgatattttattactcgatgatggccgggtacaattaaaagttaaggaagttaatgggacaaggattctgactgaagtgactgttggtggtcctctttctaataataaagggattaataagctcggtggtggtctgtcagccgatgcgctgacagagaaagacaaggccgatattattactgctgcacaaatcggtgtagattatcttgctgtttcttttccccgtagcggtgaggacctgcaatatgcccgtcgtttagctcgtgatgcgggctgtgatgctaaaattatagccaaggtggaaagggcagaagcagtcagcgacttaaatgcaatggatgatatcattaacgcttcagatgcggtgatggtggcccgtggagatttaggtgttgaaataggcgatcctaaactggtcggaattcagaaaacgttaattcgtcgggcgagaaaactgaaccgtgcagttattactgccactcagatgatggagtcgatgattatcaacccgatgccaacccgtgctgaggttatggatgtagctaatgctgtcctcgatggtactgatgcagttatgctgtcggcagaaacagcggcaggtaaaaatccggtggagacagtagaggcgatggccagggtttgccttggtgctgaaaaagtacctggcgttaatgtgtccggacatcgtctggacattcagtttgacaatgtggaagaagctattgccatgtcagcaatgtactcagcgaatcatctgaaaggtgtcgctgcaatactgactatgactaaatctggacgaacagcactgatgacttcccgtattagttctggtctgcctattttcgctctgtcccgttataaacatacgctgaatcttatggctctttaccgtggggtgacgccagtctactttgacagcttgagtgatggtgttggagctgcacaggaagctgttaatctgctgcgtgaaaaaggatatttgatatccggtgaccaagtaattgtcactcagggagatatgacagatgtggcaggaagtgccaataccgtacgtattttaaatgttgattaa

SEQ ID NO: 78320 - DNA, 1158 bp, Citrobacter koseri
atgaaaattgttattgccccagactcttataaagaaagcctttctgccactgaggtagcccaggcgatagaaaaaggatttcgggaaattttccccgatgcacaatatgtttccgtaccagtcgccgatggtggtgagggaacagttgaagccatgattgccgccacgcagggttctgcacattccaccttagtgaccggaccactgggtgaaaaagtgcatgccagttggggcatatcaggcgatggaaagaccgcgtttatcgaaatggcggcagccagcggcctggcgcttgttccacccgaaaaacgcaacccactgattaccacgtcgcgtggcaccggggaattgattatacaggcgctgaacagtggggtgagcaatatcattatcggcattggtggcagtgccactaatgatggtggtgtcgggatggttcaggcactgggcgtgaagctgtgtgatgccagcggtactgagattggttatggtggtggcagtctgaatactctcagcaccattgatgtgtctggtattgatcctcgtataaaaaactgtgctatccgtgtcgcgtgcgatgtcactaatcccctggttggtgaactgggtgcctcacggatcttcggtccacaaaaaggggcgaatgaggcgctgatcctcgagctggatcgcaatctgtcacattacgctgacatcattaaaaaatttttgcatgtggatgtgaagaacgttcctggagcaggcgcggcaggtggtatgggggctgcactgatggcatttcttggtgcagaacttaaaagcggtattgagattgtgacccaggcacttaatctggaagaacatattcatgactgtacgctggtggtcaccggtgaagggcgtatcgacagccagagcatccatggcaaagtaccggtgggcgtggcgagtgtggcgaagaaatatcacaaacccgtggttgggattgccggaagccttggtaaagatgtcagtattgttcatttgtatggaattgatgcagtattcagcgtattaaattgtatatgtactctggaagaagcttttcgttgttccttcgataatatttaccagtcatcacgaaacattgcagcagtattgtctgtcggaatgcagacggaaacaaaaatggttcaatag

SEQ ID NO: 78321 - DNA, 891 bp, Citrobacter koseri
atgacaatgaaagttggttttattggcctcggtattatgggtaaaccaatgagtaaaaacctcctcaaggcaggttactcgttggtggttgctgaccgtaacccggaatccattgcggaagtcattgccgctggtgcagaaaccgccgccacggcgaaagatattgctgagcagtgcgacgtgatcatcaccatgttgccgaactcgccgcatgttaaggaagtggcgctgggtgacggcggtattattgaaggggcgaaaccgggcacagtgcttatcgacatgagctccattgcaccgttggccagccgtgaaattagcgacgcgctgaaagcgaaaggcgtggatatgctggatgcgccggtcagcggcggcgagccaaaagcgattgatggtacgttgtcggtaatggtcggcggcgataaagcgattttcgacaagtattacgatctgctgaaagcgatggctggctcagtggtacataccggcgacattggcgcgggtaacgtcactaagctggcgaaccaggtgattgtagcgctgaacattgcggcgatgtctgaagcgctgacgctggcgaccaaggcgggtgtgaacccggatctggtgtatcaggcgatccgtggcggactggccggaagcaccgtgctggacgcgaaagcgccgatggtcatggaccgcaactttaagccaggtttccgtattgacctgcatatcaaagatttggcgaatgcgctggacacttctcatggggtcggcgcgcagttgccgctgactgctgcagtcatggagatgatgcaggcgcttcgcgcagatgggctgggcaccgccgaccacagtgcactggcatgctattacgaaaaactggcgaaagtggaagtcactcgctaa

SEQ ID NO: 78322 - DNA, 771 bp, Citrobacter koseri
atgaataacacgattttcccgaataagtttaaagcggccctcgcggcgcaacagattcagattggctgctggtctgcattggccagcccaatcagtaccgaagttttaggcctggcgggttttgactggctggtactggacggcgaacacgcgccaaacgatatctcgacgtttatcccgcaattgatggcgctgaaaggcagcgccagcgcgccggtcgtacgcgtgccgaccaacgagccggtgattatcaagcgcctgctggatattgggttttacaacttcctgatcccgttcgttgagacacaagaagaggcggtgaacgccgtggcgtcgacccgctatccgccggaaggtattcgcggcgtgtccgtctcccatcgcgccaatatgtttggcaccgtaccggactactttgcgcaatcgaataagaacatcaccatcatcgtgcagatcgaaagtcagcagggcgttgataacgttgacgccatcgcggcgaccgaaggtgtagacggtgtcttcgtcggcccaagcgatctggctgcggcgctaggccatctcggcaatgcgtcacatcctgatgtgcagaaagctatccagcacatttttgcccgcgcgaaagcacatggcaaaccaagcggaattctggcgccggtagaggcggatgcgcgtcgttatctggaatggggcgcgacctttgttgctgttggcagcgaccttggcgtgttccgttcagccacgcagaaactggctgattcttttaagaaataa

SEQ ID NO: 78323 - DNA, 1332 bp, Citrobacter koseri
atgatggataacgccattacttcaaagaaaggggtgccaacccgttatttgatactattaattatttttattgttacagctgttaactacgcggaccgcgcaacactttctattgcaggcaccgaggtggcaaaagagctgggtctttcagccgtatctatgggttatattttttctgctttcggttgggcgtacctcctgatgcaaatccctggcggctggctgctggataagttcggttcgaagaaagtctacacttacagtctgttcttctggtcgctgtttacttttctgcagggttttgtcgacatgttcccgctggcttgggcgggtatttcaatgttcatcatgcgctttatgctgggcttctcggaagcgccgtccttcccggcgaacgcccgtattgtggcggcctggttcccgacgaaagagcgcggtacggcatctgcgatttttaactccgcacaatatttctctctggcgctgttttcgccgctgctgggctggctgacctttgcctggggctgggagcacgtatttaccgtgatgggcgttatcggttttgtgctcaccggcctgtgggtaaagtttattcataacccaaccgatcacccgcgtatgtcgcaggaagagctgaagtttatctctgaaaacggcgcggtcgtggatatggaccataaaaagcccggcgatgtgaaatcaggtggtcctaaactgcattatatcaagcagttgctgacaaaccgcatgatgcttggcgtgttcttcggacagtattttatcaacactatcacctggtttttccttacctggttcccgatttacctggtacaggaaaaaggcatgtcgatcctgaaagtcggtctggtggcgtcgattcctgcgctgtgcggatttgccggtggcgtgctcggcggtgtgttctctgattatctgattaaacgtggcttcagcatcaccctggcacgtaagctgccgattgtgctcggaatgttgctcgcgtcgaccattattctgtgtaactacaccgataacaccactctggtggttgcgctgatggcgctggcgttcttcggcaaaggcttcggcgcgctgggttggccggtgatttccgataccgcgccgaaagaaatcgttggtctgtgcggtggggtatttaacgtatttggcaacgtagcctctatcgtcaccccgctggtgattggttatctggtgagcgagctgcactcatttaatgctgcgctgatgtttgtagggtgttcggcgctgatggcaatggtttgctacctgtttattgtcggtgacattaaacgtatggaattgcagaaataa

SEQ ID NO: 78324 - DNA, 1572 bp, Citrobacter koseri
atgaccaacatcgaaatcagacaagaatcgccgagcccattttatataaaagtccacgagacagataatgtggcgatcattgttaatgacaatggtttgaaagccgggacgcgattcccggatgggcttgagctgattgaacatattccacagggacataaagtcgcgctggtggatattccggttcatggcgaaatcgtacgttacggcgaagtgatcggctacgccatgcgtgatattccgcgcggaagctggattgatgaatccatggttgaactgccaaaagccccgccattgaacaccctaccgttggctaccaaagtaccggaagcactgccgccgctggaaggctacacatttgaaggatatcgcaacgccgatggcagcgtgggcaccaaaaatctgctcggcatttccaccagcgtacactgcgtggcgggcgtggtggattacgtcgtcaaaatcattgaacgcgatctgctacctaaatacccaaacgtcgatggtgtggtcggacttaaccacctgtacggttgtggcgtggcaattaacgctccggcagccgtggtgccgattcgtaccatccataacatctcgctgaacccaaactttggtggcgaagtgatggtcattggtctgggctgtgaaaaactgcagccggaacgtttactggaaggtactgacgatgtgcaaagtattccggtagacagcgccagcatcgtcagccttcaagatgagaagcatgtgggcttccgttccatggtggatgatatcctgcaggtcgctgagcgccatctggctaagctgaatctgcgccagcgcgaaacctgtccggcctctgaactggtcgtcggcatgcaatgcggcggcagtgatgcattttctggcgtaacggcgaacccggcggtgggctatgcctctgacctgctggtacgctgcggcgccactgtgatgttctcagaagttaccgaagtgcgtgatgcgatccatctgctgacaccgcgcaccataaacgaagaggttggtaagcgtctgctggaagagatggcatggtacgacaactatctcgatatggggaaaactgatcgcagcgctaacccctcaccgggtaacaaaaaaggtggtctggcgaatgtggtggaaaaagcgctgggctcaattgcgaaatccggtaaaagcgctattgtcgaagtgctctctccgggccagcgtccgaccaaacgcggcctgatttacgccgcaacacccgccagcgattttgtctgcggtacacagcaggtagcgtccggtatcaccgtccaggtgttcaccactggtcgcggcaccccctatggcctgatagccgtgccagtaattaagatggcgacccgtaccgagctggcaaaccgctggtacgacttaatggatatcaatgcgggtaccatcgccacgggcgaagaaacgattgaggaagtcggtcagaagctgttcgagtttattctcgatgtcgccagcggccgtaagaaaacgtactccgatcaatggggactgcacaatcaactggcggtgttcaatccggcaccggtgacttga

SEQ ID NO: 78325 - DNA, 1161 bp, Citrobacter koseri
atgactagctggcatctggaatcaaaaatagcacaagatattgttgaccgggcaatggatatcattgatataaatataaatatcatggatgcccacgggcgaattgttggtagcggagacgctgagagaattggaaaaatccatgagggtgcgcttctggttttgtctcaaaaccgagtgctaaatattgatgattccgtagctcggcgtttatttggtgtctatcaaggtattaatctccctttacacctgaatggtgaggttgtcggtgtaattggtcttactggtgatcctgatttattaataaagtttggagagttagtctgcatggcggctgaaatgatgctagagcaggctcgtcttatatcttttttaactcatgataatcgtttgcgtgaagagtttgtgatgagcattattaaatctgaatcatattcaccgacacatcatgtctgggctcagaagcttcgggttaatatccatttgcccagagttgcgatccttattgaaggagatctcagaaatggacagtctgattcgactgaaataatatctgtacttcagagtttacaaaagattctggtgggacaagatgaaaataatctgattgctattatatcaccagtaagcatggctatattattacctgcgttgaataataatgttttggatgagaaagaacatcttaaccatatagataaactgatatctcgcacaaatgaaaataactctttagtatttcgtgtttctcaggggaagtatttcccgggggaaggcggtattgcccgttcctggcgaacggcaaaggcttcaatgtttgtagggaagcagcgtatgccaaaggcgcgttgctattcttaccagcagttaatgttgcctgttctactcaatagcctgaaagatagctggcaggccagtgagattttatctccggttaaccgattgaagttagaagataaaaacgggttgcttttaaaaactctgaccgcatggttccgctatgatcttcaacctcaacgggtatcaaaagcattatttattcatagaaatactcttgaatatcgattaaaaaagatagctgatttaactgagctagatcttgataaatttgaaaatagagtaatgctgtatatcgcaacgcaacttgatgatacacaatga

SEQ ID NO: 78326 - DNA, 777 bp, Citrobacter koseri
atgcaagcagagcagtcattacaacgaacagttacacggttgtgcattcagtgcgggctttttctattgcaacacggagcggagagcgcactggtagatgagctctcgagccgccttgggctggcattagggatggacagcgtggaaatcgctatctcctctaatgctattattctgactactataaaagacgggcaatgcctgacctctacgcgtaaaaatcaggaccgcggtattaacatgcacgtggtcaccgaagttcagcacattgtcatccttgcagaacacaaattgctagattacaaaggcgtcgaaaaacgttttagtcaggtaaaaccactccgctaccctcccgggttagtagcatggatggttggtctttcctgcgcctgtttttgcaagctgaacaacggtgggtgggatggtgcagtgattaccttatttgccagcatggtggcgatgtatattcgtcagagcctggcacagcgccatttgcatccgcagatcaacttttgcgttaccgcatttgtcgcgaccacgatttccggactcttgctgtatctgccaatctttggccagacgccaacagtagccatggctgcaagcgtattgctcctggttcccggctttccactgatcaactccgtggcggatatgtttaaaggccacatcaatacgggtctggctcgctgggctatagccagcctgttgacgctcgcaacctgcgtgggggtagtcatggcactgacactttgggggcttcgcggatgggtataa

SEQ ID NO: 78327 - DNA, 474 bp, Citrobacter koseri
atgggtataatcgacttcattctcacgctgatgcaggatatgctgctttccgcgatccccgcaatggggttcgcaatggtctttaacgtcccgcaccgcgtcctgccttggtgtgcgctgcttggcgcactcggtcacggttcgcgcatggcaatgatgatcgccggggttaatattgaatggggaacctttatcgcctcattgctcgtcggtagcatcggcattcaatggtctcgctggtatctggcgcatccaaaagtatttactgttgcggcggtgatcccgatgttcccgggaatttcagcctatacggcgatgctctctgcagtgaaaatcagccactttggctatagcgaaccattgatgattacgctactgaccaatttcctgaaaagctcgtcgattgtgggcgcactttctatcggactctccgtgcctggcttgtggctctaccgaaaacatccacgcgtttaa

SEQ ID NO: 78328 - DNA, 216 bp, Citrobacter koseri
atggggacattggccatttactcaattattgaccctgatgacgaattgtttttagaaggattagatgaggatgactggattctggcgaatattgaatggcttgcagattgtttcgaagataactcagtgcccatagaagaaccttttttcagatttttttatcaagctcttaatgctgcagattggcgatgtacaagttgcgcaggctgtatataa

SEQ ID NO: 78329 - DNA, 141 bp, Citrobacter koseri
atggcaatctattatgccatgggcattggattatcagtttcagaaataacccgtttatcctccctgagaaaaggagagattgtcatatggggacattggccatttactcaattattgaccctgatgacgaattgtttttag

SEQ ID NO: 78330 - DNA, 744 bp, Citrobacter koseri
atgagtaaagttgctttggttactggaggtagcagaggtattggttttgctgcagcaaaggcgttatatgacatcggatatactgttattgttgctgcccgtaatgaagaaagcttgcaacaatgtgtacaaggtttttcaccggaaagatttatccctatggtggcagatgtcactaaggaagtggcaacacagtcattatttcgtgctatcagaacacgctttggtagactggatcttttgtttaataatgcgggtaataatagtccggcacaaacaatagaagaaatttcattcgatgaatggttgcgagtgttcagtgcaaatgtacactccactttcttgtgtgcgaaggaggctattaaaatcatgaaagaccaaacgccaatgggaggacgtatcatcaataatgcttctgtttctgctttaacacctcgactctatactgcaccatatacagcatctaaacatgctgtgactggtttaactaaggctatctcacttgattgtagaagatttaatatttcttgcggccaaataaatatcggcaacgctgaaacggcactatctggcagaatgagaaagggcgtttatcaggctgatggttctgtaagcgcagaagatatgatgagcgtaaatgacgtggctactgctatacagatgatggcacagctaccagttacgacaaacgttttggaaattactatcattgcaaacaatatgccatttgttgggcgagggtaa

SEQ ID NO: 78331 - DNA, 165 bp, Citrobacter koseri
atggttacagataacaacctgggcggctccggtgcctccacagtggaggggagagaggttgtaacagtaaatagtaattctgatggtaccttcgataaatcagggcgcattgtggtgggagaatatggctataatgttatacaaaagacagcaactggtacctga

SEQ ID NO: 78332 - DNA, 1230 bp, Citrobacter koseri
ttgagcaccgcacaaataatatgccagcgcactatccctgcaacggtccaggtaatgacccagttttcgctgaatgttgcggctgctgtgacgggctccttttcattgtctcaagcgaccctgtcattcctgtggctgtcgttagcgggtattacaattggtgcaggattaactgcgatattgatgtatggcaatgggattatccggcgcaaatttggtgtggcaccaggtaatgatgtgttgttgagtctcatagtaccgtttcttgtatattccgtagctgaatatatgcaggtatcaggaattcttgctgcagtcgccgcaggtatttgcatgagctatgtcgaaatgtcgggacgtttgcaggcaacgacccgggttgagcgtcaggcggtatggacgatggtgcggttcacattgaacggaatgatgttcgttctgctcggagaacaactgcctgtactgttgaaggggctaaaactggctgccgatgaaagtggcgggcgtgagttgtactggttgccgatttatggtgcactgatttgtctggggctcgtgctgacccgactgctctgggttgttgtctctttgaagctgggggagttttttgccaggcgccgtggcaagcaacgcacaaaaatcagtaaaaggatcatgcttgctatatctgtcgcaggcgttcgtggggctgtcacactggctggtgttatgacactgccactggcgatgtctgatggttcgccatttcctgcccgcgagcttgctatttgcctggccgcaattgtgctgttgttttccctggtgattgcaagcgtggggttgcctcttctcctgaaaaaagagcaccatcctgctaatgaccaggtattgagagaacgtacgattgttcaggatgcaatattgaatgcggcgttgaaaagtatagcaacaacgtgccaggagttagccgcggagcatccggacgacatcacgttgtacacaaatatggccgatcgcctgtcgatttcattgctacggcagtcaggtaaagatgaacaggaaaagtcatcagaggcattggcgcgtgaacaggagatttcccgcaacatgcgtcttaaggctgttgtagcctcgcgccaagcggtttaccatctggctaagcaacaccgtatttctgatacattagctcgtgagcaagtgttatggttggacatggaagaagcccgcattctcggtgggcatttggactga

SEQ ID NO: 78333 - DNA, 1026 bp, Citrobacter koseri
atgccgttattcggtcttattctggtgtcattgacgggaagtgcagtagccgtcgagaaagtgtttgccatcccggggctgggcagagcaacgctcggtgccgttgtcgcacaggatcttcctgcgttgcagaccggtattctattcctgctgattatcgcatttatgtttggcattctggccgcggggatcagataccttattcttggcagcgcattacgttcgtcatctctgccggtaaccactgagccggacgacagtaacagaaaactgttgattgtattaccggtgatctgtggcgtcgcactgactctccttctgctggccggattaccacgtgacccgtacacgtctgagtttctgcgcctggcaccgccttctctggcactgcccttcggtgcagacgccatggggcgtgatttactggcgagagtagcgcacggtacggtgcacacctgctttctggcactgatggtctcgatgatttgtttggttctgggattagtgattggccttttcccccgggtattcgtggggccaaccgagatggcgaatgccttacccccggttattgcggggttactggtcgtttcggtgagcggccccggcagttcaggtgctgccattgcaatagcggctgtcggctgggctcctctggcgacacacactgccgcactggcaacagagatacgtgccagagcttatatcagtatgctgcccgttctgggtgcgggctggctacgccagaatctgttctatgtttttcctgcactcattggccctcttttccgtcatgccatgctgcgattgcctggaatcgcgctggcattagcgtcactgggatttctggggctgggggcatcaccacctgagccggaatggggcagagttctcgcggaaggcatgccctatcttgaacgcgcgtactgggtcgtactagctccggcgagtgccctggcgcttttatccgtgatgggggtgagtctggcaggcctgaccagtaagaagcattcaaggatacaatga

SEQ ID NO: 78334 - DNA, 231 bp, Citrobacter koseri
atgaaagtactgagtatcgttggcgcgacgctgttagtgacgtcttttcatgccgcggcatttgtttcaacatcaccagtgcctgtcgggcaacaaataaacaccacgagtgccgtgaacaacgggcatgcaataccgtcggaagcgataaatgccgatgcgacacaaatcataccgatagctggctgtaattgcgcattttgtacctcactacgcagcgttaacctctaa

SEQ ID NO: 78335 - DNA, 1236 bp, Citrobacter koseri
atgtccgaagtcagtgcaaattttcatggcgataaacgcctgccggttaccgtactttcgggatttttgggagcagggaaaacgacactgcttaaccatattctgaacaaccgggaaggccgtcgtgttgctgtcattgttaatgatatgtctgaggtgaatattgatgctgcccttgtgagggaaggtggtgcagaactctcccggactgatgaaaaactggtagaaatgagcaacggttgcatttgctgcacgttgcgcgaagatcttcttcttgaagttaatcgtctggcaaaagaagggcgttttgatcagcttgtcattgagtccaccggtatatctgagcctctgcctgttgctgaaacatttacctttgcgggcgatgacggtgaaagcctttcgacggtggcccgccttgacaccatggtcactgtggtggatgcgtacaattttctgaaggactatggttcgcaagacagtattcagtcacgcggagaatcgttaggtgaaggtgatgaaaggagcgtggttgacttgctgattgatcaaatcgaattctgtgatgtgctgatcctcaacaaagttgacctgattcgcgacggtgcgcgagagaagctgatggctattttagtgtctctcaatcctcaggcaaaaataattatttcacagttcggacaggttcctctggacgatgtgctgaataccggacttttcgattttgataaagcggctcagtcccctgggtggttaaaagagttgcgtggcgaacacacacctgaaaccgaggaatatggcattacgagttttgtattccgtgcccgccgtcctttccatcccactcgcttctgtcattttctggaaaatgaacttggcggtgtagtcagatcgaaaggttatttctggctggcgagtcgcccggagtacgccggaagctggtcacaggcgggaggagtagcaagacaggggttcggcggaatgtggtgggcaagcgtgcccagagatcgctggccggaagatgaacagtcgctgaagtttatcgaggcaaactgggtcgatggcattggcgatgcccgccaggagctggtgtttatcgggatagagatgaaggaagctgaactgcgcgcaaaactgggtgcagcgttgttaaccgacaaagagatggcagaaggcccacatctctggtctcaataccctgatcctattgaatcctggtttgaagataaagtaaccctatag

SEQ ID NO: 78336 - DNA, 327 bp, Citrobacter koseri
gtgggcaccaaatcacgccagcgctggttgttttatgcgtatgacaggatacggaagacaggcgtggcacacgtccttggtgagcacactatggccacgctggagcgtcttctgagcctgctgtcaccctttgatggggtggtatggatgaccgatggctggccgctgtatgagtctcgcctgaagggaaagccgcacgtaatcagcaaacgttacacgcagcgcattgaacggcataacctgaatctgagacagcatctggcaaggcttggacgaaagtcactgtcgttctcaaaatcggtggaactgcatgataaagtcatctga

SEQ ID NO: 78337 - DNA, 747 bp, Citrobacter koseri
atgagcagtgatgcagaaagtaatggttctcaagttatcgctagggctgcgaaaattcttcatgctcttgaagtacacccgggcggtcgaactatttcgcagctttctcgtgagacagctttgcctaggacaactgtccatagattggtcacctcgctggaatcgcagcaattactcattgcaggtgcttcaggggttaggttaggacctgccctagcacgtctcgcagcttcagcacacactgacattatttctctctcaagagcatccattgagacgcttgggcgaagaactcgtgaaactgttgatttaagtgtttatagagggagtcacgctgtttcagttagtcaatacacttcagaccaagagcttagagtggtttcggctgttggcactgctttcccgtgccactgtactgctcatggaaaagctattctggctaattttagcgataagcaagtatctgatcttattggaacacggccggatgtaaggaccaaaaacaccctttcaacactgccagaaattcttgaggaactgcgggaaacacgcgaagcaggatacgctattgattgtgaggagcatgcaagaggtgtttgtggaattggtgttcatttagatattggtcttcatgaacattacgcagtttcaattgcagttcctgcaatccgatttgaggaaaagctcgaccttctacttagctctttgcttcaatgcaaggctgagatagaggcttcaataagatag

SEQ ID NO: 78338 - DNA, 1152 bp, Citrobacter koseri
atgaatgaaatgaacaaaatgggggcgtttacgctcttggcggttgcatgccttactatcatggtgggctgcgtaatcgttcccggactgacagaagtcgcagaaaatcttggcacaccgtctgcagcaagctggctcgtcaccgtaccatcactaggggttgtagtatttggtccattagccggcaaattcatcgacaaggccggggcctataaggcactctcttggggccttttcctttatgggcttttgggaaccgcaggagtttttcttcatggacttgtaacggtaatgattgatcgcttactgcttgggggagctacggcaattgtaatgtcagcaggaacagggttgatttctacattttacagcggacggtctagattaaaaatgattgcatcgcaaggcatgtctattgaattgggaggggtgatattcctattcattggagggaccctagctacattaggttggcaatggccatttgtattgtatcttgtcagttggctctttcttgctatgcaactcatttttattcctgaaccatcttatgaagtttctgaaaagaatgaggtgcttgatggcttatctaaaccagaaacaatcggaagcctgaagccagtatttatcgcagcagtattctctatgatttgttttttcaccggcatcatagtgattcctcaacaattctacaaaatgagcataggctcagcggaaactggttactatctgtcattcatttcactagtagcagttggcgccgcagcattgatgccaaaaatagttgaccgcattcatgagtttggaactctttacgctgcttttgcgtgttatacattggctcacatcatcttttccatagcttcttctgtttcgatatttacagtaggtggtatcttgatgggattcggttttggattgtctgtaccgcttgttaatcacatgaccgttgagcaaagccatatgagtgtcagagggcgaaatctagcatggctttcgatggcgattttttccggtcaattcctttcgtcgtttatggagttcatacccggagattcatctactgtattcttaggtgcagctatcgttggggttatagttatttttatattggcaggaaatcactggtcgcgccgccgtaaaatcgcataa

SEQ ID NO: 78339 - DNA, 249 bp, Citrobacter koseri
atgccggaatttataaggccaggtaagccgacacagaatgccttcatcgagcgttttaaccggacgtaccggacagaaattctggatttttatctgttcagaaccctgaatgaagcacgggaaatcacagagcgctggctgacggaatataacagcgagcagcctcatgaatccctgaataacctgacaccggaagagtaccggctaatggcggaaaaaccggaactctcaaaaagtgcgtggaactaa

SEQ ID NO: 78340 - DNA, 321 bp, Citrobacter koseri
atgtctactgttgtggggtcagtccaaagaggctatgcaggtgtcttgattttgtggtccactacaaattttcgccgcaagggaaagcaacgtttgccagtacgcaacccggtgccactggtgacgccagaagcgctgaaccagagctggtccatcgattttatgcacgatgcgctggtgtgtggcagacgcttccggaccttcaaagtggttgatgactttaaccgcgaggctctcgccatagaaatcgacctgaatatcccggcgcagcgggtggtcagagtgctggacaggatcgtggcaaaccggggctaccgctga

SEQ ID NO: 78341 - DNA, 711 bp, Citrobacter koseri
atgaagattaataatccttttgaaaaaaagttaaagagaagtgtacttgaacatctatataaaaaaggcactattgatgaaaatgctattgttatcaacgagttaacgattgattctttttctcgaagggctgatcttgttgtaataaaaaatggaaaaatgattgcatatgagatcaaaagtgatgcagatagccttaatagattatcagggcaaatggataaatatcttgactatttcgataaggttgtagtggttactacgtcaaaacacaccccaaatatattaaattctattaatgaaaaaattgaagtttgggagatcgcagatgacaaagttattttaaagaaaagaggtaaattgaaacgagtcgagaataaggaaaaatatcttgatcttttaaaagttcatgagatgaaaaagatggcgcatctatttcagataaaattagaaggaaaaaacaaacaagaagttagaaaaagtattataaaaggattaagtggtatttcttttgaaaaattgaaggcatttacaataaatgctatctctaatcgttatgctttgacatcaaacttgtttatagagaatattctactgagaaagaaagttattcttagtgatatcgatctattaagcccatactcagctcaaaggacaaatatatatattggtcatgaggaaagtatcttagatcaattgatgaagttataa

SEQ ID NO: 78342 - DNA, 150 bp, Citrobacter koseri
atgattgaattaacatctaaaggtgacaaatttggcataaactcggcacaaaaagcaactgcagttagaataaatttgcacctttacacccaactacattacaacgatgaattagaaagcattgatactgatgaagagtgggaggattaa

SEQ ID NO: 78343 - DNA, 429 bp, Citrobacter koseri
atgaacaaaaacaattttaattcagtaatgacacttgaagaacagcttgttgtcatcatagataaatacatatcaagacggtaccagtctcacgataaaagtttctcgtaccagctatacctccttttcgtaggatatcatttaaagtatttctacccaagacagctatacactcgctctaatcgtaacatagacaacattatgacgatgttcagctctgtatacaaatgccttacaagtactttgttgcagcgattgaacaataaggaggctgttatcagagagctaaactctctcgtgaactatatcgacaacaatcaagaaaaagcagaaggaatttatacggttgttagaacacagtatgaagtgaaggttatcgagaaagagttaacccatgaagtagtcagagtaaaaaatgttagattataa

SEQ ID NO: 78344 - DNA, 267 bp, Citrobacter koseri
atgaaaacatactcaatctttaccgttattcttacagcatttcttctaaccgcatgtaacagcgaaccctcagaaaaagatatttatacagctttaagtaaatggacgggaagccatcttacatcagtgaaaaaagttgattgcacaaaagaatctgataaaagttataagtgtaatgtcgtaacggtaattgatggtaatctcaagcaagcagcatctattaaactcctaaaaacagatgacggctggcagtttgtaggtaattaa

SEQ ID NO: 78345 - DNA, 198 bp, Citrobacter koseri
gtggttggcacggttgttggcgtaatatttggtgtctacgccgttgctgataatgaagatctgcacatactggaacagaccgctaccgacccagaaggcatcacgatggtaacgatcgatttggttaaaggcttctttcagccccagcccacgacgcttcagctcaatctgcaccagtggcaggccgttgatcagtag

SEQ ID NO: 78346 - DNA, 837 bp, Citrobacter koseri
  misc_feature (313)..(322): n is a, c, g, or t
gtggtgagccaggatgtagtcagttatcttgcccagtcggatatcactttccatgacctctttggtgtcgatatcttccacatcgatatcgatctcattgctgctctctttgcgcttgtaagtgccgacatattccacggcaaaacgcagaacgttttcatcccggatggcgtcgacaatcacgtatttatgcaggcatttatcgaacaacagttcggtggtctgtttgacaccgtttgttatattgacgttatcggcaaagattggcgtcccggtaaaaccaaacagctgcgcgttctcgaagaaattcacnnnnnnnnnntcaccgaactggctgcggtggcattcatcgaagataaagacgatgcgctctttgcgcaaatgcgcaagttgcgctttatatccttcatgggtgatggcgttattaagcttctgaatggtagtcagcgtcagtttggtgctgttttgcttgagatgttttatcagcgtactagtgttgttggttgtatccacgctgtctttcgcaaagccgttgaactcttttgccgtctgataatcaagatcccggcgatcgaccacaaaaatgacccgatccacttccggcatctccatgatcacttggctggctttaaacgatgtcagtgttttaccggagccggtagtatgccagatatagccgttctccggccttccctgcttgtggagattctccttcacatggcggatcatcgcttcacaggcgtaatattggtatgggcgcatcaccatcaggcacttacgggtttcgttcaggaccgtgtaatgggtgatcattttggcgatatggcagacttttag

SEQ ID NO: 78347 - DNA, 384 bp, Citrobacter koseri
atgagtaaaataataacattgtcgtatacaaataatttcaagcctattagcgataataaatctcaatcattgcgaatacactgtgtaagtgtacgattaaataaagaagagttagagcttctcaatgcaagccgtggtgataaacgcaaaggtgaatggcttcgcatggcatcacttcaaaagcttcctccgaccattcctgcaatcaatttagaagtttggcaatcattgtctgatatatctcaaaagctaaatcgtctaataatccaccttgatactaaaagcagtaatagtgaactgacgaaaacagagatcttcgctgttaaaaagcagattaaagagcttcgctcatgtcttacaggttctgatccgtccgtaaggtag

SEQ ID NO: 78348 - DNA, 810 bp, Citrobacter koseri
atgacgatgtgtcgggttttatgcgttgcccgggctgggttttatgcgtggctgcataatccggtctctacgcgggataaagataaccagcgtctgctgacgctcatccgcgattcatattctctgagcggtggcgtctatggctatcgtcgggttcatggcgatctgaatgagatcggtgaaacctgcggcaaaaaccgggtgggtcgtattatgcaactgaaccggattaaagccgtacgcggctataaagctccgcgtcgtatcgctggccggccttcagtggttgcccctaatcgcgtgcagcggcagtttactgttgtccgggccaatcaggtctgggtcaccgatattacgtatattcgcacctggcagggctggctgtatctggcggtggttatcgatctcttcgcccgtaatgtggtcggctggtcgatgaaacccactctctcacgcgaactggcactcgacgcgctgatgatggcggtctggcgacgtaaacctgacggcgaggtcatcgtacactcggaccagggcagccagtacggcagtgacgactggcaacggttctgtcgggccaataacctggcaccgagcatgagccggcgtggcaactgctgggataatgcggtggccgaatcgttcttcagttcgctgaaaaaagaacggatcagaaaacgtatctataaaacccgggatctggcccgggccgatatcttcgattacattgaagtcttctacaaccgggcccggcgccacagtcaccttggcggcgtcagtccggaggcctttgaacaggcctcgtcgtga

SEQ ID NO: 78349 - DNA, 921 bp, Citrobacter koseri
atgaatcatgctgatataaagcctgatatgatgttgattgaaaatgaaggttcagctaagttactacaatttgacgaaagtagtattgaaggggcatatatagcattatgtatccagaaatggattgctgaaggagtaaatgaaagagatatatgtatactgctaagaaacccggctaaacaatatacagacgatatcatttcagcattgcaatatttgaaaatacaatgtcgccttgagaacgagtatcaggatcttttaaatgaagctgtaatacagttacttttacaaatgctaatgtttgtctgtaatagaaaatccatagaaagctgggccactacaatggagcttctatgtaatataagaggagtaagtaaaagaggtgatgttacacgtttagaaaaagaacttagccagtttattaaatctcatcgggtaattaaagaagaaattgtcgattatttatattcattattaagtatatttggtgtcgataaaataaagtcttactttccgcagtatatgagtgggaatggtttagaatatagcatagaattactttctcgccacctcgataagttagatgtaaaagaaaacacatcagaagccattgatttattacttggcaataaaacgatacctcttatgaccatccataaaagtaaagggttagagttcaggaaggtcatcgttgtgggtcttgaacctggtgcctattttggtaaagaagaagagcaaatagaaaatcaaaaaacagtctttgtggcattttcaagagccattgaagaagtattaatgactcgttgtaaaataagaaacaatagttatggcaggtctttcaagcagaattgtaatgatataccgttaataacaaacatgataacttattgtggtatcgaggctgaagattatcaaggttga

SEQ ID NO: 78350 - DNA, 582 bp, Citrobacter koseri
ttgcgagaccgtattgatgaaattgaaattactaacaaaagaactctccaaccaattcgcgaacgtataagaggcatcaaggatagtagcaatcaaaaaaaatcatggatgcttttcgaaatagatgagtgcattggttattttaagaaaaatttaaaaagtgctgattttgataagatcaaagccaaattaaacaattttaaaggagcgtacatatcactcactattatgttggcatttgaacgaaaaactggtctggtcaaaaacatttctcgttcttaccgatatctccaactggatgaggggcaaactgacaactattatattgcattatgcaactatatctatgaatcggagaatttcgatgaaatgctgcttggtactctgattgatgaatttcaaaaaaaaaccatagcgcctttctctgtaactattggaaaagaagcctggcaggatgttctcgtgatatgggatattgtctttaactctcatggtggtgatatctttacggagttagatttagttgagctgatgaaaaatggtggagatgatagtaaaatccgtgcttattatcaggcctga

SEQ ID NO: 78351 - DNA, 525 bp, Citrobacter koseri
atgtcatctattcatagcagaaacatatctgaagaaacactaaacaaaacaaagtctaatttaacaaactcaataatcaaatcggcaggggacgttataagaaaaaatgaagttattgaaagaataaattctcttagcaaccaaaatttttgccagtgttttacccacatattttcccttcgaaatattattgaaaaaagcctctcattctactcaaaagaaatgccatcagcactgagtgattttaatttttcctttgaccaaaaagaagaaattaaaaaagttttatatgatgatgtttttagtgatttatatctatccttgctaagacttgacaatttacttcgcccttatcttgttttaaaacatgatctatcttatttcgacaaattcactgaaaaattgaatgatcgcgaaataaaaaaatcattaagagataatgagtctgaattcaatgtaagatcgcccatcacaaaaagcggatatgcacagccattccaaatcagctcagtttactacaaatag

SEQ ID NO: 78352 - DNA, 294 bp, Citrobacter koseri
gtggcgcacgtcttcggtgaacgcactctggccacactggagcgtcttctgagcctgctgtcggcctttgaggtcgtggtatggatgacggatggctggccgctgtatgaatcccgcctgaagggaaagctgcacgttatcagcaagcgttacactcagcgcattgagcgacataacctgaatctgagacaacatctggcaaggctgggacggaagtcactgtcgttctcaaaatcggtggagctgcatgacaaggtcatcgggcattatctgaacataaaacactatcagtaa

SEQ ID NO: 78353 - DNA, 714 bp, Citrobacter koseri
atgaatacgttagcactcatcctctctggtgaaggagaaccaattttaattacattatgcaaaatttgcgtcgcttttttcctgggaggaatcatcgggcttgaaagagaatcaaagggaaagcctgtcgggtttaaaacatgtgtgattatttcagtagccagttgtgccctgaccattgtttcgattcaatctgcggagtattacgctgagatttcaatgaatatccgtagcgatcctatgcgcctggccgcacaaatcatcagtggcgtgggttttctcggtgccggggttatcctccatcgccatgatgatgcgatatccgggctaacaacagcagccatcgtctgggcttctgctggcataggaattaccagcggagccggtttttatcttcatgccctgcttgccacagggttatttctgctggctataaagctcagttattttgtgatctttttacaaacaaaaaaccagctccccggcaaagtaaaaatccgcattattcttgacgaaaaatcagggctacacacgctggtagaaagtattaatcagcaaaaaagcattattgagaccattactatccgcgatgtaaaaaagggaaaaatagaggtcaaccttaaggttgtgatcagaaaaaaaataactctgcccgaactgtacagcaacctttctacgctcgaacacgtctgcgctatcgcgctggaacactga

SEQ ID NO: 78354 - DNA, 1023 bp, Citrobacter koseri
atgtccgttaagaaactcgaagatggtcgctatgaagtggatgtaaggccgcgcgggcgcgatggaaaacgcattcggcggaagtttgacaggaaagcagatgcacacgcatttgagcgcagtatcattgccaagtttcagaatcatgattatctgaataaaccggcagataagcgaaagctgagcgaatttattacgctttggtggcagttgattggtcgcaacaaaaactatgcgaaccgcagactaagcgcggttaattgtatctgccaggatatgggcgaccctatgctttaccagcttgatgcacgatgcattattgattaccgggcataccgcctggggcaggggatcaaggcttcaacgataaatcatgaccttttcgccttgagtgggattttcaagtcaatggctgagatcgacgagttccacggagaaaaccccgtgacgtcggttgcagcattgaaagaacccaaaaccgaaatgtcatacctgacccagaccgaagttgatcggctcttgtcgttatgttctggtgattactaccgcattgcgattttactgctggctaccggtgcgaggtggggggaggcatacaatctgaaagcggaaaatattgtcggtaacagggttatgtttaccctgacaaagaacggtgaaaggcgcgttgttccgatatcggatgatatcgccaggataatcaaagacagggaatcagggcggcttttccgggtaagttataaaacgttccgcttgaggatgaaagaagcaaaacccaatttgccagatggacaggcggcccatgctttgcggcacacattcgcgacgcacttcatgatgaaggggggcaacatcattgctttacagagaatcttgggtcatgcggatatttctcaaacgatggtttatgcgcacttcgctccagattatttactggacgctgtaagctataatcctctcagcggaatgtccacattgtgtccacactctggaggcaaggcgggggatttgagggtcagttaa

SEQ ID NO: 78355 - DNA, 171 bp, Citrobacter koseri
atgacgctggagtctgcaattaagctgtttggacatcctcggtttcataagtatcaagactggtttatgtatgaccggatcgacccaagccggggccagatcgcaccggctctcgcacactatgggcaagaatcaactcaatcagacccctccgggaaacagattggataa

SEQ ID NO: 78356 - DNA, 465 bp, Citrobacter koseri
atgacacaatcacgagaaattgatttaacggcgggatctcaacatttacgccaattcccgctggacaatgcccgtattgctcgcacgtgcaaaatgacaaccgcgcaggctgaaagcatccgggatatgaataccgaagagctgcaaaagcagattttcgttacaccggctgagttcgcatatctgactggtcgcacactcaaatcagttcgcaacctgatggatcgcgcgcagcttccagttcatcgcgaaggtatgcccggttcaaaacgcccaaaacgtttcatcatgctgcaagagtattgggatgccgtagcacattgccgcgccctgattaccccagaagaaaggcattacatcgacagattgatgcgcgataaggccacttatcgacgtaccaccggaaacaaacacaatgtgttgaagcgtaatagccgcaatgcgctatcacatggccgggcatag

SEQ ID NO: 78357 - DNA, 390 bp, Citrobacter koseri
atgaaacgagaatacgcagataaaattaattccctgctgcaatgcttccattttaataaagagtttctggaatggaatcacgattactctttgcagttgttacgtcatggcgtatcccatctttaccactttgccatgcttgagggtgagaacgacgaagccacgctggaagaactccgcaatgtcattgtctcaatcaccaatggtgaaattcctcaaccctacgatctgacctcaatcagcaatgaaccgagcgaaccagaaacaaactcagtgacgtttttaaaaccgcagtcggtaacggttgaaattacccaggaaatattgcaagacctgatacgatcagcggcaagcattccctctcaaatgaagagtccaaatctttactga

SEQ ID NO: 78358 - DNA, 273 bp, Citrobacter koseri
atgttcaccgaagagagaacatcatgggagcgggaaatgttgatccgcgaatcaattgaaagcgcggaaaaaggttttaccgttcagcttaaaaatggttcgcgtatttatataacgcccgacagcccgacaatagatttgattatctatggtcttgagaagtcgattaggggtaatcatgagcgtgcacgtatgacgttcatcgactttctttattactggcatgaaaggctgttcaggcagataaaaagaaaaccgcgcgccacccattaa

SEQ ID NO: 78359 - DNA, 225 bp, Citrobacter koseri
atgtcgattaagtcaataaagctggatagcgaaataagtgatccggaatttgtagagataagcacaaacgcacgaaaacatgagcgcacccaccttttggggctgcttcgtatttttgtcggccagctgaaaaaggaaaatgccacccttgaagagattttttcatctgtcgagcggtggatctgcaaccgcgaattagccaccaatgaggacaaaaatcaatga

SEQ ID NO: 78360 - DNA, 549 bp, Citrobacter koseri
atgaacaacgtcatgttagatattcgcgctctgggtaagtcaacggatgctccagtattcgccattgagtgcgttttcttcgaaccctcaacaggtcagattggcccgcagtattatcgcgccattaatatcacaacggtgtgcggtatttatcctgaagcggttttgcagcttatgaagggtgattccgagcagcgtgccgaggtaattaatgcaacctgtagcgcgattgatgccctgtctggcgcttgcaatttcataaagaaaatcgcatcgaaacacgaaaaactcttttgttggtcggctggtagttcgctggatgtagcgacgcttgctcatgctctttcacgctatgggctggagccgcttttaccatcttttgaattccgccatctctcaacactaatccagatcgcgggcgtaacagggtacgccccgcacccgcgccgctctactgcaacctacaggctgaccgatgccttttatcgggctgagcaggtttgcgaaatctggcagcgcctgaccagtcctcactttgagtctctgtga

SEQ ID NO: 78361 - DNA, 228 bp, Citrobacter koseri
atgcatccgcgtctttctgtcgtttgcagtgcgccattgcctgtatgcgccagggcggttgccgccctgaaatgttttacacgtggtcagcgcaatttctcccgcgtcaaacctcacgcctatctcgtgatccgtattggccgccgctggcgcttgcttagcaagaacggcggcgctcagtggcggctcatgacccatgaaacctacaaccaggagtttcgaaaatga

SEQ ID NO: 78362 - DNA, 978 bp, Citrobacter koseri
atgatcagatcgccaattaaatgggcgggaggaaaaacccgcgttatgccgcagttgcttgagcatttgccgaaagcggattgcctgattgagccgtttgtggggagcggtacggtgttcatgaacacggattaccgccgatacgttctctgtgacagcaaccgtgcgctgatcaatttcttccgtgtggtcacgactgataccgaacgcctgatcaacatcgcgagatcgatgtttcatggcgataacgacgaagagcggtattacgagcgaagagcattatttaactccatgcagtggagtgataccgcaaaagcggattctgccttgctgtatgcagcgttattcctttatctgaatcgccacgggtataacgggctttatcgcgtcaatctgaaaggtgaatttaatgttccatttggaaagtatgctgagccttactttccctccgatgaaatgcgtctgtttgctgaaaaggccagcgacacaaacgccgttttcatccattgcgatttcagccattccatccgttacatcgtggggctggattttgacaaagtcatttactgcgatccgccgtacattccagcaagtaaaaccgccaacttcaccgcttacggtaagccgtttaccttggatgatcatcgcgctctggtagcggctcttgtgtatgttaaccgtcagtacgccatcccctcgatcatctcaaacagcgacacacctgaaacacgcgatatctattccgcctttgatcttcacttttttagcgtacgccgttctgtcagcgcaaaaagccgcgatatggctgatgaggtgattggcattcttggcgtgtgtgatggctgcgggcgtcatggtggtggtcattgccctgactgtggcccatgcgctgggtattcagccggatgcggagatgaatccgatagcgatgtgctccctggctattgggaatcagaagaaaacccgatcccactgtga

SEQ ID NO: 78363 - DNA, 1002 bp, Citrobacter koseri
atgactgcctactacaacgaaatcgatcccttcgccgcgcaatggctgcgcaatctgatcgacgccgggcatattgcccctggtgtcgttgacactcgctcaattgaggaagtaaccgcaaatgaccttaaaggattcacgcaatgccacttctttgccgggatcggcgtctggtcttacgccctgcgccgcgcaggatggcccgatgatcgccccgtctggacaggttcatgcccctgccagcctttcagcgcctgcggaaagcggcagggaaaagccgatgagcgccacctctttcccacatggtttcgtcttatatcggagtgccgccctgacgttatttttggcgagcaggttgcgagcaaagacggcctcggccggctcgacgatgtacgcgatcacctggaaagagcggaatacgccttcgctggtttcgatctctgcgctgcgggcttcggtgcgccgcacatccggcaacgcctcttctgggtggccgacgccgaacgcgagcaatgtaaaaaatgcctatcaagatccccagaaggtcatagccaggatgttggcggggcggcaatcaaacctacaggactttgcctgtctggcgggctggaacactccgacagcaacggacgggaaaggcgggtatgtgggcgggagggttcggaacgggaaaatttcaacggatcggttggatgtgacggcacaacttgcgggttgggcgactccaacggcagcaatgaaaattcgttcaccggagcggttgcagggacgaacaccagcaccacacgaagtggagatactgccagcgcggttaacggtttctggcgagatgctgactggctcttttgccatgatggaaagtggaggccagttaaacccggacttaagccgctggttaatgggcttgccggacgcgtgggccagttgcgtgcctacggaaacgccatcgttgcaccggtcgcggaagcgttcataagtgcatatctggaaagtgcgcaatga

SEQ ID NO: 78364 - DNA, 2385 bp, Citrobacter koseri
atgaccacagcaacccgtggccgtcgcgccccttctccacctccaccgtatccgggtagcactgataatgctatcccttacgcttatggcgggaacaaaccataccagccgattggcgttgatgtagcgccggggctggatggtttcgactatctcacgccggacggcacgcggaagcatattgcgtttagtgaactgatagcggaagacgaaaagccggagcgcagcaagctgctgcgtcgccgtctggcctctcttccgcagtatatccgccgccattttgccttgaggctggatgcgctggacgctaaagaccgcaaagcggcagatcactggctggttaatacctttgagcgccacgtattaacgcgtattgatagcgtgaacagtgtttaccagcctgacattgtgatgcccggcattctgttgccaatccgcgatcagcttttccgtatgctctgggcagggaagaaagagttaaaaagactggcttatacgcttgccgatatctttacgagcgagtttatacgcgagtccgatcaccagttggcgcgcacgggcgatcctgagttcgcggcgctttctggttatggccgtattgcatcgctggcggtgcatctgaaaacgccgatccccggttggacagcttattgcaatgaagaacttgaagcggaggacgcgttacgcgcagttctccgtcttgagtcaccgcagtggtggttaaaccgcctgcgtcgtatccatgcccggtggcgtgagcatttaatgatcgcagcgggatacgtccagaaaaaatcttccccatacagcagcgccccatgccttacggaatggctggcccagaaaaaggctaaccgtgaatatcttaaggctatggaactggaagaccaggatacgggcgagcgcatttcactgatcgataaagtcgccggtagtgttgccaatccggccaaccgtcgccgcgaactcatgacgagaatgcgcggatttgaagatctggcgaagctggaagggctggctggtgacttctacacgctgacagcaccttcccgttaccactccatgcagcataacgggcgtcgtaataacaaatactgtggcgcatcgccgcgcgagacgcagcaatatctttgcaaagtctgggcgagaactcgcgccgcgtggaagaggaaaggtatccgtgtctttggcttccgcgtggttgaaccgcaccacgatgcaacgccgcactggcatttgctcctgttcatgcgcccggaaaaggtcgaacaggcgcgcgatatcttccgaaaatatgccttgagagaagacggcagcgagccaggagcatgggagcaccgccttgaatttaagccgattgaggacgctttaggtagcgcaaccggctacatagcgaaatacatttcgaagaatatcgacggctttgcgctggatggtgagaaggacgacgaaaccggggaagacctgaaagaaatgtccagacgcgtcagcgcgtgggcgtcgcgctggtctattcgtcagtttcagcagatcggtggcgcgccggtcactgtttatcgcgaacttcgccgcctgggtaatcgcgaactggtgttacatcctgaactggaaaccgcacgacaggccgctgatgctggcgagtgggataactatgtattagcccagggtggcccgttggtcgagcgcgataagttgcgcatccgtctgaattatgaaaccaccgaaaacggcaacgcctacggcgatgacgtccagcggatcaccggtatttactgcccgattacgggcaatgactctttgatcttcacccgcaccacgcaatacaaaatcgtgccgaagcgccagagcgctgacggtgtggccgttgacgttggtttttcaggcggcagcgccgcccctcggagttctgtcaataactgtacgcgggatgccgcggcaggtgctgacggtgttgaacatgccgccagcgaagcagcaggacagtcagaaatgactgcgccagctgagggcgtgacggtgaattttgatgcgctttcacggcaggaaaagcgagaactggcgcagcggcttagtgacgatgtgcgaagtaggtgtaaaaagcggccaccacaacgggaaaacggggccgggctaaccgtgaaagagcggcagatcagtgaactgctggcgctgcgcgggattgatgccagtgccggaatggtcagatcgatgatggccggtgcgtcagtggcgtgcggtgatctcgttatgtccgtgcaggacgggcggctggtatcccgcagccgtgccgcgtcggaaaaaatgccgtcgcaggtgatggcggcgaagaaaaagacaagcgacctcgtgaacaggatgaagtctgcgttttcggggcggaagtag

SEQ ID NO: 78365 - DNA, 699 bp, Citrobacter koseri
atgagctatctgggaagtaaggcagcgagcggggtttatcagaagattattgctgaaatgcccccacacgatacctacattgaaacgcacctgggcagcggcgcggtgatgttcttcaagccgccagcagggcagatggtaggcattgataaaaatgaggacgctttattgttgactagggcgcgctggaaagaaaaagggttaactcctcctgatattcattttcatcatggtgatgcggttagttttctggagggcttttttgattttgccaatgctggccgtgtgctggtttatgccgatcctccgtatctgccggaaacccgcaccggaaacgcacgctatcgctatgaatattcggttgcagatcatgagcggctattatcctgcctggtcagtctgccggataacgtttctgtcattctgtccggctacccgtcgcagctgtatgacgagcggttaaccggctggcgcagtaaggaatttcaggccatgacacgcggcggcgtgcgaacagaaaaaatctggatgaactaccctgaagggcgcgcatattcccacacgtttgccggaaaagattacaacgatcggcaccgtataaagcgcaaagctgagcgctggcgcgcaaaatatgcagcccttccgcctgctgaacggctggcgatcatggtggcgctcaatgaggttgacgcgggctag

SEQ ID NO: 78366 - DNA, 594 bp, Citrobacter koseri
atgagtagtaaaaaaaataaaatatcatctatggccgcagcgctggcggtggctcttgcccctgttcctgccagtagcattgtgcatcatgacgtatcaatctcccggcacagtacgtctacgctatccctccaggacgtaaaggattctgtggcataccttcctattgatgaggccaccagttatatgcttaacctggctgacaggatgaagacacacagggcaaaccttcgcatcgaatgggaagaaaagcagatccctattattctgaaaaatcagaaaaaagagactcaggaagggtttgaaagccttttccgtcatattgcggtatgtgcaagttttgtcgaggctgcaagggttgcgctgaaaagcgtacctgaaagtaacgcggaactgaggaaagagattgtcgcttttgctcgttccgctgcaacgcttcgctatacgattgaagatattttatccttcattgaaagcacgcatgtgccgaagaaaacttcagatgctgatctgggtgttaccgccgatcaggttcatgcacttatccgcagtgaacataaaaagctgggccttgaagatccaacgttccattaa

SEQ ID NO: 78367 - DNA, 381 bp, Citrobacter koseri
atgattaaagtctctgtccacaatgatatagaactccccgcagttgctcgtaaatatgcacatgccttgcagtcatggaagaacggcggacctttaccctcagtttttggcaatgaagggcagtgggaagatagcgggcgtcttcgtgattcttttgtttttaagatccatattcgtttacctgatgaaaagccgtggcctgcaaaactacctgccgcctcacgtaaatcaaacagttatcttgtttactcccgccatttcttatatccagataagtatcagctaatcagcattatgacacccaatgcgcatgagttagcccgtacatcctacatggcagaaattgagcgcagagcagaagagttccaatcttctttttga

SEQ ID NO: 78368 - DNA, 1059 bp, Citrobacter koseri
atgaagaagcgcacctacaaaaacaatcacgctgccagcagtggcagtgccggacagcctgatatctctgacgcgctcagaagcgatccggcgctcagcgccttcacgtttgacgggccatattcagtaacagacggctatgatctgctggacagcatgtgctgcgtcgataatggccggtactacgagacgccaatagactggaaagggttaacccgtgcgttcgcacaatccccgctgcaccagtcagcgctttacttcaaacgcaatgtgctgaccgggtgctatatccctcatccgttactctcacggcaggctttttctgcgtttgcgctggactggtttgtcttcggcaatgcctatcttgaacgtcggtctaatctcctgggagagccgctcaaacttaagcatgttccggcactgaacacgcgacggggaagcgatcttgatacctactggtttatccggcagtggaaagatgaatacgagttcagggcgggcgatgtttgccacatcatgaacccggacattcaccaggaaatctacggtatgccggaatacatgggggcgctgctgtccgccagcctgtcacattccgccgacaggttccgcaaactctactatgacaatggctctcacgccggatgtatcctctatgtcggttcggagaaggtggatcaggaaagcataaaggtggtgcaaaagacgctgtcacaggccagagggaaaggctccttcaaaaacgtgctcatccacgcgccgggcggcggcaaagacggcgtgcaactgttgccgttcagccagatatcggcaaaggatgagtttcttaacatcaaatcagcaacgcgcaacgatttgcgcgacgctcaccgcatcccgccgcaactgatgggtgcaatgccggaaggcaacggatcgctcggtgatgttgagaaggccgcgcgcgtctttgccatcaacgaaatgttgcccgtgatggaagccatgaagggcgtcaatgactggctcggtcaggaagtgatccgctttaatccctacgctctgctcaaagacgagtaa

SEQ ID NO: 78369 - DNA, 1731 bp, Citrobacter koseri
atgatacaggacgcttttgtacgtcagagagcaaaacaactttactggcagggctacccgccagcggagatcgcgcgcctgatgggaattaatcagaacacgatttacgcctggaagaaacgcgatgaatgggatgaaacgccccccgtccagcgtgtcagccagtctatggatgcccgcctcatccagcttacggacaagaaagacaagaccgggggggacttcaaggagattgatctgctgacccggcaactgaaaaagttgtctgacggacaaccggcaggggctggcgcgggtaaaaagccgcgcaggcggaagctgaaaaaccacttcaccgaagaacagatcgtcgcgctgcgggagaaaatacttgattccctttcgtggcatcaacgcggctggtatgagcaacgccaccaccgaaaccgcatgatactgaagtcccgccagattggcgcgacctggtactttgcacgcgaagcgttgcttgatgcgctgcgtgacgatgtgaaatacccgtaccagcgcaaccagatatttctgtctgcatcccgccgtcaggcgcaccagttcagggggttcattcagaaggtggcggaagaggtcgacgttgagcttaagggtggcgacaaaatcgtactcagtaacggcgcagagctgcatttcctcggcacgtccgctgcaacggcgcagtcatatacgggcaacctgaagtttgacgaattcttctgggtcagcaacttcaccaatctgcgaaaggttgcaggtgcgatggcaacgctgaaggggctgacgcgtacctacttttccacgccgtcaggtgaaactcatgaggcctacccgttctggacgggcgatcgctggaatgagaaacgcccgaaggcacaacgcaaagcgtttgatgtgggctggaaaacgctgaacagcgggctgttatgcccggataaaacctggcgtcagattgtcaccctgaaggatgtgatagaaaacggctgggagtacaccgaccttgaagaaatccaggatgaaaacagcgaggatgaattccgcaatctgtacatgtgcgaattcgttcgcgatggcgagtcagccttcaaccttaacgccctgattggctgcggcgcagatggttacgacgaatggccggactggaaaccctttacgtccaggccgatgggtaatcgcccggtctggatcggttatgacgccaacggcagcagcggcaacggtgacagcggcgcgatttgcgttgtggtgccgccactggtgccgggcggtaaattccgcacggtagaaacggaacaggtacgcggccttgagtttgaagagcaggcgaaagttatcgaaaacttcactttcaaatacaacgttcagcatgtgggtatcgacgtgacgggcggtaacggtgaggccgtttaccagatagtgaagaagtttttcccgatggcgacgccctacaccatgtcaatgacgtcaaagcgcgccctggtgctgaaaatgctacagctgatccgtgcgggtcgctgggagtatgatcgcagcgagcgcgccctgatcaacgcctttaactctgttcgtaaggtaaagacgcctggcggattcatcacctacgacactgaccgctcgcgcggcgtcagccacggtgatttagcctgggcgaatatgctcgccattattaacgaaccgctgggccaggagagtggcagcggcgggtttgctatggagttctga

SEQ ID NO: 78370 - DNA, 837 bp, Citrobacter koseri
atggccagcgcagctaaaccagcccgtaagaaattccgcgttgccgtctccggtgccaccgttgacgggcgcgaaattcgccctgagcaccttcgtgatgcagcagcaaactacagcccggacgtgtacggcgcacgcgtcaacgtggagcattacctttcgccgttccccgacagtgatttcggtgcgatgggggatgtgacagcgctgagcgctgaagatatcagcgaaggcccgcttgccgggcgtaccgcgctttatgccgagatcgaaccttctgagcgcatgaaaaagctgacggaagaaggtaagaaaatttactccagcattgaactgcacccgcagtttgcgcttaacggcaaggcttatgtcatggggctggcaatgaccgataccccggcgagcctcggcaccgagcgcctgaagtttgccgcgcagcagcgtcagcaggttatgtccttcaacaatcagcagggtgaagccccgctgttcaccgatgccattgaggctgaaatcatcgaactggctgagcagcgcagcgatgagggtaaacagtggttcggtcgcgttatggggattatcggcaaaggccgtaaatctgacggtgagcagttcagccaggtgcgtgacgccgtggagaacgtcgcccaatcccatgccgatctgctggacagcttcaacgacctgagccgcgcccgtgagcaggacagccaggccattcagaagctgaccgccgaccttgccgcgctgaccagcaaactgggaagcacagacggcaatttcagccagcgggaacccgcaaacggcggcgcaaacgcgcagcttgctgattactga

SEQ ID NO: 78371 - DNA, 1050 bp, Citrobacter koseri
atggaaaacactacccgccagctgtttgatcagtacgtcgcccggcaggcacaactcaacggcgtttccaccgccgcgattgctgcaaaatttgctgtagatccgacacgtcagcagcgcctggagcaggatgcacagcaaaatgattctttcctgagcaaaattaacgtgttccccgtcaaccagcagatcggccagaaagtcctgatcggcagtaaaggtccgatggctggcgtaaacaacggcgttaccagtcgccgcaaccctggctctaatcattcaatggagccgttcaactacatgtgccgcaaggtcaactatgactacggcatcagctatgaacagcttgatgcgtgggcgcacatgccggacttccagccactgatcagcaaggcaatggcccgccagatgtcgcttgaccgcatcatgattggttttaacggcgtgaagtacagcgacccgtctgaccgtgccgccaacccgctgttgcaggactgtggtattggctggctggagaaaatccgccaggaagcgccgcaccgcgtcatttccaatgtgacgatcacctcgcgcgatgaggataacaagattgtcgcaaaaggcacctacggcaacattggcgcagcggtgtacgacgctaaaaacagcctgatggatgaatggcacaagcgtaacccggataacgtggtgatcctggcgggcgacctgctgacgagcagcaatttctcggccattaacgccttaagtcagaccaacccgaacaccgaaatgctggccggtcagctgattgtcgcgcaggagcgcgtaggcaacatgccaacctttatcgcgccttacttcccggtgaatggcgtgctgatcacgccgttcaaaaacctgtcggtgtactaccagcgcggcggtctgcgccggacgatcaaagaagagccggaatacaaccgtgtcgcaacgtatcagtcttcaaacgatgatttcgtcattgaagactacggcaatgttgcgttcattgacggcattcagttcgcccaggccgaatcggcaggcgagtga

SEQ ID NO: 78372 - DNA, 858 bp, Citrobacter koseri
atgttaacaccggcacaacgacattttcagagggtcatggcagaacgccggggccaggcggatgaagaatccgatattcagcgcaccgcacatgagcaaattctgcatcgcctgcgcatggacttgtcccgcctcagcggcgtgcagtctgaagaaaccaaagccgaaatgaaaaaatccatgctgccggaatacgagggatggattgaaggcacgctcgacggcgacagcggacgacaggatgaagttattacccggctgatggtctgggcgattgactgccgcgattatgcgcttgcgttgaggctggggcgttacgtggtacgccacggactgacgctgccggataacttcaaccgcacggcagcgaccttcctgactgaagaaatgagcaagccactgctgacgctcgccgccgctgatgccgacgctgatttatcgtccggtatcgcagtgcttgacgaagtggcggacattgtcgctgacagtgatatgccggatgtggtgcgcgccaaattgtgcaaggcccgtgcgctttcccgccgtggtgcgacggatatcacgaccaaagcggaagcgctggcgctgttccgtgaggcgctgacgcgcaaccctaatgccggggtgaaaaaagagatcgccacgcttgcccgtgaggtcaaaaagctgtcagcggatgggggtacggatgaaggcgaagcggccagcaccaacaaaactgacggtactgcagagcctgcccctgaaaagagcaccaccgccagcgcagcaggtaaagcgacggcgcgtaaaaccacgaccaagacggcaacaggaaaggcgacaaagcgcaagcctgccagccagaaaaagaattaa

SEQ ID NO: 78373 - DNA, 525 bp, Citrobacter koseri
atgagcagccttgtggcaaacaagcacgtgttacctgccgacagcgatacgcctgatgttgatgatggtgatgccaccgtcagcgccggggatttctggccggtgattaaactggccgatcttcgtctggccgcgcgtatcactggcggtatcaccacgtccaggctgatgcacgtctcgactgaagcggtagcccatgtcaccgcgcagctgctggactggcgcgccgcgcaggtcagcgcaggctttcacacgctggaagatgtgccttcagtcctgccgtcaggtgagacggaaaagctggttatcaacggtgaaaacgtgaaggtgtaccgctttcgccgtgcagtctattcgattgccagggcgctggtacttgaaggctatcgcgacgttgataccacggcgaaaggcgacaaagacgccgccgcgcttgacctgcaacgggatgatctctggcgggatgcccgctggagcatcgctgatattcgcgacacaccacgactctatgcggagctttgctga

SEQ ID NO: 78374 - DNA, 201 bp, Citrobacter koseri
atgaaagttaaggcgttgcagggggatacggtggatttgctttgctggcgtcactacggcaccacgcagggcgttaccgaaaaagtgttatccgccaatccaggactgagccagcaggtttttcttgatgccggtcaggagattgaactgccggaaatctcgcgtaaagcgacacaggagatggtgcagctatgggattaa

SEQ ID NO: 78375 - DNA, 303 bp, Citrobacter koseri
atgggattaagtttctttcagcgcctgaatgactggctgacattcaccatgtcagcaatggtcacaagtatcggcgtcatgacgctgagcgaaaagattgcgctggccggtcttctcgtcgggatggtttttggtgcccgtggatggatctatcgcgcccgcatcgaacgggggcagaaacgtcgcaacgaactgattaaccagattctggaacaggcagagcacaggcagatgagtgagtcagagcggcgggcgcttgaccttctgcaacagaatgagccggaagatgaaacagcttattaa

SEQ ID NO: 78376 - DNA, 546 bp, Citrobacter koseri
atgaaacagcttattaaaaaatgctccattgcggccattgttgcgctgggtatcacgctgagtcctggcgcgttgcgcacaacgcctgaaggccagcaaaagattgcgggctgggaagactgccggaacacgccctactactgcacggctggcgtgctgactgtcggaattggttcgacgggccgcgttgaaaagcgggagtacagcgacagcgagatcgccggtcgctggattaacgatatgcgacacgctgaaaactgtattaaccagaattttgaaggcgggtatatgccacagtccgcctttgaggccatgacggatgccggtcttaatgtggggtgtactggcctgatgtggttcacggacagccagaagcgaaaacagcgcacgaccatctggaagaaggcgcaggcacatgagtggcaggcgatgtgtaaccggctgacggactttgtaaacagtggcggcaagcgcagccaggggctggttaaccggagaacagattttaaggcgtggtgcctgcgtgacgtggaggctgaaaagtga

SEQ ID NO: 78377 - DNA, 438 bp, Citrobacter koseri
gtgaagattacagccattttatgcgcgctgctggcgctggcctctggtggcctgctctggcagacacatcaacgcggtaaagactccgtccgtaatgaagcgctttcccgcgaggtgaagaacaatggtgaggtgctgggcgagctgcgtgcgctgactgctgacgcccgcgaagtccttgcacagttgcgggcaaccgaacagcaaagaaacgcccagggagaaattcgacgtgaaaacatgcgcgatgccattaaagacgatacgtgtgccagcactgttgtgcctgcttctgtcagtaatagcctgcaacgccgtaccgccgcagccacaaatgaaaatcgtgcacgaaccggtgccagagagcctgacggcagcaacgccagtgccggaactgaccgccccggtaacgtggggcgcgatagctatctggagtga

SEQ ID NO: 78378 - DNA, 471 bp, Citrobacter koseri
atgctgaaagctgattcactacgcgagaccctgacccgcgctaacaaatggtgcagggctaaccctgaagccttcaccgtgtttgtggaagaaggaaatatcgagacgaccggcgaaacgccgtcgtttatgtatcgctataccctggtactgtttgtgatgagtttcgctggtgatattgatgatttcacgttgccgttaatggcatggctctggcacaaccagcccgatctgttgctgaacccggagaaaaaccgggacattaaatttacgacccttatcaacaacgacgataccgccgacgttctttttgaaatgccgctgcgcgagcgtgtgaaggtcactctggatgaaaacggcattccccgcgcagagcatttgccggaacctaagccgcgcatcccgtcagcggacggcgactggagtgccatctttgaagatgtgacgtgggaggctgatgcacatgagtaa

SEQ ID NO: 78379 - DNA, 639 bp, Citrobacter koseri
atgagtaacgatctcttccgtgaactggatcaggtcttcagcgacatactggcgggcacctcgcaagccggacgtgttcgcactgcccgcgctatcggccaggcactgcgaaagagccagcaacagcgcatcaaagcgcagcaaaaccctgaaggctcgccatatcccgcccgccgtcgccgggtgctgcgttctcagcagggtattgtatttgtctggcagggtgagatccgtcgcctgaaaaactggcatggtggccggggaaaatacgggcgcaccattaccggatttgacgaagagcgcaacgatattcgcacgttttaccgcagcgatattgagcgctacatcgagatcaatacacgctcagtacgccgcagcaccgcaaagaaagtgccgatgtttcagcgcttgcgcagctatcgctttctcagaatgcgctctgatgcaggcggtacttccgtggggtttgacggtgtggcggcgcgtattgcgcgcgtgcaccagtacggccagcgcgatcaggtcgggccgggtgcctttgctaagtatccggtgcgtgagctgctgggctttaccgctggcgatgagcagatgattacggaacaggcggttaacagcctggggagcgctgcacgatga

SEQ ID NO: 78380 - DNA, 582 bp, Citrobacter koseri
atgaacgctgaactgatccgcctgctggaaaatatcctccgcgtcggcgtcgttattgccgttgatgaagagaactggcgcgtgcgcgtgcaaagcggcgagcttcagaccgactggctgcgctggaacaccacgcgcgccggagcattcagtatctgggtgccgccttcagtgggtgagcaggtctggctgggctgtattggcggcaatcctgaaacggcggttattattggcagtctctacagtaacgcccaccctgcaccaggcagcagcctgaaagagattgtgctgacagcgccggacggtgcctcttttcgctatgacgcagaaaccagcgcgctggaagcgcagggcataaaaaccgcacatatcaaagcctctgtcggcgtcatgcttgaaacgccggtcgtggaatgcaccgatcatctgaaagcgcggacgttcgaactgacggagggcggtacgatgaagggcgatgtcacccattctggcggatcgctttcatctaacggggtgacggttcattcgcacgtgcatggtggtgtgcagggtggcagcagcaacaccggggggccgaaatga

SEQ ID NO: 78381 - DNA, 369 bp, Citrobacter koseri
atgacagtccgctataccggaatgaacccggacggcacgggccagcttaccgataccgatcagctgtggaattcagtacgcgacatactgaccacgccgctggcaagccgggtgatgcggcgggattacggcagcatgatccccgatttgctggatgaaccacagaatgaagtgacgcgcctgcaatgtatgagtgcggcggtgatcgccctgacgatgtgggagccgcgtattgccctgaacggcatcaatatcagttattcaaaggatggcgctgtcaccgctgaactggtcggcattatcaccgaaaccatgcagacggcgggcactgcgctgacgctcaggagtggcagcaatggcaacagttga

SEQ ID NO: 78382 - DNA, 897 bp, Citrobacter koseri
atggcaacagttgatttatcgcagctaccgcagccgcaaattatcgaagtcctggactttgaagtcattctcagcgaagtcaaggccgtcatgctggaggcatttccgcaggaacagcaggcgtctgttgccgccgcgctggatctggaatccgagccgctgaacgtgatcgcccaggtggttgcctaccgtgaaatgatgctcaggcagcggattaatgacggcgcggcagcgtgcatgttgagccatgccgtatcgtccgatcttgataatctcgcgggcaacctggataccgaacgtctgatcatcaccccggagacggcaaccactgacgcggtaacggaaagcgataccgcactgcgtttgcgcgcgcaggctgcgtttgaagggctgagcgtggcggggccaaccggcgcatatgaatattttgccagaagtgccagcggcaaagtggcggatgccaaagcgatcagcccgtcgcccgccgtggtggtggtttcagtgctgtcaaccgaaggagacggtactgccagcgcggaactactggcgacggtggataaagcgctgtctgctgacgataagcgccccgttgccgatcgtctgaccgttcaggcggcagagatcgtgaattatcagatcaatgcgctgctgtatttctaccccggcccggagtctgaaccaatccataccgccgcgcaggacgcgcttcagtcatggctgaatcagcagggcaaaattggtcgtgacgtggcccgctcagccattatggcagcactgcatgttcagggcgtgcagagggtggagttactggagcctgccagcgatattgtgattgccgatacgcaggcggcgcggtgtgagtccttcacgattgagaccgggggcaccgatgaataa

SEQ ID NO: 78383 - DNA, 615 bp, Citrobacter koseri
atgaataacaacatgttgccgccttcggccagcggttttatgcgcagtacagagaaggtgacggaacggcttacggatattcctgttgacctgcgcaagctgtggaacccggacgaatgccccgccgatcttctgccttatctcgcctgggcgttgtctgttgaccgctgggataagaactggtcagagcagaccaagcggcaggtaattaaggcctcctggctggttcatcgtaagaagggcactatttccgctttgcgccgtgtcgtcgaaccgttcggctttctgctgcgcgtgatcgaatggtggcagagcgacgaagagccgggaacattccggcttgaaatcggtattcaggaacaggggattacggaggaaacctatcttgagcttgagcgccttattgacgatgccaagccgagaagccgccaccttacaggcctgtctctttcgcttcagtcgcagggctatatcgaagccggggcgggatgttatatcggcgatacgctgaccgtttatccctattttcctgaaaccatatccgtgggcggtggtgactacaccggcgcggcagtccatttaattgataccgtggagatcgcaagtggcgactaa

SEQ ID NO: 78384 - DNA, 1269 bp, Citrobacter koseri
gtggcgactaaatattttgccctgttaaccaatatcggggcggcaaaactggcaaacgccacggcattgggtgcgcagcttgagatcacccagatggccgtaggtgatggtaatggcgcgctgccgacaccgaacccggcacagaccgcactgacgaatgagcagcgacgcgcgcaactgaacatgttgactattgacccggttaacaccaatcagatcattgcggaacaggtcataccggaagatgtgggcggatggtggatacgtgaaatcggcctgtttgataaagacggcgatatgattgcggttgccaactgtgcagagacctataaaccgaagttgcaggaaggtagcgggcgcgtgcaggttgttcgcgtgatcctgatcgtcagcagtaccgaagcagttacgctgagaatcgatccgtccgtggtgctggcaacccgtaaatatgtagatgacaaaattattgaggtgaaagcatatgcggatgatctgctggacgaacatgttgaggctgcgaatccgcacaagcaatatcctctgatagccaatgccttaaaagagatgaccgatgccggactcgtctctaaagttcttgaaaaccttcgtttaacagaaacgcatctgggtgtacttcttggggtcaaaaaaatgacctcatccggcacttataatgcaacgcccggtacaaatatggtgatcgttgaactgctcggcggcggcggctctggcggcggtactgtcgcatcagccacggggaaacagtcatttgcgggcggtggcggtgctggcgcgtatgtaaaggcgatgattactgacggttttaacggcgtttttgtcactattggcgctggcggaataggcgtaatcggtgaaaccggtggaaatggtggcgatacaaaatttggagataattttgtcgccggaggcggcaaaggtggttcaggaatgcttgcaacaagtggtcccatcgggggtggtgaaggcatgggcggtgttgcttccggtggcaatattattaactcatccgggcattctggatggtcaggcattgcctacgatgtaacttattctgtatccgggcgcggtggcgaatcacttatttttcctgggggccagccatcaggaacacagcaaatgaaagacggatttgacgcctctgaatttggatgtgggggcggtggcgcaaattcacggacaggtgcgacggcctttaagggcgggactggttcacagggcattgctatcatctgggagtatgcataa

SEQ ID NO: 78385 - DNA, 204 bp, Citrobacter koseri
atggctgttatggcggttatcaaaaatgatgtagtggtaaacattattgtggctgaacccggtttaactattccgggatatgaggttatcagtgtcgagaattccggaatagcaggcgaaggttacagaagggatgaagcaggcaactggaaccctcctgaagtagtggataatccagaatattcgaatacccaggatgtttag

SEQ ID NO: 78386 - DNA, 489 bp, Citrobacter koseri
atgatgatgatatacgggatgttcgtttttgaactgaaaacactgccttaccagcaactgcgccactcgctgaactggcggcatgtaaaaaatgaccgcatcaaccgatcggcaaaatggcagtacatcggcgcaggggagacgcagatcaaccttgacggggtgctttaccctgaaattacgggcggcgacgtgtctcttaccgttctggcaacgcaggcatacaccgggcgtccctggcctttaatcagcggtgcgggacagatttacggtatgtatgtgctcaccggactacaggccacgcacacagagtttgatcgctacggaaaggcgaaaaaaatagagttttcgatcagcttccagcgctgtgatgaagacctgcgcgaacgcctgcaggcatcgtctgttggcgatctgctttcagggctgaaggataaagccacgtccgcctacaactctgccagtggcacgctgtcgggcctgttctga

SEQ ID NO: 78387 - DNA, 2997 bp, Citrobacter koseri
gtgaaaagccttaatatccgcgttgcgttcagcgcgatcgataaacttacccgcccggtcaatgccgcccgccagagtgcgggcggtttgtctgaatccctcaaaaaaacgcagtccagcattaaagatctggacagtcagtcccgcacgttcaaccgtctgcgcgacagcgtgcaaaagacctcccgcaaaattgacgatgccagccggacgcttgaaggtcttaatcaggcgcagcgggaaggtacacagcttacagacaagcaaaaagcccatatggcagcgctggccgcaaagctggagcgccttaattctgcacgcacgcaggaaatggttaagctgcgcgccgcctcacaggcgctgcgcagtcacggcgtttcgctggtcggcagcgatcgcaccattcagagcgccatacgccgcaccgaacagtacaaccagacgcttgagcgggaacggcgacagcttgccgctgtcacgcaggcacgggcgcgctacgaccagatgcagcaaacagcgggcaaacttcgcggcggtggcacgatggccgttgcgggggccactgctgccggttacgtagcgggacgtttcttatcccccgctgttgggtttgatcgggaaatgtcccgcgtgcaggcgctgacccgcatagataaaagctccgttgacttttcggcactgcgtgaccaggccaaaaagctgggcgctgaaacgcagttcaccacgactgacgccgccagcgggcaggcgtttctcgctatggccggtttcactccgcaggccattcaggccgcactgcccggcgtgctcaatatggcgctggccggtggtatggatttaggcgaaagcgccgatatcagttcaaacatcctgtctcagttccgcctcgatcccaaagaaatggatcgcgtgagtgacgtattaacgggcgcgttcacccgaaccaacaccgatctgcaaaacatcggtgaggcgatgaagtacgccgggacagggctttctaatcttggcgtcagtgttgaacagacaacagccatgatcggcgtaatggcgaacgttggtctgcgcgggagtatcgctggtacaggtttgcaggccgcgttttcacgccttgccgcgccgaccggcagggcaaaaaccgcgcttaaagaattaggcgtagacgttgctgacgccacggggaagatgcgccctgctgaagagatcctcactgaactctataaaaagatcagcaagtacggtgataccgacaagctctcattcttcaaagacattgccggtgaagaggcatcaaagtcattgcaggcgctggttatgtcagccgggagcggtgaacttcagaagttactggaggcactaaaaaacgccaaaggtgaggcacagaaagccgccaaaataatggcggataaccttgatggcgatctcaaaaatctggacagcgcctgggaaggtttccgcatccagattaacgatctcgtcgataatcagcttcgcgccctgactcaggggctgagtgatgttgtggggaatatgacgcagtgggcgaaggaaaatccgaagctcgcccaatccctgctggttgtcggcggcagcgttctggcgctgaccgccgccattggcggcacatcgctggcgatcggcctgctgatggggccactggctaaactccagttaggctttaccctgctgacagggggcggaggcataaccggaacgattgccgctctccggacgctcggcacggcttccggaccggcgatggcaagcgtgcgcggatgggggccagttcttggctcgttagcaggaaaaatgcggggagtatcaaccatcatacccgctatgcgtggcgcacttatgggggtatttcttgcacctggtgctgcgctgggcgcactgactaaaaacctcggaatgctcgctctacgcctgacaggtttaccggccatatggagcatgatcactactgcggtgtctatgctgggtacagcactatccctgttgttaagtcctatcggcttggttgtcgctgcgtttattgctgccgggttactcatctggcgattctgggaaccgataaaagccttttttaccggttttttcagcggagttatgcagcaactgactcctttccgtgatgcctttttccctcttacgctggccttctcagcaatagccaaagtcgttggtgaagtctgggactggtttgtaaaactcctctcacctgtggaaagtagccgtgaatcccttgataagtgcgcatcagcaggggaaacattcggtaaagtcctggggagcgcccttcagttactgctgttaccgctgaccaccctcatggagggtattggctgggtactggaaaaactcgaccttattccttcaggcctggaagccgcacgcctgaaagctgaaagccttaaaaaagaccctgttatgtgggagtgggacccgcaacagaaaaaaatggtgcaaaaggggtgggactggtctcctatctccacaggtaaaaatgataaggggaataatccgtttgttggtccacctgttccccccggatatacaccgccgcttaccggcgataacggcaccatgcgccggttgcagaatatcgacagcaacaccaaagcgacagccgacaacacgaagaagatcggccccggcgatattgtatttaaaaacctgccgcgtgcgctggccgttcgtggggaatggaaggaatcgcaactggccagcacggtcagaaacaacgggttaagcgcacgcctcgcagtggtggcggcatcgcttcctgttaaacaggcggagcttctgccagtcagccgcgctgaccgcaatatacctgttgccactggcggctttacgggagaaatccacgtccacctgcacggcgttgaccggcaggacgcgcgcgaaattggccggattgctgccgacgcggtgaatgccgaactggctcgcctcgcgcgactcaatcgcggcagcttcaaagacagagattaa

SEQ ID NO: 78388 - DNA, 318 bp, Citrobacter koseri
atgagcaaaaaaaacgataacgccattacgctggcaaaacccgttgttcgcggcgatgagaaaattactcaggtaacgatcacggatgagatcaaacaggctggctccctgcgcggtctgaagctggtcaacgtgatgaatatggatgtggattcggtggcggtgctactgacccgtgtaacgtcaccgcgcctcaagcagaccgaaattaacgaaatggatacccgcgatttcgtcagcctgtcagaagcgctcgtcccttttttgacgcctgcggggtctggagcatcgaacgaggcggagacggagaatcagtaa

SEQ ID NO: 78389 - DNA, 516 bp, Citrobacter koseri
atggcggttcctcacaaactgcgcctgttcacctgctttgtgaacggcagtaactgcatcggcaaagtctcttctgtgacactgccaaaactgacccgcaagactgaggattttcagggcggcgggatgattggctccgctgcggtagatcttggtctggacagtggcgcactggacaccacgatggtggttggcggtctggttcagtcgcttttgcttaactactgcggcgatatcgacgagacccgcttccgcttcgccggtgagtattacaccgatggtgaaagcctgctggtagaggtcgaactgcgcggccgcatcaccgaaatggacggcggcgaaagcaagcagggagaagacacttccgtcagctacacgatgaagaacacctattacaagctcaccatcgacggcaagccgctgtttgagtttgatctgctgaacttcatctacaagaaagacggcaagaatatctaccctgaccgcatcacgtctgcgctgggaatgggtaactga

SEQ ID NO: 78390 - DNA, 1227 bp, Citrobacter koseri
atgagggattatcacagcgaactcaataacgtaatggtggaaactatggcggaatctcgctttcatggtgcccgcatccgggagaataccgaccttgtggcggctatcaatgacattgaatccagtgtcattggggttgtcgccgtggcggatgatgccgatgcggaaacctttcccctggatacccccgtgttgctgacacgggttaacaacgtgctgggtaaggcgggtaagaccggctccctgtacaaaacgctcaaagctatcgctgaccagaccagtccgaaggttatcgttgtgcgcgtggcagcagccacggaagaggagggcggtaaaacgcagtcgcagctcatcatgggcggcacggcagaagacggcagctataccggcatgtacgcattcctgacggcggaacagaaggtcggctatcgtccgcgcattctggctgcgccggggtacgacacggaagaagtgacctccgcgctgtgcgttattgcacagaacctgcgcgcgttcgtctacgccagttgttacggctgcaaaacgatggcggaagccatcacctaccgcgcaaccttcgcctatcgcgagcttatgctgatctggcctgatttcatcgcctggaacccgctgaccggagagaacgaaaccttcccggccccggcgtatgcatgtggcctgcgggcgctgattgacaacaatcagggctggcataaatcgctttccaacgtgtcggtcaacaacgtgcttggtatttcgcaggatgtgttctggtcgcttcaggctgaagacagcgacgcgaacgaactgaacaacaaggagatcacgacgcttatcaagcgtaacggtttccggttctggggcaaccgcgtcacggataccaaagattacatctttgaagttttcacccgtaccgcccagattctggctgacagcatcgcagaagcacagtttgaggccattgacgagccgcttaccccggccaacgtcaaggacgtggtcagcggtatcagcgggaaactcagctcgctggttacgcagggacggctaatcggtgctgaatgctggtttgatatcctggataacccgacaaccgggcttcgtcagggtcaggtgcgcattcgctataaatatacgccggttccgccgatggaggatctgacgatgtatcagaccttcaccgatgaatactttgaaccggcgttctcttcgctgggaggtgcataa

SEQ ID NO: 78391 - DNA, 1137 bp, Citrobacter koseri
atggcacttacagacctgagcaaatcacttaacgacgccgtcagcagttataacgattcactgactgaggcggtaaaaagtccgggattcagtattacgatgggcggcaaggtgctgacgcagcttgatgatcggatcatgtcgttgtcactgacggacaacaggggctttgatgccgatcagctgtcaatatccattgatgacagtgacggtatggttgccctgccgccgcgcggggctgagcttgccgtatcaattggctggctgggtgaaccgctgatttacaaggggctgtacacggttgacgaggtttcccacgaaggcccggccgataccattggcattactgcccgcagcgctgattttcgtgaagagttcaacgtcaagcgcgaagtctcatggcatgacgtgaccgttgagcgtgttgtgtcggccattgcgcaccgctacggcctgaaagcgcagatcagtgaaatgctcatggatattgagattgatcacgccgaccagacgcaggaaagcgatatgtcattccttacccgcatggcggacatgctgggcgcaattgccaccgtcaagaacggcagtctgctgtttatcctgccgggggggggtgtgaccgctgacgggaaggcgctcccctctgccagtattgaccgcacaagtggcgaccggcatcgctttcgtattgccgatcgggatgcctataccggtgttcgggcttactggctggatctgaattttggcaaaaagaaaaaggtcagcgttaagcgccgcaaacctgcaaagcccaaaaaagagaagagcagcagccgtgagggtgattacatggagggtgcagacggtaacgtttatgtgctgcgcaaaacctaccagaatgaagaggcggcgaaacgtgcggcggcggcaaagtggcaacagcttcagcgtggcgcggcagagttttcgatcaccctggcgcgtggccgcgctgagctttatcccgaaatgcacgtcacggttagcggttttaaggatgaaatagacaatcaggactggattattgcccgcgctgagcacgtcatagacgacagcggtttttccacccggctggagctggaatcaaaaatacctgactggatagcggaaactgaataa

SEQ ID NO: 78392 - DNA, 249 bp, Citrobacter koseri
atgttcagatgtccattttgcggcgcaatggcccgcacccgtaccagccgtaaaataaccgatatgacaatccggcaatatcaccagtgtcagaatctggagtgcagccggtcattcaccacgcttaacagcgtggaaagggaagtaacaaaacgtgcaggtactgcgccgttaccgcctgacttcatcccccgcgatgcctttccggcatctcactatggcagggagcagttaaacctggcactctaa

SEQ ID NO: 78393 - DNA, 717 bp, Citrobacter koseri
atggagaataaaaaaaaggggacttcagtccgtacctgctcaaagtgtgagaccatttacccgcagtcacagaatgtttgcccaatttgccatagtgataaattctatcccgcatctgctctatacagctttctctcaatctgtttcgggggcgttttattcggactgctgttgtccatctttagccctacatttggcgtgatagtgtttttaattatgatggttgtagggggagctgaaggaattaaaacacgctctaagttagcggttgctaagaaatctggtggctattggttgtctgataaagcgcataaaatcaaagctgattctttttacaaccctacgaccacggaggatgtcggtaaaagcgattctgttcagttcgaacaattgggttatgaatatgcagaccgcgagcgggttttagagaacttcaaagattcgttagctgtcgtttgggctgatacagataaaaccattgaattcagctatagagacgcaaaaggggatagatctcggcgtaaaattgacttaagtgaagcatcggttaatgactacggagagttatattttataggtttttgctgggaatctctggactcaaggtcattcaaagtaaaaaggatcacgtccaaaattttatatgctggtcgtcgctacgataaggatgaatttttaagaaacatacttctacttgagccaacaaattttgagtaa

SEQ ID NO: 78394 - DNA, 150 bp, Citrobacter koseri
atgatgaattatacgccgctgaaagagacctgtgaggcgcttgaagttgcctgcaataacgagcaggactgggaaacgattgaacagttggtcgaatgtgtgctggaagatatggtgcgctttaataagtggctggcagaaaaatcttaa

SEQ ID NO: 78395 - DNA, 369 bp, Citrobacter koseri
atgaaaaccctacctgctataatttcgcgggcggcgaagccctgtctgtcgcccgttgcagtctggcaaatgttacttactcgtctgcttgagcagcactatggcctaatgctaagcgacacaccttttagcgatgaaaccgttataaaggagcatatcgatgccggtatcactctggctaatgccgttaactttctggtagagaaatatgagttagttcgtattgatcgcaatggatttacctctcaggtacaagcaccatatttgactgcgacagacattcttcaagccaggaaagcgtgcgggctgatgagccggtgttcttacagggaggtaagtaatattgttcttagccgatcacggctgtga

SEQ ID NO: 78396 - DNA, 318 bp, Citrobacter koseri
atgagcaacaccacatggggcctgcagagggatatcacgccgcgcctgggagcacgtctggtgcaggagggcaaccggctgcactatctcgatgaccgggccagtatcaccggtaagtttagtgatgcccaatgtattaagctggatgtggtatttccacattttatcagccagatagagtcggtgctgaccactggcgaactgaatccccgtcatgcccactgcgttaccctgtaccacaacggttttacctgcgaagccgatactcttggtagttgcggctacgtatacatcgccatttatcccactcagcgctaa

SEQ ID NO: 78397 - DNA, 483 bp, Citrobacter koseri
atgatggaacagtcacttatcccacaggctacggcacttccactgaccgcacaacgtacggtaaaacgcgccttaaccctgcttgaccgacacctgcgcgaaacaggcgtggcattcacctccactcaggctgcccgtgactggctgaaactgaaaatggcggggctggagcgcgaagagtttatggtgctgtacctgaatcagcagaaccaattgattgcccatgaaaccctgtttgccggttccattagcagcaccgaggtacatccccgtgaggtggtcaaacgcgccctgtatttcaatgcagcagcagtgatactggcgcataaccacccctccggcgataccacgcccagccaggcagataagaccataacgcagcgtttggtgcaggcgcttcagctcgttgatatccgtgtgcctgaccaccttatcgtcggtggtacgcagatattgtcgttcgctgagcatggtctgctttga

SEQ ID NO: 78398 - DNA, 465 bp, Citrobacter koseri
atgaacgcattaaatagcaatagcgttacgccctttcaggaacaatcgccagcgacaggtattaccgcctctgttgtacccgatcgtcagcggctctcattctggccgacacactttggctccattccgcagtggataatcctggaaccccgtattttcgcctggatggaccgcttctgtgatgagtacagcggtggtatctggtccttttatacgctcagcaatggcggagcgtttatggcccctgatgctgacagtgacgaaaaatggcatctgttcaacggcatgaacggcaatggtgcggaaatgagcgcggaagccgcaggtatcgctgtctgcctgattgaatacagccatcatgcctgtcgcaccgaatgcgatgccatgactgagcactactaccgcctgcgggattacgctctacagcatcctgaatccagcgccattttgcgcattattgattaa

SEQ ID NO: 78399 - DNA, 2883 bp, Citrobacter koseri
atgttgtcttttttatttacacacaacaaggttaatacgatgaagcgaaatctgaataccagttatcggctggtctggaacgaagttcttggcgcatttgtggttgtttcagaactggcaaaagcaaaaggaaagcgtactggcgcagtactcgcactagccgttgccggtctgacctctggtacagtactggcggcagagacctccgtacctgtcggagagatggctgacggggtggttatcagcaacaacgacacgcagctggtttacgggcaggcgaataacaccaccattaacacgggcctggagtacggcagcgatgatgaagataacaatcagggcggccagttcgtacaggatggtggcgtagcaaaccacaccaccataaacagtaacggtcttcaggcggtgcttgcaggcggcagtgccagcgatacaacgataaatgccggtggtggtcaaagcgtacacggtcagtcttccggtacggtactgaacggtggcgagcaatgggtacattccggcggggttgccaccggtaccgtcattaatgaaggcggctacatggtagtgaaagggggtgctcaggcaattggcaccgttgtgaataccggcgcacagggtggcccggattcggaaaacagcgacgggatgtttgtttctggtaccgcaacaaatacaaccatcaatgaaaatggccgccaggtcgtttttgagcaagggaccgtcgtcgccacgacggtgaatgctggcggtgatcagagcgttcatggcagtgcagaaaataccacgctaaatggcggctatcagtacgttcattccggtgcggcagcaacggataccgtcatcaacagcggtggctggcaggtagttaaggacggcgctcaggtcagcgataccacggtcaataacagcggcagactcagcgtagctgcgggtggcaaggcctcagatgtcattatcaatgcaggtggcgcgctggtgacaaatacggctgcggatgtgtccggcaccaatcggctaggcagcttcagtgttgattcggtttccggtaacgcaagcaatgtggtgctggaaaacggcgggcgactggatgtcctcactggcaatgctgcagacacaacaatggtcgataagggcggtgtgctggcggttaacaacggcggaacggcgacaaacgtgaccatgaatgaaggcgctgcgctgattgccgacagcggttcaacggtcagtggtacaaacgcgcgtggtgaattcagtattgatgctgcatctggcaaagctcgtggactctggctggaaaacggcggccgctttagcgttaaatccggtgcgatagcggaaaataccaccgttggcagcggcggcgagctgagcgtagaaaatggtggcggattgagcggtaccaccagcctggctgagcatgcaaacctgacggttacgggggatgtcatcagtaccggcaccattgaaaatgccggtacgataaccttcgcgcctgagcaaagcgatgccgccagaactcgcctgtttgctgcttcctctgataatacctttactccccgcaagctcaccacgacaaaccttgtcggccagggcggtaccattaacatgaatatcaacctggcgaatcctgacttcccggctgatatgctgattatcgacggcgggcaggcaacggggaaaacctggctgaacttcaccaatgccggtgatgccgggctgggccttgctacctcgggggacggtatcaaagtagtggatgcgattaacggtgccacgacggaggccggggcctttgcgcttggcagcaagctgcaggcaggtgcgtataactacatcctgaaccacggcgctgctgatgaaaactggtatctgaccagcgaagctggctatcgtgctgaagttgcgctttatgcttcgctgtttgcgcagagcatggactatgaccgcgcactggcaggcagttacaaccagcgcagcgcggtcaaaggtgacagcagagtctggggacgcatccagggcggtcacatgggacatgataataacggcggaattgcacagggtgccacaccggaaagcagcggcagctacggcttcgtacaactgggtggcgacttgctgagcacctcttcgctgaaagccggtgtgtatggtgcagcaggacattcttccgttgatgtaaaagacgatgaccgctcccgcgccgggactgcccgtgatgatgcgtacagcctgggcggttatctgaccgccgtgcatgccaccagtggcctgtgggcggatgtggtggctcagggctctcgtcataacctgaaagcgacgtctgatgcagacagcttcgctacccatggctggggctggctgggttcgctggaaacgggcctaccgttcaacgtgaccagtggcctggtactggagccgcagcttcagtatatctggcaggggctgttcctgaataacggccatgacaatggaggctacgtgaacttcggtgacggtagcgcacagcatattcgcgctggtgttcgcttcggcagccagtcggagctggccttcggtaacggcacttccacacgggcaggttttggcgacagcatgaaacacagcgtaagcgaactgccagtgaactggtgggtgcgtccgtctgttattcgtaccttcagctcagacggcgatctggagatgggaacggccacggcgggaagcaatgttacctttaccccgtctcaggatggtacatccgttgatttccaggcaggtattgatgcgctcatccgccagaacgtaacgctgggtattcagggcgggtatacccgtagtgtcagcggtaacagcgctgacggttacaacgggcaggccacactaaaagttgccttctga

SEQ ID NO: 78400 - DNA, 687 bp, Citrobacter koseri
atgacacagacagagcgccgccacgacaggctggcgatcaggctgtcgctgattatcagtcgcctcgtcgcaggtgaaacgctggatatgcgcaggctgaccgctgagtttggtgtatctgcgcgtactctgtaccgcgattttcgtgaacggctgatgtatctggatcttgaatgtagcaacggttgttaccgcctgcggacgggggtgagtggtgcccaggccgagctggatgtgctgacctttgctcatcgtacaggtgtggccgatctgtttccggggctggaccgtcgactggtcagcctgctgctgaactgcaacgacgcgccctgtctggcgggtgaagctgtgggtataaccagcccgtcagcgtcactgtcattctatcgtctggtcaaagccattaccgccagctatcgcgtcacgctgcttgctgacggacagcgttgcgaacggctggcaccgtatcggctgatgatgcaggaaggtcactggtatctgatcgctgaatatcaggagcgcccggctgttttcaccctgaatgaaatccatgtggtacagcccacaacggagatattcagacgtaacgagaggctctggcggatggcagagaataccggttttgcccgggctctgccgcatttccgctgcatccagcagttgctgaatgcattgacctcaccctga

SEQ ID NO: 78401 - DNA, 828 bp, Citrobacter koseri
atgacccgtctggcttctcgctttggcgcagcaaatcttatccgtcgtgaccgtccgttaacccgtgaagagctgtttcgtgtggtgcccagcgttttcagtcaggacaaacacgaatcccgcagcgaacgttatacctatattccaaccatatccctgctggacagcctgcagcgcgaaggctttcagccattctttgcctgtcagacccgcgtgcgtgacccggggcgtcgggaacacaccaggcacatgcttcgcctgcggcgggaggggcaaattacaggtaaacaggtgccggaaatcattctgcttaattctcatgatggcaccagttcgtatcaaatgctgccgggattatttcgtgcggtgtgtcagaacgggcttgtctgcggtgagtcgtttggtgaggtgcgggtaccacacaaaggtgatgtggtgagtcaggtgattgaaggggcttatgaagtgcttgggatttttgaccgggtggaagagaaacgcgatgccatgcagtctctgatgctaccgccacctgcgcagcaggcacttgcgaaagcagcgcttacgtatcgctttggtgaggaccaccagcctgttactgaatcgcagatactctccccacgccgctggcaggatgagagcaatgatctgtggaccacttatcagcgtgtacaggaaaacctgattaagggcgggcttagtggacgtaatgctaaaggcgggcgaacgcatacccgtgcggtgcgtggcattgacggggacgtaaaactcaaccgtgcgctgtgggtgatggcggaaacgatgttgtcacagtttcagtctgtttaa

SEQ ID NO: 78402 - DNA, 864 bp, Citrobacter koseri
atggaaagtaaatacggttattcttctttgctaaaaccggtatctggattacctgaatgggttactgagcatttattgcaacaaataagacagataactgagtacgaaccggttataggtattatgggtaaaacgggagcaggcaaaagtagcctttgcaatgccctgtttgctggtgaggtatcgcctgtcagcgatgtggtggcctgtacccgggaacctctgcgctttcgccttcaggttggcgagcacgttatgacgttggtggacctgcctggcgtaggggaaagtagtgctcgcgatagcgagtatgccgggctgtaccgtgatcagcttccccggctcgacctggtgctgtggctgatcaaggccgatgatcgggcgctggcggtggatgagcatttttatcatcagataattggtgagtcataccggcataaggtgctgtttgttattagtcagtcggacaagaccgaacccactagcggtggcggttacttatccacagagcagaagcaaaacattagccgtaaaatttgcctgctgcatgaattgttccagcctgttcatcctgtatgtgccgtatcggtccgggctaagtggggattacgaacaatggcggagagaatgattcgctgcctgccgcgcgaggccagcagcccggtggtcgcgcaactgcagcctccctttcgcacaacagtcgtccaggaaaaagcgcgcgttgattttggtgaaactatcggtgcggtgctggatacggtgagtactttcccgctgataccgactccggtgcggaccatcattcaggccatgcgcaccaccgtggtatcagtggcccgtgctgtctgggatttcttcttctga

SEQ ID NO: 78403 - DNA, 912 bp, Citrobacter koseri
atggtttcattttatgatgaaaggaatctcattttatttttgtactttaaattaaggaaattcgaggttgatattcctcccgagtcgtccgaagcaaatcttgcaaattatgaaaagagagtgcgcaatttattattgagtgggaataaaggttccgaaagagaagtagatatttttatcaataacacccgggttgaggctaaaaaagagattccatgtgaagatgagcttgaatggttcaccacagattccagggctagttactggttactttgtaaaacagatcaagatcacatcgccccgggttatgcaccctatacaaacactttccctgttcaggcaggaaattctctgttaaatgaaccattcactttaggattcgatattccgccggtccataatcttcgggtgcggcttatcaaagataaagttgtaaaaagtatttctgaaggaaatgccaggcaatatattctaaaattacataatgagtggaatgaattaatcacaaagaaaaatttattttctgatgttaatgggaaagcaggggtgaccattgactggttgctgaattatttgcaggaaaataatgttaccttgcaaaagtatcggcatgctgaaggaacagaagaaaaaattgcatactgttatgcgtcatattttatctggcgtgagggtatttttaggactgaggcagaaagagaactattcataaggaaatttaaaagtgcattgagcacacagaaaagccgagagaagaagcgtgcagataaaaataaagcccttaacgtgatcatttctcaggagacccatgataagcttcgtgatatatctgttagagaagggatctcaaatgccagagttattgaatatgccattcatctggcatggaagcaaaaattgaatccacgctga

SEQ ID NO: 78404 - DNA, 207 bp, Citrobacter koseri
atgataactgaaacactattaactgaagacaaattagttgacatgttatttatcaccaccttaactggattaactgacaagtggttctataaattaattaaagatggggattttccaaaacctattaagctagggagaagttctcgctggttacagagtgaagttgaaaattggttaagagaacgagttaaagtatcgcgaggctga

SEQ ID NO: 78405 - DNA, 612 bp, Citrobacter koseri
atgcttaatgatatttatcttgatcaacgtcatgccccattcaatacaatgtatctgcaacggatgcttcgcgtgattaataacgctacagcacaatacccacgaacaatggttgtccgtgtagacctacgacttcctgataaccacgatgaatgtaaggctggtcttatctctcgatttatagaatcgcttaatgcaaagattgaagcacgatatcgaagcaaactaaagcagggtattcgatgctacccatgtcatttacgttacgcttgggtccgggaggttggagaagtaaacaagaagtctcactaccacatggtactctttgtgaataaagatactttcaacgggttaggggtgtatggtgaagatggaactggattagccagcctgatacaggcagcctggctgagtgccttacagttgagctctccccccggatatcgaacgctggtacatatcccggacaacccattgtattacctggacgtcaacgctttaaacaacaaaacggtttacgataaactcactttcaggctgagttattttgcgaaggagcgcaccaagtcatacaaccggaatgaacgctcatttggctgtagccagtcctga

SEQ ID NO: 78406 - DNA, 879 bp, Citrobacter koseri
atgagcgggcatgaggtaatggtacaaagaataaccgctattattgcagaactttaccagtacggttttgtatcacgtaagaagatgatggacgaattcaacatcagtgagcgtactttgtatcgtgatcttaatcgtctgggcgacagaatcgtccccgatggtgatggtatttacaggctggctcccgcttacgctaaacctcaggctctaaaagaacaacaaaatctcatcaatgccctagggatggcagagttattccctgtaaaaaaaatcttctcccagcctgacatgacttcactgatcatcagatcgctgcccggagatccagaagcgaaacgcgtacttgagaataactatagtgtgttcgataaagcgattcgtgaaaatatcctttgtgaatttcattataaagggaagcatcggaccgtcgcgccttataagcttattaacataaagagcgtctggtatctcggtgcggtagagaatgaaaaggttaaaggattccagctcaccaaaattcattggctgaaatttaaatcagagcacttcacaccacaaccccatatcacacaatactttgctgaagaagatgatgtctggttttctttggataagcagattgtactccttaaaatttcagccgacgtaagccatttttttaaacgtcgaaatgttctgcctgcccaaaagttaattcgtcaggaacctaatggcgacttgatcgtgcaaaccaaaatggcacacgaaaaccagctatttccattattacgttattggttaccaaatctcaatattatttccccggttagcctacaacaacgtttttatcagaagctcaaccagcagataatagaaatgaaaaccccattgcagtga

SEQ ID NO: 78407 - DNA, 846 bp, Citrobacter koseri
atgttacgtggttcagaaagaaaagaagcattagccagtctcaaaagtgcaactaaccgttatgaagtacaggctaaagacacccaggatgagatcactgccctctttctgttacgccagaaatgcagtaaggacctgattgcccgtggtgaaaattttgttaatcgactggcgaatacaccgaaagagtttgataaatcctggagcgaattgaaagcggaaatcgctgaatttgataacgtggtggaaaaactggaagaagaataccgcgcatcacatattggtaaaggaacggctgctgcgggggttgccgttggggcgggggttgccgcatttgcccctacggctgcgctggcggtcgcaacaacttttggtacagcatccacgggtaccgctattgctacgttaagcggagctgccgcaacaaatgcagccctggcatggctcggcggcggcgcactggctgcgggtggcggtggcatgtcagcaggaagcgcactactggctctggcgggtccaataggctgggggattggtgctgtaggcatcgctggcggaaccttactagcccgtcgcaaaaacggtaaaatcattgatgaagcacaacaggaagagcgccaggttcgcgcaaaaaccagcgaacttcgcgtgatggaacgtggtgcgcaagaactcaagatgctcacatccgagcactatcatggtactgaaagcattattgatgtgctggaaaaggctgcgcctcaagactattgccagtttaatacccatcagaaagatcaattaggggcattgattaaccatatcaatgcattatcaaaactgatcaacaagaaaatccagtaa

SEQ ID NO: 78408 - DNA, 1446 bp, Citrobacter koseri
atgagcattaaccataatacagttggcgaccagcttatcggcagcgcggttaacgccattaatcagacccgcattgatagtgaactgttaaaactatcgcagcaggatcgtgcatttgagttggctggcgaacaaatgcaaaaggtgcgtgatttcatcgcgtcaccgggtaacatcctgggctcaatgagcaccaaacacggtgaaattgctgagcaggtagaagttggcgtgcgcaatgctcgccaggcaatagaagaaagggttcaggatgcctctgatcttagcgccacgtttgacggagtgggacgaaccgctccggcggattatatgatagatggcgttgacgtgcagtcaaagtttatcaacggagttaataataacctgaaccatgtccttcagcacatggaaacctatcccaattttacccagggagaatccttttaccatatccccaaagactcctggcaaacgattcaggatgttattgatgggaagccggtggagggcttgagcgaaaaaacaatacaagctatcagggataaagttgcagaaattgaaagtacaacgggaagatcctttaatgatgtcgtgcgtcctggagtttctgattacaaagatgttcagtggggaaaaattgacgaaacgcttgataaacatgatcaggaattagcggaacagaacgaggcaaaaaaatcagaaattattgacgatcaccaaccctccctaagtgaaggcatgcgtgcaaccgcaatgggagccgctttcggtggaacctttgctcttgtaacaggtatatatagcaaataccgtgacggtaaaaatatatttcgtggagatttcaacagacaggactggcaggatgtcggcttagatacattgaaaggtgccgctattggcggtgtatccgccggagcaatttataccctgaccaattatgcctctctgggagcaccgttcgccagcgcgctggtcactgccgctaaaggtgtaagcaatcttgttctctcctatcagcgcggtgagattaatgctgatgaatttaccgatcttggccttatcatctgcgcggaatcggccatcgttggcgcaatgtctgtcgcaggtcaggcaatcatccctgtgcctgttttgggggcattggttggttctatctcagggaagtttatggttaccgtagctaaaaatctggacagtaaagcacgccaattgctggcgaaaaaaatggagcaatttacatgtcgcttaagtgagattgagcagaaagcactcaaccgaattttgaacgagttcgcggcgctgggtgagcttaccgcagctgcatttagcgtggaaaacaatcgccggttgctggaagcaagcatcacgcttgcccaggcccacggtgttgaagaggcgaagataatcaaaaatgcggatgatcttgacacatttatgatggcgtag

SEQ ID NO: 78409 - DNA, 2523 bp, Citrobacter koseri
atgctacagataattggtgcgttaattttactggtaatcggttttgttattttaaaagcgttgtttaaggcatctctcaatattctaggtgtgatattaggattgggtgcattgattgttgcaggcccacctttattggcgggctatattgtagagcgcgtaacctatgcgcttcactcacgttggttgctgggtgtacctcttgccatagcaggaatggtgattagctttatgtggggacttgatggtaaacatattgcctacgaagcttattcatttgattcaatgaagtttattttaaccgctgcatttgccagtggcctgcttgcagtacctgtacaaaccaaggctattctacaaaacgggcttataccagccgatatcaatgccaaacttaaagagtattattgctgtttttatacgtcttactttttgatggcctgctctgcggctacaccgtttatagcctggcaatataatatctcatcttcactgatgtggtggacaggattgctatactggatagcagccttactgacacagttctatgcggcaaaccaaattcaggaactcaagaagttaactaatgccatcaatacagggttaaatgagcaaaaagcgataaataaccaactttggctgacggaactaaaagaaggaagtaacctctcagcagaattcgtagagactatctatctcaagttggtctcacagcatatttttcagggcgatactcgagagcaggatctggctggtgaaaactggcttttaaatgatgcctggtatgaaagaaaaatggctgaatttaatgagcagttaaacagtaaaattgtacactcatcagatgagctaagaagcctttttggtaataggctgaatttaccctctgctgcgaatgatgatctcctgaaccgttatcttgatggtgggaactattattctttttcggatggtcgaaaatttgtctcgtttcactatgtcgacgagctttgtacctgcacttcatgcggtttgagcgagattaaaaacgcaaaacaccagggcggtggtgggagccaggaatggtattgctctgatatttgccgggaaacggaaaaactctgcattgaaattcacaagcgaccacaggctgaatttatttccagtgcagcaacaaccggtctgattctcatgacactcccggaggcctggaatactaacgaaaaaatgtttgcagtgggaggacaaggacatggttttgcagccgaacggggaaatcatcttactgacaaaatccaactaaaagatgcacatattctcggtgatgataatgcgaaaaatggtgcagacaggctggttaacggttcagagattcagaccaaatactgtgcaaccgctgcacgtagcgtcggtgctggttttgacggacaaaacggtaattatcgctattatgacagtaacggaaccccaatgcagttagaggttccgaaagaccagtattcgaaagcgcttgaaacgatggagaacaaaattcgcgatggcaaagtccccggcgttaccgatcctgcagaagccacaaaacttgtacgtcagggacacctgacttatagccaggcacaaaacatcactaagtttggcacgttcgaatctatcacttacgacattgcggaaggatctatcatcagcctcgcagctggaggtatcagcttcggtctgacagcttctattttctacctcaataccggcgatcgtaaagctgcgttgcaaacggcagcaatacaggcaggtaaaacatttacccgcacactgacagtttatgtgacggtacagcaattacaccgtatcagtgccgttcaggggttacttaaaaatattgattttgccgctgccagcccgacagttcgtaatgcgcttcaacagggagtcggagctaacaatctcaactcccttaacaagatgatgcgtggcacactggttacctctttcgcactggtcgccgtgaccactggtccggatatgatcaaaatggtgcgaggtcgtatttctggggcacagtttataaaaaatctggcagttacttcatctggtgtggctgggggtgcaattggttctattgctggcggaatgatgcttagtccattaggtcctttcggtgctttagcaggacgcgcagctggtggcttgttaggcggtatgattgccacagcgatttccaaaaaaatagcgggtgcactggttgaagacgaccgagtaaaagtgctggctctcatccaggaacaggttacatggcttgcaacaagtttcatgcttacagaacacgaacttgaaaacctgaacgcgaatctggcaacagtaattgaccaaaaaaccctggaggttatcttcgccgcaaaagagcaagaccgagcaacggccaatatgctgattaaaccacttgtagtaagtgtggttaagcaacgaccggtcctgagctatgaacaatcgcaaatctgcgaaatggtcgatcagcttgatacatcggtttcattatctgctgttgcataa

SEQ ID NO: 78410 - DNA, 270 bp, Citrobacter koseri
atgcccccttatttgttaattctccatactcttccgcaagtctgttcgaaccagttcattatgatgattaccattgttttttttggattttacaatagtatcatggggttaatggtatttaagtttgcttcgtctgaagcaccatatcacgatggtaatgaatttatacctttcattatgcaacagcagataatgaaaccgatgtatcaagctgatcgaccatttcgcagatttgcgattgttcatagctcaggaccggtcgttgcttaa

SEQ ID NO: 78411 - DNA, 1764 bp, Citrobacter koseri
atgaagacaattataaagtttgatagattgtttgttgtctctgaaagtcataatttatatttcgaccaaaagttttcaaataaaataaacataataagtgggtgtaatacctcaggtaaaagtactttaatacagagtattttatttacctttggaattaacgatgttaaagatggcttgagcgaaattattcgatacaaccctacgttcagattggatttcagcatcactaaaggaggcgtagataaaaaatatataatagtaagagagcttggtagcatatatttaaaagaggatgggggaaatgtttttagttttcatggaattgactctgatggtcgagttgaacatgtgaagcttaaggagatgttatctcaattatttgattttaacatgcttttagaacagaagggcgagctaaaaaaagcatcgatagaatgcatgttcctgccttattatatttctcaatctgtagggtgggtttatttaagagagtcattctctaatcttggtttttataaagactttaaagacacgtatcttgattattatcttggtatagaaaattcttttgataaagaatatttttataaattaacaaaagagcgggcacaacttcagtcgaagatctcctcattgaataaatatagtgccgagcctcactttgttgtttctaaattactggatgaagagttcggtgatgaggctcagaagtatatagatggttatataaaattagtagcatcattagacgaagaacgtgatgtatatactagtttgtgtaataagttatccttaactaaaaatcatgtcaagatactaagaagaactaaaagaaatattaaaaaccaaaactataacaatattgatcgttgtcctgcatgtacgcaaatacttccttattccttagaagggttatatggttattatcaaaacatcaatgatactgataaactatcggagcaaataaataataaaatacaaaaaatacagtctgatattaatagttcacttgcgaagattaaaaagttagaaattgatatatcttcaaagtattcatattttcttgagaaaaaatcacaaaatttatctgttaacacatggatcgataataaagcaaacatacgtctgttaggcaatattcatgaagagatagaagaacatacaaaaaggtctgatgaaattaaaggattaattgatgggatgggagaggagcagtctctttttgtcgagcggtttaacaaagaaaaagatttcaaggatatatttaaaaaatatcttaatgatatgcagttgttcaatgtaacagaacctagatatacagatctttataaaataaattcatttccttttcaaggggttgagcttcataaaactgtaatgtcatatcattttgcattaaattctgtaataagaaaaacagacaatatacatcgacttccatttatgcttgacgcaattcttaaggaagatatcgatgacagaaattttgatctcatactgtcgtttgtgggaaaaaatcttccgactgatactcaatcatttatatcaatgtctgagtatgctgaagataacctcttgaaagatggtaaagagataagtgcattccgaagagccaaggttaaagatattaaaaatcgatacttccctgatggtacgaatttattctttattggtgatgggaagcatgagagaacatttttatcaaaacctttggatttaaacctcgatatttttgtcgatacttgtcggcttactgaatga

SEQ ID NO: 78412 - DNA, 1110 bp, Citrobacter koseri
gtggctaaaaataaagcggcaaacgccggggttgatgcgttaacaggttttgagtttcaaagaaactgtgcattgtatcttttgttagataatttcaattcttttatcaataaagagttctttatttgtatcgaacatcacgatgattttctattttgttataaaactgattgcttaagttatataaacgagatacatgcctatcaagcaaagaaacttagcgggaaaatatggactatcgactctaggttttctgagatggtatctaaaatactattggtgggcgaaaacttaagaaatgatgcttttgaaaaaagtgaagattataaacaccagctaacatttatatcaaatacagaaatagaattgaaatactcaccgtcaaaggcgttaaaaaaagaaggtattactgagcagatattaagtattaatgagcaaaactctatctgtgcttatgatgagttacataaaaacattcagaataaaattgaaaataaagttacagaaatttgtaatgaagaatcttctgttttccatcgtaaagaactaagtaacctaaaaattcagtgggtagattttccaagaacggctgcaaaacaaaaagaatcgcttattgggcttatgtctagaaagttttctcatatagctgactcgaaagcagccatcgaggtaatacttgctctatttaggaatgtggaaactgtatataatcaaggacaggaaatatgtctactcgatccaacaaaaagggttgaaggcgaagaagttaagaaagttatgaatataattgattcacagcaaaaggcattcgactattggcgtgccgaagcacagcaattctcaatgaaattcagaataccacttagcatacagaaaaatcatgaaaactatatacttaactcttttgaactactcaaggatatgagtaattacgattatcaaattattaaagactttgttagaaataatgattacacaactcaatatttttctcttcaagacgtattaactgcatatgttgataatgttagaaaatctcattctataaacctagataatattgatacattttttgcagttctgtgttcatacgttgagtgctacgattaa

SEQ ID NO: 78413 - DNA, 1125 bp, Citrobacter koseri
atgactcaagctagttcacatgcgttgtctgccgaagatgtgattaccgtttctacggacaaaaccacttcaaacaaaatattatcaatacagtatttgcgtggtattgccgccatgcttgtagttttatttcactcaacaacccttattggtccagagtggaaatcttttatggtaaatggctctgttggtgtcgatgtattctttatcatgagtggctttatcatttattacatcacatcaaacaaatcagaattagcaccaaaaacatttgccataaagagatttttaagaatttacccaactttctttataatttggttacttgtttcctgtatatattatgcagatgcaaaattcataaatgtaataaaatcactatttcttatccatgttgattataatgctaacgcacccgcattcaaattcaacctgataggaccggcatggactttgacatatgagatatatttttatgtaattttctgcttcgctggatatgtgagtttcaaatatagggggttactctcctctttaattctcttgctgttaccgattttattacaactatgctttaatggctcatttatgttctcatccaatgcaaaggctgagtttaatgcggattttttgttagccccagttgtaaaagtgatgtctactacaatgctatgggaatttgttggtggtattttcttggcatttttgttcataaattacaggaaaaatattgtaaaaataaataaaatagttcgcgcatgttgctgcaccattctcattgtcatctttctgtatttcacattttactcaggatggatgccgcagggcatggtggggttgttctggcccagcatggcacttgtgactgctgccctgatggctgaggacatgataccattcgaaataaaaccactttcatttattggtgatatatcttactctctatacttggttcactgggccatcataaaactcacccaaacttatttccctcaagtttggaacaatcaatacggtgtcttttccctatttgtctttttatctgttagcgtattgatatcgtttataatgtataaaaaaatcgagaagccatcaataaaaatagcaaggaaattactaaactaa

SEQ ID NO: 78414 - DNA, 1371 bp, Citrobacter koseri
atgaatatcaggaagatactttgtttttcagtaataattctgattgttttgtgtgcatctttattttatgtgtttcagaagcataagcgtacaaatatgctagttattggctatggacaaagtttaatgaccgggatggaagggtggcctgcattaacgactcacagtgaagttgataatgcatttatgattggtgattcggtcaggccagactcaaggagatcacaacattacaaacccgttggtaattacgttagaccattaacttcaactgttcagcaagtgaatgattcatctaagctggtcagcccagagtatgttagtaaactaaagcgaggggctatcaacgagggtgaagatcctatagttggtgcagttacggcgttttctggttttagaattagtttttttgaatctctctttggtatgaatgccggggtttcaggttccgatatactacagatttcaaaaggaagtggttattacaaaaggtttaccgatgctgttaaaatatttaacgctgtttctattagcgaaaaaagagaacctgttgtctcttctatagtatttatgcagggtgaaatgaattacatgcccacatacaaaaatgcaccgcaagattatgatagatatttattcgctttaaaaaaactgcacaaaaatatgttgagcgatgcggtatcaattacgaaacagaaagataaaccattatttttcatgtatcaaacaggtggtagcttttctagggatacaaacgatttatctgttggcatggctcaacttgatttttccaataaaaatgatggggtctatatggttggcccgacataccaatacccagataaaggtggacatctgggaccaaatggttatcgatggtttggtgtacagatagcaaaggttatgcatcaggttatcgacaagggggtaaactggaagccattacaacaactatccgtttcattatctaatgataaggtggttgtaaggtatggtgttccttatccaccattaaaattcacggaagcatacgtgaagtatgatcctgtgatgtatgatgataagggttttacattgtacgatagcaacggtcgtgttgatatttcatccgtagaaatcaccgcacaagatgaaataacaattactccagttcataagattactggtcctgcaaaattattttatgccgacaaaacataccataacgggaatggaaacgtttcagacagtgacaataccgtatctccatataaatacgaatataagggggggagcgggcaataccctgaatcgaatatcaaagaattagtggggaaaccgtatccattgaataactttagtgttgcattttgtttggctgttgctatgtga

SEQ ID NO: 78415 - DNA, 2046 bp, Citrobacter koseri
atgaccacctataacaccaaagaacctcttggttctgcatccgccaaggttctttatgataacgcccagaactttgatcacctctcaaatgaccgggtcaatgaaacgtgggatgaccgttttggtaagcccagacttacatggcacggaatggagcagcgttataaaacagcgctcgcgaacctcggcttaaatcctgtcgggacatttcagggcggggcggttattaattccgccggtgacatcattcaggatgagacaacaggtgcatggtatcgctgggatgatctcacgaccctgccgaaaaccgttccatctggttctactccagattcatccggcggtacaggtgtcggaaaatggctggccgtagatgtcagcgatgtcctgcgccgcgagctggcgctgccaaccggtgcagagcaggtgggctatggttatgtgacagttgccgagcggctgtcttatgttgtctacattactaacgctgatccaaccggcagcaccagtgcagtagccgcaatacaggctgctattgatgccaataaagggaagaagcttgttctgcctgctggcgactatctgatcgacgacacgattttcattccgcgaaacacgcaactgtgtggagtggcaccaattcaaacgatgtatcacgacatggtgcataacaatgcgattgtagatctcatcgctgatgatggttatacgaaactgcatttaaaaggagatccagataaacgaatcctgactgatgttgtgcatggtgttgatgacccggcatacagcatggggattgttttcgctgagtctggtgccgggttagaaaacattgcagttattggctggcgtaaacgtacagatgggacttatgagccgccatcactgacggctccgaatgacgagggggcagtcccgtgttttgacattccggtattcaacgcatcagtaatgagcgtgagaatgcacaacactatgatcgctggttatatccctgaaaatagcgcttgctattggattgattcaactcgcggcgagcaacgtaatggcaacgggaatgactttaacgttgatgaccgcattaagtcggtaggagccaatgactcacgccaaattgattgctgtttctggtggttccatcccaataccccgtcgacagaacatgatgctaatttttatggcatgaaaattcaggggcatgatgacgatattcgaaacctgactcgttatcccagcgcaagcgcagcaaacaatgcggctgctcttaactggatttggggtggtccaggaacaagcgatcacaaattccgggggagtgtaattaagggggtttatcttgattgcactctaatatcttatgtgggggatgatcggttaaatttttactcatcaaacccagggattggaggggttaacggttatcctggtgggtggcagaacacaacaggagcaggtgggaaaataagctttcttgattgtgtcatccggcagggtgatatttatcttaagcgtgtagcaaatgtctggtttgctaacacgtacggcgaggctggttatttctatatgactaatttaacaggttgggttactcaatctgatggttttctggggcatgctggtgttgatattaccattgacaatcccgatggctcgtctcctgctgcatataatcgccttaactctcccctgtataaagttgttaactgcggtaatagcgacagatttgggctgtttcataccgggcttgcaagctcttatgtaagaccacataaacctggtttcgttgatcttggttatgatgataatggaagcaacagatatcgctggaatagggtgttcacgataagtgctatagcggaaaccattagctcaagcaacgatagaaataatataggtttgttaaaacccccacgcctgccaagctacactacctccaatttgcctacgcttggcgcgagtgattacggttgtttaatatttaataccacaactaaccttgttgcagtatggacatcggcaggatggcgaagccttcaggtggtgtga

SEQ ID NO: 78416 - DNA, 2718 bp, Citrobacter koseri
gtgaccatcagaatttatccttcccggttacccggcgagccgctggaaacgcatgaacatggtgcggtgactattcatcagtggatggcgcggaatgttgaaaattaccgcgctgacatgaagcatccgatcgccattgaagtggacggcgtgaatatcccggctgctgcatggtttgattatgcgatcagcccgaaaagtgatgtgcacatttatccggtccctcatggcgccgttgcgctggcgtggattgccgttgctgtttcggtcgcatctgttgcttatgcgctgttctttgcgcctggcgcatcagatcccggtggtttctcttcgtcgacaggcgattcactggacgttaacccggcaaaagcgaaccgtgcaaagctgggtgatccaattcgcgagttgttcggacgccgccgaatttaccccgattacgtagtgcaaccggtaacccgcttcagcccggacgatccgacagtgatgaccgttgaaatgttcgttgctctgggattcggacaattttcattcggcgaaggggatatgcgcgtcggcgccacgcccgtttcatcgcttggtgatggtttcgcatacaccgtttttcagccgggccagaatgtggctggtgatcgccgtagtgaaaactggtttaactctaccgaggttggcgggacgtcatcgggtgccgggctggatatggcccagaccgcaccggatacggatgatgtggtagcgcagtcactgacggtgtcgggaagcacaatcacgtttaacggattaagcgctgatgatgatactgcaacaaacgagctgcctgattcgtggattgctggcgcaacggttgagctaatcgtacccgatcagtttgttgttaccaatgatggcgcatacagcagcattaccagtgacaatctggcggaaatagccccttacgtcggaatgccggtaacgctctggtacaacagcgtcgactacagtctgtttatcgcttcgtatacgccgcatgcagacgcgacagaggaagaagaggaagtcaccgcgtcgataacgctggcttatgagagtgaaaccggcgcgccttttacgggtattcctgaggggtatatcaggctttccgtttctcacgctgggtatcagtacaaaattttcgatgtggacggcaccagtgtaactcttcaacgcttgattgatggtgttgtcgataacacatggccgggtttcgtggcgcgcaccgtgcttgattttgaggcatctggcgttaaccagaatgactcctggatgggaccatttctggcatgcccggataatgaaaccatagacatgtttgaagtgaatttcttcttcccgaatggaatttgcgggtacgacaaaaaagggagaaaacaaaacagaacggttcgctgggaagttcagtaccgtgtctatggctctggttctggctggatgagcaaaaccggttcgtataacacaaaaaatattaatggccttggtttcactgagcgcatcacgctgagttctcccggacttgttgaagtgcggtgccgacgcactaacgaacaggggcaggataacagtcgcgataatatgtactggcaatcattgcgtggccgcctactgaccagaccgtcatcgtatgctggcgtaacaacgatgggggtcacggtggaaaccggtggcaagctggcagcgcagtccgatcgccgggtgaacgtggtagctacaaggatttacgacactggcgcggcgcgcagcatctccggcgcgctgtaccacgttggtaactcgcttgggctggacatggacaccgacgccattaatgcgctggaaagtacctactggacgcctgacaatgagtttttcgacttcgagacgaccgaaagcacatctgcgctggaggttttgcagaagatcgccaacgccgggaaaagctattttctgcttgcagacgggcttgcctcggttgcgcgcgaaggcgttaagccctggtcgggggttatcagtccgcatgagatgaccgaagacctgcaaaccgcgttcgtggctccgtctgacgacgactatgacggcgtggacgttacgtatatcaacggcaccacctgggcggaggaaacggtacagtgccggataccgggaaatccaacgcccgtaaaaatcgaagactacacgcttgacggtgtgctcgaccgtgaccgggcatatcagatcggcatgcggcggctgatgaagtacctacagcaacggctgacacatacgacctcaacagaactggacgcactttgctataacgtcggcgatcgtatcgtgctgaccgacgacataccgggcagccagacagtcagcgcgctgattgaagagatggataccactgataacaagacaacgtttacggtgacggagcctcttgactggtctttcgagaaccctcgcgtgctgatacgttaccaggatggcaccgcttctggcctgatgacggcaacgagaatgggggattatcaggtgctggttcctgaacaagcagagttcagctctatcattctcaatgatccgtctatcgaaccgccgcgcctgattttctgcgattcttcacgcacaggttatgacgctatcgtctcagagatagcaccacaatcagacggcacatgccagataactgcgaagcagtataaacccaacttctacgattacgacaatgccacttatcccggcaatgtaggatga

SEQ ID NO: 78417 - DNA, 156 bp, Citrobacter koseri
atgaaactaacattaattaaccggctgaaattgtgctgggaaatactaacggtaaaaagcgggcatgcgcacatcgcgcaagagaagcaactctctacatttcagcgcggataccgtgctgatttaaaagacggatgtgttaacgattcgcactga

SEQ ID NO: 78418 - DNA, 1305 bp, Citrobacter koseri
atgatagctccgacgcttaatatccctcaggcacaatttctggcgatgccgcataagtttaaagcctacgtagccggattcggttccggtaaaacgtgggttggttgtggcggcatctgtaaggggatgtgggaacacccaaaaatcaaccagggctactttgcgccgacgtacccgcaaattcgtgacattttttatcccacagttgaggaagtagcccatgactgggggctgaacgtcaaaatcaacgagggtaataaagaggttcatttctacgccgggcgccagtatcgaggaacgacgatttgccgttcaatggaaaagccacagaccatcgttggtttcaaaataggtaatgcgctgattgatgaactggatgtcatggtcgccaaaaaggcgcaattggcctggcgaaaaattattgctcgtatgcgttacaaagtgcctggtctgcgtaacggaatagacgtcaccacgacacctgaagggtttaagttcgtctatcagcagttcgtgaaggcggtacgtgaaaagccagaacttgcgaccctgtacggccttgttcaggcttctaccttcgataacgaaaagaacctgccggatgactatattccttcgctcctggcgagttatccgccggaactgatcaaggcatatctgcgcggccagttcactaacctgaccagcggcacgatttatcatcagtttgaccggactctcaataattccactgaagaagagcagccaggagagccgttgtatatcgggatggattttaacgtcgggaagatggccgggatcgtccacgttcttcggcttggtttaccacatgcggtgacagaaattatcaacgcttatgatacgccggatatgattcgcatcattaaagagcggttttggctgtatgacggtggtgactatcgtaaggtgcgggaaatttatatttacccggatgcctccggtgactctagaaaatccaataacgccagcaagaccgatattgagcagcttcggcaggcgggattcaatgtcattgtggatgaagcaaacccgccagttaaagaccgtatcaactccatgaatgctatgttctgtaacggtaacggcgagcggcgttacaaagtgaacgtgaaacgctgcccggtatatgccgactgccttgagcagcaggtatgggataaaaacggcgaaccagacaaaaagagcgacaacgatcaccccaatgacggtgctgggtatttcattgtgaaacagttcccaatcgtcaggcctgctttctccatctcgctggacacaacattctga

SEQ ID NO: 78419 - DNA, 381 bp, Citrobacter koseri
atggctaagaaaaccgcattgctgggcttttctgctctttttgttgcgagtgtcgcttttgctaaaactacaagtaactgggttgaggttaccacagctgatgatggtattttttcagcaaaaaaaggcacttttagaagtgtaaaaggtgattcatctgccttgttcatgtatcaaacgaaaaataaaaaaatagagtattacaaaattagtattaaagatgccgactgtgatagtggatatggagagttaaaattcttctatatggatgggaagttagctttcaaaggtgattatgttgccgaagggaacagcgtcggcgctggtattggtgattttatgtgtgccgtcagaggtgctgctaactcacaaaaacgttaa

SEQ ID NO: 78420 - DNA, 405 bp, Citrobacter koseri
atgataaaatttttaatgttgattgtggtgacattaaccattgcaggttgcgcccctcttgcacctacaggctgtcagaaaaaaaatgcaatggaatcatgcgaatataagagttcgggtaaagtgttggataaggatatatatggatggtattcatccagaataaaaaaagctttggacgcagcacttacagagccccatgcctggaatggtaaaaaatgtaacgctcatctggatttcaaagtcgatggcaccctgcaaaattttatcgtgaaaggtggtgacaaagattattgcgctgcattgcaaaaagcttctgaaagagcgacattcccggcgtttaccgatcggagagtttactttaatatgggttccgcaagatggaacttcgaaggtcagccatga

SEQ ID NO: 78421 - DNA, 477 bp, Citrobacter koseri
atgaccactattaccaataacaaactaacaggcctcggcgagaatcatccggccaacggcccgcttacgaccgagcgccttactcacgttcgcgacgtgttacatcgcaatctcaaatactcaaatggcggaagtatggattacatcatcgctgacgctgtgaaagcgattgatgaattgctggaagggaggaaggcggaacctgtggcatggtcggcaaaggatgttagaaatggtgaccagttgctatacagcctgattgatgatgtgaatgcggcactgtcagataaccaatggcttgaaattacgtcgctctacaccgccccgccagcgccggtagtgccggacgaatgcccggtagaaattcgcgacctgctggcgtcccattctgacgctctcttccacgatggcgatgcacaggagatatggaatgcctgccgcgccgccatgctcaacaaggataaaaacaatgggtaa

SEQ ID NO: 78422 - DNA, 225 bp, Citrobacter koseri
atggctattgctgagcgaatcgctatcggcccatctggtgacacctacgaaattcatctgggggcgaactgttatcactaccgaactgacggcaaggcgaacctgatgaaagagggcatgaaccatgcctacctatgccgggtgacgagcgaaacgattaaatatgctctcgcggcaatagttgaactacagcagaaattatccgccgctggcgttgaggactaa

SEQ ID NO: 78423 - DNA, 297 bp, Citrobacter koseri
atggaaaaaaacgttgatcgaatgcctaaagcattgaattatatggagcacctcgtagactttgccaactttataccgtccccatccaactcaaatcttgttcatatacaatttatggtaactaaaccagaacctgttattagagggaaaaaagatagcgagcacagcaatcaggtatcagtcgaagtttcgatggaaaccgagcttcagcattcgtgtacagtcatccttccgaagcatcaattactggaaatgaagaagaatcttgaagatttattagaaaaaattgacaagtag

SEQ ID NO: 78424 - DNA, 810 bp, Citrobacter koseri
atggactcaaaagctaaagtgcatactggtaaagtgactcttagctatctggaaggcaataacactgagccagtaaagcttgttttacccatagaggcggacagaaatactttttacactgtggttaaacaagcagttagcataactgaagaatactcgaaaggccgctctacagagtgtgatggcattaatgaaccaacgacatcatcaattttcatctatgatatacccaatactcgagacagatggaatgaagatccaatcaaggatgatgacacatcgtttgaagtaggggttgaaaacatgtcagctattagccgagaagaattacaagcgcatctcgataaaaataaagctgagctcaaggaaattgcctctgatttgcgctgtgagatggaaaagtggagtaaagataattctcaaaagatttcagagcttactgtatctataaatgctttatcgtccatgatcgaaggcaaaagtgaggcaacaaacggtaggttagaagggatgcaggggcaaattaacggaatgaatacctctataacaggtataagtactgctatatctggtattcagtcaggtttgtctacaaaactaactgtttttggagttatcatcactgtagtaatcgctttagtcggattcggggctagtttgctctctagcaacacatctaagccaatatcagtcccgcagtcagcacaaccgattattatacaagttcctgttcctccaagtgcgtcaagtgttcaatcacctggagtctcagttgaatcacaagacaagaaaagtgatagtaagaattaa

SEQ ID NO: 78425 - DNA, 222 bp, Citrobacter koseri
atgaaagttaaatgcatcaaagataccgagggctactggaccgaaggcgaatattacgaagcagtagaatctgccggcggttttattctggttggcgatgacgaagaccctgctggggacggatggagcgctatgcctatcgaataccgggatgatggttcgattgtttattccttgggcggtatcgaaggtgaagtgttatttgaggagcaagcggcatga

SEQ ID NO: 78426 - DNA, 774 bp, Citrobacter koseri
atgaaattatctaaattctctgagctagtggcccgtatctggtcgaacccactgacgcaacgtcgcgacccggaaattacgatcatcgtccactcgcctggcagcatcggcgctactccatccgttgaggtcgagtcaattcaggctggtttcgactgggacgccggacaggcgttgatttacccggcgcagccactgaccacgctgacacctgaacaagtggcggacatcacttccagcgtgcgcaaaggccaatcctggcacgcctatgaggcttacaagaagcacaaagcagaagttgacgcacttaaggctcagattgccgaactggagtccttccgcactgcatacatggaatggagcgccaaaaccgattggttgcagacggataagcgctttgatgtcctgaagccatggggcaagcatcgcgctgatgtccttaaggcgtatatcgagtatctggagccccgcgcctccactaatgccgctgctgatgtactggcagaacggcagcgccagattacagcgaagggatggactccagagcacgacgacgagcattgcaataacgaaatggcaatggcggcggtttgttacataaacgaaacaggaactgtgaatcgtaatggtggcaagccgtgggggtggccttgggatgcttcatggtggaaaccaaatacccgacgtcgcaacctggtaaaagcaggggctttaattctggctgaaatcgaacgcatagaccgcgccgctggtattaatgaggaggtcgagtaa

SEQ ID NO: 78427 - DNA, 435 bp, Citrobacter koseri
atgatcgaacaccagcagcaaccaacacacaatagttgcatgtctgcttgcgtggcaatgatatcaagccagccggtaactgaagtcgtcacgctatggcatgagaaatttcacaacaaagaagcgtggctcgacgacgctatggactattaccgcattccctacttctacgggcacccgaggaaagccgaacttctccctggctttatttatttcctcacggttccgtcgctgaatatcgttggcggtacacatcaaattttggccgcagtaaaagaaggtcccgtggtcgaaattctcgacccggcaaaaggtcgcgatggtgccagatattacgtctacggggaatgtcagaatcccgaagagcgtgaactcatctcatggtcggtagacctggcagtaccagttgttgagtggggtaatcatgcgcattga

SEQ ID NO: 78428 - DNA, 447 bp, Citrobacter koseri
atgacccgctttctaatctgtagttttgcccttgttttactctacccagccggcatcgacatgtatctggtcggtttaccccgtattgccgccgatctgaacgccagcgaggcgcagctgcacatcgcgttttcggtatacctggccgggatggctaccgcaatgctgtttgcgggtaaagttgcagaccagtcagggcgcaaaccggtggcgatagcgggcgcggtgatattcatcatcgcctccatgctttgctcacgagcaacggacgggtcgctgttcctgaccgggcgctttattcagggcatcggggcggggtgctgttatgtggtggcgtttgcgattttgcgcgacacgcttgacgatcgccgccgggcaaaggtgttatcgctattaaacggaattaccggtattagcgccagtgttagggcatttgattatgcttaa

SEQ ID NO: 78429 - DNA, 2091 bp, Citrobacter koseri
gtgttcagaataccgactccccgtattcccccacttttcagcgggctggcgtccatgctcagacccgcgatgcccaggttcaaagtgtccgtagcctggctgctggcactggtgtggattgtgctgctggtctggatctggtggaagggccctgcatggcggttttacgagacatactggctgaaaccgctggcgaatcgctggctggcaacagctatctgggtgctgctggcgcttatctggctgaccgtcagagtggtgaaacacctgcaattgattgagaagcagcagaagcagcagcgtcaggaagagcaggatccgctttctgtggccgttaacttccagcagcgttgcctcgaccactggctattgcggttgcaacggcatctggacagccgacactacctgtggcaactgccgtggtatctggtcacgggacctgcgggcagcggtaaaacaacacttctgcgcgaagggtttccggctgatgtgatctatacgccggacgccagccggggaaccgatcagcaggtatatatcacgccgtatgtgggcagacaggcagtggttttcgataccgatggcatgctggcggatccagatgacggcaatctgctacaccgtcgcctgcgcgaacactggctgggatggctgctgcaaaaacgcacgcgccagccccttaacggcctgatcctgacgctggatctgccggatttgctgaccgcagacaaacgccgtcacgagcaactgatacagacgttgcgcggccagttgcaggagacacgccagtcgctgcatgcccgtctgccggtctatatcgtgctgaccaagctggatctgcttatcggatttgccgcgtggttccgtgccctggaccggaacgggcgcgatagtgtcctgggtgtcacctttaccggcaacgcccatgaaagcgatgcctggcacagcgagctggacgtcttctggcagacatgggggcagcagatgaaccgggcgctggctgaccagatgcttgcccagtccagcccggtggcgcgcagcgcggcattcagtttctgccgccagatgctgggggccggggagaatattgcccgtctgctggatgcgttgctggatggcgagcaccaggatatctacctgcgcggcgtgtatctgacctcttcgctgcaacgcggccagatggatgacatctttactcagtccgccgcccgccagtacgggctggagcatggctctctgtcggcctggccgctggtggacaccacgccgtacttcacccgcatattgtttccggaggtactgctggccgagccgaatcttgccggggagaatcgcctgtggctggcccgttcccgccgccggatgagtctctttgctggatgcggtgcggtggtggtggggctgcttatctggggctggcatcacgggtataacgaaaactaccgtgcaggacagacggtgctggcgcaggctaaatcttttatggacgtgccgccgccgcagggaactgatgaaagcggttacctgcaactgccgctgctgaatccggtgcgtgatgccacgctggcctacggtgactggggcgacagaagctggctggccgatatggggctctatcaggggacgcgggtgggcccctacgttgagcagacttacttgcatctgctggaacaacgttaccttccggccctgctgaacggtctggtgaaacagatgaacaacgcgccgccggaaagcgaggaaaagctcgccgtattgcgcgtcatccgtatgctggaagataaaagcgggcgtaatgatgccgtggtgaaacagtttatggcgaaacgctggagtgaacagtttcatggtcagcgtgatgttcaggcgcagttgatgtcccatctcgactatgcgctggcgcataccgactggtatgctcagcgtctgcagggcgacgccgatgccatcagcctgtggacgccttacgataaaaccgtcgccgctgcgcagaaagaactgagcaggctgccggtttatcagcgggtgtaccagagtctgaaaacacgggcgctgggcgtactgcccgccgatctcagcctgcgcgattag

SEQ ID NO: 78430 - DNA, 1353 bp, Citrobacter koseri
gtgaagcagcgtgatgagctggtgaagctgacggcaatggattcctgggtgctggctctgacgcacaatgtcacctacagcgatgctgaccggacggaaatccagcgccagcttaccgagcagtatatcagtgattacaccgccacctggcggacgggtatggataacctgaatatccgaggctatgactcgctggccgcgctgaccggcgcgctggagcagattatcagcggcgatcagccccttcagcggatactgacggcgctgcgtgacaatacccgacctcccatcctgtctgaaaaactgagtgacaacgaacgtgcgcaggcgaagaccgagccggactggcatttgctgaaccgtctggggcatgaattcgccccggaaaacagcacgctggaagagcagaaggataagggcagcacgttgcaggtggtctatcagcaactgacagaattgcaccgttacctgctggcggtacagaacgcaccggtaccgggaaaatcggccctgaaggcagtacaactccggctggatcagaacagcagcgatccgattttcgccacccggcagatggcgaaaacgctgcctgcgccgcttaatcgatgggtggacaaactggcggatcaggcgtggcatgtggtgatgattgaggcggttcgctatatggagctggactggcgcgatagcgtggtgaaaacctttaacacccagcttgcggataaatacccgtttgatccccggtcgaaagaggatgcctcgctggatgcgtttgaacgcttctttaaaccgggcggcgtgctggacgcattttaccagcagaacctgaaactgtttgtggagaacagccaagggcttaatggggaggacaatgtggtgatccgtgaggatgtccttggccagttagataccgcacagaaaatccgcgatattttcttcagcccgcagaacggactgggggcgcagtttgcggtggaaacggtagcgctgtcaggcaacaagcgtcgcagtgtgctgaaccttgatggacaactggtggattacgctcagggacgcaactacacggcgcatctggtgtggccgaacaacatgcgtgaaggcaatgagagcaagctgacgctggtgggcgcggggggaaactcctcgccgcgaagtattgccttcagcggtccgtgggcgcagttccgcctgtttggcgcagggcaactgaccagcgtacagaacggcacctttaccgcccgcttcagtgtggacggcggcactatgacctaccgtatccacaccgatacggaagacaacccgtttgctggcggactgttcagccagttccggttgccggatacgctgtattga

SEQ ID NO: 78431 - DNA, 222 bp, Citrobacter koseri; identical to SEQ ID NO: 72367

SEQ ID NO: 78432 - DNA, 588 bp, Citrobacter koseri
atgaaaccgttaacgctgattgcgatgatcgctggcgggatgacgggaacctgggtgtttaatctgttaggcggtggactggttgcaggcccaagtccaggttcgattttcgcgtaccttgcgctgacgccgaaaggatctttcctggctacgatcgcgggtgtaacggcgggaacgctggtgaccttcatcgtgacttcgatcatcctgaaaatggaaaagagcgttgaaacggagaatgaagaagacaatttcgcagagtctgcgaaagccgtgaaggcaatgaaacaggaaggcgcattttcttataagaatattaaacgtatcgcttttgtctgcgatgccggaatgggttccagcgcgatgggggcaacgacattccgtaagcgtctggagaaagccggtctggtgattgcggtggctcatcatgctatcgaaaatgttcctgatgacgccgatattatcgtgacgcatgccagccttgagggccgcgttaagcgtgtgagtaataaacccacggtgttaattaaaaattacatcggtgacccactgctggatgaattatttaaaaaactcatcgcggattag

SEQ ID NO: 78433 - DNA, 231 bp, Citrobacter koseri
atgagcaccattcaggacatccgaaaccagctatcaactctggtcaccgaggcgcacaaggttgcatgtgccctcgatataggtgacgagcgaaccgaggcctttgagctatacgaagcacttcgtcgacttcagcggcagggcgccgccggagagattctctcagcaactaacccacttctcgcctcgccatattacgacgaggactgggacgaagatgaggacgactga

SEQ ID NO: 78434 - DNA, 342 bp, Citrobacter koseri
gtgatcggaatactcaagccggtgccggaatcgcaatggccggtacgatgccacgaccccaaacggagcaatgtgtgggctaactcttattttctggttcaggagtttcaggaaggcgacggcgtaatccgcctgacggtgaacaccaccagcattggcagttccgggcggtggaaggacggcatcagttgggatgcgttgcaggagataaagtcagccgttggatatggggatcgggatgccgtggagatttacccgcgggacaccgatgtggtgaacgtggcgaacatgcgccacctgtggattacgccggagccgattagcttcgcctggcggaagtag

SEQ ID NO: 78435 - DNA, 657 bp, Citrobacter koseri
atgattgagaatttttcggaagggaaaaagcgctggcgcctaacaatgatcgagcgccttccaagggagagcggcaagaacaggaaaggcaggttcatttgcgaatgcggaaatgtgaccgtcgcagttatcagtagggttaaatctggccttactaaatcttgcggctgcctgagccgggaggtttccgtcaggctcaggactaagcatggccagcatggttctgaaacttatggaacgtggtgcgcaatgctgtctcggtgcgaaaaccccagcaatgtaaattacaaaaattacggaggtcgtgggattaccgtttgtgaccgctggcatgaattcagcgagttctttgctgatatgggtgaaaggccacgcggaatgaccatcgataggattgacaataatcttgggtatttcccagggaactgtcgatgggccactcagtctgatcagaccaagaatcagaggaaaaggagtggctgcacatcaaattgcaaaggggttagccttaccaagcatggtcgttgggaggcgcacatttcaatcgatgggaaaagaacctctcttggacgtttcgacaccgaggaagaggcgtcggccgctcatcaattagcgcgcgctaaaagagatgagaaacatgaagagtcgactttttag

SEQ ID NO: 78436 - DNA, 342 bp, Citrobacter koseri
atggattacagcaagttgagtgataaggaagttaatcgaaaggttcagatagcttcaagactaattggttcaatgacggggagaggcgtcctaattgtcagggatggaaagtgggaattcttcgatccgtgcaataacccggcagatgcatggccgattatcaccgcaaataaaatcagcatttacgcaatgagcgaagcggacaaaagaggcggttggggggcggaggcttttcatcccaacgatgcatatagctttaacgataacccacttcgtgccgcaatgattgtctttctcatgatgcaggagtcagccaatgttcaggataatccagagggttaa

SEQ ID NO: 78437 - DNA, 198 bp, Citrobacter koseri
atgccgggaaaagtcattaagggtgagcgcttccagattggcgaggtatggcagtcgccacgcggcttcctctacaaagttgtcgatgttgcagggaaagaggcggtccttcgcttcggggctcatggccttgggcgaaaaacgaagcgatgggttgacgccatcagtggttggtcgctgtatgtgaaggaggagtga

SEQ ID NO: 78438 - DNA, 219 bp, Citrobacter koseri
atggccgatatcatcgataccgcagcagagattgaagagcttcagcgtaacgctgccctttccgctcaccgactcaaccgcaacgccgtatcagctgagcgttgtgaagaatgcgacgaaccaattcccgagccgcggcgcgctgccgttcccggctgccagacgtgcgcggagtgccagggcgtgatcgaactaaggaacaagcagagggggatgtaa

SEQ ID NO: 78439 - DNA, 192 bp, Citrobacter koseri
atgaacagagccgcacccgttgatttgaggaaaagcctcgaaattgccaaccacctggcgcacatcgggattcgctttgtgccgatcccggtggcgaccgaagaagaattccagaaactggccgccgagctttcacgacggctagagcagatggcagtcgaagccgagaaaaatgaaggcggtgcagcatga

SEQ ID NO: 78440 - DNA, 318 bp, Citrobacter koseri
atgacaacagaatttaaagccctacccgtcgaacgcgaccaatacggctactggactcacccgctttacgatgaattttgcgatgggcgcgagtctatctcacctgatgaattcaacgcatggctggataagagcggccttgagtggaaagtggtgtaccgcgatgaagatgacgtcgaccccgatgtggacggctatgacatttcagcgtggcagccagaaacacccgccggtggtggttggtttgtcggttcaattcacgacacagaagatggtgccgtctgcatctggctgcggcacgctggcggtgcggcatga

SEQ ID NO: 78441 - DNA, 597 bp, Citrobacter koseri
atgccgagtagaaactgccctgaattaactgccgaaatggttagagagcttctggaatatgaccccacaacagggctgctgacctggaagacttgtcgcaaaaaagtccagaaaggtagtgttgctggctcggtttgtggaaacggtagaaagctttacgtcaaagttaggattggtcgcctctatcgcgcgcatcgcctcatttggctgatggtgacaggtgaatggccaaagtatcacatcgatcatgttgataatgacggtacgaataaccgatggtccaatttgcgtctggctacgctaaatcagaaccagcacaaccgagagttaagcagagcgaatttaacgggatataaaggcgtatctcggtctaaaaacttatcaaaaccataccgtgcaaatatcacaataggccgtgagcgccgccaccttggatactaccgttcggctgaagaggctgctcatgcttacgatgaatctgctcgagagctattcggcgcatatgcgcgacttaactttccgcatgaaaacgagttagcagccagaaaattgctacccggctgcgccatcgatgttgtgaaaacggaggccgcatga

SEQ ID NO: 78442 - DNA, 168 bp, Citrobacter koseri
atgaaagactggagtcagaacgaactgtcgctcctgtggcgccacacaaacgcagaagtcgcagagatgaccggccggagtatcgaagatgtcggagataagcggctgcaaaccaatattgagcggaatggctgggatgtaaacgacccggaaagggaggatgcatga

SEQ ID NO: 78443 - DNA, 285 bp, Citrobacter koseri
atgtcatcacctcttcacggggcgggatatctgcgcccaccaaagcaatccggcactaaagaagaggtgctggaacgatgcttctcagctatcgctaatgacgatttccagaagcctaccatggaagacaggcttctggagttgcacgaaaaggaagtctggtacgacaacttagaagcgtcattcaggccgggatggatggtagttggacctgtagaacctgattacgttgatgaccgtatgcgtaagtatcgcggtcgttacggacaaataaggagcgactga

SEQ ID NO: 78444 - DNA, 549 bp, Citrobacter koseri
atgaaccacttaatgattgacctagaaacgatgggtaatgggccgtacgcgccgatcatctccattggtgccgtattcttcgatccgaataccggggaaattggtactgatttccaggttaacgtatcgcttggatcatcaatgcggttccgtgcccggcctgatgcctcaacaatcctgtggtggatggaacaaggagaggatgctcgcaaggcattaaccactgacacgcaggacctttctactgctctttcttggctctctgatttcatttacaaacatgcaaagccgaaatttgttcaggtatggggtaatggtgcttctttcgactgcgtaatccttcgcaacagctacgcactaaccggtcaggaagcgccgtggaagtggtggagtgaccgagatgtgcgcaccgtcgtggagatggggaaagtaatcggcatcgaccctaaacgagatattccattcgaaggaacccgccacagcgcactggatgatgccatccaccaagccaaatacgtttcagccatctggcagaagctgaccaaataa

SEQ ID NO: 78445 - DNA, 462 bp, Citrobacter koseri
atggcaagcagaggcgtaaacaaagtaatcctcgtcggcaacctcgggcaagaccctgaggttcgctacctgccaaatggtggcgcggtagccaatatcacactggctacttcggaatcatggcgagataaagcaaccggcgagatgaaagagcaaaccgaatggcaccgtgtggttctgtttggcaagttggctgaagtagccagcgaatatcttcgaaaaggttctcaggtgtatatcgaaggccagctccgcacccgtaaatggactgatcaatccggtgtggagaagtacaccactgaagtgttggttaatgtcggcggcaccatgcagatgcttggaggaaaacaagcagaaggcaaaccggcaggaagtagtcagccacaacaacgaactcaacaacaaccggcacagcagcacaacgagccgcctatggattttgacgacgacatcccattttaa

SEQ ID NO: 78446 - DNA, 624 bp, Citrobacter koseri
atggaacagaaaaaagtttattcagcaatcagtgcagtagccaaggaaatggctactactggcataagcaaagatcgtcgtaaccagcagcagggttttaattttcgcggaatcgaccaggtatacaacgcgctggcccctgcccttgttaatcacggcttgcttatcctgccgcgcatcactgaaaggacagtgaccgagcggacaacgcaaaaaggcggtgtattgttctacgtcgtcgttaaggctgagttcgacttcgtcagcacggaagatggaagtatccacaccgtcaccacttatggcgaagcgatggatagcggcgataaggcgactaacaaggctatgtcgatcgcttataagtacgctgcatttcaggcgttctgcatccctaccgaagaaactgcgattgatgcagatgcagagatgcatcacatcaaaccggctgatgcagaccagattctggctgaatttacgcagtacgccggcgctgagaacgacagcaaaaaacttcaggaacagtatgcatcaacgtggcaacgccttaacggatggcctgaccaccaggctaaatgcaaagacgtaaccggaattcgaatcagagaactaaaacaggcggcataa

SEQ ID NO: 78447 - DNA, 183 bp, Citrobacter koseri
atgatccccgttgatttagcaaaaacaccggaactcagccggataaaacgcaagtatcacgttattgaagctctgtactggcgcaagaccgccaacaaaagcatgaagcgccattgcatgcgaatggctcgcgatgagcgcatcaataaatgtgactttctcggcgaagaattaccgttctga

SEQ ID NO: 78448 - DNA, 315 bp, Citrobacter koseri
atgctgattgataaaaaattgccgtccccgatgtacccaacagaagaaatgggtaggcgctctaaaagaaatcattggtttgtgagagaaaaggggagcgatcagccacgcgatcagtcatggtatgactggtggaaatcacgctcactaggcttaggtaagaatggtcatatcgcttggcgttctacgtgtatcgcaagaaacgcacccgatcccttcaatccgccgggttcattcgaggtcgatttccaggcgcctgatgggaagttgtatcatctggagtttaagctcgctccacacggcccgaataaataa

SEQ ID NO: 78449 - DNA, 240 bp, Citrobacter koseri
atgatgcaccattacggagtgtttgaagttaaccgcggcgccgtcaagccgggaatgctggttaagcataaagacggaatgtggactgcatcagcaaatgcacgcggcaaactctatcttcatcgcggctacgagcatacctacacaaaagaattgcttgttgaggtttatctcgacgggcacggcaacgggcttagtcattatccagttatttattcgggccgtgtggagcgagcttaa

SEQ ID NO: 78450 - DNA, 240 bp, Citrobacter koseri
atgaccaataaaaatggcggccaggcattcccggtcgcaggtagtgagcacaattatcctatcgagggtatgacgctacgcgattacttcgcagctaaggctatgcagtcgatcgtatcgagtcctaaagaaatggaatcgcttatcgacactcttggtgcaaaaactgcttacgcaaaggtctcagaaacagcatacgtcatcgctgacgaaatgctccgcgcccgggaggcatcatga

SEQ ID NO: 78451 - DNA, 492 bp, Citrobacter koseri
atgagtaaacgcctggatattttgaaagcgtctctcgctaagaaagagacgcggtttaatgagcggctacagcatcactttgacaccgtggcgcaggcaaatggacagccactcaatgacaagcgcaacggccgctcaacgctaaataaatgggataagcagagtgatgcactcagggcgttgcaagaaagcattcaacgcacgaaggacgctatagaacgtgaggaatccaagattgcaagtgccagcatggttaacctgccttcatacatgcagaaagcgatagatgatgggctgatatctcagtggcgcaaacatccacgattcttttttgtggtaggggtgagtggcgggcgcatcgttctggatgaaaagaccggaaccataggtcaccgctacttgagcaaagttaagaaggatgaatatccgatatttcgggatgttttcaacaatctcaatcggcaatgtcgtgaattaaacaaggtcgcttag

SEQ ID NO: 78452 - DNA, 246 bp, Citrobacter koseri
atgcttaaaaaaacatcaattgccgaggggttagtgatggattacgaagaactggcgcagctgcgctatcaggaaatgtgccggattgtgggtgatgttgtgtttgcgatggtagccgaagggcatgaaaccaaaagagtggctatagctgatgtaatacgaacggagatatcgaaggggctggataagtgggatgctgaccagattcaggttatggagctggcagtgaagttactggaagagtag

SEQ ID NO: 78453 - DNA, 1443 bp, Citrobacter koseri
atggcaatttcaaaagaaatgcgaaagcttattaataaatggaaaactggaacgtcttggcctaaacgtcttgagtggcttgaaataaaggggataaggggctggtcagggcaaagagtagatatgcagttccctatagtcgcattagttggtgagaatggctctggaaagagcacagtccttcaatgtgctgcatctgtttacaaggacaaaaagaaaaggtttgcatctttttattttcccgacacccctttcgaaaaaattcaaagtgcatatataagatattcctatcgagagggacataattcagttgttaaatcaatcagaaaaccaactaaccgatggataggcaacccagaacgccctgatcggagggtggaatatgttgatttaagcaggcttcaaccggttaatgcacgacttggttacttaaagttactcaaaggtggctcaaccgaacaagctcatgaagcttttgataacgaacgcttagataggctgcgcaacataatcggcaagagctacacggcagcgggattgtccactacgactatagattctaaacgtcctgttactgttatttcgaatgatggtgcaaggtactctggttttcatcaaggagcaggcgaaattaccgcaactgagttaattgctgtcgattatccaaaatatggattaatccttattgatgaaattgagacttcattacaccctagagctcaaagaaggctaatgcgcgatttagcaaacttagcaagggaaagagaattgcaaattcttatcacaacccactccccatatattctttctgagttgcctccagaagcaaggatttatctcatgaatggaattgaaggaaagacagctgtcagtggtgttagtcctgaatttgcaatgacaaaaatggatgaagaaaaccacccagaatgtgatttatatgtcgaagatgtaattgcaaaaacacttgtttctgaagttatcgcaagctctaaggagagagaacttttatcgcgagtgatgatcattccttttggcactgctagtgtcggaatggctctggggcaaatggcgcacaataagagattcccaagatcaactgttgtttatcttgatggcgatcaatcccctgctgtgggatgcaccattttgcctggtgatgatgctcctgaggtcgttgttttcaacgcattacaggaaaaaggctggcccaatatatctgaaaaaatcggccgcgaaccagcagaaactattgatgctttaaacgcatcgatgagtaatgctgatcatcatggatggccaagatctgcggcaaactctttaaacataggctccgaaattctttggcatgccatgtgttcttcttgggcaaaaaattgtatgagtgatgatgatcttgatgcggtgcttcaaccgattgtcgacgcactcgaaagtgaacgctaa

SEQ ID NO: 78454 - DNA, 216 bp, Citrobacter koseri
atgaacaacattgcagagcagcgaaaaaaaattggaatttcgcaagccgctctggcttccgccatcggctgggggcagtcgagaattgccaattatgaactgaacatccgtacgccgggtcttcaggaaagccgattaattgtcgaaggcttgaaccgtcttggttgtaagtgctcccttaatgacgtgttcccaccgtctatcgacgcggcttaa

SEQ ID NO: 78455 - DNA, 855 bp, Citrobacter koseri
atgactcttgatgaaaaaatcactgaacttgagaagcacattgacagcctgaataagccgccagttgcgattgatgatactgaaatttcaatcagtacagaaacctgcgaaaaacatggggaatttgaatgccgaaccagaatttacaccggcacgtccataaaaataccgccacgaccaagccgctgccctgactgtctccgtgatgagcttataaaacttcaggcagagaaaattcgccaggacgatgcggcgcgacagcggaatatcagcctcttgctggatcgcttagatatcccctcccggttcgaatcatgcaccctgcaaaactacgaaccggtgaacgacgacgcgaaacgtgtgctgaaggtttgccaggcatacgccagtcgttggcctgagcgtttgcagaaggggggcgggttggtcatgtgcggcaagccaggcacaggcaagaatcaccttgcgctggcaattgccaggcatgcaatcaccgaacaccaaagttcagcagtgtttactacggcgctgagaattgcccgcgcttacaaatcaacctggtcgaagggggctgaaaacacggaagacgatgtgattcgctacttcaccaagcctgacctgttgattatcgacgaggtcggcgtgcagttcggaagtgatgccgagaaactgatcatgttcgaaatcatcaacacccgctatgagcgaatgaagccgaccattctgatcagcaaccagaccaaagaagaactggcagctttcgtgagtgagcgcgttattgaccgaatgagcgacggcggcggatgcaccctgtcattcacctgggattcataccgttccaagggggcttcatga

SEQ ID NO: 78456 - DNA, 654 bp, Citrobacter koseri
atgaaatcaacggtagaaacaaaaatcattgagttagtgaagttagggcatgcgcgtgcagctgaactgaaaggctcattcgaagcgatcaacgcatgcagcgtagcgcaactgattagcgatctggctactcagcttgatgtgcagtttgcccgcagcaatgcgctggctgcaaagctgagcatgattaacggcctcatggatgctgctgaacaggccaataaacttgcgcaggaagcaacggaaaaactggtacaggagcgtgacgcgctggctgcggaactaagcgcagttgagtccattcacaacgatgcagtattcatcactgacgagcactatgagcaatgcccgcgagaagttcagaagatagttcgatcgctggctgtgttgcagatacctgcttacgactctttcctggatgaagtgcgggcgcagggtgtggaacagtttctgaaaggaagccaattaccttatcaaattgcaactgtgttggctgattacgacaacgtcgatgatgcaacgctccagaccgttatttggtcgggtcagccgccagagcctgacggcgacgtttggcacctcgaatatgtgtctcgtggtaatgcaattgtgcgcgctgttttgaatgatcttcgcaaaggagtgcagtcatga

SEQ ID NO: 78457 - DNA, 186 bp, Citrobacter koseri
atgaaaaaccgcaaagccaaaatcatcgttcttcgcgcactgaaaaactgttgcccgcgccagtggctgaacgtgagcaatcgccgcatggttctcttcacgctcggtggtgttagccgtgaaggacatcaattcaaaaagagcgctacacagaaccgctggaagaatcatgtgaggttcaaatga

SEQ ID NO: 78458 - DNA, 210 bp, Citrobacter koseri
atgaccactattaccataatagcagcactcatcaccctgtttgtcatacccgctgcaatggcgggtgaaaatcctcactgtgttaccgagaaagaatatccgctcatcatcacgcagtgcgatgacggaacagtaactatagctagcgtgaggaacggcgccgcttcagtgtgccgtaagggtgatggatgtcaggagatttcactatga

SEQ ID NO: 78459 - DNA, 165 bp, Citrobacter koseri
atgatagtcgaagcctatagcgataaaaatttcctgaattggtttgagcgttacttcggttatggaccagaagatgaaatcccaagtaatcatcctgtactggtagcaacagcaattgcatgggttgaatctcgtaagtttgtaagtgaggaagaaaatggctaa

SEQ ID NO: 78460 - DNA, 438 bp, Citrobacter koseri
atgaggcagcaatatctcctccgtaacaccaacatacgcgccaatgtcatcaatgcgattaatcagttgcagcttgacgagaagcgtccggtcgtcattgagataaaagagatgacgcgctccatcgaccagaacgcgaagctttggtgttgcctgagcgacgtcagccgccaggttgaatggcatggtcgcaaactctcatctgaatcgtggaaacatatcttcaccgccgcgctggttaagcaggaagtggtgcctaatctggctggtgacggcttcgtggttctgggccagtcaaccagtaagatgaccgtcagccaaatgcgcgaccttatcgaactcattcatgcctttggtgcagagcgcaacgtcaaatggggcgatgaatcacgtttggctatggagtgggcttctcgtttcggaggtcagcgtggctaa

SEQ ID NO: 78461 - DNA, 291 bp, Citrobacter koseri
gtggctaatttatgcaaagccgctcgtggtcgtgaatgccaggtgcgtattcccggcgtgtgcaatggcaatcctgaaacttccgttctggcgcatatccgcctggccggtttgtgcggcaccggtattaagccgcctgacctgatcgccaccatcgcatgcagcagctgccacgatgagattgatcgccgtacacgacttgtcgatgctgaatacgcaaaagagtgtgcactggaaggcatggctcgcacgcaggttatctggctgaaagaggggctcgtgaaagcatga

SEQ ID NO: 78462 - DNA, 363 bp, Citrobacter koseri
atgaaccaataccgtatctcattgccatgtcctccgagcaacaaccgctactaccggcataatcgcgggcgcacgcacatcagcgcagaaggccaggcgtaccgcgatagtgtcaccagaatcatcaaagactcgatgctggatatcggcctgtccacaccggtgaaaatccgtatcgagtgccacatgccggatcgccgccgccgcgacctagacaacctgcaaaaagctgcgttcgacgcgctgacaaaatccggtttctggctcgacgaccagcaggttgattactacagcgtgaagagaatgccgatcgtcaaaggcggcaggcttgaactgactatcaccgaactggaggtcgcatga

SEQ ID NO: 78463 - DNA, 219 bp, Citrobacter koseri
atgcaagccaccgtcctgtctctgtctcatatcccgaaaagctcttggtttttgtgcgcggagaatgcgcagtggttttgcttcgagcataaaaaagcccgaccgaagtcaggctctgtttgtctgttgtgggtgaagaatcatttcaggcactgcgtgttgatgtattcctgcatgccgcgaatcatcttgtcagcggttgcgattccgtcccggtga

SEQ ID NO: 78464 - DNA, 690 bp, Citrobacter koseri
atgcgtttttctgacgatggttggtttgatgcaacaactgccgccgataaattcgataaagcgccaaatgatttcctgcgactaccggagacttattcgtacattcaggctcttgagcgtagatacgggaaaatctcgtatgtaaaaaccagtcgcgctcgcaaagaccgtggcggcggaacatggcttcaccctaaactagctgtcaggtttgctcggtggctttctgtagacttcgagatctggtgtgatgagcaaattgacgcaatcattcagggatccgtccatcacatcgacgatgaaagaatcaaggccattttcctgctggacaaatctcagccatgggagaagaggtttagcgatcctttttattctgcgatgtttaaaatgtcagggcttcctcgtcatcgaccaggccgtcgccccgcactctttgggatgatcagtgctaaatgggtatatggcccggtcttgcccccagaagtatatgcagaggttaaaaaacgcctagctgcgggagacaaaatccatcagcaccttaaacctgatgctctgacattggttgagcgacagatcattgccgttaccagcattgccaatggatgctcagattatcgtgatttcgaagcgcgttgcatgtcggcatttccggtaaagggtcagatgaaattgctatacgcagcggcgtga

SEQ ID NO: 78465 - DNA, 360 bp, Citrobacter koseri
atgaacccatattcaccagaaaaattccccatgaccaggcaggtctgtgaggagtttgtcatcatgcaaactgctaaacaccggcaaccaatctatcggtctgcatttggcgacattctgatagatgctgactgtctggcatcgatgttcacttcatattttatggctgatgacatggatgctgccgcggtggagatgaagttctttcagatgctcgacatctacaacctggatcgccaggagtatttcgcatccatcggtaagtatgaaggactcaagccatccggcgtagcagtcatcgaggacatccttgattactacgctcagaaggttgctgatggggaattgcccgcacactga

SEQ ID NO: 78466 - DNA, 480 bp, Citrobacter koseri
atggcgacactgaaaggtgaggtcaaagccttcatcgttcagtctcttgcctgcttcgatactccatcccaggtggttgagctggtcaaaaaagaatttggcctgaacatcactcgtcaacaggtcgaatctcacgacccgacgaaagcaaacggcagggggctggcgcagaaatgggttgacatgttcaacgccacccgcgaacgcttccagaatgaaatctccgatattccgatcgccaacaaggcgtaccgccttcgagttctcgaccgcatggcaacgcgcgccgagggcatgaagaacctcgcgcttactgctgagatcatcgagcaggcggcgaaggaatgcggcgatgcctacaccaataagcacaagtttgaacattccggcccgaatggtggcgccatccagacgatcaccatgagcaaagaggaatacaaatccgcacggcaggagatgatggaggatgacgactgctga

SEQ ID NO: 78467 - DNA, 1479 bp, Citrobacter koseri
atgacgactgctgagcaaaaggcttttgcccgtaaggttgaatgcgaagaagacgggctttactacgctcgatacttcttcaagcaacgtactggcggcaagatgattgtcgcgccgcaccacaaagtgattcagcaaacgctagatcgagtaatcagcggtgagataaaccgcctgatcatcaacgttccgcctggctacaccaaaaccgaactggcaaccatcaacatgatggggcgcggcttggcgctgaactgccgggcccgcttcatgcacctgtcctattcgcacaacctggcgctgctaaactcttccactgcgcgtggaatgattaagtcgcaggcgtatcagtcgatgtggcccatgtcgctacgcgatgacgctgacagcaaggctatgtggtggaccgaacacggcggcggcgtttatgcgtcgtcagctgccgggcaggttaccggttttcgtgccggacacatggagccaggctggcagggcgcgctgattatcgatgacccggtaaagccggacgacgcttactctgagatcgtccgcgacggggtcaacaaccgttttaacgagacaatcaaatcacgactggcgatcgagacgacgccgatgattgtcatcatgcagcggatccattaccacgacctgagcggctatcttctgcggggcgggagtggtgagaaatggcatcacctgaatctgccggtgattatcgacaatagtcagccatatgcagcgcagtaccctgaaaactcacacgctataccgattgaccatggcttacctgacggctggctgtggccttttaagcataatgaatcgcatcgtgtatcgctgttctcgcaccggcgcaccgcagaagcccagtacatgcagaagcctcgcaggtttaatgcagaaggcgctctgtggacagaggtgatgatcagcgcggcacgcgaactgcaaattcatcacgacaaggttcgcactgtcgtggctattgacccgcaggcaacgaatagcgacgagagcgatgagaccgggatcgttgctgccagttcatatggtgctggtgataaaaagcagttctctgtggatggcgattacagcgggaaatattcccctgctgggtgggcaaaaaaggccatatgggcttatgagcatcatcaggccgacgcgatagtcattgagacgaaccagggcggagacatggcggaggagacactccgcaacgccggattcaaaggtcgcatcattcgtgtccatgccagcaaaggtaagtatgcccgtgcggagccgatatcggcgctatacgaacaggggcgagtggcaaatcacggcaatctctatgtattagagaatcagttaatggagtacataccggccactgcgaagaaatcacctgaccgcctcgacgcgatggtttacgcactgacagaactgaatggatcgcaaccagtggggatgatgattcctaagcgtctgcgttaa

SEQ ID NO: 78468 - DNA, 252 bp, Citrobacter koseri
atgagtaataactttgatgttgatgacgagcgcaaacagcttgaaaatttgcctgatgatgagttggaacaactggctgtgagatacgatctcctgcctgaaggagtatcgcttgaagataagtcagaagcttttatagatgggcttatcggtgaaatcatcgaagccagggcctaccatgattcacaaaatgccgaatgggacgaacagcaaaacattttcgatcaacaacggcgtgatgaagattattaa

SEQ ID NO: 78469 - DNA, 159 bp, Citrobacter koseri
atgaccgaatactggtgctgcgcctgtgggaaagtcatcagattcgaaagagtcatgcctctaaattacatccccatacactgtcgcactctgatgctcagaaagattgaatcattcactccggcaaaaggaccaaaaatcccgccgatgaaacgctga

SEQ ID NO: 78470 - DNA, 513 bp, Citrobacter koseri
atgcactatccaaccgtatctgtaaacggtgtatccgttcgtgtcgataacgaagggcgttacaatcttaatgatctccacgcagcagcggtggctgaaggtaatgctacagaatcacaacgacccagtaacttcacaaaaagcaaatctatcaaggcattcattcgggaattgaccgccgctacgaaaatagcggcgctaaaaaccgttaatggcggccctaatcatggcgtctgggggcttgagcttatagctatcagatatgcggcatggcttagtgcgaagtttgagataaaggtctatcagacattccaaatggtgatccgcaatggcattgatgccatgtctcgtctcaacaaaatcgaccatgtgattaacaccgaaacaaaagcgattagccagtgcgccagccagatggcccggtggggagttggtgggcgcaaaaagctactccacgcagcgcgcgaaagggttgctgatgaagtgcagatgtatttgccgggcattgcgtaa

SEQ ID NO: 78471 - DNA, 195 bp, Citrobacter koseri
atgaaagccacagtacgccgttacttacgcgctgccggaagcgttcttgatctcgctccgtcaaccgactacaccaaaattgttaaaaaaactggtgacctacagtctatcagaaacgatttccaccggatcggtggcgattttggtcgtgccattgcggtagcaaatgcagcaaaagcagaagcagcaaaataa

SEQ ID NO: 78472 - DNA, 315 bp, Citrobacter koseri
atgtcggtgggcctgctctttttctgccatagcaaaaatgcgctcagcgccgccaggaagtattttatcgtagtcgcgaatgatttcaggtggtggcaaaggcccagagaacgatgtttcatggctaaccatcgcctgaaatttaccactttcaagcaaagcatgaaccaactctggattctgagccagttctttttcgattctgtcagccttagctactacagcttgattattttgctgcttctgcttttgctgcatttgctaccgcaatggcacgaccaaaatcgccaccgatccggtggaaatcgtttctga

SEQ ID NO: 78473 - DNA, 483 bp, Citrobacter koseri
atgagaaagcttgctgctgtatttattgttggttcatttctttccggctgcgcccctggttacgtttatactcccccttcgacggtggactatgagaaaaccatgcaggaggcaaaacgtaaggatgcagagtttgcagaaaaagttaaaaacattaatttagacactgctgatgttggtgctaaaccacagaattataaaaaactcgtcgaagatgccattaaagagcagttgaaggatccagattcagccaggtttacggacatgaccaatccacgcaaggaggttatggtagatcaaggcaacttcatctatgggtattcaacctgtgtttacgtcaatgcgaagaactcatacggtggttatgtagggaaacagcgttattgggcatttattcgaaataaccaagtattgcgcataaaaaatacaaacgaagcttatggagacgtaatcttcattggacgaccgataaactgtaattaa

SEQ ID NO: 78474 - DNA, 177 bp, Citrobacter koseri
atgtctggcctgataaacccaaaagactcaccagaagaatcagcgtatgcattattgattgaaatgattagagcccaaagagtacccgtttactccagcggaaatatttctggtcttctatcaatgtatgaccaggcagtgcagcattttaaagatgaggataaagaaagcagttaa

SEQ ID NO: 78475 - DNA, 954 bp, Citrobacter koseri
atgccggaaggtattctgattgattacaacgatgaccgcccggtgatggcgataacagcggggcttcgcgcccccagtttctgcacttcattttcaggtgagtcgtcgcaaacgtcgcaaacaaatcaatattatcaagttaacacaccgttgataccagattctcagatcatcgtggtgccaacaaatccgatttatatttatgactttgcatattacgccattgcaatgatggggagtgttacaagaaatggaaattcaggtgtcaggatctctatagaggtaattaatgatagttggatgatcccgaactggtctggttacgtaatggaattgctgcccgcagctacctataacgaagggttactggttgcgaactcgacggatttcaccgccatatctaatcaggcctcgctgatgacctgtgcctattccgggcgcattacggttaacggcagcgcacctcttccggtcagcggcattccttttgggaaatgggataacccgaatgtgtcggtggggtttgatggcaccaacatcattgtccgcgatatttcctacaccgggcgggacgacgttgccggaacggcgacgattgatctggtgatattcaatcagacagcaccagttggcggcgatggtatcaccatgaccaacgccgcgggccaggtgactttctccactctgaaacgaccttttgtatacgaccggcaaatccagatcaccgacgccttccagaatattggcggcgggtactgccagatagtttataccggggctcaggttcggatgaatggtggttacgcaaacctcagaaccaaaggggtggttatgtcaaacggcagcgtcaggtctgcatacaacagagtcgtggggaattactacacaagcctgaacatgacaaagaacagaaacatcaccatgccgattcttattctaccgaacatgtactga

SEQ ID NO: 78476 - DNA, 363 bp, Citrobacter koseri
atgagtaaattccctagccaagagatggaccgtttcaacgtgagactgccagcaggaatgcgtgacgccatagcagagcgtgccaaagctaacggcagatccatgaactctgagatagttcagatacttcaagaagcattggataccgaaaggattctttccgaaagcgacctcgttgacttcgactcaactcaagccgcatttaatgccgcagcgacagcagaagataaagagaaattcctcagtgatcttgcgaaaaaagacccgttcacagcagacatacttcgcgagggagaagagcacgcgaagcggcttgcagcaatacttggtcgtcgcatggggtatctggacgacgagaagtaa

SEQ ID NO: 78477 - DNA, 171 bp, Citrobacter koseri
atgggaaccactacatacgctggtcgtaaaaatgaaagttttcaacttcgtctaccgggacagatgaaagaggagatccgcagaatggcggagatggacggaatttctataaattctgcaattgtgcaaaggctggccaagagcctgcgtgaggatcgtcacaatgcttga

SEQ ID NO: 78478 - DNA, 459 bp, Citrobacter koseri
atgcttgagaaaatggaagctagctatgttggttatgcggggtttattaatagtaaaaaagccccgaaaaccaataagttcgagcgcggatatatctatgttttgaaactgtcgaatggatacacgaaagttgggagtactgccgagcctgcatcgagaattaagagtttgcagcgtggacttaggtcaacagaggttactcttgatcatctttggctgagtgtcagccatatcaattacaaggataacgaaaagcaagttttagcttatttggaggggaaggagcgagatggagagttctttaaaatccctttcgatgaggctttatcggtagtaatgggtatgaagattaaaaaatcgtttacagcagaggaaatagaagagaaagaagctaaaaatgcagagtttagaaattggctagatgatatacacggattttcacgccagcaacaaaactaa

SEQ ID NO: 78479 - DNA, 633 bp, Citrobacter koseri
atgagtagtttagcaatatctaactttaacttccagggtgtaacgctgaagccagttgaaagagctggtgatttatggttttcatcagccgatttagcaaaagccctcggctacaagaaaaccgatgccgttactcaaatttatagccgttacagcgatgaatttggggccaatatgtcaacgaccctcagggagagggtcgttagaaaaacgggttctgtagaaatgctggtgagatttttctctttacgcggcgctcacctggttgcgatgtttgcctccactccaaaggccaaagaatttcgccgttgggtgctggatatactagatcgcgaagttcagcactcgccgatcgccaagcagttctcagatgatgagttgattagcctctgctacatgcagttgtggatggaaaagagtaagcaggttagcaaagctctttatccggcattgaagcaggttggctctcagatgtctggcgtgatttacgatattgctaatgagacacgtttcacggcgaagtgcaaagaggcattattgcgtgagactgaaaagctggacggtgaaacttacgccatgaagcgtgcgcaaccgatgcttgccaggcttcgcggcgaagaatggatccactga

SEQ ID NO: 78480 - DNA, 705 bp, Citrobacter koseri
atgactaaacaaactgtagcaaatgcaagatctgttgtcactaaaatgtcaagccgtgagattgctaaattgaccggtaagcggcatgacaacgttatggccgattgccgaaaaatgttcgattcgctcaatcttcaatctcctgacttctcaggagattaccaggatgatagagggaggacatatcaggagtattggcttgaccaagatttgaccatgacactgatgatggggtatagcatcccgctgcgccataaggttgctacgcgttggcgtcagcttgagtctggtagtgtcgcgccgattaaatcagcctctcacctgccagaatttcgccgtgcgcgagctattaaaatggaggttgaggctatcagtctggcgttgtcttacatgccaaaattgagtgatgtggcaaagcagaccgcaatggctcgcgctgtcaatgatgctgctggcattgagcttcttccgttaccgaaactggaagatcactaccatagcgcgacagaggtggcagaaatgcttggtgtgtccgctcagaaaatcgggcgcattgccaacgcgaataacctgaaaactgacgagtacggtattttcgtaatggacaaatcagcgcactccagcaagcaggttgaggctttccgatacaactctgaaggggttaaggcattgagccacctggtgcacggtgctgatgtagcttaa

SEQ ID NO: 78481 - DNA, 357 bp, Citrobacter koseri
atgagtgacattgttgatgctctacaacgtgatgacctggtgctgtttaacgaatcgttctctgcgacaaacagtcgggaaggggccgaaatcatcagaggcgtggtaaccgcactggcagaaagcaacgtgaagctcttttttgttacacatactgcggaatttgcatgttcgttttatcaggaggatcgccaggacacggtatacttgtgcgccgaacgacgcgacgatggagaaaggacatacaaaatagcagaaggcgtgcctctggatatcagttatggcgaagatttgtaccgggatgtttttgatgcctctcccgtataccggaatacgggagaggtttcagagcgttaa

SEQ ID NO: 78482 - DNA, 462 bp, Citrobacter koseri
ttgatcctgattggctcgatgagctgggcattcggctccgtgttcggcgcccgcatcgcgttgccgacaggcatgatggccggagcgattgaaatgctggctgccggtgttgtgctgatgttcgcttcctttatcgccggggaaaagctgacgacgatgccgacgctctccggcttcatggcggtaggttatctggcgctattcggttccattatcgccattaatgcctatatgtatttgatccgtaatgtcagcccggcgctggcgaccagttacgcctacgtcaacccggtagtggcggtgttgctgggaacaggtctggggggagaaagcctttcttccgtcgagtggctggcattaggggtaattgttttcgctgtcgtcctggtgacgctggggaaatatttgtttcccgccagacccgcgaccgcagcgagcgaatcggaaaaatcactccagtaa

SEQ ID NO: 78483 - DNA, 498 bp, Citrobacter koseri
atgatctgggtattcgtcaaagcgtactggaaacagttgattatcgtgacgatgcttgctgctctggtggtcggtggcgttgttgcctggaatgttcacggtgaccagcagtatgacgccgggtattcgcaggcaaaggcagatcagaaaagtgctgatgataaggcgaggtcacaacgtgatcaggagaaaacacaaattgaacgtgaagcacaatcccgtatcgatgtggcgcgtgctgatgctgagcatgctaataccgctgctgacggcctgcgcgcagagcttgacaaaaccaagcgactcgccgaacactataccggatctttccccactggcacgccagccagcaaggtcatcggtgtgctcgccgacatgcttgaagaaagcaaccgagtttacaacgcaacagcggttgaggctgaaaagtataggattgcaggagaatcctgcgaacaccaatacgactcactgaagaagcaaaaatcggggcactga

SEQ ID NO: 78484 - DNA, 627 bp, Citrobacter koseri
atggacattaatacgttccgtcgcgccgccgggatcactgagcaactggctgagcgctggcatccgcacattgtggccgcaatgaaagagtccggcattactaaacctgatgatcaggcaatgttcattgctcaggccgggcatgagagcgccggattcacccggcttgtggagagtttcaactacagcatttccgggctcgccggatttatccgtgccgggcgtattactcctgatcaggccagtgcgcttggccggaaaacctacgagaagtcgctaccactggaacgccagcgcgccattgccaacctggtatacagcaaacgtatggggaacaacgggccgggagacgggtggaactaccgcggacgcggacttattcaaatcaccggactgaacaactatcgggactgtggcaacgggctcaaaattgagctggttgcgcagcctgaactgctggcgcaggatgaatatgcggcccgcagcgcggcgtggttcttcgctaccaaaggctgcatgaagtacacaggtgacctggtgcgcgtcacgcagatcatcaatggcggtcagaacggtatcgacgaccgtcgcgcgcgttatgctgtggcgcgtaaggcgctgttatga

SEQ ID NO: 78485 - DNA, 294 bp, Citrobacter koseri
atgacaagtcatgaactgcaactattcctcaacgccgctatctgcggcggcattgcaatcagggtactcctttttcgtcgtgacgggtcacgccatcgatggtggggcggctggcttgcctatctgctgatcgtcgtggctgccagcgtaccggtacgcactttctatgggtactacgtcagcacagactggtctgaagtcatcatcaaggccgtattcctcgccgcgctcattaagacgaaagggaatgtggtgcaaattttcaagatatcgaggtctcaacatggacattaa

SEQ ID NO: 78486 - DNA, 405 bp, Citrobacter koseri
atgtcagccacgatgacggtatcagatatcaatcaggggcttagtgctggagcgctgacggcctggctgatcggcgttccgtttgaagtggcgtttggttcactggccggagcggtgatttttgttaccttcgctgccgagtatccaataaagcgccggttgtttctggcggtaatcagcttcttctgcgggcttctcttctacaaacctacagcaacgattctaatcggattcgcaacgctcgtcccctccgtaactcctgacatgttcgagaaaggaattgtctattccgctggcgcgttcgtgtcggcgatcgttgcagtcagttttggtaagtatgtgtatcaccgttctgaaaatccacgcgacatgctcccggggagaaaagacgatgacaagtcatga

SEQ ID NO: 78487 - DNA, 1767 bp, Citrobacter koseri
atgacatcaattattgtaagaggactaaatagtaataattttagcttctcttcattctatgcggcgagatccaaaagaataatacctgcacttgtttttgtgtgtttgatggttttgttttcaggatactttttgctaacccctccagactactcttcgctgtctgagcatgtgttgtcatcaattctgtttgtatcaaactttaattattatcttgaggctggctattttgattcagaatcacatctaaaatggcttcttcatacctggtcgctttctgtcgagtggcagttttacattatttacccaataatactatatgtggtctataagtcatttggaaaatcatcgataaataaaacaatagttgtaatgtttgttttatctcttatggcatcagtttatattacgcgcattaatccttcacagtcttacttcatgattcatacgcgagcatgggaaatgttggctggaggtattgcgtattctattggtgataagcttacttatattaagaatagaaagcatctttctttatcattatggtttgtattgattggctctcttttcattataaatagcagcgtagcgtggcctggttacatggcagcgattcctgtaatgtgcgctgcgatattaatagcaatcaataaaaacatttctatatatgagttaaattttgttaagattaccgggctggtgtcttattccctgtacttgtggcactggcctgtgtcagtttttatttatcgctccaccctgtctggtaatgttatggcaggtatgtcaggaatggttttatcttttggtttggcgtatctaacttacaaattcattgagaggttaccagaaaggatatccaccgactcgctaaaaagagcatcggtgatagtatcatctttagttcttacttcgatagcgtctgtttatgtttacagaactgatggagtttcatcgcgataccctgttagtacagcggagcttgcatctattactgatgcatataaatattttgattttgctaataatatgcgtggtggagtgtgccacaacgttgacacatcaaaagacgttgactacttcattaaaaattgtttttcaaagtccaaaacaaatatattcttgtatggggattcatacgctgccactctatatcatggattgcaaacattagcagagaaagacaaggatattggaattgcacaaataacatatggtaatggctcgcctttctttgatatagatggcgatacatctgtacaatttcgtaacgtgaaagatgccaatgagttcagattaaaggcattaaaagttattaaacctgaaatagttctcctttcatggaggtatgacggtccaaatgcaatacacaacaaaaaagatgcacttgcgtcaatagagaatactattgaacgaattaaggatgtttcgccatcatcaagagtggttgttcttggcccaaccccaggatggaacaatggaattatcaacatactgttagagtattcaaagaaatacaatactgagccaccataccgtacaaaatttggactggcgttcgactcaaagaaatgggattcgtatttttcaaagcatttaaaaaatgcgaaatacatctcaagctataatgagttgtgcaacgatgatggatgcatgaccagaacaggaccaacgccaaaagaactgttgtatgttgactatggtcatttatcacaaaacggcagtgatttcctgattggcaaaataagtaatcagattataaattaa

SEQ ID NO: 78488 - DNA, 2286 bp, Citrobacter koseri
atgacggtctcaaccgaagttgaccacaacgattacacagggaacggcgtcacgacatcattcccctatacgttccgaatttttcagaagtctgatctggtggtgcaggttgttgacctggatgaaaacatcacggaactgactcttgatactgattacaccgttaccggcgccggaggttacaacggcggtaacgttatcctttccagcccgctggcaaacggataccagatatccatatcgcgatcacttcctgtgacgcaggaaaccgacctgcgtaatcagggtaagttctttgctgaagtgcatgaagatgctttcgacaagctcactatgctggttcagcaggtaagaagtatgttcagcctggcgctgcggaaaccgtcatttatagccaattattacgatgcccttggcaattatattcgcaacctgcgtgatccttcacgcccgcaggatgccgcgacaaagaactatgttgacagcctggcatccggcaacctgagccgcacccttcgcgtaccagagccaattaaccagctacctggtgttgaaggccgacgtaataaaatgcccgcgttcgatgacagcggtaatgctattgtggttgttccgccgtcagggtctgcatctgatgtaatgatagaactggcgaagccaactggcgcagagaaaatcggctatggtgatgtgaccgtcgcagagcggctgtcttatgacgtgtatttcacggggggaagcggcgcaacaaaagaagaaatccaggcgtttttagatgagaatgctggtaggaactgccacttccccccaggtgattttgatattgaatggggaatgatcccacgaaacacgaccattaccggtgcgcaggccgtcacggtgcgttcacatagtatgcgtcatgaggcgacgacactcgcgacgcttatcagtgatccgggatttacccgatttaacctcaaaggcaccccagcaacgtacgtcctgacagacgttgtagagggcgctgatgacccggcgatcagtgcaggcttatgtatttgcgaccacggaatctcaatcaacaacgttgtgctgatggggtggcgcaaacggacagacgggactcttgaagcgccatcgctgaccggggtggatgacgccggggcaacggcgtgcttctcatatggcctgtttgttccggcagtgtcagggttaaccttgtctggtactgcggttatcggctactttgcgaatgatgcagttctcctcgactgctcccgatctgaccagaataacggttctggcaatacgttcaatatcaatgggcgcatcaacagtcagagcatgtgcgacatggcgtttgatcgattctttgcatggcctctcgacccaaaacagcccactcagttggtaagcgcgattagctcatatgggctgaaactaaagggtactgaccgggatatccgggacgggactaaatacccgcaagggagtaacggctacgcgcttaactggatttggggcggcacaggaacgtccgacctgtttttctcaaatagcgtcattcgcggggtttacctcgatgccgcgataaacaccgcagaggaacccgcgaaccgaatgaacgattacgctacagacggatctgggagtggtacaacgtcagtcaacgggtacccgaaagaatggcaggatgggcgcggcagcaagctattctttgttaacacgaccattcgtgtagggaatctctacatgaaccgggtagcgaacgttaacttggtaaacacctatagtgaagctggaacccactatatgactaaccttacgggtcgagtgagtattattggtgggcacaacggcttgggtgtcagtgacctgacagtcaataatgttgatggatctgcccctacagcatataaccggctattctctgccaactggatctgtatcggcaccgccaacccaatgcgcctcggcccggtatacgagtcaggtagccatgcgtacctgcggccattcagagacgccactgttacattaggcactgatgaagggactggcgtaggtgcgttacgttatcgattctctcagatccacacagtatctggttcttttggtaacattacttctccgaacaacgtcatacaggctaacaaacctgtgcggataccgagctttacgaccgcacaacgcccttcattaaacgcagcagatgcaggagcgcagatactggatacaactcttggttatgcgatcacgtggacgggaagcgcgtggaaagatggtgtgggtaatatagtttaa

SEQ ID NO: 78489 - DNA, 261 bp, Citrobacter koseri
atgcaacggcagtatcaccacccgctggaagaaggatttaccgaacgaatacacacgccagcaggcgtacgttcactcgttgatgactcgctgctgatgaagttgttgcgggaactcgacaaggacggctttaatgttgacgggccgctggcagaacttactgccctggtgaactatgtaacaagctcgcaaatgtccatgcaggatctgcaaacgcatcttgattactgtgcggagcagcttcgcaggcaagtcacataa

SEQ ID NO: 78490 - DNA, 696 bp, Citrobacter koseri
atgacaactcaaagaaaaccatccccggacgcagtatttaagttcgaatcatctactcctgttcgtatgttcaacattgatggaaatccatggttcgctgcatcagacgtttgcaaggctcttggcttgaccaactcccgcatgtcgttaaaagctcttgatgatgatgagaagggtgtaagttcaacttacaccgttaaaggtagccagaccgttaatgtcataaatgagtccggcctctatactcttatcctgcgctgccgcgatgcagttacccctggcactatcccctaccgcttccgcaaatgggtaacgggtgaagtgctgccgcagatccgccgaaccgggcgctacgttcgcgaagagttatctccagcggataaagcgcagaaggttgtagccagcttcatgcccgccatcctggaagcaatgaaggctgaaggtaagcaggaatacagcgccccactcaaaccaggctaccgcgacatgattcactcgccggaaggtgttgttggactggcggatcgttcactgctgatgaacttgctgaaccagatgcaggatgacggccacgacgtatccggcgcagcggcggagttcaccacgatgatcagttacatcgtcggtgccagtaaatgcctgcgcgacattcagacgcacgcgcagtacatcaatagccaggctggagagttctga

SEQ ID NO: 78491 - DNA, 549 bp, Citrobacter koseri
atgcaagaggaaaaccagaagctaaaagcctctctttcgacaaatatgcaaaactctactgggcaaccaaaggatagtgaagacagtgagtttgaagaagtagaggaagacctcagtaatgagatcatccagcaccctgacgccttcaccagagtccttgatcgtcctgagattcaggaaatagtagtagctcaccacgcgtttcagggtccgcttccacctccatatctgctacgtgggtatcaggatattttacctgatgcccctgaacgcatcttccaactgacagaaaaggagtttgcacaccgtcagaaaatggaagagaaggcacttgatggagctattaacagagataagcgcgggcagtggtttggccttggtgccaccatattcacagtagcctgtgcaactctattaggtataacaggacatgaagtgttggctggaacggtgattggcattgtggttgcagtggctggtattttcgttctcagacaaaaacctggcatcaagaagaaagctgaagacaagaaaccggaagaagactaa

SEQ ID NO: 78492 - DNA, 237 bp, Citrobacter koseri
atgctgaaggtgtgctcaggtgatggtggtttttttgttattgccgattcatcttacagtaaagggccgaggctgaggattggtgatcttgtcgcttggttgcctgtgaattatgccgaagaattaacggataaattagaagatcctcgttccgctatggttggttttattttgggaaccattcatcctgtactaacatctactggttggaagggaaaagacaggtttaaaaaatga

SEQ ID NO: 78493 - DNA, 2892 bp, Citrobacter koseri
atgccggtatatgccactcctgaagaactgaacaacggatacaccccggctggcaacgtgctggccgaacctacgggctttgatgtctccctgccagaaggcactaaccctgagccacaacaacctgagccttccgtatggggggcggccttccgccagaataatctgttgggcgagatgttccgcccggccaaacagttcgaaccggtaggcgggtataacccgtatgcggataaaaacgagctgcacgggtacgaacaatggggatctgcgtttgcggattcccgttcgccggaagaaaccgcctggcttaagcagcagattgacgacgaaaacgaagaccggcgcgtactgtcagaggcgggcggcgaaggcgtgttagccagtattgccgctggcgttgtcgacccggtaaccgtcgcatcgatgtttatccccggtgcgcagggcggtgtggcagcgcgtattgcgtcacagattgcgatcggtgcagcaggtactgcgttaagcgaggtcgcgctcaataaccagcagataacacgtacgtggggggagagtgccgcgcacgtcgccgccggtgcgctgatgagcggtgtttttgccagtgctggcgcgatgcttacaccctcggtgaaaaatgcggccacgcgggaagtggcggaggcgctcgataatatgagcgtcacatcgccggtggataccgcagcggcctcgcttcctgatggcgggagtattggcgcagcgcggatcagcgaagcgacactcgaagatttaacccctgtcgcgggcgggccactcggaaaagcagcacgcagggcgggcagttatctgacgccgatcacccgcctgatggagtcaccttcaaaaacagcacgccgtacggcgctggaactggcagagaataacttcacgctccaggggaatgcgcgtggtattgaaacgcctgttgcagcggaaacccgcgttcgcggctggcgccgtgaagaagctgcggtagtggtgaccaataaacaggcgtacgcaaaatataaatctgatggcggtgacctgagttttgcgtcgttccgtgaagaggtcggtaacgccatgcgcagcggcgacgtgcacgccaacccggtagtgcaggaaaccgcgcaggccatgcgcaccgttgttaaccgcgtgaaggtggcgcagcaaaaacttgggctgttaccgccggatgaggaactgaaagctatcggacagaccagctattttccgcgcgtgtacaaggtcgggaaaatcgtcaacgagcgcgataagttccgagacatgctggttgactggtggtcgcgcggcgaaaaaaccatgtccagagaagaagccgaaatcactgcggatgccactattaacaaaatcgtcggcgcaaaaatcccgcaggatttcgctaatgtgtttatggtcaagtccgctggcagcaccagaggtcgtacactcagcgtacccgatcgcctgatgaaagattatctggaaagcgacaccaactatgttctgcaacggcatatccgtgaggcatccgcagaagttgaactgacccgcacctttggtaacaagacgctggaaaagcagcttaaggatattcaggacgaatatgacgcgctgatgcgttcccgccccaaagaccaggctaaactggcaaaagcccgtgataacgatctgcgcgatattaccgcgctgcgtgaccgccttgtcggcacgtacggcatgcctgacgacccgtcgtcgttctttgtccgcgccggtgcgtttctgcgtagtgctaactttgtcaccaaactgggcggtatgacagtatccgcaataccggatctggcgcgtggtgtgatggtgaatggcttccgcaatgtcacgcgcggctacggcgccatgataacgaaatccccggcgtgggttgccagcaaagctgaacagaaaaaaatggctgtgggactggaaaccatactgcacacccgcgcgcgtacgatgggcgatctggtggacagttccgcacgcactacggcggttgaagcgggtatggaacgtgtaaccgatgtgttcggtaagctcacgctgatgggccatttcgacgatatgaacaaatcggttaacgggatgatcacctctgacggcattctttccggtacatttgctggccgccgcctggcgaagctcggcattaacgacaatatggccgcgcgtatccgcagcgaattccagaagcacggcgaggttatcgacggctggcatatcggtaattttgaaaaatgggacgatcagcatgtcgcgggcgtgtttcagtctgctgtgctgaaagacgttaacaataccgttatcacccccggtatcggtgatacaccactgtgggccagtacgccacttggcaaaacagtattccagttcaaatcgtttgctacggcgtcttataaccgcgccacgctgggcgggttacaggaaggcacggcgcagttctattacggtactgcgtttcagatcggcctaggtgcgctgacgtatgccctcaaagaagcggccaaaggaaaagaagtggactggtcgcctgaaaaactggtgatcgagggtgttgaccgctccggtattcttggcccgctgatggaatacaataacatggcggaaaaggcttccggcggtatggttggtctgggggcattgcttggaacaggcacacagtcgcgttacgccagtcgtggatttgtgggatctctgtttggtccctcgttcgggctggcggataccattactgatgtgaccgctggtgtgctgaatggtgatgccggtgaccgagtgctgcacagtgcgcgtacgttactccccggcaataatctgttctggatcgcaccgctgattaaccaagtggatcctggaatgcgttaa

SEQ ID NO: 78494 - DNA, 2703 bp, Citrobacter koseri
atgcctgtagttcctacaacatccggtcgccaggtgcaaagccgaggtgtgcaaactggtggatttcagactttcgacgttcctcagactggtcaggtgctggcgaatgtcgcagatcagtatgcggcggcatatggtgaagccaagcagaaagcgaatgtagcattgtcccaggatgccgtccttcagcttaatcagcgcagcaatgaacgtctttataaccctcaaactggtttttatgctcaacagggcaaaaatgcgattggtaaggggcaagagtacatatctggatttgatcaggatgtggaagaaattgctggctcgctgcctgacgaagcggcaaggaaaatgtttttacagcaggctcaagtacaaaaattgcagttcagcactggtgtttccaggcatgagattgggcagaccaatgcgtatgaagatgggcaatatcaggcaacgagaaagctttggatacagaacgaagctgatgcgtggaatgatcctcaggctgctattttagcaaaaaactccaggatggtggcgactgcaagatttggtgcggccagaggatggtcgcaagaaagaatccttgaagaaattgaaagtgatgatcgcagtgctactgagatgagagctaagaattatgccacagcaaacccagaggggtggttaagcggtagcttccagaataataactctggcggtatggacatgcgcgctattggcatagtcgagtctggaggtagccattttaattctgatggcagcatcatgacctcgccagctggcgcccagggtaaataccagttgatgcccgacacgggcaaggaattggccgctaaacgcggagtcgagtataacccggcggatgaagagcaaaacgcgctgctggcaagcgattacgctaaccagctttacggtaaatacggctccgaaacgctggcaggagccgcttacaactggggaatgggtaatgtcgataagctgatctctaaattaggtgatccacggaagggtgaaatttcggaggaagagtttgttagcaacctgccatctgaaacccagggatggctttacaggtacagaaaaaacaaaaccggcatggatccattatctatttaccagatagataatctggctaacagtcagatcgaaaagcaaagaaaattgatgttagaaaaggttgagccagtgattaataacactatggctcaattgaataacggtgaagttccagattacattccagaccagacaaccatagcgcgggcctatggcaaagacgcagacaaaataatcaatcaactggatatagctattgataatgccagaatattccaggctatccagtacatgacaccgttgcagcagcaggaagaaatgcagaaagttaagccacaggctaatgacccagactatgcattaaaacttgatgcctacggtaaattatcttcattactgcaaaaatccaatgaaaccattcaggcgcaacgtgatacacgtagatttaatgaagctttatctattggtgaaaaattagatcccagcgataaatcaatgcagaaggccgccgattacacagaaatagcgcagaatttccgtatcaacgacactgcgacgcatgacggcattgtgcagcaggtggcgcagacgggaattattccatcgcaggtgacaacgcaactttctgcaatttcccgtgcaagtagtcctgatgtagtgcggcagggtgctgaactgtttaaccgtctatatgacacagatcctgcttctgtgggggatttaccaaaagacatgcagggtttttatctgacagtcaagcaacttaccgattccgggatggcccctaatgccgccgtagaacaggctcagaatcttacgtacaaccagactgatgcgcttaaatctcagctagcatccacgcagagcaccaaagagtataaaaaggatcgcagcaaagcaatggactctgctgttagtggtatgactcagtggtttagatgggatccagaagctggtgaccagactccagaagctgccagattccgtaatgattatcaggcgctgtatgacattaactatcgcaccacaggcggcaatgctgatgctgcgaaaaaaatgaccaaccagcaaatctcccgcacatggagcattagtgaagtgaacggcgacgctaaattcatgaagtacgcaccggaggcgctttataactacgggccgtcgggctggcaggcggcgcagtggaaagccgaaaaagagcaactgatgtatggcgaccgccaggagacgataaccaccagcccgacgcagcttgggatcacatccggtaatgcgccacttgttgagacaaaaacgcctgaaagccgtatcggtggtgatctggagattacgcctgatgtactgactgcgcgtcagggggattacgccattatggtgcgaatgaaagataaggatggtatcgagtcggtgcagccgttctacgacaaacacgggcgcccggtgcgctggaaaccgtcgcttgaggactgggagccttataagaaaatgcagcaggagcgtgagcagcgcgcgcaggatgaacttacgcgggggcaggatattcgcggatttaaagacaaacatcgcgcgctggatgagcagtacaaacgcctgcataacgagcgcatggacagggttaaaaattacttttcgtggagcgctgaataa

SEQ ID NO: 78495 - DNA, 567 bp, Citrobacter koseri
atgtgcggaccagtagcatttgttgctgcatcaatagcgatgtctgctgtgcaggcgtacaaccaacgccagcaaggaaaatacgcaaaagctgttgctgaacagaacgctgatattgcggaggggcaggcgcaggatgcaatcaaccgggggaatatcgaggcagaccagaggcgccgggagatgcggcagcgtgccggtagtgccgcggcaactatgggcgctactggtgctgagctgagcagtggaaccgcgctggatatttttggcgacaacgctcagttcggtactctggatgcgctaaccacagtaaacaacgctcaacgtgaggcatacggctatcaggttcagggaatgaatgccattgcgcagggtaatgcagcacagagccaggcaagagcagcagttacacagacactgctgactgccccgctaaaagcctatggcgcttatcagatgggcggcggtggtagtatcaacccgttcagcaagtcaggaaccacgccgatgttatcgaatagcagtttccttaattcagatgcacgattcaatattgggggttactga

SEQ ID NO: 78496 - DNA, 465 bp, Citrobacter koseri
atgatcgacgtgcaattacttccggccacagaagaacatctgcaaatgattctgcccagcgtacgccaggcggatatcgatgaactgtatgctgtatctatgatgacaaccgaggcggcgctgcgtattggtctgcgcactgcaacaatggcctggtctggatttgctaacggggaactggtcaccatgttcggcgtatctcctgcttcaatgatcggcggcaacggcattccctggcttgtcagtacgcaccttgtcgagaagtatcagaaaacattccttcgccgtagccgtcatgcattgcaggacatgctggccgtatacccgcaccttgaaaactacgtcgatgagcgaaaccacgttgcaaaagcgtggctgcactggctcggcttccagcttgaagatgcggcgccatatggcgcgcttggccttaacttccaccgattccacatggagagaaaataa

SEQ ID NO: 78497 - DNA, 2472 bp, Citrobacter koseri
atggctatcagttggatacagcccagctttgccggtggcgaaattggcccgtcgctgtacgggcgtatcgacatggcgaaataccaggtggcattgcgcaagtgcgataactttatcgtgcgtcagtatggcggtgtggagaatcgcccgggtacgcgttttgtcggagccgcaaaatacgcaaacaggaagtgccgtctgatcccgttccagttctcgacggttcagacctatgcgctggagttcggtcaccaatacatgcgcgttatcaaagatggtgcgctggtgctaaacagcagcaatgttatctatgagatctctactccttatgcagaagccgatctctttcgcatcaaattcacacagagcgctgatgttctgacgttggtgcatccaaactacccgccaaaggaactacgccgctacgcgcacgacgactggcaacttgttgacgtcaccactaaaaacggtcctttcgaagatatcaacgtggacgagaatgtcaccgtatacgccagcgcaagcaccggaaccattacgcttaccgccagttcgtctatttttggcgctgagcaggtaggcaaattgttctatcttgagcaacctgccgttgattcaattccggtatgggagaccagcaaagatacagcgattaacgatgtgcgccgggctgacagtaactactatcgcgccgttaccgcagggaaaacaggtacgcttcgtccgtcacatactgagggtacttcatgggatggctggggcggcactggcgatggtgacaccgggatcgaatgggagtatctgcatagcggatttggtattgcccgtatcactgccgtcagtggtacaaccgccacggcaaccgttatctcattcattccatcacaggtagttggttccgctaatgccagttacaaatgggcgaaatacgcatggaacagcgttaacggttatcccggcacggtcgtttattatcagcagcgcctgtattttgccgcctcttctgcattcccccagaccatctgggcaagccgcaccggtgactataaagacttcgggaagaacaacccgacgcaggatgatgaccggatcatctacacatacgccggacgccaggttaatgagatccgccatctgatcgatgttggttcgctggttgcgctgacttccggcggtgaatacgtcattaccggagaccagaataaggtactcaccccttcggcgtttgcgttcagttcgcaggggtctaacggctccagcaacatacctccgatcgctgtggcaaatatcgcattattcgtccaggagaagggaagcgttgtccgtgaccttgcctattcatttgacgttgacggtttccaggggaatgaccttaccattcttgcaaaccatcttttccagaagcgcagtattgttgactggtgcttctctattgttccgtattccagtgctttctgcgttcgtgacgacggcaagttgctggtgatgacgtatctgcgtgatcagcaggtttttgcctgggcaccgcagtccagcgccggtaaatatgaaagcacatgcagcatcagtgaaggtagtgaagatgccgtgtatttcatcgttaacagaactatcaatgggcaggttgtcaggtacatcgagcgcctttcaagtcgcatgtttaccagcgatgaagatgcattctttgtcgattcaggcctgagctatgacgggagaaacacatctgatcgaacaatgaccatcaccggcggatctggtgactgggactaccgtgttgactacaccattaacgccagcggcggtgcatacttcaacagtggtgatgtcggcgcacaacttcagttcccctataccggaaccgatcccgatactggcgaagcggtggcgaaagaattgcgttgcgacatcctgtctgtaaccagcagtaccgcagttgtggtgcgggcaaaccgggatgtgccagaaattctccgcaactcagcaactactaactggcagatggcgagaaagacattcgccggacttaatcacattgaaggtcagaccgtgaatattctttctgatgccagcgttgagccacagaaagtagtgactgatggggctgtaacactggaatcaccgggcgccgttgtgcatatcggtctgccgatcactgctgagttcgaaacactggacatcaacattaacggtcaggaaacgctgctggataaaaaacaggtgatccctgcggtaaccctggtggtaaacgcaagtcgtggcatctgggcaaccactccgggtggtaagtggtatgagtatccacagcgtgaattcgagttctacgatgatcctgtcgatgatgccaccgggaaagtggaagtaaaactcgacagcaactgggacaaaaacgggcgcgttaaaattcgtcaacttgacccgttgccgctttccgttcttgctgttattcctcgcctgacagtggggggattctga

SEQ ID NO: 78498 - DNA, 606 bp, Citrobacter koseri
atggcttctgttgtcgagatctgcaatcgcgcgctgtcgaatatcggcaacagccgtagcatcaacagtctgacggaagccagcaaagaggcgggggaatgttccctgcatttcgatgcctgtcgtgattctgttctgtcagactttgactggaactttgcgactaaacgcctggcgctggctgacactaataacccacctcctgactgggcgtatgcgtaccagtacccgtctgattgcctgcgcatcactgaaatcatgcttcccggtgtgcgcaatcccactgctgcaatgcgtgttcagtatgaagttggtgcagatgcagacggaaccggaaagttgatttacacagaccaggcgcaggcatggcttaaatatgtaacgcgaattactgacgtgaatatgttcgacgcgatttttatggaagcgctggcgtggcgtctggctgctgcaatcaacatggcgctgactggaaatgctgatctcggcacttttgccctcaacatgtacaaccgagtgatcctgagcgctggctctcatagccagaacgaatcacaggagccgcagccgccggtggatgaatttactgtagcgaggttgtcctga

SEQ ID NO: 78499 - DNA, 324 bp, Citrobacter koseri
atggaactggtcaacctcaaaaccggcaccgacagctaccaggacgagagcggagaaaccaagacccgcgacgaatatccgtggggcctgtgcatcacactgaataacgacacgctgaataagctcaaggcgcagccacatggtgtaggaaccgaagtgatgattactgcaaaggctgtcattcgaggactgtctgcgcgcgaaactgatgatggcgttaaccgtagtgctgatctacagatcaccgacatggcgatcgcacctgcaaccggagagcctgataaatccgctgctgaaaccctttacggtaacgggggtgagtga

SEQ ID NO: 78500 - DNA, 336 bp, Citrobacter koseri
atgtcaggtgagaaaccgaagtatcgcgttctgcgcctctctcatatccacaataatctgtggccggagggttcggaaattgaatacgaaggcgagccaggtagtgcactggaacccatcaacgatgcagcgaaggcggcgaaagcaaaggttacaggtaaagcagcagaagccgtaaccagtgccaaacccatcaacgatgcagccgaagatggcgatctggataagatccgcgaagagtatgaactgctctttaacgagaagccgcaccataacgccaaggccgaaacgcttcgcgataaaatcgcagataagcgcaaagaactgggcgtgtaa

SEQ ID NO: 78501 - DNA, 438 bp, Citrobacter koseri
atgatcctcgacaaactgttgatgttctccgaagcgcaggcagttacggcttccgcagcttctaccgatgtaatcgacctcggcccgattgacggtacccgccgcgatatcggtgtcggctatccgcttgagttctgggcaatggtgaataccgctgctaccgccgctggtgccgcaactgtaaacgtgcagttgcagaccagcccggacaacagcacctggaccactatctatgatagtggcgcgctggctctggccgatctgaccactggtaagcgcgttgcgtctgtgaaagtaccttccggtgttctgcgctatctgcgtgttaactataccgttggtactggcccgctgacggctggtgcattcacttccggtattaatctggatgttgatgcgaatacgccgtatccgattcgctccaaagtaaccggttaa

SEQ ID NO: 78502 - DNA, 987 bp, Citrobacter koseri
atggctgttaaaggcttaactgcgctgacgctggcagactggggtaagcgcatcgaccaaaacgggaaagtcgataaaattatcgagcttctcgcacaaactaacccgatccttcaggacatgccttttgttgagggtaacctgccgaccggtcaccgcaccactattcgttccggtctgccgtcagcgacctggcgtttgctgaattacggcgtacagccaagcaaatcaaccaccgtacaggtgactgatgccgttggcatgctggaaacctatgccgaggttgataaatctctggccgatctgaatggcaacacctctgaattccgcctgtctgaagaccgtgccttcattgaagcgatgaatcagcagatggctcagacactgttctatggtgactcaagcgtaaacccgcagcagtttatggggctgtcatcccgttactccagcctgtcggccggtaacgcgcagaacatcatcgatgctggtggtactggcacagataacacctctatctggcttgttgtgtggggtgaaaacaccgtgcacggcatcttccctaaaggtcagaaggctggcttgcagtttgaagataaagggcaggtaacgctggaagatgcaaatggcggcaagtacgaaggctatcgcactcactacaagtgggataacggtcttgctctgcgtgactggcgctacgttgttcgtatcgcaaacattgatgtaagcgacctttccgatccgtcaactgctgcgaatatcgcgaaactgatggtgaaggcactacaccgtatccctaaccgtggtatgggccgtcccgtattttacatgaaccgcactatcggccaggcgcttgatctgcaatcgctggagaaaacctctctggctatcagcgttaaagagactgaaggcgaatggtggacatccttccgtggtgtaccgatccgtgaaactgatgctcttctggaaacagaagcgcgcgtggtgtaa

SEQ ID NO: 78503 - DNA, 564 bp, Citrobacter koseri
atgtcacaaccaggcgctgaaggcgataagccagcagaagaaacgcctgtcgatgacaaaaagccggaaggcgataaaccggctgaaaagaaagaagaagataagccagaaggcgcgccggagaaatacgagtttcatgctgctgaaggcgtagagctggacagtgaagcgctgaaggacttcgagccggtagcccgcgatctgaacctgactaatgagcaggcgcagaagctggtggacgcatacccgaaaattctggctggtgtgcagcagcgtcaggccgaagcctggcagcaaaccactgaacagtgggcggcagacgtgaaggccgacaaagagattggcggcgacaagctgacatccaacctcagcgccgcgcagcgcgcgcttgaccagttcggcacccctgaactgaaagaatatctgaacaccaccggtctgggtaatcatcctgatctggtgaaaacgttcgtgaaaatcggcaaggctatgtctgaagacggcatggtcaccggtggtaatgatggccagcgtagtgcggccgaagtgctctatggcaaataa

SEQ ID NO: 78504 - DNA, 270 bp, Citrobacter koseri
atggctatcaaacgtatccgcccaatcagtaatgacggcaatgcaaccatagctgaagtagaagatcagggtggtggcgataccgtttcatgggatgacattaccggaaaaccttcgacatttgctccgcccgctgcgactactgacgcggttggtggcgtaaagcaagcggcaactcaggctgattctactgcgactgacgtcgaagggcttgtcactgattttaatgctctgctggcaaaactgaaagccgcaggaattatggtttaa

SEQ ID NO: 78505 - DNA, 297 bp, Citrobacter koseri
atgaccgattatgacgacgacaaactgaaagaagagaacgcgcgtaagcagcgcgatctggcccagcgtgaaatcgacgacatccgtttcgtcatggactgcaagcagggccgccgtgtcgtctggtcagtgctggagaaagggcgtgtattttccgccatcccgccgatggacgcgctggtaatggcattcaacgaagggcagcgcaatctggcgctggagttgcttcagcgcgtcatggagcactgccctgatcagtatctgaagatggccgcagaggccagtgaacaggagtag

SEQ ID NO: 78506 - DNA, 1680 bp, Citrobacter koseri
atggcggaaacaacgaaagagcggttgaacaaacagttcgcacagcttgaaagcgagcgccagtcgttcgagccacactggcgcgaactgagcgatttcatcaatccgcgtggttcccgcttcctgacttccgatgtcaaccgtaacgaccgccgcaacacgcggatcatcgactcaaccggcactatggccgcccgaactcttgccagcggtatgatgtccggcattaccagtcctgcacgtccgtggtttcgcctggcaactccagatcctgacatgatggactatggcccggttaagctctggcttgagacagtacagaaccgcatgaacgatatgttcaacaagtcaaatctgtaccagtcgctgcctcagctttacggcagtcttgggacgtacagcaccagcgcgatggctgtactggatgatgacgaagatattatccgcacgatgcctttcccgatcggcagttattacctggctaactccccgcgtggaagcgttgatacctgcttccgtaaattctcaatgaccgttcgccagcttgtgcaggaatttggcctgagcaacgtcagtgaatcagtgaagggcatgtgggaaagcggcacgtatgagaaatgggtagatgtgatgcactcagtgtatccaaacatcgaccgcgatacggcaaagctggacagcaagaacaagcctttcaaatccgtttattacgaagttggtggcgataacgacaagctgttgcgtgaatccggtttcgatgaattcccgatcatggcgccgcgctgggaagttaacggcgaagatgtttacggttcttcctgtcccggtatgctggcgcttggtcccgttaaagccctgcaacttctccagaagcgcaagtctcagcttatcgacaaagccactaacccgccgatggttggcccaacgtcgctcaagaatcagcgtgtttctctgctgcctggcgacatcacctacatcgaccagatctccggtcaggacggtttcaagcctgcttatcttgttaacccaagcactggtgacctgatttctgacattcaggatacgcggcagaccatcaacagcgcctacttcgtcgatctgttcatgatgttgcagaacatcaacacccgctcaatgccggttgaagcggtgatcgagatgaaagaggaaaagcttctgatgctcggtccggtactggaacgcctgaacgacgaatgcctgaacccgcttattgaccgggcgttctcgatgatggttcgcaagaacatgctgccacctccaccggatgttttgcagggcgagccgctgaaggtggaatacatctccgtcatggcacaggcgcagaagtctatcggtctctccagcctggcatccactgtcaacttcatcggtcaacttgctcaggcaaaacctgaagcactcgacaagctcaacgttgaccaggcgatcgactcatttgctgatatgtcaggcgtgtcgcagacagtcattgttccgcaggagcaggttgaacagaccagacaggatcgcgcacagcagcaacagcaacaacagatgatggctatggggatggcggcagcgcagggagccaaaactctcagcgaggcgcagatgaaagatccaagcgctctctctgcaatggctcaggcagcaggtggacagggcgggcaacagcaatga

SEQ ID NO: 78507 - DNA, 207 bp, Citrobacter koseri
atgtgcatgggtagctctccatcagtgccagcggcaccggaagtacaggctgcaccgcaggaacaggatgctgctgtcgttgatgctcgcgacgaggaaacccgccgccgccgtgctgctgccgggcgtagttcaacgttgctgactggcgcgcagggcgacacctcgacagccaataccagcggcaaaactctgctcggtcagtaa

SEQ ID NO: 78508 - DNA, 372 bp, Citrobacter koseri
atgacgttgtgttgtaaacccgtgactgccaaggaaggcaactcccattgctaccacttcgcccggttcgccgggcatttttttaaggtgaaatctatgaaatttggagaagctcttgaggcagttaaatccggcgcaaagatttatcgcgaaggatggaacggtaaaggtcagtttgtaattaaggcggggggatataccgttagcgaacctcgcccaggcagtgattatgcaaaggctggcattactggtgagttcactatcgcgccacatctcgatctgaaaaacgcccaagggattatgcagcctggctgggttccatctcagggtgatttgttcgccgatgattggctggcaataccaatagattga

SEQ ID NO: 78509 - DNA, 204 bp, Citrobacter koseri
atgagtgactggataagtgttgaagaacgcactccagagaatcaggatggcaagtggtcgaaagacgttatagcgcttagtgattctggagatgtgttcaagttggctttcatgggcggctactggcaaaggacgcaagcatttatcgattcaggggctaccaaggtaactcactggatgccactgatttaccccgatgattaa

SEQ ID NO: 78510 - DNA, 1479 bp, Citrobacter koseri
atgacagccgcagccatgtcgccggaagagcagctcgtcgaggatatcgcctcgttcacgtatgaccctctgggctatgcgctttatgcgttcccgtggggcgaggaaggaacagagcttgcacacgccactgggccgagaaattggcaggctgacgcattccgcgagatacgcgatcacctccagaaccccgcgacgcgtcaccagccgctgatgctggcccgcgcatccggacacggtatcggcaaatccgctttcatttcgatgctcatcaactggggcatgtccacctgcgaggactgcaaggtggtggtgaccgccaacaccgacaaccagctgcgcaccaagacctggccggaaatcatcaaatggtcgaacctggctatcaccaaagactggtttacctgcaccgccacagcgatgtacagcaacgatcccggtcacgataaacgctggcgcgctgatgctatcccgtggtctgagcacaacactgaagcattcgccgggctgcacaacgagcgtaagcgcatcatcgtggtattcgacgaagcctccaacattgccgatctggtctgggaagtagctgagggtgcgctgacggacgaagacacagaaatcatctgggtggcgttcggtaacccgacacgtaacaccgggcgtttccgcgaatgtttccgcaaataccgccaccgctggaagtgcgcacagattgatagccgcaccgtggagggaaccaacaaagatcaacttaacaaatgggttgaggactacggcgaagatagcgacttcgtgaaggtgcgtgtgcgcgggatattccctgatgcgtctgaaaaccagtttattccttctggtctcacgcaaccggctgtgggccgtgtgattactcctgcgcaggtccagtacgctgctactgtcattggcgttgacccgtcgcaccagggtaaagacccggcggttatctacctgcggcaggggctgcactgtaaaaaactcggtgagtacccgcgcacaactgatgatgtctggtttgccaaggtgatcgccgacttcgaagaccagtatcatgccgacgccgtattcatcgattacggatacggaacagggctgaagtcagtcggtgataactgggggcgatcgtggacactgatacagttcggcggcggaacggcagatcctgagatggcaaacaaacgtggtgagatgtacaagtcagcccgtgacgctctgaagctgggcgcgcaactggatagccaggatttagccgatgaactgagcgctcctgagtacaaagtgaggctgaaagacagcaggaagattttgcaggacaaggacgaagttaaagagttgcttgggcggtcgccgaataacgcagacgcctatgtgcttacctacgcgttcccggtggttaagaaacagcacataccaggacaacagaatcaacatggcaaggccatcacagactacgatccgtttgcataa

SEQ ID NO: 78511 - DNA, 630 bp, Citrobacter koseri
atggcggcggaaccaaagccacataagcgcaaatcaacgcagtataagcccctgacagcgatgcaggaggcttactgccagtcctacatcaagacgccagagaaccagactcaggcggcgattgatgcgggattttcgcctaatacggcagccgtcaaagccagcgtgatgatgcgcgacgaaagaatccagaaacgaatcgccgagctgatggaagagcgcaacaagcgcatgcgcgtcagcgctgattacgtcctaatgcggctggtggagatcgaccagatggacgtgctggatatcctgaacgacgacggcgggatgaagccgatcgctgagtggcctaaggtatggcgcacctctctcagcgcgatggatatcgctactatcaagacgactcaggcctctctgcaaaaagagaatggcgaggcggatctgtctgttgaggatgtcgagcatatcctgaagaaggtgaaatggccggacaaggtgaagaacctcgagctgattggtaagcacgtcgacgtcaacgcgttcaaagagcgcctggaagtttccggcactgtcaccatcgctgaccgcatggcagccgcgcgacgccgcgtcaaagagcaggctggtggtgaagaatga

SEQ ID NO: 78512 - DNA, 339 bp, Citrobacter koseri
atgcctaaatccccagcagagcgtaaagcagcgcagcgtgcacgccaggcagaagcaggtgaacgcaagctggagttggtgcttgatgagcaggaaatggaaatgctggagcgaaactgcgccgcccggcgccctggtcgtgatccgtatgagatgtcagagtacatcgcgatgctgatccgccaggatgatgcgagggtgcgtggtcgtatcaaatctatcagcgcgaaccgctgcggtaaatgcggcgacgcgctgccggttgagtcgtgtccgtgcgacggtgattcgcaatgctgggttacgcgtggctggcatgagacaaaattatcggtgtga

SEQ ID NO: 78513 - DNA, 141 bp, Citrobacter koseri
atgtctaagctaactttcgtcattgagtttgaggatggtaaagaacctcctgttcatgctcacatggaggcgttcggcggcaaggtcgttgcggtggcgttccgtgacgcactggaagaaccggataaggatgaagactga

SEQ ID NO: 78514 - DNA, 282 bp, Citrobacter koseri
atgcctaaattcacagacgtacacgacctgttaactgcctatcaaaaacaggcgcggaaagtacccgcgaagggcgtttatgcatcaaaacagcgccgtgatgaagtgcaggcagcgcacgcaagaaaggtaattcgtcagcgtaaacgctctgttgggaagtccaataaattaggagggcgtcgccgggctgaggtgttagcggcgctgatttgcgaaatgaatttttgggcgctggtgtgtcgttcaaaccgtaagaattccatccaaggcgagggttaa

SEQ ID NO: 78515 - DNA, 738 bp, Citrobacter koseri
atgagcaacatcgacaaacaggcgctgcgggaagcggcggaaaaataccgcacaacatatgccgctcatctcaaaaacccaagaaattatgatgagctggatgcatgggataaggctaccagtgagtttatggcgttagttaataacgacgagctcaacatcatcgcgtcattgatagacgaaattgacatggaaacaggatatcgggagggggcgtttgttgcatgtaatcgctggcataccaaatttagagagacagaggcaaagctggaagccgcagagaacaacctcattgatagcgaatgtcatgtcgctgaactggaggaagcgctgcgtgataaacaggcgttacttgaggcgctggataattccctctgcgagcttctaccaggaactcagtacatggatccgccagacggtgggaacgtaactcccattgagcaggtgcggcgcatggttgctggctatcgtgagcaaattgaagccgcagagaagcgcatagcagaactgcgagactggaatgcaggacttgcgcaagagtcattcgaacgacagcagcgtattgctgagttttctggtcagaaacggctgattgggtggcgagcatcagattacaccgatgagacatcagaccctgagttagctaaaaactgggctgctgctattggcgtactgcctatttttgaaggtgacgtgaataccaaacttagcgccgctggcatcggtaagggggaataa

SEQ ID NO: 78516 - DNA, 561 bp, Citrobacter koseri
atggacagcaatatcagtgagttagtgcagttagggcatgagcgggccgctgaactgaaaggctcattcgaagcgatcaacgcatgcagcgtagcgcaactgattagcgatctggctactcagcttgatgtgcagtttgcccgcagcaatgcgctggctgcaaagctgagcatgattaacggcctcatggatgccgctgaacaggccaacaaacttgcgcaggaagcaacggaaaagctggtacaggagcgtgacgcgctggctgcggagaatgcggggctgagcaattttatctcaaacagttgctatgtgcaggcgggtgaagattcttcatggcatcaggcagttgaccacgcaccggaaaccccagcgacctccgctttccgggctgaagtgcgggcgcatgacatcaacgctttcatccagcatcacagcgcagaactggatgcgcatattaaaaacggcggtgaacagttcgacgaaaaatcagtacgcatcagaaacatcatcgtctcagcccgcttgttcagggagcagatccgcaaaggagtgcagtcatga

SEQ ID NO: 78517 - DNA, 465 bp, Citrobacter koseri
atgacggcagttttagggattgacccgggatgcagtggcggactggttctcatcactgagcagggctgctatatcgaccatctggcaatgccaaccatcaaggtcggcaacaagtccagagtgaacggcgcagcggttgctgcgtgggttaggcagtacggaatcacgcatgcgtacctcgagcaggtaggggcaatgccaggtcagggaacggccagcatgttcaccttcggacatgcagctggcgtagcggaggggatccttcaggggctcaacattccgtacacactggtaacaccgcaggcctggaagaagtcagccgggcttataggcagcgacaaggacgcggcacgcagcagggcgattcagctttacccaggcctcagggcgctggatgcaaaagcgaaaggccaggccatcgcagatgcgctgctaatcgccagacatgggatcggcatcaaataa

SEQ ID NO: 78518 - DNA, 684 bp, Citrobacter koseri
atggccggtgactggattaagatgcgtgcagatttgcacacgcatccgaaagttgtccgcatggcgtccgcattgaaagcggacagattgcggatagttggcggactacattccgcatggtgtcttttcgatgtccactctgttgacggttttcttgacggatacagtgcggaaactctcgacgacctgatcggcttcccgggattttcacgggcaatgatggccgtaggatggctcgaagaaaatggagaaagcctagtaatgccgcgctttgaagcccataacggacagtctgcaaagcgtcgcgcacaggacgcagacaggaagagaaaagaccgcaaagcgtccgcatcagaagcggacaaaaagcggaccagagaagagaagagaagagaagatattaaaccccatataaaccccactcataacgcgcgcgcggaaaattctgtggataactttactggtggcgacgagacatttttgatgtttgatgaatggttgccggatcctgactttgtagagcaatcgaaggaatggggtactcctgttaatggcgggctcaggaaatcagaactgatagcgtttattgatttctggaaatgtgaaaacaagccgctcaatcagtttcagtggcagcaaaaacttgcaaggcacgtcattaacgtcaggggtgacagcacttag

SEQ ID NO: 78519 - DNA, 801 bp, Citrobacter koseri
atgtcacacctgacgacctgcgaggattcacgcagtgccacttctttgccggaattggcgtctggtcccattccctgcgcctcgccggatggcctgacgataaaccagtctggaccggctcctgcccgtgccagcctttcagcgcggcaggcaaaggagatgggtttgctgacgagcggcacctttggccccacttcttccacctcatcagcgagcgcagacctaagcatgtctttggcgaacaggttgcagcaggtaacgcaaacgcatggttcgaccttgtacaagctgacctggaaggaatgggctacgctttcgggcttgtgccgtttacgtcagcgggcatcggtgctccgcacatcagagagcgggcctactgggtggccctcgccagtagcgaacgattcaaccggttcgactcattgctacagcgggaagaactcagacggaacaccgaaggtttgcctgaaactaccgggctcggttctgcttgcggggtgggtaacgccaacaactcgcgactggaaagacacgtcgggaatgatcgcgcaacgggatggaaaggatcgactggatcagttaccgaggcaggcttacacagcaggccccttgaggttaacggtttttggcgagatgcggactggctcttatgtcgagatgggaaatggcgtccagttgaacccggcacattcccgctggttgatggggctgccgcacgcctgggacgagtcgagcccggggtggcaagagtggcaagcggcaaccgcgtcggcagactcaaaggctatggaaacgccataa

SEQ ID NO: 78520 - DNA, 231 bp, Citrobacter koseri
atgagcgagaacacgcaattcgatttcaaaaagcactggcttgcacttaccccggatgagcgtgaagccttcgcagaagaggccggaacgacgagcaattacatccagactcatcttactggaaagcgtaaaatgccaggtaagacactgatgaatgggctgtttaaagcggcaaaatcccgccagtgggtgcgtacaaaaccggaactggcatacttcttctactcctga

SEQ ID NO: 78521 - DNA, 585 bp, Citrobacter koseri
atgaaaagcatccaggacgtccgcaggcagaatctcagggatctgatagaccgtgatttcaacggcgtacagacacgccttgctgaaagaatggaaacgcaggcaaatctggtgaaccgctgggtgcttggtaagaaagtcatcggcgaccaggtcgcgaggaaaattgaaacggcagcaaataagccgcgcaactggctggacatcgaccgctacctgtctatggaaaatcatcagcagacagagccgggtgatatcggtcagattgcagctcacaacctgcaacgctggatgagtgaaagcgagagcctgacatcacaagggaagctggagcgagccagcggaatttcccagaacactgtcagtagaatgttgaacaacgaagtcagtgtgtcaatatcaactctcgaatctgtcgcatcagcgttcggtcgtcatggttatgaattgctcattcatcctcacgatccagaggctatcagatatgaccgaccaagttacggattgttacctgaagcagaaaaaaagaagatagaaagctacatagaattcgttatcagtcagaataaaaaaaccgcagattaa

SEQ ID NO: 78522 - DNA, 150 bp, Citrobacter koseri
atgcagtggaaaatcattaacggttggtactgcgttacagcttgcgggctgatgagctggaagttccgcacgctgggagaagcaatgaactgggtattcgtcagcaagctggcggtaaaaacggaaatggatatgggggtgagcaagtga

SEQ ID NO: 78523 - DNA, 978 bp, Citrobacter koseri
gtgagcgaatcaaaagaactggtgctggtacaacttccggcacctgcagatctggaagcggcattcatcagtgatgagtacatctcaaacctgattgctgatattcgccagaaagcattatcggtagttggtgacgtcaacacagttaagggacgcggcgtttatatcagcatggcatctaccgttcgtcgcactaaaacagccatcgacgaagccggaaaaaatctggttgcagaaatgaaaaagcgccctgctcttgtcgatgctagccgcaaaaaagtacgcgatgcgctggatgaactggcggtagaaatacgccgaccggctaccgaatgggaagctgaacaggagcgcatcaaagctgaagaagctgctcgagttaaagccgaaaacgaccgtaagcagttcgaatcagatcacgaaattgctctactgatgaatgccgcattcgaccgagaagcgaaggcgaaagcagaagaagcagaacgccagcgcattgctcatgaagaagagttaaagcgtcaggcagcagaacaggccaagcgcgaagccgaagagaaaatcgaacgtgaacgcgctgaatctgcccgtcgcgaggctgaattaaagctaaaggcagagcaagcagagcgtgaccgtattgcagcagagcaaaaagctgaatcagagaagaaggaagccgcagatcgtgccgagcgcgaaaaacaggaagctatcgcagctgagcaacgcaaggcgcaggaagaagccgatcgcatcaagcgtgaagctgaagcgaaagaagcagcccgtctggcggaagagaagcgcatcgctgatgaagcggcagcacgcgctgcagatgtagagcaccgtcgggccattaatgcagccgcggtccaagcgctcattgacaagggcattcctgaagactgggcgaaggcatgtgttgtcgccatcgctcgcgggaaagtcccagcaacaaccatcaactactga

SEQ ID NO: 78524 - DNA, 303 bp, Citrobacter koseri
atgcacattcagcaattcaataacctgaaaaaaatagttgctcagtttgacagcgactaccagatgtcatctgaactgtatgaccgccacgttgagctgatcgaagcagtcagcagcgccgaaatggatgagacgttcgatcgagcactgctgcgcgccggtgttcgtcgtgaaattctggaagcggcaaaagaaagctgcgagtacgaagaactgatgtcgagcttcaagcgagagcttaccggaatcatcgccaggatggatatggcggacaaaatcgacagcgcgaggacagcggcatga

SEQ ID NO: 78525 - DNA, 228 bp, Citrobacter koseri
atgaaaaaaaacacaggtggacaagcgttcccacgccagcagtgggagtacgacggtcacaacaccgtactgcagtatcaggaagacggaatgacgctgcgcgactactttgcggctaaggctatgcagagcgtcctggtcaatgggtacttcgacaagtttgatagcgttgcttcagacgcttatcaacttgccgacgcaatgctccgcgcccgggaggcatcatga

SEQ ID NO: 78526 - DNA, 822 bp, Citrobacter koseri
atgaaaccaggcatctatttcgacatcagcaacgaagactatcacgccggtgacggcgtgagtaagtcgcaactggatatggttgcaaagaaccctgcacttctgaaatgggttaaggccgctcctgaagatgaagagaagaaatccgcactggatatgggcactgcgttgcactgcctgcttctggagccggaagaattcgacaagcgtttcattgtggcgccgcaattcaaccgccgtaccaaccagggtaaagccgacgaagaagcgttcctgcgcgatgttgccggtatgggtatgacggtgatggacgccgaacagggccggaaactgaaactgatgcgtgacagcgcaatggctcacccggcggcgcgctggatgctggatgcaccaggccactgtgaagcatcgatgtactggaacgacgatgagactggcgagttgtgccgcatccgccctgataaatggttgcatgagcacaacgtgatcgtcgacgtgaaaaaggttgcggacatggatcgctttgctcgtcacatcgaggatttccgctatcacgtccaggacgccatgtaccgggaaggtgcgcagaaagtaactggtgagccacacggattcttcttcctggcagtaagcgaaacgatcgactgcggtcgatacccggtacgcgttttcgaacttgacgcaccagatgttgatgccggaatggcgctgttccgccgggatctaaatacctatcaccagtgtcgccttacagatgaatggggcggcgtggaaattattaaacgccctgagtgggcacgtaaacaggatatgtacgtatga

SEQ ID NO: 78527 - DNA, 900 bp, Citrobacter koseri
atgagcaacgatatcgcaatcacctctcagccaggcgctaccgtcggcactgcggctgcaatcttcagccctgaaggcatgaatcaactggtacgctttgcagagttgatggcgcagagcaaggcaaccgtaccccagcacctggctggcaaacctgctgactgcctggcggtaaccatgcaggcggcgcagtggggaatgaacccgttcgcagtcgcgcagaaaactcacgtggttaacggcacgctgggctacgaagctcaactggttaacgctgtcgtgtcctcatccaacctgctgacctcccgcctgaattaccgctgggatggtgactggtcaaaagtgaatggaaagacagataaatcaccgtcgctgactgtaacagtttcggcagtcatcaagggtgaagctgagccgcgcgagttaaccatcagcatggcgcaggcaggagtgcgtaactcaccgctgtgggaacaggatccgcgtcagcaactggcttatctgtgtgttaagcgctgggcccgtttgcatgccccagatgtccttcttggcgtgtatacacctgacgaactacaggagaccgcgccgcgcgtagagcgtgacattacgccaccagcggcaacggctcaaggcatgaacagtctgatcaactcgaagccagagcaaaaagaccatcccaagaatgaaggtcgagatcctgacgaaatgctgaagtcattcaccgaagctgccagcaatgcggaaagcgtcgagaaactggacttgatttttaatggcggtacatggcctgacagtaagaaacgccccggcgcgaaagatgcattgtcaggtaaatggctggagatggctaccgatgtttacaccatccgtcgcgacgaactgaacgaagtaccgatgtaa

SEQ ID NO: 78528 - DNA, 249 bp, Citrobacter koseri
atgaaaggtgcattaggcaagaaggaactcctggcggtggtgccactgtcatggagcacgattgaccgcctggaagccgcaggcgaattcccaaaacgctggtatatcactgaccgccgctgcgtgtggacacaagaggaagtcgagcagtggcttgataaacgcaaagcggaaagcccggatgtttacaccggaaaaaagccgccggttgatcagcgtgtttatcgtcctgtgagtaacgcagcatga

SEQ ID NO: 78529 - DNA, 300 bp, Citrobacter koseri
atgaaaaagttaagccgccttgaaaggtatcacctgaataaagtttcccagcgtaacccaggaaaggttgttgctgttactccagaagcgatggaaatagaaaatcgggcaattgagcgtgagcgccgtgggaattaccgcatcgccgccaggctgtggcttgagtgcatggatgcagcaaggggtgaagttgagagagcgcgcatcgctgtacgccgtgatcagtgcattacgaaaagcaacggtctgcgttgcggtgattacagcggaatactcagccgtggggtgatctatgactaa

SEQ ID NO: 78530 - DNA, 660 bp, Citrobacter koseri
atgactggtaaatactctcttatttacgctgatccgccctggtcttacggcaacaccatcagcaacggggccgcagaaaaccactacggtactatgaaacttatcgacatcaagagactgccagtgtgggaacttgccgccgaaaacgcggtgctggcgatgtggtacaccggaacacataaccaggaggctatcgaactggctgaggcctggggttttaccgttcgcacgatgaaaggctttacctgggtgaagctgaatcagaatgccgagatgcgcatcaacaaggcgctggcagagggtgaagtcaccgacttttacgacttcctcgatcttctgaatgctgagacacgcatgaatggcggcaaccacaccagggcgaacacagaggatttgcttattgccacctgcggaagcgggctggagcgtctgaacgcaggcattaaacaggtggtatacagcccgctcggtgcccacagtgaaaagccgtgggaagtcagacaccgcctggagttgctttacggatatgtcccgcgcatcgagttgttcagtcgctgcggcgctcccggatgggaccattggggaaatcagtgctccactgccgcggttgaattgctgcccggctgcgccatcgatgttgtgaaaacggaggcagcatga

SEQ ID NO: 78531 - DNA, 180 bp, Citrobacter koseri
atgaccattttcaacgaggcggagttaatccgccaactggaagagcagcgtgctgtgattgtgcagaaaagcgcacaggttaactggctgcaaactgaaaacagtgtcttgcaaaagaaatgcgaagaactgcaaatgacagtggagctacaacgagaatttataaaatcccgaaattaa

SEQ ID NO: 78532 - DNA, 1254 bp, Citrobacter koseri
gtgcttaccgataccaaactgaaaaacctcaagccgcaggagaaactgtataaggtttccgaccgcgacgggctgtatgtcgccgtgctaacatcaggctctgtctcgttccgctacgactatcgcattaacggccgccgggaaactctggtcatcggacaatacggtcgtgacggtatcagcctggcagaagcacgcgaagaactcattgcggctaaaaagctgctgaaggcaggacagtcgccagctgcggcgaagcgtgacggtatcaggcagatcgctggtgcagaaacattcacggtatataccgacgcctacatgaaacacgtcatcctggcagacagcacccgcgccatgaagcaggcggtgatcgggagggacatcctcccggtgctgggcaacaaaatgatgactgagataaccaccagaatggtgcgcgacctgtgcgatcgtatcgtcgagcgtggaggccggtcgacggcggtacaggtcagggagataatcagcagcgtctaccggtacgccaacgaccgcggtcacggcctgtttaatccggcggccgacatcaagccatcatcaatcgccatgtttaaaccgcgcgagcgcacgctaatgccggaagagatcggcatattcttccgcgcgctggaagaagtgggcgctatgggaaccatgaaaatggcattaaagttggtgttgctgacactcgttcgcaaaaatgagttcatctccgccacctgggcagagattgatttcaaaaagtggacatggacgatccccgctgaccggatgaaggccgggcgcgcgcatgttatttaccttccgaagcaggcgcaggatctgcttgtgggtctgcaaatgtgtgctggtggcagcgaataccttgtgcctggccgctacaacttccgcaagcctttatcgaacgcagcgctcaactcgctgatagacagaacggtggaggccattaacaaagacggtgagaaaattcaggacttcactgtgcacgatcttcgccgcacggccagcacgctgctgcacgaagcagattatccatctgactggatagagaaggcgcaggcgcatgaacagaagggcgtgcgcgcggtctacaacaaagcggaatatgcccggcagcgcgagtacatgttgcaacagtgggccgatatggttgatgcctggattaacggggagcacaccgatcttgtaccgttctccccgtctaagtttgagaagtggatgagtgatggtgattaa

SEQ ID NO: 78533 - DNA, 258 bp, Citrobacter koseri
gtggaagggcaatacacgagtaaatacccccgacagcgagaccacaagggtcatgatgagtattgtgaagaagatttccatgcgttccctgtttgcgatatttcttatgttttaaaacgtgaggcgtcgtgcctcaattctatcttcctcagagtaacgcaaaagacaacgggatgtgtcctgaaaataaaaacgggcggcaaaagccacccgtttttagaggacgccaggaatcagatagcccagccgcccgcatag

SEQ ID NO: 78534 - DNA, 126 bp, Citrobacter koseri
atgtcggggctattaagtacctgtcatacaccgattttagcctcaacctggggacgttttagcaaaagccatccccttgtgcggagtaattatgtccatgataaatcaaagttttatgataaataa

SEQ ID NO: 78535 - DNA, 192 bp, Citrobacter koseri
atgaccatgtacccaaggggagcgaggccgaaccgctggcagagcttgcatatggtctgcaagtaccgtgaccaccataaacctgtttatcccctgcggcgtctcgcgacggcgacagaacgggggcatcgggctaaaatgcgcttcactaaaagtttttgggattgtttagagacggtggctacgtcatag

SEQ ID NO: 78536 - DNA, 915 bp, Citrobacter koseri
atgcttattcagaaaaagcgtattcgaaatattgataattacatacctaactttgatggccgagatatctacattgcacattctttgccagatgcggggaaaacggactctattggtttctcaagtcaaagagctttaggtgaagaagtcctccccaaaattttagggccaataaccagattcaatgctaatggcaaatcagtacctgacaaaacagcacctaaagaaactgcatacagacaaatttcatggactagaaagcaatggatcggagggggcgcaactcaagaagttactgacactcgtgaaattgagtataagcgctacaagagaatcctcacccctccaccaagcatagagttaaagattgtagagaatctgcaaggggagaagttgatcatctctccaaagctaagtttgacagctaacaacaaagagttagtggctcactgcattaatctttttttagagctttttgggttgtgcgaaactgttgacgaccaacttaataccatcgttaaaagtaaatctataaaactaaactggagcctcctgcctcagggtcaacagccttggagtactatcggttcaaaaatcctttcagctattaagatcaggggaaagggcaataccgctgttgttgaaggcaggcttgaacttatcaatagtaaaaaaccagatttcgtagcggttgggcaagctgggttccaaggctacgtaatatttgggttcacaggccaaaacatttacgtactagaaagctcacaatgtaataacgcaacttatatacttaacaataattggcagcagttatcccagctaactaaagccgaaatactagacggaaacttgcaccatgcccgtgtcatccaccgtgtaaactgggcagcagaaatacttaaatacttaccataa

SEQ ID NO: 78537 - DNA, 576 bp, Citrobacter koseri
atgaggacttttatctactgccgcgtttcaacacgcgagcaggatacgcagaatcaggtgctggctattgagcgtgccgggtacacggtgcctgagagcagggtaatcagcgaggacatttccggcagcgttcaggctatgcagcgccctaagtttcgggcgatggttgagcataagctggaatcgggagatcagcttgtcgtgctgaaactggacaggctggggcgtgacaacatcgatgtgcagcagaccatcgacatgctgttagaacgcggcgtgaaggtggtgtctcttgacctgccagcgcgtgatctgacttcatctgagggcaagctaatccgccagatgtttggagcctttgctgagttcgagcgaaaccgtatccgtgagaggacactggacgggctggagaaggcgaaagccaatggcgttaagctgggacgcaaggaagccaccgacaccactcaaaaggtgcaggagctgcggagtgaggggctgtctcaatcgaaggtagcgaagcgtctcggcgttagcgtgagcaccgttaaacgccactggaacaagggcgaggggtga

SEQ ID NO: 78538 - DNA, 1845 bp, Citrobacter koseri
atgccaacgaatctacgccgcctgcttgcgcaggctggtgacgctgacccgctcaataccgccaacgcagatgtacagcagatgatcgctgacgggattgttattcgacgttccaagatatgtcccgtaaagcataaacccgttaaggcggcatacaacacaaagaccgaagagttttattacaatgctgatggttccgctatgactctgcgggagtggcgaacgctgcacggtgttcaaccgaagaagcaaaaacagcgctctgacacggggctacggcaagtcatccagcccggtgacgcaattcattgccgatgtgctgagatagaaatgtggcttaacaagaggcctgctcgttatgttgaaccactgccgccagatttccccggtgtgcgtgtcgatgatgccgcattgaaaccgcgcgagcacgccgtgcctgaatcaacaaccggacagaatgcttttctcaaagcctgccgcgagtttctgatttgcgatgacgccaccctgaaaagaatcagccggggtataggcaaactggaagcgatgcgccatgctgactttgcgcgactgggagacacctcgggatttcgccagctatggtgcggtgagctgaaacccacagatgataaattcaatacgctgaatctgcattgtgacattgggggcgctggcctgccgccgtccatcccgccgttgattactgcgccgtacaggttccgcgagctggagcaatgcgaccgcccggcgtttgtgccattgccgccgccagacgggggcgactggcgacccggacagcaggacgtagccgccgctgtgtttgcccgtgaccgcgatatgctggcggtgctaccgaccgggtacggaaagacggctgcattcacctatgccctgcaatttgaatccggtgctggcgaggggctgaccgttatcgttgtgccgacgaacaccatcaagcagcaggtgctacagcagttaagggaggctggcgttcacgcggtggcctttggcgataaactaccgaagcggcgtaatgcgcagcaacttgcggggctggctgctggcgctttccatgtcgctgtcgtttcgcctgagcatctggtgccgggtagtcaggtgctggcggcgctgatggccgctggtgtggacaggtttatcatcgacgaggttcacaccgttgatgactgggagtttcgcactgctttccccgcgatgaagcacaccctgcaaaatgcctttcctgatgcgcagcgttgcgcgtttaccgcgaccctacgaaaaggtgatgaatctgagctgatgaaagcgttgggttgtcgtagcgagttcctgaccttccgcgccagcgctgcccgtgaaaacatccagcttgttcctgttcggcaatgtgaagcgcagcgccgggctgctgttggtctggtcgatgccctcccggtggatgaaaagacgctggttatggtggacagtatcaagatgctttacgcgtacctcgatgagctgggaagccgcgcccggccttatcattccgacacccgccgtctgagccgtgaccagcgtcacgctaacgctgagtggttcgccactacgcccggcgctgttctagtggcgaccaaagcctttggcctcggtgctgatatccctgacgtgcgtaccgtaatcgtgacttatattcctgatgacctgcccgatatggtgcagatggttggccgtgctggacgcgacggacaacctgcccgcgcgtttctgctgtggtcatcactggcgctcggtgcagcacctgatgagctggcggcgttgtaccgccctgaaaactgcaaatggggttacatctcccgcttcctctga

SEQ ID NO: 78539 - DNA, 432 bp, Citrobacter koseri
atgcctgatgaaaccgtgctgcatcgcacggggcgttctgacgccctgattaatgcacaactcgcctttgccctgaacgggtattcatttgacgggctggcgtcacgccatgtttacgctcttaatcgtgaggccatactgcgccgggtaagctcgccactacagcgctattgcctgctcaataactgtgagccttgggaatgtatcgctgcggtattgaaccgatttcgacgccgggaggatggctctcgcgtttggccgacctaccgcatggctcgcgagatctttaacggaactgttcacccggatgttaaaacgcgcgatgagatatttcaatccgtgcagcgtcgcctgtttttaccaaagccagtacatgccgaggtcattcaacatctgcgtgcaatgggactaactggagacaaccaccaatga

SEQ ID NO: 78540 - DNA, 207 bp, Citrobacter koseri
atgacgaaatctgaatttgaaaatgaaacgtggcgaatgaaaggcttgcttcttggggcgctgattcgccgccttgaggaagacaaggttggtgagtcgcgcatggccgcagcggagttatccagtgcggtcaacttccttaaggccaatgccgtagaagcgccggacacgtcatttaaccgtgtatttgaggatgacgagcaatga

SEQ ID NO: 78541 - DNA, 177 bp, Citrobacter koseri
atgacacccgcagagtttagagcatggtttgcaaccctgccgccgaactatcagtgcgccgcacgcaccatgtacgacaacgcccgcaagtcgggcacacataccgcgtcaagccttgcgctgattcatacgctggttactgaccagatcaaatttgattcggagtttaatttatga

SEQ ID NO: 78542 - DNA, 564 bp, Citrobacter koseri
atgactttgagtattaccgatatccagcgcattaacgcgctggctcataagcacctaaagaacaatgaagagattgcagcggagacaggtcataccctgaccgatattgatgctgtaatccgtggcgtctatgtcgatgacttggccgaacattggaaagacgatgctgatattactatggcggagtacaacgccatccgcagccgctataagcccggcaagctgcaccgcgatacagagtttatgattgcccgcgatatgctgattcgccctgagactgtgctggctatcgcccattcccgctttagcaacgtccacacgcacccagtgccgaaagccgtcaaagcaaagccggagaaagcgaaagcagtgcgcaagttagtgcctactgatttagatgaaatccacaagttagagcgcttcggttggcctgccgccgagattgccgaaaagctgggtgtccctgtcgaggtagtcgcgcatgtgcaacgctgcctgagaaatcgttggtcatactcggatactctggaatccgttaattccaaattcagtgaggctgcatga

SEQ ID NO: 78543 - DNA, 234 bp, Citrobacter koseri
atggtagagaacgaaccgctgcaccctgccgttaaccctgatctctacgtgaaccttgacgaacaacgtgaaggatacgccccgtttgaatcacgcggctgggatgtgctgacacagaacctgtccggggaagggcgaactgatcccggccaagcaccaaaccagaatccaaggcagcgaccgcgtggctccgttggcgagcgacgttggttgcgtcgtcatggccttatctaa

SEQ ID NO: 78544 - DNA, 240 bp, Citrobacter koseri
atgagcaccatcattttaatggagccacgccgcgcggctgattgcgggcaacaactgaaattcattgccgaagccttgaatcttcgtcaaatcgatttggctcatgtgtaccagatcgacagacaagatctcggcaaagcgtaccacggacagaagatgattcctgcccgatgcgtacacgcgcacatgcttttacttgaactggcgcaccgccgagttacatcacaagaggttgtataa

SEQ ID NO: 78545 - DNA, 696 bp, Citrobacter koseri
atggctgacaatcaaaacccttatctcgctgctggcgctgatgctgtaccgcagcaatcgccgtacatggctgcacctgttggcgctgacaatggcgcatcccgctttagctctgcgcctgctgatgctgatttcctccgtacccagcccgttaacggcaatgatggcggccaatggaatagtagcaatattgcgaatcagcaagatcagaacgcggacagcgccggggcgcaggtgggtgacaccatccctctgatggatggaactgctgttgagtataccgccgagcttcaaggattgatggggcagtttcaccagtccattgaaagccaactagggaaggggacagttgacgctatgttgcagtatgctggcacgctcgacgccgggacgcaatctacccttgagcggatggttatgtctggcgaccctgcacagatgcagcgggcagttcagtacctgcaagagaggatggccgcaggcaatgcgactggttatgttccatcgcaggggaacccatacggccaacccgccgcgcaacctgttggtatgtctcatgccgagtttatcgcagcgtatgaccagctttcgcagtgggcgcagcaatcagggtatggccccggccatcgccagtacgacacccaatacagggacttggtagcccaacgcgcacttggtaaaaggagtgggcgataa

SEQ ID NO: 78546 - DNA, 264 bp, Citrobacter koseri
atgtatgatgaaacttcgattcgcattctgaccgaagaggaaaagcagactcactcggcggacagcattctttcaattctgctggatgagtaccccagtaccagccctgaccatctggcgcgtgtggctgaatgccttgttacctttggctggggtacgaaggattacgccgcgtaccgtgccggaacatttagtgatgcaaagcgccagacgatggccgcatggttcactgagcgcaatcgcgctatgcgctgcgggcattaa

SEQ ID NO: 78547 - DNA, 996 bp, Citrobacter koseri
atggctgatacgtcgtacagtcccgatctgtttcgcccacattatggcggggtggaatccgacaatgatattcacatcgaggcttatgaccgggatgtccagacccgtttagagtccaaatccgtatttctggccgaggggctgtctacatacaggccgctgaaagccagtaaccaatatcgtgttgatcgcctgagtggtgatcttgaggtgaagggcagaaccgcagggcaatcgctggagcctaccgccgttaagtcggataagctgattatctctgtggatacgctgagctatatccgcatcccgattgactatcaggatgactggactgcacccacctttcgcgcagagctgagccgcaatatcggtactgctcacgctaaattctacgacgaagcgcacgccatccagctaatcaaagcgactgactttgtaccaccgccgacactgcaaccaacgtttaacccgttgacggataacgttgtctcgctcgacctgacagcggggagcgaagaagacgccgcgaatgagctggttaacgctattaaagctgctgttaatcgattcctgactgagaaagatattccggtggcggagctggtactgcttatcgacccggcttggttcagcatcctgatggaacataagaagctgatgaacgtccgttacagccgggatagtggcaacgattacgcatggcgtcgtgttggctatgtcgctggggtgcgagttatcgagctgaatagttacccgcaggaagccattaccgggcatgaactgggcgctgattatgacgttaccgcagaggaagcgctgacgagggcgacgctgtttaaaccttcctcggtactgttgacggtcgaagcgcagagcgtcattaatcgccagtgggatgatgaacgcgaaatgacgatggtgatggactcatatcgcctgttcaacgttgggctgcgtcgtcctgactgcgttatcaatttccgacaagctgcataa

SEQ ID NO: 78548 - DNA, 510 bp, Citrobacter koseri
atggttaatgatgcttacgcctctgagctgttgcgatcccttttcctatatgacccggtgacaggtcgcctgcaccataaagctaaccgacgccgggttaaggctggctcctatgctgactccacccggcgagctgatggttatcgtcaagttgccctgcgacttgatggcaagcagtaccagctaaaagcccatcgcgtggcgtggattcttgcgcatggcgctattcctcacggtaagcagatcgatcacatcaacggtatccgtgacgacaaccgcctatgcaatctgcgcttggttacgcagcgggaaaacgaccagaaccgacgcaaggcaagggggtatagctggaataagggctgtagcaaatgggaggcttacatacgcgtagatggtgtactccgtcacattggcttatttactaccgaagcggcggcgcgtgctgcctatctaaaagctaaagccagataccatccctcaacgccagccgatttgttgcaggctgcctaa

SEQ ID NO: 78549 - DNA, 426 bp, Citrobacter koseri
atggctgatgaaaagccaattaaaccgctggcatgtgatgacccacgccgccagcggtacgccgaactgttggcgcaggctggccgcatgactattccccgactgcatccgggcgatgctaatagtgttatgagtcagcttgcgacaacgctcggcgcacctgtcccgatagtgggtgctatgacggagcacgccgctgcatggcgtgcctgtctgctggatcaaggacttggcgatcttctggatggattgagtaaacaggtgctgacaatcttctttctgctttgctggagagacagcgccttgcgattggctggtaagcaaaaggaactgctggatatagctatcgaaggaatgacgcttaaacaagccagtgaagcgagagcaaacgatataaagaggaatgcttatggcattgacgattaa

SEQ ID NO: 78550 - DNA, 300 bp, Citrobacter koseri
atggcattgacgattaaattaaggtggcggtacatcgagccgccgccaatgactggcgcacttgctgacctgaaacaatgggtaattgatgccggagagcctgagcttgaagatgaatttcgtaagctgctggggctaatgcgccgcaacggtatcagtgacgaacgcgttaatgcgatggctgatgagctttatgttctggtttgccaacgccagcgcgaagaatacgaagcctgcaagcgggccgcgtctgacaatggagattttgaatcatggttacacggacagaccagctactaa

SEQ ID NO: 78551 - DNA, 426 bp, Citrobacter koseri
atggttacacggacagaccagctactaagaaaagctatgaagggctatctggaacaccttggcaacatgccgctggcggaacggattacaaacgctgctgcattcgaagatgtgtatcgcttcctgttgaatggttccgggcggctggagttgcgccgcgctgatgtggccgctgtccgtgtctttctgtggaattatcaataccgacgctgtgcggtgacaggtaagccgctgcgccttgcgtctgccgtgctggatcactgccaccgaaccgggcgcgtgcgtgctgtggtgcatcgctctgctaacgctgctgagggaggccgctacgttgggcggacgtgtggtgttagcgctacgaatctaaggactatgattggcagctatcgcaagcaatacactggtattggcgtgttatatccataa

SEQ ID NO: 78552 - DNA, 903 bp, Citrobacter koseri
atggctaactcaccagttcttgaacttcaagcactagcatgcgatcccgactccgacattttatctgtactcatgaaggccaaaatgattgcagtgaagctcggcctcagcgatttgaccgagtggatacagctcgaattaaatggctatcccagctttgatacggttcctgaatacaggaaaggtcaatcgcagttaaaagcatatagtccccaacatcaaagctgggttccgcttgtggtcaacttcaacgacgcggaattaaatgcaatggtatcaacgtttcacattacagaatcaatatcatccgttaaaaagatgaataataaaggagaaaccccttttcttcctttaccggattggatggcggatacgttgtatgaaggcatcggtcaaaaaacagaaatcgtgtgggttattagtccgggaatcttagaacatgtaataactaccgtcaggaataaaattctcgactggtctttagatttagagtcaaagggtattttaggcgaagggttacagttttcactaagagaaaaagaggtagcaccaatgactgtccataacgtgaccaacattcatggcaacgtaaacaacgctggcgttatcggctctggtaacggggacatttcacaaaataatactgtcaacgctggagacttcaactcgcttgaaaagcagctcaaggattggggcgctaatgatgaagatattaagagccttcatcaagctatacaagaatcaccagccccaactaccccggacaatttcagtgatagccttgggaagtgggttgtaaatatgattggtaaagcatatgcgggaacgctaaatattgcagcgtctgctgcaccagctctactaactaatgcaatttgtcattactacaacattcctgtttga

SEQ ID NO: 78553 - DNA, 1158 bp, Citrobacter koseri
gtgcggatagctattcccagctacatgcgccacctgttccaagggaagcgctactttatgaaaagcacagggacacgtgacatacgtcaagcgcgtttgtttcgcgatgctattgctctggaatggactcgcttaaggaatctgcttaagccgcaaggcggctcatccgtcgatcaaatcattgatgagctacgccgggtcagcgtgtacgccaaggaagcccccgcatcatttggtgcatcggttcaggcttgcccttccctacttaaaatgcgcgatctgtatcttctccaatacagcgagaagagaaagctaaccacgctatccaagaccaataaagccgtagaggtgctgttagcccacctgaaaaagaaagatattcagttgcgggatattaaccgaaccatagttacaggctggttagataagctcaaaactgagcgagcgctgcaaaccatccagaactatataagcgcactggcacagatttgggatttggcacgcaatcgctatcacgatgcgccacaggacaatccttggcgtggtcatgcgctcgaagcaaaaagcagcaaggtcagctatgaagtcttcgcaccgggagagctggcaaagatctatgccttacttgatgacgagatgaaggcggtaacggctattggtgcatacagcggtatgcggcttaatgaaatatgtacgctacgtgaaagcagcataaaaaatgtcgagggtgtattgtgctttgagatcaccgagggaaagaccaagagcgcggcgcgaatcgtccctgtacacagcaagataatccctctcgtgaagtcgttgctcaagaccacacatagcggttttctgttctatcacgcctcaatcacagaccgggcagacggaaagcgttcaacgtggcacacccagcagttcacacgggcgaagcgaaaagcgcttggcgaacctgccgcagagagaaaagtgtttcattcactccgacatgcgtttgtgcaacagctcgaccgtgctcaagtaccagaggatcgtattgccctgctcgtcggtcatgagcgcgggagtacagagagcttcaaaacttactcgaaaaatgcagcttcccctatagagatcggtaagtatgtcgaactcatccagcatgaaggaataaacatctaa

SEQ ID NO: 78554 - DNA, 468 bp, Citrobacter koseri
atgttagaaccaccaaagagttataatgaaatgttgcctatgctccataaggcaacttttattactacattcatattttatctatcattggttatttatggctacatcccattggttggcattaatgccaagtacatcccacccattaaagactacgaagagtttattaagtggatattaacattcggtattttaccaatcgcattttcaattttttggtccgtaattagtggagctttagatctacataataacgtggcaaaaattattggaataagaaaagcatgggataatcacttaattattaagccattagcgatgatcgccggagttacgagaaagttaactagtgatgaatcttacaaggtaatgagtaaactttattatccagaagtaaaagagttgaaagataaacattatgttgagcttttttggaacaaagtatattacttctggttttttttttga

SEQ ID NO: 78555 - DNA, 666 bp, Citrobacter koseri
atggggttagttttgaattacaagataaatgaaatgattatacgttcagaaaatgcagccaaaccatataccatgccatctaactatctctgcaactatattaaaaactctattaaaagtggcagagctcttgattttggatgtgggaagcttagatattcagaacaattggtaaataaatttgagactgtaacatttttagattccagaaaacaaattgaaagagtgcaaattatcaggggtgtacaaaccacaattccagagtatgtggctaataactataaaaatgctaatgttgttccttttgaaagtatagataaaataacgagtaattatgattttatactttgcgcaaacgtgctttccgcaattccatgtaaatccacaatttacaaaattatcagtgcgattagagaattattagagagtgatggtgaggcaatgattgtcaatcaatacaaaagctcttattttaagaagtatgagagtggaattaaacatttgcatggttatatataccaaaattctcgcagtgcttcctattatggcttgttggatgagaatgttgtaagtaaaatttgtttagataacaatttagtaataataaggtcatggagcaaagcaggcagttcatatgtgattgttggtaaaaataaacatatttag

SEQ ID NO: 78556 - DNA, 900 bp, Citrobacter koseri
atgattgacccacttattagaaacttacagagtgacattgcactacttcagctttatatcgcgcaacgcaaacaggctggctttcatgacatggaaagaatgattgagtcattgaccatctttatgtttcgcgcactaaaaatgggtgagcttgagaacatgaatcagattaaagttaactttcccgccattgatttagctgacaatcaaaacaaaatagcagttcaagttactacgaatgcaagcccgacaaaaattaaaaaaaccattacagcttttgaaaagacaaatgaattaggtgtgagcctcaaagataaatactctattttatatatatttggtttttgtaaaatatcaagaatctcagttccaagttattgtaaaataatcgaccccagctatttcgtgaatgaactttgcgataaagcagatgaagatatgatccatgatatgctcgatgctattcaacgccatcaggattatacgtcattacacccatggaatgataaagactcactcgaaataatactcaatgttattaatcgcaatgcaattaaacaccggatgagttgcgaaggcagcctatctgatatgcttaccggtttaaaggaaattaatgaagtaattacaaaaggaacaatccaacgtaagaaacgttcaaaatcgatatctgacttcaaagatcaaagcatggttaaattcctgagaggtgtaatggatgatctgtctgttattcaagctatagtgaacaaatcaaaagttaaccaatatgatatggtttatatcagctatgaagatatgatcagcattgataaattaaaagctaaaatagcaaacaattcatcagagatttcaagtcaaaataatattgacatgacactaaacattgttgatttataa

SEQ ID NO: 78557 - DNA, 1149 bp, Citrobacter koseri
atgtacatggatacgacagtgaagctatgttcaattaagaatcttctgccagatagcgagcaaattcgtagccggattcaggcgcggttccatgcgcccacgaagcaacctttcgacttgttagcacatattgggatggactgtgttggggctatacagctttggccttatgaaaccgatattccatccattcagagagtggatgccgaacccttaactgaaaacgaaatagaacatctgctgcagggatacaaagatgccccattgggtatgcaggcagaggtcgatgatttccgtatttcactggcgggtgcacaggaaaaaacagctctgctctggtggaataatcaatggtgcaggccacgcgggagcacaccgacaagccatatttttaaactacctattggctatatcgccaataacggaattgaccttcgcgagagcgttgaaaatgagtggctgtgttcaaaaatagcggctgagtttggttttcccgttgcggatacccgagttgcgtattttgggcaacaaaagatactgattgttgaacgtttcgatcggcgatgggctaaagatggtcagtggctgatgcgtttgccaacggaagacttttgtcaggcattgggcgtggctccggcacttaagtatgaatctgatggtgggccaggaatcgccagaagcatggatttgttactgggttctcaacaaccgcttgaggacaggattttgtttttcagaagtcagatctttttctggatgttggcggcaattgatggccatgccaaaaacttcagcgtattccttgaaccaaacagtgcttaccgtatggccctgctttacgatgtaatgtctgcttaccctttgatgcacccgaaaggtattcctcccagaaaagctaaaatggcgagggcgctatccggacgtaatcgccattttcactggagtacaatcatgccccgtcattttctttccactgcgcgagaagtgagctttcccgttttgcaagttgagcaattgctggcggagatgaaacaacgaactgaatcggtgatctcaaaagtggaaacgatgttacctgcaggattcccagagcacataagcgaagctatttttgaaggattaaggcatcagtcagcgcgtattccgtag

SEQ ID NO: 78558 - DNA, 1050 bp, Citrobacter koseri
atgaatgaaaacaccattccaattaaaaacatttattacatgctctgttatgcttgggggtatatcaggcaagcaaaaacaataaatttatcgtcgctaaaaggagataatatctatgatcttctcagcattgtattaatacaaggaacgcagcatatttatagaagaggattcgagttaggatacaaaaatcataatgatattctaagcggtgttaaaggaaaaattgacataacaaatacaaccaagcgtttcttaacacataatggtaaattgcattgtgtctttgatgaactcaccgtcgacgttattacaaatcaaataataaaaagcacgcttaaattattatatacaaatgaaaatattgataatgacttaaaattaaaaattagttctgtgttgaagtgtatgcgtcctattaaagaaattgacttaaactcaaaaattttcagaataatacaactcaatggcaataataaattttataaatttattattgccatttgtcaattagtatacacttcatcttttatatcgcaagaaaaaggccatgttaatttttatgattttatacgagatgaacatgaaatgtcacggatatttcaagagttcttgtatcagtttatgaaaaaagaatatattggctggagtgtaagcaggccgcatataaaatgggatgcttctagtgatactgatccagaattgaaactcttacctaggatggaaagtgatataataatgtcaaatgcagataaaactattatcatagatgccaaatactataaaaacatgtatgccaacaggtacaataaagcaaaattccgctcaaacaacctttatcaattaatgtgttacttgcacaattacgattttcaagaaacaaaacaaaataagaacacaggtggcatgattatatatccaatgacaggagatagtgttaatgaaacatatacaataaacaattacaaaattactctcagaactcttaatctcaatcaggaatggaacaaaatccatgatgaattattaaatattttcatcactccttga

SEQ ID NO: 78559 - DNA, 1389 bp, Citrobacter koseri
ttgatagctgaactcatcaaaaattttcttaagcaagcagacgaaaaatcatcacaaagcacgtcttcatacaataaagaatatcgtaatctaaaaataacgctgagctttggaaaaggaagttacgcagatgtcccatggatcgcatttcttggtggtgggcaaacaccttcaaatgggatttatcctgtaatattatattataaagattacaatgaattaatccttgcttatggtgttagtagtattacaaaaccagaactatcatgggaagggttgccgcctaagaccatcaccattaatgattactttaaggaataccataataaacctgcagagaaatatggcacttcattatttcactctgtttaccaaaccaataatgaagttgattataactctctagtatctggactgaatgaagcaattgataaatataataatttaataaacaaaaaaaataatatcaacaagttaaataacaaccaaaaagaaattaccacatataatttcaataatgccagtgaagatttattccttccaactgacacactcaacaagataattaaaaagcttaacaacaaaaaaaacataatactacaaggtcctcctggagttggtaaatcttttattgccaagagattggcatacctccaaattggaagtaaagatattaataaggttggtatgattcaatttcatcaatcttatagttatgaggatcttattcaaggctttcgacctaatacgaccggtttcactagaaaaaatggtattttctatgagttttgccagaaagctaaagatgaccccgaaaataattatgtatttataattgacgaaattaacagagcgaatttgagcaaagtattgggtgagctaatgatgctcattgaagcagacaaaagaggccccgagtgggcaatccctttgacttattctgaagatgaaaaggacacttttttcgtcccggaaaatatattcattataggattaatgaatactgcagaccgttctttggctgttgttgattatgcattacgtcgtcgtttttcatttattgatatagcaccgggattcaatactgagcaatatcgctcctatatgttatccaaaggtgtaagcgaagaagttattaacctcattcgtaccagcatgcacaaattgaatttagagattggtcatgacaaaaataaccttggaaaaggatacatgattggccacagtttcttttgcccttcgagtaatatagaaaaaggattagactatgaatggtataaagaaaccatcatgtctgacattggccaattattagaggaatattggttcgatgaaccagaaaaatatgaaaaatggttaaacatactcttggtgaatatcgatgaatga

SEQ ID NO: 78560 - DNA, 726 bp, Citrobacter koseri
atgtcaaaaaaatatcagccattgcttataactcattatatgtcaacatgggtcactataacggaagcagttgagatcactaccaaagccataaaacaaaaaattactcctagcgatatttatcgtcatgccttgagtggcaacatcctactatcggtctatttccagtctcctgtgatacttaagaagatacaaacttttaatggaaaaataaaattcaggcagtttgagggagacctacttgataaactatgcatgcttgacagggacggttttatttatggtcaaaatttaagactctgtacagaagccagatatgtttgtcctgtgcaacaaattatagatacccccctgataggctatgaatatgttttgattcagcgcatactggcacgtgaacttaaattcccctccccaattgtgggggcaagaaaaactaaccatggtattatagtaagattttcagaggagctttttcaaattttcgaaacgatgagttggaaagaacgcgtagaaaaacaaatttccagactacctaaaaacacagcattagatgtcataaaaaaactaacagaagtgacgaccataaaatataatcacaatgggtgctttcctctttatacattaccgcctgatgcctgttttgttattcgccacaccgaagtcgaaagactaattaatttatacaaaaaagggagagtcatcccatttcaccttcccgtatga

SEQ ID NO: 78561 - DNA, 3051 bp, Citrobacter koseri
atggagctcagccggaggcagttctttcgaatctgcgcgggtggtatggcaggaacaactgttgcatctctcggattcttatcatctttttccgttcatgcggaaacacgtcagtacaaactcttaaaagcaaaagagactcgtaataactgtacttattgctcagtaggttgcggcatgctgatgtacagtcttggcgatacagctaaaaacgtcaaagaaagcatctaccacattgaaggtgatcctgatcatccggtcagccgcggttctttgtgtccgaaaggtgctggcgtgttggattatattcacagtgaaacacgcctgcagtatcccgaatatcgcgcccctggttctgataaatgggaacgtatcagttgggatgatgccatcaaccgtatcgcgcggttaatgaaggatgatcgcgatgctaatttcatcgagaaaaacgcgcagggtgtgaccgtcaatcgctggacgaccacaggcatgctgtgttcttcggcagccagcaatgaaaccggtatcctcgacgacaaatttacccgtagcctggggatggtcgccatcgactgccaggctcgtctgtgccatggtccaaccgtttctgcgctggcaccaacgtttggtcgtggcgcaatgaccaacaactgggtggatattaaaaacgccaacgtggtgctgattatgggcggcaacgcggctgaagctcacccggttggttttaaatgggtggttgaagcacagaccaaaaatgacgccaccgttgtggtggtcgacccacgttttaaccgtagcgccgctgttgccgatctctatgcaccgatccgtgcgggttcggataccgcgttcctgctgggtgtcattcggtatctgctgaaacacaagcgcgtacagtacgaatacgtactccattacaccaatgctgctctactgatccgcgaagactatcagttcaatgacggattattcagcggctatgaccctaaaaaacggcaatatgataaatcgagttggttctatcagcttgatgagcaggaaaatgccctgcgtgatgaaacgctgagtcatccccgctgtgtctggaatttactcaaaactcatgtcgatcgttacaccccggaaatggtgagtcgcctgtgcggaacatcggtggaggacttcaatcgtatttgcgacattctcgccagcaccagcgtacctgaccgcaccgcgactattctgtacgcgttgggctggacacaccattctgccggggcgcagatcattcgtgcggccggaatgctgcaactgctgttgggcaatattggtatggctggcggtggcgtaaacgccctgcgtggccactcaaacattcagggctatactgaccttggcctgctgtcgaccaacctccccgggtatatgccgctgccttccgaaaaacagccggactatcagacctatatctcgcaaattaccccacctgcgttgggcgtaaatgaagtgaactactggcagaatacgccgaagttctttgtcagcatgatgaaaagcttctggggtgatcatgcaactgcggaaaatagctggggttatgactggctgcctaaatgggatcgtctttatgacgtgatgactcaggccgagctgatgctggaaggcaaaataaacggctacatcgttcagggtttcaatccactggctgcatttcccgataaaaacaaatcgtcccgcgcactttcgaagctgaagtatatggtggttatcgatccactggttaccgaatcatctaacttctggcagcaccacggcgaaatgaacgaggttaaaccggaagatatccagacagaagtgttccgcctgccgtcatcctgttttgcagaagagaacggttcaattgctaactctggacgatggttacagtggcattgggcagcggccgaaccgccgggtgaggcgttgcatgatggcaaaattctcggccgtctgtttatgcgtctgcgtgagctataccaacaggaaggcggtgcgaatccagaacctcttatgagcatcaactggaactataaagacccgtatgacccacatccggaagaaattgcccgcgaagccaacggaatagcgctggcagacctctacgatgataaagggcaattgatcgcgaagaaaggtcaacaattgagcagctttgctcagcttcgtgatgatggctcgaccagcagcttctgttgggtctactgtggaagctggaccgagcaaggtaaccaaatggccaatcgcgataacagcgatccgtatggtctgggctgtacgccaggttgggcatggtcctggccggcaaatcgccgaattctctacaaccgcgcctcagctgaccctgccggcaagccatgggatgtcaaacgggcccttctacactgggacggtaataaatggaccggaatggatgtggcggactacagtcaggccgctccgggcagtaacgttgggccctttatcatgaatccggaaggtgtcgcacgtctgttttctctcgacaaaatgaacgacgggccattcccggaacattacgaacccattgaatcacctattggtaccaacccgcttcatccggatgttgtttccagtccggttgcgcgcatctaccctggagatatcgctaatatgggcaaatctgacattttcccatacgtcgcgaccacttactcgattaccgagctattccgtcactggactaaacatgctcttctgaacgccatcgcccaacctgatcagttcgtcgaaattggcgaagcgctggcgagcaagaaggggattacggcaggcgacacagtgaaggtcatgtccaaacgtggttttatcaaagcgaaagccgttgtaaccaaacgcctgcaaacgctgacaattgacggcaggcaggtggatacaattgggatcccatgccactggggatttgaaggggctacacgcaaagggttcctcgctaacacgctgacgccatccgtcggcgacgccaactcacaaacaccagaatacaaagcattcctggttaacattgagcgagcgtaa

SEQ ID NO: 78562 - DNA, 309 bp, Citrobacter koseri
atgtggaaagaagtattagtgtttatattgaatacagataaaaactctaaattctatgagcatatcaaaaatatttccccgcttgatttggatattgcattgcttggtgattatcttcaggttttcaataaaaggacaaaggataatgttgttttggatgaaattgaacactggtacgcagaaggtaatattccgttcaaggagagaattgaaaacttgagtgttattggcgatggagatgcttggtcttatttttatgaagatgaagatgaagatgaagatgaagatgaagatgatgctattttttaa

SEQ ID NO: 78563 - DNA, 663 bp, Citrobacter koseri
atgagaattaaaaagcccttaactgatataatttcctataccatcatcataattgtaacattgtgcttcatctcaatgattaccgctgcgataattgtctgcattgatatagttaggacaagagatttacatttttgcttctctgaaaattgcgtattaaatgctcaggaaatttttaaaactccaatatctcttctgaagcaatcgttaatactcatacctatttttgtattttttataggcctatataattataagctggcgataataaatgcgaaaaacaacaacacacttaacaaagagcgtgatttttattcttatttaaaagaaaatacaagcgaacaaaaggaattgatagaaacacttaacaagaagagactcttcaacgcactttttgatgatcacttagatttcaaagtagatgctaaggaaaaaatagaatcttatcttaaaacaagaaaagctactggcttactaaacgaacttattgacgataaaaaaaacaattataaaattaaccttacgtccattacaatacactttgggtttcacattgaagaagaagttgatatagagcgtttagatgaaattactcataacatatgcattctattgatagaaatcattgaggtctggtttaatataaatatatcaagagagtaa

SEQ ID NO: 78564 - DNA, 1182 bp, Citrobacter koseri
atggcaaaggatttctctttcaaaaacactttcacccccattcagaagaaagaaagcttatttgccttattgggtataagtgatatcgataaatttgaaaagctgatttccgatggtgtagaaaaagcttactacataaaaccaccaattgaaaaaaagaacggtggtcatagaattgtctacgcaccaaaccgaatgctgaaatcgattctaagaaaaataaacaataaaattttcagccaaattaattttccagattacctttacggctctattcctgacaaagaaaatcctcgcgattatattttgtgtgcccaacagcattgcaaatctaaaatccttgtaaaaatggatatcgaaaattttttcccaacgatgaagtcaaaatttgtttatcaaatttttagagaattattcagattttcagatgaagtttccaatatattaaccactttaacaacatatgagggtttcgttcctcaaggtgcaccaacgagtacttatttagccaacttatatttttatgattgtgagccaagtaaagtcagttatcttcgtaatcttggattcagatatactcgtttgattgatgacataacaatatcccgtttaaataaagatggagattggaagtttgttgagtctgttatttctaactttattaaacaaaaagaattgactgtcaataatgagaaaacaaaacttctatctgctaaatcgccacaatcatttaaagttcatggattatgtattgaggatgatgctccacgatttactaaaactgaaagaactaacataaaaacgcaagtacatcaagttgtaaggaccggttatgggcgagatcaaatccgaatgcaaccaagttatcacaagaaatatttctctgtgaaaggtaaaataacgaaacttaagcgtgtagattgccctgattatccagttcttaaaaaacttctaaaaaaacattgcgatcctcttcctgagcataaagaaataaaaagaattaatcgtgttatatcaaacttgtcgaaagatcatgtgagcattggtcatacggaaagatacaaaagtaggtattttcaagttgtttttcgtttagatatattaaaaaaactatatccagttgaagcaaatgagtttagagcacggctaagacaaataggtccaactaagaatgagaattaa

SEQ ID NO: 78565 - DNA, 273 bp, Citrobacter koseri
atgaactggcttttttttttgccggatggcggctgcgccttatccggcctacagaacgcgcacattgtagacccggtaagcatcgcgccaccgggcataacgccggatggcggcttcgccttatccggcctacagaacatacacgttgtatgcccggtaagcatcgcgccaccgggcataatgccggatggcggctgcgccttatccggcctacagaacgcgcacattgtaggcccggtaagcatcgcgccaccgggcattgcattcgactag

SEQ ID NO: 78566 - DNA, 882 bp, Citrobacter koseri
atggataaaactgattacatcctacgttcacttacgaaaacctcaaaaaaacgatgggaacattatgcagtaactcgcatttatcatcttttaaatgatcccgacattgaatttgtctgccagcaatgtgtcagaaaagaaaatggaaaaatctatttggcagatttatttttcccacaactggaactttatcttgaaattgatgaagggcatcacaacagtgagcaatcacaaatagatgatgcgaaacgtcgtatggatattactgaagttacaggatttttagagaaaagaattcccgccggcgaaataagtcttgaaattttcgatcgttatatcaatgaatttattgagttgatacgcaatcgtaaaaatagaatgattaaagataaaaaattcaaagaatgggattatgataataaatatacagctcgtcctcatcttaaggcaggaaggatatctgtaggtccagatgccgtcttcagataccaccgggatgctttgaactgtttcggttacaacaaaggacatcatcagtctggcggttggagcattccttctcacataagtgaagcaatgggtctatcaggaaaatgcatggtttggtttccaaaactatatggaaattcagattggggaaatgaattgactgatgatggtaacaaaatcatagagcggaatataaaagatgatgagggatacacagaacgctgggataaacgaattgttatggcacattctcgtgatgagttgaacaggacactgtaccgatttcttggggtgtttgaagctatccctggtcaccatactggcaacatactagagtttcatcgtgtaagtacatcggtcaatgtataccctcctaatgatgctgccccatga

SEQ ID NO: 78567 - DNA, 408 bp, Citrobacter koseri
atgcagaaattcagcgacccgatgaccgcgcgcgcactgctccagtcgcagcagaactccgacgaggcactcagcattaagcgcgatgctgacccgacgtttgatttttgcggctatctggaaatgctcccgcagaccaacgggatgtttatggggaatgccagcatcatcccgcgtaattaccgtaaatacctctatcacgcatatctggcctatatggaggctaacgggtacaggaacgtactcagcctgaaaatgttcgggctggggctgcccatgatgctgaaagagtacggcctgaattatgagaagcggcacaccaagcaggggatacaaaccaatctgtcgctgaaagaggaaagctacggcgactggctaccgaaatgcgacgaacccgcagcaacataa

SEQ ID NO: 78568 - DNA, 1902 bp, Citrobacter koseri
atgaaaatgaacgtaacagaaacggtaaaacaggcgtgcggccactggccgcacattctccctgcgctgggtgtgaaggtgattaaaaaccgccatcagtcctgcccggtgtgtggcggctctgaccgtttccgctttgacgataaagaggggcgcgggacgtggttctgcaatcagtgcggcgcgggtgacgggcttaagctggtagagaaagtgtttggcgtgacaccgtcagaggccgccgggaaggtgaacgccgtgaccggcaacctgccgccggttgccccggaagtgattgcggccacagaggctgaaaccgatgccgaccgcaaagcggcggccgcgctggccgtcaggctcatggagaaaacccgaccggccaccggcaacgcctacctcacccgcaagggtttccccgctctggaatgtctgacgctcaccgtcatgcataaaaccggcggcgtgacgtaccgcaccggtgatgtggttgtcccgctgtatgacgataccggcgcactggttaaccttcagcttatcaatgctgacggtctcaaacgcaccctgaaaggcggtcaggtcaaaggggcatgtcatgtcatcgaagggaaaaaacaggccggaaaacgcctgtggattgcagagggttatgcgaccgcactcaccgtgcatcacctgaccggggaaaccgtcatggtggcgctgtcctccgtgaacctcctttctctggcgagccttgcccgtcagaaacacccggcctgtcagattgtcctcgccgccgaccgtgaccttaacggcgatggccagagtaaagcagttgcggccgcagatgcctgtgagggcattgtcactctgccgccggtgttcggtgactggaatgatgcgtttatacagcacggcgaggaggccacgcgcaaaactatttatgacgccatccggccaccggcgcaaagtccgttcgacaccatgagcgaggcggaatttaccgccatgagcgccagcgacaaggctttgcgggtacatgagcactacggcgaagcgctggcagtggatgcgaacggccagctcctgtcccgctatgaaaacggcatctggaaaaatatccctgccgccaccttttcacgaaatgtggctgatttattccagcgcatacgcgccccgttctcgtcagggaaaattgcctcggtggtggagaccctgaaactgattattccgcagcaggataccccagcgcgccgtctgattggttttcgcaacggggtacttgatacccaaagcgggatattcagcccgcaccacaaatcgcactggctgcgcacgttgtgcgacgtggattttaccccgccggtggacggggaaacgctggagactcacgcgccgaacttctggcgctggctcgaccgtgcggccggtaaaaacccacaaaaacgcgacgtgattctggctgcgctgtttatggtgctggcgaaccgttacgactggcagctctttctcgaagtcacaggtcccggcgggagcggcaaaagtattctggccgaaattgcgaccctgctcgccggggaagataacgccacgtcagctgatatcgacacgctggaagacccgcgcaagcgtgcctccctgactggcttctcgctaatccgtctgccagaccaggaaaaatggagcggtgacggcgcaggactcaaggccatcaccggcggcgatgcggtctcagttgacccgaaataccagaatccgtactcaacgcatattccggcggtgattctggccgtgaacaataacccgatgcgcttcaccgaccgcagcggcggcgtctcccgtcgccgggtgattattcatttcccggagcagattgccccggaggaacgcgacccgcagctcagggataaaattgcacgctag

SEQ ID NO: 78569 - DNA, 321 bp, Citrobacter koseri
atgaaaaagccattaccacccgtattacgcgccgcgctgtatcgtcgcgccgtggcctgtgcatggctgaacctgtgcgaacgccagcaccgctacccgcacctcaccctcgacgcgctggaaagcgccattgccgccgagctggaaggcttctacctgcgccagcacggcgaggaaaaaggccgccagattgcctgtgcactactggaggatttaatggaagccggaccactcaaagccgcgccatcgctgtcctttctcgggctggccgtgatggatgagctttgcgcccgtcatatcaccgcaccggtactgcactga

SEQ ID NO: 78570 - DNA, 180 bp, Citrobacter koseri
atgcgcaatgtcggccagctcgtcagcgacctgatgcaggtgcaggactgcgccaccgttcgtcgtgaccctgcgcagcacttacagctcacctccgtgatttacctcatgaccgcccagctcgacggtgtggtcgaacgctgcaatcagcagtggctgaccggggagggtaacgtatga

SEQ ID NO: 78571 - DNA, 552 bp, Citrobacter koseri
atgatgacaaccactcagcaaacagcccctttttctggcttgcttcttttcgccgtttccaggtatagttttcccgctgtcgcaaaatcggcagccgggcgtaggaacccgtgtaattcacaggcgacaacagacgcgccatgcgtctttttttacgtcgttgctcaggcacacccatttttcgggctgtggtgcttattccatagcccctgtcagataatggtggtccgggcggggcagctttcgggctggccggtattctgtgaagccggtattcctacccccgttcgggtcaccacccatgagcgtaggaactccggtggtggcaataaccgctattcacaggaggttgccgctatggctacgaccctcaccccgtcacacccgcagtttgtctttgtgtttgccgccgttcgtcgcgcagaccgtaaaccccgtatttgtatgctccgcaccgttgccggtgatgagcacgctgcacgtctttctctcgttcgcgattacgttctctcgtttgctggccgtctgccggttgcggaggcgcgcgcatga

SEQ ID NO: 78572 - DNA, 267 bp, Citrobacter koseri
atgcacaccgctttttcttccccgtcttctgcccctgccgcgccgctgatgccggtttctgataccgttcacgagcgctttatccgtctgcctgaagtgatgcatctgtgcggcctgtcccgctcgaccatttacgacctcatcagccgggaagctttcccgaaacaaatctccctcggtgggaaaaacgtggcgtgggcgcagtctgaaatcaccgcatggatggcggatcgcattgccgagcgcaaccggggttatgacgcatga

SEQ ID NO: 78573 - DNA, 804 bp, Citrobacter koseri
atgaaaccagatttgtttaccgcagtaatgaaaaccatcggcagcacgcaggatgagaaaatccgcacggccattgacagcgcactggatacccttaacgagaaagcaaaccagaacgcagaggccacgataaataacgcacttgatgcgttcagcaaggccaaatccgcgcacacggaaaacatgctgaaactgaatgatattgatgccgcgattacccgcagcgagaaagagcgtcagaacgccctgaatgaaagtgccgaagccgaacagaactggcgtacccgttttcgcgaactgcgcggcatgatgaccccggaactgaaaaccgaacacagtcagcgagtggccggtcgggagctggcggaggaattcaccgccatgattgatgagctcaacgatgataaagccagtaccatgctggccgcctgtacatcaggaaaagaatacgtcagcgcccattcagaggcgctttctgcccatgcccggaatgagtggtcggcggtcatgaaagagattcccccggcgctggtacgcgcttttgcgttacgcctgcgtgagctcgaaattaagggagaagaacaccctcacaacgttctcattcaggagctgggtgagaatgtactggcgcaaagcaggttctacacattcaacatggcgcaggagccggtaatttcaataatcgggcttcaccgtccggctcttaccggcgtggacatgaaactctataaaagccctgctctcagaatggcgcgggctaaagagctggcgcagaagaaaaaatcacagggggttaagccatga

SEQ ID NO: 78574 - DNA, 243 bp, Citrobacter koseri
atgatgcgctgcccgtactgcaaacaggctgcccatgtccgtaccagtcgctacctgtcggataacgtcaaacagagctacctccagtgcgtgaatgtcttttgctccacgacctttcgcaccatcgagtctatcgacgaggtgatacgaccaccggcagaagaaaagcccgaaccgccaaagacagtaccagaaacaacgccccgaattctggactgtgcccgctcatcgctgcgccactga

SEQ ID NO: 78575 - DNA, 576 bp, Citrobacter koseri
atggcacgagcaccactggaacaggcctttgaaacctgtcagaagaataaatcggactggatgagcagcaagtcagcactggcgcgggctgaaatggcgctgaaagagctggagctgacctgtacccgttatgaaccggaggctgcacaggcgctgcgggatgatattgacctgaaaatatgggcggtaaatcagtcggccgggcagtacatccggtcgcatgaagccgtgcagcgtatcagtatccgtcgtcagctccacgcctttatgcaggtaagcggcgacgcactggccgccgcactggcaccagaattaatgcatctcagcgaacaacctgacattgtcagagagcgtgctctcgaccgggcggccgccagtgttcgcgaagcgctgttcgttcatgtaacccgcggaggaaacattgattacgcagaggaagatcgtgacattctgacaaccatcggtttccggcctgacagagcatcgagagacgacaaccgggcaaaatatacgcctgaacagagtcagattttcatgtgccgacaggccgagcagacccgcaaaaaatccgcataa

SEQ ID NO: 78576 - DNA, 948 bp, Citrobacter koseri
atgagtatacttaaccagttatccgccacattgttcatggataaagactcgttgaaaagctttatctcgacagcccctcgccgctataagaaatataccataccaaagagaagcggtgatggagttcgtattatcgctcagccatctaagcaaattaagtctttacaacgttttactgccaacctgctttctgaacatttgaaagtacattatgcggctcatgcctatgttcctggtaagggtataaaaactaatgccgccgcacacaaaaatagtcaattcatattaaaaatagactttaaggatttcttccattctattacacctgatcttttcattaagaccctcgaagccaatggggctaatatatcagaagaagatagatttatcatcgcccatcttttattctggaaactaagaggcaatagccctcttagattaagtattggagccccaacatccccgttaatatctaatgcaatcatgtattgttttgatgaggaattaacaaattactgcactgacttaaatgtaacttacacacgttacgccgatgatttgaccttttcatcatttcatggtttaagcttagcgacaatacagcgcacagtacaaactctattaataaaacattacaacagaaaaatcagaataaatagagataaaacaattttttgcaacaaagctatgaatagaacaattactggtgtagtactaaataatagcaatgaattatccttaggaagaaaaaagaaaaggatgattagttctttagtacataaattttcgtatagtttattaaaccaaaaagagattaattatcttaacggcatattgggacatgcttttcatatagaacctcaattcattgagcgtcttcaagttaaatatgggcatgacgttattgataagattaagcagtcaataacctatgacgacatcacttaa

SEQ ID NO: 78577 - DNA, 975 bp, Citrobacter koseri
ttgagtacggcaaagggtaatgaaagctacgaagatacactcattgatgagttcagttctctctcgtactccaatttttccctttacttaacacctcataaaatttttatctgtggtggagatacaaacactggaaagctgattccgcaaagtttacgcgacaggataattgcattctttgaggttaatgaagaacatggtctctcaaaatccttcataatggccgaaacattcaaggattatttccgagaaaacacatattcagatttgttttcatttgaggatgatattgccaaactatccacacttataatcatttgcttagaaagccccggttctcttgtcgaattaggcatgtttgcaaacattagcgaccctaaaaaaatacttatcttcgctccagatgaacatgtacaggctgaagactcatttatttacctgggtcctttatcatatttaaaacgaaaagataaagagtcagtgcatatcttcccatggcccagcaacacagagataaattacccagacttaccattggtaatagagtgcataaaaaatagacttaaaaccgcaagtaaaacaactgcttttaatatatctaaccctgcacatatagcattattagtctacgatatcatccatacattctatccaataaaagactatgaaattgaattagcattaatagcactcaatatcgaaatagatgaaaacgttataaagagactgctttatttattacaatcaatgtctatgattggcaaaaagaaatatagcaatataactttttactaccctctggaaagtaaaaaaagagttatactgggaaaagataaacttggacgaataaaagaatataaggccatgagaataagagccgtcacatcatttgttctatctgatgacgaggcatccagaaaaagaaaacttgcattatctgcaattacaaaaatgcttgaggatgacgccaaatga

SEQ ID NO: 78578 - DNA, 1191 bp, Citrobacter koseri
atggcgcgcatcacacgccccctaactaacaacgaaatcctcaaagctaaaccccgcgaaaaagacttcactttgcatgatggtgacggcctgttcttactcatcaaaacatctggtaaaaagctctggcgcttccgataccagcgtccggtaagtaatagccgaactaatctgagtctcggctcatacccttcgcttacgctcgcagcagctcgccagatacgcgaccaacatttagctacgctcgcgcaagggatggatcctcaacagcaacaagagcaagcgtcagagcaacgtcagatggagctggatagtattttctcaacagtggccgccaactggttcaaaatgaaaagcaaaagcgtcacagaggactacgcgaaagatatttggcgctctttagataaggacgtgttccctgctataggcgttatacccgttcaggagataaaggccagaacgattattgaagcattagagccaatcaaagcgcgtggtgcgctggagactgttcgccgtttagtgcaacgtgtaaacgagataatgatttatgcagttaataccggtctcattgacgccaatcctgcctcaggcgtaggtatggcttttgagaaacccaaaaagcaaaacatgccaacactgcggcctgaagaattgccgaagctaatgcgttctttggtcatgtcaaacttatctgttccgactcgctgtctaattgaatggcaactcctgactctcgtgcgtccatctgaagcatctggtactcgttgggaagagatcgaccttgagaccagactctggacgattccagccgaaaggatgaaagcgaagcgtgaacacatcgtaccgctttctcctcaggcattagagattctggaagtgatgaagcctataagtaagaatcgtgaatacgtttttccaagtcgtaacgatccaaatcaaccaatgaatagccagactgctaacgctgccttaaagcggattggctatggtggtaggttagttgcgcatggtcttcgctcgatagcaagtactgcattaaatgaatcaggctttaattctgacgttattgaatctgctctggcacattgtgataaaaacgaagttaggcgcgcatacaaccgctccatttatctgccgcaacgcacaaatcttatggattggtgggggaattttgtacgttctgtttaa

SEQ ID NO: 78579 - DNA, 594 bp, Citrobacter koseri
atgagtgttgttgaaacattgagagaactatcagaggtatggaaactttttagtgatatgcctgatgacacaacattaagtgtagatttagctgctctctatcttggtatcagtgctaaatcattagccagatacagacagaacgggggtggacctcaatacattcaatatcagactgaagatagcaaagcaagaaaccagcgcgttaattatcttttgaaagacctccgttcttggcgggataatcacaaagtaagcaatacaatgcacgctgctcaggttaggggattagcctttaactgcctatctgatttcaccgaacctcaacctttctggcgaatcactattggctctacaagcaaaatcatttcccatgcattaactctcactgataaggaattcaaagaactattactgaaaccgtatactgatgttgtctggatatctatcgaaaaagcgctttttcaaacatgggaaaacaaggatgaaagaactatttggcacaaagtatttatatcagtactaaatagtattgtttgtgcttcggacgctgaacaggaaagatatacgctcaatgatgcgttgaagagctaa

SEQ ID NO: 78580 - DNA, 1176 bp, Citrobacter koseri
atgggcacgacagaatcgcctaaactcccgcgcggcgtaaccatcaggaaacaccgcaacggcgaaaccatcaatattacattcacttataaaggggtcaaatgtcgtgagcccctttctaatctggacgtaaccactaaaaacattaaatacgcagagcgcacactcggcgaaatccataacaagatcgaaaggggaacgtttgtttatgcagaatactttccccgttctacccggttaaaaattttcggcaacgctgccgcaggcaaaactgtgaagatgtacctagacgagtatctgatgatctgtgaaacgaggaaactatctccttcgacaattggtggatacaagaaatgccgaagcgctctgtcatcacttcatatttttcctgcaagtgagttgacgccagccgcattaaagacatggatccagagccagaaaacaacattgaagactatccgaaaccagctgtcattcctgcgttctgctttggatgaagcggtgacggatggcgtgcttcagattaaccctgtatcactggtaacagcctcacgataccaaagtgataaatcagaggcagaaagtagttatgtggttgatccgctatcaccagcagaagttgacgctttgctctctgctgctggcaataagcagtgggagaatcttttccggttcgcgatacaaactgggctgcgtagttccgaattgtgtgctcttcgttggcgtgatatcgactttgtagggaagactgcgcacgttcaaaatgccagtgtagttggcgtcatcaaaggaacaaaaacaaaagccggtacgaggaaagtagaactgactgaagaggcattggtagctctagccagccagaaactgttcactttcatgaaagatgaaactatcttcgaagatccaaaaagtaataaaccgtgggctagtgctgatgcgataagaaaaaaagcatgggtgccaactctacgaaaagcaggcatccgctaccgaaatccatatcagacaaggcatacattcgccaccagccatatcagccgtggcgccaacctattctggctagcagcccaaatgggtcataaaggtcctgaaatgctattccgacactatggccgctaccttaaagaatatgatggtaaaacttctgtaatcctgttgaataacaacactaaataa

SEQ ID NO: 78581 - DNA, 207 bp, Citrobacter koseri
atgctgagcctcgattgtgttcctatctcaacttattgcaaagagactggcgaaaccccagatgccatcaacaaacgtgtgcagcgtggagtatggcgtgaaggggttcaggtgctaaaggtcgacggcgttaaggaaagatggattgatcttagtgaggttgcaaaatgggcacgacagaatcgcctaaactcccgcgcggcgtaa

SEQ ID NO: 78582 - DNA, 789 bp, Citrobacter koseri
atgactaatagcccaatgacaaccaataaccacccagcacacggtcctgtatcactcgatcgcctgcaccagatgcgcgaataccttgagcgtaatagccagtaccaaaacggcgggaacagagcttacattctcgctgatatgttaaaggtgattgccgaggcgatggcagcaaggaacaccgagccggtaacggtgatgaataacaaattaacagagtggcgcaaagcgctgaataaagctgtagaaaactatcaatccgcacaggcctggtatgaagaaaatcaggacagcccatcagctcagcaggatatggacgaagctgagggtgggattgaaaagttgataagacaatacggggtgctcattgtcttaaatttgctggatgagatagacgagctacaggaacgtcgcagggttgaaaatgccgagcctatctatcaatgcgaattttgtcaccatgacggtaatggcgagttgcaatggcattgggaggatgtaaacaaagatttttacgaccaatacgattcagagcgccgcggtaaacgcagaattctctacaccgccccgccagtgccgataatgccagatggttacgtgattgtgccgattgttccgaccgaggacatgattattaacggcttcgaatcggttccagatccgcacttcagcgatgaaaaagagtgggaggaatacgaagcattgagtggatgccgacaggcggcgcgccgggctgagttatgctgggcagcaatgattaaagcagtaccaaaacaggagaatatttaa

SEQ ID NO: 78583 - DNA, 348 bp, Citrobacter koseri
atgagcaaatcattaagcgcacgctgcatccgccgctgggaagttgaattcaaaggccgctgtgactcgaaacacagcccgtactggcgcaagcatcatctgcgcgggtgcatccgtgaatgtgccctgactactgccgaaagcatggtttatcgcctagccgaaaaacgggcttgggaagtatgcccggttgccgatgagcaaggctggaccccagagttttctgcctggtacgcgactcggcgcgaacaatttcgcaaagaagcgctggaatttctgaacagtcatgccaccaatgacaaaatcgacgaggaaatccagaacgagctggaggcatggaatgactaa

SEQ ID NO: 78584 - DNA, 243 bp, Citrobacter koseri
atgaccgtatttgaatatctccaggcccacccgaacgccaccagcggtgaaatcgcaagagcgatgggtaaaaagacgccggccgtagccagcgcactatctcagctttatgcaacagggagaattgttaagtctggagcacgctgcggtataccgacatatcacgtcaatgatctgccgtttggatgcagcaataacttaacgctgatgtttaaccagcttttaaaggaagccagacaatga

SEQ ID NO: 78585 - DNA, 240 bp, Citrobacter koseri
atgggcaacgttacttatcttaaccatgccagactcgatgctattgagttggccatatcaaggctggccattgctattactgaggctgaaggcccacatactaaggaactcgaaagttctatcgcccatttccgtatgctctttgaaaagcctgatatcactgaaaaagagcgtgaaacctacctcagaacaataaggctgctagatcctttgggtaacgaccctatcgaacccttctaa

SEQ ID NO: 78586 - DNA, 243 bp, Citrobacter koseri
atgaaagagaacgaattgaagcatgtcatagctctgctactggaggatgctaagcgaattcagcaaattgaaccgaacacaggcactgaatcacgcattcttcttgcgcaagcggcgttaaagagcgcaggtcatgacaaaaatgaaaagaagcgcctcaacggggtagagattgtcgaggcgttactggaacggagaaaacgattagaagggttcgatagggtcgttacccaaaggatctag

SEQ ID NO: 78587 - DNA, 627 bp, Citrobacter koseri
atggaaacggttgggcagcgtattaagtccctcagacgaataacccgaacatcccagaaagagcttgggaagttctgcggagtgagcgatgttgcggttgggtattgggaaaaagatataaatgtacctggtggagaatcactggcaaaacttgcaaaattcttcaatacatcaattaattacatcctatatggcactgaattcgagggtaacctcattacaaaaatgcgcagggtccctgtaatctcatgggttcaagctggtcaattcacagaatgcaaggctgctgaagttttcaatgaagtggataagtgggtagagacgtccttaagggttggtgatagctcgtttgcactggaagttaaaggggattcgatgacaaaccctaacgggcttcccactattcctgaaggcgcaactgtgattgtagatcccgatgccgagccacttcatggcaaaatagttgtggccagaatagatggaaccaatgaagcgacagtaaaaaaactcgttattgatggcccacaaaaatttttagtccctctaaatccgcgctatcccaacatcccgataaatggtaactgcctgatcatcggtgtcgtcaaaggcgttcaatacgaactttaa

SEQ ID NO: 78588 - DNA, 195 bp, Citrobacter koseri
atgacaactgacgatattgaaaattactttggcaatgcagaaagagttgccgaatttttcggcattaccagtgaagccgtttaccaatggcgcaataggcctgggcgcctcattccgaaaggccgggcagctgaagcggcataccgcactggtggtggcttagtttttcaccctgagctttatgaaaaaaaatag

SEQ ID NO: 78589 - DNA, 492 bp, Citrobacter koseri
gtgggtaacgaacctgagtggaaagtggagcgtcagccagcctggctggtggccgcaattaaaaagaccatcaccgagcttccaggcggatatacagaagcagcggaatggctgggagtgacagaaaactctcttttcaatcggctacgcattgaaggagaccaaatcttcccgcttggctgggcgttagtgttacagcgcgctggtggctcaaaccatatagctgacgccgtagcccgccattcaaacggtgtctttgttccactggcagatgttgatgatgtggataacggggatatcaatcagcgccttatggagtcgatcgaatggattggcaaacattctcactacgtccgtaaagccactgctgacggaatcattgatgaggcagaacgagctcagattgagaagaacagttacaaggtcatggctaagtggcaggaacacatcacgctgctgtatcgcgttttttgtgtttctgaaaaagagtga

SEQ ID NO: 78590 - DNA, 1032 bp, Citrobacter koseri
gtgagagcgctgcttacccctgaagttgtgccacgcctcggagtggtgctgttcaagcctggtcgcgagttaatgagcctgttttccggtgggcgtgttctcgttgctgctgaacctaaaaatatgacccggctgccatcaggccgggtgccagatgcccgccagcctctggctgatgatcaatctctggtttcgttcttcactgatgatcgggtgatccgcgccgcaggtggtttgtctggtcttgaatactggcttttacgccgtgttaaagagtgccagtaccctcattcgggctatcaccataaagaactggtcacaatgcgtcacgcacccggttcaatggtgctttgctggcactgtgagaaccagttacgtgagcagacgacggaacagcttgcagatctggcactccgtaacgtgatcgcgtgggtcattgatactgtgctggtggcgcttgggtacaaccgggaaagggagctttcactcggtgagttgtgctggtgggcggtttacgctggcgccgctgatgccatcacagaaagcatggctgccagtgcgttgcggttgcctgttgagcctttgcagtccgtttacaaagaaagcgatatcactccttctttgcccgcaacccgcatacttgccagcaggctggaagcatacaatgcgcaggtcgaacaaccgatgctggaaaagcctgttgtacgcctgagcattgatcccgagccaccagcggcattttttgccaggccaaagcgtcatcgatggcagaatgctgactacatctcatgggtgaaaacacaaccctgctgttgctgcggaaacccggcagacgacgcacatcaccttattggatacggacagggtggcatgggaaccaaagcccatgacagtttcactatcccattgtgccgtgaacaccacacagaactgcataacgatccggtcaagtttgaacgtaaatacggctctcagcttgaaatgttgaaaaatgtgctggaccgggcgtttgcgcttggcgttctggcataa

SEQ ID NO: 78591 - DNA, 600 bp, Citrobacter koseri
atgacgccacgtcaaaaacgttcacaccgcgcagcgctggaaaaagcagcatcggcaccccgcaaaagctggctggggaaatgtactctccttaccgggattcagtcggcatggataaaatcactgttaacgatatggggggaaggtgtgagcgggggaactgccccacgcatgcccaggggacatgaatgctggaatgtactgaggggcggtcgctggtcagataaagcgctggagcgttttacggctgcgctgaaccaggctcgcagtgagggatttaaggggcagcaggcactaaatcgcgctcacaccattctatggccccagccagccacaagcgtaattgatgaagctttgcataatgatgatgttgattttgttgagcaatccgtgttgctggcgcttgatgtcaatgatccggtgtatgtcgtcgggcttcagtattacaccacgcggaaaaaaatctctgatattacaagagagttgcgggcaatagcgccgtggctaaccgactgggaggcaagaaagcgcgtgcgctggtgcctggaaattttcagagcaaaagtctttctgtcgtcgcggaaattgttatccgaatag

SEQ ID NO: 78592 - DNA, 543 bp, Citrobacter koseri
atgactaaagacgacattttcaatgccatcctcgggaaagaaggcggctacgttaatcatcctgacgataaaggcggcccaacaaactggggaattacgcaagcggtagctcgggcccacgggtacaccggagatatgcggaacctcacccgccagcaggcgctggatattctgacggctgactactggacaggcccacgcttcgaccttgtttctgatgtgtcaccagccattgccgccgaactctgcgacacgggcgtaaacatgggcccatcggttcagaccaaatggtttcagcgctggctgaacgtgttcaacattcagggctcactttatcccgatctgattgcagatggctttatcggtccgcgaactatcagcgcgctgaaaagctatctttctcgtcgcgggaaagagggcgaactggttatgctccgcgccctgaattgcagtcagggtcaacgttatctcgaactggcagaacagcgcagcgcgaacgagacgtttgtttatggctgggtaaaggagcgggtggttatatga

SEQ ID NO: 78593 - DNA, 276 bp, Citrobacter koseri
atgacgctggagatgattatcggcctggccgcagcggtgattgccgctatcgctggtgcttttggtttcggccatgcgcgcggcaccagtaaagcggaagccaaagccgaaaggcagcgcaccgaagagaatgcagcggcaacgatcgcagcagcagaacgtcgggtggaagtaacgaaagaggccagcaatgtgcaagaagctgttaagcgtatgggcgatgacgatgttgatcgcgagttgcgcgaaaaattcacccgccccggtggtggttga

SEQ ID NO: 78594 - DNA, 192 bp, Citrobacter koseri
atggaatggattaacgttgaagatcaaaaacctaaaggtttcgaaatggtcattttagataccgataaaggtattgcggttggctgttttgacccttttggagaacctaaacatgcgatttttggcttcgttggaactgtaggccactctcaatttgaagttaagcgttggatgcctctaccaaaagcatga

SEQ ID NO: 78595 - DNA, 279 bp, Citrobacter koseri
atgcatgacgtcatgttgtttggtcagggatactctggtgaagtttgggagacagaaagtcaatcaagcccgctagaactcttcgaaagacctgacatgtatttgctagatgggttaagtgatacagaggactttgtgtttgtatcatttaagatctcggtgcaatcgatccgaggggaaaactatctaattgcctttgcagacaaaagaccttcgagcgaagaaattgaatgggcatttttccacggtgacaggaaaccagagcccataactgactaa

SEQ ID NO: 78596 - DNA, 390 bp, Citrobacter koseri
atgggctttccttcacctgcggcagattatgttgaaacacgaatctccctcgatcagcagttaatcagccagcccgcagcgacttatttcatgcgggcatcgcgttcacatttcagggaagggataatccagggggcgctacttgttgtggacgcgtcgctttcagcctgtgatggctcgctgctgatatgtgcgatagatggggaattcaggatcaagcgataccgaactcaccctcagccccacctgataaatctggataacgggagaagggaagcgctgccagaagatggtgatggctacaattcctcacacgcaatatttggagttatcacgtatatcattaatgatgccagcaatgctgagtttgatgattgtcctgctatataa

SEQ ID NO: 78597 - DNA, 162 bp, Citrobacter koseri
atgttaaaagataacgaaaaagccagcgaaccgctgtcgctggcttctcctatcgtaagcgaatacgaaaaacttggcggttgtgagtatacgcttaccttaggttttgtcaacagcgaaactttaaaggtacctatacatgagtattacaaacgccagtaa

SEQ ID NO: 78598 - DNA, 537 bp, Citrobacter koseri
atgactattgcgaaacgagaacttggccatcgcgtttcacctctcagcaatgacatgattaaatcttatgcgcagcgtttgagggatgttcttcagatatcgaatcatacatatctgagactggatgtattgctagaaggtcttatggcctcagaaagcatcgaccttgaaattgtggaagatcacgagttacctaaacggtacgcagtgacttacccagacaaaaacaagattgttttgcaacagtctgtttatgatgccctctgtagtggagaaaatcatgcacgatttactgttgcacacgaaattggtcatcttattatgcaccgcaatcaaggagcatacgctcgtagtaagagcaatggtggacacaaaatttatgaggacagtgagtggcaagcagatgtatttgccagccatttccttatagatgcaagattagtctctccagcgatgaatgctgaggacgttagcataacattcggggttagcttgcaggcagctgaaacgtggatgagaaaaaatgttaaaagataa

SEQ ID NO: 78599 - DNA, 351 bp, Citrobacter koseri
atggtaactagctttggtaaagctctcagaaaactgagaatagaccggggtatggtactcaagaatatggctgatatgttgggggtgagctcagcttacttgtcagccattgaattaggtaagcgagccatacctgactcattagtaaattcagtagctgctgcattcggattaagtggtcaagaagccagcgaccttaggaaacaggctgagatttctcaaccatcactgaaagtcgatatgtccgatgcagaggatcagaataaagaattgatgcttgtctttgcccgtaagttcaaagatctgagtcctgaacagcttgataaactcaacaaaatgttaaaggactag

SEQ ID NO: 78600 - DNA, 762 bp, Citrobacter koseri
gtgccaaaaaacttgttacaactttgctacgaaggggagtgtggcgaaaattacattcgtagcatgaacgaaaaaggacaactttttgtttcactctcggacgttttgaagactctttcagcagaaaacagaaagcttgatggtaaaacatcccaaagtcttatcactgttcttaaagcagtaattaagacgctagatccagatgaattcagaaacgttcctcttattgtagatggcgagacaatttctgaaactttcctcactgagccaggtttatacagggtccttgctcaagatacgacagcagcagggaaaaaattccaacgctggctctttcatagtgttctgccctcaattcgtgagtttggtgtttatccgccccctcctaagcaggaacgttcggaactgagtgctttcgcaaatagtcttcagcaaacagttcaagctttagtgatggagattgaaaggcgcgaagaactcgagagccgggtaaaccaggttgaactaaaagttaactcgttagaaagtttaagggatttatcaaaattcaggagtgttccgcaacgcctgttagaacttgaacttgagggatactctgtcgaggagatctggcagtggtgtgagaaactacgtagcgaaactggtgccgagaagattaaatgtccttcagggattaatatcaacacttgctatccattggctctggttgatgaagcaatcacactgtatcaaaaagttatcgaggcaagaattcggccttga

SEQ ID NO: 78601 - DNA, 195 bp, Citrobacter koseri
gtggtggtgctcggtggcgtcggacaactggcggggagcgtggccgccgcatttgggttgggtatcttcaataagattctggaaccgcaaatgggcgcggtgctgggcaaaatcgtcattctgattgcgatcgttctgtttatccagaaacggcctcagggattgtttgcgctgaaagggagggttattgattaa

SEQ ID NO: 78602 - DNA, 447 bp, Citrobacter koseri
atgggcaacaatgagcatgaagttatggcggacaaacagagagcagaacgtataaaaaaggcaattctggaacactcgacttatgaagaactggccgagaagactggcattagcgtaagtacgctggtcaggatagcgtccggcaaaactgaacctaaattcagcgatataattcagatagctaaaattaccggcgcagatttgaacaccttagcttatggctatgctcttgatgttaaagaagaagctactgagcgaaagctgataacttctgcggacggatatactgatgaagaaaccacgaacgcgcataatttcatcgtgtggaacatcagaacattggagaagcaagatattctggcacttgcaaggcaagtttctgcattaagttcatatacttacagtacaaaaatgtttatgaaaaaagcattgtcaggcgaagagtaa

SEQ ID NO: 78603 - DNA, 717 bp, Citrobacter koseri
atggcagggcaatttaagatctcacgcattgatattaactacatgtattcattatcaacgctggaaaatgtccgcgcatggctatatgccgcagaattcaaggctaaaactcgccatggtcgcgcctgtggtaaaggtggaactgtttacttagggaaaaactcccggcggtggagcctgaaattttattcaaaatatgatgagcatatttctggtaaaaaaggacaccagatagcagaagagtttgttaaagctggcttacttgactggtctaaagataaattacgaattgaattgacgctaagaacaacagaattaattgacttaaaccttacgcttggcagtaactggaatatcgatactccaaacaaattattctctgaatatgtagggagaatagaaatgaatcaaaatgccattttgaccgatgaaaaaatagttaaactgccgagaaaaatacaatcaacatatttactgtggaagcagggcgcaaacatgaaagaaatgcttccaaagccaacattttacaggcaccgaaaagaattattgtctttcgggatagatattaatttttattgtgaatcccctgattcaaataatgttgttccattagtaagaacacttgaagctaaaccagcccaaatccctacatgggtttatgagaaaggttttatttttgattacaaccgtatttcacatgccagtaactggcattaa

SEQ ID NO: 78604 - DNA, 477 bp, Citrobacter koseri
atgaggatcgtcaatgatggcggcatccagaccgacggccagaagctcttcgcgcgtaaagcgtcggctgcattcacgaccttccagcagattttgccagaacgtttcgccatccggcgattcaggaaaatggcaggcgtagccgataaccgcgacaggttcgcagtccgggtagtgttgagcgatcgatgcatcaatggaatctgctgtcggcgcagaagagaagcgcaagttatccataatcggtcccgtttcctaagattcacaaagtcaatggaacgccatgcgttcgcgatggcgttccggggaaaatcagtttgcttcgcgctatatccgccgctgacgacggcgaacagggcgaggtcgttttgttttctccaccgtggcgacgccggccagataatcggccagggcagcaggagaagggtgggtgaagaggtcaagcaacgtcagggtggaaaattcgtgacgttgtaa

SEQ ID NO: 78605 - DNA, 960 bp, Citrobacter koseri
atgacggagtcaccgcaaacgcaatctgaaatctctattcaccagttggtggtcgggaaacctgcaaacgatggcaatattcctgctcagtgtgaactgctgcgctgttcgttgcaggaaggtatggatattttgctctggaggggccattttgcgcggcctgagacgttgcagctacacgacgatctgggcaggattaacttctcgtgcatcctggaaggcacttcgcgctttgcgattcagggactccggcgccacaccgactgggagcttgcgcgcaatcgccattacattacccatacgccagactgtcgcggcagcgcctcctattgtggccgattcgagagcattaccctctccttcagccctgaaaccctcgcgctgtgggtgccggatattagcgcggtcattaagaataagatcgactcccactgctgttgccagcagcagcgttgtaatgctgaaacccacttaacggctcaggccttgcgtcacgcgctgatgcgcatgcacggcggcttcagtcatgaacaaaagccgtcgacgctatggttgcaggggcaaagtctggtcatgctcagtctggtgctggatgaacatcgcgaagacgccagttgcctctcctgccacttcaacccgatggaacgccagaaactgctgcgggcgaaggatctgctgctggctgatctgacgcaagcgccgggcgtcgcggagctggccagagagtccggtctgagcgttctcaaaattaagcgaggcttccgcgttctgttcaacaacagcgtctatggcctgtttcaggctgaacgaatgcaggaagccagaagacgcctggccaacggcaatacctccgtcatgacggtggcggccgatctgggctatgccaacgccagccatttctctgccgccttccagaaacagtttggcgtaaccccttcgacctttaaacgcgtgatgtaa

SEQ ID NO: 78606 - DNA, 276 bp, Citrobacter koseri; identical to SEQ ID NO: 11599

SEQ ID NO: 78607 - DNA, 693 bp, Citrobacter koseri; identical to SEQ ID NO: 11600

SEQ ID NO: 78608 - DNA, 249 bp, Citrobacter koseri
atgtctgtaaaaagcagggtgcgcgatcgacttcccggtggtcgcatgaagtcttaccgtcgtgttggttcacattttaccagttgttccaggtggtttgataaatcaccgtcctggtatcgcaatatgatgatgacccggccagagcgccgtgaagtcagaaagcttcttaatcaggtcttgcgtggtcgtgatgctgacggtatggcatttcctgtcagtaacaagccgtttgcatggtggtggtga

SEQ ID NO: 78609 - DNA, 300 bp, Citrobacter koseri
atgggtaacgggcaattagttctgactatcgacactcgcgccgattcaatcagcaatgatgaccaggcatccgatattattacgaaccagcgtcagatacagacaacagttcagattaaggatggccagacgctcttacttggtgggctgattgattcatcatccagcaatgctgaccgttctgtaccgtttatcagtaaaattccggtgattggctggcttttcaggagtaaagctgacagtaatgagcaacgcattatgtatgttctgctgaccgctcatattattcgcgcgctttga

SEQ ID NO: 78610 - DNA, 945 bp, Citrobacter koseri
gtgtatctcgccgtcctcccggtggcgcataactttccgctggcctgccccggtattctgggaacgcttgcctgcggcggaaaagtggtgctgaccgacagcgccagctgtgatgaggtgatgcctttaatcgcgcaggaaagagtgactcacgtcgccctggttccggcgctggcgcaattatgggtgcaggccagggagtgggaagacagcgacctttcgtcgctgcgcgtcattcaggcaggcggcgcccggctcgacccgacgcttgctgagcaggttatcgccacctttgactgtaccctgcaacaggttttcggtatggcggaaggcctgctctgttttacccggctggacgatccgcatgccaccattctccacagccaggggcgcccgttgtcccctctggatgaaatccgcatcgttgatcaagacgagaacgacgtcgcgccgggcgaaaccgggcaattgttaacgcgcggcccttataccatttcgggctattaccgcgcccctgcccacaacgcgcaggcctttaccgcgcaagggttttaccgcacaggcgacaatgtcaggctggatgaggtggggaacctgcacgttgagggacgcataaaagagcagatcaaccgcgccggagaaaaaatagccgcggctgaagtggaatcggcactgctgcgtttagcggaagtgcaagattgcgcggtggtcgccgcgccggacacgctgcttggcgagcggatttgcgcgtttatcatcgcgcagcaggtgccaactgactatcagcagttgcgtcaacaactgacccgtatggggctcagcgcgtggaaaattcctgaccaaatcgagtttctggaccactggccgctcaccgccgtcggcaagatagacaaaaaacgcctgacggctctcgccgtcgaccgttatcgccattctgcccaataa

SEQ ID NO: 78611 - DNA, 1173 bp, Citrobacter koseri
atgaaagggatgcaaaagatcaaaagaggaaaaacctttaataggcttatttcttatttattaaaacctgcttcgcaccacaagtcagatccgtatgtagtcggtgggaatgtcatagaaagcttcgcagaagcactaagtgcagagttcaatgcgacaaagcttctacattcagatgtcagcaaacctgtatggcataactctttacgtctgcctgttggtgagagtttaccaatacagaaatggaaacagatagctgatgactacatgaagcgtatgggcttctctgaaacgcatctacgtgcatacgtgcttcatgatgataaagatggccaacatatccatatagtagcaagtcgcatagatgcaacatctgggaagctctacttaggtaaaaatgagaaccttatcagcacacgtatcatagaagagctggagcaggactaccagttaaccagaaccaaaggacctgatgctatgaaaccttcttcctcacctgccaaacgtaaaaaatcacgtaatgagactatgttagaggagagaactggtgaaccatgtcctaaatccatcatccagagggctatagattcgataacgctaaatcctatagcaattgatgacttcgttgaaaagctgaatagcatggggattacggcgaaaagcaatatcgcctcaactggcaagatgaatggattttcgtttgaatgcaaaggtgttgtgttcaaagcttcccaacttggcaaaaagtatagttggaagaacctggaaccaatgatatcgatgaattccagctcaaacattggagaggaaagacctgtcatccctgtacctgatacttctcgcagcaacgaagctgtcatatctatagtggaagactatccagatggaaagatctacccagagatagggttgcccttaccaagacctggcatagcccccacaaaacccacaaacatgacaatgcgttggatcgcaaccattccttatctggtgagtgttgttggcgcacttaaaacgatacgtatcccatttctgaaagcgttcaatggtccaactaagttcttttccatgtccatgattcacctgtccctgagaagcctgaaacagactaaaacggatagtttggaaccaaaaagctcccaccataaagcccataaacccctacttccctga

SEQ ID NO: 78612 - DNA, 1200 bp, Citrobacter koseri
atgacaactataataggtatacataaactcactatggcatcgggggagaggcgttgcatcatttttgataatgaaaataaaatcccactgtattatccaaatctatatctaactattcaatacagaaacagaggttgttccttttcaactatagagtcagtagctcttagcatttctttgctgtacagatttttacgagagaacaatattccaatagagaatgatattttagcgggacagtgtttatcaaactcagagattgagagtctgtccatgtttttaatgaggaaacgttcaaatcatgagccttttgagtctatatcaacgagaacactgtatcacaggctaaacactattatcggttatttctcatggctgtcagatactatcctcagatttgattcatcagagcaaagggtaagtgttaacagaatggttcgaaccataaaacaaagactccctgttaatagtaaaaacaaaaataaaaagtatgttaatgatggtctgagtccagatgtccaggataaaatccttgatgtcatcaacccacattcagcaaacaaccctttcgaaccctatgtaaggcaacgaaatgagttgatgatccttcttttatatcatcttggggttcgatgtggcgaactattaaatataaagctggaagacatcgattttcaaaaaaacaggattttgattacaagaagacctgatgagaaggacgatccaagacttaatcaaccattggtaaagacctacggtagaacactatcgttagaaagggatttagctctcaaaatccatgactatatttcttttgatcgccacaaggtttctccctcgaaaaagggctatctatttctgtcatacaaacctggtccatcgagagggctacctatttctaaatcgggttatcataaaatcatagcccagatagcctcatgcgatcctctacttcatagattaaaaggacatcagctacgtcatacctggaactataacttttcaaaccttatggattccctgtcagttagtgaagaagaacagggtaaaatgagggaacaacaaatgggctggaaagagaattctggaacgtctgccatatacaataaaagatttattagagaaaaaacagatgatgcctcattaaggctacaagaacgcctaagcactgcaaggagaaaaaatgataataacaaatag

SEQ ID NO: 78613 - DNA, 222 bp, Citrobacter koseri
atgataataacaaatagagaagttaaaaaaaatgaagaacctttaatagctattaatagtggttatacttttcacaaggaagataaagtatggatattagataagaatgtgaggattaacgtatcacttgttcttagtgttctggatgaaagtagccatcaaggttttttggggatgccattatgtaaatactccacttgccattctgagatgccggggtag

SEQ ID NO: 78614 - DNA, 123 bp, Citrobacter koseri
atggagttgatatatctgaatacgcgctacataaattactttctgatagtaatgtcaaaatatatcttgatgcatttgatgaagttaaacctgaatttagacttgaacttgttgatgaaataa

SEQ ID NO: 78615 - DNA, 342 bp, Citrobacter koseri; identical to SEQ ID NO: 11593

SEQ ID NO: 78616 - DNA, 198 bp, Citrobacter koseri
atggtggtggtgagtctggcggtggtgagtctggcggtggtgagtccggtggcggtagttctggcggtggtgagtccggtggcggtagttctggcggtggtgagtccggtggcggtagttctggcggtggctttagtggttccagtctttctaaaggtgatattcagtctgctatcgaaggtgcttcacccaaaatag

SEQ ID NO: 78617 - DNA, 342 bp, Citrobacter koseri; identical to SEQ ID NO: 11593

SEQ ID NO: 78618 - DNA, 342 bp, Citrobacter koseri
atgcctttattattgggtattcctgcattgttgcgttttcttattggtcttgtccctttgtttattggctatgtggcgagttttttagctcgacttgctaccaaaacaggattaatcgcttttgcattggtcgcattaattacaacaactgttacgcttttaatgcagtatcttgccgaggtcatgtataacggtttacctgctgatttctctcatttaatggcgtctgtattgcctgaccattttcaggcgtgtgttaacgttattatggttactcgtatcagtgtttttgttttcgatttaaaacaaaaatttcttgattatgcaaacagggtgatttaa

SEQ ID NO: 78619 - DNA, 429 bp, Citrobacter koseri
ttgtatcctcagacgcttcacataacagaatttggatactgcacccatgattttgtcgtttcacagtgtgaaaaattcagagactgcgtgaactgttcagatcaggtttgcatcaaagggcatactgaaaacctaaccaggctgaaagaaaaactatcccatgtaaaaggcttgattgataaggttgcaggagaaaatagtagtagtagtcatggggatatagatgagaaggaccaatggctgaccttccaggtgcagacgaaagaaaggctgactgagcttatccatattctggaggatacggacatccctaatggttcgtttgtcaggctatcgaacaagagctttacacatctatcaaggctaaccaacgaggaaaatttactaaaccataaagtgagggctgaaaatgtcaaaaaaattaactaa

SEQ ID NO: 78620 - DNA, 420 bp, Citrobacter koseri
atgtcaaaaaaattaactaaaaaagagaagactatgatactggatactatctggggctgggatgattcatcgatcacctgggagcatctttgtgatgaatgctctacattcctcaagtctcgaccaagcagacaggctttgtcttatcataaggagatagccgatgctttcaaaagtaagaagaaagggattgccaacgatatgaacaggtttaaaaaaccatcaagccttggcaatgcatccaaaataatctttaatttggaatcaagaattaaaagtcttgaagaagaaaataacaatcttaaacagaaattcatcttatggcagtttaatgcctatagatacgacataaaagagcatcaattagatgagccattacctaaaattgaccgtagaagagatgatggtctgagaagatga

SEQ ID NO: 78621 - DNA, 504 bp, Citrobacter koseri
atgaacttatgtcaaaaacagatcgatgatttaattgatgttttttctcatgaaaaattcactttggtgaaaaaaggatttaagcgtatttaccgcctttcttggtctgttgtcgaaaaattccctaatggtgtttggttcacaacgaacatagaatacgcaaaacaatataaggctatacattctgctgtggcttcatcaaaccaaaagaatgaaagaccatttttatatgaagctgaatctattaacgatttaaatttattaaactataatggggatggtttctttaatgatatgaaagatctttactcttcagtaggtctaagtatcacacaaggaagagtaattagagatttatcttcttttatagcacgaaataaattccatattgatggtttctatatgaaaaaagacggccttattgaagccatgccagtagatgaaattttaattcctaatgcggaaaattccctacgtctgataaaaacaacagatatgtcgtaa

SEQ ID NO: 78622 - DNA, 366 bp, Citrobacter koseri
atgaaaagaattaaaaactattgtgaagatgatttttgttcgattattgttgactttaattcaaaaggttcttctcatttcttggaaaaagtattcccaacctttactttggatgactacttggattttatcttctacctttttaagacggataagagtcatcctttgctccggattatttctccaaaaaaaataattctagatgatacggatgatcttcaatttgggtttactataaaagagttcaaggccaagcatgttagcttacatgaattatctttaatgttggcggagagaaatgctatttcttttgctcttaagaataataaagaattacaggcggccagggaaattaaaagactttaa

SEQ ID NO: 78623 - DNA, 555 bp, Citrobacter koseri
atgaaaagagtagttaagttttgcatcatcggaatacctttaatagcctctctctgtgcaatatacgcttttatgttcccaagaacaccagatactcaaaagacagatgacatcattggcacatggaaatcagattattcatatgatactggaggggttatagttagagtaaatggagagacatcatatttctccaatgggaaatacaatgttaatgctgatatgtctttccaaccaaatagtacgattataataacctttgctactaatggtgctggggattggaatattaacggcaaagaattgataacaacacttaatactctaaagtctactccgaataaaatgatttataaagggaacgtattaggatctcaagattttgatatgatggaacgaatttccaatcaaaagctaaagaccatagaagatttcacagcaactggaataagtcagtcttacattataaaaaaagatggtcatgataaaaagctgttagaagctataaacccctttggaaaaaactacagtatcgtgatgcatagagagaagtaa

SEQ ID NO: 78624 - DNA, 375 bp, Citrobacter koseri
atgcgcctcacgaaaatttattttcgcaaatcgaaccgtcttatattaatgctttcttttttggcgctggggcttgcgcttggtttctggctccagtctggaaagaatgttgatgaaatctccgctattaaatctgcttatgctgaacaggcgagggcggtaacgcctgattcgtccagtgacttaccccgactttctattaattctttttcacaacttggctttgacgtttccgttacgtttgttgatgcaaaaggtacgaaatatcagtattttgatttgattaaagatggttattccgttgatattaaagatgcctgtcgtgttgttattagaaaaggccgttatttacagactgttatctgtcaggagtaa

SEQ ID NO: 78625 - DNA, 255 bp, Citrobacter koseri
atgacgtcaagtcatcatggcccttacgaccagggctacacacgtgctacaatggcatatacaaagagaagcgacctcgcgagagcaagcggacctcataaagtatgtcgtagtccggattggagtctgcaactcgactccatgaagtcggaatcgctagtaatcgtggatcagaatgccacggtgaatacgttcccgggccttgtacacaccgcccgtcacaccatgggagtgggttgcaaaagaagtaggtag

SEQ ID NO: 78626 - DNA, 618 bp, Citrobacter koseri
atgacaacccaatatggattttttattgactccagtcgttgcaccggttgcaaaacctgcgaactggcctgcaaagactacaaagatttaaccccggacgtcagcttccgtcgcatctatgaatatgcgggcggcgactggcaggaggataacggtgtctggcaccagaacgtctttgcctactatctctccatctcctgcaaccactgcgaagacccggcctgcacgaaagtgtgcccgagcggcgcaatgcacaaacgcgaggacggttttgtggtagtggatgaggacgtctgcatcggctgtcgctactgccatatggcctgcccgtacggtgcgccacagtacaacgccgccaaaggccacatgaccaaatgcgacggctgtcatgaccgcgttgccgacggcaaaaaaccgatctgcgtcgagtcctgcccgctgcgcgcgctggactttggcccgatagaagagctgcggaagaaacatggcacgctggcggccgttgcgccgctgccgggcgcgcacttcaccagaccgaacattgtgattaaacccaacgccaacagccgcccgaccggggataccacgggttatctggcaaatccgaaggaggtataa

SEQ ID NO: 78627 - DNA, 255 bp, Citrobacter koseri; identical to SEQ ID NO: 78625

SEQ ID NO: 78628 - DNA, 201 bp, Citrobacter koseri
atgaaatgcgccgacagcttgagtacaagcagctctggcgaggtggtcaggtactggcaataccaccagcctacaccagtcagaagtgcgcttgctgtggtcatacagcaaaggaaaaccgccagtcacaaagtcaattcgagtgccttgaatgtggatatacagcgaatgctgatatcaacggggcacgtaacattttag

SEQ ID NO: 78629 - DNA, 279 bp, Citrobacter koseri
atggaactaaaacaacgtcttgaagactacactgaatccgaattcatagaattcctgaatgaattttttgaaaaccctggcaatctgaaaggaagagaatttgaatctcactctaataggctagtcaaacacttcgataaaatcgtggatcatcctgaaggtaatggtttgattttttatcccccggatgacagggaggacagtccacaaggcatcattgaagaaattaaaagatggcgaaaatctcagggacgcccatcattcaaagactctgagtaa

SEQ ID NO: 78630 - DNA, 282 bp, Citrobacter koseri
atgattcattttaaacaaaaactcgaagactacactgaatccgaattcttagacttcctaaatgaattctccgcaaacccgcgctaccaggaagaaatggaccgtgaatcttacatcgactcattagtcgatcatttcgataaaatcgtggatcatcctgaaggcaatggtttgattttttatcccccggatgacagggaggacagtccacaaggcatcattgaagaaattaaaagatggcgaaaatctcagggacgcccatcattcaaagactctgagtaa

SEQ ID NO: 78631 - DNA, 576 bp, Citrobacter koseri
atgccggatggcggcgatgccttattcggcctacagatagtgccacactgtaggcccggtaagcgtcgcgccaccgggcctaagaaatgtggcggttttttttatacattatgccggatggcggcgatgccttatccggcctacaggatagtgccacactgtaggcccggtaagcgtagcgccaccgggcgtaagaaatgtggcggttttttttatacattatgccggatggcggcgatgccttatccggcctacaggatagtgccacactgtaggcccggtaagcgtagcgccaccgggcgtaagaaatgtggcggttttttttatacattatgccggatggcggcgatgccttatccggcctacaggatagtgccgcactgtaggcccggtaagcgccgcgcccccgggcgtaagaaatgtggcggtttttttatacgttatgccggatggcggcgataccttatccggcctacaggacagtcacactgtaggcccggtaagcgtcgcgccaccgggcgtaatgtcattcaggactcaaccgccagcgggcggtttctgaatttgagtgactga

SEQ ID NO: 78632 - DNA, 1017 bp, Citrobacter koseri
gtggcgctggcgatcttctcgctggcgggcatcgcaacgctgcatgtggatgatgatatttcacagctacaggcgctgccgcagcagattctggcgcaggaaaaagcaatcaccgccctgaccgggcagagtgtcgatcagaaatggtttgtggtttacggtcagtccgcacagcaaacgctggagcggctggaagcctttaccccagcgctggaacaggcaaagcgcgacgggctgctcagcggctatcgcacgcttccgatcaactcgctcgcccgtcagcggcaggatctgaagctactgaaaaacgccgctccggcggtgagccgcgcgctacagaatgccgggctttccacggttaacccggatctgaacgccatgccggtaacggtggacgcctggcttgccagcccggccagcgaaggctggcggctgctgtggctgacgcgggaaaatggcgaaagcggcgtgctggtgccggtagacggcgtgaagcggagcgccgcgctgaacgccctcgccacgcaatattccggcgtggcgtgggttgaccgaaaaagcaccttcgacacgctgttcgccctctatcgcaatgtgctgacaggactgctgtttgtggcgctggcggtcattgcctgcggcgcgatgatcaggcttggctggcgcaaagggctggtaagtctggtgccgtcagtgctgtcgctgggctgcggtctggcggcgctgacattgagcggccatgcggtcaatctattctcgctattggcgctggtgctggtgctggggattggcatcaactatacgctgtttttcagcaacccacgcggaacgccgttgacctcgctgctggcgattacgctggcgatgatgaccacgctgctgaccctcggcatgctggtctttagcgccacccaggccatcagcagtttcggtatcgtactggtcagcgggattttcaccgcatttctgttatcgcctctggcaatgcccggtaaaaaagagaaaaaaagaagatga

SEQ ID NO: 78633 - DNA, 2487 bp, Citrobacter koseri
atgatgatagacaaatatataattaatccgtatccggccaggcttgtattgtttatctccctgggaatattcagcgtgctgaatgaggttctgggtcgggattactttaatccggcgctactggagcatatatcatccggtagcgagaatatcgatctttctggttttgaaatgggagggcaggcacagggcacttaccatgtcgatattatcctcaacgggcagtttctggacacgcaggatatcgcattcaataaaacaccaacgccttctggtgaggatgtgcttgagccctgcctgtcgggggaaatgttgcaacgctatggcgttaacatcgcgcagtatccgggtgtgcagggcaaaggggattgcgccgatttgtccgctattccacaggcttcaagtgagttccagttttcgacgcaaaagctgttgttaagtattccgcaggcggcgttatctgccagagcgcggggggatgtcgcgccggaactctgggatgaaggcattaccgccgcgatgcttaactacagtctgagcggtgataacagtaatagtcagtacgctaatttgcgccccggaataaatatcggcccgtggcgtttgcgcaattacaccacctggcggcgcagcggtcagggcgatgaggactgggattcgatttatacctatgtccagcgcaatatcgtccctctgaaagcgcaactggtgctgggagacagcgcctctcctgcggatgtttttgacagcataccgtttcgtggcggtcagcttgcgtcagatgacgacatgctgcccgattcgctgaaggggtatgcgcccgtggtgcgcggtattgcccgcaccaatgcgcagatcgtcatccggcaaaatggctaccaaatctaccaaagttacgtggcccctggcgcgtttgatattaccgacatgttccccacgggaggcgccggcgatctggaggtcacggttaaagaggcggatggcagtgagcagcacttcaccgtcccgttcgcatcattaccggtgttacagcgtgaaggccggttcaaatatgcgttaaccggcgggcgctatcgctccagcgacagtcgtgtggaacaaaccgatttcggccagggaaccgcgatttatggtttgccgggcggtttcacgctttatggcggcgtccagacttcccgtaactatcgggcgatagcgtccggcgtcggtaaaaatctgggaacgattggcgcgctttctgccgacgtaatccagtcatgggcgcaacccgctgatggcagcaagactcaggggcaatcctggcgtgtgcgctatagcaaaaatagcatcgcgacaggaacaaacttttcgattgcgggttaccgatattcaacgcgcggttactacggtatgcaggacgctttcgatacgtatggcggtagttccgggcagataacgaaacgacgtaaccgtatggaagccaacgtcaaccagtccctgggcgcaggcggcggatcgttggcgttaagcgcggtacaggaggactactggcataccggaaaaccgatgcagtcgtggagcgtggggtatcacaatgcctggaacggcgtgagctatagcgtcgcctggacgctgagtaaaaacggcagcggcgatcgttatgataaagaccaacagctggcgctgaatatcagcattccgctggatcgctttatgagcaatacctgggccagttatggcatgaatgccagcagcgggaagggcgcgactcatagcgcagggctgagtggaacggcgctggctggcaacgcgctgaactggaatattcagcaaggttacggcacggatgacgtggggtataccggtagtctgagcgcggattataagggtacttacgccgatgttagcggggggtatcgttacgatcgccactcgcagcgcgtgaattacgctctcgcggggggcgtgctggcatatgccgatggcgtaacgttctctcagcctctgggggaaaccaacgtgctgattggcgcgccaggcgcatcgggggtcgggattaaaaaccagagcggcgtacgaactgattttcgtggctacaccgtttccgccaatgtttcaccgtatcgcaaaaatgatatcggcctggatacggcatccgttgcggacgatgttgaactggcgctcaccaacaaaaccgttgtgccaacccgtggcgcggtcgtgagggcggactatgtcgctaatgttgggctgcgcgtgctgttgacgttgaccagaccccacggttcgacggtgccgtttggggcgatggtgacgttaaaaggcgcgcaagaacaacaatttattgtcggtgacgaggggcaggtttatttaagcggcatgccgccggaagggacgttgaatgtggtctggggacgtgacggcgagcagcgctgcacggcaaattattcattaaccgcagccgagaactacagcggcgttagcgtgaccggctctctttgccgctaa

SEQ ID NO: 78634 - DNA, 237 bp, Citrobacter koseri
atgcctggaagaaaacgctggctgctggccctgatgctgcttactggtcaggtatgggggcagggcgatccgatcgcattaaacatcaaagggaatgtgaaagccgcgccgtgtcaggtgagcagcgacagcatcactaaaaccgttgatttaacggcagggagtccggtaacggcttcatcaatgtataccgcagggtcaacgacgccgtgggtcagttttgatttcagcatttga

SEQ ID NO: 78635 - DNA, 273 bp, Citrobacter koseri
atgcggaaagtttcaatcaacggcgcggtttttatattcatggccagaggtgaaaagcttaaggattctgactggctaccctccaacggacttccagacagcaaatatgttttatggccacgcggtgaagggtgggatgtgcgttatctcgaatttgttacgaaagggatagattggttgcccatagcggagaatatttttagctcagaatctgaggcatggcaggcagcatacgggcactggatggagagggctaaaagatgtggctattga

SEQ ID NO: 78636 - DNA, 1677 bp, Citrobacter koseri
atgaagccgataaaacgcctgtacctttcaacggatgaaatccacctggctgatgccagcctggtgctggagcttaacagctgcggccgggggtttattacggccgggacaacgcaggattatacggggaaactggtgcgtctcgatgtgggttacaccgatctggttttgcgctggttcaccgggtacgtggagcgctcgcaacctgctgaaaatggtttccagcgcctgtttgtgcgtgagctggtcggcgtgtttgaacggctgtggccatgctcattccagcacccgactctgcgcgatgtggccagctggctgactgaacacagcggactgattttcagcgtgccggatgctgattattcagaccgtccaatcccgcacttcacgcacagcggtacgggttatcagttgctggataatctgggaaaggcctttggcattacggattacgtctggtaccagttgccggacggcggggtatatgttggaggcgcagaaaaagccctctttgcagatcgtccggttgagatcccccatgagtttaaccagggggcggccgggggtaattccatgacgattcctctggtgcagagtctgcgcccgggcgtggagctgaacggggagagggtgacaaaagtccacctgcaaaatgacgtgatggccgtgacctggacgccgcgcaaccgcgccacgggtcaggcactacagaaaacacccgtgcagcgccagattgaaagccattatccggagctggcatccgggatgcatttgccaaaatttgcccgcgtcatgaatcccgttgaggcggtgaaaagcggcaatttctccgatccgttccgtcctcgctatgcggttgacgtgcagctgttagacgcggacggaaacccggataaaaacacgcctgtatactctgctgtgccgctgccggttcctatggcgggtaatgattccgggatgttccagtttccacctgaagggacactggttgaaattgcctttactggcggaaggccggataagccctttgtgcgtcagaccgtgccggacggaaccagcctcccggatatccagcctggcgaacaactgcaacagcagcgtgcggaagtgtctcagcgcgtcacccaggcgggtgactgggtgaggcagacagaccagacgatcagtgaaacctcaatggcgcgggttgttaaggccgattcggaacagcgggagctggtcagccgggaaaccatgattaaagccacggataaaattaccgtgctgggcacgtccacactgatggccggtgccattcagcaggtatgcacgggggattacagccaggcagtgaagaaccgcgtggcgagtatcagcggcaatgatgaagcggacatcgccgggagccagacagtcacaacgggtaaagacctgatcgagaaaattggccagatacgtaaaagcgtggcggccgtgcaacagcagattattgccccggtggtgtggattggctctgacacaatcaacgtggcgcagctgatgctcgatacccttgatgtggtgaaagagcttgcagagcaaacggccagccacacgcacagcaatacgggaacaccgaccaacgcgggagccatccggagcaccggggcgaaagcggacaccctgaacgggaaatactccccggtaattggtaagtaa

SEQ ID NO: 78637 - DNA, 549 bp, Citrobacter koseri
atgacctcgaacccgacactggcgcttaacggcgaagccattctgctgaaaaacatgcgcgttaccgtttctcagcaatttcaggacaaagaccagtccggccagacgagtgccaccacaaaatctgagcagggcatcaaaggcaaagagctgcgcgtatccggcgaaattccctataaaaacccggagatcctgcggcgtatttttgagctgggcagcgctacagatgccagcggccagcgccagaaataccgcgttgcgcatgaggcggcgcgggcggtgaattttagggaggcgacattcaccggaaccctggacgcgccgccgcaggatgggcgcatgtcctggctggttacgttcacgctgaccgaacatatcagcgtgcaggaaaaacgtgaggccagggcaagcggcaaaacaaaggctgtgaagcaaacggccggaggcggcgacggccagaacgtgagccaggcagctggcgaggatgaagaaaaactgacgtggtttgaacgtaaggtgctcaagcccgtaaatgatgcactgggataa

SEQ ID NO: 78638 - DNA, 726 bp, Citrobacter koseri
atgtggcgtgaggcaaaaattgcattcagtgattctgttgcagcgctgaattgttcagttatcccggcgcatccgtgggtgtacgggcttggacagcagacagaaaacggtgcttacctcagcccggtaaatgcgattaactacctggctgagaaactggccggaacgggcggggtagctgatatcgtgatcataatggtttctggccagacacatgacagctttatgaccagcctggataagcttgttgatgtatttccaagcccggtattcacccaggtgcggaggctggcgcagtccgctgcgcaactggcaatggaaaagatgcaaattccagcaaaatacagtcagagtttgccagcgccgattccgctttccgtgcccacgagccgcactgccctggcggccgcagcggtgaagaaagcccagcaggaagccgcaaccgtcgcggatttaacgggcgtaaagaagctaatgggagattttaaacagcggcgtgaaagccttattgctgacattgccagcggactaacggaattacaggggaaaagcgccagagcatgggtatttactgccagcggggatctgccgtcaacgcttctggagctggttaaggggattccgcttcagtcctctgtatataccgccgccatgatgctggttggcgataatctcgacggcataaaaggaatgatacatgacctcgaacccgacactggcgcttaa

SEQ ID NO: 78639 - DNA, 456 bp, Citrobacter koseri
atggataatttagataaccttgaagttaattatttttttagtgccagcacaggcggcttttatccgtcaagtttacgcggggaatatgaagctgcgggatcgtggccagaagatgctcagcctatatcagacaaatggtatttgtatctgaacgatgggcagtctaaggggaaagtgattgtcgcggatgaatatggccagcctgttttgtccgaacctgcaccattcacagctgaacaaatggcgacgtttgctgaaaataagaaaatagagctgatgggcgtagcaagttcacgaattcagccattacaggatgccgttgaattaggggaggcgacagaagccgaagcggcgcagttaattgcatggaaaaaataccgtgtattgctaagccgtgttgatacaaatctggggacagaaccagactggccggagatgccagaagatgtggcgtga

SEQ ID NO: 78640 - DNA, 2178 bp, Citrobacter koseri
atgtcacagacagctattacactggcctttgaacagtggaaagccagccaggcggtaacaggcgaacctgttctgctggatgaatttgtttttgctaacgtgccggggctggatgtcagtaagccgattgatcgcaaagaaacgctgccacctgccgcgcaaatcgttcaccgtcaggccgtcagccgcaaaggcgtggtgaatgaaaacgccgtggttcactccgttgtactgggagcggacgtgggtgatttctcgtttaactggattggactgatcaacaaggcaagcaatacgctggccatgattgttcatgccccgttacagcagaaactgaaaacgaaagatggccagcagggcaatgtgctcacccgttcgtttttaatggagtacaacggggcacaggcagaaaccgggatcaacacgccagcggaaacctggcagattgacttcactgcccgtatggccgcgatggatgaacgtcagcgcctggagaatattgacctctacggtgctgcggctttcctggggaatggctaccttgttgcaaaaagtggctcgcaatattttgtgacggccggggcgggttatgttcgcggcttgcgcgcgcagctggccgagaaccagaacattacggtaactaccaagcccgtaaaggtctggctggatgtgtcatggacaggaacgctgacaagtgcctggggtgtggttagcaaaattacggtggcggctaaccttgccgattacgttcaaaacggcgtgcagcactatgtgtttgcagtggccagtatcgatgcaaatggaaacatttctgatttgcggcctaagggcagtctcgatttacaggatgttaatgcagatttcctgagaaaaaataaaaaccttactgatgtcgacgataaggaagaagcaaggaaaaccctttcagcagctaaaaaaggggataactcggacattacctctctttccggtctgacaactgcactttctttaacgcagggcggaactggtgcaaaaacagcgcgagatgcacgaaagaatctggagctgaacaggtttacccaggcagacgttgaaacccagatgttgtctcccagtggcgggcacgttttacggctctgggataatggggtttggggggtatttgatgtcgccgcccaggaatggacgccgctaccagttgaaaaaggcggcacgggtgcagtcactgcatctgctgcgagaaaaaatcttcaggcagcacaatcgggggctaatacagatattacgtctatttctggcctaacaacggcactttcagtgtcgcaaggcggtacgggggcaacctctgcaaaagaagcgcgtgaaaagctgttcgccgctgagcgcggtggtaattcagatattacctctttgtctggtctgacaactgcactttctttaacgcagggcggaactggtgcaaaaacagcgcgagatgcacgaaagaatctggagctgaacaggtttacccaggcagacgttgaaacccagatgttgtctcccagtggcgggcacgttttacggctctgggataatggggtttggggggtatttgatgtcgccgcccaggaatggacgccgctaccagttgaaaaaggcggcacgggtgcagtcactgcatctgctgcgagaaaaaatcttcaggcagcacaatcgggggctaatacagatattacgtctatttctggcctaacaacggcactttcagtgtcgcaaggcggtacgggggcaacctctgcaaaagaagcgcgtgaaaagctgttcgccgctgagcgcggtggtaattcagatattacctctttgtctggtctgacaactgccctttctgtttcgcagggcggaaccggagccaaaacggcagcaggtgcaagggcaaacctttatgccggggggattcctactgccctgaacgccgattccgggtggtggaagtgcgcagatacggggcgcatttttcagcacgggaaagtggtaattaaggccggtgggcggatcacatttccagctgcatttccgaataaatgctgtgccgtgatcctgacggataacgacggatataaagattgtggtgtgttgggcgcaaccactacctacgcaccttttaccagtaaccaaagtgggctggtgaccgtgggctattttgcagtcggttattaa

SEQ ID NO: 78641 - DNA, 588 bp, Citrobacter koseri
atgactgattttctcaaaaagctggccagcatggcgctgccgtcctggatgaataaaggtgagccgctggctttattgcgcacggcgcggacgttttgggcggaagtatacagctggataacttggccgctgcggcagtttgatccgctgacctgcatcgaaccggtactcaatctgatcgcttatgacagggacattacccgttttagtggtgaacctttaacgctgtaccgcaagcgagttgcatacgcctttgtgaatgcgcgtgatgcgggttcggtagacggttttattaacattttttcacgcctgggaattggttatgtggagctggtagagcgccagccgggtatcgactgggacgtgattctggttcgcgtgactgatagccagatagccagcaatacgcagctgatgattcaaatcattcagcaatacggcagaacctgccgccgctatcagtttgaagtgatcacgtctgaaagtctgattatccgggcagggtgggatcagggggaatatgtggtttatccggcacgtctgaacggtacggaagccagcagcgcaacgtttagcgcgagtttatag

SEQ ID NO: 78642 - DNA, 1185 bp, Citrobacter koseri
atgacagaaaagccgcaggtagattttgaagaggtggtgaagtccagcgggatgcccgttacggaagaggaggttcgcacccgtttcaatgccatcgccgcccaggaagggctcattactaacacgtcgcgcatgtctccgttctggcggctcattaccgcgattgtgaccgcgccagtgatgtggctgaaagatgcgctggtctctgtggtactgacaaacatgtttgtggccacggcaggcgggcagatgctgcgccttctggcctgggcggtgaacgtcacggccaaacccgccagtgctgccgaaggcgtgatccgcttctacaaggaagatgcgaaacaggctgtgacagtgacggccgggacggttattcagaccgaaaggattaacgggaaaatttacgccgtggccacggtggccgatgtggtgatcccgtccggtacaaccagcgctttactggccgtcaaagcaaccggaacaggcggggcgtacaaccttgcgccgggttattaccgcattctgcccgtggccgtggacggtatcagtcatgtggcaagtgaagaggactggctgaccgttccgggggcggatgaagaaagtgatgatgagctgcgcgagcgctgccggaaccagttcaaccttgtgggtaattaccataccgatgcggtttatcgttcgatgattgccagtgtggccgggctcagcattgacaggattttctttcttcacgatgcgccccgtggacctggtaccgcgaacgcatatttattgctggatagcggggtaacgtctgaaccctttatcgaagcggttaatgactacatcaacacgcaaggccatcacggccacggtgatgatatgcagtgttttgcgatgccggaaacccgacacgatttgagcgttacggtttatgtccgaaatctgagcaacatagaccaggaaaagcaggacgcgctaaagaaaggggtagacaacctgatccgctgtgccttcagggaaaatacggactatgacgtgaaaaagacgtggccatattcccgcttttcgttttctcagctgggacgcgaaatacacaaagctttcccggatgccgattcggttgagttttcactgaaggacataaccagtgagctgagcgtgccacgtcttaaaaccttaaccgtgagtctgatgaatgactga

SEQ ID NO: 78643 - DNA, 330 bp, Citrobacter koseri
atgagtgatttgctttacatcgatctgctgattgaaaacggtaattttgtgctgaataccgggaaagagcctgagctgtgtaataaccgaaaaagtatcgggcaggacattattcacagcattctggaaagcggtcttgccacgcagctggttggcgagcgtagcccgactttacgcgctgatatcttcacgcagctggaactgcttattgaagaggatgaacgtattgtgcctggcacggtggaagtgagtgaggaaagccagaaacgtttatgggtgacggcgagcacgtatgactttggcggaatatcggcgcaggtggatttatga

SEQ ID NO: 78644 - DNA, 2274 bp, Citrobacter koseri
atgaaacagttagattttacattaagcctgatcgataaattgtcccgccctttaaaacaggtgcagaacaatgtgaccggctttgcggaaaaatcgacggcagcgtttacgaagattggcggcggcgtgctggcgctggccggaacgggaatggccatcaaaggtgcgttgtctccggctatagaaatgtatgacgcgctgaatgaggcggccgcgaaaggtatcgacgattcgacgcttaaaaccgttcagcgggatgcgctgacgttcagcgccacatacggcgccagcgcggtggaatttgtccagtccactgaatcaatcaatgcggccatcgccgggctgaccggaaatgagctgccgaaagtgacaaaagtcgccaacgtcctggcgtttgccatgaaatcaaccgcggcggaaacgtcggaatttatggggcagatgttcggtaacttttcctctgaagccgcacgcctgggcaaagtgcagttcgctgaacagctggccggaaaaatggtttacatgcgcaaaacgttcggcgcggaaatggccactatcaaagacctgatggaaggtgcgcgcggggtggggacaaactacggtgtcgggctggatgaacagctggccgtgctggggcaactgagccgcacgctgggaacggaagcgagcagtgcctacgaaggttttatgacgggcgcgattgatggcgctaaaaagctggggctgtccttcactgacgctaccggaaaaatgctgtccatgcctgaaatgctggcgaagcttcagggcaaatatggcaagagcctggaaggaaacctgaaagcacaggcggagctggatgaagcctttggggacagttcggcggtggtcaaacagctttacggaaatgtggctttgcttcagcggaatattaccgagctgggtggggcggacgggctgaagcgtacccaggaaatggcggccaaaatggttaagccgtgggatcgcttcattgccatcctgacggccattaaaaccgtcattggcctgacgctgatcccggttctgtatccgttgctgaatcgcctggccgatatggggcagacttttgcccggtggatgcagctgtttcccaatatcgcgcgggtggtgggttatgccaccctggcgctgctgagctttgccgccgtgggagccgtcgccaatatcgtgatgggtgtcagcacctttgtactgatgggggtaacgaaagtgctggcgccagtggccagactgctgggactcaatcgcctggcaatgctcgccagtaatgccgtgacgcagctgtttactgccggattgagggggttacgtgccgcactcctggccgcaagtattgctgcgcgcgtggggtctgcctcgtttttactgatgattgccccgattgcggccgtggcgctggccattgctggcgtggtgctggcggtcattaagttctggcaacctatcaaggcgtttattagcggttttatcagtggtttcagccaggcaagtggtgcactgattccgtttaaagggctatttagcggcatcgccacggctgtgggctgggtctggagcggcgtgaaaacgctgtttggctggtttggaaaccttctgtccccggtacaaatgaccggggaaaaactggctggcgtgaccagcgctggggaaatctttggtcgcgtcgtggcgggggcggttggcctggttctgactccgtttgagctgctttatcgttccattcagatggtcattgagatgttcgggattgtgattgagggctggggtgatgtggttaacgcctttgatattaattcccctgtcgcctcctttgaaaaaatggccagcgtgatcggtgatgtgttcgggaaactgtgggacaccctgaaaggttcatttaccggaacgtataactggattattgaaaagctgaataaaattccgggagtggatattgccctggctgctgattcaggttcgggaccaaataagggaataccctttaatcctaaacagcttgaatatggcgggaatattacgcagcagttaacgcaaaacacgttattaccagagcctcctccagcgatcgccccaaatgtgcttttaactggcggagaactgaaaggcgtagagcgcggcggaatcagtaaaaccataaacagcagttctaaatctgttacggacaacagccgcagaattgacacggtgaatatttttccgaaagaaacactttcaccgggacaattgcaggagtggcaggagctaaacccatga

SEQ ID NO: 78645 - DNA, 261 bp, Citrobacter koseri
atggaacagaaaattactctggtagtaactggtaaagaaattgttttcgcaccgaaccagaccgcctataacaaattcatcaatgaaatggcaatggataacaaagttgccccggcgcataactacctgacccgtattgttgagccggaaagtaaagacgcgctgattgagcttttaaaacgtccgggtgctgcgttgcagctggctggaaaggttaatgagatttacgcgcctgagctggaaattgaagtaaaaaactga

SEQ ID NO: 78646 - DNA, 369 bp, Citrobacter koseri
atgacaaacggccagtggctggtagtggttgcgctggcgtttgtctggggctggctgaccgctgactggcggcgtgacagtctggagctggcgatcaactccgccgcgcaggttgcgggtaacaagtcccaaaaagcgatgctggagattgccagcgaatccgccagggggctggaagataaactggaggcgctggaaagtggcagaccgaaggaaatcaggacggaaatacttaagccggtattcactaacgtttgcgtgtctgatgagtttatccggatgtataacgcaaccgtcgaaaacaccgaacgtaccctttcaggaaaacctgaagcgaaaatgcccaacggaaaatcttccgcgcattaa

SEQ ID NO: 78647 - DNA, 342 bp, Citrobacter koseri
atgacgttaagcgagaaacagcagctgtttaccgtgatggtggccaatctgatccactgggcggaagagcacggctatcgtctgacgtttggcgaggcgtaccgcacgccggaacaggccgcgctgaatgctaaaaaaggcagcggtatcacaaacagtctgcatacccagcgcctggccgtggactttaatctgttcgtgaatggccagtacaaaacagacaccgccgattatctcccactgggtgaatactgggaatcgctgggtggtacgtggggcggccgcttcaaatcccgtccggacggcaatcacttcagcctggaacataacggggtgcggtga

SEQ ID NO: 78648 - DNA, 294 bp, Citrobacter koseri
atgcaggagtatgaaaaagggtttatcgcgctggctctgatgggggcgctgattgctctgggcaaaatgcttaacagtgacgagccgatcacgttacgcctggttctggggcgcgtcattgtcggtagcgccttatcgctggccgcaggggttgccctgtactttgtgccggacattcaccctctggcgctcgccgggattggttctgcgctgggtattctggggcttaacggtgttgaagcctggctgcgtaaaaaggggattaactttctgggtaaaggagtggggaaatga

SEQ ID NO: 78649 - DNA, 1128 bp, Citrobacter koseri
atgacctggccaaatgtgaccgttaaccaggtaaaccagttactgggtgaaaccaatgaggttgaacgcgcggtgctgtttatcggtacgggaaccaaaaatacaggcaagaccctggctgtaaacacccagagcgattttgatgcgcttctgggtgaggatgacagccagttaaaaagggatgtgctggcggcagtggcgaacgctggccagaactggtggggattcgtccatgtgctggcggctgacagtgagccggaagcgtgggttaaggctgtgctggccgcacaggtttcatgctcggttgaaggtgtcgtgctgagcaatgacatttccacgaaagcggaaattaaccaggccattaccctgcgtgcgaatctgatcgctaaatacggccgctgggtgtggttcattctggccacgcagggaatgcaggaggaagaggggcaggcggaatatctggcgcgtatgtccatccttcaggatggtattgcggaaaaagcggtacagctggttccccgtctctgggggaatgaaccgggggtgctggctggccgcctgtgcagccgtgccgtcaccgtggcggacagcccggcgcgtgtcaaaacgggggcgctggtcagcctgggcagcgatgaactgccgctggatggcacaggtgcagtgctggagctggccacgcttcaggcgctggaggcgcagcgcttcagcgtgccgatgtggtatccggattatgacgggttctactggtcagatggtcgcacgctggacgtggaggggggcgattatcagtccatcgagacgctgcgcgtggccgataaagccgcacgccgggtgcgtctgctggccatcggcaaaattgcagaccgttcgcttaacagtacgccgggcagcattgccgcacaccagacgctgtttgcgaagccgctgcgcgaaatgtccacggcagcaaacatcaacggggtttcattccctggcgaagtgaagccgccgcaggatggtgatgtgaccattgtctggaaaagcaaaaaggcggtggagatttacattgtggtgcgcacctgggaagtgccgctgcaaatcaccattagtctgttactggatgccagcctggaggccgccgcatga

SEQ ID NO: 78650 - DNA, 708 bp, Citrobacter koseri
gtgattgccggaggggagcttaacaagcgccagctggcggagctgaaaaaggcgctggccagcatggagctgccgcccaaaaaacggcagcggctgctgtggcgaatggcgaaatacggcgtgattgccgcagctaagcgcaacgtgcggaaccaggaaacaccggacgggggagcctgggcaggtcgcaaaacaaagcgcaaagggaagatgctgcgcaacatgccgaaactgctgcatatccgggaaatgcctgaaattcaggctgtgcggatctacctgcagggcggcggctaccggaacggggaaacgcctgtacccgctggcacggtggggtattcgcagcaaaacggcatgcgtgtccgggtgagtcgtgcaagccagccagggaaggcacagccgggcaagatggccaccgctgcgcagggaaaaaagctgcgtgcgctgggctaccgggtgcgccgggggaagcgctggaaaaagcccaccattcgggaaataaccagcgaaatgccatatgcacaggccgggttgcttatccggaagttaagcggtaaggccgtaaaaacgagctggactatcgatcttccttcccgcgtatttctgggaatgggtgatgaggactttaacaaggcgctggcacgccagcttcaggccataggctttggctgggatgtaaatgcgcaggatatcagggggagaacatga

SEQ ID NO: 78651 - DNA, 507 bp, Citrobacter koseri
atgagccagacacagcttgacaacctgacggcgttttttaccagcaacgtaccagcccgggcgatgaaggcttttggcagcgtagtggatgaaatggagttcgtaccggctgcaaaggatttggggctggggcagtaccgccaggcggtgatccgctatgacgcggtgctgagctgggagcgtttcccgtatcgcctgtgtccgccgcagttgcttatgtcgctgatggctgcctggctcgatgaggcagacagggaactgctggaagaaatcggggtaactgaggccgatccgcagtgggatgtgtcggtggccgatgaagaaaccgccgatattgtcctgacggttccgatggcggaagagctggtgatccgtgaggacgaaaacggattaatcccctggcaggggaaacgctggtcgcttgttgagccggagatctggacggcactgacagcaacggtttacggcgtggatgaatccggtgcgcctgtgggcgatgtgccgtga

SEQ ID NO: 78652 - DNA, 453 bp, Citrobacter koseri
atgtttagtggaaagccgcttgtttatcaggatgagccgctaaaaaacgaaggattctggccagacctgaacctgaaggactttcaggcacagcgagctatcccggctgatgttgacgcggacactgttgcccaggcgctgctggcggccgtggcggaggtgaatgcggaactggaaaaagtggaagccagctggaaggcaagaggggttctgagcgcaggggacgcgccgggggcacggatgggagagttaaacaccctctgtgcgcagtacacaaaggcggtttttgccagggcaaaagcggacctgttgggagagtttgccaccgttgggcggcgtgattctcaccctggccaggaaagcgcggaaacccgcgccgggttactggcagaggcttctgttgtgatccgccgcatgaaagggctgaaaagggcaacggtgaagaaagtatga

SEQ ID NO: 78653 - DNA, 702 bp, Citrobacter koseri
atgtctctttctcccgcgcagcgtcataaccagcgcatagcgatggaacaaaagctgaagcaaagcctggccgttggcaccacggaaagcatgcaccttttgattaaggcgctggaaaccgatgtggaacaggtgcgaagcctgccgctgattgcggatcgcattgagcataagcgcaatgtgctgctgccgaaatgggttccgactgtggaagcgtatctggccagcggccaggtgtatgccaatccggttctggcgtggtgcgtgatctggctgtttgacgtgggcgatctggataaagcgctggaatgggcagatatcgctattgcccagcaacaggccacgccggaacggctgcgcagcaattttcccacgtttgtggccgatacgatgttggcctgggcggaggagtctgcggggcgcggggaaagcattgagccttatttttcacgcacgtttgagaatgtggccaccaggtggcggttgcatgaacaggtaacggcgaaatggtacaagttcgccgggttgcagctgctgcgcggtgaggatggcaagaaaacagcggcgggtgtggatgatgtcgagacactccagaaagccgatcagctgctggccaccgcagaacagtattacctgaaaatcggcgtcagaacgcagcggcagaccatcgccgcacgtatccgaaaactgacgcagggttaa

SEQ ID NO: 78654 - DNA, 1023 bp, Citrobacter koseri
atgttactgaataaccgtgcgcgggaattaatggagaattatacggcaggggtagcgcagcattttggcgctaaagacccaggccgttacttctccctgaatgacccgcaggaaaacgcattgcgtcaggccatgctggagtctgtagagtttcttgattggatcaccgcgctggatgtagaccagctgagtggtcaggttattaatgtgggcgcatctgcccttcacaccggacgcagcgaaaaaggccgtttcgttcgccaggtaggggttaacggcaatacttactcactggttgaaactgacagctgcgcggcactgcgctgggatctgctttccgtctgggcgaacgccgggaaagaagaaaacgagttttataacctggtgcagaccttcagcacccaggcgtttgccctggatatgctgcgtatcggctttaacggtacacaccgtgcaacgactacagaccctgaagccaatccaaatggtgaagatgtcaacattggctggcatgaaatcatgaaaacgatgctggacggtaagcaaattatgaccgatccggtagtgctcgatcaggccggtgattacaaatcgctggatgcgatggcctctgatctgattaacgcaaaaattccggcacagttccgcaatgacccgcgcctggtggtgctggtaggtgctgacctggtagccgctgaacagtaccgcctgttccaggctgcagaccgtccatcagagaaaatcgcggcgcagatgctgggcaatacgattgctggccgaaaggcgattattccgccgttcatgccgggcaaacgtatggtggttacgccgctttccaacctgcacatctacacccagcgcaatacgcgccagcgtaaatcccgctttgaagatgatcgcaaacagtttgagaacagctatctgcgtaatgaaggctatgcgatcgaagtgccggagctgtacgcggccattgatgaaaatgccgtgaccatcggcaagccgtctgagcctgtggagggttaa

SEQ ID NO: 78655 - DNA, 795 bp, Citrobacter koseri
gtgtcgcatttaaaaactggctggctgtgtgttgctactgaaggcgatacggttgatggacgcgtgctggaacggcaatggattatcgacatgggagaaacctatgaccctgaccattacgccgccttaatctggccggaacatgagcgctacgccggaaactttggcgaagtgctggaagcgatgtggcaggacggtgatgacggactggcgcggctgtatgtcagcctgtgcccaaacaagcgcctgatttacgcaaacgacgaaggccagctgttgtatttctccgtagagccggaactgaactggcgcggaggggatcgtacatatctgaaggggctggctgtcactgacaatccggcaagtgtgggaactacacggctgcgctttagtcggcgcaaattaaacaaacagggatattacagttgtgtgatttcccgtaacggtaaaattacgcaggaagggaagatgaaaaactggcagaaaatgtttggtattaagccgaaatttgaagatgaaaatccgcaggatgatccacctgctgatgataaattgcaggcgctggcgagtgcgctgaatgatctggaagcgcgtgtgggtaaaattgaaacccagcttaattccgtgcaggacggtgtagacactattaccgaagtagtggacacggaagagtttgccgctattcgtgacaatgcaaaagagattgttacccgatttaacgaactgggtaataaaggtggtcaacgcaaactgcgtcaggtaccagccaaatccggtaaatttaatttcctttaa

SEQ ID NO: 78656 - DNA, 1053 bp, Citrobacter koseri
atgagcaaaaagaaacgctttgtgaaacgcggacagcgcggcgacaaatcaaaaaaaatgagcattatcagcttcggcaagccagaaccggtactgaccaccggaaccgattaccgggatatctggtacgacaacgccgccgaccactacacccagccgatagaccgcctggcgctcgcacagcttatcaacctgaacgggcagcacggcgggattatccacgcccgtaaaaacatggttacggcggattatcagggtggcggcctgacgttcgacgagctggaggcggcggtgtttgattatctgacgttcggggatatcgctgtggccaaaatccgcaatggctggggtgacgtgatcgggcttcaacctttgccggggctttacctgcgacgcagaaaggagaaagaaaacacggagacggtaccaggggactatgtggttttacaggaaggtgagccgctggcgttcccgcctgaagatatcattttcatcaagatgtacgacccgcagcagcacatttatggtctgccggattacatcggcggcgttcactctgccctgctgaacagtgaggcggttattttccgccgtcgctactaccacaacggcgcccatacgggcgggattctctatacccgtgaccccagcatgacggacgaaatggaggaagagattgaacagcagctgcgggacagcaaggggatcggcaacttctctaccatcctggtgaacatccctggcggcgacggtgacgccatcaagtttattgagatgggggacatttcggccaaagatgaatttgcgagcgtgaagaacatcagcgcccaggacattctgaacgcgcaccgcttcccggccgggcttgcgggtatcgttccgcagaatactgccggactgggcgaccctgaaaaggttgaacgaacctacaaaaagaatgaagttttgcccattcagcgccgcctggcgatggccatcaacagcgatccggaaatcccgccccatctgcatctgaattttgcaatggaaacaacggataagggtgcagcatga

SEQ ID NO: 78657 - DNA, 270 bp, Citrobacter koseri
atgagagtcctgaagattgaatgtccggagtgcggctcaaaggctgtgattcgcaagacaaaccggaaacacagaaagattgctgatatctattgctcctgtgctgacgtggagtgtgggcacacttttgttatgaatttgacgttttcccacaccctcagccccagcgctaaaacgggtgacgttttagtgaaaactctgcttcaaaacttatcacccgatcagaaacaaatggcgttggatttattgaagtccgctcccaccgcctga

SEQ ID NO: 78658 - DNA, 213 bp, Citrobacter koseri
gtgcaggacttattttttgaaaccgttgcctttcaacggatcgctttggttgcaaaattaatggctaccgcagaatgtactgaggctgaaaaagatgtggctctggcctggctgggagaaatgacgcaggaactgggaaggaagcttgatctgtatgaaaaaaaacacccccataatgggggcggttcaggcggtgggagcggacttcaataa

SEQ ID NO: 78659 - DNA, 2022 bp, Citrobacter koseri
atgacgcttgctgctaatggccaacatcacgccgtcgatgcctggcggcgtgatactttcgcgccaggaacgccagcgaatgcgacaattacagagcgccgtttgtgggcagttaacccacaggattatgaatggcgctcgcagttccttcatgagatacccgactggttagccgggtattttggcaaccgttatgaaaagctgtttgctggtcgtgacggccgccgccgtgccaatacatttctgcgcaaaacaattggcgagaatgtattgccacgtctgcggaaagtggctgcgcgttaccagctggccgctgatgtaagcgatcttccattcggaaagtcattgcagcgcttgccgtcgcttgaccgtaccgatctcaaaaagctgtctggccaggtctctggctggatggctcagatgttctatgacttcaccgacacgctgaagagcaagccaaaagacgaaagggaaatgcgccagcgcacgctggaggcttaccgcaatctttgctcgctttccctcatgctgaacaatcaaccaccttactgggcagagcacgaagcaaatgaaggccacctggaaacccgaaaagcagagtccgggattttgcgtctcatggcaccggaatggtggtatcagcgccttaagcgtgcccgtgatctgcaacgtgaacatctggccatcgccgttggccaggtgcagaaatctgcgagcgcctacgtatcacgtaaaaccctgggcgaatggatagatcagaagaaacgaaatctggagtttttcaaaaagtttgatctgattgacgaagagggcaaccgtattgcgctggacagcatggtacaccgcagcgttgctaacccggctattcgtcgctgtgaacttatggtgcgtatgcgcgggtttgaagatatcgccaatgaacaagggctggctggcgagttttacacaatcactgcgccttcacgttatcacgcggtacacagcaaaggcggctttgtgtctcagtggaacggattgagcccacgggacacgcagcgttatttatgcaacgtctgggcaaaagcacgcgcggcgatctcccgtgccggtattcatgtttttggttttcgcgtggtggagcctcaccacgacgggacaccgcactggcatatgctgctgttcatgcgtccgcatgacgttgaggcggtgcgggatattctttgctatcacgccagaattgccgattcagaagagcttcagacacccaacgcgcttaaggcgcgttttcacgttgagcctatcgatcccgctaaagggtcagccacgggctatatcgctaagtacatctcaaaaaatattgacggctttgcgctcgatggcgagcaggatgaagaaaccggggaaaacctacgcgatatggccaaatccgtatcggcctgggcatcccgctggcggattcgccagtttcagcaaattggtggtgcgcctgtgactgtatggcgtgagttgcgtcgcctgggtgatcagcgcctgactgacagccgtatggatgcggtgctggcggcagctgatgtcggggactgggcggcctatacacagttgcagggtggcgcactggttgcacgtcgcgatctggttgtgcgtctggcctatgaaatcactgaacagggtaacgagtacgcagaagatgttcagcgtgtgcagggtatctattctcctttgatccctgattccgaagtttgcacccgtctggttaagtggcagaaggttgcgaagttggccgaagcgccagcggaggcgggtttttctggcggcagcgccgccccttggagttctgtcaataactgtacggagggaggtgcccggagacggttaaaactggaactgaaccagcgagggtttgccggaacggatgaagaaatcgacattctgaagcggggcggtgggctcaaattcggccgttcagccctgatttaccgtgaaggtcggttgcaggagaagcggaacactccggaaaacgaacaatggccaggctggcagtaa

SEQ ID NO: 78660 - DNA, 858 bp, Citrobacter koseri
atggcagtaaaaacgccccttaaatgggtgggcagcaaagtccgcctgatgccgcagctgcgtggccatctgccggaaggaaaacgcctggtggaacctttcgcgggttcgtgcgccgtcatgatgaatactgattatgacgaatacctgatcgctgacctgaacccggatttagtcaatctgtataaggcgatggcctaccataccgacgcgtttcttgtggagcttgaagccctgttttctgccggggcgttaggtgaacaggagagccgcgctattttttactatgccgtccgggatgcgttcaatttgtcgggaaaggcacttggggctgaaagcgttgaagccgctgcccgtttcatgtacctgaaccgccacggctttaacgggctttgccgttacaaccgccgtggccagttcaatgtccctttcgggaagtacaaaaaaaattatttcccgcttaaagaagtccgcgcatttgctgaaaaggcgaagcgtgcaacgttcatcaccgcgcattactccgaaacgcttgcgctggttcgtgccggggatgtggtctattgcgatccgccatacctgacggaatcaggaaatttcacctcatacactgaaagcggtttttcacatcttgatcaggggcggctggccagaaagctgcgccgtcttgctaaaaagggcgtgagtgttgttgcgtcaaacagcgatctggaaatggtgcattacctttacgccgggtttgaggcggtgaaagtcaacgcgccccgcagtgttggtgccgcagctgcaagccagaaatctgccgcagagctgatcctgaaatcccagcttgaatccgttgcaagggctcgcgcatga

SEQ ID NO: 78661 - DNA, 234 bp, Citrobacter koseri
atgcaaatgactcgtcagaatttacccgcaacagaatcaggtattgacctgatggcgatgcttattaaagccacgcaggaggggaaggttgcagcagctgatctgtgttccacccgtctggataagctggctacctttgccgccaatgaagggctaagcgctgccgaaatcgtagagctgatccgtgaagaggctgcggccatttgcagcaaaggcggtccagcatggcagtaa

SEQ ID NO: 78662 - DNA, 402 bp, Citrobacter koseri
atgtccattatctctgtaaatgccaaagaactgggacaggagctggccgcgtggggtgttccacataattacgccattctctttctggagaaaagcaccgttaaaaatggccgtgtggccttacatccgtttttctttaacgacaccgagcacatgacaaacaaacgccactggctggctgtaaatgttgcgtactggtgctgtgtttaccgtgaagcggaaagccagttccagcaggttgaagcgctggccagtattcgttccatgtattacatcgccgggtcattgggcgctggagaagtcaaagcgctgatccaggagtggtggcgcaatacctacgcgcttcaccagatacccgcgccgagctactcagccgcgcccgttactgtctctttccactaa

SEQ ID NO: 78663 - DNA, 438 bp, Citrobacter koseri
atggccattagctcagaacagcaggagatcggcctgaagtggctggagtatatgcgccgtaaatactggagtgaaaaaagcgaagccgccgaatggtgggacaaattaacacctgaatggcgaggggttgttttacatgcagccgcagtaaattccgggtcggacgttttcaaagcccacctgtgtaaatgctgctggcatgagctgtatgcacgcctgaactaccgggaaatgattcaactgaaacaaggtatttcccgcgcccggttaacgtttgaggggttcgggagtttgcgtgacagcgatttttcccggcgcaccgccaatcgcccggcaaaggtggttaatccgatttacagcagtaacggggtgcagatggttgtggcacctcaattcgttagcaaaatgcaattgttgcaacagcaggagaatcactga

SEQ ID NO: 78664 - DNA, 195 bp, Citrobacter koseri
atgaaagcgttcgttacctacctgaaaaaagaatctccggccatgcaactggcaagcggctccactggatggattgagctgcccaatggtcaacgctggaatcctggccacgtacataaatttactgcgcatcaaccgcgccgccgttggtggcatcgcctgatgggattgttccgggggcgttatggccattag

SEQ ID NO: 78665 - DNA, 189 bp, Citrobacter koseri
atgaaaactacctccgcaacttatacagagaaccgctggatacctatcaaaactttcagtgagcgtgttggtatcaaattacgtactgcgcgttactgggttcactcggggaaagtgaaaatcaagccgaaggaaaaaccaaaagaacacgtttatgtagattggtacgcatggaatgcagaccgttag

SEQ ID NO: 78666 - DNA, 519 bp, Citrobacter koseri
gtgtacggtttcacttccaggcttcaattggctcaatacctggaaatgtctccaagtgctttgggtacaaggatcatgcgtgataactttcctgcggatcttgttttgagatgtgcgttagaaacaggggcatcaatctactggcttacgactggcgagggtgccacctttgaccacctggccagcgacacgcttagaatcccagcctttaaaatttctaataacgacttcattagagaatcgtcttacatttacgacaaagcagctctcccggactactcaggagagctacaaataatcaaagatgacaaagtaacctactttgtagatattttttcacatcaggcttctgacggtaagtatttgattgaatactccggcacaaagagcatcaaagaactgacgctgcttcctggcaacaaacttcgtattgattggggcaaataccctgtggattgcgacatttcagatgttgtgctgcttggtaaagtggttgcaacttatttggttaatgattaa

SEQ ID NO: 78667 - DNA, 1017 bp, Citrobacter koseri
atgacggtaagaaagacaccagagggagattggctttgcgatttgcgcccgaacggtgcgaaagggaagcgcatacgcaagaagtttgcgacgaaaggagaagccctcgcttatgaaaagtacatatcaaacgagcttgaagataaaccgtggctaggtgataagcaggataataggcgattatctgaccttattgaacaatggcatgcgttgtatggccgaaccctatcggactcagaccggatgatgtcaaaattgaagggaatctgtgctggtatgggcaaccccgttgcctcaagcatcactgctgctgatttcagcgcttaccgtgaaggacggctcaaaggggaaataccggatgtaaacgggcgctgtatgccaatccagccgcaaactgttaatcatgaacagagaaacttatcagccgtttttggcactctgaaaaaactaggtcattggtctctaccaaatccagttgctggaatccctacattcaaagttgatgaaaaaatggtttcttttctgtatccccaagaaatcaaaattcttttggatcatcttgccgaatctaatagttcaagtgttctcattatctcaaagatatgtcttgctacaggggctagatggagtgaggccgaaaatcttgaaggttcacaggttacgccctatcgcataacgtacaaaaataccaaaagtggaaaagtccgctcagttcccatctctaaagaactctatgaagaaataccaaaaaaacgcggacgcttgtttacaccgtgtagaaaaaccttcgaacggattgttgaaaaggcagggatagagctacctgaaggacaatgtacgcacgtactacgccataccttcgccagtcactttatgatgaacggtggaaacatactcgttttgaaagaaatcctaggccactctgatataaaaatgaccatgatttatgctcactttgccccaacccatttagaggatgcggtgacaaagaatccgttagcaaacctcctaaaatga

SEQ ID NO: 78668 - DNA, 816 bp, Citrobacter koseri
atgaaattggaatcatccttaaaacatttcagccctcaggggatgcacatcagcgacagcgtgagaggcacatcaccggatcgtataaccggtactgatgtaatggccgctattggggccaccagcagccgcgcacgattcggcctggctgctttcttcggcaaggcggggatcagcaagacggatgagcaactggcggttcaggcgctggcgcgtcacgcgatggataccgcaccgaagaacgtcaggaagggcgccggtagtgagttcggctggtgcatgcaggtgctggcgcagtttgcatttgctgagtattcccgttctgcggccaccagtgcgacatgtcgcagttgcaatggttcggggtgtgtaacggtgacccggataatccgcaaagtatcttacccgtggggtaaagctccatactgggccagcaagtcccgcgctgttcgtccttcagactgggagcaatggaacgaggtcacagagagtgtccccgctgtttgcgaggtatgtgatggtaaaggcattctgagcgctcgctgccgttgtggtggaaaaggggaggtgctcgatcgcaaggctacgaaagagcatggggcgccggtgttcaaaatctgtgagcgttgtggtggtgaagggtattcgagagtgtcttctgcgaccgttcaccgcgctattctcaaacgtctaccggccctccatcagtcgtcgtggtcccgcaactggaagccattctataaaatgctggtggatgtgttgcacaagggggagacacaggctgcgttagagtttgagaaggcaaccagttattga

SEQ ID NO: 78669 - DNA, 189 bp, Citrobacter koseri
atgaagctggatgtaacgaaggaagacgggcacaccataagcgaataccttcgcgctgcccacggtagctattccggtcctgtcttcatcgatattaaccggctggtggatttgaacatggtttacagccgcctggttgttatgacgtatctcatgaaacagcagtggttctggagggctaaacaatga

SEQ ID NO: 78670 - DNA, 312 bp, Citrobacter koseri
atggatcgtcttattcgcgaaatgtcgtatttattcaccaaaaagcgctttgaggaacttcaggaaacggcttgtgaaatagcgacaggacacagtgattttcctgaatgttttgggctcattgctgatgctatagcggaatttgttgaaggaactcctgaagatgaatggcgcgagcatgaaaaaatctttatgcattatgtcgttatgcgcgctctggcgctgtgggggcagggagagaaaataacggaagtccagtgggcacatcctggctggttcggtacggcagagaagggagataccatccaatga

SEQ ID NO: 78671 - DNA, 1356 bp, Citrobacter koseri
atgacaccggtatggaaaaacgatgatctggaaggtgcagtaattggcgcgatttttctgcgcggtgctgatcctgaagttcttgacatcatttcccgcctgccagcaagtgtttttaatgtctggcagtaccgtgaaatttattccggcatatgccgtcaggtgcacggaacgggaactattgaccccttactgctctgtgaaagcatgccggaacagagtgcggttattatggcgtcagggcaaatagcctgggcgaaatcagcgctggtttcctacgtttctgtgctggaacgtaacgcagctgtacgcgatgcggaagtggtgattgaaaatgcccttgcaggaatccgggcagcggccaatggtgagagtgcagttgaagcgctgaaatctgcacaggccagcatcgcgactatctccctttccgcaaacaccgtacagccagttcatattgatgaaatcctgcctgctgtcgttgatcgtgttgatgcccggcatcaggggctggagacagcaaaaagcctgctcactggcattgaagagctggacgagaaaacaggcggtattgaacccacggatctggtgtttatcgctgcgcggccatcaatgggtaaaaccgaactggcgcttgatattatcgacaaggtttcggagcaggggcgtggcgtattgttcttcaccatggagatggccagcattcagattggtgaacgaatggtatctgccgccggtggtatgtcagtttcccgactcaaggctgcggcgaagtttgacgatgaggactgggcgcggttatcaaccggtgttggtcgtcttaccggacgcccgatctggatggtggacgctaccaatctgacggttgagcaaatccagcaggtcgccaccagtcaccagattgcccacccggaaatttccctggtggtcattgattacctcttactcattaagatccagagtacggcacgttatgacctcgctgtaggtgaaatttcaaaggggttaaaaaatctggctaaggcaaaccagactcccgtaatcgcattgagccagctttcgcgaggtgtggagtcccgaccgaacaaacgcccaatgaactccgaccttaagaactcaggcgaaatagaggctgatgctgacatcatcatgatgctttaccgtgacgaggtatataaccctgagtcaccagcaagagggatcgcggaaatcaatatcaccaaacagcgtaatggcgttcttgggaccgtgtaccgtcgtttttataacggacatttcctcccggttgaccaggaagaagccaggcgaaaatcagcaccacagcaaaaatcacaaccccgacgttatgcaaaagcctaa

SEQ ID NO: 78672 - DNA, 885 bp, Citrobacter koseri
atgttaaatttgttgaatcagcagaaagatcgcgctgacctgaaggcaagacaggaacgcctgaacgaagaattaaattttgcactggagcataaacttccgtggggatatggcggctgggactcagggaaagccgagaccactacctgcgaaaaacatggcgaatttgagcgtttcactctggtgggaaaagattttcgcggcggtgagaattttaaacactcacaatgtccggaatgtctgcgggatgaacttgcggaggttgacgccaaattgcgtgacctgcgagttactgaactactggatcgtgctggtattgctcgtcgctttgagcgttgtgagtttgaaaactatcaatccgtgaatcaggatgccgcgaggaatcttgctgcctgccagcgttatgccgacacttggcaggagcgccttgcggctggcaccagtatggttatgacagggaactgcggaacaggaaaaaaccatctggctgttgctatgacgaaaagcatcatcagaaactacctcgcgcgggttgagattactgacgttatgcgactgacgcgtgcagtgaaaagcacatggcgacacggcgcagaaagtaccgaagatgaggtcattgaacgtttcgcatctctggatctgctgatcatcgacgaggttggcgttcagttcggcagcccgactgaaatgacaattcttcaggaaataatcaacgccaggtacgaaagtattttgccaacaatcctgatcagcaacctcaccctcgaccagctaaaagagacgattggtgagcgcatcgtggacagagttaccgatggcgggcgtaaccgcctggcctttggctgggaaagctatcgcgcaaacgccgggggtgtgactgcatga

SEQ ID NO: 78673 - DNA, 924 bp, Citrobacter koseri
atgagtagcaaaattttgggcaacgtctgggacgcatgcgctgcgcatgacgttaagggcgcgaagctaatgattatggctcgcctggctgactactcgaatgatgatggtgttagttatccaggggtggaaacaatctgtcgccaactggggctgggagaaagcacggtcaggacagcggttgcagaacttgagtctgctggctggttacgtcgtgaatcacgtcgcaaaggaaatcggaatacgtccaatctttactacctgaatgccgaacgccttgaggcgctggcacgcgctgaacgggataaagtttcagcaatgaaacagcaacgcagagcaaccagttttcacccgtcagattctgaaccttcaaattctgacccgtcagattctggacgttcatacggttttcacccgtcagattctgacaaaaaaggcgttttgacccgtcagaatctgaccccagatccacaaggtttaaaacatgatccacaagtaaattcaaaacatgaatcgcaagatattggcgcatctgctggcgcgcctgcaccaactcgctctgcaaaacaggattattcaacggagtttgaaacagcgtggcaggcataccctaagcgtgctggtggaaattccaagtcggcagcattcaaagcctggaaagcccgcctgaaagacggagttaggcctgaggacatgctggaaggcgtcaagcgctacgcggcatactgccgggcgaccggtaataccggcacacagttcgtcaagcaggctgcaacgttcttcggccccgatcgccacttcgaagagtcttggcagactccatccgctcccggaggtgggcgttgcaatgcgctacctgtatccggcttcagcgggcaggactatggcgaatcgggttgcaactggggaacggggagtatttaa

SEQ ID NO: 78674 - DNA, 825 bp, Citrobacter koseri
atgaatgccaccattaaaacgttcgactttaagtctgatgctggtgatctgctggcttcggttcgtactgtgcagattgatcgctctccgtggtttttcgctgttgatgtgtgtgaggcgttgggcctgagcgataccaacaaagcgcttttgtcggtagatgaagaggataagtgtgaacacgaacagtattcgggttcgggtcgtaaaccaatgttggttaatgaatccgggctttacacgctcattcttaaaagccgcaaaaaacaggctaaacgcttcaagcgctgggtcacttccgatgtgctgccatctatccgaatgacgggatcatacaatcttatcccgtctaataatcttcctgatttttccgatgaggttgcagctgctcgtgcgtgggccgatgaacgagaggcggcacggcgagcaattggatacgcagaacgccaggcaaggtacatccagcatctggaaaatcttttcagcccggggatgacccctacgcagttttgtaagcgtctcaacggcgtcaatgtgcagcaggtgacggcctttcttgaagaacacaactggctttatgacgatcgtcctgagtccaggcgtccggcgtggcgcgtaaaggcttatgcgcgcgatctttatctgaccgaacgccgccaccttgtcgagcatgatgattttgacagtttcgacacttatacccctgtcttactccgcaaaggagcggtgtggatttatcgccagtatctcaaaggtgctctgccgatgaaaaagagctggaacggggaatttacccacgacaaagaattagcaggtgcagcatga

SEQ ID NO: 78675 - DNA, 699 bp, Citrobacter koseri
atgaacacattctcagatcgtattaaaaaagcgatggctgacgccggcctaactcaggctgaattggctacgatggttggggtctcgcagccagctatctggcgcctagcctccgggaaaaccaactcatcacgtaagttggttgagatcgctcaagttctgggcgttagccccgaatggctttcgactggtaaagatcacacccctcataaacaggggtacgtgattgagaatatgaatgataaagagctgcgggctaactccgatgtattcagggttgaagtacttgatctttctgtaagtgcagggcctggcacatttatgctttctgaatttgttgaagttttacatgccatagaatacacgacagaacacgccaaatccctttttgggaatcgtagtgaagatgtcgtaaaagtaatgactgtaaatggcgatagcatggccaataccttcaattcaggagatcgcgttttcgttgacatttcggtccgtcacttcctcactgacggagtgtatgtgttcgtttttggtaaaacattccaccttaagcgcctccagatgcagggaaacagacttgccgtcttatccgacaaccccgcttatgaaaaatggtatatcacggaagagagccaagacgagctatatgtgatgggcaaagcaatcatgcacgaatcaataaattacaacaggctttaa

SEQ ID NO: 78676 - DNA, 234 bp, Citrobacter koseri
atgacaacttcatacccccccttattaagcaatgcaaaaaagaaaatcgatagcatcgtctgtctattaattgcactagagcattgtggctcatcactggatgaaacggttcttgagggggctatttcaggagttagaatgctagcttccgatgcatattgcaatatggattcggcagagaaatatattaactcgtctaaggcaaaggaggtgagcaatgaaaactccaattaa

SEQ ID NO: 78677 - DNA, 201 bp, Citrobacter koseri
atgaaaactccaattaacatgctcgaaagtattgccgctgacatcgttgaaaacacctcgttacttgaggttatttatcgcatcaatgaattaccaccagaagcagatcatgcaatcgcatgtttaatcagatcaatgcagaaaacgaatgaaactgcatgtgggtatattgaacaactcagcggtcaaggcggtgaataa

SEQ ID NO: 78678 - DNA, 186 bp, Citrobacter koseri
atgagcacatgtttattaggagccagaaaccgagtcaaacaagcagaagcagttctgaatcaatgggcggaaaacccgagagatgattatgagcgcacattgattatggcagtaatgaccctgcttgaaggtgttggggattcaattcagcaagcagaaaccaaactcgaaccgagcaagcagtaa

SEQ ID NO: 78679 - DNA, 306 bp, Citrobacter koseri
atgaaaaataatacagctttagaatttacaaagaatgcaatgggccaaatcgaaacaagcatcagcaatgtgtttaaagcgatcagctcacctgaacattgtggaatgcatctgcgatacaccggaacgacgctcgaatgtgctccttttgggacgggcaaatggcgtttattcaacgatacagatatcagccacctgcgtatcaccctcggcgagaaaggattcggtcgtatacggccagggatggtgaaagaggttgtagcgcttgttgcgcttggcaataccgagagcaaatcgagtttttaa

SEQ ID NO: 78680 - DNA, 2256 bp, Citrobacter koseri
atgccagagaataagatctggggggcgacgcctgacgaatggttccacttcgatctggtgctggggcgtactgaccagctgctgccggccgtgtgcaacccgggcgcgaccatatccccgaatagcaaactcaaaatgcttggcaaaacgccaagcctgtataaccgcgaccgcatggctaccggaatcaaggactggaccgagcacgtagtaaccgagcgtgactttgcacgctggtcgaacgaaccggattacggcatctgcgtgcgtacaggtcatggctggctggcgctggactgcgacagcgaagatgaagatatccaggccgatattcgcaaaacgctggtgcagctgcttggtaagctgccgccgcgtcgctggcgcgccaacagcaacaaatgcctgtacctgctggccgttgacggtgatttccgtaagcgcatccaccgtctggcgggtgatatggggattatcgaactgctggccaacggccaacagttcgttgcctgcggtacacacagcagcggcgcgcgtattgagtgggatggcggtctgccggacgagccgccggctattactgctgaccagctcgaaacgctgtggcagcgcctggcggatcagctgcctgtgtcggtcaccaccgaagcgggcagcacgaagatgcgcgaccgctccacattcacgcctggcgccacggatgagacggcggaatatctcgacgccaacggctggacgctgctggacggcgcgaacggcgagcgatacatccgctgcccgtttgaggacggccacagcaccggcggtgacccgaccagtacggtttactttccgggtggtaccgcgggctttgagcaggggcattttaagtgcctgcatgccagctgcgcgcaccgcgatgacggtgatttccttaatgccatcgggatccgcaatgacgatttcgaagacctgaccgcagatgaagaaggtgatagaccagaatttgtggatattaacaccgatatgaccagccacttccttgagcgctttatctacgttatcgaaggcgatcaggtatgtgatcttagccgaccgccatatcagtgcatgatggatatgaagtcgttcaaaaacctgatggcgccttaccagttcccgccagaagggaaggggcaacctatacccgcgacaaagcgctggatagagcaccggcataagaagatagctgagacgacaggctataagcctggctcaggtcgtattatcgagcgtttcgatggcaggtacgagattaacgaattctatatgcctgagcacccacgtaccgcagatacgagtaaggtgtccacgttccttaaccatatggcttatctggtgcctgacgcctggcagcgcgagttcttcatcgctcgcctgggctggatggtacagcgtcctgaaaggcgttgcccgatttccattctgcatgtggctacagcacatggtacgggcaggggatgggtcagccagttgatggagcgcgtgcttggcccgtggaactgcgctcgcaccagaatgaagatcctgtgcgataaccagttccatgattatctgtacaacacgttgctttgcaccattgacgaggtgcgagaaaacgataagcggtatgaggtgaacgataagatccgcgacgtgctgacagaaccacggtttgaagtgaaccgcaaatatggcagcaaaaagacgatggatatttataccggctttctgttctacaccaaccactttgatgcgctggcgctgccagaggaagaccgccgtatcgccgtgcttggtggccctgacttcgccgcaagtgaagagcattatgccagcctgtacggcgcgctgagcgacagcgattttatcgcgcaggtgtactggtatctgatgggtgtcgacctgtcccgcttcaactggcagcgcgcacctgagacgaaagaacgccagttgatgattgaaagcaataagagcgatgtcgaggctgctcttattgaaatcctggataacccgccagcgcctgcaatgacctaccagcaaatcgttaacgcgatactggcagaagcaggaatggacgtggaaattaaccagaagcatattactcgcgttttgaaagaacgaacaaagcgggaacctgtacgcgtaaaaattgacgggtttgtatataggatttggattcttgtaaaaaataacgagttcagcaacgaagaattgcgagaaatatataaatcttgcgaaattttgcaatctggattgtaa

SEQ ID NO: 78681 - DNA, 201 bp, Citrobacter koseri
atgattgagttaactcctaaagacatggttcagtccctgattgatgcagggtacacccaaagccagattgccgaagctaccggcgtagcgcaatcctcaatttgccgactgcttactggtgtgcatacagatccgcgcatatctaccgtcagggctttagagaatatgctgcgtaccgtcggcgaatccaaaaaggcgtaa

SEQ ID NO: 78682 - DNA, 678 bp, Citrobacter koseri
atggcatacgaatacgatgttgttcagaaaaacatcaaatacctaatggagaaagcaggtatctctagcgtgacggagctatccagaaaagtaaaaatgcagcagtctacgctgcagcgcatgcttgctggggagattaaagatccgaagtacattaccctgaaacacattgctgagttttttaaaatttccccagtggacctggtggaatgcgacctacaagccgaaaaaccacgaacagtagttgacgtggacggtgacccttatgattttgaattcagggaagtaccggtattaggtaatacccagctgggtaatggagggttctggacggatatgcaatacccggttggtaatggagatggccacatcagatggccttcatatgatgcagatgtttacgcgctaaaatgcgttggcgattctatggtacctcgtatcaaagaaggtgagttcgtaataatagaacctaaccacggttaccacccaggagatgaagtgctagtagtcaccgaacagggtgaagtaatggtcaagacttttctttttgaacgcgacggcttttaccatttactcccggtaaacgaaaaccacgctcctatcagattacctaagagttctgtcactaaaatccagtatatagcaggcatagctaaatcgtcgctatggcgtccctaa

SEQ ID NO: 78683 - DNA, 909 bp, Citrobacter koseri
atgagcttagaaacaaatctggaacttaataaccagctggtaacccgtaacaacgaactgctggaacgccttatcaccgcgctcgcctctggcgtacctcttcgcgcggacaccgtggcgcaggtgcaggaatatcgcgaaacggtaccggagacaggaggcggttctcctactctggatgatctgacattcagcgacgtaattgcgttggccggattctatcccgaaccacaggccatcaatctgaccatgttgcagcgcgcgatcgattaccgcgacgccgaaggcgataagcgcgttgtgcagatcgatgcgctggacagcgccctgcagggtgttaaacgcgctggacatcttaacaagccagcattacttgacctgtcacgtaacatcctgcgcttctgggacgatttgcctaccatcgcggcacgccgtgagtttgccgagcgtttacttgacgcaccagccgacgggcgccatgaagtgaagccgaagaaggcagacagcaaagacgaagaacgcacagggccgttctactgcaagaacgttgatggctccgccgccagcgagctacacaccttacgcaagctgaacgaactgcttaaaaagggccatatcgaaatcaccaaagttgaatatctccagctgcaggaagattttgcgcgtaaaaacacggcaaaaggcggtaccgaaacggttgatgacgccgggggtaatactggcgaacagaccgattttgcagcgctgcgtaaaaaggctgaagggttgatcctccagctggcgaaaggtggttaccgtgccgaagcggtggcgattctggaaaaacaaggtgccaaaaagctcggcgaagttgctgacgagaacctcgcagacgtgatcgctcaggctgaaaaagcactggagggttaa

SEQ ID NO: 78684 - DNA, 192 bp, Citrobacter koseri
atgcgaaggatctatatccggctggtcatcactctggctatcgccgcgctcgtttacggcttcctggttccttctctgatctcgatgaaggacaccgtagctgtgctgtctggtttcgcgctggcgctgaccgcgccgccgtgtctgtttgccattttcaaaggcatctttattactaaggaaaagaaatga

SEQ ID NO: 78685 - DNA, 837 bp, Citrobacter koseri
atgaagaaaattatctttgctgccgtcgtcgccctgtcggcgctggctctgtctggttgcgaacgcgccaccgttcccgcgggttacgtcggcgttaaagtggacctctacggtgacgaaaaaggcgttcagcagtcagaagtgggcgtcggtaaatattggctgacgtggaacgaagagatttaccagttcccgacgttcaaccagctgcacaactatgatcagccattcaccttccagaccgccgactcaatggatgtgaaagcccggatcggcgtcgaatattacgtcgaccccgagaaggtaaccaaaatattccagacctaccgtaaaggggtggacgaaataaccgaggtcaacctgcgccagaacatcagcgacgcgctgatcaaccactccgggaagatgaatatcaactcgctggcagccgggggcaaaacgcagctgctcgagcaggttacgcaggatctgaagtccaaacttgaccctatcggcatcaagatcgtgaagttgtcatgggtaagcgacctcgactatccgcaaaaggtgaaagaatccatcaacgcaaaaatcgaggccacgcagcgcgcgctgctgcgcgagaacgagatcgcccagtccaaagccgaagcccagaaggcgatcgagcaggcccgcggtgaagcagaatccaccatgttgcgcgccaaagctgaatcagacgccatagcccttcgcggtgaagcgttacgcagcaaccctgaagtactgcaactggaagctatcaataagtggaatggcacgctgccgcagtatctgaccagcggcgcagcaactccctttatccccttgaagtaa

SEQ ID NO: 78686 - DNA, 204 bp, Citrobacter koseri
atgaaatatgtctacatggtcatggatagccgtgcgcagttcgatatagaccgcgcagcggttctcgaatgttgcggcaacaagcaaccttcatggcactccctacgcagagactggggtgatcagggcgcagttctggtccgcttccgtctggttaacagcgatatggctaccgaccctgaggttgtcggcgtcatccactga

SEQ ID NO: 78687 - DNA, 393 bp, Citrobacter koseri; identical to SEQ ID NO: 76170

SEQ ID NO: 78688 - DNA, 1020 bp, Citrobacter koseri
  misc_feature (696)..(704): n is a, c, g, or t
atgaaatttatcccttatggacgacaggatatctctgatgaagatatcaatgcagttgtggacgtattgaagtcagattttttgacccaaggaccatgtgtaccacagtttgagcaagcaattgcagattatgtcggtgttaaacatgccgttgctgtgaacagtgcgacctctgcgttacatgttgcttgcctggcgttgggcctgaagaaaggtgactggttatggacgtctccgaatacgtttgtcgcttcggctaattgtgctttgtattgtggggccaatgttagttttgtcgatatcgatccgcaaacctacaatatgagtgtgagcgcgctaaaagctaaattggctactgctaaggctaacggcgtattaccaaaagttgttgttcctgttgctttcgcgggtcaatcatgtgagatggaagaaattcatcaactgtctaaagagtatggttttgccattattgaagatgcatcacatgcaattggcggtagttatcagggtgttaaaattggtaattctcgttttgccgatattacgatactgagctttcatccggtaaaaattataacgacagcagaaggtggcatggcgctcaccaactgtgattccctggctgaaaaattacagctttttcgtagtcatggcattacccgcgatggtgataaaatgacgaaagccacggaaggnnnnnnnnngtttgagggagtacctgtttccactcctcttcaatcaccaagtggctacagtgctctacatctttatcctctgacggttaacgatccagcacagcgtaaaccgctttttgactacctgcgtgataaaggaattggcgttaacgtccattatatccctgttcatactcagccatattatgaacaactcggacataaagcaggcgattacccgattgctgagaactattactcgcgcgcaatcagcattccgatgtactcgacactttctgatgaagagcagaattacgttatcaaatgtattcgggagttcttttaa

SEQ ID NO: 78689 - DNA, 285 bp, Citrobacter koseri
atgaataaatcatggcttgaacaacaggtgcaaaatgaaaaattaaaaaaagtacaggaagagaaaaaagatggcaccatcccaaaagaactgtacagagtacgtataaaagacaaatacaggtgggatttgtgggaaaatgattgcagaattgttattgcttattcgaaagatgatgcagaactaaaatttacgggaatgacaggttttaatgaccattactatatagaaagcattgaaaaaataacgttttcagatatagaaagactattactggaaaactga

SEQ ID NO: 78690 - DNA, 222 bp, Citrobacter koseri
atgaaaaaaacagtttccatttttactaatggtaataacagggcagtacgcatccctcgcgacatggattttgagggcgttagcgagctggagatttggagagagggtgacacacttatccttcgacctgtgcgcccaacttggacaagcttaaaagaggtagctaaggctgatcccgactttctgcaagatagggagaatgtcatcgatgaccaatcgtga

SEQ ID NO: 78691 - DNA, 327 bp, Citrobacter koseri
atgaaaattattaatgcacctgatgcaagaagtgtacggatcgccggaattgaaattatcgatagtgccaaagcggtcgcttctgtttttactgaaatcttgttgtttatggtctggtttccggcaattgtctatgggctttatcgtgttgttatcgctttgtgggatgcttccttaaagccgcaatcgctcatggagtttattaatttcatggttgagttatacagctatgtacttccttcactggctggtatcgcagtggctttaattgtcgttttatccatttttaaacggctctcagcaatatgggagggaagaaagcaatga

SEQ ID NO: 78692 - DNA, 906 bp, Citrobacter koseri
atgagacttaaagttatgatggatgtgaataaaaaaacaaagattcgtcacagaaatgaactaaaccatactttagcccaactccccttacccgctaagcgagtaatgtatatggcgctagcccctattgatagtaaagagcctcttgaaagagggcgaatctttaatattcgagctgaagatctggcttcccttgccaaaattacgccttcgttggcttacaggcagttgaaagaaggtggaaagattttaggagcgagcaagatctctttgagaggggatgatattattgctttagcaaaagagcttaatctccccttcaattcaaaaaatacaccagatgaattagatctcaacatcactgaatggattgcatattctaaggatgaagggtacttatcccttaaattcacccgtacaattgaaccatatatatcaagcctaattggtaaaaaaaataaattcaccacacaattacttactgccagcctccgtctgagtagtcaatactcttcatctttgtatcagttgataagaaaaaattactctaacttcaaaaagaaaaattcttttgtgatttccatagaagaattgaaagatgaattgattgcttatacttttgatggtgacggtaatactgaatataaatatcctgaattccctatatttaaaagagatgtacttaataaatcaattgcagaaataaagaaaaaaactgaaatatcttttatcggcgtttctgtttttgaaaaagaaggccgcaaagtaagtaaattacagtttgattttatagttgatgaagatgagttttctggaaacggtgatgatttattgacggcttttagtgaagaagatagtgcatttttaaaagaatttgataaagcagttcctcctaaaaacaagtga

SEQ ID NO: 78693 - DNA, 348 bp, Citrobacter koseri
atgaataaatttataacaattgatggccgcaatattggtaaagaccatcctccctatattattgctgaactttcggctaaccataatggtgatcttaatcgcgcattcaaaattatggaagaagctaaagcagcaggagcagatgcaatgaagattttcagattcatggcggattatgggatggacaaactctgttcaatttgtacaaaggtgcccagatgccatgggaatggcacaaacctttattcgaaaaagcaaaagaactgggaatcactatttttagtagtccgtttgatcatacggctgttgacttactggaggagttgggcgctcctgcatataagatag

SEQ ID NO: 78694 - DNA, 252 bp, Citrobacter koseri; identical to SEQ ID NO: 16616

SEQ ID NO: 78695 - DNA, 234 bp, Citrobacter koseri; identical to SEQ ID NO: 10869

SEQ ID NO: 78696 - DNA, 1713 bp, Citrobacter koseri
atggaaattgggttcccttttatgggggatcgtctcagcttatgtcgttattcttgggctaagaggctgacggtttattcctttattttttcctttctctgggtttcctttccccgatattcatattcatttgtaccagcaattgcagcagtggctgcgcgggctgttattcctaaagtcgttggccgggtgcttgttcgtcgctttgctgccaatgatgcgatttatacggcatcacagcttacagcaacccgtgtttttgttggccgcgctgcggctaatgctgccgaatacttgcctgctgcctcatcatacaaaatgagcggtgttgcaacgtgggcgggtattgctgctgctgtatcatcttttgttccgtcttctttgagttcatctgacggctcggtaatggtaatgactaacggtaaaaagatttccgataatttatatgaagtaacgtacagtggtcaaagtggtgaaagtaagacgataaccgttaattttgaaccacaggaattaagtccggtaatccttcatgttagtcgtaataatgtggatgcgggttctccagttgtaggtgttgaaacaggatattccacgccagataatgcgctttattattatcaggattcgaaagagctaatttattactatggtgataatccaactgaaattgccagaaattatcttaatgactataactcgcgtacttatactgaaacactaacgaattttgaacgcactgtgacgaataaagttgtcaacagtaatggagatgtatcctttactgaacagaattataagtttacttatccttcctcattttatgaaatacctgagattacacacttgtatagcaacccgtccgcatcttcatttcccgcaggtattcccatgtatgaaaatgtagcagggcttcccatgtattacagcgttgcttatttaacagcaggcaagcaatatcagtatcacaacacgccttgtaaaacgactaatcagtcaaatggtggatattcgacgatttgcgccgttcctgaaaaagaggattacaccgcaaaagatattgatgaaaagagtgagcttactatctggaccaataccaaatataaagccatgacggaagtactggaggccggaaatattgagtccatgattgattatctggagtatcttgatagtgttagtgtatcgccagcacttcttgccgacatgattaacgagctgtggtctgaagctgccgttaatgccgattataacggcttaccgtttaaagaggtttcaccggctgaagtaacttctgcgatgtcggaacttaggctatctccaacgttattagatatgctttcacctgtatctgacagtgcaggggctgacgtcaatattgatattaccattaataacaactcagggtctgacactggaaataatggcaatatagctttgggagaagatcccggtgtaaaagagcctgagcttgaagaaacgccaacggcaagagatattttaacgccaattattaacttgttgccttttacaaacgaatttaacatcggctctcgttcagcatcctgccccgttgttgaattcagcgtgtttaatcaccagtacagaattgactcccattgtccgttaattgagcagaacagaggcgccgtagaaaccatatttctgattatatggggatttgttgcgctccgtattattctgagtgcctaa

SEQ ID NO: 78697 - DNA, 288 bp, Citrobacter koseri
atgtttgggattctgattagtgcattaaatactttgttaggttttgtattccggtcattgattattaaattcgtcgtattctttgcgctgtattttgtagtccagggcttcgttgaaatccttgttgagttactgccagattcaagcaatctctcatcgctgtttgccaatttatcagacggattctggtacttcattaatctgagtaaattaccacaggggattagtatgattatctccgcaatggctactcgttttattattcgacgtattcctgttatagggtga

SEQ ID NO: 78698 - DNA, 1026 bp, Citrobacter koseri
atggctatttctgcatatattggcatacccggctcaggaaaaagttatgaagccgtttgcaatgtcattattcctgcatttaccagcggccggagagttgtgacgaacatttatggtttacaaaaagataaaatcaccgaacgttatcctgatgcaacgggagaaattattgttgtggataatgatgatgtgcttaaaacagatttctttccttttaaaggtggggaagggagcttttgccagtttggtgatttaattgttattgatgaagcatggagaatcttcggtagcgataaggatatgacggctgagaagaaatcatttattgctgaacatcgtcattttacgcaccctgaaacgggtattagctgtgatttggttattgtaaatcagtcactttctaatattgctcgctttctgaaagacaaaatagaaacaacttaccggatgcgcaagctgaaagcgttgggcctgaataatcattactgcattgacgtatattcaggccacaaaatctataaaagcaacctcgtcaccagttatcgcaataaatataaccctgatatttttgaactttataaaagctatgaaggaaataacggtaatgaaaagcagacagataaacgccagagcatctggaattctggcaaagtcaggttctttcttgtgctttttccattgatgtttatcgggtcaggctggctgatttactcatttttcagcacgtttggccgaagcgatccctcgccagatttggctacaacagatgtacgtgatgcggccatgtttcgttcttccgctgctactccagcaccagatactccctcagaaccagctgaaccgccactttcaaccgagtggcgtatatcagggagaatgaccagtgaaggcagggcgtttgtgattcttgttaacggtgccggtgttttgcgtgccgttcctgcatccagttttaattacaaagggatgttgatgagcggaattattgatggtgagcgtgtgacgctttatacggggaaaaaataa

SEQ ID NO: 78699 - DNA, 1245 bp, Citrobacter koseri
atgaaaaagattttactcgcattaacgctactattttcttcatgtgctttcgcagggtcagagcttgaattaaataaagtcaagctaccggaggctatttctcttatttatagtgaggtgcttaaagtcccgtatatgctagatccacagcttgttaatgatgaacgaatgattacattcaggttaacacctgatattgatgaacgggaatttgtaacccgttatcttggcaatatgaacattcgaatatggacgaaaaagggtgttgattttatcgcgccctatacgccgaaagagccggttaagccacgttatacatggacttatacgcctcagtaccgttctgttgcctacctgtctgatattcttggcggctacgtttcaggctccttcaataacagtggagccgtgatttctgacgattcgctaaaaggttcatcaggggcaagcaactacatcaatcgaaccggtgatattctggtttattatggtacgaaagaggatatcgccatcctgaaaacactggtcacttcgctggatacgatgagtgatgaagtggttgtttctggttatgtttttgaggttcagacctcgcagtctgacggctccggcattcttttagcggctaaaattctgtctgataaattcaatatttcagttggtgctgccggactggataattttatcaatattcgaaccggctccattgatgccattttcaatctgcttaaaaccgacagtcgttttactgttgtcagtgcgccacgactgcgggtaaaaaataatgcctcagcgtctttttcagtcggctctgatgtgccagtactgggcagtgttacggtgaataacaatacgaccacgcaatccgttgaatatcgttccagcggtgttttgtttaacgtaacgccatcaatcaaaagtcggacaatggatctcaagattcagcagcagctttccaactttgtgaccactgaaaccggcgtcaataactcgccaacccttatcaagcgtgatgtaacaaccgaagtcagccttgcagatggtgatattattttacttggtggccttgctgaacagaaagacagtaaggccagttccggctggagcttcttcggttcccgtaccagtgaaagcaacaagactgatattatggtgatgcttcaggtcagaaaggttgaccggagcagggcgacgccccgcagcgccgcgaggagcggtgaactgttccgggacaacctgaactga

SEQ ID NO: 78700 - DNA, 249 bp, Citrobacter koseri; identical to SEQ ID NO: 11349

SEQ ID NO: 78701 - DNA, 480 bp, Citrobacter koseri
atgacaacgagtgatgccatcgctttagctgcgcttgtagtatcgatttacactatcatatcatcagaagtgaagtcgagaaaaagtgatagagaacaaaaggttataaaggatgagcaagacaggttacgtaagttgcttctagaaaaagaaacaaagtcagcaattaatgagatgaaggctgagcttggtgcccgcctcgtaaaaatagccaaaaacaactatagactcaagatatttaatagagggaaagttgaggctaaaaatatagaaattcatttccctgataacgatggcaatgaatatctttacatgcatgatgtagaagataaatttccatatgaagtattacacccgcaacatgggattgaaattttagcgggactaaggtttggaagtaaaactaaataccgaataaaacttatatgggatgacaattataaaaaaaggaatgaagaggagtttttcatttctatataa

SEQ ID NO: 78702 - DNA, 276 bp, Citrobacter koseri
atgaaactgaatcctgagaaatacaatagaaatatcaccctgctatgtcctgtgtgcggaaatacagagatggaacacgaggaagagtctgaagtcgtcagatgtgtaggctgcgggaaagaattcactaatgatgatttaatccaagaaaacggggtgagtattgacgcccatgtggatgagataaaagaagagttaacaaaagatattcaaaaacagtttaatgatatgctcaaaaaggcatttaaaggaagtaaaaatataaggattaaataa

SEQ ID NO: 78703 - DNA, 423 bp, Citrobacter koseri
atgagtagaagtaacgaaacaagcggcgttgaactggttgtcgtcggcgtatttgctttctgtctggcagttgttgcctggctaatgaaaactttcgatgttgaatggcaaacagcactggaaactgcgcctggcctgatagtctggctgcttgttgtcggggcggggatctttttcgggatcaaaatggaaacaggtcttgttcgctggggtgctccactggcgattgcccttctgattccggtattcaaaccaatccttaaggaagctgccggagtacgtgaaacgggtggattggttttcgatgatatggtttcgtggtatggaactggctggggaatgtctctgatgtttttcggaattcttatcatcggatacgggctgctttattggtggcacagaagaaattcatattactggtaa

SEQ ID NO: 78704 - DNA, 447 bp, Citrobacter koseri; identical to SEQ ID NO: 16619

SEQ ID NO: 78705 - DNA, 912 bp, Citrobacter koseri
atgaaagtaaggtctgttggatctgatggtgaaggtcgggcaacacatctctacattgacggtaatccatcaaagtttttgcaaggtcactctgttatcggttccgacgatttgcaagggttggtgttaacagcttacgccagaatattggcattactgcatattcctcatgatctaccatcctatcggcaggtcatggaagggcaatttaagatctcgcgcatcgatatcaattacatgtattcattgtcaacattagaaaatgtccgcgcatggttatatgccgcagaatttaaagctaaaactcgccacggtcgcgcctgtggtaaaggtggcactgtttacttagggaaaaactcccgtcgttggagcctgaaattttattcaaaatatgatgagcatacatctggcaaaaaagggcaccagatggcagacgaattcgttaaagctggtttactggactggtcaaaagataaattacgcattgaattaacattaagaacaactgaattaattgatttgaatcttacgcttggtaatagctggaatattgagacgcccaataaattattctctgactatgtagggagaatagaaatgaatcaaaataccatattaactgatgaaaaaataattaatctcccaagaaaaatacagtctacatatttattgtggaagcagggcgcgaacatgaaagagatgttaccgaaacctacattctaccgacaccgtaaagaattactttctttcggaatagatattaacttttattgtgagtcaccggattctaataacgttgttccgttggttcgtactcttgaagccaaaccagccaaaattccatcatgggtttatgagaaaggtttaattttcgattataaccgtatttcacatgccagtaactggcattaa

SEQ ID NO: 78706 - DNA, 318 bp, Citrobacter koseri; identical to SEQ ID NO: 16617

SEQ ID NO: 78707 - DNA, 252 bp, Citrobacter koseri; identical to SEQ ID NO: 16616

SEQ ID NO: 78708 - DNA, 234 bp, Citrobacter koseri; identical to SEQ ID NO: 10869

SEQ ID NO: 78709 - DNA, 1713 bp, Citrobacter koseri; identical to SEQ ID NO: 78696

SEQ ID NO: 78710 - DNA, 288 bp, Citrobacter koseri; identical to SEQ ID NO: 78697

SEQ ID NO: 78711 - DNA, 1026 bp, Citrobacter koseri; identical to SEQ ID NO: 78698

SEQ ID NO: 78712 - DNA, 1245 bp, Citrobacter koseri; identical to SEQ ID NO: 78699

SEQ ID NO: 78713 - DNA, 249 bp, Citrobacter koseri; identical to SEQ ID NO: 11349

SEQ ID NO: 78714 - DNA, 510 bp, Citrobacter koseri
atggttctcaacgatgcatcaggtatggcatcgaccagctcctctgcttcctgcatggaacggatggcgtcatcttcactggcaataaccagtgtgggacaacctatcgttgctgaaggaataccttgtcgggttaaggtcgattgcgtaatgaaggcttcaaatccgagacaacgtcccatttgctggatagttgaaatcatatcccgatctgatgcgtttagggggtgcagtgaccgggcaatagcatggctgctcagccccttaaacgttgcgggtgacaatgactgcacgctttgccactttgattccgcctctaatggcgtatcttcccgtaacgaactggcaatcagtaccagggactccacacgatccgaaaaatctgcagcaaactgccgggcaatgtaccctcccagtgaaaaacctatcaacgtaaatttgtctggcagacaggtactcatatgctgcgcgatatcatggagggttagtcctccggttacggaagcatga

SEQ ID NO: 78715 - DNA, 1167 bp, Citrobacter koseri
atgaaaataactatctcaggaacaggttatgtaggtctttcgaacggtatcctgattgcacagaaccatgaagtggttgcgctggacattgtgcaggctaaagtggatatgcttaacaagaagcaatcgccgattgtcgataaagaaattgaagagtatctggaaacaaaagatctcaactttcgtgcaacgacagataagcatgatgcgtacaagaatgccgattacgttatcattgcaacaccaactgattatgatcctaaaactaactactttaatacctccagtgttgaagccgttatccgtgatgtgactgaaatcaatcctcaggcagtgatgattatcaaatctactattccggtaggttttacccagtctattaaagagagtctgggagtggataacgttattttttcccccgagttcctgcgcgaaggtaaagcactttatgataatttgcatccttcgcggattgtgattggtgaacgctctgagcgtgcggagcgattcgctgctttgctacaggaaggcgccataaaacaggatattccaaccctgtttactgattcgacggaagcagaggcgattaagctttttgctaatacttatcttgcgatgcgcgttgcttactttaatgaacttgatagctatgcggaaagtttaggactgaatacccgacaaattattgaaggtgtgtgtctggatcctcgtattggcaatcattacaacaatccttcattcggttacggcggttattgtctgccgaaagatacgaagcaacttctggcgaattatcagtcagtgccaaacaatattatctccgcgatcgtggatgcgaaccggacgcgtaaagattttattgcagatgccatcctgtccagaaaacccaaagtggtgggcatctatcgtctgattatgaagagcggttctgataatttccgtgcgtcttcaattcaggggattatgaagcgaatcaaagctaaaggtgtggaagttattatttacgaaccggttatgaaggaagcgtcgttctttaattcccgccttgaacgtgatttgaatacgtttaaacagcagtccgacgtgattatctccaaccgcatggcgtctgaactgctggatgttcaggacaaagtttatacacgcgatctctttggcagtgattaa

SEQ ID NO: 78716 - DNA, 1077 bp, Citrobacter koseri
atgaaaaaagttatcttcgttcagccggctattcctaaatatcgcattccgttttttcaccgtttagaaaaaatttatgatgttgaaattttttctaacaaagtcgactttctgggcgtgaaatcggttgatgattttgcaaatgtcaaatggggaagaggattttcggtaattttcaataaactgttctggcatcgcaggttgcccttgattagagggataaacaagggtgatatcgttgttgtcaacggcaaccctcgaattttgaactacatgcttctgctgctgctgtgtaaaattcgtggcatcaaaacgatctggtggggacacggatggtctgctggctcgtatggatttttcgcctcattacgtattaagatgatgcgtatagctaatgttgttttagtctataccgaatatgaaagagaacagttgggtagagaaaactgttatgctttgaataacggtcttgattcagacgtcatacgccaggcgatcgcaggcagcaatatggttcatcacttcagcgatcatactcgcttgctttttgtcggccggataacccaaaaggccaatcttgctttcgttattgaggcaatgcagcatttagcgcccaaagttacgctctcagtcataggtgatggcacgcttaaaaaagagctgatgcacttagcgcaatcgaaaggtgttgctcaaagaatcatatggtatggcgcaatgtttagtgaggatgatatcgcacgcgttatgcttcaagctgatgtttttgtttaccccggctctgtaggtttgagtttaatccatgcgtttaattatggattgccaacggttgtgcataattcacgagagatgcatatgcctgagtatgctgctttcagaaacgggttcaatggtttcgggtatgctgaaaatgacattgaatctttttgccacgcgatcaataactatgccgggcttccggtagagcagaaggtgattctcagagataatgctttcgaaacggtgcgaaaaacattcaatgtggaagatatggttttacgcttcacggctaccgtgaaaaattttgataaaaaataa

SEQ ID NO: 78717 - DNA, 1635 bp, Citrobacter koseri
atgattggagttgtaggtataacaatatatcctgtcagtagtaaattatcatctttatgggaaaagacaattaaggagaatataaaatcagcttttcctgtagaattcattgaatttagccataataattttattatccaactttgcgttaacgataaatatcagtgtgataccaaagctgaagagatttttatcggtaaagtaaatgagtcacatatcttctctgtagacgatcacgggcttggtattgctcttgaggccgatcagataacagtaaaaaatgactggctggcatcgttgccgttgttctataatgaagaaacaaaagtagtttccactttttacaatgcggttattgattcaatctcgtttgataaaacggggtgtaacgcctatttccgctacggctacagctttcaaggcagcacgccatttgaaaacatcaaatttttgacacccaatagtactatcaggcttggggttgaacggttcgaaataatcaaaaaccctcgtttttctgatgatataacccgtcttaccaaaaataagtctacggctaatgaaataatttctgagataaaagattatctagatagcaaaattgataaacgagagaaaattgttcttcccctttccggtggtctggactcacgattactggcaggtgttgtcagtaaagaaaacgtgtatgcttttacctacagcggcaacagtaaaaattatgagtcagtgaatgcatccattgtcgctgaaagactttcaatgccttggcagcggattcccttaacaaatttctatggattaatggggcaatgggtagatctctatggcgcaagtgaacatgctcatggtatgtatcatattgatttctatagaaaaatatgtagtgatagtgcctatgatatgttgctaagcggtatatttgcggacatctgggctggtaataacccggtagaaataaaatcagtagctgatattcagcaattgggttattcacatggtttgaatctgtctcaggatattttcgggaaactgaaagagtttgatgatgacgctgttctggaaaaccaatatcttactgagctcagaaacgaagggttattaacatttgatgccttaaatcgtattcagatgaaaataattttgataagttatttaatgaccttaccacgtttttttggattaaacaccgtaacgccgttcctgaataaggaaatagccgtcaaaatgctttctttgccagaagacgaaagacgtaatcgtaaatggcaaaaggagatacttagagatttaggtctggagattaaagagacgtggaacccattaaaaagtaattatgtaaataacctcgatctactggcttataaaagaagtgattttactaatattaaagtcatcatgcgttccaccgatctgagttgtttgtttaaagattcggtaagttataatcacttatttgatgatgttggtgaactttctttttggcaagaagctaatatgtatcttaactccactcgtggtgttaatcgcatcatgaaaaaactcaatatgagttcgcacaaattaaaaaatctaagagatttgcaggttttattcccactggcatatatcagaaataagtgggacgcagcatga

SEQ ID NO: 78718 - DNA, 1044 bp, Citrobacter koseri
  misc_feature (930)..(970): n is a, c, g, or t
atgatagttaatatttttggtgatgtgtattttaaatcacaagacattgttttaactgactcagtggaaaaattattaaaagccgctgacagaaatatcgttaacttcgaggctcctgttgttgataataatgagcagcccagagaaaaagttggggcagttttaaaacacgatctcgcggttgtcgaaaaattaaaaagaatgtcgattacagatgtttgtatcgctaacaaccattattacgattatggcattcgggcagctgaaaatagcagtgagattcttaaagaccatggttttgtgatccatggtgagtatggcaaagactatcagaaaatcatttctgatgatggaactatcaaagtagccatattcaacgttgcagaatcagaatatggcgtgagcgttaatgataaacccgggtttacttcagttttagatacttcgctctacaatcaattggcgaaagcgttaaataatggctttaaagtcattctgatcgtgcatgccggccttgaaaatgaactttctcctttgctttcgtggtcagaaatctaccgaaaattcattgattttggtgtttgtgcagttgtcgcccatcatccccatgttcctcagcgatacgaatattataaggatggcgtgatctattatagtcttgggaattttgtttttcagggcggcggaagtcatgagtatagtaatgtaggccagtgcgtttcctttaagtttgactcggcagggttcgaagctagtgtgtattatacgcgatatgataatagcacattagatatctatgatagggctgatgagcttgatgatttactgaaccacaaagttgcaaaatatcataaggttactgaggaagaatataataagtattgcaagattgactataaaagatttataagcgcgatggtatataaaacnnnnnnnnnnnnnnnnnnnnnnnnnnnnnnnnnnnnnnnnnttcatctgcataacctgagatttgaaacccaccgatttgtgcaactggagtatctggaggataaattaaaatga

SEQ ID NO: 78719 - DNA, 891 bp, Citrobacter koseri
atgcgtggtgaagtgatattctggggaaggatctgttcttacgcaataacgataattttcctgttttttgtttacttctccgatcatagccgttgggtgtattttgtgttcgtgttagagccgattatatatggctcgtggtgctatctaaatatgcatcgcggcagacgacaggcatattcattagcaagagctatttttgatgttaagaaaatacgcgagttattcaccactagcttcccattcatgctttcttcctttgcaataataatctatatgaggatggatgtttattttatcgactatttcctcggtaagggtgctgtggggcagtatagcttggctgtaagatttgctgaagcagcaaactttttgcctatcgtcattgctaactcggtgtatccatggctggtcagaaatcaaaataaaataaactaccgaaaatttttcgatggcctatttttggcatctatggttgtcctgataccagcaagcattggaggtacgctggttataaaatatttctttggtgccgaatatcaacaatcaattcctctatttatcattttgatgctccaggttattcccgtctttatcgggattggccgggccaaggtactggttttggagaatctgcagagatatattcccttcttcgtcttttctggggttgcgctaaatgctttattgaatctagcgctcatacctcttatgggtactaaaggtgcggcaattgcgactgtgataagtcaattctcgactactttacttattccgttatttatacctcgcgtgcgggatatttccctgttaatgcttaaaagtattattacctgtggtttttctctactgcattcggtttatcaaaggtgtaagaataatgatagttaa

SEQ ID NO: 78720 - DNA, 360 bp, Citrobacter koseri
atgtctgaagatatctttgatgccatcatcgtgggggccgggctggcgggttctgtcgcggcgctggtgctcgcccgtgaaggggcgcaggtgctggttattgagcgcggcaattccgctggcgcgaagaatgtcaccggcgggcgcatctacgcgcacagtctggagcgcattatccccggttttgctgagcatgccccggttgaacgcgtgatcacccatgaaaaactcgcttttatgaccgaaaaaggggcgatggcggtggattacgtcaatggcgaggatgccgcgccttcgcaggtctcttattccgtattgcgcagtaaatttgacgcctggctgatggaacaggctgaatag

SEQ ID NO: 78721 - DNA, 213 bp, Citrobacter koseri
atggcgtcgctgatgcgtcttatccggcctacaaaatacgtgattcgtaggcctgataagcgtagcgccatcaggcatcaagtgaaaacaaaacaggacgcggctatgcagcagccaggaactttgacgacattaaattctcctctattcaccgcagaattatgctgtggggaagcggcgggccgttcctggacggttacgtactggtcatga

SEQ ID NO: 78722 - DNA, 1227 bp, Citrobacter koseri
atggcgggcactaacaagctaagtgataaaaagctcaaggcattccagggggccagccgtgatgcgccagaaatgtatgctgatggtgaaggtttaagcgtcagggcatcaaaacagggtcaactgagttgggtattctcgtaccggttgggtggaagaggtagcaagctcgaacgtttaacgcttggccgttacccggatttgtcgctaaaagctgcgagagaaaagcgggaaaagtgtcgtcagtggttggctggtggtctcgatccaaaaacagagcttgaactgagcactgaagaaacgtttaaacctgtgacagtagaggatgctctagaatactggctggtgaattacgccaggagaaagcgtagcgatgaggaactggtgagggcacagctgcgtaagcatatttacccgcggctcggacgttatccactcacacgatgtgaaacccgccattgggtggcctgttttgacgaaataaaccagaccaaacccatgaccgctggtcgcatgttccagatatccaaacaggcgttacgtttttgcaaggttcgccgctatgccgccagtgatgctctggcctttcttaccattcaggatgtgggccagccatccggccaacgtgaccgcgtattgtcagatagcgagctggctgatgtgtggcgctgtacagatagcgatgatcagcagccgtattattcacgtcttctcaaaatgctggtgctttttggtgcgcgaacgatggaagttcgcctttctcgatggtcagagtgggattttacatcgtggatttggactgtaccgaaagagcatagcaagacccgagagaaaatcgtgaggtcgatacctgaagctatacgcccgtggttggaagagttaaagcgcgagaccgggaaaacaggtttgttactgggtgaagatcgtacccgtcaggctgtatcattgaaagggcgcaggctttttaaagattttcaccataacgagccgtggacgttgcatgatttgcgccgcacgttttccacagggctgaacaatatgggtatagcaccgcatatagtcgagctgctgttgggccatgccttgccgggagttatggcgatttataaccgtagtctgtacttgccggagaagctggatgcgctgaacaagtggtatgaccgcttagaacttcttgcgggtaatcatcaaaatgtggttctgttacctgtaatgaatagagattaa

SEQ ID NO: 78723 - DNA, 906 bp, Citrobacter koseri
atgagtaaagagctttcatttacaacagaactgccggaatggtttgatttagagcagtacatcccttttaaaagcatgagtagtaaagaattagctctgcaattacattatcgactgcatacattaatgataatgaatttaggttcatcgggtatattcgatttgatgtataaggatggtgttgttatccccgaaaatgaaggctctaaaaaatatagttcttgggtaaaagaaaaacgctcagaaggcaggagacttagtcaaagtcttgcaatttctcctataaataggactgaattatcatggatggctatgcaaaaggagagtgattcacatagatatccacttccttatgacgttcagattttactatctgacctaagaaatgatggtaatgtaaatagaaacgttgttctgtctgtagatgatataatggcattgaaagataatatggatgagtatcacaggatcgaaaacgaaagcatagatttacttttgccaaggagtagcaatatccatgttaatatagatttatctatgcctgatagatttattatggaaggattgaagggattgttatctgtatggagaaaacaattaaatattccatcgcccaatccaaaacttaagtcttctttatctattctgagaagtaatttcataaattatcgggcgtttcaaatcattgacctaaaactttgggcaaaatcaaaggaattgcgctatagggactctttcctacatacagtgatattcccagatggtgataaaacacttaacttggatgattttaggaaaaaagccatcccattcgctgatgatgtgttagatccaaggctgccatctgcaatgttggatatgtgtcgcgcggaagaaaaaaacggggcaaaatcttccgaagaataa

SEQ ID NO: 78724 - DNA, 285 bp, Citrobacter koseri
atgtcaaatactctttttaccccgccaacacctgagcaacgccgcaacattctggcagagtacggaattaagtttgatcgtcgtattcgtgaaaatgaatgttttgaaataaccagcctttcccgttccacccgctggtatatggagaacgaaggtaaattcccgccacgctgccactttggccgtaatagttgcgcctggcttttgtcagatgttctttggtgggttcgcaatccgcctgctgttgagaacgtcaacaccccttacaaccgtaaatccgcgtaa

SEQ ID NO: 78725 - DNA, 780 bp, Citrobacter koseri
atgcaaaaattaaatgagttggttccggttaatcccggaaatattggcggcgtggcggtatcgctggtcagtgctaaaaaactccatgcgtttctcggcgttgggcgtgatttcaccaactggattaaagggcgtattagccagtacggcttcattattggagttgattacatcattgttgaaagtttgagcacgccaaaacgggcgagcgcaaaatctcggcagcagatggaacatgactacctgatcactattgatatgggtaaagagctggcaatggttgagcgcaacgaaaaagggcgggaggtgcgccgctacttcatcaactgcgaacgccaggcaaaagccgccgctaatatcccccagacgttaccggaagccctgcgccttgctgctgatctggcagaaaaggcaagcgaacttgaaaaccggctggtggccgctgcgccaaaggttgatttcgctgatcgcgtggcggagatcaacaagggtatttccattcccaactatgccaaagccgtagggcttggccccatcaaattattcggctggatgaggcaacaggggattctcatcaacggcggccagcgccacaacctgcctatgcagcgttatatcgatagcggttattttgccgttcgccagggaacgtatgaaacgaatggcgaggtaaaagcctcattcacaacgatgctgacagggaaaggtgagcagtggttaacgaagaaactgatcgctggtggtgtattgccggaggtgccgaatgctgacgctgaataa

SEQ ID NO: 78726 - DNA, 969 bp, Citrobacter koseri
atgctgacgctgaataaaacaaaggcagctttgcagagctgccaatgtcactaccaaaaacttaagcagaaacagcataccagggttaacgcttgtggtcaaagagtgagcgctcctgagattacaggaactgcgccattggcgaggttaaggggtatgtccaaatctggacactcccgccaagggtatacgaacttttccgcacacctgcaaactacccagaaattaggctgtttagggagtactcaactttttttcaaaacttcctcgcaacctggccgcaatagatctcgttcattgcttccgcaaaggctctttgtcgtgaagcatgattttaagagaaaggctgcgacaattaaaacagccgccaagatgagaattttcttcattgctcatccttttggctcaatgccgcgctgctgtaactctttgcggattattctcttgatccaggctgatacagatgcgtcaccatcttgtgccagagcctgtttgatcccttcttctaggcttggttctacgcgtaatgcgatctgcttattgcctttggctttaatttctatggttgacatttggttgacacctgattactttgaaatggtaatcaagtgtatgacatgtgcataccaaaaagcaacgccccggagtgcaggaacactgccgaggcgtctaaccaaaccgttatacgaggtaacgatcatggctgaattacagcatacccaaactcgcccggaatttacatggttattcctggctacccccgaccatacccctgaatgcacaccagtagtgctgcgcattgatgctgacaccgaagaaaccgcccgcgccgccttccccggctgggaactggtatttgccgcaaaaatccgtgctcatgctccatgccgcgttgctttcttcgattacaccacccaccgtggatgggagttcgacagcgcagctattcagggggggcaccatgcgtaa

SEQ ID NO: 78727 - DNA, 189 bp, Citrobacter koseri
atgcgtaaggtcaaatggtcggaaattgacattgaagatgaactgcgccgcctggaggcgctgctctcaacatcgctgtatatgaatttcgaggatgaaaccgagtacagcgttgctatggatctgatcagtatgtcgttgtcccgtgttcgtgaactgaaagcggcaagtgaggtgagccatgcgtga

SEQ ID NO: 78728 - DNA, 312 bp, Citrobacter koseri
atgcgtgatatctaccaccagcttgttaagagcactcctgattttaaaaacttcactgatgaggctttggctgaatccagcgatttatatgctgctggtgcatttgccatcaatagtgcgctcacgctgatcggaaatctggcattagacgcaaccaatgcagaagaatatgcagatgaagatgctcgccgtgacttaatccttgtaagccatgtgttgcgtcatcttccaagaatggcgcaggcgcttaatcagagtagcgagtctgcggactatgttcgtgcccagcgcaacaacaatcgggaggcttaa

SEQ ID NO: 78729 - DNA, 231 bp, Citrobacter koseri
atgttcgtgcccagcgcaacaacaatcgggaggcttaacgtgataactcctgaaatcaatgaccgctggtcagaaaagcatggcgcaatgattacggtgaacaatatcgcctttaaccgggtgacgttcgttcgtgatggttacgaatttccctgcattttcccgctggaaagatttgttaaagaattcacttttataagccgggggcagggatatgaaaaacgcgcctaa

SEQ ID NO: 78730 - DNA, 1821 bp, Citrobacter koseri
atgaaaaacgcgcctaatgtcaggctactcccgaaagataaatttactgaggcaattattttcgcgggtaaagatgcttatgcccatgctaagggctgggaagagggattaggtaagcaggtggccggtgattccataccaccggtttatcttgggccgaagcaactggcggaactggacaacctgcaaattattgatgagggacggcgttcagctcgggtatatctggctggcgatatcgagccgatcatgattaatgctattggcgagaagctggcacgggcggcggtgcaggatgcaaaactgtataagggcattcctgacaggaacccggaggactggcgcgaatatcttaaccggcttcgggagcaatccaaaaatgaagaaaacaatatccaccagttgcctgtaacgaagagagcgcaacttcagacattcattgaggttagtccggcccttaaccagatgggggccagtcaacgcggagaggtgcttcttgcgcattacgatggtgctctggctattcacgctgattctgacacggttcaccactacaacggagtgatctggaatccgatcccggataaagaactgcaacgggaaatggcacaaatctacattgatgcagaagtggcctattcgcagaacgccattaaatcggcggtggaaaccatgaagctgagtctcccggtcatgggggttacggcccgtaacctcattggcttcagcaatggagtatttgatacccgaacggggcaattcagggaacacaataagaccgactggctgctgatcgccagtgaacttcctttcagcccaccagccgagggggagactctggccagccatgccccgaacttctggaaatggcttcgccgttccgtggccaacaatgaccgcaagacagatcgtgtactggctgcgttgtttatggtgctggctaaccgttacgactggcagctttttcttgaggtcacggggccgggtggtagcggtaaaagcgttatggcggaaatctgcacgatgctggcgggtaaagccaataccgtatcagccagcatgaaggcgctggaggatgcgagggacagggcgctggtggttggctactcgctgatcatcatgccggatatgacccgctacgctggcgatggtgcaggtattaaggctattacaggcggcgataaagtgtcgatagaccccaaacacaaagcgccttattcgacacggatacaggcggtagtgctggccgtcaataacaatgctatgacctttagtgatcgaagcggtggtatctcgcgacgccgggtgatattcaatttcacagaggtagtgccagaaaatgaacgagatacgatgctggccgaaaagatagagggtgagctggccgtaatcattcgtcacctgctgacccgctttgccagccaggacgaagccaaacggctattgcacgagcagcagaaatccgaagaggcactggctatcaagcgtgagggtgattcgctggtggacttctgcggctacctgctggcgtctgtggcgtgtgatgggatgtttatcggtaatgccgagatagtacctttcagcccacgcaaatatctctatcacgcctacctcgcatatatgcgggccaatggtcttagcaagccagtatcgctaatgcggttcggtactgatatgcctggggcaatgtctgagtatgggaagaagtacgaaaagcggaagaccaagcacggtatcaggtcaaacgttacgctacacgatgactcagactactggatgccatcctgttccggtacttctgaaaacagaggggtagagtaa

SEQ ID NO: 78731 - DNA, 210 bp, Citrobacter koseri
atgatcgttagtgatttcatggacgagccggagctgttcgcgctgctgggtaagaagaaaacagccgtgtggcgattacgcaaagatcatggattccccaatccagtactcacctacccttcacgctacagccgtaaagctgtaatgaaatggcttgaggaaggtggcgtaaatagaagtaataatttggatatttgcacgataaaataa

SEQ ID NO: 78732 - DNA, 336 bp, Citrobacter koseri
atgaaactaattggcaaagataacgggcatatgagcgatctcaagtttctctacagcgccgttgatgagctttcaaataaagatgaaattacagtgacggattttctggctctgagtgcttttgtcacttcagaaaagcttgatctggaatcgtaccagtctgggctggaagaaggggggcaagagttgtcgaaagatgccagtgcttacctcaatcttctccagaggatggcggctgatttatcgtatccagcctctggtcttaagaacgctatccatagcgcacaatcaacggcgagctttgctttctatcagtgggggctggataaagaataa

SEQ ID NO: 78733 - DNA, 513 bp, Citrobacter koseri
atggacttcgattttgatggtatggcatacccggatatttttttaatttccggcgaggagtttaaaggaagccggagcacaggaaaaaatcaggtagatatcccgtttactgacgaaccgcaaattgaattgggcgatattctgattcagaagattggaagccgcgagttaagccttaaagttgtcgatctttcaatatcaaagaatggaacgctgaacgtgggtacaacgcatcctcacttacttacgttatccgtagagaatctttcttccgacgcacacaggacagcaaagagcatgaatacttttaatattggctccgtcagtggtgagcaagttcaaataggtgaaagtaatcatatgctggtgaatattagtattactgaacttgtcgagaaagtagctaagtctggcgatccacaggctaaatcaatgctgaaacagttactagaaaatagcaccgttgccagtatcgttggcgctggcgcttccgcgctgttaggtctgctttaa

SEQ ID NO: 78734 - DNA, 1167 bp, Citrobacter koseri
atgaagaaattacttgaattacgccagcagaaagccgcactcaaaacccagatgcgttccttgctggaaaaagctgacagcgaaaagcgaagcctgaacgatgaagagggcaaacagttcgatgaactccgcgcccaggctgatgcgcttgaagttgaaattacccgccttgaggccgtcgccgacgatcaacgcaatttgcctggtacttctgttgaaggtgaaggtgtaagcaacgatgagctgcgccactacatcatgaccggcgatacccgctctctttccacgctggtgcaggctgatggcggctataccgttatccctgagctggacaaagagatcatgcgccagttgcaggatgacagcgttatgcgctccatcgccacggtgaagactaccaaaaccaacgaataccagaagctggtgtcagtgggcggcactaccgttaagcgcggcaccgaaggtgaagcgcgtaccgaaaccagcacaccgaagatggagcgcgttgatatcaaactcaacccgatctacgcctatccgaaaaccactcaggaaattctcgacttctccgaagttgatattctgggttggctgtcctctgaaatctccgacaccttcaccgaaaccgaagagagcgactttgtgaatggtgacggtgataaaaaatccaaagggttcatgtcctatcctcgcgcggccaccagcgataaaacccgtccgttcggtacgctggagaagatggaaaccgctgccgtttccgctgatggtctgatcgacctgctgtttaagctgaaagccaaataccgcaaaaacgccgtatgggtgatgaactccaataccgccgccacgctgcaaaagctgaaaaatggcaacggggattacatctggcgagacggtcttgtcgctggttctcccgatatgctgctgggccgtcctgtttcgtatctggaaaccatgccggacgccgccgagggtgaagcgttcctggctgtgggcgactttaagcgcggctactacattgtggatcacactactggcgtgcgtacccgtcctgacaatatcaccgaacctggtttctacaaggttcacactgataaatatctgggcgccggggtggtggactccagggctatcaaggtgcttgagctttccggctccggttcctga

SEQ ID NO: 78735 - DNA, 561 bp, Citrobacter koseri
atgaaaacaatcgattttgaaatccgtacctccgaactgagcgccagcaacaaaaagctggtgggctatgccgtgcgctggaacagcctgtcagaggtgatctgggatgagttccgcgagcagttcgcgccaggggcgtttaaagacagcctggcatccggtaatgatgtgcgtgcgctgtacgagcataactatacccaactgctggggcgcacaaaatccggcacactggtgctgtcagaagatgatatcgggctgcgtttcgagctgaccccgccaaacacccaacttggcaatgatgttctggagctggtggatcgaggtgatatttccggtatgagcttcggtttccgtgcgctgaaagagtcctgggatattactcctacaccgtatattcgcactgttaccgccgccgagctgcgggaaatcaccgtcacctctatgcctgcttaccctgagtccggcgtggaaattgcgcaccgttctctgttttcccaacatcctgaactgcgccgcgctggtgataaccgccgacgctgggctgacttagcggggctgtga

SEQ ID NO: 78736 - DNA, 1236 bp, Citrobacter koseri
atgtggaatatctggccttttggccgtaaatctgagccatccgaacagcgcagcatgacgattgatgagtttctggcgatggcagggattccaaataccggatcaggcgaatatgtgtctgctggtactgcggaatctctgccggcggtgatgaacgccgtgtcagttatcagtgaggcagtggcaacaatgccctgctatctctaccgcgtgcccaacgataacgggcgagaagcgcgggagtggttaagtaatcatccggtagattttctcctgaacgagcaaccgaacgactgccagacgccttaccagttcaagcgcacgatgatgcgtcattgcctgctgaatggtaacgcctatgcggtgatccagtggggccgtgacggccagccgcaatccctgcatccgtatgcaccgggggcggttgttcctgagcgtatcggccagcataagtacaaatacactgttactgagccgtttaccggggcagtgcgcacctacttgcaggaagagattctgcacctgcgttactcgaccgatgatggttttctggggcgctcgccgatcaccatctgccgtgaagcgctgggattaggtctggcccagcagcgccacggtgccagcattatgaaagatggcatgatggcggcgggcgtagtcactactgctgaatggctcgatagtgtgaagggtaagcaggcgttggacgcgcttgagcgctacaaaggtgccagaaacgcagggaaaacgccgatccttgaaggtggcatggactataagcaacttggcatgagcaatcaggatgctgagtggctggcctcccggcgcttcaccatcgaagatattgcccgcatgtttaacgtttctcccatcttcttgcaggaatacagcaacagcacctacagcaattttagtgaggcgagccgtgcctttcttaccatgacaatgcgcccgtggctggcgaactttgagcagcagattaaatccgcgttgctggtggcatcgcctgtacccggaatccgttatcaagtggagttcgactctgccgatcttcttcgagccactccaaccgaacgttacgcaacttatgagcgcggtatcaagaacgggatcatgaacccgaacgaagcccgcgaacgtgaaggtatgccgccgcgtgaaggtggcgacgaatacagccaggcatggaagcaggaagtgaagatcagcaaggacaacaaggaaggtgacgaatga

SEQ ID NO: 78737 - DNA, 339 bp, Citrobacter koseri
atgagaaccggaggtctgagaagccgggtaactatccgggtattcacaacccaacgtgcgccatctggtcaggttattcaggtatgggaagacggagaaaccatctgggctgaggttaaggggattagtggccgggaattaatggcgtcaggtgccgaggttgccgaagcgacgatccgtgtctgggtgcgtttccgccgtgatatcaccgcagccaatcgtctgaaagtgcttactggcccgtttgctggcggcactctcaatatcatcgggcctcctattcctgattcggaaggtacccggctggaaattctctgcaagacaggaacggaaaaatga

SEQ ID NO: 78738 - DNA, 294 bp, Citrobacter koseri
atgacagcagaaatcaccctggatgaagcaaagctgcattgccgtattgatgatgattacgaagatatgttgatacaggcgtatatcgatgcggcgctggaggtctgccagaagcatatcggcaagcggtttgataacgggctggagtttacgccagctatcaagattggctgtctgatgtacgtatctcagctgtacgagtaccgcacgatgattggtgataccgacgccaaagagataccgatggctgtctctgcgttgtggtctgtctaccgagatgtgggggtgtactga

SEQ ID NO: 78739 - DNA, 444 bp, Citrobacter koseri
atgccgtggcaaccactacgccggtgcaatgagccggggtgtaataagcgggtgaaatccggcaagtgtgatgagcataagcgggatgcccgccgacaaagcgacagccgaagaggtacacggacagagcgcggttactcgaatcgctggggcgaataccgtcgtcattttctgaaagctaacccgttgtgtgtccactgtctcaaggctggcgtctatacatcggcaactatcgtcgatcacatcatccctatcgagggtgaagccgatgtgctgttctggcccgccagtaatcaccagtcgttatgcgctgcctgtcatggccggaagacaaccacaacagacccggtgacgaagcagcagcgtaaagccggtaagttccgtgagcaggaagaagcagcacgtcatcgcaccgactggatctatgaggcaaacaatgactga

SEQ ID NO: 78740 - DNA, 153 bp, Citrobacter koseri
atgactgagcaggaacagcagcgcctgattagtgggctgataaagcagcgcgaggcatggcaaccagccagacagagaacgcatacgaagcccgtagtaaagcgtatgagccagcgtgaccgggagcttatggaatgtttccgcaaccgctga

SEQ ID NO: 78741 - DNA, 357 bp, Citrobacter koseri
atggcaagaccacccaaaccgcccgcctatcttgatgaaatcgcggcgcagcagtggaaagcgaaggcgaagcagttggcggagcgcggagatctgacacctgccgactggaacaatcttgagctgtactgcgtcaattactcgatgtaccgcaaagccgtggaagaccttgccacgcggggattcagcatagtgaacagccagggcggtgagagccgtaacccggcactgagcgcaaaagcggatgccgaaaaaattctcataaaaatgtcgtcgctgctgggctttgatccggtaagccgccgccgcaatccggtagaaacggaagaggaggacgagcttgaccgtctggaatga

SEQ ID NO: 78742 - DNA, 1662 bp, Citrobacter koseri
ttgaccgtctggaatgattacgcaaacgccattaaatccggtgaaattccggcctgtaagcgcgtaaaacaggccgttgaaaggtacttttcagacctgaatgatccccgttatgagttcgatacggcgaccgtagagcggtttattgcgttctcccgactctgtccacacgtcaaaggcccgctgcggggccagcctatcaagctggaaccgtggcagcagttcgcctttgctaacctgctgggctttaaggtcagggagtcaggacgccggaaatacagcagcgcctttattgaagtgccgcgcaagaacgccaaatcaaccgtggccgccatgctggctaactggtttctggtgatggagaagggccagcaggatatctacacggcggcggtgagccgggatcaggcccgaatcgtattcgacgatgcccgccagatgtgcctgctgtcaaaaccgctgaaaaagcgcgtcaatattcaggcgcataaggtcattttcccgaagagcaacagcctgctaaagccgctggcggcgaaagcggccaccattgaaggaactaaccccagcctggcgattgtcgatgagtaccaccttcacccggataacggcgtttattccgcccttgagctgggtatgggcgcacgtcctgaggcgattttgttcgccataacgaccgccgggagtaacgttgtctcagcctgtaaacagcattacgactactgctgtcagattctggccggggaagagagcaacgattcgctgtttgtcctgatctacgagctggacgacgaaagcgaggttgagcagcctgaaatgtggatcaaggccaaccctaacctgcatgtgtccgttgacgcggcgaagctggaatccaccatccaaaaagcgtggggtataccgtcacaatgggtggagatgctgaccaagcgtttcaatatctggtgtcagggttccactccgtggatgggggccggggcatgggatgcctgtgcactcgattatgccgaagaagatctgtccgggatggagtgttacgccggatttgacttgtcctcaaccagcgatattaccagtgtgagttacgctttcccgtttgaacgcgagatcaggcttcttacccggcactatctgcccgaagcacaactacttaacgttgctaacaaaaaccgcgccatctatcggcagtgggtaaaagcgggctggatacgcaccactcccggcgactgtatcgactatgatcgcatccgtgacgatatcctgcgcgacgctgaaatattcaatatccggctggtgggctttgatacgtggaacgccacacacttgcgaacccagttacagggggctggcctcgatgtggagccgttcccgcaaacctatctgaaattcagcccggtagcgaaatcctttgaggtttttgttaaccgcaaggtggtgcgccatcgtggcgatccggttctggcctgggcgattggtaacgtggtgatggagtccgacgccaacgccaacattaagcccaacaagaagaaatcctccaacaagatagaccctgcggtatcagcgctgatggcgttcgggacattccaggctgagcacgaggattttgcattcgatatgagcgatactcacaagcaacgattggccgtgtttaatggaatttaa

SEQ ID NO: 78743 - DNA, 540 bp, Citrobacter koseri
atgtcgttagctcagaaaatgaaactacaagatcttaaagcaaaagctgaggaatacaatgctcatcggcgcgagttattgacaaaacaaatcaatgatgcagcaactaccattcagaaagataccttagaattttttaagtctaaaggtttttctatcactggtcagatgccgaaaatcaaagctacttataatggtgggcttgaaacatccattgacttctctaacctgactggaagtttttttggatgtgatggtggagttgacttcaaatatgaaaataaatcgtttgtgcttaattactctgtgaaacgaggaaatgctcctgatcgtggaaccctggctggtagtcctgacgaagtgatgcaaaaagaaattgagtattacgaaggtaaattattaccgtttttagaatccacaggtgtgtctgatctgagtggcgaagtgattttgttctcagttatgaagaatgtaactaacagaccaaccactcagaaatacgatagtgttgaacaagcattaaacagctttatggattaa

SEQ ID NO: 78744 - DNA, 882 bp, Citrobacter koseri
atgtcattcaataataaaaaactgttaattactctcttatccctctgcacatttcagacttatgcagcacaatgcactgcggaaaccttcgctaaaaacaaactgaacaacttcatccttctgagcgagccaacaagaactgaaattcccaaatctgtatcaatcactattgatagtcctgatggatatctccgcacatcggttcaaagcaacttcagtcaatgcggtgaattaattggcggccgtatgaaagaggtcaaaacctcaacaggccagaaagcagttttcacggcaacctctgaaattcagttgaataaaacggaatttggctggcgcatccaggtggactcaaacggcgtcatagccgataaaaacagccagaaaaccacgcaggcatatcggcagactcttgagggaatgtacctgcttaacgataaaggaattatcagccgtgcagttaatcgttcggttatcgcggccacaaaaccagaagataaagacaaaaccgtagtgggcacaatcgactacgccttcaattcatcaggattactggcaagcgcggcaagcaaaggaagtatggcgatagataataatacgattgtatatagttatgatggcaatcatcgcctgatcaaaacccaatcaccctcaaccatagaagagtatggctatgataacgagggccgtgagttgaccctgagcaagacccagacgtatttcaccatcgaaaaaacactggccacctgcgaggagtggaactcacatggagaatgcacacgcgccaatatggatatcacgataaccccaactgctcggacaggtaaacagtatgtggacaaacataacgccgtaatgacggcgaaatatgaatactggaactga

SEQ ID NO: 78745 - DNA, 915 bp, Citrobacter koseri
atgcatttacaatcaatcgattatccaacgttgggtgttaagcctcgtattatacctgttgtttccactaaggggggcgagggtaagtctactcagtcagctaatcttgcaggatttctggccgatgcaggtatcaaaacacttctgattgatggcgaccatgctcagccaacggccagcagtatattcccgcttgaatatgaagcccctggtggtttgtacgaactgttgatgcagacagttgatctctcaaatcccgataatctgatctcccgtacgtcgatcaataatctggacattatcgtttccaacgatcctcgtaattttctcccaactgcaatgctgaatgcgcctgatgggcgagttcgcctccgaaatgctctttcacatcccctttttaattcatatggcgtgattattgtcgattcacaaggctcacggtcagtgatgtctgagttaattatcctggcctccaccggaaccatggtgggtattgccaaaccgattcttcctgatgtcagggagttcatgcgcggaacagtcgcgctgatggaagaattgctgccttattgtgcgtttggcattcagcttccagtcacaaaattgctcatcaactgtatggaatacgacaatctgtctgttgagaccctcgctgaagtcaaagcgatcgttgaagataaacgctacagcgcccatgcagacaaaattcatatcgacctgctggagacatgtatctatgacctgactgtctatgttcttgggcatgttaagggcgtaccggtacatcgtcttgaaaaaaatacccgacgtaaaagcgactcagcgtttacgtcaatgtatcaattggcttgtgaacttttcccagagtggaaaacgaattttgatgcgttagctaatgcggggggcgaggaatga

SEQ ID NO: 78746 - DNA, 1368 bp, Citrobacter koseri
atgacctctaacaaccgcagaaatgtttcggggctgttttctcaggatgctgagcagagcgtcattggtggcctgatgctggataacgactgctgggatgaagtggcgctccgtctcgataccgatgatttttatttcaaggttcaccaggtcatctttcatgaaatggcgcgtctggttgcagcagggcgtccgattgacctgatcacacttgctgagagcattgaaaaccgtggtaaggatgcgcttgagcaacttggcggattcgcctatctggccgaactttcaaaaaatactccaagtgcggccaatatcgtcgcttactgtgacattgttgccaggtacagccaggggcgacagttggtcgccattggtgctgagataaccgaaactgttaaggcatccggtgctgatatcggggcggtgatggaaaccgcagagcaaaaaattacccggctggcagaacgttcagaaccacagcaggccgtgacgctgcttgacggcatggaaaaactccttacagagctggaacgtcgttgcaatgtgcccgatggtattactggtacgcctacgggatttgaagattttgatgccatgaccagcgggctgcaggcagctgatctgatacttatagcagcaaggccttcaatggggaaaactgcctttctgatcagcctgattttgaattcacttctgaaaaaagccgatacacatgcgcagttttacagccttgagcagcccaccgagcagatcctcatgcgtatggtcgcttcacttggcagtgtagatttaacacatttaaaaaatggccagatggatgatgaggactgggcgcgtgtttcaaacgcgtcttcactattgatgggtgaccttaaagaccgcctcatcatagatgacactggctcattgacccccgccatgctcagaattcgcgcccgtcgtaacgcccgccgttatggtcacccttcagtcatcggtcttgattacctgcaactgatgcgttgtccggatcaggagaaccgcacacaggaaattgctgaaatctcgcggtcactcaaagcgctggcgaaagaaatgggttgtccggttgttgccctttcgcagttgaatcgtcaactagagagtcgtgctgataaacggccgaacaatggcgatcttcgtgattccggtgccctggaacaggatgctgatgtaattgtctttatctatcgtgatgaggtctatcacgaaaacactgaagacaagggggttgctgaaattattgtcagcaaacagcgtcagggaccgattggtacgatccgactgcaatacgaaggccgttatacgcgtttttctgctaaccctggtcataccgggaggtttgcatga

SEQ ID NO: 78747 - DNA, 1716 bp, Citrobacter koseri
atgagcaacgtccgtagtcttaaccttggcgacgccatgttgcagcgtggaaaatcaccggctcaggctgctgataataatactcccaccgttacccagccagtaaacgaaatggcaatggttcttacccttgaccagcttcgcccgaatccggataacccgcgcaaaggacgcaatcctcgttttgaggaaattaaagcttccgtccgtgcacgaggattggattcgattccaaaagtgacccgtgatccggatggtgatgatgtttatatctttagtgacgggggaaatacccggtatcagatactctgcgatctctggcaggagactggtgatgaacgtttttatcgcgttcacacgatcttcaaaccctggcctggacgtctaaaatgtctggttggtcacctggctgagaatgaggtcaggggggatcttacctatatagaaaaggcattcggtgttcataaagcgcgtgtaatttatgaagagcaactgggccggagtgttaccttacgagaactttcggatctgttgggtaaggaaggttatcctattgataactccagcgtaagccggatggaagatacgcttaattacctgtatccacatatgccccagttgcttgagagtggcatgagccgtggtcaggcaacaccactcctgagccttcgttcttcagctatgaaggtctggaaatctttcagcggtgacgtaaacccagaatgttctcttgatgatgtgtttggtgcagtttgccggtgttttgatgaacctgaaagctatgcccttgatatttttagggatgagtttatcggtcaactggttaaggctcttccccatccaagcctgaattatgaccgctggttaattgaacttgatcctcgtgagcaaaaacgcagggaacagtttggcgagccgcctccactgccagcacctacacccgcgtctgaacagtcaggtggtcgggaacgcacaacaccaccagttacgactctgccagcagatacttcatcccagccccctgttactggtctgcgtagcggtacgctgactactccagggcgtccggaagctgtaccagaacttcaggacaatactgcacttcccggcggtatgtctgttggaagtgagccgcgtcgtgaagttcagaatgacctgtttggcggaaatcctgtgattaccggtcagacagagaatcctgataacgatggagagtggcaatttaagtcagatgttaatgccaacgcgctcgtttctgcttttggcgaacaggatgaaacttccacaccttcagttagctcagtggccttcgccgcaaccgggttggaaccggtcaatgatatctggcacatctccgcattacaggacgacatcgagcacctgcaggatatggcttatcggcttactttcgaaattgccgaagcgatgggctgcgcggactgtgttcgggaggataaagaccatcattcagctggtttctccatttcagagaacgccagcgagtttactcttttcctcgccgggctatcaggttcactgcctaacaaacagttcaatatgttcatgttctgcctgaatttttttggctctcaggaacctgcagatactgccgttttcgatgatgtcactgttgtaaaaacaatgcgccttatccgcgttatacggcgtctgcgtgagctgcagcgtctggctgtgaagggaggggaaaatgtctga

SEQ ID NO: 78748 - DNA, 255 bp, Citrobacter koseri
atgtctgaggacctgaatgatgaaatggctcaggccagtaccgctattttcacccagcgcggcatcgatgctatcagggcaaaagtgcactcgttacgcccgtcaaaagaaatttgtgagtgctgcggcgcggacattcccgctgcccgtcagttggcagtgccgggcgtagagttgtgtgctgcttgtcaggatgtgaaggagaagcaggatgttcaccgtgctgccggctgcagggggctacaccatgtctga

SEQ ID NO: 78749 - DNA, 780 bp, Citrobacter koseri
atgttcaccgtgctgccggctgcagggggctacaccatgtctgaaactacaaaagtgattgcacgtatccggcgactgatggcgctgggtacccggaacagtaatccacacgaggcggcccgtgcagtggctctggctcaacggctgatgcagcgtcatggcctgacccctgacatgctttctcttcatgatatccaggaatccgtctgtcagaacctgaccagtaatgcagaaaaagtgccagcctggctaagttcactcgcaacagtggtatgcatggccacgggctgccgttgctggtttggctggcatattcacactagttgcagtggtgtaaaaagcgttcgccgatctctgcacttttatggtttcagcgggagagccgaagttgcgctctatatctataccgttttacagcggcaacttcgtgcagacactgacggtcagattgccggataccggaagcgccgtattcttaagaacacgcttcgtcgcagagccgatcagtttcgtgaagggtgggtatctggcgtctggcaggtactgcagtcattcgcgccttcagaatgtgagaattccatgcttcagcgctggcttgcccagcgtcacaccggcgacaccctggggactgtaaacgtcagggtggccggtaaatgccgtggcgacagagcagcacgcgtagcgggctggctcgcggggcgggataccgaagttcatcaaggcctgactggtgcgcaggctcaacagcagattacggcgggaggctgtacacatgagtaa

SEQ ID NO: 78750 - DNA, 597 bp, Citrobacter koseri
atgagccagcacaacctttcacaggccaccacggccatcctttcatcactgctgatggatgttaaaaacggcaatattcgccgctgtgagtcgctgggaatgtcactcgaggagatacgcgcactgagtcagttgagccttgatgagctgcattatttgagccagtcacacgtttctgtgcttgatgttagcctgaatcacgaaaatttttggctgatgctcaaccaggcacgtaatgagcagaaacgaatgctgatgatagaccgggcgcttgagcttggcggttcaatggaactgattgataaatacttcggcctgtctccatcagaggttagcgcacggcgtcgtctgatggggatagagtctcgccagggccgcacacagtctctgacggagccacaggattcggcactatggatcgagtggaaggctgccgggctatcatccccggactctcatcaggctctggaagcgatgatgcttgccgctgagcagcatggcctgtcactgaccgcagtctggagcagggtctgccagtggtgccgggagacaactccatcccgcaagagtgaatcacaacagcgcaaggaagcatga

SEQ ID NO: 78751 - DNA, 231 bp, Citrobacter koseri
atgcagatgaccgacttttcttcacgtcagtacgtttccccctcggttcgtcgcagggcgcaacggctgttcagcgcagtgtgctgcggtgagaaggtgttccgtcggttgacgatgaacggctatctcaagatagatgttgggccgttctggcgcatcctcagtaaggatggaggtaaacactggtggcttatggatcatgagacctataaccgtgaaatacggcggtaa

SEQ ID NO: 78752 - DNA, 1233 bp, Citrobacter koseri
atgaccattccggcagacagcatagttgctcatacactgtccaggatgcagcgtagtctcgaacggcgtacagacactggtgatgtcggtcaggagcgcagcgggcttctttttatgggaaatgtacatgatgcgtttccccgacagctgtttctggatacccgtctttcgccactggataaaaccgcctgggtgatgatccggttgtatgcacagcagaatgaaggtgctgttttcccgacttatgatgagctccaggttcaactggcgtcggcacattcagagaaggcctccagagatacggtcagccgcgttctgctgatgctgcgtcttacaggctggctcagcctgtgtaagcgtgttcgcgacgaccatggtcgtgtgcggggcaatatctatgcacaacatgatgagccgctgggctaccgtgatgctgagacttttgatccgggctggctgacccttgttgaagagagttgcctgagcaggaataaagccgtccgtatgacggcgctggctgtagtcaatgacatccttcatgatccgggaatgcgccaccgtcacagccgcttggccattattgagagccggctaagtgcacctgccacaccagaacaaatggctcgtcagcgacaggctgtgcaaccgagtccgaaatcaggactcagtaaaaaacgcataaaaaacagcccgaattcactgagtccggaaaacggactcagttcccttaaacctgataattcacagaatccggaaaatggactcagtaaaaaatcaaggacttacgccggagtccgaaattcggactgtaacgtacgttctttcacacacagtgtgaataaaaaaacgtacgtaccgtgtggtgagcaattcctgccagatgattttctgaacgctctgaacagtgaagacaggcagatgctgagtacgcagatggcttcgcttccggagacaatggcaaaggcccttgctgacatgctgcgtgagcaacaggcccttggaaggctcaacaatccggtgggctggatgttctctatgcttcgcagggcgcgaagtggtgagctgaaaatttcagaggatacggagactgccagttctggtggaacaatttcccacccggttgaatcacgtactgtacccacagccaacgtccctgttcaacctgcgaaacgcccgtctcaggggcaggtaagggctatgattgcggctattcggcaacaggtccagaaatga

SEQ ID NO: 78753 - DNA, 723 bp, Citrobacter koseri
atggcagaaaaaaatgagaaaagaactggtgcgctgcagtctgaaatgacgatcgcactgcatacgaattacgcaatcgggctatggcaggggcgtcagcctgaaaaacaggacggtgaaaagcctgcaaggcatggaattatcggtatgcctcagtttttccaccgtgcgactctgattaaccaggattccctgcgaaataatccatgggctgatgttgctatgtttaacctggaagaaaagatcaaggttgcatcagattctatgactgctttgatacagcaacttgatgctgagatgtcaatgttgccgcctggtattacattgacagaagttgcatctgttgagccactcgatatccaggtatttacacgaacccctctgggttacaggtgtgtgtttctgttagtaggattcgatcagtttgcgaaaaaggcactacaagcatcgcattatggattaattacacgttctcgccgtgatcatcatcttagcgaaggtggcagattaattcgtcagatctatggctctgttttatcttatcgccgtattgatgctacccggtttgatgctgtggaaaacaacgaaacatggaaacaagcatgcgaggtggcgggagagccagatttgtctgttcttcttggtgaaaagcgctcagctttctcaccgccggttaatgaatcgagcgtaaacctgcttcgtatgcgatatcgggctgcctga

SEQ ID NO: 78754 - DNA, 1884 bp, Citrobacter koseri
ttgctggagaccgcaccgcctgaagcatacggtcaacagtatggcaaaccatggtcgctctctgctctgccgatcctgccttccccatggcaggtggtggtaaaaaaggagacgcagtctcagttcaaggttattgagcggctgctgcgccaggtcgatgatgtggttatctccactgatgcggaccgggaaggagaagtaattgcccgtgaattgctggaatactgccgctgggacggtcctgtacagcggctttggctttctgcccttgatgaaatgagcatccgtgcagctctccaggatctgcgaccgggtgccgaaactcttggaatgtatcatgcgggacttggtcgcgctcgtgccgactggctcattggaatgaatctgtcccgtctgtatacactgcttgcagtacagtcaggattcgactgtgtgatttctgtcgggcgggtgcagactcccaccctggcactggttgtccggcgtgatcgggagatagcgacattcgtcccaaaacctttctggcaggttaaggcgcttctgagtgcgggagggagaacttttccggcgcaatgggtacctgcaaaggtttataccgacgaagaaaaacgctgtgtacaccaaaatatagcgcagcaggtagcgcatctttgccggcaggctggagcagcgaccgtaacagaatgtgagacgaagcgtgaaaaagcggcagcgccgctggctttttcgctcggcactttacaacaggcctgtggcctgctctgggatatgtcaccccagcaggtgcttgacactgcacagagcctctatgagaaacacaaggcaaccacttatccacgaactgattgtggataccttcctgagtctatgcgtgaggaaatcccctcggttctttccgctattggtctgtctgatccagagtgtagttctcttctttcaggtctaaatacttcgtttgtttcgcgtatatggaacgacaaaaaaatcacagctcaccatggcattatccctacccgaaacgcgtttaagttttctgcgttaagtgaggcagagcgaagggtatacacccttatccgccgaaattatctggcacaatttcttcccctgcacgaatctgatattactcgtctgcagtttgacattggcgggcaactgttccgcacaacaggaaggacggagattgtaatgggctggaaggtcctgttcagtaaggaggaagaggatagtgcaggggatgatgatctcagtattgaacttcctcctctcaggaagggtgaccgttgcggagtaaacggtgcagaggtcgtgcagcaaatgactcgtccgccggctcactatactttcgcaacactcatcggcgctatgatgaacgcgtcagcgtttgttaccgatattgctcttcgtaaggtactgaaggacaacgccggattaggcacggaagccacccgcgctggtatcgttgagcaactgctgaaccgcagatttattgtgcgtaaaggtaagcagcttcgcgcgactgatcttggtgctgatgtcattgatgctctgccctcgcagttaaccgaccccggaatgactgcactttgggaacaggctctggatgaagtagcagaaggacgccttaccctgaatgattttttgcagcgacaggtcggatggacccgtaaccttgtcagcatgggaggacagcagcgggtgagcattagaataccacccacaccatcgtgccctttatgtggggggaaaactcgcctaaaaaaaggacagaaaggagagttttgggggtgtactcgttatcctgattgcaaaggaatcatcaacaacgacacccagaaacgtaaaagcgcgcgtagctctaaggctgtaaaaccaaagaataattaa

SEQ ID NO: 78755 - DNA, 492 bp, Citrobacter koseri
atgactgctactacaactgcatcttcttccaccacctcttcctctgccagccagaaaaaagagtatttcaatcttaacgtaagcggtatcggctacctgagctcgattcgtcgtgtacagggccaaaacggtgaatttacctgcgctgtcattaatgccctgactggtcctaccgacaatgcgtcatacactcgtttcgatgtcactgttgcgggcccagaggctacaaaactcatcaaccgctgccagaaggccgtggatgaagaggaaaaagtattgctggggtttgtgctgagcggcctgaaagctgacgtgtttacccttcagtcgggtgaacattccggtgaatccagaccttctctgaaggctcgcctgattaaggtcgagttcattaagaaaggccaggaagtcgtttacacagcgccaaatgcatctcaaaccccggaacaaggttctgcggctcctaaagactacgatccgaactcgttttaa

SEQ ID NO: 78756 - DNA, 204 bp, Citrobacter koseri
atgggaaatccattcggtttactggcttcagaagctgggtatcaattacagatccaggttctgtccagtcagcgcggtttttatatcggaaccgcgaacgaaatgggacccgtgtcccgtgagtcagtcgaatactacaaaaccagtctgcaggccgatattgctcttgaaaaaggggaatggacgcagcgtgaatatgattag

SEQ ID NO: 78757 - DNA, 549 bp, Citrobacter koseri
atggcaagtcgcggaattaacaaagttattctcgttggccatctcggtcaggaccccgaagtacgttatatgcccaatagcacagctgttacagggttcagtattgcaacgtcggagtcatggcgtgataaacaaagcggtgaaatgaaggaaaacactgagtggcatcgcgttgtgttgtttggcaaactcgccgaaatagccggtgaatatctgaaaaaaggttcacaggtatacattgaaggccatctgcggacccgcaaatggactgataacggcggggttgaacgctggacaacagaagttgtggttggtgtgaacggtacgatgcagatgctgggtagtcgtaatgctccagcaggtaccggtaatgctcagcagcctgggtcggcgcaaggaggttgggggcagcctcagcagcctcagcctcagcagtcagctgcgccacacaatcctgctaatgaacctccgatggattttgatgatgacataccgtttctggggcatggttatgggatctgccgaaaagcgatctacgccatttcctga

SEQ ID NO: 78758 - DNA, 243 bp, Citrobacter koseri
atgccagttatactgagaattaacggattcaaatttttcttttactcgaacgagggaaatcctctagaacccgctcatattcatgtccgtaacgctgatggtgaagcgaaattctggcttgaaaatgaagttaaactgagcaggaacgatggcttcgatgcccggactcttaaagagttgactaagatggttcaacataaccagacgatgtttgtggaggcctggaatgactatttcagctaa

SEQ ID NO: 78759 - DNA, 249 bp, Citrobacter koseri
atgactatttcagctaaaaatgtacgatttgatgagaccaccatgtgggtcgaattaaacgatggcagggtgatgggcgtaccaatcgcctggtttcctcgtctgctgaatgccacagacaaagaacgtaatgactatgaactgagtaaacgtggtattcactgggataatctcgatgaggatatctcagtcgatggcttgctcgctggccgtggtgacgtgacccatgttccacatcgcgtagcctga

SEQ ID NO: 78760 - DNA, 1350 bp, Citrobacter koseri
atggtaaaaataaacctgcagacacgttatcggcttggggccatcacgctttgtctgcttgccgctggctgcacagactttagttctcgctctgaacccatgagcaggcttcagggctctccccgtgttcaggatctttatcaaaaccgttcccctgaagttgttcgatacgatcgttacatacttgcgagtacgcgacctgtagatgctcagcgtgacccactgaatcagattatcgatatcaggatgcctttgcagatggtgaataccattggggaaggtatgcgatacgtgatgcttgaatcaggttattcactgtgttcaggcgaaccgggtgtattctctgaattgttcgttaaaccattaccggctgtgcagcgttcaataggacctgtgaagcttggagatgctttacaaatcctcgccgggcctgcctggcgtatgcgcgtagatgacctgaatcgagaaatttgttttgttctgcgtgatgaatatcgacatcttgccctctcaacaacaggtcccttgcaggcgagtgtagcaagtcatggaacagggaaatctgcttctacaggcacactacttaacagttctaagggactttctggtactggaaataatagctatccgttgcctccggctcggccagaaagttccattttgtcaccagggacaccaaaagttacctctcaagctgtttcccctttatctgttgcaacgacagcaaaaacacctcgtaacccgttctctgccagcgagcctggggaaaaatctacggttccggtgcagaaaacacaggcaggtcccgcagctaagttaacatctggcaaggtaaaaccatcaacagagttggctcctgcgcctgcgccgtcagcattgtcagttgcgtcaacacctctgaataaagctgcacttggtgtgcctttaactccatctggtgcagtgaaaccaggtggaacggttcagaacagtaatccaccgtccactgtcatctctcctactgctccggtcagcggaaaaactgttttcactccgggagcattgctttcctcgttaccagacggacaggcctggaccgcgcaggcaggcactacgttaaaagagactctgatccaatgggctacatcggttcgctgtgagagtggcagtagtcctacctgggtagttatctggccaacgcctgtgaactaccgcatcgatgtaccatttacgctgcgcggtaatttcgagtcgattatcgtgcagctgtttaggttatatcgccctgcagaaaaacccctctatgcagcaccaaatcgtcttcagtgcctggtattcgtggacgataagccgattcaggacgggaaatga

SEQ ID NO: 78761 - DNA, 444 bp, Citrobacter koseri
atgggatatgcgctgccagttttcgcgctttgtcttgtcatcatcttgatagccggtgatgcacagcaccactcatcagagcatgtacggcttgcgctgcagcagactcagcctgaacagcttgcagcagacatgcttcggactgctgatgtcgtaaataattggcgtcacgggcggtccataacagatggccccgtatcaaccgcactgactggaatgctgccgttaccagacagtcgcatcaaaagcattattcagaacggtcgcctgtggatctgggtacctgaaacagacggtgtttatgccgcgttgcgcgcccgctcagtgacttctgcgcttgccctgaccgtaagcggcggtcatctgcggatggcggatggcactgatatgaacctgtctctgccgtccggtgtgacggaaggcagcattgtttatcttaactaa

SEQ ID NO: 78762 - DNA, 1674 bp, Citrobacter koseri
atgccgcgtatacctttctgcctgacagtacttaccgctgcgtttgtgctgtcatcatgttcgctgaatgaaatcagcaaaatagacaaggaagccgttgggcaggccgatacggctcagcgagtgttgcagagtcgtcagtccatatcacaaccaactgttgtctggatggataagccctgggtaaacctgcagccagtcacgccggtggtctccactccggacgaaaagaatctgcctccctgtcagataacgattaatcgtcctgacggcatttcactgcctgagctgggacagcgcatcactgcgctatgtggtatacgagtctccatcacaccagatgcatttgctgcgctgagcaacgtgagtaccggcagcgtggtaacttctcagatgagtggtcaactgccggcgccggatgacaatggtcgggttcccctggcacagatgggggctacgtcagctcagcccgtctccgttcagccatcaccggcgctcatgcgtggccttaaattccagggagatgttcgtgatctgctcgatgtcgaagccagcgggtacgggctgtcatggcgcagtgacggaaacggagtttatttttatcgacaggatacccgcacttttcagctcgttatcctgaatacgaaagtaaacagtagcgcatcaattaactccggctctggcaatcagctgggcagcggtggcggcacatcgggggggacgagcggagacattagctctaatcagaagaccgattatggcatgaacagcgacctgtacgacgacattcgtaaaaccatcgagcagatgctgacgccaaaatctggtcgtttctggctttcagcagctactggcacgttgagtgttactgacacaccggacgttctggatcgtattggtcgttacattgagtatcagaataaggttctaagcaggcaggtccagctcaacatacagattgtcagcgtcaaccagacgcgtaatgagcaactgggtcttgactgggggctcgtatacaaatccctgcacaattttggcgccactctgaccggttcaatggccaatgcttcgacttcagcaggcagtgccggcatttcgattctcgacacggcaacaggcaatgccgccaaattttccggctccagcctgctgattaaagcgctttccgagcagggcaacgtcagcatggcgctgaaccagaccgacccaacagcaaatctgacgccggtagcttatcagctctcaaaccaacagggcgttctgacaagttccagttcaactgcaacagctaacgtcggggttacttcctcacagaccgtaaccacaatcaccaccggtttgttcatgaccatgctgccgttcatccaggaaaacggtgacgtgcaactgcagttcgcttttagctataccagtccaccgcagatagagaaatttatcagtagggacgggaatacccgtaacgatataccgaatacctcgacacaggggctggcacgtaaagttaacctgcgctcaggccagacactggtattaaccggatctgagcaacagaacctttctgcaaacaagcagggaacattcacacccgacaactttatcctgggcggtggccagaacggtacgcgcggtcgtaacacgctcgtgattatgatcacccctgttctgctgaggtaa

SEQ ID NO: 78763 - DNA, 1281 bp, Citrobacter koseri
atgtcatcaaagaaaaaatcttcactccgtagcggcattcgagtcacccaccaccgtcgcgactggatggcaggacttcattgggagcagcagcggagcgcactgttaacgcgattccggggaaaagcctcacctgacacgcatgtagtagttgccggcaggcgtaacgcatcaatgatgggggtcgtttcccccgggcgtgtgcgacggagcccttactctcttgcagtagcattcctgctgtctgaagggggaaatacatgggggatataccgtctcagccacaacgaagatctctgggttttctttgcagccagcggtgggcaactttctgtcatgggtgatgtgaccggttcacgcgcgaagatagaatcagcagcagaaaacttcctgcgttttaacgatgctgatacaccgggtctgcgctgtgctgcaaccgcagatgataattgtgatgcaacctcgctcactgacaggctgaaccgttcgcaactgaagcgttgccgcctgggtaagcgcctgacgacgatgtctctcattatgcctgctgcgcttattacactcgtggcagcagcaggaatttactggtacgacgacgttcagcaaaaagcggaacaggctgctgcaatggcagagtttcgcgcccgaatggcgatgtctgctgataagccagctgcgccagcccgagcgccgcatccgtgggcctctcagccaccagtttcgcttttacttggtaattgctggctgacacgcgaaccacttttcgcctcggtggctggctggcgctttacggacggtgaatgtgtccctgaaggcctgcgcttgcgttacctcgccacacctggtgcgacggtggaggatttctcccaccgcgcaagggtgcttcttgggcattctgctgttttcaaccttcaggaaggaggtaaaaacggcgacgtattcattcccttccggaaatacagcgtaagtgagtataccgacgaggccttgcctggcgcggatgcccaactgatacgtttcatttcgcacctgcagcgccgcaacctggaagtcaagttcagtgaagtgaaaccgccagcggtcgcgccaggacaagagaaaaccatgcccgtacaggactggcgcgaattcacttttactgtcagctcgcgtttgcagcctgaacgtctgctgcaggattttgatgcgaccgggctccgcctgaacagcgtgtcaatcaccatgagcccgcaggggcagttcgactacaccatgaaggggagcatttatgcgcagaattaa

SEQ ID NO: 78764 - DNA, 498 bp, Citrobacter koseri
atgcgcagaattaatcccgcgggaacgggcctgctgctgtccgctctgttctgcgggcaggcagtggcaaccgtaaccagtgatgcgcttccgccgaacgttacgcttggcgaacttgaagcagctcaggcgcgcaacctcattctggagcagaaagtgcagacggcgcgtctggagcagcagctgcgtgaaagccagtccggacagagtactgacaggaattatctgtctactgccgcccagcctgccatgccgcttatggcgcagccagctccttcacaacagactgccagtgcagtcggtgaaaagcggaccggtggtgtgcgccttcaggagatttacggccgtggctcgcagttgcgtgcacgcattgttctgccggatggcggagtcacagaagtagcaaaaggcgatcagcttcccggaacctcaaagcgggtcacggaggttacctccacgatcgtacgcctcagcgacaattctgaactttcattttga

SEQ ID NO: 78765 - DNA, 1575 bp, Citrobacter koseri
atgtcttctgataaagaaatcatggattttgtctttgccgagcagcatccgtctggaggggttacgctactcatcgacggcaaccggcgaaaagaccctggcatacagcgctgggttatggatgtcacccggacatgggctgatgcaaaaactgagtttgttacactcagcgaactgaaccggcggcgtgaagtggcagaacgtcagggccgtgggcttaaccagggtgtgagcgaggcggatctaagtaaccgtgacgtcagtgtgtcgcaggataaggtcatcagctatatgaggctgggtaacgactttaatgcctctgatattcatatggaaataagcggtgatcgcaagatttgcatcgttcagttgcgtattcacggcgagctggaggtggtggatgaagtgaaagatgtggagggtatgacgctggcctccacatcttatctttccatgtgcgacgtgcgcgagcagtcattctttgccggtcgtgagcagtcagggcgcatcgatgcaaagttcgcccgccgcgccggcctctatggcgcccgctacgaacaccgtcctactccggatgggctgatagtggtcatgcgtctgatcccggatgacggggacaatataccgacgctgccgcaactgggttttttgcctgagcagattaagctcatcctgcagatcctgcgtatgccggaaggcatgacgctgctgaccgggcctactggttcagggaagagcgccacgttgcgcgtgttcagtgatatctggctgaaactgaccggcggtaaaaagcgcctgctcacgctggaaaacccgcccgaggggcgtattccgggtggtattcagacccccgttatgccggaagacaattcaccggaggccatcagccgcgcctggagtaacggaaacgcctctgcacttcgtctcgatccggatgccatcctgaacggtgagatccgtgacctgtattcccttctcgccgccattttcgccagtgaaaccggccacctggtgctgtcgaccctgcacacccagagccctatcggctccctgcgtcgtatggagcatttcggtattgatcgccaccttctggcggatgctgcactcatcactggcctgattggccagcgtctggtgccgctgttgtgtgaacactgccgggtaccgtgggaagtcaaagtccctgagcttgatgaagaaacccgcgcgcgtctcgaaaaatattgttctgtcgcgggcttgtgcgaaccgaaaaatctcttcttccgcaactatgagggatgtgaacactgccggaaaacggtaccactgaccggacgcattatcagtcgtggcgttacagggcgaacagctattgccgaagttgtccggacagatgctcgcctgatgcaactttggctttcacatgggccttcagttgccagaaagtactgggtaaaccagggtgggattactcgccgcatgcatctgttgcgttatctggcagagggtcttgttgatccgctggaaggcgatctcatctgtccgctggatgaggatgacatcatggattgtgaggtgcctgatggaaagtga

SEQ ID NO: 78766 - DNA, 1116 bp, Citrobacter koseri
atggaaagtgacagccatttttatccatcccgggaaatgtcgttccctgaaaggattcgctaccggcttgtcagagccacttttactgggaaataccgccagccattttacgaaacgctgcgctttcttcttgaaaaccgtaaggccctgaaagacgcgctgaccatgatcggcgatgtacatactgattttggcaggcgctggcatccttattatgaacttgttcaggactgcatcgagggtgtgaacgacaaccgtcctggccgcgcgctgcaggatgttctggctgcctgggcaccttacgaagaggccgcgcttatcagcgccgggatggaaaccggtaatattcctgccgcgctgatgcaggctgataagttgattgttgcccgtcggcgaattcttgggcaggtaatttttgcctcagtatttcctgccgcgcttgccatcctgagtacggggctactactggccaacaatctcgcacttgttcccaccatgagcaaaatgtccgatccagctcgctggaccggtgcactcgggtttatgaatggagtagcgaagtggagttccgagtggggtgttgcttctgccgctacagccgcagggcttgtgctgctgtctttctggtcgctgccccgctggcgcggccgtctcaggcgctgtgctgactggttactaccatggtctgtttataaagacctgcagggagctgtatttcttatgaatattggcgcgcttcttggttcgggtgtccaggaactcaaagctttgcagatccttaacggttttgcaccgccctggctgcaggaacgcatcgaggccgcgatggagtgcatgagtgaaggcgattcacttggcagagctctgcgtaacagcggatatgattttccgagccgtgaggctgtgaactatctctctcttctggataagggggatggtgctgcttcgctcatcaccaattatgcggaccgctggctggagcaggcgctcgcgcgcgtcgcgcgtcgggcgaatgccaccaaactcttttctctcgttctgattatgagtttcttcttactcatcctgatgatggtgatgcagattcaggacatgaacactttcaacttacattaa

SEQ ID NO: 78767 - DNA, 597 bp, Citrobacter koseri
atgtcagctcagacattaccacatcgccaacatcagcctgaccggggctggggcattcttgaacacggtaccattgcgatcgggacgattatcgtactggctctggttggtgctctggtctggagtctttgggggaaaaagtccgttgccgttgaggtttcaaatctccagaccgtcgtgacaaacgcgcagtcgcttaagcaggcgcaggggggatataactttacgagcggtacaactatgacgggaacgcttatccagcaggggggcgcaccaaaggctggctggactatccagggaacagccagttccggtaccgctacgatgtggaacggttatggtggtcaggtcgttctggctcctgtggcatcgaatggatttaacaatggattttcagttacaacgcagaaagttccgcaggcagactgcatctctatcactacacagctcggttccggtggagcattcagtgctatcaccattaacagtactgattacagtgacggtctggtcagtgcagaagaggcaggcaaaacctgctcatcagacagcggaatgacaggtaacaatacactggtcttcacccataacggctga

SEQ ID NO: 78768 - DNA, 480 bp, Citrobacter koseri
atgctgcgcctgtccgcttttctgctgctgattttggtttgcccacgggtggatgcattctgctttgaatcggcgggcgctaaataccacattgacccgctactggttaaggcaatagccataggtgaaagcagcctgcgaccggatgtcacaaatattaatcgtgacaaaaagaccgggcaggcactcagtaccgattatggactgatgcaggtcaattcatcgcatatcgcttcgctgatagcgcagggttacattcgcagctcacaggacctcctgaaccgtccgtgcctcaacgttcagataggtacctggatactggcgaagcattttcaggtatgcggcataagctggaactgtcttggctcttataacgcaggttttcgtaaggaccggcatgaaactcgcgagtcctatgccaaccggatttatgccatttatcgtcggcttttacttaatgaacggggaataaaactgtga

SEQ ID NO: 78769 - DNA, 669 bp, Citrobacter koseri
gtgacactgctgacgctgagtatgccctggccaactgtcattatcatttttcctctatgcctcagcttattcagttttatgaggagcctggttcgtctcagcctgatgatattggatgatgatcaggaatggtttgctgtttttttcgcccctgcatccaccggcttcatctggctttacgctacagcggcaactggcatgatgctgtcccctgtgccgctactggagcgactgatgtctctgttgttctgcctctttcttttcaggttgacgcttaccgatgcgttcacaggatttctgccccgagaattgacgataaggtgtcttattgccggtcttgtttccgctcttatcgctcccggctttatagggcacttcctcacagctaccactgcgctggtgatttttggcgtctggcgttatgtcacctttaggattcatgcccgtgagtgtctggggcttggcgatgtctggttggccggtgctattgcggcctggttgggagggcgagaggggctttatgctctgctgatcggcgtggtgctctttgtgctctggcagatatctgttcgtcgcataactgaaggagggccgatgggaccctggctgtgcgccggcgcgatttctgtgaccctgtttaaattgtatcaaccgcttattacatggtga

SEQ ID NO: 78770 - DNA, 1389 bp, Citrobacter koseri
atgcctgtgttcacatataaaacgactgaccggggctgggctatcctcagcactggtgcttcattgattattctcctggtggtcagcgtctggggctttacccttatcagtgactggatgcaaaaacggacctggctgaataccgcgtcacaggtatctcgcttcacacaagctgtgaagagctacactggccgttattacgatactttgctttcaagtgccaccaccacgaccccggttacggttacacccgctatgctgaaaaacaccggatttctggagcaggggttcagcgagacgacagtagacggacaggcttacctggctgctgttgttcgtaatgccactaatacagatcagctgcaggcactggtttacactcaaaacggcgcggcactgccttttctcgcactgcgccagatatcaatggatatcacctctggtatgggcggctatatatggacatcaggaactgctaccggcgctatgggcagctggactattcctctttcacagtttgggataagtacaactcagggacatattgcggctttactgaccacagatgaactgggcgctgctcgcggtgaaaatgatcgcctttatcgtttttcggtaaccggcaagccagacctcaacacgatgcataccagtattgatatgggaggtaacaatcttaataacgcaggcacgattaatgccgtaacgggtaatttcagtggcgatgtggcggccactggaaatataactgcgaatggaactgttacaggacagaatgttactgccggttcaaacgtcaccgcaggaaatacaataacggctaacaacgacatacgttcaaataatggctggttcataactcgagggagtaagggatggctaaatgaaacgtatggcggcggtttttatatgtcagataatgactgggttagagtcataaataataagaatatttatacaagcggtcaggttcgtggtggaagtgtgcgggctgatggaagactttctacaggagaagttttgcagctcgacggagtcaatactgctggcgcagtttgttcaccaaacggccttgtaagccgcgacgccactggagccatactttcctgtcaatccggtgtgtgggcagccgcatcaaaaatcaaaatgcaaaccgtttttggcgaaaccacctgtgccaataaagcggttgcgtctgcttattgtccgtccggtacagtggctataggtggttcttacactttaaaaagttggtctgatggttccaatcataactcacctgattccatggctcttgatcctgtaaatgaccggttctacatcgtcttaccgaacaattcaaaaggtgcagcgtgcttccaggctatagcaaactgcgccactaattag

SEQ ID NO: 78771 - DNA, 564 bp, Citrobacter koseri
atgttattgatcagtatatcggaatacatgcgtactgctcctggacatatcttttcagcgccccgttgggaggaactcaaaaggtctatagcgacgggaacaatggctggagagtcaccaataccccttataatggataccaaactggctcttcggtttcggttacttgtcttaaccttccgggggcgggaatttgactgtcaatccggtgtgtgggtatctggcggaaactacagcgggaattattcttcacttggctcatttgtgtcagcttacacagctatcaataccaccggtaagcccatgacagtatatgcatctgggggagtatccacagtgaaccggcacgtcgaggatggtgacaattgcagaaacacatgggctttgtcaggtagtgttgatgggcgcgttatcaccgccgcgggtacagctaattcaagctggagtaagtcgggtacgattaattttatcgtaccggcaggctcttccttcactgttatgtctagcccgttaccctcttatggatgctctccagggagttttagccttgctatatactcataa

SEQ ID NO: 78772 - DNA, 1122 bp, Citrobacter koseri
atgcaactcagacagcgaattaagaaaatggagctgggtgtagctcttgataaatattacggttgtgcatctgtgcaaaagcggggccatctgcaggagttttatcggataaatgttataaagcgttcagctcttgccaggcgatacatgcatgagattacttcggttgatattgcagaataccgtgatcagcgactctctgaagtaagtagtaaaacggggcgaactaatagccctgcaagtgtccgacttgaacttgcgttgctatctgccctttataaccttgctcgaattgaatggggaacatgtactcataaccctgttgagcatgtacgaaaaccaccggcctccaaagggcgaacccgaagattgacatctcaggaggagcgaaagattggcagggcgctggcaaaacgaaatatcgagttggcagccatttttcatttggcccttgaaacggctatgcgtcagggggagatcctctcacttcgctgggagaatatcgacctgcacattggcatcgctcatttacctctcactaaaaatgggagcgtacgggatgttccgttgtcgtttaaagcaagaaaggtattaagagagtattccggccctctatccggacctgttttcagttatacatccaatgggtttaaaagcgcctggcgagaagttatacaggctttaggcattgtcgatttgcattttcatgatctacgacacgaagctataagccgtctttttgagctcggaacactgaatgtcatggaaattgcagcgatatcaggacacaagagcctgacgatgctaaaacgctatacccaccttcgtgcgacgcagctggttagtaaacttgatatacgtaaacgacagacgcagaaactggcggcgatctttgttccgtatcctgctgaacttgagagcagcaataacggtattgttttacgcttctctgatcttgaacatccttcacttgaagcgcaaacaaaggaagacgttatccagaaagcctcttttgagcttctcagaattcaggctcttgctgctcgttctggagaacgactccctccaccaggcaatatcaaagctaatgacccaactcgtgtgctcattaatccgctctga

SEQ ID NO: 78773 - DNA, 867 bp, Citrobacter koseri
atgtcagtcagtcaagtcgtcccggaagaagttatacctgaaaatccagaggttacttcttcgaaagttgtgcctgctgagccagaggctcgccggttggttcccattaacctgaaaaaaatagtccggattggaggtctgggattcctcattgtttctcttgttggttctgtggccacgattgtgatcatggcacagcaaatctctgatctgagtattcgggtgaactccctggatgccgcttttcgcagcggtcagatgagccagttgtctggttcggttacttcgctcgaagctcaaagccggaaacacgagaagcagctcgagtctgtctcatcagggcttgaatcagtacaaaaccagttagctgattttcagggggaacattcaaaattaacaggaagcattaacaaactttcctcagaagccctggcgcggcgtaccgcgatagacgaacactctgaacgtattgatgacattaactcacggttgtcacaggttgaatcgcgagttgccgggctgagcaaagctgaaagcaacacttctcagaaagaatcgaagcagaaccagcaaccagtcactaagagcaaaacatcttcaaaatccgggacaggccagatcgtaaaaaagcctgagcggtcagtcaggcgcgcagctgttgaagcaccgtttgtactgaccggcattgagcggcgcggcgggcagatgttcgcagtcgtcatcccccgtggaaattcccaaatatcagatatgcggttgctttcaccgggagacgggatgctggggtggacgcttcgttctatccaggacagtggtactgctgttttcagcgtgaacggtacccaacatagtttacaggttcaataa

SEQ ID NO: 78774 - DNA, 726 bp, Citrobacter koseri
atgaagcatcagatgagaagaattttgatggcaggtgtactttccttgccgctgtgtgtggcggcatcaacagttaccactcaatcgaatcagagtcagcaaacatccctgcaggcatcatcagcaaaccaggttcagacgcagcaacagggtcaacaatgggggctttcagatgaggactggagtcgctatcagtcgttgatgaaaggagccagaggcattatgtcccctggtcttgatcctcttactgccctgggcgtcgagacagataattcatctgagcgccgtcggctggctgaattgtgggtaaaacacgaatacgcccgtaccgagaaagaacttgcatttcaacgagaaataaacactgcctggcttcgtctttatcctgaaacattggccgtgaatatggggaatgccgcgggtatcgctcatgacacacaaggaagactggcgttatttgtcaaagagtcatgttcacgctgtgatgcccggcttgctgctgttatcgccgacaacagaccggtagatatttaccttgtcggaaatgacgtgagcgacgaaaaaatcagatcatgggcaataagccatggcataccagtcgaaaaagtgcgtaatcggcaaattaccctaaatcatgatcgcggtttgtggcagcgctatgggcaaggtcagatgccagttattttgcagcagggagaagagggatggcaaattgccgcattctga

SEQ ID NO: 78775 - DNA, 624 bp, Citrobacter koseri
atggcaaattgccgcattctgaaactggcttgctgtttatggtttgtcagcactggttgcctggcggtcgtgaatgtaaatagcagtgttcaggtagttccgcaggcttatcgggtcattgctgctgccgagcgcgttccggcagaatcgctttactcgctggcgatggccgaaagcacccgtaaaaccgcatgggggtctaaaccatggccctggactattaatgtagcagggaaaggataccactttgaaacccgcgaggaggcctttgcggcacttcttggatttatgcagcgctaccctctcaagcgtatcgatgtcggtgtagcccaggtcaatcttgggtggaacgggcatcttttcccatcctttcgtgatgcttttgatccctacacaaatcttcgtgcagcggcccgaattctccgtgcctgctatgacgctcagcctggaagctggattaaagctgctggctgttatcaccacccggccggtggtaagccggcagcaaaatatatggctatcgtacgccgcaagctaagtcagatcgcacctgatattaaggtccctgaaggggggccggttgctctggccagtcactcattaacctgggttgaacctcaatga

SEQ ID NO: 78776 - DNA, 531 bp, Citrobacter koseri
atgaaaaaaaatatcgataaatatttcaatggcatcttttgtgtatcactgcttacagcagcgtttagttgttttgcttcgctgacagtggtcggggatctgggcggggagtcaaccagaccattattcgaggcgattaattcaggtgaggagtcgcatttgtccgatgtttcttccttgcctgaaccaccgtcatcgctgtctatttccgatatgttgcccgttaatacaccggaaatgacacccggaaaggtgacgtctcgccctctgcagttacccggtttgccccctgtttttgtgattggcgatgatgatatttcccgagcctggctgcggcagcgtggtgctgaactgaaagggatgggcgccacaggaatggtagtgaatgttacgactgaaagtgcgctcaacacgcttagaggactcttgccaggtactgagatggtccctgttcgcggcggtgatttggcaaagcgattgaatctgacgcattaccctgtcctgattaccgctgatggattagcgcaatga

SEQ ID NO: 78777 - DNA, 549 bp, Citrobacter koseri
atgaccacagtggttttcatattattggctttcatttcactcacagctttttggctgcggtgtaatacaagaagtgcccgtgtccgcagacatcagcgtaatcgacagacggctaacagggtgttgctaaaactgcctgagctgaaagcggggcagcaggttttatatttacggaagattaatccctatgttttcgaggagatgattctgaccgccatagagcggcgaggaataccggtcaggcgtaatccgagttacagcggtgatggtggtattgatggtcagttctggattggtcaggaaaggtggcttgtccaggctaaacgatttgccagtgctgttcgtcctgaacatgtccgccagtttggtgagttagtccgacaagaaaaatgcagaggtctgtttgtacacacaggacgaacaggttttatcagttttaagtatttcagtgattacccggaaattttgctcataagcgggtcttcccttttgctactgctgtctggtgaatccgttgaacatgttctccggccattaaaaaagaggtaa

SEQ ID NO: 78778 - DNA, 228 bp, Citrobacter koseri
atgaatttttccacatcaacattaccgtttattggttcggtgtggcttttggtttctttccggattttcatattccggtctgtattgatttctttgctgatgtttgggttatttcttttcttttatttatttctagccgtattccgcaaggccacagattctgctcatttattcctcaaactcaatgataaaacttttgctctgttccaggggagggcttttatatga

SEQ ID NO: 78779 - DNA, 2112 bp, Citrobacter koseri
atgagcgacaagtacgtgatggaatccctccttcgcccggcggttgaactgtattccgctgcggcggcgggtagcgcaacctttatttgccttacggccccctgggctgtcgcgctcgcaccatcggtcagttgggtgaccgccgcggggtttggtgtactggcgctgaagcgtacatctgaggggatgaaaatactccgttaccgccaaaacattcgccgtttgccccgatatgtactgaccagcgagcagatccccgtcagccagcggcacttgttccttggcaagggcttccagtggtctccccgccatacgcagcgtcttctggaagcgaggcgtccggagtgtgaggtctacgtacaaccttctgttatttatcgcctggcacgcgatctggaaaaaaagatggagtacagcttgccgtggttgtgcaggctgacacgaactgattcggcgctcaacccgtttcgcccgttgcctcctgtaggaggaagccccatttaccatggtgtggaactggatgaaactacggtcacctatgatctcggagaacgtgtagggcatacactggttatcggcaccacacgagtcggtaaaacccggcttgctgagttacttatcacacaggatattcgccgtaaaaacgctgcaggcgagcatgaagttgtcatcgtgtttgacccgaaaggagatgccgatctgttgaggcgaatgtatgccgaggcacaccgtgctggtcgtcaggataacttctgggtgttccacctcggatggccagatataagcgctcgctacaatgccgttggacggttcagccgtatctcggaagtagcatcacgtgttgcaggacagctctccggagagggcaattctgctgcatttcgggaatttgcctggcgatttgtcaatattattacccgcgcgctggtcgcacttggccagcgtcctgattacggtctcatactgcgttacgtgacaaacataggtgaactgtacgaaacctatgttgagaatatgctgagtgaaaaggcaccacagttgctgagtacagtcgaagcgctgttaggtagcggtataagcgagaaggatctgccgcgtcacatgcagggcaggcctaatggcatgaatatctgggctattgagcaggtactggccagcgaagaaggaaaaaaactgtgggacccggtgctggatgggctacgtagcgctgtgcaatatgatcgaacgtatttcgacaaaattgttgcgtcactgctgccgctgcttgaaaagcttacaactggtaaaacggccgcattgctggcacctgactatacggacctgaacgatccgagaccgatcctggactggcataacattataaaatcgcgcggcgtggtttatatcggcctcgatgcactatccgaccctgttgtcgcagcagcagtcggcaacagcatgttcgctgatctcgtttccgaaggtggacacatctataaattcggtctcggtgatgaggatggcagaaaaagttcgaaagtggcgataaatcttcactgtgacgagtttaacgagttaatgggtgatgagtttattcctctcatcaacaaagggggtggtgcgggcttccaggtgactgcatatacgcagactctttcggacatcgaggcccgtataggcagcagtgctaaagcgaatcaggtagtggggaacttcaactcattgataatgctccgtgtgcgtgaaaaaaacactgccatgctcctgaccgaccaattaccggaagttgacgtctaccagaaaacccttacatcgggtgtcactgacgtatcccggccgggagagggtactgattttaacagtaacgttcaggaccaggtcagtctggttaaagtcccgatgctcaacccttcagacgttatcaacctgccgaaagggcaggcatttgccctgcttgaaggagggcgcctgtggaaaatcaggatgccgttgccggctgataacgacgatccttacatgcccgcgagcctgaagcagctggctgacaacatggagcagaattaccgaactggagaatcctggtggacaggcggtgatgcggcatattcgggggggcaaaatgtctcagcatga

SEQ ID NO: 78780 - DNA, 690 bp, Citrobacter koseri
atgttgctctgggatttgcctgtcagtttaattggcattctgctggggtcgcttctggttagcctgctgatcgaatatgcctgcattgccttactctggcctgacgaaggtgcttcacacagctaccgggtgatggttgcagaaagccactggttgtcggaagggtacacgcggagtttactgatggcagcgccggttgagacgatttcgcggtgggtacataccgcctggaactggttgtttgtcgatagcggattcagccattggcttcaatcattcagggaaactggtcagaaggggactggagttatcccaacgattaaccggttcggtgactcactaatcggctggcttggggagtacctgcaagctacgctctgggtaactctgattttcttcatcagggtgatgatccttttcctgagtctgcctctgttcggcctggtgattatcaccggcatagttgaagggctggtccgtcgagatttgcgtcgttatggagctggatatgaatcgagctttgtctaccatcacgccaaacgttttattaaacccgcactttacggcccctgcatgttgtatctggcctggccgactgctgtctggccaaatctcctgttgctgccatcagcattattacttggcggtgttctggccatcgtcacggcgtcctttaaaaaatacctatag

SEQ ID NO: 78781 - DNA, 318 bp, Citrobacter koseri
atgcgtcacaccacaatcatcctggcaatgttattgcccgttctgccggtgctgacctgccaggcgtcagaaaaagatgagctggcactcgtgatgcgccagctggatcaggttcaggctggccttgatcgcgcccgcgtcgtagccaatcagaatcaggacgctcgcttttatttcgactatcagcaggcaacccgtgacatctcaacgatgaggcagggcatatccacttatctcgagccgtcgcgcgcgcagccaacagcaccctccactttagtcaccgggcagtaccgtgctgaggagccctcatggcgatga

SEQ ID NO: 78782 - DNA, 246 bp, Citrobacter koseri
atggcgatgaatggctctcagctaaatggatggagtgcgggcaccggaagcagcctcacgcccgggcaactgaacctcttgatcctcggtacgctcgccatcgtcgttctccttttcagcgcatgggcactggtgcaggcctaccgtggcctggtcagtaaatcagtgacgttcaggcagttcaatgagctgctaattcgactgattgtgctttatctgctgaccctgtttctgtttttccactga

SEQ ID NO: 78783 - DNA, 366 bp, Citrobacter koseri
atgaaattcactttcttcaggcattttcgttctgcctattcccgtgcgggatatttgttgcttaccggtctcttaactgcaagtcaggctatggcagacttgccagctgttgaacagccaacatctggaggcggtggcggaacctacaacaccgttatgggctacatcaaaatgggggcacttgcgatagggcttctcgtatgtgtcggtgctttttttgccgtagcgcatgccgtgattaccgcatttcacgatatccgtcgtggtaagggggaatggactcagttcctggtctatctggttgtcggcatcatcctcatccttttggttatttacctcgcaactaaagcttcagatatcctgtaa

SEQ ID NO: 78784 - DNA, 381 bp, Citrobacter koseri
atggccgtcattgatttcctccctgacagactgaacaacccccccgtggtctggaaagggttcacatccggggagtttgtgctggcggccgtcatcggtgttattgccggtatccctctggcaataccgttagctctggttccttttgtcggatggctggcttttccgacgtgcatgctgctgatgcctctgttggtcattttttttggcggcaactggattgccagctacaagcgcggtaagccagaaaattatatctggcaacgtctggaggaattgcgctgccgtgcacgtatgtcccgaaccatgattctggatagcagggcgtgggaacttaaacgaacgaaacctgttccgttgatgcgcggagggaaagtatga

SEQ ID NO: 78785 - DNA, 660 bp, Citrobacter koseri
atgagtcgttttcgtaacggtataaccgcccgcgataatcatattatttcgctacgtatcgcttgtgttttgctggctttgggactgttcgtcaccagtctgggatggatgcgagcaccctcggagctgacaattcacaacccacctgacctgcgttccggcagtacccgaaaatggtgggaggtcccgccatctacggtttacagttttgctttttacatttttcagcaactgaattcctggccgaaaaatggggaagctgactacacagccaaaattgcccaaatgagcccgtatttgacgccgtcctgtcaggattttctcaataaggacgccgagatgcgcaagaataatgacgagctgcgcgatcgtgtacgcgtggtatacgaaatcccccgtcgtggttacagtaaccgcagcgtgaccatcattgatgaagatcattgggtggtacggctggacctggtagctgacgaatatttccataccgaacccgttaagcgtgccctggcgcgttatccaatgaaagtggttcgctgggaaggtgacccagagcgaaatccgtttggactggcactggattgctatgacagcgcgccacaaagacttgaggcgatctccttgcctgagccagaacaaaagtcgggagcattcaattga

SEQ ID NO: 78786 - DNA, 900 bp, Citrobacter koseri
ttgaaaaaattctcagtgatcctgctgaccctggtactggtctcagccggagctcgtgctgttgagcttatgaaatgggaacggatacctttgcagattcccctgactgtagggcaggagcgaatcgtttttgtaaacaaaaacgtgcgagtggggtttccgcccacactcaacgacaagctgcgtattcaaagctccggaggtgtagtttatctcgatgcgaaagaagcctttccggtgacgagactggaacttcagaacaaggaaaacggggaaatacttctacttgatgtttctgctgcccccggtaaaaccacgcgggaacctgtcaaaattgtctacgacggagaagtggctaccgcttcggcgaccgataaacagacggtcagcagtgatggggacagtgccggccgtcagtcgtcggcagaggcaaatgcagaaagccggaggcccgcaaaactcaatgcgccgctgcccgttgtcctgactcgttatgccgcacagaacatgtatggaccgttgagaacggtagagcccgtaccgggagtaagtcaggtttcactgaagcttcctccccggatcaccacacttatgccctctgagtccgtcagcgtcacgccgatggctgcctggagtctgcagggcagcagtgtaattgcgctgcaggtgcgtaaccgatcagcagtaaaggtcatcctcgatcctcgttcgctgcaaggtcagtttactactgcgactttccagcaccgttggctggggcgtgccggtacaccggaagacacgacagttctatatctggttactacaggacgtcccgaaagtgcctttattgctgaacagcgtttacccgaatctgaaggaaaggagagtaagcggagtaaccgaggagcacataaatga

SEQ ID NO: 78787 - DNA, 1527 bp, Citrobacter koseri
atgaaaaagcctgcttcaaacctgcttgtgaaaattgctgttcccgtcgtagtggtgggcgccatcatgattggggttaaatcctgtacagataaaaacgataaaaatgaagcaggccagaaaacctctaatgtcgccctgaaggaccttacaccagaagatctcaaagcgctgggtgtggaaggtgacaccgcgcaggatactttgcgtaccctggttggtagttaccgtaaggttcaggggcgccttgacagccttgaaagcgataataaaacgcttgctgatgaaaataaggagctgaaaaaaaatagcaccaatgttgatcagcaaatcagccaggctgtggggcaagttcgttccgaagaggctcaaaaacgtgcacaactgagttctcaggttactgatctgagttcgcaggtgaaccaacttcttgaccaactcaaaaatggctcctccggcttaacggcaggaaataaaggtaacgttgcaggcagcgatattccagtgggactgggttatgacaatggactgaccggaggcacgggaaatctatctcaaacagatggcaacgggttgcaatgggttgagccgaaagatggtattgccacggatgcgaatggtcgacctgtctcagataaaaacagtaataacgcgactggtttttcttttgccacctcctttggcgctgcaggtgatgcagccaggcaggcaacgtcagcagtaagtacaacggtccagaacaacattcccggatctgaaaaaaatgctgcccctgtttatacccttccggaaaactccacgcttgtgggtagtcgggccatgaccgcgctgttgggacgtattcccattgatggcaaggtgactgacccttacccgttcaaagtgatgatcggaaaagacaacctgacggcaaatggcattgaattgcctgatgtacagggggcgatcgtttcgggaaccgctacgggggactggacgctttcctgcgtacgcggcgccataacaagcatcacttttgtttttactgatggcaccgttcgtacgcttccttcacctgaggggcaaggcagtaatggtggtaatcagaacagccagggtgggaataacagcagtattggctggttatcagatgacaatggcattccatgcatttcaggtacccgaaaatcaaacgcttctacttatctgccaaccattgccgcacttgcagctgccagcgcagctggggacgccgtggctgaaaaccagaataccagccagaccaatggctatggtggtgtgacgtctacgctgacgggggatgccggtcaggccgtgttgggtaaggcgttatccggcggtatgcgtgagaccgttgactgggttaaagcgcgatatggtcagacttttgacgcgatctatgtaccgcctggacagaaagtggctttacatatcactcgtcagttggcgattgattatgaagaaaaaggccgcaaggtgaaatatgacgatttcagcctcgctggtagcagcacgggcatggactga

SEQ ID NO: 78788 - DNA, 264 bp, Citrobacter koseri
atgcagaacaataaaaacctcgagtatcgggtggactatacgccactgggtggccgtctctttgccggttttgtcaggtgtgataatggcaaatgggaaggtagcaggcatgaagtcaccgaacaggccctgctcgctgtcggaaagaagcttctgagcgagggaaatggaatgcagatgcagctgcctgatggacgagtgattcgtctgtcagctgtcatcagtgattcggatgaagcggaggtgcatgttgctcagttttaa

SEQ ID NO: 78789 - DNA, 417 bp, Citrobacter koseri
atgttgctcagttttaatcatctggccaccgttatgttggtcgttgtatcgcttgccctctcgggttgcagtacgtcaaaagaggaaatgttgccgcctggcgacagcaccatgcttgaattatggaacgatggtgcatcgtcaactcatgctaccaacgagagcagaacaacacttcgccggccagttacagacagcgaacgtgagatcagtcagcaggtcagtaacagctacagccgcacccaggaaaatgaaattcagcagacgtttccgcgtctgccaaatcctgacatggtcatgtatgtttttccgcatctggctggcgggaacacgccggttccaggctacagcaccgtctttcctttctacagccaggtacagtatgcgttgcctggtgagcgaacggaggatctctga

SEQ ID NO: 78790 - DNA, 2817 bp, Citrobacter koseri
atggctttccctttatttagccgacgtcgagcgtctcaggatgctcatcagtacggtaacggtccgttttccgtcagtgggtatgaaccgcttacccgggaagggcaactgactcattcagatgaagcgcgtctgtattccacggcaccttccattatcgatcatgttccctggggtgagtatttgccagagcatgaatgtattctgcttgacgatggcgtatccgttggggccgtgtatgagattatccctgtgggcactgaagggcgcccggaaacacgtctggacgagatctgcaatatcgctgagaacgccctacaggacagtctccctgaactggatgatcaccaatgggtggtacagtttttctgccaggatgactctgatctctctacttatatggatactatcagaggctatgtcaggccaagagctcagggaactgcattcacgaaagcctggctggctgaacaggagcgccacctagaaaatgtggcggtggaacaggggctttttgtagacgaggctgtcacaggggccgcctggagagggcaaattcgcagaacgcgcatggtggtttaccgttgggttgagacaccttatcgtgaccccatgccaccggaggtgctgctgaaacaggtctgcgatcgcctgactgcagcactgagcggtgccggtatccggtgcgaaaagcagaacggcgagcaaatccatagttggctgttgcgctggttcaacccggcgccggcgtgggtcgataagaaaacattgtatcgttgcgcaaaacactccgatcatgcaccgggcgatttgcctcttctgaatgatttcagcgaaagcctctggtttacccgcccgcgaagtgatgccgaaagcggtgtgtggtggtttgatgatgtggcacataaagctgttccggttgcccgcctgcgtactgcaccttctaccggtcatctgacgggggaggtaaaacgtggtgataatgtgaatgccattatggatctgcttccggaagggacagttctggccatgaccctggtggttcagcctcaggacaagcttgaagaaagttttgcgagccttagccgcaattcaatgggggagaatgttgattccctgcgtgctcgcgaagacgctgctacagcgcgtaatttcctgggaaacaaacacaagctttaccgtgcggccatcacactgcttatcaaggctcaggacaaggaaacactcgataaacggtatcttgatctcagcagtaaattactgaactgtgggatggaaccgataaatccagaacacgatattggtcctctcagcagttatatgcgtgcgttacctatgtgctttaaccctcaaatggataaacacaactggtacacgcgccttatgtttgtacagcattttgcatgtctcgcccctatttatggtcgcgacaccggtactggtcacccgggggttacgttctggaatcgtggtggtggccccctgtccgtagatccacttaataaaaatgaccgtacccagaatgcgcacctgctgcttttcgggccgacaggtgccggtaaatctgccactgcgctcgataaactggctcagatggtggcaatctaccgcccccgtatatttttgctggaagcgggtaacagcttcggtctgtttggagattactgtaattcgctggggctctcagtgcaccgtgtcagtatcaagcctggtaaggttatttcacttgctccgtttggcgattcacatctgctcatgcaggcgaaacctgagacgttagtgacaagcgaagaggccctccctgacattgatgaagatgatgaggacaaggacgaagaacgtgacattctgggtgaaatggagattgcagcgcggttgatgatcaccggtggtgaagcagcagaagaggagcgaatgacacgcgccgaccgcggtatgattcgtgaggcgatactcattgcggctcgtaaagcgtttgacgaaaaccgccagatgctaccggaagatttaatgttctcgcttgagaacattgcccgcgatgtcagcatgggagaagacggccgcgagaaacgcacgccagcgcgacgtgcgcgagctgaagagatggcagaagcattacgcatgtttaccgaaggttttgaaggggagttgtttaaccgtccgggcgcgcaatggccagaggcagacgtgactattgttgatttaggtacgctggcgcgtgaaggctatgaagctcagatggccgttgctgtcatctcgctgcttaatacgattaacaacatcgcagaaagggaacagttcagcgatcgggatatcattgtgccaatcgacgaagcgcatattgtaactgctaacccgctgttgggcccgtatgcaaccaaaattgtcaaaatgtggcgtaagctcggatcatggctgtggttgttcacacagaacctggaggatttccctgacactgcgaaaaaaatgctcaatatggcggagtggtggatctgcctcgttatgccacctgatgaagttgaacaaatagcgcgatttaagacgctcacagaagagcagaaggcgatgctgttgtccgcgacaaaacttccgagaaaatacacagagggagttattttgtcccgtaaggtacaggcgttgtttcgtgcggtcccccccagtttgtacctggcgctgggaatgactgaaaaagaggaaaaagccgaaagacgggccattatgaatgaattaaattgctcggagcttgaggccgcatttcacgttgcgcgccgcctcgatgagaaacgtggcattggcactattcaggggacaatatga

SEQ ID NO: 78791 - DNA, 408 bp, Citrobacter koseri
atgaaaaaactgattatggcgacgccgatcgttgtaccggacaaggcatttattgcctctgttatttttaccgttccgccacagggttctgcctcagtcggtgtggctgacagtgagtcgattaagcatctgcaaggggagatcgttaagagactggagcagcctgtattgctgtcggtctatcctcaccgggttggccggcgcagctgcgttgcagtccacctcagcgacgtgcatgagaaaaccctggatatcctgataactgttaccggcaatacactctggccagcagaacaggagtaccggtcgggtatccgatggaatatctgtgtacccgatgcaaccgatatgctctgggttcttaaggaaatcgacagggtgacctgtgacaccggatgtgacttataa

SEQ ID NO: 78792 - DNA, 408 bp, Citrobacter koseri
atgaaaatgccattttgctgcctggcagcactgttcctttccgtcggtgccagtgccggcacagtgatatataccgactcctctcataccatagcagcaaatcctggtccggatgtctccgttgttgagctcgatgcgcccgaacgtgcacaggcggacattttcggtcagttatctgccgatcccgttcttgcagaacaacgtgcccgggcagtgatctcttccccgaatttccggcagcagcaacaacaactggcggaagcttatgcgggtgtcactcatgcctggtccctcggcctggaaaaatacccggctgtggtttttgatgacgtctttgttgtctacggtacgactgatgtcaacgaggcaacccgtcagctcgctgcctggaaggagaagaaccgatga

SEQ ID NO: 78793 - DNA, 972 bp, Citrobacter koseri
atgaaatctttctccttccgcccacgtcgactggcgatcgccacattgctggtttgttccggcaccatggccagcgtcaatacagcgaatcttctggccagcgcggcaagtacagactgtatcagctggcgtgtcagtggtatctgctactggttattgtgtaccccatttggttgcacggtgaaaacctcggtgaaagtgacacatttcattccggaggctgtggtatcggcttacctcaaccccggagataacccctggactgaaatgtccacagttagtaacgccgccagcggtgctgaaggttctctgctggaaagtgtgacgggtgtgagtacggggggcggtcgtcaggagatgaaagctcccggggaacgtaagcagaacctgcatttctattacggcgacgcctatggccatccagcaacaaaagtcattggcggtatggtgccgggctattcatgcgacagtgctgccactcctttcatgccctatttcaacagctcactggatgctctggtctggcgaacgggtgtcccggagaccctttatcccgaagcactcatccccgggcaacgagaaatcggggaaaccacatccggcaatatgtgggggaacgtttatccacgtagcgggtttgtcacccagacagacagttacaaatcagcagcggttgtagttcagcgtgtcgctgacgtcattacccgctccggccagctccacgtctacaacccccttacgggacagaagtccccgggttactggccacccgagccggtaaaagaaaataccggcaccaaaaaccacaaatggcagcgactttcgcctcagttgtcccagacctgtgcagtgtttcccgacaccaatggccagattgcccaggacggtaactatgcctgggcattgtggcaaccgtacagctgctgcaaacgtcgcggccagacgttcctttccagcaccgatttctcataa

SEQ ID NO: 78794 - DNA, 1395 bp, Citrobacter koseri
atgaaaaaagcaggacttttactgatttttgcctcgctgccggcaatggcaactgatatctctttgtcttcatcgggggcgtcagttagcggtaacgctatcagcgatgggctcttttattctattggtggcggttcggttatttcacccccgcccagtcgtaacaatatgtccaggataggcattaatggtggccttagcagtgatctgatgtgtggcaatttcgacatcaaaacaaccgttggcaaccagctgaatggtattaccagcgggtttaaggatctgatggggaatgtgattcagggggcgactggtgctgtcatgagtatgccggcaatggctattcagcgcgcaaaccccgggctgtatgaaatgctcaccaatggcgttctgcaggccggtttgagctttgataaagcgatgttgaactgtcagagcatgtcgaagaagctggctgattataccattggcaataaatggcagcaggtagctgtctctgaagagtacaaagatattgtggccacaagtggcggcgatgcggtttccagcgaccagaaactgcaaaaagcaactggagaggaaggcgtgacgtgggttggtgggcagaaaagaggcggcaaggggcagcccgcaattcagcccactcgggatctggccaaagctggttataacatgatgaataatttgccagtgaccagtaacagcagcgtcggctcctcgagctgcaatggtaccgcatgccaacgttataaatcttctgaagaggccgctgcggccgttgttaaagtgcttggtgatcgctccatcaggacttgccgggaaaccagtgaatgtaccagtggtggaaccgataaccagccgggcagtgctgtcgctggtactggcttttctcccatccttgaggatgccacgaaagagaatctggagcagcttagtaagctggttagtggtgagctgcagcccaccactgataacctttccgcactgaaaaccggcagtctggttgtcacccgcggggtaattcaggcattacgtgacgatccggacaaagcggccctggttcagcggcttgccggcgaactggcgatgtccgataccgttgaaaccgcgctaacaatgcgcaggatgctcaccactggtgaatccgaacctaatgctgcagagcagccggaagccattgctgagggtgatcgccgcatcgatgccctcgatcgcgagctgacggcgctgcgtaatgagatggagttacgcaaatctataagcaataacagcctgctgacggcactggagcggcaggggacaaggaatcaggataaccgtctgcagcagaaagccggtaacgaggaccagggcttcagccagatgggccagtctcagtcttccggagcaaactga

SEQ ID NO: 78795 - DNA, 339 bp, Citrobacter koseri
atgagactttacccgttcagcggccatattggccgcattctccttatggtgctgctcattctgttgatgacggccagcatgtttgctatcgcagcggtatttatggcttacgaccctgatggccacatcacacggcgctggttgcatgacagccgatggggactgtttgcctggcgactggttctttatggctgccctattaccgcctggatattgaaggtacgcccacaggcattaatccgctggccggatgggcgtccgcgtcttgtgcgtatggaactgatgggggtgttgttcctggtagccacggaatatgtggcctggacaagcgctgtgtaa

SEQ ID NO: 78796 - DNA, 1545 bp, Citrobacter koseri
atgaccgcaaacagttttctggaatattttctcgttctctttggctgggtaatgaacaatgccatgtggagcattctcagcagtacaggcctttttgcattgccactggtggtcagggttcttggcgtctggctgaaagtgagggaggagggggctgacgaggggaacaaagggcttcttgcccttccgcgaatcgaacatgcactgtatgtgtcttatcttgtgatgctcttttgctgtattccgctgttgccggttgatatcagcacaatcaagttcgacagctcgcgcgctaaacagtgcggcgtcagtgtgccgacgccacagaattctggctacaagggactcgttaacgattttgacggtcgtacggccgaggttccagtttggtggtatctcctgcatatgatgtcgaagggcacaacgcaggcaatgattgcgtcaatcccatgcggtacgaatttgcgacagatgcgttttgacgttcagaacacgaaactgcgtgatcctgtgttgttgcaggaggtccaggaatttgcagatcaatgttactcgagagcatatttcagactgaaaaacagcaacagccagctcagtgatgccaccatcaactccgtgggctggataggtagcagctacttcctgaatacttccggatattatgactactacacggctatgacgccacgtagccagtggccttacaacagcagccgggacagtggctatccggatactggtgcaggtggatatccaacatgtaagacgtggtggtccgatggtacttccgggcttcgcaaacgagttctggccagttttagtgataacacacgtaaggagatgcagcgtcagttccccggaaagcagtgggaagaaattgcgttacgctggcttgtcagcccacgcaacgcagatctctccggcgccggtaccacttatgctgttggcagtagcgacacaaccaccggagtagttggtaatcttacacgccttacctcgtctattggtcttggactgaaacaggccgaggcgttacctggttttgatgcaatgaagcaggcactgccgatgatccaggcattattgctgatgatgataatcacggtcattcctgcgttaatgatgttcagcgcctacgatccgaaaaccatttttaccatctccttcgcgttattcgctcttcagttcattacgttctggtgggaactggcaggttggcttgatgacagattgatcaccatcctctatgacaatatggctgagcaggggattgcaaacagctcggtgcctttcgcggctttctttagctcaacggctgatggatggattatgaacctggtactggggatgatgtacctggtctttccgatgttctgggttggtatgctgagttgggctggagttcgaattggtaatatggctaacaactttagtgatgcttctaaaatgcctacggatgctggctcggaagcaggtaaaaaagctcaaggggtggcgattgatgcagcttcaggcgggattaaatcaggattaagcaaaggataa

SEQ ID NO: 78797 - DNA, 282 bp, Citrobacter koseri
atgagcgaggacggtttcaataaagatgacctgagcagcacctttgcgcgtttcaccacaaaacgtcgcaatatcgtttgtgatgaatccaagctgaagcggaaaaaacctgagccggtaaaactttcgagtgcaacacaagaaattggttgtgtgatttcatctgtgctcgcctctacctctaaagcggacgtcacaaaagacaaacaggaccaatataaatctcctatccgttacagctgggagaaaaaaggtattaacggtggttctaacaatttttaa

SEQ ID NO: 78798 - DNA, 639 bp, Citrobacter koseri
atgcataccttcttaacggagtatttcatgactaacctgcctgctgacaccgtccgtcggatcgaggacgccgccgccgcactcattgccgccggcaacccgaacccgaccaacgaacaggtccgccagcacctcggtggcggctccctgtcccacatttccccggtgatgcgggaatttcgggcacgccagcgcgcactggccagcgaacagacgccggctctgccgccagagctggcgcagctgctcaccggccagttggccctgttgtggcaggccgcggtgaaacaggcagaagccgggacactggcggcccgggaacaggccgacaccgatatcgcccgggccgaccaggagcgcgacgaggcgctggcgaaagtgaccgcactggaaagtgaactggcggtgcttcgggaggtggtgaccgaacgtgaccggttgctcgatgaggtacgcgggctgcgcgcggaggcgctgccgctgcgcgagcaggtagcccgtctgaccgccaccggcgaacacctggcggcgcagctgcaggacaccaaagcggagctgaaggaaacccgggaggatggccgtgcgctgcaggcagagctgctggccctggcacgccacgacgggaaggcgaagaaatga

SEQ ID NO: 78799 - DNA, 501 bp, Citrobacter koseri
atgggaaattattcagattttgaaaccgattttgttcagcgaacactggcgcttatcgatcattataacgaaatgattgaggtgctgggcaaaccattcagggagcagtacaactacacgttgaccctgaattgccttctgggtcttatcgtgttaccgaaagagagggcgctctctttcctgcctgccgaccgtttaacgcggcaacttaaagcagaaatgggattacgtgagtcacagctgcccggaccggaaatgaacctgcgggagttgatccataagatgcggaattcagttgctcatttctgtgtccaggtagagtcagccagcgatgcacaccttgtagactggattgttttcagggaatcccagggagatggagaagtctacgccagcttcagcgctccggagcttttaccctttctgaaatattatgcgaccctgctgctcgacaatatggctcggcgtcgagcccccgctgttaacatattggatttgtga

SEQ ID NO: 78800 - DNA, 774 bp, Citrobacter koseri
atgttgattctcgattgctcctcacgaactcaggcgttgcatacattatctgccgggtttgcctgtccccctgaaaagctgaaaaaagtgctgctttcgctcgatcttgaaagtatctacgagcttaatcctcgccagttggttgatgcacctcagtatctgagagactacgtctgtgcggaactgggcgaaccgggaccattcacccgggctctgtggtttcatggcacccggactttcgccggtaatacttttccggcggggttactggcgctaaatcagtcagaatccctcgccatgaaaatgctgctcaacctggccccgaatgagatggtccgtaaacacctgcaggaatgggatgttccggggggcgtcccggatgagatgtttcagctcagaaccggcgataaaattcactggggaccttatggccatttagtccgggaattacattttaacgccagtgaaaatggactgcatgattacctctggctgccggagctggtagaggatgtctgtaaggcctaccagaagaaatacggccacgatcttaaaccgcattatctcagcgtgcttcatccctgtattgtctggttcgaggcggatattgtttatgaaaaaggggttcttgaaacggctctggcatatgcctatacatcagtccgtgacctcccgccggacggaaacgcaactttcggcatagactgtgacgggaaatctgtgtccaggtcggccattgccagaatcgagtttctgcagcccgggcagatgtaa

SEQ ID NO: 78801 - DNA, 1134 bp, Citrobacter koseri
atgcacttttatgtggatgaaacaggccagactggccgaaacctttttgacaaaacccagccagtcctctcctacggagtgctgtcgtctgatgctaatctggataaggttgctgaagcggatcttgccgtattacgcaaaacgcttggcgtgcagcgcctgcacgctgcggaactgggcttgcaccgcctttctgaccttgtggatacgctgctggttctgcagaaaaagcaccggatacggtttgacatctggcaggtagtaaagcgcgatcatgccattatttcgttcttcgaccaggtatttgatcagggaatgaatccagccgttccctggtctgcatactggacccctctgcgctaccccctgctgctgaatctggccagcctgtttgatgatgaacttgcttcaaacgcatggacggcaaggctggaggcgcatgatgagcgggcgtcggaacttttttgtaccgtcagtgatgaactgatcagcaggacggcagccagcgcgctggaccaccggtcgaagcagctgatcaccgatgccctgaactgggcgtcagccaattttgaacagctgggctataactgtaaaaccaacaaggaaaggctgcggattatgcccaatatgattggctttcagtccgtattgcacgggatctgttcccgcctgggggcaccagaaagaaaggccagtatcattgttgaccagcagtcacagttcaacaccacccagcgtgaacttaacgagttttactaccagatacgggagatgccctgggaactggggcccggattacctgttatgaacatgaaaaatatgccggctgaaccacttgtattccagtccggtaccaagagtgcaggtctggagctggtagatatttatctctggacattcaagcgattcatggaagacaaggcgctgacaaagccactttcccgccttgtttataccaatctgaaaacagccaggaccaacagcgtgtcaatccagtcggttgccagtcgatttatggaactcctgggtaaactcccggtaccaagcgcagagatcatgaggcaggcgcaggaactgcgggactttgatgaagccagacgcatgccatatgtggtgtcgggatcacccgactga

SEQ ID NO: 78802 - DNA, 513 bp, Citrobacter koseri
atgaccatctttaaggagaatattgtggacacaagtctgattggaccgatccttacggcgctgcttgccgctgcggggttctactgtaagttttggtttacgcgttatcaggcctcccgtgatcaggcccagaaagtcagccggacgatcgaggatgtcctgagcaatatggccgcgctgttcggacagaagaaacctgcccggatactgagagaggaattttccgctgttattgcgccgcttcatcaggaaatgcgcagccttgacgatatgacgtcccgtctgccgctgaaatggctgcagcgcgaacagcgccacgttctttatcatgcccgatggctgcagcggtatctggattcgcgcaggggcggcagtgacggggactttatcctgctattgcacgatgtggcgatggggaccgattatcaggttgctgacattctggcatcgcagcatgactgtaagcggcgtcgtggatcacagctgccggttaacctgaaaacctgcccctga

SEQ ID NO: 78803 - DNA, 255 bp, Citrobacter koseri
atggcccgtacgatgaccgtggacgtgggtgatgagctgcgtgaattcatcgattcccaggttaaggccggtgattaccgaatccagagcgaggttatgcgtgacgcgctgcgtctgctgcgcgatctgctggccgaagggatcagcagcggcgaggcgaaaccatggaacaaggatgcattcctgaaaaacgccagtgccagggcggaaaatgaaagggatcgagctgatgcgaaaagagaagaagacctgtaa

SEQ ID NO: 78804 - DNA, 435 bp, Citrobacter koseri
atgaaaaaaattcttgtatcctttattgccatgatggctgtcgcttcatctgcctgggctgcagagacaatgaacatgcatgaccatgtaaataatgcccaggcgcctgcccatcagatgcagtcatccgctgaaaaaagtgcagttcagggggagagcatgaaaatgatggatatgagcggtcacgatcaggccgctatgtcccatgaaatgatgcaaaacggcaattctgccgcccatcaggacatggctgaaatgcataaaaaaatgatgaaagccaaacctgagaacacccaagaaactgctaagccattttccgaaatgagcgagcatgagaaagccgctgttgtgcatgagaaggcgaataatggccagtcttccgttattcatcagcaacaggcggaaaagcatcgcagccagatcacccagaattaa

SEQ ID NO: 78805 - DNA, 432 bp, Citrobacter koseri
atgaaaaatatcgtcttagcatcagtgttaggtttgagcttaatttctacggcctgggccactgaaactgtaaatatccatgagcgtgtcaataatgctcaggctccggcccatcagatgcagtcttcttcaactccagccgccatccagggggcagctccacggatggccggtatggatcagcatgaacaggctattattgttcatgaaaccatgaacaatggttcagcagatgcacataaaaaaatggcggaaagtcatcagaagatgatgggaactggcaccgttaacgcttcccgtccggcgacttcgtttgcggcgatgaatgaacatgaaagagcagctgttgcccatgaatttacgaataacggtcagtccggcccccatcaggctatggctgatgcacaccgccgcatgatcaatgcgggctga

SEQ ID NO: 78806 - DNA, 234 bp, Citrobacter koseri
atgtccggcatgaaaggtatgcatgacaaaatgatggccgctgtaaaagagtccgatcccgacaaggcttttgcgaaaggcatggtagcacaccatgaaggggcaatagcaatggctgagaccgagctaaaatacggaaaagatccggaaatgagaaagctcgcgcaggacatcattaaagctcaaaaaggtgaaattgagcagatgaatacatggcttggtaatcaaaaataa

SEQ ID NO: 78807 - DNA, 276 bp, Citrobacter koseri
atgaaaaaactgtttgccgccctcgccctcgctgccgttgttgcccccgtgtgggccgccacccagaccgtcacgctgtccgtaccgggcatgacctgctccacctgcccgatcaccgtcaagaaggcgatttccaaggtcgaaggcgtcagcaaaattgacgtgaccttcgagacacgcgaagcggttgtcacgttcgatgatgccaagaccagcgtgcagaagctgaccaaggcaaccggagacgcgggctatccgtccagcgtcaagcagtga

SEQ ID NO: 78808 - DNA, 408 bp, Citrobacter koseri
atgggactgattacacgcattgccgacaaggctggcgcgcttggcagcgttgtttccgcgatgggatgcgctgcctgtttcccggctatcgccagcctgggcgcggccatcggccttggctttctacaggaatacgaagggttgtttatctccaagctgctgccgctgttcgcagtcgtggctttgctggcgaatgcactgggctggctgagtcatcggcaatggtaccgcagcctgctcgggatggtcggcccagccatcgtgctggcggccatgctcttgttttttggcaattggtggacggcgaacctcctctatgtcggtctggccttgatgatcggggtgtcgatctgggatctgctctcaccggccaaccgccgctgcgaactaccacccaaacacggctaa

SEQ ID NO: 78809 - DNA, 1683 bp, Citrobacter koseri
atgtatttgaatatcaccggaatgacctgcgactcgtgcgcgacacatgtcaaggacgccctggagaaagtgccgggcgtgctgtcggcgctcgtgtcctacccgaaaggctccgcgcaactcgccaccgatcccggcacctcgccagaggcgctgaccgccgctgtggccggcctcggctacaaggccacacccgccgatgccccatccacttcagcgcggggcagactgcttggcaaggcgctgggatggctgggcggtggcgacaaggctggtggtgatggggacggactgcacgtcgccgttattggcatcggcggagccgcgatggcggcggcgctgaaggccgtcgagcaaggtgcgaacgtcacgctgatcgagcgcggcaccatcggcggtacttgcgtcaatgtcggctgcgtgccgtccaagatcatgatccgcgctgcccatatcgcccatttgcgccgtgaaagcccattcgacagtggcatcgcggcgactgtgcctgcgattgatcgcagcaaactactggcccagcagcaggcgcgcgtcgatgagctgcgccacgccaagtacgaaggcatcctggacagcaacccggccatcaccgtgctgcatggtgaagcgcgtttcaaggacgaccagagccttgccgtccgtttaaacgatggcggcgagcgtgtggtggcgttcgaccgctgcctggtcgccacgggtgccagcccggccgtgccgccgattccgggcctgaaagagtcaccctactggacttccaccgaggccctggtcagcgacaccattcccgagcgcctggccgtgatcggctcgtctgtggtggcgctggaactggcgcaagcctttgcccggctgggcagcaaagtgacgatcctggcacgcagcacgctgttcttccgcgaagacccggccatcggcgaggccgttacagccgcgttccgtgccgaagggatcaaggtattggaatacacgcaagccagccaggtcgcgcatgtggacggcgaattcgtgctgaccaccgggtacggtgaaatacgcgccgaccagctgctggtcgccactggcagggcaccgaacacgcgcagcctggcattggaagcggcgggagtcgctgccaatgcgcagggggccatcgtcatcgacaagggcatgcgcaccagtacgccacacatttatgcggctggcgactgcaccgaccagcctcagttcgtctatgtggcggcagcggccggcacccgtgctgcgatcaacatgactggcggcgatgcggccctggacctgaccgcaatgccggccgtggtgttcaccgacccgcaggtcgccaccgtgggctacagcgaggcggaagcacatcacgacgggatcgagaccgacagtcgcaccttgaccttggacaacgtgccgcgtgcgcttgccaacttcgacacacgcggcttcatcaagctggtcatcgaggaaggtagcggacggctcatcggcgtgcaagcggtggccccggaagcgggtgaactgatccagacggcggtgctcgccattcgcaaccgtatgaccgtgcaggaactggccgaccaattgttcccctacctgaccatggtcgaagggctgaagctcgcggcgcagaccttcagcaaggacgtgaagcagctttcgtgctgcgccggatga

SEQ ID NO: 78810 - DNA, 1101 bp, Citrobacter koseri
atgaacgcttccaggcacgcgccaaggccgcgacagaatctgacattgcgcctgtccctggcggttcgcagccgtcagattgaggcatacccttcacatactggagataacgtcctctatgaacagcctcttccaatttccagtgtcgcggtcgctaaaaatctctttcggctcatcgatgccaaaaccggagaagcctttgacatcgaagaagaactgtgggcctatgagcgtctgacggccgcagtagtgaacgacattattcacgaacataatttttctcgacttcgtctggctaagcccggcgatttcccgttcgagacactgaccagctttgcagtaatgcagctgcttttaaatttacataatccccagaataagaatccctacaagcaggatcttcttgaccactttcatcatgacattgaaatgcattttgaagaatatataaaaagcattcagtcactgcctggcacccagcccgcactaatgaacgacagtttttatcaaaaattgcttcgcgtagccaacgcgtcctcatccagagaggataaatgtcgggcgatttttactttgttcagcctgctggctattctcaataaacccacgccttatgacatgatcaatgtcttccggaataaaatattcagtcggacgagcgtgattgaaataatacacaccggccacgcttttgacagtactaaccccaggccagtctttgcgatagccccgaatatattttgtttatacacaaaacagaatagaatatatctgccgttgtctcataatttcactttgtgttttattattggctcaccattaacattccgtccccggatagacgttttttcaccacgacccgaactgctaaagtgttgtgacgatcgccacttaaatttctacaaagtttcttttgattacattgataatgtcatgagcaccatcgatatgtacaatgtaggaaattcaagcactttctattctgcttatcagctcagcgacgttgaaaaatacctcgatttgcaggaaaaagatcaccaatattactatacgcctgcagaccccgtgcgatggctccctcagcagccggattcattatga

SEQ ID NO: 78811 - DNA, 291 bp, Citrobacter koseri
atgaacccagaaaaccagcaacgtatacgggagatgattgaatccggagaatttaacgggtatacgctggtcagcggagaagactggcagctccccacggcacgcgaaactaccttcgttcgggggctgatccccctgactgacatccagctggccaaccggctgaatgtggacgaacgtaccgtccgcaagtggaaatccggccagacccggatggtgttcaccacatggtgttgcctgtgctggctggccgggctggggatgctgctggataaccttctcagcgattaa

SEQ ID NO: 78812 - DNA, 204 bp, Citrobacter koseri
atgactgtatttctcatcctcaccgccatcgcatatggcatcgtcagtaccggcggctacatccttttagtggacaaagggtatcagggctggaccctattctggaaaaactatgacgacctgccccatatctaccgttcccgctggcgataccagagacgcttcattctcagacgtatctggaagcgtctctttaatcgctga

SEQ ID NO: 78813 - DNA, 321 bp, Citrobacter koseri
atgagcaacacaacgacatacgctaatcagtgcaacagcttttccccttcatcaattgtggaaatgctttcaggttatggctgtaaaaaaatgtggttataccgcacgacgaatacgcagggggaaacacttcttgtgcttctcgatgaggagaacgggatatacgaggaaatggccagccgccttgatgctccagatatgaaagagtggtccattcagtattctgacggcggttataaatcccgtacgcttcctgaaggggcgtttgagatcgatttgggttgtcctgacgaagcggcatggtatatggatcttttatag

SEQ ID NO: 78814 - DNA, 354 bp, Citrobacter koseri
atggggcgttccactaaggggattatcaagggaagggagtttccttccaaaaaagcagctgtggggcatttcatggatcagcgtgaaacagtcaaagaagcgggcccgctgaaagagggagaattgtttgatgaattacgcgagctttatctgcgttactgcgaagtgaccagctttgatctgaatggcaggattatctatgccttcagtgtggattatgagccgcgacagaacggtcagacctgggcatctcacctgtgctactgggtacatttctcgccgaagcagagtttgtccttttcggtcagagaagcggtggatgaaattgcaaaaactgctgctgaacaaatttaa

SEQ ID NO: 78815 - DNA, 510 bp, Citrobacter koseri
atgattaaaggaattccattgcattcttttgaatacctgcattacatcgttgatagtcttggatggatgctgccagtttatttatatctcttcagttttctttacgcatttattcatgaatccggacatgcccttatggccatgtgcctgggaactcgggtaacccgctttcaagtggggaaacctgtgttgttccggttcaaaaggggcagacttatcctgaagtttggattgctttttccagacggaggtgtcagttaccactatgcgaatgatgcccccaggtggaaagttatggcggcggcgctggccggtccattattgcccgtgattctgtcagtaccagtttttactcttaccggtattcagccactaacggtcattgctgggttaattgtgatgatgctgactctggttaacctaaatcccttcatgatggaaacagatggccagaaagttctcaagcatctgcatgccatagttcaggggcggaaagtcctggattcctga

SEQ ID NO: 78816 - DNA, 336 bp, Citrobacter koseri
atggaactgaactttgcggcgtcggtgctgaaagagcttggccatgtgacaaggctcgggatttataaaagactaatcaaagccggacctcagggcgtggccgtgggtgatctacagaagcaactcgaaatccctgcatccacactgagtcaccatctttcatctctgatatctgtatctctggttcgtcaggagcggcaaggaagaatactgtactgtcacgcctgctatgaaaaccttggcgcgctgattgcttttctgacagaagaatgctgctcaggggcagatggactgtacgataccaatggcgatcttggaggaaaaaatgagcactga

SEQ ID NO: 78817 - DNA, 516 bp, Citrobacter koseri
atgaaaatcgttaacgcagaagaaaagcacatccccgccatatgcgatatctacgcccatcatgttattcatggtaccgccagctttgaaactgaaccaccggatacccatgagatgcttgcccgcctgaaaaagatccgcaatcaggcgctgccgtgggttgtcgcgttagaggaagaaaaggtcatcgggtattgttatctcactcgttaccgtgaacgctacgcctatcgccacaccctcgaagattcaatttatattcacccggatgcgcagcgtcaggggacaggaaaagcgttgctgcgccacgtcattgcctgggcagaaacacacggctaccggcagatgatagccattatcggcgacagcaataatgagggttcgctgaaagtccatcagcaggtcggatttacagaaaaaggcacgctgaaagacattggtttcaagcatggtcgctggctggacacggttttgctgcaacgaaatctgggggaagggaacagctcgctgccataa

SEQ ID NO: 78818 - DNA, 1224 bp, Citrobacter koseri
gtgaacacacctccacttctacttagcagcaagattacctggtgcgttggtttggcccagttaattaactgggggattacctactacctgttgggtgcttttggtagcgccattgctaatgacacgtcgtgggggcaacctcttatcttctcagggttgacgctggctatgggcatcatggggctcatttcaccgatatccgggcgattattagcatcgatggggggaagaaaagtcctgcagcttggtgctctcctgaacggccttggatgcctgctcctggcaacgagtcactccctatacatttacttaatggcctggctggtgatgggcataggtatgcgcctttcactttatgatgcagctttcgctgttctcgtaaatcttgcagggccgacagccagaaaatctattacacaggtgaccctgctcggaggtctggcttctgttgccttttggccaattggcgagggcttactgagcctgctgggctggcgatggggtgttggctgttacagcctgttcgccctgataagcattttgctttgtatttctttgccagataacaaaagagaacgaggtgtagccccccgcgaatcgacggaacagggcatccagcatcttgagcgggactatctgaaatgcgggttgtatgcagcattgatggcattgctcagtttcctgtccacaggaatttcaacccatttacctctgattctggccagtgctggtgtcccggtacttgttggttccttatggggggtgggacaggtcagtgcacgtcttggcgatatagcgatggggagtcgaggatctgctctggggctgaacctgatagtggggattttgcttccttgttgtttcatgatcagcctgctgggacagacatccatcgtggggaccggcttgttcgttcttggatatggtgccgtcaacggtctatctactctggtgagagcaacattaccattaactctgtttgacccgcgcctgtacgccagtcgcatgggaacattgctcatgccgagtttttttctgtcggcactggccccttcactctatgccagctttcgcgaacgatttggggatactggcatgctgatcatttcactggtatttgcgtgtgtggcagcaatcatagccatatggatctatttgattggaaaagataaacaggcactacaaagagtgcctgttgatataacatcgaacgttaatgagtag

SEQ ID NO: 78819 - DNA, 498 bp, Citrobacter koseri
atgatggataaaacgtaccatgtccttttcctgtgcacaggcaactctgccagaagtatttttgctgaggctttaatgaatcagctcggtggtgggattttcaaggcgtttagcgccggcagccatcccgcttcatcaccgcaccctttgacgctaaaagtattgaaaagtcaggggtttgacatctccagcctttcaagtaaaagtctcctgcagtatcagcaagtcgactcaccaaaaatggatttcattttcaccttgtgtgacaaaatggctggagaaggatgcccggtatttccaggccaaccgctgacggcccattggggattcaaagatcccgcactcgcagagggcgattcggaagcaatgtaccaggcatttgtggacgtcgagaagcaaatagccagtcgcatcagactgtttctgagtttgccgtttgagaagctagatcgcctttctttacaacagcaactggaacaactggataaaggcgtgtag

SEQ ID NO: 78820 - DNA, 429 bp, Citrobacter koseri
atgagcaacatcaccatttatcacaacccggcctgcggcacatcgcgtaatacgctggagatgatccgaaacagcggtactgagccgaccgtaattctctatcttgagaatccaccttcacgcgatgagctggtcaaactcattgcagatatgggtatttcagtacgagccctgcttcgtaaaaacgttgagccttatgaagaattgggactcgccgaagataaatttactgatgatcagttaatcgactttatgttgcagcatccgatcctgattaaccgacccattgttgtatcaccactgggaacccgactgtgccgcccatcggaagtggtactggatattttgcctgatgcacagagaggtgaatttactaaagaagacggtgaaaaggtgatcgacgcacatgggcagcgtgtaatcaagtag

SEQ ID NO: 78821 - DNA, 1290 bp, Citrobacter koseri
atgttactggcaggagccatttttatcctgaccatcgtgttggttatctggcagccaaagggattaggcattggctggagcgccacgctgggtgccgtactggctctggcatcgggtgtgattcatatcgccgatattccggtggtgtggaatatcgtctggaacgccacggccacctttattgccgtcattatcatcagtctgttgctggatgagtccggcttttttgaatgggctgccctgcacgtttcccgctggggcaatgggcgtggacgtctgctatttacctatattgttctgctcggcgcggcggtggcggcattgtttgccaacgatggcgcggcgttaattctgacgccgatcgttatcgccatgttactagcgctggggttcagtaaaagcaccacgctggcgtttgtaatggccgcagggtttattgccgataccgccagcttgccacttatcgtatcgaacctggtcaatatcgtttcggctgatttcttccgtctgggattcacagaatatgcgtcggtgatggtgccagtggatatcgccgccattgtcgccacgctggtgatgctgcatctttttttccgcaaagatatcccgcccacttatgagctggcgcgactgaaagaacccgcaaaagccatcaaagatccagcaacattcaaaacgggctggattgttttagtccttttgttagtcggtttttttgtactcgagccactcggaattcctgtgagtgcaatcgcggcagtgggagccgcaatcctgtttgcggtggccaaaaaaggtcatgggattaacaccggtaaagtgctgcgcggtgcgccctggcagatcgtgatcttctcactggggatgtatctggtggtctacggattacgcaacgcagggctgacagaatacttgtctaacgtgctgaacgtacttgctgataaaggtctttgggctgctaccttaggtactggcttcctgactgcattcctgtcttccatcatgaataacatgcctaccgtgctggttggcgctctctctattgatggcagcaccgcaacaggcgttatcaaagaggcgatgatttatgccaacgtgattggctgcgatctgggaccgaaaataacacctatcggcagcctggcaacgctactctggctgcatgtgctttcacagaagaatatgaccatcacctggggatactatttccgcaccgggatcgtcatgactctgcctgtgctgtttgtaacgctggccgcgctggcgctacgtctctctttcactttgtaa

SEQ ID NO: 78822 - DNA, 1752 bp, Citrobacter koseri
atgaaatttttagaaaatatacccccttatctgttttttactggtaaaggtggtgtaggtaaaacctctatttcctgcgccacagcgatccgtcttgcagaacagggtaaacgagtattgctggtcagtaccgacccggcctcaaacgttggccaggtgtttggccagacgataggcaacaccattcaaccaatagcctctgttccgggattatcggctcttgagattgatcctcaggcagctgcacagcagtaccgggccagaatcgttgacccaattaaaggcgtcctgccttatgacgtcgttagcagcatcaacgaacaactgtcgggtgcatgcacaaccgagattgctgcatttgatgagtttactggattgctgactgacgcctctctgctgacccgctttgatcatatcatttttgatacagcacctactggccatactatccgccttctccagttgcctggtgcatggagcagttttatagagagtaatccagatggcgcatcttgtctgggcccaatggcgggactggaaaaacagcgtgaacaatatgctcatgccgttgaagcgttgtctgacccaacacgcacccgactggttttagtcgcgcggttgcagaaatcaacgctactggaagtcgccagaactcatctggaacttgccgccatcggtcttaaaaatcagtatctggtcattaatggcgttcttccaaaaactgaagccgctaccgatacactggctgcagcaatatgggaacgtgaacaggaagcgctagctcatcttccctctgatctttctggccttccaactgacacgctattccttcaaccggttaatatggtcggtgtatctgcactcagcgggcttctctccactcagccagaagcagtattatcttctgcagactacattcagcaacgtcctgatattccatcgctctctgcgctagttgatgacattgcccgtaatgaacatggtttgatcatgctgatgggcaaaggtggcgtggggaaaaccacgatggctgctgccattgccgtcagactggccgaaatgggatttgatgtccatctgacaacgtctgatcctgcggcgcatctcagcacaaccctcaatggcagccttaagaatctgcaggtcagcaggatcgatcctcacgaggaaacggaacgctaccgtcagcatgttcttgacactaagggaggcgaactggacgaagcaggaaaacgcctgctggaagaagatttacgctctccttgcaccgaagagattgcggtcttccaggccttttcacgggtgattcgtgaagcgggtaagcgcttcgtggtcatggatacggcacccaccgggcatacgctactactgctggatgccaccggggcgtatcaccgcgaaattgctaagaaaatgggcgataaaggccatttcaccacgccaatgatgcagcttcaggacccggagcgaaccaaagtgttactggtcacgctgccggaaaccacgcctgtgcttgaggcggcaaatttgcaggccgaccttgaacgcgcagggattcatccctggggctggattatcaataacagcctttccattgccgatacccgttcaccgctgcttcgtctgcgggcacaacaggaacttccgcagatcgagagcgttaaattccagcatgccagtcgcgtagctcttgttcctgtactggcgtcagaaccgaccggcatcgacaaactcaaacaactcgctggttaa

SEQ ID NO: 78823 - DNA, 363 bp, Citrobacter koseri
atgaaaacgctaacggtattcgacccagcgatgtgttgtagcaccggtgtctgcggtactgatgtcgatcaggctctggttgatttttctgcggatgtacaatggcttaaacaacgaggtgttcaggtagatcgttacaatctggcacagcaaccgatgagctttgtccagaacgagaaagttaaagcattcattgaggcttccggtgcggaaggactgccactactgttactggatggcgaaacagtgatggccggacgttatccgaaacgggctgaacttgcacggtggtttgggattccgctggagaaagtaggattagcgccttcaggctgctgcggtggtaatacttcttgttgttaa

SEQ ID NO: 78824 - DNA, 351 bp, Citrobacter koseri
atgtcgcttacttccctacaactctttaagaatctgtctgatgaaacacgtctgggtattgttctcatactcagaaccatgggggagttgtgcgtctgtgatctttgcactgcacttgatcaatcacagcctaagatctcccggcatctggcaatgttgcgggaaagcgggattttgcttgatagtaagcacggaaaatgggttcattaccgcttatccccacacattccttcatgggctgcgcagattattgagcaggccaggttaagccaacaggacgatcttcaggccatcgcccgtaaactggcttcagtcaactgcactaacagcagtaaggctatttgtatttaa

SEQ ID NO: 78825 - DNA, 771 bp, Citrobacter koseri
atgaataccgatgatgacgactatccaaaagattcccaaaaacggaaacttatatctacattagccattgcgactggagttgcgcttgttatagctcctactcaggcagcccccagacttactgaaaaaaaacagcactggtgtatggtcatagatctgcgtaaatgcgtgggttgtcaggcatgtactgtcagttgcaaaatcgagaatcacgcaccgccggggcaattcagaacctgggtcgccgatattgaagttggtcaatatccaaaaaccaaaagacagtttcttccgcgtctatgtaaccattgtgaaaaccctagctgtgtccctgtttgtccaacaggtgctacgtttaaacgcaatgatggcattgttcttatcaatcaggatatttgttggggctgtggtgcctgtgttactgcctgcccttatgatgctcgttttattaatactgaaaccaaaacagctgataaatgtaccttttgcgcgcatcgcatagaacaggggctcgtcccagcctgtgtcgaaacttgtgtcggtgcagcaagggtttttggtgatctgaatgacaaagaaagtgaagtgcataaattatattcagagcatataacaaatgttttgaatccagcaacgggtaacaagcctcaggtattttatattgggttaaacaatgaaatgactgtaggagaagaaataaaaagtaagacttggacgaaagagttttctgatgttttcgatcaggaactcccctgggtaaatcaggagtaa

SEQ ID NO: 78826 - DNA, 1008 bp, Citrobacter koseri
atgatgacgaccattttaaatattgcacatcaatctccatttggcttgctttttattaattactcgctattgttaggtgcatcaggaggtctcgctgttatctggtccttccttaactgggggagtcagtcaaagactaaccttttacctgtggcattggcttttgcattagcatttggaggcatattaaatgtattagcagaggtacagcaacccggccggttaatttatggatttatatatggttgggaacactggtacggttcaataataaaatatggtgtactgattttacccctgttttgcctgttactaatcctgcaactcacgccattaaagctgtctgttttcgttgataaattaacaaaaatccttcttataggaactgggatatttttagggatgtactctggaatattcatgactaatgagcatggtattgcactctggaataccccactgtctgcagtcttaatgttacttagtggactttatactggattcatagcctacagtttagtttctaaacatactaatgaacaaccggcagtaatttcatcttattgcgggcttggtgtgatgcttattactatgtttattttattgctattcacatggtgggggcatgtctttgcgggagaaactatcagcacctcctttggtttacttgattctaactatttagcaacgcagataattactgtgggagcgttggttttagcttgcgttatgattgctgtaattagatctaaaaataaaatccactacataattatcattattctatctgctatctctgcctggggtgttcgttttcttttgttggttggggggcagggaacgagtcgtagcagcgccggagtctttacttatcaccctgaaccaaaagaatatttatattcttttggtagtatatttttcatggcaggtattcttgctttagtcatattgttttatgagaatttccaacacaaatatccggcacatacaggaggagaaattaaatga

SEQ ID NO: 78827 - DNA, 3027 bp, Citrobacter koseri
atgaacagacgtcattttcttacaggttgtgccgcgctaggtgtaggtgttggtgccagtatttatggaaaagtattttaccgtgcaggtacattcttagatgcaggagagcaagcaaaatcaaccttttatggtcagtcaactgaacctgaatggctgcttgataaagaaactggccagcatgttataaatcccaattatatggtacgtcattctgtatgtcttcagtgtcatggagagtgtggactgagagccaaagtgaaccgtaaaaccggaaaactggaacgcttacagggtaatccatatcatccgaacacattgattgattataaggatatgaatatcccggtggtggacactgccaatactccgggtacactatgtgcccgagggaacgcgggtctacaaactgcttacgacccatatcgactgacagttcccctgaagcgctctggcccgagaggaagtaataaatgggtgcctattgagtgggaaaaactgatcgatgaagtggtcaatggtggaaagattttcgctgatacaggtgatgaggctagtcaaaaccttgagataaaaggattccgggcattatatgaaaaacgtgatgaatggattgatgataacaatcatgacttagggcgagtatctaataagcttgttatacaaagcggacgtattgttaaaacgcgaaaagattttcagactcgtttcgcgaaatcctttggcacagttaataattacgaacacactaatatatgcgaattaagccatcacattgctacgagtgctgtatatactgagcataataattttaaagcagatctttgtgagtcagagtttgttttatattggggaaccgcgcctggagaagctaatttccctatgcagacattagggaaatactcagcagaggcgcgttcaaagggctgtaaaattgctgttattgatccagtattaccccgaactataacggatgacccaaatatgttctggcttgctccgcgaccaggtactgatggtgctatcgcaatggggatgataagctggattatagatcataatcgccataatacggattttttaagttaccctaatcagtcttctgccaaaaatgctggtgaaacttgtttcacggatgccagttatctgattattaccgatgaaacacatcctaattttgggaaatttattacttctagtgaagctgccttgggggacagtaacgacagtgtcgtaattaatctcactggtattccagaattagcggaaaaatgtgttaaagcaatactggattatagcgggagtgttaatggtataggggttgctacagcatttcatttattaaagacatcagcgaatgattattctctagagtattatgccgatatcagtggtgttcgcattgacgatattgtcaatttagctgacgagttcactaagcatggacgaaaagcatccacagagttttatcgtggaattgcacagcacccgaacggttattatacaggttttgcaataaatcagttgaacgtcttaatcggtaatttgaactggagtggtggtggttccctcgggggaggtggattcccttatgacaaaggggtatatgacctgactgctattccttctctggtgccagctcaatttggtattaaaattacccgtgaagatggctttcgctatgaagattctactgaatttaagacaaaggttgctcgtggcgaagccccctacccagctaaaaggccgtggttccctttcactaaagatattttcagtgatatcttgccttcagcactggaaggttatccgtatacagccgacattctgttgtggcatatgtgtacgcctttatacagcgctccaggcatgggtaaagaagatattattcgaggggtttgtgatccaacaaaaataccattaattattgccagtgatattgtcgttagtgataccagcatgtatgcagattatattatccctgacattacatatctggaacgttatgtccagcatccgatgcttgaagcaactatggtcaaggggactgctgtacgttatcccgttatcgagccgctgactggaaaaaaccaggcgggacaacatttttgtcttgagactttctttattgatatagcttcgaaattaaacatggctgggtttgggaaaaatgctatccctgacagtaatggaactctatggcctctcgaaaaaatggaggattactatctgaaaggtactgcaaacgttgcttatagtggaacaccagtatcggatgctactgatgatgatataaaaattgccggtcttgaagattaccagaagaagtatttcagtagtcttaagtctgatgaatggagaaaagtactttttttaatgtcacgcggtggtcgttttgagccagttactaccagacggaatggtacgcaattgaaaaatcaattcaataatcgtatcagaatgtacaatgaaaaaattgctcagggtctaaatagttttaccggtgaacgtttttcaggaactgcactttggcaaccatctctcactatgatggggaaaaaagtggatgagctcgatcagggcaaaggtatggattttacaatattgacccgaaaaagtgcacttcagacccagtcccgactgtcttccaacagttttatccgagagatacagccgacaaactgggctgaaattaataccgaggatgggaaagctctcggtttgaaaaccggtgatagtgtatgggtcgaaactgttgaagggcgtaggcgttgtgaagtaaaactcagagatggggttgcacccggagtgatcagctttatcgttggctatggccattggggttacggagcaaccgatattgatattggtgggaagcgaattaaaggcagtaaaatccgggctgcggggataaatttaaatccaataatgcgactggatccagatgtatgggggatgccgcttatggatccaattggtggcagtagcagtttctttaatacacgagctaaaattatcaaagcgtag

SEQ ID NO: 78828 - DNA, 582 bp, Citrobacter koseri
atgtgtgaagtggaagagttgagaagaacctgtgatattgctggatccttactactcaaaagccctgaacaagagcttattgactggataaagcaatgtacagggcaaaaccttgcgattaaagaatgtcagcaggcgttttatgactatttctgcttcccacaatctggtttgttttgtccaccctataatcatgtctttagtaatggcttacgtcatggagacatctggcaatttcctgcagcaagctttgatgggggagcagaagaagaggatttctatcaaaaattcaattttgctccctctatgcttaacatcaaattgccgatggtacataaacatgttcctggtgaccattttggtgtggaattgctttttataagttgtgtgctgacaaatgaaaatttaaacacccccgagacctggagtattttaaagggatttatatgtgcacacttacctgctctacaggggtatacccatttattaggcagccaaactgaaccctatattaaagtcgtagctgaatgtctggaggagtgcttgtcaggacttgattatttactttcgattgattcttga

SEQ ID NO: 78829 - DNA, 216 bp, Citrobacter koseri
atgttgagttattgcgaagctccccaggtctctgacctgttcgcggtttgcaccgggctgaaattaatcagtctgcttccacacaccagtatgttgactggtgtcgccatcgatatcgtgtcgattttctcctttcagaatgaagtccttacccgtttttacgagaaagacgtttggttgataaatgaacaagaagtgaatgaagtacgtttttaa

SEQ ID NO: 78830 - DNA, 891 bp, Citrobacter koseri
atggcaaaactgaataaaaatcttaaaacgcttgccaggcaggcagggggaagttttaaaaccgtttctgaccgaatgaaaattgcggacaggtttgccgaacgtttattaaaacttaatgttcaaatcagagatattaaaaatatcaagacggggcatatcgagttgtatatgaagagccgcctttctgaagatatttccagacgcacacttcagaacgaaatggcagctatccgggctttgttacgtgttgcggggaaaacattcatggcaaatccttctcatgataaactgagcaatcaggctctgggtatttcggaaacgagccgggatggaactaaggttgctattcccgatgcttattttcggcaggtattgacgagtgtagagcaaaaggatgatggcgttgcatgtgcaatgagattatccagattactcgggttaagaacagaagaaacagtacagtctgctaaatcgttgcgtacctggaaaaaagctttactcaatggtgacgaaaaaatacgtgttgtatttgggacaaaaggaggacgaccaagagatacaacggtattagatcgtgaatcaactctggctgcaatcaatgcgtcccttaaacacttgaatgaaaataatggaaagttgattgataagccatcattacatacggctattgaacgttatcgcaatgttgtccgtgagtccggattaacaggaaaatatgcgcctcatagtttacgctatgcctactctgttgatgtcatgaattatcatatgaaaagaggtttcactaaagaagaggcacaggctctggcatcaatggatttgggacatggcgatggcaggggacaatacgtggctcgtgtttataataaggtagagggtaatgagtaa

SEQ ID NO: 78831 - DNA, 246 bp, Citrobacter koseri
atgagtaaaagcatttttgtttctggtgaggatttggttattggtcgtgtgtttttgggatggaaggaaaggatttcacgtattatcgatagggggcattacgaggtggcttgttcacaggaggttcatgcgcattacggagacaaatttacccgtactgatgcctgtctgtatttcatccgtggcgcactgtctgaaactttcaggaaatcactgagagaaaaagaaaacgctcatgaaatgtaa

SEQ ID NO: 78832 - DNA, 417 bp, Citrobacter koseri
atgcattacaccagaatgatcaatccgctcgcgttactgagttgtgactcacccgcttctgcaaaaatcattgtggattacgtaaaaactcagcttaacgttcgtctggataacaaactcatggtcgacgcagatcctcaggttcctgctgacggccttcctgattacctgacttttctcagacatgtcgcgcatacagttggttttgcaactgagcatggcttcataaaacatacctttgtcgaagaagcagtgagcgagcttacgcttctggggacagatgttcacagttttcactggagtacagcttttcttcagggcgttaccaggtctcgcgaggaaaaagagctggacgaagctacagagcaattgcgcgaaatgttttatcagagcgcccatttctcagacatcgcctga

SEQ ID NO: 78833 - DNA, 366 bp, Citrobacter koseri
atgaacgagttaattctcaccgaagattttcacatccgtgccagcgagcgtaatgctcacaaagttgcactggctaaagcggaaggcgagctgctgagtatcgcagcgcttcgccgccttgacctaaataccgggacagatgaagacggctttccgtattatgtctgggatatggcttctgttgcccgggaactggctgaactgtatgttcgaaaacttataccgggatcatgggaggcattctttaacgacctctgccgcatggcagaaggtattgataaagaagcctggatatatttctacaaaagcgcagtcaaagacgaagaggcctttctgtctatggaacgcagcgatgctgatttctga

SEQ ID NO: 78834 - DNA, 309 bp, Citrobacter koseri
atgagcagtataatactgttgtttatcacccataccacgcgcgtcctcagccgcatttcagaagcaatgcggcagcagcaggccgaatggttcaccaaccgtagcggtcacagcagtttccgcgccgaggtcgttcagtctgaagggggttttaccgccatcatttcacgcagaacgggctacagttcgcgtgactggcagtatcagcaactggccagcgccggtcagtttgcctccgcacgtaaggctttacgggcgggacggcagatggcgcagcagatggcctggctgcgttaccgtttcgactga

SEQ ID NO: 78835 - DNA, 624 bp, Citrobacter koseri
atgattcgctttacctcaaccgaattacgccctcttttatcacagcagggcggtatgcaaaggccactgctgcttgaaaagaaccttggtatatacatccgggttccggatgaccgaaaccccggcgaatggctcagggcatgggcggaaggttgtaatccctcgaaagatgcaaactggtcggaaaatgcagacctgttaattcccgggaaggaatacgcttttcagacctttatggagcagagcaaattcgacgccgttctgaccgaacaccacgatctttttatgatgccatcggccggtccactggggactggtatgacaattcgtaaagagacccgtccgccagaaaaggtgtatgtcctggtggaggaatatcgcagcaatattcgttggctctacgatcagtctctccggcatttacctgcctgtgtggggaatgcggaacgtctgagctggcgctcgcaggcgctgtatgtgcttgacagggtaatccgtctcgactgtaaacgggcaaaacctgctgatcgcgcgatatttgagagtgcggttcgcagcgtgcgcagcagcgtcagcgaggtgatgtctgatggctctttccgttacgcggcaacccgccgttag

SEQ ID NO: 78836 - DNA, 993 bp, Citrobacter koseri
atgaacaaatccattcgcggccgtaaggccgcgccggctcagaaagccgatctttaccagcaggtcaccgacaaaatcattgctgccctgggaaaaggggttccaccgtggcgccggccgtggcgttctgcacagaacgtacatggcagcgcgttaccggtgaatgccacaaccggccgccattacagcggagtgaatatacccttgctgtggatgtctgctgaagagcggggatttccatccgatcgatggctgacataccagcaggcgaaagccgtgggtggtcaggtgcgcaagggtgaaaccagctcgatggccattatctacaaaccgtttgagaaacaggcgacggatggcaacgataacaagctgttcgataaagacggtaatcccgtcatggagtcgcttgcgatgctgaagccgctgcaacttttcaatgtcgcccagtgtgatggactgccggatgctgttgccggcatgccgccaacagaggcagaagaggagcggcattccatactcagtgaacaacaacaggggcaggtactgtcagtactgaatgcaaccggtgtggtttgcacatcgtaccgacaaaaccgggcgtattatcagccatcaaccgatcgaattgtgatgcctacgacttcgcagtttaattctgaagctgattactggtccacgctactgcatgaactggttcatgcaaccggccacagccgccgccttagccgtgaagggataacatcttcttcgcgaaaattcggtgatccggtttacgcctttgaggagcttattgccgaaaccggcagtgcttttctttgtgcagagctgggtatttacggtgatgttcaacatgaaagctatctggccagttggctgaaggtacttcgtgacgataaaaaagcctttttccgcgcctgccggtttgcccgggaagcgtcggaatttttactgcagccactgaaccgacaaccggaacagaacaaggctgcttaa

SEQ ID NO: 78837 - DNA, 954 bp, Citrobacter koseri
atgttttcatggtgcaaaaaccgtctggaaatcactgcgaaatctgtttgtattgacgtgatgcagtcctggattgccggcactgaaactccgcgttatcgacatgccatacggcaggccataaagctgtttcttgctggatgtgccgggatacttaagccaacaaaagcgacagagtttactgcttatccgatgcttacggccgccggtacgggggcttctacttcggcaaaccaggcgttccagcatttcctggaattaatggaaaaggatgcgtggctcgacagcgctactattgcacgtatggagaagatctgggttcagtccggcctggaaacacttaaatgggagagtattccagtttcatcgcgccagataatgtcccagttgatggctgttcactatgctgactggtttggtgttgccagcttcggggaacagttcgatccgcaggagcgttgggaatggctcagtataatgccggccgcgagttgtccctgcgatatgctgatgataatgccgtcacgtcttgcaactgagttgaacggtaacagtggtttgttccgggggcttaacacaactgcagatctttacacgcagctgtatggtgtggagttcccggctggtcataaagccaactggagccgtgaatcactgggcacgatattactgacgttcgataccccctggtacccgccatctggagaggttatgggtgagatgtcagagctgtttgactgtgagatccgtcattactggaaatcagtggatgaaggtttttccggatataactgttttgaccgcggtgatcacgttgacagtggcccctggccggaagaaatgcagcaactgagcaacggtgaaacagcaagaatgtaccttgtctctacggaaaccacagcggtaacgccatatgcggcgccagcggcacaatacgggagcattcgggcctga

SEQ ID NO: 78838 - DNA, 684 bp, Citrobacter koseri
atgaaaaatcttataaaccatgaaaaggcgttcatttcgcttttcaaccagactgctcgttatcaccatcgacatcaggtttttgaagacttcatcagttgcagcgttattgctcttcagaatgccctcagtttctgcgaaaagcgggagcagaaatatctacacatagttgcacgttatgaaaagaaggatgtagtccgtatggcagaattgctggcccatgttgtcaatgggctggatgattcaccgggggattttcttggacaggttttcatgcagctcgaactgggtgataaatatcgtggtcagttttttaccccatgggatgtgggcatcatgatggcgcgcatgcaactcggcaacgttgctgataattttgcggacaagccttttattaccctggcggagccagcctgtggcgcaggatgtatggtgctcgcatttgccactgtgctgcgcgatgccggttattcaccacaccggtatttgtgggtttcagctactgatatcgatccgctggctgcggggatggcttatattcagttaacgctgtgtggagtgccaggtgaagtggttattggcaactctctttgcgatgaacgccgtcgtgtgttgcatacgtttgcgcattaccagggcaactggcccggtcgtttacgtcatgtcctgaatcaggccgcctga

SEQ ID NO: 78839 - DNA, 279 bp, Citrobacter koseri
atgaaagatgtgtactgggtagtcgaagccaacgggaaggaaattggcgctatgacactggatgagtttgaagacatccaaaagtccgtgaaggcaaactggttgaacaggatcgttgccgttatcaggtttttctttttccctgcatataagaaaacaggcctgtatttgcctgaaattgaagaggaagtaaaagcacttttgcaggtcagaactgatgctccgctaaccattaaattcgttcgcggagaaatgccatctcagataagactactataa

SEQ ID NO: 78840 - DNA, 648 bp, Citrobacter koseri
atgtccagtttaccaactggtgaaaatatcaaagccattgaaaagctaattagcgatgcctcagaggttattgcaaaacgcgagcgctcagtcagacgtgcagaacgaaatctggaaatagccgaagaccaccttgcagacctggaaaatcagagagatgaactcgtcatagcgagctggggagatgttcctaattggcatggaatatttagtatgagtgaggatgcctcaactaccatgcgagcataccgtgataaatgggtcggtacgatcgcaggtctgcgtctaactgccttcggcaatatttataccggacagtcagtttacgggatcggtttcacaacaaagtctgaagaagaactggagcaaacagtccagatggtggagtttgttctgccgtaccttattgctgatgagcgaaaagaaaaatcattaatgatttataactaccccgcggtggactgctaccacagcttcgtttttaatatcgaaacaggtacatatggcatcgccacagatcgctttatgtcacgtcaggaaacgatggagtttccctcactggaattcgcacttcgtcatctccaggcaaacaccttaatagacgatgtagataaacggaaaagcctgaacgatgaggtgacggaatga

SEQ ID NO: 78841 - DNA, 546 bp, Citrobacter koseri
atgaaaaaactcattctttgctcaggtatctcttttgtacttatggctcttgcggggtgtagccagaaccagctcaatcagtttcagcagcaactgtcagatgtcagcacaatgatatcacctggagagcagcatacttctgacaaacaggctgaacgtaatgagattacccaggcattcagcctgccagtcggcgtagatactgctgcactacgcctgaagcaacattatggttttccctcagatgaagatgtttcagcagcaagaaacaatggccagggaaatgctggctggtcagcatcggcaatttcagaaggtgccagttggtcagcccaacctgggtcttattatcgcatgagccggaactgggcagctaatgatcgcctgacaatagaagtcacaggcgatgctaaacgcagcaacgtgaccgcaatttatcgttcctccaatccggagcatcttaaacctgaatggaccgcgcgcctgtggaaacaaattccggaagtcgcacgcggtacgaaggttagtcgggaggtcgggcaatga

SEQ ID NO: 78842 - DNA, 1218 bp, Citrobacter koseri
atgatgaaagcttcaatttcaatgattacacgctgcgtttcccttgctcttctggtttccgcagtgccatcggttaatgctgcgacgaactggatggaggcacgcggtgatgctatgggtggcaccggcgtggcatccgcgcactacggtacagctgctctgtctaaccctgctctgttaactacgtccggaccaaccgatgatttcagcctggtgctgccatcgatgggcgcccaggtctctgacccggataaaaccgtggataaagcggatgatgttaaggacctctgggatcgtttcgacagcgccgtcgctaatcagtccggtgtcagcgaaagcgccgcggcactcaagagtaagcttcaggatttgaaaaacacacatgcgaacggccaggtcggggcttcagttattgcaactgtgccgaaccagacactaccgtttgccgttgtggtgaaatcatggggtactgtctctgtcgatggtaaggtcagcgatcacgacctggaatacctcgacaaggtcgccgatggcacaatccccccttctgcagtggatactgactcacttacgtcaagagcctacggtcgtgcggctgtgatcaccgatgtcggcgtggccatggcgcatgagttcgaaactgcaggacatgcctggtcctttggtatcacaccaaaataccagcgcgttgacctgtttaactacaacgtttccgtcagtaattttgacaaaaacgacattgactccagcgagtaccgcaataccaaaaccggttttaacgccgacgtcggtctgtccacaaacctgaacgataactggactctcggtctggccgtacaaaatatcatcccccgctcaatcgataccaaagaagtaaatggtgaaaagggaacgttcaagattaaaccgcaggccactgccggcgcctcatggcacaacagcttcatcacaaccgcgctcgatgtcgacctgactgaagcgagtggtttcaccagtgataataagcgtcagtttgcaagtctgggtgccgagattaatgcctggaactggatgcaggtgcgtgcgggttaccgccagaacatggcttccggagaaggcaatgctttcactgccggcctggggttctctccgtttgatgtggttcacctggatatcacgggcatcgcaggcactgatcgtacctacggggcggttgcacaacttcaattcactttctga

SEQ ID NO: 78843 - DNA, 1017 bp, Citrobacter koseri
atgaaccgtctgaacatcacctccatccttgccagtatcatcactgaacgggatgaaaatatgcagcagctggtagcccagctttcggacggaaagaaaacgtctggcagccctattgcaatacgttttaaaccagctgtcagggatttcgtcacactggtatcaggacgcctgggtatttcatcagctgaactggtcaatattctcgtcgagggtatcatgcgcgagacgcttatcccccgacaggctgtgatcacacatatccacgaacggttctggctgctgatggatgagcaccgcctgtcggtactggacgtggctcgcctgctctcggactggaatatcggtctgagcgttctggaaagccgtgaaagaacgatggattacttaactgcacctttgctgaaacagctatctgactggttctgtgtaagtaccagatggctggaaggaagtgatccccggccagtgtacctgaccgctttcagcgaatggatgcaggttgccatgataattaaaaaaagaattcaggaatatacatctgacgacaacctgacccgtcctgacatattcctggtcagagagaatcaatacacctcaggagatatcaaagacgaatccggacatgttttcatttttattcggcgctataaaaccgttaataacacaacaattcgtgtagttgaatgtatcgggcactgtccatcttcaggtgcttataaaacacaacttaattcatttctgagcatgagcaacattctcttcagagcgcatattctcaacagtttcgacacattttatgcatccggttatttactggatgcgctgagagaaggaaagatacttccggccgctgcactgtgggagattcagaaacttcaacgaacagagtcaggtaagttttctcaaaatatttggaccgaagaggaaagagaaccttttcttttccctgaggaatttataacaccagaatggagtaaatttgttagccaaataacagccctcaatattaagtga

SEQ ID NO: 78844 - DNA, 561 bp, Citrobacter koseri
atgcaaagattagtagtctctggaattatcctctgctggggtcttgtgagttacgggctcatcgctctgattacggggtatcaggatgggatggtgtatctctgggggcttgttttgctatcccctttttctctgagagtggtgaactggatgcagcgcagactcatcaaccagccctgcatcctgagctaccataagcgcagctcaaggatattcgtgcatctgtcgccaaaccagccaaccgtcagtatttcatccgaacgtgtggcctggttctggaatggagtgctaaccagtatagaggacgctctcagtggcagagaaaacaccatcgtgattgcctcccatctcctcacctcttatcgaattaaacgtatcagaaggcatcttcagattcaggccggacattaccgaagccatgtcatacatgtccccttcacacccgctgcgcgtgcagttatgcaactggaaattcttcttgcacagtggcgctggcgtgtaccgtccagaacgttatggcccgttcttgtcatacgaaaaactttcaatccggaaaaataa

SEQ ID NO: 78845 - DNA, 1539 bp, Citrobacter koseri
atgcgtggactgaaatggttaacaggccttgggctggcagtcggaacggaacactcagtaaggccatccgtgcagccggcgcaagcgggagggttccggaacgtactgtccggtcagttgttactgggaactgcggagcgacagaagttcgtccggatgttgcgggaaaattgcccactgtcacagtctgcctttgacgaattctggctaaaacccttagagcaaatggccgctcgcgttcaggaagtaccggcagcctgggcggggccgttcgccactccagggggctttactgacctcagtttatccgtggccgcaagtgccgtgaggctggtacgcggtatgatgttacctccgggagcgacgcctgaggagcaggcagagcaggggccagcctggatatgcgcagtgttctgggctgggctttttcatcatcttgactggttgtcgcagattgaagggagcctggcgaacggaaaagcctggtgtccggggatggaaatacccggtgcaaactggcgggtgcgtccccggcaggggagaacggcttcaatgaacggaatgtacattgccagtaaactcatcccggatgctgcggctatctggcttcaacgctggccggcgatttcaggtgcgctatttttgtacctcagcggacaaaaagctcagtctggaattctcaacagcatcatcagcgatgcgcttgccagcgttgccaataaatcaggaaccgtttctggtacagcaagcccctctgaaagcgataaggtgatcaccacaggggaggaaggggaggaagaatccagaacaaacaatatcccaaatttaatagacgacgatatgcatcaaacgtccagtcacaaaaatataacaccggttccagagccaattaacaatgcatcaataggttacgatactaaccagacaggtgattatgctgccaaggatgttaccggtcaggttacgttgctttcggcatttgataatcatgatacgcagtcatccgatgaacgaacaggtgatgacactgtcccggatgagtcggtatcaaccgcagaacttcttagcgtgcttgaccagatgtcgggctctggtgcacctgttgttgaagcgaaggttgaaactacttcttctgaagagttttcgctagtcgggatggaatctggcactccaggagaaaagtttctggactggctgaaatcctcaatccatgacggtacggttagtgtcaatgagggcgagagttttgcacatattcttgctcagtttgtattcattgtttcacctgagtgtttttttaaatatttatcgctgaatacaaacgagtcactggataaatcagcgttacaaaaaagctttgaagctctgaacgttcattattcacgaaatggtaaaggcctctggcattaccataaatacgatacgccggacaaaagcggtcgttacaccaaaatgtcaggatacatgctgagcgctgacattatttacagaaaaggaacctgtccaccggacagcgtatggcttgcacgaagaaattaa

SEQ ID NO: 78846 - DNA, 954 bp, Citrobacter koseri
atgaacaatgcatttgaacaagtgctggatgattattttttcagtaaatctttgcgcccggctacggagtggagctacaggaaggtagtcagatcattcatttcctttagcggtgaaggtatttcacctgagcaggttgataaaacgctggttttaacgtggcgccgaaaaattatccatgaggaaggactgagcagaacgacctggaataataaagtgactcatatgcgcgctatatttaatcacgccatcgttaatgggcttgtaacgatgagggaaaatcctttcaacggggtaattacccgacccgatgtcaaacgcaaaaaaacactgactgatgtgcagatgaataaaatttatctgcacatgcaggcgagggaagaggatgaacggactggtatgatggagttaagaaaaagcgccttacggccagcatggttctggttaacggtactggatgcattgcggagaacagggatgcgccagaaccagctgctgcacattcgcctggaggatgtaaattttgagcaccgatggattaatctccggcctgagggttccaagaaccataaggaacaccgggttccgattactgaaaacctacgacccagacttgaaaggctctataacctttcccttgagcgtggcgcgaagatgcaggatcagttgtttaatctttctcgctttgatggccggaagaatgaaatcagcagcaacatggattatccgccgttgcgcgcgtttttcagacgactttcacgagaatgcggttttacagtcagcccgcacagattccgacacaccatcgcgactaacctgatgcgtttgccggatcgtaatctgaagatggcacaggacctgctgggtcattcaacgccggcggtcacgctggagtatgttgaaagtgacctggataaggtccgggacatgctggaggagctggatgcggcataa

SEQ ID NO: 78847 - DNA, 222 bp, Citrobacter koseri
atgaaagttatcagtaaacgccgggcgatgatgatttaccgtcagcatccggcctcccgcatttttcgatactgtaccggcagataccagtggcacggcagtgtctgtcattacaccggtaaggtggttcctgacattcccggcgtgctggctgtatatgccgagcgccgccaggaccgcaacggaccttatgcctgtctgatgagtatcaccctgaactga

SEQ ID NO: 78848 - DNA, 1161 bp, Citrobacter koseri
atgagtaataacccactgattccgcaaagcaaactgcctaatttaggcaccacaatctttacacaaatgagtgccctggcgcaggagcatcaggcgattaacctgtctcagggatttcctgacttcgatggcccgcgctatctacaggaacgtctggcctggcatgttgcacaaggggcgaatcaatatgcgccaatgaccggcgtgcctgcattacgcgaagccattgcggaaaaaacggcggcgttatacggctataaggctgatgccgggagcgaggtgacggtaacggcgggggcaacggaagcgttgtatgccgctatcaccgcgttggttcgtgcgggagatgaggtgatctgcttcgatcccagctatgacagctacgcgccagccgttgaactgtccggcggcgtgctgaaacgtctggcgcttcagccgccgcagtttcgcgttgactggcaggcatttgctgcgttactgagcgaacgtacccggctggtgatcctcaatacgccgcataacccgagcgcgaccgtctggcgcaaagccgactttgaagcgctgtggcaggcgattggcgatcgcgaaatctatgtattaagcgatgaagtgtatgagcatatctgctttgcgccagaaggccatgccagcgtactggcgcatccgcagttacgtgagcgtgctgttgcggtctcgtcattcggtaaaacctttcatatgaccggctggaaggtggggtactgcgtagcgccagcggcgatcagcgcggaattgcgtaaagtgcatcagtatctgacgttctgcgtcaacacaccggcgcaactggcgctggccgatatgctgcgtgctgaaccggaacattaccgcgatttacccgcattttaccggaagaagcgtgacgttctggttaatgccctgcgtgacagtcgtctggaaatcctgccctgcgaaggcacctattttctgctggtggattacagtgcggtatcagacctcaatgacgtggatttctgccagtggctgacccgggaaatcggcgttgcggcgattccgctgtcggtattttgcgccgatcctttcccacataaacttatccgcttatgttttgccaagcaggaatccacgctgctggcggccgcagaacgcttgtgtaaattgtaa

SEQ ID NO: 78849 - DNA, 189 bp, Citrobacter koseri
atgttggtttcagcaatagtattaatgattgcaaccatcgagtcactgcgaaacccaattttccggctggcaagaagggagttgaccagcgactggtattctttaacgcctggctcctctccctggtatgaggtaaacggttcttcgagtatttgcgctaatgtactggcgtcgctgattctggggtga

SEQ ID NO: 78850 - DNA, 156 bp, Citrobacter koseri
atgagctatcgtatgtttgattatctggtgccaaatgtgaactttttcggcccaatgccatttcggttgtgggcgaacgctgcaaactattgggcgggctgtaacccggaaaaatttgcggatatcgccgggagcccccggcgaaagccggtctag

SEQ ID NO: 78851 - DNA, 1080 bp, Citrobacter koseri
atgtttgtgttttttgttgggccttcttcaggtaaaataacaggtcaatccgtagcttttaatctcatctataaaaattataagggtaagaaatccctcgttgattatcttgatttctccggaagtaaatgcaaggtttttttacattactttctgtctatgtttatgtttgtcgcattgaatttaatgtatctgctaagcgttaaagttgtgtatatcacaacaagtcgaacttatttaggattttttcgcgattcattttttattttggttggttggttatttagagcaaaaatagttaaccatttacatggttctgattttctctatttcagaaataaacagcctcgatttattcagtcaattattgactttgtatataataaaatcgatatttcaatcgtgctgacagaggcaatgaaagagcaatataaagcatatgaaaaaatgcgcttgctggttgtctcgaattgttactctggtctgactgaattcggtaataaaaacattcttcagaaaaatgagattcaattcgtttatctgtcaaacttaatgtactcgaaaggtgtattgcatctgatcagagctgtaaagcaggcgcacgaggccggtgtccccgtgaagctcattcttgccggagcgatatgttctgatgaatattattccgagaatgaattaagcagtctgattgatgcagagatctcaacggttaattacattaagtatgtgggcgttgtaaaagggaagcaaaaaaacgatcttcttttgaatactgatatttttgtattacccactttttaccgctctgaagctcagcccatttctatcatcgaagcgatgtattatggctgcgcaattatcactaccaaccataattacctgaaagactttgtaaataatgagcatggaataattgtggaaaaagagagccaacaagctctgtctgatgctattaaccttattcatgaaaataaaacgcgcttcattgatgtttctgaaagcaacatgaagttagctagaacattttattctcctgagaactacattcaaagaataacagatattattaccgaggaataa

SEQ ID NO: 78852 - DNA, 1119 bp, Citrobacter koseri
atgaaaacagcattgattacaggcgtgaccggacaggatggttcatatctggctgagttcttgttggaaaaaggttacgaagttcatgggattaaacgtcgttcttcctcattcaacactgagcgagttgaccacctataccaagatcagcacgcagaaaaccctaaatttattttacattatggggatttaactgatacctcaaacttggttcgcttaattcagaaaatcaaacctgatgaggtctataatttaggtgcgcagtctcacgttgctgtgtcatttgaatcgccggagtatacagcggatgttgatgcgctcggcacgttacgcctgctggaagctattcgtatctcagggctggataaaaaaaccagattttaccaagcttccacctcggaattgtatggcttagtgcaggaaattcctcagcgcgagtctacgcctttctatccgcgttctccttatgcggtcgctaagctttatgcgtactggattacggtaaattatcgtgaatcctatggcatgtatgcctgtaatggtatcctgtttaaccatgagtctccccgtcgcggagaaacgtttgtcacgcgtaaaatcacacgcgcaattgcaaacatctctcagggaattgaaaactgtctatatttaggaaatatggattcactgcgcgattggggacacgctaaagattatgtccgcatgcagtggatgatgctgcagcaggaaaagccggaagattttgtcattgccacaggcaaacaaatatcagtacgtgactttgtgaggatgtctgcaaaagaggtcgggctcgaaatcgagtttacaggcactggcgtggatgaaattggcactgtcgtgaagaagcttaacgattgtgcgaccggagttaatgtcggcgatgtgatcgttcgggtcgatccgcgctatttccgtccggcagaagttgaaacgctgctcggagaaccggagaaggcgaaacgagtattaggttgggttcctgaaattaccgtcgaagagatgtgcgctgaaatgattgcgaatgatttatcaaaagcgaagcagcatgcattgctcaaaacgcatgggtacgatgtttctgtctcaatggagcgttaa

SEQ ID NO: 78853 - DNA, 165 bp, Citrobacter koseri
atgagcagaatggataatattgcattcgatcataagattctggtagataaattcagcgggataggtgttattggcatgtatgcctcccaccttagcagccgccagataaacctgatcgatttgttctgcagcaaaaaatttcttaacctcttcctgagaggttaa

SEQ ID NO: 78854 - DNA, 594 bp, Citrobacter koseri
gtgctcgaaggagaacgcctgaacgaccagcgccgactcgaccctgctacctatgactgggtgtgggaagggacttacctggaaaacttggataaacaggttctggccggtaaataccgggtcgccgaattctcagataatctctggaaagaggccgagcgcttgttcttcggcgtcgacttcagttttgccaaagacccgaacacgctggtgcgttcattcattctgcataacaggctgtacatcgaatatgaagcatacggtcagcaaacagagctggaccacatgccggagctatacgacacaatccccgggtcgcgtgaatggcccattacagccgactcggcgcgccctgagacaatcagctatctcaagcggcagggtttcaaaatctcagccgccgagaagtggcagggaagcgttgaggacgggatcgcacatcttcgtggcttcgacgagataatcattcacccgcgctgcaagaaggtagcgcgagaggcccatatgtggtcgtacaaaacagaccgcataaccggcgaggtgttgccgaaactggccgacggttatgagcactactgggatggcattcgttaa

SEQ ID NO: 78855 - DNA, 210 bp, Citrobacter koseri
ttgtgggaagccagcaaagacttgctgacgcctgcggagtttgatgaagctgaatcagtcagtgaaatagcttggctgaaactcagcccaacagtgcgcgaagaaggctcagagatttgggtgacgtggaacccggagcgcgacggtagcgccactgacaagcttttccgcaaagaagcaggtgacgactgcatcaccgttgagatgtga

SEQ ID NO: 78856 - DNA, 501 bp, Citrobacter koseri
atgcgtcatgaagacaacacccccccagagaaagaatgggggaaaattgactcatgggacagaaatacgcagcttcctgaagatgaggtggagatcccttttttgagagatatagagtttgcttgtggtgatggcagggtttctgacgacgattacaacggttttaagctgaggttttcaaaagctactctgcgcaaggtaggagctaacaccgacggttcaggtgttctatgtttccccgccagaggaaatagtatggaacctaatattcctgatggcactacggtcgctgtaaatacgaaagataaaaaaatcattgatgggaaaatgtatgccatcaacgaagatgggtggaaaagaattaaactgctttatcgcacaggacccgagatgatcagcattcgcagttacaatagtgctgagtatccatctgaggataaaaatctaggagatatagaaattataggcagagttttttggtggtcagttttagactattaa

SEQ ID NO: 78857 - DNA, 1152 bp, Citrobacter koseri
atggatgcatttaaaaacaggttaaaacttcatagtgagcatgttaaaaacgttggactgcattgcactactgaagaaacaacaaaacaggcactaattttaccttttttggatattctcggttttagtccatacgatccacaaaaagtaaaagctgaatacggtgctgattttcctggggtgaaagctaatgagcgggttgactatgccttgttttgtcaagggattccagtcatgttcattgaggccaaagcctataaagaaaaaattgataatcactgcccacagctatcaagatattttaactcaaccccagaagtgacaatctcagccataaccaatggagttgagtggcggttttttactgatctaaaagagaagaacattatggatcccactccattcttaaaaataagaatggatgaagttacggacgccgatgccgagcaactatttagatttaggcatgataagttcaaaccagaagccttaagaactctcgcagaagaaagcgtatacctttccgcttttactaaaacaataagttcaagccttcgagaagttgaccaggaatttgttagatatgtagcaagcagatcgaatgtagaaaggcaattgaaccaaagatttcttgagtcgataactccattagttaaacaagcagtagaattatcagtaagtgccatggtagtttctgggctatcaggaaaaaactcaacagaatccccgaacgatgaagttcatgatgataacgaacaagaaaagtctgacgcacaggcggatgttgtagatcccgataatcctaatattgtcacgacttataaagaaaggcagctctttgataaaatcgtatccatcattggatctgagcacgacattcaatacaaagacactgcatcgtacttcggtgttctcttccagggtaaaacgaaccgctggatagttcgctactatgataagaaatcaaaatcatcgatccagctacctatagaattgaatgacataacaattaatgaaatctctagagcagggttaacctgcgatgcttcaagaatttacatggataatcctgaagatattttgaggatatcgggattggttcttgattcatttgagtacgtaaaaaacgacgaaaatttccgcaagaagtaa

SEQ ID NO: 78858 - DNA, 258 bp, Citrobacter koseri
atgtactgcgaaaccgcagcactggaccagtttttctgggtattcgtcaacaaagacgagaactaccactggatcgccatcgtcgaagcatccgaagaattgctgaaactcggcatgctggaataccgcaaagcaatgcgcgccatagcgaacgggttcgacacaggcgaatggctggcaccgattaccaaagattacgccgaagaactcaatgattttgatgtccgccgccttgaagcgctgcgcgtacaggcataa

SEQ ID NO: 78859 - DNA, 330 bp, Citrobacter koseri
atggaaaacacaaatattgttaccactgagcagcaggcaccaaacaccatttctgccagtaacgcgatttttaacgtacagacgctgggccagttaaccgcgttcgcaaatctgatggccgattcccaagtgactgtaccagcgcaccttgcaggaaaaccagtcgactgtatggctatcgtggtgcaggctatgcagtggggcatgaacccatacgcggtggcgcaaaaaacgcatctggttaacggtgttcttggatacaaggcgcaacttgtcaacgcggtaatctccagttccagtgccattcatggccgttttcattaccgttaa

SEQ ID NO: 78860 - DNA, 723 bp, Citrobacter koseri
atgaacttcaacctgaaaaataaactgccagttaatagatatcttgtgataatagtttttgtacttttcattttggcttgtatgcagtttatttatcttttccttcgttcattaagcattgccccaaactatacgggaactgtaagtgacatcataatagccacaacaaatgttattttagctacctgcgccgttcttgcattcaaaaacatatccagtttatttaaagataaactatccgataatgccatcagtaaaatagatacagcattggtatctcttgatgattgcatagatagtttttcaagcttatttttaaatatgacacttgctaaaatttataaagccactaataaccccaaggaccctcagttagttaagcaacttgatgaagcatcaaaaaacattgaaaaagcaacaagttcagcctacaagactagatctataattggttcactagctcgctggaatataagcttaaacacagagagcggaataagactaagccaactgaccgctgatgctttcgagttaggcatgaaggcaacaaatatgtatatagcactaataaatgaaataaaccctaattccccatacaactctttaactcatagaccatttgatgagttatttaatgattttaatgaagaaaggggcagaattgaagacgaaagcgatgaattaaaaaaattctccattcatgaaatattcaaaataaaataa

SEQ ID NO: 78861 - DNA, 216 bp, Citrobacter koseri
atgatgaattgtccgttgtgcgctcaggccgcacacacacgcagcagttttcaggtctccactcaaaccaaagaacgttacaaccaatgtactaacattgagtgcgggcataccttcgtgacgcatgagacgtttgtgagatcagtttgtcggccggagaaaatcagcgccgcaccaccgcatcccaaagggatgcagcaacaattagtttactga

SEQ ID NO: 78862 - DNA, 1098 bp, Citrobacter koseri
atgaatatcagctcggaacagctggaccttaacagcaaaacaccctctttcagtattgtgattgagggcaagaacgtgacagaggtgctggataagcgcctgatgagcctgacgttgacggacaatagaggtttcgatgctgatcagctcgatctggaactggacgacgcggacgggcagattgtgttgccccggcgcggggcggtgatcaccctggcgctgggctggaaagggcagccacttttcacaaagggcagtttcacggtggatgagattgaacacgctggcgcaccggacagactgaccatccgcgcccgcagtgccgactttcgggaaaccctgaacacccggcgggagaagtcctggcatcagaccacggtgggcgacgtggtgaaagagattgccacccggcacaacctgacaatggccctgggcaaggacctgaccgataagccgctggatcacctggaccagaccaacgagagcgacgcgagtttcctgatgaagctggcgcggcagtttggggccattgcctctgtaaaagacggacatctgctgtttatccgccaggggcagggcagaacagccagcggaaagccactgccggtaatcactatcacccgcaaggccggagacagccaccgtttcagcctggcagatcgtggagcctatacgggcgtgattgccagctggctgtatacgcgggagccagcaaagaaggaaaccacgagcgttaagcgccggaagaaaaccacgacagcaaaggagccggaggcaaagcagggagattatctggtcggcacggatgaaaacgtgctggtactcaaccggacctatgctaaccgggccaacgctgaacgggccgccaaaatgcaatgggagcgcctgcagcgtggtgttgcgtccttctctcttcagcttgcggaagggcgggccgatctctacacggaaatgcccgtgaaggtgagcggctttaagcagcccgttgatgaagcggaatggacgataaccacgctcacgcatacggtcagcgctgacagtggtttcacaaccagcattgagtttgaggtgaaaattgacgatctcgaaatggaataa

SEQ ID NO: 78863 - DNA, 2802 bp, Citrobacter koseri
atgagtgataataacctgcgcctgcaggtggtactgaatgcggttgataaactcacccgccctttcaaaaacgcgcaggccagcactaaagcgctggcttcagccgcgcaacagagcaaaacccggctgaaagaactggatgcccaggccgggaaaattgagggctttcgtaaggccagctcacagctggcagtgaccggagtcaatctcaaagccgcccgcgaagaagcggcaaaacttgccacgcagtttgccgccactaacagacctaccgcacagcaggcccgattgctggagcaggctaaaacccgcgttaatgatctgcagaccaaatataacgggctgcgtcagtccgtgcagcgtcaacggcaggccctcaaagagtccgggatcgatacaaaaaaactcagcagtgcacagcgggaactgcggcagaacgcagacgaaacccggcaggcactggacaaacagcagcaatccctgaaacgcctgggtgagcagcaggcgaggatgcacgcggcacgcgctgattattcccgtcgtctggaagtgcgtgatcggattgccggagctggggcgacgacaaccgccgccggggtggcaatgggcgtgccggtaatggctgccgtgaaaagctacgcgagcatggaagatgccatgaaaggggtggcgaagcaggttaatggcctgcgcgacgataacggcaaccgcaccgcccggttctatgaaatgcaggacgccatcaaggccgccagcgaacagctgccgatggaaaacggggcggtggactttgccgcgctggtcgagggcggcgcgcgcatgaatgtggcaaaccctaatgactcctgggctgaccagaaacgtgacctgctggcgtttgctgccacggcggcgaaagcctccacggcgtttgagcttccggcggatgagctttccgaaagcctggggaaaattgcccagctctataaagtcccgacccgcaacatcgagcaactgggcgatgcgctcaactatctggatgataacgccatgtcaaagggcggagatattatcgacgtcctgcagcgcatgggtggggtggcggaccgtctggattatcgcaaggctgccgcgctcggctccacgttcctttcccttggcaccgcgccggaagttgccgccagtgcagcaaatgccatggtgcgcgagctgtccattgccactatgcagagcaaaagcttttttgcaggcatggatctgctgaaactgaatccagcgcagattgaaaaggagatgacccaggatgcaatgggcactattcagcgcgtgctggagaaggtcaacaacctgccgaaagacaagcgtctgggcgcgatgacgctgatttttggcaaggagtttggtgatgacgcggcgaagctggcaaacaacctgccggagctgcagcgccagctcaagcttacttccggcagtgacgccaacggctccatgcagaaagagtccgacatcaataaagattccctgtcagctcagtggttgctggtcaaaactggggcggaaaataccttcagtagcctgggcgaaacgctgcgcgcgccactgatggcgatcatgaacacagcgaagcaggtcactggctctttccgccgctgggtggaggaaaatccaaaactggcgggtgggctacttaaagtcatggcggcgctggcgtctattgcggtggtgctgggcacggtgatgctagcggtgtccgccgtgctggggccactggcgctgatgcgcctgcagttttccatcctgggcattaaggggggcggcgcgcttggtctgatcgctaaagctatcggtggtgtcggcaaagggattatgtggctggggcgtcttatgttcgcaaaccctatcctggcggtgattggcctgattgctatgggggctatttacatttggcagaactgggacacgctggggccgaagttcaaagccatgtgggactctgtttgtgcagccacagcggcggcgggagaatggattaaggagaagttcagcactgtcatggagggcattaaatcgctgttcttcaattacaccctgccgggcctgattgccaaaaactgggacgccattaaggccggagtgtctgaggcatggaccaccgtccggcagaccatcagtgataaatgggctgccattctggcagacgtcgccgcgctcccggctaagttccaggagatgggcagcgctatcatcgacagcattctgaacggcatcaatgcgaagtgggaagcgctcaaaagcaagctgtcctccgttactgattatttgccggactggatgaccggaaataataaagcaccaggtaaaacgcaggtgcaggtggttggcggcgctgcagctgcagcggttccctttgcagggatgtatgacagcggcggtgccattccgcgcggccagtttggcattgtcggggagaatgggccggaaattgttaacggcccggcgaatgtgaccagccgcaggcgcacggcggcactggcatccgtggttgccggaatgatgggcactgccgcagtgcccgcagaggctgcaccgctccacccaatgagtctgcccgcagcaacttatcgcgccccgcaagagaaagccgccagccagccgcctgcagtgcgctacgaaatcaacgcgcctattcatattgttgcccagccgggccaaagtgcgcaggacattgcccgcgaggtggcaaggcagctggacgaacgggaacgccgcgccagggcgaaagcccgcagcagctacagcgatcagggggggtatgaatcatga

SEQ ID NO: 78864 - DNA, 303 bp, Citrobacter koseri
atgagcgacaaagtaaacgaaaaaaccgtggtactggatacgccaatcctgcgcggtaaaagcgaaatcaaagaggtggtgctgcgtaagccgcaatccggcgcactgcgtggcacccgcctgcaggccattatggatatggacgtgagcgcgatgatgaccatcattccgcgaatctccagcccgacgctgaccccgcaggaaatggcagagctggacccggcggacctcaccgccatgtccgtggaggtggtcacttttttgttgaagaagtcggtgcttgccgatttgccgacagcctga

SEQ ID NO: 78865 - DNA, 516 bp, Citrobacter koseri
atggctttaccacgtaagttaaaacacctgaacctgttcaacgacgggaacaactggcaggggatcgttgagtccctgaccctgccgaaatttacccgcaagtttgagaagtatcgcggcggcggcatggctggcgcggtggatgtggacatggggctggatgacggtgcactggacacggaattttccattggcgggatggagtcgctgatctttaaacagcttgccaaaaccaccgccgacggcgtgcaactgcgctttactgcgtccatccagcgcgatgacaccggggaagtacaggccgtggagctggtagtgcgcgggcgtcacaaagaaatcgactccggcgagctgaaaaccggggagagcaacagcaccaaagtcagcagcaccaacagctacgccaaactgaccattaacggcgaagtgctttatgaggtcgatacgatcaacatggttgaaatcgtggacggcgtggacctgatggaagcgcaccgccacgccatcggcctctga

SEQ ID NO: 78866 - DNA, 432 bp, Citrobacter koseri
atgaaatactggtttagtggtgagagcaacgctttctatccgattgagcttaaaaccgattaccttgcggctggctcgctacctgcagatttggttgaggtcagcagcgctgtgtttgctgaatattccggtccgtcgccagagaataaagtcaggggggttgatgcgtatgggttccctgcctggcaagacgttccaccgccaacggcagaagatttaatggttgcggcggagaatatgcaacaggcattggttaaccaggcgctggatcatatcagtgataagcagtggcaaggaaaagctgctatcggacgccttaaagacgatgagcgggcagaatataacgcctggctggattatcttgatgagcttgatgtagttgatctgccctcggctcccacggttaactggccctctcaaccagaaaagtag

SEQ ID NO: 78867 - DNA, 360 bp, Citrobacter koseri
atgacgatgtattacggcatgaacagcgccacgggcaaggccattacagacaccgaacatctgcgccagtccgtcaaagacattttgatcacgccgcagggcagccgcattgcccgccgggagtatggttcgctgctgtcggcactgattgaccagccacaaaacccggcgctgcgcctgcagatgatgagtgctgtttatgtggcgctgatgcgctgggagccacggcttactctcgatgctatcactatcaacagcgcctttgacggctcaatggtcgttgacctgaccgggcggcgcactgatggctcgcctgtttctctttccgttgcaacaggagcacaaagtggcagcaattga

SEQ ID NO: 78868 - DNA, 606 bp, Citrobacter koseri
atggggttaattggcaaaatattctccatgaatgcacaactgaccgaaatcatgcgccttatcaccaacctgatccgcaccgggactgtcaccgaagtggaccgggataactggctgtgccgggtgaaaacgggcgagcttgaaaccaactggattaactggctgacgctgcgcgcgggcaaatcgcgcacctggtggaaaccgtcagtgggtgagcaggttgtgttgttcagcctgggcggcaatctggaaacagcgtttgccctgcctgccgtctactcaaaccagtttccgccgccgtctgactctgaggacggcagcgtgacggaatacccggacggtggctggtttgaatacgaacctgaaaccgggcgctggtacgtccgggggattaaatccatggtgatcgaggcggcggataacgtcaccttcaaaaccggggaatttgtcgtggaagccgacaccacccgcattaacagcgaggtggtgatcaacggtggcgtgactcagggcggcggtgcaatgagttctaacgggatcgtggctgataagcacggtcacacgggcgttaagtccggtggcgacacatcgggaggcccggtatga

SEQ ID NO: 78869 - DNA, 900 bp, Citrobacter koseri
atgctctataaataccggaacattaatgaatggaccattagtgctttagaaacacaaaaaatatggctcgcaaaaccctcaacactcaatgatcctctggaatgcagaccaccaatatttaataaggatgagatatacaaccactgcgcaaaaacgtggggcgcccagcttttaggattcttacaccaaattatattttgcaaagaaaatggagaacatttcttcggcatttctggaagagaacttgacaagctattcagaaaaataaacaagcaaaatagtctagaaaaaaagataagagtagcaaataggtttaaattaagtgtaggatcgcaagagtttgcagatcctagtatcacaataaattcaatacaaaatcatcttaaaaacattggagtatgcagcctttcagaagaccccttaagcactcttttatggtcgcattattctgcggaacacagaggcgttgctctgggcttcgaagttacgccaggaagtaagctggcaaataaaaagtattgctctaaggtagattatattgagactctgcccaagtattctctagacgatttctcacgacgggaattaacgatttatgcaggtccccgcagaccagaaaacaaagtactatttgacgaccctacaattagaaaaattctttcaacgaaaatatctgactggagttacgaaaaagaatggcgttactttgagcgcgatagtggaagctatgacttcccaagcaagttatccgaaatagtttttggtgcaaatacaaaagatgatgaaatagataaaataatccaaacatgtcatgctcacataccttacgacattacattcaagaaatgtttttatgcaacaaactcctcttcattacaattaaaaaaaataaaacgttaa

SEQ ID NO: 78870 - DNA, 444 bp, Citrobacter koseri
gtggatgaactgcagaaaatggatgcctggctgacggcgttgctggcaaatctggagccagcagcacgcaagcgcatgatgcgagagttggcgcagcagctacgccggacccaacagaacaacatccgactgcagcgcaatccagacggaaccggctacgagccgcgccgggtaacagcccggacgaaaaagggccgcattaagcgacagatgttcaccaaactccgcaccactaaatacctgaaaaccgccgccactgctgactatgccagcgttgagtttgccgggcaggtgcagcgcattgcccgggtgcatcattacggcttacgagatcgagtaagccgtcgggggccggaggtgcgttattcggaacgaaaattactagggattaatagcaaagttgagcacttaatagaagttttagttttgagttctctcaagtag

SEQ ID NO: 78871 - DNA, 432 bp, Citrobacter koseri
gtgaacaagccgcaatccctgcgcgtagcgctaaataaatcggtggcctacgtccgggaaaacccggacaagctgcacctgtttgtggataaaggctccctggtggcaactggggccagctccatgtcgtgggaataccgttacaccctgaatgtggtgattgaagacttcagcggcgatcaaaacctgctgatggccccggtgctgctgtggttgatggagaatcagccggatgccatcaataacccggagctgcgcgaaaagctgttttcctttgaggtggatattctgcgtaatgacatttgcgacatcagtctggatctgcagctgacggagcgcattctggtgaatgccgagggagggacctcaaccgttaaggcggagccggagccggatgtgccggaagaaatgtggacggtgagccgtggatga

SEQ ID NO: 78872 - DNA, 429 bp, Citrobacter koseri
atgacgcgtgtcctggtagtgattatggcgctggtgctggcggcgctgggctggcagtcgtggcgactcaataacgccaggcacactatcgataaccaggacgctgcgctggagagcaaaacccaggagctgacgaagaaaaacagccagttgatcggcctgtctatcctgaccgaaaccaacagccgggagcagacgcggctttatgcggcggcagaagatacgcgatctttgctgcatcagcgccagaaccggatcgaggagctaaaacgtgaaaacgaagatttgcgccgctgggctgacactcgtttgcctcctgatgttgtcaggttgcgcgaaagaccctctatcaccggaggtgctgcttaccgtgagtggctgtccaaaggtgacgcagtgccgcctggaaaggtcatcgccgcgcagtaa

SEQ ID NO: 78873 - DNA, 216 bp, Citrobacter koseri
atgacgcttgaacgaatcagcgcctttatcacgtatttcatcgccgcagtgctggcatggatgggggacctgtccatcaaggatgcctccacggtgggcggcgtgttgattggcgtgctgatgatgctgattaactggtactacaaacacaaaactttccagctgctgcgtgacgggaagctctcacgggaggcgtatgactccatcaatcgttaa

SEQ ID NO: 78874 - DNA, 465 bp, Citrobacter koseri
atgcagtttgttgcgcctgagcaggccccggaacagacggaggtcatcaaaaatacgccgttctggcctgatgtggacctgtgcgaatttcgcagcgtgatgcgcactgacggcacggtgacgcccgcccggctgaaacagctggcgctcacggcaatgtcagaagttaacgcggagctgtacaccttccgccagcgccagcagtcgctgggctaccggatgctggcagaggtgcccgcagaagaactggacggcaaaagcgagcgcctgcaccactacagcaatgcggtgtattgctgggcgcgggcggtgctcaatgagcgctatcaggactatgacgccacggcgtctgcggtaaaacgcggggaagagctggcagaggccagcgccgatctgtggcgtgatgcccgctgggctatcagccgggtgcaggatgcaccgcactgcacggtggagcttatctga

SEQ ID NO: 78875 - DNA, 651 bp, Citrobacter koseri
atgagcctgagtcccgcacggcagcaccgcctgcgcattcaggctgaacaggccgcccgccagggcggcagtgttcgccacgcgtcaggttatgaccagatgctgctgcagctggcggaggataagcgccgcctgaaaggtattcagtccacggtgacaaaggcgcaaatcaaggtggagctgctgccgaaatatgccgcctgggtggagggcgtgctggcggcggaggccacgcagcaggatgacgtggtgatgtacgtcctgctctggcgcattgacgccggtgactatgctggcgcgctgcaaatcgccgtccacgcgctgcgccatggctgggtgatgccgctcggcaaccgtaacccgcagacggtactggttgaggagctggcagacgcggcgcaggccgccatcaccgcctcacaaccttttgagactgagtatttgctgcaggcgcttgatatgaccgacggcagcgacatgcccgatcagtcacgtgcgcgcctgcataaagctatcggccttttgctctgcgaaaccagcccggcctccgccctgaatcacctcactcatgcgctgcagctcgacccgcgctgcggcgtgaaacagaacaaagaacggcttgagcgcagactgcgcaacgagagccagtaa

SEQ ID NO: 78876 - DNA, 1086 bp, Citrobacter koseri
atgaaacagaaaaccaaatttgcctttaacgcctacctgatgcagctggcccgcctgaacaatgttccggtggaggagttgtccagcaagttcacggtggagccgtccgtgcagcagactctggaagaccagattcagcagtccgccgcgttcctcaccctgattaacatcatgcccgtgtctgagcagtccggtcagctgctggggctgggcgtcggcagcaccatcgccgggaccaccgacaccaccgctaaagaacgcgaagccaccgatcccacgctgatgacggatgtggaatacaagtgcgaacagaccaactttgatacggtgctgacctacgcgaagctggacctgtgggcaaaattccaggacttccagctgcgtatccgcaacgccatcattcagcgccaggcactggaccgcatcatgatcggctttaacggtgtgacgcgtgccaaaacctccaaccgtaccgccaatccgatgctgcaggacgtcaacaaaggctggctgcagaaagtgcgtgaagatgcgccggatagcgtgatgggcagcaccaccgccgaagacgggaccaccactgcagttgtgttgaaagttggaccgggcggtcagtacctcaacctggatgctctggtgatggatgcggtcaacgaactggtagacccgattttccaggacgatgacggtctggtggtggtctgtggtcgtgagctgttggcggacaagtatttcccgctggtcaacaaagaacagcccaacagcgaaaaaatctccgccgatctgatcatcagccagaagcgcatgggtggcctgcaggcggtgcgtgctccctatttccctgcaaatgcgctgttgatcacccgcctggacaatctgtccatttactggcaggaggacactcgccgccgtgccgtgatcgacaatccgaagcgtgaccgcatcgaaaactttgaatccgtcaacgaggcgtatgtggtggaggactaccgctgcgtggctctggtggaaaacattgagatcggtgacttcaccccgcctgcagctcctgcagaagaatccgccgaaaccggaacaggggaataa

SEQ ID NO: 78877 - DNA, 825 bp, Citrobacter koseri
atgacagcgaaagcaaagcgtttccgcatcggggtggaaggtgccactactgatggacgtgaaatccagcgtgactggctggtgcagatggcagccagttacaacccggcggtctataccgcgcaaattaaccttgagcacatcaagtctcatctgccggatagcacctttaatcgctacggcaccgtgactgccctggttgccgaagaaatcaaagacggtgcactggcgggcaagatggcgctctatgccgatgtggccccgacggatgccctggtggccctggtgaagaaagggcagaagctctttacctccatggaggtcagcccgcagtttgccgactctggcaaggcgtatcttgtcggcctggcggcaacggatgaccctgcaagcctgggcacggaaatgctgaccttcagcgccaccgccacccataacccgctggctcaccgcaagctgaacccggaaaacctgttttccgccgccgccgaaacggtgatcgagctggaagaagcccagccaaacctcttttcccgcgtcactgcgctgtttgccaaaaaagagcagatcgatgacgcgcgtttctctgatgtgcacaaagccgtggagctggttgccactgagcagcagagctttggtgagcgcaccaacaaatccctgtctgagcaggaagcccgcctttccgtgctggaaacctcactgcagcaacagcaggccgattttgcggcgctgcagaagcagctgagcaccgaagacagccgcaaggattaccgccagcgcgcgccgggcggtgatgcacccgctggcaccgtgactaactgctga

SEQ ID NO: 78878 - DNA, 1032 bp, Citrobacter koseri
atgagtgaacacgacgccctgaccagcaccgcgccagtacaggaagccgcgcagcagaagaacacaactcacgcggaagcgttcagctttggcgatccgatcccggtactggaccgccgcgaactgctggattacgtggaatgcgtgcagatggataagtggtatgagccgcccgtaagctttgacgggctggcccgcacctaccgcgccgccgtgcatcacagctcgccgattgccgttaagcgcaacatcctgaccagcacgtttatcccgcacccgctgttgagccagcaggcattcagccgctttgtgcaggattatctggtattcggtaacgcctatctggaaaagcgcacgaaccggcttggcggcattctgtcactggagccatcgctggcgaaatacactcgacgtgggatcgatctcgacacctactggtttgtgcaatacggcatgaccacgcagccctacgagttcaccaaaggcagcatctttcacctgatggaaccggacctgaaccaagagatttacggcctgccggaatacctgtccgccatcccttccgccctactcaacgagtccgccacgctgttccgccgaaagtattacatcaacggcagccacgcgggctttatcatgtacatgactgacgccgcacagaaccaggaggacgtgaacaacatccgccaggccatgaaaagcgccaaagggccgggcaacttccgcaacctgtttatgtactcgcccaacggcaagaaggacggcattcagatcatcccgctgtcagaggtggcggcaaaggatgagtttttaaacatcaagaatgttagccgcgatgacatgatggcggcccaccgcgtgccgcctcagatgatggggattatgcctagcaatgttggggggtttggggatgtggagaaggcaagtatggtatttgtcaggaatgaattgatgccgctacagaagcggcttcaagaactaaataactggttagatgtgccaataatcacattttcacaatatgaattgtaa

SEQ ID NO: 78879 - DNA, 960 bp, Citrobacter koseri
atgaaatccgctgaacacttgaacacttttagactgagacatcttggcttgcctgtcatgaacgatttgcaggatatgtccaaggcgacccgtatttcagttgaaactcttcgcttattgatttacagagctgattttcgttataaaatctacagcataaagaagaaagattctcagagtatcagaacaatctatcaaccttcacgtgagctgaaagccttacagggatgggtgctgcgtaatattttagataagttgtcttcatctcctttttctattggttttgaaaaacatcaatcgatattgaataatgctacgccacatataggcgctaattttattcttaatattgacttggagaacttttttccaagtttgagtgcgaaaaaagtttttggggtttttcactctctgggctataacagaactatatcctcatctcttactaagatctgttgctataaaaatttgttaccacaaggtgctccatcatcacctaagctagcaaatctaatatgctcaaaactcgattatcggatacaaggttatgcgggtagcagggggcttatttatacccgatatgcagacgatttgacattgtcagctcaatcaatgaaaaaggttcttaaagcgaaggattttttattctctataattccaactgagaatttggttgttaatactaaaaaaacatgcatcagtggcccacgtagtcaaaagaaagttacaggtttggttatttcacaggagaaggctggaataggcaggctaaagcacaaagagttgcgggcaaaaattcatcatcttttcttagggcgttcaaaggatatagaacatgttcgtggatggttatcattcgttttaagtgtagactcgaagagttatagaagattattagtgtatatcgggaagttagaaaaaaaatatggatggaatccgctaagtaaaacgaagacctag

SEQ ID NO: 78880 - DNA, 924 bp, Citrobacter koseri
atgaaaaaaaaatttaccgacgagcagcaacaacagcttataggacatctcacaaaaaaaggcttctaccaaggtgttaatattaagttgtctatttttttgtgcggtggtgatgtagcaaatcatcagtcgtggcgtcatcagttttctcaatttttggcaaaggcaagtaacgttgatgttttctatccagaagatttgtttgatgatttattggctgggcagggccagcacagtcttttaagtttagaaaatattcttgcagaagctgttgatgtaataatattatttcctgaaagtcccggctcgttcacagagttaggggctttctctaataatgagaagttaaggaaaaagttaatttgtatccaagactcaaaattcaaatctaagcgtagctttatcaactacggccctatacgtttgttaagagagttaaattcaaactctgttttgcgctgtagcgtaaatgagctgacagaactgtgcgaatcatcattggatgtggccaagaaaaccccattttataggaagttaatgaggtccattggccgggtattgaaggataataaagttcaaaaagatattggtaatatattatatgcggagaggtttttgcttccgtgcatttatttattagatggtgtcaactttaggaccttatgtgaattagcttacaaagcattaaaacaagatgaagttctatctaaaattattgtaaggtctgctgtttcccgattgataaatcagcggaagattcttcaaatgactgaaggttaccaagttacagcattaggggccgactacgtaaggagtgtcttcgacagaaagatacttgaccgtttgcggcttgaaatcatgaattttgaaaatcgtagaagatcaacatttaactatgataagatcccatatgcgcacccttag

SEQ ID NO: 78881 - DNA, 1659 bp, Citrobacter koseri
atgcggctgattgatgtaagcgattggcgcagggatgatgaacacggtatcttcccaataggcgcaagggacaaaaaaatgctttggtctccagagcaggaaattgatggggttaaaccaaactggccgtatctctttaaattgtctagggatgcatatccggaccaattttggatggaaaccatcgcttacatagttggttgcgctatgggcgtagaaatcccaaaagccatccctgcagtaagggttaatgaatcaggactaaaggagtatggtgcgctccttgagtggttttacgataaagaatttgaacatttcgtccatgcctccgatatttttcatgtactgaacaaagagttcgatgatgaatccggcaggcaccataatgttgaagatttaaggttgatttgcagggccctgagcattcacgggatgatccatactgattggaatagctgggtttgcgatatgcttttgctggattccctaatcggaaacagtgaccgacaccaggagaactggggattcgtattcactatccaaaaaggaagtgatggaaaagctctgcgcgatgcggaaggcaaagtagttactactggcaaactgtccccttacttcgacaacggaaccagtttgggacatgagaggtttcctgagaaggtagctgcatgggattgtaaggcccttgataagtacattcagaaaggaaaccatcatctcagatgtacgagaacggatactaaggtcaggcttggacatttgcagtcgattcaagagctaactcatgaaccggcaatgttgccacttattaacgagcgactaggctttaatatagaagatctttgcggcagaatacgtgcgctcacaagtatagatgcaggagaaggggcgctttcttctgctagggctgagtgggtgattagactgttacaacgccgacatacgaggttaaaactaataactaacatgcgaactatcaatcacattgtcgagccattgcggttgtggcttacttggcaacctgcaggtggtggttctcgttatgtcgtagggtatattgatcgaaatgaaggtgatcaatacaccttcacgtacaacttcgagaccgctgatttcaatgcagctatcgaaaaagggtttaaagggcacccggcatttcagttcaagccgcaagttcatacaaacaacgtgcttgagccatttttacgacgtttaccgcctaggaaacgtaaagattttgcagagtacttggctcaacatcttttacctgcggatttcccaggctccgattttgcgttacttggttacactggcgctaagtcacctgctgatggatttagtctcatcaacgattcatcagtttttgagcgcagctgtgaattattattagaggttgcaggcactcgttaccaggaggggttggacctctctttggttcaagttggcgaccctgtggaatttgttgctgaaccggataatccccatgacagcgacgctgtagcggttatccatgcagcaggaagaatagggtacgtaaacaaagtccattgcaaagtcgttaaagacggtgttaaagcaaaaaagattaatgcttttgtagccaaaaaaaacggcactcaagcaagaccgttggtctacctgctcgttgaatgtaagtag

SEQ ID NO: 78882 - DNA, 549 bp, Citrobacter koseri
atggataacattatgatagatatggaaacgctaggcgtttctgtatcctccccgataatctctattgcagcagtcttttttgaaacagatggtagtgttggaaaaactttctatcgcgtggtggatttgaagtcagcactttccaatgggcaagtcgaaccttccacactttcgtggtggatgtctcagtctgatgaagcccgtaagattttttccgatccaagcgcgacttctcttgaccttgttttgcgggatttagatgccttcatcaaggaagcgggaaactcagattgcgtgaaagtttgggggaacggtccttcttttgataacgctattttggctcaggcgtataaaaattttgacgtttcgttaccttggcggttcagaaatgaccgtgatgtgaggaccattgtagacttagctaaatgcttaaaaaacattgatccccttaggttagcggttcgggaaggcgttcatcacaacgcactttcagatgcgctgtttcaaatcgaatgtgtttctatagcttatcgggcacttaaaggctag

SEQ ID NO: 78883 - DNA, 228 bp, Citrobacter koseri
atgcgcaaagcatgtattgagcttatgggtggaaccaatgcagcatgcctgattgcaggagaactaggcactggacgctgcctttatatggttgtagtaatggaggacatttttggtaagcccacaacagagcaatggcttaaatcattgcgactatgcgaggccaaggccgtcgaactcaaatatgaggtcgcacgtattcgcggcatgagactggcaggcttgtaa

SEQ ID NO: 78884 - DNA, 2412 bp, Citrobacter koseri
gtgactgaaagtatttcaggccgcctcgctgccttgtctcctgcccaggcccccggcggggtaaaaaatgctgccggggtttacgcctggaactcagccaaaaaagcagttaacccataccttgacccggcagacgttgcgccgggttcagcactttcaaacctgatcactctgtacgctgccgacaatgagcaggagcagctgcgccgtgaggcgctgagtgatgaggtctgggagcgttatttcttcaatgagtcccgtgatcctgtccagcgagaaatggagcaggataacctcatcagccgcgccaaaatggcccgtgagcagcagcgtgttaatcccgatctcgtgattatcgctgatgtaaacgcggagccatcccatatcagcaagccattgcttgaacgcattaaatattttcatggcctgggccgggcaaaagcttactcccgttatctgcgtgaaactatcaggccatgccttgagcgcctggcgcgggtgcgtgacagccaggtgtctgcttccttccggttcatggctagccatgactgtctggaggggctactggtcctgcctgaaatgagcctggaccaggtaaaacgcctgtctacgctggttgccgcacacatgagcatgtgtctggatgcggcctgtggtgatctttttgtcacggacgacgtgaaaccagaagaaatccgccaggcgtgggaaagggtggctgctgaggcaatgcggctggatgtgatcccacctgcgtttgagcagctacgccgaaagcgccgccgccgcaagcctgtgccttatgacctcattccgggatcgctcgcgcgtatgctctgcgcggactggtggtatcgcaagctgtggcagatgcgctgcgagtggcgagaggaacaactgcgcgccgtttgtctggtcaacaagaaagcctccccgtatgtcagctatgaagctgtgatccataagcgcgaacagcgccgcaaatcactggagtttttcaagtcgcatgagctggtaaacgccgacggcgatacgctggatatggaagaggtggtgaacgccagcaacagcaacccggcacaccgccgcaacgaaatgatggcctgcgttaaagggctggagctgattgctgaaatgcgcagtgactgcgccgtgttctataccattacttgcccgtcccgctttcacgccaccctcaacaacggcagaccaaacccgaagtggaccagcgaaacagttcggcagagcagtgattatctggttgaaaccttcgctgcattccgcaaggccatgcacaaggccgggctgcgctggtatggcgtccgggttgcagagccacatcatgacggcacagtacactggcatctgctgtgcttcatgcgcaaaaaagaccgtcgccccatcaccgcgctgctgcgcaaattcgccatccgcgaagaccgcgaggagctgggcaaaaataccggaccgcgcttcaagcctgagctgatcaacccacgcaagggcacgccgaccagctacatcgctaaatacatcagcaagaacatcgacgggcgcgggttggctaaagaagtcagcaaggaaacgggcagatcactgcgggacagcgcggagcacgtcaccgcctgggcgtcactgcaccgtgtgcagcaattccgtttcttcggtattccgggccgtcaggcttaccgagagctgcgcctgctggcaggccaggctggcggagcgcagggcgataaaaaagcaggtgcgccggttctggaaaatgcccgtctggatgccgtgctggcggctgcggatgcggggtgctttgccacctacatcatgaagcagggcggcgtgttggttccacgtaagcatcatctcgtcaggacggcctacgagcttaacgacgagccgagcgcctacggcgatcacggtattcgcatttatggcatctggtccccgattgttgaaggccggatctgcacgcacgccatcaagtggaaaatggttcgtaaggccgttgacgttcaggaggcggcagccgaccagggcgcttgcgccccttggactcgtggcaataactgtccccctgttgaaattttgaaccaatcagggggtgaattacctgaaaccaaagagccggaggcgctgccggacctccacgatctcagcgcgaaggaacggcgggagctgacagccaggctgaggctggtaaaaccgaagcggcggaaagggtacaaacaggaagttaacgagcagcagcgccagcagctcgacgctgaactgaggtccagagggtttgaagcgagtgaaacagaggtggatctgcttctgcgtggcggcagtattccgtctggggccgggttacgtcttttctaccgcaaccagcgcctgcaggaagatgacaaatggcggcagtggtactaa

SEQ ID NO: 78885 - DNA, 1011 bp, Citrobacter koseri
atgaatatcatcgaccagcgctgcctctcaaccgacaccatcaacatcatcagtatttcaggtggcaaagatagtcttgcccagtggctgcgggccattgaaaacgatgttccttatatgtcggtctttgctgatacgggtcatgaacacccgcagacgatggactatctggattatctggaatctaaactgggcaaggtgactcgcgtcaaagctgatttcacgcgtcagatagaaggcaaaagaaagttcattgcggagaagtggcccgtttctctggtcgaagactgtggaatgtcgccagacgaagccgcagaacgtgtaagccgcgcactggaaatcctcaaaccgacgggcaacccctttcttgatttgtgcatgtggaaggggcggtttccttcaacgaaggcaagattttgcacgtttgatctgaagcacgaacccgtgcgtactcaggttgtactgcccgcactggagctatacgacgaagtcatcagttggcagggtgtccgcgcccaggagtcacctgcacgcgccttgcttccagagtgggaagaagatgccgataacacgcctggcctgcatgtttaccgtcccatccttaactggctccatgaagatgttttcgccattgcgaagcgtcacggcattaagccgaacccactgtatctgcagggatgcagccgtgtcgggtgcatgccatgcatccacgcccgcaagtctgaactggcagaaatatttcagcgctggcctgaagaaatccagcgggtggctgaatgggagagaatggttgccgagtgctcgcgccgcggcaattcgacgttctttccatccacgcatgacccgcgtcgggctgaaaaacgcattgaggttattaccgttgatgcctatggcattgagacttaccgcgactgggccttaacgactcgcggtggtgcgcagttcgatttgctggcagcaatgaatgacagcacggtgtgcagcagtgtgtacgcgggggtttgtgagtga

SEQ ID NO: 78886 - DNA, 855 bp, Citrobacter koseri
atgagcacaatcctgaaatgggcgggcaataaaaccgacgtcatgccagagctaaaaaagcacttgcctgccggttcccgtctggttgagccgttcgcgggctcatgcgctgtgatgatggcgacagattatcctcattatcttgtcgcggatatcaatcctgacctggtcaatatgtaccagcagattaaggaagaccctgaatttttcatccagattgctgccggattttttaaacaaaacagcgaggatgatttcaggcgtattcgtcgtcattttaataacgggaaatcgaacggcaaagtttggcgtgccgctgcatttctgtatctcaaccgccattgttatagagggctatgccgttataacaaaagtggtggtttcaatgtgccatacggcaattataaaaaaccgtattttccagaaagagagatatgggcatttttccataaggcccaacgcgcaacgattatctgcgccagctatgacgaaacgctggcaatgctgcaggcgggtgatgtggtctactgcgatccgccgtatgacggcactttcactgcataccacaccgcaggctttggtgaggatgaccagtatcacctggcctcaattcttgagcaccgctcatcagaagggcacccggttgttgtttcaaacagtgataccttgctgacgcgttcgctttaccgaaacttcctcctgcacagcatcacaaccaagcggagcatgggagttgatgcgggtgagcgtaagtccgcagaggaaattattgctgtatccagggtgctgagatctcgccgctctcattccagccttgggcgagtttgcctgggaactgttgaggtgcgcgcatga

SEQ ID NO: 78887 - DNA, 234 bp, Citrobacter koseri
atgcgaaatatagaaacccgaaccaccaaaaccggaccagatgatgccgggcttaacctgatgttgactgaggcgcgcatggaagaacgccggggccgcgctgatgtatttgctgctcatctggaaaagctggcggtgcatatcacgcgcggaaaactcaacggcaccgaagcggctgagttgctgcgtaacgctgctgaaatcatccagaacgaagcgcaggagatccactga

SEQ ID NO: 78888 - DNA, 342 bp, Citrobacter koseri
atggctattgaaggtgctgcaacgactcgcaggataagcccaggtgaacgctatgaagggttgaaccacatagcggaattaagggcaaaggtgtttggatttaacattgagtcagagcttgagcggtttattaacgaaatgagcgacccacgggacgcaaataataaacagaataagcgcgcattagccgccatattttttatggctaacattccggcagagcgtcacggcgtcaaaattagtgagctgacgactgacgaaaagcgggagcttataaaagcaatgaaccattttcgtgcagtggtgagcttatttccaaaacggctgaccatgccgaattaa

SEQ ID NO: 78889 - DNA, 201 bp, Citrobacter koseri
atgctgaatcacgaaccgtcatttgcatcactacttgttaagaaaagcccaggaatgcacttcggtcatggctggattacaggcaaagatggcaagcgctggcacccatgccactcgcaggctgaattgctggctgacctgtcaaccatcaaacaggggaaaccatggctattgaaggtgctgcaacgactcgcaggataa

SEQ ID NO: 78890 - DNA, 510 bp, Citrobacter koseri
atgtttgattataagatttccaaacatccgcactttgatgaagcctgccgggcctttgccttacgtcataacatggcaaagctggctgagcgtgcagaaatgaacgttcagacactgcgtaataagctgaatccggaacagccgcaccagctcaccgcgccggaaatctggctgcttaccgatattactgaggactcaactctggttgatggatttctggcccagattaactgcctggcgtgtgtcccggtgaacgaagtcgcaagcgagaagatgccgcattacgtgctgagtgctactgcagagattgggcgtgttgctgccagcgcagtttcaggtgaggcacaaactaccgccactcgtcggcaggcaatcgacagcatcaactctgttactcgtttgatggcgctgacggctgtttctatgcacgccaggctacaaacaagcccggcaatggcaagtgcggttgataccatgacgggcctgggcgcttcatttggtctgatttga

SEQ ID NO: 78891 - DNA, 243 bp, Citrobacter koseri
atgagtaccgatatttcaattcgtgtaccaaaagagatggcaacgcctgcagagttcgcggaatgggaaggtatttcccgcggctctgtttaccagaaaatccatcatgggcagctcgctaaatacatggtgaagaaggataaaaacaaagggcgcgtcagcctccgctatctgatgtacaaagctgatcaagttcgtgagtcccttggtcattctaacttccgcatcatcgtgggccagtaa

SEQ ID NO: 78892 - DNA, 633 bp, Citrobacter koseri
atgattaacatccaagcaggtcccaatacgggaggtcgcgaagctatcgataggctgcttaaagcgtatggcttcaccacaaaacaagcccttgccgatcacttaaagatatcaaaaagcaccatggcaaacaggaacttacgcgacagcttcccggctgaatgggtaattcaatgtgctctcgaaacaggcgttgcactgttatggttagctacaggtcaaggtgaaatgttcacctcagaagatcgagcaaaaaatcccgtaaacgagtcaacaacaacagtccgtccactttcaaagatcgtcgcaccgagcatcaagcaagctgacctaaaaaatggcgagttgaatacagaaggagagatactactggataacagccttttagacagcgagccttcgaagtctctgtttgtcaaaacctcaacagacagttttgtgatcgatacatcggttaagcaaatcagtaacggttactggctcgtcgatatcgatggagtgaaaagcatcgttaaggttgccagaatcccaggtaaccgaatcgtggttcaccaggatgaatcctcttttgagtgctctgtagacgatgtagaaactattgggcgtgcagtaaaaatgattaagagcatctga

SEQ ID NO: 78893 - DNA, 1029 bp, Citrobacter koseri
atgactattcgaaagcagccgaacggaaaatggttgtgcgagtgctacccgaacgggcgcgatggtaaacgcgtgcgcaagcaatttgcgacgaaaggcgaggccgtagcattcgaaaacttcaccatggatgaagtaaacaaaaagccgtggctgggggagaaggaagatcggcggaaactgtcggagttgattgagcagtggcattccctctacgggcagactctcgcggaccccaaacgtctgatggcgaagctcaatattatttgtaatggccttggcgatcccgttgcctcagaactgacagccggtgactttacgaaataccgtgaagcacggctaaagggcgaagtacgtaatgaagatggcgcgcttatgtcgccagttaaaccccgaacggtaaacctagagcaacgcaacctgtcatcagtattcggcacgttgaaaaagctgggtcactggtcagcccctaacccgcttgccgggctaccaacattcaaaatcgcagagggcgaactggcgttcctggccccagatgaaattaagcgactactggatgcctgcgcagattctcaaaaccatagcctcctgacgattgcaaaaatctgcctagcaacaggagcacgctggagtgaagctgaaaacctgcagggccatcagttatcgaaatatcggatcacttacacaaagaccaaaggcaagaagaatcgtactgtaccgatatctcaggagctgtatgacgagctccccaagaatcgagggaaattattcactccatgcagaaaagcttttgaacgggcagtgaagcgagctgggatcgatctgccagatggacaatgtactcatgtactgcgccatacattcgccagccattttatgactaatgggggaaacatacttgttttgagagatatactgggtcacgccgatatcaaaatgacaatgatttattctcatttttcaccagaccatttagaagatgctgtaactaaaaaccctctagcgacgctggaatttactcatggataa

SEQ ID NO: 78894 - DNA, 1071 bp, Citrobacter koseri
atggataaaagcatttattacttactcattactctttcatacatacttatcacggcagtatatttaaggagaaaaattaaaaccaattacttcaaactcgatcaccgcagtttgttagaacaacgacttttttggttttcaatactctatccttttataacttttgtattttttggttcttttgtttggatagaaaaattcaattctttttctctaacagccaaggggtacgaacactttttagaaatctcaaaatttcctttactttttttagccgcatcggtgccattggcctcgattgtcaacaatctacaccgcacaattcagactgaaaagcagataacagaagcggaaagaaaaaacaaaaacgaccttcactataatcatttaaagttacacactgaattttataagaaaattgaaacaagaaaaatagaatgcaaattcaaagagagtaaagagtttacactcaactatgaaatttacatccaacatcctttagaactttatagaaaatgctaccctgggtcatcagaggcatcatttgaaataaacatgcattatattagagccatcaaaaaccaatggaacacgataaataacgcctgtagacaaatcagcaccgttaccgagactgagcaagatgaacacttatactcaaggaggattgttctttattataatttaatgagcgcttatgaagagctatgtcacatcctctgtttaggtggttatcattcagaatattcaattgtaataaatgacaaaccacaaaagtatcagttatactctattttttatgactttagaagtatgtataaatctttgcttagtttgcaagatttaacaaatttatttcttgatacctgtcgagatacaaaagtgaatgaaatatttcctctgggaaatagaatttttccatatggtagtggtattgtcgaccattggttctattatcttgattttatcgctatcggcgactatcaggcaccacagcttacaaaaatcggcgacttcctcaataacatgtatagtgaaaaagatggcggcaatttggcggcagaaaggtaa

SEQ ID NO: 78895 - DNA, 315 bp, Citrobacter koseri
atggataatgaattggaagacatactggcgaaaacgggcatgaaaaaaaaggatgctactatcctgattaagctggcaaaaaggaaacatatcagcttgggtcgggcattttttttgtatgcatggaaatattatgcctggagtggagctttactattggcagtcatttttgcctccctttctgagggaattgagtactttatagtaaacgttctcttctgtattgctgtagctctagtttcactcttctttacaccctttgtcataaatttaattcggagtattaaaattcaagttaagttgatcggaaaataa

SEQ ID NO: 78896 - DNA, 1440 bp, Citrobacter koseri
atgtctggttttaaaaaagattttctttggggtggcgcggtagcagcacatcaacttgaaggtggctggaacgaaggtggtaagggcatcagcattgcggatgtaatgacggctggagaatacggtatttcacgagaggtgacgccggggatcattgaaggcagaaactaccctaatcacgaagctattgatttctttcatcgttataaggacgatattaagctattttcagaaatgggatttacgtgtttccgcacctctattgcctggtccagaatttttcctgaaggtgacgagctggagcctaatgaagcgggcttgcaattttatgataatatgtttgatgagtgtttaaaatataatattcaacccgttatcactttatcgcattttgaaatgccatatcaccttgtgactgagtatggcggctggcggaaccgtaaattaatcgacttttttcttcggtttgcgaaggtagttttcacgcgttataaatctaaagttaaatactggatgacatttaatgaaataaataaccaggtcaactatcgtgaaagtctttgtccttttactaattcaggtattctttattcttcggatgaagatgagtatgcgcgtgaaagagcgatgtatcaggcagttcactatgaattagttgccagtgcattagtcgttgatgctggacacctcattaatccagattttaaaattggttgtatgattgcgatgtgtccaatctatccgcttacctgttcaccgggcgatatgatgatgtctgtgagtgcaatgcatcgtcgttattggtttactgacgtgcatgtgcgtggatattatcctcaacatatggttaattatttcaggaaaaaaggttttgaacttgatatcactgaaagtgatattgagattcttcagcatgggcgtgtggactatatcggtttcagttactacatgtctttcgtaactcaatacacggatgataatcctgagtttgattatgtcgagccagcgcatctggtgaataatccgtatattcaaacatctgactggggttggcaggttgatgcgatgggcttgcgctactcgctcaactggttctgggaccattaccagctaccgatgtttatcgtagagaacggttttggcgcgaatgatgtccagcaggcggacggaacagttgatgatcaatatcgcattgactatcttaccgcgcatgtgagcgagatgaaaaaagccgttgtagaagatggtgttgacttaatcgggtataccccgtggggctgcattgacctgatttctgccggtacgggcgaaatgaagaagcgctacggtatgatttatgttgataaggataatgacggtaatggttctctgaatcgtagtcgtaagaaatccttctactggtatcgggatcttattgcggataatggcaatactatttga

SEQ ID NO: 78897 - DNA, 1596 bp, Citrobacter koseri
atgaattcaagaaaattgaaggtgagtctattatcgttatatgtgtgtctggctttatgtccagttgatgtgctggccggtaaattaaccgttgagcaacgactcgaacttctggagtcagaacttactgcaaataaaaatgaactccagaaaacgaaagatgaactagggaagtacaagtcaaagctggcatctttacagcaaagtgttgttgaaaataattatcgcaatacggttgtttctaacccatcgggatcatcaccggtcgctgtaattgatagcaatggagaaaaaaccacaattgaaagtgttacgctgaaagatattagcaagtacgtgaaggatgacatagggtttagttatcaggggtatttccgatcgggatgggggactggtaatcatggctctcctgagacgtatgccgcgggctcattggggcgttttggtaatgaaatgagcggctggtttgatctgacattaaatcaacgggtttataatcaggatggtaaaaccgctaatgctatcgttacctatgatggcaatgttggcgaacaatataatgatgcctggtttggtgacagtgataatgaaaatatcatgcagtttagtgatatttacctgactacccgtggttttttaccttttgcgcctgatgcggatttttgggttggtaaacataaattaccacaatatgaaatccagatgctggactggaaaacattaactaccgatgtggccgctggggtaggcattgaaaactgggcgatagggcctggtatgctggatatttcattaagccgtgatgatgtggatgtctattcacgcgactttgaacataccacccaaatgaacacgaattctgtagatgttcgctatcgtaatatcccactatgggagagtggaacgctgtcattgatggccaaatactccagtccaaataaaaccgatcagcaggaagacaatgaaagcgatgatagctattttgagatgaaagatagctggatgttgagttctattcttcgtcagaacatggaacgtgatgcttttaatgaattcacattacaggtcgctaataattctttcgccagtagtttctcaagtttttccgacgcaagtaacacaatggctcatggacgttattactacggcgatcataccaatggcatcgcctggcgattgatttcgcaaggtgagatgtaccttagcgataatattattgttgctaatgccctcgtttactcacatggcgaagatgtttatagctatgaaagtggtgctcatagcgattttgatagtattcgcacagtgatccgtcctgcatggatttggaatacctggaatcagactggggttgaattgggctggtttaaacagaaaaataaaactcaacaaggtataacgctggatgagtcggcatataaaacgaccctgtatcatgctttcaaagttggcacgagtatccttggttcaagacctgaaattcgattctatgggacgtacattaatatcttagataatgaattgtctaattttaactttaatgatgacagtaaagatgaattcatggctggcatacaggctgaagtctggtggtaa

SEQ ID NO: 78898 - DNA, 312 bp, Citrobacter koseri
atgtttgcaaatgaagagaccgtaatggagttattgatacattccgggcaggcacgctctgatgcaatggaggcaatcagccgtgcccgtgaaaaggactggagtgctgtagagcaattgatgaaaagttcggaacaggcctgtcttaaagctcacaagattcaaacagccttaatcggtcaggatgaaggatgcggaaaaatacgggttaatttgattcttgtacatgcacaagatcatttaatgaatgcaatattgtgtcaggacctggcgaaagagattatttcattaaggaaagagttactctcttaa

SEQ ID NO: 78899 - DNA, 1320 bp, Citrobacter koseri
atgggattaatgcgctcatttgaaagcgggatggaacgctttcttgtgccaatagcaataaaattaaactcacaaaaacatgttgccgctgtaagagatggttttgtttatacatttcctattattatggcaagttcactaattattttaataaattttgccatattatcgccagatggctttattgccgggttattgcaccttaacagcttgtttcctaatctggaaaaagctcaggccatctttacaccggtaatgaatggctctgtaaacataatgtctataatgattgcgtttctcgtcgcaagaaatatggctattagttatgaacaagatgatctcttatgcggtttgaccgcgataggcgcattttttattgtttataccccttaccagatgattaatggtcaggcctttttaacaacaaaatttctgggagcgcagggactgtttgttgcagttattgttgcattattgaccagtgaaattttttgtcggatggcaagaaaccccaaaataacgataaccatgccagcggcggttccacctgcggtagcccgatcgtttaaagtgctgttacccatttttttcgtcatgatattcttttcagcgctgaactatttattgtcgctgatttctcctgccgggctgaatgacctgatttatacattgattcaggctccgcttaaacacatggggacgaatatctttgcggtgattatccttggtgccgtcggaaactttctgtgggttcttggcatacatggccctaataccacatcggctatccgcgaaaccgttttttctgaagcgaatctggaaaatctttcctgggctgcgcaacacggttcaacatggggggcgccttatcccatcacctggacgtcgattaatgatgctttcgcgaactgcggtgggtcaggtatgacgttggggctgctattggcaatttttattgcttcacggcgagctgaatatcgggatctggcaaagatgtcgttcattcccggtattttcaatatcaacgagccggtcatgtttggactgccgattgtcctgaatccgattatgatggtgccttttatccttgtccccattgttaactctgtaatcggctatttctttgtatccctgaagattattcctcctgttgcttatgctgttccctggacaacacctgggccattaatcgcatttctggggacgggaggtaactggctagccttacttgttggttttttatgtcttggcgttgcgacattaatatatttaccttttgttattgcttctaacaaagtgaatgttgccctttctgaataa

SEQ ID NO: 78900 - DNA, 312 bp, Citrobacter koseri
atgaaaaagatattattagtctgtgctgcgggtatgtctaccagtatgctggtaaagcggatgattgaacatgcgacaacagtaaatattgaagttgatataaatgcattcgcgattgctgaggccaaaggtaaaataaaaaataatgaggcagatgtcattctgcttgggccacaggttcgtttccagaaatcagaaattgaggcagttgctcagggaaaaattccggtggctgttattgatatgaaagattatggcgcgatgaatggtaaatcggttcttgattttgccatgaaacttcttgaagaataa

SEQ ID NO: 78901 - DNA, 699 bp, Citrobacter koseri
gtggtatttcaggatgtcgccaggatgcttaaagacagtattaacggatatacatataatgtaggagatctattaccgccagaagttgaacttgcacagcgctacagtatttcccggaataccttacggaaagcactacttctcttagaagaagacggaatgatagagcgtaaacatggctcagggacatacgtaaagcagaaaagctttatcgcacatgtaaatcatatgaatagttttagtgagattgctcataacagcggtaaagaagttattagtcagatcatgaagtttgagcttcagacagcatccccactcatctccagggagctaaatataaaacttaatgaccctgtatattatataaagcgattacgtattattgatgataaaccagcgcaattagaagaaacctggctatcggtaagtcgtttcccaaaactcacaatctcacatatgaaaaaatctaaattttcatatatagaaaaagagtgtggcatcaaaatcattggcacctttgagacgttttctccggcatttccaacagcagaaattgccagtattctgcatataagtaccaaagatcccgtactgaaaattcaaacgcaggcggtctgcaaaaaccatcaaccgattgattactcgattctgtactcaaatacatttgaatttcaggtaaaatattttttaccgagataa

SEQ ID NO: 78902 - DNA, 759 bp, Citrobacter koseri
atgacggccattgccaacggcattgcccaccacggcggatttgtgccttacaccgcgaccttcctgatgtttgtggaatacgcccgtaacgcggcgcgaatggcggcgttgatgaaagcccggcagatcatggtttatacccacgactccatcgggctgggtgaagatgggccgacgcaccaggccgtggagcagctggccagcctgcgtctgacgccaaatttcagcacctggcgtccgtgcgatcaggttgaggcggcagtcggctggaagctggcggttgagcgccataccggcccgacggcgctgattctctcaaggcagaatctggcgcaggtggagcgtaccccggagcaggtgaaggagatcgcccgtggtggttatgtgctgaaagacagcggcggtaagccggatgtgatcctgattgccaccgggtctgaaatggaaatcaccctgctggcggcggaaaagctgaccggagaaggccataacgtccgggtggtgtccctgccttcgacggatatttttgatgctcaggatgaggcgtatcgcgaatccgtgctgccgtcgaacgttgccgctcgcgtggcgattgaggcgggcattgccgactactggtacaaatatgtcgggctgaaaggcgcgattgtcgggatgacgggatatggcgaatcggccccggccgaaaaactgttcccttatttcggctttacggtcgagaatatcgtcgaaaaagcgcataaggtgcttaaagcgtaa

SEQ ID NO: 78903 - DNA, 1044 bp, Citrobacter koseri
atgcgcaatcgcgttattttcgttttcctgctcggcctgctgccgacgtcgctgacgtgggcggcgccagcgcagcagactttttctgactggcaggtcacctgtaacaatcagaatttttgcgtggcgcgtaataccggcgaacatcgcgggctggtgatgaccttaagccgcagcgccggggcgcataccgatgcggtacttcgcattgatttgggggggctgacctcgcccggtgcgaaagaggcggagattgcgccgcgtctgctgctggatgaaaaaccgctgccgctaaatgccgggcaatggcgtatcacgccctggcatctgatgacggacgacaccgccaccattgccgcgtttttacagaccattcaggaagcccaggcgattactctgaaaaagggaaaacagacgatttctctggtggggcttaaagctgcgctgttgtttatcgacgcacagcaaaaacgcgttggcagcgaaacggcgtggattgataaagggaatgatccaccgctcagcgtgccgcccgcgccagcgctgaaaggcgtggctatcgtcaacccaacgccgacgccgctctcttatgatgaacgcaacgatctgctggattacggtaactggcggatgaacagtattcactgctcgcttgacccgatgcgccgggaagtgcgcgtcgcggccctgaccgatgacaaagccctgctgatgaccggttgcgaagccggagcctataatacggtcgatctcgcgtggattgtctcacgcaaaaaaccattcgcctcccgcgccgtacggttgcgtttaccctttaactccggggctgaaagcaatgatatggagctgatgaacgcggtttttgacgagaaatcccgggaattaatcacgctggcaaaagggcgtgggttggccgattgcggtatccagacgcgctggcgttttgacggccagcgttttcgtttggtgcgttatgccgaagagccaagctgcgataactggcatgggccagatgcctggcccacgttgtggatcacacgttag

SEQ ID NO: 78904 - DNA, 345 bp, Citrobacter koseri
atggatgcgggttcagggcgcgctttgcagggatgctacctcgcgcccgccccggtagcctggaggaataagcggagggtattgcgaaaagcaacaattttcctgccgggagcggggattgttaagggggcagcgatagcccccttaacgcgttcacgggtgatgaagcgccagagaaatgcgggacataaagtgaacggcataatactctgggatactatgttctctcttcagaataattccgctcactggatggcaatattttttgccctgccatcaaccataaaggtgtcgggaaatgccgacatcagcagattgtttgtgtcgccaaaaggagacatttaa

SEQ ID NO: 78905 - DNA, 1266 bp, Citrobacter koseri
atggctctgagtgatgtgaaggttcgttcggctaagcctgaagcaaaagcctataaactgactgacggtgaaggcatgattttgctggttcaccctaacggttctaaatactggcggttccgctttcgcttcagtggcaagcaacatctgatggcttttggtgtttaccctgaaacatcgttagctgatgcgaggcagaaaagggaagaggctaggaggcttgttgctgctggaattgatcctcgcgagcataaacgtgctgtgaaagaagaacagacgaaagaagctattacctttgagtcggttgccagagcttggcatgcaactaacaagaaatggtcagaggatcacagtcggagggtattgaagagcctggaagacaacctattccccgcgattggcaagcgtagtattgaagagctaaagactcgcgacctgcttgcacccattaaagttgtagaagcaactggccgccttgaaattgcttctcgtctccagcaacgaacaaccggcatcatgcggtatgccgtccaaagtggcttaattgattacaacccagcccaagagatggctggcgcagttgcttccagtaaccgtgcccatcgcccagcacttgagctgaaacgcctacctgaactgctccgccgaattgacggttacacgggacgccctttgacccgcttggctgttgagctcaccttgttaatcttcattcgttccagtgaattgcgctttgcccgctggtctgagatcgatttcgatacggcaatgtggacgataccggctgaacgtgaagctatcgaaggagtgaagcactctcaacgtggttctaaaatgcgcacacctcatctggtgccattgtctcaccagtctctagcaatcctcaaacaagttcacaagcttagtggcgagcgcgattttgttttcattggcgatcataaccctcgtaaaccgatgagcgaaaatacggtgaacaaggcgctgcgcgtgatgggatacgacacgagggttgaggtttgcgggcatggattcaggacgatggcatgtagctcgttgattgagtcagggttgtggtcgaaggatgcggttgaaaggcagatgagccatatggaacgcaattcggtgcgggcggcgtatatccataaagcggaacatctggatgagcgcaagttgatgttgcagtggtgggctgattttctggatgcgaaccgggagaaagggattacgccgtttgactatgcgaagatcaaccggggtcaatggtga

SEQ ID NO: 78906 - DNA, 825 bp, Citrobacter koseri
atgtgtgagacaacgggtctgtcgcaacgccgtgcctgcaggctggctggtctgtcactttcaacctgccgttattcggctcagcgtccggctgctgacgcacaactgtctctacgcatcacagagctggcacttgaacgccgccggtttggttaccggcgcatctggcagttattgcgccgggagggccttcacgtcaaccacaagcgcgtttaccgcatctatcaccttaacggtctgggtgtaaaacgcaggcgccgccgtaagggtctggcgactgaacggcttccgcttcttcgcccggatgcgccgaacctgacatggtcgatggattttgtcatggatgcacttgccagcggccgccggattaagtgcctgacctgtgtggatgatttcacgaaggagtgtctgacgatcaccgccgctttcgggatttcaggtattcaggtcgcgcgtattctggacagcattgcgctgtttcgtggatatcctgagacgataagaaccgatcagggcccggaatttacctgccgcgcgctggatcaatgggcctttgaacatagtgttgagttgcgcttaatccagccgggcaagccaactcagaacggatttattgagagtttcaacggtcgctttcgggatgaatgcctgaatgagcactggttcagcgatgttcttcatgcccggaaaatcattaatgactggcggcaggattataacgagtgtcgacctcattcatcgctgaattaccagacgccatctgaatttgcagcaggctggcgaaacgggaagcatgaagaaaaatcaaccgacattactaactga

SEQ ID NO: 78907 - DNA, 264 bp, Citrobacter koseri
atgaagaagcgattttccgacgaacagatcatcagtattctccgcgaggcagaagccggggtttcggcccgggaactctgccgcaagcatgccatttcagacgccaccttctacacctgccgtaagaagttcggtggcatggaagtccccgaagtgaagcggctcaagtcacttgaagaggagaacgctcgtctcaagaagctactcgctgaagccatgctggataaggaggcgcttcaggtggccctgggccgaaagttttga

SEQ ID NO: 78908 - DNA, 1599 bp, Citrobacter koseri
ttgaaatttgcacaagctctcagcattctctcaaagtcttcaccgtatgcggtcagtaccgagagagagcactatcaagatcacctcgttggattcaagagatacatatacatcacgacagatatagaagcggattttaaaaaagcactcctatctgctaagtccaatcaagtcatattcctatgcggaagtagtggtgatggcaagtctgagatcttgacgcagtacagccaaaagcacaaagtgactcatgacttccatttggatgcgactcacagcttcaatccaagccagacagccattcaagctcttgatcaaagattcacccagttcaagcaaagtcataaaccacttgttgtgggtattaacgttggtatgctcggcaattatgcagaagaaggttccaaagagcatagcgacatcaaaaaggtgctcagagactttctctctcgtaagcgatcagcaattccaaagcagtacgtattcttggattttgaagactatccaaaattcaccttcaatgctgagggctgtgcatcagactttgcagaaaaatttctaaaaagattgacagcacaaacgcttgagaatcctttctatgcgctttatgacaaagagctcaaatctctaggtcatactcgcctgacggcaaactatgcgctgctgagtcgcccttcagttcaggaatctctgatcggcttattactcaaagcccgtcttatcaaagatcagttcctcacggcccgagcgttactggatttcattttccagttgctcgcggcggatggctacttgttcgacaacttgtttgcaggcagtgataacgagctgttatcccgtatacagggttttgacccaagtaatctgcacacgcgcaccgtcgatgagtttgtgcttcagcatgagctgggcattgaagatgagcgtttcaatgcgtttagatctaaaattaacgagcttggtttttacgaggtaaccaaagcaacgtcttttcttcgccttttctatttgcttcggggtgacaaagagctcagcaatgagtttgtaacgcctatccaaaacgagttcacaaacaatctggtagaaacctatgcatctgtctggatgcgacatcgtgatttcgatggttcaggaaagatgcgcaaactgcttggcagtttctacaaagaaacgctgatcgcagcgcttcaccgctattgtaatcgtcatgccccaacactcgacaaagacgagtatttagtttctgagcttaatggctacaaaatggcggtgtctcttgaagttaaggccgatttttcagcaatacaaaacagtacactcgaaaaaataggcaccttcaatgtgtatctgaaagtcgatgaacaatcgcttaagccaatgccaattagcgtcaaactacttgagcttttggtcaagattgggcaggggtatcgccctaacaagcacgacaaaaatgctgttttgttacttgatgaagcattggaacagatgctgacagtagctaagcaaaaagagaccttttttattctcaagggtgataagcgctacaaaatcgtgaaagaagaaagtgactattttgaagtgagtggtatgcactaa

SEQ ID NO: 78909 - DNA, 1356 bp, Citrobacter koseri
atgacgaccgataatttcacattaccgataaaggccggtttgccacaaacggtagctgataagttccaaaataagaatacgttgagcagttacattcccattcgtacgcaaggcaatgattttgactggtcatcagtcgtgggcttagtcctgcgtggattactttgtaaaaaaatagaaaagtacaattaccaagattttactgcggattgcaaaaacaacttacaaaacaaattgggtgaagaggcattttggagtgtacttgaagatatgtatttcactaatgaaaatatattctcggtaacccctgagtttctgttgtttaagagccagaagagtcaagataacaagtacacgcgcgacatgcgaatggcatccttgtttattaacttacttcaaggacagcaaattgaacgatttgaatctaacttgaacttcctcgaagaggagtttcttaaaacgcttttagacaaaacaaagtcagatcgtgacaaggacttccaagtgaccgagtcaccatatttgccctatatagcagaggcgtttaaacgtgacctcgagtttttaactggttatccgaaatacctgttggatgagttcgagcgtttcttggcattctatggctttgcttacacggctcaattaagcctatcgttgtcggattggaaaacaggtgaagccccaaccgcgaaaccgctgtatttcatcatggatcatgagcgcgccagcagtgaacgtatccatatcaaaaagcacggttacaagctttttagcgaatcgtctttcaaactgtttcccttcctctctatgctggaaaatcttcaaccaaacccagaaaaattaaaaaaacctttgtggcaattggcaaaggatattaagagttcagagcggagtgatctagctgggtatattgaaaattacgcaaaaatgtttcgccacaacagaaaacttgaaacagcaatacctgaaaaagcagaaaccgcaattgattggttggaatatgctttgaagcttgctgaagaacagttcagagaccctaaaaccgaccgtccggggactatcaaaaaatatattaaagcggttgaagaaaacatggctactggcttcgtgcaagctcgtggtcgctctggtcgggtgttagtactcactcaagaccacattattttgcttactaacctggtggtgggtaaggaagaaaagcttcgcttccatgagctgataattggcttacagcaaagggggatttttgttgataagcagacagaacaagagcttattaagttctatgagcgaattggcaacgttgaacgcatgagtgatagtggagatgcagtgtatgtgcgcaaaacaatttga

SEQ ID NO: 78910 - DNA, 3213 bp, Citrobacter koseri
atgtgcgcaaaacaatttgaatcgtttctggttgagcagtttttactgcacgcgaaaggaaacatccgcgcaggctatcgctaccagtttaactctcctgaccatgctaatagtcagcgacttttcgatgcgctcttagcgcgaaaaggaggagagagcgaagatcgcaatggtgtagcgctgagctatttagacctagaagactgcaaagtggtgccagtgcttcatagcgaagatgcgtgtgaaacgggctttaccgaaaactacatctctaatttgcgtgacgaaatagcaagccaggaaggtccgttgaagggctgtgcactggtggtgattcacaatagtcgcctagatactctcatcaactcggcggaagatcttggccagtctggccaggtgtggagtccagggaacatcaaattcgctcttagtggctttattgagcaatctgacaaatctcgagacgtttcgctttgccttttggacgaccaatttgacgcgattttggaagatggtgcgaccatgttcggtttcgagtctttatacaaggcagttgaggatggcgagctgtgtttcagcgagctaggcatgtttgaggatccttttgttgctgagttatcgggcaataaaaaacagatcaaacagcgcctagaagaaaaccgtacgctttaccaagagttgtcgtttgaagtagagcattttggtcagcaactcgaagaaaggctgaaaggctttagtagtaggtttatcaaagaacatttttctgacgatggttggaaagatgtggagtttgaaacttatcgagaagagatcaaaaggaataagattcagaaccttaagcatgaaggtgaagacgagaccaataatgcgcaagtgattggtcgctacctaaaagaaactaaagcaggattgcgtgaccgtcacttgattattgcactggaagaagggcaaagtgagtttgaacttaaactgagcttttctggcatcagcgatttaagaaaagagcagtttaaagtctcgccagcgaatgcacttggcaaacaagaagtcatcagcacgcgcctaactagtaaaggggcaaacgctactctagcagctagttatgccaatgagcctttgtttttcacgctagcattgaagcgtgacaatacctctgaacaccataacttccgttgcttggttgtcagaaaaggcgagtttcacctcgaggcattcaaaaacattttcgccgttgagccttcaaaaaaacgccttaccttgaaaacggtagacaacagcttggttattaacccggcgctaactgcaaaccgaagcctagatgatgtcggtgaagtggttgaccgcgcagaatttggtgttgtcgattttgaatctttggccaacgagtcagaagaaatcagctttgtggtgaaatcaggtgataattccctgacattttatattgagggtgaacaggtagaaagcagcctgtccttcccattgctgcttaaccaatctcgcttccacaaattgtttgacgatcacgtgtttggcgagctttatccgagtaaagacgttgtcgcgatcgatcatagtgaatttcgcgtcatggagccgcgcattagcctacttcgttgggaagagtgtttcgttcagcaaaagcaagtctacctagcggaatccaacagcatggcgttggaacagttaaggtctattgatgacggtcttcactcagcataccaagcactgtttgactatctagcgagccgacgaacaactatttcgttggtttcgtgggggcctatatttacggcactcgtgaaagcgaccgtggatgcattccttgattatttcaacgcgatcccaactggtggcatgcttaccaaagagcaaaagcttgtgatgcaaatcggtttggttcgcgagaatggtgaagaatattactcgccattccacccaatggtgttggcttactacttaaatctttgtaatgaaatgcaaaaagatgacagctttgctgacttgccaactgtcacgttcaatcgcttggggccaagtggactgcttccgtatgtctatcatcccaagcatgggtttgcctacaaccagcaagtaacagaaaacgggttttgggttaaaagtgtccctcaccagaaaagttgtctgaagttcgttcgcaagctggttaaagaaaagatcaacgagttccaaaaagcgtttcgccacttgtttaccggctcagagaagagtgtgttggtgaatgccgtgaatcaagatcgtgcagaagagttattcctcggtttggttgactatgtaaaagataacctcgataaagcggcatcaattcatgtcaacctctacgatgatgagctggttttcaatgcatttgaccagtttgcagaaacgttcaattacgaagaattaaagtcttggttggaattggaccgagagaaagtgcgagaaaatgccgacaccattatcgatattctgcgaacccggctaacttacagcaagtttaccaatgctcaaagtgaacgcgaagggcaagcctactcgcacctgtcttttttcagaaacaacgacaacgtgaagttaacgaccttgagcgttgacgacatgcctagtggtattgcgtgtgatggtctgctgacgggcgacgcttctaaaagtgatgaaggctcatacttcactgcatttggtttgcaaaacgttcaatatagtaaccaaccacacttggaaatagcgaagtatgttggctcgttaatagaaccagcatttaagcccagcacacaatacacgggggccaatgctcctgctcttgcggtcagtgaagactttaaatctctgctagcgcgctcttatgacagctcgatttggaccaccatcatcgacccgaaagtgacgctagacttcttccacgccaatcaatgtatcgtgcttattcattattctgatcagtacaccagctcagccagctacgatgcgataaccgtgacggctcctctgtttggaggttcggttttaaatcctctggcttatcgaccacaacgtctaatggaacgagcgactctctttttttcaaagctgtctgccccaccaacatatactccgccggcacatggcagatctgtgcgatgtccttttcgttcattaatacttgaagcgggttgcaccagtgaaggcagcaaagacataggaaggtcaaccttcaacacgccatcctgcatgttatag

SEQ ID NO: 78911 - DNA, 582 bp, Citrobacter koseri
  misc_feature (10)..(19): n is a, c, g, or t
atgatatacnnnnnnnnnnatatactgctggtgggctttaaagagggtaacctttatttgcttcctgtcgaagtgaaaacaggctccacgccagactacaaaaaagcagtacagcaagcgaatgagcttcgccgctatctaacagagcttttgagcgacgagacactggcgtcgaagctataccgaggcttgtttatccgccaagtgttgatgcaaatcgacaaataccgtctgtacaacgtattcagcaatgactatttcgaagccctgctggcagagaaagaagagtggctacgcggtaactacgcgattgcggagcttgagagctatccagcaggtctagtggttagccaccttgaaagcggaagctgtttcgaacctggctataacatgcaggatggcgtgttgaaggttgaccttcctatgtctttgctgccttcactggtgcaacccgcttcaagtattaatgaacgaaaaggacatcgcacagatctgccatgtgccggcggagtatatgttggtggggcagacagctttgaaaaaaagagagtcgctcgttccattagacgttgtggtcgataa

SEQ ID NO: 78912 - DNA, 252 bp, Citrobacter koseri
  misc_feature (221)..(230): n is a, c, g, or t
atgttgacttgcaacgacaccattcgcaaagagcgaactggcattatcggcgcctataaatttgcgacgtgtctggtgcaccaatctgatatcacctgggttccgctctcagttggtgaaatgatccgcgtgtcgggtaacatcggcctgaaaatgaccgacagtgacttctcacgcaatgtgcagagatataaaaaaggcgcgatttcagatgatatacnnnnnnnnnnatatactgctggtgggctttaa

SEQ ID NO: 78913 - DNA, 1887 bp, Citrobacter koseri
atgatcactgttttcaggcagactttgtgctgtctgttattgctatggctgcccgtctcgtgggcggcagaaagcggctggctgcgctcgccggataacgaccatgccagcgtccgcctgcgcgcggacacgtccccggaaggcgaaacccggctactgttggatgtaaaactggaaaacggctggaaaacctactggcgttcgccgggggaagggggcgtggcgcccgccattgcctggaaagaaaatatacctgcggttgactggttctggccgacgccgtcgcgctttgacgtcgccggtatgaccactcagggttatcaccaccgcgtgaccttcccgatggcggttcgcggtccgtcacccgcgatgctcagcggcgtgctgaccttgtctacttgcagcaatgtctgcctgttgaccgattacccctttaccctcaaaccttcggcgcatgacccggcgttcgcgcatgactatgcccaggcgatggggcagatcccgctctcccgggggctgacgcagacgctcagcgtgggcgctcgtccaggagagctggtggttgaagccacgcgtgccggaggctggtcatcgccagcattgtttctcgacgccgttgataacgctgattttggcaagccgcaactgcgtgttgagggcgaaaaactgctggtgacggttcctgtcagcgatggctggggagaaggggcgcccgatttgcgtggtcaaacggtcacgctggtactggcgaatgacggcgtggctcaggaaagtaccctggcgatcggcagtacgacggcaaaaatggccgatagcgccgaactgccgctctggcaggtgatgttgatggcgctggcgggtgggttaattctcaacctgatgccctgcgtgctgcccgtgctggggatgaagctcggctcgattctgctcgtcgaagagaaaagtcgtcagcggatacggcggcagtttctggcgtcggttgccgggattattgcctcttttatggcgctggcgatgctaatgaccgttctgcggctgacccatcaggcgctcgggtggggcattcagttccagaacccgtggtttatcgggtttatggtgctggtgatgttgatcttcagcgccagcctgttcgggctgtttgaattccgtctgccttccgcgatgacgacccgacttgccacccacggcggcaacgggatggccggtcatttctggcagggcgcgtttgccacgctgctggcgacgccgtgcagcgcgccgtttctcgggacggccgttgcggtggcgttgacggcctccttcccggtgttatgggggctgtttctggcgctcggggtggggatgagcctgccgtggctgtttgtcgcgctacgccctggtctggcgctgcgcctgccgcgtcccggacgctggatgaacggattgcggcgcgtactgggcgttatgatgctcggttcggcaatctggctggcgacgctcctgctgccgcatctgggatacgcgacaagcagcccggcgaaagagcgcgtcgtctggcagccgttgagcgaacaggcgatccaggacgcgcttgcgcagcacaaacgcgtattcattgacgttaccgctgagtggtgcattacctgcaaggtcaataagtacaacgtgttacagcgagaagatatacaggatgcgctgcaacagccggatgttgtcgcattgcgcggcgactggacgctgcctgcggatgacatcaccaactttttgaaaaaacgcggccaggtggctgtgccgtttaaccagatttatggccccggtttaccgcagggtcagtcattgcccacgctgctgacgcgcgatgcggtgctgcaaacgttgcgcgatgcgaaaggagttacgccatga

SEQ ID NO: 78914 - DNA, 978 bp, Citrobacter koseri
atgagcttggccgatgctcaaattcggtcgctggtgattgattatacaaacggattcttgccgaatcaccttgagccggagtttattgaacgaacaaatcctaaatccaatattctttgtaatgagccatttggtatgtcgccatttagagctcaaaagcaagattttggcgggatttttctcgaagagaagcctcatatggtggctggaagggtagcctctgtttttaacaaggtatattcgacaattggcgagcgccagatcgcagtgctcaatgaagtgattgaatctggtgtccaacgatatggtagtgcttatagcttacagaatatgttggatgacctaaacgaggaagaaactgcaggaccagcacttgcaagcaagctggctcctcttgttaagtctaacttgttttcatctgacagtgataaaagttggaatgatgtgtttgagagtgaacatcaccgctcaacaattatgcaacttgcgtcgcttaaccacgatatttcaatgctttgtactgagtttttactttgggatctatactcctacgcatgtagttacggtagtaaggaaaaaccgattcctattgtattggatgaagtgcagaacctcgatcatcgcctggagagcccattgggcaaaatgttaacggaaggacgcaagtttggggtatccctaattctggcgactcaaacgctaagtatgctgcgtaaagatgagcaagatcgtttattccaggcgtgtcacaagctgatttttgcaccagcaaaaacagagacaaagacgtacgcgaaaattcttgaactgagcatgccaggtacaaagcaggctgagtgggaaaagcaactaggagacctatccaaaggacagtgtttatcagttggctaccatttggataacggtcagttgaagatgagtgttaagaaagtgaaggtttcctccatgttatcccgcctgaacaattctaagggttga

SEQ ID NO: 78915 - DNA, 360 bp, Citrobacter koseri
atgctcccgaatcgaatggtgcttagtcgtcagactgaagagcagcttaaaaaattgaaaggatatacagggattacgcccaatgtcgctgctcgactggcatttttccgttcggtagagagcgagttccgttattcgcctgagcgggataccaagaagctggatggctcgctggtactggataaaattacgtggctgggggagacattacagactacagaattggtgttgaagatgctttatccacagatgacgcagaaggatatgattaaagcctgggcagcacatgttgaggatgggattgcggggttaagaaactatcgctcggtaaaagattttgtatatggagtatacaaataa

SEQ ID NO: 78916 - DNA, 2001 bp, Citrobacter koseri
gtgctcattaaacaactagtgttacataattttcgggtatttaacggtactcataccattgatctggcccccagaaagcgcccacacgatttgaatccacgacctattgtactgtttggtggtttaaacggtgcagggaaaacgtcgatcctatcagcgatccgtctagcactatatggtcggctggcgtttggccttgccactcaacaacaggaatatgtcgagcaacttagttcgttaattcacaacggtgcgtacgatattgaacaacctgaggaagccgctgtcgaattgacctttacctataataagggcggccatgaagcggaatttaccgttacgcgaacctggaaaaaaggtaagaaagatcgcctatctctgcaacaggatggacagccactcagtgagctggattacgatcagtgccaggggtttcttaatgaattaatcccgcatggtattgccgatctgttcttttttgatggcgagaaaattgcggagctggcggaagatgaatccggcaatattttgcgtaccgcagtgcgccgtttattaggtctggatctgatatccaaactgcgtaatgacttaatgatttttgttaagcgccagcaatccagccagttggtgggttctcaacaacagcagattgcagagcttgaaaaacaaagtaaagaattggcctgccagactgaagagatactggaaagagccgattttgccaaatcgcggattgagtttatttctaaagatattatccgttatgaaggtttgctaaatgctcaggggggggcttttgcccagacaaaagcgcaggaaaagcagaaagttgatgcgttattgaaagataaggaacgtctggaaaaagcactgcgtcaggaatgtgatgggccgctaccttatgcgcttgcgcccactattttgtctcgtttactgcaacaaattactgatgaaacgcagattaaacaggcaaaaagctttgaaaaagagctgagccagtttttaacgcaactcagaaatgatattgcatttcgttctgcggggactggcaaaatagcagctgaagcgattaccgataatctaaaagagtatatgacaactaagcctaaaggcgatttgctgtttgatatctctgaacgtgaagccggtatgctccaacagtcgattgaacaagacagcaaaaaggcatggcaacgcttcgatctttaccgtacccagttatcagagactgaacagcagttagagcaggctgctgcaaatattgcccgcgccccggaagacgaccagttaatggagctctttgagaagctacgcgaactggataagcaacgtgaaaaacagcggcaaaaatatctttcattgctggaagatgctaaacgaattaagcaacagcaactggattgcgttcgtcaggtacaaaaaatgcatgatgttgcccgaagtcagcatggcttgagtagcgcctttaaaaacgctcaagaaacgattaatttactcgatcgatacagtgatgtattaacgcaggcaagagtgaaaacactgtcagcgaatttcgaaatagcctatcgcaaactggcccgtaaagaagatttacaacttagtgcgcacattaacccagagacgtttgacgtagagctgattgatgaacaaggatccgtcataaaacgtaagctgctttctgccggtgaaaagcaaatttatgcaattgctattcttgaggctttagcaaaaacctcaggccgtgatttaccggtgattatcgatacgccattaggacgtctggattctcagcatcgggataaactgattaaccactatttcccgtttgccagccatcaggtagtgctgctatctactgatacggaagtggatgagcgttattttgttgatcaattgcgtgatgatatctctcatgcttatgagattgtgtttaatgcacataccaaatcgtctgcactgaaacctggctatttctgggaattaactaaggaggcgatctga

SEQ ID NO: 78917 - DNA, 1086 bp, Citrobacter koseri
atggctagtgttgatgcagattactgctactcttttccagctatacgtggcattcaggctggtcgtcctttctacattgccacgtgcccgatgcgcatcattcccaagatattcagctttgatgaaaatgacgtaccacctgagctacgcgcgcagcgcacgctgaataaatcacgcatccccgaaatggtgcgttatctgctggaaaatccaaaagattatgtgttttcagcactgacagcgtctattgccgttgacgttcagtttgatgagttccctaactccaacaacctggggacgttatgcgtgccaatggatgcacaaattctaatcaacgacggtcagcatcgccgtaaagcgattgaagacgctttggatgctcgcccggagctgggccaggataatattccggtgttgttctttgttgatgaaggcttaaaacgtagccagcagatgttcgccgatctgaataaatacgctattcgccccagcccgtcgctggcgtctctatacgatcatcgcgatgccagttcaaatctggcacgttacctggcgatgtccatagagccctttgttggaatgacagaactggaaaaatctggcatcagtcagcggtcaaataagttatttacgttgagcagcatcaagcaggctacccgcgcattgttgggtaaagatcccaaagagaacaactttgaggaatgcacccaaattgctacccaatattggcaagctatttttagcgtgatgccggattggcagctagcggctaaaaaagaggtttcaccggttcagttacgacaagattatgttcacgctcatggcattggattgcaggcacttgggcaactgggatataccctgctaacggattatcctgagcaatggccggagaaaatagctgcacttaaaacttttaactggcgcagaaacaacccggatctcgtcaaacgtgcgatgcagcacggcaaactgagtaaaaccagtaccgcgatccagctcacctgtaatgcgctaaaaaccgcgctctcaatccccctcactcctgaagaacaggagcttgaagctcaaatggttgtctcatga

SEQ ID NO: 78918 - DNA, 2190 bp, Citrobacter koseri
atgtcctggcttaattccctcttagtggcgcttacgtctgtggaaccccattgggttcctttcaccgttatcggcctcgttacctttgcctttgtctgctttattttcttttatttgctgagatccatcagaattatttatggactaaaaaaatacacgcgatcaattaccagcattgaaaaaagtgcgccagaggtccagcttgagcaccttaagagcctgtttcagcggcctgaactcaggcatgcgtggaatgagttcgaagaatcgttgcactcacaatatgaactggaggatggcgaagagaaaatcgtccgtattcgggctactgcaccgagcgctagctttttctcggagcaacaactggtcgatattccgctgaacaccgaatttttcaaacacctgcccggtattctgaccggtatggggattatcggcaccttctacggtctgatgattggtctcaaccacttcgaccccagcacaccggagcaggtctccagcagcgtcaataatctgctgcgcgatgtgctgtacgcctttctgggttctgcatttgctattttcgcctccattctggtcacctggcttgaaaaattatccatcgctaagtgctacaaatatctggaaaaattcaccgcatctctcgactcgctttatgacagcggcgttggcgaggagtaccttgcctcactggtgaaatcaagtaatgaaagcgcaacccaggcacgccatctgaaagagagtctggtcactgatttacgcgatatgttgctgcatctggccgagagccagaaagtcgaaaatgaacgccttgctaatacgttaagcgcaacttaccgcgagtcaggttcacagtttgccgaccaggtcagcggcgcgattgaaaacagcctgaagtcgccattggataaaattgccggtgcggttcagaccgccagcggtgatcaaagcggcatggtacaaaacatgctgcaggatgtgctgaccgcgtttatggcgaaactcgacaccacctttggtcagcagtttacaaacctcaacgaaatgatgggacaaaccgttggcgccattcaaacaatgcaaaccggtttcgccacgttattacaagatatgcgtcaggtgagcgatgatacccgccagggcagcgcgcagctcatcgagcaactgttatcagagatgaaatctggccagcaagctatgcaggctggcatgaatgacatgctcactagccttcaggcctcggtggctaaaattggcgcagaaggtgaaggtgccggagagcgaatggctcgccaactggaaaaaatgttcgctgatagcgaggcgcgagaaaaagcccaagcagaacatatgaccgcctttattgaagccattcagaattcagtgcagcagggacaaagcgccacaatggaaaaaatggcagcctctgtcgagttgcttggtgaacaactgggtagcctgtttgggcagattgataagggccagcaacagatttcagcgactcagcaagcgaatcagcagtcccttcacgaacagacacagcgtgtgatgagtgaggtagacgatcagattaaacagctgatcgacactgttgccagccagcatcagggaacgacagaaacacttcgcttgctcgcagaacaaaccaaccgacagattcaggatatgcaaaacggcgcggacaaaatgcgtatggctgccgaacgctttgagcatgcaggtgatcgggtgtcagaagcaaaccaccttaccgctgacgtgctgaataaagcgcaatcggcaggttcatcactctcccttgccaccagcgaactcacttccgttgtggctgattatcgtaacaatcgggaagctgttagcaaatccattgcaatgctggagctgctcgccgcaaatacgcagtctgaacaaaccacgcgcaaccaattcatcgccgacctcaagcagcacggtgaacgtctgcagagctataaccgggaagcacaggcctttatggaaaatgtcagtgacgtgctcgggaaagggtttgaagacttctccgaaggtgtttcacgcagcctggataaaacgctgggcaaactggatgtcgaaatggcgaaagcctctactctgctcgcgggttctgtcgaacagatcggagaaagcgtcagcgagcttgatgatgtcctgtcacgcgttcgtgcctaa

SEQ ID NO: 78919 - DNA, 741 bp, Citrobacter koseri
atgtttggaaatgcatttggcgttaaaaaacgccgcagcgatgaagcggagaaaccattctggatctcctatgccgatttgatgactgccatgatggtgttatttctggtcgttatggttgcgtcgctgagttccgttacacagcgtattcaacgtgcggagcaaggtgaaaaaacacgggggcaggatatttccagattgtgtgagcgcctggaactgaatgcccgcaatgtgaacaaaaccatcgtggtggattgccacgataaccgtatcagctttggcgaagccgggcgtttcgatcacaaccaatttttcctgaacgctgaagggcaaaaagcattgcaggatgttgttcctcttgtgctggaagcgtccaacagtgaagaaggtaaaaagtggtttaagcaaattgtcattgaagggtttaccgacaccgacggttcgtacttatacaacctacatctctccctgcaacgttctgaatgggtaatgtgtagtctgctcgatagccgcagccctctgcaaaaaaatatctctgcagaacagcagctccaaatccgtaaacttttcctcgcgggtggcgtctccttcaataatgccaaggaaagtaaggaggccagccgccgcgtcgaattacgtatgcagttcttcggacttaaagataaacgtgatggggccgatgaagtggatttcccccccgtcgtcaataaagaagtttgccagttggtgatgccgcaatga

SEQ ID NO: 78920 - DNA, 1683 bp, Citrobacter koseri
atgacgcccgccctgaactctctttctcaacgcattgcagcgaggctctcttccagccagcgggatgaccattatctgcataatgatttccacgcgctggcctccgctgctctcgacatggaaaagcggtttgataaggcagaaaaaatccctttaccgccacaaaaaatgcggctggcagctctgcgtcgccttcgccttgcacaagaactctcggagcgagagtggcggatggtgttttatggccttgtcgataatgatccgtcatctcctgaccagccaatcctactggaggatgatgcgtttttccctgaagtagacaatgccatcaaaaagcgacttgaaactaatgcgttgaaacgcaaggactgggccgcactctgttctagctattttgcttaccagaacccatcacctgagacaaacccacactggtgcgtactgcgtgggcatatttctcagggttacttggtggtgaaagcggctatacgacgtgaaaaaccgtggatgaaaaccattgagttttatcacgacatttttaccccgcaagcgggaggcgtgatctctagacaattacttgcaggcgagagtaattcactctcgtcgctagaaaaaatcgcgcaaatacctaatagcagctggttgtggaaacgcattttcacagtgcttttagcgcaactggacacactcgacgatccccagtttctggacaaaattagctggttgttaggtctggctgcgcagtgggagcatttccgtgatgacatcatgactgcgaccttgactcgctattaccattctggctatcgcgatcaggcacattcagctctgaagctggccgcgctggaatactgggataacccgcaactgaaaagccagcagaataaatggcatcagtatgcctccgagccggttgctgcgatggtccggggatggctggcaaaacaagatctgatgcatttctttgaattgctgcgcggtaatggcgatgttgatcaggcacgattgcactactggctgcgtttcgccaaccagatgggatttactcgtattgtcatggggactgatgcctggcaagaccgtggtagcgactttgtgaaattccgcgaagagaataaggggcgattgagctatttacgaggcggacgtagctttgataacgccatgattatgcagatcaacgattatctgttcgttgagttttccgggacaggcaatgcgatgtatgcctatcgaataggtcacgcgccatttaaccctgaatcacgcacgcttgatatcaacattcatctaaaagatcaggggcgctgcgcgctcaggctaccccatgcacctcgtgctgaggggtataacaaagtccggataaccggctggatgttgaaatacgacgatgagctacgcaagttgggcattcggtggatggcagaagaacccgtcaggtttgtcgataagaaagtgacctcccccgcatctctgtctgccatcaaaatcatcaacccgttgcgtgatatggctatacagcacttggttgaaggtagttcatgtatcgtcagcgataatcgacaaaaaggtggcgtgctgtccgtacagctcaatacacctgacgacaccatagaaagagagttgttacgactaggctttgcgcccgtggctaaagaaccgcatcgttactggatcaaataa

SEQ ID NO: 78921 - DNA, 3243 bp, Citrobacter koseri
atgctgaaacgtctgttaagtaaactgacgggaaaccgtcagcagatagaataccacctaaagaatcagtaccaggttgaggaaaacggacttagctttccgctatcgctggttgatgatgcgcagctttgggcactggtatcctggcttgaacaactggctgaagaagactatctgatatcacttacagaccggtggttgttgagttgggacgcactatatcgcctgctggaggatgaggaacatgccagcagcctgcctcttatcggtgtacctgacgtactgcctttacgcgcaagcctgagttcacgtggcgcattaagtgaccatgattttcgcgtctggattgctgaatgggctacgctttcagcccgcaagccgatccgtttcagtcgtaccggtgccattttaacccatgaaaatcagcaatacctgttatcgcgtgaaaactgggcactcttacaggcaacagaacaactcagtacacaacaaaatcagactcctggtgaaaccactaaccagttgggatgggccgctatccgcaaatgtgcgaagcaagcagccgcaaaatttgatgattatttagaaaaaacgcatgtcgtcaaaccaacttcattgtcattacgtttgcgtaaagcaacggttgctgatactgctgttatcgaaattgagccccatttcgaggaccagcctgctaactggctaggcagttttgacaaaaactcgcaggttcacgatagctatcgtattcccggcgagaatggcgaactcagccatgtcattatccctcccgaagtgaaagaggtcttaaactcaatacactctatcccaggccgtcgagtggccggaagtgaagcgctttcctttgttcgcaatccctatacatttttgggcgaagatgccgccagtgttattgcccctgaagaacatgaacaggcactgtttgatgccaggattttctttcatcatttcaggttgatacctcaactgaatgcggaaaataagatcgcagaagttacgctggtacttgagcctgtttcacctgttccccagccagaaatcacttttgggttctcagccccctgggagctggataaattcatacagcaactcggtattagcgtcgctgcacagatgcctgccggttcatggcaaggttacgagctggaattaagtcagttcactgaacagcagtggcacgattgccaggcacttctaactcgctggcagcaagaaatagaaggaaaagaatttagcgatgtgctggatatcgcgaagtatggcgatcgagtgattggcattggtgaatttgaaaaaatctcttctccctggctgaccaaagcgcagagtgaaaactggcttcctgacgacatcgatttctccgcgttttcagtcgaaacactgtctggctggcaacctgaaaatcttcaccatttcgatgaactgcaggagagaattactcaggcagaagctgtaggtgaaacgcatatcaccgcaccatggaatgacaaccaattaccgttggatgctgctaaaaccttcagtaagaactgggaaaaacagcaaagcactgcaaatcaatctcaaggcaacgttgcagataaaacggcccgagccgtactcaaaattgagcagaatattgaagaggcggcctacatcaaacagcgccgcaattcactcctcaatgctcgtcatgccgagcctgaaattcctctgagccttaaagagcatatccgactcaaagaccatcaacgtgaaggtgtggcttggctccagcaactcttccttcgttcacctgaggaaactgcaggttgcctgctggcggatgatatggggctgggaaaaacgctgcaaattctgagcttcctggtatggttcattgaaaaattcccgcaagaaccgccaagtctcattgttgctcctgtctctcttttagataactgggaacgtgaactggacaatttcttctataccgcaggaataccggtattgaaattgtatggcgagaccattaaagcggtgaaatatcccaaacaggctatccctgcccatctgcaatctcaggggatcaaaaacctgcttaaacctggctggcaaggtgaggcgaaaatcatcctgacgacctacgaaacgcttcgcgaccaggagttttctttggcacgccagccgtggtccattatggtgtgcgacgaggcacaaaaaataaaaaacccagctgcgttaatcacacatgcggccaacgcggtacaagctaggtttaaagtggcatgcacaggaacgccagtcgaaaacacacttgtcgacctgtggagcttatttgattttgcccagccaggattattaggggctctaaatgaatttggtaaacactatgttcgccccatcgagaacgaagatggccgcgatccggaacggctggaaagcctgcgggcgctgatagagcctcagactttacgccgaaccaaagaagaggttgcgcgtgatttacctcagaaaattgaagtggaaagctgtaagcaattgacgttgtcttgcgtgcaaaaacaactctacctttcgtctgttgcaaattggcaacaacagcaagcactgagtgaagggatgcagcagtccggaaccggtatgttaggtttgttacaccgactgaaactcatctgtgcacaccctgcagtagttaatccagagccacgttttcgtgataactcacccaagcttaactggctgctgaaaatactcgcagaaataaaacatatctcgaaagataaggtcattatttttacggagcttcgagatttacagcgcgagcttcaacatgcgatccaccaaaagtttggtttccgccctgtcattatcaatggtgataccagtactaaaagtcaaagccaaaacagccgccagcgcctgattgatgattttcaggcgcagcctgggtttggggtgattattctctctacggttgctgtcgggttcggcgttaacgtccagaaagccaatcatgttattcatttcactcgttgctggaatccagccaaagaagatcaggcaacggaccgggcgtaccgaattgggcaaactaaagacgtgtatgtctattatccgacggtaagggacactgaaatcactacttttgaagaaactctggatgaccttctgcagcgtcgacgtgcattggccagggatatgctgtgtgcaactcctgatttgagtggtgctgattttgaggcaatattgaaaggtgcttag

SEQ ID NO: 78922 - DNA, 459 bp, Citrobacter koseri
atgctcctgatgccatgctattgggctctgaataccagaggtgagcaaacaggcagcagaagagcggccagccagcctgaagaaagctggacatgcccgtcctgcggatgtcgtttggtactgcattctgatgaccctggcattcgcgcctggtttgaacacgaccaacggtcagtggggaatgatgtactgaggcagtgcaagtatcgggacgactttgccacattgccgggagactggcacacaaggtttatattcacattctttcctctggatgcgtctgccccagtcggggcctggtactgcgtctggtgcgggcgtcactatgcgggtgagaaacactgcgcggcctgcaacacaggtatctacagcattgaggagaccgcatggcgggagagttatatttgtcctgttgacaagcctgcgcaaccctcccccgaagatcagggaggcaactga

SEQ ID NO: 78923 - DNA, 339 bp, Citrobacter koseri
atgtacccaaaatcatttcttgccctcaataacgctagtcgcctgaccggtgccagaaccgcactacgctctcctgacgaacaatacacctgccaacactgcggcagtattctggtgctgcacgttgacgctgagcgcccgtggtttgcgcataccgatgctgcactcactgagcgaggcacgcaaggttgcccttacgttcaccctgcggctgatgaaattcagttgatacgcaagctacgtcgttacgtacccaatgcgaagccggtggtcagtcatgcagatcaatgcaccagtgaatatcacgcttacggagatgaggaggtcatatgctcctga

SEQ ID NO: 78924 - DNA, 207 bp, Citrobacter koseri
atgaccaccccaaccagtattctcagcgataagttagtcgatatggcctttatcactcagcttaccggcttaaccgacaaatggttctacaagcttattcaggatgggatattccctaagcctatcaaactcggacgaagctcccgctggctacaaagcgaagtggaagcctggttacagcaacgcattgcagagtcacggggctga

SEQ ID NO: 78925 - DNA, 615 bp, Citrobacter koseri
atggcttatcacgacattaccgacatcaactttaatcatattcagcaccgtcccctgcaacgtaaattgcatcatcaccagaaccagttatttgagcgttactcaaagctgctgatgttacgggtggacttctcctaccgactgaatagtgactcacatcgtgagggagacattcacgccgcagtagcggacatgacgctgctgctacagcaaagccaggacatcaaagggctggtgggttacgcatgggttctggagcataccgaacagcatagttatcacattcacgctgcgttttacctgaatggccagaagcatcgtcaggcgtggacggtctttgaagcgctaaggaatacctggaagtatgtaacccgggatgaggggcatgcatatcgctgcgaacccgaggagcattatcgcgtgaggggtgaacgggtgacggcccatgacgataccagggggcgcaagggaatgcagtacattctgagctacctcagtaaacaggcccagaaaaaccggggggttatttaccagttgagtgagattcctgctgcaccagccgctggcagacggcgaaacgccagccaggctcccgttcaaaaattacggcagtga

SEQ ID NO: 78926 - DNA, 705 bp, Citrobacter koseri
atgtatgtcaatttacataacttgtatgttttcaaaatgaacagttactactcctctcgccaggcgaaaaacattgaaaaatcctttaaggaattattccggaatctctctgccggaggcgcggtcagagccctgaaattctcgtttgtgatcacccaatccaacagggggagcacgtattcagaagacagcgccagagagcatgccaggaagactcatctggcacttaagcattttctgaatcacatgcgggtgcttaaatacgggaagtgcgtcgctggatattcatggctgatatgtaacgaaaaacgggtaaatcgcccctacatttacgcactgttttacattcctggggatgccagtgccagcgatatcgcgaaatgtttgagtgagttatgggtccgttcggttgcaaaggcggctcgtgagggaggctggagtgattatccggtagtcattaattacaataccgagctgggcaatattcagtactgcaggggaaagcatccccgtctggcctgttgtgaaaaggtacaggaaggctcattcatcaatgaggatttatgtggcggaatatctgcctttcggtacaacaccgataatcccgacgagtttcttctctatctggggacactccagcgcagagtgaggtcgatccccggagtcagagcatggggaggttcagcgctgaaacgtaaacattaa

SEQ ID NO: 78927 - DNA, 456 bp, Citrobacter koseri
atgaaaaaaattatcgtactttccgcattactgatgtcatcagccgctttcggcttcggcagtactgagaagtggacttcaggctggggacaaggggtatcagaatttatcgttctgggtaaggggcagtcctcgctttatctgtcctgtgaggataccgcttcccgcgctgccaccgtgatattcaccgatattcatggcaatcaggttagcagcgatacggaaaaacggctggaagtgaaaatcgacaataacgaaaaagtggagatgggagacagtgaatcacatgttggttcagacaattttggctttggctggaaccaactgcgtaaaggcaaaaaagtgattgtttcaggggatggtgtgaaggctgctgtctttacgttgcagggtgcctctggagtcattcctgaattcgggacggatggctgcatttctggatttgctgctccataa

SEQ ID NO: 78928 - DNA, 465 bp, Citrobacter koseri
atgaataacaccaccagtctgcacacgcccgtcagtactgacaatacggttcccattaccgctactttgctgcctgatgcacagcgacttcatttctggccgcagcactttggcggtatcccgcagtggatactgctggagccccgtatcttcggctggatggaccggctttgtgaaaattacagcggcggcatctggcgtttttacacactcagcaatggtggggcttttatggcccccgagccggatgatgagaacgatgaacagtggacactgttcaataccatgaatggcaaccgcggcgcaatgagctccatggcggccggtatcgcggcctgtctgctggaatacagctatcatgcctgccgaacggaatgtgatgccatgacggcccactattaccggttgcgtggctacgcactaagccaccccgaatgcagcgccatcatgcacctcatcgactga

SEQ ID NO: 78929 - DNA, 480 bp, Citrobacter koseri
atgaaacagcaactacagctgtttgcctgtgaattacctgcctctgcacagcgaaccatcctggaagcgctgactctactggagcaacagttacgtgaacccggcgcggtctttacttccagtcacaccgtccgcgactggctacgactgcagcttgccccaatggatcgcgaggcattcacagtcctgtggctggacaatcagcaccggcttattgccgatgacatgctgttcctcggaaccatcaacagcataagtgtgcatccacgcgaagtggtgaaggcaggtctgaaacataacgctgcagcggccttactcgcacataatcacccctctgggcattcagaacccagcgatgctgacagacgaatcacagaacgtcttaaacaggcattagatctggtagatatacggctgctggaccaccttgtggttggcggaatggatatcgtctcatttgccgaacggggctggctgtaa

SEQ ID NO: 78930 - DNA, 354 bp, Citrobacter koseri
atgaaaaaagataccggcaataaagtcacggatacgctgcaatgggggctgaaatgcgccatcacgccgcatttcagcgcgcgtcttgtgcaggaaggaaaccgtctgcattatctgtctgaccggaccagtatcaccggccagttcagcgaggcagatttacgtcatctggaccaggcttttccgctgttgttaaagcaattggagttgatgctgaccagcggtgaacttaatccccgtcaccagcatgccgtgaccctgtatgcgaaagggctgacatgcgaagccgacacgttgggcagttgtggttatgtttacctcgcgatttacccgacatccaaaacaaccacgtaa

SEQ ID NO: 78931 - DNA, 1134 bp, Citrobacter koseri
atgtcagactcaacaatcaaaagctatggtggaatactccgcattggggcaggactcagcatcgttctgatggcgctcactgccatttttatctggttttacctaacgtggattggccgtctagatatattccttcaagctgtcacttttaacgagctattctccttctctgggattatatttttaagtagcattatattgttctgtggcgtactgtttctaccttgtttgttagggtgcctcgttatacatagcaatcaaaataatgccaagtcaaagcgaaagaaaatacttctagcacgtgtttatgctggaaactcttttctatgcataacttttatcgctttaatatctttgtttgacatagcctcaggagaattcatattcataaccttgatgttattgactggtattattagtacttttattgtattaactcttcagagaaaatgcatacacactcatctgaagccattaaaaacaataaaaaagttaaaaatcctattattagattattcaatgaaaccctttctactgggaatcatttgctggctagtagtcttcccaatgacattattgagcaaattcttacacatcgaaaatggaatggacgactaccagcaaacctcgttactcctggtgtatggtacattagtaataatagtcaatatatttccatgcatcttttttttacgacaagatttttctagcggatggtttaaacctctgagaaatactacaggttttgttttcactttattgctactgtcatcaaccttcatgcacgtcattccgttactgattgtcaacatggcatttcggatgactgggatgacgatcatggaaccagttacaatttctatcaaaacggatgaaattccttctgaaatgcttcatagcagaggatgggtgtatcagctctcagaggataaaaaatttaacttagtatcaggagttatctttttttcatatggcggagtttatcttgtctgtcctaaagaaacgacccaaaaatttcgtgaaagcataatcttcgacatactgtctgaagaaatagaaaaaaaagcaagagaagaaataaaaaaatcagcccagcaatgtattgcagtggataaaagtgttttaaacttttga

SEQ ID NO: 78932 - DNA, 342 bp, Citrobacter koseri
atgaaaactttacctgcaacaactcagcgggcggtgaagccctgcctgtcacccgtggctgtctggcaaatgttactgacacgtctgctggaacagcactatggtctgacaataaacgacacgccattctgcaacgaggctgtgattaaggaacacatcgatgccggtatcaccctagccgatgccgtgaattttctggtagaaaaatacgagctggttcgtatcgacaggaagggatttagctggcaggaacaatctccttatctccgggctgcagacattctgcgagcgcggcaggcaactggcttgttgcggcaaagccgtaacaacgtagtacgatga

SEQ ID NO: 78933 - DNA, 318 bp, Citrobacter koseri
atgagcaaccctaccaggggcctgcagcgggagattacactgcgcctgggagcccgtctggtgcaggaaggcaaccgactgcattatctggctgaccgggccagcatcaccggcaagttcagtgacatcgaatgccggaagctggatgaaacattcccgcactttatccgccagatggaatcgatgctgaccaccggtgaactcagcccccaccatgcccactgcgttaccctgtaccacaacgattttacctgcgaagccgacacccttggcagttgcggctacgtatacatcgccatttaccccactcagcgttaa

SEQ ID NO: 78934 - DNA, 459 bp, Citrobacter koseri; identical to SEQ ID NO: 21301

SEQ ID NO: 78935 - DNA, 240 bp, Citrobacter koseri; identical to SEQ ID NO: 21300

SEQ ID NO: 78936 - DNA, 468 bp, Citrobacter koseri
atgacaatacgttcactaagtcggtttgtgctggtgggtgtactgctcgcgagctttaatgcctctgctatcccggggttctggcagcagggttacggtcagggcaatacggaatacagtgtgaccgaagccagcgggaagacgtttaccatcaactgcacaggtaacccggaccagaatggtttttatcagcattcagtctttcttacccttgccgatgacaagatggtcagttcgcacgatgacgacactactatcaccgtagtgatggatcaccagcagtacattattccgtccagcctgggctggcgtaacggcgataacgcctggtttgacttcatcagcaatatctctgaggccgggcagttcgacgtctacgtcaatgaccacaaagcagggaccttcactgcggaccggaagaacgctgagaaagttctgtccactctcggagactgcagcaacgactga

SEQ ID NO: 78937 - DNA, 543 bp, Citrobacter koseri
gtgacgcccaacaggctccagcggcagttcaacccggaagcaccggatgagcgttgggtaacggacatcacctacatccggactcacgaaggctggctgtatctgactgttgttgttgacctgttctcgcgcaaagttattggctggtcaatgcagccccggatgacaaaggatattgtcctgaatgcacttctgatggccgtgtggcgacgtaatcctcaaaagcaggtgctggttcattctgatcaaggcagtcagtacacaagctatgagtggcagtcgttcctgaaatcacacgggctggagggcagtatgagccgtcgcggtaattgccatgataatgcggttgcagaaagctttttccagttgttgaaacgcgaacggataaagaaaaagatctacggaacgcgggaagaagcccgcagcgatatttttgattacatcgaaatgttttataacagtaagcgtcggcatggttccagcgatcagatgtcaccgacagaatatgaaaaccagtattatcaacggctcggaagtgtctaa

SEQ ID NO: 78938 - DNA, 273 bp, Citrobacter koseri
atgtctgacggttttgaggaaaatgccgagtttttcactctgacctacgaagctgagaagtcggttagccacaacttggcctttgttcgcattgcgccgttgctatggctacgcgcgggtgcgcgcggcgaacgtattgaaaaaatacctactaaaggatgggaagtgaccgatgcgtacggtctactgctagatgtagaccaagcaaccccattcattgaagccattgataccgtagcccacgggcacgtaagggtgaaaccagcatcgtga

SEQ ID NO: 78939 - DNA, 285 bp, Citrobacter koseri
atgcaaaaccatcatgaaggttgctgtaaacatacagagcaccaacacgaaggctgctgcaagggtgaaggacatcaccacgaaagccgccacagtgagcaccatgcaggctgctgcaaaagtgaagagcatcgccacgcaggctgtcaccaggaacatcaccacgaacagggtgcggacgccgccacggtcgcggcggaggtggtggtcgtcgccagtgcatctccgtcactaacaacgaagtcgctgccgacgaacagaaaaaattgcgcgaacagggcttaa

SEQ ID NO: 78940 - DNA, 771 bp, Citrobacter koseri
atgacaaaaaacacctcacgctacccacagcgcgtgcgtaacgaactacgttttcgcgaattaaccgtgctgcgcgttgagcgtatcggccaggcgttccagcggatcgtgctggggggcgaggcgctggatggctttgtttcacaaggttttgacgaccacaccaaactgtttttcccgcaggcgggcagcgtatttacgccgccggaagtgaccgacgaaggcattaactggggcgagggcgtgcgcccggcgacccgcgactacacgccgctgtacgatgccgaacgccacgagctggcttacgatttttatatccacgatggcggtattgccagccgctgggcgctggaagccaacatcggcgataagctggtgatcggcgggccgcgcggctcgctggtggtgccggaagattacgcctggcagctttatgtctgtgacgagtcgggcatgccggcgctgcgccgtcgcctgctgggattacgtcagctgccggtgacgccgcaggtgacggccatcgtcaccgtcgcggatgcttcgtataaagattatctggcggatctcgacggctttaatatcgaatgggtggtaggccacaacccggcgttcgtcgccgagcggctggctcaggtcaaggtgccgtcagaagattattttatctggctgaccggagaaggcggcgtggtgaaatcgctgctggcgcgctttgaggagccgagtatcgatcagcaactggtgcgttcgcaggcgtactggcatagcaaataa

SEQ ID NO: 78941 - DNA, 1650 bp, Citrobacter koseri
atgtctcaattcttttttaaccagcgcgccagcctcgttaacgacgtgatcgagggaaccattattgccagcccgtggaacaacctcgcccgcctggagagcgacccggcgatccgtgtagtggtacgccgcgatctgaataaaaacaacgtggcggtgatttccggcggcggttcaggacacgaaccggcgcacgtcggctttattggtaaaggcatgctgaccgccgcggtctgcggcgatctgttcgcctcgccgagcgtcgatgcggtactcaccgcgattcaggcggtgaccggcgaggcgggctgtctgctgatcgttaaaaactacaccggcgatcggcttaacttcggcctcgcggcggagaaagcgcgccgtcttggctataacgtagagatgctgatcgtcggcgacgatatttcgctgccggataacaaacagccgcgcggtatcgccgggactattcttgtgcataaggtggcgggctatttcgccgagcgcggcttcaacctcgccaccgtcctgcgtgaagcgcaatacgccgccaaccataccgccagcatcggggtggcgctggccagctgtcacctgccgcaggaagcggaaagcgcgccgcgccatcagcccggccacgccgagctggggatgggcatccacggcgaaccgggagcctcgacgatcgcgacccataacagcgcggaaatcatgcagattatggtagagaagctgaccgccgccctacctgaaaccggccgcctggcggtgatgctcaataatctcggcggcgtgtcggtggccgagatggcgattctgacccgcgagctggccaacaccccactccatgcgcgcgttgactggttgattggcccggcttcgctggtaacggcgctggatatgaaaggcttctcgctgaccactatcgtgctggaagagagcattgaaaaggcgctgctgtcggatgtcgaaaccgccagttggcagaagccggtgcagccgcgggctgttaatatcatgccgtccgcgctcgccagcgcacgcgtcgcctttacgccatcggccaacccgcaggtgggcgattacgtggcgcaggtgaccagcaccctctccggcctcgaaacccatctcaacgcgcttgacgccaaagtgggcgacggcgataccggctccactttcgccgctggcgcgcgtgagattgccgctctattgcaacgccagcaactgccgctcaatgatttacccacgctgttcgcgctaattggcgaacgcctgacggtggtgatgggcggctccagcggcgtattgatgtcgattttcttcaccgccgccgggcagaagctggagcaaggcgccagcatggcggaagcgctgaacgccggtctggggcagatgaaattttacggcggcgccgatgagggcgaccggacgatgattgacgctctacagccggcgctggcggcgctgctggccgaaccggataatctgcaggccgctttcgccgcggcgcaggccggcgcggatcgcacctgccagtcgagcaaagccggcgccggacgcgcctcctatctcaatagcgagagcctgctcggcaatatggaccccggcgcccacgcggtggcgatggtgtttaaggcgctggcggaacgctaa

SEQ ID NO: 78942 - DNA, 1419 bp, Citrobacter koseri
atggtaaacctggttattgtttctcatagcgcccggctgggcgaaggtgtcggagaactggcccggcagatgttaatgaacgatggctgtaagctggcgatcgccgccgggatcgacgatcccgacagcccgatcggcaccgatccgattaaagtcatggaggcgatcgaatccgtcgccgataccgaccatgttctggtgatgatggatatcggcagcgccctgctcagcgccgaaaccgccctcgatctgctcgatccggcgatggcggcaaaggtgcggctgtgcgccgcgccgctggtcgaagggacgctggcggccaccgtcagcgccgcctccggcgccgggatcgacaaagttatcgccgatgccatgaacgccctggaagccaagcgggttcagctgggtttaccttcgcacacgcctgacgccgccgccccaacgcttgctgacgacggcgatgctaaatcggtttcagtcattattaacaatcacaacggcctgcacgtgcgtccggcatcaaagctggtcgccgcgctggcgggttttaacgccgacctggtgctggagaaaaacggcaaatgcgtcaccccggacagtctgaatcaaatcgctctgctacaggtgcgccgccacgataagctgcgcctgctggcccgcggtccggacgccgatgcggcgctggcggcgtttcaggcgctggccgccgataacttcggcgagtcgccggaggcgcagccgacagcggaacccgccatacctgcgcgtgttgaaggcgccgcgatgctttatccgcaggcgccgatccaaccggcgctccccgccgccgccgacatcgcccgcgagcagcagcgcctgcgccaggcgatcgaccagacgctggccgatctcaatgcgctcaccgagctggcggaacacaaatttaacgccgatatcgcggcgatcttcgccggtcatcacaccttgctcgacgatgaagatctgtttgatgccgccaacgatcgcctgctcaccgaacagtgctcggcggaatgggcgtggcatcaagtgctgatggagctcagccagcagtatcgtcagctggatgacgcctatctgcaggcccgttatatcgatgtcgacgatattctgcagcgcacgctgcgccatctgcagggtattaaggagacgctgccattcgccagtgagccgacgattattatcgccgacaatatttatccctcgactgtactccaactggatgccagcaaggtcaccggcctgtgcctgcgcgacggcagcgaacaggcccacggcgcgattatcgcccgcgcggcggggatcgcctggctatgccagcagggcgaagcgctgaatgatattcagcctggcgaagccatcacgctcgatatgcgtctgcaacgtcttattcgtcgctaa

SEQ ID NO: 78943 - DNA, 633 bp, Citrobacter koseri
atgtcactgaacagaacgcaaatcgtcgactggctgtaccgctgtggcgacattttcaccaaacagagcgattttctcaccggccttgataaagagatcggcgacgccgaccacggcctcaatatgcatcgcggcttcagcaaagtggtcgaaaagctgccgtcgatcgccgataaagacatcggttttattctcaagaataccgggatggcgctgctttccaacgtcggcggcgccagcggcccgctgttcggcaccttctttatccgcgccgcccaggtcacccaggcgcatcagagcctgaccctcgacgagctttatcagatgatccgcgaaggcgcggacggcgtcgtcaaccgtggtaaagcggagccgggcgataagacgatgtgcgacgtctggctgccggtggtggaatccctgcgtcattccagcgagcaacatctgtctatccctgccgcgctggatgccgcctgcgaagtggccgagcgcgccgcccacgccaccatcaccatgcaggcgcgtaaaggccgcgccagctatctcggcgagcgcagcatcgggcatcaggatcccggcgcgacctcggtgctgtttatggttcagatgctggctgccgccgccaaagagtaa

SEQ ID NO: 78944 - DNA, 1071 bp, Citrobacter koseri
atgaaaaaactgattaaccgtgtggaagatgtactgagtgaacagcttatcggcctggcgaaggcgcatcctgaactgacgctgcaccaggacccggtctatgtcacccgcgctgatgcaccggtcgccggcaaagtggcgctgctctccggcggcggcagcggacacgaaccgatgcactgcggctacatcggccagggcatgctctccggcgcctgtccgggggaaattttcacctcgccgacgccggacaaaatgttcgaatgcgcgatgcagattgacggcggcgaaggcgtcctgctgattatcaaaaactataccggcgacatcctgaattttgagaccgccaccgagctgctgcacgaaagtggcgttaaggttaccaccgtcgtggtggatgacgacgtggcggtaaaagacagcctctataccgccggacgccgcggcgtcgccaataccgtgctgattgaaaaactggtcggcgccgccgccgaacgcggcgactcgctggaagcctgcgctgaactgggccgccgtttaaataaccttggtcactcgattggcatcgcgctgggcgcctgcaccgtaccggccgccggacagccctcctttaccctgaaagatgatgagatggagttcggcgtcggcatccatggcgagccgggtatcgaccgccgccgcttcagctcgctcgaccaaaccgtcgatgagatgttcgataccctgctggaaaacggcgcatacagccgcacgctgcgccagtgggataacgtcaagggagcgtggcaggaagtgaaacagagcaaaaccgcgctgcaaaacggcgatcgggttatcgcgctggtcaataacctcggcgccaccccgctttccgaactgtacggcgtttacaaccgccttgcccagcgctgcgaagcgtccggcattgtgattgaacgcaacctcatcggcagctactgcacctcgctggatatggcgggtttctccatcaccctgctgaaagcggatgatgacacgctggcgttatgggacgccccggtccataccccagcgctgaactggggaaaataa

SEQ ID NO: 78945 - DNA, 531 bp, Citrobacter koseri
atgtatcgtatctatacccgcaccggggataaaggcaccaccgccctgtacggcggcagccgcatcgagaaagaccatattcgcgtcgaggcctacggcaccgtcgatgaactgatatcccaactgggcgtctgctacgccacgacccgcgacgccgggctccgggaaagcctgcaccatattcagcagacgctgttcgtgctgggggctgaactggccagcgatgcgcggggcctgacccgcctgagccagacggtcggcgaagaggagatcaccgccctggagcggcttatcgaccgcaatatggccgagagcggcccgttaaaacagttcgtgatcccggggaggaatctcgcctctgcccagctgcacgtggcgcgcacccagtcccgtcggctcgaacgcctgctgacggccatggaccgcgcgcatccgctgcgcgacgcgctcaaacgctacagcaatcgcctgtcggatgccctgttctccatggcgcgtatcgaggagactaggcctgatgcttgcgcttga

SEQ ID NO: 78946 - DNA, 354 bp, Citrobacter koseri
atgtcgctttcaccgccaggcgtacgcctgttttacgatccgcgcgggcaccatgccggcgccatcaatgagctgtgctgggggctggaggagcagggggtcccctgccagaccataacctatgacggaggcggtgacgccgctgcgctgggcgccctggcggccagaagctcgcccctgcgggtgggtatagggctcagcgcgtccggcgagatagccctcactcatgcccagctgccggcggacgcgccgctggctaccggacacgtcaccgatagcgacgatcatctgcgtacgctcggcgccaacgccgggcagctggttaaagtcctgccgttaagtgagagaaactga

SEQ ID NO: 78947 - DNA, 429 bp, Citrobacter koseri
atgaacaagagccaacaagttcagacaatcaccctggccgccgcccagcaaatggcggcggcggtggaaaaaaaagccactgagatcaacgtggcggtggtgttttccgtggttgaccgcggaggcaacacgctgcttatccagcggatggacgaggccttcgtctccagctgcgatatttccctgaataaagcctggagcgcctgcagcctgaagcaaggtacccatgaaattacgccagcggtccagccaggacaatctctgtacggtctgcagcttaccaaccaacagcgaattattatttttggcggcggcctgccagttatttttaatgagcaggtaattggcgccgtcggcgttagcggcggtacggtcgagcaggatcaattattagcacagtgcgccctggattgtttttccgcattataa

SEQ ID NO: 78948 - DNA, 585 bp, Citrobacter koseri
gtgcaacagacaacccaaattcagccctcttttaccctgaaaacccgcgagggcggggtagcttctgccgatgaacgcgccgatgaagtggtgatcggcgtcggccctgccttcgataaacaccagcatcacactctgatcgatatgccccatggcgcgatcctcaaagagctgattgccggggtggaagaagaggggcttcacgcccgggtggtgcgcattctgcgcacgtccgacgtctcctttatggcctgggatgctgccaacctgagcggctcggggatcggcatcggtatccagtcgaaggggaccacggtcatccatcagcgcgatctgctgccgctcagcaacctggagctgttctcccaggcgccgctgctgacgctggaaacctaccggcagattggcaaaaacgccgcgcgctatgcgcgcaaagagtcaccttcgccggtgccggtggtgaacgatcagatggtgcggccgaaatttatggccaaagccgcgctatttcatatcaaagagaccaaacatgtggtgcaggacgccgagcccgtcaccctgcacgtcgacttagtaagggagtga

SEQ ID NO: 78949 - DNA, 426 bp, Citrobacter koseri
atgagcgagaaaaccatgcgcgtgcaggattatccgttagccacccgctgcccggagcatatcctgacgcctaccggcaaaccattgaccgatattaccctcgagaaggtgctctctggcgaggtgggcccgcaggatgtgcggatctcccgccagacccttgagtaccaggcgcagattgctgagcagatgcagcgccatgcggtggcgcgcaatttccgccgcgcggcggagcttatcgccattcctgacgagcgcattctggctatctataacgcgctgcgcccgttccgctcctcgcaggcggagctgctggcgatcgccgacgagctggagcacacctggcatgcgacagtgaatgccgcctttgtccgggagtcggcggaagtgtatcagcagcggcataagctgcgtaaaggaagctaa

SEQ ID NO: 78950 - DNA, 1824 bp, Citrobacter koseri
atgccgttaatagccgggattgatatcggcaacgccaccaccgaggtggcgctggcgtccgacgacccgcaggcgagggcgtttgttgccagcgggatcgtcgcgacgacgggcatgaaagggacgcgggacaatatcgccgggaccctcgccgcgctggagcaggccctggcgaaaacaccgtggtcgatgagcgatgtctctcgcatctatcttaacgaagccgcgccggtgattggcgatgtggcgatggagaccatcaccgagaccattatcaccgaatcgaccatgatcggtcataacccgcagacgccgggcggggtgggcgttggcgtggggacgactatcgccctcgggcggctggcgacgctgccggcggcgcagtatgccgaggggtggatcgtactgattgacgacgccgtcgatttccttgacgccgtgtggtggctcaatgaggcgctcgaccgggggatcaacgtggtggcggcgatcctcaaaaaggacgacggcgtgctggtgaacaaccgcctgcgtaaaaccctgccggtggtagatgaagtgacgctcctggagcaggtccccgagggggtgatggcggcggtggaagtggccgcgccgggccaggtggtgcggatcctgtcgaatccctacgggatcgccaccttcttcgggctaagcccggaagagacccaggccatcgtccccatcgcccgcgccctgattggcaaccgttcagcggtggtgctcaagaccccgcagggggacgtgcagtcgcgggtgatcccggcgggcaacctctacattagcggcgaaaagcgccgcggagaggccgatgtcgccgagggcgcggaagccatcatgcaggcgatgagcgcctgtgctccggtacgcgacatccgcggcgaaccgggcactcacgccggcggcatgcttgagcgggtgcgcaaggtaatggcgtccctgaccggccatgagatgagcgcgatatacatccaggatctgctggcggtggatacgtttattccgcgcaaggtgcagggcgggatggccggcgagtgcgccatggaaaatgccgtcgggatggcggcgatggtgaaagcggaccgtctgcaaatgcaggttatcgcccgcgaactgagcgcccgactgcagaccgaggtggtggtgggcggcgtggaggccaacatggccatcgccggggcgttaaccactcccggctgtgcggcgccgctggcgatcctcgatctcggcgccggctcgacggatgcggcgatcgtcaacgcggaggggcagataacggcggtccatctcgccggggcggggaatatggtcagcctgttgattaaaaccgagctgggcctcgaggatctttcgctggcggaagcgataaaaaaatacccgctggccaaagtggaaagcctgttcagtattcgtcacgagaatggcgcggtggagttctttcgggaagccctcagcccggcggtgttcgccaaagtggtgtacatcaaggagggcgaactggtgccgatcgataacgccagcccgctggaaaaaattcgtctcgtgcgccggcaggcgaaagagaaagtgtttgtcaccaactgcctgcgcgcgctgcgccaggtctcacccggcggttccattcgcgatatcgcctttgtggtgctggtgggcggctcatcgctggactttgagatcccgcagcttatcacggaagccttgtcgcactatggcgtagtcgccgggcagggcaatattcggggaacagaagggccgcgcaatgcggtcgccaccgggctgctactggccggtcaggcgaattaa

SEQ ID NO: 78951 - DNA, 804 bp, Citrobacter koseri
atgaaccagacttctaccttaaccgggcagtgcgtggccgagtttcttggcaccggattgctcattttcttcggcgcgggctgcgtcgctgcgctgcgggtcgccggggccagctttggtcagtgggagatcagtattatctggggccttggcgtcgccatggccatctacctgacggccggtgtctccggcgcgcaccttaatccggcggtgaccattgccctgtggctgttcgcctgttttgaacgccgcaaggtgctgccgtttattgttgcccagacggccggggccttctgcgccgccgcgctggtgtatgggctctatcgccagctgtttctcgatcttgaacagagtcagcatatcgtgcgcggcactgccgccagccttaacctggccggggtcttttccacgtacccgcatccacatatcacttttatacaagcgtttgccgttgagaccaccatcacggcaatcctgatggcgatgatcatggccctgaccgacgacggcaacggaattccgcgcgggccgctggcgccgttgctgattggcttgctgatcgccgtgatcggcgcgtcgatggggccgctaaccggctttgcgctgaatccggcgcgcgacttcggcccaaaactgtttaccagtctggccgggtggggctcgatcgcctttaccggtgggctggcgatcccttactttctggtgccgctgctggcgccggtggtgggggcgattatcggggcgtttttgtatcgcaagcttatcggccgccttctgccgtgcgaatgcggtatcgatgagtaa

SEQ ID NO: 78952 - DNA, 339 bp, Citrobacter koseri
atgaatatgatgatctcatatcaggaacttgttcgcaccttccctaaagcactcgtattgaccgtggcggctaccacattctgtctgatgaccagcccggcgttcgcggttgaggaaaccacgccgcagaatatgacctgtcaggaatttatggatatgaacccaaaaagcatgaccccggtggccttctgggtagtgaatcgcaacaccgactttagcggcggcgactatgttgactggcatgaagtcgagaccgtttcggtaccgaaaatgctgcaggagtgccacaagaaccccgccgctaaacttggcgatctcagcgcggtcatcaaaaaataa

SEQ ID NO: 78953 - DNA, 414 bp, Citrobacter koseri
atgagccatcaactcaccttcgccgatagtgaattcagcactaagcgccgtcagaccagaaaagagattttcttgtcccgcatggagcagattctgccatggcagaatatgaccgctgtcatcgagccgttttatcccaaggcgggcaatggccgacggccctatccgctggagaccatgctgcgtattcactgcatgcagcattggtacaacctgagcgacggtgccatggaagatgccctgtacgaaatcgcctccatgcgcctgtttgcccgattatccctggatagcaccctgccggatcgcaccaccatcatgaatttccgccacctgctcgagcagcatcaactggcccgtcaattgttcaagaccatcaatcgctggctggccgaagcaggcgtcatgatgacctaa

SEQ ID NO: 78954 - DNA, 558 bp, Citrobacter koseri
gtggatgccaccatcattgaggcacccagctctaccaagaacaaagagcagcaacgcgatccggagatgcatcagaccaagaaaggcaatcagtggcactttggcatgaaggcccacattggtgtcgatgccaagagtggcctgacccacagcctagtcaccaccgcggccaacgagcatgacctcaatcagctgggtaatctgcttcatggagaggagcaatttgtctcagccgatgccggctaccaaggagcgccacagcgcgaggagctggccgaggtggatgtggactggctgatcgccgagcgtcccggcaaggtaaaaaccttgaagcagcatccgcgcaagaacaaaacggccatcaacatcgaatacatgaaagccagcatccgtgccagggtggagcacccgtttcgcatcatcaagcggcagttcggcttcgtgaaagccagatacaaggggctgctgaaaaacgataaccaactggcgatgttattcaccctggccaacctgtttcgggtggaccaaatgatacgtcagtgggagagatctcagtaa

SEQ ID NO: 78955 - DNA, 345 bp, Citrobacter koseri
atgttcaccggcttgtctgctttcccaatgacccctgttaccgccaacggcgtcgatgaaaagggattcaataatattttggcccgccttacgacggcacgggtggattcaatgggtattctggggtctaccggtagctacgcctatctaaccccggagcagcgcaaacgtgtcgcgactctggcaaaacaggttgctggggatatccctgttatggtgtgtgtgggggcagtcagggaaggtgcgaataagcaggtcatttcttcccaagctgactcgctgattaaaatttcgcggatctgggccgatttttttcccgcaaacacatcgaatcagcctatttag

SEQ ID NO: 78956 - DNA, 696 bp, Citrobacter koseri
gtgttaacagtatctccgtcaattgcccctgaaatttatcgtattgcacccggtttccgggcactcagtatctatgtaaacgctgcgccggtgctgaaccctgatattggtgaaacagcgctgagagaagcttgtgaagcggttcttgtcggtgagcctgagtgggcagaatcgcatttagctgcatgggctgagatttttcagacgtttggcgctaagcctaaacgcaccccttgttcagctgatgcgttacgtaagcgtgtattacgtgacggcgcgatgccagcacttgaccccatcgttgatctctataatgccgttagccttcgctacgccgtgccggtggggggcgagaacattgctgcctatcaggggctaccacgcctcgttgtggcaacaggcactgagccgtttgatacggtaaaagagggtgaaatcgccgttgaatatccttcgcaaggtgaagttatctggcgtgatgatgccggtgtgacctgccgtcgctggaactggcgacaaggagtcagaacccgcttagatgtggaagcacagcacatgtggtttattctggagagtctgccgcaaatgccactggaaaaacttcacgaagccgggaagatgctgaccgatggcctcgaagcaatgacgccaggtctgcgggttgacgtaactctcattgaagagcaacaaccgtaa

SEQ ID NO: 78957 - DNA, 603 bp, Citrobacter koseri
atgactaaaaaagtcaatttaatgaccgatgctggttcgattgccagcacagtaaatgaagctgtatctcagcggattaagctgtatcgcaaacaaaaaaaaatctcccttgatgaactctcccgccgggcgggcgtcagcaagggtgcactggttgaaattgaggggtgccgggcaaatcccagtattgctctgttgtgccgcctggccgtcgcgatgggggtttcggtggcagactttgtggatgtcagttcgaaaccaacggtgcatctcatcgctgaagaggaaatccccgaattatggcaaggcgaaaaaggcggacgagccagactgcttgcaggatcaggtggccctgatatgaccgagatgtggatgtgggaaatgcaaccgggggaaaagtttgcttcccccggccacacagatggaacgcttgaattgttttacgtccaggaaggcacactcacactgggtgtacaagatcacctgtatcaagtgaacaccaactgttcggcaaccgcgagaacagacgttgcgcattgctatgaaaaccgaggagcgagcccattggtgttcatcatgacggtacatgagaaatcatcctga

SEQ ID NO: 78958 - DNA, 297 bp, Citrobacter koseri
atgaccttacttcctgatcatcccggcattaaactggccgaaatactagcggtatcaaatataggactgaataaattttcggtttacatgggatgtcgcgagcaagagatagttgaattgttgaacggttcagtttcactgacgaaagctatggcactccggttatcgcatgtagtcggtggaagttggtcgaagtggatgttaattcaagagcagtttgaattacagttggcacaacgagagattaaagaattaatgattttgactaatatcggggatgaggtcgttggattatag

SEQ ID NO: 78959 - DNA, 621 bp, Citrobacter koseri
atggaattatatcatggttcacatggtgagcatgtgctcgcctataaaaaaaatattgaacgagtcgtcaatgatgcactcagtgaattccccagaacaatggcattacgtgttgatgtacattacccccccattctagacagaggtgatactgtttgctgttttcctaatctagagcctggtgccatatcccgtttccgtaatgcattaaatgccatgttggaggccaatgagagagccagagccgccaacggtaaaagaatatatccaaaccgagttcgtcatgtttgggtaagggagttttccgaagagggaaaatgtcattttcatattggtcttttttttaacaaagatgcttattaccatttaggtgattatgaggctgaaagcaatttaaggatgatgattgtaagagcatggtatagcgcactgggattggaactggatgattatccgggattggctcactaccctgaaaattgtcgttatatattagacgtcaatgattttaactttgaaggagaatacaataaattactgaatcgtcttgactacctggctaaacttgatacaaaagtatacggagatggcgaccgtagcttcggctgcagtcgcgggtaa

SEQ ID NO: 78960 - DNA, 765 bp, Citrobacter koseri
atgaaaaaacgcatcactttcagcgcaaacaaaaaatcaactattgatgcaatcgacgactatagcaatgcaaaaggatactctaggtcagaggtgatatcatttttgttaaacgccacagccccagcattgaataaaataacatcgcaatatcatatagctcaaactttggagtcaacattaggctgtatttttgaagagaaggccccctcaatcgcacggggtgagccaaaattaacttacgaagagtttttttattccgtctggaacactcacattcgacaccggaacgaggttgtcgatcaagatttttatgcgcacaaaatacctcatgataagatgggaaagagcgaaaaaaaattaattcatgaaaagctctcatacattataaaaagtttcaatgtaaaaaaagcaatttttatttacacagatcggcgcgtgaaccgcaaacatctcattgcaggagggttatctaatatcatactgataaaggacacagtctacgatggttgtttttttgatttgagcagcattgtgattatgccaatctttgaacttattacatttggagttgaggcagtattgaaaagaaataaaactccccctaaacaatcatgctattgctggataccaatttattacacaaatgatctagcggtaatggttccggtaattgccgaaggcgatacacctcaaaaggcgatgaaaggaggagatgccatcattattaatccctttaacggtgaagtaaaccatacattctga

SEQ ID NO: 78961 - DNA, 450 bp, Citrobacter koseri
atgtctaattctttgatgagttctgcgcaaactagctcaaaggctcgaatagtacgggtcgtgggtaagatcaaagttgttcgttctagtaagcagcgacaaacctgtgctgagtccatatttcaggaaagacagatgaacatcaggattcgagctgctcttggacacctcaatgaaaaaaactctttatacaataaaaacaatcgacataaaactttgggcgttttttttgcacgtatcatctcgcacaaaaatctggccgaaaactcgcaaggtaatgcgtctaaatcaactaaaagtacctcatccggctcaagcgaaggtagtgaccctgaccctgaagcttattcaagcttggctttttcgttttctttttggtcctttctttcccttctaatttcattactttttgtatatgcctgcatctcaatcattgaggtggtagcatga

SEQ ID NO: 78962 - DNA, 828 bp, Citrobacter koseri
atggataaagtttatcactattgtgatctcaatgcactattgagcattataaataataagaaactttggatttcatcggctggaaatctaaatgattatactgaaataaattatgctaaaaaatatttcttggatgctctggattcaaagaggaatccatctaataattatgttattgatgagttccttctttgctttcaaaactcattcccacatccttatatttgtagtttttcaaaaaacaaagatctcttaagtcaatggcgagcctatgctagtgatggctgtggagtatcaattggttttaatactgaagcctttgggttttctgacgtcgccccagttttgggtatgtctgatattcattccataggcatcaatgaagttttttatgatgatgttaaagttatccgtgagtttgctgaccgtatgtctaatgttgtaattgcatcatcttttcttgatgactctcatagatggatgacctataatcatataacaactgaggtcagaacaaaatgcttatttactaaaaataaattctttgaagaagagcaagaagtgagaattgtacaccttccctttattacagggaatgaacgtggcgaatttaacttcttacattcaatttcaaggccaaagcaaagagttacaggaaatagaataacatcgtatttcgaatatgatttttcctcaaaagaaaatcttctatttgaagttgttcttggccctaaatgtgaaataaataattatgaaattgagatgttactagcgtcgaatggctatctaaagatacccgtatctagatctggtgcaagttacaggtaa

SEQ ID NO: 78963 - DNA, 1041 bp, Citrobacter koseri
atgacttgggtggttggaggaaactgctttaatgggtttgtctgcgtagccgatattcaggcaacaataacattgactggcggggaagttcgttattttaattgcattcaaaaaatacaccaaataggaagtaatttatgcgtggctttcagtggtgatattaggtcaggtttcaaaatcatcgagttgttgagagaaaatattcatcaaaactttcaggatggtgaatactttgacattgatggtcaatctaagatattgataggttttcttaagtgctgctatgattatatcaatccgaaccataagccttatcttgaattaatgtttctatggaattcacaagaaggtgatggacttctatatcgcccattttgcatgaaatttaaatcgccaaactttactatgaattcaaccgcattgcctggggttgctcaatcaggtagtggaatgactaatagcacctttcaggcaatatcttcttttttagaggggaaggaaatttccacgccggagtacaaaaaattattttctaacattgaaggtgctccagatattatcactcttaaaaatttcaaaaacataattctgaatgaagcgtcaaaagttaatcagccgggtataagtcgaacattgatttcttttgaatcagaaataccctttgacgagatttatagtgagcaacaaaacaagaatttaagagaagcatttatcaccctaggtttaggacccactgaaatgaaaactgaaaattacagattatttctttctgtgctctcagttcctgatatccagaaaaaattagattatatcaaacgatataatccatttttgtataactcgataagggatatattgcaacagggggggaagtcaataaatatacagccaataacagaacttccgccaattgttgtcgatcgtcatgtgagtgatgaagaagaaattcactcttataaactaataaccacgtggcctgaacttaaagcatttttgggcgaaaagcgcattagcgtatcggctatgcaggcaacagcgtga

SEQ ID NO: 78964 - DNA, 807 bp, Citrobacter koseri
atggacataggtaaacagcggtcagaaatatgccagttccggcgtgtggataaatatacttgcggagccgcgctaagtactgaggagaggaagcaggcagtgaaactttatgagaatgtggttattggtaatttcctgtacggactgggcgtctctgtaggggcacagcttcgcgggcatgtattgccagcatctgtcaatctgctccagcagacgcctgaggacaaggcgctggctgatgtcctgctttcctttcccggcacgctacggctgattgagtttaaatctgcggataaccgctctggtaaagaggcagcccgcttcagaaagctctctcacgcgctggaaagtgatgcgagactgaggccgctttctcaccgaatccattggtatgttgaaaccacgcctgacgctcagctgggtgtgaaaacctacttttcgagctatctcatcgccctctctcagtccacccgtaaggctgagcctctgaaccttgagaactttattgcacagacaacccgtagcatcttttcgactcaggttaatgccgaagatccggttgccgtcagtgactacctgaaactggtcaggtggtgccagggcgtggacgcagagagcaacgcgggtacgcttatcgtcgtttgtgacggcagcggcaatctgaggtatgtagagctgaagaatatgatggagctttcgatgacacatgagaaatggctcctctacaggcatgaagcagatcgccagacagagctgaagagagagcaatcattagaccacgacagagggattgagcagagcctatga

SEQ ID NO: 78965 - DNA, 582 bp, Citrobacter koseri
atgaaaaacacaaattccgtcagtgaacacgacatacgcctcttttttgaggccgcagacaggctccttcaggccgcacagcagcagggaaaaacagcagacagagcaacgtcagcactgattcattccgccacatctcatgaaaaacagatgagagaggtcagagatgatgttatcagtgccgttacagcaatggccgactcaacggctcagaggtctgcacgacttctggcggaccatttccgcgaagccgatcgggccgcagacggggcaactaaccgctatgaacgagcctgcaggtctcttggttggcgaagctggctctggtttctggctgcacagggggttctgtgcagtgtggtcattgtgcttatcctgacgcttgttccctcactggatgagatacacgagcgacgctcaacgctgacgcagctacataaggagactgagggcttcccgttatactggggaaattgcaacgttgacggcaaagtcacccggtgtttccggacggatgataaagcaggaaattttacatctgaagatggcagcacctggcacgttccatggcagaagccttag

SEQ ID NO: 78966 - DNA, 1128 bp, Citrobacter koseri
atgactgacttattaacccaggccttcacgtttaaaaatagcctcaggatgcgtaaccgcgtcgttatggcaccgatgactacctggtccgctaatgacgatgaaactatttcagatgaagaagtaaactattatcgagcgcgcgctaccggtgtgggattagtgataacgggatgcgctcatgttcagagaaacggtgtgggtttcaccaatgaattcgcagcctacgatgatcgttttatcccaagtctgaggaaactggctgatgcagcaaaaagtgggggggcgctggcaattctgcaactgtttcatgccggtaataaagcggttcccgaactcatcccaggtggggagatcgtcagcgccagcgccctggccgctccggctggcccttttaatcgtggcgaacaagccagccgggctttgggccatgacgaaatttctggtgtgatccatgacttcggcgaagccactcgccgcgcaattgaggccggttttgatggtgttgaattgcacggtgcgcatggttttcttatccagaacttcttctccccctggtttaaccagcgtactgacgaatggggtggttcattagcaaaccgtatgcgttttccgctggaggtcgttcgggaagcccggcgggttattgaaactcatgctgggaaaccctttttattgggttaccggttatcgccggaagaatcaggagacggaggattacggattaatgactcccaggctctggtgtgtcagttagagaaagagactctcattgactatctccatatctcactccacgacgtactgaccgatcggccgcagggtagtgagggtaaggatacgatcctggcgcggtttgtagagcaactgaatgggcgtttacctctgctggcagcgggaaaaattacttcatcacaagcggctcaacagtctctggaggccggactgtcactggttgccataggccggacgattgtcatgaatcccaactggatggagctggtgcaggcaggccatgaggataaggtaaaaaacacgcttatcctgtcgcaacactcagacgaactggcgatccctgaaaaactatggcaagtgattcagaagacgcccggatggtttcctacataa

SEQ ID NO: 78967 - DNA, 834 bp, Citrobacter koseri
atgaatcgtgtttggtttataaccggtgcggcccgcggtatgggggtccatatagcgaaagccgctttgcagcagggagatcgtgtggtggcaacggggcgtaatatggacaaattacgccaaatattcagcacggtagcaccggaaaatattgcgctgctggagcttgatgttcgcgatgagcaccaggctaaggttgccgttgatgccgctattcgccgtttcgggcgtattgatgttctggttaacaacgcaggattctgcctgctgggtcgctttgaagaggcaaccgctgaacaaatagcgctgcaatttgccaccaacgtgttcggcacggccaatgtgctacgcgctgtgttaccggtcatgcgccagcagcgtagcggacgcattattaatacgtcctcgatcgcgggtgtcaaagcggtcgcaaacgccacattttactcagcttcgaaatttgccgttgaaggtatgaccctggcacttgccgatgaagttgcgccgcttggtattcatgtcaccgcaattgagcccggttttttccgcacagagtttctcagtaatagttcggcccactatggcgaaaaaaagattgaggactatgccgattatggcgatgcgcgtgagctgctggcatccgcagatggtcaacagcaaggggacccggccaaactcgcacaggtggtttgtcaggtggttggaatggagaacccaccccgacagctgctaataggaaatgacgctatcagttttgtaatgccttcgctggaagcccgtattaaagagatacgcgaatttgcggcgctgagtaataccaccgattttgattaa

SEQ ID NO: 78968 - DNA, 651 bp, Citrobacter koseri
gtgaaaaacatcattcaaaaagtcctggtacttggtgccagcgggcagattgcccgccatgttatcgaccaactggccgataaaccaggcgtaacacagacgttatttgcccgtcagccagaaaaaatcacccagcctcacccggtcaatagccggattatcatgggcgatgtgttaaaccatgcggcgctggaacaggccatggtgggtcaggatgtggtttacgccaatctgaccggggaggatttagatctacaggcgaaggcggtgattgcggcgatgaaagccactggcgtaagacgcctgattttcgtcctttctctcggtatctatgatgaagtcccgggaaaattcggtgagtggaataacgccattattggcgaacctctcagaccattccgccgtgcggctgatgcgattgaagcctccgggctggattacaccatcctgcgtccggcctggctgacggatgaagatacgattgattatgaactcactacccgcaatgagccgttcaaaggcacagttgtatcccgcaaaagtattgccgcattaattgccgatatgattgataaacctgaaaaacatattggtgaaaatatcggtgttaaccagcccgggaccgacggcgacaagccgtactttatgtaa

SEQ ID NO: 78969 - DNA, 933 bp, Citrobacter koseri
atgaaatatgttcaaatccagaatgccgatatggcctggcatgttgccgccaacgttcagtttccacctacgttcgatgagtcaaaacagtatccgacaattatcagcgtccacccttttggcagctgtaaggaacagacgtccggcaatgtctacggaaaagcgctggctgaagcaggctatgtcgtgatcgcctatgacgccagcttccagggggagtccggcggctctccacgctgggtggaggatccgactcagcgcgtggaagatatcagtcgggttattgattacgccgtcaccctgccgtatgtcgatgctgaacggattggcgtgctgggcatttgcggcggcggtggctatgccattaatgccgcactgacggagaaacgtattaaagctgtggtgagcatcaccggcgtaaatatcggtcgtctttttcgcgaaggcttcagtaattatgaccctattggcgcgctgaatgcgatggcggcacagcgtacaaatgaagcccgcgggggagaggttcaggttaatgaactgctcccagccagcccggaaatggcgaaggcaggtggacttaatgagcgtgacgtatttgaggcaacagactactacaaaacgccgcgcggccagcagccaggcggggcaacgcggatggtgttctcgcatgcgcagaaaacgctggcctgggatgccttcgcttttgcagaagtgttgctgacccagccagtaatggtggtggttggtgaaaaaacaggcgctttcggtgcttaccgtgacgggctggaaatctatggccgggctgtagcctcccgtgaccgtcagctggtctcattagccgatttttcgcattacgaactgtatgacaaaccggaagcggttcgtgaagcgatgtcaaaagtgcttccgttctttgccgcacatctggagtaa

SEQ ID NO: 78970 - DNA, 921 bp, Citrobacter koseri
atgaaccagaaaatcagcttcaccaacagcaatatcccgacaatttctttgtccgctgtactttatttcccacccgcatttgatgaaagccgcaagtacccggctattgtggtttctcatccagggggcggcgttaaggaacaaaccgccggtacctatgccgaaaaactggcagaaaaagggtttgtgacggtagcttacgatgcgtcttatcagggtgaaagtggcggagagccgcgccagctggaaaacccgtacatccgtaccgaagatgtcagtgcggtgattgattacctgaccacactgccttatgtcgacagcgcgaaaattggcgcgatgggaatttgcgccggtgcaggctataccgccaatgccgccattcaggatcgtcgcatcaaggccatcggaacggtcagcgccgttaatatcggctcgatgttccgtaatggctgggaaaacaatgtgaagtccattgatgcactgccgtatgttgaagccggttcaaatgcccgtagtaccgatatcagcagcagtgaatatgccaccatgccgctggctcccatgaaggagtctgatgctccaaatgaagagttgcgccaggcctgggagtattaccacacgccacgggcacagtatccgacggcccccggatacgccacgctgcgaagcctcaatcagatcattacctatgatgcttaccatatggcggaggtttacctgacccagccgctgcaaattgttgcgggtagcgcggcgggaagtaaatggatgagcgacgacctgtacgatcgcgcctcaggccaggacaagcggtaccacatggtcgaaggtgctaaccacatggacttgtatgacggtaaagcctacgtcgctgaagcagtttccgtattagccccattcttcgaggagacgctgtcatga

SEQ ID NO: 78971 - DNA, 930 bp, Citrobacter koseri
atgattaattgcccggataaaaacacaaagatgaaacgcgatgagatagcagatctgatggcatttgtggccgtcgccgaagagcgtagtttcacccgggctgctgcccgtctgggcatggcccagtcagcgttaagtcagatagttcgtcgcacggaagaacggttagggttacggcttttaacgcgaaccacacgcagcgtggtaccgacggaagcaggtgaacaacttttgtctgtccttggtccaatgcttcacgacatagactcgactctggcctcattaggtgaactgcgtgaccgcccctctggcacaatacgcattaccacagttgaacatgccgcaaagaccatattgttgcccgccatgcgcacgctgttgaaatcttaccctgacattaatgtgcagctccttatcgattacggcctgactgatgtcgtctctgagcgctttgatgctggcgttcgcctgggaggagagatggacaaggatatgattgctgtgcgaatcggacctgatattccgatggcgattgttggcgcgccggagtatctctcgcgtaaaggtattccagtgtctgtggcgcacctggtcgatcatcaggctattaatctgtaccttccttcatcgggcaccgcaaatcgctggagattagtgcgcggagggcgcgaagtcagggttcgcatggaaggacaacttctcttaaatacgatagacctgatcctcgatgcagctattgacgggcacggcctcgcgtatctgccttatgaccaggttcagcaggctattcaagaaaaaaaactgacccgcgttctggagaaatttacgccagacttaccagggtatcatctgtactacccacaccgccgccatgcgggttcggcattttctctgttaattgatgtgctgaagtataaaggggatgtttaa

SEQ ID NO: 78972 - DNA, 645 bp, Citrobacter koseri
atgaacaaagattcgtcttataacaatattggaattggacatttagcctggtgtgctttggttgctctcggcattcagcggcacgatcggcttgttactaccgaggcgcaggaaaacatatttctgatccgctggttggccgatgccagaaaacagaaaagattccccagaaatttaactgagcacattgattggctacttgctcagggacgtcgacttggcgttcgggcacgtctaaatcagaaactgcattatttatggcttataagcagcggcgatcttcacaatatgccggatctacttcgattgacctatgctatcgaaatggcaaaagctggcggttggcagtatgaccttgttgatgagaagaagatggcggctggtatgagcagattccagaatatgaattcgttttgcctgaaaagaacagctattgagaagggatttgattctaacgggaagcagatagccccacttcatattcgggtgtttggtcaagttgagaatctgctggctcttctggactgcttaggacttaaactcgacgcaatcgattcggatttaatgtgtatgacattccttagaggtagaggcttagtcagcaacacgataagtatcccagaaaatcgtgctattgacatttga

SEQ ID NO: 78973 - DNA, 561 bp, Citrobacter koseri
atgagcgttcaacaaaatactttaaatatcctgagcgagttgcagcaaaatgcgatgaagattgatgatgcccaggctgctcaattcgtcgcacagattaagaatgccaaacatatatttctgcagggcgcgggtcgtagcggcatcgccatccgcggctttgcaaaccgccttctccatctcggtttttcagtaagcgtagtgggcgaaatttcttctcctcataccaaaccgggcgacctggtcattattggctccggtagcggtgagaccggcagtctggtgagtctggcgcagagggccgtagcatgtggcgtggatgtggcgctcgtaacaatgaaagcggagtccacaatcggcaaactggccaaaagtactcttgtattgcctggaactgtgaaagaagacaacgatcgcgaagaaggtgctttttcgcagcctatgggatcggcttttgagcaactctgctttatcacctatgacgctatcgtgcttgagctgatggcccagctcggtgaaaccagcgacacgatgtttaagagacacgctgaccttgagtaa

SEQ ID NO: 78974 - DNA, 753 bp, Citrobacter koseri
atgagtaattttgaaggtaaagtcgtgctagtaaccggtggggcacatggaatcggtaaaggaattgctaagcaattcgcagaccgtggggctcatactgtcattgtcgattataacgaagaaaatggtaaaaagacggccgaagagttaactttcggtaatgttaaatccttattcgttaaaaccgatgtatccgatccgaaagctctggataacgttcgtgagcaggtttttcaaaccttcggacgtattgatattttggtattaaacgctggcgtggcgtttgctaataaggttaataacatcacttttgaagagtggaataaaacgattgcaattaaccttactggcctgtttaacaccgttaaagcattctacgacgactttactactaaccatggatctatcgtttatatctcatccggctcggcgctttccggtactggcggtggcgtgagttacccggccagcaaagctggcggtgaagggttgattcgtggtctggcaaaagaactgggacctaagggtgtcaatgttaatgctatcgctccacgcctgattgataccggtgaaatgatgcgcgtcaattatcctacccaggccgatcttgatgctgttctggaaaaaattccagtgcgccgccttggaaccattgacgatgtagcaaaccttgcaatctttttggctgataaagataactcgtacatccaggggcaaaccattctgatggatggtggtcgtaccatcgcttaa

SEQ ID NO: 78975 - DNA, 645 bp, Citrobacter koseri
atggcacaaattttaccatcagtatttggtgcaaacatattacgtttgcaggaagaaattcattttctggaaacagaaaaaacagaaattctgcatgttgatttaatggatggcacttatgtaagcaatattgctttcggtcctaaccaaattgcggcaatgaaaaaagccagttcaatgacatttgatgtgcatatgatgctggcagacccggaaagacatatcgatgatgttattaaaaccggggcggaaatgatttcagttcattatgaatcaacaccacatgtgcattatattatccagaagatcaagaaagccgggcgtaaagccggtgtggtactcaatccggggacgccggaacatgtaattgaatacctactggatgatattgattatattttgattatgaccatcaacccaggtcagcctggtcagacatttattgaaaaaagtctggagaagatcaggaatactaaagagatggttgccggacgcaatattcagattgaagttgatggcggcgttaatgctgaaattgctaaaaaggtaaaagaagcgggtgctgatttaattgttgttggtggcgcgttatttaatgatacaccgaaagaaagctatcaggcattaagggccgcgatccaatag

SEQ ID NO: 78976 - DNA, 1254 bp, Citrobacter koseri
atggaaatgttaaaaagcatcatgtttactattacaagcatgggcgctacagcaatattgccgcttgttattttccttttaggtctggtttttcgaatgaaagttggtgccgccattaaatctggcatcactgtaggtatcggtttcatcggtctgggactggttgttgggctgctaaacacagccctgcagccagcaattacgtattactcaaaaattggcagcgggttcaccgtggctgatattggatggcctgccgttggcgcagctgcgtgggttgccccgtttgccgcaatggttattcctattggcattatcctgaacctgatcctggttcgtctgaagcttaccaaaactcttaatgtggacatctggaactacatgcatttcctggttccgggggctcttgcgtatttcgtctttgacagctttttccttgggttgggtgtcgccgtggcactgagcgtagccgcactgtttattggcgatcttattgcgccaagatggcagaaatactacggcctggaggggacgacctgtaccacaatgatccacatcggatggacacttccatttgcatgggttgttaacaaaattatcgatttcattccgggtttaaacaagatggatgtggatttagaaagcgttcagaaacgactgggtgtattcggtgaacccgcgatcattggcgtgattgtcggttgtctcctgggattgttaaccaaacaacccattacaaccatcgtgccaatggcgatgggcgtggctggcgtcatggtgctgttgccaaaagtggttggagttcttatggaaggacttaacccgataggtaagagtgctaaagaaatcatgcaaaagcagatgggtaaagatgcggaactgaatatcgggatggactgcgctctggcacttggcgatccggcaactgtgactgtcaccgttattactatccctctgacaatgctttgtgcgctggttttaccgggtattcagatattcccaatcggcgtgctgatgtcaattatctacatgacgaccatgacagtcatggccagtaacggcaacgttattcgttcgattatctcaaccttactgttctgtgtggtggttatgtatctggggggatatgtcgcgcccggtgcaactcagttcctgaacggtgctggcgtcggcctgaatggccagggcacggacttcgtattaaccggcccatgggagattctgacctactggttgagcacagttactcattaa

SEQ ID NO: 78977 - DNA, 294 bp, Citrobacter koseri
atgattactatcctcgtagcctgcggaagcggtgtagcaacctccactctcgccgctgatgaagtgaaatcggtttgtgctgaatacggcattgccaactttaagattaataaatgcagcatgtccgaactggcctctgaaatgcaaagcgctgatgtggtcctgacgacgaataattataaaggtgatattggtaagccgcacatgagtgtcgcaggttttattaccggtattaacgaagccgcactgcgtaaaaaattaggtgaactgttaagcgaaatttccaaaggctaa

SEQ ID NO: 78978 - DNA, 450 bp, Citrobacter koseri
gtgggtgcaatttctatcaatgtcgcggatggggcggcatacaaaaattatgatgaagtgctggagcatattcacgagaaacatctggcggatgggattgtacgagagacttacctccaggcgttgcgtgaacgtgaagccgactatcctaccggaattttacttgatggctatgctgtcgccatcccacattgcgatagcctgcacgccgttagcccggcgatttatatcatccgtttgcctcaagaaatagaagttaatcaggctgatggtgatgaaaaattgtgggtccgcctggttgtcaacctggttgttacccaacctgcagatcaattgcagttgttgaaggcgctgtttaaccatcttcagttagctgatttttaccaccagatgctggagcttcctgctgaagaagcaaaggcattgtttattaacacgataattaaataa

SEQ ID NO: 78979 - DNA, 756 bp, Citrobacter koseri
atgtacctggttgaagaaaggagaaaattgatccttgaagagattatttcggcgggtaccgtgtacgttagcgaccttgccaaaaagtatgaggtcacttatgaaactatccgcaaagatctcacccatcttgaaaaaaaagggctgctggttaaaagccacggaggtgcaaccttaaagcagggggctgtcgaacatcctttccaggtcagggaaaaagaaaacagtactttcaaacaagccatagccagaaaagcgctggattttatcccccccaatagctcaatgatcattggtacagggagttctaactatgaactggcaaatctgttgtgcatgaaatctggttttaaaatttttaccgattctttgccggtggccagtgtgctgatcgagtcagataaccaggtctttttgttcggcggagagctgaggaaaaaaagctcttctgtctttggcgggtgggctgtgtcaatgattaatgatattaacgttgatctatgctttatcggcactgatggtttcaacaatatgacgggcccgtccactccgtcctcctcagatgcctttttggatcgaacgatcattgcccattccgagaagaaatatatcctgggcgattacactaagttccagcgaagcagcttatttaagatctgcgactggtctgagattaccgcgctgatcactaatgatattgctgataaagacggtgttgccgaagttgcgaagcatacgacagtggtaacttgttga

SEQ ID NO: 78980 - DNA, 537 bp, Citrobacter koseri
atgaaaacgaaaattgcaatcgcatgtgatgatgtagggtttgatcgtaaggaggagattaaaaagtaccttgaagaagagaaaaatgcagatgtcgtgtacgatcccgtaaaacgaaaagaagacggtttcaacaacttcgctcgtctggcggatgaaatggcaggtgttattcagcgggacgaatgccgccttggtatctacatttgcggaaccggaattggctttacttgccagataaataagcactgggggattcgtgctgttgccgtcaccaacccctactcagccaagcgagcaagactcagtaacaatgctcaggtgattggtcttggctgcagagttaatgatcttgaatacacaaaaatgatcgttgatgcctggtatgacaatgcgttcgactttgctactgcaagggaaaattccaaaaagaatctactcgaagcagaacgcagcgacaacgcattgctgacgaaacctgaagatgtgcgatggaatatgggtttcagaccagatgatgagaaatctgagggctaa

SEQ ID NO: 78981 - DNA, 1371 bp, Citrobacter koseri
atggaactgatcacacagtttatcaatgacctgggtaactttatttttataccggtcattttccttgtactgatgaaacttctggggcgtccgctgtcggagtgtatttcatcagccattaaagtcggcatcggttttattgcattaaccatgaccatcaagctgatgcttgaaaaaatgcagccagcagtgactgggcttgctgaggccactggttcttcactgagcgccattgatgttggcggcgcagccaccgccgtaatgggttttggttcaagtatgggggcgattatcatccctctgtgcgttgcggtgaatattgccatgctggtggcccgtctcacggactgtgtaaacgttgacgtgtttaaccttcaccagaatgcctctatgggggcaatcgttggcgtttactccggcagcttcctttacggtgttcttacggctgcattgttccatgtctgggcgcttattgcggctgacttgggtgcgaaaaacaacgaaaaattcttcaatctgccaaaaggcgttgccatctcccacccggttgcaaacacctatttgctgttcgcttatccgtttaactggatatacgatcgcatccctggattccgtaatctgaacgttacggcggaaagcattcagaaacgttttggtatccttggcgatccgaccatggttggtttcattattggtattcttcttggcttctgtggttatggttgggaatctccatatcacaccattatcgccagcctgcagttgggtatgtaccttgccgctgtgatgctcctgctgccacgcatgacctcaatcatgatggaaggtctggttccgctgtccaacgtggcacgtaagaaactggttaaacgtttcccggatcgtgagatcactgtcgggatggataccgcactgattgttggtcatccttcagttatcgcgcctgcactgctgctgatcccggtcattgttatcctcgccgttgtccttcccggcaaccgagtgatgcctctgggagacctctcgcagttcgtattctttattgcgtgcatggtacctgtttttaatggcaacattattcgtacctgggtgacttccatcatcctgtttggcggcggcttatacatcgcttcctggatggctccggcaacgaatgaagtgttccagaaattcggcaccaatcctgatgcaagcgtgatgtactcatcgcttaacccgtcagctaacccgttcacaggtctctttgctggactcagccatattggtatcgcaggctatgctctcgccgctgtgttgctgctgtccgtaggctacttactcaaacagaaagcgcgtcgtcagttgaaaactgagacagaagaaacggcttaa

SEQ ID NO: 78982 - DNA, 294 bp, Citrobacter koseri
atgaaaaagattttagttgtatgcggaaacggtattgcctcttcttccattatggtttctgtcctgcaggactacctgaaagaacagaatatcaaagcgcaggtagataaatcctcattgatggcttgtaccactgacacgtttaacagctatgacctgattgtttcttcaaccaagctggataacccaggcatcactactcgtgtgattgtaggagcaggactgttaacgggtctgggcgaagatgagatttttgatgctgttaaagaagaaatgcttaaccaggtgaaatga

SEQ ID NO: 78983 - DNA, 459 bp, Citrobacter koseri
atgaaacttgagatactggtaaatgacgtcgagggtacgatcgctgactggcatgcagcaattgagtttgcaggccagaagcttttggaaaaaggctatatcactcccgagtatattcaggcctgcctggagcgtgagaagacttatccaactggtttattgatggcaaacggtcagggcattgccatcccacatgcagactatacgctggtaaaaaccaacagcataagcattgtgcgttttgataaaggagtcgtgtttggtcagatggaagatgctgacctcacagtggaatgcagcattatgtttaatctcgcattcgcaaccagcgatcagcatatgtctgtgctgcgccgcctctttacgctcttccaggatatttcgttcatcgagtcgtgccgtaaccttaaaacacacgaagtcgggaaatatgttgaagagatgcttgccgcatcctga

SEQ ID NO: 78984 - DNA, 606 bp, Citrobacter koseri
atgttgaagagatgcttgccgcatcctgataaacaaaaggcagatatcccctatctgcctttttttaataaaagaatgaccatcatggaaaaatactccctcgttttgcacgaactatcctcacttgtggataaaatcgatgagaaagaatttaactcactcgttgattctattatcactgccggtcatgtatttcttgccggtgctggacgttcaggacaaatgataaatgcttttgccaaccgactgatgcaccttggcctgtccgtcagcgtggttggagaaatcagttctccacattctcgcaaaaaagacctgatgatcgttggctcaggttccggagaaacccaacgcctgatcaaccaggtgaaaatagctaagaataatggcgtgtatatcgcgctcatcactaccgcaccagattcaactctggcgaccctggcggatcacatactcattatcccggcaggttacagcgcccaaccgatgggctctcttttcgaacaggcttccctgctgacctatgacactattgttctgtcattaatggccaatcttaatgaaacgagtcagacgatgaaggaacgccacgccgatattgaataa

SEQ ID NO: 78985 - DNA, 966 bp, Citrobacter koseri
atgccaaaagagaacaaaaatccgaagctgcgcaactacgatcctcgttttatctactctcttgttgttaagcgttacttctctgagatgaagacgaaggtagaaattgcagaggagctcggtctgtctcgattcaaagttgcacgcctgattgatgaagccattgcacaagagtatgtaaaatttaccttccctaaacagcaggctcttgatgaggaaatagcgcaaaatctctgtaagaaatacggattgcaggatgcagttgtgctttccgtttccgagtcctggtcttctcaggaacaattaaacgtcaaactgggagggataacggcgacctacttgagtgagattctcaaagagggtatgaagtttggtctggcctgggggcgggttctttcaagtacggtgagtcaactcacgacattacctgttctggatgtcgttcagctttctggcgttcatcctggtattgagtttagtcagggaccgattgatctaatacacaaagttgccgcaatttcccacggaagagcgcacccaatgtatgtacccatgtgggtggatgacgaaagtttagcccagaaactcgctgacgatcaggctgttcaggatacgcaaaaattttactcaaatatggatgtcgttattacgggcattggagcctggaaaacgggttcttccagtctatgcgatatattccctgaagcgtggcgtgaggctttaataagccaggacattacagctgatgtatgcgtaaccctggtcaatagcaaaggggaaattctggatagtccgctgaaccgcctgggtttcggcattacgacagatcaattacgcgccacaaagaaactgattggtgtagcgggaggggacgaaaaatatgaaggtatagttgcctctctcaaatcaggtcttctgaatgtgttgattactgattttgatacggctattaaacttctggattaa

SEQ ID NO: 78986 - DNA, 987 bp, Citrobacter koseri
atggctaacggtaaggttctcagacagcttataaaagctggagcgacaggtgatgtcgcggccttccgtcgtgtttcggaagtgatcattgaagaagaacgacaaaagcaacatcatcttcttgccaatgatcttgaacatattctttatggtgatcatgctatacaaacctctcgagtgcccgctgcgcctccagtgcctgtggacaaagagcgaggtttacctttactagatattagacagccaagtcgttctttagatgaaatcgtgctacctgaatcaagttcagatgctgtcgaagagatacttgaagaaaatcgtagggctgatgtgttacgcacttatggaatgaaagccatcagtaaagttattttttttggtccccctgggtgcggtaaaactcttgctgcagaagtagtggcttgtgaattggatatgccattagccatcgtcaggcttgatactctggtttcttcttatcttggtgaaactgctgctaacttacgccaaatctttgattttatctctcagtatccaatggttgtactgttcgatgagtttgatgctataggtaaagaacgtggggatagtggggatcatggtgagttaagacgagttgtgaatgctgttttacaaatgatggatgcataccaaggaaaaagcttaattcttgcagcgacaaaccatgaacatattctagatagtgctatttggaggcgttttgacgatgctatcgaatttccattacccgataaacatcagttgttagaattgatgaagctcaagcttcgtggtattcgccgccagtttgagcttgaagatgatgaggttctctcattatttattgggaaaagtggtgctgatttagagcggattgtaagacgtgcaatcaaaagaatgattttacgtagccaagagtttttgactctcaaagatcttaagaatgcacttttacgggaaaatataaacaaaactcgtcagggataa

SEQ ID NO: 78987 - DNA, 2391 bp, Citrobacter koseri
atgacggaacaatatcaacatctaagcattgctaaagaatctcttcagaaccctagacgcacacgccagttcaagattccgagaacacagcgtgctgatttgcgactacatggacgcattttgtctgagcaattacgaagtattacacaattagctactccacaaattccgggaaaggataatgatggccggtatatgctgaagttacagtataccgggatgttagatattgctcatctggacaggcatggaatcgagttcgtcagtcaagaagataaaacaatatgcattgcctttgctgatgaacgaggaatcgctctttttgaggagcacctttcacagctaggtcatggtcatattacctaccagcagattttaaccgcattggatagtgttgatgtttggactaatgaggatcgaaaaagttggtcaattcagcaatatggttttccagagtcagatgttttcggtctagatattgagctttggccggtagaaacgacaatgcatccttcacgaactaggatctgtcgagagtttgaagattggcttcatgaaaatgcgattcatcgtttggatcgaataaaccttgatagcttattaatgtatcgggttagagtcaatttagaacaagctgaaaagctgctaaaccaccgtgatgttcgaatggtggaccgtcttcctgtcagtggaatctcgtatgagaaactgaacaaagatatcaattttatccccgaatatatcccatctccattacctaatgccgcaaaagtttgcatccttgatagcggaattaataccgcacatccattattgcgtagtgcaatagctgagagtgcctgcttcgtggataatgaagatgaatctgaccattttggacatggtactgctgttgcaggtattgccctatatggtgatgttgaggcttgcgatgctagtaatttctggcaaccgtcaatgtggttatataatggaaaaattcttaatgcccagggggaatttgatacggctacgattgaaacaaccttgaccgaagcagtagaatatttcgttggtctaggatgtcgtatttttaacttatcacttggcaatgcaaatgcaccttacgatggaaagcacatccgaggtattgcttatgtgcttgatgtgctggcgaggcgtcacaatattcttattgtagtttccgcaggtaattttaatggtagcagcgaccctgatgttccagcagaaagttggcggacagagtatcccagctatttaatccacgatagctcagttattattgatccagcgcccgcactcaatgttctaacggcaggaagttatgcaaggcataatgcaacatttgacgctcaacgtcgtgctgatgaaattagccatttaagccctgcaggtgaatatcaaccttcgccattcacgcggcatggaccttctgtgaaaggtgcatttaaaccagaaatagttgcgcacggtggaaactttgcggcacctatgcgtaatgttggaggtcaatggcgacagcatgccagaggacttggtgtgctaagctgccaccatcaattccaagggagtacacttttctctgaacaaagtggaactagtttttctgcaccttatattacgcacctcgctgcacgtttactcaatgaatatccagatatgtctgctaatatgttgcgagctatgcttgtcaatcacgctgcgctgacaccgcagatggagaatacattctcagaagaggttacagaaaattataaatctgaaccttcaacccgaaatcgtagtgttattcgagatgtcgttggatatggaattgttgaggaagatggtttatatcgctcgtccgaggaagtagttgttatgatgtgtgaagagcaaatctctgatgacactcatcaattctttgagcttccattacctacatcttttttaagaactcagcgagcagtaagagaactgcacattactttagcgtattcaccagtagtcaggacaacgcgattagattatacagcaacacaaatatcttacaggcttgttagaggttcttcgttgcaagatgttcagcaatactttaatcatgatatacaagatggtactgattctaggaatgacgatgcggtcagcaatcgttctattactgcacaacaacgcgatcatggtacagtacaatcctctagttggacttttaagcaaaggtctccagatgaaaagtggtttgtggtcgtaactagaaatgatcgtgagtggggcactccgcttaatagccaatatgaaccttatgcattagttgttactgcaacggatagagaaaacgctgaagccaatctttacagtgaaattgaggcacgaattcgtgagcaggagcgctccagggctcgggtaaattaa

SEQ ID NO: 78988 - DNA, 1422 bp, Citrobacter koseri
atgactccactctctccttatattttcgatgtatatgccttatcgctgcctaaaggtctgggatttggtgccaacaagcccgtaagcgtatgggccagtagcgatcatctaacagttggcgcattgttacagaaccatcacagcaggaagtatggagtacttatcatgcgacgtcgtgaggacgaggtgtgggctgtactgcgtaaagaatcagaatcacttagtaacgatgaggctttggcaatcatacgccaggcatgcgacgaggctgcatgcctcgtccctatacctcccagcattcgcaggcgtgcccctttatgggataccaagggatatgaaccaagtggcattttcaaattgctagcacatcctgccagacagcgtggtgcatggatgttgaatcagttatatcttgctatgcctaatccggaccccaactgggctagagattgtcagactggcaattttcacaccagactatgggaagtcctgcttctggctagtttccgcgaacagggattgttggtgactcaagaatacccttcaccagacttttatgtagcgaatgagttgggtggagatgcttgggttgaagcagtaacagtcaatccatcggtgcgatacgaccatgctaacggcggagaggtccagtttcctcgggacagacgtgaaagagtacttggaatagcagctgagcgttatgctaggacattacgaaacaaattgtgcaagaactacacaagcttacctcatgttattggtaaaccatttgctattgcaatcgccgacttccattcaccaggatcaatgatgtggagccgtgaagcccttatatcttatctctatggattctatgccagagaagtcgatatcgaggggaaggttgttgctttagccgaacctatttgtaaccttccaggtgatcccaatatacaggctggtttatttaccttttgtgaaaatgaaacactgtctgccattattttttcgaacgcggcgactttatctaagttgagccgagtgcctatgtcattcgacggtaaagacgaagattatcggtatgtaagaattggtgagttctatgatgatactccgggggtacttcgtggtattcccttctgcatggatgtaaatagcgaccaatatcgtagtttgtggaaaccatatggctatgaaccatggactgctgagatcgaagtgttccataatccgaatgcacttcatccaataaatcctgcattgttgcctgaagcaagtcattggcttcagagcaacaatgagttcgtttgtaagcgattctttaagaagggcatcttgagtagtcgaactttgatccaagattcatactcacaactctctgaagttgattggcaggtattccaagtcactaataatactgatattgatgagataatggtttag

SEQ ID NO: 78989 - DNA, 837 bp, Citrobacter koseri
ttgaaatacttagaagataagataatagatttactaaataaagcttatgagttagaaccattagttataaaacatcagatggatgcaacagcatggtctaactcaccaagtgagtatcctgattatcaagagtggattaatgatggtcacgataaatatgagagtccattttttgatattttaaagtcaatttatttaagtgtgtctctttatgtcgaaaaaaacaatgttcctaaatatctatctatttttcatgatatatttggggaagactatgagaggtgcaagtattataatgaatttagttatgatgattattggactggggtattcaataatacgtttttattaaagatgaaccaatttttaggtccttttgaattcttcgactctaatagaaaagaaacagggttgctttatctcgagaatatactctctggaacagagttttaccttaacgcattgggaataacccctgcaaaggaatcagatgtttatcaacctataaagcagttagttaatgttgttttcccttcttcaactaatgcaagtagcattttcctgaagcccaataagcaatataaacctgatattttagtgcctgaactaaaggccgcaattgaatataaatatgcgaatagtaaagaaagattaaacaagaacatcgaagaggtagtgtctgatacgcagggatacactaatgatgctaattattcttttttctatgctgttttttatgtaactcaagattttataggtgaaaataggtttatggagacgtggaaacaacataacttcccaaaaaactggattcctatttatatagtcggacattaa

SEQ ID NO: 78990 - DNA, 1230 bp, Citrobacter koseri
atgaagcttaatgcacgacaggtagatgctgctaaacccagagagaaaacctataagctagcagatggtgcaggcttgtatctcgaagttgttccttctggttctcgatactggcggatgaaatatcgcttcaatggaaaagagaagcgtatggcttttggtgtctatccggcagtgtcccttgcacaagcgagggcactacgtgatgaagccaagaaaaagctggccgaaggtatcgatccatcgtttgccaagaaagaagaaaagctggttcgcgacgtgcagctcaataatacgtttcaggctgtggcgcttgagtggcacggtacgaaggtgagccggtggtcagaaggctatgcatccgacattatcgaagctttcaataaagatattttcccctatatcggccaactgccggtgaatgacatcaagcctttggttctgctgaatgtgctacgtcgaatggaaagccgtggcgcgacagagaaggccaagaaggttcgccagcgttgcagtgaagtctttcgttacgccatcgttaccggtcgtgcggaatacaatcctgcagcggatctaaccagcgcaatgtcagggcatgaatcgaagcattatcccttccttaccgttgaggagttaccagacttctttaaagctctctctggctatacaggcagcccgttagttgttcttgccgctcgtttgctgatccttacgggagttcgtactggcgagctccgaggtgctttctggagtgaatttgatcttgagaaagcggtgtgggaaattcctgccgaccgaatgaagatgaaacgacctcaccttgtccccctctctacccaagcgctggaaatcgtacagcaactcaaagtgatgtcagggcaatatccactggttttcccgggacgtaatgatccccgcaagacgatgagtgaagcgagtattaatcaggtgtttaagcggattggatacacggggaaggtaacggggcatggcttccgccacacgatgagtacaattttgcatgaggaagggttcaatacggcatggattgaaacccagcttgcgcatgtcgataagaatgcgatacgtgggacgtacaaccatgcgttgtatctggaaggtaggagggagatgatgcagtggtatgcggattatattaacagcattggagaattgaatacttatggtgggcttataataccagcttcaaatttatccatttattcatag

SEQ ID NO: 78991 - DNA, 165 bp, Citrobacter koseri
atgtatgcctcccaccttagcagccgccagctaaatatcgaagttgacgaacagcatcaattccctgattcacaacacagagtttttaaatggttcgagcctgaagagctcttcgccagtaacgatgtccatcagtatactaagaattatttcctgccaaggtaa

SEQ ID NO: 78992 - DNA, 1407 bp, Citrobacter koseri
atgttacttccagtcatcatggccggtggctccgggactcggctatggccgctgtcacgtacgctttatccaaaacaattcctctcactaaatggctgcctgacaatgttacaagagacgttgcgtcgtcttgataatgttgaacatacacctgcgttgatcatttgtaatgaatctcatcggttcatcgtagcggagcaattacgcaaagaggggttgtcacacagcgggatcatgcttgaaccagatggtcgtaacactgccccagcagttgcgctggccgctttacaagcgctttcaaaagatgaagatccaaccctcctggtgcttgcagcggatcatgaaattcgtgatgaagagagctttattcgaagtcttgaggccgcacagcaatttgccagtgaaggcaagcttgtgacatttggtgttgtgcccacctctgccgaaacgggatatggctatattaaaacgggcgataaactaaaaggcgaagggtatcaggttgctgcctttgttgaaaaacccaatgcggaagtggctaaccgctacttcactgacggaggatatctctggaatagtggaatgttcatgtttaaagcttcagtctttataaatgagctgcaaaagtttcgcccggatattctggcttcttgtaaacagtctttagcttcggcgacacaggatcttgattttattcggcttgataacgcttcatttaaaagctgtcctgaagaatcgatagactatgcggtgatggaaaaaacgtcagaagcgatcgttgttccgctggatgctaaatggagcgacgtcggctcctggtctgccctgtgggatatcagccagaaagacgagtacggaaacacaatccgcggtgacatcattgtcgaagactcatctaatagctatctctattctcaacatcgcctgatcggcgtggtgggtgttgaggatatggttgttgttgaaacaaaagatgcgattctggttgctcataaagataaagtgcagcaggtcaaaaaaattgtttcccggctcaaagaaactaaccggtcagaatatttacagcatcgggaaattttccgcccctggggcagccatgatactatagccgaaggtcagcgttatcaggttaaacatgtcatcgtattgcctggacagattacagctaaacagattcattatcacagaacagagcattgggtagtcgtatctggaacagctaaagttcatctcgaagaaaaaacatacttggtttcagaaaacgaatccacttacattcccgttggcaccccacatgcaatcgaaaatcctggcaagattccattggaaataattgaagtacgttccggagtttatcttgaagaggatgatgtcgtgcgagtatcttcctcaggagttggttattaa

SEQ ID NO: 78993 - DNA, 765 bp, Citrobacter koseri
  misc_feature (454)..(463): n is a, c, g, or t
atgcgagtatcaattatcacagccacttataatagtgagaaaactctcgctgatacattattttcattagaaaatcagacatatcaaaatattgagtacattattgttgatggtgcttcaaaagataacactttagatcttgtccgtgagaaatgtagtagggtaagtaaaattatcagcgagtcggacaaaggtatctatgatgctctaaataagggtatcaatgccgcaacgggtgatattattggttttttacactccgatgatatgctcgcctatgataatgtaatcgaagatatcgtaaatgcctttaagtcgagtggtagtgatgcagtatatggtgatcttgaatacgtcggtcaggaagacaccggcaagcgaattcgcctgtggaaaagtggaatattcagccgtaacaaaatgaagctgggttggatgccgccacatccgtctnnnnnnnnnnatccgtctttttatatgaaacgttcatgttatcaagagcatggaggtttttcgttaagttatcgcatatctgctgattacgattctttattacgttatatctataccaagcgtgttactgtttcatatctgccaaaaatactggtcaaaatgcgcgtaggtggaataagcaaccgttcgttaagtactatgttttgtaaatcaaaggaagatataaagattatgaagagtaacggtattgtatggccgcttgcgctcgcatttaaaaatctttcgaaacttccgcagtttatcaagaagtaa

SEQ ID NO: 78994 - DNA, 1335 bp, Citrobacter koseri
atgaaaaaattctattttatttttttattattcacgatttctgttaatttattagcttatttatttcctcagtcctttgtcgtgctggatgatggttattatattttctgcctgatatcatatattattcttgtttttctaagctcttatgacaaaaaagaaatcactacactactggtttttcaggcaccgtttggtttatttattcttggccgatttattggccattatctcgatcccggacttaaaattgagtcaatagattttttctataacataaatctgagtagtgaagaagtaattaagtacctttcagtctatatgctgtttttcgatatggtatttttaggctatttgataccgccatttagagtgggaaatgcactgttcaaacttgaaattaacaaagatattatcagctatttctcatatttgattatcgtaataactgttattggcatttttcttgttctgaaagacctttatgccaccgttagccagtacggatacgcagcgttatatattgtaaagaaagaaaatgccaatgattcttccagcattttcattacgctgctactggttacgattggtttggttgctaaagagaattgccggaggcctttaaatatcctgatgattgtcttattttgctatagctttgcgcttttgttcatgggggcgcgtggcccaatgatgacatacataatattatggctctggctgtacaagaaaaatatcaatattgttaagctggggattgctgctttaattatactggcgagcgtgcagtatatgagcgcaatgatgagaacgacaagttcgcaatataatatgctggcgaaaattctctatgatatggggacaacatttattgttctgccgtttggttcgtatatttcagactggcctggtgtagcgttagttcaaaatttcattcccatggcatcacggttagcttcattcttcatcgacttcaatccctatgatgctaacctcgcaaattaccttggtttttatctgaatccagaattgtactggaaaggggttggtctggggtggactgtcgtactggacttttccatatatgcgcaggggagtattattctgctcgctctctttgcaataatatttggtattgtgctgcgtaacttggatggcttctcttcaagtaacagtatcaagtatggattggctacgacgattatcttaccgttaggtttcctgtatcgatccggattattttctgtcgtcccccttgctgtatattttttaatgatgcttcttattctttctttcgtttcgactctgattaggcggattaactttggcaattaa

SEQ ID NO: 78995 - DNA, 525 bp, Citrobacter koseri
atgaagtcaaaacgcgaagtcgtcattgttagcctggtactgctgatatgtggttatctgctttggactcagcgaccggtgactatatttcgggctgaagtcggactcgaagatgaccctatgtatttacatggactttataccagcagtaaacgagggtttattgacaaggagtggtatgatattgcggttgaccacctggcattaaccgaatgggggcggattcactggtatttggaccacaaagctgaacttaagagaaaataccgtataccaacgagtacctcatacagtattgcttttttgggtattggtagcggatttatcgatattgataagtcaggcgatagcgatctgtattgtttctccccaaaaaaagatacaaaagaaaattgtatcgaaaaaaatatgctcctggaggtggatttcgatgcaggaagttatgagcgattttctttcggtgacagtgagtattactggataaccatgccggacgggaagcttgttagaataaaaagcgcataa

SEQ ID NO: 78996 - DNA, 1023 bp, Citrobacter koseri
atgactatcacgactgtcggtatcgatcttgctaaaaatgtgtttgctgttcacggtgttgatcaaaatggtagaactgttctggttaagcctaaagtatcgcgtgctgcacttcctgagttaattgcaagtttgcctccctgtgttatcgggatggaagcatgctccggggctcactactgggcaagattgtttcggcagtatggtcatgagccacgtctgatggctgctaagtttgtatcgccttatcgtatggccggaaaatcaggaaaaaatgatgcagctgatgctcaggctatctgtgaagctgttcgtcgtccgcatatgcggttcgtaccagtgaaagacgaaagccagcaggccatgcagtgtttacatcgtacccgtcagggttttatcgaagagaaaacagcaacgtataatcgtctgcgaggattgatatctgaattcggtgtcatcgcgccacaaagtgctgatgccctgcgccacatggtttctgtgcagaagagctctttaccgcttcaggttcagcaatgtgttgatgatttgatggaacacgttgatcgcattgaagctaacatcactgaatatgaccgaattttgtcccacatagccaaaacagatcatcgcagtcagcggctgatggagctaaagggcgttggtcccacaacggcctgtgcactggtcgccagtatcggtaatgcacatgattttaaaaatggacgtcaactggcagcctggctggggctgacgccatcacaatacagcagcgggggaaagtcgaaactcggcaggatcacaaaagccggtgattcgtatctgcgaacgcttctggttcagggggctcgttcagtgcttattggcgccgggaaaaggactgactcattcagccgttgggtttgtatgttggttgagcgcagagggtactggcgggctgttgtggccatcgccgccaaaaatgcgcggctgtgttgggcatcactacattacggtgatgatttccggctgtactcagtcaactaa

SEQ ID NO: 78997 - DNA, 510 bp, Citrobacter koseri
atgattggtatctacgagcattcgagcgcgggcagagatatttatccacttattttcaagcaattaggtgcagaaattatctcattagggcgtagcgatgagtttgtgcctattgataccgaggccgtcagtgataaagatcgggcgctggcgcaaaaatgggtgcacgagtatcagcttgatgctattttttctactgatggagatggtgatcgtccccttatctccgatgaaaatggtgaatggctaagaggtgatatccttggccttttggcttcacttcaactgaatattcaggctttagctgttccgcttagttgcaatacggctattgaattaacttctcagttcaggaaagtagaacgtacacggattggatctccgtatgttatttcagcttttgctgacttaaaggattatcagtctgttgccggttttgaggccaatggcggtttccttttggcttctgatatcaatgtgaacagctcagttttaagagctttgccataa

SEQ ID NO: 78998 - DNA, 186 bp, Citrobacter koseri
atggagtttcagactatgaaaaagcgtcacaaaacgatgaggcaatgtgaatttatttcaagggtgatgaatttttctcggttgtcagtgagcaggttgcatgtcatttttagacgcatagccatccagaagtctaagcttcaaataataaattatcacgtcaggcaactaacgccgggtgaatga

SEQ ID NO: 78999 - DNA, 4035 bp, Citrobacter koseri
atgaattcaaccttctatcttgaacgtaattttacgcacggtgacaggacgtacacagagacagagttgctggcggcatcaacgcacattgttgtgttagcagaacccggcggcgggaaaacggagctgatgaaaagcatcgctcagaaactgaacacttctgtcttaaatgccagcgtatttgcttacgtgggagcagataaagaaaatagcccactggtaattgatgccgttgatgaggtcgccaggatcgatcaatcaggtattcataaactccttgcgctagccagaacatcaaaaccaactcgcgtaatcatgtcgagcaggtcaagcgaatgggggctggcctctaccggtatttttgagaaatttcttggtttctcccctatgattgtgaggctgagagaatttgatcaaaacgaacaacacgccatctttaagcaccatgcgccagaagaagacttctttacattccagaccgaagtaacacagtttagtttagaaatgttgttaccaaaccctcagtttctgaaaatgttcaccgatgcctatttagaaagtggcaggcgatttgctgacaaacgttcaatctttgctttagcggtcgaacgactggctaaggaagtcaacccagatatcccgaaagcctctatatctctttcagttgcacagaagatttcattttctgccgaggtttatgtcaaacttctgttgtcgggcgcagagggagtcagcaccatcgacgcgacggcaagccggatgtatcccatgctgccagcattatttagcggcagtactgactgttacgacatattgtcaactcagcttttcaaacccggcgataaggaagaccagcaccgcccggttcataagatcgtcgctgaatactgcgcagcggattatcttattaaacgaataaccgacccaggggatgttctcactttaacaaagtgcttgcctgttattgcaccgaacggtactgccagggatgagttgagaggtctgctcggatggatggcagcattaggcaacaagtcagtacaggaatccattattgagcttgacgcctatgcggttctcgcaaacggcgatccatcacaacttgaacgctcatcgaaacgacaacttcttcatcgactcaaagagattgaagccgcagacccctactttcgtcggagcgatttctggcgtcggttcagcgcggctggttttttcacgcaagacgttattgaagaaataaagcctcttttaacgatgggtaatgatggtcatttacgtgatttaattttagaacttctgacagactcaccggtaaactgtcagttgacgcctgaattaagtctgcttaccttaaaccctaacgagtctgaacacattcgtaccttagcaagtagatgcttactcaatgtcaaagaatacgatttcattggcgctttagccgttttgatttttgaggccagtaatatttcactcaatattgcagctaaagccatcgaagtcaccgggccagaaaaatttaaccacacatatctctctggattcttacgcgtctgtgcgaacctctaccctgctcacaaagaacaatttgaaagagtggtcggctctcgttattttattaaaaagctcatttcctgtttttcacaacatacactcgaatctcttctggatgagctaacccataaccttcattgccactgtgggaaaaaatcctatgaatgtgattgtcgcaatgggataagcaagatcgtcggttcaatggtcgatcgctattttaaactgactcaagcacagtttgaccctgtcaggatctggcaatggataggtaatctcaattttcatcgccaatgccaacccgatcaaagcagatcggtacaggtgcttcgggaaaatgacacacttcgtcaggagatcattgcttatgtattcgggccattaacggatcgtaaagaaatattcaacataagagtagaaaaattcgacggacacctgcactcacattcaggcctacatttatggaggaatgactataaattcatcctcaatctggcgtttgaaacagataacgttgacctgtgggcgagttttcttgtcaaccatcaacgttacaaaaacaaggaagaatatggccctgatgatttgcggacacaaatgcgtcagcacgccctttccaaacccgcatttatgcgcgaatgggcccgatacaacaatgcaatgaaattatccgaacaggagcaccagttatggagattcagacatagccgaagcaggaaacgccatgacaaaaaacaacgagagattcacgctaaaaacataaaatttgttaatgaaaacagagatgttgtagaacgtggtcgtcactggagttgtctggtgcgctttgcagaacttgtgctcatgcatccagaaagaattgaattagaatttggtaacgagaaactggttcggactgcgttaagaaattgtctggattttattactcccgtggttcccaccctacccgaactagcggctctacaatgtgaatctaagcacaggtattctgagacagttttatatgcagcctgtctggagattttacgtgcagaaggcaatcttgaatgcgtcaataccgaattgcttacagcattaagaaccaacattcacatgggatatgactcagtttcgagggaagaacgtgacgctctacagactgaaatagaccgcctcatttttcctgatagtgaaagtgctgaaaaatatctccagcaatacgttgaaccccaactcactcaaccatgccctcaccctgaaatctggatgttaagtggagaagaggtctttcgtcattcacgcgctaaactttctattgaatggcttcgtcgttttactgatttatcccttaactcagtagatacactttttgaaattgctgctcaatacggcgatcgcgaggatttaaaagagattattgcagagcgttgctcagatatgatgtcaggctggcctaatccgacagaaaatgaggatattgaacgcaagcgaatattctggatggtacgtgagttctactttctggagaatattacggatacttattgggcatggctaaaatctgacaaagataatttactgcatttttatgaacattctgggcgcatgagccgaagtgagcaccgtgcctggccggaactgacctcaatcaaaattgaagccattttagatgctttcattgaacaatggtcgcgcgttgacctaccggatcattgggacagtgatagtccagaagaggaaaaagcctaccgctttttgactgatttaatttggtcaattgaatcagatattcctgacaatgcaatacccgtactgggtcgccttcttgccgatccacgtttcacgagccagcataaaggactgcaaagtatatatgctggtcagctcaggaaaaaagcactcagggattttgaaccaccaacaccagatgaaatagttcaaaatctggattgtgattcagtggttactgttgaaagcctgcgtcaattagttcttcaggagcttaatgatttccagaaagcgattgatggcggggagtttaactcagtagatcgcttctatgagaaaaatgaacgccttgatgaggtaaagtccacagagattattgcggaacgcctgaatttaagacttcagcctcagggcatctctataactcctgagcatcagttgaaagggaaaaacaggagtgatttcacggcatctaaattgattggcggaagaagacgactgctcgttacggaagtcaaaggccagtggcatagagagttatattctgccgcttcagcccaactctatgaccgttatgccattcatcctgatgccgagcagcagggtatctttcttgtcatatggtttggagaaagcgaaaccgttgctggccgcaaaactcacggaattaaaaccgctcaggagcttaaaatcagtattgaagcagtattaccggccgatctccgtagtttaattgatgttttcgttttagatgttgcacggcgcagtaaacattaa

SEQ ID NO: 79000 - DNA, 216 bp, Citrobacter koseri
atgaagaggttgccggacggcagaattgggtgggggccctgccagtcaactataaaccttatttttcaatgcaatggaggcaagtggaacacattatttgtaccacctgaaatgagaatgagcaagcaggtttaccgccagcaacttctccttccattcattgcgcaacagtccatctctgtcacgcaataccatcacccgcctgtgctgctctga

SEQ ID NO: 79001 - DNA, 369 bp, Citrobacter koseri
atgaaaactctatctgctacaatttcgcgggcggtgaagccctgtctgtcgccagtggctgtctggcaaatgttactgacacgcctgctggaacaacactatggcctgacactgaacgacacgccgttcagtgatgaaactgttattaaggaacatattgatgccgggattaccctggccgatgcagtcaacttcctggtagataagtacggactggttcgtatcgatcgcagaggatttagctcacagggacaagagccatatttgaccgtgacagatatccttcatgccaggaaagcatgcggattaatgaacagttgttcttatcgggaagtaagtaataatgttcttagccgatcgcgtcagtga

SEQ ID NO: 79002 - DNA, 327 bp, Citrobacter koseri
atgtcattaatatcagcccatgaatgggggctaaaaagggatattgttccacggtttggagccaggttaattcaggagggcaaccggctgcactatctggctgaccgggcgggtattaccggtaagtttaatgatgccgaatgcctgaagttggatgacgcatttccacattttatcagtcagatggaatcgatactgaccactggtgaaatgaatccccgccatgcccactgtgtcaccctgtaccacaacggtttcacctgcgaagccgatacccttggtagttgcggctacgtatacatcgccatttatctcactcaacgctaa

SEQ ID NO: 79003 - DNA, 471 bp, Citrobacter koseri
atgcctgcgatcaatttatcccccgtatttccagcaaacgagcagcgagtcatccggcgagcattacgtctgttggagaagtatcagcgccagccgagtgagtcatttacctccaccagcctcaccaaaaactggctacaactacagatggctcatctggagcgggaagtcttcatcgtgatgtatctcgacaatcagcactgtctgctggagcgagaaacgctgtttaccggcacgcttagccataccgaagtacatccccgcgaagtggtcaaatcagccctgaaacacaacgccgcggcggtcattctggcgcataaccatccttccggcacgacagaaatcagcctgcaggacaaacatatcactcagcggattatgaaagccctggcattggttgaagtgcgagtgctggatcatcttgtggtgggaagcgaggtaatgtcatttgctgagcttggtttgctttaa

SEQ ID NO: 79004 - DNA, 819 bp, Citrobacter koseri
atgaaattagccagccgttttgggcaaatcaaccagatacgccgcgaccgtccgttaactcgtgaggagatgatgcaggtcgtccccagcgtgttcggggaagataaacatgtatcacgttcagatcgctatacatacatccccactataaccctgctggaaaatctgcagcgtgagggctttcagccattctttgcctgtcaaacccgcgtgcgcgatcaaagcaaacgtgaacataccaaacatatgttgcgccttcgccgtgagggacaaattacaggcaaacaggtgccagaaatcatcctgcttaacagccatgacggctcaagctcataccagatgttgccggggttattcagatcggtttgtcagaatgggctgatttgcggtgagtcgttcggagaggtgcgcgtgccacataaaggcaacgtagtagagaaagttatcgaaggggcctacgaagtactggggatatttgaccgcgtagatgagaagcgagatgccatgcagtcgcttttgttgccgccacccgctcagcaggcaatggcgaaagcggcattaacctatcgctttggtgaagagcatcagccggtaagtgaatcacaaattctttccccgcgccgctggcaggatgagagtaatgacctgtggactacttaccagcgtattcaggaaaacctggttaaaggcggtctgtcggggcgaacgaccaaaggcaagcgtgcccatacccgagccgttaaaggtatcgacggcgatgttaagctcaatcgtgccctgtgggtgatggccgagaatatgctgcagctcgcttcatga

SEQ ID NO: 79005 - DNA, 798 bp, Citrobacter koseri
gtgaaaaccctacctgcagtaatttttaccctgtctactctgtttaccactgcctgtgctgccgctgattttgatctgaaatgtacgctggctgataacagtgtcatgacgctttcacacagtgcccagactgtctatatcggctttacgaaccaaggagatgtagaaagtgaaggggcggtcattaagctagatgttccatcgggagaagcggttcagaccgttggttcccgacctgtttttcatgagaaatttttcaacttgcgtggtaccggagaagagattgaaggggctgttgccattacttatgccgaacataaaggtgtgaaatcagcaggctatacagagataaatttattgggtaatgaaaccaaaaatattgcctgtaagccgggcaccattaaagtagctgacggattattaacgagcggcattactggcatggagaaacaggtatcacataccggggatacgacgaatgatacgccagatgaagatgtgagtgatcagcctgtcattaaagtttcaacagagcatttctatcttgttaaccagttcccgaactggcgtattacattgaccagtgtcggtaataatatcattgtaaaaaatgcagttatgaatcgcggtaattgcactcttcgcccgaacgggaatggtgaccgctttaatattccactgaaatttggtgatacgcttaagtttaatgtgacaacggatgaaaattttacggaatgtcaattacttgaactggttgtggagacaaacaaaggtacgttcacatttaaacctgaatga

SEQ ID NO: 79006 - DNA, 885 bp, Citrobacter koseri
atgccaaaaaatattaggaatggttttaataccttgaaacaatatttctctgtaatccctgattatcttactcaagcttttatcgatcgtttgcagcacgttatcgattatgaacctgtcattggcattatgggcaaaacgggtactggtaaatccagtctggttaatgccctttttcagcacccactgagcacggtcagcaatagtactggctgcacgcgcgaggctctccatttcaaatttgaagttggagagcggaagatgacattgattgatttaccaggggctggggaaagcatcgcgtatgacgaagaatatcgtacgctctatcagtcgatattaccggacctcaaccttattctctgggtaatgaaagccgatgatcgggcctgctccactgacgaagcgttttatcagtttctgctggaatgcggcgtctctccagactgcattgtgtttgtcatcaatcaggccgataaggctgaaccctctttggagtggtgtcgtgaaacagccactccctcggctgagcaattactgactcttgccgccaggtgcaatgcagtatcacaacaatttcgcccccctcatccggtgcatcccgtttccgccagcaccggttataacctgccccttctggtcgaaacccttgtcagtgccctgccagcatcagccagcagcggtgtgttctgccagattaaagaaattcatcgtacatctgaagccgagcaggtggttcgacaggactttggtgaactggtgggggagttatttagccgcattattgacgcggtgccattaccagaagcactaaaggaccgactccacgctatcaatgaaagtctcgccagagccgcttcagcactctggcaccggttcttctaa

SEQ ID NO: 79007 - DNA, 855 bp, Citrobacter koseri
atggcaagtccgaataagttaacgatgtactatgcggatgaaagcacccggttatttttagaagaacaaatcagtctgtatggtgggaaaaattcagggtcaaaatatctatacgctcttgtgagtcgtgaaaggcagcgtataaacaatgatgctgatgacaaatgtgccagtgaaatatccaaaccatcagcaatgttctatccaaaatttttagctgggacagattatataactaaaggggatatatctttcagttccctggatttagtaaaggagtatatgcgagaagcgtctggggaagagaaaatcatctctaaaaaaagaaagcgattgaaaatgattcgtgagggtattcttgagcaaattattcttgattaccggaacttatctggcgcttcggcgattagatcaaatgtggattccttctcgattataataataaaatatataaagtgtaactatcatgatttcaacggtgggaatgtaactcttgatggtgagtttctggcagagtggaagcttatacgtgtcgatcgtaagttatgggataaatatgatggaaaatatgatttcagaaaaataaaatacatgaaatatgctgaggtgaccgagttttacggagggcaaggtctatgtaaagtaaatgaggttacaaccagggataatgccggtgcgtactttatacctgtgagttctaacacattaaaattcccctctggatttatttcccgtaaaggaccgctgattgttggtggtttcattgaccaaattaaaaaccgcgttgacattagacctatgaacgaaaccaggattaaaaaaataaaaaaccttcgccataaaaatacgcaatag

SEQ ID NO: 79008 - DNA, 627 bp, Citrobacter koseri
atggaagattattcagaacgctatggggatatgagcgaggagtattttaaacgaattcaggagagtatcagtaaagctcagcaggaataccctcgcttactggctgtcagagtggatttccgcttacccttgtccagggataaactagagaaagccaaaatcgattcttcggttatcacacgttgtatgaaatctctgaaggagcgtattaaggcggatttgaaacgtaaaaagaaagccggtaaacggacctacccctgtcggctccgttatgtatgggtgagagagtttaatcttgaagggaaaaaacattaccacgccctgcttcttctgaataaagatgcttattttcatccgggagattacaacaaagaaagcggaacactggcatcaatgatagccggagcgtgggtaagtgctctggggctttcatatcctgtggacagaggtctggttcactttccaacaaatggttactaccacctgaacagcaagggacagaaagagttcattacgcagatgaatacgaaaatggatgagctgatgtttcgtagtgcctatctggcaaagctgagatccaaaagcagtgaagacgacgaacgcaactttggctgcagtcagaactaa

SEQ ID NO: 79009 - DNA, 216 bp, Citrobacter koseri
atgaccttgcaaagtaacaacattgatctgatgaacgacaagctggtggatatggtattcattaccgaatttacagggttgagcgacaagtggttttacaaactgatcagcgaaggaaggtttccgaagccgattaagctagggcgtagctcccgctggaaggaaagtgaactgaaggaatggctgtttgagcgtattgaacaatcacgacgctga

SEQ ID NO: 79010 - DNA, 4011 bp, Citrobacter koseri
gtgagtaacgataaactatttacatctggaaatgagcatgctgtaccgtctgtagatacctgcaggcaggcgatacatgctcttagagggtatgcttatcagattaccgcagctgcgcttgaatggctcgacctcagtgatcgagccattatatttctcgaggtggcagaagactatgcaaccgttgctgaaaataacttaaaggctgtgcaggtcaaagatactggagcctcagccaccgttacgctcaactcccaaagcgtacgtgacgccatccataacttcgtaaaactcacatcaaacaataccgacaagcaagttcacttagagttttttacctcgtcaaacattgccactgaaaaacaaacacctgatagcatgttccctattccaggtcttcgtttctggagacaactagcaaaagggggagatttgacggccatgaggctctggctaatgagtgaaaaaaactcgaaggatgttaggggatttgtggagtcacttagtgatgaagaacttcgcacggacatgctgcaaaaaatccactggaattgtggtaaaccagattatgcttctctaaatgaagagttttatgagcggctggttgtcataggcaaagagaagcacagtctttcagcacacgaatgtcaaaaaatcgcgcctcagatcctgtaccatgttttacaaacgtctcttaggaaagaccccggtcttcgcgttctcaaccttgcttcgctctatagatttattgatgatgcttcccgcctgtccattaaaattaatacattagaacaactggttaatcttcggcaaaacaatgaagggctgaatcccgctcctgaagcattgacctggataactgaagctcatgaacaaccgaacaatactatcctcctcccccgagagcgtctaacccatgaagcgctggagaaattattccattgtggggtctgtttaatcttcggttcttcaggaacaggaaaatcacacatttctcgctatgtggcgggaaaagctggtaatccttaccagattgttgatttcagggacatacaaggtcatgaggcagtcagtagaataaaagttctcatatcccgtataggggcaatgaacactcaaactatcattcttgaagattttaactgccttaatgacccccgtatcacgggcgatatcactgcgctttttagggcattagatcgccgtgatatcaaattcattttgacatgttactcaacaccaaccaaccgactcctcacgcaaacggggatttcccccgaatcagttatggagtgcagttatctgactcttgaagaatcaaatcatctggtcacattacacggtggtaatgctaaattatggggacagctggcatatatcagcggagcaaacggccatccgcaactggtccatgcctttatctccgggatggcagcaagaggatggcccgctcctgaaatcattgatgtgcttaaaagcggcatgtcctctaatgatattaaagatgaacaagagagcatacggcgttacgttatccaaggtttacctgagcaggcgagagagatgctgtatcgcctgagcctaatcactggaagttttacgcgtgaagctgccactatgcttggagcaacccctcctcccctcagtctacccggagaattatttgatgttctgaaaggcccttggattgaatcacttaaaaatgaccatttccggatttcaccgcttgccgcaaaatcaggcaaagaagttttgactgcagcgcaacagactacagtccaccgggatattgcaactcacttttttaagaaaggtgccagtgttgatattgaggatatagataaaataattattcatgcgatggctggcaagcatgagtccatacttgcggcattgtcattgaagctccttactgctgacgaagaaattattcagtacctttacgataacgtttctgtactacgtatgctgccactcgacacgtccgcatggcctgacaatccgactatttcatgtgcattacgtatcactcaattcaaaatacaggtgcttacccgcgataaagttcagataaaagcatgctggaaaatacttcagaatgaactaaaacgcgcaagcgagattgaatcatcacactatgtatatattgctggcctaacttctgtactgaatacagtcggcattgcacggtacctggataattggtttgctctggtgatggagttgcattacctaatatcgcagccatcccaacccggtatgttcgatatgctagcttctggtcaaatcgatctttcagaagttgtccctctattctttaccgtgggtataactggattgtcagatctcgataggctcagggaaatcatacaaaacctggatgcgctttctactgacttgagaatgcacttgctgcaattttatcaagaaataaatcccgatttttcagttcttatacagacagcatggacagatgattccgcaacagaggctggggaacatagcgttcagatctaccgcgatatggcacacactacagcgcaatggaaccttccggcactaacgacacaatgctggattgcggcttcaatgattacatcagagaaattgcacgatccatccgctagccttcacattctggaggttgcttctaggctcaatgctgataaaacgatggtcactttaacccgcatgaaaattctgtggaaaatggagcaacatgcgcaagtgtgtgaagaaatgcagtatcttgcaaaagatgcttacctgaataatccagtagaaagagtttatctccttcgacaagcggcaattagcgcgagcaaaattgaaaagtggatacttgctgaacaatggttttccctcagtcaacaggaagcgcaaaatattgaactggacaatatgcaggtcatggcggcaggtctcagtgctgatactgccgtagcagcactgcaagctggtaatattaagcggtctcttgagcacatagcctccgccatgactcaacttgagaaaataaaccatgaagactccctgatggcttactattgccatcaggttacccgtcatgtcgtcctgtggatgctatccgttatcgatggcaagaaaattgatatcgataataaacctattgtggttgttcctggatgctgcagtaatccttcgccgccggaggccataaggcagaaagagcatactcaaattcagatggcgtggtatatcctcgcggaactggatatagcaaacaatactcaactaggcctgattgagaagctgaccccacgttctgaaaatcgttacctgattatgatggaggatggtcttcgaaatcgactgctgttgaaagaaatgctcaacctgaaagaagccaatgtagctaaagcatcatacgattttgtttcctgcagagcatttctggcgaccctacatagcacgggagattttaacttcgattacaaaaacctagtctgggaaagtattccagctctcgggcaagttgcgactccctcagtcgtagatatgctcaacaaaattttgataacctatttcatcatcgctgcatgtaaaaatcatgttgtaaacatcaccatcttaagtgaaaaaattgctcaacattttggtgaaaacattacacacaatagcctcctgtctcgaatagtagcaaataatggagtatacgatgataaaatacgcagcattttatctatcggccagggaatgtatcgctctccagcgcactattgccaggctggtatctgtgcgcttttattggttaggcatttatataatcgtaatgaactgatcacacagattgctcagtggcaacgttatatttgggaaagacttattagatgggattctttagatgcccctggtattatttctgcattaaaccgagaacataatgatggcattttcttgaataagttactttctgagactgcgaagttcaccaagattaaattatccgaaacgatactgattgaacttcagagcgtgtctcttggctaa

SEQ ID NO: 79011 - DNA, 945 bp, Citrobacter koseri
atgtatagagcatggggggacttcgtcgtttccaatatatgtacggaactcgttgataataaatgccgcaatcttaatagctttttgaaacaaccagcgacgccaagagttaaagaaaaagaatctctaattgataaagcctttcatagattagaaaaatcatatgaagacccttataaagaaatcgaagataaagttggtgttagatttgttgtattgcttacatcagatatagatgatgtatgcgatgtaataaaaagaagtgataaatggttctataagacctcaagacattatgatgaagagcgtctaaatacacctttaattttcacatatcaatctgttcattttatcgtaacagccaaacaatcatttgatcataatggagtatttattgaggaaggaattccttgtgaaatacaggtgagaactctattgcaacatgcatatgcagagttaacgcatgacgccatttataaagctaaaactatcgttgagcctgatatacatagaacggtagcaagaagtatggcattaattgaaacaactgatgattttttttgttcagttgctaaagccctgaacaattcacctgatgcttatataggaactcagaaaacactcgatcaactttatatgactttaataaaggaaaaaccaaataatcaaaaatcggccatattaatattggatacattcaaaaaaaccattgatgctgacatcataagtagattatacaaatttgttgaagatacacctgagttagaatcattgatccgtgatggtaaaaataaaagcagtttctatgaacagagtgttaccattttcgtgtactggttaattaaaagacgtaagtctattttacagaaggaatggccgttagaatggagaattatacaaaaaatggcggctgacattggtgtttctcttgaaaggcaaatgtag

SEQ ID NO: 79012 - DNA, 1092 bp, Citrobacter koseri
atgaatattagcaagttgagtattgataaaattattattcatcaaattcatcagcgagatgacgagggtttaaaaattgagcctacacgaggttcgtcttttattacatttgatgaagatgccttgcagggatttaaatcccgagtaatagatgctcttggtgatggatcaaaagccgtcaaaatgaaaattatagagcacggtgaaggatatgtacctttcatggctaccaatttatttggtaaagaaggggatgaatatatcgatcaaacttataatatcgcaaacaagctagctgatgcccaaacaagaagagcaatacccggaggcatcgttgttatattcactggtgactatggagtaaataagcgaaaatttatcggtataattaaagcagacatttacagtgcctatgaaaaaattgttgattcaaaaactggtcaaatctcgttaaaatttgttgaagaaatacttcttactccctcaacaaaactctataagacagcaggttttttccaatcgagtaacactgctcaagaagatgatttgaacaaatcatgggatgtcatgatctctgattatcaaataagcaaatctgatggaaaagctgctgctcaatatttttatcaacatttcttaggttgcggctatcctgaaacaagtgctcgcacaacaaaaaacttttatgagaagactagtgatttcctaaatgaactagatataagctcagaaaaaagaaatgacttaaaaaacgccttggttacttatttgaagcatgagaaatccgatgtcatttcagcaaaagagtatgcagagagattcttcgatgatgaagttaaagatctttatcttgagtatgcaagcgaaagtggaattccacagacagcttttacaagagataacgaacatatcgaaagcaaattaaaaacaagaaagttaaattttagcaaaaacattaaaattacagccccagcagaagtttttaaaaataatatagttattgagtctacggaaggtgacttagataataacggagaacctgcagaatggactactattcttattaaagataaaattatacttcaagaataa

SEQ ID NO: 79013 - DNA, 1032 bp, Citrobacter koseri
atgaaattaagtcttttaatactcttagccgcgatggctactttaccaacaagttatgcaggatgtactggaaacatcacttttacggatgatttagttgttcgcgaagattttgcggtaaatccatcccagtctgcatcctttgtgcaccaatatacggatccatcctgcgcgggaacgaatacggtaacccgtctaaaaacttctgatgttattgttggcttttataataatacggtaaagttgaatctgaaaattagctggttggatgatgctactattagattaacagataaccagaaaagttttactgcaggatataaagttgatatttctcaggcaagtaataatgcaacagtgaatatctctgcggattcaggggggggtgttagaatagataatgtggcctctttgtctagtgcctcctcaacatcccgaaatacggcgttttgggtactgattggatgtttgctgtctggaggaggctgggaagcatgtataaataattaccgtaattcactttctgatgccggcggtttttattcatcaaatctaaaactgacatataacaggaagcaaactacctgcaaaccagaaaatttaactatcgcactccctgatatttcgcttgcagaattacctgcttcaggaaaaacgacaagtaaaaatgctactgataacatacgattacaatgtgaaaatctttttggggatcgtaaacaaacgtcacgaaaaatggtggtttatttgtccagcggcgatttgctggcaggcagtaacaccgtcttacgtggtgatgctaataacggtgtaggatttgtacttgagaatagcaataaaatcgtgaatatttcagatacccctgaacagggaactgcgacaacgctgtggaaagtcgataaagttggtgatgccgtaaacaataacacggttacgatccctgttgttgccagttattatgtttatgacaggagtaaaataaaacctggtgagcttaaggctacggcactaatctatgtgaagtatgattga

SEQ ID NO: 79014 - DNA, 702 bp, Citrobacter koseri
atgaccgaagacctgcaaaccgcgttcgtggctccgtctgacgacgactatgacggcgtggacgttacgtatatcaacggaacgacgtgggcggaggaaacggtacagtgccggacaccagataatccaacgcccgtaaaaattgaagattatacgcttgatggtgtgctcgaccgggaccgggcatatcagatcggcatgcggcggctgattaagtacctacagcaacggctgacgcatacgacctcaacagaactggacgcgctttgctataacgtcggcgatcgtatcgtgctgaccgacgatataccgggcagccagacgattagcgcgctgattgaagagatggataccactgataacaagacaacgtttacggagcctcttgactggtctttcgagaaccctcgcgtgctgatacgttaccaggatggcaccgcttctggcctggtggttgcaacaagaatgggggattatcaggtgctggttcccgagcaaccagaattcagctctattattctcaatgatccggctatcgagccgccgcgcctgattttctgcgattcttcacgcacaggttatgacgctatcgtctcagagatagcaccacaatcagacggcacatgccagataactgcgaagcagtataaacccagcttctacgattacgacaatgccacttatcccggcaatgtaacctga

SEQ ID NO: 79015 - DNA, 327 bp, Citrobacter koseri
atgaaaaaaataatggtggtagcagtggctatgggccttttggtggggtgtgcaactaaacagtacccacaggccccagcagtaacaggtgaagaatccacagcattagactgcacagcaataaaacaagaaatcgcgaaaactcatagtgtccagagtgagatcgaatcaaccggtcaatttgacgggcgtactgttctcggtgtgttgggtgactttggcatcggtaatgggatggcgaagaacgaagcgcgtaaaaaagcccaggagagacttaagcaactggagtcgcttaaatctgtgaagtgcgctaacgacaattcttga

SEQ ID NO: 79016 - DNA, 234 bp, Citrobacter koseri
atgaaaactatttttttaatcgccatcatatgcatcgtcgcatttttaggttttggcttttatgttggctcaacgcctgaaggaaaagaaaagcaagcagcaagagatgcgataagttattgctggtcgactcaaaataaaaaatcaaattctgcatcccaagggcaatttattgccggggcctgtgaaaagatggaagatgatttcagagtgaaatatggcgtgaatccatag

SEQ ID NO: 79017 - DNA, 1143 bp, Citrobacter koseri
atggctgctagaccacgcactcacaaaataccaatccctaacctgtactgcaaattggataagcgcaccggtaaggtatattggcaatataaacatcctatttcaggtcgttttcacagccttggaaccgatgaatccgaggctaaacaagtcgccacagaagctaacataataatagctgaacagcgaactaggcagatcttgagcgtgaatgatcgcctggcacggatgaaaggcaggcgcactgatattacggttactgagtggctcgataaatacataggcattcaggaggaaaggcttaaaaataacgagcttaaaccaaactcctttcttcaaaaaggtaagcctgtccgtttattcagagaacactgcggcctgcaacatctaaaagatatttcagctctcgatattgcagaaataactgatgccattaaagccgaaggccacaatcgcatggctcaggtagttagaatggtgctcatcgatgtttttaaagaggcgcaacatgccggacacgttgcccccggatacaatccggcgcaagccactaagcagccgagaaatagaataacaaggcagcgtctttcctttgaagaatggagcgttatttataagacggcggaacagcagcagccttatcttcagtgcggaatgttattagccctaatcactggccagcgtcttggtgatatatgcaatatgaagttcaccgatgtatgggatgacatgctccatatcgagcaggaaaaaacaggttctcgtctggctattccgttagatcttaaatgcgaggtgctgggcctcactctcagggatgttatttcaaaatgtcgggatgcggttgtcagtaaataccttgtccatttcaggcacaccacatcccaggctaatagaggtgatcgagtgtcgagcagttgcctgacatccacctttaaaaaagccagagacaaaagtggcctggagtggaaaaacgggacgcccccaactttccatgaacagcgttctttatcggagcgactgtatcgtgaacagggtctggatactcagaaactgctggggcacaagtccagaaaaatgacggataaatacaacgacgatcgaggaaaagactgggtcgttgttggggtaaaaacggggtaa

SEQ ID NO: 79018 - DNA, 204 bp, Citrobacter koseri
atgtcaaagtcaccaatgaaactcatgctacgggcatggaacaaagagcttaaaaatccagaatggggcatgggcaatcgtaaacaccgcaaagcttgtgctcgtgattttgccggagccagcatagaaaccgatgctgatatccctaaccaagccgaagcagatgaccgcctggcggaagaacttacttactggacggactaa

SEQ ID NO: 79019 - DNA, 528 bp, Citrobacter koseri
atgacagtgcatacaattaagcaatgccgtcctgaccagaaagaaaccgattatttctggaagttgtttcatgcggcacaacgcaatgacgctcgctggcacggtagtgaaagcagcattatcgctgatgagctatcccgaacggatttagatcgtaaccaaaaactgtttcttctccgcgcctggcaagtgcttgtagacgacaaaggtggattcgggcgctttattggtgcctttgatacttacgtctacaacatgcaggacccggatgatgactgcgtagcgtggaagcctgaacttagcaaactgctgtgtgacgggcaattgttggacgtggttatcgatgcttatcagtctgctcggcagcgcatagcagaactggaggcgcggacagtgacgctgccccaatatcgcaattcaccggacatgcacacaaaacagttttatgaggctatcggatttaatcaggggcttgatattttcatagaagcactccgcgccgctggcattggcgtgaagggggaatga

SEQ ID NO: 79020 - DNA, 255 bp, Citrobacter koseri
atgaccgtatttgaatatctccaggctcatccgaataccaccagcggtgaaatcgccaaaggtatgaacaaaacgacgcccgcggtcgctggcgcattatcgcaactctatggcaccggccggatcgtgaagtctggtgttcgcaagggcattccaacataccgtgttaacgatatgccgtttgggtgcagtaacagcctaaccatgatgtttaaccagttattgagcagagtcagaaaaggaacagtccaatga

SEQ ID NO: 79021 - DNA, 540 bp, Citrobacter koseri
atgagctacattcagacattatccggtaaaaaatttaactacctgaccgccacaatcgacgatatcgatgttgaggatatcgcgactgctctttccaacatctgtcgattcgctgggcatctcccagagttctatagcgtggctcagcactctgtgcttgtaagccagattgtgccgccagagttcgcctttgaagcgctgatgcacgacgctgcggaggcatattgccaggatattccggccccgctcaaagccttgctgcctgactaccagcgcatggaaacttatattgatggtcttatccgctttaaattcggtatccagcttgagcaagctgccgtcgtgaaatatgccgatctaaccatgttagctaccgagcgccgtgatctggaaatagatgacggttcgaagtggcaaattcttgaaggtattccctgctctgatctcgttcaggttatccccctccgtcctggtcaagcctatggcctgttcatgaatcgctttaacgaacttgtggagctgcgccaatgcgccgcatga

SEQ ID NO: 79022 - DNA, 828 bp, Citrobacter koseri
atgtctcagttagacagcggcaccttcaagcaggtcaaagacctggttctttccggttatcacctgaatgatattcatggcctggcttgcccgaccgcattactgccagagggtactggcgttgaaagcctcgagcgcttttctctggagcgtttccgctttcgtggagcaatgaccacaaccagtattgacgacttcgcacgttattctaaaggttacgccagcgccagtgagccagctcgttgctttattgacgctgacaacatgaccgctcgttcagtgttcaacatcggcaccctggataatcccggtcacgccgataacgttgcttcaatcaccctgaagaaaaccgccccgttccgcgcgctactgcagatcgatggtcaacgcctgaagcaaaagcaaatcgccgaatggctggaagactggagcgattaccttctggcgtttgatgctgatggcaatacgatgcagatttcccaggctgctcaggctgtgcgtcgtatcactattcagcaagcaacacagcaagaccatgaaactggtgatttcgctggtaaaaaatcgctgatgcaaagcgttgaagcaagcagcaaagacgtaatgcctgtggcgttcgagttcaaatgtgtgccgtatgaaggtctgggcgaacgccgctttagcttgcgtaacagcctgctgaccagcgatgaaccctgctttgttctgcgcatcgtccaacttgaagcccaggaagaagagatcgccaacgaattccgcgatttgctgatcagcaagttcgaaggtgaatcagtggaaactttcatcggtaactttaaagcctaa

SEQ ID NO: 79023 - DNA, 618 bp, Citrobacter koseri
atgttttccaaaagtctacagattcagcagcttaattataaccacagaatcaaggggttaaccgtgggtaataaacctgaatggaaagttgaaaagcagcccgtctggctggtggccgctatcagaaagacgatcgcagcgctccctggtggatacgccgaagcggcggaaatcctggacgaaacgcagaactcgctttttaaccgtcttcgtgtcggcggggatcaaattttcccgatgggctgggcaatggtgctccagagcgcagctggcgtgagttacatcgctgatgcgttctcccgtgagacagataacgggattcatgtgtctggtgctgtgccggatgacgaaaacgaagagattggtttgaagctggccgagctggtgggacggcttggagatctggtcaatgcataccgttggtatatcgacgacggtgttgttgataagggcgagtggcaaagcctcaacgacatcgcatatcagttcagggtcaccctcatgacgttcctgaatcttatttcccgtgtttactgccttccagaaatgggtgaggcccgcgagtgtgcagctccgggccccttggcgtgtcgtatcagtggagaaactaacgcatga

SEQ ID NO: 79024 - DNA, 327 bp, Citrobacter koseri
atgaacagtttaacggtaaacaaccgtctcccgcaactccgtggtattcccgttacaggaacctcgtcgtttcggtatgagcgcatggtatcaggccgctgggttgcatgtaaccacagcagggcgatggcaattgtgggtatttggcgtcgtaaagggagatcgttatgcgagaacttaaccggcgatttaaagaccacaggggaatccctgtccacgtcatcagatgggagcccgagactcgacgcgttatataccttcgcgaagggtacgatcatgagtgcttcagccctcttgagcaattccagcgtaaatttacagagttaa

SEQ ID NO: 79025 - DNA, 654 bp, Citrobacter koseri
atgaaatactcattgatttacgccgatccaccgtgggaatacggtaaccgtgcgagcaacggcgccgccgccgaccactattccaccatgaagttaatcgacatcaagcgtcttcccgtctggaaacttgctgccgatgatgcggtactggcgatgtggtacaccggcacgcataaccaggaggcgatcgaactggctgaagcgtggggcttcaaggtccgcacgatgaaggggttcacctgggttaagttcaatgaactggcagaacgccatataaacaaagcccttcaggctggtggagtggaggatttttacgacttactcgacctgctgaatacacaaacccgcatgaacggtggcaactatacacgggcaaatactgaagatctgttaattgccaccagcggtaaggggcttgagcggcacatgaagaatattaagcaggttatatacagcccacttggtgaacacagtgaaaaaccgtgggaagcccgtcaccgtcttgaattgctgtatggcgatgtccctcgcattgagcttttcagccgttgtgctgcacctggctggcatcactggggggatcaggccgaatctcctgatgttgaattattttctgccggggtactgccagtatccagaatggaggtcagatga

SEQ ID NO: 79026 - DNA, 342 bp, Citrobacter koseri
atgaaaattagatatgtaattgcgttagcgttatcactattcgttgctggctgtgataatgcgccaaaatttgatggttcaagccaggagtctttgcgttactcaggtgagaaagttattgagtcactttctgatgctaagaaagaagaacttaagtcagcaattcaagacgctttaagctattacgctactcaggcagtcataaataacgatagcagttattctccagaaaaaatgcgtttagtcatactgaatgggaagactgctgagcagattatttcagaagccgatagctatcggaaaaagaaagagcaactggtgaaacaatacaagcagaattaa

SEQ ID NO: 79027 - DNA, 1197 bp, Citrobacter koseri
atggatcatatttatgaattaggaaagcgggttgagcggttattatatacaagtgttatcgttattgttgttagcttgctgatcttctcactttctaattcgattgtgatatcatcagtaactgaaaaatataaaatataccaagaattaagagatgctatatataaagagaaagataacgtagcacgagcaaaatcaattcttgcacagtatgataaatataaaattgatgaaggcgtcaggaaaaatgcatacgaaagaacaaagtcaatgtttaatagtaagtcagaagaggaaaaacaaaataaaataagagaaaaaataggattgccagtaaaacctcttcttattgataaggaatatacaccattaacgtatcactcctacgatgccgatcttaacgaaataaataaagttacaggtaagactaatgcaaacaaatatgtcagccttgatgcagcaaatggggccgacattgcaataataagctctctgatagacggtgttgcaacaaagaattacgaagtttacaaagaactaaactcaatcatagatacaaaggatagcatatctaaaataattgaagttttagataaaaatattgaagtatttcaagatggtaagttaaaaatttttgatgtagaaactccactaaatgtaccattttctattggtgacatgaaatcaagcatatcactttataatattgaacaatggtctatggttgtcatgccaattttccttgttatttggtttggttcaatattgataactcgtagatttgaaacgcatttaattcttgaaaaaagaaaagtaatggaatcctacccacacattttgaatatatttagtgttcttgatgaaaaaaatcaatccccaaaagtaaagaggctaatagaagcatcactactgggagatgagaaatcaataaaagagattaaatcttatggttatattgcattttttttaaggatgtctattttaattggtatgtttatactgatggcgattcctgcttattatgggttttatattgttatatttaacaattctggtgagtatgatattttgcgtttaacatggataacattatgtgtatttattaatatattacaattgattggtgtagttgatattgaagctaggttagtgagtaaaacatttattctaaatggtggtaaaaatgaaattatttaa

SEQ ID NO: 79028 - DNA, 354 bp, Citrobacter koseri
atgaaattatttaacttggtgctatctgccctaatttttatcagtttatcagttagtgccaagagcatcactgtttacggtggaatttatgattgtaaatcatggattgagttatctagaaaagaaaatattgagaaagatcaattagttaaaaatgcaatcaatggaattcagtctcactggcttgctggctatatgacagcatttaaccaagttactggtgaggataattttccgatgatatcagtatcaacagctaaagatttcataagtgattattgcgccaaaaatatttcaaaagaagtggttgatgggttattattattaaaagtgaaattaaaaaaactggactaa

SEQ ID NO: 79029 - DNA, 522 bp, Citrobacter koseri
atgactattcttgaagaaatcgaaacggaagcatggcacatcctgacaaacgtctatacatatcagcgcttgatggaaggccttgtcaatagcagtacaaggtatgcactcgccgatcagatagtagctctcaatgcattgtcggaaatgttagtgatacgcctagctcgtcttgcggataaaagaagagatgtaagatctgtatcaatgcttttgaaacgtggctcgtacccaggtccatccgaggctgttaaatcagcagctgaaaagttcctaacactcgcagaaccggtagtaaagattaggcatgagcagattgcacatatgaagcttggaacacacagtagcttacagcctagaggccttccaaaggaagttctgagagcaactgaggagctaatcaatcttattgacatcgccagaggccatcctctgtcttacacatatcgagttggctcgcaagaactagccattgatttgaggtcttcagtggagaatggcgaaatggttaaaatctcataa

SEQ ID NO: 79030 - DNA, 258 bp, Citrobacter koseri
atgtttactaatgttaatgtggacgtctgtaagacgccggggtgtaaaaacctgggtattttgaacagcccggattatctctatcagggaaaggaagttctttgtcgtgaatgtggctttctgttccccgtgatttcggagaaagcattgaatctttttcgccacacggtgaaccggacatggaagggactggtcaggcagtgcgcagattgcgggagtacatcattaaaaaaaatatggcttttcatcgcaaggtga

SEQ ID NO: 79031 - DNA, 366 bp, Citrobacter koseri
atggacaatcactcagaatccggtactaagccggagagtcccgcccgccagttgtggggactgaagcgcgatataacaccttgttttggggctcgtctggttcaggaaagcaaccgactgcactatctggctgaccgagcagaatttaacggggcgttcaccgatgatgttgcaatgcgccttgaccaggcatttccgctcatgatgaaacaacttgagctgatgctgaccagtggagaacttaaccctcgccaccaacactgcgttacgctataccacaacggcctcatctgcgaagccgacacactcggctcctgtggctatgtctacattgctatctatcctgagcagactgagccgcaataa

SEQ ID NO: 79032 - DNA, 444 bp, Citrobacter koseri
atgaatacacaaaacattcagctcgctgagcagacagctattgcggcctcagtggtccctgacgacttacgtataggcttctggccgaagcactttggctccatcccacagtggataacccttgagccccaaatctttgcctggatggatcgactatgtaccgattatcacggtggtatctggaacttctcgacgctcagtaacggtggcgcttttatggttcctgaggcagagcacgatgagaagtggacattgttcaacagtatgaacggcaacggtgcggaacttactgacgaagctgcggggatagtcgcttgcctgatagcatacagccatcacgcctgccgtaccgaatgcgatgcgatgactgagcattattatcgcttacgagacttcgcgctgagccatccagagtgcaccgccattatgcatctcattgactga

SEQ ID NO: 79033 - DNA, 204 bp, Citrobacter koseri
atggacttaccaatgaaaaacgcaaaatcgccggacgataccgtgccagaagagcaaccgctggatctgacctggcccgttgttttcagtgtcaccggactcacgctgctgcgaagcaaatcggttgtatgccagacgctcggggccacgctgaccacactcagcctgatacgccttataaaaaaattcgccacccttgcctga

SEQ ID NO: 79034 - DNA, 840 bp, Citrobacter koseri
atgtcgacattactctcacgcctggttttactcccgatccttttgttcccggcacttagctttgccatcactatccaggggcatattcaccctgagcggtacaccttctttctgacggaaaacggcggtgaaatgctgcgtgatatgaacaatgaggcagtcagcgtcaaactcaacaataaagccggtttcaacgctgaggcacaaagtaaggctgcggcggcaaatatatctcccttgctgtatgccgcctcaccgcttgaacagaactttatccgctacgacggaaagcctgtaaaagccctgacttgcctcatcaccacccgcaccatgccgggccagaataaaaattatgcatgggaggaaacctactgcctggatgaaaccggtgcggcctacattggcactaaaggctggccgtctcgcactattttcagtaagagctgtgtcgtgggcgctgctgattgccctgtttacctgagcatgaacaacgacccgccaaccttgcgtaatgactcggtgcaatatgttccttacagccgcgagcgcgtaggtgggcagaaagaacgttatcctgagccaaaaccaacgcctgcggaaaccgtcgcagatcaggacggttatgtggtgaattttgttaaatccagtaactgcgccgacagcaagctcattgtgaaaaacacaaactcagggaaaagcgctgtaattgcaggactcaatgggtgcacgtttgatccaaagaccaatgcagtcatcatctttacccaaaatgaatacgtcggcgtttacagtggccccactaacgcttctcaggaaatagcctccgcagatcttccctaa

SEQ ID NO: 79035 - DNA, 435 bp, Citrobacter koseri
atgttgaagataacctctgcactgttcttgagtgccatgctgtttagcaccgcttcggacgccatgggccgggaggaacattggggtagctggtttggcactatcaatgtgatggagtttgaacttaacaccgacaacagcgcaggtgaacggctgactctgacctgccgagacaatcagttggtcgcgggttacagcgcaccagataaagctcatgcggaaacgcccgacgacggacaaaaaacagtggggctgaatatcaactccgtccattaccaaacgagtgaggccgcgtttatggcactcaaaaattcagacagcgatggacaaattgaagtcacaagcatgaacaaggccttatctcacccctttaaaactgcaggactgcatgacgcattgcaggacctgacctgggaagactgcattagccattaa

SEQ ID NO: 79036 - DNA, 633 bp, Citrobacter koseri
gtgaaaacattcatcagtccttttggactaagcaatcagcatcatatggatcgtattcgtgaaacacttgataagtctttacaggaatacccaaggacgtttgtgttaaatatcatactaagattgcctgatgagaattatgaacattacaaggcagaccctaaattgataacccgatttattgaatctttaaaatctcagattgagcatgcgcagaaacgtaaagccgcagagggtaaacgtattcgctcctgtaatgttcgttatgcctggtcgagagagtttggtgaagaaaagggcaagaagcattaccatgtggcattgatgctgaataacgatgtgtactgtaatgctggtacctattattccatacaaggtctgtatatccataatctggcattaatgattatggaagcctgggtgagaacgctgtgtctcaatgtcacgcctgactatcaaaagtattacccattggtacattttgttaaggagggagatttcaggctggataagaagggtaaaaactttgagtactattacagtcaactggatcgcagtttgtcctacttaacgaagctcgccacgaaagacagttctgatggcatgcgtaattttggttgcagtcagtcctga

SEQ ID NO: 79037 - DNA, 1563 bp, Citrobacter koseri
atgacgtacaacccaattacgactctctctcagctggtaagccagtcagaggaatcgtcccttcccatcacagccttcccgcaaatcttacaagatgttattcgctatcttcaggatggcagtaaatattcagccgtgttagcagccagcacggtattagctgccgtctcaaacagctgccagtcactgattgaggttttcaataacaatcacggctcatcagagacgacagcgctttactttatgacacttggtgaatcgggttcaggaaaaacaaccctcagcaaactggtgatgaaaccgtatgatgcattgaaggctgaactggcgcaggaatacctggagagaatggccacctatggacgtgattttgccgtctggaaaccagaactgcaggctctggaaagcaaactccgcaccgcaatcaaaaaggatgacaatcctgaggaaatccaggcgaggttacagcaacatatcgctcgcaaacccgttcaaccgattatgccaatccttgtatacaacgatacctcgcttgcggctctgcttgatggattgagcgtatatccgagcgcttttttacggtctgaagaaggaagtcgctttttcgagcattgcaatatcgctcagcaggcattctgtaacgaggcatgggatggaggggtttatgattataagcgcagcaatcgcgagccctgtagtttcaaaccaacactgacggtatcgctcatgttgcagccatctctttttctcagttatatgaaaaaacatggtactgaagcattagacagtggtttcttatctcgcttcctgtttgcctgcattccatccaacaatcagtatccttccggaggcatgagctatcgttaccgccaggatacattttcccgtgatgaggaggctttacgcgcttttcataaccggattactgcattgctggcaaaacaaaaagaacttatttggtccgcggaaataaagaagaaaacactcaaactctcacctgacgcggttgcatattgggaaggtaaacacgatgagtggatttcaagaacaatggctgactcgtcatggtcattcattaagccgatggtaatgaaagcgagtgggaatactttgcgcatcgctgcatcgcttcactacttcgttaatcaggatgatgagactatttctctggattctcttcatcgagcagcggctatcatggaatggtatcttagtcatactgcagagtggttttatcagttcactccacactacaaattcctgcaagacgtacaggaactcacccaatggatccgtcataaattcgcatccaacaatggtttgccgttcaaaaagaatgacgttattaaatatggcccgaacaagtttcgccgaagtgataagctggagccacttttgaattacattatgaacaccggtgaatttatctacatccacaaatctccgccgcattcggcggtatatattacctggcgtatgcccaatgggcactatgcccctattgcagaacataatgtacatcactatttacctccacaacaagatactgaccagattagctag

SEQ ID NO: 79038 - DNA, 213 bp, Citrobacter koseri
atgaccacctacacccagacggtaaaaatcctgcgcatgcgagcagttgcggccaaactcggcatcgctcgttccaccatctacgactggcttaatgccaaatccccacgtcacgatccagcgttcccgaagccttaccctctcggcaagcaatctgttggctggctcgagtccgagctggatgaatgggttctccagcgcagagctgcataa

SEQ ID NO: 79039 - DNA, 1167 bp, Citrobacter koseri
atgtgtctcatatgcgcagaccccgttgcagaagagtggtatggccgtatttttggcagaatcaacagcatacttcagagggaagggataaccggaaaacaggctcagatagccaagcattatttgctgggggctcttgaaatctacttgtcgattgatagcaactattttgcgggcacagttgagcataataaaggtgttgatggtggtgcaccttataacagagaacttctcgagcaatttgttgaacacaaccgaaattatagtatcgctttactttgcaatattgctgattttaatggtgtcgacagagagttcttttttcaggcaacggaagagttatttaatgataagatgttatctgccatgccgcgttttatcagatatcgtcttaccgaatgttgctatgcgcttgaatatcctgatgctcctctctttttttatcgggagttggtgagtctgggtattgttttgtgtgggaaatactcacgtcatcgtgaccaatttgtgaagaagtctgattcagaattatcacttttgttcattcgtgcaggcttactttttgagtttaagatgctgcaaagagcagtgcaggtgataacctccctcaataaaaatggtactcttgttttacccgctgcagatctccgaatgtcctttacagagcgcaagaacattgctgattactataaaagacttgttgatgtgtggttgctggaagataaacctggttcctttgtggtttttaagtgtaaaagcgatgtttctgatttagatgttaaaatacttcttaaaaatatgaacaaattttattttcataaacgaatgtttgatggtacacagggaagctggctgggaacactgggagcatttgatattgaggttagccgttggatagaaccagagttggcgatttattacgagggtaataatagtcttacaatttcagaaaaaattagatctaagtttatggggttaggttttagtgtatcagctagaaatttgtatttgcggcataaagcggtaagaaaaaatagttaccctaaaattcgatgttattatacccatttattaaatcagccatgcatattcccctggtatcttaatgacaatagttgttacgacatggctctggagtttgatggttatcaagactttgctggatag

SEQ ID NO: 79040 - DNA, 207 bp, Citrobacter koseri
atgttcaaatataaatccttcctgagagtgatcctcccccagcgccagaaggcgctgataagtaccagcagacacataaaacagttgttcgacggaacactgatgttgcatgactacgacggtaaggctgcagaggctttggccatgatgcgtgcgccgagcaaaatgacgaagacggggatgcctgaaggcctgtgtatcacctga

SEQ ID NO: 79041 - DNA, 2310 bp, Citrobacter koseri
atgtcagcagcagacgccactacatcattatctggacagatatcccttcggtttgttgagctttgccagttccgccgacttggtaaggtccagcttgagattgatcctaagactactattctcgtcggtgctaataatagcggcaaaacatcaattctggcagcgctgcgccacttcctcgcagatggctcgtcatttggtgctttcgacatcagtgtttctcaatggccaaaattgcgggaacttggaagagtttgggacgcattagaagaagacccgtctacgtctggcgcatccgaaggtgaatgggaagagcaactcggaaccttactttcggcgatgccaacgctagatctatggttcgatgctaaggccggcatgttccactatgtctccccgttcttgtcaaaattcagttggaaggggggcggggtaggtgtccgattgcgtctggaacctgctacgaacattgaggatctgaagcagttggcttggaagtatcacctgacgagaatacctgtgaaggatatgggaaaggattcgcttgcgtggccgattgatcttcttgatttttggctgcgagaaccttctcaactcggccaagttcgggcctacaagttagatgccgataacaaccctttggacgggataaagacctacgttagccaggtactggatgctgactcaagcccaattgatcgtaagcatcttcagaaacttataaaagtagactttgtggctgcacagcgtggccttggtagtgaggaagctgattcccggtctgcttctggcacccatcgcataggtttattctccaatcagcttctcaaatttgctcgacagcatctaaatgtggcagcaacaggtcatgggcaccgagctgacctcataaaagctgttgctgatgcccagcaggaactagataaaaagattcatgaggctattggtccatcggtagaagaggttaaagagcttgggtaccccggcttgcatgacccccaagagattcgtttccgcacgcgcatacagacagccgaattactcgaccatgggacagctgttcaatacagcatgcagaaggattcactagaagagcttctcccggaatattccattggtctcggttatcagaatttacagtcccttagttaccaactagtttctttcaaagctgctcgcctaaatcctgaaaagggcgctcccgcacctgttcatctggttatgattgaggagcccgaggctcatttgcacgtacaggtacaacgtattttctcgggtaaggcacataagctcatcagtcctaacggtagcgatgagtcaggtcttaaaagccaactgattatcagtactcattctagccatttagctcatgctgagaattttgaccggctacgatatgttcgccgcgttgccaagagtgaagaacaaaacatgcctaccactgaggtggttaatcttgggcaagtttttggtgatgataaaacaacccgtcaattcgctgaacgttattttcgcgttcaacacacagatcttttatttgccaatgctgcaatctttgtcgagggggttgctgaacgaatgctgttacctcttttcattgaaagagattttgcaacactcaacagtcgctatctgtccttccttgatattggtggcagccatgctcatcggctaagagctctcgttgaaagactccgtattccaactgtaattattactgacatcgatccagttgaagaaagaccaggtaagcctaaaaaaaatggggatccgactacaaccttagttgctgtggctaatacaggacaacccggactgcaatgtgggaacccgactcttcgcggatggcaccctaagttgcaacagcttgaggatttcaagaacccgaaaaatgagcatcttgtctggaaagaaattgccgagtgttctgtacgttttgcatggcagttgcctgtagtcgaagctgatggtcaatggccaagtacttttgaagactctctaattctgagaaatatcccttggtttaagcaacttattgatgaaaaagtcgatggcgatgggaagcaaatcaaaccgccgaagggagcactgggctcagtagcaagacaggtcgctgaaaatgataatattccagaactgctcgcagctctgcataaattaatgcatggatcttttaataaaggagactttgccgcaagtatctttgaaatggttgctgcggatgagccgatagtctgtcctaaatatatcgaggatgcattggaatggctccagacacagctggaaccaagcagggaggtgatgccatga

SEQ ID NO: 79042 - DNA, 1992 bp, Citrobacter koseri
atggctccagacacagctggaaccaagcagggaggtgatgccatgactaactcaccaatccttgacggcaatgatcgcgatgcaggggtagtagaagagatttgcggctacctcacagacataccacctcgtaactacttcctttttgcaggggctggttctggtaaaacacgaacattggtggaagttttacgtcgccttactggtgtgaccgagcatgagaaggggggacaattagcacggtccctgaagatgtatgggcgttcgattagagtagtaacctacaccaaaaatgctgtctctgtaatcaacggacgtcttggggacaataatttagtcagtgtgtctaccatccattcattttgctgggaaatgattaacgggtttaacgatgacatccgtgaggctcttattgcattaaaagaagcgcaactcgctagagacactgcagaggcagaagcaaaaccgagaggtataactccagctaaacaacgcgctctcgacgaaattatagatgaaatcgaaattctgcgagcaacagaagtattcatataccatcccgaccgtaatacgtatggtccgggggctttatcacacaattacgtacttgacgcgactgcgtggttgcttcggaataaaccgacacttcaaagcattctcaaagatcgtcatccaatcatacttatcgatgagtcgcaggacacgatgaaaggtgtactggactccttgatgttacttgccgaaaagcgggagcgagatttaactcttggtttgctgggagatcatcgacaacgaatttatacagatggtcattcggatcttccaagcattgtgcctgaaaattgggcaacgcctgagttacaaatgaatcatcgtagtcagcggcggatagtaacactgattaataaaatctgggaaactgaactggaaggtaggacgcaaccaacaaagggttcagcacaacatccccgaaaggaaaaagctggtggaacggttcggctcttcttgggggatacatcacgaagtccacaagataaagtgcttagtgaacgttggtgcgctgagcgaatgtatcaaattagtggtttagcagattggaatcaagggcaatatcagttgcttgcgcttgagcataagcttgtcgccactcgtggctcgtttcttgatgtttatgaggcaatggttctgttagatcccaacgctgcagcaccatctggcagtggggacaataaggggccttcaacagtacaaattttgcttaatgagctggcgcatttagaagcctgcgtcagtaatgaaggaatcgttaatgagtttaaggcaaccgaggtttttcgacgttatggcggtttagacaatatgcctgaggactcagaagcaagagctgaacgtactaatgaaatgctcgaagcgatagcgatatttgcaatggcttgctccaaccctgagtcaacgatcgctgaagtattagcaccagttttaaatgcaaaattatttgaagtagatcatcgccttcaggaggcttatgccgacaagtcaccagccccgcaagctcctggacgaggtgaggatgagtcaaagcaaacaagaatgcgccgtggatggtgtgcactgtttgctgctccatggaaacaacttgggtgctatcggaattatcttgctgggatttcagagcttgcaacacatcaggtagttaaaggttctgagttcaagcatgtcatggttgtaatggatgatgagcttgccggagggttccttattaaatacgacaagatttttgggggtatggagctaagtaaacgagacaaagagaatgctgaagctggcaaagagacaaccatcgaccggaccttacggttgctgtacgtgacttgtagcagggcgcaagaatcgctcgccttagtgctttggtcgtccgatccaagtgcagcaatggctcgaatcgaggagagcatgtggtttactaaagatgaaatacaggtcattccatag

SEQ ID NO: 79043 - DNA, 4314 bp, Citrobacter koseri
atgatgtatcagcctgttccgcttgtacgatatttttctttagtacctaagtcaaaggatgactcagatgaaagcgaattgcactcgctttggggtacacagaaacacactgagtggcaaagtcttgaagaagaatatcgctgcgtcattttggcggaagcaggagcaggaaaaaccttcgagatggaatctcgagcaaagcatattcagcaatcaggtcgagcagcattcttcatcagaatagaagatatagaagatggtttcgaaaatgcctttgaagttggttgcgcagaatcctttgaaaattggcttgaatctcacgaaaaagcatggtttttccttgactcggtcgatgaagctcgtcttgaaaaccctcgagcttttgagaaagcaattaggcgtttttcattgaagatcaaatcagcgcaacagcgtgcacacatttacgtttctagtcgcccatatgcatggcgtgcacgaactgatcgggaactgttagagcaatatttgcccttcgaaaagttgttggctgatactactgtcactgaagaaagtaattctaatgaaatcgataatgatcaggtagttgaagtaagtagcgctctgcaagtattcatactcgaaccattggacgagtgtggcattcgtatttttgccgagcatcgtgaaacaccacaagtagaaacgctgattattgaacttcatcgtgcaaatctgacaactatggctgcgcggccatttgatcttgagagtattttggctaagtggaaaaccgaacaaaagcttgatgggcggctcgagttactacagcacaatattgagctttgtttaagcgagattgatccaagtcgttcacaacgacaaccactcaatcgagagaatgcattgtcaggtgtacgtttacttgcagccgcggttattatgactggtgaacctggaattcgaattccagatgccacgaatccagatgaaggcattgatgcggaacttgttttaggtgattggaacccaccagaggtgagagcactacttgaacgtggtatcttcaatgatgtcatatatggcatggtaagatttcggcaccgagaagtgcgagagctcctcgcagcagaatggtttagtcgtcaacttaatgatggtcattctcgtagagcaatagaatccctatttattcgtgaacaatatggacaattagttataactcctcgtttgcgaccgatattaccttggttaattttatttgataatgaattacgtcaaaaagtattgaaaatatcacctgagatcgttgttgagggaggagatgcagctcgcttacctttaactgaacggaaaatgatactcacagatgttgttaaccgtattgcggaagggaaggatgatcattcggcacgtgataataatgctattgcccgtatagcccagccggatttaatgaatgacaccctcaatttgatcgggaaatatcgaaataatgatgatgcaatcttcttcttgggaagattagtttggcaaggttgtatgacggagtgtgtaccagttctttcagacattgcaattgattcaggacgaggtatttatgcgcggatcgcggctacacgtgctgtaatgacatgtggaaagaaaacgcaaataaaccatctattgaatgagctaatccgtttaccagacattatacctcgaaaattgctggctgaagtactggggaatgccagccctgatactatctcagctaatttcttgttagcgtcgttagaaaaagttgaagattataaacagtatgaaacatctggactaaagcaagctatgcatgttttcattgatcgcttcccaaatgatgcagccgcgctcaaacccttgaaaacaataattattggcttgaacggttttcttgaaagaaaaccttatattgagcgaggggagtgccatgtctctaaagagttcgtatggcttttaggtgcggcaacacatgcagttgaacgactggtttctatgcgctctgaagcagcactttcattggatgcacttgcgattatgttaaaagttccggcggtgcgattctggcgaagtgaggatttcgatgagtataaaaatatacttcacgaaatcgttccagcttggaaggaactgaatgatgccctattctggaaaagtatcgacgaagcacgtggcagaattgaaacaaaggaatctgaacggctgatcgatgattactctgtgcagtggctcgggcatttttggaaattcgggccagaccgattcgatgatgtgctgagttttatcacgatgcatgattttcttgatgacaaacttgtagcggtttctctcgccttcaggctttataatttggctgataaacctgaaggcttgttacgtaaactcaaatgcgtaacagaagatcgagccgaagttaaagagtacctagatacatttttaaacccgcagagatctcaaaaaactattgaaagggaagaacaagaagcacagcgccgggaagagcgggaaaaagaaaaagaagatcgcaatcgcaaccggatagcgtggattaatcgcttaagagctacaccggatgttatcagaaatcctcctggacttaaaacaggggatttcagtaatgaccagtattggttattatgtgagattggaggtaacggtgatcgttctgatggttcaaattggaaacggttgatccctgaatttggtgaagatgtcgcaagagcatatcgggatgctgcaatctcacattggaggaaatacgttccttctattagatccgagggtagtgacacaaccaccgtttcctatcaattattatttgctatagctggcctggaaattgaagcaagtgaaagtgatgcttttcctgcgtgtttgactgaggctgaagttcgccatgtacttcggtatgctatctgggagttgaatgggctatcaaaatggctggaacaattgcatcatgcttttccagaattggtattggaagcaatcctcacagaattgaactgggaattgacgcatactgcagtcgacgtgtctatgcattatattttgtataaacttgcgacttatgcaccatggatgcatccctacttagctccagcattaattgactggatagagcaaaacgaaatatataactctgacatgcttcgttactgtatttgtattgtactaaacgaatgtgttgattctaacgttatattaaaactagttagatttaaggtttcgcaaagttctgtaaaagagcagctagctacttggtatgcagtttgggttgatcttaatgcggaagaagcgattcctgccgtcgatagttggttgtcaggccttcagccagaagaggcttcaaaagaagcacagttgtttataacaaaattaatgggggctcgtttttctaggaatacagcgtatggtaatggtgattcctttagtgtcaaacagcttaaagcgttatatattctcatgcatcggtatatcagagcagaggatgatatagaacgggctggtatgggggtgtattctccggggctgagagatgatgcgcaagatgctcgtaatgctctttttaacagattggctgcaattccaggtaaagagacctattttgcccttatagaactatcaggagaacatccagttattgaatctcgagcttggatgagtaagttagcttataaacgagctgaagaagatgcagatttagaaccatggtcggcacagcaaatgcgagaatttgctaggaaccaaatgagcacgccaacaacacatcgacagctctttgatcttacagtcaaccggctgattgatcttaaatcttggatcgaaggcggaaatgatagcccatataggacctggcaaagagttgaaggtgaaaccgaaatgcggaaccttgtggcgggttggttgaatcacaattcttcaggccattatagttgtgctcaggaaaacgagcttccaaatagacaaaggccagatatttggactcaaaatccacttatctcctcaccagtgccaattgaactgaaattgcttgataactggtccggcccagaattatgtgaacggttgcgcaatcaacttgctggtgattatttacgggaagaaacttctggttgcggaattatgcttttggtttggcagggtcgatctactcgaaggcgttggcaaattgaggggcaccgtgtaactcgtccttgcttagttaatacactaaagtcttattggggctctgttgcatataatttcactggagtggcagcaatagaagtgatcttaattgacctaactgttagagatactaaatctgatatttga

SEQ ID NO: 79044 - DNA, 339 bp, Citrobacter koseri
atgaaaccatatataatgcagtatagcgaaacagcttttataagctgtaaagataatccaattactgattcaacccgaaaaacattttcgattgaatcaaatgatgaagactatctaaatctcagcggatggacaaccataactaaagtaagtgaaccaagtgatgaagactcaatagggataacactttatcactcaacgtctaaagagtttaaaacacacccaagcacaatgattaccgaaacaattgagaatgatgacaatgattatttaaacttatccaccataaaaactaacactattgaatccagtgatgaagactatattttcaattattag

SEQ ID NO: 79045 - DNA, 867 bp, Citrobacter koseri
atgttaaataaattactattcctcctaacgaaagtattgaactcttcaccgctatttcatatatctgcggatgacaactttgatactattgagaaaaataatttctcagtaggtcaagagttcaggctaactttgcttgcattaagtttcggaaccatcaaaatttacttaatcacctgtacgtttatcgccaatccatttaaatggaaagggatttcattatcttatcaaattagcttcgacactgtgcaaaaaagaaagagcccaagcatacttgaagcacaaatgactgaatatgaaaacgtcaccttaaaaaacatagatgatgaaacacgcaccaaacaagaggaattcttaaaattaagaactgcagaaaacaatgattctctaaacagtatattcaacaaagttaactatcatacaacaataatattagcctatgctgctgttttagtttacacatacaccaagttaattgaattaccaataacagcaacaactaccattatatattaccttgctataaccaacctcttaaacatgttcgacttgatgtttctactaaaaaggatcgtctctatttctgactttactcgctcaacatttaaggaactacgctcttgcgatgagaaatattcgctggctaaatcattatattttgattgggctgctagtacagatgacgtaaaatacttcgccggcttagcaaaaaactctgaaattatatcaatgagaataatttttataggaatgattgttttagcgagtactacattatttcctgagcaaactaagaactctcagcaaggcacgtcagtttttctacaaagcattgcatttattaatcacatgacagaggaggggtaa

SEQ ID NO: 79046 - DNA, 900 bp, Citrobacter koseri
atgattttagttataagctcaagctttgataaaaccatagattatatcaagcataagcataatgttgataatttttacagattcaacattgataacttttcaagctacacagttttttatgatcaaaatggtttttcaataaccgatttggaaggtagaacccttttagaaggaaattgctccgcaatatattacaggaaacctacaccagaacttcttccacaaaaacttgattctaaataccacaaccatctttatcgcgaagtattctctttgactgatggtatttctgaagcatttaaaggtaaatgcttaacaaagccatcattattaagaaaagctgacaataaaatttttcaattaagggaagcatatgagattggtttcaatatcccatccccactaataacaaacaacatagaaataattaagagttattttagcaaacccatcattaaacccttatcctcaggcattgtagaatatgatagtaagcgtgaatacgtacagacaaatttagtagattttaacaaagacacatctctcctaaactatggaccttgttactttcaagaatttcaaaataaagaatatgaagttagaatcacaatcatagacaactacgtgtatccagttaagattatttcagaaaataaaatagactggagaaaaaacaataacaaaatccaatacgagctaatcgacatacccaacaaaataagaaagcagtgctttaatctcatgaaaaaactggacattagttttggttgttttgattttatagtaatgcaagataaatggtatttcttagaggttaacgcaaatggccagtgggtatggcttgaagtagaacttggattggatattagctcaaagatcttgaggcacttgcaatgttaa

SEQ ID NO: 79047 - DNA, 246 bp, Citrobacter koseri
gtgacattcattatatctactaatattggctctgaaaattttggagtactgttttataaaacctttggcacttccttccagtcagagcgcaataatggttacaacctcatgtatggctcatattttagccgggtcttcgatgattacgagcaaaaaacagactttattgttggcaaaaatggttatgtcatttattgccatttaggctactctaaacaagatgcctcgctaaccgctaaccgctaa

SEQ ID NO: 79048 - DNA, 600 bp, Citrobacter koseri
atgcccggtggcgctttgcttaccgggctgacaaaatccctctcccgtaggccggataaggcgtttgtgccgccatccggcgtcatgcccggtggcgctttgcttaccgggccgacaaaacctctctcccgtaggccggataaggcgcttgcgccgccatccggcgttatgcccggtggcgcttcgcttaccgggcctacaaaatccctctcccgtaggccgggtaaggcgcttgtgccgccatccgtcgccatgcccggtggcgctttgcttaccgggcctacaaaatccctctcccgtaggccggataaggcgtttgtgccgccatccggcgtcatgcccggtggcgctttgcttaccgggccgacaaaacctctctcccgtaggccggataaggcgcttgcgccgccatccggcgttatgcccggtggcgcttcgcttaccgggcctacaaaatccctctcccgtaggccgggtaaggcgcttgtgccgccatccgtcgccatgcccggtggcgcttcgcttaccgggcctacaaaacccttcccccatcggcaaaaaaaaagcctccgctacgggaggctttttgcttcgcggtga

SEQ ID NO: 79049 - DNA, 1530 bp, Citrobacter koseri
atggaccttggcatcaaaagcctgcaagaagtatcgagtgacatcgccattactgtagaaaggagagggggactttatgacgattcagtcgtagttgatcctttctataagcatctgtatgaaaaagagcttgtacttttcgatcacctcactaggttagcaaccgagcgctattacgacgattcgaacagaaggttgaaatttgggataatcaattgtgcagacattggcggatttgcttgcgtgggtgaagaggacatagactttatcggcattcattttggaactatttcactagtttcagcaatttttacccgcatgctgtgcaactcaaacatatttcctcatataggcaatcccagcctagaaacaaacacagggcaatcattctacatacctgtaaaggaagatctaaaagactttccggctatccgtccaaattgtccgattagagggacattctctaagctgcttgtattaaccggcttgaacttcatttttggacatgagatagcccatatatccaacggtcactttggaattataaataagaccaaacataatgatcctgaaaagcgacgccttgcactttctcctcttgagaatcaagcaattgaattggacgcagaccgtggtgccgctgaatggacactgttgtactctgaaatttccagaggtgcacgtccgttagttcaagtagagggcaatgactctctgggcatagcttggcgcgagttatatgttaatgaaattgaaacactaaggtattgcttctttgcctgctatattaccctaagaatgaccagccctgatcactggagcccggatacccagcaggcgtgttaccttcctttgcctccatttagaatggcgtcgcttattcaggtttatatcttttttctaatggaatttcatggcctgtcgtttgaaaatgcacagcgtcgagtaaatgagtggttcattgagactgaacaagcttttactgaccttttgggggagtcaggtaagggggaattgcaactaaatgggatagctagctttttcagggacgttggcgactatagcgaaatggtcgataaagctttcaaatcgctggccgatgagcttagcgaatatgctatgagtgaaactagtaagacggcacaagagcgacctaaaacgtgtggctacgtagtcatgaaagggttgcaaaaaggcgttgagtttataggaatcctcgaagcaaatcttataaaaaccaatatcaaaggacttgatttacagtgtcttgcacagggatgtcatggcatttttagatcccccttccaagtgaggttcgtaccagaattcgcgggtgatatgctcgaagtagccttaacgtctgatggcgtaaacaggaccgtaagtgtcgaggggctggagtcgtatgagctagtagagcttgaatctatttcggacaaattggaactcctacgctttgctctgcaaaatagtaactgccctagtcttaaaaatgaccttataaagcttctggcagcagaaaaagcgtag

SEQ ID NO: 79050 - DNA, 2397 bp, Citrobacter koseri
atgttcagtcaggttgacatcgatagtttcggtagttttgcgggcctcagttggagaaagagccttaaggatgcaggtaacaacgtccagaatttcaagaggctcaacatcctctacggacggaactactctggtaaaactacactctcacggattttccgcgctttggaaacggggcgcattccacataactacgtggatccaaatttcactattcgtggtgacaaaggtgatgtgacacaggcaggccttgccggtcatggctatgatgttcgggtctacaatcgggactttgtgagcgataacctaagctttttggtcaatcaaaccgatggagagatcaagacgtttgctatcgttggtgaaaagaataaagagatcgaagatgctattatcgcaatccaaactaagctaggcagtgttgagtcgaaggcaggcctccgacatgaacttgaagctaaaaagaaagaacgagatcgaacgaaaggcaatcataaaactgcgtctgatgcgctggaaggcaaacttcgttctcatgccaacagtaagattaagcagaaccgcatctacggccctgctgtttacaatatagacagcatcaaaagagacattgactcagtcaaaaaacatagcttcataccgctgacaaccgaagaacaagtatccaaggtcaacctattgaagcaagaagccttacctgatattgctgataccgtatcgataagcctcaacattgagtcaataaaaaaggtggctgaagagctcctttcaagatcgatcaagccgactacggcgattcaggaactattgaatgaggcggctcttcaaacgtgggtgaagcaaggcatacctctacataaagataagcgggacacttgcgccttctgtcgtcagaaccttcctcatgacatctggcaggtattagactctcacttcagtaaggaatcctcggatctggagtcgtgtatcgattcatgcctggcttccatcgccagcgaaatccaagccattcctaacttcttgactttgactggtgataagttctacgcagaagaaaaaatcttatttgaagccagcaagagagaacttgctgaatacctgaaaagctacatgcaggatatcaaaactctgaaggctgcattggataagagaaagaacaccatttttcagcaggttgccatacctgtctacattcacgattcgaatgcaattcagcgatgcgtaggcgacatcaataatctgatcagtagaaacaacagtcgtacaagttcactggaaaaagataaaaatactgctcgcgaatctcttcgacttaccgatgtggcttcctttatcggagacattacctacgatactgagttgacccgtattgccagtctcaaaacagatgctgacactgccaacactgcatttaccgaggcagaagtcggaattatcaaacaagaagccgaggtgacccgcctacagggccaacagaaggatgaacgcaagggcgcgaagcgagtgaatgacctgctcagtcacttctttggtcacgatggcatcaaacttgaagccaaagacaatgttgagcagacttcggttaagtttgaagtcacaagagatggtgaatcagcctacaacttgagcgaaggcgaatgcagtctgattgctttctgctacttcatagccaagctggaagagccagacagcaaaggtaaggatctgatcatttatatagatgaccccatttccagcctagacgggaatcacatcttcttcatgttcagcttgattgaaagcctgattgcgaaacccatcaagaatgcagatggaacaaacagctatcgctacaagcagctttttatatctacccacaacctagatttcttgaagtatctaaagaaaatatcacttccgaatgagaagaatcacggcggatgccaacatttcatcgtggagagaaacggaggggcaagtcagatttccctgatgccttcgtatctgcgagactacatcacagaattcaactacctgtttcatcagatctacaagtgccgtaatcaaggtggagagaatgaatctcatgaaccattttatggatttggtaacaacctccgtaagttccttgaggcatttttattctttaagttcccccaccaagatgataagaacgatgcctttgaacggatcaagaaattctttggcgatgaggatccgactgcgatagctcttgtgaatagacttaacaacgagttttcacatctcgaatcgatccctgatcgtggattcagacctgtggagattccagaaatttccaaggtggcaaactacgtgttggacaagatttatgcggcggatccgcatcaatacaactccctgttaaaaagtattggcgaaccaccaagggcattatag

SEQ ID NO: 79051 - DNA, 321 bp, Citrobacter koseri
atgcacaaccagcatgatgtgttcatagacgctatacataccaaaaagaaactaagaatacgattctactctgaagacgatgggcgttacattgaaagagtatgtgcaccaatggatcacgctgccggaactagaatcaaagatgggatcccacgatattgggtttgggattttgagagcgataaaactaatcacaccctccctttaagggaagaacgtatcgagtacatgattgatacaggcgatcattttgaacctagttcctttgtttcatggcgtccagcatgggtaattgatagggattggggccagtacagctga

SEQ ID NO: 79052 - DNA, 1278 bp, Citrobacter koseri
atgaaaaataaatctaatttcagaattcgcgaactaacggaaaaaaagcaacgtgtgatgactgagactatgaaggccgttgctataccaggcaccagcgataatctgcattctaatctgacatcgcatagtgcaataaccgaggctatgaaggctgttgctatacccagtatcagcgaatcattgcaatcgagtctgacatcgcatagtgcaatgaccgaggctatgaaggctgttgctatgcccagtatcagcgaatcactgcgttctagtctgacatcgtatagagcgataactgaggccatgaaagcggttgatatgcccagtatcaacgaatcccttcgttatgcacttgagttacaacgaaatacgattgcagatgcaatgagcgctgttgctataccaagcatcagtaccatgctaagttcagcattagaatcacataatgtgaatataactgatgtgttaaaaataaggaaaagtacatcatttttagatggtaacttatttagcactatcgtcgattctggtcttggaaaaatggctaaagccattgctgacacatcaaattcgtcaaacaaccatagtttgttaagttggaaacttaactctaccatggaagaaatggctagaaaagtagttactttctcaagctacaatccaccaaacaagatgcttatagataattctttcctaacagccgcattagcttggagtaattcatctgttggcaaggaaatggcgagcattattaatattcagaatgtggatgattctgttattggtgatgcgttagaattaagcgaggttgttacctcccattcttcgagaataagtaataaaaaaaccatctttgaacaactccatgcgcttcctccatttattcaacaaataatcacatggattctttgtgaagttttattaagtatcgtagctgatgctggcaaggaatatatcttgattgcaattaataaaacagaaagctatgtgtcctctcttttaaatgagcatcctatcacccaaaaagagataatatcatccaacccagatattaactggaaagaactaaataagtttcgactaatcaccgctgacaacgtaaatatgagaactaaaccatcgatgagcgccgatgtgattgagactttaaataaaaatacagcaattgcagtaattgactctacgaatagacaatggttgtatattcaagtcatatttcatggtgaaaaaacgttcggatgggtgaatagaagttataccaagaggttaggtttatag

SEQ ID NO: 79053 - DNA, 1035 bp, Citrobacter koseri
atgactaagaacgtcaatacactattacttgaaactgagccgttcgaaccagaaggtggcgggataagtggctttggcattgaatatcttattttaaactacaatgagctagcggaattacctttcgaagatatttcatcttgcctgaaagaattcataatgaatgaatttatcataaaaagtgcagatggaaatagctacagcgttacgagaaaagggaaaatagctcgaataattcatctggcagaaaagaaaaagcttcaaccagcccttaaagaacaatacaaccacaatccagaggatctaatccttgctttactcgcaagtaataaaattgatgaatggagccagtcaagctttactgccacaggaataggtatctatctacatcagcatacaaccgaaagcattaacgacgccataaccatattgtcaagtaaaaacttcatggcaactgaagcaccttttcgtaatgaccgtttcagaattactgcgttaggtttacaacattacctttccactgtaagacaaatattaggcttagattccaatacagggatactcacccctgtagctgaagaatataccaatgataagatcatgaacctgcctaacttaaacgaccacataaaagaaaaccttaatagtcgatggtcagaaacagagaaatgcgccctttctgaggcctggcttgcaagtgtgataatgctcggcagtctattagaaggtgtgctactcgcagtgttagaagccgccggaaagaaagctctgaatgcaacatcagcccctaaaaacagaaatagtggtaatgttaaatctattgatacatggacactacaagactacataaaagttgccatcgagctaaagctaatcccttccagcatagaaaagcacatccatgaactacgtgatactcgcaaccttgttcatccaaacaaacagctacgcgaaaacatcatagccgatgaatcattgtatcgaatatccagagaagtgaccgaaactgtgatagacgcattgcagcgacaataa

SEQ ID NO: 79054 - DNA, 393 bp, Citrobacter koseri
atgagagattttaattctggcgacataattggtgatgtgaacatcattgataactcaaataataatcagttcaaactattgatccactgtgataatgaagaattgctccaggaggaagcacatcgatggaatctggttaaaaaagaaagaaatcaacgacttactggagtgttgtgggtttttgctttttgcgctgtgctgttactcattgctgcaggttggtatttcatcatgggcaaaatggagttaataaactcactgattggtggagcaggtgttgtagttgggctgatgaatctagcaaatgctgataaacctactgaatttgaagtgaggcagttgaatacactgaaggaaataaatacgttgctccgggagagaggggtacggtaa

SEQ ID NO: 79055 - DNA, 1146 bp, Citrobacter koseri; identical to SEQ ID NO: 19181

SEQ ID NO: 79056 - DNA, 534 bp, Citrobacter koseri; identical to SEQ ID NO: 19180

SEQ ID NO: 79057 - DNA, 318 bp, Citrobacter koseri; identical to SEQ ID NO: 19179

SEQ ID NO: 79058 - DNA, 222 bp, Citrobacter koseri; identical to SEQ ID NO: 25144

SEQ ID NO: 79059 - DNA, 1236 bp, Citrobacter koseri
atgatcaatttcaagcctaaaattccggcgatgcttggggctctggcggttcatgcacaacaggcccgtctgctcgggcagcagacacggaatgacagggccatttcagaggcccggaataaactcagttcagtgacggaatcgcttaacacggcccgtaatgcattaaccagagctgaacaacagctgacgcaacagaaaaacacgcctgacggcaaaacgatagtttcccctgaaaaattcccggggcgttcatcaacaaatcattctattgttgtgagcggtgatccgagatttgccggtacgataaaaatcacaaccagcgcagtcatcgataaccgtgcaaacctgaattatcttctgacccattccggtctggactataaacgcaatattctgaatgaccggaatccggtggtgacagaggatgtggaaggtgacaagaaaatttataatgctgaagttgctgaatgggataagttacggcaaagattgcttgatgccagaaataaaatcacctctgctgaatctgcggtaaattcggcgagaaataacctcagtgccagaacaaatgagcaaaagcatgcaaatgatgctcttaatgccctgttgaaggaaaaagagaatatccgtaaccagcttgccggcatcaatcagaagatagcggaagagaaaagaaaacaggatgaactgaaggcaacgaaagacgcaattaatttcacaacagagttcctgaaatcagtttcagaaaaatatggtgcaaaagctgagcagttagccagagagatggccgggcaggctaaagggaagaaaatacgtaatgttgaagaggcattaaaaacgtatgaaaagtaccgggctgacattaacaaaaaaattaatgcaaaagatcgtgcagcgattgccgcagcccttgagtctgtgaagctgtctgatatatcgtctaatctgaacagattcagtcggggactgggatatgcaggaaaatttacaagtcttgctgactggatcactgagtttggtaaggctgtccggacagagaactggcgtcctctttttgttaaaacagaaaccatcatagcaggcaatgccgcaacggctcttgtggcactggtcttcagtattcttaccggaagcgctttaggcattatcgggtatggtttactgatggctgtcaccggtgcgctgattgatgaatcgcttgtggaaaaagcgaataagttctggggtatttaa

SEQ ID NO: 79060 - DNA, 336 bp, Citrobacter koseri
atgaacagaaaatattattttaataatatgtggtggggatgggtgacggggggatatatgctgtatatgtcatgggattatgattttaaatacagattactgttctggtgtatttctctctgcggaatggttttgtatccggttgcaaaatggtatattgaagatacagctctgaaatttacccggcctgatttctggaacagcgttttttttgctgatacacctggaaaaatgggattgcttgctgtttatacgggtactgttttcatattatctcttccgttaagtatgatatatattctttctgttattataaaaaggctgtctgtaagatag

SEQ ID NO: 79061 - DNA, 348 bp, Citrobacter koseri; identical to SEQ ID NO: 21707

SEQ ID NO: 79062 - DNA, 591 bp, Citrobacter koseri
atgacccagagccgccgaccgtcgccactgcagcggagagtgctgattgtgctggctgcccttgatgaaaaacggccgggacccgtgctgacgcgggacctggaacgggtgctggaacgaagcggggaggccccggtctacgggccaaacctgcgcgcctcctgccgtcgtctggaggatgccggctggcttcgtaccctgcgcgccccgaatctgcagctggctgtcgagctgacggacgccggccgggccgtggcacagcctctgctgctggcagaacaggaccgcctccgggcagaacagcgtgcggcagaagtcgtcgtactgccgctggtcccggccgcaggtctgcccgcagacggcacttctgccactgatctggcggtggagctgaacggcatgacgtatcaggcctgccgtggggattttgtggtacgtctcgacggcagcacctgtctgcagttatggaataaagaaggcagggtggtacgcctggagggcgatccgctggaagtggcgcagtggctgcaggcctgtcacgatgccggaatggaggttcgtgtacaggttaatgaaaacgtcaccccgtaa

SEQ ID NO: 79063 - DNA, 258 bp, Citrobacter koseri
atggatcaggaaatgacgttttcactcagctatgaacaactgacccggtttgcggaaaaacgcatccgggaatgcaatctggacagccagggcgcgatttatctctgcgagtcagccaaagccggagccgtgctgatcttctggcatgaactggccataaatggctatgcctcaatgaatgccataaagagacaggagctcattgacgccgactttcagcgcctcagaaacctcatctggccggaggatgacaggtaa

SEQ ID NO: 79064 - DNA, 240 bp, Citrobacter koseri; identical to SEQ ID NO: 32521

SEQ ID NO: 79065 - DNA, 690 bp, Citrobacter koseri; identical to SEQ ID NO: 32520

SEQ ID NO: 79066 - DNA, 789 bp, Citrobacter koseri
atgagtggtccacaattgctttccctgcctggttcttttttaacgcctccggcaacattacctgttgccattgattacccggctgcgctggcactccgccagatgtcgatggttcatgatgaactgccaaaatacctgctggcccctgaagtgagcgccctgctccattacgtgccggatctgcgccgcaaaatgctgctggccacactgtggaacaccggtgcgcgcattaatgaagcactggcgctgacgcggggggatttttcgctcacgcctccgtatccgtttgtgcagctggccactctgaagcagcggacagaaaaagccgccaggacggcaggaaggatgcccgccggtcagcagactcaccgtctggttccgctctccgacgcctggtacgtcagccagctgcagacgatggtggccacactgaaaatccccatggaacggcgtaataaacgaacaggcaggacagagaaagcgcggatctgggaagtgacggacagaacggtcaggacctggattggggaggcggttgccgccgctgccgctgatggtgtgacgttctctgtcccggtcacgccacatacgttccgccattcctatgcgatgcatatgctgtatgccggtataccgctgaaggtcctgcagagtctgatggggcataagtccatcagctcaacggaggtctacacgaaggtgtttgcactggatgtggctgcacggcaccgggtgcagttttcgatgcctgagtccgatgcggtgtctatgctcaaaagaattccataa

SEQ ID NO: 79067 - DNA, 645 bp, Citrobacter koseri
atgcctgttattgctaatacgcatcccaaaggtggtgtgggtaagacaacttcatccgtaaacattgttggtgaaatgaagtctgatacagttgatctggatactcataccgggctttctatcattctggggctgagacctgaaggaaaagaaatttccgtgaaagtacccaaaacagtggatgagttaatcgaaattatgactccctacaagaacagcgataagacgttacttattgactgtgggggatttgactcagatcttacccgtactgcgattgcctttgcagactgcgttattgtcccttcaaaagactccctgactgaacgtattggtttgatgcattttgatggagtactggacgaaatcagctctatcatggggaccgatataactgctcacctgtatctctgtaaagttaatcctaacaagaagaaattccctaagcttgatgcaatcctgccatcgttcaaacatctgaagctgatgaagagccgcatttctgctcgtgcagaatttgaggatgtcattgagactgggatgggaatcactgagtctgttcatgggcgctattcggctggaggtaaggaagttattgccctgatcgaagaaatcaatcatctgattgaaaataacaaacagtaa

SEQ ID NO: 79068 - DNA, 981 bp, Citrobacter koseri
atgaaaatctttattgatgatggttctaccaacattaaacttgcctggttggaggatggtgacgtgaaaacgttaatcagccctaacagctttaaaccggaatggtcttttagtttactggatgatgctgccccggctaattacgagatcgacggcgagaagttttcatttgatccattaagtgctgatgctgtcgtaacgactgaaacacgctatcagtacagtgatgtgaatgttgtggccattcagcatgcgctacagcagaccggcctgaaagcgcagcctgttgatgtcatcgtcacattgccgatctctgaataccttgacgccaacaatcagaaaaataagcaaaacattgaaagaaagaaaaaaaatgtgatgcgtgaagtacgggtgcaggggagtgatgcatttgttattcgcagtgtttccgttcttcctgaaagtattcccgctggtttcagtgttcttgcggggcttgaggatgatgaatcccttttgatcgtagatctcggtggtacaactcttgatgtgtcgcatgttcgtagcaaaatgacagggattacaaaaacctggtgtgatccgaatatcggcgtgtccctgattacatccggggttaaggaacagatggctgtacatgctaatacaagagtgagctcataccaggctgacaatatcattgtgcaccgtaatgaacctgactacctttcccgtcgcatttataatgctgaacagcgtgagtctatcattaatgttatcaatgaacggcagaagttgcttattaaacgagttaatgatgtcatcagccgtttcaccgactatacacatgtaatgtgtgttggtggtggggctgaaattgtggccgaggctgtgaagaacctgactaaggttcctgatgagcgcttttatctgagctcatccccgcagtttgatttagtcatgggaatgataaaaatgaaaggtggtgtgactaatgagtga

SEQ ID NO: 79069 - DNA, 417 bp, Citrobacter koseri; identical to SEQ ID NO: 8543

SEQ ID NO: 79070 - DNA, 1275 bp, Citrobacter koseri
atgtttgcactggctgatatcaacagtttctacgcctcatgtgaaaaagttttccgcccggaccttcgcaacgaaccggtcatcgtactcagcaataacgatggctgtgtgatcgcgcgcagcccggaggcaaaagcccttggcatcagaatggggcagccctggtttcaggtgagacagatgcgcctggagaagaaaatacatgtattttccagcaattatgcgctgtaccacagcatgagccaacgggttatggctgttctggagtcgctttctcccgcagttgagccctactcaattgatgaaatgttcattgatttgcgggggataaatcattgcatctctccggaggtttttggtcatcagctcagggaacaggtaaagagctggacaggactcaccatgggggtgggcattgcgcctacaaaaacgctggctaaaagtgcacagtgggcaacaaagcaatggccacagttttccggagtggtcgcgctgacggcagaaaaccgtaatcggaccttgaagctactggggctgcagccagttggtgaggtctggggagtaggacgcagactgacggaaaagctgaatgcgctgggtattaacacagcactgcagctggcgcaggctaacacggcattcatccggaaaaacttcagcgtcattcttgagcgtacggtacgcgaactcaacggcgagtcctgcatatccctggaagaagcaccaccggcaaaacagcagattgtctgtagtcgcagttttggtgaacgaatcacagacaaagatgccatgcaccaggctgttgttcagtatgcagagcgggccgcagagaaactacgtggggagcgtcagtattgccggcaggtgacgacatttgtacggacatccccctttgcagtaaaagaaccctgttacagcaatgccgctgtggaaaagcttccattgcccacacaggacagccgggacattattgccgccgcatgcagagccttaaaccatgtctggcgtgaagggtaccgctatatgaaggcaggagtcatgctggctgatttcacaccatcgggtatagcgcagccgggattatttgatgaaatccagccccgtaaaaacagtgaaaagttaatgaaaacactcgatgaactgaaccagtcgggaaaagggaaagtgtggtttgcggggcgaggaaccgcccctgaatggcaaatgaaacgggaaatgttgagtcagtgttatacaactaaatggcgagatattcccctggccaggctgggttag

SEQ ID NO: 79071 - DNA, 438 bp, Citrobacter koseri
atgagtaccgtttatcaccgtccggctgacccttcaggcgatgacagttacgtgcgaccgttgtttgccgatcgttgccaggccggttttccttcgcctgccactgattatgctgagcaggaactggatctgaacagctattgcatcagcagacctgcagccaccttctttctgcgcgccagcggtgaatcgatgaaccaggctggcgtgcagaatggtgatctgctggtagtggacagggccgaaaaaccacaacacggggacatcgttatcgctgagatcgacggtgagttcaccgtcaaacgactgctgttgcgcccacgcccggcactggagccggtttcagacagcccggagttccgcacactgtatccggaaaacatctgtatttttggtgttgtcactcacgtgatacacaggacgcgggagtcacgctga

SEQ ID NO: 79072 - DNA, 249 bp, Citrobacter koseri
atgatccgcattgaaattcttttcgaccgccagagcacaaaaaacctcaaatcaggcacacttcaggcgctacagaatgaaatcgaacaacgtctgaaaccacactacccggaaatctggctgcgtatagaccagggcagcgccccgtctgtatctgtcacaggagcccgcaacgacaaggataaagaacgtatcatgtctctgctggaagaaatctggcaggacgacagctggctgcctgcagcatga

SEQ ID NO: 79073 - DNA, 435 bp, Citrobacter koseri
atgtacggaacatgcgaaacgctctgccgtgagctggcagcgcagtatacggagaacacgccgctgatgctggttgtctggtccccggaagagattcaggcactggctgacggtatggaaatttctctgaccggtcatgaaatcaggaccgtcctggcacgcctggaggacatcccggaagaccagcggattgagtccggtatttcttccgctgcggtgatggagattatccgcaacgagagcgaaaaccgcctggtgaccgtccctgctgaactgctggcgtccctgattcagaccgctgaacaggcattgtggaaacgtgaatgggccgcccgggatcatggcctcgccgtcccggaatgcgtcacccgccgtcaggaggtggttaatcaggcccgcaccctgctgaaaaacaacacacacgaaaacgactga

SEQ ID NO: 79074 - DNA, 423 bp, Citrobacter koseri
atgtactgtactgttaaagaaattatccgcgaagtgctgaacacagacgtgccggacagtgaatgcgtttttgccgtggtgctgacccgtggggatgtgcgtcacatagcccaggactggagtctgacagacgatgagctggaaaccgtcatgcagcgactggacgatgcctttgagcatggtgcggatgtcagcattgttcacgacgttgttcgtgagctgatggaagaaaagcgcgccagccgtcaggtgacagttccggcggtgatgctggaaaaagtgatggcgctggcaggcagtgaaatgaagcgcctgtatgccgtcgggagcgagaacgggggcgacggtgacgcattcgtcagggaagaacgcgaagcaatggacgttgtgttacaggcgctggacggggagcacatgtcatga

SEQ ID NO: 79075 - DNA, 435 bp, Citrobacter koseri; identical to SEQ ID NO: 8581

SEQ ID NO: 79076 - DNA, 720 bp, Citrobacter koseri
atgagcgcacgttcacgggcactgatccccctcagcgcagaacaacaggccgccatgcaggctgtggctgtcaccgaacaacgtcgtcgtcagggacgcacactttcagcatggccttatgccagcgctttctttcgctgcctgaatggcagtcgccggatttcgctgaccgatctccgcttttttgcccctgcgctgacgaaggaggaatttcatggcaaccgtctcctgtggctggctgccgtggataaactgattgaaagttttggtgaagtctgtgttcttcccctgccatccgatgcggggcatcgtctgttcccgtccgttccttttcgtgaaggtgagcggcgtcgtcagaaaaccacgctgacagagcagaaatacagccgccagcgggaacgtgaggcagaacgacgggaactggaataccagacatgttttgctcaggcgcagattgaccttgcgtttcatactcccgccacggtcggaagctggttgtcccgctggtctggtgttgttgaggagcatgatctggaaacgattttctgggggtggtgcgggcgttttccatcactgtcatcatttgaccggtttttctggcaggaggaaccactctggcggctgatttttgaagccggtgaggccggtcgtggtgcaccggtacaggtacgtgcacttgagcagtggatgatcccgaacaagctggagaacgcaatatga

SEQ ID NO: 79077 - DNA, 597 bp, Citrobacter koseri
atgatgaaatcagacgaacaatatcaggttcccgtgtggatgcgacctctgttgccgttgctctgcaataccggtggtaatgatccggaggaactgctgaatgatacagaaaccaccgccagtgcgaatattgtccgttatgtactgatagttgcagtgcggtcgcagattgatctgctgcagctactgtacaggaaaggactgttgcgcacagagataccaggtggcttttcaccggaagaagcgcaggaactcctggataatctggtgcgcagccatatcagcaaggcgctgtcgggtgagcgaatggcagcccgtgacagaaatgccgatctgacctggattcgccagcaactggtcgatgccgcctggtttgtccgtgccacactggaagcgcatgggatgggcgtcggaaatgagagtccctctgctccgccggagacaatgccggacatacagacacgggaactggttatgttgatcaagcgactggcatcatcgctgaaagcggtgaaacccgacagtagcgtggtgcgtgaagcgcaggactggctgtgcgacagaaaacttgtggatatcacagatattctccggtga

SEQ ID NO: 79078 - DNA, 501 bp, Citrobacter koseri
atgtctgttgttgcacctgctgtatacgttggaacctggcacaaatacaactgtggaagcatcgccggacgctggtttgacctgaccacgtttgatgatgagcgcgactttttcgccgcctgccgtgctcttcaccaggatgaagccgatcctgaactgatgtttcaggattatgagggattcccggggaatatggcctctgaatgccatatcaactgggcctgggttgaaggcttccgccaggcacgggatgaaggctgcgaagaggcttatcgtctctgggtggaggataccggtgagacggattttgacaccttccgcgatgcctggtggggcgaggctgacagtgaggaggcttttgcggttgagttcgccagtgataccggcctgctggctgacgtgccggagacggtggcgctctattttgactatgaggcgtatgcgcgggatttattcctggactccttcacctttattgacggtcatgtgttccgtcggtga

SEQ ID NO: 79079 - DNA, 435 bp, Citrobacter koseri
atgacagtcagcagcacgatttccgttttttgccgcgacggggtgttccgtaccgtttactgccacctgcacggggagccgacctggaacggtcgcatcctgcatacccactatgccaccggtcagcaggccgaagccctggttgaacacggtgatatccgttgcctcggtccccgttgcgacaaacccgccgggcatacgcttcagaacccggtggacggtgtgacggcttattacggacgtgacagtggtttccggatggacagtgaagcgcgtgagtaccgttctttcagggaggctattgccactgaaagcactgaagaggtgcgcttccattatgtgttcatcgacggctactggaaggtgatgtaccgcacgccggaaggctggaagatgaaagcgctcgcgctggcactgcgtcgctgtccgaaatga

SEQ ID NO: 79080 - DNA, 267 bp, Citrobacter koseri; identical to SEQ ID NO: 39973

SEQ ID NO: 79081 - DNA, 891 bp, Citrobacter koseri; identical to SEQ ID NO: 8520

SEQ ID NO: 79082 - DNA, 246 bp, Citrobacter koseri
atgagaaccacaaagcccggcaaaatgccgggcttttttgtcagcaggagcagagcaaacagcatgacgattgcagaacgtcttatacagaaaggtttcgacgagggttttaaacaaggggctcttgaagtggcgcgggaaatagcctgccggcttcgggatataggctggccgccggaacggattcaggaggtcacgggactttccggtgaagaactgaaaaagctgtttcctgatgagcagtag

SEQ ID NO: 79083 - DNA, 252 bp, Citrobacter koseri
atgaccggctgggaactgcgaatctggcgaaaaagcatgctctggtcacgcgaaaaagcggccagagaatttggcgtgacgcagagaacatggcacgcctgggaaaatgcggaacaggtggacgtcaccgtctggaggaccacccaggcactttcagtccgtgacctgctgcctcacatgcaggggatgcgtaaggcagatatcatcaggcgactggaaaatgaactgggggaaacggcagggaatgtgtga

SEQ ID NO: 79084 - DNA, 849 bp, Citrobacter koseri
atgaatcagactttacccactgctgacctgaatactgccggcacgacagatgttattccgtctgtggctatcgaccgcatcatcgcgcagcgtaacgaaggtattgcactgttcatgcaggcgatggaatgcctggcgacagcgcgcaagattctgctcgatgcgtcaggtgatatttttctttacgggtttgaagactgcgtgactgattccgttcggtgcatggataaaccggaagaagcgaaaaagaatatcacccgtcttgccgaccgtaaaatctgggaccgcctgatgacggatacggggatgtacaccttcatgagttcatgtcagcgtgatgagtggaacagccagttgatgagcaacacctgtcctgaaatcaccctggacaatgtactggcaacttttcgccatctgaatgccagtaagatgcagacatttgaacagggactgattgatgtctaccggaaattgtcatgggattacagaaccaataatccctgccgtctgggtaagaaaatcattattgaaaacctgctgtaccgctggagcaacgggcgtgtgacgctggactgcagcggacgggaggcactggatgacctggtacgtccgttttatctgctggaggggcgcaacgttcctgacttcaggaacagcatcggggcgcagtatggtgaatttctcgggaacggcgacaatgtcggtaagctgttagaaggggaatattttacggtgcgtggctaccagaaagggaccgtacacattgtctttaagcgttctgaccttgttgaaaaactgaatgatattattgcacggcattatccaggtgcattgccgccacgagtctga

SEQ ID NO: 79085 - DNA, 336 bp, Citrobacter koseri; identical to SEQ ID NO: 8519

SEQ ID NO: 79086 - DNA, 132 bp, Citrobacter koseri
atgagactgggaaggatgcagaagcatctgtttgttcagggaaaaagaaccggtgacaaggaatacgcagaagtgcttgttgccataaccgaacttacaaatacattgcgtaaacagttaatggaaggttga

SEQ ID NO: 79087 - DNA, 2700 bp, Citrobacter koseri; identical to SEQ ID NO: 8517

SEQ ID NO: 79088 - DNA, 2292 bp, Citrobacter koseri
atgagtgaacatcgcgttaaccccgagcttttacaccgtacagcctggggaaatcctgtctggaatgcactccagagtctcaatatctatggcttttgcctggtggcaagtcttgtggccagttttatctggccacttgcattaccggcatgtctgttgttcacactgataacaatgctggtatttagtctgcagcgatggcgctgccctcttcgtatgcccatgacgctggaatgtgctgacccgtcacaggacagaatgattaaaagaagtcttttcagcttctggccaaccctgttccagtatgaggtcattctggaatcaccggccagcggcatattctatgttggttatcaacgcgtcagggatattggcagggagttatggctgagtatggacgatctgacccgccatataatgtttttcgccaccaccggtggcggtaaaacggaaaccatctttgcctgggcgattaacccactttgctgggcaagaggattcacccttgtcgatggcaaggcacagaatgatacggcaagaacgatctggtatctggccagacgctttggacgtgaagacgatgtggaagtcattaacttcatgaacggaggaaaatcccgcagtgaaatcattctgagtggtgaaaaaacgcgtcctcagtcaaatacctggaatcccttctgttacagcactgaggcattcacagcggagacaatgcagtcaatgctgccccagaacgtccaggggggcgagtggcagtcccgggccattgccatgaataaggcactagtatttggtactaaattctggtgtgtgcgcgaaggcaaaacaatgtcgctgcagatgctccgtgaacatatgactctcgaagggatggccaaactttactgtcgtggcctcgatgatcagtggccggaagaagctatcgcaccgttacgtaactaccttcaggacgttcccggtttcgacctgtcgctggtcaggacaccatcagcctggacggaagaacccagaaaacaacatgcttatctctccgggcagttttctgaaactttcagcacattcacggaagcattcggggatatttttgctgaagattccggtgatatcgatatccgtgacagcattcacagcgacaggattctgatggtaatgatccccgctctggatacatcagcgcatacaacgtctgctcttggacgaatgtttatcacccagaaaagtatgattctcgcccgtgatttgggctaccgcctcgaaggaactgattccgatgcactggaagtcaaaaaatataaggggcgtttcccttatctgtgtttccttgatgaagtgggggcatactatacggaccgtattgctgtggaagccactcaggtgcgttcactggattttgctctgattttgatggcacaggaccaggaacgtatagaaggacagacaacagccacgaatactgcaacactgatgcagaacacggggacaaaatttgccggcaggattgtcagcgagggtagtacggccagaacgctgaaaagcgccgccggtgaagaagccagggcgagaatgaacaacctgcagcgtcaggacggcatatttggtgaatcatggattgacagcccacaaatcagcatcctgatggaaagcaagataaatgttcaggagttgattgaacttcatcctggcgagttcttttctattttccggggagaaaccgtaccatcagcatcattcttcatccctgacgatgagaaaagctgcagcagcgatcccgttgttataaacaggtatatcagcgtggatgcgccacgcctggaccgtctccgccgtcttgttccccgtactactcaacgtcgaataccgtcaccggaaaatgtcagtgccatcattggcgtcctgactgcaaaaccctccagaaaaagacgaaaaattcgcacagagccgcacacgatcgtggatacattccagcaacgcattgcaggacgtcaggcggctatggcaatgctggaagagtacgacacagatatcaacgcacgtgaaagtgccttgtgggaaacagcggtgaatacgcttaaaacgaccacacgggaagagcgacgaattcgctatatcacgctgaacagaccagaactacctgaaacaaaagaggaaaatcagatatcagtgagagcagaaagagcaggtataaacctgttaacgcttccacaggacaataaccacccgacagggcgtcctgtaaacgggtttcatcataaaaaaaccaaccgtccggactgggacggaatgtactga

SEQ ID NO: 79089 - DNA, 1071 bp, Citrobacter koseri; identical to SEQ ID NO: 8515

SEQ ID NO: 79090 - DNA, 1209 bp, Citrobacter koseri; identical to SEQ ID NO: 8514

SEQ ID NO: 79091 - DNA, 156 bp, Citrobacter koseri
atgatgccacagcgaacgtttttaatgatgttaatcgtcatctgtgtgacgattctgtgttttgtctggatggtgagggattcgctttgcggactccggctccagcagggaaacacagtgcttgtggcaacgttagcctacgaagttaaacgttaa

SEQ ID NO: 79092 - DNA, 252 bp, Citrobacter koseri; identical to SEQ ID NO: 8512

SEQ ID NO: 79093 - DNA, 177 bp, Citrobacter koseri
atgaatctggtagacgcctttgtcaaaaaagtaatatccgagccatatgaagaatatggaaaatggtggatagatgttgaatacatttcatggggtgttcccgggaaaacaagactgatgtttgagtcaaaggagcaggcactggaagttaaagaagggtacaaatttttaacgtga

SEQ ID NO: 79094 - DNA, 210 bp, Citrobacter koseri; identical to SEQ ID NO: 8510

SEQ ID NO: 79095 - DNA, 651 bp, Citrobacter koseri; identical to SEQ ID NO: 8509

SEQ ID NO: 79096 - DNA, 2169 bp, Citrobacter koseri; identical to SEQ ID NO: 8508

SEQ ID NO: 79097 - DNA, 585 bp, Citrobacter koseri; identical to SEQ ID NO: 8507

SEQ ID NO: 79098 - DNA, 1203 bp, Citrobacter koseri; identical to SEQ ID NO: 8506

SEQ ID NO: 79099 - DNA, 615 bp, Citrobacter koseri; identical to SEQ ID NO: 8505

SEQ ID NO: 79100 - DNA, 3045 bp, Citrobacter koseri; identical to SEQ ID NO: 8504

SEQ ID NO: 79101 - DNA, 801 bp, Citrobacter koseri; identical to SEQ ID NO: 8503

SEQ ID NO: 79102 - DNA, 189 bp, Citrobacter koseri; identical to SEQ ID NO: 8502

SEQ ID NO: 79103 - DNA, 405 bp, Citrobacter koseri; identical to SEQ ID NO: 8501

SEQ ID NO: 79104 - DNA, 528 bp, Citrobacter koseri; identical to SEQ ID NO: 8500

SEQ ID NO: 79105 - DNA, 705 bp, Citrobacter koseri
atgaaacctgaaacagaaatagatgaaaccggcagcttcggtgaacccgaagagaaacccgcccccttctggaaacgttccgtctgggggatatctgtagcaacatgggggctatgtgcagtcgtgttgctcgcagccatatggtatctgttcctgagagcgccatcggaaacaggcatgcctccgtttaatgatgcggatgctggcgtacagacctggcaaaccacacaagaatcatcaccttccgttcagtccactgagactatgactgtccggacaggagaagatatgagccagcttgcccgggatgtaaaaacagagctggataaccgcgatgaaaaaattcaggcaacactgaatatgcttcacgacagcattaacaagctgggcgaagctataaaaaaggatgaagaatacgcacaggaaacgcgccgtcagctggatgatatccggagccacctgaacggaatgatgacacagaaaagcgtcaccgaatcctcttccacaccgcatccagcaaagaaaaaaacgtcgtctgtacttaacggaatgaaaatcatgtcgatggaaactggcatggcctggattcgctggcagggtagtacctgggctgtcagagaaggtcagactctgggcaatgtggtgatccagcggattgatccgacgacccggaccatcatcaccagtgcagggacgttacgctga

SEQ ID NO: 79106 - DNA, 1290 bp, Citrobacter koseri
atgagtgctgaacaggatgccggtaaatccggaaagaaactggctgccctgcttgggctgagcagcatcatcttatttggcggcagctatatcgcgttttccaaactatcagggagtaacagcgatatgcagtcagccgtgaacataaacagtgctgcaagtggcggtacgcgcagcgttaccgaaacgcctcactatcgtgaactgttaagagcggataatgaacgaggggctgcggcggcagcccgcaataatcagacgttcattgccagtcttccgcaggggcttgatattccggacactccggaaaagcaacaacagcctgcagcaaaaccggaaaactatgcttatcgccaggcttccggcacaccacaggaggatcgagcagccagtgaaaagcgtatggaacggctgcaaaagctgattgtaagaataaaagatcagcatcctgccggtagtacaccaaccatagcaacgactatgtggaataaatctccggcagaaacaacagggcagaatggtacgcagcaattcgcattacagaatgccagcctgtccacgcctgtagcagaaaaagggatacaactgatacctgccctgacccgtataccggcatatattgatactgcagtggattctgataacccgtcatccaaggttatcgcaaccattcccgctggcccctgggcaggggcaacgctgttcagtccgggagtcaaactggtgggtaacggcgtggagatccatttcgaccggatgagctggaacggcatggaccttaaggtcaatgcatatgctcaacgggaagacaacctgatgtcatccgtggccagcaatgtgaatacacgctggtttaaacatatcattctgccgtcagtgttaggaggtgtgggcagtattggcacactttataaagatgccaacacgcaggttattcagggtaactatggcacggttaccggacgcgtgggaatgcccagtggtgaagctgttgcgggcgttattgccggtggtatggcggaaagaggaagtcagatattaacccgccaggcagaaagtgagccctataaacaggtagaagtgtatcagcatgaagtcgtatcaattctgtttgttgacccggtaatgacaaacgacgccaggtcatcttccctttccagtggcatttccccttcagttaatcgtacatcacaggcggaacaacgctcgcaggcacgaatgcagacagccatggagcaaagaaaagctgtgatgcaacgtcggtatgatgaacaaccggagacaccataa

SEQ ID NO: 79107 - DNA, 984 bp, Citrobacter koseri
atgcaatcacgttatttactgagcacactgctcctggtgtgcagcgccgccacgtctgcagataacgcaggatggcagaacgcacgcacaccacaaacgacaaattctgccagcgatcacgttcagaacgcctcccaaaacaccggaggtgttccggcaacactggtaaaaggtgagctgcctgcccccgggcaggccagcccgctggtacaggatgcggcaagacttgattctgagctctccgccgatgagattcgctcactacgcagtctcatggcggataacgagcgggccatcaatgcgcccatcaccagtgttgtaccccgtatcagctctctgacagttaatctgtcccccggtgccagccttcctcttgttcgcacagccatgaacaacctgagcgtagtgacatttaccgatatcaacggttcaccatggccacaatccgatcctccttataacgcggcaccaaaactctttgatgtgcagtacaacgagaacatggtgacaatcacaccattgcggccatgggcatccggaaacatttctgtctacctgaaaggtctgtcggtaccggtcatcctgaacgtaaccagtggcgaaacagatacgccgtcatccagtcaggaaatggacagtcgtctggatctgcgaataccacggcagggaccaaccagcccggttgtctccatcccgacggataaaatcgccctgcatgacgcaacattacaggcatttctggatggtattcctccccgggacccttcagttaagaggctgaaattcacaggtaatgtcccggatacaacgatctggcaacacggcgatgaccttctggttcgttcccgggcgatattgcgcgatgaatttgaacagaccttgtcctctgccgacggaactcatctctggaagcttcccgtcaccccactactgactttctctgtgaatggccagtccgttcacgtgacaccagaactggagtaa

SEQ ID NO: 79108 - DNA, 693 bp, Citrobacter koseri
atgaccgaaaataccgagccatcctcgccatcacatccggcacctgacccggaaatactgaagagcacaatcagggctatgaagcagtcagaacagcgggcaaataatgtccctgcgctgataaaagcgcttttatgtacgggcacatgtcttcttatcagtattactggtaacgccattcagtactggcactcaacgaatgtggagcgcgaatatttcgctacagacaatggtcgtctggtcaggctggcaccaacaaatcagccagcatggagtcagaatgacgcaatggcctttggcagccaggcactggcgaccgcattcaacctggattttgtgcactatcgttcacagatttcctctctgtctccgcgtttttctgacgaaggttttgccggatatgtgaatgcattacaggcatctaacattctggagacgatcaagaaagagaagatgaatctgaccgccacgacaggcgctggcgttctggtacgacagggacaaatgtccgacggcgtatggttctggacatttcagtatcctgtccgtatgcgtctggtcggccagacaaccagcaagccagaacagtcttttgttttcgaaatcaccatccagcgtgttgaccccagactgaaaccatccggtatggaaatccggcagatgatctcccgtaacgccggaccgaactcctga

SEQ ID NO: 79109 - DNA, 348 bp, Citrobacter koseri; identical to SEQ ID NO: 8495

SEQ ID NO: 79110 - DNA, 3768 bp, Citrobacter koseri
atgccgtctgtatcccgctaccgcacctggcttgccgtgcctgcagatgaaatagaagatctcaaaaaagcacatcccccgatgaacgggcacacgcccgtcatctgggacaaggagcacaaactctggttcgcccgcccgggggcggacctgtccaggctggaccgctggctgccccggccacaggacgtctccatgaacggcagtgatccggtcaccgagtttgcccaggttctggagaatgccggactggttctgaaagaactgccggtcatggacgggaaaatccaccgtgtcccgaccgccgatgacaaaaaaggacaaaaaagtggcgcatatcgcggattcctggacggcagacctgccggctggtacagggattatcgcagcgcggatgattcgccgatcacctggaccttctccggcggagaacagacagatccccgcgcaagactccacctgaaagcgcattcaatgcaacgcagggaggacgcggagcgggaactgaaagcacagtacaaccgacaggccgcgtatgcccgccgctatgtcaacaaatggccgcaggccacagcacatgaatacctgacccggaaaggcattcaggctgcaccgggggtgcgggtaaacaacaaaaatgaactggttattcccttcagtaaccgtaacggcgcgatacgctcttaccagcgtattccggtcaccggggggaaggatgcccgcatcctgaaagattcagagaaaaccggtaactggtttgcgctgggcacaccgcgcaacggtcagccggtactgtttgccgagggctatgccactgcggcctccctgcacgaagccacgggccttccggtactgatgacggtggatggaggcaacatgattgccgttgccgaaaatgcccggcaaaagtggacgcaaagcccctttatcttctgtgccgacaacgatcatgcaatccgggttaacaaaggtatcgtcagtgcaacaaaagccgcagaactgacaggaggaacggtcatctttcctgcgttcaccgatgccgaaaaagcgcaggggctgaccgatttcaatgacctggacgcaagccggggacgggccgcttttcagcatgtcatcaacgcccagttagaacacatcggggtttccacccccaacagtaacaccccggaaatccgcgaggcactggtgatcggcaacctcgtttttacaccggtccacactgaggaaaaaaccatgactccgacagaatatcctgaaacatcacccgatacagggcacagccatgaccagggaccttctctgccgtccgccacgcagcaggaacaaccagctgcttccagcagtaacattgctgacgaaacacagtcatttaccagtcacgccactgaaaataacggcaaagatgagcggcacgctgataacgttcaggcgcaaacggaaagctctgtagttcaggactcccctgcagaatcaccggcgtccccggaaagtacaacggcatctgcccctgatgaacccgctcatccggcggaacctccggaaaaagttgtctcggtggccacagataaagactggcgtgaatttgaagccgaactgtcacaaccggaaaaaaacgagtcacaacaggaatccggcacttcacctgaaataccggcccctgctgccgcccccgcatcccctgaagacagtccctcatctgaaaccatgaatgaatcagccgagccatcaccttcccctgatgcagtcaaagaggaaatgaccgtgatgacggagcctgatgacaaacaaagcaccggaatatccccggatactccccgggaagaggcggtcaaccatgtaactgaagacattccccttcagccagagccgttccttcctgagtcagatggccccgaagaatacgaaaactacagcgcatatcaggagctgatgaacaatgaaaatcctgagcatctgcaggaaaacagtgatatgccgtcgcaaccggacacagaccacgttcaggcagatgagtcagaacttcaggccacaacagatactgcagaaccggctgtccgggatgaacccactccacagcaacctgttcagagcacatcaccttctgataatacttcatcgtttctcgacaaagcgcgtggcttttttacgcgtaaaaaaacggattcacaggcacatgagaacagtgatcccacgccctcagcggaaaccacgacgactccaccgatacctgacagtattgtctacgccccggaacgttctgatgcaccgatatcgctcaacatggacgaaattcttaaagagcttgactgggaaaaacgagcagacagaaccgtcctgtacaaactggatggcaaacctgccttcattgaccgggtaaaccggctggaaatggtcaacggtgccagcaatgacgatcgcagcgttctggccgcacttgctgtggccaccaaattttatgggggcgtcatagagctgacgggcagtgatgcctttaagcaaaaagcaatgcagttgattatcgagcacaacatcgatgtccggatgaaattgccagatcaacgggctgaactagaaaaattacgcaaggaaatggctgtcagtaaggatgcagttgtcacccatcagccaacaccggaacttaaccggaataccccagaacaaccggctgtccctgaccccgttcaggaaaaagaagccacacaatccccggcgtcccctgttgcccctgaagcatcaaccgtcagcaccgcctctgcaccatcaccggctgaaccaggcaaaacggcagatgtggcaccagacgaagaaccaccaggaaaacttcgcccgggagagagcgtgactgccgtactgcacaattttggtcgtgctgaatatgcacccggcaaaggagagagtttctttgttgagcttaaaaaccgcagtggcagcaaactctactggggggaacaactggaaagtctggtcaaaaaccatcagaaaggtgacgtggtgacactgacacttcagaaccgcgaacaattcatcctcccgggagagcaaaaagcacgtttccggaataagtggtccatggagtcagttaccaacgggatctcggtatcacatgataatccggataaaggtcagcgtattcaggcgattccggtcgaaacctttatgaaagtggctgcgcaaatcagccaggggtggcccgaagagatgaaagcgttacgtatgccagaaaacgtcggctcacatctgtttatcggtgaagaccgacatccggtctccgcgccacagaacgcgaatcaggtaacagaaataaccagcgcagcccctgacaagctgacacctgttctgggatcagtggataaggatacgcgtgaactcaacctgttacttgtccagagtgccgatgaacatctgcagggtgtggtccggctgaacggcacattgtatccggcactggccaccccatcggccgacaacagtcagttggttatcaatgcgctgaccgacaaaggtttacgctttgcaggttatggtgaagcggtaaaccacgatgctgacagcacgaatcgccccgcaccggagcttatgcagtttcatctgaaaacccgggaagaaccgctttttgctgctgtctacacgccggaaaaacaacctgatgcgttgtaccgaaacctgggcttcgagcagtcatggcagcagtggtccaacagccaaaagccggaggacaggcaggaaaaaactctgcatcaggatctctcccacagccccggccgatga

SEQ ID NO: 79111 - DNA, 552 bp, Citrobacter koseri
atgtcaggtaaaaaaactatcgttactctgctccgggtatcgctactggcatgcccgttactgttcacgacaccatcgtttgcaatgatcgacacgccatccgtgaaggtcggcttttctcctgaaggaagcgcatccgctctggtgcttgacacaatcaacagtgcggaaagctccatcaggatgatggcatattccttcaccgacccggatgtaatgcatgcgctggcaaaagcgaaaaaacgcggagtggacgtccgtattgttgttgatgacaaggggaatacgaaccgggcaagtcaggaagcgatgaaatatatcaacctgctggacattcctctccggactgtagatgccttccccatccatcacgacaaagtcatcattgttgacggaaacacggttgaaactggctcctataacttctctcgtgctgctgcacgcaagaattcagagaatgtcgttgtgctcaagaatatgccggatgtagccgcacaatatcttgaacactggcaggatcgctggaataagggtacagactggaaaccctga

SEQ ID NO: 79112 - DNA, 291 bp, Citrobacter koseri
atgaaaagagaaggtttctggcgatatgcaacaccgccagtcaacatccagggcgtacctctgccgttcaccatgatttatctgtttatatgcccctttccctccaaaacaaccttctggatttgcaccggcatcattttatttttcgttattctcgaccgttcaggctggactgtcaggactatctgtacacgcattttcagcattctgagaggggccatcgcctccggtcgtccatggtggtatcgccaccatacggaatcaccacgagactggactggcctcgattaa

SEQ ID NO: 79113 - DNA, 1149 bp, Citrobacter koseri
atgaatattcctgatgagtttggtctttttccgtttcagcgtttcactgcagatgaactacggcatttctttgtctggtgtgccgcacataaagtcagtgatgtggatctgaccggcgggtcacctgtatctgtcagtcgctttggccgacgggtgcgttgttccagtgcaacgttaccaaccacactcatgtcctccctgattgatgaactgttcggtcgggaagtcattccccgcgttctggcaggcaatccggttgacaggacgatacagattaacggggatgcatccgggcgctatggtcttaaacgcggagaacgcatccggttacgctctcacctcattcagggcacatctggtgcggaggagaaagcaatctcaataaccatgcgtgtcatcccgacagaaataccggacattctctccatgaacattgaaccagacctgcttgaagcaatggtctgcaaaagcggtctgggatttgtatgtggtgaaaccgggtcaggaaaatcaacgctgtgttcagcactgtaccgttacattatggacaatttccccgacgccaaaatcgtgacatatgaagacccggtggaatatatcctgggaaatgaaaacgatctgctcccaccgcatcaggcagaaatcgggcgtgatgtggtcagttttgctgccggactgcgttctgctgtacgacgtaatcccgaaattatcggtgttggtgagatcagggataacgaaaccgccgacgcagcggtacaggcaggcaacaccgggcattactgcctgagcaccatgcatacgaaatctcctggtgaaacgctggcacgtcttcttgggctgtttccccctgtcatcagggattcgatggcctgggctgtcctgtcactgttgcagttcattctggttcaggttctggtcagaacaaatgacggtggtcgtaaagccgtccgggaatatatcgtcattaacgatgagcttcgcgacaatctttccggaatgccgcatgcagagtgggggcatcacattgatgccataatccggcaggagaagcgccgtatccgggaccagattctggaaatgtatatccggaatgaagttgaccgaagagaagcgattctttttatcccgccaggggagttacggtcatga

SEQ ID NO: 79114 - DNA, 819 bp, Citrobacter koseri
atgaaagcactcacctctctccttttgccagtaatactgcttactggttgttcttcttcccctaccatctcgccaggtggtgtcaatacgccaccacctgacattaatgcatggcttaaaccacgaagtgaaaagccggatagtctgtcagaaacacgctggaaaatgctgacagacgcaggtaaaacgcttggatttcgtggtggcaaggctcagcgttcatgggagctgattcaggcgctcaacgcccgggaaagcacacttaatgccttatacgatttccggccactgattagcccggaaggctggctaccaccggttattgatgaagcacaggacgtagctcatatcacgccagatcaaatccggacctcttcccgggtctggaccatcattcgccctgaacgctttgtcagcaatccaccgggctggcgtgactggcttctccgggggctttcaacaacagccactccgggtacagaaggcagcgtcgttccagaagacagcgtgcaacgaaaagtgtgggaaaccgcattacggcagggatggcaggaaggaagacaaaacgccgacctgacgcttgaagccaaccagaaaaccctcacccgtgattaccggggcatgatgctgtactcacttctctggcgtcagggcatgatcacccgtccggatgtttctgatcaaatgcaaaccgttacaggtgacgggaaaaaactggtcactggagatcgtgttcgtcgccttaaaaatcatgcggaattcaatcttcagaaatctcactggcgtccgcttataggcactgaaggaggctcccgatga

SEQ ID NO: 79115 - DNA, 459 bp, Citrobacter koseri
atgaaccgtattatacctgcggggtgtcttgccgccctttttctggctggctgcaactccccttctcagcatactcctgttccgcgtaactacggtgctgcctctgatgtggcggttacccggcacactcagtacacattatgggacaaaggtgtattttccggccaacttccggtttcaacggggtctcatcttctgacagctaacagcgatcgcctttcctttgactgggaaggtgatgcaattgaattactgaacgaactggccagagtcagggggatgcagtttaactacaatggtgtccgcctgccgttaccagtcaaccttcacgtccgggatatgacgttttccaatacgttgagacttattgaagcccagacagcctggagagcaacaatccatcaatatccgggcttgttacaggtcagcttcatgcagccggagaaccggaaaaaatga

SEQ ID NO: 79116 - DNA, 582 bp, Citrobacter koseri
atgaaaccacgttcttcttattcaaaaacagcattcattcttttattttctgttttcctggtagcggcagtgacaaaagcaaaaagctcgcttcccgatatcaccctggaacaggcaaaagaaattaatgctgataacaccgttattttccttttccgccatggagaacgttgcgaccgttcagatatgccatgctattcggataaaagcggaatcactattaccggtacagagaaagcacagcaggaaggtattaagttcgcaacaatcttcagtgaatatgatatttactccagcaatgcggtaagaaccatacaaactgcaaaattcttctccggtaaagaacccgtcgttatggacagtttatcagactgcaataatgatctttataagacgcttgaatcaatcgcaagagaatctcataaaaggaacatagtaataatgacacataatcattgtttatcatttctggccagagataggctcggcaagaaattcaaaccggcgtaccttgatgccctgatcatgcattacgatggtacccggctcatacttgacggaaaatacaacaaagaggcatag

SEQ ID NO: 79117 - DNA, 1200 bp, Citrobacter koseri
atgaagaaaaatcatattacccgcaccatcattgcatctgctgtattattttcctttaacgctgcagcagcgacgtcatattttgaagcgcgtaacgatgcaatgggtggtaccggggtagcatcttcccattatggtgtggcacctctggcaaacccggctttactgacaaagcacaacagcaatgatgatttcagccttcttctgccgtctgttggggcacaagttgctgatcctgatgatgtatcaaataaagctgatgatgttaaagatgactgggatttgtttgacagtgctgtagataaccagcatggcgtacaacaggcagcggcaaatcttaaacatcgtctgcaggaattccgcaatatcaatgcagatgctcaggtaggtgtatcagctgtagcagccatggcaaatgacactctgccgtttgcccttatggtcaagtcttacggaactgtcagcgtaaacggaaaagtaaacgatgcagacctggattatctggacaaagttgccaatggaacaattaccgacgtcgataagaatgccctgacctcacgcgcattcgggcgtgcagctgtaattaccgacgtcggaatttcatttgccaaagaactggaaacggccggacaaaaatggtctcttggcgtcacaccaaaatatcagcgtgtggacctgtttaactacaacgtaacggttcgtgattacgacaaagacgattttgacggtgacaagtaccacaacacgaaaaacggattcaacgccgatattggtgcttatacagacctgaatgacaactggactgtcggtcttgttgcccagaacatcattccacgcagtattgatactaaagtcgtcaatggctttaaagaaaccttcaaagttcgtccgcaggcaaccgccggtgtatcctggcataatgacctgtttaccactgctcttgacattgatctgactcctgccagtggcttcacttctgacagcaaacgtcagtttgcaagtgttggtgctgaatttaacgcatggaaatgggcgcaattgcgtgccggttatcgtcagaacatggcatcaaactccggaagcgccttcaccgctggcgttggtatctctccatttgacgtcgtacatatcgatgtttccggcctggtaggaactgaccacgattacggtgcaatggcacaacttcagttcactttctga

SEQ ID NO: 79118 - DNA, 825 bp, Citrobacter koseri
atgagactgaatacgaccggtattgcggcccgaatgatgctctcgctggacaaaaaagcaatcggcgaaaaactcatcaacggtcgtcagataaacccgacacctctgcaggtccgttacccccaaggggtaagagaagttctggggataatgagcgaacaattagccatatccaccgctgatttaacccgaatcctgcttgaggatgctcttcataatatgtttatgcctgcggataacaccacaggaaacataataagcagaattgaatacatcatgctgtcgcatgatataaatgcgccattactggcaacattgctgtcgccatggaatatccgctccacggttatacaggacccggccagacttgcagactatctttcagctgacgctctcgaacatcttgctgaatgttttaatctcaatccggactggctgaatggccatgaaaactatccgatagcgttgtccggtgaatggccagatactgctgataatttcagaatgcttattagtgatagcagcaacactgaagttattttctggcatagtttccccttcgcaggaaatacgaaaagagaatattgcggggtaatattgagacagaaaaaagaaataaatggctctgtaatatatccggcactatcattatcaccaacacttctgaacgatgaaaaaagaaaatggttaactgaatatacaaccaggcagaatacaacaatgtctttgcgacgcgtcacgttgagacctggccttgccgggaaccttattacagggcaaatactacctgttagcttatttaatacgtctttattaccctggtaa

SEQ ID NO: 79119 - DNA, 1155 bp, Citrobacter koseri
atgccgtctccacgcatccgtaaaatgtccctgtcacgcgcactggataagtacctgaaaacagtttctgttcacaagaaagggcatcaacaggagttttaccggagcaatgttatcaagcgatatcccattgcccttcggaatatggacgaaataacaaccgttgatattgctacatacagagacgttcgtttagcagaaatcaacccccgaacgggtaaacccattacaggtaatactgtacgtcttgaactcgcccttctgtcatctctgttcaatattgctcgtgttgaatggggaacctgtcgtactaacccggttgaactggttcgcaagccgaaagtatcctcgggacgagatcgccggctaacgtcttcagaagaacgtcgcctttctcgctatttccgcgaaaaaaatctgatgttgtatgtcattttccatcttgcccttgagacagccatgcggcagggcgaaatactggccttacgttgggagcacattgatttgcgccacggtgtggctcatttacctgaaaccaaaaacggtcactcacgggatgttcctctgtccagacgtgcccgtaactttcttcagatgatgcccgttaatctccacggcaatgtttttgattacaccgcatccggctttaaaaatgcctggagaatagccacacaacgacttcgcatcgaggacctgcattttcacgatctacggcatgaagcaataagccgcttcttcgaactgggtagcctgaatgtaatggagattgctgcaatatcaggacatcgttccatgaatatgctgaaacggtatactcatcttcgtgcatggcaactggtcagtaagcttgatgcccgccggcggcagacacaaaaagtggcagcatggtttgtgccgtatcctgcccatatcacgaccatcgatgaagaaaatgggcagaaagcgcatcgtattgagatcggtgattttgataaccttcacgtcactgccacaacgaaagaggaagcagttcaccgcgccagtgaggttttgttgcgtacactggccattgcagcacagaaaggcgaacgtgtcccatctcccggagcgttacctgttaacgaccctgactacattatgatttgccctctgaacccgggcagcaccccgctgtaa

SEQ ID NO: 79120 - DNA, 135 bp, Citrobacter koseri; identical to SEQ ID NO: 10665

SEQ ID NO: 79121 - DNA, 1293 bp, Citrobacter koseri
atgaaaaaatatgaccgaggctgggcatcgctggaaactggcgcggctttactgattgttatgctcctgattgcctggggagcgggcatatggcaggactatattcaaacaaaaggatggcaaactgaagcacgtcttgtcagcaactggaccagtgcggcccgctcttatatagggaaaaactacacgactctccagggcagtagtaccacaacaactcctgccgttatcacgacaaccatgctgaaaaataccggctttttgtccagcgggtttactgagacaaacagcgaggggcagcggttacaggcatatgtggttcgaaacgcccaaaacccggaattactacaggcaatggttgtatccagtggtggcacaccttatccagtgaaagcacttatccagatggctaaggatattaccactggtcttggtggatatatccaggacggcaaaacagccacaggtgcattacgttcctggtcagtagctttaagtaattatggtgccaaaagcggtaacgggcatattgccgtattgttatcgacagatgaacttagtggtgcagctgaggacactgatcgtctttacagattccaggtcaatggtcgccctgacttaaacaaaatgcacacggccattgatatgggatcaaataacctgaataacgttggggcagtaaatgcccagacaggtaatttcagcggcaatgtgaatggtgtaaatggcactttcagcggtcaggtaaaaggcaatagcggaaactttgacgtaaatgtcaccgctggcggtgatatcagaagtaataatggttggttaattactcgtaacagtaaaggctggctcaatgaaactcacggtggcggattttatatgtccgatggatcatgggttcgaagtgtaaacaacaagggcatctataccggcggtcaggtgaaaggcggtactgttcgggctgatggtcgcctttatactggtgaatacttacaactggaaagaactgccgttgctggcgcatcatgttcgcctaacggccttgtaggccgcgataatacaggggcaatactttcgtgccaatccggtacgtgggggacaataggtggaaaactcaaagttactcagctttccaccacaggttatctggggcaattcgacttctgtgccattgccagaatgggcaacgcagaggatgcccactactgccaggtagttgagagcccagcaggttcacgcaaatggtacaaatacgagcataagacaggttgtattgcgtcgtgtgtaacgctcaattaa

SEQ ID NO: 79122 - DNA, 657 bp, Citrobacter koseri
atgcagacaatcgtaggcataagtctatcccctgtttatatactgccattgatgttcacattttccattattggacgaactctgctattcagagttcgttattttttatctgatacgggacatctctggtataagacacaccctgctgttctgtcaggaatatggctatacagtatagctgtggcgttaattattttatcatcatcaccactgctctaccgtattcatgctgtccttattctttcgttcatactgcaaatggcggtaacggatgcactgacaggtttattaccaggaacattcacccgacgttttttaattgcaggaatgctatcacaaatcacgactgatatatggtggttccgtacaacagaatttgccactgctgcaattgtcttattctgccttcataaattagttaaccgccatcgtcttaatattggcactggagacctgtggcttattgcaggtattaccgcatggtcagggttatataacgccatatggtgtgtgttgctgggcacaggaggatttgtcttatggcattcaacatggtgcataaaagggcataaagaaggccctctgggtccatggctatgttttggccatgtccttttgctgctggataatctttatcaaccactatgggtaatctga

SEQ ID NO: 79123 - DNA, 561 bp, Citrobacter koseri
atgtcagggggtacagtacccctcagacttatttcattaatcctgcttttttctcttattccacccgcccgagcttcatacgtagctcccaaacagatctggaccaacaagtgggacaattgctttgccgctgccggcgcgcgctatcaaattgaaccattattattgaaggctatttctgccggggaatcttcgttgaggccgggcgcaattaatataaataaggacaaaaaaacaggtaaagccagtagcacggattatgggttgatgcaaataaactcaacccatattccaaagctgataaatatgggcgtaataaaaaagtctgaggatttaattaccaaaccatgccttaatatccatataggaagctggatactggcaagacattttcagatatgtggcgtcagctggaattgccttgggtcatacaatgccggattccgtaaggacagacatgaaacaagagagcaatatgccaataaaatatggagaatttatcgtgacatgaaagggatatgtcttcccggacagggaggcaggcaatgcagacaatcgtag

SEQ ID NO: 79124 - DNA, 615 bp, Citrobacter koseri
atgttagtagaaaatattaataccactttaactggaaataataagaagaatgagcctcatgataaaggatgggcaattttggagcagggaacaatagcgctcgttgttctttttgttatagtcgttgttctgggtagtttgtatgcgttgcgtacaagagccaatgtggcaactgaaaccgcaaatatacaaacaattatcacaagtgcccagagcctgctaaaaggtagcgatggatatacatttaccagcagtgccaaaatgacaggtgccctcattcagatgggtgtcattccctctgggatgaccgtacagggcgacaaaacatctggtacagcaacgctctataacgcatggggcggtgctgtaactgttgccccggcttcaacatcagggttcaacaacggttttaccgttacctatgataaagtcccacaggatgcctgtatccagattgccacacgaatcagtaaaactggtttaactaacggcattaccctgaacagtactgctcacagtgatggaaaagtcactactgaagaagccagtacgcaatgcaaggcagataatggcagcactggtacaaacaaacttatcttcaccatcaatggttaa

SEQ ID NO: 79125 - DNA, 1098 bp, Citrobacter koseri
atgcgtgaaatgaatttcagtcaacggctgaggcgtttcattgtcagaaaaacgttcagcgccccctacagggtgcagttttacgaagccctgcgttttctgctggaaaataaacagccattaaagaccgcactggaacagatgcgggatgcctggacagactttggacgaaaatggcatccctttgctgaactggccacagactgcattgagtctcttcgtgaaaacagtggcgaaaactctctggaatatactcttagtttatgggttcctcaggaagaggccgcagtaatcagcgccgggataagaagtggttcaattgtggatgcactgcaattcgccaccactcttacagatgcaaaagaacaaatccatcaggctatatggcaaatggctatttatccggtgggattgttaatcatgatgacggggacattatatgttctgaatacagagctaatacctgaactgagcaaaataagctcccccgattcatggagtggtgctcttggttttctttatggattatctgtttttgtcgataattacggcgctatatgtgccgttctttttgcagtgatcacaggtttaatatcatggtctctgccaaactggaaaagccctgacagtgttcgtacttttgccgacaagataatgccatggagtatttatcaggatatacagggagcaacatttctcctgaatatggctgcacttctgaaagccaaaatgacgacgctcaactcgctaaacattcttcaggagtttgcatcaccatggttaagcacacgtcttgacagcattatttaccgcgtccgccagggggatcatcttggactggctttgcgtcagtgcggttatcagttcccatccagggaagcagccaacttcctgtctttattacagggagatggcgcaacagagctaatcagcaattatggtcaacgatggcttagtcaaacacttcaacgtgtaaagaaacgggcaaacgtgattcgtttaattatgctgatatttcttgtcatgtctctcatgttactggtttttgccattatggatattcagtctattagtgacaacagcatgggtaacttttaa

SEQ ID NO: 79126 - DNA, 1554 bp, Citrobacter koseri
atggataaatataatctgaaggatgctctcctttttatatccaggggagacacccatgaaattcttatagaaacaaaccagcggacaaggcctgacgtacaaagtaatctccaggagctgctaaaattatatccggatatcaacccaaaagtagtctcgttgtcggagttacaggaggcaggtcaggatgagaaaaacagaggcccgaaagaacgaattattcatctgaaagaccttgctgatgtcagtgaaagtgagaagaaagttctatcttattttgaaactgccagaaaacttggtgcttcagatattcatttcttaatttcagagtctattttcaaagttcgcatgagaatattcggtgaactgcagactgtagatgaagatcaaccagcactgggctattcactttgcgcaacagccattctgtcaatggctgatgtcactgaaaccagtttcttccctcaaagggagcaggatgcgcgcctgtccccacaattaatgcgaaaaataggaatatttggtgcacgctacagtcacagacctacgggagacggtctgattgcagttatgcgcctgatacccgatgacggagataaagttcccacgtttaaacaactgggctttatcccggaacaaatccggttgctgaacataatgctgcgccgcccggaaggaaaaatagtcctgtcaggtccaaccggttccggtaaatcgacaacgttacgcagcgcctgccgtgtatatcttgacgataatcaggggcgacacctgctaacaatcgaagatccgctggaaggacagatactgggagcaacacagactccgattatctgcgacaaatccgacgaagatgccgtcaaactggcatggagtcgggctatttcatcggcaatgcgacttgaccctgatgccatcatggaaggggaaatgcgcgatcttatctcgatgatgtcaaccacctacgcggcacagaccgggcacatagttctgacgacattacatacaaactcagctctgggtataccggagcgaatgattacgatgggtatgaatgccgatcttatttgcgatgcgcaattactgattgggatgatcagccagcgccttgtaccaactctgtgtccctcctgccgtattccatgggaaaagcgagcacctgaacttagcgacgacgagcgtgattaccttgagcggcactgcaataaagattcactctgcagtacagataatatctggttccgaaatcatcacggatgctctgaatgtaatcacgacgtaatcattaacggcagaaagcgcggtgaaataggtaaaggcctcaccggcaggactgtaattgctgaggtgatagaacctgataaccgcttatttcagattctgaaaacacgcggcaaagttgcagcacgtaaatactggctggaaaacatgaaaggcatcagtcgtgtagagcatcttcttcgccgtatcaatgaaggtctggtagaccctcttgaagccgacagaatcatccctctggacgaagacgagcgcctcagcatcgatgatgtctaa

SEQ ID NO: 79127 - DNA, 453 bp, Citrobacter koseri
atgcgtccaggtaaattactcattattccatccatatttttcttctccggtttttcatttgcaacaacacaacctcttgtcacaataggagaacttgaagcacaacaaaaccggaatattcttttacaggcaaaagttcagggcgcacagctacagaaacaactcgaagaatcagatgttacttcatcatctgaaactgtttcaggtttctctggtgtgactgcctctttgccatcagtttcagagcagccgacatctaaaaacagaaaggaattgcccgttattatggaaataaacggcaaagataaacgtcttaatgccgttcttcgcatggctgatggacgtcagacaagcgtcaccactggcagccagcttccaggcacatccgtcacagtgaagtcgatctcattgtctggcgtcacgttaagtgatggcaccacccttactttctga

SEQ ID NO: 79128 - DNA, 1296 bp, Citrobacter koseri
atggctgatgaagatatcaacccggttgtacttctcgcagatcctaaagtaaatcatcgcgtgtgggcagcctgtcttaaatggagtcctgtcgtaaaaaaacagcgagtcccttctcatcagaaacacaagccccatgtaaaatccagacggcttacctctctgaaagtgactgtaggcagcagaagttcccgtgggaagatcagccgcattaccggcacaggaatactggccaggccggagcgcaatcattatttttcccttgctctggctttctgctcatgggtgagaaatggatacggcgtcttccggtacagcgataaggagcttttattccttgcctccattaatggccagcctgccgttatggctgatctgtcaggaaatgatgctgatgttgctcaaaaggtcagtctttttctgacgatgaacgaagagccccccgaaaaatggcaggtcgtatctcctctggaacatcctgataactgggaaagtattattacccggttatcatcagcagatctccgccgttgcaaacttactgtcggcaatcgcagcaaattcacactgcctgccgtactttttttagtagcagccagcgcaggcactgtattctggatgactcagccagagccggatgtcgtaccgacgcccgaggagatagctgcacgggcaagattgcagtttaaaaagcccgatccaccgccagaactcccgcatccatgggcatcacaacctgtaatcagtgattttctgaaagcctgcgcggaccttcgaaaaccatcaccggtcgcgctagaaggctggaaacttaccggtggaacatgtactcccgagacattcacactgatttacgaacgacagccaggaggaactattgaaggctttctggcaagaagcaaagaaatctttaatgttattcctgactttaaccttaaagatggtgcacgcctggcttctgtaacccggccactgccttccctgccccgcagggatgaggcagtccctaccccctcagaacaactgatgcgggtgttcacgtggtttcagaaaaaacagttaacgccggccattaatgaaatagccataccggaaccattaccaggtaacgatggtgaaccagcccctgttcagaaatggaaagaatatcagttcagtttatcaacgcctgtaaatcctgatgagttgttccctttatttcaggataccggcgttcgtctgagcaatatccattttgaattaaacggcggtactttcagttattcctcagaaggtcatatttatgcgtccaggtaa

SEQ ID NO: 79129 - DNA, 1683 bp, Citrobacter koseri
atgaaaaaatcacaccagcgttcaatgaagctggcggtgctcccctgcatgatcgccgtcgctctttccatctccggatgtactttcagcgaaatcaacaaaatgcagaaaaaagcacaggaagactcagcacatgcacgggaaaaggtatcagccctttcggcccgtaaatcgcaggctcttacctggctcgataatcaatggataaaccctgttccggtcgctcagatatcaagagagaaaaaacaaacagctccggcctgctacatcacgcaggcaagaaaaggagagatcactctgcaggaactggggcaacgtattactgccgtatgcggcatccctgtgatcatcacgcctgacgcagccaattcaactcttgaaggaggcgctacccgccagatgacaggaacactaccagcaccagatgaaaatgggcgtctaccgttaagcagcctgggcagcacaacaatgactacctccactcagccattaacgctgaataacctcatgtggcagggagatatcaatggtcttctggatctgatggccagccggagtggtctgtactggcgcatggataatggtcggattgtattctatctgactgaaaccagaacgtatccacttcatatgctgaacaccaaaaccagcagcagttccagtgtcagctctggctcaacaagcacaatgggggcaacaggaggccaggataactcagcatccggtgatgcaacgtcctctcagagcacaaccgttggtcaggaatacgatctgtatgaagacatccggaaaactattgaagcaatgctgacaccagaaaaaggccgttactggttatctgcatcgagctcaacgctgactgtcactgatactccagctgtccaggaagccgtcgcacgatatgtggacgaacaaaacagtattatgaaccgccaggtagccctgaacgtacaggttctgagcgtcagcaataccagaaacgaacagttcggtctggactggaaccttgtttataaatcgctacattccgccggagcaacgttgaacaatgcaagcggagattttacaggcgctacatctgcaggcgtatcaattctggatacggcaacagggaatgccgccaaattcagcggttccagtcttctgattaaagcgctgagtgaacagggcgatgtcagtgttgtgacttcacaagaaagcactgtcacaaacctgacgccggtacctatccagatggcagatcagacggtttacgtcgcccagtcagcaacaacaacgactacggatgtaggagcaacaacaacattaacgccgggcatgatcaccaccggattcaatatgaccctgctgcctttaattcagaaaacgggcaatctccagttgcagatgaattttaatctgtcagatcccccaacaatccgtagctttacgtcaaaagacggaaacagttacatcgaaatgccgtataccaaactgcgttcactgagccagaaggtcaatctgaaagaagggcaatcacttgtcgttactggtttcgatcagaacaatacgacgacaagtaaagccggtacgtttacgccagcaaatccattatttggtggttcacaaaccgggaaaaatgaacgcagcacgcttgtaatcatcattaccccgactttcccgtcaggaggcaacaatggctga

SEQ ID NO: 79130 - DNA, 438 bp, Citrobacter koseri
atgggatggctggtcatggccgtcggcctgaccattctgattatcactggtagctaccagaatcagaagatgtctgaaaccacaaacgcccagcaatatgcaagtgcgtctgtatgggcaagtcagatactgatgattgctaacagaatcaatgatatcagatacgtatcaggccagcaggacggagtaatttcctcagataaactggctctccctgtcactccggactcccgaattaaacatcagttacaacaggggcgtctgtgggtatggatgcctgaacaaccaggtcttgttgaaactttgcgttcaaaaagtcgtggttctgcactaatagggatcttccaaaacgggcaactcacctggctatcaggaactgcaaccggtctgacacccccggcaggcattactgctggttctgtcgtctacgttaactaa

SEQ ID NO: 79131 - DNA, 1068 bp, Citrobacter koseri
atgaaaaaaaactatctgacacttatactgccgtcattattgtccggctgtgccggaatttccggcagcaataacgtggcaccatcagatacgcctgctctggtttttgttgacggacaaatcagtgagagtgctggcgttctggcacttacgcaacaacgtctttctccacctaaaataactccccccccgagagtcagcgtgccagagacagtaaaaacagcacatccagtcagcgaatcccgaccgttaccttcaccaacaataagtcagaatttctcccggttaatcattacaggcaagcctggtagcgcccctgtaacactatcgccgacggcccgtaaccggaccgtcagtcagtggataaaaacattactaccggaaggatggaaattcagacaagagaatgcagccacgcccaagctgaataccaaactggtttcatggtctgccaatgatcagtggacccgttctctgaatcggttgctggaagaacaacacctatggggccatctggactgggataataaaacgttgaccgtcacaacatcagctgctgcaccggcacaggacacggcaaccactatctcgccagcagccatggtaaccacatccacttcccctgaatctccaacaacagcaaatagccagaacaaaccacgaaatccattcagaggaaacagcgtatcttcgtcaacccccgccgccaccccgactccaaccggctccacagtcaagtctatcccgctcatgaccggaacgcctgttaaaccggtatctcagggtaaagagtggcgtgcgccggcaggcaccacattaagagagaacattatcaagtgggcagaagaaacaaaatgcgaaagcatggcatcaacgcactggatggtcatatggccactttctgtaaccgattaccgtctggatgcgcctttaatgttccggggatcatttgaatcagccatggagcaggtatttgagttatatcggactgcgcaaaaacctttatacgcacaggcttctcgcatgcagtgcatcattacagtttctgatacaagggatggtcgctaa

SEQ ID NO: 79132 - DNA, 591 bp, Citrobacter koseri; identical to SEQ ID NO: 19457

SEQ ID NO: 79133 - DNA, 453 bp, Citrobacter koseri
atgtcgtttttatttaaattaaccatcgcgattttgattgtctttgcaatcctttttccgattttaatttcatcagataacaaactgtccgcacttttttggaagataccaaaagatttctgggttttcctgattatcatgtacggggcaatcatcacggtggtgttcatagaaagcagtgaacaggcacgcatccgccgccaacaatatttgcaacagtacaaaatgccaaatgagatacatgaaaatgtggtgatagaaaacagtattatttcaagagaaacaacagatgacgaatctgacattaacaccctgtaccttgattcatttaaaagtaaaaacaactgcaaatcttttgaaaccaattcaaatttactggataaaaatggtaagcctgtggaaataatggtgtgtgatgttcaggaactgcattttttcgttccaaagaattaa

SEQ ID NO: 79134 - DNA, 255 bp, Citrobacter koseri
atgccacagcaacatcccggacgactacaggtactggtcgtcgacacgcactgcaaacgcaagctgttttcaacgaaaacacagacagatcccgatgagcttgcccgacgcttctgcacgccggataactgccttgtggtggtactatgcaacaaccgatttctgttccgcctggaacgtgcacccggtagccactgccgctggcgcaagggtagccgctcccgccatcagcacctgcaggactggctgtcgtaa

SEQ ID NO: 79135 - DNA, 567 bp, Citrobacter koseri; identical to SEQ ID NO: 19456

SEQ ID NO: 79136 - DNA, 684 bp, Citrobacter koseri
atgaccacgacagaacatcccgtgcgccagttgctctggtgtgcactgaatgccctgaaaacggcacaggaaaaccacaatataaccagtgaaaccggattacggcattacctgcttgaatggctttctggtgccagcagacatcctgagttccgtagtctccctggcgaaatcatggcgttaaaagcattgaccgaaaaagatcgcaatattcccatcatcggaacgctgaatacgctctttctcagctctgccactgtcggggaatgtccgttgtttcgttttcgggctgcactgggtaaattacagaaagcaggctggcgcacatatgtctgcccatggcctgagagggtgttcaatgaatccattgaacgggcctgttccgggaaacgtcatctgctacaactaagtcgcaccgaagagtgttttctaccgacaggcgatatgagggcaccagttacgttgcagctgatcactccactacaccgcaaaactatgcagcttctggaagcggcagagttaatattctccgacgaaggatttcaggtggtgagaggatacgaacatcaattcgggatcgaacgcagagaaaccctctttcacaccttatttatcgggctgcccagcctgccagaagatgtctggggtgcaacacaggagcagacgactatcacattacactga

SEQ ID NO: 79137 - DNA, 534 bp, Citrobacter koseri
gtgaatatagaacacctgaataaccggaactggtatcttgcgcaatataatacagccggcaaaaacagagaatctttattctcatggctgaatgagcaaaacgtcgtaccatggactccattaataacaagaaagataagacgggcagactccaggtgctgttaccgtgaaagaatattcgctatttttccagggtacttttttattctggctaattttgacattcacccagtatcagcattacgtcgacatagcgccttcattgatttcgtgaagtttggcggtgaaataaaacccgtcaataaagatattgttgatggattaatgaagatttacccggaccctgtgctaaatccgggagccagggaagagctgaatgcggcttccagcatatggctgacaaaagcacaatatcagtatctcctcagaatggaaaatactctccagcctgagtcgaggatatccctgctcctggaactggtatcaaatgccgaacatcacggctttatggagcgccttgtaaacatcccatag

SEQ ID NO: 79138 - DNA, 288 bp, Citrobacter koseri
atgtcacctcaactgatacagaaactcccggccatcactctgttggaaggcatgtttcccgagctatcaacaaaccagcttaaagtctgcgttttttacgcaatgggtgttccttacgacgccattgctcagaactgtcggctttctcccgaaacggtacgaacctacctgaagcgaagcctgaagaatttaaatctggaaggatatgatgcacttcgctctgctgtgctgatgcgaactttcgttttcatgattagcaatacagctaaagaaaacgaaaaaatgtga

SEQ ID NO: 79139 - DNA, 1077 bp, Citrobacter koseri
gtgtataaatacacggcacaatcgctccgccataagcgacagcttgtggcaggtctgaagaatactccatataacgcagtacactggagtcagttagcacccgaagagcagatccgtttctgggaagactatgaagcgggaagggcgaccactttcctggttgaaccggaaaggaagcgcacgaagcgtcgtcgtggtgagcactccaccaaacccaaatgcgaaaatccgtcctggtatcgtcctgagcgctataaggcgctgagcgggcagctcgggcacgcctacaaccgtctggtgaaaaaggacccggtgaccggcgagcagagcctgcgcatgcacatgtctctgcatcctttttacgtgcagaaacgaacgtatgccggtcgcaaatatgctttccgtccggaaaaacaacgcctcctcgatgccgtctggccggttctggtcagcttcagtgatgcgggcacacataccgtaggcatgagtgtttcccgtctggccagagaaatcagctcgaaagacagcaaggggaaggttattccggaactggaagtgacggtctcccgcctttcccgtttgctggccgagcaggtacgttttggtgtgctgggtgtttcagaggaaaccctgtgggaccgtgaaacccgccagcgtctgccacgttacgtctggataacaccggcaggctggcagatgctgggcgtcgacatggtaaaacttcacgaacagcagcagaaacgactgcgtgaaagtgaaatccgccagcagctcattcgggaaggtgttctgcgtgaggatgaagatatctccgtacatgcggccagaaaacgctggtatctgcagcgcagtcaggatgcgctgaaacaccgtcgtgcgaaagcagcagccagtaagcgcgccagacgcctgaagaaactgcctgccgaccagcagattcatgagatggcagagtatctcaggaagcgtctgcctccggatgaagcctatttttgttccgatgaccatctgaagcgaatggccatcagggagttgcgtcagcttgaactgacgctggctgccccgccaccgcactag

SEQ ID NO: 79140 - DNA, 234 bp, Citrobacter koseri
atgtcgtcacgcaactctgtacatgattttataatgctgctcccggcgctgctgttggttgggtggttagttttggtgataattctcatgtttagggatgataaatgtgacaaaacttaccgtgaaggttcgtttcccgaatttatttgtctccattctgatcgctcgtcacttcgagaaaccgattctgagagactcattgtcaaatatacagaaataaaatcacaaaaatag

SEQ ID NO: 79141 - DNA, 495 bp, Citrobacter koseri
atgtgtgattcagaagcggagaagattttattcatcctgaataaacatgaacgggcatacagacgcctgatccccgtatatatttttttagctatagtattatggattttacctattctcctgattgtatacctgtatttctgtatagttgacaatgagtttctcagaatcggtttctgtattgcatggacagcatactactttctttcgcttttcaagtattttgtacaatacttctttcctctcgatcgtgaagatttgcttaaactgatggatctcgccaaagattctcctgatgcgaaacaggagcttcttgagcgtcttttgtccggaaaaagaatgaccgggcgggatgaaatggatatcaagcgcattctaaaaacaaaggaagcacttgataacatcaggaattttattgataaacagcagttaacgaatagtgatactccgaagaaaagcacggtcccaaatgaagataaaaaaggcataagatga

SEQ ID NO: 79142 - DNA, 603 bp, Citrobacter koseri
atgggaaaaaatcaggaagaaaggaaaactcccgtcattgtggtgaaaaaacgtcgtactttttcgctaccgtccttatccgaaaaaacagatattatcgcacctgtatttactgaacagacggcagaatcagcccccgccggaataaattcatctgccgtcgaaacacatatccccgaagcgccagccaggaagaagaaaaagaaaagacaccgttttccacgtccctcccactggacccgtgagtatactcacgagtgcgtggaaaaaataaaggccctgtttcctcatcttcgtgctgaaggtggtggatttattcccctgaaaattggcataaacaatgatatttcggcatttctggcagaacacccggagacagaactgaccatggacgaatggctctgtgcagtgtcctgcatcacatcccgccgcgtatatctgcagcggacagctgtcgccggcgtcccacgttatggcctggatggtcaccccaaagggcaggtctcagactctgaagcacagagtgccggtcgcagactggcgacattagaacaaaagtggctcaggatgcaggcacagcaggagaatatttctgggcaataa

SEQ ID NO: 79143 - DNA, 666 bp, Citrobacter koseri
atgcagatcaatgaaagccacacgccggaagagggcgaacccgccggtaccgccacaactgacctgacggacacctggtaccgccagctggacgccgcgctgcaggcggaggggatcaccggtctgaatgaggagatcagacaggcagttattatgcccggcgaggcgctccgcgacctgccggcaccggcgcgcctgctgcgcgttctgcgcgagagtccggaggcgttcccgctctcggctgccgcatacgaggaagacacggaagccgcgctggccgacctgctggaacgtgcggggttcaccggcggccaggcgcaggagctgcaactgcaccgcatccgctggcctctgatgagtcaggaagaatatgaccggcacgacctgaacagcctgctggacgaactggagcggcgacagctgttctgcaaacgtgaccagctggtcgccctcgtcttttcccctgtcagaaaagccggcgagaactggactgaacgtctgcaatggctcttatcaacggatggatttggattccacagtccgctatctcgtgaaaatgccacaccggcgctgaattatctggctggctacgtcggacaagacgccgttaaacagctgaccacctacgtggtatgggcgggagacaaacaggcgggaaagccctga

SEQ ID NO: 79144 - DNA, 861 bp, Citrobacter koseri
atgaatactgaagcactgagtgagagcgacaccgtattaacatgcgttctgaagattcagaatgataagggtaagttcgaaagcctacagagggagtctgcgcgaaagcatgaccctcaccagtgcagccatgataaaaatgttgaacaccaacacatctgtatctgctcgttcatcatgcgcgagcagccggaagccgtgctgaagcgcctggagcagacggtgctgcgcaatcaccggatcgtggtgtcggccatcacctatgccgaaatgcactttggcgcgatcggcaagaaagcctcaccgcgccacgcgcagctggttgacgcattctgcgcccgcctcgatgccgtcctaccctgggaccgggccgcggtggatgcggccaccgacattaaagtgaccctgcggctagccgggacaccgatcggcccgaacgacacattgatcaccgggcatgccatcgccgccggtgccgtccacgggatcacggcaccggcactccgcgacgaaccgtcctggccggaggtggccgtaccgcttcagcacattatcggcgtccgtccgctgattatctttaatgccccttttgacctgcgtatcctgaagcagaccgcggcggcacatggcgatccggctccgtggctggacgggctcacggtccactgcgcgatgcagctggccgccggctattacggggccaccaaccgctatggctccatctcgctcgccagtgccgcccgtgaggccggcctcacctggcaggatcgggcgcattcggcccttgccgatgcccggatgaccgcgggcgtggtggccgccatcgcggttggtggccacctggcttcaggcctgccatga

SEQ ID NO: 79145 - DNA, 528 bp, Citrobacter koseri
atgaaattgaaagtaattgctctggcgatcccggtaatctttgcaacgtcttctgccttcgcaattgaaggtgagtccagcactgtgaatttcaccggtaatgttgttgaaacttcctgtagcctgactactggctctaaaggtatgaatgtaccgctgggtgatgtatccgccaataccttcactggcgcaggaaccactgccaaagaaaccccgttcatcattacgcttgatggttgtgacgtggctaagaacccgggttccgtatctattacctttagcggtaacaccgtcagcggtaagaatgataccctggaaacgtctgctacaggtaccactaaagtcggtcttcagatcctgcaggccggctcgccactggctgttgatggttctgctgcctctgctggtcaggctatgatcgatggtagcaatgaactgccgttttctgcccgttatatcgctcttgatgatgctgtagcagcaggtgaagctgctgcatcagctaactttactgtgaactatcagtaa

SEQ ID NO: 79146 - DNA, 705 bp, Citrobacter koseri
atgttatttttcccacttaataaaatgtggagtgtttctgtattgatcctcgccagcatgatgcccgctctggctcaggccagtggcggtgttgtgctggggggaacccgaattatttatccggccggacagaaagaagccagtatcactgcacataatacttcagaagattcccgttttatggttcagtcctgggttgaagacagtaacggcaataaagctaaagactttattgttacgccgcctctgtatgtcagtaacccacaaagcgaaaatacactgcgtctgatgtatgccggtaaaaagttgccttcagatcgtgaaactctatattatctcgtttcaaaagccattccggccgtcgacaagaacgcagcggacggtaaaaatctgctgatactgtcagcagctacccgcattaaattgtttatccgcccggccggaattaccccttcacctgatgaagctgcaaagaaactgacgtttaatcgcgaaggacgtaaggcagtcgttaaaaacccgtcgccgtattatattacactggtcggaattaaagtcgatggtaaaccgacaaaagaatccgttatggttccaccatccggatcgaaaatcattaatttaccttccgcccagacgacgtctttaagttatcagaccatcaatgactatggtggcctggcgaaagaaaacacctggaagttctga

SEQ ID NO: 79147 - DNA, 2580 bp, Citrobacter koseri
atgtattcattcaaaaaaaccaaacttgctttattaatttctggtttatctgctttttctgctcatgcagaaatgtattttccgacagaacttatttccatggatggtgatggcacggttgatttatcgcagtttcgtgcagatggctcccagctgcccggagcgtacatggttgaaatttatcttaaccagaacttcatttcccgccagtctgtccgctttgatgccatccctactggcgaaaaatcccgggacggcaccggcctgctcccttgtctgaacagagacatgctgaataatgcgggagtgaaagttgaactgtttccggcactgatggcaatgaaagaggagcagtgtgtcaatctggcggagcatgtgccgggtgccttcacattgttcgattttcctaaaatgcgtctggatctcagtgttccacagctggttacccgaaaccgggcacgtggtgaaacagatccggcgctctgggatgacggtattaacgccgccctcatgaattacagcttcagtggcaacaaccgtttcggcagcaataatgatggcaccagttactttctgcgtctgtccagcggcctgaacctgggaagctggcgttttcgtgatgacaggagctggaattattatgaaagcagttatgggaaacatcagcaatggcagcgaatgagtacctacgcagagcgttctgttattccgctgaagagcagccttgttatcggggaaagtacgaccggaagcgatatttttgattctctcgcatttcgcggtgttcagctcgccagtgacgataacatgctcccggataccctgcgcggattcgctcctgtggtacgtggggtggcggaaagtaatgcggaagtcagcgtcagccagaacggatatattatttaccggactactgtttcaccgggtgcgtttgaaataaccgatctgagtccgatgtactccagcggagacctcgaagtcagggttaaggaagccagtggcaggatcaattcgtttactgttccttacacgacgcttcccgccctgcagcgtgaagggcgtatgaaatatagcctgaccgctggtcgttaccgtggcagcagcgatcgttatcaggatccgtccttcgctcagggaaccctgatgtggggattacctcataatgtgacactttatggtggaacgcagttctcatctgaataccttgccgttcagtccggagcaggcattaacatgggcagcctgggggcagtatccgccgatgtcacacacgcggacagcacgctggccgatggctccgaacacaagggacagtccctccgttttctttacgcgcatgccttcaacccgacgggcactacgttccgtctgacgggctaccgctattccaccaagggatttcatacgctggatgaaaccgccctgaaaaccatgagcggtcggcgaaatgaccattccgggcttgataataacgggcaacccgttgttgattcatggtctgattactacagtctctacaataaccgacgggcccgatttgaggcgaatgtttcccagtccctgggggattatggctctgtctggctcaccggcgttcgtgaaagttactggaacacatcatccggaaatgactcattccgggcgggctacagtaactcgatcggccccgttaactattcggtgaactacagctattcgcggtacagaaacgagaatgcaccgtcatacaaagaccataacatcaatctttctttgtctgttccgcttaacaggttgttctcatggtcctcagataaacctgtctatgccaccgttaatggcagtcgcgacggccggggcaatgtcagccagcagtccggactgagtggccagttgctggaggacagaaacctggactggaacgtctctcagggctacagccgtagcgagggtacgcaggggacaagtggtaatgccgggctgaggtaccggggaggatacggcaacaccgacctcggttacagctacagcagtgactggcagcagatgagttacggtatctccgggggggctttactccatcgtgatggccttaccatcggccagccgctcggagagaccagtgtactggttgccacgcccggcgtttcaggtgtggggatcactaatgaacctggggtatcgacagactggcaaggatataccatcaaaccttatgcctcggcttacagggagaaccgcatacaggtgaatacccgcgcgctggatgaccagaccgatatcgagggctcgatactccgcgtgatccctacaaaaggggccgtcgttcgggctgaatttaaagcacatcgtggttaccgggtattaatgacgctgactcataacggtcgtccattgccgttcggggcaatcgtggtatcaaaagacaacagcagcattgtggctgacggtggtcaggtttatttgtctggcatggaagagaaaggcgtggtgaccgccagctggggagggaattcacagcaaaactgtcaggcagactatcatctgactccgtcagatgttgcggacccaatcatacgtattaatggcgtttgtcggtaa

SEQ ID NO: 79148 - DNA, 531 bp, Citrobacter koseri
atgatgaaagcgctcactaaactggcgatgtctgtaatcctgagcagcgggttaatatatcaccctgtagcgatgtctgaaccggaatctatatcgatgccctttacgataacggtgcaggaacaaacctgcaagtttggtataaccagtcaggccatcacattggatgatgttggtgttcttcaacttcaaaatgagggggtaatacgtaatgcgaaaaccatttcaataccgatagattgtacggaatcggggctttcgtccgtaaaggtacagtttagtggagatatgtcaccatataataacaatttttataaaaatacgggaacagcagaaggaattggtcttggcgtaaagggctctaacaatcagtcaatagggccaatattaggtgttacagaagttgtctctatggtaaataaccaggctatttataaatttagcgctggatatgtccgtttaagcccagagacccctatcactggtggaacttttgcatcaatgctgacgttgactttcatatacgattaa

SEQ ID NO: 79149 - DNA, 489 bp, Citrobacter koseri
atgaaaaaacgcacaattaaaatggtaagccttctggtattcacggcggtgcttagcgggctggtttactggatggtggtcagtcgtcagtcatccccgacgtcacttccctcctgcaaaagccggttgacagtgaagcacggcgatttccggctcagcgccgattttgatttcagcttcattatgaagggctacggctcagtggtgatcaatggtgaaggccaggccagtgggaagcgttttacgatcgaccgttcggtttcattcacgtaccgggccgaacatggccgctatcttctgacggccacagggctccgctactatttcggggacctggaggagaaaaacccgggcctcccgcatctgcccctgtttttcgcgaaaccgcagaccgatttggtcctttcacaggcatctgacagatacggcacgccggtgctgatgctgctcggcacaaccccgattttctattgtaacatcgaggggtaa

SEQ ID NO: 79150 - DNA, 771 bp, Citrobacter koseri
atggaaaaagacgataatgcagcatctttgcagaatacagaacagtatattttggacggaagatggtatttttcccctgaagaatcgattcttcgggatatgcatctgcaacaggaaataaaattacaacgaccagcctgtcggtgcctgacgcttttaattaaacaccagggggtactgatcccccagaatgatctcattacatatgcctggggcgaagaacgtgcgaaatatatcaccccgaatacgctgtatcagtctatgcatcatttaagacaatcccttgcacaggccggtctgccggatgcgatttttaccgtagcgcgtaagggaaccgggatcagcagcgaactgagtattattcctgtgtccgaatccgttcccctttcactccaccgggctcactggaactccgttttccgtgccggcggatatctgtctgtagtggctgttatcatactttgttgtattatttttttcagctggacgaatgctgacgaaaaaagagagaatgttttccggaattatgcgtttaaacaacagcagcagtgccagatttaccgctcaccagacacgcttacggataataaagtcagatttttacttcagcgcgcaggaattacctgcagtgaaaatataaccctgtttattacggtcgccgcagcgggagaacgaaaaagtgtgctcgcctgctcccgatatacaaccagagcacgacgctgtcaggtttacattattatggatcccttcgatgaaaaaacgcacaattaa

SEQ ID NO: 79151 - DNA, 270 bp, Citrobacter koseri
atgactacccactctctcagtcccaaggagcaggccgtactgcagcatctgattacccgtgccgcagagacggacagtgacggggcgcgctcccgtgaaatagcggattcgtgcggacttgatatttacagcgcacgctatgtgctcctgaaactcacccgcatgggatatgttgagcgtaaccacgctgcgagcgcaaaacgacattcgtggcagcttgtgaaggccccggtgctccccgttgtgcatctgtgccggtcagcaaactga

SEQ ID NO: 79152 - DNA, 582 bp, Citrobacter koseri
atgaacatttgcactgaaaatcatttattaaaaacaggccttcagctattactggataataataccagaggccgtatgataaatatgaacgcgtttgacctggaaaataaccagataggcttcgcgaccagttgtcgtatccggaattataaagcagggcattttaagagcccgttacactcctatatcagtctttgtcatggcatcatgtcagcagaagacttataccgctatcttagtcaacattcctctgcccctttcacacccagaaaacccttacccctcaccgttaaggaaataaacctgacaaacaggctgctcgcaggcttcccggtacacagcgtcgctgaacattttcagatcaaccttaaaaccacctacggggtaaaatcacaggtggaaaataaactgggggtacgcaggttttcgcagctcgccgttcgccttactctctgggaaaggaagctcagtttgctgaccggcacagatgcacaacggggagcaccggggccttcacaagctgccacgaatgtcgttttgcgctcgcagcgtggttacgctcaacatatcccatgcgggtga

SEQ ID NO: 79153 - DNA, 813 bp, Citrobacter koseri
atgaagataatcaccgtaatggccttgctcgcggcagggcccgcgcttggggcctccgtcgcgtgcaccgtgacccagcctgtgagcacccacggcagcatgctggacactgccgtagctggcatgcttggccactgcgtacccaaatcctctgatatagaccccgctgtagaaggggattggccaagtcagaccggagagtgcgctgacccgcggttctttgcaggcttccggtcattacacgcgattaaccctgagaaatgttatcaccttaccctcacagcgaatggacgaacggcagaactgaaacccaaccagtcggtcgacgtgacgaacctcttcgatcctagcgtcaacccttacttttaccagcctgcaaaattagagttcttacttgtaccgcttgatccgcttccacccacgtgtacggaagcaaacatccccacctttcttgaaactgttatttcatcatatccttttggtgttggtaatgagaagcgggtctacgagaaagggacgatgtcgctcttccagacgacggagaccttccgcctgacggcggaagggaagcagatggacgcgcgcccgggggagtgggtcaacgttggcaatacgacggaactggttaacggcgtacgccctaccgtgaccgccacacgcgggcaggacggacaactctctgtccggattgggacgactgatctggtctatggcaacagtatcacagtcactgatgaacgggcaataacggccaaagcggacgggcctggagtgcatgaagggtacgtgaacttcgaggtcgcctgcccgtga

SEQ ID NO: 79154 - DNA, 735 bp, Citrobacter koseri
atgagtgaactgaaaattgataatccggctcagaggctgctggatattcttgagagtggcagagcacattccggacatcttaattgcagagatgtctggaaaaaaatacttggcgttaagcagaatgatgaacagcttcttctttccagactggcgaaggctctggagctttcaggtcggatcattcaggtcagggaaaaccatttttcctctctgcgggggaactccagccactggaaaacctgcgtagaaaaagccttcatggcgcagagtcttaacaacacctggcagtcgtttatccagcatatcgatattcatacaattaatgaactggcaatgttatcagatctgttcgaaagtcggggggcgcacgcaacgatgaaagatgatgagattggaaatctcatcgaacgggttgccggactccgtactgaaatacgcacttcagatctctctgcagagatgaaaaatcttctgttacggcagctgtcgcagatccaggatgcactggaatcgtatgatatttcgggcatcgagccggtgatggatgcaattcaatcaactatcgggcttactgctctgcacccggggtatcgttccgaacttaaagacggtcagttttccactaaaatctcgcaactactttccgatgcgtcaaatgccgtaaccgcagcaggtgctctaccggctctaacggctgccgccagttcattgattgcttatctaagttcgtaa

SEQ ID NO: 79155 - DNA, 417 bp, Citrobacter koseri
atgaagaaaacctatatgctcgacaccggcatctgctcgttcatcatgcgcgagcagccggaaaccgtgctgaagcgcctggagcaggcggtgctgcgcaatcaccggatcgtggtgtcggccatcacctatgccgaaatgcgctttggcgcgatcggcaagaaagcctcaccgcgccacgcgcagctggttgacgcattctgcgcccgcctcgatgccgtcctgccctgggaccgggccgcggtggacgccaccaccgaagtgaaagccgcactggccgccgccgacacaccgataggcccgaacgacacggcgatcgccgggcacgccatcgccgccggcgccgtcctggtgaccaataacacgcgggaatttgagcgggtgccgggcctgcagcaggaagactgggtaaaataa

SEQ ID NO: 79156 - DNA, 231 bp, Citrobacter koseri
atgagaaccgtatcgatatttaaaaatggcaacaaccgtgccatccgcctgccccgcgatctggattttgagggggtgagcgagctggagatcgtgcgggaaggggacagcatcatcctgcgtcccgttcgcccgacctggggctcgttcgccagcctggaaaaggccgatccggactttatggcggagcgcgaggacgttgtcagcgacgaaggacgttttgcgctatga

SEQ ID NO: 79157 - DNA, 408 bp, Citrobacter koseri
atggtgttcaggcaccgggtgtgtgcacaggttcagtataggcagatgttcagcatatgtataggttctgcatatgcagatgtcatgggtatgcgtatgccatacctgtgcagatgtaaggcatatggatatgttctgtatatgctgctttctctctttttccgcgcagatccgaaaaaagccagagtaggatctgcttcacccccaccggcgcgctgcggcacagaaacacaatatgtgccacgccttcagatgcgttttcttctatatgttgtgtttctcctccgttccgttacccgccgcccggcagcagatattgccgctttgcttattccgtatgcgtggtacacttccgaaaagtcgcaatacttaagaaagtcggatctccccgaaaccggtatccggtaa

SEQ ID NO: 79158 - DNA, 381 bp, Citrobacter koseri
atgaaaaacagcgtcaaccctttccaaaaccttaccccgcgcaagcagattttctgtaccgcgttttggtgcctgaccctgggcttcctgctggggagctactggggtatgaccagcgcgctgtcgtccgccgtgcagcaggccgggatccggttccccacctgtaacgtcccgggggttggcatgatcaccgtgtatccgcgcgatggcaacctgcaggccattgccaaatcaacggtcatgccggcgggggccctggagcgctggccggacgggcggatccagctgaccaccgcggacggctatgccccggatgtcacggactgcctgtccggacagttcgatgccgcacagctgcgtgccattcccctgcatcgctga

SEQ ID NO: 79159 - DNA, 360 bp, Citrobacter koseri
atggactatgtggcaaaatcgtgcggagctgtgcgcaagtacggtatgaatatcatcgccgcttcgcatttaatggaggttaaggccttcactcagtctgacccgcggatgccagtcacgcggctgcgccggtatctggggcagtacgggctgcgcggtgaagcgctgagcagggaggtcaggcgtatcgtcgctggccccgagcgaccggataacacgctgaaaaccggaatttactatacctggccctatggctgggagcctgtggatttcacgccgatgatgcgccgaattcttagcggaaaacgtacacggcatgtgatgctattcgatgaattccatcaggtgttcaggaaatga

SEQ ID NO: 79160 - DNA, 783 bp, Citrobacter koseri
atgatgcctgcccttcccggccaggggattgccctgcctgccgcaccgctgccggtggccatcgactacccggccgccctcgccttacgacagatggcgctggttcaggacgaactgccgaaatacctgcttgcaccggaagtgagcgccctgctccactacgttcccgatttgcaccgcaaaatgctgctggcaacgctgtggaataccggcgcacgtatcaatgaagcactggccctcacccgcagtgatttttcgctggccccgccttacccgttcgtgcaactggccaccctcaagcagcgcgcggagaaagccgcccggaccgccggacgtgcgcccacaggcagccagcctcatcgtctggtcccgctctccgattcgcaatacgtcagccagctgcagatgatggtggcaacgctgaagattccgctcgagcggcgcaacaaacgcagcggccggacggagaaggcgcgcatctgggaaatcaccgatcgcacggtcagaacgtggataaatgaagcggtggatagcgcggctgccgacggggtgacgttctcagtcccggtgacgccgcacacgttccgccactcctacgcgatgcacatgctgtacgcgggcattccgctgaaggtgctgcagtcactgatgggccacaagtccatcagttcaacggaagtatatacgaaagtgtttgcgctggatgtggcggcgcggcacagggtgcagttccagatgccgggcgatcaggcggtgctactgttgaagggaaatgtcagatga

SEQ ID NO: 79161 - DNA, 171 bp, Citrobacter koseri
atgttaatcacagatgccactatcagacttccaatttacttaattggagtaggtgtattcgttccgctcatgtttactcaaagtgcggcatgggttattcctttatttataatatcgttcattgatttaatctaccttttaagaagacctaaactagctaaaaaaagctaa

SEQ ID NO: 79162 - DNA, 138 bp, Citrobacter koseri
atgaagataaaaaatatattaacgattattatttatcactattacttagcaaaagcacaatacagttcgatgaagccattatttatcaataagtttaataatagaaccgacatcattttgccgctcttttcgtattag

SEQ ID NO: 79163 - DNA, 549 bp, Citrobacter koseri
atgaacatcttaaaatcatcattatttattatgctcctgagtaccactctggggagttttaatgccgtggctgatacattgccagcaacgggtatttcggcaaatgaaggtgcttatggtggggcgcattatggtgtgttcggctatacagatacaaactcgctagtaaattcagtcaaacttctggataagttcggttttcattcaaatgttgtagccgaaacccttgatttaaatgcttatcagggtagtgttatcatctttaaacccgcagccagcggcaaggtactttcatatgaggatgtttttgcagccttaaaaaagtatatgactccacttaaatttaaagagactgatgctattgtcgttaaaaacacaccactttcagtaaatgaaggtggtgcgactatcaagcagtcttatcaagtgttgtttgacggtaatcatgctgaatccagccaaccttttcagatccccaaaggcggtcttgcgttaacagtgtttaagctggacggtggacaacttcttttcattacctctgctccctga

SEQ ID NO: 79164 - DNA, 141 bp, Citrobacter koseri
atgtccgatttagataacccgtttctatgccgtgttggaatgattctgtcctattctgctgttttagcgtctttggtgctcggcatggtgatgtttgttcaggaaatttttattccattatggcagcagttaaacgcatga

SEQ ID NO: 79165 - DNA, 258 bp, Citrobacter koseri
atgatgacgggaaccggaattaacacggtacgtatcaacggtgtggtaaaggccgttaccgaacttgatccagtaactctcagcaatgagtggtcaaagttgaaaaacgagaatgatgacctgtacagctataaccatcagattaatcagggttggcgatgctttattcttcgcctgctgggtattcatctgcctgataaaaaccgtgtacgtcttgaaggcattaatgccagaaaagaatctgtttatccagaatga

SEQ ID NO: 79166 - DNA, 1353 bp, Citrobacter koseri
atggcaatgaaacttatccgcaaaaaagctcccagaggtggactcatccgttggttaaccggggatgaagaaacggcagttaagaatatatcaggtcgcaaaacatcagcgggccgggaggaatacattctggcggaaaaggtgctgcttgaaatgcgccagcgtgaagcctggcttcagtgtgactgtgtgcctggagactcgccggcaatgaacagcgccaggctgatgcaggataccggtaccctttttctggccgggtttaatcatgaacacgcaccagaatgtccgatgtaccgtaagttcagtggcgatgatggggctaccgcaggcggaaccaggaaaacggcaggcagccgccgcataagttatcggaatttcctgcctccggacgagaacggtgccagagtaagagctccaggacatccggttgcgtccgccggtgatcgtacaagacgcactcgccgctcacgcatcgcacgtcttcttctttccctaatcgaagatgccggtcttaaccgacttgaaagtctctctcccctcccctcccggaaagcaatcgatgcgattaacgacctcagaagagtggcagaatcacaggagtttatccgcggccgacagttgtcggatattgtccgtttccagcccgggatgacccagtacgggaaggagcagctaatggaatcacttgagaatcatgacgctaactggccagcaggcagagcccgtatgttctttcagatcttcatgtctgagtgcgtcacccgggatgaggtcatgttcagttggccaggtggcgaagtttcgtttcgtcctgagcgcggtattagcataaatggagagtcaactgacgggctgcggcccccatattgggtgatcctggcgttccggcgcggtaccgacagtaaggtgatctgtagcgaaggttatgctcatgccctttaccgtaggggatgtccggtaccggtcgacagcgggctggaaaggaaaacgatagacggtattgcggaactggcccgctggcttagccgtaaccctgacgccccggtgctgagtctggtgaaacccctgtttgatattgaggtggtgactgaggatgagaaagggtttgtcctgccggatttcatcctcaatgccaggacgaatgcaggacagcattaccgcttcataatcgaaacaatggggtataccgatgaagattattgcgagcgaaaaacagagcagcatcgcgggatgaaaacgttaggtcaccttttaacggatccaccgagatggccgggggaatcggacaccagtttaagcaaatacctgtggggttatttcagacatctggactcaataacgcctttgtaa

SEQ ID NO: 79167 - DNA, 429 bp, Citrobacter koseri
atgtttcgcgtttatcctgcagcatcaatgcctgagccgttttctgccccgctttttctggaacgttgtcaggcaggtttcccgtcgccagctgctgattacactgagtctgagctggacctgaacgagtattgcattcagcgtcgtagctcaacctactttgtcagggccattggcaactcaatgcgtgacattggcctctacagcggcgacttgctcatagttgacaaagcggaacgcccccggcacggagatatcgtgattgcagagatagacggtgagtttacagttaaaaagctactgttgatgccacgtccagggctccaggcgatgaatcctgcataccctactctctggccagatccggatcatctgcagatatttggtgtcgtcactgcgttcgtgcacaaaacacgaggacaagactga

SEQ ID NO: 79168 - DNA, 972 bp, Citrobacter koseri
atgattcatattttttgtgatgatggttctacgaacgtaaaacttgcgtggtttgaaaacgatgttctgaagacatttgtctctgccaactcattccgtcacggctggaaagtggattttggggggcaggtatttaactatatggtggctggtatgaaatatacctgggatgctgtcagccgggacgcggtctcaaccacaaacgtcgaataccagtatggtgatcttaacctgctgggcgttcaccatgcattgctgaacagtggcctggaaccacaggacgtatcactgactgtcacgctcccgctcagtgagtattacgatcaggactgccagaaaaacgatgaaaatatcagtcgcaaaaaggctaacctgatgcgcgatatcacccttaacaaaggtgaaacgtttacggttaaagacgtctacgttatgcctgagtcacttcctgctgcgttctctcgtcttgccgaaattaagccgggtgccggtgaaacgacacttattatcgatctcggaggaactacactcgatgccggtgtgatcgtgggggagtttgaagatatcagcgcgatccatggtaacccgtccgttggcgtatctcttgtcactcaggccgcgcagggggcccttcgtgcagcagaaagtgaaaccagcccactgattgccgacagggtcatccgtgaacgaaaagatcgtgcatttcttcacagcatcattaatgattcggacagaattggatatgtcactgacaaaatagaagaggctatcggggcactgggcgccagagtggtgagcgaacttacccgcttccgtaacgtgaaccgtgtcctgcttaccggcggcggcgcgccactcatcgaggagtcgattcgccgtgcctggccgctggcagcagaccgtatcgaggttattaaagagcctcagctggcgctggcccgggagatagcgctcttcaaaaatgagggctga

SEQ ID NO: 79169 - DNA, 669 bp, Citrobacter koseri
gtgtctgcaggaaatttctttctctatctgaatcatgatgaccatacggacatgcgtgcgctggctactattgagtcggtatcccgtccgctacgcggtgagtttattcgcaccgcatccgtggccggcgctgttctttaccgaattgatatccgtctgccggcgatgctggtagccatgtttgtcggcacgattaaggtgtcccagttttccggtatccttgcattactgcgggggaccggaggggctaatacttcaggcgagggagaagcatacccctggactccgggccgatacactggcccgtctcagcgccgccggttgaccctgcaactggatgacgatgcaagcgccagcctggtgatccccttgctggatgatgcttcagatcggcaacgtataacgcttctgcgcagcctgatgattgcaggctgtgtacttcacgaactggaaccacgttttccgcgactgctttcaaacatgccggaaccaccggtcacgctggatgcactgcagcagctggctacagggttactgaaggagagcctgattaatattcctgactccgggcagagggaagcatctcagcaagaggaggggagaggaacagagtctcaccccggatcagataccagtgttgcacgtaagaatatgaaaaaattcttctga

SEQ ID NO: 79170 - DNA, 936 bp, Citrobacter koseri
atgccgaactggtgtgccaaccgcctgatgttcagtggtattaaagaccgttatgccctcaaaacgtggattaccggaggtgagctgtctttgaaccgccgtgcgagaaaagaggggattcagcttttcctcgcgggctgcgcagggatactgcgtcccctgacagagcaggtatatccgccatacccgctactggtttccagcgggacggcggcagataacaggctttcgacgaaggcatacagcgactggctgacagcgtttatggccggagctgaactggatgcggaaacctgcaaaaaactgcatcagcactggctggacagtgatatccgtcattaccgctggtcgaccctcagtgacccggaacaggcggttatcagtcgactttatcagcagaaatcctttgactggggagacagtttccagccctcgccggtgaacgcatggtgggacagtctgtgcaacggggatgatgctgcgcctgccgctgaaccgatggatttccgtgaagtgctgccgggacgtctggatattgaagtgaacggttttaacggtggcctgctgacagatattccgtcttcatatggccattatgtgaatctgtacggctgtaagtggcctgtaggctatgacgctaatatctgcttcgaaggggaaaataccctgacggtggatttcgacacaccctggagtccggtcagtgaagtggttgttgcaacactcagtcagctctgtgacggtgaagttgagcactggttcgcagagcaggggtgcgactactgcggctacgcgcggtacatcaacggcgaaacggaggtgtatatcactgacgagctggaatgggacgagacagatcctgacgatgaggacagtttcctctgtgtaaccggcccggactggattatcaacaacgtggcacacttcggcggatga

SEQ ID NO: 79171 - DNA, 228 bp, Citrobacter koseri
atgcaggctcaggcgatgcggacgtatcagattgcgtttaccggacgtgatgcgaaaggcgttttacccatgtttacccgtgtacaggccatgaccggaaaaggcgcagtgagggcgtttattgaacgttacagacccgtcagcggctggcttttaggcgaccccgaagacattaccgacaaaatgcagaaggaggcagaaggggcgggcagcaacccgcagacatga

SEQ ID NO: 79172 - DNA, 2046 bp, Citrobacter koseri
atgtcagtcaccgagtctaatgcaaaaaaagccaaaaaagccagtcccaaagcgactgcgcgtaaagagggcgcacaatcagatgtcctggttaccgcactggataacgcccccatccgttacaccgcctggtcccgcctttttatcggggaactgaactgccgcatcatcccgcacacgccggaagaaatcagggggtatgccgacagtattcacgcggtcgggcagatccataaccttgtggtggtggaatgtgacgatggtcggctggaagtggtatgcggcgggggacgaaccaaagcgatcggtctgctggttggggaaggcaaggtagaccctgaaaacgtctggatttcttataaagcggtgccgcgtgaactggcaagggcaatctccctcactgaaaatggcagacaccgcgccatgcaccccgccgaacagattgccggattccgctcactggctgaagaagggaaaactccggcgcaaatcggtgatttgctgggctacggcgtcaaacatgtccagcgcatgctgaagctggcagggctggctccggtcattcttcaggcactggcagagaacaacatcactaccgagcactgtcaggcgctggcgctggaagataatcccgatcgtcaggtacaggtgtacgaggcggcgtgtcgtcaggaatacaacaacaaaccggaagtgcgtgtgatccgtaacctgatcaccgaaagtcaggttcccaccctcaacaacagcaaatatgcatttgtcggggaacgcgcattctccgcagatgaaatccgcgccgacctgttcagcgacgagcagggtggttttgtggacagactggcgctggatgcggccctgctggaaaaactccaggtggcggcggagtgcctgaaagaggccgagggctgggcatgggccaccggacgcatggaggcggtcagttatcacggcgaggacagcgcggtgtaccgtattcaggatgagcctgacgcggtttacacggagcaggaacagcagcgcatggatgaattgcaggatcagtatgacgagaaccagaccgccagcgatgaaaccgacgcgatggagtcagagatggaggccattgaatgcgcggcacagcttcgggcgtggacgccggaaatgcgcgcacagtccggcgtggtggtgtcatggcttcacggtgaaatctgtgtccagcgcggcgtgatgttgcgtgaaacgtcagaaacggaagaagaacatgttcaggttaagacatatgagcgtcagcctgaacctgtggacgaaatcagtgttcccctgctgacaaaaatgtgtgcggaacggacgctggcagtccaggcggcactgatgcagcagccggaaaaatccgtcgccctgctggcatggacactctgcctgaacgtgttcggcagcggcgcgtataaccgacccgcgcagatctctctggactgtaagcattattccctgacgaatgttgccccgtccggtaaagagggcgtggcgtttctggccctgatgcaggaagggcaacggctggaagcgctgctgccgcagggctggaaacaggacttcaccaccttttttaccctcagcaccacagaccttagcgccctgctcagtttctgcacggcatgcagtcttgacggtatgcagacgcgcggcaccggaggcaccacccgcagtccgctcgatacgctggaaacggccctcgctttccacctgcgcgactggtggcagccgacgaaagccgatttcttcacaggccttaaaaagccgcaaatcatcgccgcgctgaacgaggccaacctgacaggtgcggcgcgggacgcggagaagatgaagaaaggcgatgcggctgaactggcagaggacaaaatgcgggacacccgctgggtgcctgtctggatgcgcgcccctgatgcagaaaaagccccgtctgatgcagaaaacaacgtgtctgataccgaaaaagacagtgctgatgcacccgatacggcttctgatgcagacagccaccacaccctgcccgatgcagcctga

SEQ ID NO: 79173 - DNA, 264 bp, Citrobacter koseri
atgactggttacgaactgcgcttatggcgaaaaggaatgaactggagcagtgacagggcggccgaagagttgggggtcagcctgcgtacatggaaagtttatgaaaagtcagaaaaggttacacgggtcgtagagctggcgaccataacgctgtctctcgcagcagcactcccctactttgaacaccggaaaacctctaaagagaggattgtaaacaggatccagacgctgaccaggtcggcaggactcagagggagacaatga

SEQ ID NO: 79174 - DNA, 243 bp, Citrobacter koseri
atgaaagacccgttaatcgtcacctgttgcgaatattttgtaaaggaacgagctaaaacctgtcacccactgaaaatccccgaaacactgaagcctgacgctattatgccgcatctgaaaaagccgggtgcatcgctggttcgttgtagacgtgttcagaagcccgtccatatatccgctcttaacgtggctgaacgggagctcgtccagagtatgctggaacttttccgcgtgtatgcctga

SEQ ID NO: 79175 - DNA, 456 bp, Citrobacter koseri
atgcctcactacatcccccgcgcgcctcacggcgtcacctgtatccgactggataacggtgatgaagctctctatgtgaacggagaactgatttccacctgctacgccagtgaacctcacccgcgtattattgcatcaggagttaatctttcggcggtacttaatctgccatttcaacagatcaatgctaaggttcctgatgtccctgaatggacgtgggaaaacgttatcacttcgctgggatggggtgaacgcattgagttgagtaacagagtgatacgttctgtactggaatgtagtcttagtcatattacgcgacgggacagcgatattctgagcgaactatgccacacagagtacgaaagcgaatggatccatgaatccgatctgggttacatcatccgtgttgatgccatcagctatccgcttctggtactgaagcgacatggtatttaa

SEQ ID NO: 79176 - DNA, 309 bp, Citrobacter koseri
atgagtaagaaggcattttattcagatgaagatatcgaacaggcaaaatctgcgctggcaggattgccggatctgacaccacagcgtaaatcacaaaaggagtttctcgatgcaatccgtgatgatcttttagctctggttaaaacgaaaggttacacggtctctgatatcagggagactttaaaaacaacgggatatgaaatcagtgaaagggcgcttcgtgaaatcgtccgtgatgccgaaaagaacaaaccagcacgtaaaaagcgcaaatcagccataagttctgcatccacagaagcgaagtaa

SEQ ID NO: 79177 - DNA, 336 bp, Citrobacter koseri
atgagcgacaaagcatcacgaaggggaagtgataaacggcagaaaaccgttatcaagaccctgagattcacgccagatgaaatcgaagagattgaacagaaagcagaagcggttgggcaaagcgtatcggcttatatccgaaacgccgcaatgaacagaaaggttactccggtcatcgatgacagctttatgacggagttactgaggctggggagactgcaaaagcatctttttgttgaagggaagcgagtgggggataaagaatactccacggtccttgtagcaataacagaactgtccaccacgctcagaaaaaagctgatgagcaacgattaa

SEQ ID NO: 79178 - DNA, 2700 bp, Citrobacter koseri
atgatcgccgtcattccaccgaaacgtaaagatggcaagtcctcatttgtggacctggtctcctatgtttccgtgcgtgatgaagaacgggatgatgatctaatggaagcggtgaaagcatccggaatgaaaccggaaatgccgcaccgcagccgtttttcccgtcttgtggattacgccacaaaactgcgggatgagtcctttgtctccctggttgatgtaatgccggacggcggtgagtgggtaaatttctatggggtgacatgctttcataactgcacgtccatcgaaaccgccgcagaagagatggagtttattgcgcagaaagccaggtatgcgcatgacaacagcgatccggttttccattatcttctttcatggcaatcacacgaaagtccgcgtcctgaacaagtttatgactcagtcagacattcactgaaaagactgggtatgagcgaccaccagttcgttgctgcgatacatacggacacagataatcttcatgtccacgttgcagtgaaccgtgttcatcctgaaaccggctatcttaactggctttcctacagccaggaaaaactccataaggcctgccgagaactggagctgaagcatggtttctcgcctgataatggttgctatgtgatcgcgcctgataatcgtatcattcgccgtacttctgttgaacgcgatcgtcaaagtgcctggactcgggggcgtaaccagagtctgaaagagtacattgccgacacgacaattgccggtttacgcgaatcccctgcgaccgactggtcctctctccatcagcgctttgcgaaagaaggtttgttcctgtcagcggataacggtgagcttaaagtaaaggatggctggaacagtgaacggcctggcgttatgctttctacatttggtcacgccttcgataccgataaacttattcgtaaaatgggtgagtttattccacctgcacaggatattttcgcgcaagttccggctgttggtcgttacgaaccagacaaggttattgtgccgtcgcgtcctgaacgtatgacagagaaagaatccttatccgactatgcgatcgcccgtttacgcgcgccgttgattgcacttgatcaggacccgtcgcagcgaactatacagtctgtacatacgcttctggcacagtctggtctgtatctgaaagaacaacatgaccgactggttatctgtgatggatatgatccaacccgaacaccagtcagggcagaacgtgtgtggcctgcgctaacgaaagcgatccttgactcgtataaaggtggctggcagccggtaccgaaagacattttccggcaggtgacacccacagaacaattcaccggcggcggtctggaagctacttcggtttccgatcgggaatggcgtaaattgcgcacaggttcaggtccgcagggggcgctgaaacgtgagattttctcggataaggaaagcctgtggggatacgcaatctcacactgccgtcaggaaattgagacgcttatcggaacaggtcagttcacctgggaacgttgtcatgaacagtttgcacggcaggggctgttgctgatgcgggagcatcagggactggttgtgatggatgcgtacaatcatgagcagacgccggtgaaggcgagccatgtgcatccggatctgacgcttgcgcgggcagagcctcatgccggcgcattcaggcctgttcctgcagatatcttcaaacgggttccaccagaaagccggtataacccggagctggccgtcagcgacagggatataccgggcatgaaacgcgaccctgaactgcgtcgccagcggcgcgaagcgcgcgcagctgcgcgtgaagatctgaaagcgcgttatgcggcgtggcgtgcaaactggcgtaagccggatctgcgcggtcgtgaacgctaccaggatattcatgagatgtgccgccggcgtaaggcgtatatccgggcgcagtaccgtgatccgttgatccgtaagctgcattaccatattgcggaagtgcagcgcatgcaggcgctgattaaactgaaagagacgatgaaggatgagcgtttacagctgatcggtgaagggaaatggtatccgccgtcgtaccggcagtgggtggaggtggaagccctgaaaggggacaaggctgcgatatcgcagctgaggggatgggattaccgcgatcgccggggcgacgcagtgaaagtgaccacagataaacgttgcgtggtgatctgtgagcctggtggtacgccagtttatgccggtgttccggggcttaaggccgcgttgcagaaaaatggccgcgtgcagttccgcgatgaagaaaccggggaacatatctgcacggactatggcgatcgggtgatattcgggaacagtcgtgattacgacacgctgaaacggaatatggttaaggtgtccccgattttgttcagccgttctccggacgtggcaatgtcaccacagggcgacaatgagcagtttaaccaggcgtttgcgaaaatggtggcctggcacaatgttaaccgacaggatggtgatgaataccggatatcgagagccgatatcgacaggttgcgtgttgaaagcgaacaacagtttatgggtatgtcgggccagggtaatgattcccggtatgatcgggatgaaccgaagcagacctggaagccaccatcgcctctctag

SEQ ID NO: 79179 - DNA, 141 bp, Citrobacter koseri
atgaaaaaagctgttaaacaaaatcctaaggccagaagcaccagtcgtgaagacatgtttcttatggctgcggctgtgcgggcgttgcgtgttcccgtttctgaaattccggctaaagagcgtaaagcgtatcaggtttga

SEQ ID NO: 79180 - DNA, 531 bp, Citrobacter koseri
atgacagggagcgttttccatcggcagtccacttcagaagaggggcatcaacttgtctttgatgttgatgccttgctcgcattatcaccagataccttgcccggatttcagaaggcttattcagcattcattgattacaagactgaaagtgctgacctcggcaacattcctgctccggaaaatcacatacagatggagtatgcgtctgtagttgatctttttggtaaagataaacctaaccatttccccaaacctggcgcaaaaaaagaaaaactgcatcatgtgcacgtttttgatgggaaaacggatcaggaattggatgcctgggttagcaaggcgcagtcacgcagggtttgcgacacattgttgttttactcttactttgagtttcagggaattcatcactttttcatcctccagtttgtgttagatcccgatggtcatgatttccagaacgaagacggaaacatgaaaaatctggtcgaacgagccagcgcttaccgagcaggcatactctcaggacagatataa

SEQ ID NO: 79181 - DNA, 153 bp, Citrobacter koseri
atgaaatctaacagacgtgaaggttgctcagaggaactccggtggctgaaataccagcaccggatgaaagtacgcgacaccccgagtataagtaaagtaataaaaaggccgcttgatgcggccttttttatttctgcgtccggacacaattaa

SEQ ID NO: 79182 - DNA, 975 bp, Citrobacter koseri
atgcatttttttaacactatagtcgacattccgcctgcagaagaccgacggtctggttttgagcaacatatattacaatggggattctctgtcttacgcgatgagtgcggacagtatgcctctgaaatcacccgggcggcctggctcggtttttcactttatgccacatcacttaccgatgacgcaccggcgctgacgccggatgagccggttatcccggagacagacagcccgctggctgatttgtcggttctgtcaccggaacagttttttaaaggacaccgaacagaagtcacggcaaacgtcaccaccacgaaaacgcacaccgtggatctgacagaagaggaacagcgggacataattgaaagccgcctcctgcagcgcgcattcagtgacaaaaacggtcatgcctcgaaaaaagaagccatgaagcaggcccggctcatcacggatgaatacctcaaaccgtcctgggtatataaaaataacgatcagtattatgtttccacccacggttttgacctctcccgacgccctgacgttaccatcacccagtctcaggttgacgccctgcagaaagtaaagggaatgccggaaaccggccagtcccgcgatctggaacccggcgtggtggcccgtttcggttataacggccgtattttccagcaatgtggccgctacctcgacgcagttgatgtcgtggaatggatagcggtacaacagcgtcccgccatttttatcagcattccgtctgactacagcagtgagcggaagatgcacattgacaggatcagacgtgagcttcttgattaccacgacatcatcaccgcatatcgctgggtgacaacagacacggtcgttatggccatcagccaccatgccgcaggtatacacgcccgggatcaggtacagaatccctggtggctcctccgggctttcaaccgtcccaactccctggtttttggcaggggctga

SEQ ID NO: 79183 - DNA, 291 bp, Citrobacter koseri
atgcccaaaaagacagaggccggtgagcagtacatcagagccgcaacggatgccatcaaaaatgcaggttcgctccgggaactgtatgtggctattcatggtactgagccaggaagatcggaactgcagcgttttgctaaccgccttaacccgtcacgatctaatcctggtaccgatatgcttggcgtttgcgtggcgcatctgccatccctgcatgatgtcactctgaaggaattcttcggtataacggaaaacgtggaaagtgacggtgcgcagcaggtgtctggttaa

SEQ ID NO: 79184 - DNA, 288 bp, Citrobacter koseri
atgaaaaaattacttttagctcccctgctttgcgtcccttcactggcaatggccattcaaccggtctctgacacggaagcgacgaatcagctccggctgatgaacagccagcttgagttgattgccggtacgctggccagcaatcagcaaaaaatattcacctgcactgacggagagaagacctatacggtcggactggatattacacgcggtgcttcacagtacaggtgcatactgaaaggcgatcatgctgaatgggaacgacaaccccggctctcattgaagtaa

SEQ ID NO: 79185 - DNA, 624 bp, Citrobacter koseri
atgacagtaccgaccataaaaacaggaacgtcggattatgagcaactttgcgtccttatcacattcgaaagcaagatgctctgtctcctggcggaacatcgatgggggatactgaccgcttcagatgcagaactggtcgcctgggaactgggatgggaacacgccagcgatatatctgacttatcactctcctgcgctgacgtcctctcgtccatcaacataatgggagaagaactgcttccgggtggatgggttgatgcagtgcagaccggcagtgatgaccgcatcaggtatgaacgacagttcagggaagctgaggaaaaataccctgccggtgacaacaacattgaacgccataacatgacgttcaggcgattatatggctcgccggatgactcagctggctatgtctttatacagacggcattgccgcgtaatgcaaactactgcgttagtcagacagacaatgatgaaaaggtcatcgctgttctggactccctcaatgatgcgatagcagtagcacgctatgccgcatctcatgatggtggttatggtgatgtctgtatcgcaacatcaggtcaccccaccacacattcggactttgacagctggtttactgactga

SEQ ID NO: 79186 - DNA, 2289 bp, Citrobacter koseri
atgcagaacactcccgttaaccaggcgatgataaaccggaacgcctggggctccccgctgattgagctactgcgtgatcatctgttgtatgccgtcatcatggcgggcagcatggtggccggtttcatctggccgctgtccattccgctgtgcctgctgctggccatcgttgccagcatcagcttcagcacccaccgctggcgcatgccgatgcgtatacccctgtaccttcaccgggtggatccgtcggaagacaggaaggtgcgccgcagcctgtttaaagccttcccttccctgtttcagtatgaaaccctgcaggaaagcaccggtcgtggaatattttatctcgggtaccagcggcttcgtgacaccgggcgtgagctctggctctctctcgatgacctgacccggcacgtcatgttcttcgccgggaccggcggcgggaaaaccgagactatctacgcctggatgctgaattcattctgctggggccggggattcacctttgtcgatggcaaggcgcagaacgacacggcaaggacggtctggtatctggctctccgctttggccgcgaagacgatgtggaattcattaacttcatgaccggagggatgtcacgcagtgagataattcacaagggagataaaagccggccgcagtccaatacctttaacccgttcggtctcagcaccgaggcatttattgccgaaaccatgcagtccatgttgcccaccaatgttcaggggggcgagtggcagtcccgggccatcgccatgaacaaggcgctggttttcggcaccaaatactggtgcgtgcgggaaaacaaaaccatgtcactgcagctgctgcgcgagttcatgccgctggagaaactggccgaactctactgccgtgccgtggatgaccagtggccggaagaagctgtctctccactgcataattacctggtggatgtgccgggatttgatatggcgctggtccgcacaccatcggcctggacggaagaaccacgcaaacagcactcctatctgaccggccagtttctggagacgttcagcaccttcacggaaacttttggcgatatctttgcggaagatgcgggggatatcgatatccgcgactccattcacagcgaccgtatcctgctgacgctgatcccggccatgaacacttcccagcacaccacctccgcactggggcgtatgtttgtcacccagcagagcatgatcctggcccgcgacctcgggtaccggctggaagggctggacaccgaagcgcttgagataacaaagtacaaaggccggttcccctacatgaattacctggacgaagtcggtgctttctacacggaacgtattgccgttcaggccactcaggtacgttcactggaattcgcgctggtcatgatggcacaggaccaggagcgtattgaaacccagacgtctgccgccaatgtcgccacgctgatgcagaacgccggcacgaagatcgcagggaagatcgtcagtgaagacaaaaccgcgcagaccatcagtaacgctgctggcaaggaagccagggccagcatgctcaacctgcagcggcgtgatggcgttatcgggacgtcatggattgatggcgaccacatcaatatccagatggagaacaaaatcaacgttcaggatctgatgaagctgcagcccggagaacactacacggtgtttcagggtgacccggtcccgggagcctcgttctatatcagtccggaggagaagagttgcaacattccgctggtcatcaaccgctatatcacggtgaatccaccaaagctggaacgactgcgccgactggttccccggactgcgcagcgtcgtctgccaacaccggagaatgtcagccggatcatcggtgtgctcacggagaaaacctctcgtcggcgtaaaaagacagacacaatgccctggaaagtgatcgacaccttccagcagcggctggccaaccgtcaggaggcgcataacctgctgacaaactttgacatggatttcgcggggcgtgaaaaaaatctgtgggaagaggcgctggatactatccgtaccaccaccatggccgaacgtaccattcgctatgtcatgctcaaccggcccgaatcctccgtgacctcccgggaagatgacgcgccagcccctaacgctcttctgaaaaatctgacgctacctccgatcacccatgttcacgttgtcaggaaaaggaatgatgtgcccccggtacaggttcccccgcccctgaaccaaatggagtggcctgaatga

SEQ ID NO: 79187 - DNA, 1149 bp, Citrobacter koseri
atgccctcagcaaacacttattccgcttttcactgtaacgacagcatcgtggtcctgcatcagcatggacaggatacgccacagacattgaccattttccgcgaaccacagcggctggccacgcatgacggtaaactgattgccttttacgccttctcaaatgaggccgtcacgctgctcgacgatccgcagcatgatgccggagcggtcctcaatgccattgcattgccgctgaaaaaacgcagtaacgccgccctgtcccgttacctgaaatacctggcctgtgccgctggcggcgcccttctggcgtctgccatgtggtaccagccctccccggaagatttcgttcccgtagcgttcagtccggccaccgaaacaactgtccaccgggctgctgacagtgctcctattgcccgcacagccgcttccgaatcgcagaacatgcaacgcgcgatgcaggataaccgcaatgcgttaccggcatcgccatcagcagcgctgcagcctgcaccgtcggaggttcgtcccgccagttcttccgtgttgcccgccgcgcataccgcacctgaggtggcaccggaaaccgccgctcggcttcagatggcagaagtgcttaaacgcaacgctgaccgtggcatgttcaccattacgctgtccgccggtcacgaacgtacgctctacgccttcctcgatccaacgtgcagcgtctgccgggcaatggagccggccattgaacgtctgacgcaggagtacaacgtgattgtcttcccggtttcggtggtaaatgacggcggcaatgccgtggagaaaatcgtgcccctgctctgccagaaagacgcggcaaaacgcgccgctggctggcaggcactgttccgtgccgacgccggaatgtccgttccggggagcagcagcgcacccgtcgatccggaatgcggaaaagccgcagaagcggccgtcgccgtgaacgacctcggtttccgccagttcggttttgaaggtaccccatgggtactgaccgacacaggtttccgtctgtcaacggggttactggccgaaccagccaaaatcgacctgttcctgaaaaccaccgaccagatgcaacctgaacaggccgatcgcttcctgaaaaccgtcaacactcaggagtaa

SEQ ID NO: 79188 - DNA, 1215 bp, Citrobacter koseri
gtgtattcttcccgtaccggtacgtctgtggaccccatggactactggggtgttcttgccgtgctgggcctgatgatgctactggttgcctggctctttctcccggagtttgtctactggtcctgctttcttcttcatacgctgtggggcatggtagacttcgggccgttccatacctgggccgctccccgttacaacctgctggccaccaccggtaacaatgctgaaaacgtcaccctcgaccagtggataagcgtcatggagcagaccaccggcatcctgatgatttttctcattccgttatctgctgcttccctgtggggatggatacgccatccggccagaaactggtacacacgtcgccccctggatattcactctctgccgttcgcgatggaaagcatctcaccggctattgcaccggtgttgcaggaaggcgatccgaagcgactgttacttgataagcgccgcccggaaaggtgtccggccaaaagacctgaagactttgccaaagaacataagctcatcagtaatatgcagcttgatgttgcccgctgccgggaagttttcatggcgcagctcggcaaaccactttcctcctggaaaagccttgcgccccatgaaaaagccctgttcgccatcttcggcctgcagttctttctcgatgaccgcccggccgcgaaagcgctgatggataccctgaaccgctcctgccgtatcaaaagccgtcgggacagtggccggttctccgtgccggtgtacgcactggcaaaaccggcatttatccgggtgatcaatagtgaaggcgcaaaacgctggctgaaagagcacaggtatgtcagaagtggcctggtctggctgtatgcgcacgacctgcgcctgacaccgcccaactggctctggctgaaaggcgtcgaccgcacgctgttctatggtcttcaccgggcaaataccacaaagggttttatcgagggagccggcatcgtggccgtggcccgcacggagaacgaagccatccgtctgggtcttccctgcccgaaaccctgtgtggaggaagccatcgacggttttcgcgacgatatggtcgccctgggtcttatctgggatgagccgcaaccggatcgtgaccgtaaacggcgcatccgcaataactggtcactgactgacgacgtgctggcgcggccagggcaggaggatgacgaactgcctttctga

SEQ ID NO: 79189 - DNA, 219 bp, Citrobacter koseri
atgctagacacatctagattagccgcttactgcgctctgcgcaaggagaagtatgctatgaaactaccacgaagtcccgccatctggtgtctgctgatagtgtgtctcacactactgatattcacctggctcacccggtcaacgctctgcgaagtccgtgtgagggatggagaaagggaggtcgctgcgtttctggcttacgaatccaacggtaagtag

SEQ ID NO: 79190 - DNA, 633 bp, Citrobacter koseri
atgactgatcgcttccctaaatggtggcttatctattatgtaactaagagtctttttctgcgattcggtgttgttacactacttatccttgcgcctttatttacactttttgcttttgattcaccgtatgcacatagtcgagagttcatgattgcgttttctctatggttctttttggttgcaccatttgctgtaaattactttattgcaaaaaaacgcaagcagaaaattcagtcagtactggatgaaataaaagctacagggttctttaatccaacgaaagactctgaaggatggttgttctggcagaatacctatcttggctttgactaccacaagggcacgatcgtgtacatccgaatctacccgggcaatgtcatggacgttattggatttgatgcctacagccttacccgtactgaggttgagggctctaagctgcgcctgtacacgaagttagcatcattgcctatgatacctattgataccttttctgcgtctaacattgcagaccacctgcatggcatgaacaataaaggctactcatacaacttcaacttcccggagatcgtgaagcaaaaacgtcagaaactcgaatcgcttgccggaatgcctgtacctgatttagtgtaa

SEQ ID NO: 79191 - DNA, 2157 bp, Citrobacter koseri
gtgaaaaaacaccttcttgcgctctgcgcaggccttcttgcgcctgtcgtaactgcacgggctgccgtcacctatgaagatatcgtgtcggcggccaccaatgcccaggatttatcgcgccaggctctggtgaccatatttggtgacgtggtcaccaacccgcttgccgggggtaacaccacgatggtcggtaatctgtttgccctgtttaacggcatcatcgccattcttgccgtcgtctggtttatcttcatcggcctgcgccatatcaataaaaccggccatcagggcaaggtgttcagcgccgatcgtgacatcgtcggcaccatgagcacggttgccggtttcctgatgattatccccacggcaaacggatggagtctggcccagctcattatgctctggggctcctccattatgggcgtcggctctgccaatctgatggtacagaaggccgcagatgacatagccagcggttattctctcactgtccagcccacgcagtcctccacccgcacggccgcccgcggcatttttgagatgcagctgtgcaaatacgccattaacaatacgctggatgatttcaacagcacgatgccctcttccacaccgaagatgacagaatcgtccggcaccagcggcggtaattataccttccggataagtaacggcagcggcgtgtgtgggacggccagtattccggaacagcagggcagcgacgtttcgtcttccggcggcttttttaatccgttcagttcagcagacacccgagaagttgtggatgcgcagcacacagccatggatgcgatgattaaagacatggatggtgtggccagcgagtttgtgaaagcgtttatggacaagcgggcaaatgatgccggcacgctgccggacattgaaagccgcatccagcaggcagcaaacacttacgaacagacggtgcagaaagcccttccggcgcaaaatgagcagagcggaatacaggacaacctgcgtaactatctcgatacgtatggatgggcatcacttggggcctggtaccagacatttgcgactgcaaaccagcgactgacggaaatagccagccgctcaccatcgaccagcggcatgtccgccctgggtgaagtgggtaatgcagagttgttcacggccgtaatggcggcttaccgaacacaactgcagaattccacttatgtgccatcgctcggaacgatagtaacaagcaatgagcaacaggcaggaaatagtaatgatcccaatagcattttaatgaatacgattgcaggtccgatgcaaatcttcaccaactgggtagcaacatcacttagtggcacaggcaccgagaacacacaagtaaatccattaataaagatgaaaaatgttggtgactatactttagtggccgcagagagcagtctgactgcatatacaattgccagggctcttgttgcaggtggagaaaaatctatccttggtaaagtaatcaacctcactggtgctgtcagcgctgtcgataaaggtctggatgctctatcaccggctgtatattttcttctgttactgatgtttaccgtaggtttcacactgtccatttatctaccttttatccctttcatctactggatgaccgggattggtaactggattgtcagcgttctggttggatgtacagcaggacctctatggggggcgacacacctcgggacatcacaggatcgcggtagcagggctgcctacgggtatatctaccttatcgatacaatgatccgtccaccactgatggtgttcggctttttctttgcatcggtggcgatcattgctgtcgggacgattttgcatgctttgtttggtgcagcacttgtgaatgttcaggccacctcgttgacgggactgttcagcctgattggttttttgatgatctacgcccgtctctgtactgcactggtttccagtatgtttgccctgcaggcctatcttcctgactacgtcatttcgttcctgggtggacgcgatgctgccaatactcttgggaatatggcgagttctgttagagatatatttgcggccggcggacaaaatatgcgtagaacacctgggataaacgccaaaggaatgaataattcacctgatacaaacaaagatgggattaatggttaa

SEQ ID NO: 79192 - DNA, 150 bp, Citrobacter koseri
atgactattgctgaacgtcttgaacaaaaaggccgacaggaagaagccaaaaaaattgccatgcaactgcttaagatgggtatgccacctgaaacggtgaaacaagccaccggcctttctgacgaagcgctgaaaaaattgcgccattga

SEQ ID NO: 79193 - DNA, 840 bp, Citrobacter koseri
atgtcgcggccggaagccgtcagggattttatggatatccatcttccggcggaactgcgcgcgctctgtgatttcagtacactaaaactggaaaacacctcttttgttgaagatgaattacggggctattacagcgatctgatctggtccctgcgcaccacgaaaggaggtgatggttacatccatctgctcgtggaacaccagtcatcgccggatcggcacatgggctttcgcctcatgcgctacgctgttgcggcgatgcagaagcaccttgaagcaggccataaaaagctgccgctcgttataccgatgctgtattacgcaggaaaacgcagcccctatccctacccggttaactggctgaaagagtttgatgatccggaactggccgctcagctttacagcaacgattttccgctggttgacgtcactgtcattccggatgaggaaattatgaaacaccgccatatcgcggcacttacgtggctacagaaacatgtccgcgccagggacaagccagacgatgtggagcgccttgcaatattgttccagtcagagtatacagacggacaaactctgaccattctggtaaactatctgatacaggcgattgacaaacctgagccagagaaattccttcaggcactggcccaacgtctgccacgatacgaggaggatctcatgactattgctgaacgtcttgaacaaaaaggtcggcagaatgaagccgaaaaaattgcgagaatgatgcttaaagatggctatgatgagtcagtcatcaaaaaattcactggctttactgtcaaagaactgaaagagacgaaagaacataagcactga

SEQ ID NO: 79194 - DNA, 480 bp, Citrobacter koseri
atgcacatgaaactggtcaacggcaaacccattaaacacattgcaaagctctttatcgacagggcgtcagaatgccggggaaacatccttcttaccggggcttccggcacggggaagacgctgatactcgcgcattatctggcagacaacccggctgactggcatgatttcaatgaggtgatgcccgtaccgtccatgctgacgccggagacgctcttccccgcgcacagcgtcgccatcattgacgtgccgtatctcgatacggcatgccaggaagtcctgctgaatgtactgagaacggcccgccgcgatgggcggcggcttatcctctcctgccagacagccccctactggctgatgcttccgcagtttgagatgctgttccgcctgaaacgccttcgtgacggtcacggcatcagcattgagtgtcacaatatgaacttactctcatgccgtaacgctgaaagccttcacgactga

SEQ ID NO: 79195 - DNA, 540 bp, Citrobacter koseri
atgataaccgatgacaaaccgaagaaaccccgccgcctgtggcgtatcacccgcgggctgctgagccttttcctgccggtgcaggagacacagtggtacctgcgcagttcccgggacgtcaccgcccgcaacctggcacgtatccggaaggcctttccggaactggatgtgacggaagaacccccggagtctccggactgggaggcggccgtggccgcctccgggcaaacaccggaagcgctggaaagcaactaccttacgcagcgccggcgctggcggctcatgttctggctgctggccattccggtgccgctgttcaccctggggccggtatacgccggcaacggcctgacctttcatcagttcagcaccggcctggtgctgttctccggtgcgggggtggcctggtcaaaagcgctgattgtgaccttccggctgtggcagttgcgtaaccgccgggtgagcgaggccgaacgcggaaccttccggcactttatcgcggaaacccgcgctgtgcgcgatgccattcgtggcgactga

SEQ ID NO: 79196 - DNA, 1203 bp, Citrobacter koseri
atgcaacgatgccgactttccgcactgatgctgctcatggctgcgggtctgccgcagctcgcctgcgcctataccgtgaatgtgaactccagtatcccggtgaccacacaaatcctgcccgagatggcaaccatccaggggacgctcgccgaaatcttgcgtatgcagcaggccaccggcacggccatcaaccagaacgcggacaagctggccaccatcatcagccaggacgggcaggccacccgtcagcagatgatattcggcaacgagacgcagcggctggaagaggcccgacggagtttctccgtgccggactccatctgcagtgattccgcgtcaggggtggcagccaccacccgcagcgctgcgggcagcaccgcctcacggctctcgtccggtggcggcgtcagcagcaccccggtccgtcagcgcatcgccgcagtcgcggaatcccaggcccgcgatgcctatgacggcgcgaacgtgcatgcggcctactgtaccgccgctgaatatgcacgttacggcggcacggatgtctgtcccgccgtcagcgacctgcccggtggtgacagccaggtacgctcggtctatgacggtgccgggccggaaggccaggcaccggccggcacctggacacaggagcagatcgacgcggccatggcctacatgaaaaacactgcccgtccctctgccgggcgcactcccggcaagggggaagtgaaaaccctgaccgggcgcacgtatgtcggcttgctgaacgaatacaacggcatcattgatgccgcctcggagccccagctgtcgctgattgcggacagcaaacccagtgaggctacccgggatgcgctccaggaagctctccagtccccgtctgccgcccagtattttgatgaggtcgcctctccggaggcaaaagcgaagggatacatgagccagcgggaatttgagttatttgaggccgggcgacgctacgccaacacggcatatatttccgacctgcagcagatggacggggataacctgatacgtgagcttattcgcaccacttcgcagatgaactggcagctgaacgacatcaaggagcagttgcgcaaggggaatgtaattaacggacaactgctggccaccactgcccgccaggcgtataccccgaggctgcagcagctggaatccgccatgaaccaggggaccgctcgatga

SEQ ID NO: 79197 - DNA, 573 bp, Citrobacter koseri
ttgagatgtctgatccacctgaccccgcgctgcaggcgaccggcacgcggtcaggtcagtctggcacgcctgctgcttgacactggtgacgcgcagttcgccctgccgtccggtcatttccggacagataatgctccgggtaaccgtgccgtgtacgccacagatgcccgcgaggcaccggacgccaccggggtcctgctgagtctgcctgaacacccggtgcagcttgtcaccaccgccatctggcgcgttgatgagcccggcgaacccgtccgggaagcccggcatgtggtgcagtggctgctgcccgtatcgcacgctggcctgctgagcgacgatgtctggctctggccggtacagtctgaccatccgccgctcagcccaggcgactggcctgtgatggatatcacgccgccgtccattccccggattcagcgccgggggctgacggtcatcgatacccgtaacacccgcggccggatcatccgccgtttccagaccttccccctggtggcactgtctccggaaactgtctccgtacgcctgcccggccagaccacacaactaacctga

SEQ ID NO: 79198 - DNA, 3054 bp, Citrobacter koseri
atgaacattaaacgcatggtcttcgccattgaagatatgatgaacacgttttcccgttttgccgtctcggcagactttgttgactactgtgacctgcgcacggttatcggcctggataaacaggatctggaactgcgcccctggctgcaggcaccgtatatcggcgtcacccaccaggggtattacctctccgtcttcgagattgccggcgcactgcgggacatggacgaagaggccccggcagaccatccggatgcatttgaaggcctcattactcacctcgccacaacgctcagtaccagctacaaaaacaccggccacaagatggcgtttatctttgagcgcgatcaggaaaagggggaaagtgagatcagcacgatgatcgccccgcaaaaacgggccatccgccacacggccattcagcttgatgacattctggaagagaaaatcaccaccctctcaccctggctggtccgggaacgctgctggctggccgtctggagttcaccgctgctggtcagccagcaggaacgggcagactttaacaaaacgattcgtgaagtgaatgataaagccccgctggcccgtttcggtcagcagccctggcgctggatgatgtccggcctcaaaatccgccatgacagctttatcaccacgctggagaaggcgctcgtccggggcggtgaaggcctgctggtacgcctgatggacatcccggaagtgtgcaatgaaatccgtcgggaaatggctcgcaacagcacgtcatcacagtggcggccgctcctgcccggagacaccgcagtcgccggggtgcgtcaggacgacgataactctgccctgcttgcgccgtacctcaaccttcaggtgttcggcaactcgccggaaaccgtaggcaaccttattcacaccgggggcctctggcacgggatggtgaccctcacccttccgccacagcacccgaaaagttttaatgaactggtcaaagccgtcccccgggccgtcccctggcgcatccgcatcgatgtgatgcccggcggtatgaaggcgctgggcgggaaaaaatttctcgcctccttcgggcagtttattccgtccatccgcccgctgtatgacgcctgcacgcagttggcccggacggatgagcgcgatccggtgtgcgtcatgaccatcgtggccaccacatggggcccgacgcaggaaatctgcacccgcaaccagatgctgctggaatccgccctgcagggatggggcgtatgcagtaccaccaccgcattcggcgatccgcgccggggatgggtgaacaccatgctggccgcctcggcgggctccggccccgtacctctctatccgccgctgtcccatgccctctcgatgctgccctttaaccgcccggggaccgtctggcggggagaaggcaacctgatgctgcataccgaagacggctgcgcctgggaggtggggctggcgtcatcacggcagaacaagcacaccgagctggcccccggggattccggtctgggcaaatcggtgctcatcaacaccctcacggagatacaggtggcgtcggcacaggcgtcgctcccctatgtggcccatatcgacaaaggcttcagtgccgtgggaaccattgagcttatccgtgacgccctgccggaagggcgcaaggatgaggccatctcgatcattctgagcaacgatccgtcccagtcgcgcaacatcttcgacatcctgtacggtgcccgtgagccagttaccccggagaaacaattcatccgcgccatgctgacggcgttctgtatcgagccggataagggaacgcctccgaatccgacggacaccgggcagattatggatcgcctgattgagctggcgttcgatctgcgcagtggcgaagaacccaacatgtaccgggagcaggttgaaccggaagtggatacggctctgcaggagtcgggactgtgggaacagcatgatgcagactggtggcaggccacgccatggtatgaagtcagagatatcctgcacgggaaaggattgctgcaggccgcccagcgcgcccattaccaggcggtacctgaactcgctgacatgccgtcctttctgaaacaccagtccatccgggagagttttggccggatccagcgtaacggctctcaggaacctttactggaatatatcgagcgctgcctcatccaggcccggcaggaatatccgatgctggccagccggacgcgtttcgcactgaacccggacacgcgtatcgtgagcgttgatctgaacaacgtggccggggacaaaacgccggcgggtcgcttgaaaactgggatcatgtacctgtttgctggtcacatcaccgccggggatttcaccctgccgcagtaccgcaacgaagtgctgaaagtgctgccggtggcgtaccatgcgggcattctgcgccgtattaaccagctcgacagcgagatgaagaccaaaatctacgacgagctgcacaacgccaaaggcatcgacttcatctgggatgcgctcgatacccaggacagggagcagcgtaagttcggcatccgcaccgtgctgagtacccagttcctgaccgattacccgaaaagtctgctcgattccgccaacaccctctggctgctgcgctaccgccaggaagacattccccttttacgggacagttttaagatccccgaacacaatcttcaggcattccttcgtatgcccgccggcccggctgcagacggcagtggcgtaccgatgctgtgtatgatgcgcacgacccagggcacgctggcccggattgtccgcttcacgcttggcccgctggaactctggtcactcaactcggacaaaaaggacggtgcgctgcgccgccacctgaaggaaagcctcggttctgcccgggcgcgccagcttctggcttcgaccttcccccgcggctcggcaaaaaaatacattgagcaccgggaacgtaacgccggcgcgcgcggcgaaaaaggtgtcatcgctcagatggcggaggagatgattaacagtctggggtacaacctttga

SEQ ID NO: 79199 - DNA, 819 bp, Citrobacter koseri
atgagcatcgctaaaaaaacgcaggagcccctttacctgcatccgcttcccctgcccgacgtggtccacaccacagagcctatgttgccggcaccagagaaaactgacggcggacgctgcgtctgctgccgggctgacgtgaaacaccgctttgtgctgccggagtccctgccgctgacccggctgttacagacggcagaagacgcgcttattcgccttgaccgggcccgggatgccctgctgcgccttgagtcccgccagccgccgcaggagccggcagaacggcagaagtacctgaaaaacctgaaagccgccagaaccagcctggagcatgccaccctgtccgcccgtcgtctcgccctgcgtcatattccctggcgcagcatcacggaaacgggcgcgctgtcagcacaggagcggacagagctcagcctgccggcagcgccgttccatctttgttatctctgccatgcctggcatgcgctcaacggctatgcggccgcgcagggtaccatggtctggttgcctgatttgcatccgcgcagcgttgtggccctgaaccgcaaggccctgcgggctgtcttcagcaccagtccggcgacggtgcgtgaagggcgaaagatcctgtcagaactgctccgccaccgcctgccggtagaagaacgattcggaggatttcgtccggtagattttgccgatgccctgcgccgttttcccccctcgatgcgcgatgaactgcgggagaagatggcgggcgtggcgctcattctgacgccggattcggttacggaccgggaatacctgcaggaaaacaactaa

SEQ ID NO: 79200 - DNA, 195 bp, Citrobacter koseri
atgctgatatcccccgctgttctgttgcccttacagggcctcaccgtgctgcgcactgagcatgctaacgtcatcgcccgtgacgaacgggacaatcaggaatttgtactggcggagtgcagttctccggccatcgccggttgcctgctggcgttgttcagacacgcctcaggaggtcaggatgagcatcgctaa

SEQ ID NO: 79201 - DNA, 405 bp, Citrobacter koseri
atgtcactgttccgtgccctgacggcgcgtctgtatgccgtcgtcttttatattcaactgaccctgatagccctacgcgaacgggcggttcgtgccctgcttgcgctcatcgccggtttgttgcccggtattgcgctggctgacggcgacctcgccgacatgtttgacagcgccgctgccggtgcgaaacgcgccaaaacatccgggctggatatctttcaaatgctcggtctttttattttcggtgcctccctgctggcgttcaaaaaagtgggtagccacccgcaggttaccctggggcgctgtgttgccggccttctcattggcgccgggctgtttattatcccggaactgatcagccgctcccagaaacagatgggaacaagctcaatcactatcaactga

SEQ ID NO: 79202 - DNA, 528 bp, Citrobacter koseri
atggcgcttgatgcgctgaccgccatcgagaactttgcatcgggaatattcagtagcgggatcaactttctgttcacctggggtgaaacgctgggatttatctgcctggcgctgctgttaacccgggctcgctcgacaacagccgtaccgctgtccccggggaagttctttggcggcctgtttgcctgcgcggccatggtatcactgccctccatcatcaatgccagcggcgcgcagttcggctttcattccaccacctttgatgccatcgcctacgtccagccttcaaccttcggagaggcggccggcgcggcaaacgccgtgctgtcgcttgcccggcttgccggtgtgggctttgttcattccggcctgaacatgtaccgcatggccggtctggaaggccacacagcgctgagttccagcgaaagcatccgctcagccaccgtcaaggtcgtggcgggtacagcccttgttttttcaccgcagcttatcgacaagctgctggccagcattggcctcgccttttaa

SEQ ID NO: 79203 - DNA, 765 bp, Citrobacter koseri
atgagtcagcaagatgaacttatcaccgatgacgacgtggtcgatttcggtgaagccgatatcggggagaaaaagcccttctggaagcgcgaactgctgtttggctactcgctgccctggcttctgggggctgcgctgcttgccggtgcagggatctggtatctgtatggcccctccctgtcaggctttgtgtcccgccccggcaacgccgaattcagcgaggtggaccacaccctgaacgacacggccgggacagcacaacccgcagtgctcccgcatagcgggactcagacagggacacagcctgaggtaaccacaccagagtctcccgcaatgcacggcgacaccgtggcgatgatgacggacatccgtgatgagctgaacgcgcgtgacagcaggataaacgacacccttggcactctgaaagacagcgtcagccagatctcagaggccattaaacgggacgaggcgtatgcggtggaaacccgtaaccaactgatggctctgacgcagcgccttgctgcactggaaagccgtctcgcggcgagcactgtggccacgcccaaatcctcatccggtaaacggcaggcggccagccctgttgccggcatgaaggtggtctctctggaaaacggaatggcctggataaaatggcagggcagtacctgggccgtccgggagggcgacacactgggtaaggtcaccgtcagccgaattgatccggccagccgatccgtcaccacctccggcggaacgctgcgctga

SEQ ID NO: 79204 - DNA, 1308 bp, Citrobacter koseri
atgagcgcagaacaggatgccgcgaataacggtaaaaaaaccttttccatcatcatgctgggcctgcttatcgcgctggccggggggtactggctgatctcctggtggcaccatgacgacggcgcggactcggccgtaaacctgaacggcacggcaacaagcgcgggctctcagaccaccgaaactccgcgttaccgcgagctgctgaaagcgtccaacgaccgcggagcggcagaggcagcacgcaacaacacgacgtttattgccagtctgccggtcggtcttgacagccgggaaccgcctcagacgcgtccccctgagcccgacaggcccccaccggtacagcgggagccgccacccgcgccccggtcacaggcttccgcggccgcggagcagcaggcgaatgaaaaacgacaggaacggctgcagaaactgctgacccgcatcagtctcgcgcagggcaagggcacgcgcccggaacgggcccggttacttcacgagggtgacactgtcacgtcaccagatgtgtccgtaaccaccgccagcctgtcgacggcggtgaggcagacgccgacgccacagacgcttatcccggccctgacccgcgtgggggcttcaatggaaactgccgtcgactccgataaccccaattctcaggtggtggcggagatacccgcaggcttccttgcaggcgcccgccttcatagtgcatcggtgaaacttgccggcaacggcgtggaaatccatttctcccgcatgagctggcaagggaagacgttcaatgtcaacgcatatgcccagagtgaacgcaacctgatgtcatctgtcgccagtgatgtcagccaccgatgggggacacacattgtcctgccagccattctgggtggaatgggcaatgtggggagtctgtacaaagagtccaacacgcagatccttcagaccaacatgagcaccgtcaccggccgggcaggtaaacccgatgcaggcaccgtagcaggcgttatcgccgggggaacggcccagaaaggcgcggaagtcatcagccaggagatggcacgggaacccttccgtcaggtcaccgtcaaccaggatgaggtgatctccattctcttcgtcgatgccgtcacccctgacgacgttgtcggacaaaagaactccgcgtcacctgcaaccagcacgtctgcaccgtccgggatggccgccgcggaacaactatctgaaacccgcctgcaggaagccattgctcgccgtcaggccgaaatccgccgccagtatggcggcactgaacccagtaaggagtatgaatga

SEQ ID NO: 79205 - DNA, 1002 bp, Citrobacter koseri
atgacattccgttatctcctggtcacgcttctgctgtgtggcccggccgttgcggcaaccgcggacgacagcggctggcagaaggcccggacgccggtggccgcctcaacgagcacagcagcagccggtgcgcaggccgcacagccggcgggacatcagggtaccggtgtgccggccagccagatgagtggcgaactgccggctcccgggcaggcgtctcccctggtggaggaagccgccagtctggactccccgctgtcgccagatgagatccgcgaactgcgcctgcgcctgacggacaacgaacgttccgtcagcgcgccggtcatcagcgtcgtgccgcgtatcagttccctcaccctgaacctgtcaccgggtgccagcctgccgctggtccgcaccgcgatgaacaaccagagtgtggtaacgctgacggatattcgcggtgcgccctggccccagtcagacgcgccgcttaacgccagtccggagaactttgacgtgcagtacaacaagggcagcaatatgctggccatcactcccctgcgtccgtgggcatcaggcaatatctcggtctggctgaaagggcttgatgtccccgtcatgctcaacgtcaccagtggcgagaccgacacacggaccgccagccaggagattgacagccgcctggatttacgggtgccgcgcacggggcccggctccgcgcttcccggcacgccggtggacaaaattgccctgcacgatgccacgctgcaggcatatctcgatggcataccaccgaaagacgcccgccgtctgaaatttcagggcaatgtgccggacaccgcgatctggcagagcggcgatgacctgatggtccgctcccgcgccatgctacgcgacgagtttgagcagacgctctcgtccgccgacggcacacacctgtggaaactgccggtcaccccgctgctgaccttctctgtgaacggccagtccgtacacgtcaccccggagctggaataa

SEQ ID NO: 79206 - DNA, 699 bp, Citrobacter koseri
atgacaaacctcacgcaaaaagcccccccggctaaggggcgggctccatcccctgcagcagatccgctgaaagacgctgtcagcatgatgaagacagctgaaaaacggcagcaactggtgccggacatgatgcagtccaacctccggctgggactcgccctgctgatcagcctcaccctcaacgccgtgctggtctgggggatcttccagaaagaacgggactactttgccacggacaatggacggctggtccggcttgccccaacaactgagccggcatggagccaggaggacgccactgcgttcggcagcaaggccctgatgcaggccttcaacctggatttcgtccattaccgtgagcaggtctcttcggtggccccgctgttttcagaagaggggcacgccagctatatccaggcgctgacagcctccaacattctggaagccctgaaggcccgcatgaacctgacggccactgttggtgccggtgtggtcgtgcgccgtggacgcctggctgacggtacctggttctggaccatgcagtacccgctacgcctgcgtctggtcgggcagacaaccagccggccggagcaggcctttacgtttgaaatcaccatccagcgggtggatccacgacagaaaccggtcggtatggaaatacgccagatgatctcccgcaacgccccccgcaactactga

SEQ ID NO: 79207 - DNA, 354 bp, Citrobacter koseri
atgcgatatctcatgctgaaagccggacttctgtccggcttcatgcttttttctgccgcggccacagcagcagtcacctgtcgggcgggtagcgccgcccaggcaggaagtcaggccggttatgaacgggccaggacagccgcgaccgcctggtcgcagcgggaaaataatgtctcatcctccctgcagtcctgtctgtcccgtatcaaaaaaatcacggtcaccgtgccggagtttcccagcctcgacgatgtgctgtcgaagctggaaaacgaaatttgtgatgctgctgtggacaaagtaaacgagcaaattcccggcaatatcgacccctggaaaaactattcttcctga

SEQ ID NO: 79208 - DNA, 4560 bp, Citrobacter koseri
atgattagccgtcacagaacatggcttgccgtacctgttgaagaaaaggacgccgcagtacaggcccatcccagactcgaaaacggacaacaggccatcgtctgggataaagaacataaactgtggtatgcccgtcccggcgtggaactcgatcgactggaacgctggctgccccgcccacatacgttgtccatgaacgcagacgatccagtgacagaattcgcacagaaactggaagaagcaggtctcgtactgaaaggtcctcccgtcatggacggtacccgtcaacgcgtcccgacccgtgatgacaaaaagggcgctaaaagcggagtttacaaggccttccttgacggtcgtccggcaggctggtaccgaaattaccgcacatctgatgagaagcctacaccgtgggtatattcgggcggaaatgaaatggatcccctggcccggcttcatctgcgcgcacaagcgcagcagacccgcgaggacaatgcccgtgagctggaacagcagtataaccgccgggccgcctatgccgaacgctatgtctcccgactcccgcaggccaccaccagtccctacctgatccgcaagggagttcaggccgcagaaggggtgcgcatcacccctggaggtgaactggttatcccgttcagcaatgcgcaggggaaaatcagatcctaccagcgaatccctgaaaccggcggcaaggatgcccgcatcctgaaggacagtgagaaaaccgggaactggtttgccttcggcacaccggttaatggccagccactgctgtttgccgaagggtattccacagcggcctccgtgcatgaagccaccggcctgccggtgctgatgaccattgatgcaggcaacatgattgccgtcgcccggaatgcccgtgccgtctggcctgacagtcgtttcatcttttgcgcggataacgatcatcacctccggaacccgcagactggtgagccggaaaacaagggcattctcagtgccacgaaggctgcggaactgacgaatggtcagatcctcgtgccggtttttacgcttgccgaactcgaccagaagctcactgattttaacgatctcgatgtcagccggggcagagaggcgttccatcaggagatcaacgttcaccttatcgcaatgggcgtgaccacgcctttcagtgactctcccgggatacgtgaggcgcttatccgcgccggtgtcggactcccctctgttcaggaaaccaccatggaaaaagaagaaaatactggcctcgcgccgacacctgccaatgacgccctgccacaacccgccataccggacgtggcgccgccctccgtcacagggctggaacaacaggctacacaggattatgccctcttaaagaaaagtgaactggatcctgccacgctcgtacgcaaggctgaagcagaccccgcctacaaagctggactcctgtcagccatgtcacaggatgccggagatatgcagttcaacggccagagagttgacgccaccgcctttgctgaagaaagtttccgcgccctgacggtatttgcgcagactgtttcggatctcactactcgccatcaggcggagagcgattttacccgctacagcaatcaggagcttgatgccgccaccctggtacagaacgccggtgccgacccggcctaccgggaggggcttctgtcggcgctggcgcaggatgccggtgacctgcagcttaacggccagcgtgttgacgccgccgcctttgccgaaaacgccctgcgcgccatggcgacggaagtgcaggcgaacgcggagaacaccacgcgccgtcaggcagagggcgattttgcccgttacagcgccggtgaactggatgcagccactctggtgcagaacgccggttccgacccggcctaccgggaggggcttctgtcagccctggcacaggatgccggtgacctgcagtttagcaacggccagcgtgttgacgccacggcctttgctgaaaccgccctgcgcgcccttacatcggaagcgcaggcagatgctgagcacgccacacaactgccgaccacgcttcagcaggaaccggcgcccgcgcagacggctgtacaggggccacttgcctcagaggcgcagccgcaggtaccacagcccacagctgagattcaggcaggtaccggacaaacggaagagaccgcagaacgctcactgccaccggactccgcgcagccatctgcagtgtcggataacaatgcacagccggcagcagtcgcgactgcaggtgaaaccgatacggccagtccggctcttctgacggaacagggacaacaggccgccgacgatcttgcccgtttcatccgttcagatctcgacgcagccaccctggtacagaacgcggaaaccgacccagcataccgtgctggtctgctggccatgtttgaacagaccgggcgtgacctgcaggctcagggccacgatatcgatatcgccacatacgctgaaaaaaccctgcgtgaccttacaggggagatccggatggatgaatctgttgcggcatcctcccctgctgcgtctgagcccgtgatgcctggtcaggagagcagcaccgaacaggctgtcgtatccgggctctcccgggaagatcccggtgacaccccaccggcatcgttgcgggcaccgtcggtgtctgatgcagcggacgaacaggaggtggaggtgccgcaggtgatggatgacgccgttccggtcatcgatctcagtgcgctgtccatgaccgccggggacatcagggagccggagcccccctttattgacatgagtacattcgggaaggaaaaaccggagccgacccgcccagcagccggggaggcacaggaacaggcgggcactccggctgctgaacggacagaggccacagccgaaacggcggcccatgcagaagaggctgacggcattgtctgggggccccgccgtcctgatgtaccgcagaaagaagatcttgagaagataatcaaggccctgacgtgggaagaactgcgtgacaacagccggctgtaccggcttgatggcgaggatgcgttccgcgacctcggtaaccgcctggagatgtgcaacggagcaggtcaggacgaccgtaaggtgctggccgccctggccgtcgctgcaaaattttacggcggcgtgattgaactgaccggcagcccagagtttaaggaaaaagccatgcggctcatcatcgagcatgacctcgatatccgcatgaaaattccggcccagcgcgaacagctcgaagagatgcgtaaacagttgtgcaccacgcaggacgccgtggtcacgcatcaacccaccccggatctgaaccgccataccccggaatctcccccgcagacgacggcagaccaggccacacaggagaagacctccggcgggccgcaaccccaggtaccgttaccaccgaagccgactgcgccgggcaatacctcaccggcagcaacagaacaggccgccccggtaccgccagcccccggcgagggtccggctccttcaactgacgcaaacagcattaaggtaccggatatgcccgaagagcctgcgccggcggcattgtcgcccggagagagcgtcacggccgtactgatgaatttcggtgaagccatgtatgagaacaaggagcagcgtggcaacagcttctttatcgaactgcagaaccgggggggcagccacacatactggggacaggatctgcgtaagctcgttaaggaccataaggcgggcgatgtggtgacgctgaccctgaactcccgggacacctgggttgtcgacggggaggagcgtgagcgggtgaaaaacaactggtccctgacggctgcgtccaccggcatcgccgtggcccatgaccgtccggagcagggacagcagctgcagtcgttcccggttgataccttcggcaaactcacgcagcacatccgccaggcctggccggagtacatggccgacctgaaactgcctgcccgtctggaagaacgccagttcttccttggcgaagatcgtcatccggtggccgcaccgcagggggcggcaggcatcacgccggcaggccaggatgtgccggataaactgacgccggtcatggcctccatggacagccagtcaaaacagatggatttgctgctcgtccagtctgtcggtgaacacctgcagggtgttgttcgcctcaacggcacactctatccggcactcgcctcccccacggcggataaccgccagctggttatcaacgccatcaccgaccagggtccccgctttgcgggctacggccaggcggtgaatttcgaaccggacggcgttacccctgccgcccctcagctgatgacgtttcacctgaaaggccgtgaagaggatgccccgcttcccgcccgtctctacacaccggaaaaacaggatgatgccctttttcagcgcctgggtttcgaacagacgtggaaacagtgggacgacgcccgaaagccggagggcagacaggaaaaagcgcttcatcaggaacactcccacagccccggccactga

SEQ ID NO: 79209 - DNA, 243 bp, Citrobacter koseri
atgactaacctcggtttatgtgcctggcgccaggaggcgctggtaaatacgaaaatcacgtttgttgtagcagacgcacaacacgtccatgtcagtgccggtttctgccagaaaggcgatgatcgtgttgacagcaatcctggccgcgcgctcgtgcggataaaagtaatgcccggtatgcaggcaaaccagggcgccgtgtcggggactttttcctgcaaggaggtacgagacgtaaggtag

SEQ ID NO: 79210 - DNA, 288 bp, Citrobacter koseri
atgaaaaaagacggattctggcgctacgccaccccgcctgtcagcgtggctggcattccactgccctttctgctgatttacctcgcctggttccgctggcccgaatgggtcacgttttacatctgcagcgggatcctggtgttttttatggggctgaattttttcggctggggtgtccgaaccatcctccggcgcattgtcagcaccttccgcggtaaaaccgcctcgggccgcccctggtggtaccggcatttcactgaaaccccacgggactggacagggctgtaa

SEQ ID NO: 79211 - DNA, 1161 bp, Citrobacter koseri
atgagtcaactggccttacccgatgagttcgggcttttcccgttcagcggcgcgttcagcgctgacgagttcaggaccttcttcgcctggtgcgcaaaacacagcgtcagcgatgtggatctggtaggcggatcgccggtctcggtcagccgctacggccgccgcgtacgctgttctcaaagcgtgctacctaataccctgctcggcaatatgctggacgatctgctgggccgggaaatccgtccccgggttcagggcggcataccggctgaccgcgccattcagattgacggtgacatgcacggtcgctacggtctgggtcgcggagagcgggtacgcctgcgcacccattcaatccagggcacctccgcccgcgaggaccgggccttgtccgtttcactgcgggtgatcccccacgccatccccgatttcctcagcatgggaattgagccggatctggccgccgccatgctgccggacagcggactcgggttcatctgtggccagaccggctccggtaaatccaccctgcaggccgcactgtaccgttactgccagaacacgcagccggatcgcaaaatcgtgacctacgaagatccggttgaatacatccttggccggacggatgacctgctgccaccccatcaggcgcagataggccgcgatgtggccagctttgccgaaggactgcgttctgccgttcgccgtaatccggagctgattgggatcggggaaatcagggataccgaaaccgcagaagccgccgtacaggcaggtgaaaccgggcacctctgtatcggtaccatgcatacccgctcgcccggtgaatcgatcccccgcctgctggggctgtttcacccgcagatccgcgatgcgatggcctgggcggtactgggtatcatgcggtttattgtgaatcaggtactggtccgcaccaccgacggaaaacggcgcgccctgcgtgagtacattgtgtttgacgatgccctgcgcagcaaactgcatgacctatcccacgaacagtgggcaagccacctcgatggcgttctgctcatggaaaaacgccgcatcgtcgaccaggttcgcgcgctgtattactgtggtgatgtggctcgtgacgaagcggcgcgttacctgcctgccggagaactgaccgcatga

SEQ ID NO: 79212 - DNA, 846 bp, Citrobacter koseri
atgaagatcctcctcgctgtcattctccctgccgtcctgctgaccggatgcgccggaacacctccgcccgcacagcccgacttatccgcggccccgccggatcttaatacctggctgcatccacaggagaagcatcacggcgggatttccgacacacgctggcagatgctgacggaagccggcaaaacactgggcttccggggtggtaaggcacaacgctcatgggagctgactcaggcgctgatggcgcgcgactccaccctcaccgccctgtttgactttcgcccgctaattagcccggaaggctggctgccgccggtggtcgatgaggcgcaggatgtggcgcatatcacgccagaccagatacgcacctcttcccgggtctggagcatcattcgtcctgagcgctttgtcagtaacccaccgggctggcgggactggctgctgaaagggctggccaccacggccacccccggaaccgaaggccgggtggtgcctgaggacagcgcccagcgcgacgtctgggaaacggccctccgccagggctggaaggaggggcgggaaaatgcggacatgacgctggaagccaacatgaaccgccttacccgcgattaccggggcatgatgctgtatgccctgctctggcgccagggcatgatcacccgtcctgaagtcgcggagcagatgcagaccgtcaccggcaccggtcagaagatgatcaccggcgaccgcgtccgccgtctcaaaacccatgccgcgtttgaactgcagaagtcacggtggcgtccttccgtcacaacacaacccaaaggagcccacgatgagtcaactggccttacccgatga

SEQ ID NO: 79213 - DNA, 468 bp, Citrobacter koseri
atgaaacagtttattcctgcagtcatgctggccggcgttctgctcgccggctgccagtccttttctcgtccggctcctgcatccgccgcccctgaccgctacggtgccgcatccgatgttgccgtcacccggcatgcgcagtaccggatgtgggataaaggtatttattcatccaccaccctgcagccctccgccacacaactcatccgcgcgaacagcgatgcgctgtccttcgactgggaaggcgatgcgatcgaactgctggctgagctggcccgcgtacgcggactgacgtttaactacagcggcgtccggctcccgctgcccgtcacgctgcatgtgcgcggcatgacgttcactaatgtcctgcgcctgattgagtcccagaccgcctggcgcgccacgcttcatcagtaccctggcctgctgcaggtcagttttatgcaaccggagtccggaagaaaatga

SEQ ID NO: 79214 - DNA, 258 bp, Citrobacter koseri
atgaaaaatccacccaaacgcctgtgcgactggaacggcgcgaccgtgaagttgatacacgaaaccagaaatagcctggcaacattacctgccgggaccacagggaaaattcgtgtgggatacaaaagtcgtaatggtcttaccttcatcagcaatccgtgtgaatgctgcggcgttcaggtacacataacccgtatgcgtccggagcatttcgaattacttgagcttgtacaggttaatgcaggagaagagcaatga

SEQ ID NO: 79215 - DNA, 648 bp, Citrobacter koseri
atgcaccaggttgatgatatcttccggcgtatcgccgaaacgcaaaaggtgatcacccgccgtaaacgttccgtacagcgtgcagagcgtaatctcgaggaagcagaagacctgctggcagcgctggaaaatgaacgtgatgaacacctcatctccagctggggcgacgcccccaactggcatgctattttcagtgcttacgagcccacacctgcactgcaggcataccgggacaaatgggtaagcaccgtacccgggcttcgtacaaccggctaccacaatcttgagacccgccaggccgtgttcgcgatttgttttgaaaccagcacgcaggcagaactcatgcagactgtccgcatggtggaatttgtcatgccgtacctgcatgcagacagccgtggtgagaaaaccatgatgatctacaacgtgccggcacaagactgttcacgcagtttcgtgttcaacacccatacaggccagtacggcattggcacggaccgctatatgcaccgcgccgaaacacagtcgttcccgtcactggaggccgccctgcgtcacctgcagagcatttcggacacggataacgtgccagaacatcagcatgagttaatcgattacacggacaggaactctggagaggcggaatga

SEQ ID NO: 79216 - DNA, 1191 bp, Citrobacter koseri
atgaataaaaagatgacagcaaaaagccttattgccactgccgtactaatggcatttaacgcgaccgcagcaaccagttattttgaagcccgtaacgatgcgatgggcggtaccggggtagcctcatcccattacagcgccgccgcgctggcgaacccggccctgctgactaaagcaaaggcaaatgatgacttcgcccttatcctgccgtccgtcggtgcccaggtctctgacccagatcatctggaagacggtgcggatgacgttaaggatgcatgggaccgtttcgacgacagcctgaacaccggtgactcctcagcacaggccgctgagctgaaacgccagctgagcaagttcaaagatactcatgcgaatgcgcaggccggtgtctctgccgtggccacgctgccgaacgacaccctgccggccgccctgttcgtgaaagcatggggaacggcgaccgtagacggcaaagtctctcagcacgaccttgattacctcgaccaggtcgctgccggcgcaacggccgacaaggacaacctcacctcaaaagcctacggccgtgccgcggtcatcaccgacgtcggtatcgccctggcgcgtgagtttgaatccttaggccacacctggtccgttggcttcacgccgaagtaccagcgcgttgacctcttcaactacaacgttgccgtgaaggactacgacagcagcgactttgacggtgatcagtaccgcaacaccaaaaacggcttcaacgccgacctcggtctggccgctgacctgaccgagaactggaacgtgggcctggtcgcgcagaacctgatcccgcgcagcatcgacagtaaggaagtgaatggagaaaaagccactttcaaagtacgtccgcaggtcactgccggtacgtcatggaccaacggcttcttcactggcgcggttgacgtggatctgaccgaggccagcggcttcactgacgacaaaaaacgccagttcgccagcatcgggggtgaaatcaatgcctggagctgggcacagctgcgcgcaggttaccgccagaacatggcctcctctgacggcagcgccttcacggccggtatcggcatctccccgttcgacgtggttcatctcgatctgaccggcattgccggtaccgaccgcacttacggtgccgtggcacaactgtccttcactttctga

SEQ ID NO: 79217 - DNA, 849 bp, Citrobacter koseri
atgacaaacagccttacgggcatcttcgcctcattactggcgcttccgggttttgagaaagagaaaattgccgcgctgctgagtgagaatagcagtaaaaaacttttatcgccgacaacgttaagattccggcccggtaccaaagctctggttgacctgatttcggaaaaactcggaatttcggcgtcagaggtgataaacctgattcttgagagcacgctgagggagatttacttccccttcagccatacggcagaaagtattgctgaccgttttgaatacctgctgaagtcccacggcctgagcccgccagatgtcgcgcagttgctctccccgtggaacctgcgcctgagtattctgcgggaccgggagcggacgatggactacctgacgcctcctctgcttgagacactggccagatggttttatgtctcgcaggactggcttttcgggcgaagcgattgccctgttgataccagcctgccgatccacaggtggcctcagagcgaggaggaattcaggaaacgaataattccatccgacgagaataacaatattaaaatcatattctggactaacgtaaattcgcccgataatgaatatgaaaaaagaacaggtattttaattaagaaaaaagaaacgtccggcaatgttatttattacccggtattgtccatcacaccacagtgtttaaatagcgaccaaagagactgggtaaccagccttaagacttccctgaaggacacagcgagtataaggtttatcacgctcggtgagcatgcagccactgcacttgaacagggaacgacgttacctgcatttattttaaataagtcagtgaatacctga

SEQ ID NO: 79218 - DNA, 549 bp, Citrobacter koseri
atgaccggactactaattttcacagcagcattttcgctgttgttagcgctgttgcgcccgggaactttaatcctgtcgaggttttcccgccgtactggtcggggattttacaccgtcgaaacaacacacaaaggaaagcactggcgaaccatgcacctgacctcttatgacccggtgggcaggctcagccgtattcaggcggtacgcttccatcagtgttatctggccgcactggagaacgctctgcgcggtttccgcgagcctctttatttccgttcacacctcatgcgcccggttcacctgcgcagcatggaaaaatgtctggctgcttttccggaacgccgctggcgtaaaaagcgtgttcgtatctcacggacagagcactggggtatacgcctgcagacactgtttaacgaatggcgctggattaccccgcaggaccggggttacctgattgtcattggcccgccgggaactggaggaagaagcaaacccaaaagcgattcggagcgaatacacgaacgtattcgatctgacagatcgaaataa

SEQ ID NO: 79219 - DNA, 1161 bp, Citrobacter koseri
atgtcgtcagttgttcgtattcgaaaattaacgttgagtcgtgcacttgataaatattacgaaaccgtttcggttcataaaaaaggccatcagcaggagttctaccggacacaggtgataaagcggcatccacttgctgataaatttatggatgagatcactactgttgatattgcggcatatcgcgaccaccggttgacgcaggccaccacccgatcgggtaaacctgtttcggggaatactgtccgtcttgaaatggccctgctctcttccctgttcaatatcgcccgcgttgaatggggaacatgccggactaacccggtcacgcttgtacgtaaaccaaaggtctcctccgggcgcgatcgccgactgacgtcatcagaagagcgccgtctttcccgatacttccgggaacgaaatccggaggtttacatcatttttcacctggcgctggaaacggccatgcgacagggtgagattctggggctctgccgtgagcatctcgatttacagcacggtattgcacacctgcccgaaaccaaaaatggttcatcacgtgatgtccctctttcccgtcgcgcacgtaatctactgcagtcactgcctgcgcagctcaacggcagaatattcagctatacgtcatccgggtttaaaagcgcatggcggactgccattaaggaactgaaaattgttgatctacattttcacgacctgcgtcacgaagccatcagccgcttctttgaactcggcacactgaacgtcatggaagtggcggccatttccggtcaccgttccatgaatatgctgaaacgctatacccacctgcgcgcctggcaactggtcagcaagctcgatgcccggcgtcgtcagacgcaaaaaatcgccccttatttcgtcccctatcccgcaaggatagaagagcaacagggacaggaagatggtatctgcgtgcacctctgtgattttgaagggctgaccgcgtccggtccgacccgcgaaaccgccttaagccgcgccagcgaacttcttctgcgtacgctggccatcgcagcacagaaaggcgacagggtaccggcaccgggcgaactgccggcagaaacccgggacaggatcatgatttgcccgcttaaccccacgatggcactgggcctcacccgttaa

SEQ ID NO: 79220 - DNA, 666 bp, Citrobacter koseri
atgcgcacagtcattgctacggctgtggcaccggaacatgccctgccgctgatccttgtgctaatacctgccggtgtgctgctcctccggcgggtgtcggtgtttcttcatgaggtctctgtgccgtttcgccccggccatccggcggtaatctccggcatctggctgttcagcctggctggcacgctggtactgatggcccctgtccccctggccgcacggttcaacaccatgctgatgctgggttttctgctgcagatggcggtgacagatgccgtcagcggttacctgccccggacgttcacgctccgttttctggctgcggggctgcttgttgcctgccttccttcatccggaagcctgcgcctggtggaaacagcggcaacgggcgtgctggtatgtctgtttcatgtactggtcaaccgtcatggcgacaggatcggccggggcgacctctggctgctgacaggactgacggcatggacgggctttgacgccaccgtgcagacagcagtctgggggactggcggctttattctatggcactgcacaggacgcctcaccggtaaaaaagagggacctctgggtccctggttttgtttcagctgcgccgtgttgcagctgaacgcgttctatcaacctgtttgggtgtgggtatttcaatga

SEQ ID NO: 79221 - DNA, 531 bp, Citrobacter koseri
atgcaggggaaacgattctccctctgcgcactgatcctgaccgccctgctctgcttcctgacctcatcgccgtcacgggcctcgtccccgctcaccatcaccacctttaacgactgcttcgtccgggccggtatccgctaccagattgagccgttgctgctcagggccattgccataggcgagtcgtcgatggatccggtgataaccaacacaaacagggacaaaaaggggcggccggtcagtacggattacggtctgatgcagattaactccacccatattccgaaactggtccggatggaggttatcaggggggccgacgacctgctgacccgtccctgtctgaacattcagataggggcgtggatcctggcccgtcactttcaggtctgtggcgtaacgtggaactgcctgggctcctataatgccgggttccgcaaggatcggcatgagacgcgcgaacattacgcaaaccgtatctggcggatttacagcaggctgaaaggcctgcccgccgtgcaggggaggtga

SEQ ID NO: 79222 - DNA, 603 bp, Citrobacter koseri
atgtcattccacacagcagacaataatccggcatactgtcgccatcaggatcgcgggtgggggctgctcgaacagggctggatcgcccttgccgttatttttgtcatcgccgccgtactcggcaccgcgtatatgatcaaaagccgtaccagtgtcgggctggagtcatccaatattcagtcgctgatcaccggggctcagaacctgatgaaggcctcggacgggtactcctttaccagctcggccaaaatgactggtgccatgatccagatgaaggcggtgccgaaaggcatgaccgttcgtggtaccgcctcttccggtaccgccacgctttacaactcctggggtggggccgttacctttgcgccgctaaccatttccggttttaacaatggcttcacgctgacgtacgagcgcgtaccgcaggatgcatgcatccagctgaccacccagctgagccgttccggcgtatccgatggcatcaccattaacagcaccgcgcacgatgatggcaaggtgacaacggagcaggccagcacacaatgcacggccgacagcggcaataccggtaccaacaagctgatcttcaccgtaaccagttaa

SEQ ID NO: 79223 - DNA, 1098 bp, Citrobacter koseri
atgcgtgaaatgaacctgttccgccggatacggcattttatcgtgaggaaaaccttcgccggcccctaccgggtgcagttctatgaggccctgggttttctgattgaaaaccgccagcagttaaaagccgctctgcagcagatgcgcgatgcgtggacggacttcggccggcgctggcatccgttcgcagagcttaccgatgactgtattgaagccctgcgtgaaaatgccggcgagaagacgctggagaaaacccttgcccgctggttaccggaaacagaagcggccgtcatcatcgccgggatccacagcgacaaactcccccaggccctgaaatacgccaccaccctgaccgatgcgggcaaacgcatcatggagtccgtctggcagatgtccatctacccgttggctctggttgtcatgctggccgggacggtctgggtgctgaatgaggaactggtgccgtcgctgtcggaaatcatcccgccggagcagtggaccggggcgctggggtttttatacaacttttccgtcgcggtgaatgagtacggtctgatcggcggcatcattctggcgattgtggggtgctgggtggcctggtcgctggctcactggcaccggccggatgcgctgcggcgtgtcatggacggctttatgccctggtctgtttaccaagatattcagggggctgcctttttactcaatattgccgcgctgataagggccggcgtacagacaaaaagcgcgctgcagatgctccgtaaccaggcctcgccgtggctggctgtccggatcgacgccattatcgccagcgtccgggaagggggaaacctcgggcatgcgctgcgcgagtgcggctacaacttcccgtcccgcgaagccgccaactttctgtccgtgctacagggggacggcgcagatgagctcatcagtaactatggcctgcgttggctggagcagacacttgtccgtatccgacgacgggccgttgttgtacgcctgatcatgctgaccgtgcttgtcatgacgctcatgctgctggttttcgcggccatggacattatttcagtcagtgacccgggtatgggcacgttttaa

SEQ ID NO: 79224 - DNA, 1566 bp, Citrobacter koseri
atgacagacactctccaggacaataatgccctgctgcttatcagcaacgaggggcggacagaaatcctcgtggacattaaccagcggggtaaccccggcgtgcaggtgacgctgctgaaactgatggaacgtaaccccggcgcgaaggccagttttgtcagtctggaacaactaagggatgcgcgggacaaggcgcttgtcctgacgccacagcaggatggtaccggcgggctgacgctcaacgacctgaaggacgtcagcggcagcgaaaagaaaattctcgactactttaatgtggcgaggacgctcagcgcctccgacattcacttcatcatttcgtcctctctgtttgtggtcaaaatgcgtatcttcggcacgctgcatacggttgacgcgcgccagccccgtgaagggatgtccctgtgcggaacggccgtgctttccatgtcagacattgccgagccgacgttcttcccgggccgcgagcaggatgcgcgcctgtctccagagctgatgcgaaaaatagggttgtggggcgcccgctattcccatcgcccgacggcagatggcctcattgccgtaatgcgacttatccctgacgacggcagcgccgtcccttccttcctgcaactgggttttctgccggaacaaatccgcctgctaacgcgcatgctggcgcgaacggaggggaaaatcatgctcaccgggccgaccggctcggggaaatccaccaccctgcgcaccgcctgccgttactacctcgatcacaatgaaggcaagcatctgctgtccattgaggatccggtcgaagggcagatgaaggatgccgtacagacgccggtgatagcagacaagtccgatgaggatgccattaatatcgcctggacgcgggggatccgctccgggatgcgccttgatccggatgtgatggttatcggtgaagagcgtgacctgatttcaatgctcacggggatttatgcctcgcagaccggacacctggtgctgagcacaatgcacaccaactcagcgctgagtattccggaacgtcttatcacacagggcgtaaacggagagctgatttatgacgcccagctaatggtcgggcttatcagccagcgactggtcccgacactctgcccgaactgcagggttccctgggagaagaagatggccagcctgaccgtcgaagagcgtgacatgctggaaaggtactgcaacgtggagggggtatgccgtaccgaaaacctcttcttccacaatccggacgggtgtgaagcatgccgacatgacgtggtgatcaacggacaggttcgcgccgtggtgggacacgggcttaagggacgaaccgtcatcggtgaggtgattgagacggataaccgtcttctgctccgtctgaaaaaagaggggaaaaccgctgcccgccagtactggctggaaaagatgaacgggatcagccgcgtccgacatctgctgcacaagctgaacgaagggcttgtggatccactgatagcagaccgcattgtccccctcgacgaagacgaaaggttgaaagcggatgatgagtaa

SEQ ID NO: 79225 - DNA, 495 bp, Citrobacter koseri
atgccagtaagccataaccttcaccacgtccgggcagccctgctgcttgcggccatcattcttgccaccgtatccggtggcgcacttgcatcggactcaacgtcttcacaggtcacgcccgccctgaccaagggagagctcgaggcgctcaataatcgcaatatcctgttacaggcacaggttcagggcgcgcagctggagcgccagctgaaggagaaccgtgacggcacaccttcagccaccgcgccgggctcccaggtctggccacaggtgcccggcgacagcgtcaggccgccttcagctcagaccggcgggcgtaccaccgtgcttgagataaccggccgggatcgggctctccgggccaccctgatgctggcgaatggccagctcaccacagtcaccaccggcagccgcctcccgggctccccgctgacggtaaaaagcatatccctcgccggcgtgatgctcagcgacggcaccacactgacattctga

SEQ ID NO: 79226 - DNA, 1302 bp, Citrobacter koseri
atgcaacatgacgatcacgtcaccctgcttcgagatcccgccctgccacgccacgactgggcggccggactggaatggaaaccccgggaaacaggaggcggagtacgccggtttctgccgttccggtctgcgggcactgcccgccgccaggggcttcctgtggtggccacgccacgcccgaaaacccgtagcaggtcgcccctgccggaaggtcggggcatcatcccgttccactaccgcagccacacgctgtactccctcgcgctggcgttctgcgacacggtgacggacgggtacggcgtctaccggctcgacagcacggacttcgtgtttctcgcctccatcaacggtatgccggccattgtggccgacatcaccggcaacgcagggaagatgcaggagaccctggcgctgtttcttgcgctgaacgatgaacccgaaaccggctgggtatgcccctcagcgcccgacgcccctctcgactggagcagtctgatccacggactcgccccgcgccagcgccgccgctgccggcttgtccggccggatcatggtgcccgccaggtcgccatgaccttgttgtcgggtctgctggtttgcgggggtatgctgtggtgggttaaccgggcgcccgccctggacgccccgcccacggctgaagagctgcgggcccgggcgcgggaattcatgaccgagccggcaccggttccacgtctgccccatccctgggccaccattcctcccgtcagcgacctgctcgccgggtgtgcggaacaggacggacgggctccggtgatgctggatgggtggaaactcacctccggctactgccggccggacggtgtctcgctggtctatctgatccagcccggcggaacggccgaagggctgcgccagcgcagtatggagatattcggggtggagcccgtgtttaatgtccgtgaaggcggccgtgaagccaccattcccctcccgctgtcggagatgcccctgcacgatgaagccgtgccggagccgtcagcccagatgatgcgaatactctcctggttccagcgccagcagatcctgccgaaccttaacaaggtggcgcaacccgatcccctcccgggcgcagacggcaggccgcctgcgaagcaggactgggaggaataccagttcagtttcaccggaacggtgccgcccctcgtacagtttgcgggatttgatggcagcgggatccggctgagcagtgtgaaatttgaaatcaacggcaccgtgttcacctacaccacagaagggcagatgtatgccagtaagccataa

SEQ ID NO: 79227 - DNA, 1686 bp, Citrobacter koseri
atgaagaatcttcccttccgactccggcgcctcctgcaggcgtcttttttcgcgctggcctcgtccgtcacgctcctgtccggatgtaccttttccgaaatcaacaaaatgcaggaaaaggcgcagtcggatgccattgtggcccgcgcacaggcgcagctgccacgcacacagcatgcccgtcctctgacctggactgagcgccagtggatcaacacgcagccgcttccggcagaggcgcgggacaccgcccgcaaggcaccggactgctatatcacccaggcaaaaccgcagataacccttcaggaactggcacagaacatctccgaaatctgccgggttccggtgatcttcacgccggatgcggcgggagccacccggagtacgggcgggggcgtcacccgccagataaatggtccactgccggtcccggatgagagtggacgcctgccgctgaatgcggccacgccagccacctccacggtgagcgacggggcaccgcttgtcctcactaacctgatgtggcagggggaactggagggcctgctgaaccagatggcctcccgcagtgggctgtactggaagcaggatcacggcagcatcgtattctacctgctggaaacccgcacctattcgctggccatgctgaacacgaagacgaccagcaactccagcgtcagttcgggcacaaccagtacgatgggagcctccggcggccaggataactccgcctccggggatgcgacctcgtcacagagcacccgcatcgaccaggaatacgatctctacgcggatatccgcaaggggattgaagccatcctgacgccggagaaaggccgttactggctctcggcatcaagctcctcgctgatcgtgaccgacacaccggcagtccaggacgcggtggcgcgttatatcgatgagcagaaccgggtaatgaaccgccaggtggcactgaacgtagaagtgatgagcgtcagtaacacccgtaatgagcagttcgggatcgactggaacctggtctaccgttcactgggcacggcaggtgcggccctgaacaatgcgagcggcgaaatcaccggcgcgacatcggccacggtctccatcctcgagacggccaccggcaaggccgcgaagttcaccggctcagaactgctgttaaaagccctgtccgagcaaggggacgtcagcgtcgtcacctctcagtccagcgtcgtgaccaacctgacgccggtgccgatccagatggcagaccagaccgtgtatgtcgcccagtcggccaccacaaccaccaccgacgtcggggccaccaccacgctgacgccgggcatgatcaccaccggctttaacatgaccctgctgccgttgatccagcagatagggaaagtgcagctgcaggtgaacttcaacctgtcagatccaccgaccatcaggaacttcacctcgaaggacggcaacagctatatcgagatgccgtacaccaaactgcgttccctgagccagaaggtcaacctgcgcgcggggcaatccctgattgtgaccggtttcgaccagaacaacacacgaaccagcaagtcaggcaccttcacaccggctaacccggtatttggcggctcacagagtggcaacaatgaaagaagcaccctggtgcttgtcatcaccccgacctttcctgcggggcagtaa

SEQ ID NO: 79228 - DNA, 438 bp, Citrobacter koseri
atgggctggctccttctggccatctgtatggcctttctgaccatcattggtgatatccagctggaagagcgccagacagcccgtaccgcctggcagcagcagagtggccagctgtatgccacccagatgctgatgctggcgaaccggatcaacgactaccgttacaacagaaatccgggggacgggacgctggccctctccctgctcgcgctgccgttcacccccgatccccgtattcagcaccgtctcgtccagggacgcctgtgggtatggatgcccgagcagcccgggctcgtcgatgccctgcgcgaccgcagccgcggctcagcgctgattggcacgcgccgcaacggtcagctggtctggctttccggcaccgcatcgggactcagcgcgcctgccggcattcccgatggtgccgttgtctatctcaactaa

SEQ ID NO: 79229 - DNA, 1146 bp, Citrobacter koseri
atgaaaaaaatcaccctccccctgctgctctcccctttgctggcagggtgcaccgattttatggccagggagaccggcgcgcagatgccggccctggtgtttgttgatggtcagatcagtgaaagcgcggacattattgcgcagacccagcgcagactggcacctccacgccctgccagcgcacctgtggtggcggtgcaaaagtccgcaccagctgctgttccggcaggcaattcagtcccgctgccgtcgccatcactcgcgaaaaccgagactccggcggccaccgcgtcgtctgcccagccattaacgcccggcagccagccggcattaccggcgctttccgtcaccggcacgccgggtacggttaccgtcctgtcgctttctcctgcccggaacctcacgcttgagcagtgggtgcggcggatcatgccgtccggctggaagctggagtatgagaatgccctgcgtacagcgcttaatacccgcatcgtctcggtctacaccaacgatcagtggacgcgggtactgaaccggttactggcagagcagtccctgcacggggacctcaactggacaacgcagaccgtcacactgcgccgtccgggccagcaggctgctgcacgcgtgcagccagcagataaaccagcgacgccggcagcaccgcgtaatccgttcagcagcgtaagtgccacagtgccggccgctgcggccacggaaaaaacagagagccatccggccgccacaccagtgtcgacaagtcagcgacaggcacaggccgcctctgtcacgccgtccgtcccgtcccggcctgccgcgcccgtactgaccggcacaccggtcccggtcagcgacaccggtgggaaagtctggcgggcacagcccggcaccacgctgcgcagaacgctgatgcagtgggcaggcgagacccggtgcgaaaccgctgacgggacaaaatggacggttatctggcccgcttccgtgaccgactatcgtcttgatgcgccgctgaccttccacggcagctttgagtccatgctgacccaggtcttcgacctgtaccacactgccagtaagccgctctatgcgaaagcctcgcgaatgcagtgcctggtgtccgtcaccgacacaccggacgaaccgtaa

SEQ ID NO: 79230 - DNA, 534 bp, Citrobacter koseri
atgaaaacactgatatccgtccttctctccctgctgctgagcggttgcgccgtagcgcattcgtccttcactgagagcacacctctcctcactgccacggtggttcccgcgtcgtcacatgatccagccggggacaacatcgttctcccggtcaatgcccgtaccggggaggtgacaaccctgcgcagtacccggtcggtaccttacacccgtgaaaccgtctccaggaacaacaggaaaacacaggaaatacgcgaccatgtggagtccggcaccgtcatcacggtggccgtcactcagacagacgctgggcagcaggcattaactctgcgcgttcagcatacctgcccaccgcagataaagaccttcacgccgggcagcaatcctgacgccaggattgatttgccgtccgtccggtcattctccctgcaaaaaacactggtggtgcaggaaggtgaaatggtccggatccgcagcgaggggatgacggcagactgtgcttttccccgtatagatgttcaccccactgcataa

SEQ ID NO: 79231 - DNA, 528 bp, Citrobacter koseri
atgaaacaaggtcctgccgccctgcttctgccgttacttctgctgctgagtggctgtaccggcagtaaccggcctgacgctacccggcatatcacacagctggaaatcacggtctggccgctgaaaacgcagcgggacggtaccactgcacctgacttcagcgtacctgaaacctggacgctgggactcccggacgacagacgggcctatcttacgctttcatccctggacgatgacgttaagccgtctgccggtagcagcagggccagtgccgtaaacctggtgatcgaatcccgtgaccggagtccaaaagggcacacgctggatgtgacgctgtcggagttctgcctgaagttcactgatttcagcgtcgctgacagcggaacggtgcgcatgccgtctcccgtgataccgaaaacgaaaaaaacgctggtcaccggcgttcatcctgcgtccccgcttcgtattcaggccagtaataatgattgcccctccaccctgctggttcaggttacctccctggactga

SEQ ID NO: 79232 - DNA, 636 bp, Citrobacter koseri
atgagaaaatctctttccgtcgccgctcttgccctggccgcggcgttaaccggctgccactacaccatgcccgacacctcaccgtccactgtcccgacaggaggaaccccgcccgacagcgccaccaggaaaatcccggcagataccgacaccgtcacgctgcaaaccatggtggttgaggtaaaaaaatccccggacgtgagctggaaaaccctgcttccggaatggcacgccggaaaggatatcgccgtactgcagggtgacggtaaagccatttatcaccgcctggcagccagtagccttgcggtgattaagtacagcaatagctcggtcacacccaatatgacagcgctccctctcctgtaccgcgattgttccgacacatcaggctctacccggaactgcagcagtatgggactggttctgcgtccggggtttaagcacaccgaaggcccactgagccttatgctggatttgcatatgcaggatccacagcacagcgtcagcattcgtcagttcgtcagtatgcaacccggtcagaccgtactggccggacgcgcactggaggagaacacgctgcaggtcgtgctgatcaccccatacattcattcccccctgcatggagcaaagccatga

SEQ ID NO: 79233 - DNA, 579 bp, Citrobacter koseri
atgaatgaaaagctcccatggctgttgcttatactgccggccttctctgccatgtctgaacccgtaataacctgtgagccggagagtgcgttttctacgtattttttaccggctgtcggtttttgtgttctgttaattgtcttcgtatattcaataatagatttattgttagatgacgcttccactttcagaaccggtaaaaaaccgtggttattcgtcatcgctgtgaattcagtcgttaccgtactgggtatactgctgaccagctatacccttcatctggagccggataaaaaagcggtcgttaacgaagccgtcctgatgtcatcacctgaggtaagtcagggccttcattaccagaaagactgtattctggtcagcagaaacgacactgctgtgacgctgaactgcagcccggatagccgaactgaaatcgttccccttgccgactatgctcacgcgaccagtgcactggaggatgccacagcgcatctgttggaactgaagatcaaagtcagccgaaataacatctgtcgcctggacaaaacgtcattttttgacgatctgttttcccgttag

SEQ ID NO: 79234 - DNA, 240 bp, Citrobacter koseri
atgcctgatatttgcgatcgtgcgaacgaggaaatgatgtttctggccagtctgcgccagcagaactacagtgccccgctgcgcccgtcagccacacactgtgtatcttgctatgcccccatccctgaaagacgccgggaagcgctccctggtgtgcagacctgcgctgactgccagtcagcatcagaagatgttctgaaccgccgccgccgtctctttgccatcactccggccagatag

SEQ ID NO: 79235 - DNA, 462 bp, Citrobacter koseri
atggcatggcttagcggtctctccccctggcagatatggttgatggtggcgggtctttgtctggctttcgaaattataaccggaacgggatggctgctctgtctgagtctggccgcgctggccactaccggactggtgcagatattaccgctctcagtcgcctggcagtggctcttttttgccgccgtggccattctgatggcctgcctgcgtcgcatcaaaaaaatgatttacctcggacagcacactgacggaaggccgccactcaatgaccgtcttgcgctgatgaagggcatggtactgacactggataatggattaatcaacggcacagggcagacccgaataggtgacagtgtctggtttgttaaagccgacagtgattatcccgccggcacaaaagtacggataaccggcacggaaggtatttttctgtgtgtcacagccacagagcagcagtag

SEQ ID NO: 79236 - DNA, 930 bp, Citrobacter koseri
atgtatgaactgatttccagcctgctgccggcaggcatctgtgtgtttgtcgctttcgtctttgtgtcctcggctgtcaaaatcgtgccgcaggggttcgagtggaccgtggagcgttttggccgctacacccataccatgaaacccggcctcaatttcatcgtgcctttcatggaccggatcggccgtaaaatgaacatgatggagcaggtactggacattccgtctcaggaaatcatttctcgcgataacgccaatgtcgccattgatgccgtctgtttcgtgcaaatcactgacgccgcgcaggccgcctacgaagtcagcaatctcagtaatgccattgccaatctggtgatgaccaatatccgcaccgtactgggcgccatggagcttgatgaaatgctctcacagcgtgactccatcaactcccgcctgctgagcgccgttgaccatgcgaccagcccctggggcgtgaaggtaacccgcattgaaatccgcgatatccagcctcccaaagagcttattgacgccatgaatgcccagatgaaagccgagcgcaccaaacgcgccagtattctggaagccgaaggcgttcgtcaggcacaaatcctgcgcgcagaaggcgaaaaacagtcgcagatcctccaggccgaaggggagcgtcagtctgcgttcctgcaggcggaagcccgtgaacgttcggctgaggccgaagcgcgtgccacacagatggtgtctgaggcgattgcctccggcgatatccaggccgttaactactttgtcgcccagaaatacaccgaagctcttcagcagatcggcgcctcatccagcagtaaggtcgtgatgatgccgctggatgcctcaagtgttatgggctccattgccggcatcggggagctggtcagcactctgaacgctgggaaagcctga

SEQ ID NO: 79237 - DNA, 729 bp, Citrobacter koseri
gtgcagacgccattccggatactgataaagaatgaggcgattcacgtcatgacatcaacagaaaacccgctgacgcaccttctgtggtgcattctggtggcactgcggaccgccagtaaaactgaagcattccgttccgaaaccgcccgccgtaaatttatcgccagctggctggataacgcccgcctcatgccgtcattcaggggaatgggggacgattttgccacgctgcgcagtctgcttgaaaaggacagggacatctccatcgagggaacacttaacaccctgctgatgttttcctcccgcgcggatgactgcgatttgttccgttttcgcatggccatcagctcgctgctgaaaaaaggctggcgtaccggaatatgccgctggcctgaagaaatcatgacggaaatccttcaacgaagggaaggccgccgtaaccaccttctccaactgacggccaccacggacgcctttcttccgaccggcgtgatgtgtaggcccgtgacgttccagttgctcatgcaccagacccggggcaacaacgatcgtgtggaagaagcgttttacgatgcccggtttatcgtcatttccgcgcgagaggaccagctcgaccgttccacgtggatacgtacactccacgtcggcacaaatgccctgcccgagaatgaatgggttccggatcaccgcgatatctggaaaccagacagttaccggcgttctgcctga

SEQ ID NO: 79238 - DNA, 504 bp, Citrobacter koseri
atgcaaatattaaatgaccgccagtggtaccttgcgcagtatattaccggtggaaaaaatcgggagaatttgttcggctggctccatgagcaaaaaataacgccatggacgccgctgacggtgaagaccattaaacgttccgacaagattaatggctaccggaagcgtattaccactgtattcccgggttatttttttcttaaggcaaatttcgagtatcacaatatcaccaatatccggatgcactcggcattctccgattttgtggcgtttgggcgtcagataaaacctgtggattctggcgttgttgaacgcctcatgaagtacttcccggaacctgattcacatactctagcaaaagccgaactcgaagcagcctccgccatctggctaaccagagcgcagtacaactttatggtgaatatggaaaatgaccccatgccgctttcccgttcggccatgcttatggacctggtctatcactctggcaagcacggtttttaa

SEQ ID NO: 79239 - DNA, 258 bp, Citrobacter koseri
atgaccaaggcctataatcttaatgtattacgcaacttgtttcctgaattaacaaaaatgcagattgaagtttcagcactttactctttaggttgtacttatgaagtaattgctgacattcaccatatttcaccaaatacagtacgctcccatcttcgtgaaagcaccaaagccctcaacgtagatggtcacgaatctttgcgagcggttttcttgctacgcacacatattcatatcctcgaaaaagtgactaaataa

SEQ ID NO: 79240 - DNA, 201 bp, Citrobacter koseri
atgataagaacggtacattgctcccgtgttgccggtgtttcagagcttaaagctaacccggaaaaactggtggcttccacggcaggtgaaccactcgcgatcctgagttataacaagccggttttttattgtgtcccgttggatctgtttgagcggatgaagtcggcactggaggcacaggaagcgaaaacgggcgtatga

SEQ ID NO: 79241 - DNA, 1017 bp, Citrobacter koseri
gtgtctgagagaccccagtcagttcactggagtgagctgagccctgaagagcaaatccgctactggcagggggtggatgacggcagtattgattctttcctggtttcaccggagaagaaacaaacccggcgtcgtcgtggcgatcactccacaaaaccaaaatgcgagagtcctgcatggttccgtcctgcgcattacaaagcgctgggtggccagctcggctatgcctacaatcgtcttgtcaaaaaagacaaagagacggggcagatcagtcttcgcatgcacatctcccgtcacccgttttacataaaacaccgtgaaaaggcagggcgcaggtatgcgttccgtccggaaaagcgtcgtctgcttgatgctctcatgccactggccatcagtttctgcgatgccggtaaacacaccactgtgatatgcgtttccaggctggccagagagctcagtccgaaggatggcaggggaaaggtcattcctgaaatggaagtgaccgtatcccggctgtcacgtcttataaacgagcaggtgcagtttggtgttttcggcgttgccgagaaaacctgggatcgtgaaagtaaatcctggcttcctaaatacatctacatcaccgataccggcttcaggattctgggtgttgacatgcagaagctgcacgaacagcaacagaggaagctgaaagagagtgaagagcgccgcgcgctcatccgggaaggtattcttggtgaggatgaagagatctccgttcatacggccagaaaacgctggtatgaacagaaatcccttgaggcactgcgctaccgccgtcagcaggccgcagcccgcaagcgggctaaccgcctggagaaactgccccgcgaccagcagattgaggatatctccggctggctgctgaagaccatgccagcggaagaagcatattactgttcagatgaacggctccagaagctggccattcagcatttgtaccagctgaagctggcgcttgaggagccacctccctggtag

SEQ ID NO: 79242 - DNA, 444 bp, Citrobacter koseri
atgagcgattccgggcaaccgtccgtacctgaaaagatgacaaagaaagaacggaaaaaactcgcactcagcctggcgctgaaaaaagtctgtacccgctggccggagctgtggccgggatggaaaaaaagggagttccggccaatcgcccacggcatcagccagctgatgcacgaccagcttaaagctgaaccggctcctgacctgacccataacgaagttgcccgggtcatgttttatgtgacgggaagcctgagttacctggagcagattaaagcaggcgcttaccgctacggcctcgacggtcagcctgtccaggaagtgacggcagaggatgagaagtactcacgtctgcgcattaaggaaatacatcagcgtatcaaggccagtgccgccagaaaagccacagagcaggatacttctgaagagactaattcaccgtga

SEQ ID NO: 79243 - DNA, 567 bp, Citrobacter koseri
atggcctggtgtgccctggtcgcgctccatatcgcacgccaggatggcgtggtgtccggcgagtcccaggaaagcctgtttctgacccgctggctggccaccgcacagaagcagaaacgctttccgcgtgaagtggcgccggacatcgagtggctgctgaaacagggacgcctctacggcgtcagggcgaagctggccagcaaactggaatacctctggcacacctgtacgggcgagatttcagcacagagcgatctgttccggctgacctacgccattgaaaacgcgaaaagcatgtactggacttaccggttgctcagcgatcgtgagtggagtggccgccatgccgttccggtgaaccctgcggttaactgtattagtctgtcgaagtcatccctcgatgccgcgttcgatgacgacggcaggctgaagggcaacctgatggccagaatcaccggcaatctccccgggctttccgtcctgctctcgcgttgtggctgggaggcggtggcggcagaaaatgtcggcgctgaccccctttaccgtctgtgtgtaactgcagtctga

SEQ ID NO: 79244 - DNA, 1020 bp, Citrobacter koseri
atgtcacctcttatatccgaccctgttgaggctctgcaggcttgtgtgaacgtcctgaaggcccgcgggtatgacactcagaaaccaggtttgtttccggacaagacgcgcctgcgcgcagatccagcccttcaactgccggtcattgtcgctgagggggaaaagctgctgaaactgcgtcccggagagacccttttcgggattgaatgtcactatgacgatcggcgtacgctgatcgaaatgttcatggatgatcttgtgcagttcaccaccctgcacagaatttcactgggcataaacatcatgcattttgggcagacgagaatagcggaacatgccttctggcatctgtccctttcgccactgttgcccgcgacttatggcgacattcaacagaccggcggcaacggacggatctttgatatgtactccatcccgttccggatccgtatcgcgctcgagctgaaactcagcagcataaccgggtttgaaaaatacgagatttctgtcacgggaaagtcaaccatcacgtcagaggaattcccgtttacacgccttgtccgggaacttaaacgcctgaattgccttgagcttccatgttcgctggataacatccggaacatctaccggtgggcgtccggcttctgccatactggagaaaaagagtttgtctggctctcaatgagagcactgacgctgattgcaccgttgttcctgtatgaagaacaacgcaggcgtgaagtcagcctgatccgccggtggtcagaagaagggctgagtgaaggggaaatactggacaaagtcacgtcctggcccggtccactgaatccagtcagtttttacagggaagggtggtctcctctgaaactgcagcaaaggctgaacagagatgaagaaaaacgcataaaaatggaacaaaaaaagaaccggaagaccaccggctacaggtactttttttcagacacgaatctcagtgaagcgcactgctgcttctgcagccgtacaggaaactattactga

SEQ ID NO: 79245 - DNA, 636 bp, Citrobacter koseri
atgaagacagaaaataaaaagcagcacgcatcgcagctcagacaccggtacagcatgcttaactggcgcatccatgcgaaccttgccgaagaatattttgagacggtcatccggcaggcagaaaagagtcattacccggaaaaactatatgtccagcgtcatgacagtcaccgtcagatacaactttccgccggctctcatccgattggggaactgaaagaggtttatgatgcgtcaggtgcgaggatcagccggcgcttccccacggaaaaaggtgctgcgctggtgatatcacagcatgctaatggcagtgtggccgttttcctgtatccgtacgcttccgataaaatgaagatgaagatgccacttatcacctgggcgatatattctgagccgaccaggctgactgaggcagtattgcgctccgccacgcgcgatttttttatctacatgcgagtgtcaagcgccattgccagagagagttttacagaccggctccggatacagttccttgaaatcaaagcccggaagtatgacggcaaagggagtatggtgaaaatcattttcagccactggagtctgctggctctgggcgcagcaggctctatcgccagtctctggtccgtatataaatag

SEQ ID NO: 79246 - DNA, 774 bp, Citrobacter koseri
atggcactttttaattcggaatttcgggagaaaattaaggacttcttttctgtcgcggacagtcatatgctcagaaaattaaaacagggcatagtggttgatgaaaacgactgcacatcacagtttacttctgcggtcagagagcagttcccgaatcatttcccgataacgataaaggcctattcgcaaaagctcccggccaccatcgaacaaaggtggggtgtcgatggagtaatattgttagtggatcatgaattaaatcagggaaaaatttgcttatttgaggctaagattgaccgccgaaactgggactatatacaaaaaaactcttcgccacctgtttctcatttttcaacgcaactgaagagacaaaaagtaccggacgcccggggctttgttgtctgggaacagttttataccgcttcacaggccaattctttatgttttatgcataacgttgcgatagagcacaagggagaaccagcatatcccacaatatggcgtgacgcggatataagtgcagcttgtgaactacagcgtggaaaaggcctgccggtgaatgttggtgagataattcagtcagtatgtgagtgtacagttggaacgctattttccattggtgacgttgtagagcatctccgtcagatcccccctgttgcaagtgcgttgcttgtagaaaaacaagcgcccgagctgaatcacacgcttgatgaggaactgaagaaagtattttcggaaaagcgcacgatgaaacatcgccatcgccgcaggtaa

SEQ ID NO: 79247 - DNA, 267 bp, Citrobacter koseri
atgaaatcagatgttcagctcaatcttagagccaaagaatctcagcgggcactcatcgatgctgcggcagagatccttcataaatcccgtacagactttatcctggaaatggcatgtcaggcggcggagaatgtgattctcgaccgccgcgtattcaattttaacgatgagcagtatgcagagtttatcgctatgctcgatgaaccggttgcggatgacccagccatcgataagctgttggcaaggaaacctcagtgggacgtgtaa

SEQ ID NO: 79248 - DNA, 492 bp, Citrobacter koseri
gtgggacgtgtaacagcaccagaaccgctatccagttcacaccagctcgcagaattcgtcagtggcgagagtgtactcgatgaatggcttaaacagcgagggcttaagaatcaggctctcggggccgcccgaacgttcgttgtctgcaaatccggcacgaagcaagtcgcgggcttttactctctggccactggcagcgttaaccatacggaatccacaggcagtcttcggcgcaacatgccggaccctatacccgtcatcatacttgctcgtcttgcagtcgatgttgcattccgtggaaaagggctcggcgccgatctgcttcatgatgcggtgctgcgttgttatcgggttgctgagaatatcggtgtacgtgcgatcatggttcacgcgcttactgaagaagccaaaagtttttatctgtaccacggctttaaggcttcaaatacacaggaacgcacattgttcctgaaactaccatatttaacataa

SEQ ID NO: 79249 - DNA, 351 bp, Citrobacter koseri
atgatgccactggataaatatgacgactaccgcgctctgtgttatgaggctctgcaaagtgacatgccggacgcaattcaggacatctatgcgttaatgcttaagtgccgttctgaatacatgcttaattttcagcaacagtttcagggctgggttctgaataagtatcttatgccggcaatacaatccccgaacaaactggatatttttctcgcatgggaaagccggaatgcagactggaaacatatcctccgtatgtcattgcttggcggccgtgtgggctctgttgcccgaacgctgcggatgtctctgttaacttttgctgagcagcacagcaaggccgatcgctga

SEQ ID NO: 79250 - DNA, 498 bp, Citrobacter koseri
atgatgctgaaatttacgaagtattcctcgctgtgtctgtttacagcagcctggtttgccagcgcggatatccatggccatgtggtgcgcgtgctggacggggataccgttgaggttcttgagccgggaaaccgactgacgcgtgttcgcctggctggcatcgatgcgccggaaaagagtcagccctttggccagcgttcccgacaggcgctgaccgcactgacggccgacaagtcagtgcatgtctctggaagtacccaggatcgttatggccgcctgcttggaaccatctggtcagacacaacagacattaatgccgttcaggtgaaaactggtatggcctgggcctaccggtatcacgacagggcaccggtagcggaatatgtcggactggagaggctggcacgggagagccggtcgggtctgtgggcagacccatccccggttgaaccgtggcgatggcgtacaatgaagaagggcggtcaggcaagtcactga

SEQ ID NO: 79251 - DNA, 993 bp, Citrobacter koseri
atgaataacaatcataagccctttattggtttccgtgacgcgggttccggtcagttctcagggccctacataactgaaaaccaactgagcaaccttatcaggctgcttccggttcccaggccttcaccagtccagtatgtgtttcccgatctgtcaccactgatccggcatatcaacgggcagatagctcacgcatttcaggctcacagtcaggggcaactggataagcagcttgcagaagaatacgagctgattttcactcactggaaccgggccagtggaatggaggagggaccgaaaaaggaacatgcctgggaaaaagtaaccgacagagccgatccgctgctgattcatctgcgtcaggccatgccggctgcaaagccggttgaatgctggaatgatgagctgataaataatattgaacacaaggggcgtatgtatactgaagtgttgcttttcattatttacgcccgtgccgcttacgagcggtcctctcttggccgggatccttccctgcgggaatactgccgacagatgaagaagatactggccgcgcatacgggcggtgaaaatacccagctgttaatgctgagcgccgcttcagaagtggagtgggcgccgtactacgccatgctgcgggaaatgaatggtcagggaccggaagatccggattcgtacctggcacaacatgtcaggggcataacggcagaaaccctccatgatgataatcgtcttatgcccctgtgctatgactttgacacgaccacggttaaacgccgtcatgtgacgttcaccagtttttccagcatgcactggcgtatggttatgaccctcgcccaaatccactaccggatcagccagctggaggtgctgcttgattcgctaaccgacagtgacgtcaaagtggactttgacggtaccagcgaaacccgcgcgcagttggagaagatgattttgcaactgactgatcaggaagaacggaaccagagatga

SEQ ID NO: 79252 - DNA, 2028 bp, Citrobacter koseri
atgaacctaaatcaaattaagaaaaaataccgtacggatattgatggcctcagggctattgcggttactgttgtgattttatttcacctcggcatcgggtacttcccgtcaggatttatcggtgttgatattttctttgttatatccggttacctgataactggcattattctatcatcactcagagaaggtactttcagttactcagatttttttgttcgtcgactctggcgcatacagcctgcattaatatttgtttgtattgtaacgttacttgtctcaagtgttctttttgtttccccggattatctggactatcttaaaagcgcaaaatataacaccttattaattgccaatcagtatttctcgcgtcagtcagtagcatatgcaacacctgaaagtgatatatttcctttgttacatacatggtcgcttgccgttgaatggcaatggtatatattccttcctttgttcatcgcgataaccatttctcttaaaaaaagagtcccggcaactaaaaatgttaatatcagtgataattatattttagtattatggtctgtcattacctttgtattcgcagcattagcattgtttatagcaaaaaatgaacctgggcagtcatattatttcctgagcacaagagtatttgaattctgtgcgggcggtacaacatatttactgacctgtcgaaaggaatatattcacaagggtatttcaacagttttaaataccctggcgattatcggaattatttacatttcgacaaaagagcatgtgattgatatttacccaaatgtcaatgcgttaatagtcgtggcctgcacatgcgttttaatcttctcaggaaaacaagaaagtaacttcatcagcaggttattatctttaaaacctttttcattcactggcaaaatatcatattcactttatttatggcactggccggttcttgcatactgtcgctatgtcaacatccagttaaccggtctgaacctcatatacatttgcggcagtattatcacactgtcgctgattggttattatcttatcgaacaaccaatgaggaaattcaggtatagtctgaaactcactgtgacactgcttttagctttacctgcaattttttacagtatcctgtattctgttgcagtaaaacaacagggttttcctgagcgtcttggttctgtatattcacatcagttcaaaaccatccagcactatgaaagcaaggccgttaccagaaaaaaatgcatcgatacgaatcattcgctggaaacctgtgtccttggcgctcgtgaaggtaataaatctgcgcttgtgattggtgactcgaattccaatcatttctggggatttttcgatgtactggggaaagatgccggaataaaaattaatgcactgagtgtttcgtcatgcctgaccctgccgggaatatggcaatatgactggtggatatataagaataaaaattatgagtattgccacagcaaaacggccgagtattacaacatcataaaaaataataaatttgattatgttattattggtgaagtctggcagaattattcgcgtggaccgcatcttattactaaaaaagatgatgcccgttctgatgctttaacaaaagaacgaatgacccgtgccgcaaaactggcgatttcaaagattattgaatccggggcaagacctgtcatcattaaaacaatatatcccatgccaaagggctatcaggagtgccgacagcgtgaagctattctgagaaagacattctcagaaaaagcctgtgattcccgacgcattcaggcacaagaaagtcagtaccttacaacgctttttgacatgcttaaagaagaatatccttctttgataattattgatccaaagaaaatacagtgcaaaaacaactcctgtatcagccatgtcgattctatacaagtctatcgtgatgtcgggcatttaactgactacgcctcttatatttttggagaaaggtatttaaacgagttcgggaatccgttacaaccttaa

SEQ ID NO: 79253 - DNA, 213 bp, Citrobacter koseri
atgaaaggaactgagaatacctggatgcgtaaaaccgggatcacagtgaaagttattacggttgcctgtcttatccaggccagtatttctggtattgcttttgccgattcccgttggaccgtggaagtggcgcacgaaaaatcgctgactcacggttttctctctaactgtgcatgtaatctaatggaacaaaaacaaacgcaagtaaattaa

SEQ ID NO: 79254 - DNA, 270 bp, Citrobacter koseri
atgcggatctgcccccaggatcagtttgtccttgccgtctctcctgtgtaccttcgcgctattgagaacgatattctggcaggattaccggcactcaccagcgcagagcaacagttaaacatcatcacctctaaggcctatcatggcgcactggagcgatgggtgacatacagccacagcggtatgctggaggtactgaaaacaaattgtacggccctgaatatcagcctggccgggcatctgattgatgaacttgttgataatatttga

SEQ ID NO: 79255 - DNA, 189 bp, Citrobacter koseri
atgttgacccgcaaaagtatcgatacagttctgctctctgttggtgctgagaagctctcacaacgagaatgggactggatgaaaatgctcaaacccatggacccaccacctgcgatggtgacgacctccatcctgaagcgccgtggcgatacagcagcccttaccctgctacaggataccggggtttaa

SEQ ID NO: 79256 - DNA, 1200 bp, Citrobacter koseri
atgttgtccggttttactccccgccctctgaaacgtctgttcacagccaaccagtgctggacgtccttcctggatgcgggcggtctgcgcgatatcgaggttgaagccgtcaccaaaatgctggcctgcggcacacggatactgggtgtaaaagagttcgggtgtgataacccggactgtcagcacgtaaagtacctgaccaactcatgcggcagccgtgcctgcccgtcctgcggaaagaaggccacagacctgtggacagcaacacagctgaatcgtcttcctgactgcgactgggtacatctggtcttcaccctgccggacacgctgtggccggtgttcgaaagcaaccgctggctgctgaatgacgtgtgccgtctggcggtggagaatctgctgtatgccgcccgaaaacgggggctggaacccggtatcttctgcgccatccacacgtatggccgtcgtctcaactggcatccgcatgtacatgtgtctgtaacctgtggaggtctgaataagcatggtcagtggaaaaagctgagcttcctgaaagacgcgatgcgttcacggtggatgtggaatatgcggcagctgcttctgaaagcgtggtcagaggggatggcaatgccggagtcgttgtcacatatcacgacggaatcacagtggagaagcctggtgctgaaatccggcggaaaatactggcatgtgtacatgtcgaagaagacagccggagggcggaatacggcacgctacctgggtcgttatctgaagaagccaccaatagcggcttcccgactggctcattacaacggaggggcaagcctgagcttccgttacctggaccacaaaacgggagaaacggcgacggaaacgctgacacagcgtgagctggtcgcgaggctgaaacagcacatcccggagaagttttttaagatggtgaggtacttcgggttccttgccaaccgtgtgtgtggagagaagctgccgcaggtgtaccgtgcactggggatggataaaccggaaccagtggcgaaagtgtgctatgcacaaatggtgaaacagttcctgagtcgtgacccgttcgaatgcgtgctgtgtggctgccggatggtataccgccgggccattgcggggctgaatgtatcagggctgaagaaaaacgcgcgggatatcagtctactgaggtatatgccggcctga

SEQ ID NO: 79257 - DNA, 288 bp, Citrobacter koseri
atggctactttgcaggaattaatcgacctgacgccggaacaggaaaaagcgtggaagcgccttgagaaagccgtgaaggatttcagggccgcgggagggcgtttttacagcgtccttgacactcttagcggttgcaacggcgagcatgttgccaccattgataacgacaccggatatcacactgcaagtgtctatatgccgagcattgatgcgccaggatttaccagctttgcggacgattggcatggcataacgctgaaagatggcgttgaagtggatgaggactaa

SEQ ID NO: 79258 - DNA, 339 bp, Citrobacter koseri
atgacaatagaaaaacagaggttgcgtgaagagttatctaacccggcaatcggtagcaatgctcacctgagaaagttagcgctggcgctgctggatgagctggaagccgcagatagcggattccctccgctcaccgttgagcgattaatgcgcgagaaagatgctctcgagaagcgggtggttgagcttgaagcgaggatggtgaaacttcctgagcgttacgaggtagatatgtgtcctactccttcccctgttggggagtggttttctcgcgaagatgtattggcggccctggtaactgctagcgtcagatacgccgcagccggtaaaggagagtga

SEQ ID NO: 79259 - DNA, 246 bp, Citrobacter koseri
atgcgtaatacagcgaagctacaactcggattctctctgctgagcaaaacaatcactctggcgaaaatgcgtgatgtggaaggtggtcgcctgcgtgtcggcaatgaccgtggacgtgatgtaacgaatgaggctgcgcagatggtctggcagcttgtcatggcagagggaggggaaattggctgggagcttgatgacggttctcgcatggtgctgaaagctgagaaacgggagcgtgcagcatga

SEQ ID NO: 79260 - DNA, 198 bp, Citrobacter koseri
atgacacagggcaacatccaaaactttgccatcatcgtgctggtaaatggtggcacaaaacaggtctttttgaccaaagagcaaaagcggctttttgcaaagctcaccctgggcacgttaggcgatagccccatcactatgatgcctatagacgacatgatccagttgcagcctgacaccgacgcattctcctcctga

SEQ ID NO: 79261 - DNA, 213 bp, Citrobacter koseri
atggctgtaataaaaacgcataccggaacggttattacccgcaccggtgaaaagcaggtgcaactgcatcaaaacccgacaacgtgggtggctggcccaaaagagtattactacaaggatactggccgccgtggcggcgctgttggtgtccgtactcgtctcgtgctgagcagcatccgccctatcgttgaaacagaggaccaacagcaatga

SEQ ID NO: 79262 - DNA, 549 bp, Citrobacter koseri
atgaaaattaaactgaatggcgtacgtcatgcattttgtaatctgtttgaagccactgacttcgaaggagacggaaacttcaaattccgtgacaccttcctgatacctaaaaacagtgaacttgataaacaaatctgggcggctgttcgtaaagttgcaaaagatgcctggggcgataagtacgaaaaaatcctggagtctatcaaacatatcccgaaccgcgccggttatcgcgacggtgacactaaatccgagtatgaaggctttgaaggccacatgttcttagccgcatcaaacaaagccagacctttggtcattgaccgcgaccgttcccctctggttgctgctgacggacgaccttattccggctgtttcgtcaatgcgacggtgaccgtgtacgcgtatgacaacaaagggaaaggcattggcttctctctcggtggcgtgcagttcttcaaagatggcgatgcatttagcggcggcggtgtggcaactaccgacgacttcgacgacatcagcgaaggcgcagatgccgaccaactgatttaa

SEQ ID NO: 79263 - DNA, 330 bp, Citrobacter koseri
atggttcaaaacccaaaaatcgccattttcatggagtatgtccgattccttaattcgcataagttagccctcagtggattagtaaaaggcctgaagcctttgattaatgcactgcacgccccatcatcggagcgtttcaacttgcgtgacttatcagctcgtcgcggtgtggtcctctacgcttaccgtacgcatacggactcggcgcttacctcgatcccatcgggtgccatttcgttttgccaggagcacagcggcttacctgtcacgcagttctgtttgttaaagagcgattacttcttgggaataaatctacaatttgagttgtaa

SEQ ID NO: 79264 - DNA, 624 bp, Citrobacter koseri
atgtccctcgcagcacgcttcaaagcccgccgtctagaactcggaatgacacaaacagaggtcgcaaactcagcgggagttagccagcaatcaattgagtcgatagaaagcggacgcacccgaaaaccgcgaaaccttctcgaccttgctaaagcactgaaatgcagcccggactggctattgaacggtaaaaacataatgccactcgctgaaatcagcaccagaagaatccctgtgttgagttacgtacaagcgggttgtctcactgaagcaagagacgttacagacctgacaggagagcttgaatatgttctggccgatgcagacgtacccgaaacatgcttcgctcttcgcatcgatggcgacagcatgcaaccggaatttaaagaaggcgatatcgttatcatcgatccggatctatgccctaccccaggagaattcgtggttgccaagaacggcggccatgaagccacattcaaaaaataccgaccgctgggaataggcgttgatgacttcgaactggttccgcttaacccagactatcctgttttgcgcagtgctgacatgaagttacagatcattggtgtcatgattgagcatcgtatttaccgtcgtaaacgctaa

SEQ ID NO: 79265 - DNA, 213 bp, Citrobacter koseri
atgactctggctacccgattaaaagagcgtcgtaaagagctcaaaatgacacaggtcacgctggctgagctaacaggggttagccagcaggctatcaacaggatcgaaagcggtgttatttcccgccctcgctatcttcttgaattatccgttgcgcttgattgcgaccctaactggctactgcacggctcacaaaacgataaaaaggcgtaa

SEQ ID NO: 79266 - DNA, 2781 bp, Citrobacter koseri
atgaaacacatacgcgtagccgcttgcatgcttatgctggcgttggcggggtgcgataacaatgataacgcgccaacggcggtgaaaaacgatgagacgcccgccgtgcaatccgctccgacgaaagattcggcacaactgcaaaagctggcgcaacagagcgaaggtaaagaactgacgctgctggacgcctccgaagtccagttggacggcgcggcgacgctggtgctgacgttctccattccgttagatcctgaacaagattttgcccgcaccgtgcatgtggtcgataaaaaaagcggcaaggttgatggcgcctgggagctgtcgccgaatctgaaagagctgcgcttgcgccacctggaacccaaccgcgatctggtggtgtccgttgaacgtgatttaacggcgctgaataaagccgcttttggccgcgcgtatgaaaaaaccattaccactcgggacgttcagccgagcgtcggctttgccagccgtggctcgctgctgccgggaaaagtggtggaaggcttgccggtcatggcgctgaacgtgaacgacgtggatgtaaacttctttcgcgtgaagcctgagtcgctggcggcattcgtcagccagtgggaataccgcaatgctctttcgaactgggaatctgacaacctgctcaaaatggcggatctggtctataccgggcgttttgatctcaatcctgcgcgtaatacgcgtgaaaaacgcctgctgccgctgggtgacattaagcctctgcaacaggcgggcgtgtacattgcggtaatgaatcaggccggacattacaactacagtaatcctgccacgctctttaccctcagcgacattggcgtttccgcccaccgttatcacaatcgtcttgatatctttacgcagagtctggaaaacggcggggcgcagcagggggttgaggttgctctgcttgatgagaaaggtcagacgctggcgcaagccgccagcgatgcgcaggggcatgtacaactggaaaatagtcagcaggcggcgctgttgctggcgcgaaaagacggacaaaccacgctgctggatctgaaactgcccgcgctggatctggcggagttcgcgattgcgggcgcgccgggctacagcaagcagttctttatgttcggcccgcgcgatctgtatcgtcctggggaaacggtgatcctcaacggactgctgcgcgacagcgacggtaaaaccttgcccgatcagcccgtcaaactggaagtggtaaagccggacggccaggtgctgcgcaccgttgtcagccagcctgaaaacgggttataccgctttacgtatccgctggatagcggtgcgccaaccggcatgtggcacatccgcgcgaacacgggcgataaccagccccggatgtgggatttccatgtcgaagattttatgccggagcgaatggcgcttaatctcagcgcgcagaaaacgccgttagccccgtcggaagaggtgacgttctccgttgttggttactacctgtacggagcgcctgccaatggcaacacgttacaggggcaactcttcctgcgcccgcagcgtgaagcggtacaggcgctgccgggcttccagtttggcgatattgcggaagaaaacctttcccgcagcctggacgaagtccagcttacgctggatgaaaatggccgtggcgacgtctccgccaacagccagtggcaggaagcgcattcgccgttacaggtgatcctacaggcaagcctgctggaatcaggcggtcgtccggtcactcgccgtgcggaacaggctatctggcctgccgataccttgccgggtattcgtccgcaattcgcctctaaagcggtgtatgactatcgtactgacgccacggttaaccaacccatcgtggatgagggcggtaacgccgcctttgatattgtctacgccgatgcgcaaggcaataaaaaagcagcttcgggtttgcaggttcgtttgatccgtgaacggcgcgattactactggaactggtcggaaagcgaaggctggcagtcgcagtttgatcaaaaagatctggttgaaggggaacagacgctggatctcagcgccgatgaaacgggcaaggtgagcttcccggttgactggggatcgtatcgtctcgaagtgaaagccccgaatgatgcgatcagcagcgtgcgcttctgggcaggttacagctggcaggataacagcgacggcagcggcgcggcgcgcccggatcgcgtcaccctgaagctggataaacccacctatcgtcctggggacaccatcaaactgcatgtcgccgcgccggtggcgggtaaaggctacgcgatggtggaatcaagcgacggcccgctctggtggcaggaaatagatgtacctgccgagggcctcgacctgtcgattcccgttgataaagcctggaatcgacacgatctctacctgagcgcgctggtcgtgcgcccgggcgataagtcgcgttcagcgacgccgaaacgcgcggttgggctgctgcacctgccattgggggatgaaaatcgtcgtctggatctgacgctggaaagcccggctaaaatgcgtccaaaccagccgctgacggtgaacgtcaaagccagcgctaaacatggcgaaacgccaaaacagatcaacgtactgctctctgcggtggacagcggagtgttgaatatcaccgattacgttacgccagatccgtggcaggcattcttcgggcaaaaacgctatggcgcggatattatgatatctacggtcaggtga

SEQ ID NO: 79267 - DNA, 615 bp, Citrobacter koseri
gtgattaaaaagataatagaggaatatcttaagcaaatacacgcagataaatattcagtaattacgatcaatcatcttgatgaggtatcgattatctcaaatctgccatatcactgggcgcaggattttataaaaaggaaattgcatttacgaagccatatcgtattaaaggcgaaaaataaaataacacctttcaagtggtcctcggtaaatacagctaacgaagacattaaattcatgtctaataaatatggtattcgcaatggagtaagttttgtcataaaaataaattataattctgttatttttactatttattttaatgatgatgatgattttattaaagtgtacgccagtgaaaaacataagatattgtttgatgtactgagcatttttgaacatcattacaaacaaaaaataaaatatacttttacaatacgggaaaaggaggttatgaatttacttaaatttggtaaaacttacacagagattgcactgattcttggtgtaagtgaaagaactgtcagatttcacattaataatgtcctcaggaaactggatgtgacatctgtccgctatgcgatttttaaagctacatccgaaggtttgatctga

SEQ ID NO: 79268 - DNA, 276 bp, Citrobacter koseri; identical to SEQ ID NO: 13689

SEQ ID NO: 79269 - DNA, 597 bp, Citrobacter koseri
atggcatcagataatagatacagtattaacttcacgctatctgttttagaaaaaacagaagcaagcaaattaataaaagaacaagaaaaacaagagcatatagaaccttatggctatattttgcttataaaaaaagcagcgttgttagttctttcatttgcagcattatttgattttataatactttttggtttgattgctctcgccccaaaagaccctgattatgtagaaagagcaaaatttctttccattattacatttacactaatagctatatttatcgggttattatatatatatgattatttgatgaaaaaagtaatgaggactaactatttatcagaaataagagattctgaactaatgttacgtctcaaaataaatcgttcatacattgagcaaatcatgaaaattggtagttcgaaggttttctggaataacataaaaaaaacataccgtaagaaaggatttctatttatccagacaaaagaaaacagatgcataatcattccagaaagagtttttaaaaatggagaagaaaccgaaaaattatataattttgtaaaggagcaaatagcaaaaaacacaatagaatga

SEQ ID NO: 79270 - DNA, 357 bp, Citrobacter koseri
atgaaatatttggtcaaagagtttattaacgaaaaatatactaaggctgttaatattttaaaggataaccttaaagaacactatcatgttttttattgtgtgagattaagtgagattctttttcctgccagtgaatatggaactgaacagttttttagtgattttgaaaagataaactccatttcattacctgtcttagtgtttgatctcaaagagggtgttcctgtgattgtcattagtcttgatgatgtcagctactgtgatgttctggacgaaatggatattgattttatgaaatgtgattcgctggcagaattgcttaccagcgataagctggatgcgttatttaaggattga

SEQ ID NO: 79271 - DNA, 447 bp, Citrobacter koseri
atggctaaaatctatcaattccctcagggggaagaacgagctaaattcaggaaagaaatcgccagggagcgtaagaaacgttttgcagtgaaaacagggagcacttttgttaagtggcttggctggggatggttttatcttcgtcttcttgccgcgagtgttttacattttatctttgtttttgtgttagccattcttggtgcgtttaaatgggctgtgttctggctggggggtattttgtgtgtcatcacctggtatcatctcgatcaccagttatggacgccacaaaatctgactataccggtgattacggcaacctggattttgggactgctggctgagcctctgatggagctgctcaacaaaactatgccctggcacaagttacttgttcccgaacctgcggacgaaagcaccgagaacagtagcgagataagccagcaatga

SEQ ID NO: 79272 - DNA, 843 bp, Citrobacter koseri; identical to SEQ ID NO: 13691

SEQ ID NO: 79273 - DNA, 840 bp, Citrobacter koseri
atgaacttactgagcgttacaaagaaaacaaaaattcgccacagaaatgaaattaacagcacattctcatcgttgcctttgtctgccagaagaattttgtttatggctatggcgcagattgattcacgtgaagagttatctgagggggcaacctttcgtattacggctcgggaatatgcatttatcgctgatattgatgtaacaggtgcttaccggcagttgaaagagggggcagaagaacttcaggccagtgttattcgtattcctcgaaatcaacttctcacagctcagggcaatcaaagctctggacatacgaagaagagaggtaaattaccttctgacgcagtcaggcttatgaacctgactgcgttttgtgattatgttgaaagtgaaggatatattgatattgctttttcacatgtcattgagccatatatcacgatgttaaaggattcttacactactcaggttttgatatcgtctgtaagactcgctgatcaaaattcaaatatgctttatcagtttatcaggaaacaatacagcagtggtaaaaagacatttttcgacattgaagtagatgtattaaaggatgaacttgaattattcagaatagataatggcgaaaaagtttacctttatcagaattttaaggattttaataaggtttttctgcaaaaaaatattgaaaaaataaatcaatatacagagattaatcatctcgaagttaaaattgttgagagagtcgcaagaagagcatcaaagctaagattttcgtataaaatagataaagaaagcgaaggacttgataccagaataccgtatggtttcagaggtgcttaa

SEQ ID NO: 79274 - DNA, 252 bp, Citrobacter koseri; identical to SEQ ID NO: 4288

SEQ ID NO: 79275 - DNA, 282 bp, Citrobacter koseri
atgacctatgaactggcttttgaccgcagagcactgaaggaatggcagaaactcggccacaccatccgtgaacaattcaaaaagaagctggcagaacggctggaaaatccacgcgtacccgcagcccggttacatggtcatgctgatcgctataaaatcaaacttcgtgcatctggctacagacttgtatatcaagtcattgatgagaaagtcgttttactcgttattgccgttggaagaagggaaagcagcgaagtctatcagatcgcagatttgcgctaa

SEQ ID NO: 79276 - DNA, 324 bp, Citrobacter koseri; identical to SEQ ID NO: 4290

SEQ ID NO: 79277 - DNA, 246 bp, Citrobacter koseri; identical to SEQ ID NO: 4291

SEQ ID NO: 79278 - DNA, 216 bp, Citrobacter koseri; identical to SEQ ID NO: 4292

SEQ ID NO: 79279 - DNA, 330 bp, Citrobacter koseri; identical to SEQ ID NO: 4293

SEQ ID NO: 79280 - DNA, 273 bp, Citrobacter koseri; identical to SEQ ID NO: 4296

SEQ ID NO: 79281 - DNA, 210 bp, Citrobacter koseri
atgatgaatcgttgccgtaattcaattgataagatcggtcgtaatttccattatatcattgttaatgatcagaccagggttcttgataaagatggtttctatcaggatgcggagcgtcttacaacagaaatttttaatcttaagaatcagtttgagaattacattatgttatgtaaagggagaactgtttcaaataaagtggagatgtga

SEQ ID NO: 79282 - DNA, 1167 bp, Citrobacter koseri
atgggcgtttacgttgataaagaatatcgtgttaaacgaaagtcatcagaaaatggtcgtaagtcagctttcgctcataaagtcaaaaatggtggaaagaactatagccgcaatgttcaggaacgtatcaaccgcaagggtgccagtaaggaggttgttgtcaaaatatctggaggtgctgttactcgtcaggggattcggaacagtattgattatatgagccgtgagtcagagctaccagtgatgagtgaaagcggtcgggtatggacgggtgacgaaattctggaggctaaagatcacatgatagatcgtgctaatgatcctcaacatgtgatgaatgataaaggtaaagaaaataaaaaaatcacacagaatattgtcttctcgcctccagtttcagcgaaagtaaaacctgaagatttgctggagtctgtcaggaaaacgatgcagaaaaaatatcctaatcaccgttttgttcttggatatcattgtgacaagaaagaacatcctcacgttcatgttgtttttcgtatccgagataatgacggtaaacgcgctgacatcaggaaaaaagatttacgggaaattcgtacaggtttttgtgaagagttgaagttaaaaggttatgacgttaaagcgacccataagcaacagcatggacttaatcagtctgttaaagatgcacataatacagcaccaaaaagacagaaaggtgtttatgaggttgttgatgttggctacgaccattatcagaacgataaaacaaagtctaagcaacattttataaagctaaagactcttaacaagggggttgagaaaacatactggggggctgattttggggacttatgttcgcgggaaagcgttaaagcaggtgatcttgtcagactgaagaaacttggtcagaaagaagtaaaaatcccggcgctcgataaaaacggtgttcagcatggctggaaaacggttcacagaaatgagtggcagttagaaaatctgggggttaagggcgtagacagaacaccttcagccagcaaagagctggtactgaacagccctgatatgctgctgaagcaacaacagcgaatggcgcagtttacgcagcagaaagcatccacgttacagtcagaacagaagctgaaaacagggattaagttttggagtttataa

SEQ ID NO: 79283 - DNA, 519 bp, Citrobacter koseri
atgaaaggacagaaacagttttacctgcttcagtgttctccgcattttcatcagtcggttctgttgcagttatcccggagcggtatcgcttactacaatccagttatacgcactttctataagaggcgtgactgtagtgcatacaggggacaaatcatgccaatgtttcccggttatgtattcgttcttctggattttgaggttgtacatccatcctgctttacccggatgaaaaatgtttatggactggtcagttttggtgaatatcctgctgaagttcctctgagtgtcataaatgaagtaaaagagcaggagaagattttttcgatgaatttaagcctgatgaataactcctgtctggcaaaaatacttctccttgcagacgcttcaaagcgtggacaagtctttgccgactatgtgtgtaacagaaaatacgacaggttaaaaaatgacagctataaaaggaaagcggaaaccgcaacgcaatgtactctaccttcctacagaagttcgtgttga

SEQ ID NO: 79284 - DNA, 648 bp, Citrobacter koseri
atgttatctacttctacttttcttgcgcttgccatgcaatgcgctgccagcgttcatcccgacacaacgcacgaagtcgccagggttgaatcaggttttaacccatatgcaattgcggaaataataccaaaggttaaacgcaaacctggtgataaaggcgtagtatcttactttccagaatcaaaggaggcagcacttaagatcgttaaaaacattgaattacggaatcatcgttactctgtaggacttatgcaaataacaagtaccaattttgcaaagttcggcacaacagcagagaaaatgtttgatccatgcgaaaatcttaaggtatcagaaaaaatactggttgactgttataaacgaggtggcgacttagtgcgtgggctgagttgctattattccggcaatccagaaacaggagtaaagccagaacctgaatttaataatacaagttatgtacaacgtataggatttagccctcctgataataaaaaaatttttattgttccctctgtaaaggaaatgattaaaaaggagaataagacgactatcacacctgaagaaatcattatatatcctcaatacgccatgcgtggcactgtatcaaatgaaaaggaaacaaaagatgttgaaattaaatctgaataa

SEQ ID NO: 79285 - DNA, 2754 bp, Citrobacter koseri
atgagtactctttttaaaggtcttacgcgccctgctttaataagggggctgggcgttccgctctacccctttcttggaatgtgcattatttgtgttctgcttggtgtctggattcatgaggctatgtatgcccttattcttcctggctggtatgccatcaggcgtgtaacacagtttgatgaacgcttttttgaccttctgtatctgagaactcttgtcaaagggcattctttatcaaacaagcgattcagcgcagtccattatgcggggagccagtacgacgaagttgatatttcaaaagtggataactttatgaagctgaaagaccagtcttctgttgaagagttaattccgtactcttcacatatcactgacaacattatcgttacgaaaaaccgggatttgctggcaacctggcagatagacggtgcttactttgagtgtgttgattctgaagatttgtcaattctgacagatcagctcaatacgcttatacgtagctttgaagggaaatctgttacgctttatcctcatcgtatcaggtgtaaaaaggacgtcagaccagtatttaacagtaaaattccttttgtgaacagagtaatgaatgattattacgagtcattccctcagtctgaatttttcgagaataaattatttctgacgatttgttttaaaccttttactacggaagataaagtaacgcatttcttttcacgaggtaaaaaacaaaaagatatctttaaagagcctgtaaatgaaatgaatgaaatttgcgacaggttgaatacctatctgtcccgttttcattcccgacgtcttgggctttatgaagatcatggggttgtttattcagatcagttatctctgttccagtatctgctttctggtcgatggcaaaaggtcagggttagcagtagtccgttttatacatatctgggaggaaaagatctgttctttggtaatgatgccggacaaattaccgcgtcagaccatgcccggtattttcgttgtatagagattaaggattattttcaggagacggatgccggtattctggatgctctgatgtatctccccgttgagtatgtcgtgacatcgtcctttactgcgatggataagcagtcagcgattaaggcgctggatgatcagatcgataagctggaaatgacggatgatgctgccaaatctttgctggcagatctgaaagtcggactggatatggtttccagtggatatatttctttcgggaaatcgcatcagaccctggttgtctttgcggattcaccggagcgtctggtgaaagacaccaatatcgtgacttccactctggaagatttggggctgattgtcacttattcaacactgagtcttggcgcagcttattttgctcagctaccaggaaattatacgcttcgccctcgtctgagtaccctcagtagtcttaattttgctgaaatggaaagttttcataatttcttttcaggaaaagaaaaaggaaatacctggggggaaaaactgattactcttcgggggtcaggtaatgatatctaccatctgaattaccatatgacgactgaacatcagaatttcttcggtaagaacccgacgctggggcataccgaaattctcggtacgtctaacgtgggtaaaaccgtattactgatgacaaaagcatttgccgcccagcagttcggtacgccggaatcattccctgcaaacagaaaactgaaaaaactgaccacggtttttttcgataaagaccgggcaggtgaagtcggtatacgggcaatggggggatcttattaccgggtgaaggagggagagccgacaggctggaatcccgccgcactgccgccaacaaaacgtaatatcgcttttatgaaggacctggtgaggctgctttgtactctcaacagtgagccgctcgatgattaccagaacagcctgatttcagatgcggttgaacgtcttatgcaacggtcagatcgctcttatcctatcagtaaactacggcctcttatccaggagccggatgatactgaaaccaaacgtcatggacttaaagcccgtcttaagccgtggacgcagggggaagagtttggctgggtgttcgacaatcgggaagacacgtttgatgtcgataacctggatgttttcggtattgatggaacggagttcctggataataaggtgctggccagtgctgcttcattctatctcatctatcgggtcactatgctggctgatggtcgcaggcttcttatctacatggatgagttctggcaatggatcaataacgaagcgttcagggactttgtttacaacaagctgaaaaccggacgtaaactcgatatggtgcttgtcgtagccacacagtcaccggatgaactgattaaatcacccattgcggcagcggttcgtgagcaatgcgccactcatatctatctggcaaacccgaaagccaaacgtagtgaatatgttgatggtttgcaggtcagggagctttattttgacaaaattaaagctatcgatccgctgtcccgccagttccttgttgttaagaacccacagaggaaaggtgaaagtgatgattttgctgcttttgccagactggagctgggaaaagcagcgtattacttaccggttctcagtgcatcaaaaccccagttagaactgttcgatgatatctggaaagaaggaatgaagccggaagagtggcttgatacctatctggaacaggcgaacctgatttga

SEQ ID NO: 79286 - DNA, 759 bp, Citrobacter koseri
atgaaaaagcaaattatggcggcattcgtcgcttcactgattgttatttccggcgctcaggcagggatacctgttgccatcgacgccaaccctgaatgggcgattgaagccggacgatggacagaacgccttaagcaatgggcggaaacggtaaaacattacgaaaatcagataaatgcgtacaaacaggagctgctgtcaaaaacgggtatccgtgatgtgcagggactggtgcagtccgcacagtcagtgagtcaggaactgatgcagatttatgatcaggggaatgcttttattgacgattacattaaaaatcctgaaggggcgttatcggaacaggccaaatcgttattgtcagattacaaagtaacggatacctgccagaacctgggatattccggcgacctggtacggggatgtgaagcgacgttcctttctcaactggcaagcgtggaatacggtaacaagctggagagcaagcttcgtcaggacaaccagacgatgaaagaccttattgatcaagtcaaaaatgcgaaggatacgaaggccacgcaggatgcaacaaacgctgttgcacttgaacaactgaagttcgagaagctcaaatttcagtatcaaatgtatcgcgataagcagcgagatcttgcagaatataaagagaagatggctcaggcagctttcagaaaacagcaacgtgaagccgtgccaccttcttacagaaaagcttatatggcaatgaaatcatatgaggatgattaa

SEQ ID NO: 79287 - DNA, 1134 bp, Citrobacter koseri
atggggattgtcactggtataccggatggtactgatttatcaggtaatgtaacctctcccgcaaatgcgggaggtgtttctggatttgattctgatttttttcagacaactcatgaagttatatttaatattctcaacaagagtatatctggaaaattaagtgaatattcagatgtggcttatactcttggtaaatatggagtttctctgtatgttttatggtatgcttttactgtattagcaaggaaacaacagacacctgtacctgatttcatctggaatatctgtaggttttacataatattgctttttgttaagaatacagggggaatactttcatcagcaacagatgctattgatggattgaaaaatacattggcagggggagatccgtgggtatggatggatcagttatgggtgaaggttatacaagttgcaactcttatttttgataaagatacatctactgtgcctgttgccggtgggattggtgctttattaacttatgtcggtggtgttttggcattattgctttgttctatagtatttgcatctgctgaattaacattactattactttctgtcactgcgccaatatttatcatgtgtctgatgtttggtttacttcggcaaatgtttaatagctggctacagcttaattttagctcgttactggtttttctatttgcagcattagcactaagagctgggacatggcaattaaacatggcattaagtacgtctattgctacagcatcagaaaacaatcttcttcaaacgggagtaacttcattagctgctggcattttcatggcctggattatctggcaggcgaaaagttatgcttcacagattgcaggtgtgggtgttgaaggtgccatgcagggcgcagccgctatggggattggtgctggcgttttcggtgcatcccgtatggcgcgtggcgcacttggtatgggcagaaatgccggtattggtgcatggaaaggtctgcgtcgtcaggaaggcgggtttggtcagtctccgggaataacgggtaagaccgctaacctggccggacagggcgttaatattggtgccaaaaagcttcgtcaggcagctattgagagggcaaagaaaatgtatggagggtga

SEQ ID NO: 79288 - DNA, 714 bp, Citrobacter koseri
atggaatttaaacttcccggatttaaaaataaaaaagacgttactgactcatcagtttcgtttgaagaaaaaaatattgcactacaggagagaatgaatcgtatttataaattcggtggtatcggaggcatgttaattggtgggctgtctttacttgcattaaatgcagcattaccactgaaaacaacagttgttgatgcctaccttatcgataaggttacaggtgtggctgaacgtctgacttctgttaaaaaagaaaatctttctgaaaacgaagccattgcccgatattttatcacccagtatataaaacatcgtgaaggttataattttttcagtctccagcatgattatgattatgtaatgacttacagcgcggagaatgtcgcggcagattataacgcattatttaacagtgaacaggcaccaaaacttgtttataacaaagcagaaaaaacggcaatggttcaggataatccatctgtcataatttcaccttcgtcacggacggatgataaagatatcggtgcgtatattcgttttcgtctgaccatcagggatgttgctaccggacaaacccgccaggagttctggaatgttcgcctgacttatcgtatcgaaccgcaggttgaaatggtgtcaggggaacgtaataacaatcctcttaagttcgttgtaacaagctacgttcgcgataaagaagccagaggttaa

SEQ ID NO: 79289 - DNA, 930 bp, Citrobacter koseri; identical to SEQ ID NO: 4307

SEQ ID NO: 79290 - DNA, 1206 bp, Citrobacter koseri
gtgactgaacaggaaaataaaatcccgactgcaaccgaaattgaacagcagctacgggaacgcagacagaaagaactggaacaggccgggaagactccggaagaagagcctggcaagccagcattgcagcttggtattgaaaaacttaaaaagtcacgtaaagggatgattatcctcgtcgtgggttttcttctgcttgctgccggtgtttctgtttattatatcccgtccattatccgttctgtgtcgtcaggggatgagaaacccgcaagtcagccgcttgcaaccggagcggctaaacgtcagaccggactgagcgaagatatcgatccttttaataccgcacagaaaaaaacagagaaaccagaggaagaaaaagtcatttcttctgaaaagactgaaccgccggaaaataaacagcagagcttcagccgtgcacttgatgtttctcttgatggcagccaggcaggaaacagcagcagttcagcgggaacgtcagtttcacatactgcggccagtgagccagaaagcgataaaaaggatgaagcaaaagcaaccgcacaggctacagaatctgcgccactggcgaaaataacgaaacttccatatgacccaaatttgtttatcccggaagggacatcaattccctgttcactggacaggcgttttgtttctgacctggcggggaaactggaatgtacggtcaacagcgatatatacagcgccagcggtaatgtaaaacttatcgaaagaggaaccgccgcaaaactgatgtataaggccgggtctttaaatcatggacaagggcgtgtgtttgttatggcttacaagctacgtacccgcagtaagccttttattgatattcccctggttgactcacaggcggctggcgcgttaggcgaagccggtgcttctggctggattgacactcatttcagtgaacgttttcttggtgcaatgatggtcgggatgataccggatttaagtcaggccgccagtggtattgcacagaacaacagggacagccagacggactatacagctaacagccgccaggcttttgctgatatagcacgcgaagcattttctaatagtgtgaatatcccgccaacgctttataaaaatcagggagaaattattactctgattgtcggtcaggatctggatttttcaggtatttataaactgaaaatgaaagggggttaa

SEQ ID NO: 79291 - DNA, 1032 bp, Citrobacter koseri
gtgaataacgaaaacagacatctgatttatgatgtggttaacgactatttttatcactggctgaatgagattgatggtgtcacggaaatcgctgttaaccgaccaggagaaatatttataaaggtcaggggaaagtggcaatggtatgaacaaaagatgagttacagtgattgtctttcttttgcatccacactggctgattttcatgacggcggttcagtgactcctgaatatcccctgcgttctgctacgcttccgggtggagagcgtgttcaggttgtgatcccaccggcaactgaaaaagatactgtttctataacaatccgtaagccgtcaggtatttttatcagtcatgacaaatttataaaacagggcttttattcacgcgtcggtggtttaagtggtgactccgttatggaagataatatttctgctttaatcacttccggatattttgaacgggttatacctgaatcactgagtcaggggaaaacgatagttttctgtggagggacggggtcaggtaaaaccacctttgcaaatgcctgtctggaatatataccgcatcatctgcggtgtatttctattgaagatactgatgaggcaaaattcagattccataaaaaccatgtaaaactttactatccggcagagggtgagagtaaggttattacctcagcgagtcttctgcgttcctgttttcgtatgaatccggacaggattctgatgacagaaatcaggggagctgaggcatgggattttctgaaagcatcgagttcaggccatgcaggaaacattaccaccgttcacgaaagtagtcctgaatatgccgtgcttgggattgtccagcgatgttatatgaatcctgaatgtcagaatctaccattcaatgtcattttaagacgtgtactgagtaatattgatattatcatgagtattaaataccttgatgatgaagattttcggttcgcttccggtatttactacaaacaacttcattttgatgactatttcagaaaactgaaggagtga

SEQ ID NO: 79292 - DNA, 414 bp, Citrobacter koseri
atgaaaaaaatacttatgatcagtattcttgtcctcacagcctgttcctctccacctgaaccgccacaggttgaatgggaaaaaacgcctgaagttatgaatacacaaataatgaactggaaaccaacatccggtgttattaaatcagataatataaattcctcatggagtaaggtgttgcctgattttaaaccagaaaaccgtctttacgatgattctgttttttatgccgttgcccattctgaaaaaatagttgtaaggacatcttcttttgataattactggtcagcgaaagactggctaagaaaaaatggtgcaacaggtgttattgaatatcagccactaaaaagatggttgaataatgactatgttgaaatttatctgtcaagaataaatattcagaggttactatga

SEQ ID NO: 79293 - DNA, 303 bp, Citrobacter koseri
atgaaaaggatatgcaaaggtctaatcgtaatttttactgtgtccttgtttacagcgccaacgtatgcggctgatccctgtaaatccgttttttgtctttatggtaaagctgtcggtagtagcggagggagtgagtgcagtagtgcagaaaaggatttttttaaaaatgttgaaaagaaaaaggggaaaatccgctggggtaaaacatttgatctccgtaagaattttttaaatcagtgttcaactgcagacccggctgcaatctcactgatcatgagtaagtttggtcgcgtcagaggctga

SEQ ID NO: 79294 - DNA, 3006 bp, Citrobacter koseri; identical to SEQ ID NO: 10984

SEQ ID NO: 79295 - DNA, 558 bp, Citrobacter koseri; identical to SEQ ID NO: 7707

SEQ ID NO: 79296 - DNA, 861 bp, Citrobacter koseri; identical to SEQ ID NO: 5314

SEQ ID NO: 79297 - DNA, 1257 bp, Citrobacter koseri
gtgagttttcgttccactgagcgtcagacccctaatatttcggattgtgttgatggtgtaaaaggcatagccaatagtgcgctgtcaaactcacagaatgctcaaaatgttgcaaatggtgctgcttctacagcccaaaatgcgcagtctgtcgcgaatactgctgcgtctactgcgcaaaacgcgcaaacagccgcgaataaagctcaggcaacagcaaatgaggctaattcagcggcccaaaatgcacagaacacagcgaatacggcgcaaaatacagcgaactctgctaatacggttgctcaaaatgctcaatcgacagctaaccaggcaatccaggatgcggcagaaaaagccgaagcggcagaaaagaacgcaaacaactatacagacaataaaattacagatgctaaaaatgaactgaatacgaatattgatagtgcgaagaatgacgcgatcaattcgtcgaacagctacaccgacagcaaaatcagtgatgcgaagacggaactgaacgccaatattgataaggcgaagaatgacgcgatcagttcatccaacagttacactgacaataaaatcagtgatacgaaaacggagctgaacgccagtatcgacaaggcaaagaacgacgcgatcagctcatcaaatagctacactgacaataaaatcagtgacacgaagacggagctgaatgccagtattgacaaggcgaagaacgacgcgatcagttcatcaaatagctacactgacaataaaatcagtgacacgaaaacagagctgaataccaatatcaacaatgcaaaaaatgaggcaatcagcacatcaaacaactatacggataagaaatatcaacaaggtatcagttataccaatgaaaaatatgagcaaagcatacagtatgctcaaaatgcagccgataaagctgaacaaaatgcgaataactatacagataaccgattcagtcagttaagcaatcagtcaaatcagcggttcgaacaattaaacagtaaaattgaacgtgcggaaaaacgccttaatgccggtattgcaggtgtaacagcaatatcatcaatcccgtatgttgctgaaaatagtttctcatatggtattggtgttggtaattatcagaatggaaatgcgattgcagcaggcattcaatataaaacgtcattaaacacaaacgtgcgccttaatgtttcatgggattcatctcataacactgtacttggcgcaggttttgcgggtggctggtaa

SEQ ID NO: 79298 - DNA, 228 bp, Citrobacter koseri
atgaaaccattagtttatgcaatgattctgtcactgacgaccttttctgcttttgcaaaacagaactcggctaacagtcagaaaactggtgcaagtaatattgaaagacaaagctatgagaataccgatgcggggaaaaaacaagctgaatggatgaaaggtaaattggttaaatctgattgttctcctgccatgaatcgtattggctggtcagaaggttgtaagtaa

SEQ ID NO: 79299 - DNA, 510 bp, Citrobacter koseri
atgaaaattatattaataacatttatttttctgtttactgtttttcagtctgcaaatgcaggtggaatacctggtgttttcacattaaacctggaaatccaggggaaagttattcgtgttctcgatggcgataccatcgaagttttacaggacaaacaggacaaaaagcctgtcaggattcgcctggcaaacatcgatgcaccggagaaaaaacaggctttcgggcgctggtcagcaaatcagcttaaagctctgcttgcagcacagcctgttactgtgacgtatacgcagagagaccgctacggacgcattatcggtcgtgtgttcacgacgaacggcacagatgccagccgctttatggttaagtctggtgctgcatgggtatatgaacgttacaacgcggatgagttattaccggctctgcaacgggaagcgcaggaacaaaaacgaggtttatgggctgacagtaatccggttccaccgtgggaatggcgacataaacagaactga

SEQ ID NO: 79300 - DNA, 576 bp, Citrobacter koseri; identical to SEQ ID NO: 31276

SEQ ID NO: 79301 - DNA, 2154 bp, Citrobacter koseri
atgagactttttatcgcagaaaaacccgcagtagcaaatgatattgttaaggcacttggtggcaattttacccgccatgatggctggtttgaaagtgataacgccattgtgactaactgttttggtcatattatcgaatcacaaccgccggaaaactataatcctgaatacaaagcctggaaggttgaaacgcttcctttacgtctttatcccgtgaagtatcagcctgttgaaagtgcagcaaaacaggttaaaacgattctcgagcttatcagacgtggagacgtgactgaaattgttcacgctggcgatcctgatgatgagggacagctacttgttgatgaagtcctggaatatgcaggaaacgcaaaacccgtaaagcgcgttctgataaacgacaacacgcttccggcagtgaaaaaggcactggcaaatcttaaagataatcgtgatttcaaagggctttaccttaaggcgctggcgcgttcagttgccgatgccgtctatggattctccatgacgcgtgcttacaccattcctgcaaaagccagaggatatcagggcgttctgtctgtcgggcgcgtccagacgcccgttcttggcctgattgtgaatcgtacccgtgctaaccagaaccataaatccagtttttactacaccatgaccggagtctttcagcgaggtgctgatgttatcagggcgaactggaagccaggggaatttgctccgctgacagaccgtaaattacttgataaagcgtgggcagacggaacggcagcatcccttgcaggaaaaccggctacagttgaagcggcagcaactgatgataaaaaaacggctgcgccgttgccgtttaacctggtcaggctccagcaatacatgaacaaaaagttcaaaatgacggcacaaaaaacgctggatattacgcaacaattacgtgaaaaatataaagcgattacttataaccgctctgattgctcatatctttctgatgaacaattcagcgaagcgccgcaggttatcgatgccctgaaatcagtctttcctcagtcgctggatattgattctgcacgtaaaagcaaagcgtttaacagtgaaaaggtgactgcgcatactgctataatcccgaccgtcagtgtgcctgatgttaacgcactcagcaccgacgagcgcaatgtttacctggcgatcgcacaacactatcttgttcagttcatgcctgaaaaagcataccaggaagtatcggttgccattcagtgtggtgatgagtcgttctatgcccgtgccagaaaaacaacagacagcggatttgaggcgtttcttggcgcggaaaccacagacgtaggtgaatcagaagataatgatgattccgcttttgaactgctctgtaaaattcgcactggagaaacactgacgacaaaagaagttgttgttaatgagaagaaaacaacaccgccgccgttattcaccgaagcttccttgcttgctgcgcttgttcgtgtcgcggattttgtcactgatccaacgattaaaaaattgttgaaggataaggataaagacaaaaaagatgaacatggcggtattggtacgccagcgacacgcgctgccattctggaaacgctgaagaagagaaactatatcacgctcgaaaaagggaaacttattccgactgataccggatgtgcgcttattgatgccctgccaggtatagcggttaatcctgatatgacagcattatggtctgaaaaacagtctgccattgaaaatggcgacctgacggttgaacagtttattaatgagttgtacggtgaactgacaggcatgatttctgatgttgagctgggcgagatgaagattgaacccgctgcgccagcagggcagtttcaacgcctggactctccctgcccttcctgtggtaagcatattgttatcaggccaaaaggttatttctgtaccggatgtgaatttaaaatctggagtgagttttctggtaagaaaatcatccaggcacaggccgaaaaactggttaaatcagggaaaaccgatttgattaagggatttaaaaagaaaagtggtggaacgtatgatacagttcttgtccttgaggataagaaaacagggaagctgggttttccggcaagggctaagaagtga

SEQ ID NO: 79302 - DNA, 462 bp, Citrobacter koseri
atgagcgaactgactaaagaagatgaatacggcattatcagccggactatgatgaatattcgttcattgcgtgtgtttgcccgtgagattgattttgagcagttgctcgaaatgcaggaaaagctcaacgttgttattgaagaacgtcgtgaagatgctgaacgtgaagcggctgaacgagcagagcgtgaacggaaacgtcaggaactgcttcagttaatcgccggagagggtttctcaccggaagaactgcttggtctgtccgaagaagcaccaaaatcacgtaaaaaaacgttaccaaaagcgccacccaagtatcaatttgaagaaaatggtgaaacgaaatactggtctggtcgtggacgtgcgccaaaaccgattgatgaagcgttgaaagccgggcgttctctggaagattttcgtatcaataagagtttgaacggagtaacagatgagcagtaa

SEQ ID NO: 79303 - DNA, 264 bp, Citrobacter koseri; identical to SEQ ID NO: 13666

SEQ ID NO: 79304 - DNA, 1326 bp, Citrobacter koseri; identical to SEQ ID NO: 13665

SEQ ID NO: 79305 - DNA, 945 bp, Citrobacter koseri; identical to SEQ ID NO: 13664

SEQ ID NO: 79306 - DNA, 180 bp, Citrobacter koseri
atggattttatgagcattttggggcgctgtttacttcttcctttccctgttgcgatgtttgtcggttgcctgtttccaggcatcgatgatcgttttactggaatgttcatgagttttattgtcggttgtctatcgtggtatatcaccaagccaaaaccgcaaaaggctgaggtcgcgtaa

SEQ ID NO: 79307 - DNA, 645 bp, Citrobacter koseri; identical to SEQ ID NO: 13663

SEQ ID NO: 79308 - DNA, 816 bp, Citrobacter koseri; identical to SEQ ID NO: 6090

SEQ ID NO: 79309 - DNA, 303 bp, Citrobacter koseri; identical to SEQ ID NO: 13714

SEQ ID NO: 79310 - DNA, 1494 bp, Citrobacter koseri; identical to SEQ ID NO: 13713

SEQ ID NO: 79311 - DNA, 225 bp, Citrobacter koseri; identical to SEQ ID NO: 13704

SEQ ID NO: 79312 - DNA, 738 bp, Citrobacter koseri; identical to SEQ ID NO: 13703

SEQ ID NO: 79313 - DNA, 333 bp, Citrobacter koseri; identical to SEQ ID NO: 13702

SEQ ID NO: 79314 - DNA, 768 bp, Citrobacter koseri; identical to SEQ ID NO: 13701

SEQ ID NO: 79315 - DNA, 507 bp, Citrobacter koseri; identical to SEQ ID NO: 13700

SEQ ID NO: 79316 - DNA, 1068 bp, Citrobacter koseri; identical to SEQ ID NO: 13699

SEQ ID NO: 79317 - DNA, 204 bp, Citrobacter koseri; identical to SEQ ID NO: 13698

SEQ ID NO: 79318 - DNA, 1026 bp, Citrobacter koseri; identical to SEQ ID NO: 13729

SEQ ID NO: 79319 - DNA, 138 bp, Citrobacter koseri; identical to SEQ ID NO: 50167

SEQ ID NO: 79320 - DNA, 570 bp, Citrobacter koseri; identical to SEQ ID NO: 13730

SEQ ID NO: 79321 - DNA, 165 bp, Citrobacter koseri
atgaccggtgatatggggctgaacggcgaagatatcggcaaaatcgtgatccatccgatgcatgcttatgtcgcggtgcgccagggtatcgcgcagcaggcgcgtaaactgcttcagcagggtaaaatcaaaggaaaacctgtcagagtacgattgctgaaataa

SEQ ID NO: 79322 - DNA, 1119 bp, Citrobacter koseri
atgtcgccaaggccacgaaaaaataatgtatcaatctccgggttatatgcccggttcgatcgccgcaccgcaaaaacctattatcagtacaaaaatcctttaacagggaagtttcacggtctgggaacagacagggaaaaagcagaaaaaatagccacaacagcaaaccaaagaattgcagtggctgaggcagagcattatttacgccagatagatgaaacccctaaagcagtagtacagcgaggaattagtcttaaagcatggattgaacgatatctgaaaatacagagacaaagcctggatgcaggttccctttccgaaaaacgatacaaagaaaaaaaacgcatggccgaattactttccaggcgactgggttctcgtccgatgaagagtctggaggtgaaagattttgccgttctgttggatgagtttttggatgctggccatgccagtagcgcgctttgtaatcgcgttgtatgggtggatatttttcttgaggctcagcatgccggtgaagtacctccgggctggaatcctcctaacgcaactaaaaaaccatctgttaaggtgaaacgtgcgcgcctgtcacttgatgagtggaaaaaaattctggataagatcccggcagatcattatgcgcataacgcgatgcttcttgcactcgttacgggtcagcgccgggaagatatcgctaatatgaaattctccgacatcaggaacggatacttacacattgagcaaatcaagacaggttcccgtatagctttacctctgaatttacgttgtgatgccatcggcatgacacttgaggatgtgatccgaaaatgccgggatcgttttgtcagtccctacctgctgcacgggaaaagaaaaaccgctgtaaaacacgtttcgcttacattgcttacgaaagaatttgcaacggcgcgtgatgctgctggcgtcattccgcctgaaggcaaaaccccgacgacatttcatgagcaacgatcattatcagagcgcctttatcgtgcccaaggcatcgatacaaaaattctgttgggccataaaacgcaatcaacaactgacagatataacgacgatcgcgggaaggagtggaccaaactggctatttga

SEQ ID NO: 79323 - DNA, 2217 bp, Citrobacter koseri
atgaacacatatgcgtatctcattaaagcaaaagccaaagcggcagacgctaaaaacctcttttgctggttctctgcaaaatccgactcgcgcgctgaacgcgaaatcctcaatattctggaagactccgggattgaagtcggtcgtggtgctgaccatcagttgccgattcgtactaactggtttgttgttgacgatctgccggaagaaggaaagctggatgacacctggtgcgaccgttacgaactcggcgaggatggggctagctggaaaaaaattgtatccgacaatacgggcgacgcagacgaaaccacagcatcggacgctccgcaagatgataagcccaatgcagaaccatcgcagggcgaagaatccagcggacaggtaaacgatgcagcatccgaagaaagcgacaatcgcactgaaaccccggaattaaccgttgttgcgacaatgcccttccgtcaccgcgttctcgctcaatttattggcgatggtgagtatctctatcacgtcgatgccggacagaaaaaagacattttgcgccttgagatggacactgataattcgtatgtccagaatcttctgctggcggctgaaaacgttgaaccattaaaaaaagcgcttgaatccgacattcataaagtagtgaatgccgttaaaaaggtattttctcttgatggcaaaacgccagaactggcaaccgttatccagttttttaatgcctggtttaatacggaacatattgatcgcggactcctcacgaaggaatgggttaacggcaatcgcgtctcctgcatccagagaacatccagcggagctagcgctggtggcggaaacagaactgatcgtagccctgagtacatccataccttcgaaacgatggattacgaaattgcggcggccacgctgcctatggattttgatatttacaatattccgctatccattcatcgccgttctaaagagatcatcactaaaaaagagagcccgtggaaagagtggtctgccgcacttcgcgcgactcccggcattctggatttttcccgcgccgcaatttttgcgttaattcgtgacgcgggtgcgcacatccataattttccagatcgcatgcgtggttatatcaatgccaatctgacggaaaaaaaccacgaaaaaccaacagaggaaactctggccgccgcgcgacagattaactcagtcgcagtaaccctggatgcagttaaggatgcgattaacggccagaaagaaacgccagtccctgatggcgtgggcgaagaatatgcctttgttggtaaacaactcatcactgaagccctgtctcgtactgagcaaccgagcatcgaaaacctcggcaatggtgtctattccatcgacagcctggttaacaccccaccagcacagccattatctgttgttgactatgtccgccagctctctgctgaagaaaaactgaatgcggataacatagaggagaccgccagcgatgtgcagatggaagaaactggtaacgatgaagccaaagctggtactgaaatgtcgcagagcgaagcagcaactcagtcagatgaaggcagtgatacagatggttcgcaaacagatcccctgaataatggacccgttcaccaaattgcagttcaaaaaccagacaaactttattcccacttaatggtggatctggaaacgatgggcaataaacccgatgcgccagtcgtttccgttggcgccgtattttttgacccggcaaccggcgataccggcgcggaattctacaaagtcgtcagtctggaatctgctatggcatggggtggcgtaccggatgcatcaacgatcgtctggtggatgaagcagtcagctgaagcgcgctctgcgatcgttatggatgatgcaattcagcttgatgacgccctcttccagcttaatgacttcatcgcagaaaatgctgcaaacggtccatcgttaatgcaggtctggggcaatggtgcctcattcgacaatgtcattctccgccagtcttatgaccgaaccggcatcgactgtccctggatgttctggaatgaccgggacgttcggacaatggtcgagctaggtaaagccgtgggtattaatccgcgctatgacattaagtttgaaggtgacatgcacaacgcattatccgatgcccgacaccaggtcaaatacgtatccgccatctggcagcgactgactgcaaactga

SEQ ID NO: 79324 - DNA, 339 bp, Citrobacter koseri
atggaatttggaatgaagcgtgttgtggcatctgttcaggccgtggcgatccttaaaaggatttacaacggaaaaccagtaaccatcgcatctatcagtaaagaatccaggctgtctgtctcatacctggagcagattttttcaaggcttcgcggcagcgacattgttaccagccagcgtggccccggcggtggataccatctgaaaaagatgaatcccagcgttgctgatgtcgttcgcgccgtgacgcgcacaccggattcgttcgaacccgtgctgaatgccctggagtgggttcccgtcgcgcagctgtcgcagggaaaatccccggccccataa

SEQ ID NO: 79325 - DNA, 294 bp, Citrobacter koseri
atgtcagcgaacgaactggcattgagattcagcacagcaccggcagaggaactgattggtgttttgcctgtccgcgaagtcaaagaagccctgcgtgatgaagtggaagatgacgttctgggcgaagtctggacagaacataactttgaaatggaagcggttgaggttgtcgccgatgcctttggaactgcgataaagctggccctgacattaccgcatgatgaggcaattaaagttctcaccgatgctattaacactcaccagggctatggccaagaaccggagaagagctaa

SEQ ID NO: 79326 - DNA, 270 bp, Citrobacter koseri
atgtctgaggaaactttgaaactggccgttagcttctcaaatgccagcatggttatcgaacgatcaataaacattttccatagtgttaatgaaatccgttcgtcgctggatgatatgcgtgaagcaatgaaaccctgtggcatcgttatggatgaccaattagacagttacgacactgctctgcgcaatctggagaagctactacaaaatattgaaggtgatgcccgccaagaatctattgctcttcgttacaagctgaaatcgcaataa

SEQ ID NO: 79327 - DNA, 213 bp, Citrobacter koseri
atgaataacatcgccaaagaacggcaggcgcttgggttaactcaagagcaattagccaaattgtttgggtggcgccagtcaaggatctcaaattatgagaatggaacccgccagccaggactacctgaatgccgactgattgttgagaaactcaatgaattaggacgcacttgcactcttgatagcgttttcccgccagaaagcgaggtttaa

SEQ ID NO: 79328 - DNA, 555 bp, Citrobacter koseri
atgcactcagcagcttactcacatcataaccagcgggtagccattccgctgaaatctgaaaatcaatataaaccgcagcggcgtgacactatccggcaccgcgcgatccgtgaagcagtcagggaatgggaatcgacattacccgggcaggctcaggaaaagattgcgcaactggtggctgaacactggagcaagcagggcggtcgcgggatcactgtgaacaagcagaacctgttccgctatctcaagaatgaaaataactccggcaaatacacggcttacgttatgcagctggcgtccgcgattgcttctgccatgccgattgaaattgccagaacgcacggcttacggcaggggaaaacggaaactgagctggtggcctgtgcagtaaaagaatgcagcgaggcacaccaggccaaactgctcggcgcgccgttgcacaagcttgaaaaagagattcgcgaagcggcgatcgcgttattcaacatgctgccagcagatgcggcgggaccactactggctagtatcagcgccgtagcgccgcaaattttttaa
